United States Patent Application Publication US 2013/0332133 A1 - sequence listing, part 19

SEQ ID NO: 189269 - protein, 637 aa, Unknown
  Bacterial polypetide isolated from the Sargasso Sea
MPNITLPDGSVRSFDNSITGFQLASDIGPGLAKAALIMLVDGIELDLDHQIINDSKVAFITRSDESALPLIRHDCAHVMAAAVQELFPETQVTIGPSIENGFYYDFYRQTPFSQDDLGKIEKRMHELVDRDDKIQREVWDRGHAIDHYKSIDEPFKVELVEAIPDGEVLSFYRQGDFLDLCRGPHAPSTRHVGHAFKLMSVAGAYWRGDSSRPMLQRIYGTAWPDEKKLKSYLLMLEEAEKRDHRRLGRELDLFHMQEEAVGSIFWHEKGWTLYREIEAHVRRRLDAGSYKEVKTPQLIDRALWEASGHWDKFRENMFTAESEDDRTLALKPMNCPGHVQIYKQGIKSYRDLPLRMSEFGSCHRNEPSGALHGIMRVRAFTQDDAHIFCTEDQITTESIIFCDLLRQIYKDFGFEDIHVKFSDRPEVRAGDDSTWDRAETALRDACSAAGLDTTLNPGEGAFYGPKLEFVLRDAIGRDWQCGTLQVDFVLPERLDANYIAQDGSKRRPVMLHRAILGSMERWIGILIEEYSGKFPMWLSPVQGVVATITSDADEYANKVFEGLKKAGLRVGKDVRNEKINYKVREHSRAKIPVIIVVGEREENQGTVAIRRLGGKTQEILALDDAINKLVDESRPPK

SEQ ID NO: 189270 - protein, 395 aa, Unknown
  Bacterial polypetide isolated from the Sargasso Sea
KAELIEQIPENEDVSIYFHGDWHDLCRGPHLSSTGKIGKYFKLMKVSGAYWRGDSNNEMLQRIYGTSWASQKDLDEHLKRIEEAEKRDHRKLGKEMDLFHFREESPGSVFWHERGWALFQKLINYMRSRQDAAGYKEVNTPEILDRQLWEKSGHWEKYGENMYTSETPDEKVFAIKPMNCPGHIQVFNQGLKSYRDLPLRITEFGKVHRYEPSGALHGLLRVRAFTQDDAHIFCTEEQITSECLIVTNLILDIYKDLGFENVILKYADRPEVRVGDDEVWDKAEASLLEAVKASKLEYSINKGEGAFYGPKIEFVLRDAIGRDWQCGTLQVDLNLPGRLDASYVDKDGTKKVPVMLHRALFGSLERFIGILIENYAGKFPFWISPLQTMVISNFR

SEQ ID NO: 189271 - protein, 395 aa, Unknown
  Bacterial polypetide isolated from the Sargasso Sea
NDFKKIEKKMVEIINKNENFVREEWSKEEAIKNFSEKGEKFKVELINDLPKDEIITIYKQGEWLDLCRGPHMPSTKHIGKSFKLMKVAGAYWRGDSSNIMLTRIYGTAWRNDQELKDYLHQLEEAEKRDHRKLGREMDLFHFQEEAPGAVFWHPKGWSLFQSLINYMRDRQDKEDYVETNTPDMMDKSLWETSGHWEKFGENMFTTEAKEEKIFAIKPMNCPGAVEIYKQGLKSYRDLPLRMSEFGKVHRYEPSGALHGLMRVRAFTQDDAHIFCTEDQITSESKKVCDLILSIYKDFGFNDVRIKYSDRPEKRVGDDAVWDKSEQALKDAMEATDLEYSLNPGEGAFYGPKLEFVLRDAIGRDWQCGTLQVDLNLPGRLGATFVDEDGQKKTPV

SEQ ID NO: 189272 - protein, 367 aa, Unknown
  Bacterial polypetide isolated from the Sargasso Sea
MVQKRFSKKSVTILEIAQSIGAGLAKATIAGKVNDVLLDATIPINNDSKVVIITSKDKEGIEIIRHSFAHLIGHAVKQIYPNIKMAIGPVIEDGFYYDIFSEYRFTPEDLKKIEDRINKLIKTNYNVEVLQVSKKEAIKTFKERDETFKLRIIEEIPEEGLINLYKHEEYIDMCRGPHVPNTRHLRHFKLLKLSGSYWRGNSDNESLQRIYGTAWAKEKELNDYLTRIEEAEKRDHRKLGKKHSLFHIQEESPGMIFWHPNGWTIYQVLEKYIREILKKNDYLEIKTPQAVDKSLWEKSGHWEKFRDDMFTTASENRTYAIKPMNCPCHIQVFNQGLKSYKDLPIRLAEFGSCHRNEPSGALHGLMR

SEQ ID NO: 189273 - protein, 639 aa, Unknown
  Bacterial polypetide isolated from the Sargasso Sea
MPTITLPDGKNLNFSKEVNGLEIAKKISRSLLKHALVMSVDGELKDLYFTIKNDCTVKIFTSKDPEGLEVIRHDAAHIMAMAVQELYPGTQVTIGPVIENGFYYDFSRKEPFTSDDLIKIEKRMSEIIDKDIKTKREVWDRGKAISHFNKIGEKYKAEIIESIPENEELSVYYHGDTWHDLCRGPHLVSSGKIGKAFKLTKVSGAYWRGDSKNEMLQRIYGTGWASQKDLEEYLKRIEEAEKRDHRKLGKEMDLFHFREESPGSVFWHEKGWSLFQKLINYMRAKQDAAGYREVNTPEVLDRLLWEKSGHWEKYKENMYTSQTPDEKVFAIKPMNCPGHIQVFNQGLKSYRDLPLRITEFGKVHRYEPSGALHGLLRVRAFTQDDAHIFCSEDQITSECLNVTNLILDIYKDLGFENVILKYADRPEIRVGDDKVWDEAEASLLEAVKATKLKYTINKGEGAFYGPKVEFVLRDAIGRDWQCGTIQVDLNLPGRLNASYVDKDGTKKVPVMLHRALFGSLERFIGILIEHYAGKFPFWISPLQTVVIPISEDFEEYALKVSKEIKKTGITTEVDLKKHNLNYKIRDHSLAKVPLLLICGKKEVDSNSVTIRRLDSTKQENMELKTFLKKYSALNKAFSN

SEQ ID NO: 189274 - protein, 638 aa, Unknown
  Bacterial polypetide isolated from the Sargasso Sea
MPTITLPDGNNLNFTKKVTGVEVAEKISKSLAKQAMVISVDGELKDLDYLIEKDCSVKIFTSKNPEGLETIRHDTAHILAMAVQELFPGTQVTIGPVIENGFYYDFARKEPFTEDDLVKIENKMKEIVDRDEITKREVWDRNKAIDHFKKKGEIYKSELIKAIPEKEDVSIYFHGDWHDLCRGPHLSSTGKIGKYFKLTKVSGAYWRGDSKNEMLQRIYGTSWATQKDLDEHLKRIEEAEKRDHRKLGKEMDLFHFREESPGSVFWHERGWALFQNLINYMRNRQDAAGYKEINTPEVLDRQLWEKSGHWGKYGDNMYTSETPDEKVFAIKPMNCPGHVQVFNQGLKSYRDLPLRYAEFGKVHRYEPSGALHGLLRVRAFTQDDAHIFCSEDQITSECLIVTNLILDIYKDLGFENVILKYADRPEVRVGDDEVWDKAEASLLEAVKASKLEYSINKGEGAFYGPKIEFVLRDAIGRDWQCGTLQVDLNLPERLGASYVDKDGSKKIPVMLHRALFGSLERFIGILIENYAGKFPFWISPLQTIVIPISDEFNNYALEISKKIKNVGISSSVDLKNQNLNYKIRDHSLAKIPLLLICGKKEVDSNSVTIRRLDSDKQENMDIETFLKTFSAINKASSN

SEQ ID NO: 189275 - protein, 422 aa, Unknown
  Bacterial polypetide isolated from the Sargasso Sea
MPNITLPDDSIRSFDGSVDGFELASAIGPGLAKSAMMMIVDGNERDLSFKIEQDCNVVIITRKDAVALDLIRHDCAHVMAEAVTELYPETQVTIGPAIENGFYYDFYREKPFTEGDLETIETKMHEIIDRGDPFEREVWARDEAMSHYEKIKEPFKVELIEGIPDDEPISFYRQGNFLDLCRGPHAPSTKHVGHAFKLMSVAGAYWRGDSSNPMLQRIYGTAWPDEKKLKAYLNMLEEAEKRDHRRLGRELDLFHMQEEAVGSIFWHPRGWSLYREIEAHVRRRLEDGDYKEVKTPQLIDRSLWEASGHWDKFRENMFTADSEDDRTLALKPMNCPGHVQIYKQGLKSYRDLPIRMAEFGSCHRNEPSGALHGIMRVRAFTQDDAHIFCSEDQITSESIIFCDLLRKIYKDFGFEDVRVKFS

SEQ ID NO: 189276 - protein, 266 aa, Unknown
  Bacterial polypetide isolated from the Sargasso Sea
MPNITLPDGKKLAFKEKVSGLKVAEKISKSLAKEALVISVDGKLKDLSYEIENDCEVKVLTSKDKDGLDTIRHDTAHILAMAVQELFPGTQVTIGPTIEDGFYYDFSRKEPFTEADLKKIETKMSEIVDRDEQTYREVWDREEAISHFKKIGENYKSEIIQDIPKNEEISIYFHGKWHDLCRGPHLSSTGKIGKNFKLTKVAGAYWRGDSKNEMLQRIYGTSWASKKDLDNYIKRLEEAEKRDHRKLGKEMDLFHFREESPGAVFW

SEQ ID NO: 189277 - protein, 363 aa, Unknown
  Bacterial polypetide isolated from the Sargasso Sea
MPIITLPDGNNIDFPNKVTGLEVAEKISKSLAKQAMVISVDGELKDLDFQIENDCSVKIFTSKNPEGLETIRHDTAHILAMAVQELFPGTQVTIGPVIENGFYYDFARKEPFTEDDLVKIENKMKEIVDRNEKTKREVWDRNKAISHFKKKGEIYKAELIEAIPENEDVSIYFHGEWHDLCRGPHLSSTGKIGKYFKLTKVSGAYWRGDSNNEMLQRIYGTSWATQKDLDEYLKRIEEAEKRDHRKLGREMDLFHFREESPGSVFWHERGWGLFQKLVNYMRSRQDAAGYKEVNTPEVLDRQLWEKSGHWEKYGENMYTSETPDEKVFAIKPMNCPGHIQVFNQGLKSYRDLPLRFAELGKFI

SEQ ID NO: 189278 - protein, 443 aa, Unknown
  Bacterial polypetide isolated from the Sargasso Sea
MGNIVVNLPDGSGKDLPKDSNGNDLAALIGPRLAKDAVAMSINGEQRDLSDTLADGDNVSIITIKSDEGLEIMRHTLTAQVLAQAVKNIYPTSKLAIGPTIEDGFYYDFLFEKPISSEELPKIEEEMRKIISNKSEINKTLHDKKDAISKFKNLDEGFKASIIEEADQKKDFQIYEQKETGFIDLCRGPHLPSLEYIGEFKLTKISGAYWKGNSENEMLTRIYGTAWRTKKELDSYIEKMQKAEEVDHRKLGKEMDLFHFQEEAPGMVFWHPKGWSIYTQLQYYVRKMQKNAGYSEVNTPEVVDRKLWEKSGHWDQYRENMFITEIDEEHANEKRTNALKPMNCPNHVQIYNQDIRSYRDLPFRLCEFGKCHRYEPSGTMHGLMRVRGFAQDDAHIFCTEDQIESETANFIALLSKMYSDLGFNEFKIKLSTRPEKRVGSDAS

SEQ ID NO: 189279 - protein, 186 aa, Unknown
  Bacterial polypetide isolated from the Sargasso Sea
MNFPNKVTGLDVAEKISKSLAKQAMVISVNGELKDLDHIIENDCSIKIFTSKNPEGLETIRHDTAHILAMAVQELFPGTQVTIGPVIENGFYYDFARKESFTEDDLIKIENKMKEIVDRDEITKREVWERNKAIAHFKKKGEIYKAELIEAIPENEDVSIYFHGEWHDLCRGPHLSSTGKIGKYLS

SEQ ID NO: 189280 - protein, 362 aa, Unknown
  Bacterial polypetide isolated from the Sargasso Sea
MPSIKLPDNSTRNFDNPLSVEDIAKDIGTGLAKAAVAGKIDGKLVDGSEIIADDCSLEIITIKDDEGLEIVRHSCAHLLAHALKQLYPNAQMAIGPVIRDGFYYDIKLDKNLSDEDLEAIEKRMKKLAKTKYDVRREVVSQKKAIKTFKERNEPYKVNLAEEIPDDEVIALYHHEEYIDMCRGPHVTNMRHLQAFKLTKVSGAYWRGDSKNEMLQRIYGTAWPNSKDLENYILQQEEAEKRDHRKLGRQLDLFHFQEEAPGMVFWHPKGWSIYSALKTFIQSKQAEYDYQEINTPQIVDRKLWEASGHWDKYRENMFITEIDEEHANEKRTNALKPMNCPCHVQVFNQGLRSYKDLPIRYAE

SEQ ID NO: 189281 - protein, 459 aa, Unknown
  Bacterial polypetide isolated from the Sargasso Sea
MEINLPDGSVKELEKGSNGLDLAKSIGAGLAKSAVAVVVNGEQRDLLDELPDKSSVSIITIQSDEGLEIMRHTLTAQVLAKAIKNLYSDSRLAIGPTIENGFYYDVSTETPISVEDLPKIENEMKRILENKSNIVKSLHSEKDAKKMFKEKGETLKIEIIDDAEQTDNFQIYTNADEDFIDLCRGPHLPNLSFIGAFKLTKVSGAYWKGDSTNEMLTRIYGTAWRNEKELQEHLKSIEEAEKRDHRKIGKDMDLFHFQDEAPGMVFWHPKGWTIYSTLKSYMSDMQKKADYKEINTPSVIDRKLWEKSGHWDKYRENMFITEIDEEHANEKRVNALKPMNCPGHVQVYNQGIRSYKELPFRLCEFGSCHRYEASGTMHGLMRVRGFTQDDGHIFLTEDQIESETAIFIDLLSKVYADLGFNQFEIKLSTRPEQRVGSDEIWDKAELSLKNAIEKLGLEY

SEQ ID NO: 189282 - protein, 228 aa, Unknown
  Bacterial polypetide isolated from the Sargasso Sea
MYVPPPVGTTENTMVSIRLPDGSVRQYEHPVTVAEVAASIGPGLAKAALGGKIDGELVDTSTLIDHDVALAIVTEKDADGLDIIRHSTAHLLAYAVKDLFPEAQVTIGPVIDNGFYYDFSYHRPFTPEDLEKIEKRMQELAKKDEPVSRRVVSRDEAVDYFKSIGEKYKAEIIESIPATDEIKLYSHGSFTDLCRGPHVPSTGKLKVFKMMKLAGAYWRGDSKNEQCS

SEQ ID NO: 189283 - protein, 630 aa, Unknown
  Bacterial polypetide isolated from the Sargasso Sea
MPEITLPDKSKRKFEESISIEDVAKDIGPSLAKATVAGKINGVLVDASELIEEDSTVEIITSKDEEGIEVVRHSCAHLLAHAMKQLYPEVKLAIGPVINHGFYYDVLLDKSLSDDDLQAIEDRMLKLAKTDYNVIREVVSRKKAIKTFKERDEPYKVALAEEIPDEEIIALYHHEEYTDMCRGPHVTNTKHLRAFKLTKVSGAYWRGDSQNEMLQRIYGTAWPSPKELKKHLVQLEEAEKRDHRRLGRQLDLFHFQEEAPGMVFWHPKGWTIYRVLEDFMRTKQIESDYDEINTPEVVDRKLWEESGHWDKYRENMFITEIDEEHANEKRTNALKPMNCPCHVQVYNQGLKSYRDLPVRFAEFGSCHRYEASGTLHGLMRVRAFTQDDGHIFCTEEQIKEETKSFIELLSLIYSELGFKEFEIKLSTRPEVRVGSDEVWDKAELALKEAINNLDLKYEISEGEGAFYGPKLDFVLNDALDREWQCGTFQADFILPERLGSTYIGDDGEKHQPIMIHRAILGSFERFIGILIEHHGGALPVWLSPVQAQILNITDKHSQYSEKIRDLLQKNGFRAQSDLRKEKITYKIRDHSMQKTPFLLVVGDKEMKNDTVSVRARGGEDLGDMSMKEFM

SEQ ID NO: 189284 - protein, 646 aa, Unknown
  Bacterial polypetide isolated from the Sargasso Sea
MIEITFPDGAVKEYKKGITPIEIARSISNSLAKNLLSVSFNKKQIESTSILEGSGSIEFHFWEDLKGKSAFWHSSAHLFAQIVKELYPKSKLTIGPPIENGFYYDIDLGDQTISENDFEKIEKRIIEEARKDHKFSIRESSKEDAINFYKNNNNEYKIELIENLGDEKITFCDHANFSDLCKGGHIPSTGHIKAVKLLNVAGAYWRGDENNKQLTRVYGISFPKQKLLNEHLELIEEAKKRDHRVLGKKLKLFTFSQQVGLGLPLWLPKGAELRKRLEDFLTKAQKAAGYDMVVSPHIGNKKLYETSGHFQKYGESSFMPIKSPSSDEEFLLKPMNCPHHCEIYKSEQWSYKDLPIRYAEFGTVYRYEQSGELHGLTRVRGFTQDDAHIFCSQDQLVEEFEKVIDLVLYVFNTLGFDNYEVQISLKDKNDDEKYIGSAEMWDLAENAIVKATTAKKLNYTIEYGEAAFYGPKLDFMVKDALNRKWQLGTIQVDYNLPERFDLKFKNKNNQDERPVMIHRAPFGSLERFVAILIEHTGGVFPMWLTSNQIVLISVGEKHEKFAKKVSSLLEKAEIRATLDNRNETVGKKIRESEQNKVPYMGIIGDKEVSSNSVSIRGLGGDEVGEMNIDELINFIKNEEKKSLINN

SEQ ID NO: 189285 - protein, 539 aa, Unknown
  Bacterial polypetide isolated from the Sargasso Sea
MPTITLPDGNSIDFPNKVTGIEVAEKISKSLAKQALIISVDGELKDLYFEINKDSAVKIFTSKDPEGLEVIRHDTAHIMAMAVQELYPGTQVTIGPVIENGFYYDFARKEPFTTDDLKKIEKRMSEIIDKDVKTRREVWEREKAISHFTKIGEKYKAEIIESIPGNEELSVYHHGETWHDLCRGPHLVSSGKIGKAFKLMKVSGAYWRGDSNNEMLQRIYGTSWANQKELEDYLKRIEEAEKRDHRKLGKEMNLFHFREESPGSVFWHEKGWALFQKLINYMRSRQDAAGYREVNTPEILDRQLWEKSGHWEKYGENMYTSETPDEKVFAIKPMNCPGHIQVFNQGLKSYRDLPLRIAEFGKVHRYEPSGALHGLLRVRAFTQDDAHIFCSEDQITSECLEVTNLILDIYKDLGFENVILKYADRPEVRVGDDKIWDKAEASLLEAVKASKLEYSINKGEGAFYGPKIEFVLRDAIGRDWQCGTLQVDLNLPGRLEASYVDKDGIKKVPVMLHRALFGSLERFVGILIENYAGKFPFWI

SEQ ID NO: 189286 - protein, 307 aa, Unknown
  Bacterial polypetide isolated from the Sargasso Sea
MPNITLPDGKKLNFKKSVTGSEIAEKISKSLAKQALIMSVNGELKDLYSIIDKDSSVKIFTSKDPEGLEVIRHDTAHIMAMAVQELYPGTQVTIGPVIENGFYYDFARKEPFTSDDLKNIEKRMSEIIDKDVKTRREVWKRDEAINHFKKIGEKYKAEIIEGIPENELLTIYHHGDTWHDLCRGPHLVSSGKIGKAFKLTKVSGAYWRGDSNNEMLQRIYGTGWANQKDLDVYLQRIEEAEKRDHRKIGKEMDLFHFREESPGSVFWHQKGWNLFQKLISYMRMKQENAGYQEINTPENIRSITWEK

SEQ ID NO: 189287 - protein, 450 aa, Unknown
  Bacterial polypetide isolated from the Sargasso Sea
MANITLPDGKTIKFDKPVTGSEVAENISKSLAKQALVMSVNGELRDLYYTIKEDSSVKIFTAKDPEGLEVIRHDTAHIMAMAVQELYPGTQVTIGPVIENGFYYDFARKEPFTSEDLNKIEKRMSEIVDKNVKTKREVWAREKAINHFKKIGEKYKAEIIESIPENEELTIYHHGDSWHDLCRGPHLESSGKIGKAFKLTKVSGAYWRGDSKNEMLQRIYGTGWANQKDLDTYLKRIEEAEKRDHRKLGKEMDLFHFREESPGSVFWHEKGWSLFQKLVNYMRDRQRKAGYKEINTPEILDRSLWEKSGHWDKFGEHMYTSKTPDEKVFAIKPMNCPGCVQVFNQGLKSYRDLPLKMSEFGKVHRYEPSGALHGLMRVRAFTQDDAHIFCTEEQITEESLTVTNLILDIYKDLGFKNVILKYSDRPEVRVGDDKVWDKSEAALLEAVKAT

SEQ ID NO: 189288 - protein, 245 aa, Unknown
  Bacterial polypetide isolated from the Sargasso Sea
MLIFFVLKIKSLSESKKVCDLILSIYEDFGFKNVRIKYSDRPEKRVGDDSVWDKSEKALKNAMEATGLDYSLNPGEGAFYGPKLEFVLRDAIGRDWQCGTLQVDLNLPGRLGATFIDEDGQKKTPVMLHRALFGSLERFTGILIEHYAGHLPVWLSPVQVTVATITSDTDDYGYEVLKKLKSSGIRAEIDVRNEKIGYKIREHSNLKVPAILAIGKKEAEEDTVSVRRLGSQNTKVYKLDDFIKS

SEQ ID NO: 189289 - protein, 457 aa, Unknown
  Bacterial polypetide isolated from the Sargasso Sea
FRRSNKNEKKMSEIIDRDVKTSREVWERDKAVKHLKKIGEKYKAEIIESIPKSEELSVYHHGDTWHDLCRGPHLASSGKIGKAFKLTKVSGAYWRGDSNNEMLQRIYGTCWKNKDQLKLYLDRLEEAEKRDHRKLGKEMDLFHFREESPGSVFWHEKGWILFQRLVEYMRFRQRLDGYKEINTPELLDKTLWEKSGHWEKFSEHMFTSETPDEKVFAIKPMNCPGCVQIFNQGLKSYRDLPLKLSEFGKVHRYEPSGALHGLLRVRAFTQDDAHIFCTEDQITEECLSVTNLIIDIYKNLGFEKVILKYSDRPEKRVGDDKIWDKSEAALLTAIKKSKLEYTINKGEGAFYGPKIEFVLQDAIGRDWQCGTLQVDFNLPGRLGASYVNKSGEKQVPVMLHRALFGSLERFIGILIENYAGKLPFWLSPSQAVVCPIAEDNNIYAKKLFEDLFKESIK

SEQ ID NO: 189290 - protein, 362 aa, Unknown
  Bacterial polypetide isolated from the Sargasso Sea
MKLTLPDKSVKELPKGVTGLDVAMSIGPGLAKSAIAVNIDGEQKDLSDPINADCSLSVITLDSDEGLEIMRHTTAAQVLALAIKSIYPDSKLAIGPTIENGFYYDFHTEDSISTEDLPRIEEEMRKIIKEKSEIGKSFHDKKSAIDQFKKLSEDYKVKIIEESDQAEDFQIYKNEKSEFIDLCRGPHLPNLSHIGAFKLTKVSGAYWKGDSSNEMLTRIYGTAWRNKKELDQYLVQLEEAEKRDHRRIGKDLDLFSIQEDAGGGLVFWHPNGSRIRSEIENYWKNEHEKAGYELLYTPHIALDTLWQTSGHTDFYEESMYTPIDDENQSYRLKPMNCPFHVLIYKDKLRSYREFPIRWAELG

SEQ ID NO: 189291 - protein, 648 aa, Unknown
  Bacterial polypetide isolated from the Sargasso Sea
MGNIVIKLPDGSSKELPANSNGLDLANSIGPKLAKDSVAVVVNGSQRDLSDILPDKADVSIITKDSDEGIEIMRHTLSAQVLALAVKNLYPSAKLAIGPTIDDGFYYDFFMDKPISSDDLPKIEDEMNKIIKSKSKITKSYHSKKEALKVFDDLDEGFKAEIINDSDQKDNFQLYTQDETGFIDLCRGPHLPNIGMCGEFKLTKVAGAYWRGDSTKPMLTRIYGTAWQTKKELSLYLERLEKAEEVDHRRLGKEMDLFHFQDEAPGMVFWHPKGWTIYTHLQYYVREMQKKAGYKEVNTPEVVDRKLWETSGHWEQYRENMFITEIDDEHANEKRTNALKPMNCPNHVQIYNQGIKSYRDLPFRLSEFGKCHRYEASGTMHGLMRVRGFAQDDGHIFCTEDQIESETKNFIDLLSSMYKDLGFTDFKIKLSTRPDKRIGTDESWDKAEKALQDGIEKLKLEYTIDEGDGAFYGPKLDFVLTDAIARKWQCGTLQVDFNLPGRFDSTFIGEDGTKHTPVLLHRAALGSFERFIGILLENYGGKLPVWLAPTQTVIAAITDEANDYAVSLNKKLLENGIRSELDIRNEQISYKVREHSLQKVPYIIAVGKKEVEGKSVSVRRLGSEKTESVLLDDFVKSVIQEAKTPLEK

SEQ ID NO: 189292 - protein, 490 aa, Unknown
  Bacterial polypetide isolated from the Sargasso Sea
VDGELKDLNHSIYKDSSIKIFTSKDKEGLETIRHDTAHILAMAVQELFPGTQVTIGPVIEDGFYYDFARKEPFTTEDLEKIENKMKEIVDRDEKTYREVWKRNDAIEHFKKKGEMYKAEIIESIPEGEDVSLYFHGDWHDLCRGPHLSSTGKIGKYFKLTKVSGAYWRGDSNNEMLQRVYGTSWSTQKELDDYLNRIEEAEKRDHRKIGKEMDLFHFREESPGSVFWHQKGWSLFQKLISYMRMKQETAGYQEINTPEILDRSLWEKSGHWEKFGANMYTSTTPDEKVFAIKPMNCPGCVQVFNQGLKSYRDLPLKMSEFGKVHRYEPSGALHGLLRVRAFTQDDAHIFCTEEQITEECLTVTNLILEIYKDLGFEEVILKYSDRPELRVGDDQVWDKSEAALLEAIKASKLEYSINKGEGAFYGPKIEFVLRDAIGRDWQCGTLQVDLNLPDRLGASFVDSDGNKKVPVMLHRALFGSLERFIGIFIEN

SEQ ID NO: 189293 - protein, 359 aa, Unknown
  Bacterial polypetide isolated from the Sargasso Sea
METKNLEAYRHNLRHSAAHLLAEAVLKLYPNAKITLGPPITDGFYYDFDIDITFSPQDLIAIEREMKRSVKRNSKFECNELSREEALDVYKDNPYKIEIIKSMPEEEIITEYSHSDGKFRDLCRGGHIEKTGEIKALKLLSTAGAYWRGDENNKMLQRIYGTAWESEELQKDYLDKRQKAIESDHRKLGTSLDLFFLDPISPANPFFLPNGAFIYNKLIEFVRNLYDKYGYQEVITPQLFSTDLWKTSGHYDFYLDNMYMMEIDENEVGVKPMNCPAHAVIYKSTLRSYRDLPLRLADFGRLHRYERSGVTHGLTRVRSFSQDDAHIFCSTKDAGIEIKSFLEMLRESYSAFGFNKPKN

SEQ ID NO: 189294 - protein, 284 aa, Unknown
  Bacterial polypetide isolated from the Sargasso Sea
KMSEFGKVHRYEPSGALHGLLRVRAFTQDDAHIFCTEDQITEECLSVTNLILEIYKDLGFENVILKYSDRPEIRVGEDGVWDKAEAALLEAVKASKLEYTINKGEGAFYGPKIEFVLRDAIGRDWQCGTLQVDLNLPGRLGATFVDKDGSKKVPVMLHRALFGSLERFIGILIEHYSGKLPFWIAPLQAMVIPVSDDFNHYAIEVRKKIKDVGINCEADLKNHNLNYKIREHSMLKTPLLLICGKKEVDSSTVTIRRLDSNKQESMELSKFLKKFASLNKAPLN

SEQ ID NO: 189295 - protein, 646 aa, Unknown
  Bacterial polypetide isolated from the Sargasso Sea
MEIKLPDGSSRQLPDGANAFDLAKDIGKNLAKSAVAAWINGSQKDLLDPLPDKAEVSIITIDSEDGLEIMRHTVAAQVLAAAVKELYPSAKLAIGPTIENGFYYDVLFEDPISSEDLQAIQNKMLDIVAKGSLVKKTLHSKSEANKLFANLDETYKQQIIKDADQDDDFQIYTNDDSNFIDLCKGPHLPNLGFVGAFKLTKVSGAYWRGDAKNEMLTRIYGTAWRNQKEQDVYLANLEEAEKRDHRRIGKDMDLFHFQDEAPGMVFWHPKGWTIYSALKSYMSDMQKKSNYKEINTPSVIDRKLWEKSGHWDKYRENMFITEIDEEHANEKRVNALKPMNCPGHVQVYNQGIRSYKELPYRLCEFGTCHRYEASGTMHGLMRVRGFTQDDGHIFCTEHQIESETAIFIDLLSKVYADLGFNEFEIKLSTRPEQRVGSDEIWDKAESSLKNAIEKLGLDYRIDEGDGAFYGPKLDFVLTDAIGRKWQCGTLQLDFNLAERLDAQYVAEDGDKYYPVMFHRAILGSFERFIGILIENYKGNLPLWLAPIQVVIATVTDDANEYAKEIASNLDQLEIRYRLDQRNEKISYKVRDHMAQKNPIVIVLGKKEIEDQSVNIRRLGNSETQEMPLKNFMKFISEEVKAPHHDL

SEQ ID NO: 189296 - protein, 639 aa, Unknown
  Bacterial polypetide isolated from the Sargasso Sea
MPEIQLLDGKKIPFVKSISGFELTKKISKSLEKSALIMEVDGELKDLSHEIKKDSKVRLITSKDKEGLEVIRHDAAHIMAMAVQELYPGTQVTIGPVIENGFYYDFARKEPFTSDDLKKIEKRMSEIIDRDVKTKREVWKREKAIKHFKNIGEKYKAEIIESIPLNEELSIYHHGDTWHDLCRGPHLASSSKIGKAFKLTKVSGAYWRGNSDNEMLQRIYGTCWSSKKELDEYLHLLEEAEKRDHRKLGKDMDLFHFREESPGSVFWHEKGWLLFQRLIEYMRMKQRLAGYKEINTPELLDKTLWEKSGHWEKFGEHMFTSETPDEKTFAVKPMNCPGCVQVFNQGLKSYRDLPLKLSEFGKVHRYEPSGALHGLLRVRAFTQDDAHIFCTEDQITEESLSVTNLILEIYKDLGFKDVILKYSDRPEKRVGDDSVWDKSEAALLTAIKKSKLEYTINKGEGAFYGPKIEFVLRDAIGRDWQCGTLQVDLNLPGRLGATYVAKDGTKKIPVMLHRALFGSLERFIGILIENYAGKLPFWLSPAQAVVCPIAEENNNYVKKLFEDLFKEGIKCEMDLRNEKINYKVREHSLAKIPYIIVCGKKEVADNTVTVRKLGSDNQEVIKREDLIKNMLDLNKLPLN

SEQ ID NO: 189297 - protein, 330 aa, Unknown
  Bacterial polypetide isolated from the Sargasso Sea
IREKFGANMYTSTTPDEKVFAIKPMNCPGCVQVFNQGLKSYRDLPLKMSEFGKVHRYEPSGALHGLLRVRAFTQDDAHIFCSEDQITQECLNVTNLILEIYKDLGFENVILKYSDRPEVRVGDDKVWDKSEKALLEAIKASKLEYSVNKGEGAFYGPKIEFVLRDAIGRDWQCGTLQVDLNLPGRLGASFVDKDGSKKVPVMLHRALFGSLERFIGILIENYSGKLPFWISPLQTMVIPVSEDFDKYAKEVNQKIKKAGITSEVDLKNHNLNYKIREHSLSKVPILLICGKKEVDSNSVTIRRLDSNKQDNMDLDLFIKKYSALNQVSSN

SEQ ID NO: 189298 - protein, 444 aa, Unknown
  Bacterial polypetide isolated from the Sargasso Sea
MIKVSFPDGNIKEFEKGTKVIDIAKSISEGLARKVISASYNSEVIELSTGLNDDGDIKLYTWDDDEGKKAFWHSSAHILAQTIKDIYPTSKLTIGPAIESGFYYDVDFGGNNPSENDFKKIEEKFLEFAREDNEFKMRHLSKSDALEFYKKEKNQYKIELIEDLEDGTITFCDHSNFSDLCKGGHIPSTGIVKSVKLLNIAGAYWRGDEENNQLTRIYGISFPKQKMLTEYLELVEKAKERDHRKLGKELELFTFSSRVGNGLPLWLPNGTELRDRLQRFLEDAQRKAGYKKVMTSHIGSKELYETSGHYEKYGADSFQPILTPNDNETFILRPMNCPHHCEIYNSKPQSYRDLPLRLAEFGTVYRYEQSGELHGLSRVRGFTVDDAHIFCTPEQVDSEFKNTIDLVLYVFRSLGFEEFSAQVSLRDDSKPEKYIGSKKNWEIS

SEQ ID NO: 189299 - protein, 478 aa, Unknown
  Bacterial polypetide isolated from the Sargasso Sea
IKSIPKGEEVSLYFHGKWHDLCRGPHLLSTGKVGKFFKLTKVAGAYWRGDSKNEMLQRIYGTSWSSQKDLDDYLKRIEEAEKRDHRKLGKEMDLFHFREESPGSVFWHEKGWNLFQKLISYMRQKQDEAGYKEINTPEILDRSLWEKSGHWEKFGANMYTSTTPDEKVFAIKPMNCPGCVQVFNQGLKSYRDLPLKMSEFGKVHRYEPSGALHGLLRVRAFTQDDAHIFCTEDQITEECLSVTNLILEIYKDLGFENVILKYSDRPDLRVGDDDVWDKSEKALLEAIKESKLEYSINKGEGAFYGPKIEFVLRDAIGRDWQCGTLQVDLNLPGRLGASFVDKDGSKKVPVMLHRALFGSLERFIGILIENYAGKLPFWISPLQAMVIPVSDDFNTYAIEVNKKLKKSGITSEVDLKNHNLNYKIREHSLTKIPLLLICGKKEVDSNTVTIRRLDSKEQENMEIKKLIEKFSSQAKSPS

SEQ ID NO: 189300 - protein, 294 aa, Unknown
  Bacterial polypetide isolated from the Sargasso Sea
MKEIVDRDEITKREVWERNKAIDHFKKKGEIYKSELIKAIPEKEDVSIYFHGDWHDLCRGPHLSSTGKIGKYFKLTKVSGAYWRGNSKNEMLQRIYGTSWATQKDLDEHLKRIEEAEKRDHRKLGREMDLFHFREESPGSVFWHERGWALFQNLINYMRHRQDTAGYKEINTPEVLDRQLWEKSGHWGKYGDNMYTSETPDEKVFAIKPMNCPGHVQVFNQGLKSYRDLPLRYAEFGKVHRYEPSGALHGLLRVRAFTQDDAHIFCSEDQITSECLIVTNLILDIYKDLGFENV

SEQ ID NO: 189301 - protein, 644 aa, Unknown
  Bacterial polypetide isolated from the Sargasso Sea
MKITLPDNSNRELPDGSCGYDLAKDIGPGLAKSAVAVTIDGEQRDLHDVIHGDSAVSIITIDSNEGLEIMRHTLTAQVLARAIKNLYPKSKLAIGPTIEDGFYYDVECSKTISIDDLEKIENEMNKIIKAKSSITKKLLSKKDALNVFKSLDEPYKQEIINDSSQEKSFQLYYQDDDNFVDLCRGPHLPNLAFIGSFKLTKVSGAYWKGDSNNTMLTRIYGTAWNSEKDLNKYLNTIEEAEKRDHRKLGKEMDLFHFQDEAPGMVFWHPNGWSIYRNLRNFVRDRLQDSNYIEVNTPQVIDRKLWEASGHWDKYRENMFITEIDEEHANEKRVNALKPMNCPGHVQIYNQGIKSYKDLPLKYAEFGLCHRYEPSGTMHGLMRVRAFTQDDGHIFCTEDQIESETGLFIEFLSKIYADLGFKEFDIKLSTRPEMRVGSDEIWDKAEEALEAAIKNLGYPYRIDVGDGAFYGPKLDFVLTDAIGREWQCGTFQLDFNLAERLDAHYIGEDGKKHNPVMIHRAVLGSFERFIGILIENYAGKLPLWLAPQQVVIASIISDVNDYSLEIKNLLKKEGIRAEVDLRNEKISYKVREHSSKKVPIILAIGNNEKNDRTVSIRRIGSKETEVLSLDDAINQINSENRTLNE

SEQ ID NO: 189302 - protein, 197 aa, Unknown
  Bacterial polypetide isolated from the Sargasso Sea
MLEAIKATKLEYSINKGEGAFYGPKIEFVLRDAIGRDWQCGTLQVDLNLPGRLGASFVDKDGTKKVPVMLHRALFGSLERFIGILIENYAGKLPFWISPLQAVVIPISSDFDEYAKSVAKELKRVGLIVEVDLKNHNLNYKIRDHSLTKVPMLLICGKKEVDSNSVTIRRLDSNKQENMALKEFIKKYSDLNKAPSI

SEQ ID NO: 189303 - protein, 273 aa, Unknown
  Bacterial polypetide isolated from the Sargasso Sea
MPNIKLPDGNSISFEKKVTGLQIAEKISKSLSKQALVISVDGNLRDLNYEINKDCTVKIHTAKDKEGLETIRHDTAHVLAMAVQEIFPGTQVTIGPVIDNGFYYDFARKKPFTEEDLRKIEKKMLEIVERDEPTHREVWKRDKAVEHFKKAGELYKAEIIKDIPKDEEVSVYFHGKWHDLCRGPHLMSTGKIGKYFKLMKVSGAYWRGDSKNEMLQRIYGTSWSTQKDLDNYLNMIEEAEKRDHRKLGKEMDLFHFREESPGSVFWHEKGWNL

SEQ ID NO: 189304 - protein, 401 aa, Unknown
  Bacterial polypetide isolated from the Sargasso Sea
MPEITLPDGKKINFEKSISGFEVAEKISKSLSKQALLISVDGELKDLNHSISKDSSIKIFTSKDKEGLETIRHDTAHILAMAVQELFPGTQVTIGPVIEDGFYYDFARKEPFTTEDLEKIENKMKEIVDRDEKTYREVWKRSDAIEHFKKKGEIYKAEIIESIPEGEDVSLYFHGDWHDLCRGPHLSSTGKIGKYFKLTKVSGAYWRGDSNNEMLQRVYGTSWSTQKELDDYLNRIEEAEKRDHRKIGKEMDLFHFREESPGSVFWHQKGWSLFQKLISYMRMKQETAGYQEINTPEILDRSLWEKSGHWEKFGANMYTSTTPDEKVFAIKPMNCPGCVQVFNQGLKSYRDLPLKMSEFGKVHRYEPSGALHGLLRVRAFTQDDAHIFCTEEQITEECLTV

SEQ ID NO: 189305 - protein, 264 aa, Unknown
  Bacterial polypetide isolated from the Sargasso Sea
MSTENIEEYRHKLRHSAAHLLAEAVLKRHPQAKLTIGPPITDGFFYDFDIDITFSPQDLATLERDMKRSIKRNTKFERKEISKNEALEIYKDNPYKIEIINSMPEDEIVTEYSHSDGNFIDLCEGGHIEKTGEIKAIKLLSTAGAYWRGDEKNKMLQRIYGTAWESEELQQDYLDKRKKAIESDHRKLGTSLDLFFLDPISPANPFFLPDGAFVYNKLIEFVRNLYEKYDYKEVITPQLFSTDLWKQSGHYDFYLENHVYDGNR

SEQ ID NO: 189306 - protein, 271 aa, Unknown
  Bacterial polypetide isolated from the Sargasso Sea
MIKITFPDGSIREYQKGTSSMDIAKSISEGLARNVLLAKVNGKLQDLSLPINEDSAFELLTWKDEEGKSTMWHSSAHLMAEALEQLYPGVKLAIGPPTARGFYYDVDFCDYQISEKDLPKVEQKMKELAKQKLTFTRKEVSKSDALSYFEKKGDPYKLELISELEDGGITFYTQGSFTDLCKGPHIPHTGHIKAIKLLSIAGAYWRGDEKNKQLTRIYGVSFPKKSELVEHLQMIEEAKKRDHRKLGKELELFTFSQKVGQGLPLWLPNGT

SEQ ID NO: 189307 - protein, 426 aa, Unknown
  Bacterial polypetide isolated from the Sargasso Sea
YGTAFNNDKDLQNHLDNIEEALKRDHRKIGKEMNLFHFQDEAPGMVFWHPNGWTVYRNLRNFVRDKLQSNGYIEVNTPQVIDRKLWEASGHWDKYRENMFITEIDEEHANEKRINALKPMNCPGHVQIYNQGIKSYKDLPLKYAEFGLCHRYEPSGTMHGLMRVRAFTQDDGHIFCTEDQIESETKLFIDFLSEIYADLGFTKFDIKLSTRPEMRVGSDKTWDKAEEALESAINNLGHPYRIDHGDGAFYGPKLDFVLTDAIGREWQCGTFQLDFNLAERLDAQYVGEDGKKHFPVMIHRAVLGSFERFIGILIENYAGKLPLWLAPIQIMIAPIISDANDYADTVKKEFVNNGFRVEIDKRNEKISYKVREHSLSKIPYILALGKKEIADNTVNVRKIGSKDTNTMKIKDFLNELKTELKESNKC

SEQ ID NO: 189308 - protein, 638 aa, Unknown
  Bacterial polypetide isolated from the Sargasso Sea
MPSIILTDGKKLDFTKSITGLKIAEKISKSLMKQALIMSVNGELKDLEHEITKDSEVKIFTSKDKEGLETIRHDTAHILAMAVQELFPGTQVTIGPVIEDGFYYDFARKEPFTNEDLEKIEKKMKEIVDRDEKTYREVWKRNDAVKHFKKKGEIYKAEIINSIPENEEVSIYFHGKWHDLCRGPHLISTGKIGKYFKLTKVSGAYWRGDSSNEMLQRVYGTSWSSQKELDEYLERIQEAEKRDHRKLGKEMDLFHFREESPGSVFWHQKGWNLFQKLISYMRMKQDHAGYEEINTPEILDRSLWEKSGHWEKFGANMYTSTTPDEKVFAIKPMNCPGCVQVFNQGLKSYRDLPLKMSEFGKVHRYEPSGALHGLLRVRAFTQDDAHIFCTEDQITEECLSVTNLILEIYKDLGFENVILKYSDRPDIRVGDDSVWDKSEAALLEAIKASRLKYSINKGEGAFYGPKIEFVLRDAIGRDWQCGTLQVDLNLPGRLGATYIAKDGSKKVPVMLHRALFGSLERFIGILIENYAGKLPFWITPLQVVVIPISGDFDDYAKNVYQQIRKVGISCELDLKNHNLNYKIRDHSLTKVPLLLICGKKEVDTNTVNIRRLDFKKQENMELKEFLKKYSAMNRAPSI

SEQ ID NO: 189309 - protein, 544 aa, Unknown
  Bacterial polypetide isolated from the Sargasso Sea
MPNITLPDGKKINFEKSISGFEVAEKISKSLSKQALLISVDGELKDLNHSISKDSSIKIFTSKDKEGLETIRHDTAHILAMAVQELFPGTQVTIGPVIEDGFYYDFARKEPFTTEDLNKIENKMKEIVDRDEKTYREVWKRNDAIEHFKKKGEIYKAEIIESIPEGEDVSLYFHGDWHDLCRGPHLSSTGKIGKYFKLTKVSGAYWRGDSNNEMLQRVYGTSWSTQKELDDYLNRIEEAEKRDHRKIGKEMDLFHFREESPGSVFWHQKGWNLFQKLISYMRMKQETAGYQEINTPEILDRSLWEKSGHWEKFGANMYTSTTPDEKVFAIKPMNCPGCVQVFNQGLKSYRDLPLKMSEFGKVHRYEPSGALHGLLRVRAFTQDDAHIFCTEEQITEECLTVTNLILEIYKDLGFEDVILKYSDRPELRVGDDQVWDKSEAALLEAIRATKLEYSINKGEGAFYGPKIEFVLRDAIGRDWQCGTLQVDLNLPGRLGASFVDSDGNKKVPVMLHRALFGSLERFIGILIENYSRKITFFGYAQFKQ

SEQ ID NO: 189310 - protein, 390 aa, Unknown
  Bacterial polypetide isolated from the Sargasso Sea
RVYGTSFKNEKDLKKYLNMLEEQKKRDHRKIGRELDLYFFDDEVGPGLPLWTPNGAVMIDELEALAKEKETASGYLRVKTPHLTKGELYEKSGHLKHYISSMYPAMDVDGIDYYMKPMNCPHHHKIFANTPKSYRDLPYRLSEYGTCYRYEKSGELFGLMRVRSMQMNDAHIYCTEEQFKDEFIGVCNLYMDYFKIFGIEKYEMRLSLHDPKGLGEKFIDNAELWKKTEDDVRNALKSANLKFVESVGDAAFYGPKIDVQVWSSIGREFTLATNQVDFAVPERFDLTYNDNDGTSKTPLCIHRAPLGTHERFIGFLIEHFGGNFPLWLAPKQVIVLPVSDKYNDYAEKVTKDLKSKGIRAFLDKRSEKIGSKIRDAELQKINIMIIVGEK

SEQ ID NO: 189311 - protein, 392 aa, Unknown
  Bacterial polypetide isolated from the Sargasso Sea
KLAKTKYDVRREVVSQTKAIKTFKERNEPYKVNLAEEIPEDEVIALYHHEEYIDMCRGPHVTNMRHLQAFKLTKVSGAYWRGDSKNEMLQRIYGTAWPNSKDLDNYILQQEEAEKRDHRKLGRQLDLFHFQEEAPGMVFWHPKGWSIYSALKTFIQSKQVEYEYQEINTPQIVDRKLWEASGHWDKYRENMFITEIDEEHANEKRTNALKPMNCPCHVQVFNQGLRSYKDLPIRYAEFGSCHRYEASGTLHGLMRVRGFTQDDGHIFCTEDQIQDETKKFIKLLTEIYSQLGFDEFDIKLSTRPEVRAGSEQVWDKAELALENAIKNLDLPYEVIAGDGAFYGPKLDFVLIDALGREWQCGTFQLDFILPERLDAKFVDSDSEKYNPVLIHR

SEQ ID NO: 189312 - protein, 299 aa, Unknown
  Bacterial polypetide isolated from the Sargasso Sea
QGLKSYRDLPIKYAEFGVVHRNEPSGTLHGLMRIRAFTQDDAHIFCTPEQIEDEIKKLISTIYHIYKIFGFTDIKVELSTRPEKRVGSEEIWDKSENALKSALDSCDIDWVLNAGDGAFYGPKIDFSLKDSLERVWQLGTIQLDFSMPTRLDASYIDSNGNKLAPVMIHRAILGSLERFVGILIEEYAGDLPLWLSPIHAVVLNISNNQVNYCDEICKKLNSLGIRTEKDLRNEKISYKVREHSMRRTPYLIVIGDNEVENNELSIRTRAGKDLGIMKVDKFIKMVDTLVCDKSILLNN

SEQ ID NO: 189313 - protein, 339 aa, Unknown
  Bacterial polypetide isolated from the Sargasso Sea
MFQSLINYMRLRQDRADYVETSTPELLDKSLWETSGHWEKFSENMFTTDPKEEKVFAIKPMNCPGAVEVYKQGLKSYRDLPLRMAEFGKVHRYEPSGALHGLMRVRAFTQDDAHIFCTEDQITEESKIVCDLILSIYKDFGFNDVRIKFSDRPEKRVGDDRVWDKAEEALKQAMEATGLEYTFNPGEGAFYGPKLEFVLRDAIGRDWQCGTLQVDLNLPGRLGATYVAEDGQKKVPVMLHRALFGSLERFAGILIEHYAGHLPLWLSPSQVVVATITSESDNYAFDVKDQLSKNGLRTEADIRNEKIGYKIREHSNAKIPIILAVGKKEAKKKLFLLDA

SEQ ID NO: 189314 - protein, 574 aa, Unknown
  Bacterial polypetide isolated from the Sargasso Sea
MEINLPDGSVKELEKGSNGLDLAKSIGAGLAKSAVAVVVNGEQRDLLDELPDNSSVSIITIQSDEGLEIMRHTLTAQVLAKAIKNLYSDSRLAIGPTIENGFYYDVSTKTPISVEDLPKIENEMKRILENKSNIVKSLHSEKDAKKMFKQKGESLKVEIIDDADQTDNFQIYTNADEDFIDLCRGPHLPNLSFIGAFKLTKVSGAYWKGDSSNEMLTRIYGTAWRNEKELQKHLKSIEEAEKRDHRKIGKDMDLFHFQDEAPGMVFWHPKGWTIYATLKSYMSDMQKKADYKEINTPSVIDRKLWEKSGHWDKYRENMFITEIDEEHANEKRVNALKPMNCPGHVQVYNQGIRSYKELPFRLCEFGSCHRYEASGTMHGLMRVRGFTQDDGHIFLTEDQIESETAIFIDLLSKVYTDLGFNEFEIKLSTRPEQRVGSDEIWDKAELSLKNAIEKLGLEYRIDEGDGAFYGPKLDFVLTDAIGRKWQCGTLQLDFNLADRLDAQYVAEDGNKYNPVMFHRAILGSFERFIGILIENYSGNLPLWLAPTQVTVCSITDEADDYVKEISEMLRSKNI

SEQ ID NO: 189315 - protein, 514 aa, Unknown
  Bacterial polypetide isolated from the Sargasso Sea
PGLAKACIAGRVNGELVDACELIEADASLAIITAKDEEGLDILRHSCAHLLGHAIKQLWPQTKMAIGPVIDNGFYYDIDLDRTLTDEDLAALEERMLALAAKDYDVIKKKVSWQEARDVFEARGETYKVEILDQNIARDDQPGLYHHEEYIDMCRGPHVPNMRHCHHFKLQKMSGAYWRGDSNNKMLQRIYGTAWADKKQLKSYLQRLEEAAKRDHRKIGKQLDLYHMQEEAPGMVFWHNDGWTIFRELETFIRGKLKEYDYQEVKGPFMMDRVLWERSGHWEKYAQAMFTTQSENREYAIKPMNCPGHVQIFNQGLKSYRDLPLRMAEFGSCHRNEPSGSLHGLMRVRGFTQDDAHIFCTEEQIMEEVSACIRMVYDVYGTFGFENIVVKLSTRPEQRIGSDEAWDRAEAALAEALVLNGLKYDLQPGEGAFYGPKIEFTLHDCLDRAWQCGTVQLDFALPGRLGATYVGEDNERHVPVMIHRAILGSLERFIGILTEEYAGLFPTWLAPTQA

SEQ ID NO: 189316 - protein, 175 aa, Unknown
  Bacterial polypetide isolated from the Sargasso Sea
MPNIQLLDGKKITFTNSINGFDIIKKISKSLEKSALIIEVDGQLKDLSHEITKDSKVRVITSKDKEGLEVLRHDAAHIMAMAVQELFPGTQVTIGPVIENGFYYDFARKEPFTSDDLNKIEKKMSEIIDRDVKTKREVWKRDKAISHFKKIGEKYKAEIIESIPESEELSIYHPW

SEQ ID NO: 189317 - protein, 274 aa, Unknown
  Bacterial polypetide isolated from the Sargasso Sea
MPIITLPDGSKRVFEKSVTILEIAHSIGAGLAKATIAGKVNDVLLDATIPINKDSNVVIITSKDKEGIEIIRHSFAHLIGHAVKQIYSDIKMAIGPVIEDGFYYDIFSEYRFTPEDLIKIENRINKLIKTNYDVEILQVSKEEAIKTFKERDETFKLRIIEEIPEEGLINLYKHEEYIDMCRGPHVPNTRHLRHFKLLKLSGSYWRGNSENESLQRIYGTAWAKEKELNDYLTRIEEAEKRDHRKLGKKHSLFHIQEESPGMIFGIQMDGPSTK

SEQ ID NO: 189318 - protein, 591 aa, Unknown
  Bacterial polypetide isolated from the Sargasso Sea
MNKAEDTQLYRIRHSLAHVLAQAVLEIRPEAKLGFGPPVENGFYYDFDLEDPLSPEDLPEIEKRMKKIIKSRQTFECEELNGEEMRTRLAENGQDYKIEQVNDLDAEGEILTLYRNGPFWDLCEGPHVESTAEIPKNCFSLDSLAGAYWKGSEKNKMLQRVYGLAFESQEALKDFKEKRKMAMERDHRKLNIDQHYFVIDEEVGKGLPLWMPNGTVIREELEKLAKEQEFLDGYERVSTPHITRENLYHTSGHLPYYADSMFPPMEVDGEKMFLKPMNCPHHHLIYRSQPRSYRELPLRLAEYGTCYRYEQSGELAGLLRVRGLTMNDAHIYCTAEQVKEEFIRVMQLHLRYYELFGLENFWMRLSLAESDGAKYVNEPEVWARAEALVIEAMDEVGIPYESVRGEAAFYGPKIDFQVSNVIGREETASTNQLDLVMAERFGLTYRDQESVERAPMIIHRAPLGTHERFCAFLIEHYGGVFPSWLAPVQVRIIPVASAFFDYAEKLEKELKSRFIRSQVDLSTDSFGKKIRNGAVSKVPNLLILGEQETSEGSVTWQRYGTKERIKLGFDTFLTQFEEEIRNRSDWRITAN

SEQ ID NO: 189319 - protein, 439 aa, Unknown
  Bacterial polypetide isolated from the Sargasso Sea
VSGAYWRGDSKNEMLQRIYGTSWASQKDLDDYLKRIEEAEKRDHRKLGKEMDLFHFREESPGSVFWHEKGWTLFQKLINYMRAKQDLAGYKEVNTPEVLDRLLWEKSGHWEKYGENMYTSETPDEKVFAIKPMNCPGHIQVFNQGLKSYRDLPLRITEFGKVHRYEPSGALHGLLRVRAFTQDDAHIFCSEDQITSECLNVTNLILEIYKDLGFENVILKYADRPEVRVGEDEIWDKAEASLLKAVKASKLEYSINKGEGAFYGPKIEFVLRDAIGRDWQCGTVQVDLNLPGRLDASYVDKDGTKKVPVMLHRALFGSLERFIGILIENYAGKFPFWISPLQTVVIPISEGFEEYAKTVSNKIREAGITSMVDLKNHNLNYKIRDHSLAKIPLLIICGKKEVDSNSVTIRKLDSNKQENMELNSFLKKFSALNKAPSNI

SEQ ID NO: 189320 - protein, 330 aa, Unknown
  Bacterial polypetide isolated from the Sargasso Sea
FRDDMFTTDSENRNYAIKPMNCPCHVQVFNQGLKSYKELPIRLAEFGSCHRNEASGTLHGLMRARNFTQDDAHIFCTEDQIQDEVSNFISMLFEVYHDFGFDEIIIQFSTRPDNRVGSDEIWDKAEKALELAIEKNKLECELQPGEGAFYGPKIEFSLRDCIGRIWQCGTIQVDFSMPELLGASYVDEDSSKKVPVMLHRAVVGSMERFIGILIENYAGSYPIWLSPVQAVVVSITENQAEYARKVSNILKNHHFRVEHDLRNETIGLKIRDHAMQRIPYQIILGPREQDENTVAVRTRDGEDLGSMSLNDFIQRLDKDIEYLGRVDLGD

SEQ ID NO: 189321 - protein, 314 aa, Unknown
  Bacterial polypetide isolated from the Sargasso Sea
MNCPHHHKIFSSLPRIYRDMPVRLSEYGTCYRYEKSGQLFGLMRVRSLQMNDAHIYCTPNQFKKEFMDVCRMYIEYFELFNIEKYTMRLSLHDKEGLGEKYVNEPELWLETEQWVREALDEGGFNYSEVSGEAAFYGPKIDVQVWSAIGKEFTLATNQVDFVVPKRFNLSYKDPNGEQQTPICIHRAPLSTHERFIGFLVEHFGGNFPLWLAPVQVAILPVSDKTNEYARKINEKLIDVDIRTFLDDRSDKIGAKIRNAEINRINVMLILGPKEEKNNTVSVRRKISGDLGTIDQDMLISQLVKEIKDRSLTYS

SEQ ID NO: 189322 - protein, 283 aa, Unknown
  Bacterial polypetide isolated from the Sargasso Sea
RYAEFGLCHRYEPSGTMHGLMRVRAFTQDDGHIFCTEDQIESETGLFIKFLSSIYADLGFKNFDIKLSTRPEMRVGSDETWDKAEEALETAIKNLGYPYRIDEGDGAFYGPKLDFVLTDAIGREWQCGTFQLDFNLAERLDAGYVGEDGKKLIPVMIHRAVLGSFERFIGILIENYSGKFPFWLSPQQVVVASIVSDVNDYSSEIVESLKKEGILAEADLRNEKISYKIREHSSKKVPIILAIGNNEKKDRTVSIRRIGSTDTEVVDLKVAIKQIAKENTALN

SEQ ID NO: 189323 - protein, 370 aa, Unknown
  Bacterial polypetide isolated from the Sargasso Sea
MKNIKITLPDNSHKSVPIGTTPQGVADIIGSGLARAVVVAKVDGDLKDLNFPLQQDCSLELFTGDTEEGHDTLLHSTAHLMAQAVKSLFPNAKVTIGPTIENGFYYDFDVDNPFTDEVLEKIEIKMKELAKSGQEINRNELSAKEAVSLFKSMNEDYKVEIIEQINPDDIISTYIQSDFTDLCRGPHVSNTSKIKHFKLLSSSGAYWRGDENNKMLQRIYGTVFSSKEALKKHLENLEEAKRRDHRKIGKEMQLFAFDGDIGPGLPLWLPNGTVMIEELEVLAKDTEKKAGYSQVRTPHLTKGTIYEKSGHLDHYKESMYPEMEIDGVDYYVKPMNCPHHHKIYSSIPRSYRDMPVRLSEYGTCYRYEKS

SEQ ID NO: 189324 - protein, 493 aa, Unknown
  Bacterial polypetide isolated from the Sargasso Sea
MSEIKITLPDKSVRSYDEGVTPLDVAQSIGPRLAKDTIVASIDGDLVDISRKINHDCELTLYTGDSHEGHQVLLHSAAHLMAQAVKFFWPNAKLTIGPAIDNRFYYDFDLDYTFSEEDLIKIEKKMRELAENDYPCLRKELTRDEAADFFRDLDESYKLEILDDIPSDEMLTSYSQGDFVDLCRGPHVPSTGSIKYFNLLSTSGAYWRGDEKNKMLQRIYGTVFSTKEKLNSYLELLEEAKKRDHRKLGKELEIYAFDDEVGPGLPLWLPNGGIIIEQLEKLAKETEKDHGYHQVRSPHLTKGELYKKSGHLDLYKDSMFPAMDVDGNDYYVKPMNCPHHHKIYDASPKSYRDLPYRIAEYGTCYRYEKSGQLFGLMRVRSMQMNDAHIYCSQSDFNSEFLDVCNMYLEYFEIFGIKKYEMRLSLHDPKELGKKYINEPELWVETEKSVKDALIKGGINFVEIPGEAAFYGPKIDVQVWSAIGKEFTLATNQV

SEQ ID NO: 189325 - protein, 427 aa, Unknown
  Bacterial polypetide isolated from the Sargasso Sea
SGAYWRGDSNNEMLQRIYGTGWANQKDLDVYLQRIEEAEKRDHRKLGKEMDLFHFREESPGSVFWHEKGWSLFQKLVAYMRMKQDHAGYKEINTPEILDRSLWEKSGHWEKFGANMYTSTTPDEKVFAIKPMNCPGCVQVFNQGLKSYRDLPLKMSEFGKVHRYEPSGALHGLLRVRAFTQDDAHIFCTEDQITEECLSVTNLILEIYKDLGFEDVILKYSDRPDLRVGEDDVWDKSEAALLEAIKASKLEYSINKGEGAFYGPKIEFVLRDAIGRDWQCGTLQVDLNLPGRLGASFVDKDGSKKVPVMLHRALFGSLERFIGILIENYAGKLPFWLSPTQTIVIPISNDFDDYAKDVNTQLKKSGIMSEVDLKNHNLNYKIREHSLTKVPMLLICGKKEVDSNTVTIRRLDSKKQESMDLKEFIKQ

SEQ ID NO: 189326 - protein, 433 aa, Unknown
  Bacterial polypetide isolated from the Sargasso Sea
LQRIYGCAFLNKEQLKNHLKMLEEAAKRDHRKLGREMKLFHIQEEAPGQIFWHPNGWKIYTTLQDYMRRKQEQDGYVEVNTPQLVDRKLWEASGHWEKYQENMFIVEVDEEHAREKAVNALKPMNCPCHVQVYNQGLKSYRDLPLRMAEFGSCNRYEPSGALHGVMRVRGFTQDDAHIFCREDQIESETKKFINFLSDVYKDLGFKKFSIKFSDRPEKRSGSSEVWDKAEDALKSATTAAGYEFEINPGEGAFYGPKLEFVLTDAIGRDWQCGTLQVDFVLPDRLDANYIGEDGNKHRPVMLHRACLGSFERFIGILIESFAGRLPFWLAPRQVVVAAIVSDANDYCENVVSALRAKGIRAEVDLRNEKINYKVREHSVSKVPVILACGMKEIADQTVSVRRLGEKHTKVEQLSEMINQLTEEAKSPDQLAAN

SEQ ID NO: 189327 - protein, 488 aa, Unknown
  Bacterial polypetide isolated from the Sargasso Sea
MVSLRLPDGSVKKFPKPVTGVEVAKEIGPGLAKAALAIRVNGAFADLKTQINADSEFSVVTASDGDALELIRHDAAHSLAQSVQELFPDTQVTIGPAIENGFYYDFARETPFSSDDFSDIEKRMEEIVDRDLPIEREIWDRNKAIEYFKSKGESYKAELIQDLPQNEEIIIYKQGDWIDLCRGPHLPSTGKLPLAFKLTKIAGAYWRGDSTKEMLQRMYGTAWANKKQLANYLTMLEEAEKRDHRRLGREMDLFHFQEHAVGSVFWHPKGWTLYRIIMDYIRVKLELAGYQEVNTPQLVDSSLWKDSGHWDKFREQMFISEAEDKVLAIKPMNCPCHVQIFRQGIKSYKELPIRMAEFGSCHRNEPSGALHGLMRVRAFTQDDAHIFCTEDQIVSETEKFCSLLMEIYKAFGFENIQIKFSDRPENRAGENKVWDQAEKALIEAVEVAGYSYELNPGEGAFYGPKLEFVLRDAIGRDWQCGTLQVDFV

SEQ ID NO: 189328 - protein, 579 aa, Unknown
  Bacterial polypetide isolated from the Sargasso Sea
MSNNEPFIDILRHDTAHVLAMAVQELFPDTQVTIGPVIENGFYYDFDRKEPFTEKDLGTIEKKMKEIVNRDEKTSFKVMSREDAIKLFSDKGENYKVEIIRDLPESEELKVYYHGEWFDLCKGPHLESTGKIGKAFKLTKVAGAYWRGDSNNPMLQRIYGTAWETQEDLENYLNLLKEAEKRDHRKLGKELDLFHFQEEAPGSVFWHAKGWTLFRTLIDYMRHRQEEAGYEEINTPDIMDKSLWERSGHLEKFGDNMFTTEAREERVYALKPMNCPGCVQVYKQGLKSYRDLPLRVAEFGKVHRYEPSGALHGLMRVRAFTQDDAHIFCTEDQITEESKKVCDLVLSIYKDFGFENVSIKFSDRPEKRVGNDDVWDKSEAALREAMEATGLEYTLNPGEGAFYGPKLEFILKDAIGREWQCGTLQVDLNLPERLGGHYVAEDGQKHNPVMLHRALFGSLERFTGILIEHYAGNLPLWLAPIQAVVAPITSDINEYAERVFLSLKNKGIRVEKDLRNEKISYKIRENSLKKIPYQLILGKNEMEDNTVTLREFGNDKQEKIKFEKLNDFFQKKCMMPSHQ

SEQ ID NO: 189329 - protein, 247 aa, Unknown
  Bacterial polypetide isolated from the Sargasso Sea
MPKIKLPDGSEKEFDKPINFDELASSIGSGLAKATVAGLLNGKLVDASELIETDSDAVLVTNSDDDGIEIIRHSCAHLFGHALKQLYPEAKMAIGPTIENGFYYDIDLEESLSENDLEKIELRMKELAQTKYNVVREVVTRKKALDTFKDRNEPYKIEIINEIPDDEIIALYHHNEYIDMCRGPHVTSVRHLKAFKLTKIAGAYWRGSSDNKMLQRVYGTAWASEKELNKHLILLEEAEKRDHRKLG

SEQ ID NO: 189330 - protein, 524 aa, Unknown
  Bacterial polypetide isolated from the Sargasso Sea
MPIITLPDGNNIDFPNKVTGVEVAEKISKSLAKQAIVISVNGELKDLDYLIENDCSVKIFTSKNPEGLETIRHDTAHILAMAVQELFPGTQVTIGPVIENGFYYDFARKEPFTEDDLIKIENKMKEIVDRNEITKREVWDRNKAISHFKKKGEIYKAELIKAIPENEDVSIYFHGEWHDLCRGPHLSSTGKIGKNFKLTKVSEAYWRGDSNNEMLQRIYGTCWSNKEQLKLYLDRLEEAEKRDHRKLGKEMDLFHFREESPGSVFWHEKGWILFQRLVEYMRFRQRLDGYKEINTPELLDKTLWEKSGHWEKFAEHMYTSETPDEKVFAIKPMNCPGCVQIFNQGLKSYRDLPLKLSEFGKVHRYEPSGALHGLLRVRAFTQDDAHIFCTEDQITQECLSVTNLIIDIYKNLGFEKVILKYSDRPEKRVGDDKIWDKSEAALLTAIKKSKLEYSINKGEGAFYGPKIEFVLQDAIGRDWQCGTLQVDFNLPGRLGASYVDKSGGKQVPVMLHRALFGSLERFIG

SEQ ID NO: 189331 - protein, 641 aa, Unknown
  Bacterial polypetide isolated from the Sargasso Sea
MKITLPDKSVRELPDGSSGYDVAKDIGPGLAKSAVAIIVNGEKKDLHDIIEKDSTASIITIDSEDGLEIMRHTLAAQVLAKALKNLYPKSYLAIGPTIEDGFYYDIETSQSISVDDLEKIEKEMNKIISSKSSITKRIASKKDALKVFKSLEEPYKQTIINESDQKDNFQLYYQDQDSFVDLCKGPHLPNLSFIGSFKLTKVSGAYWKGDSKNTMLTRIYGTAWNSDKDLNKHLNSIEEAQKRDHRKLGREMDLFHFQDEAPGMVFWHPDGWTIYRQLQNFVRQKIESNGYVEINTPLVIDRKLWEASGHWDKYRENMFITEIDEEHANEKRVNALKPMNCPGHVQIYNQGIKSYKDLPLRFAEFGACHRYEPSGTMHGLMRVRGFTQDDGHIFCTEDQIESETGLFINLLSDIYADLGFKDFNIKLSTRPEVRVGSDKTWDKAEQALESAIKNLGYPYKLDEGDGAFYGPKLDFVLTDAIGRAWQCGTFQLDFNLADRLDAEFVGEDGKKHIPVMIHRAVLGSFERFIGILIENYSGKLPFWLAPKQVVVASIVSEVNDYVMEIQELFKNKGIRTEVDLRNEKISYKVREHSSKKVPIILAIGKNEKANNTVSIRRIGSNDSKVMDLNKAVQEITKENTI

SEQ ID NO: 189332 - protein, 296 aa, Unknown
  Bacterial polypetide isolated from the Sargasso Sea
FNLHQGIKSYKDLPLKYAEFGLCHRYEPSGTMHGLMRVRAFTQDDGHIFCTEDQIESETGLFIEFLSNLYADLGFKDFDIKLSTRPEMRVGSDEIWDKAEEALEAAIKNLGYPYRIDEGDGAFYGPKLDFVLTDAIGREWQCGTFQLDFNLAERLDATYIGEDGKKHIPVMIHRAVLGSFERFIGILIENYAGKLPFWLAPQQVVIASIVSDANDYALEIQQSLKDNKIRCEVDLRNEKISYKVREHSTKKVPIILAIGKKEMADKTVSLRRIGSNESSVLSLDDAIKDITKESRA

SEQ ID NO: 189333 - protein, 102 aa, Unknown
  Bacterial polypetide isolated from the Sargasso Sea
WLAPVQAVILNITDRQQAFALETEKFLKKQGLRVETDLRNEKIGYKIRESTLKRVPYLLVVGDREVEQGCVAVRTRDGEDLGTFAVADLLDQCLRPNAGARR

SEQ ID NO: 189334 - protein, 278 aa, Unknown
  Bacterial polypetide isolated from the Sargasso Sea
MKLTLPDKSIRDLENGSSGFDLASDIGPGLAKAAVAVTVDGVQKDLHDPIMQDSSVSIITIDSEEGLEIMRHTLTAQVLARAVKNLYPKSKLAIGPTIKDGFYYDVECDETISVDDLKNIEKEMDKIIKTKSSIKKKLLSKKDALKVFKDKDESYKEEIINDSDQENEFQLYYQDDEDFVDLCKGPHLPSLNFIGAYKLTTISGAYWKGDSSNTMLTRIYGTAWSNEKDLKEHLNNIEEAQKRDHRKLGKEMDLFHFQDEAPGYGFLASRMDGLFIEI

SEQ ID NO: 189335 - protein, 317 aa, Unknown
  Bacterial polypetide isolated from the Sargasso Sea
TPDEKVFAIKPMNCPGHVQVFNQGLKSYRDLPLRYAEFGKVHRYEPSGALHGLLRVRAFTQDDAHIFCSEDQITSECLIVTNLILDIYKDLGFENVILKYADRPEVRVGEDEVWDKAEASLLEAVKASKLEYSINKGEGAFYGPKIEFVLRDAIGRDWQCGTLQVDLNLPERLGASYVDKDGTKKIPVMLHRALFGSLERFIGILIENYAGKFPFWISPLQTMVIPISEEFNDYAIEISKKIKNVGISSSVDLKNQNLNYKIRDHSLAKIPLLLICGKKEVDSNSVTIRRLDSNKQENMDIDAFLKTFSALNKASSN

SEQ ID NO: 189336 - protein, 423 aa, Unknown
  Bacterial polypetide isolated from the Sargasso Sea
RIYGTAWNNEKDLVNTLTMLEEAEKRDHRKLGKAQQLFHIQEEATGSIFWHPSGWTIYQEIEAYIRRRLNKAQYHEVKTPQLIDRKLWENSGHWEKFGEHMFTTESDEDQTLALKPMNCPGHVQIFKQRLKSFRDLPLRLSEFGACHRNEPSGALHGIMRVRAFTQDDAHIFCTEEQINQESVSFCELLRSIYNDFGFEDITIKFSDRPDIRAGDDKTWDQAEKALMDASNAAGLEVIMNPGEGAFYGPKLEFVLKDAIGRDWQCGTLQVDFVLPERLKAEYISTDGSKKRPVMLHRAILGSMERWFGILIEQYAGRWPLWLAPNQIKICTITQNTDSYAEDIKIQAEKLGLRVSVDKRNEKIGYKIREHSENKVPILLIIGNKELENKEVSVRQLGSKNQVNLDINKALLKFKSEALPPRSC

SEQ ID NO: 189337 - protein, 286 aa, Unknown
  Bacterial polypetide isolated from the Sargasso Sea
VYRYEQSGELHGLSRVRGFTVDDAHIFCTPEQVDSEFKNTIDLVLYVFRSLGFENFFAQVSLRDDNKPEKYIGSKKNWEISENAIIDAAKEKGLSYKIEYGEAAFYGPKLDFMVKDALGRSWQLGTIQVDYNLPERFELSYKGPKNEDLRPVMIHRAPFGSMERFVAILLEHTGGLFPLWLATTQIEILVVSENYKNYGQKVLNILENHEIRAHLDDRNETVGKKIRESEINKIPYMIIIGENEEKNETVSIRKHKEGDLGEMKIDKFLDIFKKEISDSIPEFNIN

SEQ ID NO: 189338 - protein, 210 aa, Unknown
  Bacterial polypetide isolated from the Sargasso Sea
MPAITLPDGSIKNYDHPESIYKVAADIGPGLASATIAGEVDGKLCDACDLIEHDGTLRIITNKDEEGVDVIRHSCAHLIGHAVKQLFPEANMVIGPIIENGFYYDIAVEKPFTPDDLQVIEDRMRSLIKQKYDVVKKMTPRDEVIAEFENRGEQYKLKLIEDMPEEEAMGLYYHQEYIDMCRGPHVPNTSFLENFKLTKVSRAYWRGDSR

SEQ ID NO: 189339 - protein, 568 aa, Unknown
  Bacterial polypetide isolated from the Sargasso Sea
MKITLPDKSVRELEDGSTGYDLAKDIGPGLAKSAVAVTIDGEKHDLNDVIEKDSSVSIITIDSDDGIEIMRHTLTAQVLAKALKNIYPKSYLAIGPVIDDGFYYDIETDESISIDDLEKIEKEMHKIISSKSFITKKLLNKKDALKVFKTLKEPYKQSIINDSDQKDNFQLYYQDDDSFVDLCRGPHLPNLSFIGSFKLTKVSGAYWKGDSKNTMLTRIYGTAWNNDKDLNKHLNSIEEAQKRDHRKLGKEMDLFHFQDEAPGMVFWHPDGWTIYRQLQNFVRKKIESNGYVEINTPLVIDRKLWEASGHWDKYRENMFITEIDEEHANEKRVNALKPMNCPGHVQIYNQGIKSYKDLPLRFAEFGACHRYEPSGTMHGLMRVRGFTQDDGHIFCTDDQIESETGLFIKLLSDIYANLGFKNFNIKLSTRPEVRVGSDKTWDKAEQALESAIKNLGYPYKLDEGDGAFYGPKLDFVLTDAIGRAWQCGTFQLDFNLADRLDAEFVGEDGKKHTPVMIHRAVLGSFERFIGILIENYSGKLPFWLAPKQVVIASIVSEVNDYVMEIQSY

SEQ ID NO: 189340 - protein, 398 aa, Unknown
  Bacterial polypetide isolated from the Sargasso Sea
MKITLPDNSSRELPEGSSGYDLAKDIGPGLAKSAVAVTINGIQKDLHDVIEGDVSASIITIDSDEGIEIMRHTLTAQVLARALKNIYPSSKLAIGPTIDDGFYYDIETEDAISIDDLEKIEDEMIKIVKTKSSITKKLVGKEDALKIFKSQKETYKESIIEESEQINDFQLYYQDDEKFVDLCRGPHLPNLSFVGAFKLTKVSGAYWKGDSKNKMLTRIYGTAWKNEKELNKYLTTLDEAQKRDHRKLGKEMNLFHFQDEAPGMVFWHPDGWTIYRNLRNFVRKRLQDNNYIEVNTPQVIDRKLWEASGHWDKYRENMFITEIDEEHANEKRVNALKPMNCPGHVQIYNQGIKSYKDLPLKYAEFGLCHRYEPSGTMHGLMRVRAFTQDDGHIFCTED

SEQ ID NO: 189341 - protein, 641 aa, Unknown
  Bacterial polypetide isolated from the Sargasso Sea
MSDKITITFPDGNFRSVKKGINGFEIAEEISKSLAKESIAIKINSEIFDLKRRIEKDAKIQIIKKSDEEALDILRHDCAHVMAEAVQSLFPETQVTIGPSIENGFYYDFAREEPFTLSDLPKIEKKMHEIISLGEKFTREVWSREETIKFFKDKGEDYKVELIEELDPNEEITIYKQGEWLDLCRGPHMISTKQIGKGFKLMKVAGAYWRGDSNNTMLTRIYGTAWRNEKELENHLQQIEEAEKRDHRKLGKEMGLFHFQEEAPGGVFWHPKGWQLFQSLINYMRLRQDRADYVETSTPELLDKSLWETSGHWEKFSENMFTTDPKEEKVFAIKPMNCPGAVEVYKQGLKSYRDLPLRMAEFGKVHRYEPSGALHGLMRVRAFTQDDAHIFCTEDQITEESKIVCDLILSIYKDFGFNDVRIKFSDRPEKRVGDDRVWDKAEEALKQAMEATGLEYTFNPGEGAFYGPKLEFVLRDAIGRDWQCGTLQVDLNLPGRLGATYVAEDGQKKVPVMLHRALFGSLERFAGILIEHYAGHLPLWLSPSQVVVATITSESDNYAFDVKDQLSKNGLRTDADIRNEKIGYKIREHSNAKIPIILAVGKKEAEEKTVSVRRLGSQETLVLKLDELISDLKKESLSPIN

SEQ ID NO: 189342 - protein, 411 aa, Unknown
  Bacterial polypetide isolated from the Sargasso Sea
MQHQTQWSVIVNDIDHRVLGNKLDLFHQQEEGAGMVFWHPRGWELYRVLEDYIRARMRRAGFREIRTPQLLARSLWEKSGHWEKFGAAMYSLADAEEGRALCLKPMSCPCHVQVFNQRVRSYRELPVRYSEFGACHRDEPSGSLEGLKRTRAFVQDDAHVFCTEAHIEAEVGRFCALLRAVYADLGFPAFKVALATRPAMRAGNDQTWNRAEDALANAARAAGLEFDVLEGEGAFYGPKLEFHLTDSRERSWQCGTIQLDFVLPERLDAEFVNERNERERPVMIHHAVLGSMERFIAMLLEHHEGWLPVWLAPEQVVVATISDANAAYAQEVMQALEDAGIRALLDGRPERLEKKIVDAREKQVPIFVAVGSRDERDRTISIRMRDGQQSTLALAEGVERLRLAALPPATR

SEQ ID NO: 189343 - protein, 414 aa, Unknown
  Bacterial polypetide isolated from the Sargasso Sea
KPINFDELASSIGSGLAKATVAGLLNGKLVDASELIETDSDAVLVTNSDDDGIEIIRHSCAHLFGHALKQLYPEAKMAIGPTIENGFYYDIDLEESLSENDLEKIELRMKELAQTKYNVVREVVTRKKALDTFKNRNEPYKIEIINEIPDDEIIALYHHNEYIDMCRGPHVTSVRHLKAFKLTKIAGAYWRGSSDNKMLQRVYGTAWASEKELNKHLILLEEAEKRDHRKLGKELDLFHFQDIAPGMVFWHANGWSIYKELEDYIRRKISKEGYKEIKTPQILDKDLWVESGHWDKYKDNMYRTIIDDRELMIKPMNCPGHVQIYNQGIKSYKDLPLRMAEFGSCHRNEPSGALHGLMRVRNFVQDDAHIFCTEDQIESETVNFCKLLQEVYNELGFNEVSIMYADRPEQRVGS

SEQ ID NO: 189344 - protein, 456 aa, Unknown
  Bacterial polypetide isolated from the Sargasso Sea
MINVSFPDKSVKKFEKGTKVIDIAKSISEGLARKVISASYNDEIVETESPINEDGSIKLFTWDDDEGKQAFWHSSAHILAQTIKSFYPKSKLTIGPSIENGFYYDVDFGDDVFSEKDFNKIESKFLELARENHSFAMKSVSKKEAIDFYKLENNEYKVELIEGLEDGSITFCDHSNFSDLCKGGHIPSTGIVKAVKLLNVAGAYWRGDEKNNQLTRVYGISFPKQKLLTEYLELLEKAKERDHRKIGKELELFTFSNRVGHGLPLWLPNGTELRDRLQDFLEDAQRRAGYKKVMSSHIGAKELYETSGHYEKYGADSFQPISTPNETETFILRPMNCPHHCEIYNAKPQSYRDLPLRLAEFGTVYRYEQSGELHGLSRVRGFTVDDAHIFCTPEQVDSEFNNTIDLVLYVFNSLGFHDFSAQVSLRDPNNPDKYIGSDKNWEISEQAILNSAKEKG

SEQ ID NO: 189345 - protein, 590 aa, Unknown
  Bacterial polypetide isolated from the Sargasso Sea
DMIDADAQLQIISAKDDEGLEILRHSCAHLLGHAIKQLWPNTKMAIGPVIDNGFYYDVDMEESLTQEDLAKLEKRMLELAKTNYDVVKNKVSWQEARDAFEARGESYKMEILDENISKDDRPALYHHEEYTDMCRGPHVPNMKFCHHFKLMKVAGAYWRGDSDNKMLQRIYGTAWADKKQLKSYLQRLEEAEKRDHRKIGKALNLFHWQEEAPGMVFWHNDGWSIYTELESYVRKKLREYGYDEVKGPLMMDRSLWEKSGHWDKYAENMFTTESEKREYAVKPMNCPGHVQIFNQGLKSYRDLPLRMAEFGCCHRNEPSGALHGLMRVRGFTQDDAHIFCTEEQILEEVSGCIKMVYETYAAFGFENIKVKLSTRPEKRVGADEIWDKSEAALADALKANDIEFDYQPGEGAFYGPKIEFTLHDCLDRAWQCGTVQLDFSMPGRLGSTYVAEDGERKVPVMIHRAILGSLERFIGILTEEFAGFFPLWLAPQQVVVMNITDKQADYASNCVKKLQDLGFRAKSDLRNEKIGFKIREHTLKRIPYMLVVGDKEMEAGEVAVRSRRGDDLGKMSLEDFIAMAQQEVVEKTIK

SEQ ID NO: 189346 - protein, 358 aa, Unknown
  Bacterial polypetide isolated from the Sargasso Sea
QIEAGYEEINTPQVVDRKLWEESGHWDKYRENMYITEIDEEHANEKRTNALKPMNCPCHVQIYNQGLKSYRDLPVRFAEFGSCHRYEPSGTLHGLMRVRAMTQDDGHIFCTEDQIESETKNFINALSSVYEELGFTKFEIKLSTRPEVRVGSDKVWNKAELALENAIKNLDLPYEVSEGEGAFYGPKLDFVLTDALDRDWQCGTLQADFNLPERLDTNYVGEDGNKHRPVMLHRAMLGSFERFIGILIEHHGGALPVWLSPIQAQILNITDKHSKYSEKIRNLLQKSGFRAQSDLRKEKITYKIRDHSMQKTPYLLVVGDKEMENETVSVRARGGEDLGEMSTSDFMDILEIKIKAKE

SEQ ID NO: 189347 - protein, 553 aa, Unknown
  Bacterial polypetide isolated from the Sargasso Sea
MLQIKFPDGNTKNFEKNISILEVAKSISNSLAKEAVAGRVNGQLKDLCVQIEQDCELEIIKKSDPDGIDIVRHSFAHLTGHAIKQMYPDAKMAIGPVIKNGFYYDIELSENLSDLSLKKIEKQIDKLIKQNYDVVREVVSPEKAIEVFQQRNENYKVEIVNEIPKDEIIALYHHQEYIDMCRGPHVPNTKFLRHFKLTKISGAYWRGDSKNKMLQRIYGTAWDTKEDLANYLTKIEEAEKRDHRKLGKQLNLFHFQETAPGMVFWHPKGWTIYQLLQKFMREINSDSGYQEINTPQILDRTLWEKSGHWDKFGEMIFTTQSEKRDYAVKPMSCPGHLQVYNQGLKSYRDLPLKLCEFGLVHRNEPSGTLHGLMRARQFVQDDAHIFCTESQLHEEITKLIKLTFEVYEKLGFENIKVALSTRPEKKVGSDDIWNKSEKILEDALNENVSDFETLPGEGAFYGPKIEFTLTDSLERDWQCGTVQLDFSMPGLLEASFVDEDNVKKTPVMIHRAVLGSMERFIGILIEHYGGNLPFWLAPTQIMIASITEKHVES

SEQ ID NO: 189348 - protein, 179 aa, Unknown
  Bacterial polypetide isolated from the Sargasso Sea
MPVITLPDGSQRAFDNAVSVLDVANDIGPGLAKATIAGKVNGELVDAVDMIDADAQLQIITAKDDEGLEILRHSCAHLLGHAIKQLWPNTKMAIGPVIDNGFYYDVDMEESLTQEDLAKLEKRMLELAKTNYNVVKNKVSWQEARDAFEARGESYKMEILDENISKDDRPALYHHEEYT

SEQ ID NO: 189349 - protein, 645 aa, Unknown
  Bacterial polypetide isolated from the Sargasso Sea
KEITITLPDGSQKKAPVGVSGHEIASMIGAGLAKAAIAFSVNGNQRDLSDTVNQDADISIYTLDSDEGLEIMRHTVAAHVLARAIKNLYPKAKLAIGPTIENGFYYDFLSEERVSIDDLPKIEKEMEKIVASKSKIIKTIHSKKDAIKSFADINEEYKVKIIEESDQEDSFQIYSQGDTGFIDLCRGPHLPSLDKVGAFKLTKISGAYWKGDSKNEMLSRVYGTAWKNAKDLKKHLTLIEEAEKRDHRKLAKEMDLFHLQEEAPGMVFWHAKGWSIYITLQNYVRKKQIANGYQEINTPMVVDRKLWESSGHWEKYRENMFITEIDEEHANEKRVNALKPMNCPCHVQIYNQGLKSYRDLPVRLAEFGSCHRYEASGTMHGLMRVRGFTQDDGHIFCTEDQIESETADFISLLSEIYTELGFESFDIKLSTRPEIRVGSDDVWDKAEAALESAIKKLEIPYKVEAGDGAFYGPKLDFVLTDAIGREWQCGTFQADFNLPDRLDAEYIGEDGSKYRPVLMHRAILGSFERFIGILIENYSGKLPLWLAPTQLAILTVTEEVNEYAETLKEKFNEFNLRVDLDLRNEKIGYKIREHSNAKVPFMAVIGKEEMSAQTVSIRNLRENKTDTYSIDEAVSKLSEESKSPN

SEQ ID NO: 189350 - protein, 637 aa, Unknown
  Bacterial polypetide isolated from the Sargasso Sea
MPNITLPDGNILTFDNKVTGLKIAEKISKSLLKQALVMSVNGDLKDLDYEIDSDCSVKIYTSKDKEGIETIRHDTAHILAMAVQELFPGTQVTIGPVIDNGFYYDFARKESFTSEDLKKIEKKMQEIVERDEPTHKEVWERDNAIEHFKKAGEIYKAEIIKSIPKGEEVSIYFHGKWHDLCRGPHLLSTGKIGKFFKLTKVAGAYWRGDSNNEMLQRIYGTSWSSQKDLDDYLKRIEEAEKRDHRKLGKEMDLFHFREESPGSVFWHEKGWNLFQKLISYMRNKQDEAGYKEINTPEVLDRSLWEKSGHWEKFGANMYTSTTPDEKVFAIKPMNCPGCVQVFNQGLKSYRDLPLKMSEFGKVHRYEPSGALHGLLRVRAFTQDDAHIFCTEDQITEECLSVTNLILDIYKDLGFENVILKYSDRPDIRVGDDEVWNKSEKALLEAIKESKLEYSINKGEGAFYGPKIEFVLRDAIGRDWQCGTLQVDLNLPGRLGASFVDKDGSKKVPVMLHRALFGSLERFIGILIENYAGKLPFWISPLQTMVIPVSNDFDNYAVEVNKKLKKSGITSEVDLKNHNLNYKIREHSLTKIPLLLICGKKEVDSNTVTIRRLDSNEQENIGLKKLIEKFSSLAKSPS

SEQ ID NO: 189351 - protein, 500 aa, Unknown
  Bacterial polypetide isolated from the Sargasso Sea
MSEVVAYKDSNNNYWDTEVENSTPIKHKSEDALNIMRHDMAHILAEAVISLFPNAKPTIGPFIKNGFYYDFDMESTLSDDDLENIEKKMREILLEGRDFLKRAVSKKEALEIFKDNKYKLELINNLDNSDEITLYEQNNFTDLCKGPHHKSTKDYNASFKITSVSGAYWRGISTNKMLQRIYATAWYSEKELRVYLKNLEEAKERNHRRLGTDMGLFLLTDLSAGNVFWKDKGLTLYQNIEKYIRSEQQKLNYFEVKTPELVSNELWIKSGHWDNFKENMFTSETDNKTFALKPMNCPCHIVLFNSQLITYKDLPLRYSEFGKCHRYEPSGALNGLFRVRGFTQDDAHIFCSGDQIYDVCNETTQLIERVYKKFGFEKIKFNISTRPEKSIGTQENWYNAENQLKKVLKDNNKEFNILEGEGAFYGPKIEYTLEDSLGREWQCGTIQIDFNLPDRLGAKYKDKDDKNQVPIMIHRAVVGSLERFIAIILENTNGWLPIIC

SEQ ID NO: 189352 - protein, 639 aa, Unknown
  Bacterial polypetide isolated from the Sargasso Sea
MIHITLPDGSQREFPGPVTVAEVAASIGSGLAKAALAGKIGDKVVDTSYQITADSPLSIVTAKDADGLDVIRHSTAHLLAYAVKELFPDAQVTIGPVIENGFYYDFAYKRPFTPEDLVAIEKRMAELAAKDEPVVRRVLPRDEAVAYFKGLGEHYKAEIIASIPSNEDVSLYREGNFEDLCRGPHVPSTGKLKFFKLMKVAGAYWRGDHRNEMLQRVYGTAWASKDELQQYLTMLEEAEKRDHRKLGRELDLFHIDEHSPGTVFWHPKGWTVWQEVEQYMRRVYRENGYQEVKGPQILDQGLWEKTGHWDKYRENMFVTESEKRDYALKPMNCPGHIIIFKQGIKSYRDLPLRFGEFGQCHRNEPTGGLHGIMRVRAFTQDDGHIFCTEDQIQSEVVAFTTLLQKVYKDFGFTDIIYKLSTRPEKRIGSEESWDRAENALAEGLRASGCEFEYLPGEGAFYGPKIEYTLKDALGRPWQCGTIQVDPNMPERLDAEFVGEDGGRHRPIMLHRAIVGSLERFIGILIEQHAGALPTWLAPVQVSVLNITDAQSDYCREIAAKLQKALPNQGLRVALDLRNEKITYKIREHSMQKLPYILVAGDKEKAAGAVAVRARGNRDLGVMSVDAFIELIANDIATKA

SEQ ID NO: 189353 - protein, 119 aa, Unknown
  Bacterial polypetide isolated from the Sargasso Sea
MPNIKLPDGNTLAFDKKVTGLKIAEKISKSLSKQALVISVDGNLRDLNFEIENDCSVKIYTSKDKEGIEIIRHDTAHVLAMAVQELFPGTQVTIGPVIENGFYYDFARKETFTEEDLQK

SEQ ID NO: 189354 - protein, 269 aa, Unknown
  Bacterial polypetide isolated from the Sargasso Sea
MRHTVAAQVLARAIKKLYPKAKLAIGPTIENGFYYDFLSDERVSIDDLPKIEKEMKKIIAEKSNISKTIHSKKEAIKNFADIKEDYKVKIIEESEQEDNFQLYNQGDTGFIDLCRGPHLPSLDKVGAFKLTKIAGAYWKGDSKNEMLSRIYGTAWKNEKDLKKYLTLIEEAEKRDHRKLAKEMDLFHLQEEAPGMVFWHAKGWSIYVALQDYVRRKQIANGYEEINTPMVVDRKLWEASGHWDKYRENMFITEIDEEHANEKRVNALKP

SEQ ID NO: 189355 - protein, 473 aa, Unknown
  Bacterial polypetide isolated from the Sargasso Sea
QAEDFQIYKNEKSEFIDLCRGPHLPNLSHIGAFKLTKVSGAYWKGDSSNEMLTRIYGTAWRNKKELDQYLVQLEEAEKRDHRRIGKDLDLFSIQEDAGGGLVFWHPNGSRIRSEIENYWKNEHEKAGYELLYTPHIALDTLWQTSGHTDFYEESMYTPIDDENQSYRLKPMNCPFHVLIYKDKLRSYREFPIRWAELGTVYRHEMTGALHGLMRVRGFTQDDAHVFCAEDQIEQEISGILELAINMLNKFTFTEFEIHLATRPEKYVGSEEIWDKATDALTDALNQRGLNYEIDEGGGAFYGPKIDIKIKDAIGRLWQCSTIQLDFNLPERFDMRYIGSDGQRHHPIMIHRALLGSVERFFGILVEHFAGKFPLWLAPVQVCVIPINQKQHDYADSVHKILKKNGLRAEIDLRNEKIGSKIRDHTLNKVPYMVVLGDREVCDEEITIRTQKGDDLGNMKLESFLERVTEEINN

SEQ ID NO: 189356 - protein, 487 aa, Unknown
  Bacterial polypetide isolated from the Sargasso Sea
ESYKAEIIESIPKNEELSIYHHGDTWHDLCRGPHLVSSGKIGKAFKLTKVSGAYWRGDSNNEMLQRIYGTCWSSKDQLNQYLERLEEAEKRDHRKLGKEMDLFHFREESPGSVFWHDKGWILFQRLVEYMRFRQRLAGYKEINTPELLDKSLWEKSGHWDKFSEHMFTSETPDEKIFAIKPMNCPGCVQIFNQGLKSYRDLPLKLSEFGKVHRYEPSGALHGLLRVRAFTQDDAHIFCTEEQITAECLSVTNLIIDIYKSLGFDKIILKYSDRPEKRVGDDKIWDKSEAALLSAIKESKLNYTINKGEGAFYGPKIEFVLQDAIGREWQCGTLQVDLNLPGRLGASFVNKSGEKEVPVMLHRALFGSLERFIGILIENYAGKLPFWLSPLQAVVCPIAEDNNNYAKKLFEDLFKESIKCEVDLRNQKISYKIREHSLSKVPMILVCGKKEEKENTVTLRSLGSDKQQTFKREDLIKKIITHNKMPTN

SEQ ID NO: 189357 - protein, 388 aa, Unknown
  Bacterial polypetide isolated from the Sargasso Sea
MDLFHFQEEAPGAVFWHPKGWTLFQSLINYMRNRQDKAGYVETNTPDMMDKSLWETSGHWDKFSDMMFRTEAKDDKIYAIKPMNCPGAVEIFKQGLKSYRDLPFLLSEFGKVHRYEPSGALHGLMRVRAFTQDDAHIFCTEDQITEESKIVCDLILSIYKDFGFENVKIKFSDRPEKRVGDDAVWDKAEAALKQAMEATGLEYTFNPGEGAFYGPKLEFVLRDAIGRDWQCGTLQVDLNLPGRLGATYIGEDGNKKTPVMLHRALFGSLERFTGILIEHYAGHLPLWLSPLQVMVATITSYTDDYALLVKNKLIKEGIKAEVDLRNEKIGYKIREHSNSKIPVIIAVGEKESQEKTVSIRRIGSTETKTFKLDEITTTLSSEVKSPIE

SEQ ID NO: 189358 - protein, 534 aa, Unknown
  Bacterial polypetide isolated from the Sargasso Sea
MKITLPDESIKELPKGVTGLDVAESIGPGLAKSAIAVSIDGIQKDLSDPINSDCSLSVITLDSEEGLEIMRHTIAAQVLALAIKNIYPDAKLAIGPTIENGFYYDFLTENTISTEDLPKIEKEMKKIIAGKSEIKKSFHNKKDATGIFKKISENYKVEIIKESDQIDEFQIYKNLDTDFIDLCRGPHLPSLSQIGVFKLTKVSGAYWKGDSSNEMLTRIYGTAWRNKKELDEYLTQLEEAEKRDHRRIGKDLDLFSIQEDAGGGLVFWHPKGSRIRSQIEQYWKTEHEKGGYEILYTPHIALDTLWQTSGHTDFYEESMYTPIEDENQSYRLKPMNCPFHVLIYKDKLRSYRDLPIRWAELGTVYRHEMTGALHGLMRVRGFTQDDAHIFCSEDQIESEISEILELAINMLNKFTFTEFEIHLATRPEKYVGSEAIWDKATAALIKALEEKNLSYELDAGGGAFYGPKIDIKIKDAIGRLWQCSTIQLDFNLPERFDMRYVGSDGKKYHPIMIHRALLGSVERFFWNFSGTFCR

SEQ ID NO: 189359 - protein, 397 aa, Unknown
  Bacterial polypetide isolated from the Sargasso Sea
MPNIKLPDGKSINFKDKVTGFQIAEKISKSLSKQALIISVDGNLKDLNYEINKDCLVKIYTSKDKEGLETIRHDTAHILAMAVQELFPGTQVTIGPVIDDGFYYDFARKEPFTEEDLRKIEKKMLEIVERDEPTHREVWKRDKAVEHFKKVGEIYKAEIIKNIPKDEDVSVYFHGKWHDLCRGPHLMSTGKIGKYFKLMKVSGAYWRGDSNNEMLQRIYGTSWSSQKDLDDYLHRIEEAEKRDHRKLGKEMDLFHFREESPGSVFWHEKGWNLFQKLISYMRKKQDEAGYKEINTPEVLDRSLWEKSGHWEKFGANMYTSTTPDEKVFAIKPMNCPGCVQVFNQGLKSYRDLPLKMSEFGKVHRYEPSGALHGLLRVRAFTQDDAHIFCSEDQITEE

SEQ ID NO: 189360 - protein, 145 aa, Unknown
  Bacterial polypetide isolated from the Sargasso Sea
MPIITLPDGKSLDFPKKVTGLEVAEKISKSLAKDAMVISINGELRDLDYLIEKNCSIKIFTSKNEEGLETIRHDTAHILAMAVQELFPGTQVTIGPVIENGFYYDFARKEPFTEDDLKMIEKKMREIVDRDVKTKREIWDRDKAI

SEQ ID NO: 189361 - protein, 301 aa, Unknown
  Bacterial polypetide isolated from the Sargasso Sea
MEDLEKLRYNIRHSAAHIMAEAVMNIFPGTKIGIGPPTADGFYYDFDCPKQLSKEDFKNIEAEMKKIIKSKRKFTGAVVSRGEAAQRFSDQKYKLEIIEGIPENEKVTIWSHESWEDICKGGHVDSTNNIKAFKLLDVAGAYWRGDEKNKMLQRVYGTAWESKEEQKKYLEKLELAAKRDHRKLGTSLDLFYFDEFSPSMPFFLPKGTYIMNKLTDYMREKYNKYGYQEVITPQIFSSKLWDLSGHSSHFKENMFFTENDDNKMGIKPMNCPSHYLLFRSKLHSYKDLPIRYADFGRLHRK

SEQ ID NO: 189362 - protein, 198 aa, Unknown
  Bacterial polypetide isolated from the Sargasso Sea
NWSEEPGEAAFYGPKIDFVVKDVIGREWQLGTVQVDYNLPERFELEYKGSDGEMHRPVMIHRAPFGSMERFCGVLIEHFAGRFPTWLAPTMVHVLTISEKQVEYGHKVVDELKAAGIRVEIDDGDDTIGKKIRTHRKFHPAYMLILGDEEISQNSVSIRARNGDQRAGVKLSDFISEIVEEVATKVATPSIVAPSEDN

SEQ ID NO: 189363 - protein, 322 aa, Unknown
  Bacterial polypetide isolated from the Sargasso Sea
MKQITIRLPDKSTRQYDQGVTALQIATSIGERLANDTVAATVNENLVDATIPIMDDADLIIHTGDSKIGHEVLLHSAAHLMAQAVKKFWPTSQMTIGPVIENRFYYDFDIEGTFSDEDLLKIEEEMHNIAKENHDVSREDLSRDEAIKLFSKLNENYKVEIINEIDDSDRITAYKQGDFIDLCRGPHTPSTGNLKYFKLLSTSGAYWRGNENNKMLQRIYGTAFSKKSELKKYLNFLEEAKKRDHRKIGKELEIFTFDEEVGPGLPLWLPNGGVILNELESLAKETEDRHGYHQVRTPHLTKGDLYKKSGHLELYKDAMYPA

SEQ ID NO: 189364 - protein, 639 aa, Unknown
  Bacterial polypetide isolated from the Sargasso Sea
MPIITLPDGKNIEFPKEVTGLDIAEKISKSLSKQALIMSVNGELKDLYFSIKKDCSVKIFTAKDPEGLEVIRHDTAHIMAMAVQELYPGTQVTIGPVIENGFYYDFARKEPFTEDDLEKIEKRMSEIIDKDVKTRREVWNRDKAISHFKKIGEKYKAEIIESIPESEELTVYHHGDTWHDLCRGPHLVSSGKIGKAFKLTKVAGAYWRGDSNNEMLQRIYGTGWASQKDLDDYLKRIEEAEKRDHRKLGKEMDLFHFREESPGSVFWHEKGWALFQKLINYMRARQDAAGYKEVNTPEVLDRLLWEKSGHWEKYGENMYTSETPDEKVFAIKPMNCPGHIQVFNQGLKSYRDLPLRITEFGKVHRYEPSGALHGLLRVRAFTQDDAHIFCSEDPITSECLNVTNLILDIYKDLGFEKVVLKYADRPEVRVGEDKVWDKAEASLLEAVKATKLEYSINKGEGAFYGPKIEFVLRDAIGRDWQCGTVQVDLNLPGRLDATYVDKDGTKKVPVMLHRALFGSLERFIGILIENYAGKFPFWISPLQTVVIPISEDFEQYAIKVSKKIKEAGMSSIVDLKNHNLNYKIREHSLTKVPILLICGKKEVDSNSVTIRRLDSNKQENMELNKFLKTFSALNKASSI

SEQ ID NO: 189365 - protein, 415 aa, Unknown
  Bacterial polypetide isolated from the Sargasso Sea
FLLLQEEAKKRDHRKIGKELELFTFSEKVGQGLPLWLPNGAIVRECLIDFMKKEQIKEGYLPVVSPHIGSKDLYVTSGHYDKYGESSFQPIKTPNENEEFFLKPMNCPHHCEIYKFKPRSYKNLPLRLAEFGSVYRYEQSGELHGLTRVRGFTQDDAHIFCTNEQVKSEFIKVIDLILKVFDSLSFDDYSVQVSLRDKEDKSKYIGSDKTWEMAENDILEAVKEKKIKYSIEYGEAAFYGPKLDFMVKDSLNRKWQLGTIQVDYQLPERFQLDYITENNTKQTPVLIHRAPFGSLERFVALLTEHCYGNFPFWLAPIQMTILSISDKFNSYSDKIFKSLSKLNLRVIQDIRSEKISKKIRDAELKKIPYMIIIGENELKSNKISLRKHTEGDLGKMTLDDLISILKKEKNVIINN

SEQ ID NO: 189366 - protein, 175 aa, Unknown
  Bacterial polypetide isolated from the Sargasso Sea
MPNITLPDGKKLNFKNKINGLEIAEKISKSLIKQALIMSVNGELKDLSYSIQNDSSVKIITHKDKEGLDVIRHDAAHIMAMAVQELFPGTQVTIGPVIENGFYYDFARKEPFTSNDLEKIEKKMSEIIDKDVKTKREVWERDKAIVHFKKIGEKYKAEIIESIPENEELSVYHPR

SEQ ID NO: 189367 - protein, 191 aa, Unknown
  Bacterial polypetide isolated from the Sargasso Sea
MPIITLPDGNNIDFPNKVTGLEVAEKISKSLAKQAMVISVDGELKDLDFLIENDCSVKIFTSKNPEGLETIRHDTAHILAMAVQELFPGTQVTIGPVIENGFYYDFARKEPFTEDDLVKIENKMKEIVDRNEITKREVWERNKAISHFKKKGEIYKAELIEAIPENEDVSIYFHGKWHDLCRGPHLSSTGK

SEQ ID NO: 189368 - protein, 341 aa, Unknown
  Bacterial polypetide isolated from the Sargasso Sea
MEKIIITFPDGNKREYDAGITAEKVAQTISISLSKKAISADLDGAHWDLQWPIYKDAELSINTLKNKERAIELVRHDLAHIMARAVQEIWPKVKVTIGPVINHGWYYDFDHEEPFTPEDLGKIERKMREIINLRDVVRTELWDREKAIEYYTAKKEPYKIELIDAIPENDNIRMYWHGDWQDLCRGPHFQNTAQVPADAFKLMSVAGAYWRGDSNRQMLQRIYGVAFLNKENLREHLNMLEEAAKRDHRKLGKEMDLFHMQEEAPGQIFWHPNGWKIYTLLQDYMRRQQEVGGYVEVNTPQVVDRKLWEESGHWDKYQEHMFIVEVDEEHAREKSINALKP

SEQ ID NO: 189369 - protein, 648 aa, Unknown
  Bacterial polypetide isolated from the Sargasso Sea
MGNIVITLPDGSNKELPANSNGYDLANSIGSRLAKDSVAVVVNGLQRDLSDILPDKADVSIITKDSDEGVEIMRHTLSAQVLALAVKNLYPDAKLAIGPTIDDGFYYDFFMDKPISSDDLPKIEDEMIKIIKSNSKVTKSYHSKNDALKVFDDLDEGFKAEIINDSDQKDNFQLYTQDETGFIDLCRGPHLPNIGMCGEFKLTKVAGAYWRGDSTKPMLTRIYGTAWQTKKELSSYLEKLKKAEEVDHRKLGKEMNLFHFQDEAPGMVFWHPKGWTIYTHLQYYVREMQKRAGYREVNTPEVVDRKLWETSGHWEQYRENMFITEIDDEHANEKRTNALKPMNCPNHVQIYNQGIKSYRDLPFRLSEFGKCHRYEASGTMHGLMRVRGFAQDDGHIFCTEDQIESETKNFIDLLSSMYKDLGFTDFKIKLSTRPDKRIGTDESWDKAEKALQDGIEKLKLEYTIDEGDGAFYGPKLDFVLTDAIARKWQCGTLQVDFNLPGRFDSTYIGEDGSKHTPVLLHRAALGSFERFIGILLENYGGKLPVWLAPTQTVIAAITDEANDYAMSLNNELLNNGIRSELDIRNEQISYKVREHSLQKVPYIIAVGKKEIENQSVSVRRLGSEKTQSILLNDFVKTVVKEAKTPLES

SEQ ID NO: 189370 - protein, 426 aa, Unknown
  Bacterial polypetide isolated from the Sargasso Sea
MINITFPDKSVRKYESSITGNDLAKSISNSLAKSAVCIEINGELRDLSYLIENDAVCKIFTKEDQYSLDTLRHSTAHVMAQAVLNLYPGTEFAVGPSVDDGFYYDFLFKENIKETDLIKIENEMRKISKSQQDFVREEITKDQANKMFSNQTFKQELINSADKSEGVSEENISIYTNDKFNDLCRGPHVQNTSLIKHFKLTKLAGAYWRGIETNPQLQRIYGTAWFSKDDLDSYLKRQEEAEKRDHRKLGNELDLFISTEETGPGQYLWKPKGAVLRQIIEDYSKKAHSENGYDYAYTPHIGRSVLWETSGHLDYYKEGMFPPLKNQENDEEYYLKPMNCPFHILIYKSDIRSYKELPLRYFELGSVYRYEKSGVLHGLLRARGFTQDDAHIFCTTDQIEEEILNLLTFSIKLLNSFGFDSIEADL

SEQ ID NO: 189371 - protein, 114 aa, Unknown
  Bacterial polypetide isolated from the Sargasso Sea
MPNITLPDGKKISFEKSISGFEVAEKISKSLSKQALLISVDGELKDLNHNISKDSSIKIFTSKDKEGLETIRHDTAHILAMAVQELFPGTQVTIGPVIEDGFYYDFARKGIFYL

SEQ ID NO: 189372 - protein, 346 aa, Unknown
  Bacterial polypetide isolated from the Sargasso Sea
GKIDGIRVDASELILEDSKVEILTADSEEGLEVVRHSCAHLLAHALKQIYPDIKLAIGPTISDGFYYDVLLDHKINEKDLEEIEKRMKKLAEENYEVVREVVTKAKATKTFKDRKEDYKLDIIKEIPKDEIIALYHHKEYTDMCRGPHVTNTKHLRAFKLTKVAGAYWRGDSKNEMLQRIYGTAWKDKKDLETHLNNLEEAEKRDHRKLGRQLDLFHFQDEAPGMVFWHPKGWSIYRVLEDYIRAKQQEAGYSEINTPEVVDRKLWEKSGHWDKYRENMFITEIDDEHANEKRTNALKPMNCPCHVQVYNQGLKSYRDLPIRLAEFGSCHRYEASGTLHGLMRVRG

SEQ ID NO: 189373 - protein, 310 aa, Unknown
  Bacterial polypetide isolated from the Sargasso Sea
NALKPMNCPGHVQIYNQGIKSYKDLPLKYAEFGLCHRYEPSGTMHGLMRVRAFTQDDGHIFCTENQIESETGLFIEFLSSIYADLGFKNFDIKLSTRPEMRVGSDETWDKAEQALEAAIKNLGYPYRIDEGDGAFYGPKLDFVLTDAIGREWQCGTFQLDFNLAERLDASYVGEDGKKHIPVMIHRAVLGSFERFIGILIENYAGKLPFWLSPQQVVVASIISDVNDYSLGIVESLKKEGILAEADLRNEKISYKIREHSIRKVPIILAIGNNEKKDKTVSIRRIGSTDTEVVDLKDAIKEIAKENLALN

SEQ ID NO: 189374 - protein, 376 aa, Unknown
  Bacterial polypetide isolated from the Sargasso Sea
KYFKLTKVSGAYWRGDSNNEMLQRIYGTSWATQKDLDEYLKRIEEAEKRDHRKLGKEMDLFHFREESPGSVFWHEKGWALFQKLINYMRSRQDAAGYREVNTPEILDRQLWEKSGHWEKYGENMYTSETPDEKVFAIKPMNCPGHIQVFNQGLKSYRDLPLRIAEFGKVHRYEPSGALHGLLRVRAFTQDDAHIFCSEDQITSECLEVTNLILDIYKDLGFENVILKYADRPEVRVGDDKIWDKAEASLLEAVKASKLEYSINKGEGAFYGPKIEFVLRDAIGRDWQCGTLQVDLNLPGRLDASYVDKDGTKKVPVMLHRALFGSLERFVGILIENYAGKFPFWISPLQTMVIPISEEFNDYAVEVSKKIKNVGIS

SEQ ID NO: 189375 - protein, 656 aa, Unknown
  Bacterial polypetide isolated from the Sargasso Sea
MAEIQITLPDNSVKKVPKGSTAQDIADLIGPGLARAVVVAKVNGDLKDLNAPINDDSELQLFTGESPEGHDTLLHSTAHLMAQAVKELYPNAKVTIGPTIENGFYYDFDVDVSFSDEVLVKIEEKMRVLAKSGQDIQRNEISAKDAVSLFKDIGEDYKVEIIQQINPDDVITIYKQSDFTDLCRGPHVSNTSKIKYFKLLSTSGAYWRGDENNKMLQRIYGTVFSTKDALKTHLHNLEEAKKRDHRKLGKELKLFTFDEEVGPGLPLWLPNGAIMIEELERLAKESERHAGYEQVRTPHLTKGSLYERSGHLEHYKESMYPAMDVDGIEYFVKPMNCPHHHKIYSSYPRSYRDLPLRLAEYGTCYRYEKSGQLFGLMRVRSLQMNDAHIYCTKEQFKQEFLAVCNMYLQYFDIFGIEKYSMRLSLHDKDELGKKYVNEPELWIETEEWVREALVEGKLDFEEVPGEAAFYGPKIDVQVWSAIGKEFTLATNQVDFAVPSKFDLTYINETGEEQTPLCIHRAPLGTHERFIGFLIEHFGGNFPLWLAPVQVAVLPLSDKFIDYANKVVNVLKDSGIRVKLNDRADKIGSKIRHAELEKINVMLILGEKEEKDGTVSVRKRFEGDTGILNLEEVKEQLLDEINDRRLTHRKKTEAATE

SEQ ID NO: 189376 - protein, 379 aa, Unknown
  Bacterial polypetide isolated from the Sargasso Sea
MDKYLWQPNGSILRNQIEEFSKSAHISNGYEFVNTPHIGRSILWETSGHLDHYKEGMYPALTTEDTNEDYYLKPMNCPFHILVYKNDIRSYRDLPIRYFELGSVYRMEKTGVLHGLLRARGFTQDDAHIFTTIDNLNDEILNLLTFSIKLLNCFGFTDIEADLSTRPKDSIGLDKDWENATNSLEEALNQQKLSYKIAQGEGAFYGPKIDLHIKDAIGRRWQLTTIQIDFAQPNNFSLEYVNSENKKVRPVMIHRALLGSIERFTGILIEHYAGEFPGWLAPNQINILTIGNVKEYLDFIVSKLSKYRLNIDDRNIRLGEKIHESRKNKIPVTLIIGEKDAKNKSVAINYLDGSEEQDIELSEGIKSINKKLKKPVFKI

SEQ ID NO: 189377 - protein, 456 aa, Unknown
  Bacterial polypetide isolated from the Sargasso Sea
MSDLKTIRGMPDLYGENIEAISMVEEICLKTFKSFNYKEFRTPLLENSALFSRSIGLTSDIVQKEMYEFKDKKGERLCMRPEGTAGLVRALITNGLDDEEIKKFFYIGPMFRYERPQKGRKRQFFQAGIELIGDRSIDSDIEIILVAKKILDELNIKYNLQVNYLGSVAEIEEYSAYLEEFMQNKGVASNKEKLLAENEKEIQAILVEKRNQMAHPRPKDPSDLDKRLARLMDKKNQLVQETSAIRALDSKLEESKKLFEEARALDSFLSKEKKQEFESIKAKLDELEIDYSVNSRLVRGLDYYNGLVFEFLSNDLGSQNAVLAGGRYDGLIKNLGGRDLPATGFALGIDRIAEIVKAKSIEKDLFIGCVDKESRTYAQALGYKIRENNSSLIVENYLGNANVGKQLKKADSQGFKFAIIVGQDELKSKKVKLKNLKEDNPDLELKEKDLLEYFKC

SEQ ID NO: 189378 - protein, 447 aa, Unknown
  Bacterial polypetide isolated from the Sargasso Sea
IGKNFKLTKVAGAYWRGDSKNEMLQRIYGTSWASKKDLDNYIKRLEEAEKRDHRKLGKEMDLFHFREESPGAVFWHQRGWTLFQKLIDYMRKKQNEAGYKEINTPEVLDRSLWEKSGHWEKFGAHMYTSETPDEKIFAIKPMNCPGCVQVFNQGLKSYRDLPYKMSEFGKVHRYEPSGALHGLLRVRAFTQDDAHIFCTEDQITEESLSVTNLILNIYKDLGFENVILKYSDRPDLRVGEDEVWDKAEKALLEAVKATKLEYSINKGEGAFYGPKIEFVLRDAIGRDWQCGTLQVDLNLPGRLGASFVDKDGSKKVPVMLHRALFGSLERFIGILIENYSGKLPFWISPSQIMVIPVSEDFNDYSVEVNKKLIASGLNSEVDLKNHNLNYKIREHSLSKVPILLICGKKEVDSNSVTIRQLDSTKQENMELKKFINHYQALNKAPSL

SEQ ID NO: 189379 - protein, 638 aa, Unknown
  Bacterial polypetide isolated from the Sargasso Sea
MLNITLPDGKKLSFDEKVTGKQIAEKISKSLAKEALIMSVDGNLKDLSFEIEKDSIVKILTSKDDDGLDTIRHDTAHILAMAVQELFPGTQVTIGPTIENGFYYDFARKEPFTESDLKKIETKMSEIVDRNETTYREVWERDKAITHFKKMGENYKAEIIQDIPKGEEISIYFHGKWHDLCRGPHLPSTGRIGKHFKLTKVAGAYWRGDSKNEMLQRIYGTSWASKKDLEDYLKRLEEAEKRDHRKLGKEMNLFHFREESPGAVFWHEKGWNLFQKLVNYMRKKQQDAGYKEINTPEILDRSLWEKSGHWEKFGAHMYTSQTPDEKIFAVKPMNCPGCVQVFNQGLKSYRDLPLKMSEFGKVHRYEPSGALHGLLRVRAFTQDDAHIFCTEDQITEQSLSITNLILEIYKDLGFENVILKYSDRPDLRVGSDAVWDKSEKALLKAVKETKLDYSINKGEGAFYGPKIEFVLRDAIGRDWQCGTLQVDLNLPERLGASYVEKDGSKKVPVMLHRALFGSLERFIGILIENYSGKLPFWISPLQTVVIPVSDEFDEYSKQVNKKLIDAGFSSEVDLKNHNLNYKIRDHSLSKVPILLICGKKEVDSNSVTIRRLDSNKQENIELKKFITTHQALNKAPSL

SEQ ID NO: 189380 - protein, 290 aa, Unknown
  Bacterial polypetide isolated from the Sargasso Sea
SYRDLPIRMAEFGSCHRNEPSGALHGIMRVRAFTQDDAHIFCSEDQITSESIIFCDLLRKIYKDFGFEDVRVKFSDRPDVRAGDDATWDRAEEALKNACEAAGLETTLNPGEGAFYGPKLEFVLRDAIGRDWQCGTLQVDFVLPERLDATYIASDGSKKRPVMLHRAILGSMERWIGILIEQYAGRFPIWLAPVQLVVTTITSDNDEYAYRVLEQCKKVGLRAAVDTRNEKINYKIREHSNAKIPVILVVGAKEQENETVAMRRLGGKSQEILALGDAVNTLLKESAPPS

SEQ ID NO: 189381 - protein, 639 aa, Unknown
  Bacterial polypetide isolated from the Sargasso Sea
MPNITLPDGKKLSFKSNVTGYEVAEKISKSLSKQALIVSVDGELKDLSFLIKKDASVKIITSKDKEGLDVIRHDAAHIMAMAVQELFPGTQVTIGPVIENGFFYDFARKEPFTKDDLKKIEKKMSEIIDRDVKTKREVWNRSKAIAHFKKIGEKYKAEIIESIPKNEELSIYHHGDTWHDLCRGPHLVSSGKIGKAFKLTKVSGAYWRGDSNNEMLQRIYGTCWSSKKELDEYLHRLEEAEKRDHRKLGKEMDLFHFREESPGSVFWHEKGWNLFQRLVEYMRLKQRNAGYKEISTPELLDKSLWEKSGHWEKFGHHMFTSETPDEKVFAVKPMNCPGCVQVFNQGLKSYRDLPLKLSEFGKVHRYEPSGALHGLLRVRAFTQDDAHIFCTEEQITDECISVTKLILDIYKDLGFEKVFLKYSDRPEKRVGDDKVWDKSEKALLEAIKKTKLEYTINKGEGAFYGPKIEFVLRDAIGRDWQCGTLQVDLNLPGRLGATFVDKDGTKKIPVMLHRALFGSLERFIGIIIENYAGKLPFWLSPSQIVVLPIAEEHNDYAKKIFKDMFKEGIKCEVDLRNQKINYKIRDHSLSKVPFLLICGSKEIKDKSVTIRKLGSEKQETKKINKAIKEFKQLNNLPIN

SEQ ID NO: 189382 - protein, 635 aa, Unknown
  Bacterial polypetide isolated from the Sargasso Sea
TLPDGKKLNFDKSVTGSEVAEKISKSLAKQALVMSVNGELKDLYSTIDKDSSIKIFTSKDPEGLEVIRHDTAHIMAMAVQELFPGTQVTIGPVIENGFYYDFARKEPFTSDDLKKIENKMSEIIDKDVKTRREIWERDKAIAHFKKIGEKYKAEIIESIPKNEMLTIYHHGDAWHDLCRGPHLESSSKIGKAFKLTKVSGAYWRGDSNNEMLQRIYGTSWANQKDLDLYLQRIEEAEKRDHRKIGKEMDLFHFREESPGSVFWHQKGWNLFQKLISYMRMKQETAGYQEINTPEILDRSLWEKSGHWEKFGANMYTSTTPDEKVFAIKPMNCPGCVQVFNQGLKSYRDLPLKMSEFGKVHRYEPSGALHGLLRVRAFTQDDAHIFCTEEQITEECLSVTNLILEIYKDLGFEDVILKYSDRPDLRVGDDKVWDKSEAALLEAIKATKLEYSVNKGEGAFYGPKIEFVLRDAIGRDWQCGTLQVDLNLPGRLGASFVDSDGNKKVPVMLHRALFGSLERFIGILIENYSGKLPFWLCPVQTIVIPISSDFDEYAKQVNNELKKVGLSSEVDLKNHNLNYKIREHSLTKVPMLLICGKKEVDSNTVTIRRLDSKKQETMELKEFLKKYSALNKAPSI

SEQ ID NO: 189383 - protein, 264 aa, Unknown
  Bacterial polypetide isolated from the Sargasso Sea
VRGFTQDDAHIFCSIDQVGDEVLGVIDLILKVFKSLSFKDYKVQISLRDENDSSKYIGESSLWDRAENDLIEAVKRKKIQAEIVHGEAAFYGPKIDFMVKDSLDREWQLGTIQVDYQLPKRFNLEYVDKDNTKKTPVIIHRAPFGSMERFIAIITEHCEGNFPLWLAPNQVIILPINENVNDYATEIKNKLESLDFRTEIDIRFEKISKKIRDAEVKKIPYMLVIGDNEMKSSTLSVRKKHEGDIGKMSLDGLIKILNEELNSN

SEQ ID NO: 189384 - protein, 353 aa, Unknown
  Bacterial polypetide isolated from the Sargasso Sea
TEHEKGGYEILYTPHIALDTLWQTSGHTDFYEESMYTPIEDENQSYRLKPMNCPFHVLIYKDKLRSYRDLPIRWAELGTVYRHEMTGALHGLMRVRGFTQDDAHIFCSEDQIESEISEILELAINMLNKFTFTEFEIHLATRPEKYVGSEAIWDKATAALIKALEEKNLSYELDEGGGAFYGPKIDIKIKDAIGRLWQCSTIQLDFNLPERFDMRYVGSDGKKYHPIMIHRALLGSVERFFGILVEHFAGKFPLWLAPVQVCVMPINQKQHDYADSVYKILKKNGLRVEIDLRNEKIGSKIRDHTLNKVPYMIVLGDREVCDEEITIRTQKGEDLGNMKVESFLKKLSEEISN

SEQ ID NO: 189385 - protein, 578 aa, Unknown
  Bacterial polypetide isolated from the Sargasso Sea
MPNITLPDGKKLNFEKSITGTEVAEKISKSLGKQALVMSINGELKDLYTVIDQDCSIEIFTAKDPEGLEVIRHDTAHIMAMAVQELYPGTQVTIGPVIENGFYYDFARKEPFTSDDLKKIEKKMSEIIDKDVKTRKEVWERDKAISHFKKIGEKYKAEIIESIPKNEELTVYHHGETWHDLCRGPHLVSSGKIGKAFKLTKVSGAYWRGDSNNEMLQRIYGTGWATQKELDLYLQRIEEAEKRDHRKIGKEMDLFHFREESPGSVFWHQKGWNLFQKLVSYMRMKQDHDGYKEINTPEILDRSLWEKSGHWEKFGANMYTSTTPDEKVFAIKPMNCPGCVQVFNQGLKSYRDLPLKMSEFGKVHRYEPSGALHGLLRVRAFTQDDAHIFCTEEQITEECLSVTNLILEIYKDLGFEDVILKYSDRPDLRVGDDKVWDKSEAALLEAIKATKLEYSINKGEGAFYGPKIEFVLRDAIGRDWQCGTLQVDLNLPGRLGASFVDKDGTKKVPVMLHRALFGSLERFIGILIENYAGKLPFWISPLQAVVIPISSDFDEYAKSVAKELKRIGLIVEVDLKNH

SEQ ID NO: 189386 - protein, 327 aa, Unknown
  Bacterial polypetide isolated from the Sargasso Sea
DLPDNEEISIYKQGDWLDLCRGPHMVSTKQIGKAFKLMKVAGAYWRGDSSNTMLTRIYGTAWATEKDLEQHLLQIEEAEKRDHRKLGREMDLFHFQEEAPGAVFWHPKGWTLFQSLINYMRNRQDKAGYVETNTPDMMDKSLWETSGHWDKFSDMMFRTEAKDDKIYAIKPMNCPGAVEIFKQGLKSYRDLPFLLSEFGKVHRYEPSGALHGLMRVRAFTQDDAHIFCTEDQITQESKTVCDLILSIYKDFGFDNVRIKFSDRPEKRVGDDAIWDKAEAALMQAMEATGLEYTLNPGEGAFYGPKLEFVLRDAIGRDWQCGTLQVDL

SEQ ID NO: 189387 - protein, 337 aa, Unknown
  Bacterial polypetide isolated from the Sargasso Sea
MWVESGHWDKYKDNMYRTIIDDRELMIKPMNCPGHVQIYNQGIKSYKDLPLRMAEFGSCHRNEPSGALHGLMRVRNFVQDDAHIFCTEDQIESETVNFCKLLQEVYSELGFSEVSIMYADRPEQRVGSDEIWDKAENALLNASKATGIPFDKNSGDGAFYGPKLDFYLHDAIGRKWQCGTLQVDFNMPGRLGASYVGEDNEKHTPVMLHRAILGSLERFTGILIEHYEGKFPLWLAPIQLVVATITSKADQYAKEIEEKFIEKGIRVILDSRNEKINYKVREHSVNKIPYIFVVGVNEMENGTVAIRKLGSNKQEIISIEDSINMILKDTSAPDIDN

SEQ ID NO: 189388 - protein, 369 aa, Unknown
  Bacterial polypetide isolated from the Sargasso Sea
MSEKIIITFPDGNKKEVDKGINGLELASQISKSLAKESVAIKINNEIKDISLPINGNASVAILKRDSEEALELIRHDCAHVMAEAVQELFPGTQVTIGPAIENGFYYDFARDEPFTVADLPKIEKKMHDIIQRNKNFIREVWSKEESIKYFKDKGEDYKVELINDLPDNEEISIYKQGDWLDLCRGPHMVSTKQIGKAFKLMKVAGAYWRGDSSNTMLTRIYGTAWATEKDLEQHLLQIEEAEKRDHRKLGREMDLFHFQEEAPGAVFWHPKGWTLFQSLINYMRNRQDKAGYVETNTPDMMDKSLWETSGHWDKFSDMMFRTEAKDDKIYAIKPMNCPGAVEIFKQGLKSYRDLPFLLSEFGKVHRYE

SEQ ID NO: 189389 - protein, 453 aa, Unknown
  Bacterial polypetide isolated from the Sargasso Sea
TGLEIAQKISKSLLKNALIMSVDGDLRDLNFQVEKDSAVKIFTSKDKEGLETIRHDTAHILAMAVQELFPGTQVTIGPVIDNGFYYDFSRKEPFTENDLKKIEQKMMDIVDRNEPTHREVWNRKKAIEHFKKIGEKYKSEIINDIPEEEEVSVYFHGKWHDLCRGPHLSSTGKIGKFFKLTKVSGAYWRGDSNNEMLQRIYGTSWPSKKELDEYLNRLEEAEKRDHRKLGKEMDLFHFREESPGSVFWHEKGWNLFQKLIYYMREKQNQAGYKEINTPEILDRSLWEKSGHWEKFGANMYTSTTPDEKVFAIKPMNCPGCIQVFNQGLKSYRDLPLKMSEFGKVHRYEPSGALHGLLRVRAFTQDDAHIFCTENQITSECLSVTNLILNIYKDLGFENVILKYSDRPDVRVGEDHIWDKAEAALLEAIKASKLEYSINKGEGAFYGPKIEFVL

SEQ ID NO: 189390 - protein, 439 aa, Unknown
  Bacterial polypetide isolated from the Sargasso Sea
GKKINFEKSISGFEVAEKISKSLSKQALLISVDGELKDLNHNIFKDSSIKIFTSKDKEGLETIRHDTAHILAMAVQELFPGTQVTIGPVIADGFYYDFARKEPFTTEDLNKIENKMKEIVDRDEKTYREVWKRNDAIEHFKKKGEIYKAEIIENIPEGEDVSLYFHGDWHDLCRGPHLSSTGKIGKYFKLTKVSGAYWRGDSNNEMLQRIYGTSWSTQKELDDYLNRIEEAEKRDHRKIGKEMDLFHFREESPGSVFWHQKGWSLFQKLISYMRMKQEIGGYQEINTPEILDRSLWEKSGHWEKFGANMYTSTTPDEKVFAIKPMNCPGCVQVFNQGLKSYRDLPLKMSEFGKVHRYEPSGALHGLLRVRAFTQDDAHIFCTEEQITEECLTVTNLILEIYRDLGFEDVILKYSDRPELRVGDDQVWDKSEAALLEAIK

SEQ ID NO: 189391 - protein, 447 aa, Unknown
  Bacterial polypetide isolated from the Sargasso Sea
MPVITLPDGSQRSFDAPLSVLDVAKDIGPGLAKATIAGKINGQLVDACELITADASLSIVTAKDQEGLEIIRHSCAHLLGHAIKQLWPNTKMAIGPVIDNGFYYDVDLDRPISSDDLAQLEERMLQLAKTEYDVVKKKVSWQQAYDTFAPRGESYKMEILDQNVAKDDQPGLYHHEEYIDMCRGPHVPNMRFCQHFKVMKVAGAYWRGDAKNKMLQRIYGTAWADKKQLAAYLLQLEEAEKRDHRKIGKALGLFHWQEEAPGMVFWHNDGWTIFRELETFVREKLAQYDYQEVKGPFMMDKVLWEKSGHWEKYSDNMFVTSSENRDYAIKPMNCPGHVQIFNQGLKSYRDLPLRMAEFGCCHRNEPSGGLHGLMRVRGFTQDDAHIFCTEDQVQAEVSNCIKMVFDVYSTFGFKDVQVKLSTRPEKRIGTDEMWHRAEQGLAEALDA

SEQ ID NO: 189392 - protein, 598 aa, Unknown
  Bacterial polypetide isolated from the Sargasso Sea
MGKILDLSRTIENDSEIQILTKEDNEALDIIRHDCAHVMAEAVQSLYPGTQVTIGPSIENGFYYDFARKEPFAISDLPKIEKKMHEIINRNEKFTREVWSRDEAIKFFKSKGEEYKVELIEDLNEDEEITVYKQGEWLDLCRGPHMMSTKQIGKGFKLMKVAGAYWRGDSNNAMLTRIYGTAWRNEKELESHLLQIEEAEKRDHRKLGKEMNLFHFQEEAPGAVFWHPKGWKLFQSLINYMRKRQDDAGYVETNTPDMMDKSLWETSGHWDKFSEMMFRTEAKDEKIYAIKPMNCPGAVEVFKQGLKSYRDLPFLLSEFGKVHRYEPSGALHGLMRVRAFTQDDAHIFCTENQITQESKTVCDLILSIYKDFGFDNVRIKFSDRPEKRVGDDAVWDKAEAALMQAMEATGLEYTLNPGEGAFYGPKLEFVLRDAIGRDWQCGTLQVDLNLPERLGATYVAEDGQKKVPVMLHRALFGSLERFTGILIEHYAGHLPLWLSPLQIVVATITSESDNYAFNVKDQLTKNGLVTEVDIRNEKIGYKIREHSNAKVPVILAVGKKEADEKTVSVRRLGSQDTKNIKLDELIKSLQKESLSPIN

SEQ ID NO: 189393 - protein, 639 aa, Unknown
  Bacterial polypetide isolated from the Sargasso Sea
MPTITLPDGNSLDFPNKVTGIEVAEKISKSLAKQALIMSVDEELKDLYFSINNDCSVKIFTAKDPEGLEVIRHDTAHIMAMAVQELYPGTQVTIGPVIENGFFYDFARKEPFTEDDLKKIEKRMSEIIDKDVKTRREVWERDKAIKHFKKIGEKYKAEIIESIPKNEELSIYHHGDTWHDLCRGPHLTSSSKIGKAFKLTKVSGAYWRGDSNNEMLQRIYGTSWASQKDLNEYLKRIEEAEKRDHRKLGKEMDLFHFREESPGSVFWHEKGWSLFQKLINYMRARQDAAGYKEVNTPEVLDRLLWEKSGHWEKYGENMYTSETPDEKVFAIKPMNCPGHIQVFNQGLKSYRDLPLRITEFGKVHRYEPSGALHGLLRVRAFTQDDAHIFCTEDQITSECLIVTNLILDIYKDLGFENVVLKYADRPEVRVGDDKVWDKAEASLLKAVKASKLEYSINKGEGAFYGPKIEFVLRDAIGRDWQCGTLQVDFNLPGRLDASYVDKDGTKKVPVMLHRALFGSLERFIGILIENYAGKFPFWISPLQTVVIPISEDFEDYAVKVSEKIKSAGMSSLVDLKNHNLNYKIREHSLAKVPVLLICGKKEVDSNSVTIRRLDSNKQENMELNIFLKKYSALNKASSN

SEQ ID NO: 189394 - protein, 176 aa, Unknown
  Bacterial polypetide isolated from the Sargasso Sea
MPNITLPDGKKLNFKNKTNGLEIAEKISKSLIKQALIMSVNGELKDLSYTIQNDSSVKIITQKDKEGLDVIRHDAAHIMAMAVQELFPGTQVTIGPVIENGFYYDFARKEPFTSADLEKIEKKMSEIIDKDVKTKREVWKRDKAIAHFKKMGEKYKAEIIESIPEKEELSVYHHGD

SEQ ID NO: 189395 - protein, 430 aa, Unknown
  Bacterial polypetide isolated from the Sargasso Sea
MKNRFLSNISEFDGKEETFDGWVYNTRSIGKIWFLILRDGTGMTQCVVSSDETTETVFKLENTLTQESSITVTGIVKKEPRSIGGYEILVKNIVVHQLALDYPISLKEHGTSFLMDNRHLWIRSKRQHAILKIRHQVIKSSRDFLDNNGFTLVDTPIFTANACEGTSNLFNVDYFDRSAYLTQSGQLYSEASAASFGKVYCFGPTFRAEKSKTRRHLTEFWMVEPEMAFFDLDENMNLAELFVESIVQSCLQNCKNELDTLGRDTTSLEQVKVPFPRITYDEAVKILSDNGSDFSYGGDFGGTDETIISEQYDRPVMVHRWPADVKAFYMKRDNENEKLALGVDMLAPEGYGEIIGGGQREDNLKILEKRIEEHGLDKKDFKWYLDLRKYGSVPHSGFGLGIERTVAWITGIKHIRETIPFPRTISRLEP

SEQ ID NO: 189396 - protein, 519 aa, Unknown
  Bacterial polypetide isolated from the Sargasso Sea
FPGTQVTIGPVIENGFYYDFARKEPFTQDDLVKIENKMKEIVDRNEITKKEVWDRNKAISHFKNKGEIYKAELIEAIPDNEDVSIYFHGKWHDLCRGPHLSSTGKIGKYFKLTKVSGAYWRGDSNNEMLQRIYGTSWATQKDLDEYLKRIEEAEKRDHRKLGREMDLFHFREESPGSVFWHERGWGLFQKLINYMRSRQDAAGYKEVNTPEVLDRQLWEKSGHWEKYGENMYTSETPDEKVFAIKPMNCPGHIQVFNQGLKSYRDLPLRFAEFGKVHRYEPSGALHGLLRVRAFTQDDAHIFCTEDQITSECLIVTNLILDIYKDLGFENVILKYADRPEVRVGDDLVWDKAEASLLEAVKASKLEYSINKGEGAFYGPKIEFVLRDAIGRDWQCGTLQVDLNLPERLDASYVDKDGTKKVPVMLHRALFGSLERFIGILIENYAGKFPFWISPLQTMVIPISEEFNDYAVQVSNKIKNSGISSAVDLKNHNLNYKIRDHSLAKIPLLLICGKKKLTPI

SEQ ID NO: 189397 - protein, 269 aa, Unknown
  Bacterial polypetide isolated from the Sargasso Sea
MLNITLPDGNKLNFKKKVTGLEVAEKISKSLSKSALIISIDGKLKDLNTVIEKDCSIKIFTSKDKEGLETIRHDTAHVLAMAVQELFSGTQVTIGPVIEDGFYYDFARKEPFTDDDLKKIENKMREIVERDEKTTREVWPRKKAIEHFKKIGEIYKAEIIKSIPEGEDVSIYFHGKWHDLCRGPHLSSTGKIGKFFKLTKVSGAYWRGDSNNEMLQRVYGTSWSTKKDLDNYLMKIEEAEKRDHRKLGKIMDLFPFKEESPGAVFWHEK

SEQ ID NO: 189398 - protein, 121 aa, Unknown
  Bacterial polypetide isolated from the Sargasso Sea
MPNIILPDGKKLDFTDSITGLKIAETISKSLLKQALVMSVDGELKDLEHEITKDSKVKIFTSKDKEGLETIRHDTAHVLAMAVQELFPGTQVTIGPVIEDGFYYDFARKEPFTNEDLEKIE

SEQ ID NO: 189399 - protein, 643 aa, Unknown
  Bacterial polypetide isolated from the Sargasso Sea
MPTISFPDGSKKIFKSSVSPLSIAEEISNSLKKNAVIAKVNGEFWDLNREILEDSDVSILRKGDKETLEILRHDCAHILAEAVLEIYPETQVTIGPVIENGFYYDFYREEPFSKEDLIIIEKRMHEIVDRNERIDREVWSRSDAIKFYEDKNEPFKVELVNNIPRNEELTFYTQGDFIDLCRGPHLRSTLDTGHAFKLMSVAGAYWRGDSKNPMLQRIYGTAWTTDKELNQYLLMIEEAEKRDHRKIGKAQKLFHIQEEATGSIFWHPSGWSIYQEIEAYVRRRLKKASYQEVKTPQLIDRKLWENSGHWDKFREHMFTTEADEKQTLALKPMNCPGHVQIFKQSLKSFRDLPLRLAEFGACHRNEPSGALHGIMRVRAFTQDDAHIFCTEDQINQESISFCELLMSIYNDFGFENITIKFSDRPEIRAGSNETWDQAEKALMDASKAAGLEVIMNPGEGAFYGPKLEFVLRDAIGRDWQCGTLQVDFVLPERLKADYIATDGSKKRPVMLHRAILGSMERWFGILIEQYAGKWPLWLAPCQIVICTITQDADNYAHEVKTQTEERGLRVLLDNRNEKIGYKIREHSENKIPILFIVGNKEIESKQVSVRRLGSKEQINLDLIEALDKYKLQALPPDLARDVK

SEQ ID NO: 189400 - protein, 259 aa, Unknown
  Bacterial polypetide isolated from the Sargasso Sea
FTQDDAHIFCTEDQITQESKTVCDLILSIYKDFGFDNVRIKFSDRPEKRVGDDAIWDKAEAALMQAMEATGLEYTLNPGEGAFYGPKLEFVLRDAIGRDWQCGTLQVDLNLPGRLGATYIGEDGNKKIPVMLHRALFGSLERFTGILIEHYAGHLPFWLSPLQAVVATITSDTDEYAYEVQKALVSKGIRAEIDTRNEKIGYKIREHSNSKVPAIIAVGKKEAQDKTVSVRRIGSSETKTFKLEDIVTSLSKEAKSPIE

SEQ ID NO: 189401 - protein, 638 aa, Unknown
  Bacterial polypetide isolated from the Sargasso Sea
MPIITLPDGNNIDFPNKVTGLEVAEKISKSLAKQAMVISVDGELKDLDFLIENDCSVKIFTSKNPEGLETIRHDTAHILAMAVQELFPGTQVTIGPVIENGFYYDFARKEPFTEDDLVKIENKMKEIVDRNEITKREVWDRNKAISHFKKKGEIYKAELIEAIPENEDVSIYFHGEWHDLCRGPHLSSTGKIGKYFKLTKVSGAYWRGDSNNEMLQRIYGTSWATQNDLDQYLKRIEEAEKRDHRKLGKEMDLFHFREESPGSVFWHERGWGLFQKLINYMRSRQDAAGYKEVNTPEVLDRQLWEKSGHWEKYGGNMYTSETPDEKVFAIKPMNCPGHIQVFNQGLKSYRDLPLRFAEFGKVHRYEPSGALHGLLRVRAFTQDDAHIFCTEDQITSECLIVTNLILDIYKDLGFENVILKYADRPEVRVGDDAVWDKAEASLLEAVKASKLEYTINKGEGAFYGPKIEFVLRDAIGRDWQCGTLQVDLNLPGRLDASYVDKDGTKKVPVMLHRALFGSLERFIGILIENYAGKFPFWISPLQTMVIPISEEFNNYAVEISNKIKNSGISSAVDLKNHNLNYKIRDHSLAKIPLLLICGKKEVDSNSVTIRRLDSNKQENMGIDQFLKTFSALNKASSN

SEQ ID NO: 189402 - protein, 413 aa, Unknown
  Bacterial polypetide isolated from the Sargasso Sea
DQYLIQQEEAEKRDHRKLGNELDLFTSSEELGSGNFLWKPKGAVLRDVIETYSKKAHLQNGYSLVNTPHIGKSILWETSGHLDHYSENMYPPINHDENNETYYLKPMNCPFHILVYKSDLHSYKELPLRYFEFGSVYRYEKTGVLHGLLRLRGFTQDDAHIFCTTDQINDEVKTLLSFSVNLLGSYGLTEIEADLSTKPTKYIGSDKDWDNATNSLKQSLTELEVPFQTAEGEGAFYGPKIDLHAKDAIGRRWQLSTIQIDFAQPDNFDIEYVNSDNKKSRPVMIHRALLGSVERFTAVLLEHYAGNLPGWLSPIQIDVLTIGNVNEYAQTIIEDLKSYRVNLDDRNIRLGEKLHNSEKSKTPIQIIIGEKDASSNTMAVNIFEKENMKDVDYKKAINTIKKSLKEPEFSLDG

SEQ ID NO: 189403 - protein, 314 aa, Unknown
  Bacterial polypetide isolated from the Sargasso Sea
EKVFAIKPMNCPGCVQVFNQGLKSYRDLPLKMSEFGKVHRYEPSGALHGLLRVRAFTQDDAHIFCTEEQITKECLTVTNLILEIYKDLGFEDVILKYSDRPELRVGDDQVWDKSEAALLEAIKATKLEYSINKGEGAFYGPKIEFVLRDAIGRDWQCGTLQVDLNLPGRLGASFVDSDGNKKVPVMLHRALFGSLERFIGILIENYSGKLPFWLCPVQTIVIPISSDFDDYAKEVNSQLKKVGLSSEVDLKNHNLNYKIREHSLTKVPMLLICGKKEVDSNTVTIRRLDSKKQETMDLKEFLQKYSALNKAPSI

SEQ ID NO: 189404 - protein, 641 aa, Unknown
  Bacterial polypetide isolated from the Sargasso Sea
MPEITLPDKSKRKFENPLSIEDIASDIGPGLAKATVAGKIDGVLVDASEIVTKDAEIEIITAKDDEGIEVVRHSCAHLLAHALKQLFPDVQLAIGPVIGNGFYYDIKLDKALNDDDLRSLEDRMLKLAKTDYEVVREVVSRKKAVKTFKDRNEPYKVALAEEIPDKEIIALYHHEEYTDMCRGPHVTNTKHLRAFKLTKVSGAYWRGDSQNEMLQRIYGTAWPTAKELESHLVQIEESEKRDHRKLGRQLDLFHFQEEAPGMVFWHPKGWSIFRALQEFIRIKQVEAGYEEINTPQVVDRKLWEDSGHWDKYRENMFITEIDEEHANDKRINALKPMNCPCHVQIYNQGLKSYRDLPVRYAEFGSCHRYEASGTLHGLMRVRAMTQDDGHIFCTEDQIESETKSFIDVLSSIYTELGFTKFDIKLSTRPETRVGSDAVWDKAESSLEKAIKNQGLSYEISHGDGAFYGPKLDFVLTDALGRDWQCGTLQADFNLPERLDTNYIGEDGNKHRPVMLHRAILGSFERFIGILIEHHGGALPVWLSPIQAQILNITDKHSKYSEKTRNLLQKSGFRAQSDLRKEKITYKIRDHSMQKTPFLLVVGDKEMENETVSVRVRGGEDLGEMSIINFMDILQKKIEAKE

SEQ ID NO: 189405 - protein, 256 aa, Unknown
  Bacterial polypetide isolated from the Sargasso Sea
MPNITLPDGKKLDFAESITGLKIAEKISKSLIKQALVMSVDGELKDLEHEITKDSVVKIFTSKDKEGLETIRHDTAHILAMAVQELFPGTQVTIGPVIEDGFYYDFARKETFTNEDLEKIEKKMREIIDRDEKTYREVWKRKDAVEHFKKKGEIYKAEIINSIPENEEVSIYFHGKWHDLCRGPHLISTGKIGKYFKLTKVSGAYWRGDSNNEMLQRVYGTSWSSQKELDEYLKRIEEAEKRDHRKLGKEMDLFHF

SEQ ID NO: 189406 - protein, 574 aa, Unknown
  Bacterial polypetide isolated from the Sargasso Sea
RHTLTAQVLAKAIKNLYSDSKLAIGPTIENGFYYDVSTETPISVEDLPKIENEMKRILENKSNIVKSLHSEKDAKKMFKEKGETLKIEIIDDAEQTDNFQIYTNADEDFIDLCRGPHLPNLSFIGAFKLTKVSGAYWKGDSSNEMLTRIYGTAWRNEKELQEHLKSIEEAEKRDHRKIGKDMDLFHFQDEAPGMVFWHPKGWTIYSTLKSYMSDMQKKADYKEINTPSVIDRKLWEKSGHWDKYRENMFITEIDEEHANEKRVNALKPMNCPGHVQVYNQGVRSYKELPFRLCEFGTCHRYEASGTMHGLMRVRGFTQDDGHIFLTEDQIESETATFIDLLSKVYADLGFNEFEIKLSTRPEQRVGSDEIWDKAELSLKNAIEKLGLEYRIDEGDGAFYGPKLDFVLTDAIGRKWQCGTLQLDFNLADRLDAQYVAEDGNKYNPVMFHRAILGSFERFIGILIENYSGNLPLWLAPTQVTICSITDEADDYVKEISELLRNKNIRCNSDLRNEKISYKVREHSVSKVPIIIAVGKKEVADRTVSVRRLGSDDTSALSLDDFTSSVFQESLAPNK

SEQ ID NO: 189407 - protein, 292 aa, Unknown
  Bacterial polypetide isolated from the Sargasso Sea
KSYKDLPLKMSEFGKVHRYEPSGALHGLLRVRAFTQDDAHIFCTEDQITKECLIVTNLILEIYKDLGFEDVILKYSDRPELRVGDDSVWDKAEAALLDAVKATKLEYTINKGEGAFYGPKIEFVLRDAIGRDWQCGTLQVDFNLPGRLGASYVDKDGTKKVPVMLHRALFGSLERFIGILIENYAGKFPFWISPLQTVVIPISEDFEEYASKVSKKIKEAGISSIVDLKNHNLNYKIREHSLSKVPILLICGKKEVDSNSVTIRRLNSNKQENMELNKFLKTFSALNKVSSI

SEQ ID NO: 189408 - protein, 197 aa, Unknown
  Bacterial polypetide isolated from the Sargasso Sea
LLEAIKASKLEYSVNKGEGAFYGPKIEFVLRDAIGRDWQCGTLQVDLNLPGRLGASFVDKDGSKKVPVMLHRALFGSLERFIGILIENYSGKLPFWISPLQTVVIPVSAEFDDYAKEVNKKIKKEGITSEVDLKNHNLNYKIREHSVSKIPILLICGKKEVDSNTVTIRRLDSNKQESIELNLFLKKFSALSKAPSN

SEQ ID NO: 189409 - protein, 392 aa, Unknown
  Bacterial polypetide isolated from the Sargasso Sea
DLFHLQEEAPGMVFWHPKGWSIYTAVEKYMREKQVNANYSEIKTPQVIDRKLWEKSGHWEKYRENMFITEIDEEHANEKRTNALKPMNCPGHVQIYNQSIKSYRDLPIRFAEFGSCHRYEPSGTMHGLMRVRGFTQDDGHIFCTEDQIQEETASFISLLYDVYEDFGFKKIDIKLSTRPKVRVGSDKIWDKAEKALKNAIEALNIDYEIAEGDGAFYGPKIDFVLTDALKREWQCGTFQADFNLPERLDASYVGEDGKKHRPVMMHRAILGSFERFIGILIEQFDGSFPLWLSPIHAVVMNVSEKHTDRVAEITEKLKKNEIKVISDLRNEKITYKIRDHSIQKIPYQIVIGDKEVEEGSVSVRERESQKQSSMSVSDFSKMVLRKIRSKEV

SEQ ID NO: 189410 - protein, 492 aa, Unknown
  Bacterial polypetide isolated from the Sargasso Sea
MPDIKLPDGKVIKFKDQVNGFQLAEKISKSLAKEACIMSVNGEMKDLSYEIKKNSTAKIFTTRDKEGLEVLRHDAAHVLAMSVQELFPGTQVTIGPVIENGFYYDFSRKDPFTEDDLKKIEKKMKEIVDRDEKTVRKVWKRDEAIKHFKKKGEHYKAEIISSIPKNEEVTIYFHGEWHDLCRGPHLPSTGKIGKAFKLTKVSGAYWRGDSKNEMLQRIYGTCWNNQKELDKYLERLEEAEKRDHRKIGKEMDLFHFREESPGAVFWHNKGWNLFLKLIEYMRSKQRNAGYQEINTPELLDRSIWETSGHWEKFGDLMYTSTTPDKKIFAIKPMNCPGCVQIFNQGLKSYRDLPLKMSEFGKVHRYEPSGALHGLLRVRAFTQDDAHIFCTEEQITQECLSVTNLILEIYKDLGFENVILKYSDRPEKRVGDDKIWDKSEKALLKAIKESKLEYSINKGEGAFYGPKIEFVLRDAIGRDWQCGTLQDMLIYLV

SEQ ID NO: 189411 - protein, 176 aa, Unknown
  Bacterial polypetide isolated from the Sargasso Sea
MAGPDRKPVSSAAATTPAPSAPVVLPKTSESSQLLKIRHSMSHVMAMAVQQLFPKARVTIGPWTESGFYYDFDNPDPFTEADLKAIKKGMIKIINKKVPLERVEVTRAEAETKIKAQNEPYKLEILEGLQDPITLYTLGEDWWDLCAGPHVEHTGQLNAKAFELESVAGAYWRGDE

SEQ ID NO: 189412 - protein, 416 aa, Unknown
  Bacterial polypetide isolated from the Sargasso Sea
MPTITLPDGKNLEFPKEVTGLDVAEKIGKSLLKKALIMSVDGELKDLYFSIKKDCSVKIFTAKDPEGLEVIRHDTAHIMAMAVQELYPGTQVTIGPVIENGFFYDFARKEPFTEDDLKKIEKRMSEIIDKDIKTRREVWERDKAISHFKKIGEKYKAEIIESIPENEELSVYHHGDTWYDLCRGPHLLSSGKIGKAFKLTKVAGAYWRGDSKNEMLQRIYGTGWASQKDLNDYLKRIQEAEKRDHRKLGKEMDLFHFREESPGSVFWHEKGWALFQKLIKYMKMKQDEAGYKEINTPEVLDRSLWEKSGHWEKFGANMYTSTIPDEKVFAIKPMNCPGCVEVFNQGLKSYKDLPLKMSEFGKVHRYEPSGALHGLLRVRAFTQDDAHIFCTEDQITKECLTVTKLILEIYKDLGFE

SEQ ID NO: 189413 - protein, 599 aa, Unknown
  Bacterial polypetide isolated from the Sargasso Sea
IDEKICDLSLPLNNDCKVVIIKRENAEALDIIRHDCAHVMAEAVQSLYPGTQVTIGPSIENGFYYDFARKEPLTIADLTKIEKKMHDIINKGEKFTREVWTRDGAIKFFNNKGEKYKVELIKELDADEEITIYRQGEWLDLCRGPHMLSTKQIGKGFKLMKVAGAYWRGDSSNAMLTRIYGTAWRNEKELESHLLQIEEAEKRDHRKLGKEMDLFHFQEEAPGAVFWHPKGWRLFQSLINYMRIRQDKAGYVETNTPDMMDKSLWEMSGHWDKFSEMMFRTEAKDEKIYAIKPMNCPGAVEVFKQGLKSYRDLPFLLSEFGKVHRYEPSGALHGLMRVRAFTQDDAHIFCTEDQITQESKTVCDLILSIYKDFGFDNVRIKFSDRPEKRVGDDAVWDKAEAALMQAMEATGLEYTLNPGEGAFYGPKLEFVLRDAIGRDWQCGTLQVDLNLPERLGATYVAEDGQKKVPVMLHRALFGSLERFTGILIEHYAGHLPLWLSPLQIVVATITSDSDNYAFEVKDQLTKNGLVAEADIRNEKIGYKIREHSNAKVPVILAVGKKEADEQTVSVRRLGSQQTSTIKLDKLIKDLQKESLSPIN

SEQ ID NO: 189414 - protein, 198 aa, Unknown
  Bacterial polypetide isolated from the Sargasso Sea
LNASKATGIPFDKNSGDGAFYGPKLDFYLHDAIGRKWQCGTLQVDFNMPGRLGASYVGEDNEKHTPVMLHRAILGSLERFTGILIEHYEGKFPLWLAPIQLVVATITSKADQYAKEIEAKFIEKGIRVILDSRNEKINYKVREHSVNKIPYIFVVGVNEMEDGTVAIRKLGSNKQEIVSIEDSINMILKDTSAPDIDN

SEQ ID NO: 189415 - protein, 158 aa, Unknown
  Bacterial polypetide isolated from the Sargasso Sea
MPNITLPDGKKINFEKSISGFEVAEKISKSLSKQALLISVDGELKDLNHNISKDSSIKIFTSKDKEGLETIRHDTAHILAMAVQELFPGTQVTIGPVIEDGFYYDFARKEPFTSEDLEKIENKMREIVDRDEKTYREVWKRNDAIEHFKKREKYIKQK

SEQ ID NO: 189416 - protein, 384 aa, Unknown
  Bacterial polypetide isolated from the Sargasso Sea
MKLTLPDKSVKELPKGVTGLDVAMSIGPGLAKSAIAVNIDGEQKDLSDPINADCSLSIITLDSDEGLEIMRHTTAAQVLALAIKSIYPDSKLAIGPTIENGFYYDFHTEDSISTEDLPRIEEEMSKIIKEKSEIGKSFHDKKSAIDQFKKLSEDYKVKIIEESDQAEDIQIYKNENNEFIDLCRGPHLPNLSHIGAFKLTKVSGAYWKGDSSNEMLTRIYGTAWRNKKELDQYLVQLEEAEKRDHRRIGKDLDLFSIQEDAGGGLVFWHPNGSRIRSEIEKYWKNEHEKAGYELLYTPHIALDTLWQTSGHTDFYEESMYTPIDDENQSYRLKPMNCPFHVLIYKDKLRSYREFPIRWAELGTVYRHEMTGALHGLMRVRGFTQ

SEQ ID NO: 189417 - protein, 415 aa, Unknown
  Bacterial polypetide isolated from the Sargasso Sea
MPIITLPDGNNIDFPNKVSGTEIAEKISKSLAKQAIVMSVNGELKDLNHLIDNDCSVKIFTSKNPEGLETIRHDTAHILAMAVQELFPGTQVTIGPVIENGFYYDFARKEPFTEEDLVKIENKMKDIVDRNEITKREVWERNKAISHFKKKGEIYKAELIEAIPENEDVSIYFHGEWHDLCKGPHLSSTGKIGKYFKLTKVSGAYWRGDSNNEMLQRIYGTSWATQKDLDEYLKRIEEAEKRDHRKLGKEMDLFHFREESPGSVFWHEKGWALFQKLINYMRSRQDAAGYREVNTPEILDRQLWEKSGHWEKYGENMYTSETPDEKVFAIKPMNCPGHIQVFNQGLKSYRDLPLRIAEFGKVHRYEPSGALHGLLRVRAFTQDDAHIFCSEDQITSECLEVTNLILDIYKDLGFE

SEQ ID NO: 189418 - protein, 555 aa, Unknown
  Bacterial polypetide isolated from the Sargasso Sea
QELFPGTQVTIGPVIENGFYYDFARKEPFTEDDLVKIENKMKEIVDRNEITKREVWDRNKAISHFKKKGEIYKAELIEAIPENEDVSIYFHGEWHDLCKGPHLSSTGKIGKYFKLTKVSGAYWRGDSNNEMLQRIYGTSWATQKDLDEYLKRIEEAEKRDHRKLGREMDLFHFREESPGSVFWHERGWGLFQKLVNYMRSRQDAAGYKEVNTPEVLDRQLWEKSGHWEKYGENMYTSETPDEKVFAIKPMNCPGHIQVFNQGLKSYRDLPLRFAEFGKVHRYEPSGALHGLLRVRAFTQDDAHIFCTEDQITSECLIVTNLILDIYKDLGFENVILKYADRPEVRVGDDLVWDKAEASLLEAVIASKLEYTINKGEGAFYGPKIEFVLRDAIGRDWQCGTLQVDLNLPGRLDASYVDKDGTKKVPVMLHRALFGSLERFIGILIENYAGKFPFWISPLQTMVIPISEEFNDYAVEVSNKIKNSGISSAVDLKNHNLNYKIRDHSLAKIPLLLICGKKEVDSNSVTIRRLNSNKQENMGIDQFLKTFSALNKASSN

SEQ ID NO: 189419 - protein, 345 aa, Unknown
  Bacterial polypetide isolated from the Sargasso Sea
MKQITITLPDKSTRQYDEGVTALQIATSIGERLANDTVAATVNDNLVDATIPIMDDADLIIHTGDSKIGHEVLLHSAAHLMAQAVKKFWPTSQMTIGPVIENRFYYDFDIEGTFSDEDLLKIEEEMHNIAKENHDVSREDLSRDQAIKLFSKLNENYKVEIINEIDESDRITAYKQGDFIDLCRGPHTPSTGNLKYFKLLSTSGAYWRGNENNKMLQRIYGTAFSKKSELKKYLNFLEEAKKRDHRKIGKELEIFTFDEEVGPGLPLWLPNGGVILNELESLAKETEDRHGYHQVRTPHLTKGDLYKKSGHLELYKDAMYPAMDVDGMDYYVKPMNCPHHHKIYA

SEQ ID NO: 189420 - protein, 421 aa, Unknown
  Bacterial polypetide isolated from the Sargasso Sea
WRNEKELQEHLKSIEEAEKRDHRKIGKDMDLFHFQDEAPGMVFWHPKGWTIYSTLKSYMSDMQKKADYKEINTPSVIDRKLWEKSGHWDKYRENMFITEIDEEHANEKRVNALKPMNCPGHVQVYNQGIRSYKELPFRLCEFGSCHRYEASGTMHGLMRVRGFTQDDGHIFLTEDQIESETAIFIDLLSKVYADLGFNEFEIKLSTRPEQRVGSDEIWDKAELSLKNAIEKLGLEYRIDEGDGAFYGPKLDFVLTDAIGRKWQCGTLQLDFNLADRLDAQYVAEDGNKYNPVMFHRAILGSFERFIGILIENYSGNLPLWLAPTQVTVCSITDEADDYVKEISETLRSKNIRCNSDLRNEKISYKVREHSVSKVPIIIAVGKKEVSERTVSVRRLGSDDTSILSLDDFTTSVVQESLAPNK

SEQ ID NO: 189421 - protein, 427 aa, Unknown
  Bacterial polypetide isolated from the Sargasso Sea
VAGLLNGKLVDASELIETDSDAVLVTNSDDDGIEIIRHSCAHLFGHALKQLYPEAKMAIGPTIENGFYYDIDLEESLSENDLEKIELRMKELAQTKYNVVREVVTRKKALDTFKDRNEPYKIEIINEIPDDEIIALYHHNEYIDMCRGPHVTSVRHLKAFKLTKIAGAYWRGSSDNKMLQRVYGTAWASEKELNKHLILLEEAEKRDHRKLGKELDLFHFQDIAPGMVFWHANGWSIYKELEDYIRRKISKEGYKEIKTPQILDKDLWVESGHWDKYKDNMYRTIIDDRELMIKPMNCPGHVQIYNQGIKSYKDLPLRMAEFGSCHRNEPSGALHGLMRVRNFVQDDAHIFCTEDQIESETVNFCKLLQEVYSELGFNEVSIMYADRPEQRVGSDEIWDKAENALLNASKATGIPFDKNSGDGAFYG

SEQ ID NO: 189422 - protein, 522 aa, Unknown
  Bacterial polypetide isolated from the Sargasso Sea
MTKISEENLQITHEIKSRDDSISYFEKINENYKVEIINDLDPNETLKVYSQGEFTDLCRGPHVPYTGVIKHFKLLSSSAAYWRGDEKNQTLQRVYGTSFQNIKDLKKYLLMLEEQKKRDHRKIGKELDLFFFDDEVGPGLPLWTPSGTVLIDQLEALAKEKETAGGYLRVRTPHLTKGDLFSKSGHLDHYMSSMFSPMDVDGIDYYMKPMNCPYHHKIYANTPKSYRDLPYRISEYGTCYRYEKSGELFGLMRVRSMQMNDGHIYCTEEQFKEEFINVCNLYMEYFKIFGIEKYEMRLSLHDPEGLGDKFIDNPTLWKKTEDDVRNALKGAKLKFVESVGDAAFYGPKIDVQVWSSIGREFTLATNQVDFAIPERFDLTYTDKDGTAKTPLCIHRAPLGTHERFIGFLIEHFGGNFPLWLAPKQVTILPVSDKFNDYAQEITTHLITKGVRASIDNRSEKIGSKIRDAEMQKINIMVIVGEKEQENKTLTIRRRFVKEQEELNLDDFSKNILSEINERRVSN

SEQ ID NO: 189423 - protein, 214 aa, Unknown
  Bacterial polypetide isolated from the Sargasso Sea
STRPEMRVGSDEIWDKAEEALETAIKNLGYPYRIDEGDGAFYGPKLDFVLTDAIGREWQCGTFQLDFNLAERLDATYIGEDGKKHIPVMIHRAVLGSFERFIGILIENYAGKLPFWLAPQQVVITSIVSDANDYALEIQQSLKDNKIRCEVDLRNEKISYKVREHSTKKVPIILAIGKKEMADKTVSLRRIGSKESLVLSLDDAIKDIIKENRG

SEQ ID NO: 189424 - protein, 646 aa, Unknown
  Bacterial polypetide isolated from the Sargasso Sea
MPPTVGITEIAMVSIRLPDGSVRQYEHPVTVAEVAASIGPGLAKAALGGKLDGELVDTSTVIDRDASLAIVTDKDADGLDIIRHSTAHLLAYAVKELYPDAQVTIGPVIDNGFYYDFSYNRPFTPEDLEKIEKRMQELVKKDEPVTRRVVSRDEAAGYFRSIGEKYKAEIIESIPQSDEIKLYSHGGFTDLCRGPHVPSTGKLKVFKLMKVAGAYWRGDSKNEQLQRIYGTAWTKKEDQDQYLHMLEEAEKRDHRKLGKQLDLFHMQEESPGMVFWHPKGWALWQQVEQYMRRRVNEAGYLEIKTPMIMDRSLWEASGHWQNYRENMFTTESEKRDYAIKPMNCPGHVQVFKHGLRSYRDLPLRYAEFGSCHRNEASGALHGLMRVRGFVQDDAHIFCTEDQFISESIAFNTLAMSVYKDFGFDHIDIKLSLRPDQRAGTDETWDRAEQGLRDALTACGLTWEELPGEGAFYGPKIEYHIKDALGRSWQCGTLQLDMVLPERLGAEYVADDSSRRRPVMLHRAIVGSMERFLGILIEHHAGAMPAWLAPFQAVVLNIAESQAEYAQSLAQSLQKQGVRVVADLRNEKISYKIREHTLEKVPYLLVVGDKERDAQTVAVRARGGVDLGVMPVEAFVERLQEDLRSFK

SEQ ID NO: 189425 - protein, 279 aa, Unknown
  Bacterial polypetide isolated from the Sargasso Sea
MPIITLPDGSKKVFEKSVTILEIAQSIGAGLAKATIAGKVNDVLVDATIPISRDSKVVIITSKDKEGIEIIRHSFAHLIGHAVKQIYPNIKMAIGPVIEDGFYYDIFSEYRFTPEDLIKIENRIHKLIKTNYDVKILQVSKEEAIKTFKERGETFKLRIIEEIPEEDLINLYKHEEYIDMCRGPHVPNTRHLRHFKLLKLSGSYWRGNSENESLQRIYGTAWAKEKELKDYLTRIEEAEKRDHRKLGKKHSLFHIQEESPGMIFWHPNGWTIYQVWKNT

SEQ ID NO: 189426 - protein, 404 aa, Unknown
  Bacterial polypetide isolated from the Sargasso Sea
MSEKITITFPDGNKKEVDKGISGLDLASQISKSLAKESVAVKINDEIKDISLPINTDVSVAILKKDSEEALELIRHDCAHVMAEAVQELFPGTQVTIGPAIENGFYYDFARKEPFTLSDLPKIEKKMHEIIQRNESFVREVWSKDEAIKYFKDKGENYKVELINDLSDNEEISIYKQGGWLDLCRGPHMVSTKQIGKAFKLMKVAGAYWRGDSSNAMLTRIYGTAWATEKDLEQHLLQIEEAEKRDHRKLGKEMDLFHFQEEAPGAVFWHPKGWTLFQSLINYMRNRQDKAGYVETNTPDMMDKSLWETSGHWDKFSDMMFRTEAKDDKIYAIKPMNCPGAVEIFKQGLKSYRDLPFLLSEFGKVHRYEPSGALHGLMRVRAFTQDDAHIFCTEDQITQESKIV

SEQ ID NO: 189427 - protein, 473 aa, Unknown
  Bacterial polypetide isolated from the Sargasso Sea
DEDVSIYFHGDWHDLCRGPHLSSTGKIGKNFKLMKVSGAYWRGDSKNEMLQRIYGTSWASQKDLDEYLKRIEEAEKRDHRKLGKEMDLFHFREESPGSVFWHERGWALFQKLINYMRSRQDAAGYKEVNTPEILDRQLWEKSGHWEKYGENMYTSETPDEKVFAIKPMNCPGHIQVFNQGLKSYRDLPFRITEFGKVHRYEPSGALHGLLRVRAFTQDDAHIFCAEDQITSECLNVTNLILDIYKDLGFENVILKYADRPEVRVGDDEVWDKAEASLLEAVKASKLEYSINKGEGAFYGPKIEFVLRDAIGRDWQCGTLQVDLNLPGRLDASYVDKDGIKKVPVMLHRALFGSLERFIGILIENYAGKFPFWISPLQTMVIPISEEFNDYAIEVSKKIKDAGISSAVDIKNNNINYKIRDHSLAKIPLLLICGKKEVDSNSVTIRRLDSNKQENMEIDLFLKTFSALNKASSN

SEQ ID NO: 189428 - protein, 636 aa, Unknown
  Bacterial polypetide isolated from the Sargasso Sea
MPKIKLPDGSVKEFDKPINFDELASSIGSGLAKATVAGMLNGKLVDASELIESDSEAVLITNSDEDGVEIIRHSCAHLFGHALKQLYPMAKMAIGPTIENGFYYDIDLEESLSENDLEKIELRMKELAQTNYDVVREVVTRKKALDIFENRNEPYKIEIINEIPNDEIIALYHHNEYIDMCRGPHVTSVRHLKAFKLTKIAGAYWRGSSDNKMLQRVYGTAWSSEKELKKHLVLLEEAEKRDHRKLGKELDLFHFQDIAPGMVFWHSNGWSIYKELEDYIRRKISKEGYKEIKTPQILDKDLWVESGHWDKYKDNMYKTIIDDRELMIKPMNCPGHVQIYNQGIKSYKDLPVRMAEFGSCHRNEPSGALHGLMRVRNFVQDDAHIFCTEDQIESETINFCKLLQDVYSELGFDKVTIMYADRPDQRVGNDEIWDKAENALLNASKATGIPFDTNRGDGAFYGPKLDFYLHDAIGRKWQCGTLQVDFNMPGRLGASYVGEDNEKHTPVMLHRAILGSLERFTGILIEHYEGKFPLWLAPIQLVIATITSKSDKYAQEIEEKFINKGIRVILDSRNEKINYKVREHSVNKVPYIFVVGVNEMDDKTVAIRKLGSNKQEILSIKDSVDLILKETAAPDS

SEQ ID NO: 189429 - protein, 643 aa, Unknown
  Bacterial polypetide isolated from the Sargasso Sea
MKITLPDNSLRELPEGSSGYDLAKDIGPGLAKSAIAVTINGVQRDLHDPIDADASVSIITIDSDEGIEIMRHTLTAQVLARAIKNLYPKSKLAIGPTVQDGFYYDVESDESISSDDLSKIEEEMKKIIKTKSAITKKLVSKKEALKIFKSNKEPYKEIIINESDQDDNFQLYYQDDEEFVDLCRGPHLPNLGFIGSFKLTKVSGAYWKGDSKNSMLTRIYGTAFSNDKDLQNHLDNIEEALKRDHRKLGKEMDLFHFQDEAPGMVFWHPNGWTVYRKLRNFVRDRLKENNYIEVNTPQVIDRKLWEASGHWDKYRENMFITEIDEEHANEKRVNALKPMNCPGHVQIYNQGIKSYKDLPLKYAEFGLCHRYEPSGTMHGLMRVRAFTQDDGHIFCTEDQIESETGLFIEFLSSIYADLGFKNFDIKLSTRPEMRVGSDETWNKAEAALEAAIKNLEYPYRIDEGDGAFYGPKLDFVLTDAIGREWQCGTFQLDFNLAERLDASYVGEDGKKHTPVMIHRAVLGSFERFIGILIENYAGKLPFWLSPQQVVVASIVSDVNDYSLEIVELLKKQGILAEADLRNEKISYKIREHSNRKVPIILAIGNNEKKDGTVSLRRIGSTETKVVKLKEAMKQITKENLIIN

SEQ ID NO: 189430 - protein, 307 aa, Unknown
  Bacterial polypetide isolated from the Sargasso Sea
MPTITLPDGNSLNFKNKVTGLQIAEKISKSLSKQALVISVDGNLKDLNYEIDKDCSVKIYTSKDKEGLETIRHDTAHILAMAVQELFPGTQVTIGPVIDNGFYYDFARKEPFTEQDLRKIEKKMLEIVERDEPTHKEVWNRDKAVEHFKKAGEIYKAEIIKDIPKEEEVSVYFHGKWHDLCRGPHLMSTGKIGKYFKLMKVSGAYWRGDSNNEMLQRIYGTSWPSQKELDQYLNRLEEAEKRDHRKLGKEMDLFHFREESPGSVFWHEKGWNLFLKLISYMRAKQDEDGYKEINTPEILDRSLWEKS

SEQ ID NO: 189431 - protein, 345 aa, Unknown
  Bacterial polypetide isolated from the Sargasso Sea
KSKGPFMMDKVLWERSGHWEKYSDNMFVTSSENRDYAIKPMNCPGHVQIFNQGLKSYRDLPLRMAEFGCCHRNEPSGGLHGLMRVRGFTQDDAHIFCTEDQVQAEVSACIKMVFDVYSTFGFKDVQVKLSTRPEKRIGTDEMWHRAEQGLAEALDANGIAYDLQPGEGAFYGPKIEFTLHDCLGRAWQCGTVQLDFALPGRLGASFVAEGNDRQVPVMIHRAILGSLERFIGILIEEYAGFFPAWLAPTQVVVMNITDNQAEYVQDLVKTFKSHGIRAISDLRNEKIGFKIREHTLQRVPYLVVVGDKEVEAGDIALRTRKGEDLGKMSVSDFVTKLTTEIKNRV

SEQ ID NO: 189432 - protein, 656 aa, Unknown
  Bacterial polypetide isolated from the Sargasso Sea
MWPYVWVTTGQGYFMPVITLPDGSKREFAHPVSTLDVAADIGPGLAKACIAGRVNGELKDACDLIETDAELSIITAKDEEGIEILRHSCAHLLGHAIKQLWPQTKMAIGPVIDNGFYYDIDLEHKLTQEDIEALEKRMLELAKTNYDVVKRVVSWQEARDTFAARGEEYKIAILDENISKDATPALYHHEEYTDMCRGPHVPNMRFCHHFKLMSIAGAYWRGNSENKMLQRIYGTAWADKKALSTHLARLEEAAKRDHRKIGKQLDLYHMQEEAPGMVFWHNDGWSIFLELERFIRRKLNQYTYQEVKGPLMMDRVLWERSGHWDKYSEAMFTTSSENREYAVKPMNCPGHVQIFNQGLKSYRDLPLRMAEFGCCHRNEPSGSLHGLMRVRGFTQDDAHIFCTEDQVQAEVSSCIQMVYDTYSTFGFENIVVKLSTRPEKRIGDDAMWDRAEEALKQALRANNIEFTILPGEGAFYGPKIEFTLHDCLDRAWQCGTVQLDYALPSRLGATYVAEDNSRQTPVMIHRAILGSLERFLGILIEEYAGRFPTWLAPMQVVVMNITDKQADYVEEVVKFFKEQGIRASFDLRNEKIGFKIREHTLRRVPYLLVVGDQEMENKEVAVRTRDGVDLGKMRIEDFAAKIHQQISLRSLKLLEE

SEQ ID NO: 189433 - protein, 500 aa, Unknown
  Bacterial polypetide isolated from the Sargasso Sea
VTKKEAIKTFQERDETFKLRIIEEIPDEGLINLYKHEEYIDMCRGPHVPNTSHLRHFKLLKLSGSYWRGNSENESLQRIYGTAWAKEKELNDYLTRIEEAEKRDHRKLGKKHSLFHIQEESPGMIFWHPNGWTIYQVLEKYVREILNKNDYLEIKTPQAVDKSLWEKSGHWDKFREDMFTTASENRTYAIKPMNCPCHIQVFNQGLKSYKDLPIRLAEFGSCHRNEPSGALHGLMRVRNFTQDDAHIFCTEEQIQAEVSTFIDLVFEVYKTFGFDEIIIKLSTRPEKRVGSENIWDKSEEALMKALDNKSIKWELQPGEGAFYGPKIEFSLKDCLDRIWQCGTIQVDFSMPIRLDATYVDLNNEKRNPVMLHRAILGSFERFIGILIEQYEAKFPIWLAPYQIILLSITDRNIEKCLKFNQLINIKGYRSKVDIRNEKIGYKIREATIGRIPLIAVIGDKEEEVDSVALRALDGKNLGIFKLDDLYKLMNILIEKKGRTE

SEQ ID NO: 189434 - protein, 382 aa, Unknown
  Bacterial polypetide isolated from the Sargasso Sea
SRKQLTRIYGISFPKQNELTKYLELVEEAKKRDHRKIGKELELFTFSKKVGVGLPLWLPKGAALRERLENFLKKAQMKAGYKQVITPHIANKELYVTSGHFQKYGSDSFQPIETPAEGESFLLKPMNCPHHCEIYKSRPWSYKELPLRYAEFGTVYRYEQSGELHGLTRVRSFTQDDAHIFCTPDQLNKEFKNVIELVLYVFSSLGFNEFEAQVSLRDKNNSEKYIGSNQNWELAENAIISATEEKNLKYVIEYGEAAFYGPKLDFMVKDALGRKWQLGTIQVDYNLPERFELTYKGDDNKHHRPVMIHRAPFGSLERFVAILLEHSEGKLPIWLAPEQVIILCVSEKHEKYAKKVLNYLENNEIRASLESRNETIGKKIRQ

SEQ ID NO: 189435 - protein, 514 aa, Unknown
  Bacterial polypetide isolated from the Sargasso Sea
NPGTQVTIGPVMKNGFYYDFARKEPFTEDDLEKIEKKMSEIIDKDVKTKREVWKRDKAISHFKKIGEKYKAEIIESIPENEELTVYHHGDTWYDLCRGPHLVSSGKIGKAFKLTKVAGAYWRGDSKNEMLQRIYGTGWASQKDLNDYLKRIEEAEKRDHRKLGKEMDLFHFREESPGSVFWHEKGWALFQKLINYMRARQDAAGYKEVNTPEVLDRLLWEKSGHWEKYGENMYTSETPDEKVFAIKPMNCPGHIQVFNQGLKSYRDLPLRITEFGKVHRYEPSGALHGLLRVRAFTQDDAHIFCSEDQITSECLNVTNLILDIYKDLGFEKVVLKYADRPEVRVGEDKVWDKAEASLLEAVKATKLEYSINKGEGAFYGPKIEFVLRDAIGRDWQCGTVQVDLNLPGRLDATYVDKDGTKKVPVMLHRALFGSLERFIGILIENYAGKFPFWISPLQTVVIPISEDFEEYASKVSKKIKEAGMSSIVDLKNHNLNYKIREHSLAKVPILLICGK

SEQ ID NO: 189436 - protein, 449 aa, Unknown
  Bacterial polypetide isolated from the Sargasso Sea
HVGKAFKLQKLAGAYWRGDSDNEMLQRIYGTAWRDEKELKTHLLMLEEAEKRDHRRLGREMDLFHFQEEAIGSVFWHPKGWTLFQSLIDYMRHRQNEAGYLEINTPDIMDRGLWEKSGHWEKFSENMFTTEAKEDRIFALKPMNCPGGVQVYNQGIKSYRDLPLRMAEFGKVHRFEPSGALHGLMRVRAFTQDDAHIFCAEEQITDECRVVCRLILDIYKEFGFDDVRIKFSDRPEKRIGSDDIWDKSEAALKLAVEATGLEYSVNPGEGAFYGPKLEFVLRDAIGRDWQCGTLQVDLNLPERLGAFYIGTDGEKYHPVMLHRALFGSLERFTGILIEHYAGKLPMWMAPVQAVVATITSEADDYALEVRDALKAAGIRTEIDIRNEKINYKVREHSHTKVPAMLVVGQREIADRKVALRRLGGKDQDFLALDEAVARLADESRSPAAT

SEQ ID NO: 189437 - protein, 602 aa, Unknown
  Bacterial polypetide isolated from the Sargasso Sea
AVKINDEIKDISLPINTDVSVAILKKDSEEALELIRHDCAHVMAEAVQELFPGTQVTIGPAIENGFYYDFARKEPFTLSDLPKIEKKMHEIIQRNESFVREVWSKDEAIKYFKDKGENYKVELINDLSDNEEISIYKQGGWLDLCRGPHMISTKQIGKAFKLMKVAGAYWRGDSSNAMLTRIYGTAWATEKDLEKHLLQIEEAEKRDHRKLGKEMDLFHFQEEAPGAVFWHPKGWTLFQSLINYMRNRQDKAGYVETNTPDMMDKSLWETSGHWDKFSDMMFRTEAKDDKIYAIKPMNCPGAVEIFKQGLKSYRDLPFLLSEFGKVHRYEPSGALHGLMRVRAFTQDDAHIFCTEDQITQESKTVCDLILSIYKDFGFDNVRIKFSDRPEKRVGDDAVWDKAEAALMQAMEATGLEYTLNPGEGAFYGPKLEFVLRDAIGRDWQCGTLQVDLNLPGRLGATYVGEDGNKKTPVMLHRALFGSLERFTGILIEHYAGHLPLWLSPLQVMVATITSDTDDYAINVKNELIKNGIRADVDLRNEKIGYKIREHSNSKVPIIIAVGKKESQEKTTSVRRIGSAETKTFKLDEIVTTLSKETKSPIE

SEQ ID NO: 189438 - protein, 470 aa, Unknown
  Bacterial polypetide isolated from the Sargasso Sea
LGEDWWDLCAGPHVEHTGQLNAKAFELESVAGAYWRGDETKAQLQRIYGTAWETAEQLAEHKRRKEEALRRDHRRIGKDLDLFSIEDEAGAGLVFWHPRGARMRLLIEEFWRQAHFEGGYELLYTPHVADISLWKTSGHLDFYAESMFGPMEVDEREYQLKPMNCPFHVLTYASKLRSYRELPIRWAELGTVYRYERPGVMHGLMRVRGFTQDDAHVFCLPEQISDEILKILDLTERILSTFDFNTYEINLSTRPEKSIGDDAVWDLATKGLIEALERKGWAYKIDEGGGAFYGPKIDLKIEDAIGRMWQCSTIQLDFNLPERFKLDYIAADGSKQRPIMIHRAIFGSLERFFGIMTENYAGDYPLWLAPEQVRLLPVTDEVQPYAESLLYQLTQTGVRATIDRSGDRLGKLIRTGEQMKIPVLAVIGAKEAEQNAVSLRSRRDGDLGVVAVADLLRAAQNANSQRAAGL

SEQ ID NO: 189439 - protein, 316 aa, Unknown
  Bacterial polypetide isolated from the Sargasso Sea
PDEKVFAIKPMNCPGCIEVFNQGLKSYKDLPLKMSEFGKVHRYEPSGALHGLLRVRAFTQDDAHIFCTEDQITKECLIVTNLILEIYKDLGFENVILKYSDRPNLRVGDDSVWDKAETALLEAVKATKLEYSINKGEGAFYGPKIEFVLRDAIGRDWQCGTLQVDFNLPGRLGASYVDKDGSKKIPVMIHRALFGSLERFIGILIENYAGKFPFWISPLQTVVIPISEEFGDYATHISKKIKEAGMSSFVDLKKQNLNYKIRDHSQAKIPLLVICGKKEVDSNSVTIRRLDSNKQENMDLNSFLKTFSALNKASSN

SEQ ID NO: 189440 - protein, 452 aa, Unknown
  Bacterial polypetide isolated from the Sargasso Sea
ESSSKIGKAFKLTKVSGAYWRGDSNNEMLQRIYGTSWANQKELDLYLQRIEEAEKRDHRKIGKEMDLFHFREESPGSVFWHQKGWSLFQKLISYMRMKQEIAGYKEINTPEILDRSLWEKSGHWEKFGANMYTSTTPDEKVFAIKPMNCPGCVQVFNQGLKSYRDLPLKMSEFGKVHRYEPSGALHGLLRVRAFTQDDAHIFCTEEQITEECLTVTNLILEIYKDLGFEDVILKYSDRPELRVGDDQVWDKSEAALLEAIKATKLEYSINKGEGAFYGPKIEFVLRDAIGRDWQCGTLQVDLNLPGRLGASFVDSDGNKKVPVMLHRALFGSLERFIGILIENYSGKLPFWLCPTQTIVIPISSDFDHYAKQVNNQLKKVGLASEVDLKNHNLNYKIREHSLTKVPMLLICGKKEVDSNTVTIRRLDSKKQENMDLKEFLKKYSALNKAPSI

SEQ ID NO: 189441 - protein, 222 aa, Unknown
  Bacterial polypetide isolated from the Sargasso Sea
VILKYSDRPDLRVGDDAVWDKSEAALLEAIKETKLEYTINKGEGAFYGPKIEFVLRDAIGRDWQCGTLQVDLNLPGRLGATYVEKDGSKKIPVMLHRALFGSLERFIGILIENYSGKLPFWLTPLQVVVIPISSDFDDYSKKINHELKKVGISSEVDLKNHNLNYKIREHSLLKVPLLLICGKKEVDSNTVTIRRLDSKKQENMDFNEFIKKYSALNKAPSI

SEQ ID NO: 189442 - protein, 260 aa, Unknown
  Bacterial polypetide isolated from the Sargasso Sea
AFTQDDAHIFCTEQQITEECLTVTNLILEIYKDLGFEDVILKYSDRPELRVGDDQVWDKSEAALLEAIKATKLEYSINKGEGAFYGPKIEFVLRDAIGRDWQCGTLQVDLNLPGRLGASFVDSDGNKKVPVMLHRALFGSLERFIGILIENYSGKLPFWLCPVQTIVIPISSDFDDYAKEVNSQLKKVGISSEVDLKNHNLNYKIREHSLTKVPMLLICGKKEVDSNTVTIRRLDSKKQEIMDFKEFLKKYSALNKAPSI

SEQ ID NO: 189443 - protein, 325 aa, Unknown
  Bacterial polypetide isolated from the Sargasso Sea
FITEIDEEHSNEKRTNALKPMNCPCHVQVFNQGLRSYKDLPIRYAEFGSCHRYEASGTLHGLMRVRGFTQDDGHIFCTEHQIQDETKKFIELLTDIYAQLGFDEFDIKLSTRPEIRAGSEQVWDRAELALENAIKNLNLPYELVDGDGAFYGPKLDFVLIDALGREWQCGTFQLDFILPERLDAKFVDSDSEKYNPVLIHRAVLGSFERFLGVLIEHYGGALPTWLSPIQAEILNITDKQAEYCSKIGNLLKKSGFRAHSDLRNEKITYKIRDHSMQKTPFLLIAGNREMENNTISVRARGGEDLGEMSIDDFIQKLQNVVDKKI

SEQ ID NO: 189444 - protein, 460 aa, Unknown
  Bacterial polypetide isolated from the Sargasso Sea
FKLLSTSGAYWRGNENNKMLQRIYGTVFSTKDALKTHLQNIEEAKKRDHRKLGKELKLFAFDDEVGPGLPLWLPNGAVMIEELEKLAKESEMLAGYEQVRTPHLTKGKLYERSGHLEHYKDSMYPAMDVDGIEYFVKPMNCPHHHKIYASYPRSYRDLPLRLAEYGTCYRYEKSGQLFGLMRVRSLQMNDAHIYCTKEQFKEEFLAVCNMYLQYFDIFGIEKYSMRLSLHDKDELGKKYVNEPELWIETEGWVREALIEGGLDFEEVPGEAAFYGPKIDVQVWSAIGKEFTLATNQVDFAIPAKFDLNYTDEKGSDNTPLCIHRAPLGTHERFIGFLIEHFGGNFPLWLAPVQVAVLPLSDKFLDYGNRVVKVLKESGIRVKLNDRADKIGSKIRQAELEKINVMLIVGEKEAENNSVSVRKRFEGDTGIIPLEDLRNQLLNEIKYRRLTHRKKTEATAE

SEQ ID NO: 189445 - protein, 484 aa, Unknown
  Bacterial polypetide isolated from the Sargasso Sea
SDRITAYKQGDFIDLCRGPHTPSTGNLKYFKLLSTSGAYWRGNENNKMLQRIYGTAFSKKSELKKYLNFLEEAKKRDHRKIGKELEIFTFDEEVGPGLPLWLPNGGVILNELESLARETEDRHGYHQVRTPHLTKGDLYKKSGHLELYKDAMYPAMDVDGMDYYVKPMNCPHHHKIYAASPKSYRDLPYRISEYGTCYRYEKSGQLFGLMRVRSMQMNDAHIYCSKDDFSQEFLDVCKMYLEYFDIFGIEKYEMRLSVHDKEGLGKKYIDEPDLWIETENIVRRTLTEGEINFTEISGEAAFYGPKVDVQVWSAIGKEFTLATNQVDFAIPKRFGLSYTDQDGKEKTPLCIHRAPLSTHERFVGFLIEHYGGDFPVWLSPIQIAILPVSEKTNHYAYEVDKQLTQAGFRTTIDDKPDKIGSKIRNAELNKIPIMAVIGEKEAQNNTLSIRRRFVGDQGELSIDKIINDLTKEIKQRSQPYRKSE

SEQ ID NO: 189446 - protein, 427 aa, Unknown
  Bacterial polypetide isolated from the Sargasso Sea
AVTFPTEKLMKEYNMRIEEAKKRDHRTIGVNQELFFFHQLSPGSCFFQKNGARIYNKLVEFIREKYWEYEYDEVITPNIYNFDLWKTSGHAAHYKENMFSFNVEKEEFGLKPMNCPGHCVMFAHRRRAYRELPMRVADFGVLHRNEFSGALHGLTRVRRFQQDDAHIFCREDQMEDELSGFLKFLDEVYEVFGLTYEMKLSTRPEGYLGELEVWDKAEAALKASLDRSGREWKLNEGDGAFYGPKIDITVFDALKRRFQCATVQLDFQLPIRFDLSYVDENNDPVKPIIIHRAILGSVERMFAILTEHFAGKWPFWLSPKQVMLVPISEANKDYCFELKKSLRKSGFYVEVDASDRKMQKKVREAQLEQYNYILVCGDSEQANGTVNVRTRDNKVHGEHKLEALIEVLTRERDTRSLTCCFEDKTNE

SEQ ID NO: 189447 - protein, 389 aa, Unknown
  Bacterial polypetide isolated from the Sargasso Sea
HSLFHIQEESPGMIFWHPNGWTIYQVLEKYIREILKKNDYLEIKTPQAVDKSLWEKSGHWEKFRDDMFTTASENRTYAIKPMNCPCHIQVFNQGLKSYKDLPIRLAEFGSCHRNEPSGALHGLMRVRNFTQDDAHIFCTEEQIQEEVSTFIDLVFEVYKTFGFDEIIIKLSTRPEKRVGSEEIWDKSEDALTKALDNKNLKWELQPGEGAFYGPKIEFSLKDCLNRVWQCGTIQVDFSMPIRLDATYVDIDNEKRNPVMLHRAILGSFERFIGILIEQYEAKFPIWLAPYQIILLSITDRNIEKCLKFNELINNNGYRSKVDVRNEKIGYKIREATLGRVPLIAVIGDKEEEIDSVALRALDGTNLGIFDLPNLYKLMDELIEKKGRTE

SEQ ID NO: 189448 - protein, 329 aa, Unknown
  Bacterial polypetide isolated from the Sargasso Sea
WEKFGANMYTSETPDQKIFAIKPMNCPGCVQVFNQGLKSYRDLPFKMSEFGKVHRYEPSGALHGLLRVRAFTQDDAHIFCTEDQITEECLSVTNLILEIYKDLGFENVILKYSDRPDLRVGDDAVWDKSEAALIKAVEASKLEYSINKGEGAFYGPKIEFVLRDAIGRDWQCGTLQVDLNLPGRLGASYVDKDGSKKIPVMLHRALFGSLERFIGILIENYAGKLPFWISPLQTVVIPISEDFNEYALSVHKKIKNAGISSDVDLKNHNLNYKIREHSNSKVTMLLICGKKEVDSNAVTIRRLDSNKQENMLIDEFIKKYTALNKAPSI

SEQ ID NO: 189449 - protein, 630 aa, Unknown
  Bacterial polypetide isolated from the Sargasso Sea
TPFEIAESIGARLANDALAAQVNSKLVDLNVPIDTDADVAILTGDSPEGHAVLLHSCAHLMAQAVKEFWPNAKLTIGPAIENRFYYDFDVDFTFTENDLSKIEQKMHELAKEDYPCIRTNLSRDEAINIFKDMGEDYKLEIIQSIESDEQLSSYAQGDFVDLCRGPHIPSIGKLKYFKLLNISGAYWRGDENNKMLQRIYGTVFTSKKKLNQYLNFLEEAKKRDHRKLGKELSLYAFDEEVGPGLPLWLPNGAVIMDELETLAKETERTAGFHRVRTPHLTKGSLYEKSGHLDHYRDAMYPSMDVDGTEYYVKPMNCPHHHKIYDSSPKSYRDLPVRLSEYGTCYRYEKSGQLFGLMRVRSMQMNDAHIYCTAKQFKDEFLAVCNMYLHYFDIFGIDKYQMRLSLHDPAGLGKKYIDEPTLWQQTESEVRQALIEGEIDHVEISGEAAFYGPKIDVQVWSAIGKEFTLATNQVDFAIPKRFGLTYTDEEGKEQTPLCIHRAPLSTHERFIGFLIEHYGGDFPLWLAPVQVAVLPISDKVLDYAKMVEKTLYESGIRVQLNAQAEKMGAKIRQAELQRINVMLVVGEKEADSNQVSVRRRFQGDLGMQPLDGVVKELNNEIKTRRNTYRTN

SEQ ID NO: 189450 - protein, 475 aa, Unknown
  Bacterial polypetide isolated from the Sargasso Sea
KIIKTKSAITKKLVSKKEALKIFKSNKEPYKEIIINESDQDDGFQLYYQDDEEFVDLCRGPHLPNLGFIGSFKLTKVSGAYWKGDSKNSMLTRIYGTAFSNDKDLQNHLENIEEALKRDHRKLGKEMDLFHFQDEAPGMVFWHPNGWTVYRKLRNFVRDRLKENNYIEVNTPQVIDRKLWEASGHWDKYRENMFITEIDEEHANEKRINALKPMNCPGHVQIYNQGIKSYKDLPLRYAEFGLCHRYEPSGTMHGLMRVRAFTQDDGHIFCTEDQIESETGLFIKFLSSIYADLGFKNFDIKLSTRPEMRVGSDETWDKAEEALEAAINNLGYPYRIDEGDGAFYGPKLDFVLTDAIGREWQCGTFQLDFNLAERLDASYVGEDGKKHIPVMIHRAVLGSFERFIGILIENYAGKLPFWLSPQQVVVASIISDVNDYSLGIVESLKKEGILAEADLRNEKISYKIREHSNRKVPII

SEQ ID NO: 189451 - protein, 178 aa, Unknown
  Bacterial polypetide isolated from the Sargasso Sea
AFYGPKLEFILKDAIGREWQCGTLQVDLNMPERLGGHFIAEDGQKYNPVMLHRALFGSLERFTGILIEHYAGALPLWLSPVQAVVTPITTEINEYGEEVYESLKNAGIRVEKDLRNEKISYKIRENSLKKIPFQLILGKKEIEERSITMRAFGSDKQEKIKFENLNDFFIKKCMMPSQ

SEQ ID NO: 189452 - protein, 387 aa, Unknown
  Bacterial polypetide isolated from the Sargasso Sea
MENEEKFIDTLRHDTAHVLAMAVQELFPETQVTIGPVIENGFYYDFDRKDPFTDKDLSVIEKKMKEIVNRDVKTSFKVMKREDAIKLFLDKGEKYKVEIIKDLPESEELKVYYHGDWFDLCKGPHLESTGKIGKAFKLTKVAGAYWRGDSNNPMLQRIYGTAWETEEELKNYLMLLEEAEKRDHRKLGKQLDLFHFQEEAPGSVFWHAKGWTLFRTLIDYMRHRQEEAGYEEINTPDIMDKSLWELSGHLEKFGDNMFTTEAREDRVYALKPMNCPGCVQVYKQGLKSYRDLPLRVAEFGKVHRYEPSGALHGLMRVRAFTQDDAHIFCTEDQITEESKKVCDLVLSIYKDFGFDKVSIKFSDRPEKRVGSDAIWDKSEEALRQAME

SEQ ID NO: 189453 - protein, 420 aa, Unknown
  Bacterial polypetide isolated from the Sargasso Sea
TAWNTEKELNKHLHELEEAEKRDHRKIGKEMDLFHFQDEAPGMVFWHSDGWTIYRNLRNFVRSRLQESDYIEVNTPQVIDRKLWEASGHWDKYRENMFITEIDEEHANEKRVNALKPMNCPGHVQIYNQGIKSYKDLPLKYAEFGLCHRYERSGTMHGLMRVRAFTQDDGHIFCTENQIESETGLFIEFLSSLYSDLGFKEFDIKLSTRPEMRVGSDEIWDKAEAALESAIKNLGYPYRIDEGDGAFYGPKLDFVLTDAIGREWQCGTFQLDFNLAERLDAQYVGEDGSKHYPVMIHRAVLGSFERFIGILIENYAGKLPFWLAPKQVVVASIVSEVNDYADEIANMLKKQGIRAEVDLRNEKIGYKVREHSTKKVPFIFAIGNNEKAERSVSIRQIGSTDTSSMSLDEGIEFICCQNKV

SEQ ID NO: 189454 - protein, 319 aa, Unknown
  Bacterial polypetide isolated from the Sargasso Sea
YREDGEIIPVPKEMLPVTLPNVREIGNQGNLLNGLKEWKNTVCPHTGMKAVRETDTFDTFFESSWYFLRYCSPREKEKPFLSNEVDYWLPVDQYIGGVEHAILHLLYSRFFVKALRDMGYVKIDEPFKGLFTQGMVTHKTFKDKKNNWLYPHEITIKNNSYFDAEGSEVAVGKIEKMSKSKKNVVDPSYIINLYGADTARWYMLSDSPPDRDLEWTEKGIIGAHKFINKIWDLSMKAIEYKSDSVLENEEMLTQQNKLILSVTENIEKFHFNKAVANIYEMVNLIQKHIIAKSVSIELLKESIINLAKVTHPFIPHISE

SEQ ID NO: 189455 - protein, 346 aa, Unknown
  Bacterial polypetide isolated from the Sargasso Sea
GFCKKYKLDILEVVSPDGKKHSNFSKRSEAFTDDGVLVNSEFLDGLSVESAKNKIIGEIEKKKIGKKKITFRLKDWGISRQRYWGCPIPMIYLGDGSIVPVEKDELPIKLPENIDLNTSGNPLENHKEWKKTKHKKTGKPATRETDTLDTFVDSSWYFMRFCSPKSVERPFEIDDLNYWMPVDQYIGGIEHAILHLLYSRFFMKALKANNNSIKYSEPFKGLFTQGMVCHETYKDSKGIWLSPDEIEKGSNDQAIKKTDKSKITVGPSEAMSKSKKNIIDPESMIKIYGADAVRWFILSDSPPEKDIQWSNQGVTASYKFLQKIWSLNSKVVERKNPKISKEVKIR

SEQ ID NO: 189456 - protein, 309 aa, Unknown
  Bacterial polypetide isolated from the Sargasso Sea
CELNFKIEGDLPVKEIKCFTTRPDTLFGFSFLALSPDHPISKYYESNPEFIKFKEECSKTGTTEESLALAEKIGFKTNLKAINPLKEEEKVPVYFANFVLMDYGFGAIFGCPGHDQRDFDFAKKYDLSIKTVVRPKDKEKFEVKTEAYSGEGIIINSEFLDGLNAPDQSVLEAIKILNDKQIGKEKINFRLKDWGVSRQRYWGCPIPIAYDEKGEIKPIPKNLLPVRLPKNIDLNCKGNPLENDENWRTVNIDGKKYFRETDTLDTFVDSSWYFLRFCSPKYDDYGFDLEEINYWMPVDQYIGGVEHAI

SEQ ID NO: 189457 - protein, 295 aa, Unknown
  Bacterial polypetide isolated from the Sargasso Sea
CHPEYYKHEQKFFIDMFNAGLAYKKEAEVNWDPVDKTVLANEQVIDGKGWRSGAVVEKKKLSQWFLNISKYSDELLNDLDKLHNWPNKVKIMQSNWIGKSVGAEIKFKVSDKDLYITVFTTRPDTIFGATFLALSTEHEISQSLSIKDGKLNKFIKDCENLNPEKNKKGFKLKLMVDHPFIKEKKLPVFVANFVLKEYGLGAIFGCPAHDQRDLDFANEYNIDVIPVVKPVNISEENFIIKKDAFVDSGTLINSSFLNELTVERAKEKIINRIENEKIGRKKINYKLRDWGISRQ

SEQ ID NO: 189458 - protein, 294 aa, Unknown
  Bacterial polypetide isolated from the Sargasso Sea
IDGRGWRSGALVERKNIPQWFIKITAFAQELLDDLTQLEGWPSRVRTMQSNWIGRSEGLTLEFEVVDAKDGTEPISVYTTRPDTLMGVTYLAVAPKHPLAEIAAAKNNKLANFIEEQNRLKVAEAELATLEKMGIDTGFKAIHPITKEELPIFIANFVLMSYGSGAVMAVPAHDQRDWEFAKKYNLPIKLVIEPNDATMSADLEKSAFVEKGKVINSGQFDGLNFDEAFDSIAAYLSEQGSGKKTTNFRLRDWGVSRQRYWGAPIPMVNCKACGSVPVPEKDLPVLLPRRCRTR

SEQ ID NO: 189459 - protein, 299 aa, Unknown
  Bacterial polypetide isolated from the Sargasso Sea
WCFNNIPDWKETVCPKTGMKAYRETDTFDTFFESSWYYFRYCNSRLSEPFDKKDVDYWLPVDQYIGGIEHAILHLLYSRFFTKALRDLGYFNLNEPFKGLFTQGMVTHITYKNQNGEWVEPKNVKGNNKKLKDNKNLNVETGKIEKMSKSKKNVVDPNDIINLYGADTARWFMLSDSPPERDLQWTETGISASFKFINRLYELVDKYKIYKGNNLNDNDIKEELKKIINQVSKNIEAFQFNKSVAKIYEFVNILNNNLSKNKISKDVFGWSLNKLSIILQPFVPHISEEIWSNIGNKTL

SEQ ID NO: 189460 - protein, 187 aa, Unknown
  Bacterial polypetide isolated from the Sargasso Sea
MADIEIPYDPAKIEQKIQSYWKENETFSVVEDPNKEKYFCLSMFPYPSGSIHMGHVRNYTIGDVISRFHRMLGKNVLQPMGWDAFGLPAENAAIKNDIQPSEWTQENIKNMKNQLSRMGFAYDWKREFATSDENYYKWEQWFFLELVKKGLAYQEEAEVNWDPVDQTVLANEQVIDGKGWRSGAEVQ

SEQ ID NO: 189461 - protein, 164 aa, Unknown
  Bacterial polypetide isolated from the Sargasso Sea
MKRYNFRETEQKWQQKWSEAKTFQVFENTDLPKYYVLEMFPYPSGRIHMGHVRNYTLGDLLARYKKACGFNVMHPMGWDAFGLPAENAAFERNIHPAKWTDQNISTMREQLKAMGLSYDWDRELSTCDPEYYKHEQKMFLDFVKNNLAYRKESWVNWDPVENTV

SEQ ID NO: 189462 - protein, 309 aa, Unknown
  Bacterial polypetide isolated from the Sargasso Sea
KKKYYVLEMFPYPSGKIHMGHVRNYTLGDVIARYKRMKGFNVLHPMGWDAFGLPAENAAITEKKHPKEWTYKNIETMKKQLLQMGLSLDWKREIATCHPDYYKHEQKFFIDLFNAGLAYKKEAEVNWDPVDKTVLANEQVIDGKGWRSGAVVEKKKLSQWFLKTSKYSEELLNDLEKLDKWPNKVKIMQSNWIGRSVGAEIDFQVSNSVDKIKIFTTRPDTIYGATFLALSTDHKISKGLSKKHPAIKKFIEECKVINPDKVKKGYNTGLTVDHPFIKEKKIPVFIANFVLMEYGLGAIFGCPAHDQRD

SEQ ID NO: 189463 - protein, 294 aa, Unknown
  Bacterial polypetide isolated from the Sargasso Sea
MDYGLGAVFGCPAHDQRDLDFANKYNLSIKTVVQPNDSIDELVVKKEAYTGGGKIINSKFLNGLNVPNESIIKTIEILEKKKLGIKKINFRLKDWGVSRQRYWGCPIPVAYDNNGNVFKIPKEDLPVLLPENINLKTKGNPLDAQKEWKSVEINSKLLTRETDTLDTFVDSSWYFLRFCSPQNSSYGFNFDEINYWMPVDQYIGGVEHAILHLLYSRFFMRAINYKNENFEIKEPFQGLFTQGMVCHETYKDEKNNWLGPDEIESKNGKDFFIKKSKKKVIIGPSESMSKSKKN

SEQ ID NO: 189464 - protein, 221 aa, Unknown
  Bacterial polypetide isolated from the Sargasso Sea
FFESSWYYARFASYDNDEFMLDDRAKYWLPVDQYIGGIEHAVLHLLYSRFFFRCMRDMGLVEGDEPFLNLLCQGMVLKDGAKMSKSKGNTVDPQGLIEKYGADTVRLFVMFAAPPEQSLEWSDQGVQGAHRFINRIWRLVNKHIQAGIKKESIEVTSEACKALKSKIHKTLAKVKDDYLRRHSFNTAIAAIMELSNDIPGDFLDSKANPEMREVANEAIES

SEQ ID NO: 189465 - protein, 339 aa, Unknown
  Bacterial polypetide isolated from the Sargasso Sea
PLKTMSDFYEVNDRDIPLVRETDTFDTFMESSWYYARFCSSDSDKAMLDDRAKYWLPVDLYIGGIEHAILHLLYARFYHKLLRDEGLVEGNEPFKRLLTQGMVLNDGAKMSKSLGNTVDPEEMIQNYGADTVRLFMMFTSPPEQSLEWSDTAINGSYRFLKKLWKLIKTHQDSIKDISGISSNEKFNGNQNKLRRKTHQTISKVTDDIGRRYTFNTAIAAVMELVNEVSTFNVDDELDRQVIKEAIESILLLLSPIVPHICHQLWLDINHDQPIIDARWPKFDSSLLKSETSLIVVQVNGKLRSKLEVDASISEDELKSMALSDEKVVRFIDGNEIKKI

SEQ ID NO: 189466 - protein, 293 aa, Unknown
  Bacterial polypetide isolated from the Sargasso Sea
DWLISRQRYWGTPIPIYYDKNENIIPVDINELPVVLPEAKEFMPTGQSPLTLDEEFLWFDHPKYGKLRRETDTMDTFVDSSWYHLRFASDESSKVDPFNKERLKNWLPVHQYTGGAEHAVMHLLYARFFNKVLRDLGFVDFDEPYQNLFNQGVLLKDHQKISKRSNPLAPDPLVKEFGADAVRLYLMFLGPWDQGGDWSDDAFNGITRWLNRVWDISTRDTDEIISNDDNNKDFEILINSTVKKVSEDLEKFKFNTSISTLMEYTNSLSKIWSAGCNNDLWKESIIILIKLLS

SEQ ID NO: 189467 - protein, 322 aa, Unknown
  Bacterial polypetide isolated from the Sargasso Sea
IAIGEKIGFKTKLEAINPLNPSQKVPVFFANFVLMDYGFGAVFGCPAHDQRDFDFAKKYSLDIKTVVRPEEENENFEVKDEAYSGPGVLINSEFLNKLKVPEESVLKTIDILEEKKIGQKQINFRLKDWGVSRQRYWGCPIPMAYDEHGNVRTIPKENLPVKLPENVNLNSKGNPLDSKLDWKNIIIDGKKYIRETDTLDTFVCSSWYYLRFCSSDNSEYGFKQEEIDYWMPVDQYIGGVEHAILHLLYSRFFMKALGYKNENFKFNEPFEGLFTQGMVCHETYKDQNNNWLSPDEIELVGDQFFKKGDSKHLVKVGPSESM

SEQ ID NO: 189468 - protein, 362 aa, Unknown
  Bacterial polypetide isolated from the Sargasso Sea
SGVQIEIKEIDQWFIKITNYADELLSSLEDLEWPDNVKLMQKNWIGKSFGAEIKYQIDGSKDSLTTFSTRPDTIFGVSFLAISPNHPLATKISKGDKKISNFLEKCKEAKAAEADIAKAEKLGIDTNLRVIHPLTGDKLPVWIGNFVLLDYGTGVVMGVPAHDSRDYEFAKKYNLNIKEVIKNNEEVLPRTENGILINSEKFNGLSSEEGSKKIIEELVKLKSGKQLIQYRLRDWGVSRQRYWGCPIPVIYENGDPKVIDEDDMPVELPKLKDNSSPIPLSQNEDFINLGNNLYRESDTFDTFMDSSWYYARFTSSNNNNEIFDENTKYWLPVDLYIGGIEHAILHLLYSRFFHKALRDIWT

SEQ ID NO: 189469 - protein, 182 aa, Unknown
  Bacterial polypetide isolated from the Sargasso Sea
MERVNFHLLEEKWQKNWNKKKLYNSKFKKNFYCLEMFPYPSGKIHMGHVRNYTIGDVIARYKFMKNYNVLHPMGWDAFGLPAENAAKENKMSPSAWTKKNIQEMKRQLKMLGLSIDWELEIATCDESYYKHQQELFIDFYNAGLVSRKETYVNWDPVEKTVLANEQVINGRGWRSNAIVERK

SEQ ID NO: 189470 - protein, 320 aa, Unknown
  Bacterial polypetide isolated from the Sargasso Sea
MKAVNPFKENERVPVYFANFVLMDYGFGAVFGCPGHDQRDFDFAKKYNLSIKTVVRPKDVENFDVKTEAFPGEGIIINSDFLNDLKAPDQSVVKAIEILEERKIGREKINYRLKDWGVSRQRYWGCPIPIAYNEKGEIKTIPKDQLPVKLPKNINLNCKGNPLDNDENWKIIDIEGEKYFRETDTLDTFVDSSWYFLRFCSPKNDKYGFDLDEINYWMPVDQYIGGVEHAILHLLYSRFFMRSIAYNNDKFKFKEPFEGLFTQGMVCHETYKDENNNWLSPDEVELNGKHYYIKTNSSSKVIVGPSESMSKSKRNVIDPE

SEQ ID NO: 189471 - protein, 314 aa, Unknown
  Bacterial polypetide isolated from the Sargasso Sea
ISTCDEEYYKHQQELFIDFFNKGLVIRKETYVNWDPVDETVLANEQVINGRGWRSNAVVERKKLSQWFFNISKFSNELLEDLNTLDEWPEKVKLMQKNWIGKSVGCEIDFKISSKNTNIKIFTTRPDTIFGATFLAISVDHPLCKGLEKNKDFIEFKKKSSQVGTTEEAIANAEKIGFDTRLKAKHPFIKNKTIPVFVANFILMDYGTGAIFGCPAHDQRDFDFATKYNIEIIPVVKSEKDDNNKKINEAYTGDGKIINSEFLNGFNVEEAKNKIISKIEKKKIGKKKITFRLKDWGISRQRYWGCPIPMLYLK

SEQ ID NO: 189472 - protein, 337 aa, Unknown
  Bacterial polypetide isolated from the Sargasso Sea
FPYPSGKLHMGHVRNYTIGDVISRYQRMLGKNVLQPMGWDAFGMPAENAAMKNNVAPAKWTYENIAYMKTQLRSLGLAVDWSREVTTCKPDYYRWEQWLFTRLFEKGVIYKKSGTVNWDPIDQTVLANEQVIDGRGWRSGALIEKREIPMYYFKITAYADELLSSLDDLPGWPEQVKTMQRNWIGKSKGMEVQFPYNVDSIGEAGALKVFTTRPDTLMGATYVAVAAEHPLATQAAQNNPELQAFIAECKGGSVAEADVATQEKKGLPTGLFVEHPLTGEKLPVWVANYVLMHYGDGAVMAVPAHDERDFEFATKYSLPIKSVVRTSSGDTNPAPWQ

SEQ ID NO: 189473 - protein, 339 aa, Unknown
  Bacterial polypetide isolated from the Sargasso Sea
MKKKILGKKQTNYRLKDWGVSRQRYWGCPIPVAYDENGKVHPIPKSMLPVKLPENIDLKVKGNPLDSQKKWKEIIIDGKKMTRETDTLDTFVCSSWYYLRFCSPNEKHYGFNKEEIDYWMPVDQYIGGVEHAILHLLYSRFFMRAIDYRNENFQIKEPFQSLFTQGMVCHETYKDEDNNWLSPDEVEKVNGKIVKKIDENKIVKVGPSESMSKSKKNVVDPEFIIKNYGADAVRLFILSDSPPEKDIQWSEQGMVSSYKFVQKLWILHNEIKNIIFKNKYENDDKKIEKFVNQMISKITVNLEKFNYNVIIANMYETYNFLINYLKEEKSLKNLKDNYY

SEQ ID NO: 189474 - protein, 305 aa, Unknown
  Bacterial polypetide isolated from the Sargasso Sea
TVELKEIDQWFLKITDYADELLASIENLDWPENVKSMQKNWIGKSFGSEISFSLSSGEKLTAFTTRIDTIYGVTYLAISPNHPISQNLANQDTEIDDFIKKCNETKMAEADMAKADKLGLKTNLKVKHPFTGIDLDVWIANYVLMDYGTGVVMGVPAHDERDHEFALKYNIDIKQVIKADELPSSEKGELINSEKFNGLSSENAIQDINSFLEKEKIGKGIENFRLRDWGVSRQRFWGCPIPVVYKNDEPIFLEKTDLPVELPKIKDGESPKPLSQNNDFFEISSNETREVDTFDTFVDSSWVLC

SEQ ID NO: 189475 - protein, 219 aa, Unknown
  Bacterial polypetide isolated from the Sargasso Sea
RMFILFKAPPEKDLEWDDADVEGQFRFLQRIWRLCDGAKASGLQLQSLLPLPAELAGAETDLRRAVHTAIEAVSDDLQGDELQFNTAVSELMKLSNAMGGQLDAVSAPVAQEAVRSLLLLLAPFAPHLAEELWEQLQGSGSIHQQRWPEVDASALVRDTITVVLQVKGKVRGNLEVPAAISKDELEQVALASDVAKKWLEGNAPKRVIVVPGKLVNLVP

SEQ ID NO: 189476 - protein, 297 aa, Unknown
  Bacterial polypetide isolated from the Sargasso Sea
ILQGFNVLHPMGWDSFGMPAENAARQNNLDPKTWTETNISNMKSQLKKLGLSIDWDREISTCTPEYYKHQQEFFLELYDKGLVYRKEQYVNWDPVDQTVLANEQVIDGKGWRSGASVERKKLNQWFFNISKFSEKLLENLNLLKEWPNKVKVMQKNWIGKSFGCEVDFKIQNSEKIKNIKCFTTRPDTLFGMSFIALSVDHPVSKLYENDEGFINFKKECSATGTTEEAIANAEKLGFKTNLVAINPLDENIKVPVYFANFVLMDYGLGAVFGCPAHDQRDLDFALKYNLEVNTVVR

SEQ ID NO: 189477 - protein, 203 aa, Unknown
  Bacterial polypetide isolated from the Sargasso Sea
MERVNFQLIEKKWQSVWEKKKIYREKSSKKFYCLEMFPYPSGKIHMGHVRNYAIGDVVARFKFLNGFTVLHPMGWDSFGLPAENAARENNLHPKEWTKKNISEMKRQLKMLGLSIDWDLEISTCEEDYYKHQQELFIDFYNKGLVSRKENYVNWDPVEQTVLANEQVVNGRGWRSGAVVERKKLSQWFFNITKFSESLLKNLE

SEQ ID NO: 189478 - protein, 302 aa, Unknown
  Bacterial polypetide isolated from the Sargasso Sea
SNWIGKSVGAEINFDIQKINKKIKIFTTRPDTIYGATFLALSPEHDIALELSSKNQGALEFIESCKNINPDKVKKGYNTGLFAKHPFVENKTIPVFIANFVLKEYGLGAIFGCPAHDQRDLDFANQYNLDVIPVVKPSSYKNNDFTIKKESFTEEGIVINSDFLNGLTTKEAKTKILKTIEDKKIGQKKINFKLRDWGISRQRFWGCPIPIIYREDGEIMSVEENELPVKLPEVKEFNESSSTLKNIEGWNQTTCKKTGMKAIRETDTFDTFFESSWYYFRYCNARLEKPFNEKDINYWLPS

SEQ ID NO: 189479 - protein, 297 aa, Unknown
  Bacterial polypetide isolated from the Sargasso Sea
VVLPEIENYINTDGSPLSKSEEFINAECPKCKIPGIRETDTMDTFVDSSWYYLRFLDSKNDEEPFKSEFINNWLPVDQYIGGVEHAILHLLYSRFFVKALRDLGIIEIDEPFNNLFSQGMINFEGAKMSKSKGNIVDPEAYFKSHGADALRLYILFMAPPSDGVDWNDGGIEGTKRFLNKLWENLDQIIEMKTDESNNNEFGNEIERKLNQTIESVTNHLEKFEFNTVVSDLMILNNDLSSYLNKTEMINKDLKDQIVKNICLLIYPLAPHFGSEKYKNYFNEEINNQTWPKFNKEK

SEQ ID NO: 189480 - protein, 310 aa, Unknown
  Bacterial polypetide isolated from the Sargasso Sea
RDFDFAKKYNLPIIRVVSDKNNSNDGEKMQEAYVGNGTMVNSEFLNDLPVEEAKKKIISKIEEKKIGKKQTLFRLKDWGISRQRYWGCPIPMIYLEDGSVVPVDKSELPIKLPYDADLRSSGNPLDNHPNWKKTTHKKTGKPAIRETDTLDTFVDSSWYFLRFCSPKYKNAPFDNDKVNYWMPVDQYIGGIEHAILHLLYSRFFMKAIKKCDDKFKYSEPFNNLFTQGMVCHETYKDLSGNWLYPDEVKITSKKKAIKILDKSEVKIGSSESMSKSKKNTIDPETMIKQYGADAVRWFILSDSPPEKDIQ

SEQ ID NO: 189481 - protein, 315 aa, Unknown
  Bacterial polypetide isolated from the Sargasso Sea
QKNWIGKSFGCELTFKVDNSKNVNEIKCFTTRPDTLFGMSFLALSIDHPIAKLYENNNEFIKFKKECSKVGTTEEAIANAEKLGFKTELIAINPIDTNIKVPVYFANFVLMDYGFGAVFGCPAHDQRDLDFALKYKLDVKTVVKPDLNENEFKVTNKAYTGPGFLFNSSFLDGLKCPEESIIKTIEYLEEKNFGNKKINFRLKDWGVSRQRYWGCPIPIMYDEDGIPHKVPKDKLPVKLPEITKLDSAGNPLDNLTEWKEINVNGKKYIRETDTLDTFVDSSWYFLRFCSPKNSEYGFNNEEVKYWMPVDQYMAG

SEQ ID NO: 189482 - protein, 191 aa, Unknown
  Bacterial polypetide isolated from the Sargasso Sea
FLRRIWTLAAEHKELFNTAVTSLELNSDQKALRRDIHKTIAKVSDDIGRRNVFNTAVAAIMELANKVQKAPVETDADKQVKREGIQTLIQLLNPITPHLSQYLWKELGFATALEQSSWPVADAAAMVEDEKLVVVQINGKVRAKVTVSADATEAQVLELAHAEENVQRFLEGVTIRKVIYVPGKLLSLAVG

SEQ ID NO: 189483 - protein, 115 aa, Unknown
  Bacterial polypetide isolated from the Sargasso Sea
MEPRYSPEQLEPVVQTHWEEQQSFQVVEDPAREKFYCLSMLPYPSGQLHMGHVRNYTIGDVMSRYQRMLGRNVLQPMGWDAFGLPAENAAIQRAVPPAEWTYQNIAHMRGQLQRM

SEQ ID NO: 189484 - protein, 310 aa, Unknown
  Bacterial polypetide isolated from the Sargasso Sea
RYWGCPIPIIYREDGKIIEVPENELPLRLPDDIDLSVSGNPLDNHPTWKYTKCPETGMNAIRETDTLDTFVDSAWYFLRFCSPQNTNSPFDEKETSYWMPVDQYVGGVEHAILHLLYSRFFTKALHLEDIKEPFQSLFTQGMVCHNTYQNEEKTWVFPDDVEKKNNTFIQISTGQKVSEGPIESMSKSKKNVIDPQSIIQTYGADSARWFMLSDSPPEKDINWSESGINGSWKICQKIWSLVSKNKEYLQLKNKVSNPVFSPEATSLLRSVHQNLNAITQGIEKFQMNVAIARVFEMVNTISKFKVEKEN

SEQ ID NO: 189485 - protein, 299 aa, Unknown
  Bacterial polypetide isolated from the Sargasso Sea
QKISEESIAKNEKIGVKTGLFIKHPFINNKLLPVYIANFILMDYGSGAIYGCPAHDQRDLDFANKYKLEVIQVIDPNDKVPFDKKTAFVGDGKLINSDFLNGSSIENAKKEIIKRVEELKIGKKTINYRLRDWGISRQRYWGCPIPIIYREDGEIIEVPEDQLPLKLPEDIDLSIPGNPLDNHPTWKFTTCPETGMSAIRETDTLDTFVDSAWYFLRFCSPSNQDSPYEDIETDYWMPVDQYVGGVEHAILHLLYSRFFTKALKIKNVNEPFDSLFTQGMVCHNTYQNQDNAWVFPRRC

SEQ ID NO: 189486 - protein, 304 aa, Unknown
  Bacterial polypetide isolated from the Sargasso Sea
TEYAESLLSGLDELDWPESVKELQRNWIGKSEGSRVNFRLSDINTNIIVYTTRPDTLFGATYMVLSPEHPLVDRLVTNDNKAKVAEYKKLASNKSDFDRGEVNKDKTGVPLGAYAINPVNNKEVPIWIADYVLMSYGTGAIMAVPGHDERDYEFARKFDLPVVEVVSGGDIEKEAHTDTKNGIMINSSNDFGLNLNGMKVSEAISVTIEWLESNKKGEKAIQYKLRDWLFSRQRYWGEPMPIIHSDNGEIIPLNNSDLPLTLPEVDKYEPTGTGESPLAGINDWVNTNSGKRETNTMPQWAGSC

SEQ ID NO: 189487 - protein, 71 aa, Unknown
  Bacterial polypetide isolated from the Sargasso Sea
MLEEQYNPEKIESSIQSEWEKISKYKTTPDDREKYYCLSMFPYPSGKLHMGHVRNYTIGDVISRYKRMRGF

SEQ ID NO: 189488 - protein, 312 aa, Unknown
  Bacterial polypetide isolated from the Sargasso Sea
FTSADNNEDIFDQNTKYWLPVDLYIGGIEHAILHLLYSRFFHKALRDIGLLEGNEPFKRLLTQGMVLKDGAKMSKSKGNTVDPQSYIEKYGADTVRLYMMFTSPPEQSLEWSESSVEGASRFLKKVWNLVDGRKFEISDIDNNFSKEELELRRKSHATLKKVENDFEVRFSFNTAIAAIMELLNFIPDNFKSENASDSQKFCLNEAIIFTLKMLFPIAPHVSEYLWNNFKAEESHIESSWPKFEPCLIEAEEFDLIIQVNGKVRGKINLNKDISQKDIEQAALSVENVKNFIDSSEIKKTIYIKEKLINFVI

SEQ ID NO: 189489 - protein, 291 aa, Unknown
  Bacterial polypetide isolated from the Sargasso Sea
TDTLDTFVCSSWYYLRFCSPKETKYGFNQEEINYWMPVDQYIGGIEHAILHLLYSRFFIKALGYKNKNFNIEEPFKGLFTQGMVCHETYKDQENNWISPEEIEIKDKKYYKKNDPSSQVIVGPSESMSKSKKNVIDPQNIIKNYGADSVRLFILSDSPPEKDVQWSEQGMVSSFKFVQKLWILHSKIKKKLSNKNDLKEEDLELNQFTNQLINKIKDNLESFSYNVIIASMYETYNFLIKYIEKNINTKCLLENYTKILTVFSPIVPHLASECLIDIGYEKKLNWPIVNKN

SEQ ID NO: 189490 - protein, 123 aa, Unknown
  Bacterial polypetide isolated from the Sargasso Sea
MLEEQYNPEKIESSIQSEWEKINKYKATPDDREKYYCLSMFPYPSGKLHMGHVRNYTIGDVISRYKRMRGFNVFQPMGWDAFGLPAENAAIQNKVDPKSWTEQNIKNMKLQLKRLGFSYDWSK

SEQ ID NO: 189491 - protein, 307 aa, Unknown
  Bacterial polypetide isolated from the Sargasso Sea
LFFLELYEKGLVYRKENYVNWDPVDQTVLANEQVIDGKGWRSGAIVERKKLNQWFFKISQFSDELQSDLDKLKEWPNKVKVMQKNWIGKSFGCEIAFRTEGKLPVNEIKCFTTRPDTLFGFSFLALSVDHEISKFYSENQEFQKFKKECSKTGTTEEAIAIGEKIGFKTDLMATNPLDNSQKVPVFFANFVLMDYGFGAVFGCPAHDQRDFDFAKKYKLNIKTVVRPPEENDDYEVKNEAYTGPGSIINSEYLNGLKVPEESILKAIDILEEKKIGKKKINFRLKDWGVSRQRYWGCPIPMAYDEKG

SEQ ID NO: 189492 - protein, 150 aa, Unknown
  Bacterial polypetide isolated from the Sargasso Sea
MDRYNAKKTERKWQERWESKKTYLTEKNTNKKKYYVLEMFPYPSGKIHMGHVRNYTMGDVIARYKRHKGFNVLHPMGWDAFGMPAENAAMEQNTHPGTWTYKNIAEMKSQLKPMGLSIDWSREFATCDANYYKHQQEIFIDMLNQKLAYR

SEQ ID NO: 189493 - protein, 327 aa, Unknown
  Bacterial polypetide isolated from the Sargasso Sea
YNLEITEVVSDNPSRPKNFDKLSEAYVGDGTIINSDFLDGLKVDEAKTKIINKIEKLKIGERKITFRLKDWGISRQRYWGCPIPMIHLEDGTVVPVEKSELPVKLPDDIDLSQSGNPLEKHKSWKKTIHKKTGKPATRETDTLDTFVDSSWYFLRFCSPGLKSEPFDIEKVNYWMPVDQYIGGIEHAILHLLYSRFFMRALKKNNKKIKDSEPFKGLFTQGMVCHETYKDKNGKWLTPSEVEKNSNGKFLKISDKSEVKVGPSESMSKSKKNVIDPENMIKTYGADSVRWFILSDSPPEKDIQWSNQGVNAAYKFLQKIHNLCCTVN

SEQ ID NO: 189494 - protein, 285 aa, Unknown
  Bacterial polypetide isolated from the Sargasso Sea
VKQFLNKCENSNSEKEKLGLKLNIEVEHPVTKKPLPVFIANFVLMDYGLGAIFGCPAHDQRDLDFARKYNLDVIMVVKPNSHKIEKIQSEAFIGEGTIINSEFLNGLDIESAKNKMVEYLEAKGLGFSKTNFKLRDWGISRQRYWGCPIPVLYREDGEIIPVSKKDLPVLLPQNSAENGVFKSLKDLENWKTTKCSKTGLKAYRETDTFDTFFESSWYFLRFCNPRNKSPLDFNDINYWLPVDQYIGGIEHAILHLLYSRFFTKVLRDLKYIDLDEPFKGLFTQG

SEQ ID NO: 189495 - protein, 321 aa, Unknown
  Bacterial polypetide isolated from the Sargasso Sea
WSQKKTNTVKIDKNKKKFYCLEMFPYPSGKIHMGHVRNYTIGDVLARYKKLRGYNVLHPMGWDSFGLPAENAAKENKLHPKDWTKKNIETMKRQLKLLGLSLDWEREISTCDPKYYKHQQEFFLELFAKDLVYKKDTYVNWDPVEQTVLANEQVINGKGWRSGAVVERKKLSQWFFNIKKFSQNLLDELDKLKNWPEKVKLMQKNWIGKSYGCEINFKINKKNKFKEIKVFTTRPDTIFGASFIALSTDHPIAKTFEKDSKFLSFKSECSKMGTTEEALANAEKIGFNTDLFVQHPFNKKITLPIYIAKLVLMDYETGAIF

SEQ ID NO: 189496 - protein, 306 aa, Unknown
  Bacterial polypetide isolated from the Sargasso Sea
MGHVRNYTIGDVWARYKYLNGFNVLHPMGWDSFGLPAENAARLNNLNPRTWTEENIKTMKKQLKMLGLSIDWDLEVSTCNKDYYKHQQELFIDFYNAGLVSRKETYVNWDPIEKTVLANEQVINGKGWRSNAVVERKKLSQWFFNITKFSDELLKDLESLDGWPEKVKLMQKNWIGKSIGCELDFKIESLEKNLRIFTTRPDTIFGASFIAISTDHDICKNFNNSSEFKKFQDKCSKIGTTEEAMANAEKLGFKTNLFAEHPFIKNKKLPIYVANFVLMDYGNGAIFGCPAHDQRDFDFAKKYKLP

SEQ ID NO: 189497 - protein, 146 aa, Unknown
  Bacterial polypetide isolated from the Sargasso Sea
MERYNFKTIEEKWQEKWHKSGVFRSKIDYSKEKFYCLEMFPYPSGKIHMGHVRNYTIGDVLSRYKSLQGFNVMHPMGWDAFGMPAENAARENNLDPKEWTNKNISTMKDQLKKLGLSIDWDREISTCSKEYYKHQQIFFLELYEKG

SEQ ID NO: 189498 - protein, 277 aa, Unknown
  Bacterial polypetide isolated from the Sargasso Sea
FARFAGISDKEMISKEANYWLPVDQYVGGIEHAILHLLYARFFNILMHENKLILNEEPFTKLLTQGMVLADAFYLLDEAGNKTWLNKDFLDDKNDELLDNSGNKVFKDGMSKMSKSKLNGVDPKEMIDKYGADTVRLYMMFTSPPEQTLEWSENAIEGSYRFIKRFWTLVEGRSNNIEEPSIFNKEEETLRRKSHQTLKKVLKDYEERNSFNTVIAAVMELINAIPESFKKEDASESQKYCLNEAIEFSLKILSPIAPHVTLELWSKFNSSQDKSLF

SEQ ID NO: 189499 - protein, 258 aa, Unknown
  Bacterial polypetide isolated from the Sargasso Sea
MPAENAAKENKLDPKEWTNKNISTMKGQLKRLGLSIDWDREISTCSEDYYRNQQLLFLELFKKGLVYRKENYVNWDPVDQTVLANEQVIDGKGWRSGAVVERKKLNQWFFNISKFSQELLDDLEKLDKWPNKVKVMQKNWIGKSFGCEISFKTEGDLPIDEIKCFTTRPDTLFGFSFLALSVDHEISKYFSKDIKFQEFKKECSKTGTTEESIAIGEKIGFKTNLMAINPLDPSQKVPVFFANFVLMDYGFGAVFGCP

SEQ ID NO: 189500 - protein, 290 aa, Unknown
  Bacterial polypetide isolated from the Sargasso Sea
EEWTENNIQTMKKQLKQLGLSIDWNREISTCSEEYYKHQQKFFIDMFKKGLVYKKENYVNWDPIDETVLANEQVIDGKGWRSGATVERKKLSQWFFNISKFADELQSELDNLDEWPNKVKVMQKNWIGKSFGCEIDFQIKGNSKIEKITCFTTRPDTLFGFSFLALSVDHPLSKFFEDDPKFKEFKLECSKSGTTEESIANAEKVGFKTNLFAKNPLDESQMVPVYFANFVLMDYGFGAVFGCPAHDQRDFDFAKKYNLEIKTVVKPFDEKDTFKVKNEAFSGSGVKLIL

SEQ ID NO: 189501 - protein, 304 aa, Unknown
  Bacterial polypetide isolated from the Sargasso Sea
ARGFNVLHPMGWDAFGMPAENAAMQNNIHPAKWTYQNISNMREQLKLLGLSIDWSREIATCDPQYYQHEQRLFLDFYKKGLVGRKKSKVNWDPVDNTVLANEQVIDGKGWRSGAEVEIKELTQWFFNITNYASDLLSRLESLDKWPDKVKTMQNHWIGQSTGLQFKFEITNVTDSDYKTIDVFTTRPDTLFGASFVAIAADHPITKEIEKTNPEISSFIKECRSKGTTLAEIEKAEKIGFNTGVKVKHPFIKNKDLDVYIANFVLMEYGTGAIFGCPAHDQRDLDFARKYNLEVIPVVLPEDKE

SEQ ID NO: 189502 - protein, 295 aa, Unknown
  Bacterial polypetide isolated from the Sargasso Sea
RYKRLQGYNVFHPMGWDAFGLPAEQYALKTGTHPIETTEKNIDRYRQQLKMLGFSYDWDREINTTEPSYYKWTQWIFLQLYNKGLAYEAEVPVNWCPELKAVLSNEEVVDGRSDIGGHPVHRVPMRQWMLKITEYAESLLSGLDELDWPESVKELQRNWIGKSEGSRVNFKLPYINTNIIVYTTRPDTLFGATYMVLSPEHPLVDRLVTNNNKAKVAEYKKLASNKSDFDRGEVNKDKTGVPLGAYAINPVNNEKIPIWIADYVLMSYGTGAIMAVPGHDERDYEFARKFNLPIV

SEQ ID NO: 189503 - protein, 317 aa, Unknown
  Bacterial polypetide isolated from the Sargasso Sea
EVCFTTDLEFYKWTQWIFLQLFNSWYDSEADRARPITELESLLSNGHLKLENGTDWNVLTISEKREIIDSYRLAYLAEAPVNWCPALGTVLANEEVTAEGRSERGNHPVFRRPLKQWMMRITAYADRLLDDLEILDWSDAIKTMQRNWIGKSEGAEITFKAGDEDLKVFTTRPDTLFGATYMVLAPEHPLIEVVVADSWPDGTPDKWKNGMATPTEAVQNYQKEASQKSDLDRQENKDKTGVFVGEFAAVPVNGKKIPIFISDYVLMGYGTGAIMAVPGQDERDWEFAQEYGLEIIRTVQPPEGWDGDAFIGDGPAI

SEQ ID NO: 189504 - protein, 233 aa, Unknown
  Bacterial polypetide isolated from the Sargasso Sea
MNDFDFQQIEKKWQDYWSKSNIIECDLNSEKPKFYNLCMYPYPSGDLHMGHVRNYTIGDVITRYKLLNGFNVLSPMGWDSFGLPAENAAIKTGIHPRKFTEERIENMKDQIIRLGSLYDWDREVAAHSEDYYKWTQYLFIKLFESGLAYKKDAPVNWCDSCTTVLANEQVIDGNCDRCDTEVSPKNLNQWFLKISKYSDELLSGLEKIGNWPENVKTMQKNWIGKSEGAQFQL

SEQ ID NO: 189505 - protein, 204 aa, Unknown
  Bacterial polypetide isolated from the Sargasso Sea
TVLANEQVIDGRGWRSGAIVERKKLSQWFFNISKFSQELLDGLDKLDNWPNKVKTMQKNWIGKSFGCEIDFKVEGELPVSNIKCFTTRPDTLFGFSFIALSTDHEVSKYYKDDDDFKKFKEDCSKTGTTEEAIAVGEKIGFKTSLFAINPLNPKQKVPVYFANFVLMDYGFGAVFGCPAHDQRDFDFAKKYNLEIKTVVKPDNQ

SEQ ID NO: 189506 - protein, 277 aa, Unknown
  Bacterial polypetide isolated from the Sargasso Sea
DVVARYKKMKGFNVLHPMGWDAFGLPAENAALVEKKPPSEWTYNNINVMRSQLKSMGLSLDWSREIATCHPKYYQHEQAFFIDMFNNDLAYKKKSLVNWDPVDQTVLANEQVIDGKGWRSGAQVESKELSQWFLKTSAYSEELLSYLNELDRWPEKVKIMQSNWIGKSIGAEVIFEMINSNNYSSKLLKVFTTRPDTIFGATFCAISLEHPLAKEIIKKNPEAKNFQTSCSGADIDKDKLGFKTEILIKHPFIENKRIPLFLANFVLMDYGSGAIFG

SEQ ID NO: 189507 - protein, 298 aa, Unknown
  Bacterial polypetide isolated from the Sargasso Sea
LKITAYSDELLSSIDNLDSWPSSVKSMQKNWIGKSEGAKVVFKLVGINQTLEVYTTRIDTIYGVTFLALSPNHSLIKTMLDSNSEINLFIEQCSGLKVSEETVGNIDKKGIDTGIKAINPINGKIIPVWVANYILSDYGTGCVMSVPGHDERDNDFALKYNLPVIEVVTPKKNLKSKRKVFTDDGILIKSDKHTGLDSAAARKSILEELVKKDSAESKINYRLRDWGISRQRYWGCPIPIIYHDDGTVYPVPEKDLPVTLPDDIDLTKDGNPLENHPTWKYIKCPYTGKDAIKRNRYI

SEQ ID NO: 189508 - protein, 313 aa, Unknown
  Bacterial polypetide isolated from the Sargasso Sea
KECSKTGTTEEAIAMGEKIGFKTNLMAINPLNSNQKVPVYFANFVLMDYGFGAVFGCPAHDQRDFDFAKKYNLEIKTVVCPNDKSENFEVKEKAYTGAGIIINSNFLDGLKVPEESIIKTIDILEEKKLGKKQTNFRLKDWGVSRQRYWGCPIPIAYDENGKAVPIPKKDLPVKLPENVDLNAKGNPLNSIDNWKNIMIDGKQMTRETDTLDTFVCSSWYYLRFCSPKNTEYGFNKEEIDYWMPVDQYIGGIEHAILHLLYSRFFMQALAFKNNIFKIKEPFTGLFTQGMVCHETYKDLDNNWLSPEEIEQKD

SEQ ID NO: 189509 - protein, 273 aa, Unknown
  Bacterial polypetide isolated from the Sargasso Sea
LLTQGMVQAAAYKNNKTGKYVSPSDITDLSNPTDPIDNTKLEVLYEKMSKSKYNGIDPESVIKKYGADTARMFILFKAPPEKDLEWGDTDVEGQFRFLSRIWKLYINCTKDINSKSNSYPDKEKSLIKSMNIAIKEISNDILNNQFNTAISELMKFYNSLSNSINDVNNNLKIDALKTFCILLAPFAPHIAEEIWHLIGFKKSVHLEHWPSFNAEALKEDSYELVIQVNGKVRDKININNDMSDDQIKELTLKRPNILKWTQDKEIRKIIIVK

SEQ ID NO: 189510 - protein, 272 aa, Unknown
  Bacterial polypetide isolated from the Sargasso Sea
SDFINGLSINKAKERIISELEKNKIGKKKINYKLRDWGISRQRFWGCPIPIIYREDGEILAVEERQLPVKLPDIKNFSESSSALSNIPGWKETICPKTGMKAYRETDTFDTFFESSWYYFRYCNARLDKPFDKKDVDYWLPVDQYIGGIEHAILHLLYSRFFTKALRDLNYFNLDEPFQGLFTQGMVTHVTYKNKNGEWVEPKDVEGVGDVLKDNNGFEVEVGKVEKMSKSKKNVVDPNDIINTYGADTARWFMLSDSPPDRDLQWTDTGIA

SEQ ID NO: 189511 - protein, 259 aa, Unknown
  Bacterial polypetide isolated from the Sargasso Sea
GEENFHAKDLPVELPSKVEFKGVSSPLKDMSEFLNVDQEGKSLIRETDTFDTFFESSWYYARFASFDSHDSMLDDRANYWLPVDQYIGGIEHAVLHLLYSRFFFRCMRDLGLVEGDEPFTNLLCQGMVLKDGAKMSKSKGNTVDPQGLIEKYGADTVRLFVLFAAPPEQSLEWSDQGVQGAHRFINRIWKLVNKHIHAGLSDDFDVNHSNKDLKLMRSKIHKTLFKVKDDYLRRHSFNTAIAAVMELSNDIPQEWFDSS

SEQ ID NO: 189512 - protein, 277 aa, Unknown
  Bacterial polypetide isolated from the Sargasso Sea
MDTLVDSSWYFLRFCSPLEENKGFNIEDVNYWMPVDQYIGGVEHAILHLLYSRFFTKALSYKNSEFNLSEPFNGLFTQGMVCHETYKINNEWKNPSEVQSENGKDFFLKDKPNQRVIVGPSESMSKSKKNTIDPAIMIKNYGADSVRFFILSDSPPEKDIQWSEQGMQAAFKYVQKFWNLHCEIKNKILSKNLKNNNFDPQSTNKINVFTNQTVKKITQNLENFQYNVIIANLHEIYNFFSKLKNFENCEIEIFKKNYIKILTLMHPILPHLITECL

SEQ ID NO: 189513 - protein, 310 aa, Unknown
  Bacterial polypetide isolated from the Sargasso Sea
NFVLMDYGFGAVFGCPAHDQRDFDFAKKYKLEIKTVVKPESEDDNFEVGDEAYSGSGVMINSEFLNKLKVPDESIIKTIDILEQRKIGKKQINFRLKDWGVSRQRYWGCPIPMAYDQNGNVTAIPKDQLPVKLPENVNLNSKGNPLDSMNDWKNIDIDGKKYVRETDTLDTFVCSSWYYLRFCSPKNVDYGYKKEDIDYWMPVDQYIGGVEHAILHLLYSRFFMKGLGYKNSDFKFSEPFKGLFTQGMVCHETYKDQNNNWLSPDEIELVGNHYRKKSDPSEKVKVGPSESMSKSKKNVIDPENIISNYG

SEQ ID NO: 189514 - protein, 279 aa, Unknown
  Bacterial polypetide isolated from the Sargasso Sea
SWYYARFCSSDSDKAMLDDRAKYWLPVDLYIGGIEHAILHLLYARFYHKLLRDEGLVEGNEPFKRLLTQGMVLNDGAKMSKSLGNTVDPEEMIQNYGADTVRLFMMFTSPPEQSLEWSDTAINGSYRFLKKLWKLIKTHQDSIKDISGISSNEKFNGNQNKLRRKTHQTISKVTDDIGRRYTFNTAIAAVMELVNEVSAFNVDDELDRKVIKEAIESILLLLSPIVPHICHQLWLDINHDQPIIDARWPKFDSSLLKSETSLIVVQVNGKLRSKLEVDA

SEQ ID NO: 189515 - protein, 249 aa, Unknown
  Bacterial polypetide isolated from the Sargasso Sea
VVEQKWQNKWSEEKIFASQIDKNKKKYYVLEMFPYPSGKIHMGHVRNYTLGDVVARYKRMRGFNVLHPMGWDAFGLPAENAAMTEKKHPEEWTYKNIKTMKSQLLQMGLSLDWDRELATCHPDYYKHEQKFFIDMFNAGLAYKKESEVNWDPVDKTVLANEQVIDGKGWRSGAVVEKRKLSQWFLKISKYSDELLNDLEKLTNWPNKVKVMQSNWIGKSIGAEIDFKLSNNNEKIKIFTTRPDTIYGAT

SEQ ID NO: 189516 - protein, 299 aa, Unknown
  Bacterial polypetide isolated from the Sargasso Sea
KACSKTGTTEESNAQATKIGFKTELTAVNPLNKKSKVPVYFANFVLMDYGFGAVFGCPAHDQRDFDFAKKYNLKIKTVVKPVEENAEFEVKDQAYTGPGIIINSEFLNGLSVPKESINETIKILEDKKLGKKKINYRLKDWGISRQRYWGCPIPIAYDNNNNVIKIPEKDLPVELPEKIDLNTNGNPLDGQKKWQEVIIDGKKCKRETDTLDTFVDSSWYYLRFCSAHNKREPFDTNELDYWMPVDQYIGGVEHAILHLLYSRFFMRAISLNNNETKLKEPFDGLFTQGMVCHQTFKDE

SEQ ID NO: 189517 - protein, 256 aa, Unknown
  Bacterial polypetide isolated from the Sargasso Sea
DTFVCSSWYYLRFCSPKEKGYGFNKEDINYWMPVDQYIGGVEHAILHLLYSRFFMQALSHNNNEFNILEPFEGLFTQGMVCHETYKDSDNNWVSPDEIETINGKKYLKIDNSKVVKVGPSESMSKSKKNTIDPENIITNYGADAARLFILSDSPPEKDVQWSEEGIISSFKFVQKLWNLHEKILDEAHKDHKKNNNDLIEKYTNKFLKNITHNLENFSYNKLIANLHEMYSFMYKQIQEPYTKITLIENYQKILIA

SEQ ID NO: 189518 - protein, 225 aa, Unknown
  Bacterial polypetide isolated from the Sargasso Sea
RPDTLFGFSFLAVSIDHPISKYFSDNPDFKKFKEECSKTGTTEESIAQGEKIGFKTNLCAINPLDENQKVPVYFANFVLMDYGFGAVFGCPAHDQRDLDFANKYNLLVKTVVKPKDENNNFKVNKEAYTGPGIIINSNFLDGLKVPEESITKTINILEKKNLGKKRINFRLKDWGVSRQRYWGCPIPIAYDKNGKVVPIPKEKLPVKLPDKINLNSKGNPLDSAK

SEQ ID NO: 189519 - protein, 303 aa, Unknown
  Bacterial polypetide isolated from the Sargasso Sea
TVLANEQVVDGRGWRSGAEVQKKKMKGWFLKISNFADDLLNEIDNLNDWPEKVKTMQRNWIGKSHGALIKFSIENSSENLEVFTTRPDTIFGATFIAISPQHELAKKVAQKDSKAFDFIKFCENQSTKEIDIEKADKHGYETDLTVSHPFKKDVSLKIYIANFILMDYGTGAIFGCPAHDQRDYDFAVKYSLEIIPVIKTDEDLPFTGDGAHINSDFLNNLNTDEAKTFCIKKLSEMNIGEEKITYRIRDWGVSRQRYWGCPIPIVFCNDCGEVPVPEKKLPISLPKDVDFSKRGNPLDNHPN

SEQ ID NO: 189520 - protein, 322 aa, Unknown
  Bacterial polypetide isolated from the Sargasso Sea
FNKECRQMSTSEADMEKAEKKGVDTGLRVRHPLQPDWELPVWIANFILMDYGTGAIFACPAHDQRDLDFARKYKLPVIDTFYRLKNSSPVEETAFVPPKSEKVKWINHFTDIDVATGQEAIDKTIDFAEKNGWGKSVTNFRLRDWGLSRQRYWGCPIPVVHCGNCGVVPEKKENLPITLPDDVTFDVPGNPLDRHPTWRKCECPSCGSPALRETDTMDTFVDSSWYFARFTSPKSEKPTSKEDVSYWMNVDQYIGGVEHAILHLLYSRFFARAMQITGHLPKTAKEPFDALFTQGMVTHAIYKSIGSDGRDLFHYPEEVKFR

SEQ ID NO: 189521 - protein, 233 aa, Unknown
  Bacterial polypetide isolated from the Sargasso Sea
GLEDLDWPESVKDLQRNWIGKSEGAEVKFKLDSLNQYIKVFTTRPDTLFGATYMVLAPEHPLVSKLTTIENRKVVEEYVLAAQQKSELDRGELNKDKTGVFIGAYVINPVNDQQIPIWIADYVLMSYGTGAIMAVPGHDERDHEFATKFNLPIVEVVSGGNVSKEAFTDSENGVMVNSANDTGLDLNGKSVKDAIKKTISWLKDNDNGIEKVQYKLRDWLFSRQRYWGEPIPV

SEQ ID NO: 189522 - protein, 57 aa, Unknown
  Bacterial polypetide isolated from the Sargasso Sea
MKYNFLEIEKKWQKFWSDNRVYEVKSSSSKPKFYVLDMFPYPSGAGLHVEHPARVYS

SEQ ID NO: 189523 - protein, 301 aa, Unknown
  Bacterial polypetide isolated from the Sargasso Sea
RNWIGKSFGCEIDFKIEGSDKIKSIKCYTTRPDTLFGFSFLAISVDHPLAKLYENNKDFLKFKTECSKTGTTEESIAQAPKIGFKTDLLAINPLDTENKVPVYFANFVLMDYGFGAVFGCPAHDQRDFDFAKKYDLKIKTVVKPNDKDENFKVSDEAYSGPGSIINSKFLNGLSVPNESISKTIEILEERKIGNKKTNYRLKDWGISRQRYWGCPIPVAYDENNEIKIIPKDQLPVLLPDKVDLNTNGNPLDTNEDWKNITIDGKKYRRETDTLDTFVDSSWYFLRFCSADNSKLSFEPRE

SEQ ID NO: 189524 - protein, 170 aa, Unknown
  Bacterial polypetide isolated from the Sargasso Sea
INKILTLSQNSQEIQTYIDAAKSKTEFERMSITKEKTGVDTGLKVTNPINNKSVPLWIADYVLINYGTGAIMAVPGHDERDYEFAKKYNIEIIQVITDKDQKIDISNKPFIEKGVLINSGDYDGLNSHDEASDSILNYLSEKDLGEKKITYRLRDWLISRQRYWGCPIPL

SEQ ID NO: 189525 - protein, 196 aa, Unknown
  Bacterial polypetide isolated from the Sargasso Sea
SGASFIALSVDHSLNKNFKDNKDFIKFKEDCNKTGTTEEALANAEKLGLKTNLYVKHPLIKDKILPVYFANFVLMDYGSGAIFGCPAHDQRDFDFAKKYNLEIIEVVSDESKEKKLEKAYTGNGKLINSSFLNGLNIEQAKEKIINEIEKNNLGTKKTLYRLKDWGISRQRYWGCPIPILYLEDGTIVPVEKDELP

SEQ ID NO: 189526 - protein, 130 aa, Unknown
  Bacterial polypetide isolated from the Sargasso Sea
MERYNFKKIEEKWQDFWIKNKSFKSQINPKLKKFYCLEMFPYPSGKIHMGHVRNYTIGDVLSRFKSMQGFNVLHPMGWDSFGMPAENAARENNLHPKEWTEKNILVMKEQLKSLGLSIDWDREISTCNEN

SEQ ID NO: 189527 - protein, 301 aa, Unknown
  Bacterial polypetide isolated from the Sargasso Sea
TNFSNELLNDLENLPGWPEKVKLMQKNWIGKSLGCEINFELVNDSRKVNVFTTRPDTIFGASFLALSVDHPLNSGFKEDPTFKKFKEECNKTGTTEEALANAEKLGFNTGLFAKHPFQNKKIPIYFANFVLMDYGTGAIFGCPAHDQRDFDFAKKYKLQIIQVVSGDKKNADLNEAFTGSGILINSEFLNNLDVEKAKTKIISEIEKRKIGKKKTLFRLKDWGISRQRYWGCPIPMIYLEDGSVVPVDKSELPVELPNDIDLNSQGNPLDAHPDWKNTKQKSTGKKAVRETDTLDTFVDSS

SEQ ID NO: 189528 - protein, 159 aa, Unknown
  Bacterial polypetide isolated from the Sargasso Sea
MDKINVGEIDKKWQIFWSKKKNQFKFTDKKKKFYCLEMFPYPSGKIHMGHVRNYAIGDVIARYKMMNKFNVLHPMGWDSFGLPAENAARENNLSPKDWTKKNISTMKHQLQLLGLSIDWDLEISTCDQEYYKHQQELFIDFFNKGLVIRKETYVNLGSR

SEQ ID NO: 189529 - protein, 213 aa, Unknown
  Bacterial polypetide isolated from the Sargasso Sea
TVVKPDNHNDDFKVEDEAYTGPGKLINSDFLNGLKVPEESIDKTIKILEGKKLGNKKTNYRLKDWGISRQRYWGCPIPVAYDDDNNIIKIPKNELPVKLPEDIKINSSGNPLNAHDEWKEIIIDGKKCTRETDTLDTFVDSSWYYLRFCSSTDKSNSFNKSDIDYWMPVDQYIGGVEHAILHLLYSRFFMRALNMDNEDISLTEPFKGLFTQG

SEQ ID NO: 189530 - protein, 278 aa, Unknown
  Bacterial polypetide isolated from the Sargasso Sea
MVATKNSKLAKFIEEQSKLKVAEAELATLEKMGLDTGLKAVHPITKEEVPIFVANFVLMTYGSGAVMAVPAHDQRDWEFAKKYDLPIKLVIEPIDSNRKTNLENGAFVDKGRLINSGEFDGLDFDEAFKAISTFLNDRGLGEKTVNFRLRDWGVSRQRYWGAPIPMINCQTCGSIPVPEEDLPVLLPENVQIDETGSPLKKMEEFLNVNCPICDNPANRETDTFDTFMESSWYYARFASPNQSNKMLDERADYWLPVDQYIGGIEHAILHLLYARFYH

SEQ ID NO: 189531 - protein, 240 aa, Unknown
  Bacterial polypetide isolated from the Sargasso Sea
MILGEDHEKMSKSRGNVVNPDDLVKKYGADTVRCYLMFLGPWDAGAPWNPHGIEGLSRFFKGIWNLCHQPQKPENIDQESEKKLKKAQHRTLKKVTEDLGRFRFNTAIAAMMSFRNDLKDHVHRCREETRTEALKTMLLMLAPFAPHVSEELWQWMAPETGSIHQQDWPAFDEQLASAEMVTLVVQINGKVRDRIQCPVGMEQKQTEEKVLASEKIQNLLEGKAVRKLIVVPDRLVNLVA

SEQ ID NO: 189532 - protein, 289 aa, Unknown
  Bacterial polypetide isolated from the Sargasso Sea
EIERTSEEKEKDGVFTGAYAINPMNGELVPVWIADYVLASYGTGAIMGVPGHDERDFNFARKYGLDTPVVIVSKEKLDSVPCGDELSEPILQKEDSVMVNSSGFDGLVWPDSFNRVADHLQKEGFGERQVNYRLRDWLISRQRMWGTPIPVVYCESCGMQPVPYNELPVVLPDDAEFKPTGESPLKYHNGFLKTSCPNCGGNAERETDTMDTFICSSWYYYAYVSPYWKKGGKLVRDDFPWDVEKINSFCPVDQYTGGIEHATMHLLYFRFFTKVLADLGLLNFREPTK

SEQ ID NO: 189533 - protein, 271 aa, Unknown
  Bacterial polypetide isolated from the Sargasso Sea
AIPVSKELLPVKLPEKINLNVKGNPLDSQKDWKEINIDGKNFTRETDTLDTFVCSSWYYLRFCSPKEEGYGFKNEDIKYWMPVDQYIGGVEHAILHLLYSRFFMRAISYKNEDITINEPFIGLFTQGMVCHETYKDENNNWVSPDQIEITGKNYHLKNFPKSKIIVGPSESMSKSKKNVIDPESMIENFGADAVRLFILSDSPPAKDVQWSEQGMIASYKFIQKLWILHNKIKENLNNKSKNETDTLNKFTNKLIEKFNFNLEKFNYNVLI

SEQ ID NO: 189534 - protein, 157 aa, Unknown
  Bacterial polypetide isolated from the Sargasso Sea
MRFTLEEIVKKETGQLFHKKNGKKVRELRSEKMSKSKKNIVDPVNIIKKYGADTARFFMLSDSPPERKLKWTNSGIDGSNKYLIKVWKFFNSFPLNDIPYQENYVYLDKQNIHLREKTHYYIDRITKSLDRFQYNVSVALIREFSNIFLSLDVNNTD

SEQ ID NO: 189535 - protein, 280 aa, Unknown
  Bacterial polypetide isolated from the Sargasso Sea
MKSQLKQLGLSIDWDREISTCSDDYYKHQQLFFLELYEKGLVYRKENYVNWDPVDETVLANEQVIDGKGWRSGATVERKKLNQWFFNISRFSEDLLSSLDSLDEWPNKVKIMQKNWIGKSLGCEISFNIKGNLPIKNIKCFTTRPDTLFGFSFLAVSVDHPLSEYYKDDEEFINFKKICSKTGTTEESIAQAEKLGFKTNLMAINPLDNNNKVPVYFANFVLMDYGFGAVFGCPAHDQRDFDFAKKYKLEIKTVVKPENEKDNFKVSNEAYPGPGILINS

SEQ ID NO: 189536 - protein, 295 aa, Unknown
  Bacterial polypetide isolated from the Sargasso Sea
FREVEDKWQNLWTTKKKFSAIKNKDKKKFYCLEMFPYPSGKIHMGHVRNYTIGDVLARFKTLIGFNVLHPMGWDSFGMPAENAARQNNSSPKEWTEKNISVMKTQLKKLGLSIDWDREISTCSPDYYKHQQKIFLDLYDKGLVYRKESYVNWDPVDKTVLANEQVIDGKGWRSGALVERKKLNQWFFKISKFSEELLEDLKNLDTWPEKVKIMQKNWIGKSFGCEVDFKVEGSENVKSIKCYTTRPDTLFGFSFLALSVDHPLAKYYEKNEEFIKFKEDCSKTGTTEESIAQAKK

SEQ ID NO: 189537 - protein, 111 aa, Unknown
  Bacterial polypetide isolated from the Sargasso Sea
MERYNFQAIEKKWQSIFTKEKLFNGKTSKKFYCLEMFPYPSGKIHMGHVRNYTIGDVIARFKYMNGYNVLHPMGWDSFGLPAENAAKENNLHPKEWTQKNISEMKRQLKLM

SEQ ID NO: 189538 - protein, 301 aa, Unknown
  Bacterial polypetide isolated from the Sargasso Sea
IETIIKYFENNKSGNRKTNYKLRDWGVSRQRYWGCPIPVIYYEDGSYRVLDKDELPVELPYDIEMDGKGNPLIKHDKWRNIICSKTGKRALRETDTFDTFVDSSWYFIRFLDNKNPNRPFNEEIVNELMPVDKYIGGIEHAILHLLYARFFTKALRDIYDLKFSEPFKELFTQGMITHKTYQNNENAWVLPSDVAIKNKKLIQISTNQEVKEGPSEKMSKSKKNVVDPDEIIKNFGVNATRAFMISDSPPERDLEWTDAGIQSSKNLTNRIERFFSKDFDNKKISEDQNKFIYKNLYEMDK

SEQ ID NO: 189539 - protein, 77 aa, Unknown
  Bacterial polypetide isolated from the Sargasso Sea
MERYNIKNIEKKWQDIWSSKKTDSVIIDKNKKKFYCLEMFPYPSGKIHMGHVRNYTIGDVLARYKKLRGYNVLHPNG

SEQ ID NO: 189540 - protein, 152 aa, Unknown
  Bacterial polypetide isolated from the Sargasso Sea
MQKKYILEMFPYPSGNIHMGHVRNYVIGDICARYHKLKGDEVIHPMGWDAFGLPAENAAIQFNTHPQDWTFENIKIMKDQLKKLDLDLDWDRELATCNEDYYRFQQELFIDLYNAGLAYKKDALVNWDPEDQTVLANEQVIDGKGWRTGALV

SEQ ID NO: 189541 - protein, 295 aa, Unknown
  Bacterial polypetide isolated from the Sargasso Sea
LSQRNNYGFSKEDIDYWMPVDQYIGGVEHAILHLLYSRFFMKAIGYKNKDFNFKEPFKGLFTQGMVCHETYKDKNGKWLSPDEIELIGNQYQKKGDPKNKIKVGPSESMSKSKKNVIDPEYIMNNYGADAVRLFILSDSPPEKDVQWSDRGMVASYKFLQKLWMLHNKIKIKIENNLDILNDDNEIEKFTNQMINKITNNLENFSYNVMIANIYETYNFLNKQIAKKINSKSLKENYIKILILLTPAIPHFTSECIEDLNVLGNLEWPETNSKFLNEDKIDYVVQINGKKKANFK

SEQ ID NO: 189542 - protein, 306 aa, Unknown
  Bacterial polypetide isolated from the Sargasso Sea
SHFSEVLLNDLDQLEKWPEKVKTMQKNWIGKSYGCEINFKIEGSDKIDSIKCYTTRPDTLFGFSFLALSVDHPLSKYYEKHTDFVKFKESCSKTGTTEESIALAEKIGFKTDLLAVNPLDEQNKVPVYFANFVLMDYGFGAVFGCPAHDQRDFDFSKKYNLEIKTVVKPNNENDNYVVKSEPHTGPGIMINSGFLNGLSAPEESILKTIEYLEENKLGNKKTNYRLKDWGISRQRYWGCPIPIAYDENKNVVKIPVKDLPVALPNIEKLDTDGNPLNNHEKWKTVIINGKKCTRETDTLDTFVDSF

SEQ ID NO: 189543 - protein, 128 aa, Unknown
  Bacterial polypetide isolated from the Sargasso Sea
TYDNIDYMKGQMQSMGLAIDWSREIATCKPDYYKWNQWLFLKMLEKGIAYKKTGTVNWDPVDQTVLANEQVIDGRGWRSGALVEKREIPMYYLRITQYADELLNDLDGLGWPERVKIMQQNWIGKSFG

SEQ ID NO: 189544 - protein, 309 aa, Unknown
  Bacterial polypetide isolated from the Sargasso Sea
EELRADLAQLEGWPDKVRIMQENWIGRSEGAFIHFPLSQKDIHLKVYTTRQDTLFGASFCAISANHTIAQELAKTNLALRNFIADCNRLDTSEATIETAEKLGFNTGLTAEHPLIKGKKLPIFVANFVLMEYGTGAIFGCPAHDQRDLDFARKYNLSIIPVVKPKDVSSATFNIGVEAYTGDGVMTNSGFLNGLSVEDAKIKMISKLEKLGAGEKAVNYRLRDWGVSRQRYWGCPIPIIHCTHCGIVPVPKEDLPVTLPEDIDLDKPGNPLTNHPTWKHVTCPNAGKLPNAKPIPLIHFLSLHGISHVS

SEQ ID NO: 189545 - protein, 246 aa, Unknown
  Bacterial polypetide isolated from the Sargasso Sea
MLEEQYNPEQIESNIQSEWEKINKYKATPDDREKYYCLSMFPYPSGKLHMGHVRNYTIGDVISRYKRMRGFNVFQPMGWDAFGLPAENAAIQNKVDPQSWTEQNIENMKSQLKRLGFSYDWSKELKTCDPNYYRWEQEIFSLLHKQGLVYRKKSLVNWDPVDETVLANEQVIDGKGWRSGATVELKEIDQWFLKITDYADELLTSIENLDWPENVKSMQKNWIGKSFGSEISFTLSNEEKLTALQQ

SEQ ID NO: 189546 - protein, 280 aa, Unknown
  Bacterial polypetide isolated from the Sargasso Sea
GCPAHDQRDFEFAKKYNLEIIKVVSDNDDKKELIEAFIGNGKLINSDFLNGLKVDDAKSKIINEIEKRGIGSKKTLYRLKDWGISRQRYWGCPIPMIYLEDGTIVPVDKSELPVVLPDDIDLSTQGNPLESHPNWKMTTQKSTGKKATRETDTLDTFVDSSWYFMRFCSPKYKNGPFDEKKINYWMPVDQYIGGIEHAILHLLYSRFFTKGINKFNKNININEPFKNLFTQGMVCHESYKDLNGEWLYPEEVERKDNKNVIKRKDKTKVIVGPPESMSKS

SEQ ID NO: 189547 - protein, 293 aa, Unknown
  Bacterial polypetide isolated from the Sargasso Sea
KNINTMKSQLKSMGFSFDWKKELATCHPEYYRHEQEFFVEMFNNGLAYKKESEVNWDPVDKTVLANEQVIDGRGWRSGAMVEKKILSQWFLKISKYSEELLKDLKGLNEWPEKVKTMQTNWIGKSEGVEIDFKLNSSFLKGEIIKVYTTRPDTLYGASFIAISPQHKISLDLSKKNIDTKKFIIECEKTNPDKEKLGFKTGLRVEHPITKKLLDVYIANFVLMDYGLGAIFGCPAHDQRDLDFANKFSLEVIMVVKPKDDNLIQITNEAYLGDGTIINSDFLNGLDVDSAKNK

SEQ ID NO: 189548 - protein, 226 aa, Unknown
  Bacterial polypetide isolated from the Sargasso Sea
EKKLGNKKINFRLKDWGVSRQRYWGCPIPMAYDKNGNVIKIPNDQLPVKLPENVNLKEKGNPLDKLKSWKNIKINEKDCFRETDTLDTFVDSSWYFLRFCSPKNNDYGYDIDEINYWMPVDQYIGGVEHAILHLLYSRFFMRAINYKNNNFKITEPFKGLFTQGMVCHETYKDENNKWLRPDEVENRDGKNFYIKNQPEKKVIVGSSESMSKSKKNTIDPEDIIND

SEQ ID NO: 189549 - protein, 262 aa, Unknown
  Bacterial polypetide isolated from the Sargasso Sea
NEQVIDGKGWRSGAIVERKKLNQWFFNISKFSQNLLDGLEKLDTWPKKVKTMQKNWIGKSFGCEINFKIEGDLPIKNIKCFTTRPDTLFGFSFLALSVDHEVSNFFKNDRDFLSFKKECSKTGTTEEAIAVGEKIGFKTNLLAVNPLNPKQKVPVYFANFVLMDYGFGAVFGCPAHDQRDFDFAKKYNLEIKTVVRPNDKDEKFKVIDEPYPGPGYIINSDFLNSLKAPEDSIIETIKILEQKKLGKKQINFRLKDWGFPDK

SEQ ID NO: 189550 - protein, 244 aa, Unknown
  Bacterial polypetide isolated from the Sargasso Sea
KAKDEAYSGPGVIINSKFLNGLQAPESSILETIKILEQKNLGKKKINFRLKDWGVSRQRYWGCPIPILYDENGKPHPVEKEMLPVKLPENINLNTKGNPLDNEKNWKEIEIAGKKFTRETDTLDTFVCSSWYYLRFCSPKNSDYGYDINDINYWMPVDQYIGGVEHAILHLLYSRFFMRALSYENENLNLFEPFKGLFTQGMVCHETYKDPDNNWVSPEEIETINGKKYLKNDNSKMITVGSSE

SEQ ID NO: 189551 - protein, 296 aa, Unknown
  Bacterial polypetide isolated from the Sargasso Sea
THSNISSIRSDQERMGYSYDWSRFLATSDVDYYKWNQDMFLTLNERGLVERRMAPVNWCVDCDTVLANEQVKNNRCWRCGLEVVQKDMAQWFLRMTEYSDELLEELDNISFPENVKTMQRNWIGRSNGAHIDFPIDGTDSVIGVFTTRPDTIFGVTFVTLSPEHELCEQLCTGTKWEGGWRNLKEECAKISEFERINMLKDKKGVFLGKNAINPISGEKVPIYAGNFVVASYGTGAVMGVPGHDQRDFDFAKEYELEIKRTLIEDNGENPDFPLHRAFEGYGQMVNSSIAGFDGLS

SEQ ID NO: 189552 - protein, 160 aa, Unknown
  Bacterial polypetide isolated from the Sargasso Sea
MNDFDFQQIEKKWQDYWSESNIIECDLDSEKPKFYNLCMYPYPSGDLHMGHVRNYTIGDVITRYKLLNGFNVLSPMGWDSFGLPAENAAIKTGIHPREFTEERIENMKDQIIRLGSLYDWDRELAAHSEDYYKWTQFLFIKLFESGLAYKKDAPVNWCDS

SEQ ID NO: 189553 - protein, 303 aa, Unknown
  Bacterial polypetide isolated from the Sargasso Sea
KLVYRKENYVNWDPIDETVLANEQVIDGKGWRSGAVVERKKLSQWFFKISKFSQDLLDGLEKLDTWPNKVKTMQKNWIGKSFGCEIEFKVEGNLPVEKIKCFTTRPDTLFGFSFLALSVDHEVSKYFKDDKEFIKFKEECSKMGTTEEAIAVGEKIGFKTGLEAINPLKPNEKVPIYFANFVLMDYGFGAVFGCPAHDQRDFDFAKKYKLDIKTVVRPFDKDDTFKVEDESYPGAGILINSEFLNGLEAPNDSVAKTIEILEKKKLGNKQINYRLKDWGVSRQRYWGCPIPIVYDEKGKIHPV

SEQ ID NO: 189554 - protein, 241 aa, Unknown
  Bacterial polypetide isolated from the Sargasso Sea
MSEYKFQEIESKWQKHWSDNDSIKCDITSVDKNFYNLCMYPYPSGDLHMGHIRNYTIGDVITRYKMMNGFNVLSPMGWDSFGLPAENAAIQTGIHPKTFTEERINNMKDQIIRLGSLYEWDREVAAHNKNYYKWTQFIFVKLFKNKLAYKKDAPVNWCNSCKTVLANEQVIEGNCDRCDAIVDQKNLNQWFLKISDYSDELLDGLNEIGDWPENVKAMQQNWIGRSEGAEFSLKIDGTKLS

SEQ ID NO: 189555 - protein, 107 aa, Unknown
  Bacterial polypetide isolated from the Sargasso Sea
MNETRYNFKIIEDKWQKYWEEKKIFKSVSNKKKEKFYCLEMFPYPSGKIHMGHVRNYTIGDVLSRYKSLKGFNVLHPMGWDSFGMPAENAAKQNNLNPKNWTESNIQ

SEQ ID NO: 189556 - protein, 285 aa, Unknown
  Bacterial polypetide isolated from the Sargasso Sea
LFIDFYNNGLVSRKETYVNWDPVKKTVLANEQVIDGRGWRSNAVVERKKLSQWFFNITKFSNNLLSDLEKLGGWPEKVKLMQKNWIGKSFGCEIKFELSSETSKINIFTTRPDTIFGATFIALSVDHPLSKKFINSNEFQEFKNECNKTGTTEESLANAEKIGFDTKLFAKHPFIKEKKIPIFFANFVLMDYGNGAIFGCPAHDQRDFDFAKKYNLEVIKVVSDKQEEELKEAYTGDGVIINSEFLNNLNVENAKEKIIEEIEKRGIGKRKTLFRLKDWGISRQR

SEQ ID NO: 189557 - protein, 300 aa, Unknown
  Bacterial polypetide isolated from the Sargasso Sea
FDITKFSNELLRGLDQLDNWPDKVKIMQKNWIGKSIGCEINFKIKGENKTINVFTTRPDTIFGASFLAVSVDHPICAKFLKDEKYNSFKNECLKVGTTEEALANAEKIGFDTKLFAAHPFVEGKKIPIYVANFILMDYGTGAIFGCPAHDQRDLDFAKKYNLPITEVVSDNPTKPKNFNNLSEAFIGDGTLINSDFLDGLTVEQAKTKIIKEIEKLKIGKKKITFRLKDWGISRQRYWGCPIPMIHLQDGSIVPVDKSELPIKLPEDIDLNQSGNPLENHKSWKNTINKKTGEPATRETD

SEQ ID NO: 189558 - protein, 328 aa, Unknown
  Bacterial polypetide isolated from the Sargasso Sea
YDPSSLEKRWQRLWNEKQIDQTPDGNTDQAFYALSMFPYPSGNLHMGHVRNYVITDVIARVRRMQGFSVLHPMGWDAFGLPAENAAIERNVDPGDWTDQNIAQMRAQLDRLGLSIDWDREQATCHSDYYRWTQWLFLELFDGGLAYRKNATVNWDPIDQTVLANEQVDADGKSWRSGALVEQRQLNQWFLRITDYAEALLKDLDQLDGWPERVRTMQANWIGRSEGAEINFAVRGHDSASITVFTTRPDTLAGASYVVLAPEHPLVDALLDPAQEAAVRTFQKDVARLSSLERTSDDRPKHGVPIGASVTNPLNGDELPVWIADLCAG

SEQ ID NO: 189559 - protein, 307 aa, Unknown
  Bacterial polypetide isolated from the Sargasso Sea
YIANFVLMDYGTGAIFGCPAHDQRDLDFANKYKLNVLPVVKPEKIDPKEFKITDKAYTDDGILFNSDFLNNLKVTDAIKKAIEVITNKNFGEKKVTFRLKDWGVSRQRYWGCPIPIVYNEKGEAFPVDKKDLPILLPEDVDLNSKGNPLEKHPTWKFTKLSSGEKALRETDTLDTFVDSSWYFLRFCSPKNKKYGYEIEDINYWMPVDQYIGGVEHAILHLLYSRFFMRALAFENKKFNYSEPFESLFTQGMVCHETYKNENNNWLYPDEIEKNSKGQFITKKDKEKVMVGPSESMSKSKKNIMIQR

SEQ ID NO: 189560 - protein, 300 aa, Unknown
  Bacterial polypetide isolated from the Sargasso Sea
SGNCHMGHVRNYTIGDVISRYKRMKNFNVFQPMGWDAFGLPAENAAIANKVSPNDWTNQNIENMKSQLQSLGFSYDWSKELRTCDSSYYKWEQLIFKKFYDAGLVYRKKSMVNWDPEDKTVLANEQVIDGKGWRSGAQIEIKEIDQWFIKITDYADELLSSLEELDWPENVKLMQKNWIGKSFGAEIEYKIDASKDSLITFSTRPDTIFGVSFLAISPNHPLAIKIAKDNEKISNFLEKCKETKAAEADMAKAEKLGIDTNLRVIHPLTKEKLPVWIGNFVLLDYGTGVVMGVPAHDSRD

SEQ ID NO: 189561 - protein, 285 aa, Unknown
  Bacterial polypetide isolated from the Sargasso Sea
GVPAHDQRDFEFAKKYYLEIIQVIKNKDRKDNKDLVEAYTEDGEVINSDFLNGLSVDDAKKTIISKLEELKIGSRQVNYRLRDWGVSRQRYWGCPIPIIYREDGEVIPVPDNELPVSLPDDIDFDSPGNPLEKHPTWKYTTCSETGMKAVRETDTLDTFVDSSWYFMKYCSENIQNHSFDDEDLNYWMPVDQYVGGVEHAILHLLYSRFFSKALSDTGVGNFNEPFEGLFTQGMVCHETFKTKKGEWILPSDIYEKNNQFYRLETNELLTKGPSESMSKSKKNVV

SEQ ID NO: 189562 - protein, 326 aa, Unknown
  Bacterial polypetide isolated from the Sargasso Sea
GCPAHDQRDFDFATKYKLTIIPVVEPFDKNKNFVTLKEAYTGPGKIINSKFLNDLKVPEESIIKTIEYLEKNNIGKKKINFRLKDWGVSRQRYWGCPIPIAYDENNNIKKIPLENLPVELPENINLKTNGNPLDHVESWKNITIDGKKYKRETDTLDTFVDSSWYFLRFCSPKNEKKGFNIEDVKYWMPVDQYIGGVEHAILHLLYSRFFMQAINFNQKEFNITEPFSGLFTQGMVCHETYKSQQGNWLSPDEYELAKSRGEKIQIGSPESMSKSKKNTIDPENIIENYGADAVRLFILSDSPPEKDVQWSDTGMLSSYKFLKSFG

SEQ ID NO: 189563 - protein, 228 aa, Unknown
  Bacterial polypetide isolated from the Sargasso Sea
MERYNFKIVENKWQNFWEKKKVFKSKLDKSKKKFYCLEMFPYPSGKIHMGHVRNYTIGDVLARYKSMKGYNVLHPMGWDAFGMPAENAARENKLDPKDWTNKNIDTMKNQLKKLGLSIDWDREISTCSEDYYKHQQTFFLELYEKGLVYRKENYVNWDPIDETVLANEQVIDGKGWRSGAIVERKKLSQWFFNISKFSQDLLDGLETLDTWPNKVKTMQKNWIGKSFG

SEQ ID NO: 189564 - protein, 280 aa, Unknown
  Bacterial polypetide isolated from the Sargasso Sea
FSQDLLDGLEELEAWPNKVKVMQKNWIGKSFGCEIDFKIEGNLPIKNIKCFTTRPDTLFGFSFLALSIDHEVAAFYKNDENFKLFKEECSKTGTTEEAIAVGEKIGFKTSLLAVNPLNPKQKVPVYFANFVLMDYGFGAVFGCPAHDQRDFDFAKKYKLGIKTVVRPHDQDESFKVTNEAYSGPGIMINSNFLDGLEAPDQSILKTIDILEEKKIGKKKINYRLKDWGVSRQRYWGCPIPIAYNKDNKPVPIPKSMLPVKLPNKIGLKSKGNPLDHDKDG

SEQ ID NO: 189565 - protein, 101 aa, Unknown
  Bacterial polypetide isolated from the Sargasso Sea
MQYDHLKIERKWQEYWDNNKTFKSDVDPEKEKLYILDMFPYPSGAGLHVGHPLGYTATDIYSRFKRLQGFNVLHPMGWDAFGLPAEQYAIRTGTHQKIPLK

SEQ ID NO: 189566 - protein, 282 aa, Unknown
  Bacterial polypetide isolated from the Sargasso Sea
YGTGVIMAVPGQYQRDWDFAKKFDLKIVRTVETPDNFDGEAYSEDGPAINSEFLDGLHIDDAKEKMIKWLEKEGKGKRAVQFKLRDWLFSRQRYWGEPIPIIHQDGKPVPLNESELPLELPEVDKYEPSGTGESPLANIKSWVEVKDSESNIIGLRETNTMPQWAGSCWYYLRFIDPNNLEKGWDSEKEKYWMPVDLYIGGAEHAVLHLLYSRFWHHVLYDLGLVSTKEPFKKLFNQGMILGSDGSKMSKSRGNVVNPDETVDIYGSDALRIYEMFMGPLEK

SEQ ID NO: 189567 - protein, 284 aa, Unknown
  Bacterial polypetide isolated from the Sargasso Sea
VRETDTFDTFFESSWYFLRYCNPRLDKPFLKEDIDYWLPVDQYIGGIEHAILHLLYSRFFTKVLRDLGYININEPFKGLFTQGMVTHKTFKSKKGEWVEPSYIFEKKNGYFDNNNEKVEIGKIEKMSKSKKNVVNPSSIIDMYGADTARWFMLSDSPPERDLEWTDVGVASSHKFINKIWDTCIKAKNYKKGGGDSKASMFNKHIINISENIDKFHFNKSVANIYEYVNDLNKLMEQKTITEKEIKKATNNLCIVLQPFTPHLSEEIWEMLGNNGFCANASWPE

SEQ ID NO: 189568 - protein, 294 aa, Unknown
  Bacterial polypetide isolated from the Sargasso Sea
QYLFLELYKAGLVYQKESEVNWDPIDNTVLANEQVDSEGKSWRSGAIVEKKLLKQWFLRITNYADELLKDLEKLDYWPERVKIMQDNWIGKSIGTNINFNINTNPQEKLTVFTTRPDTLFGVTYLAISVNHSLIKNISDQATLQDIEKLKEYLKENKNTEFEKIGLKTNLIAINPLNSEPIPIWVASYVLDEYGTGAVMGVPAHDMRDFEFAKKNDIDIKQVIIKEKSDSSNELENAYVENGYLINSNQYDGMANNIAKLKISEEGVNNGWAENKIQYRLRDWLISRQRYGDVP

SEQ ID NO: 189569 - protein, 268 aa, Unknown
  Bacterial polypetide isolated from the Sargasso Sea
WRSGAIVERKKLNQWFFNISKFSQELLDGLEKLDQWPNKVKVMQKNWIGKSFGCEIIFKIEGELPVDNIKCFTTRPDTLFGFSFLAVSIDHEISKYFAKDKSFIEFKKQCSKTGTTEEAIAMGEKIGFKTNLIAINPLEPNQKVPVYFANFVLMDYGFGAVFGCPAHDQRDFDFAKKYDLEIKTVVRPDEEKDNYKVKDKAYTGPGIIVNSNFLNGLKVPEQSIIKTIDFLEEKKIGKKQTNFRLKDWGVSRQRYWGCPIPIAYDQNG

SEQ ID NO: 189570 - protein, 283 aa, Unknown
  Bacterial polypetide isolated from the Sargasso Sea
NKIQYRLRDWLISRQRYWGCPIPIVNCKKCGSVPLNQSELPVALPKDIDISANKINALGDNNNWLNTTCPKCGIAAKKETDTMDTFMCSSWYFLRYPSSKCSNKPFEKIEINKWLPVDQYVGGVEHAILHLLYARFFTKALRDNELFEIDEPFKKLLTQGMVQAAAYKNNKTGKYVSPSDITDLSNPTDPIDNTKLEVLYEKMSKSKYNGIDPESVIKKYGADTARMFILFKAPPEKDLEWGDTDVEGQFRFLSRIWKLYINCAKDINSKSNSFPDKEKSLTK

SEQ ID NO: 189571 - protein, 184 aa, Unknown
  Bacterial polypetide isolated from the Sargasso Sea
MNRYNFKIVEEKWQTYWDKNKTYKTKIDKTKKKFYCLEMFPYPSGKIHMGHVRNYTIGDVLARVKSLQGYNVLHPMGWDSFGLPAENAARENKLHPKKWTETNISTMKMQLKKIGLSLDWDREISTCSEEYYKHQQIFFLELYEKGLVYRKENYVNWDPVEQTVLKNEQVIDGKGWRSGVTVKE

SEQ ID NO: 189572 - protein, 225 aa, Unknown
  Bacterial polypetide isolated from the Sargasso Sea
WDPVDQTVLANEQVIDGRGWRSGAIVERREIPQWFIRITAYAEELLAGLDTLDGWPEAVRIMQRNWIGKSRGVELAFGLSSPIADHERIEVYTTRPDTLFGVTYLSLAAEHPITLALAEKNPELKEFVTSCQQASVAEADMAQAEKLGMDTGLRASHPLTGEAIPVWVANYVLMDYGSGAVMAVPAHDERDWEFAQKYQLPIKAVVCETEGKPANTTHGAYTDRG

SEQ ID NO: 189573 - protein, 190 aa, Unknown
  Bacterial polypetide isolated from the Sargasso Sea
MLKVRYNFLEIEKKWQEFWKTNETYKVGFSSKPKFYVLDMFPYPSGAGLHVGHPLGYIASDIYSRFKRHKGYNVLHPQGYDSFGLPAEQYAIRTGQHPRKTTSENIDMYRNQLDRIGFSFDWSREIRTSDPKYYKWTQWIFILMFNSYYCPKDKKAKSIESLISMFEREGDKSMKEDLLLYGYSFTNSQW

SEQ ID NO: 189574 - protein, 271 aa, Unknown
  Bacterial polypetide isolated from the Sargasso Sea
NTKGNPLNSNDDWKKVNIEGKDLFRETDTLDTFVCSSWYYLRFCSPKENKYGFNQEEIDYWMPVDQYIGGIEHAILHLLYSRFFMKALGFKNKTFNIEEPFKGLFTQGMVCHETYKDQNNNWISPDEIEIRNRKYYKKNEPDSEIIVGPSESMSKSKKNVIDPENIINNYGADSVRLFILSDSPPEKDVQWSEQGMVSSFKFIQKLWLLHSKIKVKILNKNQTTNEDTELNKFTNQLISKITDNLESFSYNVIIANMYETYNFLTKHIEKN

SEQ ID NO: 189575 - protein, 295 aa, Unknown
  Bacterial polypetide isolated from the Sargasso Sea
QLFFIEMFEKGLVYRKENYVNWDPIDQTVLANEQVIDGKGWRSGAVVERKKLNQWFFNISKFSDSLLESLNSLKNWPKKVKRMQANWIGKSLGCEINFKISGDVEINEIKCFTTRPDTLFGFSFLAVSVDHPISKFYKDDPKFKKFKDDCSKTGTTEESIAQGEKIGFKTNLLATNPLNENERVPVYFANFVLMDYGFGAVFGCPAHDQRDLDFALKYDLPVKTVVKPPDESDAFKINKEAYTGGGVIINSKFLDGLKVPDESIIKTINIIEEKKIGKKTINFRLKDWGVSRQRY

SEQ ID NO: 189576 - protein, 141 aa, Unknown
  Bacterial polypetide isolated from the Sargasso Sea
MERYNFKTVEEKWQEKWLKSQVFRSKVDHTKEKFYCLEMFPYPSGKIHMGHVRNYTIGDVLSRYKSLQGFNVMHPMGWDAFGMPAENAARENNLDPKEWTNKNISTMKDQLKKLGLSIDWEREISTCSEEYYKHQQIFFFG

SEQ ID NO: 189577 - protein, 287 aa, Unknown
  Bacterial polypetide isolated from the Sargasso Sea
NAEKIGFKTDLVAINPLDNNLKVPVYFANFVLMDYGLGAVFGCPAHDQRDLDFALKYKLKVTPVVSPELRVKNFKVQDKAYTGPGYIFNSSFLDGLKCPDESITKTIEHLEKEKLGVKKINFRLKDWGVSRQRYWGCPIPILYDEEGIAHKVPKEHLPVQLPDLEKLEPTGNPLDNQIEWKKVKLDGKNYVRETDTLDTFVDSSWYFLRFCSPHKEDYGFDSEEIKYWMPVDQYIGGVEHAILHLLYSRFFMQAISYKNDQIDLKEPFKGLKIRAWFVMKLIKILKI

SEQ ID NO: 189578 - protein, 271 aa, Unknown
  Bacterial polypetide isolated from the Sargasso Sea
GIILGIVVQDQINLFEKSDVDYWLPVDQYIGGIEHAILHLLYSRFFTKALRDLNYINLSEPFKGLFTQGMVTHQTYKDSKGNWLEPGEIKILNGSVLNLNNNEVQAGKIEKMSKSKKNVIDPTDIIENYGADTARWFMLSDSPPDRDLEWTDSGISGSHKYINKVWNLMQEVVEGDYKEKNSKQEDTLKDKINYTIESVTKNIENFHFNKSVANLYELVNIFQKVISEKTVSKKYLIQSFKTLSVLLQPFTPHLSEEMWKCLGGARLAINE

SEQ ID NO: 189579 - protein, 298 aa, Unknown
  Bacterial polypetide isolated from the Sargasso Sea
MFPYPSGKIHMGHVRNYTIGDVLARYKSMCGFNVLHPMGWDSFGMPAENAARENNLDPKDWTKKNIATMKNQLQSLGLSIDWDLEISTCDEEYYKHQQALFIDMYNKGLVKRKATYVNWDPVDKTVLANEQVINGRGWRSNAIVERKKLSQWFFNISKFSNELLEDLKTLNQWPDKVKLMQKNWIGKSVGCEIDFEIQGNQKVKIFTTRPDTIFGATFLALSVDHPLCKGFDEREDFIKFKKTVSQVGTTEEAIANAEKIGFDTGFKAKHPFIKNKTIPVYVANFISMDYGTGAIFGC

SEQ ID NO: 189580 - protein, 294 aa, Unknown
  Bacterial polypetide isolated from the Sargasso Sea
NFVLKEYGLGAIFGCPAHDQRDLEFANEYNLDVIPVVKPINAEQSSFKIKDIAFTDDGLIINSDFLNGLSVENAKYKIIEQIEKSQIGRKKTNFKLRDWGISRQRFWGCPIPIIYREDGEVLAVEENELPVKLPEVENFGESSKTLNNIPGWNETVCPKTGMKAYRETDTFDTFFESSWYYFRYCNARNDNPFDKEDIDYWLPVDQYIGGIEHAILHLLYSRFFTKALRDLNYFNLNEPFKGLFTQGMVTHITYKNKNGEWIEPKDVEIIDGKPKDINGFDIETGKIEKMSKSK

SEQ ID NO: 189581 - protein, 274 aa, Unknown
  Bacterial polypetide isolated from the Sargasso Sea
WNDEEVFSVKTDLNKKKYYVLEMFPYPSGKIHMGHVRNYTLGDVVARYKKMCGFNVLHPMGWDAFGLPAENAALTEKKAPGEWTYNNIKTMKSQLLKMGLSLDWDREIATCHPDYYKHEQKFFIDMFKAGLAYKKEAEVNWDPVDKTVLANEQVVEGRGWRSGALVEKKKLSQWFLKISKYSEELLDDLNKLDNWPEKVKIMQSNWIGKSIGAEISFKIIDFNENKIDKIKVFTTRPDTIFGATFIALSTEHEISKILANNNSEINSFINDCKK

SEQ ID NO: 189582 - protein, 266 aa, Unknown
  Bacterial polypetide isolated from the Sargasso Sea
LGLLKCDEPFTNLLTQGMVWKDGAKMSKSKGNTVDPQSLIDEYGADTVRLFMMFASPPEQSLEWKDEGVEGAHRFLKRLWKFASTHINEGKSPALNQTSMTDAQRELRRKIHMTIDKVNDDIGRRYTFNTAIAAVMEMINALLRSKLTNDNDHAIMREGVETAILLLSPIVPHITDALWVELGHSEPLIDVPWPKSDPNALEQNEIEMVVQINGKLRGKITVTKNAEQKQIENQAVEDEKVKQNLKGKTIKKIIVIPERLVNIVVS

SEQ ID NO: 189583 - protein, 280 aa, Unknown
  Bacterial polypetide isolated from the Sargasso Sea
NEQVIDGKGWRSGATVELKEIDQWFLKITDYAEELLTSIENLDWPENVKSMQKNWIGKSFGSEIKFSLLDKTELTAFTTRIDTIFGVTYLAISPNHPLAQSLAAECMETSEFIKKCNATKMAEADMAKAEKLGHKTNLKVKHPFSDIDLDVWIANYVLMDYGTGVIMGVPAHDERDFEFAKKYNIEIKQVIEGDELPSPKKGILIHSDSFTGQESNDAIQNINNFLEMNNIGKSIENFRLRDWGVSRQRFWGCPIPVIYEDGEPVFLEKEDLPVQLPKIN

SEQ ID NO: 189584 - protein, 168 aa, Unknown
  Bacterial polypetide isolated from the Sargasso Sea
MSEKYNPKVIEKRWQSFWDREKIFESEIQADKEKYYILEMFPYPSGKIHMGHVRNYTLGDVIARYKRAKGFNVLHPMGWDAFGLPAENAAKENVISPKKWTYENISTMKDQLRQMGLSLDWSRELATCDEKYYHQQQKLFLNFFRKKLIYKKESLVNWDPVENTVLAN

SEQ ID NO: 189585 - protein, 56 aa, Unknown
  Bacterial polypetide isolated from the Sargasso Sea
MARYNHKKTEPKWQKVWEDRGCFQVYEDPNRPKYYVLEMFPYPSGRIHMGHVRNYT

SEQ ID NO: 189586 - protein, 293 aa, Unknown
  Bacterial polypetide isolated from the Sargasso Sea
KVKLMQKNWIGKSFGCEIDFQIDSEKEFVKIFTTRPDTIFGASFIALSVDHPLSKNFQSNGNFNEFKKECNKTGTTEEALAHAEKIGFDTGLFVKHPFLDKKIPIYFANFVLMDYGTGAIFGCPAHDQRDFDFAKKYNLGIIKVVDDSKLGELEEAYTGSGKLINSDFLNGLDVSAAKEKIISEIESKNIGVRKTLYRLKDWGVSRQRYWGCPIPMIYLEDGSVVPVEKNELPVELPDDIDLNSQGNPLESHPKWKYTTHKATGEKAIRETDTLDTFVDSSWVLFEILFTKSS

SEQ ID NO: 189587 - protein, 305 aa, Unknown
  Bacterial polypetide isolated from the Sargasso Sea
VKKEDLPIRLPDIKKFNKTSGLLKGFDEWKETTCPETGMKAVRETDTFDTFFESSWYYLRYCNPRDIKPFDKKDISYWLPVDQYIGGIEHAILHLLYSRFFTKVLRDLKYINIDEPFKGLFTQGMVTHKTYKNKKGEWIEPEEVSFGGSNYVDASGDKVLVGKIEKMSKSKKNVVNPSKIIELYGADTARWFMLSDSPPDRDLEWTDKGVSASYKFLNKIWDTYIKSRDYLITTKTNKIITSSLNKIINEVSENIESFHFNKSVAKIYEYINLLNSSISSKNINKSDLNKAIKNLALITQPFIPH

SEQ ID NO: 189588 - protein, 280 aa, Unknown
  Bacterial polypetide isolated from the Sargasso Sea
FGCPAHDQRDLDFAQQYDVEVIKVVEQERSPEVVDNQINRAFVESGIMINSGFLNGLHNEIAKEEVLKRLEKEGKGNRKTNYKLRDWGISRQRYWGCPIPILYREDGSVVPVRKEDLPVLLPSTSHNNPSPTKEEVNEWKNTVCPTTGMKAIRETDTFDTFFESSWYYLRYCNPRNEKPFIKEDINYWLPVDQYIGGVEHAILHLLYSRFFTKALRDMDFVDINEPFKGLFTQGMVTHKTFKNAHGEWVEPKNIFESNGNFFDSHKEKVKVGKIEKMSKS

SEQ ID NO: 189589 - protein, 265 aa, Unknown
  Bacterial polypetide isolated from the Sargasso Sea
SPFHPFVDRLMKQSEALNSQVNELRSQKISEESIAKNEKVGIQTELFIKHPFIENKLLPVFIANFILMDYGSGAIYGCPAHDQRDLDFANKYDLEIIQVIKPTDSIELDKKTAYTGSGKLINSQFLNDLSIEEAKKEIIKRVEELNIGKKTTNFRLRDWGVSRQRYWGCPIPIMYREDGKVIEVPEDQLPLELPEDIDLSIPGNPLDNHPEWKFTKCPETGMNAIRETDTLDTFVDSAWYFLRFCSPLETKEPFNLDEIDYWMPS

SEQ ID NO: 189590 - protein, 268 aa, Unknown
  Bacterial polypetide isolated from the Sargasso Sea
VGKNTYNGQAALHETDTFDTFMESSWYYARYCSPDHDQAMLDPAKANYWLPVDQYIGGIEHAILHLLYSRFFHKLLRDVGLVQCDEPFKRLLCQGMVLADTFYRETENGGKEWFSPADVATERDEKGRITASILKTDGKPVLSAGMSKMSKSKNNGIDPQLVIDQYGADTVRLFMMFTAPPEQTLEWQDSAVEGANRFLRRIWTLAADHKELFSTAVTSLELNSDQKALRRDIHKTIAKVSDDIGRRNVFNTAVAAIMELANKYKKRL

SEQ ID NO: 189591 - protein, 303 aa, Unknown
  Bacterial polypetide isolated from the Sargasso Sea
IGKSIGCEINFEIDKNKDKVKIFTTRPDTIFGATFLAVSVDHPLSRSFETQKKFLEFKKKCSQVGTTEEAIANAEKIGFDTNLKARHPFIKGKTIPIFIANFILMDYGTGAIFGCPAHDQRDFDFAKKYKLDIIPVVKSKESIEINQMKNAYTGDGKIINSNFLDDLNIEDAKKKIIKEIEKKNIGCKKISFRLKDWGISRQRYWGCPIPMIYLKNGEVVPVDKSELPVKLPEDIDLNSKGNPLVNHPTWKNVKFKKTGEDAIRETDTLDTFVDSSWYFIRFCSPRLKGKPFDEKALSYWMPV

SEQ ID NO: 189592 - protein, 152 aa, Unknown
  Bacterial polypetide isolated from the Sargasso Sea
MERVNFQVIEKKWQEKFASSKLYNKNGKKFYCLEMFPYPSGKIHMGHVRNYTIGDVIARYKYMKGFNVLHPMGWDAFGLPAENAARMNNLKPKDWTQKNIKLMKSQLKMLGLSIDWDLEISTCDESYYKHQQELFIDFYNQGLVSRKETYVN

SEQ ID NO: 189593 - protein, 262 aa, Unknown
  Bacterial polypetide isolated from the Sargasso Sea
YTGPGYIFNSSFLDGLKCPEDSIIKTIDHLEKNKFGEKKINFRLKDWGISRQRYWGCPIPIIYDDNNNPQKLPKKMLPVELPKIDKLQAKGNPLDKENEWKNLTIDGKKYARETDTLDTFVDSSWYFLRFCSPKNNEYGFSYEDIKYWMPVDQYIGGVEHAILHLLYSRFFMQALSHKNNKLNITEPFKGLFTQGMVCHETYKDPENNWVSPDEIISKDGKKYLKNNPSKEVKVGPSESMSKSKKNTIDPENIINNYEQILS

SEQ ID NO: 189594 - protein, 278 aa, Unknown
  Bacterial polypetide isolated from the Sargasso Sea
LKRLGFSYDWSKELKTCDPNYYKWEQEIFSLLHKQGLVYRKKSLVNWDPVDETVLANEQVIDGKGWRSGATVELKEIDQWFLKITDYADELLSSIENLDWPENVKSMQKNWIGKSFGSEISFSLSSGEKLTAFTTRIDTIYGVTYLAISPNHPISQNLANQDTDIDDFIKKCNETKMAEADMAKADKLGLKTNLKVKHPFTGIDLDVWIANYVLMDYGTGVVMGVPAHDERDHEFAHKYNIDIKQVIKADEVPSSEKGELINSEKNNGLTSENAIQDI

SEQ ID NO: 189595 - protein, 265 aa, Unknown
  Bacterial polypetide isolated from the Sargasso Sea
VARYKRAQGYNVLHPMGWDAFGLPAENAAMEKGVHPASWTYENIATMREQLQAMGLSIDWEREIATCDPDYYRHEQTMFVDFLKKDLVYRQDGWVNWDPVDQTVLANEQVIDGKGWRSGALIERRRLSQWFCRITAFSDELLSALDTLDRWPPKVRAMQENWIGRSEGAYIEFAFTDGRETPLRVYTTRPDTIFGASFCAIAADHPLAEELAAGDPEAAAFIEECRQLGTSEEAIQTADKRGYDTGLRVKNPFADGIELPVYIAN

SEQ ID NO: 189596 - protein, 264 aa, Unknown
  Bacterial polypetide isolated from the Sargasso Sea
QLKRLGLSIDWEREISTCNEEYYKHQQLFFLELYDKGLVYKKENYVNWDPIDETVLANEQVIDGKGWRSGAIVERKKLNQWFFNISKFSDDLLKGLEELKSWPNKVKIMQQNWIGKSFGCEIDFKIEGNLPINSVKCFTTRPDTLFGFSFLAVSIDHPISEHFKENQDFIKFKKECSKTGTTEESIAQGEKIGFNTNLTAVNPLNTREKVPVYFANFVLMDYGFGAVFGCPAHDQRDLDFALKYNLPVKTVVRPLDKDEKFQVK

SEQ ID NO: 189597 - protein, 106 aa, Unknown
  Bacterial polypetide isolated from the Sargasso Sea
MDKVNFNNIEKKWQKIWEKTNLYRANKEKKFYCLEMFPYPSGKIHMGHVRNYTIGDVIARYKYLNSFNVLHPMGWDSFGLPAENAARENNLNPKIWTQKNIFGNEK

SEQ ID NO: 189598 - protein, 306 aa, Unknown
  Bacterial polypetide isolated from the Sargasso Sea
MTRETDTLDTFVCSSWYYIRFCSPNEKNYGFKKDDIDYWMPVDQYIGGVEHAILHLLYSRFFMRAISYQNKNFNINEPFESLFTQGMVCHETYKDENQNWLTPNEVVKKGNKFVKKDKPDEIVKVGPSESMSKSKKNVIDPEFIINNYGADAVRLFILSDSPPEKDVQWSEQGMLSSYKFIQKLWTLHLKIKDKVSKEDEKLVDREIETFTNQTIAKISNNLEKFNYNVIIANMYETYNYLIKYIQKNKNLKNLKDNYKKILICFSPVIPHFASECLEELGETDNMVWPNFDTTLLESEDISYVIQ

SEQ ID NO: 189599 - protein, 295 aa, Unknown
  Bacterial polypetide isolated from the Sargasso Sea
MENHRTWKLTKQKSTGKKAIRETDTLDTFVDSSWYFLRFCSPKEKGQPFDVKKINYWMPVDQYIGGIEHAILHLLYSRFFMRALKKNNKNINDNEPFRGLFTQGMVCHETYKDQNGKWLNPTEVEKSSKGEAIKIKDKSIVKVGPSESMSKSKKNVIDPEQMITSYGADAVRWFILSDSPPEKDIQWSNQGVNAAYKFLQKIYNLCCVIKDREKSKNTLDNEFNLKMNSYLNKITKFIENFNLNVVVANVYEIYSLFNSHLKENVSDKCFRDNLIKLMKILIPFTPHLAYECLEL

SEQ ID NO: 189600 - protein, 259 aa, Unknown
  Bacterial polypetide isolated from the Sargasso Sea
MDTFVDSSWYFLRFLDSKNEKSPFDKNIANSWLPIDQYIGGVEHAILHLLYSRFFVKALRDINLLNVDEPFHNLFSQGMINFGGSKMSKSKGNVVDPEAYFATHGADALRLYILFMAPPSDGVEWNDGGIEGTKRFLNKFWDNMTKLKDLENVETSNEDSLVRTMNQTIFSVTNHLEKFEFNTGVSDLMKANNAISLYLNQNKTVSIETKDLVLESMCNLLYPFSPHISSEIYHLYLNKDISTIDWPAYEESNLRNPTI

SEQ ID NO: 189601 - protein, 298 aa, Unknown
  Bacterial polypetide isolated from the Sargasso Sea
MQKKYILEMFPYPSGNIHMGHVRNYVIGDICARYHKLKGDEVIHPMGWDAFGLPAENAAIQFDTHPKDWTLSNIENMKNQLKRLNLDLDWERELATCNEDYYKYQQELFIDFYNAGLAYKKDALVNWDPVDQTVLANEQVIDGKGWRTGAAVEQKVLSQWFFKITHYAEELLSNLDELPLWPEKVKTMQRNWIGKSIGAEIKFQVVGMNEWLNVYTTRPDTIYGATFIALSVNHQLVSMFLKPQEIDKIKKSFANKSNEKEKIGFCLDIKCKHPILDKEIPVYIANFVLDNYGERVQY

SEQ ID NO: 189602 - protein, 234 aa, Unknown
  Bacterial polypetide isolated from the Sargasso Sea
MERYNIKLIEKKWQNIWLKEKTNASILNKNKKKFYCLEMFPYPSGKIHMGHVRNYTIGDVLARYKKLQGFNVLHPMGWDSFGLPAENAARENNLHPKIWTRKNIQTMKKQLKLLGLSLDWDREISTCEPEYYKHQQEFFIELFKKKLVYKKDTYVNWDPKEQTVLANEQVIDGKGWRSGVVVERKKLSQWFFNIKKFSQDLLDDLNKLKNWPDKVKLMQKNWIGKSFGCEINFQ

SEQ ID NO: 189603 - protein, 268 aa, Unknown
  Bacterial polypetide isolated from the Sargasso Sea
ALHPFIKNKKIPIYVANFVLMDYGKGAIFGCPAHDQRDFDFAKKYKLPIIRVVSDKDKSKNNEEMREAFTGVGKIINSNFLDNLDIPEAKKTIIKEVEKKKIGQKKTLFRLKDWGISRQRYWGCPIPMIYLEDGSVIPVEKSELPIKLPNDVDLNSNGNPLDNHPFWKKTFHKKSGKPAIRETDTLDTFVDSSWYFLRFCSPKFRKGSFEEKDANYWMPVDQYIGGVEHAILHLLYSRFFMKAINKSNKKIKCSEPFKNLFTQRYGLS

SEQ ID NO: 189604 - protein, 304 aa, Unknown
  Bacterial polypetide isolated from the Sargasso Sea
DPVEKTVLANEQVINGKGWRSNATVQRKKLSQWFFNITKFSNELLNELDKLHGWPEKVKLMQKNWIGKSFGCEINFDIVQNKNKITVFTTRPDTIFGASFLALSVDHPLSKSFVDKDDFKKFKEKCDKTGTTEEALANAEKLGYKTGLEANHPFLENKKIPIFFANFVLMDYGTGALFGCPAHDQRDFDFAKKYDLKITRVVSDEKGDKELQEAFTGEGKIINSEFLNGLEINKAKERVIDTIEKNRLGTRKTLFRLKDWGVSRQRYWGCPIPMIYLEDGSVVPVDKSELPVELPEDIDLNSAG

SEQ ID NO: 189605 - protein, 310 aa, Unknown
  Bacterial polypetide isolated from the Sargasso Sea
PPIKNIFANVDISDAAYGSKDNVEIANSDFLNGLDYKKGTQKAIEKLEEIGQGKGKTNYRLRDAVFSRQRYWGEPFPVYYVNGLPKMIESQHLPIILPEVEKYLPTEDGLPPLGNAAVWAWDTKQNKVVATDLVDNATIFPLELNTMPGWAGSSWYWMRYMDAHNENEFASAAALAYWENVDLYIGGSEHATGHLLYSRFWNKFLKDKGFAPTEEPFKKLINQGMILGTSAFVYRLEGTNTFVSKNKIGDQKVQPIHADVSMVNSSDELNVEKFKAWREDYTDAEFILDDNGKYIVGREVEKCLNREYML

SEQ ID NO: 189606 - protein, 257 aa, Unknown
  Bacterial polypetide isolated from the Sargasso Sea
SNLDKKKKKFYCLEMFPYPSGKIHMGHVRNYTIGDVLARYKKLQGFNVLHPMGWDSFGLPAENAARENNLHPKDWTKKNIETMKKQLKLLGLSLDWDREISTCEPEYYKHQQEFFIELFKKKLVYKKDTYVNWDPAEQTVLANEQVIDGKGWRSGVAVERKKLSQWFFNIKKFSQNLLDELEKLKNWPDKVKLMQKNWIGKSFGCEINFQIDKKNNNENIKVFTTRPDTIFGASFIALSIDHPVAKNFENNKDFINL

SEQ ID NO: 189607 - protein, 294 aa, Unknown
  Bacterial polypetide isolated from the Sargasso Sea
MDLELYFGCPAHDQRDLDFAIKYNLPFKTVVKPKDETDKFKVKNEAYTGTGIIINSDFLNGLKVPEDSIIKTIEVLEEKKIGKRKINFRLKDWGVSRQRYWGCPIPIAYDVDGNVMTIPKDQLPVKLPSEIDLKSKGNPLDKKKEWKTVSINGKECIRETDTLDTFVDSSWYFLRFCSPKNDIYGFDLESIKYWMPVDQYIGGVEHAILHLLYSRFFMRAINYKNEKFPITEPFESLFTQGMVCHETYKDKNNNWLNPEEVETKDGKNFFIKDNPEKKVLVGPSESMSKSKKNT

SEQ ID NO: 189608 - protein, 295 aa, Unknown
  Bacterial polypetide isolated from the Sargasso Sea
MAYTEKEAVLKNSNSLNGLSYRKALEKITKHMVKKGLAKIQTNYKLRDAVFSRQRYWGEPFPIYYENNIPKVIEKQNVVLPKINKYLPTKEGNPPLARAKKEDWNVFKGERMEYNTMPGWAGSSWYFLRFMDPNNEKNFADKNKLNYWKQVDLYVGGAEHAVGHLLYARFWTKVLYDHGLVKIKEPFKRLVNQGMIGAPIHFLLLKKEKERGRTVFVSNNNIYNNQNFIKIACHIDLVSLPGTKEAHLNNEQLIRFIKWRPEFKKALFEIKEKKLSEKEIKKNKKAKFKIILEQG

SEQ ID NO: 189609 - protein, 303 aa, Unknown
  Bacterial polypetide isolated from the Sargasso Sea
YSLDSVIGGEPIPVIHKDDGTTLPLNTSDLPLTLPQVEKYEPAETGESPLANIKDWVETDEGRRETNTMPQWAGSCWYFLRFVDPINDKLPWSKEKESYWMPVDLYIGGVEHAVLHLLYSRFWHHVLYDFGLVSTKEPFKKLFNQGMIRGEDGQKMSKSRGNVINPDDVVKDYGADSLRLYEMFMGPLEKSKPWSTKGLQGCYRFLQKVWRIFNNEKIKIKEGCSTEETKKLLHQTIKKASDDLDGLRFNTVVSQLMIFANHLSTLDVLDKEVLHQFLILLNPFAPHLSEELNEIIGYPPITT

SEQ ID NO: 189610 - protein, 269 aa, Unknown
  Bacterial polypetide isolated from the Sargasso Sea
HMRSQKISEEAISKNEKEGVDTKLFIKHPFIKDKFLPVYIANFILMDYGSGAIYGCPAHDQRDFDFASKYNLEIIPVIKAFDNSEFEFEEAYEGNGLLINSQFLDGLEIEEAKNLVIKKLEKMKAGKKTINYRLRDWGVSRQRYWGCPIPIMYREDGEIIEVPESELPLELPEDVDLTIPGNPLDNHPTWKFTKCPLTGMSATRETDTLDTFVDSAWYFLRFCSPNSSEPFDKDEIDYWMPVDQYVGGVEHAILHLLYSRFFTKALKID

SEQ ID NO: 189611 - protein, 255 aa, Unknown
  Bacterial polypetide isolated from the Sargasso Sea
MPVDQYIGGVEHAILHLLYSRFFMQAISYKNSKFNILEPFEGLFTQGMVCHETYKDENNEWVSPDEIEIKNGKKVLKKNSMQQVNIGPSESMSKSKKNTIDPEKIIEMYGADSARLFILSDSPPEKDVQWSDEGITSSYKFIQKLWSLNQRILEEIQKNHSQDEGIEISKFTNKFLKKMTDNLDNFSYNILIANLHEMQNFFSKEINKKYKAKTLTENFGKILITMIPIVPHLANECLMKINYNVAKWPEYDPSL

SEQ ID NO: 189612 - protein, 199 aa, Unknown
  Bacterial polypetide isolated from the Sargasso Sea
LEPLGILRVLKDFPRFFKTVWTLCNLEGKNSSNVSNEIDEKLLKSLHQTIKKVTNELQNFRFNTAIASLMAFRNILKAEGEAAGIEVWNECLEGMLLMLAPIAPHITEELWQKMKPGNGSIHMQTWPAFDENLAAEKLIILVVQVNGKVRDRLEISAGTSKEETEKTALASPKVQSYLVGKKVRKVIVVPERLVNIVSD

SEQ ID NO: 189613 - protein, 295 aa, Unknown
  Bacterial polypetide isolated from the Sargasso Sea
CYYRDDVNLNVKGNPLEKHPTWKYFKLSSGKKVTRETDTLDTFVDSSWYFIRFCSPKNREYGYKFDEIKYWMPVDQYIGGVEHAILHLLYSRFFMRALAFKNKKFNYIEPFTSLFTQGMVCHETYKNEQNEWLYPDEIDKTSDGKFLTRKDRKKVLVGSSEAMSKSKKNIVDPEEMINTYGADSIRWFMLSDSPPERDVQWSVEGVSAAFKFIQKLWKLHSDILQKTNSTLETEDLTLQKAVNKTVYNVTKNLDNFQYNVVIANIHEIYNLLYEHVLNNKTSSKTLKNEWEKITM

SEQ ID NO: 189614 - protein, 289 aa, Unknown
  Bacterial polypetide isolated from the Sargasso Sea
MNDSYVPVEVEQEAQQRWEQEQSFVAVDDQKRERFFCLSMFPYPSGQLHMGHIRNYTLGDVISRYQRMKGYNVLHPMGWDAFGLPAENAAIKNDIPPSDWTRANIENMKAQMKQLGFGIDWSREFATCDPEYYRWEQWLFVRLFKKGLVYRKNSIVNWDPVDQTVLANEQVIDGRGWRSGEFVERKEMAQWFLKITEYADELLEEIELLEGWPESVKTMQRNWIGRSEGVEIDFPVVGRESEVLRVFTTRPDTLMGATYLALAPEHPLAVEAAENDPDIMAAIAGMKKI

SEQ ID NO: 189615 - protein, 306 aa, Unknown
  Bacterial polypetide isolated from the Sargasso Sea
KYDLEIKTVVRPMDKDENFKVLNEAYPGPGVLINSEFLNGLKAPENSILETIKILEKKKLGKKQINFRLKDWGVSRQRYWGCPIPIAYDENGIAYPIPKSMLPVELPENINLNVKGNPLDNQNDWRKVIIDGKQLIRETDTLDTFVCSSWYYLRFCSPKEAEYGFKKEDIDYWMPVDQYIGGVEHAILHLLYSRFFMRALSEKNSNFNISEPFSGLFTQGMVCHETYKDPDNNWISPEEIENIDGKKYLKQDRSKLISIGPSESMSKSKKNTIDPENIIANYGADSARLFILSDSPPEKDVQWSEE

SEQ ID NO: 189616 - protein, 300 aa, Unknown
  Bacterial polypetide isolated from the Sargasso Sea
LKTCDPDYIKWSKEIFSLLHKQGLVYRKKSLVNWDPVDETVLANEQVIDGKGWRSGATVELKEIDQWFLKITDYADELLTSIENLDWPENVKSMQKNWIGKSFGSEISFPLANGEELTAFTTRIDTIYGVTYLAISPNHPISQNLANQDTQIDDFIKKCNETKMAEADMAKADKLGLKTNLKVKHPFTGIDLDVWIANYVLMDYGTGVVMGVPAHDERDHEFALKYNIDIKQVIKADEVPSSEKGELINSEKFNGLTSENAIQDINNFLEKEKIGKGIENFRLRDWGVSRQRFWGCPIPV

SEQ ID NO: 189617 - protein, 297 aa, Unknown
  Bacterial polypetide isolated from the Sargasso Sea
SYVGGVEHAILHLLYARFFTKALRDNQLFEIDEPFKKLLTQGMVQAAAYKNNKTGKYVSPSDITDLSNPTDPIDNSKLEVLFEKMSKSKYNGIDPESVIKKYGADTARMFILFKAPPEKDLEWGDTDVEGQFRFLSRIWKLYINCAKDVNSKSKSYPDKEKTLIKSMNMAIKEISNDILNNQYNTAISELMKFYNSLSNSINEVNNNLKKDALKTFCILLAPFAPHIAEEIWHLIGFKNSVHLEHWPSCNAEALKEESYELVIQVNGKVRDKININNEIKEDQIKKLTLYRPNILKW

SEQ ID NO: 189618 - protein, 285 aa, Unknown
  Bacterial polypetide isolated from the Sargasso Sea
WLSSHDQRDFDFAKKYKLDIIPVVKPKSEDEQELKNAYTGDGKIINSEFLNNLNIDEAKQKILIEIEGKKIGKKRITFRLKDWGVSRQRYWGCPIPMIYLKNGNVVPVDKSELPVRLPNDININQKGNPLDSHPTWKKTKYKKTGEEATRETDTLDTFVDSSWYFIRFCSPKLKDKPFDEKSFSYWMPVDQYIGGVEHAILHLLYSRFFMRAIALCNNKIKLKEPFKGLFTQGMVCHETYKDKNEKWLSPDQINKTKEGLISKIDGSKVKVGPSEAMSKSKKNIV

SEQ ID NO: 189619 - protein, 177 aa, Unknown
  Bacterial polypetide isolated from the Sargasso Sea
CLEMFPYPSGKIHMGHVRNYTIGDVLARYKKLRGFNVLHPMGWDSFGLPAENAARENNLHPKDWTKKNIKTMKKQLKLLGLSLDWDREISTCDPEYYRHQQEFFLELFEKDLVYKKDTYVNWDPVEQSVLANEQVINGKGWRSGAVVERKKLSQWFFDIKKFSRKFVGRTSKSEKLA

SEQ ID NO: 189620 - protein, 267 aa, Unknown
  Bacterial polypetide isolated from the Sargasso Sea
FDTFFESSWYYLRYCNPRLDNKPFLKEDVNYWLPVDQYIGGIEHAILHLLYSRFFTKALRDLKFINISEPFTGLFTQGMVTHKTFKDNGGNWVEPNKIVERKGNYFDINNEKVVVGKIEKMSKSKKNVVNPSSIIDNYGADTARWFMLSDSPPERDLEWTDVGVASSHKFINKIWDTCIKAKNYNVAEGFLKANKFNLLINSVSENIEKFHFNKSVANIYEYVNEINKSIDKKAISADGLKSVVKNLCIIIQPFTPHLSEEIWELLG

SEQ ID NO: 189621 - protein, 216 aa, Unknown
  Bacterial polypetide isolated from the Sargasso Sea
YKLRDWGISRQRFWGCPIPIIYREDGKIVPVKEESLPIKLPEVSELNETSSTLKKFEDWVNTKCEETGLEAKRETDTFDTFFESSWYYFRYCNSRSTKVFEKKDINYWLPVDQYIGGIEHAILHLLYSRFFTKALRDLGYFDLDEPFKGLFTQGMVTHQTYKNSKNEWLEPKNIKNTNGNFVDLNNNKVTTGKIEKMSKSKKNVVDPNDIINLYGA

SEQ ID NO: 189622 - protein, 292 aa, Unknown
  Bacterial polypetide isolated from the Sargasso Sea
KGFVSRKENYVNWDPVEETVLANEQVINGKGWRSGALVERKKLSQWFFNITKFTEELLKGLKNLENWPEKVKLMQKNWMGKSTGCEIDFEIADNKTNIKVFTTRPDTIFGATFLALSPDHPVSKKFEKNKEFLKFKQDCLKVGTTEEAMANAEKKGFNTGFFAKHPFIKNKKIPIFFANFILMDYGTGAIFGCPAHDQRDFEFAKKYKIEIIKVVSDEKNSSQLKEAFIGDGKIINSDFLNGLDVESAKTKIISEVEKKKIGSKKISYRLKDWNISRQRYWGCPIPIIYWRT

SEQ ID NO: 189623 - protein, 282 aa, Unknown
  Bacterial polypetide isolated from the Sargasso Sea
ELEKLKNWPDKVKLMQKNWIGKSYGCEINFQIIGRKKSDKITVFTTRPDTIFGASFIALSVDHPISKNFEKNKDFLSFKSECSKMGTTEEALANAEKIGFKTNLFAQHPFNNKIKLPIYISNFVLMDYGTGAIFGCPAHDQRDLDFANKYKLKVLPVVKPKNINSEEFVIKNEAFTDDGILFNSEFLNNLTVNQAIEKIIQVITKKKLGKKKITFRLKDWGVSRQRYWGCPIPIVYDDKGKAIALNKKDLPVLLPENVDLNVAGNPLDKHPTWKHTKLSSGK

SEQ ID NO: 189624 - protein, 253 aa, Unknown
  Bacterial polypetide isolated from the Sargasso Sea
MASSESRYSPSDLEAKWQQRWQQLGLDQTPEPSSNRAENFYALSMFPYPSGNLHMGHVRNYVITDVIARLMRLKGKRVLHPMGWDSFGLPAENAAIERGVDPADWTDRNIAQMREQLQQLGLSIDWNREVATCHSDYYRWTQWLFLQFLKADLAYRKEATVNWDPIDQTVLANEQVDADGRSWRSGAMVEKRKLRQWFLKITAVADELLDDLDQLTGWPERVRTMQANWIGRSNGATLRFAMSDKGEDAIEVF

SEQ ID NO: 189625 - protein, 200 aa, Unknown
  Bacterial polypetide isolated from the Sargasso Sea
DFAEDLNEGLKDLKKWPKKVLSMQENWIGKSTGALINFNLVNSEEKIEVFTTRPDTIFGASFIGLSPDHPISLNMAKENSEIGDFIKSCKAAGSSVVDIEKAEKLGIDTGLRVKHPYSKLELPVYIANFILMDYGTGAIFGCPAHDQRDFEFAKKYHLTITQVVGKYPDLDEELKEAYTGVGVMINSDFLNGCTIQEAQT

SEQ ID NO: 189626 - protein, 320 aa, Unknown
  Bacterial polypetide isolated from the Sargasso Sea
KEERFIAKIDDREKFYCLSMFPYPSGKLHMGHVRNYTIGDVISRYKRMNDFNVFQPMGWDAFGLPAENAAIENKVSPKDWTNANIDNMKKQLKSLGLSYDWSKELRTCDPKYYKWEQLIFKKFYDAGLVYRKKSIVNWDPVDETVLANEQVIDGKGWRSGAQIEIKEIDQWFIKITEYAEELLDSLDGLDWPENVKLMQKNWIGKSNGAEIKYKIDESDEYLTTFSTRPDTIFGVSFLAISPNHQLAIDLSKKDKNILKFLERCKDIKAAEADIAKAEKLGIDTNIKVIHPLTGEKLPLWIGNFVLLDYGNRCGHGCSWA

SEQ ID NO: 189627 - protein, 136 aa, Unknown
  Bacterial polypetide isolated from the Sargasso Sea
PKTGMKAFRETDTFDTFFESSWYFFRYCNARLEKPFDKKDIKYWLPVDQYIGGIEHAILHLLYSRFFTKVLRDLGYFNLDEPFKGLFTQGMVTHLTFKNEIGEWVEPKDVKQDGKILKDQNNLIVETGKIEKMSKS

SEQ ID NO: 189628 - protein, 273 aa, Unknown
  Bacterial polypetide isolated from the Sargasso Sea
FLKMFEKGIAYRKNGAVWWDPIDQTTLANEQVVDGKSERSGAEVIRKMMPQWYFKITDYAEELLDMEDLGWPEKIKQMQRNWIGKSLGTTVKFSLNSSKNNISTFTTRVDTIYGVTFIVLAPEHPLVDEVTENSYKKNVESYISTSSKSSEIERTSTDREKTGEFTGGYAINPINGDKVPIFVGDYVLGTYGTGAVMGVPAHDQRDFEFAKKYNLPVKVVITKDGIDEFEINQADESKGILVNSDQFNGINSEEALKNITKFMEDKNIGNGTV

SEQ ID NO: 189629 - protein, 262 aa, Unknown
  Bacterial polypetide isolated from the Sargasso Sea
MERINFQAIEKKWQKKFSKKKLYNSGKKKFYCLEMFPYPSGKIHMGHVRNYTIGDVIARYKFLNGFDVLHPMGWDAFGLPAENASKSNNLHPKIWTHQNIETMKRQLKLLGLSIDWDLEISTCDKEYYKHQQELFIDFYNNGLVSRKETYVNWDPVENTVLANEQVINGKGWRSNAVVERKKLSQWFFNITKFSNDLLNDLQDLDGWPEKVKLMQQNWIGKSFGCEINFSVSDKKKNIKVFTTRPDTIFGASFLALSADHEL

SEQ ID NO: 189630 - protein, 299 aa, Unknown
  Bacterial polypetide isolated from the Sargasso Sea
LDRWPEKVKSMQSNWIGKSLGCQIQFEVFDDKKNSTNEKLEIFTTRQDTIFGATFCAISPNHPFAETLSQHNEAIKNFIKECQKKGFSEETLAKEEKEGVFTNHFVKHPFKKDTFLPIYLANFILMDYGTGAIYGCPAHDQRDLDFANKYKLDVIPVICPNDADLKTFKIDNEAYTENGTLINSEFLNGKNIEEAKQEVNQKLEKLGIGESTINYRLRDWGISRQRYWGCPIPVIYREDGEIILVPEKDLPVKLPEEVNFEEKGNPLDSHSTWKHTTCPETGMKAIRETDTLDTFVDSS

SEQ ID NO: 189631 - protein, 294 aa, Unknown
  Bacterial polypetide isolated from the Sargasso Sea
LKQKLYNKKGSKFYCLEMFPYPSGKIHMGHVRNYTIGDVIARYKFLNGFNVLHPMGWDAFGLPAENASKQNNLHPKIWTKKNIKTMKKQLQMLGLSIDWDYEISTCDKDYYKHQQELFIDFYNNGLVTRKETYVNWDPIEKTVLANEQVINGRGWRSNATVERKKLSQWFFNITKFSNQLLEDLDKLDGWPEKVKLMQSNWIGKSYGCELKFNLVDSDESIDIFTTRPDTVFGASFLALSVDHKFNKKFINSDQFQRFLKECNKTGTTEEALANADKLGFNTGFFVKHPFINNK

SEQ ID NO: 189632 - protein, 286 aa, Unknown
  Bacterial polypetide isolated from the Sargasso Sea
GKSVFEPMGFDAFGIHSENFALKVGTHPMDLIPSNVKNFTRQLRRIGGMFDWEHSIDTTDPAYYKWTQWIFLQFFKAGLAERKEAPVNWCPSCMTVLANEQVVGGECERCATPVEQRRIAQWFFRITDYAQRLLDNLDHIDWSETTLKAQRNWIGRSTGAQLRFPVVDEAGDETGTHIEVYTTRPDTVFGATYVVLSPEHPLVQSVTEEGMIGHVSDYVEAAAQRDLVARQKTDKTKTGVPTGGFCRNPATGEMIPIWIADYVLMEYGTGAIMAVPGHDSRDFEFA

SEQ ID NO: 189633 - protein, 241 aa, Unknown
  Bacterial polypetide isolated from the Sargasso Sea
KSKGNTVDPQGFIKKYGADTVRLFVLFAAPPEQSLEWSDQGVQGAHRFINRIWKLVNKHIDASLPEDIDVNHSIKDLKLMRSKIHKTLAKVKDDYLRRHSFNTAIAAVMELSNEIPQEWFDSSASPEMRKVANEAIESILLMLNPITPHLCQHLWWQLYPQESIIDKSWPKIEESLLIDDKLKIAVQVNGKLRSEIEIDKETEDDSVKSIALSDEKIIKHLKGSEVKKIIYVPGKILNIVI

SEQ ID NO: 189634 - protein, 231 aa, Unknown
  Bacterial polypetide isolated from the Sargasso Sea
MVSFSPSVLEAKWQAIWDEEQCFKTNIDVCREKYYVLEMFPYPSGRIHMGHVRNYALGDVIARFKRAKGFNVLHPMGWDAFGLPAENAAIERGIHPGKWTIENISAMRAQLKTMGLSYDWDREVTTCSPNYYKHEQKMFLDFLKAGLAYRKESWVNWDPVEHTVLANEQVVDGKGWRSGAPVERRQLSQWFLSISDYAEDMLAAIEKLDKWPDRVRLMQHNWIGRSEGATV

SEQ ID NO: 189635 - protein, 262 aa, Unknown
  Bacterial polypetide isolated from the Sargasso Sea
GSGAIFGCPAHDQRDLDFANKYNLDIIPVVLPNDKKEGDFKITNEAFVGEGKLINSSFLNGLEIEDAKKAVIKNLKKINCGKDKITYRLRDWGLSRQRYWGCPIPMMYREDGKIIPVSKKDLPITLPPIKGLGEKNNDIGIIDSWKKTACPETGMKATRETDTFDTFFESSWYYLRYCNPRSSEPFLKEDINYWLPVDQYIGGIEHAILHLLYSRFFVKALRDLGYVNINEPFQGLFTQGMVTHQTYKNSSDNWLAPDEVIK

SEQ ID NO: 189636 - protein, 324 aa, Unknown
  Bacterial polypetide isolated from the Sargasso Sea
REKIEIWIADYVLISYGTGAIMAVPGHDERDWDFASKYNLPIVEVVEGGDVSKAAFTAKGNAKIINSSNDKTLSLDGLNVDQAIKEAILYIEKNSIGKATVNYKLRDWLFSRQRYWGEPFPLIHKDDKVELISEKDLPVMLPEVENYKPSDDGKSPLSLINNWVEVKDEDSNIVGLRETNTMPQWAGSCWYFLRFTDPNNTNEAWSKENENYWMPVDLYIGGQEHAVLHLLYSRFWHHVLYDLGLVSTKEPFKKLYNQGMILGDDGTKMSKSRGNVINPEEIMDEYGSDSMRLYEMFMGPLNKSKPWSTKGLQGCYRFLNKLWS

SEQ ID NO: 189637 - protein, 265 aa, Unknown
  Bacterial polypetide isolated from the Sargasso Sea
NGQKFYCLEMFPYPSGKIHMGHVRNYTIGDVIARYKYMNGFDVLHPMGWDAFGLPAENASKANNLHPMEWTNENIKTMKAQLKMLGLSIDWDREISTCDKDYYKHQQEIFIDFYNKGLVSRKETYVNWDPAEKTVLANEQVIDGKGWRSNVTVERKKLSQWFFNITKFSNELLSDLDSLVGWPEKVKLMQKNWIGKSFGCEINFEIENSDEKINIFTTRPDTIFGASFIALSIDHPLNKNFKDTPEFEKFRESCNKTGTTEEALA

SEQ ID NO: 189638 - protein, 282 aa, Unknown
  Bacterial polypetide isolated from the Sargasso Sea
KITFRLKDWGVSRQRYWGCPIPITYNQKGEATPVNKKDLPILLPEDVDLNVKGNPLEKHPTWKFTTLASGEKAIRETDTLDTFVDSSWYFLRFCSPKYKKYGYQIEDINYWMPVDQYIGGVEHAILHLLYSRFFMRALAFENKNFNYIEPFESLFTQGMVCHETYKNQKNQWLYPDQIEKNSEGHFVTKNDRKKVIVGPSESMSKSKKNTVDPEEMISMYGADSIRWFMLSDSPPERDVQWSQEGVSAAFKFIQKLWKLNNEIIIKNSKSSNLGDTVLKKAG

SEQ ID NO: 189639 - protein, 291 aa, Unknown
  Bacterial polypetide isolated from the Sargasso Sea
VGYRIRDWLISRQRYWGTPIPIIYCDNCGVQPVPFNELPVLLPENAEFKPTGESPLKYSSEFLNVPCPSCRLPARRETDTMDTFVDSSWYFLRYVSPESLDAPFDSNKIGLWNPVDQYTGGAEHAVMHLLYARFFTKVIRDLGLIEFGEPFLRLFNQGTVLSNHTKMSKSRGNVIAPDMYTQELGADVVRLYLMFMGPWEGGGDWSDSGINGVARWVNRLWDLCTKTSEALPEEEQELDRELLRKMHQTIKNVITDYDRFKYNTAIAAMMELTNAASPAYEKKLVSQKVWI

SEQ ID NO: 189640 - protein, 123 aa, Unknown
  Bacterial polypetide isolated from the Sargasso Sea
MERYNFKKIEKKWQDFWIKNKTFKSQIDSNLKKFYCLEMFPYPSGKIHMGHVRNYTIGDVLSRYKSMNGFNVLHPMGWDSFGMPAENAARENDLHPKEWTKKNISVMKTQLKSLGLSIDGIEK

SEQ ID NO: 189641 - protein, 216 aa, Unknown
  Bacterial polypetide isolated from the Sargasso Sea
MAEAELATMEKKGCATGIYAVHPLTGEQVPVWVANFVLMDYGSGAVMAVPGHDQRDYEFASKYQLAIKQVVRPAEGSAQECDLTKAAFTEKGVLINSGEFDGADFETAFNAIAAKLAAMGRGEVKVNYRLRDWGVSRQRYWGAPIPMLNLADGSQVPVPEDQLPVRLPEDVVMDGVTSPIKADPEWAKTTYNGSEAFHETDTFDTFMESSWYYARY

SEQ ID NO: 189642 - protein, 306 aa, Unknown
  Bacterial polypetide isolated from the Sargasso Sea
MDSQKKAYTGDGSIINSEFLNDLSIPEAKKKIIEKIEKMKIGSKKVSFRLKDWGISRQRYWGCPIPMIYLNDGTVVPVDKKELPVKLPNNIDLKSKGNPLENHPNWKKTIYKKTGEQATRETDTLDTFVDSSWYFVRFCSPKLKGKPFDEDAFSYWMPVDQYIGGVEHAILHLLYSRFFMRAIKLNNNKIKIKEPFKGLFTQGMVCHETYKNKNGNWMSPEDIKKMNKSEIIVGPPEAMSKSKKNVIDPESMINIYGADAIRWFMLSDSPPDRDIQWSNEGVSSAHKFVQKLWLTKQKILERKDVG

SEQ ID NO: 189643 - protein, 244 aa, Unknown
  Bacterial polypetide isolated from the Sargasso Sea
IDETIKILENKNLGKRKTNFRLKDWGISRQRYWGCPIPIAYDENNNVIKIPEKDLPVELPSKVDLNTNGNPLNAQQEWKQITINGKKCVRETDTLDTFVDSSWYFLRFCSAKVNNEPFDDDDIDYWMPVDQYIGGVEHAILHLLYSRFFMKAISLNNKKTRLQEPFKGLFTQGMVCHETYKDENNNWLFPEDVSTKDGKNFYLNNNPSKKVIVGPSESMSKSKKNTIDPEKIIKMYGADAVRLF

SEQ ID NO: 189644 - protein, 163 aa, Unknown
  Bacterial polypetide isolated from the Sargasso Sea
MNKLDVIEIDKKWQNFWLDKKAIFKNTDKKKKFYCLEMFPYPSGKIHMGHVRNYTIGDVLARYKSMCGFNVLHPMGWDSFGMPAENAARENKLDPKDWTKKNIATMKRQLQSLGLSIDWDLEISTCDEEYYKHQQSLFIDMYNKGLVIRKETYVNWDPVDKTV

SEQ ID NO: 189645 - protein, 152 aa, Unknown
  Bacterial polypetide isolated from the Sargasso Sea
GLKCPEDSIPKTIEYLEKNKLGKKKVNFRLKDWGVSRQRYWGCPIPIMYDENNNPKKIPLELLPVELPKIDKFETSGNPLNENKDWKNIIINGKKYTRETDTLDTFVDSSWYFLRFCSPNKNDGGFDIDEVKYWMPVDQYIGGVEHAILHLL

SEQ ID NO: 189646 - protein, 256 aa, Unknown
  Bacterial polypetide isolated from the Sargasso Sea
YVLEMFPYPSGKIHMGHVRNYTLGDVVARYKKMRGFNVLHPMGWDAFGLPAENAAMTEKKHPEEWTYKNIKTMKDQLLQMGLSLDWSREVATCHPEYYRHEQKFFIDMFKAGLAYKKEAEVNWDPVDKTVLANEQVIDGRGWRSGAVVEKKKLSQWFLKISKYSEELLQDLNTLDNWPNKVKIMQSNWIGKSIGAEINFDLSDSDKKIKVFTTRPDTLFGATFVALSTEHSFVESLSKKNDKLKNFIEECKNTNPD

SEQ ID NO: 189647 - protein, 306 aa, Unknown
  Bacterial polypetide isolated from the Sargasso Sea
MFPYPSGKIHMGHVRNYTIGDVIARYKFLNGFNVLHPMGWDAFGLPAENASKQNDLHPKEWTYKNIETMKSQLKLLGLSIDWDLEIATCDKEYYKHQQEIFIDFYKQGLVSRKETYVNWDPVENTVLANEQVINGRGWRSNAIVERKKLSQWFFNITKFSNELLDDLDKLEGWPNKVKLMQKNWIGKSYGCEINFNLTNSKDKIKVFTTRPDTIFGASFLALSVDHDLNKNFLKKASFEKFKDECNKTGTTEEALANAEKIGFDTGLFVDHPFIDNKKIPVYFANFVLMDYGTGAIFGCPAHDQRD

SEQ ID NO: 189648 - protein, 251 aa, Unknown
  Bacterial polypetide isolated from the Sargasso Sea
LTEWPDKVKLMQKNWIGKSTGCEIDFVVNSKDKKIKVFTTRPDTIFGATFLAISVDHPLCKDFEQLEDFQKFKKKASQVGTTEEAIANADKIGFDTKFRAKHPFIKNKTLPIFVANFILMDYGTGAIFGCPAHDQRDFDFARKYALEIISVVKPIENVESHKLKNPYTGDGKIINSEFLNDLSVEKAKEKIIKEIERKKIGKKKITFRLKDWGISRQRYWGCPIPMIYLKSGKVVPVDKSELPVRLPDDVI

SEQ ID NO: 189649 - protein, 271 aa, Unknown
  Bacterial polypetide isolated from the Sargasso Sea
KVSLVRYNHKKTEPYWQAVWLKENSEDTDQKSIKKKYYVLEMFPYPSGKIHMGHVRNYTLGDVLARYKKMQGFNVMHPMGWDAFGLPAENAAITEKKNPADWTYKNIKVMKEQLQQMGFLLDWSREIATCHPEYYKHEQAFFIDLLKNKLAYKKESEVNWDPVDKTVLANEQVIDGRGWRSGAIVEKKKLSQWFLKISKYSEELLKDLSDLDEWPEKVKLMQSNWIGKSEGVKITFKITPLVQEIDEIEVFTTRHDTLFGASFCAISIDHP

SEQ ID NO: 189650 - protein, 307 aa, Unknown
  Bacterial polypetide isolated from the Sargasso Sea
MAKTWKESGIYNVSIDSSKKKFYVLDMFPYPSGAGLHVGHPLGYIASDIYSRYKRHKGFNVLHPQGYDSFGLPAEQYAIQTGQHPQKTTEENINRYREQLDRMGFSFDWSRELRTSEKNYYKWTQWMFTLLFDSWYDKKLNKARSIQDLKEGFLENGSDYVIGYDREFNNNEWVDFNDHEKEDILQEFRIAYISETDVNWCPKLGTVLANDEVIDGLSQRGGYEVVRKKMRQWSIRISEYSERLLSGLEIIDWPDPLKEMQRNWIGKSKGAMIKFSVENSEYSIEVFSTRPDTIFGATFITLAPEHD

SEQ ID NO: 189651 - protein, 278 aa, Unknown
  Bacterial polypetide isolated from the Sargasso Sea
GAVFGCPAHDQRDFDFAKKYNLNITTVVKPNDKDDNFKVSTEAYPGSGILINSDFLNGLEAPNDSIIETIKILEKKKLGKKKINFRLKDWGVSRQRYWGCPIPIAYDENNEAHEIPNSMLPVKLPKNINLNVKGNPLDSQKDWKEIEIDGKKLIRETDTLDTFVCSSWYYLRFCSPKENEYGFNMDDIDYWMPVDQYIGGVEHAILHLLYSRFFMQAISFENKNFNLTEPFDGLFTQGMVCHETYKDSNNNWVSPDEIENINGKKYLKSDNSQEITIG

SEQ ID NO: 189652 - protein, 258 aa, Unknown
  Bacterial polypetide isolated from the Sargasso Sea
NPTSKEDVSYWMNVDQYIGGVEHAILHLLYSRFFARAMQITGHLPKTAKEPFDALFTQGMVTHAIYKSTGADGRDLFHYPEEVEVREGKAFLIKDNKEVTIIPSAKMSKSKNNVVDPVNIVDAFGADTARWFVLSDSPPERDVEWTASGAEAANKHLSRVYRIIDEIVSNNIPSNDNDERLLKEMHKTIHDVTQAIESFGFNAAIARLYSFTNSLAKSKAGTKTKLSAAKILAKLMSPMTPHLSEEIWEKLGEKNLVA

SEQ ID NO: 189653 - protein, 139 aa, Unknown
  Bacterial polypetide isolated from the Sargasso Sea
HLLYSRFYQKFLFDLGIFNRDEYAKKLINQGMILGNSAFIYRKKGTSEYLSKNLIDKVKVEKIRIDIKYLIGENEVDIDLLKYDDKDFNKSVFHFDNGKFQCIRELEKMSKSKFNVVNPDEICDYYGADTLRMYEMFLG

SEQ ID NO: 189654 - protein, 300 aa, Unknown
  Bacterial polypetide isolated from the Sargasso Sea
DLDFANKYDLEVIQVINPSDNSEFDSKNAFTGNGKLMNSQFLNELSIEDAKNEIIKRIEKLNLGKKTTNYRLRDWGVSRQRYWGCPIPIMYREDGKVIEVPEKDLPLKLPDDIDLSIPGNPLDHHPTWKYTRCPETGMKAIRETDTLDTFVDSAWYFLRFCSPLETNEPYNLEEVNYWMPVDQYVGGVEHAILHLLYSRFFTKALNIKGIEEPFDSLFTQGMVCHNTFQNESKAWVYPNDVERKNSNYFQISTGEQVTMGEIESMSKSKKNVIDPESIIDAYGADSARWFMLSDSPPEKD

SEQ ID NO: 189655 - protein, 276 aa, Unknown
  Bacterial polypetide isolated from the Sargasso Sea
LMHYGSGAVMAVPGHDQRDYEFATKYGLAIKQVVQPEAGSTAVCDLTTAAFTEKGVLVNSAEFNGLDFTAAFKAIADKLTAMGVGQVKVNYRLRDWGVSRQRYWGSPIPMLTLEDGTQVPVPEDMLPVRLPEDVVMNGVTSPIKADPEWAKTTYQGQAALHETDTFDTFMESSWYYARYCSPDHDKAMLDPAKANYWLPVDQYIGGIEHAILHLLYSRFFHKLLRDVGLVQCDEPFKRLLCQGMVLAETFYRETENGGKEWFSPADVATERDEKGR

SEQ ID NO: 189656 - protein, 259 aa, Unknown
  Bacterial polypetide isolated from the Sargasso Sea
FSEDYLSGLDKLETWPNKVKIMQKNWIGKSFGCEIDFKIEGKLPINSIKCFTTRPDTLFGFSFLAVSVDHPLSEFFKDNIEFTNFKKECSKTGTTEESIAQGEKIGFKTNLMAINPLNPDHKVPVYFANFVLMDYGFGAVFGCPAHDQRDLDFANKYNLTVKTVVKPTNEKDTFKVKNEAYTGPGKIINSDFLNGLEVPDESILKTIEIIEQKKIGNKKINYRLKDWGVSRQRYWGCPIPIAYDKDGNVIKIPKNQLPI

SEQ ID NO: 189657 - protein, 269 aa, Unknown
  Bacterial polypetide isolated from the Sargasso Sea
RYWGCPIPMLYREDGKIVPVAKKDLPVLLPPTKGFTGISNALNNIDSWKNTVCPETGLKAVRETDTFDTFFESSWYFLRYCNPRSNEPFLKEDINYWLPVDQYIGGIEHAILHLLYSRFFVKALRDLGYVNINEPFQGLFTQGMVTHQTYKNSGGAWLAPDEIIKKNDKFLDLQNQSVKVGKIEKMSKSKKNVIDPGKTIDMYGADTARWFMLSDSPPERDLEWTEFGISSSYKFINKIWDLSSQLFLNNYSEKNNENDNDIKININKT

SEQ ID NO: 189658 - protein, 302 aa, Unknown
  Bacterial polypetide isolated from the Sargasso Sea
QLGLSIDWDREISTCSPEYYKHQQKLFLDLYDKGLVYRKESYVNWDPVDKTVLANEQVVDGKGWRSGAFVERKKLNQWFFKISHFSEELLKDLGQLNNWPDKVKTMQKNWIGKSFGCEIDFPIEGSDKVNSIKCYTTRPDTLFGFSFLALSVDHPLSKFYENDPKFTKFKETCSKTGTTEESIAQAEKIGFKTNLLAINPLDKNNKVPVFFANFVLMDYGFGAVFGCPGHDQRDFDFAKKYELKITTVVKPLNEDDNFVVESGPHTGSGIMINSKFLNGLTVPEESVSKTIKYLEEKKLEKK

SEQ ID NO: 189659 - protein, 273 aa, Unknown
  Bacterial polypetide isolated from the Sargasso Sea
MNKINVKEIDKKWQDFWLKKKTNFENTKESKKFYCLEMFPYPSGKIHMGHVRNYAIGDVLARYKTMNGFNVLHPMGWDSFGMPAENAARENKLNPKDWTKKNIATMKRQLQSLGLSIDWGLEISTCDEEYYKHQQELFIDFFNKGLVIRKETYVNWDPVDETVLANEQVINGKGWRSNAVVERKKLSQWFFNISKFSNELLEDLDMLTEWPEKVKLMQKNWIGKSVGCEIDFKIDGEEKKVKVFTTRPDTIFGATFLAVSVDHPLCKNLEKQK

SEQ ID NO: 189660 - protein, 247 aa, Unknown
  Bacterial polypetide isolated from the Sargasso Sea
KTGVFTGAYAFYPMSKKKMPIWISDYVLYSYGTGAIMAVPAHDERDYEFAKKFNLEITRVIEGGEDVDCYTGDGKIINSENYNGLDNQEFKIIVVDFLEKQKKGEKKVNYKLRDWIFTRQRYWGEPIPILYDGEKKKDLEYEDLPLKLPEVESYLPTKDGSSPLARNKNWVSVQKDGKEYLRETNTMPQWAGSCWYFLRFLDPLNDNEFANKDIIKYWMPVDLYIGGAEHAVLHLLYARFWHKVLFD

SEQ ID NO: 189661 - protein, 270 aa, Unknown
  Bacterial polypetide isolated from the Sargasso Sea
RRPMKQWMLRITDYAERLLDDLDGLDWPESIKEMQRNWIGRSEGVRLSFRLPGAEEKVEVFTTRPDTLFGVTYLVLAPEHPLIHTLTSKEQAAAVREYVETSSRKSDLERTDLAKEKTGIFTGAYATHPLTEEEIPIWVADYVLGSYGTGAIMAVPAHDERDNEFAAAFELPVIQVVTPPDGDCTCYAGDGFMQNSASEAIDVNGLTNSDAGQRILEWLEENSIGTKTINYKLRDWLFARQRYWGEPFPVVYADNDRDKPVPIPYSDLPL

SEQ ID NO: 189662 - protein, 277 aa, Unknown
  Bacterial polypetide isolated from the Sargasso Sea
KRKVKHWCLRISKYSERLLNDLDKIDWPDPLKEMQRNWIGKSKGVSLIFNVENSNEKIEVFTTRPDTIFGVSFLTIAPEYKDISEFISSNHKSEIDSYIDEVLKKSERERLSDVKTVSGVFTGSYAIHPFTGKKIPIWISDYVIASYGTGAVMGVPAGDQRDFDFAKKFMIDIPNIFENIDVSQHAFSDKSGFRLINSEFLNGLDYEKSLELIIQEIENNGIGKSKIQFKLRDATFSRQRYWGEPIPIYYKNGIPINIEKDYKPLELPDVDNFLPTK

SEQ ID NO: 189663 - protein, 100 aa, Unknown
  Bacterial polypetide isolated from the Sargasso Sea
MTKNAKNDSNFTPYNPAEIEPKWQKIWEENELYKTPDTINGKNNYFALTMFPYPSGDLHIGHWYAFTPADAHARYMRMNGYNVMHPQGFDAFGLPAENAA

SEQ ID NO: 189664 - protein, 256 aa, Unknown
  Bacterial polypetide isolated from the Sargasso Sea
YCDATNTNIPFDKQTCDYWMNVDQYIGGIEHAILHLLYARFFTKACRDCGLTTHNEPFKRLLCQGMVLKDGSKMSKSVGNTVDPNAIIEKYGADTVRIFILFGAPVERDLDYAETGIDGAYRFLKRIHNLITNPDKYPLSNEAKLTQHYHKTVAAITQDIERFSFNTAISRLMEWINTQYADGTTIEYLKNTLKLLAPFAPFLADHLWQHLNEKNSIHQEEWPSFDEEKLKNETITMVCQINGKVRDKLNCPADAT

SEQ ID NO: 189665 - protein, 262 aa, Unknown
  Bacterial polypetide isolated from the Sargasso Sea
YYKHQQELFIDFFNKGLVIRKETYVNWDPVEKTVLANEQVIDGRGWRSNALVERKKLYQWFFNISKFSDELLEDLEILKEWPEKVKLMQKNWIGKSLGCEINFEVSNENKFVKIFTTRPDTIFGATFLAISVDHPMCESFKNQKDFIEFKKNCSQVGTTEEAIANAEKIGFKTNKTANHPFIKGKKIPIYVANFVLMDYGTGAIFGCPAHDQRDFDFAKKYKLEIIPVVKPENIDNTSMDSAYIGDGKIINSDFLNNLDISK

SEQ ID NO: 189666 - protein, 221 aa, Unknown
  Bacterial polypetide isolated from the Sargasso Sea
KHQQIFFLELLEKGLVYRKENYVNWDPVDETVLANEQVIDGKGWRSGAIVERKKLSQWFFNISKFSEELLEGLSNLDNWPNKVKTMQKNWIGKSFGCEIDFEIEGDIPLKTVKCFTTRPDTLFGFSFLALSIDHEISKFYEKDKNFIKFKEECSKTGTTEEAIAIGEKIGFKTNLSAVNPFDKNQKVPIYFANFVLMDYGFGAVFGCPGHDQRDYDFANEI

SEQ ID NO: 189667 - protein, 283 aa, Unknown
  Bacterial polypetide isolated from the Sargasso Sea
RFFLELLEKKLVYRKENYVNWDPVDETVLANEQVIDGKGWRSGATVQRKKLNQWFFNISKFSQNLLDGLNDLNSWPNKVKIMQKNWIGKSFGCEIDFKVEGELPINNIKCFTTRPDTLFGFSFLALSVDHEVSKFYKNDPNFIKFKEECSKTGTTEEAIAVGEKIGFKTSLMATNPLNPKSKVPVFFANFVLMDYGFGAVFGCPAHDQRDFDFAKKYNLDIKTVVKPNDEKDDFQVINKAYPDPGIIINSNFLNGLIAPKDSVIETIKILEERKLGKKKINFR

SEQ ID NO: 189668 - protein, 245 aa, Unknown
  Bacterial polypetide isolated from the Sargasso Sea
KKWEKNKEFKSQVNKKKKKFYCLEMFPYPSGKIHMGHVRNYTIGDVLARYKKLQGYNILHPMGWDSFGLPAENAAKQNKLDPKTWTEKNISVMKNQLKKLGLSIDWEREISTCSSDYYKHQQLFFLELYKKGLVYRKENYVNWDPVDETVLANEQVIDGKGWRSGATVERKKLNQWFFNISKFSNELLSGLNKLPNWPNKVKTMQRNWIGKSYGCEIDFKIIGNSSIKKIKCFTTRPDTLFGFSF

SEQ ID NO: 189669 - protein, 288 aa, Unknown
  Bacterial polypetide isolated from the Sargasso Sea
WDPVDQTVLANEQVIDGKGWRSGVPVERKKLNQWFFNITKFSKELLESLNNLSEWPNKVKIMQQNWIGKSFGCEIGFKIESQKNIDEIKCYTTRPDTLFGMSFLALSIDHPIAQFYENDPKFRDFKNECSRTGTTEESIAVAEKLGFKTDLLAINPLDETKKVPVYFANFVLMDYGLGAVFGCPAHDQRDLDFAIKYNLKVTPVVKPEGEQSCEIKEKAFTGVGELFNSDFLNGLKVPNESISKTIDHLEENKIGVRKTNYRLKDWGISRQRYWGCPIPIAYDENNEP

SEQ ID NO: 189670 - protein, 251 aa, Unknown
  Bacterial polypetide isolated from the Sargasso Sea
TKKNDAAVLDKKKKKFYCLEMFPYPSGKIHMGHVRNYTIGDVLARYKKLQGFNVLHPMGWDSFGLPAENAARENNLHPKEWTKKNIETMKKQLKLLGLSLDWDREISTCDPKYYKHQQEFFLELFEKNLIYKKDTYVNWDPAEQTVLANEQVIDGKGWRSNVAVERKKLSQWFFNIKKFSQNLLDELEKLKNWPDKVKLMQKNWIGKSFGCDINFQIDKKNSKEKIKVFTTRPDTIFGASFIALSIDHPNF

SEQ ID NO: 189671 - protein, 256 aa, Unknown
  Bacterial polypetide isolated from the Sargasso Sea
NIQVMKNQLKQMGLSYDWEREFATCSPDYYKFEQKMFLDFFKAGIAYKKETVVNWDPVEQTVLANEQVVDGRGWRSGVEVEKKKMKGWFLKISDFAEDLLNEIDNLKEWPDRVKIMQRNWIGKSIGATINFSINNSKDIIKIFTTRPDTIFGATFIAISPQHHLSKEIAKNDKKAKNFIKFCEKQSNREADIEKAEKFGYETDLTVSHPFKKEVNLKIFIANFVLMDYGTGAIFGCPAHDQRDYDFAQKILIRNYI

SEQ ID NO: 189672 - protein, 256 aa, Unknown
  Bacterial polypetide isolated from the Sargasso Sea
NGVPPAKWTYDNIDYMKGQMQSMGLAIDWSREIATCKPDYYKWNQWLFLKMLEKGIAYKKTGTVNWDPVDQTVLANEQVIDGRGWRSGALVEKREIPMYYLRITQYADELLNDLDGLGWPERVKIMQQNWIGKSFGVNFGFPYELDGEKKLLRVFTTRADTIMGVTFCAIAAEHPLATRLAQDKPELLAFIDECKRGGVAEADVATMEKKGVATGFSVTHPLTGEPVEVWIGNYVLMSYGEGAVMGVPGHDERDFA

SEQ ID NO: 189673 - protein, 306 aa, Unknown
  Bacterial polypetide isolated from the Sargasso Sea
DRISDVKSVTGVFTGSYAIHPLTLKKIPIWVSDYVIASYGTGAVMAVPSGDQRDYDFAKKFNLEIKNIFKGIDISKSAFEEKSNFTLENSDFLDNLSFSDAVDKIILEIEKKDIGKSKIQYKLRDAIFSRQRYWGEPIPIYYRNSEPVALSLSDLPLELPEVDNFLPTKNGDSPLGNSKKWAWDLKNKTVVENNLINDRDIFPLELNTMPGWAGSSWYFYRYMDSANKDFFASKEAIDYWKCVDIYLGGSEHATGHLLYSRFYQKFLFDLNILPINEYASKLINQGMILGNSSFIYRERGTNNFYS

SEQ ID NO: 189674 - protein, 85 aa, Unknown
  Bacterial polypetide isolated from the Sargasso Sea
MDYSPKKIEPYWQDLWSKEKSFASEKSDKNLPKKYILEMFPYPSGRIHMGHVRNYTIGDVITRYRITKGDNVLHPMGWDAFGMPA

SEQ ID NO: 189675 - protein, 112 aa, Unknown
  Bacterial polypetide isolated from the Sargasso Sea
MLEEQYNPEKIESSIQSEWEKINKYKATPDDREKYYCLSMFPYPSGKLHMGHVRNYTIGDVISRYKRMRGFNVFQPMGWDAFGLPAENAAIQNKVDPKSWTEQNIENMKLQL

SEQ ID NO: 189676 - protein, 261 aa, Unknown
  Bacterial polypetide isolated from the Sargasso Sea
DFANKYNLEIIPVINPSDNIEFDKKTAYTGSGKLINSQFLNDLSIEEAKKEIIERVEDLHIGKKTTNFRLRDWGVSRQRYWGCPIPIMYREDGKVIEVPEDQLPLELPDDIDLSIPGNPLDNHPEWKFTKCPETGMNAVRETDTLDTFVDSAWYFLRFCSPLETKEPFNLDEINYWMPVDQYVGGVEHAILHLLYSRFFTKALDIKGMDEPFDSLFTQGMVCHHTFQNESNAWVYPDDVEKKDSKYFQISTGEPVTMGEIE

SEQ ID NO: 189677 - protein, 268 aa, Unknown
  Bacterial polypetide isolated from the Sargasso Sea
EEDMPIELPELDKNSSPMPLSQNNEFINIEDGLIRESDTFDTFMDSSWYHARFTSANNDNEIFDENSKYWLPVDLYIGGIEHAILHLLYSRFFHKALRDIGLVEGDEPFKKLLTQGMVLKDGAKMSKSKGNTVDPQSYIEKYGADTIRLYMMFTSPPEQSLEWSESSVEGASRFLRKIWGLLDERKYNQFDKKPDFNKEEMSVRRKSHATLKKVENDYEIRFAFNTAIAAIMELLNFIPDNYKNENATDAQKYCLDESIIFILKMLSP

SEQ ID NO: 189678 - protein, 234 aa, Unknown
  Bacterial polypetide isolated from the Sargasso Sea
PFKKDIKLPIYIANFVLMDYGTGAIFGCPAHDQRDLDFANKYKLNVLPVVRPKNIDPTNFKISNEAYVEDGILFNSEFLNNLTVDMAIEKAIEFITKKKFGEKKITFRLKDWGVSRQRYWGCPIPIVYNQKGEALPVDRKDLPILLPEDVDLNVKGNPLEKHPTWKFAKLSSGEKVTRETDTLDTFVDSSWYFLRFCSPKYKKYGYEIKDINYWMPVDQYIGGVEHAILHLLYS

SEQ ID NO: 189679 - protein, 297 aa, Unknown
  Bacterial polypetide isolated from the Sargasso Sea
ESVKELQRNWIGKSEGCEVDFKIKNINQNITVYTTRPDTLFGATYMVLAPEHPLVDMLVSENQVSIVNDYKKLSSLKSDFDRGELNKEKTGVATGASAINPVNGQVIPIWIADYVLMSYGTGAIMAVPAHDDRDYEFAKKFKLPIKEVVSGGNIELEVHKDTSNGTLINSSNDKGLNLNDLNVQDAIRVVVDWLEKEGLGTRKTQYKLRDWLFSRQRYWGEPMPIIHNNDGSINPLKDSDLPLTLPEIKKYEPSGTGESPLSIITDWVNVDGGKRETNTMPQWAGSCWYYLRYISPH

SEQ ID NO: 189680 - protein, 235 aa, Unknown
  Bacterial polypetide isolated from the Sargasso Sea
MQDYVPKEIEAKWQKYWEKHNLLDYDFDSENPKFYMLTMLPYPSGDLHIGHWYAMAPSDCYARFMKMKGYEVFFPIGFDAFGLPAENAAIKNNIHPKSWTYANIERMQKQLRSMGNMFAWKNEVVSCDPEYYKWSQWFFLRMLESDLAYREYAPVDYCNHCQTTLAREQVWGEERVCERCNYPVIKKDLNQWKLRITNYADELLDFEGLDWPERVRSMQANWIGRSEGVEFTLKI

SEQ ID NO: 189681 - protein, 274 aa, Unknown
  Bacterial polypetide isolated from the Sargasso Sea
SKYFSENEEFQKFKNECSKTGTTEEAIAIGEKIGFKTNLMAINPLNKSQKVPVFFANFVLMDYGFGAVFGCPAHDQRDFDFAKKYKLNIKTVVRPSDEENDYIVKNEAYTGSGVMINSEFLNDLKVPNESISKTIDILEKKKIGKKKINFRLKDWGVSRQRYWGCPIPIAYDENEKVISIPKKQLPVKLPENIDINTKGNPLDAVDEWKYIEINGKKYRRETDTLDTFVCSSWYYLRFCSPKETNYGFKKDEIDYWMPVDQYIGGIEHAILHLL

SEQ ID NO: 189682 - protein, 291 aa, Unknown
  Bacterial polypetide isolated from the Sargasso Sea
MVVKPNNENENFKVTTEAYAGPGILINSHFLNGLKAPDDSIIETIKILEEKNLGKKQINFRLKDWGISRQRYWGCPIPIIYDKNDNPHPIPKSKLPVKLPENIELNVKGNPLDSVKNWKEIEIDGKKFTRETDTLDTFVCSSWYYLRFCSPNENEYGFKKEEIDYWMPVDQYIGGIEHAILHLLYSRFFMQALSFKNKNFELLEPFEGLFTQGMVCHETYKDPNNNWISPDEVVNIEGVKYLKKDKSIKVTIGASESMSKSKKNTIDPEDIIFNYGADSARLFILSDSPPE

SEQ ID NO: 189683 - protein, 236 aa, Unknown
  Bacterial polypetide isolated from the Sargasso Sea
KNLGSKTINFRLKDWGVSRQRYWGCPIPVAYDENGEVHKIPESMLPVELPHNINLNVKGNPLDHQNHWKEIVVDGKKLVRETDTLDTFVCSSWYFLRFCSPDESDYGFKEEDIKYWMPVDQYIGGVEHAILHLLYSRFFMRAISQNNYKINIEEPFDGLFTQGMVCHETYKDTDNNWVSPEEIETINGKKCLKIDNSKLVKVGPSESMSKSKKNTIDPEKIISIYGADAARLFILS

SEQ ID NO: 189684 - protein, 286 aa, Unknown
  Bacterial polypetide isolated from the Sargasso Sea
SPREIEAAAQSHWDAQKSFVVSEQPGKDTFYCLSMFPYPSGKLHMGHVRNYTIGDVIARYQRMQGKNVLQPMGWDAFGMPAENAAMKNQVAPAKWTYENIAYMKSQLKSLGLAIDWTREVTTCKPDYYRWEQWLFTRLFEKGVIYRKNGTVNWDPVDQTVLANEQVIDGRGWRSGALIEKREIPMYYFKITAYAEELLSSLDELDGWPEQVKTMQRNWIGKSFGADIVFDYDVGSIGIEGQLKVYSTRPDTLMGATYVAVAAEHPLAQRAAAGNPQIAAFIAECKA

SEQ ID NO: 189685 - protein, 268 aa, Unknown
  Bacterial polypetide isolated from the Sargasso Sea
LYARFWHHVLHDLGLVSTKEPFKKLYNQGMILGDDGTKMSKSRGNVVNPDDIINEYGADSMRLYEMFMGPLNKSKPWNTKGLQGCYRFIKKLWGIIVDEEGNLSSKITEDVTPDKETLHLHHTTVKKVGDDIEHLHFNTAVSQLMIYCNHLQKCENISKDLIADLIKIAAPFMPHLSEEFWSLLGNKNTLAYEEWPGYDEALTQSDEVTVAVQINGKLRANITLAKDSDEKTAVDTALSVEKVSNYTSAGSIVKTIYVPNRLLNFVVK

SEQ ID NO: 189686 - protein, 113 aa, Unknown
  Bacterial polypetide isolated from the Sargasso Sea
MDQYDASAIEAKWQARWNDGDCFAAETGSEKPKYYVLEMFPYPSGRIHMGHVRNYALGDVVARYRRARGFNVLHPMGWDAFGLPAENAAMERGVHPGHWTTENIAAMRTQLRG

SEQ ID NO: 189687 - protein, 279 aa, Unknown
  Bacterial polypetide isolated from the Sargasso Sea
RVEHPLISNKQIPLFIANFVLMDYGLGAIFGCPAHDQRDLDFALNYNLEVIPVVRPHNVKQEEFEIKKTAFTEDGIIINSDFLNGLSIDNAKTKILDFLLKKGLAKKKVNYKLRDWGVSRQRYWGCPIPVLYREDGSITTVPKEELPLALPELKKFTSKGNVLENLENWKHTTCPITGLKAIRDTDTFDTFFESSWYFLRYCNPRSDKPFVEEDINYWLPVDQYIGGIEHAILHLLYSRFFIKALRDIGLVSFNEPFKGLFTQGMVTHKTYMKKSGEWV

SEQ ID NO: 189688 - protein, 281 aa, Unknown
  Bacterial polypetide isolated from the Sargasso Sea
FNISKFSNELLEDLYKLTEWPEKVKLMQKNWIGKSVGCEIDFEINESKEKVKIFTTRPDTIFGATFLAVSVDHPLSKNFEKDKDFIEFKKKSSQVGTTEEAIANAEKIGFDTNLRAKHPFIKNKKIPIFVANFILMDYGTGAIFGCPAHDQRDFDFATKYKIEILPVVKSETENKGSSKKMKQAYTGDGKIINSEFLNNLKIEEAKKRIVDEIERQKIGKKKISYRLKDWGISRQRYWGCPIPMIYLKNGKVIPVEKSELPIKLPDNVDLNSKGNPLENHP

SEQ ID NO: 189689 - protein, 261 aa, Unknown
  Bacterial polypetide isolated from the Sargasso Sea
KWQKKWNELNIFKANIDYNKPKYYVLEMFPYPSGAIHMGHVRNYTLGDLVSRYKRAQGFNVLHPMGWDAFGLPAENAAIQNNTLPSKWTYSNIEIMKNQLKQMGLSYDWERELATCNPNYYKFEQKMFLDFYKAGIAYKKETVVNWDPIEQTVLANEQVVDGRGWRSGVEVEKKKMKGWFLKISDFAEDLLNEIDNLNKWPDRVKIMQRNWIGKSDGATISFSINHSDDKVEIFTTRPDTIFGATIYCYFSHNIHYHKNAK

SEQ ID NO: 189690 - protein, 300 aa, Unknown
  Bacterial polypetide isolated from the Sargasso Sea
LFDAGIISTPEPFKKLVHQGMILGELEYAKFEDEDNIPISADFISSNKDSRTGSEVKRVVISADDVKKDGEHFVLANDASIKVEARAHKMSKSRGNVVNPDEVVKSYGADAFRLYEMFMGPLEQVKPWSTRGVEGTYRFLNRVWRLMVGDENGAQLSKAVCDKTPTPEQLKVLHQTILKVTNDIQELRFNTAISALMEFINTANKWDVLPREIVNDFVLLLSPLAPHIAEELWERLGNTETIAYMKWPEFDEKYLKSDTAEVSVQVNGKMRSRVSVPSDATEAEALAIAKNDENVARHIA

SEQ ID NO: 189691 - protein, 277 aa, Unknown
  Bacterial polypetide isolated from the Sargasso Sea
DTLDTFVDSSWYFLRFCSPSKDDYGFDENEMKYWMPVDQYIGGVEHAILHLLYSRFFMQALSFKNKKINITEPFEGLFTQGMVCHETYKDNDNNWVSPDEVITIKGEKFLKKNNSIKVEVGASESMSKSKKNTIDPADIMEKFGADSVRLFILSDSPPEKDVQWSDNGIEASYKFIQKFWFLHRKIMNKINENNKNIEGKNLEVLTNKFVRDITNNLDNFNYNIAIANIHEMYSSLNREMNYDYSKEIIEKNYLKILICLLPIIPHLSSEALEELKS

SEQ ID NO: 189692 - protein, 312 aa, Unknown
  Bacterial polypetide isolated from the Sargasso Sea
MSKGALIKFNIKDTQESLEVFTTRVDTLCGVSFLAVSPSHNILDKIESDVVKNFIIKCKALKVSEETVSNIEKEGVRTDLVAINPINGNEIPVWVANYVLSDYGSGCVMSVPAHDDRDYEFSIKYKLPIKQVIRNKDDNGGINSAYTGDGELINSGKYNGLDSEIAKSKILEDLAKVNSGESKVNYRLRDWGISRQRYWGCPIPVFYHKDGTVYPVPEKDLPVVLPKDIDLTKDGNPLDNHPTWKYIKCPYTGKDAIRETDTFDTFFESSWYYLRFLSSDYKDGLMDESKKDWLPVDQYIGGIEHAILHLLY

SEQ ID NO: 189693 - protein, 313 aa, Unknown
  Bacterial polypetide isolated from the Sargasso Sea
MPVDQYIGGVEHAILHLLYSRFFMQALSFKNQSFISPEPFKGLFTQGMVCHETYKDEENKWVSPDEVFTENGKDFFKIKDKKKISVGPSESMSKSKKNTIDPEKIMDQFGADAVRFFILSDSPPEKDVQWSEQGMVASFKFIQKFWLLHKKIIEEIKNKKRVGENTGLTIYTNKLIERYTSSLEKFNMNVLIAYLHETYNFLSKEIDNSNNKDLEENYLKILILMFPIVPHLVSECLEDIKKDFNISWPVAQKKYLMEKYVNIVIQINGKKKSLIQIEKDLDEKILLENVIKDKKISNFLQKKSVFKHIIVKK

SEQ ID NO: 189694 - protein, 311 aa, Unknown
  Bacterial polypetide isolated from the Sargasso Sea
AVIEYRDAASRKSDLERTELAKEKTGVFTGAYAVNPVNEEKVPIWIADYVLSTYGTGAIMAVPAHDERDLEFSQKFDLPVRVVVQAPEGEESLGYTGAGESIESGFLNGLGTSEAKKRIVDWLEEKRKGKRTINFKLRDWLFSRQRYWGEPFPIIWRHGRHEALQESELPLLPPELDDYKPTVEGEPPLARAVDWVNLADGATRETNTMPQWAGSCWYYLRYLDAQNDECFAGKEAEKYWMNVDLYVGGAEHAVLHLLYARFWHKVMYDLGHVSTSEPFQKLVNQGIILGEDGQKMSKSRGNVVNPECCSC

SEQ ID NO: 189695 - protein, 259 aa, Unknown
  Bacterial polypetide isolated from the Sargasso Sea
IPVFVANFILMDYGTGAIFGCPAHDQRDFDFAKKYKIEIITVVKPDDNKQSVELKQAYTGDGKIINSDILNNLSILEAKNKIINEIEKRKIGNKKVSFRLKDWGISRQRYWGCPIPMLYLKDGKVVPVDKSELPVKLPENIDLNSKGNPLDNHPTWKKTKYKKTGENATRETDTLDTFVDSSWYFLRFCSPKLEDKPFDEKSLSYWMPVDQYIGGIEHAILHLLYSRFFMRAVKLNNEKIKIKEPFKGLFTQGMVCHET

SEQ ID NO: 189696 - protein, 270 aa, Unknown
  Bacterial polypetide isolated from the Sargasso Sea
LNQWFFNISKFSDDLLEGLNELTNWPNKVKVMQKNWIGKSFGCELNFKIEGDLPVDEIKCFTTRPDTLFGFSFLALSPDHPISKHYESDPDFIKFKDECSKTGTTEESLAMAEKIGFKTNLKAINPFEESEKVPVYFANFVLMDYGFGAVFGCPGHDQRDFDFAKKYNLNIKTVVRPKDQENFEVKTEAFPGEGIIINSEFLNGLEAPDQSVVKAIEILEERKIGTEKINFRLKDWGVSRQRYWGCPIPIAYNEKGEIKTIPEDQLPVKL

SEQ ID NO: 189697 - protein, 281 aa, Unknown
  Bacterial polypetide isolated from the Sargasso Sea
DQRDFDFAKKYKLNIETVVRPYDQDEDFKVEKEAYTGDGVIINSDFLNGLNAPKESVIEMINIFEEKRIGKKKINFRLKDWGVSRQRYWGCPIPIMYDENGEAHPIPDSILPAKLPINIDLNVKGNPLDSQKDWKKIEIDGKIYTRETDTLDTFVCSSWYFLRFCSPNNSNHGFDYDDIKYWMPVDQYIGGVEHAILHLLYSRFFMQALSYEDNKFNLTEPFDGLFTQGMVCHETYKDPDNNWVSPEEIEEINGKKYLKKDNTKEIKIGPSESMSKSKRNT

SEQ ID NO: 189698 - protein, 284 aa, Unknown
  Bacterial polypetide isolated from the Sargasso Sea
ADYGSGAVFGCPAHDKRDNDFAKKYRLEIKNVIQQKENLINKEDPYEKKSLKDKMINSDFLDDLNPVEAKEKVIEKLEKIGAGRRKSKFKIRDWGVSRQRYWGCPIPIIYREDGAILPVDEIDLPVVLPKDVDLSKPGNPLKNHPTWKYTKCKKTGLKAIRETDTLDTFFDSSWYFLRFCSPHSQIEPFNKSSIDYWMPVDQYVGGIEHAILHLLYSRFFCRALKDCGYSVPIEPFKKLLTQGMVCHETFQTKDKKWVEPDNVIKKKNEYFSMSGEKLIKGRQK

SEQ ID NO: 189699 - protein, 271 aa, Unknown
  Bacterial polypetide isolated from the Sargasso Sea
STSEADMEKAEKKGIDTGLRVKHPLDPDWELPVWIANFILMDYGTGAIFACPAHDQRDLDFARKYKLPVIDTFLSLEDSSPVVDEAFIPPKSEKVQWVNHFTEIDIATGQEAIDKTIDFAEKNKWGKSVTNFRLRDWGLSRQRYWGCPIPVVHCENCGVVPEKKENLPISLPDDVKFDIPGNPLDRHPTWRKCKCPSCGSQALRETDTMDTFVDSSWYFVRFTSPKSEKPTSSEDVNYWMNVDQYIGGVEHAILHLLYSRFFARAMVITGH

SEQ ID NO: 189700 - protein, 316 aa, Unknown
  Bacterial polypetide isolated from the Sargasso Sea
HDDRDHEFAKKYNLPIREVVSGGDVTKEAYTDNENGLLVNSSNDNDLDLNGKLVSDAIAHVISWLSDNKKGVSKTQYKLRDWLFSRQRYWGEPIPIIHKDNGDIVPVEYSDLPLTLPQVDKYEPADTGESPLANIKEWVEVEEGRRETNTMPQWAGSCWYFLRFTDPNNDELPWGKDEESYWMPVDLYIGGVEHAVLHLLYSRFWHHVLFDLGLVSTKEPFKKLFNQGMIQGEDGQKMSKSRGNVINPDEVVIDFGADSFRLYEMFMGPLDKSKPWSTKGLQGCYRFLQKVWRLFNNPDIAIKENCSNDETQRAAT

SEQ ID NO: 189701 - protein, 277 aa, Unknown
  Bacterial polypetide isolated from the Sargasso Sea
MGENCIRETDTLDTFVDSSWYFLRFCSPKNNDYGFNAQEIKYWMPVDQYIGGVEHAILHLLYSRFFMRSIDYKNNDFDIKEPFDGLFTQGMVCHETYKDQNNNWISPEEIEIIDKKYFKKTDKKSKIIVGPSESMSKSKKNVIDPENIINDYGADSVRLFILSDSPPEKDVQWSEQGMISSYKFVQKLWVLHLKIKNKLTKQKNKVSDDLELNKFTNQLIYKITNNLESFSYNVIIANMYETYNFLTKHIEKEINLKDLMYNYKKILTIFSPIIPHL

SEQ ID NO: 189702 - protein, 298 aa, Unknown
  Bacterial polypetide isolated from the Sargasso Sea
RECCIENNVSPKEWTVQNIDAMRGQLKSLGFSYDWNREFATSSADYYKWEQSFFNKLFDQGLIYKKESEVNWDPVDETVLANEQVIDGKGWRSGATIEKKKIDQYFIKITDYAEKLLENIQELDGWPNQVKLMQENWIGKSLGLEFNFQIKDHNDALRVFTTRPDTIFGATYCAVAMDHPLAISLIESNPKIHDFIKNNKNITTSEAAIATQEKLGMDTGLKAIHPFTREEIPIWIANFILMDYGTGAVMCVPGHDQRDWEFAKKYNILIKQVIESDQDNGVSDGAFEDKGILINSKQ

SEQ ID NO: 189703 - protein, 201 aa, Unknown
  Bacterial polypetide isolated from the Sargasso Sea
MSSTYKHKLIEKIIQKKWDDENRYVSKIDKREKYYCLSMFPYPSGKLHMGHVRNYTIGDVISRYKRMQNLNVFQPMGWDAFGLPAENAAIENKVSPQKWTNENISNMKTQLKSLGFSYDWSKELRTCDSNYYKWEQLIFKKFFDAGLVYKKKSLVNWDPIDQTVLANEQVIDGKGWRSGAQVEMKEIDQWFIKITNYADEL

SEQ ID NO: 189704 - protein, 247 aa, Unknown
  Bacterial polypetide isolated from the Sargasso Sea
EKAKKGFNTGFVVDHPFIEGKKLPVFIANFVLKEYGLGAIFGCPAHDQRDLDFANEYNLEVIPVVKPDNIEEGSFKINTKAFIDDGKIINSKFLNGLNIEKAKNKIINEIERNNIGRKKINYKLRDWGISRQRFWGCPIPIIYREDGEILPVEEIDLPVKLPEIKKFNESSTALNNISGWKETICPKTGMKAYRETDTFDTFFESSWYYFRYCNARLERPFDKSDIDYWLPVDQYIGGIEHAILHLL

SEQ ID NO: 189705 - protein, 281 aa, Unknown
  Bacterial polypetide isolated from the Sargasso Sea
RRAGEQLLCQGMVLADAFYYVGENGERNWVSPVDATVERDEKGRIVKAYDPQGRELVYTGMSKMSKSKNNGIDPQVMVERYGADTVRLFMMFASPADMTLEWQESGVEGANRFLKRVWKLVYEHTTQGPVAALDVASLSEDQQALRRDVHKTIAKVTDDIGRRQTFNTAIAAIMELMNKLAKAPQENEQDRALMREALLAVVRMLNPFTPHACFTLWQELGGEGDIDNAPWPVADESAMVENTTLVVVQVNGKVRGKIPFRSMQPKNRFVHVRVRNIWSRS

SEQ ID NO: 189706 - protein, 297 aa, Unknown
  Bacterial polypetide isolated from the Sargasso Sea
MLLAYLSENAAMVEKKSPEDWTYKNIETMKGQLKSMGFSFDWKKELATCHPKYYKHEQEFFIEMFNKGLAYKKKSEVNWDPVDKTVLANEQVIDGRGWRSGAVVEKKHLSQWFLKTSKYSEELLESLEGLSEWPEKVKTMQTNWIGKSVGAEIKFQISDGPLKESYIKIYTTRPDTIYGASFIAISPQHPFTIELAKQDNNIKNFIKKCEKSNTENDKLGFETKINVTHPITKDQLPVYIANFVLMDYGLGAVFGCPAHDQRDLDFANKYNLNVITVVQPDENLQEITNTAFTGEGK

SEQ ID NO: 189707 - protein, 276 aa, Unknown
  Bacterial polypetide isolated from the Sargasso Sea
PLDKSLEWKNIIINGKKYTRETDTLDTFVDSSWYFLRFCSSQNNLYGFEENEVKYWMPVDQYIGGVEHAILHLLYSRFFMQALNYKNEKFNLEEPFKGLFTQGMVCHETYKDHNGNWVSPDEIITINSEKFLESDRTKKIKVGPSESMSKSKKNTIDPEKIIKQYGADAVRLFILSDSPPEKDVQWSEEGIAASYKFIQKLWTLNMKFLSNIKMNQKENKGEELEKYTNKFLKKMTENLQNFNYNIIIANMHEMYSFLIKDLDKQYNPNTLVDNYS

SEQ ID NO: 189708 - protein, 284 aa, Unknown
  Bacterial polypetide isolated from the Sargasso Sea
SVGCEIDFQILQTKKTIKIFTTRPDTIFGATFLAVSTDHPICENFKESNDFIKFRNKCSSVGTTEEAIANAEKIGFKTNLFAQHPFIEGKKIPIFIANFILMDYGTGAIFGCPAHDQRDYDFAKKYALEILPVVKPENSDQKNIEGAYTGDGTIINSDFLNDLSISKAKERIIKEVENKKIGGKKITFRLKDWGISRQRYWGCPIPMIYLKNGKVVPVDKSELPVKLPEDIDMNYKGNPLDNHPTWKKTKYKKTGEDAVRETDTLDTFVDSSWYFIRFCSPKIR

SEQ ID NO: 189709 - protein, 264 aa, Unknown
  Bacterial polypetide isolated from the Sargasso Sea
WFLKISKYSDELLNDLDNLNNWPNKVKLMQSNWIGKSTGAEINFKISGEDGFIKIFTTRPDTIFGATFLAVSFDHELVLNKLKENNILLNFIKECENLDTEKVKRGFNTGLTVDHPFIDGKKLPVFVANFVLKEYGLGAIFGCPAHDQRDLDFANEYSLDVIPVVKPNDIEENGLKIDKNAYTGEGTIINSKFLNGLNIKSAKEKIIEEIEKRKIGSKKINFKLRDWGISRQRFWGCPIPVIYREDGKILTVEESELPVKLPEY

SEQ ID NO: 189710 - protein, 275 aa, Unknown
  Bacterial polypetide isolated from the Sargasso Sea
DTFDTFFESSWYYFRYCAPRSKKAFEKSDIDYWLPVDQYIGGIEHAILHLLYSRFFTKALRDLGYFNLSEPFKGLFTQGMVTHKTFKDEKNNWVSPDNVNFEGGVAVDKNGVEIKVGKIEKMSKSKKNVIDPSDIIEQYGADTARWFMLSDSPPDRDLEWTENGITGSFKFINKIWGLAKDAQIIKNDSSNNELDNIINVKVNETIKNVTTNIEAFHYNKAIANIYELINLIQKNLYSSKLSLDSIKYAFKTLALLLQPFTPHISEELWKLLEEK

SEQ ID NO: 189711 - protein, 300 aa, Unknown
  Bacterial polypetide isolated from the Sargasso Sea
CKSKVLKESDLPLELPDVEKYEPSGTGESPLSNIKSWVEVKDVNDNIIGLRETNTMPQWAGSCWYYLRYLDPSNDEKAWDSEKEKYWMPVDLYIGGAEHAVLHLLYSRFWHHVLFDLGLVSTKEPFKKLFNQGMILGQDGSKMSKSRGNVINPDETVETYGSDSMRIYEMFMGPLDKAKPWSTTGLQGCSRFIKKLWSILVDDEGVLSSNVTEKKDDKETLQALNMMIKKISDNLDQMQFNTCVSEFMIFTNHIQKLDSINIDTIRSFIIIMNPFMPHLAQELWELIGETNELTYQGWPD

SEQ ID NO: 189712 - protein, 274 aa, Unknown
  Bacterial polypetide isolated from the Sargasso Sea
AENAARENNLDPKDWTEKNISVMKSQLKKLGLSIDWDREISTCSPEYYKHQQIFFLELYKKGLIYKKENYVNWDPVDQTVLANEQVIDGRGWRSGAIVERKKLSQWFFKISKFSDELLKGLDQLENWPNKVKVMQKNWIGKSFGCEINFNIEGNSSIKNIKCFTTRPDTLFGFSFLAVSADHPIARFYEKDEKFQEFRKQCSKTGTTEESIAQAEKIGFKTNLIAINPFDKNIKVPVYFANFVLMDYGFGAVFGCPAHDQRDFEFAKKIQSSDQ

SEQ ID NO: 189713 - protein, 249 aa, Unknown
  Bacterial polypetide isolated from the Sargasso Sea
MVLNDGAKMSKSLGNTVDPEEMIQNYGADTVRLFMMFTSPPEQSLEWSDTAINGSYRFLKKLWKLIKTHQDSIKDISGISSNEKFNGNQNKLRRKTHQTISKVTDDIGRRYTFNTAIAAVMELVNEVSTFNVDDELDRQVIKEAIESILLLLSPIVPHICHQLWLDINHDQPIIDARWPKFDSSLLKSETSLIVVQVNGKLRSKLEVDASISEDELKSMALSDEKVVRFIDGNEIKKIIVIPEKLVNIV

SEQ ID NO: 189714 - protein, 295 aa, Unknown
  Bacterial polypetide isolated from the Sargasso Sea
MSCSDQRDYDFAKKYKIEIIKVVRPKESYKIGKDNKAFDGDGSIINSEFLNGLNISDAKDRIIGEIEKKKIGKRKISYRLKDWGISRQRYWGCPIPMIYLKNGEIVPVDKSELPITLPGDSDLNSKGNPLENHPNWKKTKYKKTGEDAVRETDTLDTFVDSSWYFIRFCSPKLKDKPFDERSLSYWMPVDQYIGGVEHAILHLLYSRFFMRAIKLNNDRIKVKEPFKGLFTQGMVCHETYKNKKGNWLSPEEIKDFNKSEIIVGPPEAMSKSKKNVVDPESMIKIYGADAIRWFM

SEQ ID NO: 189715 - protein, 301 aa, Unknown
  Bacterial polypetide isolated from the Sargasso Sea
PIDETVLANEQVIDGRGWRSGAVVQRKKLNQWFFNISKFSENLLNGLDNLSNWPNKVKTMQKNWIGKSFGCEIDFKIEGSKDVKSIRCFTTRPDTLFGFSFLALSVDHPMSKYFENDEKFVNFRKECSKTGTTEESIAQGEKIGFKTNLLAINPFDKEKKVPVFFANFVLMDYGFGAVFGCPAHDQRDMDFALKYQLEIKTVVKPLDKDNTFKVKDKAYVDGGEIINSKFLNGLKVPEESIIKTINILEKRRLGEKKINFRLKDWGVSRQRYWGCPIPIMYDNTGNPHPVPKELLPVKLPE

SEQ ID NO: 189716 - protein, 299 aa, Unknown
  Bacterial polypetide isolated from the Sargasso Sea
DETVLANEQVIDGKGWRSGATVERKKLSQWFFNISKFSQDLLDGLDKLDHWPKKVKTMQKNWIGKSFGCEIDFKIEGDLPVKNIKCFTTRPDTLFGFSFLALSIDHEVSKFYKENNDFIKFKEECSKTGTTEEAIAVGEKIGFKTNLKAINPLNPKQKVPVYFANFVLMDYGFGAVFGCPAHDQRDFDFAKKYNLDIKTVVRPYDKGDDYKVTDEAFSGEGVLINSNFLNGIEAPNKSVIKTIEILEEKNLGSKTINFRLKDWGVSRQRYWGCPIPVAYDEDGEIHKIPNSMLPVKLPQ

SEQ ID NO: 189717 - protein, 259 aa, Unknown
  Bacterial polypetide isolated from the Sargasso Sea
PMGWDAFGMPAENAARENNLDPKDWTNKNILTMKSQLKKLGLSIDWDREISTCSEEYYTHQQLFFLELYEKGLVYRKENYVNWDPVDQTVLANEQVIDGKGWRSGATVERKKLNQWFFKISEFSQELLDDLEKLNEWPNKVKVMQKNWIGKSFGCEIAFKTEGDLPIDEIKCFTTRPDTLFGFSFLALSVDHEISKYFLEDKKFQEFKKECQKTGTTEEALAIGDKIGFRTNLMAINPLKPSEKVPVFFANFVLMDYGF

SEQ ID NO: 189718 - protein, 289 aa, Unknown
  Bacterial polypetide isolated from the Sargasso Sea
FDRTEVNKDKTGVFTGSYAINPFSKEKIEIWIADYVLISYGTGAIMAVPGHDERDWEFASKYNLPIVEVVEGGDVSKAAYTAKGNAKIINSSNDKTLSMDGLSVDQAIKEAILFIEKNSIGKATVNYKLRDWLFSRQRYWGEPFPLIHKDDSVELIQEKDLPVMLPEVENYKPSDDGKSPLSLVKNWVEVKDESNNIIGLRETNTMPQWAGSCWYFLRFTDPNNTIEAWSKERENYWMPVDLYIGGQEHAVLHLLYARFWHHVLYDLDLVSTKEPFKKLYNQGMILGDD

SEQ ID NO: 189719 - protein, 292 aa, Unknown
  Bacterial polypetide isolated from the Sargasso Sea
EMFPYPSGKIHMGHVRNYTLGDVIARYKRAQGFNVMHPMGWDAFGLPAENAAIENKTSPKTWTYENIETMKNQLKQMGLSIDWSREIATCDKLYYQNQQKLFLKFYRKNLIYKKESLVNWDPVEKTVLANEQVIDGKGWRSGAEVEQKKLSQWFFKITDYAESLLKALDDMSRWPEKVRTMQKNWIGKSFGCEIDFVISSKLDEFNDEKLRIFTTRPDTIFGATFCALSPFHPFVDRLIKQNETLNNQVNELRSQKISEESIARNEKVGIQTDLFIKHPFIENKLLPVFIAN

SEQ ID NO: 189720 - protein, 280 aa, Unknown
  Bacterial polypetide isolated from the Sargasso Sea
PIVYDPEGNPHPIPDEHLPWLLPDDVEYKPKGTSPLGSSKELIQRTEDIFGKGWRPEIDTMDTFVCSSWYYLRYVDPNNNECAFSDDSLSWLPVDHYIGGAEHATMHLLYARFITKCLRDLGFLNFNEPFKHLFHQGMITKDGSKMSKSKGNTVSPDEFVKKYGSDTFRCYLMFMGPFDEGGDWNDKGITGIDRFLKRSYRMIVNDECKDHNDEDDYVINSTIRFVSEGLSGMKFNTSISKLMELVNHFYDKGLSMTYKEVYVKFVITPLLHILQKECGR

SEQ ID NO: 189721 - protein, 312 aa, Unknown
  Bacterial polypetide isolated from the Sargasso Sea
KKDAVVNWDPVDKTVLANEQVIDGKGWRTGANVEKKNLSQWFFKITDYAEELLKDLDDLKLWPEKVKTMQRNWIGKSIGAEVKFQIVQNKRFLNIYTTRPDTIYGATFIAVSVNHQILNDLIDKKTLEKIRNEYDLVNEEKEKLGVKLNISCKHPILDKEIPVFVANFVLDTYGEGAIFGCPAHDERDYEFAKKYSLPIIKVIECKDEELPYTGDGKVINSPKLNGLSKDEAIKEIIEYFKEANIGKKKVNYKIRDWGVSRQRYWGCPIPVIYYEDGTYRVLDKSELPVLLPYDIKLEGKGNALLNKESGEK

SEQ ID NO: 189722 - protein, 255 aa, Unknown
  Bacterial polypetide isolated from the Sargasso Sea
RPDTLFGMSFLAVSIDHPLSKFYENKSDFIKFKEECAKTGTTEEAIAQAEKIGFKTSLKAINPLDNSKTVPVYFANFVLMDYGFGAVFGCPAHDQRDLDFANKYGLKVLPVVEPLNNNDKSFLITKEAYGGPGKIINSNFLNGLNVPEESIIKTIEYLEKNNLGKKKINFRLKDWGVSRQRYWGCPIPIVYDENNKIKKIPIENLPVELPENIDLNTNGNPLDNQNNWKNITIEGKKYTRETDTLDTFVDSSWYF

SEQ ID NO: 189723 - protein, 284 aa, Unknown
  Bacterial polypetide isolated from the Sargasso Sea
EKFKEFKKQCSTTGTTEESIANAEKIGFKTELIAINPLDNNLKVPVYFANFVLMEYGLGAVFGCPAHDQRDLDFALKYKLKVTPVVSPELNNEKFKIQDKAYTGPGYICNSSFLNGLKCPDESIIKTIEYLENEKLGTKKINFRLKDWGVSRQRYWGCPIPIMYDAEGKAHKVPKEMLPVELPNINRLEPTGNPLDKEIKWKKVSLNGKNYVRETDTLDTFVDSSWYFLRFCSPHNKNYGFDFEEAKYWMPVDQYIGGVEHAILHLLYSRFFMQALSYKNNNLK

SEQ ID NO: 189724 - protein, 215 aa, Unknown
  Bacterial polypetide isolated from the Sargasso Sea
QKNWIGKSFGAEVKFKIENSKTIDSISCFTTRPDTLFGMSFLAVSVDHPLSKFYENDEKFKDFKKKCSTTGTTEESIANAEKIGFKTDLIAVNPLDENLKVPVYFANFVLMEYGLGAVFGCPAHDQRDLDFALKYKLKVTPVVTPELNNLNFEIKKKAFTGPGYIFNSSFLNGLKCPDDSIIKTIEYLEKEKLGTKKINFRLKDWGVSRQRYWGC

SEQ ID NO: 189725 - protein, 273 aa, Unknown
  Bacterial polypetide isolated from the Sargasso Sea
PLDHVTDWKFIEYKGEKFTRETDTLDTFVDSSWYFLRFCSPHEKDYGYNEDEINYWMPVDQYIGGVEHAILHLLYSRFFMRAIGYKKDDFKFNEPFEGLFTQGMVCHETYKDEKGNWLRPDEVETKDGKKYFVKNKLENVVTVGPSESMSKSKKNTIDPEQIIQNYGADAVRLFILSDSPPEKDIQWSEQGMVASYKFIQKLWMLHEKIKDKINNNSNNLDLENNFERFVNETINKFDYNLEKFNYNVLIATIYETYNFINNILESKINGEIL

SEQ ID NO: 189726 - protein, 197 aa, Unknown
  Bacterial polypetide isolated from the Sargasso Sea
MTTSTNVNRFREQLQSLGFSYDWDREVATCDPSYYKWTQWIFTKLLERGLAYQAEVPVNWCPALGTVLANEEVIDGLSERGNHPVIRKPMKQWMLKITAYGDRLLNDLDDLDWPESIKEMQRNWIGRSEGAQLAFDVPGVDHETLGKLEVYTTRPDTLFGATYLVVAPEHPLVDALASAERRDAVDEYVARASRKVG

SEQ ID NO: 189727 - protein, 269 aa, Unknown
  Bacterial polypetide isolated from the Sargasso Sea
LVSRKETYVNWDPVENSVLANEQVIDGKGWRSGAIVERKKLSQWFFNITKFSDDLLNELNKLPGWPSKVKTMQENWIGKSTGCEILFNIDNKKDSIKVFTTRPDTIFGASFLALSVDHPLNKLFSNDAEFLNFKSECNKSGTTEEAIANAEKIGFDTKLFVNHPFLQKKIPIYFANFVLMDYGTGAVFGCPAHDQRDYDFASKYKLEIINVISNNSPKKKITEAYTGDGKLINSEFLNGLSIISAKKRVIEEIEKRKLGTKKTFFRLKD

SEQ ID NO: 189728 - protein, 226 aa, Unknown
  Bacterial polypetide isolated from the Sargasso Sea
YKDEQKFLNFKKECSTTGTTEESIAQAPKIGFKTNLFAINPLNANIKVPVYFANFVLMDYGLGAVFGCPAHDQRDFDFAKKYDLEIKTVVRPKNENENFKVDTEPYTGEGFIINSEFLNGAKVPEESINKTIDLLEKKSLGKRKTNYRLKDWGISRQRYWGCPIPIAYDENDEIIKIPEKDLPVQLPENINFNTNGIPFDADEDWKNIIINGKKCKRETDTLDTFV

SEQ ID NO: 189729 - protein, 97 aa, Unknown
  Bacterial polypetide isolated from the Sargasso Sea
MSRYNFKSVETKWQNYWEKNKSFKVKTDPSKKKFYCLEMFPYPSGKIHMGHVRNYTIGDVLARYKSLQGYNVLHPMGWDSFGMPAENAAKQNNLDPK

SEQ ID NO: 189730 - protein, 301 aa, Unknown
  Bacterial polypetide isolated from the Sargasso Sea
WVNVPCPSCGEPARRETDTMDTFMCSSWYFLRFADPHNSETPFSREAVNRWLPVQQYVGGIEHAILHLLYSRFFTKALRDRGLIDVGEPFQRLLTQGMVQGTTYRNPVTGKYVAPADVVDPADPRDPVTGDALEVLFEKMSKSKYNGVDPAAVIDRYGADTARMFILFKAPPEKDLEWDDADVEGQYRFLQRLWRLIDSSRPLLDQQDGGEGRPAELTPEEADLRRAVHTAIEAVTEDLSDDIQLNTAISELMKLSNAINATDLPGLRVAVLREALSVLVRLLAPFAPHLAEEFWQKLGGA

SEQ ID NO: 189731 - protein, 269 aa, Unknown
  Bacterial polypetide isolated from the Sargasso Sea
HWCLRISKYSDRLLEDLNKIDWPEPLKEMQRNWIGKSKGVSLTFEVENSKNKIEVFTTRPDTIFGVSFLTVAPEYSDLHDICNADNRVSIESYIKKVSIKSERDRLADFKTMSGVFSGSYAIHPFSGKKIPIWISDYVLASYGTGAVMGVPAGDQRDFEFAKKFNLEIPNIFDKINITESAFSDKTGFKLINSEFLDGYDFNSALNKIITKIEENKIGKSKIQYKLRDAIFSRQRYWGEPIPIYYKNDLPVDIDEKYLPLKLPKVDNFL

SEQ ID NO: 189732 - protein, 254 aa, Unknown
  Bacterial polypetide isolated from the Sargasso Sea
KQVENKWQKFWEEKKIFSTKINKNKKKFYCLEMFPYPSGKIHMGHVRNYTIGDVLSRYKIIKGFNVLHPMGWDSFGLPAENAAKENNLNPKEWTEKNISVMKGQLKKLGLSIDWDREISTCSEDYYKHQQLFFLELYEKGLVYRKENFVNWDPIDETVLANEQVIDGKGWRSGATVERKKLNQWFFNISKFADELLQGLDQLEKWPNKVKVMQKNWIGKSFGCEVDFKIEGSPSVEVIKCFTTRPDTLFGFSFL

SEQ ID NO: 189733 - protein, 293 aa, Unknown
  Bacterial polypetide isolated from the Sargasso Sea
IEEAKKIVLNKLMEKKIGNEKINYRLRDWGLSRQRYWGCPIPVLYREDGEIVPVSKKDLPIKLPNINEFGQSGNPLDSIEDWKNTKCPLTGMKAVRETDTFDTFFESSWYYLRYCNPRSKAAFEKEDINYWLPVDQYIGGIEHAILHLLYSRFFVKALRDTNHIELDEPFQGLFTQGMVTHKTYKNIKNEWVSPADIYYDEGSGKNFDANNNEINIGKIEKMSKSKKNVVDPSQIIETYGADTARWFMLSDSPPDRDLEWTDSGISGSFKFVNKVWALLIETKSLDESITTDK

SEQ ID NO: 189734 - protein, 249 aa, Unknown
  Bacterial polypetide isolated from the Sargasso Sea
IASAEKIGFKTDLVAINPLDKKIKVPVYFANFVLMDYGLGAVFGCPAHDQRDLDFAIKYNLPVNAVVTPEKNQKNFEVQNEAYTGPGYLFNSSFLDGLKVPEDSIIKTIEHLEKKKLGVKKINFRLKDWGVSRQRYWGCPIPIIYDENHNPHKVPKELLPVKLPTIDKLDHSGNPLDNISDWKNVSIDGKKFYRETDTLDTFVDSSWYFLRFCSPKNNEYGFNLDEVKYWMPVDQYIGGVEHAILHLLY

SEQ ID NO: 189735 - protein, 251 aa, Unknown
  Bacterial polypetide isolated from the Sargasso Sea
YCLEMFPYPSGKIHMGHVRNYTIGDVLARYKKLQGFNVLHPMGWDSFGMPAENAAKENNLDPKEWTQKNISNMKKQLMRMGLSIDWDKEISTCSEDYYKHQQKFFLELFDKGLVYRKENYVNWDPVEQTVLANEQVIEGKGWRSGAIVERKKLNQWFFNISKFSENLLSDLEKLPDWPNKVKIMQKNWIGKSFGCEIEFKILGNEKIKSIHCYTTRPDTLFGSSFLALSVDHPLSKYYEKNNDFLNFKNQM

SEQ ID NO: 189736 - protein, 262 aa, Unknown
  Bacterial polypetide isolated from the Sargasso Sea
SIDWDREISTCSEDYYKHQQTFFLELFKKGLVYRKENYVNWDPIDETVLANEQVIDGRGWRSGATVERKKLSQWFFNISKFSQDLLDGLETLDAWPNKVKTMQKNWIGKSFGCEIDFEINGDLPVNKIRCFTTRPDTLFGFSFLALSVDHEISKYYAENEDFLKFKEECSKTGTTEEAIAVGEKIGFKTSLRAINPLNPEEEVPVYFANFVLMDYGFGAVFGCPAHDQRDYDFAKKYKLRIKTVVAPIGEDKTYTVNDEAYP

SEQ ID NO: 189737 - protein, 307 aa, Unknown
  Bacterial polypetide isolated from the Sargasso Sea
LPVYIANFVLTEYGLGAIYGCPAHDQRDYDFAKKYGLEIITVVKPKENKDENFSVKNEAYEGDGIIINSDFLNDLYIDEAKVKIIESITKKKIGYKKTNYKLRDWGISRQRFWGCPIPIIYREDGEILTVEEEQLPIKLPNEKFSEKNTTLKNIEGWSETRCSKTGMKAVRETDTFDTFFESSWYYFRYCNARLNTPFDKEDISYWLPVDQYIGGIEHAILHLLYSRFFTKALRDLGYFKLDEPFKGLFTQGMVTHQTFQNEKKEWVEPKEVKEVDGVFYDRNNNNVKVGKIEKMSKSKKNVIDPKT

SEQ ID NO: 189738 - protein, 96 aa, Unknown
  Bacterial polypetide isolated from the Sargasso Sea
MKVNSPNRYNFKKVEDKWQKTWEKNKTFLSKVDKNKEKFYCLEMFPYPSGKIHMGHVRNYTIGDVLSRYKILKGFNVLHPMGWDAFGMPAENAARE

SEQ ID NO: 189739 - protein, 144 aa, Unknown
  Bacterial polypetide isolated from the Sargasso Sea
MARYNHKITEAKWQKIWEDRGCFQVHEDPERPKYYVLEMFPYPSGRIHMGHVRNYTLGDVVARYKKARGFNVLHPMGWDAFGLPAENAAIENKVHPGKWTRENIAEMRRQLKSMGLSYDWTREFATCEPEYYRHEQKMFLDFLE

SEQ ID NO: 189740 - protein, 290 aa, Unknown
  Bacterial polypetide isolated from the Sargasso Sea
QVVLVDGETFNYHQWQDWYGDKQRGVTINSDSFSGLSYKDAVNAVAHALEQKGLGEKKTTWRLRDWGVSRQRYWGTPIPIIHCDEHGAVPVPEKDLPVVLPQDCIPDGSGNPLHKHEGFHAGVTCPVCGKPARRETDTMDTFVDSSWYFMRYCDPKNADAMVAGGADYWMPMDQYIGGIEHAILHLLYARFWTKVMRDLGLVKVDEPFTKLLTQGMVLNHIYSRRTAKGGKDYFWPHDVEHVLDEGGKIIGAKLKNEATSGDGMLPVGTPIDYEGVGTMSKSRTTVWTPG

SEQ ID NO: 189741 - protein, 261 aa, Unknown
  Bacterial polypetide isolated from the Sargasso Sea
NWDPVDQTVLANEQVIDGKGWRSGAQVERKKLNQWFFNISKFSEQLLDGLDNLPEWPNKVKTMQKNWIGKSFGCEVDFKIEGDLPIKNIKCFTTRPDTLFGFSFLALSVDHPLSKYFENNLKFEKFKKECSKTGTTEESIAQAEKIGFKTNLQAINPMSPKIKVPVYFANFVLMDYGFGAVFGCPAHDQRDFEFAKKYNLKIKTVVKPEDKTDDFQVKDEAFVKNGLIINSSFLNGLKTPGEAIERSIDYLTKNKFREKEN

SEQ ID NO: 189742 - protein, 293 aa, Unknown
  Bacterial polypetide isolated from the Sargasso Sea
SGTTEESIANAEKLGFKTDLVALNPLDKSIKMPVYFANFVLMDYGFGAIFGCPAHDQRDFDFAKKYNLDIKWVIKPENSDDNFKSEKAYTGPGIVFNSKFLDGLKVPEDSIIKSIEHLEKENIGKKKINFRLKDWGVSRQRYWGCPIPIAYDKNNKEIKVPRESLPILLPNKIDLNVKGNPLDSDLKWKSTIIDGKKCHRETDTLDTFVDSSWYFLRFCSAKNKSEGFNQKEIDYWMPVDQYIGGVEHAILHLLYSRFFMQALSYNNNQFKLTEPFQGLFTQGMVCHETYKDK

SEQ ID NO: 189743 - protein, 280 aa, Unknown
  Bacterial polypetide isolated from the Sargasso Sea
NLYNTDEQPSNKEKFYALSMFPYPSGNLHMGHVRNYVITDLIARFQRFQGKVVLHPMGWDAFGLPAENAAIERGINPDKWTKQNIAHMKSQLKLLGLSVDWDREFATCDENYYVWTQFLFLELHKAGLVYQKESEVNWDPIDNTVLANEQVDSEGKSWRSGAIVEKKLLTQWFLKITDYAEELLQDLEKLNEWPERVRIMQENWIGKSIGTNINFKIKEFNKEKIQVFTTRPDTLFGVTYLAISVNHPLNKKISDNKILRKLENLKLYLHETKDKNQKKI

SEQ ID NO: 189744 - protein, 145 aa, Unknown
  Bacterial polypetide isolated from the Sargasso Sea
MNRYNFKSIESKWQNYWEKNKSFKVNTDHNKKKFYCLEMFPYPSGKIHMGHVRNYTIGDVLARYKSLQGYNVLHPMGWDSFGMPAENAAKQNNLDPKKWTETNILNMKSQLKKLGLSIDWDREISTCKKDYYKHQQAFFLDLSKK

SEQ ID NO: 189745 - protein, 245 aa, Unknown
  Bacterial polypetide isolated from the Sargasso Sea
GDVLARYKALKGYNVLHPMGWDSFGMPAENAARQNNLDPKTWTESNIKNMKAQLKKLGLSIDWDREISTCIPEYYRHQQEFFLELYDKGLVYRKEQYVNWDPVDETVLANEQVIDGKGWRSGAVVERKKLNQWFFNISKFSQELLDGLDNLDLWPKKVKTMQKNWIGKSFGCEIDFDVEGELPVKNIKCFTTRPDTLFGFSFLALSVDHEISKFYQKNKDFIKFKQDCSKTGTTEEAIAVGEKIG

SEQ ID NO: 189746 - protein, 277 aa, Unknown
  Bacterial polypetide isolated from the Sargasso Sea
EKCKDIKAAEADIAKAEKLGIDTEIKVIHPLTGEKLPLWIGNFVLLDYGTGVVMGVPGHDSRDYEFATKYELNIKQVIKTKDDDLPITENGILINSDKYDGMTSEEASNGIIKELVKLNSGAHLIQFRLRDWGVSRQRYWGCPIPVVYENGVPKVIEEKDMPIKLPELDKNSPPIPLSQNKEFIDIKDGVIRESDTFDTFMDSSWYHARFTSSNNEDQIFDENTDYWLPVDLYIGGIEHAILHLLYSRFFHKALRDIGLVEGDEPFKKLLTQGMVLK

SEQ ID NO: 189747 - protein, 275 aa, Unknown
  Bacterial polypetide isolated from the Sargasso Sea
ELFIDFYNKGLVVRKETYVNWDPVEKTVLANEQVIDGKGWRSNALVERKKLHQWFFNISKFSNELLEDLNTLKEWPERVKLMQKNWIGKSVGCEIDFKISENDNSVRVFTTRPDTIFGATFLAISADHPLCKSYIKQAKFIEFKKKCSQVGTTEEAIANAEKIGFKTDLEAEHPFIIGKKIPIYVSNFILMDYGTGAIFGCPAHDQRDFDFATKYKIEIIQVVKSKDFEKLKTEKKAFTGDGSIINSDFLNGLTITAAKEKIVKEIEKKKMEKRK

SEQ ID NO: 189748 - protein, 282 aa, Unknown
  Bacterial polypetide isolated from the Sargasso Sea
KSEKVKWLNHFTDIDIATGQEAIDKTIDFAEKNKWGKSVTNYRLRDWGLSRQRYWGCPIPVVHCEACGVVPEKKENLPITLPDNVTFDVSGNPLDRHPTWRKCKCPSCGRQALRETDTMDTFVDSSWYFTRFTSPDSEKPTSKEDVSYWMNVDQYIGGVEHAILHLLYSRFFARAMQITGHLPDTAKEPFDALFTQGMVTHAIYKSVGVDGRDLFHYPEEVEVRDGKAFLIKNNKEVTIIPSAKMSKSKNNVVDPVNIVDTFGADTARWFVPSDSPPERDVE

SEQ ID NO: 189749 - protein, 219 aa, Unknown
  Bacterial polypetide isolated from the Sargasso Sea
RENLPISLPDDVTFDVPGNPLDRHPTWRKCVCPSCGSQALRETDTMDTFVDSSWYFARFTSPKSEKPTSEGDVNYWMNVDQYIGGVEHAILHLLYSRFFCRAMQITGHLPKTAKEPFDALFTQGMVTHAIYKSIGADGRDLFHYPEEVELREGKAYLHTDGKEVDIIPSAKMSKSKNNVVDPVNIVDAFGADTARWFVLSDSPPERDVEWTASGAEAAE

SEQ ID NO: 189750 - protein, 236 aa, Unknown
  Bacterial polypetide isolated from the Sargasso Sea
YCLEMFPYPSGRIHMGHVRNYAIGDVIARYKMMNGHNVLHPMGWDSFGLPAENAARENNLNPREWTQKNISTMKNQLQLLGLSIDWDLEISTCDEEYYKHQQELFIDFYNKGLVVRKETYVNWDPIEKTVLANEQVIDGKGWRSNALVERKKLYQWFFNISKFSDELLKDLETLTNWPEKVKLMQKNWIGKSLGCEINFKIKDTKNKIKIFTTRPDTIFGAYFFSNFSGSSGMRGF

SEQ ID NO: 189751 - protein, 266 aa, Unknown
  Bacterial polypetide isolated from the Sargasso Sea
WYFLRFCSPQNEKYGFSYDDVNYWMPVDQYIGGVEHAILHLLYSRFFMQALSHKNENFDIKEPFKGLFTQGMVCHETYKDDENNWVSPEEITLKDGKKYLKNNLLKEVKVGPSESMSKSKKNTIDPENIINNYGADSVRLFILSDSPPEKDVQWSEEGISASFKFIQKLWNMNTKILNEIKKNHPKDTSSELDKFTNKFIKKINSSLESFSYNIIIASLHEMYSFLIKEIDKNYSQKSLKQNYEKILITMTPIIPHFSNECIEMLE

SEQ ID NO: 189752 - protein, 310 aa, Unknown
  Bacterial polypetide isolated from the Sargasso Sea
FNIKKFEQNLLDELDNLKNWPEKVKLMQKNWIGKSYGCEINFKTDKNDNKITVFTTRPDTIFGASFLALSIDHPLAKKFEKDKKFLEFKSECSKMGTTEEALANAEKIGFNTNLFAFHPLNEKIKLPVYIANFVLMDYGTGAVFGCPAHDQRDLDFANKYNLKVLPVVKPKNIGEKNFSIKDKAFTDDGILFNSDFLNDLTVPEAIEKAIEVISHKKLGVKKITFRLKDWGVSRQRYWGCPIPIVYNTKGEAIPVTKNNLPVMLPEDINLSSQGNPLENHPNWKHVKLDNGEKVTRETDTLDTFCDSSWY

SEQ ID NO: 189753 - protein, 270 aa, Unknown
  Bacterial polypetide isolated from the Sargasso Sea
IGFKTNLQALNPMDPEIKVPVFFANFVLMDYGFGAVFGCPAHDQRDFEFAKKYKLGIKTVVRPKDRGSDFQVKDEAFIDDGVMMNSSFLDGLETPGEAIEKSIEYLTKNNLGNKKINFRLKDWGISRQRYWGCPIPIAYNEKGNIVKVPKEMLPIKLPEKINLNTKGNPLDHQKKWKEIIINGEKCNLDTDTLDTFVDSSWYFLRFCSPENNEYGFDKEDIKYWMPVDQYIGGVEHAILHLLYSRFFMQALGFKNQNFISPEPFQGLFTQ

SEQ ID NO: 189754 - protein, 304 aa, Unknown
  Bacterial polypetide isolated from the Sargasso Sea
KHVDCPSCGKPAERETDTFDTFFESSWYFARFASPQADDIGFTKSAANYWLPVDQYIGGIEHAVLHLLYSRFFTRALRKCGYLNINEPFAGLLTQGMVCHATYRDNDGNWLLPNAVAINDQDALVHHKSGVGVTQGRSEKMSKSKKNVVDPEHIIGTYGADTARLFMLSDSPPERDLDWTDSGIEGAWRYLNRLWRLVEDLDASSSEGVDLDALNVETLDVLRLAHKTIGSVTTDLDRFHFNKAVARLRELTNGIDGLDHAAPGSMSVRQEAVGILVRLLAPDVAALGRGDVGCPGTPKSFLPT

SEQ ID NO: 189755 - protein, 253 aa, Unknown
  Bacterial polypetide isolated from the Sargasso Sea
MVYRKESYVNWDPKDKTVLANEQVIDGKGWRSGAIVERKKLNQWFFKISQFSEELLNDLSSLTEWPEKVKTMQKNWIGKSHGCEIDFKIEGSDKINLIKCYTTRPDTLFGFSFLALSVDHPISKYYESDEDFEQFKKECSKTGTTEESIANATKIGFKTNLLAINPLNPKDKVPVYFANFVLMDYGFGAVFGCPAHDQRDFDFAKKYNLQIKTVVKPLNEDENFNVSNEAYSGPGTLINSEFLNGLKVPEQSI

SEQ ID NO: 189756 - protein, 280 aa, Unknown
  Bacterial polypetide isolated from the Sargasso Sea
SRKETYVNWDPVEQIVLANEQVIDGKGWRSNAIVERKKLSQWFFNISKFSEELLEDLNKLENWPNKVKTMQKNWIGKSFGCEIDFKIKSDLPVSKIKCFTTRPDTLFGFSFLALSIDHPVSKYFSKDPKFIKFKEECSKTGTTEESIAQGEKIGFKTNLLALNPFNEKEKLPVYFANFVLMDYGFGAVFGCPAHDQRDLDFANKYNLEIKTVVRPTDENDSFNVQKEAYTGPGVVINSDFLNGLQAPEESIIKTIEIIEKKKLGKKTTNFRLKDWGISRQ

SEQ ID NO: 189757 - protein, 303 aa, Unknown
  Bacterial polypetide isolated from the Sargasso Sea
VDQYIGGIEHAILHLLYSRFFTKALRDLGYFKLNEPFKGLFTQGMVTHQTFKNSDNEWIEPKDVVKKNSELFDEKNNSVTVGKIEKMSKSKKNVVDPNDIIETYGADTARWFMLSDSPPDRDLEWTENGIQSSHKFINKIWDFVNRYDEYEIEENKSGDTVEKMKKIINDVTNNIENFQFNKSVAKIYEFVNILVEQVSNKSLIKKDYKWSLEKLALLLQPFLPHISEEIWLKIGMEDLCINQIWPVEKLSEKNVKTNIAIQINGKTRSVIIIDNDTKKEKVLEMAREDKNVLKYLGDKKIIR

SEQ ID NO: 189758 - protein, 294 aa, Unknown
  Bacterial polypetide isolated from the Sargasso Sea
QLFFIELFEKGLVYRKQNYVNWDPVDKTVLANEQVIDGKGWRSGAVVERKKLNQWFFNISKFSDDLLEGLKKLDDWPNKVKIMQKNWIGKSFGCEIDFKIQGNLPIEKIKCFTTRPDTLFGFSFLAVSVDHPISKFYENDENFKKFKEECSKTGTTEESIAQGEKIGFKTDLFALNPFNENDKVPVYFANFVLMDYGFGAVFGCPGHDQRDLDFAIKYNLPIKTVVKPDNENDSFSVTSEAYTGSGVIINSKFLNGLKVPDQSIIEAIKIIEEKKLGKKTINFRLKDWGSISSK

SEQ ID NO: 189759 - protein, 243 aa, Unknown
  Bacterial polypetide isolated from the Sargasso Sea
IIINSDFLNGLSAPENSVIETIKILEERKLGKKQINYRLKDWGVSRQRYWGCPIPIMYDEEGNAHPVPKSMLPVKLPENIDLNTKGNPLDNKKDWKQIIVNGKKYIRETDTLDTFVCSSWYYLRFCSPKEKNYGFNQSDLDYWMPVDQYIGGVEHAILHLLYSRFFMRAINYKNDNFKIKEPFENLFTQGMVCHETYKDDDDNWISPDEIFSDDGKNFFTINEKKKIKIGPSESMSKSKKKHS

SEQ ID NO: 189760 - protein, 315 aa, Unknown
  Bacterial polypetide isolated from the Sargasso Sea
NKVKVMQKNWIGKSFGCEIDFKVEGELPINNIKCFTTRPDTLFGFSFLALSVDHEVSKFYKNDPDFIKFKEKCSKTGTTEEAIAVGEKIGFKTSLMATNPLDPKSKVPVFFANFVLMDYGFGAVFGCPAHDQRDFDFAKKYNLNIKTVVKPNGEVDNFQVVDRAYPDPGIIINSNFLNGLVAPEDSVIETIKILEEKKLGKKKINFRLKDWGVSRQRYWGCPIPIAYDEKGNVHPIPKSMLPVKLPENIDLNVKGNPLDSQKNWKEIVINGKKLTRETDTLDTFVCSSWYYLRFCSPKEKGYGFNKDDIKYLDAS

SEQ ID NO: 189761 - protein, 182 aa, Unknown
  Bacterial polypetide isolated from the Sargasso Sea
MSRYNFKTIETKWQNFWEKNKSFQVEVNLKKKKFYCLEMFPYPSGKIHMGHVRNYTIGDVLARYKALQGYNVLHPMGWDSFGMPAENAAKQNNLDPKIWTETNIKKMKIQLKKLGLSIDWDREISTCNEDYYKHQQNFFLELLEKKLVYRKENYVNWDPVDETVLANEQVIKGKGWRSGAAV

SEQ ID NO: 189762 - protein, 248 aa, Unknown
  Bacterial polypetide isolated from the Sargasso Sea
RYWGCPIPMIHLKNGEVVPVDKSELPIKLPKDVDLSLKGNPLENHPTWKKTIHKKTGEFATRETDTLDTFVDSSWYFIRFCSPKLKDKPFDKEAFSYWMPVDQYIGGIEHAILHLLYSRFFMRAIKLNDKKIKIKEPFKGLFTQGMVCHETYKNEKGDWLSPEDIKKTDKSKINVGPPEAMSKSKKNVVDPESMIKIYGADAIRWFMLSDSPPDRDIQWSNEGVSSAHKFIQKLWSTNRKILERKDKN

SEQ ID NO: 189763 - protein, 286 aa, Unknown
  Bacterial polypetide isolated from the Sargasso Sea
RGWRSGALVEKKKLSQWFLKISKYSEELLKDLDSLTNWPNKVKVMQSNWIGKSIGAEINFKLSNQENFIKVFTTRPDTIFGATFLALSTEHELSTDISKDNKDLQKFIKECEGLNPDKIKKGFDTGLFVNHPFIKDKKLPIYIANFVLKEYGLGAIFGCPAHDQRDLDFAKEYGLDVTPVVKPNNIIESEFKIKDEAFTEDGVIINSDFLNGLVVEKAKDKIIEQIEKNKIGRKKINYKLRDWGISRQRFWGCPIPIIYREDGEIIAVEDSELPVKLPDIKKFNET

SEQ ID NO: 189764 - protein, 297 aa, Unknown
  Bacterial polypetide isolated from the Sargasso Sea
IMYDEKGTPHLIPDDHLPIKLPTDISFKKTGNPIKTSKEHQSITIDGKNYSKETDTMDTFFDSSWYFLRYCDAKNSSLPFESTKANHFLPVDFYIGGIEHACLHLLYARFFTKALRDLNLHAVTEPFKTLICQGMVLKDGAKMSKSLGNTVDPDSIINKYGADTARIFILFGAPVEKDLEWSSDGVEGSFRFLKRFFNYTANHTHYPINPNDVNQLNKHCNKVIKKVTNDITNFQFNTAISQLMELINTISKIGTTLEVAKKMAILIAPFAPFIAENIWQELNQSGSVHEQNWPTYD

SEQ ID NO: 189765 - protein, 319 aa, Unknown
  Bacterial polypetide isolated from the Sargasso Sea
IDFSILKSENISSQKLKIFTTRPDTIFGATFCAISPNHPLAIEIKKTNTEVKNFISRIEKNDEKINIDEKLGIDSGIKVKHPVKTNSELPVYIANFVLMEYGSGAIFGCPAHDQRDLEFANKYKLDVIPVVMPKNEKVDSFSIKNQAFVEDGILINSEFLNGLSVEQAKKTINEKLVKDGSAKYKTNFRLRDWGISRQRYWGCPIPIIYREDGKVLPVKEKELPVLLPQNISLTGKGNPLGQNKDWKKTICPETGMAATRETDTFDTFFESSWYFLRYCSPRSKEAFEKKSLNYWMPVDPYIGGIEHAILHLLYSRFFT

SEQ ID NO: 189766 - protein, 140 aa, Unknown
  Bacterial polypetide isolated from the Sargasso Sea
MKKYNPDVVEKKWQKIWNEKDIFASEIDYNKPKYYVLEMFPYPSGDIHMGHVRNYTLGDLVARYKRAQGYNVLHPMGWDAFGLPAENAAIENDIHPNLWTKSNISKMKDQLKKMGLSYDWNRELSTCDPNYYKHEQKMFL

SEQ ID NO: 189767 - protein, 272 aa, Unknown
  Bacterial polypetide isolated from the Sargasso Sea
KKINFRLKDWGVSRQRYWGCPIPIIYDENGSYKTVPEEQLPIKLPQNINLNTKGNPLSNTEEWRKIKVDGKIYYRETDTLDTFVDSSWYYLRFCSPKNKEEPFDNEEVKYWMPVDQYIGGVEHAILHLLYSRFFMRAISYQNNEFKLKEPFKGLFTQGMVCHETYKDQENNWRSPDEVTTKDGKNYFLKSDNSNKIFVGSSESMSKSKRNTIDPEKIINLYGADAVRFFILSDSPPEKDVQWSEQGMLSSYKFIQKLFVLNEKIKELNNQKK

SEQ ID NO: 189768 - protein, 282 aa, Unknown
  Bacterial polypetide isolated from the Sargasso Sea
MGHVRNYTIGDVIARYKYLNGFNVLHPMGWDSFGLPAENAARLNNLNPKTWTEENIQAMKKQLKMLGLSIDWDLEVSTCNKDYYKHQQELFIDFYNAGLVSRKETYVNWDPIEKTVLANEQVINGKGWRSNAIVERKKLSQWFFNITKFSDELLKDLENLDGWPEKVKLMQKNWIGKSIGCELDFKIESLKKNLRIFTTRPDTIFGASFIAISTDHDICKNFNKSSEFKEFQDKCSKIGTTEEAMANAEKLGFKTNLFAEHPFVKNKKLPIYVANFVLMDYG

SEQ ID NO: 189769 - protein, 251 aa, Unknown
  Bacterial polypetide isolated from the Sargasso Sea
LAVSVDHPISKHFLKDPEFIKFREECSKTGTTEESIALGDKIGFKTNLLAINPLDKKQKVPVYFANFVLMDYGFGAIFGCPAHDQRDLDFANKYKLRVKTVVKPIDEDDNFIVQKEAYTGPGVVINSEFLNGFKVPDESIIKTIAILEEKKIGKKKINFRLKDWGVSRQRYWGCPIPMAYDKNGKVFPIPKNNLPVKLPENIDLKSKGNPLDSANEWKKIIINGKELTRETDTLDTFVDSSWYFIRFCSPK

SEQ ID NO: 189770 - protein, 293 aa, Unknown
  Bacterial polypetide isolated from the Sargasso Sea
DKTVLANEQVIDGRGWRSGAVIEKKNLSQWFLKTSNYSEELLSDLNSLDMWPQKVKIMQSNWIGKSEGVEISFSITGNGALKQNYIKVYTTRPDTIFGATFIAISPEHELSKKIFEEDSAAKKFSDQIKKVDADKTKVGYSTNVFVQHPFLDKKLPVFIANFVLMDYGLGAIFGCPAHDQRDLDFALKYNLDVIQVVENKNSKKSFKLKNEAMLESGTMINSDFLNGLDSELAKKEVLNRLEKKGIGNKKINYKLRDWGVSRQRHWGCPIPMLYREDGEIVPVQEGDLPVLLP

SEQ ID NO: 189771 - protein, 231 aa, Unknown
  Bacterial polypetide isolated from the Sargasso Sea
MPKYNPSVIEPKWQIWWAEQKTFRSPRLPSGKKAYILDMFPYPSGDGLHVGHPEGYTATDIVSRFERMRGTSVIHPMGFDAFGLPAEEHAIRTGTPPRESTERNIATFRRQLQMLGFSYDWERETSTTDPEFVRWTQWIFLLLYDTWFDADRQQGRPISDLPIPEDVQESGEEAVNSYRDDHRLAYQSEAPVNWCPELGTVLANEEVIGGLSERGGHPVVRLPLRQWMLRI

SEQ ID NO: 189772 - protein, 263 aa, Unknown
  Bacterial polypetide isolated from the Sargasso Sea
KTKKKFYCLEMFPYPSGKIHMGHVRNYTIGDVLARYKSLQGYNVLHPMGWDSFGMPAENAAKQNNLDPKNWTETNIAKMKSQLKKLGLSIDWDREISTCSENYYKHQQKFFLELLKKKLVYRKENYVNWDPVDETVLANEQVIDGKGWRSGANVERKKLSQWFFNISKFSQDLLDGLDKLEEWPNKVKTMQKNWIGKSFGCEIDFKIEGDLPVKNIKCFTTRPDTLFGFSFLALSIDHEVSNFFKDDKNFIKFRDECSKTGTT

SEQ ID NO: 189773 - protein, 313 aa, Unknown
  Bacterial polypetide isolated from the Sargasso Sea
KFYENDKDFINFKKECSKTGTTEEAIAVGEKIGFKTSLVAINPINPSQKVPVYFANFVLMDYGFGAVFGCPAHDQRDFDFAKKYNLEIKTVVRPFDKNENFKVDTEAYSGPGILINSDMLNGLEAPDTSVLETIKVLEKKNIGKKQINYRLKDWGVSRQRYWGCPIPVAYDDEGNVHPLPKSMLPVKLPENINLDTKGNPLDNQNSWKEIQINGKKLIRETDTLDTFVCSSWYYLRFCSPNNKEYAFDKTEVDYWMPVDQYIGGVEHAILHLLYSRFFMRAINHKNEDFKITEPFQSLFTQGMVCHETYKDEN

SEQ ID NO: 189774 - protein, 280 aa, Unknown
  Bacterial polypetide isolated from the Sargasso Sea
LGKININGKDLNRETDTLYTFVDSSWYFLRFCSPGTKGYGFDYDDIKYWMPVDQYIGGVEHAILHLLYSRFFIKALNFKNKKFDLKEPFKGLFTQGMVCHETYKSQDNTWLNPEEVDTNDGKKFFLKKDPKKKVIVGSSESMSKSKKNTIDPEMIIKNYGADAVRLFILSDSPPEKDIQWSEQGMTASYKFVQKLWLLHIKIKEKINLKINSNNKSNELSKFTNQLIDKVTKNLEKFNYNVIIANFYETYNFIYKKLDQIENSKDLLINYKKILYLMLPV

SEQ ID NO: 189775 - protein, 261 aa, Unknown
  Bacterial polypetide isolated from the Sargasso Sea
EDINFSLPGNPLDNHPTWKYTKCPHTGMNAIRETDTLDTFVDSAWYFLRFCSPANPNAPFNDDEINYWMPVDQYVGGVEHAILHLLYSRFFTKALKIKNIDEPFKSLFTQGMVCHNTYQNESKAWVYPEDLEKRDGEFYQVSTGEKVQEGPIESMSKSKKNVIDPQSIIESYGADSARWFMLSDSPPEKDINWSESGINGAWKICQKIWSIVNLYKELLKLPNENEDYSKNGHELIKVFHQNLHSITNSLENFQMNVAIAK

SEQ ID NO: 189776 - protein, 225 aa, Unknown
  Bacterial polypetide isolated from the Sargasso Sea
MNEYKFQEIESKWQKHWSDNNSIKCDITSVDKNFYNLCMYPYPSGDLHMGHIRNYTIGDVITRYKMMNGFNVLSPMGWDSFGLPAENAAIQTGIHPKTFTEERISNMKDQIIRLGSLYEWDREVAAHSKDYYKWTQFIFVKLFKNNLAYKKDAPVNWCNSCKTVLANEQVIEGNCDRCDAIVDQKNLNQWFLKISDYSDELLDGLNEIGDWPENVKAMQQNGWKI

SEQ ID NO: 189777 - protein, 277 aa, Unknown
  Bacterial polypetide isolated from the Sargasso Sea
KVSYRLRDWLISRQRYWGCPIPVIHCDDCGAVPVPEEQLPVELPADAELGASGGSPLERHPTWSMVACPRCGKPARRETDTMDTFMCSSWYYLRYTDAANSEQPFSIEATKAWMPVDQYVGGVEHAILHLLYSRFFTKVLHQRGLVECCEPFARLLTQGMVQGITYRNPTTRRYVAPASVSDPQQPLDPETGEALDVFFEKMSKSKYNGVDPGTVVDRYGADTARMFILFKAPPEKDLEWDDADVEGQYRFLQRIWRLCAAAQESGLSIAEPLPLPS

SEQ ID NO: 189778 - protein, 294 aa, Unknown
  Bacterial polypetide isolated from the Sargasso Sea
MGHLRCYTLGDVVARYKRAQGFNVLHPMGWDAFGLPAENAAMEKGVHPASWTHENIATMRKQLQAMGLSIDWSREFATCDPAYYRHEQALFIDFLDKDLVYRQDGWVNWDPVDNTVLANEQVIDGKGWRSGAPIERRRLSQWFGRITAFSDELLSALDTLNRWPSKVRAMQENWIGRSEGAYIEFAFTKPRAQGLRVYTTRPDTIFGASFCAIAADHPLAEELAAKDADAAAFIETCRQLGTSEEAIQTADKRGYDTGLRVKHPFAEGVKLPVYIANFVLMGYGTGAIFGCPAH

SEQ ID NO: 189779 - protein, 238 aa, Unknown
  Bacterial polypetide isolated from the Sargasso Sea
MERYNFKKIEMKWQNFWSKNKSFKTKIDPNLKKFYCLEMFPYPSGKIHMGHVRNYTIGDVLSRYKSLQGYNVLHPMGWDSFGMPAENAARENNLHPKDWTEKNISIMKDQLQSLGLSIDWDREISTCDERYYKHQQEFFIEMYEKGLIYRKENYVNWDPVDKTVLANEQVIDGKGWRSGALVERKKLNQWFFNISKFSNELLENLNSLDNWPKKVKIMQANWIGKSFGCEINFKINGN

SEQ ID NO: 189780 - protein, 281 aa, Unknown
  Bacterial polypetide isolated from the Sargasso Sea
TQKNIATMKRQLYSLGLSIDWDLEISTCDPNYYKHQQSLFIDFYNKGLVVKKETYVNWDPVEQTVLANEQVINGKGWRSNAIVVRKKLSQWFFNISKFSEELLEDLNSLSEWPEKVKLMQKNWIGRSVGCEIDFQIEGQEKVKIFTTRPDTIFGATFLAVSIDHPICKNFSNEDNFLKFKNKASQVGTTEEAIANAEKIGYDTGFKAKHPFIKNKSIPVYVANFILMDYGTGAIFGCPAHDQRDYDFAKKYKIEIIKVVKPRENHEIVQANKAFDGDGSMI

SEQ ID NO: 189781 - protein, 250 aa, Unknown
  Bacterial polypetide isolated from the Sargasso Sea
TRPDTIFGATFLALSPEHWLSKEISKNNQSLQKFIKECEVSNSEKNKRGFNTNLFTDHPFIEGKKIPIYVANFVLTEYGLGAIFGCPAHDQRDLDFANEYGIDVIPVVKPINIDIKNYKITDNAYTEDGIIINSKFLNGLTVEAAKEKIINEIVNSKIGRKKVNFKLRDWGISRQRFWGCPIPIIYREDGEILAVEDENLPVRLPDIQNFNESSSALNNIPEWKETVCPKTGMKAIRETDTFDTFFESSW

SEQ ID NO: 189782 - protein, 157 aa, Unknown
  Bacterial polypetide isolated from the Sargasso Sea
MNYKHKDIESKWQKYWDDNKTFKAIEDTDKEKFYILDMFPYPSGSGLHVGHPLGYTATDIYSRYKRLQGYNVLHPMGWDAFGLPAEQYALKTGTHPRETTEKNIDRYRQQLKMLGFSYDWDREINTTEPSYYKWTQWIFLQLYKKGLAYEAEVPVNW

SEQ ID NO: 189783 - protein, 247 aa, Unknown
  Bacterial polypetide isolated from the Sargasso Sea
MQFSVDKDTGGEPIPIYYRNSEPVALSISDLPLELPEVDNFLPTKNGDSPLGNSKKWAWDLKNKTVVENNLINDRDIFPLELNTMPGWAGSSWYFYRYMDSANKDFFASKEAIDYWKGVDIYLGGSEHATGHLLYSRFYQKFLFDLNILPINEYASKLINQGMILGNSSFIYRERGTNKFYSKDLIKDKNVDKIRIDISYVDIDNYLYVDKLKKSDKSFSDSEFYSENGKFIVEREHEKMSKSKFNV

SEQ ID NO: 189784 - protein, 289 aa, Unknown
  Bacterial polypetide isolated from the Sargasso Sea
KKYYILEMFPYPSGKIHMGHVRNYTLGDVIARYKRAKGFNVMHPMGWDAFGLPAENAAKENNISPKNWTYENIATMKNQLKQMGLSLDWSRELATCDERYYHQQQKLFLEFYKKNLIYKKESLVNWDPVENTVLANEQVIDGKGWRSGADVEQKKLQQWFFKITDYAEELLTSLDLMNKWPEKVKTMQKNWIGKSVGCEINFQLSSNEYNLKTSSLEIFTTRPDTIFGATFCALSPFHPLVDEIIEANIQIKREVIELRARKINEESISKDEKIGVNTGIFIDHPFIKK

SEQ ID NO: 189785 - protein, 313 aa, Unknown
  Bacterial polypetide isolated from the Sargasso Sea
EQVIDGKGWRSGAVVERKKLNQWFFNISKFSQDLLDGLSDLDTWPNKVKIMQKNWIGKSYGCEIDFKIEGDLTVKNIRCFTTRPDTLFGFSFLALSVDHELSKFYKDDKEFIKFKEECSKTGTTEEAIAIGDKIGFKTNLMAINPLNSSQKVPVYFANFVLLDYGFGAVFGCPAHDQRDFDFAKKYDLEIKTVVRPKDKNENFKVADEAYSGPGILVNSDFLNGLEAPNNSVLETIKILEKRKLGKEKINFRLKDWGVSRQRYWGCPIPVAYDEDGNVHKIPKSMLPVKLPENIDLSVKGNPLDNQKNWKEIL

SEQ ID NO: 189786 - protein, 291 aa, Unknown
  Bacterial polypetide isolated from the Sargasso Sea
WFFNISKFSQNLLDGLDKLEAWPNKVKIMQKNWIGKSFGCEIDFKIEGDLPINKVKCFTTRPDTLFGFSFLALSVDHEISKFYKDNINFIKFKEECSKTGTTEEAIAVGEKIGFKTNLMAINPLNPKHKVPVYFANFVLMDYGFGAVFGCPAHDQRDFDFAKKYDLEIKTVVRPHDKEKNFKVVNEAYPGPGILINSDFLNGFEAPDNSVIETIKILEEKKLGKKQINFRLKDWGVSRQRYWGCPIPIAYDEDGKAYPIPKSMLPVKLPEKINLNVKGNPLDNQKDGRKLL

SEQ ID NO: 189787 - protein, 262 aa, Unknown
  Bacterial polypetide isolated from the Sargasso Sea
MNKDYQPANIEKIAQAVWETNTSSKVDFSTSVNKYYVLSMFPYPSGKLHIGHVRNYTIGDVITRSNKMIGKNVFQPMGWDAFGLPAENAAIKNNVHPEEWTKKNIAHMKGQLKNIGILYDWENEVSTADPKYFRWEQWFFLQLLKKGLVYRKLSEVNWDPVDNTVLANEQVIDGRGWRSGALVERKEIPQWFLKITDYSDVLLKDLDKLSDWPESVKLMQKNWIGKSKGLNINFKLEGNDQLLITFTTRPDTLFGVSYLAIN

SEQ ID NO: 189788 - protein, 291 aa, Unknown
  Bacterial polypetide isolated from the Sargasso Sea
FFDSSWYYARFLSQGDTKHLLNPELKTSLPVDIYIGGIEHAILHLLYARFVNMFLHNIGLSNSKEPFKEMITQGMVLKDGAKMSKSKGNIVTPSELHTKYGADAIRLFILFAAPPTQSLEWSDAGIEGMQRFLKKVHHYFTNPSKALNTENPTAWTESQKILKQITADYEKRQLNTTVAGAMKLFNILTEQKDRTRTHEKIEKIFLTVMKPIAPHMAIYCSDAIGFEITSWPSVDQKALDQAQIEISIQINGKMRGKVKANSQSTENDILEIARKNPTISKYLYEKEIKKV

SEQ ID NO: 189789 - protein, 114 aa, Unknown
  Bacterial polypetide isolated from the Sargasso Sea
GLPAENAAITEKKHPKEWTYKNIETMKKQLLRMGLSLDWDREIATCHPDYYKHEQKFFIDLFNAGLAYKKESEVNWDPVDKTVLANEQVIDGKGWRSGALVEKKKLSQWFLKIS

SEQ ID NO: 189790 - protein, 290 aa, Unknown
  Bacterial polypetide isolated from the Sargasso Sea
LALSIDHEISKFYKENNDFIKFKDECSKTGTTEEAIAVGEKIGFKTNLKAVNPFNPDQKVPVYFANFVLMDYGFGAVFGCPAHDQRDFDFAKKYNLDIKTVVRPSDKSDDYKVADQAYPGEGVLINSDFLNGLEAPNQSVIKTIEILEKKKLGSKTINFRLKDWGVSRQRYWGCPIPVAYDENGEIHKIPDSMLPVKLPQNINLNVKGNPLDHQEDWKEIIIDGKKLIRETDTLDTFVCSSWYFLRFCSPTESQYGFKEEDIKYWMPVDQYIGGVEHAILHLLYSRFFMR

SEQ ID NO: 189791 - protein, 267 aa, Unknown
  Bacterial polypetide isolated from the Sargasso Sea
MSFLAVSIDHPVSEFFSNNEDFIKFKKECSKTGTTEESIAAAEKLGFKTDLLAINPLDETKKVPVYFANFVLMDYGLGAVFGCPAHDQRDLEFALKYNLEVIPVVTPEKNKNITIKNKAFTDSGYLFNSKFLNNLKVPEESIPQTIDYLEKENIGQKKTNFRLKDWGISRQRYWGCPIPIAYDENNNPIKIPKNMLPVKLPEVNNLNTKGNPLDEIEDWKNIKIDGKKYKRETDTLDTFVDSSWYFLRFCSPKNDSYGFKEEEIKYW

SEQ ID NO: 189792 - protein, 312 aa, Unknown
  Bacterial polypetide isolated from the Sargasso Sea
NTMPQWAGSCWYYLRYLDPSTDEKAWDSEKEKYWMPVDLYIGGAEHAVLHLLYSRFWHHVLFDLGLVSTKEPFKKLFNQGMILGQDGSKMSKSRGNVINPDETVETYGSDSMRIYEMFMGPLDKAKPWSTTGLQGCSRFIKKLWSILVDDEGVLSSNVTDKKDGKETLQALNMMIKKISDNLDQMQFNTCVSEFMIFTNHIQKLDSINIDTIRSFIIIMNPFMPHLAQELWELIGETNELTYQAWPDYDKDLAISDEIVIPIQINGKRRSEILISANESESEVISKAKSDDKIASYLINTTIIKEIYIKGKI

SEQ ID NO: 189793 - protein, 238 aa, Unknown
  Bacterial polypetide isolated from the Sargasso Sea
MSEKYNPRVIEKKWQSFWTDNNLFASKVIKGQKKYYILEMFPYPSGKIHMGHVRNYTLGDVIARFKRAQGFNVMHPMGWDAFGLPAENAALENNISPKSWTYENISTMKNQLKQMGLSLDWSRELATCDEIYYHQQQKLFLNFYKNKLIYKKESLVNWDPAENTVLANEQVIDGKGWRSGAEIEQKKLSQWFFKITDYAESLLKSLDNMRDWPEKVKIMQKNWIGKSTGCEIDFEIVS

SEQ ID NO: 189794 - protein, 280 aa, Unknown
  Bacterial polypetide isolated from the Sargasso Sea
MKNRIPYNPSLIEPKWQKKWKDSKIYTVDLDSKDKKNYFSLTMFPYPSGDLHIGHWYAFTPADSYSRFKKMKGFNVLHTQGFDAFGLPAENAAISRNINPMKWTFDNIDNMRGQFNLMGNSYDWTRELITCTPEYYKWNQFFFLKMYEKGIAYRKNGAVWWDPIDQTTLANEQVVEGKSERSGADVVRKMMPQWYFKITDYAEELLEMDDLGWPEKIKHMQRNWIGKSLGTDVDFKLQKGNKIISTFTTRVDTIFGVTFIVLAPEHDLINEVTTEEYKEK

SEQ ID NO: 189795 - protein, 309 aa, Unknown
  Bacterial polypetide isolated from the Sargasso Sea
LYSRFIIKALNSINEINIKEPFKGLFCQGMVCHKTYKDQSGRWVFPEDVIKKNNQLIHKTTGKKVFEIKSEKMSKSKKNIVDPVSIIENYGADTARIFMLSDSPPERNLDWSTSGIEGSRKFIVKVWIFFKRLKFNEKDIDKNTSFENDQPSDLTRQLHLCIEKVTKSLDNFQYNVAVASLREFANYFFSIKNEDNIKGLHKALSNWVIMISPLAPHLAEELWRTLGYKSLVAEQMWPKYENKFFIEDNINLIIQINGKKKLVMNVKKGLTKEQTQRAALNNSTIKKIIGGKTYKKIITIPDRIVNLVF

SEQ ID NO: 189796 - protein, 303 aa, Unknown
  Bacterial polypetide isolated from the Sargasso Sea
MHLLYARFFTKALRDNDLFEIDEPFKKLLTQGMVQAAAYKNNKTGKYVSPSDITDLSNPKDPIDNSKLEVLFEKMSKSKYNGIDPESVIKKYGADTARMFILFKAPPEKDLEWGDTDVEGQFRFLSRIWKLYINCAKDINSKSKSYPDKEKTLIKSMNIAIKEISNDILNNQFNTAISELMKFYNSLSNSINDVNNNLKKDALKTFCILLAPFAPHISEEIWYLIGFKNSVHLENWPSFNAEALKEDSYELVIQVNGKVRDKININNEMNEDQIKELTLKRPNILKWTNDKEIRKIIIVKGKL

SEQ ID NO: 189797 - protein, 203 aa, Unknown
  Bacterial polypetide isolated from the Sargasso Sea
MERVNFQSLEKKWSNYFLKQKLYQENKTAKKFYCLEMFPYPSGKIHMGHVRNYTIGDVIARYKFLNGYSVLHPMGWDSFGLPAENAAKQNNLNPKDWTKKNISQMKAQLMMLGLSIDWDLEVSTCDENYYKQQQELFIDLYNNGFVSRKENYVNWDPVEKTVLANEQVINGRGWRSNALVERKKLSQWFFNITKFSEEVNLRS

SEQ ID NO: 189798 - protein, 293 aa, Unknown
  Bacterial polypetide isolated from the Sargasso Sea
MERYNIKNVEKKWQDYWSKKKTHTSKIDKNKKKFYCLEMFPYPSGKIHMGHVRNYTIGDVLARYKKLQGFNVLHPMGWDSFGLPAENAARENNLHPKAWTEKNIETMKKQLKLLGLSLDWDREISTCDPEYYKHQQEFFIELFEKKLVYKKDTYVNWDPAEQTVLANEQVIDGKGWRSGVAVERKKLSQWFFNIKKFSQNLLDELEKLENWPDKVKLMQKNWIGKSFGCEINFQMEKIVKDKYGELTKQIKVFTTRPDTIFGASFIALSIDHPIAKNFEGNKDFIKFKSECSK

SEQ ID NO: 189799 - protein, 141 aa, Unknown
  Bacterial polypetide isolated from the Sargasso Sea
HSFTPLVAACMESFNALDRFEHGNDPGRIGVMREVLGILIRVLAPITPHVSHVLWGELKMLGDLLDAPWPEVDQEALTSATQMLAVQINGKLRSQVEIDAEADEDRIRDAVLADEKVARHVGDKPVRKVIVVPGKLVNVVV

SEQ ID NO: 189800 - protein, 124 aa, Unknown
  Bacterial polypetide isolated from the Sargasso Sea
MNKVDVKEIDKKWQNFWLKNKGSFNSTEKKKKFYCLEMFPYPSGKIHMGHVRNYTIGDVLARYKSMCGFNVLHPMGWDSFGMPAENAARENKLDPKDWTKKNIATMKKQLQSLGLSIDWDLEIS

SEQ ID NO: 189801 - protein, 199 aa, Unknown
  Bacterial polypetide isolated from the Sargasso Sea
VFNKIEKKWQNIWSEKKVKKKKNQKKFYCLEMFPYPSGKIHMGHVRNYTIGDVIARHKIMKGFDVMHPMGWDAFGLPAENAAKENNLNPKEWTFQNIETMKKQLQMLGFSIDWDREISTCKEDYYKQQQSLFIDLYKNDLVGRKETYVNWDPVEKTVLANEQVIDGKGWRSNQPVERKKLNQWFFKITKFSEELLNDLK

SEQ ID NO: 189802 - protein, 316 aa, Unknown
  Bacterial polypetide isolated from the Sargasso Sea
NTDKEKKFYCLEMFPYPSGKIHMGHVRNYTIGDVLARYKAMCGFNVLHPMGWDSFGMPAENAARENKLDPKEWTKKNIATMKRQLQSLGLSINWELEISTCDEEYYKHQQSLFIDLYNKGLVIRKETYVNWDPIDKTVLANEQVINGRGWRSNAVVERKKLSQWFFNISRFSDELLEDLKTLDQWPDKVKLMQKNWIGKSIGCEIDFEVEGKEKIKIFTTRPDTIFGATFLAVSVDHPLCKNFEDKRDFVKFKKEASQVGTTEEAIANADKIGFDTGFRAKHPFIKNKTIPVYVANFILMDYGTGAIFGCPAHDQR

SEQ ID NO: 189803 - protein, 285 aa, Unknown
  Bacterial polypetide isolated from the Sargasso Sea
PMGWDSFGLPAENAAKENNLNPKDWTKKNIATMKHQLQLLGLSIDWSLEISTCDEEYYKHQQELFIDFFNKGLVIRKETYVNWDPVEKTVLANEQVIEGRGWRSNALVERKKLHQWFFNISKFSEELLEDLKTLKEWPERVKLMQKNWIGKSVGCEIDFKVENEKKFIKVFTTRPDTIFGATFLAISVDHPICEKFKNSQDFSEFRKKCSEVGTTEEAIANAEKLGFKTGLFAEHPFIKEKKIPIYVANFILMDYGTGAIFGCPAHDQRDFDFAKKYKLEIIEVV

SEQ ID NO: 189804 - protein, 255 aa, Unknown
  Bacterial polypetide isolated from the Sargasso Sea
ENAARENQLDPKDWTEKNIENMKSQLKKLGLSIDWDREISTCRSEYYKHQQMFFLELYDKGLVYRKENYVNWDPVDQTVLANEQVIDGKGWRSGAIVERKKLNQWFFKISNFSDDLLKGLEKLDDWPNKVKIMQKNWIGKSFGCEIDFKIEGDPSIENIKCFTTRPDTLFGFSFLALSVDHPIAELYKNQSEFKKFKDACSKTGTTEESIAQAEKIGFKTNLMALNPLDKNKKVPVYFANFVLMDYGFGAVFGCP

SEQ ID NO: 189805 - protein, 259 aa, Unknown
  Bacterial polypetide isolated from the Sargasso Sea
AEIDFRIYNNDKKITVFTTRPDTIFGATFIALSTEHELVINISKKNNDLKKFIKDCENLNHEKEKKGFNTGLLVEHPFIDGKKIPVFVANFVLKEYGLGSIFGCPAHDQRDLDFANEYNLEVITVVKPNNVKEDSFNVSVEAYTDDGTIINSKFLNGFNVEEAKIRIINEIESKKIGRKKINFKLRDWGISRQRFWGCPIPIIYREDGKILPVEEKELPVKLPEIEKFNESSSALNNISGWKETKCPKTGMKAFRETDT

SEQ ID NO: 189806 - protein, 109 aa, Unknown
  Bacterial polypetide isolated from the Sargasso Sea
MQEYVPKEIESKWQKYWEDHNLLDFDFDSENPKYYMLTMLPYPSGDLHIGHWYAMAPSDCYARFMKMKGYEVFFPIGFDAFGLPAENAAIKNNIHPKSWTYANIKRMQK

SEQ ID NO: 189807 - protein, 254 aa, Unknown
  Bacterial polypetide isolated from the Sargasso Sea
YGTGAIMAVPGHDERDYEFARKFDLPIVEVVSGGDIEKEAHIDTKDGAMINSSNDFGLNLNGMKVSEAISTTIEWLESNKKGEKAIQYKLRDWLFSRQRYWGEPMPIIHGDNGEIIPLNDSDLPLTLPEVDKYEPTGTGESPLAGIDDWVNTNSGKRETNTMPQWAGSCWYYLRFIDPLNDRAAWDKDKEKYWMPVDLYVGGVEHAVLHLLYSRFWHHVLYDLDLVSTKEPFKKLYNQGMIGGEDGQKMSKSRG

SEQ ID NO: 189808 - protein, 259 aa, Unknown
  Bacterial polypetide isolated from the Sargasso Sea
GYNTNIFVEHPFLDKKIPLFIANFVLMDYGLGAIFGCPAHDQRDLDFALKYKLDVIQVVEPSKSEKKFSKIKSDAILDNGLMINSGFLDGLDNEKAKTEVVKKLENEGIGNKKINYKLRDWGISRQRYWGCPIPIIYREDGSVVPVQKKDLPVLLPVLSQNNPSPTKEQVEEWKSTTCPTTGMKAIRETDTFDTFFESSWYFLRYCNPRSDKPFVKEDVNYWLPVDQYIGGIEHAILHLLYSRFFTKALRDLGFVDINE

SEQ ID NO: 189809 - protein, 299 aa, Unknown
  Bacterial polypetide isolated from the Sargasso Sea
IAPDHPIAKSLANNNKELQNFISECNQIGTSEEALEKAEKKGFDTSIKVFHPFEEGQKLPVFVANFVLMSYGTGAIFGVPAHDQRDLDFANKLKLPVKIVVKDKKNNTDKIDTIAYTGDGEIINSGMLNGMNVHKAKSQVIELAESKKIGKKSKQFRLHDWCASRQRYWGCPVPIVLCDDCGIVPVPKSDLPVLLPDDVTFDKIGNPLDHHKKWQTVNCPECNKPAKRETQTFDTFVDSSWYALRYPAPKSKEPIDKKEMLKWSPPDQYVGGIEHAILHLLYSRFFNRGLKKTKYVNFD

SEQ ID NO: 189810 - protein, 326 aa, Unknown
  Bacterial polypetide isolated from the Sargasso Sea
TSKDLNKKKYYVLEMFPYPSGKIHMGHVRNYTLGDVIARYKKMRGFNVLHPMGWDAFGLPAENAAITERKHPENWTYQNIKTMKNQLLKMGLSLDWEREIATCHPEYYKHEQKFFIDMFKAGLAYKKEAEVNWDPVDKTVLANEQVIDGRGWRSGAIVEKKILSQWFLKISKYSDELLNDLDKLENWPNKVKIMQSNWIGKSIGVEINFKISNEKSDITIFTTRPDTIFGATFLAISIDHDLAIRNSSVNSNLKKFIDECKGLNHEKIKRGFNLGLTADHPFIQGKKIPVFVANFVLKEYGLGAIFGCPAHDQRDLDFANQYKLDV

SEQ ID NO: 189811 - protein, 286 aa, Unknown
  Bacterial polypetide isolated from the Sargasso Sea
GLGAVFGCPAHDQRDLDFANKFNLDIKMVVEPEDKNLRKITDRAYVGSGKIINSDFLNGLSVDSAKNKIVEYLEKNQLGSKKINYKLRDWGVSRQRYWGCPIPVIYREDGQIIPVPKKDLPVCLPESNNNGGLITSLKNLNDWKTTKCPDTGMLAIRETDTFDTFFESSWYFLRFCNPRLNAPIDKDEINYWLPVDQYIGGIEHAILHLLYSRFFTKALRDMGYIKLSEPFDGLFTQGMVTHRTFKNEKGDWIEPSKVVYKNDTFFDDIGELIKGGNTEKMSKSKK

SEQ ID NO: 189812 - protein, 311 aa, Unknown
  Bacterial polypetide isolated from the Sargasso Sea
CNEQVIDGKGWRSGALVEKKKLSQWFLKISKYSDELLKDLEKLKNWPNKVKIMQSNWIGRSVGAEINFELTENSKKIKIFTTRPDTIYGATFIALSPEHEISVNLSKKNKSVNNFINECKKTNPDKIKKGFDTSLFVHHPFIKGKKIPVFIANFVLVEYGLGAIFGCPAHDQRDLDFANEYNLEVLPVVKPLDLKDAKFKIKNLAFVDEGEVINSDLLNGLTTKEAKEKIINLLEEKKIGIKKINYKLRDWGISRQRFWGCPIPIIYREDGTIIPESEDNLPVKLPVVENFTESSSTLKNIDSWKETTCKE

SEQ ID NO: 189813 - protein, 264 aa, Unknown
  Bacterial polypetide isolated from the Sargasso Sea
EIKTVVKPIDEEDSFVVKDEAYTGPGITINSGFLNGLKAPNDSIIETIKVLEEKNIGTKKINFRLKDWGISRQRYWGCPIPIVYNDKGEHFTVPKDHLPVKLPDNINLSVKGNPLSHQKDWVNIKINGEMFKRETDTLDTFVDSSWYFLRFCSPDKKNYGFDNEEVNYWMPVDQYIGGVEHAILHLLYSRFFMRAIGYKNSEFKFKEPFFGLFTQGMVCHETYKDENNKWYSPDEVDSKNGKDFYLKIDNSKKIKVDHLSLCQN

SEQ ID NO: 189814 - protein, 243 aa, Unknown
  Bacterial polypetide isolated from the Sargasso Sea
NLRKDEAYTGDGTIINSDFLNNLTVSEAKEKIVNIIEKKKIGKKKITFRLKDWGVSRQRYWGCPIPMIYLKNGDVVPVDKSELPIRLPEDVDVNFKGNPLNNHPTWKNTKYKKTGEEAIRETDTLDTFVDSSWYFLRFCSPKLVSKPFDEKSFKYWMPVDQYIGGIEHAILHLLYSRFFMRAIKFCKKDINIKEPFKGLFTQGMVCHETYKDEKGKWLRPDQIESTKLGVKSKIDGSKVKIGP

SEQ ID NO: 189815 - protein, 151 aa, Unknown
  Bacterial polypetide isolated from the Sargasso Sea
IAKVSDDIGRRYTFNTAIAAVMELVNELNAFEINDDVDKQVVKEAIKAIILLLSPIVPHICNRLWLDLGYDSSIIDERWPTHDPELMVQETVEIVIQVNGKLRSKITVDQSIDDKALEELVMIDEKIKKHTDGQTVKKIIIVPKKLVNIVI

SEQ ID NO: 189816 - protein, 295 aa, Unknown
  Bacterial polypetide isolated from the Sargasso Sea
FCQKYNLEIRTVVRPNDENDSFEVKDKAYNGTGIIINSNFLNGLKVPEESIIKTIEILEEKKSGKKQVNFRLKDWGVSRQRYWGCPIPIAYDENENPLPIPKKDLPVKLPENIDLSVKGNPLNSKQDWKNIKINGKKFVRETDTLDTFVCSSWYYLRFCSPKNAKYGFNQDEIDYWMPVDQYIGGIEHAILHLLYSRFFMKALEFKNNSFKIKEPFTGLFTQGMVCHETYKDQNNNWLSPDEIEMKENAFYKKKDPSSKVIVGPSESMSKSKKNVIDPEIIMDNYGADSVRLFML

SEQ ID NO: 189817 - protein, 100 aa, Unknown
  Bacterial polypetide isolated from the Sargasso Sea
MNSQFEYKKIEKKWQDHWENSETVKCDLKSDKPKFYNLCMYPYPSGDLHMGHIRNYTIGDVITRYKQMNGFNVLSPMGWDSFGLPAENAAIKTGIHPREF

SEQ ID NO: 189818 - protein, 304 aa, Unknown
  Bacterial polypetide isolated from the Sargasso Sea
SFGLPAENAAKENNIHPGEWTNKNISTMKEQLKSMGLSYDWSREVSTCDPKYYKFEQKMFIDFFQKGLAYKKESWVNWDPVEKTVLANEQVIDGKGWRSNAVVEKKLLNQWFLKMTHYAEDLLGTIANLTNWPDRVKLMQNNWIGKSLGANINFKIIEKDEKIEVFTTRPDTLFGASFIALAPSHPISLNLSKNNSTIKNFIDECNINSTSEAIIEKNEKKGIYTNLNVVHPFDKSIKIPVYIANFVLMEYGTGAIFGCPAHDQRDLDFAINYKLPVLPVVKPKSYEKGDYKITDTAFTDDGII

SEQ ID NO: 189819 - protein, 243 aa, Unknown
  Bacterial polypetide isolated from the Sargasso Sea
MQEQYNPQDIESKVQSYWEENQVFKVTEDESKEKYYCLSMFPYPSGRLHMGHVRNYTIGDVVSRFQRLQGKNVMQPMGWDAFGLPAENAAIKNKTAPAKWTYENIDYMRNQLKQLGFGYDWDREIATCHPEYYKWEQWFFTKLYEKGLVYKKMSTVNWDPVDQTVLANEQVIDGRGWRSGAVVEQKEIPQWFIKITDYAQELLDDLDKLDDWPEQVKTMQRNWIGRSEGLDIEFTRTDNNEKF

SEQ ID NO: 189820 - protein, 113 aa, Unknown
  Bacterial polypetide isolated from the Sargasso Sea
MGDTEIPYDPAKIEKKIQSYWNENDTFSVTEDPNKEKFFCLSMFPYPSGSIHMGHVRNYTIGDVISRFQRMLGKNVLQPMGWDAFGLPAENAAIKNEIQPAEWTQENIKKMKG

SEQ ID NO: 189821 - protein, 280 aa, Unknown
  Bacterial polypetide isolated from the Sargasso Sea
SYADELLDFEQLDWPERVRSMQGNWIGRSEGVEFSLKLDGSEDLSFRVFTTRPDTVFGMTFCVLAPEHELVNIITKAEKKESVEAYIYAAQHKDEIERTSDGKEKDGVFTGAYAVNPMNGELVPVWIADYVLESYGTGAIMGVPGHDERDFNFARKYGLDTPVVVVSREKLDSVPHGNELAEPILQKEDSVMVNSSGFDGLVWPDSFNRVADHMQKEGFGERHVNYRLRDWLISRQRMWGTPIPVVYCESCGMQPVPYNELPVLLPDDAEFKPTGESPLK

SEQ ID NO: 189822 - protein, 266 aa, Unknown
  Bacterial polypetide isolated from the Sargasso Sea
FEVLNTNEGISPISVYTTRPDTLMGVTYLAVAPKHPLAEMVATKNSKLAKFIEEQSRLKVAEAELATLEKMGLDTGLKAVHPITKEEVPIFVANFVLMTYGSGAVMAVPAHDQRDWEFAKKYDLPIKSVIEPIDSNKEANLENGAFVDKGRLINSGEFDGLDFEGAFEAISTFLNDRGIGEKTVNFRLRDWGVSRQRYWGAPIPMINCQTCGSNPVSEEDLPVLLPENVQIDETGSPLRKMEEFLNVNCPICDNPANRETDTFDTF

SEQ ID NO: 189823 - protein, 252 aa, Unknown
  Bacterial polypetide isolated from the Sargasso Sea
TRPDTLFGFSFLAVSIDHPISEHFLKDPNFIKFKEECSKTGTTEESIAIGEKIGFKTNLLAINPLNEKQKVPVYFANFVLMDYGFGAVFGCPAHDQRDLDFANKYNLKVTTVVKPINEDDNYKVLKEAYTGPGVVINSDFLNGFKVPDESISKTIEILEKKKLGEKKINFRLKDWGVSRQRYWGCPIPIAYDKHGKVFPIAKEKLPVKLPENIDLNCKGNPLDNNKEWKKIKIDGKELTRETDTLDTFVDSS

SEQ ID NO: 189824 - protein, 322 aa, Unknown
  Bacterial polypetide isolated from the Sargasso Sea
PEAVRTMQRNWIEKSRGVELAFGLDEPVANLDRIEVYTTRPDTLYGVTYVSLAAEHPISLALAENNTELAEFIAACKQASVAEADMAQAEKLGMDTGLRATHPLTGEAIPVWVANYVLMDYGSGAVMAVPAHDERDWEFARKYALPMKTVVCDTEGQPTEATESAYTEHGVLTGSAEFNGCDFDEAFEGIAARLEAMGMGQTTTQFRLRDWGVSRQRYWGTPIPMLNPEDGQDIPIPADRLPSLLPEDVVMDGVTSPIKADAEWRRFEHEGQPCERDTDTFDTFVQSSWYYARFTCPHYTDGMIDSDQANYWLPVDQYVGGM

SEQ ID NO: 189825 - protein, 299 aa, Unknown
  Bacterial polypetide isolated from the Sargasso Sea
KKTGLGGRKTNYKLRDWGISRQRYWGCPIPVMYREDGKIVPVPKESLPVELPEIKHLDGRLGSLKDQKDWRETTCPETGLKALRETDTFDTFFESSWYFLRYCNPRLDQPFNKKDVKYWLPVDQYIGGIEHAILHLLYSRFFTKALRDMGHLDIDEPFKGLFTQGMVTHKTFKNDKNEWISPDEVLKNNNKLLDKNNNEVSEGKIEKMSKSKKNVVDPANIIDLYGADTARWFMLSDSPPERDLEWTENGISGAYKFINKIWDLANKILSLDEYTCEAGLEKSIKNDLSITIEKVTTNI

SEQ ID NO: 189826 - protein, 281 aa, Unknown
  Bacterial polypetide isolated from the Sargasso Sea
KKDALVNWDPVDQTVLANEQVIDGRGWRTGAQVEKKNLSQWFFKITHYAEELLNDLDKLELWPEKVKTMQRNWIGKSYGAEIKFKISGENEYLNIFTTRPDTIYGATFIAVSVNHPIVKKSLSNFEIENIKKEFERMDGDKEKLGYKIKLSCDHPILSKKIPIYIANFVLDTYGEGAIFGCPAHDERDFDFAKKYSLPIIKVIDCDDNQLPFTEDGLLVNSPLLNGLNKNEAIKKIILFLKKEKIGDEKINYKIRDWGVSRQRYWGCPIPVIYYNDGSYRV

SEQ ID NO: 189827 - protein, 308 aa, Unknown
  Bacterial polypetide isolated from the Sargasso Sea
LLDETWINIFGGIEHAILHLLYSRFFARAMHLTGHLPEKAIEPFSALFTQGMVCHETYKDIKGNWLSPVEVETYSDNYGKKFFRKMADKTEVAVGPSVKMSKSKKNVIDPIEIIEQFGADTARWFVMSDSPPERDIAWSTEGVEGSWRHLNRVWRLLEDQLKESSDNIVSDDSFEKQVNLIIEDVSNFIETFSFNKAIAKLYELTNFLTRAKGSQKQKREGLRVLAIMMEPFTPHLAQEIWETLGEKGFIAEVDWPKTNQDLIQEKNYVIPIQINGKRKAEISVLLGTDEKQIKELVFNQNSIKKSLG

SEQ ID NO: 189828 - protein, 136 aa, Unknown
  Bacterial polypetide isolated from the Sargasso Sea
MERYNFKIVEEKWQNQWSKSGVFRSRVDHSKKKFYCLEMFPYPSGKIHMGHVRNYTIGDVLSRYKSLQGYNVMHPMGWDAFGMPAENAARENNLDPKDWTNKNISKMKEQLKRLGLSIDWDRKISTCSEEYYKHQQ

SEQ ID NO: 189829 - protein, 291 aa, Unknown
  Bacterial polypetide isolated from the Sargasso Sea
KIFPVIRSGGEEFILDNWKDSYKTKGVCINSGKYNGLNFVDAIESIAQDLKKLNLGHKEVQWRLRDWGISRQRYWGTPIPIVHCPNCGDVPVPIEELPVVLPKDCIPDGSGNPLKKNENFLNTTCPSCGGPAIRETDTMDTFVDSSWYFLRFASADNLIEMVDERVAYWLPVDQYIGGIEHAILHLLYSRFWTKVMRDLELIKIEEPFGNLLTQGMVLNEVFSRKETDGRKVYFNPDDVIVDHSSSGARTGFVSRSDGQAVFSEGIRTMSKSKNNGVDPQELIDEYGADTA

SEQ ID NO: 189830 - protein, 300 aa, Unknown
  Bacterial polypetide isolated from the Sargasso Sea
FEESKFKINNKAYTENGIIINSEFLNGLNIDEAKEKIINEIEKRGLGKKKINFKLRDWGISRQRFWGCPIPIIYREDGEVLAVEEEDLPVKLPEIENFSESSSALSNISGWKDTVCPKTGMKAFRETDTFDTFFESSWYYFRYCNARLNKPFDKKDIEYWLPVDQYIGGIEHAILHLLYSRFFTKALRDLGYFNLDEPFKGLFTQGMVTHITYKNINNEWIEPKDVEKHNGILKDKDGFEVIGGKIEKMSKSKKNVVDPNDIIDSYGADTARWFMLSDSPPERDLQWTETGIASSFKFIN

SEQ ID NO: 189831 - protein, 274 aa, Unknown
  Bacterial polypetide isolated from the Sargasso Sea
RIATCKPDYYKWNQWLFLKMFEKGIAYKKTGTVNWDPVDQTVLANEQVIDGRGWRSGALVEKREIPMYYLRITQYADELLNDLDGLGWPERVKIMQQNWIGKSFGVNFGFPYELDGEKKLLRVFTTRADTIMGVTFCAIAAEHPLATRLAQDKPELLAFIDECKRGGVAEADVATMEKKGVATGFSVTHPLTGEPVEVWIGNYVLMSYGEGAVMGVPGHDERDFAFAKKYGLPIKQVISAEGQQYSLDAWQEWYGDKETAVCVNSGKYDGLRYT

SEQ ID NO: 189832 - protein, 51 aa, Unknown
  Bacterial polypetide isolated from the Sargasso Sea
EQRVQQYWEENQSFKANDYVEKEKFYCLSMFPYPSGRLHMGHVRNYTIGDV

SEQ ID NO: 189833 - protein, 310 aa, Unknown
  Bacterial polypetide isolated from the Sargasso Sea
WRSGAIVERKKLSQWFFNISKFSQQLLDGLEKLNSWPNKVKIMQKNWIGKSFGCEINFKIEGDLPVKSVKCFTTRPDTLFGFSFLALSVDHEISKFYQNDKDFLNFKKECSKTGTTEEAIAVGEKIGFKTKLTAVNPLNPKQKVPVYFANFVLMDYGFGAVFGCPAHDQRDFDFAKKYNLEIKTVVRPNNEDETFKVSHEAYPGPGILINSDFLNGLKAPENSILETIKILEERKLGKKQINFRLKDWGVSRQRYWGCPIPIAYDENGTIFPIPHSMLPVTLPREIDLNVKGNPLDSQNKMERIIIDGKK

SEQ ID NO: 189834 - protein, 262 aa, Unknown
  Bacterial polypetide isolated from the Sargasso Sea
TYSNIKYMRSQLKSMGLSIDWERELATCHPGYYKHEQLFFIEMYKQGLAYKKLSQVNWDPVDKTVLANEQVIDGRGWRSGAIVEKKNLSQWFLKTSNYSEELLADLNSLNMWPQKVKMMQSNWIGKSEGAEIVFSIVDNNILNDKFIKVYTTRPDTIFGATFVAISPDHELSKKILQKDFNAKAFNDEIKNIDSEKTKVGYNTNIKIQHPFLNKKIPLFIANFVLMDYGLGAIFGCPAHDQRDLDFAIKYNLDVIKVVEQKD

SEQ ID NO: 189835 - protein, 227 aa, Unknown
  Bacterial polypetide isolated from the Sargasso Sea
MGWDSFGMPAENAAKQNKLDPKEWTEKNISTMKQQLKRLGLSIDWDREISTCSPEYYKHQQIFFLELYEKGLVYKKENYVNWDPIDETVLANEQVIDGKGWRSGALVERKKLNQWFFNISKFSDELLEGLDLLNEWPNKVKIMQKNWIGKSLGCEVNFEVQGNLPIKEISCFTTRPDTLFGLSFFAVSVDHPLSKFYENDPKFKKFRDDCSKTGTTEESIAQAEKIG

SEQ ID NO: 189836 - protein, 276 aa, Unknown
  Bacterial polypetide isolated from the Sargasso Sea
GGNQNINVFTTRPDTIFGASFLAVSVDHPICKNFVNDESYNKFKNECLKVGTTEEALANAEKIGFNTKLFAKHPFIKGKKLPVFVANFILMDYGTGAIFGCPAHDQRDLDFAIKYNLEIKEVVSDNPSKLKNFDKLSEAYVGDGKMINSDFLNNLSVEQAKSKIIKEIEKLKLGEKKITFRLKDWGISRQRYWGCPIPMIHLEDGSIVPVDKSELPVKLPEDIDLNQSGNPLESHKSWKNTFHKKTGKPAIRETDTLDTFVDSSWYFLRFCSPEIK

SEQ ID NO: 189837 - protein, 194 aa, Unknown
  Bacterial polypetide isolated from the Sargasso Sea
MAQYNPKSIEKKWQNAWEDAKVFEAKTDQKKPKYYVLEMFPYPSGRLHMGHVRNYTMGDVIARYKMGTGHNVLHPMGWDAFGMPAENAAMASGGHPKEWTYSNIEIMKSQMRPMGWTLDWTREFATCDPDYYGKQQELFLDFLNAGLVYRKNAVVNWDPVDMTVLANEQVENGRGWRSGAIVERKELTQWFFKI

SEQ ID NO: 189838 - protein, 292 aa, Unknown
  Bacterial polypetide isolated from the Sargasso Sea
MINSGFLDGADNEKAKKEVVKRLEKEGIGNKKINYKLRDWGISRQRYWGCPIPILYREDGSVIPVLERDLPVLLPISGQNNPSPTKEEVDDWKKTTCPITGMNAVRETDTFDTFFESSWYFLRYCNPRLNTKPFLKEDVNYWLPVDQYIGGVEHAILHLLYSRFFIKALRDLNFIDINEPFSGLFTQGMVTHKTFRDKSGSWVEPNKIIETKEGYFDSNNEKVEVGKIEKMSKSKKNVVNPSSIIDNYGADTARWFMLSDSPPERDLEWTDIGVASSHKFINKIWETCIRAK

SEQ ID NO: 189839 - protein, 282 aa, Unknown
  Bacterial polypetide isolated from the Sargasso Sea
KAFKYWMPVDQYIGGIEHAILHLLYSRFFMRAIKFCKKDIKIKEPFKGLFTQGMVCHETYKSEKGTWLSPDQVENTKLGMRSKIDGSKIKVGPSEAMSKSKKNIVDPESMIKIFGADAVRWFILSDSPPERDVQWSTAGVSASHKFIQRIWSLNQKVLNRKQGEISSADEKKLQLKFNEYIFKITDLIENFQLNVAVAKIYEITSLMETNLEKKIKNENLFILQNKFMKILLPFAPHLSCECLSKLEGKNFYEEIQWPKADQSLLGKQEVTLVVQINGKKRG

SEQ ID NO: 189840 - protein, 318 aa, Unknown
  Bacterial polypetide isolated from the Sargasso Sea
EEGHPVIRKPMKQWVFRITEYAESLLKGLEDVDWPDNVKELQKNWIGRSEGSNVKFEIPSINKTISVFTTRPDTLFGATYMVLAPEHPLVNELTDKVNREAVSKYIELTSRKSDLDRGDLNKEKTGVFIGSYAINPVNKNEIPIWISDYVLMSYGTGAIMAVPGHDQRDYEFAKKFDLPIVEVVSGGDISSSAYTDIDKGVMINSSTSDGVFSLNDLKVKDAIENTISYLEKIQKGKRAVEYKLRDWLFSRQRYWGEPFPIIHLEKGYKPVSEEELPVLLPDVEKYQPTGTGESPLAAIDEWVNTIDTETNTPATRET

SEQ ID NO: 189841 - protein, 206 aa, Unknown
  Bacterial polypetide isolated from the Sargasso Sea
KDGAKMSKSKGNVVDPDEIIKTYGADTARIFILFAAPPIKDLEWSDQGVEGCSRFLKRVWRIFCEFVDEVKSISPADENLSTSIKELKELRRITHITIRRVTEDIEKRMQFNTAIAAIMELVNHLYLFKEWKEKQSKVDENLYSVIRESMEAMILTLSPFAPHITAEMAVLMNFSRTLDEEKWPTYNEKLTQTDEILIVIQVNGKV

SEQ ID NO: 189842 - protein, 293 aa, Unknown
  Bacterial polypetide isolated from the Sargasso Sea
DKSKKKFYCLEMFPYPSGKIHMGHVRNYTIGDVLARYKKLRGFNVLHPMGWDSFGMPAENAARENNLHPKEWTKKNITTMKKQLQLLGFSLDWDREISTCDPEYYKHQQEFFLELFKKGLVYKQDTYVNWDPVDKTVLANEQVINGKGWRSGAIVERKKLSQWFFNIKKFAQNLLDELENLKNWPEKVKLMQKNWIGKSFGCEINFELEKNKIFSEKIKVFTTRPDTIFGASFLAISIDHPLAKKFEKESNFVSFKDKCSKIGTTEEAMANAEKIGFDTKLFAIHPLDKNNKL

SEQ ID NO: 189843 - protein, 136 aa, Unknown
  Bacterial polypetide isolated from the Sargasso Sea
MSNYKKTKRDSEFIPYNPSVIEPKWQKKWNESEIYKTNFSEDKKDNFFSLTMFPYPSGDLHIGHWYAFTPADTYSRFKRMKGFNVLHTQGFDAFGLPAENAAISRNVNPMKWTFENIENMRRQFRLMGNCYDWSRE

SEQ ID NO: 189844 - protein, 269 aa, Unknown
  Bacterial polypetide isolated from the Sargasso Sea
PAEQYAIKTGTHPSKTTKDNVANFKRQIKMLGFSYDWSREINTTDPEYVKWTQWIFVQLYKKGLAYEAEVPVNWCPELKAVLANEEVVDGKSDIGGYPVFRVPMRQWMLKITKYADSLLSGLDDLDWPNSIKELQKNWIGKSEGAKIYFDLPSINQTLEVFTTRHDTLYGATYMVLAPEHPLVNKLTDDAQRDLVKKYVKESSKKSDLDRTELNKDKTGVWLGTYAINPVNNKEIPIWISDYVIMSYGTGAIMAVPGEDERDWDFAKKI

SEQ ID NO: 189845 - protein, 299 aa, Unknown
  Bacterial polypetide isolated from the Sargasso Sea
SGKLINSQFLNDLSIEEAKKEIIKRVEELHIGKKTTNFRLRDWGVSRQRYWGCPIPIMYREDGKVIEVPEDQLPLELPDDIDLSVPGNPLDNHPKWKFTKCPETGMNAIRETDTLDTFVDSAWYFLRFCSPLETKEPFNLDEIDYWMPVDQYVGGVEHAILHLLYSRFFTKALNIKGMDEPFDSLFTQGMVCHHTFQNKSNAWVYPDDVEKKESKYFQISTGEPVTMGEIESMSKSKKNVIDPESIISTYGADSARWFMLSDSPPEKDINWTDSGINGAWKICQKIWMIVQNNKENLKQ

SEQ ID NO: 189846 - protein, 207 aa, Unknown
  Bacterial polypetide isolated from the Sargasso Sea
MDRYNFKKVETKWQKKWTENELYKSEIDRSKPKYYVLEMFPYPSGRIHMGHVRNYTMGDVVARYKKASGYNILHPMGWDAFGMPAENAAMENNIHPGEWTYQNIKDMRNQLKPLGLSIDWKREFATCDPEYYGHQQSMFIDMLNAGLAYRKSATVNWDPVDQTVLANEQVENGLGWRSGAIVERKELTQWFFKISKYSEELLNSLED

SEQ ID NO: 189847 - protein, 326 aa, Unknown
  Bacterial polypetide isolated from the Sargasso Sea
TIGLVSQLGTNINFNINTSLKEKLTVFTTRPDTLFGVTYLAISVNHSLIKNISDQTVLQDIEKLKQYLKKNKNNELEKIGIKTSLIAVNPVNSEPIPIWVASYVLDEYGTGAVMGVPAHDLRDFEFAKKNNIDIKQVIIKDKREINDELDNAYVENGYLINSNQYDGIANTIAKLKISEDGVNNGWAENKIQYRLRDWLISRQRYWGCPIPIVNCKKCGSVPLNQSELPVSLPKDIEISDNKINALGENNNWINTTCPKCGIAAIKETDTMDTFMCSSWYFLRYPSSKCATKPFEKNEINKWLPVDQYVGGVEHAILHLLYARFFT

SEQ ID NO: 189848 - protein, 340 aa, Unknown
  Bacterial polypetide isolated from the Sargasso Sea
MGHVRNYTIGDVFSRYKSLKGNNVLHPMGWDSFGMPAENAAKQNNLNPKNWTEDNIKIMKSQLMMLGLSIDWDREVSTCSPDYYKHQQKIFLDLFDKGLVYRKESYVNWDPVDKTVLANEQVIDGKGWRSGALVERKKLNQWFFKISHFSEELLSDLNELNEWPDKVKIMQKNWIGKSFGCEIDFKIEGSENIKSIKCYTTRPDTLFGFSFLALSVDHPLSKYYDNNKDFIKFKKECSKTGTTEESIAQATKIGFKTELLAINPLDNKNKVPVYFANFVLMDYGFGAVFGCPAHDQRDFDFAKKYNLEIKTVVRPKNEDANYQVENEAYTGPGKIINSKF

SEQ ID NO: 189849 - protein, 316 aa, Unknown
  Bacterial polypetide isolated from the Sargasso Sea
MANGVPPAKWTYDNIDYMKGQMQSMGLAIDWSREIATCKPDYYKWNQWLFLKMLEKGIAYKKTGTVNWDPVDQTVLANEQVIDGRGWRSGALVEKREIPMYYLRITQYADELLNDLDGLGWPERVKIMQQNWIGKSFGVNFGFPYELDGEKKLLRVFTTRADTIMGVTFCAIAAEHPLATRLAQDKPELLAFIDECKRGGVAEADVATMEKKGVATGFSVTHPLTGEPVEVWIGNYVLMSYGEGAVMGVPGHDERDFAFAKKYGLPIKQVISAEGQQYSLDAWQEWYGDKETAVCVNSGKYDGLRYTDAVDAVAAD

SEQ ID NO: 189850 - protein, 301 aa, Unknown
  Bacterial polypetide isolated from the Sargasso Sea
AVLHPMGWDAFGLPAENAAIERNVDPGEWTDRNIDQMRAQLDRLGLSIDWTREQATCHSDYYRWTQWLFLELLEGGLAYRKNATVNWDPVDQTVLANEQVDGDGRSWRSGALVEQRQLNQWFLRITDYAEPLLNDLDALKGWPERVRTMQANWIGRSEGAEISFSIDGAKDQTITVFTTRPDTLAGASYVVLAPENELVDSLTSTEQKCKVEDFRKEVARLSTIQRTSDDRPKRGVPIGSHVINPLTGAVLPVWIADYVLAEYGTGAVMGVPAHDQRDIAFAQSHGLPIQQVIDAEGAAEG

SEQ ID NO: 189851 - protein, 271 aa, Unknown
  Bacterial polypetide isolated from the Sargasso Sea
NKNKKKFYCLEMFPYPSGKIHMGHVRNYTIGDVLARYKALQGFNVLHPMGWDSFGMPAENAAKQNNLNPRNWTETNIANMKSQLKKLGLSIDWDREISTCSEDYYKHQQKFFLELLDKKLVYKKENYVNWDPVDETVLANEQVIDGKGWRSGAHVERKKLSQWFFNISKFSQDLLDGLDTLDTWPNKVKVMQKNWIGKSFGCEVNFEIEGNPEINNIKCFTTRPDTLFGFSFLALSVDHEISKFYANDPNFINFKNECSKTGTTEKALAIG

SEQ ID NO: 189852 - protein, 295 aa, Unknown
  Bacterial polypetide isolated from the Sargasso Sea
INFKIKNNNLNSNFIKIFTTRPDTLFGATFVAISPEHPLVKEISVQNSNIEIFLKKCEKSNSEKEKLGLDTQLKVEHPVTKNLLPVFIANFVLMDYGLGAIFGCPAHDQRDLEFAQKFKLQIIKVVEPSEKQISPTFKEAYTGDGLIVNSDFLNGLSIDLAKTKMIEFLESNGIGSSKINYKLRDWGISRQRYWGCPIPILYREDGEIVPVEDENLPVTLPKIKKNENVTSLNNIGDWKNTTCPKTGMKALRETDTFDTFFESSWYYFRFCNPRLDKAFEYEDVNYWLPVDQYIG

SEQ ID NO: 189853 - protein, 246 aa, Unknown
  Bacterial polypetide isolated from the Sargasso Sea
GESPLKYHPAFLNTECPKCGGSAERETDTMDTFICSSWYYYGYVSPYWKKGEKLKKEDHPWDPEAIQKWCPVNQYTGGIEHATMHLLYFRFFTKVLADMNLFDFREPATRLFNQGMILGEDHEKMSKSRGNVVNPDDLVKKYGADTVRCYLMFLGPWDAGAPWNPHGIEGLSRFFKGIWNLCHQPQKPESIDHESEKKLRKAQHRTLKKVTEDLRRFRFNTAIAALMSFRNDLKDHVHRCREETRT

SEQ ID NO: 189854 - protein, 265 aa, Unknown
  Bacterial polypetide isolated from the Sargasso Sea
ESELPLVLPETDNFKPSGGGEGPLANCDDWVRTVDPRTGKPALRETNTMPQWAGSCWYYLRFIDPSNEDALIDGSLEKYWLPVDLYVGGAEHAVLHLLYARFWHKVLYDIGVVSTKEPFQRLVSQGMILGEVEYSARVDDAGAFVEGNKTSGAQTVKVNADEVTKKGDGFVLTANPKVKISARAHKMSKSRGNVVNPDDIVGAYGADSLRLYEMFMGPLRETKVWQTKGVEGCFRFLARTYRLLDKVTDEKPDEEGLRALHKCIA

SEQ ID NO: 189855 - protein, 260 aa, Unknown
  Bacterial polypetide isolated from the Sargasso Sea
AKQNNQDPKLWTEDNIKTMKNQLKQLGLSIDWSREISTCSEEYYKHQQKFFIEMFNKGLVYKKENYVNWDPIDETVLANEQVIDGKGWRSGAIVERKKLSQWFFNISKFADDLQNELETLKEWPKKVKIMQQNWIGKSFGCEIDFEIIGDENIKNIKCFTTRPDTLFGFSFLALSVDHPLSEFYKDNEEFKKFKENCSKTGTTEESIANAEKIGFKTKLLAKNPLDGDKTVPVYFANFVLMDYGFGAVFGCPGHDQRDFD

SEQ ID NO: 189856 - protein, 133 aa, Unknown
  Bacterial polypetide isolated from the Sargasso Sea
MKEHIPYNPSVIEPKWQKRWKESKIYDVDLDSNNDKNFFSLTMFPYPSGDLHIGHWYAFTPADSYSRFKKMKGFNVLHTQGFDAFGLPAENAAISRNINPMKWTFDNIDNMRNQFNLMGNSYDWSRELITCKP

SEQ ID NO: 189857 - protein, 285 aa, Unknown
  Bacterial polypetide isolated from the Sargasso Sea
DHPSLAREDGDEEKVKLPYSGPGIMVNSEEYDGMDTDACKAKIIADLEAKGCGKGAVNYKLRDWIFSRQRYWGEPIPLVWVSLEDYGKAGREEGPVTELMPEESVTTVRDGKTLYALPLPVSELPLRLPEVENYQPSGTGESPLATIPEWLEVWFDVESGRTEARSGPKPQGENWVPATRETNTMPQWAGSCWYHLRYLDPDNSDRLVDSEKEAYWQGPDFYIGGAEHAVLHLLYARFWHRFLHDEGVLANPEPYGKLFHQGLILGEDGNKMSKSVGNVVSPDVV

SEQ ID NO: 189858 - protein, 219 aa, Unknown
  Bacterial polypetide isolated from the Sargasso Sea
MSEKYNPRVIEPKWQLYWKNNDSFISEIKNDKKKYYILEMFPYPSGRIHMGHVRNYALGDVIARFKRAQGFNVMHPMGWDAFGLPAENAAIENNISPKKWTYQNIETMKDQLKKMGLSIDWSRELATCDEIYYKQQQKLFLNFFRKKLIYKKESLVNWDPVEGTVLANEQVIEGKGWRSGAEVEQKKLSQWFFKITEFADSLLKSLETMHSWPDKVRTM

SEQ ID NO: 189859 - protein, 304 aa, Unknown
  Bacterial polypetide isolated from the Sargasso Sea
STCSEDYYKHQQNFFLELLEKGLVYRKENYVNWDPIDETVLANEQVIDGKGWRSGATVERKKLSQWFFNISKFSQDLLDGLDELSTWPNKVKIMQKNWIGKSYGCEIDFKIDSNLPVNNIKCFTTRPDTLFGFSFLAVSVDHEISKFYQEDKEFIKFKEECSKTGTTEEAIAVGEKIGFKTDLMAINPLNPTQKVPVYFANFVLMDYGFGAVFGCPAHDQRDFDFAKKYGLDIKTVVRPNDQDENFKVIDESYPGPGILINSDFLNGLEVPNNSVLETIKILEKKKLGKEKINFRLKDWGVSRQ

SEQ ID NO: 189860 - protein, 271 aa, Unknown
  Bacterial polypetide isolated from the Sargasso Sea
PVERKKLNQWFFNISKFSDDLLEGLSKLKNWPDKVKTMQKNWIGKSFGCEIDFKIEGNLPIKTIKCFTTRPDTLYGFSFLAVSVDHPISKHFIENKDFIKFRDECSKTGTTEESIAQGEKIGFKTNLLAINPLDPNQKVPVYFANFVLMDYGFGAVFGCPAHDQRDLDFANKYNLNVKTVVKPLDKDNNFSVTNEAYTGPGIIINSKKLDGLKVPDESIIKTIDILEKEKLGKKKINFRLKDWGVSRQRYWGCPIQIAYDKDGNVFTIPKK

SEQ ID NO: 189861 - protein, 295 aa, Unknown
  Bacterial polypetide isolated from the Sargasso Sea
MRISGKNFWEKNNFFKTKIDKNKKKFYCLEMFPYPSGKIHMGHVRNYTIGDVLSRYKKLKGFNVLHPMGWDSFGMPAENAAKQNNQDPKDWTEKNIITMKTQLKQLGLSIDWNREISTCSEEYYKHQQKFFIDMYNKGLVYKKENYVNWDPVDETVLANEQVIDGKGWRSGAVVERKKLNQWFFNISKFSDDLQEELRKLDEWPNKVKIMQQNWIGKSFGCEIDFEIIGDKKIKSVKCFTTRPDTLFGFSFLALSVDHPISDLYKNDSEFKSFKEKCSKSGTTEESIANAEKIGF

SEQ ID NO: 189862 - protein, 96 aa, Unknown
  Bacterial polypetide isolated from the Sargasso Sea
MSEKYNPRAIESKWQSYWLNNKTFKSELDTKKEKYYVLEMFPYPSGKIHMGHVRNYTLGDVIARYKRAKGFNVMHPMGWDAFGLPAENAAIENNIS

SEQ ID NO: 189863 - protein, 263 aa, Unknown
  Bacterial polypetide isolated from the Sargasso Sea
MGWDLFGMPAENAARQNNLDPKTWTESNILNMKSQLKRLGLSIDWDREISTCTPEYYKHQQEFFLELYDKGLVYRKEQYVNWDPIDKTVLANEQVIDGKGWRSGAPVKRKKLNQWFFNITKFSNELLENLNSLKEWPNKVKVMQKNWIGKSFGCEVNFKINNSKEIEEIKCFTTRPDTLFGMSFLALSADHPVSKLYEHDKKFLEFKKQCSSTGTTEEAIASAEKLGFKTNLLAVNPLNESIKVPVYFANFVLMDYGFGAVFG

SEQ ID NO: 189864 - protein, 263 aa, Unknown
  Bacterial polypetide isolated from the Sargasso Sea
MGHVRNYTLGDVIARYKKMMGFNVFHPMGWDAFGLPAENAAMTEKKDPADWTYTNISYMRNQLKSMGFSIDWDRELATCHPGYYKHEQLFFLEMYKNGLAYKKMSEVNWDPVDKTVLANEQVIDGRGWRSGALVEKKNLSQWFLKTSSYSEELLLDLDSLDMWPNKVKLMQSNWIGKSEGAEIVFSIVKNDFLEDGHLRVYTTRPDTIFGATFIAISSDHDLAKKILKKDNKAKKFNEEIKVIDSEKTKEGYNTGIFIKHPFL

SEQ ID NO: 189865 - protein, 252 aa, Unknown
  Bacterial polypetide isolated from the Sargasso Sea
LTQGMVLKDGAKMSKSKGNTVDPQSYIEKYGADTVRLYMMFTSPPEQSLEWSESSVEGASRFLKKIWNLVDGRKFEIYDIDHNFSKEELNLRRKSHATLKKVENDFDVRFSFNTAIAAIMELINFIPEDFKSENASDTQKFCLNETIVFTLKMLFPIAPHISEYLWNTFKVEGSNIESSWPSFDANLIEAEEFELIIQVNGKVRGKINLDKNTLQDKIEQTALTVENVKNFIGSSEIKKTIYVKEKIINFVI

SEQ ID NO: 189866 - protein, 275 aa, Unknown
  Bacterial polypetide isolated from the Sargasso Sea
MGKATIQYRLRDWGVSRQRYWGCPIPIKYKNGKSFTEGLKELPIRLPVDENNPLPILKNEENFVNATNGFIRETDTFDTFMESSWYYARFPSANEKSTPFNKETDYWLPVDLYIGGIEHAILHLLYSRFFHKVLRDLGYLSGDEPFKKLLTQGMVLKDGSKMSKSKGNTVDPEQYIKVFGADAIRTFMIFASPPEQSLEWSDAGLEGCYKFLKRLWSFSFQIYSLDDANFKATELSVHEENIKLMIKINDDYKKRFNFNTVVSSCMEILNNMSAR

SEQ ID NO: 189867 - protein, 186 aa, Unknown
  Bacterial polypetide isolated from the Sargasso Sea
MNRYNFKSIEKKWQSFWEKNKSFRVKTDPSKKKFYCLEMFPYPSGKIHMGHVRNYTIGDVLARYKSLQGYNVLHPMGWDSFGMPAENAARQNNLDPKTWTETNIKNMKLQLKKLGLSIDWDREISTCDKNYYKHQQEFFLELFKKGLVYRKENYVNWDPVDETVLANEQVIDGKGWRSGAPVERKK

SEQ ID NO: 189868 - protein, 247 aa, Unknown
  Bacterial polypetide isolated from the Sargasso Sea
NPMDPKIKVPVYFANFVLMDYGFGAVFGCPAHDQRDFEFAKKYNLNIKTVVRPKDQNDNFKVKTEAFIEDGIMINSSFLDGLKTPSEAIEKSIEHLTKNKLGKKKINFRLKDWGISRQRYWGCPIPIAYDKNGNIVKVPKEMLPIKLPEKINLNTKGNPLDHQKEWKEIKINGENCTLDTDTLDTFVDSSWYFLRFCSPKNSEYGFSEEEIKYWMPVDQYIGGVEHAILHLLYSRFFMQALSFEKKN

SEQ ID NO: 189869 - protein, 97 aa, Unknown
  Bacterial polypetide isolated from the Sargasso Sea
MERYNFKTVEEKWQDKWLKSGIFQCEIDLNKEKFYCLEMFPYPSGKIHMGHVRNYTIGDVLSRYKSLQGYNVMHPMGWDAFGMPAENAARENNLDPK

SEQ ID NO: 189870 - protein, 300 aa, Unknown
  Bacterial polypetide isolated from the Sargasso Sea
MISIFGGIEHAILHLLYSRFFTKALRDLQYFNLDEPFKGLFTQGMVTHVTYKNKDGEWVEPKNVEIINGKLKDKNHQEVETGKIEKMSKSKKNVVDPNDIINLYGADTARWFMLSDSPPERDLQWTETGISSSYKFINKLYELVDKFKNYKSDSSENFEIMEKLKIIINDVSTNIESFQFNKSVAKIYEFVNILNESLLKNKISKKNFEWALEKLSMILQPFVPHISEEIWSSIGNDGLCINENWNIEDVKKKTKLNIAIQINGKTKEVIEFEDNVSKEKILETIKNTNKIKNSLLGKNI

SEQ ID NO: 189871 - protein, 251 aa, Unknown
  Bacterial polypetide isolated from the Sargasso Sea
VIDGRGWRSGAEVEKKKLKQWFLKITDYSEELLEGIETLKGWPEQVRIQQKNWIGKSEGMNFSFKVKDSDEIINVFTTRPDTIMGVSFIAISASHKLSIDVSEKDDKFKSFIEKQKKVKQSEAEFAKQEKEGLFTELYAIHPFTGDQIPIWIANFVLSDYGSGALMAVPAHDQRDFEFANKYDLPILPVIENRSDASDTLEEAYLEKNTLINSKEFNGLNFGEAFKAIEKKAEELGCGYRETNFRLRDWGV

SEQ ID NO: 189872 - protein, 182 aa, Unknown
  Bacterial polypetide isolated from the Sargasso Sea
LANFVLMDYGSGAIFGCPAHDQRDLDFANKYNLEVVPVVLPNDKKENDFKITNEAFTGEGRLINSSFLNGLEIEQAKKEIIKNLKNINCGKDKTTYRLRDWGLSRQRYWGCPIPMLYREDGKIIPVSKKDLPITLPPNSGIGEITNKLDNIDSWKNTVCPETGMKAIRETDTFDTFFESSWY

SEQ ID NO: 189873 - protein, 289 aa, Unknown
  Bacterial polypetide isolated from the Sargasso Sea
EKTGVDTGLKVLNPINNKSVPLWIADYVLINYGTGAIMAVPGHDERDYEFAKKYNIEIIQVIIDKDQKIDISSKPFIEKGVLINSGDYDGLNSHDDASESILNYLSDQDLGERKVTYRLRDWLISRQRYWGCPIPLINCTKCGLVPESLDNLPVLLPEIDDYKNSEDSPLAKSEDFINIKCPDCGSDGRRETDTMDTFVDSSWYFLRYLDSQNQNSPFDKNIINSWLPIDQYIGGVEHAILHLLYSRFFVKALRDINLLDVNEPFHNLFSQGMINFGGTKMSKSKGNVV

SEQ ID NO: 189874 - protein, 277 aa, Unknown
  Bacterial polypetide isolated from the Sargasso Sea
VLEKSELPVILPYDVNLEDKGNALLGLNSWRKIVCPKTKKIAFRETDTLDTFVDSSWYYIRFLNNKLLKPFDIQQVNELLPVDKYIGGIEHAILHLLYSRFFMKALRDIYNLKVDEPFKQLFTQGMITHKTYKTSNNEWVMPKEVLINNGKLIREKTKESLIEGPCEKMSKSKKNVIEPNEILDSYGIDATRIFMISDSPPDRELEWTDEGIQSSKNLVHRLEKYFTQKKSPINHEIEKKVEKFISNIEQNILNFSLNKCVADIYTLFNYWKKIKFI

SEQ ID NO: 189875 - protein, 264 aa, Unknown
  Bacterial polypetide isolated from the Sargasso Sea
PYPSGKIHMGHVRNYTLGDVVARYKKMKGFNVFHPMGWDAFGLPAENAAKTEKKNPADWTYTNISYMRNQLKSMGFSIDWDRELATCHPGYYKHEQLFFLEMYKSGLAYKKMSEVNWDPVDKTVLANEQVIDGRGWRSGALVEKKNLSQWFLKTSNYSEELLNDLDSLDMWPNKVKVMQSNWIGRSEGAEIVFSLVKNNFSDDKHLKVYTTRPDTIFGATFVAISADHALAKKILKKDINAQKFKEEIKIIDSEKTKVGYNTNI

SEQ ID NO: 189876 - protein, 260 aa, Unknown
  Bacterial polypetide isolated from the Sargasso Sea
MDTFICSSWYYYAYVSPYWKKGQTLVRDDYPWNADRINYFCPVDQYTGGIEHATMHLLYFRFFTKALADLGLLNFREPTKRLFNQGMILGEDHEKMSKSRGNVVNPDVLVKQYGADTVRAYLMFLGPWDAGAAWNSKGIEGLARFFKSVWILCNSDAKNTANVPMDTEKKLRKSLHQTIKKVTVDLHNFRFNTAIAAVMSFRNVLKANADAIGSEVWNECLEGMLLMLAPIAPHITEELWQKMKPDNGSIHRQQWPVYDE

SEQ ID NO: 189877 - protein, 277 aa, Unknown
  Bacterial polypetide isolated from the Sargasso Sea
DKFEVQKEAFTGPGIIINSNFLNGLKAPDASILKTINIIEDKKIGKKKINFRLKDWGVSRQRYWGCPIPIAYDQNGNIKTIPKEDLPVKLPENVDLNSKGNPLDSQTEWKNISINGEKYTRETDTLDTFVCSSWYYIRFCSPKNTEYGFKKEDIDYWMPVDQYIGGVEHAILHLLYSRFFTKALGYKNTTIKFSEPFEGLFTQGMVCHETYKDKNNNWVSPDEIELVKNEYQKKGEPNNKIKVGPSESMSKSKKNVIDPENIMNSYGADAVRLFILS

SEQ ID NO: 189878 - protein, 132 aa, Unknown
  Bacterial polypetide isolated from the Sargasso Sea
MWHDRSLAVDRSPVNSRYEPSELEQRWQSSWRDLGTDRTPEDPTRPVFYALSMFPYPSGTLHMGHVRNYVITDVIARVQRMRGHAVLHPMGWDAFGLPAENAAIERNVDPGEWTDRNIEQMRGQLDRLGLSI

SEQ ID NO: 189879 - protein, 214 aa, Unknown
  Bacterial polypetide isolated from the Sargasso Sea
SEIEALVQKHWHDNKTFEVTEDANKEKFYCLSMFPYPSGRLHMGHVRNYTIGDVVARFQRLQGKNVLQPIGWDSFGLPAENAAINNKTAPAPWTYQNIEYMKNQLKLLGFGYDWSREIATCTPEYYRWEQWFFTKLYEKGLVYKKTASVNWCPNDETVLANEQVQDGCCWRCDTPVEQKEIPQWFIKITAYAEELLNDIDTLDGWPEQVKTMQR

SEQ ID NO: 189880 - protein, 281 aa, Unknown
  Bacterial polypetide isolated from the Sargasso Sea
FFNISKFSQELLDGLNELKNWPNKVKVMQKNWIGKSFGCEIAFKTEGDLPVKEIKCFTTRPDTLFGFSFLALSVDHEISKYFAKDKKFQEFKKECSKTGTTEEAIAIGEKIGFKTNMTATNPINPSQKVPVFFANFVLMDYGFGAVFGCPAHDQRDFDFAKKYSLDIKTVVKPENEGDEYEVKDEAYSGPGILINSGFLNNLKAPEESIIKTIDILEERNIGKKQINFRLKDWGVSRQRYWGCPIPMAYDENGNVTKVPKKDLPVKLPENVDLNFKGNPLN

SEQ ID NO: 189881 - protein, 279 aa, Unknown
  Bacterial polypetide isolated from the Sargasso Sea
NYTIGDVLARYKSLQGYNVLHPMGWDSFGMPAENAAKQNNLDPKTWTESNIAKMKSQLKKLGLSLDWDREISTCSEEYYKHQQKFFLELYEKKLVYRKENYVNWDPVDETVLANEQVIDGKGWRSGAIVERKKLNQWFFNISKFSQDLLDGLEKLDNWPNKVKVMQKNWIGKSFGCEINFKIEGDLPIETIKCFTTRPDTLFGFSFIAISVDHEISNFYKNNEEFSKFKNMCSKTGTTEEAIAVSEKIGFKTNLKAINPLNPNQKVPVYFANFVLMDYG

SEQ ID NO: 189882 - protein, 120 aa, Unknown
  Bacterial polypetide isolated from the Sargasso Sea
MDNYDFKKIEKNWQSIWENNKLASCDVTLGKNNFYNLCMYPYPSGDLHMGHIRNYTIGDVITRYKQKQGYNVLSPMGWDSFGLPAENAAIKTGIHPKKFTEDRIINMRDQIKRLGSLYDW

SEQ ID NO: 189883 - protein, 304 aa, Unknown
  Bacterial polypetide isolated from the Sargasso Sea
KVPVYFANFVLMDYGFGAVFGCPAHDQRDFEFAKKYDLPIKTVVKPKDINGNFEVKDEAYIGDGTMINSSFLDGLKTPDDAISKAIETIEKKNSGKKKINFRLKDWGISRQRYWGCPIPIAYDDKGNYITIPEEQLPIKLPENINLKTKGNPLDHQHDWKKIKIKGKQYVLETDTLDTFVDSSWYYLRFCSPKNSTYGYNQDEIKYWMPVDQYIGGVEHAILHLLYSRFFMLALGYKNKDFISREPFDGLFTQGMVCHETYKDKNNNWLSPNEVFSKDGKNFFKIGDANERIIVGSSESMSKSK

SEQ ID NO: 189884 - protein, 167 aa, Unknown
  Bacterial polypetide isolated from the Sargasso Sea
MDKEYNPNNIEANIQKYWDDNNSFVCKLDNPSEKFYCLSMFPYPSGKLHIGHVRNYTIGDVIARSNRMLGKNVFQPMGWDSFGLPAENAAIANDIHPSEWTRNNIIHMKSQLKRLGYAYDWSKEISTSDPDYYKWEQWFFLKLLKKKLVYKKLSEVNWDPVDKTVLG

SEQ ID NO: 189885 - protein, 264 aa, Unknown
  Bacterial polypetide isolated from the Sargasso Sea
LRDMGMVKNDEPFKKLLTQGMVLKDGAKMSKSKGNTVDPKEYIENYGADSIRTFMIFASPPEQSLEWSDNGLEGCHKFLKRLWALSFKISSLGSDAFVGSEKTLNDECKDLFIKINDDYEKRLNLNTVVSSCMEILNNINKRFNDEKVLCDKNDLYTCYDFLLLALSPIAPHISENLYKNILNKDIEDASWPQANFFHRNETEIKYLVQVNGKVRATILIDSEKSEDDVKEIAKEHENVSRHLENKDIIKVIFIKNRLINFVHS

SEQ ID NO: 189886 - protein, 288 aa, Unknown
  Bacterial polypetide isolated from the Sargasso Sea
KIGKKKINFRLKDWGVSRQRYWGCPIPIAYDPDGNVLTIPKDQLPVKLPDEIELKSKGNPLDKKKEWKSVTINGKKCVRETDTLDTFVDSSWYFLRFCSPKNHDYGFDLESIKYWMPVDQYIGGVEHAILHLLYSRFFMRAINHKNEKFSITEPFENLFTQGMVCHETYKDENNNWLNPEEVDTNDGKKFFIKNQPEKNVLVGSSESMSKSKKNTIDPEKMIENFGADAVRLFILSDSPPEKDIQWSEQGMVASYKFIQKFWLLHTKVLNKINESTNSKNQENDLELT

SEQ ID NO: 189887 - protein, 267 aa, Unknown
  Bacterial polypetide isolated from the Sargasso Sea
YARFTSADNDEKALDDDSKYWLPVDLYIGGIEHAILHLLYSRFFHKAMRDIGLVEGDEPFKKLLTQGMVLKDGFKMSKSKGNTVDPQKFIDKYGADTIRLYMMFTSPPEQSLEWSDTAIEGSYRFLKRLWALISDRKIFLEKPPTDFSKLELKLRQKSHQTLKKVTNDYGERNSFNTAIASIMELLNAIPDSFKSDDASSAEAFCLDEVIQFTLKMLSPITPHISLYLWKKYTDSDGYNFEHSWPKYSEDFLKVEDFQLIIQVNGKV

SEQ ID NO: 189888 - protein, 253 aa, Unknown
  Bacterial polypetide isolated from the Sargasso Sea
GNPLESHHSFVQTICPKCGSEARRETDTMDTFYDSSWYFMRFCDANNDESPFNRSSVDYWMDGGVDLYIGGIEHAVMHLLYARFFTKFTRDAGMNEVGEPFGRLVCQGMLNAPAPYCSDCNSEYHVDYFESACPSCGKELSSRSAKMSKSLGNTVSPEEMISRFGADTVRLFILFGANPEAGMDWSDSALEANHRQINSLFDAIDEAMALSDAPSKIDGWLLSRMRASQNRWIEAMSDVSLREGVMISHFEML

SEQ ID NO: 189889 - protein, 194 aa, Unknown
  Bacterial polypetide isolated from the Sargasso Sea
MNTELNIKAIEEKWQKKWEKLGLHSSDKKNTKNKKYCLTMFSYPSGDKLHVGHWYNYGPVDTFARFLKMNGYNVFQPQGFDSFGLPAENYAIKHGIHPKKSTHDNIAKMKSQLKKIGGMFDWSSEVQTSNEDYYRWTQWLFIQLYNKNLAYQKEALVNWDPIDQTVLANEQVLSDGTSERSGGIVIQKPLKQWF

SEQ ID NO: 189890 - protein, 77 aa, Unknown
  Bacterial polypetide isolated from the Sargasso Sea
MNDSYVPVEVEQEAQQRWEEEQSFIANDEHNGDKFFCLSMFPYPSGQLHMGHVRNYTLGDVISRYQRMKGYNVLHPH

SEQ ID NO: 189891 - protein, 296 aa, Unknown
  Bacterial polypetide isolated from the Sargasso Sea
DDKGQPKPVPDDQLPVKLPEKVDLNSKGNPLNSLEDWKNVVINGKSFTRETDTLDTFVDSSWYFLRFCSPEESNYGFNYDLINYWMPVDQYIGGVEHAILHLLYSRFFMRAISDKNEKFKFNEPFKGLFTQGMVCHETYKDETGKWFNPGEVETNDGKSYYLKSDRNKKIVVGPSESMSKSKKNTIDPENIIENYGADAVRLFILSDSPPEKDIQWSEQGMVASYKFLQKLWNLNQLVLNKIQLNIQNKENELILEKFVNNTIEKYNYNLSKFNYNVLIASLYETYNFFSEILKKE

SEQ ID NO: 189892 - protein, 230 aa, Unknown
  Bacterial polypetide isolated from the Sargasso Sea
PVPDDMLPVKLPENIDLKVKGNPLDSQKSWKEVEINGKKLTRETDTLDTFVCSSWYYLRFCSPKNSDYGFKKEDIDYWMPVDQYIGGVEHAILHLLYSRFFMRALSYENTNFDISEPFSGLFTQGMVCHETYKDSDDNWVSPDEIETINGKKYLKEDHSKKIKVGPSESMSKSKKNTIDPENIITNYGADSARLFILSDSPPEKDVQWSEEGIASSYKFIQKLWILNLKI

SEQ ID NO: 189893 - protein, 79 aa, Unknown
  Bacterial polypetide isolated from the Sargasso Sea
MLYDFKSIENKWQSYWSKNKTFKTEIDPSKPKYYVLDMFPYPSGSGLHVGHPLGYIASDIISRFKRNKGFNVLHPMGFD

SEQ ID NO: 189894 - protein, 307 aa, Unknown
  Bacterial polypetide isolated from the Sargasso Sea
FIDLYNAGLAYKKDALVNWDPVDQTVLANEQVIDGKGWRTGAQVEKKNLSQWFFKITYYAEELLNGLDSLKLWPDKVKTMQRNWIGKSSGAEIKFEIKDGDGFLNIFTTRPDTIYGATFIAVSINHPIVAKTLSIDEIKKIRNEFESVDDEKDKVGVYLKIKCSHPILNKEIPVYVANFVLDNYGEGAIFGCPAHDERDYEFAKKYSLPILKVIDCKDEDLPYSGDGKVINSEILNGLNKNEAIKKIISYFTNNKIGKEKINYKIRDWGVSRQRYWGCPIPVIYYEDGSYRVLENQSYQSYYLMMLI

SEQ ID NO: 189895 - protein, 322 aa, Unknown
  Bacterial polypetide isolated from the Sargasso Sea
MGVSFIALSSEHEITKRKLSENKDLQLWIEEMSKVKSAEKDQALQEKKGFFLNEFSYHPVTKEKIPIWVANFVISDYGSGALMGVPGHDQRDFEFATKYSLPILKVISSEKEDSDQASTDKGKLINSGQFDGLSFEDAFTKIQKFAEQNNFGRFEENFRLRNWGVSRQRSWGAPIPMMISENEDDNDAIPFSDLSDDELKADSIERNGKKYVKEKDTLDTFFESSWYYARYASFKSDADILDDEANYWLPVDQYIGGIEHAILHLLYSRFFCKVLNELGYLDTREPFTNLLCQGMVLMDGAKMSKSKGNVVNPDDLIGRIRC

SEQ ID NO: 189896 - protein, 227 aa, Unknown
  Bacterial polypetide isolated from the Sargasso Sea
QRDLDFANKYNLDVIPVILPNNKKENNFIITNEAFVGEGRLINSSFLNGLKIEEAKKIIIKNLKITNSGKDKITYRLRDWGLSRQRYWGCPIPMLYREDGKIVPVSKKDLPITLPPIKGLGGINNELGNIDSWKNTVCPETGMKATRETDTFDTFFESSWYYLRYCNPRSSEPFLKEDINYWLPVDQYIGGIEHAILHLLYSRFFVKALRDLGYININEPFQGLFTL

SEQ ID NO: 189897 - protein, 249 aa, Unknown
  Bacterial polypetide isolated from the Sargasso Sea
LYMMKMVKQIWYQKRILPVLLPENVNLSSKGNPLDNESDWKNITIEGKKFIRETDTLDTFVCSSWYYLRFCSPKNKDYGFNQEEIDYWMPVDQYIGGVEHAILHLLYSRFFMKALSYNNKKFNFNEPFKGLFTQGMVCHETYKDKDNNWVSPDEIELVGKQYQKKNEPENKIKVGPSESMSKSKKNVVDPENIIRNYGADAVRLFILSDSPPEKDVQWSEQGMIASYKFLQKLWTLHQKIKKKILENNK

SEQ ID NO: 189898 - protein, 213 aa, Unknown
  Bacterial polypetide isolated from the Sargasso Sea
MERFNFQLIEKKWQSSWDKKNINNNKNKKKFYCLEMFPYPSGKIHMGHVRNYTIGDVIARYKSMSGYNVMHPMGWDSFGLPAENASRENNLKPKDWTNQNIKEMKRQLKLLGLSIDWDLEISTCDPEYYKHQQELFIDFYKKGLVYKKENYVNWDPVEQTVLANEQVINGRGWRSNAVVERKKLSQWFFKISKYSEELLSDLEHYKDGQIECA

SEQ ID NO: 189899 - protein, 271 aa, Unknown
  Bacterial polypetide isolated from the Sargasso Sea
DWGISRQRFWGCPIPIIYREDGEVLAVEDSELPVKLPEIKNFTESSSALNNISDWKETICPKTGLKAIRETDTFDTFFESSWYYFRYCNARLEKPFDKKDIDYWLPVDQYIGGIEHAILHLLYSRFFTKALRDLKYFNLDEPFKGLFTQGMVTHITYKNKSGDWLEPKDVEMVNGTLKDNSGQEVITGKIEKMSKSKKNVVDPNDIINSYGADTARWFMLSDSPPERDLQWTDTGIAASFKFINKLYELVEKYKNHQSNNDENSTDINELK

SEQ ID NO: 189900 - protein, 292 aa, Unknown
  Bacterial polypetide isolated from the Sargasso Sea
DVIARYKSMNGFDVLHPMGWDSFGMPAENAARENNLNPKEWTKNNITIMKRQLKSLGLSIDWDLEISTCDEEYYKHQQELFIDFYNKGLVVRKETYVNWDPVDQTVLANEQVINGRGWRSNAVVERKKLSQWFFNISKFSNELLQDLDTLTDWPEKVKLMQKNWIGKSVGCEIDFEIEEINKKIKVFTTRPDTIFGATFLAVSVDHPICKKFEKKPEFIEFKKIASKVGTTEEAIANAEKIGFETGLSAKHPFIKNKKIPVFVANFILMDYGTGAIFGCPAHDQRDFDLRKN

SEQ ID NO: 189901 - protein, 276 aa, Unknown
  Bacterial polypetide isolated from the Sargasso Sea
PIDKIRCFTTRPDTLFGFSFLAVSVDHPLSEHFSNNPEFIKFREECSKTGTTEESIALGEKIGFKTNLFAINPLDKKQKVPVYFANFVLMDYGFGAVFGCPAHDQRDLDFANKYDLKVKTVVKPIDQDDNFKVKKEAYTGPGIIINSDFLNGFKVPEDSIIKTIDILEKKKLGKKKINFRLKDWGVSRQRYWGCPIPMAYDDGGNVHPIPKNKLPVILPEDINLNNKGNPLDNVKEWKEIKINGKKLTRETDTLDTFVDSSWYFIRFCSPKNEKYG

SEQ ID NO: 189902 - protein, 277 aa, Unknown
  Bacterial polypetide isolated from the Sargasso Sea
VPLNESELPLELPEVDKYEPSGTGESPLANIKSWVEVKDSESNIVGLRETNTMPQWAGSCWYYLRFIDPNNLEKGWNPEKEKYWMPVDLYIGGAEHAVLHLLYSRFWHHVLYDLGLVSTKEPFKKLFNQGMILGSDGSKMSKSRGNVVNPDETVDIYGSDALRIYEMFMGPLEKGKPWSTSGLQGCSRFIKKLWSILVDNEGDLSKHINDTESDKQTNQMLHQMIKKVSDNLEQLHFNTCVSEFMIFTNHIQKLDEINRELIRSFIVLLNPFMPHFS

SEQ ID NO: 189903 - protein, 246 aa, Unknown
  Bacterial polypetide isolated from the Sargasso Sea
DSFGMPAENAARQNNLSPKKWTEENIETMKSQLKKLGLSIDWDREISTCSPKYYKHQQKLFLDLYDKGLVYRKESYVNWDPIDKTVLANEQVVDGKGWRSGAVVERKKLNQWFFKISHFSEDLLNELENLKEWPEKVKTMQKNWIGKSYGCEIDFEIEGSEKINSIRCYTTRPDTLFGFSFLALSVDHPFAKYYEKDPDFIKFKNDCSKTGTTEESIAQAEKIGFKTNLLALNPLDKSIKVPVYFA

SEQ ID NO: 189904 - protein, 64 aa, Unknown
  Bacterial polypetide isolated from the Sargasso Sea
KELINNNNVEVKTNFRLRDWGISRQRYWGCPIPIIHCDDCGPVKVPEIDLPVELPEIDNISSKG

SEQ ID NO: 189905 - protein, 316 aa, Unknown
  Bacterial polypetide isolated from the Sargasso Sea
LNGLNIDEAKEKIINEIEKKGIGKKKINFKLRDWGISRQRFWGCPIPIIYREDGEILAVEDEDLPVKLPDIENFSETSSALSNISGWKDTVCPKTGLKAYRETDTFDTFFESSWYYFRYCNARLNKPFDKKDIEYWLPVDQYIGGIEHAILHLLYSRFFTKALRDLGYFNLDEPFKGLFTQGMVTHKTYKNINNEWIEPKDIEKYSGGLKDKDGLKVVSGKIEKMSKSKKNVVDPNDIINSYGADTARWFMLSDSPPERDLQWTETGIASSFKFINKLYETAGKLNKYKSNNSENIDLIDSLKSIINEVSENIENF

SEQ ID NO: 189906 - protein, 313 aa, Unknown
  Bacterial polypetide isolated from the Sargasso Sea
KKWQLTFEKEKLYNSKGSKKFYCLEMFPYPSGKIHMGHVRNYTIGDVIARFKFMNGYNVLHPMGWDAFGLPAENAAKENKLHPKNWTEKNIAEMRRQLKLMGLSIDWDLEVSTCDEKYYKHQQEIFIDFYNKGFVKRKENYVNWDPVEQTVLANEQVVNGKGWRSGAVVERKKLSQWFFDITKFSEDLLKGLDDLNYWPDKVKIMQRNWIGKSIGCEIKFDIEGENNKINVFTTRPDTIFGASFLAVSVDHPICSNFLKDEKYIKFKNECLKVGTTEEALANAEKIGFDTKLFAAHPFIKGKKLPIFVANFIL

SEQ ID NO: 189907 - protein, 316 aa, Unknown
  Bacterial polypetide isolated from the Sargasso Sea
RSGALVERKKLSQWFFNISKFSQDLLDGLDSLDTWPNKVKTMQKNWIGKSLGCEIDFSVEGDPTVKKIKCFTTRPDTLFGFSFLAVSVDHEISRLYKNNNEFLKFKEECSKTGTTEEAIAVGEKIGFKTKLEAINPFNPNQRVPVYFANFVLMDYGFGAVFGCPAHDQRDFDFAKKYNLDIKTVVKPLNEDVSFKVETEAYAGPGTLINSEFLNGLQVPDSSINEAIKILEARKLGRKKINYRLKDWGVSRQRYWGCPIPIVYDQNGNAHPVPKTMLPVKLPENIELNVKGNPLDSQEKWKKVIIDGKEFIRETDT

SEQ ID NO: 189908 - protein, 304 aa, Unknown
  Bacterial polypetide isolated from the Sargasso Sea
KIDDREKFYCLSMFPYPSGKLHMGHVRNYTIGDVISRYKRMNDFNVFQPMGWDAFGLPAENAAIENKVSPKDWTNANIDNMKKQLKSLGLSYDWSKELRTCDPKYYKWEQLIFKKFYDAGLVYRKKSIVNWDPVDETVLANEQVIDGKGWRSGAQIEIKEIDQWFIKITEYAEELLDSLDGLDWPENVKLMQKNWIGKSNGAEIKYKIDESDEYLTTFSTRPDTIFGVSFLAISPNHQLAIDLSKKDKNILKFLERCKDIKAAEADIAKAEKLGIDTNIKVIHPLTGEKLPLWIGNFVLLDYGT

SEQ ID NO: 189909 - protein, 111 aa, Unknown
  Bacterial polypetide isolated from the Sargasso Sea
MSRYNFKATEKKWQKTWEEKRCFHAEPDPEKEKYYVLEMFPYPSGRIHMGHVRNYTLGDVVSRYKKAIGFNVLHPMGWDAFGLPAENAALANNVAPAKWTNENIKTMKQQL

SEQ ID NO: 189910 - protein, 286 aa, Unknown
  Bacterial polypetide isolated from the Sargasso Sea
DQRDFDFAKKYNLKIKTVVKPTDKNNEYEVKDEAYSEEGIMINSEFLNGFKAPNESVIEAIKFLEKKKLGRKKINFRLKDWGVSRQRYWGCPIPVAYNRDGKILTISKDDLPVKLPEKVNLGSKGNPLDKENDWKKVFIDGEECVRETDTLDTFVDSSWYFLRFCSPKNEIYGFDYDEIKYWMPVDQYIGGVEHAILHLLYSRFFMRAISFQNNQFNFDEPFKGLFTQGMVCHETYKSEDNKWLSPDEVSTKDGKNFYEKNNLNKKVIVGPLESMSKSKKNTIDPE

SEQ ID NO: 189911 - protein, 237 aa, Unknown
  Bacterial polypetide isolated from the Sargasso Sea
MSKSKKNVVDPQQIIDDFGADTARFFMLSDSPPNRDMEWSDSGVEGSWRFLNKLWKFVKALPNKNTKDGLPTNISIQNKELLTFMNTTIKDVTKAIDEFHFNIAVAQIRSLFNLVSSYKVQNDNDAKVVLFVTSKLLILINPMVPHLAEELWFTLGNKDSISNECWPKVDLGYIQKDNIKIPIQVNGKVRAVIEVPIDLDKSDIKEIALKEKNVLKFLNKNPKKVIIIPNRVVNFVI

SEQ ID NO: 189912 - protein, 302 aa, Unknown
  Bacterial polypetide isolated from the Sargasso Sea
LRFCSPTNKMYGFDKNEIDYWMPVDQYIGGVEHAILHLLYSRFFMRAINYKNDKFKIKEPFEGLFTQGMVCHETYKDENNKWLSPEEVESKNGKEYYVKNNPNKKVKVGPSESMSKSKRNTIDPENIINNYGADAVRLFILSDSPPEKDVQWSEQGMIASYKFIQKLWTLHEKFKEKINKNYKDGDEEISIFTNQMIEKINYNLEKFNYNVIIANLYEAYNFFTQKLNKNINQKVLLDNYSKFLSIISPIIPHFSSECLTDLKLRPLQKWPIANKNFLKVNNIEYVIQINSKKRASLKLMAD

SEQ ID NO: 189913 - protein, 248 aa, Unknown
  Bacterial polypetide isolated from the Sargasso Sea
MKTTDEVAWQQAWSDANVFASNDDASKPKFYCLEMYPYPSGKMHMGHVRNYSIGDAVARYKRMRGFNVLYPMGFDSFGMPAENAAIAEGGHPHDITEKNMASITEQIKRMGFSYDWSRLLKSHDPNYYKWNQLFFTRFFKSGLAYREFAPVNWCESCSTVLANEQVKAGRCWRCNGPVRQKDMSQWFIDITKYAQQLLDGLETIEFPESVRLMQEDWLGRSEGAEIEFGIEGSDETIRVFTTRPDTLF

SEQ ID NO: 189914 - protein, 288 aa, Unknown
  Bacterial polypetide isolated from the Sargasso Sea
PKYYVLDMFPYPSGSGLHVGHPLGYIASDIVSRFKRSKGFNVLHPMGFDSFGLPAEQYAVKTGQHPKKTTEENVIRFKDQLDRLGLSFDWDREIKTSDSSYYRWTQWIFLKLYNSYYDHKLNKAQSIEKLKIPKNLNEEEIESFIDSKRLAYVDTIDVNWCEELGTVLANEEVIGGLSERGGFPVIKRPMKQWVMRITDYADRLLDDLSELDWPESIKLSQKNWIGKSEGAEIKFSIDNNFIEVFTTRPDTIFGATYLVLAPEHPLINHITTDEYKKSISEYVEQAQK

SEQ ID NO: 189915 - protein, 314 aa, Unknown
  Bacterial polypetide isolated from the Sargasso Sea
IMYREDGKVIEVPEDQLPLELPDDIDLSIPGNPLDNHPEWKFTKCPETGMNAVRETDTLDTFVDSAWYFLRFCSPLETKEPFNLDEINYWMPVDQYVGGVEHAILHLLYSRFFTKALDIKGMDEPFDSLFTQGMVCHHTFQNESNAWVYPDDVDKKGSKYFQISTGEPVTMGEIESMSKSKKNVIDPESIISTYGADSARWFMLSDSPPEKDINWTDSGINGAWKICQKIWAIVQNNKENLKQTTNNNDKTYKGKSLDFIKIIHQNLHAITQSIEKFQMNVSIAKVFEMVNAISKFQIEDEEGKEAINEALHIL

SEQ ID NO: 189916 - protein, 278 aa, Unknown
  Bacterial polypetide isolated from the Sargasso Sea
FVLMDYGFGAVFGCPAHDQRDFDFAKKYELEINTVVRPKNEKENFKVDKEAYPGPGVIINSDFLNGLEAPENSVIETINILEKRKMGKKQINYRLKDWGVSRQRYWGCPIPIAYDEKGNSVPIPKSMLPVKLPQNIDLEVKGNPLDAQKDWKIITIDGKKLVRETDTLDTFVCSSWYYLRFCSPNENKYGFTKDEIDYWMPVDQYIGGVEHAILHLLYSRFFMRAISFKNSEFNINEPFQSLFTQGMVCHETYKDQNNNWLSPEEVDSKDGKNFYLKS

SEQ ID NO: 189917 - protein, 269 aa, Unknown
  Bacterial polypetide isolated from the Sargasso Sea
EVEEKWQRLWEERGTNTHTREELKSAKDPFYNLMMFPYPSAEGLHVGNIYAFTGADVHGRYQRLRGKSVFEPMGFDAFGIHSENFALKVGTHPMDLIPSNVKNFTRQLRRIGGMFDWEHSVDTTDPTYYKWTQWIFLQFFKAGLAERKEAPVNWCPSCMTVLANEQVVGGECERCATPVEQRRIAQWFFRITDYAQRLLDNLDHIDWSETTLKAQRNWIGRSTGAQLRFPVVDEAGDETGTRIEVYTTRPDTVFGATYVVLSPEHPLVQ

SEQ ID NO: 189918 - protein, 247 aa, Unknown
  Bacterial polypetide isolated from the Sargasso Sea
INTMKDQLKKLGLSIDWDREISTCSEEYYKHQQLFFLELYEKGLVYRKENYVNWDPVDQTVLANEQVIDGKGWRSGADVERKKLNQWFLNISKFSQELLDGLDDLKQWPDKVKIMQKNWIGKSFGCEISFKTEGDLPVKEIKCFTTRPDTLFGFSFLALSVDHEISKFYLNDKEFQKFKAECSKTGTTEEAIAIGEKIGFKTSLVAINPLNPDQKVPVFFANFVLMDYGFGAVFGCPAHDQRDFDFA

SEQ ID NO: 189919 - protein, 268 aa, Unknown
  Bacterial polypetide isolated from the Sargasso Sea
KIEVFTTRHDTLFGASFCAISINHPLAIKIIAENKEAANFAKSCDGVDQEKVKKGFKTNLEVFHPLIKNKTLPVFIANFVLMEYGTGAIFGCPAHDQRDLDFAIKYSLEVTPVVTPDINEGDFKITTTAYTGQGHIINSSFLNGLTIKLAKQKVFEELSKIGIAKKQTNYKLRDWGLSRQRYWGCPIPVLYREDGEIIPVPKEMLPVKLPDVKKVGSEGNLLNNLKEWKNTVCPHTGKKAIRETDTFDTFFESSWYFLRYCSPRENSK

SEQ ID NO: 189920 - protein, 300 aa, Unknown
  Bacterial polypetide isolated from the Sargasso Sea
KECSKTGTTEESIAQGEKIGFNTNLMAVNPLNTKEKVPVYFANFVLMDYGFGAVFGCPAHDQRDLDFALKYNLPVKTVVKPYDKDKKYKVKKKAYTGPGEIINSDFLNGLKAPEESIIKTIEILEKKKLGNKKINFRLKDWGVSRQRYWGCPIPIAYDENGNVVKIPSEQLPVKLPENINLNEKGNPLDNVKSWKNIKINGTDCSRETDTLDTFVDSSWYFLRFCSPKNSKYGFDKDEINYWMPVDQYIGGVEHAILHLLYSRFFMRALNYKNSKFKITEPFEGLFTQGMVCHETYKDEY

SEQ ID NO: 189921 - protein, 273 aa, Unknown
  Bacterial polypetide isolated from the Sargasso Sea
GDVLARYKKLQGFNVLHPMGWDSFGLPAENAARENNLHPKEWTKENIKNMKVQLKQLGFSLDWDREISTCEPEYYKHQQEFFLELFKKDLVYKKDNYVNWDPEEQTVLANEQVINGKGWRSGVPVERKKLSQWFFNIKKFSQDLLDELDNLKNWPEKVKLMQKNWIGKSFGCEINFEIDNKNILNKIKVFTTRPDTIFGASFIAISVDHPIAKQFEKDKNFISFKSECSKIGTTEEALANAEKLGFNTDLFALHPFKKSKKLPIYIANFVLMD

SEQ ID NO: 189922 - protein, 281 aa, Unknown
  Bacterial polypetide isolated from the Sargasso Sea
APVERRLLSQWFLKITEYADDLLETLAELDRWPDQVRLMQANWINRSEGATVGFSLAGRTDSLDVFTTRPDTLFGASFCAIAANHPLALELAEKDPELASFIEGCNRMGTSEAAIETAEKEGYLTEIRACHPFSEDWELPVYVANFVLMEYGTGAIFGCPAHDQRDLDFARKYGLDVVPVVAPADGSGVEIGNEAFVGDGNIINSEFMNGLDVEAAKRRAIEELERLNSGQSKITYRLRDWGVSRQRYWGCPVPVIHCETCGTVPVPEADLPVTLPDDVDF

SEQ ID NO: 189923 - protein, 247 aa, Unknown
  Bacterial polypetide isolated from the Sargasso Sea
MAESSRYNFKDVENKWQSYWDKKKIFKAEVSSKKPKFYCLEMFPYPSGKIHMGHVRNYTIGDVLARFKLLQGFNVLHPMGWDSFGMPAENAAKQNNLNPKKWTEDNIKIMKSQLKKLGLSIDWNREISTCSEEYYKHQQKLFLELYDKGLVYRKESYVNWDPIDKTVLANEQVIDGKGWRSGAIVERKKLNQWFFKISNFSEELLSDLDNLNEWPEKVKTMQKNWIGKSFGCEIDFEIEGSKEVNNI

SEQ ID NO: 189924 - protein, 286 aa, Unknown
  Bacterial polypetide isolated from the Sargasso Sea
KNISTMKTQLKRLGLSIDWDREISTCSPNYYKHQQIFFLELYDKGLVYRKENYVNWDPIDQTVLANEQVIDGKGWRSGAQVERKKLNQWFFNISKFSEELLDGLKDLSGWPNKVKTMQTNWIGKSYGCEIDFKIEGDLPVKSIKCFTTRPDTLFGFSFLALSVDHPLSKHFENDPEYKKFKEECSKTGTTEESIAQAEKIGFKTNLKALNPLDPKIKVPVYFANFVLMDYGFGAVFGCPAHDQRDFEFAKKYNLNIKTVVRPKDPDDNFTVKNEAFIEDGIMINSS

SEQ ID NO: 189925 - protein, 209 aa, Unknown
  Bacterial polypetide isolated from the Sargasso Sea
MNQEYNPQKIEKTVQKFWEDNNCYRAIKNDQKKFYCLSMFPYPSGKLHMGHVRNYTIGDVISRYKRMRGFNVLQPMGWDAFGLPAENAAIQNKVDPQTWTEKNIANMKLQLKQLGFSYDWTKELKTCDPNYYRWEQEMFTLLQDNGLVYKKKSLVNWDPVDKTVLANEQVIDGKGWRSGATVELKEIDQWFLKITDYADELLQSIDNLD

SEQ ID NO: 189926 - protein, 250 aa, Unknown
  Bacterial polypetide isolated from the Sargasso Sea
LDNLNSWPNKVKIMQKNWIGKSFGSEIDFKIEGDLPVKNIKCFTTRPDTLFGFSFLALSIDHEISKYFSDNKDFLRFKEECSKTGTTEEAVAVAEKIGFKTNLIASNPLNPTHKVPVYFANFVLMDYGFGAVFGCPAHDQRDFDFAKKYNLEIKTVVKPFNEKENFQVKDEAYPGPGVIINSDFLNGLEAPDNSVIETIKILEEKKLGKKQINYRLKDWGVSRQRYWGCPIPVAYDENGNVHPIPKSMLP

SEQ ID NO: 189927 - protein, 267 aa, Unknown
  Bacterial polypetide isolated from the Sargasso Sea
MKINGKNFWEDNNSFKSEVDKSKKKFYCLEMFPYPSGKVHMGHVRNYTIGDILSRYKTMEGFNVLHPMGWDSFGMPAENAAKENNLDPKVWTEKNISTMKNQLKKLGLSIDWDREISTCSNDYYKHQQLFFLELYEKGLVYKKENYVNWDPIDETVLANEQVIDGKGWRSGAMVERKKLSQWFFNISKFSEDLLKGLDELENWPNKVKVMQKNWIGKSFGCEIDFKIEGDLPVNNIKCFTTRPDTLFGFSFLAVSVDHPISKFFKDQ

SEQ ID NO: 189928 - protein, 286 aa, Unknown
  Bacterial polypetide isolated from the Sargasso Sea
ADKIEVFTTRPDTIFGMSFCAISPNHPLTKTLAKDNEQIALFVEQCNSTSTGLANLEKQEKEGLDTGIKVKNPFKKGSVPLYIANFVLMEYGSGAIFGCPAHDQRDLEFALKYNLDVIPVVCPDDRDAATFMIEKEAFSGDGKIINSDFLNGLTIEDAKEKIISLLSKKNIGENKVTFRLKDWGISRQRYWGCPIPVIYCEKCGVIPEKKENLPVKLPENVSFKDPGNPLLSASDWLITDCPVCGNPAKRETDTMDTFVDSSWYFIRFTSPKNSKPTEENDLKYWM

SEQ ID NO: 189929 - protein, 281 aa, Unknown
  Bacterial polypetide isolated from the Sargasso Sea
MGLAIDWSREIATCKPDYYKWNQWLFLKMLEKGIAYKKTGTVNWDPVDQTVLANEQVIDGRGWRSGALVEKREIPMYYLRITQYADELLNDLDGLGWPERVKIMQQNWIGKSFGVNFGFPYELDGEKKLLRVFTTRADTIMGVTFCAIAAEHPLATRLAQDKPELLAFIDECKRGGVAEADVATMEKKGVATGFSVTHPLTGEPVEVWIGNYVLMSYGEGAVMGVPGHDERDFAFAKKYGLPIKQVISAEGQQYSLDAWQEWYGDKETAVCVNSGKYDGLR

SEQ ID NO: 189930 - protein, 297 aa, Unknown
  Bacterial polypetide isolated from the Sargasso Sea
AFTDEAFKYWMPVDQYIGGVEHAVMHLLYSRFFMRALKFVKTVDLKEPFNSLQTQGMVCHQTFKTQKEKWLFPKQVTKENNTFFHINTKEEVIAGRIEKMSKSKKNVVDPQQIIQTYGADTARFFMLSDSPPNRDMEWSDSGIEGAWRFLNKLWNFVFNLEIKNIDNNLPTNLSKSHKKLLATLNTTIEEVTKSIDDFHFNIAVASIRSLFNAISSYKILNNDDKSVILHNVKKLLVLINPMVPHIAEALWENLNEKVLIANESWPIADKSFEEKDIIKIPVQVNGKMRAIIEVQKD

SEQ ID NO: 189931 - protein, 192 aa, Unknown
  Bacterial polypetide isolated from the Sargasso Sea
LKDMQKNWIGKSKGAIIRFKVYNKNEQIEAFTTRPDTIFGVTFITLAPENEIISRIVNKDQKDEVDKYIKQVVNKSDLERQSDIKNISGVFSGAYATHPFTRNKIPIWIGEYVLSGYGTGAVMGVPCGDQRDYDFANFFRIPIKNIFHKIDISKSAFVEKSNFKITNSDFLNGLSFKDAFARTIDELEKRDS

SEQ ID NO: 189932 - protein, 312 aa, Unknown
  Bacterial polypetide isolated from the Sargasso Sea
YWYRYMDAHNTGAFIDKEVQEYWGNVDLYIGGSEHATGHLLYSRFWNKILFDLGHVNQEEPFKKLINQGMIQGRSNFVYRVKGENKFVSKGLKKDYDTTPMHVDVSLCRNDELNIEGFKSWRPDLADAEFILEDGKYMCGWEVEKMSKSKYNVVNPDDIIERYGADTLRLYEMFLGPLEQFKPWNTNGIDGVKKFLGKLWRLFHNGQGEFEVSADAPTKEELKALHKTIKKAGEDIDRYSFNTSVSTFMICVNELSALKSNNRAVLQDLLVVISPYAPHITEELWSLLGHETSIIDAAYPEFNEVYLKEDDI

SEQ ID NO: 189933 - protein, 236 aa, Unknown
  Bacterial polypetide isolated from the Sargasso Sea
MESEYNHIVIESEIQDKWQSEDLYSINVDSKKPKYYCLSMFPYPSGKLHMGHVRNYTIGDVVSRFKRTQGFNVFQPMGWDAFGLPAENAAIENKTHPMKWTEKNIETMKQQLKSLGYSYAWEKELKTCEPEYYKHEQEIFIKMFEQGLVYKKKSMVNWDPIDKTVLANEQVIDGKGWRSGAKIELKEIDQWFLKITNYADELEKSLEQLDWPENVKTMQKNWIGKSYGAEISFQIE

SEQ ID NO: 189934 - protein, 298 aa, Unknown
  Bacterial polypetide isolated from the Sargasso Sea
LGYIASDIYSRYKKMEGFNVLHPMGYDSFGLPAEQYAIQTGKHPALTTKENISRYRDQLDKLGFCFDWDREVRTSSPSYYKWTQWIFKQLYNSYFDLKENKAVNIEQLRIKLSKNGTTNLHAYSESKQSVSAKEWNLMSEEEKEVFLLNYRLTYLADSLVNWCPKLGTVLANDEVVNGLSVRGGFPVVQKTMRQWSMRIKAYSERLLSGLDEIDWSDSLKEQQRYWIGKSFGCSVEFKLEKENTKSIEVFTTRPDTIFGVSFLVLAPEHPLVNKITTEDYIKNVTEYVKLASNKSDLD

SEQ ID NO: 189935 - protein, 62 aa, Unknown
  Bacterial polypetide isolated from the Sargasso Sea
DPNNDESSWDKESESYWMPVDLYIGGVEHAVLHLLYSRIWCHVLHDLGLVSQREPFQKLYNQ

SEQ ID NO: 189936 - protein, 251 aa, Unknown
  Bacterial polypetide isolated from the Sargasso Sea
KTVVKPEGEKDKFEVKDEAYSGPGFLINSEFLNNLKVPEESIIKTIDILEERKIGKKQINFRLKDWGVSRQRYWGCPIPMAYDENGKVIPIPKNELPVKLPENINLNSKGNPLDSEKDWKNISINGKNYIRETDTLDTFVCSSWYYLRFCSPKNSDYGYKQDEIDYWMPVDQYIGGVEHAILHLLYSRFFTRALGYKNKNFKINEPFKGLFTQGMVCHETYKDQNNNWLSPDEIEYINNQLYKKGDPKNKV

SEQ ID NO: 189937 - protein, 186 aa, Unknown
  Bacterial polypetide isolated from the Sargasso Sea
MDTFVDSSWYYLRFLDSNNDEEPFKSEYINDWLPVDQYIGGVEHAILHLLYSRFFVKALRDLGIIEIDEPFNNLFSQGMINFEGAKMSKSKGNIVDPESYFKSHGADALRLYILFMAPPSDGVDWNDGGIEGTKRFLNKLWENLDQIIDMKIDENNNNEFGNEIERKLNQTIESVTNHLEKFEFIQ

SEQ ID NO: 189938 - protein, 265 aa, Unknown
  Bacterial polypetide isolated from the Sargasso Sea
MAVPGHDERDWEFASKYNLPIVEVVEGGDVSKAAFTTKGDAKIINSSNDKTLSMDGLTVDRAIKEAISFIEKNSIGRATVNYKLRDWLFSRQRYWGEPFPLIHKDDSVELIQEKDLPVMLPEVENYKPSDDGKSPLSLVKNWVEVKDESGNIIGLRETNTMPQWAGSCWYFLRFTDPKNENEAWSKEKENYWMPVDLYIGGQEHAVLHLLYSRFWNHVLYDLGLVSTKEPFKKLYNQGMILGDDGTKMSKSRGNVINPSEIMDEY

SEQ ID NO: 189939 - protein, 182 aa, Unknown
  Bacterial polypetide isolated from the Sargasso Sea
MERLNFQVIEKKWQDRFANENLYRKDGKKFYCLEMFPYPSGKIHMGHVRNYTIGDVVARYKYLNGFNVLHPMGWDAFGLPAENASKLNNLHPKEWTKQNINTMKKQLKLLGLSIDWNLEISTCDKEYYKHQQSLFIDFFKKGLVSRRETYVNWDPVEKTVLANEQVINGRGWRSNAPVERKK

SEQ ID NO: 189940 - protein, 248 aa, Unknown
  Bacterial polypetide isolated from the Sargasso Sea
ATFNYGLSIDWDREIATCHPEYYKHEQKFFIDMFNAGLAYKKEAEVNWDPVDQTVLANEQVIDGRGWRSGAIVEKKKLSQWFLKISKYSEELLNDLNKLDKWPHKVKIMQSNWIGKSVGAEIDFKIQNSEDKIKIFTTRPDTLFGATFIAISPDHPISLQLSEHNEKIKDFILSCKKEDADKNKMGILLDSKAEHPLIKKKGLPIFIANFVLMEYGLGAIFGCPAHDQRDLDFANKYKLEVIPVVKPH

SEQ ID NO: 189941 - protein, 177 aa, Unknown
  Bacterial polypetide isolated from the Sargasso Sea
MKQWPNKVKVMQKNWIGKSFGCEISFKIEGNLPVKEIKCFTTRPDTLFGFSFLALSVDHEISKYYSDDEKFQEFKKECSRTGTTEEAIAIGEKIGFKTNLMAINPLDPSQKVPVFFANFVLMDYGFGAVFGCPAHDQRDFDFAKKYKLNIKTVVRPIDEAETFVVKEEAYTGPGVII

SEQ ID NO: 189942 - protein, 214 aa, Unknown
  Bacterial polypetide isolated from the Sargasso Sea
IGGIEHAILHLLYSRFFHKLLRDFGLVNSDEPFDRLLCQGMVLAETFYRKDEKGGDIWISPSDVETETDEKGRVTKAWHKEDGEPVFSSGMSKMSKSKNNGIDPQQVIAQYGADTVRLFMMFTAPPEQTLEWSDSGVEGAHRFLKRVWKYAVDVKAAGYQALEKSALTNPQKVLRRELHKAIAKVSDDVERRQTFNTAIAAIMELSNKLIKAPL

SEQ ID NO: 189943 - protein, 39 aa, Unknown
  Bacterial polypetide isolated from the Sargasso Sea
MSQYNAKSIEKKWQKAWEQAGVFQSKTDKTKPKYYVLEM

SEQ ID NO: 189944 - protein, 281 aa, Unknown
  Bacterial polypetide isolated from the Sargasso Sea
AAIKTGIHPKKFTEERISNMRDQIQRLGSLYDWDKEVAAHDKNYYRWTQYLFIQLFNNGLAYKEDAPVNWCTSCNTVLANEQVVEGNCERCDSEVIKKNLNQWFFKISNYSDELLDGLEKIGNWPENVKSMQENWIGKSSGVQFNLKIDESDLNFDVFTTRPDTLFGMTFAVISPEHDLMNEILSISSNSKEINKYIDKAKSKSEFERMSITKEKTGVDTGLKVLNPVNNKSVPLWVADYVLINYGTGAIMAVPGHDERDYEFAKKYDLEIIQVIIDKDHS

SEQ ID NO: 189945 - protein, 230 aa, Unknown
  Bacterial polypetide isolated from the Sargasso Sea
REQEKMSKSKFNVVNPDEICNQYGADTLRMYEMFLGPIEQSKPWDTRGISGVHSFLKKFWNLFFQDGNIYLSDEEPSKESLKSLHKTIKKVSEDIEKLSLNTCISSFMICINELSSMKCNNRLILENLLILISPFAPHFAEELWNQIGNSKSIVDEKYPEFQERYLVESEKVYPVSFNGKTKFTINLSLDLNHQEIEEAVLSNEKTKSILNNNTPKKIIVVPGKIINIVI

SEQ ID NO: 189946 - protein, 241 aa, Unknown
  Bacterial polypetide isolated from the Sargasso Sea
MLNVRYNFLEIEKKWQEFWKNNETYKVGFSSKPKFYVLDMFPYPSGAGLHVGHPLGYIASDIYSRFKRHKGYNVLHPQGYDSFGLPAEQYAIRTGQHPRKTTSENINMYRRQLDRIGFSFDWSREIRTSDPKYYKWTQWIFILMFNSYYCPKDDKAKSIESLICKFEKDGDKSLKEDLLELGYSFTSSQWKRFDDKIKSDILMNFRLAYLTDGDVNWCEELGTVLANDEIINGVSERGGYP

SEQ ID NO: 189947 - protein, 289 aa, Unknown
  Bacterial polypetide isolated from the Sargasso Sea
MDTGLTVAHPLDPDWHLPVWIANFVLMDYGTGAIFGCPAHDQRDLDFARKYELPVHDVFLPAEGGEPVENTAFVPFKTDAVRYVRPLGAAGTMTGEDAIVQAIDFCEAKGVGHGVTKFRLRDWGLSRQRYWGCPIPVVHCDTCGVVPEAKENLPVELPKDVTFDRPGNPLDWHPTWRDTACPKCGAAAKRETDTMDTFVDSSWYYARFTSPNADTPTDVDAAKYWMNVDQYIGGVEHAILHLLYSRFFARAMEKTGHLPASANEPFDALFTQGMVTHETYATKGKDGRT

SEQ ID NO: 189948 - protein, 213 aa, Unknown
  Bacterial polypetide isolated from the Sargasso Sea
MNRYNFNTIEAKWQKYWEDNNTFQCKTDKIKKKFYCLEMFPYPSGKIHMGHVRNYTIGDVLARYKLLKGFNVLHPMGWDSFGMPAENAARLNNLDPKKWTEENISVMKSQLKKLGLSIDWNREISTCSPDYYKHQQKFFLELYDKGLVYRKENYVNWDPIDQTVLANEQVIDGKGWRSGAIVERKKLNQWFFNITKFSEVLLEGLNQLDNWPK

SEQ ID NO: 189949 - protein, 192 aa, Unknown
  Bacterial polypetide isolated from the Sargasso Sea
MSRYNFTAVEKKWQEKWKKNSNFKSKLDRSKKKFYCLEMFPYPSGRIHMGHVRNYTIGDVLARYKKLNGFNVLHPMGWDSFGMPAENAAKQNKLDPKTWTEKNISTMKTQLQQLGFSIDWDREISTCSPNYYKHQQTFFLELLDKGLVYRKENYVNWDPVDQTVLANEQVIDGNRMEIWSFCRKKKIKSMVF

SEQ ID NO: 189950 - protein, 304 aa, Unknown
  Bacterial polypetide isolated from the Sargasso Sea
GRIHMGHVRNYTLGDVVARYKRSQGYNVLHPMGWDAFGLPAENAARDKNIHPAKWTYDNISNMREELKRMGLSIDWNRELATCHPGYYSHQQNIFLDMLEHGLVYRSSSLVNWDPVDNTVLANEQVIDGRGWRSGAPVEKRELPQWFFKITEFEEELLSSIGGLERWPERVRLMQENWIGRSEGLSINFSIENSDEKLEVYTTRHDTLFGATFCAISVDHPLAKSISLINNDAKLFIADCNKLGTSEVTIEKAEKKGFDTGLKAIHPFSKNRLPIFISNFVLMHYGTGAIFGCPAHDQRDLEFA

SEQ ID NO: 189951 - protein, 59 aa, Unknown
  Bacterial polypetide isolated from the Sargasso Sea
MEMFPYPSGKIHMGHVRNYTIGDVLARYKSLKGFNVLHPMGWDSFGMPAENAAKQNNLD

SEQ ID NO: 189952 - protein, 266 aa, Unknown
  Bacterial polypetide isolated from the Sargasso Sea
WDAFGLPAENAAIENKTHPSTWTYSNIETMKIQLKQMGLSYDWERELTTCDPSYYKFEQKMFLDFYKAGIAYKKETLVNWDPIEQTVLANEQVVDGRGWRSGAEVEKKKMEGWFLKISNFADELLNELDNLKDWPDKVKIMQKNWIGKSYGAHINFSIKNSSDKLEVFTTRPDTIFGATFIAISPQHPLAKKIAAKDPKASDFINFCERQSSKEIDVEKAEKHGYETNVFVYHPFNKKISLKIFIANFILMDYGTGAIFGCPAHDQ

SEQ ID NO: 189953 - protein, 269 aa, Unknown
  Bacterial polypetide isolated from the Sargasso Sea
TYYADELLSSLSEVDWPENVKTMQENWIGKSHGAEIKYQIEGSEECLTAFSTRPDTIFGVSFVAISPNHEIALSLSKKDKEIESFLIKCKETSSAEADMAKAEKLGIDTGIKVIHPLTNKRIPVWIGNFVLLDYGTGVVMGVPGHDQRDFEFASKYDLDIKQVISIGKDDKLPVLNKGILINSDKYDDLNSDSASKKIIEELSEKNLGEGLIQFRLRDWGVSRQRYWGCPIPVIYENGDAKLVEENELPVILPDLPKNSPPIPLNQNEN

SEQ ID NO: 189954 - protein, 315 aa, Unknown
  Bacterial polypetide isolated from the Sargasso Sea
MGIKKINYRLRDWGISRQRYWGCPIPVIHCEKCGVVPEKKENLPIELPKSVTFDLPGNPLNRHKEWLITKCPNCNKQAKRETDTMDTFVDSSWYFARFTSPKSANPTDANSLDYWMNVDQYIGGVEHAILHLLYSRFFCRAMFETGHIPQKSKEPFSSLFTQGMVCHETYRDEDGKWLSPNEVKEIKKVNNKRNFINIKTGSYIELGPSIKMSKSKKNVVDPEDIIDQFGADTARWFMMSDSPPERDVEWTTAGVEAAWRHLQKVWRISLQIYNEGKKLNSVAEFILDLTENKEEYNLLQATHNSINDVTHCLTN

SEQ ID NO: 189955 - protein, 288 aa, Unknown
  Bacterial polypetide isolated from the Sargasso Sea
RYWGCPIPIAYDENEKVYPIPKSMLPVELPENIDLNVKGNPLDSQNNWREININGKKLFRETDTLDTFVCSSWYYLRFCSPRETEYGFKKEDIDYWMPVDQYIGGVEHAILHLLYSRFFMQALSHDNVNFNILEPFSGLFTQGMVCHETYKDPDNNWVSPDEIENIGGKRYLKKDKSRIISVGPSESMSKSKKNTIDPENIIANYGADSARLFILSDSPPEKDVQWSEEGIVSSFKFIQKLWKLNEKVVDEINKNHNADYDNEILKYTNKYLKRSSRIILKVLVTIKL

SEQ ID NO: 189956 - protein, 295 aa, Unknown
  Bacterial polypetide isolated from the Sargasso Sea
IYGCPAHDQRDLDFANKYNLEIIQVISPTSKEEFDHKNAITDDGTLINSDFINGLNVIDAKKAIIDKLVELKIGEQKINYRLRDWGISRQRYWGCPIPIMYREDGEIIEVPENELPIKLPEDIDLSVPGNPLDNHPTWKYTKCPKTGMNAIRETDTLDTFVDSAWYFLRFCSPDSNSPFDELESKYWMPVDQYVGGVEHAILHLLYARFFTKALGKENFREPFESLFTQGMVCHHTYKSESGNWVFPEDVIREGNSLKQISTGETVIEGPIESMSKSKKNVIDPETIIHSFGADA

SEQ ID NO: 189957 - protein, 149 aa, Unknown
  Bacterial polypetide isolated from the Sargasso Sea
MHLLYSRFFHKAMRDMGLVEGDEPFKKLLTQGMVLKDGYKMSKSKGNTVDPQKFIDQYGADTIRLYMMFTSPPEQSLEWSDKAIEGSYRFLKRVWSLLSERKQFTEKLPNKFTKYELQLRQKSHKTLQKVTHDYAEQNSFNTAIASIME

SEQ ID NO: 189958 - protein, 314 aa, Unknown
  Bacterial polypetide isolated from the Sargasso Sea
FLVSGYTDKLRVYTTRPDTIFGATYMVLSPEHHLVEKITTDDQIAAVKEYQEEASKKSDLDRQELNKEKSGVFTGAHAINPVNGKEIPIWIADYVLVSYGTGAIMAVPGQDERDWEFAEKFDLPIIRTVEPTVGFEGKAFTGQGPAINSEFLNGLPIQKAKDKIIDWLEEKGAGNKAVNFKLRDWLFSRQRYWGEPFPIIHTDGKPKAIGYDELPLELPEVEKYQPTGDGEPPLANATEWLKTVDAETGNLAIRETNTMPQWAGSCWYYLRYISPDWDGGPVDPEYEKYWMPVDLYVGGAEHAVLHLLYARFGI

SEQ ID NO: 189959 - protein, 245 aa, Unknown
  Bacterial polypetide isolated from the Sargasso Sea
KWQSYWDREKKFKAEVSSKKPKFYCLEMFPYPSGKIHMGHVRNYTIGDVLARFKLLQGFNVLHPMGWDSFGMPAENAAKQNNLNPKKWTEENIKVMKSQLKKLGLSIDWDREISTCSEEYYKHQQKLFLELYDKGLVYRKESYVNWDPIDKTVLANEQVIDGKGWRSGAIVERKKLNQWFFKISNFSEELLADLDDLNEWPEKVKTMQKNWIGKSFGCEIDFEIEGSNKVKNIKCYTTRPDTLFG

SEQ ID NO: 189960 - protein, 258 aa, Unknown
  Bacterial polypetide isolated from the Sargasso Sea
FNLDEPFKGLFTQGMVTHVTYKNKNGDWIEPKDVEIVNGGFKDNKGQEVTTGKIEKMSKSKKNVVDPNDIISSYGADTARWFMLSDSPPERDLQWTDTGIVASFKFINKLYDLVEKYKHYQSENNKDSRDINKLKNIINEVAENIEAFQFNKSVAKIYEFVNILSNALLKNKLSLKNFKWSLEKLSIILQPFVPHISEEIWSNLGNKSLCINQSWRLESVVKKSEIKIAVQINGKTKEIIEIEDKISKEKVLETVKLS

SEQ ID NO: 189961 - protein, 299 aa, Unknown
  Bacterial polypetide isolated from the Sargasso Sea
GCFIKIKSMQGFNVLHPMGWDSFGMPAENAAKENNLHPKSWTEKNISVMKNQLKKIGLSIDWDREISTCSEEYYKHQQLFFIELFKKGLVYRKENYVNWDPVDETVLANEQVIDGKGWRSGAVVERKKLSQWFFNISKFSDDLLNGLDELKNWPNKVKTMQKNWIGKSFGCEIDFKIEGELPIKEIKCFTTRPDTLFGFSFLAVSVDHPISKYFEKDPKFGEFKKECSKTGTTEESIAQGEKVGFKTKLLAINPLDPSQKVPVYFANFVLMDYGFGAVFGCPAHDQRDLDFATKYIFHQ

SEQ ID NO: 189962 - protein, 280 aa, Unknown
  Bacterial polypetide isolated from the Sargasso Sea
EQVIDGKGWRSGATVERKKLNQWFFNISKFSEELLKGLENLKDWPNKVKIMQRNWIGKSFGCEIDFKLQKNEQINSIKCFTTRPDTLFGMSFLAVSIDHPLSKFYEKKSEFIKFKDECAKTGTTEEAIAQAEKIGFKTNLRAINPLNNSKTVPVYFANFVLMDYGFGAVFGCPAHDQRDLDFANKYGLEVLPVVKPMNDDKFSITNEAYTGPGKIINSDFLNNLKVPEESIIKAIEYLEENKIGKKKINFRLKDWGVSRQRYWGCPIPIVYDENNNIKKV

SEQ ID NO: 189963 - protein, 271 aa, Unknown
  Bacterial polypetide isolated from the Sargasso Sea
MDYGFGAVFGCPAHDQRDLDFALKYNLPVKTVVKPLDKDKNYKVKKEAYTGPGEIINSNFLNGLRVPDQSIIKTIEILEEKKLGKKKINFRLKDWGVSRQRYWGCPIPIAYNENGNVVKIPIDELPVKLPENINLKEKGNPLDKVESWKNIKINGINCHRETDTLDTFVDSSWYFLRFCSPKNKDYGYDLEEINYWMPVDQYIGGVEHAILHLLYSRFFMRAINFKNNNFKITEPFEGLFTQGMVCHETYKDENKNWLSPEEVESKDGKNF

SEQ ID NO: 189964 - protein, 282 aa, Unknown
  Bacterial polypetide isolated from the Sargasso Sea
LQKGVSCNWDPVENTVLANEQVIDGKGWRSGADVEQKKLSQWFFKITSHANSLLESLENMPGWPEKVKTMQKNWIGRSVGCEIHFEIESGYKEYKPEKLEIFTTRPDTIFGATFIAVSPFHPIVDDILKSDPDVVEEINGLRSQKLNEETISKNEKIGISTALKIKHPFIEGKKLPLFIANFILMDYGTGAIYGCPAHDQRDFDFAKKYNLEIIKVIKPDDTVAPSDNEAYTGEGSLINSSFLNGLNITEAKDKIISELEKIKIGKKTINYRLRDWGISRQR

SEQ ID NO: 189965 - protein, 293 aa, Unknown
  Bacterial polypetide isolated from the Sargasso Sea
IDYWMPVDQYIGGVEHAILHLLYSRFFMRAINYKNENFKITEPFQSLFTQGMVCHETYKDKQNNWLSPDQVERIGDKYFLKGNKNEIVKVGPSESMSKSKKNVIDPEHIIENYGADSVRLFILSDSPPEKDVQWSEQGMVSSYKFIQKLWVLHKIIKSKLLDENKDKFDENIEKFTNQTISKITSNLEKFNYNVIIANMYETYNYLINYLKDNKNMSNLENNYKKILICFSPVIPHFSSECLDEIGVTNYKWPEYDEKFIQDDNINIVIQINGKKRTLLETEKGMKNQNFGNR

SEQ ID NO: 189966 - protein, 108 aa, Unknown
  Bacterial polypetide isolated from the Sargasso Sea
MNFVDRYNFKIVEEKWQNYWHKNKSFKTDLDTNKKKFYCLEMFPYPSGKIHMGHVRNYTIGDVLARYKTLQNFNVLHPMGWDSFGMPAENAAKENNLDPKDWTEKNIS

SEQ ID NO: 189967 - protein, 266 aa, Unknown
  Bacterial polypetide isolated from the Sargasso Sea
SELPITLPEDVDLNSSGNPLENHPRWKKTIHKKTGKPAIRETDTLDTFVDSSWYFLRFCSPKNEKYPFESKETNYWMPVDQYIGGIEHAILHLLYSRFFMKAVKQTNNKIKCSEPFKNLFTQGMVCHETYKDLEGNWLDPLEIEKTSEKKAIKKSDKTKVTVGPSESMSKSKKNTVDPETMIKQYGADSVRWFMLSDSPPEKDVQWSDAGVVSSSKFLQKIWNLNQSVLDRNKTKIKEDEKIQKSFENKIDLSVYKIDSAINNFQF

SEQ ID NO: 189968 - protein, 262 aa, Unknown
  Bacterial polypetide isolated from the Sargasso Sea
KGIAYKKTGTVNWDPVDQTVLANEQVIDGRGWRSGALVEKREIPMYYLRITQYADELLNDLDGLGWPERVKIMQQNWIGKSFGVNFGFPYELDGEKKLLRVFTTRADTIMGVTFCAIAAEHPLATRLAQDKPELLAFIDECKRGGVAEADVATMEKKGVATGFSVTHPLTGEPVEVWIGNYVLMSYGEGAVMGVPGHDERDFAFAKKYGLPIKQVISAEGQQYSLDAWQEWYGDKETAVCVNSGKYDGLRYTDAVDAVAAEL

SEQ ID NO: 189969 - protein, 310 aa, Unknown
  Bacterial polypetide isolated from the Sargasso Sea
QLPVKLPEKINLKSKGNPLDQEKEWRKININGIDCLKETDTLDTFVDSSWYFLRFCSPNNEHYGFDYDAVKYWMPVDQYIGGVEHAILHLLYSRFFMRAITYKNNNFSLSEPFESLFTQGMVCHETYKDKNNNWLSPDQIDTKDGKKFYVKNQPDNIVLVGPPESMSKSKKNTIDPAKMIENYGADAVRLFILSDSPPEKDVQWSEQGMLASFKFIQKFWLMNNRIKKIIEKCSNEENQEGDFELTKFTNLLINKININLERFNYNVIIANMHETYNFLNKILDKKFNKKVLCENYKNILTIMSPCHTTI

SEQ ID NO: 189970 - protein, 263 aa, Unknown
  Bacterial polypetide isolated from the Sargasso Sea
KNGDWLEPKDVEMVNGNFKDNNGQEVITGKIEKMSKSKKNVVDPNDIINSYGADTARWFMLSDSPPERDLQWTDTGIAASFRFINKLYDLVEKYKHHQSNDDENSKDINELKIIINEVAENIEAFQFNKSVAKIYEFVNILNDALLKNKLSQNNFKWSLEKLSIILQPFVPHISEEIWSSLGNQTLCINETWPLEDVIKKSEIKIAVQINGKTKEIIEVDDQFSKEKVLETVKLNDKIKKNLLGKNIMREIYVPGKIVNLVVK

SEQ ID NO: 189971 - protein, 285 aa, Unknown
  Bacterial polypetide isolated from the Sargasso Sea
WPNKVKTMQKNWIGKSFGCEIDFKVEGDLPVKNIKCFTTRPDTLFGFSFLALSIDHEISKFYRENEKFLKFKEECSKTGTTEEAIAVGEKIGFKTNLFAINPLNPKQKVPVYFANFVLMDYGFGAVFGCPAHDQRDFDFAKKYNLNIKTVVRPKDEDDDYQVTDEAYPGEGVMINSEFLNGLDAPNKSVIETIKILEDKKLGLKKINFRLKDWGVSRQRYWGCPIPVAYDENGEVYEIPDSMLPVKLPQKINLNVKGNPLDHISEWKEIEIDGKKLVRETDTLDT

SEQ ID NO: 189972 - protein, 258 aa, Unknown
  Bacterial polypetide isolated from the Sargasso Sea
MGWDSFGLPAENAAKEKSIHPETWTKENINSMRTQLKGMGLSYDWNREISTCDKEYYKFEQKMFIDFLKLGLAYRKESWVNWDPIEKTVLANEQVIDGCGWRSGAKVEKRLLSQWFLKMTAFANDLLETLDELKNWPDKVRLMQSNWIGKSIGANIDFKIVNNEKKIKVFTTRPDTLFGASFIALSPSHPLSLNLSKTNPSIKDFISFCNQQTTSEASIEKAEKLGFKTHLHVSHPFDKKKTLPVYIANFVLMEYGTG

SEQ ID NO: 189973 - protein, 279 aa, Unknown
  Bacterial polypetide isolated from the Sargasso Sea
MFFCYFVLMDYGSGAIFGCPAHDQRDLDFAIKYNLDVLPVILPTNQKESSFRITDEAYVGEGKLINSSFLNGKKIEDAKKMIIDELEKSRTGRKKINYKLRDWGISRQRYWGCPIPVMYREDGEIIPVPKNELPVTLPELKSFDGKLGSLKNHNDWRETFCPKTGLKALRETDTFDTFFESSWYFLRYCNPRLKDPFIKNDIKYWLPVDQYIGGIEHAILHLLYSRFFTKALRDMGHIEIDEPFKGLFTQGMVTHKTFRNIKNEWISPDEVAQNSKGFV

SEQ ID NO: 189974 - protein, 240 aa, Unknown
  Bacterial polypetide isolated from the Sargasso Sea
GHPHSVTERNIEMIRADQERMGYSYDWRRMFATSTPEYYRWNQELFLRFNEAGLVERRFAPVNWCDDCDTVLANEQVKNNRCWRCGLEVVQKDMAQWFLRMTEYADELLDELDHIEFPENVKAMQRNWIGRSHGAHIEFPVVGEVEGASASIGAFTTRPDTIFGVTFVTLSPEHPLCEPLVSRTEYEQAWRDLAEECARMTEFERINMLKEKKGVPLGRFATNPITGEEVPIFAGNFVVA

SEQ ID NO: 189975 - protein, 271 aa, Unknown
  Bacterial polypetide isolated from the Sargasso Sea
NFRKECSRTGTTEEAIAIGEKIGFKTDLIAVNPLNADHKVPVYFANFVLMDYGFGAVFGCPGHDQRDFDFAKKYKLEILTVVRPKDQNENFRVKDEAYPGPGVIINSDFLNGLEAPENSVLETIKILESKKLGKKKINFRLKDWGISRQRYWGCPIPIAYDESGNIHTIPNTMLPVKLPQNINLNVKGNPLDSQADWKKINLNGKNLIRETDTLDTFVCSSWYFLRFCSPKETEYGFRKEEIDYWMPVDQYIGGVEHAILHLLYSRFFMQA

SEQ ID NO: 189976 - protein, 126 aa, Unknown
  Bacterial polypetide isolated from the Sargasso Sea
MDRYNFKESEPKWQERWQKAGCFNAEADPEQKKYYVLEMFPYPSGRIHMGHVRCYTIGDVVARYKRAQGFNVLHPMGWDAFGLPAENAAFDNNVHPAVWTRENIAAMRDQLKLMGLSYDWRRELAT

SEQ ID NO: 189977 - protein, 249 aa, Unknown
  Bacterial polypetide isolated from the Sargasso Sea
LDELEDWPNKVKTMQKNWIGKSFGCEISFQTEGELPVKEIKCFTTRPDTLFGFSFLALSVDHEISKYFSKDEEFLKFKDACSKTGTTEEAIAIGEKIGFKTKLLAINPLNPNQKVPVFFANFVLMDYGFGAVFGCPAHDQRDFDFAKKYNLEIKTVVKPDNEDDNFEVKDEAYSGPGVLINSEFLNGLKVPNDSILNTIDILEKRKIGKKKVNFRLKDWGVSRQRYWGCPIPMAYNENGQVVPIPKNQL

SEQ ID NO: 189978 - protein, 255 aa, Unknown
  Bacterial polypetide isolated from the Sargasso Sea
MKYNPSLIEKKWQEKWSKLNVFKASIDKTKPKYYVLEMFPYPSGAIHMGHVRNYTLGDLVARYKKAQGFNVLHPMGWDAFGLPAENAAIENKTHPANWTYANIESMKTQLIRMGLSYDWDRELATCNPDYYKFEQKMFLDFFNAGIAYKKETLVNWDPIEQTVLANEQVIDGRGWRSGAKVEKKKMKGWFLKISDFADELLDEIDNLSNWPEKVKIMQKNWIGRSNGAIIKFSIENSPNNLKIFTTRPDTILEPL

SEQ ID NO: 189979 - protein, 110 aa, Unknown
  Bacterial polypetide isolated from the Sargasso Sea
MERYNIKNVEKKWQEFWSKKKSYAANLDKSKKKFYCLEMFPYPSGKIHMGHVRNYTIGDVLARYKKMRGFNVLHPMGWDSFGLPAENAARENNLHPKDWTKKNIETMKKQ

SEQ ID NO: 189980 - protein, 275 aa, Unknown
  Bacterial polypetide isolated from the Sargasso Sea
GIEHAILHLLYSRFFTRAMSRTDHTALDEPFAGLFTQGMVCHETYQTGSGDWVEPTSVVEQAGGARVHADTGEAITVGRSEKMSKSKKNVVDPEDIINSYGADTARWFMLSDSPPARDLDWTEAGISGAWRFNNRLWRLVAAHAGDLPPPGGGIPAGRAPETRRVIHATVAGVTEDLEAFHFNRAVARIYELVNALSGDEAIEHKAVLREGLETMTLLIGPMMPHLAEELWQALGHGTLVADSAWPEADESLLVQETVEIAVQVRGKMRGTVAIR

SEQ ID NO: 189981 - protein, 288 aa, Unknown
  Bacterial polypetide isolated from the Sargasso Sea
MERYNIKNIEKKWQDIWSNNKTYSALLDKNKQKFYCLEMFPYPSGKIHMGHVRNYTIGDVLARYKKLQGYNVLHPMGWDSFGLPAENAARENKLHPKVWTKKNIETMKKQLKLLGLSLDWDREISTCDPEYYKHQQEFFLELYEKGLVYKKDTYVNWDPAEQTVLANEQVIDGKGWRSGVTVERKKLSQWFFNINKFSQDLLDELVKLKNWPEKVKLMQKNWIGKSFGCEINFQIDKKKETEKIKVFTTRPDTIFGASFIALSIDHPISKNFENDKNFKTFKIECSKT

SEQ ID NO: 189982 - protein, 279 aa, Unknown
  Bacterial polypetide isolated from the Sargasso Sea
SKYSEELLNDLDKLTNWPNKVKIMQSNWIGKSIGAEIDFKSPEFDSTITIFTTRPDTIFGATFIALSSEHELAIRISKSNKALQNFIKECESLNPDKNKRGYDTGLFVEHPFIKGKKLPIYIANFVLKEYGLGAIFGCPAHDQRDLDFARQYGIDVIPVVKPSDIKENNFKIGSDAFTDDGIIINSSFLNGLSVVEAKSKIITEIEKKSIGRKKINYKLRDWGVSRQRFWGCPIPVIYREDGEVLAVKEEELPVRLPDIKNFGETSTTLNDIPDWKETV

SEQ ID NO: 189983 - protein, 255 aa, Unknown
  Bacterial polypetide isolated from the Sargasso Sea
MKAISKAIEEVEKRKSGKKRINFRLKDWGISRQRYWGCPIPIAYDEQENFITVPKDKLPIKLPENINLKTKGNPLEHHDEWRNIKINGKNYKLETDTLDTFVDSSWYFLRFCSPKNESYGYDFDEIRYWMPVDQYIGGVEHAILHLLYSRFFMLALGYESKKFISNEPFEGLFTQGMVCHETYKDKKNNWLSPTEVFSNDGKNYFKIKNRDEKVIVGASESMSKSKKNVIDPEKIIESYGADAVRLFILSDILQK

SEQ ID NO: 189984 - protein, 300 aa, Unknown
  Bacterial polypetide isolated from the Sargasso Sea
ETTQLVDVLARYKMINGFNVLHPMGWDAFGLPAENAAKENNLNPKDWTKKNISTMKHQLQLLGLSIDWDLEISTCDEDYYKHQQELFIDFYNKGLVVRKETYVNWDPVEKTVLANEQVIDGKGWRSNAVVERKKLFQWFFNISKFSDELLEDLSSLKEWPERVKLMQKNWIGKSVGCEIDFKINKNDKSVKVFTTRPDTIFGATFLAISVDHPLCKDYLKNSDFLDFKKKCSQVGTTEEAIANAEKIGFKTDLEAEHPFLKGKKIPIYVSNFILMDYGTGAIFGCPAHDQRDLDFATKYK

SEQ ID NO: 189985 - protein, 314 aa, Unknown
  Bacterial polypetide isolated from the Sargasso Sea
PEKSIVKTIEYLESKDLGKKKINFRLKDWGISRQRYWGCPIPIVYDENNKPQKIPENMLPVKLPEIQKLEPTGNPLDKANDWKNIIIDGKKFVRETDTLDTFVDSSWYFLRFCSPNNEIYGFSDEEVNYWMPVDQYIGGVEHAILHLLYSRFFMQALSFQNPKFNIKEPFKGLFTQGMVCHETYKDKNNNWVSPDEIITLNGKKFLKKDKTEEIKVGPSESMSKSKKNTIDPESIINNFGADSVRLFILSDSPPEKDVQWSEEGMSASFKFIQKLWNLHLKISGEIDKNNSENNSENLIKFTNKFIKKMSQNWK

SEQ ID NO: 189986 - protein, 314 aa, Unknown
  Bacterial polypetide isolated from the Sargasso Sea
LDTFVDSSWYFLRFCSPKNKNKPFDIEDIKYWMPVDQYIGGVEHAILHLLYSRFFMRAIGFQNNNFKIKEPFQGLFTQGMVCHETYKDQKNSWKSPDEVSTKDGKNYYLKSDHSKKIIVGPSESMSKSKKNTIDPEKIINLYGADSVRLFILSDSPPEKDVQWSEQGMLAAYKFIQKLFVLNEKIKIIKNKDKKEASNQLSKFINQYLNKIEKNLSNFHYNVIIANIHEAHGFLSQIIKKEENFSNLISEYSKFLISISPVLPHLSNECLGQLNINNYTWPIIDKKFLIEENISIVVQFNGKKRGIVNTKKDIL

SEQ ID NO: 189987 - protein, 313 aa, Unknown
  Bacterial polypetide isolated from the Sargasso Sea
QVIDGKGWRSGAIVQRKKLNQWFFNISKFSEDLLADLDELKNWPNKVKVMQRNWIGKSFGCELNFKIEGDLPIKNIKCFTTRPDTLFGFSFLAISPDHPISKHYENDPEFIKFKEECSKTGTTEESLALAEKIGFKTNLKAINPFKENEKVPVYFANFVLMDYGFGAVFGCPGHDQRDFDFAKKYNLSIKTVVKPKNVENFEVVTEAFSGEGIIINSEFLDGLEAPGESVLKAIEILQNRKLGKQKINFRLKDWGVSRQRYWGCPIPIAYDENGKIKPIPIDNLPVKLPENINLNCKGNPLDNDKNWKTSYYR

SEQ ID NO: 189988 - protein, 261 aa, Unknown
  Bacterial polypetide isolated from the Sargasso Sea
MISPDKQYEADTNLYNPSEIEKKWQSIWTENNLYKTDKLTENSDKFYALSMFPYPSGNLHMGHVRNYVITDLIARFQRFKGKSVLHPMGWDAFGLPAENAAIERGISPSVWTKKNISHMKSQLKLLGLSVDWDREFATCDENYYIWTQYLFLELYKAGLVYQKESEVNWDPIDNTVLANEQVDSDGKSWRSGALVEKKLLKQWFLRITNYADELLKDLEKLDNWPERVKIMQDNWIGKSIGTNINFNINTNPEEKITVFTT

SEQ ID NO: 189989 - protein, 249 aa, Unknown
  Bacterial polypetide isolated from the Sargasso Sea
TFDNIQNMQKQFEMMGNSYDWNRKLVTCTPEYYKWNQKFFIDMYKNGLAYRKNGPVWWDPIDQTTLANEQVVDGKSERSGAEVEKKMMPQWYFKITDYAEELLNMSDLEWPEKIKQMQKNWIGKSEGVTINFDIENSTEKISTFTTRIDTVFGVTFVVLAPEHPIIKKLNIDKNKDISQYISNSQKLSEIDRTSTVREKTGVKTNILCINPMNNEKIPVFIGDYVLSSYGTGAVMGVPAHDERDFIFAK

SEQ ID NO: 189990 - protein, 96 aa, Unknown
  Bacterial polypetide isolated from the Sargasso Sea
MNEYSHKEIELAAQTEWEKRNLFSTVEDGPKYYCLSMFPYPSGKLHMGHVRNYTIGDVISRFKRLEGFNVLQPMGWDSFGLPAENAAIQNKTHPLK

SEQ ID NO: 189991 - protein, 241 aa, Unknown
  Bacterial polypetide isolated from the Sargasso Sea
DFIKFKKECSSTGTTEESIAQAPKIGFKTNLMAINPLNPDNKVPVFFANFVLMDYGLGAVFGCPAHDQRDFDFAKKYSLEIKTVVKPKDENDNYRVLKEAYVGPGVIINSEFLNGAKVPEESIIKTIDILEKKKIGKRKTNYRLKDWGVSRQRYWGCPIPIAYDENNNIIKIPVKDLPVKLPKDININVQGNPLDAQKEWKNITLNGKKYTRETDTLDTFVDSSWYYLRFCSANDKLNPFN

SEQ ID NO: 189992 - protein, 219 aa, Unknown
  Bacterial polypetide isolated from the Sargasso Sea
MNNQFEYKKIEKKWQDHWENSETVKCDLESDKPKFYNLCMYPYPSGDLHMGHIRNYTIGDVITRYKQMNGFNVLSPMGWDSFGLPAENAAIKTGIHPREFTEERIANMKSQIIRLGSLYDWDREVAAHSIDYYKWTQYLFIKLFENNLAYKEDAPVNWCNSCRTVLANEQVIEGSCERCDTAVEPKNLNQWFLKISEYSEELLEGLEEIGDWPENVKTM

SEQ ID NO: 189993 - protein, 306 aa, Unknown
  Bacterial polypetide isolated from the Sargasso Sea
PSINKTISVFTTRPDTLFGATYMVLAPEHPLVNDLTNKVNRKAVSKYIELTSRKSDLDRGDLNKEKTGVFIGSYAINPVNKNEIPIWISDYVLMSYGTGAIMAVPGHDQRDYEFAKKFDLPIVEVVSGGDISSNAYTDIENGVMINSSTSDGVFSLNDLKVKDAIENTISYLEKIQKGKRAVEYKLRDWLFSRQRYWGEPFPIIHLEKGYKPVSEEELPVLLPDVEKYQPTGTGESPLAAIDEWVNTIDTETNTPATRETHTMPQWAGSCWYYLRFLDPNNDNKPWDKDVEKYWMPVDLYIGRYRT

SEQ ID NO: 189994 - protein, 245 aa, Unknown
  Bacterial polypetide isolated from the Sargasso Sea
DELLDELDNISFPENVKTMQRNWIGRSNGAHIDFPVDGTDSVIGVFTTRPDTIFGVTFVTVSPEHELCEQLCAGTKWEGGWRNLKEECAKISEFERINMLKDKKGVFLGKNAINPISGEKVPIYAGNFVVSSYGTGAVMGVPGHDQRDFDFAKEYELEIKRVLIEDNGDIPDSPQHRAFEGYGQMVNSSIAGFDGLSGEQAKQAVISTLEESGSGRGKVEYRLKDWLLSRQRFWGTPIPMIHCES

SEQ ID NO: 189995 - protein, 306 aa, Unknown
  Bacterial polypetide isolated from the Sargasso Sea
KNNSLKKYYVLEMFPYPSGKIHMGHVRNYTLGDVLARYKKMCGFNVMHPMGWDAFGLPAENAAIVEKKPPSEWTYQNIKTMRRQLKSMGLSIDWTREIATCHPEYYKHEQSFFLDLLKSGLAYKKESLVNWDPIDQTVLANEQVIDGRGWRSGAVVEQKNLSQWFLKTSKYSEELLSDLNNLEGWPNKVKIMQSNWIGKSSGVEINFKISNPGNLSDNFLNIFTTRADTIFGASFCAISFDHKISKELANENNQVKKFIKDNSKKNPEKEKIGFETGLYVEHPFIENKKIPIFIANFVLMEYGSGA

SEQ ID NO: 189996 - protein, 284 aa, Unknown
  Bacterial polypetide isolated from the Sargasso Sea
IYTPKLGTESNISIMKKQLKKMGLSLDWDREISTCSEEYYKHQQLFFLELYEKGLVYRKENYVNWDPMEKTVLANEQVIDGKGWRSGVPVERKKLNQWFFNISKFSEELLKGLDTLKNWPDKVKTMQKNWIGKSFGCEIDFKIEGNLPVNEIKCFTTRPDTLFGFSFLAVSVDHPISKHFLKNPEFVKFREECSKTGTTEESIALGEKIGFKTNLFAINPLDENQKVPVYFANFVLMDYGFGAVFGCPAHDQRDLDFANKYKLEIKTVVKPVNEKDNFKIKKDA

SEQ ID NO: 189997 - protein, 273 aa, Unknown
  Bacterial polypetide isolated from the Sargasso Sea
HFSAWTIAPPVKNEAFVPSKSEKVKWLNHFTDIDVATGQEAIDKTIDFAEKNKWGKNVTNFRLRDWGLSRQRYWGCPIPVVHCETCGVVPEKKENLPVTLPDDVIFDVPGNPLDRHPTWRKCKCPSCGSEALRETDTMDTFVDSSWYFARFTSPKSKTPTSKEDVSYWMNVDQYIGGVEHAILHLLYSRFFARAMQITGHLPKTAKEPFDALFTQGMVTHAIYKSIGADGRDLFHYPEEVEVREGKAFLIKDNKEVTIIPSAKMSKSKNNVVD

SEQ ID NO: 189998 - protein, 297 aa, Unknown
  Bacterial polypetide isolated from the Sargasso Sea
LLARYKKACGFNVMHPMGWDAFGLPAENAAFERNIHPAKWTDQNISTMREQLKAMGLSYDWDRELSTCDPEYYKHEQKMFLDFVKNNLAYRKESWVNWDPVENTVLANEQVIDGKGWRSGAPVEKRLLSQWFLKITEYSDDLLKSIETLERWPDKVKLMQHNWIGRSEGATVFFNINGHDDRLEVFTTRPDTIFGASFCAIAANHPIASSLGKTDTKLQDFISECNKLSTSEADIETAEKRGYDTGLKVAHPFLDGCELPIYVANFVLMDYGTGAIFGCPAHDQRDLDFALTYNLPV

SEQ ID NO: 189999 - protein, 270 aa, Unknown
  Bacterial polypetide isolated from the Sargasso Sea
MFPEQVTRGEGGKLIHVDNGRPVISGRSEKMSKSRKNVVDPEAIIATYGADTARLFMLSDSPAARDLQWTDAGIEGAWRYTNRVWRMIAEPEFPFAAVTDEAPETLDDSSEEVLRKIHRTISDVSADFDAFRFNRAVARIRELTNALANLDGDSADRAWTRRFGFETTAQLIAPIMPHLAEELWSILGHKSLLSDTSWPSADDAYLSDETVTIAVQINGKLRGTIDLPFDVDKQIAEDSALALEYVARATDGTSPRKVIVVPNKVINVVL

SEQ ID NO: 190000 - protein, 44 aa, Unknown
  Bacterial polypetide isolated from the Sargasso Sea
MSFNHQEIEKKWQGYWEENKTFRTPDETEKPKFYALDMFPYPSG

SEQ ID NO: 190001 - protein, 308 aa, Unknown
  Bacterial polypetide isolated from the Sargasso Sea
GETTFRLRDWGVSRQRYWGCPIPMTHCPSCGVVPVPETDLPVTLPEDIDFSIPGNPLANHPSWKHTQCPKCGGAAEREQDTFDTFFESSWYFLRYADPTHKDGFSPATAAYWMPVDQYIGGVEHAVLHLLYSRFFTRALSRVGYLDLDEPFAGLMTQGMVCHQTFKDKNGKWLFPTEVTKDGDQWVETSTGAVATAGRTEKMSKSKRNVVDPELIIETYGADTARLFMLSDSPPERDMEWTESGVEGASRFLKRIWRLARDERLAACGTPIPNTLGETATAALRMAHKSILALSADIENFRFNRASSP

SEQ ID NO: 190002 - protein, 282 aa, Unknown
  Bacterial polypetide isolated from the Sargasso Sea
NDLKCPEDSIIKTIEYLEKYNLGKRKTNFRLKDWGVSRQRYWGCPIPIVYDEKNNPVKIPKEMLPVKLPEISKFETSGNPLDKNLKWKNVLINGKNFTRETDTLDTFVDSSWYFLRFCSPEKKDYGFHTDDVRYWMPVDQYIGGVEHAILHLLYSRFFVLGLGYQNDKFNFQEPFKGLFTQGMVCHETYKNQNNEWLSPDEVETVDGVKVEKNNKKNKVFVGPSESMSKSKKNTIDPESIIENYGADAARLFILSDSPPEKDVQWYNEGIKSSYKFIQKLWT

SEQ ID NO: 190003 - protein, 287 aa, Unknown
  Bacterial polypetide isolated from the Sargasso Sea
PICENFSKSEKYNNFKDECLKVGTTEEALANAEKIGFNTNLFASHPFIKGKKIPIYVANFILMDYGTGAIFGCPAHDQRDFDFAKKYNLQITQVVSNNPSNSENLSEAFIGDGTLINSDFLNGLKVEQAKTKIIKEIEKLKIGKKKITFRLKDWGISRQRYWGCPIPMIHLQDGKIVPVDKSELPIKLPEDIDLNQSGNPLENHRSWKNTVHKKTGNPAIRETDTLDTFVDSSWYFLRFCSPKKKSEPFDIEKINYWMPVDQYIGGIEHAILHLLYSRFFMRALKKN

SEQ ID NO: 190004 - protein, 287 aa, Unknown
  Bacterial polypetide isolated from the Sargasso Sea
RYWGCPIPVAYNSDGNVVPIPKKDLPVKLPQNVDLNAKGNPLNSENDWKKININGKDLIRETDTLDTFVCSSWYYLRFCSPKETEYGFNQEEIDYWMPVDQYIGGIEHAILHLLYSRFFMKALGFKNKAFNIDEPFKGLFTQGMVCHETYKDQNNNWISPEEIEIRDKKYYKKNEPNSKVTVGPSESMSKSKKNVIDPENIINNYGADSVRLFILSDSPPEKDVQWSEQGMVSSFKFLQKLWILHSKIKLKLSNKNNLINEDLELNKFTNQLINKITNNLESFSYNV

SEQ ID NO: 190005 - protein, 304 aa, Unknown
  Bacterial polypetide isolated from the Sargasso Sea
MGFSIDWEREIATCHPGYYKHEQLFFLEMYKNGLAYKKMSEVNWDPIDKTVLANEQVIDGKGWRSGALVEKKNLSQWFLKTSSYSEELLSGLEGLDMWPNKVKTMQSNWIGKSEGAEIDFSIINNPILDDKFLKVYTTRPDTIFGATFIAISPDHDLAKKILRKDAGAKKFSEEIKTIDFEKTKIGYNTQILIQHPFLDKKIPLFLANFVLMDYGLGAVFGCPAHDQRDLDFAIKYNLDVIQVVSTKESDQNSFNIKSEAMLDNGTMINSGFLDGLENEKAKKEVIKRLEEQGTGNKKINYKLR

SEQ ID NO: 190006 - protein, 323 aa, Unknown
  Bacterial polypetide isolated from the Sargasso Sea
PRWKNNEEAKDTIAERMSKNIIDGSPQGQKKITYRLRDWGVSRQRYWGCPIPIIHCGDCGVQEVPDDDLPVRLPDDVDFSVPGNPLEKHPTWKKVKCPNCQKDAIRETDTFDTFVDSSWYFARFCSPKANQPVNKESVDYWLPVDQYIGGVEHAILHLLYSRFFTRAMKETDHLSLDEPFSGLFTQGMVTHETYKDSSGNWLFPEEVLLDRSNPVHIKTGEAVTIGPIESMSKSKKNIIDPQSIVETFGADTARWFILSDTPPERDIQWTDKGAEASSRFIQRIWKIVNDGMSIISGNTIDEPKEFTEDSVNIRKITHKAIKD

SEQ ID NO: 190007 - protein, 289 aa, Unknown
  Bacterial polypetide isolated from the Sargasso Sea
FVIEKEAFTEDGILFNSDFLNDLTVNEAIEKVIKIITKKNLGNKKITFRLKDWGVSRQRYWGCPIPVVYNKKGKALPVKKKDLPILLPDNINLNASGNPLEKHPTWKFIKLSSGEELIRETDTLDTFVDSSWYFLRFCSPKNKKYGYEINDIKYWMPVDQYIGGVEHAILHLLYSRFFMRALAFNNKKFNYTEPFKSLFTQGMVCHETYKNEDGQWLYPDEVERNTDGVFVTKNKGRKVVTGPSESMSKSKKNIVDPEEMIHTYGADSIRWFMLSDSPPERDVQWSVEG

SEQ ID NO: 190008 - protein, 301 aa, Unknown
  Bacterial polypetide isolated from the Sargasso Sea
YKKDGSIKTVPKDELPVELPESVNLNHTGNPLDIHPTWKKTIDKTTGEECVRETDTLDTFVDSSWYFLRFCSPESKDKPFDIKKVNEWMPVDQYIGGIEHAILHLLYSRFFTFGINKFTKDLNFKEPFKKLYTQGMVCHETYKDESGSWLSPDEIEKLNDKEAINIKSKKPVKIGAAEAMSKSKRNTIDPEKMIDKFGADSVRLFILSDSPPDRDILWSEQGIEGAYKFLQRIWNLNILILNRSETKRDKEIEKEFNRKINNYVNKVSVLIQTFSLNVAVANIYEVYNLFNSTLSKRISND

SEQ ID NO: 190009 - protein, 291 aa, Unknown
  Bacterial polypetide isolated from the Sargasso Sea
IDGKGWRSGAEVEQKKLSQWFFKITKYADSLLDSLNSMDGWPDKVRTMQKNWIGKSYGCEVDFEILSDISQFNGKKIKIFTTRPDTIFGATFCALSPFHPLIEELIKEEKNIESQVNEMRAQKINEESIAKNEKLGIQTSLNIKHPFIKGKSLPVFIANFILMDYGSGAIYGCPAHDQRDLDFANKYNLEVIQVIEPEDQTTFDKKNAFVGNGKLINSDFLNGLSIEEAKKNIMEKVGALQIGKQTINYRLRDWGISRQRYWGCPIPIMYREDGKVIEVPEDQLPLKLPED

SEQ ID NO: 190010 - protein, 259 aa, Unknown
  Bacterial polypetide isolated from the Sargasso Sea
MSPLASCDEYINTLCPQCGADAKRDADTMDTFVCSSWYYLRYPNANYKDGPFDPEGLKLLPVDCYIGGSEHATMHLLYARFITKALRDGGYLDFDEPFTKLYHQGTITKDGSKMSKSRGNTVSPDEFIDKYGSDTFRAYLMFMGPFDEGGDWNDKGITGIDRFLKKIWRFCHLPENKDESDKKDLRILHKTIKYVSNDLNEMKFNTAISKLMELINHFSNHDSISKSIKSNLIKMIAPIVPHIAEELWEVLGSLGSVFD

SEQ ID NO: 190011 - protein, 258 aa, Unknown
  Bacterial polypetide isolated from the Sargasso Sea
PFKKLLTQGMVLKDGYKMSKSKGNTVDPQKFIDQYGADTIRLYMMFTSPPEQSLEWSDTAIEGSYRFLKRIWNLLSERKQFTEKQPDEFTKHELELRQKSHKTLKKVTHDYAERNSFNTAIASIMELLNAVPESFKANDATIAQRFCLDEVIQFTLKMLSPITPHISLYLWKEYSESDGDDFENSWPIYNEEFLQLEDFQLIIQINGKVRGKENVSVDIEQDELEVLAKANENVKKILANQPIKKVIYVKEKLINFVI

SEQ ID NO: 190012 - protein, 213 aa, Unknown
  Bacterial polypetide isolated from the Sargasso Sea
PDRVKLMQNNWIGKSLGAKINFKIIQIDEKIEVFTTRPDTLFGASFIALAPSHPVSLKLSKKNSIIKNFINECNKNSTSEAVIEKNEKEGVYTNLDVSHPFNKKIKIPVYIANFVLMEYGTGAIFGCPAHDQRDLDFAIKYKLPVLPVVKPKNYKKNDYKITDTAFTDDGIIINSHFLNGLNVTDAKKHAVEELERLNSGASSTTWRLRDWGI

SEQ ID NO: 190013 - protein, 217 aa, Unknown
  Bacterial polypetide isolated from the Sargasso Sea
MERLNFQEIEKKWQSIFDKEKLYNNKSSKKFYCLEMFPYPSGKIHMGHVRNYTIGDVIARFKFMNGFNVLHPMGWDAFGLPAENAAKENNLHPKKWTEKNILEMKRQLKLMGLSIDWDLEVSTCDESYYKHQQEIFIDFYKKGLVKRKENYVNWDPVEQTVLANEQVVNGKGWRSGAIVERKKLSQWFFDITKFSNDLLKGLNELDNWPEKVKTMQK

SEQ ID NO: 190014 - protein, 209 aa, Unknown
  Bacterial polypetide isolated from the Sargasso Sea
MKYNFLEIEKKWQKFWSDNRVYEVENSSTKPKFYVLDMFPYPSGAGLHVGHPLGYIASDIFSRYKRHKGYNVLHPQGYDSFGLPAEQYAITTGQHPRKTTSDNINMYRTQLDRMGFGFDWSREIRTSDPEYYKWTQWIFILFFNSYYCPFDNKAKSIEDLIKVFESEGNQKFKSFLSSDDIIFDSKEWDNFEQQLKSKILMEYRLAYLS

SEQ ID NO: 190015 - protein, 205 aa, Unknown
  Bacterial polypetide isolated from the Sargasso Sea
MSKSKYNGIDPESVINKYGADTARMFILFKAPPEKDLEWGDTDVEGQFRFLSRIWKLYINCAKDINSKSKSYPDKEKTLIKSMNIAIKEISNDILNNQFNTAISELMKFYNSLSNSINEVNNNLKKDALKTFCILLAPFAPHIAEEIWHLIGFKNSVHLEQWPSFNAEALKEESYELVIQVNGKVRDKINIDNEMNEDQIKELTL

SEQ ID NO: 190016 - protein, 321 aa, Unknown
  Bacterial polypetide isolated from the Sargasso Sea
KLPEKINLNTKGNPLDHQKKWKNIKIKGKDYTLDTDTLDTFVDSSWYFLRFCSPENNEYGFDKEDIKYWMPVDQYIGGVEHAILHLLYSRFFMQALGFKNQNFISPEPFKGLFTQGMVCHETYKDENNKWISPDEVFSENGKDFFKIKNKKKIIVGPSESMSKSKKNTIDPEKIMDQFGADAVRFFILSDSPPEKDVQWSEQGMIAAYKYIQKFWILHKKITEKIQNQKENFESEDLAIYTNKLIEKYTISLEKFNMNVLIAYLHETYNFLSKEINKHNIKDLEENYKKILILMFPVVPHLVSECLKDVQKEIDVSGPGTK

SEQ ID NO: 190017 - protein, 308 aa, Unknown
  Bacterial polypetide isolated from the Sargasso Sea
FGCEIDFRIKGNQDIKEIKCYTTRPDTLYGMSFLAVSVDHPLSKLYENDNNFLKFKEECSKTGTTEEAIAQAEKLGFKTNLNAINPLDETLTVPVYFANFVLMDYGFGAVFGCPAHDQRDLDFALKYNLPIKTVVRPIDKDLNFKVENKAYTENGILINSQKLDGMKVPDESIPKTIKILEEKKLGKKKINFRLKDWGISRQRYWGCPIPIAYDENNQILKIPEDQLPVKLPDGVDLNVKGNPLDHQDEWKNIEISGKKCVRETDTLDTFVDSSWYFLRFCSSENSKIPFSDEEVKYWMPVDQYIGGV

SEQ ID NO: 190018 - protein, 289 aa, Unknown
  Bacterial polypetide isolated from the Sargasso Sea
TCDENYYVWTQYLFLELYKAGLVYQKESEVNWDPIDNTVLANEQVDSEGKSWRSGAVVEKKLLKQWFLRITNYADELLKDLEKLDNWPERVKIMQDNWIGKSIGTNINFNINTNPEKKLTVFTTRPDTLFGVTYLAISVNHSLIKDISDKETIQDIDNLKQYLKNINNNEFEKIGIKTSLIAINPVNSDPIPIWVASYVLDEYGTGAVMGVPAHDQRDFEFAKKNNIDIKQVIIKDKSEQNKELDEAYVENGYLINSNQYNGKENTIAKLKISEDGVNNGWAENKIQYR

SEQ ID NO: 190019 - protein, 129 aa, Unknown
  Bacterial polypetide isolated from the Sargasso Sea
MSQRYNHKKTENHWQQKWLDNKIFQSSTDTKSKKFYILEMFPYPSGKIHMGHVRNYTLGDVVARYKKMSGYNVLHPMGWDAFGLPAENAAITEKKPPAEWTYKNIKVMRSQLKSMGFSIDWSREIATCH

SEQ ID NO: 190020 - protein, 324 aa, Unknown
  Bacterial polypetide isolated from the Sargasso Sea
GKVIPVDKSELPIKLPENVDLSSKGNPLENHPTWKKTKNKKTGESAIRETDTLDTFVDSSWYFIRFCSPKLKDKPFDEKAFSYWMPVDQYIGGVEHAILHLLYSRFFMRAIKLNDKKIKIKEPFKGLFTQGMVCHETYKNEKGDWLSPKEIEKMDKSKVIIGPPEAMSKSKKNVVDPESMIKIYGADAIRWFMLSDSPPDRDIQWSNEGVSSAHKFVQKLWSINRKILERKDSNVSQSEEKKFISKFSKYLFKISNLIEKFHLNVAVANFYEITHLVNDSISKDISTKCLKEIQIKIMRIMMPFMPHIASECLIELEGRKFYFK

SEQ ID NO: 190021 - protein, 293 aa, Unknown
  Bacterial polypetide isolated from the Sargasso Sea
ANKINALGDNNNWINTTCPKCGIAAKKETDTMDTFMCSSWYFLRYPSSKCSNKPFEKVEINKWLPVDQYVGGVEHAILHLLYARFFTKALRDNKLFEIDEPFKKLLTQGMVQAAAYKNNKTGKYVSPSDITDLSNPKDPIDNSKLEVLFEKMSKSKYNGIDPESVIKKYGADTARMFILFKAPPEKDLEWGDTDVEGQFRFLNRIWKLYINCVKDINKNSKSYPDKEKSLIKSMNIAIKEISNDILNNQFNTAISELMKFYNALSNSINDVNNNLKIEALKTFCILLAPICTS

SEQ ID NO: 190022 - protein, 278 aa, Unknown
  Bacterial polypetide isolated from the Sargasso Sea
VVSKKDSSTDEKLIEAYTGDGKMINSDFLNNLTITKAKELIISEIEKKKIGKKRTLFRLKDWGISRQRYWGCPIPMIHLDDGTIVPVDKSELPIKLPDKIDLKLSGNPLENNNDWRKTTDKKSGKPALRETDTLDTFVDSSWYFLRFCSPQNSKEPFSEKEANYWMSVDQYIGGVEHAILHLLYSRFFMKAINKCNRNIKCSEPFKNLFTQGMVCHETYKDVNGKWLYPDEIKKISANKAVKRSDNSEVKIGPSESMSKSKNNTIDPETMIKQLEQML

SEQ ID NO: 190023 - protein, 119 aa, Unknown
  Bacterial polypetide isolated from the Sargasso Sea
MKYNPSLIEKKWQKKWNDLKIFKAKIDYNKPKYYVLEMFPYPSGAIHMGHVRNYTLGDLVARYKKAQGFNVLHPMGWDAFGLPAENAAIENNTLPSKWTYSNIEIMKNQLKQMGLSYDW

SEQ ID NO: 190024 - protein, 244 aa, Unknown
  Bacterial polypetide isolated from the Sargasso Sea
ANGVPPAKWTYDNIDYMKGQMQSMGLAIDWSREIATCKPDYYKWNQWLFLKMLEKGIAYKKTGTVNWDPVDQTVLANEQVIDGRGWRSGALVEKREIPMYYLRITQYADELLNDLDGLGWPERVKIMQQNWIGKSFGVNFGFPYELDGEKKLLRVFTTRADTIMGVTFCAIAAEHPLATRLAQDKPELLAFIDECKRGGVAEADVATMEKKGVATGFSVTHPLTGEPVEVWIGNYVLMSYGEGA

SEQ ID NO: 190025 - protein, 288 aa, Unknown
  Bacterial polypetide isolated from the Sargasso Sea
DSKGNPHPVPNELLPVKLPENINLDTKGNPLDHVKDWKFIEYKGEKFTRETDTLDTFVDSSWYFLRFCSPNEKNYGYNEDEINYWMPVDQYIGGVEHAILHLLYSRFFMRAIGYKKEDFKFNEPFEGLFTQGMVCHETYKDEKGNWLRPDEVETKDGKKYFVKNKLGSIVTVGPSESMSKSKKNTIDPEQIIKNYGADAVRLFILSDSPPEKDIQWSEQGMVASYKFIQKLWMLHEKIKDKINHKSDNLDLENNFERFINETISKFDYNLEKFNYNVLIASIYETYNF

SEQ ID NO: 190026 - protein, 290 aa, Unknown
  Bacterial polypetide isolated from the Sargasso Sea
MSQEYTPQTLELALQAEWAESGRFAVQPDEAREKFYCLAMFPYPSGKLHMGHVRNYTISDVIARYQRMQGKNVLQPMGWDAFGLPAENAAIANKVAPAAWTRENIDHMRAQLQRLGYAYDWDREIATCDPQYYQWEQWFFTQLCERGLVYKKMATVNWDPVDQTVLANEQVIDGRGWRSGAVVERREIPQWFIRITAYAEELLEGLDTLDGWPEAVRTMQRNWIGKSRGVELAFGLDEPVANLDRIEVYTTRPDTLYGVTYVSLAAEHPITLALAENNTELAEFIAALQQ

SEQ ID NO: 190027 - protein, 257 aa, Unknown
  Bacterial polypetide isolated from the Sargasso Sea
GVEHAVLHLLYSRFFTRALRETGYLDFDEPFAGLMTQGMVCHQTFRDEDGKWLFPTEVERDGESWRHLETGTPVTAGRIEKMSKSKRNVIDPELIISTYGADTARLFMLSDSPPERDMEWTESGVEGASRFLKRLYRMAGDPSLAAASGPLPTEGAGAELVRAAHRAVMAMSEDIEAFRFNKAVAQLYTLANAVGDLREESPEAASARCFAVETLTRLLAPMAPHIAEEMWEALGHDTMLADSAWPEADPSLVTESS

SEQ ID NO: 190028 - protein, 135 aa, Unknown
  Bacterial polypetide isolated from the Sargasso Sea
METDTLDTFVDSSWYFLRFCSPLEANKGFNIEDVNYWMPVDQYIGGIEHAILHLLYSRFFTKALGYKNSKFDLSEPFKGLFTQGMVCHETYKINNEWKNPSEVQSDNGKDFFLKDKPNQKVIVGPSQSMSKSKKN

SEQ ID NO: 190029 - protein, 305 aa, Unknown
  Bacterial polypetide isolated from the Sargasso Sea
TSIENLDWPENVKLMQKNWIGKSFGSEISFPLSGGPIIEAILGVRGRFGTMQGEELTAFTTRIDTIYGVTYLAISPNHPISQNLANQFSDIDDFIKKCNETKMAEADMAKADKLGLKTNLKVKHPFTGIDLDVWIANYVLMDYGTGVVMGVPAHDERDHEFALKYNIDIKQVIKADEVPSSEKGELINSEKFNGLTSKNAIQDINNFLEKEKIGKGIENFRLRDWGVSRQRFWGCPIPVVYKNDEPIFLEKIDLPVELPKIKDGESPKPLSQNKDFFDIGPNESREVDTFDTFVDSSWYYARLQQ

SEQ ID NO: 190030 - protein, 278 aa, Unknown
  Bacterial polypetide isolated from the Sargasso Sea
DTLFGFSFLALSVDHPLSKYYEKNEDFQKFKKECSKTGTTEESIAQATKIGFKTNLTAINPLEKDSKVPVFFANFVLMDYGFGAVFGCPAHDQRDFDFAKKYKLEIKTVVRPIDKDDTYKVEDEAYAGPGVIINSKFLNSLSVPEESVNETIKILEDKKLGRRKTNFRLKDWGISRQRYWGCPIPIAYDEKNNVVKIPRETLPVQLPEDIDLNTNGNPLDAQERWKEIEINGKKCRRETDTLDTFVDSSWYFLRFCSAQNLKEPFDKNELDYWMPVDQ

SEQ ID NO: 190031 - protein, 121 aa, Unknown
  Bacterial polypetide isolated from the Sargasso Sea
MSEKYNSRVVEKKWQSYWSDHQLFESKIVSDKKKYYILEMFPYPSGKIHMGHVRNYTLGDVIARYKRAQGFNVMHPMGWDAFGLPAENAAIENKTSPKKWTYENIETMKNQLKQMGLSIDW

SEQ ID NO: 190032 - protein, 316 aa, Unknown
  Bacterial polypetide isolated from the Sargasso Sea
IILPQWERVNFHVIEKKWQKNWLKKKDYKNSKKKFYCLEMFPYPSGKIHMGHVRNYTIGDVIARYKSMQGHNVLHPMGWDAFGLPAENAARENNLDPKKWTEKNIIEMKRQLKMLGLSIDWDLEISTCDEKYYKHQQELFIDFYNIGLVSRKETYVNWDPVEQTVLANEQVIDGKGWRSNAPVERKKLSQWFFNISKFSKELLEDLNKLDNWPNKVKTMQKNWIGKSFGCEIDFKIEGDLPINKIKCFTTRPDTLFGFSFLALSIDHPVSKYFSKNSEFMKFKEECSKTGTTEESIAQGEKIGFKTNLFATNPFYE

SEQ ID NO: 190033 - protein, 280 aa, Unknown
  Bacterial polypetide isolated from the Sargasso Sea
KKIPVFIANFVLMEYGLGAIFGCPAHDQRDLDFANEYNLEVVSVVKPVNLKGEEFTVKKIAFTENGKVINSDFLNGLTTEKAKNKIIDVLEEKKIGCKKINYKLRDWGISRQRFWGCPIPIIYREDGELKPVDIDSLPVKLPDVDNFNESESTLKNISEWKETKCQETGMKATRETDTFDTFFESSWYYFRYCNSSSQYASSSVMTSSSSNFAPTPAKPRCGSTAHRPGTGACSERRSIDHSGDQPCCFAARPWSSSRLRVAFSPKRATKRGFDSLWIFA

SEQ ID NO: 190034 - protein, 195 aa, Unknown
  Bacterial polypetide isolated from the Sargasso Sea
KILLNVNLIFINFVERYNFKLIEEKWQNFWEQKKTFATKIDKNKKKFYCLEMFPYPSGKIHMGHVRNYTIGDVLARYKNLEGYNVLHPMGWDSFGMPAENAARQNNLSPKQWTESNIATMRMQLKKLGLSIDWDREISTCSPDYYKHQQEFFLELYDKGLVYRKEQYVNWDPVDQTVLANEQVIDGKGWRSGAVV

SEQ ID NO: 190035 - protein, 123 aa, Unknown
  Bacterial polypetide isolated from the Sargasso Sea
KAPQENAQDIAIMREACESILLLLNPITPHIAHELWKVLGHSEDIDLAPWPQADKAALVEDEKLIIVQVNGKVRAKMTIAADASKESIEASAKEQPNVQQFIEGKTIRKVIVVPGKLVNIVAN

SEQ ID NO: 190036 - protein, 299 aa, Unknown
  Bacterial polypetide isolated from the Sargasso Sea
LSPDNELPVTLPDDIDFDSPGNPLEKHPSWKHTTCPETGMKAVRETDTLDTFVDSSWYFMKYCSENIQNHSFDDEDLNYWMPVDQYVGGVEHAILHLLYSRFFSKALSDSGVGNFNEPFEGLFTQGMVCHETYKTKTGEWVLPSDTYEKNNQFFSLETNEPLIKGPSESMSKSKKNVVDPEAIINTYGADTARWFMLSDSPPGRDINWSDSGIKGAWKFINKVWSLINENKEIFKTTINDNESETKNYLNLKKITHKNLRDITKSIESFQMNVAVAKIYEMTNFLTTFEAKNNLEKSAL

SEQ ID NO: 190037 - protein, 267 aa, Unknown
  Bacterial polypetide isolated from the Sargasso Sea
LNSKGNPLANHLAWKKTKYKKTGESATRETDTLDTFVDSSWYFIRFCSPKFKDKPFDEKAFNYWMPVDQYIGGVEHAILHLLYSRFFMRAIKLNDKKIKIKEPFKGLFTQGMVCHETYKNEKGDWLSPEEMKKIDKSKVTVGPPEAMSKSKKNVVDPESMIKIYGADAIRWFMLSDSPPDRDIQWSNEGVAAAHKFIQRVWLLTSKTIERENKKSSAEDEKNFLVKINKYLFKITNLIEKLQLNVAIASIYETVRFLEENLKKTLVN

SEQ ID NO: 190038 - protein, 84 aa, Unknown
  Bacterial polypetide isolated from the Sargasso Sea
MNKKYDHLEIEPKWQKFWDQNKTFKVEIDHNKPKYYILDMFPYPSGQGLHVGHPLGYTATDILSRYKRMCGFNVLHPMGWDAFG

SEQ ID NO: 190039 - protein, 163 aa, Unknown
  Bacterial polypetide isolated from the Sargasso Sea
NQNKLRRKTHQTISKVTDDIGRRYTFNTAIAAVMELVNEVSTFNVDDELDRQVIKEAIESILLLLSPIVPHICHQLWLDINHDQPIIDARWPKFDSSLLKSETSLIVVQVNGKLRSKLEVDASISEDELKSMALSDEKVVRFIDGNEIKKIIVIPEKLVNIVV

SEQ ID NO: 190040 - protein, 237 aa, Unknown
  Bacterial polypetide isolated from the Sargasso Sea
AYVGDGIMVNSSFLDGLNTPNEAIFKAIAKIEEIKSGKKKINFRLKDWGISRQRYWGCPIPIAYDDQGNYETVPEDQLPIKLPENINLKTRGNPLDHQEEWRKITIRGKKYKLDTDTLDTFVDSSWYYLRFCSPNNKSYGYDLEEIKYWMPVDQYIGGVEHAILHLLYSRFFMLALGHKNKNFISKEPFDGLFTQGMVCHETYKDKNNNWLSPNEVFSEDGKNFFKVSNKKEKIIVG

SEQ ID NO: 190041 - protein, 278 aa, Unknown
  Bacterial polypetide isolated from the Sargasso Sea
IKCFTTRPDTLFGFSFLALSVDHPLSELYKDDVEFKEFKDLCSKTGTTEESIANAEKIGFKTKLLAKNPLDKNQTVPVYFANFVLMDYGFGAVFGCPAHDQRDFDFAKKYNLKIKTVVKPVNEDNNFTVTKEAYTGTGLIMNSEFLNNLKVPDESIIETIKILEKKNLGKKKINFRLKDWGVSRQRYWGCPIPIIYDEKGNYKTVPEKDLPVRLPQNIDLNSKGNPLSAVEEWNKIEIDGKIYTRETDTLDTFVDSSWYFLRFCSPKNKAEPFDIEDI

SEQ ID NO: 190042 - protein, 102 aa, Unknown
  Bacterial polypetide isolated from the Sargasso Sea
MDRYNFKTVEKKWQDKWSLSGTFKSKIDRSKKKFYCLEMFPYPSGKIHMGHVRNYTIGDVLSRYKSLIGFNVMHPMGWDAFGMPAENAARENNLDPKDWTNK

SEQ ID NO: 190043 - protein, 242 aa, Unknown
  Bacterial polypetide isolated from the Sargasso Sea
KKIGKKQINFRLKDWGVSRQRYWGCPIPMAYDLDGNVKQIPKKDLPVKLPENVNLNSKGNPLDLENNWKNITIDGKKYIRETDTLDTFVCSSWYYLRFCSPKETKYGFNQDDIDYWMPVDQYIGGVEHAILHLLYSRFFMKAIGYENKNFKFKEPFEGLFTQGMVCHETYKDKNNNWISPDEIETINGKKMLKNKPSEEVMVGASESMSKSKKNTVDPEKIIEIYGADAARLFILSDSPPEK

SEQ ID NO: 190044 - protein, 300 aa, Unknown
  Bacterial polypetide isolated from the Sargasso Sea
MFPYPSGKIHMGHVRNYTIGDVLARYKSLLGYNVLHPMGWDSFGMPAENAAKQNNLNPKKWTEENIQVMKTQLKKLGLSIDWNREISTCSPDYYKHQQKIFLELFDKGLVYRKESYVNWDPVDKTVLANEQVINGKGWRSGAIVERKKLNQWFFNISKFSEELQEDLKDLDHWPEKVKIMQKNWIGKSFGCEIDFKIEGSKKIEKIRCYTTRPDTLFGFSFLALSVDHPLSKFYEKDKDFIKFKNSCSKTGTTEESIAQAEKIGFKTELLAINPLDEKIKVPVYFANFVLMDYGFGAVFG

SEQ ID NO: 190045 - protein, 230 aa, Unknown
  Bacterial polypetide isolated from the Sargasso Sea
MQEYIPKEIEAKWQKYWEDLNLLDFDSDSDNPKFYMLTMLPYPSGDLHIGHWYAMAPSDCYARYMKMKGYEVFFPIGFDAFGLPAENAAIKNNLHPKSWTYDNIKRMQKQLRSMGNMFAWKNEVISCDPEYYKWSQWFFLRMLEKDLAYREYAPVDYCNNCQTTLAREQVWGEDRVCERCENPVVKKDLNQWKLRITNYADELLDFEGLDWPERVRSMQGNWIGRSEGVE

SEQ ID NO: 190046 - protein, 299 aa, Unknown
  Bacterial polypetide isolated from the Sargasso Sea
TKLSSGEEAIRETDTLDTLVDSSWYFLRFCSPKYKKYGYEIKDINYWMPVDQYIGGVEHAILHLLYSRFFMRALAFKNKSFDYSEPFESLFTQGMVCHETYKNENNQWLYPDQIEKDSEGYFVTKKDRKKVIVGPSESMSKSKKNTIDPEEMINIYGADSIRWFMLSDSPPERDVQWSQEGVSAAFKFIQKLWKLNNDILSRKNSNSNSEDIVLKKAVNKTVYNVTKNLDNFQYNVVIANMHEIYNLFYDHVVNNRTSDKTLKNEWEKIIMLLMPLTPHLAHECCEKINKKFYWPKYDP

SEQ ID NO: 190047 - protein, 65 aa, Unknown
  Bacterial polypetide isolated from the Sargasso Sea
MSAKYNPKIIEKKWQSYWSENKLFESKVIKDKEKYYILEMFPYPSGKIHMGHVRNYTLGDVIARV

SEQ ID NO: 190048 - protein, 265 aa, Unknown
  Bacterial polypetide isolated from the Sargasso Sea
SRTDTLDTFVDSSWYFIRFCSPRLKDKPFDEKSFSYWMPVDQYIGGIEHAILHLLYSRFFMRAIKLCNEKIEVKEPFKGLFTQGMVCHETYKNKDGKWLSPDQIQKTKDGFSSKIDGSKVKVGPSEAMSKSKKNIVDPESMIKIYGADAVRWFILSDSPPERDVQWSTEGVSAANKFIQRIWSLNSKVLEKKEEESDPTEEKKLLSNFNEYLFKTSDLIEKFQLNVAIAKIHELTNLLEDNLFKKLSKKTLLETQIKFIKLMMPF

SEQ ID NO: 190049 - protein, 107 aa, Unknown
  Bacterial polypetide isolated from the Sargasso Sea
MLKVRYNFLEIEKKWQEYWKKNETYKVGFSSKPKFYVLDMFPYPSGAGLHVGHPLGYIASDIYSRFKRHKGYNVLHPQGYDSFGLPAEQYAIKTGQHPKKTTSENIE

SEQ ID NO: 190050 - protein, 271 aa, Unknown
  Bacterial polypetide isolated from the Sargasso Sea
FALKYNIDIKQVIKADEVPSSEKGELINSEKFNGLTSENAIQDINSFLEKEKIGKGIENFRLRDWGVSRQRFWGCPIPVVYKNDEPIFLEQTDLPVELPKIKDGESPKPLSQNKDFFDVGPNESREVDTFDTFVDSSWYYARFTAADNNNKALDENSAYWLPVDLYIGGIEHAILHLLYSRFFHKAMRDIGLVEGDEPFKKLLTQGMVLKDGSKMSKSKGNTVDPQQYIDKYGADTIRLYMMFTAPPEQSLEWSETAVEGAFRFLKKLWSF

SEQ ID NO: 190051 - protein, 283 aa, Unknown
  Bacterial polypetide isolated from the Sargasso Sea
NPLNGDRVPVWVAEYVLAGYGTGAIMGVPAHDQRDFLFARRYDIPTPVVVVPEDLDQPIPEGSELEEALLVKEGSKMVNSNEFDGLVWPEGFDRVVQAIEDKGIGKKQVNYRLRDWLISRQRMWGTPIPVIHCKNCGTVPVPYEDLPVMLPDDAEFKPTGESPLKYHPAFLNTECPKCGGSAERETDTMDTFICSSWYYYGYVSPYWKKGEKLKKEDLPWDPVAIRKWCPVNQYTGGIEHATMHLLYFRFFTKVLADMKLFDFREPAMRLFNQGMILGVDHEK

SEQ ID NO: 190052 - protein, 255 aa, Unknown
  Bacterial polypetide isolated from the Sargasso Sea
FDFAKKYKLNIITVVRPTNEKDNFNVSNEPYVDSGILINSKFLDGLSVPDQSIPKTIDYLEKNNLGNRKTNYRLKDWGISRQRYWGCPIPIAYDKNNNVIKIPEKDLPVTLPEIEKLNTNGNPLDSETKWKSVIIDGKECLRETDTLDTFVDSSWYFLRFCSSNDETNPFDEEEIKYWMPVDQYIGGIEHAILHLLYSRFFVRAINLDNKKIDLKEPFKGLFTQGMVCHQTYKDSNNNWLSPDEVFSKDNKQFFN

SEQ ID NO: 190053 - protein, 290 aa, Unknown
  Bacterial polypetide isolated from the Sargasso Sea
MCSKTGTTEEAIAVSEKIGFQTDLKAINPLNPTQKVPVYFANFVLMDYGFGAVFGCPAHDQRDFDFAKKYNLEIKTVVRPNNEDDNYKVSGEAYAGPGVLINSNFLNGLKAPDLSVKKTIEILEERKLGKKQINFRLKDWGVSRQRYWGCPIPIAYDEDGEPYPIPEKMLPVKLPENVDLNVKGNPLDNEKNWKEIKIDGKKLTRETDTLDTFVCSSWYYLRFCSPIEKKYGFNKEEIDYWMPVDQYIGGVEHAILHLLYSRFFMRAISYENKNFNLLEPFNGLFTQGMV

SEQ ID NO: 190054 - protein, 267 aa, Unknown
  Bacterial polypetide isolated from the Sargasso Sea
MKNLKNFCSKTGTTEESISQAEKLGFKTDLLAINPLNETEKLPVYFANFVLMDYGFGAVFGCPAHDQRDLDFAKKYKLKVMPVVKPVDKQDFEIKNQAFTGSGIIFNSKFLDGLKVPEESIHKTIEILEKKKIGKKTINFRLKDWGVSRQRYWGCPIPIAYNKKNEIIKVPLEKLPIKLPENINLNVNGNPLDHQNEWKKININGEECNLETDTLDTFVDSSWYFLRFCSPQNSKDGFTQEDLDYWMPVDQYIGGVEHAILHLLYSR

SEQ ID NO: 190055 - protein, 299 aa, Unknown
  Bacterial polypetide isolated from the Sargasso Sea
RRKGWRSGAVVERKKLNQWFFNISKFSEDLLDELDSLESWPTKVKTMQKNWIGKSFGCEIDFKIEGNLPIKNIKCFTTRPDTLFGFSFLALSVDHEISKYFAEDESFQKFKDECLHTGTTEEAIAIGDKIGFKTNLLAINPLDTSKKVPVFFANFVLMDYGFGAVFGCPAHDQRDFDFAKKYNLEIKTVVKPKEKNDDFKVDKEAYPGPGIIINSEILNGLDAPKKSVLETINILEKKNLGKKKINFRLKDWGVSRQRYWGCPIPIVYDKEDNAIPVPKKMLPVKLPEKINLNTKGKSL

SEQ ID NO: 190056 - protein, 255 aa, Unknown
  Bacterial polypetide isolated from the Sargasso Sea
DANNDDSPFDRSAVDYWMDGGVDLYIGGIEHAVMHLLYARFFTKFTRDAGMNEVGEPFGRLVCQGMLNAPAPYCSDCNSEYHVDYFESACPSCGKELSSRSAKMSKSLGNTVSPEEMISRFGADTVRLFILFGANPEAGMDWSDSALEANHRQINSLFDAIDEAMALSDAPSKIDRWLLSRMRASQNRWIEAMSDVSLREGVMISHFEMLSDWNWYLRRGGLDRTTAMKFLEGWIPMLAPATPHIAEEIWNKFGG

SEQ ID NO: 190057 - protein, 251 aa, Unknown
  Bacterial polypetide isolated from the Sargasso Sea
ISRQRFWGCPIPIAYDENGNTIKIPKEKLPIKLPEKINLNVKGNPLDQQEEWQFIEIDGKKYKKETDTLDTFVDSSWYFLRFCSPNESSYGYNIDDINYWMPVDQYIGGVEHAILHLLYSRFFMQAIGYNKAEFKFIEPFSGLFTQGMVCHETYKDQNGKWLSPEEVVSNDRKEFFLKKDRSIKVKIGPSESMSKSKKNTIDPENMITNFGADAVRLFMLSDSPPERDIQWSEQGMNAAYRFINKLWLLHQ

SEQ ID NO: 190058 - protein, 289 aa, Unknown
  Bacterial polypetide isolated from the Sargasso Sea
TEKNIKEMKRQLKMLGLSIDWDLEISTCDEKYYKHQQELFIDFYNMGLVSRKETYVNWDPVEQTVLANEQVINGRGWRSNAIVERKKLSQWFFNISKFSEELLEGLNQLKNWPEKVKTMQKNWIGKSFGCEIDFKIEGNLPIKTIKCFTTRPDTLFGFSFLAVSVDHPLSNHFSNNSQFKQFKEECSKTGTTEESIAQGEKIGFKTDLLAINPLNEKEKVPVYFANFVLMDYGFGAVFGCPAHDQRDLDFANKYNLKVKTVVRPLEKDNNFNVQKEAYTGPGVIINSDF

SEQ ID NO: 190059 - protein, 280 aa, Unknown
  Bacterial polypetide isolated from the Sargasso Sea
QTSDPKYYRWTQWIFLKLFNSYYNTSKDKAFPISELISDFEREGNHKVFAHCEKDTQLFGANEWNAFSEVEKEKILLKYRLTYLSKTQVNWCPALGTVLANDEIVNGVSERGGHPVIKKKMTQWSMRISAFANRLLEGLDQVNWPDSLKEMQRNWIGKSIGASIFFQIKDNKNKIEVFTTRPDTIFGVTYLTLAPEHGLVKSITTPEKEKEVEDYIAKVSTKSERERQAEVKNISGVFTGGYAIHPFTKVKIPIWIGDYVLASYGTGAVMAVPSGDQRRF

SEQ ID NO: 190060 - protein, 285 aa, Unknown
  Bacterial polypetide isolated from the Sargasso Sea
TIGDVIARYKYMKGFDVLHPMGWDAFGLPAENAAKINNLNPKDWTRENVKVMKSQLKMLGLSIDWDLEISTCDEDYYKHQQELFIDFYNQGLVSRKETYVNWDPIEKTVLANEQVINGKGWRSNAVVERKKLSQWFFNITKFSDELLKDLEKLSGWPEKVKLMQKNWIGKSIGCELNFKLAGQKNSLSIFTTRPDTIFGASFIAISVDHEICKSFIKNPDFEKFKDKCSKIGTTEEALANAEKLGFNTNLFAEHPFIKNKKIPIYAANFVLMDYGKGAIFWLSCS

SEQ ID NO: 190061 - protein, 314 aa, Unknown
  Bacterial polypetide isolated from the Sargasso Sea
WFLSKCGIVPEDKDSLPILLPKKADFSKPGNPLDRDSTWKKTKCPQCKMESKRETDTMDTFVDSSWYYARFTNPAALTPTDEANTNYWMNVDQYIGGVEHAILHLLYSRFFARAMNITNHLPKKSIEPFSALFTQGMVCHETFSSYSLKISENSEQFLIGQELLGETTNAKSYVKGVINDNELIVKKPRKPFKIGERIFVPGTKIGAIIKATAEEWFSPEEVTSRSLEISDKSKVVIKTGLPVEIGNSVKMSKSKKNVVDPIDIIEQYGADTARWFVMSDSPPDRDVEWTEAGIEGAWRHVQKVWRVSHDIFAQ

SEQ ID NO: 190062 - protein, 293 aa, Unknown
  Bacterial polypetide isolated from the Sargasso Sea
MPVDQYIGGIEHAILHLLYSRFFMQATKLTNNKIKDEEPFKGLFTQGMVCHETYKDINGKWISPEEVEKKDDGKFLKKSDKSIVSVGPSESMSKSKKNIIDPETMIKSYGADAVRWFILSDSPPEKDVQWSNQGVSASYKFLQKIWNLNSKIVTRSDQKPSSEAEEKLKTEFNSYLFKITNLINNFQLNVAVANVYEIYRLISSSLEKKISNKCFKIIMIDFMKILIPFTPHLASESLEMLDQKNIDNWPKLDEKLIKKQKVKIAIQINGKTREIIEIEKDLSEEVAVKESKK

SEQ ID NO: 190063 - protein, 222 aa, Unknown
  Bacterial polypetide isolated from the Sargasso Sea
MQEYIPQEIEAKWQKYWEEHNLLDFDFDSENPKFYMLTMLPYPSGDLHIGHWYAMAPSDCYARFMKMKGHEVFFPIGFDAFGLPAENAAIKNNIHPKSWTYENIKRMQNQLRSMGNMFAWKNEIVSCDPEYYKWSQWFFLRMLEKDLAYREYAPVDYCNHCKTTLAREQVWGEDRVCERCDNPVVKKDLNQWKLRITNYADELLDFDGLDWPERVCSMQENW

SEQ ID NO: 190064 - protein, 195 aa, Unknown
  Bacterial polypetide isolated from the Sargasso Sea
MDRYNFKIVEEKWQSKWESEKTFVVKTDLNKKKFYCLEMFPYPSGKIHMGHVRNYTLGDVLSRFKMMNGFNVLHPMGWDSFGMPAENAARENNLHPVEWTRENISNMKDQLKKIGLSIDWEREISTCEPEYYRHQQEFFLELYDKGLVYKKENYVNWDPIDETVLANEQVIDGKGWRSGAQVERKKLNQWFFNIS

SEQ ID NO: 190065 - protein, 259 aa, Unknown
  Bacterial polypetide isolated from the Sargasso Sea
LSKKDVKLAAFIKEQSKGSTAESDITKAEKLGYKTSFNVFNPITNENIPIWIINYVLMDYGTGAIMGVPGHDERDFEFAEKYKIQIKRVIESEEPLPYSGDGRLINSQELNNLNVDEAFKKISKMLSDNHSGKELYQYRLRDWGVSRQRYWGCPIPIVYKNGEPRPVQNLPVELPLGDKDHKPLDQNEDFKNIADGEIRETDTFDTFFESSWYFARYTSADNKNKIFDENTNYWLPVDLYIGGVEHAILHLLYARFFHK

SEQ ID NO: 190066 - protein, 308 aa, Unknown
  Bacterial polypetide isolated from the Sargasso Sea
CDKEYYKHQQELFIDFYNQGLVSRKETYVNWDPVEKTVLANEQVINGKGWRSNAVVERKKLSQWFFNITKFSHELLNDLDSLPGWPEKVKLMQKNWIGKSYGCEINFNYENKKKITVFTTRPDTIFGASFIALSVDHPLSKNFTNNAEFLNFKKECDKAGTTEEALANAEKIGFKTNISVDHPFIKNKKLPVYFANFVLLDYGTGAIFGCPAHDQRDFEFATKYDLEIIRVVSDGNDNIKLSEAYTGNGKIINSEFLNGLEIDLAKEKIIKTIEEKNFGKRKTLFRLKDWGISRQRYWGCPIPMLYLD

SEQ ID NO: 190067 - protein, 293 aa, Unknown
  Bacterial polypetide isolated from the Sargasso Sea
MFLDFYKAGIAYKKETIVNWDPIEQTVLANEQVVDGRGWRSGAEVEKKKMKGWFLKISDFAEDLLSEIDNLKEWPDRVKVMQRNWIGKSNGATINFSINNSDDKVEIFTTRPDTIFGATFIAISPQHPLSLKIAINDNKAKNFINLCERQSNKAEDIEKADKLGYETSFTVSHPFKKETNLKIYIANFILMDYGTGAIFGCPAHDQRDYDFARKYSLDIIPVVENDNILPYTGDGSHINSDFLNGLDTKEAIDLSIKELQKLGIGKETVTYRIRDWGVSRQRYWGVPYTHSIL

SEQ ID NO: 190068 - protein, 303 aa, Unknown
  Bacterial polypetide isolated from the Sargasso Sea
MIEKYNPKVVEQKWQKIWQDKKTFEVEIDQSKQKYYILEMFPYPSGKIHMGHVRNYTLGDVVARYKRAQGFNVMHPMGWDAFGLPAENAAMQNKTSPKIWTYENIEQMKKQLKLMGFSIDWSREFATCDEDYYFQQQKLFRILYENGLVYRKESLVNWDPVEQTVLANEQVIEGKGWRSGANVEQKKLSQWFFKITEFSENLLSDLSKLDRWPEKVKSMQSNWIGKSLGCQIQFEIYDNDKTATNEKLEIFTTRQDTIFGATFCAISPNHSFAESLSHSNESIKSFIAACQKKGFSEETLAKE

SEQ ID NO: 190069 - protein, 268 aa, Unknown
  Bacterial polypetide isolated from the Sargasso Sea
INFKLRDWGISRQRFWGCPIPIIYREDGEILSVEENELPVKLPDIQKFNESSSALNNIADWKETLCPKTGMKAFRETDTFDTFFESSWYFFRYCNARLEIPFDKKDIDYWLPVDQYIGGIEHAILHLLYSRFFTKALRDLGYFNLDEPFKGLFTQGMVTHITFRNSNQDWVEPKDVQKVGGILKDTKNLDVEIGKVEKMSKSKKNVIDPNDIIDSYGADTARWFMLSDSPPERDLQWTDNGIAASFKFINKLFDLVERFKNYNLKKSD

SEQ ID NO: 190070 - protein, 247 aa, Unknown
  Bacterial polypetide isolated from the Sargasso Sea
AENAAIENKVSPKDWTNKNIDSMKSQLKTLGFSYDWSKELRTCDSQYYKWEQLIFKKFYDAGLVYRKKSHVNWDPIDETVLANEQVIDGKGWRSGAQIEIKEIDQWFIKITKYAEELLDSLEELDWPENVKLMQKNWIGKSHGAEIRYKIDKSDDFLTTFSTRPDTIFGVSFIAISPNHPLAIDLSKKEKNIFDFLERCKEIKAAEADMAKAEKLGIDTKLKVIHPITGKKLPVWIGNFVLLDYGTG

SEQ ID NO: 190071 - protein, 285 aa, Unknown
  Bacterial polypetide isolated from the Sargasso Sea
RQRYWGCPIPVAYDEAGKVHPIPRSMLPVKLPENVDLKAKGNPLDGQKEWKEIIINGKKMTRETDTLDTFVCSSWYYLRFCSPNENNYGFNKEDINYWMPVDQYIGGVEHAILHLLYSRFFMRAINYENKNFDIKEPFQSLFTQGMVCHETYKDEDNNWLSPDEVTKINGKIVKKNDENKIVKVGASESMSKSKKNVIDPEFIIENYGADAVRLFILSDSPPEKDVQWSEQGMASSYKFLQKLWILHNEIKNKIFKNKYEKDDKKIEKFINQMISKITVNLEKFN

SEQ ID NO: 190072 - protein, 285 aa, Unknown
  Bacterial polypetide isolated from the Sargasso Sea
KEEDIKYWMPVDQYIGGVEHAILHLLYSRFFMRAISKDNKKINLSEPFEGLFTQGMVCHETYKDPENNWVSPEEIVTINGKKYLKNNNSIQIKVGPSESMSKSKKNTIDPENIISNYGADAARLFILSDSPPEKDVLWSEEGISSSFKFIQKLWTLNSKIIEEIKKSHNEDTNDEITKYTNKFLKKVTNNLENFSYNKIVANLHEMHSFMTKQINKNYKKETLIENYQKILISMQPIIPHFANECLDLINIKDFKWPKFDEKYTIEETINLVIKINGKKRGLIEI

SEQ ID NO: 190073 - protein, 276 aa, Unknown
  Bacterial polypetide isolated from the Sargasso Sea
ENYVNWDPVDQTVLANEQVIDGKGWRSGAQVERKKLNQWFFNISKFSEQLLNGLDNLEEWPNKVKTMQKNWIGKSFGCEIDFKVEGDLPVKNIKCFTTRPDTLFGFSFLALSIDHPLTKYFEKNSEFQNFRDKCSKTGTTEESIAQAEKIGFKTNLQALNPMDPKIKVPVFFANFVLMDYGFGAVFGCPAHDQRDFEFAKKYKLDIKTVVRPKDRGSDFQVEDEAFIDDGVMINSSFLDGLETPGEAIEKSIEYLTKNNLGNKKINFRLKDWGISR

SEQ ID NO: 190074 - protein, 280 aa, Unknown
  Bacterial polypetide isolated from the Sargasso Sea
HAKNWIGKSFGCEIAFKTEGDLPVKEIKCFTTRPDTLFGFSFLALSVDHEISKFFEKDKKFQEFKKECSKTGTTEEAIAIGEKIGFKTNMKAANPLNPSQKVPVFFANFVLMDYGFGAVFGCPAHDQRDFDFAKKYNLDIKTVVKPDSEDDEYEVKDAAYSGPGTLINSEFLNNLKAPEESIIKTIDILEERNIGKKQINFRLKDWGVSRQRYWGCPIPMAYDENGNVTKIPKKDLPVKLPDNVDLNFKGNPLDAKNDWKNINIEGKKYLRETDTLDTFV

SEQ ID NO: 190075 - protein, 250 aa, Unknown
  Bacterial polypetide isolated from the Sargasso Sea
KNISEETDTLDTFVCSSWYYLRFCSSNNSDYGYKQEEIDYWMPVDQYIGGVEHAILHLLYSRFFTKALGYKNKKFKFNEPFKGLFTQGMVCHETYKDENDNWLSPDEIELDGQQYYKKGNPNNKVRVGPSESMSKSKKNVIDPENIINNYGADAVRLFILSDSPPEKDVQWSDQGMVASFKFLQKLWILHNKIKEKIENNKEDGGDNEKLNKFTNQMIERITNNLEDFSYNVIIANIYETYNFINKIIEK

SEQ ID NO: 190076 - protein, 114 aa, Unknown
  Bacterial polypetide isolated from the Sargasso Sea
NRAVIYEGLRTVLQLLWPITPHLSEHLWQALTGEAFKENQWPEVDDTALSRDELEIVVQVNGKVRGKINVPASADNAEIEAMAKSQENVQRFLADTTIRKVIVVPQKLVNIVAQ

SEQ ID NO: 190077 - protein, 327 aa, Unknown
  Bacterial polypetide isolated from the Sargasso Sea
RPDTLFGASYIVLAPEHTLIHSFVTDDQRSKVEVYIEETKKKSDFDRTEVNKYKTGVFTGSYAINPFSKEKIEIWIADYVLISYGTGAIMAVPGHDERDWEFASKYNLPIVEVVEGGDVSKAAYTAKGNAKIINSSNDKTLSMDGLSVDQAIKEAILFIEKNSIGKATVNYKLRDWLFSRQRYWGEPFPLIHKNDSVELIKEKDLPVMLPEVENYKPSDDGKSPLSLVKNWVEVKDESGNIIGLRETNTMPQWAGSCWYFLRFTDPNNSNEAWSKERENYWMPVDLYIGGQEHAVLHLLYSRFWHHVLYDLDLVSTKEPFKKLYNQG

SEQ ID NO: 190078 - protein, 264 aa, Unknown
  Bacterial polypetide isolated from the Sargasso Sea
GEKEWKEININGKKLTRETDTLDTFVCSSWYYLRFCSPKEKEYGFDKEDINYWMPVDQYIGGVEHAILHLLYSRFFMQALSHNNDEFNILEPFEGLFTQGMVCHETYKDLDNNWISPDEIETINGKKYLKGDKSKMVKVGPSESMSKSKKNTIDPENIISNYGADAARLFILSDSPPEKDVQWSEEGIISSFKFVQKLWNLHQKILDESNKDHKKNNNNAIEKYTNKFLKDITHNLENFSYNKLIANLHERYSFMHKQIQEPYT

SEQ ID NO: 190079 - protein, 267 aa, Unknown
  Bacterial polypetide isolated from the Sargasso Sea
SNEIVNELTKLELGEELIQFRLRDWGVSRQRYWGCPIPVIYDGDVPSVLGENDIPVELPELKENEPPTPLSQNDNFLKVKEGFRRESDTFDTFMDSSWYYARFTSADNEDEIFDEKTKYWLPVDLYIGGIEHAILHLLYSRFFHKALRDIGLVEGDEPFKRLLTQGMVLKDGAKMSKSKGNTVDPQPYIEKYGADTVRLYMMFTSPPEQSLEWSESSVEGSARFLKKVWNLISGRKYKKLDDQFNFSKEELALRRKSHATLKKVEND

SEQ ID NO: 190080 - protein, 292 aa, Unknown
  Bacterial polypetide isolated from the Sargasso Sea
EEYYKHQQLFFLELLEKGLVYRKENYVNWDPIDETVLANEQVIDGKGWRSGAIVERKKLNQWFFNISKFSQRLLDDLDKLNKWPNKVKVMQKNWIGKSFGCEINFKVEGDIPVNEIKCFTTRPDTLFGFSFLAVSIDHEISKFFSNNNEFNKFKKECSKTGTTEEAIAMGEKIGFKTNLMAINPLNSNEKVPVYFANFVLMDYGFGAVFGCPAHDQRDFDFAKKYKLKIKTVVKPNNEHDNYEVGDKAYTGGGNIINSEFLNGLKVPEQSITKTIDFLEQKRIGKKKINFRL

SEQ ID NO: 190081 - protein, 261 aa, Unknown
  Bacterial polypetide isolated from the Sargasso Sea
DAFGLPAENVAIANKVSPKAWTDQNIDNMKDQLKSLGFSYDWSKELRTCDSKYYKWEQLIFKKFYDAGLVYRKKSFVNWDPVDETVLANEQVIDGKGWRSGAQIEIKEIDQWFIKITKYADELLNSLDDLDWPENVKTMQKNWIGKSKGAEIKYKIENSDDYLTAFSTRPDTIFGVSFLAIAPNHPIAIELSNKNKEIHDFLNKCKEIKAAEADIAKAEKLGIDTNIKVIHPLTGEKIPLWIGNFVLLEYGTGVVMGVPGH

SEQ ID NO: 190082 - protein, 312 aa, Unknown
  Bacterial polypetide isolated from the Sargasso Sea
SRQRYWGCPIPMIYLEDGSVVPVDKSELPIELPDDVDLNSKGNPLDNHPHWKNTLQKSTGKKAIRETDTLDTFVDSSWYFLRFCSPNHSSSPFDEKQVKYWMPVDQYIGGIEHAILHLLYSRFFTKGIKKFKKNFNIIEPFKNLFTQGMVCHETYQDQKGNWLYPNEVEKVDSNTYIQKKDKSKVIVSPPESMSKSKKNTIDPETMINEYGADAVRWFILSDSPPEKDVQWSDTGVTSANKFLQKIWNLNFLIHKRKNKDIDKKLEKKFDLVIKSFTAKIDNSIKSFRFNVSIAHFYEIYRVFKDAYESQYK

SEQ ID NO: 190083 - protein, 304 aa, Unknown
  Bacterial polypetide isolated from the Sargasso Sea
MVFTTRSDTLFGVTYLAISVNHSLIKNISDQEILQDIEKLKQYLKKNKNNELEKIGIKTSLVAVNPVNSEPIPIWVASYVLDEYGTGAVMGVPAHDLRDFEFAKQYNIDIKQVIIKDKSELSNELDNAYVDNGYLINSNQYDGIANTIAKLKISEEGVNNGWAENKIQYRLRDWLISRQRYWGCPIPIVNCKKCGSVPLNQSELPVSLPNDIEISDNKINALGDNNNWINTICPKCGIAAIKETDTMDTFMCSSWYFLRYPSSKCSTKPFEKNEINKWLPVDPYVWRSRARHITFVICPDFSLR

SEQ ID NO: 190084 - protein, 257 aa, Unknown
  Bacterial polypetide isolated from the Sargasso Sea
DLQALNPMDPKIKVPVYFANFVLMDYGFGAVFGCPAHDQRDFEFARKYNLKIKTVVRPKDQNNNFTVKNEAFVEDGIMINSSFLDGLQTPGEAVEKSIEHLTKKKLGKKKINFRLKDWGISRQRYWGCPIPIAYDKNGNIVKVPKEMLPIKLPDKINLNTKGNPLDHQKEWRNINIKGESCTLDTDTLDTFVDSSWYFLRFCSPDNREYGFSEEEIKYWMPVDQYIGGVEHAILHLLYSRFFMQALSFEKKNFISTE

SEQ ID NO: 190085 - protein, 64 aa, Unknown
  Bacterial polypetide isolated from the Sargasso Sea
MKYFHEQIEAKWQEYWAKNQTFAASNNSDKPKYYVLDMFPYPSGAGLHVGHPLGYIASDIVARY

SEQ ID NO: 190086 - protein, 222 aa, Unknown
  Bacterial polypetide isolated from the Sargasso Sea
IDFKLEGDLPVKSVKCFTTRPDTLFGFSFLALSVDHEISKFFTENKEFQKFKKECSKTGTTEEAIAIAEKIGFKTNLVAINPLDPNQKVPVYFANFVLVDYGFGAVFGCPAHDQRDFDFAKKYNLKIKTVVRPKDSEENFEVQDEAYAGPGLIINSDFLNGIKAPENSIIETIKILEEKNLGKKKINFRLKDWGVSRQRYWGCPIPIFYDEKGEAHPVPKDM

SEQ ID NO: 190087 - protein, 228 aa, Unknown
  Bacterial polypetide isolated from the Sargasso Sea
VEDIDKKWQLFWSKKKNIFKNTNKKKKFYCLEMFPYPSGKIHMGHVRNYAIGDVIARYKMMKGFNVLHPMGWDSFGLPAENAARENNLNPMDWTKKNISTMKHQLQLLGLSIDWDLEISTCDEEYYKHQQELFIDFFNKGLVVRKETYVNWDPVEKTVLANEQVIDGRGWRSNALVERKKLHQWFFNISKFSEELLEDLETLKEWPEKVKLMQKNWIGKSLGCEINFK

SEQ ID NO: 190088 - protein, 104 aa, Unknown
  Bacterial polypetide isolated from the Sargasso Sea
MERVNFQAIEKKWQVKFNSSKLHNKNGKKFYCLEMFPYPSGKIHMGHVRNYTIGDVVARYKYLNGFNVLHPMGWDSFGLPAENAARLNNLNPKTWTEENIKTMK

SEQ ID NO: 190089 - protein, 305 aa, Unknown
  Bacterial polypetide isolated from the Sargasso Sea
MVQHFCAISPFHPLVDDIIKEDKKIESQVFELRAQKINEEAIAKNEKIGIQTKLFIKHPFIEKKFLPVYIANFILMDYGSGAIYGCPAHDQRDLDFANKYNCEVIQVIDPEDNSIFDNKNAITGNGKLINSDFLNELNIEDAKKEVIKRITKLGLGKETINYRLRDWGISRQRYWGCPIPVMYREDGKIIEVPESELPLKLPEDIDLSKPGNPLDNHPTWKYTKCPLTGMNAIRETDTLDTFVDSAWYYLRFCSPKNTNDPFDNNEINYWMPVDQYIGGVEHAILHLLYSRFFTKALELDNLHEP

SEQ ID NO: 190090 - protein, 294 aa, Unknown
  Bacterial polypetide isolated from the Sargasso Sea
DQRDFDFAKKYKLEIIKVVSNGNDEELKEAYTGSGKLINSDFLNDLNIDEAKQKIIKEVENKKIGNSKTLFRLKDWGVSRQRYWGCPIPMIYLEDGTVVPVEKKELPIELPDDIDLNSNGNPLDNHPTWKQTVQMSTGKKAVRETDTLDTFVDSSWYFLRFCSPDHKLSPFDEEKVNFWMPVDQYIGGIEHAILHLLYSRFFTKGINKCNKNIKVTEPFENLFTQGMVCHETYRDKNGNWLYPEEIEKINPSKAVKRKDKTEVTVGSSESMSKSKKNTIDPEVMINKYGADSVR

SEQ ID NO: 190091 - protein, 282 aa, Unknown
  Bacterial polypetide isolated from the Sargasso Sea
MKRYNFRETEQKWQQKWSEAKTFQVFENTDLPKYYVLEMFPYPSGRIHMGHVRNYTLGDLLARYKKACGFNVMHPMGWDAFGLPAENAAFERNIHPAKWTDKNISTMREQLKAMGLSYDWDRELSTCDPEYYKHEQKMFLDFVKNNLAYRKESWVNWDPVENTVLANEQVIDGKGWRSGAPVEKRLLSQWFLKITEYSDDLLKSIETLERWPDKVKLMQHNWIGRSEGATIFFNINGHDDRLEVFTTRPDTIFGASFCAIAANHPIASSLAKADAKLQDFIS

SEQ ID NO: 190092 - protein, 141 aa, Unknown
  Bacterial polypetide isolated from the Sargasso Sea
MTTSEPYNAKNIEAKWQKVWNKRNIFKAKNKNSDKNYYVLEMFPYPSGKIHMGHVRVYSLGDVLARYKRAQGFDVLHPMGWDAFGMPAENAAFENNIHPAEWTKKNINSMRNQLKAMGLSYDWDLEFATCDPLYIKCQQKI

SEQ ID NO: 190093 - protein, 255 aa, Unknown
  Bacterial polypetide isolated from the Sargasso Sea
DPNSGEPLEVLFEKMSKSKYNGVDPAAVIDRYGADTARMFILFKAPPEKDLEWDDADVEGQFRFLQRIWRLVESAGTRIETLDPEERPEPLADSDAQVRRAIHLAIEAVSEDLQDEIQLNTAISELMKLTNAITSVGVSELSTSVLKEALSTLLRLLAPFAPHLAEELWYQLGGSSSVHRAGWPELDPSALVQDSVDLVIQIKGKIRGTIQVPADADKAQLEALALASDVAAKWLEGQPPRRVIVVPGKLVNLVP

SEQ ID NO: 190094 - protein, 291 aa, Unknown
  Bacterial polypetide isolated from the Sargasso Sea
KVKLMQSNWIGKSEGAEIKFEIRNAENLSQNHLTIYTTRPDTLFGATFCAISSEHPVAKEVVKKDPNAAEFIKGCKNLDSDKEKKGYKTEIKIRHPLLEKDIPLFIANFVLMEYGLGAIFGCPAHDQRDLDFANTYKLDVIPVVKPDNIKNKDFLITNKAFTDNGTMINSGFLNGLSDLEAKKTILKRLSEKGVAKKKINYKLRDWGISRQRYWGCPIPVLYREDGKIITVRKQDLPLKLPKIDRLTGEGNILQNLDKWKNVSCPETGLKCTRDTDTFDTFFESSCISKIC

SEQ ID NO: 190095 - protein, 277 aa, Unknown
  Bacterial polypetide isolated from the Sargasso Sea
CEPEYYKHQQEFFLELYEKGLVYKKENYVNWDPVDETVLANEQVIDGKGWRSGAVVERKKLSQWFFNISKFSNQLLDGLKDLDDWPDKVKTMQSNWIGKSYGCEIDFKVEGDKNFNEIRVFTTRPDTLFGFSFLALSVDHPLAKQFENNADFIKFRNNCAKTGTTEESIAQAEKLGFKTHIMAINPLDPEDKAPVYFANFVLMDYGFGAVFGCPAHDQRDMDFALKYKLKIKTVVKPKDHEGDFKVDEKAYTGSGHMINSNFLNGLKVPEESIKKAI

SEQ ID NO: 190096 - protein, 288 aa, Unknown
  Bacterial polypetide isolated from the Sargasso Sea
SVGCEINFKVSGIEKFIKVFTTRPDTIFGATFLAVSIDHPICEKYKKLPKFLDFKKECSQVGTTEEAIANAEKIGFKTDLQAEHPFIKNKKIPIYISNFILMDYGTGAIFGCPAHDQRDFEFATKYNIEIIPVVKPKDTNQAYQKNEAYTGDGVLINSEFLNDLTILEAKQKIVKEIENKKIGKKKITFRLKDWGVSRQRYWGCPIPMIYLKNGEVVPVDKSELPIKLPENIDVNSKGNPLDTHPTWKKTKYKKTGEEATRETDTLDTFVDSSWYFIRFCSPKIKSKA

SEQ ID NO: 190097 - protein, 288 aa, Unknown
  Bacterial polypetide isolated from the Sargasso Sea
SEFFKDNNDFIKFKKECSKTGTTEESIARAEKIGFKTDIIAINPLDQEMQVPVYFANFVLMDYGFGAVFGCPAHDQRDLDFANKYNLKVKPVVCPHGANIDFKIKNEAYTGPGKIFNSKFLDGLNCPEESIIETINILEKKNLGKKKVNFRLKDWGVSRQRYWGCPIPVAYNGKGEVVKVPLNNLPVKLPENIDLKVKGNPLEHQHEWKKITINGEDCIRETDTLDTFVDSSWYYLRFCSANNKLKGFDMDEISYWMPVDQYIGGVEHAILHLLYSRFFMRALGEDKK

SEQ ID NO: 190098 - protein, 304 aa, Unknown
  Bacterial polypetide isolated from the Sargasso Sea
WRSGAQVERKNLNQWFFNISKFSEQLLDGLKSLPEWPNKVKTMQTNWIGKSYGCEIDFKIEGNLPVKNIKCFTTRPDTLFGFSFLALSVDHPLSKYFENNPEYQKFKEECSKSGTTEESIAQAEKIGFKTNLQALNPMDPKIKVPVYFANFVLMDYGFGAIFGCPAHDQRDFEFAKKYNLNIKTVVRPKDQNNNFSVKKEAFVEDGIMINSSFLDGLKTPGEAIEKSIEYLTINKLGKKKINFRLKDWGISRQRYWGCPIPIAYDKKGNIVKVPKEMLPIKLPEKINLNTQGNPLDHQKEWGRK

SEQ ID NO: 190099 - protein, 180 aa, Unknown
  Bacterial polypetide isolated from the Sargasso Sea
TGAVMAVPAHDERDFEFAQNFELPIKRVVKAAPKQGKKKKKGDAEAQAQAEAAAAADDEAAMEEAFTTEGVAVNSGDDFDGLTTAKAKKKVAAALSDMGAGGEQVTYKLRDWVFSRQRYWGEPIPIYFPVDVEDGVDPREGEHTIRYDQPIAVDDTDLPLRLPQMDNYEPGDDPQGCLAR

SEQ ID NO: 190100 - protein, 104 aa, Unknown
  Bacterial polypetide isolated from the Sargasso Sea
MIERYSHQKVENFWQTKWKENQVFESKLDNKKNKYYVMEMFPYPSGKIHMGHVRNYTLGDVVARYKKMKGFNVLHPMGWDAFGLPAENAAIKEKKNPSDWTYSN

SEQ ID NO: 190101 - protein, 239 aa, Unknown
  Bacterial polypetide isolated from the Sargasso Sea
MPRYNPAELEPRWQSYWQEHRTFSTPRLPAGKKFYALDMFPYPSGDGLHVGHPEGYTATDIMSRFKRMQGQAVMHPMGFDAFGLPAEEHAIKTNTPPRIQTEKNIANFRRQLRMLGFSYDWDRELATTDIGYVRWTQWIFLQLHDTWFDEEQQIGRPIAELPIPPDVSAEGSEAVAAYQDEHRLAYQTHAPVNWCNALGTVLANEEVKDGLSEVGGHPVTRIPLRQWMLRITAYAERLE

SEQ ID NO: 190102 - protein, 301 aa, Unknown
  Bacterial polypetide isolated from the Sargasso Sea
FRRFTYRSLVCFTPADAHARFKRLEGFNVMHPQGFDAFGLPAENAAIKNNINPKKWTFDNISNMQKQFDMMGNSYDWSRKLITCTPEYYKWNQKFFVEMYKKGLAYRKNGPVWWDPIDQTTLANEQVVDGKSERSGADVVKKLMPQWYFKITDYAEELLDMDNLEWPEKIKQMQRNWIGKSSGVTINFSIENSNEKISTFTTRIDTIYGVTFVVLAPEHPIIKTLSLSKNKYVKEYIARSQKMSEIDRTSTIREKTGVRTDVCCINPLTGEKIPVFVGDYVLASYGSGAVMGVPAHDERDF

SEQ ID NO: 190103 - protein, 257 aa, Unknown
  Bacterial polypetide isolated from the Sargasso Sea
RFKKSKGFNVLHPMGWDAFGMPAENAAMEKKVHPRAWTESNIKDMKEQLRPMGLSIDWSKELATCDPNYYEKQQSLFIDMEKSGLVSRKISKVNWDPVDMTVLANEQVVDGKGWRSGALVERKELTQWFFNISNYSEELLNGLDALKGWPEKVRTMQSNWIGKSSGAEITFSIKNSITEFKNIKVYTTRPDTIFGMSFLAISPNHPIAVELSKTNKRLNDFCIECQNNLTSEEALETAEKKGIDTGIKVEHPFKIDK

SEQ ID NO: 190104 - protein, 230 aa, Unknown
  Bacterial polypetide isolated from the Sargasso Sea
SDLYVAANQSDKESYYVLEMFPYPSGKLHMGHVRNYVIGDCLARYKRMNGFNVLYPMGFDSFGLPAENAAIKHNVNPKSWTADNVESMKVQLERLGLSYDWNRELATFRDDYYRWNQWIFIQMYKKGLVYKKKGWVNWDPVDQTVLANEQVIDGKGWRSGADVEKKEIEQWYIKITDYAEELLQDIDNKLTDWPERVKSMQRNWIGKSFGTEIDFDIVDANGVKLDTVTV

SEQ ID NO: 190105 - protein, 236 aa, Unknown
  Bacterial polypetide isolated from the Sargasso Sea
MSSNIIKVFTTRPDTIFGATFCAISSEHPIALEIVNNNNEAKIFQEKCRRLNPDKEKIGFKTNLLIEHPFEKKTIPLFIANFILMDYGSGAIFGCPGHDQRDLDFANKYNLQIIPVILPPGEKVNNFKVLNEAYIGEGLLINSSFLNGKSIENAKQLVVKKLSEKGMGKEKVNYRLRDWGLSRQRYWGCPIPIIYREDGEILTVRKEDLPVELPKIDKFSGTGNVLEKIDDWKVTK

SEQ ID NO: 190106 - protein, 297 aa, Unknown
  Bacterial polypetide isolated from the Sargasso Sea
LDQLKAPEQSVLKTIEILEKKKVGKKKINFRLKDWGVSRQRYWGCPIPVAYNQKNEIVKVPLDQLPIKLPDNINLNVNGNPLDHQNEWKKITINGEECTLETDTLDTFVDSSWYYLRFCSPKNEKEGFNIDDVNYWMPVDQYIGGVEHAILHLLYSRFFTKALAYKDKKFKISEPFSGLFTQGMVCHETYKIENQWFSPEEVSSDNGKDFYLKKDKKKVIVGPSESMSKSKKNTIDPEIMVENFGADAVRFFILSDSPPEKDVQWSEQGMLASYKFIQKFWNLNSELTDKIKMKANS

SEQ ID NO: 190107 - protein, 292 aa, Unknown
  Bacterial polypetide isolated from the Sargasso Sea
RESGSNKYISSNLISDNEVDKIRIDIKYVKDDNQVDYNLLKLEDSDFKNSTFKLENNVFYCIREQEKMSKSKFNVVNPDEICDQYGADTLRMYEMFLGPIEQSKPWNTRGISGVHSFLKKFWNLFFKDGVFNISEDKPSKESLKSLHKTIKKITEDIEKLSLNTCISSFMICINELSLIGCNNREILEELLILISPFSPHFAEELWSQLGHKESIVDQNYPEFNENYLVETQKLYPVSFNGKTKFTINLPIDLSNKEIENAVMSFEKTKAILNNVEPKKVIVVPGKIINIVT

SEQ ID NO: 190108 - protein, 251 aa, Unknown
  Bacterial polypetide isolated from the Sargasso Sea
FNNKSILPIYIANFVLMDYGTGAIFGCPAHDQRDLDFANKYKLKVLPVVKPKNIDSKKFIIKNEAYTEDGILFNSDFLNNLTVNEAIKKAIEVLAKKKLGQKKITFRLKDWGVSRQRYWGCPIPIVYNAKGKAIPVNKKDLPILLPEDVDLNVGGNPLEKHPKWKFVQLASGKKGIRETDTLDTFVDSSWYFLRFCSPKYKKYGYQIDEIKYWMPVDQYIGGVEHAILHLLYSRFFMKALAFDNNKFNYTE

SEQ ID NO: 190109 - protein, 311 aa, Unknown
  Bacterial polypetide isolated from the Sargasso Sea
SQINKNKKKFYCLEMFPYPSGKIHMGHVRNYTIGDVLSRFKSLKGFNVLHPMGWDSFGMPAENAAKQNNQDPKIWTENNIKTMKIQLKQLGLSIDWDREISTCSEEYYKHQQKFFIDMFNKGLVYKKENYVNWDPIDQTVLANEQVIDGKGWRSGAIVERKKLSQWFFNISKFADDLQNELESLDEWPNKVKTMQRNWIGKSFGCEIDFKIFGEPKIDKIKCFTTRPDTLFGFSFLAVSVDHPISELYKNDPEFKIFKEKCSKTGTTEESIANAEKIGFKTNLVAINPLDNNQKVPVYFANFVLMDYGFGA

SEQ ID NO: 190110 - protein, 296 aa, Unknown
  Bacterial polypetide isolated from the Sargasso Sea
KKVIDELLKKNIANKKTNYKLRDWGISRQRYWGCPIPILYREDGKIIPVPKEELPLTMPKLDQLSSKGNVVLNLEEWKNTTCPKTGLKAVRDTDTFDTFFESSWYFLRYCNPRSESAFIKQDVDYWLPVDQYIGGIEHAILHLLYSRFFVKVLRDLKLIDLKEPFKGLFTQGMVTHQTYKTKSGEWINPDDVIKKNDELFFKQGEKVFVGKVEKMSKSKKNVIDPSEIIQKYGADTARWFMLSDSPPDRDLEWSDNGVTGAFKFINKLWDTSVKIKNYSEKNTEEDERLELKLNET

SEQ ID NO: 190111 - protein, 312 aa, Unknown
  Bacterial polypetide isolated from the Sargasso Sea
KTVLANEQVIDGRGWRSGALVEKKKLSQWFLKISKYSEELLNDLDNLTNWPNKVKVMQSNWIGKSIGVEINFKLSNQENFIKVFTTRPDTIFGATFLALSTEHELSIDISKDNKVIQKFIKECKSLNPDKIKKGFDTGLFVNHPFIKGKKLPVYIANFVLKEYGLGAIFGCPAHDQRDLDFANEYGLDVIPVVKPNNIKEDEFKIKDKAFTEDGIIINSDFLNGLVVEKAKDIIIEQIEKIKIGKRKINYKLRDWGISRQRFWGCPIPIIYREDGEIIAVEDSELPVKLPDIKKFNETSSALNNIPDGKKLF

SEQ ID NO: 190112 - protein, 302 aa, Unknown
  Bacterial polypetide isolated from the Sargasso Sea
MGHVRNYTIGHVLSRYKIIKGFNVLHPMGWDSFGLPAENAAKENNLDPKEWTEKNISVMKSQLKKLGLSIDWDREISTCSEEYYKHQQLFFLELFEKGLVYRKENFVNWDPIDETVLANEQVIDGKGWRSGAIVERKKLNQWFFNISKFAEELLAGLDELKNWPNKVKIMQKNWIGKSFGCEIDFKIEGNPSIDKIKCFTTRPDTLFGFSFMALSPDHPVAKNFENDNEFKKFKEECSKTGTTEESLAMAEKIGFKTNLFAINPLNQKEKVPVYFANFVLMDYGFGAVFGCPAHDQRDFDFA

SEQ ID NO: 190113 - protein, 273 aa, Unknown
  Bacterial polypetide isolated from the Sargasso Sea
NGLKIEEGKIAVIRRLEKMEKGRGQTIFRLRDWGISRQRYWGCPIPILYREDGKILTVPDSELPIKLPEDIDLNKPGNPLENHPTWKFTKCPETGMKAIRETDTLDTFVDSSWYFLRFCSHDNKNAGYNLDDVKYWMPVDQYIGGVEHAILHLLYSRFFSRAISLGSDYEIKEPFQGLFTQGMVCHKTYKNKKGDWIFPENIVLENGKVLDKNSGEEVFEGPSESMSKSKKNVIDPETVIKLYGADSVRWFMLSDSPPERDIQWSDEGISGSY

SEQ ID NO: 190114 - protein, 216 aa, Unknown
  Bacterial polypetide isolated from the Sargasso Sea
MSEKYNPKVVEKKWQSFWSEQKLFESHIIKDKKKYYILEMFPYPSGRIHMGHVRNYTLGDVIARFKRAQGYNVMHPMGWDAFGLPAENAAIENKTSPKTWTYENISTMKAQLKQMGLSLDWSRELATCDEIYYQQQQKLFLKFYNENLIYKKESLVNWDPIENTVLANEQVIDGKGWRSGAEVEQKKLSQWFFKITDYAESLLKSLEKMENWPEKV

SEQ ID NO: 190115 - protein, 335 aa, Unknown
  Bacterial polypetide isolated from the Sargasso Sea
RYWGCPIPVIYYDDGTYRVLDKSELPVLLPYDVNLNGKGNALINHESWRKVKCPITNKYALRETDTLDTFVDSSWYYIRFLNNKLDKPFDKETVNEYLPVDKYIGGIEHAILHLLYSRFFMKALRDIYNLKVDEPFKQLFTQGMITHKTYKTHEGWVMPKDVLEIDGKLLKRDTKEAIEEGPTEKMSKSKKNVIEPDEILENYGIDATRIFMISDSPPDRELEWTDEGIQSSKNLVRRIEKYFMTERTEVLDDTKKIVERFIYNIEKNISTFSLNKCIADIYTLFNYLEKNKVYLHDSELSKKILICLKPIIPRMSSSIIKKLFKEDNVKKLAFS

SEQ ID NO: 190116 - protein, 306 aa, Unknown
  Bacterial polypetide isolated from the Sargasso Sea
HEISKYYSENDEFQKFKRECSKTGTTEEAIAIGEKIGFKTDLEAINPLDNSQKVPVFFANFVLMDYGFGAVFGCPGHDQRDFDFAKKYKLNIKTVVRPVDESDDYQVKKEAYTGSGVMINSEYLNNLKVPEESILKTIDILEEKRIGKKQINFRLKDWGVSRQRYWGCPIPMAYDENENVIPIPKKDLPVKLPENINLNTKGNPLDATDEWKNIEINGKKYRRETDTLDTFVCSSWYYLRFCSPHETSYGFKKDEIDYWMPVDQYIGGVEHAILHLLYSRFFIKALGYKNDEFRFSEPFQGLFTQG

SEQ ID NO: 190117 - protein, 300 aa, Unknown
  Bacterial polypetide isolated from the Sargasso Sea
DGMHINSDFLNGLYIEDAIEASINKISKYNIGEKTTTYRIRDWGVSRQRYWGCPIPIIFCDKCGEVPVPDDQLPITLPEDITFTKRGNPLENHPNWKFTECPICKSNAIRETDTFDTFFESSWYFARFTDLNNTKPFTEEAIKYWMPVDQYIGGVEHAVMHLLYSRFFMRALKSIDSINIDEPFTSLQTQGMVCHQTFTTTKKQWVFPKDVIKKNGNLFHVVTHEPVLAGRTEKMSKSKKNVVDPQLIIDNFGADTARFFMLSDSPPNRDMEWSESGIEGSWRFLNKLWRFVYSLNVKTI

SEQ ID NO: 190118 - protein, 278 aa, Unknown
  Bacterial polypetide isolated from the Sargasso Sea
KIGIKTNLTAINPVNSEPIPIWVASYVLDEYGTGAVMGVPAHDLRDFEFAKKNNIDIKQVIIKDKCEQSKELEEAYVEKGYLINSNQYNGIENTIAKIKISEEGVNNGWAENKIQYRLRDWLISRQRYWGCPIPIVNCKQCGSVPLNQSELPVSLPKDIEISANKINALGENNNWINTTCPKCGIEARKETDTMDTFMCSSWYFLRYPSSKCSNKPFEKIEINKWLPVDQYVGGVEHAILHLLYARFFTKALRDNELFEIDEPFNKLLTQGMVQAAAY

SEQ ID NO: 190119 - protein, 325 aa, Unknown
  Bacterial polypetide isolated from the Sargasso Sea
YSNEFNAQESEAAIKKITTKLEDAGKGMKVVEWRLNDWGISRQRYWGCPIPIIYKDGKPQTANIKDLPVLLPMNEDTSTPLAQNNDFIDELDGFKRETDTFDTFMESSWYYARYPSSDNNKQAFDARSNYWLPVDIYIGGIEHAILHLLYARFFHKVLRDLGYIKSDEPFKKLLTQGMVLKDGAKMSKSKGNTVDPEPYIEKFGADSIRTFMIFASPPEQSLEWSDSGLEGCHKFLKRLWNLSNKVNNFDESKFDKNSDSLKLENIKIFSKINDDYKKRLNLNTIVSSCMEILNNISSRISNETISCEKKDFDECFQFLLISLFP

SEQ ID NO: 190120 - protein, 281 aa, Unknown
  Bacterial polypetide isolated from the Sargasso Sea
QWPNKVKVMQKNWIGKSFGCEISFKTEGDLPVKEIKCFTTRPDTLFGFSFLALSVDHEISKYFKDDKKFQDFKKQCSKTGTTEEAIAMGEKIGFKTSLMATNPLNHNQKVPVYFANFVLMDYGFGAVFGCPAHDQRDFDFAKKYDLEIKTVVRPEEENDDYKVKNEAYSGTGVIINSDFLNNLKVPEESIIKTINILEEKKLGTKKINFRLKDWGVSRQRYWGCPIPIAYDENKNPIAIPKENLPVKLPENVNLKSKGNPLNSMDHWKNIEIGGKKCGKRN

SEQ ID NO: 190121 - protein, 316 aa, Unknown
  Bacterial polypetide isolated from the Sargasso Sea
KCKSKWSESNSFVAKKDLSKEKFYILEMFPYPSGKIHMGHVRNYTLGDVIARYKRGRGFNVLHPMGWDAFGMPAENAAMQNNIHPAEWTYSNIETMKSQLKLMGLSIDWSREFATCDRDYYHHQQKLFKKLYKNNLVYKKKSYVNWDPVDNTVLANEQVIDGKGWRSGAEVEQKELSQWFFKIKDYADQLLNDLDHLNHWPDKVKLMQKNWIGRSEGCYLRFDILDETHKKIDQQLEIFTTRPDTIFGASFCAISPMHPLAKKISKTDKAIQNFINEQSSSAVNEESVARTEKEGIKTGLSVQHPFIKDQVFTLYT

SEQ ID NO: 190122 - protein, 118 aa, Unknown
  Bacterial polypetide isolated from the Sargasso Sea
MDREYKPKNIETFIQDIWNKSNAFKTDLNNLKNKYYCLSMFPYPSGKLHIGHVRNYTIGDVISRGQKMLGKNVFQPMGWDSFGLPAENAAIENKIHPAEWTRKNINHMREQLSRLGYS

SEQ ID NO: 190123 - protein, 132 aa, Unknown
  Bacterial polypetide isolated from the Sargasso Sea
MKNQIPYNPSIIEPKWQKKWKDSKIYNVDLDSKDKKNYFSLTMFPYPSGDLHIGHWYAFTPADSYSRFKKMKGFNVLHTQGFDAFGLPAENAAISRNINPMKWTFDNIDNMRGQFNLMGNSYDWSRELITCT

SEQ ID NO: 190124 - protein, 319 aa, Unknown
  Bacterial polypetide isolated from the Sargasso Sea
NNIKVFTTRPDTIFGASFIALSVDHSISKKFENNNSFISFKSECSKMGTTEEALANAEKIGFNTGLFALHPFDKKIKLPIFIANFVLMDYGTGAIFGCPAHDQRDLDFANKYDLKVLPVVKPKNMEAGKFIIKNEAFTEDGVLFNSNFLDGLAVNEAIEKIIKVITKKKLGNKKITFRLKDWGVSRQRYWGCPIPIVYNKKGDAIPVKKENLPVLLPDNVDLNVKGNPLEKHPAWKFTQLSSGEKVVRETDTLDTFVDSSWYFIRFCSSKHKGYGYKLSDIKYWMPVDQYIGGVEHAILHLLYSRFFMRALAYKNKNFN

SEQ ID NO: 190125 - protein, 172 aa, Unknown
  Bacterial polypetide isolated from the Sargasso Sea
MDAKWQQRWETDGLHKVSDETDKPKWYEMTMYPYPSGDLHIGHWYAMAPADCHARFKRMQGYNVLHPIGFDAFGLPAENAAISRGIHPHEWTMSNIDNMRRQLRSLGAIYDWDREVICCLPEYYKWNQWLFLKLFNQGLAYRSQAPVVWCPSCQTVLANEQVLNGACERAIR

SEQ ID NO: 190126 - protein, 209 aa, Unknown
  Bacterial polypetide isolated from the Sargasso Sea
KTIDESKKDVIKKLSELGVGNAKTNYRLRDWGLSRQRYWGCPIPMMYREDGEIIPVPKKDLPVKLPHVNELSGSGNILEKIEGWKNVLCPDTGMKAIRETDTFDTFFESSWYYLRYCNPRFEEAFIKDDIKYWLPVDQYIGGIEHAILHLLYSRFFIKALRDVGYIDLDEPFSGLFTQGMVTHQTYKNSKNEWVNPEDVIYKEKSAVDK

SEQ ID NO: 190127 - protein, 209 aa, Unknown
  Bacterial polypetide isolated from the Sargasso Sea
MDTEYNHSKIEQEIQSVWDESSAFKAEIDKKKPKYYCLSMLPYPSGNLHMGHVRNYAIGDAVSRYKRLKGFNVLQPMGWDAFGLPAENAAKGKDIHPKDWTEKNIANMREQLKSLGFSYDWSKELNTSDVSYYKFEQELFLRFYEHGLAYRKKSLVNWDPVDETVLANEQVIDGKGWRTGAEVELKEIDTWFLKITDYADELEESLETI

SEQ ID NO: 190128 - protein, 252 aa, Unknown
  Bacterial polypetide isolated from the Sargasso Sea
KINALGDNNNWINTTCPKCGIAAIKETDTMDTFMCSSWYFLRYPSSKCSTKPFEKNEINKWLPVDQYVGGVEHAILHLLYARFFTKALRDNQLFEIDEPFKKLLTQGMVQAAAYKNNNTGKYVSPSDITDLSNPTDPIDNSKLEVLFEKMSKSKYNGIDPESVINKYGADTARMFILFKAPPEKDLEWGDTDVEGQFRFLSRIWKLYINCAKDINSKSKSYPDKEKTLIKSMNIAIKEISNDILNNQFNTAI

SEQ ID NO: 190129 - protein, 333 aa, Unknown
  Bacterial polypetide isolated from the Sargasso Sea
MKGFNVLHPMGWDAFGLPAEQYAIKTGTHPKETTQQNVSNFKKQINSLGFSYDWSREINTTDPNYYKWTQWIFMQLYNKGLAYEQEVAVNWCPELKAVLANEEVVNGKSDIGGHPVVRLPMRQWILKITDYAESLLDGLDDLDWPENIKELQKNWIGKSEGVELGFEIDGHNDTINVYTTRPDTLFGASYMVLAPEHTLIHSIVSDEQRSKVEAYIDETKKKSDFDRTEVNKDKTGVFTGSYAINPFSKEKIEIWIADYVLISYGTGAIMAVPGHDKRDWEFASKYNLPIVEVVEGGDVSKAAFTAKGDAKIINSSNDKTLSMGCLTVDRAIK

SEQ ID NO: 190130 - protein, 251 aa, Unknown
  Bacterial polypetide isolated from the Sargasso Sea
QNNKILDSNINELGFGKMEKMSKSKKNVVDPNDIINLYGADTARWFMLSDSPPERDLQWSETGILSSHKFINKLWDLSQRYQLYKTNSETGDANCKNSLSLLTKDVGKNIQSFHFNKSVAKIYEYVNLLNNYIVEKNISKNCFSWSLNNLCLIIQPFIPHVSEEIWSAIGNKELCINQEWPKIKTVDDVSNFKIVVQVNGKNRGLFEFEEGTTKEKIIEKIKSDDKIMKYVEGKKILREIYVPKKIFNLVI

SEQ ID NO: 190131 - protein, 287 aa, Unknown
  Bacterial polypetide isolated from the Sargasso Sea
IPIIKCNSCGDSPVPVKELPVELPYDIDLDTPGNPLDAHPKWKFVKCPKCNKSAERETDTFDTFFESSWYFIRFTDPDIKTPFNKSIADYWMPVDQYIGGVEHAVLHLLYSRFFTRALKDCGYLSISEPFKGLMTQGMVCHQTFKSGDGKWVFPHEVEKKNNKFYHIVSGNEIFPGRIEKMSKSKKNVVDPLSIVNKYGSDTARIFMVSDSPPERDMEWSTAGVEGSFKFLNRVLRIVNESQKPKKLINLDHVDKNNIIIKKVHQTIKDVTEGIESFKFNICIAKII

SEQ ID NO: 190132 - protein, 322 aa, Unknown
  Bacterial polypetide isolated from the Sargasso Sea
LVAQRTIKEIFDFAKKYDLEIKTVVRPMDKDENFKVLNEAYPGPGVLINSEFLNGLKAPEDSILETIKILEKKKLGKKQINFRLKDWGVSRQRYWGCPIPIAYDENGIAYPIPKSMLPVELPENIDLNVKGNPLDNQNDWRKVIIDGKQLIRETDTLDTFVCSSWYYLRFCSPKEAEYGFKKEDIDYWMPVDQYIGGVEHAILHLLYSRFFMRALSEKNINFNILEPFNGLFTQGMVCHETYKDPDNNWVSPEEIENIDGKKYLKQDKSKLISIGPSESMSKSKKNTIDPENIIANYGADSARLFILSDSPPEKDVQWSEEG

SEQ ID NO: 190133 - protein, 106 aa, Unknown
  Bacterial polypetide isolated from the Sargasso Sea
MERVKFSLLEKKWTPVLEKRKLYSNKYKKNFYCLEMFPYPSGKIHMGHVRNYTIGDVLARYKFMNGYNVLHPMGWDSFGLPAENAARQNKLSPKVWTNKNIGEMKR

SEQ ID NO: 190134 - protein, 284 aa, Unknown
  Bacterial polypetide isolated from the Sargasso Sea
ETVLANEQVINGRGWRSGAVVERKKLNQWFFNISKFSEDLLEGLKKLDNWPQKVKTMQKNWIGKSFGCEVDFKIEGNETIKKIKCFTTRPDTLFGFSFLALSVDHPLAKLYEKDKNFKKFKDECGKTGTTEESIANADKLGFKTDLTAINPLDSSIKAPVYFANFVLMDYGFGAVFGCPAHDQRDFDFAKKYKLNINWVVRPEDSNDNFRSEEAYTGTGIIFNSKFLNGLKVPDESIVKTIDYLEKNNLGKKKINFRLKDWGVSRQRYWGCPIPIAYNEKNEVV

SEQ ID NO: 190135 - protein, 303 aa, Unknown
  Bacterial polypetide isolated from the Sargasso Sea
VEGDLPVDKVKCFTTRPDTLFGFSFLALSIDHEISNFYKNDPEFLKFKEDCSKTGTTEEAIAVGEKIGFKTNLKATNPLNPNHKVPVYFANFVLMDYGFGAVFGCPAHDQRDFDFAKKYNLKITTVVRPLDKDDNFQVTEKAYPDPGILINSDFLNGLEAPEKSVLETIKILEERELGKKKINFRLKDWGVSRQRYWGCPIPIIYDENGKEHAIPNEMLPVKLPQNINLNVKGNPLDKEKNWNEIIIDGKKFKRETDTLDTFVCSSWYFLRFCSPKNKDYGFNKEDIDYWMPVDQYIGGVEHA

SEQ ID NO: 190136 - protein, 324 aa, Unknown
  Bacterial polypetide isolated from the Sargasso Sea
ELLEGLNEIGDWPENVKAMQQNWIGKSEGAEFSLNIDDTDLSFDVFTTRPDTLFGMTFAVLSPEHQLMDEVISISSNRDEIENYIDNAKKKSEFERMSLTKEKTGVDTGLFVINPVNGKKVSLWIADYVLINYGTGAIMAVPGHDQRDYDFAKKYGIEIIQVISDKNRESSIEKEAFIGEGILINSGDFDSLKSHTEGSEKIIQYLEDNKIGTSKTTFRLRDWLISRQRYWGCPIPLINCDKCGMVPESEENLPVLLPEIDDYKNTNESPLAKSEDFINTNCPECGIKATRETDTMDTFVDSSWYFFRFVDPKNDDIPFDANKV

SEQ ID NO: 190137 - protein, 255 aa, Unknown
  Bacterial polypetide isolated from the Sargasso Sea
MHDLFESVYDPGQIEEAIQKHWVKSKIFEVDEDDSREKFYCLCMFPYPSGRLHMGHVRNYTIGDVIARYKKMKGFNVLQPMGWDAFGLPAENAAIENQTHPAKWTISNIEYMRNQLERLGFAYDWRRELSTCDPSYYRWEQWFFTRLYEKGLVYRKEAEVNWDPVDQTVLANEQVIDGCGWRSGVPVERKRIPQWFLKITDYAEELLDGLESLEGWPESVKTMQRNWIGRSVGVNITFTLDGARDNLEVFTTRPD

SEQ ID NO: 190138 - protein, 298 aa, Unknown
  Bacterial polypetide isolated from the Sargasso Sea
SKVKTMQRNWIGKSFGCELDFKITGSKDVDTIKCFTTRPDTLFGMSFLAISVDHPIAELYRNNQEFEKFKKDCSKTGTTEESIAQAEKLGFKTNLIAINPLDEAIKVPVYFANFVLMDYGFGAVFGCPAHDQRDLDFALKYNLKVSPVVKPTEKDDNFEIDKIAYTGSGVIYNSKFLDNLKVPDESITQTIDILEKQKIGKKKINFRLKDWGVSRQRYWGCPIPIAYNDKNEIVKVPDEKLPIKLPEKINLNVNGNPLDYQSEWKKIEINGELCTLETDTLDTFVDSSWYFLRFCSPK

SEQ ID NO: 190139 - protein, 286 aa, Unknown
  Bacterial polypetide isolated from the Sargasso Sea
LLSRHGTGGCPIPIVYCENCGEQPVPVDELPVNLPDDVEFMPTGRSPLTTHEEFLNVTCPNCGGGARRETDTMDTFVDSSWYFLRFADSNNKQNPFDIEAIERWLPVDQYIGGVEHAILHLMYARFFTKALADLGVAPKNLREPFSRLFTQGMIRLGGTKMSKSKGNLVAPEEILDRQGADALRLAHLQVKPPQEDVDWEDLGIDGCSKFIGRIWRLALSTKDLPGERREGNPSTADLEIEKATHRLMDRITNEYDRWSYNTAIAGFMEFTNTLYRWIQSEEGAHG

SEQ ID NO: 190140 - protein, 190 aa, Unknown
  Bacterial polypetide isolated from the Sargasso Sea
MQEYVPKEIEEKWQKYWEEKNLLDYDFESENPKFYMLTMLPYPSGDLHIGHWYAMAPSDCYARFKKMKGFEVFFPIGFDAFGLPAENAAIKNNIHPKSWTYENIKRMQKQLRSMGNMFAWKNEVVSCDPEYYKWSQWFFLRMLEEDMAYREYAPVDYCNQCQTTLAREQVWGEDRVCERCGNPVVKKDLN

SEQ ID NO: 190141 - protein, 294 aa, Unknown
  Bacterial polypetide isolated from the Sargasso Sea
LLVTVDQYIGGIEHAILHLLYSRFFTKALRDLGYFNLNEPFIGLFTQGMVTHQTYKDIKDNWLEPNEVKKRGDEFFDNDNNKVIVGKTEKMSKSKKNVVDPNDIIELYGADTARWFMLSDSPPERDLQWSETGIIASHKFINKIWEFVNKFENYNHSEDLKDNSAKNRLKKLITEVTANIENFQFNKSVAKIYEYVNLLSDSIMKKNISKEAFKWALQKLSLILQPFVPHVSEEIWSQISVNGFCINENWPDVNFIEESLNINLPIQINGKTRGLLEVDKNIEKDKIIEIIKND

SEQ ID NO: 190142 - protein, 266 aa, Unknown
  Bacterial polypetide isolated from the Sargasso Sea
LYENNQDFIKFKKECSKSGTTEESLAAAEKIGFKTNLIAVNPFDDKIKVPVYFANFVLMDYGLGAVFGCPAHDQRDLDFAKKYNLDIRTVVTPSLDNQNFIVKNEAYTGPGYIFNSSFLNNLKCPDESIIKTIEHLEKNNLGKKKINYRLKDWGISRQRYWGCPIPIVYDENNKPQKIPENMLPVELPKIEKFKNSGNPLDLDDNWKKVKIDDKVYTRETDTLDTFVDSSWYFLRFCSPNKTDYGFNQEEIDYWMPVDQYIGGVEH

SEQ ID NO: 190143 - protein, 273 aa, Unknown
  Bacterial polypetide isolated from the Sargasso Sea
IGLAIDWNREISTCSDDYYKHQQKLFIDLYNKGLIYKKDSYVNWDPVDNTVLANEQVIDGRGWRSGAIVEKKKLSQWFLKITAFSKELLDDLKGLDEWPEKVKTMQKNWIGYSDGAEIIFKVVNKNLEIKVFTTRPETIFGASFIAVSVEHELNLLFNHDKGFQIFREKCLKNQSRIDNEDEKLSFPTKLFVEHPFIKGKTLPVFFANYVLMDYGNGAIFGCPAHDNRDYDFAKKFKISITNVIKTVKKNEGGELPYSGISENDIMINSEFLN

SEQ ID NO: 190144 - protein, 282 aa, Unknown
  Bacterial polypetide isolated from the Sargasso Sea
MEAKDMGKGAVNYKLRDWIFSRQRYWGEPIPLVWVSLEDFEKAANTEGIIKDLLPERAVTTQRDGETLYALPLPASELPLKLPEVENYQPSGTGESPLATIPEWLEVWFDLSTGKTVSRSEDKPRGENWVSATRETNTMPQWAGSCWYHLRYLDPSNTEQLVSPEKEAYWGGPDFYIGGAEHAVLHLLYARFWHRFLHDEGVLAHPEPYGKLFHQGLILGEDGNKMSKSVGNVVSPDIVIEAYGADSLRLFEMFLGPLEAVKPWSEKGIEGVHRFLRKVNRE

SEQ ID NO: 190145 - protein, 147 aa, Unknown
  Bacterial polypetide isolated from the Sargasso Sea
MKSKKYVLEMFPYPSGNIHMGHVRNYVIGDICARYHKLKGDEVIHPMGWDAFGLPAENAAIKFGTHPQDWTLSNIENMKTQLQKLDLDLNWDRELATCNEDYYRHQQELFIDLYNAGLAYKKDALVNWDPVDQTVLANEQVIDGKGW

SEQ ID NO: 190146 - protein, 355 aa, Unknown
  Bacterial polypetide isolated from the Sargasso Sea
LDTFVCSSWYYLRFCSPNEKNYGFKKDEINYWMPVDQYIGGVEHAILHLLYSRFFMRAIEYKNKNFDIKEPFKSLFTQGMVCHETYKDKNNNWLRPDEVEKVGKDIVLKSNPNEKVIIGASESMSKSKKNVIDPEFIIENYGADSVRLFILSDSPPEKDVQWSDQGMVSSYKFIQKLWLLHNEIKNKINIENKEKTNNELDLFTNQIIAKITDNLEKFNYNVIVANMYKTYNFLIKFLNNNKNLSNLEENYKKILICFSPVIPHFVSECLNDLKVDQDIFWPKFDKSQLENEKINFVVQINGKKRAILSVNNGVNEKDILSMLKNNRNTEKYLTQVKINKIIFVQNRLINILIDE

SEQ ID NO: 190147 - protein, 397 aa, Unknown
  Bacterial polypetide isolated from the Sargasso Sea
MGNKKYILEMFPYPSGNIHMGHVRNYVIGDICARYHKLKGDEVIHPMGWDAFGLPAENAAIQFNTHPQNWTLSNIENMKSQLQKLDLDLDWDRELATCNENYYRYQQELFIDLYNAGLAYKKDALVNWDPIDQTVLANEQVIDGKGWRTGAEVEQKTLSQWFFKITNYAEELLSELDNLTLWPEKVKVMQRNWIGKSIGAEIDFQLSSLDKKIKVFTTRPDTIYGASFIAISVNHQIVSNLLDKSEILKIKEQFNGIEYDKEKIGIPLGINCINPITNDLIPLYIANFVLDNYGEGAIFGCPAHDERDFEFAQKYQLPIKKVVECKDNQLPYTGDGKIINSPLLNGLNKDQAIIKIIEQLEIKKIGNKSINYKLRDWGVSRQRNWGCPIPVIYYEDG

SEQ ID NO: 190148 - protein, 623 aa, Unknown
  Bacterial polypetide isolated from the Sargasso Sea
MVSKITDFAEDLLNGLNELENWPKKVLSMQENWIGKSIGATIKFQINNSENFIEVFTTRPDTIFGASFIGLSADHNISIDLSKDNKEISEFIKLCKQTGTTNIELEKAEKIGIDTGLTVKHPFTEKEIPVYIANFILLNYGTGAIFGCPAHDQRDFEFAKKYNLEIKQVVSKDKNEDLFEAYTGMGKMINSEFLDGLEIEAAKKTVIDNLKNKNQADYSIKYKLRDWGISRQRYWGAPIPILYSSNETVIPVDYKDLPIELPNEVDFNQVGNPLEKHPTWKHAENKKNNESLIRETDTFDTFFESSWYFARFCSPKSDNMIDQQFSKWMPVDLYIGGVEHAILHLLYSRFFMHALKRLGKTEISEPFKKLVTQGMVLKDGAKMSKSLGNTVDPEDIIKKYGADSVRVFILFSAPVEKDLEWNESGIEGASRFLKRIWKITYENISKIQDSFNQDFDSLAIDERNFLIKIHKTTEKITKDIENLQFNTCIAALMELLNSAYKFIEKNNNEKLFGFFIYQFLQLANPFIPHIANELWQLSELKEKDINLEWPEFSSEIIQKDQIIIGVQVNGKTRGSIPLLYEEENEDELTSRIIELNEFSKFFINKEIIKKIYISKRLINLIVK

SEQ ID NO: 190149 - protein, 863 aa, Unknown
  Bacterial polypetide isolated from the Sargasso Sea
MHEKYVPSDVESAAQGQWRAIDAYKTSETTDKPKFYCVSMLPYPSGKLHMGHVRNYTINDVMYRYLRMNGYNVLMPMGWDAFGMPAENAAMANNVPPAKWTYDNIAYMKKQMQSMGLAIDWSREVATCSPDYYKWNQWLFLKMLEKGIAYKKTGTVNWDPVDQTVLANEQVIDGRGWRSGALIEKREIPMYYMRITQYADELLNDLEGLGWPERVKIMQQNWIGKSFGVNFGFPYEIDGEQKLLRVFTTRADTIMGVTFCAVAAEHPLATRLAQDKPELQAFIEECKRGGVAEADMATMEKKGMATGFTVTHPLTQEQVEVWIGNYVLMSYGEGAVMGVPAHDERDFAFAKKYSLPIRQVVAVEGKDYSTDAWQEWYGDKDGTLVNSGKYDGLNYTQAVDAIAADLKELGLGDKQITWRLRDWGVSRQRYWGTPIPIIHCPTCGDVPVPEKDLPVVLPEDLVPDGTGNPLAKSEAFVNCTCPTCGGAAKRETDTMDTFVDSSWYFYRYAAPDAKTMVDERTDYWAPMDQYIGGIEHAILHLLYSRFWAKVMRDLGLIKFGEPARNLLTQGMVLNETYYRENEAGKKTWYNPADVTVSFDDKGRPVGAVLNEDGQPVVLGGVEKMSKSKNNGVDPQLLIDQHGADTARLFVMFAAPPEQQLEWSGSGVEGASRFLRRVWGFGHTNEAALRAGGKIDPAQLGEVDKVLRREIYSVLKQADFDYQRLQYNTVVSAAMKMLNALDSAKNAQPAVLRETYSVLLRVLYPVVPHQTFQLWQELGYADEFGSLLDAAWPKVDEQALEQAEIELVLQVNGKVRGALTVAKDATREAIEQLAAAHEAVEKFSEGKAPKKIVVVPGRLVNVVV

SEQ ID NO: 190150 - protein, 722 aa, Unknown
  Bacterial polypetide isolated from the Sargasso Sea
NNKVQPSEWTLENIESMKTQLSRLGFAYDWKREFATSQSDYYKWEQWFFLQMLDKGLAYQEEAEVNWDPIDQTVLANEQVIDGRGWRSGAEVEKKKLKQWFLKITDYSEELLEGIETLKGWPEQVRIQQKNWIGKSEGMNFSFKVKDSDEIINVFTTRPDTIMGVSFIAISASHKLSIDVSEKDDKFKSFIEKQKKVKQSEAEFAKQEKEGLFTELYAIHPFTGDQIPIWIANFVLSDYGSGALMAVPAHDQRDFEFANKYDLPILPVIKNRSDASDTLEEAYLEKNTLINSKEFNGLNFGEAFEAIEKKAEELGCGYRETNFRLRDWGVSRQRYWGAPIPVLHDSENTYPSKTLPVELPSKVEFKGVSSPLHNMPEFLNVEVDGKKLIRETDTFDTFFESSWYYARFASFDSNESMLDERVKYWLPVDQYVGGIEHAVLHLLYSRFFFRCMRDMGLVEGDEPFTNLLCQGMVLKDGAKMSKSKGNTVDPQGLIEKYGADTVRLFVLFAAPPEQSLEWSDQGVQGAHRFINRIWKIVNRYLEADHITDFNFEDLNQDQKQLRNKTHKTLVKVKDDYLRRHSFNTAIAAIMELSNAIPTKYLEESASNKERAIAAEAIEAILLMLSPITPHLCQHLWWELYPGDSIVDKEWPEADGSLLEEDSIRIAIQINGKLRSEIEIEKNMVSEEIEEIALNDLKILKHLENAEVKKVIYVPGKIVNIVI

SEQ ID NO: 190151 - protein, 215 aa, Unknown
  Bacterial polypetide isolated from the Sargasso Sea
MSTVNSRYSPADLEQRWQTTWRSEGLDVTPEPEDGKGFYALSMFPYPSGTLHMGHVRNYVITDVIARVQRMRGHSVLHPMGWDAFGLPAENAAIERNVDPGDWTDRNIDQMRSQLDRLGLSIDWDREQATCHSDYYRWTQWLFLELFDGGLAYRKNATVNWDPVDQTVLANEQVDADGRSWRSGALVEQRQLNQWFLRITQYAEALLKDLDQLSG

SEQ ID NO: 190152 - protein, 348 aa, Unknown
  Bacterial polypetide isolated from the Sargasso Sea
RPDTLFGFSFIALSVDHEISKFYEKDPKFLKFKDDCSKTGTTEEAIAVGEKIGYRTNLFAINPLDQTQKVPVYFANFVLMDYGFGAVFGCPAHDQRDYDFAKKYDLKIKTVVKPENEKDTYTVDNEAYTEKGIIINSEFLNGLKAPVDSVIETINILEQKNLGKKKINFRLKDWGVSRQRYWGCPIPVAYDENDKIHMIPDKMLPVKLPQNINLNVKGNPLDSEKEWKEIIIDGRKLFRETDTLDTFVCSSWYFLRFCSPNNSDYGFDKEDIKYWMPVDQYIGGVEHAILHLLYSRFFVRAISKDNKKIDLDEPFSGLFTQGMVCHETYKDKNNKWDSPDEIETINGI

SEQ ID NO: 190153 - protein, 525 aa, Unknown
  Bacterial polypetide isolated from the Sargasso Sea
MQEQYNPSEIEALVQKHWHDNKTFEVTEDANKEKFYCLSMFPYPSGRLHMGHVRNYTIGDVVARFQRLQGKNVLQPIGWDSFGLPAENAAINNKTAPAPWTYQNIEYMKNQLKLLGFGYDWSREIATCTPEYYRWEQWFFTKLYEKGLVYKKTASVNWCPNDETVLANEQVQDGCCWRCDTPVEQKEIPQWFIKITAYAEELLNDIDTLDGWPEQVKTMQRNWIGRSEGVEMTFGVAGSDKSFDIYTTRPDTLMGVTYVAIAAGHPLAELAAQTNPELAQFVEECKNSTTSEADLATMEKRGVATGLYAIHPITGKQVPIWAANFVLMNYGTGAVMSVPGHDQRDYEFAKKYNLAIEAVIKPVDGELDISEAAYTEKGVLFNSGEFDGLDFDGAFNAIADKLVAEGKGKRQVNYRLRDWGVSRQRYWGAPIPMVTLADGTVIPTPEDQLPVILPEDVVMDGIQSPIKADKEWAKTQVNGQDALRETDTFDTFMESSWYYARYCSPQADQMLDPTKANYWLPVDQY

SEQ ID NO: 190154 - protein, 585 aa, Unknown
  Bacterial polypetide isolated from the Sargasso Sea
KSCHNGFFNITKFSDQLLKDLDNLDGWPEKVKLMQKNWIGKSFGCEINFNIKNKDQKIKVFTTRPDTIFGASFIALSSDHPLSKDFKNSKEFKNFREECNKSGTTEEALANADKIGFKTNLEVEHPFIKNKTIPVYFANFVLMDYGTGAVFGCPGHDQRDFDFAKKYKLEIIKVVSDGKESELTEAYTGTGLMINSDFINGLDVEKAKNRIIEEIEKVSLGQRKTLFRLKDWGISRQRYWGCPIPMIYLENGEVVPVDKSELPIELPEDIDLKSQGNPLDVHPKWKYTVEKSSGKKAIRETDTLDTFVDSSWYFLRFCSPNHKLSPFDQKEVKYWMPVDQYIGGIEHAILHLLYSRFFTKGINVCTKDFNISEPFKNLFTQGMVCHESYRDEKGNWLYPNEIEKIDANNIVKRSDRSKVLVGPPESMSKSKKNTIDPETMINQYGADAVRWFILSDSPPEKDVQWSDTGVDSANKFLQKIWNLNYLISKKEEGASDDKINSKVTLEINNFVYKIDESINNFRFNVTIANFYQVYNTLKNYLSLEVSKQTLTDCIIKIMKQMLPFTPHLANECLELFECQTVNSWP

SEQ ID NO: 190155 - protein, 520 aa, Unknown
  Bacterial polypetide isolated from the Sargasso Sea
GSVAEADMATMEKKGVATGQFVIHPLTGDKLPVFVANYVLWGYGEGAVMAVPAHDERDFEFANKYDLPITQVYAGKGKDYDASTWQDWYGDKTGLTTINSGKYDGLDFSAAFDAIVGDLEASAHGARKTQFRLRDWGISRQRYWGCPIPIIHCDSCGDVPVPEDQLPVVLPEDVVPDGAGSPLAKMPEFYECSCPKCGAPAKRETDTMDTFVESSWYFARYASPHYEGGMVDPAAANHWLPVDQYIGGIEHAILHLLYARFFHKLMRDEGLVSSNEPFKNLLTQGMVVAETYYRTLENGGKDWFNPADVELERDAKAKVISAKLKSDGLPVEIGGTEKMSKSKNNGVDPQAMIDAYGADTCRLFMMFASPPDMSCEWSDAGVEGANRFLRRVWRLAQGHVSAGLPGKLDVSVLSDEQKAVRRAIHLAIKQASNDIGQHHKFNTAIAQVMTLMNVLEKAATATEQDRALVHEGLEIVTLLLAPITPHISHELWQRLGHADAVIDAQWPQVDESALVQDSLT

SEQ ID NO: 190156 - protein, 499 aa, Unknown
  Bacterial polypetide isolated from the Sargasso Sea
MIKSYNPKHIEKKAQTYWKQEETFKVSTEVKSLRKDNYYCLSMFPYTSGNIHMGHVRNYTIGDVKSRLKKMQGFNVLQPMGWDSFGLPAENAAIKDKSHPALWTNKNIESMKKEFEEMGFAYDWSRELATCDEDYYKWQQWLFIEMRKKGLVYKKDAIVNWDPIDQTVLANEQVIDGRGWRSNALVEQKNIAQWFCKITAYADQLDKDLESLTKWPDAVKTMQKNWIGKSKGTNVHFKIKDRSETLSVFTTRADTLFGATFMAIAIDHPVAADIARENKDIESFIKECQKQSTAEADIQTAEKKGIMTNLVAINPVNNEEVPIWIANYILMSYGTGAIMAVPAEDKRDREFAEKHDLKIIEVYSDDEKPVLINSGKYNGLEQKKALKAIVQDLVDSKNGESITTYRLRDWGISRQRYWGVPIPVINCKDCGAVSEKEENLPIQLPKDIQYEYGKPLLKECKEFYETNCPKCGKAAHRETDTFDTFFDSSWYYHYYISQG

SEQ ID NO: 190157 - protein, 889 aa, Unknown
  Bacterial polypetide isolated from the Sargasso Sea
MAVVAAAGYGYSIAISQLIYLSISQIRMSPMQEQYVPQSIEPAVQKHWDAKKTFKAVEKVDKEKFYCLSMFPYPSGRLHMGHVRNYTIGDVISRYQRLNGKNVLQPIGWDAFGLPAENAAIKNNTAPAPWTYENIEYMKNQLKMLGLGYDWDRELATCKPDYYRWEQWFFTKLYEKGLVYKKTSSVNWCPNDMTVLANEQVVDNCCWRCDTPVEQKEIPQWFIKITDYAEELLNDIDNLEGWPEMVKTMQRNWIGRSEGVNISFNIEGQAEHLEVYTTRPDTFMGVTYVGIAAGHPLALQAAESNPELAAFIEECKNTKVAEAELATMEKKGMATGLYAIHPLDGRKVPVWVANFVLMNYGTGAVMAVPGHDLRDHEFATKYGLEIKPVIKPVDGELPNVIDAAYTDKGVLFNSGEFDGLEFQPAFDAIASKLESLGCGKRTVNFRLRDWGVSRQRYWGAPIPMLTLADGTVVPTPEDQLPVLLPEDVVMDGIQSPIKADAEWAKTTYNGQEAFRETDTFDTFMESSWYYARYCSPDYDKGMLDPAAANHWLPVDQYIGGIEHACMHLLYARFFHKLLRDAGLVNSDEPFKRLLCQGMVLADAFYYKDEKGGNVWVSPTDVKVERDDKGRITKAVDNEGREVIHSGMTKMSKSKNNGIDPQLMVERYGADTVRLFMMFASPAEMTLEWSDSGVEGAQRFLRRLWRITFEHVSAGAAPALNVAALSADQKAVRRELHKTIAKVSDDVGRRQTFNTAIAAIMELMNNLAKLGSDEQDRALMQEALEAVVVMLYPITPHIGFELWKMLGKGDDVDHAVWPVADEAAMVETEKLVVVQINGKMRGKLTVPAEISQADVEKLAMADASVQKFTDGLTVRKVIYVPGKLLNIVAN

SEQ ID NO: 190158 - protein, 630 aa, Unknown
  Bacterial polypetide isolated from the Sargasso Sea
MQKNWIGKSFGCEINFKIEGDLPVDEIKCFTTRPDTLFGFSFLALSVDHEISKHFVNDNEFIKFKTECSKTGTTEEAIAMGEKIGFKTNLLAINPLNPSQKVPVYFANFVLMDYGFGAVFGCPAHDQRDFDFAKKYNLQIKTVVRPNEENSNFEVKEKAYTGNGVIVNSEFLNDLNVPEESIIKTIDILEKKKFGKKQINFRLKDWGVSRQRYWGCPIPVAYDNDKVVPIPKKDLPVKLPDSVDLNSKGNPLNSKEDWKKVMINGKELIRETDTLDTFVCSSWYYLRFCSPKETNYGYNQEEVDYWMPVDQYIGGIEHAILHLLYSRFFMKALGFKNKNFNIEEPFTGLFTQGMVCHETYKDQSNNWLSPEEIEIKEKKYVKKNDPKNKVIVGPSESMSKSKKNVIDPENIIKSYGADSVRLFILSDSPPEKDVQWSEQGMVSSYKFIQKLWILHTKIKKRLLNQEKNISIDINLNKFTNQLLNKVTSNLDTFSYNVIIAHMYETYNFLIKHIEKNISPKDLYENYIKILTMFSPIIPHFTSECLVDIGFKEKIVWPEIDKNYLTDENLDYVIQINGRKRTIINAKKDLSEEKILNIAKNDKVLHKYLINKPIKKVIFVKNRLLNILVNE

SEQ ID NO: 190159 - protein, 547 aa, Unknown
  Bacterial polypetide isolated from the Sargasso Sea
NDLEKLDKWPNKVKIMQSNWIGRSVGAEIDFQVSNSVDKIKIFTTRPDTIYGATFLALSTDHKISKGLSKKHPTIKKFIEECKVINPDKVKKGYNTGLTVDHPFIKEKKIPVFIANFVLMEYGLGAIFGCPAHDQRDLDFANEYNLEVVSVVKPVSLKEEEFIVEKIAFTENGKVINSDFLNGLTTEKAKNKIIDVLEEKKIGCKKINYKLRDWGISRQRFWGCPIPIIYREDGELKPVDIDSLPVKLPEVDNFNESESTLKNISEWKETKCQETGMKAIRETDTFDTFFESSWYYFRYCNARSEKPFEKEDIDYWLPVDQYIGGIEHAILHLLYSRFFTKALRDLGYFKLNEPFDGLFTQGMVTHQTYRNKNNEWLEPGEVKKVGDSFFDEENIEVKIGKIEKMSKSKKNVIDPSEIINLYGADTARWFMLSDSPPDRDLQWTETGIASSYKFINKIWDLLSKYKTYSVKTKTDENVLDSFRLLTNEVSQNIENFQFNKSIAKIYEYVNLLIDSLIKDILNKDDFNWSLKRLAILLQPFIPHISEE

SEQ ID NO: 190160 - protein, 137 aa, Unknown
  Bacterial polypetide isolated from the Sargasso Sea
MSKINVEEIDKRWQTFWSNKKNSFKNTDKNKKFYCLEMFPYPSGKIHMGHVRNYAIGDVIARYKMMKGFNVLHPMGWDSFGLPAENAARENNLNPSEWTKKNISTMKHQLQLLGLSIDWSLEISTCDESYYKHQQEL

SEQ ID NO: 190161 - protein, 494 aa, Unknown
  Bacterial polypetide isolated from the Sargasso Sea
NLDWPENVKSMQKNWIGKSFGSEIKFALLNSDELTAFTTRIDTIYGVTFIAISPNHPIAQNLAKDNTETNEFIKKCNATKMAEADLAKADKLGLKTNLKVRHPFSDDNLDVWIANYVLMDYGTGVIMGVPAHDERDYEFAKKYNIEIKQVIESDELPSPIKGKLIHSDIFTGQESDEAIKNINDYLEKNAIGKSIENFRLRDWGVSRQRFWGCPIPVVFDNGEPIFLEKKDLPVELPKIKDGESPKPLSQNKDFFDLGSGKTREVDTFDTFVDSSWYYARFTAADNDEKALDDDSKYWLPVDLYIGGIEHAILHLLYSRFFHKAMRDIGLVEGDEPFKKLLTQGMVLKDGFKMSKSKGNTVDPQKFIDKYGADTIRLYMMFTSPPEQSLEWSDTAIEGSYRFLKRIWTLISDRKIFLEEPPKDFSKLELKLRQKSHQTLKKVTNDYGERNSFNTAIASIMELLNAIPDSFKLDDATSAEVFCLDEVIQFTLKML

SEQ ID NO: 190162 - protein, 195 aa, Unknown
  Bacterial polypetide isolated from the Sargasso Sea
MERINFQVIEKKWQEKFKTAKLYNKDKKSKKFYCLEMFPYPSGKIHMGHVRNYTIGDVLARYKYLNGFNVLHPMGWDAFGLPAENASKSNNLHPKEWTNKNIKVMKDQLKLLGLSIDWDLEISTCDKEYYKHQQELFIEFYNQGLVSRKETYVNWDPVEKTVLANEQVINGKGWRSNATVERKKLSQWFFNITKF

SEQ ID NO: 190163 - protein, 487 aa, Unknown
  Bacterial polypetide isolated from the Sargasso Sea
SFDAIFSAQEWNSWSEKQQQKILMNYRLTYLSETWVNWCPKLGTVLANDEIKEGFSERGGHPIEQKKMTQWSMRITAYAERLLKGLNNLDWTDSIKEIQTNWIGKSQGASVFFSLEDSQEKIEVFTTRPDTIFGVSFLVLAPEHPLVPVITTTEQKNKVEKYQEKAAAKSERDRVSEVKTISGEFTGAYAKHPFNGNKVQVWIGDYVLASYGTGAVMAVPCGDQRDWDFAKHFKIDIINIFKNKNISKGAYVEKDATITNSEFLNDLPVKKAIKSAIYELGKQNKGLGKTQYKIRDAVFSRQRYWGEPFPVYYKNETPYLIEENKVVELPEVDKYLPTEGGDPPLARAKKKSWNVSGYGDRMEYNTMPGWAGSSWYFIRYLDPKNNESFVSKDKMEYWQNVDLYIGGAEHATGHLLYARFWSKILFDLGHISFDEPFKKLINQGMIQGNSALVYRDNNSGKFISKGKIKNQKTKSIHVDINFLNGDQ

SEQ ID NO: 190164 - protein, 128 aa, Unknown
  Bacterial polypetide isolated from the Sargasso Sea
MERYNFKIVEEKWQNNWEKNKSFKTHLDLNKKKFYCLEMFPYPSGRIHMGHVRNYTIGDVLARYKSMNGFNVLHPMGWDSFGMPAENAAKENNLHPKSWTENNILMMKKQLKKLGLSLDWDREISTCS

SEQ ID NO: 190165 - protein, 551 aa, Unknown
  Bacterial polypetide isolated from the Sargasso Sea
FSFLALSVDHPISKYFEEDEKFINFRKECSKTGTTEESIAQGEKIGFKTNLIAINPFDEDKKVPVFFANFVLMDYGFGAVFGCPAHDQRDMDFALKYQLEIKTVVKPFDKDETFKVKDKAYVDGGEIINSRFLNGLKVPGESIIKTINILEERKLGEKKINFRLKDWGVSRQRYWGCPIPIMYDSAGNPHPVPNELLPVKLPENINLDTKGNPLDHVKDWKFIEYKGEKFTRETDTLDTFVDSSWYFLRFCSPNEKDYGYNEDEINYWMPVDQYIGGVEHAILHLLYSRFFMRAIGYKKDNFKFNEPFEGLFTQGMVCHETYKDEKGNWLRPDEVETKDGKKYFVKNKLENVVTVGPSESMSKSKKNTIDPEQIIKNYGADAVRLFILSDSPPEKDIQWSEQGMVASYKFIQKLWMLHEKIKDKINLKSHDLDLENDFERFINETISKFDYNLKKFNYNVLIASIYETYNFLNNILENKINGEILLKNYIKILTILSPIIPHFATECFDNLGINKVPNWPEVDKNKTKIDKVNFVVQINGKKKATILQNLT

SEQ ID NO: 190166 - protein, 199 aa, Unknown
  Bacterial polypetide isolated from the Sargasso Sea
MKKEYSPIENEKKWLPLWNSLKASKQTKEKKYILEMFPYPSGHLHMGHVRNYSIGDVQARFYRMQNYEVLYPMGFDSFGLPAENAAIKNNVNPLEWTEKNIQHMKEQLTKLGCSYNWNNEISTSRVDYYKWNQWLFKKLYENKLIYRKKSYVNWDPIDQTVLANEQVIDGKGWRSGATIEKKEIEQWYIRITKYAEELL

SEQ ID NO: 190167 - protein, 401 aa, Unknown
  Bacterial polypetide isolated from the Sargasso Sea
NINKLVERYNFKIVEQKWQDFWKKNNSFKAKIEKNKKKFYCLEMFPYPSGKIHMGHVRNYTIGDVLARYKKMQDYNVLHPMGWDSFGMPAENAARENQLDPKEWTEKNIENMKSQLKKLGLSIDWDREISTCRSEYYKHQQMFFLELYDKGLVYRKENYVNWDPVDQTVLANEQVIDGKGWRSGAIVERKKLNQWFFKISNFSNDLLEGLKKLNDWPNKVKIMQKNWIGKSFGCEIDFKIEGDPSVENIKCFTTRPDTLFGFSFLALSVDHPIAELYKNNSEFKKFKDACSKTGTTEESIAQAEKIGFKTNLMALNPLDKIKKVPVYFANFVLMDYGFGAVFGCPAHDQRDLDFALKYNLEVLPVVKPNDADDKFSIKDEAYTGTGKIFNSSFLNGLNVPE

SEQ ID NO: 190168 - protein, 434 aa, Unknown
  Bacterial polypetide isolated from the Sargasso Sea
MNNEYRPNQIETDIQKKWSDTNAFEVSEDPAKEKFYCLSMFPYPSGKLHMGHVRNYTIGDVISRYQRMQGKNVLQPMGWDAFGLPAEGAAIKNNVPPAKWTYENIDYMRGQLKRLGFAYDWNRELATCDPDYYRWEQWFFTKLYEKGLVYKKTSVVNWDPVDQTVLANEQVIDGKGWRSGATVERREIPQWFLKITDYADELLEGLEKLSGWPDAVKTMQANWIGRSEGVEVDFKVEGAGESLRIYTTRPDTIMGVSYMAVAAEHPLAKSAAKGDDAIAKFIDECKSSGTSELELETMEKKGMPLNINLRHPISNEIIPLWVSNFVLMGYGTGAVMAVPGHDQRDWEFANKYTLPIKQVIFPVDGNQHDITESAYIEKGVLKNSGQFDELSSEDACNAVAEFVEKNKCGNRKINYRLRDWGISRQRYWGVSDSL

SEQ ID NO: 190169 - protein, 191 aa, Unknown
  Bacterial polypetide isolated from the Sargasso Sea
MEYDHLKIESKWQNIWLKEKTFKTNIDRNKEKVYILDMFPYPSGAGLHVGHPLGYTATDIYSRFKRLQGFNVLHPMGWDAFGLPAEQYAIKTGTHPKNTTEDNIKNFKRQIQMLGFSYDWDREINTTDEKYYKWTQWIFLQLYKKGLAYEAEVPVNWCPELKAVLANEEVVDGKSEIGGHPVVRKPMRQWM

SEQ ID NO: 190170 - protein, 669 aa, Unknown
  Bacterial polypetide isolated from the Sargasso Sea
PVERKKLNQWFFNISKFSNELLEGLDELKNWPEKVKTMQKNWIGKSFGCEIDFKIEGDLPIEKIKCFTTRPDTLFGFSFLALSVDHPISKHFLNNPEFNKFRDECSKTGTTEESIAQGEKIGFKTNLFASNPLDENQKVPVYFANFVLMDYGFGAVFGCPAHDQRDLDFANKYKLKVKTVVRPLDENDNFTVTKEAYTGSGTVINSNFLDGLKAPNESINKTIEILEEKKLGKKKINFRLKDWGVSRQRYWGCPIPMAYDKNGEVYPIPKKDLPVKLPENINLNSKGNPLDSMNKWKKTKIDGKELIRETDTLDTFVDSSWYFIRFCSPNNEKYGFDYEELKYWMPVDQYIGGVEHAILHLLYSRFFTMALNYKNKNFDLKEPFKGLFTQGMVCHETYKDENNKWLSPDEVENKDGKNFFIKKNPKKKVIVGPSESMSKSKKNTIDPEEIIKNYGADSVRLFMLSDSPPEKDVQWSDQGMMACYKFIQKLWVLHNKIKLILKKNDKNSNQTEDISKFTNQLIDRINLNLEKFNYNVIIASIYEAYNFLNQKINSPLNRDQLFENYIKILSVLFPVIPHFASECLKDLNADYNAKWPMIDKKFLVNENTNIVIQINGKKRSIINCKKGTTEKILMKKIKEDIKLNKFLENKKNIKSIFIKDKLINLIIKE

SEQ ID NO: 190171 - protein, 507 aa, Unknown
  Bacterial polypetide isolated from the Sargasso Sea
NTDFIKFKDQCSKTGTTEESIAQAEKLGFKTKLEAFNPLDENEKVPVYFANFVLMDYGFGAVFGCPGHDQRDLDFALKYNLPVRTVVRPKEEKDDFKVKNIAYTDQGVIINSKFLNNLKVPDESITEAIKVIEKKKIGKKTINFRLKDWGVSRQRYWGCPIPIAYDKDGNVHVVPKDMLPIKLPEKINLQAKGNPLNHETQWKKITIDGKECERETDTLDTFVDSSWYFLRFCSPHDANYGFDYKAIDYWMPVDQYIGGVEHAILHLLYSRFFMRAINYNNEKFSIKEPFESLFTQGMVCHETYKDEDQNWLSPDEVDTNDGKRYFVRNQPSKKVEVGPAESMSKSKKNTIDPGSMIDNFGADSVRLFILSDSPPEKDIQWSEQGMVASHKFIQKLWLLNSKIKEKISKCSNKKDQDGDLEIEKFTNHLIFRMNNNLEKFNYNVIIANMHETYNFLTRILDKEFNKDILRENFRKILSVMYPVIPHIINECIENNNFEPIKKWPDIN

SEQ ID NO: 190172 - protein, 399 aa, Unknown
  Bacterial polypetide isolated from the Sargasso Sea
MAYNHKSIEQKWQKYWDENEIFKTDDFLDKPKYYILDMYPYPSGSGLHVGHPLGYIATDILARYKRHQGYNVLHPMGWDAFGLPAEQYAIKTGTHPSVTTKENINNFKRQIKMLGFSYDWTREINTTDPGYVKWTQWIFIQLYNKGLAYEAEVPVNWCPELKAVLANEEVIDGKSDIGGHPVLRVPMRQWMLRITKYAESLLSGLDDVDWPHSIKELQRNWIGRSEGTKVLFELPSISKHLEVFTTRHDTLFGATYIVIAPEHPLVEDLLIEDQRTLVKQYIEETSKKSDLDRTELNKEKNGVFLGTYAINPANGKEIPIWISDYVIMGYGTGAIMAVPGEDERDWEFATKYDLPIIRTVEPSKDFSGGAYTGDGPAINSEFLNGLYIDEAKEKMASWL

SEQ ID NO: 190173 - protein, 365 aa, Unknown
  Bacterial polypetide isolated from the Sargasso Sea
ANIFKVEKKDNKKKYYVLEMFPYPSGKIHMGHVRNYTLGDVVARYKKMMGFNVFHPMGWDAFGLPAENAAMTEKKNPEDWTYTNISYMRNQLKSMGFSIDWDRELATCHPGYYKHEQLFFLEMYKNGLAYKKMSEVNWDPVDKTVLANEQVIDGRGWRSGALVEKKNLSQWFLKTSNYSEELLDDLSSLDMWPNKVKVMQSNWIGKSEGAEIVFSLVKNDFLDDKHLRVYTTRPDTIFGATFIAISANHDFAKKILKKDNNAKKFNKEIKVIDSEKTKVGYNTNIFIKHPFLDKKIPLFIANFVLMDYGLGAIFGCPAHDQRDLDFALKYNLEVIQVVKPIKSKQNSNGIKNTAILENGLMINSG

SEQ ID NO: 190174 - protein, 432 aa, Unknown
  Bacterial polypetide isolated from the Sargasso Sea
RLRDWGVSRQRYWGCPIPIIKCNNCGDIPVPTEELPVELPSDIDLDTPGNPLDAHPDWKFVKCPKCNKSAERETDTFDTFFESSWYFIRFTDPDINIPFSKSVANYWMPVDQYIGGVEHAVLHLLYSRFFTRALKDCGYLSISEPFKGLMTQGMVCHQTFKSEDGKWVFPHEVEKKNNKFYHTVNGSEVFPGRIEKMSKSKRNVVDPLSIVKKYGSDTARIFMVSDSPPERDMEWSTAGVEGSYKFLNRVLRIVNETKKPKKLINLDLVDNKNAVIKKIHQSIKDITEGIESFRFNVCIAKLYELTNMISKLDSKTDFEISLKFYGLEILAQLISPFAPHHAEEIWSLMGHKILICDTEWPKFDKRFLSVEQISIGVQINGKLRGNISYNKNAKKEEIKELALSLSSVKNRLGGEKPKKVIIVPERIVNIVV

SEQ ID NO: 190175 - protein, 384 aa, Unknown
  Bacterial polypetide isolated from the Sargasso Sea
YSQVNELRSQKISEESIAKNEKVGIQTELFIKHPFIENKLLPVFIANFILMDYGSGAIYGCPAHDQRDLDFANKYNLEIIPVIDPSDKIELDKKTAYTGSGKLINSQFLNDLSIEEAKKEIINRVEELHIGKKTTNFRLRDWGVSRQRYWGCPIPIMYREDGKVIEVPEDQLPLELPDDIDLSIPGNPFDNHPEWKFTKCPETGMNAIRETDTLDTFVDSAWYFLRFCSPLEKKDPFNLDETNYWMPVDQYVGGVEHAILHLLYSRFFTKALNIKGIDEPFDSLFTQGMVCHHTFQNESNDWVYPDDVEMRDSKYFQISTGKPVTMGDIESMSKSKKNVIDPETIISTYGADSARWFMLSDSPPEKDINWTDSGINGAWKICQK

SEQ ID NO: 190176 - protein, 662 aa, Unknown
  Bacterial polypetide isolated from the Sargasso Sea
IFTKLEQNGLVYRKKSLVNWDPVDETVLANEQVIDGKGWRSGATIELKEIDQWFLKITDYADELLSSIENLDWPDNVKSMQKNWIGKSFGTEIKFNLLNNEELRAFTTRIDTIYGVTFIAISPNHPIAQNLATNNPEINEFIKQCNATKMAEADMAKVDKLGLKTNLKVQHPFSDTKLDVWIANYVLMDYGTGVVMGVPAHDERDYEFAKKYNIKIKKVVESNELPSPKKGILIDSDIFTGQESDEAIKNINDYLEKNDVGKGIENFRLRDWGVSRQRFWGCPIPVVFDNGKPIFLEKNDLPVELPKIKDGESPKPLSQNKDFFDLGSGKTREVDTFDTFVDSSWYYARFTAADNNNEALDENSKYWLPVDLYIGGIEHAILHLLYSRFFHKAMRDIGLVEGDEPFKKLLTQGMVLKDGFKMSKSKGNTVDPQKFIDKYGADTIRLYMMFTSPPEQSLEWSDTAIEGSYRFLKRIWVLVSDRKIYSKKSPKTFTKLELKLRQKSHQTLKKVTNDYAQRNSFNTAVASIMELLNAIPDSFKSEHATETEVFCLDEVIQFTLKMLSPITPHISLYLWKEYTDSDGHDFENSWPNYNEDFLKVEDFQLIIQVNGKVRGKEHISINADQTEIEKLSKENENVKKVLANKPIKKVIYVKEKLINFVI

SEQ ID NO: 190177 - protein, 422 aa, Unknown
  Bacterial polypetide isolated from the Sargasso Sea
CPAHDQRDLDFANKYKLKVKPVVCPPNENADFQITNEAYTGPGKIFNSKFLDGLNCPEESIIETISILEKKKLGKKKINFRLKDWGVSRQRYWGCPIPIAYNNKGEVIKIPLNDLPVKLPENIDLKVKGNPLDHQHEWKKITINGETCVRETDTLDTFVDSSWYYLRFCSANNKLKGFDMDEISYWMPVDQYIGGVEHAILHLLYSRFFMRALGEDKKKFINVEPFEGLFTQGMVCHETYKDKNNNWFFPDEVETNDGKKYFLKNDPSLEIKVGPSESMSKSKKNTIDPQIMINNYGADAVRLFILSDSPPEKDIQWSDQGMISAYKFIQKFWTLHKKIINHKFNNKSKIKNLENINSFTNEAINKITKNLESFHFNVIIANLHETYNFLIKCIDDKNSKKEFLGNYSKILKVLSPIIPHII

SEQ ID NO: 190178 - protein, 499 aa, Unknown
  Bacterial polypetide isolated from the Sargasso Sea
MERANFKKIQEKWKDKLDLNNNSKNKKFYCLEMFPYPSGRIHMGHVRNYTMGDVVARYKSLKGFNVLHPMGWDAFGLPAENASRENNLSPMKWTKENIDQMKKQLKMLGLSIDWSKEIATCDPSYYKHQQELFIDFYNNGLISRKETYVNWDPVEKTVLANEQVVNGKGWRSNALVERKKLYQWFLNITKFSDDLLDGLKSLDGWPDKVKLMQKNWIGKSFGCEIIFDIDNTEEKIKVFTTRPDTIFGATFLAISPDHQIAKKFYQNQDFLKFKEISSKIGTTEEAIALAEKHGFDTKLKAKHPFIKNKLIPVYIANFVLMEYGEGAIFGCPAHDQRDFEFAKKYNLEIIQVVKSDSEKDTLPYTSGGKIINSDTLNGMDVEKAKIEVIKKVENLKIGKKKIQYRLKDWGISRQRYWGCPIPMIHLKNGQIVPVDKSELPIKLPDNIDLKSSGNPLENHKEWKRTIYKKTGEPALRETDTLDTFVDSSWYFIRFCSPRK

SEQ ID NO: 190179 - protein, 398 aa, Unknown
  Bacterial polypetide isolated from the Sargasso Sea
FPYPSGKLHMGHVRNYTIGDVISRYKRMKNFNVFQPMGWDAFGLPAENAAIANKVSPNDWTNQNIKNMKSQLQSLGFSYDWSKELRTCDSSYYKWEQLIFKKFYDAGLVYRKKSMVNWDPEDKTVLANEQVIDGKGWRSGAQIEIKEIDQWFIKITDYADELLSSLEELDWPENVKLMQKNWIGKSFGAEIEYKIDASKESLITFSTRPDTIFGVSFLAISPNHPLAIKIAKDNEKISNFLEKCKEAKAAEADMAKAEKLGIDTNLRVIHPLTGEKLPVWIGNFVLLDYGTGVVMGVPAHDSRDYEFAKKYNLNIKEVIQNNEEELPRTENGILINSDKFNGLSSEEGSKKIIEELVKLKSGKQLIQFRLRDWGVSRQRYWGCPIPVIYENGDPKVID

SEQ ID NO: 190180 - protein, 182 aa, Unknown
  Bacterial polypetide isolated from the Sargasso Sea
MNYKHKDIESKWQKYWDDNKTFKAIEDTGKEKFYILDMFPYPSGSGLHVGHPLGYTATDIYSRYKRLQGYNVLHPMGWDAFGLPAEQYALKTGTHPRETTEKNIYRYRQQLKMLGFSYDWDREINTTEPSYYKWTQWIFLQLYKKGLAYEAEVPVNWCPELKAVLSNEEVVNGRSDIGGHPV

SEQ ID NO: 190181 - protein, 287 aa, Unknown
  Bacterial polypetide isolated from the Sargasso Sea
MSRYNFKLIEKKWQDDWDKNKQFKVKVDNKKKKFYCLEMFPYPSGRIHMGHVRNYTIGDVLARYKSLLGFNVLHPMGWDSFGMPAENAAKQNNLNPKDWTEENINTMKNQLKKLGLSIDWGREISTCSPEYYKHQQKIFLDLYDKNLIYRKESYVNWDPIDQTVLANEQVINGKGWRSGAVVERKKLNQWFFKISTFSEELLADLDTLDQWPEKVKTMQKNWIGKSFGCEINFKIEGSKNVKSIKCYTTRPDTLFGFSFLAVSIDHPLSKFYEKDKNFISFKDECSK

SEQ ID NO: 190182 - protein, 302 aa, Unknown
  Bacterial polypetide isolated from the Sargasso Sea
MQYDHLKIETKWQTHWQKNKTFKVEIDTTKEKLYILDMFPYPSGSGLHVGHPLGYTATDIYSRFKRLQGYNVLHPMGWDAFGLPAEQYAIRTGTHPKKTTEENVKNFKRQIKMLGFSYDWDREINTTDEKYYKWTQWIFLQLFNKGLAYEAEVPVNWCPELKAVLANEEVVDGRSEIGGHPVIRKPMRQWMFRITEYAESLLEGLEDLDWPENVKDLQRNWIGRSEGSEVEFKLPAINVNIMVFTTRPDTLFGATYMVLAPEHPLVLELVTEEYRQDVERYIENAQKKSDLDRGELNKDKTG

SEQ ID NO: 190183 - protein, 445 aa, Unknown
  Bacterial polypetide isolated from the Sargasso Sea
MGWDSFGMPAENAARENNQDPKVWTENNIATMKKQLKQLGLSIDWDREISTCSEDYYKHQQKFFIEMFNKGLVYKKENYVNWDPVDETVLANEQVIDGKGWRSGAVVERKKLSQWFFNISKFADNLQEELNNMDEWPNKVKVMQQNWIGKSFGCEIDFQILGESKVNKIKCFTTRPDTLFGFSFLALSVDHPMSEYYKNDPDFKIFKEQCSKTGTTEESIANAEKIGFKTKLSAKNPLDETKSVPVYFANFVLMDYGFGAVFGCPAHDQRDFDFAKKYNLEIKTVVKPSDEKDDFVVTKEAYTGSGSIINSKFLNNLQVPDESVIETIKILEEKKLGKKKINFRLKDWGISRQRYWGCPIPIIYDENGSYKPIPEKELPVKLPQNINLNTKGNPLSKVDEWNKIKIDGKTYYRETDTLDTFVDSSWYFLRFCSPKNESEPFDIED

SEQ ID NO: 190184 - protein, 291 aa, Unknown
  Bacterial polypetide isolated from the Sargasso Sea
MQEYIPQKIEAKWQKYWEEHNLLDFDFDSENLKFYMLTMLPYPSGDLHIGHWYAMAPSDCYARFMKMKGHEVFFPIGFDAFGLPAENAAIKNNIHPKSWTYDNIKRMQNQLRSMGNMFAWKNEIVSCDPEYYKWSQWFFLRMLEEDLAYREYAPVDYCNHCQTTLAREQVWGEDRVCERCDNPVVKKDLNQWKLRITNYADELLDFDGLDWPERVRSMQENWIGRSEGVEFALKIDGSEELFFRVFTTRPDTVFGMTFCVLAPEHELVDQITKDENKESVEAYKSAAKHKD

SEQ ID NO: 190185 - protein, 399 aa, Unknown
  Bacterial polypetide isolated from the Sargasso Sea
MDKINTSDIDKKWQSFWARRKNKFKHTNKEKKFYCLEMFPYPSGKIHMGHVRNYAIGDVLARYKMINGFNVLHPMGWDAFGLPAENAAKENNLNPKDWTKKNISTMKHQLQLLGLSIDWDLEISTCDEDYYKHQQELFIDFYNKGLVVRKETYVNWDPVEKTVLANEQVIDGKGWRSNAVVERKKLFQWFFNISKFSDELLEDLSSLKEWPERVKLMQKNWIGKSVGCEIDFKIYKNDKSVKVFTTRPDTIFGATFLAISVDHPLCKDYLKHSDFLDFKKKCSQVGTTEEAIANAEKIGFKTDLEAEHPFIEGKKIPIYVSNFILMDYGTGAIFGCPAHDQRDLDFATKYKIEVIQVVKPKDINNEKINNVAYTGEGSIINSDFLNNLTISEAKEKIVK

SEQ ID NO: 190186 - protein, 337 aa, Unknown
  Bacterial polypetide isolated from the Sargasso Sea
MFPYPSGQGLHVGHPLGYTATDILSRYKRMKGFNVLHPMGWDAFGLPAEQYAVETGTHPASTTKKNIEKFKSQIMSLGFSYDWDREINTTDPKYYKWTQWIFLQLYKKGLVYQDEVPVNWCPSLGTVLANEEVIDGKSERGGHPVVRKPMKQWVFRITDYAESLLKGLDEVDWPENVKELQKNWIGKSDGANVIFDIPSIDETISVFTTRPDTLFGATYMVLAPEHPLVDMLTKEERKKDVLKYVEITSHKSDLDRGELNKDKTGVFIGSHAVNPLNNEEIPIWISDYVLMSYGTGAIMAVPGHDQRDYEFAQKFNLPITQVVSGGDISESAFTDID

SEQ ID NO: 190187 - protein, 641 aa, Unknown
  Bacterial polypetide isolated from the Sargasso Sea
NLNEWPDKVKTMQKNWIGKSFGCEIDFKIEGSKEINSIKCYTTRPDTLFGFSFLALSVDHPISKYYENNKDFEKFKKECSKTGTTEESIANATKIGFKTNLLAVNPLDQKNKVPVYFANFVLMDYGFGAVFGCPAHDQRDFDFAKKYNLEIKTVVKPTDMEDNFKVKIEAYTGSGILINSKFLNGLKVPEDSINQTIKVLEEKKLGKRKTNYRLKDWGISRQRYWGCPIPIAYDENNKIIKIPENELPVKLPDNIDINTNGNPLDAQEKWKKIIIDGKKCVRETDTLDTFVDSSWYYLRFCSAKDNSEPFNKSDIDYWMPVDQYIGGVEHAILHLLYSRFFMKALNLNNSKIKFTEPFKGLFTQGMVCHETYKDHDNNWLSPDEVISENGKDFFEIKDRNKKVKVGPSESMSKSKKNTIDPQNIIDQYGADAVRFFILADSPPERDVQWSEEGMRSSYKFIQKFWLLNEQILKLDKIQSNEQSQDLEIFTNQSINKINQALEKFRYNVIIATYHEIYSYYKKIIEKEKNFKNLKKNFQKILLIMIPVTPHLANECLERLNYDLNISWPGIEQKYLQQDCNDIVIQINGKKRGIISVEKNLQEKDIIKQIKNEKLIDKYLNDGKLIKTIYVKNRLINYIVKL

SEQ ID NO: 190188 - protein, 380 aa, Unknown
  Bacterial polypetide isolated from the Sargasso Sea
MFFNQWAWDAFGLPAENAAIENKVSPKDWTNTNIDNMKKQLKSLGFSYDWSKELRTCDPKYYKWEQLIFKKFYDAGLVYRKKSIVNWDPVDKTVLANEQVIDGKGWRSGAQIEIKEIDQWFIKITEYAEELLDSLDGLDWPENVKLMQKNWIGKSNGAEIKYKIDELDEYLTTFSTRPDTIFGVSFLAISPNHPLAIDLSKKDKNILEFLEKCKDIKAAEADIAKAEKLGIDTKIKVIHPLTGEKLPLWIGNFVLLDYGTGVVMGVPGHDLRDYEFATKYGLDIKQVIKTNDDDLPITENGILINSDKYDGMSSEEASNEIIKELVKLNSGAHLIQFRLRDWGISRQRYWGCPIPVVYENDVPKVIEEKDMPIKLPELDK

SEQ ID NO: 190189 - protein, 864 aa, Unknown
  Bacterial polypetide isolated from the Sargasso Sea
MHERYVPADVEAAAQGDWRAADAYKTQEDSQKPKFYCVSMLPYPSGKLHMGHVRNYTINDVMYRYLRMNGYNTLMPMGWDAFGMPAENAAMANGVPPAKWTYDNIDYMKGQMQSMGLAIDWSREIATCKPDYYKWNQWLFLKMLEKGIAYKKTGTVNWDPVDQTVLANEQVIDGRGWRSGALVEKREIPMYYLRITQYADELLNDLDGLGWPERVKIMQQNWIGKSFGVNFGFPYELDGEKKLLRVFTTRADTIMGVTFCAIAAEHPLATRLAQDKPELLAFIDECKRGGVAEADVATMEKKGVATGFSVTHPLTGEPVEVWIGNYVLMSYGEGAVMGVPGHDERDFAFAKKYGLPIKQVISAEGQQYSLDAWQEWYGDKETAVCVNSGKYDGLRYTDAVDAVAADLKAGGFGDKQVTWRLRDWGVSRQRYWGTPIPIIHCPSCGDVPVPEQDLPVVLPEDLVPDGSGNPLAKSEAFLNCACPKCGAAAKRETDTMDTFVDSSWYFSRYTAPDAETMVDARTDYWMPMDQYIGGIEHAILHLLYSRFWTKVMRDLGLVKFGEPAKNLLTQGMVLNETYYREDASGKKTWYNPLDVTVTHDDKGRPVGATLNADGQPVVLGGIEKMSKSKNNGVDPQLLIDQYGADTARLFTMFAAPPEQQLEWSGAGVEGASRFLRRVWSFGATNREALAARAGFDAAALGEADKALRREIYSVLKQADFDYQRLQYNTVVSAAMKMLNAIDGAKGATPGVLRETYGVLLRVLYPVVPHVTFELWKALGYAEEFGPLLDAPWPKVDEAALEQAEIELVLQVNGKVRGALKVAKDASREAIEAAAVADDAFAKFSEGKPAKKIVVVPGRLVNIVV

SEQ ID NO: 190190 - protein, 559 aa, Unknown
  Bacterial polypetide isolated from the Sargasso Sea
MNNSYKPAEIEKKAQELWATEKCFEVTEDSKKDKFYCLTMFPYPSGQLHMGHVRVFTISDVIARYQRMIGKHVLQPMGWDAFGMPAENAAIKRNIPPAKWTYKNIDYMRTQLKRLGYAYDWTREVTTCRPEYYKWEQWLFVRLFKKGIVYRKNAIVNWDPVDKTVLANEQVIDGRGWRSDAIVERKEIPQWFMKITAYADELLDGLDQLEGWPTSVKTMQKNWIGKSEGLEISFDIENSKDALKIFTTRPDTLMGATYMAVAAEHPLAFDAASENSDIASFIEECKKNKASEAAMETMEKKGMPLNVFAIHPITGEKIPIWVANFVLMTYGSGAIMAVPAHDQRDWEFAKKYDLEIKKVIEPADKNFDTAKAPFLDHGTLINSMDYTDMSSEEAFTEIAKFFESTKKGRRVTNFRLRDWGVSRQRYWGTPIPIIYCEDCGSVPVPEEQLPVVLPENVEFSGTGSPLKDMPEFYNVDCPNCKKSARRETDTFDTFFESSWYFSRYACPDAEEGMLDKRESYWMPVDQYTGGIEHAILHLLYSRFFQRLMRDEGLSKESEP

SEQ ID NO: 190191 - protein, 317 aa, Unknown
  Bacterial polypetide isolated from the Sargasso Sea
MSYNHKSIESKWQKFWLENQTFKSEDVSSSKPKYYVLDMFPYPSGAGLHVGHALGYVATDIVARYKRMKGFNVLHPMGWDAFGLPAEQYAIKTGTHPKVTTQQNVENFKKQINSLGFSYDWSREINTTDPGYYKWTQWIFMQLFNKGLAFEQEVAVNWCPELKAVLANEEVVNGKSDIGGHPVIRLPMKQWILKITDYAESLLDGLDDLDWPENIKELQKNWIGRSEGVELGFEIDGSNDLINVYTTRPDTLFGASYMVLAPEHTLIHSLVTDKQREEVESYIEETKKKSDFDRTEINKDKTGVFTGSYAINPFTRE

SEQ ID NO: 190192 - protein, 359 aa, Unknown
  Bacterial polypetide isolated from the Sargasso Sea
MLPEVENYKPSDDGKSPLSLINNWVEVKDENSNIIGLRETNTMPQWAGSCWYFLRFTDPNNTNEAWSKENENYWMPVDLYIGGQEHAVLHLLYSRFWHHVLYDLGLVSTKEPFKKLYNQGMILGDDGTKMSKSRGNVINPEEIMDEYGADSMRLYEMFMGPLNKSKPWSTKGLQGCYRFINKLWSIISDDEGFLSSKISNDVEPDKETLFLHHQTIKKLGEDIESLHFNTAVSQLMIYCNHLQKCDSIPKDLIEDLSIIICPFVPHLSEEFWSLLGHSDSITYESWPDYDENLIELDEVTIAVQVNGKLRANISVAKDSIEKDVVSKALTLENVEKFTSDGSIVKTIYIANRLLNFVVK

SEQ ID NO: 190193 - protein, 396 aa, Unknown
  Bacterial polypetide isolated from the Sargasso Sea
ISRQRYWGCPIPIINTKDGQALSVPEDQLPVVLPENIEFEGISSPIKSMEEFINIDAPDGSGSGERETDTFDTFFESSWYFARYCCPDNNKVMADERANYWLPVDQYIGGVEHAILHLLYARFFHKLMRDLGLLECDEPFTNLLTQGMVLKDGAKMSKSKGNTVDPQSLIDEYGADTVRLFMMFASPPEQSLEWKDEGVEGAHRFLKKLWKFASTHINEGQSPTLDPASMTDVQKELRRKIHMTINKVNDDIGRRYTFNTAIAAVMEMINALSRSELKSDNDHAIMREGIETAVLLLSPIVPHITDALWVELGHCEPLIDTAWPKSDSDALEQNEIEMVVQINGKLRGKITVTKNSKQKEIENQAVEDEKVKRNLEGKTIKKIIVIPERLVNIVVS

SEQ ID NO: 190194 - protein, 815 aa, Unknown
  Bacterial polypetide isolated from the Sargasso Sea
MAEIEIPYDPAKIEEKIQSYWKEHETFSVTEDPDKEKYFCLSMFPYPSGSIHMGHVRNYTIGDVISRFQRMLGKNVLQPMGWDAFGLPAENAAIKNEIQPSEWTKENIKNMKTQLSKMGFAYDWKREFATSDENYYKWEQWFFLQLVEKGLAYQEEAEVNWDPVDQTVLANEQVIDGKGWRSGAEVEKKTLKQWFLKITDYAEELLEGTDKLEGWPNQVRLQQKNWIGKSEGMEFSFAIDGSDKRIEIFTTRPDTIMGASFIAISTSHYLSLEMQEENNDVKKFVQELNKVKNAEADLAKQEKKGIKTKFHAIHPFTKEKLPIWIANFVLSDYGSGALMAVPGHDQRDFEFAKKYKLPIKQVITGKKGDDIKLEAILEKDVLINSGEFNGLSFDEAFKAIEKKATELNCGKRSTNFRLRDWGISRQRYWGSPIPILKDKDNFVPAKELPVRLPLEVEFKGVNSPLKDMDEFINIEQDGKSFKRETDTFDTFFESSWYYARFASFDSENSMLDERAKYWLPVDQYIGGIEHAVLHLLYSRFFFRCLRDIGIVEGDEPFDNLLCQGMVLKDGSKMSKSKGNTVDPEGLIEKYGADTVRLFVMFAAPPDQSLEWSDQGVQGAYRFINRIWKIAHHHIDSGIPDSAAIGSEDQEVRKLRIKTHQVLKKVKDDYLRRHSFNTAIASIMELSNNIPREFLNKDTDNDKRKAADEAIKAIILMLSPITPHLSQHLWWQFDQDNLVVDIAWPEAKEEFLQEDVINIAIQVNGKLRSEIQVSQDAQEDLIKELAIEDQNIKKYVSDSPIKKVIYIPRKLINIVI

SEQ ID NO: 190195 - protein, 470 aa, Unknown
  Bacterial polypetide isolated from the Sargasso Sea
YCLSMFPYPSGKLHMGHVRNYTIGDVISRYKRMQNYNVFQPMGWDAFGLPAENAAIENKVSPKEWTNQNIQNMKTQLKSLGLSYDWSKELRTCDESYYKWEQLIFKKFFDAGLVYRKKSMVNWDPVDETVLANEQVIDGKGWRSGAQVELKEIDQWFIKITNYADELLESLDKLDWPENVKLMQKNWIGKSNGAEIKFQIIGTKDYLITFSTRPDTIFGVSFLALSPNHPMAIEISKENEKIKKFLEVCKESKAAEADMAKADKLGIDTGVRAMHPITKEEIPIWIGNFVLLDYGTGVVMGVPGHDSRDFEFASKYNLDIKQVIQSDQTEDLPILDKGMLVNSDKFNGKTSEEASKEIVQELIDNGYGEELVQFRLRDWGVSRQRYWGCPIPVVYKNGEPEIIGENDMPVILPELDDGAAPVPLSQIKDFVELGNGITRETDTFDTFMDSSWYHARFTSAGNSKQIFDEN

SEQ ID NO: 190196 - protein, 480 aa, Unknown
  Bacterial polypetide isolated from the Sargasso Sea
RKVPIWVGNFVIASYGTGAVMAVPGHDERDFDFAKKYDIPIKRVLVMTEDGSADSELEEAECDLGWMVNSGMDGFDGLYGDDAKSAVCQALENIGAGNSTINWKIRPWLISRQRYWGTPIPIIHCDSCGVVPVPEDQLPVELPRDVVFDGKGNPLESSESFCNVECPKCGEPARRETDTMDTFVDSSWYFLRYTDAMQNETCFDPKIANHWMNVDFYCGGIEHAQMHLIYARFWTKALRDIGLHNIDEPFEELLCQGMVNKAAPWCEPCGITLSVAHAGQKCPQCNFILTERSAKMSKSLGNTVSPEEMIEKYGADTVRLFILFAANPTAGMDWSDTALEANHRQMIQLFNMPEMILQWDGDQSQIDTWLLARIKQRMNEWRDAMEAYDLRGAVEVSHFDLVKDINWYRRRGGNNQAVGRKVLYCWTHMISTTSPHMAEDWWKMLGNEDLIAGRIFQIEDDLEVNEQKALIDERYLRAFL

SEQ ID NO: 190197 - protein, 715 aa, Unknown
  Bacterial polypetide isolated from the Sargasso Sea
STMRDQLKSLGAVYDWSREVICCNPEYYEWNQWLFLKFFEQGLAYKQKAPVVWCPSCNTVLANEQVVNGNCERCDTVITRKDLEQWFLKITDYADELLDFEGLIEWPEKILTMQRNWIGKSEGVEIQFDLINPENTNLASTEITTFTTRIDTIFGVTFMAIAPEHEFVDSLTTKTNSDAVKKYIEQARKTSEIDRLSTEKVKTGQLLGSYAINRFNGAKIPIYIADYVLPNYGTGAVMGVPAHDDRDFVFASNYGIDIVQVVSQNDETDIGLTEAYVEDGKLINSGEYSGLNNRDAIKVLGDQIESKKWGKKAVTYRIRDWLISRQRYWGTPIPMVTCKDCGIQPVETTSLPVELPPNADFTPSGESPLAKIESFVKTTCPKCGGVADRETDTMDTFFDSSWYMYRYLNPKYKEGPFENKEVSSWMPVDQYTGGAEHAVMHLLYSRFFTKALRDMGLVDFDEPFLRLYNQGIILGQDHEKMSKSRGNVINPDDVVGIMGADAVRVFLMFIGPWDQGGPWSNVGINGVARWLNRIWGIASEKYVTSADSVFDHEMESETQQAVHKTIKKVYEDLDKFKFNTAIAALMELSNHLTKVWNAKNVSVEVWNDSIKQFLLMLAPIAPHLSEELWEMNGYEFSIHNQKFPDWEESLVVDESITLIVQINGKLRDTISVDSGISEEMAQEAAMSSEKIQGHINGTTIKKVIYVPDRLINIVV

SEQ ID NO: 190198 - protein, 436 aa, Unknown
  Bacterial polypetide isolated from the Sargasso Sea
MPERDLPYEPGDIEEQVQLYWKENDSFSVTEDPDKEKYFCLSMFPYPSGSIHMGHVRNYSIGDAISRFHRMLGKNVLQPMGWDAFGLPAENAAINNKVQPSDWTLENIASMKKQLTRLGFAYDWKREFATSESDYYKWEQWFFLQILEKGLAYQEEAEVNWDPVDQTVLANEQVIDGKGWRSGAEVEKKRLKQWFLKITDYAEELLEGTDKLDGWPEQVKIQQKNWIGKSEGMNFSFAVKDEESKIEVFTTRPDTIMGVSFIAISASHFLSLEIAENNKEIFNFITKQNKIKQSEAEFAKQEKEGFFTGKYAIHPFTKKEIPIWIANFVLSDYGSGALMAVPAHDQRDFEFATKYKLPILPVIQSDETDSDTLGQATVEKNILINSDEFDGLDFDQAFQAIEKKAEELTAAIKRLTSGLEIGEFQGKDIGVHLSRY

SEQ ID NO: 190199 - protein, 855 aa, Unknown
  Bacterial polypetide isolated from the Sargasso Sea
MDYSPKKIEPYWQDLWSKEKPFAAKKSDKNLPKKYILEMFPYPSGRIHMGHVRNYTIGDVITRYRITKGDNVLHPMGWDAFGMPAENAAMENKIHPKEWTYKNIDSMRDQLKSLGLAIDWDREFATCDHEYIKHQQNIFIDFYKNNLVYRKESEVNWDPVDKTVLANEQVIDGLGWRSGAVVERRKLNQWFLKISDFSDDLLDGLEKLDKWPDKVKLMQKNWIGKSSGAVFSFKILGKFTKIASEIKVYTTRPDTLFGASFCAVAPDHEIATAISQDNDDALNFIKECQKIASSEEAIEKVEKEGFDTGILVQHPFDENIKLPVYIANFVLSSYGTGAIFGCPAHDQRDLDFANKYGLPVLPVVCPADVDEQDMLIKNEAYIGDGTIINSNFLNGLSIEKAKETAIDKLKELKIGKKEINYRLRDWGISRQRYWGCPIPIMYREDGEIIPVPESELPITLPEDIDFSIPGNPLERHPTWKHTICKKTGLKAIRETDTFDTFIDSSWYFARFCDLDNSKPINKDEANYWLPVDQYIGGIEHAILHLLYSRFFTRALKITGHLEIKEPFDGMFTQGMVCHETYTNEKGEWVEPYLVIKNEKDNSAYHKETGEKISIGSPEKMSKSKKNIVDPDDIIKLYGADTARWFVLSDSPPDRDIFWTEAGIDSSNKFINKIWRTILDFKEIIKKKSPKDPDEQIQYKKILHKYIRDITFNLESMAFNKAIANVYSLIGELSKSETKENISSETAYEILQSLIIILSPFIPHLAEESWSQLGFKGLACKQSWPEFEENLIKDKNAKLIVQINGKKRGEISIPIETEEEVAIDAAKENKKIKGDLAEKEIKKVIYVKGRILNFVI

SEQ ID NO: 190200 - protein, 451 aa, Unknown
  Bacterial polypetide isolated from the Sargasso Sea
FGMTFAVISPEHELVNQIMEQSDKKDEIQNYLDSIVNKSEFERMSITKEKTGVDTTLKVKNPITNEEVPLWIADYVLINYGTGAIMAVPAHDERDYEFAKKYDIEIRQVIIDKEKTINVDNEAFTGNGVLINSEEFNELSSHEEASKKINDFLVKNKIGDEKTTYRLRDWLISRQRYWGCPIPLINCDDCGLLPEKYENLPVLLPEIKDYINTDGSPLSKSKEFVETDCPKCSKKALRETDTMDTFVDSSWYYMRFLDPKNDNEPFESDFINEWLPVDQYIGGVEHAILHLLYSRFFVRALRDLGFMKIDEPFHNLFSQGMINFGGAKMSKSKGNIVDPESYFATHGADALRLYILFMAPPSDGVEWNDGGIEGTKRFLNKFWDNMVKIIDQKDTSDTFSSKDEEIERKINQTIKSITQHLEKFEFNTAVSDLMKLNNDLSDYLKEDNTIR

SEQ ID NO: 190201 - protein, 478 aa, Unknown
  Bacterial polypetide isolated from the Sargasso Sea
EQTVLANEQVINGRGWRSNAIVERKKLSQWFFNISKFSEELLSDLDKLENWPNKVKTMQKNWIGKSFGCEIDFDVEGNLPINKIKCFTTRPDTLFGFSFLALSVDHPLSEYFIKDQEFIKFKDECSKTGTTEESIAQAEKIGFKTNLLAINPLDKNKKVPVYFANFVLMDYGFGAVFGCPAHDQRDFDFAKKYNLQIKTVVKPFEEKDSYEVKDEAYSGGGTIINSDLLNGLKVPNESITKTIDLLQKKKLGKKTINYRLKDWGISRQRYWGCPIPVAYDERGKVFLIPKKDLPVKLPEKVNLNFKGNPLDNAKDWKKVKIGGNNLTRETDTLDTFVDSSWYFMRFCSPNFSEGPFDLKKLNYWMPVDQYIGGVEHAILHLLYSRFFMKAIKTTNQKVKDSEPFRGLFTQGMVCHQTYKDGKGKWISPDEIEKDNLGNIISKNSKEKIIVGPSEAMSKSKKNIIDPESMIKIYGADAV

SEQ ID NO: 190202 - protein, 341 aa, Unknown
  Bacterial polypetide isolated from the Sargasso Sea
MNLWPDKVKTMQKNWIGKSFGCEIDFQINGSKEVKSIKCYTTRPDTLFGFSFLALSVDHPISKYYENNEKFIEFKKECSKTGTTEESIAQATKIGFKTTLEAVNPLDNELKVPVYFANFVLMDYGFGAVFGCPAHDQRDFDFAKKYDLKIKTVVKPADKTDNYQVQNEAYTGAGVIINSKFLNGLSVPEKSITETIKILEDKNLGKKKTNYRLKDWGISRQRYWGCPIPIAYDNHNNIIKIPEENLPVELPDSIDLNTNGNPLDSQTKWKKVKINGKECIRETDTLDTFVDSSWYFLRFCSAKNKEKAFDVNEVDYWMPVDQYIGGVEHAILHLSIFTFFY

SEQ ID NO: 190203 - protein, 725 aa, Unknown
  Bacterial polypetide isolated from the Sargasso Sea
MIDSKYNPREIEESAQNYWEDKRVFESIEDQEKEKYYCLCMFPYPSGRLHMGHVRNYTIGDVVSRYQRMHGKNVLQPMGWDAFGLPAEGAAIKNNMAPSKWTRQNIEYMKYQLKMLGFGYDWSRELATCDPDYYKWEQWMFTRLFEKGIAYRSDAIVNWDPVENTVLANEQVIDGKGWRSGATIERRNMPQWFLRITDYCEELLEGLDDLDWPEQVKVMQRNWIGRSEGYEIDFEIPHLDTAISVYTTRTDTLFGATYLALAPEHPIVQEIASLDNNVQEFLEDTKSQAVSEEALEKMEKKGVPLGFNAINPINGEEIPVWTANFVLMTYGTGSIMSVPAHDQRDHDFAKKYDLHIQPVIRSNDKDSNHDFNKEAYIEEGILFNSGNYDGVSSAQAKDQIGELLTDKNAAKKVINYRLRDWLISRQRYWGAPIPVLTNEQGDLVSESDENLPVSLPEEVEFDGVHSPLKTMSDFYEVNDRDIPLVRETDTFDTFMESSWYYARFCSSDSDKAMLDDRAKYWLPVDLYIGGIEHAILHLLYARFYHKLLRDEGLVEGNEPFKRLLTQGMVLNDGAKMSKSLGNTVDPEEMIQNYGADTVRLFMMFTSPPEQSLEWSDTAINGSYRFLKKLWKLIKTHQDSIKDIPSISSNENFNGNQNKLRRKTHQTISKVTDDIGRRYTFNTAIAAVMELVNEVSAFNVDDELDRQVIKEAIESILLLLSPIVPH

SEQ ID NO: 190204 - protein, 542 aa, Unknown
  Bacterial polypetide isolated from the Sargasso Sea
MSSNYNPQSIEKDIQDKWDKQNKYVTRVDERKKYYCLSMFPYPSGKLHMGHVRNYTIGDVISRYKRMRNFNVFQPMGWDAFGLPAENAAIANKVSPKEWTNQNIENMKVQLQSLGFSYDWSKELKTCEPNYYKWEQLIFKKLFDAGLVYRKKSLVNWDPVDETVLANEQVIDGKGWRSGAQIEIKEIDQWFIKITKYAEELLDSLENLDWPENVKRMQRNWIGKSNGAEIKYKIDNSKEFLTTFSTRPDTIFGVSFLAISPNHPLAVNLAKSNKEIYEFLEKCKEIKAAEADIAKADKLGIDTNIKVIHPLTGKKIPVWIGNFVLLEYGTGVVMGVPAHDARDHEFATKYNLDIKQVIETDNNDFPILQKGKLINSENFNGMQSDSASNEIVNELTKLKLGEELIQFRLRDWGVSRQRYWGCPIPVIYDGDVPSVLGENDIPIELPELEENEPPTPLSQNEKFLKLNKGFRRESDTFDTFMDSSWYYARFTSADNEDEIFDEKTKYWLPVDLYIGGIEHAILHLLYSRFFHKALRDIGLVEG

SEQ ID NO: 190205 - protein, 321 aa, Unknown
  Bacterial polypetide isolated from the Sargasso Sea
MDSSWYYARFTSSNNNNEIFDENTKYWLPVDLYIGGIEHAILHLLYSRFFHKALRDIGLVEGDEPFKRLLTQGMVLKDGAKMSKSKGNTVDPQSYIEKYGADTVRLYMMFTSPPEQSLEWSESSVEGASRFLKRIWSLIEGKKYIKLDMKFEFSKEEIELRRKCHSTLKKVEHDYESRFSFNTAIAAIMELLNFIPDEFKKDNATDAQKFCLNEAILFSLKMLFPISPHICEYLWTSFVNDGSCIESSWPKYDEAIIESDEFELIIQVNGKVRGKLNISKNLDEETVKNLSLEVENVKNNIADSEIKKAIFVKDKLINFVI

SEQ ID NO: 190206 - protein, 386 aa, Unknown
  Bacterial polypetide isolated from the Sargasso Sea
VIPVILPKDKTEKEFKVSDEAYVGDGQIINSDFLNGLKIEEGKIEVIRRLEKMEQGRGQTIFRLRDWGISRQRYWGCPIPILYREDGKILTVPDSELPIKLPKDIDLTKPGNPLENHPTWKFTKCPETGMKAIRETDTLDTFVDSSWYFLRFCSHDNKNTGYDLDDVKYWMPVDQYIGGVEHAILHLLYSRFFSRAISLGSDYEIKEPFQGLFTQGMVCHKTYKNKKGDWIFPEDVMLEKGKILDKNSSEEVFEGPSESMSKSKKNVIDPETVIKLYGADSVRWFMLSDSPPERDIQWSDEGISGSYKFMQKIWNISETINNLDPKTKMDDETKNVLDKSINKLIKDVTLAIESFHFNVAVAKFYEFINILSKVLHDKNEDKIYLQ

SEQ ID NO: 190207 - protein, 583 aa, Unknown
  Bacterial polypetide isolated from the Sargasso Sea
MQEQYRPEEIESKVQLHWDEKRTFEVTEDESKEKYYCLSMLPYPSGRLHMGHVRNYTIGDVIARYQRMLGKNVLQPIGWDAFGLPAEGAAVKNNTAPAPWTYDNIAYMKNQLKMLGFGYDWSRELATCTPEYYRWEQKFFTELYKKGLVYKKTSAVNWCPNDQTVLANEQVIDGCCWRCDTKVERKEIPQWFIKITAYADELLRDLDNLDHWPDTVKTMQRNWIGRSEGVEITFDVNDYDNTLTVYTTRPDTFMGATYLAVAAGHPLAQKAAANNPELAAFIDECRNTKVAEAEMATMEKKGVDTGFKAVHPLTGEEIPVWAANFVLMEYGTGAVMAVPGHDQRDYEFATKYGLTIKPVILTAEGAEPDLSEQALTEKGVLFNSGEFDGLDFEAAFNAIADKLVALGVGERKVNYRLRDWGVSRQRYWGAPIPMVTLEDGTVLPTPEDQLPVILPEDVVMDGITSPIKADPEWAKTTVNGMPALRETDTFDTFMESSWYYARYTCPQYNEGMLDPEAANYWLPVDIYIGGIEHAIMHLLYFRFFHKLMRDAGMVNSDEPAKQLLCQGMVLADAFYYVGANGER

SEQ ID NO: 190208 - protein, 276 aa, Unknown
  Bacterial polypetide isolated from the Sargasso Sea
YSRFFHKALRDIGLVEGDEPFKKLLTQGMVLKDGAKMSKSKGNTVDPQSYIEKYGADTVRLYMMFTSPPEQSLEWSESSVEGASRFLKKIWNLVNGRKYKKFDKKLEFNKEEMSIRRKSHATLKKVENDYEVRFAFNTAIAAIMELINFIPDEYKHEDASDAQKYCLDEVIIFTLKMLSPISPHICEHLWNDFYLDESSIDAWWPKFDENLLEAEEFELIIQVNGKVRGKINIDKNIEQKEIETTALNVENVKSHIGSSKIKKTIYIKEKLINFVI

SEQ ID NO: 190209 - protein, 801 aa, Unknown
  Bacterial polypetide isolated from the Sargasso Sea
MSSTYNHKTIEEIIQNKWNEEKRYVSKIDKREKYYCLSMFPYPSGKLHMGHVRNYTIGDVISRYKRMKNFNVFQPMGWDAFGLPAENAAIANKVSPDDWTNQNIENMKSQLQSLGFSYDWSKELRTCDSSYYKWEQLIFKKFYDAGLVYRKKSMVNWDPEDKTVLANEQVIDGKGWRSGAQIEIKEIDQWFIKITDYADELLSSLEELDWPENVKLMQKNWIGKSFGAEIEYKIDASKDSLITFSTRPDTIFGVSFLAISPNHPLAIKIAKDNEKISNFLDKCKEAKAAEADMAKAEKLGIDTNLRVTHPLTGEKLPVWIGNFVLLDYGTGVVMGVPAHDSRDYEFAKKYNLNIKEVIQNNEEELPRTENGILINSDKFNGLSSEEGSKKIIEELVKLKSGKQLIQFRLRDWGVSRQRYWGCPIPVIYENGDPKVIDEMDMPVELPKLKKNSPPIPLSQNEDFINLDNSILRESDTFDTFMDSSWYYARFTSSNNNNEIFDENTKYWLPVDLYIGGIEHAILHLLYSRFFHKALRDIGLVEGDEPFKRLLTQGMVLKDGAKMSKSKGNTVDPQSYIEKYGADTVRLYMMFTSPPEQSLEWSESSVEGASRFLKRIWSLIEGKKYIKLDMKFEFSREEIELRRKCHYTLKKVENDYESRFSFNTAIAAIMELLNFIPDEFKKDNATDAQKFCLNEAILFSLKMLFPISPHICEYLWTSFVNDGSCIESSWPKYDDAIIESDEFELIIQVNGKVRGKLNISKNLDEETVKNLSLEVENVKNNIADSEIKKAIFVKDKLINFVI

SEQ ID NO: 190210 - protein, 367 aa, Unknown
  Bacterial polypetide isolated from the Sargasso Sea
PLNESELPLELPEVDKYEPSGTGESPLANIKSWVEVKDSESNIIGLRETNTMPQWAGSCWYYLRFIDPNNLEKGWDPEKEKYWMPVDLYIGGAEHAVLHLLYSRFWHHVLYDLGLVSTKEPFKKLFNQGMILGSDGSKMSKSRGNVVNPDETVDMYGSDALRIYEMFMGPLDKGKPWSTSGLQGCSRFIKKLWSILVDNEGDLSRHIDDSAADKKTNQMLHQMIKKVSDNLDQLHFNTCVSEFMIFTNHIQKLDKINRELIRSFIIILNPFIPHFAQEMWKLIGETTELSYEDWPKYDHTLIINDELTIPIQINGKRRSEISISKDESESSVLDKAKSDDKIAAFIGKMEVVKSIYVKEKIVNLVVK

SEQ ID NO: 190211 - protein, 295 aa, Unknown
  Bacterial polypetide isolated from the Sargasso Sea
MQKNWIGKSFGCEIDFKIEGNLPINEIKCFTTRPDTLYGFSFLAVSVDHPLSKYFNDKKDFLEFKKQCSKTGTTEESIALGEKIGFKTDLFAINPLDNNQKVPVYFANFVLMDYGFGAVFGCPAHDQRDLDFAIKYKLPVKAVVKPINEGDNFKVGKEAYLDSGIIFNSDILNGFKAPDESIIKTIEILEKRKLGKKKINFRLKDWGISRQRYWGCPIPIAYDSDNNVVKIPKEQLPVKLPENINLNCKGNPLDHQKDWKKIEINETTCLRETDTLDTFVDSSWYFLRFCSPKKF

SEQ ID NO: 190212 - protein, 462 aa, Unknown
  Bacterial polypetide isolated from the Sargasso Sea
NSKFLNNLKVPDESINEAIKILEEKKLGKRKTNFRLKDWGISRQRYWGCPIPIAYDENNNVVKIPEELLPVKLPDDVDLNTNGNPLDSQEKWKEVEINGKKCIRETDTLDTFVDSSWYYLRFCSAQNIKEPFDKNELDYWMPVDQYIGGVEHAILHLLYSRFFMRAISLNNKDTTLKEPFEGLFTQGMVCHETYKDKDNNWIYPDDVSSKDGKNYFLNNNPTEKVIVGPSESMSKSKKNTIDPEKIIKMYGADAVRLFILSDSPPEKDIQWSDTGISASFKFLQKLWSLNEKIINNKKKFSNFDNELERFTNQIIKKLSDDLDRFGFNVTIASIHKIHSFLNQHTNKEDWGSNFHKNYINILKVINPIIPHFSNECLEKLKISTEVIEWPKVDQKYLEQEIFNIVTQINGKKRKVFSISKSLDKKTLIENIKNDEQIKKYLDNKQIIKTIYIENKLINFIIN

SEQ ID NO: 190213 - protein, 812 aa, Unknown
  Bacterial polypetide isolated from the Sargasso Sea
MNSQFEYKKIEKKWQDHWENSETVKCDLKSDKPKFYNLCMYPYPSGDLHMGHIRNYTIGDVITRYKQMNGFNVLSPMGWDSFGLPAENAAIKTGIHPREFTEERIANMKSQIIRLGSLYDWDREVAAHSVDYYKWTQYLFIKLFENDLAYKEDAPVNWCNSCRTVLANEQVIEGSCERCDTAVEPKNLNQWFLKISEYSEELLQGLDEIGDWPENVKTMQRNWIGKSEGSQFELNIIGTDLTFDVFTTRPDTLFGMTFAVISPEHELINQIMEQSDKKDEIQNYLDSIVNKSEFERMSITKEKTGVDTTLKVMNPITNEEVPLWIADYVLVNYGTGAIMAVPAHDERDYEFAKKYDIEIRQVIIDKEKTINVDNEAFTGNGVLINSGEFNDLGSHEEASKKINDFLVKNKIGDEKTTYRLRDWLISRQRYWGCPIPLINCEDCGLLPEKYENLPVLLPEIQDYINTDGSPLSKSKEFVETDCPKCSKKALRETDTMDTFVDSSWYYMRFLDPKNDNEPFESDFINEWLPVDQYIGGVEHAILHLLYSRFFVRALRDLGFMKIDEPFHNLFSQGMINFGGAKMSKSKGNIVDPESYFATHGADALRLYILFMAPPSDGVEWNDGGIEGTKRFLNKFWDNMVKIIDQKDTSDTFSSKDEEIERKINQTIKSITQHLEKFEFNTAVSDLMKLNNDLSDYLKEDNTIQIDLKDSILRNILILLYPMSPHIASEIFQDYFDSDISQEKWPTFDETKLENPVYELVIQINGKKRHALIVNTGIEEDEVKEICTTNFDIDFSNAKKVIFIKDKLINIVQ

SEQ ID NO: 190214 - protein, 350 aa, Unknown
  Bacterial polypetide isolated from the Sargasso Sea
MDCSDADLPYTDDGIMINSKFLDGLKKDQAIEAIVNYLEKEKLGNRKVNYKLRDWGVSRQRYWGCPIPVIYYEDGSFRVLDKEELPVELPYDIKMDGKGNPLVKENGWRSVICSKTGKKALRETDTFDTFVDSSWYFIRFLDNKNSKEPFDREIVDKLMPVDKYIGGIEHAILHLLYARFFTKALRDIYKLKVSEPFKELFTQGMITHKTYKNEVGSWVLPIDVAIKNNELIQISTNQKIIEGPSEKMSKSKKNVVDPEEIIKNYGVSATRAFMISDSPPDRDLEWTDAGIQSSKNLTNRIERFFSNDTNTKNPTEDDQKFIYKCLYDMDNNISNLSLNKYIANIFTLFN

SEQ ID NO: 190215 - protein, 83 aa, Unknown
  Bacterial polypetide isolated from the Sargasso Sea
MSSNYKPQLIEKTIQDKWDKEERFIAKIDDREKFYCLSMFPYPSGKLHMGHVRNYTIGDVISRYKRMNDFNVFQPNGLGCFWV

SEQ ID NO: 190216 - protein, 366 aa, Unknown
  Bacterial polypetide isolated from the Sargasso Sea
VNWDPVDQTVLANEQVIDGRGWRSGAIVERKKLSQWFFKISKFSEELLKGLDKLENWPNKVKVMQKNWIGKSFGCEINFNIEGNSSIKNIRCFTTRPDTLFGFSFLAVSIDHPISKFYEKDEKFQEFKKQCSKTGTTEESIAQAEKIGFKTNLIAINPFDKNIRVPVYFANFVLMDYGFGAVFGCPAHDQRDFEFAQKYNLPIKTVVKPKEFKEDFKVKDEAYVEDGVMINSSFLNGLKTPGEAISKAIEEIENRKTGKQKINFRLKDWGISRQRYWGCPIPIAYDDKGNIIPIPKEHLPIKLPEKIDLKTKGNPLDHQTEWKKILIDGKKYNLETDTLDTFVDSSWYYLRFCSPKNDNYGYNFEE

SEQ ID NO: 190217 - protein, 394 aa, Unknown
  Bacterial polypetide isolated from the Sargasso Sea
LLYIQHVQILYFGATYMVLSPEHPLVDSIVTSENKAKVAEYKKLASNKSDFDRGEVNKDKTGVPLGAYAINPVNNKEIPIWIADYVLMSYGTGAIMAVPGHDERDYEFARKFDLPIVEVVSGGDIEKEAHTDAKDGIMINSSNDSGLNLNDMKVSEAISATIEWLESNKKGEKAIQYKLRDWLFSRQRYWGEPMPIVHGDNGEIIALNDFDLPLTLPEVDKYEPTGTGESPLAGIADWVNTESGKRETNTMPQWAGSCWYYLRFIDPLNDRAAWDKDKEKYWMPVDLYVGGVEHAVLHLLYSRFWHHVLYDLDLVSTKEPFRKLYNQGMIGGEDGQKMSKSRGNVVNPDDVVEKYGADSFRLYEMFMGPLDKSKPWNTKGLQGCYRFTQKIWKI

SEQ ID NO: 190218 - protein, 859 aa, Unknown
  Bacterial polypetide isolated from the Sargasso Sea
MQEQYNPSEIEALVQKHWHDNKTFEVTEDANKEKFYCLSMFPYPSGRLHMGHVRNYTIGDVVARFQRLQGKNVLQPIGWDSFGLPAENAAINNKTAPAPWTYQNIEYMKNQLKLLGFGYDWSREIATCTPEYYRWEQWFFTKLYEKGLVYKKTASVNWCPNDETVLANEQVQDGCCWRCDTPVEQKEIPQWFIKITAYAEELLNDIDTLDGWPEQVKTMQRNWIGRSEGVEMTFGVAGSDKSFDIYTTRPDTLMGVTYVAIAAGHPLAELAAQTNPELAQFVEECKNSTTSEADLATMEKRGVATGLYAIHPITGKQVPIWAANFVLMNYGTGAVMSVPGHDQRDYEFAKKYNLPIEAVIKPVDGELDISEAAYTEKGVLFNSGEFDGLDFDGAFNAIADKLVAEGKGKRQVNYRLRDWGVSRQRYWGAPIPMVTLADGTVIPTPEDQLPVILPEDVVMDGIQSPIKADKEWAKTQVNGQDALRETDTFDTFMESSWYYARYCSPQADQMLDPTKANYWLPVDQYIGGIEHACMHLLYFRFFHKLLRDAGLVNTNEPAKQLLTQGMVLADAFYYTNDKGARVWVSPLDVVTTEKDDKGRITKAIDKDGNELVYTGMSKMSKSKNNGIDPQVMVEKYGADTVRLFMMFASPPELTLEWQESGVEGAHRFIKRLWKLASDYVAQDNSEALDVSKLTSEQKALRREVHKTIAKVTDDIGRRQMFNTAVAAVMELMNHLQKAPQTTGQDRAIIGEALTAVVRLLYPIIPHVSFTLWNELGNTNSIEDSQWPVVDESALVEDSKLIVVQVNGKVRAKITVAADADQASVEALGMADEQVIKYLDGVTVRKVIYVPGKLLSIVAN

SEQ ID NO: 190219 - protein, 528 aa, Unknown
  Bacterial polypetide isolated from the Sargasso Sea
KFSDELLNGLDQLKNWPNKVKVMQKNWIGKSFGCEIDFKIEGDLPIKEIKCFTTRPDTLFGFSFLAVSVDHPISKYFEKDPKFADFKKESSKTGTTEESIAQGEKIGFKTKLLAINPLNPKQKVPVYFANFVLMDYGFGAVFGCPAHDQRDLDFAIKYNLSFKTVVKPIDETDEFKVNNEAYTGAGKIINSDFLNDLKVPDESIIKTIEILEEKRIGKKKINFRLKDWGVSRQRYWGCPIPIAYDPDGNVLTIPKDELPVKLPDEIDLKSKGNPLDKKKDWKSVIIDGKKCIRETDTLDTFVDSSWYFLRFCSPKNNDYGFDLESIKYWMPVDQYIGGVEHAILHLLYSRFFMRAINHKNEKFSITEPFENLFTQGMVCHETYKDKNNNWLNPEEVDTKDGKNFFIKNQPENKVLVGSSESMSKSKKNTIDPEKMIENFGADAVRLFILSDSPPEKDIQWSEQGMVASYKFIQKFWLLHIKILDKINESTITKNQKIDLELTKYTNQLIYKFNNNLKKFNYNVIIANI

SEQ ID NO: 190220 - protein, 773 aa, Unknown
  Bacterial polypetide isolated from the Sargasso Sea
MLKEQYNPEQIESNIQSEWEKINKYKATPDDREKYYCLSMFPYPSGKLHMGHVRNYTIGDVISRYKRMRGFNVFQPMGWDAFGLPAENAAIQNKVDPQSWTEQNIENMKSQLKRLGFSYDWSKELKTCDPNYYKWEQEIFSLLHKQGLVYRKKSLVNWDPVDETVLANEQVIDGKGWRSGATVELKEIDQWFLKITDYADELLNSIENLDWPENVKSMQKNWIGKSFGSEISFPLSNEEELTAFTTRVDTIYGVTYLAMSPNHPISKNLANQDTQIDDFIKKCNETKMAEADMAKADKLGLKTNLKVKHPFTGIDLDVWIANYVLMDYGTGVVMGVPAHDERDHEFALKYNIDIKQVIKADEVPSSEKGELINSEKFNGLTSENAIQDINNFLEKEKIGKGIENFRLRDWGVSRQRFWGCPIPVVYKNDEPIFLEKTDLPVELPKIKDGESPKPLSQNKDFFDIGPNESREVDTFDTFVDSSWYYARFTAADNNNKALDENSAYWLPVDLYIGGIEHAILHLLYSRFFHKAMRDIGLVEGDEPFKKLLTQGMVLKDGSKMSKSKGNTVDPQQYIDKYGADTIRLYMMFTAPPEQSLEWSETAVEGAFRFLKKLWSFTHDKKFKKAKIQGELDKSQKDFRRKIHLTIKKVTDDYENRYAFNTVIAACMELLNSTPNQIKGEISSENDQFCLNEFIASVLQMLYPIAPHICETLWNNFFENSSGIEESWPTFDENLMVTDTFELVVQINGKVRGKIEISSNLEQDEIESVAKSIK

SEQ ID NO: 190221 - protein, 349 aa, Unknown
  Bacterial polypetide isolated from the Sargasso Sea
MKEYFERYNFEVNETKWQDTWNKINAFKAEIDPSKPKYYVLEMFPYPSGRIHMGHVRNYTLGDVVARYKRSKGFNVLHPMGWDAFGLPAENAARDKNIHPSDWTYENISNMRSELKRMGLSIDWDREIATCHPGYYKFQQQLFIDMFNKDLVYRKKSMVNWDPVDKTVLANEQVIDGKGWRSGAPVEKKELSQWFFRITKYQNELLDELNKLKRWPERVRLMQENWIGKSQGAQIEFEIDDSSETLPVYTTRPDTIFGATFCAISPEHPLSLKLSKKSIKAKEFIEECNKLGTSEAIIEKAEKKGFKTDLYAIHPFKQTKLPIFIANFVLMEYGTGAIFGCPAHDQRDL

SEQ ID NO: 190222 - protein, 510 aa, Unknown
  Bacterial polypetide isolated from the Sargasso Sea
MLNEYNPKIVEKKIQDKWNKSDKYKSAVDNREKFYCLSMFPYPSGKLHMGHVRNYTIGDVISRFKRMQNFNVFQPMGWDAFGLPAENAAIENEVSPKDWTDRNIKNMKNQLQSLGFSYDWSMELRTCEPKYYKWEQLIFKKFYDAGLVYKKKSLVNWDPVDETVLANEQVIDGKGWRSGAQVQIKEIDQWFIKITSYAEELLDSLEELDWPENVKLMQKNWIGKSYGAEVEYKMEEGGDSLKTFSTRPDTIYGVTFLAISPNHQLSIDLSEKDENIKLFLEKCKDLKTAEADIAKAEKLGIDTGKKVIHPITKEKLPVWIGNFVLLDYGTGVVMGVPGHDERDFEFATKYKINIKQVIKNDKDDLPISDKGILINSDNFDGMTSEDASKEIINKLIELDCGNSLIQFRLRDWGISRQRYWGCPIPVVYDDHEPVVVNQEEMPIKLPELEQGTRPIPLSQNENFINLSTNQKRETDTFDTFMDSSWYYARFTSADNDKDIFDSRTNYWLPV

SEQ ID NO: 190223 - protein, 425 aa, Unknown
  Bacterial polypetide isolated from the Sargasso Sea
LRMLEMDLAYQEFAPVDFCNHCQTTLAREQVWGDERLCERCGNTVIRKELNQWKLRITNYADELLDFDGLDWPERVRLMQTNWIGRSNGVEFDIYLDLPGGLQFRVFTTRPDTVFGMTFCVLAPEHELVEQIVTDDQKEEVSIYCENAMRKDEIERMSESQEKDGVFTGAYAINPLNGDRVPVWVAEYVLAGYGTGAIMGVPAHDQRDFLFARRYDIPTPVVVVPEDHDQPIPEGSELEEALLVKEGSKMVNSNEFNGLVWPEGFDRVVQAIEDKGIGKKQVNYRLRDWLISRQRMWGTPIPVIHCKNCGAVPVPYEDLPVMLPDDAEFKPTGESPLKYHPGFLNTECPKCGGSAERETDTMDTFICSSWYYYGYVSPYWKKSEKLKKKDLPWDPKAIEKWCPVNQYTGGIEHATMHLLYFRFSP

SEQ ID NO: 190224 - protein, 187 aa, Unknown
  Bacterial polypetide isolated from the Sargasso Sea
MNEYNFQKIESKWQNHWSENNSIKCDINSKEKNFYNLCMYPYPSGDLHMGHIRNYTIGDVITRYKMLNGYNVLSPMGWDSFGLPAENAAIKTGIHPKTFTEERINNMKDQIIRLGSLYEWDREVSAHSKDYYKWTQFIFIKLYKNKLAYKKDAPVNWCDSCKTVLANEQVIEGNCDRCDAVVDQKNL

SEQ ID NO: 190225 - protein, 434 aa, Unknown
  Bacterial polypetide isolated from the Sargasso Sea
GAIFGCPAHDQRDFDFAKKYNLEIIRVISDGKDKRLEEAYTENGLLVNSSFLNGLEVDKAKQKIIDKIEIEKMGKKKTLFRLKDWGISRQRYWGCPIPMIYLKDGSVKPVDKSELPVMLPEDIDLESQGNPLDSHPTWKKTKHKKTGEMAVRETDTLDTFVDSSWYFLRFCSPNHKDAPFDSKDINYWMPVDQYIGGVEHAILHLLYSRFFTKGINQVRRDFNIDEPFKNLFTQGMVCHETYKDNKGNWLYPEEIEKIDNNNAVKASDKSKVVIGASESMSKSKKNTVDPESMIKIYGADAVRWFILSDSPPEKDVQWSDVGVLSANKFLQKLWNLNLLIINREETKNNENLLKKFNSEITKLIGKIDTSIKEFKFNVSIALFYETYKTINNFQKEEINKKSLIENLTKVMKLMLPFVPHLANECLELLNCKNK

SEQ ID NO: 190226 - protein, 475 aa, Unknown
  Bacterial polypetide isolated from the Sargasso Sea
NEQVIDGKGWRSGAVVERKKLNQWFFNISKFSQKLLDDLEELNEWPNKVKVMQKNWIGKSYGCEVNFKIEGDIPVSEIKCFTTRPDTLFGFSFLAISADHEISKFFVNDEEFNKFKRECSKTGTTEEAIAMGEKIGFKTNLLAINPLNPKQKVPVYFANFVLMDYGFGAVFGCPAHDQRDFDFAKKYKLEIKTVVRPKDKDNNYEVIDKAYDGDGIIINSEFLNGLKVPEESIIKTIDILEKKKFGKKQINFRLKDWGVSRQRYWGCPIPVAYDNDGKVVAIPKKDLPVKLPENVDLNAKGNPLNTKNDWKKVNVNGKDLVRETDTLDTFVCSSWYYLRFCSPKENDYGFNQQEIDYWMPVDQYIGGIEHAILHLLYSRFFMKALGFKNKKFNIEEPFKGLFTQGMVCHETYKDQNNNWISPEEIEIRGKKYYKKNDPNSIVIVGPSESMSKSKKNVIDPESIINNYGADSVRLF

SEQ ID NO: 190227 - protein, 356 aa, Unknown
  Bacterial polypetide isolated from the Sargasso Sea
DLEQLEEWPDQVRAMQANWIGRSEGVEITFDLASAVNDIADLTVYTTRPDTFYGVTYVAVAAQHPLAEFAAKSNPDLAAFIDECKNTKVAEAELATMEKKGFATGFEVVHPLTGEKLPIWVANFVLMDYGSGAVMAVPGHDQRDWEFATKYNLPIQQVIAPNAGDEDKCDLTASAFTEKGSLINSAKFDGLEFDAAFNGIADELESKGCGKRKVNYRLRDWGVSRQRYWGAPIPMLNLENGESVPVPADQLPVVLPEDVEMNGVTSPIKADPEWAKTTYNGEAALRETDTFDTFMESSWYYARYACATNNDAMLDPTSANYWLPVDQYIGGIEHAILHLLYSRFFTSCYAMKAWVT

SEQ ID NO: 190228 - protein, 323 aa, Unknown
  Bacterial polypetide isolated from the Sargasso Sea
MRRASARLHRRVVTSSAARSSPSARVGGADARRCVSTRDAATTRARAVAPASSDAEGAASESAGGYPFATIEPKWQRFWSSERTFKTPREVDTSKPKFYALDMFPYPSGAGLHVGHPEGYTATDIVARYKRMTGHNVLHPMGWDAFGLPAEQYAIETGTHPSVTTKTNVGRFREQLQSLGFSYDWDREVATCDATYYKWTQWIFLRLLEKDLAYQAEVPVNWCPALGTVLANEEVIDGLSERGNHPVIRKPMKQWMLKITEYADRLLEDLDELDWPDSIKEMQRNWIGKSEGAQLSFSVDGFAADAEKLEVYTTRPDTLFGAT

SEQ ID NO: 190229 - protein, 632 aa, Unknown
  Bacterial polypetide isolated from the Sargasso Sea
MDKVNVKEIDKKWQDFWSNNKKVLKIKDKKKKFYCLEMFPYPSGKIHMGHVRNYTIGDVLARYKKLCGFNVLHPMGWDSFGMPAENAARENKLDPRKWTQENIATMKRQLQSLGLSIDWDKEISTCDEEYYKHQQSLFIDLFNKGLVVRKETYVNWDPVEETVLANEQVINGRGWRSNAVVERKKLSQWFFNISRFSDELLSDLETLTGWPEKVKLMQKNWIGKSTGCEIDFEISEKEKLKIFTTRPDTIFGATFLAISVDHPLCKKFESQKEFIQFREKTSKVGTTEEAIANAEKIGFNTGLKARHPFIKNKNIPVYVANFILMDYGTGAIFGCPAHDQRDFDFAKKYNLEIIKVVEDKTKEKEKELKEAYVGDGKLINSEFLNNLNVDEAKDKIIDKVQKNKIGKKKITFRLKDWGISRQRYWGCPIPMIYLKDGTVIPVEKSELPVRLPDDVDLSSKGNPLENHPSWKKTKYKKTGESATRETDTLDTFVDSSWYFIRFCSPKLKDMPFDKDLLSYWMPVDQYIGGVEHAILHLLYSRFFMRAIKLNDEKIKIKEPFKGLFTQGMVCHETYKTKDGNWISPDEIDKTNKSEIIVGPPEAMSKSKKNVVDPESMIKIYGADAIRWFMLSR

SEQ ID NO: 190230 - protein, 489 aa, Unknown
  Bacterial polypetide isolated from the Sargasso Sea
QNLASENDDINQFIKKCNEMKMAEADMAKAEKLGFKTSVKAKHPLSGIDLEVWIANYVLMDYGTGVVMGVPAHDERDFEFAQKYEIPIKQVIEADDLPSSAKGKLINSDDFNGEESDEAIDNINSLIEKNGIGNSIINYRLRDWGVSRQRFWGCPIPVIYEKDKPIFLRGNELPVELPKMKAGDSPKPLNQNKNFYDLGNGKSREVDTFDTFVDSSWYYARFTTAGNNKKAFDENSEYWLPVDIYIGGIEHAILHLLYSRFFHKAMRDMGLVNGDEPFKKLLTQGMVLKDGTKMSKSKGNTVDPQKYIDHYGADTIRLYMMFTAPPEQSLEWSDSAIEGASRFLKKFWRLCENRTNTDYQNIPSDFQQSHLDLRAKTHNTIKKVTTDYEDRNSFNTVIAAIMELINAIPEEFKSSEATSTDIFCLNEVINVSLQMLSPIVPHITFDIWTRFNPHLDPKLFEKSWPAFDQKLTEKDDFELIIQVNGKVRG

SEQ ID NO: 190231 - protein, 525 aa, Unknown
  Bacterial polypetide isolated from the Sargasso Sea
ADVEQKKLSQWFFNITDFAEDLLKSLDELKKWPEKVKTMQKNWIGKSVGCEITFKIFSGNLKLKNSHLKIFTTRPDTIFGATFCALSPFHPLVDELIENNKAISNEVAKLRSQKINEESISKNEKIGIDTGIFIEHPFIKGKQLPIYIANFILMDYGSGAIYGCPAHDQRDLDFANKYSLEIIQVINPTSNEEFDRKNAITDDGTLMNSDFINGLNVPDAKETIINKLVELNIGEQKINYRLRDWGISRQRYWGCPIPIMYREDGEVIEVPEDELPIKLPEDVDLSIPGNPLDNHPTWKYTKCPKTGMNAIRETDTLDTFVDSAWYFLRFCSPNSNNPFDELESKYWMPVDQYVGGVEHAILHLLYARFFTKALGKENLIEPFESLFTQGMVCHHTYKNDSGNWVFPEDVKKEGNKLSQISTGETVNEGPIESMSKSKKNVIDPETIIRSFGADAARWFVLSDSPPEKDINWSESGIQGSWKICQKIWTLVNENKKYLSSKDYSENMTLSDEARELMYLINQNLE

SEQ ID NO: 190232 - protein, 424 aa, Unknown
  Bacterial polypetide isolated from the Sargasso Sea
SDGVFSLNDLKVKDAIENTISYLEKIQKGKRAVEYKLRDWLFSRQRYWGEPFPIIHLEKGYKPVSEEELPVLLPDVEKYQPTGTGESPLAAIDEWVNTIDTETNTPATRETHTMPQWAGSCWYYLRFLDPNNDNKPWDKDAEKYWMPVDLYIGGIEHAVLHLLYSRFWHHVLHDLGLVSTREPYKKLFNQGMIQGEDGQKMSKSRGNVINPDDVIEEYGADSMRLYEMFMGPLDKSKPWSTKGLQGCARFAKKVWKVFNNTDKHSDQKESDDTTRLLHQTIAKVSNDLDNLRFNTAISQMMIFTNHLQEQETINKGTLNTFLLLLNPFIPHMSEELNEQMDSFESLSYAQWPNFDENLAKEDLITIAIQVNGKLRGSIQVADDIDDKTLKSKSSKIDSVKKYLDGKEIIKKIIVPGRLVNFVVK

SEQ ID NO: 190233 - protein, 96 aa, Unknown
  Bacterial polypetide isolated from the Sargasso Sea
MERYNFKKTEKKWQDYWDKNKSFKCEINKNKKKFYCLEMFPYPSGKIHMGHVRNYTIGDVLSRFKSMEGFNVLHPMGWDSFGMPAENAAKENNLHP

SEQ ID NO: 190234 - protein, 603 aa, Unknown
  Bacterial polypetide isolated from the Sargasso Sea
MNDFDFQQIEKKWQDYWSESNIIECDLDSEKPKFYNLCMYPYPSGDLHMGHVRNYTIGDVITRYKLLNGFNVLSPMGWDSFGLPAENAAIKTGIHPREFTEERIENMKDQIIRLGSLYDWDRELAAHSEDYYKWTQFLFIKLFESGLAYKKDAPVNWCDSCTTVLANEQVIDGNCERCDTEVSPKNLNQWFLKISNYSDELLSGLEKIGDWPENVKTMQKNWIGKSEGAQFQLNVSNSDISFEVFTTRPDTLFGMTFAVISPEHELMEKIIEISDNKTEIKEYIEKAKSKSEFERMSISKEKTGVDTHLKVINPMTKEEVPLWIADYVLINYGTGAIMAVPAHDQRDYDFAKKYNIEIRQVIMNMETKKDIEKEAYVGEGVLINSGEFNDLNSHVDASENIITYLEKNKIGDKKTTFRLRDWLISRQRYWGCPIPLINCESCGLIPEDVTKLPVVLPEIENYINTDGSPLSKSEEFINAECPKCKIPGIRETDTMDTFVDSSWYYLRFLDSKNDEEPFKSEFINNWLPVDQYIGGVEHAILHLLYSRFFVKALRDLGIIEIDEPFNNLFSQGMINFEGAKMSKSKGNIVDPEAYFKSHGADAL

SEQ ID NO: 190235 - protein, 812 aa, Unknown
  Bacterial polypetide isolated from the Sargasso Sea
MNSQFEYKKIEKKWQNHWENSETVKCDLKSEKPKFYNLCMYPYPSGDLHMGHIRNYTIGDVITRYKQMNGFNVLSPMGWDSFGLPAENAAIKTGIHPREFTEERIANMKSQIIRLGSLYDWDREVAAHSVDYYKWTQNLFIKLFENDLAYKEDAPVNWCNSCRTVLANEQVIEGSCERCDTAVEPKNLNQWFLKISEYSEELLQGLEEIGDWPENVKTMQRNWIGKSEGSQFELNIIGTDLSFDVFTTRPDTLFGMTFAVISPEHELIDLIMEQSEKKDEIQNYLDSIVNKSEFERMSITKEKTGVDTTLKVTNPITNEEVPLWIADYVLVNYGTGAIMAVPAHDERDYEFAKKYDIEIRQVIIDKEKTINVDNEAFTGNGVLMNSGEFNDLSSHEEASKKINEFLVKNKIGDEKTTYRLRDWLISRQRYWGCPIPLINCEDCGLLPEKYENLPVLLPEIKDYINTDGSPLSKSKEFVETDCPKCSKKALRETDTMDTFVDSSWYYMRFLDPKNEKEPFNSNFINEWLPVDQYIGGVEHAILHLLYSRFFVKALRDLGLMTIDEPFHNLFSQGMINFGGAKMSKSKGNIVDPEEYFATHGADALRLYILFMAPPSDGVEWNDGGIEGTKRFLNKLWDNLLKIINQEDIEKELSEDDKSLERKINQTIKSVTQHFEKFEFNTAVSDLMKFNNDLSEYLKHESILPKELKDVLIKNILILLYPMSPHMASEIYESYFDSDISTEKWANFDDSKLENPMYELVVQINGKKKHAIMVETGIEEDDAITLCESNFDINFKEAKKIIFIKDKIINVVQ

SEQ ID NO: 190236 - protein, 618 aa, Unknown
  Bacterial polypetide isolated from the Sargasso Sea
MKEYDPKVIDQSIQDYWDSNNAFEVDPDTNKDKFYCLSMLPYPSGKIHMGHVRNYTIGDLISRFNIRLGKCVMQPMGWDAFGLPAENAAIENKVSPKDWTYQNIETMRSQLKQLGFAYDWRREFSTCDESYYKWEQDLFCKMFEKGLVIREKAEVNWDPVDKTVLANEQVIDGRGWRSGAPVEKKFLNQWSLKITDYADELLSELRNLSGWPEQVKLMQENWIGKSKGMVFQFENSVIDKPIEVFTTRPDTIMGVSFIALSSEHEITKRKLSENEDLQLWIEEKSKVKKAEKDQALQEKKGFFLNEFAYHPVTKEKIPIWVANFVLSDYGSGALMGVPGHDQRDFEFATKYSLPIVRVISSENEDSDQASTDKGKLINSGQFDGLSFEDAFIKIQKFAEQNNFGRFEENFRLRNWGVSRQRSWGAPIPMMISENEDDNDAIPFSDLSDDELKAESIERNGKKYVKEKDTLDTFFESSWYYARYASFKSDKDILDDEANYWLPVDQYIGGIEHAILHLLYSRFFCKVLNELGYLDTREPFTNLLCQGMVLMDGAKMSKSKGNVVNPDDLIEEYGADSLRLFMMFAAPPEQSLEWSDSGIKGSFKFINKLWTMSQKHFST

SEQ ID NO: 190237 - protein, 231 aa, Unknown
  Bacterial polypetide isolated from the Sargasso Sea
EEMIQNYGADTVRLFMMFTSPPEQSLEWSDTAINGSYRFLKKLWKLIKTHQDSIKDIPGISSNEKFNGNQNKLRRKTHQTISKVTDDIGRRYTFNTAIAAVMELVNEVSAFNVDDELDRKVIKEAIESILLLLSPIVPHICHQLWLDINHDQPIIDARWPKFDSSLLKSETSLIVVQVNGKLRSKLEVDASISEDELRSMALSDEKVVRFIDGNEIKKIIVIPEKLVNIVV

SEQ ID NO: 190238 - protein, 793 aa, Unknown
  Bacterial polypetide isolated from the Sargasso Sea
MKIEYDHSKIEKDIQSKWDKSNAFTAKIDNEKPKYYCLSMLPYPSGNLHMGHVRNYAIGDAVSRYKRLKGFNVLQPMGWDAFGLPAENAAKGKNIHPKDWTEKNIKNMREQLKSLGFSYDWSKELNTSDVSYYKFEQELFLKFYERGLAYRKKSLVNWDPVDKTVLANEQVIDGKGWRTGAEVELKEIDTWFLKITDYADELEESLATIDWPENVINMQKNWIGKSKGVEIKFTTDTNKEIKAFTTRPDTLFGVTFFGISPNHPIVKELSKNDKDLVEFLSEIKKVSSAEADLAKAEKLGYKTEINIVHPITEKKIPVWIINYVLMDYGTGAIMGVPGHDERDFEFAQKYEIPITRVIDSKDELPYSGQGKLVNSKDFDGLDSDKAFDEVTKKLEKNNAAKILYQYRLRDWGVSRQRYWGCPIPIIYKDGKAMPSEELPVELPVSVDGEYSPLHQNEEFKKADNGFERETDTFDTFMESSWYFARYTSATNDKEIFDENTKYWLPVDLYIGGVEHAILHLLYSRFFFKALRDMNIVEGDEPFKKLLTQGMVLKDGAKMSKSKGNTVDPKEYVTNYGADSIRTFMIFASPPEQSLEWSDNGLEGCHKFLKRLWNLSININELDEEQFKDNKNNLTDECKKLFKKINDDYEKRLNLNTIVSSCMEILNNINGRFDDKNVNCSKEDLLSVYDFLLLALYPIAPHICETLYAEVLKKDIAQAKWPEDNFFVANLSESNYLVQVNGKLRANIMMPIDLKEDEVKEIALTNENVARHLENKNIIKVIFIKNKLINFVHS

SEQ ID NO: 190239 - protein, 320 aa, Unknown
  Bacterial polypetide isolated from the Sargasso Sea
MSEYVPKEIEAKWQKSWEESGSFEPDFETEKSRYYMLTMLPYPSGDLHIGHWYAMAPSDTYARFLKMQGNEVFFPIGFDAFGLPAENAAIKNNIHPKDWTYKNIERMRLQLRSMGNMFAWKNEVVSCDPDYYKWSQWFFLRMLEMDLAYREFAPVDFCNHCQTTLAREQVWGDERLCERCGNTVIRKELNQWKLRITNYADELLDFDGLDWPERVRLMQTNWIGRSNGVEFDIDLDLPGDLKFRVFTTRPDTVFGMTFCVLAPEHELVEQIVTDDQKEEVSIYCENAMRKDEIERMSESQEKDGVFTGAYAHHPLNGDRV

SEQ ID NO: 190240 - protein, 349 aa, Unknown
  Bacterial polypetide isolated from the Sargasso Sea
FESSWYYLRYCNPRNSEPFLKEDINYWLPVDQYIGGIEHAILHLLYSRFFVKALRDLGYVNIDEPFEGLFTQGMVTHQTYKSKDGGWLAPDEVIRENDNFVDLKNSHVSVGKIEKMSKSKKNVIDPSKTIDMYGADTARWFMLSDSPPERDLEWTEFGISSSYKFINKIWELSSVLFLNNYNEKNDSDDNKIKTDINNTIKKVTDNIDLFHYNKAIANIHEFINSAQKFIINKTISKKEAIDSFKKLSLIIQPFIPHLSEEIWQKFGGEGLAIEQDWPQVNESLLVKNFNIAIQINGKTKDVLSATKELDKDSVVNILKENNKISRLLKDKRIVKTIYVSGKIINFVTN

SEQ ID NO: 190241 - protein, 510 aa, Unknown
  Bacterial polypetide isolated from the Sargasso Sea
LKLDLKLFTPLQKKKLPIWIANFVLSDYGSGALMAVPGHDQRDFEFAKKYNLPIKQVIEGNEKDDINKEAILEKNKLINSDEFNGLSFEEAFKAIEKKAIELNCGKESTNFRLRDWGVSRQRYWGSPIPILKDEKGFVPAKDLPVKLPLEVKFKGVNSPLKDMKEFIDIEQDGKSLKRETDTFDTFFESSWYYARFASFDSENSMLDDRAKYWLPVDQYIGGIEHAVLHLLYSRFFFRCLRDLGIVEGDEPFKNLLCQGMVLKDGSKMSKSKGNTVDPADLIQKYGADTVRLFVMFAAPPDQSLEWSDQGVQGAYRFINRIWKLVHTHINAEIPDTTEIESEDPEIKKLRLKTHQVLKKVKDDYLRRHSFNTAIAAIMELSNNIPNEFLLADAVTDKRKAADEAIKAIILMLSPITPHLSQHLWWQLDQDSLIVDAQWPEAKEEMLEEDVVKIVIQVNGKLRSEIDVDLDLPEEEIKKIALEDKNIKKHISDSEIKKVIYVPEKLINIVL

SEQ ID NO: 190242 - protein, 84 aa, Unknown
  Bacterial polypetide isolated from the Sargasso Sea
MTESYNPKIVEKAAQSFWYEKNSFAVKESEKPKYYCLSMFPYPSGKLHMGHVRNYTIGDVISRFKRMRGFNVLQPMGWDSFGLP

SEQ ID NO: 190243 - protein, 449 aa, Unknown
  Bacterial polypetide isolated from the Sargasso Sea
MSSTYNPKFIEKKIQKKWDQEKRYESKIDNREKYYCLSMFPYPSGKLHMGHVRNYTIGDVISRYKRMKNFNVFQPMGWDAFGLPAENAAIANKVSPKEWTDKNIENMKAQLRSLGFSYDWSKELRTCDSKYYKWEQLIFKKFFDAGLVYRKKSLVNWDPVDETVLANEQVIDGKGWRSGAQIEIKEVDQWFIRITKYADELLNSLDDLDWPENVKLMQKNWIGKSKGAEIKYKIENSDDCLIAFSTRPDTIFGVSFLAIAPNHPIAIQLSNKNKEIKEFLNKCKEIKAAEADIAKAEKLGIDTNIKVIHPFTKEKIPLWIGNFVLLEYGTGVVMGVPGHDSRDYEFAKKYELQINQVIDTGEKSLPIVEKGKLINSKKYDGMTSDEAIKEIINDLVKMNSGSELIQFRLRDWGVSRQRYWGCPIPVIYEEESPKVIEKEEMPIELPALR

SEQ ID NO: 190244 - protein, 460 aa, Unknown
  Bacterial polypetide isolated from the Sargasso Sea
RKKLNQWFFNISKFADELLEGLEELKNWPNKVKIMQKNWIGKSFGCEIDFKIEGNPSIDNIKCFTTRPDTLFGFSFLALSPDHPIAKNFENDKKFQKFKEECSKTGTTEESLAMAEKIGFKTNLFAINPLNKKEKVPVYFANFVLMDYGFGAIFGCPGHDQRDLDFAIKYNLPVKTVVKPDNVDDFKVENEAYTGSGVIINSDFLNGLKAPEESIIKTIEILEKDKIGTRKINFRLKDWGVSRQRYWGCPIPIAYDEKGEIIKLPKEELPVKLPSKINLNTKGNPLDNHKDWKKIKINGKNYIRETDTLDTFVDSSWYFLRFCSPKNDNYGFDINDINYWMPVDQYIGGVEHAILHLLYSRFFMRSINYKNANFKITEPFEGLFTQGMVCHETYKDLDNNWYSPEEIEIRDKNYYKKDDPNSKIIVGPSESMSKSKKNVIDPQNKINNYGADSVRLFIFQ

SEQ ID NO: 190245 - protein, 308 aa, Unknown
  Bacterial polypetide isolated from the Sargasso Sea
RYDNEIFDENTNYWLPVDLYIGGIEHAILHLLYSRFFHKALRDIGLLDGDEPFKRLLTQGMVLKDGAKMSKSKGNTVDPQPYIEKYGADTVRLYMMFTSPPEQSLEWSESSVEGAARFLKKIWNLVNDRQNVELNNKFDFSKDELELRRKSHSTLKKVEHDYEVRFSFNTAIAAIMELLNSIPESYKEENATDSQKFCLNEAIVFSLKMLSPIAPHICEHLWNNFQTNESCIESSWPKFDEDIIESEEFELIIQVNGKVRGKINIDKNLEEEEIKNIALEVDNVSNNIGENQIKKVIYVKDKLINFVI

SEQ ID NO: 190246 - protein, 484 aa, Unknown
  Bacterial polypetide isolated from the Sargasso Sea
FFIDMFKAGLAYKKEAEVNWDPVDKTVLANEQVIDGKGWRSGAVVEKKKLSQWFLKISKYSDELLKDLDNLENWPNKVKIMQSNWIGKSIGAEIDFHVSEGETKIKIFTTRPDTIYGATFLALSSEHELVTKISKNNDSLKKFIKDCETINPDKVKRGFDTGLFANHPFIEGKKLQIFVANFVLKEYGLGAIFGCPAHDQRDLDFAREYNLDVIPVVKPTNITGNNFKITTEAFTDDGVMINSPSINGLSINDAKDKIIENIEKKKIGRRKINFKLRDWGISRQRFWGCPIPIIYREDGEILAVEETELPVKLPDIKNFTESSSALKNISDWKETVCPKTGLKAIRETDTFDTFFESSWYYFRYCNARLEKPFDRKDIDYWLPVDQYIGGIEHAILHLLYSRFFTKALRDLNYFNLDEPFKGLFTQGMVTHVTYKNKNGDWLEPKDVEIVNGAFKDNNGQEVRTGKIEKMSKSKKNVVDPNEYY

SEQ ID NO: 190247 - protein, 118 aa, Unknown
  Bacterial polypetide isolated from the Sargasso Sea
MSATEYNPSEVEKIIQKSWKENNSYKATPSKTKEKFYCLSMFPYPSGKLHMGHVRNYTIGDVISRFKRMQGFNVFQPMGWDAFGLPAENAAIKNKVDPQSWTEQNIENMKSQLERLGF

SEQ ID NO: 190248 - protein, 896 aa, Unknown
  Bacterial polypetide isolated from the Sargasso Sea
MSYNFIEIEEKWQKYWLDNKTFKADNNSEKPKYYVLDMFPYPSGSGLHVGHPLGYIASDIVSRFKRCKGFNVLHPMGFDSFGLPAEQYAVKTGKHPKKTTEENVVRFKNQLDKLGLSFDWDREIKTSDSSYYRWTQWIFLKLFNSYYDQELNKAQPIEKLKIPKNLNDEEKESFVDSKRLAYVDTIDVNWCEELGTVLANEEVIGGLSERGGFPVVKRPMKQWVMRITDYADRLLDDLSELDWPESIKLSQQNWIGKSEGAEIKFSIDNNNSIEVFTTRPDTIFGATYLVLAPEHPLINHITTDEYRESISYYVEQASKKSDLERQENEKNKTGVFTGAFALNPISNEKIPVWISDYVLFSYGTGAIMAVPAHDERDNEFAKKFNLKITKVINGGNSDECYTGNGSMINCGEYDGIDNIKFKSIVVEKLVNENKGNKTTNYKLRDWIFTRQRYWGEPIPIIYDGNKKKALEFNELPLELPEVESYLPTNDGLSPLARNKDWVNISINGKNYKRETNTMPQWAGSCWYFLRFIDPENKNEFANKNLIKYWMPVDLYIGGAEHAVLHLLYARFWHKVLYDLGYVSSTEPFKKLVNQGMILGNSAFAHRIKNTNDFISFDMIKDEKTQKIHVDISFVDEKNRLNIERLKQNNPEFNGVNFIKGESFYVSRDIEKMSKSRYNVISPDDICKRYGADTLRMYEMFLGPIDQSKPWNTAGISGVFSFLNKFWNLFHINEKFYVSDEQSSDEALKIYHKTVKKIVNDIDKFSFNTSVSAFMICINELSSIGCNSRNILSNLCILLSPFAPHICEEIWSLLGNDKSISYEKYPEFDEKFLEESVIEYPVSFNGKLRFRISLQSNIELKEVESLVNNHELTNKYLDGKSIKKIIFVPKKIINVVC

SEQ ID NO: 190249 - protein, 442 aa, Unknown
  Bacterial polypetide isolated from the Sargasso Sea
MSNTQRYNFKEVEIKWQNFWEKNKSFKAKIDLNKKKFYCLEMFPYPSGKIHMGHVRNYTIGDVLARYKSLEGFNVLHPMGWDSFGMPAENAAKENNLNPKNWTEENISIMKSQLKKMGLSIDWEREISTCSPDYYKHQQKIFLDLFDKDLVYRKESYVNWDPVDNTVLANEQVIDGKGWRSGAPVERKKLNQWFFKISNFSEELLKDLKNLDNWPEKVKIMQENWIGKSFGCEVDFKIEGSKNIQFIKCYTTRPDTLFGFSFLALSVDHPLSKYYEEDQKFQEFKKKCSKTGTTEESIAQAEKIGFKTNLLAVNPLDPSNKVPVYFANFVLMDYGFGAVFGCPAHDQRDFDFAKKYNLEIKTVVKPNDKGDDFKVLDEAYSGPGRIINSKFLDGLMVPNDSVNETIKILEKKKIGKKKINYRLKDWGISRQRYWGMSNTYYL

SEQ ID NO: 190250 - protein, 296 aa, Unknown
  Bacterial polypetide isolated from the Sargasso Sea
MDRYNFKLVEKKWQDYWEQNKSFKTKEDKKKKKFYCLEMFPYPSGKIHMGHVRNYTIGDVLSRYKTMLGFNVLHPMGWDSFGLPAENAAKQNNLDPKIWTERNISVMKNQLKKLGLSIDWDREISTCSKEYYKHQQKFFLDLYDKGLVYRKESYVNWDPVEKSVLANEQVIDGKGWRSGSTVERKKLNQWFFNISKFSDELLSGLDNLEDWPNKVKTMQKNWIGKSFGCEIDFNLEKNDQVGSIKCFTTRPDTLFGMSFLAVSTDHPISKFYQNRDDFKKFKEKCSKTGTTEEAIA

SEQ ID NO: 190251 - protein, 147 aa, Unknown
  Bacterial polypetide isolated from the Sargasso Sea
DDLGRRQTFNTAVAAIMELLNHLQKAPQDDVQDIAIMREATESVLLLLNPITPHIAHELWKVLGHNEDIDIAPWPEVDKDALVEDEKLIIVQVNGKVRAKMTIAADASKEDIEASALAQSNVQQFIDEKTIRKVIVVPGKLVNIVAN

SEQ ID NO: 190252 - protein, 859 aa, Unknown
  Bacterial polypetide isolated from the Sargasso Sea
MQEQYNPSEIEALVQKHWHDNKTFEVTEDANKEKFYCLSMFPYPSGRLHMGHVRNYTIGDVVARFQRLQGKNVLQPIGWDSFGLPAENAAINNKTAPAPWTYQNIEYMKNQLKLLGFGYDWSREIATCTPEYYRWEQWFFTKLYEKGLVYKKTASVNWCPNDETVLANEQVQDGCCWRCDTPVEQKEIPQWFIKITAYAEELLNDIDTLDGWPEQVKTMQRNWIGRSEGVEMTFGVAGSDKSFDIYTTRPDTLMGVTYVAIAAGHQLAEIAAQTNPELAAFIDECKNSTTSEAELATMEKRGVATGLYAIHPITGKQVPIWAANFVLMNYGTGAVMSVPGHDQRDYEFAKKYNLPIEAVIKPVDGELDISEAAYTEKGVLFNSGEFDGLDFDGAFNAIADKLVAEGKGKRQVNYRLRDWGVSRQRYWGAPIPMVTLADGTVIPTPEDQLPVILPEDVVMDGIQSPIKADKEWAKTQVNGQDALRETDTFDTFMESSWYYARYCSPQADQMLDPTKANYWLPVDQYIGGIEHACMHLLYFRFFHKLLRDAGLVNTNEPAKQLLTQGMVLADAYYYTNDKGARVWVSPLDVVTTEKDDKGRVTKAIDKDGNELVYTGMCKMSKSKNNGIDPQVMVEKYGADTVRLFMMFASPPELTLEWQESGVEGAHRFIKRLWKLASDYVAQDNSEALDVSKLTSEQKALRREVHKTIAKVTDDIGRRQMFNTAVAAVMELMNHLQKAPQTTGQDRAIIGEALTAVVRLLYPIIPHVSFTLWNELGNTNSIEDSQWPVVDESALVEDSKLIVVQVNGKVRAKITVAADADQASVEALGMADEQVIKYLDGVTVRKVIYVPGKLLSIVAN

SEQ ID NO: 190253 - protein, 483 aa, Unknown
  Bacterial polypetide isolated from the Sargasso Sea
CLKLNNLHPKEWTNKNIKVMKDQLKMLGLSIDWDLEISTCDKEYYKHQQELFIEFYNQGLVSRKETYVNWDPVEKTVLANEQVINGKGWRSNAVVERKKLSQWFFNITKFSEELLNDLENLNGWPEKVKLMQKNWIGKSYGCEIIFNIEKSEDKINVFTTRPDTIFGASFICLSADHPLNKNFLEREDFKKFKKLCDKTGTTEESLANAEKIGYKTDLFVKHPFIAEKKLPVYFANFVLMDYGSGAIFGCPAHDQRDFDFAKKYKLEITQVVSDGNDKKILSEAYTGPGKMINSDFLNGLEYNKAKEKIIDKIEQNKLGKRKTLFRLKDWGISRQRYWGCPIPMIYLEDGSVVPVDKSELPIELPDDIDLSSQGNPLESHPTWKNTTQKSTGKKAIRETDTLDTFVDSSWYFLRFCSPNYKNAPFDEKKINYWMPVDQYIGGIEHAILHLLYSRFFTKGINKFNKNLELSEPFKNLFTQGMVC

SEQ ID NO: 190254 - protein, 573 aa, Unknown
  Bacterial polypetide isolated from the Sargasso Sea
HVRNYTIGDVLSRYKTLKGFNVLHPMGWDSFGMPAENAAKQNNLNPKDWTEENIKAMKTQLKLLGLSIDWDREISTCSPDYYKHQQKIFLDLYDKGLVYRKESYVNWDPVDKTVLANEQVIDGKGWRSGAIVERKKLNQWFFKISHFSEDLLNELNNLDSWPNKVKIMQKNWIGKSFGCEIDFKIEGSKNVKSIKCYTTRPDTLFGFSFLALSVDHPLSKYYEKNEDFIKFKKECSKTGTTEESIAQATKIGFKTDLHAVNPLNETSKVPVYFANFVLMDYGFGAVFGCPAHDQRDFDFAKKYDLKIKTVVKPINEDDDYQVQKEAYTGTGTLINSQFLNGLSVPEKSIDETIKILENKNLGKRKTNYRLKDWGISRQRYWGCPIPIAYDENNNVLKIPEKDLPVKLPETIELNTNGNPLDVQTDWKKVKINGKICTRETDTLDTFVDSSWYFLRFCSAKNVNKPFEKNEIDYWMPVDQYIGGVEHAILHLLYSRFFMRAISLNNKETNLKEPFKGLFTQGMVCHRTFKDENKNWVYPDEVFTDDGKNYYQIKNPSKKVIIGPSESMSKSKKN

SEQ ID NO: 190255 - protein, 481 aa, Unknown
  Bacterial polypetide isolated from the Sargasso Sea
VPAHDQRDWEFATKYGIDIKQVIESISDQPAEISSGAFVERGRLINSGAYSDLSFEEAFDQIASALAGKGLGRKTSNFRLRDWGVSRQRYWGCPIPMIHCDDCGVVPVPEKDLPVVLPTEVKFEGVQSPLVKMESFLTVGCPVCGGQARRETDTFDTFIDSSWYYARFASANNPGSMVDSNVDDWTPVDHYVGGIEHAILHLLYSRFFYKLMRDEGLVKADEPFKKLLMLGMVLQDGKKMSKSSGDAGDPQKLLDKYGADAVRTAMMFAAPPDQSFEWSEAGLEGALRFLRRLWSLVERLAADGAAADVVHSELNDSARELRKKAYEALARADDDFGRRVQFNTVVSGVMELCNAVSKFDCKTEHDRAVVSEALKFAVQILSPIAPHICEKLWSRLGGEGTLVSRAWPPMVDEALEVSQVELVVQVNGKVRGKILVPGDASEEAVLLAAKENENVLRSINNQTIRKEILVPGRLVNLVVSG

SEQ ID NO: 190256 - protein, 325 aa, Unknown
  Bacterial polypetide isolated from the Sargasso Sea
MSYDHKSIESKWQKFWLENQTFKSEDISANKPKYYVLDMFPYPSGAGLHVGHALGYVATDIVARYKRMKGFNVLHPMGWDAFGLPAEQYAIKTGTHPKETTQHNVSNFKKQINSLGFSYDWSREINTTDPNYYKWTQWIFMQLYNKGLAYEQEVAVNWCPELKAVLANEEVVNGKSDIGGHPVVRLPMRQWILKITDYAESLLDGLDDLDWPENIKELQKNWIGKSEGVELGFEIDGHNDTINVYTTRPDTLFGASYMVLAPEHTLIHSIVTDGQRSKVEAYIDETKKKSDFDRTEVNKDKTGVFTGSYAINPFSKEKIEIWIAD

SEQ ID NO: 190257 - protein, 363 aa, Unknown
  Bacterial polypetide isolated from the Sargasso Sea
MSLKEYNPKRIENLIQESWKLNDSYKAKVSKTKEKFYCLSMFPYPSGKLHMGHVRNYTIGDVISRFKRMQGFNVLQPMGWDAFGLPAENAAIQNKVDPQSWTEQNIESMKMQLERLGFSYDWSKEIKTCDPNYFKWEQQIFTKLAQNGLVYRKKSLVNWDPVDETVLANEQVIDGKGWRSGATVELKEIDQWFLKITDYADELLSSIENLDWPDNVKSMQKNWIGKSFGSEIKFNLLNNDELTAFTTRIDTIYGVTFIAISPNHPIAQNLATNNPEINEFIKQCNATKMAEADMAKADKLGLKTNLKVQHPFLDTKLDVWIANYVLMDYGTGVVMGVPAHDERDYEFAKKYNIKIKKAVKAMN

SEQ ID NO: 190258 - protein, 381 aa, Unknown
  Bacterial polypetide isolated from the Sargasso Sea
MPYDAQEIESRWQKKWSEDRVFEAEIDDSKPKFYCLEMFPYPSGHMHMGHVRNYSIGDAMARFQRLMGKNVLYPMGYDSFGMPAENAAKKEGGHPHDVTHSNISSIRSDQERMGYSYDWRRFLATSDVDYYRWNQEMFLILNERGLIERKSAPVNWCIDCDTVLANEQVRNNRCWRCGLEVVQRDMAQWFVRMTEYSDELLDELENISFPENVKAMQRNWIGRSNGAHIDFQVVDSSSVIGAFTTRPDTIFGVTFLTLSPEHPLCEELCSGSEWEEGWRGLKEECSRMSEFERVNMLKEKKGIFLGRHAINPLNDERVPIYAGNFVVSTYGTGAVMAVPGHDQRDFDFATEYDLEIRRVLEENRGGDINEPMNRAFEGYGP

SEQ ID NO: 190259 - protein, 70 aa, Unknown
  Bacterial polypetide isolated from the Sargasso Sea
MERYNFKLIESKWQNYWEKEKANKVQIDKTKKKFYCLEMFPYPSGKIHMGHVRNYTIGDVLARHKKMQGF

SEQ ID NO: 190260 - protein, 427 aa, Unknown
  Bacterial polypetide isolated from the Sargasso Sea
GFAYDWKREFATSDEDYYKWEQWFFLQLVERGLAYQEEAEVNWDPVDQTVLANEQVIDGKGWRSGADVEKKTLKQWFLKITDYAEELLEGTDKLEGWPNQVKIQQKNWIGKSEGMEFSFGIEGTKKHIEIFTTRPDTIMGASFIAISTSHYLSLEMAKENDEVKDFINELNKVKTAEADIAKQDKKGIETRFKAIHPFTKEELPIWIANFVLSDYGSGALMAVPGHDQRDFEFANKYNLPIKQVIEGNEKDDINNEAILEKNKLINSDEFNGLSFEEAFNAIEKKANELNCGKRSTNFRLRDWGVSRQRYWGSPIPMLKDEKGFIPAKDLPVKLPLEVKFKGVNSPLKDMEEFMNIEQDGKSLKRETDTFDTFFESSWYYARFASFDSENSMLDDRGKYWLPVDQYIGGIEHAVLHLLYFRFFFRCL

SEQ ID NO: 190261 - protein, 264 aa, Unknown
  Bacterial polypetide isolated from the Sargasso Sea
MERVNFHLIEKKWQEKFAKEKLYNKEGKKFYCLEMFPYPSGKIHMGHVRNYTIGDVIARFKFLKGCNVLHPMGWDAFGLPAENASKMNNVHPEKWTNQNIQTMKKQLKLLGLSIDWDLEISTCDKEYYKHQQELFIDFYNQGLVSRKETYVNWDPVEKTVLANEQVVNGKGWRSNAVVERKKLSQWFFNITKLADPLLKDLEKLSGWPEKVKLMQKNWIGKSYGCELDFELIKEKQLITVFTTRPDTIFGASFIALSNDHPLSK

SEQ ID NO: 190262 - protein, 446 aa, Unknown
  Bacterial polypetide isolated from the Sargasso Sea
YNTKIFIKHPFLDKKIPLFIANFVLMDYGLGAIFGCPAHDQRDLDFAIKYNLEVIQVVEPIKSKQISNSIKNIAILDDGMMINSGFLDGMDNEKAKKEVVKRLEKEGIGNKKINYKLRDWGISRQRYWGCPIPILYREDGSVIPVEEKELPVLLPVLSQNNPSPTKEEVDEWKNTSCPITGMKAIRETDTFDTFFESSWYFLRYCNPRLNNKPFLKEDVNYWLPVDQYVGGIEHAILHLLYSRFFTKALRDLNFLDINEPFKGLFTQGMVTHKTFKDKMGNWVEPNKVVESKGNYFDNNNEQVLVGKIEKMSKSKKNVVNPSSIIDNYGADTARWFMLSDSPPERDLEWTDVGVASSHKFINKIWETCIRAKNYKAPDGLLKTNKFNPLIKSVSENIEKFHFNKSVANIYEYVNEINKSMDKKTISSDSLKGAVKNLCIIIHPFTP

SEQ ID NO: 190263 - protein, 410 aa, Unknown
  Bacterial polypetide isolated from the Sargasso Sea
MAKFWSENQIFKSEDISTNKPKYYVLDMFPYPSGAGLHVGHALGYVATDIVARYKRMKGFNVLHPMGWDAFGLPAEQYAIKTGTHPKETTHQNVSNFKKQINSLGFSYDWSREINTTDPSYYKWTQWIFMQLYNKGLAYEQEVAVNWCPELKAVLANEEVVNGKSDIGGHPVVRLPMRQWILKITDYAESLLDGLDDLDWPENIKELQKNWIGKSEGVELGFDIDGHDDIINVYTTRPDTLFGASYIVLAPEHTLIHSIVTDEQRSKVEVYIEETKKKSDFDRTEVNKYKTGVFTGSYAINPFSKEKIEIWIADYVLISYGTGAIMAVPGHDERDWEFASKYNLPIVEVVEGGDVSKAAYTAKGNAKIINSSNDKTLSMDGLSVDQAIKEAILFIEKNSIGKATVNYKLR

SEQ ID NO: 190264 - protein, 254 aa, Unknown
  Bacterial polypetide isolated from the Sargasso Sea
MPDKDLPYEPGDIEHQVQEYWKENESFSVTEDHSKEKYFCLSMFPYPSGSIHMGHVRNYTIGDAISRFQRMLGKNVLQPMGWDAFGLPAENAAIDNKVQPSDWTSENIESMKKQLTRLGFAYDWKREFATSESDYYKWEQWFFLQMLEKGIAYQEEAEVNWDPVDQTVLANEQVIDGKGWRSGAEVEKKILKQWFLKITDYAEELLQGTDELYGWPEQVKIQQKNWIGKSEGMNFSFGIEDREAMIDSSQQDLT

SEQ ID NO: 190265 - protein, 422 aa, Unknown
  Bacterial polypetide isolated from the Sargasso Sea
MKDHIPYNPSVIEPKWQKRWKESKIYDVDLDTNSDKNFFSLTMFPYPSGDLHIGHWYAFTPADSYSRFKKMKGFNVLHTQGFDAFGLPAENAAISRNINPMKWTFDNIDNMRNQFNLMGNSYDWSRELITCKPDYYKWNQFFFLKMYEKGIAYRKNGAVWWDPVDQTTLANEQVIEGKSERSGADVIRKMMPQWYFKITDYAEELLNMDDLGWPEKIKHMQRNWIGKSLGTNVDFKLEKSSKNVSTFTTRVDTIFGVTFIVLAPEHNLVSEVTTEKYKSDVERYIKNSSKSSEIERTSTERVKTGQFTGGYAINPMDDKKIPIFVGDYVLGTYGTGAVMGVPAHDQRDYEFAKKYKLPINVVITSDGQAAEEINKANESYGILINSKNFDGLDSEKAKSNITEFMEKKGVAKEPLPTILETG

SEQ ID NO: 190266 - protein, 399 aa, Unknown
  Bacterial polypetide isolated from the Sargasso Sea
TFEMMNSNNYSSNLLKVFTTRPDTIFGASFCAISLEHPLAKEIIKKNPEAKNFLTSCSGADIEKDKLGFRTEILIKHPFIENKKIPLFLANFVLMDYGSGAIFGCPAHDQRDLDFANKYNLDVIPVVLPNDKKENEFKITNEAFIGEGKLINSSFLNGLEIEDAKKVVVKNLKNINCGKDKTTYRLRDWGLSRQRYWGCPIPMLYREDGKIIPVSKKDLPITLPPIKGLGGTKNDIDIINSWKRTVCPETGMKATRETDTFDTFFESSWYYLRYCNPRSSEPFLKEDIDYWLPVDQYIGGIEHAILHLLYSRFFVKALRDLGYININEPFQGLFTQGMVTHQTYKSVAGNWLAPDEVIKENDQFVDLKNEHVSVGKIEKMSKSKKNVIDPSKTIDIYGA

SEQ ID NO: 190267 - protein, 370 aa, Unknown
  Bacterial polypetide isolated from the Sargasso Sea
MGNKLTFVNRYNFKLIEKKWQSYWEKNKTFKTKLDKSKKKFYCLEMFPYPSGNIHMGHVRNYTIGDVLARYKTLEGYNVLHPMGWDSFGMPAENAARQNELDPKSWTESNISNMKSQLKNLGLSLDWDREISTCTPEYYKHQQEFFLELFDKGLVYRKEQYVNWDPVDQTVLANEQVVDGKGWRSGVPVERKKLNQWFFNITKFSEELLDCLDELKNWPNKVKVMQKNWIGKSFGCEINFKIHEPKNVNEIKCFTTRPDTLFGMSFLALSIDHPVAKFYENNNEFLEFRKKCSNTGTTEEAIANAEKLGFKTDLIAINPLDPSIKVPVYFANFVLMDYGLGAVFGCPAHDQRDLDFARKYNLEVNTVVKP

SEQ ID NO: 190268 - protein, 504 aa, Unknown
  Bacterial polypetide isolated from the Sargasso Sea
WTYNNISIMKDQMKPLGLSIDWQREFATCDPEYYGQQQALFLDFLEAGLVYRKNAVVNWDPVDLTVLANEQVENGRGWRSGAVVERRELTQWFFKISEFSDDLLASIEKLDNWPAKVKLMQTNWIGESKGLEFAFKAVNAPDRFDKIEVYTTRPDTLMGASFVGISADHPLARELEKVNPDIASFNAQCRQMSTSEAEMEKAEKKGIDTGILVTHPLNPDIKLPVWIANFILMDYGTGAIFACPAHDQRDLDFARKYQLPVIDTFYSLENEEAVKNTAFVPPKSERVKWVNHFTGVDVATGEEVIDETIRFAEKKGWGSGVTKYRLRDWGLSRQRYWGCPIPVVHCDNCGLVAEKKENLPIKLPDDVKFDKPGNPLDRHEIWRKCKCPECGGPALRETDTMDTFVDSSWYFTRFTSYNSTTPTNEKEINYWMNVDQYIGGVEHAILHLLYSRFFARAMHHCGHLPKSAIEPFDALFTQGMVTHAIYERDNENGRPTYFYPEEVE

SEQ ID NO: 190269 - protein, 801 aa, Unknown
  Bacterial polypetide isolated from the Sargasso Sea
MSSNYKPQLIEKTIQDKWDKEERFLAKIDDREKFYCLSMFPYPSGKLHMGHVRNYTIGDVISRYKRMNDFNVFQPMGWDAFGLPAENAAIENKVNPKDWTNANIDNMKKQLKSLGLSYDWSKELRTCDPKYYKWEQLIFKKFYDAGLVYRKKSIVNWDPVDETVLANEQVIDGKGWRSGAQIEIKEIDQWFIKITEYAEELLDSLDDLDWPENVKLMQKNWIGKSNGAEIKYKIDESDEYLTTFSTRPDTIFGVSFLAISPNHPLAIDLSKKDQNILEFLEKCKDIKAAEADIAKAEKLGIDTEIKVIHPLTGEKLPLWIGNFVLLDYGTGVVMGVPGHDSRDYEFATKYELNIKQVIKTKDDDLPITENGILINSDKYDGMTSEEASNGIIKELVKLDSGAHLIQFRLRDWGISRQRYWGCPIPVVYENGVPKVIEEKDMPIKLPELDKNSPPIPLSQNKEFIGIKDGVIRESDTFDTFMDSSWYHARFTSSNNEDQIFDENTDYWLPVDLYIGGIEHAILHLLYSRFFHKALRDIGLVEGDEPFKKLLTQGMVLKDGAKMSKSKGNTVDPQSYIEKYGADTVRLYMMFTSPPEQSLEWSESSVEGASRFLKKIWNLVNGRKYKKFDKKLEFNKEEMSVRRKSHATLKKVENDYEVRFAFNTAIAAIMELINFIPDEYRNEDASDAQKYCLDEAIMFTLKMLSPISPHICEHLWNDFYLDESSIDKWWPKFDENLLEVEEFELIIQVNGKVRGKINIDKNIEQKEIESSALNVENVKSHIGSSKIKKAIYIKEKLINFVI

SEQ ID NO: 190270 - protein, 113 aa, Unknown
  Bacterial polypetide isolated from the Sargasso Sea
MERLNFQAIEKKWQTVFEKNKLYNNKTAKKFYCLEMFPYPSGKIHMGHVRNYTIGDVIARFKFLNGFNVLHPMGWDAFGLPAENAAKENNLHPREWTEKNIAEMKRQLKLMGL

SEQ ID NO: 190271 - protein, 248 aa, Unknown
  Bacterial polypetide isolated from the Sargasso Sea
MERVNFQVIEKKWQKKFAKKKLYRTNGKKFYCLEMFPYPSGKIHMGHVRNYTIGDVIARYKFLNGFSVLHPMGWDAFGLPAENASKQNNLHPKEWTNKNIETMKSQLKLLGLSIDWDLEISTCNKDYYKHQQEIFIDFYNQGLVSRKETYVNWDPVERTVLANEQVINGKGWRSNAIVERKKLSQWFFNITKFSEDLLNDLEKLIGWPEKVKLMQKNWIGKSFGCTIDFKVDNNKDQITVFTTRPDTI

SEQ ID NO: 190272 - protein, 301 aa, Unknown
  Bacterial polypetide isolated from the Sargasso Sea
MEKYNFKVIENKWQTYWDKNKSFKTSSDKSKKKFYCLEMFPYPSGKIHMGHVRNYTIGDVLARYKSLQGFNVLHPMGWDSFGMPAENAARQNNLDPATWTEKNITVMKSQLKKLGLSIDWDREISTCSKDYYRHQQTFFLEMFDKGLVYRKENYVNWDPVDQTVLANEQVIDGKGWRSGAPVERKKLNQWFFNITKFSEDLLKSLDTLDKWPNKVKIMQKNWIGKSFGCEVKFEITGSKDVKIVECYTTRPDTLFGMSFLALSVDHPLAKLYQNDKAFLKFKDECSKTGTTEESIAVAEKL

SEQ ID NO: 190273 - protein, 447 aa, Unknown
  Bacterial polypetide isolated from the Sargasso Sea
FTTRPDTLFGSSFLALSVDHSLSKFYENNEDFLEFKKKCSKTGTTEESIANAEKIGFKTDLIAINPIDEEIKIPVYFANFVLMDYGLGAVFGCPAHDQRDLDFANKYNLTVKPVVTPNKDDLNFKVKDEAYTGPGFIFNSSFLDGLKCPDDSIIKTIEYLESKNLGEKKINFRLKDWGVSRQRYWGCPIPIMYDENNNPKKIPKEILPVKLPEINKLDETGNPLDKNIEWKNITIDGKNYTRETDTLDTFVCSSWYFLRFCSPQNEKYGFSYDDVNYWMPVDQYIGGVEHAILHLLYSRFFMQALSHKNENFNIKEPFKGLFTQGMVCHETYKDDENNWVSPEEITLKDGKKYLKNNLLKEVKVGPSESMSKSKKNTIDPENIINNYGADSVRLFILSDSPPEKDVQWSEEGISASFKFIQKLWNMNTKILNEIKKNHPKDTSSELD

SEQ ID NO: 190274 - protein, 329 aa, Unknown
  Bacterial polypetide isolated from the Sargasso Sea
TDTMDTFICSSWYYFGYVSPYWKKGEKLKKEDLPWDPEAIQKWCPVNQYTGGIEHATMHLLYFRFFTKVLADMNLFDFREPATRLFNQGMILGEDHEKMSKSRGNVVNPDDLVKKYGADTVRCYLMFLGPWDAGAPWNPHGIEGLSRFFKGIWNLCHQPQKPENIDQESEKKLRKAQHRTLKKVTEDLRRFRFNTAIAALMSFRNDLKDHVHRCCEETRTEALKTMLLMLAPLAPHVSEELWQWMAPETGSIHQQDWPAFDEQLASAEMVTLVVQINGKIRDRIQCPVGMEQKQTEEKVLASEKIQNLLEGKAVRKLIVVPDRLVNLVV

SEQ ID NO: 190275 - protein, 855 aa, Unknown
  Bacterial polypetide isolated from the Sargasso Sea
MDYSPKKIEPYWQDLWSKEKSFASEKSDKNLPKKYILEMFPYPSGRIHMGHVRNYTIGDVITRYRITKGDNVLHPMGWDAFGMPAENAAMENKIHPKEWTYKNIDSMREQLKSLGLAIDWDREFATCDHDYIKHQQTIFIDFLKNDLVYRKESEVNWDPVDNTVLANEQVIDGLGWRSGAEVERRKLNQWFLKISDFSDDLLDGLEELDKWPEKVKLMQKNWIGKSTGAVFSFKVMEEFSKIADKIEVYTTRPDTLFGASFCAVAPDHEIATIISQNNDNALKFIEKCQKIASSEEAIEKVAKEGFDTGIKVKHPFDKDIELPVYIANFVLSSYGKGAIFGCPAHDQRDLDFARKYNLPVLPVVCPENLNKKDMVIENEAYLGEGKIINSKFLDGLDIDEAKKVAINKLKELKIGKKEINYRLRDWGISRQRYWGCPIPILHREDGAIIPVPIDELPITLPEDIDFSQPGNPLEKHPTWKYTTCKETGLKAIRETDTFDTFIDSSWYFARFCELDNSKPINKDEANYWLPVDQYIGGIEHAILHLLYSRFFTRALKITGHLEIKEPFDGMFTQGMVCHETYSNEKGDWIEPKFVRKGDNKQDAHHKDTGEKIKVGPSEKMSKSKKNIVDPDDIIKLYGADTARWFVLSDSPPDRDIFWTEAGIESSNKFINKIWRTILEYKEIVEQKDIKNTSEQVQFMKIINKGIKDITFNLETMSFNKAIANIYSLIGELSKSETKEKINGETASKILKNLIVILSPFVPHLAEESWVYAGFDGLACKQSWPEFDESLTDNEDAKIVVQINGKKRGELSLPITAEEKEAVEVAKNNNKIKNDLAGKEIKKIIYVKGRILNFVV

SEQ ID NO: 190276 - protein, 537 aa, Unknown
  Bacterial polypetide isolated from the Sargasso Sea
VKKKKLSQWFLKISKYSEELLNDLDSLNNWPNKVKIMQSNWIGKSVGAEIDFKITGRDDKITVFTTRPDTIYGATFIALSSDHDLVEEISKNNEKIQKFIKSCEGLNSDKTKKGLDLGLSVEHPFIIGKKLPIFIANFVLKEYGLGAIFGCPAHDQRDLDFANEYKLEIIPVVKPNNIEENEFKINDIAYTEDGTIINSKLLNGLSIKDAKKRIIVEIENKKIGRKKINFKLRDWGISRQRFWGCPIPMIYREDGEVVPVEDKDLPIKLPDIKDFNESSSALNNISEWKNTKCSKTGMKAYRETDTFDTFFESSWYYFRYCNARLDKPFDVKDIDYWLPVDQYIGGIEHAILHLLYSRFFTKALRDLGYFSLSEPFSGLFTQGMVTHITYKNEEGVWVEPKDVNNKGLELRDNKNFRVETGKVEKMSKSKKNVVDPNDIIELYGADTARWFMLSDSPPERDLQWTDTGISASFKFMNKLYEFIEKLNKYESNDENDSVIIEDLKMVINQVSQNIEVFQFNKSVAKIYEFVNIVNEAP

SEQ ID NO: 190277 - protein, 96 aa, Unknown
  Bacterial polypetide isolated from the Sargasso Sea
MKEYFERYNSEVNEKKWQDEWNNLNCFKASIDLSKPKYYVLEMFPYPSGRIHMGHVRNYTLGDVIARYKRSKGFNVLHPMGWDAFGLPAENAAKDK

SEQ ID NO: 190278 - protein, 508 aa, Unknown
  Bacterial polypetide isolated from the Sargasso Sea
MKDQLKELGLSIDWEREISTCSPDYYKHQQKIFLNLYDKGLVYRKESYVNWDPVDNTVLANEQVVDGKGWRSGAVVERKKLNQWFFKISHFSEELLSDLGKLDEWPEKVKIMQKNWIGKSFGCEIDFKIEGSDKVNSIKCYTTRPDTLFGFSFLALSVDHPLSKYYENDPEFIKFKENCSKTGTTEESIAQAEKIGFKTDLMAINPINNTNKVPVYFANFVLMDYGFGAVFGCPAHDQRDFDFAKKYNLEIKTVVKPKNENDDYVVDTEPHTGPGVMINSDFLNGLSAPEKSISETIKYLEKNNLGNKKTNYRLKDWGISRQRYWGCPIPIVYDENNEVIKIPQEDLPVKLPDIEKFNTDGNPLDTQEEWKSIIINGKKCIRESDTLDTFVDCSWYFLRLCSSNNKEKAFNEDEIKYWMPVDQYIGGVEHAIIHLLYSRFFVRAIDMDNKTFNLKEPFQGLFTQGMVCHQTFKDQNNNWLNPDEVYSEDGEKYLIKNRPEEKVMVGPS

SEQ ID NO: 190279 - protein, 359 aa, Unknown
  Bacterial polypetide isolated from the Sargasso Sea
KSFAEKNKIDYWMPVDVYIGGAEHAVLHLLYARFWHKVLYDLGYVSVPEPFKKLVNQGMILGNSAFIHRIKNTNTYISYDLIHKYDVQKINVDIDLLTNNNELNIEKLKNSDIKFKNAEYVFNEKFIVSREVEKMSKSKFNVVSPDKICDKYGADTLRMYEMFLGPLEQSKPWNMDGITGVHNFLKKFWNLFHDKTRFNVLDTKPNENSLKILHKTIKKVNSDIESFSFNTCVSAFMICVNELSSLNEKSSKVLRNLCLLMSPFAPHICEEIWSKFGESDSISNQDFPIHDESYLIEDKFEYPISFNGKLRFKMIFNLDCEYNDIQKELSQNEKVNSYLNGKKIKKIIFVKNKIINIVF

SEQ ID NO: 190280 - protein, 65 aa, Unknown
  Bacterial polypetide isolated from the Sargasso Sea
MSRYNFKSIETKWQNYWEKNKSFKVKTDTSKKKFYCLEMFPYPSGKIHMGHVRNYTIGEFLLVIS

SEQ ID NO: 190281 - protein, 451 aa, Unknown
  Bacterial polypetide isolated from the Sargasso Sea
SSFIAISPDHPICEQMKDQKDFVDFKKECLKVGTTEEALANAEKVGLKTNLTVDHPFKEDKKLPVYVANFILMDYGTGAIFGCPAHDQRDFDFAKKYELEIIEVVSETGKATRNFYKSTEAYTGDGFILNSQFLDGLKIDEAKQKIISEFEKEGIGKKKITFRLRDWGISRQRYWGCPIPIIYLKDGTIKTVPKEDLPVKLPQDVNLKANGNPLESHTSWKNTVDKETGEPAMRETDTLDTFVDSSWYFLRFCSPKVKDKPFDTDKVNYWMPVDQYIGGIEHAILHLLYSRFFMKALKLNDPKVKCDEPFKGLFTQGMVCHETYKDSENNWLSPDEIELDENNKFVLKNTKKRVTVGPAEAMSKSKKNVVDPENMIKSYGADAIRLFILSDSPPEKDIQWSERGVVSSNKFLQKIWNLNQLIINRKDIKISNIKVQEEFIENFYNYIFRLS

SEQ ID NO: 190282 - protein, 804 aa, Unknown
  Bacterial polypetide isolated from the Sargasso Sea
WTQWIFTLMFNSFYCKIENKAKHISELINSFEKDGDTQYKNELENLDYSFSNEEWKNFNDQIKSDILMNFRLAYITDGEVNWCDELGTVLANDEIINGVSERGGYPVTKRKVKHWCLRISKYSDRLLEDLNKIDWPEPLKEMQRNWIGKSKGVSLKFEVENSDKKIEVFTTRPDTIFGVSFLTVAPEYRDLYDISSSKNRKEIEGYVKEVSLKSERDRLSDVKSVSGVFTGSYAIHPFSSKKIPIWISDYVLVSYGTGAVMGVPAGDQRDFDFAKKFKLDIPNIFDQIDISKSAFSDKTGFKLMNSEFLNGHNYETSLEIIINKIEDKKIGKSKIQYKLRDAIFSRQRYWGEPIPIYYKNDIPKNIDEPHLPLKLPEVDNFLPTKNGDSPLGNSNEWAWDEKNKKVTFNSKIDNVNVFPIELNTMPGWAGSSWYFYRYMDSKNDKKFISDDSQSYWCDVDVYFGGSEHATGHLLYSRFYQKFLFDLDFLQKDEYAKKLVNQGMILGNSAFIYRKSGTSEYFSKNLINNIEVDRIRIDIKYVNTENEVDIDGLKKEDKDFNNASFHFDNGKFECIREQEKMSKSKFNVVNPDEICDQYGADTLRMYEMFLGPIEQSKPWDTRGISGVYSFLKRFWNLFFENDKLTLNEDIPSEESLKSLHKTIKKITEDIEKLSLNTCISSFMICVNELSALKCNNRLILEQLLILISPFAPHFAEELWSQIGNKKSIIDEKYPEFDKKYLIESEKNYPVSFNGKTKFTINLSLELDVNEIEKIVLSNEKTISILNNLRPKKVIVVPGKIINIVV

SEQ ID NO: 190283 - protein, 455 aa, Unknown
  Bacterial polypetide isolated from the Sargasso Sea
MFLDFYKNGLAYRKETWVNWDPSEQTVLANEQVIDGKGWRSGVNVEKRKMNGWFLKITRFAEDLLKEIDNLKHWPEKVKIMQKNWIGKSIGATIKFEVYEIKESINVYSTRPDTLFGATFIAISPQHPFALKIIKENKHIENQLNSIEFKANSEEEIEKLDKVGIKTPFTAIHPFIKEKRIPIFIANFILIDYGTGAIFGCPAHDQRDMDFAKKYSLEIIQVVKKLNSKKNEILDKAYSDDGILINSSFLNNLSVKEAIDLSVKKLEERGHGKKTINYRLRDWGVSRQRYWGCPIPIIYCYKCGDVPVPEKDLPVELPQDISFNNRGNPLSNHENWKNVKCPQCGSRAKRETDTFDTFFESSWYFARFTDPQIDTPFSDKASKYWLPVDQYIGGVEHAVLHLLYSRFFIKALNKLNQINITEPFSSLQTQGMVCHRTYQNDDNQWLFPRDVYQKN

SEQ ID NO: 190284 - protein, 365 aa, Unknown
  Bacterial polypetide isolated from the Sargasso Sea
MERYNHREVEGKWQNKWDSKKIFQASEDYSKQKYYVLEMFPYPSGKIHMGHVRNYTMGDVVARYKRARGFNVLHPMGWDAFGMPAENAAMQNNIHPAKWTYENISNMREQLKLLGLSIDWSREIATCDPEYYQHEQRLFLDFYRKGLVGRKKSKVNWDPVDNTVLANEQVIDGKGWRSGAEVETKELTQWFFNITNYANDLLSKLDKLSKWPEKVKTMQNNWIGKSTGLQFKFEIVIAPDDDCKTIEVFTTRPDTLFGASFVAVAADHPIVKKLEKNNREINSFIKECRSKGTTLAEIEKAEKIGFNTGVKVKHPFIKDKNLDVYIANFVLMEYGTGAIFGCPAHDQRDLDFARKYDLDVIPVVL

SEQ ID NO: 190285 - protein, 321 aa, Unknown
  Bacterial polypetide isolated from the Sargasso Sea
MLEEQYNPEQIESSIQSEWENTNKYKTAPDDREKYYCLSMFPYPSGKLHMGHVRNYTIGDVISRYKRMRGFNVFQPMGWDAFGLPAENAAIQNKVDPQSWTEQNIENMKSQLKRLGFSYDWSKELKTCDPNYYKWEQEIFSLLHKQGLVYRKKSLVNWDPVDETVLANEQVIDGKGWRSGATVELKEIDQWFLKITDYADELLTSIENLDWPENVKSMQKNWIGKSFGSEISFSLSSGEKLTAFTTRIDTIYGVTYLAISPNHPISQNLANQDTEIDDFIKKCNETKMAEADMAKADKLGLKTNLKVKHPFTGIDLDVWIA

SEQ ID NO: 190286 - protein, 186 aa, Unknown
  Bacterial polypetide isolated from the Sargasso Sea
MNSQFEYKKIEKKWQDHWENSETVKCDLKSDKPKFYNLCMYPYPSGDLHMGHIRNYTIGDVITRYKQMNGFNVLSPMGWDSFGLPAENAAIKTGIHPREFTEERIANMKSQIIRLGSLYDWDREVAAHSVDYYKWTQYLFIKLFENDLAYKEDAPVNWCNSCRTVLANEQVIEGSCERCDTASSQK

SEQ ID NO: 190287 - protein, 324 aa, Unknown
  Bacterial polypetide isolated from the Sargasso Sea
KWLPVDQYVGGVEHAILHLLYARFFTKALRDNELFDIDEPFKKLLTQGMVQAAAYKNNKTGKYVSPADITDLSNPTDPIDNSKLEVLFEKMSKSKYNGIDPESVIKKYGADTARMFILFKAPPEKDLEWGDTDVEGQFRFLSRIWKLYINSAKDINSKSNSYPDQEKSLIKSMNMAIKEISNDILNNQFNTAISELMKFYNSLSNSINDVNNNLKIDALKTFCILLAPFAPHIAEEIWHLIGFKKSVHLEQWPSFNAEALKEDSYELVIQVNGKVRDKVNINNEMSEDQIKELTLIRPNILKWTQDKEIRKIIIVKGKIINIVV

SEQ ID NO: 190288 - protein, 453 aa, Unknown
  Bacterial polypetide isolated from the Sargasso Sea
WFLKISKYSEELLNDLDKLENWPNKVKVMQSNWIGKSIGAEINFEIEESFDSLKHIRVFTTRPDTIFGATFIALSVDHQLSLKLSEDNVDLKKFINECKNIDPEKNKRGFKTQISVNHPFIKNKKLPVFIANFVLSEYGLGSIFGCPAHDQRDLDFAKNYNIEIIQVVKPIKTNTDSLDKTNTAFTDNGVVINSDFLNGLTTEEAKTKILQIIEKNKIGIKKINYKLRDWGISRQRFWGCPIPIIYREDGSVVPVKEESLPVKLPEISEFNESSSALKNFSDWSETTCEETGMKAYRETDTFDTFFESSWYYFRYCNARDNSPFKKEDVHYWLPVDQYIGGIEHAILHLLYSRFFTKVLRDLGYFKLDEPFKGLFTQGMVTHQTYKNSKSEWVEPKDVKEVDGILYDLNNNKIEIGKIEKMSKSKKNVVDPGDIINLYGADTARWFMLSDSPP

SEQ ID NO: 190289 - protein, 793 aa, Unknown
  Bacterial polypetide isolated from the Sargasso Sea
MKIEYDHSKIEKDIQSKWNESNAFTAKIDNKKPKYYCLSMLPYPSGNLHMGHVRNYAIGDAVSRYKRLKGFNVLQPMGWDAFGLPAENAAKGKNIHPKDWTEKNIENMREQLKSLGFSYDWSKELNTSDVSYYKFEQKLFLKFYERGLAYRKKSLVNWDPVDETVLANEQVIDGKGWRTGAEVELKEIDTWFLKITDYADELEESLATIDWPENVINMQKNWIGKSKGVEIKFTTDTNKEIKAFTTRPDTIFGITFFGISPNHPIVNEISKNDEGLIEFLSEVKKISSAEADLAKAEKLGYKTELNIVHPITDEKIPVWIINYVLMDYGTGAIMGVPGHDERDFEFAQKYEIPITRVIDSKDELPYSGQGKLVNSKDFDGLNSDKAFDKVTKRLEKNNAAKILYQYRLRDWGISRQRYWGCPIPIIYKDGKTMPSEELPVELPVSADGKYSPLHQNEEFKKLDNGFERETDTFDTFMESSWYFARYTSATNDKEIFDENTKYWLPVDLYIGGVEHAILHLLYSRFFFKALRDMDIVEGDEPFKKLLTQGMVLKDGAKMSKSKGNTVDPKEYITKYGADSIRTFMIFASPPEQSLEWSDNGLEGCHKFLKRLWNLSTNISELDEKQFKDSKNQLTDECKKLFKKINDDYEKRLNLNTIVSSCMEILNNINGRFDDKNVNCSKEDLLNVYDFLLLALHPIAPHICETLYAEVLKKDIAQAEWPEDSFFVADLSESNYLVQVNGKLRANIMMPIDLKEDEVKEIALTNENVARHLENKNIIKIIFIKNKLINFVHS

SEQ ID NO: 190290 - protein, 297 aa, Unknown
  Bacterial polypetide isolated from the Sargasso Sea
FKDECFKTGTTEESLAMAEKIGFKTNLFAINPLNQKEKVPVYFANFVLMDYGFGAVFGCPAHDQRDFDFAKKYNLPIKTVVKPNDIDDFEVDKEAYTGSGIIINSGLLNGLKAPEESIVKTIEILEKDKIGIRKINFRLKDWGVSRQRYWGCPIPIAYDEKGEILTIPKKDLPVKLPSNINLNTKGNPLDSDNEWKNIKINGKNFTRETDTLDTFVDSSWYFLRFCSPKNNDYGFNSDDIKYWMPVDQYIGGVEHAILHLLYSRFFMRSIDYKNDKFNVKEPFDGLFTQGNGLSRNI

SEQ ID NO: 190291 - protein, 450 aa, Unknown
  Bacterial polypetide isolated from the Sargasso Sea
MERINFQVIEKKWQERFKTAKLYNKEKTSKKFYCLEMFPYPSGKIHMGHVRNYTIGDVLARYKYLNGFNVLHPMGWDAFGLPAENASKLNNLHPKEWTNKNIKVMKDQLKMLGLSIDWDLEISTCDKEYYKHQQELFIEFYNQGLVSRKETYVNWDPVEKTVLANEQVINGKGWRSNAVVERKKLSQWFFNITKFSEELLNDLENLNGWPEKVKLMQKNWIGKSYGCEIIFNIEKSEDKINVFTTRPDTIFGASFICLSADHPLNKNFLEREDFKKFKKLCDKTGTTEESLANAEKLGFKTDLFVRHPFLAKKKLPVYFANFVLMDYGSGAIFGCPAHDQRDFDFAKKYNLEITQVVSDGNDKEILSEAYTGPGKMINSEFLNGLEYNKAKEKIIDKIEQNKLGKRKTLFRLKDWGISRQRYWGCPIPMIYLEDGSVVPVDKSELPIELP

SEQ ID NO: 190292 - protein, 577 aa, Unknown
  Bacterial polypetide isolated from the Sargasso Sea
IFGATFLALSVDHPLCKDYVTRSDFTDFKKKCSLVGTTEEAIANAEKIGFKTDLEAEHPFIKGKKIPIYVSNFILMDYGTGAIFGCPAHDQRDLDFATKYKIEVIQVVKPKDINNEKIHNGAYTGEGSIINSDFLNNLTISEAKEKIVKEIEKKKIGKKKITYRLKDWGVSRQRYWGCPIPMIYLKNGKVVPVDKSELPIKLPDDIDVNSKGNPLDNHPTWKNTKCKKTGEEATRETDTLDTFVDSSWYFLRFCSPKLKSKPFDEEAFKYWMPVDQYIGGIEHAILHLLYSRFFMRALKKNNSKINDNEPFNGLFTQGMVCHETYKDQNGKWLTPSEVEKGSDGKYKKISDKSEVRVGASESMSKSKKNVVDPENMIKSYGADAVRWFILSDSPPEKDIQWSNQGVNAAYKFLQKIYNLCCVVNERSEEKNTLNKEFDLKMNSYVNKITKSINDFNLNVVVANVYEIYNLFNNHINKEVSNKSLKANLINLMKILIPFTPHIAYECLEMLGTKDNRSWPKVDTKLVLKEKINMAIQVNGKTRDVIEIEKGINQNSVVKLCKNNDKIKNKIDDKSVKR

SEQ ID NO: 190293 - protein, 266 aa, Unknown
  Bacterial polypetide isolated from the Sargasso Sea
MDKVNFNNIEKKWQKIWEKTNLYRVNKEKKFYCLEMFPYPSGKIHMGHVRNYTIGDVIARYKYLNSFNVLHPMGWDSFGLPAENAARENNLNPKIWTQKNISEMKRQLKMLGLSIDWDLEISTCDEGYYKHQQEIFIDLYNKGFISRKENYVNWDPVEKTVLANEQVINGRGWRSDAPVERKKLSQWFFNISKFSNELLEDLEKLNNWPEKVKLMQKNWIGKSIGCEIDFETNESNKNNIKVFTTRPDTIFGASFIAISADHPFCE

SEQ ID NO: 190294 - protein, 540 aa, Unknown
  Bacterial polypetide isolated from the Sargasso Sea
MNKDYQPADIEKIAQTAWNDNTSSKVNFSDSTNKYYVLSMFPYPSGKLHIGHVRNYTIGDVITRSHKMIGKNVFQPMGWDAFGLPAENAAIKNNVHPEEWTRKNIAHMKEQLKNIGILYDWENEISTADANYFRWEQWFFIQLLKKGLVYRKLSEVNWDPVDKTVLANEQVIDGRGWRSGALVERKEIPQWFLKITDYSDVLLKDLDKLPNWPEPVKLMQKNWIGKSKGLNINFKLAERDQILTAFTTRPDTLFGVTFIAISINHSLAKELLEHNKNIKEFIEEYQKLTLSEEASSKLEKDGIFTELYCIHPLTNKKIPLWITNYVLDNYGTGVVMGVPAHDARDFEFSNKFKLDIIQVIENINKENDLPFIDSGLLINSDKFNGLESQDAKDKISKYCNDNHIGEEVTSYRLRDWGISRQRYWGCPIPVFYHEDGSVHPVPEKDLPVELPEDVDLSGDGNPLDKNNKWKNMICPYTGKKATRETDTFDTFFESSWYYLRFLDPSNNKEMCDKKFKSWLPVDQYIGGIEHAILHLLYARI

SEQ ID NO: 190295 - protein, 327 aa, Unknown
  Bacterial polypetide isolated from the Sargasso Sea
MPVDQYIGGVEHAVLHLLYSRFFTRALRKCGYLNIDEPFEGLMTQGMVCHETYRDSTGWLFPNQVTKNKAGEFVNSETNENVVLGRVEKMSKSKRNVVDPEAIIESYGADTARLFMLSDSPPERDLEWTEAGVDGAWRYLNRLWRSILEFNEHPFPKTSGISTAKKGDELRRLIHKTIKSVTENIERWRYNSAVANIRELSNHLNDFKPENGDDAKVKLFGYEVLLRLIEPMTPHIAEEIWQSLGKTDALGEQPWPQYDKDLVIDETISIAIQINGKLRGSIQIQRDATEEEVKALARDLTNIKKAIKEKEVRKVIVVPNKIINFVI

SEQ ID NO: 190296 - protein, 336 aa, Unknown
  Bacterial polypetide isolated from the Sargasso Sea
KNNKHGYDLDEINYWMPVDQYIGGVEHAILHLLYSRFFMRAINYKNENFRITEPFEGLFTQGMVCHETYKDENNNWLNPEEVETSDGKNFYIKKKPNKKVKVGPSESMSKSKKNTIDPENIIDSYGADSVRLFILSDSPPEKDIQWSEQGMIASYKFIQKLWMLHGKFKSRIQENSNNEDIEISIFINQMIKKVNYNLEKFNYNVIVANLYEAYNFLFQKLNTPIDKKTLLDNYTKFLAVISPVIPHFSSECLSDLKLNPLQKWPEVDKNLLKEDTVEYVIQINGKKRGTIKNMKDISEEELINHIKNFDDTKKILEGKKIKKSFFVKNRLINILI

SEQ ID NO: 190297 - protein, 780 aa, Unknown
  Bacterial polypetide isolated from the Sargasso Sea
KHETYKVDLNNSNEKYYCLCMFPYPSGDLHMGHVRNYTIGDVFSRFHRLTGKNVLHPIGWDSFGLPAENAALEKGINPSDWTYENIKNMRYQLKSLGFSYDWSKEITTCSEEYFKWEQWFFIKLFEDGLIYRKKSIVNWDPVDMTVLANEQVIEGRGWRSGAIVEQKEINQWFLKITEFADDLLEDLTLLKDNWPDNVITMQKNWIGKSLGSEILINTDLGDIDIFTTRADTIFGVSYIGISLSHPFVSKLDIEIQNFCKSKDNFLKNESITQNSINGIFSGFYAYHPITKEKIPIWCCNYILMDYGTGAIMGVPAHDERDYLFAKKFSLNIKKVISCKEKENLPVIQKGILINSENFDDLSSDDAIKKLNQFFLDNSLGKSCYKYKLRDWGVSRQRYWGCPIPVIYREDGEILTVPLDQLPITLPVDVSFEGKGNPLENHPTWKYTKCSETNMKAIRETDTLDTFFESSWYQAKYPTSNNETMISNEAKNWMPVDLYIGGVEHAVLHLLYARFFNKLMNKYNILTNKEPFKKLITQGMVLKDGSKMSKSKGNTVDPKLLISKYGADTVRHFIIFSAPINNSLEWSDTAVEGSHRFLNRLWQTSVEINNYKKPTIQKDLENNFLIFCNQQIRKITKDYKDEDSLNTVVSSCMEYLNKLSINIKKRSINAVILNEYFMKLLIMLYPVCPHICKQIFKDLYNENIDVQQWPRFDENYLNYDNTMIVIQINGKVKDKVEVKSDISQEELEKIVFHREKIKAIIADRKIKKVIYIQNKILSIVI

SEQ ID NO: 190298 - protein, 476 aa, Unknown
  Bacterial polypetide isolated from the Sargasso Sea
FKNTDKKKKFYCLEMFPYPSGKIHMGHVRNYAIGDVLARYKTMQGFNVLHPMGWDSFGMPAENAARENNLDPKEWTQKNIATMKRQLCSLGLSIDWDLEISTCDPNYYKHQQSLFIDLYNKGLVVRKETYVNWDPVEQTVLANEQVINGKGWRSNAIVERKKLSQWFFNISKFSEELLEDLNSLTEWPEKVKLMQKNWIGKSVGCEIDFEIEGQKKVKIFTTRPDTIFGATFLAVSVDHPICKNFSNNDNFLKFKNKASQVGTTEEAIANAEKIGYDTGFRAKHPFIKNKSIPVYVANFILMDYGTGAIFGCPAHDQRDYDFAKKYKIEIIKVVKPRENHEIIKDNKAFDGDGSIINSGFLDGLNISDAKNKIISEIEKKKIGKRKISYRLKDWGISRQRYWGCPIPMIYLKNGKVVPVDKSELPIMLPGDVDLNSKGNPLENHPNWKKTKYKKTGEDAIRETDTLDTFVDSSWYF

SEQ ID NO: 190299 - protein, 834 aa, Unknown
  Bacterial polypetide isolated from the Sargasso Sea
MEQLSIQKIDKKWQDFWSKNKIISKKDKKGKKFYCLEMFPYPSGKIHMGHVRNYAIGDVLARYKLMNGFDVLHPMGWDSFGMPAENAARENNLSPKDWTQKNIATMKRQLMSLGLSIDWNLEISTCDEEYYKHQQELFIDFYNKGLVVRKETYVNWDPVDETVLANEQVIDGKGWRSNAVVERKKLSQWFFNISKFSNELLEDLDTLKEWPEKVKLMQKNWIGRSVGCEIDFEINKTKQKVKIFTTRPDTIFGATFLAVSVDHPLCKGLENQKDFKEFKRKCSHVGTTEEAIANAEKIGFNSGLEAKHPFKENEKIPIYVANFILMDYGTGAIFGCPAHDQRDYDFATKYKLKIIPVVKSLQSSANNGVYTGDGKIINSNFLDGLSVDQAKEKIIDEIVRKKIGNKKTSFRLKDWGISRQRYWGCPIPMIYLKDGKVVPVEKSELPIKLPENIDLNSKGNPLANHPTWKKTKHKKTGEPATRETDTLDTFVDSSWYFIRFCSPKLNDKPFDKEAFNYWMPVDQYIGGVEHAILHLLYSRFFMRAIKLKDDKIKIKEPFKGLFTQGMVCHETYKNEKGEWLSPDEASKYQKSQVIVGPSEAMSKSKKNVVDPESMISIYGADAIRWFMLSDSPPDRDIQWSNEGVSSAHKFVQKLWSLNKKIIERKETKISKIEEKKFLSKFNKYLFKISNMIEKFHLNVAVANFYELIHVVNDYISKDISTNCLKETQIKIMRIMMPFMPHITCECLAALEGENFLQNNKWPKADKTLLEDSEVTIVVQINGKKRGLLLIKKDSDEKEAIAKAKNIENIKKNLINKKIVKNVFVKNKVINFIIT

SEQ ID NO: 190300 - protein, 394 aa, Unknown
  Bacterial polypetide isolated from the Sargasso Sea
KEEVSIYCENAMRKDEIERMSESQEKDGVFTGAYAINPLNGDRVPVWVAEYVLAGYGTGAIMGVPAHDQRDFLFARRYDIPTPVVVVPEDHDQPIPEGSELEEALLVKEGSKMVNSNEFDGLVWPEGFDRVVQAIEDKGIGKKQINYRLRDWLISRQRMWGTPIPVIHCKNCGTVPVPYEDLPVMLPDDAEFKPTGESPLKYHPGFLNTECPKCGGSAERETDTMDTFICSSWYYYGYVSPYWKKGEKLKKEDLPWDPEAIQNWCPVNQYTGGIEHATMHLLYFRFFTKVLADMNLFDFREPATRLFNQGMILGEDHEKMSKSRGNVVNPDDLVKKYGADTVRCYLMFLGPWDAGAPWNPHGIEGLSRFFKGIWNLCHQPQEPENIDQESEKKL

SEQ ID NO: 190301 - protein, 433 aa, Unknown
  Bacterial polypetide isolated from the Sargasso Sea
KKTNYRLKDWGISRQRYWGCPIPVAYDENNKIIKIPENELPVKLPDNIDINTNGNPLDAQEKWKKITIDGKKCLRETDTLDTFVDSSWYYLRFCSAKDKLKPFNKSDIDYWMPVDQYIGGVEHAILHLLYSRFFMRALNLNNSEIKFTEPFKGLFTQGMVCHETYKDNNNNWLSPDEVISKNGKDFFEKKDPNKKVKVGPSESMSKSKKNTIDPQNIINQYGADAVRFFILADSPPERDIQWSEEGMKSSYKFIQKFWSLNEQILKINKIETDKQNEELEIFTNQSINKINKALEKFRYNVIIATYHEIYSYYKKIIEKGVNYKNLKKNFQKMILIMIPVTPHLANECLEKLNYDADIKWPNIEQKYLNQETNNIVIQINGKKRGIISVEKNFKEEEIINQIKNEKLIDKYLNNGKLIKTIYVQNRLINYIIK

SEQ ID NO: 190302 - protein, 425 aa, Unknown
  Bacterial polypetide isolated from the Sargasso Sea
VSSKRYWGCPIPMIYLKNGEVVPVDKSELPIKLPENIDVNSKGNPLYSHPTWKKTKYKKTGEEATRETDTLDTFVDSSWYFIRFCSPKIKSKAFDEESFKYWMPVDQYIGGIEHAILHLLYSRFFMRAIKFCNKAINIKEPFKGLFTQGMVCHETYKDEKGKWLSPDQIENTKVGIKSKIDGSKIKVGPSEAMSKSKKNIVDPESMIKIYGADAVRWFILSDSPPERDVQWSTAGVSASHKFIQRVWSLNEKVLNRNKTENDDEKTFALKFNEYVFKITELIEKFQLNVAIAKIYEITSLFEDYVEKKISNEKFLNYQIQFIKILLPFAPHLSCECLSKLEGKNFYGEIKWPKGSKSLLEKQEVTLVVQINGKKRGLMITKKDLSEKDALIEAKKIENIKKNLKDKKIVKNIFVKNKIINFIVAG

SEQ ID NO: 190303 - protein, 341 aa, Unknown
  Bacterial polypetide isolated from the Sargasso Sea
EKPFSKEAVNRWLPVKQYVGGIEHAILHLLYARFFTKALKDRGLVDINEPFERLLTQGMVQGITYRNATTGKYIAPADVADPENPRDPNTGDKLEVLFEKMSKSKYNGVDPAAVIDRYGADTARMFILFKAPPEKDLEWDDADVEGQFRFLQRLWRLVEAGATRIDSLEPMQRPADLSDADSDVRRALHLAIEAVSEDLSDEIQLNTAISELMKLSNAISSTGIEALSAPVLQEALSGLVRLLAPFAPHLAEELWSRLGGSGSVHRQSWPVLDPTALVQDSVEVVIQVKGKVRGKLQVPASADKEELKRLALASDVAEKWLEGAAPRRVIVVPGKLVNLVP

SEQ ID NO: 190304 - protein, 526 aa, Unknown
  Bacterial polypetide isolated from the Sargasso Sea
QLFFLELYEKGLVYRKENYVNWDPIDKTVLANEQVIDGKGWRSGAVVERKKLNQWFFNISKFSQELLDGLDNLKQWPNKVKVMQKNWIGKSFGCEIAFKTEGDLPVEEIKCFTTRPDTLFGFSFLALSVDHEISKYFSEDKKFQEFKKECSKTGTTEEAIAIGEKIGFKTDLMAINPLNPSQKVPVFFANFVLMDYGFGAVFGCPAHDQRDFDFAKKYNLNIKTVVKPEGENDNFEVKDEAYSGSGELINSEFLNKLKVPEESILRTIDILEEKKIGKKQINFRLKDWGVSRQRYWGCPIPMAYDENGNVATIPKKDLPVKLPENVDLNSKGNPLDFEKDWKNIKIDGKKYVRETDTLDTFVCSSWYYIRFCSPKSENYGYREEDINYWMPVDQYIGGVEHAILHLLYSRFFMKALGYKNTNFRFNEPFEGLFTQGMVCHETYKDQNNNWLSPDEIELVGNQFQKKGEPNQKVKVGPSESMSKSKKNVIDPENIINNYGADAVRLFILSDSPPEKDVQWSDQGMVA

SEQ ID NO: 190305 - protein, 793 aa, Unknown
  Bacterial polypetide isolated from the Sargasso Sea
MKEFYDYKEIEQEVQDRWDQQKTYEANIDTKKPKYYCLSMLPYPSGNLHMGHVRNYSIGDAVSRYKRLKGFNVLQPMGWDAFGLPAENAAIDKKVHPQEWTEQNINHMKDQLNSLGFAYDWTKEINTSDESYYKFEQELFLKFYEKGLAYRKKSLVNWDPVDMTVLANEQVIDGKGWRTGAEVELKEIETWFLKITDYADELEEGLEKIDWPENVKNMQKNWIGKSRGTEISFETNQGAELKAFTTRPDTLFGVTFFGISPNHPFVNELSKNNDEIKKFLEEVKKVSSAEADQAKAEKLGYKTEVNIVHPITKDLIPLWIINYVLMDYGTGAIMGVPAHDERDYEFAQKYQIPISQVIETEEKLPYSGTGLVINSGDFNGLPSGEAFEKISEKLIALKKGEILFQYRLRDWGISRQRYWGCPIPMEYKDGKTYRAKDLPVVLPVNKDGTYKPLHQNEDFRYKSDGYERETDTFDTFMESSWYFARYTSAQNKKEIFDKNTEYWLPVDLYIGGVEHAILHLLYSRFFYKVLRDMGMVKHNEPFKKLLTQGMVLKDGAKMSKSKGNTVDPKEYIENYGADSIRTFMIFASPPEQSLEWSDNGLEGCHKFLKRLWALSFKISSLENDAFGASEKTLNDECKDLFIKINDDYEKRLNLNTVVSSCMEILNNISKRFDGKKVLCDKSDLYTCYDFLLLALSPIAPHISENLYKNILNKDIQNASWPEESFFHKNETEVKYLVQVNGKVRANILIDSDKSEEDVKEIAKDHENVSRHLENKDIIKVIFIKNRLINFVHS

SEQ ID NO: 190306 - protein, 381 aa, Unknown
  Bacterial polypetide isolated from the Sargasso Sea
KGNPLDSVNEWTKIKINGINCTRETDTLDTFVDSSWYFLRFCSSQEKDNSFNKNEVDYWMPVDQYIGGVEHAILHLLYSRFFTRAINLDNQELNIKEPFKGLFTQGMVCHQTYKDQKNNWLSPDEVFSDDGKNFFIKNKPSEKVIIGPSESMSKSKKNTIDPEKMIEAYGADSVRLFILSDSPPEKDIQWSETGMTSAYKFIQKFWMMSEDIIEIINTEPNKSINKQIEVFTNQSIEKINIALEKFRYNVIIAVFHEIYNYYNKVSEEKKNYKNLKENYEKILIVMSPVIPHLANECLNNITKENLKWPKVKKEFLESDEKEIVIQINGKKRGNITINKKIRENEILAKVKELDIIQKYIKDKKISKTIYVKERLINLIVK

SEQ ID NO: 190307 - protein, 485 aa, Unknown
  Bacterial polypetide isolated from the Sargasso Sea
ELLSDLDLLDGWPEQVKTMQKNWIGKSEGMEFTFGLGESGFIEVFTTRPDTIMGVTFIALSFNHPITREYARNDNALQTWLKNNSKGSTSEIGSNLTEKNGYKLKLKAIHPISKEQIEVWVSNYVLSYGFGALMGVPAHDQRDYDFAKKYKIKIKQVIENKNSTVDITKEAEVSKGTIINSEFLNGLKSEEATEQLSKFGKKKINYRLRNWGVSRQRSWGAPIPMMISKNDPQKVIPFSELNESLIGEEEPEIDGEIFIKDKDTFDTFVESSWYFARFASYKSKDKIFDDEVDYWLPVDQYVGGIEHAILHLLYSRFFCKAMSDLDLLKIREPFKKLLCQGMVLKDGSKMSKSKGNVINPKELIEEFGSDSVRMFSMFAAPPNQSLEWSNEGLKGSYKFLNKIWSLVQLFKQQEIVEGDSKESHEDLVVKLNQTIKKVSNDFETRESFNTAISSIMELINFVPEDFLKNKINNEKYCLLKQVINS

SEQ ID NO: 190308 - protein, 812 aa, Unknown
  Bacterial polypetide isolated from the Sargasso Sea
MKDDYNPNELEEAIQSLWNKEKTFETKFENTDNKYYCLSMFPYPSGKLHIGHVRNYTIGDVISRSQRMIGKNVFQPMGWDSFGLPAENAAIKNKIPPAEWTKMNIDNMREQLKRLGYSYDWNCELSTSDPNYYKWEQWFFIKLLEKGLVYRKKSEVNWDPVDKTVLANEQVIDGKGWRSGADVIRKEIPQWFLKISEYSDELLSSIDSLEDWPESVKMMQRNWIGKSTGAMIQFQVEGHNKVLEVFTTRPDTIYGVTFLAISPNHPFLRDNLNLDIEVREFIEQCNKVKVSEETVSNLEKKGVNTGYFAISPMNGSRIPIWIGNYVLLDYGTGCVMSVPAHDERDYEFAIKYKLPIKVVITSDDKKTNNNVYSGEGILINSDEFDNLKSSSAKTKIIDALVEKGFGKSKINFRIRDWGISRQRYWGCPIPVFYHEDGSVHPIPEKDLPVELPEDVDLDSEGNPLASHPTWKYIKCPYTGKNAVRETDTFDTFFESSWYYLRFLTPELRERIFDKKFESWLPVDQYIGGIEHAILHLLYARFFHKLLRDLGIIKSSEPFKALLSQGMVLKDGSKMSKSKGNIVDPKDIVTKYGADTLRLFIMFAAPPDNNLEWSDTAIEGSYKFIKRLWVLSKKIIEDKDNKSNTATNIHSQSLELKLNKTIEKVTNDIFNRKSFNTAIASIMELFNDLNKYEQSKNRNILLCRQSLESILKMLSPIAPHVTQYLWKELGYEKLILDEKWPTARTDELKETKKEIIIQINGKLRGRVTIKPGISESQIKSIIENDKKIYKYIENHEIKKIIYIKDKLINYVLD

SEQ ID NO: 190309 - protein, 343 aa, Unknown
  Bacterial polypetide isolated from the Sargasso Sea
HPQGYDSFGLPAEQYAIRTGQHPLKTTSDNINMYRSQLDRIGFSFDWSREIRTSDPKYYKWTQWIFILMFNSFYCTKDKKAKSINTLISMFEKDGDKDFKEHLLENGYSFTSSEWKNFDEKIKSDILMNFRLAYLTDGDVNWCEELGTVLANDEIINGVSERGGYPVTKKKVKHWCLRISKYSDRLLNDLDKIDWPDPLKEMQRNWIGKSKGVSVTFNVEDSNKKIEVFTTRPDTIFGVSFLTIAPEYKEINDLSSLNYKSEIENYIEEVSKKSERERLSDVKTVSGVFSGSYAIHPFTGNKIPIWISDYVIASYGTGAVMGVPAGDQRDFDFAKKFKIDIPN

SEQ ID NO: 190310 - protein, 357 aa, Unknown
  Bacterial polypetide isolated from the Sargasso Sea
MAEYVPVEIEAKWQKSWEESGSFEPDFETEKSRYYMLTMLPYPSGDLHIGHWYAMAPSDTYARFLKMQGNEVFFPIGFDAFGLPAENAAIKNNIHPKDWTYKNIERMRLQLRSMGNMFAWKNEVVSCDPDYYKWSQWFFLRMLEMDLAYREFAPVDFCNHCQTTLAREQVWGDERLCERCGNTVIRKELNQWKLRITNYADELLDFDGLDWPERVRLMQTNWIGRSNGVEFDIELDLPCSLQFRIFTTRPDTVFGMTFCVLAPEHELVEQIVTDDQKEEVSIYCENAMRKDEIERMSESQEKDGVFTGAYAINPLNGDRVPVWVAEYVLAGYGTGAIMGVPAHDQRDFLFARRYDIP

SEQ ID NO: 190311 - protein, 92 aa, Unknown
  Bacterial polypetide isolated from the Sargasso Sea
MSSNYKPQLIEKTIQDKWDKEERFIAKIDDREKFYCLSMFPYPSGKLHMGHVRNYTIGDVISRYKRMNDFNVFQPMGVGCFWVASRKCSNRK

SEQ ID NO: 190312 - protein, 372 aa, Unknown
  Bacterial polypetide isolated from the Sargasso Sea
RETDTMDTFVDSSWYFARFTSPKSITPTDEDSIDYWMNVDQYIGGVEHAILHLLYSRFFCRAMFETGHIPRKSKEPFSSLFTQGMVCHETYRDEDGKWLSPIEVKEIKKINNKRNFINIKTGSHVELGPSIKMSKSKKNVVDPEDIIDQFGADTARWFMMSDSPPERDVEWTTAGVEAAWRHLQKVWRISLQIYNEGKNLNSVAEFKLDLTENKEDNHLLQATHNSINDVTSCLTNFSFNKAVAHMYELTNFISNTNASYGAKEYSIKILASIMQPITPHLSQEIWSLFGCKSFLYNEKWPQVIKKFIQKQEMTYPIQINGKRRAEITVLKNISNSELEEKVLTHPTVEKFLNGFTPKKVIIVTGKIINVVI

SEQ ID NO: 190313 - protein, 672 aa, Unknown
  Bacterial polypetide isolated from the Sargasso Sea
MLKPDTEAYIPSVVESKWQKKWKDSDIYKTFDNVPSKKNWYALSMFPYPSGDLHIGHWFAFTPADAHARFKRLEGYNVMHPQGFDAFGLPAENAAIKRNINPKKWTFDNINNMQKQFDMMGNSYDWNRKVVTCTPEYYKWNQKFFIDMFKKGLAYRKNGPVWWDPIDQTTLANEQVVDGKSERSGAEVVKKLMPQWYFKITDYAEELLDMSSLDWPEKIKQMQRNWIGKSEGVTIKFNIENSDKKISTFTTRIDTIYGVTFVVLAPEHPLINELALDKNKNVKEYIKESQKLSEIDRTSTIREKTGVKTDIYCINPVTNEKVPVFIGDYVLASYGTGAVMGVPAHDERDFIFAKKYDLPIKVVISPDGSKNLDLKEAFTGNGIQINSNEFNGLSNNEGKKKIANLIEDKGFGEKTITYHLRDWLISRQRYWGTPIPMFYDDNNEIIPVDEEFLPVILPDAKEFMPTGQSPLTLDENFLYFDHPKYGKLRRETDTMDTFMDSSWYHLKFASPGILDIPFEKEKIDLWSPVDQYMGGAEHAVMHLLYARFFNKVLRDLGYVDFDEPYKRLFNQGVMLARHMKISKRNNPLNPEPLVEKYGTDSVRAYLMFLGPWDRGGDWSDSGINGVYRWLHRIWDMVTIKYKENKISEKETKNCKQISNETTKNILTDHGKL

SEQ ID NO: 190314 - protein, 355 aa, Unknown
  Bacterial polypetide isolated from the Sargasso Sea
MVERYNFKIIEEKWQKFWNENKSFSTKIDKNKKKFYCLEMFPYPSGKIHMGHVRNYTIGDVLARFKALQGYNVLHPMGWDSFGMPAENAARENNLSPKKWTETNILNMKTQLKRLGLSIDWDREISTCSPEYYKHQQEFFLELYDKGLVYRKEQDVNWDPVDKTVLANEQVIDGKGWRSGAPVERKKLNQWFFNITKFSNELLESLETLNQWPNKVKIMQKNWIGKSFGCEVKFKIQSSRNIDEIKCFTTRPDTLFGSSFLALSVDHPLSKFYEDNKEFLEFKKKCSKTGTTEESIANADKIGFKTDLIAINPIDEKIKIPVYFANFVLMDYGLGAVFGCPAHDQRDLDFAINII

SEQ ID NO: 190315 - protein, 145 aa, Unknown
  Bacterial polypetide isolated from the Sargasso Sea
MNKKYDHLEIEPKWQKFWDQNKTFKVEVDHNKPKYYILDMFPYPSGQGLHVGHPLGYTATDILSRYKRMCGFNVLHPMGWDAFGLPAEQYAVETGTHPADTTMKNIEKFKSQIKSLGFSYDWDREINTTDPRYYLWTPWIFLRLY

SEQ ID NO: 190316 - protein, 273 aa, Unknown
  Bacterial polypetide isolated from the Sargasso Sea
MTKEYNPKSIEEAVQEKWESNKTFESKIDDREKFYCLSMFPYPSGKLHMGHVRNYTIGDVISRYKRMQNYNVFQPMGWDAFGLPAENAAIENKVSPKEWTNQNIQNMKTQLKSLGLSYDWSKELRTCDESYYKWEQLIFKKFFDAGLVYRKKSMVNWDPVDETVLANEQVIDGKGWRSGAQVELKEIDQWFIKITNYADELLESLDDLDWPENVKLMQKNWIGKSNGAEIKYQIIGTKDFLTTFSTRPDTIFGVSFLALSPNHPMSIEIFKRE

SEQ ID NO: 190317 - protein, 428 aa, Unknown
  Bacterial polypetide isolated from the Sargasso Sea
DSGEFNDLSSHEEASKKINEFLVKNKIGDEKTTYRLRDWLISRQRYWGCPIPLINCEDCGLLPEKYENLPVLLPEIKDYINTDGSPLSKSKEFVETDCPKCSKKALRETDTMDTFVDSSWYYMRFLDPKNEKEPFNSHFINEWLPVDQYIGGVEHAILHLLYSRFFVKALRDLGLMTIDEPFHNLFSQGMINFGGAKMSKSKGNIVDPEEYFATHGADALRLYILFMAPPSDGVEWNDGGIEGTKRFLNKLWDNLLKIINQEDVEQELSEDDKSLERKINQTIKSVTQHFEKFEFNTAVSDLMKFNNDLSEYLKHNSILPKELKDVLIKNILILLYPMSPHMASEIYESYFDSDISTEKWANFDDSKLENPMYELVVQINGKKKHAIMVETGIEEDEAITLCESNFDINFKEAKKIIFIKDKIINIVQ

SEQ ID NO: 190318 - protein, 340 aa, Unknown
  Bacterial polypetide isolated from the Sargasso Sea
WRSPLAAIDSWVNIIDKETGKSAKRETHTMPQWAGSCWYYLRFLDPNNDDRPWDKDVEKYWMPVDLYVGGIEHAVLHLLYSRFWHHVLHDLGLVSTREPYKKLFNQGMIQGEDGQKMSKSRGNVINPDDVINEYGADSMRLYEMFMGPLDKSKPWSTKGLQGCARFAEKVWRIFNSTDKYSENPDSDETIRLLHQTIAKVTTDLDNMRFNTAISQMMIFSNHVQSLSEININTLKTFLLLLNPFVPHMAEEINEHMNAYESLSYAEWPNFDPELAKEDLITIAIQVNGKLRGNIQVSAEIDVKTLKSDASQIDTVKKHLDGKDIIKKIVVSGRLVNFVVK

SEQ ID NO: 190319 - protein, 112 aa, Unknown
  Bacterial polypetide isolated from the Sargasso Sea
MEYNHQEIESKWRKYWAVNETYKVLEDKSKPKYYVLDMFPYPSGAGLHVGHPLGYIASDIYSRYKKMQGFNVLHPMGYDSFGLPAEQYAIQTGQHPAITTKKNILTYRNQLD

SEQ ID NO: 190320 - protein, 563 aa, Unknown
  Bacterial polypetide isolated from the Sargasso Sea
KIPIWVSDYVIASYGTGAVMAVPSGDQRDYDFAKKFNLEIKNIFKGIDISKSAFEEKSNFTLENSDFLDNLSFSDAVDKVILEIEKKDIGKSKIQYKLRDAIFSRQRYWGEPIPIYYRNSEPVALSLSDLPLELPEVDNFLPTKNGDSPLGNSKKWAWDLKNKTVVENNLINDTDIFPLELNTMPGWAGSSWYFYRYMDSANKDFFASKEAIDYWKSVDIYLGGSEHATGHLLYSRFYQKFLFDLNILPINEYASKLINQGMILGNSSFIYRERGTNKFYSKGLIKDKNVDKIRIDISYVDIDNYLYVDKLKKSDKSFSDSEFYSENGKFIVEREHEKMSKSKFNVVNPDDICDQYGADTLRMYEMFLGPIEQSKPWSTRGISGVHSFLKKFWNLFFLNGDFNVSQDNPSEESIKILNQTIKKVTNDIEKFSLNTCVSSFMICINKLSEEKCNNESVLKQLLILISPFAPHFAEELWSLMGNKESIVDEPFPIHDDSVLVEYQKVYPVSFNGKTKFTLSLSLDLSNKEIEEILLNDNQTKKYLNNKKPKKIIIVKGRIINIVV

SEQ ID NO: 190321 - protein, 282 aa, Unknown
  Bacterial polypetide isolated from the Sargasso Sea
MKAQLKKLGLSIDWDREISTASEEYYKHQQLFFLELLEKKLVYRKENYVNWDPVDETVLANEQVIDGKGWRSGATVERKKLSQWFFNISKFSQNLLDGLDNLEQWPNKVKTMQKNWIGKSFGCEIDFKTEGSLPVEKIKCFTTRPDTLFGFSFLALSIDHEISNFYKDDKDFIKFKDECSKTGTTEEAIAVGEKIGFKTDLVAINPLNPKQRVPIYFANFVLMDYGFGAVFGCPAHDQRDYDFAKKYNLEIKTVVRPNDQDETFKVNMKLIQVQVLLLILIF

SEQ ID NO: 190322 - protein, 801 aa, Unknown
  Bacterial polypetide isolated from the Sargasso Sea
MSSTYNPKFIEEEIQKKWDQEKRYESKVDDREKYYCLSMFPYPSGKLHMGHVRNYTIGDVISRYKRMRNFNVFQPMGWDAFGLPAENAAIANKVSPKEWTDQNIENMKDQLKSLGFSYDWSKELRTCDSKYYKWEQLIFKKFYDAGLVYRKKSFVNWDPVDETVLANEQVIDGKGWRSGAQIEIKEIDQWFIKITDYADELLDSLDDLDWPENVKLMQKNWIGKSKGAEIKYNIEDSDDYLIAFSTRPDTIFGVSFLAIAPNHPLAIDVANENKDVAEFLNKCKEIKAAEADIAKAEKLGIDTKIKVIHPLTGEKIPLWIGNFVLLEYGTGVVMGVPAHDSRDYEFAKKYKLKIDQVIDTGEKSLPITEKGMLINSQKYDGMTSDHAIKEIVKDLIDTGAGEELIQFRLRDWGVSRQRYGGCPIPVIYEDEFPKVINEDEMPVELPALDQQSLPKPLSQNKNFTDLGNGLQRESDTFDTFMDSSWYYARFTSADNNEDIFDQNTKYWLPVDLYIGGIEHAILHLLYSRFFHKALRDIGLLEGNEPFKRLLTQGMVLKDGAKMSKSKGNTVDPQSYIEKYGADTVRLYMMFTSPPEQSLEWSESSVEGASRFLKKVWNLVDGRKFEIFDIDNNFSKEELELRRKSHATLKKVENDFEVRFSFNTAIAAIMELLNFIPDNFKSENASDSQKFCLNEAIIFTLKMLFPIAPHISEYLWNNFQVEESNIESSWPKFETCLIEAEEFELIIQVNGKVRGKINLNKDTSQKDIEQAALSVENVKNFIDSSEIKKTIYIKEKLINFVI

SEQ ID NO: 190323 - protein, 799 aa, Unknown
  Bacterial polypetide isolated from the Sargasso Sea
MLEEQYNPEKIESSIQSEWEKINKYKATPDDREKYYCLSMFPYPSGKLHMGHVRNYTIGDVISRYKRMRGFNVFQPMGWDAFGLPAENAAIQNKVDPQSWTEQNIENMKLQLKRLGFSYDWSKELKTCDPNYYKWEQEIFSLLHKQGLVYRKKSLVNWDPVDETVLANEQVIDGKGWRSGATVELKEIDQWFLKITDYADELLTSIENLDWPENVKSMQKNWIGKSFGSEISFPLPDGEELTAFTTRIDTIYGVTYLAISPNHPISQNLANQDPEIDDFIKKCNETKMAEADMAKADKLGLKTNLKVKHPFTGIDLDVWIANYVLMDYGTGVVMGVPAHDERDHEFALKYNIDIKQVIKADEVPSSEKGELINSEKFNGLTSENAIQDINSFLEKEKIGKGIENFRLRDWGVSRQRFWGCPIPVVYKNDEPIFLEKTDLPVELPKIKDGESPKPLSQNKDFFDIGPNESREVDTFDTFVDSSWYYARFTAADNNNKALDENSAYWLPVDLYIGGIEHAILHLLYSRFFHKAMRDIGLVEGDEPFKKLLTQGMVLKDGSKMSKSKGNTVDPQQYIDKYGADTIRLYMMFTAPPEQSLEWSETAVEGAFRFLKKLWSFTHDKKFKKVKIQGELDNSQKDFRRKIHLTIKKVTDDYENRYAFNTVIAACMELLNSTPDQIKGEISSENDQFCLNEFIASILQMLYPIAPHICETLWNNFFENSSEIEDTWPTFDEDLMVTDTFELVVQINGKVRGKIEISSNLEQDEIESVAKSIKNVDDLLGDKEIKKCIYVKEKLINFVI

SEQ ID NO: 190324 - protein, 817 aa, Unknown
  Bacterial polypetide isolated from the Sargasso Sea
MIDSKYNPREIEESAQSFWADQRVFESREDQNKEKYYCLCMFPYPSGRLHMGHVRNYTIGDVVSRYQRMQGKNVLQPMGWDAFGLPAEGAAIKNNMPPSKWTRQNIDYMKQQLQMLGFGYDWSRELATCDPDYYKWEQWMFTRLLEKGIAYRSDAIVNWDPVENTVLANEQVIDGKGWRSGATIERRNMPQWFLRITDYCEELLEGLDDLDWPEQVKVMQRNWIGRSEGYEIEFQIPHLDTSVSVYTTRTDTLFGATYLALAPEHPIVQQIASSDQNVHQFLEDTKSQAVSEEALEKMEKKGVALGFNAINPINGEEIPVWTANFVLMTYGTGSIMSVPAHDQRDHDFAKKYDLTIQPVIKPIEKDASHDFNEEAYIEEGILFNSGKYDGINSADAKDQIGEMLTDKSAANKVINYRLRDWLVSRQRYWGAPIPVLTNEDGDLVSESDENLPVTLPEEVEFDGVHSPLKTMSEFYEVNDGGMPLVRETDTFDTFMESSWYYARFCSSDSDNAMLDERAKYWLPVDLYIGGIEHAILHLLYARFYHKLLRDEGLVEGNEPFKRLLTQGMVLNDGAKMSKSLGNTVDPEEMIQNYGADTVRLFMMFTSPPEQSLEWSDTAINGSYRFLKKLWKLIKTHQDSIKDVSEISTNDGFNEDQNKLRRKTHQTISKVTDDIGRRYTFNTAIAAVMELVNEVSAFNVNDELDRQVIKEAIESILLLLSPIVPHICHQLWLDINHDQPIIDAEWPKFDSSLLKSETSLIVIQVNGKLRSKLEVDASISEEELKSMALSDEKVMGFIEGNEIKKIIVIPEKLVNIVV

SEQ ID NO: 190325 - protein, 419 aa, Unknown
  Bacterial polypetide isolated from the Sargasso Sea
GCPIPIAYDKNGNVIQVPKKDLPVKLPENIDISRKGNPLDQEDDWKKVKINNQDCIRETDTLDTFVDSSWYFLRFCSPSNKDYGYDKKEVDYWMPVDQYIGGVEHAILHLLYSRFFMQALGFKNKEFKDKEPFKGLFTQGMVCHETYKDKDGNWLSPDQVFTEDGKNYFRKDDKASKIIVGSNESMSKSKKNTIDPEDIINNFGADSVRLFILSDSPPEKDVQWSDQGMVASYKFIQKFWMLHQKIKEKIENKTITKEKSNDKNLSKFTNLLISKITANLDKFNYNVIIANLYETYNFLVREIEKEIDPKDLLKNYEKILKVINPILPHLSSECLEDINNKFNLNWPKIEDKYLIEDNINIVIQINGKTRSILKLKKDITEEELIEEIKKDIKLKKYIEGKLISKTIYIKNKLINLIIK

SEQ ID NO: 190326 - protein, 278 aa, Unknown
  Bacterial polypetide isolated from the Sargasso Sea
MDRYNFKLVEKKWQDYWDKNKSFISKIDKSKKKFYCLEMFPYPSGKIHMGHVRNYTIGDVLSRYKSMLGFNVLHPMGWDSFGLPAENAAKQNNLDPKIWTEKNISVMKTQLKKLGLSIDWDREISTCSKEYYKHQQKFFLDLYDKGLVYRKESYVNWDPVEKSVLANEQVIDGKGWRSGVSVERKKLNQWFFNISKFSEDLLSGLDNLDSWPNKVKTMQKNWIGKSFGCEINFNLKKNDQVKSIKCFTTRPDTLFGMSFLALSIDHPISKFYQDREEL

SEQ ID NO: 190327 - protein, 384 aa, Unknown
  Bacterial polypetide isolated from the Sargasso Sea
QQQHWVNVPCPSCGEPATRETDTMDTFMCSSWYFLRFADPHNTEQPFSREAVNRWLPVEQYVGGIEHAILHLLYSRFFTKALKDRGLIDVAEPFDRLLTQGMVQGTTYRNPSTGKYVAPAEVSDPEMPTDPTSGEPLEVLFEKMSKSKYNGVDPAAVIDRYGADTARMFILFKAPPEKDLEWDDADVEGQFRFLQRIWRLVESAASRIDSLEPEERPDPLADTDAKVRRAIHVAIEAVSEDLQDEIQLNTAISELMKLTNAITSVGVAELSTSVLQEALSTLLRLLAPFAPHLAEELWHQLGGSSSVHRAGWPVLDPSALVQDSVDLVIQIKGKVRGTIQVPATADKEQLEALALASEVAAKWLEGHPPRRVIVVPGKLVNLVP

SEQ ID NO: 190328 - protein, 354 aa, Unknown
  Bacterial polypetide isolated from the Sargasso Sea
DTLDTFVDSSWYFLRFCSAGIKDDGFNYDDINYWMPVDQYIGGVEHAILHLLYSRFFMRAIGYNNPKFKFKEPFKGLFTQGMVCHETYRDDKNKWYSPDEVESDNGRDFYLKSNKKLKISVGPSESMSKSKKNTIDPEKMINHYGADAVRLFILSDSPPEKDIQWSDQGMISAYKFIQKLFTLNEKIKQIADLKETSSSEEISRFINQYIYKIEKNLANFHYNVIIANIYEAYSFLAKIVKEEKNYSNLVEDYSKFLISISPVIPHFSHECLSQMNKHKDIWPEIQEKFLVEENVNIVVQFNGKKRGVFETKKDTSEKELVEQIMKSKVFDKNFNDKKIKKQFYVNNRLINFIV

SEQ ID NO: 190329 - protein, 496 aa, Unknown
  Bacterial polypetide isolated from the Sargasso Sea
KNIILQIKTVVKPDNESDDYQVQKEAFSGAGVIINSKFLNGLSAPQNSIDETIKILEERKLGKKKTNYRLKDWGISRQRYWGCPIPIAYDANNNVIKIPEKNLPVTLPESIELNTNGNPLDSQTEWKEVVIDGKKCKRETDTLDTFVDSSWYYLRFCSAKNTNKAFDIEDIDYWMPVDQYIGGVEHAILHLLYSRFFMRAISLNNKETSFKEPFEGLFTQGMVCHQTFKDNNNNWVYPEDVFSEDGRNYYQNKDPSKKVIVGPSESMSKSKKNTVDPEKIIKLYGADSVRLFILSDSPPEKDIQWSDSGISASFKFLQKLWALNEKIVSNKKKFSEFDKALEKFTNQILKKITNDLDRFGFNVVIASIYKIYTFYNKQTNKSDWGSNFFENYVKILKIINPIIPHFSNECLERLNQPVKNLQWPSANEKYLDEEIVNVVTQINGKKRKVFQIDKSIDKESLIEKIKNDDQIKKYIDNKKIIKTIYIENKLINFIIR

SEQ ID NO: 190330 - protein, 335 aa, Unknown
  Bacterial polypetide isolated from the Sargasso Sea
YGFSKEDIDYWMPVDQYIGGVEHAILHLLYSRFFMKAIGYKNKDFNFKEPFKGLFTQGMVCHETYKDKNGKWLSPDEIELIGNQYQKKGDPKNKIKVGPSESMSKSKKNVIDPEYIMNNYGADAVRLFILSDSPPEKDVQWSDRGMVASYKFLQKLWMLHNKIKIKIENNLDILNDDNEIEKFTNQMINKITNNLENFSYNVMIANIYETYNFLNKQIAKKINSKSLKENYIKILILLTPAIPHFTSECIEDLNVLGNLEWPETNSKFLNEDKIDYVVQINGKKRLILNENRDIDKESLLDKIKTNKMSEKYLKDKTINKVIFIKNRLINLLLNE

SEQ ID NO: 190331 - protein, 416 aa, Unknown
  Bacterial polypetide isolated from the Sargasso Sea
KPKDWTEENIKIMKAQLKMLGLSIDWDLEISTCNEDYYKHQQELFIDFYNQGLVSRKETYVNWDPVEKTVLANEQVINGKGWRSNAVVERKKLSQWFFNITKFSNELLKDLEKLSGWPVKVKLMQKNWIGKSIGCELNFKVIGQNKSLSIFTTRPDTIFGASFIAISVDHEISKNFHKNQDFEKFKDKCSKIGTTEEALANAEKLGFNTKLFAEHPFSKGKKIPIYVANFVLMDYGNGAIFGCPAHDQRDFDFAKKYHLPIIRVVSDKNNPDGGEKMQEAYIGNGSMVNSEFLNGLPVEEAKKKIISKIEEKKIGKKQTLFRLKDWGISRQRYWGCPIPMIYLEDGSVVPVDKSELPIKLPYDADLRSSGNPLDNHPNWKKTTHKKTGKPAIRETDTLDTFVDSSWYFLRFCSPQE

SEQ ID NO: 190332 - protein, 264 aa, Unknown
  Bacterial polypetide isolated from the Sargasso Sea
GLLEGDEPFKRLLTQGMVLKDGAKMSKSKGNTVDPQSYIEKYGADTVRLYMMFTSPPEQSLEWSESSVEGASRFLNKIWKLVNKRKNLKFERDLKFTKQELDLRRKSHSTLKKVENDYESRFSFNTAIASIMELLNFIPEEFKTEGATDSQKFCLNEAILFTLKMLFPIAPHISEYLWNKFISDESCIETSWPEFDDEIVESDEFELVIQVNGKVRGKMHANINMTENEIEDLSLNIKNVKNIIGENKIKKVIFVKNKLINFVT

SEQ ID NO: 190333 - protein, 347 aa, Unknown
  Bacterial polypetide isolated from the Sargasso Sea
KNSPPIPLSQNEDFINLDNSIFRESDTFDTFMDSSWYYARFTSSNNNNEIFDENTKYWLPVDLYIGGIEHAILHLLYSRFFHKALRDIGLVEGDEPFKRLLTQGMVLKDGAKMSKSKGNTVDPQSYIEKYGADTVRLYMMFTSPPEQSLEWSESSVEGASRFLKRIWSLIEGKQYTKLDMKFEFSKEEIELRRKCHSTLKKVENDYESRFSFNTAIAAIMELLNFIPDEFKKDNATDAQKFCLNEAIQFSLKMLFPISPHICEYLWNSFVNDGSCIESSWPKYNEAIIESDEFELIIQVNGKVRGKLNISKNLDEETLKNLSLEVKNVKNNIADSEIKKLSLLKISL

SEQ ID NO: 190334 - protein, 726 aa, Unknown
  Bacterial polypetide isolated from the Sargasso Sea
WDAFGLRAENAAIENKVSPKEWTNQNIQNMKTQLKSLGLSYDWSKELRTCDESYYKWEQLIFKKFFDAGLVYRKKSMVNWDPVDETVLANEQVIDGKGWRSGAQVELKEIDQWFIKITNYADELLESLDDLDWPENVKLMQKNWIGKSNGAEIKYQIIGTKDFLTTFSTRPDTIFGVSFLALSPNHPMSIEISKENEKIKKFLEVCKESKTAEADMAKADKLGIDTGIRAMHPITKEEIPIWIGNFVLLDYGTGVVMGVPGHDSRDFEFASKYNLDIKQVIQSDRTEDLPILDKGKLVNSDKFNGKTSEEASKEIIQELVDNGYGEELVQFRLRDWGVSRQRYWGCPIPVIYKNGEPEIIDENDMPVILPELDDGAAPVPLSQIKDFVELGNGITRETDTFDTFMDSSWYHARFTSAGNSKQIFDENTKYWLPVDLYIGGIEHAILHLLYSRFFHKALRDIGMVEGDEPFKRLLTQGMVLKDGAKMSKSKGNTVDPQSFIDKYGADTVRLYMMFTSPPDQSLEWNESSVEGASRFLNKVWKLIEGKKYIELKINDLKFSKDDLALRRKSHATLKKVQNDYEKRFGFNTAIAAIMELLNFIPEKFKVDELNDSSKFCLNEAIVFILKMLSPIAPHICYQLWSEYEYDARNIESWWPEIDESLLSIEEFELIIQVNGKVRGKINIEVNKSKTEIEELAKNVDNVKSHIGSVNVKKTIYVENKLINFVV

SEQ ID NO: 190335 - protein, 562 aa, Unknown
  Bacterial polypetide isolated from the Sargasso Sea
HPLCTKFSNNDKFIKFKEECSKTGTTEEALANADKIGFETKLFCDHPFKKNHKLPVFVANFILMDYGTGAIFGCPAHDQRDFDFAKKYNLKITEVVAENKKQPKNFNNLKEAYTGDGILVNSDFLNNMNVESAKVKIIQKIENLKIGSKKVSYRLRDWGISRQRYWGCPIPMIHLENGTIKPVEKNELPIKLPKDIDLKTNGNPLDHHKSWKFTKDKISGKPAIRETDTLDTFVDSSWYFLRFCSPKKEESAFDLDKVNYWMPVDQYIGGVEHAILHLLYSRFFMRALKKNDTKIKYTEPFKGLFTQGMVCHETYKDSNGKWLSPDEIEKDDDGNFIKKDDQSKVIVGSSESMSKSKKNIIDPESMIKSYGADAVRWFILSDSPPEKDVQWSNQGVNAAYKFLQKIYNLNLLIIDRKESQDDLDEDFELKINSYIFRITNLIENFNLNVVIACVYELYNLFNEYLNKKISNKCMKNNIIKVMKILIPFTPHLAHECLELLGTNNVSKWPAVDKKLIDKEKIKIAVQLNGRTKTILEVEKNINQNDVVEICKKKCENEQKFSK

SEQ ID NO: 190336 - protein, 658 aa, Unknown
  Bacterial polypetide isolated from the Sargasso Sea
GATVERKKLSQWFFNISKFSQDLLDGLDTLDQWPNKVKTMQKNWIGKSFGCEIDFKTEGNLPVKNIKCFTTRPDTLFGFSFLALSIDHEISNFYKDDKNFLKFKEECSKTGTTEEAIAVGEKIGFKTDLVALNPLNPEQKVPVYFANFVLMDYGFGAVFGCPAHDQRDFDFAKKYNLEIKTVVRPHDQEDTYQVNKEAYPGPGVIINSEFLNGLSAPDNSVMETITILEKKDIGKKKINFRIKDWGVSRQRYWGCPIPVMYDEEGKAHPVPKETLPVKLPEKIDLNVKGNPLDHQNSWREIKIDGKKFIRETDTLDTFVCSSWYYLRFCSPNNKDYGFNKEEIDYWMPVDQYIGGVEHAILHLLYSRFFMQALSYQNPSFNIVEPFEGLFTQGMVCHETYKDKNNNWISPDEIEVRNGKKVLKKNQTEEIKIGPSESMSKSKKNTIDPEKIIEMYGADSARLFILSDSPPEKDVQWSDEGIASSYKFIQKLWSLNEKVIHEIEQNHEEDEGKDLIKFTNKYLKKMTDALNAFSYNILIANLHEMQNFFNKELIKKYTKKTLTENFSKILVTMIPIIPHLANECLKRINYNVIEWPEYDETLLVEDIIPYVIQVNGKKRAIIEAKRDILDEELFEIVQQNKNLKKYFYEKEIKKKIFVP

SEQ ID NO: 190337 - protein, 335 aa, Unknown
  Bacterial polypetide isolated from the Sargasso Sea
PALSEIEQTQWIPDWGQSRIEKMVENRPDWCISRQRTWGVPITLFVHRETEELHPDSVSLMARVANRIEQEGIQAWWDLDAAELLGEEAEQYRKVTDTLDVWYDSGSTFASVVGARPEFHGHGVDLYLEGSDQHRGWFMSSLMISTAITGKAPYKQVLTHGFTVDGKGRKMSKSIGNVIAPQQVTNKLGADILRLWVAATDYSGEMTVSDEILNRSADAYRRIRNTARFLLANLNGFDPAKDLVAVEDMVALDRWAVRRAASLQQEIIEAYEQYNFHIVTQKLMQFCSVELGSFYLDIIKDRQYTAKQEGHARRSCQSALFHIAEAMVRWIAPIL

SEQ ID NO: 190338 - protein, 332 aa, Unknown
  Bacterial polypetide isolated from the Sargasso Sea
SMLTDRPDWCISRQRNWGVPITLVVHKDTGEIHPDQKDLFEKFAQIIEKDGISAWDNLDLRDYIDDHEDYIKTSDSLDVWFDSGVTHFAVSEKRFGANVVADLYLEGSDQHRGWFQSSLLTSIAMNKSVPYKTVLTHGFVVDEQGRKQSKSLGNVVSPQKVWDSLGADILRLWVASTDFRSEMVASDEILKRTSDQYRRIRNTFRFILGNLSDFSDKDKVSFEDQVELDKWIINEIKTLQKEVISLYESFSYHKAIQKIHNFCVNELGGVYLDIVKDRLYTCKNDSSARRSCQTSLDCILNILVRLISPILSYTAEEIWQTSNRLNSQEDSV

SEQ ID NO: 190339 - protein, 323 aa, Unknown
  Bacterial polypetide isolated from the Sargasso Sea
FTYALIEIIHETRKINIIIAEDLIDSTLERIEVEKFISLGTCKGSDLLGFEATHPYLDRNSLIISGDHVTTDAGTGIVHTAPGHGLEDYTVSIQNGIDVLNPVKGNGTYNEDVEHFAGQFVFKANENITTLLKERGVLLSKSSYEHSYPHCWRHKSPVMFRATPQWFISMEEKDLLKQSQNSIDSINWAPTWGQARMNSMLEERPDWCISRQRSWGVPIALLINKDTGELHPETEKIIEKVADLVELDGIQAWHDIEIKDLTNDYESYEKITDCLDVWFDSGVTHACVLDVNEDLHFPADLYLEGSDQHRGWFQSSLLTSIAR

SEQ ID NO: 190340 - protein, 282 aa, Unknown
  Bacterial polypetide isolated from the Sargasso Sea
MKSQNSKEQKSDFSYKETLNLLKTDFSMRANSVVREPEIQDFWANNDIDFQLGSSNSGEIFTLHDGPPYANGALHMGHALNKVLKDIINKYKTLRGFRVHFVPGWDCHGLPIELKVLQNLKSDERKNLDTLTLRKKATDYAHIQINNQKEGFKRWGIWGDWNNPYLTLKKSYESAQIGVFGKMFLNGYIYRGLKPVHWSPSSRTALAEAELEYPDEHFSKSIYVSLKITKIPEEILLNFNQENLNIKKDFFQNNSFITIWTTTPWTIPANEAVAVNPKNKVR

SEQ ID NO: 190341 - protein, 287 aa, Unknown
  Bacterial polypetide isolated from the Sargasso Sea
RQRAWGVPITVFVNKGTGEPLRDPTVMERVVSIFKEEGADAWFTSPPDRFLSNDYHADDYEQVTDILDVWFDSGSTHAFVLEDGEWEDLAWPASLYLEGSDQHRGWFHSSLLESCGTRGCAPYETVLTHGFVMAEDGQKMSKSLGNIVEPQNVYNQHGADILRLWVIGSDYAEDLRIGPEIVKQQADVYRRLRNTLRFLLGNLHGFSDAERIPLRDMPELERWVLDRLWRMDKALRETCDNFQFHTFFTELHNFCTVDLSAFYLDIRKDSLYCDRLDDPRRRAARTV

SEQ ID NO: 190342 - protein, 303 aa, Unknown
  Bacterial polypetide isolated from the Sargasso Sea
TKHVLNFEGIHIFKANPIVIEKLKNEKNLLANGKLNHSYPHSWRSKAPLVHRATPQWFISMESHKLRDKALKAIDDTEFYPPKGKERLRSMIETRPDWCVSRQRVWGVPLPIFISKSDGKVLVDEDVFENIASIYEKEGSDCWFSDDPQKFLGDKYKAEDFVKLKDIVEVWFDSGSTHSFVLEKRGDLKWPASMYLEGSDQHRGWFHSSLLESCGTRGRAPFESILSHGFVMDGKGLKMSKSLGNQIFPEDILKKYGADILRVWVTASDYSEDLRIDYTILEQHAKAYRKIRNTFRYLMGNIN

SEQ ID NO: 190343 - protein, 307 aa, Unknown
  Bacterial polypetide isolated from the Sargasso Sea
LGRCFVQVVDASEFIKRTESKKIDDGRDLYIPIWTTTPWTLPSNEAVAMGKDISYGIYKLTLNGREILVVIANDLKETIKNRWNVENLEVLEEISAENLSGLRLQHPFDERTVPVLLGEHVTTENGTGSVHTAPAHGLEDFQLGQENDLDLNCYVNTYGVFIETKESFAKQHIFKSESNIIEKLSDSGLLISSEKFEHSYPHCWRHKTPVIYRTTKQWFISMENQDFRTACLSSIKDVNWKPTWGEERIHGMIETRPDWCISRQRYWGVPIPLFTHKDDQGIHPNTPDLLNQIADKVEDQGIDAWFD

SEQ ID NO: 190344 - protein, 374 aa, Unknown
  Bacterial polypetide isolated from the Sargasso Sea
IETRPDWCVSRQRVWGVPLPLFIDKKTGKPLKDKNVINRIADIYEKEGSNTWFSENPQRFLGDEYNADDYEQVKDVVEVWFDSGSTHAFCLEKREDLKWPASMYLEGSDQHRGWFHSSLLESSGTRGRAPYESVLTHGFVVDGKGRKMSKSLGNVISPDDILKKYGVDILRLWVVASDYYDDLKLDNAILQSQAESYRRIRNTFRFLIGNLHNYSSEEIVAEEDFPELEKYLLHRLWEVDQVVKKCVKTFNFHLMFTTLLNFCSNDLSAFYFDIRKDIIYCDSSKSNTRKSSRTLLDIIFNHLVRWFSPSISFTTEEAWKAIGKNNSVHLEDFLNCKDVYQNKKLSEKWSLIKNIRKVSTGAIEKIREEKIIDQ

SEQ ID NO: 190345 - protein, 288 aa, Unknown
  Bacterial polypetide isolated from the Sargasso Sea
DFNLCLNNGIKAIETVDDDGKYTKNVSLFEGLHIFKANPIVIEKLKEQNNLLSNGELVHSYPHSWRSKAPLVHRATPQWFISMESHKLRSKALKAIDDTTFYPSKGKERLKSMIETRPDWCVSRQRVWGVPLPIFVNKKSNEILIDDEVFENIANIYEKEGSDCWFSDNPQKFLGDKYKAEDFNKLSDIVEVWFDSGSTHSFVLEKRKDLKWPASMYLEGSDQHRGWFHSSLLESCGTRGKAPFESILSHGFVVDGKGLKMSKSLGNVIAPEDILKKYGADILRIWVA

SEQ ID NO: 190346 - protein, 257 aa, Unknown
  Bacterial polypetide isolated from the Sargasso Sea
MTNYKDTVFLPQTEFSMRAGLPQKEPEILKSWQKIDLYKLLRHKRKNCTPFILHDGPPYANGNLHIGHALNKILKDIINRSQSMLGKDANYVPGWDCHGLPIEWKIEENYRKKKKNKDEVPLIEFRAECREFASKWMKIQSEEFERLGVCGDWENPYSTMKFESESTIMSELGKFLLNGGLYRGVKPVMWSTVEKTALAEAEIEYHDHTSTTIYAKFPIKQANNDSLINCNVVIWTTTPWTMPGNRAVAFGKHIEYS

SEQ ID NO: 190347 - protein, 277 aa, Unknown
  Bacterial polypetide isolated from the Sargasso Sea
PDTPLFAGQHVFKANDSVVEALKDAGKLLVHKALTHSYPHCWRHKTPIIFRATPQWFVSMEQKGLRSTSLEEIGKTRWIPDWGQQRIENMVAGRPDWCISRQRTWGVPIALFVDKDTSALHPNTPALMEQVAKLVEQSGIQAWFDLEPETLLGADAAQYVKVTDTLDVWFDSGVTHACVIEPRAEFHGATQADLYLEGSDQHRGWFMSSLMTGVAIKHHAPYKQVLTHGFTVDGEGRKMSKSLGNVVSPQDVMNKLGADILRLWVATTDYTSEMTVS

SEQ ID NO: 190348 - protein, 265 aa, Unknown
  Bacterial polypetide isolated from the Sargasso Sea
RERALNSIDKLVSWTPQTGRNRLYSMIEARPDWVLSRQRAWGVPLTCFTKKGALPTDSDFLLKNTTVNERIAKAFENEGADAWYLENSKARFLEGIVDPADYEQVYDILDVWFDSGSTHAFVLKEREDGSDDGFADLYLEGTDQHRGWFHSSMLQSCGTNGRAPYRGVLTHGFTLDEKGMKMSKSLGNTIAPEQVVKQYGADILRLWVAQSDYTADLRIGPEILKGVSDSYRRLRNTMRFILGSLSELTESEKIEPRRYARARTV

SEQ ID NO: 190349 - protein, 265 aa, Unknown
  Bacterial polypetide isolated from the Sargasso Sea
QKNLLGSGSLVHSYPHSWRSKAPLVHRATPQWFISMESHKLRNKALDSIDQTAFYPEKGKARIRAMIETRPDWCISRQRSWGVPLPIFVNKKTNEPLRDKEVVENIANIYEKEGSDCWFYDDPQRFLGKKYKKEDYIKSNDIVEVWFDSGSTHSFVLEKRKDLKWPASMYLEGSDQHRGWFHSSLLESCGTRGRAPFDSILSHGFVVDGKGMKMSKSAGNIISPEDILKKYGADILRLWVASSDYSEDLRIDHSILDQPCGVYRK

SEQ ID NO: 190350 - protein, 305 aa, Unknown
  Bacterial polypetide isolated from the Sargasso Sea
LETVDDDGKYTKNIPLFEGTHIFKANAIVIEKLKKEKKLVFNGKLNHSYPHSWRSKAPLVHRATPQWFISMESHGLRDKALKAINKTVFYPEKGKERLKSMIETRPDWCVSRQRVWGVPLPIFINKKDGKVLVDDEVFENIANIYEKEGSDCWFKDDAQKFLGKKYKAENFTKLSDIVEVWFDSGSTHSFVLETRKDLKWPASMYLEGSDQHRGWFHSSLLQSCGTRGEAPFETILSHGFVVDGKGLKMSKSLGNVISPDDILKKYGADILRIWVAAFYYSEDLRIDYTILEQHADAYRKIRNTF

SEQ ID NO: 190351 - protein, 288 aa, Unknown
  Bacterial polypetide isolated from the Sargasso Sea
HVRKVEPNVLNELTKKGNLINSEEYDHSYPHCWRHKTPVIFMATPQWFLSMSKSGLLEGAVRAVDDIKFIPDWGKDRMEIMLKERPDWCISRQRDWGIPITLFYNNDSGELHPNQDEIFRDAAEAIKSNGIDSWNEMELNYEDSSEYEKSSDIFDVWYDSGVTNFTVIDKLYGSNTQSDLYLEGSDQHRGWFQSSLLTSIAMKGIAPYKSVLTHGFVVDEGGRKMSKSLGNIITPQEIMNDSGADILRYWIASTDFRGEIAFSKDIFNRAIDGFRRIRNTMRFMASNL

SEQ ID NO: 190352 - protein, 210 aa, Unknown
  Bacterial polypetide isolated from the Sargasso Sea
MCAEIPDYKDTLNLPKTDFPMRAGLPKREPEWLAKWENIKVYDTLRQKKGRSSFILHDGPPYANGHLHIGHALNKILKDMVVRSQQMMGKDARYIPGWDCHGLPIEWKIEEQYRSKGKNKDDVDIIDFRQECRKFAAGWVETQREEFKRLGVMGKWENPYLTMDFHAERVIAEEFMTFLMNGTLYQGSKPVMWSPVEKTALAEAEIEYHD

SEQ ID NO: 190353 - protein, 288 aa, Unknown
  Bacterial polypetide isolated from the Sargasso Sea
NHLLPHILGRSKAPLVHRATQQWFISMESHGLRKKALKALDETVFYPSKGKERIKAMIETRPDWCVSRQRVWGVPLPIFVSKKNNEVLIDDEIFENIAKIYEKEGSDCWFSDDPQRFLGKKYKAENYEKLSDIVEVWFDSGSTHSFVLEKRNDLKWPASMYLEGSDQHRGWFHSSLLESCGTRGRAPFESILSHGFVVDGKGHKMSKSLGNAIAPEDILKKYGADILRVWVAASNYAEDLRIDYSILEQHAEAYRKIRNTFRFLLGNINDNFTKINFKDIDISKFPEL

SEQ ID NO: 190354 - protein, 308 aa, Unknown
  Bacterial polypetide isolated from the Sargasso Sea
KHVPYFEGIHIFKANKIVIEKLREQKKLLSNGELIHSYPHSWRSKAPLVHRATPQWFISMESHDLRKKALKAIQDTKFYPSKGKERLKSMIELRPDWCVSRQRVWGVPIPVFISKKTKKVLLDEEVTENIANIFEKEGADCWFDGDIQRFLGKKYKSEDYIKMNDIVEVWFDSGSTHAYVLEKRKDLKWPASMYLEGSDQHRGWFHSSLLESCGTRGKAPFETILSHGFVVDGKGHKMSKSLGNSIAPEDILKKYGADILRIWVSASNYAEDLRIDHSILEQHAESYRKIRNTFRYLLGNLNDNFKPS

SEQ ID NO: 190355 - protein, 289 aa, Unknown
  Bacterial polypetide isolated from the Sargasso Sea
INKEDRTLHPKTNEIMESIANDIKNHGIEKWFDSSVKDYLGKDYEDYEKSSDTMDVWMDSGLAHHSVSQSHKEITFPADLYLEGSDQHRGWFQSSLLTSVAMNGSAPYKQVLTHGFFVDEHGKKMSKSLGNVIAPQNIINSMGADILRLWVASTDYTSEMRISDEILKRNSDTYRRIRNTARFLLSNLGDFNPAEEMIAYDKLLVLDQWVIDRLSNVNEQIKDDFERYSFHKVSQTLHNFCVNDMGGFYLDVIKDRLYTMPENSIGRRSAQTVLMHIAESLVRWIAPML

SEQ ID NO: 190356 - protein, 301 aa, Unknown
  Bacterial polypetide isolated from the Sargasso Sea
MTTIYQWLEAQFVTTEQGTGIVHCAPSHGPDDFNLCLNNGIKAIETVDGDGKYTKNVTLFEGIHIFKANPIVIEKLKEQKKLLKDGELIHSYPHSWRSKAPLVHRATPQWFISMESHKLRDKALKAIDETTFYPSKGKERLKSMIETRPDWCVSRQRVWGVPLPIFINKKSKEILIDDQVFETIAKIYEKEGSDCWFSDDPQKFLGKNYKSKDFEKLSDIVEVWFDSGSTHSFVLEKREDLKWPASMYLEGSDQHRGWFHSSLLESCGTRGRAPFESILSHGFVVDGKGLKMSKSLGNVIA

SEQ ID NO: 190357 - protein, 315 aa, Unknown
  Bacterial polypetide isolated from the Sargasso Sea
GAPSHGPDDFNLCLNNNIKAVETVDDDGKYTKHVLNFEGIHIFKANPIVIEKLKNEKNLLANGKLNHSYPHSWRSKAPLVHRATPQWFISMESHKLRDKALKAIDDTEFYPAKGKERLRSMIETRPDWCVSRQRVWGVPLPIFISKSDGKVLVDEDVFENIASIYEKEGSDCWFSDDPQKFLGDKYKAEDFIKLKDIVEVWFDSGSTHSFVLEKREDLKWPASMYLEGSDQHRGWFHSSLLESCGTRGRAPFESILSHGFVMDGKGLKMSKSLGNQIFPEDILKKYGADILRVWVTASDYSEDLRIDYSILEQTC

SEQ ID NO: 190358 - protein, 304 aa, Unknown
  Bacterial polypetide isolated from the Sargasso Sea
FLDKGHGESQFQFFYKKNGNDILLNSEIINHIQKLFSEHGADIWWDWEVKDLLPQNYAKEADLWRKGTDTMDVWFDSGSSWAAVCELRSELKYPADLYLEGSDQHRGWFQSSLLTSVAVNNKPPYKKVLTHGFALDENGRKMSKSLGNVVDPNIIINGGNNKKVEPAYGADVLRLWVSSVDYSVDVPIGSNILKQLSDVYRKVRNTARYLLGNIHDYDPNIESFEIDQLPLLDQWMLGRLVEVKDQISDAYENYEFSKFFQILQSFCVVDLSNFYLDIAKDRLYVSSKSEFRRRSCQFVMSKSS

SEQ ID NO: 190359 - protein, 299 aa, Unknown
  Bacterial polypetide isolated from the Sargasso Sea
RCSISNYTILSTKPGSILESAEAKHPYFDRKSKVILGDHVTTEMGTGIVHTAPAHGLEDFHASNKYKLEILNHVGSDGRFLETAIDFSGMNLEEANKKSIEMLEGQSNLLSKDPYQHSFPHCWRHKTSLFFRATPQWFISMTAENLLENSMNSIDSVNWMPDWGKSRITSMMEERPDWCISRQRTWGVPIALYINKKTGELHPDTVSIMQKVADEIEKSGTDIWFEQKLESVNVGDEYEPVMDILDVWFDSGVTHYCVLNEQRGLSQPADLYLEGSDQHRGWFQSSLLTGMTINKLPPL

SEQ ID NO: 190360 - protein, 222 aa, Unknown
  Bacterial polypetide isolated from the Sargasso Sea
IDDLNTSGVLLAHSEYEHSYPHCWRHKTPLIFRATPQWFISMNAKNLQKDSWEGIQSVKWIPSWGQKRIEAMMQDRPDWCISRQRTWGVPLAIFIHKETYEIHPNSVKIMHKVAELVKEGGIEAWFDAKPADFLSEADAQDYEKCEDVLDVWFDSGVSHQAVTSVRSGMSYPADLYLEGSDQHRGWFQTSLLSGVAIKGIPPFKQVLTHGFTVDAKGYKMSK

SEQ ID NO: 190361 - protein, 286 aa, Unknown
  Bacterial polypetide isolated from the Sargasso Sea
MVKKANITHSYPHCWRHKTPIIFRATPQWFISMNQAGLLDQAMNEVENTVEWRPSWGKARIDGMMNDRPDWCISRQRTWGVPIALFVHKETAELHPRTSELIAQVAERVEGAGIDAWFDLDPAELLGDEATQYDKVVDTLDVWFDSGVTHTAVCMARDELEMPADLYLEGSDQHRGWFQSSLLTSVAAYGKAPYKTALTHGFTVDGQGRKMSKSIGNTVEPQKVINQLGGDILRWWVADTDYSGEMTVSDEILKRNADSYRRVRNTCRFLLANINGFTPATDMVPA

SEQ ID NO: 190362 - protein, 327 aa, Unknown
  Bacterial polypetide isolated from the Sargasso Sea
IFGGMKVRESNEEIVSLLSKNDALLFSEDYEHSYPHCWRYKTPLIFRATPQWFMSMDKSALRKSIKDDIKNINWLPSWGEDRIFNMIEGRPDWCLSRQRFWGVPIPLFLHKETNELHPNTNVILEEAQKIIKEGNIEAWIDFDKRSIVRDFDDYTEVKDTLDVWFDSGVTHQTVLKDRGIDETADLYLEGSDQHRGWFQSSLITSHAINNKSPYKNVLTHGFVVDAEGQKMSKSVGNIISPQRIIKDKGADILRMWVAMTDYTKEMTISEEIIKRVSESYRRIRNTSKFLLSNINDFDVNEFYQSKLLALDKWIIHKAEEMNKTIQS

SEQ ID NO: 190363 - protein, 277 aa, Unknown
  Bacterial polypetide isolated from the Sargasso Sea
FISMESHNLREKALKAIDETTFYPSKGKERLKSMIETRPDWCVSRQRVWGVPLPIFVNKKTKEILSDDEVTENIASIYEKEGSDCWFSDNPQRFLGSKYNAEDFEKLSDIVEVWFDSGSTHSFVLEKREDLKWPASMYLEGSDQHRGWFHSSLLESCGTRDKAPFESILSHGFVVDGKGLKMSKSLGNVIAPEDILKKYGADILRIWVASSNYAEDLRIDYSILDQHAESYRKIRNTFRYLLGNINDNYENINFEKIDITKFPEIEQLMLHKIYSLN

SEQ ID NO: 190364 - protein, 275 aa, Unknown
  Bacterial polypetide isolated from the Sargasso Sea
LNVLKDANDLIIVDLQKNNLLLLKEKYKHRYPYDWRTKKPTIFRATEQWFASVEGFRSSALKSIEDVEWMPKTGKKRIYSMVVGRGDWCISRQRSWGVPIPVFYEKEGKQILINTETINHIKSLFEEYGADVWWEWDEKKLLPEKYKDESDRWKKGLDTMDVWFDSGSSWAAVCEQREELQYPADLYLEGSDQHRGWFQSSLLTSVAVNNKPPYKTVLTHGFALDENGRKMSKSLGNVVDPNIIINGGPNQKIQPAYGADVLRLWVSSVDYSVDV

SEQ ID NO: 190365 - protein, 296 aa, Unknown
  Bacterial polypetide isolated from the Sargasso Sea
GIHIFKANPIVIEKLKEQKNLLFNGELVHSYPHSWRSKAPLVHRATPQWFISMESHKLRDKALKAIDETTFYPGKGKERLKSMIETRPDWCVSRQRVWGVPLPIFVNKQTKEILVDDEIIENIASIYEKEGSDCWFSDDPQRFLGKKYKAEDYEKLSDIVEVWFDSGSTHSFVLEKREDLKWPASMYLEGSDQHRGWFHSSLLESCGTRGKAPFESILSHGFVVDGKGLKMSKSLGNVIAPEDILKKYGADILRIWVASSNYAEDLRIDYSILDQHAESYRKIRNTFRYLLGNLND

SEQ ID NO: 190366 - protein, 288 aa, Unknown
  Bacterial polypetide isolated from the Sargasso Sea
VDDDGKYTDHIPEFKGLHIFKANRVVIEKLEEQKNLLSSGELVHSYPHSWRSKAPLVHRATPQWFISMESHDLRKIALKALDNTIFYPSKGRERIKSMIETRPDWCVSRQRVWGVPLPIFVSKKTKEVLIDDEVFENIANIYEKEGSDCWFGGDVQRFLGKNYKAEDYEKSNDIVEVWFDSGSTHSFVLEKRDDLKWPASMYLEGSDQHRGWFHSSLLESCGTRGRAPFESILSHGFVVDGKGLKMSKSLGNVILPEDILKKYGADILRIWVAAKNYAEDLRLDHSIL

SEQ ID NO: 190367 - protein, 290 aa, Unknown
  Bacterial polypetide isolated from the Sargasso Sea
VAFTATDSKAVAAQFGVSDYSHPVAMVIWTTTPWTLPANRALSISPELDYSLVEFVKEGATHAVILADVLVEACMARYGAESHSVLGKVKGATLELVRFKHPFLAFDVPAILGDHVTTDAGTGVVHTAPGHGQDDFVVGQKYGLEVANPVGDNGVYKPDTEFFAGQHVFKANDNVVALLKEKGALLHHVAYRHSYPHCWRHKTPIIFRATPQWFISMDNQNLRKQALSEIEQTQWIPDWGQSRIEKMVENRPDWCISRQRTWGVPITLFVHRETEELHPDSVSLMARVAN

SEQ ID NO: 190368 - protein, 282 aa, Unknown
  Bacterial polypetide isolated from the Sargasso Sea
MGLYQWESHKLRKKAIDSIDQTTFYPEKGKTRIRSMIETRPDWCISRQRSWGVPLPIFIDKKTKEPLRDLEVIENIAKIYEKEGSDCWFHDDPQRFLGKKYNKENYIKTNDIVEVWFDSGSTHSFVLEKRKDLKWPASMYLEGSDQHRGWFHSSLLESCGTRGRAPFESILSHGFVVDGKGMKMSKSAGNIISPDEILKKYGADILRLWVASSDYSEDLRIDHSILEQHAESYRKIRNTFRYILGNLRDNYSPQNFKSIEASKLPELEQVILHKLYFLSLEI

SEQ ID NO: 190369 - protein, 285 aa, Unknown
  Bacterial polypetide isolated from the Sargasso Sea
ALKAIDNTEFYPAKGKERLRSMIETRPDWCVSRQRVWGVPLPIFISKSDGKVLVDEDVFENIASIYEKEGSDCWFSDDPQKFLGDKYKAKDFVKLKDIVEVWFDSGSTHSFVLEKRGDLKWPASMYLEGSDQHRGWFHSSLLESCGTRGRAPFESILSHGFVMDGKGLKMSKSLGNQIFPEDILKKYGADILRVWVTASDYSEDLRIDYSILEQHAEAYRKIRNTFRYLMGNINDNYSEQEYASINIKKLPELEKLMLHKLYILNEKFKANFREYNFHVLYKELL

SEQ ID NO: 190370 - protein, 318 aa, Unknown
  Bacterial polypetide isolated from the Sargasso Sea
CRSKYELPITCVVDEKGNLNEYSGQFKGSNVLKDANDLIIEYLKRNNLLLLQENYKHRYPYDWRTKKPTIFRATEQWFASVNGFRSSALKAIEDVVWMPETGKKRIYSMVVGRGDWCISRQRSWGVPIPVFYKKNGNDILLNKEIINHIQELFGEHGADIWWDWDVKNLLPENYAKESDLWKKGTDTMDVWFDSGSSWAAVCELRSELKYPADLYLEGSDQHRGWFQSSLLTSVAVNNKPPYKKVLTHGFALDENGRKMSKSLGNVVDPNIIINGGNNKKTDPAYGADVLRLWVSSVDYSVDVPIGSNILQQLSDVYR

SEQ ID NO: 190371 - protein, 323 aa, Unknown
  Bacterial polypetide isolated from the Sargasso Sea
LKEFKKLLHQGTLRHSYPHSWRSKAPLIFRNTPQWFISMDKKDLRQKALKSIDETIFYPPQGQTRLRSMIETRPDWCVSRQRVWGVPLPLFVNKKTEQPLRDIKVINRIADIYEKEGSDTWFTEDPKRFLGDDYSINDYDQIQDVVEVWFDSGSTHAFCLEKREDLKWPASMYLEGSDQHRGWFHSSLLESAGTRGRAPYESVLTHGFVVDGKGRKMSKSLGNVISPEKVMSQYGVDILRLWVVASDYYDDLKLDNAILKAQSDSYRRIRNTFRYLIGNLEGFDEKEKINIEEFPELEKYILHRLWEVDQIIQKCVKGILIFI

SEQ ID NO: 190372 - protein, 260 aa, Unknown
  Bacterial polypetide isolated from the Sargasso Sea
GLPAMKADPLIVEKLQEHNALINIEDYHHSYPHCWRRKTPLIFTSTPQWFISMKKNNLIKNALKQIKSVNWEPSWGLQRIESMLTDRPDWCISRQRNWGVPITLVVHKDTGEVHPNQNDLFEKFALLIEKDGIAAWDNLNLKDYIDDYEEYIKTSDSLDVWFDSGVTHYAVLEKRYGKNVVADLYLEGSDQHRGWFQSSLLTSLAMNNSAPYKTVLTHGFVVDEQGRKQSKSLGNVVSPQKVWNNLGADILRLWVASTEL

SEQ ID NO: 190373 - protein, 275 aa, Unknown
  Bacterial polypetide isolated from the Sargasso Sea
IIIKNLDEQKNLLGSGSLVHSYPHSWRSKAPLVHRATPQWFISMESHKLRNKALDSIDQTSFYPEKGKARIRAMIETRPDWCISRQRSWGVPLPIFVNKKTNEPLRDKGVIENIAKIYEKEGSDCWFYDDPQRFLGNKYKKEDYIKSSDIVEVWFDSGSTHSFVLEKRKDLKWPASMYLEGSDQHRGWFHSSLLESCGTRGRAPFESILSHGFVVDGKGMKMSKSAGNIISPEEILKKYGADILRLWVASSDYAEDLRIDQTILEQHAESYRKIR

SEQ ID NO: 190374 - protein, 328 aa, Unknown
  Bacterial polypetide isolated from the Sargasso Sea
MIETRPDWCVSRQRVWGVPLPIFVNKETKEILVDDEVNENIASIYEKEGSDCWFSDDPRRFLGDKYKAQDYDKLSDIVEVWFDSGSTHSFVLEKRNDLKWPASMYLEGSDQHRGWFHSSLLESCGTRGRAPFDSILSHGFVVDGKGLKMSKSLGNVIAPEDILKKYGADILRIWVASSNYSEDLRIDYSILDQHADSYRKIRNTFRYLLGNLNDNFEIIDLEKVDLNDLPDLEQYMLHKLNSLNNNFKKYFENYDFHNLYKELLNFCTIDLSAFYFDIRKDTLYCDSLDDTKRKSTILLLNIILNSLLRWFAPILSFTTEEIYQLLFK

SEQ ID NO: 190375 - protein, 195 aa, Unknown
  Bacterial polypetide isolated from the Sargasso Sea
GPSRIESMLTDRPDWCISRQRNWGVPITLVVHKDTGEIHPDQESLFEKFAQIIEKDGISAWDNLDLKDYIDDHEDYIKTSDSLDVWFDSGVTHFAVSAKRFGANVVADLYLEGSDQHRGWFQSSLLTSIAMNKSVPYKTVLTHGFVVDEKGRKQSKSLGNVVSPQKVWDSLGADILRLWVASTDFRSEMVASEEI

SEQ ID NO: 190376 - protein, 272 aa, Unknown
  Bacterial polypetide isolated from the Sargasso Sea
MKDYKDTLNLPGTSFPMKANLPNREPEILKFWDEIDLYRKIRKKSMGKKPFLLLDGPPYANGKIHIGHALNKILKDFIVKSKTLFGYDAPYLPGWDCHGLPIEHQVEKKKGKVGPKLTAREFRDYCREYALRQVEEQKEDFIRLGVPGEWDNPYLTLDKRYEAEQIRAFAEIYENNHVTFGYKPVHWCLDCQSALAEAEVEYMDKVSTSVDVLFKIIDTSEFIKRTNASKINNGKELFIPIWTTTPWTLPSNEAVAMGEDIPYGIYSLTLHE

SEQ ID NO: 190377 - protein, 277 aa, Unknown
  Bacterial polypetide isolated from the Sargasso Sea
GRYTKNVALFEGIHIFKSNSIVIEKLKDQKKLLSSGELVHSYPHSWRSKAPLVHRATPQWFISMDSHKLRNKALKAIDETTFYPSKGKERLKSMIETRPDWCVSRQRVWGVPLPIFINKKSNKILVDDEVFENIAKIYEKEGSDCWFSDDPQKFLGKKYKAEDFEKLSDIVEVWFDSGSTHSFVLEKRKDLKWPASMYLEGSDQHRGWFHSSLLESCGTRDRAPFESILSHGFVVDGKGLKMSKSLGNVIAPEDILKKYGADILRIWVASSNYAEDL

SEQ ID NO: 190378 - protein, 297 aa, Unknown
  Bacterial polypetide isolated from the Sargasso Sea
TPQWVYFSMEKNDLRKKAIKSINETHFYPKKGKERLLSMIEGRPDWCVSRQRVWGVPLPIFINKKTKEPLKDKKVIDRIASVYEKQGSDCWFTDDPKVFLGNEYDPKDYDKLNDIVEVWFDSGSTHSFVLEKRKDLNWPADMYLEGSDQHRGWFHSSLLESCGTRGRAPFKSILSHGFVVDGKGLKMSKSLGNVISPEDILKNYGADILRVWASASDYAEDLRIDKNILIQHAESYRKIRNTFRFMLGNLKDKFERQDFKKIQIKEMDELEQFILHKLFIIGESLNENLKNYNFHKL

SEQ ID NO: 190379 - protein, 226 aa, Unknown
  Bacterial polypetide isolated from the Sargasso Sea
IDRKLNDGMDDYGDTIRKRALSSIDQLVKWTPRTGRNRLFSMIETRPDWVLSRQRAWGVPLSCFVRKGRTPQDNDFILIDSKVNERIIEVFKEEGADSWFAPDAKKRFLLGLYNPEDYEQIFDILDVWFDSGSTHAFVLRDRSDGFWPADLYLEGTDQHRGWFHSSLLQACGTRGQAPYKGVLTHGFALDENGMKMSKSLGNTVSPENVINQYGEDILRLWVAQSD

SEQ ID NO: 190380 - protein, 269 aa, Unknown
  Bacterial polypetide isolated from the Sargasso Sea
KNNIEIIKALDSEGLFKKEIDFIAGLPPLKADSLVIEKIDEKGALINCDDYQHSYPHCWRHKTPLIFTSTPQWFISMDKAGLLKNALGSINEVKWEPSWGLQRIESMLTDRPDWCISRQRKWGIPITLLIHKDTGEIHPDQGELFKKFADVIEKNGISAWDSLDLSEFTDSSDSYIKVQDTLDVWFDSGVTHSTVSEKRFSDDVIADLYLEGSDQHRGWFQSSLLTSIAMKGAPPYKAVLTHGFVVDENGRKQSKSLGNVVSPQKVWDS

SEQ ID NO: 190381 - protein, 301 aa, Unknown
  Bacterial polypetide isolated from the Sargasso Sea
ILLLQKTYLDECSDRWGIDLEILGSVLGKEITEITMAHPLYERESKLLHGDHVTTESGTGCVHTAPAHGLDDYFICIKNGLESVKALDNRGIFKEEYGPLSGLGTKKGDPIVIELLQDNNALLAHKQYDHSYPHCWRHKSPVIFMSTPQWFISMKKSGLSDGAVNAVKDVNWEPSWGEERILSMLEDRPDWCISRQRNWGVPITLIIHNETGEIHPKQNLLFNQIADVIEKEGIEGWDNLSLDSLIDDAESYSKVYDTLDVWFDSGVTHMCVLDNLYGPDVIADLYLEGSDQHRGWFHRPC

SEQ ID NO: 190382 - protein, 285 aa, Unknown
  Bacterial polypetide isolated from the Sargasso Sea
NYKDTVFLPSTTFPMRGGLPKKEPEIIARWKQLDLYKKLRKARKGREKFILHDGPPYANGNLHIGHALNKILKDVINRSQSMMGKDANYVPGWDCHGLPIEWKIEEQYRKKGKDKDEVPIEEFRQECRDFATHWMDVQSEEFQRLGVLGDWENPYYTMKFESEAIIAEEIGKFLMQGSLYRGSKPVMWSPVEKTALAEAEVEYSEHSSVTIFAKFKLVKCTIESLIGNYIIIWTTTPWTMPGNRALAYGNDIDYVAVTINQVSETSIAHEGQTIIVSEILLENIC

SEQ ID NO: 190383 - protein, 181 aa, Unknown
  Bacterial polypetide isolated from the Sargasso Sea
GWSKDNIYEKLSEKSKSRKKFVLHDGPPYANGHLHMGHAMNKILKDFVVRSQQMLGNDSSYIPGWDCHGLPIEWKIEEQYREQGKNKDDVDIIKFRKECREFAEKWIDIQREEFIRLGINGDWYSPYTTMSYEAESIIVREFFKFLENESLYRGSKPVMWSTVEKTALAEAEIEYKEHKST

SEQ ID NO: 190384 - protein, 299 aa, Unknown
  Bacterial polypetide isolated from the Sargasso Sea
CKGFEGEHIYKVDGKISDKLNELKKLLFKGTLRHSYPHSWRSKAPLIYRNTPQWFISMEKNKLRDTALKSIDKTVFYPAQGQARLRSMIETRPDWCISRQRVWGVPLPLFVSKETGQPLRDQEVIDRIADIYEKEGSDTWFTEDPQRFLGDKYLIEDYEQVKDVVEVWFDSGSTHAFCLEKREDLKWPASMYLEGSDQHRGWFHSSLLESSGTRGRAPYESVLTHGFVVDGKGRKMSKSLGNVISPEDILKKYGVDILRLWVVASDYYDDLKLDNSILQAQTDSYRRIRNTFRYIIGNL

SEQ ID NO: 190385 - protein, 241 aa, Unknown
  Bacterial polypetide isolated from the Sargasso Sea
MSEYKDTVFLPKTTFSMRAGLPKKEPEILKFWQDIDIYSKLRSARQGRELFVLHDGPPYANGNLHIGHALNKILKDIINRSQSMLGKDANYVPGWDCHGLPIEWKIEENYRKKKKNKDEIPIIDFRKECREFADKWMNIQSEEFERLGVCGDWKDPYSTMKFESEAKIMSEIGKFLMNGGLYRGVKPVMWSTVEKTALAEAEIEYHEHRSTTIYVRFPVYKTEIEDLKNSSIIIWTTTPWT

SEQ ID NO: 190386 - protein, 278 aa, Unknown
  Bacterial polypetide isolated from the Sargasso Sea
PSKGKERLKSLIETRPDWCVSRQRVWGVPLPIFVNKKTKEILVDDEVMENIASIYEKEGSDCWFSDDPQRFLGKKYKAKDYEKLSDIVEVWFDSGSTHSFVLEKRDDLKWPATMYLEGSDQHRGWFHSSLLESCGTRGRAPFESILSHGFVVDGKGLKMSKSLGNVIAPEDILKKYGADILRIWVASSNYAEDLRIDYSILDQHADSYRKIRNTFRYLLGNINDNFEDINLDNIEVDELPELEQLMLHKIFVLNDKFKQYFSNYDFHNLYKELLNFCT

SEQ ID NO: 190387 - protein, 249 aa, Unknown
  Bacterial polypetide isolated from the Sargasso Sea
YLNESDRWQKGTDTMDVWFDSGSSWSSVISKKKDLNYPADLYLEGSDQHRGWFQSSLLTSVAVNEHAPFKKVLTHGFALDENGRKMSKSLGNIIDPLVIINGGSNKKLDPAYGADVLRLWVSSVDYSADVPIGSNILKQISDVYRKIRNTSRYLLGNLYDFDYKNDSIDISKLPLLDQWMLNRTAEVIDEITEAYSNFEFSKFFQTIQNFCVVDLSNFYLDIAKDRLYVSSKSDFRRRSCQTVLSLIVE

SEQ ID NO: 190388 - protein, 278 aa, Unknown
  Bacterial polypetide isolated from the Sargasso Sea
ILLNEEIINHIQELFSEHGADIWWDWDVKNLLPENYAKESEVWEKGTDTMDVWFDSGSSWAAVCELRSELKYPADLYLEGSDQHRGWFQSSLLTSVAVNNKPPYKKVLTHGFALDENGRKMSKSLGNVVDPNIIINGGNNKKTDPAYGADVLRLWVSSVDYSVDVPIGSNILKQLSEVYRKVRNTARYLLGNIHDYDPKIDSFEIDQLPLLDQWMLGRLVEVTDQISNAYENYEFSKFFKILQSFCVVDLSNFYLDIAKDRLYVSYKSQFRRRSCQFV

SEQ ID NO: 190389 - protein, 274 aa, Unknown
  Bacterial polypetide isolated from the Sargasso Sea
LNVLRDANAAIIEALESAGALLKQEAYGHRYPYDWRTKKPTIFRATEQWFASVEGFRQQALDAIAAVEWTPASGRNRIESMVKERGDWCISRQRTWGVPIPVFYHRSSGEVLLNANTLDHIEALIAEHGADVWWEKNEADLLPPAYADQADQWRKGTDTMDVWFDSGSSWAAVASQRDNLSYPADLYLEGSDQHRGWFQSSLLTSVAVNGHAPYKRVLTHGFALDEKGRKMSKSLGNVVDPMVIIEGGKNQKQEPPYGADVLRLWVSSVDYSAD

SEQ ID NO: 190390 - protein, 330 aa, Unknown
  Bacterial polypetide isolated from the Sargasso Sea
VHKASGEPLCDQAVIDRVVEAMRDEGADAGFSSTPSRFLGPDYDPAEYEQVTDILDVWFDSGSTHSFVLEQRNDLVSPADLYLEGSDQHRGWFHSSLLQSCATRGRAPYKSVLTHGFVLDEQGRKMSKSLGNVVTPQKVMDQNGADILRLWVVSSDYYNDLRIGPEIIKRTTDNYRRFRNTLRYLLGALDGFAAEEVVSHNRMPALERWVLHRLAEIDSRIREMTEGYDFHGIFTELHTLCNSDLSAFYFEIRKDRLYCDSSNSMERRACRTVMNEVYERLTAWLAPILAFTAEEAWQARVQDIENSVHLRSYDPIPDGWLDPALGERWA

SEQ ID NO: 190391 - protein, 262 aa, Unknown
  Bacterial polypetide isolated from the Sargasso Sea
VHRATPQWFISMESHKLRKKALDSIDQTAFYPEKGKARIRSMIETRPDWCISRQRSWGVPLPIFVNKKTNEPLRDSGVVENIAKIYEKEGSDCWFYDDPQRFLGKKYKKEDYIKSNDIVEVWFDSGSTHSFVLEKRKDLKWPASMYLEGSDQHRGWFHSSLLESCGTRGRAPFESILSHGFVVDGKGMKMSKSSGNIISPEEILKKYGADILRLWVASSDYAEDLRIDHSILEQHAESYRKIRNTFRFILGNLRDDFNPKRF

SEQ ID NO: 190392 - protein, 291 aa, Unknown
  Bacterial polypetide isolated from the Sargasso Sea
EDLLPKKYKENAKDLRKGEDTLDVWFDSGSSWKSVLINDNKYPADMYLEGNDQHRGWFQSSLLTSVSVNNIAPYKAVLTHGFVVDSKGQKMSKSKGNVFDPNKIIKTNGADILRLWVASEDYSSEVRISDDILSTVTDKYKKIRNTLRFLLGNLHDFGLTNKLNVNDLEEIDRWILARLSKTKENYNKNFDSYLFHIGINDIIHFCSNDLSSIYLDIQKDVLYTYSINSKERISCQTSMSILFREISIMLAPILSFTTEEAWQSSNYLKGSVFEASLSNEIFSHSEIEFKW

SEQ ID NO: 190393 - protein, 290 aa, Unknown
  Bacterial polypetide isolated from the Sargasso Sea
NLEMLEEVSAENLSGLQLQHPFDERTVPVLLGDHVTTENGTGSVHTAPAHGHEDFQIGKENDLDLKCYVNSYGVFIDAKESFAKQHIFKSESEIIERLDESNLLILSEKFEHSYPHCWRHKTPVIFRTTRQWFISMENEDFRSSCLESIKDVQWKPKWGEDRINGMIETRPDWCISRQRYWGVPIPLFTHKDDQTIHPDTPELLNQIAEKIEENGIDAWFDADIEELLGDDSNSYEKSTDTMDVWMDSGIAHKTVSHLFDHITDKADLYLEGSDQHRGWFQSSLLTSVAI

SEQ ID NO: 190394 - protein, 302 aa, Unknown
  Bacterial polypetide isolated from the Sargasso Sea
MNSIKDVNWKPTWGEERINGMIETRPDWCISRQRYWGVPIPLFTHKDDQRIHPNTPDLLNQIADKVEDQGIDAWFDAGIEEFLGDDVNSYEKSTDTMDVWMDSGIAHKTVSRLFDHIKDEADLYLEGSDQHRGWFQSSLLTSVAINNHAPYKEVLTHGFVVDEKGHKMSKSLGNTVSPQSVINNMGADILRLWVASTDYSSEMKISDQILKRNGDTYRRIRNTARFLLSNLSDFDPNKNQKKVDDLVLLDQLAIQRVSVLNEQIKNEYNNYSFHKIVQLLHNFCVHDMGGFYLDILKDRLYT

SEQ ID NO: 190395 - protein, 313 aa, Unknown
  Bacterial polypetide isolated from the Sargasso Sea
RGIVHCAPSHGPDDFNLCLNNNIKAVETVDDDGKYTKHVLNFEGIHIFKANPIVIDRLRTEKNLLAHGKLSHSYPHSWRSKAPLVHRATPQWFISMESHKLRDKALKAIDDTNFYPSKGKERLRSMIETRPDWCVSRQRVWGVPLPIFISKSDGKVLVDEDVFENIATIYEKEGSDCWFSDDPQKFLGSKHKADDFIKLKDIVEVWFDSGSTHSFVLEKRKDLKWPASMYLEGSDQHRGWFHSSLLEACGTRDRAPFESILSHGFVVDGKGLKMSKSLGNVIAPEDILKKYGADILRIWVASSNYAEDLRIDT

SEQ ID NO: 190396 - protein, 257 aa, Unknown
  Bacterial polypetide isolated from the Sargasso Sea
VSLFEGIHIFKANPIVIEKLKEQKKLLKNGELVHSYPHSWRSKAPLVHRATPQWFISMESHKLRKKALKAIDETTFYPSKGKERLKSMIETRPDWCVSRQRVWGVPLPIFVNKKTKEILVDNDVFETIAKIYEKEGSDCWFSDNPQRFLGKKYKAEDFEKLSDIVEVWFDSGSTHSFVLEKRKDLKWPASMYLEGSDQHRGWFHSSLLQSCGTRGKAPFESILSHGFVVDGKGLKMSKSLGNVIAPEDILKSMEQIY

SEQ ID NO: 190397 - protein, 315 aa, Unknown
  Bacterial polypetide isolated from the Sargasso Sea
QQNKGSGIVHCAPSHGPDDFNLCINNNIKAVETVDDDGKYTKHVLNFDGVHIFKANPIVIEKLKQQKNLLANGKLTHSYPHSWRSKAPLVHRATPQWFISMESHKLREKALKSIEETSFYPKKGKERLKSMIETRPDWCVSRQRVWGVPLPIFISKKDGKVLVDEEVFDNIAKIYEKEGSDCWFSDNPKRFLGNNYDIEDYNKLTDIVEVWFDSGSTHSFVLEKRKDLKWPASMYLEGSDQHRGWFHSSLLESCGTRGKAPFESILSHGFVVDGKGHKMSKSLGNVIAPEEILKKYGADILRIWVASSDYAEDLR

SEQ ID NO: 190398 - protein, 289 aa, Unknown
  Bacterial polypetide isolated from the Sargasso Sea
ATPQWFISMESHKLRDKALKAINDTTFYPSKGKERLKSMIETRPDWCVSRQRVWGVPLPIFVNKKTKEILVDEEVNENIASIYEKEGSDCWFSDEPQRFLGTKYKAEDYDKLSDIVEVWFDSGSTHSFVLEKREDLKWPASMYLEGSDQHRGWFHSSLLESCGTRGRAPFENILSHGFVVDGKGLKMSKSLGNVIAPEDILKKYGADILRIWVASSNYSEDLRIDYSILDQHAESYRKIRNTFRYLLGNIKDKLEEINFEKVDLNVLPELEQFMLHKLYFLNINFKKYF

SEQ ID NO: 190399 - protein, 257 aa, Unknown
  Bacterial polypetide isolated from the Sargasso Sea
LESIKDVEWKPKWGEERIYGMIETRPDWCISRQRYWGVPIPLFTNKDDQTIHPDTPELLNQIAEKIEEHGIDAWFDVDTEELLGDDANSYEKSTDTMDVWMDSGIAHKTVSHLFEHITDKADLYLEGSDQHRGWFQSSLLTSVAINNQAPYKEVLTHGFVVDEKGHKMSKSLGNTVSPQSVINNMGADILRLWVASTDYTSEMKISDQILKRNADTYRRIRNTARFLLSNLSDYDPAKNQQKIDDLVLLDQLAIQRV

SEQ ID NO: 190400 - protein, 289 aa, Unknown
  Bacterial polypetide isolated from the Sargasso Sea
SMIETRPDWCVSRQRVWGVPLPIFVNRKTKEILVDDEVIENIASIYENEGSDCWFSDDPQRFLGNKYKAQDYEKLSDIVEVWFDSGSTHSFVLEKRDDLKWPASMYLEGSDQHRGWFHSSLLESCGTRGRAPFESILSHGFVVDGKGLKMSKSLGNVIAPEDILKKYGADILRIWVASSNYSEDLRIDYSILDQHADSYRKIRNTFRYLLGNINDKFEILDLNKININELPELEQFMLHKIYNLNNNFEKYFKNYDFHNLYKELLNFCTVDLSAFYFDIRKDALYCDPH

SEQ ID NO: 190401 - protein, 310 aa, Unknown
  Bacterial polypetide isolated from the Sargasso Sea
DSILDVWFDSGSSHVYVLKNNGITNKADLYLEGSDQHRGWFQSSLIESCANYGESPFKTVLTHGFVIDEKGKKMSKSLGNIISPSDVIKKYGADILRIWVANSNFNEDIKISYQNLDRQAESYRKIRNTIRFILGNLNNSSLNTKTDHDKLLPLEKFIRHKLYTLNKKINLEYEEFNFSKVFQMILHFCSQELSALFFDIRKDALYCDGKDSLVVQSTKTVMADVFQCLIRWLAPIIPFTSEEAWQCWRNDIKKENYLSCHLLNKIELSDDWNNELLEEEWTKILEIKNAFTFAVEKKRNLKEIKSSLEA

SEQ ID NO: 190402 - protein, 220 aa, Unknown
  Bacterial polypetide isolated from the Sargasso Sea
RAWGVPIPAFYHKDTNEVLMDEAIITHFTEIVRKRGCDAWWEMEVEELLPEEHKAKAGDYVRGSDTMDVWFDSGSSWAGVVQSRGLSFPADLYLEGSDQHRGWFQSSLLTGVAATGSAPYKTILTHGFVLDEKGYKMSKSLGNVIDPRMVIEGGKNQKQEPGYGADTLRLWVASTDYSGDVSIGMNIIKQTSEAYRKLRGTIRFLMGVLDDFNPAEQVSY

SEQ ID NO: 190403 - protein, 296 aa, Unknown
  Bacterial polypetide isolated from the Sargasso Sea
IGQLTCTFEGSDQHRGWFHSSLLHSSGTRGQAPYKSILTHGFVVDGKGQKMSKSLGNVIAPEEIIKKNGADILRLWVVASDYSEDLRIDQSIIRQHSESYRKIRNTLRFLLGNILDEFSFEEFENFDFDKLDLIDAFIINKISELDNNFSNYEKNNEFHKIYVELLNFCTIDLSSLYFDIRKDCLYCDDQDSQKRKNSVNILKYSLYFLLKWLHPILVFTTEEVFQILKSNSKNLEKFEESIFLVDFKKISNQKDVNFDLSSWEILQKIKTEINHIFEDMRNNKVIKSGLETIINI

SEQ ID NO: 190404 - protein, 279 aa, Unknown
  Bacterial polypetide isolated from the Sargasso Sea
AEAEVEYMDKVSTSVDVLFKIVDPSEFIERTNAGKINNEKELFIPIWTTTPWTLPSNEAVSMGEDIPYGIYSLTLNERDILVVVANELRESIEKRWGVSNLEMLEEVSAENLSGLQLQHPFDERTVPVLLGDHVTTENGTGSVHTAPAHGHEDFQIGKENDLDLKCYVNSYGVFTDAKESFAKQHIFKSESEIIERLDESNLLISSEKFEHSYPHCWRHKTPVIFRTTRQWFISMENEDFRSSCLESIKDVEWKPKWGEDRINGMIETRPDWCISRQRY

SEQ ID NO: 190405 - protein, 281 aa, Unknown
  Bacterial polypetide isolated from the Sargasso Sea
DFVDLELQHPFYDLTVPAITADHVTDENGTGAVHIAPGHGTDDYLAGIKNNLEVYNPVDDYGRFIEALPIFGGMKIRDCNDDIIALLKKNDCLLFSEDYEHSYPHCWRYKTPLIFRATPQWFMSMDNSGLRESIKNNIRDINWLPSWGEDRIFNMIDGRPDWCLSRQRNWGVPIPLFLHKDTNELHPDTDSILKKAANIIKYGNIEAWLDFDKESIVKNINEYREIKDTLDVWFDSGVTHETVLKSRGIDQTADLYLEGSDQHRGWFQSSLKTSHAMYSKS

SEQ ID NO: 190406 - protein, 327 aa, Unknown
  Bacterial polypetide isolated from the Sargasso Sea
LKAIDDTNFYPNKGKERLKSMIETRPDWCVSRQRVWGVPIPVFISKKTNKVLIDDEITKNIADIFEKEGADCWFEKDNKKFLGKKYKAEDYEKMSDIVEVWFDSGATHSYVLEKRKDLKWPASMYLEGSDQHRGWFHSSLLESCGTRGRAPFDSILSHGFVVDGKGLKMSKSLGNIIAPEDILKKYGADILRIWVAASDYAEDLRIDYSILEQHAESYRKIRNTFRYILGNLNDNFEKVDFDKLDILNLPELEQFMLHKITNLSLNFKKNFEIYNLHTLYKDLLNFCTIDLSAFYFDIRKDTLYCDDVRTEKRKSTIIFLNILLEIL

SEQ ID NO: 190407 - protein, 239 aa, Unknown
  Bacterial polypetide isolated from the Sargasso Sea
ENGLDVLSPVVANGTFSDDVEHLAGMFVFKSNEKVIQILEEKGALLAKADYEHSYPHCWRHKTPLMFRATPQWFIGMDSKDLLKRSSLSIENVLWEPDWGKARMASMLEARPDWCISRQRTWGVPITLLVHNETGNLHPNMEAIIENVATLIEQEGVQAWHDIEISELIEDSEDYFKVTDCLDVWFDSGVTHASVLSENDELNFPADLYLEGSDQHRGWFQSSLLTSMAINGEPPYKGV

SEQ ID NO: 190408 - protein, 269 aa, Unknown
  Bacterial polypetide isolated from the Sargasso Sea
MGNGSLLHSYPHSWRSKAPLVHRATPQWFISMESHKLRKKAIESIDKTIFFPEKGKARIRSMIETRPDWCISRQRSWGVPLPIFIDKKTNEPLRDPEVIENIAKIYEKEGSDCWFHDDPQRFLGKKYNKENYIKSNDIVEVWFDSGSTHSFVLEKRKDLKWPASMYLEGSDQHRGWFHSSLLESCGTRGRAPFDSILSHGFVVDGKGMKMSKSAGNIISPDDILKKYGADILRLWVASSDYAEDLRIDHTILEQHAESYRKIRNTFRYI

SEQ ID NO: 190409 - protein, 287 aa, Unknown
  Bacterial polypetide isolated from the Sargasso Sea
KYNQHAVGFEGEHIYKVDHKIADKLEEFSKLLFKGTLRHSYPHSWRSKAPLIYRNTPQWFISMEKNNLRDIALKSIDETIFYPPQGQTRLRSMIETRPDWCVSRQRVWGVPLPLFVNKKTGQPLRDENIINRIADIYEKEGSNTWFTEDPQRFLGDEYSLDDYEQVKDVVEVWFDSGSTHAFCLEQREDLKWPASMYLEGSDQHRGWFHSSLLESSGTRGKAPYESVLTHGFVVDGRGRKMSKSLGNVISPDDILKKYGVDILRLWVVASDYYDDLKLDNAILQSQA

SEQ ID NO: 190410 - protein, 302 aa, Unknown
  Bacterial polypetide isolated from the Sargasso Sea
PPYANGNLHIGHALNKIIKDVINRSQSMLGKNANYVPGWDCHGLPIEWKIEENYRKKKKNKDDISIVEFRKECRDFAAKWMDVQSEEFQRLGVYGDWEDPYSTMKYESEAIIMSEIGKFLMNGSLYRGIKPVMWSPVEKTALAEAEIEYHDHISTTIFARFPVLKTSLDIISDFEIIIWTTTPWTMPGNRAVAYGKDIDYSLIEVTNVSENSLAKIGDKIIIAKELVEDVMKEISVLSFNSSNTLKGSDFAGTVLAHPLNNNGYEHEVLLLEADFVTTDQGTGFVHIAPGHGADDFELGRQK

SEQ ID NO: 190411 - protein, 326 aa, Unknown
  Bacterial polypetide isolated from the Sargasso Sea
HPFYDIQVPVIFAEHVTDENGTGAVHIAPGHGTEDYLAGLKHGLEVYNPVDDYGRFKETLPIFGGMKVRESNEEIVSLLNKNDALLFSENYEHSYPHCWRYKTPLIFRATPQWFMSMDKAALRKSIKDDIKNIKWLPSWGEDRIFNMIEGRPDWCLSRQRFWGVPIPLFLHKETNELHPNTSVILEEAQKIIKEGNIEAWIDFDKRLIVKDFDDYTEVKDTLDVWFDSGVTHQTVLKDRGIDETADLYLEGSDQHRGWFQSSLITSHAINNSSPYKNVLTHGFVVDAEGQKMSKSVGNIISPQKIIKDKGADILRMWVAMTDYTKE

SEQ ID NO: 190412 - protein, 319 aa, Unknown
  Bacterial polypetide isolated from the Sargasso Sea
IRSMIETRPDWCISRQRSWGVPLPIFINKKTNEPLRDPEVIENIAKIYEKEGSDCWFYDDPQRFLGNKYKKEDYIKSSDIVEVWFDSGSTHSFVLEKRKDLKWPASMYLEGSDQHRGWFHSSLLESCGTRGRAPFESILSHGFVVDGKGMKMSKSAGNIISPEDILKKYGADILRLWVASSDYAEDLRIDHTILEQHAESYRKIRNTFRYILGNLKDTFSPQNFRSIKVKELPELEQVILHKLYFLSLEIKKSLKDYNFHKLQKELLNFCTLDLSSFYFDIRKDTLYCDDLSSQKRKSCVTILNIILECLLKWYAPVLS

SEQ ID NO: 190413 - protein, 236 aa, Unknown
  Bacterial polypetide isolated from the Sargasso Sea
QWIPDWGQSRIEKMVENRPDWCISRQRTWGVPITLFVHRETEELHPDSVSLMARVANRIEQEGIQAWWDLDAAELLGEEAEQYRKVTDTLDVWYDSGSTFASVVGARPEFHGHGVDLYLEGSDQHRGWFMSSLMISTAITGKAPYKQVLTHGFTVDGKGRKMSKSIGNVIAPQQVTNKLGADILRLWVAATDYSGEMTVSDEILNRSADAYRRIRNTARFLLANLNGFDPAKDLVA

SEQ ID NO: 190414 - protein, 289 aa, Unknown
  Bacterial polypetide isolated from the Sargasso Sea
ADKVEVHGIDAWFDAGIDEFLGDDANSYEKSTDTMDVWMDSGIAHKTVSRLFDHIKDEADLYLEGSDQHRGWFQSSLLTSVAINSHAPYKEVLTHGFVVDEQGHKMSKSLGNTVSPQSVINNMGADILRLWVASTDYSSEMKISDQILKRNGDTYRRIRNTARFLLSNLSDFDPSKNQKKVDDLVLLDQLAIQRVSVLNEQIKNEYNNYSFHKIVQLLHNFCVNDMGGFYLDILKDRLYTMPANSSGRRSAQTALYIIAESLTRWIAPILSFYSEEILEHLPERKESPY

SEQ ID NO: 190415 - protein, 325 aa, Unknown
  Bacterial polypetide isolated from the Sargasso Sea
KAIDETTFYPSKGKERLKSMIETRPDWCVSRQRVWGVPLPIFVHKKSKEILVDDEVIENIASIYEKEGSDCWFSDNPQRFLGTKYKADDYEKLSDIVEVWFDSGSTHSFVLEKREDLKWPASMYLEGSDQHRGWFHSSLLESCGTRGKAPFESILSHGFVVDGKGLKMSKSLGNVIAPEDILKKYGADILRVWVASSNYSEDLRIDYSILDQHADSYRKIRNTFRYLLGNINDKFETLDLEKIDIDKLPELEQFMLHKIYNLNQNFVKYFQNYDFHNLYKDLLNFCTVDLSAFYFDIRKDTLYCDPVDSHKRKSTIIFIDVILDS

SEQ ID NO: 190416 - protein, 298 aa, Unknown
  Bacterial polypetide isolated from the Sargasso Sea
QQWFISMESHGLRKKALKAIDQTAFYPSKGKERIKSMIETRPDWCVSRQRVWGVPLPIFVSKKNNEVLIDQDVFDNIAKIYEKEGSDCWFSDDPQRFLGNKYKKEEYEKLSDIVEVWFDSGSTHSFVLEKRSDLKWPASMYLEGSDQHRGWFHSSLLQSCGTRGRAPFDSILSHGFVVDGKGLKMSKSLGNAISPEDILKKYGADILRVWVAASNYSEDLRIDYSILEQHAEAYRKIRNTFRYLLGNLNDNFSETDFEKVKLNDFPELEQYMFHKIYLLNEIFQKNFQTYTFHNLYKE

SEQ ID NO: 190417 - protein, 317 aa, Unknown
  Bacterial polypetide isolated from the Sargasso Sea
LPVFGGLHVLRDNEEMAERMLEKGALIGRGNLQHSYPHSWRSKAPLIFRTTPQWFISMEKNDLRKIAIKSINDTNFFPDQGSKRLSSMIESRPDWCISRQRAWGVPIGIFYNKETLEPLRDQGVVDRVVEAFKIEGADAWYQKPSSYFLGDDYDEKEYVKVTDIADVWFDSGSTHSYVLEDRKDLTWPASMYLEGTDQHRGWFHSSLLESCGTRGRAPFDAVLTHGFVLDEQGRKMSKSFGNITSPQEVLKEFGADILRLWVIGSDYYDDLRIGKEILIRHADHYRRLRNTLRYLLGALNEFNEEENINYKQMPEIE

SEQ ID NO: 190418 - protein, 308 aa, Unknown
  Bacterial polypetide isolated from the Sargasso Sea
PHCWRHKTPVMFSATPQWFISMEEKDLLQHAQDSVDSVNWAPTWGHARMSSMLEERPDWCISRQRSWGVPIALLIHKATGELHPETREIIEKVADLVESEGIQAWHDIEIKDLIDDHESFEKITDCLDVWFDSGVTHACVLDVNEDLQFPADLYLEGSDQHRGWFQSSLLTSIAMKDVPPYKAVLTHGFVVDADGKKMSKSLGNVISPQKVWETMGADVLRTWAASTDYTKEIVLSDDILKRSSDSYRRIRNTMRFLLGNLSDYSGQKLVPEKLTELDKWMIHKTQNLQEEIIEDYLNYDFHHAFQKI

SEQ ID NO: 190419 - protein, 276 aa, Unknown
  Bacterial polypetide isolated from the Sargasso Sea
KDKKKFILHDGPPYANGPIHIGTAANKILKDIINRTMQFEGYNSLYVPGWDCHGLPIEWQIEKQYRKKGKKKEDIDIKDFRNECREFAQKWIEEQKKSFIRLFVLADWNKPYTTMAYESEAIILKEFSKFFLNGSLYQGSKPVMWSPIEKTALAEAEIEYHDIDSTSIYVAFKVKSSPNKLLENTSVIIWTTTPWTIPGNRAIAFGNSIDYCIFKVQESKNNLIKNNKYLVAKSLLKEVCDRCNISKFELIKKIKGEELGNTICHHPFSKIGLIMM

SEQ ID NO: 190420 - protein, 313 aa, Unknown
  Bacterial polypetide isolated from the Sargasso Sea
HSGLFQCESHKLRDKALKAIDETTFYPGKGKERLKSMIETRPDWCVSRQRVWGVPLPIFVNKQTKEILVDDETTENIASIYEKEGSDCWFSDDPQRFLGKKYKAEDYEKLSDIVEVWFDSGSTHSFVLEKREDLKWPASMYLEGSDQHRGWFHSSLLESCGTRGRAPFESILSHGFVVDGKGLKMSKSLGNVIAPEDILKKYGADILRIWVASSNYAEDLRIDYSILDQHAESYRKIRNTFRYLLGNLNDNFETINFDELDVDGLPELEQLMLHKIYILNNNFKKYFNNYDFHNLYKELLNFCTVDLSAFYFD

SEQ ID NO: 190421 - protein, 301 aa, Unknown
  Bacterial polypetide isolated from the Sargasso Sea
HIAPGHGDDDYSLGINNGVDIIQTVQDDGRYNNHAKGFEGEHIYKVDGKISDKLNELSKLLFKGTLRHSYPHSWRSKAPLIYRNTPQWFISMEKNNLRDIALKSIDETIFYPEQGQIRLRSMIETRPDWCISRQRVWGVPLPLFVSKDTGQPLRDQSVIDRIADIYEKEGSDTWFTENPQRFLGDKYSFNDYEQVKDVVEVWFDSGSTHAFCLEKRGDLKWPASMYLEGSDQHRGWFHSSLLESSGTRGRAPYDSVLTHGFVVDGKGRKMSKSLGNVISPDDILKKYGVDILRLWVVASDY

SEQ ID NO: 190422 - protein, 274 aa, Unknown
  Bacterial polypetide isolated from the Sargasso Sea
MKNFSKTIILPSTKFSMKANLSETENTWMAFWEKNKIYHNLKNKSQKKDKFILHDGPPYANGDLHMGHALNKILKDIVCRSKFQFSFDVNFIPGWDCHGLPIEWKIEEKFRKAGKEKGEVDLKEFRKECREFANTWVEKQKSQFNRLGIQNDWKKIYTTMTKDAEVCIVEELLKFFESGELYLGFKPVMWSVVEKTALAEAEVEYQEKVSSSIFVKFPIKNCDEKASIIIWTTTPWTIPCNRAIAYSKNLEYKKIILLDDYPNLNLEKNEVIVI

SEQ ID NO: 190423 - protein, 294 aa, Unknown
  Bacterial polypetide isolated from the Sargasso Sea
MIETRPDWCVSRQRVWGVPLPIFVNKKTKEILIDDEVNENIANIYEKEGSDCWFSDNPQRFLGKKYKAEDFDKLSDIVEVWFDSGSTHSFVLEKREDLKWPASMYLEGSDQHRGWFHSSLLESCGTRGRAPFESILSHGFVVDGKGLKMSKSLGNAIAPEDILKKYGADILRIWVASSNYAEDLRIDYSILDQHAESYRKIRNTFRYLLGNLNDNFPKLNLEKIDLNKLPELEQFMLHKIYSLNLNFKKYFKNYDFHNLYKELLNFCTVDLSAFYFDIRKDTLYCDPKDSSKRQ

SEQ ID NO: 190424 - protein, 326 aa, Unknown
  Bacterial polypetide isolated from the Sargasso Sea
SFSSRATPQWFISMESHGLRDKALKAINKTVFYPEKGKDRLKSMIETRPDWCVSRQRVWGVPLPIFINKKDGKALVDDEVFENIANIYEKEGSDCWFKDDAQKFLGKKYKAENFTKLSDIVEVWFDSGSTHSFVLETRKDLKWPASMYLEGSDQHRGWFHSSLLHSCGTRGQAPFETILSHGFVVDGKGLKMSKSLGNVISPDDILKKYGADILRIWVAASNYSEDLRIDYTILEQHADAYRKIRNTFRYILGNLKDEFTKVDFNEINYNGLSELDKLMLHKIYLLNYNYHKNFKSYNFHLLYKDLLNFCTVDLSSFYFDIRKDTL

SEQ ID NO: 190425 - protein, 265 aa, Unknown
  Bacterial polypetide isolated from the Sargasso Sea
VHRATPQWFISMESHKLRNKALKAIDETTFYPSKGKERLKSMIETRPDWCVSRQRVWGVPLPIFVNKKTKEILVDNELFENIAKIYEKEGSDCWFSDDPQKFLGEKYKAEDFDKLSDIVEVWFDSGSTHSFVLEKRQDLKWPASMYLEGSDQHRGWFHSSLLESCGTRGKAPFESILSHGFVVDGKGLKMSKSLGNVIAPEDILKKYGADILRIWVASSNYAEDLRIDYSILDQHSESYRKIRNTFRYLLGNLNDKFEDIDLKKL

SEQ ID NO: 190426 - protein, 302 aa, Unknown
  Bacterial polypetide isolated from the Sargasso Sea
MEYKDTLNLPKTDFPMKANLPNREPDILKSWAKHSIFQKVLNQSKQSKKYVLHDGPPYANGDIHIGHAVNKILKDFIIKSKIMSGYHTPFTPGWDCHGLPIELQVEKKYGKGKFKDNPNAFVAACREFANKQIEKQKADFIRLGVFADWDNPYTSMDKEVEAGIVKSLSKIIDNNHIYFGSKPVHWCIESSSALAEAEVEYKDIVSKAVCVKFRIASSSELTFTKNINQKAHISIPIWTTTPWTLPANRAVAISKDVEYSLVQVKKNYLIIAKKLVDSVIEKAGISKFKVIEESHESEMSNG

SEQ ID NO: 190427 - protein, 286 aa, Unknown
  Bacterial polypetide isolated from the Sargasso Sea
SGIVHCAPSHGPDDFNLCLKNNIKAEETVDDDGKYTKHVPTFEGIHIFKANKIVIEKLKEQKNLLSSGELIHSYPHSWRSKAPLVHRATPQWFISMESHGLRKKALKSIDETNFYPNKGKERLRSMIELRPDWCVSRQRVWGVPIPVFMSKKSDEVLVDDEINENIANIFEKEGADCWFEGDAQRFLGKKYKIEDYEKMTDIVEVWFDSGSTHAYVLEKREDLKWPASMYLEGSDQHRGWFHSSLLESCGTRGRAPFESILSHGFVVDGKGLKMSKSLGNIIAPED

SEQ ID NO: 190428 - protein, 283 aa, Unknown
  Bacterial polypetide isolated from the Sargasso Sea
DYEVVTDILDVWFDSGSTHVFTVEARYGEGTRANLYLEGSDQHRGWFQSSLLESSGTRGRAPYDAVLTHGFALDGNGRKMSKSLGNVVDPLKIIGESGADILRLWVAQTDYFEDVRIGKEVLSGTSDTYRKLRNTFRYLLGALDGFTEEERVEVRQMPELERYILSELGRLDRELRAAAEAFEFNRYTRALADFANDDLSAFFFDIRKDSLYCDAADSLKRRSYRTVLDILFHALVRYAAPVLAFTAEEVWQARYPSDDGSVHFLEWPEIPALPGDLPMGTEG

SEQ ID NO: 190429 - protein, 293 aa, Unknown
  Bacterial polypetide isolated from the Sargasso Sea
ERLKSMIETRPDWCVSRQRVWGVPLPIFVNKKSNEILIDDEVFENIAKIYEKEGSDCWFADDPQKFLGDKYKTEDFEKLSDIVEVWFDSGSTHSFVLEKRKDLKWPASMYLEGSDQHRGWFHSSLLESCGTRGKAPFESILSHGFVVDGKGLKMSKSLGNVIAPEDILKKYGADILRIWVAASNYAEDLRIDYSILDQHSESYRKIRNTFRYLLGNINDKFENVNFDEIDIESLPELEKFLLNKIYILNQKFETCFHKYDFHNLYKELLSFCTVDLSAFYFDIRKDTLYCDPN

SEQ ID NO: 190430 - protein, 277 aa, Unknown
  Bacterial polypetide isolated from the Sargasso Sea
EQKNLLGSGTLVHSYPHSWRSKAPLVHRATPQWFISMESHKLRKKALDSIDQTAFYPEKGKARIRAMIETRPDWCISRQRSWGVPLPIFINKKTNEPLRDIDVVENIAKIYEKEGSDCWFYDDPQKFLGKKYKKEDFIKSKDIVEVWFDSGSTHSFVLEKRKDLKWPASMYLEGSDQHRGWFHSSLLESCGTRGRAPFDSILSHGFVVDGKGMKMSKSSGNIISPEEILKKYGADILRLWVASSDYAEDLRIDHSILEQNAESYRKIRNTFRFILGN

SEQ ID NO: 190431 - protein, 309 aa, Unknown
  Bacterial polypetide isolated from the Sargasso Sea
ERKVLLCHAPFQHSYPHCWRHKTPIIFRATPQWFVSMTGSGLLSAAKSAVEDVQWIPDWGRARIDSMLAERPDWCISRQRTWGVPICLFVHNTTGEIHPDTKSLMEQVAVRMESQGIDAWFDLDPAELLGDDAAHYEKVTDTLDVWFDSGVTHECVLREREGLSWPADLYLEGSDQHRGWFQSSLLTGIGTHNTAPYRKVLTHGFTVDGDGRKMSKSLGNIIPAGKAMQDLGADVLRLYVSAADYRNEISASDEIFKRTADAYRRIRNTARFLLSNLAGFDPVSDCLPVEQLLPLDRWILGQAQSLQTD

SEQ ID NO: 190432 - protein, 310 aa, Unknown
  Bacterial polypetide isolated from the Sargasso Sea
LKNNIKAEETVDDDGKYTKHVPKFEGIHIFKANKIIIENLKEQKNLLSSGELIHSYPHSWRSKAPLVHRATPQWFISMESHGLRKKALKSIDETNFYPSKGKERLRSMIELRPDWCVSRQRVWGVPIPVFLSKKNNEVLIDDEITENIASIFEKEGADCWFEDDAQRFLGKKYKSEDYQKMTDIVEVWFDSGSTHAYVLEKRQDLKWPASMYLEGSDQHRGWFHSSLLESCGTRGRAPFESILSHGFVVDGKGLKMSKSLGNIISPEDILKKYGADILRIWVAASDYAEDLRIDYSILEQHAESYRKIRN

SEQ ID NO: 190433 - protein, 311 aa, Unknown
  Bacterial polypetide isolated from the Sargasso Sea
MVGQKYDLPITCVVDEKGNLNEYSGQFKGSNVLKDANDLIIEHLKGNNLLLLQENYKHRYPYDWRTKKPTIFRATEQWFASVNGFRSSALKAIEDVEWMPETGKKRIYSMVVGRGDWCISRQRSWGVPIPVFYKKNGNDILLNKEIINHIQELFSEHGADIWWDWDVKNLLPENYAKESDLWKKGTDTMDVWFDSGSSWAAVCELRNELKYPADLYLEGSDQHRGWFQSSLLTSVAVNNKPPYKKVLTHGFALDENGRKMSKSLGNVVDPNIIINGGNNKKTDPAYGADVLRLWVSSVDYSVDVPIGSNIL

SEQ ID NO: 190434 - protein, 471 aa, Unknown
  Bacterial polypetide isolated from the Sargasso Sea
VHRATPQWFISMESHKLRDKALKAIDETTFYPSKGKERLKSMIETRPDWCVSRQRVWGVPLPIFVNKKTKQILVDDDVIENIATIYEKEGSDCWFSDEPQRFLGKKYKAEDYEKLSDIVEVWFDSGSTHSFVLEKRDDLKWPASMYLEGSDQHRGWFHSSLLESCGTRGKAPFETILSHGFVVDGKGLKMSKSLGNVIAPEDILKKYGADILRIWVASSNYAEDLRIDYSILDQHADSYRKIRNTFRFLLGNINDNFVNINLNELDLTKLPELEQFMLHKIFVLNDKFKKYFKNYDFHNLYKELLNFCTVDLSAFYFDIRKDSLYCDEKESKKRKSTIKVLNIVLDALLKWFAPILSFTTEEIYKLLNKDQKSIHLEKFLEIPTKFKNEKINEKWVELIKIRNICNISIEEKRANKEIGSSLEADLKIEINKKLKVMMENIDFSELCITSKASVHYKDDIETTAITSKAKG

SEQ ID NO: 190435 - protein, 414 aa, Unknown
  Bacterial polypetide isolated from the Sargasso Sea
MSDYKETLNLPDTGFAMKANLPSKEPKMIEFWEEMDLRKEVAAAREGREKFILHDGPPYANGQIHIGHAAQKVLKDIVIKSQTLNGKYAPYVPGWDCHGLPIELNVEKKKGKAGHKISVSEFREACREYAQSQIDIQKKDFKRLGIIGDWDKPYVTMDFAFEANIIRSLGRIIEKGHLQRGDKPVHWCVDCGSALAEAEVEYQDKISTSIDFIFPIDNKIISEIFSCSSTNHSYAASWTTTPWTLPGNLALTINESFTYELIEILHDNKPINIILAQDLVDSTLDRIGVDKFTSLGTCKGTDLLGFNAKHPYLDRNSLIISGDHVTTDAGTGIVHTAPGHGLEDYAVCKENGIDVLNPVKGNGTYNEDVEHFAGQFVFKANENITNLLEERGVLLSKSSYEHSYPHCWRHKTPV

SEQ ID NO: 190436 - protein, 940 aa, Unknown
  Bacterial polypetide isolated from the Sargasso Sea
MSDYKFTLNLPETEFPMRGNLANREPEMLERWTKDGLYQQIRDSRIGRTPFILHDGPPYANGSIHIGHSVNKILKDIIVKSKTMSGFDAPYVPGWDCHGLPIELKVEQKVGKPGQKISAAEFREECRKYAAEQVDGQRADFIRLGVLGDWQKPYLTMDFATEANIVRSLSKVIENGHLHKGVKPVHWCTDCGSALAEAEVEYEDKTSPAIDVAFSATDSKAVAAQFGVSDYSHPVAMVIWTTTPWTLPANRALSISPELDYSLVEFVKEGATHAVILADVLVEACMTRYGAESHSVLGKVKGAALELVRFKHPFLAFDVPAILGDHVTTDAGTGVVHTAPGHGQDDFVVGQKYGLEVANPVGDNGVYKPETEFFAGQHVFKANDNVVALLKEKGALLHHVAYRHSYPHCWRHKTPIIFRATPQWFISMDNHNLRKQALSEIEQTQWIPDWGQSRIEKMVENRPDWCISRQRTWGVPITLFVHRETEELHPDSVSLMARVANRIEQEGIQAWWDLDAAELLGEEAEQYRKVTDTLDVWYDSGSTFASVVGARPEFHGHGVDLYLEGSDQHRGWFMSSLMISTAMTGKAPYKQVLTHGFTVDGKGRKMSKSIGNVIAPQQVTNKLGADILRLWVAATDYSGEMTVSDEILNRSADAYRRIRNTARFLLANLNGFDPAKDLVAVEDMVALDRWAVRRAAALQQEIIEAYEQYNFHIVTQKLMQFCSVELGSFYLDIIKDRQYTAKQEGHARRSCQSALFHIAEAMVRWIAPILSFTADEVWQLLPGQRDAYVFTQEWYQGLQSITLDTDLSDAYWENLLTVRNEVNKVIEQARRDKRIGGSLEAEVTLFADAALTEQLTHIGDELRFVLLTSEAKVLPLADATSDAVETELASLKLVVNATTAEKCERCWHHREEVGTIEAHPTLCHRCVTNIEGDGEVRLFA

SEQ ID NO: 190437 - protein, 953 aa, Unknown
  Bacterial polypetide isolated from the Sargasso Sea
MSDYKHTLNLPETEFPMRGDLAKREPNMLKRWYDQDLYGAIRRAKAGKPSFILHDGPPYANGSIHIGHSVNKILKDIIIKSKGLSGFDSPYVPGWDCHGLPIELKVEGMVGKPGEKVSAAEFRAECRKYAKTQIEAQKTDFIRLGVLGDWEHPYLTMDFGTEANIIRSMAKIVENGHLHKGSKPVHWCTDCGSALAEAEVEYYDKNSPSIDVRFKAVDEAGVAAKFDCAEGHTGKGPISAVIWTTTPWTLPANRGIAMHADLDYALVQVEGEHPERLILAAELVKDVMDRAGIEQFHNLGYAKGAALELLRFNHPFYSFDVPVVLGDHVTLDAGTGAVHTAPGHGQEDFVVGQKYGLEVANPVGSNGVYLPDTELFAGQHVFKANASVVEVLTERGALLHHKVFNHSYPHCWRHKTPIIFRATPQWFISMEQKGLRKRALEEIERIEQDGIKQHGQSGWVPAWGKNRIQAMVENRPDWCISRQRTWGVPISLFVHKETQELHPESVRLMHEVAKRVEQSGIQAWWDLDKVELLGSDADLYDKVPDTLDVWFDSGSTHSSVVDARPEFNGNPADMYLEGSDQHRGWFMSSLMIGVAMKDKAPYNQVLTHGFTVDGQGRKMSKSIGNVVSPQDVMNKLGADILRLWVASTDYTGEMTVSDEILKRSADAYRRIRNTARFLLANLNGFNPATDMVAPADMVVVDRWAVGRAKAVQAEIMAAFDEYNFHGVTQKLMQFCSIEMGSFYLDVIKDRQYTAKADSLARRSCQTALYHIAEAMVRWMAPIMSFTADEIWALLPGERGEFVFTEEWYDGLFGLEAGETLNDDFWAEILTVRGEVNKALEVARGEKRIGGSLQAELTLFAKPALAARLNALADELRFVLLTSKAKVVSVDAAPADAVATERDDLWLSVAQSAAAKCDRCWHHVEDVGTIAGHEEICGRCVTNVEGDGETRQFA

SEQ ID NO: 190438 - protein, 435 aa, Unknown
  Bacterial polypetide isolated from the Sargasso Sea
GNGFFDAEYEGLAGLPAIKADNIVIDILNDSGALINAEDFHHSYPYCWRHKTPLIFASTPQWFISMDKSGLLEGSIQAVKDVEWEPSWGYERIKSMLEGRPDWCISRQRSWGVPIPLIINKKTGEIHPKQNLLFNEIADRIDEQGLEAWDKANLEDLIDDHDEYIKATDTLDVWFDSGSTHFCVLDKLYGKDLIADLYLEGSDQHRGWFQSSLLTGIAINGKAPYKAVLTHGFVVDENGRKQSKSLGNVVSPQKVCNNLGADILRLWVASTDFRSEMVATDEILKQVADQYRRIRNTFRFMMGNLNDFNDDSKNINQNDLVEIDKWIISAAIKLDEEVKNLNDSYAYHHVVQKIHNFCVHELGGIYLDIIKDRMYVTKSDSHARNSAQFALFEVADILIRLISPILVFTAEEIWQSHDLFKKQSKSVFLCPKKSL

SEQ ID NO: 190439 - protein, 683 aa, Unknown
  Bacterial polypetide isolated from the Sargasso Sea
YVKFKVTKSNISEIIGKDIIIWTTTPWTIPGNRALAYGQDLNYVLIEVLETKKESLVNLNDQIIIAEKLKENVLEEIGVNNSKIIKKFSGESLENTECEHPFKDIGYNFIVKALPGDFVNLEQGTGIVHIAPGHGDDDYNLGIKNNIDVVQTVEDDGKYNHHAVGFEGEHIFKVDLKIAEKLKELNKLLFLGSLKHSYPHSWRSKAPLIFRNTPQWFISMEKRDLRNKALKSIDETIFYPSQGQTRLRSMIETRPDWCVSRQRVWGVPLPLFVNKKTGLPLKDVKVINRIADIYEKEGSDTWFTSDPQRFLGEDYKIEDFDQVKDVVEVWFDSGSTHAFCLEKREDLKWPASMYLEGTDQHRGWFHSSLLESSGTRGRAPYESVLTHGFVVDGKGRKMSKSLGNAMTPDDILSKYGVDILRLWVVASDYYDDLKLDNSILKAQTDSYRKIRNTFRYLIGNLHEFDSKEKVDIEEFPELEKYVLHRLWEINKIIIDCINNFNFHLMFMTLLNFCTNDLSSFYFDIRKDTIYCDSINSKKRKAARTLLDILFNSLVRWFAPSLVFTCEEAWASRGNQSSIHLEEFSKIEENYKNEKLNNKWEIIRNIRKVVTGALEKKREERIIGSSLEASIEIYVDKKIKPIIEDIDFAEISITSNAKLLEKNSSTKGFILENYKDIIVNIKKA

SEQ ID NO: 190440 - protein, 564 aa, Unknown
  Bacterial polypetide isolated from the Sargasso Sea
EWKIEEQYKKKKKNKYEIPIKDFRQECREFAKSWIDVHIKEFKRLGVVGDFENYYSTMSYEAEAQIVRELGKFLIDGSLYQGFKPVLWSTVEKTALADAEVEYLDHTSNTIYVAFKVKDTNKDFLKDSSIIIWTTTPWTIPANKALAFNSSIEYAVLEIDQLEHFKNKRIVVAKNLIETITKECEIKKYKELKTFKGSEFNGTVCSHPFVKMDFNYDVPLLDAQFVNLDQGTGIVHCAPSHGPDDFNLCLKNNIPSLYTVDNSGVYTKEVPYFTNTHVFKADPIVIDKLKEQKQLLKNDKLNHSYPHSWRSKAPLIYRATPQWFISMQKNKLRDKAVKAINETIFYPKKGKDRLLSMIEGRPDWCVSRQRVWGVPLPIFINKKTKEPLRDQKIIDRIASIYEKQGSDCWFTDDAKIFLGDDYDAKDYEKLNDIVEVWFDSGSTHSFVLEKRKDLKWPADMYLEGSDQHRGWFHSSLLESCGTRGKAPFKSILSHGFVVDGKGMKMSKSMGNVISPEDILKNYGADILRVWASASDYAEDLRIDKNILIQHAESYRKIRNTFRFM

SEQ ID NO: 190441 - protein, 392 aa, Unknown
  Bacterial polypetide isolated from the Sargasso Sea
LNNGIKAIETVDGDGKYTKHVSLFEGIHIFKANPIVIEKLKEQKKLLSNGELMHSYPHSWRSKAPLVHRATPQWFISMESHKLRDKALKAINDTTFYPSKGKERLKSMIETRPDWCVSRQRVWGVPLPIFINKKTKEILVDDEVNETIATIYEKEGSDCWFSDDPQRFLGNKYKAEDYDKLSDIVEVWFDSGSTHSFVLEKREDLKWPASMYLEGSDQHRGWFHSSLLESCGTRGRAPFENILSHGFVVDGKGLKMSKSLGNVIAPEDILKKYGADILRIWVASSNYSEDLRIDYSILDQHAESYRKIRNTFRYLLGNIKDNFEEIDFKKVDLNELPELEQFMLHKLYSLDVNFKKYFKNYDFHNLYKELLKFCTVDLSAFYFDIRKDSLYC

SEQ ID NO: 190442 - protein, 473 aa, Unknown
  Bacterial polypetide isolated from the Sargasso Sea
PDWVLSRQRVWGVPLACFVDKNLNINCDNYILFDKKVNNRILEAFEKEGADAWFAPDAKQRFLGGLHNPDDYEKIDDILDVWFDSGSTHAFVLRDRDDGSWPADLYLEGTDQHRGWFHSSMLQSCGTVGRAPYNGVLTHGFTLDENGMKMSKSLGNTVSPDDVIKQYGADILRLWVSQSDYTSDLRIGKEILKGVADSYRRLRNTMRFMLGSLGDSNDFEKIRLQDLPDLEKWVLSKLKKLDINIREDYKNYSFQTVFQQLFQFCTVDLSSFYFDIRKDALYCDHISSNVRKSCIFTLEMIFERLVKWFAPILPFTMEEVWMQRQKENSKTSVHLDDFPKTPNEWTNIELEEKWNRIRDIRSYVTLAIEKERQNKNIRSSLEASPVLKIKDKNLFKILSSVDFSEVCITSSIKIEVNEDLQLEETLSSDEGIEVSIVKAEGEKCNRCWKYTNSYNHYKNKIICKRCNEVLNNS

SEQ ID NO: 190443 - protein, 543 aa, Unknown
  Bacterial polypetide isolated from the Sargasso Sea
TALADAEVEYMDHVSDTIYAAFNVKVSNLDIIKGADVIIWTTTPWTIPANKALAYNAGLKYVLLEINDNKNFIDRNIVIAKDLLEPFKKDTSIENIKVLNEFLGKDLKGTICSHPFSKMGYDYNIPMLEANFVTTEQGTGIVHCAPSHGPDDFNLCLNNNIKAIETVDGDGKYTNEIKHFEGLHIFKANNLIIEKLDEQKNLVTNGKLTHSYPHSWRSKAPLVHRATPQWFISMESHGLRDKALKAIDNTDFYPSKGKERIKSMIETRPDWCVSRQRVWGVPLPIFISKKTGDVLVDDEIFENIAKIYEKEGSDCWFNEDYQIFLGDKYKAEDYEKLSDIVEVWFDSGSTHSFVLEKRDDLKWPASMYLEGSDQHRGWFHSSLLESCGTRGVAPFESILSHGFVVDGKGLKMSKSTGNVIAPQDILKKYGADILRIWVASSNYAEDLRIDYSILDQHAESYRKIRNTFRYLLGNIQDQYENLDFEKVKFENFDSLEKFMLHRIYVINENFKNNFKVYNFHNLYKELLNFCTVELSAFYFDIKK

SEQ ID NO: 190444 - protein, 525 aa, Unknown
  Bacterial polypetide isolated from the Sargasso Sea
HGVDDYNICKKYQFETIHAIDNKGYFKKDYERLSGKPVLIVDEEVISILKENDKLIHVEDYFHSYPHCWRHKTPLIFACTPQWFISMKKSGLLDGAINSVDGVEWHPSWGKERILSMLQERPDWCISRQRSWGVPIPLIVHNETGELHPKQSSLFNEIADLIKTKGIESWSDVNLNEFIDDEENYHKTIDILDVWFDSGVTHFAVLDKLYGADLVADLYLEGSDQHRGWFQSSLLTGIAINGTAPYKSVLTHGFVVDEEGRKQSKSLGNVIAPQKIWNSLGADILRLWIANTDFRSEMVASDEIFKRVSDQYRRIRNTLRFLVANLNDFDVKSHNINVDDLLEIDKWIISKTYSIQSKILEHYKSYEFHQVIQKIHNFCVNDLGGFYLDVIKDRQYTTQTNSDTRRSAQTAINIVLNVMVRLISPILSFTAEEIWQSQESLKNQYKSVFLSLQYEFSLPKSDLTAEDWERVLELRNFVNQSIEEARNLKQIKGSLDADLRLEVTESDYELLSIFGTEITFFVYYL

SEQ ID NO: 190445 - protein, 496 aa, Unknown
  Bacterial polypetide isolated from the Sargasso Sea
ANLPSKEPGILERWEKEKIFEKLRKNSKGKKKFVLHDGPPYANGNIHMGTALNKILKDMVTRFHQMTGKDSIYVPGWDCHGLPIEWKIEEQYKKNKKNKDQVPIKDFRNECREFAKQWIKIQSKEFKRLGVVGDFENYYSTMSFNGEAQIVRELGKFLLDGSLYQGFKPVLWSTVEKTALADAEVEYKDHTSNTIFAAFKIKKTDKDFLKDANVIIWTTTPWTIPANKALAFNSSLEYSVVEISNLENFKDNKIVIAKDLMKTVFESCGIEKFKVIKNFKGSDLKNIICSHPFLKLGYDYDVPMFDARFVNLEQGTGIVHCAPSHGVDDFNLCLKNNIESNYTVDDSGYYTDVIPHFNKTHVFKADAVIIDQLKKENKLLKSEKLQHSYPHSWRSKAPLIYRATPQWFISMETNSLRKKAIKAINDTNFYPSKGKERLMSMIEGRPDWCVSRQRVWGVPLPIFIDKKTKKPLKDKKVIDRIAEIYEKEGSDCWFSD

SEQ ID NO: 190446 - protein, 465 aa, Unknown
  Bacterial polypetide isolated from the Sargasso Sea
MKSQINKEHKSDFSYKETLNLLKTEFSMRANSVVREPEIQNFWAKNNIDFELGSNNEGETFTLHDGPPYANGALHMGHALNKVLKDIINKYKTLKGFKVHYVPGWDCHGLPIELKVLQKLSSDERKRLDTLNLRKKATDYAYIQIKNQMEGFKRWGIWGDWDNPYLTLRKSYESAQIGVFGKMFLNGYIYRGLKPVHWSPSSRTALAEAELEYPEEHYSKSIYVSLKITKIPDDILLKFCQENNANKKDNFLSNSFITIWTTTPWTIPANEAVAINPKINYVFAIDEEKRIYLFAKDLSSEISNKFNKDLKHLLEVKGANLEHIEYQHPTKNKNCRIVIGGDYITTESGTGIVHTAPGHGIDDFNVGQKYNLPTTCVVDEKGNLNENSGQFKGSNVLKDANDLIIEFLKGNNLLLLQENYKHRYPYDWRTKKPTIFRATEQWFASVNGFRSFALKAIEDVEWMPS

SEQ ID NO: 190447 - protein, 590 aa, Unknown
  Bacterial polypetide isolated from the Sargasso Sea
PVLWSTVEKTALADAEVEYMDHKSDTIYAAFNIKKSKNEKLLNSQIIIWTTTPWTIPANRALAYNENLKYAVIKIEDQSDFKDKQVVVAEDLLKSLIEDCNIKKFTKVLTLSGKEFEGTICSHPFSKIGFEYDIPMLSANFVTTEQGSGIVHCAPSHGPDDFNLCLKNNIKAEETVDDDGKYTKHVPTFEGIHIFKANKIVIEKLKEQKNLLSSGELIHSYPHSWRSKAPLVHRATPQWFISMESHGLRKKALKSIDETNFYPNKGKERLRSMIELRPDWCVSRQRVWGVPIPVFMSKKSNEVLVDDEVTENIANIFEKEGADCWFEGDAQRFLGKKYKIEDYEKMTDIVEVWFDSGSTHAYVLEKREDLKWPASMYLEGSDQHRGWFHSSLLESCGTRGRAPFESILSHGFVVDGKGLKMSKSLGNIIAPEDILKKYGADILRIWVAASDYAEDLRIDYSILEQHAESYRKIRNTFRYILGNLNDKFDKVDFEKINISNFPELEQYMLHKIYNLNILFEKNFEKYNFHTIYKEIINFCSSDLSAFYFDIRKDALYCDSLESKKRISTIEFLNIVLEILLKWFAPSIIIY

SEQ ID NO: 190448 - protein, 391 aa, Unknown
  Bacterial polypetide isolated from the Sargasso Sea
MIDLKKTLNLPSTKFPMKANLPVKELEIQKEWKETDIYNEMQTYRKDSPLFILHDGPPYANGNIHIGHAVNKILKDIILKSKFLSGFKTPYIPGWDCHGLPIELEVEKNISKKDEISDEEFRKLCREYAYKQVEKQKEDFIRLGVLGNWDNPYLTSSPELEAEIINSLKKIYEKGHISRGVKPVYWCPVCKSALAEAEVEYHEKESTSIDVKFEITDELNFLNTEDKKVSIVIWTTTPWTLPSNQAIAINENIDYVLIERNKELLIICNELFEKFNLRSGENCKLIKRFEGKKLINIKVKHPLFKNKIVSILHGDFVTTDTGTGCVHIAPAHGVDDFELGKKYDLEILNPVTSSGLYVGEIEEIKNIHVFKIDQNIIDILERESALIGKEK

SEQ ID NO: 190449 - protein, 463 aa, Unknown
  Bacterial polypetide isolated from the Sargasso Sea
KGEKPVHWCQESGSSLAEAEVEYIDKTSKAIDVAFKVDASSLKNVKDLFNAEDSAEISFVIWTTTPWTIPSNVAVCINPKYKYSLIKMNDKFYVIAFEMIDQCSKRWNQKFDVISTIHGKKLRDIDLIHPFLDRKSVLLHANHVTTETGTGCVHTAPAHGMDDYLICKKNSIDTIHSLNNKAFFKDELDFIAGLPAMKADPLIIEKLQEHNALINIEDYHHSYPHCWRRKTPLIFTSTPQWFISMKKNNLINDALKHIKSVNWEPSWGLQRIESMLIDRPDWCISRQRNWGVPITLVVHKDTGEIHPNQNDLFEKFAQVIEKEGISAWDKLNLKDYIDDHEEYVKTSDSLDVWFDSGVTHYAVSTERFGSNVVADLYLEGSDQHRGWFQSSLLTSIAMKDSAPYKTVLTHGFVVDEQGRKQSKSLGNVVSPQKVWDNLGADILRLWVASTDFRSEMVASDEIL

SEQ ID NO: 190450 - protein, 470 aa, Unknown
  Bacterial polypetide isolated from the Sargasso Sea
RESALIGKEKFRHSYPHNWRTKTPLIFRTTPQWFISMSKNNLRKNALQELPEVNWIPDWGYNRIKTMIDDRPDWCISRQRKWGVPITLLINKKTQELHPNTSKIFNAVYEEVKKDGIEAWFKKDIKDLIDDHNDYEKVNDTLDVWFDSGATHSAVLKEKHGLDFPADLYLEGSDQHRGWFQSSFLSSVSISGKPPFKSAMTHGFTVDAKGNKMSKSKGNVVSPQKVINRLGADILRLWVASTDYTSEISVSDEILNRTSDKYRKIRNTIRFLLANISDFEEKDYESEISNELDKWILCRAINTQKNIIENYDKYNMHNVVQIIHSFCVNELGSFYLDIIKDRIYTINKNSYSRKSAQQAMKHILNMLILWLAPICPHTAEESWSHFTNTNNNSVLLNNWYDTNEIKFGNRKVNDEDWERILNIKKIVTKEIELKREQGVIGSSLEAKLDINCTNHDFLLLEKFENEVKFL

SEQ ID NO: 190451 - protein, 454 aa, Unknown
  Bacterial polypetide isolated from the Sargasso Sea
MNKSQINLPKTAFSMKANLPLKEPEILKLWQNINLYEELRKSRKGEEKFVLHDGPPYANGNIHMGTALNKILKDIIVRFHQMDGKDSVYVPGWDCHGLPIEWKIEEQYKKNKKNKNEVPIVEFRKECRAFAEKWIEVHKDQFKRLGVVGDWENYYSTMSYDAEAQIVRELGKFLKEGSLYRGFKPVLWSTVEKTALADAEVEYLDHKSDTIYASFPVKSSNIKELNNSDVIIWTTTPWTIPANRALAFNESLDYLLIEIRDDGDFKNKKILLADALFESVIKDCKIKEFKKLNKIKGKDLKGTICKHPFLKLGYDFDIPMLDARFVTTEQGTGIVHCAPSHGPDDFNLCLSNGIKAIETVDGDGKYTKNVALFEGIHIFKSNPIVIEKLKSQKKLLFNSELVHSYPHSWRSKAPLVHRATPQWFISMDSHRLRVKALKAIDETVFYPGKGKERL

SEQ ID NO: 190452 - protein, 570 aa, Unknown
  Bacterial polypetide isolated from the Sargasso Sea
GREKFVLHDGPPYANGHIHMGTALNKILKDVIVRTQQMSGKDSIYVPGWDCHGLPIEWKIEEEYRKKGKNKDDVPIVQFRKECREFAEKWIDIQKKEFRRLGVEGDWKNPYLTMSNEAEAQIVRELGKFLLDESLYKGARPVLWSVVEKTALADAEVEYEDHTSTTIYVKFLILKSNIEELVNSNIVIWTTTPWTIPGNRALAYNSEIDYSLIEVNEVDDSSLLSVGEKLILASDLVKKVSEEVGIIKYNLIKKFKGRDLDTCECEHPFKKIVYKFIVKPFHADFVNLDQGTGIVHIAPAHGDDDYHLGIKNNVDIVQTVLDDGKYNHHAKGFEGEHVYKVDDKISEKLIEFKKLIHKGKLRHSYPHSWRSKAPLIYRNTPQWFISMEKKNLRKIALKSIDETIFYPSQSKTRLRSMIETRPDWCISRQRVWGVPLPLFVNKKTGQPIRDIKLIDRIANIYEKEGSDTWFTEDPKRFLEDDYSIDEYEQLKDIVEVWFDSGSTHAFCLEKRTDLKWPASMYLEGSDQHRGWFHSSLLESSGTRGRAPYESVLTHGFVVDGKGRKMSKSLG

SEQ ID NO: 190453 - protein, 202 aa, Unknown
  Bacterial polypetide isolated from the Sargasso Sea
MTNYKDTLNLPHTAFPMKANLSQREPEILKSWEENNLYQKIRTKRKKNKKFILHDGPPYANGDIHIGHAVNKILKDIIIKSKGFSGFDTPYIPGWDCHGLPIELQVEKKIGKAGVKVNPREFRDACRQFASKQVDKQREDFKRLGVLADWGKPYLTMDHLTEANIIRSLGKIISSGHLAKGVKPVHWCIDCCSALAEAEVEY

SEQ ID NO: 190454 - protein, 480 aa, Unknown
  Bacterial polypetide isolated from the Sargasso Sea
MDSHKLRNKALKAIDETTFYPSKGKERLKSMIETRPDWCVSRQRVWGVPLPIFINKKTSEILVDEEVFDNIAKIYEKEGSDCWFSDDPQKFLGKKYKAADFEKLSDIVEVWFDSGSTHSFVLEKRKDLKWPASMYLEGSDQHRGWFHSSLLESCGTRDRAPFESILSHGFVVDGKGLKMSKSLGNVIAPEDILKKYGADILRIWVASSNYAEDLRIDYSILDQHAESYRKIRNTFRYLLGNLNDNFEQMDLEKIKIENLPELEQFMLHKIYNLNSKFDMYFKDYDFHNLYKELLNFCTVDLSAFYFDIRKDTLYCDPINSEKRKSTLILLNIILNSLIRWFAPILSFTTEEIYQLISKNKKSIHLEKFLNFPEKFNNSNLNSKWEQLIKIRDICNLSIEQKRASKDIGSSLEAALIVKLNNENQKFLKNIDLSELCITSSVKIEISDTNEITVETSKAKGEKCPICWKIRSAPCERPNCK

SEQ ID NO: 190455 - protein, 907 aa, Unknown
  Bacterial polypetide isolated from the Sargasso Sea
NLPKTAFSMKANLPNKEPEYLKYWDKINLYEKLRSQSKGKEKFVLHDGPPYANGNIHMGTALNKILKDIIIKFHQMDGKDSVYVPGWDCHGLPIEWKIEEQYKKNKKNKNDVPIIEFRKECRDFASKWINIHKDQFKRLGVIGDWENYYSTMSFDAEAQIVRELGKFLKEGSLYKGYKPVLWSTVEKTALADAEVEYQDHVSDTIYAAFPVKKSNINELIGSSVVIWTTTPWTIPANKALAYNQSLEYVLCEIDNKGILENKKIVIAKELLTSVAKDTDYKIKILKEFKGKDFEGTICNHPFHKIGYDYDVPMLEARFVTTEQGTGIVHCAPSHGPDDFNLCINNGIKAIETVDDDGRYTKQIPIFEGTHIFKANDIVIEKLKELKNLLKNGKLTHSYPHSWRSKAPLVHRATPQWFISMESHKLRDKALKAINETTFYPSKGKERIRAMIETRPDWCVSRQRVWGVPLPIFISKKNGEILIDEEVFENIAKIYEKEGSDCWFEDNFQRLLGDKYKAEDFDKTSDIVEVWFDSGSTHSFVLEKREDLKWPASMYLEGSDQHRGWFHSSLLESCGTRGRAPFESILSHGFVVDGKGLKMSKSTGNVIAPEDILKKYGADILRIWVASSNYAEDLRIDYSILDQHSESYRKIRNTFRYLLGNIQDEYSKVDFDKIDLKNIPELEKYMLHRLYVIDESFNEYFKSYNFHNLYKELLNFCTVELSAFYFDIRKDLLYCDPKDSKKRSDCILILKVILECLLKWFAPILSFTTEEIYHLIHKEENNGSIHLQKFVKIPNQWKNEELNSKWDKLKLIRDEANISIESKRADKIIGSSLEANIEIKIKDKDMYSLAQSHDFSEICITSSASISNDNNLEKEIEITSSKAIGNKCPVCWKIRENICERDGNCHLS

SEQ ID NO: 190456 - protein, 883 aa, Unknown
  Bacterial polypetide isolated from the Sargasso Sea
KDQKEYENNELFLLHDGPPYANGDIHLGHSVNKILKDITIKFKTLQGFNAPYVPGWDCHGLPIELNVEKKHGKNSELVKNKESFQKACKKYAESQINNQLNDFKRLGVLGDWENSYKSLDPKFEADIVRSLGIIFSEGHLEKGEKPVHWCQESGSSLAEAEVEYIDKTSKAIDVAFKVDDSSLKKVKDLFSSEDLDEIFFVIWTTTPWTIPSNVAVCINPEFEYSLISMQNKFYVIAFEMIDQCSKRWKQKFDVISTIKGNKLNDIDLIHPFLKRKSVLLHADHVTTETGTGCVHTAPAHGMDDYLICKKNNIETIHSLNNKGFFKDELDSIAGLPAMKADPLIVEKLEEHNALINIEDYHHSYPHCWRRKTPLIFTSTPQWFISMDKNNLNKDALEFIKSVNWEPSWGLQRIESMLTDRPDWCISRQRNWGVPITLVVHKDTGEIHPDQKDLFEKFAKIIEKDGISAWDNLDLKDYIDDHEDYIKTSDSLDVWFDSGVTHYAVSAKRFGDNAVADLYLEGSDQHRGWFQSSLLTSIAMNKSAPYKTVLTHGFVVDEQGRKQSKSLGNVVSPQKVWDSLGADILRLWVASTDFRSEMVASDEILKRTSDQYRRIRNTFRFILGNLSDFSDKDKVMFEDQVELDKWIINEIKTLQKEVISLYESFSYHKAIQKIHNFCVNELGGIYLDIIKDRLYTCKNDSLARRSCQTSLDCVLNILVRLISPILSYTAEEIWQTSDRLNSQEDSVFLTNFDNFEEDSESNINQSEWKRIFEIKDAVNQTIEEMRNENKIKGSLDSIVDVQATSDDISVLKKLGEELHFLFISSEASISKGKSFKIKVNPSNNTKCVRCWHRCSSVGSNKEHPELCNRCIDNIENDGEQRKSV

SEQ ID NO: 190457 - protein, 463 aa, Unknown
  Bacterial polypetide isolated from the Sargasso Sea
MDYKDTLNLPKTKFPMKANLPNREPEIMKFWDSINLYQSLRKENQNKPKYILHDGPPYANGDIHIGHAVNKILKDIVIKSKTASGYDCPFVPGWDCHGLPIELMVEKKFGKSKFRENKNAFRKACREYAHKQVEKQKKDFIRLGISADWDNSYLSMDKDFEASIIESLGDILANNHIYFGSKPVHWCIESESALAEAEVEYKDVESDAVYVLFKLVKNNLKINTKKDIYLMIWTTTPWTLPANRAVAVNIDVQYVLVEDKDRVYVLAEDLLESLNSVMNTSLQSVDSVNGKDLIGLSVNHPFYNFDVPIIFADHVTTESGSGIVHIAPGHGQEDYKAGIENDLEIFNPVNDKGCFDDGLEFFGGLNVRDANSSIISKLKENNCLLHQHKYHHSYPHCWRFKTPLIFRATPQWFVSMDNNNLREKILSSINDVEWIPGWGEDRIRNMMDNRPDWCISRQRFWGV

SEQ ID NO: 190458 - protein, 459 aa, Unknown
  Bacterial polypetide isolated from the Sargasso Sea
MESHKLRDKALKAIDDTTFYPNKGKERLKSMIETRPDWCVSRQRVWGVPLPIFINKKDNKILVDEDVFENIAKIYEEEGSDCWFSDDLQKFLGKNYKAEDYEKLSDIVEVWFDSGSTHSFVLEKRKDLKWPASMYLEGSDQHRGWFHSSLLESCGTRGKAPFESILSHGFVVDGKGLKMSKSLGNVIAPEDILKKYGADILRIWVASSNYAEDLRIDYSILDQHSESYRKIRNTFRYILGNLNDTFENIDLENIEIKKLPELEQFMLHKLYNLNINFNKYFKNYDFHNLYKDLLNFCTVDLSAFYFDIRKDCLYCDSKNSEKRKSTLLLLNIILNALLRWFAPILSFTTEEIYQLMSKDKKSIHLQNFIRFPKKFENLELNNKWIKLLKIRDICNLSIEEKRASKEIGSSLEASLIVNLNKNMMDIIQKIDLSELCITSSVEVKENSKDEIIVETKKAK

SEQ ID NO: 190459 - protein, 545 aa, Unknown
  Bacterial polypetide isolated from the Sargasso Sea
TIPANKALAFNESLDYVVLEINDEGDFKNRKIVIADSLLESVVKECELKSYKKIKTFKGKEFKNTICSHPFLDLGYEYDIPMLEARFVTTEQGTGIVHCAPSHGPDDFNLCLNNGIKAIETVDGDGKYTNNVKLFEGIHIFKANPIVIEKLKEQKNLLFNSELVHSYPHSWRSKAPLVHRATPQWFISMESHKLRDKALKAIDETAFYPIKGKERLKSMIETRPDWCVSRQRVWGVPLPIFVNKQTKEILVDDEVTENIASIYEKEGSDCWFSDDPQRFLGSKYKADEFEKLSDIVEVWFDSGSTHSFVLEKRTDLKWPASMYLEGSDQHRGWFHSSLLESCGTRGRAPFESILSHGFVVDGKGLKMSKSLGNVIAPEDILKKYGADILRIWVASSNYSEDLRIDYSILDQHSDSYRKIRNTFRYLLGNINDNFNIVNLDELNLKDLPELEQFMLHKIYSLNINFKKYFTNYDFHNLYKELLNFCTVDLSAFYFDIRKDSLYCDPINSKKRQSTILLLNIILNSLLKWFAPILSFTTEEIYRLLN

SEQ ID NO: 190460 - protein, 464 aa, Unknown
  Bacterial polypetide isolated from the Sargasso Sea
AQDLLESCMNRYGVEDFREVATCTGAALDKLNVNHPFLDLEVPLILGDHVTTESGTGCVHTAPAHGVDDFNVGKQYDIEVYNPVGNNGVYLENTPLFAGQFVFKANDEIIETVKEKGNLVLNVKYEHSYPHCWRHKTPIIFRATPQWFVSMDKKGLRAESLEQIKQTKWIPDWGQNRIEKMVEGRPDWCISRQRTWGVPIPLYVHKLTGEIHPESAALMEKVAQEVEAKGIQAWWDLDDAALLGSELDNYEKVTDTLDVWFDSGVTHYFVVDRRDDIPASADLYLEGSDQHRGWFMSSLMSSTAMHGHAPYKEVLTHGFTVDAHGRKMSKSVGNVVAPQEVTNKLGADILRLWVASTDYRGEIAVSDEILKRAADGYRRVRNTARFLLANLNGFAVEDAVAEEDMVALDRWIVARAKALQEELIEAYDNYDLLVVSQKLTHFCSIELGSFYLDVIKDRQYTAKA

SEQ ID NO: 190461 - protein, 482 aa, Unknown
  Bacterial polypetide isolated from the Sargasso Sea
MSNEKDQKLNLPKTSIPMKANLNQREPEFLKEWDKRNVYKKIRKNKKGKKAFHLHDGPPYANGEIHLGHAVNKVLKDIIIRSKSLEGFDSPYIPGWDCHGLPIEHQVEKKIGKKRKEISKSEFRDLCREYAKTQIKLQEKDFVRLGVFGDWKNRYASLDQSFEGEAINAFSRIFHNGHVEKGFKPVHWCLDCGSSLAEAEVDYLDKTSRAIDVKFRIDKTLEEKFIKQNKLPEHSKVFAVIWTTTPWTIPGNQAVCLNKDIEYSLVEVAKNEIYIIASELVKTCFDRWSSEDFKIIKKMKGNDLDGLHFIHPLYNRTSPLLFSEHVTTDTGTGCVHSAPAHGPEDFETCSENGIELKNPISSNGCFKDDVKHFGGLHVRKSEEEIIKKLKETDSLLCNEDFQHSYPHCWRHKTPLIFMATPQWFISMTKSGLLEGAEHGIDNVEFTPAWGKERMQIMLKDRPDWCISRQRDWGIPIPLIFDK

SEQ ID NO: 190462 - protein, 458 aa, Unknown
  Bacterial polypetide isolated from the Sargasso Sea
FTDAKESFAKQHIFKSESEIIERLDESNLLISSEKFEHSYPHCWRHKTPVIYRTTRQWFISMENEDFRSSCLESIKDVEWKPKWGEDRINGMIETRPDWCISRQRYWGVPIPLFTHKDDQTIHPDTPELLNQIAEKIEENGIDAWFDADIEELLGDDSNSYEKSTDTMDVWMDSGIAHKTVSHLFDHITDKADLYLEGSDQHRGWFQSSLLTSVAINDQAPYKEVLTHGFVVDEKGHKMSKSIGNTVSPQSVINNMGADILRLWVASTDYTSEMKISDQILKRNADTYRRIRNTARFLLSNLSDFDPTKNQQKIEDLVLLDQLAIQRVAVMNEEIKNEFNNYSFHKIIQLLHNFCVNDMGGFYLDIIKDRLYTMPTDSHGRRSAQTALYIIAESLTRWIAPILSFTAEEIWKHLPERKEESVFLSDWIDIEESKSNVDWDQLNDINSIVLKALEVARD

SEQ ID NO: 190463 - protein, 338 aa, Unknown
  Bacterial polypetide isolated from the Sargasso Sea
MKIDYKDTVCLPKTDFPMKAGLAKKESEILSRWEKINLYKQHRKIAKGREKFILHDGPPYANGNLHIGHALNKILKDVVTRSQQMLGKDSNYVPGWDCHGLPIEWKIEEKYRKKGEDKDQIPIVDFRKECRDFAEGWIEIQKEEFKRLGVIGDWANPYTTMSYEAEAAIVAELGKFILNGGLYRGAKPVLWSVVEKTALAEAEVEYKDHTSNTIFTKFPIIKSAIKSLVDNSSIVIWTTTPWTIPGNRGIAYSANNEYLCLLIKKVEPGSEAMVNDKVVVAESLLEEFCQGCHISEYNIVDKFNGSHLEGTHCIHPFSGKGYDFEVPLLPADFVDMET

SEQ ID NO: 190464 - protein, 926 aa, Unknown
  Bacterial polypetide isolated from the Sargasso Sea
MEIKDSITLPKTGFSMKADLPKKEPGILDEWLKNDIYKKLREQSNSKEKFILHDGPPYANGHLHMGHALNKILKDIIVKYQQLLNKNSIYVPGWDCHGLPIEWKIEEEYRAKKKNKDDVPVIEFRKQCRDFANKWISIQKKEFQRLGVIGDWDNPYTTMHFHAEAQIVRELGKFLKNGGIYKGHRPVLWSVIEKTALADAEVEYHDHKSTTIYACFPISKTDNNKLKEHSIVIWTTTPWTIPGNRALAVHNDIEYKSLNLKINDGNKNVIIASDLVESFIKENKIEEYKVNFSIKGHELTNTFCKHTLYDSGYNFEVPILHGDFVTTEQGTGIVHICPVHGMDDFILGKQHGLELPMTINESGIYYDHIPVFNGQHIFKVDQNVCDEIKKNKNLISQGILVHSYPHSWRSKAPLVYKNTSQWFISMDTNDLRTKALKAIDETDFFPKQGQKRLRSMIQDRPDWCVSRQRVWGVPLPIFVNKKTGEPLRDQNIIEKIAKIYELEGGDAWFNSEPSRFLSPEYDPNDFEQVKDVVEVWFDSGSTHSYVLEAREDLHWPASMYLEGSDQHRGWFHSSLLESCGTRDKAPFESILSHGFVVDGKGRKMSKSVGNVISPDEIINKYGADILRIWVVASDYSEDLKIDNKIINYQIDSYRKIRNTLRFLLGNLYNFNKQNLVDPEEMPELERYLLTRISSLNEKLKELVSKHDYHAIYTALLNFCTLELSAFYFDIRKDSLYCDDIKSIKRRSTSTCLHIIFEFLTKWLSPIVSFTCEEAWKSRSYSNEESILLQNVKDDEFTYKDISLEKVFEELKRVRKSVTSALELKRNEKLIGSSLQAKVILFLSKDTQKIIADLDLAEMCIVSNVETHDISNKSKESISIEDEEIYVEIKLADGKKCERCWAVLQEVSTSKNNLCNRCDNVWKTFQK

SEQ ID NO: 190465 - protein, 517 aa, Unknown
  Bacterial polypetide isolated from the Sargasso Sea
MTKSQINLPKTAFSMKANLPTREPEILEYWKKINLYDELRNQSKGKEKFVLHDGPPYANGNIHMGTALNKILKDIIVKFHQMDGKDSIYVPGWDCHGLPIEWKIEEQYKKNKKNKNEVPIVEFRKECRTFAEKWIEIHKSQFKRLGVVGDWENYYSTMSFNAEAQIVRELGKFLKEGSLYKGFKPVLWSTVEKTALADAEVEYQDHKSDTIYTSFKVKSSNLKDLVGSEIVIWTTTPWTIPANKALAYNESLDYIILEINDEGDFKNRKIVIADALLESVVKECELINYKKIHTFKGKEFNNTICSHPFLNLGYDHDIPMLEARFVTTEQGTGIVHCAPSHGPDDFNLCLNNGIKAIETVDGDGKYTNNVKLFEGIHIFKANPVVIEKLKEQKNLLFNGELVHSYPHSWRSKAPLVHRATPQWFISMESHKLRDKALKAIDETTFYPSKGKERLKSMIETRPDWCVSRQRVWGVPLPIFVNRKTKEILVDDEVIENIASIYEKEGSDCWFSDHPQRF

SEQ ID NO: 190466 - protein, 376 aa, Unknown
  Bacterial polypetide isolated from the Sargasso Sea
FYFSKVHIYFKANPIVIEKLKLEKKLLSSGKLKHSYPHSWRSKAPLVHRATLQWFISMESHGLRKTALDAINKTTFYPSKAKERLKSMIETRPDWCVSRQRVWGVPLPIFISKKDSKVLIDQDVIENIANIYEKEGSDCWFSDDPQRFLGKKYKASDFKKMSDIVEVWFDSGSTHSFVLEKRKDLKWPASMYLEGSDQHRGWFHSSLLESCGTRGRAPYENILSHGFVVDGKGLKMSKSLGNIISPDDILKKYGADILRIWVTSSNYAEDLRIDYSILEQHAEAYRKIRNTFRYLLGNLNDEFKKINLNELKIEEFPELEQYMLNKIFNLNKNFLNYYKSYNFHNLYKELLNFCTVDLSAFYFDIRKDTLYCDTKD

SEQ ID NO: 190467 - protein, 240 aa, Unknown
  Bacterial polypetide isolated from the Sargasso Sea
MNTKNDKIDFSETLFLPKTSFAMRAGLPEQEPKILDDWSKDNIYKKLREKSKSRKKFVLHDGPPYANGHLHMGHALNKILKDFVVRSQQMLGNDSSYIPGWDCHGLPIEWKIEEQYREQGKNKDDVDIIKFRKECREFAEKWIDIQREEFIRLGINGDWYSPYTTMSYEAESIIVREFFKFLENESLYRGSKPVMWSTVEKTALAEAEIEYKEHKSTTICVKFPVKESSDTNCQDASVII

SEQ ID NO: 190468 - protein, 644 aa, Unknown
  Bacterial polypetide isolated from the Sargasso Sea
MSDYKETLNLPDTGFAMKANLPSKEPKMIEFWEDMDLRKEVAAAREGREKFILHDGPPYANGEIHIGHAAQKVLKDIVIKSQTLDGKYAPYVPGWDCHGLPIELNVEKKKGKAGHKVSVSEFREACREYAQSQIDIQKKDFKRLGIIGDWDDPYVTMDFAFEANIIRSLGKIIEKGHLQRGDKPVHWCVDCGSALAEAEVEYQDKISTSIDFIFPIDNKNISEIFSCSSTNNSYAASWTTTPWTLPGNLALTINESFTYELIEILHDNKPINIILAQDLVDSTLDRIGVDKFTSLGTCKGTDLLGFNAKHPYLDRNSLIISGDHVTTDAGTGIVHTAPGHGLEDYAVCKENGIDVLNPVKGNGTYNEDVEHFAGQFVFKANDNITNLLEERGVLLSKSSYEHSYPHCWRHKTPVMFRATPQWFISMEEKDLLQHAQDSVDSVNWAPTWGQARMSSMLEERPDWCISRQRSWGVPIALLIHKETGELHPETRKIIEKVADLVEVEGIQAWHDIEIKDLIDDHESFEKITDCLDVWFDSGVTHACVLDVNEDLQFPADLYLEGSDQHRGWFQSSLLTSIAIKELPPYKAVLTHGFVVDSEGKKMSKSLGNVISPQKVWETMGADVLRTWAASTDYTKEIVLSDDIL

SEQ ID NO: 190469 - protein, 515 aa, Unknown
  Bacterial polypetide isolated from the Sargasso Sea
MSNSEITLPKTSFSMKANLPNKEPDLIKYWKEIDLYKKLRANSKGKEKFVLHDGPPYANGNIHMGTALNKILKDVIIKFHQMSGKDSVYVPGWDCHGLPIEWKIEEQYKKNKKNKNDIPIVEFRRECREFASRWIDIHKDQFQRLGVIGDWDNYYSTMTFDAEAQIVRELGKFLKNGSLYRGYKPVLWSTVEKTALADAEVEYKDHTSDTIYVSFPIIKTDLKEIEKCNVIIWTTTPWTIPANRALAFNQSLKYLVLEINDEGDFNNTKVIIAKDLTDSFVKDCKILKYKKLNEFSGNQFKNTICSHPFKDIGYDHDIPMLDARFVTTEQGTGIVHCAPSHGPDDFNLCLNNGIKAVETVDDDGKYTNHIPNFEGLHIFKANQIIIEKLKEQKKLLSNGKLNHSYPHSWRSKAPLVHRATPQWFISMESDSLRNKALKALDETDFYPEKGKDRIKSMIETRPDWCVSRQRVWGVPLPIFLSKKDKSVLVDDEVNENIANIFESEGSDCWFSDNPQ

SEQ ID NO: 190470 - protein, 477 aa, Unknown
  Bacterial polypetide isolated from the Sargasso Sea
MDYRDTINLPFTELAMKAGLAKKEPEILKFWNEINLYDEIRKLRSGKEQFILHDGPPYANGDIHLGHAVNKVLKDITIKYHSLIGKDAPYIPGWDCHGLPIELNIEKKHGKKSEIVQDKNKFIKACRDYADTQVENQMEDFQRLGVLGDWKNSYKSMDPAYEADIVRALGRIVANGHLQRGEKPVHWCYDCGSALAEAEVEYQDKISKSIYVNFPVKSESLKSLGAYFGETIQECAFIIWTTTPWTIPANVAVSIGPEIEYSLCENSERSFVIASDLMKACEEIWGSEIKEISRVKGSELTDIVLEHPYLKRDSILIHGDHVTIETGTGCVHTAPAHGIDDYFVCKKYNLDTIHSLNAKAFFKDEFSSIAGLPAVKADELVIQDIDAAKNLIHTDDFHHSYPHCWRHKSPLIFTSTPQWFISMDQSGLIGGAKAAVDQVDWHPEWGKQRILSMLEDRPDWCISRQRRWGVPIPLIVH

SEQ ID NO: 190471 - protein, 210 aa, Unknown
  Bacterial polypetide isolated from the Sargasso Sea
MTAEPIDYKNTLNLPKTDFPMRAGLPNREPGWLERWEKIGIYKKLRQKTSRKPFILHDGPPYANGNLHIGHALNKILKDMVVRSQQMMGNDARYIPGWDCHGLPIEWKIEEKYRKKGKNKDDVPLVDFRQECRKFADDWIDIQREEFKRLGITGNWENPYLTMDFKAERTIAQEFMKFLMNGTLYQGSKPVMWSPVEKTALAEAEVEYHD

SEQ ID NO: 190472 - protein, 491 aa, Unknown
  Bacterial polypetide isolated from the Sargasso Sea
MTINYRDTLNLPETDFSMKAGLPKKEPEILDLWEKKNLYKKIRQKYEDRKLFLLHDGPPYANGSIHLGHSVNKVLKDITIKNKTLQGLNAPFIPGWDCHGLPIELNVEKKHGKNSDLVKNKETFQNACKEYAESQINNQLNDFKRLGILGDWDNPYKSLDSNFEADVVRALGKIYDAGHVEKGEKPVHWCQDCGSALAEAEVEYKDKTSKSIDVSFEADKESISKLKDIFNTNKPESISFVIWTTTPWTIPSNVAVCINAELDYSLINVDDTHVVIASEMIDECMERWGKVGTEISKVPGKLISDIQLLHPFLDRKSVLLHGDHVTTETGTGCVHTAPAHGVDDHLICKKNNIRPIKAMNSLGLFKDEIDFLKGLPAVKADPLVIEKLKETNSLVSLEEYNHSYPHCWRHKTPLIFTSTPQWFISMDKNNLLNDAKKTIDTVSWEPSWGLQRIESMLEDRPDWCISRQRNWGVPITLVVHKETGEIIQINQ

SEQ ID NO: 190473 - protein, 599 aa, Unknown
  Bacterial polypetide isolated from the Sargasso Sea
MTINYRDTLNLPVTDFSMKAGLPCKEPEILNMWSDKDIYNKIRKKYKDKDLFLLHDGPPYANGDIHLGHSVNKILKDITIKLKTMQGYNAPFVPGWDCHGLPIELNVEKKHGKNSELVKNKESFQNACKEYAETQIDNQLEDFKRLGVFGDWKNSYKSLDSKFEADIVRSLGVIFKEGHLEKGEKPVHWCQDCGSSLAEAEVEYIDKISRSVDVAFKVDHESLKNLQDTFDDKTIVDVSFVIWTTTPWTLPSNVAVCINPDIEYSLISINEKYYVIASEMVDQCMERWGTKCKKISSVIGNKLNEIDLLHPFINRKSVLLHGDHVTTETGTGCVHTAPAHGMDDHIICKKNNLSTINALNNKAFFKDELDFIKGLPAIKADPLIIEKLKECNALINDEDYHHSYPHCWRHKSPLIFTSTPQWFISMNKNNLIKGALDAVKDVNWEPSWGLQRIESMLEDRPDWCISRQRNWGVPITLVVHKETGDIHPEQSELFEKFAVMIEENGISSWDKLELKDYISDADDYVKISDSLDVWFDSGVTHFAVSSKRFGKNVVSDLYLEGSDQHRGWFQSSLLTRIAMNGDAPYKTVLTHGFVVDEPG

SEQ ID NO: 190474 - protein, 542 aa, Unknown
  Bacterial polypetide isolated from the Sargasso Sea
MSEKKDQKLNLPKTEIPMKANLNEREPKMLEEWSKRDVYQKIRKNNSGKDKFILHDGPPYANGKIHIGHAVNKVLKDIVIRSKSLEGYDAPYVPGWDCHGLPIELQVEKKLGKKRRELSQSEFRAMCREYAKEQIDIQKDDFIRLGVFGDWENRYASLDYSFEGEAINGFARIYHNGHVEKGSKPVHWCLECSSALAEAEVEYMDKTSSSIDVKFAFTKDSAKELKKRLGNKTADQIHVVIWTTTPWTIPGNQAVCFKPDIGYEVLKVDGEFLLVASELKEQCSERWSDKKVSSTKIKLKGSDLEDLILKHPLFDRESPLYAADHVTTETGTGFVHTAPAHGVDDYNICSKEGLAIENPVLANGCYKEDVEHFSGMHVRKVDPEVISKLKEFNALINHGEYFHSYPHCWRHKTPLTFMATPQWFFSMTKSGLLDGATRALEEIKFIPEWGKERMDIMLNDRPDWCISRQRDWGIPIPLFYDKNTGEPHPEQDNIFNAVSESIKDNGIDSWNSIDLKISDSENYEKSKDIFDVWFDSRNNSLL

SEQ ID NO: 190475 - protein, 390 aa, Unknown
  Bacterial polypetide isolated from the Sargasso Sea
MKDYKDTLNLPGTSFPMKANLPNREPEILKFWDEIDLYRKIRKKSKGKKPFLLLDGPPYANGKIHIGHALNKILKDFIVKSKTLFGYDAPYLPGWDCHGLPIEHQVEKKKGKVGPKLTAREFRDYCREYALRQVEEQKEDFIRLGVPGEWDNPYLTLDKRYEAEQIRAFAEIYGNNHVTFGHKPVHWCLDCQSALAEAEVEYMDKVSTSVDVLFKIVDPSEFIERTNARKINNEKELFIPIWTTTPWTLPSNEAVAMGEDIPYGIYSLTLHERDILVVVANELRESIEKRWGVSNLEMLEEVSAENLSGLQLQHPFDERTVPVLLGDHVTTENGTGSVHTAPAHGHEDFQIGKENDLDLKCYVNSYGVFIDAKESFAKQHIFKSESEIIE

SEQ ID NO: 190476 - protein, 909 aa, Unknown
  Bacterial polypetide isolated from the Sargasso Sea
MSKSDINLPKTAFSMKANLPTREPEILNYWQKINLYDELRKSSKGKEKFVLHDGPPYANGNIHMGTALNKILKDIIVKFHQMDGKDSIYVPGWDCHGLPIEWKIEEEYKKNKKNKNDVPIVEFRKECRSFAEKWIEIHKGQFKRLGVVGDWENYYSTMSFDAEAQIVRELGKFLKEGSLYRGYKPVLWSTVEKTALADAEVEYQDHKSDTIYTSFSVRSSKIKELEKSEIIIWTTTPWTIPANKALAYNEALDYVLLQVNDEGDFQNRKIVVAQALLESVIKECGIKNYNEIKKFKGKEFKDTICNHPFLNLGYETEIPMLEARFVTTEQGTGIVHCAPSHGPDDFNLCLNNGIKAIETVDGDGKYTNNVKLFEGIHIFKANPIVIEKLKEQKNLLLNGELVHSYPHSWRSKAPLVHRATPQWFISMESHKLRDKALKAIDDTIFYPSKGKERLKSMIETRPDWCVSRQRVWGVPLPIFVNKETKEILVDDEVNKNIASIYEKEGSDCWFSDDPQRFLGEKYKAQDYDKLSDIVEVWFDSGSTHSFVLEKRNDLKWPASMYLEGSDQHRGWFHSSLLESCGTRGRAPFDSILSHGFVVDGKGLKMSKSLGNVIAPEDILKKYGADILRIWVASSNYSEDLRIDYSILDQHADSYRKIRNTFRYLLGNLNDNFEIIDFEKIELNNLPDLEQYMLHKLYSLNNNFKKYFENYDFHNLYKELLNFCTVDLSAFYFDIRKDTLYCDSLNDPKRKSTILLLNIILNSLIRWFAPILSFTTEEIYQLIFKNQKSIHLENFLTFPKNFHNEKLNQKWVELIKIRNLCNVSIEEKRAAKVIGSSLEAEIKINLDKNLESITKDIDFSELCITSKAEVNYENNIDANVLTEKAKGTKCPMCWKINEKGCTRSNCPQNS

SEQ ID NO: 190477 - protein, 387 aa, Unknown
  Bacterial polypetide isolated from the Sargasso Sea
MTAEPIDYKNTLNLPKTDFPMRAGLPNREPYWLERWEKIGIYKKLRQKTSRKPFILHDGPPYANGNLHIGHALNKILKDMVVRSQQMMGSDARYIPGWDCHGLPIEWKIEEKYRKKGKNKDDVPVVDFRQECRKFADGWIDIQREEFKRLGITGNWENPYLTMDFKAEGTIAKEFMKFLMNGTLYQGSKPVMWSPVEKTALAEAEVEYHDKESFTIWVKFEVIDNEDKELNGSQVVIWTTTPWTIPSNKAVVFGPDIKYGLYEVISRPDECWANIGDRYILADNLADGVMEKARLDNTMYRRISDVTTEKLSTISLKHPLFSAKDANGEWDEIRDFRGADFVTDTEGTGFVHCAPSHGMEEYELYRELGMLAQVITYNVKRRWQFQR

SEQ ID NO: 190478 - protein, 530 aa, Unknown
  Bacterial polypetide isolated from the Sargasso Sea
RRWGVEGDWENPYLTMSNQAEAQIVRELGKFLIDESLYKGAKPVLWSVVEKTALADAEVEYEDHTSNTIFVKFLISNSDDKDLIGSNIVIWTTTPWTIPGNRALAYGSELEYSIIKVEEVENSSLAKINDKLIFAKELLENVTKEIGIIKYSSVKTFKGSNLSSCKCDHPFKELGYNFTVKPFHGEFVNLEQGTGIVHIAPGHGDDDYVLGIENNVDIIQTVEDDGKYNHHAVGFEGEHVYKVDQKIADKLKEFSKLLFQGTLRHSYPHSWRSKAPLIYRNTPQWFISMEKKDLRKIALKSIDETIFYPPQGQTRLRSMIETRPDWCVSRQRVWGVPLPLFINKKTGQPLRDEKIINRIAEIYEKEGSNTWFTEDPQRFLGTKYSKDEYEQVKDVVEVWFDSGSTHAFCLEKRSDLKWPASMYLEGSDQHRGWFHSSLLESSGTRGQAPYESVLTHGFVVDGKGRKMSKSLGNVISPDDILKKYGVDILRLWVVASDYYDDLKLDNAILQSQAESYRRIRNTFRFLIGNL

SEQ ID NO: 190479 - protein, 945 aa, Unknown
  Bacterial polypetide isolated from the Sargasso Sea
MSNKKADSKPQAKYPVNLLDTPFPMRGDLPKREPQWVKEWEERGIYEKIRAASAGRPKFILHDGPPYANGDIHLGHAVNKILKDIVVKSRNMAGFDAPYVPGWDCHGMPIEIQIEKQFGKSLPAAEVMSKARTYATEQIEKQKVGFKRLGVLGDWANPYKTMNFVNEAEEIRALGKIIEKGYVYRGLKPVNWCFDCGSALAEAEVEYKDRTDPTIDVMFAFAEPEKTAQAFGLPALPRAEGGIVIWTTTPWTIPANQALNLHPEIVYALVDTERGLLIIAEERVEACMTDFKLTGRVVATAPGVKLAGLRFHHPLASAHPGYKRTAPVYLGDYVTTDTGTGVVHSSPAYGIEDFLSCKAHGMTDSDFINPVMGDGRYIESLPLFGGLSIWDANPKIVEALNAAGSLLRSEKYTHSYMHCWRHKTPIIYRATSQWFAGMDVTPRDGGKTLRETALEGVDATAFYPSWGKQRLFSMIANRPDWTLSRQRQWGVPMAFFVHKETGELHPRTLELLEEVAKRVEQSGIEAWQTLDPRELIGDDANLYEKNRDTLDVWFDSGTTHWHVLRGSHKDQLQFPADLYLEGSDQHRGWFHSSLLTASMIDGRAPYKGLLTHGFTVDGEGRKMSKSLGNGIDPHEVANRLGAEIIRLWIASTDYSGELAISEEILKRVTEGYRRIRNTLRFLLANLSDFDFAQHAVPVDEWLEIDRYAVAFSQQLQTELLGHYEKYEFHPVVAKLQTYCSEDLGGFYLDVLKDRLYTSAADSLARRSAQTALYHLTHGLLRVLAPFLSFTAEEAWKVFQPASDTIFTETYYAYPEVAGSAALIEKWALLRDVRGNVTKALEEARTANRIGSSLQAEVAVHASGARYDALTSLGEDLKFVLITSAATVVKVDDEAQESVDVAASKYQKCERCWHYREDVGAHADHPTLCGRCFSNLFENGEIRSAA

SEQ ID NO: 190480 - protein, 816 aa, Unknown
  Bacterial polypetide isolated from the Sargasso Sea
MSKEYRDTLNLPQTDLSMKAGLPKKEPEILAFWDSINLYHKIREQNNGKEQFILHDGPPYANGDIHLGHAVNKTLKDITIKFQSMLGKDAPYVPGWDCHGLPIELNVEKKHGKTSDLVRNKQSFIKACREYAQSQVNQQKKDFIRLGVLGDWENPYLSLNKSFEADTVRALGRIIANGHLEKGEKPVHFCMDCGSALAEAEVEYKDKKSHSIDVKFKVIPQSIESLCNSFKINNIKDAYFVIWTTTPWTIPSNVAVCINENIDYILAKSSNEHFIIAKDLLDACSERWDLDLEVLASVQGKDIENISMEHPLYDRESILLHADHVTTESGTGCVHTAPAHGLDDYFICIKNGLQSIKALDHRGLFKEEYGQLSGLSTKKGDPVVIELLNEKKALLAHKQYDHSYPHCWRHKTPVIFMSTPQWFISMKKSGLIDGAVNAVANVDWEPGWGEERILGMLEDRPDWCISRQRNWGVPIPLIIHNETGEIHPKQNQLFNPIAEVIEQEGIEGWDNLNLKELIDDHESYSKVHDTLDVWFDSGVTHMSVLDRLYGSNIVADLYLEGSDQHRGWFQSSLLTGIASKGMAPYRSVLTHGFVVDEEGKKQSKSLGNTISPQKIWDTLGADILRLWIASTDFRSEMVASDEIFKRVSDQYRRIRNTFRFLLGNISDFDAKIDSVELDNLLELDKWILSELSFLQEDLIGLYKSYSYHQVIQRIHNFCVNQLGGIYLDVIKDRQYTTQKDSKIRRSAQTCMSIIIEQLVVLVSPVLSFTAEEIWQGNDFLKANAESVFLATLRSLDDFESELSKENWSRLIEIKEA

SEQ ID NO: 190481 - protein, 920 aa, Unknown
  Bacterial polypetide isolated from the Sargasso Sea
MDYKETVFLPKTEFPMKAGLPRKEPEILKIWEEINIYQKLREQRKGSEKYILHDGPPYANGNLHIGTALNKILKDIINRFQSMLGKDANYVPGWDCHGLPIEWKIEEQYRKKGKDKDTIPIVEFRKECRDFAKKWMDIQSQEFQRLGVCGNFKNPYTTMTFDAEASIANEMGKFLLNGGLYRGSKPVMWSVVEKTALAEAEIEYEDHKSTTIYAKFEVKKTNLQNVDGAYIIIWTTTPWTMPGNRAVAFSKEINYSLVRIKKIADDSLAKNNDLIIIAKDLVEDVAKNCKILEWEEVSSILGHKFDETILSHPLNNYGYSHDVKMLPADFVTVEQGTGFVHIAPGHGEDDYFLGKKFNIEVPETLAGNGKLLDHLPLFGGMHVLRDNPKIADIMSEKNSLIGRGELIHSYPHSWRSKAPLVFRNTPQWFISMTTNNLKETALNEIEKTQFYPEAGKQRLYSMIENRPDWCLSRQRAWGIPIPVFVNKKTGEPLRDKIVIDRIVSSFKKGGSDAWFEIPASNYLEPEYDANDFEQIQDIADVWFDSGSTHAFVLEDRDDLKSPANLYLEGSDQHRGWFHSSLLESVGSRGVAPFEGILTHGFVLDDKGRKMSKSLGNTVNPQDILRDYGADILRLWVAGSDYYEDLRIGPEIIKHHTDHYRRLRNTLRYLLGSLNGFQENEKIDYSDMPQLEKWLLHRVNEVNNSVREKIESYNFHPIYTEIHNFCTIELSSFYFEIRKDLLYCGDPNSLERRGCRTALDILFNHLTAWLAPILCFTAEEAWQCYINNKENSIHLKTIPISVNKWNDEALNIKWKRIRFIRSLVLAEIEEARNNNVIKSSLQAKVEIKLSKEDKDLFENLIAADIFITSEVSFSIEKIETPKITIENADGNKCSRCWKILPEVKPEGLCNRCEDVVKIYCS

SEQ ID NO: 190482 - protein, 393 aa, Unknown
  Bacterial polypetide isolated from the Sargasso Sea
MKDYKDTLNLPGTSFSMKANLPNREPEILKFWDEIDLYRKIRKKSKGKKPFLLLDGPPYANGKIHIGHALNKILKDFIVKSKTLFGYDAPYLPGWDCHGLPIEHQVEKKKGKVGPKLTAREFRDYCREYALRQVEEQKEDFIRLGVPGEWDNPYMTLDKRYEAEQIRAFAEIYGNNHVTFGHKPVHWCLDCQSALAEAEVEYMDKVSTSVDVLFKIVDTSEFIKRTNAIKINNEKELFIPIWTTTPWTLPSNEAVAMGEDISYGIYILTLHERDILVIVANELRESIEKRWGVANLEMLEEVSAENLSGLQLQHPFDERTIPVLLGDHVTTENGTGSVHTAPAHGQEDFQLGKENDLDLNCYVNTYGVFTDAKESFAKQHIFKSESDFIERLD

SEQ ID NO: 190483 - protein, 596 aa, Unknown
  Bacterial polypetide isolated from the Sargasso Sea
MSKSNINLPKTAFSMKANLQNKEPGIIDYWDKIDLYKKLRSSSKGKTKFVLHDGPPYANGDIHMGTALNKILKDVIVKFHQMKGEDSVYVPGWDCHGLPIEWKIEEQYKKNKKNKNEVPINEFRKECRDFAKKWIEVHKKQFKRLGVVGDWENYYSTMSFDAEAQIVRELGKFLKEGSLYRGYKPVLWSTVEKTALADAEVEYMDHKSDTIYAAFNIKKAKNEKLLNSQIIIWTTTPWTIPANRALAYNENLKYAVIKIEDQSDFKDKQIVVAEDLLKSLVEDCNIKKFTKVLSFSGKEFQGTMCSHPFSKIGFDYEIPMLSANFVTTEQGSGIVHCAPSHGPDDFNLCLKNNIKAEETVDDDGKYTKHVPTFEGIHIFKANKIVIEKLKEQKNLLSSGELIHSYPHSWRSKAPLVHRATPQWFISMESHGLRKKALKSIDETNFYPNKGKERLRSMIELRPDWCVSRQRVWGVPIPVFMSKKSNEVLVDDEVTENIANIFEKEGADCWFEGDAQRFLGEKYKIEDYEKMTDIVEVWFDSGSTHAYVLEKREDLKWPASMYLEGSDPHRGWFHSSLLESCGTRGRAPFESIIVHGI

SEQ ID NO: 190484 - protein, 646 aa, Unknown
  Bacterial polypetide isolated from the Sargasso Sea
MSEKKDQKLNLPKTEIPMKANLNEREPKMLEEWSKRDVYQKIRKNNSGKEKFILHDGPPYANGKIHIGHAVNKVLKDVVIRSKSLEGYDAPYVPGWDCHGLPIELQVEKKLGKKRRELSQSEFRTMCREYAKEQIDIQKDDFIRLGVFGDWENRYASLDYSFEGEAINGFARIYHNGHVEKGSKPVHWCLECSSALAEAEVEYMDKTSSSIDVKFAFTKDSAKELKKRLGNKTDDEIHVVIWTTTPWTIPGNQAVCFKPDIGYEVLKVDGEFLLVASELKEQCSERWSDKKVSSTKIKLKGSDLEDLVLKHPLFDRESPLYAADHVTTETGTGFVHTAPAHGVDDYNICSKEGLAIENPVLANGCYKEDVEHFSGMHVRKVDPEVISKLKEFNALINHGEYFHSYPHCWRHKTPLTFMATPQWFFSMTKSGLLDGATRALEEIKFIPEWGKERMDIMLNDRPDWCISRQRDWGIPIPLFYDKNTGEPHPEQDNIFNAVSESIKDNGIDSWNSIDLKISDSENYEKSKDIFDVWFDSGITHFCVVDELYGSNTQSDLYLEGSDQHRGWFQSSLLTSIAMKGIAPYKSVLTHGFVVDEEGKKMSKSIGNVITPQEVIDQSGADILRFWIASTDFRGEMAFSKDILNRS

SEQ ID NO: 190485 - protein, 948 aa, Unknown
  Bacterial polypetide isolated from the Sargasso Sea
MSDKKNTKDYRDTLLLPKTDLPMKAKLSENEPILLENWDKIDTYTSIRKSSQGKEKFILHDGPPYANGNVHMGTALNKILKDVIVKSKQMAGFDAIYRPGWDCHGLPIEWKIEEQYREQGKSKEEVPINEFRSECRLFAKKWIKVQKEEFKRLGVFGDWENPYTTMEFESEAIIVREFHKFLMNDDLYCGSKPVMWSVIEKTALAEAEVEYKEHVSPTIWVKFPLTSKEKPYDESSILIWTTTPWTIPANRAIAFSSKYEYGLYEVIEIEEGSLAKIGEKIIINNSLKENLENASKTKINLIQNVDEIEKLVCQHPFNSLGYDFDIPLLEGEFVTDETGTGFVHIAPSHGQDDYDLASKNGIEAPFMIDDEGVYLPSVKIFAGKKVYDDDGSYGDGNGAVIKELINCNALFAKGKLRHQYPHSWRSKAPLLFRNTPQWFISMEKNNLRNKSLSEIENVEWIPKRGKNRIKSMVDNRPDWVVSRQRAWGVPLAIFLNKKTGEILKDKEINEKIFNNFKENGSDSWFELSSEEILGEKYNSDEWEKIDDILDVWFDSGSTQAFVLEGNQGIGIPADLYLEGSDQHRGWFQSSLLVGCGTRGKAPFKKVLTHGFVVDKDGKKESKSLGNVTKPEDLIKQYGADVIRLWVVSSDFTDDLRVGQDIMKANVESYRKIRNTFRFLLGNLDNFSEDEIVDYKDMPELERYILHKLCLIDNEVRESYKNFDLKSVFQILLNFSNLDLSSFYFDIRKDCLYCDSPKSNIRKSTRTVLDLLFDYLVRWFAPILCFTAEEVRKSRFPDLNNSIHEMQFLDVKNEWNNSELFEKWESIRSIRKVVTGAIELERKEKRIGSSLEAKPILFISDDNYVGALKDIDLPEIFITSQAEMRNEKGPENAFTLDEIDDVAVICDIAEGNKCSRSWKILPEVGTDKEYPDLSLRDAEVMREINDKGN

SEQ ID NO: 190486 - protein, 424 aa, Unknown
  Bacterial polypetide isolated from the Sargasso Sea
MTINYRDTLNLPVTDFSMKAGLPRKEPEILDLWSSSDLYGKIRKKYEDKELFLLHDGPPYANGDIHLGHSVNKILKDITIKHKTMQGFNAPFVPGWDCHGLPIELNVEKKHGKNSELVKDKESFQKACKEYAESQIKKQLVDFKRLGVLGDWENSYKSLDPKFEADIVRSLGIIYNEGYLEKGEKPVHWCQESGSSLAEAEVEYIDKTSKAIDVAFRVEDSSLDTVKGLFNSDEPDEISFIIWTTTPWTIPSNVAVCINPKYKYSLIKMNEKFYVLAFEMIEQCTKRWKQKFDLISTIKGEKLIDINLIHPFLDRKSVLLHADHVTTEAGTGCVHTAPAHGMDDYLICKKNNIDTIHSLNNKALFKDELDFIAGLPALKADPLIIEKLQEHDVLVNIEDYHHSYPHCWRRKTPLIFTSTPQWFI

SEQ ID NO: 190487 - protein, 646 aa, Unknown
  Bacterial polypetide isolated from the Sargasso Sea
LDYEIHLIESSIVTEETGTGFVHMAPSHGAEDYEEFLKRGWLDKLTHNVDEDSSFVRFMPYFNGLEIYNKKGKEGRANEEVIKKLIEANGLMARGKLLHSYPHSWRSKAPLIFRNTKQWFVSIDKDVSHKDKTKTDSVYGNTIRERALKSIDDLVSWFPKSGRNRLYSMIEKRPDWVLSRQRVWGVPLACFINKNFTNKDNNYILYDTRVNSRILKAFENEGADAWFSPGAKERFLKDFYNPDDYEKIDDILDVWFDSGSTHAFVLRDREDGVWPADLYLEGTDQHRGWFHSSLLQSCGTVGRAPYNGVLTHGFTLDEKGMKMSKSLGNTISPDDVIKQYGADILRLWVSQSDYTSDLRIGKEILKGVADNYRKLRNTMRFMLGSLEDLKDIEKIELDELPELEKWVLNKLKNLDNCVRDGYKNYSFQLVFQQLFQFCTVDLSSFYFDIRKDSLYCDQASSHVRKSCIFTLEMIFKRLVKWFAPILPFTMEEVWLQRHPENPNISIHFEDFPETPDKWINVDLEKKWNMVRDVRGLVTSAIEKERQNKKIRSSLEAFPILKLKQKKLFQVLNSIDFNEICITSSIKLILNEDPTSNGSLSNEDSVEVEIIKAEGEKCERCWKYTNSYTNFKDNIICQRCNEVLENL

SEQ ID NO: 190488 - protein, 373 aa, Unknown
  Bacterial polypetide isolated from the Sargasso Sea
FKAIDNTEFYPAKGKERLRSMIETRPDWCVSRQRVWGVPLPIFISKSDGKVLVDEDVFENIASIYEKEGSDCWFSDDPQKFLGDKYKAEDFVKLKDIVEVWFDSGSTHSFVLEKRGDLKWPASMYLEGSDQHRGWFHSSLLESCGTRGRAPFESILSHGFVMDGKGLKMSKSLGNQIFPEDILKKYGADILRVWVTASDYSEDLRIDYSILEQHAEAYRKIRNTFRYLMGNINDNYSEQEYSKINLTKLPELERLMLHKLYILNEKFNLNFKEYNFHVLYKELLNFCTVDLSSFYFDIRKDTLYCDKKNSDKRQSCILILNTILDALLKWFAPILSFTTEEIFSLLNKDEKNSIHLKKFPEFPKSGKMRSLIT

SEQ ID NO: 190489 - protein, 590 aa, Unknown
  Bacterial polypetide isolated from the Sargasso Sea
MTKSQINLPKTAFSMKANLPTREPEILEYWKKINLYQELRDSSKGREKFVLHDGPPYANGNIHMGTALNKILKDIIVKFHQMDGKDSIYVPGWDCHGLPIEWKIEEQYKKNKKNKNEVPIVEFRKECRTFAEKWIEVHKNQFKRLGVVGDWDNYYSTMSFDAEAQIVRELGKFLKEGSLYRGFKPVLWSTVEKTALADAEVEYQDHKSDTIYTSFKVKSSNLKDLVGGEIIIWTTTPWTIPANKALAYNDSLDYVILEVNDEGDFKNRKIVIADALLGSVVKDCELNNYKILNKFKGKEFNNTVCNHPFLNLGYDYDIPMLEARFVTTEQGTGIVHCAPSHGPDDFNLCLNNNIKAIETVDGDGKYTNNVKLFEGTHIFKANPIVIEKLKEQKNLLFNGELVHSYPHSWRSKAPLVHRATPQWFISMESHKLRDKALKAIDETTFYPSKGKERLKSMIETRPDWCVSRQRVWGVPLPIFVNKKTKKILADDDVMENIASIYEKEGSDCWFSDDPQRFLGKKYKAEEYEKLSDIVEVWFDSGSTHSFVLEKRDDLKWPASMYLEGSDQHRGWFHSSLLESCGTRGRAPLRQ

SEQ ID NO: 190490 - protein, 559 aa, Unknown
  Bacterial polypetide isolated from the Sargasso Sea
KWIDIQKKEFRRLGVEGDWENPYLTMSNQAEAQIVRELGKFLIDESLYKGAKPVLWSVVEKTALADAEVEYEDHTSNTIYVKFLINSSSYKDLEGANIVIWTTTPWTIPGNRALAFGEDLKYSLIEVEKITNESLAKIGDKLIFAKELVKQVCDEIGIESYKEIKEFEGKHLSKCQCEHPFKSIGYDFVVRTFHGDFVNLEQGTGIVHIAPGHGDDDYNLGIKNGVDIVQTVQDDGKYNKHAKGFEGEHIYKVDIKIADKLDELSKLLFKGTLRHSYPHSWRSKAPLIYRNTPQWFISMEKNKLREIALKSIDETIFYPAQGQKRLRSMIETRPDWCISRQRVWGVPLPLFVSKETGQPLRDKSIIDRIADIYEKEGSDTWFTEDPQRFLGDKYSIDDYEQIKDVVEVWFDSGSTHAFCLEKRDDLKWPASMYLEGSDQHRGWFHSSLLESSGTRGRAPYESVLTHGFVVDGKGRKMSKSLGNVISPDDILKKYGVDILRLWVVASDYYDDLKLDNAILQSQTDSYRRIRNTFRYLIGNLDGFNDDEKINESEFPDLEK

SEQ ID NO: 190491 - protein, 666 aa, Unknown
  Bacterial polypetide isolated from the Sargasso Sea
ANKALAYNQSLKYLIIELLDDNQFKNKKIVIAKDLLNSVIKDCNIEKYKTLKEINGKDFLGTICQHPFFNIGYDYDIPMLEARFVTTEQGTGIVHCAPSHGPDDFNLCLNNGIKALETVDDDGKYTKNIPVFEGVHIFKANSIVIEKLKEFKKLLANGKLNHSYPHSWRSKAPLVHRATQQWFISMDSHGLRKKALRAIEETKFYPSKGKERLKSMIETRPDWCVSRQRVWGVPLPIFISKKTNEILIDDEVFDNIANIYEKEGSDCWFSDDPQKFLGKKYNAKDYEKLSDIVEVWFDSGSTHSYVLETRKDLKWPASMYLEGSDQHRGWFHSSLLESCGTRGRAPFETILSHGFVVDGKGLKMSKSLGNIIAPEDILKKYGADILRVWVAAADYSEDLRIDNLILEQHAESYRKIRNTFRYILGNLNDNFVKTDLEKINLSKFTELEKYMLHKIYILNENFHKNFKSYTFHNLYKELLNFCTVDLSAFYFDIRKDSLYCDDLKSEKRKNCILVLNIILDCLLKWFAPILSFTTEEIFTLVNKGNGKSIHLERFSEIPLKWKNEKLNEKWIKIKRIRDITNISIENKRANKVIGSSLEAKVKIKLNKEMYEFAKNFDFAEICITSEAEIILDEKLNDEVDVETIKAEGKKCKVCWKIIKGKCERHG

SEQ ID NO: 190492 - protein, 948 aa, Unknown
  Bacterial polypetide isolated from the Sargasso Sea
MSEEKKITDYRDTLLLPETDLPMKAKLPENEPKLLDNWNEIGTYAAIRKSSEGKDKFILHDGPPYANGNLHMGTALNKILKDIIVKSKQMSGFDAIYRPGWDCHGLPIEWKIEEQYREKGKSKEEVPINEFRSECRVFAKKWIDIQKEEFKRLGVFGEWENPYTTMEFESEAIIVREFHKFLMNDDLYCGSKPVMWSVVEKTALAEAEVEYKEHVSPTIWVKFPLNTKETEYENSSILIWTTTPWTIPANRAIAYSSKYEYGLYEVVEIEEGSLANIGEKIIINNTLKENLENASKAKIKFIKNIDNIENLICEHPFKSLGYEFQIPLLEGEFVTDETGTGFVHIAPSHGQDDYDLASKNGIEAPFMIDDEGVYLPSVKFFAGKRVYEDDGSYGDGNGSVIRELINANALFAKGKLRHQYPHSWRSKAPLLFRNTPQWFISMEKNNLREKSLSEIERVQWIPKRGKNRIKSMVDNRPDWVVSRQRAWGVPLAIFLNKKTGEILKDKEINEKIFAKFKEKGSDSWFELTSEEILGDNYNSDEWEKIDDILDVWFDSGSTQAFVLEGDEGIGFPADLYLEGSDQHRGWFQSSLLVGCGTRGKAPFKQVLTHGFVVDKDGKKESKSLGNVTKPEDLINQYGADVIRLWVVSSDYTDDLRVGQDIMKANVESYRKIRNTFRFLLGNLNNFSQDEIVDYEDMPELEKYILHKLYLIDLEVRKAYENYDLKSVFQTLLNFSNLDLSSFYFDIRKDTLYCDSPKSNNRKSTRTVLDLLFNYLVTWFAPILCFTTEEVRKSRFPEINNSVHEMEFLETKDVWNNSKLFEKWENIRSIRKVVTGAIELERKEKRIGSSLEAKPIVFVSNEDYIELLRNIDLPEIFITSQAELRSEEGPKNAFTLDDISDVSVICEIAEGNKCNRSWKILPEVGTDNDYPDLSLRDANVMREINVKGH

SEQ ID NO: 190493 - protein, 869 aa, Unknown
  Bacterial polypetide isolated from the Sargasso Sea
HDGPPYANGDIHLGHSVNKILKDITIKFKTLQGFNAPFIPGWDCHGLPIELNVEKKYGKNSELVKNKESFQKACKEYAESQLNRQLDDFKRLGVLGDWENSYKSLDPKFEADIVRSLGIIYSEGYLEKGEKPVHWCQESGSSLAEAEVEYIDKTSKAIDVAFKVDHLSLKKVKDLFNTVDSDEISFVIWTTTPWTIPSNVAICINPEYKYSLIKMNNKFYVIAFEMIDQCSKRWNQKFDVISTIQGKKLCDIDFIHPFLDRKSVLLHADHVTTETGTGCVHTAPAHGMDDYLICKKNNIDTIHSLNNKAFFKDELDFIAGLPAMKADPLIIEKLQEQNALINIEDYHHSYPHCWRRKTPLIFTSTPQWFISMKKNNLIKDALKHIKSVNWEPSWGLQRIESMLVDRPDWCISRQRNWGVPITLVVHKDTGEIHPDQKNLFEKFAQIIEKDGISAWDQLDLKDFISDYKDYVKTSDTLDVWFDSGVTHFAVSSKRFGKNTIADLYLEGSDQHRGWFQSSLLTSIAMNGSAPYKTVLTHGFVVDEQGRKQSKSLGNVVSPQKVWDNLGADILRLWVASTDFRSEMVASDEILRRTSDQYRRIRNTFRFILGNLKDYKDENKIKFKDQVELDKWIINEAKILQNDVLKLYESYSYHKAIQKIHNFCVNELGGVYLDIVKDRLYTCKSDSNARRSCQTSLDFLLNILVRLIAPVLSYTAEEIWQTSERLSSQEESVFLSNYDISEIDYQSSIKESDWNRIFEIKDAVNQSIEEMRSDNKLKGSLDSIVNINANEEDLKILKKLGNELHFLFISSEASVEKSKSFKIKINSSKNPKCTRCWHRHASVGTSKEHPELCYRCIENIDDNGEQRSFV

SEQ ID NO: 190494 - protein, 544 aa, Unknown
  Bacterial polypetide isolated from the Sargasso Sea
MSDYKHTLNLPETPFPMRGNLAQREPKMLKAWYEDDLYGQIRSAKKGKKTFILHDGPPYANGDIHLGHSVNKILKDIIVKSKTLSDFDSPYIPGWDCHGLPIELMVEKKVGKPGVKVTASEFREKCRAYAKKQVEGQKVDFKRLGVFADWDKPYLTMNFDFEANAIRVLGRIIKNGHLHKGAKPVHWCTDCGSALAEAEVEYQDKQSPAIDVRFIFADQDAVVNAFDMAQGHKGKGSVGTVIWTTTPWTLPANRAVAVHAELEYALVQVEDEGAEQRLILGSELVKDAMDRFGFNHYHVLGYVKGAALENLQVAHPFYDFNVPVIVAEHVTTDSGTGVVHTAPGHGQEDFVAGLNYNLEVANPVGANGVYLPDTELFAGQHVFKANASVIEVLKERGALVHHHALTHSYPHCWRHKTPIIFRATPQWFVSMDQANLRKDSLAEIKNTQWLPEWGESRIANMVEGRPDWCISRQRTWGVPIALFVDKDTGALHPNTQALIEQAAALVEKSGIQAWYDLEPETLLGEEDAKQYMKVQDTLDVWFDS

SEQ ID NO: 190495 - protein, 910 aa, Unknown
  Bacterial polypetide isolated from the Sargasso Sea
PEIQNFWANNDIDFQLGSNNSGEIFTLHDGPPYANGALHMGHALNKVLKDIINKYKTLRGFRVHFVPGWDCHGLPIELKVLQNLKSDERKNLDTLNLRKKATDYAHIQINNQKEGFKRWGIWGDWDNPYLTLKKSYESAQIGVFGKMFLNGYIYRGLKPVHWSPSSRTALAEAELEYPDEHFSKSIYVSLKINNISEQILLNFNQENPNIKKDFFQNNSFITIWTTTPWTIPANEAVAVNPKIKYVFAIDEEKRIYLFAKDLSSEISKKFNKDFKVLLEVRGSELENIEYQHPTKDKNCRILIGGDYITTESGTGIVHTAPGHGIDDFNVGQKYDLPITCVVDEKGNLNESSGQFQGSNVLKDANDLIIEYLKGNNLLLLQENYKHRYPYDWRTKKPTIFRATEQWFASVNGFRSSALKAIEDVEWMPETGKKRIYSMVVGRGDWCISRQRSWGVPIPVFYKKNGNDILLNNEIINHIQELFSEHGADIWWDWDVKNLLPESYAKESDQWKKGTDTMDVWFDSGSSWAAVCELRSELKYPADLYLEGSDQHRGWFQSSLLTSVAVNNKPPYKKVLTHGFALDENGRKMSKSLGNVVDPNIIINGGNNKKTDPAYGADVLRLWVSSVDYSVDVPIGSNILKQLSDVYRKVRNTARYLLGNIHDYDPNVDSFEIDQLPLLDQWMLGRLVEVTDEISNAYENYEFSKFFQILQSFCVVDLSNFYLDIAKDRLYVSSKSQFRRRSCQFVMSKVVENLAVLISPVLCHMAEDIWQNIPYSTKEKSVFQRGWPIFSQSWKNQILNEHIANLRNLRVEINKAIEGCRNKQIIGAALETEVNYLPEDKVLKDSLTWLKEFGNQDVDLFRDWLIVSNFQVVSDLVENSLIIDNNALGKIQILKAQGQKCDRCWHYQKET

SEQ ID NO: 190496 - protein, 552 aa, Unknown
  Bacterial polypetide isolated from the Sargasso Sea
GTCCPKILKDMVVKSQVLDGKHAPFVPGWDCHGLPIELNVEKKKGKVGQKISASEFRTACRDYANSQINLQKSDFQRLGIIGDWENPYVTMDYPFEANIIRSLGKIIEQGHLKRGDKPVHWCFDCKSALAEAEVEYQEKLSTSIDFLFPIKNSKIDKIFGSNSKNQSYFASWTTTPWTLPGNLALTVNESFIYELIEIIFNNRKINLILAKELVQSTLERIGLDSYKSLGTCNGSDLLGIKATHPYLDRDSLIIAGDHVTTEAGTGIVHTAPGHGLEDYLVSIENGLEVLNTVKANGTFQDDVAHFAGQFVFNANDNIIELLKEKDVLLSQSDYEHSYPHCWRHKTPVIFRATPQWFISMDANKLLEKSLSSVDSVRWEPAWGQSRMVSMLESRPDWCISRQRSWGVPIVLLVDKDTGEIHPETQEIIEKVAIMVEKNGIQAWHDVAIEDLTENHENYYKVTDCLDVWFDSGVTHACVLDTNEELQFPADLYLEGSDQHRGWFQSSLLTSIAMKESAPYKTVLTHGFVVDGEGRKMSKSIGNVISPQKIGKI

SEQ ID NO: 190497 - protein, 569 aa, Unknown
  Bacterial polypetide isolated from the Sargasso Sea
APVMVQMILIFCLNNGIKAIETVDGDGKYTNNVALFEGTHIFKSNPIVIEKLKEQKKLLSNGELIHSYPHSWRSKAPLVHRATPQWFISMDSHKLRIKALKAINETTFYPSKGKERLKSMIETRPDWCVSRQRVWGVPLPIFINKKTKEILVDDNIFENIAKIYEKEGSDCWFSDDPQKFLGNKYKAEDYEKLSDIVEVWFDSGSTHSFVLEKRKDLKWPASMYLEGSDQHRGWFHSSLLESCGTRDRAPFETILSHGFVVDGKGLKMSKSLGNVIAPEDILKKYGADILRIWVASSNYAEDLRIDYSILDQHAESYRKIRNTFRYLLGNLNDSFESKDLSKLEIKKLPELEQFMLHKIYTLNLNFDKYFKNYDFHNLYKELLNFCTVDLSAFYFDIRKDTLYCDSKESEKRKSTLILLNIILDSLLKWFAPILSFTTEEIYQLVSKNKKSIHLERFLSFPKKFENPELNLKWERLLKIRDVCNLSIEQKRANKEIGSSLEAALIIKLNKENQNILKGIDLSELCITSSAKIENSNLDEVVVETSKAKGDKCSICWKIRTSPCERPNCK

SEQ ID NO: 190498 - protein, 506 aa, Unknown
  Bacterial polypetide isolated from the Sargasso Sea
PLIYRNTPQWFISMEKNQLRDTALKSIDNTIFYPAQGQTRLRSMIETRPDWCISRQRVWGVPLPLFVSKETGQPLRDQEVINRIADIYEKEGSDTWFTEDPQRFLGDKYSIDDFEQVKDVVEVWFDSGSTHAFCLEKREDLKWPASMYLEGSDQHRGWFHSSLLESSGTRGRAPYESVLTHGFVVDGKGRKMSKSLGNVISPDDILKKYGVDILRLWVVASDYYDDLKLDNAILQAQTDSYRRIRNTFRYIIGNLDGFDNSEKIDESEFPDLEKYILHRLWELDQIISNCVKNFNFHLMFTTLLNFCSNDLSAFYFDIRKDVIYCDGKKSKIRRSARTLLDTIFHYLVRWLAPSLSFTTEEAWKAMGNKTSIHLEDFLHTPVNYENSKINENWKVLKQIRKVITGALEKKRAEKIIGSSLEAHLDIYVDSLTLEKIKNYPLDEISITSSFSLHELTDKSQGFYLEDVSNVKIAVSKTKGQKCQRCWKYKEQLIRDEICERCDNAIS

SEQ ID NO: 190499 - protein, 442 aa, Unknown
  Bacterial polypetide isolated from the Sargasso Sea
MTAKDDKIDFSETLFLPKTSFAMRAGLPEQEPSILEDWDKNNLYHKLRNNSKDRKKFVLHDGPPYANGHLHMGHALNKVLKDFVVRSQQMLGHNSSYIPGWDCHGLPIEWKIEEQYREKGKDKDEVDIIQFRKECREFAKKWIDIQRSEFIRLGVTGDWFNPYTTMSYEAESTIVKEFFKFLENESLYRGSKPVMWSTVEKTALAEAEIEYKEHKSITIFVKFPVISSLENNEVNTSVIIWTTTPWTIPANRAIAFSKDISYSIYSVNGLEESSLLKEGEQIIIADQLIDNVRTQCKVKELTKIRAIKDLDQIICGHPFRDSGYDFEVKLFDADFVTLEQGSGFVHIAPGHGADDYNLGIANNVEVPETVDENGQYFDHVPLFKGKKVFNDDGSDADANVAVIVELKNHNNLAGKGSLRHSYPHSWRSKAPVIFRNTPQWVY

SEQ ID NO: 190500 - protein, 560 aa, Unknown
  Bacterial polypetide isolated from the Sargasso Sea
MSKENINLPKTAFSMKANLPNKEPEILNHWDKINLYEELRKSNKGNKKFILHDGPPYANGNIHMGTAYNKILKDIIVKFHQMSGEDSVYVPGWDCHGLPIEWKIEEQYKKNKKNKNDVPIAEFRKECRAFAEKWIDVHKKQFMRLGVVGDWKNYYSTMSFDAEAQIVRELGKFLKEGSLYKGFKPVLWSTVEKTALADAEVEYLDHNSDTIYASFTIKKSNFNELNGAEAIIWTTTPWTIPANRALAFNPNLEYCIVQIEDPGDFENKKIVICKDLIESVIKDCEITKYKLIKSFKGNELKGTICIHPFFKLGYDYEIPMLEARFVTTEQGTGIVHCAPSHGPDDFNLCLNNGIKAIETVDGDGKYTKNVYLFEGIHIFKANPIVIEKLKDQKKLLSSGKLLHSYPHSWRSKAPLVHRATPQWFISMESHGLRKTALKAIDDTKFYPAKGRDRIRSMIETRPDWCVSRQRVWGVPLPIFIHKKTKEILIDDKVIENIASIYEKEGSDCWFSDDPQKFLVDGYNIDDYEKSNDIVEVWFDSGSTHSFVLEKREELEWPASM

SEQ ID NO: 190501 - protein, 445 aa, Unknown
  Bacterial polypetide isolated from the Sargasso Sea
SRKKFVLHDGPPYANGHLHMGHALNKILKDFVVRSQQMLGNDSSYIPGWDCHGLPIEWKIEEQYREQGKNKDDVDIIKFRKECREFAEKWIDIQREEFIRLGINGDWYSPYTTMSYEAESIIVREFFKFLENESLYRGSKPVMWSTVEKTALAEAEIEYKEHKSTTICVKFPVKESSDTNCQDASVIIWTTTPWTIPGNRAIAYSKSITYSMFEVVSLEEHSTLQVGDKIIIADELLDNVKVQCKIRELKKISEVKNLDKIICNHPFKKSGYDFEVRIFDADFVTLEQGTGFVHIAPGHGADDYNLGITNGIEVPDTVDENGEYFPHVPLFNGKKIFNEDGSDADANVAVIIELKKHENLAGKGSLRHSYPHSWRSKAPVIFRNTPQWFISMEKNQLREKALNEIEKVKWYPKQGKNRIYSMIEERPDWVVSRQRAWGVPLSIFT

SEQ ID NO: 190502 - protein, 337 aa, Unknown
  Bacterial polypetide isolated from the Sargasso Sea
SIDKTIFYPEKGKARIRSMIETRPDWCISRQRSWGVPLPIFIDKKTNEPLRDLEVIENIAKIYEKEGSDCWFHDDPQRFLGKKYNKQNYIKSNDIVEVWFDSGSTHSFVLEKRKDLKWPASMYLEGSDQHRGWFHSSLLESCGTRGRAPFESILSHGFVVDGKGMKMSKSAGNIISPDEILKKYGADILRLWVASSDYAEDLRIDHSILEQHAESYRKIRNTFRYILGNLRDNYSPQNFKSIKVGELPELEQVILHKIYFLSLEIKNSLKDYNFHKLQKELLNFCTLDLSSFYFDIRKDTLYCDEVTSQKRKSCVTLLNIILECLLKWYAPSVIVYN

SEQ ID NO: 190503 - protein, 308 aa, Unknown
  Bacterial polypetide isolated from the Sargasso Sea
MSDYKATLNLPQTDFPMKANLAQREPERLKAWAEMDLYGQMREAAKGKPTFILHDGPPYANGELHIGHAINKILKDIIIKSKTLSGFDAPYVPGWDCHGLPIELNVEKKVGKPGHKVTAAEFRQKCRDYASKQVEAQKADFVRMGVFGDWAHPYLTMDFQFEANIVRTLAKIIDRGHLHRGFKPVHWCLDCGSALAEAEVEYADKQSSAVDVAFPFVDRGEAASRLGCDDVEAIDLAIWTTTPWTLPANRAVALSADLEYVLLDLGSRRVLVAEALAEDCVQRFGAASHDIIGRAKGEALEGLFSDAA

SEQ ID NO: 190504 - protein, 517 aa, Unknown
  Bacterial polypetide isolated from the Sargasso Sea
MSEHNALIGRGKLNHSYPHSWRSKAPLVFRTTPQWFISMVSNNLREASLKALSQTAFYPPQGQNRLTKMIEDRPDWCISRQRAWGVPLAIFVNKKTQEPLRDQVVIDRIVNAFKTDGADAWFEKPSSYFLGSKYNPDDYEAVTDIADVWFDSGSTHSFVLEERDDLFWPASLYLEGTDQHRGWFHSSLLESCGTRGRAPYDAVLTHGFVLDQQGRKMSKSLGNITAPQKVINEFGADILRLWVVGSDYYDDLRIGKEILIRHSDHYRRLRNTLRYLLGALNDFSENERINYIEMPELEQWVLHRVYELSEKIHENTEKFNLHDIYLDIHNFCTVDLSAFYFDIRKDTLYCENPSSTERKSCRSVMDILFQSLTTWLAPIICFTAEEAWQSRYGDKENSVHLQTYFQAKKEWENFQIGKKWSEIRELRSVVTSSIEEKRKEGVLGSSLQAKVLIEANEDSYNVLQSVDLPDIFICSDVQMDLNKNLSDTKIKVKIDLASGGKCMRCWKVVPEVKDNMN

SEQ ID NO: 190505 - protein, 555 aa, Unknown
  Bacterial polypetide isolated from the Sargasso Sea
MLGKDANYVPGWDCHGLPIEWKIEEKYRKKKKDKDEVPVVEFRKECREFADEWIDVQRTEFKRMGVFGNWDHPYTTMTYAAEAKIAEELGKFLLDGSLYRGSKPVMWSPVEKTALAEAEVEYYDHTSTTIFVRFPVITPSVPEVDGAAVVIWTTTPWTMPGNRAVAFGPAIEYTVFDVTATAEESRAQVGETLIVATKRLAEMTAECGITGHEARATLKGDALTDTVCRHPLRGQGFDYDVPALAADFATTDEGTGFVHIAPGHGADDWVLGVANGIEVPHTVGEEGRFFAHVPLFSGMHVYKCNDDVAEIICNAGGLLGKGSLVHRYPHSWRSKQPLIFRNTAQWFISMETTGLRDKALKAIDETRFVPASGQNRLRGMIAERPDWVVSRQRAWGVPITVFVNKETDEPLRDPAVMERVVSTFKEEGADAWFASPPDRFLGKDYNAEDYEQVTDILDVWFDSGSTHAFVLEDGEWNDLAWPASLYLEGSDQHRGWFHSSLLESCGTRGRAPYETVLTHGFVMAEDGQKMSKSLGNIVEPQNVYNQQGADIFGSG

SEQ ID NO: 190506 - protein, 344 aa, Unknown
  Bacterial polypetide isolated from the Sargasso Sea
MQDKEFDFKNTLFLPDTSFPMRASLPTREPSWLEQWNRLKIYYKLREKGAKRKPFILHDGPPYANGHLHIGHALNKILKDFIVRSQQMLGFDARYVPGWDCHGLPIEWKIEEKFRQKGQNKDEIPINELRKQCRVFASEWVEIQKNEFKRLGIIGDWENPYLTMDFKSEATIAAEFMKFIELGTIYQGSKPVMWSPVEKTALAEAEIEYKEHQSKTIWVKFPLISNKFSNCSIVIWTTTPWTIPSNKAVAFNKDISYGIYEVIETESECWLSKGELLMLADKLASECFKQARVLNAKKIKNIDYKDLNTLKTKHPFSNLTGSNNFWNYEVPIIDSSIVTEETGT

SEQ ID NO: 190507 - protein, 567 aa, Unknown
  Bacterial polypetide isolated from the Sargasso Sea
LDGNGFFDAEYEGLAGLPAIKADNIVIDILNDSGALINVEDFHHSYPYCWRHKTPLIFASTPQWFISMDKSGLLEGSIQAVKDVEWEPSWGYERIKSMLEGRPDWCISRQRSWGVPIPLIINKKTGEIHPKQNLLFNEIADRIDEQGLEAWDKANLEDLIDDHDEYIKATDTLDVWFDSGSTHFCVLDKLYGKDLIADLYLEGSDQHRGWFQSSLLTGIAINGKAPYKAVLTHGFVVDENGRKQSKSLGNVVSPQKVCNNLGADILRLWVASTDFRSEMVATDEILKQVADQYRRIRNTFRFMMGNLNDFNDDSKNINQNDLVEIDKWIISAAIKLDEEVKNLNDSYAYHHVVQKIHNFCVHELGGIYLDIIKDRMYVTKSDSHARNSAQFALFEVADILIRLISPILVFTAEEIWQSHDLFKKQSKSVFLCPKKSLNKIESSISDYDWKVIFAVKDSVNQNIEKARADSVIKGSLDAKIKISCSSEIYGALKKIENELKFVFIASEVELIEDSNTKLSIDITNYDQKKCIRCWNKCESIGSHEDDPEICSRCHTNVYGDGEVRKFV

SEQ ID NO: 190508 - protein, 472 aa, Unknown
  Bacterial polypetide isolated from the Sargasso Sea
KKFGRDSDTVKDKSKFISACREYALSQIENQKKDFIRLGVLGDWENSYKSLDSSFEADTVRSLGRIVTNGHLQKGEKPVHFCYDCKSALAEAEVEYEDKVSKSIDVGFKVKKDSLVKLSAAFSKEIDSCSFVIWTTTPWTIPANAAVSIGPELKYTLCSSKFGNLILASDLIDQCSERWGEDLEKISEAKGSDIKDVVLEHPYLKRDSILVHGDHVTTDTGTGCVHTAPAHGVDDHNICKKFNIETIHALDGNGFFNAEYEGLAGLPAIKADNIVIDILNDSGALINTEDFHHSYPYCWRHKTPLIFASTPQWFISMDKSGLLEGSIQAVKDVEWEPSWGYERIKSMLEGRPDWCISRQRSWGVPIPLIINKKTGEIHPKQNLLFNEIADRIDEQGLEAWDKANLEDLIDDHDEYIKATDTLDVWFDSGSTHFCVLDKLYGKDLIADLYLEGSDQHRGWFQSSLLTGIAING

SEQ ID NO: 190509 - protein, 618 aa, Unknown
  Bacterial polypetide isolated from the Sargasso Sea
MSKSQINLPKTAFSMKANLPIREPEILKLWKKIDLYKELRNSRKGEEKFVLHDGPPYANGNIHMGTALNKILKDIIVKFHQMDGKDSVYVPGWDCHGLPIEWKIEEQYKKNKKNKNDVPIVEFRKECRTFAEKWIEVHKDQFKRLGVVGDWENYYSTMSYDAEAQIVRELGKFLKEGSLYRGFKPVLWSTVEKTALADAEVEYQDHKSDTIYACFPVKLSKIKELNDCNIVIWTTTPWTIPANKALAYNESLDYLIIQINDEGNFKNKKIVIAEALLESVLKDCEIKEFKNLKKFKGKDLKDTICKHPFFDLGYDYDIPMLEARFVTTEQGTGIVHCAPSHGPDDFNLCLNNGIKAIETVDDDGKYTNNVSLFEGLHIFKANPVVIEKLREQNKLLSNGELVHSYPHSWRSKAPLVHRATPQWFISMESHKLRSKALKAIDDTTFYPSKGKERLKSMIETRPDWCVSRQRVWGVPLPIFVNKKSNEILIDDKVFENIANIYEKEGSDCWFSDDPQKFLGDKYKAKDFEKLSDIVEVWFDSGSTHSFVLEKRKDLKWPASMYLEGSDQHRGWFHSSLLESCGTRGKAPFESILSHGFVVDGKGLKMSKSLGNVITPEDI

SEQ ID NO: 190510 - protein, 523 aa, Unknown
  Bacterial polypetide isolated from the Sargasso Sea
EILNLIIAKDLVKSCIERLGITKYSEKASCKGKDLEGFEARHPYLDRSSKIILGDHVTTEAGTGIVHTAPGHGLEDYQVAMKYNLEVINPVKNNGTFKEDIYGLEGMFAMKANEKVLELLDEAGSLFHSEDYAHSYPHCWRHKTPLMFRATPQWFIGMDRNNLLEKAKLTVDEVDWKPDWGQARMKGMLEDRPDWCISRQRTWGVPIPLILNKETSELHPDMQNLIEKIALKIEEQGLNAWYSMELSELIEDHEDYEKIDDCLDVWFDSGVSHSCVLNHFEDLQFPADVYLEGSDQHRGWFQSALLTSVAMYEEAPYREVITHGFVIDSDGQKMSKSIGNTTSPKEIWNSKGADVLRIWIASTDYRKEMVFSQEILKNCSDAYRRIRNTIRFLLGNLNDFNDQEIPKGFELAELDNYMISRTKSLQEEIVEDYNNYQFHRAFQKILNFCTNDLGGFYLDVLKDRLYTCAQDSQARTSSQIALNVILESLLRWVSPILCFTAEEAYKQFKPEDKSVHLLNWFKD

SEQ ID NO: 190511 - protein, 590 aa, Unknown
  Bacterial polypetide isolated from the Sargasso Sea
MLGARFVTTEQGTGIVHCAPSHGPDDFNLCLNNGIKAIETVDDDGKYTNNVSLFEGLHIFKANPIVIGKLKDQNKLLSNGVLVHSYPHSWRSKAPLVHRATPQWFISMESHKLRSKALKAIDDTTFYPSKGKERLKSMIETRPDWCVSRQRVWGVPLPIFVNKKSNEILIDDGVFENIANIYEKEGSDCWFSDDPQKFLGSKYKAEDFEKLSDIVEVWFDSGSTHSFVLEKRKDLKWPASMYLEGSDQHRGWFHSSLLESCGTRGKAPFESILSHGFVVDGKGLKMSKSLGNVIAPEDILKKYGADILRIWVAASNYAEDLRIDYSILDQHSESYRKIRNTFRYLLGNINDKYEEINLDKIDVESLPELEKFMLSKIHSLNNKFENYFKKYDFHNLYKELLNFCTTDLSAFYFDIRKDTLYCDPINSEKRKSCVTILNVLLKSLLRWFAPILSFTTEEIHQLISKESKSIHLEKFLTFPDKFKNEELTERWSQLIKIRDVCNISIEEKRASKEIGSSLEADLNIQLNEKYKEIVADMDLSELCIVSKTFINFDNQSDILVETKKASGNKCSVCWKIREDPCERHPKCQIS

SEQ ID NO: 190512 - protein, 455 aa, Unknown
  Bacterial polypetide isolated from the Sargasso Sea
VIADALIDSVVKDTKIQSFQKLKNFKGKDLKGTICNHPFLNLGYEYDIPMLEARFVTTEQGTGIVHCAPSHGPDDFNLCMNNGIKAIETVDGDGRYTKNVSLFEGIHIFKSNSIVIEKLKDQKKLLSSGELVHSYPHSWRSKAPLVHRATPQWFISMDSHKLRNKALKAIDETTFYPSKGKERLKSMIETRPDWCVSRQRVWGVPLPIFINKKTSEILVDDEVFDNIAKIYENEGSDCWFSDDPQKFLGKKYKAADFEKLSDIVEVWFDSGSTHSFVLEKRKDLKWPASMYLEGSDQHRGWFHSSLLESCGTRDRAPFESILSHGFVVDGKGLKMSKSLGNVIAPEDILKKYGADILRIWVASSNYAEDLRIDYSILDQHAESYRKIRNTFRYLLGNLNDKFEQINLEKIKIEDLPELEQFMLHKIYNLNSKFSKYFKDYDFHNLYKELLNFCTC

SEQ ID NO: 190513 - protein, 945 aa, Unknown
  Bacterial polypetide isolated from the Sargasso Sea
MSNKKADSKPQSRYPVNLLDTPFPMRGDLPKREPQWVKEWQERKVYEKIRAASKGRKKFILHDGPPYANGDIHLGHAVNKILKDMIVKARNMAGFDAVYVPGWDCHGMPIEIQIEKQFGKSLPAAEVMQKARAYATEQIEKQKVGFRRLGVLGDWDNPYKTMNFTNEAGEIRALAKIMEKGYVFRGLKPVNWCFDCGSALAEAEVEYADKTDPTIDVLFSFAEPEKTAQAFGLKALPRNEGGIVIWTTTPWTIPANQALNLHPEIVYALVDTPRGLLILAEERVEACLKQYELEGTVIATAPGAKLVNLRFNHPLAAAHPAYKRTAPVYLGDYVTTESGTGVVHSSPAYGVEDFVSCKAHGMADSDIINPVMGDGRYIESLALFGGLSIWAANPQIVEALRAAGSLMRTENYRHSYMHCWRHKTPIIYRATSQWFAGMDVKPNDSDKTLRETALEGIENTAFYPAWGKQRLFSMIANRPDWTLSRQRQWGVPMAFFVHKETGELHPRTLELLEEVAQRVEKAGIEAWQTLDPRELLGDDANMYEKNRDTLDVWFDSGTTHWHVLRGSHKDELQFPADLYLEGSDQHRGWFHSSLLTASMLDGRPPYNALLTHGFTVDGEGRKMSKSLGNGIDPHEVANRLGAEIIRLWIASTDYSGELAISEEILKRVTESYRRIRNTLRFLLANLSDFDFAQHARPVEDWLEIDRYAVALSANLQNDILSHYDKYEFHPVVAKLQTFCSEDLGGFYLDVLKDRLYTTAADSVARRSAQTALYHIAHGLLRLMAPFMSFTAEEAWKVFQPNSETIFTETYHAFPAVPQAGELLDKWTLLRAARSDVTKALEEARVANLIGSSLQAEVEIRASGARYDALTSLGDDLKFVLITSAANVVKVDSEAEESVEVIASKYLKCERCWHYRADVGAYAEHPTLCGRCFSNLFGNGETRSAA

SEQ ID NO: 190514 - protein, 453 aa, Unknown
  Bacterial polypetide isolated from the Sargasso Sea
MIETRPDWCVSRQRVWGVPLPIFINKKTKEILVDDEVNETIAAIYEKEGSDCWFSDDPQRFLGNKYKAEDYDKLSDIVEVWFDSGSTHSFVLEKREDLKWPASMYLEGSDQHRGWFHSSLLESCGTRGRAPFENILSHGFVVDGKGLKMSKSLGNVIAPEDILKKYGADILRIWVASSNYSEDLRIDYSILDQHAESYRKIRNTFRYLLGNIKDNFEEIDFKKVDLNELPELEQFMLHKLYSLDVNFKKYFKNYDFHNLYKELLNFCTVDLSAFYFDIRKDSLYCDSIDSKNRKSTILLLNIILNSLLKWFAPILSFTTEEIYRLIFKDSKSVHLEKFLNFPNNFENKKLYQKWLELIKIRNICNISIEEQRANKEIGSSLEADLNIHLNKKLQEITKNIDFSELCITSKAQISFKEKLETSAQTTKAKGTKCTLCWKISENACDRTHCPKNT

SEQ ID NO: 190515 - protein, 479 aa, Unknown
  Bacterial polypetide isolated from the Sargasso Sea
EHLAGMFVFKSNEKVIEILEENDALLAKADYQHSYPHCWRHKTPLMFRATPQWFIGMESKDLLKNAFSSIENIHWEPDWGKARMASMLDSRPDWCISRQRSWGVPITLLVHNETGEIHPDIETIIEKVATLIEKVGIQAWHDVEVSDLIDDSEKYFKVTDCLDVWFDSGVTHACVLNSNDELDFPADLYLEGSDQHRGWFQSSLLTSMAINGEPPYKGVLTHGFVVDSEGKKMSKSIGNVISPQKIWDTMGADVLRAWIASTDYTKEIVLSDDILKRTSDSYRRIRNTIRFLLGNLSDFNNEDAVGKDKLTELDKWMIYRTKSLQDEIKKDYENFQFHQAFQKIHNFCANDLGGFYLDILKDRLYTAKTDSDARRSSQTALSNILQALLRWISPVLSFTAEEAWLLMEEDEDSVHLLEWFEDWNDFGELKISDDEWNKVLEIRSEVNKHIEETRNQEIIGSALEADLELCCDKSLKQLL

SEQ ID NO: 190516 - protein, 671 aa, Unknown
  Bacterial polypetide isolated from the Sargasso Sea
TEIPSDILKELICKHPFHNLHKGFNFDVPLLDGNHVTDDAGTGFVHTAPGHGIDDFEIWMKNKKSLDEQNIDSTIPYTVNEDGAFDENIDGFHGVYVFDKNGKKGKANEHVISKLVDCASIISRKRFEHQYPHSWRSKKPVIFRNTPQWFISMEDNKTNGLRSTALKSINNTIFYPPAGKNRLHSMIEARPDWVLSRQRTWGVPISLFINRQTGIFIPNKEFDKSEILIDRIHKIFSEEGANSWFKENAKERFLEGIVDNHDDWEKVDDILDVWFESGTTHAFVLENNPETTWPADMYLEGSDQHRGWFHSSLLESSLTRGRAPYKSVLTHGFTMDKDGRKMSKSLGNVISPQDIVKKYGADILRLWVASTDYSDDQRIGEEILKSIIEAYRKIRNTIRWMLGVLSNYDQSWIYDYEDLDELEKYMLHSLTRLQEDVQDAYEAYDYRKVTTLLVNYINLDLSAFYFDIRKDSLYCDPYSSEKRKSSLYVINLIFKTISKLYAPILSFTMDEVWKNYPFAQDRSIHLSRFELVNNKWSSDNINSKWDNVRKLRKTVTAALEIKRRDKEIGSSLEAGIQIYLNDKDIQASVCDIDLAEICITSSFELINKKPDSKCFVLDEEPEIGVIVHIANGKKCKRSWKVSQDVGLDAEYPELSKRDADAVREFLSLSQN

SEQ ID NO: 190517 - protein, 923 aa, Unknown
  Bacterial polypetide isolated from the Sargasso Sea
MTVNYRDTLNLPDTDFSMKAGLPRKEPEILDLWSKQDLYAKIRKKYENKELFLLHDGPPYANGDIHLGHSLNKILKDITIKYKTLSGFDAPYVPGWDCHGLPIELNVEKKHGKNSELVKNKESFQKACKEYAETQINKQLDDFKRLGVFGDWENSYKSLDPKFEADIVRSLGIIYKEGHLEKGEKPVHWCQDCGSSLAEAEVEYIDKTSKSIDVAFKVDETSIDKVKDLFNIKEADEISFVIWTTTPWTIPSNVAVCINPEFKYSLIKMNNKFYVIAFEMVDHCKERWKQKFDVISTTEGKKLSDIYLIHPFLERKSVLLHGDHVTTETGTGCVHTAPAHGMDDHLICKKNNIDTINSLNNKAFFKDELDFIAGLPAIKADPLIVEKLQEHNALINIEDYHHSYPHCWRHKTPLIFTSTPQWFISMKKNNLIKDALKDIKNVNWEPSWGFQRIESMLSDRPDWCISRQRNWGVPITLVVHKDTGEIHPDQKDLFEKFAQVIEKDGISAWDKLNLEDFIDDHEEYIKTSDSLDVWFDSGVTHFAVSSKRFGNKVISDLYLEGSDQHRGWFQSSLLTSIAMNNSAPYKTVLTHGFVVDEQGRKQSKSLGNVVSPQKVWDSLGADILRLWVASTDFRSEMVASDEILKRTSDQYRRIRNTFRFILGNLSDFNDKNKVEFNDQVELDKWIINETKILQKEITALYESYSYHKATQKIHNFCVNELGGIYLDIVKDRLYTCKNDSLARRSCQTSLDFILNVLVRLIAPILSYTAEEIWQTSDRLNDQEKSVFLSNFDTFEIESESIINQSEWKRIFEIKDAVNQSIEEMRNDNKLKGSLDSVVNIQATSNDFQILSKLGDELHFLFISSEAKVKEGNTFKIKVTTSKNAKCVRCWHRDLSVGSIQEHPELCNRCIDNIENDGEQRKSV

SEQ ID NO: 190518 - protein, 275 aa, Unknown
  Bacterial polypetide isolated from the Sargasso Sea
RDKALKAIDETTFYPSKGKERLKSMIETRPDWCVSRQRVWGVPLPIFVNKKTKEILADDDVTENIASIYEKEGSDCWFSDDPQRFLGKKYKSEDYEKLSDIVEVWFDSGSTHSFVLEKREDLKWPASMYLEGSDQHRGWFHSSLLESCGTRDRAPFESILSHGFVVDGKGLKMSKSLGNVIAPDDILKKYGADILRIWVASSNYAEDLRIDYSILDQHAESYRKIRNTFRYLLGNINDNFEIINFDKLDLNGLPELEQLMLHKIYILNDNFKKYF

SEQ ID NO: 190519 - protein, 503 aa, Unknown
  Bacterial polypetide isolated from the Sargasso Sea
EFRKECRTFAEKWIEIHKSQFKRLGVVGDWENYYSTMSFGAEAQIVRELGKFLKEGSLYRGFKPVLWSTVEKTALADAEVEYQDHKSDTIYTSFKVKSSNLKNLVGTEIIIWTTTPWTIPANKALAYNESLDYIILEINDEGNFKNRKIVIADALLDSVVKECELKNYKKIHVFKGKEFKNSICSHPFLNLGYDHDIPMLEARFVTTEQGTGIVHCAPSHGPDDFNLCLNNGIKAIETVDGDGKYTNNVKLFEGVHIFKANPIVIEKLREQKNLLFNGELVHSYPHSWRSKAPLVHRATPQWFISMESHKLRDKALKAIDETTFYPSKGKERLKSMIETRPDWCVSRQRVWGVPLPIFVNKKTKEILIDDEVTQNIATIYENEGSDCWFSDDPQRFLGNKYKAENYDKLSDIVEVWFDSGSTHSFVLEKREDLKWPASMYLEGSDQHRGWFHSSLLESCGTRGRAPFESILSHGFVVDGKGLKMSKSLGNVIAPEDILKKYGA

SEQ ID NO: 190520 - protein, 328 aa, Unknown
  Bacterial polypetide isolated from the Sargasso Sea
MNSMLEGRPDWCISRQRAWGVPITLLIHKETGELHPETRKIIEKVADLVELEGIQAWHDIETKNLINDYESYEKITDCLDVWFDSGVTHACVLDVNEDLQFPADLYLEGSDQHRGWFQSSLLTSIAMKEVPPYKAVLTHGFVVDSEGKKMSKSLGNVISPQKVLETMGADVLRTWTASTDYTKEIVLSDDILKRSSDSYRRIRNTIRFLLGNLSDYSGEKLAPEKLTELDKWMILKTKNLQEEIVEDYLNYDFHHAFQKIHNFCSNDLGGFYLDILKDRLYTAKSTSDARLSSQIALFYILQALLRWISPILSFTAEEALASLGSDTN

SEQ ID NO: 190521 - protein, 500 aa, Unknown
  Bacterial polypetide isolated from the Sargasso Sea
HLHLWPPPQWFFSMTKSGLLDGATRALEEIKFISEWGKERMDIMLNDRPDWCISRQRDWGIPIPLYYDKNTGEPHPEQDNIFNAVSESIKDKGIDSWNSIDLKLSDSENYEKSKDIFDVWFDSGITHFCVVDELYGSNTQSDLYLEGSDQHRGWFQSSLLTSIAMKGTAPYKSVLTHGFVVDEEGKKMSKSIGNVITPQEVIDQSGADILRFWIASTDFRGEMAFSKDILNRSIDGFRRIRNTMRFMISNLYDYSDNFNEKDLLLLDKVILNKTKELQEEIRANYENYNLHFITSKILNFCVNDLGGMYLDIIKDRLYTMKDGSVGRRSAQFTIKKVLTILIKNISPILPFTAYEFYEQMFPGEGDKIFLEEYENLSSFASNDEMEIFKVLEELRSSVYQEIESKRQKGILKNALDAEISITLTKEKFELLEHLSSEIHKFFISSACKLVLGKEEKIQVSKSKHEKCSRCWHRVEGVEAGGHCYRCEDNMNGEGEIRSFF

SEQ ID NO: 190522 - protein, 532 aa, Unknown
  Bacterial polypetide isolated from the Sargasso Sea
YDFEVPVILGDHVTTDSGTGAVHTAPGHGPEDFTVGKLYNLEVANPVGANGVYLPDTPLFAGQHVFKANDSVVEALKEAGKLLVHKALTHSYPHCWRHKTPIIFRATPQWFISMEQKGLRSTSLQEIGQTRWIPDWGQQRIENMVAARPDWCISRQRTWGVPIALFVDKDTSALHPNTQELMEQVAQLVEQSGIQAWFDLEAETLLGADAAQYVKVTDTLDVWFDSGVTHACVIEPRAEFHGATQADLYLEGSDQHRGWFMSSLMTGVAIKHHAPYKQVLTHGFTVDGEGRKMSKSLGNVVSPQDVMNKLGADILRLWVATTDYTSEMTVSDEILNRAADKYRRIRNTARFLLANLKGFEPETQLVPFEEMVQLDLWLVQRAAKLQQEIVDAYENYQFHQVSQKLMNFCTVELGSFYLDVIKDRQYTAKTDGLARRSCQTALFHVVQAMVRWMAPIMSFTAQEIWEVMPGQHSEFVFTEAWYQGLDTVPAGQFDDAFWQQLLEVRDAVNKVLEVGRRDGKIGASLQAEVTLY

SEQ ID NO: 190523 - protein, 617 aa, Unknown
  Bacterial polypetide isolated from the Sargasso Sea
LCSHPFKNLGYEYDVPLLEANFVTLDQGTGIVHCAPSHGPDDFNLCLKNGMKAIETVNNDGLYTKNIPIFEGTHVFKADEIIIKNLKEQNNLLGSGNLIHSYPHSWRSKAPLVHRATPQWFISMESHKLRKKAIESIDQTNFYPEKGKTRIRSMIETRPDWCISRQRSWGVPLPIFIDKKTNEPLRDPEVIENIAKIYEKEGSDCWFHDDPQRFLGKKYNKDNYIKSNDIVEVWFDSGSTHSFVLEKRKDLKWPASMYLEGSDQHRGWFHSSLLESCGTRGRAPFESILSHGFVVDGKGMKMSKSAGNIISPEDILKKYGADILRLWVASSDYAEDLRIDHTILEQHAESYRKIRNTFRYILGNLRDNYSPQNFNSIKVKDLPELEQVILHKLYFLSLEIKKSLKDYNFHKLQKELLNFCTLDLSSFYFDIRKDTLYCDDVSSQKRKSCVTLLNIILECLLKWYAPVLSFTTEEITDLSNKNKKISIHEEIFSDLPENWKNETLYKKWEKLLSFRQEVNIAIEEKRSKKIIGSSLEADVKISLSKKDHEILDSVDAEELFITSNVTKTIQDDIKDKLVVSVKKAEGTKCSRCWKIVPKPNENKCSRTKICPLQNVGK

SEQ ID NO: 190524 - protein, 706 aa, Unknown
  Bacterial polypetide isolated from the Sargasso Sea
MEYKDTIFLPKTSFEMRANLPSKEPAIIEEWDKENIFKKLRDKSKGREKFVLHDGPPYANGHIHMGTALNKILKDVIVRTQQMAGKDSIYVPGWDCHGLPIEWKIEEEYRKKGKNKDDVPTVQFRNECREFAEKWIEIQKKEFRRLGVEGDWENPYLTMSNQAEAQIVRELGKFLLDESLYKGAKPVLWSVVEKTALADAEVEYEDHTSNTIYVKFLIKNSIDEDLIDSNIVIWTTTPWTIPGNRALAYGKELDYSLIVVEELEEDSLAKINDKLIFSSELLENVTKEIGIKKFSIKKKFKGDNLSSCECEHPFKQLGYDFIVKPFHGDFVNLEQGTGVVHIAPGHGDDDYVLGIENNVDIIQTVQDDGKYNQHAVGFEGEHIYKVDHKIADKLEEFSKLLFKGTLRHSYPHSWRSKAPLIYRNTPQWFISMEKNNLRDIALKSIDETIFYPPQGQTRLRSMIETRPDWCVSRQRVWGVPLPLFVNKKTGQPLRDENIINRIADIYEKEGSNTWFTEDPQRFLGDEYSLEDYEQVKDVVEVWFDSGSTHAFCLEQREDLKWPASMYLEGSDQHRGWFHSSLLESSGTRGKAPYESVLTHGFVVDGRGRKMSKSLGNVISPDDILKKYGVDILRLWVVASDYYDDLKLDNAILQSQAESYRRIRNTFRFLIGNLSDFTEEEAIDESEFPELERYLLHRLWEVDKVVQ

SEQ ID NO: 190525 - protein, 444 aa, Unknown
  Bacterial polypetide isolated from the Sargasso Sea
DGDEKYTKNVLLFEGIHIFKSNPIVIEKLKEQKKLLSNGELTHSYPHSWRSKAPLVHRATPQWFISMDSHKLRNKALKAIDQTIFYPNKGKERLKSMIETRPDWCVSRQRVWGVPLPIFINKKTNEILVDDNVFENIAKIYEKEGSDCWFSDDPQKFLGKKYKAEDFEKLSDIVEVWFDSGSTHSFVLEKRKDLKWPASMYLEGSDQHRGWFHSSLLESCGTRDRAPFESILSHGFVVDGKGLKMSKSLGNVIAPEDILKKYGADILRIWVASSNYAEDLRIDYSILDQHAESYRKIRNTFRYLLGNLNDTFENINLDSIDIQELPELEQFMLHKIYNLNINFNKYFKNYDFHNLYKELLNFCTVDLSAFYFDIRKDILYCDPKNSEKRKSTLLLLNIILNSLLKWFAPILSFTTEEIYQLISKQKKSVHLEKFITFPKEFNNS

SEQ ID NO: 190526 - protein, 781 aa, Unknown
  Bacterial polypetide isolated from the Sargasso Sea
MSNSQINLPKTAFSMKANLPVKEPEILEYWQKINLYDELRNSSKGKEKFVLHDGPPYANGNIHMGTALNKILKDIIVKFHQMDGKDSIYVPGWDCHGLPIEWKIEEQYKKNKKNKNDVPIVEFRKECRLFAEKWIEVHKGQFKRLGVVGDWENYYSTMSFDAEAQIVRELGKFLKEGSLYRGFKPVLWSTVEKTALADAEVEYQDHKSDTIYTSFLIKRSNLKDLLGSEIIIWTTTPWTIPANRALAYNEDLEYVLLELNDESDFKNRKIIVAEALLQSVINECKIKNYKKIKIFKGKELKGTICNHPFLNLGYNYDIPMLEARFVTTEQGTGIVHCAPSHGPDDFNLCLSNGIQAIETVDGDGKYTKHVSLFEGIHIFKANPIVIEKLKEQKNLLSNGELLHSYPHSWRSKAPLVHRATPQWFISMESHKLRDKALKAINDTTFYPSKGKERLRAMIETRPDWCVSRQRVWGVPLPIFVNKKTKEILIDDEVNETIASIYEKEGSDCWFSDDPQRFLGSKYEAEDYDKLSDIVEVWFDSGSTHSFVLEKRKDLKWPASMYLEGSDQHRGWFHSSLLESCGTRGKAPFESILSHGFVVDGKGLKMSKSLGNVIAPEDILKKYGADILRIWVASSNYSEDLRIDYSILDQHADSYRKIRNTFRYLLGNLNDNFNNVDFKKIDINELPELEQFMLHKLYILDSNFKKYFNSYDFHNLYKELLNFCTVDLSAFYFDIRKDTLYCDRVNSNKRQSTLLLLNIILNSLLKWFAPILSFTTEEIYRL

SEQ ID NO: 190527 - protein, 723 aa, Unknown
  Bacterial polypetide isolated from the Sargasso Sea
NVFKWLYISRSKPVHWSPSSRTALAEAELEYPDGHYSKSIYVSLKITNIPEEILLNFIQENLNIKKDYFFNNSFITIWTTTPWTIPANEAVAVNPKINYVFAIDEEKKIYLFAEDLSSEISKKLNKDFKVLLEVIGSKLENIEYQHPSKNKNCRIVIGGDYITTESGTGIVHTAPGHGIDDFNVGQKYDLPITCVVDEKGNLNKYSGQFEGSNVLKDANDLIIEHLKGNNLLLLQENYMHRYPYDWRTKKPTIFRATEQWFASVNGFRSSALKAIEDVEWMPETGKKRIYSMVVGRGDWCISRQRSWGVPIPVFYKKNGNDILLNKEIINHIQELFSEHGADIWWNWDVKNLLPENYAKESDLWKKGTDTMDVWFDSGSSWAAVCELRSELKYPADLYLEGSDQHRGWFQSSLLTSVAVNNKPPYKKVLTHGFALDENGRKMSKSLGNVVDPNIIINGGNNKKTDPAYGADVLRLWVSSVDYSVDVPIGSNILKQLSDVYRKVRNTARYLLGNIHDYDPKIDSFEIDQLPLLDQWMLGRLVEVTDQISNAYENYEFSKFFQILQSFCVVDLSNFYLDIAKDRLYVSSKSQFRRRSCQFVMSKVVENLAVLISPVLCHMAEDIWQNIPYSTEEKSVFQRGWPIFSQSWKNQILNEHIANLRNLRVEINKAIEGCRNKQIIGAALETEVNYLPEDKALKESLTWLKEFGNQDVDLFRDWPYSIKI

SEQ ID NO: 190528 - protein, 940 aa, Unknown
  Bacterial polypetide isolated from the Sargasso Sea
MSDYKFTLNLPETEFPMRGNLANREPEMLERWTKDGLYQQIRDSRIGRTPFILHDGPPYANGSIHIGHSVNKILKDIIVKSKTMSGFDAPYVPGWDCHGLPIELKVEQKVGKPGQKISAAEFREECRKYAAEQVDGQRADFIRLGVLGDWQKPYLTMDFATEANIVRSLSKVIENGHLHKGVKPVHWCTDCGSALAEAEVEYEDKTSPAIDVAFTATDSKALAAQFGVSDYSHPVAMVIWTTTPWTLPANRALSISPELDYSLVEFVKEGATHAVILADVLVEACMARYGAESHSVLGKVKGATLELVRFKHPFLAFDVPAILGDHVTTDAGTGVVHTAPGHGQDDFVVGQKYGLEVANPVGDNGVYKPDTEFFAGQHVFKANDNVVALLKEKGALLHHVAYRHSYPHCWRHKTPIIFRATPQWFISMDNQNLRKQALSEIEQTQWIPDWGQSRIEKMVENRPDWCISRQRTWGVPITLFVHRETEELHPDSVSLMARVANRIEQEGIQAWWDLDAAELLGEEAEQYRKVTDTLDVWYDSGSTFASVVGARPEFHGHGVDLYLEGSDQHRGWFMSSLMISTAITGKAPYKQVLTHGFTVDGKGRKMSKSIGNVIAPQQVTNKLGADILRLWVAATDYSGEMTVSDEILNRSADAYRRIRNTARFLLANLNGFDPAKDLVAVEDMVALDRWAVRRAASLQQEIIEAYEQYNFHIVTQKLMQFCSVELGSFYLDIIKDRQYTAKQEGHARRSCQSALFHIAEAMVRWIAPILSFTADEVWQLLPGQRDAYVFTQEWYQGLQSITLDTDLSDAYWENLLTVRNEVNKVIEQARRDKRIGGSLEAEVTLFADAALTEQLTHIGDELRFVLLTSEAKVLPLADATSDAVDTELASLKLVVGATTAEKCERCWHHREEVGTIEAHPTLCHRCVTNIEGDGEVRLFA

SEQ ID NO: 190529 - protein, 707 aa, Unknown
  Bacterial polypetide isolated from the Sargasso Sea
MSDKKDQKLNLPKTEIPMKANLNEREPKMLEEWSKRDVYQKIRKHNSGKEKFILHDGPPYANGKIHIGHAVNKVLKDIVIRSKSLEGFDAPYVPGWDCHGLPIELQVEKKLGKKRRELSQSEFRAMCREYAKEQIDIQKDDFIRLGVFGDWDNRYASLDYSFEGEAINGFARIYHNGHVEKGSKPVHWCLECSSALAEAEVEYMDKTSSSIDVKFAFTKDSAKELNKRLDNKIKGEVHVVIWTTTPWTIPGNQAVCFKPDISYEVLEVNGDFLLVASELKEQCSERWSDKKVSSTEVKIKGSDLEDLVLKHPLFNRESPLFAADHVTTETGTGFVHTAPAHGVDDYNICSKEGLEVNNPVLANGCYKEDVKYFSGIHVRKVDPEVISKLKEFNALVNHGEYFHSYPHCWRHKTPLTFMATPQWFFSMTKSGLLDGATRALEEIKFIPEWGKERMEIMLNDRPDWCISRQRDWGIPIPLYYDKNTGEPHPEQDNIFNAVSESIKDKGIDSWNSIDLKLSDSENYEKSKDIFDVWFDSGITHFCVVDELYGSNTQSDLYLEGSDQHRGWFQSSLLTSIAMKGTAPYKSVLTHGFVVDEEGKKMSKSIGNVITPQEVIDQSGADILRFWIASTDFRGEMAFSKDILNRSIDGFRRIRNTMRFMISNLYDYSDNFNEKDLLLLDKVILNKTKEIAEEIRANYENYNLHFIT

SEQ ID NO: 190530 - protein, 925 aa, Unknown
  Bacterial polypetide isolated from the Sargasso Sea
MEFKDTIFLPKTTFEMRANLPQKEPKILEEWDKEKIFLKLREKSKGREKFVLHDGPPYANGHIHMGTALNKILKDVIVRTQQMSGKDSIYVPGWDCHGLPIEWKIEEEYRKKGQNKDDVPIVQFRQECREFAEKWIEIQKKEFRRLGVEGDWNNPYLTMSNEAEAQIVRELGKFLLDKSLYKGARPVLWSVVEKTALADAEVEYEDHTSNTIYVKFKVTKSLINELVDTNIVIWTTTPWTIPGNRAVAYGKDLEYSLIEIIKTNEKSLANIGEKLVIADELKNQVLDEIGIDESKIIKKFFGKDLEGTECEHPFKSLGYNFNVRALEGDFVNLEQGTGIVHIAPGHGADDYILGIKNDVDVIQTVEDDGKYNHHAVGFEGEHVYKVDQKIADKLKEFKKLLHQGTLRHSYPHSWRSKAPLIFRNTPQWFISMDKKDLREKALKSIDETIFYPPQGQTRLRSMIETRPDWCVSRQRVWGVPLPLFVNKNTEQPLRDIKVINRIADIYEKEGSDTWFTEDPKRFLGDDYSINDYDQIQDVVEVWFDSGSTHAFCLEKREDLKWPASMYLEGSDQHRGWFHSSLLESAGTRGRAPYESVLTHGFVVDGKGRKMSKSLGNVISPDKVMSQYGVDILRLWVVASDYYDDLKLDNAILKAQSDSYRRIRNTFRYLIGNLEGFDEKEKINIEKFPELEKYILHRLWEVDQIIQKCVKDFNFHLMFTTLLNFCSNDLSAFYFDIRKDSIYCDSFDSKKRRSARTLLNLIFDHLVRWLAPSLSFTCEEAWKAKGNTSSIHLEDFLKASQDFKNNDIANKWNIIKNIRKVITGAIEKKRAEKLIGSSLEANVIIYVKEDLKKKIEEINFDEIAITSSFQLLDYKNKKDYFALEEINDVAVTVEKTDGQKCERCWKYTDILQDKQICQRCDEAIKK

SEQ ID NO: 190531 - protein, 570 aa, Unknown
  Bacterial polypetide isolated from the Sargasso Sea
MIVASELVENLSAQLELKLEPLQQVKGEELEGLTYRHPLVERSSPVVIGGDYITTEAGTGLVHTAPGHGVDDFNTGRKYNLPVLCPVDEGGWLTDEAGPFAGLNVLKDANTAIISALQDVEALLAEQRYEHRYPYDWRTKKPTIFRATEQWFASVEGFRDDALRAIESVEWLPASGRNRIEGMVRERGDWCISRQRTWGVPIPVFYHRSSGEVLLNADTLQHIQGLIAEHGADIWWESDEADLLPSAYRDQADQWRKGSDTMDVWFDSGSSWAGVLGGLEAEASSSLNYPADLYLEGSDQHRGWFQSSLLTSVAVNGQAPYKRVLTHGFTLDEKGRKMSKSLGNVVDPAVIVEGGKNQKQEPPYGADVLRLWVSSVDYSADVPLGPGIVKQLADVYRKVRNTARYLLGNLHDFDPSRDAIPLAELPLLDRWMLQRTAKVLKDVSGDFERYEFYRFFQTLQNFCVVDLSNVYLDIAKDRLYVSAADSFRRRSCQTVMALVVERLAGMIAPVLSHMAEDIWQHLPYPVEEASVFLRGWPQAESSWSALTDSESAAIDAAVQLAGVGEQAIGK

SEQ ID NO: 190532 - protein, 603 aa, Unknown
  Bacterial polypetide isolated from the Sargasso Sea
MEFKDTIFLPKTTFEMRANLPQKEPKILEGWDKEKIFLKLREKSKGREKFVLHDGPPYANGHIHMGTALNKILKDVIVRTQQMSGKDSIYVPGWDCHGLPIEWKIEEEYRKKGQNKDDVPIVQFRQECREFAEKWIEIQKKEFRRLGVEGDWNNPYLTMSNEAEAQIVRELGKFLLDKSLYKGARPVLWSVVEKTALADAEVEYEDHTSNTIYVKFKVTKSLINELVDTNIVIWTTTPWTIPGNRAVAYGKDLEYSLIEIIKTNEKSIANIGEKLVIADELKSQVLDEIGIDESKVIKKFFGKDLEGTECEHPFKSLGYNFIVRALEGDFVNLEQGTGIVHIAPGHGADDYTLGIKNDVDVIQTVEDDGKYNHHAVGFEGEHVYKVDQKIADKLKEFKKLLHQGTLKHSYPHSWRSKAPLIFRNTPQWFISMDKKDLREKALKSIDETIFYPPQGQTRLRSMIETRPDWCVSRQRVWGVPLPLFVNKKTEQPLRDIKVINRIADIYEKEGSDTWFTEDPKRFLGDDYSINDYDQIQDVVEVWFDSGSTHAFCLEKREDLKWPASMYLEGSDQHRGWFHSSLLESAGTRGRAPYESVLTKGFCS

SEQ ID NO: 190533 - protein, 655 aa, Unknown
  Bacterial polypetide isolated from the Sargasso Sea
MEHSILEFWENENIFQKSLQQSKEFDPYVFYDGPPFATGLPHHGHLTASTIKDIIPRYWTMQGKHVSRRFGWDCHGVPIEWEIDKKLKMSAQEAVAKLGVKGYNDECRSIVQRYVAEWRSTITRLGRWVDFEDDYKTMDPWYMESVWWVFKQLWDKGLVYKGFKVMPISTALGTPLANFEVSQNYRDVQDPAVTVLFKIKDQERYLAAWTTTPWTLPSNLAVCVGDEIDYVLVRDESTAKNIYFAEELLTHYGDFEILERVKGSDLVGLQYEPLFDYFTDQQTEGGFVVVSDDYVTTDGGTGLVHQAPAFGEDDYRVLNENDIDAFVCPVGLDGRFDESVTDFSGMHVKEADKSIIEFLKQRGSLYRQEVIQHSYPFCPRSDTPLIYIAIPAWYVRTSSIVDKMVSANDQIHWVPEHIKEGRFGNWLKGEVDWGVSRNRVWGTPIPIWINDETGKAICIGSKEELKEYSGVEVSDFHREHVDPLTFDIEGEPGTYRRIEEVLDCWFESGSMPYAQLHYPFENHDVFKSGFPAEFIAEGLDQTRGWFYTLTVLAAAIFDKPAFNNVIVNGLVLAEDGKKMSKSLQNYTPPDNLMEQYGADALRLYLINSGLVKAEEQRFVDSGVHEMTRRALLPWFNAFSFLKTYAEIDEWSPKGR

SEQ ID NO: 190534 - protein, 547 aa, Unknown
  Bacterial polypetide isolated from the Sargasso Sea
MTKSQINLPKTAFSMKANLPTREPEILEYWKKINLYDELRNKSKGKEKFVLHDGPPYANGNIHMGTALNKILKDIIVKFHQMDGKDSIYVPGWDCHGLPIEWKIEEQYKKNKKNKNDVPIVEFRKECRTFAEKWIEIHKSQFKRLGVVGDWENYYSTMSFGAEAQIVRELGKFLKEGSLYRGFKPVLWSTVEKTALADAEVEYQDHKSDTIYTSFKVKSSDLKDLVGSEIVIWTTTPWTIPANKALAFNESLDYVILDIKDEGDFKNRKIVIANALLESVVKECELKNYKKIHIFKGKEFKNTICSHPFLNLGYDHDIPMLEARFVTTEQGTGVVHCAPSHGPDDFNLCLNNNIKAIETVDGDGKYTNNVKLFEGIHIFKANPIVIEKLKEQKNLLFNGALVHSYPHSWRSKAPLVHRATPQWFISMESHKLRDKALKAIDETTFYPNKGKERLKSMIETRPDWCVSRQRVWGVPLPIFVNKKTKEILVDDEVTENIASIYEKEGSDCWFSDDPQRFLGQKYKAGDYEKLSDIVEVWFDSGSTHSFV

SEQ ID NO: 190535 - protein, 795 aa, Unknown
  Bacterial polypetide isolated from the Sargasso Sea
KKLRKKSKGKEKFVLHDGPPYANGHIHMGTALNKILKDMITRFHQMNGKDSIYVPGWDCHGLPIEWKIEEQYKKKKKNKDEVPIKDFRQECREFAESWIDVHIKEFKRLGVVGDFDNYYSTMSYGAEAQIVRELGKFLLDGSLYQGFKPVLWSTVERTALADAEVEYMDHTSNTIYVGFKVKETDKDFLKDTSIIIWTTTPWTIPANKALAFNSNIDYSILEIENLPNFKEKKIVVATNLVKEIINACEIKSYKELRKFKGSEFQNTICSHPFLKMKFDYDVPMLDAQFVNLEQGTGIVHCAPSHGPDDFNLCLKNNIPSLYTVDNSGLYTKEIPFFENTHVFKADNIVIEKLKEQKKLLKNDKLNHTYPHSWRSKAPLIYRATPQWFISMQKNDLRKKAIKSINETNFFPKKGKDRLLSMIEGRPDWCVSRQRVWGVPLPIFINKKTKEPLRDQEVIDRIAGIYEKQGSDCWFTDDPKVFLGDSYDPNDYEKLNDIVEVWFDSGSTHSFVLEKRKDLKWPADMYLEGSDQHRGWFHSSLLESCGTRGRAPFESILSHGFVVDGKGMKMSKSMGNVISPEDILKNYGADILRVWASASDYSEDLRIDKNILIQHAESYRKIRNTFRFMLGNLKDNFEKQDFEKINLNELDELEQYILHKLYLIGNSVTQNLKSYNFHKLYKELLNFCALDLSSFYFDIRKDVLYCDSLNSKKRKNCVTVLNIILESLLKWFAPILVFTTEEIYSLVDKKSESIHESNFVKIPKKWENDKLNEKWSNLFKIKQVANVAIEEKRTNK

SEQ ID NO: 190536 - protein, 587 aa, Unknown
  Bacterial polypetide isolated from the Sargasso Sea
KEPELVDYWDKIKLYEKLRDISKGKEKFILHDGPPYANGNIHMGTALNKILKDIITKFHQMDEKDSVYVPGWDCHGLPIEWKIEEQYKKNKKNKNDVPINEFRKECRDFAAKWIDVHKKQFKRLGVIGDWENYYSTMSFDAEAQIVRELGKFLKEGSLYRGYKPVLWSTVEKTALADAEVEYLDHKSETIFTGFKVKKSNVKELTDSEIIIWTTTPWTIPANRALAYNENYKYSIIKIEDETDYKNKQVVICEDLLKSVLENCNIKKFKIIKSIRGKDFKETVCSHPFLEKGFNYDIPMLEANFVTKEEGTGIVHCAPSHGPDDFNLCLKNNIKAEETVDDDGKYTKHVPFFEGIHIFKANKIVIEKLKEHKKLLSNGELIHSYPHSWRSKAPLVHRATPQWFISMESHGLRKKALKAIQETNFYPNKGKERLKSMIELRPDWCVSRQRVWGVPIPVFISKKTKKVLLDDEVIENIANIFEKEGADCWFEGDTQRFLGKKYKSEDYDKMNDIVEVWFDSGSTHAYVLEKRKDLKWPATMYLEGSDQHRGWFHSSLLESCGTRGRAPFENILSHGFVVDGKGHKMSKS

SEQ ID NO: 190537 - protein, 356 aa, Unknown
  Bacterial polypetide isolated from the Sargasso Sea
MSDYKETLNLPDTGFAMKANLPSKEPKMIEFWEEMDLRKEVAAAREGREKFILHDGPPYANGQIHIGHAAQKVLKDIVIKSQTLNGKYAPYVPGWDCHGLPIELNVEKKKGKAGHKISVSEFREACREYAQSQIDIQKKDFKRLGIIGDWDNPYVTMDFAFEANIIRSLGRIIEKGHLQRGDKPVHWCVDCGSALAEAEVEYQDKISTSIDFLFPIDNKNISEIFSCSSTNHSYVASWTTTPWTLPGNLALTINESFTYELIEILHDNKPINIILAQDLVDSTLERIGVDKFTSLGTCKGTDLLGFNAKHPYLDRNSLIISGDHVTTDAGTGIVHTAPGHGLEDYAVCKENGIDVL

SEQ ID NO: 190538 - protein, 655 aa, Unknown
  Bacterial polypetide isolated from the Sargasso Sea
LADAEVEYKSHTSNTIYVAFKVKVASKDFLKDASIIIWTTTPWTIPANKALAFNKNLDYSLIEINELDHFKDKKIIIATNLIESVIKSCEIKDHKILKTFKGSELNGTICSHPFLDMKFEYDVPMLEADFVDLEQGTGIVHCAPSHGPDDFNLCLKNNIKSSYTVDNAGLYTKEIPYFSKTHIFKADLLVIEKLKEQKKLLKDDKLNHSYPHSWRSKAPLIYRATPQWFISMEKNSLRNKAIKAINDTKFFPEKGKERLLSMIEGRPDWCVSRQRVWGVPLPIFINKKTKEPLKDKKIIDRIADIYEKEGSDCWFTEDPKKFLGNDYDPNDFDKLQDIVEVWFDSGSTHSFVLEKRKDLKWPADMYLEGSDQHRGWFHSSLLESCGTRGRAPFDSILSHGFVVDGKGLKMSKSSGNVISPDDILKNYGADILRSWVASSDYTEDLRIDKSILAQHAESYRKIRNTFRFILGNIKDKFERQSIKSLDIKNFDELEQYILHKLFVINNSVQESLKDYNFHRLYKELLNFCALDLSSFYFDIRKDILYCDSIGSKKRKQCVIVLNIILDCLLKWFAPVLVFTTDEIYSLVSSDKKNIHEYKFPEISKEFYNLTLNEKWEQLFKIKEKANIAIEEKRATKEIGSSLEADIEITASKKNL

SEQ ID NO: 190539 - protein, 766 aa, Unknown
  Bacterial polypetide isolated from the Sargasso Sea
SLDPKFEADIVRSLGIIYKEGHLEKGEKPVHWCQESGSSLAEAEVEYIDKTSKAIDVAFKAHHSSLKKLKDVFNAEDLDEVSFVIWTTTPWTIPSNVAVCINPKYKYSLIKMNNKFYVIAYEMIEQCSNRWKQKFDVISTTQGKKLSDIDLVHPFLDRKSILLHADHVTTETGTGCVHTAPAHGMDDYLICKKNNIDTIHSLNNKAFFKDELDFIAGLPAMKADPLIVEKLKEYNALINIEDYHHSYPHCWRRKTPLIFTSTPQWFISMNKNNLNKDALKHIKSVNWEPSWGLQRIESMLTDRPDWCISRQRNWGVPITLVVHKDTGEIHPDQKDLFEKFAQIIEKDGISAWDNLDLKDYIDDYEEYIKTSDSLDVWFDSGVTHYAVSAKKFGNNVVADLYLEGSDQHRGWFQSSLLTSIAMNNHAPYKTVLTHGFVVDEQRRKQSKSLGNVVSPQKVWDSLGADILRLWVASTDFRSEMVASDEILRRTSDQYRRIRNTFRFILGNLSDFSDKYKISLEEQVELDKWIINETKILQTEVLKLYKSYSYHRAIQKIHNFCVNELGGIYLDIVKDRLYTCKNDSSARRSCQTSLDFILNVLVRLIAPILSYTSEEIWQTSNRLNGQEESVFLSNFDISDIDFKSNINQSEWKRVFEIKDAVNQSIEEMRNENKIKGSLDSVVDIQADSSDINILRKLGKELHFLFISSEANISEGKSFKIKVCPSKNTKCVRCWHRCSSVGSSKEHPELCNRCIDNIENDGEQRKSI

SEQ ID NO: 190540 - protein, 850 aa, Unknown
  Bacterial polypetide isolated from the Sargasso Sea
MSKSQINLPKTAFSMKANLPTREPEILKLWQNINLYDELRKSRKGEEKFVLHDGPPYANGNIHMGTALNKILKDIIVRFHQMDGKDSVYVPGWDCHGLPIEWKIEEQYKKNKKNKNEVPIVEFRKECRAFAEKWIDIHKDQFKRLGVVGDWDNYYSTMSFDAEAQIVRELGKFLKEGSLYRGFKPVLWSTVEKTALADAEVEYQDHRSDTIYASFPVKSSNIKELNDSEIVIWTTTPWTIPANKALAYNESLDYLLIEINDDGDFKNKKIVIADALIDTVVKDTKIQSFKKLKNFKGKDLKGTICNHPFLKLGYEYDIPMLEARFVTTEQGTGIVHCAPSHGPDDFNLCMNNGIKAIETVDGDGRYTKNVALFEGMHIFKSNSIVIEKLKDQKKLLLSGELVHSYPHSWRSKAPLVHRATPQWFISMDSHKLRNKALKAIDETTFYPSKGKERLKSMIETRPDWCVSRQRVWGVPLPIFINKKTGEILVDDEVFDNIAKIYEKEGSDCWFSDNPQKFLGKKYKAEDFEKLSDIVEVWFDSGSTHSFVLEKRKDLKWPASMYLEGSDQHRGWFHSSLLESCGTRDRAPFESILSHGFVVDGKGLKMSKSLGNVIAPEDILKKYGADILRIWVASSNYAEDLRIDYSILDQHAESYRKIRNTFRYLLGNLNDNFEQIDLEKIKIENLPELEQFMLHKIYNLNSKFNKYFKDYDFHNLYKELLNFCTVDLSAFYFDIRKDTLYCDPLNSEKRKSTLILLNVILNSLLRWFAPILSFTTEEIYQLISKNKKSIHLEKFLNFPKKFDNSNLNSKWEQLIKIRDICNLSIEQKRASKDIGSSLEAALIVKLNNENQ

SEQ ID NO: 190541 - protein, 403 aa, Unknown
  Bacterial polypetide isolated from the Sargasso Sea
KQHIFKSESNIIEKLSDSGLLISSEKFEHSYPHCWRHKTPVIYRTTKQWFISMENQDFRTACLSSIKDVNWKPTWGEERIHGMIETRPDWCISRQRYWGVPIPLFTHKDDQGIHPNTPDLLNQIADKVEDQGIDAWFDTGIEEFLGDDANSYEKSTDTMDVWMDSGIAHKTVSRLFDHIKDEADLYLEGSDQHRGWFQSSLLTSVAINNHAPYKEVLTHGFVVDEKGHKMSKSLGNTVSPQSVINNMGADILRLWVASTDYSSEMKISDQILKRNGDTYRRIRNTARFLLSNLSDFDPSKNQKKVHDLVLLDQLAIQRVSVLNEQIKNEYNNYSFHKIVQLLHNFCVNDMGGFYLDILKDRLYTMPADSSGRRSAQTALYIIAESLTRWIAPILSFTSEEIWK

SEQ ID NO: 190542 - protein, 840 aa, Unknown
  Bacterial polypetide isolated from the Sargasso Sea
MSNSQINLPKTAFSMKANLPVREPEILEYWQKINLYRELRNSSKGKEKFVLHDGPPYANGNIHMGTALNKILKDIIVKFHQMDGKDSIYVPGWDCHGLPIEWKIEEQYKKNKKNKNDVPIVEFRKECRLFAEKWIEVHKGQFKRLGVVGDWENYYSTMSFDAEAQIVRELGKFLKEGSLYRGFKPVLWSTVEKTALADAEVEYQDHKSDTIYTSFPIKKSNLKDLVGSDIIIWTTTPWTIPANRALAYNEALDYVQLELNDDSDFKKRKIIVAEALLQSVINDCKIKNYKKIKTFKGKDLKETICNHPFLDLGYDYDIPMLEARFVTTEQGTGIVHCAPSHGPDDFNLCLNNGIKAIETVDGDGKYTKHVSLFEGIHIFKANPIVIEKLKEQKKLLSNGELIHSYPHSWRSKAPLVHRATPQWFISMESHKLRDKALKAINDTTFYPSKGKERLKSMIESRPDWCVSRQRVWGVPLPIFVNKKTKEILVDDEVNETIAAIYEKEGSDCWFSDDPQRFLGSKYKAEDYEKLSDIVEVWFDSGSTHSFVLEKREDLKWPASMYLEGSDQHRGWFHSSLLESCGTRGRAPFENILSHGFVVDGKGLKMSKSLGNVIAPEDILKKYGADILRIWVASSNYSEDLRIDYSILDQHAESYRKIRNTFRYLLGNIKDNFEEIDFIKVDLNELPELEQFMLHKLYSLDVNFKKYFKNYDFHNLYKELLNFCTVDLSAFYFDIRKDSLYCDPINSKKRKSTILLLNIILNSLLKWFAPILSFTTEEIYRLLFKDSKSVHLEKFLNFPNNFENKKLYQKWLELIKIRNICNISIEEKRANKEIGSSLEAD

SEQ ID NO: 190543 - protein, 913 aa, Unknown
  Bacterial polypetide isolated from the Sargasso Sea
MSKEHINLPKTAFSMKANLPNKEPGIIEYWKQINLYEKLRKQSKGKEKFILHDGPPYANGNIHMGTALNKILKDIITKFHQMDGKDSVYVPGWDCHGLPIEWKIEEQYKKNKKNKNDVPIVEFRKECRDFANKWINVHKDQFTRLGVIGDWKNYYSTMSFDAEAQIVRELGKFLKEGSLYRGYKPVLWSTVEKTALADAEVEYMDHVSDTIYSAFPIKKTNLKEIEGSNVIIWTTTPWTIPANKALAYNSSLIYLVIKINDEGDFKNKKIIIAKDLSESLIKECEIKNFDIEKEFSGKEFEGTICSHPFLDIGYNYDIPMLEARFVTTEQGSGIVHCAPSHGPDDFNLCLKNNIKALETVDDDGRYTKNIIKFEGTHIFKANPIVIENLKNQKKLLASGKLTHSYPHSWRSKAPLVHRATAQWFISMESHGLRTKSLKAIDETTFYPSKAKERIKSMIETRPDWCVSRQRVWGVPLPIFLSKKNGKALIDDEVFENIAEIFEKEGSDCWFSDDDQKFLGKKYNSEDYEKMSDIVEVWFDSGSTHSYVLEKREDLKWPASMYLEGSDQHRGWFHSSLLESCGTRGKAPFESILSHGFVVDGKGLKMSKSTGNVILPEDILKKYGADILRIWVASSNYAEDLRIDYSILDQHAESYRKIRNTFRYLLGNINDNYVEKNFEDINIKDLPDLEKYMLHRIYLINKNFCNYFNSYNFHNLYKELLNFCTVELSAFYFDIRKDLLYCDPINSKKRSDCILVLNIILNCLLKWFAPILSFTTEEIYKLINKGEENSIHLKNFIKIPENWKNEELNSNWEKIKKIRDEANISIETQRSEKIIGSSLEANIEIKIKDQEMFDIAQKHDFSEICITSSASILSDNNLKKDIEVISSKAKGNKCPVCWKIRENACERSGHCHLV

SEQ ID NO: 190544 - protein, 375 aa, Unknown
  Bacterial polypetide isolated from the Sargasso Sea
VDGDGKYTKNVSLFEGIHIFKANPIVIEKLKEQKKLLKNGELIHSYPHSWRSKAPLVHRATPQWFISMDSHKLRKKALKAIDETTFYPSKGKERLKSMIETRPDWCVSRQRVWGVPLPIFVNKKTKEILVDEDVFEAIAKIYEKEGSDCWFSDDPQKFLGKKYKSEDFEKLSDIVEVWFDSGSTHSFVLEKRKDLKWPASMYLEGSDQHRGWFHSSLLQSCGTRGKAPFESILSHGFVVDGKGLKMSKSLGNVIAPEDILKKYGADILRIWVASSNYAEDLRIDYSILDQHSESYRKIRNTFRYLLGNLNDNFEEKKMEDIDIDQLPELEQFMLHKIYSLNIKFNKYFRDYDFHNLYKELLNFCTVDLSAFYFDI

SEQ ID NO: 190545 - protein, 585 aa, Unknown
  Bacterial polypetide isolated from the Sargasso Sea
AHGMDDYLICKKNIIDTIHSLNNKALFKDELDFIAGLPALKADPLIIEKLQERDVLVNIEDYHHSYPHCWRRKTPLIFTSTPQWFISMKKNNLINEALNQINNVNWEPSWGLQRIQSMLTDRPDWCVSRQRNWGVPITLVVHKDTGEIHPNQKDLFEKFALAIEKQGISAWDKLDLKDYIQDYDEYVKTSDSLDVWFDSGITHYAVSSKRFGENTVADLYLEGSDQHRGWFQSSLLTSIAMNNSAPYKTVLTHGFVVDEQGRKQSKSLGNVVSPQKVWDSLGADILRLWVASTDFRSEMVASDEILKRTSDQYRRIRNTFRFILGNLSDFNNKNKVQLENQVELDKWIINETKILQKEVISLYESYSYHKAIQKIHNFCVNELGGIYLDVVKDRLYTCKNDSSARRSCQTSLDFILNVLVRLIAPILSYTAEEIWQSSNRLNSQEDSVFLSNFDISELSFESDINQSEWKRIFEVKDAVNQSIEEMRNENKIKGSLDSVVDIQATSNDLNILKKLGSELHFLFISSEANVNEGKNFKIKVNPSKNAKCVRCWHRCFSVGSSKEHPELCTRCIENIDDEGEKRSFV

SEQ ID NO: 190546 - protein, 552 aa, Unknown
  Bacterial polypetide isolated from the Sargasso Sea
MKSQNSKEQKSDFSYKGTLNLLKTDFSMRANSVVREPEIQNFWANNDIDFQLGASNSGEIFTLHDGPPYANGALHMGHALNKVLKDIINKYKTLRGFRVHFVPGWDCHGLPIELKVLQNLKSDERKNLDTLNLRKKATDYAHIQINNQKEGFKRWGIWGDWNNPYLTLKKSYESAQIGVFGKMFLNGYIYRGLKPVHWSPSSRTALAEAELEYPDEHYSKSIYVALKITKISEEILLNFIQENPHIKKEFFQSKTFITIWTTTPWTIPANEAVAVNPKINYVFAIDEDKQIYLFAKDLSAEISKKFNKDLKVLLEVKGSKLENIEYQHPSENKNCRIVIGGDYITTESGTGIVHTAPGHGIDDFNVGQKYNLPITCVVDEKGNLNEYSGQFKGSNVLKDANDLIIEHLKGNDLLLLQENYKHRYPYDWRTKKPTIFRATEQWFASVDGFRSSALKAIEDVEWMPATGKKRIHSMVVGRGDWCISRQRSWGVPIPVFYNKNGNEILLNNEIINHIQELFSEHGADIWWDWDVKNLLAESYAKESDLWKKGTDT

SEQ ID NO: 190547 - protein, 817 aa, Unknown
  Bacterial polypetide isolated from the Sargasso Sea
EKKFGRDSDTVKDKSKFISACREYALSQIENQKKDFIRLGVLGDWENSYKSLDSSFEADTVRSLGRIVTNGHLQKGEKPVHFCYDCKSALAEAEVEYEDKVSKSIDVGFKVKKDSLVKLSAAFSKEIDSCSFVIWTTTPWTIPANAAVSIGPELKYTLCNSKFGYIVLATDLIDQCSERWKTDLEKISEVNGNDIKDVVLEHPYLERDSILIHGDHVTTETGTGCVHTAPAHGADDHNICKKYNIDTIHALDGNGFFNQEYKDLAGLPAIKADQIVIDILRESGTLINEEDFHHSYPYCWRHKTPLIFASTPQWFISMDKSGLLEGSIQAIKDVNWEPSWGYERIKSMLEGRPDWCISRQRSWGVPIPLLINKNTGEIHPKQNLLFNEIADLIEENGIESWDKVNLKELVEDHDDYVKATDTLDVWFDSGSTHFCVLDKLYGKDLIADLYLEGSDQHRGWFQSSLLTGIAINGKAPYKAVLTHGFVVDENGRKQSKSLGNVVSPQKVCNNLGADILRLWVASTDFRSEMVATDEILKQVSDQYRRIRNTFRFIMGNLNDFDDATNNINKNDLVEIDKWIISEAIKLHEEIQELNDNYAYHHVIQKIHNFCVHELGGVYLDIIKDRMYVTKSNSNARRSAQFALFEVADILIRLISPILVFTAEEIWQSHELFKKQSVSIFTAPQKTLSEIESSISDDDWKKIFAVKDAVNQSIEKARADSVIKGSLDSKIIISCDKKAYNALEKIEDELKFVFISSEVEIAESSSSKLDIEVTNFDQKKCIRCWNKCSSVGLYVEDPEICSRCYTNVYGDGEIRKFV

SEQ ID NO: 190548 - protein, 638 aa, Unknown
  Bacterial polypetide isolated from the Sargasso Sea
EEIGIKKFSTKKKFKGDNLSSCECEHPFKQLGYDFIVKPFHGDFVNLEQGTGVVHIAPGHGDDDYVLGLKNNVDIIQTVQDDGKYNQHAVGFEGEHIYKVDHKIADKLEEFSKLLFKGTLRHSYPHSWRSKAPLIYRNTPQWFISMEKNNLRDIALKSIDETIFYPPQGQTRLRSMIETRPDWCVSRQRVWGVPLPLFVSKKTGQPLRDENIINRIADIYEKEGSNTWFTEDPQRFLGDEYSIDDYEQVKDVVEVWFDSGSTHAFCLEQREDLKWPASMYLEGSDQHRGWFHSSLLESSGTRGKAPYESVLTHGFVVDGRGRKMSKSLGNVISPDDILKKYGVDILRLWVVASDYYDDLKLDNAILQSQAESYRRIRNTFRFLIGNLNNYKNEESIDEKEFPELEQYLLHRLWEVDQTIQKCVKTFNFHLMFTTLLNFCSNDLSAFYFDIRKDTIYCDSINSIKRRSTRTLLNIIFNHLVRWFAPSISFTSEEAWKAMGNTESIHLQDFLNCKKEYQNDQLNEKWNLIKNIRKVSTGAIEKIREEKIIRSSLEAHLDIFVSKENFDKVNEVMFDEIAITSSYKLHVLDENSQGFSIDEIENVKVQASKVSGQKCQRCWKYEKELVKNEICNRCNDAIS

SEQ ID NO: 190549 - protein, 296 aa, Unknown
  Bacterial polypetide isolated from the Sargasso Sea
WAALRPSFITHHNALDMPMYLRIAPELYLKRLVVGGFERVFEINRNFRNEGLSPRHNPEFTMMEFYMAYADYKDLMDLTEELLSSIAIELLGSAQMPYGEHTVDFGGPYARLSMLEAIQKYNPDNATIQAMTYEQVKDLEFMRELAISLGIKIEKFWTCGQLLEEIFGETAEWQLMQPTFITGYPADISPLARRNDDNHFITDRFEFFIGGREVANGFSELNDAEDQDSRFKAQVDAKDAGDDEAMFYDADYITALEHGLPPTAGQGIGIDRLVMLFTNTHTIRDVILFPAMRPQA

SEQ ID NO: 190550 - protein, 291 aa, Unknown
  Bacterial polypetide isolated from the Sargasso Sea
MENKSLKQIIDNRLEKLKKIRELGIEPYAYDYDSSHHTSEINEKLIDSKVSLAGRVMSLRKMGKASFANIQDQEGRIQFYIARDDVGEDNYNLFKLTDIGDFVGIEGKVFKTKTDALTIKVSHLTILSKNIKPIPDVKEKDGEKYNLVSDKEFRYRKRFLDLIINPETKNNYVKRFKIINSIRSFLNDHGYIEVETPVLQPIYGGANAKPFTTHHNALDQDFYLRIATELYLKQLIVGGFEKVYELSKDFRNEGIDRSHNPEFTMLEFYQAYSDYNFMMDFVEQMFKKVVK

SEQ ID NO: 190551 - protein, 321 aa, Unknown
  Bacterial polypetide isolated from the Sargasso Sea
MSGEKKYDLFKLLDIGDFIGIDGIVFKTKVGEVSVRANDFTILSKSIRPLPVVKEKDGQVYDAFNNKEQRYRKRYLDLIINPKVKEIFIKRSLIIKTIRDFLDSRNFLEVETPVLQPLYGGANARPFVTHHNALDQKLFLRIADELYLKRLIIGGFERVYEISKDFRNEGMDRNHNPEFTMLEFYWAYADYEDNMLIVEEMIKEVAKKISVKKIKWGKSLIDITKPFKKRPIMQLLSDAVGEDVSQKDESSLKKICDRRNIDTNNKNYGQLIDEMMSELVEPNLIEPTFVIDYPKAISPLAKKHRNNDPDLVERFELFIGG

SEQ ID NO: 190552 - protein, 246 aa, Unknown
  Bacterial polypetide isolated from the Sargasso Sea
MYLRIATELHLKRLVVGGFQRVYELGRIFRNEGISTRHNPEFTSVEIYEAFADYFDMMDLTEKLLSSVCEKICGSTKINYQEQEIDLQPPWRRATMHDLVKEFTGIDFELFGDNADDAKAEMSREGLQVPDKAYTVGSLLNEAFEQAVEPELIQPTFVMDYPIEISPLARKHRTKKGLVERFELFIVGRETANAFSELIDPIDQRERLLLQQAKKEAGDLEAQSLDEDFINALEVGMPPTGGLGIG

SEQ ID NO: 190553 - protein, 146 aa, Unknown
  Bacterial polypetide isolated from the Sargasso Sea
LGKETDKSWGTGRLLLEIFEETVEEKLINPTFVTEYPVEVSPLSRRNPDNPDFADRFELFIGGKEFANGFCELNDPDDQASRFEAQAAAKDSGDKEAMDFDKDYITALEHGMPPAVGVGLGIDRLVMLLTNQSSIRDVLLFPQLKN

SEQ ID NO: 190554 - protein, 42 aa, Unknown
  Bacterial polypetide isolated from the Sargasso Sea
EIGNGFSELNDAEDQAQRFQDQVNAKDAGDDEAMFYDEDYVT

SEQ ID NO: 190555 - protein, 327 aa, Unknown
  Bacterial polypetide isolated from the Sargasso Sea
YRQRYVDLIVNEDTRKTFQIRAKIVAGIRNFLVQKDFVEAETPMLQVIPGGATARPFITHHNSLDMDMYLRIAPELYLKRLVVGGFEKVFEINRNFRNEGLSTRHNPEFTMLEFYQAFGDYHDLMNLTEEMLRTLAETVLGSTDVAYQGDVFDFGKPFTRMTVFDSILHFNPDIDAAKLADIEGAREIATGLGIPLKDGYGLGKVQIEIFEKTVEHRLKDPTFITEYPTEVSPLARRMDDNPFVTERFEFFVGGREIANGFSELNDAEDQAERFRQQVEEKAAGDDEAMFYDEDYVVALEHGLPPTAGEGIGIDRLVMLFTECTVHS

SEQ ID NO: 190556 - protein, 290 aa, Unknown
  Bacterial polypetide isolated from the Sargasso Sea
IPGGAAARPFITHHNALDVPLYLRIANELYLKRLIVGGFEGVYEFAKDFRNEGMDRTHNPEFTQMEIYVAYKDYIWMMEFTEQMLETICLEVLGTTELQIGDNMVSFKKPFKRISMIDSIKEHTGIDIANMNQEQLIETCKKLEVPFDSSMGKGKLIDEIFGEKCEGNYIQPTFITDYPVEMSPLCKKHRDNPHLTERFELMVNGKELANAYSELNDPIDQKERFEHQLKLAEKGDDEAMFIDLDFVRALEYGMPPTSGMGIGIDRLVMFLCNQPSIQEVLFFPQMKPEV

SEQ ID NO: 190557 - protein, 328 aa, Unknown
  Bacterial polypetide isolated from the Sargasso Sea
EFSIAGRMMAKRVMGKSSFSRIKDGKGSIQVFLSNSDLGDEAYESFKTMDVGDIVWVRGSLFRTKTDELTLNVKELVLLSKSLRPLPEKYHGLTDTEIRYRRRYLDLMMSEESAEVFKIRSKVVTQIRSFLNDLDMMEVETPMMHPIPGGAVARPFITHHNTLDQDFYLRIAPELYLKRLTVGGFDRVYEINRSFRNEGVSTQHNPEFTMLELYVAHETPDFLMNMIEDMMRAISQELFGSDKIEYQGETIDFAGHFQRLTMEESVLKYNPELDKEKIRDAEYLRSFAEGIDISVENNAGAGKILFEIFEKTVEHQLQQPTYITSYPR

SEQ ID NO: 190558 - protein, 288 aa, Unknown
  Bacterial polypetide isolated from the Sargasso Sea
VLVTIKTLYNEVFKKLIDLGDFVGIEGTLFTTQVGEKSVRVSNLTLLSKTLRPLPLPKTDAEGNTFDAFVDPELRYRMRYVDLVVNPKVKEVFVKRTKLFSAMRNFFNQAGYMEVETPVLQAIPGGAAARPFITHHNSLDIPLYMRIANELYLKRLIVGGFDGVYEFSKNFRNEGMDRTHNPEFTAMEIYVAYKDYNWMMEFTENLLEHCAIEVNGTPETTFGEHKVSFKAPYERVTMTDAIKQFTGFDITGKSEKELFEAAQSMGIAVDETMGKGKLIDEIFGEKCE

SEQ ID NO: 190559 - protein, 294 aa, Unknown
  Bacterial polypetide isolated from the Sargasso Sea
FTKLYPNSFKRNTNSHDLRQKFDKKTKEELESEEGIFSVSGRLLTVRKMGNSTFANLHDDSGKIQLFLSKNGTGKDMYKLLDHTDLGDIVGAKGRIFKTKTGELSINVTEYNVLSKSLRPLPEKYHGLSDIEIKYRQRYLDLMISEDSRKVFKDRINIVSKIRKFFEEEAYLEVETPMMHPIAGGAAAKPFVTHHNSLDMDLYLRIAPELYLKRLIIGGFEKVFEINRSFRNEGLSVKHNPEFTMIEFYAAYEDYDYLMNFIERLIRSLINSVGLSESFKYQDFEIDTKKSLKD

SEQ ID NO: 190560 - protein, 267 aa, Unknown
  Bacterial polypetide isolated from the Sargasso Sea
MDKDNLSGEKALIEERRKKLEQLRDKGNAYGNSFKPENNAEDLHEKYDEFSKEELVEKKIKDISVAGRIVLKRVMGNASFATLRDSSGDIQIYVTKNNVEESVYEDFKTWDLGDIVGVSGTIFRTKTDELTIDVWDLEMITKSLRPMPEKFKGLTDIEARYRQRYLDLMTNTDTKEIFIKRTKIIDSMRTKMNERGYLEVETPMMHPLAGGAVARPFITQHNAFRPDLYLRIAPELYFKRLLVGRIERVFEINRKFRNEGFITKHNP

SEQ ID NO: 190561 - protein, 131 aa, Unknown
  Bacterial polypetide isolated from the Sargasso Sea
LEIFEETVEERLVNPTFVTEYPVEVSPLSRRNPDNPDFADRFELFIGGKEFANGFCELNDPDDQASRFEAQVAAKDSGDKEAMDFDKDYITALEHGMPPAVGVGLGIDRLVMLLTNQSSIRDVLLFPQLKN

SEQ ID NO: 190562 - protein, 257 aa, Unknown
  Bacterial polypetide isolated from the Sargasso Sea
FRNEGVSTRHNPEFTSVEIYQAFADYNDMMDLTEELISSVSHQVCGSTQINYQGTEINLAPGWRRATMHELVQEATGLDFSGFSSREEAASAMKVKGLQTPALADSVGRLLNEAFEQAVEETLIQPTFVTDYPVEISPLARPHRSKPGLVERFELFIVGREHGNAFSELTDPVDQRQRLEAQQERRAAGDLEAQRVDEDFLMALEVGMPPTGGLGIGIDRLVMLLTDSPSIRDVIAFPLLRPESRDGSAAVDNGSTE

SEQ ID NO: 190563 - protein, 246 aa, Unknown
  Bacterial polypetide isolated from the Sargasso Sea
ISNIINEHNDIEEGIHTGISVTVRGRLLNARSFGKLLFYDILDQSGKIQLLVNSGEIEDIYLRLFENFDIGDIIAVNGEVIKTKKGELSIKVNQSTILSKSLRSFPEKWHGLKDKETRFRQRYLDLIVNPESKKILETRSKVIKLIRVYLHENSFVEVETPILQTKAGGAIAKPFTTHHNALGLDMYLRIAPELYLKRLIIGGFEKVFELGKIFRNEGIDQTHLPEFTMLESYQAYVDANSVMDMV

SEQ ID NO: 190564 - protein, 237 aa, Unknown
  Bacterial polypetide isolated from the Sargasso Sea
RNEGISTQHNPEFTMLEIYEAYSDFNDMMNLIEKLILNCLEDLNLAKTISYQNHSINFQLPWERVSMIEWTKNFLGFDVLNNKKELFNYALKNNIEHFEQEGRVISEVFETNFFKEKYNPIFVYEFPIDISPLARRNDKNKLIADRFELYINGKEIANAFSELNDSDDQKQRFEKQLKLKEQGDDEANDMDLDYVEALSYGLPPTAGAGLGIDRLVMLLTDSPSIRDVILFPHLRDE

SEQ ID NO: 190565 - protein, 198 aa, Unknown
  Bacterial polypetide isolated from the Sargasso Sea
LTTPGRRATLMILIEEHAGLDVSLDTPIEDLRSICKKLDIEVLPAWGAGKLLLEIYEKAVEPNLWGPCFVTEYPSEVSPLSREHRQKPGYTERFEAIVAGREILNGFSELVDAQEQQKRFEEQLAQNKAGDEEAMVVDSDYVRALEYGLPPTGGIGIGIDRLVMLLADVQTIRDVILFPTLRPEQQTSPQSEPDSLKD

SEQ ID NO: 190566 - protein, 225 aa, Unknown
  Bacterial polypetide isolated from the Sargasso Sea
IEFYSAYENYEYLMQTIEDLFKSLILNLNINKKSNYQDFEIDYSTPFKRITFHECIAENADNFDNTQINDLSYLMKYCLENNLKTQNETSIEILQLEIFEKMIEKKLISPTFVTHYPTKVSPLARATDDNPDLTERFELFVAGREIANGFSELNDPLEQSKRFSNQLSVSDDEKMKYDEDFIKAMEYGMPPTAGAGIGIDRLIMLLTDKSSIRDVLLFPHMKPKS

SEQ ID NO: 190567 - protein, 299 aa, Unknown
  Bacterial polypetide isolated from the Sargasso Sea
MENKSLKQIIDNRLEKLKKIRELGIEPYAYDYDSSHHTSEINEKLIDSKVSLAGRVMSLRKMGKASFANIQDQEGRIQFYIARDDVGEDNYNLFKLTDIGDFVGIEGKVFKTKTDALTIKVSHLTILSKNIKPIPDVKEKDGEKYNLVSDKEFRYRRRFLDLIINPETKNNYVKRFKIINSIRSFLNDHGYIEVETPVLQPIYGGANAKPFTTHHNALDQDFYLRIATELYLKQLIVGGFEKVYELSKDFRNEGIDRSHNPEFTMLEFYPAYSDLYFMMGICETMFKKVVKDLDMKKIS

SEQ ID NO: 190568 - protein, 178 aa, Unknown
  Bacterial polypetide isolated from the Sargasso Sea
PKSMSPLTKEHRSNPNLTERFELIVNGMEIANAYSELNDPIDQLKRFEDQFELSKKGDDEAMSIDMDFIKSLEYGMPPTSGIGIGIDRLVMLMTDKTSIQEVLFFPQMKPIKKEPDISKDAKIIFNRLKNIEQILLADFKSEFDLSNKKWDKVLKELRGNDLIDIFKSDDGSLFIKPV

SEQ ID NO: 190569 - protein, 177 aa, Unknown
  Bacterial polypetide isolated from the Sargasso Sea
MTEQNNPAESSTAAAVPAQDDNKIIAERREKLAEIRQQGVAFPNDFRPTHHAGDLQAKYRELEQAALEAEPVQVAIAGRMMLKRVMGKASFATVQDSTDRIQFYISRDAVGEDVYASFKKWDLGDIVAARGTLMKTKTGELSVAVTELRLLSKSLRPLPGDYYGLADQEQKYRQRYV

SEQ ID NO: 190570 - protein, 259 aa, Unknown
  Bacterial polypetide isolated from the Sargasso Sea
PELYLKRLVVGGLEKVYEINRNFRNEGLSTKHNPEFTMLEFYEAYADYEDQMNFVEEIIVSLAKRVFDSNSIEIEGKNLDITKGFERLSLVGSIAKYLEVEEDKLSDRSFLEDLAKKLEIENVDKSEMTDGKLQLDIFEKGVEDKLIEPTFIISYPKDVSPLSRTSDTEPNFVDRFELFIGGKEIANGFSELNDPDDQAERFKLQVEQKASGDEEAMEFDSDYIEALEYGLPPCAGVGVGIDRLVMLLTGVESIRDVLL

SEQ ID NO: 190571 - protein, 303 aa, Unknown
  Bacterial polypetide isolated from the Sargasso Sea
VKDFKLLTKSLNPMPEKHAGLTDIETIYRQRYVDLMSNKDSREVFVKRNKIVQSIRKNLEEAGFLEVETPMMHPIPGGANAKPFKTHHNALDKELFLRIAPELYLKRLLVGGFEKVFEINRNFRNEGLSTIHNPEFTMLEFYEAYGSLDRTTRFVQKLVKDSISAVNDSLSIIYEDKELNLESDFEVKSLKDLVQEKLNMVLDTEKQIFDAAKKTGLKVKSDWGWGKILLELFEEHVEKNLWSPTFVKDYPYEVSPLSRRKNENKDYTDRIELFIAGREFANFFCELNDPIDQEERFDMQLKQ

SEQ ID NO: 190572 - protein, 293 aa, Unknown
  Bacterial polypetide isolated from the Sargasso Sea
MPEKFKGLTDIEARYRQRYLDLMTNNSTKEIFIKRTKIIDSMRRKMNEVGYLEVETPMMHPLAGGAVARPFVTQHNALGQDLFLRIAPELYLKRLLVGGFEKVFEINRSFRNEGLSTKHNPEFTMMEWYEAYASMQDQMDLTKDIILNAALAAGCEESIEWDENKINLGNFKQSTLSELVVEYNPELKDKDLSDKKILEQHLKSTSVKIEKVWGPGRLLLEIFEETVESKLIDPTFVTEYPVEVSPLSRRNEHKPDFADRFELFIGGKEFANGFCELNDPDDQASRFEDQVAA

SEQ ID NO: 190573 - protein, 306 aa, Unknown
  Bacterial polypetide isolated from the Sargasso Sea
SITLIQKSLRPMPEKHKGLADMEVKYRQRYLDLMSSPESKEVFVKRSQIVSSIRSSMLEDGFLEVETPMMHSIPGGAVAKPFITKHNALDRELFLRIAPELYLKRLLVGGFEKVFEINRSFRNEGLSTRHNPEFTMLEFYSAFATFTGTMDFTKTIIQSASKAIGNDNEIEWDGDKINLSNFSKKTINDLVLEHNSELKSADLDNLEMLINYAESIKVPLKDSWGPGKILLEIFEKTVENNLIQPTFVTDYPVEVSPLSRRNNDNPSIADRFELFIGGKEIANGFCELNDPDDQAERFKEQVMAKA

SEQ ID NO: 190574 - protein, 318 aa, Unknown
  Bacterial polypetide isolated from the Sargasso Sea
HKLAGLREMGNPFPNDFRRDATSDQIHAQYEHLSKEELEEKKIRVTVAGRMMLRRIMGKASFTTISDVGGKLQLYVARDSLPENVYNEGFKKWDLGDIIGGSGVLFKTQTGELTVWLDEIRLLTKALRPLPDKFHGLTDQEACYRQRYLDLIVNDQSRKTFLIRSKTVAYIRQFFNSKGFLEVETPMLQSIPGGASARPFETHHNALDMQMFLRIAPELYLKRLVVGGFEKVFELNRNFRNEGVSTRHNPEFTMLEFYWAYADYNDLMDITEELFRGLAQSVLGTTEVPYQGNLFDFGKPFARMSVTESILHYNPEGS

SEQ ID NO: 190575 - protein, 244 aa, Unknown
  Bacterial polypetide isolated from the Sargasso Sea
MEKVFEINRNFRNEGLSTKHNPEFTMLEFYTAYVDYKFQMDFVENMLRTIEKNLNANNSIFSNKFHRFSMDESIANHNTIDIEELANKETLVSFCEKKKIKINKSDQIGNIKNEIFEATVEDKLIEPTFIYNYPIEISPLSRSLDEDNSVAERFELFVNGKELGNSFSELNDPEEQAARFESQVKEKDAGDEEAMHFDKDYIEALEYGLAPCAGVGIGIDRLVMLFTGQESIRDVVLFPQLRNK

SEQ ID NO: 190576 - protein, 203 aa, Unknown
  Bacterial polypetide isolated from the Sargasso Sea
IPGGAVARPFITHHNTLDQDFYLRIAPELYLKRLTVGGFDRVYEINRSFRNEGVSTQHNPEFTMLELYVAHETPDFLMNMIEDMMRAISQELFGSEKIEYQGVTIDFTGHFQRLTMEESVLKYNPELDKEKVRDAGYLRSFAEGIDIAVENDAGAGKILFEIFEKTVEHQLQQPTYITSYPREISPLSRANDDDPWIVNRFEF

SEQ ID NO: 190577 - protein, 265 aa, Unknown
  Bacterial polypetide isolated from the Sargasso Sea
IVNPEARETFIKRTKIINEIRSTLNSKQFLEVETPVLQPIYGGANARPFTTHHNALDQKLYLRIADELYLKRLIIGGFEKVYELSKDFRNEGMDRNHNPEFTMLEFYWAYADFNDCMELVEEIIRNAAKKIGDLKIKWGHYDIDLSKKFDKKSFSQLIKEATDTDFSKLSNNEMLEVCDLHNVEVDKNSNKGQIIDSIMSELVEPKLINPTFVIDYPKSISPLAKLKRDGSEEIVERFELFIGGSEFANSFSELNDPIDQRLRLE

SEQ ID NO: 190578 - protein, 272 aa, Unknown
  Bacterial polypetide isolated from the Sargasso Sea
LENVAIDCNGKSVVEYGDKQIEFKGPYKKIGIIDAIKEETGIDALSLNESELREAAQKIGVEIDDTMGKGKIIDEIFGEKCESKFIQPTYIIDYPKEMSPLTKQHRDNPLLTERFELLINGSEIANAYSELNDPIDQLERFEEQLKLSEKGDEEAMFIDYDFVRSLEYGMPPTSGIGIGIDRLVMLLTNHRSIQEVIFFPQMKPENELKIDLNEDEKLIYIKVKELKKTDLLALKESTGLSNKKWDKSIKLLTKNNLVKVSKNDQGLFVEIV

SEQ ID NO: 190579 - protein, 161 aa, Unknown
  Bacterial polypetide isolated from the Sargasso Sea
MQDVDKARAIAKKAGAKVLGHEGLGKLQVMIFEELVESKLEQPHFITEYPFEVSPLARRNDQNPNVTDRFELFIGGREIANAYSELNDAEDQADRFLAQVAEKDAGDDEAMHYDADFVRALEYGMPPTAGEGIGIDRLVMLLTNSPSIRDVILFPHMRPQA

SEQ ID NO: 190580 - protein, 301 aa, Unknown
  Bacterial polypetide isolated from the Sargasso Sea
ANSLVSKGFASYAQSFKVSHTTSFLIQEFDYLENGQEEDFSVSLAGRVMAKRVMGKIAFFTISDQEGQIQLYLDKRIIDLNLEKQKLLSFEDIKEIADIGDWIGVYGTIKKTNKGELSIKVEKWEMLSKSLQPLPDKWHGLTDIEKRYRQRYLDLIVNPHAKNVFKTRAKCISFIRKWLDNRNFLEIETPILQSEAGGAEARPFITHHNTLDIPLYLRIATELHLKRMVVGGFEKVYELGRIFRNEGISTRHNPEFTSVEIYEAYSDYVDMMNLTEELIKDIVAEACGSLTINYQNKEIDF

SEQ ID NO: 190581 - protein, 259 aa, Unknown
  Bacterial polypetide isolated from the Sargasso Sea
KIIDSMRRKMNEVGYLEVETPMMHPLAGGALARPFVTQHNALGQDLFLRIAPELYLKRLLVGGFEKVFEINRSFRNEGLSTKHNPEFTMMEWYEAYASMQDQMDLTKDIILNAASAAGCEESIEWDENKINLSNFKQSTLSELVVEYNPELKDKDLSDKKILEQHLKSISVKIEKAWGPGRLLLEIFEETVESKLIDPTFVTEYPVEVSPLSRRNEHKPDFADRFELFIGGKEFANGFCELNDPDDQASRFEDQVAAKD

SEQ ID NO: 190582 - protein, 320 aa, Unknown
  Bacterial polypetide isolated from the Sargasso Sea
MDEISVSARKLTILCKSIRPLPVVKEKDDQTFDAFIDKEQRYRNRHLDLIVNPSIKETFLKRAKIIQGLRKYLDNLSFLEVETPVLQPIYGGANARPFTTHHNALDQKFYLRIADELYLKRLVIGGIDRVYEMAKDFRNEGMDRNHNPEFTMLEFYWAYADYEDNLNLVEDMIRSIAKSIDALKINWGKMKIDLSKPFIRKPIFDLLNEATGENLENIGLDELRKICKANNIETEKSANYGQLLDGLMGTLVEPNLIQPTFVIDYPKEISPLAKKHRNNNPNLVERFELFIGGAEFANAFSELNDPIDQRQRFESQSKLA

SEQ ID NO: 190583 - protein, 258 aa, Unknown
  Bacterial polypetide isolated from the Sargasso Sea
DKGKIQIFIKKDNVGDKVYEAFNLMDIGDFVGIRGFVFKTKVGEISISAEKFDVLSKSIRPLPIVKEKEGEIYDAFKDKELRYRNRHLDLIVNPETRETFIKRTKIINEIRSTLNSKQFLEVETPVLQPIYGGANARPFTTHHNALDQKLYLRIADELYLKRLIIGGFEKVYELSKDFRNEGMDRNHNPEFTMLEFYWAYADFNDCMELVEEIIRNAAKKIGELKIKWGEYDIDLSKKFDKKSFFQLINEATDTEFFK

SEQ ID NO: 190584 - protein, 311 aa, Unknown
  Bacterial polypetide isolated from the Sargasso Sea
MSGEDNYNLFKLTDIGDFVGIVGKVFKTKTDALTIKVSQLTILSKNIKPIPDVKEKNGEKFNLVSDKEFRYRKRFLDLIINPETKENYIKRFKIINSIRSFLNDNGYIEVETPVLQPIYGGANAKPFTTHHNALDQDFYLRIATELYLKQLIVGGFEKVYELSKDFRNEGIDRSHNPEFTMLEFYQAYSDYNFMMDFVEEMFKKVTKDLEMKQISWDGHKIDFSKKFARKTMGELIKDHTGNDIDISNHSEVFNLCKELKLEVNKKDSLANLIDEIMRRKVEPNLIQPTYVINHPVEISPLAKVNRDGDKD

SEQ ID NO: 190585 - protein, 124 aa, Unknown
  Bacterial polypetide isolated from the Sargasso Sea
LIQPTFVIDYPKAISPLAKAHRDGDPNLVERFELFIGGAEFANSFSELNDPIDQRERLEAQAILRDRGDDEAQPVDENFIQAMECGMPPTGGVGIGIDRLTMLLTSNRWIKDVILFPTLRSESP

SEQ ID NO: 190586 - protein, 115 aa, Unknown
  Bacterial polypetide isolated from the Sargasso Sea
MLALLSSPQYGPCSPSFFSPAPGSFEAFVYGRELANAFSELTDPVDQRERFELQAAKKAAGDDEAHDVDEEFLAALEQGMPPTGGLGIGIDRLVMLLTDAPSIRDVIAFPLLRKD

SEQ ID NO: 190587 - protein, 136 aa, Unknown
  Bacterial polypetide isolated from the Sargasso Sea
KLQVMIFEELVESRLEQPHFITEYPFEVSPLARRNDDNPNVTDRFELFIGGREIANAYSELNDAEDQAERFLAQVAEKDAGDDEAMHYDADFVRALEYGMPPTAGEGIGIDRLVMLLTNSPSIRDVILFPHMRPQA

SEQ ID NO: 190588 - protein, 230 aa, Unknown
  Bacterial polypetide isolated from the Sargasso Sea
RPFKTHHNALDQQFYLRIADELYLKRLVIGGIDRVYEIAKDFRNEGMDKNHNPEFTMLEFYWAYADYEDNMDLVEDMIRSIAKSINALKINWGEMKIDLSKPFQRKPIFKLLKEATGEDLEKVGINELKKICIKNNIEIENSANYGQLLDTLMSSLVEPHLVQPTFVVDYPKEISPLAKKHRNNNPNLVERFELFIGGAEFANAFTELNDPIDQRERFESQAKLAKEGDD

SEQ ID NO: 190589 - protein, 171 aa, Unknown
  Bacterial polypetide isolated from the Sargasso Sea
VLTYNKDLNKKDLNDRSVLEKYFKGLGKKSDKSWGIGRLLLEIFEETVEERLINPTFVTEYPVEVSPLSRRNSDNPDFADRFELFIGGKEFANGFCELNDPDDQALRFEAQVAAKDSGDKEAMDFDKDYITALEHGMPPAVGVGLGIDRLVMLLTNQSSIRDVLLFPQLKN

SEQ ID NO: 190590 - protein, 294 aa, Unknown
  Bacterial polypetide isolated from the Sargasso Sea
MRRKMNEVGYLEVETPMMHPLAGGAVARPFVTQHNALGQDLFLRIAPELYLKRLLVGGFEKVFEINRSFRNEGLSTKHNPEFTMMEWYEAYASMQDQMDLTKDIILNAALAAGCEESIEWDENKINLGNFKQSTLSELVVEYNPELKDKDLSDKKILEQHLKSTSVKIEKVWGPGRLLLEIFEETVESKLIDPTFVTEYPVEVSPLSRRNEHKPDFADRFELFIGGKEFANGFCELNDPDDQASRFEDQVAAKDSGDKEAMDYDHDYITALEHGMPPAVGVGMGVDRLVMLLTN

SEQ ID NO: 190591 - protein, 275 aa, Unknown
  Bacterial polypetide isolated from the Sargasso Sea
ITKSLRPMPEKFIGLTDIEARYRQRYLDLMTNTNTKEIFIKRTKIIDSMRQKMNQVGYLEVETPMMHPLAGGAVARPFKTQHNALGRDLYLRIAPELYLKRLLVGGFEKVFEINRSFRNEGLSTKHNPEFTMMEWYEAYATMQNQMDLTRDIILNASSAIGCESIIEWSDVKINLNNFTQSSLTNLILEHNKDLSKDDMNNPNKLEKFLKDKKIKVEKGLKIGRMLLEIFEQTVESKLIDPTFVTEYPVEVSPLSRRNEDNPDFADRFELFIGGK

SEQ ID NO: 190592 - protein, 289 aa, Unknown
  Bacterial polypetide isolated from the Sargasso Sea
VARPFETHHNTLDMKLFLRIAPELFLKRLVVGGFERVYEINRNFRNEGVSTQHNPEFTMLELYQAYADYEDFMVLIEDMMSEISVGIHKSESIIYQEKEINFKGPFHRMTMEEAIIKYNPDLNKENIRDKAYLENYANQLSIKIEETYNAGKIQAEIFEKTCEEHLVEPTFIYAYPTEVSPLSRRNDSDPFITDRFEFFVFGRELANGFSELNDPEDQSERFKAQVKMLEQGDNEAMSYDHDYIRALEYGLPPTAGLGIGIDRLVMLFTDSASIRDVLLFPYMRNEKAE

SEQ ID NO: 190593 - protein, 182 aa, Unknown
  Bacterial polypetide isolated from the Sargasso Sea
FERKSFNQLIESATGYNINDMDDIKLRDICREKGITLKDDAKFGQMLDELMSQVIEPGLIQPTFVIDYPKIISPLAKEHRNGNTNLVERFELFIGGTEFANSFSELNDPIDQRQRLEEQAKLRDLGDQEAQPIDEDFIQAMECGMPPTGGVGIGIDRLTMLLTGNRWIKDVILFPTLRSESI

SEQ ID NO: 190594 - protein, 275 aa, Unknown
  Bacterial polypetide isolated from the Sargasso Sea
GNSFKPQNNAKTLHEEYGAFSKEELADKNIKNISIAGRIVLKRVMGNASFATLRDASGDIQIYVTKNNVEESVYEDFKTWDLGDIVGVSGSLFRTKTDELTIDVWDLEMITKSLRPMPEKFKGLTDIEARYRQRYLDLMTNNSTKEIFIKRTKIIDSMRRKMNEVGYLEVETPMMHPLAGGAVARPFVTQHNALGQDLFLRIAPELYLKRLLVGGFEKVFEINRSFRNEGLSTKHNPEFTMMEWYEAYASMQDQMDLTKDIILNAALAAGCEESI

SEQ ID NO: 190595 - protein, 86 aa, Unknown
  Bacterial polypetide isolated from the Sargasso Sea
SEFANSFSELNDPIDQRKRLEEQSSLRASGDEEAQNLDENFIQAMECGMPPTGGVGIGIDRLVMLLTNNRSIKDVILFPILRSENS

SEQ ID NO: 190596 - protein, 260 aa, Unknown
  Bacterial polypetide isolated from the Sargasso Sea
QLLFDSKKISFKKPFKRITIFDAIEQYTGYDISSMQENELRDICKKMDIEVTDQMGEGKLIDAIFGNKCEKEIIDPTFIMDYPKSMSPLTKEHRDNVNLTERFELIVNGMEIANAYSELNDPIDQLSRFEKQLELSKRGDEEAMFIDKDFIRSLEYGMPPTSGIGIGIDRFIMLMTDNTSIQEVLFFPQMKPENPSLDISEESSKILNIIKNNVELNIDDLKGKIDFSNKKWDKFLKELRDKGLITIFKDERDQILVKLT

SEQ ID NO: 190597 - protein, 115 aa, Unknown
  Bacterial polypetide isolated from the Sargasso Sea
NHPVEISPLAKVNRDGDKDFTERFELFIAGMEFANGFSELNDPIDQRKRFEDQSRKKDGGDEEAFPIDENFLEAIETGMPPTAGVGIGIDRLVMLLIDTRWIRDAIIFPTLKSLK

SEQ ID NO: 190598 - protein, 243 aa, Unknown
  Bacterial polypetide isolated from the Sargasso Sea
RSFRNEGLSTKHNPEFTMMEWYEAYATMQNQMDLTKDIIVNSAKAIDCGERIQWDELEIDLGKFSQKKLSDLVLSYNKDLSKKDLNDRSALEKYFKGLGKESGKSWGTGRLLLEIFEETVEEKLINPTFVTEYPVEVSPLSRRNPDNPDFADRFELFIGGKEFANGFCELNDPDDQASRFEAQVAAKDSGDKEAMDFDKDYITALEHGMPPAVGVGLGIDRLVMLLTNQSSIRDVLLFPQLKN

SEQ ID NO: 190599 - protein, 195 aa, Unknown
  Bacterial polypetide isolated from the Sargasso Sea
KISIEGKDYDLSKPFKKIGLLESVATKLSIPVTDLSDRKKLEELSKKHNIEDYKSYSDGKLQFELFEKIVEDDLIEPTFIIDYPVEVSPLSRLSDDKEGIVDRFELFIGGNEIANGFSELNDPEDQAERFKNQVEQKASGDEEAMEYDADYIEALEYGLPPCAGVGIGIDRLVMLFTGAESIRDVLLFPQMKPKS

SEQ ID NO: 190600 - protein, 217 aa, Unknown
  Bacterial polypetide isolated from the Sargasso Sea
MSKKELSEQEIQRRESLKKLREIGINPYPAELFPVTDFAKSLIQKYEEEKEVCIAGRIMSRRIMGKASFAEIQDSTGRIQAYFNRDEICKEEDKTLYNSVFKKLLDIGDFIGIRGKMFKTQVGETSIHVTSFMVLSKSLRPLPLPKTDADGIVHDSFSDPETRYRQRYVDLVVNPSVKETFIKRSKIISSMRNFLNSKDYLEVETPILQSIPGGAAA

SEQ ID NO: 190601 - protein, 101 aa, Unknown
  Bacterial polypetide isolated from the Sargasso Sea
DPDLTDRFELFSAGRELANGFSELNDPEDQAQRFRYQAQAKAKGDEEAMFYDADYVMALEYGLPPNAGGGLGVDRYVMILTDSPSIRDVLLFPHMRPESAE

SEQ ID NO: 190602 - protein, 291 aa, Unknown
  Bacterial polypetide isolated from the Sargasso Sea
NQTKEIFIKRTRIIDSARSKMNERGYLEVETPMMHPLAGGAVARPFITQHNALGRDLYLRIAPELYLKRLLVGGFDKVFEINRSFRNEGLSTKHNPEFTMMEWYEAFATMQNQMDLTKDIITNAAKAIDCGEKIQWDEIEIDLGKFSQEKLSDLVLSYNKGLSKKDLNDRSALEKYFKGLGKKTNKTWGTGRLLLEIFEETVEEKLINPTFVIEYPVEVSPLSRRNPDNPDFADRFELFIGGKEFANGFCELNDPDDQASRFKAQVAAKDSGDKESMDFDKDYITALEHGM

SEQ ID NO: 190603 - protein, 183 aa, Unknown
  Bacterial polypetide isolated from the Sargasso Sea
HPFDRMTCWEAIITHSDYTKSELLDATRAVEIAKAHGIDTTHMGLGKIHMELFEAVAEKELIQPTFITAFPKEVSPLARASDEDDFVTDRFEFYVVGQELANGFSELNDPEDQASRFQAQLDAKAAGDEEAMSFDHDYITALEHGLPPTAGEGIGIDRLVMLFTNSPSIREVILFPLLRHKEA

SEQ ID NO: 190604 - protein, 231 aa, Unknown
  Bacterial polypetide isolated from the Sargasso Sea
EFTMLEFYWAYADYEDCMELVEDLIRRSAKKINALNINWGGMDIDLSKKFIRKPFIELLNEATGHDISELDQKQLKKICSEKDIDIDDNSNLGQILDALMSQLVEPKLIQPTFVIDYPKAISPLAKAHRNGNPNLVERFELFIGGAEFANSFSELNDPIDQRERLEAQSILRDRGDDEAQPVDENFIQAMECGMPPTGGVGIGIDRLTMLLTSNRWIKDVILFPTLRPESS

SEQ ID NO: 190605 - protein, 269 aa, Unknown
  Bacterial polypetide isolated from the Sargasso Sea
DRYQGLDIGDIIGVTGQLHLSGKGDLYVNMEEYQLLTKALRPLPEKFHGLTDQETRYRQRYVDLIVNEESRQAFVMRSKVVAAIRNFMIKKEFMEVETPMMHVIPGGASARPFITHHNALDMPMYLRIAPELYLKRLVVGGFERVFEINRNFRNEGLSPRHNPEFTMMEFYMAYADYKDLMDLTEELLSSIAIELLGSAQMPYGEHTVDFGGPYARLSMLEAIQKYNPDNATIQAMTYEQVKDLEFMRELAISLGIKIEKFWTCGQLLE

SEQ ID NO: 190606 - protein, 160 aa, Unknown
  Bacterial polypetide isolated from the Sargasso Sea
MEDQELLILLENEELKLEGNWNRGLAIQLLFEEKCEKQLIQPTFITGHPKETSPLCKEHRENPDLIERFEAFINGWELANAYSELNDPLLQRKLMEEQVERGRGGESETQPLDEDFLRCVEYGMPPMGGIGFGIDRMVMLLTGQNTIRDVILFPTMRPEQ

SEQ ID NO: 190607 - protein, 262 aa, Unknown
  Bacterial polypetide isolated from the Sargasso Sea
FKDRINIVSKIRKFFEEEAYLEVETPMMHPIAGGAAAKPFVTHHNSLDMDLYLRIAPELYLKRLIIGGFEKVFEINRSFRNEGLSVKHNPEFTMIEFYAAYEDYDYLMNFIERLIRSLINSVGLSESFKYQDFEIDTKKSFERLNFHQSIIKYCDGIAIENINDYSALESFCKLNDIDITIKGSIHKTQLDIFDKIVESKLINPTFITEYPTAVSPLSRRSDDNPEVVERFELFIAGREIANGFSELNDPQDQAQRFSEQLE

SEQ ID NO: 190608 - protein, 225 aa, Unknown
  Bacterial polypetide isolated from the Sargasso Sea
MSEIRDARLQKANSLVSKGFASYAESFRVSHTTKFLIQKFDFLENGHEEEFSVSIAGRVMAKRVMGKIAFFTISDQEGHIQLYLDKRIINCNLEKQKLLSFEDIKEIVDIGDWIGVYGTIKKTNKGELSIKVEKWEMLSKSLKPLPDKWHGLTDIEKRYRQRYLDLIVNPHSKSVFKTRAKCISFIRKWLDNRNFLEIETPILQSEAGGAEARPFITHHNTLDIP

SEQ ID NO: 190609 - protein, 301 aa, Unknown
  Bacterial polypetide isolated from the Sargasso Sea
SESRFSVRIGRKKFGEKNKDELVQLDFETSVAGRLVLQRNMGKASFISLLDMSGQIQCYLTRDALGDSAYQEFLDLWDLGDIVGVKGSLMKTNKGELTVRATSINLLNKTLQPLPEKFHGLTDQETKYRQRYLDLLSNQEARELFKVRSKVLKCLREFFGSLGYLEVETPMMHPIPGGASARPFVTHHNALDMDLYLRVAPELYLKRLVVGGFERVFEINRNFRNEGLSTRHNPEFTMLEFYQAYSDYLELMDLTDDMLIFVSQSVLNKTEIVYQGTKIDFARRSVRMTMAEAIIQYAGVK

SEQ ID NO: 190610 - protein, 276 aa, Unknown
  Bacterial polypetide isolated from the Sargasso Sea
MFKQHIVTEQEKIRREKLEELKKLGIDPYPAELYPVTNFSSDLISKYEDKKQVVIAGRIMSRRIQGNASFAEILDSKGRIQVYFNRDEICEGDDKTKYNIVYKRLLDIGDIIGIHGELFKTRVGEITVLVKDFKILNKSLRPLPLPKVDSQGKEYDSFTDLEQRYRQRYIDLIVNQSVKKTFIKRTKIINSIRNFLNNKEYLEVETPILQPIPGGATARPFITHHNALDIPLYLRISDELFLKKLIVGGFEAVYEFSRDFRNEGMDKNHNPEFTIL

SEQ ID NO: 190611 - protein, 299 aa, Unknown
  Bacterial polypetide isolated from the Sargasso Sea
HFASEAGGAEARPFITHHNTLDIPLYLRIATELHLKRMVVGGFERVYELGRIFRNEGISTRHNPEFTSVEIYQAFADYVDMMNLTEELIKDIVADACGSLSIKYQNKEIDFSKPWTRISMKDSVKKYTGIDFDSFSGDFQAAKQAVKNINVDFSNKVNTIGRLLNEVFEQKVESKLIEPTFVIDYPVEISPLARPHLDNKEMVQRFELFIVGRELANAFSELIDPVDQRERMQLQQSLRDDGDLEAHCIDEDFLNALEIGMPPTGGLGIGIDRLIMLITNSASIRDVIPFPLLKPEITS

SEQ ID NO: 190612 - protein, 226 aa, Unknown
  Bacterial polypetide isolated from the Sargasso Sea
KLTQSYFLLKILKEIVDIGDWIGVYGTIKKTNKGELSIKVSKWKMLSKSLQPLPDKWHGLTDIEKRYRQRYLDLIVNPLSKNVFKTRAKCISLIRRWLDEKNFLEIETPILQSEAGGADARPFITHHNTLDIPLYLRIATELHLKRMVVGGFEKVYELGRIFRNEGISTKHNPEFTSVEIYQAFSNYIDMMDLTEDLIKNIIFTCCDSLVINYQGKVIDFSKPGKE

SEQ ID NO: 190613 - protein, 281 aa, Unknown
  Bacterial polypetide isolated from the Sargasso Sea
RIVLKRVMGKVSFMTLEDTSGRLQAYFSLNNLGDSLEEIKDWDLGDIVGIKGNLFRTKTDELTVEVEEALLLTKSLNPMPEKHKGISNIETIYRQRYIDLMSSQESRELFVKRNKIIQSLRKNLESTGFLEVETPMMHPIPGGANARPFETHHNALDKKLYLRIAPELYLKRLLVGGFERVFEINRNFRNEGISTIHNPEFTMLEFYEAYGNLEKTTNFIQKLVQDSVLEVNDSLKIQYDGKPLDLSKNFKVISVKELLKQKLGIEKLESSKEIFDAAQEA

SEQ ID NO: 190614 - protein, 190 aa, Unknown
  Bacterial polypetide isolated from the Sargasso Sea
KEIIDPTFIMDYPKSMSPLTKEHRDNVNLTERFELIVNGMEIANAYSELNDPIDQLSRFEKQLELSKRGDEEAMFIDKDFIRSLEYGMPPTSGIGIGIDRFIMLMTDNTSIQEVLFFPQMKPENSGLDISEESSKILNIIRNSKELNIDDLKGKIDFSNKKWDKFLKELREKGLITIFKDKEDQILVKLT

SEQ ID NO: 190615 - protein, 273 aa, Unknown
  Bacterial polypetide isolated from the Sargasso Sea
IFQTIRNYLLEEGFLEVETPTLQSVYGGANATPFVTHHKALDQQFFLRISNELYLKRLIAGGFDAVFEFVKDFRNEGIDRTHNPEFSSLEFYQAYVDYTKIMQHTEKICERCALAVNGKTKFEYEGSTIDMKAPWPRLTMLEAIKELGSISFHSMSDSDVKLLLENNGWELEGDYNRGLATQLVFEKTCEDHLIQPTFITDHPRETSPLCKQTRQNPELIERFEVFINGWEIANAYSELNDPVIQRRLMEEQVERGRGGEKDTHPLDEDFLRA

SEQ ID NO: 190616 - protein, 244 aa, Unknown
  Bacterial polypetide isolated from the Sargasso Sea
FRNEGISTRHNPEFTMLELYEAYADYEDIMRLVEDLVSELAVEICGSTVIQYDGRELDLSTPWKRSSMLDLLNEKIQTEINLQTPIEELRKLCEDFSVPFKEHYGVGKLILELYEKTTEPELWGPIFVTDYPQEVSPLSRAHRSNPELVERFEAIVAGRELCNAFSEVVDSEDQRSRFAAQEKSRDAGDEEAMVVDEDYLRALEYGLPPTGGLGIGIDRLVMLLTDTQAIRDVILFPTLRPEQE

SEQ ID NO: 190617 - protein, 190 aa, Unknown
  Bacterial polypetide isolated from the Sargasso Sea
VRLRQPFARMSVTESILHHNPEITKEQLATRESVAALCKTLHIEVKPNYGHGRLLMEVFDELVETKLRHPTFITEYPAEVSPLARRNDHNPEITDRFEFFIGGRELGNGFSELNDAEDQAERFREQVAQKDAGDDEAMFYDDDFVTALEHGLPPTAGQGIGIDRLVMLLADAASIRDVILFPHMRLHHDK

SEQ ID NO: 190618 - protein, 263 aa, Unknown
  Bacterial polypetide isolated from the Sargasso Sea
YQGLDIGDIIGVTGQLHLSGKGDLYVNMEEYQLLTKALRPLPEKFHGLTDQETRYRQRYVDLIVNEESRQAFVMRSKVVAAIRNFMIKKEFMEVETPMMHVIPGGASARPFITHHNALDMPMYLRIAPELYLKRLVVGGFERVFEINRNFRNEGLSPRHNPEFTMMEFYMAYADYKDLMDLTEELLSSIAIELLGSAQMPYGEHTVDFGGPYARLSMLEAIQKYNPDNATIQAMTYEQVKDLEFMRELAISLSIKIEKFWTCG

SEQ ID NO: 190619 - protein, 173 aa, Unknown
  Bacterial polypetide isolated from the Sargasso Sea
LEEATGTDLSKITKDEMLELCDVNSIKIDKNSNIGQILDALMSNLVEPKLINPTFVIDYPKSISPLAKLKRDGSKDIVERFELFIGGSEFANSFSELNDPLDQRSRLEEQSKLREQGDEEAQPIDEDFINAMEIGMPPTGGVGIGIDRLVMLLTNNRWIRDVILFPTMKSEKE

SEQ ID NO: 190620 - protein, 290 aa, Unknown
  Bacterial polypetide isolated from the Sargasso Sea
PDKWHGLTDIDKRYRQRYLDLIVNPHSKNVFKTRAKCISFIRKWLDSRNFLEIETPILQSEAGGAEARPFITHHNTLDIPLYLRIATELHLKRMVVGGFEKVYELGRIFRNEGISTKHNPEFTSVEIYQAFSNYVDMMDLTEELIKDIVADACGSLVINYQDKEIDFSKPWLRISMKDIVRKYTGIDFDSFSGDFQVAKQAVESINVEFSNKVNTMGRLLNEVFEQKVESELIEPTFVIDYPVEISPLARPHLDNKEMVQRFELFIVGRELANAFSELIDPVDQRQRMQL

SEQ ID NO: 190621 - protein, 263 aa, Unknown
  Bacterial polypetide isolated from the Sargasso Sea
MMLRRIMGKASFLTIQDTSGRIQLYVRKADLPDGIYDDFKTWDLGDIVGGRGRLFKTNTGELSVHLTEIRLLTKSLRPLPDKHKGLTDTELRYRQRYVDLMTNNETREVFTLRSKVIAAIRHFFESRGFLEVETPMLQVIPGGATARPFITHHNALDIDMYLRIAPELFLKRLVIGGFERVFEINRNFRNEGLSTRHNPEFTMLEFYWAYSDYRDLIHMTEELLREVAKKACGKTVFSLEDGSRVDLDRPFDAMTVKEAILKY

SEQ ID NO: 190622 - protein, 218 aa, Unknown
  Bacterial polypetide isolated from the Sargasso Sea
AGRVMAKRVMGKIAFFTISDQEGQIQLYLDKRIINSNSEKQKLLSFEDIKEIVDIGDWIGVYGSIKKTNKGELSIKVEKWEMLSKALQPLPDKWHGLTDIEKRYRQRYLDLIVNPHSKNVFKTRAKCISFIRKWLDNRNFLEIETPILQSEAGGAEARPFITHHNTLDIPLYLRIATELHLKRLVVGGFEKVYELGRIFRNEGISTRHNPEFTSVEIY

SEQ ID NO: 190623 - protein, 307 aa, Unknown
  Bacterial polypetide isolated from the Sargasso Sea
VEGIRRFLADRDFMEVETPMLQVIPGGASARPFVTHHNALDIDMYLRIAPELYLKRLVVGGFDRVFEINRNFRNEGLSTRHNPEFTMIEFYQAYADYIDLMNITEDMLRTVATNVLGSPIVVNTTKDENGEVIDSVEYDFGKPFERLSMADAILKYNPEFDAAVFNDPENHFEELKAYAKQVHVKIPENCVWGPGKFLCEIFEETAEHMLIQPTFITGYPWEVSPLARRNDDNAFVTDRFEFFVGGRELANGFSELNDAQDQAERFTRQVEEKDAGDDEAMHYDEDYIRALEYGLPPTAGEGIGIDR

SEQ ID NO: 190624 - protein, 254 aa, Unknown
  Bacterial polypetide isolated from the Sargasso Sea
YRQRYLDLMSNNSTKEIFVKRTRIIDSMRRKMNEVGYLEVETPMMHPLAGGAVARPFVTQHNALGQDLFLRIAPELYLKRLLVGGFEKVFEINRSFRNEGLSTKHNPEFTMMEWYEAYASMQDQMDLTKDIILNAASAAGCEESIEWDENTINLGNFKQSTLSELVVEYNLELKDKDLSDKKILEQYLKSMSIKIEKSWGLGRLLLEIFEETVESKLIDPTFVTEYPVEVSPLSRRNEHKPDFADRFELFMEEK

SEQ ID NO: 190625 - protein, 314 aa, Unknown
  Bacterial polypetide isolated from the Sargasso Sea
KPTNYSNQLKTEFKSYENKDVLVAGRIMAIRKMGKASFFHIEDSQGRIQVYIKKDEVGESQYEVFKLLDIGDFIGVSGFVFKTKTKEISLHAKSITVLAKSIRPLPIVKEKDGETFDSFEDKEQRYRNRHLDLIVNPDIKEVFKKRSLITRALRSYLDAEQFLEVETPVLQPLYGGANARPFTTHHNTLDQTFYLRIADELYLKRLIIGGYDKVYELSKDFRNEGMDRNHNPEFTMLEWYEAYSDYNDQMNRVEEIIRFAAKSIGKLKINWGDIQIDLSKKFDKKPCFDLLKDATGKDILDADEKKLREICKQN

SEQ ID NO: 190626 - protein, 254 aa, Unknown
  Bacterial polypetide isolated from the Sargasso Sea
FVQLMDDEGKIQIFVRNNDIGDENYSNFKLLDIGDFIGVEGEVFKTKTGEITIKTHKLTILAKSIRPLPIVKEKDGQLFDSFTDKEQRYRKRHLDLILNPEVRETFQKRSKIISSIRNFFDNQGFLEVETPILQPIYGGANARPFTTHHNTLNQKLYLRIADELYLKRLIIGGFDRVYEIAKNFRNEGMDRNHNPEFTMLEFYWAYSDYEDCMNLVEQLFAHIAKKLDSFYLDWGDSKIDLTKKFHRKSFFELL

SEQ ID NO: 190627 - protein, 110 aa, Unknown
  Bacterial polypetide isolated from the Sargasso Sea
SPLGKLKRDGSQNIVERFELFIGGSEFANSFTELNDPIDQRERLEAQAILREKGDEEAQPIDEDFIRAMEVGMPPTGGVGIGIDRLVMLLTNNRWIRDVIFFPTMRAEKR

SEQ ID NO: 190628 - protein, 315 aa, Unknown
  Bacterial polypetide isolated from the Sargasso Sea
IRIYFLKPIPIDSYCIDLNNNHEESSKEDLENLNKEVAIAGRMMAKRIMGKSSFSKIKDGTSSIQIFLNSKNVSEEIYEDFKTYDVGDILWVKGNLFKTKTDELTINANEIELLTKSIRPLPEKYHGLKDTETRYRKRYLDLIMSDESRAVFENRSKIITTIRRYLNEQEILEVETPMMQPIPGGAIARPFVTHHNTLDKDFYLRIAPELYLKRLVVGGMHRVYEINRSFRNEGVSTQHNPEFTMLELYLAFASYEEIMTLVEEMLIEISKDLFGSSTITYQDREYDLSGPYKRITLEESVMEFNPDMNPEKLRD

SEQ ID NO: 190629 - protein, 303 aa, Unknown
  Bacterial polypetide isolated from the Sargasso Sea
LADTETRYRQRYLDLIMNQDAFSVFKTRSKVVELVRKFLKLEGYLEVETPMMHPIPGGANAKPFITKHNSLDMDLYLRIAPELYLKRLVVGGFEKVFEINRSFRNEGLSTRHNPEFTMLEFYEAYATFEDLMVLTEELLKNLVKEVLGTDYLIYQEKKYSFAGSFEKLTMVEAVKRFNPTYHGENLKDMRVLSELASQIKLKIEDGWGEGKILAEIFEKTCEPNLEGPVFITHYPSEVSPLARNNNQDPFFCDRFEFFVAGREIANGFSELNDPEDQAQRFSLQLEDKAKGDDEAMHFDSDYI

SEQ ID NO: 190630 - protein, 265 aa, Unknown
  Bacterial polypetide isolated from the Sargasso Sea
NLKKLIVGGLEKVYELGRVFRNEGIDHSHNPEFTTIESYEAFVDYNAIMELVEQLVSGAAFKVNGSFEIDYGEEIGVIDLKPPWKRLDLQKAIKDFSGIDFISIKDEAELSNQMRNLGIHVEPNSSWATMIDKIISDKVEPNLKQPTFLIDYPVEMSPLAKRKDRNSDVAERFEAFVMGSELANAFTELNDPIDQRNRFEEQESLRKKFNDDELDRLEEDFLIAVEHGMPPTGGLGLGIDRLVMLITKKITIRDVVLFPQLKTLE

SEQ ID NO: 190631 - protein, 274 aa, Unknown
  Bacterial polypetide isolated from the Sargasso Sea
SPDSRETFRRRARLVSGIRRWLDQRGFLEIETPVLQSEPGGADARPFETHHNALDLPLTLRIATELHLKRLVVGGFERVYELGRIFRNEGVSTRHNPEFTSVEIYQAYSDYIGMMELTEQMISAVCQEVCGSCQITYQGTEIDLSPPWRRATMHELVEEATGLDFRSFGSREAAAAAMVAKGLHAPELADSVGRLLNEAFEQAVETTLIQPTFVTDYPVEISPLARPHRSKPGLVERFELFIVGREHANAFSELTDPVDQRQRLEAQQARKAAG

SEQ ID NO: 190632 - protein, 233 aa, Unknown
  Bacterial polypetide isolated from the Sargasso Sea
PGGASARPFETHHNALDMQMFLRIAPELYLKRLVVGGFEKVFELNRNFRNEGVSTRHNPEFTMLEFYWAYADYNDLMDLTEKLFRGLALDVLGSTEVPYQGEVFDFGKPFARMSVTESILHYNPSITKEQLATRESVAELAKSLGIEVKANYGHGRILMEVFDELVETKLRHPTFITEYPAEVSPLARRNDDNPEITDRFEFFIGGRELGNGFSELNDAEDQAERFREQVAQK

SEQ ID NO: 190633 - protein, 115 aa, Unknown
  Bacterial polypetide isolated from the Sargasso Sea
FDIKEIVQRFELFIVGRELANAFSELIDPVDQRERMQLQQSLRDEGDLEAHCIDEDFLTALEIGMPPTGGLGIGIDRLIMLITDSASIRDVIPFPLLKPEITSKKSEKLPSNEVK

SEQ ID NO: 190634 - protein, 291 aa, Unknown
  Bacterial polypetide isolated from the Sargasso Sea
MKEVTEKSSSGENKLIADRREKLGRLRIGNAFPNDFRRDSLAGELLSAYGERSGSILDKDCITVRVAGRMMAKRIMGKASFIKIQDSSGQIQIYIEKDRVSVEIYQAFKSWDVGDILGVEGELFKTKTGELSIRAEQIRLLVKSLRPMPEKWHGLVDQELKVRQRYVDLIVSDETRRVFQLRTEIIRFLRSSLDTLGFLEVETPMMHPIPGGAIAKPFATHHNALDIPLYLRVAPELYLKRLLVGGFERVYEINRSFRNESISTHHNPEFTMLEVYQAYANYRDFISLTQT

SEQ ID NO: 190635 - protein, 295 aa, Unknown
  Bacterial polypetide isolated from the Sargasso Sea
FTILELYVAYKDYFWMMELTESLIEKVCIELNGDSSINFDSKKISLKKPFKRISIYDSIKKYTGYDISSMDENELRDICKKMDIEISDQMGEGKLIDAIFSNKCEKEIINPTFIIDYPKSMSPLTKEHRENSNLTERFELIINGMEIANAYSELNDPIDQLSRFEEQLKLSEKGDEEAMFIDKDFIRSLEYGMPPTSGIGIGIDRLIMLMTNNTSIQEVLFFPQMKPENTSKDISDELSKILDVIKNKEELNINDLKSKFNFSNKKWDKFLKELREKELITIIKDKENQILVKPS

SEQ ID NO: 190636 - protein, 283 aa, Unknown
  Bacterial polypetide isolated from the Sargasso Sea
VRDTFYIRSNIIRYIRKYLDERDFLEVETPMMNMIAGGATARPFITHHNDLNMTLFMRIAPELYLKQLVVGGIERVYEIGRQFRNEGIDMTHNPEFTTCEFYQAYADYNDLMTMTEEMVSGMVYAIKGSYKIQYHANGPDEDPIEIDFTPPFRRISMISGLEEALNIKFPSTDFSTQENEDFLKNLIKELGVEMQPPFTTARMLDELVGEYLESQLVNPGFICDHPQIMSPLAKYHRSIPGMTERFELFVNTKELCNAYTELNDPIDQRERFAEQAKAKSSGD

SEQ ID NO: 190637 - protein, 148 aa, Unknown
  Bacterial polypetide isolated from the Sargasso Sea
LGVSTEDTWGLGKYWMEIFEAVVEKHFLQPTYITEYPAEVSPLARLNDRNSFVTDRFELFICGREYANGFSELNDPVDQTERFKKQVALKDSGDHEAMHFDEDYITALEYGLPPTAGEGVGIDRLVMLLTDSPSIRDVLLFPQMRPIN

SEQ ID NO: 190638 - protein, 77 aa, Unknown
  Bacterial polypetide isolated from the Sargasso Sea
SELNDPEDQAERFKKQVEEKNAGDAEAMHFDDDYIKALEYGMPPTAGEGIGIDRLVMFLTDSSSIRDVILFPHMRQK

SEQ ID NO: 190639 - protein, 305 aa, Unknown
  Bacterial polypetide isolated from the Sargasso Sea
IISGCCLAGRIRSRRIMGKASFVDLQDSEGRIQLYLNRDEICPGDDKAMYNDVFKKYLDLGDFIGIRGSVFITKVGAISILVKELVVLSKAIRPLPVVKESDGVMHDAFSSADLKYRQRYVDLVVNSEVKNTFIQRTKLTNSIRSFLNERGYLEVETPILQPIHGGAAARPFITHHNTLDMPLYLRIANELYLKRLIVGGFDGVFEFAKDFRNEGMDRTHNPEFTQVELYVAYKDYLWMMDLTEEMIEKAVLDLHGQTKVMVGDKEIDFKRPWKRYTMFEAIKEFTGIDISKMEEEELFKTAKEL

SEQ ID NO: 190640 - protein, 249 aa, Unknown
  Bacterial polypetide isolated from the Sargasso Sea
MSDIQDENHLIEERKKKLIELKKSGINYPNSFRRSNLSFSLIEDYSEFSKEELTKKNISVSVAGRIMLRRIMGKASFSTIQDMTGRIQLYLRQDAIDNYELFKDCDLGDIVGAKGVLFKTNTGELSIQVNEFYLLTKSLRPLPEKHLGLSDVETKYRKRYLDLLTNSESQEVFEIRSKVVNEIRQFLIKDNFIEVETPMMHPIPGGATAKPFVTHHNALDMQLFLRVAPELYLKRLVIGGMEKVFEINR

SEQ ID NO: 190641 - protein, 107 aa, Unknown
  Bacterial polypetide isolated from the Sargasso Sea
MKFFGEKCESKFIQPTFIIDYPKEMSPLTKQHRDNPLLTERFELLINGSEIANAYSELNDPIDQLERFEDQLKLSEKGDEEAMFIDYDFVRSLEYGMPPTSGIGIGI

SEQ ID NO: 190642 - protein, 272 aa, Unknown
  Bacterial polypetide isolated from the Sargasso Sea
KVFIKRTKIIDSLRKKMNESGYLEVETPMMHPLAGGAVARPFVTQHNALGQDLYLRIAPELYLKRLLVGGFERVFEINRSFRNEGLSTKHNPEFTMMEWYQAYASMQDQMDLTKDIILNAAKAADCESKIEWGDIKVNLNNFKQSTLSDLVLEFNKELSKDDLSNKKKLQNILTDNKVKVEKSWGIGRILLEVFEATAEGKLIDPTFVTEYPVEVSPLSRRNEENPDYADRFELFIGGKEFANGFCELNDPDDQATRFEEQVAAKDSGDKEA

SEQ ID NO: 190643 - protein, 262 aa, Unknown
  Bacterial polypetide isolated from the Sargasso Sea
GSVKRSDKGELSIVPAQVQMLTKALLPLPDKWHGLTDVEKRYRQRYVDLIVSPDVRNTFKARSNIISTIRRMLDDDGFLEMETPVLHTQAGGADAKPFNTFHNALGMQLTLRIATELHLKRLIVGGFERVYELGRVFRNEGLSTRHNPEFTSIEVYQAYADVTDMLELTEEMICQCAMRACGTLTIPYGDLTIDLSQRPWRRAPMNDLVKEATGVDVMAFGDDLEGAKAAAIPALKAHSKKAGEGIKGVKAAASVGHVLNEM

SEQ ID NO: 190644 - protein, 223 aa, Unknown
  Bacterial polypetide isolated from the Sargasso Sea
FDFAKSIGIDVNETMGKGKLIDEIFGEKCEGNFIQPTFITDYPIEMSPLTKKHRSKDGLTERFELMVCGKEIANAYSELNDPIDQRERFEEQLKLSEKGDDEATGFIDEDFLRALEYGMPPTSGLGIGMDRLIMFLTNNPSIQEVLFFPQMRPEKVVPQIELGEDEKVILEILNSQENAFSLAEVKERSQLSGKKWDKASKNLTKHGMVKVEKIDDNVLMKLV

SEQ ID NO: 190645 - protein, 123 aa, Unknown
  Bacterial polypetide isolated from the Sargasso Sea
QLIQPTFITDHPRETSPLCKQTRQNPELIERFEVFINGWEIANAYSELNDPVIQRRLMEEQVERGRGGEKDTHPLDEDFLRAMEYGMPPMGGVGFGIDRIVMLLTGQSTIRDVILFPTMRTEF

SEQ ID NO: 190646 - protein, 169 aa, Unknown
  Bacterial polypetide isolated from the Sargasso Sea
MGSDISKMDENEIFDECKKHNLEIDKKSNIGQMLDALMSNLVEPQLINPIFVTDYPKAISPLAKLKRDGSKNIVERFELFIGGSEFANSFTELNDPIDQRERLEEQAMLREKGDEEAQPIDEEFLRAIEVGMPPTGGVGIGVDRLVMLLTNNRWIRDVIFFPTMKSEQK

SEQ ID NO: 190647 - protein, 99 aa, Unknown
  Bacterial polypetide isolated from the Sargasso Sea
PNLVERFELFIGGAEFANSFSELNDPIDQRERLEAQAILRDRGDDEAQPVDENFIQAMECGMPPTGGVGIGIDRLTMLLTSNRWIKDVILFPTLRSESS

SEQ ID NO: 190648 - protein, 192 aa, Unknown
  Bacterial polypetide isolated from the Sargasso Sea
MSVSELRDTRLEKAQALIECGQTPYALRFEPSNRTAQLQKAHADLPNGEERDVFVAIAGRVMTRRVMGKLAFFTLADETGPIQLFIEKAALGEGFKQITSLVDAGDWIGVKGTLRRTDRGELSVKVAEWEMLSKSLQPLPDKWHGLADVEKRYRQRYLDLIVSPDTRDTFRRRAQLVSGIRRWLDERDFLEI

SEQ ID NO: 190649 - protein, 270 aa, Unknown
  Bacterial polypetide isolated from the Sargasso Sea
FYLRIATELYLKQLIVGGFEKVYELSKDFRNEGIDRSHNPEFTMLEFYQAYSDYNFMMDFVEQMFKKVVKDLGMKKISWDGHKIDFSKKFARKTMGELIKDHTGNDIDISDHSAVYKVCKDLKLEVSKNDSLATLIDEIMRRKVEPNLIQPTYVINHPVEISPLAKVNRDGDKDFTERFELFIAGMEFANGFSELNDPIDQRKRFEDQSRKKDSGDEEAFPIDENFLEAIETGMPPTAGVGIGIDRLVMLLIDTRWIRDAIIFPTLKSLK

SEQ ID NO: 190650 - protein, 261 aa, Unknown
  Bacterial polypetide isolated from the Sargasso Sea
MSEIREARLQKANSLVSKGFVSYAENFKVSHNTTFLIKKFDYLENGEEEDFRVSLAGRVMAKRVMGKIAFFTISDQEGKIQLYLEKKIIDHNLENQKLLSFEDIKEVVDIGDWIGVYGKIKKTNKGELSIKVETWEMLSKSLQPLPDKWHGLTDIEKRYRQRYLDLIVNPHSKNVFKTRAKCISFIRKWLEKRNFLEIETPILQSEAGGAEARPFITHHNTLDIPLYLRIATELHLKRMVVGGFEKVFELGRIFRNEGIST

SEQ ID NO: 190651 - protein, 301 aa, Unknown
  Bacterial polypetide isolated from the Sargasso Sea
MMVGEIPYNNFKLLDIGDFVGVEGNIFKTKTEEISIRTDKLTVLAKSIRPLPIVKEKDGKQFDAFLDKGQRYRKRHLDLILNPDVKQTFIDRSNIIKSIRSFLDYNGFLEVETPILQPIYGGANARPFTTHHNTLNQKLYLRIADELYLKRLIIGGFDKVYELSKDFRNEGVDRSHNPEFTMLEFYQAYADYKDCMDIVEKMILNAAKTVNSEKILFDNIEINFRERFDRKSYFDLLKDETGHDLKDFSERKLKAVCLENKISLEDNLNKGQMLDALMSNLVEPKLIKPTFIIDYPKFISP

SEQ ID NO: 190652 - protein, 279 aa, Unknown
  Bacterial polypetide isolated from the Sargasso Sea
RPFITHHNTLDIPLYLRIANELYLKRLIVGGFEGVYEFAKDFRNEGMDRTHNPEFTQMEIYVAYKDYKWMMDFTEKMLETICLEVLGTTEVKIGEKTVSFKSPFKRITMLDSIKEHTGVDISKMNEPEIREVCTNLGVEVDESMGKGKLIDEIFGEKCEGNYIQPTFITDYPVEMSPLCKKHRNNPELTERFELMVNGKELANAYSELNDPIDQKERFEDQVKLAEKGDDEAMFIDLDFIRALEYGMPPTSGMGIGIDRLVMFLCNQPSIQEVLLFPQK

SEQ ID NO: 190653 - protein, 94 aa, Unknown
  Bacterial polypetide isolated from the Sargasso Sea
MEVANGFSELNDPDDQRQRFELQMQQKAQGDHEAMPYDHDYVEALEYGLPPTAGEGIGIDRLVMLMTNAPSIRDVILFPLMRPKSQIDTNTNDE

SEQ ID NO: 190654 - protein, 298 aa, Unknown
  Bacterial polypetide isolated from the Sargasso Sea
RGLGTEPYPYSFVQSHTILQVKEQAEELLENQQIIMIAGRMLAVRGKGKAIFCNIQAQHKRLQVYVRLDVVGESIFEIFKLCDIGDHLGVSGTLMRTNTGEITLRASEVELLAKSIRPLPIPKVQEKDGHRIVYDEVKDKEFRYRQRYVDLILNPHVSEVFRKRALIFQTIRNYLIEECFLEVETPTLQSVYGGANATPFVTHHKALDQQFFLRISNELYLKRLIAGGFDAVFEFVKDFRNEGIDRTHNPEFTMLEFYQAYVDYTKIMYHMEKICERCALAVNGKTQFEYEGNTIDMK

SEQ ID NO: 190655 - protein, 288 aa, Unknown
  Bacterial polypetide isolated from the Sargasso Sea
MTENLSENELIKQRRSKLDNIRKNGIAYPNTFKRDSLSQDLKEKCAGYSKEDLEKKHIEVTVAGRIMLQRIMGKASFITLQDMKGQIQAYVRSNDLPEGQYEDFKTWDLGDIVGVKGKLFLTKTGELTVNAESIEMLTKSLRPLPEKYSGLVDTEQRYRKRYLDLITNPESLEVFKKRSLIISFIREYFVLNEYQEVETPMMHSILGGAAAKPFTTHHNALDMDLYLRIAPELYLKRLVVGGMEKVFEINRNFRNEGLSTKHNPEFTMLEYYSAYADFNDQMSFIEDL

SEQ ID NO: 190656 - protein, 256 aa, Unknown
  Bacterial polypetide isolated from the Sargasso Sea
MELPYQFSVTATTKEIRADYASLDEGTGSGKSVTIAGRLMLRRVQGKVAFGDLQDMSGRIQLFAPAKVTPEFDSFTSLNIGDWIGVTGEIMKTKRGELSVKVEQWVILASANRPFPDKWHGITDPDLRYRQRYVDLWVTEEARENFLIRSNTLSLTRRWLEAKNFLEVETPVFHPIPGGALARPFSTHHNALDTELYLRIAPELYLKRLIVGGFERVFEIARVFRNEGISSKHNPEFTMLELYQAYADWNEIMELA

SEQ ID NO: 190657 - protein, 121 aa, Unknown
  Bacterial polypetide isolated from the Sargasso Sea
NEPTFIIDYPVEVSPLSRLSDDKDGLVDRFELFIGGNEIANGFSELNDPEDQAERFKAQVEQKASGDEEAMEYDADYIEALEYGLPPCAGVGIGIDRLVMLFTGAESIRDVLLFPQMKPKS

SEQ ID NO: 190658 - protein, 259 aa, Unknown
  Bacterial polypetide isolated from the Sargasso Sea
MSDIEPKEDLSQILRHRREKLEEVVKRGMQPFVYNYSATSSTVAAVEGFEAAEAAGTLDEEGHSEPVKVGGRLVGWRDMGRSVFAHLEDGQGRIQLYFRNSVVGESSFEALSVLDISDWIGAEGRMFRTRTGEVTVQVEEWTLLTKSLRPLPFGKVETDAQTGERTVYGGFQDQEGRYRQRYADLAVHPDVREVFRTRAKVITELRRFLDGEGFLEVETPVLQPLYGGASARPFVTHHHSLDQRMYLRIADELYLKRLV

SEQ ID NO: 190659 - protein, 252 aa, Unknown
  Bacterial polypetide isolated from the Sargasso Sea
IDRVYEIAKDFRNEGMDRNHNPESTMLEFYWAYADYQDNLDIVEDMIRSIAKSIDALKINSGNMKIDLSKSFIRKPFFDLLNEATGEDLENIEIDELKKICKSNNIETEKSANYGQLLDSLMGNLVEPNLIQPTFVTDYPKEISPLAKKHRNNNPNLVERFELFIGGAEFANAFSELNDPIDQRQRFKSQAKLAKEGDAEAHPVDENFLQAVESGMPPTAGVGIGVDRLVMLLTENVSIKDVILFPALRNEE

SEQ ID NO: 190660 - protein, 282 aa, Unknown
  Bacterial polypetide isolated from the Sargasso Sea
FEDLKEIVDIGDWIGVCGTIKKTNKGELSIKVEKWEMLSKSLQPLPDKWHGLTDIEKRYRQRYLDLIVNPNSKNIFKKRAKCISFIRRWLDKRNFLEIETPILQSEAGGAEARPFITHHNTLDIPLYLRIATELHLKRMVVGGFDKVYELGRIFRNEGISTKHNPEFTSVEIYQAFSNYVDMMDLTEELIKDIVINTCGSLVINYQSKEINFSKPWLRISMKNIVKQYTGIDFDSFGGDFQAAKLAVQSIDVDLSIKVNSIGRLLNEVFEQKVESQLVQPTF

SEQ ID NO: 190661 - protein, 184 aa, Unknown
  Bacterial polypetide isolated from the Sargasso Sea
LSKKFHRKPFLEILSEVSGHNLDNFDEQKISNICKEKGIELDENSNLGQMLDGLMSALVEPNLIEPTFIIDYPKVISPLAKTHRNGNPNIVERFELFIGGAEFANSFSELNDPIDQRKRLEEQVALKDLGDEEAQPIDENFIQAMECGMPPTGGVGIGIDRLVMLLTGNRWIKDVILFPTLRPE

SEQ ID NO: 190662 - protein, 257 aa, Unknown
  Bacterial polypetide isolated from the Sargasso Sea
MLSEQEQIRRESLKKIIDYGIDPYPASEYKFTHYTKQIKENYKEGQKVVIAGRLMRRKIQGKASFGSIKDSKGKIQIYINRDIICPNEDKSIYNDLFKKWIDLGDFIGVEGKVFKTMVGEISINVEKFHLLSKALKPLPLPKIDSNGNIHDAFNDPELRYRRRYVDLILNDNVKETFLKRTKIINSMRKFLANRDYIEVETPILQTIPGGAAARPFVTHHNALDIPLYLRIANELYLKRLIVGGFEGVYEFAKDFRN

SEQ ID NO: 190663 - protein, 218 aa, Unknown
  Bacterial polypetide isolated from the Sargasso Sea
TVLVKDFKILNKSLRPLPLPKVDSQGKEYDSFTDLEQRYRQRYVDLIVNPSVKETFIKRTKIINSIRNFLNNKDYLEVETPILQPIPGGATARPFITHHNALDIPLYLRISDELFLKKLIVGGFEAVYEFSRDFRNEGMDRNHNPEFTILELYVAYKDYFWMMELTESLIENVCLEIHGKTKVEFDSTTIDFKAPYERISITEAIIKFTGHDISGKSE

SEQ ID NO: 190664 - protein, 212 aa, Unknown
  Bacterial polypetide isolated from the Sargasso Sea
MDLTKDIIVNSAKAIDCGERIQWDELEIDLGKFSQKKLSDLVLSYNKDLSKKDLNDRSALEKYFKGLGKESGKSWGTGRLLLEIFEETVEEKLINPTFVTEYPVEVSPLSRRNPDNPDFADRFELFIGGKEFANGFCELNDPDDQASRFEAQVAAKDSGDKEAMDFDKDYITALEHGMPPAVGVGLGIDRLVMLLTNQSSIRDVLLFPQLKN

SEQ ID NO: 190665 - protein, 249 aa, Unknown
  Bacterial polypetide isolated from the Sargasso Sea
MSDKNSKSDNRLVDERREKLNSLREGGFNYPSTIEINSSTLSIIDEYDSMKKEDLEGIDRDFSIAGRMMAKRVMGKSSFSRIKDGKGSIQFFLSNSDLGDEAYESFKTMDVGDIVWVKGSLFRTKTDELTLNVKELVLLSKSLRPLPEKYHGLTDTEIRYRRRYLDLMMSEESAEVFKIRSKVVTQIRSFLNDLDMMEVETPMMHPIPGGAVARPFVTHHNTLDQDFYLRIAPELYLKRLTVGGFDRVY

SEQ ID NO: 190666 - protein, 296 aa, Unknown
  Bacterial polypetide isolated from the Sargasso Sea
SKKILETRSKVIKLIREYLHENSFVEVETPILQTKAGGAIAKPFTTHHNALGLDMYLRIAPELYLKRLIIGGFEKVFELGKIFRNEGIDQTHLPEFTMLESYQAFVDANSVMDMVEDMCTYVFKNLETDTKLHFGENTADFSGPWKRESMFDMVSEKLNIDIQFNSDFKKISKELKKQGVDFEAKSIGLLVYELFENFVEKEIIDPTFVIDYPVEVSPFAREKKDEKGITERFELFAFGSELANGFSELIDSEDQAKRLKEQAIKKNDGDEEAHVEDEDNVEALQYGLPPHWWFRF

SEQ ID NO: 190667 - protein, 309 aa, Unknown
  Bacterial polypetide isolated from the Sargasso Sea
QEFDYLENGQEEDFRVSLAGRVMAKRVMGKIAFFTISDQEGQIQLYLDKRIVDLNLEKQKLLSFEDIKEIVDIGDWIGVHGTIKKTNKGELSIKVEKWEMLSKSLQPLPDKWHGLTDIEKRYRQRYLDLIVNPHSKNVFKTRAKCISFIRKWLDNRNFLEIETPILQSEAGGAEARPFITHHNTLDIPLYLRIATELHLKRMVVGGFEKVYELGRIFRNEGISTRHNPEFTSVEIYEAYSDYVDMMDLTEGLIKDILADLCGSLIINYQNKEIDFSKPWLRISMKDIVKKYTGIDFDSFSGDFLAAKKA

SEQ ID NO: 190668 - protein, 234 aa, Unknown
  Bacterial polypetide isolated from the Sargasso Sea
HNPEFTMLECYQAYSDYRDLIEMTDQLLSELVHSVSGSSKIVYQGREYDFSKGAQQITMSESICSHTAIEENRINDEDYLRHVLGDIGVRCEEAWGIGKLQLELFEAQVEDKLEDPTYVTEYPAEVSPLARRKDGNPEVTDRFELFIGGREYANGFSELNDPVDQSERFQRQSELKESGDSEAMHFDHDYITALEYGLPPTAGEGIGIDRLVMFLTNAPSIRDVLLFPQLRNSS

SEQ ID NO: 190669 - protein, 214 aa, Unknown
  Bacterial polypetide isolated from the Sargasso Sea
VTKNNVDESVYEDFKTWDLGDIVGVSGSLFRTKTDELTIDVWDLEMITKSLRPMPEKFKGLTDIEARYRQRYLDLMTNNDTKKVFIKRTKIIDSLRKKMNESGYLEVETPMMHPLAGGAVARPFVTQHNALGQDLYLRIAPELYLKRLLVGGFERVFEINRSFRNEGLSTKHNPEFTMMEWYQAYASMQDQMDLTKDIILNAAKAADCESKIEW

SEQ ID NO: 190670 - protein, 246 aa, Unknown
  Bacterial polypetide isolated from the Sargasso Sea
FESIEALETKGLSVKHNPEFTMIEFYAAYEDYNYLMNFIERLIRSLINSVGLNELFKYQDFEIDTKNSFERLNFHQSMIKYCDGIGNENINDYSALESFCKLNDIDITIKGSIHKTQLDIFDKIVESKLINPTFITEYPTAVSPLSRRSDDNPEVVERFELFIAGREIANGFSELNDPQDQAQRFSEQLEKDDEKMNYDSDFITAMEYGMPPTAGAGIGIDRLVMLLTNSASIRDVLFFPLMKPKT

SEQ ID NO: 190671 - protein, 177 aa, Unknown
  Bacterial polypetide isolated from the Sargasso Sea
MSMYEALQELADIDSESMEDQELQNLLENEELKLEGNWNRGLAIQLLFEEKCEKQLIQPTFITGHPKETSPLCKEHRENPELIERFEAFINGWELANAYSELNDPLLQRKLMEEQVERGRGGESETQPLDEDFLRCVEYGMPPMGGIGFGIDRMVMLLTGQTTIRDVILFPTMRPEQ

SEQ ID NO: 190672 - protein, 289 aa, Unknown
  Bacterial polypetide isolated from the Sargasso Sea
FKHWDLGDILGAEGTLMKTKTGELSVKVTSLRLLTKSLRPLPDKFHGMADQEQKYRQRYVDLITDEQARKRFVARSKAVSGLREFMVSHGFLEVETPMLHPIPGGANAKPFVTHHNALEQEMYLRIAPELYLKRLIVGGFERVFEINRSYRNEGISVRHNPEFTMMEFYAAYWNYLDLMDFTETLIREVALKATGGLQMTYQGRPVDLSQPFARLTIREAIFQHTEAGAHVDDTAWLISALKKLGMTEEKDKLSSRTLASLQVLYFEETVEDKLWQPTFIMEHPTEISP

SEQ ID NO: 190673 - protein, 137 aa, Unknown
  Bacterial polypetide isolated from the Sargasso Sea
KIIEPTFVIDYPIEISPLARPHIDNKEMVQRFELFIVGRELANAFSELIDPVDQRERMQLQQSLRDEGDLEAHCIDEDFLNALEIGMPPTGGLGIGIDRLIMLITNSPSIRDVIPFPLLKPEITSYKNEKSPSNEVK

SEQ ID NO: 190674 - protein, 483 aa, Unknown
  Bacterial polypetide isolated from the Sargasso Sea
MKEQDENNLFEVRKEKLKKLREQGKDYPNSFRRNELAKELIKEYSDLSKDDLENTSISVKVAGRIMLRRLMGKASFTTIQDMSAQIQLYLREDTLNNYDDFKTWDIGDIIGVEGELFKTNTGELSIKVTEAILLTKSLKPLPEKHQGLVDVEQRYRKRYLDLLVNEEAREVFLARSKIISETRNYFDSSGFIEVETPMMHPIPGGAAAKPFVTHHNALGMDLYLRIAPELYLKRLVVGGFEKVYEINRNFRNEGLSTKHNPEFTMLEFYTAYEDYDFQMNFVEALIKHLSNLEQSKRSFKKFKRVSFDEALTKNTSLNKKDLDDIDSLRKFAKSLKIENFKTLSIGKLKAEIFESEVEDKLSEPTFIYKYPLEISPLSRKSEGDEGYVDRFELFIDGKEIANGFSELNDPEDQLERFKMQMEDKEKGDEEAMEMDLDYIEALEYGLAPCAGVGIGLDRLVMLLTGIDSIRDVILFPQLKNKGN

SEQ ID NO: 190675 - protein, 155 aa, Unknown
  Bacterial polypetide isolated from the Sargasso Sea
MRELAISLGIKIEKFWTCGQLLEEIFGETAEWQLMQPTFITGYPADISPLARRNDDNHFITDRFEFFIGGREVANGFSELNDAEDQDSRFKAQVDAKDAGDDEAMFYDADYITALEHGLPPTAGQGIGIDRLVMLFTNTHTIRDVILFPAMRPQA

SEQ ID NO: 190676 - protein, 366 aa, Unknown
  Bacterial polypetide isolated from the Sargasso Sea
MSEIREARLQKANSLVSKGFASYAQSFRVSTTTKFLTQKFDYLENGQEEDFKVSLAGRVMAKRVMGKIAFFTIRDQDGQIQLYLDKKIINLNLEKQKSLSFEDIKEIVDIGDWIGVYGTIKKTNKGELSIKVEKWEMLSKSLQPLPDKWHGLTDIEKRYRQRYLDLIVNPHSKNVFKTRAKCISFIRKWLDNRNYLEIETPILQSEAGGAEARPFITHHNTLDIPLYLRIATELHLKRMVVGGFEKVYELGRIFRNEGISTRHNPEFTSVEIYQAFSDYVDMMNLTEELIKDIVADACGSLIINYQNKEIDFSKPWTRISMKEIVKKYTGIDFDSFSGDFQAAKQAVKSINVDFSNKVNTIGKTFK

SEQ ID NO: 190677 - protein, 484 aa, Unknown
  Bacterial polypetide isolated from the Sargasso Sea
MDNFSKSEKEIYDLRKQKINFLNELTSNSFPTKFNESVKVADVIKEHSEIKDGEHTGVNVSIRGRILNARSFGKLLFYDLLDQSGKIQLLINSGEIDELYLKLFENFDIGDIIAVNGEIIKTKKGELSIKVNETTILSKSLRTLPEKWHGLKDKETRFRQRYLDLIVNPESKRILETRSNVVRLLREYLHGTEFIEVETPILQSKAGGAIAKPFQTHHNALNLDMYLRIAPELYLKRLVIGGFEKVFEIGKIFRNEGIDQTHQPEFTMLESYQAYADMNIVMDMVEDMCNYVFDNLEIDKKLEFNDEEASFSGPWKRVSMYDLVSEKFGIKINFNSKFEDLSSKLTDQNIDFEAKTFGLLVFELFENFIEKEIKDPTFVIDYPVEVSPFAREKKDQQGVTDRFELFAFGSELANGFSELIDPEDQSFRLKEQAIKKSAGDEEAHVEDEDYVEALQYGLPPTGGLGFGIDRFVMMLVGKPSIREV

SEQ ID NO: 190678 - protein, 500 aa, Unknown
  Bacterial polypetide isolated from the Sargasso Sea
MSSPSPIDTDQPSSTVTALLQARRDKLAKLQELGIDPWGSRFDNSQAVASIRKEGESIAQDADDGPTVRVAGRIMLLRNAGRLVFLDLVDRTGRLQVMIGKKQVGPDTWPVVGCLDLGDIIGVEGRLGYSNSGEMTIFASSLTFLTKSLETPPDKYHGLVDPELRQRMRYLDLIHGEGVRDRFVARSRIIEAIRRVLTDRGYLEVEGPTLQETAGGAAARPFTTHHNALDMPLVMRIALELHLKRLLVGGMERVFELGRVYRNEGISPRHNPEFTMMEAYEAYGDYASMMDLTEAVLVAAAEAAGTPETFNWMGHDVSLKPPFPRKRYDDLLAEVTGCDPEDPASVAAEASKHEIETAGRHPDVIKSELFEETVEKTLSGPIFVIDYPAAVCPLTKRKSDAPDIAERFELYVAGMELANAYTELNDPDLQEELFRTQLDGLSDDESMARMDHDFIKSLRHGMPPAGGLGIGIDRLVMFLTQASSIRDVILFPIHRPHTGG

SEQ ID NO: 190679 - protein, 488 aa, Unknown
  Bacterial polypetide isolated from the Sargasso Sea
MDSKDLTKVQKDREEKLKILREKGFNYPNKFEKKDYLGEISSKFSKSSKSSLEDKKVSICTAGRIVLKRVMGNAAFMTLEDSSGRLQIFLSRNKLNEKLDEAKDLDLGDIIGVKGILFRTNTDELTVDLDSFELLTKSLKPMPEKHKGLTDIETIYRKRYLDLMSNPESREVFIKRNKIIKSLRTNLESNGFLEVETPMMHPIPGGANARPFETHHNALDKKLYLRVAPELYLKRLLVGGYEKVFEINRNFRNEGISTIHNPEFTMLEFYEAYGDLQRTAKFIQKLIQDSILAVNDSLKITYDQKNINFEKDFEIRSLKELVKEELNVESLENEEDIFDLAKKKKIKIEKNWGWGKVLLELFEKFVEKKLWQPTFVKDYPFEVSPLSRRKDEEKEFTDRVELFIAGKEFANFFNELNDPHDQEQRFLDQVKQKDSGDDEAMFFDDDYLDALYHGMPPAVGVGIGIDRLIMLATDKTSIRDVVFFPTLK

SEQ ID NO: 190680 - protein, 303 aa, Unknown
  Bacterial polypetide isolated from the Sargasso Sea
QVGYLEVETPMMHPLAGGAVARPFKTQHNALGRDLYLRIAPELYLKRLLVGGFEKVFEINRSFRNEGLSTKHNPEFTMMEWYEAYATMQNQMDLTRDIILNASYAAGCESIIEWNDTKINLNNFTQSSLTNLILEHNKDLSKDDINNPKKLEKFLKDKKIKVEKSWKIGRMLLEVFEETVESKLIDPTFVTEYPVEVSPLSRRNEDNPDFADRFELFIGGKEFANGFCELNDPDDQASRFEDQVAAKDSGDKEAMDFDQDYITALEHGMPPAVGVGLGVDRLVMLLTNQSSIRDVLLFPQLKN

SEQ ID NO: 190681 - protein, 248 aa, Unknown
  Bacterial polypetide isolated from the Sargasso Sea
MTEEQKSFKQIVEYRKEKLEKLISKGVNPYPALFKPTHKSSEVILNFDALNNSSLHLAGRIISIRKMGKASFFNIQDSSGKIQIFIKKDEVGDSEYEVFQLMDIGDIVGIEGIVFRTKVGEVSVKTVKLSVLCKAIRPLPIVKEKEDEVFDAFSGKEQRYRNRHLDLIVNSDVRETFVKRSQIIKSIRSFLDDLGFLEVETPVLQPIYGGANAKPFTTHHNALNQKLYLRIADELYLKRLIIGGMDRV

SEQ ID NO: 190682 - protein, 293 aa, Unknown
  Bacterial polypetide isolated from the Sargasso Sea
MTDQQTDDNKLIAERRAKLSAIREQCRANGFPNSFRRENYADELQAKFGEFDKETLQGQGNKVSIAGRIMAKRGPFMLLQDMTGRIQAYADKDTQKALKAKYGALDIGDIIGVAGDLHKSGKGDLYVNMEQYELLTKALRPLPEKFHGLSDQETKYRQRYVDLITSEQTRKTFMIRSKIVNGIRNYLTKRDYLEVETPMLQVIPGGATAKPFVTHHNALDIDMYLRIAPELYLKRLVVGGFERVFEINRNFRNEGLSTRHNPEFTMLEFYQAYADYNDLMNLTEDMLRTLAED

SEQ ID NO: 190683 - protein, 500 aa, Unknown
  Bacterial polypetide isolated from the Sargasso Sea
MSDQQLDHNELQQEENKLIAQRKEKLAAVREQGIAFPNDFRRDRLCADLQKQYEGKSKEELEAAAIPVKVAGRIMLNRGAFMVIQDTSGRLQVYVNRKTLPAEQLEAVKHFDLGDIIAAEGTLARSGKGDLYVDMQNVRLLTKSLRPLPDKHHGLTDTEQRYRQRYVDLIVNEEVRHTFRVRSQVIAHIRRFLNERGFLEVETPMLQTIPGGAAAKPFETHHNALDMAMFLRIAPELYLKRLVVGGFEKVFEINRNFRNEGVSTRHNPEFTMLEFYQAYADYRDNMDLTEELFRELALAVLGSTDVPYGDKVFHFGEPFVRLSVYDSILKYNPDITEADFNDVEKARAIAKKAGAKVLGHEGLGKLQVMIFEELVESRLEQPHFITEYPFEVSPLARRNDDNPNVTDRFELFIGGREIANAYSELNDAEDQAERFLAQVAEKDAGDDEAMHYDADFVRALEYGMPPTAGEGIGIDRLVMLLTNSPSIRDVILFPHMRPQA

SEQ ID NO: 190684 - protein, 368 aa, Unknown
  Bacterial polypetide isolated from the Sargasso Sea
LPDKWHGLTDIEKRYRQRYLDLIVNPHSKNVFKTRAKCISFIRKWLDNRNFLEIETPILQSEAGGAEARPFITHHNTLDIPLYLRIATELHLKRMVVGGFEKVYELGRIFRNEGISTRHNPEFTSVEIYEAYSDYVDMMNLTEELIKDIVADACGSLIINYQNKEIDFSKPWSRISMKDIVKQFTGIDFDSFNGDFLAAKQAVKNINVDFSNKVNTMGRLLNEVFEQKVESKLIEPTFIIDYPVEISPLARPHQDNKEIVQRFELFIVGRELANAFSELIDPVDQRERMQLQQSLRDEGDLEAHCIDEDFLNALEIGMPPTGGLGIGIDRLIMLITNSASIRDVIPFPLLKPEITSKKSEKLPLNEVK

SEQ ID NO: 190685 - protein, 430 aa, Unknown
  Bacterial polypetide isolated from the Sargasso Sea
FIEKAFLNLASSNDPDAFAHLTGLVDSGDLIGVEGTLRRTDRGELSVKVSAWTMLSKSLQPLPDKWHGLADVEKRYRQRYLDLIVSPETRETFRRRARLVSAIRRWLDERDFLEIETPVLQSEPGGADARPFETHHNALDLSLTLRIATELHLKRLVVGGFERVYELGRIFRNEGVSTRHNPEFTSVEIYQAYADYTDMMDLTEQLISEACEQVCGGTQISYQGTAIDLSPGWRRATMHELVQEATGLDFNSFATREEAAEAMRAQGLQVPALADSTGRLLNEAFEQAVETTLIQPTFVTDYPVEISPLARPHRSKPGLVERFELFIVGREHGNAFSELTDPVDQRQRLESQQARRAAGDLEAQRVDEDFLMALEVGMPPTGGLGIGIDRLVMLLTDSPSIRDVIAFPLLKPESRDWTATVDNGSTEQIS

SEQ ID NO: 190686 - protein, 486 aa, Unknown
  Bacterial polypetide isolated from the Sargasso Sea
MLELRKAKLDELRSSGNAFPNKFKRDSLANDLHSSYGELENEDLEKKKDVFSVAGRIMLQRIMGKASFMTIQDMSGQIQAYLTKNDLPEGVYDSFKTWDLGDIVGVKGKLFKTKTGELTIHANEIELLTKSLKPLPEKHAGLVDTEQRYRKRYLDLITNEESLEIFKQRSFLIKEIRSFFDDEGFMEVETPMMHSTLGGAAAKPFVTHHNTLDLDLYLRIAPELYLKRLVVGGIEKVFEINRNFRNEGLSTKHNPEFTMLEYYTAYADFDDQMSFLEKLFAHLASELNGSSKISIEGKNYDLSKPFKRIGLLESVATKLSIAEEDLSDRKKLEELSKKHKIEDYKSYSDGKLQFELFEKVVEDDLIEPTFIVDYPVEVSPLSRLSDDKEGIVDRFELFIGGNEIANGFSELNDPEDQAERFKAQVEQKASGDEEAMEYDEDYIEALEYGLPPCAGVGIGIDRLVMLFTGAESIRDVLLFPQMKPKS

SEQ ID NO: 190687 - protein, 263 aa, Unknown
  Bacterial polypetide isolated from the Sargasso Sea
MQYHDNSLINSRLIKLNKIKELGIDPYPARYSRTSDILTSVNNFIEQESESSDPHNDDGDKITLAGRIIAIRGMGKAKFIDIRDYSDTIQILFRSNVLGEQFELLDHLDIGDFIGAKGNVMRTRTGQVTLHADEFTILCKGIRPLPEKFHGLKDTETRYRQRYLDLIANEEVISTFANRSKLLTALREFMNDRGFIEVETPVLVPIPAGAHAKPFVTFHNALDENLYLRIATELYLKRLIIGGFDKVYEIGRVFRNEGVDQNH

SEQ ID NO: 190688 - protein, 182 aa, Unknown
  Bacterial polypetide isolated from the Sargasso Sea
FIRKPFFELLSEAPGHNMADLDEKKLREICTEKEISIDVDFNLGQILDELMSELVEPKLIQPTFVIDYPKEISPLAKAHRNGNPSIVERFELFIGGAEFANSFSELNDPIDQRNRLEAQALLRERGDDEAQPIDENFIQAMECGMPPTGGVGIGIDRLTMLLTGNRWIKDVILFPILRSENI

SEQ ID NO: 190689 - protein, 512 aa, Unknown
  Bacterial polypetide isolated from the Sargasso Sea
MSEIKEARLQKASSLVNKGFASYAQSFKVSHTTSFLIQKFDHLENGQEEDFSVSIAGRVLAKRVMGKIAFFTISDQEGQIQLYLDKRIINFNLEKQKLLSFEDLKEIVDIGDWIGVYGTIKKTNKGELSIKVEKWEMLSKSLQPLPDKWHGLTDIEKRYRQRYLDLIVNPHSKNVFKTRAKCISFIRKWLDNRNFLEIETPILQSEAGGAEARPFITHHNTLDIPLYLRIATELHLKRMVVGGFEKVYELGRIFRNEGISTRHNPEFTSVEIYEAYSDYVDMMNLTEELIKDIVADACGSLIINYQNKEIDFSKPWLRISMKAIVKKYTGIDFDSFSGDFLAAKQAVKNINVDCSNKVNTMGRLLNEVFEQKVESKLIEPTFIIDYPVEISPLARPHHDNKEIVQRFELFIVGRELANAFSELIDPVDQRERMQLQQSLRDEGDLEAHCIDEDFLNALEIGMPPTGGLGIGIDRLIMLITNSASIRDVIPFPLLKPEITSKKSEKLPSNEVK

SEQ ID NO: 190690 - protein, 497 aa, Unknown
  Bacterial polypetide isolated from the Sargasso Sea
MSEENKSLSQIINYRIEKLSKLKEMGFEPYPHKYDRTHSSTEILNNFENLEDKDVSISGRVMALRKMGKASFIHIMDAFGQIQVFIKKDTVGEKVYEAFKLIDIGDFLGICGLVFKTKTQEISINTRQFTILSKSIRPLPIVKEKEGEVFDAFKDKELRYRNRHLDLIVNPETREVFRKRTQIISDIRSTLDSKQFLEVETPVLQPIYGGANARPFTTHHNTLGQKLFLRIADELYLKRLIIGGYEKVYEIAKDFRNEGMDRSHNPEFTMLEFYWAYADYNDCMILVEEIIRSAAKKVGKLTIKWGEIDIDLSKKFECKTFYGLLNEATGKDISLLDDNDLFDVCKSQNLEIEKNANTGQMLDSLMSTLIEPKLINPTFVIDYPKSISPLAKLKRDGSQNIVERFELFIGGSEFANSFTELNDPIDQRERLEAQALLREKGDEEAQPIDEDFIRAMEVGMPPTGGVGIGIDRLVMLLTNNRWIRDVIFFPTMRAEKH

SEQ ID NO: 190691 - protein, 341 aa, Unknown
  Bacterial polypetide isolated from the Sargasso Sea
EQRYRKRYLDLITNSESLEIFKKRSQIISSIREFFINHEYLEVETPMMHSILGGAAAKPFTTHHNALDMDLYLRIAPELYLKRLVVGGMEKVFEINRNFRNEGLSTKHNPEFTMLEYYTAFADFNDQMEFLERLFKFVSEEVLGSSKLETENISYDFSKPFQRISLKETVSKKLSIDPISFDDRGFLLDLGKRYKFEDIENLSNGKILFGLFEELVESELINPTFITGYPKDVSPLSRVSDENPHEVDRFELFIGGKEIANGFSELNDPDDQAERFQDQVSQKSAGDEEAMEFDSDYIEALEYGLPPCAGVGIGIDRLVMLLTGAQSIRDVLLFPQMKPKN

SEQ ID NO: 190692 - protein, 490 aa, Unknown
  Bacterial polypetide isolated from the Sargasso Sea
MTDEKDLIRERKKKLENISEFSLAYPNKVIKSDTTRSLINTCSNEDKKSLEEKNILTNICGRVMTIREMGNSVFADLHDEYGKIQIYLNKKNLDEISQNMFKNLDLGDIVGISGIIFKTKTQELTINVDSFLILSKCLRPLPEKFHGIADIEIKYRQRYLDLMTNFETRIHFKKRSKIIKIIRNYFDERDYIEVETPMMHIIPGGANAKPFITHHNSLDMDLFLRIAPELFLKRCIIGGYEKVFEINRSFRNEGLSIKHNPEFTMIEFYSAYENYEYLMQTIEDIFKTLVLNLDINKKSYYQDFEIDYSTPFKRITFHECIAENADNFDNTHINDLSYLKKYCLENNLKTQNGTSIEILQLEIFEKMIEKKLISPTFVTHYPTKVSPLARATDDNPDLTERFELFVAGREIANGFSELNDPLEQSKRFSNQLSVSDDEKMKYDEDFIKAMEYGMPPTAGAGIGIDRLIMLLTDKSSIRDVLLFPHMKPKS

SEQ ID NO: 190693 - protein, 269 aa, Unknown
  Bacterial polypetide isolated from the Sargasso Sea
MSDKNSKSDNRLVDERREKLNSLREGGFNYPSTIKINSSTASIIDEYDSMKKEDLEGIDREFSIAGRMMAKRVMGKSSFSRIKDGKGSIQVFLSNSDLGDDSYESFKTMDVGDIVWVRGSLFRTKTDELTLNVKELVLLSKSLRPLPEKYHGLTDTEIRYRRRYLDLMMSEESAEVFKIRSKVVTQIRSFLNDLDMMEVETPMMHPIPGGAVARPFITHHNTLDQDFYLRIAPELYLKRLTVGGFDRVYEINRSFRNEGVSTQHNPEFT

SEQ ID NO: 190694 - protein, 255 aa, Unknown
  Bacterial polypetide isolated from the Sargasso Sea
MDKENLSGEKALIEERRKKLEQLRDKGDAYGNSFKPQNSASKLHEEYGVFSKEDLVKKDIKNISVAGRIVLKRVMGNASFATLRDSSGDIQIYVTKNNVHESVYEDFKTWDLGDIVGVSGSLFRTKTDELTIDVWDLEMITKSLRPMPEKFKGLTDIEARYRQRYLDLMTNNETKEVFVKRTKIIDSMRRKMNEYGYLEVETPMMHPLAGGAVARPFVTQHNALGQDLYLRIAPELYLKRLLVGGFDRVLKLIEV

SEQ ID NO: 190695 - protein, 496 aa, Unknown
  Bacterial polypetide isolated from the Sargasso Sea
MSEDKIGGEKAILEERRKKLENLRDKGVAYANSFRPKNSANEIHKLYGETSKDDLAEKNIKNISIAGRIVLKRVMGNASFATLRDASGDIQIYVTKNNIDESVYDDFKTWDLGDIVGVSGSLFRTKTDELTIEVWDLEMITKSLRPMPEKFKGLTDVEARYRQRYLDLMTNTQTKEIFIKRTRIIDSARKKMNERGYLEVETPMMHPLAGGAVARPFVTQHNALGRDLYLRIAPELYLKRLLVGGFDKVYEINRSFRNEGLSTKHNPEFTMMEWYEAYATMQNQMDLTKDIIVNAAKAIDCGERIQWDELEIDLGKFSQEKLSDLVLSYNKDLSKKDLNDRSALEKYFKGLGKETDKSWGTGRLLLEIFEETVEERLINPTFVTEYPVEVSPLSRRNPDNPDFADRFELFIGGKEFANGFCELNDPDDQASRFEAQVAAKDSGDKEAMDFDKDYITALEHGMPPAVGVGLGIDRLVMLLTNQSSIRDVLLFPQLKN

SEQ ID NO: 190696 - protein, 564 aa, Unknown
  Bacterial polypetide isolated from the Sargasso Sea
MSNLSEQELIRREKLKKIRELGIEPYPADLFKISSNSKTIKSNFKEGSKVIVAGRLMSRRIQGNASFAELQDSSGRIQVYFNRDEICTSEDKSKYNELYKRLLDIGDIIGIEGELFKTKVGEKTIMVKDFKLLSKSLKPLPLPKTDAEGNVYDEFTSPELRYRQRYVDLIVNKNVKDTFIKRSKIISSIRNSLENEEFIEVETPILQPIPGGAAAKPFITHHNSLNIPLYMRIANELYLKRLIVGGFNGVFEFAKDFRNEGMDRTHNPEFTNLEFYVAYKDYNWMMSFTEKLLENVAIDCNGKSIVEYGDKQIEFKGPYKKIGIIDAIKEETGIDALSLNESELREAAQKIGIEIDDTMGKGKIIDEIFGEKCESKFIQPTFIIDYPKEMSPLTKQHRDNPLLTERFELLINGSEIANAYSELNDPIDQLERFEDQLKLSEKGDEEAMFIDYDFVRSLEYGMPPTSGIGIGIDRLVMLLTNHKSIQEVIFFPQMKPENELKVDLNEDEKLIYDRVKELKKTDLTSLKESSGLSNKKWDKSIKLLTKNNLVKVSKDDQGLFVEIV

SEQ ID NO: 190697 - protein, 497 aa, Unknown
  Bacterial polypetide isolated from the Sargasso Sea
MSDQHKSLKQIMAFRLEKLDTLRKAGVDPYPVKFNPSHSSESIKSNYDELEGKSVKIAGRIMAIRKMGKASFAQIMDCEGKIQFFIRRDDVGDESYSYFKLLDIGDYVGVEGLVFTTKTGEISVHTSTITILAKSIRPLPVVKEKDGQVFDSFSDKEQRYRNRHLDLILNPEVKETFIKRASIIRSIREFLDAKGFLEVETPVLQPLYGGANARPFTTHHNSLDQTLYLRIADELYLKRLIIGGFDRVYEIAKDFRNEGMDRNHNPEFTMLEFYWAYADYEDCMELVEDLIRRSAKKINALSINWGGMDIDLSKKFIRKPFIELLNEATGHDISELDQEQLKKICSEKDINIDDNSNLGQILDELMSQLVEPKLIQPTFVIDYPKAISPLAKAHRDGDPNLVERFELFIGGAEFANSFSELNDPIDQRERLEAQAILRDRGDDEAQPVDESFIQAMECGMPPTGGVGIGIDRLTMLLTSNRWIKDVILFPTLRSESP

SEQ ID NO: 190698 - protein, 494 aa, Unknown
  Bacterial polypetide isolated from the Sargasso Sea
MENLSEDRIIKDRLEKLEKLRKLKIDPYPNRWEKDRTIIHDAITAYDDSNESANSKQLCISGRIIAKRAMGKIIFFDIKDQSGKIQLHYKEEESEINKDFLDLIDIGDIVGVEGHLFRTRRGELTLDLHDIVILTKAIRPLPDKWSGLKDNEIRYRQRYLDLISNEESLEIAVKRSKAISSVRNFMNNRGFLEVETPILVDIPAGGRAIPFSTYHESLEKDLFLRIATELHLKKLIVGGIEKVYEIGRLFRNEGIDHDHNPEFTTMESYEAYEDYNTVMRMVEDLVSYVSIEVNGTTKINISDDLTIDLAPPWQRLDLRKAIIDNTGIDFLKFKNNNDLANEMKNKGFVADQNEAWGILLDRLISQGVEPKLIKPTFLLDYPIEMSPLAKLKPGSKDVVERFEAFVLGHELANAFTELNDPIDQRNRFLEQEKQRKNLGDKEADRLDEDFLISIEHGMPPTGGLGIGIDRLIMLITAQDQIREVLLFPQLRSKK

SEQ ID NO: 190699 - protein, 296 aa, Unknown
  Bacterial polypetide isolated from the Sargasso Sea
ETPMMHPLAGGAVARPFVTQHNALGQDLYLRIAPELYLKRLLVGGFERVFEINRSFRNEGLSTKHNPEFTMMEWYQAYASMQDQMDLTKDIILNAAKAADCESKIEWGDIKVNLNNFKQSTLSDLVLEFNKELSKDDLSNKKKLQNILTSNKVKVEKSWGIGRILLEVFEATAEGKLIDPTFVTEYPVEVSPLSRRNEENPDYADRFELFIGGKEFANGFCELNDPDDQATRFEEQVAAKDSGDKEAMDYDQDYITALEHGMPPAVGVGMGVDRLVMLLTNQSSIRDVLLFPQLKS

SEQ ID NO: 190700 - protein, 367 aa, Unknown
  Bacterial polypetide isolated from the Sargasso Sea
MNVKELVLLSKSLRPLPEKYHGLTDTEIRYRRRYLDLMMSEESAEVFKIRSKVVTQIRSFLNDLDMMEVETPMMHPIPGGAVARPFITHHNTLDQDFYLRIAPELYLKRLTVGGFDRVYEINRSFRNEGVSTQHNPEFTMLELYVAHETPDFLMNMIEDMMRAISQELFGSDKIEYQGETIDFTGHFQRLTMEESVLKYNPELSKEKVRDAEYLRSFAQGIDISVENDAGAGKILFEIFEKTVEHQLTQPTYITSYPREISPLSRANDDDPWIVDRFEFFIMGRELANGFQELNDPDDQAERFEDQVKARDGGDDEAMFFDQDYIEALEYGMPPTAGLGVGIDRLVMLFSNQASIRDVLLFPHMRSK

SEQ ID NO: 190701 - protein, 498 aa, Unknown
  Bacterial polypetide isolated from the Sargasso Sea
MDEKVDQLKVRLGKLEKIRELGTEPYPYSFKQSHTLLEVIEQSDKLLENQQIITIAGRMLAIRGKGKASFCNIQAQHKRLQVYVRLDVLGESAFEMYMLCDIGDHLGVSGSLMRTNTGELTLRASKVELLAKSVRPLPVPKIQEKEGQRIVYDEVTDKEFRYRQRYVDLILNPHVSEVFRKRALIFQTIRNYLLEECFLEVETPTLQSVYGGANATPFVTHHKALDQQFFLRISNELYLKRLIAGGFDAVFEFVKDFRNEGIDRTHNPEFSSLEFYQAYVDYTKIMHHTEKICERCALAVNGKTKFEYEGNTIDMKAPWPRLTMLEAIKELGSIPFHSMSDSDVQLLLDNNGWELEGDYNRGLATQLVFEKTCEDKLIQPTFITDHPKETSPLCKQTRQNPELIERFEVFINGWEIANAYSELNDPVIQRRLMEEQVERGRGGEKDTHPLDEDFLRAMEYGMPPMGGVGFGIDRIVMLLTGQSTIRDVILFPTMRTEF

SEQ ID NO: 190702 - protein, 491 aa, Unknown
  Bacterial polypetide isolated from the Sargasso Sea
MENKSLKQIIENRLEKLKKIRELGIEPYAYDYDSSHHTSEINEKLIDTKVSLAGRVMSLRKMGKASFANIQDQEGRIQFYIARDDVGEDNYNLFKLTDIGDFVGIEGKVFKTKTDALTIKVSHLTILSKNIKPIPDVKEKDGEKYNLVSDKEFRYRKRFLDLIINPETKNNYVKRFKIINSIRSFLNDHGYIEVETPVLQPIYGGANAKPFTTHHNALDQDFYLRIATELYLKQLIVGGFEKVYELSKDFRNEGIDRSHNPEFTMLEFYQAYSDYNFMMDFVEQMFKKVVKDLDMKKISWDGHKIDFSKKFARKTMGELIKDHTGNDIDISDYSAVYKVCKNLKLEVSKKDSLATLIDEIMRRKVEPNLIQPTYVINHPVEISPLAKVNRDGDKDFTERFELFIAGMEFANGFSELNDPIDQRKRFEDQSSKKDGGDEEAFPIDENFLEAIETGMPPTAGVGIGIDRLVMLLIDTRWIRDAIIFPTLKSLK

SEQ ID NO: 190703 - protein, 484 aa, Unknown
  Bacterial polypetide isolated from the Sargasso Sea
MTDKPTESELLELRKAKLDELRASGNAFPNKFKRDSLADDLHSLYGELENNDLEKKKEVYSVAGRIMLQRIMGKASFMTIQDMSGQIQAYLTKNDLPEGVYESFKAWDLGDIVGLKGKLFKTKTGELTIHANEIELLTKSLKPLPEKHAGLVDTEQRYRKRYLDLITNQDSREIFKQRSFLIKEIRSFFDGEGFMEVETPMMHSTLGGAAAKPFITHHNTLDLDLYLRIAPELYLKRLVVGGIEKVFEINRNFRNEGLSTKHNPEFTMLEYYTAYADFNDQMLFLERLFGHLSNELSGTSKITIEGKDYDLSKPFKRIGLLESIATKLSISIDDLSDRNKLEELSKTHNIEDYKSYSDGKLQFELFEKVVEDDLIEPTFIIDYPVEVSPLSRLSDNKEGLVDRFELFIGGNEIANGFSELNDPEDQAERFKAQVEQKASGDEEAMEYDEEYIEALEYGLPPCAGVGIGIDRLVMLFTGAESIRD

SEQ ID NO: 190704 - protein, 267 aa, Unknown
  Bacterial polypetide isolated from the Sargasso Sea
VVGGFERVYELGRIFRNEGVSTRHNPEFTSVEIYQAYSDYIGMMELTEQMVSAVCQEVCGSCQITYQGTEIDLSPPWRRATMHELVEEATGLDFQSFQSREEAAAAMAAKGLYAPALADSVGRLLNEAFEQAVETTLIQPTFVTDYPVEISPLARPHRSKPGLVERFELFIVGREHANAFSELTDPVDQRQRLEAQQARKAAGDLEAQGLDEDFVTALEVGMPPTGGLGIGIDRLVMLLTDSPSIRDVIAFPLLRPEPRAEDAPAMG

SEQ ID NO: 190705 - protein, 252 aa, Unknown
  Bacterial polypetide isolated from the Sargasso Sea
VSTRHNPEFTSVEIYQAFADYNDMMDLTEELISSVTQQVCGSTQITYQGTEINLAPGWRRATMHELVQEATGLDFTGFSSRREAAAAMEAKGLQTPALADSVGRLLNEAFEQAVEETLIQPTFVTDYPVEISPLARPHRRKPGLVERFELFIVGREHGNAFSELTDPVDQRQRLEAQQERRAAGDLEAQRVDEDFLNALEVGMPPTGGLGIGIDRLVMLLTDSPSIRDVIAFPLLRPESRDGSAAVDNGSTE

SEQ ID NO: 190706 - protein, 311 aa, Unknown
  Bacterial polypetide isolated from the Sargasso Sea
HEKKMNEAGYLEVETPMMHPLAGGAVARPFITQHNALGQDLYLRIAPELYLKRLLVGGFEKVFEINRSFRNEGLSTKHNPEFTMMEWYQAYASMQDQMDLTRDIILNAAEAAACGTDLEWDSVKINLGNFNQSTLSDLVTKHNKDLTSNDLTDRKKLEEFLNNRKIKIEKSWGIGRMLLEIFEETVESNLIDPTFVTEYPVEVSPLSRRSEDNPEFADRFELFIGGKEFANGFCELNDPDDQASRFEDQVAAKDSGDKEAMDYDHDYITALEHGMPPAVGVGMGVDRLVMLLTNQSSIRDVLLFPQLKSSE

SEQ ID NO: 190707 - protein, 335 aa, Unknown
  Bacterial polypetide isolated from the Sargasso Sea
DISPESFQPDNINYRISGRVIAIRSFGKSAFIKIVDNMERIQIFISNNSAGKEKMDFFKKFVDVGDFIGIEGHCFFTKTQELSIEAKDIEILTKSINTLPEKWHGLTNVETRYRQRYVDLISNDEVKQIFLQRSQIVNNIRNFLVNKGFLEVETPILHTVAGGAAAKPFKTYHNTLDMDLILRIAPELHLKRLVVGGMEKVFEIGRNFRNEGISTQHNPEFTMIELYEAYSNYELMMNMIEELVISCVDLYSNDRKIVYQEKEIDFNGPWERVHMIEWLSEKLGYSVLDNSDKILKEADKMKINHFDLPGKAITEIFEEKYLKGVLNPVFVYGFP

SEQ ID NO: 190708 - protein, 97 aa, Unknown
  Bacterial polypetide isolated from the Sargasso Sea
MANAFSELIDPVDQRERMQLQQSLRDEGDLEAHCIDEDFLNALEIGMPPTGGLGIGIDRLMMLITDSASIRDVIPFPLLKPENTSKKSEKLPSNEVK

SEQ ID NO: 190709 - protein, 495 aa, Unknown
  Bacterial polypetide isolated from the Sargasso Sea
MTENLSENELLQQRRSKLDELRKKDKAYPNSFRRDSLSQDLKNQYAQMSKEELEENSIEVSVAGRIMLQRIMGKASFITLQDMKGQIQAYVRSNDLPDGDYEEFKTWDLGDIVGIKGTLFITKTGELTVNANSIEMLTKSLRPLPEKHSGLVDTEQRYRKRYLDLITNQESLEVFQKRSQIISSIRDFFIGHEYLEVETPMMHSILGGAAAKPFTTHHNALDMDLYLRIAPELYLKRLVVGGMEKVFEINRNFRNEGLSTKHNPEFTMLEYYTAYADFSDQMDFIEKLFKHISNQVFGTFKLKQDGIEFDFSQPFTRIRLKDSVAQKLSVDSNLLDNRDFLLEIGEKYKIENLKNLSNGKILFELFEELVEDDLIDPTFITGYPKDVSPLSRSTDGDDSEVDRFELFIGGKEIANGFSELNDPDDQAERFKDQVAQKSAGDEEAMEFDSDYVEALEYGLPPCAGVGIGIDRLVMLLTGAQSIRDVLLFPQMKPKV

SEQ ID NO: 190710 - protein, 413 aa, Unknown
  Bacterial polypetide isolated from the Sargasso Sea
KNISIAGRIVLKRVMGNASFATLRDASGDIQIYVTKNNIDESIYDDFKTWDLGDIVGVSGSLFRTKTDELTIEVWDLEMITKSLRPMPEKFKGLTDVEARYRQRYLDLMTNTQTKEIFIKRTRIIDSARKKMNERGYLEVETPMMHPLAGGAVARPFVTQHNALGRDLFLRIAPELYLKRLLVGGFDKVYEINRSFRNEGLSTKHNPEFTMMEWYEAYATMQNQMDLTKDIIVNAAKAIDCGEKIQWDKLEIDLGKFSQEKLSDLVLSHNNDLSKKDLSDRSALEEYFKGLGKDTDKSWGTGRLLLEIFEETVEEKLINPTFVTEYPVEVSPLSRRNPDNPDFADRFELFIGGKEFANGFCELNDPDDQASRFEAQVAAKDSGDQEAMDFDKDYITALEHGMPPAVGGRARNR

SEQ ID NO: 190711 - protein, 495 aa, Unknown
  Bacterial polypetide isolated from the Sargasso Sea
MTEERKSLNQIINIRKEKLNKIISKGINPYPPIFKPTHLSGEILSNFKTQEKKLVSLAGRILSIRKMGKASFFHLQDSMGKIQIFIKKDDIGESEYENFQLLDIGDFVGIEGDVFKTKVGEISVKVKSMTILCKSIRPLPIVKEKEDEVYDAFTSKEMRYRNRHLDLIVNPQVRETFYKRTKIISSIRSFLDNLGFLEVETPILQPIYGGANARPFTTYHNALDQQFYLRIADELYLKRLIVGGIDRVYEISKDFRNEGMDRNHNPEFTMLEFYWAYADYEDNMELVEKMIRSVSKQVDSSKINWDGNEIDLTKKFKRIPFFKLLNEKLGEDISQLDINKLKKLCIANNLSIEKNENYGQLLDQLMSEFIEPELIQPTFVTDYPTVISPLAKKHRNGNSDIVERFELFIGGSEFANAFSELNDPVDQRERFESQQKLAIKGDEEAHPVDENFLQAIESGMPPTAGVGIGIDRLVMLLTGNRSIKDVILFPAMKNE

SEQ ID NO: 190712 - protein, 507 aa, Unknown
  Bacterial polypetide isolated from the Sargasso Sea
MSEIKEARLQKANSLVSKGFASYAQSFRVSNTTKFLIQKFDYLENGQEEDFSVSLAGRVMAKRVMGKIAFFTISDQEGQIQLYLDKRIVDLNLEKQKLLSFEDIKEIVDIGDWIGVYGTIKKTNKGELSIKVEKWEMLSKSLQPLPDKWHGLTDIEKRYRQRYLDLIVNPHSKNVFKTRAKCISFIRKWLDNRNFLEIETPILQSEAGGAEARPFITHHNTLDIPLYLRIATELHLKRMVVGGFEKVYELGRIFRNEGISTRHNPEFTSVEIYQAFSDYVDMMNLTEELIKDIVADACGSLIINYQNQEIDFSKPWTRISMKDIVKKYTGIDFDSFSGDFQAAKQAAKSINVDFSNKVNTIGRLLNEVFEQKVESKLMQPTFVIDYPVEISPLARPHLDNKEMVQRFELFIVGRELANAFSELIDPVDQRERMQLQQSLRDEGDLEAHCIDEDFLNALEIGMPPTGGLGIGIDRLIMLITDSASIRDVIPFPLLKPEITSKKVKNYP

SEQ ID NO: 190713 - protein, 508 aa, Unknown
  Bacterial polypetide isolated from the Sargasso Sea
MTEPTQTQPAVTADENQIISERREKLRALREQGVAYPNDFRPEHHAADLQAKFADSDKATLEANPVEVSVAGRMMLKRVMGKASFATVQDGSGQIQFFVTPNDVGAETYDAFKKWDLGDIVAARGVLFRTNKGELSIQCKELRLLSKALRPLPDKFHGLSDQEMRYRQRYVDLIVTPETRDTFRARTKTIASIRKFMDNAEFMEVETPMLHPIPGGAAAKPFVTHHNALDMQMFLRIAPELYLKRLIVGGFERVFEINRNFRNEGVSPRHNPEFTMMEFYAAYTDYRWLMDFTEQLIRQAAIDALGTATIQYQGRELDLAKPFHRLTITQAIQKYAPDYTDGQLSDDAFLRTELKRFGVDVSQPAFLNAGIGALQLALFEETAEAQLWEPTFIIDYPVEVSPLARASDTVPGITERFELFMTGREIANGFSELNDPEDQAARFKKQVEQKDAGDEEAMFFDADYIRALEYGMPPTGGCGIGIDRLVMLLTDSPTIRDVLLFPHLRRED

SEQ ID NO: 190714 - protein, 511 aa, Unknown
  Bacterial polypetide isolated from the Sargasso Sea
MSEQTTTPEVDQTLDLNNEMQERRSKLAALRAQGNPFPNDFRRDSLSGDLHAEFGDKSADELAALGKRVKIAGRIMTRRIMGKASFATLQDMAGKIQVYVTRDDLPEGFYNEQFKKWDLGDIVGVEGTLFRTNTGELSIHVSDIRLLTKALRPLPEKHKGLTDQEARCRQRYLDLIANEESRKTFVTRTKVVAGIRKFLNDKRFMEVETPMMQVIPGGASARPFITHHNALDIDMYLRIAPELYLKRLVVGGFERVYEINRNFRNEGISVRHNPEFTMLEFYMAYADYIDLMDLTEEMLRTLAQDILGDTKIRYAKEGEEGLTIDFGQPFQRLSMVDSILKYNPDVTRDDLATLEKATAVAKRLKIELMKSWELGHVITAIFEETVEHMLLQPTFITEYPAAVSPLARRNDQNPDVTDRFEFFIGGRELANGFSELNDAEDQAERFQAQVDQKAAGDDEAMFYDADFVTALEHGLPPTAGQGIGIDRLVMLFTNSHTIRDVILFPALRPQK

SEQ ID NO: 190715 - protein, 488 aa, Unknown
  Bacterial polypetide isolated from the Sargasso Sea
MDTKELTKVQKDREEKLKKLRSEGFNFPNDFEKKDQIGDLVEKYNSLAKEKLEAKKVTVKTAGRIMLKRVMGNAAFMTFEDSTGRIQTYFSKDNLAEQLDSVKELDMGDIIGVEGVLFRTKTDELTVEVKKIRLLTKSLKPMPEKHKGLTDIETIYRQRYVDLMSNPESRELFVKRNKIIQSLRKNLEEEGFLEVETPMMHPIPGGANARPFETHHNALDKQLFLRVAPELYLKRLLVGGYEKVFEINRNFRNEGISTIHNPEFTMLEFYEAYGDLNRTAKLIQKLVQDSVLAVNDSLNIAYEDKPLNLEGDFRVVALKDLVKEKLKLSSLDTEDEIFNAAKENKLKLHKSWGWGKVLLELFEAFVEKDLWEPTFVKDYPYEVSPLSRRKDDNEDYTDRMELFIAGREFSNFFCELNDPHDQEQRFTDQVEQKKAGDNEAMFFDDDYINALQHGMPPAVGVGIGIDRLIMLATDRRSIRDVVFFPTLK

SEQ ID NO: 190716 - protein, 275 aa, Unknown
  Bacterial polypetide isolated from the Sargasso Sea
ESLIEKVCLEINGKTKVTFDSKKIDFKAPYERVSITDAITKFTGYNISGKNESELRSICKDLSIEIDDSMGEGKLIDAIFGNKCEKNFINPTFITDYPKSMSPLTKEHRSNPNLTERFELIVNGMEIANAYSELNDPIDQLKRFEDQLELSKKGDDEAMFIDMDFIKSLEYGMPPTSGIGIGIDRLVMLMTDKTSIQEVLFFPQMKPIKKEPEISEDSKVVYDKLKNINEILLVDFKSEFDISNKKWDKILKELRGNDLIDIFKTDDGSLFIKLI

SEQ ID NO: 190717 - protein, 496 aa, Unknown
  Bacterial polypetide isolated from the Sargasso Sea
MDKENISGEKALIEERRKKLDQLRDRGDAYGNSFKPKNNASSLHEEYGDVSKDDLAEKNIKDISVAGRIVLKRVMGNASFATLRDASGDIQIYVTKNNVDESVYEDFKTWDLGDIVGVSGSLFRTKTDELTIDVWDLEMITKSLRPMPEKFKGLTDIEARYRQRYLDLMTNNDTKKVFIKRTKIIDSLRKKMNESGYLEVETPMMHPLAGGAVARPFVTQHNALGQDLYLRIAPELYLKRLLVGGFERVFEINRSFRNEGLSTKHNPEFTMMEWYQAYASMQDQMDLTKDIILNAAKAADCELKIEWGDIKVDLNNFKQSTLSDLVLEFNKELSKDDLSDKKKLQNILTSNKVKVEKSWGIGRILLEVFEATVESKLIDPTFVTEYPVEVSPLSRRNEENPDYADRFELFIGGKEFANGFCELNDPDDQATRFEEQVAAKDSGDKEAMDYDQDYITALEHGMPPAVGVGMGVDRLVMLLTNQSSIRDVLLFPQLKS

SEQ ID NO: 190718 - protein, 317 aa, Unknown
  Bacterial polypetide isolated from the Sargasso Sea
RSKIINSIRSFLNNHGYIEVETPVLQPIYGGANAKPFTTHHNALDQDFYLRIATELYLKQLIVGGFEKVYELSKDFRNEGIDRSHNPEFTMLEFYQAYSDYNFMMDFVEEMFKKVVNDLGMKKISWDGHKIDFSKKFVRKTMGELIKDHTGNEVDISNHSAVYKLCKDLKLKVTKKDSLATLIDEIMRRKVEPNLIQPTYVINHPVEISPLAKVNRDGNKDFTERFELFIAGMEFANGFSELNDPIDQRKRFEDQSKKKDSGDEEAFPIDENFLEAIETGMPPTAGVGIGIDRLVMLLIDTRWIRDAIIFPTLKSLK

SEQ ID NO: 190719 - protein, 436 aa, Unknown
  Bacterial polypetide isolated from the Sargasso Sea
MSEENKLILERKRKLQALSELTALYPNDFRRNISVQELVAKYGDKAKEDLEGEDTTYLIAGRILTIRKMGNSTFANLHDDSGKIQLFLSKNGTGKEQYSLLDQTDLGDIVGVKGVIFKTKTGELTLNITEYRILSKSLRPLPEKYHGLSDIEIKYRQRYLDLMISEESKNVFKDRIKIISLIRKYFEDNKYFEVETPMMHPIAGGAAAKPFITHHNSLDMELYLRIAPELYLKRLIIGGFEKVFEINRSFRNEGLSVKHNPEFTMIEFYAAFEDYHYLMNFIEELFKSLFDSLGFKNTVTYQEQAINITKKFERINFHDSIIKFCDSISSENLNDYSYLESYCKNHDIEVSVKDSLHKTQLDIFEKKVEGKLIQPTFITEYPTAVSPLSRRVDSNPEIVERFELFIAGREIANGFSELNDPIDQSERFHDQLATDE

SEQ ID NO: 190720 - protein, 495 aa, Unknown
  Bacterial polypetide isolated from the Sargasso Sea
MSDQQKSLKQIMDFRLEKLDQLINNGINPYPVKFNSTHLSHEIIENFSEYEGKSVVIAGRIMVIRKMGKASFFQVMDSSGRIQIFIRRDDIGDASYSNFKLLDIGDFIGIEGEVFKTKTGEISIKTTVMTILAKSIRPLPVVKEKDGQYFDSFTDKEQRYRNRHLDLILNPQVRETFHKRTKIIREIRNFLDNKGFLEVETPILQPIYGGANARPFTTHHNALNQKLFLRIADELYLKRLIIGGIDRVYEMSKDFRNEGMDRNHNPEFTMLEFYWAYADYEDCMDLVEQLFHQVAKKVGSHNLSWGDNNIDLSKKFHRKPFLEALGEATGHNFDEFDEEKVRKICKETGIELEENSNLGQMLDGLMSALVEPKLIEPTFIIDYPKVISPLAKTHRNGNPNLVERFELFIGGAEFANSFSELNDPIDQRKRLEDQVKLKDLGDEEAQPIDEDFIQAMECGMPPTGGVGIGIDRLVMLLTGNRWIKDVILFPTLRPE

SEQ ID NO: 190721 - protein, 286 aa, Unknown
  Bacterial polypetide isolated from the Sargasso Sea
MSDKNSKSDNRLVDERREKLNSLREGGFNYPSTIEINSSTASIIDEYDSMKKEDLEGIDREFSIAGRMMAKRVMGKSSFSRIKDGKGSIQVFLSNSDLGDDAYESFKTMDVGDIVWVRGSLFRTKTDELTLNVKELVLLSKSLRPLPEKYHGLTDTEIRYRRRYLDLMMSEESAEVFKIRSKVVTQIRSFLNDLDMMEVETPMMHPIPGGAVARPFITHHNTLDQDFYLRIAPELYLKRLTVGGFDRVYEINRSFRNEGVSTQHNPEFTMLELYVAHETPDFLMNM

SEQ ID NO: 190722 - protein, 500 aa, Unknown
  Bacterial polypetide isolated from the Sargasso Sea
MTEQVQDENKLIAERRAKLESIRPNCSANAHPNTFRRTHKAAELQEKYGQNTKEELEALGFKTSIAGRIMAKRGPFLVIQDVSGRIQAYAEKGVQADLKDRYQGLDIGDIIGVTGQLHLSGKGDLYVNMEEYQLLTKALRPLPEKFHGLTDQETRYRQRYVDLIVNEESRQAFVMRSKVVAAIRNFMIKKEFMEVETPMMHVIPGGASARPFITHHNALDMPMYLRIAPELYLKRLVVGGFERVFEINRNFRNEGLSPRHNPEFTMMEFYMAYADYKDLMDLTEELLSSIAIELLGSAQMPYGEHTVDFGGPYARLSMLEAIQKYNPDNATIQAMTYEQVKDLEFMRELAISLGIKIEKFWTCGQLLEEIFGETAEWQLMQPTFITGYPADISPLARRNDDNHFITDRFEFFIGGREVANGFSELNDAEDQDSRFKAQVDAKDAGDDEAMFYDADYITALEHGLPPTAGQGIGIDRLVMLFTNTHTIRDVILFPAMRPQA

SEQ ID NO: 190723 - protein, 105 aa, Unknown
  Bacterial polypetide isolated from the Sargasso Sea
MVQRFELFIVGRELANAFSELIDPVDQRERMQLQQSLRDEGDLEAHCIDEDFLNALEIGMPPTGGLGIGIDRLIMLITNSASIRDVIPFPLLKPETTSKKMKNYP

SEQ ID NO: 190724 - protein, 331 aa, Unknown
  Bacterial polypetide isolated from the Sargasso Sea
MSDSNISGESSILEERRRKLEELRERNIAYINNYTPTNSSKDLHDAYDHLNKEDLESKKITNLSLAGRIVLKRVMGNASFVTIRDGSGDIQVYITKNNIDPDLYKNFKTWDLGDIIGVSGNLFKTKTEELTIEAHSIILITKALRPMPEKFKGLVDVEIKYRQRYLDLMSSPESKEVFENRSRIVSSVRSTMLEDGFLEVETPMMHSIPGGAVARPFVTQHNALDRELFLRIAPELHLKRLLIGGFEKVFEINRSFRNEGLSTRHNPEFTMLEFYAAFATFNGTLDFTKNIIQTASEAIGNKNNIEWDGDKIDLSNFSIKSLNDLVLEHNP

SEQ ID NO: 190725 - protein, 495 aa, Unknown
  Bacterial polypetide isolated from the Sargasso Sea
MTEKLTENELLEQRRLKLDALRNRGVAYTNSFRRDSLSQDLKSQFDGTSKEELEEQSHEVAIAGRIMLQRIMGKASFITLQDMKGQIQAYIRSNDIPEGQYDEFKTWDLGDIVGIKGKLFLTKTGELTVHADSIQMLTKSLRPLPEKHSGLVDTEQRYRKRYLDLITNSESLEIFKKRSQIISSIREFFINHEYLEVETPMMHSILGGAAAKPFTTHHNALDMDLYLRIAPELYLKRLVVGGMEKVFEINRNFRNEGLSTKHNPEFTMLEYYTAFADFNDQMDFLERLFKFVSEEVWGSSKLETENISYDFSKPFQRISLKETVSKKLSIDPISFDDRGFLLDLGKKYKFEDIENLSNGKILFGLFEELVESELINPTFITGYPKDVSPLSRASDENPHEVDRFELFIGGKEIANGFSELNDPDDQADRFQDQVSQKSAGDEEAMEFDSDYIEALEYGLPPCAGVGIGIDRLVMLLTGAQSIRDVLLFPQMKPKN

SEQ ID NO: 190726 - protein, 195 aa, Unknown
  Bacterial polypetide isolated from the Sargasso Sea
DIKLNYQENIIDFKTPLPKIKFYDAIEKYAIDIDVSKLNDREYIESYCLSQSIKISDDHSIAKAHLDIFEKLVEKQFINPTFVTHYPTEVSPLSRSFDDNPELVERFELFIAGREIANGFSELNDPQEQSKRFKAQSESNDDEKMSYDGDFITALEYGMPPTAGAGIGIDRLIMLFTNSPSIRDVLLFPHMKPKK

SEQ ID NO: 190727 - protein, 312 aa, Unknown
  Bacterial polypetide isolated from the Sargasso Sea
FIKKFMESKGFIEVETPILQPKAGGAIAKPFTTHHNALDIDMFLRIAPELYLKRLIVGGFEKVFELGKVFRNEGIDQTHSPEFTMMESYEAYVDVTTVMDMVENMSTYIFDELGIEKNIKFMDIEADFSGPWKRVSMYELVSKKFKVDIKHDSDIKKVKRELKKNLDIKPEAKTVGLLVYELFENYIEDDITSPTFVTDYPVEVSPFARENKKKPGVTERFELFAFGSELANGFSELIDSEEQEDRLKAQAQQKAKGDEEAHVEDQDYVEALQYGLPPTGGLGFGVDRFVMILTNNISIREVLAFPHLKPEN

SEQ ID NO: 190728 - protein, 327 aa, Unknown
  Bacterial polypetide isolated from the Sargasso Sea
PEAREVFRIRAATVQCIRQFLVERQFVEVETPMLHPIAGGATARPFITHHNTLDMEMYLRVAPELYLKRLTVGGLEKVFEINRNFRNEGLSTRHNPEFTMLEFYWAYADYRDAMDLTEELMRELTQSVLGSTEVVYGDATFHFDRPFERMTVVEAILKHNPDLTSDDIAERDAAAAVAERFGIKVEKSWGLGKIQIEIFEETAEAQLQEPTFITAYPMEVSPLARRNDDDPFVTDRFEFFVGGRELANGFSELNDAEDQADRFKAQVAAKEAGDDEAMHFDHDYIRALEYGLPPTAGEGIGIDRLVMLLTNSPSIRDVILFPHLRHE

SEQ ID NO: 190729 - protein, 500 aa, Unknown
  Bacterial polypetide isolated from the Sargasso Sea
MTEQVQDENKLIAERRAKLDSIRPNCSANAHPNTFRRTHKAAELQEKYGQNTKEELEALGFRTSIAGRIMAKRGPFLVIQDVSGRIQAYAEKGVQADLKDKYQGLDIGDIIGVTGQLHLSGKGDLYVNMEEYQLLTKALRPLPEKFHGLTDQETRYRQRYVDLIVNEESRQAFVMRSKVVAAIRNFMIKKEFMEVETPMMHVIPGGASARPFITHHNALDMPMYLRIAPELYLKRLVVGGFERVFEINRNFRNEGLSPRHNPEFTMMEFYMAYADYKDLMDLTEELLSSIAIELLGSAQMPYGEHTVDFGGPYARLSMLEAIQKYNPDNATIQAMTYEQVKDLEFMRELAISLGIKIEKFWTCGQLLEEIFGETAEWQLMQPTFITGYPADISPLARRNDDNHFITDRFEFFIGGREVANGFSELNDAEDQDSRFKAQVDAKDAGDDEAMFYDADYITALEHGLPPTAGQGIGIDRLVMLFTNTHTIRDVILFPAMRPQA

SEQ ID NO: 190730 - protein, 545 aa, Unknown
  Bacterial polypetide isolated from the Sargasso Sea
MKLSEQEKIRREKLDELIKLGINPYPAKLYPVDHLSNDIKTKFSENKKVIIAGRIMSRRIQGNASFAEILDSKGKIQVYFNRDEICKGENKEKYNIIYKKLLDIGDIIGIEGELFTTKVGEKTVLVKDFTLLNKSLRPLPLPKEDSDGKTYDEFTDTEQRYRQRYVDLIVNPEVKETFIKRTKIINLIRDFLNNKGYLEVETPILQTIPGGANARPFVTHHNTLDIPLYLRIADELFLKRLIVGGFDAVYEFSRDFRNEGMDKNHNPEFTILELYVAYKDYFWMMELTESLLEKVCIELNGDTSITFDSKKISFKKPFKRITIFDAIKKYTGYDISNMQENELRDICKKMDIETTDKMGEGKLIDAIFGNKCEKEIIDPTFIMDYPKSMSPLTKEHRDNATLTERFELIVNGMEIANAYSELNDPIDQLSRFEKQLELSKRGDEEAMFIDKDFIRSLEYGMPPTSGIGIGIDRFIMLMTDNTSIQEVLFFPQMKPENPSLDISEESSKILNIIRNNKELNIDDLKGKIDFSNKKWDKFLKELREK

SEQ ID NO: 190731 - protein, 495 aa, Unknown
  Bacterial polypetide isolated from the Sargasso Sea
MSTEKQSLKEIINFRMQKLERLREAGVDPFPHNFKPTNYSNEIKDQFKVLENKDVIVAGRIMAMRKMGKASFFHIEDSDGRIQVYIKKDEVGDSLYNIFKLLDIGDFIGVNGFVFKTKTKEISVHAKSITVLAKSIRPLPIVKEKDGETFDSFEDKEQRYRNRHLDLIVNPEVKEVFRKRTIITSALRSYLDNEGFLEVETPVLQPLYGGANARPFKTHHNTLDQTLYLRIADELYLKRLIIGGIDKVYELSKDFRNEGMDRNHNPEFTMLEWYEAYSDYNDQMNRVEDIIRFAANSIDKMKFDWGDVSIDLSKKFDRKPYLDLLKDATGEDLLEADIKKLRSVCKENSIEISNKENYGQLLDELMRRLVEPNLTQPVFIIDHPREISPLAKSHRSGEVKLVERFELFIGGAEFANSFSELNDPLDQRDRLENQAKLREKGDDEAQPIDDSFIEAMECGMPPTGGVGLGVDRLVMLLTNNRSIRDVLLFPAMRNI

SEQ ID NO: 190732 - protein, 55 aa, Unknown
  Bacterial polypetide isolated from the Sargasso Sea
MYYDEDFVTALEHGLPPTAGQGIGIDRLVMLLADAPSIRDVILFPHMRHSDKQGS

SEQ ID NO: 190733 - protein, 364 aa, Unknown
  Bacterial polypetide isolated from the Sargasso Sea
NEIELLTKSLKPLPEKHAGLVDTEQRYRKRYLDLITNQDSREIFKQRSFLIKEIRSFFDGEGFMEVETPMMHSTLGGAAAKPFITHHNTLDLDLYLRIAPELYLKRLVVGGIEKVFEINRNFRNEGLSTKHNPEFTMLEYYTAYADFNDQMSFLEKLFAHLASELNGSSKISIEGKDYDLSKPFKRVGLLESVATKLSIAQEDLFDRKKLEELSKKHKIEDYKSYSDGKLQFELFEKVVEDDLIEPTFIVDYPVEVSPLSRLSDDKEGIVDRFELFIGGNEIANGFSELNDPEDQAERFKAQVEQKASGDEEAMEYDEDYIEALEYGLPPCAGVGIGIDRLVMLFTGAESIRDVLLFPQMKPKS

SEQ ID NO: 190734 - protein, 452 aa, Unknown
  Bacterial polypetide isolated from the Sargasso Sea
MTDKPNESELLELRKAKLDELRSSGNAFPNQFKRDSLANDLHSSYGELENEDLEKKKDVFSVAGRIMLQRIMGKASFMTIQDMSGQIQAYLTKNDLPEGVYDAFKIWDLGDIVGIKGKLFKTKTGELTIHADEIELLTKSLKPLPEKHAGLVDTEQRYRKRYLDLITNEDSREIFKQRSFLIKEIRSFFDDEGFMEVETPMMHSTLGGAAAKPFVTHHNTLDLDLYLRIAPELYLKRLVVGGIEKVFEINRNFRNEGLSTKHNPEFTMLEYYTAYADFNDQMSFLERLFAYLSHELNGTSKISIEGKDYDLSKPFKRIGLLESVATKLSIPVTDLSDRNKLEELSKKYKIEEYKSYPDGKLQFELFEKVVEDDLIEPTFIIDYPVEVSPLSRLSDDKEGLVDRFELFIGGNEIANGFSELNDPEDQAERFKAQVEQKASGDEEAMEYDADYI

SEQ ID NO: 190735 - protein, 481 aa, Unknown
  Bacterial polypetide isolated from the Sargasso Sea
MDNENLGGEKAILEERRKKLDQLRDRGSAYGNSFKPQNSAKNLHDEYGGFSKEDLAKKNIKNISIAGRIVLKRVMGKASFATLRDASGDIQIYVTKNNVDEDVYEDFKTWDLGDIVGVSGTLFRTQKDELTVDVWDLEMITKSLRPMPEKFKGLTDIEARYRQRYLDLMTNTSTKEVFIKRTKIIDSMRKKMNEVGYLEVETPMMHPLAGGAVARPFITQHNALGQDLYLRIAPELYLKRLLVGGFEKVFEINRSFRNEGLSTKHNPEFTMMEWYQAYASMQDQMDLTRDIILNAAEAAACGTDLEWDNVKINLGNFSQSTLSDLVIGHNKDLTKDDLTDQKKLEEFLNNRKIKTEKSWGVGRMLLEIFEETVESNLIDPTFVTEYPVEVSPLSRRNEENPEFADRFELFIGGKEFANGFCELNDPDDQASRFEDQVAAKDSGDKEAMDYDHDYITALEHGMPPAVGVGMGVDRLVYVTYK

SEQ ID NO: 190736 - protein, 292 aa, Unknown
  Bacterial polypetide isolated from the Sargasso Sea
RDASGDIQIYVTKNNVDESVYEDFKTWDLGDIVGVSGSLFRTKTDELTIDVWDLEMITKSLRPMPEKFKGLTDIEARYRQRYLDLMTNNDTKKVFIKRTKIIDSLRKKMNESGYLEVETPMMHPLAGGAVARPFVTQHNALGQDLYLRIAPELYLKRLLVGGFERVFEINRSFRNEGLSTKHNPEFTMMEWYQAYASMQDQMDLTKDIILNAAKAADCESKIEWGDIEVDLNNFKQSTLSDLVLEFNKELSKDDLSDKKKLQNILTSNKVKVEKNWGIGRILLEVFEATVER

SEQ ID NO: 190737 - protein, 492 aa, Unknown
  Bacterial polypetide isolated from the Sargasso Sea
MRTILVRATEYQTIMTEPTQPNAAQNVAPEVDDNKIMAERREKLRELREQGVAYPNDFRPTHHAEDLQTQYAGTDKEALEANPLEVAIAGRMMLKRVMGKASFATVRDGSGQIQFFITPADVGQETYDAFKKWDMGDIVAARGVLFRTNKGELSVRCTELRLLSKSLRPLPDKFHGLADQEMKYRQRYVDLIVTPETRKTFIARTKAMSSIRKFMADADFMEVETPMLHPIPGGAAAKPFTTHHNALDMQMFLRIAPELYLKRLVVGGFERVFEINRNFRNEGVSVRHNPEFTMIEFYAAYTDYKWIMDFTEQLIRQAAVDALGSATITYQGRELDLAKPFHRLTISQAIQKYAPQYTDAQLSDDAFLRTELKKFGVDASQPQFLNAGVGALQLALFEETAESQLWEPTFIIDYPIEVSPLARASDKFDGITERFELFITGREIANGFSELNDPEDQAARFKKQVDQKDAGDEEAMFYDADYIRALEYGMPP

SEQ ID NO: 190738 - protein, 342 aa, Unknown
  Bacterial polypetide isolated from the Sargasso Sea
MFKQYIVTEQEKIRREKLEELKKLGIDPYPAELYPVTNYSTDLISKYEDKKQVVIAGRIMSRRIQGNASFAEILDSKGRIQVYFNRDEICEGDDKSKYNLVYKRLLDIGDIIGINGELFKTKVGEITVLVKDFKILNKSLRPLPLPKVDSHGKEYDSFTDLEQRYRQRYVDLIVNQSVKETFVKRTKIINSIRNFLNNKDYLEVETPILQSIPGGATARPFITHHNALDIPLYLRISDELFLKKLIVGGFEAVYEFSRDFRNEGMDRNHNPEFTILELYVAYKDYFWMMELTESLIEKVCLELHGKTKLEFDSKKIDFKAPYERISITEAIIKFTGYDISGK

SEQ ID NO: 190739 - protein, 371 aa, Unknown
  Bacterial polypetide isolated from the Sargasso Sea
KTDELTIDVWDLEMITKSLRPMPEKFKGLTDIEARYRQRYLDLMTNTNTKEIFIKRTKIIDSMRQKMNQVGYLEVETPMMHPLAGGAVARPFKTQHNALGRDLYLRIAPELYLKRLLVGGFEKVFEINRSFRNEGLSTKHNPEFTMMEWYEAYATMQNQMDLTREIILNASSAAGCESTIEWGDIKINLNNFTQSSLTNLILEHNKDLSKDDINNQKKLEKFLKDKKIKVEKSWKIGRMLLEVFEETVESKLIDPTFVTEYPVEVSPLSRRNEDNPDFADRFELFIGGKEFANGFCELNDPDDQASRFEDQVAAKDSGDKEAMDFDQDYITALEHGMPPAVGVGLGVDRLVMLLTNQSSIRDVLLFPQLKN

SEQ ID NO: 190740 - protein, 165 aa, Unknown
  Bacterial polypetide isolated from the Sargasso Sea
EENRIDDEDFLRHVLGDIGVRCEEAWGIGKLQLELFEAQVEDKLEDPTYVTEYPAEVSPLARRKDGNPEVTDRFELFIGGREYANGFSELNDPVDQSERFRRQSELKESGDSEAMHFDHDYITALEYGLPPTAGEGIGIDRLVMFLTNAPSIRDVLLFPQLRNSS

SEQ ID NO: 190741 - protein, 488 aa, Unknown
  Bacterial polypetide isolated from the Sargasso Sea
MDIKELTKVQKDREDKLKKLRSEGFNFPNDFEKKDQIGDLVESYGSLTKDKLASKKVAVKTAGRIILKRVMGNAAFMTFEDPTGRIQTYFSKDNLAKELDSVKELDMGDIIGVEGSLFRTKTDELTIEVKKIRLLTKSLKPMPEKHKGLTDIETIYRQRYVDLMSNPDSRELFVKRNKIIQSMRKNLEEAGFLEVETPMMHPIPGGANAKPFETHHNALDKKLFLRVAPELYLKRLLVGGYEKVFEINRNFRNEGISTIHNPEFTMLEFYEAYGELGRTAKLIQKLVQDSVLAVNDSLNISYEDKPLNLKEDFKIVALKDLVKEKLGLPSLDTKDEIFSAAKDNKLKLHKSWGWGKVLLELFEAFVEKDLWEPTFVKDYPYEVSPLSRRKDDDDDYTDRMELFIAGREFSNFFCELNDPHDQEQRFTDQVEQKKAGDSEAMFFDDDYINALQHGMPPAVGVGIGIDRLIMLATDRRSIRDVVFFPTLK

SEQ ID NO: 190742 - protein, 337 aa, Unknown
  Bacterial polypetide isolated from the Sargasso Sea
YVDLIVNQDSRHVFQVRSKIIRTIRNYFEGADFMEVETPMMQVIPGGATARPFITHHNALDQEMYLRVAPELYLKRLVVGGFEKVFELNRNFRNEGLSTRHNPEFTMLEFYQAYATYFDLMDLTEDLFKTLSREVTGDSIVTYQGSTYDFSKPFRRMTVLEAVENHCAVKQEQLKTKEAAIDTAKSLDVTLDEKWGIGKIVMEIFEQRVEAKLDQPTFITEYPIEVSPLARKNEISSEVTDRFELIIGGRELANGFSELNDPEDQAQRFAIQAAEKDSGDKEAMHFDEDYITALEYGLPPTAGEGIGIDRLIMLFTNSPSIKDVLLFPHMRPEKDSD

SEQ ID NO: 190743 - protein, 151 aa, Unknown
  Bacterial polypetide isolated from the Sargasso Sea
TYAESIKISVKDQWGEGKILLEIFEKTVEENLIQPTFVIEYPVEVSPLSRRNNDNPLIADRFELFIGGKELANGFCELNDPDDQAQRFRDQVKAKADGDDEAMGFDEDYITALEHGMPPAVGVGLGIDRLVMMLTNQSSIRDVILFPQLKS

SEQ ID NO: 190744 - protein, 374 aa, Unknown
  Bacterial polypetide isolated from the Sargasso Sea
TNKGELSIHVNSIELLTKSLRPLPEKYHGLTDQELRYRQRYVDLIMNEKTRNTFKIRSKIIDFIRSYLKSENYIEVETPMMHVIPGGATARPFITHHNSLDMELFLRIAPELYLKRLVVGGIEKVFEINRSFRNEGLSPRHNPEFTMLEFYQAYSDYEDLMNLTENMMRELTLNLFNTHEVTYQEQVYDLGKPFERLSLFESILKYNKTISDEDLRSLEKIRSIAKELDVFIEDSYGLGKIQVEIFEKTVESKLLSPTFITQFPTEVSPLARKNNDDPFVTDRFEFFIAGREIANGFSELNDPEDQAERFRKQVEDKEAGDDEAMHFDDDYIKALEYGMPPTAGEGIGIDRLVMFLTDSASIRDVILFPHLRQK

SEQ ID NO: 190745 - protein, 349 aa, Unknown
  Bacterial polypetide isolated from the Sargasso Sea
KYHGLTDTEIRYRRRYLDLMMSEESAEVFKIRSKVVTQIRSFLNDLDMMEVETPMMHPIPGGAVARPFITHHNTLDQDFYLRIAPELYLKRLTVGGFDRVYEINRSFRNEGVSTQHNPEFTMLELYVAHETPDFLMNMIEDMMRAISQELFGSDKIEYQGETIDFTGHFQRLTMEESVLKYNPELDKEKVRDAGYLRSFAEGIDISVENDAGAGKILFEIFEKTVEHQLHQPTYITSYPREISPLSRANDDDPWIVDRFEFFIMGRELANGFQELNDPDDQAERFEDQVKARDGGDDEAMFFDQDYIEALEYGMPPTAGLGVGIDRLVMLFSNQASIRDVLLFPHMRSK

SEQ ID NO: 190746 - protein, 370 aa, Unknown
  Bacterial polypetide isolated from the Sargasso Sea
MSEIKEARLQKASSLVNKGFASYAQSFKVSHTTSFLIQKFDYLENGQEEDFSVSIAGRVLAKRVMGKIAFFTISDQEGQIQLYLDKRIINFNLEKQKLLSFEDLKEIVDIGDWIGVYGTIKKTNKGELSIKVEKWEMLSKSLQPLPDKWHGLTDIEKRYRQRYLDLIVNPHSKNVFKTRAKCISFIRKWLDNRNFLEIETPILQSEAGGAEARPFITHHNTLDIPLYLRIATELHLKRMVVGGFEKVYELGRIFRNEGISTRHNPEFTSVEIYEAYSDYVDMMNLTEELIKDIVADACGSLTINYQNKEIDFSKPWSRISMKAIVKKYTGIDFDSFSGDFLAAKQAVKNINVVCSNKVNTMGRLLNEVFE

SEQ ID NO: 190747 - protein, 358 aa, Unknown
  Bacterial polypetide isolated from the Sargasso Sea
MITKSLRPMPEKFKGLTDIEARYRQRYLDLMTNNETKEVFVKRTKIIDSMRKKMNECGYLEVETPMMHPLAGGAVARPFVTQHNALGQDLYLRIAPELYLKRLLVGGFDRVFEINRSFRNEGLSTKHNPEFTMMEWYQAYASMQDQMDLTKEIITNAADAAGCKSKIQWGDLEINLDNFKQSTLSDLILDFNSDLSKDDLSNQKKLEKILKDKKVKIEKNWGIGRILLEVFEETVEDQLIDPTFVTEYPVEVSPLSRRNETNPDYADRFELFIGGKEFANGFCELNDPDDQASRFEDQVAAKDSGDKEAMDYDHDYITALEHGMPPAVGVGMGVDRLVMLLTNQSSIRDVLLFPQLKS

SEQ ID NO: 190748 - protein, 103 aa, Unknown
  Bacterial polypetide isolated from the Sargasso Sea
FQKNPDNPDFADRFELFIGGKEFANGFCELNDPDDQASRFEAQVAAKDSGDKEAMDFDKDYITALEHGMPPAVGVGLGIDRLVMLLTNQSSIRDVLLFPQLKN

SEQ ID NO: 190749 - protein, 495 aa, Unknown
  Bacterial polypetide isolated from the Sargasso Sea
MTEKLTENELLEQRRLKLDALRERGVAYTNSFRRDSLSQDLKIQFDGTSKEELEEQSHEVAIAGRIMLQRIMGKASFITLQDMKGQIQAYIRSNDIPEGQYDEFKTWDLGDIVGIKGKLFLTKTGELTVHADSIQMLTKSLRPLPEKHSGLVDTEQRYRKRYLDLITNSESLEIFKKRSQIISSIREFFISHEYLEVETPMMHSILGGAAAKPFTTHHNALDMDLYLRIAPELYLKRLVVGGMEKVFEINRNFRNEGLSTKHNPEFTMLEYYTAFADFNNQMDFLERLFKFVSEEVLGSSKLETENISYDFSKPFQRISLKEKVSNKLSIDPISFDDRGFLLDLGKKYKFEDIENLSNGKILFGLFEELVESELINPTFITGYPKEVSPLSRASDENPDEVDRFELFIGGKEIANGFSELNDPDDQAERFQDQVSQKSAGDEEAMEFDSDYIEALEYGLPPCAGVGIGIDRLVMLLTGAQSIRDVLLFPQMKPKN

SEQ ID NO: 190750 - protein, 339 aa, Unknown
  Bacterial polypetide isolated from the Sargasso Sea
NVFKTRAKCITFIRKWLDNRNFLEIETPILQSEAGGAEARPFITHHNTLDIPLYLRIATELHLKRMVVGGFEKVYELGRIFRNEGISTRHNPEFTSVEIYQAFTDYVDMMNLTEELIKDILADACGSLIINYQNKEIDFSKPWLRISMKDIVKKYTGIDFDSFNGDFLAAKQAVESINVDFSNKVNTMGRLLNEVFEQKVESKLIEPTFVIDYPVEISPLARPHLDNKEIVQRFELFIVGRELANAFSELIDPVDQRERMQLQQSLRDEGDLEAHCIDEDFLTALEIGMPPTGGLGIGIDRLIMLITDSASIRDVIPFPLLKPEITSKKSEKLPSNEVK

SEQ ID NO: 190751 - protein, 62 aa, Unknown
  Bacterial polypetide isolated from the Sargasso Sea
DEDFLNALEIGMPPTGGLGIGIDRLIMLITNSASIRDVIPFPLLKPEITSNKNEKLPLHEVK

SEQ ID NO: 190752 - protein, 379 aa, Unknown
  Bacterial polypetide isolated from the Sargasso Sea
FHQLDPHLRMKVFVEVETPILQPIPGGAAAKPFITHHNSLNIPLYMRIANELYLKRLIVGGFDGVFEFAKDFRNEGMDRSHNPEFTNLEFYVAYKDYNWMMSFTEKLLEKVTIDTLGSSTVKFENKEINFKGPYEKIGILDAIKNETGIDALSLNERELAEAAKKIGVEIDETMGKGKIIDEIFGEKCESNFIQPTFIIDYPKEMSPLTKEHRENPQLTERFELLINGSEIANAYSELNDPIDQLERFEDQLKLSEKGDEEAMFIDHDFVRSLEYGMPPTSGIGIGIDRLVMLLTNHRSIQEVIFFPQMKPENNALADLSIDEKSIYNQVKNLEKVELNFVKDSSGLSNKKWDKSIKNLTKKNLVKVSKTNEGLFIEIV

SEQ ID NO: 190753 - protein, 488 aa, Unknown
  Bacterial polypetide isolated from the Sargasso Sea
MDNKEEEHRLIKHRKEKLERIKESRNPYKNNYARTHQCKDVINDESLIDNSNIKVSVLGRMSSKRMMGKSNFAHIKDMSGKLQFFVDKTKLDQNHFSEFKISDIGDVISISGNIFLTKTKEITLNCESFEIVTKSLRPIPENFYGLADQEIKYRKRYLDLICNEETRDIFIKRSKIIKLIRDYFEKNNYIEVETPMMHKIPGGAKARPFTTHHNTLDMDLYMRIAPELFLKKLIVGGFEKIFELNRNFRNEGVSSKHNPEFSMIEFYQSYATFEDLMKFTQELLKFIAMELSNSHIINYQGNEIDFSKSFDVLDMKDSILKYNEDITENDLNNKDSLKKIFSNIKIPYNDGSSLGELHFELFEKTVEAKLINPTFITNHPVEVSPLARLNDNNKEMTDRFELFIAGKEIANGFSELNDPEDQKRRFEKQIALKDKGDLEAMHYDEEFIEALEYGMPPTAGEGIGIDRLIMLFTNSSSIRDVLLFPLMR

SEQ ID NO: 190754 - protein, 174 aa, Unknown
  Bacterial polypetide isolated from the Sargasso Sea
SELVVEYNPELKDKDLSDKKILEQYLKSISVKIEKAWGPGRLLLEIFEETVESKLIDPTFVTEYPVEVSPLSRRNEHKPDFADRFELFIGGKEFANGFCELNDPDDQASRFEDQVAAKDSGDKEAMDYDHDYITALEHGMPPAVGVGMGVDRLVMLLTNQSSIRDVLLFPQLKS

SEQ ID NO: 190755 - protein, 482 aa, Unknown
  Bacterial polypetide isolated from the Sargasso Sea
ERRKKLDQLRDKGDAYGNSFKPQNNARSLHEEYGTFSKEELVDKNIKNISIAGRIVLKRVMGNASFATLRDASGDIQIYVTKNNVEESVYEDFKTWDLGDIVGVSGSLFRTKTDELTIDVWDLEMITKSLRPMPEKFKGLTDIEARYRQRYLDLMTNNSTKEIFIKRTKIIDSMRKKMNEVGYLEVETPMMHPLAGGAVARPFVTQHNALGQDLFLRIAPELYLKRLLVGGFEKVFEINRSFRNEGLSTKHNPEFTMMEWYEAYASMQDQMDLTKAIILNAASAAGCEESIEWDENKINLGNFKQSTLSELVVEYNPELKDKDLSDKKTLEQHLKSISVKIEKAWGPGRLLLEIFEETVESKLIDPTFVTEYPVEVSPLSRRNEHKPDFADRFELFIGGKEFANGFCELNDPDDQASRFEDQVAAKDSGDKEAMDYDHDYITALEHGMPPAVGVGMGVDRLVMLLTNQSSIRDVLLFPQLKS

SEQ ID NO: 190756 - protein, 311 aa, Unknown
  Bacterial polypetide isolated from the Sargasso Sea
GPCGPCSEIHYYVGDEVDNQDASHVNHSSDYWELWNLVFIQNNRLKDGTLEDLPKKHVDTGAGLERICSVLQGKNSNYKTDLFSKTISDLEKISKTKYADNEVTYNVICDHIRMLSFAIADGVLPSNEGRGYVVRRVLRRASKFVMNLDIKEPILYKLVQSVVSTMSDSYSELTTKQEHIEQTILSEEESFLLTLERGVIQFEKIIKNSSKIISGSDAFKLYDTYGFPFDLTELMAEEKGMTVDKKGFDEAMQKQKDLAKSSQKFTFDKSNVKWILDNDGSHSEFIGYDSEESQSKIMKWANEDDQIFIVL

SEQ ID NO: 190757 - protein, 326 aa, Unknown
  Bacterial polypetide isolated from the Sargasso Sea
VIKFIIKDNKEVNYLSEGEEGYIVLNQTPFYGESGGQLGDTGTIKCGDNNFNVTDVQKKFGDMFIHYGKVKKGKLNLNDNVELGIDYERRKNIRAYHSATHLLHESLRRTLGNHVMQKGSLVAPDRLRFDFSHMKPISESELDKINKIVNEIVDNKSEVITRLMTPKEGMEHGALALFGEKYGDEVRVVFMGEEGNKYFSTELCGGTHVRNTSEVGKFKVVSQSAIASGVRRVEALRDKQLEKYLNEKEKNLNVASQKDQDQIDDLSDQIKKLGGKPNTSSPDKKIIIKELSKQLDLLNVKNVLGDKNKNIIKDENINNIKVRFQK

SEQ ID NO: 190758 - protein, 306 aa, Unknown
  Bacterial polypetide isolated from the Sargasso Sea
HHTFFEMLGNFSFGDYFKEDAIQLAWDFITNELKLEKDRLWVTIFEDDDEAASIWLEKIGVSADRLVRLGEKSNFWSMGDTGPCGPCSEIFYDHGDHIDGGPPGSDDEDGDRFVEIWNLVFMQFDRQANGELVNLPKPSVDTGMGLERIAAVMQGVSSNYDIDLFQKIIAAIKNQSEKGEESHYRVIADHIRSSSFLIMDGVTPDNEGRGYVLRRIIRRALRHGHDLEIESPFFFKLVDVLAGEMGQTYPELLNKKDYIERIILMEEERFAATLSQGMSLLQKEFDRSNDEMISGEFAFKLYDTYG

SEQ ID NO: 190759 - protein, 342 aa, Unknown
  Bacterial polypetide isolated from the Sargasso Sea
MAKTLNKIRSAFLDYFEKNDHKIIESSNLVPNNDPTLMFANSGMVQFKNVFTGLEKRDYHRATTSQKCVRAGGKHNDLENVGYTPRHHTFFEMLGNFSFGDYFKEKAIELAWNLITKEFGLDKNRLYVTVYHDDDEAFNYWKKIAGLSEDKIIRIATSDNFWSMGETGPCGPCSEIFYDHGEHLEGGLPGSKNEDGDRFIEIWNLVFMQYEQISKDKRINLPKPSVDTGMGLERIAALLQGTHDNYETDHFKKIIKSAAEILKVEPNNNNLASFRVIADHLRASSFLIAEGVLPSNEGRGYVLRRIMRRGMRHSHLLGSKEPIFYNIFKTLKDEMKGNYSEI

SEQ ID NO: 190760 - protein, 301 aa, Unknown
  Bacterial polypetide isolated from the Sargasso Sea
MILVLIISATHLLHESLRRVLGTHVTQKGSLVEPSRLRFDFSHMKPISSEEIDKIETFINSMVSKKTDVRTRLMTPDEAVENGALALFGEKYGEEVRVLSMGDENGKYFSTELCGGTHVKNTGDIGKFKIISQSSIAAGVRRVEALRDKQLEDYLKNKEKLSSISSEKNDEIIKDLTQQITNLGGKPTLDQTDQKLLIKNLTKQLETLSVKLILNDKTKNKIKDEEIKGVKIRFQNVEGLPPKELRKLVDDGKKELGDGIVVVFASKDNKVGVAVGITNNLTEKFDAVKFVKLSSEIIGGQ

SEQ ID NO: 190761 - protein, 109 aa, Unknown
  Bacterial polypetide isolated from the Sargasso Sea
MNTNEIREAFLEFFKSKDHNIVSSSSLVPNNDDTLLFTNAGMVQFKDVFLGQEKLKYSRATTSQKCIRAGGKHNDLENVGYTLRHHTFFEMLGNFSFGDYFKEEAIVFA

SEQ ID NO: 190762 - protein, 328 aa, Unknown
  Bacterial polypetide isolated from the Sargasso Sea
SQRCVRAGGKHNDLENVGYTARHHTFFEMLGNFSFGDYFKKEAISYAWVYLTDVLKIPESKLWVTVFEDDDAAANIWLKEIGISSKQFSRCGEKDNFWSVGDTGPCGPCSEIFYDHGKEIPGGPPGSKDAELDRYVEIWNLVFTQYNRNSDGSLTPIPHPSVDTGMGLERITAVMQGVHNNFEIELFKKIISKIHSFCNTKQIDIVSTRVVADHIRSCSFLLADGVIPSNEGRGYVLRRIIRRAIRHGNKLGLKEPFFYKLVEVLENQMGQAYPELSKSKTNIESVLLNEEERFAETLDQGLKILDDIIAKIKGDEIQGEDVFRLYDT

SEQ ID NO: 190763 - protein, 321 aa, Unknown
  Bacterial polypetide isolated from the Sargasso Sea
IYAESGGQVGDRGMFKSKNAEGSILDCKKSGKVFMHLIKLDKGSLKIDDKIKVNVNKEKREKTEAHHSATHLVHAALKSVLGDHVKQKGSLVDEHKLRFDFSHDEPLSDKEISKIEDLVNQEILKNLAVSTKIMDLEDAKNSGAESLFGEKYEDQVRVLSIGEDDFSLELCGGTHISRTGDLGIFIITSQSSVASGIRRIEALSGPRAQEYLSNLKNQTIQLQKLLNAPAEEIEDKVGKLLKENKSLKKGSKTAKVATIKSSNTHDIDNFKLVIEEAESEDIKELRPVLDEKTKNANNSIFILLSSKNETLTILCSVSKDL

SEQ ID NO: 190764 - protein, 271 aa, Unknown
  Bacterial polypetide isolated from the Sargasso Sea
MTSQLIKKIVTGDEIRNAFLKFYSEKLHKIIPSASLIPDDPTVMLTIAGMLPFKPVFLGLKERPSKRAASSQKCIRTNDIENVGVTARHHTFFEMLGNFSFGDYFKREAIQWAWELVTNIYQLSVENIIVSVFHEDEESAKIWRDEIGIHPDRIVKLGEEDNFWSSGKTGPCGPCSELYYDFHPEKGLQKIDLEDGDRFIEFYNLVFMQYNRDPNGKLTDLKFKNIDTGMGLERMAQILQKKQNNYETDLIFPIIQKICEIANIDYFSSDG

SEQ ID NO: 190765 - protein, 288 aa, Unknown
  Bacterial polypetide isolated from the Sargasso Sea
DNYETDLFKDLIKKIASNLGALNLENPSLRVIADHLRSSSYLIADGLSISNEGRGYVLRRIIRRALRHAHKLSPDYEKPLSGLVKELVSQMGKEHALLSKNKKIIEKTIEKEEQQFSLTLRNGMRIFEDETPKDVNEVSGELAFKLYDTFGFPLDMTIDLAREKNISVNIKEYEELMEQQRDLAKASSNFDSLMPSSISLDKPTNFIGYDKSKCKSKVLMIFVNQKEQETLEGDSDAILILNKTPFYAESGGQVGDQGSISSEDFIFEVKDTQKVGDQFIHIGNLQEG

SEQ ID NO: 190766 - protein, 300 aa, Unknown
  Bacterial polypetide isolated from the Sargasso Sea
NEGRGYVLRRIMRRGMRHSHLLGSKKPIFFNIFKTLLDEMSGNYPELKRAEALIKETLKMEEEKFLVLLDRGMKILDEEVTKIDKVLPGEVAFKLYDTYGFPLDLTQDILKNKSLQIDNKKFEDLMKQSRELAKKNWKGSGDTAIDDIWFAIRDKLGATEFLGYETDQAEGVIQSLLKNNAQVEKLKEGDEGIIILNQTPFYGESGGQVGDTGEIISNNFKFKVSDVQKKLGDLFVHYGKVISGEITINENVELKIDVKRRENIRAYHSATHLLHESLRRVLGTHVTQKGSLVEADRLRF

SEQ ID NO: 190767 - protein, 294 aa, Unknown
  Bacterial polypetide isolated from the Sargasso Sea
SKGVNSSNEYWELWNLVFIQNNRLNNGDLESLPQKHVDTGAGFERIVSVLQKTYNNYTTDLFFPIIKETEALTERNFQDNPAPFQVIADHIRMLGFSIADGCMPGNEGRGYVLRRILRRAARFGRELGQEDPFLFQLTGTLCDIMGDAFPEIVEKKIHIEKVVQSEEKIFGNTLGRGLNHFDKVLANLSGNKISGKEAFRLYDTYGFPLDLTQLLARENGISVDDKGFKSEMKEQRQRAKSSAKFTHQVEDLDWVKVLEEESFDFVGYETTKSKSQILRYSAQKDQVLVVMNTS

SEQ ID NO: 190768 - protein, 324 aa, Unknown
  Bacterial polypetide isolated from the Sargasso Sea
LGYETNQAEGVVISLLKNNKEVEILNSGDEGMIITNQTPFYGESGGQIGDKGKIISGEFKFEVSDVQKKLGDLFVHYGNVKNGSVKLNQNVEMKIDVERRENIRAYHSATHLLHESLRRVLGSHVTQKGSLVEPERLRFDFSHMKPISSDEIEKIETQVNSMVEKKSDVKTRLMTPKEAVENGALALFGEKYGDEVRVLSMGNDDNKFFSTELCGGTHVRNTADIGKFKIISQSSIAAGVRRVEALRDKQLEDYIKNKEKLSDLSAQKDEETTKGLSEKIIKLGGKPNLDNQDQKGLIKELSKQLEQLNIKSILADKSKNIIKD

SEQ ID NO: 190769 - protein, 360 aa, Unknown
  Bacterial polypetide isolated from the Sargasso Sea
RIVKISTSDNFWSMGETGPCGPCSEIFYDHGDKLKGGPPGSPNQDGDRFIEIWNLVFMQFEQISKEKRVDLPKPSVDTGMGLERITAVLQGTHDNYSIDHFKELMSASSEITKTKIDNKTIASHRVIADHLRASSFLIAEGVLPSNEGRGYVLRRIMRRGMRHAHTLGSKNPIFYQLFDVLLSEMSQSYPELKNGKDLIVETLRNEEEKFSSLLDRGMKILDQNLSKVKNDTLPGEIAFKLYDTYGFPLDLTADILKNKNIKIDTNAFDKEMEKSKQIARASWKGSGDKSLDERWFKIREKLKPTEFLGYEFDKAEAVILKISKNNKFVDQANKGDEVEIITNQTPFYGESGGQVGDEGT

SEQ ID NO: 190770 - protein, 134 aa, Unknown
  Bacterial polypetide isolated from the Sargasso Sea
MNSSEIRSTFLNYFKKNGHEIVHSSPLVPHNDPTLMFANSGMVQFKNIFTGKEKRDYNRAVTSQKCVRAGGKHNDLENVGYTARHHTFFEMLGNFSFGDYFKDQAIEFAWNLITKEFKIEKEKLLVTVFSEDEE

SEQ ID NO: 190771 - protein, 288 aa, Unknown
  Bacterial polypetide isolated from the Sargasso Sea
VFYNLFETLKNEMSGNYPELKRADSLIKETLKMEEEKFLVLLDRGIKILNDEISKIDKVLPGDVAFKLYDTYGFPLDLTEDILRNKSLSIDTKKFQSLMKESRELAKKNWKGSGDAAVEDIWFGIRDKLGATEFLGYETNQAEGVILSLLKDNKEVQELKSNDEGMIITNQTPFYGESGGQVGDTGEFINGNFKFKVKDVQKKLGDLFVHYGKVLSGSIKLKDNVEMKINEERRNDTRAYHSATHLLHESLRRVLGTHVTQKGSLVEPNRLRFDFSHMKPISDEEVNK

SEQ ID NO: 190772 - protein, 316 aa, Unknown
  Bacterial polypetide isolated from the Sargasso Sea
DYLKEEAIVYAWEFLTDVLKLDKDKLWITVYKDDDEAKEIWIKKIGIDPDRIAKLGDKDNFWSMADTGPCGPCSEIFFDHGDKYEGTPPGEDGDEGDRFVEIWNLVFMQFNRDSGGVLHDLPKPSVDTGMGLERIAAVMQGVGSNYDTDIFSNLIIESEKVLGNVGDVSHKVIADHLRSSCFLISDDIFPSNEGRGYVLRRILRRAIRHGYKIGADKPFMHKLVKTFVDAMGNAYPQLKNDEGRIEKLIKNEETQFLQTLDKGIQILDSTLTAGNEETISGDLAFKLHDTYGFPFDLTADIAREKGIDIDEKGSRR

SEQ ID NO: 190773 - protein, 223 aa, Unknown
  Bacterial polypetide isolated from the Sargasso Sea
MADKTLNEIRETFLKYFEKNNHRIVESSNLVPNNDPTLMFANSGMVQFKNVFTGLEKRDYKRATTSQKCVRAGGKHNDLENVGYTPRHHTFFEMLGNFSFGDYFKERAIELAWNLVTKDFDINKNRLCVTVFHEDDEAFNFWKKIAGLSEDKIIRIPTSDNFWSMGETGPCGPCSEIFFDHGDKLEGGLPGTKDQDGDRYIEIWNLVFMQFEQVSKDKKNKFT

SEQ ID NO: 190774 - protein, 284 aa, Unknown
  Bacterial polypetide isolated from the Sargasso Sea
LRFDLTHFEKISQDEIIKIEKMVNQQILLNTEVEVAVQGFDEAKEAGAEALFGEKYGDEVRVVKVSDYSLELCGGTHVNRTGDIGSFKITDESSLSSGVRRIVAVTGNQALSKMQADSTILNDLQSLLNTPPSEMVERIEGLFKDKKELEKKLKNRQTDGSSEAQIMDKFEEAGTYEILVAKTKSSSMDDLKMLGDSVFKKMKSGLAVIFSAGDEKPMAVVVVSKDLNKSGILAGDIAKKVGGFMGGGGGGKPHLATAGGKNNDAIHDAMNSARKLINEVIGGE

SEQ ID NO: 190775 - protein, 277 aa, Unknown
  Bacterial polypetide isolated from the Sargasso Sea
VESDCKIISIIKESKSVNKVKKDQEAIILLNQTPFYGESGGQVGDQGFFENDNFKFEVNNTTKILGNYFLHKGKVITGSCEINDTIKASVNVENRNFIKYNHSSTHLLHAALRKILGKHVTQKGSLVNSEKLRFDFSHNNPIEKDQLINVEEIVNDQIQKDGIVEIKVVDQKKAIEEGAMALFGEKYSDEVRVVTMGHENETFFSKELCGGTHVTKLGEINKFKITSQSSVASGIRRIEAVSNILVDKYIKEIQSNLLEKDKNQDNQIEDLKNKIKK

SEQ ID NO: 190776 - protein, 315 aa, Unknown
  Bacterial polypetide isolated from the Sargasso Sea
NKHINGEVAFKLYDTYGFPLDLTQDYLKSKNIEVDIKAFEQKMLDQKERARQSWKGTGDIEDEGIWFEITSKIEPTEFLGYSDMEADCKIISIISESKSLDKIKKDQEAIIILNQTPFYGESGGQVGDQGFFENDNFKFEVMNTTKIFGNYFLHKGKVISGECKIEDTIKASINTVNRDFIKYNHSSTHLLHAALRKILGKHVTQKGSLVNSEKLRFDFSHNNPIEKDQLINVEKIVNDQIQKNGIVEIKIVDQKKAIEEGAMALFGEKYSDEVRVVTMGQENESFFSKELCGGTHVVKLGEISKFKITNQSSVA

SEQ ID NO: 190777 - protein, 279 aa, Unknown
  Bacterial polypetide isolated from the Sargasso Sea
HEVVDSSPLIPANDETLLFTNAGMVQFKDVFLGSDKRPYKRATTTQRCIRAGGKHNDLENVGYTLRHHTFFEMLGNFSFGDYFKEEAIQLAWNFLTKELNLEKEKLWISVFREDDEAAEIWSSKIGIDPERIVRLDEEDNFWSMGDTGPCGPCSEIYYDHGEQYEGTPPGSPGDDGDRFVEIWNLVFMQFNRDAAGKLTPLPKPSVDTGMGLERVAAVMQGVNSNYETDLFLNLIKASEDAIQSPGEPSHKVIADHIRSVSFLIADGITPSNEGRGYVL

SEQ ID NO: 190778 - protein, 238 aa, Unknown
  Bacterial polypetide isolated from the Sargasso Sea
MVSKKSDVKTRLMTPDEAVENGALALFGEKYGDEVRVLSMGDEDGKYFSTELCGGTHVKNTGDIGKFKIVSQSSIAAGVRRIEALRDKQLEEYLKNKEKLSNLSAEKDEETIKELSQQIIKLGGKPSLEETDQKTLIKNLTKQLETISVNAILEDKSKNVIKDEEINGVKLRLQKIDGLPPKELRKLVDKGKKDLGEGIVVVFANKDDKVGLAVGVTDNLTNKFDAVQFVKVGSEIIG

SEQ ID NO: 190779 - protein, 90 aa, Unknown
  Bacterial polypetide isolated from the Sargasso Sea
KVKSGSIKLHESVELKIDVERRDNTRAYHSATHLLHESLRRVLGTHVTQKGSLVEPSRLRFDFSHMKPILNEEIDKIEEFVNTWFQKNLM

SEQ ID NO: 190780 - protein, 363 aa, Unknown
  Bacterial polypetide isolated from the Sargasso Sea
SLFLLPSGVQETKFLGYDQLKSDSEILVMWDGQERVENALKGQEIYLACNQTPFYAESGGQIGDKGKFASDNATGNILDCRKQGKVFIHKAIVESGEIKKGDLIEMSVEKEKRIAIAIHHSSTHLLHAALREVLGDHVQQKGSLVDETKLRFDFSHDKSLTQDEIATIERIVNKEALNNLEVKTELMKLDDAMKSGAMALFGEKYDDDVRVLTMGENSYSVELCGGTHVTRTGDIGFFTITSQSSVASGIRRVEAIAGMQALNYIKKLKEVNSSIQNLLNVSSDDIHDKVKSLIDENKALKSKGTKSTKREIVFSESFEINDWKLIIQQVQLDDNKDLRFLADEQKNTNERVCFVIFSEQNNK

SEQ ID NO: 190781 - protein, 293 aa, Unknown
  Bacterial polypetide isolated from the Sargasso Sea
ALKRVLGDHVKQKGSLVDEHKLRFDFSHDESLSEEEISKIEDLVNQEILKNSAVSTKIMDLEDAKNSGAESLFGEKYEEQVRVLSIGEDDFSLELCGGTHISRTGDLGIFIITSQSSVASGIRRIEALSGPRAQEYLSNLKNQTIQLQKLLNAPAEEIEDKVSKLLKENKSLKKGGKAAKAATIKSSNTHDIDNFKLVIEESESEDIKELRPLLDEKTKNANNSIFILLSSKNETLTILCSVSKDLQSRISAKDLINALTIPIEGKGGGRVEFAQGAGKPSDREKFVSDIPNI

SEQ ID NO: 190782 - protein, 332 aa, Unknown
  Bacterial polypetide isolated from the Sargasso Sea
ETHDRFVEIWNLVFMQYEQVDENNRLSLPRPSIDTGMGIERIAAVMQGTNDNYEIDLFKKLIDHSIHITKKNDKELISSHRVIADHLRSSSFLIADGVLPSNEGRGYVLRRIMRRAMRHIQLLGYNDTMLSDLFTTLSNEMSSAYPELRRAENLIRETLSYEEIKFKDLLFRGMKQLEDELKPHQEGQIFPGSKAFKLYDTYGFPLDLTQDILRSKDIEVDIKGFDQSLEDQKSRARSSWSGSGDKSTEKIWFNLSNKINKTEFIGYENNVSQAEVLSIISNGTEVDQISKDQQGCIILNQSIFYAESGGQIGDIGYIRCGESNFKVTDTQK

SEQ ID NO: 190783 - protein, 288 aa, Unknown
  Bacterial polypetide isolated from the Sargasso Sea
MNSNQIRSTFLNYFKKNEHKIVHSSPLVPHNDPTLMFANSGMVQFKNIFTGKEKRDYNRAVTSQKCVRAGGKHNDLENVGYTTRHHTFFEMLGNFSFGDYFKDYAIEFAWDLITKEFGIDKKKLLVTVFNEDEDSYHLWKKISGLDDDKIIKISTSDNFWSMGDTGPCGPCSEIFYDHGDKFPGGPPGSPDEDGDRFIEIWNLVFMQYEQINSSQRINLPKPSIDTGMGLERMTALLNGTNDNYDTDLFKPLINKSIELLNIESLNTSPSHRVIADHLRASSFLMQRS

SEQ ID NO: 190784 - protein, 323 aa, Unknown
  Bacterial polypetide isolated from the Sargasso Sea
PRAVFVNADSGQCIEIWNLVFIQYNANEDGTFAPLAAKHVDTGMGFERVAAIIQTTQNFTNFSKPVSNYDTDVFSPIFAELEKLSGKRYTSTLPDGEPNEQEQIDIAFRVIGDHIRTLSFSIADGILPGNNDRNYVLRRILRRAVRYGRTLGFQEPFFYKLVDVLADSMGEFFPELQQRRELVQQTIRTEEESFNKTLDRGIELFREEANSLGDTKELSGEFAFKLYDTYGFPLDLTELMAREAGLSVNTAGFERLMEQQRERARAAQKKEVISVSSLSSDAQTEFVGFDQLTADATVLEVVDEKKRTGIVLDRSPFTPRWAV

SEQ ID NO: 190785 - protein, 271 aa, Unknown
  Bacterial polypetide isolated from the Sargasso Sea
VNEYIRQNSFVQTRIMTPDDAREIGAQALFGEKYGDEVRVVSMGDKINSGKGLGGQTYSLELCGGTHVKQTGEIGAFTILSDSASSAGVRRIEALTGENAITHLAKKSQQVNELSAFLKVSADELTQRVNVLIEERKNLTSEVAELKRKLALSGKGNGEAAKSEQINGVSFFAQIYSGISGKDLPSLVDEHKDRLKSGVILLITENDNRVAVAAGVSSDLTDKISAVDIVRIAVPELGGKGGGGRADLAQGGGSDISGADGAITAVKKLLK

SEQ ID NO: 190786 - protein, 294 aa, Unknown
  Bacterial polypetide isolated from the Sargasso Sea
LSIDANERKLSATNHTSTHILHQSLKDILGKHISQKGSLVSSERLRFDFSHNNPLTKKDLFKIEDHINKKIRDNSEVLIREMDIYQSKNEGATALFGEKYGDIVRVVSFGKSSDANKSYWSIELCGGTHVKRTGEIGLLKIISEGSVSSGIRRIEAITGTKALEWVNEKYDILKNINELMKSSDENLVDKIISLNEDKRKIEKEFNNYKNNYSQPSNSTEKVVQIGDIKFISKVFNDVSPKNLKGIADKIIYNQSDCVVAVITIESNKISLVVGVTRELSNRINAVDLVKIGSS

SEQ ID NO: 190787 - protein, 191 aa, Unknown
  Bacterial polypetide isolated from the Sargasso Sea
MKTSDIRKAFLDFFNSKNHEVVASSSLVPPNDETLLFTNAGMVQFKDVFLGTETKNFKRAATSQRCIRAGGKHNDLENVGYTLRHHTFFEMLGNFSFGDYFKEDAIKFAWEFLTEELKLDKEKLWITVYKDDDEAEEIWKNIIGIDPGRIARLGDDDNFWSMGDTGPCGPCSEIFYDHGEHIDGTPPGAEG

SEQ ID NO: 190788 - protein, 121 aa, Unknown
  Bacterial polypetide isolated from the Sargasso Sea
MADKTLNEIRNTFLKYFEKNDHKIVESSNLVPNNDPTLMFANSGMVQFKNVFTGLEKRDYVRATTSQKCVRAGGKHNDLENVGYTPRHHTFFEMLGNFSFGDYFKEEAIHYAWDLITKDFE

SEQ ID NO: 190789 - protein, 277 aa, Unknown
  Bacterial polypetide isolated from the Sargasso Sea
MVLGKHVQQRGSLVDDEKIRFDFSHHQSLTGSEIREIETIVNEKIDENIDVQTSIMKHDEAIESGAMALFGEKYGDDVRVLDVGDFSKELCGGTHVENTNEIGIFKVVSESSISSGTRRIEAITGDKALKWAKETEHLVESLTDLLQTRREDVTTKVESLLDSNKKLQSEIKQLKSKIASGQSVADIDSSENINGINYLYKELENDIEPSVMRGAIDQFKSKLKSGVIILSSVNQKGKVTFTIGVTDDLTSMIEAKSIAETISSALDGNGGGKGNFA

SEQ ID NO: 190790 - protein, 182 aa, Unknown
  Bacterial polypetide isolated from the Sargasso Sea
MPRPVKYVEEWPSKRVRDAFVDYFAEKHNHTRWPSSPAVPVDDPTLLFANAGMNQYKPIFLGKADPKTGLAKLTKATNTQKCIRAGGKHNDLDDVGKDTYHHTFFEMLGNWSFGDYFKEQAIAMAWDLLTTVYMLPEDRLYATYFGGDEALGLEPDLEARDIWLKYLPANRVMPFGCADNFW

SEQ ID NO: 190791 - protein, 312 aa, Unknown
  Bacterial polypetide isolated from the Sargasso Sea
IDKNRLYVTVFHEDDEAFNFWKKIAGLSDDRILRISTSDNFWSMGETGPCGPCSEIFYDHGDHLKGGLPGTKDEDGDRFIEIWNLVFMQYEQVTKDKRINLPKPSVDTGMGLERIAALLQGTHDNYETDHFKKLIQSTSDIVKKKPDQKNLSSFRVIADHLRASSFLIAEGVLPSNEGRGYVLRRIMRRGMRHSHLLGSKEPVFYNLFDTLKNEMSGNYPELKRAESLIKETLRMEEEKFLVLLDRGIKILNDEISKIDKVLPGDVAFKLYDTYGFPLDLTEDILRNKSLSIDTEKFQSLMKESRELAKKNG

SEQ ID NO: 190792 - protein, 335 aa, Unknown
  Bacterial polypetide isolated from the Sargasso Sea
RIAKLGDKDNFWSMADTGPCGPCSEIFFDHGDKYEGTPPGEDGDEGDRFVEIWNLVFMQFNRDTDGVLHDLPKPSVDTGMGLERIAAVMQGVGSNYETDIFSNLIEESEKVLGSTGDVSHKVIADHLRSSCFLISDDVFPSNEGRGYVLRRILRRAIRHGYKIGADKPFIYKLVKTFVNAMGNAYPQLKNDEERIKKLIKNEETQFLQTLDKGIQILDSTLVEGNKEIISGDLAFKLHDTFGFPFDLTADIAREKGIDIDEKGFKKNMESQQQMSKASSSFVSKTPTAEDVKETDFIGYENLSSDSNVIAIWNKNEKVELANEPQEYFIALNQTS

SEQ ID NO: 190793 - protein, 246 aa, Unknown
  Bacterial polypetide isolated from the Sargasso Sea
MATSPLTTNEVRKIYLDFFVEKDHTLVESASLVPLNDPTLLFINAGMAPFKDLLLGVEKRNYTRAVSSQRCMRAGGKHNDLDNVGYTARHHTFFEMLGNFSFGDYFKEDAISFAWELLTERYKIDPKKLWITVHDSDDESEEIWIKKIGIDPERVSRLGDEDNFWTMGDTGPCGPCSEIFYDHGDHLEGDPPRPGNDPGDRYIEVWNLVFTQFDKGQDGSLKPLPNPCVDTGMGLERMAAVIQNEL

SEQ ID NO: 190794 - protein, 327 aa, Unknown
  Bacterial polypetide isolated from the Sargasso Sea
VHESDDESEDIWINKVGVDPARVSRLDDEEIFWTMGDTGPCGPCSEIYYDHGDHLEGDPPKLGNEPGDRFVEIWNLVFTQFDRSKDGSLSPLPNPCVDTGMGLERMAAVLQNENNNYETDILKSIVQEAAKISGENDLTNPSLRVISDHLRASSFLIADGVVPSNEGRGYVLRRIIRRGLRHAHKLGMKDGILSKLVHVLEEKMGIAYPLLVKNSDIIKANLLKEEEQFSTTLEQGMQLLESAVEDLENNEIPGDIVFKLYDTYGFPVDMTADFARERDLIVDLNEYEALMLEQKERGRSSSNFNTLIPESLNIEGETAFLGYDTHS

SEQ ID NO: 190795 - protein, 284 aa, Unknown
  Bacterial polypetide isolated from the Sargasso Sea
MSKILLTDVRKNFLEYFKKNNHQIVDSSNLVPNNDPTLMFTNSGMVQFKNVFTGLEKRPYKTATTSQKCVRAGGKHNDLENVGYTPRHHTFFEMLGNFSFGDYFKEQAIHHAWNLLTKDFGLPKEKLLVTVFHEDEDALNLWKKISGLSENKIIKISTSDNFWSMGDTGPCGPCSEIFYDHGDKLKGGIPGSPDEDGDRFIEIWNLVFMQFEQISKDKRIDLPKPSVDTGMGLERMTAVLQGTHDNYKIDHFQKIMDVSSDITKTSIDDKTIASHRVIADHLRA

SEQ ID NO: 190796 - protein, 319 aa, Unknown
  Bacterial polypetide isolated from the Sargasso Sea
MTTKHFNSWKKIAGLPESRIYKISTSDNFWSMGDLGPCGPCSEIFFDHGDHLKGGPPGTKDQDGDRFIEIWNLVFMQFEQVSKEERINLPKPSVDTGMGLERISALLQGTHDNYEIDHFKTLIEASSNFTKTKVTKENIASHRVIADHLRASSFLIAEGVLPSNEGRGYVLRRIMRRGMRHSHTLGSKESIFYKMVPTLIGEMSDSYPELERAQPLIIETLKTEEEKFSSLLSRGIEILNENLNKVKNNSFPGEIAFKLYDTYGFPIDLTADILKNKNIKVDVHGFDNEMKKSKDLARANWKGSGDKSLEEKWFKIREQ

SEQ ID NO: 190797 - protein, 321 aa, Unknown
  Bacterial polypetide isolated from the Sargasso Sea
MGEIISNNFKFEVTDVQKKLGDLFVHYGKVVSGSLKLQDNVELKIDVERRDNTRAYHSATHLLHESLRRVLGDHVTQKGSLVEPSRLRFDFSHMKPIQNEEIDKIEEFVNSMVSKKSEVKTRLMTPDEAVENGALALFGEKYGDEVRVLSMGDEDGKYFSTELCGGTHVKNTGDIGKFKIVSQSSIAAGVRRIEALRDKQLKEYLEKKEKLSNLSAEKDEETIKDLSQQIIKLGGKPSLEETDQKTLIKNLTKQLETISVNAILEDKSKNIIKDEEINGVKLRLQKIDGLPPKELRKLVDKGKKDLGEGIVVVFANKDDKV

SEQ ID NO: 190798 - protein, 292 aa, Unknown
  Bacterial polypetide isolated from the Sargasso Sea
MAKTLNEIRSAFLDYFEKNDHKIVESSNLVPNNDPTLMFANSGMVQFKNVFTGLEKRDYQRATTSQKCVRAGGKHNDLENVGYTPRHHTFFEMLGNFSFGDYFKERAIELAWNLITKEFGLDKNRLYVTVYHDDDEAFNYWKKIAGLSEDKIIRIATSDNFWSMGETGPCGPCSEIFYDHGEHLEGGLPGTKNEDGNRFIEIWNLVFMQYEQISKDKRINLPKPSVDTGMGLERIAALLQGTHDNYETDHFKKIINSAAEILKVQPNNDNLASFRVIADHLRASSFLIAEGV

SEQ ID NO: 190799 - protein, 318 aa, Unknown
  Bacterial polypetide isolated from the Sargasso Sea
KFQLMDYQKQYFSGYESLSSEASKVLGLWVKGETQKTVSKEENALIVLDKTPFYAESGGQIGDQGFILNDTFKAKVSDCTKLGKVFVHEVEVMDGKISLNEKVSSQVGPLHRNLSAAHHSATHLLHAALKQVLGNHVQQKGSLVGPSKLRFDFSHKKAVTYEELIQIENIVNEKIATNANTQTKIMNLDDAIALGAEAMFDEKYENEVRVLSMADNFSVELCGGTHVKKLGEIGTLIITSESSVSSGVRRIEALVGKPASDLIKHSLENLNELKEKLKVSEDQLSSRKDVLLRENKDLKRGKQSQTNLESKSNIKNII

SEQ ID NO: 190800 - protein, 362 aa, Unknown
  Bacterial polypetide isolated from the Sargasso Sea
YDTYGFPLELTVEIAEENSISVDIKGFEEEMNAQKQRAKAAASNIDLTLEGSLEREIDLFNKTVFNGYDSLLSEAEIKGIFLDSTLVKQASEGQKVLIVLDQTTFYGESGGQVGDIGTIFSKDVEVLVDNVIRKKNVFLHYGTIKKGILNIGQKVNTYVSSSNRAKAAANHTATHLLQSALKSVVNESVGQKGSLVAFNKLRFDFNSSNPISKDQISKIETLVNSWIMENHALEIKNMSKSEALEKGAVAMFGEKYDDEVRVVNVPGVSMELCGGTHVKTTSELGSFKIISEEGISAGVRRIEALSGQSALDYFSDRNALVNQLSDLLKANPNQLFERVNNLQAELINKNKEMQKMKDEIAY

SEQ ID NO: 190801 - protein, 271 aa, Unknown
  Bacterial polypetide isolated from the Sargasso Sea
MGSLKNLDVKTRLMTPDEAVENGALALFGEKYGDEVRVLSMGDEDGKYFSTELCGGTHVKNTGDIGEFKIVSQSSIAAGVRRIEALREKQLEEYLKNKEKLSNLSAEKDEEAIKDLSQQIIKLGGKPSLDETEQKTLIKNLTKQLETISVNVILEDKSKNIIKDEEINGVKLRLQRIDGLPPKELRKLVDKGKKDLGEGIVVVFANKDDKVGLAVGVTENLINKFDAVQFVKVGSEIIGGKGGGGRKDFAQAGGQDQSKIEEAFEKLKSLI

SEQ ID NO: 190802 - protein, 352 aa, Unknown
  Bacterial polypetide isolated from the Sargasso Sea
KNKSLKIDNEKFHALMNESKELAKKNWKGSGDSAIDDIWFDIKDKLGSTEFLGYETNQAEGVVISLLKDNKEVEILNSGDEGMIITNQTPFYGESGGQIGDKGKIISGEFKFEVSDVQKKLGDLFVHYGNVKNGSVKLNQNVEMKIDVQRRDNIRAYHSATHLLHESLRRVLGSHVTQKGSLVEPERLRFDFSHMKPISSDEIEKIETHVNSMVEKQSDVKTRLMTPKEAVENGALALFGEKYGDEVRVLSMGNEDNKYFSTELCGGTHVRNTGDIGKFKIISQSSIAAGVRRVEALRDKQLEDYLKNKEKISDLSAQKDEETTKNLSEKIIKLGGKPNLDIQDQKELIKEL

SEQ ID NO: 190803 - protein, 317 aa, Unknown
  Bacterial polypetide isolated from the Sargasso Sea
FLWRLFKEKAIELAWNLVTKDFGLDKNRLYFTVFNEDEEALNLWKKITGLGEDKIIKIATSDNFWSMGETGPCGPCSEIFYDHGDHLKGGLPGTKDQDGDRYIEIWNLVFMQFEQISKEKRINLPKPSVDTGMGLERTAALLQGTHDNYETDHFKKLINSISEAVKAKPDQKNISSFRVIADHLRASSFLIAEGVLPSNEGRGYVLRRIMRRGMRHSHLLGSKQPIFYNIFKTLMDEMSANYPELVRAESLIKETLKTEEEKFLVLLERGMKILNDEISKIDKVLPGEVAFKLYDTYGFPLDLTEDILKNKSLKIDN

SEQ ID NO: 190804 - protein, 293 aa, Unknown
  Bacterial polypetide isolated from the Sargasso Sea
LKRAEPLITETLKNEEEKFSSLLNRGIEILNDNLNKVKNNSFPGEVAFKLYDTYGFPLDLTADILKNKNIQVDNVGFDREMEKSKKIARANWKGSGDKFLEEKWFKVREEINPTEFLGYEFDKLEGVIIKISKGKDFVNEAKVGDEVEIVTNQTPFYGESGGQVGDQGIIYSNDCKVTIKDTQKQMGDIHVHYGRIEKGSLKVNQTVNLEIDVQRRNDARAYHSATHLLHEALRRTLGKHVTQKGSLVSPEKLRFDFSHNKIIEKKELENIEKYVNDMVNTAADVKTRIMTPK

SEQ ID NO: 190805 - protein, 325 aa, Unknown
  Bacterial polypetide isolated from the Sargasso Sea
RSYHFEKIFSEIGDEKVISGSAAFKLYDTYGFPLDLTQLMARERGLHVEEEEFNSLMDEQKKKAKESGKFMNDSNEVQWIQVSDGTDSEFVGYSTHISHSRIRKYAKNNETLLVVLDQTPFYAESGGQVGDVGIIKGASGELKVLDVKKDNETHIHFCSGELDNVEEELECMVDNQHRNSVKNNHTATHLMHKALKEVLGDHVNQAGSLVHPDYLRFDLTHFEKISQDEIINIEKMVNQQILLNTEVDVTVRGFDEAKEAGAEALFGEKYGDEVRVVKVADYSLELCGGTHVDRTGDIGSFKITDESSLSSGVRRIVAVTGKQAV

SEQ ID NO: 190806 - protein, 328 aa, Unknown
  Bacterial polypetide isolated from the Sargasso Sea
MAKTLNEIRSTFLDYFKKNDHKIVESSNLVPNNDPTLMFANSGMVQFKNVFTGLEKRDYQRATTSQKCVRAGGKHNDLENVGYTPRHHTFFEMLGNFSFGDYFKERGIELAWNLITKDFGLNKDRLYVTVFHEDDEAFNFWKKIAGFSDDRIIRIATSDNFWSMGETGPCGPCSEIFYDHGDHLKGGLPGTKDEDGDRYIEIWNLVFMQFEQVSKDKRINLPKPSVDTGMGLERIAALLQGTHDNYETDHFKKLISSISEFTKVKQDENNLSSFRVIADHLRASSFLLAEGVLPSNEGRGYVLRRIMRRGMRHSHLLGSKEPVFNKIF

SEQ ID NO: 190807 - protein, 357 aa, Unknown
  Bacterial polypetide isolated from the Sargasso Sea
VTQKLIIENTIKDEEIKFKDTLDRGMSLLMNEINDKVSPGVLSGQKAFELYDTYGFPLDLTEDVLKSYGWKVDHQGFEKSMNEQKIKARKAWSGSGDDAYNQDILKLLLDLPPTNFRGYDENTFETKIDLIIKNNKVYDNVLANEKVDIICNETIFYAESGGQISDKGVIIGKNFKANILNSKKITVGNGKIIFVSTIEIVTGKITVGDIINQVIDLDFRKQICSHHSATHLLHEALRQKLGLHVTQKGSLVTNEKLRFDFSHQKPISSELIKEIEDEVNYRIFCNDKVTTKVMSPEKAIEKGAIALFGEKYGDEVRVVSIGKSIDNEREAWSVELCGGTHVKNTSEISTFKILSET

SEQ ID NO: 190808 - protein, 332 aa, Unknown
  Bacterial polypetide isolated from the Sargasso Sea
YLEEVGIDNFHHTFFEMLGNWSFGDYYKSEAIQWAWELFTEVWGLDKNRLWVSVYNEDQEAFDLWPKVTDIDPKRVLKCGKKDNFWEMGETGPCGPCSEIHYFIGEDLNKQTPKGVNNSDEYWELWNLVFIQNNRLDDGSLENLPQKHVDTGAGFERIVSVLQKTYNNYTTDLFLPIIKETESLTGQNFIDNPAPFQVIADHIRMLGFSIADGCMPGNEGRGYVLRRILRRAARFGRILNQKDPFIFQLTDVLCDIMGDAFPEIKEKKIHIEKVIRSEEEIFGNTLGRGLNHFDKVLSNLSGKNIPGKEAFKLYDTYGFPLDLTQLLAREKG

SEQ ID NO: 190809 - protein, 295 aa, Unknown
  Bacterial polypetide isolated from the Sargasso Sea
VITNQTPFYGESGGQVGDQGIISNSKCKINIQDTQKKMGDLFVHYGTVQKGTFAVGDSVNLEINIQKRNNARANHSATHLLHEALRRTLGKHVTQKGSLVSPDRLRFDFSHSKPIEKDEVVKINKIVNEIVNGASDVQTRIMSPKEAVNLGALALFGEKYGDEVRVVFMGKEKNGFFSTELCGGTHVKNTKEVGEFKVISQSSIASGIRRVEALRKKQLQDYEKSLKEDKNLKEENLKNQINLIKKDLLKLKVKPDFKDNVDLSENLKNLNKQLEKIKIKKIIEDKNKNIIKDKK

SEQ ID NO: 190810 - protein, 316 aa, Unknown
  Bacterial polypetide isolated from the Sargasso Sea
IKDNKESKSLSTGEEGMIITNQTPFYGESGGQLGDKGTIVSGNSVFEVEDTQKKLGDLFVHYGSLKTGEIKINDIVEMKIDVERRDNLKAYHSATHLLHESLRRTLGKHVMQKGSLVAPDRLRFDFSHMKPITNEELETIDKLVNEYVSNSSEVTTRIMTPKAAIEKGALAFFGEKYGEEVRVVSMGKEKEVYFSTELCGGTHVKNTSDIGKFKTVSQSSIAAGVRRVEALRDKQLEDFIKNKEKLSTLSTQKDEETIQDLSSQIINLGGKPKVDNKDLKEIIKNLSRQLEQLNVSSVLSDKTKNIIKDDQINNIK

SEQ ID NO: 190811 - protein, 261 aa, Unknown
  Bacterial polypetide isolated from the Sargasso Sea
MADKSLNEIRKTFLKYFEKNGHTIVDSSNLVPNNDPTLMFANSGMVQFKNVFTGLEKRDYKRATTSQKCVRAGGKHNDLENVGYTPRHHTFFEMLGNFSFGDYFKERAIELAWNLITKDFGLDKNKLYFTVFNQDDEAFNLWKKITGFGEDRIIRIATSDNFWSMGETGPCGPCSEIFYDHGDHLQGGLPGTKDQDGDRYIEIWNLVFMQYEQVTKDKRIDLPKPSVDTGMGLERIAALLQGTHDNYKTDHFLKLINSISD

SEQ ID NO: 190812 - protein, 320 aa, Unknown
  Bacterial polypetide isolated from the Sargasso Sea
MNTNEIREAFLEFFKSKDHNIVSSSSLVPNNDDTLLFTNAGMVQFKDVFLGQEKLKFSRATTSQKCIRAGGKHNDLENVGYTLRHHTFFEMLGNFSFGDYFKEEAIFFAWEFLTDVLKLDKDRLWITVYKDDDEAKEIWINKIGIDPDRIAKLGEKDNFWSMADTGPCGPCSEIFFDHGDKYEGTPPGEDGDEGDRFVEIWNLVFMQFNRDSDGVLHDLPKPSVDTGMGLERIAAVMQGVGSNYETDIFSNLIVESEKALGNAGDVSHKVIADHLRSSCFLISDEVFPSNEGRGYVLRRILRRAIRHGYKIGADQPFMHK

SEQ ID NO: 190813 - protein, 296 aa, Unknown
  Bacterial polypetide isolated from the Sargasso Sea
MNEFDKEMQAQKDQSKKSWKGSYNNEDEIILKKLFSNLNETKFLGYEDKTAEEIIIKIIVENNETNKFNDKEKKASLIFNSTPFYAEGGGQIGDAGKIVNNDFVFKVIDTQKLGRNIYTHIGFLQDGQISLNTKAKLLVDINRRKKITAHHSATHLLHRSLRQILGNHITQKGSLVSESKLRFDISHSQSIPLETLKKIEKDINTQIINNYPVKLNICKKDKALEMGAMAIFGEKYEDTVRVVSMGEITGKEYSVELCGGTHVKNTGEIGVFKIISESSLASGIRRIEAVAGLAAL

SEQ ID NO: 190814 - protein, 270 aa, Unknown
  Bacterial polypetide isolated from the Sargasso Sea
NDPTLMFANSGMVQFKNVFTGLEKRDYQRATTSQKCVRAGGKHNDLENVGYTPRHHTFFEMLGNFSFGDYFKEKAIHYAWDLITKDFGIDKNRLYVTVFHEDDEAFNFWKKIAGLSEDRIIRISTSDNFWSMGETGPCGPCSEIFYDHGDHLKGGLPGSKDEDGDRFIEIWNLVFMQYEQVTKDKRINLPKPSVDTGMGLERIAALLQGTHDNYETDHFKKLIQSTSDIVNKKPDQNNLSSFRVIADHLRASSFLIAEGVLPSNEGRGYF

SEQ ID NO: 190815 - protein, 310 aa, Unknown
  Bacterial polypetide isolated from the Sargasso Sea
RHSTYWGSKEPIFYNIFKTLKDEMKGNYSEIERAESLIKETLRMEEEKFLILLDRGIKILNDEITKIDKILPGEVAFKLYDTYGFPLDLTQDILKNKSLTIDNDKFQSLMKESKELAKKNWKGSGDSAIDDIWFSIKDRLGPSEFLGYEADQAEGIILSLLKDNKEVNELNENDEGIIILNQTPFYGESGGQVGDTGEIISGDFKFEITDVQKKLGDLFAHYGKVKSGSIKIKDNVEMKIDIDRRNNIRAYHSATHLLHESLRRVLGTHVTQKGSLVAPDRLRFDFSHMKPISDQEIEKIENHVNSMVQK

SEQ ID NO: 190816 - protein, 293 aa, Unknown
  Bacterial polypetide isolated from the Sargasso Sea
MKIDIERRNNLKAYHSATHLLHESLRRTLGKHVMQKGSLVAPDRLRFDFSHMKPITEDELTIIDKLVNEYVQNKTDVTTRIMTPKAAIEKGALAFFGEKYGEEVRVVSMGAENNSYFSTELCGGTHVKNTGDIGKFKTISQSSIAAGVRRVEALRDKQLEIFLKNKEKMSNLSAQKDEDNIKDVSAQIIKLGGKPNLENKDTKGLIKDLNKQLEQLNIQSVLGDKTKNIIKDESINGTKIRLQKVQDLSPKDLRKLVDAGKKELREGIVVVFANKDEKVGLAVGVTENLTNKY

SEQ ID NO: 190817 - protein, 296 aa, Unknown
  Bacterial polypetide isolated from the Sargasso Sea
KNGHEIVGSSNLVPNNDPTLMFANSGMVQFKNVFTGLEKRNYKRATTSQKCVRAGGKHNDLENVGYTPRHHTFFEMLGNFSFGDYFKERAIELAWNLITKDFGIDKNKLYFTVFNEDDEAFNLWKKITGFGDDRIIKISTSDNFWSMGETGPCGPCSEIFYDHGDQLSGGLPGTKDQDGDRYIEIWNLVFMQFEQISKDKRINLPKPSVDTGMGLERITALLQGTHDNYKSDHFKKLIESISDTVNVKADENNIASFRVIADHLRASSFLLAEGVLPSNEGRGYVLRRIMRRGMRH

SEQ ID NO: 190818 - protein, 279 aa, Unknown
  Bacterial polypetide isolated from the Sargasso Sea
HLLGSKEPVFNQIFDALKDEMKGNYPELERSETLIKETLKMEEEKFLVLLDRGIKILNDEISKIKKVLPGEVAFKLYDTYGFPLDLTEDILKNKSLTVDQNKFDELMKKSKELAKQNWKGSGDASEEEIWFGIKDKIGPTEFLGYEFNQSEGVVLSIIKNNKEAQNISNGEEGIIITNQTPFYGESGGQVGDQGTIVSGNSVFEVTDTQKKLGDLFIHHGTLKSGEIKIKDVVEMKIDIERRNNLKAYHSATHLLHESLRRTLGKHVMQKGSLVAPDRL

SEQ ID NO: 190819 - protein, 293 aa, Unknown
  Bacterial polypetide isolated from the Sargasso Sea
THDNYETDHFKKIIYSASEIVKVKSDKSNLSSFRVIADHLRASSFLIAEGVLPSNEGRGYVLRRIMRRGMRHSHLLGSKEPVFYNLFDTLKNEMSGNYPELVRAESLIKETLKMEEEKFLVLLDRGIKILNDEISKIDKVLPGEVAFKLYDTYGFPLDLTEDILRNKSMSIDTEKFQSLMKESRELAKKNWKGSGDAAVEDIWFGIKDKLEATEFLGYETNQAEGVVLSLLKDNKEVDQLKENDEGMIIVNQTPFYGESGGQVGDTGEIISNDFKFEVTDVQKNLEIYLSIME

SEQ ID NO: 190820 - protein, 279 aa, Unknown
  Bacterial polypetide isolated from the Sargasso Sea
RKTIASHRVISDHLRASSFLIAEGILPSNEGRGYVLRRIMRRGMRHAHSLGSKSPVFYKLFNVLLSEMKNSYPELETGKDLIVETLRNEEEKFSSLLERGMKILDENLNKVKDNTLPGSVAFKLYDTYGFPLDLTADILRIKNIQVDNVAFEKEMEKSKALARANWKGSGDKSVEEKWFKIREELSPTEFLGYEFDKAEGVVLKISKNNKFVDSANNGDEIEIITNQTPFYGESGGQVGDQGIIFNSNCKINITDTQKKMGDLFVHIGKNKKGSIKIGQ

SEQ ID NO: 190821 - protein, 323 aa, Unknown
  Bacterial polypetide isolated from the Sargasso Sea
RASSFLLAEGVLPSTEGRGYVLRRIMRRGMRHSHLLGSKEPVFNKIFDTLKDEMKGNYPELERSETLIKETLKMEEEKFLVLLDRGIKILNDEISKIKKVLPGEVAFKLYDTYGFPLDLTEDILKNKSLTVDQNKFDELMKKSKELAKQNWKGSGDASEEEIWFGIKDKIGPTEFLGYEFDQSEGVVLSIIKNNKEAQKISNDEEGIIITNQTPFYGESGGQVGDQGTIVSGNSVFEVTDTQKKLGDLFIHHGILKSGEIKIKDVVEMKIDIERRNNLKAYHSATHLLHESLRRTLGKHVMQKGSLVAPDRLRFDFSHMKPIY

SEQ ID NO: 190822 - protein, 281 aa, Unknown
  Bacterial polypetide isolated from the Sargasso Sea
YTPRHHTFFEMLGNFSFGNYFKEKAIYYAWELLTKDFGIPKDKLSVTVYFEDHEAFKLWKKVAGLPESKIVKISTTDNFWSMGETGPCGPCSEIFYDHGDQLKGGPPGSPDQDGDRFIEIWNLVFMQFEQVSKGKRVDLPKPSVDTGMGLERITAVLQGTHDNYSIDHFTKLMSASSEITKTKIDQKTIASHRVIADHLRASSFLIAEGVLPSNEGRGYVLRRIMRRGMRHAHTLGSKKPIFYKLFDVLLNEMSHSYPEIKRGKDLIIETLKNEEEKFSSL

SEQ ID NO: 190823 - protein, 297 aa, Unknown
  Bacterial polypetide isolated from the Sargasso Sea
EVPHWVPSQDKTLLFTNAGMVQFKDYFTGEQKPLYDSATSVQRCVRAGGKHNDLNNVGFTSRHHTFFEMLGNFSFGSYFKEEAIAFAWDLLTNEFNISKEKLLVTVYKDDDEAAKIWRKKINVPENKIIKCGEKDNFWAMGDIGPCGPCTEIFYDHGPNVEGGPPGTPNEGGDRFVEIWNLVFMQYQMDSTGVKNLLPKPAVDTGMGLERIAAVLQNVTGNYEIDLFKKLNNAVMKSLGNDVENVSILRIISDHIRSAAFLIMDGVVPGNEGRGYVLRRIIRRALRYGHKVNDKKLF

SEQ ID NO: 190824 - protein, 196 aa, Unknown
  Bacterial polypetide isolated from the Sargasso Sea
MKTREIRKQFLDYFAANGHEIVSSSPLVPHNDPTLLFTNAGMVQFKDVFLGQDKRAYNRAVTAQRCVRAGGKHNDLDNVGYTARHHTFFEMLGNFSFGDYFKREAIEHAWTLLTEGYGLPAEKLWVTVFDEDDEAADIWLGDMGVPAERFARIGASDNFWAMGDTGPCGPCSEIFYDHGPEVAGGPPGTPEADGDR

SEQ ID NO: 190825 - protein, 279 aa, Unknown
  Bacterial polypetide isolated from the Sargasso Sea
ETVEKGIKILDEEISNSTNIFNGEVAFKLYDTYGFPLDLTQDYLKSKNIEVDIKTFEQKMLDQKQRARQSWKGTGDIEDEGIWFEITSKIEPTEFLGYSDMEADCKIISIISESKSVDKIKKDQEAIIILNQTPFYGESGGQVGDQGFFENNNFKFEVINTTKIFGNYFLHKGKVISGECKIEDTIKASINTVNRDFIKYNHSSTHLLHAALRKILGNHVTQKGSLVNSEKLRFDFSHNNPIEKDQLINVEKIVNDQIKKNGIVEVKIVDQKKAIKEGA

SEQ ID NO: 190826 - protein, 186 aa, Unknown
  Bacterial polypetide isolated from the Sargasso Sea
MKSAELRQAFLDYFASQGHTKVSSSSLVPANDPTLLFTNAGMNQFKDVFLGRESRDYTRATSSQRCVRAGGKHNDLENVGYTARHHTFFEMLGNFSFGDYFKREAIKFAWEFLTGTLGLPEERLWVTVHVSDDEAADIWLKEMGVSAERFSRLDEDNFWQMGDTGPCGPSSEIFYDHGADVPGGPP

SEQ ID NO: 190827 - protein, 180 aa, Unknown
  Bacterial polypetide isolated from the Sargasso Sea
MNSNQIRSTFLNYFKKNGHEVIHSSSLVPDNDPTLMFANSGMVQFKNIFTGKETRDYNRATTAQKCVRAGGKHNDLENVGYTTRHHTFFEMLGNFSFGDYFKELAIELAWSLITKEYSINKDRLLVTVYSDDQEAFDLWKKIAGLSENKIIKISTSDNFWSMGETGPCGPCSEIFYDHGD

SEQ ID NO: 190828 - protein, 268 aa, Unknown
  Bacterial polypetide isolated from the Sargasso Sea
SKKPIFYKLFYVLLNEMSKSYPELNTGKDLIVETLKNEEEKFSSLLERGMKILEQNLEKVKNNTLPGEIAFKLYDTYGFPLDLTADILKNKNIKIDTSEFDKAMQKSKQVARASWKGSGDKSVEEKWFKVREHLNPTEFLGYELDKAEGVILKISKDNKFVENAKEGDEVEVITNQTPFYGESGGQVGDQGIISNSKCKITIKDTQKKMGDLFVHYGKVQNGSIKVGESVNLEINVQKRNNSKANHSATHLLHESLRRTLGKHVTQKG

SEQ ID NO: 190829 - protein, 88 aa, Unknown
  Bacterial polypetide isolated from the Sargasso Sea
MASLNEIRSTFLNYFKKNGHEIVASSPLVPRNDPTLMFTNSGMVQFKNLFTGLEKRDYLRAVTAQKCVRAGGKHNDLDNVGYTARHHT

SEQ ID NO: 190830 - protein, 250 aa, Unknown
  Bacterial polypetide isolated from the Sargasso Sea
MADKSLNEIRSTFLGYFKKNDHKIIESSNLVPNNDPTLMFANSGMVQFKNVFTGLEKRNYKKATTSQKCVRAGGKHNDLENVGYTPRHHTFFEMLGNFSFGDYFKERAIELAWNLVTKDFGIDKNRLYVTVFHEDDEAFNFWKKIAGLDKDRIIRIPTSDNFWSMGETGPCGPCSEIFFDHGEKLKGGLPGSKDQDGDRYIEIWNLVFMQFEQVSKDKRIDLPKPSVDTGMGLERITALLQGTHDNYETD

SEQ ID NO: 190831 - protein, 221 aa, Unknown
  Bacterial polypetide isolated from the Sargasso Sea
EMKGNYPELERSETLIKETLKMEEEKFLVLLDRGIKILNDEISKIKKVLPGEVAFKLYDTYGFPLDLTEDILKNKSLTVDQNKFDELMKKSKELAKQNWKGSGDASEEEIWFGIKDKIGPTEFLGYEFNQSEGVVLSIIKNNKEAQNISNGEEGIIITNQTPFYGESGGQVGDQGTIVSGNSVFEVTDTQKKLGDLFIHHGILKSGEIKIKDVVEMKIDIE

SEQ ID NO: 190832 - protein, 244 aa, Unknown
  Bacterial polypetide isolated from the Sargasso Sea
MAKTLNEIRSTFLNYFNKNDHKIIESSNLVPNNDPTLMFANSGMVQFKNVFTGLEKRDYKRATTSQKCVRAGGKHNDLENVGYTPRHHTFFEMLGNFSFGDYFKDRAIELAWNLITKDFGLDKNRLYVTVYHEDEEAFNLWKKIAGFNDDKIIRIATSDNFWSMGETGPCGPCSEIFYDHGEHLKGGLPGSKDQDGDRFIEIWNLVFMQFEQISKEKRINLPKPSVDKGMGLERIAALLQGTHD

SEQ ID NO: 190833 - protein, 291 aa, Unknown
  Bacterial polypetide isolated from the Sargasso Sea
KIYSKLNLDPTEFLGFETLTTKSKVLAIIQNNEIKEKIYEGEDFEIITDKSPFYAEKGGQIGDTGKGFSETGEFEIIDTTSPYGGVFIHKSKMKSGEITKNSLIKLEVSEDRREKIKRNHTATHLLHAALREIIGIHVRQSGSLVHPDYLRFDFTNLESLSESSIKKVEEKVNDYIRNNLEVEVCNTTYNKAIEDGALAFFDDKYEHDVRTIKIDAPWSFELCGGTHMSRTGGIGLFKIVSEAGIGSGNRRIFATTGIATENIVENNQTIVREIMKTLSSNTEDVIDKFNS

SEQ ID NO: 190834 - protein, 266 aa, Unknown
  Bacterial polypetide isolated from the Sargasso Sea
IKILNDEISKIDKILPGEVAFKLYDTYGFPLDLTEDILKNKSLKIDNKKFHSLMKESKELAKKNWKGSGDSAIEDIWFSIKDKLGTTEFLGYETNQAEGKILSLLKNNKEVKELSSGDEAMIIVNQTPFYGESGGQVGDKGEIVSGEFKFVVSDVQKKIGDLFVHYGTVKSGSIKLNQNVELKIDVQRRDNIRAYHSATHLLHESLRRVLGSHVIQKGSLVEPDRLRFDFSHMKPITPNEINKIEDFVNSMVKKKSEVKTRLMTPK

SEQ ID NO: 190835 - protein, 289 aa, Unknown
  Bacterial polypetide isolated from the Sargasso Sea
ERTKRNHSATHLLHAALRNILGEHVTQKGSLVDPDKLRFDFSHFEAVTPEQLREIERTVNEQILENTPVDIDITDMDTAKEKGAMALFGEKYGDVVRVLTMGTDKYSVELCGGTHVARTGDIGLFRITSESGISSGVRRIEAVTGLGALEWVDETERTLRETARLVKGTRDSVVDKVKQVLDRNRQLEKDVDALKAKLASSAGTDLAGSAVEVAGLKVVASEMEGADRKALMETADQLKNKLGEGVVVLATVEDGKVVLVAGVTKSATNRIKAGDLMKHLASLVDGKGG

SEQ ID NO: 190836 - protein, 263 aa, Unknown
  Bacterial polypetide isolated from the Sargasso Sea
YTPRHHTFFEMLGNFSFGDYFKERAIELAWNLITKDFGLDKNRLYFTVFNEDEEAFKLWKKISGLNENKIIKISTSDNFWSMGETGPCGPCSEIFYDHGDHLKGGLPGSKDQDGDRYIEIWNLVFMQYEQVSKDKRIDLPKPSVDTGMGLERMAALLQGTHDNYKTDHFLKLINSISETVKVKPNENNLSSFRVIADHLRASSFLLAEGVLPSNEGRGYVLRRIMRRGMRHSHLLGSKEPIFYNIFKTLLDEMSKNYPEIKRA

SEQ ID NO: 190837 - protein, 306 aa, Unknown
  Bacterial polypetide isolated from the Sargasso Sea
HVTQKGSLVEPSRLRFDFSHMKPISNDEIDKIEQLVNSMISKKTDVKTRLMTPDEAVEDGALALFGEKYGEEVRVLSMGDDGGKYFSTELCGGTHVKNTGDIGQFKITSQSSIAAGVRRIEALRDKQLENFLKNKEKLLNQSSEKNDELIKDLTKQIIGLGGKPNIDQSDQKLLIKNLTKQLENLSVKVILNDKTKNQIKDEEIKGIKIRFQNVDGLPPKELRKLVDDGKKQLGEGIVVVFANKDEKVGVAVGVTNKLIDKFDAVKFVKLSSEIIGGQGGGGRKDFAPAGGQDPNKIKEAFEKLNL

SEQ ID NO: 190838 - protein, 283 aa, Unknown
  Bacterial polypetide isolated from the Sargasso Sea
MEHIELAWKLITKEFGLEKDRLFVTVFHEDDEAFNFWKKIAGLNDDKIIRIATSDNFWSMGETGPCGPCSEIFYDHGDHLKGGPPGSKDEDGDRFIEIWNLVFMQYEQISKDKRINLPKPSVDTGMGLERITALLQGTHDNYKTDHFKKLINTISEAVKVSPNENNLSSFRVIADHLRASSFLIAEGVLPSNEGRGYVLRRIMRRGMRHSHLLGSKEPIFYNIFKTLKEEMKGNYPEVERAESLIKETLKMEEEKFLVLLDRGINILNNEISKIDKVLPGEVA

SEQ ID NO: 190839 - protein, 185 aa, Unknown
  Bacterial polypetide isolated from the Sargasso Sea
MKTAEIRNCFLSFFEERKHAVKSSSSLVPTDDPTLLFTNAGMVQFKKVFLGQEDLGVKRAATSQKCVRAGGKHNDLEEVGRTTRHHTFFEMLGNFSFGDYFKRDAIRYAFELLTDVYGLEPERLYATVHDSDDEAEDIWLNDIGLPADRVYRLGDKDNFWQMADTGPCGPCSELHYDLRDEPEPV

SEQ ID NO: 190840 - protein, 62 aa, Unknown
  Bacterial polypetide isolated from the Sargasso Sea
MKAAEIREKFLKFFESKGHTIVRSSSLVPGNDPTLLFTNSGMVQFKDVFLGAESRPYARATT

SEQ ID NO: 190841 - protein, 251 aa, Unknown
  Bacterial polypetide isolated from the Sargasso Sea
MKTNEIRQAFIKFFETEGHQSVKSSPLIPANDSTLLFTNAGMVQFKDIFLGKEDQGFTKAVSAQRCLRAGGKHNDLENVGYTSRHHTFFEMLGNFSFGDYFKEDAIQLAWDFITNELRLEKDRLWITIFEDDDEAAKIWLEKVGVSADRLVRLGEKSNFWSMGDTGPCGPCSEIFYDHGDHIDGGPPGSDDEDGDRFVEIWNLVFMQFDRQANGELVNLPKPSVDTGMGLERIAAVMQGVSSNYDIDLFQK

SEQ ID NO: 190842 - protein, 274 aa, Unknown
  Bacterial polypetide isolated from the Sargasso Sea
GNFKQVSSDLSWVLISDSKDSIFLGYEQIESQSQICKYATTDDYNVLVLDKTPFYAESGGQIGDTGVIKIGDDTLTVMDCQKNGDEIHHICSGSFNNEKLLEPVLCIIDLNRRQRIRKNHTATHLLHAALKKTLGDHIQQAGSLVHPDYLRFDLTHSEKISNDEVSEIENLVNDEIQKNVRLDISIKNFDVAKSEGAEALFGEKYGDKVRVISIGDFSMELCGGTHVNRTGDIGLLKITEESSLAAGVRRMVAVTGPEAINYFQNKVSIVQELQ

SEQ ID NO: 190843 - protein, 308 aa, Unknown
  Bacterial polypetide isolated from the Sargasso Sea
RAYHSATHLLHESLRRVLGTHVTQKGSLVEADRLRFDFSHMKPISDEEINKIEQHVNSMVNTKSEVKTRLMTPKEAVENGALALFGEKYGDEVRVLSMGDEKSKYFSTELCGGTHVKNTGDIGKFKIVSQSSIAAGIRRVEALRDKQLQEYLNNKEKLSDLSAQKDEKTINDLSSKIIRLGGKPNLDNKDQKGLIKDLSKQLDQLNVDLILKDKSKNKIKDEKINGVNVRLQIVEDLPPKDLRKLVDQGKKDLLEGIVIVFANKDEKVGLAIGITDKLISKYDAVKFAKLGSKITGGNGGGGRKDSLK

SEQ ID NO: 190844 - protein, 305 aa, Unknown
  Bacterial polypetide isolated from the Sargasso Sea
IDKVLPGEVAFKLYDTYGFPLDLTQDILKNKSLEIDNKKFDDLMKQSRELAKKNWRGSGDSAVDDIWFAIRDKLGATEFLGYETDQAEGVVKSLLKNNEQVESLKTGDEGMIILNQTPFYGESGGQVGDTGEIITNNCKFEVSDVQKKLGDLFVHYGKVISGEIKINESVELKIDVERRENIRAYHSATHLLHESLRRVLGTHVTQKGSLVEADRLRFDFSHMKPISPEEIEKIESFVNSMVETKSDVKTRLMTPKEAVDNGALALFGEKYGDEVRVLSMGDEKNKYFSTELCGGTHVRNTADIG

SEQ ID NO: 190845 - protein, 288 aa, Unknown
  Bacterial polypetide isolated from the Sargasso Sea
SDKSNLSSFRVMADHLRASSFLIAEGVLPSNEGRGYVLRRIMRRGMRHSHLLGSKKPVFYNLFDTLKNEMSGNYPELVRAESLIKETLKMEEEKFLVLLDRGIKILNDEISKIDKVLPGEVAFKLYDTYGFPLDLTEDILRNKSMLIDIKKFQSLMKESRELAKKNWKGSGDAAVENIWFGIKDKVEATEFLGYETNQAEGIVLSLLKDNKEVDQLKENDEGMIIVNQTPFYGESGGQVGDNGEIKSNDFKFEVTDVQKKLGDLFVHYGKVKSGSIKLQESVELKIDV

SEQ ID NO: 190846 - protein, 316 aa, Unknown
  Bacterial polypetide isolated from the Sargasso Sea
ASDFLGYETDRAEGIILSLLKGNKEVSELNENDEGMVIVNQTPFYGESGGQVGDTGQIISGNFKFEISDVQKKLGDLFVHYGKVISGKIKVKDNVEMKIDVKRRNNVRAYHSATHLLHESLRRVLGTHVTQKGSLVAPDRLRFDFSHMKPISEQEIEEIESYVNSMVEKKSDVKTRIMTPKEAVDNGALALFGEKYGEEVRVLSMGDEEEKYFSTELCGGTHVRNTGDIGRFKIISQSSIAAGVRRVEALRENQLNEFLKNKEKLSDLSAHKDKEMINDLSKQIVKLGGKPNLENNDIKSLIKDLSKQLEFLKFTS

SEQ ID NO: 190847 - protein, 124 aa, Unknown
  Bacterial polypetide isolated from the Sargasso Sea
GPCSEIFYDHGEKLKGGPPGSADQDGDRFIEIWNLVFMQYEQISKEKRINLPKPSVDTGMGLERMTAVLQGTHDNYEIDHFQKIMSSSAEITKTPISEKTIASHRVIADHLRASSFLIAEGILP

SEQ ID NO: 190848 - protein, 288 aa, Unknown
  Bacterial polypetide isolated from the Sargasso Sea
SQTGDAVEIITNQTPFYAESGGQVGDQGIIYSNDCKIIIIDTQKKMGDLHVHYGKIEKGSLKVNQTVNLEIDINKRNNARAYHSATHLLHEALRRILGKHVTQKGSLVSSEKLRFDFSHNKPIEKFEIEKIEKYVNDMIDTEVDVKTRIMTPKEAVAKGALAMFGEKYGEEVRVLSMGKENGGYFSTELCAGTHVKNTRDIGKFKIINQSSIAAGVRRVEGLREKQLEDYEKSLKKNKSLKEKSLKDQIDSIKKELSKYKIKPDLNNELELSENIKNLNKQLDQIKIE

SEQ ID NO: 190849 - protein, 262 aa, Unknown
  Bacterial polypetide isolated from the Sargasso Sea
RANHSATHLVHEALRRRLGDHITQKGSLVSADRMRFDISHPKAITTEELVMVEEDVNEQIRANSKVTTRLMEPDTAVEAGAMALFGEKYGEEVRVVSMGQDGSKKSNRIYSTELCGGTHVDRTGDIGLFKIVSESAVAAGVRRIEVVTGKGAEAFTRLQEFALREVAGVLKTSPEKAVERLERLVKERRQLERELQNARRELATNGGGGSKPKSKDLGGISLIRKTLEGMPARELKNLVDGMKGELSSGVVAIISNTDGKAS

SEQ ID NO: 190850 - protein, 299 aa, Unknown
  Bacterial polypetide isolated from the Sargasso Sea
MREPMMYKMVEALNREMGAAFPELMEARELIEDSLLTEEIKFKDTLERGLKLLDVELSRLKEGDKVSGDVAFKLYDTYGFPLDLTQDTLREKSFEVDLPGFQKAMELQKQKARQAWSGSGDKKLELIWFDLEHRLGATEFLGYNSTGSQAKILALVVKGIEQNQVTQNDLVDVVFNQTPFYGESGGQVTDKGKIFNDLMEGVVESVQKVGNLLVHKVLILRGKISVGDLADLEVDTVRREAITSNHSATHLMHQALKDTLGSHVNQRGSINDNEKIRFDFSHNSPLTADEIILIEDIVK

SEQ ID NO: 190851 - protein, 229 aa, Unknown
  Bacterial polypetide isolated from the Sargasso Sea
RSFKKTLGKHVTQKGSLVSPEKLRFDFSHNKPIEKKEIEKIEKYVNDMVNTAADVKTRIMTPKEAVEKGALAMFGEKYGEEVRVLSMGKENGGYFSTELCGGTHVKNTKDIGKFKIISQSSIAAGIRRVEGLREKQLEDFERSLQKDKSLKEENLKNQIESIKKELSKYKVKPDYKSDLELTENIKNLNKQLDKIKIENIIKDKSKNIIKDKKIGSFVLRQQILIDFPF

SEQ ID NO: 190852 - protein, 295 aa, Unknown
  Bacterial polypetide isolated from the Sargasso Sea
PGTKDQDGDRYIEIWNLVFMQFEQISKEKRINLPKPSVDTGMGLERIAALLQGTHDNYETDHFKKLINSISEAVKVKPDEKNVSSFRVIADHLRASSFLIAEGVLPSNEGRGYVLRRIMRRGMRHSHLLGSKQPIFYNIFKTLMDEMSVNYPELIRAESLIKETLKTEEEKFLVLLERGMKILNEEISKIDKVLPGEIAFKLYDTYGFPLDLTEDILKNKSLKIDNKKFKTLMNESRELAKKNWKGSGDSSVNKIWYEIKDRLSPSEFLGYETDYAEGKILSLLKDNKEVKSLSA

SEQ ID NO: 190853 - protein, 169 aa, Unknown
  Bacterial polypetide isolated from the Sargasso Sea
NKLRFDFSHKQPLSQEEIAKIEAIVNKEALNNLEVKTELMKLDDALKSGAMALFGEKYDDDVRVLSMGNNSYSVELCGGTHVKRTGDIGFFIITSQSSVASGIRRIEAVAGMKSIEHINKIREINSSLQSVLNVSSEDIQEKIKSLIEENKELKKKSGNKKSKKSVVFS

SEQ ID NO: 190854 - protein, 248 aa, Unknown
  Bacterial polypetide isolated from the Sargasso Sea
IDWAWELLTEVYKLDKSRLYVTVFEGDELDGTKEDSEAISFWSKHVQKKEIIKCSKKDNFWEMGDVGPCGPCSEIHMDIRSEAERSKIKGRDLVNKDHPQVIEIWNLVFMEYLRKADRSLVPLPQKHVDTGMGLERLAVALQEKKSNYDIDLFQSLIKKTEELSRIKYGANPKTDIALRIVSDHVRAISFSIADGQLPSNTGAGYVIRRILRRAVRYGYQVLEIKEPFMYNIATTLVEQMGDAYPELT

SEQ ID NO: 190855 - protein, 263 aa, Unknown
  Bacterial polypetide isolated from the Sargasso Sea
RAYHSATHLLHESLRRVLGTHVAQKGSLVEPSRLRFDFSHMKPILNEEIDKIEEFVNTMVSKKSDVKTRLMTPDEAVENGALALFGEKYGDEVRVLSMGDENGKYFSTELCGGTHVKNTGDIGKFKIVSQSSIAAGVRRIEALRDKQLEEYLKNKEKLSNLSAEKDEETIKDLSQQIIKLGGKPSLEEANQKTLIKNLTKQLETISVIAILEDKSKNIIKDEEINGVKLRLQKIDGLPPKDLRKLVDKGKKDLGEGIVVVFAN

SEQ ID NO: 190856 - protein, 306 aa, Unknown
  Bacterial polypetide isolated from the Sargasso Sea
AQKFFYDHGEKLKGEPPGSSDEDGDRFIEIWNLVFMQYEQISKDKRINLPKPSVDTGMGLERMTAVLQGTHDNYKIDHFKKIMGASSDLLKSPINESTIASHRVIADHLRACSFLIAEGILPSNEGRGYVLRRIMRRGMRHAHSLRSKDPIFYKLFDILLNEMKSSYPELITGKELIIETLKNEEEKFSSLLERGMKILDENLTKVSNKTFPGSTAFKLYDTYGFPLDLTADILKGKGIKVDNVGFEKEMEKSKALARSNWKGSGDRSVEERWFKIREEINPTEFLGYEFDKAEGVVIKISKDGKF

SEQ ID NO: 190857 - protein, 56 aa, Unknown
  Bacterial polypetide isolated from the Sargasso Sea
MKTNEIRQSFLDFFESKNHQIVSSSALVPNNDETLLFTNAGMVQFKDVFLGTDKKS

SEQ ID NO: 190858 - protein, 288 aa, Unknown
  Bacterial polypetide isolated from the Sargasso Sea
KGSLVNSKYLRFDFSHFSKISKEELEEIGNIVSSEILKNSPLEEFRSMAIDQAKEMGAMALFGEKYGEKVRVIKFADSVELCGGIHVPSTSKIACFKILSESSIASGIRRIEAITESTAWSYYKTQDQVTEELKTILKNPKDLSKAVLDLSQKNVQLSKELEKLQKEKARGLKKELVSKIEILGDVSFLGQIVDLESSSVKDILFQLKSENQNFVGVLGTKTGAKCTISIALSDQLTKDGKHHAGKIIKELSQLIKGGGGGQSFFATAGGSNPNGLNEAILKAKEIFS

SEQ ID NO: 190859 - protein, 288 aa, Unknown
  Bacterial polypetide isolated from the Sargasso Sea
QKNRSKSKKNDDLSDWILINDKISSSVFKGYDLNEVEAKICKYREAKSEDGSVSYHIVTNMTTFYPEGGGQIGDTGKLISSADEIQVIDSYKDSGDIIHLTKKLPSNLESQVKLKVATKRRSLIEANHTGTHLLHQALRNILGDHVEQRGSMISDEMFRFDFSHPSKLSSSDIHSINNFVNSKIKESIPLVENREEDYERAINNGAIGLFTEKYEDKVRTVKFDESYELCGGTHAKNTSKLKTFSIISEVSQAFGIRRITATCNEEIILKELEKKKASKEKAANEKAN

SEQ ID NO: 190860 - protein, 289 aa, Unknown
  Bacterial polypetide isolated from the Sargasso Sea
HAHTLGSKNPIFFKLFDVLLNEMSQSYPELKTGKDLIVETLKNEEEKFSSLLDRGMKILNQNLEKVNNNTLPGEIAFKLYDTYGFPLDLTADILKNKKIKIDTNTFNKEMEKSKEVARASWKGSGDKSIEEKWFKVREELSPTEFLGYEFDKAEAVILKISKDDKFVDGAKTGDEIEIITNQTPFYGESGGQVGDQGIIYTSDCKINIKDTQKKMGDLYVHTGKVEKGSIKIGQSVNLEIDINKRNNSKANHSATHLLHESLRRILGKHVTQKGSLVSPDRLRFDFSHN

SEQ ID NO: 190861 - protein, 303 aa, Unknown
  Bacterial polypetide isolated from the Sargasso Sea
LPHRSMPHAGKVFPGSLAKDTQVNAEVNAQSRSATAANHSATHLLHAVLQEVLGAHVQQRGSLVNNERLRFDFSHGDAMSGAEINEVERLVNQQVRANNDVGTRLMKLEDARAQGAAALFGERYEEDVRVVSMGEFSLELCGGTHVRRTGDIGSFRIISEGGIAAGVRRVEALTGEAAYVHGVNESETLNRLAAVLKTGRSDLEERATSLSTRVRELERKVEHLQGQLAAGGMGDDPASEIQEVNGIRVLVKRYDDVDIKGLRVMMDRLKDRLGSAVVVLGGVQNGKATLLVGVSKDLTDCCP

SEQ ID NO: 190862 - protein, 164 aa, Unknown
  Bacterial polypetide isolated from the Sargasso Sea
MNSSEIRSKFLNYFKKNGHEIVHSSPLVPHNDPTLMFANSGMVQFKNIFTGKEKRDYNRAVTSQKCVRAGGKHNDLENVGYTARHHTFFEMLGNFSFGDYFKDDAIKFSWDLITKELGIDKKKLLVTVFNEDEDAYNLWKKIAGLSDDKVIKISTADNFWSMGE

SEQ ID NO: 190863 - protein, 281 aa, Unknown
  Bacterial polypetide isolated from the Sargasso Sea
GRSSATFSSTLGQKITVKEAVEFTGYENSSEKTSIVSLYDLEGNERDFLELGQEGIICLSKTPFYAESGGQVGDAGVIESSDKQFSVSDTQLSGDQYLHIGKVSAGVFKSGETVTAEINVPQRDRTRKNHSATHLMHAALRKVLGLHVEQKGSLVNDEKLRFDFSHDGNITNDELTQIENMVNAEIVKNSLVSTELMSPEQAIEKGAMALFGEKYGQVVRVLTMGTDYSVELCGGTHVNRTGDIGVFKIISEVGISSGTRRIEALTGLKAMEEIRSNEGYL

SEQ ID NO: 190864 - protein, 280 aa, Unknown
  Bacterial polypetide isolated from the Sargasso Sea
KTVEKYSDIMWGRSEETDEAIRVVAEHARSASFLIGDGVSPSNTGRGYVLRRLIRRGMLFAKKLNLLDSPLSSLVDVISREMGEYYPELVDNKNFIIEVISKEEENFSKTLSNGQSVLDGMINFRIKNKNRESSDNFSKGLKIAANESKKSNAKNFDKSLTGREAFILYDTYGYPVEITIEVAKQNNLDLDVDSFYKELENQKKVSKEKSDQFNKGQNLEIFKHLDIPSTKFVGYEKTNHNSKVISIIHNDKIVESIEEESNAQIIVSETPFYAERGGQI

SEQ ID NO: 190865 - protein, 263 aa, Unknown
  Bacterial polypetide isolated from the Sargasso Sea
IQSTSEIVKKKPEQNNLSSFRVIADHLRASSFLIAEGVLPSNEGRGYVLRRIMRRGMRHSHLLGSTEPVFYNLFDTLKNEMSGNYPELKRAESLIKETLKMEEEKFLILLDRGIKILNDEISKIDKVLPGDIAFKLYDTYGFPLDLTEDILKNKSLSIDTKKFQSLMKESRELAKKNWKGSGDAAVEDIWFGIRDKLGATEFLGYETNQAEGVILSLLKDNKEVKELKSGDEGIIITNQTPFYGESGGQVGDIGGFKNGEFRF

SEQ ID NO: 190866 - protein, 94 aa, Unknown
  Bacterial polypetide isolated from the Sargasso Sea
MTSQLIKKIVTGDEIRNAFLKFYSEKLHKIIPSASLIPDDPTVMLTIAGMLPFKPVFLGLKERPSKRATSSQKCIRTNDIENVGVTARHHTFFE

SEQ ID NO: 190867 - protein, 276 aa, Unknown
  Bacterial polypetide isolated from the Sargasso Sea
AVLQGTHDNYSIDHFKKLMSVSSEITKTKIDNKTIASHRVIADHLRASSFLIAEGVLPSNEGRGYVLRRIMRRGMRHAHTLGSKNPIFYKLFDVLSDEMSKSYPELKRGKDLIVETLKNEEEKFSSLLDRGIKILDQNLLKVKNNTLPGEIAFKLYDTYGFPLDLTADILKNKKIKIDTNAFDKEMEKSKEVARASWKGSGDKFVEEKWFKVREELSPTEFLGYEFDKTEGVILKISKDNKFVDSVETGDEVEVITNQTPFYGESGGQVGDQGIIY

SEQ ID NO: 190868 - protein, 301 aa, Unknown
  Bacterial polypetide isolated from the Sargasso Sea
NKDPIFHKLFPTFLSGIRESYPELARAKDLIINTLLNEETKFKGTLEKGIKILEEEISNSTNIFDGEVAFKLYDTYGFPLDLTQDYLKSKNIEVDLKTFDKKMLDQKQRARQYWKGTGDIQDDNIWYEITSEIEPTEFLGYRDIEAECRILAIVSSGNKTNIIEKDQDAVIILNQTPFYGESGGQVGDKGFLENDNFKFEVVNTTKIFGNYFLHTGTVINGQCKINDNIIASISSENRNLIKYNHSSTHLLHATLRKTLGNHITQKGSLVNSEKLRFDFSHSNPIDTEQINNIEAIINDQI

SEQ ID NO: 190869 - protein, 278 aa, Unknown
  Bacterial polypetide isolated from the Sargasso Sea
NEIRQSFLDFFESKNHEILSSSALVPNNDETLLFTNAGMVQFKDVFLGTDKKSYKRASTSQRCIRAGGKHNDLENVGYTLRHHTFFEMLGNFSFGDYFKEEAIEFAWEFLTEVLKLDKDKLWITVYKDDDEAEEIWKNKIGIDPKRIARLGDEDNFWSMGDTGPCGPCSEIFYDHGDHIEGTPPGADGDEGDRFIEIWNLVFMQFNRDESGDMEPLPKPSVDTGMGLERIAAVMQGVNSNYETDIFKDLIIASEKILGDKGSTSHKVIADHIRSSVFL

SEQ ID NO: 190870 - protein, 283 aa, Unknown
  Bacterial polypetide isolated from the Sargasso Sea
GCVQNSDCMVQITDTKKFAGLFIHSGTVAKGYIEEGDSVSLFVEAERRNRIKANHSATHLLHEALRQLLGDHVAQRGSLNGEDRLRFDFSHHSFLSNEEIQSIEKSVNKYIRQNSSVQTRIMTPDDARGIGAQALFGEKYGDEVRVVSMGYQKDTGKGLGGQTYSLELCGGIHVKKTGEIGAFTILSDSASSAGVRRIDALTGESATIHLAKRSQQVNDLSAFLKVSADELTQRVNVLLEERKNLTNEVAELKRKLALSGEGNGEIAKTEKINGISFLLRSTR

SEQ ID NO: 190871 - protein, 299 aa, Unknown
  Bacterial polypetide isolated from the Sargasso Sea
NSKSISGKEVFELFDTYGFPSDLTSLILKERQMTFNNEDYQTELSKQRERSKQSTKTIASDWIILNEQQGNDFCGYDKLSCDTKINQYRNISMNGKQVCQIILNETPFYPEGGGQAGDKGKLIFENKSEIIVYDTKKENGKIIHYTDLSDIDFKKNVTAVVNSLNRNDSSSNHTSTHLLHQALRNVLGDHVEQKGSSVSSENLRFDFSHFKKIEEQQLKEIENFVNDKIDCSLDLIETRDEDYDTAISKGAIGLFGEKYGKKVRTIKFGESYELCGGTHVKNTLNIRNFLIISESSIAS

SEQ ID NO: 190872 - protein, 297 aa, Unknown
  Bacterial polypetide isolated from the Sargasso Sea
ILNEEISKIDKVLPGEVAFKLYDTYGFPLDLTQDILKSKSLTIDNDKFNTLMQESRELAKKNWKGSGDSAVDDIWFGIREKLGATEFLGYETNQAEGVVLSLLKDNKEVDQINSGDEAMIIINQTPFYGESGGQVGDKGEIISGEFVFEVEDVQKKLGDLFVHYGKVKKGSIKNNENVEMKIDIERRDNVRAYHSATHLLHESLRRVLGTHVTQKGSLVEPDRLRFDFSHMKPISSDEIEKIETYVNSMVSNKSEVKTRIMTPKEAVNNGALALFGEKYGDEVRVLSMGSEKNKYFS

SEQ ID NO: 190873 - protein, 302 aa, Unknown
  Bacterial polypetide isolated from the Sargasso Sea
INEPVFFNLFDTLKNEMSGNYPELVRAESLIKETLKMEEEKFLVLLDRGIKILNDEISKIDKVLPGEVAFKLYDTYGFPLDLTEDILRNKFMSIDTEKFQSLMKESRELAKKNWKGSGDAVVEDIWFGIKDKLEATEFLGYETNQAEGVVLSLLKDNKEVEQLKENDEGMIIVNQTPFYGESGGQVGDTGEIVSNDFKFEVTDVQKKLGDLFVHYGKVKSGSIKLQESVELKIDVERRDNTRAYHSATHLLHESLRRVLGTHVTQKGSLVEPSRLRFDFSHMKPILNEEIDKIEEFVNKMVS

SEQ ID NO: 190874 - protein, 235 aa, Unknown
  Bacterial polypetide isolated from the Sargasso Sea
MKNSKQIRQEFISFFEKKGHHFVRSAPVVPNDDPTLLFSNSGMAQFKDVFLGTGIRDYNRAVNSQKCIRASGKHNDLEDVGYDNYHHTFFEMLGNWSFGDYFKKEAIEWAWELMTVQWGLPKEKMWATVFAGGDGVEADEDAENLWKNCTDIHAEQILRFDKNDNFWEMGEVGPCGPCSELHIDLGQGSCPFSEKHECAVNLEGCWRFVELWNLVFMQYQRFADGHLEELSAQHV

SEQ ID NO: 190875 - protein, 62 aa, Unknown
  Bacterial polypetide isolated from the Sargasso Sea
GLFKIVSESGIAAGVRRIEAVTGADAVAYVSEQEQQLSDVAALVKGDSASVLEKVTALLEKS

SEQ ID NO: 190876 - protein, 154 aa, Unknown
  Bacterial polypetide isolated from the Sargasso Sea
MNKTKNSVNAIRSKFINYFNKNDHEVITSSNLVPNNDPTLLFTNAGMVQFKNVFTGLEIRDYNRAVSSQKCLRAGGKHNDLENVGRTARHHTFFEMLGNFSFGDYFKEKAIFQAWELLTKEYEIPKEKLLVTIFHDDTEAENLWKKISGLSEKK

SEQ ID NO: 190877 - protein, 257 aa, Unknown
  Bacterial polypetide isolated from the Sargasso Sea
KEAVSLGALALFGEKYGDEVRVVFMGKENNGFFSTELCGGTHVKNTKEVGEFKVISQSSIASGVRRVEALRNKELHDYENSLKKDKSLKEKNLKNQVDLVQKELTKLKIKPDYKDNMDLSENLKNLNKQLDKIKIKKIIEDKNKNVIKDKKVANFVFRQQVLIDFPPKELRSVIDQGKKDIKNGIVISISIFEGKVGIAVGLTQELTKKFDAVKLVKVASEVLGGKGGGGRKDFAQAGGSHKDKIKEAFKILNDKIS

SEQ ID NO: 190878 - protein, 303 aa, Unknown
  Bacterial polypetide isolated from the Sargasso Sea
KDLRVANSQKCIRVSGKHNDLEEVGRDGFHHTFFEMLGNWSFGDYYKKEAIEWSWELFTEVWKLDKSRLWVTVFEEDDEAFELWKNQTDIDPNRIIRSGAKDNFWEMAETGPCGPCSEIHYYVGNNPEDQQAEMVNNSSEYWELWNLVFIQFNRLKDGTMEDLPKKHVDTGAGLERICSVLQNKDSNYKTDLFSKTIEDLENFSNKKYQDFEVSYNVICDHIRMLSFAIADGVIPSNDGRGYVVRRVLRRGSKFAMNLEIKEPILYKLVDSVVSTMSSHYPELKEKQEYIEQTISLRRTVILT

SEQ ID NO: 190879 - protein, 202 aa, Unknown
  Bacterial polypetide isolated from the Sargasso Sea
MISNQVRNTFIDYFKEQGHSHVSSSSLVPDNDPTLMFANSGMVQFKNVFTGLEKRSYTRATTSQKCVRAGGKHNDLENVGFTTRHHTFFEMLGNFSFGDYFKEDAIYFAWDLITKKYEINPDKLLVTIYHDDEQAEKFWKKIAQLPDSRIIKISTSDNFWSMGDTGPCGPCSEIFYDHGEKYFGGPPGSPDEDGDRFIEIWN

SEQ ID NO: 190880 - protein, 254 aa, Unknown
  Bacterial polypetide isolated from the Sargasso Sea
MADKTLNEIRNTFLKYFEKNEHKIVESSNLVPNNDPTLMFANSGMVQFKNVFTGLEKRDYVRATTSQKCVRAGGKHNDLENVGYTPRHHTFFEMLGNFSFGDYFKEQAIHYAWDLITKDFGIDKDRLYVTVFHEDDEAFNFWKKIAGFSDDRIIRIATSDNFWSMGETGPCGPCSEIFFDHGDHLAGGLPGSKDEDGDRFIEIWNLVFMQYEQVSKDKRINLPKPSVDTGMGLERIAALLQGTHDNYETDHFEK

SEQ ID NO: 190881 - protein, 309 aa, Unknown
  Bacterial polypetide isolated from the Sargasso Sea
KSPVFYKIFETLKNEMEGNYPELKRSDSLIKETLRMEEEKFLVLLDRGIKILNDEISKIKKVLPGEVAFKLYDTYGFPLDLTEDILKNKSLNVDHKKFEEIMKKSKELAKKNWKGSGDSSEEEIWFSIKDKIGPTEFLGYESNQSEGVILNIIKGNKEVNSLSNNEDGIIITNQTPFYGESGGQLGDTGTIVSGNSIFEVNDTQKKLGDLFVHYGCLKTGEMKTSDVVEMKIDVERRENLKAYHSATHLLHESLRRTLGKHVMQKGSLVAPDRLRFDFSHMKPISNEELETIDKLVNEYVKNNTEVTTR

SEQ ID NO: 190882 - protein, 201 aa, Unknown
  Bacterial polypetide isolated from the Sargasso Sea
MADKTLNEIRNTFLKYFEKNDHKIVESSNLVPNNDPTLMFANSGMVQFKNVFTGLEKRDYARATTSQKCVRAGGKHNDLENVGYTPRHHTFFEMLGNFSFGDYFKEQAIHYAWNLITKDFGIDKNKIYVTVFHEDDEAFNFWKKIAGFSDDRIIRIATSDNFWSMGETGPCGPCSEIFFDHGDHLPGGLPGSKDEDGDRFI

SEQ ID NO: 190883 - protein, 279 aa, Unknown
  Bacterial polypetide isolated from the Sargasso Sea
DLSLPKEKLLVTVYSEDEDAATLWKKVAGLNDERIIRIPTSDNFWAMGDTGPCGPCSEIFFDHGEKVEGGPPGSSNEDGDRFIEIWNLVFMQYEQVTKDERIDLPKPSIDTGMGLERIAAILQGSHDNYEIDLMRSLIEASAHASNTDPDGSAKVSHRVIADHLRASSFLIADGVLPSNEGRGYVVRRIMRRAMRHAHLLGCVEPLIWRLVPALSKQMGEAFPELIRAESLIVETLKLEETRFKETLARGLRQLEDATNKLSDTKNLPGEVAFKLYDTF

SEQ ID NO: 190884 - protein, 283 aa, Unknown
  Bacterial polypetide isolated from the Sargasso Sea
LNVNLKINHERRSSCKAYHSATHILHQALRDILGEHVTQKGSLVSFDKLRFDFSHHKPMTNEELRNVERIANEVINSASDVQTKLMKSDDAINSGALALFGEKYADDVRVLSIGVKDNNIYSTELCGGTHVNNTSQIGEFEIINESSVSSGIRRIEALRDEDLKLYKKNKLSEESEIEEKKIQSEKLKVISNKNISEIKKQIDENIKENNHTHLIIEFYDDLKVSDLRNIVDYAKKSFEREGVIVIGSKNAGKISYQVGVSDELSNSISANDIAQYASSISNG

SEQ ID NO: 190885 - protein, 183 aa, Unknown
  Bacterial polypetide isolated from the Sargasso Sea
MNSKDIRNSFIQYFEKKDHKFHRSSPVVPIDDPTLLFTNAGMNQFKPVFLGQVEPKYKRAANSQKCIRVSGKHNDLEEVGVDTFHHTFFEMLGNWSFGDYYKKDAIEWAWDLFTNEWKLDKERLWATVYVDDDEAFDLWTQVTDIKPERVIRCGKKDNFWEMSETGPCGPCSEIHYYVGDDPK

SEQ ID NO: 190886 - protein, 292 aa, Unknown
  Bacterial polypetide isolated from the Sargasso Sea
LIADGILPSNEGRGYVLRRIMRRAMRHVHKLGIKDLHMYKLVDSLKNIMGRSFDELKRAQPLIENTLMQEEEKFRETLERGIGLLNKSIDNLRNSEPLSGEVAFKLYDTYGFPVDLTADILRGHGKELDYEGFKANMNQQKDKARKSWSGSGEQETSEILIKLKEKHNESEFVGYEKISEQIKIISIIKDDEELVEAVIDNEVSVITDKTPFYGESGGQEGDIGFFEWENGSAKVVDTIKVDDIIIHSVKVLEGVLKVNSKIMANVDLNRRDSLKIHHSATHLLHESLRRHV

SEQ ID NO: 190887 - protein, 120 aa, Unknown
  Bacterial polypetide isolated from the Sargasso Sea
MAKKTLKNVRKSFLDYFSNKDHHIVDSSNLVPSNDPTLMFTNSGMVQFKNVFTGLEKREYKRAVTSQKCVRAGGKHNDLENVGYTPRHHTFFEMLGNFSFGDYFKDVAIELAWNLITKEF

SEQ ID NO: 190888 - protein, 296 aa, Unknown
  Bacterial polypetide isolated from the Sargasso Sea
NYPELKRAESLIKETLKMEEEKFLVLLDRGIKILNDEISKIDKVLPGEVAFKLYDTYGFPLDLTEDILRNKSLSIDTKKFQSLMNESRELAKKNWKGSGDSAVEDIWFSIKDRLGVTEFLGYETNQAEGTVLSLLKNNKEVKELKSKDEGMIITNQTPFYGESGGQVGDTGEIVSGDFKFEVTDVQKKLGDLFVHYGNVISGSVKIKDNVEMKINVESRNDTRAYHSATHLLHESLRRVLGTHVTQKGSLVEPSRLRFDFSHMKPISTDEIDKIERFINSMVSKKTDVRTRLMTPE

SEQ ID NO: 190889 - protein, 317 aa, Unknown
  Bacterial polypetide isolated from the Sargasso Sea
MSQFLLTDIRKKFLNYFKQNNHEIVDSSNLVPNNDPTLMFTNSGMVQFKNVFTGLEKRPYKRATTSQKCVRAGGKHNDLENVGYTPRHHTFFEMLGNFSFGDYFKEQAIEHAWKLLTKDFELPQEKLSVTVFNEDEDSFKLWKKIAGLSENKIIKISTSDNFWSMGDTGPCGPCSEIFYDHGDKLKGGPPGSTNEDGDRFIEIWNLVFMQYEQISKEKRIDLPKPSVDTGMGLERMTAVLQGTHDNYKIDHFKKIIEASSDIIKTPIDNKTIASHRIISDHLRASSFLIAEGILPSNEGRGYVLRRIMRRGMRHAHS

SEQ ID NO: 190890 - protein, 280 aa, Unknown
  Bacterial polypetide isolated from the Sargasso Sea
KYLRFDFSHFKKIEESKLNAIEDFVNNKIDESIELIENRSENYEDATKKGVVALFNEKYGKTVRSVKFGNSYELCGGTHVKNTIQIRNFVITSESSIASGIRRIEAISGPSALKYLREKNKEIKDISNILSSKSNLIDSIKNIKDQNTQISKNLKSSQIKLIDFYVDSWSNQTEKINSFNFLFKKLNLEPSFVKSLCLGLSKKIENHIIILITVSNNRFSIFSAVSGFVVENSNITASEIIKRICDSIGGGGGGQEKFAAGSGPKTDKIELIISKLKDTF

SEQ ID NO: 190891 - protein, 212 aa, Unknown
  Bacterial polypetide isolated from the Sargasso Sea
MTSASDVRSGFLDYFANNGHEIVSSSPLVPRNDPTLLFTNAGMVQFKDIFVGTEQRPYTRATTSQKCVRAGGKHNDLENVGYTARHHTFFEMLGNFSFGDYFKDLAIELAWNLVTKEYGLDPSRLLVTVYSEDEEAALLWRKIAGLPDEKIIRISTSDNFWAMGNTGPCGPCSEIFYDHGPSIPGGPPGSAEEDGDRFIEIWNLVFMQYQQV

SEQ ID NO: 190892 - protein, 265 aa, Unknown
  Bacterial polypetide isolated from the Sargasso Sea
NDLENVGYTPRHHTFFEMLGNFSFGDYFKERAIELAWNLITKDFGIDKNKLYFTVFNEDDEAFNLWKKITGFGDDRIIKISTSDNFWSMGETGPCGPCSEIFYDHGDQLSGGLPGTKDQDGDRYIEIWNLVFMQFEQISKDKRINLPKPSVDTGMGLERITALLQGTHDNYKSDHFKKLIESISDTVKVKADENNIASFRVIADHLRASSFLLAEGVLPSNEGRGYVLRRIMRRGMRHSHLLGSKDPVFHNIFKSLLNEMSDSYP

SEQ ID NO: 190893 - protein, 278 aa, Unknown
  Bacterial polypetide isolated from the Sargasso Sea
FDFSHMKPILNEEIDKIEEFVNKMVSKKSNVKTRLMTPDEAVENGALALFGEKYGDEVRVLSMGDEDGKYFSTELCGGTHVKNTGDIGKFKIVSQSSIAAGVRRIEALRDKQLEDYLKNKEKLSNLTAEKDEETIKDLSQQIIKLGGKPSLEETNQKTLIKNLTKQLETISVNSILEDKSKNIIKDEEINGVKLRLQKIDGLPPKELRKLVDKGKKDLGEGIAVVFANKDDKVGLAVGVTDNLTSKYDAVQFVKVGSEIIGGKGGGGRKDFAQAGGQD

SEQ ID NO: 190894 - protein, 296 aa, Unknown
  Bacterial polypetide isolated from the Sargasso Sea
RSSWKGSGDGDTQKLWFDLAKKIKPTTFEGYKETTIIANISALVLNSEQVQNLSDNNEQSAIITNKSCFYAESGGQVGDKGTIISDTAEFKVTDTRKTPQGIFIHFGNVTSGNFKIGQEVKLKIDTSLRDLIKKNHSATHLLHAALRNNLGTHVAQRGSLVNEDKLRFDFSHNKQISTEQIEIIQKEVTSIISNSCETQIDIKSQDEAIKQGAMALFGEKYGDEVRVVTLGENNNKPYSIELCGGTHVTNVQNIKKFHIISEESVSSGVRRIEAYTGDRVDEFISNKIKESKLLEK

SEQ ID NO: 190895 - protein, 299 aa, Unknown
  Bacterial polypetide isolated from the Sargasso Sea
ACTQKGSLVSPEKLRFDFSHNKPIEKNEIDRIEEYVNKMVKTAADVKIRIMTPKEAVKKGALAMFGEKYGDEVRVLSMGKEDSDYFSTELCGGTHVKNTKDIGKFKIISQSSIAAGIRRVEALRAEQLESFEKIQKQDKSFKEKNLTDQIDLIKKELIKNKITPDYNINLKLSENVKILNKQLEKIKIQNIINDKSKNFIKDKKIGTFILRQQVLKDLPPKELRNIVDQNKKDIKEGIVVSFSTFEGKVAIAIGITSGLTKKFDAVTLIKVVSEAIGGKGGGGRKDFAQAGGTKIDKID

SEQ ID NO: 190896 - protein, 263 aa, Unknown
  Bacterial polypetide isolated from the Sargasso Sea
RKNHTATHLLHAALKKTLGDHIQQAGSLVHPDYLRFDLTHSEKISNDEVSKIENLVNDEIQKNVKLDISIKNFDVAKSEGAEALFGEKYGDKVRVISIGDFSMELCGGTHVNRTGDIGLLKITEESSLAAGVRRMVAVTGPEAINYFQNKVSIVQELQGILGAKSDEISSRVSHLIDERKVLEKKLKQKRSSSAFNAKVIIEDALKVNEHNIIVSEVDSESLDELKRFGDQTLNVLESGIAVLGSNKGAKPAAVIVVTDDIIK

SEQ ID NO: 190897 - protein, 161 aa, Unknown
  Bacterial polypetide isolated from the Sargasso Sea
MADKSLNEIRSTFLKYFEKNDHRIVESSNLVPNNDPTLMFANSGMVQFKNVFTGLEKRDYKRATTSQKCVRAGGKHNDLENVGYTPRHHTFFEMLGNFSFGDYFKEKAIFYAWDLITKDFGLDKNRLYFTVFSEDDEAFNLWKKVTGFNDDRIIRIPTSDN

SEQ ID NO: 190898 - protein, 277 aa, Unknown
  Bacterial polypetide isolated from the Sargasso Sea
EQIWFGVKDKVGPTEFLGYEFNRSEGVVLSIVKDNKETEKLSAKEEGAIVTNQTPFYGESGGQLGDTGKISIGDFIFEVSDTQKQLGDLFIHYGTLKNGEIKINDVVEMKIDEERRGNLKAYHSATHLLHESLRRTLGKHVMQKGSLVAPDRLRFDFSHMKPITNEELVKIDKIVNDYVTNSTEVTTRIMTPKAAIEKGALAFFGEKYGDEVRVVSIGKEKNTYFSTELCGGTHVKNTGDIGKFKIISQSSIAAGVRRVEALRDKQLEDYMQNKEKL

SEQ ID NO: 190899 - protein, 270 aa, Unknown
  Bacterial polypetide isolated from the Sargasso Sea
PELIEAKELIEDSLHNEEVKFKTTLDRGLKILDNEIINLKDGDKVSGEVAFKLYDTYGFPVDLTQDTLRERQLQVDLKGFERAMELQKERARKAWSGSGDKKLDVIWFELGSKLGATEFLGYNTLRSQAKVLSLVIKGVEQAKVSDNDLVDAVFNQTPFYAESGGQVADIGRAFNDEMEAVIEDVQKIGNLFVHKLRVLKGKISSGDLLRLEVDNSNREGISANHSATHLMHQALKDVFGSHVNQRGSLNDAEKIRFDFSHDRPLSSKDI

SEQ ID NO: 190900 - protein, 242 aa, Unknown
  Bacterial polypetide isolated from the Sargasso Sea
SLVPDNDPTLMFANSGMVQFKNIFTGKETRDYNRATTAQKCVRAGGKHNDLENVGYTTRHHTFFEMLGNFSFGDYFKELAIELAWNLITKEYSINKDRLLVTVYSDDQEAFDLWKKIAGLSENKIIKISTSDNFWSMGETGPCGPCSEIFYDHGDKYEGGPPGSPNEDGDRFIEIWNLVFMQYEQISKSERINLPKPSIDTGMGLERMTALLDGSNDNYSTDLFQPIINESTKLCGDESSIT

SEQ ID NO: 190901 - protein, 323 aa, Unknown
  Bacterial polypetide isolated from the Sargasso Sea
MNERKQSTKLAWKGSGDEAVDKIWFSLKEKIGATEFLGYEHEKSEAIVLSLIKKGKEVKEINEGDEAELVTNQTPFYGESGGQIGDTGYISNSKSNFQVIDTQKKLGDLYVHRGKLISGKIKINDTLILSIESERRANIRACHSATHLLHEALRRTLGKHVIQKGSFVGPDRLRFDFSHTKPIQEDEVKKIEEYVNRMVKSNSEVRTRLMTPKEAVENGALALFGEKYGEEVRVLSMGNDKDKYFSTELCGGTHVKNTSEIGDFKIVGQSAIAAGVRRVEALRSTQLANYLKKKEQASEDLHKVTSDKNISLQEKIKTFGQKP

SEQ ID NO: 190902 - protein, 131 aa, Unknown
  Bacterial polypetide isolated from the Sargasso Sea
MAKTLNEIRSTFLDYFEKNDHKIVESSNLVPNNDPTLMFANSGMVQFKNVFTGLEKRDYQRATTSQKCVRAGGKHNDLENVGYTPRHHTFFEMLGNFSFGDYFKERGIELAWNLITKDFGLNKDRLYVTVF

SEQ ID NO: 190903 - protein, 298 aa, Unknown
  Bacterial polypetide isolated from the Sargasso Sea
DLENVGYTPRHHTFFEMLGNFSFGDYFKEKAIHYAWDLITKDFGLDKNRLYVTVFHEDDEAFNFWKKIAGLSDDRIIKISTSDNFWSMGETGPCGPCSEIFYDHGDHLKGGLPGSKDEDGDRFIEIWNLVFMQYEQVTKDKRINLPKPSVDTGMGLERIAALLQGTHDNYETDHFKKLIESTSDIVKKEPDQKNLSSFRVIADHLRASSFLIAEGVLPSNEGRGYVLRRIMRRGMRHSHLLGSKKPFFYNLFETLKNEMSGNYPELKRAESLIKETLKMEEEKFLVLLDRGIKILNDE

SEQ ID NO: 190904 - protein, 184 aa, Unknown
  Bacterial polypetide isolated from the Sargasso Sea
MTPKEAVGLGALALFGEKYGDEVRVVFMGKEKNGFFSTELCGGTHVKNTKEVGEFKVISQSSIASGIRRVEALRNKQLKDYEKSLKEDKSLKEKSLKDQINLIKKDLLKLKVKPDLKDNLDLSENLKNLNKQLEKIKIKRIIEDKNKNIIKDKKVGSFLFRQQVLKDFPPKGIKKCNRSRKKRY

SEQ ID NO: 190905 - protein, 286 aa, Unknown
  Bacterial polypetide isolated from the Sargasso Sea
KDFVDQAKIGDNVEIVTNQTPFYAESGGQVGDKGIIYSNDCKVIVEDTQKKMGDIHVHYGKVDKGSLKVNQSVNLEININRRNNSRAYHSATHLLHEALRRTLGKHVTQKGSLVSPEKLRFDFSHNRPIEKKEIEKIEKYVNDMVNTAADVKTRIMTPKEAVEKGALAMFGEKYGDEVRVLSIGKENGNYFSTELCGGTHVRNTKDIGKFKIIGQSSIAAGVRRIEALRAEQLINYENSLKKDKSLKEKDLKDQIDLVKNELLKHKVKPDYSSDLGLSENIKNLNK

SEQ ID NO: 190906 - protein, 244 aa, Unknown
  Bacterial polypetide isolated from the Sargasso Sea
MTSSEVRQKFIDFFKSKDHKQISSASILNNYDDNLMFTNAGMNQFKNIFIGTQKPNDLRIVNSQKCLRVSGKHNDLEEVGIDTYHHTFFEMLGNWSFGDYFKEEIINWSFELLTDHYKIDKDDLYVTIFKGSTEDNTPADEESFNYWKKLFPDEKIIYCDKKENFWEMGEYGPCGPCSEIHIDIRSKDEKNKINARDLINKDHPHIIEIWNLVFIQYNRLTDGSLKKLDNKYVDTGMGLERLCM

SEQ ID NO: 190907 - protein, 241 aa, Unknown
  Bacterial polypetide isolated from the Sargasso Sea
SKDKRINLPKPSVDTGMGLERITALLQGTHDNYATDHFKKLIQASSEAVKKKPDKSNISSFRVIADHLRASSFLIAEGVLPSNEGRGYVLRRIMRRGMRHSHLLGAKKPIFYNIFKTLQEEMSQSYPELDRAQSLIKETLKMEEEKFLTLLDRGIKILSDEISKIDKILPGEVAFKLYDTYGFPLDLTEDILKNKSLKVDHKKFDSLMKESRELAKKNWKGSGDSSVDEIWFSIKDKLGPT

SEQ ID NO: 190908 - protein, 318 aa, Unknown
  Bacterial polypetide isolated from the Sargasso Sea
KVAGFPDSKIIKISTSDNFWSMGETGPCGPCSEIFFDHGDKLKGDPPGSSNQDGDRFIEIWNLVFMQFEQVSKEKRINLPKPSVDTGMGLERITAVLQGTHDNYAIDHFKKLITASSEITNTKINNDTISSHRVIADHLRASSFLIAEGVLPSNEGRGYVLRRIMRRGMRHAHTLGSKQPIFFKLFNVLLNEMSESYPELNTGKDLIIETLKNEEEKFSSLLDRGMKILDQNLEKVKNNILPGEIAFKLYDTYGFPLDLTADILKNKNIKIDTPAFDKAMHKSKELARASWKGSGDKSLEEKWFKVREQFDPTEFLGY

SEQ ID NO: 190909 - protein, 166 aa, Unknown
  Bacterial polypetide isolated from the Sargasso Sea
MADKSLNEIRSTFLKYFEKNDHKIVESSNLVPNNDPTLMFANSGMVQFKNVFTGLEKRDYQRATTSQKCVRAGGKHNDLENVGYTPRHHTFFEMLGNFSFGDYFKEKGIELAWNLITKDFGLDKNRLYVTVFHEDDEAFNFWKKIAGFSDDKIIRIATSDNFCQWG

SEQ ID NO: 190910 - protein, 265 aa, Unknown
  Bacterial polypetide isolated from the Sargasso Sea
EVKSLSSNDEGMIITNQTPFYGESGGQVGDTGEITSVDFKFEVHDVQKQLGDLFVHYGKVTKGSIKVNDNVEMKIDINRRNDVRAYHSATHLLHESLRRVLGTHVTQKGSLVEPDRLRFDFSHMKPISNDEIKKIENFVNSMVEKKSEVKTRIMTPKEAVDNGALALFGEKYGDEVRVLSMGSEKDRYFSTELCGGTHVRNTGDIGKFKIISQSSIAAGVRRVEALRDKQLQEYLNKKEKLSDLENEKIQETIKDLSQKIIKLGG

SEQ ID NO: 190911 - protein, 114 aa, Unknown
  Bacterial polypetide isolated from the Sargasso Sea
MADKTLNEIRNTFLKYFEKNDHTIVESSNLVPNNDPTLMFANSGMVQFKNVFTGLEKRDYQRATTSQKCVRAGGKHNDLENVGYTPRHHTFFEMLGNFSFGDYFKERAVELAWK

SEQ ID NO: 190912 - protein, 270 aa, Unknown
  Bacterial polypetide isolated from the Sargasso Sea
GYVIRRILRRAVRYGYTNLDIKTPFIYELVDIVISKYLTIYPDLKNQSEYISSLIYDEEKGFLKTLNQGLSLISQIIESNLNNKIISGEDSFKLYDTYGFPIDLTSLIANENDFQVDIEGFNEYMKIQKSRSKSTSNEEIKEWVIVGETSSNNIFKGYDHYELESKVFKYRESINSEGDTQYHLVTNETPFYPEGGGQIGDTGEIISNSSSVTVKNTFRDGEDIIHLVDNLPIELGDTLLMKIDKNRRVSIQRNHTSTHLLQFALKKILG

SEQ ID NO: 190913 - protein, 201 aa, Unknown
  Bacterial polypetide isolated from the Sargasso Sea
MKTNEIRQAFIKFFESEGHQSVKSSPLIPANDPTLLFTNAGMVQFKDIFLGKEDQGFTKAVSAQRCLRAGGKHNDLENVGYTSRHHTFFEMLGNFSFGDYFKEDAIQLAWDFITNELKLEKDRLWVTIFEDDDEAASIWLEKIGVPANRLVRLGEKSNFWSMGDTGPCGPCSEIFYDHGDHIDGGPPGSDDEDGDRFVEIW

SEQ ID NO: 190914 - protein, 127 aa, Unknown
  Bacterial polypetide isolated from the Sargasso Sea
KCKLNDNIKASINNENRNLIKYNHSSTHLLHAALRKTLGNHVTQKGSLVNAAKLRFDFSHNHPIEKENIHSIETIVNDQIRSNSSVDIKIIDQKKAIEEGAMALFGEKYEDEVRVITMGNENGSYFS

SEQ ID NO: 190915 - protein, 280 aa, Unknown
  Bacterial polypetide isolated from the Sargasso Sea
QLTDHTIPGDLAFELYDTYGFPVDLTADVAREQGMHVDMPAFEANMATQKQRSKLAHQFTGGHDIALDAMHQSQFLGHDRLLAKGTVLALFNHKASGTDYLDAGDTGMVVLDQTPFYAEAGGQVGDEGVLRWSGGQAVVTDTQKRGKAIVHYVQLSEGHLAVGDVVHAEVAPSRQAICCHHSATHLLHASLRMHLGDQVVQKGSLVTAERLRFDFAYDAPVRQSDLDAIERSVNACIRANVPVQTQEMSLVEAKDSGVMMLFGERYKAQVRVLSMGDFSA

SEQ ID NO: 190916 - protein, 252 aa, Unknown
  Bacterial polypetide isolated from the Sargasso Sea
EKNEIEKIEKFVNDMVNTAADVKTRIMTPKEAVEKGALAMFGEKYGDEVRVLSMGKENGGFFSTELCGGTHVKNTKDIGKFKIISQSSIAAGVRRVEALRDKQLEDYENSLKQDKSTKDKNLKGQISTIRKELLKLKVEPSYIEGFLKSKEEKDLPEQYKSLSKVLEAIKIQNVIKDASKNIIKDKKIGSYTLRHQVLTDFPPKELRNVVDQSKKDIKQGIVVGFSTFEGKVGVAVGITKELTKKYDAVTLV

SEQ ID NO: 190917 - protein, 74 aa, Unknown
  Bacterial polypetide isolated from the Sargasso Sea
MAQKTLNEIRETFLKYFEKNDHKIIESSNLVPNNDPTLMFANSGMVQFKNVFTGLEKRDYKRATTSQKCVRAGG

SEQ ID NO: 190918 - protein, 287 aa, Unknown
  Bacterial polypetide isolated from the Sargasso Sea
GLVTDIYGLSSENIIVSVFHEDDDSVKIWKEDIGIHPERIIKLGEKDNFWSSGKTGPCGPCSELYYDFKPEKGLQNIDLEDGDRFIEFYNLVFMQYNRDPAGQLTDLKYKNIDTGMGLERMAQILQKKKNNYETDLIFPIIQKASEISKIDYYSSDERTKISLKIIGDHIRAVIHLISDGVVASNLGRGYILRRLIRRMVRHGRLLGLKNEFLSKLASVGIKLMQENYPDLKNNYDYILSEIKIEEIRFRETLDRGEKLLDELISSGQKMITGFKAFELYDTYGFPL

SEQ ID NO: 190919 - protein, 291 aa, Unknown
  Bacterial polypetide isolated from the Sargasso Sea
IEIWNLVFMQFEQIDSNTRIDLPKPSIDTGMGLERITALLNGTNDNYKTDLFLPLINKSIELSNDNSQSLNPSHRVIADHIRSSSFLIADGVTPSNEGRGYVLRRIMRRGMRHAHSLGNKEPIFHKIFPTLLKTFKDSYPEITRAKDLILNTFINEETKFKETVEKGLKILEEQISLSPKKLNGEIAFKLYDTYGFPLDLTQDYLRTKKIEVDIDSFNFKMKEQKDRARKNWKGTGDKEDQKKWFDITENLNPTEFLGYEQSETESVIVSIINIKSDTETKKLSVEDEGII

SEQ ID NO: 190920 - protein, 104 aa, Unknown
  Bacterial polypetide isolated from the Sargasso Sea
MKSAEIREAFLSFFEEKGHTRVASSSLIPANDPTLLFTNAGMNQFKDCFLGLEKRAYTRATTSQKCVRAGGKHNDLENVGYTARHHTFFEMLGNFSFGDYSSVT

SEQ ID NO: 190921 - protein, 309 aa, Unknown
  Bacterial polypetide isolated from the Sargasso Sea
MTAKLIVDSSHRSAVSSNHSATHLLHETLRTVLGEHVVQKGSLNDSNRLRFDFSHSRPVNEKQLLQIEKIVNSFIRQNSEVKTRIMTPEDAKNLGAKALFGEKYGDEVRVVSMGRDNGRGSGVTSNSYSVELCGGTHVRRTGEIGIFKITSEAASSSGVRRIEALTGEGALKIINNFDMQLTDISLALKSGRSDVVPKLRSLLQENKNLKNQISDLQKQLAMKSENTSEIKSKVQSVNGIKFLGQTISGVANKELRNILDSYKEELGSGIILLLSTSEDKVSIIAGVTEDLTDRISAVDVVKLASEETG

SEQ ID NO: 190922 - protein, 224 aa, Unknown
  Bacterial polypetide isolated from the Sargasso Sea
IKTEEESFLRTLDTGLELLEMLCQKYKSTKLLPGEEVFKLYDTYGFPIDLTNIIVKEKSFSIDHEGFEKQMESQRKRSKQARCHEATFEDEPGGGEARLVKTPEDRLQMSRHHTGTHLLHTALRNTLGSHVKQAGSLVDLDRLRFDFFHYEKISVDQLKKIENEINLKIRENIIVDTFTTTLEDAKAKGALAFFKDKYGDNVRVVKIGDYSIECCGGHHVSQTI

SEQ ID NO: 190923 - protein, 283 aa, Unknown
  Bacterial polypetide isolated from the Sargasso Sea
GKLTGQEDLSNPSLRVIADHLRAASFLIADGVIPSNEGRGYVLRRIIRRALRHAHKLGMNEPILSSLVPVLEKRMSEAHPVLTKNLEIIQANLSKEEEQFSSTLEQGMQLLESEVKKLEGHKISGEVAFKLYDTYGFPVDMTADFARERNLIVDMEMYDSLMLEQKERARSSGNFSSIIPESLNIEGATNFLGYESHVSDSNIVEIFSKTSTKEEVNEGEEALLLLNQTPFYAESGGQIGDKGYIESADSIFEVYDTQKKGDHFLHIGHVKSGSFKKSDNVKA

SEQ ID NO: 190924 - protein, 304 aa, Unknown
  Bacterial polypetide isolated from the Sargasso Sea
MRHAHTLGNKDTVFDKIFPTLLDIFKTAYPELIRAKDLIINTFINEETKFKETVEKGLKILEDEISVSSNKLDGKIAFKLYDTYGFPLDLTQDYLKSKNVEVDVENFNQMMKEQKERARKNWKGTGDQEDQKNWFKISENLSSTEFLGYEQTESESEITSIVKSDSKTDQLNEGENGIIILNQTPFYGESGGQVGDIGTIVFEHNTFEVKDTTKLFGSFYLHHGKVKKGKFKIGDSVTATIDSYKRQLIKCNHSSTHLLHASLRKILGNHVSQKGSLVNSEKLRFDFSHNEPITSDNIIKIENF

SEQ ID NO: 190925 - protein, 312 aa, Unknown
  Bacterial polypetide isolated from the Sargasso Sea
EHWGLPKDKMWATVFAGGDGVEADEEAENLWKDCTDIEPEKILRFDKNDNFWEMGEVGPCGPCSELHIDLGQGTCPLSNKHECSVNLDGCWRFVELWNLVFIQYQRFEDGHLEELAAQHVDTGMGLERICRVLQEVDSNYSTDLFSPIIDKISEVTGQAYSGNENRVAFSVIADHLRSLSFAVADGALPSNEGRGYVLRRMLRRATRFGRVLNMHEPFIYKLVPTLAEAMGNAFPEINKQQDHVQNVIQAEESSFGKTLDRGLEIFQKMISSTETKSSKMISGEDAFKLYDTFGFPVDLTRLMSQEYGFEVD

SEQ ID NO: 190926 - protein, 197 aa, Unknown
  Bacterial polypetide isolated from the Sargasso Sea
PDEAVENGALALFGEKYGDEVRVLSMGDEDGKYFSTELCGGTHVKNTGDIGKFKIVSQSSIAAGVRRIEALRDKQLEEYLKNKEKLSNLSAEKDEETIKDLSQQIIKLGGKPSLEEADQKTLIKNLTKQLETISVNKILEDESKNIIKDEEINGIKLRLQKIDGLPPKELRKLVDKGKKDLGEGIVVVFANKDDKVG

SEQ ID NO: 190927 - protein, 302 aa, Unknown
  Bacterial polypetide isolated from the Sargasso Sea
IDKILPGEVAFKLYDTYGFPLDLTQDILKNKSLQIDNQKFEELMKKSRELAKKNWKGSGDSAVDRIWFAIKDKLGPTEFLGYETVQAEGVIKSLLKKNEQVESLKTGDEGMIIVNQTPFYGESGGQVGDTGEIVSNNFKFKVSDVQKKLGDLLVHYGKVISGEIKISQSVELKIDVERRENIRAYHSATHLLHESLRRVLGTHVMQKGSLVEADRLRFDFSHMKPITPDEINKIESYVNSMVDTKSEVKTRLMTPKEAVDNGALALFGEKYGDEVRVLSMGNEKSKYFSTELCGGTHVRNTG

SEQ ID NO: 190928 - protein, 154 aa, Unknown
  Bacterial polypetide isolated from the Sargasso Sea
TFLKYFEKNDHKIVESSNLVPNNDPTLMFANSGMVQFKNVFTGLEKRDYQTATTSQKCVRAGGKHNDLENVGYTPRHHTFFEMLGNFSFGDYFKERAIELAWNLITKDFGLDKNKLYFTVFHEDEEALKLWKKITGFGDDRIIKIPTSDNFWSM

SEQ ID NO: 190929 - protein, 137 aa, Unknown
  Bacterial polypetide isolated from the Sargasso Sea
MADKSLNQIRSTFLEYFEKNDHKIVESSNLVPNNDPTLMFANSGMVQFKNVFTGLEKRDYQRATTSQKCVRAGGKHNDLENVGYTPRHHTFFEMLGNFSFGDYFKEKAIELAWNLITKDFGLDRNRLYFTVFNEDDE

SEQ ID NO: 190930 - protein, 189 aa, Unknown
  Bacterial polypetide isolated from the Sargasso Sea
MTENSLSDIRKEFLDFFSIRKHNVVQSSPLVPHNDDSLLFTNAGMVQFKNIFTGLDKPENGNRAVTAQKCVRAGGKHNDLENVGLTKRHHTFFEMLGNFSFGDYFKEDAIEMAWELLTKNYQIDREKLYITVYHTDDEAFNIWKKVTGFSDSKILKISTSDNFWEMGDSGPCGPCSEIFFDHGPEFSGG

SEQ ID NO: 190931 - protein, 280 aa, Unknown
  Bacterial polypetide isolated from the Sargasso Sea
PGDVAFKLYDTYGFPLDLTEDILRNKSMSIDTEKFQSLMKESRELAKKNWKGSGDAAVEDIWFGIKDKIEPTEFLGYETNQAEGVVLSLLKANKEVDQLKKNDEGMIIVNQTPFYGESGGQVGDTGEIATNDFKFEVTDVQKKLGDLFVHYGKVKSGSIKLQESVELKIDVERRDNTRAYHSATHLLHESLRRVLGTHVTQKGSLVEPSRLRFDFSHMKPILNEEIDKIEDFVNTMVSKKSDVKTRLMTPDEAVENGALALFGEKYGDEVRVLSMGDEDG

SEQ ID NO: 190932 - protein, 110 aa, Unknown
  Bacterial polypetide isolated from the Sargasso Sea
MQSTNDIRQAFLDFFAANGHEIVSSSLLVPHNDPTLMFTNAGMVQFKNVFIGQESRDYCRATTSQKCVRAGGKHNDLENVGYTARHHTFFEMLGNFSFGDYFKDEAIELA

SEQ ID NO: 190933 - protein, 283 aa, Unknown
  Bacterial polypetide isolated from the Sargasso Sea
LLERGMKILNDEIYKVEKTLSGEIAFKLYDTYGFPLDLTEDILKSKSLTVDHKKFKSLMQQSRDLAKKNWKGSGDSSVDGIWFSIKDKLQPTEFLGYETNQAEGIVLSLIKNNKEVESLNNGDEAMIILNQTPFYGESGGQIGDTGVILSGKFKFKVSDVQKKIGDLFVHYGKVESGSIKLKENVEMKIDVDRRENIRAYHSATHLLHESLRRVLGEHVIQKGSLVAPDRLRFDFSHMKPISSDEIGKIEKFVNEMVDTKSEVKTRLMTPKEAVDNGALALFG

SEQ ID NO: 190934 - protein, 247 aa, Unknown
  Bacterial polypetide isolated from the Sargasso Sea
MKSELVRKKFLDFFSSKRHEIVDSASMVVKNDSTLMFTNAGMNQFKEFFLGNNKPKNTRITNTQKCLRVSGKHNDLEEVGIDTYHHTFFEMLGNWSFGDYFKKNAIKWSWELLTEVYNIDKKNLYVTIFEGDKKEGLSLDEESFEYWSQIIPTDRILRGNKKDNFWEMGDQGPCGPCSEIHIDIRSEVDKSLVPGWELVNKDHPQVIEVWNLVFIEFNRKSNGSLEKLPSKHVDTGMGLERLCMVLQ

SEQ ID NO: 190935 - protein, 252 aa, Unknown
  Bacterial polypetide isolated from the Sargasso Sea
MAKTLNEIRSAFLDYFEKNDHTIVESSNLVPNNDPTLMFANSGMVQFKNVFTGLEKRDYQRATTSQKCVRAGGKHNDLENVGYTPRHHTFFEMLGNFSFGDYFKERAIELAWNLITKEFGLDKNRLYVTVYHDDDVAFNYWKKIAGLSEDKIIRIATSDNFWSMGETGPCGPCSEIFYDHGDHLEGGLPGTKNEDGDRFIEIWNLVFMQYEQISKDKRINLPKPSVDTGMGLERIAALLQGTHDNYETDHLK

SEQ ID NO: 190936 - protein, 315 aa, Unknown
  Bacterial polypetide isolated from the Sargasso Sea
MGETGPGGPCSEIFYDHGNHLKGGLPGTNDEDGDRFIEIWNLVFMQFEQVSKDKRINLPKPSVDTGMGLERIAALLQGTHDNYETDHFKKLINATSEIVKVKPNEKNLSSFRVIADHLRASSFLIAEGVLPSNEGRGYVLRRIMRRGMRHSHLLGSKKPIFFNIFKTLMDEMKDNYPELHRAESLIKETLKMEEEKFLVLLDRGIKILYDEISKIDKVLPGEVAFKLYDTYGFPLDLTEDILKNKSLKIDNEKFHSLMKQSRELAKKNWKGSGDSAVDDIWFGIRERLGATEFLGYETNQAEGVILSLLKDNKEV

SEQ ID NO: 190937 - protein, 292 aa, Unknown
  Bacterial polypetide isolated from the Sargasso Sea
HSHFLGTKKPIFFNIFKTLMNEMSGNYPELKRAESLIKETLRMEEEKFLILLERGMKILNEEITKVDKVLPGEVAFKLYDTYGFPLDLTEDILKNKSITIDHNKVNSLMKESRELAKKNWKGSGDSSVEDIWFGIKDKLGPTEFLGYQSNKAEGIILSLIKSNKEVKTLTKGDEAMIIVNQTPFYGESGGQIGDTGYITSGEFKFKVEDVQKKLGDLFVHYGKVESGEIKLKENVEMKIDVERRDNIRAYHSATHLLHESLRRVLGTHVTQKGSLVAPDRLRFDFSHMKPIT

SEQ ID NO: 190938 - protein, 309 aa, Unknown
  Bacterial polypetide isolated from the Sargasso Sea
MEILTKDFELPKEKLSVTVFNEDEDSFELWKKIAGLGEDKIIKISTSDNFWSMGDTGPCGPCSEIFYDHGDKLKGGPPGSANQDGDRFIEIWNLVFMQYEQISKEKRIDLPKPSVDTGMGLERMTAVLQGTHDNYNIDHFKKIIEASSDIIKAPVDNKTIASHRVISDHLRASSFLIAEGILPSNEGRGYVLRRIMRRGMRHAHSLGSKSPVFYKLFDVLLNEMQNSYPELKIGKDLIIETLKNEEEKFSSLLERGMKILDENLNKVQNNKLPGSVAFKLYDTYGFPIDLTADILRTKNIQVDHVALKK

SEQ ID NO: 190939 - protein, 200 aa, Unknown
  Bacterial polypetide isolated from the Sargasso Sea
MADKSLNEIRSTFLKYFEKNNHKIVESSNLVPNNDPTLMFANSGMVQFKNVFTGLEKRDYQRATTSQKCVRAGGKHNDLENVGYTPRHHTFFEMLGNFSFGDYFKERGIELAWNLITKDFGLNKNRLYVTVFHEDDEAFNFWKKIAGFSDDRIIRISTSDNFWSMGETGPCGPCSEIFYDHGDHLKGGLPGTKDQDGDRF

SEQ ID NO: 190940 - protein, 230 aa, Unknown
  Bacterial polypetide isolated from the Sargasso Sea
MLGSKEPIFYKIFDSLKNEMSGNYPELERSQSLIKETLRMEEEKFLVLLDRGIKILNDEIAKIDKVLPGDVAFKLYDTYGFPLDLTEDILKNKSLKVDHQKFDELMKKSKELAKKNWKGSGDSSEEAIWFSIKDKTGPTEFLGYESNQSEGVVLNLIKDNKETKSLSSGEEGMIITNQTPFYGESGGQLGDKGTIVSGNSVFEVEDTQKKLGDLLCSLRIFENWGEKIND

SEQ ID NO: 190941 - protein, 305 aa, Unknown
  Bacterial polypetide isolated from the Sargasso Sea
RDHLRASSFLIAEGILPSNEGRGYVLRRIMRRGMRHAHSLGSKDPVFYKLFDILLNEMKSSYSELITGKELIIETLKNEEEKFSSLLERGMKILDENLAKISNKTFPGSTAFKLYDTYGFPLDLTADILKGKGIKVDNVGFEKEMEKSKALARANWKGSGDSSVEERWFKIREEINSTEFLGYEFDKAEGVIMKISKDGKFVDSASTGDEVEVITNQTPFYGESGGQVGDEGYIFNSDCKIRINDTQKKMGDLFVHYGKIEKGLISIGQNVNLEIDVSKRNNSKAYHSATHLLHESLKKNFRKTC

SEQ ID NO: 190942 - protein, 259 aa, Unknown
  Bacterial polypetide isolated from the Sargasso Sea
EKLRFDFSHGNSIENETIVNIEEIVNDQIKKNCKVDIEFIDQKKAISEGAMALFGEKYGDEVRVVSMGDENGSFFSKELCGGTHVDKLGEINKFKITNQSSVASGIRRIEAVSNITVAKFLNELEKNNFEKENLQKNQIEELKLKIKSINPKYNFKSSDDDKFAYLKELNLAYEKLKQNNSILKNIDNIITKKINNINFIYLVAEDFPNKSLKSFIDEQKKKYTNKSVSLIISNDQKKLSIVLGVSSDIADTFDASQRN

SEQ ID NO: 190943 - protein, 224 aa, Unknown
  Bacterial polypetide isolated from the Sargasso Sea
ESSNLVPNNDPTLMFANSGMVQFKNVFTGLEKRDYVRATTSQKCVRAGGKHNDLENVGYTPRHHTFFEMLGNFSFGDYFKEQAIHYAWDLITKDFGIDKNRLYVTVFHEDDEAFNFWKKIAGFTDDRIIRIATSDNFWSMGETGPCGPCSEIFFDHGDHLSGGLPGSKDEDGDRFIEIWNLVFMQFEQVTKDKRINLPKPSVDTGMGLERIAALLQGSHDNYET

SEQ ID NO: 190944 - protein, 156 aa, Unknown
  Bacterial polypetide isolated from the Sargasso Sea
TKTDLFASLIQAVMKVTNTKDSTDKSLCVIADHIRACSFLIIDGVIPGNEKRSYVLRRIIRRAIRHGYMLGMEKPFFHKLVKSLESEMGDAYPELRSQREHVERILLQEEERFAETLSQGMRILESVIEDRPEGGVVSGETVFKLYDTYGFPKDLA

SEQ ID NO: 190945 - protein, 293 aa, Unknown
  Bacterial polypetide isolated from the Sargasso Sea
MVMGETGPCGPCSEIFFDHGDKLKGGPPGSPDQEGDRYIEIWNLVFMQFEQISKDKRIDLPKPSVDTGMGLERITAVLQGTHDNYAIDHFKKLILASSEITNTKIDNNTIASHRVVADHLRASSFLIAEGVLPSNEGRGYVLRRIMRRGMRHAHTLGSKKPIFFKLFDVLLNEMSKSYPELSNGKDLIIETLKNEEEKFSSLLERGMKILDQNLEKVNNKTLPGEIAFKLYDTYGFPLDLTADILKNKNIKIDISAFEKAMQKSKDLARASWKGSGDKSIEEKWFKIREQLNP

SEQ ID NO: 190946 - protein, 276 aa, Unknown
  Bacterial polypetide isolated from the Sargasso Sea
AFPELIERKHTIENSLKEEETRFKLTLDRGLKLLGDELAKQKDSKLFSGEVAFKLYDTYGFPLDLTEDVLRENDRKVDIEAFDMKMKEQRHKAQASWIGSGDKAEEKIWADLRSNEDATEFLGYESEKSQGLISKIIRDGKYEKEISADASGIIVMNQTCFYGESGGQVGDQGRLRGVNGEGQVIDTKRVGQIFLHFVEVKKGYFEVGDNLEQHINNDLRLDIKRNHSATHLVHEALRRVAGDHVAQRGSLNNSDRLRFDFSHDKPLTEEQIFLTE

SEQ ID NO: 190947 - protein, 325 aa, Unknown
  Bacterial polypetide isolated from the Sargasso Sea
LERKFLSYFKRNNHEIIESSNIVPNNDPTLMFTNSGMVQFKNVFTGIENKSFKTATTSQKCIRAGGKHNDLENVGYTPRHHTFFEMLGNFSFGDYFKEKAIYYAWELLTKDLSIPKDRLSATVFSEDEEAFKLWKKVAGLPESKIIRISTADNFWSMGETGPCGPCSEIFFDHGDKLKGGPPGSPDQDGDRFIEIWNLVFMQFEQVSKDKRIDLPKPSVDTGMGLERITAVLQGTHDNYAIDHFKKLISASSEITNTKINNDTIASHRVIADHLRASSFLIAEGVLPSNEGRGYVLRRIMRRGMRHAHTLGSKKPIFYKLFNVFQ

SEQ ID NO: 190948 - protein, 285 aa, Unknown
  Bacterial polypetide isolated from the Sargasso Sea
NYMKAILNDQNKNNGSVEIKIMIKKKAIEEGAMALFGEKYGDEVRVVTMGDENGSFFSKELCGGTHVTKLGEINKFKIINQSSVASGIRRIEAVSNISVEKFLKEVQKTNIEKNNLHSKQIEELVLKIKDINPEYNFKSSSDNKVLYIKQLNQIYEKLKQNNSILSNIDNIIIKKINDINFIYLIAEDFPNKSLKTFIDEQKKKYPNKSISLIVSSVQKKLSIVLGVSDDIADIFDASKEIKNISTILGGKGGGGRKDMAQAGGTDISQIDNCIEYIEKQIISIN

SEQ ID NO: 190949 - protein, 244 aa, Unknown
  Bacterial polypetide isolated from the Sargasso Sea
MKTNEIRQSFLDFFESKNHEIVPSSALVPSNDETLLFTNAGMVQFKDVFLGTDKKSYKRASTSQRCIRAGGKHNDLENVGYTLRHHTFFEMLGNFSFGDYFKEEAIEFAWEFLTEVLKLDRNKLWITVYKDDDEAEEIWKNNIGIDPKRIARLGDEDNFWSMGDTGPCGPCSEIFYDHGDHIEGTPPGADGDEGDRFVEIWNLVFMQFNRDESGDMEPLPKPSVDTGMGLERIAAVMQGVNSNY

SEQ ID NO: 190950 - protein, 193 aa, Unknown
  Bacterial polypetide isolated from the Sargasso Sea
MAKTLNEIRSTFLDYFEKNDHKIVESSNLVPNNDPTLMFANSGMVQFKNVFTGLEKRDYQRATTSQKCVRAGGKHNDLENVGYTPRHHTFFEMLGNFSFGDYFKERGIELAWNLITKDFGLNKDRLYVTVFHEDDEAFNFWKKIAGFSDDRIIRIATSDNFWSMGETGPCGPCSEIFYDHGDHLKGGYPEPKM

SEQ ID NO: 190951 - protein, 211 aa, Unknown
  Bacterial polypetide isolated from the Sargasso Sea
MADKTLNEIRNTFLKYFEKNDHKIVESSNLVPNNDPTLMFANSGMVQFKNVFTGLEKRDYVRATTSQKCVRAGGKHNDLENVGYTPRHHTFFEMLGNFSFGDYFKEQAIHYAWDLITKDFGIDKNRLYVTVFHEDDEAFNFWKKIAGFSDDRIIRIATSDNFWSMGETGPCGPCSEIFFDHGDHLPGGLPGSKDEDGDRFIEIWELSFYAV

SEQ ID NO: 190952 - protein, 312 aa, Unknown
  Bacterial polypetide isolated from the Sargasso Sea
NLWKNIAGLDSNKIIKINTSDNFWSMGDTGPCGPCSEIFYDHGDKYSGGPPGSPNEDGDRFIEIWNLVFMQFEQINSSERVNLPKPSIDTGMGLERITALLNGTNDNYNTDLFNPLIDKSIQLLNNESFNKSPSHRVIADHLRSSSFLIADGVMPSNEGRGYVLRRIMRRGMRHAHSLGNKDPIFAKLFPTLLEIFQNSYPELERAKDLILSTFLNEENKFKETVEKGLKILEEEISSSPKKLDGEVAFKLYDTYGFPLDLTQDYLRSKNIEVDIESFNIKMKEQKDRARQNWKGTGDIEDQKKWFQITENL

SEQ ID NO: 190953 - protein, 214 aa, Unknown
  Bacterial polypetide isolated from the Sargasso Sea
MNSNHIRSTFLNYFKNNGHEIVHSSPLVPHNDPTLMFANSGMVQFKNIFTGKEKKDYNRAVTSQKCVRAGGKHNDLENVGYTARHHTFFEMLGNFSFGDYFKDQAIEFAWNLITKEFGIEKEKLLVTVFSEDEDAYNYWKKIAGLSDDKIIKINTSDNFWSMGDTGPCGPCSEIFYDHGEKYPGGPPGSPDEEGDRFIEIWNLVFMQFEQNNFF

SEQ ID NO: 190954 - protein, 251 aa, Unknown
  Bacterial polypetide isolated from the Sargasso Sea
FIGYEYLSSDSNVIAIWNKNEKVELANEPQEYFIALNQTSIYAESGGQVGDRGIFKSKNAEGSILDCKKSGKVFMHLIKLDKGSLKIDDKIEINVNKEKREKTEAHHSATHLVHAALKRVLGDHVKQKGSLVDEHKLRFDFSHDESLSDDEISKIEDLVNQEILKNSSVSTKIMDLEDAKNSGAESLFGEKYEDQVRVLSIGEDDFSLELCGGTHISRTGDLGIFIITSQSSVASGVRRIEALSGPRAQEY

SEQ ID NO: 190955 - protein, 287 aa, Unknown
  Bacterial polypetide isolated from the Sargasso Sea
YNKNKVSHHVIADHIRMLSFAIADGAMPSNEGRGYVLRRILRRASRYGRMLKKKDPFLYKLVDQVIEVMGESFPELVDKKTHIQKVIESEEISFNSTLERGLIHFEKYVNNNANIISGDEAFKLYDTYGFPLDLTQLMAREHGLEVDETGFHKNMKKQRDRAKAAGNFKQVTEDLSWVVVSDNQNSNFLGYEHIESDSDICKYAVTDNYTILVLDQTPFYAESGGQIGDTGIIISGDDKLNVLDCQKSGEEIHHICSGAFNKERLSEKVTCRVDYKRRQSIRKNHTA

SEQ ID NO: 190956 - protein, 309 aa, Unknown
  Bacterial polypetide isolated from the Sargasso Sea
TYGFPLDLTEDILRNKSMSIDKDKFKSLMKESRELAKKNWKGSGDAVVEDIWFGIKDRLEPTEFLGYETNQAEGVVLSLLKENKEVDQLKENDEGMIIVNQTPFYGESGGQVGDTGEIVSNEFKFEVTDVQKKLGDLFVHYGKVVSGSIKLKDSVEMKINVERRDDTRAYHSATHLLHESLRRVLGDHVTQKGSLVEPSRLRFDFSHMKPIQNDEIDKIEKFVNNMVSKKSDVKTRLMTPDEAVEKGALALFGEKYGDEVRVLSMGDEDGKYFSTELCGGTHVKNTGDIGKFKIVSQSSIAAGIRRVEA

SEQ ID NO: 190957 - protein, 125 aa, Unknown
  Bacterial polypetide isolated from the Sargasso Sea
MGQILLTDVRKKFLDYFKNNNHQIVESSNLVPNNDPTLMFTNSGMVQFKNVFTGLEKRQYKTATTSQKCVRAGGKHNDLENVGYTPRHHTFFEMLGNFSFGDYFKEQAITHAWNLLTKDFELPKE

SEQ ID NO: 190958 - protein, 169 aa, Unknown
  Bacterial polypetide isolated from the Sargasso Sea
MKNISLNEIRKEFIDYFKNNGHEVVKSSNLVPDNDPTLLFANSGMVQFKNTFTGLEKRLYSRAVTSQKCIRAGGKHNDLENVGHTARHHTFFEMLGNFSFGDYFKEEAIYLAWNLLTKVFELPEKKLLVTIFHEDTEAEKLWKKISGLKEDKIIKISTSDNFWSMGETG

SEQ ID NO: 190959 - protein, 265 aa, Unknown
  Bacterial polypetide isolated from the Sargasso Sea
AKKNWKGSGDSSEEAIWFSIKDKTGPTEFLGYESNQSEGVVLNLIKDNTETNSLSSGEEGMIITNQTPFYGESGGQLGDKGTIVSGNSVFEVEDTQKKLGDLFVHYGSLKTGEMKINDVVEMKIDVERRDNLKAYHSATHLLHESLRRTLGTHVMQKGSLVAPDRLRFDFSHMKPITEEELETIDKLVNEYVSNSSEVTTRIMTTKAAIEKGALAFFGEKYGEEVRVVSMGKEKEAYFSTELCGGTHVKNTGDIGKFKTVSQSSI

SEQ ID NO: 190960 - protein, 291 aa, Unknown
  Bacterial polypetide isolated from the Sargasso Sea
VVLDKTPFYAESGGQVGDVGSISFNGNELNVVDVQKQSEMIVHICKGDVSSWNKASNVECVVDASHRNNVKRNHTATHLLHASLKEVLGDQVQQAGSLVHPDYLRFDLTFFEKISKDQIRKIEKIANSQILLNSSLHVSVKAYDDAISSGVVAIFGEKYGEQVRVVSTGKFSNELCGGTHVDSTGDIGLLKIVEESSLASGVRRIVAVTGEAALKLFQNQSELMSEIQRKLNCNEDELSDRVKQLYEDKKALEKKIKLLSRSDESEISQWVEDSFKVNGYFIVVRKIKYGD

SEQ ID NO: 190961 - protein, 279 aa, Unknown
  Bacterial polypetide isolated from the Sargasso Sea
MQCVDTGMGLERITAVKQKVTNNYQIDSFQRLITEVAALLNVSDLEHASIRVIADHIRSTCFLISDGVLPSNEGRGYVLRRIIRRALRHGHKLENAGAFFSDLVSVVVAEMGDAYPSVREAESEIKKIVLKEENQFQATLDQGLRILKEEITDIEGEEIPGEFAFKLYDTFGFPVDLTADIARENGMVVDMNGFDRAMHEQKERARSASNFSSANQERLSLDLTTEFLGYEELNCRAKIIGLLHKGVSAEEVSGEGLFSIILDKATFYAEAGGQIGDME

SEQ ID NO: 190962 - protein, 262 aa, Unknown
  Bacterial polypetide isolated from the Sargasso Sea
LGDEGIDLEDDDRFIEFYNLVFMQYNRDAEGTLTPLANRNIDTGMGLERMAQILQKVPNNYETDLIFPLIQAAADLAGVDYHQLDDKGKTSLKVIGDHSRAVTQMICDGVIASNLGRGYILRRLLRRVVRHGRLLGIDKPFLVPMGEAAIALIQGAHPSVIDRQEVILAELQREEARFLETLERGEKLLAEVLASKPTQISGAQAFELYDTYGFPLELTEEIAEEHGLSVDLAGFEAAMQEQRQRAKAAAVSLDLTLQDAIE

SEQ ID NO: 190963 - protein, 162 aa, Unknown
  Bacterial polypetide isolated from the Sargasso Sea
MKADDLREAYLAFFESKGCIRRPSDVLVPRWDPSVLFTPAGMNQFKDHFLGKCKLDFTRATSCQKCLRTGDIENVGRTPRHHTFFEMLGNFSFGDYFKREAILWAWEFLTSRDWLNIAPELLSITVYEDDNEAYCIWSDEIGVPFTRITRMGGKMTFLGGWC

SEQ ID NO: 190964 - protein, 279 aa, Unknown
  Bacterial polypetide isolated from the Sargasso Sea
RFDFSHNKPIEKEEMIKINNIVNEIVEGSTDVQTRIMTPKEAVNMGALALFGEKYGDEVRVVFMGKENNGFFSTELCGGTHVKNTKEVGKFKVISQSSIASGVRRVEALRDKQLEEYEKTQKEDKSLKESNLKKDIRLIKSELQKLKIKPDFKEDLDLYENLKNLNKQLDKVKIEGIKKDKSKNIIKDKKIGNILIREQILKDFPPKELRSIIDQGKKDIKSGIIISISTFEGKVGLAVGISQDLTSKYNAVDLVKAASAILGGKGGGGRKEFCSSQVE

SEQ ID NO: 190965 - protein, 290 aa, Unknown
  Bacterial polypetide isolated from the Sargasso Sea
NEGRGYVLRRIMRRGMRHAHSLGSKSPVFHRLFEVLLNEMKNSYPELNNGSELIIETLKNEEEKFSSLLERGMKILEENLSKVKNKTLPGSIAFKLYDTYGFPLDLTADILRGKNIKVDNNGFDKEMEKSKTLARANWKGSGDKSLEEKWFKIREELNPTEFLGYEFDKAEGVVIKILKNGKFVNSANSGEEIEIISNQTPFYGESGGQVGDQGYIFNSDCKIKINDTQKKMGDLFVHFGKIENGSVSVGQNINLEIDKIKRKNSKANHSATHLLHESLRRTLGKHLCKK

SEQ ID NO: 190966 - protein, 238 aa, Unknown
  Bacterial polypetide isolated from the Sargasso Sea
MLSSEIRRKYLDFFENQKHQIMPSSSLIPAEDPTLLLTTAGMVQFKPYFTGEISTDITRFTSSQKCFRVTDLEEVGDETHLTFFEMLGNFSIGDYFKKEAIIWSLDFVTNYLGLEKEKLWATIYTDDDEALNLWINAGIPENRIRRFGDSDNFWGPAGAEGPCGPCSELHYDFGGPCTANNDDNCGPNCCARFLELWNLVFMQYFQDLEGNRTPLPNPNIDTGMGLERAAMILQKVNS

SEQ ID NO: 190967 - protein, 238 aa, Unknown
  Bacterial polypetide isolated from the Sargasso Sea
MADKTLNEIRNTFLKYFEKNGHKIVESSNLVPNNDPTLMFANSGMVQFKNVFTGLEKKDYVRATTSQKCVRAGGKHNDLENVGYTPRHHTFFEMLGNFSFGDYFKEQAIHYAWDLITKDFGIDKNRLYVTVFHEDDEAFNFWKQIAGFSDDRIIRIATSDNFWSMGETGPCGPCSEIFFDHGDHLPGGLPGSKDEDGDRFIEIWNLVFMQFEQVTKDKRINLPKPSVDTGMGLERIAA

SEQ ID NO: 190968 - protein, 71 aa, Unknown
  Bacterial polypetide isolated from the Sargasso Sea
MKTSNDIRQSFLEFFKSKDHEIISSSSLVPSNDPTLLFTNAGMVQFKDVFLGRESLPYKRAASSQRCVRAG

SEQ ID NO: 190969 - protein, 184 aa, Unknown
  Bacterial polypetide isolated from the Sargasso Sea
MAQKSLNQIRETFLKYFEKNDHKIVESSNLVPNNDPTLMFANSGMVQFKNVFTGLEKRDYQRATTSQKCVRAGGKHNDLENVGYTPRHHTFFEMLGNFSFGDYFKEKAIHYAWDLITKDFGIDKNKIYVTVFHEDDEAFNLWKKIAGFSDDRIIRISTSDNFWSMGETGPCGPCSEIFYDHGDH

SEQ ID NO: 190970 - protein, 302 aa, Unknown
  Bacterial polypetide isolated from the Sargasso Sea
QTLDKGIQILDSTLAEGNKEIISGDLAFKLHDTFGFPFDLTADIAREKGIDIDEEGFKKNMESQQQMSKASSSFVSKIPTAEDIKETDFIGYEHLSSNSNVIAIWNKNEKVELANEPQEYFIALNQTSIYAESGGQVGDRGMFKSKNAEGSILDCKKSGKVFMHLIKLDKGSLKIDDKIEVNVNKEKREKTEAHHSATHLVHAALKRVLGDHVKQKGSLVDEHKLRFDFSHDESLSDEEISKIEDLVNQEILKNSAVSTKIMDLEDAKNSGAESLFGEKYEDQVRVLSIGEDDFSLELCGEH

SEQ ID NO: 190971 - protein, 313 aa, Unknown
  Bacterial polypetide isolated from the Sargasso Sea
SSFRVIADHLRASSFLLAEGVLPSNEGRGYVLRRIMRRGMRHSHLLGSKEPIFYKIFDSLKNEMSGNYPELERSQSLIKETLRMEEEKFLVLLDRGIKILNDEIAKIDKVLPGDVAFKLYDTYGFPLDLTEDILKNKSLKVDHQKFDELMKKSKELAKKNWKGSGDSSEEAIWFSIKDKTGPTEFLGYESNQSEGVVLNLIKDNKETKSLSSGEEGMIITNQTPFYGEAGGQLGDKGTIVSGNSVFEVEDTQKKLGDLFVHYGSLKTGEMKINDVVEMKIDVERRDNLKAYHSATHLLHESLRRTLGKHVMQK

SEQ ID NO: 190972 - protein, 293 aa, Unknown
  Bacterial polypetide isolated from the Sargasso Sea
YFELKKSQKFIEENLKNEEIKFSETLQTGLSILNDEINTKKPKQLSADLAFKLYDTYGFPIDVTQNILTEKNIKLDINQYFEIVKKNKEKQKNSWTGSGEKSSNKFYLELKNVVKETHFVGYSQTKTKAELRCIIREEKFSDEILVDNNNIFLVFNKTPFYAESGGQIGDSGKIFSENGEFICNISDTKKVEGEIYLHQIEKNEQKKIIKGTKYILSIDKERREKIRNNHSATHLLHQSLRNILGEHVSQKGSLVSDQKLRFDFTYNKSLTNKQIYEIEMFVNKTIRLNLIQT

SEQ ID NO: 190973 - protein, 282 aa, Unknown
  Bacterial polypetide isolated from the Sargasso Sea
DKIKRKNSKANHSATHLLHESLRRTLGKHVMQKGSLVSPERLRFDFSHSKPIENQEIAKINKIVNDIVEGSSDVQTRIMTPKEAVSMGALALFGEKYGEEVRVVFMGKENNGFFSTELCGGTHVKNTKEVGKFKIVSQSSIASGVRRVEALRDKQLEQYERTQKQNKSLKETNLKEEIELVKNELQNYKIKPDYKDNADLSENLKNLNKQLNRIKIESIKKDKNKNIIKDKKVGNILIREQILKDFPPKELRNIIDQGKKDIKSGVIISISIFEDKVGLAVG

SEQ ID NO: 190974 - protein, 273 aa, Unknown
  Bacterial polypetide isolated from the Sargasso Sea
MGLERIAALLQGTHDNYETDHFKKLINSISEAVKVKPDQKNVSSFRVIADHLRASSFLIAEGVLPSNEGRGYVLRRIMRRGMRHSHLLGSKQPIFYNIFKTLMDEMSGNYPELIRAESLIKETLKTEEEKFLVLLERGMKILNDEISKIDKVLPGEVAFKLYDTYGFPLDLTEDILKNKSLKIDNKKFETLMNESREIAKKNWKGSGDSSVNKIWFEIKDRLGPSEFLGYETDYAEGKILSLLKDNKEVKSLSNNDEEMIITNQTPFYGESGG

SEQ ID NO: 190975 - protein, 286 aa, Unknown
  Bacterial polypetide isolated from the Sargasso Sea
DHGPCGPSSEIHVDIRSNEEKNKIPGINLVNKNHPEVIEIWNLVFIEFNRKMDGSLEKLPEKHIDTGMGLERLAMVIQGYKSNYDTDVFKPMIKELEKLCNVKYGLVSEIDIAIRVVVDHVRAIAFSIADGQLPSNNGPGYVIRRILRRGVRYGYTFLNQKTPFIYKLIKKLSSQFLHTFPEINAQIDLIENVIKDEENSFFRTLENGIIKLNQIVKKLKDDKISGNDAFLLYDTYGFPIDLTSLILKEKGLYYDQKKFNTLLNQQKERSKSEKLQSSDDWNVIKK

SEQ ID NO: 190976 - protein, 311 aa, Unknown
  Bacterial polypetide isolated from the Sargasso Sea
LLAEGVLPSNEGRGYVLRRIMRRGMRHSHLLGSKEPVFNKIFDTLKDEMKGNYPELERSETLIKETLKMEEEKFLVLLDRGIKILNDEISKIKKVLPGEVAFKLYDTYGFPLDLTEDILKNKSLTVDQNKFDELMKKSKELAKQNWKGSGDASEEEIWFGIKDKIGPTEFLGYEFNQSEGVVLSIIKNNKETQNISTGEEGIIITNQTPFYGESGGQVGDQGTIVSGNSVFEVTDTQKKLGDLFIHHGILKSGEIKIKDVVEMKIDIERRNNLKAYHSATHLLHESLRRTLGKHVMQKGSLVAPDRLRFDF

SEQ ID NO: 190977 - protein, 285 aa, Unknown
  Bacterial polypetide isolated from the Sargasso Sea
ARANWKGSGDKYLEERWFKVREEISPTEFLGYEFDKAEGVIIRISKNGKFVDTANTGDEIEVITNQTPFYGESGGQVGDQGYIFSSDCKIIVNDTQKKIGDLFVHYGKIEKGSISIGQHVNLEIDILKRNNSRANHSATHLLHESLRRTLGKHVTQKGSLVSPERLRFDFSHNKPIEKDEMTKINNIVNEIVASSSDVQTRIMTPKEAVKMGALALFGEKYGDEVRVVFMGKENNGFFSTELCGGTHVKNTKEVGKFKVISQSSIASGVRRVEALRDKQLEEYEK

SEQ ID NO: 190978 - protein, 240 aa, Unknown
  Bacterial polypetide isolated from the Sargasso Sea
SCLFGEKYGDQVRVITVADFSKELCGGTHVDRTGDIGLFKITEETSLASGVRRIVAVTGPKAVEFIQDQVAALDEVKSQLKCNLNSIPDRLGQLIKDNKTLEKELKKQKKSNSSFNPESLLKEALIIEDKTIVIKMTDAEDMDSLKDFGNSLLVKLKNGIGVLGAVADKPMLVVVVTDTLIKAGIKAGDLAKQIGSIMGGGGGGRPNLATAGGKDQKSLETAMEKAKDIIIKNIEEKNAV

SEQ ID NO: 190979 - protein, 225 aa, Unknown
  Bacterial polypetide isolated from the Sargasso Sea
GSLVSPDRLRFDFSHNKPIEKAEMTKINKIVNEMVDGASNVQTRIMTPKEAVNLGALALFGEKYGDEVRVVFMGKDNNRFFSTELCGGTHVKNTKEIGEFKVISQSSIASGVRRVEALRDKELQNYEKSLKKDKSLKEKNLKDQVNFVKKELLKFKLKPDYKDDLDLSENLKNLNKQFEKIKIQKIIEDKNKNIIKDKKVGNFILRQQVLIDFPPKELRSVIDHG

SEQ ID NO: 190980 - protein, 213 aa, Unknown
  Bacterial polypetide isolated from the Sargasso Sea
MADKTLNEIRSSFLNYFQKNDHTIVESSNLVPNNDPTLMFANSGMVQFKNVFTGLEKRDYKRATTSQKCVRAGGKHNDLENVGYTPRHHTFFEMLGNFSFGDYFKERAIELAWNLITKDFGLDKNRLYFTVYHDDDEAFNLWKKISGLNDDKIIRIPTSDNFWSMGETGPCGPCSEIFFDHGDHLQGGLPGTKDQDGDRYIEIWNLVFMQFEQ

SEQ ID NO: 190981 - protein, 249 aa, Unknown
  Bacterial polypetide isolated from the Sargasso Sea
EEEKNQIEDLINLEISKNTKSIVETMSMQEAQAKGAIAFFGDKYGDEVRVLNLGEGFSIELCGGTHVKETGQIEFMKITSESGISSGVRRIEAVTGEGAKNLLSNLKNSYLEIGKQLHVETKIDDPSNDLDLFRSLNEILLSISKEVSTSVDQVQNKINQLIDENRSLNEELGIKERSNKASDLLKATQSLVEENKKLKEQKKKLTSKNIGSSVEDLIEEAIDIQSYKLVTKRYDGMEASGMREAADRL

SEQ ID NO: 190982 - protein, 261 aa, Unknown
  Bacterial polypetide isolated from the Sargasso Sea
ALRNKLGDHVTQKGSLVGPDRLRFDISHPKPVSPEEISEVMKQVNLEIQKNTEVLTRLMTPDEAIEIGAMALFGEKYGEEVRVVTMGNVDGAPYSLELCGGTHVGRTGDIGSFFIVSESAVAAGVRRIEAVSGEAVLAHMTETDAQLKEASALLNVAPDQVPDRITALLSERKRLENELSAVRRKLAIGESGTNESHSDIKLIAGISFIGRVLEGIPARELKSFADDLKNQIGSGVIAICATDDDKASLVVAVTDDILNKF

SEQ ID NO: 190983 - protein, 260 aa, Unknown
  Bacterial polypetide isolated from the Sargasso Sea
IQKGSLKVGESVNLEINVQKRNNSKANHSATHLLHESLRRTLGKHVTQKGSLVSPDRLRFDFSHNKPIEKDEIIKINKIVNEMVKGASDVKTRIMTPKEAVSLGALALFGEKYGDEVRVVFIGKENNGFFSTELCGGTHVKNTKEVGEFKVVSQSSIASGIRRVEALRDKELHDYENNLKKDKSLKEKNLKDQIDLVKKELTKLKIKPNYKDNMDLSEYLKNLNKQLEKIKIKNIIENKNKNIVKDKKIANFVFRQQVLT

SEQ ID NO: 190984 - protein, 285 aa, Unknown
  Bacterial polypetide isolated from the Sargasso Sea
RHHTFFEMLGNFSFGDYFKEEAIFFAWNLITKEFGISKDKLCMTVYSEDDEAFNLWKKITGFNENKIIKISTSDNFWSMGDTGPCGPCSEIFYDHGEKLKGGPPGSKDQDGDRFIEIWNLVFMQFEQVTKDKRINLPKPSVDTGMGLERMTAVLQGTHDNYEIDLFKKLIDASAEITKSPVSNKTIASHRVISDHLRASCFLIADGLMPSNEGRGYVLRRIMRRGMRHAETLGGKSNTLSSLINTLISQMSSEYNELSRAKELITETIMNEEDKFSTMLNKGMKV

SEQ ID NO: 190985 - protein, 220 aa, Unknown
  Bacterial polypetide isolated from the Sargasso Sea
MTSKEIRDSFFDFFESKKHSIVSSSPVVLPSDPTLLFTNAGMNQFKEIFLGARDAQEKRIANSQKCIRVSGKHNDLEEVGRDTYHHTFFEMLGNWSFGDYYKKEAIAWAWELMTEVWGLDKGRIWATVYQTDEEALELWKEVTDINPCQILRFDEKDNFWEMGETGPCGPCSEIHYDLTPEGNASAEMINADLPEVIEIWNLVFIQFNRRSDGTLEELAA

SEQ ID NO: 190986 - protein, 256 aa, Unknown
  Bacterial polypetide isolated from the Sargasso Sea
MEDKSLNEIRNTFLKYFEKNDHRIVESSNLVPNNDPTLMFANSGMVQFKNVFTGLEKREYQRATTSQKCVRAGGKHNDLENVGYTPRHHTFFEMLGNFSFGDYFKERGIELAWNLITKDFGLNKDKIYVTVFHQDDEAFNFWKKIAGFNEKKIIRISTSDNFWSMGETGPCGPCSEIFYDHGDHLKGGLPGTKDQDGDRFIEIWNLVFMQYEQISKDKRIDLPKPSVDTGMGLERITALLQGTHDNYQTDHFKKLI

SEQ ID NO: 190987 - protein, 285 aa, Unknown
  Bacterial polypetide isolated from the Sargasso Sea
LVFMSYERLANGDQTPLPNPCVDTGMGLERIAAVLQSVHSNYETDVFQFLMDAVAQCEPSKSCTQVTLQVVADHLRSILFLMTDGVIPGNEGRSYVLRRIIRRALRYLYQDGFNSPCLFKMLPAVAAIMGEDYPELKLQLHHHQSQCEKEEIKFFNTLDQGMSLLHSHLEHHSHVAGDVIFKLYDTYGFPVDLTEDIVNDHNGTLDLEGYEQCMKEQKERSKQHQKFKDVLNYDVSGLMKTQFLGYEVLASNAKVVRLYQKGESIDQCQGEAEMIVDRTPFIQRA

SEQ ID NO: 190988 - protein, 105 aa, Unknown
  Bacterial polypetide isolated from the Sargasso Sea
MAKTLNEIRSAFLDYFEKNDHKIVESSNLVPNNDPTLMFANSGMVQFKNVFTGLEKRDYQRATTSQKCVRAGGKHNDLENVGYTPRHHTFFEMLGNFSFGDYLKK

SEQ ID NO: 190989 - protein, 89 aa, Unknown
  Bacterial polypetide isolated from the Sargasso Sea
MKASDIRQKFLTFFEGKGHTVVRSSPLVPGNDPTLLFTNSGMVQFKDVFLGTDKRPYVRAASVQRCLRAGGKHNDLENVGYTARHHTFF

SEQ ID NO: 190990 - protein, 288 aa, Unknown
  Bacterial polypetide isolated from the Sargasso Sea
FDFSHMKPISDEEISKIEEYVNKMVSTKSDVKTRLMTPKEAVDNGALALFGEKYGEEVRVLSMGDEKNKYFSTELCGGTHVKNTGDIGKFKIINQSSIAAGIRRVEALRDKQLNEYLTKKEKQSDLSSQKNKEVINNLSQKIIDLGGKPSLDNENQKNLIKDLTKQLETLSVKNVLKDKSKNIINDQTIKGIKLRFQKVIDLAPKDLRKLVDNGKKEIGEGVVVVCAIKEGKIGLAVGVTSKLIKKYNAVEIAKAASKKIGGKGGGGRPDFAQAGGDDSSKIDDALKK

SEQ ID NO: 190991 - protein, 291 aa, Unknown
  Bacterial polypetide isolated from the Sargasso Sea
FSFGDYFKEGAIPFAWELLTKTVADGGYGFDESRLWVTVYLDDDEAIDIWHRDVGLPLDRIQRRGQADNYWSMGVPGPCGPCSEIYYDRGPEYGIEGGPIADENRYLEVWNLVFMQFERGAGPAKEDYPILNELPNKNIDTGMGLERMAALLQGVDNIYEIDTTRSILDTASQLTGARYGKSERDDVALRVVADHARTCTFLIGDGVVPGNEGRGYVLRRLMRRVIRNMRILGAGEPTMSQLIDATVQAMAPQYPELNDEVERIRSVAIGEESTFETTLRTGTVLFETAVA

SEQ ID NO: 190992 - protein, 283 aa, Unknown
  Bacterial polypetide isolated from the Sargasso Sea
KKMGDLFVHTGKVKKGSIKIGQSVNLEIDTEKRNNSKANHSATHLLHESLRRTLGKHVTQKGSLVSPERLRFDFSHNKPIEKEEIKKINKVVNEIVDGSTDVQTRIMTPKEAIKMGALALFGEKYGEEVRVVFMGKEANGFFSTELCGGTHVKNTKEVGKFRVVSQSSIASGVRRVEALRDKQLNEYEKSLEKDKSLKERTAKEHLEKIKKELLIYKIKPDLNENKDLAENLKNLNKQLEKIKIQNVIKDKNKNKIKDKNIGNIIIREQVLNDFPPKELRSVI

SEQ ID NO: 190993 - protein, 112 aa, Unknown
  Bacterial polypetide isolated from the Sargasso Sea
MGQILLTEVRKKFLDYFKKNNHQIVESSNLVPNNDPTLMFTNSGMVQFKNVFTGIEKRQYKTATTSQKCVRAGGKHNDLENVGYTPRHHTFFEMLGNFSFGDYFKEQAITHA

SEQ ID NO: 190994 - protein, 294 aa, Unknown
  Bacterial polypetide isolated from the Sargasso Sea
MNSNHIRSIFLEYFKKNGHEIVHSSSLVPHNDPTLMFANSGMVQFKNIFTGKENKNYNRAATSQKCVRAGGKHNDLENVGYTARHHTFFEMLGNFSFGDYFKDQAIEYAWNLITKEFGINKKNLLVTVFSEDLESYDYWKKIAGLSEDKIIKINTADNFWSMGDTGPCGPCSEIFFDHGDKYKGGPPGSKDEDGDRFIEIWNLVFMQFEQINKSERINLPKPSIDTGMGLERVTALLQGTNDNYATDLFQPLINKSIDLTNNESFINSPSHRVIADHIRSSSFFNSRWNFCLLM

SEQ ID NO: 190995 - protein, 305 aa, Unknown
  Bacterial polypetide isolated from the Sargasso Sea
YDTYGFPLDLTEDILRNKSLSIDTKKFQSLMKESRELAKKNWKGSGDAVVEDIWFSIRDKLGATEFLGYETNQAQGVILSLLKDNKEVKELKSSDEGMIITNQTPFYGESGGQVGDIGGFKNGEFRFMVTDVQKKLGDLFVHYGKVLSGSVKLGDNIEMKIDEVRRNNTRAYHSATHLLHESLRRVLGTHVTQKGSLVEPSRLRFDFSHMKPISNEEIDKIETFVNSMITKKSDVRTRLMTPDEAVENGALALFGEKYGDEVRVLSMGDEDGKYFSTELCGGTHVKNTGDIGNLKYKSILDSSWC

SEQ ID NO: 190996 - protein, 91 aa, Unknown
  Bacterial polypetide isolated from the Sargasso Sea
MSKTLNEIRTTFLKYFEKHDHKIVESSNLVPNNDPTLMFANSGMVQFKNVFTGLEKRNYKRATTSQKCVRAGGKHNDLENVGYTPKTSYFF

SEQ ID NO: 190997 - protein, 313 aa, Unknown
  Bacterial polypetide isolated from the Sargasso Sea
TKEIIITNQTPFYGESGGQVGDTGVIASEKFTFEVNDVQKKLGDLFVHYGKVAKGSIKLNDSVEMKIDIGRRENIRAYHSATHLLHESLRRVLGTHVIQKGSLVAPDRLRFDFSHMKPISSEEIQKIEAFVNLMIEKKSDVKTRMMTPKEAVNNGALALFGEKYGDEVRVLSMGSEKDKSFSTELCGGTHVRNTGDIGKFKIISQSSIAAGIRRVEALRDKQLQEYFNEKAKLSDLSSQKDEEKIKDLALKIVKFGGKPNLENRNPKDLIKDLTKQYEDFSVKSILGDKSKNIIVDKNINNIKVRFQKISDLP

SEQ ID NO: 190998 - protein, 259 aa, Unknown
  Bacterial polypetide isolated from the Sargasso Sea
TLLFTNAGMVQFKDVFLGTETKNFKRAATSQRCIRAGGKHNDLENVGYTLRHHTFFEMLGNFSFGDYFKEDAIKFAWEFLTEELKLDKENLWITVYKDDDEAEEIWKNIIGIDPARIARLGDDDNFWSMGDTGPCGPCSEIFYDHGEHIDGTPPGAEGDEGDRFIEIWNLVFMQFNRDESGKMEPLPKPSVDTGMGLERIAAVLQGVNSNYETDVFKDLINASEKILGSNGSTSHKVIADHIRSSVFLISDGVIPEKEG

SEQ ID NO: 190999 - protein, 274 aa, Unknown
  Bacterial polypetide isolated from the Sargasso Sea
RQSRYASLGLVSQFTGYEKINDQSHVLLLMRDEMIVQQLNAGDHAEIILESTSFYPEGGGQIGDRGEIITSTGKFLVEDTQKFGDSIIHFGQMNDGKIDAGVEVESRVDSDFRLGAMRNHTATHLLHAALRKELGVHVKQAGSYVGPDRLRFDYTHPEAPTYENLQSIQALVNEKVRDDIVGSTFVLPYAEAVDRGAVAFFEDKYQDQVRVVEYCVAPHSHSAEAGCFSSEFCGGTHIHSTGQIGRMQIIAESSIGAGLRRIEAVTGPEAEAFV

SEQ ID NO: 191000 - protein, 200 aa, Unknown
  Bacterial polypetide isolated from the Sargasso Sea
MAKTLNEIRNIFLKYFEKNDHTIVESSNLVPNNDPTLMFANSGMVQFKNVFTGLEKRDYVRATTSQKCVRAGGKHNDLENVGYTPRHHTFFEMLGNFSFGDYFKDRAIELAWNLVTKDFGIDKNRLYVTVFHEDDEAFNFWKKIAGLSEDRIIRIPTSDNFWSMGETGPCGPCSEIFFDHGEKIKGGLPGTKDQDGDRYI

SEQ ID NO: 191001 - protein, 241 aa, Unknown
  Bacterial polypetide isolated from the Sargasso Sea
HHTFFEMLGNFSFGDYFKERAIGLAWNLITKEFGLNKDRLYVTVYHDDDEAFNFWKKIAGLSENKIIRIATSDNFWSMGETGPCGPCSEIFYDHGDHLEGGLPGTKNEDGDRYIEIWNLVFMQFEQISKDKRINLPKPSVDTGMGLERIAALLQGTHDNYETDHFKKIINSTAEILKVNPNKENLASFRVIADHLRASSFLIAEGVLPSNEGRGYVLRRIMRRGMRHSHLLGSKEPIFFNI

SEQ ID NO: 191002 - protein, 285 aa, Unknown
  Bacterial polypetide isolated from the Sargasso Sea
GLQNIDLEDGDRFIEFYNLVFMQYNRDPNGKLTDLKFKNIDTGMGLERMAQILQKKQNNYETDLIFPIIQKTCEIANIDYFSSNHKNKISLKIIGDHTRAVIHLISDGVAASNLGRGYILRRLIRRMVRHGRLLGITNEFLPNIATVGINLMKKNYPDLKNNNDLILNEIKIEEVRFRETLERGEKLLDELISSGQKLISGFKAFELYDTYGFPLELTVEIAEENSISVDVKGFEEEMNAQKERAKAASSNIDLTLEGSLEREIDLFNKTDFIGYGSLLSEARNK

SEQ ID NO: 191003 - protein, 301 aa, Unknown
  Bacterial polypetide isolated from the Sargasso Sea
LYDTFGFPFDLTALIANERGYEIDQIGFDTAMEEQKSRSRAAATSKIGDWVLLNESGKEKFIGYDQLSSEVKIIRFRKMTTAKEGDFYQLVFDSTPFYPEGGGQVGDKGYLESSNGDVFYILDTKKENNLIIHHSKTLPEKLEESHNAVVDPKQRHRSSCNHTATHLMHQALRSILGNHVEQKGSMVHSGMFRFDFSHFTKVSKDELKEVEQFVNARIHEKIPLDEKRNSPYSEAIKQGAIALFGEKYGDEVRTIRFGQSIELCGGTHVDNTSEIWHFKITSESAVASGIRRIEAITGDAA

SEQ ID NO: 191004 - protein, 52 aa, Unknown
  Bacterial polypetide isolated from the Sargasso Sea
NVGYTSRHHTFFEMLGNFSFGDYFKEDAIQLAWDFITDELKLEKDRLWVTIF

SEQ ID NO: 191005 - protein, 273 aa, Unknown
  Bacterial polypetide isolated from the Sargasso Sea
YIEKIIKAEELSFNETLDRGILHFSKVIGDMSGKTIAGAEAFKLYDTFGFPLDLTQVMAREKGLSVDSKGFEKEMALQKKRAKSSEKFKSKSTEINWTVVKDVSNSKFKGYESTFLSADIVKYSSNKNEHYVVLNQTPFYAESGGQVADTGTILGDEINLKVQNVQFEGEMIIHKCTGEINGKNFSVKCQVDESRRQRIRKNHTATHLMHKALKVVLGDHVQQAGSLVHPNYLRFDITHFEKITSDEIKEIEQIVNNEILSNNKLDIAIQSFD

SEQ ID NO: 191006 - protein, 134 aa, Unknown
  Bacterial polypetide isolated from the Sargasso Sea
MASLNEIRSTFLNYFKKNGHEIVACSPLVPRNDPTLMFTNSGMVQFKNLFTGLEKRDYLRAVTAQKCVRAGGKHNDLDNVGYTARHHTFFEMLGNFSFGDYFKSEAIPLAWNLITKEFGIPAEKLYVTVFHTDD

SEQ ID NO: 191007 - protein, 277 aa, Unknown
  Bacterial polypetide isolated from the Sargasso Sea
KFNIGDSIKALIDPKKRKLIECNHSSTHLLHASLRKILGNHVSQKGSLVNSEKLRFDFSHNEPISKDNIIIIENFVKKEIDANSQVNIKSVDHQKAIDEGAMALFGEKYGEEVRVVSMGTFEDDKIFSKELCGGTHVDKTGDILNFKIINQSSVASGIRRIEALTNIAVDEYNKHKIQLDKKVLEESIKKILTLIDELKMYDKDFSYSYDENGDLTNNIKELKKLLDQNKQNKNKETSSQNIVNEKINDINFVYLIAENYPTKILKQFVDDQKNKYK

SEQ ID NO: 191008 - protein, 246 aa, Unknown
  Bacterial polypetide isolated from the Sargasso Sea
PANDGRGYVLRRIMRRAMRHIHLLGSKKPIMHNLVVSLIQQMGSAYPELGLAQSLIEETLLQEETRFRQTLDRGLKLLDDELARVPEGEEFSGETAFKLYDTYGFPLDLTQDALREKGRVVNTAAFDIAMADQKAKARAAWVGTGQLTDDAIWFELADNILPTEFLGYETDTAEAQLLKLVKDGVEVLSAKAGDTVQLIFNQTPFYAESGGQVGDQGYVQTSDCLIQINDTKKFAGLFIHSGSVST

SEQ ID NO: 191009 - protein, 301 aa, Unknown
  Bacterial polypetide isolated from the Sargasso Sea
MSKKNTAFSSDTLGFVDKNLISSFEGYNQNSLSAKVLAIYKDGSIVDLVKAKNSELIIIFDKTPFYPEGGGQISDIGVLENNDCSLSIVNVQKIGNSIVHKAVLKNGTIKKSDKFNLKIDTRRRKSIAIHHSSTHLLHQALRDVLGNHVEQKGSLVTDEGLRFDFSHNKALSKDEISRIEKIIAFEIDEAKKTLINQMSYKDAIKAGALAFFDEKYEDDVRVLNIGTKSMELCGGTHVDNTNDIKIFKILNEQSISNGVRRIEAVAGNEAYNEFQKAFNLNRDIASLLGVSPDKIANKIDS

SEQ ID NO: 191010 - protein, 313 aa, Unknown
  Bacterial polypetide isolated from the Sargasso Sea
SEIHGKDAFKLYDTYGFPLDLTQLMAEERKMTVDIDGFDVEMKNQKELAKSGQKFEMDNLDLKWNLETKSTHSIFVGYENESISSKIINHAESGDDIIIILENTPFYSESGGQIGDTGIIRNDDFSARVNDTQKNGDYVLHICSLTNGAIGDNLSVDCMIDVDRRNNIKVNHTATHLLHQSLKDVLGGHVNQAGSLVHPEYLRFDITHPNKISSKELEDIELIVNQKISEDITVETSIKSLEEAKKEGATALFGEKYEDEVRVVSMGEFSKELCGGTHVSSTGKINKFKIKHDKAISSGIRRINAITHNQVDC

SEQ ID NO: 191011 - protein, 272 aa, Unknown
  Bacterial polypetide isolated from the Sargasso Sea
MVEADRLRFDFSHMKPISSEEIDKIEIFVNSMVDKKTDVRTRMMTPKEAVDNGALALFGEKYGDEVRVLSMGNEKDKYFSTELCGGTHVRNTGDIGKFKIVSQSSIAAGVRRVEALRDKQLQEFLHKKNVLSDISVQKNQEVIKDLTEKIIKLGGKPNLENDDQKIIIKDLNKQLDQLLTKSILSDKLKNIIKDKIINKINVRFQKVIDLHPKDLRKLVDEGKKHLKEGIIIVCAVKDGKIGLAVGVTDKLTNKYDAVKFVKIGSEIVGGKG

SEQ ID NO: 191012 - protein, 270 aa, Unknown
  Bacterial polypetide isolated from the Sargasso Sea
FFTKNNHQKVESSNLVPNNDPTLMFTNSGMVQFKNVFTGLEKRSYNKATTSQKCVRAGGKHNDLENVGYTPRHHTFFEMLGNFSFGNYFKEQAIKYAWDLLTKDFKIPKDRLFTTVYSEDEDSFNLWKKIAGLPESKIVKISTSDNFWSMGDTGPCGPCSEIFYDHGDKLKGGPPGSKDQDGDRFIEIWNLVFMQFEQISKNKRINLPKPSVDTGMGLERMTAVLQGTHDNYEIDHFKKIISASSEIINSKIDSNTIASHRVIADHLRAS

SEQ ID NO: 191013 - protein, 255 aa, Unknown
  Bacterial polypetide isolated from the Sargasso Sea
SYRIISDHLKSIIFLMAEGIIPSNEGRGYVLRRIIRRALLNVNKLNPRIIILHKLVDDVIKKYSGTYTELEKAILFIKNNLKNEEEKFSETLSTGLELLNAEIKSLKSKKFKPEVAFKLYDTFGFPVDMTESILNDKKISLDMNKYKSLIELNKKSQKKSWVGSTNTDINKLNNKIIKEVSRTEFCGYTKNYCDARLLCITEKNKFVDSIKKCKENILIFNKTPFYAEAGGQVGDSGEIYNSARKLVGEISDTKK

SEQ ID NO: 191014 - protein, 302 aa, Unknown
  Bacterial polypetide isolated from the Sargasso Sea
WNLITKEYSISKDRLLVTVYSEDHEAFNLWKKIAGLSENKIIKINTSDNFWSMGETGPCGPCSEIFFDHGDKYEGGPPGSPNEDGDRFIEIWNLVFMQYEQISKTERIDLPKPSIDTGMGLERMTALLDGSNDNYATDLFQPIINESINLCGDEKSINHPSHRVIADHLKSSSFLIADGVMPSNEGRGYVLRRIMRRGMRHAHTLGNKDPIFYKLFPTFLKGIKESYPELDRAKDLILNTLINEETKFKETVEKGIKILEEEISNSSNKFDGEIAFKLYDTYGFPLDLTQDYLKSKNIEVDL

SEQ ID NO: 191015 - protein, 313 aa, Unknown
  Bacterial polypetide isolated from the Sargasso Sea
DLTADIAREQDLDLDEEGFNSCMDEQIKNSKSASKFKGLQLDLSSIKETKFLGYEELCGKGKVLGIWDESNAIDNASDQNECFIAVDKTPFYAESGGQIGDQGSFTFSGGHGTVQDCIKQGKIFLHRIKVQEGVIKKNDKLELSVDASKRKAASVNHSATHLMHAALKDVLGDHVHQKGSLLDSNKLRFDFSHSKAVTKAEIKEIELIVNQHIQINSEVTTKIMQLDDALKIGAEAMFGEKYEDEVRVVYIGGEFSVELCGGTHVRRTGDIGMFSVTSESSISSGVRRIEALAGQGAVQSMLEARNHLQDLQG

SEQ ID NO: 191016 - protein, 300 aa, Unknown
  Bacterial polypetide isolated from the Sargasso Sea
RATTSQKCVRAGGKHNDLENVGYTPRHHTFFEMLGNFSFGDYFKEKAIHLAWNLITKDFGLDKNRLYFTVFSEDDEAFNLWKKITGFGDDRIIKIPTSDNFWSMGETGPCGPCSEIFYDHGDHLKGGLPGTKDQDGDRYIEIWNLVFMQYEQVSKDKRIDLPKPSVDTGMGLERIAALLQGTHDNYETDHFKKIIGSISEELKVKPDKNNLSSFRVIADHLRASSFLLAEGVLPSNEGRGYVLRRIMRRGMRHSHLLGSKKPIFFNIFKTLMDEMSGNYPELKRANSLIKETLKMEEEKF

SEQ ID NO: 191017 - protein, 297 aa, Unknown
  Bacterial polypetide isolated from the Sargasso Sea
DLSEKDEISSSNADCNLILEQHGPTDFVGYEANEVIAKVLYCDGDSVILDRSPFYAEAGGQVGDRGTIDGESGSALIKDTVYGAVGQHLHIVESIKGELKTGDKVVGAIDISHRLAVQRHHTGTHLLHWALRQVLGDHVKQQGSWVGAERLRFDFSHFEPLTNEQIERIEDLANTEVFSGEEMEIIETSMNEAKEMGAIAFFGDKYGDQVRVLRAGANSLELCGGTHVNHLGDVGPVKILSEGSIGSNIRRIEAVAGSASVSLLRQQELVIGETASLIGVPPANLIEGLEKKLREIE

SEQ ID NO: 191018 - protein, 86 aa, Unknown
  Bacterial polypetide isolated from the Sargasso Sea
MGQILLTDVRRKFLDYFKKNNHKIVDSSNLVPNNDPTLMFTNSGMVQFKNVFTGLEKRDYKTATTSQKCVRAGGKHNDLENVGYTP

SEQ ID NO: 191019 - protein, 269 aa, Unknown
  Bacterial polypetide isolated from the Sargasso Sea
IKINDVVEMKIDVERRDNLKAYHSATHLLHESLRRTLGKHVMQKGSLVAPDRLRFDFSHMKPITNEELETIDKLVNEYVSNSSEVTTRIMTPKAAIEKGALAFFGEKYGEEVRVVSMGKEKEAYFSTELCGGTHVKNTADIGKFKTVSQSSIAAGVRRVEALRDKQLEDFIKNKEKLSTLSTQKDEETIKELSSQIIKLGGKPNVDNKDLKEIIKNLSRQLEQLNVSSVLQDKTKNIIKDDKINNINVRFQKVHDLPPKDLRKLVDTGK

SEQ ID NO: 191020 - protein, 85 aa, Unknown
  Bacterial polypetide isolated from the Sargasso Sea
AFKLYDTYGFPLDLTEDILRNKSLTIDKEKFQSLMKESRELAKKNWKGSGDTAVEEVWFGIKDKIEATEFLGYETNQAEGVILSL

SEQ ID NO: 191021 - protein, 310 aa, Unknown
  Bacterial polypetide isolated from the Sargasso Sea
MEKVNNYETDLFEYIFKEIAEKTKTTLNDNFLIPYRIISDHLKSIIFMMSEGILPSNEGRGYVLRRIIRRALLNVNKLNPKSIILYKLADEVIKKYSENYEELTKASLFIKNNLKNEEEKFSETLMIGLDLLDKEIKRLNGKDFKPEIAFKLYDTYGFPIDMTESILKSQNINLDIKKYKLLVEHNKKLQKNSWVGSGEIESNKIYNEISKIAPETQFCGYEKGGCDAKLLFIVNNGKFVKTIENANQCFLIFDKTPFYGEAGGQIGDSGKIFSSSKKFLGEISDTKKVGKNIYLHFLKNINYKIKINQS

SEQ ID NO: 191022 - protein, 329 aa, Unknown
  Bacterial polypetide isolated from the Sargasso Sea
KFPPRDNFWSMGETVPCDPCSEIFYDHVRKFTGKLPSEADETGDRFVEIWNLVFMQFEQLNSNERIDLPKPSIDTGMGIERIAAVMQGTNDNYQVDSIKEIINNSIDLTKADDNKLISSHRVIADHLRSSCFLIADGVLPSNEGRGYVLRRIMRRAMRHVHLLQYKDTLMHKLVPTLTLNMKDAYPELLRAEVLIKETLKYEEEKFKNLLEKGIKQLDSISQNLGPNDIFPGESAFKLYDTYGFPIDLTQDILKSKNITIDIESFNKKLDAQKELARKNWSGAGGAATDRIWFELNNELPATEFLGYNSTETQGEVLSIIKKDQRVKKL

SEQ ID NO: 191023 - protein, 239 aa, Unknown
  Bacterial polypetide isolated from the Sargasso Sea
MNKYQNSERINLPKPSIDTGMGLERMTALLDGSNDNYSTDLFQPIINESTKLCGNESSITNPSHRVIADHLKSSSFLIADGVMPSNEGRGYVLRRIMRRGMRHAHSLGNKEPVFHKLFPIFLDGIKNSYPELDRAKDLIINTLKNEETKFKETVEKGIKILDEEISNSTNIFNGEVAFKLYDTYGFPLDLTQDYLKSKNIEVDIKTFQQKMLDQKERARQSWKGTGDIEDEGIWFEITS

SEQ ID NO: 191024 - protein, 255 aa, Unknown
  Bacterial polypetide isolated from the Sargasso Sea
MADKSLNEIRTTFLEYFKKNDHKIVESSNLVPNNDPTLMFANSGMVQFKNVFTGLEKRDYKRATTSQKCVRAGGKHNDLENVGYTPRHHTFFEMLGNFSFGDYFKERAIELAWNLITKDFGLDKNRLYFTVFHEDEEALNLWKKITGFSEDKIIKIPTSDNFWSMGETGPCGPCSEIFYDHGEHLKGGLPGTKDQDGDRYIEIWNLVFMQFEQVSKDKRIDLPKPSVDTGMGLERIAALLQGTHDNYKTDHFKKL

SEQ ID NO: 191025 - protein, 175 aa, Unknown
  Bacterial polypetide isolated from the Sargasso Sea
IIPSASVINQSDKNLMFTNAVMNQFRNIFLGNQESKLFRVANSQKCLRVSGKHNDLEEVGVDTYHHTFFEMLGNWSFGDYFKKEIIEWSFDLIVNIYGINKEDVYVSVFEGSKEDNLEFDQVAFDEWKKFFSEDRIISGNKKDNFWEMGDIGPCGPCSEIHIDLRSESDKKKIKG

SEQ ID NO: 191026 - protein, 289 aa, Unknown
  Bacterial polypetide isolated from the Sargasso Sea
TAAGMVPLKDYFLGNKTTDTPNMVSSQKCIRTIDIDIIGATDRHLSFFEMLGNFSVGEYFKEDAIKYSYEYITEVLKVDKDKLWFTVYKDDDEAYDIWKNVIGVPEKRIQRGNEDNFWHMNIPGPCGPCSEIFIDRGSKYGEDGGPIGGGEDRFIEIWNLVFMESIQDQPFQVIDELPKKNIDTGMGLERIAMIMQDKDNLFDTDLFKPLHDALLTKITVNDNKYEKIIIDHIKSSTFMISDGVVPTNEGRGYVLRRLIRRAIRAYNQLDASDSSLTFLIEIVIDMYSS

SEQ ID NO: 191027 - protein, 296 aa, Unknown
  Bacterial polypetide isolated from the Sargasso Sea
GDGDRFIEIWNLVFMQYEQVSKDKRIDLPKPSVDTGMGLERISALLQGTHDNYETDHFKKLIQSTSNIVKKKPDQSNLSSFRVIADHLRASSFLIAEGVLPSNEGRGYVLRRIMRRGMRHSHLLGSKEPVFYNLFETLKNEMSGSYPELKRAESLIKETLKMEEEKFLVLLERGIKILNEEISKIDKVLPGDIAFKLYDTYGFPLDLTEDILRNKSLSIDTKKFQSLMKESRELAKKNWKGSGDAAVEDIWFGIKDKLGSTEFLGYETDQAEGVVLSLLKENKEVKELRSNEEGMI

SEQ ID NO: 191028 - protein, 232 aa, Unknown
  Bacterial polypetide isolated from the Sargasso Sea
MQINDIRSSFLDYFKSNEHTVVHSSPLVPNNDPTLMFTNSGMVQFKNVFTGLENREYQRATTSQKCLRAGGKHNDLENVGYTLRHHTFFEMLGNFSFGDYFKDEAIEYAWNYITGELGINKDKLYVTIYHDDEQAYSAWKKITSFSDDKIIRISTNDNFWSMGDTGPCGPCSEIFYDHGENYHGNPPSEADETHDRFVEIWNLVFMQYEQVDENNRLSLPKPSIDTGMGIER

SEQ ID NO: 191029 - protein, 52 aa, Unknown
  Bacterial polypetide isolated from the Sargasso Sea
MKTNEIRQSFLDFFESKNHQIVSSSALVPNNDETLLFTNAGMVQFKDVFLWN

SEQ ID NO: 191030 - protein, 252 aa, Unknown
  Bacterial polypetide isolated from the Sargasso Sea
KEPVFYNLFETLKNEMSGNYPELKRAESLIKETLKMEEEKFLVLLDRGIKILNDEVSKIDKVLPGEVAFKLYDTYGFPLDLTEDILKNKSLLIDTPKFHELMKQSRELAKKNWKGSGDTAVENIWFGIRDKFGATEFLGYESNQAEGLVLTILKDNKEVKELKKGDEGMIITNQTPFYGESGGQVGDTGEIISNDFKFEVSDVQKKLGDLFVHYGKVIDGSIKLNDNVEMKINIERRDDTRAYHSATHCFMS

SEQ ID NO: 191031 - protein, 135 aa, Unknown
  Bacterial polypetide isolated from the Sargasso Sea
MAKTLNEIRSAFLDYFEKNDHKIVESSNLVPNNDPTLMFANSGMVQFKNVFTGLEKRDYQRATTSQKCVRAGGKHNDLENVGYTPRHHTFFEMLGNFSFGDYFKERAIELAWNLITKEFGLDKNRLYVTVYHDDD

SEQ ID NO: 191032 - protein, 287 aa, Unknown
  Bacterial polypetide isolated from the Sargasso Sea
SATHILHEALRQVLGEHISQKGSLVDGNRLRFDFSHQKLITKEEILDIEKLANNIVMQNNPVETEIMTIEDAINSGARALFGEKYGKEVRVVSMGENDNQKFSIELCGGIHAKSTGDIGLIKIMSEQGIASGVRRIEAITGENAVNFLTSQNTRMQRTQELLNVQGDDVIEKLEAILKEKRHVERELENIRKKDKFQKIGNKLDEISVGEITLIYQNLVDVSTKELRQLMDETKAKVKSAIIVLIGNQEGKIMIIVGITEDVLAKYSANDIIKIIAKFSDIKGGGSE

SEQ ID NO: 191033 - protein, 178 aa, Unknown
  Bacterial polypetide isolated from the Sargasso Sea
MAQKSLNQIRETFLKYFEKNDHKIVESSNLVPNNDPTLMFANSGMVQFKNVFTGLEKRNYQRATTSQKCVRAGGKHNDLENVGYTPRHHTFFEMLGNFSFGDYFKEKAIHYAWDLITKDFGLDKNKIYVTVFHEDDEAFDFWKKIAGFNDDRIIRISTSDNFWSMGETGPCGPCSEIF

SEQ ID NO: 191034 - protein, 293 aa, Unknown
  Bacterial polypetide isolated from the Sargasso Sea
RGYVLRRIMRRGMRHSHLLGSKEPVFYNLFETLKNEMSGNYPELKRAESLIKETLKMEEEKFLVLLDRGIKILNDEVSKIDKVLPGEVAFKLYDTYGFPLDLTEDILKNKSLSIDIPKFHELMKQSKELAKKNWKGSGDTAVEDVWFGIRDKLGATEFLGYETNQAEGLVLTMLKDNKEVKELKKGDEGMIITNQTPFYGESGGQVGDTGEIISNDFKFEVSDVQKKLGDLFVHYGKVIDGSIKLNDNVEMKINIERRDDTRAYHSATHLLHESLRRVLGTHVTQKGSLVEPK

SEQ ID NO: 191035 - protein, 312 aa, Unknown
  Bacterial polypetide isolated from the Sargasso Sea
SIKIAKSLNLEIDVEKRNNSKANHSATHLLHESLRRTLGKHVTQKGSLVSPERLRFDFSHNRPIEKEEMNKINKVVNEIVESSTDVQTRIMTPKEAIKMGALALFGEKYGEEVRVVFMGKEANGFFSTELCGGTHVKNTKEVGKFRVVSQSSIASGVRRVEALRDKQLTEYEKSQEQDKTLKEKTTKEQMEKIKKELLNFKVEPDLNKNKDLAENLKNLNKQLEKLKIQNVIKDKNKNKIKDKKIGNFTIREQVLRDFPPKELRSVIDQGKKDIKKGIIISISTFDEKVGVAVGVTNDLISKYDAVKFVKMP

SEQ ID NO: 191036 - protein, 326 aa, Unknown
  Bacterial polypetide isolated from the Sargasso Sea
KEESINWSYELLTKTYGLNSDDLYVSVFEGDKKDKTSKDNEAYEIWSKIVPSEKIILGGKKDNFWEMGDTGPCGPCSEIHIDLRSDSEKSKTPGKDLVNTDHPNVIELWNLVFIQFNRMSNGDLVELPQKHIDTGMGFERLVRVIQKKESNYDTDIFSPLIKSIESLSNKKYGSNLKVDIAMRVVSDHVRAVSFCICDGQIPGNTGAGYIIRRILRRAVRYGYTFLKIKEPFIYNLVDTVSYLFLDFFPELEKNKNLIKTIIKEEESVFLKTLSLGISRLDSITKKLNSNTVSGKLVFELYDTYGFPVDLTSLILKEKNITYNQQE

SEQ ID NO: 191037 - protein, 285 aa, Unknown
  Bacterial polypetide isolated from the Sargasso Sea
ILRLFKEQAIDHAWKLLTKDFQLPKEKLSVTVFHEDQESFNLWKKIAGLSEDKIIKISTSDNFWSMGDTGPCGPCSEIFYDHGEKLKGGPPGSVDQDGDRYIEIWNLVFMQYEQISKNKRINLPKPSVDTGMGLERMTAVLQGTHDNYNIDHFKKIISASSDFIKSPINVKTIASHRVISDHLRASSFLIAEGILPSNEGRGYVLRRIMRRGMRHAHALGSKTPVYYKLFDVLLDEMKNSYPELETGKDHIVETLKNEEEKFSSLLERGMKILKENLNKVQNNTL

SEQ ID NO: 191038 - protein, 126 aa, Unknown
  Bacterial polypetide isolated from the Sargasso Sea
MSQFLLTDIRKKFLNYFKQNNHEIVDSSNLVPNNDPTLMFTNSGMVQFKNVFTGLEKRPYKRATTSQKCVRAGGKHNDLENVGYTPRHHTFFEMLGNFSFGDYFKEQAIDHAWKLLTKDFELPKGK

SEQ ID NO: 191039 - protein, 255 aa, Unknown
  Bacterial polypetide isolated from the Sargasso Sea
MQFEQISKEKRINLPKPSVDTGMGLERIAALLQGTHDNYKTDHFKKLIDSISETLKVKAEEDNIASFRVIADHLRASSFLIAEGVLPSNEGRGYVLRRIMRRGMRHSHLLGSKQPIFFNIFKTLMDEMKGNYPEIERAQSLIKETLRMEEEKFLVLLDRGIKILNEEISKIEKVLPGEVAFKLYDTYGFPLDLTEDILKSKSLTIDNGKFNSLMKQSRELAKKNWKGSGDSAIDDIWFGIKDKLSTTEFLGYETN

SEQ ID NO: 191040 - protein, 322 aa, Unknown
  Bacterial polypetide isolated from the Sargasso Sea
VAAWVPENDPSLLFTNAAMVQFKDVFLGKDKRAYSRAVSSQRCVRAGGKHNDLENVGYTARHHTFFEMLGNFSFGDYFKEDAIRFAWEFLTEILKLPEDRLWITVHITDQEAEDIWLNEIGIDPDRITRLDEDNFWQMGDTGPCGPCTEIFWDHGEHVRGGPPGSPDDDLDRYVEIWNLVFMQFERGSDGQMVALPKPSIDTGMGLERISAVMQGVHSNYDIDLFKYLINSAAKIVRCADIGDDSLKVIADHIRSCAFLAMDGVIPSNEGRGYVLRRIIRRALRHGHKLGADSLFFYQLIPALVEVMGDAYPELKNQQNRLS

SEQ ID NO: 191041 - protein, 205 aa, Unknown
  Bacterial polypetide isolated from the Sargasso Sea
MSEIRRKFLEYFSRNDHKIVDSSNIVPNNDPTLMFTNSGMVQFKNVFTGLEKKPFKTATTSQKCIRAGGKHNDLENVGYTPRHHTFFEMLGNFSFGDYFKEKAIYYAWELLTKDFGLPKEKLSATIYSEDEEAFKLWKKIAGLSENRIIKISTADNFWSMGETGPCGPCSEIFYDHGEKLKGGLPGGSNEDGDKFIEIWNLVFMQ

SEQ ID NO: 191042 - protein, 92 aa, Unknown
  Bacterial polypetide isolated from the Sargasso Sea
MAEKTLNQIRETFLKYFEKNDHKIVESSNLVPNNDPTLMFANSGMVQFKNVFTGLEKRDYQRATTSQKCVRAGGKHNDLENVGYTPRHHTFF

SEQ ID NO: 191043 - protein, 279 aa, Unknown
  Bacterial polypetide isolated from the Sargasso Sea
MRRAIRQIYTLNIKEPSFYKLVPTLLDQMGNHYKELNSYQELIIKSILNEEEKFLETLEKGLRILEEENTRSNNKLFSGKVAFKLYDTYGFPLDLTEDMLKTKTKKVNLEEFNEEMKKQKELSKKSWKGDVQNKNETIWKKISSEVPPTNFLGYEKTSSLGRVLKIVFNGSKVEEANQTNKNISLVFDQTPFYAEAGGQVGDTGIIKGENFYFEVHDTQMMQNKIYEHSGVLLKGRVRIGDKASLEINLEKRKKIAANHSATHLLHSALRKKLGKHITQ

SEQ ID NO: 191044 - protein, 202 aa, Unknown
  Bacterial polypetide isolated from the Sargasso Sea
MKTSELREAYLSFFENKGHRRIPASSLIPRNDPTLLFTNSGMVQFKDPLLGKEDPGYKRATSAQSCVRAGGKHNDLENVGYTARHHTFFEMMGNFSFGDYFKEETISWAWEFIQKEMGLPEEKLWITVHPDDDESRKIWRNKIGIKAERIIDIKENFWTMGDTGPCGPNTEIFFDHGEEIFGGPPGSPDEDGDRFVEFWNLV

SEQ ID NO: 191045 - protein, 184 aa, Unknown
  Bacterial polypetide isolated from the Sargasso Sea
MADKSLNEIRSTFLKYFEKNDHKIVESSNLVPNNDPTLMFANSGMVQFKNVFTGLEKRDYQRATTSQKCVRAGGKHNDLENVGYTPRHHTFFEMLGNFSFGDYFKERGIELAWNLITKDFGLDKNRLYVTVFHEDDEAFNFWKKIAGFSDDRIIRIATSDNFWVMGETGPCGPCSEIFMIMEII

SEQ ID NO: 191046 - protein, 118 aa, Unknown
  Bacterial polypetide isolated from the Sargasso Sea
MNSNKIRSTFLEYFSKNGHEIVHSSPLVPHNDPSLMFANSGMVQFKNIFTGKEKRDYKRAVTSQKCVRAGGKHNDLENVGYTARHHTFFEMLGNFSFGDYFKDEAIQFAWNLITKEFG

SEQ ID NO: 191047 - protein, 279 aa, Unknown
  Bacterial polypetide isolated from the Sargasso Sea
MSKKTLKNVRKSFLDYFEKNDHQLVDSSSLVPSNDPTLMFTNSGMVQFKNVFTGLEKREYKKAVTSQKCVRAGGKHNDLENVGYTPRHHTFFEMLGNFSFGDYFKDVAIELAWNLITKEFGISKDKLSVSVYADDKEAFKLWKKIAGLPENRIYKIATNDNFWSMGDLGPCGPCSEIFFDHGDHLEGGPPGSKNQDGDRFIEIWNLVFMQFEQLSKDKRIDLPKPSVDTGMGLERISALLQGTHDNYEIDHFKTLIKVSSELTKSKVRKENVASHRVIA

SEQ ID NO: 191048 - protein, 228 aa, Unknown
  Bacterial polypetide isolated from the Sargasso Sea
ALFGEKYGDTVRMIQFGDSKELCGGIHLPATGNIGLFKITTESAVAAGVRRIEALGGAKAYAAIKAEETQLNAIKDSLKNPKDLLQAVDSLMEENKSLKKEMEGLKNKAAGQLKEELIKKVVQKDGVNVIIEEVELDAAQIKNLAFQLKASMENLFLVLGSKTNHRPSLTVLLSESVVEQKDLNASTIVRELAHHIQGGGGGQAFFATAGGKKPEGIGAALDHAKSLI

SEQ ID NO: 191049 - protein, 329 aa, Unknown
  Bacterial polypetide isolated from the Sargasso Sea
VKAYHSATHLLHESLRRILGTHVMQKGSLVAPDRLRFDFSHMKPISNDEMVKIDEYVNQIVNKKSEVITRIMTPKEGIAHGALALFGEKYGDEVRVVFMGEEGNKYFSTELCGGTHVKNTSNIGNFKVVSQSAIAAGVRRVEALRDKQLDEFLKNKEKQSSLSEQKDEETIKILSEEIKKLGGKLNINKENKKDLIKELNKELEKLSINEIINNRSKNIIKDEKINGVNIRMQKIDGLPPKELRRLIDSGKKEIGEGIVIIFASKDDKVGLAVGVTDKLKSKYDAVKFVKNGSEIIGGKGGGGRPDFAQAGGVNKDKIEDAFKSLKALV

SEQ ID NO: 191050 - protein, 127 aa, Unknown
  Bacterial polypetide isolated from the Sargasso Sea
MADKTLNEIRNTFLKYFEKNEHKIVESSNLVPNNDPTLMFANSGMVQFKNVFTGLEKRDYVRATTSQKCVRAGGKHNDLENVGYTPRHHTFFEMLGNFSFGDYFKEQAIHYAWDLITKDFGIDKDRL

SEQ ID NO: 191051 - protein, 241 aa, Unknown
  Bacterial polypetide isolated from the Sargasso Sea
VEKGIKILDEEISNSTNIFNGEVAFKLYDTYGFPLDLTQDYLKSKNIEVNIKTFEQKMLDQKERARKSWKGTGDIEDESIWFEITSKIEPTEFLGYSDMAADCKIISIISDSKSVNTIKKDQEAIIILNQTPFYGESGGQVGDQGFFENDNLKFEVINTTKIFGKYFLHKGKVISGVCKVEDTIKASINTVNRDFIKYNHSSTHLLHAALRKILGKHVTQKGSLVNSEKLRFDFSHNNPIE

SEQ ID NO: 191052 - protein, 267 aa, Unknown
  Bacterial polypetide isolated from the Sargasso Sea
KISTSDNFWSMGETGPCGPCSEIFYDHGDKYEGGPPGSPNEDGDRFIEIWNLVFMQYEQISKSERINLPKPSIDTGMGLERMTALLDGSNDNYSTDLFQPIINESTKLCGDESSITNPSHRVIADHLKSSSFLIADGVMPSNEGRGYVLRRIMRRGMRHAHSLGNEEPVFHKLFPIFLDGIKNSYPELDRAKDLITNTLMNEETKFKETVEKGIKILDEEISNSTNIFNGEVAFKLYDTYGFPLDLTQDYLKSKNIEVDIKTFEQKM

SEQ ID NO: 191053 - protein, 271 aa, Unknown
  Bacterial polypetide isolated from the Sargasso Sea
SDGILPSNEGRGYVLRRIMRRAIRHGYKIGAKKPFLHKLVKALVKEMGTAFPMLVDNQKSIEKIVHEEEKKFLETLEKGIEILEKEIKSIDSNVIPGEIIFKLHDTYGFPFDLTADIAREQDLDLDEEGFNNCMDEQIKNSKLASKFKGLQLDLSSIKETKFLGYEDLCGKGKVLGIWNESNAIDNASDQNECFIAVDKTPFYAESGGQVGDQGSFTFSGGHGTVQDCIKQGKIFLHRIKVQEGVVKKNDKLELSVDASKRKAASVHHSAT

SEQ ID NO: 191054 - protein, 247 aa, Unknown
  Bacterial polypetide isolated from the Sargasso Sea
EAQNMGALALFGEKYGEKVRVVSMGKDLKNDIYSTELCGGTHVNRSGDIGAFKIISESALGSGVRRIEAVAGNAAIKYFQSESKILEKLSSDLKVNNDKIIDRVNSLLDDKRKLEKKIIELNKTLNTSNLSNNKTDYENVGDVKVISKIMNDIPSKELKGLVDAFKKELKEGIVVLISITNNKASLVIGVTQGLVNAYDAVDLTKIGVEVLGGKGGGGRSDLAQGGGPNYKESEASISAILNKIKNG

SEQ ID NO: 191055 - protein, 292 aa, Unknown
  Bacterial polypetide isolated from the Sargasso Sea
GFPLDLTQDYLRSKNISVDVESFDAAMKLQKEEARSSWKGSGDGDTQKLWFDLAKKIKPTTFDGYKETTIIANISALVLNSEQVQNLSDNNEQSAIITNKSCFYAESGGQVGDKGTITSDTAEFKVSDTRKTPQGIFIHFGNVTSGNFKIGQEVKLKIDTSLRDLIKKNHSATHLLHAALRNNLGTHVAQRGSLVNEDKLRFDFSHNKQISTEQIEIIQREVTSIISNSCETQIDIKSQDEAIKQGAMALFGEKYGDEVRVVTLGENNNKPYSIELCGGTHVTNVQNIKKFH

SEQ ID NO: 191056 - protein, 299 aa, Unknown
  Bacterial polypetide isolated from the Sargasso Sea
DSLKVIADHIRSCAFLIADGVSPSNEGRGYVLRRIIRRAIRHGHKLGKKELFFHRLVSPLAEEMGEAYSVLSEQSDLLSETLREEEERFLETLDNGMKILVEHIDKSKNKDIDGEVAFQLYDTYGFPVDLTADVAKEYGVAVDMSGFDTAMERQRNLGRQSHQFARSDSKIDVVVSSIKGHSYDTSFVGYDSLRSDSTVKKIFVDGVEKEVLSQDDEAILVLDRTPFYAESGGQVGDIGCIRGQESLFEVLDTQVSDGCYLHIGKQVSGSMESGQTIEAEVDPKTRERTRSNHSATHLV

SEQ ID NO: 191057 - protein, 262 aa, Unknown
  Bacterial polypetide isolated from the Sargasso Sea
DVQKMGDSIIHICEAKNKNLKNNVPDNSTITASVDEKSRLSTTNNHTTAHLMHEALRQVLGEHVTQAGSLVNPQMLRFDFTHFEKVSDTQLEEIENIVNLVIRQNINTEIYETPYDEAINSGIIAQFGEKYGDVVRVVKISDFSEELCGGCHVKATGQIGQFRLVSEEGIAAGIRRVVAVTGKQAELMNQEQGRVTRALRQLLNVPEEKIPEMAEKLAEEKRKLEKEVQSLRSKVALEGIAEMVAHAEDVEGVSVLAREIDA

SEQ ID NO: 191058 - protein, 264 aa, Unknown
  Bacterial polypetide isolated from the Sargasso Sea
KGGLPGTKDQDGDRYIEIWNLVFMQYEQISKEKRIDLPKPSVDTGMGLERIAALLQGTHDNYKTDHFMKLINSISETIKVKPNETNLSSFRVIADHLRASSFLLAEGVLPSNEGRGYVLRRIMRRGMRHCHLLGSKEPVFFNIFKTLMNEMSGNYPELMRAESLIKETLRMEEEKFLVLLDRGMKILNDEINKVDKKLSGEVAFKLYDTYGFPLDLTEDILKNKSLTLDHKKFDELMIKSKELAKKKGKGSGDSSVDEICWNKR

SEQ ID NO: 191059 - protein, 235 aa, Unknown
  Bacterial polypetide isolated from the Sargasso Sea
MKLAEIRKKFLKYFESKNHEIVNSSDLIPHGDDSILFTNAGMVQFKDTFLGLEKRKKSATSSQKCLRVGGKHNDLENVGFTTRHQTFFEMLGNFSFGEYFKEGAIDYAWEFLTKELGIPEEKLFITVHKNDQESEKYWLENIGINKEKIARLGDEDNFWSMGETGPCGPCSEIFYDYGRQFEGVVPGAGDTGDRYVEIWNLVFMEFNRDTKGNLTPLPNKCVDTGMGLERICSVL

SEQ ID NO: 191060 - protein, 131 aa, Unknown
  Bacterial polypetide isolated from the Sargasso Sea
MADKTLNEIRTTFLKYFEKNDHKIVESSNLVPNNDPTLMFANSGMVQFKNVFTGLEKRDYKTATTSQKCVRAGGKHNDLENVGYTPRHHTFFEMLGNFSFGDYFKERAIELAWNLATKDFGLDKNRLYFTV

SEQ ID NO: 191061 - protein, 189 aa, Unknown
  Bacterial polypetide isolated from the Sargasso Sea
QKGSLVGSERLRFDFSHFEAVKADEIRRIEQMVNEQIQQNHEVLTRLMNVDDAKAAGAMALFGEKYDDEVRVLSMGDFSIELCGGTHVSRTGDIGLFKIVVESGIAAGIRRIEAVTGEGALAFVHKLEQQAQTVASMLKGDIFSIADKVQQAMDSRKALEKELEQLKAKLASAAGASMLEQVQMINGVK

SEQ ID NO: 191062 - protein, 285 aa, Unknown
  Bacterial polypetide isolated from the Sargasso Sea
SLKIGDAVQADVDEARRARIRLNHSATHLMHAALRQVLGTHVAQKGSLVNDKLLRFDFSHTEAMKPAEIRAVENLVNAQIRRNLLIETNIMDLEAAKAKGAMALFGEKYDDHVRVLSMGDFSTELCGGTHASRTGDIGLFRIVSESGTAAGVRRIEAVTGEGAIQTVHAESDRLSDVAQLLKGDSQNIADKVRSVLERTRQLEKELQQLKEQAAAQESANLSSKAVDINGVKLLVSELADVEPKMLRTMVDDLKNQLGSTVIVLATVVEGKVSLIAGVSKDVTDR

SEQ ID NO: 191063 - protein, 191 aa, Unknown
  Bacterial polypetide isolated from the Sargasso Sea
SNLVPNNDPTFMFANSGMVQFKNVFTGLEKRDYKTATTSQKCVRAGGKHNDLENVGYTPRHHTFFEMLGNFSFGDYFKERAIELAWNLITKDFGLDKNRLYFTVFNEDEEAYILWKKVSGLGDDRVIKISTTDNFWSMGETGPCGPCSEIFFDHGDHLKGGLPGTKDQDGDRYIEIWNLVFMQFEQISKDK

SEQ ID NO: 191064 - protein, 189 aa, Unknown
  Bacterial polypetide isolated from the Sargasso Sea
MADKTLNEIRNTFLKYFEKNDHKIVESSNLVPNNDPTLMFANSGMVQFKNVFTGLEKRDYIRATTSQKCVRAGGKHNDLENVGYTPRHHTFFEMLGNFSFGDYFKEQAIHYAWNLITKDFGIDKNRLYVTVFHEDDEAFNFWKKIAGFSDDRIIRIATSDNFWSMGETGPCGPCSENSLIMVIIYLEDY

SEQ ID NO: 191065 - protein, 140 aa, Unknown
  Bacterial polypetide isolated from the Sargasso Sea
MSEIRRKFLEYFSRNGHEVVDSSNIVPNNDPTLMFTNSGMVQFKNVFTGLEKKSFKTATTSQKCIRAGGKHNDLENVGYTPRHHTFFEMLGNFSFGDYFKEKAIYYAWELLTKDFALPKEKLLATVYSEDEEAFKLWKKI

SEQ ID NO: 191066 - protein, 264 aa, Unknown
  Bacterial polypetide isolated from the Sargasso Sea
HGAHIWGGPPGTPEEDGDRFIEIWNLVFMQFNKQADGTMEPLPKPSIDTGMGLERISAILQNVHSNYEIDLFQNLIKSAASIVRSEDLENKSLRVIADHIRSCSFLICDGVMPSNEGRGYVLRRIIRRAVRHGYQLGANDIFFYKLVASLAKEMGEAYPELVDQLPVIEKVLRVEEEQFSKTLARGMAILNDTLETLEGDTVPGDVVFKLYDTYGFPTDLTNDVAREHDLKIDEETFEAAMQAQRARAQQASNFGADYNSKLAH

SEQ ID NO: 191067 - protein, 280 aa, Unknown
  Bacterial polypetide isolated from the Sargasso Sea
YFEKNDHTIVESSNLVPNNDPTLMFANSGMVQFKNVFTGLEKRDYVRATTSQKCVRAGGKHNDLENVGYTPRHHTFFEMLGNFSFGDYFKDRAIELAWNLVTKDFGIDKNRLYVTVFNEDDEAFNFWKKIAGLSEDRIIRISTSDNFWSMGETGPCGPCSEIFFDHGDKLKGGLPGTKDQDGDRYIEIWNLVFMQFEQITKDKRINLPKPSVDTGMGLERIAALLQGTHDNYETDHFKKIISATSEAVKKKPDQNNLSSFRVIADHLRASSFLIAEGSFT

SEQ ID NO: 191068 - protein, 258 aa, Unknown
  Bacterial polypetide isolated from the Sargasso Sea
FEVIDVQKKLGDLFVHYGKVLNGSIKLNENVEMKINVERRDNIRAYHSATHLLHESLRRVLGDHVIQKGSLVESDRLRFDFSHMKPISSEEINKIETFVNSMINKKTDVKTRIMSPKEAVDNGALALFGEKYGDEVRVLSMGDETDKYFSTELCGGTHVRNTGDIGNFKIVSQSSIAAGVRRVEALREKQLQEFLNKKEKLSNLSSQKNEEIIKDLSEKIIKFGGKPNLENDNQQGLVKDLTKQLNQLFVKSILRDKS

SEQ ID NO: 191069 - protein, 282 aa, Unknown
  Bacterial polypetide isolated from the Sargasso Sea
IDLGEGTCPLSQEHECAVNVESCWRFVELWNLVFMQYQRFPDKHLEPLPAQHVDTGMGLERICRVLQQVNSNYSTDLFVPILRRISEVTDTTDKSGEIGVAYRVIADHLRSLSFAIADGAIPSNEGRGYVLRRMLRRATRFGRVLGMEKPFMHQLVGTLSEVMGDAFPELSAQQKHIEKVIESEESSFGQTLDRGLEIFEQMASSSRTSENGGLSGEDAFKLYDTYGFPVDLTRLMCDERRLNVDEMGFENLMEEQRTRAREAGKFRLTLDDWTEFKEGESE

SEQ ID NO: 191070 - protein, 302 aa, Unknown
  Bacterial polypetide isolated from the Sargasso Sea
GYVLRRIMRRGMRHAHSLGSKNPIFYKLFDVLLTEMKNSYPELSNAKELIVETLKNEEEKFSSLLERGIKILDENLGKVQNKTLPGSIAFKLYDTYGFPLDLTADILRGKNIKVDNVTFEREMEKSKALARANWKGSGDKSIEERWFKIREELKPTEFLGYEFDKAEAVIVKISKNGKFIDTAKSGEEIEIITNQTPFYAESGGQVGDQGYIFSSDCKIKVYDTQKKMGDLFVHYGKIEKGKISIGQNVNLEIDVSKRNNSKANHSATHLLHESLRRTLGKHVTQKGSLVSPDRLRFDLATT

SEQ ID NO: 191071 - protein, 262 aa, Unknown
  Bacterial polypetide isolated from the Sargasso Sea
MFANSGMVQFKNIFTGKETRDYYRATTAQKCVRAGGKHNDLENVGYTTRHHTFFEMLGNFSFGDYFKELAIELAWNLITKEYEINKDRLLVTVYSDDQEAFDLWKKIAGLSENKIIKISTSDNFWSMGETGPCGPCSEIFYDHGDKYEGGPPGSPNEDGDRFIEIWNLVFMQYEQISKSERINLPKPSIDTGMGLERMTALLDGSNDNYSTDLFQPIINESTILCGDENSITNPSHRVIADHLKSSSFLIADGVMPSNEGRG

SEQ ID NO: 191072 - protein, 204 aa, Unknown
  Bacterial polypetide isolated from the Sargasso Sea
MADKTLNEIRTTFLKYFEKNDHKIVESSNLVPNNDPTLMFANSGMVQFKNVFTGLEKRDYQTATTSQKCVRAGGKHNDLENVGYTPRHHTFFEMLGNFSFGDYFKERAIELAWNLITKDFGLDKNKLYFTVFHEDQEALTLWKKITGFGDDRIIKISTSDNFWSMGETGPCGPCSEIFYDHGDHLEGGLPGTKNQDGDRYIEIW

SEQ ID NO: 191073 - protein, 299 aa, Unknown
  Bacterial polypetide isolated from the Sargasso Sea
LTQEIAEEQGLTVDLDGFEEAMDEQRQRAKAAAVSIDLTLQDAIEQVAAEQPATAFKGYDALDQPSTVQALVVNGAPASTASAGDVLQVVLDSTPFYGEGGGQVGDRGSLSGVDVIVAIDSVSRSRNVFVHSGRMERGHLAVGDTVKAQVDRSCRRRAQANHTATHLLQAALKQVVDPGIGQAGSLVDFDRLRFDFHCPTAVTAEQLAQIETLINGWIAEAHSLEVQEMAIDQAKAAGAVAMFGEKYADVVRVVDVPGVSMELCGGTHVANTAEIGLFKIVAESGVAAGIRRMKQWRDQ

SEQ ID NO: 191074 - protein, 264 aa, Unknown
  Bacterial polypetide isolated from the Sargasso Sea
RIFCNDRVITKVMSPDQAIKKGAIALFGEKYGDEVRVVSIGESIDNEREAWSVELCGGTHVKNTAEISTFKILSETGVSSGVRRIEALTNIAAINYYNNEIDKIKFISSYVKTNSAQVTKKIEQLVSENQKLNKELKLLKNKSHVNYDNNSTKETINGIIFEYKIYDNLVVKELKPNAENFIKNNNSNIVCLISKIDNKASIVIAVEKTLTSKISAVEMVNEVSSILGGKGGGGRPDMAQSGGSDPKNSLQAINKIKDYIKRKI

SEQ ID NO: 191075 - protein, 298 aa, Unknown
  Bacterial polypetide isolated from the Sargasso Sea
VEERWFKVREEINPTEFLGYEFDKAEGVIIKMSKNGKFVDTANKGDEIEVITNQTPFYGESGGQVGDQGYIFSSNCKIIVNDTQKKMGDLFVHYGKVEKGSISIGQHVNLEIDILKRNNSRANHSATHLLHESLRRTLGKHVTQKGSLVSPERLRFDFSHNKPIEKEEMSKINNIVNEIVEGSSDVQTRIMTPKEAVSMGALALFGEKYGEEVRVVFMGKENNGFFSTELCGGTHVKNTREVGKFKIISQSSIASGVRRVEALRDKQLEEYEKMQRNYKSQKETNIKNEIELVKKELQ

SEQ ID NO: 191076 - protein, 296 aa, Unknown
  Bacterial polypetide isolated from the Sargasso Sea
YKDDDESKDIWLNLGIEEKYIYKFGDEDNWWGPAGDEGPCGPCSELHYYQGDKKNMEFDNPKWGPNLHDDFVELYNLVFTQFYRDLDGNDKPLPFNNIDTGMGLERTVSVLNNQKTAYKTDIFSNHLEMLNDRVDNNDDLSQKFKRIIAEHGRSASFLIADGVLPENTGRGYVLRRLIRRAMVTSKKLNLDYPVLSPVADITSKKLSHVYPELSEKLSFIKSVLDKEEENFNRTLSFGTQVLYELINKRNIETDKKIIITNDAKEVSKDIFEKINSKENKKLLSGIEAFILYDTYG

SEQ ID NO: 191077 - protein, 295 aa, Unknown
  Bacterial polypetide isolated from the Sargasso Sea
SLRRVLGTHVTQKGSLVESDRLRFDFSHMKPISPEEIKKIEGLVNSMVTKKSDVKTRIMTPNEAVNNGALALFGEKYDDEVRVLSMGTEEAKYFSTELCGGTHVKNTSEIGEFKIVSQSSIAAGIRRVEALRDQQLKEFLNKKAELSDISIQKNKEIVKDLSANIIKLGGKPDLKNNDQQNLIKELTKQLDQLTINSVLNDKSKNIICDDNINNIKVRFQRVFDLPSKELRKLVDKGKKELEQGIVIVFASKDGKIGLAIGVTNKLIKKYDAVKLVKIGSEIMEAKVAAEDLTCS

SEQ ID NO: 191078 - protein, 280 aa, Unknown
  Bacterial polypetide isolated from the Sargasso Sea
TVYKDDDEAEEIWKNIIGIDPGRIARLGDDDNFWSMGDTGPCGPCSEIFYDHGEHIDGTPPGAEGDEGDRFIEIWNLVFMQFNRDESGKMEPLPKPSVDTGMGLERIAAVLQGVNSNYETDVFKDLINASEKILGSEGSTSHKVIADHIRSSVFLISDGVIPEKEGRGYVLRRIMRRGIRHGYKIGAKKPFMHLLVKDLIKLMNSAYPELKKKQKDIIELIKNEEIKFFETLETGIEILEETISNMKNKTLSGDVVFKLHDTYGFPFDLTADIAREKQLD

SEQ ID NO: 191079 - protein, 306 aa, Unknown
  Bacterial polypetide isolated from the Sargasso Sea
MIPYGFPLDLTEDILKNKSLKIDHEKFQSLMKESRELAKKNWKGSGDSAIDDIWFGVREKLGATEFLGYETNQAEGVVLSLFKDNKEVDQLKSGEEGMIIVNQTPFYGESGGQVGDEGEIISGDFKFEVKDVQKKLGDLFVHYGNVKNGSIKLNSSVEMKINVSRRDNIRAYHSATHLLHESLRRVLGEHVTQKGSLVEPERLRFDFSHMKPISVDEITKIETYVNTMIEKKSDVKTRLMTPKEAVENGALALFGEKYGEEVRVLSMGDEESSYFSTELCGGTHVRNTGDIGKFKIVSQSSIAAGV

SEQ ID NO: 191080 - protein, 268 aa, Unknown
  Bacterial polypetide isolated from the Sargasso Sea
MVIANQTPFYAESGGQMGDKGVLFKTDGAEFSIDDTIKRLENIHVHIGTLRKGNLAKGDTVEMRVEPDRRKFLRANHSVTHLLHAALREHLGNHVAQKGSLVAPGYLRFDFSHPKAVSQEDLLAIEFEVNARIRENAPVITRQMTPDEAQEAGAVALFGEKYGEEVRVVSMGVGKFDTDLPYSMELCGGTHVASTGEIGVFKITSESAVAAGVRRVEAKTGSSALEYIAKREAIVVNAAQALNAAPSDVPIRVGALLNERRSRNERYL

SEQ ID NO: 191081 - protein, 240 aa, Unknown
  Bacterial polypetide isolated from the Sargasso Sea
MKTSEIRQSFLNFFDSKDHKVVPSSSLVPNNDETLLFTNAGMVQFKDIFLGTETKNYSRATTSQICIRAGGKHNDLENVGYTLRHHTFFEMLGNFSFGDYFKEDAIKYAWEFLTEVLKLDKDKLWITVYKDDDEAEEIWKNTIGVDASRIARLGDDENFWSMGDTGPCGPCSEIFFDHGEHIEGSPPGADGDEGDRFVEIWNLVFMQFNRDEDGNMEPLPKPSVDTGMGLERISAVMQGV

SEQ ID NO: 191082 - protein, 202 aa, Unknown
  Bacterial polypetide isolated from the Sargasso Sea
MVDKSLNEIRTTFLKYFEKNDHKIVDSSNLVPNNDPTLMFANSGMVQFKNVFTGLEKRDYQRATTSQKCVRAGGKHNDLENVGYTPRHHTFFEMLGNFSFGDYFKERAIELAWNLITKDFGLDKNRLYFTVFNEDNEAFNLWKKITGLGNDRIIKISTSDNFWSMGETGPCGPCSEIFFDHGDHLKGGLPGSKDQDGDRYIE

SEQ ID NO: 191083 - protein, 306 aa, Unknown
  Bacterial polypetide isolated from the Sargasso Sea
EIHIDLRDPKEIQAVPTSKLINKDHPEVIEIWNLVFIEFNRKIDGSLENLPEKHVDTGMGLERLSMAIDSLTSTYDTNIFRSIIKSLEKISGKKYGVEKEINIAFRVICDHIRAIVLTISDGAIPSNNKAGYVIRRILRRAVRYGYSTLQLKEPFLNELSQSVIVEYKDIFKNLSSQSDFIKEVILEEEKTFLSTLDKGLKKINEYGESSKKVSGELVFELYDTYGFPIDLTELIFREKGINIDKEKFNELLETQRNRSRNVSKAISDEWKILKKGKKLTSFIGYEEDNSLSQIIMYRKVSEDENT

SEQ ID NO: 191084 - protein, 238 aa, Unknown
  Bacterial polypetide isolated from the Sargasso Sea
LRTLEKGVIQFEKILSNTSGSEIHGKDAFKLYDTYGFPLDLTQLMAKEKKMTVDIDGFDVEMKNQKELAKSGQKFEMDNLNLKWNLETKSSHSIFVGYENESISSKIINHAKNGDNIIIILENTPFYSESGGQIGDAGIISNDDFSARVIDTQKNGDYVLHICSLTNGAIGDNLSVDCMIDVDRRNNIKMNHTATHLLHQSLKDVLGDHVNQAGSLVHPEYLRFDITHPKKISLKELE

SEQ ID NO: 191085 - protein, 147 aa, Unknown
  Bacterial polypetide isolated from the Sargasso Sea
DKILPGEVGFKLYDTYGFPLDLTEDILKNKSLKIDNKKFGELMKQSRELAKKNWKGSGDSAIDDIWFGIKDKLGPTEFLGYETNQAEGVVQTLLKNNKEVNSLKMNDEGMIIVNQTPFYGESGGQVGDTGEILPMILNLKFQMFRKN

SEQ ID NO: 191086 - protein, 312 aa, Unknown
  Bacterial polypetide isolated from the Sargasso Sea
HDTFGFPYDLTADIAREQDLDLDEEGFNRCMEEQIKNSKSANKFKGLQLDLSSIKETEFLGYGELFGKGKVLGIWNESNEIDNASDKNECFIAFDKTPFYAESGGQVGDQGTFLFAGGNGAVQDCIKLGKIFLHRIKVEKGVININDKLELSVDASKRKAASIHHSATHLMHAALKDVLGDHVHQKGSLLDSKKLRFDFSHSKAVTKDEIEKIELIVNQHIQNNSEVETKIMKLDDALDIGAEAMFGEKYEDEVRVVYIGGEFSVELCGGTHVARTGDIGMFSVTSESSISSGVRRVEAVAGQSAVKIMVEA

SEQ ID NO: 191087 - protein, 284 aa, Unknown
  Bacterial polypetide isolated from the Sargasso Sea
PCSEIFYDHGEKLKGGPPGSPEQDGDRFIEIWNLVFMQYEQISKEKRINLPKPSVDTGMGLERMTAVLQGTHDNYEIDHFKKIMASSSEITKTPINEKTIASHRVIADHLRASSFLIAEGILPSNEGRGYVLRRIMRRGMRHAHSLGSKSPLFHKLFNVLLNEMKISYPELTNGKDLIIETLKNEEEKFSSLLERGMKILDDNLSKVKNNILPGSVAFKLYDTYGFPVDLTADILRTKNIKVDSNSFEKEMEKSKALARANWKGSGDKSVEERWFKIREELKPN

SEQ ID NO: 191088 - protein, 291 aa, Unknown
  Bacterial polypetide isolated from the Sargasso Sea
TLENVGYTPRHHTFFEMLGNFSFGDYFKERAIELAWNLITKDFGLDKNRLYFTVFNEDDEAFNLWKKISGFGDDKIIKISTSDNFWSMGETGPCGPCSEIFYDHGDHLKGGLPGSKDQDGDRYIEIWNLVFMQFEQISKEKRINLPKPSVDTGMGLERIAALLQGTHDNYKTDHFLKLINSISEAVKVKPNENNLSSFRVIADHLRASSFLIAEGVLPSNEGRGYVLRRIMRRGMRHSHLLGSKDPIFFTIFKTLVEEMSGNYPELKRAESLVKETLRMEEEKFLVLLDRG

SEQ ID NO: 191089 - protein, 296 aa, Unknown
  Bacterial polypetide isolated from the Sargasso Sea
MGLERIAAVFQGTHDNYSIDHFKKLMLASSDITKTKIDKKTVASHRVIADHLRASSFLIAEGVLPSNEGRGYVLRRIMRRGMRHAHTLGSKNPIFYKLFDVLLNEMSQSHPELIRGKDLIVETLKNEEEKFSSLLDRGMKILNQNLEKVKNNTLPGEIAFKLYDTYGFPLDLTADILKNKKIKIDTNVFDKEMEKSKEVARASWKGSGDKSVEEKWFKVRDELSPTEFLGYEFDKAEGIILKISKDNKFVESAKIGDEVEIITNQTPFYGESGGQVGDVGIIYSSDCKINIKDTQK

SEQ ID NO: 191090 - protein, 309 aa, Unknown
  Bacterial polypetide isolated from the Sargasso Sea
SNYEIDLFQALIAAAAKVTNAQDLDDKSLRVVADHIRSCAFLVSDGVMPSNEGRGYVLRRIIRRAVRHGNKLGAKGAFFYKLVAALIEQMGQAYPELAKQQEIIEKVLRIEEEQFGKTLERGLAILEESLTDIEGDVIPGDLVFKLYDTYGFPADLTADVARERFMTIDEHGFQECMAVQRKQAQQAGKFGADYNQQLKSEKHTDFKGYDAEHYTGTVVELFSEGQSVSVLEDGQEGIAILDRTPFYAESGGQVGDTGVLKVAGGEFVVTNTTKLGNAFAHHGRVQGRIGTNDKAEATIDAARRDSIKK

SEQ ID NO: 191091 - protein, 282 aa, Unknown
  Bacterial polypetide isolated from the Sargasso Sea
MKSHEIRKRFLEYFNKQGHEIIHSGPLVPHNDPTLMFANSGMVQFKNVFTGKEKRKNLRATTSQKCVRAGGKHNDLEQVGYTKRHHTFFEMLGNFSFGDYFKDLAIQFSWELITKEFEIDKNKILITVYKDDEESFEIWKKISGLDSSKIIKISTSDNFWSMGETGPCGPCSEIFYDHGEKFQGGPPGSKNEDGDRFVEIWNLVFMQYEQISENNRINLPKPSIDTGMGLERITALLQNTNDNYMTDIFNSLINRSIELTESKENSSSPSHRVISDHLRSAA

SEQ ID NO: 191092 - protein, 252 aa, Unknown
  Bacterial polypetide isolated from the Sargasso Sea
GFPLDLTEDILKSKSLKIDHEKFNTLMKDSKELAKKNWKGSGDSAVDDIWFGIKEKISPTEFLGYETNQAEGIVLSLLKDNLEVKELNSGDEGMIIVNQTPFYGESGGQIGDRGQIISGDFIFEVFDVQKKIGDLFIHYGTVKKGLVKINQNVELKIDVLRRDNIRAYHSATHLLHESLRRVLGSHVTQKGSLVEPDRLRFDFSHMKPISAEELSKIETYVNSMVEKKSDVKTRIMTPKKAVENGALALFGE

SEQ ID NO: 191093 - protein, 268 aa, Unknown
  Bacterial polypetide isolated from the Sargasso Sea
PLPKPSVDTGAGLERLAAVLQRVHSNYEIDLFQSLLKDVAKVTKSKDFTGSSLNVIADHIRSCAFLIVDGVLPSNEGRGYVLRRIIRRAVRHGHQLGMKDPFFYLLTGTLCDVMGQAYPELVERKQFVETVLREEEEQFARTLDNGMTILERELENINGDTLSGETVFQLYDTFGFPVDLTADVARGRNLKIDMKGFQASMDQQRSSARAASSFGISEKLDIDSSLVTEFTGYDSLDGKGRIIEIFASSGERLDKVPANEEVYLLLDQ

SEQ ID NO: 191094 - protein, 200 aa, Unknown
  Bacterial polypetide isolated from the Sargasso Sea
VADGISPSNEGRGYVLRRIIRRALRHADKLGSKQPVLSSMVPTLVKQMSNAYPILKKNSKLIKANILQEEEQFASTLVQGMGLLKEEVKNLKGKTIKGELIFMLYDTYGFPPDMTADYARENNLKVDLKGYEEAMTKQKERGREASTFGSVIPESLNLKGSTNFVGYEKDEVKAKIVELVSLSDGKAQEKIKENQEAVVI

SEQ ID NO: 191095 - protein, 269 aa, Unknown
  Bacterial polypetide isolated from the Sargasso Sea
HDNYKSDHFKKLIESISDTVKVKADENNIASFRVIADHLRASSFLLAEGVLPSNEGRGYVLRRIMRRGMRHSHLLGSKDPVFHNIFKSLLDEMSNSYPELDRAQSLIKETLKMEEEKFLVLLERGMKILDEEISKIDKVLPGEVAFKLYDTYGFPLDLTEDILKNKSLKIDNDKFQSLMQESKDFAKKNWKGSGDTAVDEIWFDIKDKVGATEFLGYEKIQSEGVILKLIKNNKEVDSLKTGEKGMIVVNQTPFYGESGGQLGDIGKIN

SEQ ID NO: 191096 - protein, 276 aa, Unknown
  Bacterial polypetide isolated from the Sargasso Sea
ADFEKEMEKSKALARANWKGSGDKSVEERWFKIREEINPTEFLGYEFDKAEGIVIKISKDGKFVDSAGTGDEVEVITNQTPFYGESGGQVGDQGYIFNSDCKIEINDTQKKMGDLFVHYGKIKKGSISIGQNVRLEIDVLKRNNSKAYHSATHLLHESLRRTLGKHVTQKGSLVSPDRLRFDFSHNKPIEKEEMEKINNIVNEIIVGSTDVQTRIMTPKEAVSMGALALFGEKYGQEVRVVFMGKENNGFFSTELCGGTHVKNTKEVGKFKVISQS

SEQ ID NO: 191097 - protein, 295 aa, Unknown
  Bacterial polypetide isolated from the Sargasso Sea
IDHEKFQSLMKESRELAKKNWKGSGDSAIDDIWFGVREKLGATEFLGYETNQAEGVVLSLFKDNKEVDQLKSGEEGMIIVNQTPFYGESGGQVGDEGEIISGDFKFEVKDVQKKLGDLFVHYGNVKSGSIKLNSSVEMKINVSRRDNIRAYHSATHLLHESLRRVLGEHVTQKGSLVEPERLRFDFSHMKPISADEITKIETYVNTMVEKKSDVKTRLMTPKEAVENGALALFGEKYGEEVRVLSMGDEESSYFSTELCGGTHVRNTGDIGKFKIVSQSSIAAGVRRVEALRDKP

SEQ ID NO: 191098 - protein, 84 aa, Unknown
  Bacterial polypetide isolated from the Sargasso Sea
MAEKTLKNVRKLFLDYFLSKKHKIVDSSSLVPSNDPTLMFTNSGMVQFKNVFTGLEKRDYKRAVTSQKCVRAGGKHNDLENVGY

SEQ ID NO: 191099 - protein, 206 aa, Unknown
  Bacterial polypetide isolated from the Sargasso Sea
FYGESGGQVGDQGYIFSSNCKIKINDTQKKMGDLFVHYGKIENGSIKIGENVNLEIDKKKRNNSRANHSATHLLHESLRRTLGKHVTQKGSLVSPERLRFDFSHNKPIEKEEMIKINRIVNEIVDRSSDVQTRIMTPKEAVSMGALALFGEKYGDEVRVVFMGKENNGFFSTELCGGTHVKNTKEVGKFKIISQSSIASGVRRVEA

SEQ ID NO: 191100 - protein, 281 aa, Unknown
  Bacterial polypetide isolated from the Sargasso Sea
RHAHLMDVPEPLMWKLVPTLVQEMSEAFPELLRAQSLIAETLKLEETRFRETLGRGMRLLEEATSKLRSDQELSGEIAFQLYDTYGFPLDLTEDALRQQGRNVNRIEFDKAMDKQRALAKSNWSGSGDQATEQMWFDLKQMHGASEFLGYTTTSAEATVLAVISEQNIVDVAAAGAPVMVLVNQTPFYGESGGQVGDIGTISDPHGLHIDVTKTVRKADDLIIHIGTIKAGTLSPGNIIDLRVNSEKRNAARRNHSATHLLHAALRNHLGDHVAQKGSLVS

SEQ ID NO: 191101 - protein, 316 aa, Unknown
  Bacterial polypetide isolated from the Sargasso Sea
EGRGYVLRRIMRRAIRHGYKIGAKKPFMYKLVKALVKEMGPAFSMLVDKQKSIEKIVHEEEKKFLETLEKGIEILDKEIKSIDSKIIPGEIIFKLHDTFGFPFDLTADIAREQDLDLDEEGFNSCMEEQIKNSKSASKFKGLQLDLSSIKETQFLGYKELSGEGKVLGIWNESNAVDNASDKNECFIAFDKTPFYAESGGQVGDQGSFSFSGGHGIIEDCIKQGKISLHRIKVQEGVVKKNDKLELSVDAGKRKAASVHHSATHLMHAALKDVLGDHVHQKGSLLDSNKLRFDFSHSKAVTKDEIKEIELIVNQYI

SEQ ID NO: 191102 - protein, 276 aa, Unknown
  Bacterial polypetide isolated from the Sargasso Sea
EFLGYEFDKAEGVVIKISKDNKFVDSADAGSEVEIITNQTPFYGESGGQVGDQGIIFNSDCKINITDTQKKMGDLFVHTGKIESGTIKIGQSVNLEINVENRNNSKANHSATHLLHESLRRTLGKHVTQKGSLVSPERLRFDFSHNKPIEKEEMIKINKVVNEIVDGSTEVQTRIMTPKEAIKLGALALFGEKYGEEVRVVFMGKESNGFFSTELCGGTHVKNTKEVGKFKVISQSSIASGVRRVEALRDKQLQEYEKFQKQDKSIKEKTSRDQLE

SEQ ID NO: 191103 - protein, 298 aa, Unknown
  Bacterial polypetide isolated from the Sargasso Sea
DRGIKILNDEISKIDKVLPGEVAFKLYDTYGFPLDLTEDILRNKSMLIDTKKFQSLMKESRELAKKNWKGSGDAAVENIWFGIKDKLEATEFLGYETNQAEGVVLSLLKDNKEVDQLKENDEGMIIVNQTPFYGESGGQVGDTGEIVSNDFKFEVTDVQKKLGDLFVHYGKVKSGSIKLQESVELKIDVERRDNTRAYHSATHLLHESLRRVLGTHVTQKGSLVEPSRLRFDFSHMKPILNEEIDKIEEFVNKMVSKKSDVKTRLMTPDEAVKNGALALFGEKYGDEVRVLSMGDEDG

SEQ ID NO: 191104 - protein, 232 aa, Unknown
  Bacterial polypetide isolated from the Sargasso Sea
MIITNQTPFYGESGGQLGDKGTIVSGNSVFEVEDTQKKLGDLFVHYGSVKTGEIKINDVVEMKIDVERRNNLKAYHSATHLLHESLRRTLGKHVMQKGSLVAPDRLRFDFSHMKPITNEELETIDKLVNEYVKNGSEVTTRIMTPKAAIEKGALAFFGEKYGEEVRVVSMGKEKDAYFSTELCGGTHVKNTGDIGKFKTVSQSSIAAGVRRVEALRDKRLEDFIKNKEKLST

SEQ ID NO: 191105 - protein, 253 aa, Unknown
  Bacterial polypetide isolated from the Sargasso Sea
TFLKYFEKNDHKIVESSNLVPNNDPTLMFANSGMVQFKNVFTGLEKRDYQRATTSQKCVRAGGKHNDLENVGYTPRHHTFFEMLGNFSFGDYFKERGIELAWNLITKDFGLDKNRLYVTVFHEDDEAFNFWKKIAGFNDDKIIRIATSDNFWSMGETGPCGPCSEIFYDHGDHLKGGLPGTKDQDGDRFIEIWNLVFMQYEQVSKDKRIDLPKPSVDTGMGLERIAALLQGTHDNYQTDHFKKLISSISEVTK

SEQ ID NO: 191106 - protein, 232 aa, Unknown
  Bacterial polypetide isolated from the Sargasso Sea
MTLSTADLRNKFIDYFKSHSHQAVASSSLVPADDPTLLFTNAGMNQFKDCFLGAEKRSYTRAVSSQRCVRAGGKHNDLENVGYTARHHTFFEMLGNFSFGDYFKKEAIEFAWNFLTKEIGLPKEKLLVTVYSEDDEAFDIWENHIGVPKEKIIRISTSDNFWSMGDTGPCGPCSEIFYDHGAHIWGGPPGTPEEDGDRFIEIWNLVFMQFNKQADGTMEPLPKPSIDTGMGL

SEQ ID NO: 191107 - protein, 250 aa, Unknown
  Bacterial polypetide isolated from the Sargasso Sea
KSSSFLIADGVMPSNEGRGYVLRRIMRRGMRHAHSLGNKEPVFHKLFPIFLDGIKNSYPELDRAKDLITNTLMNEETKFKETVEKGIKILDEEISNSTNIFNGEVAFKLYDTYGFPLDLTQDYLKSKNIEVDIKTFEQKMLDQKERARQSWKGTGDIEDEGIWFEITSKIDPTEFLGYSDMEADCKIISIISENKSVDKIKKDQEAIIILNQTPFYGESGGQVGDQGFFKNDSFKFEVMNTTKIFGNYFL

SEQ ID NO: 191108 - protein, 268 aa, Unknown
  Bacterial polypetide isolated from the Sargasso Sea
TLHTGAGYVIRRILRRAVRYGYQFLNFKEPFIHLLVDDFVSSFDGYYKELDSQKEFIAKIIFEEESSFFKTLSSGIKRIDEIVKKCQKDKTTLISGEQCFELYDSFGFPLDLTRLLAVENNLSIDQKGFDKCLEEQRSRSKQDASKQLGDWIVVKEDDVQEFIGYDHTKTTLLITQYREVTLKKEKLFQLIFNLTPFYPEGGGQVGDTGFIQSNEQKITIIDTKKENGVIVHFVKELPKNLKANFLAQVNERYREDTAKNHSATHLLH

SEQ ID NO: 191109 - protein, 238 aa, Unknown
  Bacterial polypetide isolated from the Sargasso Sea
MQKGSLVAPDRLRFDFSHMKPITEDELTIIDKLVNEYVQNKTDVTTRIMTPKAAIEKGALAFFGEKYGEEVRVVSMGAENNSYFSTELCGGTHVKNTGDIGKFKTISQSSIAAGVRRVEALRDKQLEIFLKNKEKMSNLSAQKDEDNIKDVSAQIIKLGGKPNLENKDTKGLIKDLNKQLEQLNIQSVLGDKTKNIIKDESINGTKIRLQKVQDLSPKDLRKLVDAGKKELREGIVVV

SEQ ID NO: 191110 - protein, 286 aa, Unknown
  Bacterial polypetide isolated from the Sargasso Sea
LLHAALRKILGKHVTQKGSLVNSEKLRFDFSHNNPIEKDQLMNIEEIVNDQIQKNGIVEIKIVDQKKAIEEGAMALFGEKYSDEVRVVTMGKENESFFSKELCGGTHVLKLGEISKFKITNQSSVASGIRRIEAVSNVAVDKYIKEIERNLLEKNKNQDNQIEDLKNKIKKINADYNFKNQSEDKGLLIKELIQIYEKLKQNMSISKNIDNIVVKKIKELNFIYLVAEDYPNKSLKTFIDEQKKQYNKNSVSLIISNNNNKLSIVLGVTEDITELFDASKRNKRNF

SEQ ID NO: 191111 - protein, 266 aa, Unknown
  Bacterial polypetide isolated from the Sargasso Sea
ARNDRISRHVVRASSAAASANADTQKSTNKDNSGRSIRKRFLDFYENKGHAVLPSSSLVPEDPTVLLTIAGMLQFKPIFMGQKEREVKSATTSQKCVRTNDIENVGVTARHHTFFEMLGNFSFGDYFKKEACEWAWELSVKELGIDPDRIWVSVFESDDEALGIWRDQIGVPEAKILRMGAEDNFWAAGPTGPCGPCAELYYDFKPELGVEGVKDLNDDSRFVEFYNLVFMELSRDANGKTTPLKNKNIDTGMGLERVAQIFTKKP

SEQ ID NO: 191112 - protein, 123 aa, Unknown
  Bacterial polypetide isolated from the Sargasso Sea
MADKTLNEIRNTFLKYFEKNDHKIVESSNLVPNNDPTLMFANSGMVQFKNVFTGLEKRDYVRATTSQKCVRAGGKHNDLENVGYTPRHHTFFEMLGNFSFGDYFKEQAIHYAWDLITKRFWNR

SEQ ID NO: 191113 - protein, 259 aa, Unknown
  Bacterial polypetide isolated from the Sargasso Sea
LVPEDPTVLLTIAGMLQFKPVFMGQEERKVPRATTTQKCVRTNDIENVGVTARHHTFFEMLGNFSFGDYFKREAIEWAWELATKEYGLDAERVWVSVFREDDEAYAIWRDVVGVPESRIKRMDEADNYWAAGPTGPCGPCSELYWDFKPELGIDGSEDLDDDSRFIEFYNLVFMEFSRDAKGETTPLARKNIDTGMGLERMAQILQGAPNNYETDLIRPVIDAAAAMAGISYDSADDAQKLKLKVIGDHTRAVAYLIAD

SEQ ID NO: 191114 - protein, 272 aa, Unknown
  Bacterial polypetide isolated from the Sargasso Sea
TGFGDDRIIKISTSDNFWSMGETGPCGPCSEIFYDHGDQLSGGLPGTKDQDGDRYIEIWNLVFMQFEQISKDKRINLPKPSVDTGMGLERITALLQGTHDNYKSDHFKKLIESISDTVKVKSDENNIASFRVIADHLRASSFLLAEGVLPSNEGRGYVLRRIMRRGMRHSHLLGSKDPVFHNIFKSLLNEMSDSYPELDRAQSLIKETLKMEEEKFLVLLERGMKILDEEISKIDKVLPGEVAFKLYDTYGFPLDLTEDILKNKSLKVDNDK

SEQ ID NO: 191115 - protein, 273 aa, Unknown
  Bacterial polypetide isolated from the Sargasso Sea
PSVDTGMGLERIAAVLQGTHDNYSIDHFKKLMNASSEITKTKIDNKTIASHRVIADHLRASSFLIAEGVLPSNEGRGYVLRRIMRRGMRHAHTLGSKNPIFYKLFDVLLNEMSQSYPELTRGKDLVVETLKNEEEKFSSLLDRGMKILNQNLEKIKNNTLPGEIAFKLYDTYGFPLDLTADILKSKKIKIDTNVFDKEMAKSKEIARASWKGSGDKSIEEKWFKVREELNPTEFLGYEFDKAEGVILKISKDNKFVDSAKTGDEVEVITNQTP

SEQ ID NO: 191116 - protein, 254 aa, Unknown
  Bacterial polypetide isolated from the Sargasso Sea
MRTLNDIRSTFLDYFKRQGHEVVQSSPLVPRNDPTLMFANSGMVQFKNLFTGVETRDYKRAVTSQKCVRAGGKHNDLDNVGYTARHHTFFEMLGNFSFGDYFKSEAIPFAWELITKEFDIPKERLLVTVYHTDEEAALLWKKVAGLPDDKIIRISTNDNFWMMGATGPCGPCTEIFFDHGEKYWGGPPGSPEEDGDRFVEIWNLVFMQYEQFEDGTRKDLPNQSIDTGMGIERVAALLQGTNDNYETDLIRALI

SEQ ID NO: 191117 - protein, 195 aa, Unknown
  Bacterial polypetide isolated from the Sargasso Sea
GAVFSVVDTIKVSKAFAHKGSLKGALAIGDLVDAAIDNARREAIRKNHSATHLLHAALRTVLGEHVTQKGSLVGSERLRFDFSHFEAVKADEIRRIEQMVNEQIQQNHEVLTRLMNVDDAKAASAMALFGEKYDDEVRVLSMGDFSIELCGGTHVSRTGDIGLFKIVVESGIAASIRRIEAVTGESALAFVHKLE

SEQ ID NO: 191118 - protein, 269 aa, Unknown
  Bacterial polypetide isolated from the Sargasso Sea
FKKNGHEVIHSSSLVPDNDPTLMFANSGMVQFKNIFTGKETREYNRATTAQKCVRAGGKHNDLENVGYTTRHHTFFEMLGNFSFGDYFKELAIELAWNLITKEYSINKDRLLVTVYSDDQEAFDLWKKIAGLSENKIIKISTSDNFWSMGETGPCGPCSEIFYDHGDKYEGGPPGSPNEDGDRFIEIWNLVFMQYEQISKSERINLPKPSIDTGMGLERMTALLDGSNDNYSTDLFLPIINESTKLCGDESSITNPSHRVIADHLKSSS

SEQ ID NO: 191119 - protein, 259 aa, Unknown
  Bacterial polypetide isolated from the Sargasso Sea
GKHNDLENVGHTARHHTFFEMLGNFSFGDYFKEKAIYFAWDLLTKEFGFSKDKLLVTYYHDDIEAKKIWKSVSGLDDKKIIAINTNDNFWSMGDTGPCGPCSEIFYDHGESIFGGPPGSKNEDGDRYIEIWNLVFMQFEQIDNQKRINLPSPSIDTGMGLERLAAILQGKHDNYDIDLMEKLITASANKSSTNKDGKFKVSHRVIIDHLRSSSFLIADGILPSNEGRGYVLRRIMRRGMRHAHILGCKDPLFCKLVPDL

SEQ ID NO: 191120 - protein, 284 aa, Unknown
  Bacterial polypetide isolated from the Sargasso Sea
FGLDKNRLYVTVFHEDDEAFNFWKKIAGFNDDRIIRIATSDNFWSMGETGPCGPCSEIFYDHGDHLKGGLPGTKDEDGDRFIEIWNLVFMQYEQISKDKRINLPKPSVDTGMGLERITALLQGTHDNYETDHFKKLIQSTSDIVKKKPDQNNLSSFRVIADHLRASTFLIAEGVLPSNEGRGYVLRRIMRRGMRHSHLLGSKEPVFYNLFETLKNEMSGNYPELKRAESLIRETLKMEEEKFLVLLDRGIKILNDEISKIDKVLPGDVAFKLYDTYGFPLDLTE

SEQ ID NO: 191121 - protein, 254 aa, Unknown
  Bacterial polypetide isolated from the Sargasso Sea
ISEFTNVKQDENNLSSFRVIADHLRASSFLLAEGVLPSNEGRGYVLRRIMRRGMRHSHLLGSKEPVFNKIFDTLKDEMKGNYPELERSETLIKETLKMEEEKFLVLLDRGIKILNDEISKIKKVLPGEVAFKLYDTYGFPLDLTEDILKNKSLTVDQNKFDELMKKSKELAKQNWKGSGDASEEEIWFGIKDKIGPTEFLGYEFDQSEGVVLSIIKNNKEAQKISNDEEGIIITNQTPFYGESGGQVGDQGTIV

SEQ ID NO: 191122 - protein, 306 aa, Unknown
  Bacterial polypetide isolated from the Sargasso Sea
MKSSKIRESYIKYFENQGHVNEPSASLIPSGDPTLLFTSAGMVPFKAYFMGEQVPPSTRMTSIQKSFRTTDIDEVGDHKHLTFFEMLGNFSFGDYFKEESITYAWEVCTKVFGLNPDKFYITVHLDDDEAYDYWHHTIGIPIDRLYRYGNKDNWWGPAGEEGPTGPCSELHYDTGAVKGCGDLLSVDELTGYERLENEGKTVKWGPGCHPNCDNCERFVELWNLVFTQFYQDTDGQRTNLPSPNIDTGMGLERVTAVLQDKSNVYETDLFSPIINSIEDLTGSKYGGEESTDYSIRVVAEHGRAAT

SEQ ID NO: 191123 - protein, 284 aa, Unknown
  Bacterial polypetide isolated from the Sargasso Sea
RRATRFGRVLNMHEPFIYKLVPILAEVMGEAFPEINTQQEHVQNVIKSEETSFGSTLDRGLDIFQKIISSTETKSSKIVSGEDAFKLYDTYGFPIDLTRLMTKEHGFEVDEMEFEKLMVKQQERAREAAKFKTIPNKWIEISEGHDSKFIGYDTFTTESKLRRFSLNDSGQWQFILDTTPFYAESGGQIGDQGFLQQNNNIWKVLDVQKMGDSIIHICEAENKRSKNIVPNNSKITASVDENSRLSTTNNHTAAHLMHEGLRKVLGNHVTQAGSLVNREMLRFD

SEQ ID NO: 191124 - protein, 191 aa, Unknown
  Bacterial polypetide isolated from the Sargasso Sea
MNSNLIRSNFIKFFEEKGHSFVQSSSIVAKNDPSLMFTNAGMNQFKNIFLGNESSKVKRVANSQKCLRVSGKHNDLEEVGADHYHHTMFEMLGNWSFGDYFKKEIINWSLEILTKVYKLNKDDLYVTVFEGNKEDQLDKDIEAYKFWSEIINKEKIVLGDKKDNFWEMGDTGPCGPCSEIHIDLRSSDDKN

SEQ ID NO: 191125 - protein, 270 aa, Unknown
  Bacterial polypetide isolated from the Sargasso Sea
PSVDTGMGLERITAVLQGTHDNYNIDHFKKLMSASSEITKTKIDNETIASHRVIADHLRASSFLISEGVLPSNEGRGYVLRRIMRRGMRHAHTLGTKDPIFYKLFDVLLKEMAQSYPELKRGKDLIIETLKNEEEKFSSLLDRGMKILNQDLKKIKNNIFPGEIAFKLYDTYGFPLDLTADILKNKNIKIDNDAFDKSMEKSKELARASWKGSGDKSLEEKWFKAREELKPTEFLGYELDKAEGVVLKISKGKDFIKEAKTGDDVEIVTN

SEQ ID NO: 191126 - protein, 255 aa, Unknown
  Bacterial polypetide isolated from the Sargasso Sea
NFWKKIAGFSDDRIIRIATSDNFWSMGETGPCGPCSEIFFDHGDHLHGGLPGTKDEDGDRFIEIWNLVFMQFEQVTKDKRINLPKPSVDTGMGLERIAALLQGTHDNYETDHFKKIINSASDIIKIKSDKSNLSSFRVIADHLRASSFLIAEGVLPSNEGRGYVLRRIMRRGMRHSHLLGAKDPVFSKLFDTLLNEMSGNYPELKRAESLIKETLKMEEEKFLVLLDRGIKILNDEISKIDKVLPGDIAFKLYET

SEQ ID NO: 191127 - protein, 306 aa, Unknown
  Bacterial polypetide isolated from the Sargasso Sea
ALLQGTHDNYQTDHFKKLIDSISETIKVKQDQNNISSFRVIADHLRASSFLIAEGVLPSNEGRGYVLRRIMRRGMRHSHLLGSKEPIFYNIFKTLMEEMKGNYSELQRAESLIKETLKMEEEKFLVLLDRGIKILNNEITKIDKVLPGEVAFKLYDTYGFPLDLTEDILKNKSLKIDNEKFHALMNESKELAKKNWKGSGDSAIDDIWFDIKDKLGSTEFLGYETNQAEGVVISLLKDNKEVEILNSGDEGMIITNQTPFYGESGGQIGDKGKIISGEFKFEVSDVQKKLGDLFVHYGNVKNGSVK

SEQ ID NO: 191128 - protein, 225 aa, Unknown
  Bacterial polypetide isolated from the Sargasso Sea
MSEIRGKFLDYFSRNKHQKVDSSNIVPNNDPTLMFTNSGMVQFKNVFTGIEKKSFKIATTSQKCIRAGGKHNDLENVGYTPRHHTFFEMLGNFSFGDYFKEKAIFYAWELLTKDFGIPKDRLSATVYSEDEEAFKLWKKIAGLPESKIVKISTTDNFWSMGETGPCGPCSEIFYDHGDKLKGGPPGSPDQDGDRFIEIWNLVFMQFEQISKNKRVDLPKPSVDTG

SEQ ID NO: 191129 - protein, 238 aa, Unknown
  Bacterial polypetide isolated from the Sargasso Sea
ATEFLGYETQEAFGKVLHIVCDGSQVNKAVKGQEVQLVFNQTPFFGESGGQVSDSGRLISDLGKGDICRVERKGNLYVHFTKITEGNIVTNAEVNLKVNKHLRQSTSRNHSATHLMHEALRFVLGNHVTQRGSLNDSKRLRFDFNHSKPVTRAELLSVEASVNYQIRQNSSVNTRIMTLSEAKAIGAKALFGEKYGEEVRVVSMGVREKAVEETQNDTFSVELCGGTHVKNTGDIGFF

SEQ ID NO: 191130 - protein, 317 aa, Unknown
  Bacterial polypetide isolated from the Sargasso Sea
FSEDEEAYKYWKKIAGLSDEKIIKISTSDNFWSMGETGPCGPCSEIFYDHGDKYAGGPPGSPNEEGDRFIEIWNLVFMQFEQITSSERINLPKPSIDTGMGLERISALLNKTNDNYSTDLFSPLITKSIDLLNDESHLNSPSHRVIADHLRSSSFLIADGVTPSNEGRGYVLRRIMRRGMRHAHTLGNKNPVFDKIFPTLLDIFKTAYPELIRAKDLIINTFINEETKFKETVEKGLKILEDEISLSSNKLDGKIAFKLYDTYGFPLDLTQDYLKSKSIEVDVESFNQMMKEQKERARKNWKGTGDPGDQKNWFKIT

SEQ ID NO: 191131 - protein, 308 aa, Unknown
  Bacterial polypetide isolated from the Sargasso Sea
LEKRNYKRATTSQKCVRAGGKHNDLENVGYTPRHHTFFEMLGNFSFGDYFKDVAIELAWNLITKEFQIPKEKISVSVYSEDIEAFNLWKKIAGLSESKIYKISTSDNFWSMGDLGPCGPCSEIFYDHGDHLKGGPPGSKDQDGDRFIEIWNLVFMQFEQVSKDKRINLPKPSVDTGMGLERISALLQGTHDNYLTDHFKILIETSSSLTKTKVTKENISSHRVIADHLRASSFLIAEGVLPANEGRGYVLRRIMRRGMRHSHTLGSKEPIFYKMIPTLIKEMSDSYPELKRAEPLITETLKNEEENFL

SEQ ID NO: 191132 - protein, 285 aa, Unknown
  Bacterial polypetide isolated from the Sargasso Sea
CKIISIISESKSVDKIKKDQEAIIILNQTPFYGESGGQVGDHGFFENDSFKFEVMNTLKIFGNYFLHKGKVISGECEIEDIIKASINTLNRDFIKYNHSSTHLLHAALRKILGKHVTQKGSLVNSEKLRFDFSHNNPIEKDQLMNIEEIVNDQIQKNGIVEIKIVDQKKAIEEGAMALFGEKYSDEVRVVTMGQENESFFSKELCGGTHVVKLGEISKFKITNQSSVASGIRRIEAVSNVAVDKYIKEIERNLLEKNKNQDNQIEDLKNKIKKINADYIFKNQSE

SEQ ID NO: 191133 - protein, 278 aa, Unknown
  Bacterial polypetide isolated from the Sargasso Sea
THLLHESLRRVLGDHVTQKGSLVEPSRLRFDFSHMKPIQNDEIDKIEKFVNNMVSKKSDVKTRLMTPDEAVEKGALALFGEKYGDEVRVLSMGDEDGKYFSTELCGGTHVKNTGDIGKFKIVSQSSIAAGIRRIEALRDKQLEDYLKNKEKLSALSSEKDNETVKDLSEQIIKLGGKPSLDQSDQKNLIKNLTKQLETLSVNSILNDESKNIIKDQDINGIKLRLQKVDDLPPKELRKLVDQGKKDLSEGIVVVFASKDDKVGIAVGVTESLTSKYDA

SEQ ID NO: 191134 - protein, 198 aa, Unknown
  Bacterial polypetide isolated from the Sargasso Sea
MNSSVVREKFFDFFKDKQHQIIPSASVINETDKHLMFTNAGMNQFRNIFTGDQNPKFSRVANSQKCLRVSGKHNDLEEVGIDTYHHTFFEMLGNWSFGDYFKKEIIGWSYELMTKVYGLRSEDLYVSVFEGSKEDKLDYDEESLNEWKKYFSVDKIINGNKKDNFWEMGDIGPCGTLSEIHIDLRSSSEKKKIKDQSL

SEQ ID NO: 191135 - protein, 221 aa, Unknown
  Bacterial polypetide isolated from the Sargasso Sea
RIDIAKNNDEIFFACNQTPFYAEAGGQIGDKGKFASNSSAGSILDCKKQGKVYLHRAIIEKGKINTGDVIKMSVEKEKRSAITIHHSSTHLVHAALREVLGDHVQQKGSLVDENKLRFDFSHSKPLTQKEISKIEEIVNKEALKNLEVKTELMKLDDALKSGAMALFGEKYDDDVRVLTMGENSYSVELCGGTHVNRTGDIGLFVITNQSSVASGIRRIEA

SEQ ID NO: 191136 - protein, 295 aa, Unknown
  Bacterial polypetide isolated from the Sargasso Sea
DFGLDKNRLYFTVFNEDEEALKLWKKVTGLSEDKIIKISTSDNFWSMGETGPCGPCSEIFYDHGDHLKGGLPGTKEQDGDRYIEIWNLVFMQFEQISKDKRINLPKPSVDTGMGLERIAALLQGTHDNYETDHFKKLINSISDAVKVKQDQKNISSFRVIADHLRASSFLIAEGVLPSNEGRGYVLRRIMRRGMRHSHLLGSKQPIFYNIFKTLMHEMSGNYPELVRAESLIKETLKTEEEKFLVLLERGMKILNDEISKIDKILPGEVAFKLYDTYGFPLDLTEDILKNKSLKI

SEQ ID NO: 191137 - protein, 296 aa, Unknown
  Bacterial polypetide isolated from the Sargasso Sea
QKGSYVDSSKLRFDFSHKKALSVSELSEVERLVNSQIRANYPIETEIKDFQKALEDGAVAFFEEKYSDEVRVLTMGSFSSELCGGTHALRTGDLGIFKITSQTSVGSGLRRIEAVCGENAEIFISDNQRKLSSISELVKSSTDRLEEKITDLVRMKGKLEKDIATLKKKLTGDGQDDLSNAIEVFGEVKVVSKFLQDSSMDILRDSCDRLKDKHSNIIVVLGTVEEDKVRLVAGVTRDLSEEISAVELINFVADQVGGKGGGRPDMAQAGGSKPEYLEPALGTVNEWVKSKLCDAK

SEQ ID NO: 191138 - protein, 175 aa, Unknown
  Bacterial polypetide isolated from the Sargasso Sea
MSQILLTDVRKKFLEYFKKNNHQIVDSSNLVPNNDPTLMFTNSGMVQFKNVFTGLEKRPYKTATTSQKCVRAGGKHNDLENVGYTPRHHTFFEMLGNFSFGDYFKEQAIHHAWNLLTKDFGLPKEKLSVTVFHEDDDAFILWKKITGLNENKIIKISTSDNFWSMGDTGPCGPCS

SEQ ID NO: 191139 - protein, 215 aa, Unknown
  Bacterial polypetide isolated from the Sargasso Sea
TRLMTPDEAVENGALALFGEKYGDEVRVLSMGDDDGKYFSTELCGGTHVRNTGDIGKLKIVSQSSIAAGVRRIEALRDKQLEDYLKNKEKLSALSSKKDDENIKDLSEQITKLGGKPNLDRSDQKNLIKNLTKQLETLSVNSILNNKSKNIIKDQDINGIKLRLQKVNDLPPKELRKLVDQGKKDLSEGIVVVFASKEDKVGMAVGITESLTSKY

SEQ ID NO: 191140 - protein, 323 aa, Unknown
  Bacterial polypetide isolated from the Sargasso Sea
ISDDVFPSNEGRGYVLRRILRRAIRHGYKIGADKPFMYKLVKTFVNAMGNAYPQLKNDEGRIKKLIKNEETQFLQTLDKGIQILDSTLAEGNKEIISGDLAFKLHDTFGFPFDLTADIAREKGIDIDEKGFKKNMESQQQMSKASSSFVSKIPTAEDLKETDFIGYKHMSSDSNVIAIWNKNEKVELANEPQEYFIALNQTSIYAESGGQVGDRGWFKSKNAEGSILDCKKSGKVFMHLIKLDKGSLKIDDKIEVNVNKEKREKTEAHHSATHLVHAALKRVLGDHVKQKGSLVDEHKLRFDFSHDESLSDEEISKIEDLVNQ

SEQ ID NO: 191141 - protein, 145 aa, Unknown
  Bacterial polypetide isolated from the Sargasso Sea
MADKSLNQIRNTFLKYFEKNGHKIVESSNLVPNNDPTLMFANSGMVQFKNVFTGLEKRNYQRATTSQKCVRAGGKHNDLENVGYTPRHHTFFEMLGNFSFGDYFKERAIELAWNLITKDFGLDKNRLYFTVFNEDDEAFALWKKI

SEQ ID NO: 191142 - protein, 119 aa, Unknown
  Bacterial polypetide isolated from the Sargasso Sea
MASKTLNEIRSLFLDYFEKNDHKIVDSSNLVPNNDPTLMFANSGMVQFKNVFTGLEKRDYQRATTSQKCVRAGGKHNDLENVGYTPRHHTFFEMLGNFSFGDYFKERAIELALNLITKD

SEQ ID NO: 191143 - protein, 226 aa, Unknown
  Bacterial polypetide isolated from the Sargasso Sea
GETGPCGPCSEIFYDHGDHLKGGLPGTKDQDGDRFIEIWNLVFMQYEQVSKDKRIDLPKPSVDTGMGLERIAALLQGTHDNYQTDHFKKLISSISEVTKVKQEDKNISSFRVIADHLRASSFLLAEGVLPSNEGRGYVLRRIMRRGMRHSHLLGSKEPIFYKIFDSLKKEMSGNYPELERSQSLIKETLRMEEEKFLVLLDRGIKILNDEITKIDKVLPGDVAFKL

SEQ ID NO: 191144 - protein, 289 aa, Unknown
  Bacterial polypetide isolated from the Sargasso Sea
ILKTPGKDLVNQDHPQVVELWNLVFMEFNRNSDGSLTSLNKKHVDTGMGLERLAMVLQNKTSNYDTDLFKPLIENLEQISQKKYIPNSKNKKQEILNIAFRVIVDHLRAVSFSITDGQLPSNTGAGYVIRRILRRAIRYGYQFLDFREPFIYLLVPKLANNFSEVFNELKKNQDFISKIIQEEETSFFRTLSGGIKRMEDIVNNQSKIKNQKISGKLAFELYDRYGFPLDLTQLIASENNLGIDIEEFNKSLANQQKRSKIDAVKDYGDWITIKEDDVQEFIGYDHIEA

SEQ ID NO: 191145 - protein, 330 aa, Unknown
  Bacterial polypetide isolated from the Sargasso Sea
GTLKVNQTVNLEIDVNRRNNTRAYHSATHLLHEALRRTLGKHVTQKGSLVSSEKLRFDFSHNKPIEKKEIDKIENYVNEMVKTAADVKTRIMTPKEAVSKGALAMFGEKYGEEVRVLSMGKENGGYFSTELCGGTHVKNTKDIGKFKIINQSSIAAGVRRVEALREKQLEEYEKSLKKDKSAREKNLKDQIDLIKRELIKYKKKPDYNEDLELSENIKNLNKQLDKIKIQNIVKDKNKNIIKDKKIGSFTLRHQVLTDFPPKELRNIIDQSKKDIKKGIVVGFSTFEGKVGVAVGITNELTKKYNAVSLVKIVSEVIGGKGGGGRNDFAQ

SEQ ID NO: 191146 - protein, 245 aa, Unknown
  Bacterial polypetide isolated from the Sargasso Sea
VDKIKKDQEAIIILNQTPFYGESGGQVGDHGFFENDNFKFEVMNTTKIFGNYFLHKGKVISGECKIGDTIKASINTVNRDFIKYNHSSTHLLHAALRKILGKHVTQKGSLVNSEKLRFDFSHNNPIEKDQLINVEKIVNDQIQKNGIVEIKIVDQKKAIEEGAMALFGEKYSDEVRVVTMGQENESFFSKELCGGTHVVKLGEITKFKITNQSSVASGIRRIEAVSNVAVDKYIKEIERNLLEKN

SEQ ID NO: 191147 - protein, 159 aa, Unknown
  Bacterial polypetide isolated from the Sargasso Sea
MNSNHVRNAFIDYFKNNDHKHVKSGSLVPENDPSLMFANSGMVQFKNVFTGMEEKDFKRATTSQKCVRAGGKHNDLENVGFTTRHHTFFEMLGNFSFGDYFKEEAILYAWNLITKEFKINENKLLVTIYHDDEVAEKFWKKIGNLPDKKIIKISSSDNF

SEQ ID NO: 191148 - protein, 181 aa, Unknown
  Bacterial polypetide isolated from the Sargasso Sea
MKTAEIRKAFLEYFKANDHMIVESSSLVPGNDETLLFTNAGMVQFKDIFLGQEQPKSLRATSSQRCIRAGGKHNDLENVGYTLRHHTFFEMLGNFSFGDYFKTEAIEMAWDFLTNHLNLERDKLWISVYQDDEEAAQIWLEKIGISKERLVFLGEEDNFWSMGDTGPCGPCSEIYYDHGEK

SEQ ID NO: 191149 - protein, 292 aa, Unknown
  Bacterial polypetide isolated from the Sargasso Sea
MVQFKNVFTGTESRPYKRATTSQKCVRAGGKHNDLENVGYTARHHTFFEMLGNFSFGDYFKDVAIELAWKLLTKEYDLPAERLLVTVYSDDDEAADLWKRIANLPEEKIIRISTQDNFWQMGDTGPCGPCSEIFFDHGENVPGGPPGSPNEDGDRFIEIWNLVFMQFEQHSPGNRVALPRPSIDTGMGLERIAAVLQGKHDNYDIDLMRSLIEASAEETNTQADGENSVSHRVIADHLRACSFLIADGVLPSNEGRGYVLRRIMRRAMRHAHLLGSDDPLMHRLVPTLVSAM

SEQ ID NO: 191150 - protein, 257 aa, Unknown
  Bacterial polypetide isolated from the Sargasso Sea
RHHTFFEMLGNFSFGDYFKEKAIFYAWELLTKDLGIPKEKLSVTVYSEDEEAFKLWKKVAGLPESKIIKISTADNFWSMGETGPCGPCSEIFYDHGDKLKGGPPGSTDQDGDRFIEIWNLVFMQFEQISKEKRVDLPKPSVDTGMGLERITAVLQGTHDNYSIDHFKKLMNASSEITKTKIDNINIASHRVIADHLRASSFLIAEGVLPSNEGRGYVLRRIMRRGMRHAHTLGCKNPVFFKLFDVLLEEMSQSYPEL

SEQ ID NO: 191151 - protein, 82 aa, Unknown
  Bacterial polypetide isolated from the Sargasso Sea
MKANEIRKRFLNYFEDHNHEIVKSSSLIPANDETLLFTNAGMVQFKDIFLGQEQSKFARATSSQCCIRAGGKHNDLENVGYT

SEQ ID NO: 191152 - protein, 248 aa, Unknown
  Bacterial polypetide isolated from the Sargasso Sea
GTITSGDSEFEVTDVQKKIGNLFVHFGKVSKGTIKLKDNVELKINSERRQNIRAYHSATHLLHESLRRTLGTHVMQKGSLVAPDRLRFDFSHMKPITDEEMKKIDENVNKFVNSKTEVVTRLMTPEEGIEQGAMALFGEKYGDEVRVVFMGEEGNKYFSTELCGGTHVKNTGEVGKFKVVSQSSIAAGVRRVEALRDKQLEEYLKSKDKMSSLSSQKNEETIKSLSSEITKLGGKPIKKSDDLKITIK

SEQ ID NO: 191153 - protein, 186 aa, Unknown
  Bacterial polypetide isolated from the Sargasso Sea
MDSSNLIRKKFLDYFKKHNHKVSDSSSLIPNNDPTLLFTNAGMVQFKNIFTGAEKINSKRIVTSQKCVRAGGKHNDLDNVGYTPRHHTFFEMLGNFSFGDYFKEEAIYYAWDLLKNGFDIDLDKLIVTVFSEDSESFDIWKKISNFHDKRIIKVKSNDNFWSMGNIGPCGPCTEIFYDYGKNLNGS

SEQ ID NO: 191154 - protein, 90 aa, Unknown
  Bacterial polypetide isolated from the Sargasso Sea
MNSNHVRNAFIDYFKNNDHKHVKSGSLVPENDPSLMFANSGMVQFKNVFTGMEEKDFKRATTSQKCVRAGGKHNDLENVGFTTRHHTFFE

SEQ ID NO: 191155 - protein, 316 aa, Unknown
  Bacterial polypetide isolated from the Sargasso Sea
MKIDIERRNNLKAYHSATHLLHESLRRTLGKHVMQKGSLVAPDRLRFDFSHMKPITEDELTIIDKLVNEYVQNKTDVTTRIMTPKAAIEKGALAFFGEKYGEEVRVVSMGAENNSYFSTELCGGTHVKNTGDIGKFKTISQSSIAAGVRRVEALRDKQLEIFLKNKEKMSNLSAQKDEDNIKDVSAQIIKLGGKPNLENKDTKGLIKDLNKQLEQLNIQSVLGDKTKNIIKDESINGTKIRLQKVQDLSPKDLRKLVDAGKKELREGIVVVFANKDEKVGLAVGVTENLTNKYDAVKFAKLGSENIGGKGGGGRKD

SEQ ID NO: 191156 - protein, 262 aa, Unknown
  Bacterial polypetide isolated from the Sargasso Sea
LGPSEFLGYETDRAEGKILSLLKNNKEVKSLSDNDEGMIITNQTPFYGESGGQVGDTGEITSAEFKFEVQDVQKQLGDLFVHYGKVIKGSIKVNDNVEMKIDVNRRNDVRAYHSATHLLHESLRRVLGTHVTQKGSLVEPDRLRFDFSHMKPISTDEIKKIENFVNSMVEKKSEVKTRIMTPKEAVDNGALALFGEKYGDEVRVLSMGNEKERYFSTELCGGTHVRNTGDIGKFKIVSQSSIAAGVRRVEALREKQLQEYLK

SEQ ID NO: 191157 - protein, 311 aa, Unknown
  Bacterial polypetide isolated from the Sargasso Sea
MRRSATKANHSATHLLHEALRIKLGHHVAQRGSLNAADRLRFDFSHSKALTKGELLEVERSVNFYIRQNTEVTTRVMSPDDARELGATALFGEKYGEEVRVVSMGYNQGSGKGIDGNGYSLELCGGTHVKRTGDIGAFVILSDGASSSGVRRIEALTGEAAMDHLAKQQNYLSDIAIELKSGSSDILSRVKSLIAERKSLVSEVAQLRKDMALGGSSSGQDELKSEDLSGVNFLAKQLNGIPGKELPGLIDGYKQKLSSGVILLISENDGKVAVASGVTKDLLSNISAVDIVKTAANKLGGKGGGGRPDLA

SEQ ID NO: 191158 - protein, 99 aa, Unknown
  Bacterial polypetide isolated from the Sargasso Sea
MSEKTLKNVRKSFLNYFSNKDHQIVDSSNLVPSNDPTLMFTNSGMVQFKNVFTGLEKRNYKRAVTSQKCVRAGGKHNDLENVGYTPRHHTFFEMLGNFS

SEQ ID NO: 191159 - protein, 318 aa, Unknown
  Bacterial polypetide isolated from the Sargasso Sea
MVKKSKAKINTETRTNTTIHHSATHLLHAALRYELGKGVGQKGSYVGSNRMRFDFSYPEAISDSQLRKIEMLVNSKIRENLKVETKIMDTSDAINSGAIAFFDEKYGNKVRVLSMGDFSIELCGGTHVSQTGELGYFKILSESSIGSGTRRIEALCGIEAERHVSRTEKLVKTIMSTLETSEVSILDKLSSLIEEKSNLESEVKKFKKSSLDDIVNDVYERAEEINNVKLVFAQLDNVEPKELRRLVDNLKNRPTSHGIIVILASALGKKLRLVVGISKKLSSNISAVELIKQMVKEESGKGGGRPDLAQAGGEFSSK

SEQ ID NO: 191160 - protein, 312 aa, Unknown
  Bacterial polypetide isolated from the Sargasso Sea
DYKRAVTSQKCVRAGGKHNDLENVGYTPRHHTFFEMLGNFSFGDYFKDVAIELAWNLITKEFQISKDKLSVSVYAEDKEAHDLWKKIAGLPESRIYKIATNDNFWSMGDLGPCGPCSEIFYDHGDHLQGGPPGSKNQDGDRFIEIWNLVFMQFEQVSKDKRINLPRPSVDTGMGLERISALLQGTHDNYEIDHFKTLIESSSSLTKTKVTKENIASHRVIADHLRASSFLIAEGVLPSNEGRGYVLRRIMRRGMRHSHTLGSKEAIFYRMVPTLIKEMSDSYPELKRAEPLITETLKTEEEKFSSLLDRGIE

SEQ ID NO: 191161 - protein, 245 aa, Unknown
  Bacterial polypetide isolated from the Sargasso Sea
MAKTLNEIRSTFLDYFEKNDHKIVESSNLVPNNDPTLMFANSGMVQFKNVFTGLEKRDYQRATTSQKCVRAGGKHNDLENVGYTPRHHTFFEMLGNFSFGDYFKERGIELAWNLITKDFGLNKDRLYVTVFHEDDEAFNFWKKIAGFSDDRIIRIATSDNFWSMGETGPCGPCSEIFYDHGDHLKGGLPGTKDEDGDRYIEIWNLVFMQFEQVSKDKRINLPKPSVDTGMGLERIAALLQGTHDN

SEQ ID NO: 191162 - protein, 270 aa, Unknown
  Bacterial polypetide isolated from the Sargasso Sea
VRQVEDTIKASINTVNINFIKYNHSSTHLLHAALRKILGKHVTQKGSLVNSEKLRFDFSHNNPIEKDQLINIEAIVNDQIQKNGIVETKIVDQKKAIEEGAMALFGEKYSDEVRVITMGQENELFFSKELCGGTHVVKLGEISKFKITNQSSVASGIRRIEAVSNVAVDKYIKEIERNLLEKNKIQDNQIKDLKNKIKKINSDYNFKNQSEEKGLLIKELIQIHEKLKQNISISKNIDNIVVKKIKELNFIYLIAEDYPNKSLKTFIDEQ

SEQ ID NO: 191163 - protein, 276 aa, Unknown
  Bacterial polypetide isolated from the Sargasso Sea
SQKCIRTIDIDIIGETDRHLSFFEMLGNFSVGEYFKEDAIKYSYEYITEVLKVDKDKLWFTVYKDDDEAYNIWKNVIGVPEKRIQRGNEDNFWHMNIPGPCGPCSEIFIDRGSKYGEDGGPIGGGEDRFIEIWNLVFMESIQDQPFQVIDELPKKNIDTGMGLERIAMIMQDKDNLFDTDLFKPLHDALLTKITVNDNKYEKIIIDHIKSSTFMISDGVVPTNEGRGYVLRRLIRRAIRAYNQLNASNTSLTFLIEIVIDMYSSSYPELQDNKDKI

SEQ ID NO: 191164 - protein, 268 aa, Unknown
  Bacterial polypetide isolated from the Sargasso Sea
MKKHLSLWKKISGLNENRIIKISTSDNFWSMGETGPCGPCSEIFFDHGDHLQGGLPGTKDQDGDRYIEIWNLVFMQFEQISKDKRIDLPKPSVDTGMGLERIAALLQGTHDNYETDHFQKIIGSISEAVKVKPNKENFASFRVIADHLRACSFLIAEGVLPSNEGRGYVLRRIMRRGMRHSHLLGSKEPIFFNIFKTLMEEMKGNYSELSQAEALIKETLKMEEEKFLVLLDRGIKILNDEITKINKTLPGEVAFKLYDTYGFPLDLT

SEQ ID NO: 191165 - protein, 293 aa, Unknown
  Bacterial polypetide isolated from the Sargasso Sea
MLLIADGVLPSNEGRGYVLRRIMRRAMRHVHILNYNDLLMHKLAPTLISNMKMSYPELERAESLINETLKYEEQRFRDLLSRGIKQLDTMLDNLNGKTTLNGQSAFKLYDTYGFPIDLTQDILRNKKIEVDIDDFRKCLEDQKEKARSNWTGSGGIATDKIWLELNKSLSPTEFLGYTSEKTEGSIISIIKDGALVDSLHSGDNGSLILNQTVFYAESGGQIGDTGTIQADNFKFDVSDTQREGGLFVHYGKVIKGDINTGTGVHLSINSTRRRSCKTYHSATHILHQALREV

SEQ ID NO: 191166 - protein, 310 aa, Unknown
  Bacterial polypetide isolated from the Sargasso Sea
NEMSGNYPELVRAESLIKETLKMEEEKFLVLLDRGIKILNDEISKIDKVLPGEVAFKLYDTYGFPLDLTEDILRNKSMSIDTEKFQSLMKESRELAKKNWKGSGDAAVEDIWFGIKDKLEATEFLGYETNQAEGIVLSLLKDNKEVDQLKENDEGMIIVNQTPFYGESGGQVGDTGEIVSNDFKFEVTDVQKKLGDLFVHYGKVKSGSIKLQESVELKINVERRDNTRAYHSATHLLHESLRRVLGTHVTQKGSLVEPSRLRFDFSHMKPILNEEINKIEEFVNKMVSKKSEVKTRLMTPDEAVENGALA

SEQ ID NO: 191167 - protein, 153 aa, Unknown
  Bacterial polypetide isolated from the Sargasso Sea
MAKTLNEIRSAFLDYFEKNDHKILESSNLVPNNDPTLMFANSGMVQFKNVFTGLEKRDYQRATTSQKCVRAGGKHNDLENVGYTPRHHTFFEMLGNFSFGDYFKERAIELAWNLITKEFGLDKNRLYVTVYHDDDEAFNYWKKIAGLSEDKII

SEQ ID NO: 191168 - protein, 253 aa, Unknown
  Bacterial polypetide isolated from the Sargasso Sea
IFFDHGDHLKGGLPGTKDQDGDRYIEIWNLVFMQFEQISKDKRINLPKPSVDTGMGLERITALLQGTHDNYKTDHFIKLINSIGEAVKIKPNEKNISSFRVIADHLRASSFLIAEGVLPSNEGRGYVLRRIMRRGMRHSHLLGSKQPIFFNIFKTLMNEMSDNYPELKRAESLVRETLKTEEEKFLVLLERGMKILNDEINKVDKVLPGEVAFKLYDTYGFPLDLTEDILKNKSLSVDHKKFKSLMNESRELA

SEQ ID NO: 191169 - protein, 265 aa, Unknown
  Bacterial polypetide isolated from the Sargasso Sea
KDFKLPKEKLSVTVFHKDEESFKLWKKIAGLSDDKIIKIATADNFWSMGDTGPCGPCSEIFYDHGDKLKGGPPGSPDEDGDRFIEIWNLVFMQYEQISKEKRIDLPKPSVDTGMGLERMTAVLQGTHDNYKIDHFQKIMAASSDITKTPIDSKTIASHRVIADHLRASSFLIAEGILPSNEGRGYVLRRIMRRGMRHAHSLGSKNPIFYKLFEVLLNEMQNSYPELTNGRELIVETLKNEEEKFSSLLVRGMKILDENLNKVQNK

SEQ ID NO: 191170 - protein, 298 aa, Unknown
  Bacterial polypetide isolated from the Sargasso Sea
NQTPFYGESGGQVGDKGTITSGENEFEVIDVQKKIGNLFVHFGKVSKGTIKLKDNVELKINKERRQNIRAYHSATHLLHESLRRTLGKHVMQKGSLVAPDRLRFDFSHMKPITDEEMKKIDENVNKFVNSKTEVVTRLMTPEEGIEQGAMALFGEKYGDEVRVVFMGEEGNKYFSTELCGGTHVKNTSEVGKFKVVSQSSIAAGVRRVEALRDKQLEEYLKSKDKMSSLSSQKNEETIKSLSNEITKLGGKPIKKSDDLKITIKELTKQLEEITVKSILSDKKKNIVKDENIKKINIR

SEQ ID NO: 191171 - protein, 280 aa, Unknown
  Bacterial polypetide isolated from the Sargasso Sea
ENKFEVTDVQKKIGNLFVHFGKVSKGTIKLKDNVELKINSERRQNIRAYHSATHLLHESLRRTLGTHVMQKGSLVAPDRLRFDFSHMKPITDEEMKKIDENVNKFVNSKTEVVTRLMTPEEGIEQGAMALFGEKYGDEVRVVFMGEEDNKYFSTELCGGTHVKNTGEVGKFKVISQSSIAAGVRRVEALRDKQLEEYLKSKDKISTLSFQKNEETIKSLSIEITKLGGKPIKKSEDLKITIKELSKQLEEITVKSILSDKKKNIVKDENIKKINIRFQTN

SEQ ID NO: 191172 - protein, 278 aa, Unknown
  Bacterial polypetide isolated from the Sargasso Sea
DCKIKINDTQKKMGDLFVHYGKIENGSISVGQNINLEIDKIKRKNSKANHSATHLLHESLRRTLGKHVMQKGSLVSPERLRFDFSHSKPIENQEIVKINKIVNDIIEGSSDVQTRIMTPKEAVSMGALALFGEKYGEEVRVVFMGKENNGFFSTELCGGTHVKNTKEVGKFKIVSQSSIASGVRRVEALRDKQLEQYERTQKQKKSLKETNLKEEIELVKNELQNFKIKPDYKDNVDLSENLKNLNKQLNRIKIENIKKDKNKNIIKDKKVGSIVIRE

SEQ ID NO: 191173 - protein, 117 aa, Unknown
  Bacterial polypetide isolated from the Sargasso Sea
MLVQSTQALRKAFIDYFKSKQHAFVPSASLIPVDDDTLLFTNAGMVPFKQYFLGQSKPPFSAACSVQRCLRVGGKHNDLDNVGYTSRHHTLFEMLGNFSFGAYGKREAIAYAMDFLV

SEQ ID NO: 191174 - protein, 299 aa, Unknown
  Bacterial polypetide isolated from the Sargasso Sea
KRATTSQKCVRAGGKHNDLENVGYTPRHHTFFEMLGNFSFGDYFKEKAIHLAWNLITKDFGLDKNRLYFTVFSEDDEAFNLWKKITGFGDDRIIKIPTSDNFWSMGETGPCGPCSEIFYDHGDHLKGGLPGTKDQDGDRYIEIWNLVFMQYEQVSKDKRIDLPKPSVDTGMGLERIAALLQGTHDNYETDHFKKIIGSISEELKVKPDKNNLSSFRVIADHLRASSFLLAEGVLPSNEGRGYVLRRIMRRGMRHSHLLGSTKPVFFNVFKTLMDEMSGNYPELKRASSLIQETLRMEEE

SEQ ID NO: 191175 - protein, 275 aa, Unknown
  Bacterial polypetide isolated from the Sargasso Sea
PFLVSMGEAAIALMQGAYPQLQARRDVILAELQREEARFLETLERGEKLLADVLAAGPNQISGEQAFELYDTYGFPLELTEEIAEEQGLSVDLAGFEAAMEAQRQRAKAAAVSIDLTLQGAIEQMAAQLDATVFQGYEALEQPSCVVALVVNGEPAQQAAAGDAVQVVLDATPFYGEGGGQVGDRGSLCGDGLIVAIEAVNRQRDVFVHAGTVERGRLVVGDVVTAQVDRACRRRAQAHHTATHLLQAALKQVVDEGISQAGSLVDFDRLRFDFH

SEQ ID NO: 191176 - protein, 293 aa, Unknown
  Bacterial polypetide isolated from the Sargasso Sea
ISAVMQGTNDNYEIDLFKKLIDHSIEITKKNNKELISSHRVIADHLRSSSFLIADGVLPSNEGRGYVLRRIMRRAMRHIQLLGYNDTMLSDLFTTLSNEMSSAYPELRRAENLIRETLIYEETKFKDLLLRGMKQLEEELKPHQDGQIFPGSKAFKLYDTYGFPLDLTQDILRSKNIEVDIKGFDQSLEDQKNRARSSWTGSGDKSTEKIWFNLSNKLNKTEFIGYENNVSQAEVLSIISNGAEVDQISKDQQGCMILNQSVFYAESGGQIGDIGYIRCGEKHFKVTDTQKKE

SEQ ID NO: 191177 - protein, 333 aa, Unknown
  Bacterial polypetide isolated from the Sargasso Sea
MVASSDITKTPIDNSTIASHRVIADHLRASSFLIAEGILPSNEGRGYVLRRIMRRGMRHAHSLGSKDPVFYKLFEVLLNEMKNSYPELINGKELVVETLKNEEEKFSSLLERGMKILNENLIKVQNKTLPGSVAFKLYDTYGFPVDLTADILRGKNIQVDNNGFEKEMEKSKALARANWKGSGDKSVEERWFKIREEINPTEFLGYEFDKAEGVIIKISKNGKFVNSANEGDEIEVITNQTPFYGESGGQVGDQGYILSSDCKIKVNDTQKKMGDLFVHYGTIEKGSLSVGQNVNLEIDILKRNNSRANHSATHLLHESLRRTLGKHVTQKDH

SEQ ID NO: 191178 - protein, 109 aa, Unknown
  Bacterial polypetide isolated from the Sargasso Sea
MAKTLNEIRETFLKYFEKNGHRIVESSNLVPNNDPTLMFANSGMVQFKNVFTGLEKRDYQTATTSQKCVRAGGKHNDLENVGYTPRHHTFFEMLGNFSFGDYFKERAIE

SEQ ID NO: 191179 - protein, 293 aa, Unknown
  Bacterial polypetide isolated from the Sargasso Sea
MLGNFSFGDYFKEDAIKFAWEFLTEVLKLDKDKLWITVYKDDDEAEEIWKEIIGVDPKRIARLGDEDNFWSMGDTGPCGPCSEIFYDHGDHIDGTPPGAEGDEGDRYIEIWNLVFMQYNRDDDGKMEPLPKPSVDTGMGLERIAAVMQGVNSNYETDTFKDLITASENLLGNKKSTSHKVIADHIRSTVSLISDGVIPENEGRGYVLRRIMRRGIRHGYKIGAKKPFMFSLVKDMVRVMSSAFPDLKDKESDIAELVKTEEIKFFETLEKGIEILEEEISNMSEDIISGDVVF

SEQ ID NO: 191180 - protein, 244 aa, Unknown
  Bacterial polypetide isolated from the Sargasso Sea
GEFKFEVHDVQKQLGDLFVHYGKVIKGTIKVNDNVEMKIDVNRRNDVRAYHSATHLLHESLRRVLGTHVTQKGSLVEPNRLRFDFSHMKPISNEEIKKIETYVNSMVDKKSEVKTRLMTPKEAVDNGALALFGEKYGDEVRVLSMGNEKERYFSTELCGGTHVRNTGDIGKFKIVSQSSIAAGVRRVEALRDKQLQEYLNKKEKLSDLENEKIEETIKDLSQKIIKLGGKPNITDDNHQTLIKD

SEQ ID NO: 191181 - protein, 102 aa, Unknown
  Bacterial polypetide isolated from the Sargasso Sea
MADKTLNEIRSTFLKYFEKNGHKIVESSNLVPNNDPTLMFANSGMVQFKNVFTGLEKRDYKTATTSQKCVRAGGKHNDLENVGYTPRHHTFFEMLGNFSFGD

SEQ ID NO: 191182 - protein, 292 aa, Unknown
  Bacterial polypetide isolated from the Sargasso Sea
MRSLIEASAHASNTDPDGSAKVSHRVIADHLRASSFLIADGVLPSNEGRGYVVRRIMRRAMRHAHLLGCVEPLMWRLVPALTKQMGEAFPELKRAESLIVETLKLEETRFKETLARGLRQLEDATNKLSDTENLPGEIAFKLYDTFGFPLDLTQDILRGQGRKVDLLGFDQAMAEQKAAARAAWSGSGELATESLWLEIRDQISATEFLGYSTEFAEGEIVGLIINGESVKTTDGFPTDQEVTIICNQTPFYAESGGQVGDTGYLKIGAEASFRVKDVQRRVGDLFTLYWCY

SEQ ID NO: 191183 - protein, 254 aa, Unknown
  Bacterial polypetide isolated from the Sargasso Sea
MGGKHNDLENVGYTPRHHTFFEMLGNFSFGDYFKEQAIFYAWELITKDFGLSKDKLCVTVYSEDQEAFDLWKKIAGLEYCKIIKIATSDNFWSMGDTGPCGPCSEIFYDHGDHLFGGPPGSKDEDGDRFIEIWNLVFMQYEQVSKEKRINLPKPSVDTGMGLERMAAVLQGTHDNYEIDLFKELVNLSAEITNTKVSNETIASHRVISDHLRASCFLIADGLMPSNEGRGYVLRRIMRRAMRHANTLGSKNFVL

SEQ ID NO: 191184 - protein, 283 aa, Unknown
  Bacterial polypetide isolated from the Sargasso Sea
MKSAKIRSKFINFFEENDHQNIHSSSLVPQNDPTLMFANSGMVQFKNVFTGKEKRDYKRAVTAQKCVRAGGKHNDLENVGYTARHHTFFEMLGNFSFGDYFKDKAIELSWKLLTEEFGLEKNRLLVTVFSEDDEAFNLWKKIAGLSEDKIIKISTSDNFWSMGETGPCGPCSEIFFDHGDKYIGGQPGSKNEEGDRFIEIWNLVFMQYEQISKDIRENLPKPSIDTGMGLERITALLQGTNDNYSSDIFQPLINQSIKLCNDESTINSPSHKVIADHLRSASF

SEQ ID NO: 191185 - protein, 296 aa, Unknown
  Bacterial polypetide isolated from the Sargasso Sea
SLKIDNKKFETLMNESRELAKKNWKGSGDSSVNKIWFEIKDRLGPSEFLGYETDHAEGKILSLLKDNKEVKNLSSSDEGMIITNQTPFYGESGGQVGDTGEITSGEFKFEVSDVQKQLGDLFVHYGKVIKGSIKLNDNVEMKIDVNRRNDVRAYHSATHLLHESLRRVLGTHVTQKGSLVEPDRLRFDFSHMKPISNEEIKKIENFVNSMVEKKSEVKTRIMTPKEAVDNGALALFGEKYGDEVRVLSMGNEKERYFSTELCGGTHVRNTGDIGKFKIISQSSIAAGVRRVEALRE

SEQ ID NO: 191186 - protein, 286 aa, Unknown
  Bacterial polypetide isolated from the Sargasso Sea
LYSNNRLENGTLEELPSKHVDTGAGLERIAAVLQGKNSNYDTDLFVPIIDSLEKLSNSSYQSNPIPFRVIGDHIRMLCFSIADGALPSNDGRGYVLRRILRRAARFGRRIGLVEPFLFQLVDKVSSIMGDVFPEIKDKKTHIEKVLLSEEKSFNITLDRGLNHFEKITSAIDDSVINGSDAFKLYDTYGFPLDLTQLMAKEKGLKVDIEGFNKSMSIQKKQAKEAGKFTQISSNILWNKISQGEDSTFVGYDTLDCTSKIHSYATIDDNMLVILDRNAFYAESGGQ

SEQ ID NO: 191187 - protein, 162 aa, Unknown
  Bacterial polypetide isolated from the Sargasso Sea
MAEKTLKNVRKSFLNYFSKNNHQIVDSSNLVPSNDPTLMFTNSGMVQFKNVFTGLEKRDYKRAVTSQKCVRAGGKHNDLENVGYTPRHHTFFEMLGNFSFGDYFKDVAIELAWNLITKEFQISKDKLCVSVYAEDKEAFDLWKKIAGLPENRIFKIATNDNF

SEQ ID NO: 191188 - protein, 284 aa, Unknown
  Bacterial polypetide isolated from the Sargasso Sea
KEPVFYNLFDTLKNEMSGNYPELVRAESLIKETLKMEEEKFLVLLDRGIKILNDEISKIDKVLPGEVAFKLYDTYGFPLDLTEDILRNKSMSIDTEKFQSLMKESRELAKKNWKGSGDAAVEDIWFGIKDKLEATEFLGYETNQAEGVVLSLLKDNKEVDQLKENDEGMIIVNQTPFYGESGGQVGDTGEIVSNDFKFEVTDVQKKLGDLFVHYGKVKSGSIKPQESVELKIDVERRDNTRAYHSATHLLHESLRRVLGTHVTQKGSLVEPSRLRFDFSHMKPI

SEQ ID NO: 191189 - protein, 150 aa, Unknown
  Bacterial polypetide isolated from the Sargasso Sea
MINQKNSVNEIRKTFINYFKTNNHQVISSSNLVPENDPTLLFTNAGMVQFKNIFTGLEHREYNKAVSSQKCLRAGGKHNDLENVGRTARHHTFFEMLGNFSFGDYFKEKAIHQAWELLTKEYEIPKEKLLVTIYHNDKEAEELWKKISGF

SEQ ID NO: 191190 - protein, 120 aa, Unknown
  Bacterial polypetide isolated from the Sargasso Sea
MSGNYPELIRAESLIKETLKMEEEKFLVLLERGIKILNDEISKIDKVLPGEVAFKLYDTYGFPLDLTEDILRNKSMSIDIDNFKSLMKESRELAKKNWKGSGDAAVEDIWFGIKDKLEAT

SEQ ID NO: 191191 - protein, 267 aa, Unknown
  Bacterial polypetide isolated from the Sargasso Sea
MRRAMRHVHLLQYKDTLMHQLVPTLMLNMNDAYPELLRAEVLIKETLKYEEEKFKNLLEKGIMQLDTMSQNLGSNDIFPGESAFKLYDTYGFPIDLTQDILKSKNISIDIESFNNKLEAQKELARKNWSGAGGAATDRIWFELNNELSMTEFLGYNGTETQGEVLSIIKNDQRVNKLEDGEKGVLILNQTVFYAESGGQIGDTGIIKGENFEFQVEDTQKRGQVIIHSGVMVSGTIEIGLNASLSVNQKQRNDCRAYHSATHIYINL

SEQ ID NO: 191192 - protein, 318 aa, Unknown
  Bacterial polypetide isolated from the Sargasso Sea
KKEIICRANHSATHLLHESLRRTLGKHVTQKGSLVSPDRLRFDFSHNKPIDKKEMVEINNIVNDIINGSSDIQTRIMTPKEAVSMGALAFFGEKYGDEVRVVFMGKENNGFFSTELCGGTHVKNTKDVGKFKVISQSSIASGIRRVEALRDKKLKDYENSLQKDKSVKQKILKDQIDVIRSELSKLEVKIDYKDNLELPENLKNLTKQLERIKIQNVIKDKRKNVIKDNNLGSFIFRQQVLTDFPPKELRSIIDQGKKDIKKGIIVSISTFEGKVGVAVGITKELTKKYDAVELVKTASEILGGKGGGGRKDFAQAGG

SEQ ID NO: 191193 - protein, 178 aa, Unknown
  Bacterial polypetide isolated from the Sargasso Sea
MADKTLNEIRNTFLKYFEKNDHKIVESSNLVPNNDPTLMFANSGMVQFKNVFTGLEKRDYVRATTSQKCVRAGGKHNDLENVGYTPRHHTFFEMLGNFSFGDYFKEQAIHYAWDLITKDFGIDKNRLYVTVFHEDDEAFNFWKKIAGFSDDRIIRIATSDNFWSMGETGPCGPCSEIF

SEQ ID NO: 191194 - protein, 293 aa, Unknown
  Bacterial polypetide isolated from the Sargasso Sea
RQDVILSELQREEARFLETLERGEKLLADLLAAEPAQISGEQAFELYDTYGFPLELTQEIAEEHGLSVDLSGFELAMDAQRQRAKAAAVSIDLTLQDAIDQVVSDLEVTTFDGYQSLESSSIIQALVANGEPVTQASAGDAVQVVLEATPFYGEGGGQVGDPGVLTGRDVIVTIESVSRHRDVFVHTGRIERGQLAIGDRITAQVDRSCRRRAEAHHTATHLLQAALKQVVDPGIGQAGSLVDVQRLRFDFHCPRAVTPEELERVEILINDWITEAHHLEVAEMEIEKAKAAG

SEQ ID NO: 191195 - protein, 234 aa, Unknown
  Bacterial polypetide isolated from the Sargasso Sea
MISGFSIKDRLGPSEFLGYETDQAEGIILSLLKDNKEVNVLNENDEGIIILNQTPFYGESGGQVGDTGEIISADFKFEITDVQKKLGDLFVHYGKVKSGSIKIKDNVEMKIDIDRRNNIRAYHSATHLLHESLRRVLGTHVTQKGSLVAPDRLRFDFSHMKPISDQEIEKIENHVNSMVQKKSEVKTRIMTPKEAVNNGALALFGEKYGEEVRVLSMGDEKEKYFSTELCGGTH

SEQ ID NO: 191196 - protein, 275 aa, Unknown
  Bacterial polypetide isolated from the Sargasso Sea
MSNFFPELKREQKLSENVIREEEISFLKTLDQGLTMLNSLLKSSKNGLLNGKKIFELYDTYGFPVDLTALIAKENKFDIDEKGFNEEMKKQKDRSRADAASSIDDWKVVLDDDFEEFVGYDLLETDIKITRYRRIKNKKDGDLYQLVFNLTPFYPEGGGQVGDKGYLQEENGEIHYITDTKKEDNLIIHFSKSIPKKTSGTFKAIVDKNQRSRTCSNHTATHLMHQALRKILGSHVEQKGSMVHSGMFRFDFSHFSKVSKDELKQVELFVNERIR

SEQ ID NO: 191197 - protein, 228 aa, Unknown
  Bacterial polypetide isolated from the Sargasso Sea
MASLNEIRSTFLNYFKKNGHEIVASSPLVPRNDPTLMFTNSGMVQFKNLFTGLEKRDYLRAVTAQKCVRAGGKHNDLDNVGYTARHHTFFEMLGNFSFGNYFKSEAIPLAWNLITKEFGIPAEKLYVTVFHTDDEAALIWKKVGVPDDRIIKISTSDNFWQMGPTGPCGPCTEIFYDHGEQIWGGPPGSPEEDGDRFIEIWNIVFMQNERLDDGSMKELDIQSIDTGM

SEQ ID NO: 191198 - protein, 155 aa, Unknown
  Bacterial polypetide isolated from the Sargasso Sea
MKNSSSEIRSKFIDFFTSKGHVYVDSSPIIPSNDDKTLLFTNAGMVQFKDIFLGIKESKYKSAVTSQKCLRAGGKHNDLDNVGFTNRHHTFFEMLGNFSFGDYFKIEAIQYAWEFLTVELKIPKDKMWITVHSSDDEAKNIWLDEIGISKDRLSI

SEQ ID NO: 191199 - protein, 253 aa, Unknown
  Bacterial polypetide isolated from the Sargasso Sea
KLGDLFVHYGSLKTGEIKINDVVEMKIDVERRDNLKAYHSATHLLHESLRRTLGKHVMQKGSLVAPDRLRFDFSHMKPITDEELETIDKLVNEYVSNSSEVTTRIMTPKAAIEKGALAFFGEKYGEEVRVVSMGKEKEAYFSTELCGGTHVKNTGDIGKFKTVSQSSIAAGVRRVEALRDKQLEDFIKNKEKLSTLSTQKDEETIKDLSSQIIKLGGKPNVDNKDLKEIIKNLSRQLEQLNVSSVLQDKTKNI

SEQ ID NO: 191200 - protein, 53 aa, Unknown
  Bacterial polypetide isolated from the Sargasso Sea
MQTTNQIRDIFLKFFEKNGHQIVSSSPLVPRNDPTLLFTNAGMVQFKNVFTGG

SEQ ID NO: 191201 - protein, 238 aa, Unknown
  Bacterial polypetide isolated from the Sargasso Sea
KKFLDYFKKNNHKIVDSSNLVPNNDPTLMFTNSGMVQFKNVFTGLEKRDYKTATTSQKCVRAGGKHNDLENVGYTPRHHTFFEMLGNFSFGDYFKEKAIIHAWNLLTKDFQLPKEKLLVTVFHEDEESFKLWKKIAGLSGDKIIKIATSDNFWSMGDTGPCGPCSEIFYDHGEKLKGGPPGSPDEDGDRFIEIWNLVFMQYEQISKDKRINLPKPSVDTGMGLERMTAVLQGTHDNYN

SEQ ID NO: 191202 - protein, 299 aa, Unknown
  Bacterial polypetide isolated from the Sargasso Sea
MNSNEIRKKFLKYFEKYDHEIIHSSSLVPHNDPTLMFANSGMVQFKNIFTGKESRKYKRATTAQKCVRAGGKHNDLENVGYTTRHHTFFEMLGNFSFGDYFKELAIELAWNLITKEFGLDKNRLLVTIFSEDEDSLILWKKIADLSEDKIIKINTSDNFWSMGDTGPCGPCSEIFYDHGDKFKGGPPGSINEDGDRFIEIWNLVFMQFEQISKSERIDLPKPSIDTGMGLERITALLNGSNDNYATDLFKPIINKSIEVLNNDSLINSPSHRVIADHLKSSSFLIADGVMPSNEGRGYV

SEQ ID NO: 191203 - protein, 203 aa, Unknown
  Bacterial polypetide isolated from the Sargasso Sea
MSAGESVVADAAPAASGDLGWPAGKVRDEFVAYFEAKEHTMVPSSPVVPYDDPTLLFANAGMNQFKPLFVGQAQPGSALAKLTRATNTQKCIRAGGKHNDLEDVGMDTYHHTFFEMLGSWSFGNYFKEEAIDWAWELLTITYGLDKDRFYATYFEGDEALGLPPDEEARQLWMRYLPAERVLPGNAKDNFWEMGDTGPCGPYS

SEQ ID NO: 191204 - protein, 280 aa, Unknown
  Bacterial polypetide isolated from the Sargasso Sea
ILVLGDEDNFWQMGETGPCGPCTEIYYDQGDGFDGVLPTVGDPKDRYIEIWNLVFTQYNKTSSGEMEELPQKCVDTGMGLERVQAIVEGFTDNYDSTLFQNLSQYIDSKISLTNDNLYIKKILLDHIRACCHLINDNVIPDREGRGYVLRRILRRSSRFVYKNNIKDPFLYQCADVICTSSKDFPELKKNLAKIVDTIKSEEQKYLKTLGKGIELIDDFLKNKSNLDAETIFMLYDTYGFPFEITQEIASEKNITIDKDGYEKLMMNQKESARNKKAFTD

SEQ ID NO: 191205 - protein, 297 aa, Unknown
  Bacterial polypetide isolated from the Sargasso Sea
MKGNYSEIERAESLIKETLRMEEEKFLILLDRGIKILNEEITKIDKILPGEVAFKLYDTYGFPLDLTQDILKNKSLTIDDGKFQSLMKESKELAKKNWKGSGDSAVDNIWFSIKDRLGPSEFLGYETDQAEGIILSLIKDNKEVNELNENDEGIIILNQTPFYGESGGQVGDTGEIISGDFKFEITDVQKKLGDLFVHYGKVKSGNIKIKDNVEMKIDIDRRNNIRAYHSATHLLHESLRRVLGTHVTQKGSLVAPDRLRFDFSHMKPISDQEIEKIESYVNSMVQKKSEVKTRIMT

SEQ ID NO: 191206 - protein, 262 aa, Unknown
  Bacterial polypetide isolated from the Sargasso Sea
VSNLEVSVENVRKKKNIFIHSGIVNTGVLKINSSVQMNVTPSFRQRTTSNHTATHLLQSALKLSIDSSVSQRGSLVSNHRLRFDFNAPKPLTIKELEDMEVRINQWINEDHPIQIKTMPIKEAMAAGALAMFGEKYGDVVRVVDVPGVSMELCGGTHVTRTSQLGTFKIINETGIASGIRRIEAIAGPSVLDYFNERDLVVKELSKSFKVQSYEIVERVSSLQLELKDKTKELIKVKNELALAKALGLASYAKSVGKSKLLI

SEQ ID NO: 191207 - protein, 196 aa, Unknown
  Bacterial polypetide isolated from the Sargasso Sea
MNTNEIREAFLEFFKSKDHNIVSSSSLVPNNDDTLLFTNAGMVQFKDVFLGQEKLKYSRATTSQKCIRAGGKHNDLENVGYTLRHHTFFEMLGNFSFGDYFKEEAIVFAWEFLTDILKLDKDKLWITVYKDDDEAKEIWINKIGIDPDRIAKLGEKDNFWSMADTGPCGPCSEIFFDHGDKYEGTPPGEDGDEGDR

SEQ ID NO: 191208 - protein, 282 aa, Unknown
  Bacterial polypetide isolated from the Sargasso Sea
MAKTLNEIRSAFLGYFEKNDHKIVESSNLVPNNDPTLMFANSGMVQFKNVFTGLEKRDYLRATTSQKCVRAGGKHNDLENVGYTPRHHTFFEMLGNFSFGDYFKERAIELAWKLITKDFGLDKNRLYVTVFHEDDEAFNYWKKIAGLSEDRIIRIATSDNFWSMGETGPCGPCSEIFYDHGDHLEGGLPGTKNEDGDRYIEIWNLVFMQFEQISKDKRVNLPKPSVDTGMGLERIAALLQGTHDNYETDHFKKIINSASEILKVKPNDDNLASFRVIADHLR

SEQ ID NO: 191209 - protein, 312 aa, Unknown
  Bacterial polypetide isolated from the Sargasso Sea
FSWPVAGGTLKLGDDLRMSVDSLRRSSLRSHHSATHLLHAALRRKLGDHVAQKGSLVADDRLRFDISHPRPIDMTYLLEIEQAVNEQIRVNTDVTTRLMTPVEAVDAGALAFFGEKYGDEVRVVSMGMDGNQAYSTELCGGTHVRRTGDIGYFKVLTEGAVASGVRRIEAVTGPAAEQVLAAESAGLAETAALLKVSPADVPARVGAIMDERRKLQKDLADARRELATGGGGGGSLPNVKVVEGIKFVGKALSDVPPKELKSVADDLKGQVGSGVVALITENEGRASLVVGVTADLADKLSAVDLVRAGSEA

SEQ ID NO: 191210 - protein, 206 aa, Unknown
  Bacterial polypetide isolated from the Sargasso Sea
MAKTLNEIRSTFLDYFEKNDHKIVESSNLVPNNDPTLMFANSGMVQFKNVFTGLEKRDYQRATTSQKCVRAGGKHNDLENVGYTPRHHTFFEMLGNFSFGDYFKERGIELAWNLITKDFGLNKDRLYVTVFHEDDEAFNFWKKIAGFSDDRIIRIATSDNFWSMGETGPCGPCSEIFYDHGDHLRGGLPGTKDEDGDRYIEIWNLV

SEQ ID NO: 191211 - protein, 239 aa, Unknown
  Bacterial polypetide isolated from the Sargasso Sea
WKKIAGFSDDRIIRIATSDNFWSMGETGPCGPCSEIFYDHGDHLKGGLPGTKDEDGDRYIEIWNLVFMQFEQVSKDKRINLPKPSVDTGMGLERIAALLQGTHDNYETDHFKKLISSISEFTKVKQDENNLSSFRVIADHLRASSFLLAEGVLPSNEGRGYVLRRIMRRGMRHSHLLGSKEPVFNKIFDTLKDEMKGNYPELERSETLIKETLKMEEEKFLVLLDRGIKILNDEISKIK

SEQ ID NO: 191212 - protein, 185 aa, Unknown
  Bacterial polypetide isolated from the Sargasso Sea
EVYLLLDQSPFYAESGGQIGDQGFLRKDEGQFKVFDTQKQGNIHIHRGILDRGDWKVNDVVDAEVTQRERHAITLNHSATHLMHAALRAVLGKHVSQKGSLVDAERLRFDFSHAQALSEDELEAVEIQVNSQILANSQVNKEEMPLQLAKERGAVALFGEKYGEQVRVVSMGGEFSIEFCGGCHV

SEQ ID NO: 191213 - protein, 163 aa, Unknown
  Bacterial polypetide isolated from the Sargasso Sea
MAQKTLNEIRDTFLKYFEKNDHKIVESSNLVPNNDPTLMFANSGMVQFKNVFTGLEKREYQRATTSQKCVRAGGKHNDLENVGYTPRHHTFFEMLGNFSFGDYFKEKAIHYAWDLITKDFGIDKNRLYVTVFHEDDEAFNFWKKIAGFSEDRIIRISTSDNFW

SEQ ID NO: 191214 - protein, 57 aa, Unknown
  Bacterial polypetide isolated from the Sargasso Sea
MNTNEIREAFLEFFKSKDHNIVSSSSLVPNNDDTLLFTNAGMVQFKDVFLGQEKLKF

SEQ ID NO: 191215 - protein, 239 aa, Unknown
  Bacterial polypetide isolated from the Sargasso Sea
SSERINLPKPSIDTGMGLERITALLNGTNDNYDTDLFNPLINKSIQLLNNESLNESPSHRVIADHLRSSSFLIADGVTPSNEGRGYVLRRIMRRGMRHAHTLGNNEPIFDKMLPQLIETFQNAYPELERAKDLILNTFLNEETKFKETVEKGLKILEDEISTSPKKLDGKIAFKLYDTYGFPLDLTQDYLKSKSIEVDVESFNQMMKEQKERARKNWKGTGDQGDQKNWFKITENLSST

SEQ ID NO: 191216 - protein, 270 aa, Unknown
  Bacterial polypetide isolated from the Sargasso Sea
ILNDEISKIDKVLPGEVAFKLYDTYGFPLDLTEDILRNKLMSIDTEKFQSLMKESRELAKKNWKGSGDAAVEDIWFGIKDKIEPTEFLGYETNQAEGVVLSLLKDNKEVDQLKENDEGMIIVNQTPFYGESGGQVGDTGEIVSNNFKFEVTDVQKKLGDLFVHYGKVKSGSIKLQENVELKIDVERRDNTRAYHSATHLLHESLRRVLGTHVTQKGSLVEPSRLRFDFSHMKPILNEEIDKIEEFVNAMVSKKSDVKTRLMTPDEAVENG

SEQ ID NO: 191217 - protein, 245 aa, Unknown
  Bacterial polypetide isolated from the Sargasso Sea
MRVLFNLLLKNNEQVESLKAGDEGMIILNQTPFYGESGGQVGDTGAIITNNCKFEVSDVQKKLGDLFVHYGKVISGEIKINESVELKINVERRENIRAYHSATHLLHESLRRVLGTHVTQKGSLVEADRLRFDFSHMKPISPEEIEKIESFVNSMVETKSDVKTRLMTPKEAVDNGALALFGEKYGDEVRVLSMGDEKNKYFSTELCGGTHVRNTGDIGKFKIVSQSSIAAGVRRVEALREKTIK

SEQ ID NO: 191218 - protein, 272 aa, Unknown
  Bacterial polypetide isolated from the Sargasso Sea
NKKMKEQKDRARKNWKGIGDQEDQKKWFQITEHLNSTEFLGYDQIESESEIISIIKKDSEIDNLLEEEEGIIILNQTPFYAESGGQIGDSGKIIFNNSVFEVSDTTKLFGTFYLHHGKVTIGNFNKGNNVNAIIDIKKRELIKSNHSSTHLLHSSLRQILGKHVSQKGSLVNNEKLRFDFSHNEPISLENIVKIENYVKKEIEANTLVDTKTIDHQKAIDEGAMALFGEKYGDEVRVISMGTRENNQIFSKELCGGTHVDKTGDIIDFKIIN

SEQ ID NO: 191219 - protein, 267 aa, Unknown
  Bacterial polypetide isolated from the Sargasso Sea
NIKNNKLDGKIAFKLYDTFGFPLDLTQDYLKSKKIDVDVESFDTLMKLQKEEAKSSWKGSGDGNTEKLWFDIARKTNPTVFKGYKETILTSNVTALVLDSEAVDELSDKTKQSAIITDESCFYAESGGQVGDKGIISSENAEFRVTDTRKTPQGVFIHFGNVISGNFKIGHEVKLKIDTSLRDLIKKNHSATHLLHAALRNNLGLHVAQRGSLVNENKLRFDFSHNKQISSNQIDTIQKEVTNIISNTCETQIDIKSQEEAIKLGAI

SEQ ID NO: 191220 - protein, 265 aa, Unknown
  Bacterial polypetide isolated from the Sargasso Sea
FEKNDHKIVESSNLVPNNDPTLMFANSGMVQFKNVFTGLEKRDYQRATTSQKCVRAGGKHNDLENVGYTPRHHTFFEMLGNFSFGDYFKERAIELAWNLITKEFGLDKNRLYVTVYHDDDEAFNYWKKIAGLSEDKIIRIATSDNFWSMGETGPCGPCSEIFYDHGDHLEGGLPGTKNEDGDRFIEIWNLVFMQYEQISKNKRINLPKPSVDTGMGLERIAALLQGTHDNYETDHFKKIINSAAEILNVEPDNDNLASFRVIADH

SEQ ID NO: 191221 - protein, 275 aa, Unknown
  Bacterial polypetide isolated from the Sargasso Sea
LYVTVFHEDDDAFNYWKKIAGFNDNRIIRIATSDNFWSMGETGPCGPCSEIFYDHGDHLKGGLPGSKNEDGDRFIEIWNLVFMQYEQVSKDKRINLPKPSVDTGMGLERIAALLQGTHDNYETDHFQKLIQSTSEIVKKKPDQNNLSSFRVIADHLRASSFLIAEGVLPSNEGRGYVLRRIMRRGMRHSHLLGSKNPVFYNLFETLKNEMSGNYPELKRAGSLIKETLKMEEEKFLILLDRGIKILNDEITKIDKVLPGDVAFKLYDTYGFPLDL

SEQ ID NO: 191222 - protein, 300 aa, Unknown
  Bacterial polypetide isolated from the Sargasso Sea
NEMSGNYPELIRAESLIKETLRMEEEKFLVLLDRGIKILNDEISKIDKVLPGEVAFKLYDTYGFPLDLTEDILRNKSMSIDTDKFKSLMKESRELAKKNWKGSGDTAVEDIWFGIKDRLEPTEFLGYETNQAEGVVLSLLKDNKEVHQLKENDEGMIIVNQTPFYGESGGQVGDTGEIVSNEFKFEVTDVQKKLGDLFVHYGKVISGSIKLKDSVEMKINVERRNDTRAYHSATHLLHESLRRVLGNHVTQKGSLVEPSRLRFDFSHMKPIQNDEINKIENFVNNMVSKKSDVKTRLMTP

SEQ ID NO: 191223 - protein, 204 aa, Unknown
  Bacterial polypetide isolated from the Sargasso Sea
MKTNEIRQAFIKFFESKGHQSVNSSPLIPANDPTLLFTNAGMVQFKDIFLGKEDQGFTKAVSAQRCLRAGGKHNDLENVGYTSRHHTFFEMLGNFSFGDYFKEDAIQLAWDFITNELKLEKDRLWVTIFEDDDEAASIWLEKVGVSADRLIRLGEKSNFWTMGDTGPCGPCSEIFYDHGDHIDGGPPGSDDEDGDRFVEIWNLV

SEQ ID NO: 191224 - protein, 245 aa, Unknown
  Bacterial polypetide isolated from the Sargasso Sea
MKESRELAKKNWKGSGDAAVEDIWFGIKDKIEPTEFLGYETNQAEGAVLSLLKDNKEVDQLKQNDEGMIIVNQTPFYGESGGQVGDTGEIVSNDFKFEVTDVQKKLGDLFVHYGKVKSGSIKLQESVELKIDVERRDNTRAYHSATHLLHESLRRVLGTHVTQKGSLVEPSRLRFDFSHMKPILNEEIDKIEEFVNTMVSKKSDVKTRLMTPDEAVQNGALALFGEKYGDEVRVLSMGDEDGKYF

SEQ ID NO: 191225 - protein, 287 aa, Unknown
  Bacterial polypetide isolated from the Sargasso Sea
QFKCKINIQDTQKKMGDLFVHYGTVHKGSFAVGDSVNLEINIQKRNNARANHSATHLLHESLRRTLGKHVTQKGSLVSPDRLRFDFSHNKPIEKDEMAKINKIVNEIVNGASDVQTRIMTPKEAVNLGALALFGEKYGEEVRVVFMGKENNGFFSTELCGGTHVKNTKEVGEFKVISQSSIASGIRRVEALRKKQLQDYEKSLKEDRSLKEKNLKEQVYLIKKDLLKLKVKPDFKDNVDLSENLKNLNKQLEKVKIKRIIEDKSKNIIKDKKVGSFLFRQQVFEDFP

SEQ ID NO: 191226 - protein, 290 aa, Unknown
  Bacterial polypetide isolated from the Sargasso Sea
CFKLYDTYGFPIDLTALIAGEKGYSIDKDEFDKEMNIQKKRSRSASLLNSEDWVVLESDFVEEFVGYDYLSTDVKITRYRKIKSAKEGNFYQLVFNLTPFYPEGGGQVGDKGYLQSSNGDVFYIIDTKKENNVILHYTKNLPSNLREVFKAVVDSKQRLRTSSNHTATHLLHQALRSILGDHVEQKGSMVHSGIFRFDFSHFSKLKTEEIIEIEQFVNSRIMEHIPLEENRNEPYKEAIKKGAIGLFGEKYGDVVRTIKFGQSYELCGGTHVNNTHDIWHFKIISETSMP

SEQ ID NO: 191227 - protein, 246 aa, Unknown
  Bacterial polypetide isolated from the Sargasso Sea
EGSPPGEDGDEGDRFVEIWNLVFMQFNRDSDGALHDLPKPSVDTGMGLERIAAVMQGVGSNYETDIFSNLIVESEKVLGKAGDVSHKVIADHLRSSCFLISDDVFPSNEGRGYVLRRILRRAIRHGYKIGADKPFMHKLVRTFVDAMGNAYPQLKNDEERIKKIIKNEETQFLQTLDKGIQILDSTLAEGNKEIISGDLAFKLHDTFGFPFDLTADIAREKGIDIDEKGFKKNMESQQQIQRHQVR

SEQ ID NO: 191228 - protein, 215 aa, Unknown
  Bacterial polypetide isolated from the Sargasso Sea
MSDIRKKFLGYFSVNKHEIVESSNIVPNNDPTLMFTNSGMVQFKNVFTGVENKPFKTATTSQKCIRAGGKHNDLENVGYTPRHHTFFEMLGNFSFGDYFKEKAIYYAWELLTKDFGIPKDRLSATVYSEDEEAFKLWKKIAGLPESRIVKISTSDNFWSMGETGPCGPCSEIFFDHGDKLKGGPPGSPNQDGDRFIEIWNLVFMQYEQISKDKRI

SEQ ID NO: 191229 - protein, 305 aa, Unknown
  Bacterial polypetide isolated from the Sargasso Sea
GFPLDLTQDILKNKSLTIDKDKFQSLMKESKELAKKNWKGSGDSAVDDIWFSIKDRLGPSEFLGYETDQAEGIILSLLKDNKEVNELNKNDEGIIILNQTPFYGESGGQVGDTGEIISGDFKFEITDVQKKLGDLFVHYGKVKSGSIKIKDNVEMKIDIDRRNNIRAYHSATHLLHESLRRVLGTHVTQKGSLVAPDRLRFDFSHMKPISDQEIEKIENHVNLMVQKKSEVKTRIMTPKEAVNNGALALFGEKYGEEVRVLSMGDEKEKYFSTELCGGTHVRNTGDIEKFKIISQSSIAARCERE

SEQ ID NO: 191230 - protein, 162 aa, Unknown
  Bacterial polypetide isolated from the Sargasso Sea
MAEKTLKNIRKSFLDFFSKKEHKIVDSSNLVPSNDPTLMFTNSGMVQFKNVFTGLEKRDYKRAVTSQKCVRAGGKHNDLENVGYTPRHHTFFEMLGNFSFGDYFKDVAIELAWNLITKEFQISKNKLSVSVYSEDTKAHDLWKKIAGLPESRIYKISTNDNF

SEQ ID NO: 191231 - protein, 193 aa, Unknown
  Bacterial polypetide isolated from the Sargasso Sea
IDTEKFQSLMKESRELAKKNWKGSGDSAIEDIWFGIKDKIEPTEFLGYETNQAEGVVLSILKDNKEVDQLKQNDEGMIIVNQTPFYGESGGQVGDTGEIVSNEFKFEVIDVQKKLGDLFVHYGKVKSGSIRLQESVELKIDVERRDNTRAYHSATHLLHESLRRVLGTHVTQKGSLVEPSRLRFDFSHMEAQF

SEQ ID NO: 191232 - protein, 305 aa, Unknown
  Bacterial polypetide isolated from the Sargasso Sea
FEMLGNFSFGDYFKEEAIVFAWEFLTDVLKLDKDRLWITVYKDDDEAKEIWINKIGVDPDRIAKLGDKDNFWSMADTGPCGPCSEIFFDHGDKYEGTPPGEDGDEGDRFVEIWNLVFMQFNRDSDGVLHDLPKPSVDTGMGLERIAAVMQGVGSNYETDIFFNLIKESEKVLGNAGDVSHKVIADHLRSSCFLISDDVFPSNEGRGYVLRRILRRAIRHGYKIGADKPFMHKLVKTFVNAMGNAYPQLKNDEGRIKKLIKNEETQFLQTLDKGIQILDSNLAEGNKEIISGDLAFKLHDTFGFPI

SEQ ID NO: 191233 - protein, 296 aa, Unknown
  Bacterial polypetide isolated from the Sargasso Sea
EGRGYVLRRIIRRAIRHGNKLGAKGVFFSKLVGALAEQMGEAYPELIEKQAVIEKVLALEEEQFGKTLERGLGILEDSLAQLNGSTVIPGEVAFKLYDTYGFPLDLTSDVARERGLTVDQAGFEASMEAQRKRAQQASNFGADYNQALTSAQCTDFTGYTQIQGKAKVVEILLEGNAVNSLTDGQQALVILDQTPFYAESGGQCGDAGVLTLANGAVFQVADTIKVGKAFAHKGSLKGALAIGDLVDAAIDNARREAIRKNHSATHLLHAALRTVLGEHVTQKGSLVGSERLRLTS

SEQ ID NO: 191234 - protein, 238 aa, Unknown
  Bacterial polypetide isolated from the Sargasso Sea
MTAKEIRQTFLEFFKSKQHHIVASAPIVVKNDPTLMFTNAGMNQFKDLFLGEATVKYPRVVDTQRCLRVSGKHNDLEEVGIDTYHHTMFEMLGNWSFGDYFKKEAIAWSWELLTEVYKIPKDQLYVSVFEGDEKEGLPMDTEAFELWKQFVPEDHIVLGNKKDNFWEMGDTGPCGPCSEIHVDCRTAEERADGKGKSLVNADHPQVIEIWNNVFMQFNRLKDGSLQTLPAQHVDTEWV

SEQ ID NO: 191235 - protein, 250 aa, Unknown
  Bacterial polypetide isolated from the Sargasso Sea
NGALALFGEKYGDEVRVLSMGDEDGKYFSTELCGGTHVKNTGDIGKFKIVSQSSIAAGVRRIEALRDKQLEEYLKNKEKLSNLAAEKDEETIKELSKQIIKLGGKPSLEEADQKTLIKNLNKQLETISVNKILEDKSKNIIKDEEINGIKLRLQKIDGLPPKELRKLVDKGKKDLGEGIVVVFANKDDKVGLAVGLTDKLTNKFDAVKFVKVGSEIIGGKGGGGRKDFAQAGGQDQSKIEEAFEKLKGLV

SEQ ID NO: 191236 - protein, 289 aa, Unknown
  Bacterial polypetide isolated from the Sargasso Sea
MDLVKEKLKAEENAFFKTLSAGVKMFEQNIPNKGKAMFDGEIAFKLHDTYGFPIDLTTSMAFERDLKVDLMRFNELMEIQKAGSKNNSMFDVKDIVVDHKLKSDFIGYDQFNAESNCIKLFNFEGREVENISEVGFGIFSETPFYAESGGQIGDTGTIRNKDCYAEVRDCKKVGDFHLHEINVLDGQLKVNKKYSLAVNEERRTKIVRNHSAAHLLHSALRMTLGDSVQQRGSLVSEEKLRFDFSYEKKLTAEQIQDIENLVNDQIEKEVQTKIRLMSFEDAKKTGALA

SEQ ID NO: 191237 - protein, 207 aa, Unknown
  Bacterial polypetide isolated from the Sargasso Sea
MSQILLTDVRKKFLEYFKKNNHQIVDSSNLVPNNDPTLMFTNSGMVQFKNVFTGLDKRPYKTATTSQKCVRAGGKHNDLENVGYTPRHHTFFEMLGNFSFGDYFKEQAIHHAWNLLTKDFKLPKEKLSVTVFHEDDESFNLWKKIAGLSENKIIRISTADNFWSMGDTGPCGPCSEIFYDHGEKLKGGPPGSPKQDGDRFIEIWNLV

SEQ ID NO: 191238 - protein, 176 aa, Unknown
  Bacterial polypetide isolated from the Sargasso Sea
MTSTTNEIRAKFLDYFVANDHEVIPSSPLVPHNDPTLLFTNAGMVQFKNVFTGVETLPFKRAATSQKCVRAGGKHNDLENVGYTARHHTFFEMLGNFSFGDYFKDNAIEHAWNLVTKEYGISSDKLLVTVFSEDNEAFELWKKIAGLPESRIIRIPTSDNFWSMGDTGPCGPCSEI

SEQ ID NO: 191239 - protein, 298 aa, Unknown
  Bacterial polypetide isolated from the Sargasso Sea
KVLGDDVSQAGSLCGFDRLRFDFNGPKAPTETQLEEVENLVNGWIAQSAALTAEEMPIAAAKEKGATMMFGEKYGDVVRVVDVPGISMELCGGTHVSNTAEIGGFKILSEAGIASGIRRIEAVSGSGVVELLQQRDAVVKQLAGALRVPPEEIAGRVTSLQKDLIAAQKLADSLRGELAVAKAGALVSEAKQVGQSKVLVARLDGVDPAALKVAAEDLAARLGDGAAVVLGSANGQNVGLVALFDDTVQKLGHLKAGQVLGAAAKKCGGGGGGKPGFAQAGGRDASQLDDALRDALDT

SEQ ID NO: 191240 - protein, 286 aa, Unknown
  Bacterial polypetide isolated from the Sargasso Sea
GSLKIDDKIEVNVNKEKREKTEAHHSATHLVHAALKRVLGDHVKQKGSLVDEHKLRFDFSHDESLSDEEISKIEDLVNQEILKNSAVSTKIMDLEDAKNSGAESLFGEKYEDQVRVLSIGEDDFSLELCGGTHISRTGDLGIFIITSQSSVASGIRRIEALSGPRAQEYLSNLKNQTIQLQKLLNAPAEEIEEKVSKLLKENKSLKKGGKTAKVASIKSSNIHDIDNFKLVIEEAESEDIKELRPVLDEKTKNANNSIFILLSSKNETLTILCSVSKDLQSRIQLK

SEQ ID NO: 191241 - protein, 283 aa, Unknown
  Bacterial polypetide isolated from the Sargasso Sea
MNSNLIRSNFIKFFEEKGHSFIQSSSIVAKNDPSLMFTNAGMNQFKNIFLGNESSKVKRVANSQKCLRVSGKHNDLEEVGADHYHHTMFEMLGNWSFGDYFKKEIINWSLEILTKVYKLNKDDLYVTVFEGNKEDQLDKDVEAHNFWSEIIDKEKIVLGDKKDNFWEMGDTGPCGPCSEIHIDLRSSDDKNKIPGKDLVNKDHPEVIELWNLVFIQYNRKANGKLEELPDKHIDTGMGFERLARIVQNKDSNYDTDLFLPLIEEISKITGIKYGNDSKDECCI

SEQ ID NO: 191242 - protein, 219 aa, Unknown
  Bacterial polypetide isolated from the Sargasso Sea
MKTNEIRKGFIKYFESEGHQSVKSSPLIPANDPTLLFTNAGMVQFKDIFLGKEDQGFTKAVSAQRCLRAGGKHNDLENVGYTSRHHTFFEMLGNFSFGDYFKEDAIQLAWDFITNELKLEKDRLWVTIFEDDDEAASIWLEKVGVSADRLVRLGEKSNFWSMGDTGPCGPCSEIFYDHGDHIDGGPPGSDDEDGDRFVEIWNLVFMQFDRQANGELVNL

SEQ ID NO: 191243 - protein, 71 aa, Unknown
  Bacterial polypetide isolated from the Sargasso Sea
MSEIRKKFLDYFSKNEHKKVDSSNIVPNNDPTLMFTNSGMVQFKNVFTGIENKSFKRATTSQKCIRAGGKH

SEQ ID NO: 191244 - protein, 310 aa, Unknown
  Bacterial polypetide isolated from the Sargasso Sea
FGDYFKKESIQWAWELITGTWGFPKERLYATVYKPGVGDPGEFDQEAYDYWSEIFTAAGLDPAVHIVNGNKKDNFWMMGDTGPCGPCSELHIDLTPEGDTKGSLVNADNGQCIEIWNLVFIQYNANEDGTFVPLAAKHVDTGMGFERVAAIIQTTQNFTDFTKPVSNYDTDVFSPIFDELEKLSGKKYTSTLSDGGPNGQEKIDIAFRVIGDHIRTLSFSIADGILPGNNDRNYVLRRILRRAVRYGRTLGFQEPFFYKLVDVLADHMGEFFPELQQRRELVQRTIRTEEESFTKHSTAVSTSSARKPAA

SEQ ID NO: 191245 - protein, 293 aa, Unknown
  Bacterial polypetide isolated from the Sargasso Sea
MYLLGLEKRDYQRATTSQKCVRAGGKHNDLENVGYTPRHHTFFEMLGNFSFGDYFKEKAIHYAWDLITKDFGIDKNRLYVTVFNEDDEAFNFWKKIAGLSEDRIIRISTSDNFWSMGETGPCGPCSEIFYDHGDHLKGGLPGTKEEDGDRFIEIWNLVFMQYEQVSKDKRIALPKPSVDTGMGLERIAALLQGTHDNYETDHFKKLIQSTSDIVRKKPDQNNLSSFRVIADHLRASSFLIAEGVLPSNEGRGYVLRRIMRRGMRHSHLLGSKEPVFYNLFETLKDEMSGNYPE

SEQ ID NO: 191246 - protein, 71 aa, Unknown
  Bacterial polypetide isolated from the Sargasso Sea
MADKTLNEIRSTFLKYFEKNDHKIVESSNLVPNNDPTLMFANSGMVQFKNVFTGLEKRDYKTATTSQKCVR

SEQ ID NO: 191247 - protein, 239 aa, Unknown
  Bacterial polypetide isolated from the Sargasso Sea
ATTSQKCVRAGGKHNDLENVGYTPRHHTFFEMLGNFSFGDYFKEQAIHYAWDLITKDFGIDKNRLYVTVFHEDDEAFNFWKKIAGFSDDRIIRIATSDNFWSMGETGPCGPCSEIFFDHGDHLPGGLPGSKDEDGDRFIEIWNLVFMQFEQVTKDKRINLPKPSVDTGMGLERIAALLQGSHDNYETDHFKKIIGSASEITNVKSDQSNLASFRVIADHLRASSFLIAEGVLPSNEGRG

SEQ ID NO: 191248 - protein, 296 aa, Unknown
  Bacterial polypetide isolated from the Sargasso Sea
FGQWVRQVPCGPCSEIFFDHGDHLPGGLPGSKDEDGDRFIEIWNLVFMQFEQVTKDKRINLPKPSVDTGMGLERIAALLQGTHDNYETDHFKKIINSASEIVKVKSDKSNLSSFRVIADHLRASSFLIAEGVLPSNEGRGYVLRRIMRRGMRHSHLLGSKEPVFYNLFDTLKNEMSGNYPELVRAESLIKETLKMEEEKFLVLLDRGIKILNDEISKIDKVLPGEVAFKLYDTYGFPLDLTEDILRNKSMSIDTEKFQSLMKESRELAKKNWKGSGDAAVEDIWFGIKDKLEATEF

SEQ ID NO: 191249 - protein, 323 aa, Unknown
  Bacterial polypetide isolated from the Sargasso Sea
STIFVEDTIKILDILFVHKSTIQSGSLKIGDKVKSFVDKERRKNLASNHSATHLLHSALRKILGDHVNQKGSLVTDDKLRFDISHPNQISRDEIIKIENIVNSEIRLNKSVETKVMDSKDAMNSGALALFGEKYSDKVRVVSMGSKDSHGNCYSKELCGGTHVERTGDIGFFKIITETSVSSGVRRIEALTGDKALVSIQEDEKIIQNILSKLKASKADISNKLNNLIDQKKELESQITKLKTVKVKNNDDQKNYIKKIDGLNFYNRKLENYNSSDIRNIVDDAKKLIKSGVVLVYNIKDNKVSLIVGVTSDLCENLSAIDLR

SEQ ID NO: 191250 - protein, 290 aa, Unknown
  Bacterial polypetide isolated from the Sargasso Sea
TLKVKQDQNNISSFRVIADHLRASSFLIAEGVLPSNEGRGYVLRRIMRRGMRHSHLLGSKEPIFYNIFKTLMEEMKGNYSELQRAESLIKETLKMEEEKFLVLLDRGIKILNNEITKIDKVLPGEVAFKLYDTYGFPLDLTEDILKNKSLKIDNEKFHDLMKDSKELAKKNWKGSGDSAIDDIWFGIKDKLGSTEFLGYETNQAEGVVISLLKDNKEVEILNFGDEGMIITNQTPFYGESGGQIGDKGKIISGEFKFEVSDVQKKLGDLFVHYGNVKSGSVKLNQNVKEN

SEQ ID NO: 191251 - protein, 268 aa, Unknown
  Bacterial polypetide isolated from the Sargasso Sea
KDTLSRGLKILQEEMEDLSTNNILSGSTAFKLYDTYGFPLDLTQDYLRGHDWQVDIDGFEKAMLAQKNAARAAWSGSGSKTESRLFLELADRNGSTEFLGYGQVSSQGIVTNMILDNDETKISSKDEKVIVITNQTPFYAESGGQLGDTGCFSWPEGFANVENTTKISSLFLHHCKISKGSLSVGQPIQMNVDADRRDKLRSNHSSTHLLHEALRLTLGEHVVQKGSLVAPDKLRFDFSHNAPVSSEQLGIIEDIVNHQVQMNTLVQT

SEQ ID NO: 191252 - protein, 133 aa, Unknown
  Bacterial polypetide isolated from the Sargasso Sea
DEEAAKIWLEKVGISKERLVFLGEEDNFWSMGDTGPCGPCSEIYYDHGEKYDGTPPGSDGDEGDRFVEIWNLVFMQFNKDKDGKMHKLPKPSVDTGMGLERIAAVMQGVNSNYEIDFFKNIISSSEKLIGSSG

SEQ ID NO: 191253 - protein, 254 aa, Unknown
  Bacterial polypetide isolated from the Sargasso Sea
MKINSLRDSFISYFVKNGHKHVHSSPLVPQNDPTLMFANSGMVQFKNVFTGLEKTDFNRAVTAQKCIRAGGKHNDLENVGYTLRHHTFFEMLGNFSFGDYFKDEAIDYAWRFITSELGINRDKLCVTIYHDDEQAYNAWKKITSFSDDKIIRISTKDNFWSMGETGPCGPCSEIFYDHGENYSGKPPSETDETGDRFVEIWNLVFMQYEQVDLVHRIDLPRPSIDTGMGIERIAAVMQGTNDNYQVDSILEIIN

SEQ ID NO: 191254 - protein, 275 aa, Unknown
  Bacterial polypetide isolated from the Sargasso Sea
FFEMLGNFSFGDYFKKDAITFAWTFLTGVLKLPKEKLWVTVYATDDEAYDIWTQEIGVPAERMIRIGDNKGAPYASDNFWTMGDTGPCGPCTEIFYDHGDDIWGGPPGSPEEDGDRYIEIWNNVFMQFNRTADGVLHPLPAPSVDTGMGLERISAVMQHVHSNYEIDLFTNLLSASAAAIGCANEGQSSLKVVSDHIRSCGFLIADGVLPSNEGRGYVLRRIIRRACRHGNKLGATGSFFYKIVAALVAEMGDAFPELKQQQSNIERVLKAEEEQ

SEQ ID NO: 191255 - protein, 290 aa, Unknown
  Bacterial polypetide isolated from the Sargasso Sea
QIRSTFLKYFEKNGHKIVESSNLVPNNDPTLMFANSGMVQFKNVFTGLEKRDYKTATTSQKCVRAGGKHNDLENVGYTPRHHTFFEMLGNFSFGDYFKERAIELAWNLITKDFGLDKNKLYFTVFNEDDEAFNLWKKITGFGEDRIIRIATSDNFWSMGETGPCGPCSEIFYDHGDHLQGGLPGTKDQDGDRYIEIWNLVFMQYEQVTKDKRIDLPKPSVDTGMGLERIAALLQGTHDNYKTDHFLKLINSISNTVKVKPTDKNLSSFRVIADHLRASSFLLAEGVLPSK

SEQ ID NO: 191256 - protein, 277 aa, Unknown
  Bacterial polypetide isolated from the Sargasso Sea
VGHTARHHTFFEMLGNFSFGDYFKEKAIFYAWDLLTNEFGFPKDKLLVTFYHEDDEAKILWKKISGLDDSKIIPIHTNDNFWSMGDKGPCGPCSEIFYDHGDSIFGGPPGSKDEDGDRFIEIWNLVFMQYEQISNNERIKLPKPSIDTGMGLERLAAVLQGKHDNYDIDLLQKLIVSSAEYSSTDINGKFNISHRVIIDHLRSSSFLIADGVLPSNDGRGYVLRRIMRRGMRHAHIIGCKDPLIYKLVPSLIDAMGDAFPELIYAKDLITNTLENEE

SEQ ID NO: 191257 - protein, 268 aa, Unknown
  Bacterial polypetide isolated from the Sargasso Sea
MAKTLNEIRSAFLDYFEKNDHKIVESSNLVPNNDPTLMFANSGMVQFKNVFTGLEKRDYQRATTSQKCVRAGGKHNDLENVGYTPRHHTFFEMLGNFSFGDYFKEQAIELAWNLITKEFGLDKNRLYVTVYHDDDEAFNYWKKIAGLSEDKIIRIATSDNFWSMGETGPCGPCSEIFYDHGDHLEGGLPGTKNEDGNRFIEIWNLVFMQYEQISKDKRINLPKPSVDTGMGLERIAALLQGTHDNYETDHFKKIINSAAEILKVEPNI

SEQ ID NO: 191258 - protein, 293 aa, Unknown
  Bacterial polypetide isolated from the Sargasso Sea
GYILRRLIRRMIRHGRLVGINQPFLPQLAKVAIELMKNAYPQLLEKKKIILNELKIEESRFLETLERGEKLLAEITTHECDVISGAQAFELYDTYGFPLELTEEIANEKGISVDLTGFENEMAKQRKRAKDASVSIDLTEEGSIEREISLFDETRFEGYEKLEITATVIGIFKNNELVKQAVQGDLVKIIVNRTPFYAESGGQIGDKGLITSQDLEVSIENVRKKKNIFIHSGIVNTGVLKVNSPVQMNVTPSFRQRTTSNHTATHLLQSALKLSIDSSVSQRGSLVSNDRLR

SEQ ID NO: 191259 - protein, 296 aa, Unknown
  Bacterial polypetide isolated from the Sargasso Sea
VFIAEGVLPSNEGRGYVLIRIMRRGMRHSHLLGSKEPVFYNLFDTLKNEMSGNYPELVRAESLIKETLKMEEEKFLVLLDRGIKILNDETSKIDKVLPGEVAFKLYDTYGFPLDLTEDILRNKSMSIDTEKFNSLMKESRELAKKNWKGSGDAAVEDIWFGIKDKLDVTEFLGYETNQAEGVVLSLLKDNKEVDQLKENDEGMIIVNQTPFYGESGGQVGDTGEIVSNDFKFEVTDVQKKLGDLFVHYGKVKSGSVKLQESVELKIDVERRDNTRAYHSATHLLHESLRRVLGTHV

SEQ ID NO: 191260 - protein, 307 aa, Unknown
  Bacterial polypetide isolated from the Sargasso Sea
IAEGVLPSNEGRGYVLRRIMRRGMRHSHSLGSKEPIFYKMVPILINEMSDSYPELKRAEPLITETLKTEEEKFSLLLNRGIEILNENLNKVKNNSFPGEVAFKLYDTYGFPLDLTADILKNKNIKVDNAGFAREMEKSKKLARSNWKGSGDKSLEEKWFKVREKLNPTEFLGYEFDKLEGVVLKISKGKDFVNEAKTGDEVEIVTNQTPFYAESGGQVGDKGIIYSNDCEVVIEDTQKKMGDLHVHIGKVSKGSLKANQSVNLVIDVKRRNNARAYHSATHLLHEALRRTLGKHVTQKGSLVSPEKL

SEQ ID NO: 191261 - protein, 279 aa, Unknown
  Bacterial polypetide isolated from the Sargasso Sea
SIIHICEAKNKNLKSIAPDNSTITASVDEKSRLSTTNNHTTAHLMHAALRQVLGEHVSQAGSLVNPKMLRFDFTHFEKVSDTQLEEIENIVNLVIRQNINTDIYETPYDEAISSGIIAQFGEKYGDVVRVVKISDFSEELCGGCHVKATGQIGQFRLVSEEGIAAGIRRVVAVTGKQAELMNQEQGRVTRALRQLLNVPEAKIPEMAEKLAEEKRKLEKEVQSLRSKTALEGIAEMVAQAKDVEGVSVLAREVDADSAETLRNIGNSVREQIPSGIAWL

SEQ ID NO: 191262 - protein, 253 aa, Unknown
  Bacterial polypetide isolated from the Sargasso Sea
MAKTLNEIRETFLKYFEKNDHRIVESSNLVPNNDPTLMFANSGMVQFKNVFTGLEKRDYQRATTSQKCVRAGGKHNDLENVGYTPRHHTFFEMLGNFSFGDYFKERAIELAWNLITKDFGIDKNKLYVTVFHEDDEAFNFWKKIAGFRDDRIIRIATSDNFWSMGETGPCGPCSEIFFDHGEHLKGGLPGSKDEDGDRFIEIWNLVFMQFEQVTKDKRINLPKPSVDTGMGLERVAALLQGTHDNYETDHFKK

SEQ ID NO: 191263 - protein, 292 aa, Unknown
  Bacterial polypetide isolated from the Sargasso Sea
ILTAGKTFRKNHTATHLMHKALKEVLGDHVQQAGSLVHPDYLRFDLTHSEKITSEQINEIETIVNRQILINSNINVSVKPFDEAKKEGAVAMFGEKYGEEVRVITVSDFSKELCGGTHVDRTGDIGLFKIIEESSLASGVRRIVALTGQKSVEYFQNQFSTLESVQSQLNCSKDSIAARLSQLLGQKKSLEKQLKDKNKRSETFDLESLVQNSKSIDNYKIIIEKTNVQSMDELKNLGDSLLDSISSGIGVLGADGEKPMIVVIVTQDLVKLGIKANDLARSIGNLMGGGGG

SEQ ID NO: 191264 - protein, 243 aa, Unknown
  Bacterial polypetide isolated from the Sargasso Sea
SATHLLHESLRRVLGTHVTQKGSLVAPDRLRFDFSHMKPITNEEIIKIENHVNRMVQTNSQVKTRLMTPKEAVDNGALALFGEKYGEEVRVLSMGDEKDKYFSTELCGGTHVKNTGDIGKFKITSQSSIAAGIRRIEALRDKQLEDFLTKKEKLTDLSLQKDEEVIKNISEQIIKYGEKPNLKIQNQKELIKTLNKQLDEIIITNILKDKSKNIIKDQQIKNVNVRFQKVKGLNSKDLRKLVD

SEQ ID NO: 191265 - protein, 267 aa, Unknown
  Bacterial polypetide isolated from the Sargasso Sea
ILLDIFKNAYPELIRAKDLIINTYINEETKFKETVEKGLKILEDEISVSSNKLDGKIAFKLYDTYGFPLDLTQDYLKSKNIEVDVETFNQMMKEQKERARKNWKGTGDHEDQKNWFKITENLNSTEFLGYKQTESESEITSIVKSDNKTDQLNEGENGIIILNQTPFYGESGGQVGDIGTIVFEHNTFEVIDTTKLFGSFYLHHGKVKKGKFKIGDSVTATIDSYKRQLIKCNHSSTHLLHASLRKILGNHVSQKRFIWLIVKKIKV

SEQ ID NO: 191266 - protein, 289 aa, Unknown
  Bacterial polypetide isolated from the Sargasso Sea
FFKSKLKYSDWNIIDENAKSNFIGYDKLKSEMNLIRFREVETEYGMNLHLVFDNTPFYAESGGQIGDTGSIESSSKEVIEIIDTIKDNDYIIHVTNKMPYNQDSPFTGIVHSKRRQQITSNHTSTHLLNLALKKILGTNVEQRGSMISEESFRFDFSHQIKLSKEELNKVEEYVNNLIKESIDLIEERSADYKEVIKKGAVGLFSEKYGEKVRTIKFNDSYELCGGTHVKNTKDIGSFKIISEGSQAFGIRRIVATSSEKKILEENLKQKSIKEKAATDQANRLLKKEN

SEQ ID NO: 191267 - protein, 290 aa, Unknown
  Bacterial polypetide isolated from the Sargasso Sea
LNSTEFLGYDQTESESAIISIIKKDSEINNLLTEEEGIIILNQTPFFAESGGQIGDSGKIIFNNNVFEVIDTTKLFGSFYLHHGKVTTGSFKKGDNVTAIIDTKKRELIKCNHSSTHLLHSSLRQILGNHVSQKGSLVNNEKLRFDFSHNEPISLENIVKIEDYVKKEIEANTLVNTKTVDHQKAIDEGAMALFGEKYGDEVRVISMGTIENNNIFSKELCGGTHVNKTGDIIDFKIINQSSVASGIRRIEALSNITVNQYKQEQIKLINQKKEANQIKIKELIKEIKKI

SEQ ID NO: 191268 - protein, 314 aa, Unknown
  Bacterial polypetide isolated from the Sargasso Sea
DHAIVESSNLVPNNDPTLMFANSGMVQFKNVFTGLEKRSYKRATTSQKCVRAGGKHNDLENVGYTPRHHTFFEMLGNFSFGDYFKERAIELAWNLITKDFGLDKNKLYFTVFNEDEEALNLWKKISGFGDDKVIKIATSDNFWSMGETGPCGPCSEIFFDHGEHLKGGLPGSRDQDGDRFIEIWNLVFMQFEQVSKDKRINLPKPSVDTGMGLERITALLQGTHDNYETDHFKKLIQSASESLKIKPNKSNISSFRVIADHLRASSFLIAEGVLPSNEGRGYVLRRIMRRGMRHSHLLGSKKPIFFNIFKTLQE

SEQ ID NO: 191269 - protein, 297 aa, Unknown
  Bacterial polypetide isolated from the Sargasso Sea
GVVLSIIKDKKEVKNLGNGDEGIVILNQTPFYGESGGQVGDTGYIMSGDFKFQVTDVQKKLDDLFVHYGKVINGTIKIKDNVEMKINVERRNNIRAYHSATHLLHESLRRVLGTHVIQKGSLVEAERLRFDFSHMKPISSEEITKIEGFVNSMIDRKTDVRTRLMTPKEAVNNGALALFGEKYGEEVRVLSMGDEKDKYFSTELCGGTHVRNTGDIGKFKIVSQSSIAAGIRRVEALRDKQLKEFLNKKEKLSDISSQKDQNNIKDLSDKIIKLGGKPNLNNEDKRNLIKDLTKQYD

SEQ ID NO: 191270 - protein, 239 aa, Unknown
  Bacterial polypetide isolated from the Sargasso Sea
SLVAHDRLRFDFSHMKPISSEEIEKIEKFVNEMVETKSDVKTRLMTPKEAVDNGALALFGEKYGDEVRVLSMGDEKNKYFSTELCGGTHVRNTGDIGKFKIVNQSSIAAGIRRVEALRDKQLEDYLTKKEKLSDLSTQKNEEIIKNLSEQIIKLGGNPKLNNDNQKDLIKNLNKQFDQLSVRGILSDKSKNIIKDEKIKKINVRFQKIIGISTKDLRKLVDSGKKEIGEGIVIIFACKD

SEQ ID NO: 191271 - protein, 261 aa, Unknown
  Bacterial polypetide isolated from the Sargasso Sea
QTPFYAESGGQVGDQGIIYSDKCKIIIKDTQKKMEDLHVHYGKVKTGSLKVNENVNLEIDVDRRNNARAYHSATHLLHEALRRTLGKHVTQKGSLVSPEKLRFDFSHNKPIEKSEIEKIESYVNEMINTSADVKTRIMTPKEAVKKGALAMFGEKYGEEVRVLSMGKENGGYFSTELCGGTHVKNTKDIGKFKIISQSSIAAGVRRVEALRDKQLDDYQRSVNKDKFLKEKNLKYEIDLIKKELLKYKVEPILNNDLNLFE

SEQ ID NO: 191272 - protein, 86 aa, Unknown
  Bacterial polypetide isolated from the Sargasso Sea
MADKTLNEIRSTFLKYFEKNGHKIVESSNLVPNNDPTLMFANSGMVQFKNVFTGLEKRDYKTATTSQKCVRAGGKHNDLENVGYTP

SEQ ID NO: 191273 - protein, 278 aa, Unknown
  Bacterial polypetide isolated from the Sargasso Sea
MSKSTAEIRQAFLDFFHSKGHQVVASSSLVPNNDPTLLFTNAGMNQFKDVFLGLDKRNYSRATTSQRCVRAGGKHNDLENVGYTARHHTFFEMLGNFSFGDYFKHDAIQYAWELLTGENWFALPKERLWVTVYETDDEAYEIWEKEVGIPRERIIRIGDNKGAAYASDNFWQMGDTGPCGPCTEIFYDHGDHIWGGPPGSAEEDGDRYIEIWNIVFMQFNRQADGTMEPLPKPSVDTGMGLERIAAVLQHVNSNYEIDLFRSLIESVAKVTGATDLSN

SEQ ID NO: 191274 - protein, 290 aa, Unknown
  Bacterial polypetide isolated from the Sargasso Sea
LMFANSGMVQFKNVFTGLEKRDYQKATTSQKCVRAGGKHNDLENVGYTPRHHTFFEMLGNFSFGDYFKERAIELAWNLITKDFGLDKNRIYVTVFHEDDEAFNLWKKIAGFSEDKIIRIATSDNFWSMGETGPCGPCSEIFYDHGDHLKGGLPGSKNEEGDRYIEIWNLVFMQYEQVTKDKRINLPKPSVDTGMGLERIAALLQGTHDNYETDHFKKLINSTSEIVKIKPNEKNLSSFRVIADHLRASSFLISEGVLPSNEGRGYVLRRIMRRGMRHSHLLGSKEPIFYN

SEQ ID NO: 191275 - protein, 85 aa, Unknown
  Bacterial polypetide isolated from the Sargasso Sea
MKAAEIREKFLKFFESKGHTIVRSSSLVPGNDPTLLFTNSGMVQFKDVFLGAESRPYARATTAQRSVRAGGKHNDLENVGYTARH

SEQ ID NO: 191276 - protein, 293 aa, Unknown
  Bacterial polypetide isolated from the Sargasso Sea
NSGMVSFKNVFTGLEKRDYKRATTSQKCVRAGGKHNDLENVGYTPRHHTFFEMLGNFSFGDYFKERGIELAWNLITKDFGLDKDRLYVTVFHEDDEAFNFWKKIAGFSDDKIIRIATSDNFWSMGETGPCGPCSEIFYDHGDHLYGGLPGSKEEDGDRFIEIWNLVFMQFEQVSKDKRINLPKPSVDTGMGLERIAALLQGTHDNYETDHFKKLINSTSEAVKVKPNENNLSSFRVIADHLRASSFLIAEGVLPSNEGRGYVLRRIMRRGMRHSHLLGSKEPIFYNIFKTLMD

SEQ ID NO: 191277 - protein, 113 aa, Unknown
  Bacterial polypetide isolated from the Sargasso Sea
MAKTLNEIRSAFLDYFEKNDHKIVESSNLVPNNDPTLMFANSGMVQFKNVFTGLEKRDYQRATTSQKCVRAGGKHNDLENVGYTPRHHTFFEMLGNFSFGDYFKERAIELAWN

SEQ ID NO: 191278 - protein, 284 aa, Unknown
  Bacterial polypetide isolated from the Sargasso Sea
EHVTQKGSLVSNDKLRFDFSHHKSMTNIEIEDVQNKVNEIIKNESEVETQIMSPDDAVKAGALALFGEKYSDEVRVLKIGKLNDKIYSTELCGGTHVSNTREIGELKIISESSVASGVRRIEALRGDDLLKFNEEKKNENLRSEEKKLDLKKEKEISTVNIKLLKEAIQMSISNDSDQKIIIEFCENVPINELRPLIDKCKKLISGDGVIIICVKKDDKLSFLIGVTDLLTNKIGADEIAKFASSISNGKGGGGRKDFAQSGGMLINENDQKNKLREFIIDKLQ

SEQ ID NO: 191279 - protein, 219 aa, Unknown
  Bacterial polypetide isolated from the Sargasso Sea
MQYEQVSKEKRINLPKPSVDTGMGLERIAALLQGTHDNYETDHFKKLIQSTSELVKKKPDNKNLSSFRVIADHLRASSFLIAEGVLPSNEGRGYVLRRIMRRGMRHSHLLGSKEPIFYNLFETLKKEMSGNYPELKRAESLIKETLKMEEEKFLVLLDRGIKILNEEISKIDKILPGDVAFKLYDTYGFPLDLTEDILRNKNLSIDTKTFHSLMKESRD

SEQ ID NO: 191280 - protein, 180 aa, Unknown
  Bacterial polypetide isolated from the Sargasso Sea
MNSNQIRSTFLNYFKKNGHEVIHSSSLVPDNDPTLMFANSGMVQFKNIFTGKETRNYNRATTAQKCVRAGGKHNDLENVGYTTRHHTFFEMLGNFSFGDYFKELAIELAWNLITKEYAINKDRLLVTVYSEDQEALDLWKKIAGLSENKIIKISTSDNFWSMGETGPCGPCSEIFYDHGD

SEQ ID NO: 191281 - protein, 276 aa, Unknown
  Bacterial polypetide isolated from the Sargasso Sea
SGIVNTGVLKINSSVQMNVTPSFRQRTTSNHTATHLLQSALKLSIDSSVSQRGSLVSNHRLRFDFNAPKPLTIKELEDMEVRINQWINEDHPIQIKTMPIKEAMAAGALAMFGEKYGDVVRVVDVPGVSMELCGGTHVTRTSQLGTFKIINETGIASGIRRIEAIAGPSVLDYFNERDLVVKELSKSFKVQSYEIVERVSSLQLELKDKTKELIKVKNELALAKALGLASYAKSVGKSKLLIRRLDGVDGSGLQSAASSLIDHLGKYSAVIFGGIP

SEQ ID NO: 191282 - protein, 259 aa, Unknown
  Bacterial polypetide isolated from the Sargasso Sea
RVLGTHVTQKGSLVEPDRLRFDFSHMKPISNDDIKKIENFVNSMVEKKSEVKTRIMTPKEAVDNGALALFGEKYGDEVRVLSMGSEKDSYFSTELCGGTHVRNTGDIGKFKIISQSSIAAGVRRIEALREKQLQEYLNNKEKLSDIENEKIEETIKDLSQKIIKLGGKPNITSDNQKNLIKDLTRHYEQLLVKSTLSDKSKNIIDDKIINDVKIRFQKVIDLPPKDLRKLVDNGKKELKEGVVVIFAVKDEKIGLAIGV

SEQ ID NO: 191283 - protein, 302 aa, Unknown
  Bacterial polypetide isolated from the Sargasso Sea
IDKVLSGEVAFKLYDTYGFPLDLTEDILKNKSLKVDHQKFDELMKKSKELAKKNWKGSGDSSEEAIWFSIKDKIGPTEFLGYESNHSEGVVLNLIKNNLEAKSLATGEEGMIITNQTPFYGESGGQLGDKGTIVSGNSVFEVEDTQKKLGDLFVHYGSVKTGEIKINDVVEMKIDVERRDNLKAYHSATHLLHESLRRTLGKHVMQKGSLVAPDRLRFDFSHMKPITNEELETIDKIVNEYVKNSSEVTTRIMTPKAAIEKGALAFFGEKYGEEVRVVSMGKEKEAYFSTEIMRWNTCGKIP

SEQ ID NO: 191284 - protein, 115 aa, Unknown
  Bacterial polypetide isolated from the Sargasso Sea
MSQFLLTDIRKKFLNYFKQNNHEIIDSSNLVPNNDPTLMFTNSGMVQFKNVFTGLEKRPYKRATTSQKCVRAGGKHNDLENVGYTPRHHTFFEMLGNFSFGDYFKEQAIVHAWKL

SEQ ID NO: 191285 - protein, 206 aa, Unknown
  Bacterial polypetide isolated from the Sargasso Sea
MRDIRMKFLDYFSRNGHQKVDSSNIVPNNDPTLMFTNSGMVQFKNVFTGIEKKQFKTATTSQKCIRAGGKHNDLENVGYTPRHHTFFEMLGNFSFGDYFKEKAIYYAWELLTKDFGIPKEKLSATVYSEDEEAFKLWKKVAGLPESKIVKISTSDNFWSMGETGPCGPCSEIFYDHGDKLKGGPPGSTDQDGDRFIEILESCIYAI

SEQ ID NO: 191286 - protein, 322 aa, Unknown
  Bacterial polypetide isolated from the Sargasso Sea
SDDRIIRIPTSDNFWSMGETGPCGPCSEIFFDHGDHLKGGPPGTKDQDGDRFIEIWNLVFMQFEQVSKEKRIDLPKPSVDTGMGLERIAALLQGTHDNYETDHFKKLIQSTSEVVKNEPDEKNISSFRVIADHLRASSFLIAEGVLPSNEGRGYVLRRIMRRGMRHSHLLGAKKPIFFNIFKTLKEEMSGNYPELERAQSLIKETLKMEEEKFLTLLDRGIKILNEEITKIDKVLPGEVAFKLYDTFGFPLDLTEDILKSKSLTVDHKKFKDLMKQSRDLAKKNWKGSGDSSIDDIWFAIKDKLGPTEFLGYETNQAEGTVL

SEQ ID NO: 191287 - protein, 252 aa, Unknown
  Bacterial polypetide isolated from the Sargasso Sea
SLKTGEIKINDVVEMKIDIERRDNLKAYHSATHLLHESLRRTLGKHVMQKGSLVAPDRLRFDFSHMKPITNEELETIDKLVNEYVSNSSEVTTRIMTPKAAIEKGALAFFGEKYGEEVRVVSMGKEKEAYFSTELCGGTHVKNTGEIGKFKTVSQSSIAAGVRRVEALRDSQLEEYIKNREKISSLSIQKDEETVKELSAQIIKLGGKPNIENENLKELIKNLNRQLEHLNVSSVLKDKTKNIIKDQEINKI

SEQ ID NO: 191288 - protein, 204 aa, Unknown
  Bacterial polypetide isolated from the Sargasso Sea
MAPAVARPRRGAEIRAAFLEFYESRGHQPIPSASLIPEDPTVLLTIAGMLPFKPVFLGQQERPAPRATSSQKCIRTNDIENVGRTARHHTFFEMLGNFSFGDYFKQQAIEWAWELSTGVFGLDPKNLVVSVFREDDEAEAIWRDVVGVSPKRIIRMDEADNFWASGPTGPCGPCSEIYYDFKPELGDEGIDLEDDSRFIEFYNL

SEQ ID NO: 191289 - protein, 254 aa, Unknown
  Bacterial polypetide isolated from the Sargasso Sea
CVQGALAMFGEKYGDEVRVLSMGKENAGYFSTELCGGTHVRNTKDIGKFKIINQSSIAAGVRRVEALRDKQLEDYEKSSKKDKFLKEKSLKNQIDLIKKELLKYKAKPDYKEDLELSENIKNLNKQLDKIKIQNIIKDKTKNVIKDKKIGSFTLRHQVLTDFPPKELRNIVDQSKKDIKEGIVVSFSTFEDKVGVAVGVTKELIKKYDAVTLVKIASEVLGGKGGGGRKDFAQAGGADKNKIEEAFKTLSKKIN

SEQ ID NO: 191290 - protein, 293 aa, Unknown
  Bacterial polypetide isolated from the Sargasso Sea
CRGKWFKVREELKPTEFLGYEFEKAEGVVLKISKDNKFVEKAKEGDRIEIITNQTPFYGESGGQVGDQGEMFNSDCKIHITDTQKKMGDLFVHTGKIKKGSIKIGQSINLEINVEKRNNSKANHSATHLLHESLRRTLGKHVTQKGSLVTPERLRFDFSHNKPIEDKEMKKINKVVNEIVEDSTDVQTRIMTPKEAIKMGALALFGEKYGEEVRVVFMGKEANGFFSTELCGGTHVKNTKEVGKFRVVSQSSIASGVRRVEALRDKQLNEYDKSLEKDKTLKEKITKEQLEKI

SEQ ID NO: 191291 - protein, 87 aa, Unknown
  Bacterial polypetide isolated from the Sargasso Sea
MKSVDIRQGFIDFFATKGHAFVPAAPVVPENDPTLLFTNAGMNQFKPYFLGTEGPKIKRAVNSQPCIRVSGKHNDLEDVGRDTYHHT

SEQ ID NO: 191292 - protein, 280 aa, Unknown
  Bacterial polypetide isolated from the Sargasso Sea
MQNSNDYSNKIRETFLNFFKKNSHSEIESSSLIPNDDSTLLFVNSGMVQFKKWFTGEENPKNKNVVSIQKCLRAGGKHNDLDNVGLTPRHHTFFEMLGNFSFGGYFKEEAIKFAWDLLTKEYSIDKKRLVITVYKADELSFKIWKKISGFNDEKIIRISSNDNFWSMGDSGPCGPCSEIFFDNGESIKGGLPGTKNQDGDRFVEIWNLVFMEYEKKGDSLETLPGKFVDTGMGLERILAVLNGKVNNYDTDLFEYVFKRIEEETKANLNKNLLILFRIIS

SEQ ID NO: 191293 - protein, 266 aa, Unknown
  Bacterial polypetide isolated from the Sargasso Sea
PFYGESGGQVGDHGFFENDNFKFEVMNTTKIFGNYFLHKGKVISGECEIEDTIKARINTLNRDFIKYNHSSTHLLHAALRKILGKHVTQKGSLVNSEKLRFDFSHNNPIEKDQLMNIEEIVNDQIQKNGIVEIKIVDQKKAIEEGAMALFGEKYSDEVRVVTMGQENESFFSKELCGGTHVVKLGEISKFKITNQSSVASGIRRIEAVSNVAVDKYIKEIERKLLEKNKNQDNQIEDLKNKIKNINADYNFKKGSEDKGLLIKELF

SEQ ID NO: 191294 - protein, 117 aa, Unknown
  Bacterial polypetide isolated from the Sargasso Sea
MAEKTLNEIRNTFLKYFEKNEHKIVESSNLVPNNDPTLMFANSGMVQFKNVFTGLEKRDYVRATTSQKCVRAGGKHNDLENVGYTPRHHTFFEMLGNFSFGDYFKEQAIHYAWGFNY

SEQ ID NO: 191295 - protein, 282 aa, Unknown
  Bacterial polypetide isolated from the Sargasso Sea
LLHESLRRTLGKHVMQKGSLVAPDRLRFDFSHMKPITNEELETIDKLVNEYVQNGSEVTTRIMTPKAAIEKGALAFFGEKYGEEVRVVSMGKEKNTYFSTELCGGTHVKNTGVIGKFKTVSQSSIAAGVRRVEALRDKQLEDFIKNKKKLSTLSVQKDEGTIKDLSSQIIKLGGKPKVDNKDLKEIIKNLSKQLEQLNVSSVLQDKTKNIINDQKINDIKVRFQKVQDLPPKDLRKLVDSGKKELGDGIIIVFAISEDKVGLGVGVTDKLVDKYDAVKFAKL

SEQ ID NO: 191296 - protein, 304 aa, Unknown
  Bacterial polypetide isolated from the Sargasso Sea
GKHNDLENVGYTPRHHTFFEMLGNFSFGNYFKEKAIHYAWDLITKDFGIDKNKLYVTVFHEDDEAYNLWKKIAGFSDNRIIRISTSDNFWSMGETGPCGPCSEIFYDHGDHLKGGLPGTKDEDGDRFIEIWNLVFMQYEQVTKDKRIDLPKPSVDTGMGLERIAALLQGTHDNYQTDHFKKLISSISDVTKVDQVDNNISSFRVIADHLRASSFLLAEGVLPSNEGRGYVLRRIMRRGMRHSHLLGSKEPIFYKIFDSLKNEMSGNYPELKRSESLIKETLKMEEEKFLVLLDRGIKILNEEIS

SEQ ID NO: 191297 - protein, 308 aa, Unknown
  Bacterial polypetide isolated from the Sargasso Sea
LLTKDFGLPKEKLLVTVFHEDEDAFNLWKKISGLSEKKIIKISTSDNFWSMGDTGPCGPCSEIFYDHGNKLKGGIPGSLDEDGDRYIEIWNLVFMQFEQISKDKRIDLPKPSVDTGMGLERMTAVLQGTHDNYKIDHFQKIMAASSDITKTTIDDKTIASHRVIADHLRASSFLIAEGILPSNEGRGYVLRRIMRRGMRHAHSLGSKNPVFYKLFQILLNEMKSSYPELITGKELIVETLKNEEEKFSSLLERGMKILDENLNKVQNKTLPGKEAFKLYDTYGFPLDLTADILRGKDIKVDNENSRGR

SEQ ID NO: 191298 - protein, 305 aa, Unknown
  Bacterial polypetide isolated from the Sargasso Sea
SIFLNTEEPKDLRVANSLKCIRVSGKHNDLEEVGRDGFHHTFFEMLGNWSFGDYYKKEAIEWSWELFTKVWKLDKSRLWVTVYEEDDEAFELWKNQTDIDPNRIIRSGAKDNFWEMAETGPCGPCSEIHYYVGNNPADQQAKLVNNSSEYWELWNLVFIQFNRLKDGTMEDLPKKHVDTGAGLERICSVLQNKDSNYKTDLFSKTIEDLENFSNTKYQDFEVSYNVICDHIRMLSFAIADGVVPSNDGRGYVVRRVLRRGSKFAMNLEIKEPILYKLVDSVVSTMSSHYPELKRKTEYIEQTILS

SEQ ID NO: 191299 - protein, 180 aa, Unknown
  Bacterial polypetide isolated from the Sargasso Sea
MADKTLNEIRNTFLKYFEKNDHKIVESSNLVPNNDPTLMFANSGMVQFKNVFTGLEKRDYVRATTSQKCVRAGGKHNDLENVGYTPRHHTFFEMLGNFSFGDYFKEQAIHYAWNLITKDFGIDKNRLYVTVFHEDDEAFNFWKKIAGFSDDRIIRIATSDNFWSMGETGPCGPCSEIFFD

SEQ ID NO: 191300 - protein, 275 aa, Unknown
  Bacterial polypetide isolated from the Sargasso Sea
EKLGATEFLGYETNQAEGVVLSLFKDNKEVDQLNSGEEGMIIVNQTPFYGESGGQVGDVGEIMSGEFKFEVSDVQKKLGDLFVHYGKVKSGSIKLNNNIEMKINVLRRDNIRAYHSATHLLHESLRRVLGEHVTQKGSLVEPERLRFDFSHMKPISSDEINKIETYVNSMVEKQSEVKTRLMTPKEAVENGALALFGEKYGEEVRVLSMGNEESKYFSTELCGGTHVRNTGDIGKFKIISQSSIAAGVRRIEALRDKQLDEYLKNKEKLSGLSAQ

SEQ ID NO: 191301 - protein, 192 aa, Unknown
  Bacterial polypetide isolated from the Sargasso Sea
MADKSLNEIRNSFLKYFEKNGHKIVDSSNLVPNNDPSLMFANSGMVQFKNVFTGLEKRDYQRATTSQKCVRAGGKHNDLENVGYTPRHHTFFEMLGNFSFGDYFKDIGIELAWNLITKDFGLDKNKLYFTVFKEDEEALNIWKKITGFGDDRVIKISTSDNFWSMGETGPCGPCSEIFYDHGDHLKGGLPGT

SEQ ID NO: 191302 - protein, 183 aa, Unknown
  Bacterial polypetide isolated from the Sargasso Sea
MKTNEIRQAFIKFFESEGHQSVKSSPLIPANDPTLLFTNAGMVQFKDIFLGKEDQGFTKAVSAQRCLRAGGKHNDLENVGYTSRHHTFFEMLGNFSFGDYFKEDAIQLAWDFITNELKLEKDRLWVTIFEDDDEAASIWLEKIGVSADRLVRLGEKSNFWSMGDTGPCGPCSEIFYDHGDHID

SEQ ID NO: 191303 - protein, 309 aa, Unknown
  Bacterial polypetide isolated from the Sargasso Sea
NYDTDILKSIVQEAAKLSGENDLTNPSLRVISDHLRASSFLIADGVVPSNEGRGYVLRRIIRRGLRHAHKLGMKDGILSKLVHILEEKMGIAYPLLVKNSDIIKANLLKEEEQFSTTLEQGMQLLESAVEDLKDNEIPGDIVFKLYDTYGFPVDMTADFARERDLIVDLDEYEALMLEQKERARSSSNFNTLIPESLNIEGETAFLGYDTDSTSSKIVEIISSSEEGNKDELREGEEGLILLDETPFYAESGGQVGDKGFIQSDNSLFEVHDTQKKGDQFLHLGHVKSGVFNKNDSVTAEINTTHRNRK

SEQ ID NO: 191304 - protein, 307 aa, Unknown
  Bacterial polypetide isolated from the Sargasso Sea
LNYFKQNGHEIVSSSPLVPRNDPTLMFTNSGMVQFKNLFTGIEKRDYLRAVTAQKCVRAGGKHNDLDNVGYTARHHTFFEMLGNFSFGDYFKSEAIPLAWNLITKEFGIPSEKLYTTVFHTDEEAALIWKKVGVPEDRIIKISTSDNFWQMGPTGPCGPCTEIFYDHGEQIWGGPPGSADEDGDRFIEIWNIVFMQNERFDDGSMKELDIQSIDTGMGLERIGALLQGSHDNYDTDTMRNLMLASAEATSSDLDGKHNVHHRVIADHLRSTAFLIADGVLPANDGRGYVLRRIMRRAMRHVHLLGRK

SEQ ID NO: 191305 - protein, 268 aa, Unknown
  Bacterial polypetide isolated from the Sargasso Sea
MAPAVARPRRGAEIRAAFLEFYKSRGHTPIPSASLIPEDPTVLLTIAGMLPFKPVFLGQQERPAPRATSSQKCIRTNDIENVGRTARHHTFFEMLGNFSFGDYFKQQAIEWAWELSTEVFGLDPKNLVVSVFREDDEAEAIWRDVVGVNPKRIIRMDEADNFWASGPTGPCGPCSEIYYDFKPELGDEGIDLEDDNRFIEFYNLVFMQYSRDAEGTLTPLANKNIDTGLGLERMAQILQGVPNNYETDLIYPLIETAADLADVDYRQL

SEQ ID NO: 191306 - protein, 180 aa, Unknown
  Bacterial polypetide isolated from the Sargasso Sea
MSSVNDIRSTFLNYFHKDMHQIVDSSLLVPKNDPTLMFTNAGMVQFKNLFTGVETRDYNRAVTSQKCVRAGGKHNDLENVGYTARHHTFFEMLGNFSFGDYFKDHAIEMAWKLITREYGLPAEKLLVTVYHEDEEAAGLWRKIAGLDDDRIIRIATSGHFWAMGDNGPCGPCSEIFLDHG

SEQ ID NO: 191307 - protein, 201 aa, Unknown
  Bacterial polypetide isolated from the Sargasso Sea
SSITNPSHRVIADHLKSSSFLIADGVMPSNEGRGYVLRRIMRRGMRHAHSLGNKEPVFHKLFPIFLEGIKNSYPELDRAKDLITNTLMNEETKFKETVEKGIKILDEEISNSTNIFNGEVAFKLYDTYGFPLDLTQDYLKSKNIEVDIKTFEQKMLDQKQRARQSWKGTGDIEDEGIWFEITSKIEPTEFLGYSDMEADCK

SEQ ID NO: 191308 - protein, 276 aa, Unknown
  Bacterial polypetide isolated from the Sargasso Sea
SSFRVIADHLRASSFLLAEGVLPSNEGRGYVLRRIMRRGMRHSHLLGSKEPVFNKIFDTLKDEMKGNYPELERSETLIKETLKMEEEKFLVLLDRGIKILNDEISKIKKVLPGEVAFKLYDTYGFPLDLTEDILKNKSLTVDQNKFDELMKKSKELAKQNWKGSGDASEEEIWFGIKDKIGPTEFLGYEFNQSEGVVLSIIKNNKEVQKVSNGEAGIIITNQTPFYGESGGQVGDQGTIVSGNSVFEVTDTQKKLGDLFIHHGILKSGEIKIKDVV

SEQ ID NO: 191309 - protein, 301 aa, Unknown
  Bacterial polypetide isolated from the Sargasso Sea
PDKWTEISEGADSKFVGYDTFTTESKLRRFSQNKSGQLQFILDTTPFYAESGGQIGDQGVLKQNNNTWNVLDVQKMGDSIIHICEAENKRSNNIVPDNSRITASVDEKSRLSTTNNHTAAHLMHEGLRQVLGEHVTQAGSLVNPEMLRFDFTHSEKVSDAQIEEIEDMVNLIIRRNINTDIYETPFDEAISSGIIALFGEKYGDVVRVVKIADFSEELCGGCHVKATGQIGQFRIVSEEGIAAGIRRVVAVTGKEADLMAQEQGRVTRALRQLLNGPESQIPEMTMKLTEEKDSLKKKFNP

SEQ ID NO: 191310 - protein, 190 aa, Unknown
  Bacterial polypetide isolated from the Sargasso Sea
IWFKIKDKLEPTEFLGYETNQAEGIVVSLIKDNKEVKSLNKGDEAIMVLNQTPFYGESGGQIGDTGLIISGDFKFKVEDVQKKLGDLFVHYGKVENGSIKLNDNVEMKIDVERRDNIRAYHSATHLLHESLRRVLGKHVIQKGSLVAPDRLRFDFSHMKPISNEEIVKIETFVNEMVETKSEVKTRLMTP

SEQ ID NO: 191311 - protein, 298 aa, Unknown
  Bacterial polypetide isolated from the Sargasso Sea
MVQFKNVFTGLEKRNYNKAVTSQKCVRAGGKHNDLENVGYTPRHHTFFEMLGNFSFGDYFKDVAIELAWNLITKEFQISKDKICVSVYSEDKEAFQLWKKIAGLPESKIYKISTSDNFWSMGDLGPCGPCSEIFYDHGNHLKGGPPGSKDQDGDRFIEIWNLVFMQFEQISKDKRINLPKPSVDTGMGLERISALLQGTHDNYSTDHFKTLIEASSNLTKTKVTKENISSHRVIADHLRASSFLIAEGVLPSNEGRGYVLRRIMRRGMRHSHTLGSKEPIFYKMIPTLIKGMSDSYPE

SEQ ID NO: 191312 - protein, 172 aa, Unknown
  Bacterial polypetide isolated from the Sargasso Sea
MSVGGGGVDGGSAAAGTAAGFKTVDEVRSAFVDYFVSKAGHTHWRSSPVVPHDDPTLLFINAGMNQFKPVFLGSADPNSAMSKLKRAANSQKCIRAGGKHNDLDDVGKDNYHHTFFEMLGNWSFGDYYKAEAIKWAWELLTEVYKIPADRLYVTYFEGSEKEGLAPDTEARD

SEQ ID NO: 191313 - protein, 269 aa, Unknown
  Bacterial polypetide isolated from the Sargasso Sea
VIKISTSDNFWSMGDTGPCGPCSEIFYDHGDKYPGGPPGSPDEDGDRFIEIWNLVFMQFEQINSSERINLPRPSIDTGMGLERITALLNGTNDNYNTDLFNPLINQSIQLLNNESLNSSPSHRVIADHLRSSSFLIADGVTPSNEGRGYVLRRIMRRGMRHAHTLGNKEPVFDKMLPKLIETFQNAYPELERAKDLILNTFLNEETKFKETVEKGLKILEDEISTSSKKLDGEIAFKLYDTYGFPLDLTQDYLRAKKIEVDIESFNKKM

SEQ ID NO: 191314 - protein, 227 aa, Unknown
  Bacterial polypetide isolated from the Sargasso Sea
MAQKSLNQIRETFLKYFEKNDHKIVESSNLVPNNDPTLMFANSGMVQFKNVFTGLEKRDYQRATTSQKCVRAGGKHNDLENVGYTPRHHTFFEMLGNFSFGDYFKEKAIHYAWDLITKDFGIDKNRLYVTVFHEDDEAFNFWKKIAGFSDHRIIRIATSDNFWSMGETGPCGPCSEIFYDHGDDLKGGLPGSKEEDGDRFIEIWNLVFMQYEQVTKDKRINLPETFR

SEQ ID NO: 191315 - protein, 296 aa, Unknown
  Bacterial polypetide isolated from the Sargasso Sea
AEVLSIISNGAEVDQISKDQQGCIILNQSVFYAESGGQIGDIGYIRCGESNFKVTDTQKKENLIIHDGIVSDGVFKIADNVELEIDINRRSSCRSYHSATHILHQALRDTLGDHVSQKGSLVSYDRLRFDFSHHKSLSEGEIKNIEAIVNNIINSNFNVETKLMKSEDAINSGALALFGEKYDDEVRVLSIGDNNSSSYSIELCGGTHVEKTSEIGNFKIISESSAASGIRRIEALRGNDLIIYNETRSKQIESDLEKKKITEDAKKNNLEKIKKLTQNIEEKIKNGETLIVETCN

SEQ ID NO: 191316 - protein, 288 aa, Unknown
  Bacterial polypetide isolated from the Sargasso Sea
FMHLLVKDLIKLMNSAYPELKKKQKDIIELIKNEEIKFFETLETGIEILDETISNMKNKTLSGDVVFKLHDTYGFPFDLTADIAREKQLEIDEERFNECMNQQKQTSKASSSFVSSLPAASGIEETKFLGYENLESDSKVLVIWKDQERIDAAKNNEEIFFACNQTPFYAEAGGQIGDKGKFASQSSTGSILDCKKQGKVYIHKAIVDKGSIKTGDVIKMSVEKEKRSAIAIHHSSTHLVHAALRAVLGDHVQQKGSLVDENKLRFDFSHTKPLTKEEITKIEDIVNK

SEQ ID NO: 191317 - protein, 291 aa, Unknown
  Bacterial polypetide isolated from the Sargasso Sea
LVSPNRLRFDFSHNKPIDKEEMKKINNIVNEIVVGSTDVQTRIMTPKEAVSMGALALFGEKYGEEVRVVFMGKENNGFFSTELCGGTHVKNTKEVGKFKVISQSSIASGIRRVEALRDKQLEDYEKTQKLEKSQKESNLKDEIRLIKKELQKLKIKPDYKDNLDSIENLKNLNKQLNKVKIESIKKDKSKNIIQDKKIGDILIREQILKDFPPKELRGIIDQGKKEIKSGVIISISTFENKVGVAIGVSQDLTGKFDAVTLVKIASEILGGKGGGGRKDFAQAGGVDQNKI

SEQ ID NO: 191318 - protein, 229 aa, Unknown
  Bacterial polypetide isolated from the Sargasso Sea
RRIMRRGMRHSHFLGSKEPIFYNIFKTLKDEMKGNYSEIERAESLIKETLRMEEEKFLILLDRGIKILNEEIAKIDKILPGEVAFKLYDTYGFPLDLTQDILKNKSLTIDIDKFQSLMKESKELAKKNWKGSGDSAVDDIWFSIKDKLGPSEFLGYETDQAEGIILSLLKDDKEVIELNENDEGMIILNQTPFYGESGGQVGDTGELISGDFKFEITDVQKKLGDLFVH

SEQ ID NO: 191319 - protein, 255 aa, Unknown
  Bacterial polypetide isolated from the Sargasso Sea
MQYEQISKDKRINLPKPSVDTGMGLERIAALLQGTHDNYQTDHFQKLIQSTSDIVKKKPDQNNLSSFRVIADHLRASSFLIAEGVLPSNEGRGYVLRRIMRRGMRHSHLLGSKNPVFYNLFETLKNEMSGNYPELKRAESLIKETLKMEEEKFLILLDRGIKILNDEISKIDKVLPGDIAFKLYDTYGFPLDLTEDILRNKSLSIDTKKFQSLMKESRELAKKNWKGSGDAAVEDIWFGIKDKLGATEFLGYETN

SEQ ID NO: 191320 - protein, 285 aa, Unknown
  Bacterial polypetide isolated from the Sargasso Sea
FRGKWFKVREELNPTEFLGYELDKAEGVVLKISKGKDFVKEAKTGDEVEIVTNQTPFYAESGGQVGDQGIIYSNDCKVLIKDTQKKMGDLHVHLGKIDKGSLKTHQSVNLEINVDRRNNARAYHSATHLLHEALRRTLGKHVTQKGSLVSPEKLRFDFSHNKPIEKKEIEKIEKFVNDMVNTEADVKTRIMTPKEAVEKGALALFGEKYGEEVRVLSMGKENGGFFSTELCGGTHVKNTKDIGKFKIVSQSSIAAGVRRVEALRDKQLEDYEKSTKQDKFSKEKT

SEQ ID NO: 191321 - protein, 293 aa, Unknown
  Bacterial polypetide isolated from the Sargasso Sea
WVTVYAEDDEAFDIWNQEIGVPAERIVRIGDNKGARYASDNFWQMGDTGPCGPCTEIFFDHGPDVAGGPPGSPEEDGDRYIEIWNVVFMQYNRTADGEMLNLPKPSVDTGMGLERIAAVLQGVHSNYEIDLFQDLLKAASDILGGAATTEASLRVVADHIRSCAFLIADGVMPSNEGRGFVLRRIIRRAARHGNKLGATQPFFYKLTGALVELMGEAYPQLVSSRKQIEKVLLQEEEQFAKTLDKGLRLLEQDIAELKGTEIPGETVFTLYDTYGFPVDLTNDIARERGLTLD

SEQ ID NO: 191322 - protein, 283 aa, Unknown
  Bacterial polypetide isolated from the Sargasso Sea
DEEMKKIDENVNKFVNSKTEVVTRLMTPEEGIEQGAMALFGEKYGDEVRVVFMGEEGNKYFSTELCGGTHVKNTGEVGKFKVVSQSSIAAGVRRVEALRDKQLEEYLKSKDKMSSLSSQKNEETIKSLSSEITKLGGKPIKKSEDLKTTIKELTKQLEEITVKSILSDKKKNIVKDQNIKKINIRFQKVDDLPFKELRRLVDQGKKDIKEGIVIIYAIKDDKIGLAVGVTDTLTEKYDAIKFVKSGSEILGGKGGGGRSDFAQAGGVHSNKIEESFEKIKSLI

SEQ ID NO: 191323 - protein, 314 aa, Unknown
  Bacterial polypetide isolated from the Sargasso Sea
KRNKEVDQLKVNDEGMIIVNQTPFYGESGGQVGDTGEIVSNEFKFEVTDVQKKLGDLFVHYGKVVSGSIKLKDSVEMKINVERRDDTRAYHSATHLLHESLRRVLGDHVTQKGSLVEPSRLRFDFSHMKPIQNDEIDKIEKFVNNMVSKKSDVKTRLMTPDEAVEKGALALFGEKYGDEVRVLSMGDEDGKYFSTELCGGTHVKNTGDIGKFKIVSQSSIAAGVRRIEALRDKQLEDYLKNKEKLSALSSEKDNETVKDLSEQIIKLGGKPSLDQSDQKNLIKNLTKQLETLSVNSILNDKSKILLKTKILMEL

SEQ ID NO: 191324 - protein, 156 aa, Unknown
  Bacterial polypetide isolated from the Sargasso Sea
MSEIRGKFLEYFSRNGHEIVDSSNIVPNNDPTLMFTNSGMVQFKNVFTGLEKKSFKTATTSQKCIRAGGKHNDLENVGYTPRHHTFFEMLGNFSFGDYFKEKAIYYAWELLTKDFALPKEKLLATVYSEDEEAFKLWKKIAGLPENKIIKIQTADN

SEQ ID NO: 191325 - protein, 265 aa, Unknown
  Bacterial polypetide isolated from the Sargasso Sea
GHVKSGSIKKSDSVVAEINSEQRNRIKGNHSATHLLHAALREVLGDHVEQKGSLVEESRLRFDFAHNSSIDAEDILAIEDLINTEIKKNSESITEILPISEAIEKGAIAFFGDKYGEEVRVLNIGNGFSIELCGGTHVERTGEIGMLKITSESGVSAGVRRIEAVTGVGANLLLDELSQNYSAITNELFVEDIDSRDGVEALDYLRFLEEENISFAEALNCSNDQVLKKIIQIKEDNNDLLKELNRGPLEFMIFDTCIEAIEKSN

SEQ ID NO: 191326 - protein, 297 aa, Unknown
  Bacterial polypetide isolated from the Sargasso Sea
YHSATHLLHESLRRVLGDHVTQKGSLVEPSRLRFDFSHMKPIQNDEIDKIENFVNNMVSKKSDVKTRLMTPDEAVENGALALFGEKYGDEVRVLSMGDDNGKYFSTELCGGTHVKNTGDIGKFKIVSQSSIAAGVRRIEALRDKQLEDYLKNKEKLSVLSSEKNDETIKDLSEQITKLGGKPSKDNSDQKNLIKNLTKQLDTLSVNLILNDKSKNIIKDQDINGIKLRLQKVDDLPPKELRKLVDQGKKDLSKGIVIVFASKDDKVGIAVGVTESLNNKYDAVEFVKIGSEIIGGKG

SEQ ID NO: 191327 - protein, 262 aa, Unknown
  Bacterial polypetide isolated from the Sargasso Sea
ADHIRSCSFLICDGVMPSNEGRGYVLRRIIRRAVRHGYQLGANDIFFYKLVASLAKEMGEAYPELVDQLPVIEKVLRVEEEQFSKTLARGMAILNDTLETLEGDTVPGDVVFKLYDTYGFPTDLTNDVAREHDLKIDEEGFEAAMQAQRARAQQASNFGADYNSKLAIDHTTSFTGYTDVEGQANVVELIADNAFVEKLEDGQEGVVVLDSTPFYAESGGQAGDKGVLRVANGEFIVTDTQKMGNAFAHKGIAKGSVSKGDT

SEQ ID NO: 191328 - protein, 221 aa, Unknown
  Bacterial polypetide isolated from the Sargasso Sea
MAKTLNEIRSTFLEYFEKNDHRIVESSNLVPNNDPTLMFANSGMVQFKNVFTGLEKRDYQRATTSQKCVRAGGKHNDLENVGYTPRHHTFFEMLGNFSFGDYFKERAIELAWNLITKEFGLNKDRLYVTVYHDDDEAFNYWKKIAGLSENKIIRIATSDNFWSMGETGPCGPCSEIFYDHGDHLEGGLPGTKNEDGDRYIEIWNLVFMQFEQISKDKRINL

SEQ ID NO: 191329 - protein, 331 aa, Unknown
  Bacterial polypetide isolated from the Sargasso Sea
FAREKSLDLDLDGYESLMQSKRDRARSPSNLISMIPESLNIQGHTEFVGYDSNAISSNVIEIIPSESSSMKDEINEDEEGIVLLTETPFYAESGGQVGDSGYLKSNESIFEVYDTQKKGDHFLHIGVVKSGTFKKDETVDAEIDTKKRERIKSNHSATHLLHAALRNILGEHVEQKGSLVEESRLRFDFAHNQAIDSTEIQDIEDQINAEIKKNTKSLTEVLPLEEAIEKGAVAFFGEKYGAEVRVLNLGEGYSVELCGGTHVASTGEIGLMKIVSESGISAGVRRIEAVTGDSANYLLEELEQNFLSINDELFIGDIDSNKSGIEAPRLH

SEQ ID NO: 191330 - protein, 310 aa, Unknown
  Bacterial polypetide isolated from the Sargasso Sea
SKEPIFFNIFKTLKDEMKGNYSEIERAESLIKETLKMEEEKFLVLLDRGIKILNEEITKIDKIFPGEVAFKLYDTYGFPLDLTQDILKNKSLKIDNDKFQSLMKESKELAKKNWKGSGDNAVDDIWFSIKDKLGPTEFLGYETDQAEGIILSLLKDNKEVNELNENDEGVIILNQTPFYGESGGQVGDTGEIISEDFKFEITDVQKKLGDLFVHYGKVISGRIKIKDNVEMKIDSERRNNIRAYHSATHLLHESLRRVLGTHVTQKGSLVAPDRLRFDFSHMKPISDHEIKKIESHVNSMVQKKSEVKTR

SEQ ID NO: 191331 - protein, 271 aa, Unknown
  Bacterial polypetide isolated from the Sargasso Sea
KCVGAGGKHNDLENVGYTPRHHTFFEMLGNFSFGDYFKERAIELAWDLITKEFGLDKNRLYVTVYHDDDEAFNYWKKIAGLSEDKIIRIATSDNFWSMGETGPCGPCSEIFYDHGDHLEGGLPGTKNEDGDRFIEIWNLVFMQFEQISKDKRINLPKPSVDTGMGLERIAALLQGTHDNYETDHFKKIINSAAEILKVQLNKDNLASFRVIADHLRASSFLIAEGVLPSNEGRGYVLRRIMRRGMRHSHLLGSKEPIFYNVFKTLKDEMKG

SEQ ID NO: 191332 - protein, 142 aa, Unknown
  Bacterial polypetide isolated from the Sargasso Sea
MNSKELRQNFIDYFTKKKGHTFIRSSSVSPIDDPTLLFTNAGMNQFKDIFLGSIKPESTKVTNSQKCIRVSGKHNDLEEVGVDNFHHTFFEMLGNWSFGDYYKSDAIKWAWDYLTEVLSLDKSRLWVTVYKNDLESENLGKS

SEQ ID NO: 191333 - protein, 213 aa, Unknown
  Bacterial polypetide isolated from the Sargasso Sea
DNTRAYHSATHLLHESLRRVLGTHVTQKGSLVEPSRLRFDFSHMKPILNEEIDKIENFVNTMVSKKSDVKTRLMTPDEAVENGALALFGEKYGDEVRVLSMGDENGKYFSTELCGGTHVKNTGDIGKFKIVSQSSIAAGVRRIEALRDKQLEEYLKNKEKLSNLSAEKDEETIKDLSQQIIKLGGKPSLEEADQKTLIKNLTKQLEAISVNTI

SEQ ID NO: 191334 - protein, 285 aa, Unknown
  Bacterial polypetide isolated from the Sargasso Sea
MIKKSNSKSISGKEVFELFDTYGFPSDLTSLILKERKMTFNNEEYQTELSKQRERSKQSTKTIASDWIILNEQQGDDFCGYDKLSCDTKVNQYRNISVNGKQVCQIILNETPFYPEGGGQAGDKGKLIFENKFEIIVYDTKKENGKIIHYTDLSDIDFKKNVTAVVNSLNRNDSSSNHTSTHLLHQALRNVLGDHVEQKGSSVTSENLRFDFSHFKKIEEQQLKEIQNFVNDKIDDSIDLIEKRDEDYDTAISNGAIGLFGEKYGKKVRTIKFGESYELCGGTHV

SEQ ID NO: 191335 - protein, 273 aa, Unknown
  Bacterial polypetide isolated from the Sargasso Sea
GGQVGDRGKFKSKNAEGSILDCKKSGKVFMHLIKLDKGSLKIDDKIEVNVNKEKREKTEAHHSATHLVHAALKRVLGEHVKQKGSLVDEHKLRFDFSHDEPLSDEEITKIEDLVNQEILKNSAVTTKIMDLEDAKNSGAESLFGEKYEDQVRVLSIGEDDFSLELCGGTHISRTGDLGIFIITSQSSVASGIRRIEALSGPRAQEYLSNLKNQTMQLQKLLNAPAEEIEDKVSKLLKENKSLKKGGKTAKAATIKSSNTHDIDNFKLLIEEAE

SEQ ID NO: 191336 - protein, 260 aa, Unknown
  Bacterial polypetide isolated from the Sargasso Sea
VKQEDKNISSFRVIADHLRASSFLLAEGVLPSNEGRGYVLRRIMRRGMRHSHLLGSKEPIFYKIFDSLKNEMSKNYPELERSQSLIKETLRMEEEKFLVLLDRGIKILNDEIEKIDKVLPGDVAFKLYDTYGFPLDLTEDILKNKSLKVDQQKFDELMKKSKQLAKKNWKGSGDSSEEAIWFSIKDKIGPTEFLGYESNRSEGVVLILIKDNKEIKSLSSGQEGMIITNQTPFYGESGGQLGDKGTIVSGNSVFEVDDTQ

SEQ ID NO: 191337 - protein, 253 aa, Unknown
  Bacterial polypetide isolated from the Sargasso Sea
AIELAWNLITKEFKIPKDKIIVSVYADDIDAFNLWKKIAGLPESKIYKISTNDNFWSMGDLGPCGPCSEIFYDHGEHLEGGPPGSKNQDGDRFIEIWNLVFMQFEQISKDKRINLPKPSVDTGMGLERISALLQGTHDNYATDHFKTLIEASSSLTKTKVTKENIASHRVIADHLRASSFLIAEGVLPSNEGRGYVLRRIMRRGMRHSHTLGSKEPIFHKMIPTLIKEMSDSYPELKRAEPLITETLKNEEEK

SEQ ID NO: 191338 - protein, 280 aa, Unknown
  Bacterial polypetide isolated from the Sargasso Sea
VIADHLRASSFLIAEGVLPSNEGRGYVLRRIMRRGMRHSHLLGSKEPVFYNLFDTLKNEMSGNYPELVRAESLIKETLRMEEEKFLVLLDRGIKILNDEISKIDKVLPGEVAFKLYDTYGFPLDLTEDILRNKSMSIDTEKFKTLMKQSRELAKKNWKGSGDAAVEDIWFGIKDRLEPTEFLGYETNQAEGVVLSLLKENKEVDQLKENDEGMIIVNQTPFYGESGGQVGDTGEIISNEFKFEVTDVQKKLGDLFVHYGKVVSGSIKLKDSVEMKINVER

SEQ ID NO: 191339 - protein, 238 aa, Unknown
  Bacterial polypetide isolated from the Sargasso Sea
NYDNDLFLPIIIALQEIAGSSYSSNPIPHRVISDHIRMLCFSIADGALPSNDGRGYVLRRILRRASKFGRNIGLENPFLFQLVSVVGEIMKDVFPEILEKKSHIEKVILSEEESFNNALDRGLHHFEKNIKSLKGKTISGEQAFKLYDTYGFPLDLTVLLAKEKNMVVDMDGFESCMDDQRKKAKAKGKFSTVSDELSWEILSEDDDSKFLGYDITDTISEITRFCTKGDNLTYLILN

SEQ ID NO: 191340 - protein, 277 aa, Unknown
  Bacterial polypetide isolated from the Sargasso Sea
PGLEKRDYVRATTSQKCVRAGGKHNDLENVGYTPRHHTFFEMLGNFSFGDYFKEQAIHYAWDLITKVFGIDKNRLYVTVFHEDDEAFNFWKKIAGFSDDRIIRIDTSDNFWSMGETGPCGPCSEIFFDHGDHLPGGLPGSKDEDGDRFIEIWNLVFMQFEQVTKDKRINLPKPSVDTGMGLERIAALLQGSHDNYETDHFKKIIGSASEITKVKSDKSNLASFRVIADHLRASSFLIAEGVLPSNEGRGYVLRRIMRRGMRHSHLLGSKEPVFYNFV

SEQ ID NO: 191341 - protein, 308 aa, Unknown
  Bacterial polypetide isolated from the Sargasso Sea
TQKGSLVSPDRLRFDFSHNKPIEKDEMVKINKIVNEIVEGASEVQTRIMTPKEAISLGALALFGEKYGDEVRVVFMGKEKNGFFSTELCGGTHVKNTKEIGKFKVINQSSIASGIRRVEALRNKKLKDYEKLLKKDKSLKEKNLKNQVDLIKNDLLKLKVKPDFKDNIDLSENLKNLNKQLEKIKIRNIIEDKNKNIVKDKKVNSFLFRQQVLKDFPPKELRSVIDIGKKDIKNGIVVSISTFEGKVGVAIGLTKELTKKFDAVQLVKLASEVLGGKGGGGRKDFAQAGGSQKEKIEEVFKILIDKIS

SEQ ID NO: 191342 - protein, 269 aa, Unknown
  Bacterial polypetide isolated from the Sargasso Sea
GYEFDKAEGMVLKISKGNNFFENAKKGDDVEIITNQTPFYAESGGQVGDQGIISNSKCKINIKDTQKKMGDLFVHYGTVEKGSFKVGDTVNLEIHIQKRNNSRANHSATHLLHESLRRTLGKHVTQKGSLVSPDRLRFDFSHNKPIEKDEMIKINKIVNEMVRGASDVQTRIMTPKEAVSLGALALFGEKYGDEVRVVFMGKEKNGFFSTELCGGTHVKNTKEVGEFKVINQSSIASGIRRVEALRNKQLQDYEKSLKKDKSLKEKNLK

SEQ ID NO: 191343 - protein, 277 aa, Unknown
  Bacterial polypetide isolated from the Sargasso Sea
VLKIAALLQGTHDNYETDHFKKIINAIAETVKKKPDQNNISSFRVIADHLRASSFLIAEGVLPSNEGRGYVLRRIMRRGMRHSHLLGSKEPIFFNIFKTLMDEMSGNYPEIKRAEALIKETLKMEEEKFLVLLDRGMKILEEEISKIDKILPGEVAFKLYDTYGFPLDLTQDILKNKSLQIDNQKFDQLMKQSKELAKKNWKGSGDSAVDDIWFSIKDKLGPTEFLGYETDQAEGVIQTLIKNNEQVKSLKTGDEGMIIVNQTPFYGESGGQVGDSG

SEQ ID NO: 191344 - protein, 307 aa, Unknown
  Bacterial polypetide isolated from the Sargasso Sea
PHNDPTLMFANSGMVQFKNIFTGKEKQNYNRAVTSQKCVRAGGKHNDLENVGYTARHHTFFEMLGNFSFGDYFKDNAIEFAWNLITKEFGIDQKKLLVTVFSEDETSYNLWKKIAGLNDKKIIKINTSDNFWSMGDTGPCGPCSEIFYDHGEKYSGGPPGSKDEDGDRFIEIWNLVFMQFEQISSSERVNLPKPSIDTGMGLERICALLNNTNDNYKTDLFIPLINKSIDLLNDDNQSNSPSHRVIADHLRSSSFLIADGVMPSNEGRGYVLRRIMRRGMRHAHTLGNKEPIFDKIFPTIIRYIQRI

SEQ ID NO: 191345 - protein, 234 aa, Unknown
  Bacterial polypetide isolated from the Sargasso Sea
DLIIETLKNEEEKFSSLLERGMKILDQNLDKVKNNILPGEIAFKLYDTYGFPLDLTADILKSKNIKVDSSAFDKAMLKSKELARASWKGSGDKFVEEKWFKVREQLNPTEFLGYEFNKAEGIVLKILKDNKFVENAKEGDVVEIITNQTPFYGESGGQIGDEGIISNPKCKIIIKDTQKKMGDLFVHYGTVQKGSFKVGDNVNLEINIQKRNNSRANHSATHLLHESLRRTLGK

SEQ ID NO: 191346 - protein, 289 aa, Unknown
  Bacterial polypetide isolated from the Sargasso Sea
EKNKHKIVESSNLVPNNDPTLMFANSGMVQFKNVFTGLEKRDYVRATTSQKCVRAGGKHNDLENVGYTPRHHTFFEMLGNFSFGDYFKEQAIHYAWDLITKDFGIDKERLYVTVFHEDDEAFNFWKKIAGFSDDRIIRIATSDNFWSMGETGPCGPCSEIFFDHGDHLSGGLPGSKDEDGDRFIEIWNLVFMQYEQVSKDNRINLPKPSVDTGMGLERIAALLQGSHDNYETDHFKKIISSASEIVKVKSDKSNLASFRVIADHLRASSFLIAEGCFTLKWKEEDMYLE

SEQ ID NO: 191347 - protein, 330 aa, Unknown
  Bacterial polypetide isolated from the Sargasso Sea
GDRFIEIWNLVFMQYEQISKEKRINLPKPSVDTGMGLERMTAVLQGTHDNYEIDHFRKIMASSSEITKTSINEKTIASHRVIADHLRASSFLIAEGILPSNEGRGYVLRRIMRRGMRHAHSLGSKSPLFHKLFNVLLNEMKNSYPELINGKDLIIETLKNEEEKFSSLLERGMKILDENLSKVKNNTLPGSIAFKLYDTYGFPVDLTADILRTKNIKVDSSSFEKEMEKSKALARANWKGSGDKSIEERWFKIREELKPTEFLGYEFDKAEGVVLKLSKDNKFVDYASAGDKIEIITNQTPFYGESGGQVGDQGIIYTSECEINIIDTQK

SEQ ID NO: 191348 - protein, 270 aa, Unknown
  Bacterial polypetide isolated from the Sargasso Sea
QLHFTESLGGQVGDQGYIFNSNCKIKINYTHKKMGDLFVHYGKVEKGSISIGQSVNLEIDVLKRNNLKAYHSATHLLHESLRRTLGKHVTQKGSLVSPERLRFDFSHNKPIEKEEMTKINNIVNEIVEGSSDVQTRIMTPKEAVGMGALALFGEKYGEEVRVVFMGKENNGFFSTELCGGTHVKNTREVGKFKVISQSSIASGVRRVEALRDKQLEEYEKTQKEDKSLKESNLKKDIKLIENELQKLKIEPDFNEDLDLSENLKNLNKQL

SEQ ID NO: 191349 - protein, 282 aa, Unknown
  Bacterial polypetide isolated from the Sargasso Sea
MAAAESSPSAASAPRSGEDIREAFLSFYAERGHQRMASASLIPEDPTVLLTIAGMLPFKPVFLGQQQRPAPRATSSQKCIRTNDIENVGRTARHHTFFEMLGNFSFGDYFKQQAIEWAWELSTQVYGIDPRNLVVSVFREDDEAEQIWRDVVGVNPKRIIRMDEADNFWASGPTGPCGPCSEIYYDFNPELGDEGIDLEDDDRFIEFYNLVFMQYNRDAEGTLTPLANRNIDTGMGLERMAQILQKVPNNYETDLIFPLIQAAADLAGVDYHQLDEKGKTSL

SEQ ID NO: 191350 - protein, 199 aa, Unknown
  Bacterial polypetide isolated from the Sargasso Sea
MADKSLNEIRNTFLKYFEKNEHKIVESSNLVPNNDPTLMFANSGMVQFKNVFTGLEKRDYLRATTSQKCVRAGGKHNDLENVGYTPRHHTFFEMLGNFSFGDYFKEQAIHYAWDLITKDFGIDKDRLYVTVFHEDDEAFNFWKKIGGFSDDRIIRIATSDNFWSMGETGPCGPCSEIFFDHGDHLPGGLPGSKDEDGDR

SEQ ID NO: 191351 - protein, 321 aa, Unknown
  Bacterial polypetide isolated from the Sargasso Sea
MTSAQLRRAFLDFFASKGHQIVSSSSLIPGNDPTLLFTNAGMVQFKDVFLGQDKRSYNRAVTAQRCLRAGGKHNDLENVGYTARHHTFFEMLGNFSFGDYFKQDAIQYAWEFLTEVVKLPKEKLWITVYATDDEAFDIWTKHIGVPVERAIRIGDNKGAPYASDNFWAMGDTGPCGPCTEIFYDHGDHIWGGPPGSAEEDGDRFIEIWNNVFMQFNRHADGRMEPLPKPSVDTGMGLERIAAILQNVHSNYEIDTFAALIKATAAITGATDLNDKSLRVVADHIRSCSFLVADGVMPSNEGRGYVLRRIIRRAIRHGNKLG

SEQ ID NO: 191352 - protein, 254 aa, Unknown
  Bacterial polypetide isolated from the Sargasso Sea
MNSNQIRSTFLNYFKKNGHEIIHSSSLLPDNDPTLMFANSGMVQFKNIFTGKETRNYSRATTAQKCVRAGGKHNDLENVGYTTRHHTFFEMLGNFSFGDYFKELAIELAWKLITKEYSINKDRLLVTVYSDDQEAFDLWKKIAGLSENKIIKISTSDNFWSMGETGPCGPCSEIFYDHGDKYEGGPPGSPNEDGDRFIEIWNLVFMQYEQISKSERINLPKPSIDTGMGLERMTALLDGSNDNYSTDLFQPIIN

SEQ ID NO: 191353 - protein, 253 aa, Unknown
  Bacterial polypetide isolated from the Sargasso Sea
DKVLPGEVAFKLYDTYGFPLDLTEDILRNKSMSIDTEKFKSLMKESRELAKKNWKGSGDAAVEDIWFGIKDRLEPTEFLGYETNQAEGIVLSLLKENKEVDQLKENDEGMIIVNQTPFYGESGGQVGDTGQIVSNEFKFEVTDVQKKLGDLFVHYGKVVSGSIKLKDSVEMKINIKRRDDTRAYHSATHLLHESLRRVLGDHVTQKGSLVEPSRLRFDFSHMKPIQNDEIDKIENYVNNMVSKNSDVKTRLMT

SEQ ID NO: 191354 - protein, 318 aa, Unknown
  Bacterial polypetide isolated from the Sargasso Sea
AISSKNLTLGAEAIKETLYNEEIKFRETLSKGLEILGQEIPNIKNNKLDGKIAFKLYDTFGFPLDLTQDYLRSKDIDVDVESFDASMKIQKEEARSSWKGSGDGNIEKLWFDIARKTKPTVFKGYKDTTLKATVTALVLDLEAVDELSDKTKQSAIITDETCFYAESGGQVGDKGIISSENAEFRVTDTRKTPQGIFIHFGNIISGNFKIGHEVKLKIDTSLRDLIKKNHSATHLLHAALRNNLGLHVAQRGSLVNENKLRFDFSHNKQISSNQIDTIQKEVTNIISNSCETKIDIKSQEEAIQLGAIALFGENMEKR

SEQ ID NO: 191355 - protein, 127 aa, Unknown
  Bacterial polypetide isolated from the Sargasso Sea
MATSPLTTNEVRKIYLDFFEEKGHTLVESASLVPLNDPTLLFINAGMAPFKDLLLGVEKRNYTRAVSSQRCMRAGGKHNDLDNVGYTARHHTFFEMLGNFSFGDYFKEDAISFAWELLTERYKIDPK

SEQ ID NO: 191356 - protein, 153 aa, Unknown
  Bacterial polypetide isolated from the Sargasso Sea
MNSSEIRSTFLNYFKKNGHEIVHSSPLIPHNDPTLMFANSGMVQFKNIFTGKENRDYNRAVTSQKCVRAGGKHNDLENVGYTARHHTFFEMLGNFSFGDYFKDDAIKFSWDLITKELGIDKKKLLVTVYKEDDDAYNLWEKNLRVWMMIKLLR

SEQ ID NO: 191357 - protein, 317 aa, Unknown
  Bacterial polypetide isolated from the Sargasso Sea
MGEILLTDVRKKFLDYFKKNNHKIVDSSNLVPNNDPTLMFTNSGMVQFKNVFTGLEKRDYKTATTSQKCVRAGGKHNDLENVGYTPRHHTFFEMLGNFSFGDYFKEQAIIHAWSLLTKDFQLPKEKLSVTVFHEDEESFKLWKKIASLSDDKIIKIATSDNFWSMGDTGPCGPCSEIFYDHGEKLPGGPPGSPDEDGDRFIEIWNLVFMQYEQISKEKRIDLPKPSVDTGMGLERMTAVLQGTHDNYKIDHFKKIMDASSDLLKSPINASTIASHRVIADHFRASSFLIAEGILPFYEGRGYVLRRIMRRGMRHAHS

SEQ ID NO: 191358 - protein, 275 aa, Unknown
  Bacterial polypetide isolated from the Sargasso Sea
IEEIVNNMVSKNSEVKTRLMTPDEAVENGALALFGEKYGDEVRVLSMGDEDGKYFSTELCGGTHVKNTGDIGKFKIVSQSSIAAGVRRIEALRDKQLEEYLKNKEKLSNLSAEKDEETIKDLSQQIIKLGGKPSLEETDQKTLIKNLNKQLETISVNTILEDKSKNIIKDEEINGVKLRLQKIDGLPPKELRKLVDKGKKDLGEGIVVVFANKDDKVGLAVGVTDNLTNKFDAVQFVKVGSEIIGGKGGGGRKDFAQAGGQDQSKIEEAFEKLKS

SEQ ID NO: 191359 - protein, 311 aa, Unknown
  Bacterial polypetide isolated from the Sargasso Sea
RRQGKFHFDKTPFYAESGGQISDKGIGKKESGIIEIFNVQKTKDNFYLHQSIVKKGIFKLGDKLVLEINTDYRFSISSHHSATHIIHYALRNILGTHVRQAGSLVEDSRLRFDFSHFNNIDDITIKSIERLCNEKIIENSKVTINENVEYKKAIKEGANAFFEEKYGDLVRVVKIGDYSMELCGGTHVKSSGDLGSITISSENSISSGIRRIEAYTSIPSYNFLLNLRDKLNVSSRLLSASLEKVPDEIERLKKENIELKHKIIEFEKSMSKGLANQLKEDAVIIEGVKVISFLTNDMTANELKSLWDELK

SEQ ID NO: 191360 - protein, 173 aa, Unknown
  Bacterial polypetide isolated from the Sargasso Sea
MAKTLNEIRSAFLDYFEKNDHKIVESSNLVPNNDPTLMFANSGMVQFKNVFTGLEKRDYQRATTSQKCVRAGGKHNDLENVGYTPRHHTFFEMLGNFSFGDYFKERAIELAWNLITKEFGLDKNRLYVTVYHDDDEAFNYWKKIAGLSENKIIRIATSDNFWSMGETGPCGPC

SEQ ID NO: 191361 - protein, 261 aa, Unknown
  Bacterial polypetide isolated from the Sargasso Sea
MKNSKQIRQEFISFFEKRGHRFVRSAPVVPNDDPTLLFSNSGMAQFKDVFLGTGIRDYNRAVNSQKCIRASGKHNDLEDVGYDNYHHTFFEMLGNWSFGDYFKKEAIEWAWELMTDQWGLPKEKMWATVFAGGDGVEADEDAENLWKTCTDIASEQILRFDKNDNFWEMGEVGPCGPCSELHIDLGHGTCPLSDKHVCAVNLEGCWRFVELWNLVFIQYQRFSDGHLEELSAQHVDTGMGLERICRVLQDADFNYSTDLFV

SEQ ID NO: 191362 - protein, 310 aa, Unknown
  Bacterial polypetide isolated from the Sargasso Sea
ATHLLHESLRRTLGKHVTQKGSLVSPDRLRFDFSHNKPIEKEEMEKINNIVNEIVVGSTDVQTRIMTPKEAVNMGALALFGEKYGEEVRVVFMGKENNGFFSTELCGGTHVKNTKEVGKFKVISQSSIASGVRRVEALRDKQLEDYEKAQKLDKTQKESNIKDEIALIKKELQKIKIKPDYKDNLDLIENLKNLNKQLNKVKIESIKKDKSKNIIQDKQIGGILIREQILKDFPPKELRGIIDQGKKEIKSGVIISISTFEDKVGVAIGISQDLTAKFDAVTLVKIASEILGGKGGGGRKDFAQAGGVDQ

SEQ ID NO: 191363 - protein, 291 aa, Unknown
  Bacterial polypetide isolated from the Sargasso Sea
AKKIKPTTFEGYKETSVLANISALVLDSEEVQNLSDNLEQSAIITDKSCFYAESGGQVGDKGTITSDTAEFKVTDTRKTPQGIFIHFGNVTSGNFKIGQEVKLKIDTSLRELIKKNHSATHLLHAALRNNLGTHVAQRGSLVNENKLRFDFSHNKQISTEQIEIIQKEVTNIISNSCETQIDIKSQDEAIKQGAMALFGEKYGDEVRVVTLGKNNNKPYSIELCGGTHVTNVQNIKKFHIISEESVSSGVRRIEACTGDRVDEFINNKLKESKLLEKKLDDKIRDLITQIN

SEQ ID NO: 191364 - protein, 301 aa, Unknown
  Bacterial polypetide isolated from the Sargasso Sea
PSIDTGMGLERMTALLEGSNDNYSTDLFQPLINESKNLCGDENSINNPSHRVIADHLKSSSFLIADGVLPSNEGRGYVLRRIMRRGMRHAHSLGNKDPIFHKLFPTFLDGIKKSYPELERAKDLITNTFLNEETKFKETVEKGIKILEEEISNSTNIFDGEVAFKLYDTYGFPLDLTQDYLKNRNIKVDLKTFDKKMLDQKQRARKNWKGTGDIQDDKIWYEITSEIEPTEFLGYQDIASESKILAIISNGKKINIIEKNQNGFIILNQTPFYGESGGQVGDKGFLENDNFKFEVLNTTKI

SEQ ID NO: 191365 - protein, 292 aa, Unknown
  Bacterial polypetide isolated from the Sargasso Sea
PPGSLDQDGDRFIEIWNLVFMQFEQVSNDKRIDLPKPSVDTGMGLERITAVLQGTHDNYEIDHFKKLISASSEITNTKIDNHTIASHRVIADHLRASSFLIAEGVLPSNEGRGYVLRRIMRRGMRHAHTLGCKKPIFFKLFDVLLNEMSKSYPELNTGKDLILETLKNEEEKFSSLLDRGMKILNQNLQKVKNNILPGEIAFKLYDTYGFPLDLTADILKNKNIKVDTSAFDKAMKSSKEKARASWKGSGDKSVEEKWFKVREELNPTEFLGFELDKAEGVVLKISMGNKFV

SEQ ID NO: 191366 - protein, 310 aa, Unknown
  Bacterial polypetide isolated from the Sargasso Sea
QNDPTLMFANSGMVQFKNVFTGLENRDYKRAVTAQKCIRAGGKHNDLENVGYTLRHHTFFEMLGNFSFGDYFKDDAINYAWKFITSDLAINKEKLCVTIYHDDEQAYVAWKKVAGLSDDRIIRISTKDNFWSMGETGPCGPCSEIFYDHGEKFTGKLPSETDETGDRFVEIWNLVFMQFEQLNSNERIDLPKPSIDTGMGIERIAAVMQGTNDNYQVDSIKEIINNSIDLTKADDNKLVSSHRVIADHLRSSCFLIADGVLPSNEGRGYVLRRIMRRAMRHVHLLQYKDTLMHKLVSTLMLNMKDAYPEC

SEQ ID NO: 191367 - protein, 302 aa, Unknown
  Bacterial polypetide isolated from the Sargasso Sea
QKLNSDKSNLASFRVIADHLRASSFLIAEGVLPSNEGRGYVLRRIMRRGMRHSHLLGSKDPVFYNLFDTLKNEMSGNYPELVRAESLIKETLKMEEEKFLVLLDRGIKILNDEISKIDKVLPGEVAFKLYDTYGFPLDLTEDILRNKSMSIDTEKFQSLMKESRELAKKNWKGSGDTAVEDIWFGIKDKLEATEFLGYETNQAEGIVLSLLKDNKEVDQLKVNDEGMIIVNQTPFYGESGGQVGDTGEIVSNDFKFEVTDVQKKLGDLFVHYGKVKSGSIKLQESVELKINVERRDNTRAYH

SEQ ID NO: 191368 - protein, 324 aa, Unknown
  Bacterial polypetide isolated from the Sargasso Sea
  misc_feature (324)..(324): Xaa can be any naturally occurring amino acid
DKVGATEFLGYAIVQSEGVILKLIKNNKEVDSLKTGEKGVIVVNQTPFYGESGGQLGDIGKINLGNNSFTVNDVQKKLGNLFVHYGVMEGGSLKVGESVELKIDSARRENIKAYHSATHLLHESLRRTLGKHVMQKGSLVAPDRLRFDFSHMKPISNDEMLKIEEIANEIVNKKSDVITRIMTPEEGIEHGALALFGEKYGDEVRVVFMGDEGNKYFSTELCGGTHVKNTGDVGKLKVISQSSIAAGVRRIEALRDKQLEDFLKDKEKQSNLSAQKDEKTIEMLTKDIISFGGKPNLENKNPKDLIKDLTRQLEKLSIGKILNX

SEQ ID NO: 191369 - protein, 94 aa, Unknown
  Bacterial polypetide isolated from the Sargasso Sea
MSEIRKKFLDYFSRNGHQKLESSNIVPNNDPTLMFTNSGMVQFKNVFTGLEKKPFKTATTSQKCIRAGGKHNDLENVGYTPRHHTFFEMLGNFS

SEQ ID NO: 191370 - protein, 264 aa, Unknown
  Bacterial polypetide isolated from the Sargasso Sea
DISGFEKKLDEQKESARKNWSGSGSNLLDKIWYGISEKIPATEFIGYTSEESEAQILGIVNDGKEVDSISIKNDCSLILNQTVFYAESGGQIGDTGIISSDEGEFEVTDTQKRQNLIIHNGRLKSGNMSVNLNVNLKIDHERRSSCKAYHSATHILHQALRDTLGEHVTQKGSLVSFDKLRFDFSHHKPLTNEELRHVEKIANEVINSSSDVQTKLMKSDDAINSGALALFGEKYADDVRVLSIGIKNNNIYSTELCGGTHVNN

SEQ ID NO: 191371 - protein, 296 aa, Unknown
  Bacterial polypetide isolated from the Sargasso Sea
DLDNIGFTTRHHSFFEMLGNFSFGDYFKEEAIHYAWDFLTNNLKLDSKKLYVSVHESDDVSKDIWLNNIKVDPDKVLVLGDEDNFWQMGDTGPCGPCTEIYYDLGSRYDGVLPTEGDPKDRYIEIWNLVFTQYNKTSSGNLEELPQKCVDTGMGLERVQSIVEGLSDNYDSSIFLDLNNFIDSKLNLKAKEKYVKKILLDHIRACCHLIGDNVIPDREGRGYVLRRILRRSSRFIYKHNIKEPFLYQCAEVVCEKSKDFPSLKKDIIKIVDTIKTEETKYLKTLGKGIDIIESHLK

SEQ ID NO: 191372 - protein, 82 aa, Unknown
  Bacterial polypetide isolated from the Sargasso Sea
MADKTLNEIRSTFLKYFEKNGHKIVESSNLVPNNDPTLMFANSGMVQFKNVFTGLEKRDYKTATTSQKCVRAGGKHNDLENV

SEQ ID NO: 191373 - protein, 155 aa, Unknown
  Bacterial polypetide isolated from the Sargasso Sea
MAQKSLNQIRETFLKYFEKNDHKIVESSNLVPNNDPTLMFANSGMVQFKNVFTGLEKRDYQRATTSQKCVRAGGKHNDLENVGYTPRHHTFFEMLGNFSFGDYFKEKAIHYAWDLITKDFGIDKNKLYVTVFHEDDEAFNLWKKIAGFSDDKIIK

SEQ ID NO: 191374 - protein, 191 aa, Unknown
  Bacterial polypetide isolated from the Sargasso Sea
MKTNDVRTAFLDYFKNNGHEVVRSSPLVPHNDPSLLFTNAGMVQFKNAFTGLEKPNYNSAATSQKCVRAGGKHNDLENVGYTARHHTFFEMLGNFSFGDYFKERAIELAWTLITKEFGVDSKRLLVTVYHEDEEAFKIWKKVAGFSENRIIRISTNDNFWAMGDTGPCGPCSEIFYDHGDHILGGPAWQCR

SEQ ID NO: 191375 - protein, 285 aa, Unknown
  Bacterial polypetide isolated from the Sargasso Sea
LRRIMRRGMRHSHLLGSKEPIFYNIFKTLMEEMKGNYSELQRAESLIKETLKMEEEKFLVLLDRGIKILNNEITKIDKVLPGEVAFKLYDTYGFPLDLTEDILKNKSLKIDNEKFHALMKESKELAKKNWKGSGDSAIDDIWFGIKDKLGSTEFLGYETNQAEGVVISLLKDNKEVEILNSGDEGMIITNQTPFYGESGGQIGDRGKIISGEFKFEVSDVQKKLGDLFVHYGNVKNGSVKLNQNVEMKIDVQRRDNIRAYHSATHLLHESLRRVLGSPCYSKKDL

SEQ ID NO: 191376 - protein, 311 aa, Unknown
  Bacterial polypetide isolated from the Sargasso Sea
TGQMGQAFPELLRAQALITETLELEETRFKRTWDRGLKLLAEETESLNVGGELAGEVAFKLYDTFGFPLDLTQDALRREGYGVDLAGFDTEMERQKAEARAAWSGSGEAATEQVWFGLREQVGATDFLGYDADDAEGQVLALVVDGESVTEASDGADVAVITNQTPFYGESGGQQGDKGALSTEGVTVNVSDTQKKLGDLHVHIGTVSGGTLKVGDDLRMSVDADRRTSLRSHHSATHLLHATLRRALGDHVAQKGSLVAEDRLRFDISHPKPIAAEELSEIERAVNYQIRVNSDVTTRLMTPDEAGKPAR

SEQ ID NO: 191377 - protein, 151 aa, Unknown
  Bacterial polypetide isolated from the Sargasso Sea
MAKTLNEIRTTFLKYFEKNDHKIVDSSNLVPNNDPTLMFANSGMVQFKNVFTGLEKRDYQRATTSQKCVRAGGKHNDLENVGYTPRHHTFFEMLGNFSFGDYFKERAIELAWNLITKDFGIDKNRLYVTVFHEDEEAFNFWRKIAGFSDDR

SEQ ID NO: 191378 - protein, 298 aa, Unknown
  Bacterial polypetide isolated from the Sargasso Sea
FEREMKAQRVRARSASSFGLDYNTLVKVDVPTEFTGYKATAGSAKIVAIYKDGKSVDVLSEGEEAVVVLDQTPFYAESGGQIGDCGFLSSTSGRFDVRDTTKTGGAFLHHGVLVLGNLTVGAPVDTQVDADVRHATALNHSATHLLHAALRQVLGEHVQQKGSLVDSQRLRFDFSHFEAIKPEQIKALEDIVNAEIRKNTPVETEETDIETARNKGAMALFGEKYGDEVRVLSMGGSFSVELCGGIHANRTGDIGLLKIISEGGVASGVRRIEAVTGAAALAYLNAAEEQLKEAAGLV

SEQ ID NO: 191379 - protein, 207 aa, Unknown
  Bacterial polypetide isolated from the Sargasso Sea
ESLRRTLGKHVTQKGSLVSPERLRFDFSHNKPIEKEEMIKINKVVNEIVEGSTDVQTRIMTPKEAVKMGALALFGEKYGEEVRVVFIGKESNGFFSTELCGGTHVKNTKEVGKFKVISQSSIASGVRRVEALRDKQLQEYEKFQKQDKFTKEKTSKDQLEKIKKELLRYKIKPDLNENKDLAENLKVLTKQLEIIKIQNVINDKNKN

SEQ ID NO: 191380 - protein, 291 aa, Unknown
  Bacterial polypetide isolated from the Sargasso Sea
IVEKGNIKTGDVIKMSVEKEKRSAIAIHHSSTHLVHAALREVLGDHVNQKGSLVDENKLRFDFSHKQPLSQEEIAKIEAIVNKEALNNLEVKTELMKLDDALKSGAMALFGEKYDDDVRVLSMGNNSYSVELCGGTHVKRTGDIGFFIITSQSSVASGIRRIEAVAGMKSIEHINKIREINSSLQSVLNVSSEDIQEKIKSLIEENKELKKKSGNKKSKKSVVFSETYEINDWKLIVEQVEIDDTKDLRALVDDQKNTNEKVCIVILNAFKNKVALVCGVTKNLTDSLSAK

SEQ ID NO: 191381 - protein, 280 aa, Unknown
  Bacterial polypetide isolated from the Sargasso Sea
SATHLLHESLRRTLGKHVTQKGSLVSPERLRFDFSHNKPIEKDEISKINQIVNKVVEGSSEVQTRIMTPKEAVSMGALALFGEKYGDEVRVVFMGKENNGFFSTELCGGTHVKNTKEIGKFKIIKQSSIAAGVRRVEALRDKQLKDYENLELVEKKEKSKEALETLKLLMKKLKELGEKPKLSEKDINISEQLFPKVKILSEQLNKAKIKFILNDAKQNRIKDIKVKNFILRYQVLDGLNTKELRNVIDAGKKEIKKGIVLAFKLLKKSRSSSRRNPRFN

SEQ ID NO: 191382 - protein, 260 aa, Unknown
  Bacterial polypetide isolated from the Sargasso Sea
IIILNQTPFYGESGGQVGDKGFLENDSFKFEVMNTTKIFGSYFLHKGKVISGECEIEDTIKASINTVNRDFIKYNHSSTHLLHAALRKILGKHVTQKGSLVNSEKLRFDFSHNNPIEKDQLMNIEEIVNAQIQKNGIVEIKIVDQKKAIEEGAMALFGEKYSDEVRVVTMSQENESFFSKELCGGTHVVKLGEISKFKITNQSSVASGIRRIEAVSNVAVDKYIKEIEINLLEKNKNQDNQIEDLKNKIKKINADYNLKI

SEQ ID NO: 191383 - protein, 309 aa, Unknown
  Bacterial polypetide isolated from the Sargasso Sea
FQLYDTYGFPVDLTSDILRTKNIQVDNVAFEKEMEKSKTLARANWKGSGDKSVEEKWFKIREELKPTEFLGYEFDKAEGIIIKISKDNKFVDSAGPGSEVEIITNQTPFYAESGGQVGDQGIIFNSDCKINITDTQKKMGDLFVHTGKIESGTIKINQSVNLEINVENRNNSKANHSATHLLHESLRRTLGKHVTQKGSLVSPERLRFDFSHNKPIETEEMIKINKVVNEIVDESTDVQTRIMTPKEAVKMGALALFGEKYGEEVRVVFMGKESNGFFSTELCGGTHVKNTKEVGKLKVISQSSIASGV

SEQ ID NO: 191384 - protein, 253 aa, Unknown
  Bacterial polypetide isolated from the Sargasso Sea
FDKAEGVIIKISKEGKFVDSASTEDEIEVITNQTPFYGESGGQVGDQGYIFNSDCKIKVNDTQKKMGDLFVHYGKVEKGSISIGQSVNLEIDVIKRNNSKAYHSATHLLHESLRRTLGKHVTQKGSLVSPERLRFDFSHNKPIEKEEMTKINNIVNEIVEGSSDVQTRIMTPKEAVGMGALALFGEKYGEEVRVVFMGKENNGFFSTELCGGTHVKNTKEVGKFKVISQSSIASGVRRVEALRDKQLEEYEKT

SEQ ID NO: 191385 - protein, 202 aa, Unknown
  Bacterial polypetide isolated from the Sargasso Sea
MQDFSTNHIRKIFLEFFQEKGHELVESSSLIPSNDPSLLFTNAGMVPFKDMLLGVEKRDYSRAVSSQRCLRVGGKHDDLDNVGYTARHHTFFEMLGNFSFGDYFKKEAIEFAWELLTERYNIPEEKLWITVHKDDQESEIIWIEQIGIDPNRLSRLDDNENFWTMGDTGPCGPCSEIYYDHGEHIKGEPPKIGSDPGDRFIE

SEQ ID NO: 191386 - protein, 176 aa, Unknown
  Bacterial polypetide isolated from the Sargasso Sea
MLLKDIRETFVNFFKKNDHQIVKSSSLIPDNDPTLMFTNSGMVQFKNFFTGVENPKVKAAVTSQKCVRAGGKHNDLDNVGYTARHHTFFEMLGNFSFGDYFKERAIKLAWELLTNEFNLPKDKLLVTVFHEDSEAIKLWKKCANLPDDRIIKISTSDNFWSMGPGWTLWSLLRDFL

SEQ ID NO: 191387 - protein, 96 aa, Unknown
  Bacterial polypetide isolated from the Sargasso Sea
MNSNQIRSTFLNYFKKNGHEIIHSSSLVPDNDPSLMFANSGMVQFKNIFTGKETRDYNRATTAQKCVRAGGKHNDLENVGYTTRHHTFFEMLGNFS

SEQ ID NO: 191388 - protein, 302 aa, Unknown
  Bacterial polypetide isolated from the Sargasso Sea
QKLIQASSAETKTHINEKTITSHKVIADHIRSSAFLIAEGVLPSNEGRGYVLRRILRRAIRHSNILGRKEPFMHNLVNCLVTEMGDAYPILKDGESNIKNTIEEEEIKFKETLDRGLNLLNDEINLNKKNTIFSGKKAFELYDTFGFPLDLTQDVLKSYGWTVNIKEFEKEMENQKIKSRESWSGSGDKILDKKIIKFLDKEISTEFIGYNKTEAEGEVILILKEGKLIEKLDKNDVGDVIFDKTVFYAESGGQIADNGEILSDKLQGKVIDCKKLIIGNDKVFFLHKIQINEGTLYKHVKC

SEQ ID NO: 191389 - protein, 246 aa, Unknown
  Bacterial polypetide isolated from the Sargasso Sea
DFKPELGDDEIDLEDDDRFIEFYNLVFMQYNRDAEGNLTPLANRNIDTGMGLERMAQILQKVPNNYETDLIFPLIQAAADLAGVDYHQLDDKGKTSLKVIGDHSRAVTQLICDGVTASNLGRGYILRRLLRRVVRHGRLLGIDKPFLVTMGEAAIALLKGAHPSVIERQEVILAELQREEARFLETLERGEKLLAEVLASKPKQISGAQAFELYDTYGFPLELTQEIAEEQGLTVALDGFEVAMEE

SEQ ID NO: 191390 - protein, 217 aa, Unknown
  Bacterial polypetide isolated from the Sargasso Sea
MTSSEVRQKFIDFFKSKDHKQISSASILNNYDDNLMFTNAGMNQFKNIFIGTQQPNDLRIVNSQKCLRVSGKHNDLEEVGIDTYHHTFFEMLGNWSFGDYFKEEIINWSFELLTDHYKIDKEDLYVTVFKGSEEDNTPADEESFDYWKKFFPDEKIIYCDKKENFWEMGEYGPCGPCSEIHIDIRSKDDKNKINARDLINKDHPHIIEIWNLVFILI

SEQ ID NO: 191391 - protein, 186 aa, Unknown
  Bacterial polypetide isolated from the Sargasso Sea
MKNSKEIRQDFISFFKDREHKFVRSAPVVPIDDPTLLFTNSGMAQFKEVFLGTGLREYNRAVNSQKCIRASGKHNDLEDVGHDNYHHTFFEMLGNWSFGDYFKEEAIMWAWELMTNVWGLEKEKFWVTVFEGGEGVEPDEEAEELWSNNTDINRNQILRFDKKDNFWEMGDVGPCGPCSELHIDLG

SEQ ID NO: 191392 - protein, 314 aa, Unknown
  Bacterial polypetide isolated from the Sargasso Sea
GTIVSGNSVLEVEDTQKKLGDLFVHYGSLKTGEMKINDVVEMKIDVERRDNLKAYHSATHLLHESLRRTLGKHVMQKGSLVAPDRLRFDFSHMKPITDEELVIIDNLVNEYVSNSSEVTTRIMTPKAAIEKGALAFFGEKYGEEVRVVSMGKEKEAYFSTELCGGTHVKNTGDIGKFKTVSQSSIAAGVRRVEALRDKQLEDFIKNKEKLSTLSTQKDEEMIKDLSSQIIKLGGKPNVNNKDLKEIIKNLSRQLEQLNVSSVLQDKTKNIIKDDKINNIKVRFQKVQDLPPKDLRKLVDNGKKELGDGIVIVFA

SEQ ID NO: 191393 - protein, 288 aa, Unknown
  Bacterial polypetide isolated from the Sargasso Sea
NSGMVQFKNVFTGLEKRDYQRATTSQKCVRAGGKHNDLENVGYTPRHHTFFEMLGNFSFGDYFKERGIELAWNLITKDFGLDKNRLYVTVFHEDDEAFNFWKKIAGFSDDKIIRIATSDNFWSMGETGPCGPCSEIFYDHGDHLKGGLPGTKDQDGDRFIEIWNLVFMQYEQISKDKRIDLPKPSVDTGMGLERIAALLQGTHDNYQTDHFKKLISSISEVTKVKQSDNNISSFRVIADHLRASSFLLAEGVLPSNEGRGYVLRRIMRRGMRHSHLLGSKEPIFYKIF

SEQ ID NO: 191394 - protein, 304 aa, Unknown
  Bacterial polypetide isolated from the Sargasso Sea
EDVQKKLGDLFVHYGKVKKGSIKINDNVEMKIDVERRDNVRAYHSATHLLHESLRRVLGTHVTQKGSLVEPDRLRFDFSHMKPISIEEIEKIETYVNSMVSNSSDVKTRIMTPKEAVSNGALALFGEKYGDEVRVLSMGSEKDKYFSTELCGGTHVRNTSDIGKFKIISQSSIAAGVRRVEALRDKQLNEYLKNKETQSDLILQKDEKIIKELSEKIIKAGGKPDLCNKDQKGLIKDLSKQLESLSLRSILKDKNKNIINDQTINGVKIRLQKVEGLSPKDLRKLVDNGKKELIEGIVIVLPTK

SEQ ID NO: 191395 - protein, 262 aa, Unknown
  Bacterial polypetide isolated from the Sargasso Sea
IFYDHGDKYEGGPPGSPNEDGDRFIEIWNLVFMQYEQISKSERINLPKPSIDTGMGLERMTALLDGSNDNYSTDLFQPIINESTKLCRNESSITNPSHRVIADHLKSSSFLIADGVMPSNEGRGYVLRRIMRRGMRHAHSLGNKEPIFYKLFPIFLDGIKNSYPELDRAKDLITNTLMNEETKFKETVEKGIKILDEEISNSTNIFNGEVAFKLYDTYGFPLDLTQDYLKSKNIEVDIKTFEQKMLDQKERAFLGLRWSLDN

SEQ ID NO: 191396 - protein, 243 aa, Unknown
  Bacterial polypetide isolated from the Sargasso Sea
FFTESKLRRFSQNASGQWQFILEKTPFYPESGGQVGDHGFLKQNDNTWKVIDVQKMGDAIIHICEATDKNLKKTSPDNSKITASVDEIFRLSTTNNHTSAHLMHEALRQILGEHVNQAGSLVNSEMLRFDFTHFEKLTETQLEEIENLVNFVIRQNIKTHIYETPFEEAISSGIIALFGEKYGDIVRVVKISDFSEELCGGCHVKATGQIGQFRIVSEEGISAGIRRVVAVTGKNAELMTQEQ

SEQ ID NO: 191397 - protein, 100 aa, Unknown
  Bacterial polypetide isolated from the Sargasso Sea
MHSSEVRKKFIDFFSSKGHQIVESSSVLPLDDQTLLFTNSGMNQFKDVFLGAEKRDYLTATSAQRCIRAGGKHNDLENVGYTLRHHTFFEMLGNFSFGDY

SEQ ID NO: 191398 - protein, 306 aa, Unknown
  Bacterial polypetide isolated from the Sargasso Sea
LVLLDRGIKILNDEISKIDKVLPGEVAFKLYDTYGFPLDLTEDILRNKSMSIDTEKFQSLMKESRELAKKNWKGSGDAAVEDIWFGIKDKIEPTEFLGYETNQAEGIVLSLLKENKEVDQLKQNDEGMIIVNQTPFYGESGGQVGDTGEIVSNDFKFEVTDVQKKLGDLFVHYGKVKSGSIKLQENVELKIDVERRDNTRAYHSATHLLHESLRRVLGTHVTQKGSLVEPSRLRFDFSHMKPILNEEIDKIEEFVNKMVSKKSVVKTRLMTPDEAVENGALALFGEKYGDEVRVLSMGDEDGKYFS

SEQ ID NO: 191399 - protein, 255 aa, Unknown
  Bacterial polypetide isolated from the Sargasso Sea
EVSTRIMTPDAAIEIGALALFGEKYGDEVRVVQMGGPSDAKGRGAWSVELCGGTHVCRTGDVSLLRIVSESAVAGGVRRIEAVTEAGALEWIDGRERALTKAADLLKVSPEQLADRVARLVEDNRKAERDITSLRRKLAAGSTGGDAPSVVNGVNFVGRLLEDTPARELKSMADEIKANMTNAVICLVATENGKASIVVAVTPELVESCNAVELVKAGSAALGGGGGGGRPDMAQAGGPNADAASEAIEAVSAAL

SEQ ID NO: 191400 - protein, 245 aa, Unknown
  Bacterial polypetide isolated from the Sargasso Sea
GPCGPCSEIFYDHGEKLKGGPPGSPNEDGDRFIEIWNLVFMQYEQITKEKRVDLPKPSVDTGMGLERMTAVLQGTHDNYKIDHFQKIMAASSDITKTSINSKTIASHRVIADHLRASSFLIAEGILPSNEGRGYVLRRIMRRGMRHAHSLGSKDPVFYKLFEVLLNEMKNSYPELINGKELIIETLKNEEEKFSSLLERGMKILDENLNKVQNKTFPGAEAFKLYDTYGFPLDLTADILRSKDIK

SEQ ID NO: 191401 - protein, 301 aa, Unknown
  Bacterial polypetide isolated from the Sargasso Sea
DYLKEQAIIHAWNLLTKDFKLPKEKLSVTVYHEDEESFKLWKKIAGLSDNKIIKIATSDNFWSMGDTGPCGPCSEIFYDHGEKLKGGPPGSPDEDGDRFIEIWNLVFMQYEQITKDKRINLPKPSVDTGMGLERMTAVLQGTHDNYKIDHFKKIMSASSDLLKSPMNESTIASHRVIADHLRASSFLIAEGILPSNEGRGYVLRRIMRRGMRHAHSLGSKDPVFYKLYNILLSEMKSSYPELITGKELIIETLKNEEEKFSSLLERGMKILDENLIKVSNKTFPGLIAFKLYDTYGFPLDL

SEQ ID NO: 191402 - protein, 270 aa, Unknown
  Bacterial polypetide isolated from the Sargasso Sea
GLDKNRLYFTVFNEDEEALKLWKKITGFGEDRIIKIPTSDNFWSMGETGPCGPCSEIFFDHGNHLKGGLPGAKDQDGDRYIEIWNLVFMQFEQISKDKRINLPKPSVDTGMGLERITALLQGTHDNYKTDHFEKLIKSISDAVKIKPDEKNISSFRVIADHLRASSFLIAEGVLPSNEGRGYVLRRIMRRGMRHSHLLGSKEPIFFNIFKTLMEEMVGNYPELKRAEALIKETLKMEEEKFLVLLDRGMKILNEEITKIDKILPGEVLQT

SEQ ID NO: 191403 - protein, 295 aa, Unknown
  Bacterial polypetide isolated from the Sargasso Sea
HYDAIGQRQDYIAELVKAEEQQFLRTVSSGLTLFNSMVTDLKTANQTVVSGDAAFKLYDTYGFPFDLTQVMAEEQALSVDTAGFDAAMLAAKERSRQARSETLSDGKDETITALSDFIGDVQYGVYVDAPGGGEARIPANDDQRFGIAQHHTATHLLHESLRKVLGDSVHQAGSLVDVNRLRFDFSYHQAITADELAKIEDHVNGWITENHTVTITEEAIEAAKARGAQAMFGEKYGDVVRVVDIPNISIELCGGNHVVSTADLQQFKIVAESAVAAGTRRIEALVGEQPRRTIQ

SEQ ID NO: 191404 - protein, 255 aa, Unknown
  Bacterial polypetide isolated from the Sargasso Sea
MKESKELAKKNWRGSGDSSVDEIWFGIKEKLGTTEFLGYETNAAEGVVLSLLKDNKEVKNLKSGDEGILITNQTPFYGESGGQIGDTGKIVSGEFEFKVTDVQKKLGDLFVHYGKVLKGNINLNDNVEMKVDFERRDNIRAYHSATHLLHESLRRVLGKHVIQKGSLVEPDRLRFDFSHMKPISSEEIKKIENHVNLMIDNKTEVKTRIMTPKEAVDNGALALFGEKYGDEVRVLSMGSEKDKYFSTELCGGNAC

SEQ ID NO: 191405 - protein, 309 aa, Unknown
  Bacterial polypetide isolated from the Sargasso Sea
LKNEMSGNYPELVRAESLIKETLKMEEEKFLVLLDRGIKILNDEISKIDKVLPGEVAFKLYDTYGFPLDLTEDILRNKSMSIDTEKFQSLMKESRELAKKNWKGSGDAAVEDIWFGIKDKIEPTEFLGYETNQAEGVVLSLLKDNNEVDQLKENDEGMIIVNQTPFYGESGGQVGDTGEIVSSDFSFEVIDVQKKLGDLFVHYGKVKSGSIKLKQNVELKIDVERRDNTRAYHSATHLLHESLRRVLGTHVTQKGSLVEPSRLRFDFSHMKPILNEEIDKIEEFVNTMVSKKSDVKTRLMTPDEAVENG

SEQ ID NO: 191406 - protein, 298 aa, Unknown
  Bacterial polypetide isolated from the Sargasso Sea
RLRFDFSHNKPIEKEEMTKINKVVNEIVQGSSDVQTRIMTPKEAVSMGALALFGEKYGEEVRVVFMGKENNGFFSTELCGGTHVKNTKEVGKFKVVSQSSIASGIRRVEALRDKQLQDYEKSLKQNESLKEKNIKDQIEAIKKELLGYKINPDYKDDLELPENLKNLSKQLEKIKIQNVIKDKSKNVIKDKKMGSFTLRQQVLTDFPPKELRSIIDQGKKDIKQGIVVGISTFEGKVGVAVGVTKELTTKYDAVKLVKMASEVLGGKGGGGRKDFAQAGGSNKDSIEKAFKVLNEKIS

SEQ ID NO: 191407 - protein, 180 aa, Unknown
  Bacterial polypetide isolated from the Sargasso Sea
MNSNQIRSTFLNYFKKNGHEVIHSSSLVPDNDPTLMFANSGMVQFKNIFTGKETRDYNRATTAQKCVRAGGKHNDLENVGYTTRHHTFFEMLGNFSFGDYFKELAIELAWNLITKEYSINKERLLVTVYSDDQEAFDLWKKIAGLSENKIIKISTSDNFWSMGETGPCGPCSEIFYDHGD

SEQ ID NO: 191408 - protein, 296 aa, Unknown
  Bacterial polypetide isolated from the Sargasso Sea
MLGNFSFGDYFKEQAIHYAWDLITKDFGIDKNRLYVTVFHEDDEAFNFWRKIGGFSDDRIIRIATSDNFWSMGETGPCGPCSEIFFDHGDYLPGGLPGSKDEDGDRFIEIWNLVFMQFEQVTKDKRINLPKPSVDTGMGLERIAALLQGSHDNYETDHFKKIIGSASEIIKVKSNKSNLASFRVIADHLRASSFLIAEGVLPSNEGRGYVLRRIMRRGMRHSHLLGSKEPVFYNLFDTLKKEMSGNYPELVRAESLIKETLKMEEEKFLVLLDRGIKILNDEISKIDKVLPGEVAF

SEQ ID NO: 191409 - protein, 294 aa, Unknown
  Bacterial polypetide isolated from the Sargasso Sea
SGKHNDLEEVGMDTYHHTMFEMLGNWSFGDYFKEEAIDWAWELLTDKFNLPKDRLYATIFEGDASENLDRDIEATAGWKKYLSADKILDGSKKDNFWEMGDTGPCGPCSELHIDLRPQEEVEKVPGKDLVNMDHPQVVEIWNLVFIQYNRLSNGTLENLPEKHVDTGMGFERLAMAIQQKQSNYDTDVFQPLIQWVANKASKTYGSDEKIDIAIRVISDHIRAIAFTIADGQLPSNNKAGYVIRRILRRAVRYGYTFLDFKEPFLHKMVPLLTDQFEEVFPEINTNRTLLQKLS

SEQ ID NO: 191410 - protein, 183 aa, Unknown
  Bacterial polypetide isolated from the Sargasso Sea
MNTNEIREAFLEFFKSKDHNVVSSSSLVPNNDDTLLFTNAGMVQFKDVFLGQEKLKYSRATTSQKCIRAGGKHNDLENVGYTLRHHTFFEMLGNFSFGDYFKEEAIVFAWEFLTDVLKLDKDKLWITVYKDDDEAKEIWINKIGIDPDRIAKLGDKDNFWSMADTGPCGPCSEIFFDHGDKYE

SEQ ID NO: 191411 - protein, 263 aa, Unknown
  Bacterial polypetide isolated from the Sargasso Sea
GVILKISKGNKFVDSAKTGEEIEIITNQTPFYGESGGQIGDQGVIYNSECKINIRDTQKKMSDLYVHVGNVEKGSIKIGQNVNLEIDINKRNNSRAYHSATHLLHEALRRTLGKHVTQKGSLVSPERLRFDFSHNKPIEKGEIKKINDVVNEIVEGSSDVQTRIMTPKEAVSMGALALFGEKYGEEVRVVFMGRENNGFFSTELCGGTHVKNTKEVGKFKVISQSSIASGIRRVEALRDKQLQEHEKSHKQKQSLREKTIKNQ

SEQ ID NO: 191412 - protein, 289 aa, Unknown
  Bacterial polypetide isolated from the Sargasso Sea
KGSLVSPEKLRFDFSHNKPIEKKEIEKIEKYVNDMVNTAADVKTRIMTPKEAVEKGALAMFGEKYGDEVRVLSMGKDNGGYFSTELCGGTHVKNTKDIGKFKIISQSSIAAGVRRVEALRDKQLSDYEKTLREDKSIKEKTLKDQIDFIKEELLKYKVTPDYKEDLQLSENIKNLNKQLESIKIQNIIKDKNKNVIKDKKIGNFILRQQVLTDFPPKELRNVIDQSKKDIKEGIVVGFSTLEGKVGVAVGVTNKLTKKYDAVSLVKVASKVLEGKGGGGRKDFAQAGGH

SEQ ID NO: 191413 - protein, 247 aa, Unknown
  Bacterial polypetide isolated from the Sargasso Sea
MRASSFLLAEGVLPSNEGRGYVLRRIMRRGMRHSHLLGSKEPIFYKIFESLKNEMSGNYPELERSESLITETLKMEEEKFLVLLDRGIKILNDEISEIDKVLSGEVAFKLYDTYGFPLDLTEDILKNRLLKVDHKKFNELMIKSKELAKKNWKGSGDSSEEEIWFSIKDKTGPTEFLGYESNQSEGVVLNIVKDNQETKSLATGEEGMIITNQTPFYGESGGQLGDKGIIVSGNSIFEVEDTQKKLG

SEQ ID NO: 191414 - protein, 240 aa, Unknown
  Bacterial polypetide isolated from the Sargasso Sea
MSIRDNFLNYFKKNNHEIVESSSLIPASDKTLLFTNSGMVQFKDIFLGIKQSKSNRIVTCQKCVRAGGKHNDLDNIGYTNRHHSFFEMLGNFSFGDYFKEEAILYAWEFLTKELNLDKNRLYVSVHKNDSDAKEIWLNKIKIKQDHLWLLDDADNFWQMGSTGPCGPCSEIYYDLGDELKGMIPSKGDPGDRYIEIWNLVFTQYDKDSKGVLNDLPKKCVDTGMGLERIHAVVEGVSDNL

SEQ ID NO: 191415 - protein, 239 aa, Unknown
  Bacterial polypetide isolated from the Sargasso Sea
FNQSEGVVLSIIKNNKEAQNILNGEEGIIITNQTPFYGESGGQVGDQGKIVSGNSVFEVTDTQKKLGDLFIHHGILKSGEIKIKDVVEMKIDIERRNNLKAYHSATHLLHESLRRTLGKHVMQKGSLVAPDRLRFDFSHMKPITEDELTIIDKLVNEYVQNKTDVTTRIMTPKAAIEKGALAFFGEKYGEEVRVVSMGAENNSYFSTELCGGTHVKNTGDIGKFKTVSQSSIAAGVRRV

SEQ ID NO: 191416 - protein, 284 aa, Unknown
  Bacterial polypetide isolated from the Sargasso Sea
FGGYFKEEAIKLAWDLLTKEYSIDEKRLIITVYEEDELSFKIWKKISGFNDKKIIRISSNDNFWSMGDTGPCGPCSEIFYDNGESIKGGLPGTKNQDGDRFVEIWNLVFMEYEKKGDSLEILPGKFVDTGMGLERILAVLNGKVNNYDTDLFEYVFKRIEEETKTNLNKNLLIPFRIISDHLKSIIFMMSEGILPSNEGRGYVLRRIIRRALLNVNKLNPDVIILNRLVDDVIRKYKKTYSELTKADFFIKDNLKNEEEKFSETLSIGLELLNKEIKKIKTKEF

SEQ ID NO: 191417 - protein, 333 aa, Unknown
  Bacterial polypetide isolated from the Sargasso Sea
LFFDLYWELWNLVFIQYNRHKDGKLEELNSKHVDTGAGFERIVSVMQKKYNNYATDLFTPLIERIEKISNKSSIKDPIPFQVISDHIRMLSFAIADGALPSNEGRGYVLRRILRRAARFGRSININEPFIYDLVEPLCHKMGEIFPEIIEKKSHIEKIIKAEESSFNETLDRGILHFSKVIEDMSSKTIAGAEAFKLYDTFGFPLDLTQVMAREKGLSVDTKGFENEMALQKKRAKSSEKFKSKSSEINWTIIRDDNNSTFKGYESTFLSTDIVKYSSVKNEHYVVLDQTPFYAESGGQVADTGTILGDGIDLKGQDVQFDGEMIIHKCIGEI

SEQ ID NO: 191418 - protein, 155 aa, Unknown
  Bacterial polypetide isolated from the Sargasso Sea
MKTNEIRQAFIKFFESEGHQSVKSSPLIPANDPTLLFTNAGMVQFKDIFLGKEDQGFTKAVSAQRCLRAGGKHNDLENVGYTSRHHTFFEMLGNFSFGDYFKEDAIQLAWDFITNELKLEKDRLWVTIFEDDDEAASIWLEKIGVSADRLVRLGE

SEQ ID NO: 191419 - protein, 307 aa, Unknown
  Bacterial polypetide isolated from the Sargasso Sea
VGYTLRHHTFFEMLGNFSFGDYFKEDAIKYAWEFLTEVLKLDKDKLWITVYKDDDEAEEIWKNIIGVESNRIARLGDDDNFWSMGDTGPCGPCSEIFFDHGDHIEGTPPGTDGDEGDRFVEIWNLVFMQFNRDESGKMESLPKPSVDTGMGLERIAAVMQGVNSNYKTDVFKDLILASEKILKNKNSTSHKVIADHIRSSVFLISDGVIPENEGRGYVLRRIMRRGIRHGYKIGAKKPFMHLLVKDLVKLMSSAYPELKTKEKDIAKLIKKEEEKFFETLEKGIDILEESISNMSKYKISGDIVFKL

SEQ ID NO: 191420 - protein, 309 aa, Unknown
  Bacterial polypetide isolated from the Sargasso Sea
KPPGDDIASYRVISDHLRSTAFLVADGVLPSNEGRGYVLRRICRRATRHADLLGYKEPILHQLLPTLIVEMGTAYPELKANEILISETLEFEENKFRETLGRGLKILNDEIEGVGDKRIFSGEVAFKLYDTFGFPIDLTEDLLKSKNIEVDKKKFNESMDKQKKQTKSSWKGSGEKSNNKFDFELVAKYPSTNFIGYDSLETECELLSIVCDGKEVKRIEPNEEAILITDQSVFYAESGGQVADTGEMTNIKNGIKFYVKDVQKIGGSLFCHRGLLARDSKALSIGQKLDQNIDQESRKKFLKITLQHI

SEQ ID NO: 191421 - protein, 285 aa, Unknown
  Bacterial polypetide isolated from the Sargasso Sea
NKSLTIDNDKFQILMKESKELAKKNWKGSGDSAVDDIWFSIKDRLGPSEFLGYETDQAEGIILSLLKDNKEVNELNENDEGIIILNQTPFYGESGGQVGDTGEITSGNFKFEITDVQKKLGDLFVHYGKVKSGSIKIKDNVEMKIDIDRRNNIRAYHSATHLLHESLRRVLGTHVTQKGSLVAPDRLRFDFSHMKPISDQEIEKIENHVNSMVQKKSEVKTRIMTPKEAVNNGALALFGEKYGEEVRVLSMGDEKERYFSTELCGGTHVRNTGDIGKFKIISQSS

SEQ ID NO: 191422 - protein, 141 aa, Unknown
  Bacterial polypetide isolated from the Sargasso Sea
MTTTNEIRTAFLEYFGKNGHEILTSSSLVPNNDPTLLFTNAGMVQFKNLFTGLETRDYKLAATSQKCVRAGGKHNDLENVGYTARHHTFFEMLGNFSFGDYFKERAIELAWKLITEEFQIDQSRLLVTVYHDDEEAFKFWK

SEQ ID NO: 191423 - protein, 294 aa, Unknown
  Bacterial polypetide isolated from the Sargasso Sea
MVPFMPYFLGEEHPPSSRLCTIQKCVRAGGKHNDLDDIGRTNRHFTFFEMMGNFSFGDYFKAEAIPWAWEFVTDVLQLEKDRLWVTVHVSDDDAEEIWIQSVGLPAERIQRLDKDNWWAAGDTGPCGPCSEIFYDLGPEYGDDGGPAEGGEDRFIEVWNLVFMQFSNDGSGELTPLPQTGIDTGAGLERLLAVLQGVPSAWDIDLFAPLLSEAELITGLKYGQDPAVDISMRIFADHARTTALLISDGVFPSNEERGYVLRRIIRRAVRHAWTLGVEDVVMPRLVEVVCDVMGD

SEQ ID NO: 191424 - protein, 212 aa, Unknown
  Bacterial polypetide isolated from the Sargasso Sea
MADKSLNEIRSAFLKYFEKNDHKIVESSNLVPNNDPTLMFANSGMVQFKNVFTGLEKRDYQRATTSQKCVRAGGKHNDLENVGYTPRHHTFFEMLGNFSFGDYFKDRAIELSWNLITKDFGIDKNKLYFTVFNEDEEAFNLWKKITGFGEDRIIKISTSDNFWSMGETGPCGPCSEIFYDHGDHLKGGLPGTKNQDGDRYIEIWNLVFMQFE

SEQ ID NO: 191425 - protein, 300 aa, Unknown
  Bacterial polypetide isolated from the Sargasso Sea
MASKTLNEIRNSFLKYFEKNDHRIVESSNLVPNNDPTLMFANSGMVQFKNVFTGLEKRDYQRATTSQKCVRAGGKHNDLENVGYTPRHHTFFEMLGNFSFGDYFKDRGIELAWNLITKDFGIDKNKLYFTVFNEDDEAFNIWKKITGFGEDRIIKISTADNFWSMGETGPCGPCSEIFYDHGDHLIGGLPGTKNQDGDRYIEIWNLVFMQFEQVSKSKRINLPKPSVDTGMGLERIAALLQGTHDNYKTDHFIKLINSTAEVVKTRPNEKNISSFRVIADHLRASSFLIAEGCFTIKRRS

SEQ ID NO: 191426 - protein, 210 aa, Unknown
  Bacterial polypetide isolated from the Sargasso Sea
MTSQLIKKIVTGDEIRNAFLKFYSEKLHKIIPSASLIPDDPTVMLTIAGMLPFKPVFLGLKERPSKRATSSQKCIRTNDIENVGVTARHHTFFEMLGNFSFGDYFKREAIQWAWELVTNIYQLSVENIIVSVFHADEESAKIWKDEIGIHPDRIVKLGEEVNFWSSGKTGPCGPCSELYYDFHPEKGLQNIDLEDGDRFIEFYNLVFMQI

SEQ ID NO: 191427 - protein, 449 aa, Unknown
  Bacterial polypetide isolated from the Sargasso Sea
MVQFKNVFTGLEKRDYQRATTSQKCVRAGGKHNDLENVGYTPRHHTFFEMLGNFSFGDYFKDRAIELAWNLITKDFGLDKNRLYVTVYHEDDEAFKLWKKIAGFNDDKIIRIATSDNFWSMGETGPCGPCSEIFYDHGDHLKGGLPGSKDEDGDRFIEIWNLVFMQFEQISKEKRINLPKPSVDTGMGLERIAALLQGTHDNYKTDHFTKLIDSISENLKVKAEENNIASFRVIADHLRASSFLIAEGVLPSNEGRGYVLRRIMRRGMRHSHLLGSKEPIFFNIFKTLMDEMKGNYPELERAQSLIKETLKMEEEKFLVLLDRGIKILNDEISKIDKVLPGEVAFKLYDTYGFPLDLTEDILKSKSLKIDNEKFNSLMKQSKELAKKNWKGSGDSAIDDIWFGIKDKLSATEFLGYETNQAEGIVLSVLKNNKEVNELKVGDEGNVDSK

SEQ ID NO: 191428 - protein, 485 aa, Unknown
  Bacterial polypetide isolated from the Sargasso Sea
PCGPCSEIFFDHGDHLPGGLPGTKDEDGDRFIEIWNLVFMQFEQVTKDKRVNLPKPSVDTGMGLERIAALLQGTHDNYETDHFKKIINSASEIVKVKSDKSNLSSFRVIADHLRASSFLIAEGVLPSNEGRGYVLRRIMRRGMRHSHLLGSKEPVFYNLFDTLKNEMSGNYPELVRAESLIKETLKMEEEKFLVLLDRGIKILNDEISKIDKVLPGEVAFKLYDTYGFPLDLTEDILRNKSMSIDTEKFQSLMKESRELAKKNWKGSGDAAVEDIWFEIKDKLEATEFLGYETNQAEGVVLSLLKDNKEVDHLKENDEGMIIVNQTPFYGESGGQVSDTGEIVSNDFKFEVTDVQKKLGDLFVHYGRVKSGSIKLQESVELKIDVERRDNTRAYHSATHLLHESLRRVLGTHVTQKGSLVEPSRLRFDFSHMKPILNEEIDKIEEFVNKMVSKKTDVKTRLMTPDEAVENGALALFGEKYGDEVR

SEQ ID NO: 191429 - protein, 518 aa, Unknown
  Bacterial polypetide isolated from the Sargasso Sea
HDNYKTDHFLKLINSISESVKVKPDENNLSSFRVIADHLRASSFLLAEGVLPSNEGRGYVLRRIMRRGMRHSHLLGSKEPIFFNIFKTLLDEMSQNYPELKRAESLIKETLKMEEEKFLVLLERGMKILDDEISKIDKVLPGEVAFKLYDTYGFPLDLTEDILKNKSLKVDNTKFDEMMKKSRELAKKNWKGSGDSSVSEIWFNLKEKIGPTEFLGYETNQAEGSVTAIIKDDKEIQQLKEGEEGQIILNQTPFYGESGGQVGDKGTITSGENEFEVTDVQKKIGNLFVHFGKVSKGSIKLKDNVELKINTERRQNIRAYHSATHLLHESLRRTLGTHVMQKGSLVAPDRLRFDFSHMKPITDEEMKKIDENVNKFINSKTEVVTRLMTPEEGIEQGAMALFGEKYGDEVRVVFMGEEGNKYFSTELCGGTHVKNTGEVGKFKVVSQSSIAAGVRRVEALRDKQLEEYLKSKDKMSSLSSQKNEETIKSLSSEITKLGGKPNKKSEDLKITIKELTKQ

SEQ ID NO: 191430 - protein, 265 aa, Unknown
  Bacterial polypetide isolated from the Sargasso Sea
SEVKTRIMTPKEAVNNGALALFGEKYGEEVRVLSMGDEKEKYFSTELCGGTHVRNTGDIGKFKIISQSSIAAGVRRVEALRENQLNSFLQNKEKLSDLSAQKDEEMINDLSKQIIKLGGKPNLENEDNKILIKELSKQLEQLKFSSILENNSKNIIQDVKINNTSVRFQKVDDLPPKELRKLVDAGKKELKTGIVIVFASLEDKVGLAVGITDELIDKYDAVTFAKTGSEIIGGKGGGGRKDFAQAGGQFKDKIDDAFEKIKTLI

SEQ ID NO: 191431 - protein, 521 aa, Unknown
  Bacterial polypetide isolated from the Sargasso Sea
IDKPFLVTMGAAAIALLKGAHPSVIERQEVILAELQREEARFLETLERGEKLLAEVLASKPTQISGAQAFELYDTYGFPLELTQEIAEDQGLAVDLDGFEAAMEEQRQRAKAAAVSIDLTLQDAIEQVAGEQSSTAFKGYDALDHAGTVQALVVNGAPASSASAGDVVQVVLDSTPFYGEGGGQVGDRGSLSGIDVIVAIDSVSRSRDVFVHSGRIERGQLALGDAVNAQVDRTCRRRAQANHTATHLLQAALKQVVDSGIGQAGSLVDFDRLRFDFHCPTAVTPEQLTQIETLINSWIAEAHSLEVQEMAIEQAKAAGAVAMFGEKYADVVRVVDVPGVSMELCGGTHVANTAEIGLFKIVAESGVAAGIRRIEAVAGPAVLAYLNERDAVVKQLGDRFKAQPSEIVDRVAILQEELKATGKALAAAQAELAVAKAAALAAKAEAVGDFQLLVERLDGVDGAGLQGAAQSLADQLGDGAAVVIGGLPDPADLGKVVLVAAFGKPGDRRQAPGRQVHRRHR

SEQ ID NO: 191432 - protein, 691 aa, Unknown
  Bacterial polypetide isolated from the Sargasso Sea
FLVNIIVSVFHEDEESAKIWRDEIGIHPDRIVKLGEEDNFWSSGKTGPCGPCSELYYDFHPEKGLQNIDLEDGDRFIEFYNLVFMQYNRDPNGKLTDLKFKNIDTGMGLERMAQILQKKQNNYETDLIFPIIQKICEIANIDYFSSDDKSKISLKIIGDHTRAVIHLISDGVAASNLGRGYILRRLIRRMVRHGRLLGITNEFLPHIATVGINLMQNNYPDLKNNNDLILNEIKIEEIRFRETLERGEKLLDELISSGQKLISGFKAFELYDTYGFPLELTVEIAEENSISVDVKGFEEEMNAQKERAKAASSNIDLTLEGSLEREIDLFNKTVFNGYDSLLSEAEIKGIFLDSTLVKQASEGQKVLIVLDQTTFYGESGGQVGDIGTIFSKDVEVLVDNVMRKKNVFLHYGTIKKGILTIGQKVKTNVSSSNRAKAAANHTATHLLQSALKSVVNESVGQKGSLVAFNKLRFDFNSSNPISKDQISKIETLVNSWIMENHALEIKNMSKSEALEKGAVAMFGEKYDDEVRVVNVPGVSMELCGGTHVKTTSELGSFKIISEEGISAGVRRIEALSGQSALDYFSDRNALVNQLSDLLKANPNQLFERVNNLQSELINKNKEIQKMKDEIAYFKYSSIKSSSQIVNSFSILINQIDGLDGNSLQSAALNLTSHLGNKAIVILGGIPNPENR

SEQ ID NO: 191433 - protein, 888 aa, Unknown
  Bacterial polypetide isolated from the Sargasso Sea
MADKSLNEIRKTFLKYFEKNGHTIVDSSNLVPNNDPTLMFANSGMVQFKNVFTGLEKRDYKRATTSQKCVRAGGKHNDLENVGYTPRHHTFFEMLGNFSFGDYFKERAIELAWNLITKDFGLDKNKLYFTVFNEDDEAFNLWKKITGFGEDRIIRIPTSDNFWSMGETGPCGPCSEIFYDHGDHLQGGLPGTKDQDGDRYIEIWNLVFMQYEQVTKDKRIDLPKPSVDTGMGLERIAALLQGTHDNYKTDHFLKLINSISDTVKVKPTDKNLSSFRVIADHLRASSFLLAEGVLPSNEGRGYVLRRIMRRGMRHSHLLGAKEPIFYNIFKTLENEMSGNYPELERAQSLIKETLKMEEEKFLVLLERGMKILDDEIEKIDKVLPGEVAFKLYDTYGFPLDLTEDILKNKSLRLDHEKFNKLMKDSKELAKKNWKGSGDSSVDEIWFGIKDKIGSTEFLGYESNQAEGVILSLIKNNKQSNSLKEGDEGMVILNQTPFYGESGGQVGDNGTISNGNNIFKVSDVQKKLGNLFVHYGKVEKGNFNLKDNVELKIDIERRENVKAYHSATHLLHESLRRILGTHVMQKGSLVAPDRLRFDFSHMKPISSDEMTKIDEHVNQMVNKKSEVITRIMTPKEGIAHGALALFGEKYGDEVRVVFMGDEGNKYFSTELCGGTHVKNTSDIGNFKVVSQSAIAAGVRRVEALRDKQLDEFLKNKEKQSNLSEQKDEETIKILFEEIKKLGGKPNLNKENKKDLIKELNKELEKLSINEIINNKSKNIINDEKINGVNVRMQKIDGLPPKELRRLIDNGKKEIGEGIVIIFASKDDKVGLAVGITDKLKSKYDAVKFVKNGSEIIGGKGGGGRPDFAQAGGVNKDKIEDAFNSLKALV

SEQ ID NO: 191434 - protein, 363 aa, Unknown
  Bacterial polypetide isolated from the Sargasso Sea
MAQKSLNQIRETFLKYFEKNDHKIVESSNLVPNNDPTLMFANSGMVQFKNVFTGLEKRDYQRATTSQKCVRAGGKHNDLENVGYTPRHHTFFEMLGNFSFGDYFKEKAIHYAWDLITKDFGIDKNKLYVTVFHEDEEAFNFWKKIAGFKDDRIIRISTSDNFWSMGETGPCGPCSEIFYDHGDHLKGGLPGSKDEDGDRFIEIWNLVFMQYEQVSKDKKIDLPKPSVDTGMGLERIAALLQGTYDNYETDHFKKLIQSTSDIVKKKPDQSNISSFRVIADHLRASSFLIAEGVLPSNEGRGYVLRRIMRRGMRHSHLLGSKAPVFLYLFETLKNEMSGNYPELKRAESLIKETLKMEEEKFLI

SEQ ID NO: 191435 - protein, 375 aa, Unknown
  Bacterial polypetide isolated from the Sargasso Sea
SFGDYFKKEAIKYAWELLTEIYKISPEKLWITVHIEDQESEKIWLNEIGVQPDRISKLDEDNFWSMGDTGPCGPCSEIFYDHGEAFSGKSPAEGVDTGDRFVEIYNLVFMQFNRSPDGELSPLPKPSVDTGMGLERITAVLQGINDNYETDLFKDLIKKIASNMGELNLENPSLRVIADHLRSSSYLIADGLSVSNEGRGYVLRRIIRRALRHAYKLNPDYEKPLSGLVKELVSQMGKEHALLNKNKKNIEKTIEKEEQQFSLTLRNGMRIFEDETPKDVNEVSGELAFKLYDTFGFPLDMTIDLAREKNIAVNIKEYEELMEQQRDLAKASSNFDSLMPSSISLDKPTNFIGYDKSKCKSKVLKIFVNQKEQET

SEQ ID NO: 191436 - protein, 299 aa, Unknown
  Bacterial polypetide isolated from the Sargasso Sea
MIIFGQWEIRDLVDHASEIFYDHGDKYFGGPPGSVDEDGDRFIEIWNLVFMQYEQVDKKTRLDLPKPCVDTGMGLERITALLNGSNDNYTSDLFTNIIDITQECIQKKITEENKSSFRVIADHLRASSFLIADGVLPSNEGRGYVLRRILRRGIRHAYSLGSKDALFHEIFEELKNLMGDFYKELNTGADVIKETLYSEEIKFRETLSKGLEILGQELPKIKNNKLDGRIAFKLYDTFGFPLDLTQDYLRSKNISVDVESFDAAMKLQKEEARSSWKGSGDGDTKKLWFDLAKKIKPTT

SEQ ID NO: 191437 - protein, 176 aa, Unknown
  Bacterial polypetide isolated from the Sargasso Sea
MNSNHVRKAFIDYFKNNDHKHIKSGSLVPENDPSLMFANSGMVQFKNVFTGMEEKDFKRATTSQKCVRAGGKHNDLENVGFTTRHHTFFEMLGNFSFGDYFKEEAILYAWNLITKEFKINENKLLVTIYHDDEVAEKFWKKIGNLPDNRIIKISSSDNFWSMGDTGPCGPCFRNIL

SEQ ID NO: 191438 - protein, 301 aa, Unknown
  Bacterial polypetide isolated from the Sargasso Sea
MADKTLNEIRSTFLKYFEKNGHKIVESSNLVPNNDPTLMFANSGMVQFKNVFTGLEKRDYKTATTSQKCVRAGGKHNDLENVGYTPRHHTFFEMLGNFSFGDYFKERAIELAWNLVTKDFGLDKNRLYFTVFNEDEEALNLWKKITGLGDDKIIKIATSDNFWSMGETGPCGPCSEIFYDHGDHLKGGLPGTKDQDGDRYIEIWNLVFMQFEQISKEKRINLPKPSVDTGMGLERIAALLQGTHDNYGTDHFKKLINSISEAVKVKPDQKNVSSFRVIADHLRASSFLIAEGCLTIKRRKR

SEQ ID NO: 191439 - protein, 622 aa, Unknown
  Bacterial polypetide isolated from the Sargasso Sea
IEFSGIEANKESLISHRVISDHLRASAFLIADGVLPSNEGRGYVLRRIMRRAMRHVHKLGIKDPHMFRLVDSLNNQMSESFTELNRAKLLIETTLKDEEMKFRETLERGLGLLDQSIKKLNNTEALPGSIAFKLYDTYGFPVDLTADILRGKGRELDYKGFEDSMNLQKETARQAWSGTGDKETDSTWINIKERQGEVKFLGYETSQTKSKVNSIVINNKEEKEVKIGEEAKVMTNESPFYGESGGQLGDIGNMKWKNGEALVLDTKKFENLIIHFVKVIEGVLKVDDEVIMEIDLDRRNSLKIHHSATHLLHESLRRNLGEHISQKGSLVAPDKLRFDISHNKPITNKDIEIIEKEINNKIRENLEVSTEIMAIEDAQNVGALALFGEKYGDEVRVVKMQNNANDKYSIELCGGTHVSRTGDIGMFKIISESALGSGIRRIEAVAGKAALDVFQNYNNLIGEISSEMKVSSENLKDRITSLIADKKILEKQIINLNKKLNTSDISDTGTQSSLINDVKIVSKVLNAMPPKELKGLVDEIKKDIVTGIVIVISTLDKKASIVVGVTEDITNKYDAVEFTKAAVEILDGKGGGGRPDMAQGGGPNYQKTEEAITTILNLIRSK

SEQ ID NO: 191440 - protein, 574 aa, Unknown
  Bacterial polypetide isolated from the Sargasso Sea
MNSNQIRTEFLNYFESKNHDVIKSASLIPHDNTLLFTAAGMVPLKDYFSGNKVPDNPNMASSQKCIRTIDIDIIGDTDRHLSFFEMLGNFSVGKYFKKEAIRYSYEFITEVLSINPERLWFTVYKDDKESFDIWLNEIGVPEERIQYGDKDNFWHMNIPGPCGPCSEIFIDRGSKYGPDGGPIGGGEDRFVEIWNLVFMESIQDKPFEVVGTLPSKNIDTGMGLERIAMIMQEKESLFETDLFSSIHKELSKKIKNSDAKYEKIILDHIKASTFMLSDGVVPTNEGRGYILRRLIRRALRAYNKLTDEPSSLDFLIKEVTKLYSEPYPELDKNIEKITKLFKTEEDLFGKTLNKGIQEINTILETGELSAKQAFYLFETYGFPFELTQEIAVENNITLNEEDFQQYFENHKIKSKGSSTKIEQNMKLDIDSNDFCGYETTDTVSEIYHVEPLENKSIIFTKINPFYFEAGGQISDEGKISIDEKEYFVEKVVQSENGATGLVVDINNVNIGDEVQLTVDDTFRNAVSKSHSAAHIVHSALRNILGDHVAQAGSNVAPGRFRFDFSHTQKVSDEE

SEQ ID NO: 191441 - protein, 378 aa, Unknown
  Bacterial polypetide isolated from the Sargasso Sea
MAKTLNQIRETFLKYFEKNDHRIVESSNLVPNNDPTLMFANSGMVQFKNVFTGLEKRDYQRATTSQKCVRAGGKHNDLENVGYTPRHHTFFEMLGNFSFGDYFKERAIELAWNLITKDFGLDKNRLYVTVFHEDEEAFNYWKKIAGFSDDKIIRIATSDNFWSMGETGPCGPCSEIFYDHGEHLKGGLPGSKDEDGDRFIEIWNLVFMQFEQISKEKRVSLPKPSVDTGMGLERIAALLQGTHDNYQTDHFKKLISSTSDIVKVKPNEKNLSSFRVIADHLRASSFLIAEGVLPSNEGRGYVLRRIMRRGMRHSHLLGSKEPIFFTIFKTLMEEMKGSYPELQRAESLIKETLKMEEEKFLVLLDRGIKILNDEITKI

SEQ ID NO: 191442 - protein, 837 aa, Unknown
  Bacterial polypetide isolated from the Sargasso Sea
MRINDLRNAFISYFENQGHKHIHSSPLVPQNDPTLMFANSGMVQFKNVFTGLESRDYKRAVTAQKCIRAGGKHNDLENVGYTLRHHTFFEMLGNFSFGDYFKEDAIEYAWKFITSELAINKDKLCVTIYHDDEQAYESWKKVAGLSDDRIIRISTKDNFWSMGETGPCGPCSEIFYDHGDQYNGKLPSEADETGDRFVEIWNLVFMQFEQLNSNDRIDLPKPSIDTGMGIERIAAVMQGTNDNYQVDSIKEIIGNSIELTKSDDDKLISSHRVIADHLRSSCFLIADGVLPSNEGRGYVLRRIMRRAMRHVHLLDYNDTLMHQLVPTLMLNMKEAYPELLRAELLIKETLKYEEEKFKNLLDKGISQLDNITKDLRSGDTFPGDSAFKLYDTYGFPIDLTQDILRSNNISIDIDGFNKKLEEQKELARKNWAGAGGSVTDKIWFELNKELLATEFLGYNGTETQGEVLSIIKDDKRVTELKEKEEGIIMLNQTVFYAESGGQIGDTGVIQGEDFEFSVMDTQKKDKLILHIGVMIKGTIKNGSDAVLSVNQKQRNDCKAYHSATHILHQSLRDRLGEHVTQKGSLVSNDKLRFDFSHHKSMTNLEIEDVQNKVNEIIKTGSKVETLIMSPDDAVKAGALALFGEKYSDEVRVLKIGKFNDKTYSTELCGGTHVSNTNEIGELKIVSESSAASGVRRIEALRGDDLLKFNEEKKKEDLKSEEKKLDIKKEKEVSTENIRQLKEVIELSIGNNSDHNIIIEFCENVLINELRPLIDKYKKLISDHGVIILCAKKGDKLSFLIGVTDQLTDKIGADEIAKFASSISNGKGGGGRKDLLNQ

SEQ ID NO: 191443 - protein, 430 aa, Unknown
  Bacterial polypetide isolated from the Sargasso Sea
LTADMPREKDIDIDEEGFKKNMESQQQMSKASSSFVSKIPTAEDIKETDFIGYEHLSSDSNVIAIWNKNEKVELAKEPQEYFIALNQTSIYAESGGQVGDRGMFKSKNAEGSILDCKKSGKVFMHLIKLDKGSLKIDDKIEVNVNKEKREKTEAHHSATHLVHAALKRVLGDHVKQKGSLVDEHKLRFDFSHDESLSDEEISKIEELVNQEILKNSAVSTKIMDLEDAKNSGAESLFGEKYEDQVRVLSIGEDDFSLELCGGTHISRTGDLGIFIITSQSSVASGIRRIEALSGPKAQEYLSNLKNQTIQLQKLLNAPAEEIEDKVSKLLKENKSLKKGGKTAKAATIKSSNTHDIDNFKLVIEEAESEDIKELRPLLDEKTKNANNSIFIILSSKNETLTILCSVSKDLQSRISAKDLINALTSPIEGK

SEQ ID NO: 191444 - protein, 314 aa, Unknown
  Bacterial polypetide isolated from the Sargasso Sea
MAKTLNEIRSAFLKYFEKNDHKIVESSNLVPNNDPTLMFANSGMVQFKNVFTGLEKRDYQRATTSQKCVRAGGKHNDLENVGYTPRHHTFFEMLGNFSFGDYFKERAVELAWNLITKEFGLNKDRLYVTVYHDDDEAFNYWKKIAGLSDNKIIRIATSDNFWSMGETGPCGPCSEIFYDHGDHLDGGLPGTKNEDGNRYIEIWNLVFMQFEQISKDKRINLPKPSVDTGMGLERIAALLQGTHDNYETDHFKKIINSTAEILKVNPNKENLASFRVIADHLRASSFLIAEGVLPSNEGRGYVLRRIMRRGMRHS

SEQ ID NO: 191445 - protein, 423 aa, Unknown
  Bacterial polypetide isolated from the Sargasso Sea
RSESLIKETLRMEEEKFLVLLDRGIKILNDEISKIDKVLPGDVAFKLYDTYGFPLDLTEDILKNKSLKVDHKKFDELMKKSKELAKKNWKGSGDSSEERIWFSIKDKIGPTEFLGYETNQSEGVVLNLVKNNKETKSLSTGEEGMIITNQTPFYGESGGQLGDKGTIVSGNSVFEVEDTQKKLGDLFVHYGSLKTGEIKIKDVVEMKIDVERRDNLKAYHSATHLLHESLRRTLGKHVMQKGSLVAPDRLRFDFSHMKPITNEELETIDKLVNEYVSNSSEVTTRIMTPKAAIEKGALAFFGEKYGEEVRVVSMGKEKEAYFSTELCGGTHVKNTGDIGKFKTVSQSSIAAGVRRIEALRDKQLEEFIKNKEKLSTLSTQKDEETIKDLSSRIIKLGGKPNIDNKDLKEIIKNLSRQLEQLNV

SEQ ID NO: 191446 - protein, 182 aa, Unknown
  Bacterial polypetide isolated from the Sargasso Sea
MAKTLNEIRTTFLKYFEKNDHTIVESSNLVPNNDPTLMFANSGMVQFKNVFTGLEKRDYARATTSQKCVRAGGKHNDLENVGYTPRHHTFFEMLGNFSFGDYFKDRAIELAWNLVTKDFGIDKKRLYVTVFQEDDEAFNFWKKIAGLSEDRIIRIPTLDNFWSMGETGPCGPCSEIFFDHGD

SEQ ID NO: 191447 - protein, 341 aa, Unknown
  Bacterial polypetide isolated from the Sargasso Sea
MLSTDEIRQIYLDFFQEKGHTLVESASLVPLNDPTLLFTNAGMVPFKDLLLGVEKKDYTRAVSSQRCIRAGGKHNDLDNVGYTARHHTFFEMLGNFSFGDYFKEEAIAFAWELLTDRYKIPAEKLWITVHEDDDESEKIWIENIGVDPARVSRLDDEENFWTMGDTGPCGPCSEIYFDHGDHLEGEPPKPGMDPGDRFIEIWNLVFTQFDRAKDGTLSPLPNPCVDTGMGLERMAAVLQNENNNYNTDILKAIVKEVAELAGIDDLTNPSLRVISDHLRASSFLIADGIIPSNEGRGYVLRRIIRRALRHAHKLDIQGPVLSELTSILEKVMGDAYPVLIK

SEQ ID NO: 191448 - protein, 584 aa, Unknown
  Bacterial polypetide isolated from the Sargasso Sea
MADKTLNEIRNTFLKYFEKNDHKIVESSNLVPNNDPTLMFANSGMVQFKNVFTGLEKRNYLRATTSQKCVRAGGKHNDLENVGYTPRHHTFFEMLGNFSFGDYFKEQAIHYAWDLITKDFGIDKNKLYVTVFHEDDEAFNFWKKIAGFSDDRIIRIATSDNFWSMGETGPCGPCSEIFFDHGNHLPGGLPGSKDEDGDRFIEIWNLVFMQFEQVTKDKRISLPKPSVDTGMGLERIAALLQGTHDNYETDHFKKIINSASEIVKVKSDKSNLSSFRVIADHLRASSFLIAEGVLPSNEGRGYVLRRIMRRGMRHSHLLGSKEPVFYNLFDTLKNEMSGNYPELVRAESLIKETLKMEEEKFLVLLDRGIKILNDEISKIDKVLSGEVAFKLYDTYGFPLDLTEDILRNKSMSIDTEKFQSLMKESKELAKKNWKGSGDAAVEDIWFGIKDKLEATEFLGYETNQAEGVVLSLLKENKEVDQLKENDEGMIIVNQTPFYGESGGQVGDTGEIVSNDFKFEVTDVQKKLGDLFVHYGKVKSGSIKLQESVELKIDVERRDNTRAYHSATHLLHESLRRVLGTHVTQ

SEQ ID NO: 191449 - protein, 425 aa, Unknown
  Bacterial polypetide isolated from the Sargasso Sea
EFISFFEKRGHHFVRSAPVVPNDDPTLLFSNSGMAQFKDVFLGTGIRDYNRAVNSQKCIRASGKHNDLEDVGYDNYHHTFFEMLGNWSFGDYFKKEAIEWAWELMTEEWALPKEKMWATVFAGGDGVEADEDAEKIWNNCTDINSKQVLRFDKNDNFWEMGEVGPCGPCSELHIDLGQGTCPFSDKHECSVNLEGCWRFVELWNLVFMQYQRFADGHLEELSAQHVDTGMGLERICRVLQEVDSNYSTDLFAPILNKISEVTGQKDSDGEIGVAFRVIADHLRSLSFAVSDGALPSNEGRGYVLRRMLRRATRFGRVLDMHEPFIYKLVPTLAEVMGNAFPEINKQQEHVQNVIQAEETSFGSTLDRGLEIFQKMISNSVTKSSKIISGEDAFKLYDTYGFPVDLTRLMSNEHGFEVDEKGFEKL

SEQ ID NO: 191450 - protein, 386 aa, Unknown
  Bacterial polypetide isolated from the Sargasso Sea
KETLKMEEEKFLVLLDRGIKILNDQISKIKKVLPGEVAFKLYDTYGFPLDLTEDILKNKSLTVDQNKFDELMKKSKELAKQNWKGSGDASEEEIWFGIKDKIGPTEFLGYEFNQSEGVVLSIIKNNKEAHNISNGEEGIIITNQTPFYGESGGQVGDQGTIVSGNSVFEVTDTQKKLGDLFIHHGILKSGEIKIKDVVEMKIDIERRNNLKAYHSATHLLHESLRRTLGKHVMQKGSLVAPDRLRFDFSHMKPITEDELTIIDKLVNEYVQNKTDVTTRIMTPKAAIEKGALAFFGEKYGEEVRVVSMGAENNSYFSTELCGGTHVKNTGDIGKFKTVSQSSIAAGVRRVEALRDKQLEIFLKNKEKMSNLSAQKDEDSIKEVSAQ

SEQ ID NO: 191451 - protein, 415 aa, Unknown
  Bacterial polypetide isolated from the Sargasso Sea
DLEDGERFIEFYNLVFMQYNRDPNGKLTDLKFKNIDTGMGLERMAQILQKKQNNYETDLIFPIIQKICEIANIDYFSSDDKNKISLKIIGDHTRAVIHLISDGVSASNLGRGYILRRLIRRMVRHGRLLGITDEFLPHIATVGINLMQNNYPDLKNNNDLILNEIKIEEIRFRETLERGEKLLDELISSGQKLISGFKAFELYDTYGFPLELTVEIAEEHSISVDVKGFEEEMNKQKERAKAASSNIDLTLEGSLEREIDLFNKTVFNGYKSLLSEAEIKGIFLDSTLVKEASEGQKVLIVLDQTTFYGESGGQVGDIGTILSNDVEVLVDNVMRKKNVFLHYGTIKKGKLTIGQKVKTNVSSSNRAKAAANHTATHLLQSALKSVINESVGQKGSLVAFNKLRFDFNSSNPISK

SEQ ID NO: 191452 - protein, 391 aa, Unknown
  Bacterial polypetide isolated from the Sargasso Sea
MFYAEAGGQVGDIGLIKSRNSIFDVSDTQKYFGDFYLHFGKVKEGKIISNQTAVLIVDKEHRKNVKANHSATHLLHAALRETLGKHVAQKGSYVGPKRLRFDFSHNKAIQKEEINKINLEVNEIIKQNENVSTRLMSPTKAIKEGAMALFGEKYGEEVRVVSMGRKKEKVYSLELCGGTHVNKTGEIGKFEIISEGSISSGVRRIEGLRGEELQNYIKQQKSKDEKQSKDLKDKFDKIIETIKEQGGKADKFKNYLTDMDIAEKYLSQVIKDNILKDKSKNIVNNFKKNNITFRLQKIIDLPGKELRSIVDETKKQKNLIIFLFGISKNKISIAVGVSDDLIEKFDASEYVKYLSKNLGGSGGGGRKDFAQAGGTDVDKIDQVVKLLIEKI

SEQ ID NO: 191453 - protein, 888 aa, Unknown
  Bacterial polypetide isolated from the Sargasso Sea
MADKTLNEIRSTFLKYFEKNGHKIVDSSNLVPNNDPTLMFANSGMVQFKNVFTGLEKRDYKTATTSQKCVRAGGKHNDLENVGYTPRHHTFFEMLGNFSFGDYFKERAIELAWNLVTKDFGLDKNRLYFTVFNEDEEAFNLWKKITGLGEDKIIKIATSDNFWSMGETGPCGPCSEIFYDHGDHLKGGLPGTKDQDGDRYIEIWNLVFMQFEQISKEKRINLPKPSVDTGMGLERIAALLQGTHDNYETDHFKKLINSISEAVKVKPDQKNVSSFRVIADHLRASSFLIAEGVLPSNEGRGYVLRRIMRRGMRHSHLLGSKHPIFYNIFKTLMDEMSGNYPELVRAESLIKETLKTEEEKFLVLLERGMKILNDEISKIDKVLPGEVAFKLYDTYGFPLDLTEDILKNKSLKIDNKKFETLMNESRELAKKNWKGSGDSSVNKIWFEIKDRLGPSEFLGYETDHAEGKILSLLKDNKEVKSLSANDEGMIITNQTPFYGESGGQVGDTGEITSGDFKFEVHDVQKQLGDLFVHYGKVTKGSIKVNDNVEMKIDINRRNDVRAYHSATHLLHESLRRVLGTHVTQKGSLVEPNRLRFDFSHMKPISNEEIKKIETYVNSMVDKKSEVKTRLMTPKEAVDNGALALFGEKYGDEVRVLSMGSEKERYFSTELCGGTHVRNTGDIGKFKIISQSSIAAGVRRVEALREKQLKEYLNKKEKLSDLENEKSEETIKNLSQKIIKLGGKPNITKENQQTLIKDLTRHYEQLLVQSTLSDKSKNIINDKTINNVKVRFQKIIDLPPKDLRKLVDNGKKELTEGVIVIFAIKDEKIGLAIGVTENLTKKYNAVKLVKIGSEIIGGKGGGGRPDFAQAGGIDSSKIDNAIDQIKSLI

SEQ ID NO: 191454 - protein, 465 aa, Unknown
  Bacterial polypetide isolated from the Sargasso Sea
LNDEISKIEKILPGDVAFKLYDTYGFPLDLTEDILRNKSLSIDTKKFQSLMKESRELAKKNWKGSGDAAVENIWFGIRDRLGATEFLGYETNQAEGVILSLLKDNKEVKELKLNDEGMIITNQTPFYGESGGQVGDTGELSSGEFRFEVTDVQKKLGDLFVHYGKVVSGSIEIKKNVEMKINVERRNNTRAYHSATHLLHESLRRTLGTHVTQKGSLVEPSRLRFDFSHMKPISDEEINKIENFVNNMVAKKTDVKTRLMTPDEAVNNGALALFGEKYGEEVRVLSMGDDNGKYFSTELCGGTHVKNTGDIGKFKIISQSSIAAGIRRVEALRDKQLKDYLENKEKLSNLSLEKNDEVIKNLIKQIKDLGGKPNQDEPDQQILIKNLSRQLETLSVKSILNDNKKNKIIDEEIKNIKVRFQNVEGLPPKELRKLVDQGKKDLGEGIIIVFANQQDKVGVAVGITQ

SEQ ID NO: 191455 - protein, 343 aa, Unknown
  Bacterial polypetide isolated from the Sargasso Sea
MVKLTVDINKRRSITANHSATHLMHQALKDVVGVHVNQRGSLNDSERLRFDFSSNKPMTKQEIEKVEKIVNQHIIEDTIVDTRLMDIDEAKKLGALALFGEKYDTEVRVVMMGFNSTLIPQSSSKSKRYSMELCGGTHVQRTGMIGSFIIKSEIASSSGVRRIEALTGLNAIKYLQLSRSYIDQIITTLKIPIEAVNERLTGLINDKKSLLQKIDHFQKNKSSVSHTQDEISDIRSINGISFVVNKLENIEIKEMRSLTDEYKQKFDQSIILNLSKHDHKIIYTVGVTSNLTNKYSASEIVKILNQLSDGKGGGRSDFAQGGGNNKINQAEIVNKIELFLKAI

SEQ ID NO: 191456 - protein, 428 aa, Unknown
  Bacterial polypetide isolated from the Sargasso Sea
QSAEGVNLLAEYREIWNLVFIQYNRDKNGELNPLPKKHVDTGAGFERLVAILNGKSSNYETDLFIPILDEIVKITAKDILFEGGVPHRVIADHLRMLSFSIADGAMPGNEGRGYVLRRVLRRAARFGRKLEMKEPFLYKLVNILCQVMGEAFPEIIDKKSHIEKVIEAEEKSFNDTLDRGLEMFDRVLNKIPKNGTIPGEDVFKLYDTYGFPVDLTELLARENKIQVDVEGFDRCMVKQKERARTSGKFQTDIEDSEWIIIDDGISTNFLGYEKLESNAKIVKYIKSENSYKIVLDKTPFYAESGGQVGDKGTIKSDEFNLIVEDVQKSGDEFIHLCTIERGALADNYDVEAVVDSENRQKIRLNHTSTHLLHQALKEVIGDHVQQAGSLVSAEILRFDLTHYAQITKSQLLEIENRVNSVILNNIAL

SEQ ID NO: 191457 - protein, 180 aa, Unknown
  Bacterial polypetide isolated from the Sargasso Sea
MSKTSNDIRRSFIDYFVSNDHDHLPPSSIIPSNDPTLLFTNAGMVQFKNIFIGNENANFKNVVTCQKCLRAGGKHNDLENVGYTSRHHTFFEMLGNFSFGGYFKEEAILYAWNFLTKELMIDKEKLWVTVHITDKDSKNIWLNKIGLKENRINDVDSDDNFWSMGETGPCGPCTEIFYDY

SEQ ID NO: 191458 - protein, 273 aa, Unknown
  Bacterial polypetide isolated from the Sargasso Sea
DIVEGESNVQTRIMTPKEAVSLGALALFGEKYGDEVRVVFMGKENNGFFSTELCGGTHVKNTIEVGEFKVISQSSIASGVRRVEALRGKQLKDYEKSLKKDKSLKEKKLKEQVDLVKNELLKFKLKPDYKDDLDLPENLKNLNRQLEKMKIKNIIKDKNKNTIKDKKIGNFIFRQQVLTDFPPKELRSVIDQGKKDIKEGIIISISTFEDKVGVAVGLTKELTNKYDAVELVKIVSEVLGGKGGGGRKDFAQAGGSHKDKIEEALNTIKRKIN

SEQ ID NO: 191459 - protein, 818 aa, Unknown
  Bacterial polypetide isolated from the Sargasso Sea
MIPIDETLLFTAAGMVPFKDYFLGNNKPPHTNLVSSQKCIRTVDIDIIGDTDRHLTFFEMLGNFSIGEYFKEQAIKHAYEFITKNLGINPDDLWFTVYKDDDESFNIWKDVIGVPEERIQRGDKDNFWQMNIPGPCGPCSEIFIDRGPDYGEEGGPIGGGEDRFIEIWNLVFMESIQDEPYNVVGELPAKNIDTGMGLERIAMVLQDKESPFEIDTFESIYEKLKPKIKNPNKKYERIILDHMKASTFMISDGVVPTNEGRGYILRRLIRRAIRAYYGLTNEIDSIEFLISPIVEIYKDHYPDLYKNIDKIKKLYTTEENLFHKTLEKGTVEINRLIQDKETFDEENAFYLFETFGFPYELTKEIAFENNIQLNDDKYMKKFKEHQAKSSAFKKEISNISEFDVDCNVFTGYENTNTISEVTLVLNENSTTTIFTEATPFYYEAGGQISDQGSIIFEDKEYTVADVVQSSSGATGLVINEDIEIQSGEKIESKVNESFRRSVSKSHTSAHIVHSSLRNILGDHVAQAGSYVAPGRFRFDFSHSEKVTQEELNEIFTLSNKNVFSDLNVDTKIMNIDEAKKEGALAFFGDKYDDDVRVVNIGNFSKELCGGTHVSNSNEIGLIVLLNESSIGSNLRRVEMLSGFEAYDFMTNAYNSYKSVSNLLNTNIENVPTKLESLFNSYEELKSQVDQFKQIRNNEMVDQISNKFENVGAYKVFINQVSMDTVDDIRNVAINSINNGVVDYIYLISQIESKFVIVAMKNEKVIKDMNVSELVIETSKNFGGGASKDQVLSVGGGPNDYSIDETLKYVKESIVNNIK

SEQ ID NO: 191460 - protein, 373 aa, Unknown
  Bacterial polypetide isolated from the Sargasso Sea
VSQIFLKVLLDEMSNSYPELDRAQSLIKETLKMEEEKFLVLLERGMKILDEEISKIDKVLPGEVAFKLYDTYGFPLDLTEDILKNKSLKIDNDKFQSLMQESKELAKKNWKGSGDAAVDEIWFDIKDKVGATEFLGYEKIQSEGVILKLIKNNKEVESLKTGEKGMIVVNQTPFYGESGGQLGDIGKINSGNNSFTVNDVQKKLGNLFVHYGVIDGGSLKVGESVELKIDSARRENIKAYHSATHLLHESLRRTLGKHVMQKGSLVAPDRLRFDFSHMKPISNDEMLKIEEIANEIVNKKSDVITRIMTPEEGIEHGALALFGEKYGDEVRVVFMGDEGNKYFSTELCGGTHVKNTGDVGKLRLLASHPLLQE

SEQ ID NO: 191461 - protein, 371 aa, Unknown
  Bacterial polypetide isolated from the Sargasso Sea
MIAEGVLPSNEGRGYVLRRIMRRGMRHSHLLGSKEPIFYNIFKTLMEEMKGNYPELQIAESLIKETLKMEEEKFLVLLDRGIKILNNEIAKIDKVLPGEVAFKLYDTYGFPLDLTEDILKNKSLKIDNKKFHALMKESKELAKKNWKGSGDSAIDDIWFGIKDKLGSTEFLGYETNQAEGVVISLLKDNKEVKILNSGDEGMIITNQTPFYGESGGQIGDKGKIISGEFKFEVSDVQKKLGDLFVHYGNVKNGSVKLNQNVEMKIDVQRRDNIRAYHSATHLLHESLRRVLGSHVTQKGSLVEPERLRFDFSHMKPISSDEIEKIETHVNSMVEKKSDVKTRLMTPKEAVENGALALFGEKYGDEVRVLSM

SEQ ID NO: 191462 - protein, 310 aa, Unknown
  Bacterial polypetide isolated from the Sargasso Sea
MIIVNQTPFYGESGGQVGDNGEIVSNDFKFKVTDVQKKLGDLFVHYGKVKSGSIKLQESVELKIDVERRDNTRAYHSATHLLHESLRRVLGTHVTQKGSLVEPSRLRFDFSHMKPILNEEIDKIEDFVNTMVSKKSDVKTRLMTPDEAVENGALALFGEKYGDEVRVLSMGDEDGNYFSTELCGGTHVKNTGDIGKFKIVSQSSIAAGVRRIEALRHKQLEEYLKNKEKLSNLSAEKDEEAIKDLSQQIIKLGGKPSLDETDQKTLIKNLTKQLETISVNAILEDKSKNIIKDEEINGIKLRLQKINGYR

SEQ ID NO: 191463 - protein, 553 aa, Unknown
  Bacterial polypetide isolated from the Sargasso Sea
MSQKTLNEIRSTFLKYFEKNGHKIVESSNLVPNNDPTLMFANSGMVQFKNVFTGLEKRDYKTATTSQKCVRAGGKHNDLENVGYTPRHHTFFEMLGNFSFGDYFKDRAIELAWNLVTKDFGIDKNRLYVTVFHEDDEAFNFWKKIAGLSEDRIIRIPTSDNFWSMGETGPCGPCSEIFFDHGDKLQGGLPGTKDQDGDRYIEIWNLVFMQFEQVTKEKRINLPKPSVDTGMGLERIAALLQGTHDNYETDHFKKIINSTSEVVKKKPDQNNLSSFRVIADHLRASSFLIAEGVLPSNEGRGYVLRRIMRRGMRHSHLLGSKEPIFYNIFKTLMDEMSGNYPELKRAEALIKETLKMEEEKFLILLERGMKILDEEISKIDKVLPGEVAFKLYDTYGFPLDLTQDILKNKSLNIDNKKFEDLMKQSRELAKKNWKGSGDSAIDDIWFAIRDKLGSTEFLGYETDQAEGVVQSLLKNNEQVESLKSGDEGMIILNQTPFYGESGGQVGDTGEITTNNFKFQVSDVQKKLGDLFVHYGKVTSGEIKINESVELKID

SEQ ID NO: 191464 - protein, 557 aa, Unknown
  Bacterial polypetide isolated from the Sargasso Sea
MKINDIRSKFLDYFNSNEHEIVQSSPLVPLNDPTLMFANSGMVQFKNVFTGLENRDYKRAVTAQKCIRAGGKHNDLENVGYTLRHHTFFEMLGNFSFGDYFKDEAIDYAWNFITKELSISKDKLYVTIFHNDEQAYTAWKKVSGFDDSKIIRINTNDNFWSMGETGPCGPCSEIFFDHGDGFKGKPPSEADETEDRFVEIWNLVFMQYEQVDTKTRIDLPKPSIDTGMGIERIAAVMQGTNNNYKIDSIQKLIDHSIDVTKQNKESFISSHRVIADHLRSSCFLVADGVLPSNEGRGYVLRRIMRRAMRHVHLLGYKDELMHLLAPTLITEMKGAYPELQRAEKLILETLKYEEQKFKELLDRGIKHLDNEALNMKSGDIFPGNSAFKLYDTYGFPIDLTQDILKAKQIDVDISGFEKRLDEQKEFARKNWSGSGSNLLDKIWFKISEKIPATEFIGYSSEESEAQILGIVIDGKEVDSISGKNDCSLILNQTVFYAESGGQIGDIGIISSDEGEFEVTDTQKRQNLIIHSGNLKSGNMSVNLNVNLKINQERRSSC

SEQ ID NO: 191465 - protein, 138 aa, Unknown
  Bacterial polypetide isolated from the Sargasso Sea
MAKTLNEIRSAFLDYFEKNDHKIVESSNLVPNNDPTLMFANSGMVQFKNVFTGLEKRDYQRATTSQKCVRAGGKHNDLENVGYTPRHHTFFEMLGNFSFGDYFKERAIELAWNLITKEFGLDKNRLYVTVYHDDDEAF

SEQ ID NO: 191466 - protein, 498 aa, Unknown
  Bacterial polypetide isolated from the Sargasso Sea
MGLERIAALLQGTHDNYETDHFKKIINSAAEILKVEPNKDNLASFRVIADHLRASSFLIAEGVLPSNEGRGYVLRRIMRRGMRHSHLLGSKEPIFYNIFKTLKDEMKGNYSEIERAESLIKETLRMEEEKFLILLDRGIKILNEEITKIDKILPGEVAFKLYDTYGFPLDLTQDILKNKSLTIDNDKFQSLMKESKELAKKNWKGSGDSTVDDIWFAIKDRLGPSEFLGYETDQAEGIILSLLKDNKEVNELNVNDEGIIILNQTPFYGESGGQVGDTGEIISGDFKFEITDVQKKLGDLFVHYGKVKSGSIKIKDNVEMKIDIDRRNNIRAYHSATHLLHESLRRVLGTHVTQKGSLVAPDRLRFDFSHMKPISDQEIEKIENHVNLMVQKKSEVKTRIMTPKEAVNNGALALFGEKYGEEVRVLSMGDEKEKYFSTELCGGTHVRNTGDIGKFKIISQSSIAAGVRRVEALRENQLNSFLQNKEKLSDLSAQKEKK

SEQ ID NO: 191467 - protein, 383 aa, Unknown
  Bacterial polypetide isolated from the Sargasso Sea
MKTSEIKQSFLDFFESKNHEIVPSSALVPSNDETLLFTNAGMVQFKDVFLGTDKKSYKRASTSQRCIRAGGKHNDLENVGYTLRHHTFFEMLGNFSFGDYFKEEAIEFAWEFLTEVLKLDRNKLWITVYKDDDEAEEIWKNNIGIDPKRIARLGDEDNFWSMGDTGPCGPCSEIFYDHGDHIEGTPPGADGDEGDRFVEIWNLVFMQFNRDESGDMEPLPKPSVDTGMGLERIAAVMQGVNSNYETDIFKDLIIASEKILGNKDSTSHKVIADHIRSSVFLISDGVIPEKEGRGYVLRRIMRRGIRHGYKIGATEPFLHLLVKDLISLMKQAYPELEDNYENIVKIIKNEETKFFETLQNGIEILEETISTMQNNTISGEIVF

SEQ ID NO: 191468 - protein, 463 aa, Unknown
  Bacterial polypetide isolated from the Sargasso Sea
MVDKSLNQIRNTFLKYFEKNDHKIVESSNLVPNNDPTLMFANSGMVQFKNVFTGLEKRDYQRATTSQKCVRAGGKHNDLENVGYTPRHHTFFEMLGNFSFGDYFKERGIELAWNLITKDFGLDKNRLYVTVFHEDDEAFNFWKKIAGFSDDRIIRIATSDNFWSMGETGPCGPCSEIFFDHGDHLKGGLPGTKDQDGDRFIEIWNLVFMQYEQVSKDKRIDLPKPSVDTGMGLERIAALLQGTHDNYQTDHFKKLISSISDATKVKQEDKNISSFRVIADHLRASSFLLAEGVLPSNEGRGYVLRRIMRRGMRHSHLLGSKEPIFYKIFDTLKKEMLGNYPELERSQSLIKETLRMEEEKFLVLLDRGIKILNDEIAKIDKVLPGDVAFKLYDTYGFPLDLTEDILKNKSLKVDHNKFDELMKKSKELAKKNWKGSGDSSEEAIWFSIKDKAGPTEFLGTSLI

SEQ ID NO: 191469 - protein, 857 aa, Unknown
  Bacterial polypetide isolated from the Sargasso Sea
MNSKDIRNSFIKYFERKDHKFFRSSPVVPIDDPTLLFTNAGMNQFKPIFLGQTDPKHPRAVNSQKCIRVSGKHNDLEEVGVDTFHHTFFEMLGNWSFGDYYKKEAIEWAWDLFTNEWKLDKDRLWATVYEDDDEAFDLWTKVTDIAPERVVRCGKKDNFWEMGETGPCGPCSEIHYYVGEDISNQDPSGVNSSDQYWELWNLVFIQSNRLQDGSLEELPAKHVDTGAGLERIATVLQGKNSNYDTDLFLPIIDSLQILANSSYKDDPIPHRVIADHIRMLCFSIADGALPSNDGRGYVLRRILRRAARFGRKLGLEDPFLYKLVEKVADIMGELFPEVIDKRAHIEKVIRSEEESFNKTLDRGLSHFEKIVSGIEGSEISGEDSFKLYDTYGFPLDLTQLMARERKMTVDEKGFNESMEKQKLKAKEAGRFNQGKDQFEWITVSDGDDSKFVGYEVMDCSANIRRYAKDKDRLLIILDKTPFYAESGGQIGDIGSIQGNDIDLSVLDVKKDNDSFVHICEGTLNNTDSLVECSVNDDHRNSVKKNHTATHLMHKALKSVLGDHVNQAGSLVHPDYLRFDLTHFEKISLQEIKDIEEMVNEQILLNKALDVSIQKFDDAKKAGAEALFGEKYGDEVRVVQVGDFSMELCGGTHVERTGDIGSFKITEESSLSSGVRRIVAVTGKKAVSEMQSNASVLHDLQSLLNTPPMGMVERIEGLFKEKKDLEKKLKNRTSQPSHGNLINEAKKIGDHYGLVKEVQVSSMDDLKILGDDVFNKLSSGIAVLFSKGQEKPMAVIVVSKNLNEDGILAGKLAKEIGGYMEGGGGGKPHLATAGGKNNASIKPAIDSTQSLINELLNG

SEQ ID NO: 191470 - protein, 227 aa, Unknown
  Bacterial polypetide isolated from the Sargasso Sea
MNSSDIRSTFLNYFKKNGHEIVHSSPLVPHNDPTLMFANSGMVQFKNIFTGKEKRDYNRAVTSQKCVRAGGKHNDLENVGYTARHHTFFEMLGNFSFGDYFKDQAIEFAWNLITKEFKIEKEKLLVTVFSEDEDAYNFWKKIAGLSDDKIIKISTSDNFWSMGDTGPCGPCSEIFFDHGDKYPGGPPGSPDEDGDRFIEIWNLVFMQFEQISSSERINLPKPSIDTG

SEQ ID NO: 191471 - protein, 874 aa, Unknown
  Bacterial polypetide isolated from the Sargasso Sea
MYQTTAALRSAFLEFFRSNGHQVVDSSSLVPGNDPTLLFTNAGMNQFKDVFLGMDKRSYTRATTAQRCVRAGGKHNDLDNVGYTARHHTFFEMLGNFSFGDYFKEDAIHFGWTFLTEVLKLPKERLCVTVYQTDDEAFEIWNKKIGVAAENIIRIGDNKGAPYASDNFWQMGDTGPCGPCTEIFYDHGDHIWGGRPGSPEEDGDRFIEIWNIVFMQYNRQASGEMLPLPKPSVDTGMGIERIAAIMQGVHSNYEIDIFRALIAKAAEIIGVTDLSNKSLRVIADHIRSCAFLVADGVMPSNEGRGYVLRRIIRRAVRHGNKLGATEAFFYKLVPTLIEVMGDAAKGLADTQVIVEKALKAEEEQFARTLERGLGILDSALNELQGDTLDGETVFKLYDTYGFPVDLTADVCRERNIIVDEAGFEAAMAEQRSRAQAAGNFGADYNAALKIDEETSFCGYTELAGEGKVTALYVNGESVDSISAGTEAVVVLDVTPFYAESGGQVGDKGVLVAEGVEFVVNDTQKFGQASGHKGTLTAGTISVGQAIEAKVDKKLRHRTQLNHSVTHLLHAALRQVLGTHVTQKGSLVDPERLRFDFSHFEAVKPAELKQVEELVNTQIRRNHELKVAEMAIDEAKEKGAMALFGEKYDAEVRVVTMGDFSIELCGGTHVGRTGDIGLFKITSEGGIAAGVRRIEAVTGAAAMAYVAQQQAQLEEAAALLKGDTQSVVAKLKAQLDKMKQLEKDMQQLKDKLAAAASADLAGDAVVVNGVNVLIKKLEGVEAGALRGLQDELKQKLKSAVILLGVAQEGKVNLIAGVSNDLVGKVKAGELVAMVAAQVGGKGGGRPDMAQAGGSQPENLDAALSQVLPWITERLA

SEQ ID NO: 191472 - protein, 622 aa, Unknown
  Bacterial polypetide isolated from the Sargasso Sea
HGDHIDGGPPGSDDEDGDRFVEIWNLVFMQFDRQANGELVNLPKPSVDTGMGLERIAAVMQGVSSNYDIDLFQKIIAAIKNQSQKGEESHYRVIADHIRSSSFLIMDGVTPDNEGRGYVLRRIIRRALRHGHDLGIESPFFFKLVDVLAGEMGQTYPELLNKKDYIERIILMEEERFAATLSQGMSLLQKEFDRSNDEMISGEFAFKLYDTYGFPLDMTVDIARSVSRAVDLEGFEKAMERQRELARRASKFQSDDSFSLNHDLKSEFHGYKVLETDSKIIGIFGEDGSDVLRQGEFGQVILDKTPFYAESGGQVGDQGSFSSDASVFEVIDTQFSGNAYSHFGTVSNGQISVGDKITASVNPVRRKSITLNHTGTHMLHRALMMVLGEHVQQRGSLVDDEKIRFDFSHHQSLTASEIREIETIVNEKIDENIDVQTSIMKHDEAIESGAMALFGEKYGDDVRVLDVGDFSKELCGGTHVENTNEIGIFKVVSESSISSGTRRIEAITGDKALKWAKETEHLVESLTDLLQTRREDVTTKVESLLDSNKKLQAEIKQLKSKIASGQSVADIDSSENINGINYLYKELENDIEPSVMRGAIDQFKDKLKSGVIILSSINQKGK

SEQ ID NO: 191473 - protein, 430 aa, Unknown
  Bacterial polypetide isolated from the Sargasso Sea
NDLENVGYTARHHTFFEMLGNFSFGDYFKDLAIELAWLFVTRELGLPKDKLIVTVFAEDQEAHDLWRKIAGLSENRIIKINSSDNFWSMGETGPCGPCSEIFYDHGDKFPGGPPGSPEEDGDRFIEIWNLVFMQYEQTTPDVRVDLPKPSIDTGMGLERITAVLQGTNDNYSTDLFTSLINTSVELASVPNNKQFGVSHRVIADHLRASSFLIADGVMPSNEGRGYVLRRIMRRAMRHVHLMGCKDPLMYRLVPSLIDEMGKAFPELSRAELLISETLEMEEKRFRRTLDRGLKLLKEEVGQLGKDSELPGNVAFKLYDTYGFPIDLTQDALRRDGYKVDIAGFEKEMEKQKEEARSSWKGSGELEADEIWFELYELHGPTEFLGYNTEEAEGQIIAIIKDGELLEEAGKGEEVLILSNQTPFYAESGGQ

SEQ ID NO: 191474 - protein, 212 aa, Unknown
  Bacterial polypetide isolated from the Sargasso Sea
MTLSTADLRNKFIDYFKSHGHQAVASSSLVPADDPTLLFTNAGMNQFKDCFLGAEKRSYTRAVSSQRCVRAGGKHNDLENVGYTARHHTFFEMLGNFSFGDYFKKEAIEFAWNFLTKEIGLPKEKLLVTVYSEDDEAFDNWENHIGVPKEKIIRISTSDNFWSMGDTGPCGPCSEIFYDHGAHIWGGPPGTPEEDGDRFIKIWNLVFMQFNK

SEQ ID NO: 191475 - protein, 887 aa, Unknown
  Bacterial polypetide isolated from the Sargasso Sea
MAKTLNEIRSAFLDYFEKNDHKIVESSNLVPNNDPTLMFANSGMVQFKNVFTGLEKRDYQRATTSQKCVRAGGKHNDLENVGYTPRHHTFFEMLGNFSFGDYFKERAIELAWNLITKEFGLDKNRLYVTVYHDDEEAFNYWKKIAGLSEDKIIRIATSDNFWSMGETGPCGPCSEIFYDHGDHLEGGLPGSKNEDGDRFIEIWNLVFMQYEQISKDKRINLPKPSVDTGMGLERIAALLQGTHDNYETDHFKKIINSAAEILKVQPNNNNLASFRVIADHLRASSFLIAEGVLPSNEGRGYVLRRIMRRGMRHSHLLGSKEPVFYNIFKTLKDEMKGNYSEIERAESLIKETLRMEEEKFLILLDRGIKILNEEITKIDKILPGEVAFKLYDTYGFPLDLTQDILKNKSLTIDNDKFQSLMKESKELAKKNWKGSGDSAVDDIWFSIKDRLGPSEFLGYETDQAEGIILSLLKDNKEVNELNKNDEGIIILNQTPFYGESGGQVGDTGEIISGDFKFEITDVQKKLGDLFVHYGKVKSGSIKIKDNVEMKIDIDRRNNIRAYHSATHLLHESLRRVLGTHVTQKGSLVAPDRLRFDFSHMKPISDQEIEKIENHVNLMVQKKSEVKTRIMTPKEAVNNGALALFGEKYGEEVRVLSMGDEKEKYFSTELCGGTHVRNTGDIGKFKIISQSSIAAGVRRVEALRENQLNSFLQNKEKLSDLSAQKDEEMINDLSKQIIKLGVKPNLENEDNKILIKELSKQLEQLKFSSILENNSKNIIQDLKINNISVRFQKVDDLPPKELRKLVDTGKKELKTGIVIVFASLEDKVGLAVGITDELIDKYDAVTFAKTGSAIIGGKGGGGRKDFAQAGGQFKNKINEAFEKIKTLI

SEQ ID NO: 191476 - protein, 103 aa, Unknown
  Bacterial polypetide isolated from the Sargasso Sea
MKTNEIRQAFIKFFESEGHQSVKSSPLIPANDPTLLFTNAGMVQFKDIFLGKEDQGFTKAVSAQRCLRAGGKHNDLENVGYTSRHHTFFEMLGNFSFGDYFKE

SEQ ID NO: 191477 - protein, 272 aa, Unknown
  Bacterial polypetide isolated from the Sargasso Sea
MPWVSKKSDVKTRLMTPDEAVENGALALFGEKYGDEVRVLSMGDEEGKYFSTELCGGTHVKNTGDIGKFKIISQSSIAAGVRRVEALRDKQLEEYLKNKEKLSNLSSEKNEETIKELSQEIVNLGGKPNLDQTDQKILIKNLTKQLETISINSILEDKSKNIIKDEEINGVRLRLQKIDGLPPKELRKLVDKGKKDLSKGIVIVFASKDDKVGLAVGVTDDLTNKFDAVEFVKVGSEIIGGKGGGGRKDFAQAGGQDQSKIEDAFKKLKSLI

SEQ ID NO: 191478 - protein, 426 aa, Unknown
  Bacterial polypetide isolated from the Sargasso Sea
MADKTLNEIRNTFLKYFEKNEHKIVESSNLVPNNDPTLMFANSGMVQFKNVFTGLEKRDYVRATTSQKCVRAGGKHNDLENVGYTPRHHTFFEMLGNFSFGDYFKEQAIHYAWDLITKDFGIDKNKLYVTVFHEDDEAFNFWKKIAGFSDDRILRIATSDNFWSMGETGPCGPCSEIFFDHGDHLPGGLPGSKNEDGDRFIEIWNLVFMQFEQVTKDKRINLPKPSVDTGMGLERIAALLQGTHDNYETDHFKKIINSASEIVKVKSDESNLSSFRVIADHLRASSFLIAEGVLPSNEGRGYVLRRIMRRGMRHSHLLGSKEPVFYNLFDTLKNEMSGNYPELVRAESLIKETLKMEEEKFLVLLDRGIKILNEEISKINKVLPGEVAFKLYDTYGFPLDLTEDILRNKSMSIDKEKFQSLMKESR

SEQ ID NO: 191479 - protein, 648 aa, Unknown
  Bacterial polypetide isolated from the Sargasso Sea
MKSSQIRESFISFFESKSHARVPSAPVLPIGDKSLLFTNAGMNQFKAIFLNTEEPKDLRVANSQKCIRVSGKHNDLEEVGRDGFHHTFFEMLGNWSFGDYYKKEAIEWSWELFTKVWKLDKSRLWVTVYEEDDEAFDLWKNQTDIDSNRIIRSGAKDNFWEMAETGPCGPCSEIHYYVGNNPGDQQAELVNNSSEYWELWNLVFIQFNRLKDGTMEDLPKKHVDTGAGLERICSVLQNKDSNYKTDLFSKTIEDLENFSNTKYQDFEVSYNVICDHIRMLSFAIADGVVPSNDGRGYVVRRVLRRGSKFAMNLEIKEPILYKLVDSVVSTMSSHYPELKEKQEYIEQTILSEEQSFLRTLENGVIQFEKIVSSTSGSEIHGKDAFKLYDTYGFPLDLTQLMAEERKMTVDIDGFDVEMKNQKELAKSGQKFEMDNLDLKWNLETKSSHSIFVGYENESISSKIINHAESGEDIIIILENTPFYSESGGQIGDTGIIRNDDFSARVNDTQKNGDYVLHICTLTNGNIGDNLSVDCMIDVDRRNNIKVNHTATHLLHQSLKDVLGNHVNQAGSLVHPEYLRFDITHPNKISSKELESIELIVNQKIDEDITVETSIKSLEEAKKEGATALFGEKYGDQVRVVTMGEFLKN

SEQ ID NO: 191480 - protein, 478 aa, Unknown
  Bacterial polypetide isolated from the Sargasso Sea
MKTSDIRKAFLDFFNSKNHEVVASSSLVPSNDETLLFTNAGMVQFKDVFLGTETKNFKRAATSQRCIRAGGKHNDLENVGYTLRHHTFFEMLGNFSFGDYFKEDAIKFAWEFLSEELKLDKEKLWITVYKDDDEAEEIWKNIIGIDPGRIARLGDDDNFWSMGDTGPCGPCSEIFYDHGEHIDGTPPGAEGDEGDRFIEIWNLVFMQFNRDESGKMEPLPKPSVDTGMGLERIAAVLQGVNSNYETDVFKDLINASEKILGSQGSTSHKVIADHIRSSVFLISDGVIPEKEGRGYVLRRIMRRGIRHGYKIGAKKPFMHLLVKDLIKLMNSAYPELKKKQKDIIELIKNEEIKFFETLETGIEILEETISNMKNKTLSGDVVFKLHDTYGFPFDLTADIAREKQLDIDEERFNECMNQQKQTSKASSSFVSSLPAASGIEETKFLGYENLESDSKVLVIWKDQERIDAAKNNEEIFFA

SEQ ID NO: 191481 - protein, 370 aa, Unknown
  Bacterial polypetide isolated from the Sargasso Sea
MQDFSSSHIRKIFLEFFQEKGHELVESSSLIPNNDPSLLFTNAGMVPFKDMLLGVEIRDYTRAVSSQRCLRVGGKHDDLDNVGYTARHHTFFEMLGNFSFGDYFKKEAIEFAWELLTDRYNIPPEKLWITVHKDDKESEKIWIESIGVDPNRLSRLDDDENFWTMGDTGPCGPCSEIYYDHGDHIQGEPPEIGSDPGDRFIEIWNLVFTQFDRSKDGTLSPLPNPCVDTGMGLERIAAVLQDKHNNFNTDGFTPLIEEANKITKLNDLGNSSLKVIADHLRSSSFLIAEGIVPSNEGRGYVLRRIIRRALRHANKIGHEGPILSTLSSTLVKEMGNYHSLLKKNEEIIKSNLLPEEEQFSPTLSQGMLLL

SEQ ID NO: 191482 - protein, 521 aa, Unknown
  Bacterial polypetide isolated from the Sargasso Sea
MWRLLGITNEFLTHIATVGIKLMQNNYPDLKNNNDLILNEIKIEEERFRETLERGEKLLDELISSGQKLISGFKAFELYDTYGFPLELTVEIAEENSISVDVKGFEEEMNAQKERAKAASSNIDLTLEGSLEREIDLFNKTVFNGYDSLLSEAEIKGIFIDSTLVKQASVGQQVLIILDQTTFYGESGGQVGDIGTIFSKDVEVLVDNVIRKKNVFLHYGTIKKGILTIGQKVKTNVASSKRAKAAANHTATHLLQSALKSVVNESVGQKGSLVAFNKLRFDFNSSNPISKEQISKIETLVNSWIMENHPLEIKNMSKSEALKKGAVAMFGEKYEEEVRVVNVPGVSMELCGGTHVRNTSELGSFKIISEEGISAGVRRIEALSGQSAFDYFSERNALVNQLSDLLKANPNQLFDRVNNLQAELINKNKEIQKMKDEIAYFKYSSLQSSAEIVNSFSILVNQIDGLDGNSLQSAALDLTSNLGNKAIVILGGIPNPENKKLLFVVSFGDDAVKIGLHAGKL

SEQ ID NO: 191483 - protein, 533 aa, Unknown
  Bacterial polypetide isolated from the Sargasso Sea
ADGVLPSNEGRGYVLRRILRRGIRHAYTLGSSEPLFHKIFDELKNLMGDFFQELNTGAEAIKETLYNEEIKFRETLSKGLEILGQEIPNIKNNKLDGKIAFKLYDTFGFPLDLTQDYLRSKDIDVDIESFDALMKLQKEEARSSWKGSGDGNTEKLWFDIARKNKPTVFKGYDESTLKANVTALIIDSEAVDELSNKTKKSAIITDESCFYAESGGQVGDKGIISSENAEFRVTDTRKTPQGIFIHFGNVISGNFKIGHEVKLKVDTILRDLIKKNHSATHLLHAALRNNLGPHVAQRGSLVNENKLRFDFSHNKQISSNQIDTIQKEVTNIISNACETQIDIKSQEEAIKQGAMALFGEKYGEEVRVVTLGENNNKPYSIELCGGTHVTNVMDIEKFHIISEESVSSGVRRIEACTGNKVDEFISNKLKEDQLFEKKLDDKITNLISQINKLNGKISFSEDNKNLYVKKLENYLDNLKNKSILSNEENNKIEESDINGINFVSQLIENLPPKELRSVFDKFKSEKSKSILAC

SEQ ID NO: 191484 - protein, 810 aa, Unknown
  Bacterial polypetide isolated from the Sargasso Sea
MVGFTTRHHTFFEMLGNFSFGDYFKEQAILYAWNLITKEFKIDENKLLVTIYHDDEVAEKFWKKIANLPDNKIIKISSSDNFWSMGDTGPCGPCSEIFYDHGDKYFGGPPGSVDEDGDRFIEIWNLVFMQYEQVDKNTRLDLPKPCVDTGMGLERITALLNGSNDNYSSDLFSNIIDITQEFIQKKISEENKSSFRVIADHLRASSFLIADGVLPSNEGRGYVLRRILRRGIRHAYTLGSSEPLFHKIFDELKNLMGDFFQELNSGAETIKETLYNEEIKFRETLSKGLEILGQEIPNIKNNKLDGKIAFKLYDTFGFPLDLTQDYLRSKDIDVDLESFDEAMKLQKEEARSSWKGSGDGNTEKLWFDIARKTKPTVFKGYDETTLKANVTALVLDSEAVNELSDKIKKSAIITDESCFYAESGGQVGDKGIISSENAEFRVTDTRKTPQGIFIHFGNVISGNFKIGNEVELKIDSSLRELIKKNHSATHLLHAALRNNLGLHVAQRGSLVNENKLRFDFSHNKQISSKQIDTIQKEVLNIISNNCKTQIDIKSQEEAIKQGAMALFGEKYGEEVRVVTLGENNNKPYSIELCGGTHVTNVKDIEKFHIISEESVSSGVRRIEACTGNKVDEFISNKLKEDQLHEKKLDDKITNLISQINKLNGKISFSEENKNLYIKKLENYLDNLKNKSILSNEENNKIEETNINGINFVSQLIENLPPKELRSIFDKFKLEKSKSILACITTNEDKVSIMVGLTNDLIDIYDARVLIKSTFDILGSKGGGGRIDFAQAGGNKKDQLNQAFLSIKNQI

SEQ ID NO: 191485 - protein, 815 aa, Unknown
  Bacterial polypetide isolated from the Sargasso Sea
FKDAFLGIKKPSSSRIVSCQKCVRAGGKHNDLENIGYTNRHHSFFEMLGNFSFGNYFKEEAINLAWNFLTKELQLDVNKLYISVHKDDIDSSDIWLKQIKIAKDKLWYLGDKDNFWQMGDTGPCGPCTEIYYDLGDKLKGSPASSGDPGDRFIEIWNLVFTQYDRDSNNKLNDLPKKCVDTGMGLERIHAVVEGKLDNFKTSIFSDLENYLDHSLNNENINYTIKKIIMDHSRSSCFLISDGVIPNNEGRGYVLRRILRRATRFLYNAGIKEPFIYKCTDILEKSMGDIYSSLKTKKKTIKEIIYAEEENYLSTLEKGLNLISKLTKNTDKISGVEIFKLYDTYGFPTEIIQEIASEKNISLDMISFEKLMSKQKNLSKKNTTFSTDTLSFVDKNLASSFEGYTQDSLSAEVLAIYKDNSLVDLVEEKNTELIIIFDKTPFYPEGGGQISDIGVLRNNECSLTIADVQKIGNSIAHKAVLKNGKIKKNDKFYLSIDTERRKSIAIHHSSTHLLHQALRDIVGNHVEQKGSLVTDEGLRFDFSHNKALSKDEISRIEKFIALEIDNARPTSINQMSYKDAIKAGALAFFDEKYEDDVRVLNIGTKSMELCGGTHVDNTNEIKMFKILNEQSISNGIRRIEAVAGNEAYNEFQKAFNMNRDIASSLGVSPDKIANKIDSFKHNESMQQKSIKKLNKQLVSLFSKTINSFVSNKTNIFLQDCSNLNRDQIKDLIDEIKSIHSNSISVFYLSNENKIDCFIGVSKKCTHEYNAKKLLEILSKKYTLKGGGSDTFATLIIDVQDKSAFHKILEQIFNVTK

SEQ ID NO: 191486 - protein, 487 aa, Unknown
  Bacterial polypetide isolated from the Sargasso Sea
MKNKTLSGDVVFKLHDTYGFPFDLTADIAREKQLDIDEERFNECMNQQKQTSKASSSFVSSLPAASGIEETKFLGYENLESDSKVLVIWKDQERIDAAKNNEEIFFACNQTPFYAEAGGQIGDKGKFASQSSTGSILDCKKQGKVYIHKAIVDKGSIKTGDVIKMSVEKEKRSAIAIHHSSTHLVHAALRAVLGDHVQQKGSLVDENKLRFDFSHTKPLTKEEITEIEDIVNKEALKNLEVKTELMKLDDALKSGAMALFGEKYDDDVRVLTMGENSYSVELCGGTHVNRTGDIGFFVITNQSSVASGIRRIEALAGSKSIEHVKKLRDVNLSLQNSLNVSADELQEKVNSLIEENKKLKKSSKSKSAKKSVISSEMHEFGDWKLIVEQVDVEDTKDLRSLADEQKNTNEKLCVVIFTESSNKIALVCGVTKNLTESLSAKEVVSELSNQINGKGGGRSDFAQGAGETDNIKDFVTSIPNSVKSLAK

SEQ ID NO: 191487 - protein, 865 aa, Unknown
  Bacterial polypetide isolated from the Sargasso Sea
MNAKKIRSDFIKFFQDKDHRFIRSSPVVPFDDQTLLFTNAGMNQFKPIFLGSNKADYHRAVNTQKCIRVSGKHNDLEEVGVDVFHHTFFEMLGNWSFGDYYKKEAIKWSWELFTEVWGLDKSRLWVTVYKDDDEAHDIWLQETDIKKDRVLRFGEKDNFWEMGDTGPCGPCSEIHYYVGEEIEDQDPNGVNNTDEYWELWNLVFIQYDRQGDGELIDLPEKHIDTGAGLERIVTVLQDKKSNYETDLFQPIIKGIETITGSKYLNDKVPHHVISDHIRMLSFAIADGAMPSNEGRGYVLRRILRRASRFGRMLGTKEPFLFKLVDYLIDVMGESFPELVEKKIHIEKVIESEESSFNSTLERGLSHFEKYISKHKGNAIPGKEAFKLYDTYGFPLDLTQLMAREKGLEVDEIGFHENMKKQRDRAKASGNFKQVSSDLSWVVISDSKDSIFLGYEQIESQSQICKYATTDDYNVLVLDKTPFYAESGGQIGDTGVIKIGDDTLTVMDCQKNGDEIHHICSGSFNNEKLLEPVLCIIDLNRRQRIRKNHTATHLLHAALKKTLGDHIQQAGSLVHPDYLRFDLTHSEKISNDEVSEIENLVNDEIQKNVRLDISIKNFDIAKSEGAEALFGEKYGDKVRVISIGDFSMELCGGTHVNRTGDIGLLKITEESSLAAGVRRMVAVTGPEAINYFQNKVSIVQELQGILGAKSDEISSRVSHLIDERKVLEKKLKQKRSSSAFNAKVIMEDALKVNEHIIIVSEVDSESLDELKRFGDQTLNVLESGIAVLGSNKGAKPAAVIVVTDDIIKKGLNAGSLAKLVGNEMGGGGGGKPSLATAGGKDLKSYTTAMKKSIDLIKSELKKVEGD

SEQ ID NO: 191488 - protein, 451 aa, Unknown
  Bacterial polypetide isolated from the Sargasso Sea
MPLRKKFGFGIKDKIGPTEFLGYEFNQSEGVVLSIIKNNKEAQNISNGEEGIIITNQTPFYGESGGQVGDQGTIVSGNSVFEVTDTQKKLGDLFIHHGILKSGEIKIKDVVEMKIDIERRNNLKAYHSATHLLHESLRRTLGKHVMQKGSLVAPDRLRFDFSHMKPITEDELKIIDKLVNEYVQNKTDVTTRIMTPKAAIEKGALAFFGEKYGEEVRVVSMGAENNSYFSTELCGGTHVKNTGDIGKFKTVSQSSIAAGVRRVEALRDKQLEIFLKNKEKMSNLSAQKDEDSIKEVSAQIIKLGGKPNLENKDTKGLIKDLNKQLEQLNVQSVLADKTKNIIKDENINGTQVRLQKVQDLSPKDLRKLVDAGKKELGEGIVVVFANKDEKVGLAVGVTENLTNKYDAVKFAKLGSEIIGGKGGGGRKDFAQAGGQDSNKIDEALEKLKTLI

SEQ ID NO: 191489 - protein, 551 aa, Unknown
  Bacterial polypetide isolated from the Sargasso Sea
MADKTLNEIRNTFLKYFEKNDHKIVESSNLVPNNDPTLMFANSGMVQFKNVFTGLEKRDYVRATTSQKCVRAGGKHNDLENVGYTPRHHTFFEMLGNFSFGDYFKEQAIHYAWDLITKDFGIDKNRLYVTVFHEDDEAFNFWKKIAGFSDDRIIRIATSDNFWSMGETGPCGPCSEIFFDHGDHLPGGLPGSKDEDGDRFIEIWNLVFMQFEQVTKDKRINLPKPSVDTGMGLERIAALLQGSHDNYETDHFKKIIGSASEITKVKSDKSNLASFRVIADHLRASSFLIAEGVLPSNEGRGYVLRRIMRRGMRHSHLLGSKEPVFYNLFDTLKNEMSGNYPELVRAESLIKETLKMEEEKFLVLLDRGIKILNDEISKIDKVLPGEVAFKLYDTYGFPLDLTEDILRNKSMSIDTEMFQSLMKESRELAKKNWKGSGDAAVEDIWFGIKDKIEPTEFLGYETNQAEGVVLSLLKDNKEVDHLKENDEGMIIVNQTPFYGESGGQVGDTGEIVSNDFKFEVTDVQKKLGDLFVHYGRVKTGSIKLQESVELK

SEQ ID NO: 191490 - protein, 294 aa, Unknown
  Bacterial polypetide isolated from the Sargasso Sea
MHESLRRTLGTHVMQKGSLVAPDRLRFDFSHMKPITDEEMKKIDENVNKFVNSKTEVVTRLMTPEEGIEQGAMALFGEKYGDEVRVVFMGEEGNKYFSTELCGGTHVKNTGDVGKFKVVSQSSIAAGVRRVEALRDKQLEEYLKSKDKMSSLSSQKNEETIKSLSSEITKLGGKPIKKSDDLKITIKELTKQLEEITVKSILSDKKKNTIKDQNIKKINIRFQKVDDLPFKELRRLVDQAKKDIKEGIVVIYAIKDEKIGLAVGVTDALTKKYDAIKFVKSGSEILGGKGGGGR

SEQ ID NO: 191491 - protein, 651 aa, Unknown
  Bacterial polypetide isolated from the Sargasso Sea
MAKTLNEIRTTFLDYFEKNDHKIVESSNLVPNNDPTLMFANSGMVQFKNVFTGLEKRDYQRATTSQKCVRAGGKHNDLENVGYTPRHHTFFEMLGNFSFGDYFKEKAIELAWNLITKDFGLDKDRLYVTVFHEDDEAFNFWKKIAGFSDDKIIRIATSDNFWSMGETGPCGPCSEIFYDHGDHLYGGLPGTKEEDGDRFIEIWNLVFMQFEQVSKDKRINLPKPSVDTGMGLERIAALLQGTHDNYETDHFKKLINSTSEAVKVKPNENNLSSFRVIADHLRASSFLIAEGVLPSNEGRGYVLRRILRRGMRHSHLLGSKEPIFYNIFKTLMDEMKGNYPEVQRAESLIRETLKMEEEKFLVLLDRGIKILNEEISKIDKVLPGEVAFKLYDTYGFPLDLTQDILKSKSLTIDNDKFNFLMQESRELAKKNWKGSGDSAVDDIWFGIREKLGATEFLGYETNQAEGVVLSLLKDNKEVDQINSGDEAMIIINQTPFYGESGGQVGDKGEIISGEFIFEVEDVQKKLGDLFVHYGKVKKGSIKNNENVEMKIDIERRDNVRAYHSATHLLHESLRRVLGTHVTQKGSLVEPDRLRFDFSHMKPISSDEIEKIETYVNSMVSNKSEVKTRIMTPKEAVNNGALALFGENMEMK

SEQ ID NO: 191492 - protein, 159 aa, Unknown
  Bacterial polypetide isolated from the Sargasso Sea
MKLAEIRKKFLNYFESKNHEIINSSDLVPKGDDSILFTNAGMVQFKDTFLGLDRRNKSATSSQKCLRVGGKHNDLENVGFTTRHQTFFEMLGNFSFGEYFKEGAIDHAWEFLTKELGIPEEKLFITVHENDHESEKYWLDHIGIKKEKISRLGDEDNLS

SEQ ID NO: 191493 - protein, 376 aa, Unknown
  Bacterial polypetide isolated from the Sargasso Sea
FQLYDTYGFPVDLTRLMCDERGLSVDETGFEELMEEQRTRAREAGKFKMTLDDWTEFKEGESEFVGYFQFEADSEVLRYSSSGYDEWQIVLEQTPFYAESGGQIADQGSLIQDGKTWQVSDVQKQGGSIVHYCKGTDKPESGKIKAVVDASKRLQATNNHSATHLMLAAMREILGTHVTQAGSIVNPEYLRFDFTHPEKPTQGEMDQIESRVNDKIRENIPTEIYQTEYQKAIDSGIVAMFGEKYGDVVRVIKLGDFSEELCGGCHVQSTGQIGHFRLVSEEGIASGIRRFVGVTGIQAESINRQENRVAQNLRQLLNVPVEKVTETVEKLLDEKRGLEREIQEMRKQNAGANAGSLLEEAELIGDVHVLARQVEV

SEQ ID NO: 191494 - protein, 456 aa, Unknown
  Bacterial polypetide isolated from the Sargasso Sea
MVAAASSSSAASAPRSGEEIREAFLNFYAERGHKRMASASLIPEDPTVLLTIAGMLPFKPVFLGQQERPAPRATSSQKCIRTNDIENVGRTARHHTFFEMLGNFSFGDYFKQQAIEWAWELSTGVYGIAPKNLVVSVFREDDEAEQIWRDVVGVNHKRIIRMDEADNFWASGPTGPCGPCSEIYYDFKPELGDEGIDLEDDDRFIEFYNLVFMQYNRDAEGTLTPLANRNIDTGMGLERMAQILQKVPNNYETDLIFPLIQAAADLAGVDYHQLNDKGKTSLKVIGDHSRAVTQLICDGVTASNLGRGYILRRLLRRVVRHGRLLGIDKPFLVTMGEAAIALLKGAHPSVIERQEVILSELQREEARFLETLERGEKLLAEVLASKPTQISGAQAFELYDTYGFPLELTQEIAEEQGLAVDLDGFEAAMEEQRQRAKAAAVSIDLTLQDAIDQVVA

SEQ ID NO: 191495 - protein, 184 aa, Unknown
  Bacterial polypetide isolated from the Sargasso Sea
MADKTLNEIRSSFLKYFEKNDHKIIESSNLVPSNDPTLMFANSGMVQFKNVFTGLEKRNYKRATTSQKCVRAGGKHNDLENVGYTPRHHTFFEMLGNFSFGDYFKERGIELAWNLITKDFGLDKNRLYFTVFNEDDEALSLWKKISGLNEDRIIKIPTSDNFWSMGETGPCGPCSEIFYDHGDH

SEQ ID NO: 191496 - protein, 858 aa, Unknown
  Bacterial polypetide isolated from the Sargasso Sea
MKTSEIRQSFLDFFYSKDHEVISSSSLVPNNDETLLFTNAGMVQFKDVFLGTEKRNFNRAATSQRCIRAGGKHNDLENVGYTLRHHTFFEMLGNFSFGDYFKEDAIKYAWEFLTEVLKLDKNKLWITVYKDDDEAEDIWRNIIGIDPKRIARLGDDDNFWSMGDTGPCGPCSEIFFDHGDHIEGTPPGADGDEGDRFVEIWNLVFMQFNKDENGKMELLPKPSVDTGMGLERIAAVMQGVNSNYKTDVFKGLILASEKILKNKNSTSHKVIADHIRSSVFLISDGVIPENEGRGYVLRRIMRRGIRHGYKIGAKKPFMHLLVKDLVKLMSSAYPDLKTKEKDIAKLIKKEEEKFFETLEKGIDILEESISNMSNNKLSGDIVFKLHDTYGFPFDLTADIAREKDLLIDEKRFNIRMNQQKETSKASSSFVSSLPAAAGIEQTIFLGYEGLESDSEVLVIWKDQAKIKEAKSKEEIFIACNQTPFYAEAGGQIGDKGIFASKSATGNILDCKKQGKVYIHKAIIEKGNLKTGDIIKMSVEKEKRSAIAIHHSSTHLVHAALREVLGDHVNQKGSLVDENKLRFDFSHDKPLSQEEISKIEEIVNKEALNNLEVKTELMKLDDALKTGAMALFGEKYDDDVRVLSMGENSYSVELCGGTHVKRTGDIGFFMVINQSSVPSGIRRIEAVAGMKSIEYINKIRKINTSLQSELNVPNEDIQEKIKSLIEENKKLKKQSGTSKSKASIIFSETYEIDDWKLIVEQVEIEDTKELRGLVDNQKNTNEKVCVVIFNADKNKIALVCGVTKNLIDLISAKDVILALSDQIGGKGGGRPDFAQGAGETENLKDFVTSIVNSVKSLAK

SEQ ID NO: 191497 - protein, 578 aa, Unknown
  Bacterial polypetide isolated from the Sargasso Sea
MIKQKNSVNEIRKTFINYFKKNNHQVISSSNLVPENDPTLLFTNAGMVQFKNIFTGLEHREYDKAVSSQKCLRAGGKHNDLENVGRTARHHTFFEMLGNFSFGDYFKEKAIYQAWELLTKEYAIPKERLLVTIYHNDKEADLLWKKISGFKDDKIIKIETSDNFWSMGDTGPCGPCSEIFYDHGDTVEGGPPGSKNEDGDRFIEIWNLVFMQYEQISNNKRISLPKPSIDTGMGLERISALLQNTHNNYETDMMKNLVNASAFLTSTDQNTDNIISHRVVADHLRSMSFLIAEGVLPSNEGRGYVLRRIMRRAMRHTHLLGALDPVIYKLVEYLIKEMGEAFPELVTQKLIIEKTIREEEIKFKDTLDRGMSLLLNEIDEKVSSGVLSGEKAFELYDTYGFPIDLTEDVLRSHGWTVDHSGFESSMNNQKNKARQAWSGSGDKQYNQEILKVLLKLPSTDFQGYDNNFLETQINLIIKNNEIVKNISCGDKVDIIFNKTIFYAESGGQIADKGSLEGVEFKANVLKTKKINIGNNKNIFISTIEVLSGNLQSGDIVKQLIELDHRKQLCSHHSATHLL

SEQ ID NO: 191498 - protein, 868 aa, Unknown
  Bacterial polypetide isolated from the Sargasso Sea
EHKIVESSNLVPNNDPTLMFANSGMVQFKNVFTGLEKRDYVRATTSQKCVRAGGKHNDLENVGYTPRHHTFFEMLGNFSFGDYFKEQAIHYAWDLITKDFGIDKDRLYVTVFHEDDEAFNFWKKIAGFSDDRIIRIATSDNFWSMGETGPCGPCSEIFFDHGDHLAGGLPGSKDEDGDRFIEIWNLVFMQYEQVSKDKRINLPKPSVDTGMGLERIAALLQGTHDNYETDHFEKIINAASDIVKVKSNKTNLSSFRVIADHLRASSFLIAEGVLPSNEGRGYVLRRIMRRGMRHSHLLGSKEPVFYNLFDTLKNEMSGNYPELVRAESLIKETLRMEEEKFLVLLDRGIKILNDEISKIDKVLPGEVAFKLYDTYGFPLDLTEDILRNKSMSIDTEKFKSLMKESRELAKKNWKGSGDAAVEDIWFGIKDRLEPTEFLGYETNQAEGVVLSLLKENKEVDQLKENDEGVIIVNQTPFYGESGGQVGDTGQIVSNEFKFEVTDVQKKLGDLFVHYGKVVSGSIKIKDSVEMRINVDRRDDTRAYHSATHLLHESLRRVLGNHVTQKGSLVEPSRLRFDFSHMKPIQNDEIDKIENFVNDMVSKKSDVKTRLMTPDEAVENGALALFGEKYGDEVRVLSMGDEDGKYFSTELCGGTHVKNTGDIGKFKIVSQSSIAAGVRRIEALRDKQLENYLKNKEKLSALSSEKDDETIKDLSQQITKLGGKPSLDQSDQKNLIKNLTKQLEILSVNSILNDKSKNIIKDQDINGIKLRLQKVDDLPPKELRKLVDQGKKDLSEGIVIVFASKDDKVGIAVGVTESLTGKYDAVEFVKIGSEIIGGKGGGGRKDFAQAGGQDRSKIEDAFEKLKALI

SEQ ID NO: 191499 - protein, 617 aa, Unknown
  Bacterial polypetide isolated from the Sargasso Sea
QLDNQKRINLPRPSIDTGMGLERLAAILQGKHDNYDIDLMDKLITSSAEKSSTHKDGKYKISHRVIIDHLRSSSFLIADGILPSNEGRGYVLRRIMRRGMRHAHILGCKDPLLCKLVPDLIEEMGDAFPELIEAKELIYNSLETEENKFKETLERGIKILDDETKGLTSGQMLDGKVAFKLYDTYGFPFDLTQDILKSKKININEVEFKKEMNKQKKLARSSWKGSGDISYDKLFLEIENKCQPTNFVGYDNEFCTAKVLSIIINSSFVNVAEQGTEALVVFDQTPFYATSGGQLADKGKLNNNNNDFSATVLDCDKTKNGVYLHKIFIEKGNLQINDNIQLFIDANERKSSATNHTSTHILHQSLKDILGMHISQKGSLVSSERLRFDFSHNNSLTKKDLYKIEHYINRKIRENSEVLIREMEISQSKSEGATALFGEKYGDIVRVVSFGKSFDANKSCWSIELCGGTHVKRTGEIGLLKIISEGSVSSGIRRIEAISGTKALEWVNEKYDILKNISELMKSPDENLVDKIISLNEDKRKIEKEFNNYKNNNSHLSNSNEKVVQIGDVKFISKVFNDVSPKNLKGIADKILYNQSDCVVAVITIESNKISLVVGVT

SEQ ID NO: 191500 - protein, 520 aa, Unknown
  Bacterial polypetide isolated from the Sargasso Sea
NEIENTFLKYFEKNDHKIVESSNLVPNNDPTLMLPNSGMVQFKNVFTGLEKRDYKRATTSQKCVRAGGKHNDLENVGYTPRHHTFFEMLGNFSFGDYFKERAIELAWNLITKDFGLDKNRLYFTVFNEDEEAFKLWKKISGLNENRIIKISTSDNFWSMGETGPCGPCSEIFYDHGDHLKGGLPGSKDQDGDRYIEIWNLVFMQYEQVSKDKRIDLPKPSVDTGMGLERMAALLQGTHDNYKTDHFLKLINSISETVKVKPNENNLSSFRVIADHLRASSFLLAEGVLPSNEGRGYVLRRIMRRGMRHSHLLGSKEPIFYNIFKTLLDEMSKNYPELKRAESLIKETLKMEEEKFLVLLERGMKILDDEISKIDKVLPGEVAFKLYDTYGFPLDLTEDILKNKSLQVDNKKFDDMMKKSRELAKKNWKGSGDSSVSEIWFNLKDKIGPTEFLGYETNQAEGSVTAIIKDDKETQQLKEGEEGQIILNQTPFYGESGGQVGDKGTIISGENEFEVTDVQKK

SEQ ID NO: 191501 - protein, 423 aa, Unknown
  Bacterial polypetide isolated from the Sargasso Sea
SGDSAIDDIWFGIKDKLGVTEFLGYETNQAEGVVLSLLKNNKEVKSLNNGDEGMIISNQTPFYGESGGQVGDTGEITSGEFKFKVNDVQKKLGDLFVHYGKVENGNINLNDNIEMRIDQERRDNIRAYHSATHLLHESLRRVLGTHVTQKGSLVEADRLRFDFSHMKPISEDEVEKIETIVNEMVQTQSNVRTRLMTPKEAVNNGALALFGEKYGDEVRVLSMGDEKNKYFSTELCGGTHVKNTGDIGKFKIISQSSIAAGVRRVEALRDKQLEKYLSEKEHLSDISSKKDEELVKDLIKKIEALGGKAKLNNINQKILIKDLSKQLEDLSLKFTLKDKSKNIVNDEVLNGVKVRFQKIIDLPPKDLRKIVDEGKKQLEEGIIIVSATKDEKIGLAIGVTEKLTEKYNAVELVKTASSVIGEK

SEQ ID NO: 191502 - protein, 653 aa, Unknown
  Bacterial polypetide isolated from the Sargasso Sea
MKINSLRDSFISYFVKNGHKHVHSSPLVPQNDPTLMFANSGMVQFKNVFTGLEKTDFNRAVTAQKCIRAGGKHNDLENVGYTLRHHTFFEMLGNFSFGDYFKDDAIDYAWRFITSELGINKDKLCVTIYHDDEQAYNAWKKITGFSDDKIIRISTKDNFWSMGETGPCGPCSEIFYDHGENYIGKPPSEADETGDRFVEIWNLVFMQYEQVDSENRIDLPRPSIDTGMGIERIAAVMQGTNDNYQVDSILEIINHSKELTKNDNENLISSHRVIADHLRSSCFLIADGVLPSNEGRGYVLRRIMRRAMRHVHILNYNDLLMHKLAPTLISNMKMSYPELERAESLINETLKYEEQRFRDLLSRGIKQLDTMIDNLNGKTILNGQSAFKLYDTYGFPIDLTQDILRNKKIEVDIDDFKKCLEDQKEKARSNWTGSGGTATDKIWFELNKSLSPTEFLGYTSEKTEGSIISIIKEGVLVDSLHSGDNGSLILNQTVFYAESGGQIGDTGTIQADNFEFEVSDTQKKGNLYVHHGKVIKGDIKKGTGAHLSINSARRSSCKTYHSATHILHQALREVLGDHVTQKGSLVSFDKLRFDFSHHKSLSESEISKIEQISNTVIEEGSDVETQIMTPDDAVNAGALALFGEKYSDEVRVL

SEQ ID NO: 191503 - protein, 411 aa, Unknown
  Bacterial polypetide isolated from the Sargasso Sea
MKLTEIRKKFLKYFESKKHKVIDSSDLVPHGDDSLLFTNAGMVQFKDTFLGLEKREYSAVSSQKCLRVGGKHNDLENVGFTTRHQTFFEMLGNFSFGEYFKEEAIGFAWEFLTEELKLQKEKLWITVHHTDKDSEKIWLDKIGIEKSKLSRLGDEDNFWSMGDTGPCGPCSEIFYDYGSDYDGSPPGEGDTGDRFVEIWNLVFMEFNRDSNGDLKPLPNKCVDTGMGLERVCSVLQNVGSNFEIDLFKSFKDDIRDLFDSPNEQSLNVIADHLRASFFLLSEQVYPSNEGRGYVLRRLIRRAIRHGYKMGKETPFLYELLENLNSLLKKDFPKEFKDYKSIKKILMEEEELFFKTLSSGIKIFEDNLPKKKSEMMSGDIAFKLHDTYGFPIDLTIAMASEREIEVDEKILE

SEQ ID NO: 191504 - protein, 592 aa, Unknown
  Bacterial polypetide isolated from the Sargasso Sea
MAKTLNEIRSAYLNYFEKNDHKIVESSNLVTNNDPTLMFANSGMVQFKNVFTGLEKRDYQRATTSQKCVRAGGKHNDLENVGYTPRHHTFFEMLGNFSFGDYFKERAIELAWNLITKEFGLDKNRLYVTVYHDDDEAFNYWKKIAGLNEDKIIRIATSDNFWSMGETGPCGPCSEIFYDHGDHLEGGLPGTKNEDGDRFIEIWNLVFMQYEQISKDKRINLPKPSVDTGMGLERIAALLQGTHDNYETDHFKKIINSAAEILKVKPNKENLASFRVIADHLRASSFLIAEGVLPSNEGRGYVLRRIMRRGMRHSHFLGSKEPIFYNIFKTLKDEMKGNYSEIERAESLIKETLRMEEEKFLVLLDRGIKILNEEIAKIDKILPGEVAFKLYDTYGFPLDLTQDILKNKSLTIDNDKFQRLMKESKELAKKNWKGSGDSAVDDIWFSIKDKLGPSEFLGYETDQAEGIVLSLLKDNKEVNALSENDEGMIILNQTPFYGESGGQVGDTGQIISGDFIFEITDVQKKLGDLFVHYGKVKSGSIKIKDNVEMKIDIDRRNNIRAYHSATHLLHESLRRVLGTHVTQKGSLVHRTD

SEQ ID NO: 191505 - protein, 874 aa, Unknown
  Bacterial polypetide isolated from the Sargasso Sea
MYQTTAALRSAFLEFFRSNGHQVVDSSSLVPGNDPTLLFTNAGMNQFKDVFLGMDKRSYTRATTAQRCVRAGGKHNDLDNVGYTARHHTFFEMLGNFSFGDYFKEDAIRFGWTFLTEVLKLPKERLCVTVYQTDDEAFEIWNKKIGVAAENIIRIGDNKGAPYASDNFWQMGDTGPCGPCTEIFYDHGDHIWGGRPGSPEEDGDRFIEIWNIVFMQYNRQASGEMLPLPKPSVDTGMGIERIAAIMQGVHSNYEIDIFRALIAKAAEIIGVTDLSNKSLRVIADHIRSCAFLVADGVMPSNEGRGYVLRRIIRRAVRHGNKLGATEAFFYKLVPTLIEVMGDAAKGLADTQVIVEKALKAEEEQFARTLERGLGILDSALNELQGDTLDGETVFKLYDTYGFPVDLTADVCRERNIIVDEAGFEAAMAEQRSRAQAAGNFGADYNAALKIDAETAFCGYSELTGNAKVTALYLNGESVSAINAGDDAVVVLDVTPFYAESGGQVGDKGVLVAQGIEFAVSDTQKFGQASGHKGTLTAGSLSVGQVLEAKVDKKLRHRTQLNHSVTHLLHAALRQVLGTHVTQKGSLVDPERLRFDFSHFEAVKPAELKQVEELVNTQIRRNHELKVAEMAIDEAKEKGAMALFGEKYDAQVRVVTMGDFSIELCGGTHVGRTGDIGLFKITSEGGIAAGVRRIEAVTGAAAMAYVAQQQAQLEEAAALLKGDTQSVVTKLKAQLDKMKQLEKDMQQLKDKLAAAASADLAGDAVVVNGVNVLIKKLEGVEAGALRGLQDELKQKLKSAVILLGVAQEGKVNLIAGVSNDLVSKVKAGELVAMVAAQVGGKGGGRPDMAQAGGSQPENLDAALSQVLPWITERLA

SEQ ID NO: 191506 - protein, 365 aa, Unknown
  Bacterial polypetide isolated from the Sargasso Sea
FIKFFESEGHQSVKSSPLIPANDPTLLFTNAGMVQFKDIFLGKEDQGFTKAVSAQRCLRAGGKHNDLENVGYTSRHHTFFEMLGNFSFGDYFKEDAIQLAWDFITNELKLEKDRLWVTIFEDDDEAASIWLEKIGVPANRLVRLGEKSNFWSMGDTGPCGPCSEIFYDHGDHIDGGPPGSDDEDGDRFVEIWNLVFMQFDRQANGELVNLPKPSVDTGMGLERIAAVMQGVSSNYDIDLFQKIIAAIKNQSQKGEESHYRVIADHIRSSSFLIMDGVTPDNEGRGYVLRRIIRRALRHGHDLEIESPFFFKLVDVLVGEMGQTYPELLNKKDYIERIILMEEERFAATLSQGMSLLQKEFDRSND

SEQ ID NO: 191507 - protein, 397 aa, Unknown
  Bacterial polypetide isolated from the Sargasso Sea
NEIRSTFLKYFEKNDHKIVESSNLVPNNDPTLMFANSGMVQFKNVFTGLEKRDYQRATTSQKCVRAGGKHNDLENVGYTPRHHTFFEMLGNFSFGDYFKDRAIELAWNLITKDFGLDKNRLYFTVFNQDEEALNLWKKITGFGDDKIIKISTADNFWSMGETGPCGPCSEIFYDHGNHLKGGLPGTKDQDGDRYIEIWNLVFMQFEQISKDKRINLPKPSVDTGMGLERVAALLQGTHDNYKTDHFIKLINSIADTVKKNPNEKNLSSFRVIADHLRASSFLIAEGVLPSNEGRGYVLRRIMRRGMRHSHLLGSKDPIFFNIFKTLMEEMSGNYPELKRAQSLIKETLKTEEEKFLVLLERGMKILDDEINKIEKVLPGEVAFKLYDTYGFSFRFNR

SEQ ID NO: 191508 - protein, 396 aa, Unknown
  Bacterial polypetide isolated from the Sargasso Sea
MIYPLIETAAGLAGVDYRQLDDKGQTSLKVIGDHSRAVTQLICDGVTASNLGRGYILRRLLRRVVRHGRLLGIDKPFLVAMGEAAIALMQVAYPQLDERREVILAELQREEARFLETLERGEKLLADVLAAKPKQISGEQAFELYDTYGFPLELTEEIAEEHGLKVDLAGFEAAMEAQRQRAKAAAVSIDLTLQGAIEQMAAELEATAFRGYEALEHPSCVVALVVNGEPAQQANAGDAVQLVLDSTPFYGEGGGQVGDRGSLSGQDLIVSIEAVNRQRDVFVHAGTIERGQLSVGGLVTAQVDGVCRRRAQAHHTATHLLQAALKQVVDSSISQAGSLVDFDRLRFDFHCPRAVTAAELEQIEALINGWIAEAHSLEVQEMAIEAAKAAGAVAMF

SEQ ID NO: 191509 - protein, 264 aa, Unknown
  Bacterial polypetide isolated from the Sargasso Sea
MKTSEIRQSFLDFFNSKDHEVVSSSSLVPNNDETLLFTNAGMVQFKDVFLGTEKRNFSRAVTSQRCIRAGGKHNDLENVGYTLRHHTFFEMLGNFSFGDYFKEDAIKYAWEFLTEVLKLDKDKLWITVYKDDDEAEEIWKNIIGVAPDRIARLGDDDNFWSMGDTGPCGPCSEIFFDHGEHIDGTPPGHDGDEGDRFVEIWNLVFMQFNRDENGKTSNLPKPSVDTGMGLERIAAVMQGVNSNYETDLFLDLIAASEKVLGNKN

SEQ ID NO: 191510 - protein, 810 aa, Unknown
  Bacterial polypetide isolated from the Sargasso Sea
LKMVGYTPRHHTFFEMLGNFSFGDYFKERAIELAWNLVTKDFGLDKNRLYFTVFNEDEEALNLWKKITGLGEDKIIKIATSDNFWSMGETGPCGPCSEIFYDHGDHLKGGLPGTKDQDGDRYIEIWNLVFMQFEQISKDKRINLPKPSVDTGMGLERIAALLQGTHDNYETDHFKKLINSISEAVKVKPDQKNVSSFRVIADHLRASSFLIAEGVLPSNEGRGYVLRRIMRRGMRHSHLLGSKQPIFYNIFKTLMDEMSGNYPELVRAESLIKETLKTEEEKFLVLLERGMKILNDEISKIDKVLPGEVAFKLYDTYGFPLDLTEDILKNKSLKIDNKKFQTLMNESRELAKKNWKGSGDSSVNKIWFEIKDRLGPSEFLGYETDHAEGKILSLLKDNKEVKSLSDNDEGMIITNQTPFYGESGGQVGDTGEISSGEFKFEVHDVQKQLGDLFVHYGKVVKGSIKLNDNVEMKIDVNRRNDVRAYHSATHLLHESLRRVLGTHVTQKGSLVEPNRLRFDFSHMKPISNDEIKKIENFVNSMVEKKSEVKTRIMTPKEAVDNGALALFGEKYGDEVRVLSMGNEKERYFSTELCGGTHVRNTGDIGKFKIVSQSSIAAGVRRVEALRDKQLQEYLNKKEKLSDLENEKSEETIKDLSQKIIKLGGKPNITNENQQTLIKDLTRHYEQLLVQSTLSDKSKNIISDKTINNVKVRFQKVIDLPPKDLRKLVDNGKKELTEGVIVIFAIKDEKIGLAIGVTENLTKKYDAVKLVKIGSEIIGGKGGGGRPDFAQAGGIDSSKIDNAIEQIKSLI

SEQ ID NO: 191511 - protein, 107 aa, Unknown
  Bacterial polypetide isolated from the Sargasso Sea
MADKTLNEIRNTFLKYFEKNDHKIVESSNLVPNNDPTLMFANSGMVQFKNVFTGLEKRDYVRATTSQKCVRAGGKHNDLENVGYTPRHHTFFEMLGNFSFGDYFKEQ

SEQ ID NO: 191512 - protein, 889 aa, Unknown
  Bacterial polypetide isolated from the Sargasso Sea
MAAAASSSSAASAPRSGEDIREAFLNFYAERGHQRMASASLIPEDPTVLLTIAGMLPFKPVFLGQQQRPAPRATSSQKCIRTNDIENVGRTARHHTFFEMLGNFSFGDYFKQQAIEWAWELSTGVYGIDPENLVVSVFREDDEAEQIWRDVVGVNPKRIIRMDEADNFWASGPTGPCGPCSEIYYDFKPELGDDGIDLEDDDRFIEFYNLVFMQYNRDAEGNLMPLANRNIDTGMGLERMAQILQKVPNNYETDLIFPLIQAAADLAGVDYHQLDDKGKTSLKVIGDHSRAVTQLICDGVTSSNLGRGYILRRLLRRVVRHGRLLGIDKPFLVTMGEAAIALLKGAHPSVIERQEVILAELQREEARFLETLERGEKLLAEVLASKPTQISGTQAFELYDTYGFPLELTQEIADEQGLMVDLDGFEVAMEEQRQRAKAAAVSIDLTLQDAIEQVAAEQHATAFKGYDALDQPSTVQALVVNGAPASTASAGDAVQVVLDSTPFYGEGGGQVGDRGSLSGVDVIVAIDSVSRSRDVFVHSGRVERGELALGDTVNAQVDRSCRRRAQANHTATHLLQAALKHVVDPGIGQAGSLVDFDRLRFDFHCPTAVTAEQLAQIETLINGWIADAHSLEVQEMAIEQAKAAGAVAMFGEKYADVVRVVDVPGVSMELCGGTHVANTAEIGLFKIVAESGVAAGIRRIEAVAGPAVLAYLNERDAVVKQLGDRFKAQPGEIVERVTALQDELKATGKALAAAQAELAVAKAGALAAKVEAAGEFQLLVERLDGVDGAGLQGAAQSLADQLGDGAAVVIGGLPDPGDMGKVILVAAFGKQVIAAKLQAGKFIGGIAKLCGGGGGGRPNLAQAGGRDGAGLQTALDAAGDQLRSVLVKA

SEQ ID NO: 191513 - protein, 437 aa, Unknown
  Bacterial polypetide isolated from the Sargasso Sea
MLGNFSFGDYFKEDAIKYAWEFLTEVLKLDKDKLWITVYKDDDEAEEIWKNTIGVDASRIARLGDDENFWSMGDTGPCGPCSEIFFDHGEHIEGSPPGADGDEGDRFVEIWNLVFMQFNRDEDGNMEPLPKPSVDTGMGLERISAVMQGVNSNYETDVFKDLILASEKILANKNSTSHKVIADHIRSTVFLISDGVIPENEGRGYVLRRIMRRGIRHGYKIGAKQPFMHLLVKDLVKLMHSAYPELKKKEKDITKLIKEEEIKFFETLEKGIDILEETISNMSNKTISGDVVFKLHDTYGFPFDLTADIAREKDLLIDEKRFKERMDQQKETSKASSSFVSSLPAAAGVKETIFLGYESLESDSKILAIWKDQERIKKAKSKEEIFIACNQTPFYAEAGGQIGDKGIFASRSATGTIVDCKKQGKVYIHKVIVKKEI

SEQ ID NO: 191514 - protein, 295 aa, Unknown
  Bacterial polypetide isolated from the Sargasso Sea
MAKTLNDIRTAFLKYFEKNDHKIVESSNLVPNNDPTLMFANSGMVQFKNVFTGLEKRNYQTATTSQKCVRAGGKHNDLENVGYTPRHHTFFEMLGNFSFGDYFKERAIELAWNLITKDFGLNKEKLYVTVFHEDDEAFNFWKKIAGFSDDKIIRISTSDNFWSMGETGPCGPCSEIFYDHGEHLKGGLPGSKDEDGDRFIEIWNLVFMQFEQVSKEKRINLPKPSVDTGMGLERISALLQGTHDNYQTDHFKKLIESISETLKVKQDQNNISSFRVIADHLRASSFLIAEGSFTF

SEQ ID NO: 191515 - protein, 855 aa, Unknown
  Bacterial polypetide isolated from the Sargasso Sea
MKSTAHIRKTFLNYFEKNDHKIVHSSPLVPINDPTLMFVNAGMVPFKNYFEGKEEPDFLKATSSQKCVRAGGKHNDLDNVGHTTRHLTFFEMLGNFSFGDYFKEEAIKLAWDLLVNEFEIPSNRLLLTVFKEDTEAEEIWKKVSGFSDNKIIKISTDDNFWSMGDEGPCGPCSEIFFDHGDSVDGGPPGSKNEDGDRFVEIWNLVFMQYLQLSNKNRESLPKPSIDTGMGLERISTVLQGKTSNFDTDLFITIINHIEEIIKINKTDENIASFRVIADHLRSIAFLISDGVLPSNEGRGYVLRRIMRRAMRHAYLLNIKEPVLYSLIKKIVTLMSDAYPELSRAEKLIEVTVFEEEERFISTLSKGIKIFNDESKSLNPGDVFSGSTAFKLYDTYGFPLDLTEDLIRDKNLKLDKDSFDSEMRKQKEEAKKSWLGSGDSKTDEIWFEVANECEATEFLGYQNNKSAAEISRIIYKNKISNKIKHGDEAILVFNQSPFYAESGGQMGDVGIAKNDNFIFRISDTQKKTNNIHAHYGVVEKGSVSVGDTVNLQIESDHRRMIMCNHSATHLLHESLRRVLGDHVTQKGSQVSAEKLRFDFSHQKSLDSDEITRIEETINNLIRDDSEVMVEVLTYEKAVESGALALFGEKYSSEVRVLTMGHDSFSKELCGGTHVKSLGEIENFKIISQSSVASGIRRVEAVTGSIALNSLSLIDKINEKERKLEEKKQTKAKEKIISKDILNGKIEEFNKSKFFFDQISGVNTKNLRHLVDECKKDIGTGIVCLISTNEGKSSIAIGVTNDLLDDYDAVELVKIGSEIMGGKGGGGRKDMALAGAKDISKSDHVFEQLIKKLKENI

SEQ ID NO: 191516 - protein, 334 aa, Unknown
  Bacterial polypetide isolated from the Sargasso Sea
FNDEIAKIDKVLPGDVAFKLYDTYGFPLDLTEDILKNKSLKIDHEKFQSLMKESRELAKKNWKGSGDSAIDDIWFGVREKLGATEFLGYETNQAEGVVLSLFKDNKEVDQLKSGEEGMIIVNQTPFYGESGGQVGDEGEIISGDFKFEVKDVQKKLGDLFVHYGNVKSGSIKLNSSVEMKINVSRRDNIRAYHSATHLLHESLRRVLGEHVTQKGSLVEPERLRFDFSHMKPISADEITKIETYVNTMVEKKSDVKTRLMTPKEAVENGALALFGEKYGEEVRVLSMGDEESSYFSPELCGGTHVRNTGDIGKFKDSKPIINSSRSKKSGGFKR

SEQ ID NO: 191517 - protein, 347 aa, Unknown
  Bacterial polypetide isolated from the Sargasso Sea
MSEIRGKFLDYYSRNKHQKVESSNIVPNNDPTLMFTNSGMVQFKNVFTGLEKKPFKTAATSQKCIRAGGKHNDLENVGYTPRHHTFFEMLGNFSFGDYFKEKAIYYAWELLTKDFGIPKNKLSATVYSKDEEAYQLWKKIAGLPESKIVKISTSDNFWSMGETGPCGPCSEIFYDHGEKLKGGPPGSPDQDGDRFIEIWNLVFMQFEQISKDKRVELPKPSVDTGMGLERITAVLQGTHDNYNIDHFKKLMTASSEITKTKINDKNIASHRVIADHLRASSFLIAEGVLPSNEGRGYVLRRIMRRGMRHAHTLGSKNPIFYKLFEVLLKEMSESYPELKRGKDLIVE

SEQ ID NO: 191518 - protein, 511 aa, Unknown
  Bacterial polypetide isolated from the Sargasso Sea
KIQKGDKDNFWHMNIPGPCGPCSEIFIDRGPDYGQDGGPIGGGEDRFIEIWNLVFMQSIQDEPYNVVGDLPAKNIDTGMGLERMAMVLQDKDSPFEIDTFQNLYNELNTYIVNKDKKYERIVLDHIKSAVFMISDGVVPTNEGRGYILRRIIRRAVRAIYRLTDELMSLDFLINIVINDYQDSYPELLSNKDKILSLYKNEEELFQNTLVKGNQEIQSILKKKSSIDEKDAFYLFETFGFPFELTQETAKEHDIVIDYDKFNDLFNEHRKKSNSGKKEKISNNISDVDNNTFVGYDKLSVTSDIYHVENQENDSVIFTTQTPFYFEAGGQISDIGNIVINGKDITVKDVVQSDNGATGIVVESNILKVGDKIELNVDPSFRSSVSKSHTAAHIVHASLRNILGDHVAQAGSHVAPGKFRFDFSHTEKVKNEELNEIFKMSNDSIYKDIEVKTNVMNIDQAKKEGALAFFGDKYEDDVRVVNIGEFSKELCGGTHVHNFYEVGLFVLLMNPS

SEQ ID NO: 191519 - protein, 306 aa, Unknown
  Bacterial polypetide isolated from the Sargasso Sea
DTYGFPSEIVEEIAVEKNIKLDLKGFNKLMNNQRSKSRKNSNFEIKDTSFINKETHSLFVGYENLSLSSNVLEIYVSDKSIKTLNQLNTPFMLVTDNTPFYPEGGGQISDIGVISSKNTKIKVLNVQKINNLILHHTILESGEITVGDRVQMEIDAPRRKKITINHSSTHLLNQALREVLGSHVEQKGSLVTDKYLRFDFSHNKPLTSDEIQSIEKIISNEISACVSTKQKVTSYKKAIESGALAFFDEKYDDEVRVVNIGSNSVELCGGTHITDTSSIRLFKILNESAVSTGIRRIEAITGDEAY

SEQ ID NO: 191520 - protein, 815 aa, Unknown
  Bacterial polypetide isolated from the Sargasso Sea
MVQFKDVFLGQEKLKYSRATTSQKCIRAGGKHNDLENVGYTLRHHTFFEMLGNFSFGDYFKEEAIVFAWEFLTDVLKLDKDRLWITVYKDDDEAKEIWINKIGIDPDKIAKLGDKDNFWSMADTGPCGPCSEIFFDHGDKYEGTPPGEDGDEGERFVEIWNLVFMQFNRDTDGVLHDLPKPSVDTGMGLERIAAVMQGVGSNYETDIFSNLIEESEKVLGSAGDVSHKVIADHLRSSCFLISDDVFPSNEGRGYVLRRILRRAIRHGYKIGADKPFMYQLVKTFVNAMGNAYPQLKNDEERIKKLIKNEETQFLQTLDKGIQILDSTLAEGNKEIISGDLAFKLHDTFGFPFDLTADIAREKGIDIDEKGFKKNMESQQQMSKASSSFVSKIPTAEDLKETDFIGYEHMSSDSNVIAIWNKNEKIELANEPQEYFIALNQTSIYAESGGQVGDRGWFKSKNAEGSILDCKKSGKVFMHLIKLDKGSLKIDDKIEVNVNKEKREKTEAHHSATHLVHAALKRVLGDHVKQKGSLVDEHKLRFDFSHDESLSDEEISKIEDLVNEEILKNSAVSTKIMDLEDAKNSGAESLFGEKYEDQVRVLSIGEDDFSLELCGGTHISRTGDLGIFIITSQSSVASGIRRIEALSGPRAQEYLSNLKNQTIQLQKLLNTPAEEIEDKVSKLLKENKSLKKGGKTAKAATIKSSNTHDIDNFKLVIEEAESEDIKELRPLLDEKTKNVNNSIFILLSSKNETLTILCSVSKDLQSRISAKDLINALTLPIEGKGGGRVEFAQGAGKPSDREKFVSDIPNIVQSLA

SEQ ID NO: 191521 - protein, 481 aa, Unknown
  Bacterial polypetide isolated from the Sargasso Sea
MLTSELRSKFLDYFKKNSHEVVDSSPLIPANDETLLFTNAGMVQFKDVFLGSDKRPYKRATTTQRCIRAGGKHNDLENVGYTLRHHTFFEMLGNFSFGDYFKEEAIQLAWNFLTNELGIKKEKLWISVFRDDDEAAEIWSANIGIDPERIVRMDEEDNFWSMGDTGPCGPCSEIYYDHGDQYEGTPPGTPGDEGDRFVEIWNLVFMQFNRGADGKLTPLPKPSVDTGMGLERVAAVMQGVNSNYETDLFQNLIKASEKAIKSPGDPSHKVIADHIRSISFLISDGILPSNEGRGYVLRRIMRRAIRHGYKIGAKKPFLHKLVKALVKEMGAAFPMLVDSQKSIEKIVHEEEKKFLETLEKGIEILDKEINSIDSKIIPGEIIFKLHDTYGFPFDLTADIAREQDLDLDEEGFNNCMDEQIKNSKSASKFKGLKLDLSSIKETKFLGYEELCGKGKVLGIWNESNAIDNASDQNECFIAVDK

SEQ ID NO: 191522 - protein, 642 aa, Unknown
  Bacterial polypetide isolated from the Sargasso Sea
ELDIQSIDTGMGLERIGALLQGSHDNYDTDTMRNLMLASAEATSSDLDGKHNVHHRVIADHLRSTAFLIADGVLPANDGRGYVLRRIMRRAMRHIHLLGSKKPVMHNLVVSLVQQMGSAYPELGLAQSLIEETLLQEETRFRQTLDRGLKLLDDELAKVPKGEQFSGETAFKLYDTYGFPLDLTQDALREKGHVVNTAAFDTAMADQKAKARAAWVGTGQLTDDAIWFELADNIAPTDFLGYETDTAEAQLQKLVNDGVEVSSAKAGDKVQLIFNQTPFYAESGGQVGDQGYAQASDCMIQINDTKKFDGLFIHSGTVSKGSVREGDSLSLFVDAARRNRIKANHSATHLLHEALRQLLGDHVAQRGSLNAEDRLRFDFSHSSLLTNEEIQSIEKSVNKYIRQNSFVQTRIMTPDDARGIGAQALFGEKYGDEVRVVSLGHQKDSGKGLGGETYSLELCGGTHVKQTGEIGAFTILSDSASSSGVRRIEALTGESAITHLAKKSQQVNELSSFLKVSADELTQRVNALMKERKNFTSEVAELKRKLALSGKGNSEAESAEQINGVSFFTQIYSGISGKDLPSLVDEHKDRLKNGVILLITESDNRVAVAAGVSSDLTDEISAVDIVRTAVPELGGKGGGGRP

SEQ ID NO: 191523 - protein, 253 aa, Unknown
  Bacterial polypetide isolated from the Sargasso Sea
MVNVKEIRNNFLEYFKKNGHEVVNSSPLVPENDPSLLFTNSGMVQFKNVFTGSENRPYKRAVTTQKCVRAGGKHNDLDNVGYTARHHTFFEMLGNFSFGDYFKDTAIELAWNLITKEFSLPKEKLLITIFNEDIESEVIWKKISGFTDSKIIKISTEDNFWRMGEFGPCGPCSEIFYDHGDKINGGPPGSKNEDGDRFVEIWNLVFMQFEERKDGRILLPKPSIDTGMGLERVSAILQGKTDNYEIDLIKKIF

SEQ ID NO: 191524 - protein, 574 aa, Unknown
  Bacterial polypetide isolated from the Sargasso Sea
MTKLNEIRSKFIDYFIKNNHEEVQSSPLVPMNDPTLMFTNSGMVQFKNVFTGDETRDIPRAVTSQKCVRAGGKHNDLDNVGYTARHHTFFEMLGNFSFGDYFKERAIPLAWDLVTKEFGLPKEKLLVTVYHDDDEAVNLWKSYAGLSENKIIRINTSDNFWSMGATGPCGPCSEIFYDHGDKIEGGPPGSKNEDGDRFIEIWNLVFMQFYQMEGGGRENLPKPSIDTGMGLERMAAILQGKHDNYDTDLMRSLIEESAKISSTDPDGSSKNHHRVISDHLRSAAFLIADGVMPSSEGRGYVLRRILRRAMRHGNLMNISEPFIYKLVGKLVDLMGGAFPELNSNQSLIEKALHAEESKFITTLDKGLSLLESEIRDLGNGQVLDGKIAFKLYDTFGFPLDLTQDALREKNMTVDLNGYEAEMKAQKERARNAWSGSGSISEDKAWLKIIENNEKTEFLGYDQLQCEGLVMSFNVSGSEVSKVKGGETAQMLCNQTSFFGESGGQVGDKGVIESSTGTGKVENVFNIRGFVIHEVAVTEGEISVGQTLKLSVEESNRFKIRANHSATHSYTKHFG

SEQ ID NO: 191525 - protein, 382 aa, Unknown
  Bacterial polypetide isolated from the Sargasso Sea
LPKPSVDTRMGLERIAAVMQGVNSNYETDIFQDLILFSEKILGHKDSESHKVIADHIRSSVFLILDGVIPEKEGRGYILRRIIRRGIRHGYKIGATKAFMHLLVSDLVNLMSSAFPELKNKQKEITKVIQKEEIRFFETLENGIEMLEDSISKMTNNIISGDIAFKLHDTFGFPYDLTADIAREKNMTVDETRFNECMDIQKTTSKASSTFVSSLPEASGVEETNFLGYEKLESQSEVLEIWKDQKRTRTANISDEVFIAFDQTPFYAEAGGQVGDKGKFASESAAGNILDCKKQGKVFLHKAIIKKGKINTGDVIKMSVEKEKRKATAIHHSSTHLVHAALRKVLGDHVQQKGSLVDENKLRFDFSHDKPLTQDEIVNIEG

SEQ ID NO: 191526 - protein, 278 aa, Unknown
  Bacterial polypetide isolated from the Sargasso Sea
MITRIVESSNLVPNNDPTLMFANSGMVQFKNVFTGLEKRDYQRATTSQKCVRAGGKHNDLENVGYTPRHHTFFEMLGNFSFGDYFKEKAIELAWNLITKDFGLDKDRLYVTVFHEDDEAFNFWKKIAGFRDDKILRIATSDNFWSMGETGPCGPCSEIFYDHGDHLYGGLPGTKEEDGDRFIEIWNLVFMQFEQVSKDKRIILPKPSVDTGMGLERIAALLQGTHDNYETDHFKKLINSTSEAVKVKPNEKNLSSFRVIADHLRASSFLIAERCSTIK

SEQ ID NO: 191527 - protein, 241 aa, Unknown
  Bacterial polypetide isolated from the Sargasso Sea
MKTSEIRQSFLNFFDSKDHKVMPSSSLVPNNDETLLFTNAGMVQFKDVFLGTETKNYSRATTSQRCIRAGGKHNDLENVGYTLRHHTFFEMLGNFSFGDYFKEDAIKYAWEFLTEVLKLDKDKLWITVYKDDDEAEEIWKNTIGVDASRIARLGDDENFWSMGDTGPCGPCSEIFFDHGEHIEGSPPGADGDEGDRFVEIWNLVFMQFNRDEDGNMEPLPKPSVDTGMGLERISAVMQGVN

SEQ ID NO: 191528 - protein, 417 aa, Unknown
  Bacterial polypetide isolated from the Sargasso Sea
TTFLGYEELESDSKILVIWKDQERVDNAKNKDEIFIACNQTPFYAESGGQIGDKGKFASKSATGNILDCKKQGKVFIHKAVVEKGKIKTGEVIKMSVEKEKRAAIAIHHSSTHLVHAALREVLGDHVQQKGSLVDENKLRFDFSHSKPLTQDEISKIESIVNKEALNNLEVKTELMKLDDAMKSGAMALFGEKYDDDVRVLTMGENSYSVELCGGTHVQRTGDIGFFIIINQSSVASGIRRIEAVAGMKSLEHIKQIRDINLSLQNTLNVPADVVHEKIKLLIEENKKLKKGSNNKTSKKSVVASETHEINDWKLIIEQVEIDNTKDLRNLVDEQKNTNEKLCVVILSTTGNKVALVCGVTSNLADSLSAKDVISKLSGDIGGSGGGRSDFAQGAGETENLKEFVTSIPNSVKSLEK

SEQ ID NO: 191529 - protein, 392 aa, Unknown
  Bacterial polypetide isolated from the Sargasso Sea
FMLSPVGKLRDKGTITSDTAEFKVTDTRKTPQGLFIHFGNVTSGNFKIGQEVKLKIDTSLRDLIKKNHSATHLLHAALRNNLGTHVAQRGSLVNEDKLRFDFSHNKQISTEQIEIIQKEVTSIISNSCETQIDIKSQDEAIKQGAMALFGEKYGDEVRVVTLGENNNKPYSIELCGGTHVTNVQNIKKFHIISEESVSSGVRRIEACTGNKVDEFISNKLKESKLLEKKLDDKIKNLISQIKKLDGKISFSEDNKNIFIKKLENYLESLKNKSILSNNDNNKIDEININGINFVSQVIDNLPPKELRSIFDKFKSEKSKSILACITINDDKVSIVVGLTNDLIDLYDARELIKSTFEILGSKGGGGRVDFAQAGGNKKDQVNQAFLSIKNQI

SEQ ID NO: 191530 - protein, 550 aa, Unknown
  Bacterial polypetide isolated from the Sargasso Sea
MAKTLNEIRSTFLDYFEKNDHKIVESSNLVPNNDPTLMFANSGMVQFKNVFTGLEKRDYQRATTSQKCVRAGGKHNDLENVGYTPRHHTFFEMLGNFSFGDYFKERGIELAWNLITKDFGLNKDRLYVTVFHEDDEAFNFWKKIAGFSDDRIIRIATSDNFWSMGETGPCGPCSEIFYDHGDHLKGGLPGTKDEDGDRYIEIWNLVFMQFEQVSKDKRINLPKPSVDTGMGLERIAALLQGTHDNYETDHFKKLISSISEFTKVKQDENNLSSFRVIADHLRASSFLLAEGVLPSNEGRGYVLRRIMRRGMRHSHLLGSKEPVFNKIFDTLKDEMKGNYPELERSETLIKETLKMEEEKFLVLLDRGIKILNDEISKIKKVLPGEVAFKLYDTYGFPLDLTEDILKNKSLTVDQNKFDELMKKSKELAKQNWKGSGDASEEEIWFGIKDKIGPTEFLGYEFNQSEGVVLSIIKNNKEAQNISNGEEGIIITNQTPFYGESGGQVGDQGTIVSGNSVFEVTDTQKKLGDLFIHHGILKSGEIKIKSIVEMK

SEQ ID NO: 191531 - protein, 479 aa, Unknown
  Bacterial polypetide isolated from the Sargasso Sea
MKTNEIRQSFLDFFESKHHEVVPSSALVPNNDETLLFTNAGMVQFKDVFLGTDKKSYKRASTSQRCIRAGGKHNDLENVGYTLRHHTFFEMLGNFSFGDYFKEEAIEFAWEFLTEVLKLDKDKLWITVYKDDDEAEEIWKNKIGIDPKRIARLGDEDNFWSMGDTGPCGPCSEIFYDHGDHIEGTPPGADGDEGDRFIEIWNLVFMQFNRDESGDMEPLPKPSVDTGMGLERITAVMQGVNSNYETDIFKDLIIASEKILGDKGSTSHKVIADHIRSSVFLISDGVIPEKEGRGYVLRRIMRRGIRHGYKIGATKPFLHLLVKDLISLMKQAYPELEDNYENIVKIIKNEETKFFETLQNGIEILEETISTMQNNTISGEIVFKLHDTYGFPFDLTADIAREKQLLIDEDGFNKCMKQQQEASKSSSHFVSSLPAASGVEETKFLGYDQLQSESEILVIWDGQERIENALKGTRNIYSM

SEQ ID NO: 191532 - protein, 392 aa, Unknown
  Bacterial polypetide isolated from the Sargasso Sea
MRTPLKGQEIFIACNQTPFYAESGGQIGDKGRFASDSATGNILDCRKQGKVFIHKAIIESGEIKKGDLIEMSVEKEKRIAIAIHHSSTHLLHAALREVLGDHVQQKGSLVDESKLRFDFSHDKPLTQNEIATIEKIVNKEALNNLEVKTELMKLDDAIKSGAMALFGEKYDDDVRVLTMGENSYSVELCGGTHVARTGDIGFFAITTQSSVASGIRRVEAVAGMQALNYIKKLKEVNSSIQNLLNVSADDMHDKIKSLIDENKDLKSKGNKNSKREIVFSESLQINDWKLVIQQVQLDDTKDLRLLADEQKNTNEKVCVVIFSEQNNKIALVCGVTKNLTDILSAKEIVSVISEAIGGKGGGRPDFAQGAGESKNIKDFVTSIKDSVKSLAK

SEQ ID NO: 191533 - protein, 353 aa, Unknown
  Bacterial polypetide isolated from the Sargasso Sea
SQKCVRAGGKHNDLENVGYTPRHHTFFEMLGNFSFGDYFKERAIELAWNLITKEFGLDKNRLYVTVYHDDDEAFNYWKKIDGLSENKIIRIATSDNFWSMGETGPCGPCSEIFYDHGDHLEGGLPGTKNEDGDRFIEIWNLVFMQFEQISKDKRINLPKPSVDTGMGLERIAALLQGTHDNYETDHFKKIINSTAEILKVAPNNDNLASFRVIADHLRASSFLIAEGVLPSNEGRGYVLRRIMRRGMRHSHLLGSKEPIFYNIFKTLKDEMKGNYSEIERAESLIKETLRMEEEKFLILLDRGIKILNEEITKIDKILPGEVAFKLYDTYGFPLDLTQDILKNKSLTIDNDKF

SEQ ID NO: 191534 - protein, 676 aa, Unknown
  Bacterial polypetide isolated from the Sargasso Sea
DYFKEQAIHYAWDLITKDFGIDKNRLYVTVYHEDDEAYNFWKKIAGFSDDRIIRIATSDNFWSMGETGPCGPCSEIFFDHGDHLPGGLPGTKDEDGDRFIEIWNLVFMQFEQVTKNKRINLPKPSVDTGMGLERIAALLQGTHDNYETDHFKKIINSASEIVKVKSEKSNLSSFRVIADHLRASSFLIAEGVLPSNEGRGYVLRRIMRRGMRHSHLLGSKEPVFYNLFDTLKNEMSGNYPELVRAESLIKETLKMEEEKFLVLLDRGIKILNDEISKIDKVLPGEVAFKLYDTYGFPLDLTEDILRNKSMLIDTEKFQSLMKESRELAKKNWKGSGDAAVEDIWFGIKDKLEATEFLGYETNQAEGVVLSLLKDNKEVDQLKENDEGMIIVNQTPFYGESGGQVGDTGEIVSNDFKFEVTDVQKKLGDLFVHYGKVKSGSIKLQESVELKIDVERRDNTRAYHSATHLLHESLRRVLGTHVTQKGSLVEPSRLRFDFSHMKPILNEEIDKIEEFVNTMVSKKSDVKTRLMTPDEAVENGALALFGEKYGDEVRVLSMGDEDGKYFSTELCGGTHVKNTGDIGKFKIVSQSSIAAGVRRIEALRDKQLEEYLKNKEKLSNLSAEKDEETIKELSQQIIKLGGKPSLEETDQKTLIKNLTKQLETISVNAILEDKSKN

SEQ ID NO: 191535 - protein, 504 aa, Unknown
  Bacterial polypetide isolated from the Sargasso Sea
LYDTYGFPLDLTQDYLKSKNIEVDIKTFKQKMLDQKERARQSWRGTGDIEDEGIWFEITSKIEQTEFLGYSDMEADCKIISIISDGKSVDLIKKDQEATIILNQTPFYGESGGQVGDQGFFENDNFKFEVINTTKIFGNYFLHKGKVTRGGCKVEDTIKASINTVNRDFIKYNHSSTHLLHAALRKILGKHVTQKGSLVNSEKLRFDFSHNNPIEKDQLINVEEIVNDQIQKNGIVEIKIIDQKKAIEEGAMALFGEKYSDEVRVVTMGQENESFFSKELCGGTHVVKLGEISKFKITNQSSVASGIRRIEAVSNVAVDKYIKEIERNLLEKNKNQDNQIEDLKNKIKKINADYNFKNQSEDKGLLIKELIQIHEKLKQNMSISKNIDNIVVKKIKELNFIYLIAEDYPNKSLKTFIDEQKKQYNKNSVSLIISNNENKLSIVLGVTEDITDLFDASKEIREISIILGGKGGGGRKDLAQGGGSDVSQINESIKYVEDKLNSIS

SEQ ID NO: 191536 - protein, 99 aa, Unknown
  Bacterial polypetide isolated from the Sargasso Sea
MATSPLTTNEVRKIYLDFFEEKGHTLVESASLVPLNDPTLLFINAGMAPFKDLLLGVEKRNYTRAVSSQRCMRAGGKHNDLDNVGYTARHHTFFEMLGN

SEQ ID NO: 191537 - protein, 498 aa, Unknown
  Bacterial polypetide isolated from the Sargasso Sea
PFIFDLVSSVGDVMGDTFPELIDKKLHIEKIIKSEELSFNDTLDRGLSHFKKVIKNVSGKKVSGADAFKLYDTFGFPLDLTELMAREKGLVVDVKGFDREMNHQKKRAKGSDKFVADVTNKKWKELSKDPDSIFVGYETTTLTSKIVRYVKSDDSFLLVLNQTPFYAEAGGQVGDKGTIKGSNVDLEVYDVQLEGETYIHYCRGTMNPKTKNVECKVDDSRRQRTRKNHTATHLMHKALKVVLGGHVQQAGSLVHPDYLRFDLTHFEKISSDQIERIEKIVNDEITKNTELDVSVKPYDDAKNEGAVAMFGEKYGDEVRVITVGDYSKELCGGTHVERTGDIGFFKIIEESSLASGVRRVVAVTGPESVSFVQNQSLTLSDIKSQLNCSLDSISERISQLISDKKLLEKKLKNNRKLSSNFNVDSILKESQLIKEVTVFTKLINADSIEDLKDIGNLLIQKVDKGIGVLGADLEKPSIVVVVSNALVDIGVHAGTIAK

SEQ ID NO: 191538 - protein, 370 aa, Unknown
  Bacterial polypetide isolated from the Sargasso Sea
TKDFGIDKKRLYVTVFSEDDEAFNFWKKIAGLSEDRIIRIATSDNFWSMGETGPCGPCSEIFFDHGDKLQGGLPGTKEQDGDRYIEIWNLVFMQFEQISKDKRINLPKPSVDTGMGLERVAALLQGTYDNYETDHFKKIISSTSEAAKVKPNENNLSSFRVIADHLRASSFLIAEGVLPSNEGRGYVLRRIMRRGMRHSHLLGSKEPIFYNIFKTLMEEMSGNYPELKRAEALIKETLKMEEEKFLVLLERGMKILDEEITKIDKVLPGEVAFKLYDTYGFPLDLTQDILKNKSLQIDSKKFDDLMKKSRELAKKNWKGSGDSAVDDIWFAIRDKLGATEFLGYETDQAEGIIKSLLKNNQQVDSLKTRR

SEQ ID NO: 191539 - protein, 487 aa, Unknown
  Bacterial polypetide isolated from the Sargasso Sea
LPGEIAFKLYDTYGFPLDLTADILKNKNIKIDSSAFNKAMKKSKELARASWKGSGDKSVEEKWFKVREQLNPTEFLGYEFDKAEGIVLKISKGNKFVENAKEGDEVEVITNQTPFFGESGGQVGDQGIISNSKCKINIQDTQKKIGDLFVHYGTVQKGSFAVGDNVNLEINIQKRNNARANHSATHLLHESLRRTLGKHVTQKGSLVSPDRLRFDFSHNKPIEKDEMIKINKIVNEIVNGASDVQTRIMTPKEAVNLGALALFGEKYGDEVRVVFMGKEKNGFFSTELCGGTHVKNTKEVGEFKVISQSSIASGIRRVEALRKIQLQDYEKSLKEDKSLKEKNLKNQINLIKKDLLKLKVQPDFKDNVDLSENLKNLNKQLEKIKIKKIIEDKSKNIIKDKKVGSFIFRQQVLIDFPPKELRSVIDQGKKDIKNGIVVSISTFEGKVGVAVGLTKDLTKKFDAVELVKIASNVLGGKGGGGRGDFAQ

SEQ ID NO: 191540 - protein, 418 aa, Unknown
  Bacterial polypetide isolated from the Sargasso Sea
MNSNKIRSTFLDYFKKNGHEIIHSSSLVPDNDPTLMFANSGMVQFKNIFTGKEKREYSRATTAQKCVRAGGKHNDLENVGYTTRHHTFFEMLGNFSFGDYFKDLAIELAWNLITKEYSINKDRLLVTVYSEDQEAFDLWKKIAGLSENKIIKISTSDNFWSMGETGPCGPCSEIFYDHGDKYQGGPPGSPNEDGDRFIEIWNLVFMQFEQISKSERINLPKPSIDTGMGLERMTALLEGSNDNYSTDLFQPIINESTKLCGNESSIDNPSHRVIADHLKSSSFLIADGVMPSNEGRGYVLRRIMRRGMRHAHSLGNKEPIFHKLFPIFLDGIKNSYPELDRAKDLIINSLINEETKFKETVEKGIKILDEEISNSTNIFNGEVAFKLYDTYGFPLDLTQDYLKSKNIEVDIKTLNKKC

SEQ ID NO: 191541 - protein, 307 aa, Unknown
  Bacterial polypetide isolated from the Sargasso Sea
YVLRRIMRRGMRHSHLLGSKEPIFFNIFKTLKDEMKGNYSEIERAESLIKETLRMEEEKFLVLLDRGIKILNDEITKIDKVLPGEVAFKLYDTYGFPLDLTQDILKNKSLKIDSEKFQSLMEESKELAKKNWKGSGDSAVDDIWFSIKDKLGASEFLGYETDRAEGIVLVLLKDNKEVDQLNENDEGIIIVNQTPFYGESGGQVGDTGQIIAGNFKFEISDVQKKLGDLFVHYGKVKSGKIKIKDHVEMKIDVERRNNIRAYHSATHLLHESLRRVLGTHVTQKGSLVAPDRLRFDFSHMKPLQNKK

SEQ ID NO: 191542 - protein, 427 aa, Unknown
  Bacterial polypetide isolated from the Sargasso Sea
TYLNIKDPFIYKLVSKVSKDLQNVYPNIKDDNKIIETVIKDEESAFLKTLDQGIVLLNKLIKSSENKIIHGQDAFKLYDTYGFPVDLTSLIAAESGFKVNIKGFDENMQKQKERSSSKSKLRYSDWNIIDENAKSNFIGYDKLKSKMNLIRFREVDTENGMNIHLVFDTTPFYAESGGQIGDTGSIESSSKEVIEITDTIKDNDYIIHVTNKMPNNQDSPFTGTVDSKRRQQITSNHTSTHLLNLALKKILGTNVEQRGSMISEESFRFDFSYKMKLSKEELNKVEEYVNNLIKESIDLIEERSADYKEVIKKGAVGLFSEKYGEKVRTIKFNDSYELCGGTHVTNTKDIGSFKIISEGSQAFGIRRIVATSSEKKILEENLKQKSIKEKAATDQANRLLKKENESINKIKVESIKEDIIKNIRLSN

SEQ ID NO: 191543 - protein, 456 aa, Unknown
  Bacterial polypetide isolated from the Sargasso Sea
PGEVAFKLYDTYVFPLDLTEDILKNKSLTIDHNKFKSLMNKSRELAKKNWKGSGDTSVDEIWFSIKDKLEPTEFLGYETNQAEGVVLALIKNNKEVKNLNKDDEAMIIVNQTPFYGESGGQVGDTGIFVSGDFKFKVNDVQKKFGDLLVHFGKVESGSIKLKDNVEMKIDVQRRENVRAYHSATHLLHESLRRVLGTHVIQKGSLVAPDRLRFDFSHMKPISNDEINKIEKFVNDMVKTKSEVKTRLMTPKEAVENGALALFGEKYGDEVRVLSMGGEKGRYFSTELCGGTHVKNTNDIGKFKIISQSSIAAGIRRVEALRDRQLEEYLTKKEKMLDLSAQKNEEIVKNISEKIIKLGGKPKLDSDDQKNLIKNLTKQLDQILVKNTLGDKSKNIIKDEKINNIKVRFQKVNGLPSKDLRKLVDIGKKEIGEGIVIIFATVDEKIGLAIGITDKLT

SEQ ID NO: 191544 - protein, 327 aa, Unknown
  Bacterial polypetide isolated from the Sargasso Sea
AYHSATHLLHESLRRTLGKHVMQKGSLVAPDRLRFDFSHMKPITSEELQKIDKLVNEYVEANTEVTTRIMTPKAAIDKGALAFFGEKYGEEVRVVSMGKEKETYFSTELCGGTHVQNTGNIGKFRTISQASIAAGVRRVEALRDKQLEDYIKNKEKLSNLSTQKDEENIKELSSQIIKLGGKPNIDNNDLKELIKNLTKQLEQLNVSSVLKDKTKNIISDEKINGVKVRFQKVQDLPPKDLRKLVDSGKKELGEGIVVVFASSDNKVGLAVGITEKLISKYDAVKFAKLGSEIIGGKGGGGRKDFAQAGGQDQNKIDEAFEKIKALI

SEQ ID NO: 191545 - protein, 85 aa, Unknown
  Bacterial polypetide isolated from the Sargasso Sea
MSKILLTDVRKKFLNYFKKNNHKIVESSNLVPNNDPTLMFTNSGMVQFKNVFTGLEKRPYKTATTSQKCVRAGGKHNDLENSRLY

SEQ ID NO: 191546 - protein, 377 aa, Unknown
  Bacterial polypetide isolated from the Sargasso Sea
QIVKLKLMIHKKKWGDLFVHYGKVEKGSISNGQNVNLEIDVLKRNNSKAYHSATHLLHESLRRTLGKHVTQKGSLVSPERLRFDFSHNKPIEKEEMTKINNIVNEIVEGSSDVQTRIMTPKEAVGMGALALFGEKYGEEVRVVFMGKENNGFFSTELCGGTHVKNTREVGKFKVISQSSIASGVRRVEALRDKQLEEYEKTQKEDKSLKESNLKKDIKLIENELQKLKIEPVFNENLDLTENLKNLNKQLNKVKIEGIKKDKSKNIIKDKKIGNILIREQILKDFPPKELRSIIDQGKKDIKSGIIISISTFEDKVGLAVGISQDLTSKYDAVDLVKAASTILGGKGGGGRKDFAQAGGVDQNKIAEAFKEISKKIS

SEQ ID NO: 191547 - protein, 383 aa, Unknown
  Bacterial polypetide isolated from the Sargasso Sea
FSFGGYFKDEAISFAWDFLTNVLKLDEKRLYISVHNSDSESKQIWADKIKIDPDRILVLGDEDNFWQMGETGPCGPCTEIYYDQGDGFDGVLPTVGDPKDRYIEIWNLVFTQYNKISTGELEELPQKCVDTGMGLERVQAIVEGFTDNYDSTLFQNLSQYIDSKISLTNDNLYVKKILLDHIRACCHLISDNVIPDREGRGYVLRRILRRSSRFVYKNNIKDPFLYKCAEVICTSSKDFPELKKYLAKIVDTIKSEEQKYLKTLGKGIDLIDDFLKNKSSLDAETIFMLYDTYGFPFEITQEIAAEKNITIDKDGYEKLMMNQKESARNKKAFADKVSSNLDMTHSIEFIGYDKNNIETSVVDIYQNDKKVKNISDTNINYLV

SEQ ID NO: 191548 - protein, 389 aa, Unknown
  Bacterial polypetide isolated from the Sargasso Sea
SSLVPDNDPTLMFANSGMVQFKNIFTGKEKREYNRATTAQKCVRAGGKHNDLENVGYTTRHHTFFEMLGNFSFGDYFKDLAIELAWNLITKEYSISKDRLLVTVYSEDDEAFNLWKKIAGLSDDKIIKINTSDNFWSMGETGPCGPCSEIFYDHGDKYEGGPPGSPNEDGDRFIEIWNLVFMQYEQISKSKRINLPKPSIDTGMGLERMAALLEGSNDNYSTDLFQPIINESTKLCGNESSIKNPSHRVIADHLKSSSFLIADGVMPSNEGRGYVLRRIMRRGMRHAHSLGNKEPVFDKLFPIFLDGIKNSYPELDRAKDLIINTLINEETKFKETVEKGIKILDEEISNSTNIFNGEVAFKLYDTYGFPLDLTQDYLKSKNIEVDIKT

SEQ ID NO: 191549 - protein, 855 aa, Unknown
  Bacterial polypetide isolated from the Sargasso Sea
MKNTANIRQTFLNYFEKNDHEIVHSSPLVPINDPTLMFVNAGMVPFKNYFEGNEVPDFLKATSSQKCVRAGGKHNDLDNVGHTTRHLTFFEMLGNFSFGEYFKEEAIKLAWDLLTKEFDISPDRLLVTVFNEDNEAEEIWKKISGFSNNKIIKISTEDNFWSMGDVGPCGPCSEIFFDHGDSVDGGPPGSKNEDGDRFVEIWNLVFMQYLQHANSNKTPLPKPSIDTGMGLERISTVLQGKTSNFDTDLFISIIKYIEDKTKIIKNEENVSSFRVIADHLRSIAFLISDGVLPSNEGRGYVLRRIMRRAMRHVYFLNIREPILYNLVKKVIELMKDAYPELSRAEKLIEVTVFHEEERFLSTLSKGIKIFNEESKTLKSGDIFSGSTAFKLYDTYGFPLDLTEDLIRDKNLNLDKDGFDLEMKKQKEEAKKSWLGSGDNKTNEIWFEVSNKCNATEFLGYQNIESAAEVVNIICDNKTSKKVEDGDEAILVFNQSPFYAESGGQIGDIGFASNSSFMFRISDTQKKLNNIYAHYGVVEKGSISIGDKVNLKIENDHRQMVKCNHSATHLLHEALRRVLGDHVTQKGSLVSAEKLRFDFSHQKSLTSEEIVEIQQIINNQIKNNSSVKVEILSFDKAVDSGALALFGEKYDEEVRVLTMGEDSFSKELCGGTHVDNLGDIGEFKIISQSSVASGIRRVEAVTGITADNSLSLIDKMKEIEKRKDNKKKSKVKKQKVSKSILDGRTEEFNNIKLFFDKLDDVDAKNLRQLVDECKKDIKSGIVCLIATYEGKSSIAIGVTNDLLNNYDAVNLVKTSSEILGGKGGGGRKDMALAGAKDVTKSEDVFEQLLKEIKKDS

SEQ ID NO: 191550 - protein, 507 aa, Unknown
  Bacterial polypetide isolated from the Sargasso Sea
MTGLAEIRSTFINYFKRHGHEEVKSSTLVPSNDPTLMFTNSGMVQFKNVFTGLESRSYNKAVTSQKCLRAGGKHNDLDNVGYTSRHHTFFEMLGNFSFGNYFKETAIPLAWDLITKEFSLPKNRLLVTVFHTDNEAMDIWKKYAGLSDSQIIKIKSSDNFWSMGATGPCGPCSEIFFDHGSNIAGGPPGSPNEDGDRFVEIWNLVFMQYDQLDNNKREDLPRPSIDTGMGLERMGAVLQNTHDNYNTDLMKALIDESANLSSQKVNGKYNIHHRVIADHIRSISFLIAEGIFPTNDGRGYVLRRIMRRAMRHIHFLGVKEPMLYKMVASLTREMGAAFPELIEAKQLIEESLLNEEIKFRSTLDRGLKLLDKEINRLNKGEKFSGEVAFKLYDTYGFPIDLTQDAIRDIDIEVDIESFNLSMDKQKRLARNAWIGSGEKIIEQVWIDLANNLDPTEFLGYYSLNSQAKILAIVIDGNVADKIENDKSAELIFNQSPFYAESGRSSSD

SEQ ID NO: 191551 - protein, 388 aa, Unknown
  Bacterial polypetide isolated from the Sargasso Sea
NSRAVSCQKSLRAGGKHNDLENVGRTSRHHTFFEMLGNFSFGDYFKEDAIFFAWEFLTKELNIDKKRLYVTVHTEDEEAEGIWLDKVKVSKNKIYKLGDKDNFWSMGDTGPCGPCSEIMYDLGKDGVNCPNLKKCTVECDCGRFLEIWNLVFMQFNRDESGTLSSLPKPSIDTGMGLERLASVLQNVESNYDTDLFGYLTSYVANFINIKYGKNSEIDISIRVLSDHARAVTFLISDGVIPSSEGRGYVARRILRRAVRHYKKLDISEPFLHNLVGLVINEMESIYPELLSQKENILSIVLNEEKKFLSTIDRGFDQLKDAMDSSSESKVLSGKDVFKLYDTYGFPVDLIEDIISETDYVLDMNAYEEEMLNQKNSSKKASKFKSPHR

SEQ ID NO: 191552 - protein, 267 aa, Unknown
  Bacterial polypetide isolated from the Sargasso Sea
KKSEVKTRIMTPKEAVNNGALALFGEKYGEEVRVLSMGDEKEKYFSTELCGGTHVRNTGDIGKFKIISQSSIAAGVRRVEALRENQLNSFLQNKEKLSDLSAQKDEEMINDLSKHIIKLGGKPNLENEDNKILIKELSKQLEQLKFSSILENNSKNIIQDLKINNISVRFQKVDDLPPKELRKLVDAGKKDLKTGIVIVFASLEDKVGLAVGITDKLIDKYDAVTFAKTGSEIIGGKGGGGRKDFAQAGGQFKDKIDEAFEKIKTLI

SEQ ID NO: 191553 - protein, 246 aa, Unknown
  Bacterial polypetide isolated from the Sargasso Sea
MAQKTLNEIRNTFLKYFEKNDHKIVESSNLVPNNDPSLMFANSGMVQFKNVFTGLEKKDYKRATTSQKCVRAGGKHNDLENVGYTPRHHTFFEMLGNFSFGDYFKERAIELAWNLITKDFGLDKNRLYFTVFNEDEEAFKLWKKISGLNENKIIKISTSDNFWSMGETGPCGPCSEIFYDHGDHLKGGLPGSKDQDGDRYIEIWNLVFMQYEQVSKDKRIDLPKPSVDTGMGLERMAALLQGTHDN

SEQ ID NO: 191554 - protein, 316 aa, Unknown
  Bacterial polypetide isolated from the Sargasso Sea
MSYPELKRAESLINETLKYEEQRFRDLLSRGIKQLDTMIDNLNGKTILNGQSAFKLYDTYGFPIDLTQDILRNKKIEVDIDDFRKCLEDQKEKARSNWTGSGGTATDRIWFELNKSLSPTEFLGYTSEKTEGSIISILKEGVLVDSLHSGDNGSLILNQTVFYAESGGQIGDTGTIQADNFEFEVSDTQKKGNLFVHHGKVIKGDINKGTGAHLSINSARRSSCKTYHSATHILHQALREVLGDHVTQKGSLVSFDKLRFDFSHHKSLSESEISKIEQIANTVIEEGSDVETQIMTADDAVNAGALALFGENILMR

SEQ ID NO: 191555 - protein, 227 aa, Unknown
  Bacterial polypetide isolated from the Sargasso Sea
GSYRAPIKRNHTATHLLHAALKVVLGDQVQQAGSLVHPDYLRFDFTYFEKISKNQIRNIEDIVNMQILINSNLEVLTQSYDEAMADGVVALFGEKYGDQVRVVSTGEFSSELCGGTHVNRTGDIGLFKITEESSLASGVRRIVAVTGQRSVQVFQDKSEILSELQQQLNCKESELFHRITQLYNDKKELEKKIKELSQSSESDIESWINKGKKIGSYSLVVKHLDIS

SEQ ID NO: 191556 - protein, 216 aa, Unknown
  Bacterial polypetide isolated from the Sargasso Sea
MVNSNEVRNKFLGYFQDNGHSINKSSPLVPLNDPTLLFTNAGMVQFKNCFTGIESPDTKRVVTSQKCVRAGGKHNDLDNVGYTHRHHTFFEMLGNFSFGDYFKEYAISFAWELITKEFAIPKDKLLVTVFHEDEEAYKLWKKIAGLSESKIIKIDTSDNFWSMGDTGPCGPCSEIFYDHGDHVEGGPPGSANEDGDRFVEIWNLVFMQYEQLRKKS

SEQ ID NO: 191557 - protein, 852 aa, Unknown
  Bacterial polypetide isolated from the Sargasso Sea
MKLTEIRKKFLKYFESKKHRVIDSSDLVPHGDDSLLFTNAGMVQFKDTFLGLEKRGYSAVSSQKCLRVGGKHNDLENVGFTTRHQTFFEMLGNFSFGEYFKEEAIVLAWEFLTEELKLQKEKLWVTVHHTDKDSEKIWLDKIGIEKNKLSKLGDEDNFWSMGDTGPCGPCSEIFYDYGSSYEGLPPGEGDTGDRFVEIWNLVFMEFNRDSAGELRPLPNKCVDTGMGLERLCSVLQNVGSNFEIDLFKSFKNDIRNLFDNPNEQSLNVIADHLRAAFFLISEQVNPSNEGRGYVLRRLIRRAIRHGYKMGKEGPFLYELLDNLKTSLEKDFPKEFTSYKSIQGILKEEEELFFKTLSSGIKIFEENLPKKKSEMMSGEIAFKLHDTYGFPIDLTITMASERGIAVNEKTFEDLMKKQKEGSKKSSMFNVKDIVIEPSMSSEFVGYEQNRIDGDCVALFDEKGNEAKTLNDSGYAFFSKTPFYAESGGQIGDQGSISNDALEIFVSDCKKVGDFNMHEIKIQKGEIKLGDKVSLSINEERRKKIVSNHSATHLLHSALREVLGEGVQQKGSLVNDEKLRFDFSHGQKLTPEQIEQVEDLVNMQIEDSIDTKIEVKSFDDAIKDGALAFFGDKYGDKVRVLTIAGDFSVELCGGTHVNNTSEIEGFIISNETSVSAGVRRVEAMTGSNLVKKSKEAIQTLKELSEILNVPSDSLVGRISEVIKENKSLKSKKKTEKSLSAEIIHEAKLGSKGGEGIVVFYKNASIEMLRRFSDQAKDQVGAFSIFMTDDGEKVSYIVTSKADDNFSSKDLIELVNSAFDGSGGGRNDFAQGGSQDNSNISDKFENLKSKLEDLI

SEQ ID NO: 191558 - protein, 133 aa, Unknown
  Bacterial polypetide isolated from the Sargasso Sea
MKTSEIRQSFLNFFDSKDHKVVPSSSLVPNNDETLLFTNAGMVQFKDIFLGTETKNYSRATTSQRCIRAGGKHNDLENVGYTLRHHTFFEMLGNFSFGDYFKEDAIKYAWEFLTEVLKLDKDKLWITVYKDDD

SEQ ID NO: 191559 - protein, 281 aa, Unknown
  Bacterial polypetide isolated from the Sargasso Sea
MTTAQIRQQFLDFFASKQHQVVPSSSLIPGNDATLLFNNAGMVQFKDVFLGAESRPYTRATSSQRCVRAGGKHNDLENVGYTARHHTFFEMLGNFSFGDYFKQEAIKFAWEFLTEVVKLPQEKLLVTIYHDDEEAFEYWSKDIGLSEDRIIRIATSDNFWSMGDTGPCGPCSEIFYDHGEHIWGGPPGSPEEDGDRFIEIWNLVFMQYNRQSDGTMLPLPKQSVDTGMGLERISAILQGVHSNYEIDLFQGLIAAAASVTNAQDMDDKSLRVVADHIRSCA

SEQ ID NO: 191560 - protein, 404 aa, Unknown
  Bacterial polypetide isolated from the Sargasso Sea
KEIINNSIDLTKADDNKLISSHRVIADHLRSSCFLIADGVLPSNEGRGYVLRRIMRRAMRHVHLLQYKDTLMHQLVPTLMLNMKDAYPELLRAEVLIKETLKYEEEKFKNLLEKGITQLDSISQNLGPNETFPGESAFKLYDTYGFPIDLTQDILKSKNISIDIESFNEKLEEQRELARKNWSGAGGATTDRIWFELNNELSATEFLGYTNTETQGEVLSIIKNDQKVNKLEDNETGALILNQTVFYAESGGQIGDTGIVKGENFEFKVEDTQKRGQVIIHIGVMIRGKIEIGHNALLSVDQKQRNNCRAYHSATHILHQSLRDRLGEHVTQKGSLVSNDKLRFDFSHHKSMTNLEIEDVQNKVNEIIKNGSEVEIQIMSPDDAVKAGALALFGEKYSDEVRVL

SEQ ID NO: 191561 - protein, 350 aa, Unknown
  Bacterial polypetide isolated from the Sargasso Sea
SGSIKLKDNVEMKINEGRRNDTRAYHSATHLLHESLRRVLGTHVTQKGSLVEPSRLRFDFSHMKPISNEEIEKIEVFVNSMVTKKTDVRTRLMTPDEAVEKGALALFGEKYGEEVRVLSMGDDDGKYFSTELCGGTHVKNTGDIGKFKIVSQSSIAAGVRRVEALRDKQLEDFLKNKEKLSNLSSEKNDETINDLTKKIMNLGGKPSLDQSDQKLLIKNLTKQLDTLSVKSILKDKTKNRIKDEEIKGIKVRFQNVEDLPPKELRKLVDDGKKELVEGIVVVFASKDDKVGVAVGITNKLTEKFDAVEFVKLSSEIIGGQGGGGRKDFAQAGGQDKNKINEAFEKIKSLI

SEQ ID NO: 191562 - protein, 485 aa, Unknown
  Bacterial polypetide isolated from the Sargasso Sea
MKRAEDLIINTFVNEETKFKETVEKGLKLLEEVISLSPKKIDGEIAFKLYDTYGFPLDLTQDYLKSKKIEVDIESFNKKMKEQKDRARKNWKGTGDQEDQKKWFQITEHLNSTEFLGYDQIESESEIISLIKKDSEIENLLEEEEGIIILNQTPFYAESGGQIGDSGKIIFNNNIFEVSDTTKLFGSFYLHHGKVKIGNFNKGDNVNAIIDIKKRELIKCNHSSTHLLHSSLRQILGNHVSQKGSLVNNEKLRFDFSHNEPISIEDIVKIENYVKKEIKANTLVDTKTIDHQKAIDEGAMALFGEKYGDEVRVISMGTKENNKIFSKELCGGTHVNKTGDIIDFKIINQSSVASGIRRIEALSNITVDQYKEEQIKLIKQKKEENQVKIKEIIEEIKRFDKNFSYNYDNNEDLSVSIRELRKDLDLKKQNQNKEKISQNIVNEKVNDIEFIYLIADDYPPKLLKQFVDDQKNKYKQKCVSLIISK

SEQ ID NO: 191563 - protein, 512 aa, Unknown
  Bacterial polypetide isolated from the Sargasso Sea
MHIHLGSKSPIFHKLFNVLLEEMKKSYPELTSAKDLITETLKNEEEKFSSLLERGIKILDENLSKVKNNILPGSIAFKLYDTYGFPVDLTADILKTKNIKVDNLSFEKEMEKSKALARANWKGSGDKSVDERWFKIREELESTEFLGYEFDKAEGVVLKLFKNNKFVESASAGDKIDIITNQTPFYGESGGQVGDQGVIYTSECEINIKDTQKKMGDLFVHSGEIRKGKIKVGQSVNLEIDVEKRNNSRANHSATHLLHESLRRTLGKHVTQKGSLVSPDRLRFDFSHNKPIEDQEMSKINEAVNNIVKGSSEVQTRIMTPKEAVKMGALALFGEKYGEEVRVVFMGKENNNFFSTELCGGTHVKNTKEIGKFKVVRQSSIASGVRRVEALRDKQLEEFENYKYGEKKEKSKEAFETIKLIMGKLKDLGEKPKLSEKDINLEENLTPKIKILTEQLNNAQVKFILNDAKMNKIKDIKIKDFILRYQVLDGLDTKELRNVIDLGKKEIKKGIV

SEQ ID NO: 191564 - protein, 235 aa, Unknown
  Bacterial polypetide isolated from the Sargasso Sea
MAPATARPRRGADIRAAFLDFYESRGHKPVASASLIPEDPTVLLTIAGMLPFKPVFLGQQERPAPRATSSQKCIRTNDIENVGRTARHHTFFEMLGNFSFGDYFKQQAIEWAWELSTGVFGLDPKNLVVSVFREDDEAEVIWRDVVGVNPKRIIRMDEADNFWASGPTGPCGPCSEIYYDFKPELGDDGIDLEDDSRFIEFYNLVFMQYSRDAEGTLTPLANKNIDTGLGLSEWL

SEQ ID NO: 191565 - protein, 104 aa, Unknown
  Bacterial polypetide isolated from the Sargasso Sea
MSIRDNYLNYFKKNNHEIVKSSSLIPASDKTLLFTNSGMVQFKDIFLGIKQSKSNRIVTCQKCVRAGGKHNDLDNIGYTNRHHSFFEMLGNFSFGDYFKEEAIL

SEQ ID NO: 191566 - protein, 355 aa, Unknown
  Bacterial polypetide isolated from the Sargasso Sea
YGKVISGRIKVKDNVEMKIDVERRNNIRAYHSATHLLHESLRRVLGTHVTQKGSLVAPDRLRFDFSHMKPISEQEIEKIESHVNSMVEKKSDVKTRIMTPKEAVDNGALALFGEKYGEEVRVLSMGDEKENYFSTELCGGTHVRNTGDIGKFKIISQSSIAAGVRRVEALRENQLNEFLKNREKLSDLSAQKDEEMINDLSKQIINLGGKPNLENEDNKSLIKELSKQLELLKFQSILKDNSKNKTHEDKINNINLRFQKVEDLPPKELRKLVDAGKKDLKSGIVIVFTSFENKVGLAVGVTEELIEKYDAVKFAKIGSEIIGGKGGGGRKDFAQAGGQFKDKIDEAFEKIKSLI

SEQ ID NO: 191567 - protein, 533 aa, Unknown
  Bacterial polypetide isolated from the Sargasso Sea
FLHLLVKDLISLMKQAYPELEDNYENIVKIIKNEETKFFETLHNGIEILEETISTMQNNTIAGEIVFKLHDTYGFPFDLTADIAREKQLLIDEDGFNKCMKQQQESSKSSSHFVSSLPAASGVEETKFLGYDQLESESEILAIWDGQERVENALKGQEIFLACNQTPFYAESGGQIGDKGKFASDNATGNILDCRKQGKVFIHKVVIDSGEIKKGDLIEMSVEKEKRIAIAIHHSSTHLLHAALREVLGDHVQQKGSLVDETKLRFDFSHDKPLTQDEIATIEKIVNQEALNNLEVKTELMKLDDAMKSGAMALFGEKYDDDVRVLTMGENSYSVELCGGTHVSRTGDIGFFTITSQSSVASGIRRVEAIAGMQALNYIKKLKEVNSSIQNLLNVSTDDIHDKIKSLIDENKALKSKGTQSSKREIVFSESIEINDWKLVIQQVQLDDTKDLRLLADEQKNTNEKVCVVIFSEQNNKVALVCGVTKNLTDTLSAKDVVSVISKKIGGKGGGRPDFAQGAGESKNIKDFVTSIR

SEQ ID NO: 191568 - protein, 558 aa, Unknown
  Bacterial polypetide isolated from the Sargasso Sea
HSLPAPCVDTGAGLERIAAVLQGADSNYHTDAFIPLLDRVAQLVGEAYDPTSEAGVSYRVLADHARAVAFLLSDGVHPSNEGRGYVLRRILRRGVRHAWLLGRREPTLSGVVEVVIETMSDAYPALAERREHILEAARAEEERFLSTIEGGLARFDELAASEGGVISGDEAFKLYDTFGFPLDLTQLLAEEREVDVDVAGFEAALETQRARSRADRVASGIEIGGLNDSEGWIPVKDGSQNFVGYTSLEVETTVLKWKTMECGVGVILEENPFYVESGGQVSDTGVVRGNNWSVTVDRVAKTPLGTALFGQVDGIFPEEADDLRVTAFVATDVRFDTTRNHTATHLLHAALRSLLGGHVVQKGSLVAPDRLRFDFAHTAPMTEREKGEVERFVNEAVWKNHPVEIAERRYDDAVRDGAMALFGEKYADEVRVVDVPGISMELCGGAHVSHTGDIGLFRIISESGVASGVRRIEALTGRGAFSYFQEREATLGETASVLKTRPDNVVKRVEQLLADKAAVEGLLDEARAHGSSGEDVIAEEVIETPDGGNVVYRGIRLR

SEQ ID NO: 191569 - protein, 887 aa, Unknown
  Bacterial polypetide isolated from the Sargasso Sea
MAKTLNEIRSAFLDYFEKNDHKIVESSNLVPNNDPTLMFANSGMVQFKNVFTGLEKRDYQRATTSQKCVRAGGKHNDLENVGYTPRHHTFFEMLGNFSFGDYFKERAIELAWNLITKEFGLDKNRLYVTVYHDDDEAFNYWKKIAGLSEDKIIRIATSDNFWSMGETGPCGPCSEIFYDHGDHLEGGLPGTKNEDGDRFIEIWNLVFMQYEQISKDKRINLPKPSVDTGMGLERIAALLQGTHDNYETDHFKKIINAAAEILKVKPNKENLASFRVIADHLRASSFLIAEGVLPSNEGRGYVLRRIMRRGMRHSHLLGSKEPIFYNIFKTLKDEMKGNYSEIERAESLIKETLRMEEEKFLVLLDRGIKILNDEITKIDKILPGEVAFKLYDTYGFPLDLTQDILKNKSLTIDNDKFQRLMKESKELAKKNWKGSGDSAVDDIWFSIKDRLGPSEFLGYETDQAEGIVLSLLKDNKEVNALSENDEGMIILNQTPFYGESGGQVGDTGQIISGDFIFEITDVQKKLGDLFVHYGKVKSGGIKIKDNVEMKIDIDRRNNIRAYHSATHLLHESLRRVLGTHVTQKGSLVAPDRLRFDFSHMKPISDQEIEKIESHVNSMVQKKSEVKTRIMTPKEAVDNGALALFGEKYGEEVRVLSMGDEKEKYFSTELCGGTHVRNTGDIGKFKIISQSSIAAGVRRVEALRENQLNIFLQKKEKLSDLSNQKDEEMINDLSKQIIKLGGKPNLDNEDNKILIKELSKQLEQLKFSSILDNNSKNIIHDDKINNINVRFQKVEDLPPKELRKLVDTGKRDLKSGIIIVFASLDDKVGIAVGITDELSDKYDAVKFAKTGSEVIGGKGGGGRKDFAQAGGQFKDKIDEAFEEIKSLI

SEQ ID NO: 191570 - protein, 851 aa, Unknown
  Bacterial polypetide isolated from the Sargasso Sea
MKSSQIRESFISFFESKSHSRVQSAPVLPIGDKSLLFTNAGMNQFKAIFLNSEKPKNLRVVNSQKCIRVSGKHNDLEEVGRDGFHHTFFEMLGNWSFGDYYKKEAIKWSWELFTEVWNLDKSRLWVTVFEEDDEAFDLWKNQTDIDPNRIIRSGAKDNFWEMAETGPCGPCSEIHYYVGDTPEDQKSEMVNNSSEYWELWNLVFIQFNRLKDGTMEDLPKKHVDTGAGLERICSVLQNKDSNYKTDLFAKTIEDLENFSNTKYQDFEVPYNVICDHIRMLSFAIADGVIPSNDGRGYVVRRVLRRGSKFAMNLEIKEPILFKLVDSVVSTMSSHYPELKEKQKYIEQTILSEEQSFLRTLENGVVQFEKIVGSTSGSQINGKDAFKLYDTFGFPLDLTQLMAEEREMTVDVDGFDIEMKKQKELAKTGQKFEMDNVDLKWNLETNSSHSIFVGYENESISSKIINHADREDGLIIVLENTPFYSESGGQIGDTGIIKNNDFSAKVNDTQKNGDYILHICKLTRGSIGNNLSVDCIVDSDRRNSIMVNHTATHLLHQSLKDVLGSHVNQAGSLVHPEYLRFDITHPNKISSTELDDIEIIVNQKIGEDITVKTSIKSLEEAKKEGATALFGEKYGDKVRVVTMGEYSKELCGGTHVSSTGKISKFKIKHDKAISSGIRRIHAITSNHVDLYLKEKLDEIGLLKEAEQKKEEEKQSQSILLNSVDIDSIIKYPIMDFDGIELLFSKVELGVASDLKILSKKIKNKTDSAIIFLFTEIDKKITISVAITDDLIAKSFHAGELVKFLASELKGRGGGKEDFAMAGIPYIHPEEINLVAWQLVKRFLEKKHEDSFK

SEQ ID NO: 191571 - protein, 886 aa, Unknown
  Bacterial polypetide isolated from the Sargasso Sea
MKFQTKNTPITGDEIRKEFLNFYHEKLHKIIPSASLIPDDPTVMLTIAGMLPFKPVFLGLQERPSKRATSSQKCIRTNDIENVGVTARHHTFFEMLGNFSFGDYFKKEAIEWAWELVTDIYGLSAENIIVSVFHEDDESVKIWKEDIGIHPQRIIKLGEKDNFWSSGKTGPCGPCSELYFDFKPEKGLQNIDLEDGDRFIEFYNLVFMQYNRDPDGQLTDLKYKNIDTGMGLERMAQILQKKKNNYETDLIFPIIQKASEISKIDYYSSDERTKISLKIIGDHIRAVIHLISDGVVASNLGRGYILRRLIRRMVRHGRLLGLKNEFLSKLASVGIKLMQENYPDLKNNYDYILSEIKIEEIRFRETLDRGEKLLDELISSGQKMITGFKAFELYDTYGFPLELTEEIAQENNIGVDVKGFEKEMSAQKERAKAASQIIDLTLEGSLEREIDLFDKTFFNGYDSLDSDAEIKGIFFESTLVKQASEGQKVLIVLDQTSFYGESGGQVGDIGKIFSNDLEVLVDNVIRKKNVFLHYGIVKKGILSLGQKVKTKVNDLARAKAAANHTATHLLQSALKVVVNESVGQKGSLVAFNKLRFDFNSSQPITKDQIFKVETLVNSWILENHSLDIKNMAKSEALERGAVAMSGEKYDDEVRVVDVPSVSMELCGGTHVKTTSELGCFKIISEEGISAGVRRIEALSGQSAFEYFSDKNSLVCQLSDLLKANPNQLLDRVNSLQSELVNKNKEIQKMKDEIAYFKYSSLSSSANKIGLFSLIISQLDGLDGNSLQSAALDLTSKLGDKSVVILGGIPNKENRKLLFVVSFGEDLVKRGMHAGKLINDISRICSGGGGGKPNFAQAGAKDIDKLNDALEYARKDLRAKLLSYSDK

SEQ ID NO: 191572 - protein, 489 aa, Unknown
  Bacterial polypetide isolated from the Sargasso Sea
NYKFSKILDRGYDYLMQLIEQGINNGIIPGEEIFKLHDTYGFPIEVTKEVAEENGVNLDTDNFEQLMEGQKTKARSSADFTGDIEANKIYSSINSESSFIGYEKIEGNSKIIAIISNGKQIEKLESKENGEIILSSTPFYAEAGGQLGDKGYIQTKTGTFVVEDTQSPIPGIISHKGYVANGTIFTTEDSSANVDSIYRQGTSRNHTATHILHSSLREILGTHVRQAGSSVGNDRLRFDFTHIGSMSLEEIKAVENLANTQVRNNHSISTNITTYREAVTNGALAFFGDRYGSEVRMVTIATGEPFSVEVCGGTHLDNTGQIGYIKIINETNIGSGMRRIEAISGETASEYSINDQFTLARIAQILETNITTIESRLDSLLQENKNLKSSLNSYQQTQFVNQAKELSSKMKIIDNIEIITSMVNAFTPQDIKNIADLLRDNIKSGIINLGAIIDNKPHTLLIITDDLVEKGAIAVAAIKESSKFLQGGG

SEQ ID NO: 191573 - protein, 472 aa, Unknown
  Bacterial polypetide isolated from the Sargasso Sea
MKTSEIRKAFLEFFNKKNHQVVPSSSLIPSNDETLLFTNAGMVQFKDIFLGTETKSYKRATTSQRCIRAGGKHNDLENVGYTLRHHTFFEMLGNFSFGDYFKEDAIKFAWEFLTDVLKLDKDKLWITVYKDDDEAEEIWKNVIGIESSRIARLGDEENFWSMGDTGPCGPCSEIFYDHGDHIEGTPPGTDGDEGDRFIEIWNLVFMQFNRDENGKMEELPKPSVDTGMGLERIAAVLQGVNSNYEIDVFKDLISSSEKLLGSHESTSHKVIADHIRSSVFLISDGIIPEKEGRGYVLRRIMRRGIRHGYKIGARKPFMHLLVKDLVNLMDSAYPELNKKQKEIIELIKNEEIKFFETLETGIAILDEAILEMNNKVLSGDLVFKLHDTYGFPFDLTADIAREKNLEIDEKRFNECMDQQKQSSKASSSFVSSLPAAAGVMETNFLGYEELESDSEILVIWKDQNRIDIAKNN

SEQ ID NO: 191574 - protein, 396 aa, Unknown
  Bacterial polypetide isolated from the Sargasso Sea
MNSNQIRSTFLNYFKKNGHEIIHSSSLVPDNDPTLMFANSGMVQFKNIFTGKETRDYNRATTAQKCVRAGGKHNDLENVGYTTRHHTFFEMLGNFSFGDYFKELAIELAWNLITKEYAINKDRLLVTVYSDDQEAFDLWKKIAGLSENKIIKISTSDNFWSMGETGPCGPCSEIFYDHGDKYEGGPPGSPNEDGDRFIEIWNLVFMQYEQISKSERINLPKPSIDTGMGLERMTALLDGSNDNYSTDLFQPIINESTKLCGDESSITNPSHRVIADHLKSSSFLIADGVMPSNEGRGYVLRRIMRRGMRHAHSLGNKEPIFHKLFPIFLDGIKNSYPELDRAKDLITNTLMNEETKFKETVEKGIKILDEEISNSTNIFNGEVAFKLYDTYGFPLD

SEQ ID NO: 191575 - protein, 786 aa, Unknown
  Bacterial polypetide isolated from the Sargasso Sea
KHNDLENVGYTLRHHTFFEMLGNFSFGDYFKEDAIKYAWEFLTEVLKLDKDKLWITVYKDDDKAEEIWKSTIGVDASRIARLGDDENFWSMGDTGPCGPCSEIFFDHGDHIEGSPPGADGDEGDRFVEIWNLVFMQFNKDEDGNMTPLPKPSVDTGMGLERIAAVMQGVNSNYETDVFKDLILASEKILANKNSTSHKVIADHIRSTVFLISDGVIPENDGRGYVLRRIMRRGIRHGYKIGAKKPFMHLLVKDLVKLMRSAYPELKTKEKDVAKLIKEEEIKFFETLEKGIDILEETISNMSNETISGDVVFKLHDTYGFPFDLTADIARERDLLIDEKRFKERMNQQKETSKASSSFVSTLPAAAGVKETIFLGYEDLESDSEVLVIWKDQERIKKAKSKEEIFIACDQTPFYAEAGGQIGDKGIFASKSATGTILDCKKQGKVYIHKAIVEKGNIKTGDVIKMSVEKEKRSAIAIHHSSTHLVHAALREVLGDHVNQKGSLVDENKLRFDFSHKKPLSQEEITKIEAIVNKEALNNLEVKTELMKLDDALKSGAMALFGEKYDDDVRVLSMGNNSYSVELCGGTHVKRTGDIGFFIITSQSSVASGIRRIEAVAGMKSIEHINKIRDINSSLQSVLNVSSEDIQEKIKSLIEENKELKKKSGNKKSKKSVVFSETYEIKDWKLIVEQVEVDDTKDLRALVDDQKNTNEKVCIVILNIVKNKVALVCGVTKNLTDSLSAKDVVSTLSDQIGGKGGGRSDFAQGAGETENLKVFVTSIVDSVKSLA

SEQ ID NO: 191576 - protein, 103 aa, Unknown
  Bacterial polypetide isolated from the Sargasso Sea
MAKTLNEIRTAFLKYFEKNDHKIVESSNLVPNNDPTLMFANSGMVQFKNVFTGLEKREYQRATTSQKCVRAGGKHNDLENVGYTPRHHTFFEMLGNFSFGDYL

SEQ ID NO: 191577 - protein, 440 aa, Unknown
  Bacterial polypetide isolated from the Sargasso Sea
MADKTLNEIRSTFLKYFEKNDHKIVESSNLVPNNDPTLMFANSGMVQFKNVFTGLEKRDYKTATTSQKCVRAGGKHNDLENVGYTPRHHTFFEMLGNFSFGDYFKERAIELAWNLITKDFGLDKNRLYFTVFNEDEEALKLWKKITGFGEDRIIKIPTSDNFWSMGETGPCGPCSEIFFDHGDHLKGGLPGTKDQDGDRYIEIWNLVFMQFEQISKDKRINLPKPSVDTGMGLERITALLQGTHDNYKTDHFEKLIKSISDAVKTKPNDKNISSFRVIADHLRASSFLIAEGVLPSNEGRGYVLRRIMRRGMRHSHLLGSKKPIFFNIFKTLMEEMTGNYPELKRAEALIKETLKMEEEKFLVLLDRGMKILNEQITKIDKILPGDVAFKLYDTYGFPLDLTEDILKNKSLKIDNKKFNELMKQSRELAKKIGKAQETVQ

SEQ ID NO: 191578 - protein, 386 aa, Unknown
  Bacterial polypetide isolated from the Sargasso Sea
MKTNEIRQAFLDFFEGNDHQMFPSSSLVPVNDKTLLFTNAGMVQFKDIFLGQEPKKFDRATSSQKCIRAGGKHNDLENVGYTLRHHTFFEMLGNFSFGDYFKKDAIKLAWQFLTEKLNLEPDRLWITVYEDDDEARDIWIHEIGIEPERIAKLGEKDNFWSMAETGPCGPCSEIFYDHGDHIEGTPPGHDGDEGDRFVEIWNLVFMQFNRDSEGKLHKLPEPSVDTGMGLERIAAVLQGVNSNYEIDSFKNLIAASESLLESSGNTSHKVIADHIRSTCFLIADGISPSNEGRGYVLRRIMRRAIRHGYKIGARKPFLYKLASVLVEEMEGAYPEIKKLESNLEEIIKFEEKQFLTTLEKGIKILDEAIANHPNQIKNGNLVFKLP

SEQ ID NO: 191579 - protein, 465 aa, Unknown
  Bacterial polypetide isolated from the Sargasso Sea
MASSSGTSERGGLSGEDAFKLYDTYGFPVDLTRLMCDERGLSVDETVFEKLMEEQRTRAREAGKFKMTLDDWTEIKEGESEFVGYFQFEAESEVLRYSSSGNDEWQIVLEQTPFYAESGGQVADQGSLMQDEKTWQVSDVQKQGGSIVHYCKGTDKPESGKIKAVVDASKRLQATNNHSATHLMLAAMREILGTHVTQAGSIVHPEYLRFDFTHPEKPTQEEMDQIESRVNDKIRENIPTEIYQTKYQKAIDSGIVAMFGEKYGDVVRVIKLGDFSEELCGGCHVQSTGQIGHFRLVSEEGIASGIRRFVGVTGVQAESISRQENRVAQNLRQLLNVPVEKVTETVEKLLDEKRGLEKEIQEMRKQNAGANAGSLLEEAELIGDVHVLARQVEVQSMDEFRSMADSLRKQLNNGVAWLSAEIDGKSSLLCVVSDPLLERGLKAGELVNAVASLAEGKGGGKPHMA

SEQ ID NO: 191580 - protein, 432 aa, Unknown
  Bacterial polypetide isolated from the Sargasso Sea
MADKTLNEIRSTFLKYFEKNGHKIVESSNLVPNNDPTLMFANSGMVQFKNVFTGLEKRDYKTATTSQKCVRAGGKHNDLENVGYTPRHHTFFEMLGNFSFGDYFKERAIELAWNLVTKDFGLDKNRLYFTVFNEDEEALNLWKKITGLGEDKIIKIATSDNFWSMGETGPCGPCSEIFYDHGDHLKGGLPGTKDQDGDRYIEIWNLVFMQFEQISKEKRINLPKPSVDTGMGLERIAALLQGTHDNYETDHFKKLINSISEAVKVKPDEKNVSSFRVIADHLRASSFLIAEGVLPSNEGRGYVLRRIMRRGMRHSHLLGSKQPIFYNIFKTLMDEMSGNYPELIRAESLIKETLKTEEEKFLVLLERGMKILNDEISKIDKVLPGEVAFKLYDTYGFPLDLTEDILKNKSLKIDNKKFKTLMNESRELAKKN

SEQ ID NO: 191581 - protein, 245 aa, Unknown
  Bacterial polypetide isolated from the Sargasso Sea
LFGEKYGDEVRVLSMGNEDNKYFSTELCGGTHVRNTGDIGKFKIISQSSIAAGVRRVEALRDKQLEDYLKNKEKISDLSAQKDEETTKNLSEKIIKLGGKPNLDIQDQKELIKELSKQLEQLNIKSILEDKSKNIIKDEIINGVKVRFQKIEDLPPKDLRKLVDNGKKELKEGIVVVFANKDEKVGLAVGVTEKLINKYDAVKFAKLGSEIIGGKGGGGRKDFAQAGGQDKSKIDEALEKIKSLV

SEQ ID NO: 191582 - protein, 421 aa, Unknown
  Bacterial polypetide isolated from the Sargasso Sea
VVLSLLKDNKEVDQMKENDEGVIIVNQTPFYGESGGQVGDTGEIVSNEFKFEVTDVQKKLGDLFVHYGKVVSGSIKIKDSVEMRINVERRDDTRAYHSATHLLHESLRRVLGNHVTQKGSLVEPSRLRFDFSHMKPIQNDEIDKIENFVNDMVSKKSDVKTRLMTPDEAVENGALALFGEKYGDEVRVLSMGDEDGKYFSTELCGGTHVKNTGDIGKFKIISQSSIAAGVRRVEALRDKQLEDYLKNKEKLSALSSEKDDETIKDLSEQIIKLGGKPSLDQSDQKNLIKNLTKQLETLSVNSILNDKSKNIIKDQDMDGIKLRLQKVDDLPPKELRKLVDQGKKDLSEGIVVVFASKDDKVGIAVGVTESLTNKYDAVEFVKIGSEIIGGKGGGGRKDFAQAGGLDQSKIEDAFEKLKALI

SEQ ID NO: 191583 - protein, 539 aa, Unknown
  Bacterial polypetide isolated from the Sargasso Sea
MKTSNDIRQSFLDFFKSKDHEIVPSSSLVPANDPTLLFTNAGMVQFKDVFLGRESRPYKRAASSQRCVRAGGKHNDLENVGYTARHHTFFEMLGNFSFGDYFKQDAITYAWEYLTGVLKIPESKLWITVFEDDEEAANIWLKEIGVSTKQFSRCGEKDNFWSAGDTGPCGPCSEIFYDHGEDIPGGPPGSKDADLDRYVEIWNLVFTQFNRGSDGSLTPIPHPSVDTGMGLERVTAVMQGVNNNFEIESFEKIIKKIKTLCGNKKIDLTSSRVVADHIRSCSFLLADGVIPSNEGRGYVLRRIIRRAIRHGNKLGFKKPFFHQLVEVLEEEMGDAYPELSKTRSNIESMLLSEEERFAETLDQGLKILDEVITKTKGDVIHGEDVFRLYDTYGFPVDLTADIAREKNMKVDMKGFNKAMAGQRKRARAASKFDIDVSINTDSNLVSAFTGYERLEQKTTIIGLYQDGRNVKELNEGDVGGVILLETPFYAQSGGQVGDKGELFAGDVFFEVEDTKKQGQSHIHLGILRTGTFKVGDVVR

SEQ ID NO: 191584 - protein, 485 aa, Unknown
  Bacterial polypetide isolated from the Sargasso Sea
MKNKNIKIDTSAFDKAMQKSKELARASWKGSGDKSVEEKWFKVREQLNPTEFLGYEFDKAEGIVLKISKENKFVENAKEGDEVEVITNQTPFYGESGGQVGDQGIISNSKCKINIQDTQKKMGDLFVHYGIVQKGIFAVGDSVNLEINTQKRNNARANHSATHLLHEALRRTLGKHVTQKGSLVSPDRLRFDFSHNKPIEKDEVVEINKIVNKIVNGASDVQTRIMSPKEAVTLGALALFGEKYGDEVRVVFMGKEKNGFFSTELCGGTHVRNTKEVGEFKVISQSSIASGIRRVEALRKKQLQDYEKSLKEDKNLKEKNLKDQVNLIKKDLLKLKVKPDFKDNVDLSENLKNLNKQLEKIKIKRIIEDKNKNIIKDKKVGNFLFRQQVLKDFPPKELRSVIDQGKKDIKNGIVVSISIHEDKVGVAVGITKNLTQKFDAVELVKVASKVLGGSGGGGRGDFAQAGGSYKDKIEEAFKTLNNKIS

SEQ ID NO: 191585 - protein, 874 aa, Unknown
  Bacterial polypetide isolated from the Sargasso Sea
MKAAEIREKFLKFFESKGHTIVRSSSLVPGNDPTLMFTNSGMVQFKDVFLGTDPRPYSRATTAQRSVRAGGKHNDLENVGYTARHHTFFEMLGNFSFGDYFKHDAIKFAWELLTTVYQLPKDKLWVTVYQEDDEAYDIWAKEVGVPTERIIRIGDNKGARYASDNFWTMGDTGPCGPCTEIFYDHGPDVWGGPPGSPEEDGDRYIEIWNLVFMQFNRDAQGNMTRLPKQSVDTGMGLERLAAVLQHVHSNYEIDLFQNLIKAAARVTEISDLTNNSLKVIADHIRACSFLIVDGVIPGNEGRGYVLRRIVRRAIRHGYKLGRKGAFFHKLVADLVAEMGTAYPELKEAEQRVTDVLRQEEERFFETIEHGMSILEAALADVEAKGGKVLDGELAFKLHDTYGFPLDLTADVCRERGMTVDEPAFDDAMARQREQARAAGKFKAAQGLEYTGAKTTFHGYEEIAFDDAKVVALYVDGSSVNEVKTGQDAVVVLDHTPFYAESGGQVGDQGVLANAATRFAVADTLKVQADVIGHHGTLEQGTLKVGDVLRAEIDAHRRARTQRNHSATHLMHKALREVLGAHVQQKGSLVDAEKTRFDFAHNAPMTDDEIRRVEQIVNDEILANAPGIVRVMPYDEAVKGGAMALFGEKYGDEVRVLDLGFSRELCGGTHVHRTGDIGLFKIVVEGGVAAGIRRVEAITGDNAVRYVQELDARVNEAAAALKAQPSELTQRIAQVQDQVKSLEKELGALKSKLASSQGDELAQQAVEIGGVFVLAATLDGADAKTLRETVDKLKDKLKSAAIVLAAVEGGKVSLIAGVTPDASKKVKAGELVNFVAQQVGGKGGGRPDMAQAGGTEPANLPGALAGVKGWVEERL

SEQ ID NO: 191586 - protein, 407 aa, Unknown
  Bacterial polypetide isolated from the Sargasso Sea
AIIILNQTPFYGESGGQVGDKGFLENDSFKFEVMNTTKIFGSYFLHKGKVISGECEIEDTIKASINTVNRDFIKYNHSSTHLLHAALRKILGKHVTQKGSLVNSEKLRFDFSHNNPIEKDQLMNIEEIVNAQIQKNGIVEIKIVDQKKAIEEGAMALFGEKYSDEVRVVTMSQENESFFSKELCGGTHVVKLGEISKFKITNQSSVASGIRRIEAVSNVAVDKYIKEIEINLLEKNKNQDNQIEDLKNKIKKINADYNFKNQSEDKGLLIKELIQIHERLKQNMSISKNINNIIIKKIKELNFIYLIAEDYPNKSLKTFIDEQKKQYNKNSVSLIISNNNNKLSIVLGVTEDITDLFDASKEIREISIILGGKGGGGRKDLAQGGGSDVSQINESIKYVEDKLNSIS

SEQ ID NO: 191587 - protein, 327 aa, Unknown
  Bacterial polypetide isolated from the Sargasso Sea
FRRAGAVFYAKVNAAERKNSQANHSVTHLLHEALREVLGTHVEQKGSFVGPDYLRFDFSHFSKMTEEELKLVEDKVNAKIKESIALQEFRNIPIQEALDRGAMALFGEKYGDNVRMIQFGTSMELCGGTHVKNTSEIGHFKIVSESSAAAGIRRIEAISGDKSAEYFKNLEKQMTELSQLLKSKDIIKSIEKLIEENTSLKSEVEAFKKEKAKGEIGDWKNAYEQKGDKQLLVKKTSLDAASVKDIVFQLKREIPTSVTVILSDADGKPMITVGVSDDLAANYQAGTIVKDLAKEIQGGGGGNPGFATAGGKNLDGLENAYQKALNV

SEQ ID NO: 191588 - protein, 700 aa, Unknown
  Bacterial polypetide isolated from the Sargasso Sea
GPCGPCTEIFYDHGDHIWGGRPGSPEEDGDRFIEIWNVVFMQFNRQADGTMEPLPRPSVDTGMGLERISAIMQGVHSNYEIDIFQALIKKAAEIVGTTDLSNQSLRVIADHIRSCAFLVADGVMPSNEGRGYVLRRIIRRAVRHGRKLGATEVFFYKLAAELAAQMKDVAAELIAQLPLVERVLRIEEEQFVRTLDRGLLLLEDVLANLGDAKVIPGEVVFKLYDTYGFPADLTADVVREREIGIDEEGFKAEMEKQRARAKEASSFGVNYNEMLKLDFETPFTGYKTLTERTRVVGIYKGVDEVSGLIAGDEAVIVLEQTPFYAESGGQIGDSGTLKVDDGIFAVTDTVKAGKAIIHKGYMELGTLEKGAEVEAVVDGERRQAIALNHSVTHLLHAALRQALGEHVTQKGSLVGAERMRFDFSHFEGMTMATIRRVEELVNNQIRANHEITTQLMDLEAAKSAGAMALFGEKYEDDVRVVRMGDYSTELCGGTHAKRTGDIGFFKIIAESGIAAGVRRIEAVTGKAAIDFMHQVGEQIEEAAALVKGDQFCIADKVRQVLDKAKMMERELEQLKAKLAAQAGNDLLGQVIEIKGQKVLVAALEGADPKSLRGMLDELKNQMKSGVVLLATSGEGKVNLIAGVTNDLTGKVKAGELVNLVAQQVGGKGGGRPDMAQAGGTQPEAVPAALQSVHSWLEERL

SEQ ID NO: 191589 - protein, 407 aa, Unknown
  Bacterial polypetide isolated from the Sargasso Sea
NVFTRLEKRDYVRATTSQKCVRAGGKHNDLENVGYTPRHHTFFEMLGNFSFGDYFKERAIQLAWNLITKDFGLDKNRLYFTVFNEDDEAFNLWKKISGLGEDKIIKISTSDNFWSMGETGPCGPCSEIFYDHGDHLQGGLPGTKNQDGDRYIEIWNLVFMQYEQLSKDKRINLPKPSVDTGMGLERIAALLQGTHDNYKTDHFLKLIESTSESLKIKPNQKNMSSFRVIADHLRASSFLIAEGVLPSNEGRGYVLRRIMRRGMRHSHFLGAKEPIFFNIFKTLMNEMSENYSELKQAESLIKETLRSEEEKFLVLLERGMKILNDEITKVKKVLPGEVAFKLYDTYGFPLDLTEDILKNKSLTVDHNKFKSLMQQSRELAKKNWKGSGDNSVDKIWFKIKDRLQPTE

SEQ ID NO: 191590 - protein, 398 aa, Unknown
  Bacterial polypetide isolated from the Sargasso Sea
TGDEIRNAFLKFYSEKLHKIIPSASLIPDDPTVMLTIAGMLPFKPVFLGLKERPSKRATSSQKCIRTNDIENVGVTARHHTFFEMLGNFSFGDYFKREAIQWAWELVTNIYKLSVENIIVSVFHEDEESAKIWRDEIGIHPDRIVKLGEEDNFWSSGKTGPCGPCSELYYDFHPEKGLQNIDLEDGDRFIEFYNLVFMQYNRDPNGKLTDLKFKNIDTGMGLERMAQILQKKQNNYETDLIFPIIQKICEIANIDYFSSDDKNKISLKIIGDHTRAVIHLISDGVAASNLGRGYILRRLIRRMVRHGRLLGITNEFLPHIATVGINLMQNNYPDLKNNNDLILNEIKLEEIRFRETLERGERLLDELISSGQKLISGFKAFELYDTYGFPLELTIEIA

SEQ ID NO: 191591 - protein, 454 aa, Unknown
  Bacterial polypetide isolated from the Sargasso Sea
IEIWNLVFMQFNKQADGTMEPLPKPSIDTGMGLERISAILQNVHSNYEIDLFQNLIKSAASIVGSEDLENKSLRVIADHIRSCSFLICDGVMPSNEGRGYVLRRIIRRAVRHGYQLGANDIFFYKLVASLAKEMGEAYPELVDQLPVIEKVLRVEEEQFSKTLARGMAILNDTLETLEGDTVPGDVVFKLYDTYGFPTDLTNDVAREHDLKIDEEGFEAAMQAQRARAQQASNFGADYNSKLAIDHTTSFTGYTDVEGQANVVELIADNAFVEKLEDGQEGVVVLDSTPFYAESGGQAGDKGVLRVANGEFIVTDTQKMGNAFAHKGIAKGSVSKGDTATAAIDAANREAIKKNHSATHLLHAALREILGEHVTQKGSLVEAPRMRFDFSHFEAVTAEQLAEIERRVNQEIRANHTLATELMDLDEAKASGAMALFGEKYDEKVRVVTMGPFSV

SEQ ID NO: 191592 - protein, 567 aa, Unknown
  Bacterial polypetide isolated from the Sargasso Sea
DEDGDRFIEIWNLVFMQYEQISKEKRINLPKPSVDTGMGLERMTAVLQGTHDNYKIDHFQKIMAASSDLTKNQINSNTIASHRVIADHLRASSFLIAEGILPSNEGRGYVLRRIMRRGMRHAHSLGSKDPVFFKLFEVLLNEMKSSYPELINGKELIVETLKNEEEKFSTLLERGMKILDENLSKVQNKTLPGASAFKLYDTYGFPLDLTADILRGKNIKVDHVGFEKEMEKSKALARANWKGSGDKSVEERWFKVREEINPTEFLGYEFDKAEGVIIRISKNGKFIDKADTGDEIEVITNQTPFYGESGGQVGDQGYIFSSDSKIKVNDTQKKMGDLFVHYGKIEKGSISIGQHVNLEIDILKRNNSRANHSATHLLHESLRRTLGKHVTQKGSLVSPERLRFDFSHNKPIEKEEMNKINNIVNKIVAASSDVQTRIMTPKEAVSMGALALFGEKYGEEVRVVFMGKENNGFFSTELCGGTHVKNTKEVGKFKVISQSSIASGVRRVEALRDKQLEVYEKMQKKDKSQNEINIKNKIEFAKKELQKLKINPDFKENLDLSENLKNL

SEQ ID NO: 191593 - protein, 837 aa, Unknown
  Bacterial polypetide isolated from the Sargasso Sea
MLPFKPVFLGLKERPSKRATSSQKCIRTNDIENVGITARHHTFFEMLGNFSFGDYFKREAIQWAWELVTNIYQLSVENIIVSVFHEDEESAKIWRDEIGIHSDRIVKLGEEDNFWSSGKTGPCGPCSELYYDFHPEKGLQNIDLEDGDRFIEFYNLVFMQYNRDPNGKLTDLKFKNIDTGMGLERMAQILQKKQNNYETDLIFPIIQKICDIANIDYSSSDDKNKISLKIIGDHTRAVVHLISDGVAASNLGRGYILRRLIRRMVRHGRLLGITNEFLPHIATVGIKLMQNNYPDLKNNNDLILNEIKIEEKRFRETLERGEKLLDELIFSGQKLISGFKAFELYDTYGFPLELTVEIAEENSISVDVKGFEEEMNAQKERAKAASSNIDLTLEGSLEREIDLFKKTVFNGYNSLLSEAEIKGIFLDSTLVKQASEGQKVVIVLDKTTFYGESGGQVGDIGTIFSKDVEVLVDNVMRKKNVFLHYGTIKKGILTIGQKVKTNVNSSNRAKAAANHTATHLLQSALKSVVNESVGQKGSLVAFNKLRFDFNSSNPISKDQISEIENLVNSWIIENHALEIKNMSKSEAFEKGAVAMFGEKYDDEVRVVNVPGVSMELCGGTHVKTTSELGSFKIISEEGISAGVRRIEALSGQSALDYFSDRNTLVNQLSDLLKANPNQLFERVNNLQAELFNKNKEIQKMKDEIAYFKYSSIKSSAEIVNSFSILVNQIDGLDGNSLQSAALNLTSHLGNKAIVILGGIPNPENRKLLFVVSLGDDAVKIGLHAGKLINEIARICSGGGGGKPNFAQAGAKDIDKLSDALHYAKNHLQKTLESHSDK

SEQ ID NO: 191594 - protein, 51 aa, Unknown
  Bacterial polypetide isolated from the Sargasso Sea
MSTSEIRTAFLEYFRSQGHQVVSSSSLVPHNDPTLLFTNAGMNQFKDVFLG

SEQ ID NO: 191595 - protein, 305 aa, Unknown
  Bacterial polypetide isolated from the Sargasso Sea
VLGDHVQQAGSLVHPDYLRFDLTHFEKISKKEIREIENIVNSEILINNKLDVSIKAFDEAKKEGAVAMFGEKYGDQVRVITVADFSKELCGGTHVDRTGDIGLFKITEETSLASGVRRIVAVTGPKAVEFVQDQVAALDEVKSQLKCNLNSIPDRLGQLIKDNKTLEKELKKQKKSNSSFDTKILLKEALIIENKTIVIKMTDAEDMDSLKDFGNSLLLKLKNGIGVLGAVADKPMLVVVVTDTLIEAGIKAGDLAKQIGSIMGGGGGGRPNLATAGGKDQKSLETAMEKAKDIILKNIEEKNAV

SEQ ID NO: 191596 - protein, 299 aa, Unknown
  Bacterial polypetide isolated from the Sargasso Sea
APDRLRFDFSHMKPITNEELETIDKLVNEYVSNSSEVTTRIMTPKAAIEKGALAFFGEKYGDEVRVVSMGKEKEAYFSTELCGGTHVKNTGDIGKFKTVSQSSIAAGVRRVEALRDKQLEDFIRNKEKLSTLSTQKDEETIKDLSSQIIKLGGKPNVDNDDLKEIIKNLSRQLEQLNVSSVLQDKTKNIIKDDNIKNIKVRFQKVQDLPPKDLRKLVDNGKKELGDGIVIVFASSEDKVGLAVGITDNLVDKYDAVKFAKLGSETIGGKGGGGRKDFAQAGGQDKNKIDEAFEKIKSLI

SEQ ID NO: 191597 - protein, 254 aa, Unknown
  Bacterial polypetide isolated from the Sargasso Sea
EAVDNGALALFGEKYGDEVRVLSMGNEKTSYFSTELCGGTHVRNTSDIGKFKIISQSSIAAGIRRVEALRDKQLQEYFNKKEKQTGIDTQKNEEIIKDLSTKIIKLGGKPNIENDNHKSLIKDLTKHYEQLLVKSTLSDKSKNIVDDQIINKIKIRFQKVIDLPPKDLRKLVDDGKKELGEGIVIVFAIKDEKIGLGVGVTDNLKKKYDAVKFVKKGSEIIGGKGGGGRADFAQAGGTDISKIQEAFDQIKSLI

SEQ ID NO: 191598 - protein, 263 aa, Unknown
  Bacterial polypetide isolated from the Sargasso Sea
DLLRIFFDHGDKYEGTPPGEDGDEGDRFVEIWNLVFMQFNRDSGGVLHDLPKPSVDTGMGLERIAAVMQGVGSNYDTDIFSNLIIESEKVLGNVGDVSHKVIADHLRSSCFLISDDIFPSNEGRGYVLRRILRRAIRHGYKIGADVPFMHKLVKTFVDGMGNAYPQLKNDEGRIEKLIKNEETQFLQTLDKGIQILDSTLAAGNEETISGDLAFKLHDTYGFPFDLTADIAREKGIDIDEKGFKKNMESQQQMSKASSSFVSK

SEQ ID NO: 191599 - protein, 653 aa, Unknown
  Bacterial polypetide isolated from the Sargasso Sea
IAALLQGTHDNYKTDHFIKLINSTADVVKTKPNEKNISSFRVIADHLRASSFLIAEGVLPSNEGRGYVLRRIMRRGMRHSHFLGAKEPIFFNIFKTLMSEMSSNYPELKRAESLIKETLRTEEEKFLVLLERGMKILNEEVNKVNKILPGEVAFKLYDTYGFPLDLTEDILKSKSLTVDHNKFKSLMQESRELAKKNWKGSGDSSVEEIWFDIKDRLEPTEFLGYETNQAEGIVLSLIKNNKEVQNLNKGDEAIMILNQTPFYGESGGQIGDTGIIVSGDFKFKVSDVQKKLGDLFVHYGKVENGSIKLNDTVEMKIDIERRENIRAYHSATHLLHESLRRVLGTHVIQKGSLVAPDRLRFDFSHMKPISNEEIDKIEKFVNGMVDTKSEVKTRLMTPKEAVDNGALALFGEKYGEEVRVLSMGDEKNKYFSTELCGGTHVRNTADIGKFKIISQSSIAAGIRRVEALRDKQLEEYLTQKEKLSDLSIQKDEEIIKKLSEQIIKLGGKPNLDNDNQKNLIKDLNKQFDQLSVKKILSDKSKNIVKDETVKDVKVRFQKVIDLPTKDLRNLVDKGKKEILDGIVVIFAIQDEKIGLAVGITEKLTSKYDAVKFVKIGSDIIGGKGGGGRQDFAQAGGILKDKIDEAFDKIKSLI

SEQ ID NO: 191600 - protein, 251 aa, Unknown
  Bacterial polypetide isolated from the Sargasso Sea
MNTNEIREAFLEFFKSKDHNVVSSSSLIPNNDETLLFTNAGMVQFKDVFLGQEKLKYSRATTSQKCIRAGGKHNDLENVGYTLRHHTFFEMLGNFSFGDYFKEEAIVFAWEFLTDVLKLDKDRLWITVYKDDDEAKEIWINKIGIDPDRIAKLGDKDNFWSMADTGPCGPCSEIFFDHGDKYEGTPPGEDGDEGDRFVEIWNLVFMQFNRDSDGVLHDLPKPSVDTGMGLERIAAVMQGVGSNYETDIFQT

SEQ ID NO: 191601 - protein, 486 aa, Unknown
  Bacterial polypetide isolated from the Sargasso Sea
QHNDLENVGFTSRHLTFSEMLGNFSFGQYFKKEAIQFAWEFLTKELKLPKEKLWITIHNSDDESLNLWVNNIGVDPNKVSKLGDADNFWSMGETGPCGPCSEIFYDYGPSFEGSPPGQGDGGDRYVEIWNLVFMEFNRDLSGELHPLPNKCVDTGSGLERLCAVLQGVGSNFEIDFFSDFKKSISNLFPNPNDQSLNVVVDHIRSVFFLMSETIYPSNEGRGYVVRRLIRRAIRHGYKMGITEPFLYKCMDVLKDLLQEDFYEDFKNVAEIMSALKDEEELFFRTLSVGMKIFEDSLKNQNIKILSGEVAFKLHDTFGFPIDLTQSMAEEHGISVDLKVFESLMQKQKAGSKKSSMFNAKDFVIKPGVTSEFVGYETLKTEGHAELLFSKEGKEVNEIVDHGFIIFNQTPFYAESGGQVGDTGILKSESCYGEIIDCKKSGDVHIHEIKIIDGMVRTSEKYDLCVDGDRRERIIRNHSAAHLLHSA

SEQ ID NO: 191602 - protein, 367 aa, Unknown
  Bacterial polypetide isolated from the Sargasso Sea
MQFEQISKEKRIDLPKPSVDTGMGLERIAALLQGTHDNYETDHFKKIINSASEILKVKSDNSNLSSFRVIADHLRASSFLIAEGVLPSNEGRGYVLRRIMRRGMRHSHLLGSNEPVFFNLFETLRDEMKGNYPELVRAESLIKETLKMEEEKFLVLLDRGIKILNEEISKIDKVLPGEVAFKLYDTYGFPLDLTEDILRNKSMSIDSEKFQSLMKESRELAKKNWKGSGDAAVEDVWFGIKDKLGATEFLGYETNQAEGAVLSLLKDNKEVDELNNGDEGMIIVNQTPFYGESGGQVGDTGEIAGNDFKFEVTDVQKKLGDLFVHYGKVINGSIKIKDNVELKINVERRDDTRAYHSATHLLHESLR

SEQ ID NO: 191603 - protein, 421 aa, Unknown
  Bacterial polypetide isolated from the Sargasso Sea
TLFDGIHSSGGGLVGGEDAAELYTTYGFPPELLETLAAERNCAFDWDGFREAMEAHGKKSGAGTRGEVFTSGPLDALKKAMHGSEFVGYESATTTGTIVGIIAQDRLCESITEADAVPPTIEHKPNQIVTVILDKTSFYGESAGQVGDTGWIEGPNGKFEVINTQKEGDFFLHCGVLREGSVELGQEVRAHVDEGRRKAIRRAHTATHLVHAALQHFLGSHAVQQGSKVDADILRFDFSHAAPVGHEMLRDIEAMANESTLVAAPVSANLLPLEEARHAGAMMLFGEKYPDVVRMVSIDGISRELCGGTHVDNTGEIGLVKIIHEESVSAGTRRVVAITGHRALERFRQAEATLIESANTLKVPVPDLPTRLNSLTKELKTLKRQAETNQADISIDELLNSAEEVAGVRIVVADAKGCNAA

SEQ ID NO: 191604 - protein, 863 aa, Unknown
  Bacterial polypetide isolated from the Sargasso Sea
MKTNEIRQAFIAFFESRKHQRITSSPLIPANDPTLLFTNAGMVQFKDIFLGKEDQGFTKAVSAQRCLRAGGKHNDLENVGYTSRHHTFFEMLGNFSFGDYFKEEAILLAWSFITDQLNLEKDRLWITIFQDDDEAATIWLDKVGISEDRLVRLGEESNFWSMGDTGPCGPCSEIFYDHGDHIDGGPPGTSNEDGDRFVEIWNLVFMQYDRQASGELVDLPKPSVDTGMGLERIAAVMQGVSSNYDIDLFKKLINAIKSQSEKGEESHYRVIADHIRSSAFLIMDGVTPDNEGRGYVLRRIIRRALRHGYDLKINSPFFYKLVEVLTEEMGQTYPELLNKKDYIERIILMEEERFAATLSQGMTLLQKEFDRTNAELISGEFAFKLYDTYGFPLDMTIDIARSVSRTIDIEGFEKAMEKQREMARKASKFKIDESFSLDHGLKSDFYGYQDLDTESEVIGVFGKDGSDKLQEGEIGQVILDKTPFYAESGGQVGDQGSFSSESINFEVLDTQFSGDAYSHIGTVSTGQIKVGDKIKASVNPVRRKSITLNHTGTHMLHRALMMVLGEHVQQRGSLVDDEKIRFDFSHHQSLTSNEIREIETIVNEKIEENIDVQTSIMKHDEAISSGAMALFGEKYGEDVRVLDVGDFSKELCGGTHVSNTNEIGIFKVVSESSISSGTRRIEAITGDKALKWAKETEYLIESLTDLLQTRREDVASKVENLVDTNKKLQAEIKQLKSRIASGQTSDEDSSSEDINGIAYLYKELENETEPSVMRGAIDQFKNKLESGVIVLSSINKKGKVTFSIGVTDDLTSKVEASSIADIIAKALSGNGGGKANFAQAGGSDAKKVPAALESVKEFLKKNS

SEQ ID NO: 191605 - protein, 396 aa, Unknown
  Bacterial polypetide isolated from the Sargasso Sea
MADKSLNEIRSAFLKYFEKNDHKIVDSSNLVPNNDPTLMFANSGMVQFKNVFTGLEKRDYKRATTSQKCVRAGGKHNDLENVGYTPRHHTFFEMLGNFSFGDYFKDRGIELAWNLITKDFGLDKNKLYFTVFNEDEEAFNLWKKITGFGEDKIIKISTSDNFWSMGETGPCGPCSEIFYDHGDHLKGGLPGTKDQDGDRYIEIWNLVFMQFEQVSKDKRINLPKPSVDTGMGLERIAALLQGTHDNYKTDHFIKLINSTADAINTKINDKNISSFRVIADHLRASSFLIAEGVLPSNEGRGYVLRRIMRRGMRHSHFLGAKEPIFFNIFKTLMDEMSENYPELKRAESLIKETLRAEEEKFLVLLERGMKILNEEVTKVDKVLPGEVAFKLYDTYG

SEQ ID NO: 191606 - protein, 418 aa, Unknown
  Bacterial polypetide isolated from the Sargasso Sea
MNSKEIRKAFIDFFKDKDHKFIRSSPVVPIDDPTLLFTNAGMNQFKSIFLDQKISEFPRVVNSQKCIRVSGKHNDLEEVGIDTFHHTFFEMLGNWSFGDYYKAEAINWAWELFTEVWGLDKNRLWVTVYHEDNEAFDLWPKVTDISPDRVLKFDKKDNFWEMGETGPCGPCSEIHYFIGDDIKSQSPDKVNSSDQYWELWNLVFIQHNRLSNGKLEDLSAMHVDTGAGFERIVSVMQGKLSNYSTDLFLPIIGKIESITGKSFNDDPVPFQVISDHIRMLSFAIADGALPSNEGRGYVLRRILRRAARFGRSLDMNQPFIFNLVGTVEKIMGDTFPEIVDKKSHIEKIIKAEEASFNDTLDRGLSHFNKVISNMSGKTIPGSDAFKLYDTFGFPLDLTHLMAREKGLSIDEDGFKKEM

SEQ ID NO: 191607 - protein, 537 aa, Unknown
  Bacterial polypetide isolated from the Sargasso Sea
MGETGPCGPCSEIFYDHGDHLKGGLPGTKDQDGNRYIEIWNLVFMQFEQVSKDKRINLPKPSVDTGMGLERITALLQGTHDNYKTDHFIKLINSTADSIKTKPSDKNISSFRVIADHLRASSFLIAEGVLPSNEGRGYVLRRIMRRGMRHSHFLGAKEPIFFNIFKTLIDEMSGNYPELKRAESLIKETLRAEEEKFLVLLERGMKILNEEINKVDKVLPGEIAFKLYDTYGFPLDLTEDILKSKSLTVDHNKFKSLMEQSRELAKKNWKGSGDSSVDEIWFEIKDKLEPTEFLGYETNQAEGKVVSLIKDNKEVRSLNKGDEAMMVLNQTPFYGESGGQIGDTGLIISGDFKFKVKDVQKKLGDLFVHYGKVENGSIKLNDNVEMKIDVERRENIRAYHSATHLLHESLRRVLGKHVIQKGSLVAPDRLRFDFSHMKPISNEEIVKIETFVNEMVETKSEVKTRLMTPKEAVDNGALALFGEKYGDEVRVLSMGNEKDRYFSTELCGGTHVRNTGDIGKFKIVSQSSIAAGIRRVE

SEQ ID NO: 191608 - protein, 856 aa, Unknown
  Bacterial polypetide isolated from the Sargasso Sea
MLTSELRAKFLDYFKKNDHELVDSSPLIPANDDTLLFTNAGMVQFKDVFLGSDKRPYKRATTTQRCIRAGGKHNDLENVGYTLRHHTFFEMLGNFSFGDYFKEEAIQLAWHFLTHELNLDKERLWISVFREDDEAAEIWSSTIGVDPKRIVRLDEEDNFWSMGDTGPCGPCSEIYYDHGDQYEGTPPGSPGDDGDRFVEIWNLVFMQFNRDAKGELTPLPKPSVDTGMGLERVAAVMQGVNSNYETDLFLNLIKASEDAIQSPGEASHKVIADHIRSVSFLIADGITPSNEGRGYVLRRIMRRAIRHGYKLGAKKPFLYSLVKSLVREMESAFPMLASNQKQIEEIIHNEENKFLETLDKGIEILEKEIANVDSKVIPGDVVFKLHDTFGFPFDLTADIAREQDLKLDEAGFNQCMEEQVKNSKSASKFKGTQLDLSSIDETKFLGYDRLNAEGKILGLWNDDLQVDSATSDKEYFLALDQTPFYAESGGQVGDQGEFSSSSGSGQILDCIKQGKIFLHTIKLDDGTVNSGETLKLAVASDKRASAASNHSATHLMHAALKHVLGSHVEQKGSLVDASKLRFDFSHPKAVTKDEIKQIELLVNQHTLNNAEVKTELMKLDDAIASGAEAMFGEKYDDEVRVLSMSDGFSVELCGGTHVTRTGDIGMFVILSESSVSSGVRRIEAVTGAKAVELALEIRSQLQDVQGILNVGASQVSSKVEDLVKENKSLKKGNTSKAKSSVDLKEVIHKIKNFDLVLIEADTQNIQDLRQLVDSSKKDQSQRCVLILSHQDSKVVMVCGVTNDIQESLSANDVIQAVAKASDGKGGGRKDFAQGAGVADNFEEFVNSIPDIVQSIA

SEQ ID NO: 191609 - protein, 288 aa, Unknown
  Bacterial polypetide isolated from the Sargasso Sea
KGSLVTDKYLRFDFSHNKPLSSDEIASIEKIISNEISACVSTKQKVTSYKKAIESGALAFFDEKYDDEVRVVNIGSNSIELCGGTHITDTSSIRLFKILNESAVSTGIRRIEAITGDEAYQSYQNLYRDVKELSVNLNINPNELKSKIDSIKVTDEVNNNLINDLNKKVSTLYYYKLVPMESDKSKTSFFIQDCSDLSLDQIKLLSDNIKSKNKNSISILISGDSDKINCYVGVSKDCKHRYNAKQIISELNLKFSAKGGGSPTFGTSVITGQKPSVVIKYIKELVKA

SEQ ID NO: 191610 - protein, 670 aa, Unknown
  Bacterial polypetide isolated from the Sargasso Sea
MADKTLNEIRNTFLKYFEKNEHKIVESSNLVPNNDPTLMFANSGMVQFKNVFTGLEKRDYVRATTSQKCVRAGGKHNDLENVGYTPRHHTFFEMLGNFSFGDYFKEQAIHYAWDLITKDFGIDKDRLYVTVFHEDDEAFNFWKKIGGFSDDRIIRIATSDNFWSMGETGPCGPCSEIFFDHGDHLAGGLPGSKDEDGDRFIEIWNLVFMQYEQVSKDKRINLPKPSVDTGMGLERIAALLQGTHDNYETDHFEKIINSASDIVKVKSNKTNLSSFRVIADHLRASSFLIAEGVLPSNEGRGYVLRRIMRRGMRHSHLLGSKEPVFYNLFDTLKNEMSGNYPELVRAESLIKETLRMEEEKFLVLLDRGIKILNDEISKIDKVLPGEVAFKLYDTYGFPLDLTEDILRNKSMSIDTEKFKTLMKESRELAKKNWKGSGDAAVEDFWFGIKDRLEPTEFLGYETNQAEGVVLSLLKDNKEVDQMKENDEGVIIVNQTPFYGESGGQVGDTGEIVSNEFKFEVTDVQKKLGDLFVHYGKVVSGSIKIKDSVEMRINVERRDDTRAYHSATHLLHESLRRVLGNHVTQKGSLVEPSRLRFDFSHMKPIQNDEIDKIENFVNDMVSKKSDVKTRLMTPDEAVENGALALFGEKYGDEVRVLSMGDEDGKYFSTEL

SEQ ID NO: 191611 - protein, 382 aa, Unknown
  Bacterial polypetide isolated from the Sargasso Sea
MTSQIINKIITGDEIRKAFLDFYHEKSHKIIPSASLIPDDPTVLLTIAGMLPFKPVFLGLKERPSKRAASSQKCIRTNDIENVGVTARHHTFFEMLGNFSFGDYFKQEAIEWAWELVTKVYGLSVENIIVSVFHDDNESEKIWQEEIGILPERIIKLDEKDNFWSSGKTGPCGPCSELYYDFNPEKGLQNIDLDDGNRFIEFYNLVFMQYNRDSDGRLSDLKYKNIDTGMGLERMAQILQKKKNNYETDLIFPIIQRASEISNIDYFSADERTKISLKIIGDHTRAVIHLISDGVIASNLGRGYVLRRLIRRMVRHGRLLGIKNQFLSEIAIIGIKLMQENYQDLKDNIDSILTEIKIEEERFRETLDRGEKLLDELILQVR

SEQ ID NO: 191612 - protein, 368 aa, Unknown
  Bacterial polypetide isolated from the Sargasso Sea
MGQILLTDVRKKFLDYFKKNNHKIVDSSNLVPNNDPTLMFTNSGMVQFKNVFTGLEKRDYKTATTSQKCVRAGGKHNDLENVGYTPRHHTFFEMLGNFSFGDYFKEQAIHHAWNLLTKDFNLPKEKLLVTVFHEDKDAFNLWKKIAGLNESKIIKISTSDNFWSMGDTGPCGPCSEIFYDHGDKLKGGPPGSLDEDGDRFIEIWNLVFMQYEQISKEKRIELPKPSVDTGMGLERMTAVLQGTHDNYQIDHFQKIMAASSDLTKTSIDSKTIASHRVIADHLRASSFLIAEGILPSNEGRGYVLRRIMRRGMRHAHSLGSKNPIFYKLFEVLLNEMQNSYPELINGRELIVETLKNEEEKFSSLLVRG

SEQ ID NO: 191613 - protein, 378 aa, Unknown
  Bacterial polypetide isolated from the Sargasso Sea
NCFWYSVFEVEDTQKKLGDLFVHYGSLKTGEMKINDVVEMKIDVERRDNLKAYHSATHLLHESLRRTLGKHVMQKGSLVAPDRLRFDFSHMKPITDKELVTIDKLVNEYVSNSSEVTTRIMTPKVAIEKGALAFFGEKYGEEVRVVSMGKEKEAYFSTELCGGTHVKNTGDIGKFKTVSQSSIAAGVRRVEALRDKQLENFIKNKEKLSTLSTQKDEEAIKDLSSQIIKLGGKPNVDNKDLKEIIKNLSRQLEQLNVSSVLQDKTKNIIKDDKINDIKVRFQKVQDLPPKDLRKLVDNGKKELGDGIVIVFASSEDKVGLAVGITDKLVDKYDAVKFAKLGSEIIGGKGGGGRKDFAQAGGQDKSKIDEAFEKIKSLI

SEQ ID NO: 191614 - protein, 886 aa, Unknown
  Bacterial polypetide isolated from the Sargasso Sea
MADKSLNEIRSTFLKYFEKNDHKIVESSNLVPNNDPTLMFANSGMVQFKNVFTGLEKRDYKRATTSQKCVRAGGKHNDLENVGYTPRHHTFFEMLGNFSFGDYFKEKAIFYAWDLITKDFGLDKNRLYFTVFSEDDEAFNLWKKITGFNDDRIIRIPTSDNFWSMGETGPCGPCSEIFYDHGDHLKGGLPGTKDQDGDRYIEIWNLVFMQYEQVSKEKRIDLPKPSVDTGMGLERIAALLQGTHDNYKTDHFIKLINSISETIKIKPSETNLSSFRVIADHLRASSFLLAEGVLPSNEGRGYVLRRIMRRGMRHCHLLGSKEPVFFNIFKTLMNEMSGNYPELMRAESLIKETLRMEEEKFLVLLDRGMKILNDEINNVDKKLSGEVAFKLYDTYGFPLDLTEDILKNKSLTLDHKKFDDLMIKSKELAKKNWKGSGDSSVDEIWFGIKDKVGPTEFLGYEYEHAEAVIQKIVKNNKEVEKLNDGDEGIIILNQTPFYGESGGQVGDSGTIKSGENIFEVNDVQKKLGNLFVHYGKMRNGNLKINENVELKIDVEKRNNVRAYHSATHLLHESLRRILGTHVTQKGSLVAPDRLRFDFSHMKPISSDELEKIDNSVNEVVQKKSEVITRIMTPKEGIEHGALALFGEKYGDEVRVVFMGDEGNKYFSTELCGGTHVRNTGDVGKFKIISQSAIASGVRRVEALRDKQLEEFLTNKEKQIGISEQKNDQIIDEISKEIISLGGKPIKNVDDKKQLIKDLSKQLDQLSVKSILSDKNKNIIKDEKINNIKVRFQKIFDLSPKELRKLVDNGKKELKEGIIIVFASKDEKVGLAVGITEKLTENFDAVKFAKVGSEILGGKGGGGRKDFAQAGGQHIDKIEDAIESLKN

SEQ ID NO: 191615 - protein, 274 aa, Unknown
  Bacterial polypetide isolated from the Sargasso Sea
MPDKTLNEIRSTFLKYFENNGHRIVDSSNLVPNNDPTLMFANSGMVQFKNVFTGLEKRDYKTATTSQKCVRAGGKHNDLENVGYTPRHHTFFEMLGNFSFGDYFKERAIELAWNLITKDFGLDKNKLYFTVFNEDEEAFKLWKKITGFGEDRIIKISTSDNFWSMGETGPCGPCSEIFFDHGDHLKGGLPGTKDQDGDRYIEIWNLVFMQFEQLSKDKRINLPKPSVDTGMGLERITALLQGTHDNYETDHFKKLIGSISEGTKKNLTKVYFQF

SEQ ID NO: 191616 - protein, 510 aa, Unknown
  Bacterial polypetide isolated from the Sargasso Sea
MITKDFGLDKNRLYFTVFNEDEEAFKLWKKISGLNENKIIKISTSDNFWSMGETGPCGPCSEIFYDHGDHLKGGLPGSKDQDGDRYIEIWNLVFMQYEQVSKDKRIDLPKPSVDTGMGLERMAALLQGTHDNYKTDHFLKLINSISETVKVKPNENNLSSFRVIADHLRASSFLLAEGVLPSNEGRGYVLRRIMRRGMRHSHLLGSKEPIFYNIFKTLLDEMSKNYPELKRAESLIKETLKMEEEKFLVLLERGMKILDDEISKIDKVLPGEVAFKLYDTYGFPLDLTEDILKNKSLEVDNKKFDEMMKKSRELAKKNWKGSGDSSVSEIWFNLKEKIGPTEFLGYETNQAEGSVAAIIKDNKEIQQLKQGEEGQIILNQTPFYGESGGQVGDKGIITSGENEFEVTDVQKKIGNLFVHFGKVSKGTIKKKNNVELKINSERRQDIRAYHSATHLLHESLRRTLGTHVMQKGSLVTPDRLRFDFSHMKPITDEEMKKIDENVNKFVNQRQ

SEQ ID NO: 191617 - protein, 534 aa, Unknown
  Bacterial polypetide isolated from the Sargasso Sea
MGQAYPELIEQKNHIEDVIKQEEIRFSVTLDQGMEILEEAILSMENDVLPGEVVFKLYDTYGFPVDLTNDIARERNFSIDLKGFDEHMNSQKIRARKANKFSGAEEKNYELTVNSEFFGYEFTEKTAKIKEIFVDGNALKSIEVGQEGFIVTDATPFYAESGGQVGDTGIIHSKDGVFKVTDTQKQNNSILHHGILEKGKIDINKKVTLTVDDKKRLKIAANHSATHLMHAALRNTLGKHVKQKGSLVDATRLRFDFSHNQPLTETELSEIEAQVNAEIRKNNAAKIDIMAYQDAIDSGAMALFGEKYEDQVRVLNFGEYSIELCGGTHVNRTGDIGLFKIVSETGVASGIRRIEALTGEAAQEWLTSYKTRLDRVAAILKSSEDQVDSKVEQLLLKNKELEKELSRSKQRMFSGNHDDILNNVTEKNGKSILVQRLDGFNADDLRTSIDRYKDKLKSAIVVLGASEKGKAKIAVGVTNDNTELVHAGELIKKIAEVVGGKGGGRPDFAQAGGPEAKKLDEALKLAKELINSKI

SEQ ID NO: 191618 - protein, 363 aa, Unknown
  Bacterial polypetide isolated from the Sargasso Sea
MGSAYPDLESKEKDITKMIHDEEVKFFETLEKGINILDETINSMKGKTISGDVAFKLHDTFGFPYDLTADIAREKELKVDEKRFNECMDMQKQTSKASSSFVSSLPAAAGIDQTVFLGYEQLETNSKVLVIWKEQSRVDEAKKDEEIFIACDQTPFYAEAGGQIGDKGIFASESSTGTILDCKKQGKVYIHKAVVKKGKINKGDVIKMSVEKEKRAAIAIHHSATHLVHAALREILGDHVQQKGSLVDENKLRFDFSHSKPLSSEEIFAIETIVNKEALKNLEVKTELMKLDDALKSGAMALFGEKYDDDVRVLTMGENSYSVELCGGTHVERTGDVGFFAITSQSSVASGIRRIEAVAGIKA

SEQ ID NO: 191619 - protein, 539 aa, Unknown
  Bacterial polypetide isolated from the Sargasso Sea
MGDTGPCGPCSEIFYDHGDHIWGGRPGTPEEDGDRFIEIWNIVFMQYNRQADGEMLPLPKPSVDTGMGIERIAAIMQGVHSNYEIDIFKQLIAKAAEIIGVSDLENKSLRVIADHIRSCAFLVADGVMPSNEGRGYVLRRIIRRAVRHGNKLGANEAFFYKLVPTLISVMGDAANGLKAMQAIVEKALKAEEEQFARTLERGLVILDGALNSLNGDTLDGETVFKLYDTYGFPVDLTADVCRERDINVDEAGFEAAMAEQRSRAQAAGNFGADYNSHLIIDAETAFCGYTELTGESTVTGLYVDGKAVEQVVAGQNAIVVLANTPFYAESGGQVGDKGLLTAQGVEFTVNDTQKFGQATGHQGQLAQGQLVLGQTLTAQVDKKLRHRTQLNHSVTHLLHAALRQVLGTHVTQKGSLVNPERLRFDFSHFEAVKPSELKAVEELVNTQIRRNHQLKTAEMAIDEAKEKGAMALFGEKYDDQVRVVTMGDFSIELCGGTHVGRTGDIGLFKITTEGGIAAGVRRIEAVTGAAAMSYVAEQQ

SEQ ID NO: 191620 - protein, 503 aa, Unknown
  Bacterial polypetide isolated from the Sargasso Sea
MVFPLDLTADILKNKKIKIDTNAFKKEMEKSKEVARASWKGSGDKSVEKKWFKVREELSPTEFLGYEFDKAEGVILKISKGDKFVDSAKAGEEIEIITNQTPFYGESGGQVGDQGIIYTSDCKIRIKDTQKKMGDLYVHTGNVEKGSIKTGQSANLEIDINKRNNSRANHSATHLLHESLRRTLGKHVTQKGSLVSPERLRFDFSHNKPIEKDEMIKINNVVNEIVQGSSDVQTRIMTPKEAVSMGALALFGEKYGEEVRVVFMGKENNGFFSTELCGGTHVKNTKEVGKFKVISQSSIASGIRRIEALRDKQLEDYEKSLKQDKSSKEETLKDQINEIKNQLLKLKIEPSYIDGFLKSKENKDLSEKFRSLNKVLEKVKIENILKDKNKNIIKDKKAGAFTLRQQVLTDFPPKELRSIIDKGKKDIKEGIVVGISTFEGKVGVAVGITKELTKKYDAVTLVKTASEILGGKGGGGRKDFAQAGGSNKDNIEKAFEALNKKIS

SEQ ID NO: 191621 - protein, 287 aa, Unknown
  Bacterial polypetide isolated from the Sargasso Sea
PKDKLSATVYSEDEEALKLWKKVAGLPESKIVKISTSDNFWSMGETGPCGPCSEIFYDHGDKLKGGPPGSLDQDGDRFIEIWNLVFMQFEQVSKGRRLDLPKPSVDTGMGLERIAAVLQGTHDNYSIDHFKKLMNASSEITKTKIDKETIASHRVIADHLRASSFLIAEGVLPSNEGRGYVLRRIMRRGMRHAHTLGSKNPIFFKLFDVLLNEMSQSYPELERGKDLIIETLKNEEEKFSSLLDRGMRILNQNLEKVKTNILPGEIAFKLYDTYGFPIRFNCRYFEK

SEQ ID NO: 191622 - protein, 729 aa, Unknown
  Bacterial polypetide isolated from the Sargasso Sea
MRHLICGKVRQNISKERILRFGDKENFWEMGETGPCGPCSEIHYFIGDDISLQSPEGVNRDDIYWELWNLVFIQNERLSDGTISNLPQSHVDTGAGLERITTILQGKKSNYETDLFQPIIKQLEIFSGIKYNDDQVPFQVIADHIRMLCFSIADGAIPSNEGRGYVLRRILRRAARFGRMLKLEEPFLHKLVPVVSELMSESYPELSDKDTHIELVIGTEETLFNQTLDRGINHFDKLLSDLKGNTISGSDAFRLYDTYGFPLDLTQLIAREKGIAVDEDGFDKEMAKQKDKARQAGKFKIETKDVAWNNLRNGDHSEFIGYELLDSKSKVMKYAEIDGSYLIVLDKTPFYAEAGGQVADKGTIKSDNLDLKVVDVQKENDLIIHFCEGKVSSMDSEDIVECKADGSYRAPIRRNHTATHLLHAALKVVLGDQVQQAGSLVHPDYLRFDFTYFEKISKDQIREIEDIVNMQILINNNLDVSTKSYDEAMAGGVVALFGEKYGDQVRVVSTGEFSSELCGGTHVNRTGDIGLFKITEESSLASGVRRIVAVTGQRSVQVFQDKSETLSDIQQHLNCKESEIFHRITQLYNDKKELEKKIKELAQSSESDIDSWINEGKKIGSYNLVVKHLDVSDVDDLKRSGDKLLSQIGSGAGVLFSSGSDKPFAVIVITDDLIKQGLDAGSLAKEIGSFMEGGGGGKPHLATAGGRDSSLIPAAIDRTQDLISNKLNV

SEQ ID NO: 191623 - protein, 155 aa, Unknown
  Bacterial polypetide isolated from the Sargasso Sea
MKSSDIRKSFIEYFKNKEHQFVRSSPVVPIDDPTLLFTNAGMNQFKPIFLGEAQQDYNRAVNSQKCIRVSGKHNDLEEVGLDTFHHTFFEMLGNWSFGDYYKKEAIEWAWDLLTNVWKLEKERLWVTVYKDDDEAFNLWKSQTEYIKGANSSIWR

SEQ ID NO: 191624 - protein, 382 aa, Unknown
  Bacterial polypetide isolated from the Sargasso Sea
MKTSEIRKAFLDFFNSKNHEVVASSSLVPSNDETLLFTNAGMVQFKDVFLGTETKNFKRAATSQRCIRAGGKHNDLENVGYTLRHHTFFEMLGNFSFGDYFKEDAIKFAWEFLTEILKLDKEKLWITIYKDDDEAEEIWKNIIGIDPGKIARLGDDDNFWSMGDTGPCGPCSEIFYDHGEQIDGTPPGADGDEGDRFIEIWNLVFMQFNRDESGKMEPLPKPSVDTGMGLERIAAVLQCVNSNYETDVFKDLINASEKILGSDGSTSHKVIADHIRSSVFLISDGVIPEKEGRGYVLRRIMRRGIRHGYKIGAKKPFMHLLVKDLIKLMNSAYPELKKKQKDIIELIKNEEIKFFETLETGIEILEETISKMKNKTLSGDVV

SEQ ID NO: 191625 - protein, 392 aa, Unknown
  Bacterial polypetide isolated from the Sargasso Sea
FYGESGGQVADKGEIISGKFKFEVTDVQKKLGDLFVHYGEVKSGSIKLNNNVEMKINVSRRDNIRAYHSATHLLHESLRRVLGTHVTQKGSLVESERLRFDFSHMKPISLEEIKKIETFVNSMIEKQSEVKTRLMTPKEAVDNGALALFGEKYGEEVRVLSMGDEDKNYFSTELCGGTHVRNTGDIGKFKIVSQSSIAAGVRRVEALRDKQLDDYLKNKEKISNLSEKRDEEIIRDITKKIVNLGGKVNAENKNKKELIKILSKDLEQLELNLILEDETKNIICDDNINNIKVRFQRVEDLPFKELRKLVDKGKKDLEKGIVIVFSSKDEKVGLAVGITKQLVDKYDAVEFVRQGSEIVGGKGGGGRRDFAQAGGVEKKNINIAFGVLKNLI

SEQ ID NO: 191626 - protein, 848 aa, Unknown
  Bacterial polypetide isolated from the Sargasso Sea
MKLNQVRQSFLNYFKNKNHKILPSSGLVPKGDDSLLFTNAGMVQFKDTFLGLDNRDYSATTSQKCLRVGGKHNDLENVGFTTRHQTFFEMLGNFSFGEYFKEKAIEYAWEFLTEELKLPEDRLWVTVHKDDKESEEIWLEKIGVSSTRLAKLGDDDNFWSMGDTGPCGPCSEIFFDNGKNFDGKAPGEGDTGERYIEIWNLVFMEFNRDSNGKLSSLPVKCVDTGMGLERMCSVMQEVGSNFDIDIFKSLKNLMSKHFTEPNDQSLNVLADHLRAIFFLMAENIIPSNEGRGYVLRRLIRRGVRHGYKMGSREPFLSHFLTHLENDFKEDFEDEFLKFEKIQKDLLTEEQLFFKTLKTGIEIFEASINETDGKQLDGAIAFKLHDTYGFPVDLTMAMAQERGLKVDQKGFDKLMKKQREGSKSSSMFKVLDITIDPKINSEFVGYQEQTAKGSCVALFDEEGNSVTSLSGEGFAIFSKTPFYAESGGQVADIGIFKGTNFNGEILNCKKVGDFHLHEVTIAEGSLELNANVELIIDSERREKIVSNHSATHLLHSALRKVLGESVEQRGSLVNEEKLRFDFSHSNKVTDDQIMEIEDIVNLKIEEAIDTKTEVLPYEDALKTGALAFFGDKYGEKVRVVYINGDFSVEFCGGTHVKNTSEIGGFAVTNETSVSSGVRRIEAISGDKYYKESQNALKILELLSVKLNVPQEKIADRVDELLESLKNSKKNNPVIQAKELRDEKCSFSGSSGVIKIFENASLEILRKESDKLKSDKKIVFAICLSTTEDKLIYIVSSSNSDEAPASEIIKAVNDAFDGSGGGRADFAQGGSPQKESVDEMVTKLKGLFKG

SEQ ID NO: 191627 - protein, 503 aa, Unknown
  Bacterial polypetide isolated from the Sargasso Sea
RRYYLGEVAFKLYDTYFFPLDLTQDILKNKSLTIDNDKFQSLMKESKELAKKNWKGSGDSAVDDIWFSIKDRLGPSEFLGYETNQAEGIVLTLLKDNKEVNELNENDEGMIILNQTPFYGESGGQVGDTGEIISGNFKFEITDVQKKLGDLFVHYGKVKSGSIKIKDNVEMKIDIDRRNNIRAYHSATHLLHESLRRVLGTHVTQKGSLVAPDRLRFDFSHMKPISDQEIEKIENHVNSMVQKKSEVKTRIMTPKEAVNNGALALFGEKYGEEVRVLSMGEEKEKYFSTELCGGTHVRNTGDIGKFKIISQSSIAAGVRRVEALRENQLNSFLQNKEKLSDLSAQKDEEMINDLSKQIIKLGGKPNIENEENKILIKELSKQLEQLKFSSILENNSKNIIQDIKINNISIRFQKVDDLPPKELRKLVDAGKKDLKTGIVIVFASLEDKVGLAVGITDKLTDKYDAVTFAKTGSEIIGGKGGGGRKDFAQAGGQFKDKIDEAFE

SEQ ID NO: 191628 - protein, 192 aa, Unknown
  Bacterial polypetide isolated from the Sargasso Sea
MNSNQIRSTFLNYFKKNGHEIIHSSSLVPDNDPTLMFANSGMVQFKNIFTGKETRDYNRATTAQKCVRAGGKHNDLENVGYTTRHHTFFEMLGNFSFGDYFKELAIELAWNLITKEYSINKDRLLVTVYSDDQEAFDLWKKIAGLSENKIIKISTSDNFWSMGETGPCGPCSEIFYDHGDKYEGGPPGSPNE

SEQ ID NO: 191629 - protein, 131 aa, Unknown
  Bacterial polypetide isolated from the Sargasso Sea
MPNNTLNDIRKTFLEYFKKNGHEIVGSSNLVPNNDPTLMFANSGMVQFKNVFTGLEKRNYQRATTSQKCVRAGGKHNDLENVGYTPRHHTFFEMLGNFSFGDYFKERAIELAWNLITKDFGIDKNKLYFTV

SEQ ID NO: 191630 - protein, 365 aa, Unknown
  Bacterial polypetide isolated from the Sargasso Sea
QKKLGDLFVHYGKVISGSIKLNDSVEMKINETRRNDTRAYHSATHLLHESLRRVLGTHVTQKGSLVEPSRLRFDFSHMKPISEDEINKIEKFVNSMVSKKTDVKTRLMTPDEAVENGALALFGEKYGEEVRVLSMGDDDGKYFSTELCGGTHVKNTGDIGQFKITSQSSIAAGIRRIEALRDKQLEDFLKNKEKLLNQSSEKNEELIKDLTKQIIGLGGKPNLDQSDQKLLTKNLTKQLETLSVKVILNDKTKNQIKDEEIKGTKIRFQKVDGLPPKELRKLVDDGKKQLGEGIVVVFANKDEKVGVAVGVTNKLIDKFDAVKFVKLSSEIIGGQGGGGRKDFAQAGGQDPNKINEAFEKIKSLI

SEQ ID NO: 191631 - protein, 640 aa, Unknown
  Bacterial polypetide isolated from the Sargasso Sea
MTFHKLLIANRGEIACRVIKTAHEMGIACVAVYTEADSNAPFVKMADQAVKLSDTYLNGKEIIAAAERTGAQAIHPGYGFLSENAKFSRDVLKAGLIWVGPSSKVITSMGDKLKAKDIAEKAGVPTLPMTTDPKKANAIGYPILIKAAAGGGGKGMRIVESKKDLKESITGAQREAKTGFGDDRVFIERYVASSRHIEIQILGDSHGNIVHLGERECSIQRRHQKIIEESPSPRVDSEMRKEMGEAAIKLAKKLKYESAGTVEFLVDDKTGEFWFLEVNTRLQVEHPVTEEVTGKDLVYEQLRIARGEELGYSQEDITWKGSSIEARLYAEDPSNDFLPATGTLIAYENDVNIDARWDTGIEQGSVVGTDFDPMLAKVITKGKTRTDAANKLALALENLHIGGVTTNRDFLVSSLRSKYFLKGKTTSDFIEKAKPQRAVILKGDNLELATTAAALWIQGQNRNNAQLLKDIPSGWRNSRLPRQKISFNYLDDEVTVHYKHNRDGTFSVNENTNAKIINWSDKDIDIEINNSRFNSKVTRHKDNLVVHGPWGDILLKLVPRFNLPGSELQAGSLVAPMPGKVIDLKVKVGTKVKKGDTLVILEAMKMEHQVKASADGKVTKILIRKDDQLENGALLMVLDT

SEQ ID NO: 191632 - protein, 362 aa, Unknown
  Bacterial polypetide isolated from the Sargasso Sea
RGMFKSKNAEGSILDCKKSGKVFMHLIKLDKGSLKIDDKIEVNVNKEKREKTEAHHSATHLVHAALKRVLGDHVKQKGSLVDEHKLRFDFSHDESLSDEEISKIEDLVNQEILKNSAVSTKIMDLEDAKNSGAESLFGEKYEDQVRVLSIGEDDFSLELCGGTHISRTGDLGIFIITSQSSVASGIRRIEALSGPRAQEYLSNLKNQTIQLQKLLNAPAEEIENKVSKLLKENKSLKKGGKTANATIIKSSNTHDIDNFKLVIEEAESEDIKELRPLLDEKTKNANNSIFILLSSKNETLTILCSVSKDLQSRISAKDLINALTSPIEGKGGGRVEFAQGAGKPSDREKFVSDIPNIVQSLA

SEQ ID NO: 191633 - protein, 786 aa, Unknown
  Bacterial polypetide isolated from the Sargasso Sea
MKLTEIRKKFLKYFESKKHKVIDSSDLVPHGDDSLLFTNAGMVQFKDAFLGLEKRKHSAVSSQKCLRVGGKHNDLENVGFTTRHQTFFEMLGNFSFGEYFKEEAIDFAWEFLTEELKLQKEKLWITVHHTDKDSEKIWLDKIGIKKSKLSRLGDEDNFWSMGDTGPCGPCSEIFYDYGSGYEGSPPGEGDTGDRFVEIWNLVFMEFNRDSSGDLKPLPNKCVDTGMGLERVCSVLQNVGSNFEIDLFKSFKDDIRGLFDSPNEQSLNVIADHLRASFFLLSEQVYPSNEGRGYVLRRLIRRAIRHGYKMGKETPFLYELLENLKSLLEKDFPKEFKGHKSIKKILMEEEELFFKTLSSGIKIFEDNLPKKKSEMMSGEIAFKLHDTYGFPIDLTIAMASERGIEVDEKIFKDLMKKQKEGSKKSSMFNAKDIVIDPSMNSEFVGYEKNIINGDCIALFDLEGNEAKTLSDSGYAFFSKTPFYAESGGQVGDQGSISNDNLEIFVSDCKKVGNFNMHKVEIQKGEINVGDKVSLSINEERRIKIVNNHSATHLLHSALREVLGDKVQQKGSLVNDEKLRFDFSHGKKLTSEQIEQVEDLVNMRIEDAIDTKIEVKSFDDAIKDGALAFFGDKYGDKVRVLTIGGDFSVELCGGTHVKNTSEIEGFIISNETSVSAGVRRVEAMTGSNLVKKSKEAIQTLKELSEILNVPSEDLVGRVSEVIKENKTLKSKKKTEKSLSAEIIHEAKLDSKEGKGLVVFYENASIEMLRRFSDKAKDQDEDLFNFYDR

SEQ ID NO: 191634 - protein, 591 aa, Unknown
  Bacterial polypetide isolated from the Sargasso Sea
EGRGYVLRRIMRRGMRHSHLLGSKEPIFYNIFKTLKDEMKGNYSEIERAESLIKETLRMEEEKFLILLDRGIKILNEEMTKIDKILPGEVAFKLYDTYGFPLDLTQDILKNKSLTIDNHKFQSLMKESKELAKKNWKGSGDSAVDDIWFSIKDRLGPSEFLGYETDQAEGIILSLLKDNKEVNELNKNDEGIIILNQTPFYGESGGQVGDTGEIISGDFKFEITDVQKKLGDLFVHYGKVKSGSIKIKDNVEMKIDIDRRNNIRAYHSATHLLHESLRRVLGTHVTQKGSLVAPDRLRFDFSHMKPISDQEIEKIENHVNSMVQKKSEVKTRIMTPKEAVDNGALALFGEKYGEEVRVLSMGDEKERYFSTELCGGTHVRNTGDIGKFKIISQSSIAAGVRRVEALRENQLNSFLQNKEKLSDLSAQKDEEMINDLSKQIIKLGGKPNIENEDNKILIKDLSKQLEQLKFSSILENNLKNIIQDVKINNISVRFQKVDDLPPKELRKLVDAGKKELNTGIVIVFASLEDKVGLAVGITNELLDKYDAVTFAKTGSEIIGGKGGGGRKDFAQAGGQFKDKIDEAFEKIKTLI

SEQ ID NO: 191635 - protein, 310 aa, Unknown
  Bacterial polypetide isolated from the Sargasso Sea
MGTHVTQKGSLVEADRLRFDFSHMKPITPDEIDKIEKFVNSMIDNKSDVKTRLMTPKEAVDNGALALFGEKYGEEVRVLSMGDEKNRYFSTELCGGTHVRNTGDIGKFKIVSQASIAAGVRRVEALRDKQLEDYFKNKEKLLDLSAQKNEEIINDLSGKIVGLGGKPNIDKKNPTETIKELTKQLDVLTVGSILQDKTKNIISDIEVKGIKVRLQKILGLPPKELRKLVDKGKKDLGEGIVIIFAIKDDKIGLAVGVTDKLIKKYNAVDFAKIGSETIGGKGGGGRPDFAQAGGIESSKIDEALEKFKSL

SEQ ID NO: 191636 - protein, 842 aa, Unknown
  Bacterial polypetide isolated from the Sargasso Sea
MKSDQIRESFLKYFKDNDHKILNSSSLIPHDETLLFTAAGMVPLKDYFMGLKEPPHINLASSQKCIRTVDIDIVGETDRHLTFFEMLGNFSIDNYFKEEAIKLSYKFITEELKVPSEDLWFTVYKDDDESYKIWKDVIGVPEHKIQKGDKDNFWHMNIPGPCGPCSEIFIDRGPEYGEDGGPIGGGEDRFIEIWNLVFMQSIQDEPYNVVDDLPAKNIDTGMGLERMAMVLQEKDSPFEIDTFQNLYNELNKYIVNKDKKYERIVLDHIKSAVFMISDGVVPTNEGRGYVLRRIIRRAVRAIYRLTDELMSLEFLINIVIRDYQDSYPELLENKDKILNLYKNEEEIFQNTLVKGNQEIQTILKKKSNLDEKDAFYLFETFGFPFELTQETAKEHDIKIDYDKFNVLFDEHRKKSNTGKKEKISNTIIGVEQNTFVGYDNITVTSDIYHIEKDENKSIIFTTETPFYYEAGGQISDKGNIEVDGKEIQVNDVVQSDNGATGLIVESNSLKIGDKINLNVDPSFRSSVSKSHSAAHIVHASLRNILGEHVAQAGSHVAPGKFRFDFSHTEKVNKEELNEIFKMSNDLIYKDIDVETNVMNIDDAKKEGALAFFGDKYDDDVRVVNIGEFSKELCGGTHVHNSNVVGLIVLINESSIGSNLRRVEMLSGYQAYSFMDTAYKSYNTVSDILQTSVDQVPEKLKTFLESYEDMKEKLDKQNKAESDNELKRIISEINEINKLKTYIGKINVNSSNEAKNVATKAIKDHNLDFVFLLANIETKTVLIGSRNDKTLNKIDVSNIVGEASKLYGGGASKDPSLSIGGGPSQYDESKCIEFVIEVFTKQI

SEQ ID NO: 191637 - protein, 367 aa, Unknown
  Bacterial polypetide isolated from the Sargasso Sea
VISRNFPQKCVDTGMGLERVQSIVEGLSDNYDSSIFLDLNNFIDSKLQLEGTENYIKKILLDHIRACCHLISDNVIPDREGRGYVLRRILRRSSRFIFKHNIKDPFLYQCAEVICKKSKDFPSLKKEINKIVDIIKTEEIKYLKTLGKGIDIIDNHLKKHKSLDAEMIFTLYDTYGFPYEITEEIASENNIILDKKGYDALMLEQKNKARKSKSFSDKSISNLTTSYTTEFLGYTKNNNEGILLDLYLNNEKVSKASTVDEEYLLVLSHTTFYPEGGGQISDIGTISSDECLFKVVDVQKINDTIIHVCNLLSGEANIKDKLITSFDTNHRNKVTSNHSATHLLHHYLRKTLGIHVQQRGSSVTDKG

SEQ ID NO: 191638 - protein, 123 aa, Unknown
  Bacterial polypetide isolated from the Sargasso Sea
MTSVSDIRKTFISYFNKNDHEIVRSSSLVPDNDPSLMFVNSGMVQFKNIFTGQENSEYKRAVTSQKCVRAGGKHNDLENVGHTARHHTFFEMLGNFSFGDYFKEKAIYFAWDLLTKEFGFSKD

SEQ ID NO: 191639 - protein, 809 aa, Unknown
  Bacterial polypetide isolated from the Sargasso Sea
ENVGYTPRHHTFFEMLGNFSFGDYFKERGIELAWNLITKDFGLDKNRLYVTVFHEDDEAFNFWKKIAGFSDDKIIRISTSDNFWSMGETGPCGPCSEIFYDHGDHLKGGLPGTKDQDGDRFIEIWNLVFMQYEQVSKDKRIDLPKPSVDTGMGLERIAALLQGTHDNYQTDHFKKLISSISDVTKVKQADNNISSFRVIADHLRASSFLLAEGVLPSNEGRGYVLRRIMRRGMRHSHLLGSKEPIFYKIFESLKNEMSGNYPELERSESLITETLKMEEEKFLVLLDRGIKILNDEISKIDKVLSGEVAFKLYDTYGFPLDLTEDILKNKSLKVDHQKFDELMKKSKELAKKNWKGSGDSSEEAIWFSIKDKTGPTEFLGYESNQSEGVVLNLIKNNQESKSLATGEEGMIITNQTPFYGESGGQLGDKGTIVSGNSVFEVEDTQKKLGDLFVHYGSVKTGEIKINDVVEMKIDVERRNNLKAYHSATHLLHESLRRTLGKHVMQKGSLVAPDRLRFDFSHMKPITNEELETIDKLVNEYVQNGSEVTTRIMTPKAAIEKGALAFFGEKYGEEVRVVSMGKEKDAYFSTELCGGTHVKNTGDIGKFKTVSQSSIAAGVRRVEALRDKQLEDFIKNKEKLSTLSLQKDEETIKDLSSQIIKLGGKPKVDNKDLKEIIKNLSKQLEQLNVNSVLQDKTKNIINDQKIKDIKVRFQKVQDLPPKDLRKLVDSGKKELGDGIVIVFASSEDKVGLGVGVTEKLVDKYDAVKFAKLGSEIIGGKGGGGRKDFAQAGGQDKNKIDEAFEKLKALI

SEQ ID NO: 191640 - protein, 319 aa, Unknown
  Bacterial polypetide isolated from the Sargasso Sea
FVEKVLKEEEQQFARTLDNGMAILEREIKTINGDTLSGETVFQLYDTYGFPVDLTADVARERNLKIDMKGFQVYMEEQKNSARAASNFGVAEKLSLDAAINTEFIGYDSLNGKGKVTGIFSINGEKLDKVSANEEVYLLLDQSPFYAESGGQIGDQGFLRKDEGQFNVLDTQKQGNIHIHRGILDRGAWKVNDVVDAEVTQKERHAITLNHSATHLMHAALRAVLGKHVAQKGSLVDAERLRFDFSHSQALSEDELEAVEIQVNSQILANSQVNKEEMPLQLAKERGAVALFGEKYGEEVRVVSMGGEFSVEFLWGLSC

SEQ ID NO: 191641 - protein, 420 aa, Unknown
  Bacterial polypetide isolated from the Sargasso Sea
NNLVSSQKCIRTVDIDIIGDTDRHLTFFEMLGNFSIGEYFKEDAIKHAYKFITEDLKINPEDLWFTVYKDDDESFNIWKDVIGVPEKKIQRGDKDNFWQMNIPGPCGPCSEIFIDRGEEYGDDGGPIGGGEDRFIEIWNLVFMESIQDEPYNVIGELPAKNIDTGMGLERIAMVLQDKNSPFEIDTFLPIYNLLKPKIKNENSKFERIVLDHMKAATFMISDGVVPTNEGRGYILRRLIRRAIRAFYGLTTSIESLDFLINPIIDIYVDQYPDLLKNKDKILKLYLTEEKLFHKTLEKGTIEIQKLIKDKKSFNEDKAFFLFETFGFPYELTKEIALENGITLEDSKYMKKFEEHQTKSSSFKKESTESSNFDVDCNIFTGYEETKTLSNVLMVSVDELSTTIFMEKNPFYYEAGGQISD

SEQ ID NO: 191642 - protein, 380 aa, Unknown
  Bacterial polypetide isolated from the Sargasso Sea
GDYFKERAIELAWNLITKDFGLDKNKLYFTVFHEDEEALKLWKKITGFGDDRILKIPTSDNFWSMGETGPCGPCSEIFYDHGEHLQGGLPGTKNQDGDRYIEIWNLVFMQFEQISKDKRIDLPKPSVDTGMGLERITALMQGTHDNYKTDHFEKLIQSISDEVKVKSNKTNISSFRVIADHLRASSFLIAEGVLPSNEGRGYVLRRIMRRGMRHSHLLGSKKPIFYNIFKTLMEEMSGNYPELIRAEALIKETLKMEEEKFLVLLDRGMKILNDEIKKIDKVLPGDVAFKLYDTYGFPLDLTQDILKNKSMEVDNLKFDQLMKDSKELAKKNWKGSGDSAVDDIWFEIKDKLGASEFLGYETNQAEAIVQSLLKDNKEVK

SEQ ID NO: 191643 - protein, 423 aa, Unknown
  Bacterial polypetide isolated from the Sargasso Sea
EGVILTLLKNNKEVKDLKTNEEGMIITNQTPFYGESGGQVGDTGEIISGEFKFEVTDVQKKLGDLFVHYGKVISGSTKLNENVEMKINEERRNNTRAYHSATHLLHESLRRVLGTHVTQKGSLVEPSRLRFDFNHMKPISNEEIEKIETFVNSMVTKKTDVRTRLMTPDEAVENGALALFGEKYGDEVRVLSMGEDDGEYFSTELCGGTHVKNTRDIGKFKIISQSSIAAGIRRIEALRDKQLEDYLKNKEKLTSLSSEKNDELIKDLTKQIKTLGGKPTLEESDQKILIKNLTKQLETLSVKSILNNKSKNKIKDEEIKGIKIRFQNVEGLPTKELRKLVDDGKKALGQGIVVVFASKDEKVGVAVGVTNELTEKYDAVNFVKQSSKIIGGQGGGGRKDFAQAGGQYANKINEAFNKIRNLI

SEQ ID NO: 191644 - protein, 348 aa, Unknown
  Bacterial polypetide isolated from the Sargasso Sea
ILKNKSLGVDNLKFDQLMKQSKELAKKNWKGSGDSAVDDIWFGIKDKLGPTEFLGYETNQAEAVVQSLLKDNKETDALKLGEEGMIIVNQTPFYGESGGQVGDTGEIVSGDFKFKVLDVQKKLGDLFVHYGKVISGEIKLNQNVELKINTSRRENIRAYHSATHLLHESLRRVLGTHVTQKGSLVEADRLRFDFSHMKPISNDEINKIEQYVNSMVETKSDVKTRLMTPKEAVENGALALFGEKYGDEVRVLSMGDEKSKYFSTELCGGTHVKNTADIGKFKIVSQSSIAAGVRRVEALRDKQLQEYLNNKEKLSDLSAQKEEKTINDLSSQIIKLGGKPKFRKPEIK

SEQ ID NO: 191645 - protein, 556 aa, Unknown
  Bacterial polypetide isolated from the Sargasso Sea
TARHHTFFEMMGNFSFGDYFKEETILWAWEFIQKEMGLPEEKLWITVHPDDDESRKIWRNKIGIKAERIIDIKENFWTMGDTGPCGPNTEIFFDHGDEIFGGPPGSPDEDGDRFVEFWNLVFPQYDLAADGSLTDLPQFGVDTGMGLERSAAILQGVKSNYEIDLFARLMEAAGQFAGISDSAQILSTASLRVIADHIRSGVFLIADGVRPGNDGASYVLRRIIRRGLRHAYKLDIKEPFFHELGKVVIDEMGGAYPTIAEREKEVTEILALEEERFSETLRQGMELLVQAVDKLNDKQLPGEVAFKLYDTYGFPVDLTADVIREQGLEIDMDGFDAFMEEQRERGRSAATFSSTLGQKITVKEAVEFTGYENSSEKTSIVSLYDLEGNEKDFLELGQEGIICLNKTPFYAESGGQVGDAGVIESRDKQFSVSDTQLSGDQHLHIGEVSAGIFKSGETVTAEINVPKRDKARKNHSATHLMHAALRKVLGSHVEQKGSLVNDEKLRFDFSHDGNITNDELAQIENMVNAEIVKNSLVSTELMSPEQAIEKGAMALF

SEQ ID NO: 191646 - protein, 263 aa, Unknown
  Bacterial polypetide isolated from the Sargasso Sea
THLLHEALRQKLGGHVAQKGSLVTQEKLRFDFSHPNPISKQEIMDIEDEVNFRIFCNDDVTTKIMKPSDAIERGAIALFGEKYGEKVRVVSIGKSVDANRDAWSVELCGGTHVKRTSEILSFKIISETGVSSGVRRIEAVTNVSAVKFYNDKIDKVTNISNLLKTNNNQVEKKVEQLIEENQRINKELKRLKKNPVTTEKHNSVKETIKGIIFEYVIFDDLAIKELKSNAEKLIKNNKSDIVCLISKIDGKASLVIAVEKKLS

SEQ ID NO: 191647 - protein, 713 aa, Unknown
  Bacterial polypetide isolated from the Sargasso Sea
SPLPNPCVDTGMGLERMAAVLQNEDNNYETDILKSIVQEAAKLSGENDLTNPSLRVISDHLRASSFLIADGVVPSNEGRGYVLRRIIRRGLRHAHKLGMKDGILSKLAHILEEKMGIAYPLLVKNSDIIKANLLKEEEQFSTTLEQGMQLLESAVEDLENNEIPGDIVFKLYDTYGFPVDMTADFARERDLIVDLDQYEALMLEQKERGRSSSNFNTLIPESLNIEGETAFLGYDTHSTSSKIVEIISSSEEGNKDELREGEEGLILLDETPFYAESGGQVGDKGFIQSNNSLFEVHDTQKKGDQFLHLGHVKSGVFNKNDSVTAEINITHRNRIKSNHSATHLLHAALRSVLGDHVEQKGSLVEESRLRFDFAHNNSIQSDDLEAIEDLINLEITKDLESITEVLPINEAMERGAIAFFGDKYGDEVRVLNIGNGFSIELCGGTHVDKTGEIGVMKIISESGISAGVRRIEAVTGDGAYFLLDELEQEYSAISNELLVDDFDSRDGVEVLNYIRFLEDEISAYSKILNCSNDQVLKKITQIKEENIELNKVLGNQTSEFKTFENCIDALEGLVDLNKSLQRDSKEIQSQDIGSSVESLISDSLAVEGYELITNIFEGIDAKELREIADRLRNKSPNTIIALISITDDKAPTIVACSKDVDIDAREIMKHLINQLGGSGGGRPDFAQGGVDNTDDLDMALASVADLIVSLTNQ

SEQ ID NO: 191648 - protein, 394 aa, Unknown
  Bacterial polypetide isolated from the Sargasso Sea
SGGQVGDIGTIVFEHNTFEVIDTTKLFGSFYLHHGKVKKGKFKIGDSVTATIDSYKRQLIKCNHSSTHLLHASLRKILGNHVSQKGSLVNSEKLRFDFSHNEPITSDNIIKIENFVKKEITANSQIEIKTIDHQKALDEGATALFGEKYGDEVRVVSMGTLEGNKIISKELCGGTHVAQTGDILNFKIINQTSVASGIRRIEALTNIAVDEYNKQKIQLDNKTLKENLDKISILISEIKEYDNNFDYSYDQNSDLTNNLKELKKLLDQKKQNKNKENSLQNIVIEKINDINFVYLLTENYPSKILKQFVDDQKNKYQNKCASLIISKNGDKLSIVLGVTEDLTSNFDSAKVIQDVSKILGGKGGGGRKDMAQAGGISLENIDQAMDRIKTNLRS

SEQ ID NO: 191649 - protein, 472 aa, Unknown
  Bacterial polypetide isolated from the Sargasso Sea
KVVELINTSKESKSDKLAEDEEGVVILEQTPFYAESGGQIGDKGTLSGKGFRFDVLDTQKIGDHHGHFGVVKEGELKINSKVLAHIDEDFRNKVVPNHSATHLLQAALKKILGDHIEQKGSLVEESRLRFDFAHSKPVSTEEITKIEDLINLQIEKNTKSVTKVMTIEEATKKGAIAFFGEKYGEKVRVLDLGEGFSVELCGGTHVTKTGEIGLMKIINESGISAGVRRIEAVTGVGATLLLQELEQRITSICDELLVDVELIDQDKSNLDLIRDLQSKLNMVARELSCSEDQILKKIVQVKEEITALEKGLGKDISLISPASNSLMDAIKELKNLNTSLNNENKKKKSEGISSSASDLKANSVTVAGYNLITKSFENIDAKSLRDLADQLRNNEPNTIVTLVSITGDKIPLIVACSKKVEIDAREIMKHLVNQLGGSGGGRPDFAQGGADNSEDLEVALDSVADLVVSLSN

SEQ ID NO: 191650 - protein, 448 aa, Unknown
  Bacterial polypetide isolated from the Sargasso Sea
EKLWFELARKTKPTVFKGYDETTLKANVTALALDSEVVDELSDQIKKSAIITDESCFYAESGGQVGDKGIISTENAEFKVTDTRKTPQGIFIHFGNVISGNFKIGNEVKLKIDSSLRELIKKNHSATHLLHAALRNNLGLHVAQRGSLVNENKLRFDFSHNKQISSKQIDTIQKEVTNIISNTCETQIDIKSQEEAIKLGAMALFGEKYGEEVRVVTLGEDNNKPYSIELCGGTHVSNVKDIEKFYIISEESVSSGVRRIEACTGNKVDEFISNKLKEDQLLEKKLDDKIISLISQINKLNGKICFSDENKNLYIKKLENYLDNLKNKSILSNEENNKIEETNINGINFVSQLIENLPPKELRSIFDKFKLEKSKSILACITTNEDKVSIMVGLTNDLIDTYDARVLIKSTFDILGSKGGGGRIDFAQAGGNKKDQLNQAFLSIKNQI

SEQ ID NO: 191651 - protein, 318 aa, Unknown
  Bacterial polypetide isolated from the Sargasso Sea
RLFFTVYKDDDETKEIWEKLGIPEKYIYKFGDEDNWWGPAGDEGPCGPCSELHYYTGDLDNMKFSDDKWGPNIHEDFVELYNLVFTQYYRDLDGKDTSLPFNNIDTGMGLERTVSILNSVKSSYETDIFSEHLTHLNTLIKEKGLDVEKSKRIIAEHGRSASFLIGDGVLPENTGRGYVLRRLIRRAMVTAKKLDLEFPILSPMAKITSNKLSHIYPELDEKLDFIVSVLNKEEENFNKTLNFGTQVLYELISKRDINIDHEIISNDAKEVSKEIFNKINDKKNKKVLSGIEAFILYDTYGFPIEITSEICSEFGLEI

SEQ ID NO: 191652 - protein, 391 aa, Unknown
  Bacterial polypetide isolated from the Sargasso Sea
YGESGGQVGDTGEIVSNDFKFEVIDVQKKLGDLFVHYGMVKSGSIKLQESVELKIDVERRDNTRAYHSATHLLHESLRRVLGTHVTQKGSLVEPSRLRFDFSHMKPILNEEIDKIEEFVNTMVSKKSDVKTRLMTPDEAVENGALALFGEKYGDEVRVLSMGDEDGKYFSTELCGGTHVKNTGDIGKFKIVSQSSIAAGVRRIEALRDKQLEEYLKNKEKLSNLSAEKDEETIKDLSQQIIKLGGKPSLEEADQKTLIKNLTKQLETISVNTILEDKSKNTIKDVEINGVKLRLQRIDGLPPKELRKLVDKGKKDLGEGIVVVFANKDDKVGLAVGVTDNLTSKFDAVKFVKVGSEIIGGKGGGGRKDFAQAGGQDQSKIEEAFEKLKSLV

SEQ ID NO: 191653 - protein, 531 aa, Unknown
  Bacterial polypetide isolated from the Sargasso Sea
TYPELLNKKDYIERIILMEEERFAATLSQGMSLLQKEFDRSNDEMISGEFAFKLYDTYGFPLDMTVDIARSLSRVVDLEGFEKAMDRQRELARRASKFKSDESFSLNHDLKSEFHGYKVLETDSKIIGVFGQDGSDFLRQGEFGQIILDKTPFYAESGGQVGDQGSFESDTGVFEVMDTQLSGNAYSHFGTVSNGQISVGDMIMASVNPVRRKSITLNHTGTHMLHRALMMVLGEHVQQRGSLVDDEKIRFDFSHHQSLTASEIREIETIVNEKIEENIDVQTSIMKHDEAIDSGAMALFGEKYGEDVRVLDVGDFSKELCGGTHVKNTNEIGIFKVVSESSISSGTRRIEAITGDKALKWAKETEHLVESLTDLLQIRREDVTSKVESLLDSNKKLQAEIKQLKSRIASGQSSFDIDSTENINGINYLYKELENETESSVMRGAIDQFKNKLKSGVIILSSVNQKGKVTLTIGVTDDLIAKVEAKSIAEVISTALDGSGGGKANFAQAGGSDTKKVPAALDSVREFLSKI

SEQ ID NO: 191654 - protein, 702 aa, Unknown
  Bacterial polypetide isolated from the Sargasso Sea
GPCGPCSEIFYDHGPDVWGGPPGSPEEDGDRYIEIWNLVFMQFSRDAQGNMTPLPKQCVDTGMGLERIAAVLQHVHSNYEIDLFQALIKAAGRETGVTDLTNNSLKVIADHIRACSFLIVDGVIPGNEGRGYVLRRIVRRAIRHGYKLGKKGSFFHRMVPDLVAQMGAAYPELKDAEQRVIDVLRQEEERFFETIEHGMSILESALADLEAKGGKTLDGELAFKLHDTYGFPLDLTADVCREREVTVDEAAFDEAMARQREQARAAGKFKMAQGLEYSGAKTTFHGYEEIVFDDAKVIALYVDGASVKEVNHGQQAVVVLDHTPFYAESGGQVGDQGVLANASVRFAVTDTLKVQADVVGHHGTLEQGTLKVGDVVKAEIDAVRRARTERNHSATHLMHKALREVLGSHVQQKGSLVDADKTRFDFAHNAPMTDEQIRQVEAIVNAEVLANAPGIVRVMPFDEAVKGGAMALFGEKYGDEVRVLDLGFSRELCGGTHVHRTGDIGLFKIVMEGGVAAGIRRVEAITGDNAVRFVQDLDARINAAAAVLKAQPSELTQRIMQVQDQVKSLEKELSALKSKMASSQGDELAGQAIEVAGVHVLAATLEGADVKTLRETVDKLKDKLKSAAIVLASVEGGKVSLIAGVTADASKKVKAGELVNFVAQQVGGKGGGRPDMAQAGGTEPANLPAALAGVKAWVETQL

SEQ ID NO: 191655 - protein, 478 aa, Unknown
  Bacterial polypetide isolated from the Sargasso Sea
GESAFKLYDTYGFPIDLTQDILKSKNITIDIESFNKKLEAQKELARKNWSGAGGAATDRIWFELNNELSATEFLGYNGTETTGEVLSIIKNDQRVNKLEDGDKGVLILNQTVFYAESGGQIGDTGTIKGEDFEFKVEDTQRKGQVIIHTGVMVSGIIEIGLNASLSVNQKQRNDCRAYHSATHILHQSLRDRLGEHVTQKGSLVSNDKLRFDFSHHRSMTNIEIEDVQNKVNEIIMSGSEVETQIMSPDDAVKAGALALFGEKYSDEVRVLKIGKLNDKIYSTELCGGTHVSNTREIGELKIISESSAASGVRRIEALRGDDLLKFNEEKKNENLRSEEKKLDLKKEKEISAVNIKLLKEAIQMSISNDSDQKIIIEFCENVPINELRPLIDKYKKLISGDGVIIICVKKDDKLSFLIGVTDLLANKIGADEIAKFASSISNGKGGGGRKDFAQSGGMLINENDQKKKLREFIIDKLQ

SEQ ID NO: 191656 - protein, 384 aa, Unknown
  Bacterial polypetide isolated from the Sargasso Sea
ICQLVLENTPFYPEGGGQSGDKGKLVFENNNELLIIDTKKENGKILHFSKKPDFDISCDVKASVDSFERNECSSNHSSTHLLHQALRNVLGNHVEQKGSSVTPEGLRFDFSHFKKIDDDQIKEIETYVNNRIDDSIELKENRNENYNTAIDNGAIGLFGEKYGKTVRTIKFGDSYELCGGTHVRNTMNIRNFLIISESSIASGIRRIEAISGKKSINYLSDRNNEINQLKSILSSNKGTVDSVRNLKNENSELSKTLKKSQKKLTQFYSEHFLQKFKKVEATNLLIEKVEMDNDLMRSLSFDLINKIRDSIIIFYSKDSNNLNIICNVSKTLNDNIKIDAAKIISSLCSAVGGAGGGQKHYASGSAPFKSDIEETIKNILKEIL

SEQ ID NO: 191657 - protein, 539 aa, Unknown
  Bacterial polypetide isolated from the Sargasso Sea
MSKILMSEIRKKFLGYFSRNQHKIIESSNIVPNNDPTLMFTNSGMVQFKNVFTGIENKSYKTAATSQKCIRAGGKHNDLENVGYTPRHHTFFEMLGNFSFGDYFKEKAIYYAWELLTKDFDISKDRLSVTVYSEDEEAFKLWKKIAGLPESKIVKISTSDNFWSMGETGPCGPCSEIFFDHGDKLKGGPPGSPDQDGDRFIEIWNLVFMQFEQISNDKRIDLPKPSVDTGMGLERITAVLQGTHDNYGIDHFKKLITASSEITNTKINNDTIASHRVIADHLRASSFLIAEGVLPSNEGRGYVLRRIMRRGMRHAHTLGSKQPIFFKLFDVLLNEMSKSYPELNTGKDLIIETLKNEEEKFSSLLDRGMKILDQNLEKVKNNILPGEIAFKLYDTYGFPLDLTADILKNKNIKIDSSAFDKAMQKSKELARASWKGSGDKSVDEKWFKVREQLNPTEFLGYEFDKAEGIVLKISKGNKFVENAKEGDEVEIITNQTPFYGESGGQVGDQGIISSSKCKINIQDTQKKIGDLFVHYEQSK

SEQ ID NO: 191658 - protein, 195 aa, Unknown
  Bacterial polypetide isolated from the Sargasso Sea
MGNILMSDIRKKFLSYFKGNNHEIVESSNIVPNNDPTLMFTNSGMVQFKNVFTGIENKSFKTATTSQKCIRAGGKHNDLENVGYTPRHHTFFEMLGNFSFGDYFKEKAIYYAWELLTKDLGIPKDRLSATVFSEDEEAFKLWKKVAGLPESKIIKISTADNFWSMGETGPCGPCSEIFFDHGDKLKGGPPGSPDQ

SEQ ID NO: 191659 - protein, 176 aa, Unknown
  Bacterial polypetide isolated from the Sargasso Sea
MSNILMSDIRNKFLSYFKVNNHEIVESSNIVPNNDPTLMFTNSGMVQFKNVFTGIENKSFKTATTSQKCIRAGGKHNDLENVGYTPRHHTFFEMLGNFSFGDYFKEKAIYYAWELLTKDLGIPKDRLSATVFSEDEEAFKLWKKVAGLPESKIIKISTADNFWSMGETGPCGPCSE

SEQ ID NO: 191660 - protein, 271 aa, Unknown
  Bacterial polypetide isolated from the Sargasso Sea
MLSRHKIKKLYFKNMADKSLNEIRNTFLKYFEKNDHKIVESSNLVPNNDPTLMFANSGMVQFKNVFTGLEKRDYQRATTSQKCVRAGGKHNDLENVGYTPRHHTFFEMLGNFSFGDYFKEQAIHYAWDLITKDFGIDKNRLYVTVFNEDDEAFNFWKKIAGFSDDRIIRIATSDNFWSMGETGPCGPCSEIFFDHGEHLKGGLPGSKDGDGDRFIEIWNLVFMQFEQVTKDKRINLPKPSVDTGMGLERIAALLQGTHDNYETDHFNKIIN

SEQ ID NO: 191661 - protein, 290 aa, Unknown
  Bacterial polypetide isolated from the Sargasso Sea
MADILMSEIRRKFLDYFAKNNHEIVDSSNIVPNNDPTLMFTNSGMVQFKNVFTGIENKSFKTATTSQKCIRAGGKHNDLENVGYTPRHHTFFEMLGNFSFGDYFKEKAIYYAWELLTKELGIPKEKLSATVYSEDKEAFNLWKKVAGLPESKIVKISTSDNFWSMGETGPCGPCSEIFYDHGDKLKGGPPGSPNQDGDRFIEIWNLVFMQFEQVSKIKRIDLPKPSVDTGMGLERITAVLQGTHDNYSIDHFKKLMSASSDITKTKIDNKTIASHRVIADHLRASSFLIA

SEQ ID NO: 191662 - protein, 837 aa, Unknown
  Bacterial polypetide isolated from the Sargasso Sea
MISRHKIKKLYFKNMADKSLNEIRNTFLKYFEKNDHKIVESSNLVPNNDPTLMFANSGMVQFKNVFTGLEKRDYKRATTSQKCVRAGGKHNDLENVGYTPRHHTFFEMLGNFSFGDYFKEQAIHYAWDLITKDFGIDKNRLYVTVFHEDDEAFNFWKKIAGFSDDRILRIATSDNFWSMGETGPCGPCSEIFFDHGDHLPGGLPGSKDEDGDRFIEIWNLVFMQFEQISKDKRINLPKPSVDTGMGLERIAALLQGTHDNYETDHFKKIINSASEIVKVKSDESNLSSFRVIADHLRASSFLIAEGVLPSNEGRGYVLRRIMRRGMRHCHLLGSQEPVFYNLFDTLKNEMSGNYPELVRAESLIKETLKMEEEKFLVLLDRGIKILNDEISKIDKVLPGEVAFKLYDTYGFPLDLTEDILRNKSLSIDKEKFQSLMKESRELAKKNWKGSGDAAVEDVWFGIKDKLEPTEFLGYETNQAEGVVLSLLRENKEVDQLKENDEGMIILNQTPFYGESGGQVGDTGEIISNDFKFEVIDVQKKLGDLFVHYGKVIKGSIQLKQNVELKIDIERRDNTRAYHSATHLLHESLRRVLGTHVTQKGSLVEPSRLRFDFSHMKPILNEEIDKIENFVNSMVSKKSDVKTRLMTPDEAVENGALALFGEKYGEEVRVLSMGDEDGKYFSTELCGGTHVKNTGDIGKFKIISQSSIAAGVRRVEALRDKQLEEFLKNKEKLSNLSSEKNEETIKDLSHQIIKLGGKPNLDQTDQKTLIKNLTKQLETISVNSILENKSKNIIKDEEINGIKLRLQKIDGLPPKELRKLVDKGKKDLSPRYCGCICK

SEQ ID NO: 191663 - protein, 180 aa, Unknown
  Bacterial polypetide isolated from the Sargasso Sea
MLSRHKIKKLYFKNMADKSLNEIRNTFLKYFEKNDHKIVESSNLVPNNDPTLMFANSGMVQFKNVFTGLEKRDYQRATTSQKCVRAGGKHNDLENVGYTPRHHTFFEMLGNFSFGDYFKEQAIHYAWDLITKEFGLDKNRLYVTVYHEDDEAFNFWKKIAGFSDDRIIRIATSDNFWSMG

SEQ ID NO: 191664 - protein, 80 aa, Unknown
  Bacterial polypetide isolated from the Sargasso Sea
MGRILMSEIRKEFLDYFSRNGHQIVESSNIVPNNDPTLMFTNSGMVQFKNVFTGIEKKDFSTATTSQKCIRAGGKHNDLE

SEQ ID NO: 191665 - protein, 298 aa, Unknown
  Bacterial polypetide isolated from the Sargasso Sea
MSKILMSEIRKKFLGYFSRNQHEIIESSNIVPNNDPTLMFTNSGMVQFKNVFTGIENKSYKTATTSQKCIRAGGKHNDLENVGYTPRHHTFFEMLGNFSFGDYFKEKAIYYAWELLTKDFGISKDRLSATVYSEDEEAYKLWKKIAGLPESKIIKISTSDNFWSMGETGPCGPCSEIFFDHGDKLKGGPPGSANQDGDRFIEIWNLVFMQFEQISKDKRIDLPKPSVDTGMGLERITAVLQGTHDNYGIDHFKKLITASSEITNTKINNDTIASHRVIADHLRASSFLIAEGVLPSNE

SEQ ID NO: 191666 - protein, 318 aa, Unknown
  Bacterial polypetide isolated from the Sargasso Sea
KPHMLSLPYGDRSNVVIEPMLTNQWYVDAKALAQPAINAVKTGKIKFVPKQYENMYFSWMREIEDWCISRQLWWGHRIPAWYDSDENVYVGVDEQDVRESYKLDKEINLFQDEDVLDTWFSSALWTFTTLGWPKKTKQLDLFHPTNVLVTGFDIIFFWVARMIMMTMHFMKDQNNEPQIPFKTVYITGLIRDEQGQKMSKSKGNVLDPLDMIDGIGLSELLKKRTINMMQPQLKDKIEKQTKNEYPSGIPSHGTDALRFTLTSLASTGRDINWDMSRLEGYRNFCNKIWNAARYVLLNVGDQNFTKDNIINLSTIDSW

SEQ ID NO: 191667 - protein, 363 aa, Unknown
  Bacterial polypetide isolated from the Sargasso Sea
KPSFIPPRWEKVYKDGLENINDWCISRQCGWGHQIPAWYVLDESQDSIEQNTPYIVARNEEDALIEANKKFGFNIKLVRDKDVLDTWFSSGLWPFSTLGWPNTNDPDFKKWYPNSLLVTGFDIIFFWVARMTMMGNTFTNNIPFKDVYIHGLVRDENNKKMSKSSGNGIDPILLIEKYGSDALRFALIREVAGAGQDIRLDFDRKKDTSSTVEASRNFANKLWNATKFVLINKTFNNNYSLNESDENSLELCDKWILSKLNQVNIKVAALLKEYKLGESAKLLYEFTWNDFCDWYVEFAKQRFNNKETNNRQISEKVLIKVLNDILVMIHPFMPHITEELWHVLQLKSDKELLSLQKWATQRK

SEQ ID NO: 191668 - protein, 268 aa, Unknown
  Bacterial polypetide isolated from the Sargasso Sea
SANKYYGKDVKLIQENDVLDTWFSSALWPFSTLGWPKKTAELEKFYPTSALVTGFDIIFFWVARMMMMGLYFTKKVPFYEVYVHALVRDEKGQKMSKSKGNVIDPLVLMDEFGADALRMALCSMAAQGRDIKLSKQRIEGYKNFINKIWNAVKLCELNNCFYQEIDSKKTKNIFNKWILFEYENCRSKTQLALENYKFNEAANELYKFTWNIFCDWYLEFSKVIYLSKNDTDIKETRNITSYVLSNIIIMFHPHYAILHRTFMASGIK

SEQ ID NO: 191669 - protein, 327 aa, Unknown
  Bacterial polypetide isolated from the Sargasso Sea
YEHLIEQDYFTADSSSEKEPYTIVIPPPNVTGMLTVGHVLNNTIQDILIRKARMEGKEACWIPGTDHASIATESKVVAMLHEKGINKNDLSREEFLDHAWEWKEKYGGIIIRQLKKLGCSCDWSRERFTMDEGYTSAVLTAFVELYNKGLIYKGHRLVNWCPISRSAISDEEVIHKEKQGFLWHFRYPITNSNQYIIVATTRPETMLGDTAVAIHPDDERYKDLVGKTVALPLTGREIPIITDTFVDPDFGTGCVKVTPAHDPNDFAMGERHDLEFINIMNDDASLNSSVPEKYIGLSRENARKSVVADLESLGLLDKKEDHINNIG

SEQ ID NO: 191670 - protein, 296 aa, Unknown
  Bacterial polypetide isolated from the Sargasso Sea
KRLVNWDPKLLTAISDLEVEQKEQEGSLWHIKYPIDRDNFIIVATTRPETMLGDSAVAVHPKDLKYKDLIGKTCTLPIVEKQIPIIADEYADPEKGSGAVKITPAHDFNDFEVGKRHNLEFVNIFDEFAKVNQNAPTKFQGLDRYEARNLILEELIKLDLLIKEEKQEMVIPYGDRSGVVIEPWLTDQWFCNAKKLSIDPINSVKQNNTNFVPKIWEKTFFNWMENIQPWCISRQLWWGHQIPAWYGPDNKFFVALSIEDAKLIANKYYGKDVELKQDEDVLDTWFSSALWTFSTL

SEQ ID NO: 191671 - protein, 319 aa, Unknown
  Bacterial polypetide isolated from the Sargasso Sea
SLHMGHALTFTVQDILIRYHRMKGMEVLWQAGTDHAGIATQMVVERKLSESNLDRRSIGREKFIDKVWEWKKESGGHISNQLRRLGASADWSRERFTMDDGLSKAVKKVFVNLYNDGIIYKDKRLVNWDPKLLTAISDLEVEQRDTEGSLWHIKYPIDENNHIIVATTRPETMLGDSAVAVHPDDEKYKNLVGKFCNLPISNKKIPIIADEYADPEKGSGAVKITPAHDFNDFEVGKRHDLEFINIFDENAKLNSNVPVEFQNLDRFVVRKLILKKLDEMDLLVKEEKQQMVIPYGDRSGVIIEPWLTDQWFCDAKNYP

SEQ ID NO: 191672 - protein, 310 aa, Unknown
  Bacterial polypetide isolated from the Sargasso Sea
MGTDPDTLDTWFSSALWTWSTLIDQDLAQDESISFEELLRKSPDFQKFHPTHVMETGYDILFFWVARMILMTTFMIREVPFKTVYLHGLVRTRDGKKMSKSDPLTCIDPLESIRDYGTDALRLALIQGTGPGQDLRLYPEKLESCRRFANKVWNAGRYILMNIPSGTSLDPLQNVQNEAARWLLHELDLLIGKTLHGLQAFRLSEVIDNLRSFFWGTFCDWYLEMDKRPDRNEEDNRVLAYALSTQLKLLHPYVPFVTEALWENLGQDKMLAKAPWPESQGYDFGESHQKIQLVCESVSQLRTLREKARL

SEQ ID NO: 191673 - protein, 319 aa, Unknown
  Bacterial polypetide isolated from the Sargasso Sea
FSDRGKVPIEPLLSTQWFLKMDDISQGCLNEIDSKKPSFIPPRWEKVYKDWLENINDWCISRQLWWGHQIPAWYVLDESQDSIEQNTPYIVAINEEDALIEANKKFGLNIKLVRDKDVLDTWFSSGLWPFSTLGWPNINDPDFKKWYPNSVLVTGFDIIFFWVARMTMMGNTFTKNIPFRDVYIHGLVRDENNKKMSKSSGNGIDPILLIDKYGSDALRFALIREVAGAGQDIRLDFDRKKDTSSTVEASRNFANKLWNATKFVLINKTSNNNYSLNESDETSLELCDKWILSKLNQVNIKVAALLTEYKFGRICETSI

SEQ ID NO: 191674 - protein, 329 aa, Unknown
  Bacterial polypetide isolated from the Sargasso Sea
MTEMNDQLSIENYSPFEVEKKWQEKWESLKAFSPNPEDDGEPFCVVIPPPNVTGSLHMGHAFNTALIDVVVRFQRLLGKNVLCLPGTDHASIAVQTILEKQLKSEGKTSEDIGRDEFLKRAWNWKEQSGGRIVSQLKRIGYSVDWTRERFTLDQKLNEAVIEAFNILYKKNLIYRGEYLVNWCPESQSAVSDLEVEMQEVNGHLWHFKYPLISESGEQLDKYLEVATTRPETLLGDTAVAVNPDDDRYKEFIGVKVKVPFVDREIPIIADSHVDKDFGTGCVKVTPAHDPNDFAIGKRHNLKQINVMNKDGTLNINAGIFQNLDRYEAR

SEQ ID NO: 191675 - protein, 260 aa, Unknown
  Bacterial polypetide isolated from the Sargasso Sea
MDKRYNPTEVEEKWVEIWSKKVFFNKDSEESFSQVIPPPNVTGTLHMGHSFQYAIMDFYTRYHHMSGKKSHWQVGADHAGIATQLVVENNLEKENLDRKEMGRDKFLSEVWKWKDFSEERIQSQIKRLGSSVDWNKYRFTLDDGFTKAVNKAFIELYRKDKIYRGYRLVNWDPSLKTAVSDLEVVRQEKKGLIWHIKYHINDSDKFITVATTRPETMFGDMAIAVNPKDPRYKSLIGKHALLPFVDRKLPIIGDEYVDME

SEQ ID NO: 191676 - protein, 309 aa, Unknown
  Bacterial polypetide isolated from the Sargasso Sea
SRQLWWGHQIPAWYGPDKKIFVAENINKAELDAKRFYKKKVKITRDPDVLDTWFSSGLWAFATLGWPKKNYYLKRFYPTSVLVTGFDIIFFWVARMMMLGMEFLKKEPFKQIYVHALVRDEKGQKMSKSKGNVIDPLELIESYSADALRFTLLSMASPGRDVKLSEQRVKGYRNFLTKIWNANNFLKVNKCEFNNKINPKKLSLNINKWIYSELIITKNLAEKNVKNYRFDEATKVIYKFVWNSFCDWYLELSKTILFSKNKKNISEVKKTSGYIFKEILILLHPFIPFITEELWQINKLGDKKNKYLM

SEQ ID NO: 191677 - protein, 147 aa, Unknown
  Bacterial polypetide isolated from the Sargasso Sea
MSKTSSYNHKIVEKKIYSLWEKKKCFKPIKNKKNKKFVIVIPPPNVTGSLHMGHALNNSIQDLLIRYHRNKGIETLWQPGTDHAGIATQLVVEKQLNEKNIKKQDLGRNKFVNEIWKWKRKSGNAITLQLKKLGSSCDWSRERFTMD

SEQ ID NO: 191678 - protein, 306 aa, Unknown
  Bacterial polypetide isolated from the Sargasso Sea
MSSDKYIHSEVENKIYSYWEKNNLFKPKKNKKSFSIVIPPPNVTGSLHMGHALNNSIQDLLTRFHRMNNYETLWQPGTDHAGIATQALVEKKLANDGIKKNDLGRDKFIEKVWEWKNQYGDIIINQLKKLGCSCDWSRNAFTMDDNLSKSVIKVFVDLYKKDLIYKSKKLVNWDVVLKTAISDLEVDQREVNSKLYHIKYPIENSDDFITIATTRPETMLGDTAIAVNSKDDRYKSLVNKFVTIPLVERKIKIIEDDYADPEQGTGAVKITPAHDFNDYEVGQRNNLEILNIFTSDGKINENAPKE

SEQ ID NO: 191679 - protein, 273 aa, Unknown
  Bacterial polypetide isolated from the Sargasso Sea
RNTLWQVGTDHAGIATQMVVERKLAGEGTNRHELGREKFLDKVWEWKRESGGTITRQLRRMGASVDWTRERFTMDDGLSNAVREVFVRLHKEGLIYRGKRLVNWDPALHTAISDLEVENVEEQGHMWHFRYPLSDGSGHLVVATTRPETMLGDTAVAVHPQDPRYKDMIGKSIRLPLADRNIPIIADDYVDPDFGSGCVKITPAHDFNDYEVGKRHDLPMINILTIDAALNDEVPEGYRGLDRVEARKKVVDDLDALGLLENSGRPHPTGAPW

SEQ ID NO: 191680 - protein, 308 aa, Unknown
  Bacterial polypetide isolated from the Sargasso Sea
TGALHMGHAMFVTLQDVMTRSARMRGRKTLWLPGTDHAGIATQLVVERKLESEGVKRTDMSREEFVEKVWEWKAEYGGRIQQQIKRLGASCDWSRERFTLDDGLSESVLEAFITLHDRGLIYKGTYMVNWAPKLQTAVSDLEVEYSEEPGTLYFFKYPVEGGGPDDYLPVATTRPETILGDTAVAVNPEDDRFKHMIGKKCVVPFTGGRTVPIIGDSYVDMEFGTGALKITPGHDPNDYEIGKRVGLDIINIMNKDGTMNSNCGKYNGVDRADCRTQLWADMEAEGLAIKAEPYTNRVPRSQRGGEVI

SEQ ID NO: 191681 - protein, 293 aa, Unknown
  Bacterial polypetide isolated from the Sargasso Sea
FNWMDNIEDWCISRQIWWGHRIPAWYDKDGNVFVGENEADVRNFYNLQNEDLSQDEDVLDTWFSSSLWPFASLGWPKDTEDFKDFFPTSLLVTGFDIIFFWVARMMMMSLEFTGKIPFKNVYVTGLIRDENGQKMSKSKGNIIDPLDLIYGISLKDLVKKRTANLMQEGTAEKIEKKTRKQFPNGIESYGTDALRMTFFSLATHTKDISFEFGRLKGYRNFCTKIWNAARFIEGYSESNETYKSQNKNDDWIYEEFTKTKKQINKNISDYRLDFAINELYEFFWNKFCDVYMR

SEQ ID NO: 191682 - protein, 308 aa, Unknown
  Bacterial polypetide isolated from the Sargasso Sea
MESKYFPIEIEEKWSKVWSDRTLDKPNSDHHFSQIIPPPNVTGTLHMGHSFQYAIMDFYTRYHHMSGTDAFWQVGTDHAGIATQMVVENNLANQGKSKDDLGRDGFLKEVWKWKDFSEKKITSQMKRLGITVDWDKYRFTFDDKFCTAVNKAFVELYRKDKIYRGYRLVNWDPVLKTAVSDLEVVRQEKDGLLWEIAYPLIDSDEHLVVATTRPETMFGDMAVAVNPKDERYKKFIGQYVLLPFTHRKVPVLGDEYVDMEFGTGCLKITPGHDFNDYEIGKKHALHQIDDIVYTSKNLEDFAPNKYFY

SEQ ID NO: 191683 - protein, 351 aa, Unknown
  Bacterial polypetide isolated from the Sargasso Sea
GTITQQLRRLGASVDWSREAFTMNEDLSEAVKEVFVSLYDEGLIYRGERLVNWDVVLQTALSDLEVSTEEESGSLWYFDYPIENGNTITVATTRPETMLGDAAVAVNPDDERFKGLIGKFVKLPITNRKIPIIKDSYVDAEFGTGCVKITPAHDFNDFEIGKRHDLEFINILNLDGTLNQSVPENFRGLTTAKAREKVLKEMDSLGLLNKVEPHKIQIPKSQRSDSILEPLMTKQWFVDVEMISKEAIRVVKENETEFIPKNWENTYFSWMDNIQDWCISRQLWWGHRIPAWFDNEDNVYVGKAEDEVRKKYDLVDIELHQDVDVLDTWFSSALWTFSTLGWPRKENLLSR

SEQ ID NO: 191684 - protein, 284 aa, Unknown
  Bacterial polypetide isolated from the Sargasso Sea
GKINKNGIKEFHGLDRFEARKLIIKKLKEIGSLVKIENIKNKVPYGDRSNTIIEPLLTEQWFVDAKKLSKKPIKIVKEGKTTFFPNNWSKTFFQWMNNIEPWCISRQIWWGHRIPAWYDENGNIFVAENKKGAAKLAKKKNRNKQFNLRQETDVLDTWFSSALWPFATLGWPNKTTELNKFYPTSVLVTGFDIIFFWVARMLMMGNYFRKNTPFHKVYVHALVRDEKGQKMSKSKGNVIDPLDLINEYGADSLRFTLISMASPGRDVKLSKDRVIGNRNFITKI

SEQ ID NO: 191685 - protein, 300 aa, Unknown
  Bacterial polypetide isolated from the Sargasso Sea
MNKPESEQNFSQIIPPPNVTGTLHMGHSFQYAIMDFYTRYHHMNGANSYWQVGTDHAGIATQMVVENNLVNEGKDKNDLGREKFLKEVWKWKDYSEEKITSQIKRLGCTVEWDKYRFTFDDDFCEAVNKAFVELYRNKKIYRGYRLVNWDPSLKTAVSDLEVVRQEKEGILWHIAYPISDSNETLTVATTRPETMFGDMAIAVNPKDDRFKKFIGQYVELPFVGRKIPVIGDEYVDMEFGTGCLKITPGHDFNDYEIGKKYALHEKDGVVHTSDELNDFMPINIFTDEAHTNDSVPELFA

SEQ ID NO: 191686 - protein, 299 aa, Unknown
  Bacterial polypetide isolated from the Sargasso Sea
LIVATTRPETMLGDTAVAVNPKDDRYKKFIGKTVILPLVGREIPVIADDFVDPDFGTGCVKVTPAHDPNDFSIGERHDLEFINIMNKDASMNSQVPKKYQDLSRESARKAVLMDMDSDKKLHKVEDYIHNVGYSERGNVPIEFYLSEQWYLKMEELAKPALKAVNSGEIKFYPDHWKKTYNHWIENIRDWCISRQLWWGHQIPVWYHKEDINKIHVSIDGPKDPENWVQDEDVLDTWASSWLWPFAVHDWPDSNKSIKSFYPTNDLVTGPDIIFFWVARMIMAGNLFMGESPFKNVYFT

SEQ ID NO: 191687 - protein, 246 aa, Unknown
  Bacterial polypetide isolated from the Sargasso Sea
PLYEHWEKQGYFKPNGDESQESFCIMIPPPNVTGSLHMGHAFQQTIMDTMIRYQRMQGKNTLWQAGTDHAGITTQMVVERKIAAEEGKTRHDYGRDAFIDKIWQWKAESGGTITRQMRRLGNSVDWERERFTMDEGLSNAVKEVFVRLYKEDLIYRGKRLVNWDPKLRTAISDLEVENRESKGSMWHIRYPLADGAKTADGKDYLVVATTRPETLLGDTGVAVNPEDPRYIDLIGKFMILPLVDRR

SEQ ID NO: 191688 - protein, 264 aa, Unknown
  Bacterial polypetide isolated from the Sargasso Sea
FAILPIVGRKIKIIQDDYADPEQGTGAVKITPAHDFNDFEVGKRHNLEMINIFTKEGKLNKNVPSNYIGLDRFEARKIILEELSKLELLTKEESIKNKVPYGDRSNSIIEPYLTEQWFVDAKKLSINAKKIVKNKKTNFFPENWSKTYFQWMNNIEPWCISRQLWWGHQIPAWYGPDKKIFVAENIKKAEFDARKFYKKKVKLIRDPDVLDTWFSSGLWPFATLGWPSSNYFIKKFYPTSVLVTGFDIIFFWVARMMMLGMEFL

SEQ ID NO: 191689 - protein, 313 aa, Unknown
  Bacterial polypetide isolated from the Sargasso Sea
KKVIIPIVGRKVKIISDKYVSLDQGSGALKVTPAHDFNDFEIGKRHKLEFINIFEKNGKLNNLAPKNLVGIDRFEARKIIIKELKNLNLMEKIENIKNSIPYGDRSNSIIEPLLTEQWFADAKFLAKKAIQEVKRKKTNFFPNNWTKTYFQWMNNIQPWCISRQLWWGHRIPAWYSKDKKIFVAENEEDANKLAKKYYKQNVKLIRDEDVLDTWFSSALWPFATLGWPEKTYELKRFYPTSLLVTGFDIIFFWVARMMMMGNHLLKKVPFSKVYVHALVRDEKGQKMSKSKGNVIDPLDIIKKYGADSLRFTL

SEQ ID NO: 191690 - protein, 283 aa, Unknown
  Bacterial polypetide isolated from the Sargasso Sea
LPQDLKLCVGDTAIAVHPDDKRYKNMIGQKVLIPIVNREIPIIEDEYADPEQGSGAVKITPAHDFNDFEVGKRNDLEMISIFDSDGNLNENTPNGWKGIERFEARKRLLDKLKNENFLVKVEDHTHVVPYGDRSYEVIEPYLTDQWYVDAKKLSVSAIKHVEEGKTRFIPSNWSKTYYEWMNNIQPWCISRQLWWGHRIPAWYTNEGEIIVASSEDEAREIAIRKYNTEAIFQDEDVLDTWFSSALWPFTTLGWPNKENDLSKFYPTNLLVTGFDIIFFWVAR

SEQ ID NO: 191691 - protein, 320 aa, Unknown
  Bacterial polypetide isolated from the Sargasso Sea
MILDCGRHGLDKEQIIDFEGKLLPIAKEFEGMSIDQARPKIVEKLKNKGLLVNIDSNYSHSKAFNSRGGGAIEPQIREQWFIDVKKRSIKWKGKSLSLKEIMLDVISSGDIKLVPERFKSTYFYWIENLQDWCISRQIWWGHRIPVYYRNGEVKVSLIPLEASEGWEQDPDTLDTWFSSALWTWSTLIDPELAKNYSLPMQDLLKKSKDFQKFHPTNIMETGYDILFFWVARMILMTTYMINDIPFKTVYLHGLIRTRDGKKMSKSEPKTIIDPLESIEKFGADSLRISLILGTGPGQDLRLYPEKMESSWRFVNRFGML

SEQ ID NO: 191692 - protein, 251 aa, Unknown
  Bacterial polypetide isolated from the Sargasso Sea
MKKNYEPKSTEVDIYKRWEDSGFFEAKPDESKEPFCIMIPPPNVTGTLHMGHGFQNTLMDALIRFKRMSGYDTLWQVGVDHAGIATQMVVERQLEIEGTSREEIGREQFEKKVWDWKEKSGNKITQQLRRLGASVDWSREAFTMSDDLSLAVKEVFIKLYDEGLIYRGERLVNWDTVLGTALSDLEVSSEEENGFLWYIDYLTENNNKITVATTRPETLLGDTAIAVNPDDHKFKKLIGKKAIVPIVNREI

SEQ ID NO: 191693 - protein, 311 aa, Unknown
  Bacterial polypetide isolated from the Sargasso Sea
KKDVELVRDEDVLDTWFSSGLWAFATLGWPKKNEYLKKFYPTSVLVTGFDIIFFWVARMMMFGMEFLNKQPFKEIYVHALVRDEKGQKMSKSKGNVIDPLILIDKYSADALRFTLLSMASPGRDVKLSEDRVKGYRNFLNKLWNANNFLAMNKCDFSKSKKEPKVKLNINKWIISELNTVSKLIEKNINDYRFDEAARNIYQFVWHSYCDWYVELSKTILNSKEKSSISEVKQTLSYVFKQILILLHPFIPFITEELWLKNNLDKPKNYLMFANWSSKKANKDKQIKEVENIINLISQLRAFKNEFNVSPG

SEQ ID NO: 191694 - protein, 287 aa, Unknown
  Bacterial polypetide isolated from the Sargasso Sea
MTEMNDQLSLENYSPFEVEKKWQEKWESLKAFSPNPQDDGEPFCVVIPPPNVTGSLHMGHAFNTALIDVVVRFQRLLGKNVLCLPGTDHASIAVQTILEKQLKSEGKTSEDIGRDEFLKRAWNWKEQSGGRIVSQLKRIGYSVDWTRERFTLDQKLNQAVIEAFNILYKKNLIYRGEYLVNWCPESQSAVSDLEVEMQEVNGHLWHFKYPLISESGEQLDKYLEVATTRPETLLGDTALAVNPDDDRYKEFIGVKVKVPFVDREIPIIADSNVDKDFGTGCVKVTPA

SEQ ID NO: 191695 - protein, 188 aa, Unknown
  Bacterial polypetide isolated from the Sargasso Sea
MDKRYSPLDIEEKWANIWKDNPLPNIKSDSKFSQVIPPPNVTGTLHMGHSFQYAIMDFYTRYNHMRSVKSYWQIGTDHAGIATQLVVENNLVADGIKKEDLGREKFLEQVWEWKDFSEKQITNQIKRLGCSVNWDKYRFTLDEKFSKAVTKAFVDLFNKDKIYRGYRLCNWDPSLQTAVSDLEVKRQE

SEQ ID NO: 191696 - protein, 260 aa, Unknown
  Bacterial polypetide isolated from the Sargasso Sea
MDKNFSPADIEARWYDQWETRGYFSPSGQGPAYCIPIPPPNVTGTLHMGHGFQQAIMDALIRYHRMRGHNTLWQVGTDHAGIATQMVVERQLVAEGTTREALGREAFIDRVWDWKAESGGAITQQLRRLGASPDWTRERFTMDPGLSEAVRSVFIALHEQGLIYRGYRLVNWDPQFLTAISDLEVVQEEETGSLWHLRYPLSSGKGHLIVATTRPETMLGDTAVAVHPDDERYRDLVGETIDLPLAGRSIPIIADDYVDP

SEQ ID NO: 191697 - protein, 271 aa, Unknown
  Bacterial polypetide isolated from the Sargasso Sea
NWEQGNKFQPKDSDENFSIVIPPPNVTGSLHMGHALEHSIIDVITRIKRLQGFQTLWLPGTDHAGIITQLLVEKELEENGISKHDLGRENFLAKVWEWKDKSGDNITNQMKTLGMSCDWSRERFTMDEGLSEAVVNVFVSLYENDLIYKGTRMVNWDTKLKSAVSDLEVTSSNELGKLWTINYKVGDSFIEIATTRPETLLGDTAVAVNPSDDRYKDLIGQRATIPIVNREVEIIADDYVDVEFGSGCVKITPAHDFNDYEIGKRNNLEMI

SEQ ID NO: 191698 - protein, 306 aa, Unknown
  Bacterial polypetide isolated from the Sargasso Sea
MLGDTAIAVNPKDERYFNLVNKFAILPIVGRKLKIVQDDYADPEQGSGAVKITPAHDFNDFEVGKRQKLKSINIFTEDGKINNNAPNEYIGLDRFEARKKIIHKLKELQLFEKEETIKNKVPYGDRSNSIIEPFLTEQWFCDAKKLSTKAKKIVENKKTNFFPSNWSKTYFQWMNNIEPWCISRQLWWGHQIPAWYGPDRKIFVAENQKKAEQQAKKFYKKKVNLKRDPDVLDTWFSSGLWPFATLGWPSKNYFLKKFYPTSVLVTGFDIIFFWVARMMMLGMHFLNKEPFKEIYVHALVRERKAK

SEQ ID NO: 191699 - protein, 309 aa, Unknown
  Bacterial polypetide isolated from the Sargasso Sea
ELDAKKQAKKFYKKDVKIVRDPDVLDTWFSSGLWPFATLGWPDKKDFVKKFYPTTVLVTGFDIIFFWVARMMMFGMEFLNKEPFKDIYVHALVRDEKGQKMSKSKGNVIDPLDLIEKYSADALRFTLLSMASPGTDVKLSEDRVKGYRNFLNKLWNANNFLITNKCDFNKTDKIPKTSLNINKWIYSELIQTKDKIEKNLKDYRFDEAAKNAYQFAWHSYCDWYIELSKTILFSDDERSKNEVKEVSAYIFKQILVILHPFIPFVTEKIWLKNKFDKSDKNFLMYANWPSGKSKKDQSMKDVESIINVI

SEQ ID NO: 191700 - protein, 257 aa, Unknown
  Bacterial polypetide isolated from the Sargasso Sea
MSSDKYIHSDVENRIYSYWEKNGLFKPKENSKKFSIVIPPPNVTGSLHMGHALNNSIQDLLVRYHRMNNFETLWQPGTDHAGIATQALVEKKLSSEKIDKNEIGREKFVEKVWEWKDQYGDIIINQLKKLGCSCDWSRNAFTMDENLSKSVIKVFVDLYNKGLIYKDKKLVNWDTVLKTAISDLEVDQREVNSKIYYIKYPIDGIEEFITIATTRPETMLGDTAIAVNPNDERFKSIVGKTVTIPIVGRKIKIIEDD

SEQ ID NO: 191701 - protein, 300 aa, Unknown
  Bacterial polypetide isolated from the Sargasso Sea
KILEKLSELQILTKEENIKNKVPYGDRSNSIIEPFLTEQWFVDAKKLSVKAKKIVKNKTTNFFPLNWSKTYFQWMNNIEPWCISRQLWWGHQIPAWYGPDKKIFVAENEKEAQLIAKKFYKKKVKITRDQDVLDTWFSSGLWPFATLGWPSSNYYLKRFYPTSVLVTGFDIIFFWVARMMMLGMEFLKKEPFKQIYVHALVRDEKGQKMSKSKGNVIDPLELIESYSADALRFTLLSMASPGRDVKLSEQRVKGYRNFLTKIWNANNFLKVNKCQFNRQINPKTLSLNINKWGIFRINKD

SEQ ID NO: 191702 - protein, 342 aa, Unknown
  Bacterial polypetide isolated from the Sargasso Sea
FVTLYDSGFIYKGSRMVNWDTKLMSAVSDLEVNLEEQTGKLWSVKYKCGDEFITIATTRPETILADTAVAVNPDDERYESFIGKTAIIPIVNREVPIIADEYVDKEFGSGCVKITPAHDFNDYEIGLKHDLEVISCMKLDGTMSDDDFMPENYKNLDRFEARDQIVNELSELGFLVSADDHVIQLPKGDRSKSILEPMITDQWFVKTKELADRGIAEVENENMKFIPKNWEKTYFEWMYNIQDWCISRQIWWGHQIPAWYDEDGNIYVATTESEVREKYKLSDDLKLSQDKDVLDTWFSSALWPFSTLGWPEESTDLKKYYPTSLLVTGFDIIFFWVAQNDN

SEQ ID NO: 191703 - protein, 162 aa, Unknown
  Bacterial polypetide isolated from the Sargasso Sea
MELDKFFDFLKDEKDLYAQWEHSDCFKLKKGGEPYSIMMPPPNVTGSLHMGHALTFTIQDILIRYHRMKGMEVLWQAGTDHAGIATQMVVERKLSDSNLDRRSLGREKFIEKVWEWKKESGGQISNQLRRLGASADWSRERFTMDVGLSNAVKKVFVNLYNE

SEQ ID NO: 191704 - protein, 257 aa, Unknown
  Bacterial polypetide isolated from the Sargasso Sea
RQLWWGHQIPAWYGPDKKIFVAYNEDEAHKLSLKHYKKKVDLIRDPDVLDTWFSSGLWPFATLGWPKKNDYLKKFYPTSVLVTGFDIIFFWVARMIMFGMEFMKNEPFKNIYVHALVRDEKGQKMSKSKGNVIDPLNLIEKYSADALRFTLLSMASPGRDVKLSEDRVKGYRNLLNKLWNANNFLIQNKCKFDGVKQEKIKLNINKWIYSNLLQTKSKVEKNIKEYRFDEASRVIYQFVWHNYCDWYLELSKTNIIF

SEQ ID NO: 191705 - protein, 300 aa, Unknown
  Bacterial polypetide isolated from the Sargasso Sea
GDTALAVHPEDERYKDLIGENVLIPLINRAIPIIADSHVEKDFGTGCLKITPAHDINDFEIGKRHDLKSINIFDESACLNENCPQDLQGLSREKARAEVIKRLKDQALLIKKETIKNSVPYSERSKVPLEPRLSKQWFVKMKDLAKPAILAAKEGKLNFFPDSWKKTYLHWLENVEDWCISRQLWWGHQIPVWTCQNCKTVHASLSAPKECSNCHKEELIQDPDVLDTWFSSWLWPLSPFGWPEESKDLKLFFPSAVLITGADIIYLWVARMVMASYYLKGELPFKDLYFNAIICDSQGR

SEQ ID NO: 191706 - protein, 292 aa, Unknown
  Bacterial polypetide isolated from the Sargasso Sea
KHTVPFSDRGKVPIEPLLSTQWFLKMDDISQGCLNEIDSKKPSFIPPRWEKVYKDWLENINDWCISRQLWWGHQIPAWYVLDESQDSIEQNTPYIVARNEEDALIEANKKFGLNIKLVRDKDVLDTWFSSGLWPFSTLGWPNTNDPDFKKWYPNSVLVTGFDIIFFWVARMTMMGNTFTNNIPFKDVYIHGLVRDENNKKMSKSSGNGIDPILLIDKYGSDALRFALIREVAGAGQDIRLDFDRKKDTSSTVEASRNFANKLWNATKFVLINKSSNNNYSLNESDETSLELC

SEQ ID NO: 191707 - protein, 280 aa, Unknown
  Bacterial polypetide isolated from the Sargasso Sea
KIFVAENEDDAKQQAKKHYGKDVELNRDPDVLDTWFSSGLWPFATLGWPDDNKYVDKFYPTSVLVTGFDIIFFWVARMIMFGTEFLNKEPFKDIYVHALVRDEKGQKMSKSKGNVIDPLDLIEKYSADALRFTLLSMASPGTDVKLSEDRVKGYRNFLNKLWNANNFLITNECDFKDIDKVPNLNININKWIYSELVETKNKVEKNLEDYRFDEAAKNAYQFAWHSYCDWYLELSKTILFSEDEKAKAEVKKVSSFVFKQILILLHPFIPFVTEEIWLKT

SEQ ID NO: 191708 - protein, 277 aa, Unknown
  Bacterial polypetide isolated from the Sargasso Sea
LSKSVIKVFVELHKKILIYKAEKLVNWDTVLKTAISDLEVDQREMNSKIYYISYPIDNSSEFITIATTRPETMLGDTAIAVNPKDKRYKDHVGKTVTIPIVGRKIKIIKDNYADPEQGTGALKITPAHDFNDYDVGQRNKLEIINVFTEEGKINDNAPKDYIGLDRFDARKKILNELKEKDFFVKEENIKNKVPFGDRSNSVIEPFLTEQWFVDAKKLAIKAKKIVKTKKTNFFPTNWSKTYFQWMNNIEPWCISRQLWWGHQIPAWYGPDQKIFVA

SEQ ID NO: 191709 - protein, 298 aa, Unknown
  Bacterial polypetide isolated from the Sargasso Sea
LSVKAKEVVNNKKTNFFPENWSKTYFQWMDNIEPWCISRQLWWGHQIPAWYGPDKKIFVAINEDEAKTDAKKHYNKDVELIRDPDVLDTWFSSGLWPFATLGWPDEKEFVEKFYPTSVLVTGFDIIFFWVARMIMFGTEFLHKEPFKDIYVHALVRDEKGQKMSKSKGNVIDPLDLIEKYSADALRFTLLSMASPGRDVKLSEDRVKGYRNFLNKIWNANNFLIQNECSFNNVEKPNDLKVNINKWIYSEFLTKKDEIQKNIKGYRFDEAAKNAYPFVWHSFCDWYLELSKTILFSDN

SEQ ID NO: 191710 - protein, 287 aa, Unknown
  Bacterial polypetide isolated from the Sargasso Sea
NQAKEFYEKDVELRQDEDVLDTWFSSALWTFSTLDWPNKTYELDKFYPSNVLVTGFDIIFFWVARMMMMGSYFIKETPFKDIYIHPLIRDEKGQKMSKSKGNIIDPLDLLDKYGADTLRFTLTALLNPGRDVKLSEARVKGYKSFTNKIWNAGKFLQINNSVFKDDISIDEIFFDANRWIIKELNDLNSQLDQLTKKYLFHEIANKIYHFVWHSYCDWYIEIIKQNFDNEKYADEIKKVSGWTFIQVLKIIHPIMPFISEKLWRSLVDNKSYLMNQVYKNYTTNNSF

SEQ ID NO: 191711 - protein, 291 aa, Unknown
  Bacterial polypetide isolated from the Sargasso Sea
FTIQDILIRYHRMKGMEVLWQAGTDHAGIATQMVVERKLSESNLDRRSLGREKFIEKVWEWKKESGGQISNQLRRLGASADWSRERFTMDEGLSNAVKKVFVNLFNDGIIYKDKRLVNWDPKLLTAISDLEVEQRDTEGSLWHIKYPIDENNYIIVATTRPETMLGDTAVAVHPDDVKYRNLVGKFCNLPISNKKIPIIADEYADPEKGSGAVKITPAHDFNDFEVGKRHDLEFINIFDENAKLNSNVPEEFQNLDRFEARKLILKKLDEMNLLIKEEKQQMVIPYGDRSG

SEQ ID NO: 191712 - protein, 284 aa, Unknown
  Bacterial polypetide isolated from the Sargasso Sea
LYEKGLIYRGKRLVNWDPILQTAVSDLEVESQEESGKIWEIKYQINNSSKTLTVATTRPETLLGDTAVAVSPTDDRYAQLVGKEVVIPITNRLVPIIADEHVDPEFGTGCVKITPAHDFNDYEMGLRHDLEMINIFTFDGKLNDNCPKILRGLPREKARKKVLELLTERELLVSEKKHLLKIPRSGRTSTIIEPMLTDQWFIKMESMATQAKKAVQDGKIRFVPNNWENTYFHWLDNIKDWCISRQLWWGHQIPAWRDKEGNIFVARDETEAYEKAKAKGHKES

SEQ ID NO: 191713 - protein, 308 aa, Unknown
  Bacterial polypetide isolated from the Sargasso Sea
TTRPETMLGDTAVAVNPEDTDLAKLKGKQVRLPLTDRTIPIITDHAVELDFGTGALKVTPAHDQVDFEIGERHKLDVINVISPSGYMNHLAGKYEGLNRTDCRNAVVKDLEAEGLLVDSENYNHSVGHCDRCDDIVEPSITKQWYVRMEGLAKPAIDAVRKGEIAIVPERFKSVYYNWMENIRDWPVSRQLWWGHQLPVWYCQECSSVTVEYDDPDSCPNCKSKNLERDPDVLDTWFSSGLWTHSTLGWPETKEDVDYFYPGSVMETGYDILFFWVARMIMLGIENMGRPPFKTVYLHGLVLDPEGGR

SEQ ID NO: 191714 - protein, 320 aa, Unknown
  Bacterial polypetide isolated from the Sargasso Sea
LEVDQREMNSKIYYIRYPIENSSEFITIATTRPETMLGDTAIAVNPKDKRYKDFVSKTVTIPIVGRKIKIITDNYADPEQGTGALKITPAHDFNDYEVGQRNKLDIINVLTEEGKINDNAPQDYVGLDRFEARKKLLEELKEKDFFVKEENIKNKVPYGDRSNSVIEPFLTEQWFVDAKKLAVKAKKIVKSKKTNFIPANWSKTYFQWMNNIEPWCVSRQLWWGHQIPAWYGPDKKIFVAVNEKEAIKQAKKFYKKDVEITRDPDVLDTWFSSGLWPFATLGWPDKKDYLKKFYPTSVLVTGFDIIFFWVARMMMFGMEF

SEQ ID NO: 191715 - protein, 215 aa, Unknown
  Bacterial polypetide isolated from the Sargasso Sea
LGWPDKKDFVNKFYPTTVLVTGFDIIFFWVARMIMFGMEFLNKEPFKDIYVHALVRDEKGQKMSKSKGNVIDPLDLIEKYSADALRFTLLSMASPGTDVKLSEDRVKGYRNFLNKLWNANNFLITNNCDFKKTDKVPKTTLNINKWIYSELIEIKDKIQKNIKDYRFDEAAKNAYQFAWHSYCDWYIELSKTILYSDDEKSKREVKEVSAYVFKQ

SEQ ID NO: 191716 - protein, 221 aa, Unknown
  Bacterial polypetide isolated from the Sargasso Sea
KNNLFKPQKNSKKFSVVIPPPNVTGSLHMGHALNNSIQDLLVRYYRMNNYETLWQPGTDHAGIATQALVERKLEKQNLNKSSLGREKFIEKVWEWKNEYGDIIINQLKKLGCSCDWSRNAFTMDENLSKSVIKVFVELHKKKLIYKAEKLVNWDTVLKTAISDLEVDQREMNSKIYYIRYPIENSSEFITIATTRPETMLGDTAIAVNPKDKRYKDYVGKM

SEQ ID NO: 191717 - protein, 247 aa, Unknown
  Bacterial polypetide isolated from the Sargasso Sea
FGCKKHKLNFINIFDKQARLYSSAPKKFVGMDRYDARKSIIKALKENGQLTKIENNKMFVPIGERTGEVIEPLLTKQWFLDSKKLSNEVLRSIKKKEIKFHPESWMNTFKHWINNIEPWCISRQIWWGHRIPIWYTDGGHKIAAKDLNHARSILRKKRIKGDIIHQESDVLDTWFSSALWPFSTLNWPQKNKILSKYYPSDVLVTGFDIIFFWVARMIMMGLFFIKKVPFKNIYIHPLVKDEKGEKM

SEQ ID NO: 191718 - protein, 296 aa, Unknown
  Bacterial polypetide isolated from the Sargasso Sea
KDKRLVNGSPKLLTAFSDLEVKQRDQEGSLGHIKYPINKDNYIVVATTRPETLLGDSAVAVHPEDTRYKNLIGQFCKLPLVNKNIPIIADEYADPEKGSGAVKITPAHDFNDFEVGKRHELEFINIFDEFAKINENAPERFQGLNRFEARKSILEELSQLGLLIKEEKQEMVIPYGDRSGVVIEPWLTDQWFCNAKKLAIDPIKSVKENKTTFVPKNWENTFFNWMENIQPWCISRQLWWGHQIPAWYGPDDKSFVALSLEDAKLMAKNHYGKEVELKQDEDVLDTWFSSALWTFS

SEQ ID NO: 191719 - protein, 282 aa, Unknown
  Bacterial polypetide isolated from the Sargasso Sea
NSKLYYIKYQIENTKKFITIATTRPETMLGDTAIAVNPTDKRYKKIVGKNAIIPIVERKIKIIEDEYADPEQGTGAVKITPAHDFNDYEVGQRNKLEILNVFTEDGKINDKAPKQFFGLDRFEARKKLIKLLIEKDYFVKEENIKNKVPYGDRSNSIIEPYLTEQWFADAKKLSIKAKEIVENKKTKFFPENWSKTYFQWMDNIEPWCVSRQLWWGHQIPAWYGPDGKVFVEENEDTAKQKAKDFYKKDVELKRDEDVLDTWFSSGLWPFATLGWPKKNDYL

SEQ ID NO: 191720 - protein, 304 aa, Unknown
  Bacterial polypetide isolated from the Sargasso Sea
TTRPETMMGDTAVAVNPKDKRYSNLIGKKVKIPIVNRIIKIIADHYADPEQGSGAVKITPAHDFNDYEVGKRNKLEIINIFEKNGKINKNGIKEYIGLDRFEARKLLIKKLKENGSLVKIETIKNKVPYGDRSNSIIEPLLTEQWFVDAKKLSKKPIKIVKQGKTSFFPNNWTKIFFQWMKNIEPWCVSRQIWWGHRIPAWYDEYNNMFVAENEKQAHILAKKKNKNKDFKLKQETDVLDTWFSSALWPFATLGWPTKTKEFSKFYPTSVLVTGFDIIFFWVARMLMMGNYFNKHTPFHKVYVH

SEQ ID NO: 191721 - protein, 320 aa, Unknown
  Bacterial polypetide isolated from the Sargasso Sea
GCSCDWSRNAFTMDDNLSKSVLKVFVEMYKNGLIYKSKKLVNWDTVLKTAISDLEVDQREVNSKLYHINYPIEGSDKFITIATTRPETMLGDTAIAVNPSDERFKSLVNKNVIVPIVDRKIKIIEDDYADPEQGTGAVKITPAHDFNDYEVGERNNLEVINVFTPDGKINENAPDNYIGLDRFEARKRILKELTDKNLFVKEEKIKNKVPYGDRSNSIIEPYLTEQWFADAKKLSIKAKEIVNNKTTNFFPVNWTKTYFQWMDNIEPWCISRQLWWGHQIPAWYGPDGEIFVDETEEGAKKLDKEHYKKDVELIRDPECT

SEQ ID NO: 191722 - protein, 259 aa, Unknown
  Bacterial polypetide isolated from the Sargasso Sea
MSNNYDHIKVEDKIYSYWEKHELFKPKKNRKKYSIVIPPPNVTGNLHMGHALNNSIQDLLTRYHRMNNFETLWQPGTDHAGIATQALVEKKLANEGKNKNSIGRENFIKEVWKWKNQYGDIIINQLKKLGCSCDWSRNAFTMDENLSKSVIKVFVELYKKGLIYKSKKLVNWDTKLKTAISDLEVDQREVNSKLYYINYPIEDSDNFITIATTRPETMLGDTAVAVNPKDKRYKKLVSKNVILPIVEKKIKIIADDYAD

SEQ ID NO: 191723 - protein, 241 aa, Unknown
  Bacterial polypetide isolated from the Sargasso Sea
KVNNNAIPQYVGLDRFEARKKILNELKEKNYFVKEENIKNKVPYGDRSNSIIEPFLTEQWFADAKKLSIKAKKIVKNKKTNFFPSNWSKTYFQWMNNIEPWCISRQLWWGHQIPAWYGPDKKIFVELNESDARKSAKKFYKKDVKLLRDPDVLDTWFSSGLWPFATLGWPNKNEYLKKFYPTTVLVTGFDIIFFWVARMMMFGMEFLNKEPFKDIYVHALVRDEKGQKMSKSKGNVIDPLD

SEQ ID NO: 191724 - protein, 276 aa, Unknown
  Bacterial polypetide isolated from the Sargasso Sea
INDWCISRQLWWGHQIPAWYVLDESQDSIEQNTPYIVARNEEDALIEANKKFGLDIKLVRDKDVLDTWFSSGLWPFSTLGWPNTNDLDFKKWYPNSVLVTGFDIIFFWVARMTMMGNTFTNNIPFKDVYIHGLVRDENNKKMSKSSGNGIDPILLIDKYGSDALRFALIREVAGAGQDIRLDFDRKKDTSSTVDASRNFANKLWNATKFVLINKTSKNNYSLNESDETSLELCDKWILSKLNQVNIKVAALLKEYKLGESAKLLYEFTWNDFCDWY

SEQ ID NO: 191725 - protein, 308 aa, Unknown
  Bacterial polypetide isolated from the Sargasso Sea
ALKITPAHDFNDYDVGQRNKLEIINVFTEDGKINNNAPDDYVGLDRFEARKKILNELKEKDFFVKEENIKNKVPYGDRSNSVIEPFLTEQWFVNAKKLSIKAKQIVKTKKTNFFPENWSKTYFQWMNNIEPWCISRQLWWGHQIPAWYGPDKKIFVATNETDAKKQAKNFYKKDVKITRDPDVLDTWFSSGLWPFATLGWPDKKDFVKRFYPTTVLVTGFDIIFFWVARMMMFGMEFLNKEPFKDIYVHALVRDEKGQKMSKSKGNVIDPLDLIEKYSADALRFTLLSMASPGTDVKLSEDRVKGYRN

SEQ ID NO: 191726 - protein, 172 aa, Unknown
  Bacterial polypetide isolated from the Sargasso Sea
MELDKFFNFINDEKELYSLWENSDCFKPNKGGEPYSIMMPPPNVTGSLHMGHALTFTIQDILIRYHRMKGMEVLWQAGTDHAGIATQMVVERQLAHSNIDRRSIGREKFIKKVWEWKKESGGKISNQLRRLGASADWSRERFTMDEGLSNAVKKVFVNLYNDGIIYKDKRLV

SEQ ID NO: 191727 - protein, 277 aa, Unknown
  Bacterial polypetide isolated from the Sargasso Sea
IIEPLLTEQWFADAKFLSKKAIQVVKKKKTTFFPINWSKTYFQWMNNIQPWCISRQLWWGHRIPAWYSEDKKIFVAENEKEAIKIAKKYYKRNVKLKRDDDVLDTWFSSALWPFATLGWPKKTYELKRFYPTSVLVTGFDIIFFWVARMMMMGNYFLKKEPFSKVYVHALVRDEKGQKMSKSKGNVIDPLDIIKKYGADSLRFTLISMASPGRDVKLSEDRVKGYRNFINKIWNANQFSLKNKCKLKGNFNIKKINLDINKWIYFELVKTNNKAIEH

SEQ ID NO: 191728 - protein, 287 aa, Unknown
  Bacterial polypetide isolated from the Sargasso Sea
MFCGQVGVDHAGIATQMVVERQLESEGKSKESIGREAFEERVWEWKEKSGGTITQQLRRLGASVDWSREAFTMNEDLSLAVREVFVSLFEEGLIYRGERLVNWDVVLQTALSDLEVTSEEETGSLWHFDYPVENGGSITVATTRPETMLGDSAVAVNPEDERFKELIGQFVILPIAERKIPIIEDSYVDQDFGTGCVKITPAHDFNDFEIGKRHDLEIINILNLDGTLNESVPERFRGLTTTEARKEVLNAMESLGYLNKVEPHKIQIPKSQRSDSVLEPLITNQWF

SEQ ID NO: 191729 - protein, 306 aa, Unknown
  Bacterial polypetide isolated from the Sargasso Sea
MGHALTFTIQDILIRYHRMKGMEVLWQAGTDHAGIATQMVVERKLSESKLDRRSLGREKFIEKVWEWKKESGGQISNQLRRLGASADWSRERFTMDKGLSNAVKKVFVNLFNDGIIYKDKRLVNWDPKLLTAISDLEVEQRDTEGSLWHIKYPIDENNHIIVATTRPETMLGDTAVAVHPDDEKYKNLIGKFCNLPISNKKIPVIADKYADPEKGSGAVKITPAHDFNDFEVGKRHDLEFINIFDENAKLNSNVPKEFQNLDRFEARRLILKKLDEVNLLIKEEKQQMVIPYGDRSGVVIEPWLTD

SEQ ID NO: 191730 - protein, 275 aa, Unknown
  Bacterial polypetide isolated from the Sargasso Sea
HVVVATTRPETMLGDTAVAVHPEDERYCHLVGKQIGLPLTDRSIPIIADDYVDPEFGTGCLKITPAHDFNDHEVGLRHKMQPINVLDPSAAIDLPDSPYHGLDRYAARERIVADLQALGLVERIDDHTLMVPRGDRSGAVVEPYLTDQWFVRAGPLAAPAIKAVEDGRIRFVPENWSRTYFEWMRNIQDWCISRQIWWGHRIPAWYDDEGNIFVGRDADEARKKAFQHHGKDVSLHQDDDVLDTWFSSALWPFSTLGWPKSTEDLATFYPYLMCM

SEQ ID NO: 191731 - protein, 298 aa, Unknown
  Bacterial polypetide isolated from the Sargasso Sea
DQDVLDTWFSSSLWTFATLGWPQQTKRLDKYHPTSLLVTGFDIIFFWVARMIMMTKHFTKAIPFKEIYITGLIRDSEGQKMSKSKGNVLDPLDIIDGINLEALISKRISGLLNPDDEQKIIKQTKKDYPQGIKAHGTDALRFTFLSLASGSRDINFDMKRVEGYRNFCNKLWNASRFIELNKPASFKKTNQFIKTPEDKWIVEKLNRTIVSMNTHMDNYRFDLATQSVYEFVWNDFCDWYIEFSKNRLDSDNIKKSEVDRIISGLLHILESILKLCHPFMPFITEEIWNQIASRKKQS

SEQ ID NO: 191732 - protein, 280 aa, Unknown
  Bacterial polypetide isolated from the Sargasso Sea
HRKTGRDTLWQPGTDHAGIATQMVVERQLAEDGVSRQDLGRSKFLEKVWEWKNESGGTITEQLRSLGSSPDWSREKFTMDPDLSIAVTRVFVELYKQGLIYRDKRLVNWDPKLLTAISDLEVQQVETQGKLWHFKYPLEAGQDEFITVATTRPETMLGDTGIAVHPDDPRYTKFVGKKAVLPLVDRLIPIVADEYSDMEKGSGAVKITPAHDFNDFEVGRRHELELINIFDEKAKLNKNVPEKFVGLDRYEARKIIVAQMEELGLLSLVEDTTHVVPSWG

SEQ ID NO: 191733 - protein, 314 aa, Unknown
  Bacterial polypetide isolated from the Sargasso Sea
TLFGDMAIAVNPNDERYKDLIGKYAVLPFVERKLPIIGDDYVDMEFGTGCLKITPAHDFNDYEIGKKYCLHEKDNKVETSKNIDDFEPINIFNEDAWTNNNVPKLFENLDRFKVRKLVIKELTELKLLEKEEEYGVSIPRGERSNIVIEPRLSHQWYVKTSEMAEKANMEVKKGNVKFHPNNWIKTYFNWMDNIEDWCISRQIWWGHRIPAWYDDDGNIYVGENEQDVRNYYKLDEVKLKQDEDVLDTWFSSSLWPFGSLGWPEKTDDFKNFFPTSLLVTGFDIIFFWVARMIMMSIEFTGKIPFKDVYVTGLI

SEQ ID NO: 191734 - protein, 286 aa, Unknown
  Bacterial polypetide isolated from the Sargasso Sea
NSVKQNNTNFVPKIWEKTFFNWMENIQPWCISRQLWWGHQIPAWYGPDNKFFVALSIEDAKLIANKYYGKDVELKQDEDVLDTWFSSALWTFSTLDWPNKTYELDRFYPGNVLVTGFDIIFFWVARMMMMGSYFMKETPFKDVYIHPLIRDEKGQKMSKSKGNIIDPLVLLDKYGADTLRFTLTALLNPGRDVKLAEERVKGYKSFTNKIWNAANFLNLNNVSFIDTIDIENIKLDTSKWILKEFEEIQKRYFDNIEKYQFHEIASLLYHFTWHTYCDWYIEFIKS

SEQ ID NO: 191735 - protein, 291 aa, Unknown
  Bacterial polypetide isolated from the Sargasso Sea
FFLRLVKTYFQWMNNIEPWCISRQLWWGHQIPAWYGPDKKIFVELNESDAKKSAKKYYKKDVQLTRDPDVLDTWFSSGLWPFATLGWPNKKEYLKKFYPTTVLVTGFDIIFFWVARMMMFGMEFLNKEPFKDIYVHALVRDEKGQKMSKSKGNVIDPLDLIQKYSADALRFTLLSMASPGTDVKLSEDRVKGYRNFLNKLWNANNFLIQNKCNLKNAKKLPKLKVNINKWIYFELLETSNLIKKNIEDYRFDEAAKNAYHFAWHKYCDWYLELSKTILFSDNLKAKNEVKE

SEQ ID NO: 191736 - protein, 338 aa, Unknown
  Bacterial polypetide isolated from the Sargasso Sea
WQPGTDHAGIATQALVEKKLTSEKIDKNDIGRDRFIEKVWEWKEQYGDIIINQLKKLGCSCDWSRNAFTMDENLSKSVIKVFVELYNKGLIYKDKKLVNWDTVLKTAISDLEVDQREVNSKIYYIKYPIDGTSEFITIATTRPETMLGDTAIAVNPKDDRFKSFVGKTVTIPIVGRKIIIIEDDYADPEQGTGALKITPAHDFNDYDVGQRNNLEIINIFTEEGKINENAPEHYKGLDRFEARKIILKELKEKEFFVKEENIKNKVPYGDRSNSIIEPFLTEQWFADAGKLSVKAKEVVNSKKTNFFPENWSKTYFQWMNNIEPWCISRQLWWGHQIP

SEQ ID NO: 191737 - protein, 294 aa, Unknown
  Bacterial polypetide isolated from the Sargasso Sea
SKKPIDIVKKNKTSFFPSNWTKTFFQWMNEIEPWCISRQIWWGHRIPAWYDGNNNIFVAENKKDALILAKKKNKNKKFLLNQETDVLDTWFSSALWPFATLGWPSKTKELKKFYPTSVLVTGFDIIFFWVARMLMMGNYFNKNTPFHKVYVHALVRDEKGQKMSKSKGNVIDPLELIDKYGADSLRFTLISMASPGRDVKLSKDRVTGNRNFITKIWSANNFLKLNNCKLDKKIDINSIKLPINLWIFNEFVKVQNLVTKNIEIFRFDEATKHVYQFVWHSYCDWYLEFLKPSF

SEQ ID NO: 191738 - protein, 303 aa, Unknown
  Bacterial polypetide isolated from the Sargasso Sea
IYKAKKLVNWDTVLKTAISDLEVDQREVNSKIYYIKYPIDGTDEFITIATTRPETMLGDTGIAVNPKDDRFKSFVGKTATIPIVGKKINIVEDDYADPEQGTGALKITPAHDFNDYDVGQRNNLEIINVFTEAGKINENAPKEYVGLDRFEARKKILKELKDKEFFVKEENIKNKVPYGDRSNSIIEPFLTEQWFIDAEKLSIKAKEVVNSKKTNFFPENWSKTYFQWMNNIEPWCISRQLWWGHQIPAWYGPDKKIFVATNEDEAKADAKKHYNKDVDLIRDPDVLDTWFSSGLWAFATLGG

SEQ ID NO: 191739 - protein, 332 aa, Unknown
  Bacterial polypetide isolated from the Sargasso Sea
IKAKKIVKLKKTNFFPENWSKTYFQWMNNIEPWCISRQLWWGHQIPAWYGPDKKIFVALNEKEAKHNAKKFYKKNVELKRDPDVLDTWFSSGLWPFATLGWNTKDPYLKKFYPTSVLVTGFDIIFFWVARMIMFGMEFIKKEPFKDIYVHALVRDEKGQKMSKSKGNVIDPLDLIDKYSADALRFTLLSMASPGRDVKLSEDRVKGNRNFLNKLWNVNNFLIHNKCEIKNTKKAPKAKININKWIYSELVQTKFIVEKNIKEYRFDEAARNVYQFVWHSYCDWYLELSKTILNSKNKNQIKETKEIASYIFKEIFILFTPFIPFYTEEVWLK

SEQ ID NO: 191740 - protein, 260 aa, Unknown
  Bacterial polypetide isolated from the Sargasso Sea
MSSDKYIHSDVENRIYSYWEKNGLFKPKENSKKFSIVIPPPNVTGSLHMGHALNNSIQDLLVRYHRMNNFETLWQPGTDHAGIATQALVEKKLSSEKIDKNEIGREKFIEKVWEWKEQYGDIIINQLKKLGCSCDWSRNAFTMDENLSKSVIKVFVDLYNKGLIYKDKKLVNWDTVLKTAISDLEVDQREVNSKIYYIRYPIDGTKEFITIATTRPETMLGDTAIAVNPKDERFKSFVGKVVSIPIVGRKIKNIEDDYAD

SEQ ID NO: 191741 - protein, 282 aa, Unknown
  Bacterial polypetide isolated from the Sargasso Sea
MGLFRSGQFRPETKFGDKYVVMHPEDERYLDYQHGQTFECEWINGRIQATIIKDDAVDPEFGTGVMTITPWHDHADFEIAERHQLDKEPIIDFDGRLLPIAQEFSGMGIEEVRSLIVEKLKTKGLLVEVDEKYTHSKSFNSRGGGAIEPQIREQWFIDVNKQAIDWKGAKSSLREILIDVFRAGDIRLVPDRFESTYFHWVENLRDWCISRQIWWGHRIPAFYRENELQIAMKTPEGVGWEQDPDTLDTWFSSALWTWSTLIDPDLAQDESISFEELLRRSP

SEQ ID NO: 191742 - protein, 247 aa, Unknown
  Bacterial polypetide isolated from the Sargasso Sea
GAVKITPAHDFNDYNVGIRNKLEVINIFTPDGKINDNAPDPYKGLDRFAARKLILEHLEESKFLQKIEKLVNKVPYGDRSNSIIEPYLTEQWFVDAKTLAIKAKEVVNNGKIKFFPENWSKTYFQWMDNIEPWCISRQLWWGHQIPAWYGPDGKIFVAENEHECKKQAKEFYSKDVELKRDEDVLDTWFSSGLWPFATLGWPEKTSEVEKFYPTSVLVTGFDIIFFWVARMIMMGTEFLKEEPFKNI

SEQ ID NO: 191743 - protein, 287 aa, Unknown
  Bacterial polypetide isolated from the Sargasso Sea
MQDETYEPLAIEKKWQESWESANKFVPVGSDKKFSIVIPPPNVTGSLHMGHALEHSIIDVITRIKRLQGYETLWVPGTDHAGIITQLLVENELSEKGVQKEDIGRENFISKVWEWKEKSGENISTQMRKLGMSCDWSRERFTMDEGLSTAVREVFIKLYEDGLIYKGTRMVNWDTELMSAVSDLEVTLNPEKGKLWSIKYKTEDSFLTISTTRPETLLGDTAVAVNPDDERYKNLIGKTAIVPLVNREVPIIADEYVDPEFGSGCVKITPSHDFNDYEIGEKHKLEF

SEQ ID NO: 191744 - protein, 278 aa, Unknown
  Bacterial polypetide isolated from the Sargasso Sea
GEDVLWQTGTDHAGIATQMVVERKLDSENKPSRIKLGRKKFVDEVWKWKEESGNTITSQLRRLGASCDWSRERFTMDEGLSLAVNKVFVDLYNEGLIYKDKRLVNWDPQLRTAISDLEVIQKEVDGYLWYINYPIKDSKETITIATTRPETMFGDTAIAVHPSDNRYADLIGKEVIIPIIGRSIKIITDEYADPEQGSGAVKITPAHDFNDFEVGKRNNLEMLSILNIEGKLNENVDKEWQGLDRFEARSKLLKMLSKEGYLEKEEKYNNSVPHGDRS

SEQ ID NO: 191745 - protein, 307 aa, Unknown
  Bacterial polypetide isolated from the Sargasso Sea
DCQLQTAVSDLKIESKEMDGHLWTIAYPIQGSDESVIVATTRPETLFGDQAIAIHPNDQRYRHLHGKSATIPLTTRTIPIILDEHVDPEFGSGCVKVTPAHDFNDYAIGQRHQLPYLTVLTPDGRMNKEVPDAYQGLTVKEARKQIVDDLSETGQLLATKPHRHQVPTGDRSGTVIEPRLTYQWFMAMEKLAKPAIDAVKKGEITFTPKNWENTYFHWLENIQDWCLSRQLWWGHQIPAWYDQDGNVYVGQSETHVRDKYQLSQEITLKQDEDVLDTWFSSALWPFVTLGWPEKTDRFDTFYPNKHL

SEQ ID NO: 191746 - protein, 158 aa, Unknown
  Bacterial polypetide isolated from the Sargasso Sea
MQLDKFFDFLKDEKNLYAQWEQSNCFKPKKGGKPYSIMMPPPNVTGSLHMGHALTFTIQDILIRYHRMKGMEVLWQAGTDHAGIATQMVVERQLSESNLDRRSLGREKFIEKVWEWKKESGGQISNQLRRLGASADWSRERFTMDEGLSNAVKKVFVN

SEQ ID NO: 191747 - protein, 239 aa, Unknown
  Bacterial polypetide isolated from the Sargasso Sea
KRKFLIFGSKMDCFKPKKNKSKKNFSIVIPPPNVTGRLHMGHALNNSLQDVLIRFKRMQGHETLWQPGTDHAGIATQAVVEKNLEKNNINKNNLGRTNFIKKVWEWKEESGGIILDQLKKLGCSCDWSRTRFTMDKEFSIAVIKVFVDLYNNKLIYKDKKLVNWDTQLQTAISDLEVIQKEVQSQLYYIDYQLENSPEKITIATTRPETMMGDTAVAVNPKDERYVNLVGKEVRIPIVN

SEQ ID NO: 191748 - protein, 250 aa, Unknown
  Bacterial polypetide isolated from the Sargasso Sea
LWFFRYPIKDSTEHVVVATTRPETMLGDTAVAVNPDDHRYQHLIGKQIVLPLVGREIPIIADKYVDPEFGTGCVKITPAHDPNDFLMGERHDLKFINIMNDDASMNSNVPENYIGLSREQARKEIVKDLGEEGFLVKKEDYKTKIGYSERGQVPIEFYMSEQWFMKMDELIKPAMDAVKNGDINFYPKHWSKTYDHWLSNIKDWCISRQLLWGHQIPVWYHKDDKTKIHVSVDGPSDNKNWIRDADVLDT

SEQ ID NO: 191749 - protein, 281 aa, Unknown
  Bacterial polypetide isolated from the Sargasso Sea
WCVGCHSAISDIEVEYEDEDTSFWHIRYEIVDTSDAIIIATTRPETIPADIAVAVNSKDERYSHLIGKLCRVPTTDRVVPIIADDAVSIESGSGALKVTPAHDQVDFEIGERHGLEIINILEKDGTLNQRAGAYNGLSLLEARSQIVQDMANLGLVERIDPYNHSVGHCQRCATVIEPLLSEQWWVDAKTLSGPAIDAVKEKKINFVPPRFERTYLHWMENIRDWCISRQIWWGHRIPVWYCDECDYLTVAITDPDECDSCGCKDIRQDEDTLDTWFSSGL

SEQ ID NO: 191750 - protein, 307 aa, Unknown
  Bacterial polypetide isolated from the Sargasso Sea
KENSKKFSIVIPPPNVTGSLHMGHALNNSIQDVLTRFHRMNNYETLWQPGTDHAGIATQALVEKKLAKEGVKKNDLGREKFIDKVWEWKNEYGDIIINQLKKLGCSCDWSRNAFTMDENLSKSVIKVFVDLYNKKLIYKAKKLVNWDVVLKTAISDLEVDQREVNSQLYYINYPIENSDKFITIATTRPETMLGDTAIAVNPKDDRFKDIVGKLVTIPLANRKIKVITDDYADPEQGTGAVKITPAHDFNDYDVGIRNKLEEINIFTPDGKINDNAPDPYKGLDRFAARKLILEHLEEGKFLEKIEK

SEQ ID NO: 191751 - protein, 202 aa, Unknown
  Bacterial polypetide isolated from the Sargasso Sea
MDNNFNSSQIEQELYKMWEEENFFAPTDRDNQKNFCVLIPPPNITGTLHMGHAFNHTLIDILIRHSRMKGKRTLWQGGTDHAGIATQMLVERKLAEENLSKIELGREKFLERVWDWRRNSGNTISQQIRRMGSSIDWSRERFTMDEDYADAVLEVFVRLYDEGLIYRGKRLVNWDPELNTAISDLEVENTEENGHLWHIRYP

SEQ ID NO: 191752 - protein, 271 aa, Unknown
  Bacterial polypetide isolated from the Sargasso Sea
DANNYIIVATTRPETMLGDTAVAVHPDDEKYKNLIGKFCNLPISNKKIPIIADEYADPEKGSGAVKITPAHDFNDFEVGKRHDLEFINIFDENAKLNSNAPEEFQNLDRFDARKLILKKLDEMNLLIKEEKQQMVIPYGDRSGVVIEPWLTDQWFCDAKKLSFDPISAVRDNSSKFIPKQWENTFYNWMENIQPWCISRQLWWGHQIPAWYGPDNKYFVSETLKGAQNQAKEFYGKDVELRQDEDVLDTWFSSALWTFSTLDWPNKTYELD

SEQ ID NO: 191753 - protein, 311 aa, Unknown
  Bacterial polypetide isolated from the Sargasso Sea
IIADHYADPEQGSGAVKITPAHDFNDYEVGKRNRLEIINIFEKNGKINKNGIKEFINLDRFQARQLLVKQLKEKGNLIKIETIKNKVPYGDRSNTIIEPLLTEQWFVDAKKLSKKPISIVKKGKTSFFPSSWTKTFFLWMKNIEPWCISRQIWWGHRIPAWYDEKNNIFVAENEKDALILAKKKNKNKKFKLKQETDVLDTWFSSALWPFATLGWPAKTKELSKFYPTSVLVTGFDIIFFWVARMLMMGNYFNKHTPFYKIYVHALVRDEKGQKMSKSKGNVIDPLELINEFGADSLRFTLISMASPGRDV

SEQ ID NO: 191754 - protein, 217 aa, Unknown
  Bacterial polypetide isolated from the Sargasso Sea
MKKSGQSFGAKNNLGKNNSSHTFSQVIPPPNVTGTLHMGHSFQYSIMDFYARYNHLNDVNTHWQMGTDHAGIATQMVVENNLSRENIDKNDLGREDFVKKVWEWKELSENKITGQIKRLGNSVDWSNYRFTLDEGFNEAVLKAFVELYRKEKIYRGYRLVNWDPSLKTAVSDLEVVRQEKKGLIWYIKYPIIGSDDFVTVATTRPETMFGDMAIAVN

SEQ ID NO: 191755 - protein, 263 aa, Unknown
  Bacterial polypetide isolated from the Sargasso Sea
YYIRYPIDGTDEYITIATTRPETMLGDSAIAVNPKDERFKSSVGKTVTIPIVGRKIKIIEDDYADPEQGTGALKITPAHDFNDYDVGQRNNLEIINIFTESGKINENAPEHYIGLDRFEARKRILKELKEKNFFVKEENIKNKVPYGDRSNSIIEPFLTEQWFADAGKLSVKAKEVVKSKKTNFFPENWSKTYFQWMDNIEPWCISRQLWWGHQIPAWYGPDEKIFVAENEDDAKQQSKKHYGKDVELNRDPDVLDTWFSSGL

SEQ ID NO: 191756 - protein, 297 aa, Unknown
  Bacterial polypetide isolated from the Sargasso Sea
TGALKITPAHDFNDYDVGQRNNLEIINIFTETGKINENAPEHYVGLDRFEARKRILKELKEKDFFVKEENIKNKVPYGDRSNSIIEPFLTEQWFADAGKLSIKAKEVVNSKKTNFFPENWSKTYFQWMNNIEPWCISRQLWWGHQIPAWYGPDEKIFVAENEDDAKKQAKKHYGKDVELNRDPDVLDTWFSSGLWPFATLGWPDDNKFVDKFYPTSVLVTGFDIIFFWVARMIMFGTEFLNKEPFKDIYVHALVRDEKGQKMSKSKGNVIDPLDLIEKYSADALRFTLLSMASPRYR

SEQ ID NO: 191757 - protein, 218 aa, Unknown
  Bacterial polypetide isolated from the Sargasso Sea
MSFDKYEHKNVENKIYDYWEKKELFKPKENSKKFSIVIPPPNVTGSLHMGHALNNSIQDVLTRFHRMNNFETLWQPGTDHAGIATQALVEKKLAKEGVKKNDLGREKFIDKVWEWKNEYGDIIINQLKKLGCSCDWSRNAFTMDENLSKSVIKVFVDLYNKKLIYKAKKLVNWDVVLKTAISDLEVDQREVNSQLYYINYPIENSDKFITIATTRPET

SEQ ID NO: 191758 - protein, 279 aa, Unknown
  Bacterial polypetide isolated from the Sargasso Sea
SIVIPPPNVTGRLHMGHALNNSLQDVLVRFNRMKGLETLWQPGTDHAGIATQAVVENNLLKEGIKKNDLGREKFIKKIWDWKEESGEIILDQLKKLGCSCDWSRTRFTMDKDLSKAVIKVFVDLHKNKLIYKDKKLVNWDTKLQTAISDLEVNQKDVQSQLYYIDYTIVDSDQKITIATTRPETMMGDTAVAVNPKDERYVNLVGKNVHIPIVNRTVKIISDNYADPEQGSGAVKITPAHDFNDYEVGKRNKLEIINIFEENGKINKNGIKEFHGLDRL

SEQ ID NO: 191759 - protein, 280 aa, Unknown
  Bacterial polypetide isolated from the Sargasso Sea
VGFSERTNAIIEPRLSLQWYVNMQELSKPALDNVMNGNVQFYPEKFKNTYRHWMENIKDWCISRQLWWGHRIPAWYYGEGKDEFVVCKTLEEAVELASAKSGKNISENELKQDEDVLDTWFSSWLWPISVFNGLTDKENDEINYYYPSNDLVTAPEIMFFWVARMIIAGYEYMGDIPFKNVYYTGIVRDKLGRKMSKSLGNSPDPIELIENYGADGVRVGILISSPAGNDLPFDSSQCEQGRNFTNKVWNAYRLISSWESKNIEQPNSSVKAIEWFESKI

SEQ ID NO: 191760 - protein, 282 aa, Unknown
  Bacterial polypetide isolated from the Sargasso Sea
TAIAVNPKDKRYKNYKKKFAILPLVNRKIKIIFDNYADPEQGTGAVKITPAHDFNDYEVGKRNKLEIINILTEDGKVNKNGPEKYRGLDRFDARKKILEDLSNLNLLVKEENIKNKVPYGDRSNSIIEPFLTEQWFVDAKKLSIKAKKIVKSKKTNFFPNNWSKTYFQWMNNIEPWCVSRQLWWGHQIPAWYGPDKKIFVASNESDAKKNASKFYKKNVTLFRDPDVLDTWFSSGLWAFATLGWPSKNEYLKKFYPTSVLVTGFDIIFFWVARMMMFGMEFL

SEQ ID NO: 191761 - protein, 264 aa, Unknown
  Bacterial polypetide isolated from the Sargasso Sea
MISDKYIHSKVEDKIYSYWEKNKLFKPQKNSKKFSIVIPPPNVTGSLHMGHALNNSIQDLLVRYYRMNNYETLWQPGTDHAGIATQALVEKKLEKENLSKIDLGREKFIEKVWEWKNEYGDIIINQLKKLGCSCDWSRNAFTMDANLSKSVIKVFVELHKKKLIYKAEKLVNWDTVLKTAISDLEVDQREMNSKIYYIRYPIDKSSEFITIATTRPETMLGDTAIAVNPMDKRYKKYVGKTVTIPIVGRKIKIIKDNYADPEQG

SEQ ID NO: 191762 - protein, 248 aa, Unknown
  Bacterial polypetide isolated from the Sargasso Sea
NKLEIINIFEENGKINKNGIKEFHGLDRFEARKLIIKKLKDKGSLVKIENIKNKVPYGDRSNTIIEPLLTEQWFVDAKKLSKKPIKIVKEGKTTFFPSNWSKTFFQWMNNIEPWCISRQIWWGHRIPAWYDENGNIFVAESEKDAVKLAKKKNKNKEFKLRQETDVLDTWFSSALWPFATLGWPNKTEELNKFYPTSVLVTGFDIIFFWVARMLMMGNYFRKNTPFHKVYVHALVRDEKGQKMSKSKG

SEQ ID NO: 191763 - protein, 290 aa, Unknown
  Bacterial polypetide isolated from the Sargasso Sea
MSTPQPQPGLESLSKSFEPAALEAHWGPEWEKRGYGTAGHRGTGQPQAGEPAFSIQLPPPNVTGTLHMGHAFNQTIMDSLTRYHRMKGFNTVWVPGTDHAGIATQIVVERQLQEQGISRYDMGPTPPEARKNFVSKVWEWKEKSGNTITTQMRRMGDSVDWSREYFTMDDKLSAVVTDTFVKLYEQGLIYRGKRLVNWDPKLQSAVSDLEVESEEKDGSLWHIAYPLADGSGSLTVATTRPETMLGDVALMVHPEDARYTHLIGKMVNLPLCDRQIPVIADEYVDKEFGT

SEQ ID NO: 191764 - protein, 182 aa, Unknown
  Bacterial polypetide isolated from the Sargasso Sea
MAKTYDPQATEERWQQAWEESGAFHPDPEAPGEPFSLVTPPPNVTGSLHMGHAFNTALIDTIVRFQRMQGKNVLCLPGTDHASIAVQTILEKQLKAEGSSKEELGREGFLERCWAWKGESGGRIVSQLRRLGFSVDWQRERFTLDAGCSQAVIEAFVSLHEQGLIYRGEYLVNWCPASGSAV

SEQ ID NO: 191765 - protein, 276 aa, Unknown
  Bacterial polypetide isolated from the Sargasso Sea
QLYYIDYMIENSDQKITIATTRPETMMGDTAVAVNPKDERYVNLVGKNVLIPIVNRTVKIISDNYADPEQGSGAVKITPAHDFNDYEVGKRNKLEIINIFEENGKINKNGIKEFHGLDRFEARKLIIKKLKDKGSLVKIENIRNKVPYGDRSNTIIEPLLTEQWFVDAKKLSKKPIKIVKEGKTTFFPNNWSKTFFQWMNDIEPWCISRQIWWGHRIPAWYDENGNIFVAESEKDAVNLAKKKNKNKLFKLRQETDVLDTWFSSALWPFATLGWPN

SEQ ID NO: 191766 - protein, 311 aa, Unknown
  Bacterial polypetide isolated from the Sargasso Sea
KGYIYRGYRMVNWDPESQTTVSDEEVNYVEEESKLYYLNYSIDGSKDKLIIATTRPETIFGDTAVCVNPKDKRYSKFVGKKAIVPICDRKIPIIADSYVDIEFGTGCLKVTPAHDLNDYNLGNKHKLEIIDIFDPKGRLNEHGLHYKNKDRFDARNEIVEELKNKKILDKSEVYKHNVGRSERTNAIIEPKISRQWFLKMDKISKPAITNVLKNENIKFFPKKFKSTYKYWLENIKDWNISRQLSWGHQIPAFYYGENGDEYVIAQNKNEAKKILENQKGLKLKDDELTQDEDVLDTWFSSWLWPISVFDG

SEQ ID NO: 191767 - protein, 258 aa, Unknown
  Bacterial polypetide isolated from the Sargasso Sea
KKYYKKNIKLYRDPDVLDTWFSSGLWAFATLGWPLKKDYVKKFYPTSVLVTGFDIIFFWVARMIMFGMEFLNKEPFKDIYVHALVRDEKGQKMSKSKGNVIDPLELIEKYSADALRFTLLSMASPGRDVKLSEDRVKGYRNFLNKLWNANNFLIQNKCSFKNVSKKPKISININKWIYNELLETKKNVERNIKEYRFDEAARNSYRFVWHSYCDWYLELSKTILYSNNSNSVKEMRKVSSYIFREILILMHPFIPFVT

SEQ ID NO: 191768 - protein, 258 aa, Unknown
  Bacterial polypetide isolated from the Sargasso Sea
ECKKQAKEFYSKDVELKRDEDVLDTWFSSGLWPFATLGWPEKTPEVEKFYPTSVLVTGFDIIFFWVARMIMMGTQFLDKEPFKNIYVHALVRDEKGQKMSKSKGNVIDPLELIEKYSADALRFTLLSMASPGRDVKLSEDRVKGYRNFLNKVWNANNFLRQNECDFSDIRKPENLKLTINKWILSELVKTKNETENSLKNYRFDEAAKNIYQFVWHSFCDWYLELSKTVFNSNNEEEIKELRQTSSYVFREILIILHP

SEQ ID NO: 191769 - protein, 279 aa, Unknown
  Bacterial polypetide isolated from the Sargasso Sea
DNLGLLTKIEDYKHTVPFSDRGKVPIEPLLSTQWFLKMDDISQGCLNEIDSKKPSFMPPRWEKVYKDWLENINDWCISRQLWWGHQIPAWYVLDYSQDSIEQNTPYVVARNKEDALIEANKKFGLNIKLVRDKDVLDTWFSSGLWPFSTLGWPNTNDPDFKKWYPNSVLVTGFDIIFFWVARMTMMGNTFTNNIPFKDVYIHGLVRDENNKKMSKSSGNGIDPILLIDKYGSDALRFALIREVAGAGQDIRLDFDRKKDTSSTVEASRNFANKLWNATK

SEQ ID NO: 191770 - protein, 276 aa, Unknown
  Bacterial polypetide isolated from the Sargasso Sea
AINEEEAKADAKKHYNKDVELIRDLDVLDTWFSSGLWPFATLGWPDEKEFVEKFYPTSVLVTGFDIIFFWVARMIMFGTEFLHKEPFKDIYVHALVRDEKGQKMSKSKGNVIDPLDLIEKYSADALRFTLLSMASPGRDVKLSEDRVKGYRNFLNKIWNANNFLIQNECSFNNVEKPNNLKVNINKWIYSEFLTKKDEIQKNIKGYRFDEAAKNAYQFVWHSFCDWYLELSKTILFSDNQDSIKEVRNVSSFIFREILIILHPFIPFITEEIGLKI

SEQ ID NO: 191771 - protein, 155 aa, Unknown
  Bacterial polypetide isolated from the Sargasso Sea
MDKRFDSNYIEKKWYKRWLKSGAFASNNQSSKEPYVIMMPPPNVTGSLHIGHALTFTIQDILIRFHRMQGLDVLWQPGTDHAGIATQMVVEREIAKSNLTRHDLGREKFVEKVWEWKEKSGGEITNQLRALGASADWEKERFTMDEGLSKAVISV

SEQ ID NO: 191772 - protein, 256 aa, Unknown
  Bacterial polypetide isolated from the Sargasso Sea
KKINDRWVEAHAFRSGKDSEKGKPPFSIMIPPPNVTGSLHIGHAFNNTIQDVLVRYHRMNGYDVLWQPGQDHAGIATQMVVERELEKKNKSRQQMGREKFLEEVWNWKEKSGNTIIDQLKRLGASCDWSRNRFTMDPEFHKAVIKVFVDFYNKGLIYKGKKLVNWDPKFQSAISDLEVEQIEVRGKIWELKYFLEEGTFNFGVETDENGVVLKRIPMDHVVIATTRPETLLGDTAVIVNPSDERYRDLIGKSVILP

SEQ ID NO: 191773 - protein, 293 aa, Unknown
  Bacterial polypetide isolated from the Sargasso Sea
LETGCLKVTPAHDPNDYEIGLRHNLEIVDTIDLDGKLNAKCEIEKYTGEDRFKVRKMIVKDLRESGILIKEEEFITKIGRSERTNSVVEPKLSLQWFIKMKEISKQAHNAVMDDEIRLFPSKFKNTYNHWMENVRDWNISRQLWWGQQIPAYYYGEGENDFVVAENLELALEEAIKATGNSELSAKDLRQDEDVLDTWASSNLWPIAVFDGFNEKCFDPKTGKIDKRKNKDLNFFYPTQALVTAPEILFFWVARMVIAGYEYLDERPFENVYLTGIVRDKQRRKMSKSLGNSP

SEQ ID NO: 191774 - protein, 237 aa, Unknown
  Bacterial polypetide isolated from the Sargasso Sea
TAAMESIDEIPEKYWGLDRYDARRQILGDLEAKGLVEREEVLTNVVPHGDRSGVVIEPWLMDQWYVDAEKLAAPAIKAVEDGRTKFVPERWGKTYFEWMHNIQPWCISRQLWWGHRIPAWYGPDDTAFVEESEESAIAVATAHYGKTVELRRDEDVLDTWFSSGLWPFSTLGWPKSNTELKRYYPGEVLVTGFDIIFFWVARMMMMSMHFMNGKVPFKEVYIHALVRDEKGQKMSKS

SEQ ID NO: 191775 - protein, 281 aa, Unknown
  Bacterial polypetide isolated from the Sargasso Sea
SETLLANKYNSSKVEDKWYKYWIEKKYFHADSASEKEPYTIVIPPPNVTGMLTVGHVLNNTIQDILIRKARMEGKEACWIPGTDHASIATETKVIKMLEEKGINKNDLSREEFLEHAWEWKEKYGGIIINQLKKLGCSCDWERERFTMDEGYSRAVLESFVRLYEKGFIYKGHRLVNWCPVSKSAISDEEVIHKEIDGHLWYFRYPIHGEDNYLVVATTRPETMLGDTAVAVNPNDKRYKKHIGKNVELPLVGRKVPIISDDYVDPEFGTGCVKITPAHDP

SEQ ID NO: 191776 - protein, 315 aa, Unknown
  Bacterial polypetide isolated from the Sargasso Sea
IHDWCISRQLWWGHRLPMYTCKACSHVHCEEDMPEQCEKCSSRDLLQDDDVLDTWASSWLWPFAILNWSEKASKGNEELNYFFPTDIVVTGPDIIFFWVARMVMASKYFLKKTPFKVAYFTPIIRDAKGQKMSKSLGNSPDVYSLIDTFGADALRFAVINQIVTGQDMLWQDNSCDLGKHFTHKIWNLTKFLTMNATKLKLSFCDCSYEKLESSDTTLSLWIKSEFLATVKKLEDAIKNYEFSAYTSSLYDFIWFVFCDWFVELLKPSLKENNEKTIETFKTAMCLFDGVLRLCHPIMPYLTEEIWQSLADGRKD

SEQ ID NO: 191777 - protein, 266 aa, Unknown
  Bacterial polypetide isolated from the Sargasso Sea
TIATTRPETMLGDTAIAVNPKDNRYKSLVNKFVIIPLVERKIKIIEDDYADPEQGTGAVKITPAHDFNDYEVGQRNNLEILNIFTSDGKINENAPKEFIGLDRFEARKRLLKKLKEGDFLVKEENIKNKIPYGDRSNSIIEPFLTEQWFADAKKLSVKAKEVVNNKKTNFFPENWSKTYFQWMDNIEPWCISRQLWWGHQIPAWYGPDKKIFVAINEDEAKADAKKHYNKDVELIRDPDVLDTWFSSGLWPFATLGWPDEKEFVEK

SEQ ID NO: 191778 - protein, 244 aa, Unknown
  Bacterial polypetide isolated from the Sargasso Sea
MDKRYEPLIIEEKWSELWAKNNLGKNNSSQTFSQVIPPPNVTGTLHMGHSFQYSIMDFYARYNHLNDANTHWQIGTDHAGIATQMVVENNLSRENIDKNDLGREDFVKKVWEWKEFSENKITGQIKRLGNSVDWSNYRFTLDEGFNEAVLKAFVELYRKEKIYRGYRLVNWDPSLKTAVSDLEVVRQEKKGLIWYIKYPIIGSDDFVTVATTRPETMFGDMAIAVNPKDKRYKDIMEKKLSSHL

SEQ ID NO: 191779 - protein, 242 aa, Unknown
  Bacterial polypetide isolated from the Sargasso Sea
AHDFNDYDVGQRNKLDIINVFTKEGKINTNAPQDYIGLDRFDARKKLLEELKEKDFFVKEENIKNKVPYGDRSNSVIEPFLTEQWFVDAKKLAIKAKKIVKSKKTNFFPTNWSKTYFQWMNNIEPWCVSRQLWWGHQIPAWYGPDKKIFVATNEIDAKKQAKRFYKKDVEIIRDPDVLDTWFSSGLWPFATLGWPDKKDFVKKFYPTSVLVTGFDIIFFWVARMMMFGMEFLNKEPFKDIYV

SEQ ID NO: 191780 - protein, 277 aa, Unknown
  Bacterial polypetide isolated from the Sargasso Sea
EKIKNKVPYGDRSNSIIDPYLTEQWFADAKKLSIKAKEIVNNKTTNFFPVNWTKTYFQWMDNIEPWCISRQLWWGHQIPAWYGPDGEIFVDETEEGANKLAKEHYKKDVELIRDPDVLDTWFSSGLWPFATLGWPENNEYLEKFYPTSVLVTGFDIIFFWVARMIMFGMEFQNKEPFKNIYVHALVRDEKGQKMSKSKGNVIDPLELIEKYSADALRFTLLSMASPGRDVKLSEDRVKGYRNFLNKIWNANNFLIQNDCKFKNIKTPNDLKLNINKW

SEQ ID NO: 191781 - protein, 280 aa, Unknown
  Bacterial polypetide isolated from the Sargasso Sea
KTYFQWMNNIEPWCVSRQLWWGHQIPAWYGPDKKIFVGTNETDAKKQAKKFYKKDVEITRDPDVLDTWFSSGLWPFATLGWPDKKDYVKKFYPTSVLVTGFDIIFFWVARMMMFGMEFLNKEPFKDIYVHALVRDEKGQKMSKSKGNVIDPLDLIEKYSADALRFTLLSMASPGTDVKLSEDRVKGYRNFLNKLWNANNFLITNKCDFKKTDKAPKTTLNINKWIYSELIEIKNKIQKNIEDYRFDEAAKNAYQFAWHSYCDWYIELSKTILYSDDKKAQ

SEQ ID NO: 191782 - protein, 271 aa, Unknown
  Bacterial polypetide isolated from the Sargasso Sea
WDTVLKTAISDLEVDQREVNSKLYYINYPIEGTSEFITIATTRPETMLGDTAVAVNPKDKRYKKFVSKNVVLPLVGRKIKIITDNYADPEQGTGAVKITPAHDFNDYNVGVRNKLEILNIFTDDGKINNNAPSEFIGLDRFEARKKILTSLAEKQLLVKEENIKNKVPYGDRSNSIIEPYLTEQWFVDAKKLSVKAKKIVKSNKTKFYPGNWSKTYFQWMNNIEPWCISRQLWWGHQIPAWYGPDKKIFVGKNESEVKKIAKKYYKKDTKL

SEQ ID NO: 191783 - protein, 235 aa, Unknown
  Bacterial polypetide isolated from the Sargasso Sea
MQDETYEPLAIEKKWQESWESANKFVPVGSDKKFSIVIPPPNVTGSLHMGHALEHSIIDVITRIKRLQGYETLWVPGTDHAGIITQLLVENELSEKGVQKEDIGRENFISKVWEWKEKSGENISTQMRKLGMSCDWSRERFTMDEGLSTAVREVFIKLYEDGLIYKGTRMVNWDTELMSAVSDLEVTLNPEKGKLWSIKYKTEDSFLTISTTRPETLLGDTAVAVNPDDERYKNL

SEQ ID NO: 191784 - protein, 266 aa, Unknown
  Bacterial polypetide isolated from the Sargasso Sea
PGLLEEKFYKRWEKSGGFAADPGSSKKPYTIMMPPPNVTGSLHMGHGLTFSLQDILIRYHRKTGRDTLWQPGTDHAGIATQMVVERQLAEDGVSRQDLGRSKFLEKVWDWKNESGGTITEQLRSLGASPDWEREKFTMDPELSIAVSQVFVKLYKQGLIYRDKRLVNWDPKLLTAISDLEVQQVETKGKLWHFKYPIEACQDEFITVATTRPETMLGDTGIAVHPDDPRYKKFVGKKAVLPLVGRLIPVVADEYSDMEKGSGAVKI

SEQ ID NO: 191785 - protein, 286 aa, Unknown
  Bacterial polypetide isolated from the Sargasso Sea
NDNIKFHPKKLKNMYRAWMENINDWCISRQLWWGHQIPAYYLPSGEFVVAETKEKAYIKAKEIDGKIKMDELIQDEDVLDTWFSSWLWPISVFDGINNPRNKEINYYYPTTDLVTAPEIIFFWVARMIISGYEYRNEMPFKNVYFTGIVRDKKRRKMSKSLGNSPDPIELMKKYGADGVRAGMLFSAPAGNDLLFDEKLCEQGRNFSNKLWNAFRLIKSFEISSDGSDQSLAISWINSRFNEVLDQVEDHFSKYRISDALLSLYTFIWDDFCSWYLEIIKEKSISK

SEQ ID NO: 191786 - protein, 299 aa, Unknown
  Bacterial polypetide isolated from the Sargasso Sea
LSIKAKEIVNNKTTNFFPVNWTKTYFQWMDNIEPWCISRQLWWGHQIPAWYGPDGEIFVDETEEGANKLAKEHYKKDVELIRDPDVLDTWFSSGLWPFATLGWPEKNEYLEKFYPTSVLVTGFDIIFFWVARMMMFGMEFQNKEPFKNIYVHALVRDEKGQKMSKSKGNVIDPLELIEKYSADALRFTLLSMASPGRDVKLSEDRVKGYRNFLNKIWNANNFLIQNDCKFENIKTPNDLKLNINKWIFVEFTNTNEKIKKSIDSYRFDEAARIAYQFVWHSFCDWYLELSKTVFYSENN

SEQ ID NO: 191787 - protein, 298 aa, Unknown
  Bacterial polypetide isolated from the Sargasso Sea
DYADPEQGSGAVKITPAHDFNDFEVGRRQKLKSINIFTEDGKINNNAPKEYIGLDRFEARKKIIDKLKELQVFEKEETIKNKVPYGDRSNSIIEPFLTEQWFCDAKKLSIKAKQIVKHKKTNFFPSSWSKTYFQWMNNIEPWCISRQLWWGHQIPAWYGPDRKIFVAENQKKAETQAKKFYRKKVNLKRDPDVLDTWFSSGLWPFATLGWPSKNYFLKKFYPTSVLVTGFDIIFFWVARMMMLGMQFLNKEPFKEVYVHALVRDEKGQKMSKSKGNVIDPLVLIDSYSADALRFTLLS

SEQ ID NO: 191788 - protein, 292 aa, Unknown
  Bacterial polypetide isolated from the Sargasso Sea
PPNVTGMLTVGHVLNNTIQDILIRKARMEGREACWIPGTDHASIATETKVVGMLQEKGINKKDLSREEFLKHAWDWKEKYGGIIISQLKKLGCSCDWEKERFTMDEEYTKSVLSAFVKLYEKGLIYKGYRLVNWCPISKSAISDEEVIHKEKNGYLWYFRYPIKNSNEFVIVATTRPETMLGDTAVAINPEDNRYQHLIGQNIILPIVGREIPIIADEYVDPEFGTGCVKITPAHDPNDFLIGEKHNLEFINIMNEDASLNSNVPIKYVGMTREDARKEVVKDIDAEGLLDK

SEQ ID NO: 191789 - protein, 310 aa, Unknown
  Bacterial polypetide isolated from the Sargasso Sea
TNKVGFSERGDVPIEFYMSRQWFMKMSELAKPAINAVNEGKINFHPNHWSKTYNHWMNNIKDWCISRQLWWGHQLPVWYNKTNNAEIHVSVKEPDDIENWVQDPDVLDTWASSWLWPIGVHGWPDENDNLKKFYPTDTLVTGPDIIFFWVARMVMSGYEFRGEIPFRDVYFTSILRDAKGKKLSKSLGNSPDPFDLFEEYGTDAVRFGTMLMAPQGLDVLFAKERLEVGRNFMNKLWNACRFIQLNIPEQWNDDIELDFKNLDLPEKWILEQLSETINNFNNQIDRFYFNEAAKIIYDYTWNDFCDWYIE

SEQ ID NO: 191790 - protein, 242 aa, Unknown
  Bacterial polypetide isolated from the Sargasso Sea
ETMMGDTAVAVNPKDERYVNLVGKNILIPIVNRTVKIISDNYADPEQGSGAVKITPAHDFNDYEVGKRNKLETINIFEENGKINKNGIKEFHGLDRFEARKLIIKKLKDKGSLVKIENIKNKVPYGDRSNTIIEPLLTEQWFVDAKKLSKKPIKIVKDGKTTFFPSNWSKTFFQWMNNIEPWCISRQIWWGHRIPAWYDENGNIFVAESEKDAVKLAKKKNKNKQFKLRQETDVLDTWFSSA

SEQ ID NO: 191791 - protein, 284 aa, Unknown
  Bacterial polypetide isolated from the Sargasso Sea
YVLQTALSDLEVTSEEETGSLWYFDYPIENGSFITVATTRPETMLGDSAVAVNPEDERFKELIGQFVILPITDRKIPIIEDSYVDSDFGTGCVKITPAHDFNDFEIGKRHGLEVINILNLDGTLNEFVPEKYRGLTTTEARKEVLNEMESLGRLNKEEPHKIQIPKSQRSDSVLEPLITNQWFVDVKKMSKEAIRVVQENETGFIPKNWENTYFDWMNKIQDWCISRQLWWGHRIPAWYDKEENVYVGKSEDEVRQKYDLKDIELHQDEDVLDTWFSSALWTFS

SEQ ID NO: 191792 - protein, 286 aa, Unknown
  Bacterial polypetide isolated from the Sargasso Sea
VAVNENEAIKQAKKHYKKIVKLTRDPDVLDTWFSSGLWPFATLGWPDKKDYVKKFYPTTVLVTGFDIIFFWVARMIMFGMEFLNKEPFKDIYVHALVRDEKGQKMSKSKGNVIDPLDLIEKYSADALRFTLLSMASPGTDVKLSEERVKGYRNFLNKLWNANNFLITNKCDFNKTDKAPKTTLNINKWIYSELISIKNKIQKNIEDYRFDEAAKNAYQFAWHSYCDWYIELSKTILYSEDKKAKKEVKEVSAYIFKQILVMLHPFIPFVTEEIWLKNKFDKSNKNF

SEQ ID NO: 191793 - protein, 265 aa, Unknown
  Bacterial polypetide isolated from the Sargasso Sea
EINLPITHRKIQIIADQYVDPNFGSGCVKITPAHDFNDYDVGKRHGLELINIFTENATLNDQTPKRYEGLDRFDARKKIVEELSNLGLIEKIEEHTSAIPRGERTGEIVEPYLSDQWFVSAGLLAENAIKVVENGEIDFVPKNTENIYFSWMRSIQDWCISRQLWWGHQIPAWHDQEKNIFVGRSEEEVRAKYSLAENVKLSRDKDVLDTWFSSALWTFSTLGWPEKTKELETFHPTSVMVTGHDIISLWVSRMIMMSLYFLEKV

SEQ ID NO: 191794 - protein, 197 aa, Unknown
  Bacterial polypetide isolated from the Sargasso Sea
MAKTYDPAGTEARWQQAWEDQGAFHPDPKAPGEPFSVVIPPPNVTGSLHMGHAFNTALIDTIVRYQRLAGKNVLCLPGTDHASIAVQTILEKQLKQEGKTRHDLGRDAFLERAWEWKAESGGRIVGQLQRLGYSVDWKRQRFTLDEGLSEAVKEAFVRLHEQGLIYRGEYLVNWCPASGSAVSDLEVEMKEVDGHLW

SEQ ID NO: 191795 - protein, 216 aa, Unknown
  Bacterial polypetide isolated from the Sargasso Sea
MDNIEPWCISRQLWWGHQIPAWYGPDGKIFVAENEDECKKHAKELYSKDVELKRDEDVLDTWFSSGLWPFATLGWPEKTPEVKKFYPTSVLVTGFDIIFFWVARMIMMGTEFLKEEPFKNIYVHALVRDEKGQKMSKSKGNVIDPLELIEKYSADALRFTLLSMASPGRDVKLSEDRVKGYRNFLNKVWNANNFLRQNECDFSDIRKPENLKINNQ

SEQ ID NO: 191796 - protein, 288 aa, Unknown
  Bacterial polypetide isolated from the Sargasso Sea
KKIFVELNESDAKKSAKKYYKKDVKLVRDNDVLDTWFSSGLWPFATLGWPNKNEYLKKFYPTTVLVTGFDIIFFWVARMMMFGMEFLNKEPFKDIYVHALVRDEKGQKMSKSKGNVIDPLDLIQKYSADALRFTLLSMASPGTDVKLSEDRVKGYRNFLNKLWNANNFLIQNKCNLKNAKKLPKLKVNINKWIYFELLETSNLIKKNIEDYRFDEAAKNAYHFAWHKYCDWYLELSKTIFFSDNLKAKNEVKEVSAFVFKEILIMLHPFIPFVTEKIWLTNKFDNKNK

SEQ ID NO: 191797 - protein, 268 aa, Unknown
  Bacterial polypetide isolated from the Sargasso Sea
VGRKIPILADEYVDMEFGTGCLKITPGHDFNDYEIGKKYSLHEVDGQVKTSDAASDFEPINIFNEDAWSNENVPEPFSNLDRFKVRKAVLEKLKELNLLEKEEKYHISVPRGERSNIVIEPRLSHQWYVKTEEMAARANEAVNKGDIRFHPGNWVKTYFNWMNNIEDWCISRQIWWGHRIPAWYDSDNNVYVGYSEKEVRQFYKLDDRKLSQDEDVLDTWFSSSLWPFTSLGWPEKTEDFKKYFPTSLLVTGYDIIFFWVARMMMMSL

SEQ ID NO: 191798 - protein, 219 aa, Unknown
  Bacterial polypetide isolated from the Sargasso Sea
MQLDKFFDFLKDEKNLYSQWEQSNCFKPQKGGAPYSIMMPPPNVTGSLHMGHALTFTIQDILIRYHRMKGMEVLWQAGTDHAGIATQMVVERKLSESNLDRRSLGREKFIEKVWEWKKESGGQISNQLRRLGASADWSRERFTMDEGLSNAVKKVFVNLFNDGIIYKDKRLVNWDPKLLTAISDLEVEQRDTEGSLWHIKYPIDENNHIIVATTRPETM

SEQ ID NO: 191799 - protein, 274 aa, Unknown
  Bacterial polypetide isolated from the Sargasso Sea
MVYISSIWWGHRIPAWYDENNNVFVAENKKDALTLAKKKNKNKKVKLRQETDVLDTWFSSALWPFATLGWPTKTKEFLKFYPTSVLVTGFDIIFFWVARMLMMGNYFNKDTPFHKIYVHALVRDEKGQKMSKSKGNVIDPLELIKEYGADSLRFTLISMASPGRDVKLSKDRVTGNRNFITKIWSANNFLNMNNCKLNKKVNIKSIKLPINQWIFNEYIKTQNIVSKNIEIFRFDEAAKHVYQFVWHSYCDWYLEFLKPIFNSKNQAEIKEAKL

SEQ ID NO: 191800 - protein, 291 aa, Unknown
  Bacterial polypetide isolated from the Sargasso Sea
AVNPKDERYINLVGKFAILPIVGRKLKIFQDEYADPEQGSGAVKITPAHDFNDFNIGERHNLEKINIFTEDGKINKNAPKDFVGMDRFEARKKIIEKLLELEILIKEENIKNKVPYGDRSNSIIEPYLTEQWFVDAKKLSVNAKKIVKNKTTTFFPENWSKTYFQWMNNIEPWCISRQLWWGHQIPAWYGPDKKIFVAESEKKAQSDAKRFYKKKVKIIRDPDVLDTWFSSGLWPFATLGWPTSNYNLKRFYPTSVLVTGFDIIFFWVARMMMLGMEFLKKEPFKEIYVHA

SEQ ID NO: 191801 - protein, 263 aa, Unknown
  Bacterial polypetide isolated from the Sargasso Sea
MDKRFDSKSIEDKWYKIWLDSGAFRSDSSSTKKPYVIMMPPPNVTGSLHIGHALTFTIQDILIRFHRMQGFDVLWQPGTDHAGIATQMVVERELAKLNLTRHSLGREKFVEKVWEWKEKSGGEITNQLRALGASPDWEKERFTMDDGLSKAVNLVFVKLYKEGLIYRDKRLVNWDPKLFTAISDLEVDQKEMQGKFWYFKYPIEDSDEFLTIATTRPETMLGDTAVAVNPEDDRYKYLKGKNVILPIINRPIPIIFDNYSDPE

SEQ ID NO: 191802 - protein, 261 aa, Unknown
  Bacterial polypetide isolated from the Sargasso Sea
YNDYDVGKRNNLELINIMNKDGTLNKNVPKNYQNLDRFEAREKLIKELNDLEQIEKIEDIKHTVPFGDRSGVVVEPLLTKQWFVDAKKIAKNAIVKVKNKETVFYPENWSKTYFQWMENIEPWCISRQLWWGHQIPAWYTKNNEIIVAENKKQAEKIAKKKYKQKKVLLEQDKDVLDTWFSSALWPFATMDWPKKNYELKKYYPSSVLVTGFDIIFFWVARMMMMGLFFMKKVPFKKVYVHALVRDEKGQKMSKSKGNVID

SEQ ID NO: 191803 - protein, 298 aa, Unknown
  Bacterial polypetide isolated from the Sargasso Sea
MLRLIQCSKKYIGLSREDAREAVVSDLQLLGLLDKKEEHVNNIGFSERGDVPIEFYMSEQWYMKMSELAKPALDAVKNGHIKFHPDHWTKTYDHWMENIRDWCISRQLLWGHQIPVWYHKSDKQKIHVSVGGPSDPENWIQDNDVLDTWASSWLWPLGVHSWPDEDENLKKFYPTDTLVTGPDIIFFWVARMIITGFEFKAEVPFKDVYFTSILRDETGKKLSKSLGNSPDPFDLFDEFGTDAVRFGTMLMAPQGLDVLFSKERLEVGRNFMNKLWNACRFIQLNLGEKWDSEVHLDY

SEQ ID NO: 191804 - protein, 187 aa, Unknown
  Bacterial polypetide isolated from the Sargasso Sea
MDKRYEPLIIEEKWSELWAKNNLGKNNSSQTFSQVIPPPNVTGTLHMGHSFQYSIMDFYARYNHLNDVNTHWQIGTDHAGIATQMVVENNLSRENIDKNDLGREDFVKKVWEWKEFSENKITEQIKRLGNSVDWSNYRFTLDEGFNEAVLKAFVELYRKEKIYRGYRLVNWDPSLKTAVSDLEVVRQ

SEQ ID NO: 191805 - protein, 305 aa, Unknown
  Bacterial polypetide isolated from the Sargasso Sea
EARKLIIKKLKDKGSLVKIENIKNKVPYGDRSNTIIEPLLTEQWFVDAKKLSKKPIKIVKEGKTTFFPSNWSKTFFQWMNDIEPWCISRQIWWGHRIPAWYDGNGNIFVAESEKEAVKLAKKKNKNKQFKLRQETDVLDTWFSSALWPFATLGWPKKTEELNKFYPTSVLVTGFDIIFFWVARMLMMGNYFRKNTPFHKVYVHALVRDEKGQKMSKSKGNVIDPLDLINEYGADSLRFTLISMASPGRDVKLSKDRVTGNRNFITKIWSANNFLKLNNCKLDKKINLTLIKLPNKPIGFITRFIK

SEQ ID NO: 191806 - protein, 320 aa, Unknown
  Bacterial polypetide isolated from the Sargasso Sea
ELDKYFPTSVLVTGFDILFFWVARMMMMQLVLVDNVPFKKVYVHALVRDEKGKKMSKSLGNVLDPLELIDQYGADAVRFTLSSMAAMGRDLRLSTDRVIGYRNFGTKIWNAARYAQLNNCESSTNFNPDTVTNSINKWIIFQTTDLKKEVDSALETFRFNDAANHLYSHVWSKFCDWYIEFSKSLFSGDDVKLKNETQLTFAWVLDQCLIMLHPFMPFITEEIWQQNKNRKNMIVHETWPDFQNVLHNDDESQKEINWLIDLIQEIRSARSEVNIPASLKIKLKIVSLNKQFLQCLKNNEIIIKRLARFGSIEHEILIKS

SEQ ID NO: 191807 - protein, 304 aa, Unknown
  Bacterial polypetide isolated from the Sargasso Sea
NVYVGRDEAEVRAKHNLGDANLRQDEDVLDTWFSSGLWTFSTLGWPQQTDYLKTFHPTDVLVTGFDIIFFWVARMIMLSTHLTGQIPFKTVYVHGLVRDGQGQKMSKSKGNVLDPLDIVDGIDLESLVAKRTSGMMQPKLAEKIAKQTRAEFPDGIAAYGTDALRFTNLALASTGRDIKFDMGRVEGYRNFCNKLWNAANFVIENTDDKDTGINGEPVELSPVDRWIISALQRTEADVTRHLDAFRFDLAAQTLYEFIWDEYCAWYLELVKPVLWDENAPIERQRGTRRTLVRVLEVILRLAHP

SEQ ID NO: 191808 - protein, 214 aa, Unknown
  Bacterial polypetide isolated from the Sargasso Sea
MAKTYDPQATEARWQQAWESSGAFHPDPEAPGEPFSLVTPPPNVTGSLHMGHAFNTALIDTIVRFQRMQGKNVLCLPGTDHASIAVQTILEKQLKAEGSSKEELGREGFLERCWAWKGESGGRIVSQLRRLGFSVDWQRERFTLDAGCSQAVIEAFVSLHEQGLIYRGEYLVNWCPASGSAVSDLEVEMKEVDGHLWHFRYPLSDGSGHLEVAT

SEQ ID NO: 191809 - protein, 306 aa, Unknown
  Bacterial polypetide isolated from the Sargasso Sea
NIKNKVPYGDRSNTIIEPLLTEQWFVDAKKLSKKPIKIVKEGKTSFFPSNWSKTFFQWMNEIEPWCISRQIWWGHRIPAWYDNNGNIFVAENEKDAVTLAKKKNGNNQFKLRQETDVLDTWFSSALWPFATLGWPNKTKELNKFYPTSVLVTGFDIIFFWVARMLMMGNYFRNKTPFNKVYVHALVRDEKGQKMSKSKGNVIDPLELINEYGADSLRFTLISMASPGRDVKLSKDRVTGNRNFITKIWSANNFLKLNNCNYNKKINLNSIKLPINQWIYNEFIKTQNLVTKNIEIFRFDEAAKYAY

SEQ ID NO: 191810 - protein, 225 aa, Unknown
  Bacterial polypetide isolated from the Sargasso Sea
KNVILTRDPDVLDTWFSSGLWPFATLGWPNKKEFVKKFYPTTVLVTGFDIIFFWVARMIMFGMEFLKKEPFKDIYVHALVKDEKGQKMSKSKGNVIDPLDLIEKYSADALRFTLLSMASPGTDVKLSEDRVKGYRNFLNKLWNANNFLITNKCNFNKSHTPKIKLNINKWIYSELIEIENKIQKNIEDYRFDEAAKNAYQFAWHSYCDWYIELSKTILYSSDKKA

SEQ ID NO: 191811 - protein, 235 aa, Unknown
  Bacterial polypetide isolated from the Sargasso Sea
AVNPKDERFKSVVGKTVTIPIVGRKIKIIEDDYADPEQGTGALKITPAHDFNDYDVGQRNNLEIINIFTEAGKINENAPENYVGLDRSEARKKILKELKEKEFFVKEENIKNKVPYGDRSNSIIEPFLTEQWFADAGKLSVKAKEVVNTKKTNFFPENWSKTYFQWMNNIEPWCISRQLWWGHQIPAWYGPDEKIFVAENEDDAKQQAKKHYGKDVELNRDPDVLDTWFSSGLWP

SEQ ID NO: 191812 - protein, 302 aa, Unknown
  Bacterial polypetide isolated from the Sargasso Sea
WWGHQIPAWYGPDKKIFVAINEDVAKTEAKKHYNKEVELIRDPDVLDTWFSSGLWPFATLGWPDQKEFVEKFYPTSVLVTGFDIIFFWVARMIMFGTEFLHKEPFKDIYVHALVRDEKGQKMSKSKGNVIDPLDLIEKYSADALRFTLLSMASPGRDVKLSEDRVKGYRNFLNKIWNANNFLIQNECSFNKVEKPNDLKVNINKWIYSEFLTKKDEIQKNIKDYRFDEAAKNAYQFVWHSFCDWYLELSKTILFSDNQKAIKEVRNVSSFIFREILIILHPFIPFITEEIWLKNKLDKNNSD

SEQ ID NO: 191813 - protein, 226 aa, Unknown
  Bacterial polypetide isolated from the Sargasso Sea
MLGDTAVAVHPADNRYKHLIGKFILLPLTDREIPIIGDEFVDMEFGTGCVKVTPAHDPNDFDVAKRHNLKFINIMNEDASLNSEVPKKYINMTREIAREQIVQDLQSIGRLEKIEDYIHKVGFSERGNVPIEYYMSSQWFLKMKELSKPALQAVNDGKINFHPKHWVKTYNHWMENINDWCISRQLWWGHRIPVWYHNQDKDKMHVSIDGPSDPENWKQDEDVLDT

SEQ ID NO: 191814 - protein, 303 aa, Unknown
  Bacterial polypetide isolated from the Sargasso Sea
GDTAIAVNPNDKRYTNLVGKFAILPIVGRKLKIVQDEYADPKQGTGAVKITPAHDFNDFNVGKRQKLKIINIFTKEGKINENAPNKYVGLDRFEARKKILEELLDLQQLIKEENIKNKIPYGDRSNSIIEPYLTEQWFVDAKKLSVNAKKIVRNKKTNFFPENWTKTYFQWMNNIEPWCISRQLWWGHQIPAWYGPDKKIFVAENEKKAYLDSKKFYKKKVKLTRDQDVLDTWFSSGLWPFATLGWPTQNYYLKKFYPTSVLVTGFDIIFFWVARMMMLGMEFLKKEPFKEIYVHALVRDEKG

SEQ ID NO: 191815 - protein, 280 aa, Unknown
  Bacterial polypetide isolated from the Sargasso Sea
ENAPSDYVGLDRFEARKKILNDLGDKLIKEENIKNKVPYGDRSNSVIEPYLTEQWFADAKKLSVKAKKIVKNKKTKFFPPNWSKTYFQWMNNIEPWCISRQLWWGHQIPAWYGPDKKIFVASNYSEAKKLAKKKYKKDVELVRDEDVLDTWFSSGLWAFATLGWPNKNEYLKKFYPTSVLVTGFDIIFFWVARMMMFGMEFLNKQPFKEIYVHALVRDEKGQKMSKSKGNVIDPLILIDKYSADALRFTLLSMASPGRDVKLSEDRVKGYRNFLNKLWNA

SEQ ID NO: 191816 - protein, 222 aa, Unknown
  Bacterial polypetide isolated from the Sargasso Sea
MTKSNNQNTFCHLKTEDKLYKSWMRKKLFSCNPSSKNNKFSMIMPPPNVTGTLHIGHALNMTLQDILSRYWRMNNKDVLWQPGTDHAGIATQNIVEKKLFKEKNVSKNDIGKEKFIAEVWKWKKDSGEKIINQIKKLGASPDWDRLKFTLDKDMSHAVNYAFVELYKKKLIYKDKRLINWDIKLQTAISDLEVELKEVEGVFVFVKYFLENSKDFLVVATTR

SEQ ID NO: 191817 - protein, 160 aa, Unknown
  Bacterial polypetide isolated from the Sargasso Sea
MTTDNRFSKRYSPQDVESELYEGWESGGDFSPCGTGPSFSMVIPPPNVTGELHMGHSLNVTIQDIMARYKRLQGFRVLWIPGTDHAGIATQNVVEKQLNQDGKSAASMGRESFLNHVWEWKTTYGNRISHQIRRLGASVDWNYERFTMDDGCKQAVSKHF

SEQ ID NO: 191818 - protein, 266 aa, Unknown
  Bacterial polypetide isolated from the Sargasso Sea
IEPWCISRQLWWGHQIPAWYGPDKKIFVELNESDAKKSAKKYYKKDVKLIRDNDVLDTWFSSGLWPFATLGWPNKNEYLKKFYPTTVLVTGFDIIFFWVARMMMFGMEFLNKEPFKDIYVHALVRDEKGQKMSKSKGNVIDPLDLIQKYSADALRFTLLSMASPGTDVKLSEDRVKGYRNFLNKLWNANNFLIQNKCNLKNAKKLPKLKVNINKWIYYELLETSNLIKKNIEDYRFDEAAKNAYHFAWHKYCEWYLELSKTILFSD

SEQ ID NO: 191819 - protein, 296 aa, Unknown
  Bacterial polypetide isolated from the Sargasso Sea
ALHKVEENIHSVPYGDRSGEIIEPLLTDQWFVNAKQLSMSAIAKVKEKETKFIPKSWEKTYFEWMENIQPWCISRQLLWGHRIPAWYGPDGKIFVAQSEAEAYQDAQKHFGKTVELVQDEDVLDTWFSSALWPFSTLGWPEQTSELKKFYPTSTLVTGFDIIFFWVARMMMMALYFTDKVPFSEVYVHALVRDEKGQKMSKSKGNVIDPLLLMDEFGADSLRMTLCSMAAQGRDIKLSKQRVEGYRNFITKIWNAVKLCEINKCNYDDYSIENTKNIFNLWILNELEKCRDKVENS

SEQ ID NO: 191820 - protein, 269 aa, Unknown
  Bacterial polypetide isolated from the Sargasso Sea
MSEISKAYNPKTVEAHWSKQWIEQKSFKATLDQEKEPYAIMIPPPNVTGMLHMGHVLDNTLQDILIRRARLEGKSVLWQPGTDHAGIATQTKVEKQLRASTGESKYDLGREAFVKKIWDFRDESGGIILNQLQKLGASCDWERTRFTLDEDYSKAVLNAFVLLYKRGFVYRGKRMVNWCPATQTAISDEEVNMKPQNGILYKMRYELVEADGERTHLEISTTRPETIMGDSAVAVHPEDERYKHLIGQFVWRPYPKGKIPIIGDSYVDR

SEQ ID NO: 191821 - protein, 283 aa, Unknown
  Bacterial polypetide isolated from the Sargasso Sea
VGRKIKIIKDNYADPDQGTGALKITPAHDFNDYDVGQRNKLDIINIFTEEGKINDNAPSDYIGLDRFDARKKLLNELKEKDFFVKEENIKNKVPYGDRSNSIIEPFLTEQWFVDAKKLSIKAKKIVKTKKTNFFPGNWSKTYFQWMNNIEPWCISRQLWWGHQIPAWYGPDKKIFVAINEKEANKLAKKHYKKDVELIRDPDVLDTWFSSGLWPFATLGWPDEKEFVKKFYPTTVLVTGFDIIFFWVARMIMFGMEFLNKEPFKDIYVHALVRDEKGQKMSKS

SEQ ID NO: 191822 - protein, 297 aa, Unknown
  Bacterial polypetide isolated from the Sargasso Sea
ETLFGDTAVAVNPFDERYSHLLKSKIVIPLINKEVSIIADEAVELGFGTGALKVTPAHDINDFEIGIRHELDTVNIMNPDGTLNEFSGKYEGKDRMVVREEATIELETLNLLEKIEPIIHSIGRCDRCDTIVEPLVSKQWFLEMKPLAEPAIQAVNNGDIKIIPERFSKIYLNWMNNIRDWCISRQLWWGHRIPVWYCNLCDGMTVSITDPQSCSSCKSKDIYQDSDVLDTWFSSGLWTHSTLGWPNSTKDLNKFYPTSVMETGYDILFFWVARMIMFGIENMGVSPFHTIYLHGLL

SEQ ID NO: 191823 - protein, 291 aa, Unknown
  Bacterial polypetide isolated from the Sargasso Sea
GLWPFATLGWPEKTAEVEKFYPTSVLVTGFDIIFFWVARMIMMGTEFLKEEPFKNIYVHALVRDEKGQKMSKSKGNVIDPLELIEKYSADALRFTLLSMASPGRDVKLSEDRVKGYRNFLNKVWNANNFLRQNECDFSDIKKPENLKLTINKWILSELVKTKNETENSLKNYRFDEAAKNIYQFVWHSFCDWYLELSKTVFNSNNEEDIKELRQTSSYIFREILIILHPFIPFVTEEIWLNNKLDKNGGEFLMHANWLKGDYHEKKSYDEINNIINFITSIRSFKNELNIS

SEQ ID NO: 191824 - protein, 211 aa, Unknown
  Bacterial polypetide isolated from the Sargasso Sea
DPTKGTGAVKITPAHDFNDWEVGERHDLRVINIFDNSANIAIEANEDFLNGIDPSVDIFQLNGLERFEARKKILQILNEQGFVKGEKRDLHFVPHGDRSKVVVEPFLTTQWFVDSKKIVKEAIDVVKKNEVEIIPERDKKVYFNWLENIEPWCISRQLWWGHQIPVWYDDEGNEYCAENLKEAQKLAGHDNIYQDPDVLDTWFSSGIWPIG

SEQ ID NO: 191825 - protein, 250 aa, Unknown
  Bacterial polypetide isolated from the Sargasso Sea
EGSLWHIKYPIDNNNFIVVATTRPETMLGDSAVAVHPDDSRYKDLIGNYCNLPLVGRELPIIADEYADPEKGSGAVKITPAHDFNDFEVGKRHQLEFINVFDQFAKINDNAPKKYQGLDRFEARKLILGELKDLGLLIKEEKQDMVVPYGDRSGVIIEPWLTDQWFCNAKKLSIDPIKSVKEAKTNFVPKNWENTFFNWMENIQPWCISRQLWWGHQIPAWYGPDKKCFVALSVDDANMMANKHYGKEVK

SEQ ID NO: 191826 - protein, 236 aa, Unknown
  Bacterial polypetide isolated from the Sargasso Sea
PIIADEYADPDKGSGAVKITPAHDFNDFEVGKRHNLEFINIFDQFAKVNQNAPTKFQGLDRYEARNLILEELDKLSLLIKEEKQQMVIPYGDRSGVVIEPWLTDQWFCNAKKLSIDPINSVKLNKTNFVPQIWEKTFFNWMENIQPWCISRQLWWGHQIPAWYGPDNKIFVSLSIEDAKLMANKHYGKNVDLKQDEDVLDTWFSSALWTFSTLDWPNQTYELDRFYPGNVLVTGFD

SEQ ID NO: 191827 - protein, 314 aa, Unknown
  Bacterial polypetide isolated from the Sargasso Sea
LENWSKTYFQWMNNIEPWCISRQLWWGHQIPAWYGPDRKIFVAENQKKAEQQAKKFYKKNVNLKRDPDVLDTWFSSGLWPFATLGWPSKNYFLKKFYPTSVLVTGFDIIFFWVARMMMLGMQFLNKEPFKEVYVHALVRDEKGQKMSKSKGNVIDPLVLIDSYSADALRFTLLSMASPGRDVKLSEQRVKGYRNFLTKIWNVNNFLKVNKCSFDGAIKPKSLKLNINKWIYSELIETKNLTEKFIKNYRFDEAAKTVYKFVWNSYCDWYLELSKTILFSKKNKDIDEVKNTSGQIFQEILILLHPFIPFITEEL

SEQ ID NO: 191828 - protein, 241 aa, Unknown
  Bacterial polypetide isolated from the Sargasso Sea
MKKNYEPKSTEVGIYKRWEDSGFFEAKPDESKEPFCIMIPPPNVTGTLHMGHGFQNTLMDALIRFKRMSGYDTLWQVGVDHAGIATQMVVERQLEVEGTSREEIGREQFEKRVWGWKEKSGNKITQQLRRLGASVDWSREAFTMSDDFSSAVKEVFIKLYDEGLIYRGERLVNWDTVLGTALSDLEVSSEEENGFLWYIDYLTENNNKITVATTRPETLLGDTAIAVNPDDHKFKKLIGKR

SEQ ID NO: 191829 - protein, 307 aa, Unknown
  Bacterial polypetide isolated from the Sargasso Sea
VFVDLFNEGIIYRDKRLVNWDPKLLTAISDLEVEQKEQEGSLWHIKYPIDNNNFIVVATTRPETMLGDSAVAVHPDDSRYKDLIGNYCNLPIVGRELPIIADEYADPEKGSGAVKITPAHDFNDFEVGKRHQLEFINVFDQFAKINDNAPKKYQGLDRFEARKLILGELKDLGLLIKEEKQDMVVPYGDRSGVIIEPWLTDQWFCNAKKLSIDPIKSVKEAKTNFVPKNWENTFFNWMENIQPWCISRQLWWGHQIPAWYGPDKKCFVALSVDDANMMANKHYGKEVKLIQDEDVLDTWFLQHLDLS

SEQ ID NO: 191830 - protein, 90 aa, Unknown
  Bacterial polypetide isolated from the Sargasso Sea
MDKTYQPDRIEQAWYENWEKAGYFKPSGQGDSFCIMIPPPNVTGSLHMGHAFQDTIMDTLVRYRRMQGRNTLWQVGTDHAGIATQMVVER

SEQ ID NO: 191831 - protein, 236 aa, Unknown
  Bacterial polypetide isolated from the Sargasso Sea
MSFDKYEHNNVENKIYDYWEKNELFKPKENSKKFSIVIPPPNVTGSLHMGHALNNSIQDVLTRFHRMNNYETLWQPGTDHAGIATQALVEKKLAKDGVKKNDLGREKFIEKVWEWKNEYGDIIINQLKKLGCSCDWSRNAFTMDENLSKSVLKVFVDLYNKKLIYKAKKLVNWDVVLKTAISDLEVDQREVNSQLYYINYPIENSDKFITIATTRPETMLGDTAIAVNPKDDRLKD

SEQ ID NO: 191832 - protein, 288 aa, Unknown
  Bacterial polypetide isolated from the Sargasso Sea
NAPSDYVGLDLFEARKKILNELKEKEFFVKEENIKNKVPYGDRSNSVIEPFLTEQWFVNAKKLSIKAKQIVKSKKTNFFPENWSKTYFQWMNNIEPWCISRQLWWGHRIPAWYGPDKKIFVATNEADAKKQAKKFYKKDVKITRDPDVLDTWFSSGLWPFATLGWPDKKDFVKKFYPTTVLVTGFDIIFFWVARMMMFGMEFLNKEPFKDIYVHALVRDEKGQKMSKSKGNVIDPLDLIEKYSADALRFTLLSMASPGTDVKLSEDRVKGYRNFLNKLWNANNFLITQ

SEQ ID NO: 191833 - protein, 257 aa, Unknown
  Bacterial polypetide isolated from the Sargasso Sea
WQPGTDHAGIATQALVEKKLANDGIKKNDLGRDKFIEKVWEWKNQYGDIIINQLKKLGCSCDWSRNAFTMDDNLSKSVIKVFVDLYKKDLIYKSKKLVNWDVVLKTAISDLEVDQREVNSKLYHIRYPIENSDEFITIATTRPETMLGDTAIAVNPKDDRYKSLVNKFVTIPLVERKIKIIEDDYADPEQGTGAVKITPAHDFNDYEVGQRNNLEILNIFTSDGKINENAPKEFIGLDRFEARKRLLKKLKEKDFLV

SEQ ID NO: 191834 - protein, 283 aa, Unknown
  Bacterial polypetide isolated from the Sargasso Sea
VIKVFVDLHNKKLIYKAKKLVNWDIVLKTAISDLEVDQREVTSKLYYIKYKIENSSDFITIATTRPETMLGDTAIAVNPNDVRYKKFINRFAILPIVGRKLKIIQDEYADPDQGTGAVKITPAHDFNDFKVGERQKLEIINILSKDGKINANAPVKYQNLDRFEARKKILEELKTLQIFVKEETIKNKVPYGDRSNSIIEPLLTEQWFCDAKKLSIKAMKIVKNKKTNFYPSNWSKTYFQWMNNIEPWCISRQLWWGHQIPAWYGPDKKIFVAENQRDAEIKA

SEQ ID NO: 191835 - protein, 188 aa, Unknown
  Bacterial polypetide isolated from the Sargasso Sea
MNKQYKPREIEEKIYNSWEKTKSFLAKESTSKFSIVLPPPNVTGTLHMGHAFQHTIIDILVRYHRMLGKSVLWQPGTDHAGIATQLVVENRLKSLGKDIKGLSRDEFIDEVWKWKEISGNTIINQTKRLGSSADWSRNRFTMDDDLSENVRDIFIELYDSELIYRGNRLVNWDIKLPTAVSDLEVINE

SEQ ID NO: 191836 - protein, 308 aa, Unknown
  Bacterial polypetide isolated from the Sargasso Sea
ALAFSTLGWPEETAELEKYYPTSALVTGFDIIFFWVARMMMMGLYFTKKVPFNEVYVHALVRDEKGQKMSKSKGNVIDPLVLMDEFGADALRMALCSMAAQGRDIKLSKQRIEGYKNFINKIWNAVKLCELNNCFYQEIDSKKTKNIFNKWILFEYENCRSKTQLALENYRFNEAANELYKFTWNVFCDWYLEFSKVIYLSKNDTDIKETRNITSYVLSNIIIMFHPIMPFFTEHLWHQASNILKNDIVKINKSEWPKTISVDKKDNNKINLLLEFISSIRSTRSEMNVPANAEIDINYSSISNELGT

SEQ ID NO: 191837 - protein, 263 aa, Unknown
  Bacterial polypetide isolated from the Sargasso Sea
GCVKITPAHDFNDFEMGKRHGLEVINILNFDGTLNDKVPDKYQNLNIEDARKLILEDLNTIGQLNKTESYKVQIPRSERSNSILQPLLTNQWFVNVEKLSQEAIRVVKENETEFIPKNWENTYFAWMKDIQDWCISRQLWWGHRIPAWFDKDDNLYVGESEKAVREKYNLDNIELKQDEDVLDTWFSSALWTFSTLGWPKKENLLSRYHPTSVLVTGFDIIFFWVARMIMMTTHFINEVPFKKILIHGLIKDSEGQKMSRSKG

SEQ ID NO: 191838 - protein, 284 aa, Unknown
  Bacterial polypetide isolated from the Sargasso Sea
FTEAGKNKENAPKHYIGLDRSEARKQILKELKEKEFFVKEENIKNKVPYGDRSNSIIEPFLTEQWFADAGKLSVKAKEVVNSKKTNFFPENWSKTYFQWMNNIEPWCISRQLWWGHQIPAWYGPDNKIFVAYNEDEAKQLANKHYGKDVELNRDPDVLDTWFSSGLWPFATLGWPDDKKFVEKFYPTSVLVTGFDIIFFWVARMIMFGTEFLNKEPFKDIYVHALVRDEKGQKMSKSKGNVIDPLDLIEKYSADALRFTLLSMASPGTDVKLSEDRVKGYRNFL

SEQ ID NO: 191839 - protein, 286 aa, Unknown
  Bacterial polypetide isolated from the Sargasso Sea
RPYLTDQWYVKVKPLAEPAIKAVEDGSIKFVPKNWEKTYFEWMRNIEDWCISRQLWWGHRIPAWYDDDGNIFVGYSEKEVREKNNLGERKLKQDEDVLDTWFSSSLWPFSTLGWPEKTERLQKFYPTNVLVTGFDIIFFWVARMIMMGLKFTGEPPFKEVYIHGLVRDSDGQKMSKSKGNVLDPLDLINGITLEDLVTKRTVGLMQPQLAEKIEKSTRQHFPDGINAYGTDSLRFTFASLATQGRDIRFDIGRIDGYRNFCNKIWNATRFVLMNIESQKIDINNNK

SEQ ID NO: 191840 - protein, 279 aa, Unknown
  Bacterial polypetide isolated from the Sargasso Sea
RGKRALWQVGTDHAGIATQMVVERQLTQQGQNRHDLGRDAFLEQVWDWKHTSGGRITEQIRRLGATIDWSRERFTLDEGLSKAVQAAFIQLHREGLIYRGKRLVNWDTKLQTAISDLEVVNREVQGHLWTLAYSVEGHENAVIPIATTRPETLFGDTALAVHPEDPRYQQWIGHQVIVPICQRRIPVIADDSVDTAFGTGAVKITPAHDFNDHAMGQRHGLPTVSILHLDGTLNTEVPPAFQGLSVQAARTQVIHTLEAQGMLLETQTHHHTVPFEIAL

SEQ ID NO: 191841 - protein, 178 aa, Unknown
  Bacterial polypetide isolated from the Sargasso Sea
MEKIYQPDQIETKHYQDWEAQNYFAPGGGPESYCIVIPPPNVTGTLHMGHAFQHTIMDALIRYNRMQGKNTLWQPGTDHAGIATQMVVERLLNQEGKTRHDLGREAFVKKIWEWKEYSGGHICKQMRRLGDSPDWSRERFTMDEGLSEAVQDVFIQLYEEDLIYRGKRLVNWDPVLQT

SEQ ID NO: 191842 - protein, 198 aa, Unknown
  Bacterial polypetide isolated from the Sargasso Sea
MAKTYDPVGTEARWQQAWEDQGAFHPDPKAPGEPFSVVIPPPNVTGSLHMGHAFNTALIDTIVRYQRLAGKNVLCLPGTDHASIAVQTILEKQLKDEGKTRHDLGRDAFLERAWQWKAESGGRIVGQLRRLGYSVDWKRQRFTLDEGLSEAVKEAFVRLHEQGLIYRGEYLVNWCPASGSAVSDLEVEMKEVDGHLWH

SEQ ID NO: 191843 - protein, 324 aa, Unknown
  Bacterial polypetide isolated from the Sargasso Sea
GCSCDWSRNAFTMDENISKSVIKVFVDLYNKNLIYKDKKLVNWDTVLKTAISDLEVDQREVNSKIYYINYPIDGTDEFITIATTRPETMLGDTAIAVNPKDDRFKSFVGKTVSIPIVGRKINIIEDDYADPDQGTGALKITPAHDFNDYDVGQRNNLEIINIFTESGKINENAPKKYIGLDRFEARKKILKELKDKEFFVKEENIKNKVPYGDRSNSIIEPFLTEQWFADAEKLSIKAKEVVNSKKTNFFPENWSKTYFQWMNNIEPWCISRQLWWGHQIPAWYGPDKKIFVANNEEEAKKLAKKHYGQDENLIRDSNVWIHGL

SEQ ID NO: 191844 - protein, 256 aa, Unknown
  Bacterial polypetide isolated from the Sargasso Sea
MSFDKYEHKNVEKNIYDYWEKNKLFKPKENSKKFSIVIPPPNVTGSLHMGHALNNSIQDVLTRFHRMNNYETLWQPGTDHAGIATQALVEKKLAKEGVKKNDLGRDKFIEKVWEWKNEYGDIIINQLKKLGCSCDWSRNAFTMDENLSKSVIKVFVDLYNKKLIYKAKKLVNWDVVLKTAISDLEVDQREVNSQLYYINYPIENSDKFITIATTRPETMLGDTAIAVNPKDDRFKNIVGKLVKIPLANRKIKIITD

SEQ ID NO: 191845 - protein, 293 aa, Unknown
  Bacterial polypetide isolated from the Sargasso Sea
AVIKVFVDLHKKKLIYKAEKLVNWDTVLKTAISDLEVDQREVNSKIYYIRYPIDGTSEYITIATTRPETMLGDTAVAVNPKDKRYKKYVGKTVTIPIVGRKIKIIEDNYADPEQGTGALKITPAHDFNDYDVGKRNKLEIINIFTEDGKVNNNAISSYVGLDRFEARKKILNELKEKDYFVKEENIKNKVPYGDRSNSIIEPFLTEQWFADAKKLSIKAKKIVKNKKTNFFPENWSKTYFQWMNNIEPWCISRQLWWGHQIPAWYGPDKKIFVELNESDARKAAKKFYKKDVK

SEQ ID NO: 191846 - protein, 243 aa, Unknown
  Bacterial polypetide isolated from the Sargasso Sea
MSLDKYSHLETEDQIYSYWEKNNLFKPVKNKKKFSVVIPPPNVTGSLHMGHALNNSIQDLLIRYHRMNNFETLWQPGTDHAGIATQALVEKKLSSENIKKDDLGREKFIEKVWDWKGQYGDIIINQLKKLGCSCDWSRNAFTMDENLSKAVIKVFVDLYKKKLIYKAEKLVNWDTVLKTAISDLEVDQREVNSKIYYIKYPIDGSNEFITIATTRPETMLGDTAIAVNPKDKRYKKYVKKFAV

SEQ ID NO: 191847 - protein, 285 aa, Unknown
  Bacterial polypetide isolated from the Sargasso Sea
WWGHQIPAWYDKDGKVYVGSSEEEIRKENNLDEQVKLKRDEDVLDTWFSSALWTFSTLGWPKSRKLLDRYHPTDVLVTGYDIISLWVSRMLMMTTHFINEVPFKKIFVHGLINDSSGQKMSKSKGNIIDPLDIIDGIDLKSLIEKRISGLMQPKMEEKIKNQTIKEFPEGIKPYGTDALRLTFCSLASGSREVRFDFKRVEGYRNFCNKLWNASRFIQMQLDNFENFERTKPSGILDDWINARMDIAIEKTNDALSDYRFDLATQSIYEFIWYELCDWYIEFCKI

SEQ ID NO: 191848 - protein, 295 aa, Unknown
  Bacterial polypetide isolated from the Sargasso Sea
KAVQEVFVRLYEDELIYRGKRLVNWDPKLHTAISDLEVESKEKQGHMWHLRYPLADGELTADGKDYLEVATTRPETMLGDSAVAVHPDDERYQALIGKYILLPIVNRRIPIVADDYVDMAFGTGCVKITPAHDFNDYEVGKRHNLPMFNVLTLDAAIRASAEVVNSDGTFNKTLDGSLPVRFAGLDRFKARDAIVAEFETLGLLEKIAPHALKVPYGDRSGVVIEPMLTDQWYVAVAPMAKTAIEAVENGSIKFVPQQYENMYFSWMRDIQDWCISRQLWWGHRIPAWYDENGKV

SEQ ID NO: 191849 - protein, 284 aa, Unknown
  Bacterial polypetide isolated from the Sargasso Sea
VKVTPAHDPNDFAIGQRHGLPLITVMAKDGSMNNEAGRFAGLDRFEARKAVVAAMEAQGLLVKVEPHRHSVPYSDRGKVPVEPLLSTQWFVKAEPLAARCREALDQAKPQFVPERWSKVYRDWLTDIRDWCISRQLWWGHRIPAWFVISESGGRYTDTTPYVVARNEAEALEKARTQFGAEAQIEQDEDALDTWFSSGLWPFSTLGWPDQNAADLQRWYPTSLLVTGFDIIFFWVARMTMMAGAFTGQTPFADVYIHGLVRDENNRKMSKSAGNGIDPLLLIDR

SEQ ID NO: 191850 - protein, 282 aa, Unknown
  Bacterial polypetide isolated from the Sargasso Sea
DQSGGNISRQIRRLGSSVDWSRERFTMDDGLSEAVKEAFVRLHEDGLIYRGKRLVNWDTKLHTAISDLEVENHDEKGFLWNLKYPLADGAKTAEGNDYLIVATTRPETMLGDAAVAVNPNDERYQALIGKFVELPLVGRRIPIIADDYCDPEFGTGCVKITPAHDFNDYEVGKRHNLPLLNIFDKNAAVLPACQVFNLDGTLNDSIDGKIPAEYAGLDRFEARKQIVAAFDAAGLLVSVDDHGLKVPKGDRSGTVIEPWLTDQWYVSTKPLAEPAIAAVEDG

SEQ ID NO: 191851 - protein, 311 aa, Unknown
  Bacterial polypetide isolated from the Sargasso Sea
MIRKRRFIKKVWDWKNEFGDIIINQLKKLGCSCDWSRNAFTMDENLSKSVIKVFVELYNKKLIYKSKKLVNWDVVLKTAISDLEVDQREVNSQLYYINYPIENSDKFITIATTRPETMLGDTAIAVNPKDDRFTNLIGKHAIIPLADRKIKIISDDYADPEQGTGAVKITPAHDFNDYEVGLRNKLEVINIFTPDGKINNNSPDKYKGLDRFAARKLIIKDLEEGNFLKKIEKLVNKVPYGDRSNSIIEPYLTEQWFVDAETLSIKAKEVVNNGKTKFFPENWSKTYFQWMDNIEPWCISRQLWWGHQIPL

SEQ ID NO: 191852 - protein, 258 aa, Unknown
  Bacterial polypetide isolated from the Sargasso Sea
MDRFEARKVIVKDLEEQDLLLKVEKKKIVQPFGDRSKVVVEPYLTKQWFVDTKAIVEPAIEAVKDGKTKIFPERDTKTYFNWLENIEPWCVSRQLWWGHQIPVWYDEDGNQYCAVSEDEAKKMAKGKKLIRDPDVLDTWFSSGLWPIGTLGWPEDTTDLKKYFPTSVLVTGFDILFFWVARMMMMQLVLVKQIPFEKVYVHALVRDEKGKKMSKSIGNVLDPIDLINEYGADAVRFTLTSMAVMGRDIKLSTERIVGY

SEQ ID NO: 191853 - protein, 297 aa, Unknown
  Bacterial polypetide isolated from the Sargasso Sea
FGTGCVKITPAHDPNDFLIGERHNLEFINVMNEDASMNENVPPKYQNKDRFIARADIVKDLNDLNLLHKTENYKNKIGFSERGEVPIEFFMSKQWFMKMEDIAKPAINAVDSGEIRFHPEHWVKTYNHWMKNIKDWCISRQLIWGHQIPVWYHKEDNSKLHVSVEGPDDIANWVQEKDVLDTWASSWLWPIGVHNWPDKSKDLDKFFPTNTLVTGPDIIFFWVARMIMTGYEFLGKKPFSDVYFTSILRDDTGKKLSKSLGNSPDPLDLFDEYGTDAVRFGIMLMAPQGLGCSFFQR

SEQ ID NO: 191854 - protein, 286 aa, Unknown
  Bacterial polypetide isolated from the Sargasso Sea
MAPGTDHAGIATQALVERKLEKENLNKNSLGREKFIKKVWEWKNQYGDIIINQLKKLGCSCDWSRNAFTMDDNLSKSVIKVFVELHKKKLIYKAEKLVNWDTVLKTAISDLEVDQREMNSKIYYIRYPIENSSNFITIATTRPETMLGDTAIAVNPKDERYKEYVGKTVTIPIVGRKIKIIKDNYADPEQGTGALKITPAHDFNDYEVGQRNKLDMINIFTEEGKINDNAPQDYIGLDRFDARKKLLEELKEKEFFVKEENIKNKVPYGDRSNSVIEPFLTEQWFV

SEQ ID NO: 191855 - protein, 293 aa, Unknown
  Bacterial polypetide isolated from the Sargasso Sea
CPPNVTGSLHMGHAFQQTLMDILIRYHRMSGNDALWQCGTDHAGIATQMVVERQLQQKNISRYELGREKFIDEVWNWKESSGNTINNQSRRLGTSMDWANERFTMDDGLSDAVKEVFIQLYEKGLIYRGKRLVNWDPVLHTAISDLEVISAEENGHLWHMRYPLTESIKGIEYLVVATTRPETMLGDSAVAVHPDDDRYKALVGKKVSLPLTDRTIPIIADDYVDPEFGSGCVKITPAHDFNDYEVGARHNLEKLNIFTIDAVINDEAPKKYQGLDRFDARKQIIADFKNENY

SEQ ID NO: 191856 - protein, 300 aa, Unknown
  Bacterial polypetide isolated from the Sargasso Sea
DLEVENHDEKGHLWHLRYPLADGCKTADGLDYLVVATTRPETMLGDAAIAVHPEDERYKSLIGRHVMLPLVNRLIPIVADDYVDLEFGTGCVKITPAHDFNDYEVGKRHHLPLINIFDRNAAVLAKAQVFNIDGTPNDKIDANLPDGYAHMDRFDARKAIVAEFDAMSLLEKIDDHALKVPRGDRSGTIIEPWLTDQWYVSTKPLAEKAIAAVESGEIQFVPKQYENMYFSWMRDIQDWCISRQLWWGHRIPAWYDEAGNVYVGRDEVEVRSKYNLCNNVELRQDEDVLDTWFSSGLWTF

SEQ ID NO: 191857 - protein, 337 aa, Unknown
  Bacterial polypetide isolated from the Sargasso Sea
NHWVKTYNHWMRNINDWCISRQLSWGHQIPVWYHKDNVSKLHVSEKGPDDKENWVRDKDVLDTWASSWLWPFAVHNWIEKDTSIKKYYPTNTLVTGPDIIFFWVARMIMSGYEFLGEEPFKNVYFTSILRDANGKKFSKSLGNSPDPITLFKEFGTDAVRFGTLLMAPQGLDVLFSKDRLEVGKNFMNKLWNAARFTFMNLIDGIPPDIDLSHENLDISDKWIISRFEETAFNVNKELNNYRFNEAAKAIYEFTWNDFCDWYVEIAKIRLYGDDPKKADIARTVLIHVLKGILTLLHPYSPFITEELWSYFKTKNEKDLIISPWINGKVLKNEQVFD

SEQ ID NO: 191858 - protein, 262 aa, Unknown
  Bacterial polypetide isolated from the Sargasso Sea
MSLSKYNHKKVENKIYSYWEKNKLFKPKKNKKTFSIVIPPPNVTGSLHMGHALNNSLQDVLVRYHRMNNFETLWQPGTDHAGIATQALVEKSLKLKNINKDELGREKFIKKVWEWKNEYGEIIINQLKKLGCSCDWSRNAFTMDKNLSNSVIKVFVDLHKKKLIYKSKKLVNWDTVLRTAISDLEVDQREVNSKLYYIKYQIENTSDFITIATTRPETMLGDTAIAVNPDDKRYSNLRGKFAILPIVGRKLKIIHDKYADPE

SEQ ID NO: 191859 - protein, 281 aa, Unknown
  Bacterial polypetide isolated from the Sargasso Sea
MSSDKYIHSDVENRIYSYWEKNGLFKPKENSKKFSIVIPPPNVTGSLHMGHALNNSIQDLLVRYHRMNNFETLWQPGTDHAGIATQALVEKKLTSEKIDKNEIGREKFIEKVWEWKEQYGDIIINQLKKLGCSCDWSRNAFTMDDNLSKSVIKVFVDLYNKGLIYKDKKLVNWDTVLKTAISDLEVDQREVNSKIYYIRYPIDRTEEFITIATTRPETMLGDTAIAVNPKDERFKSFVGKTVTIPIVGRKIKIIEDDYADPEQGTGALKITPAHDFNDYEV

SEQ ID NO: 191860 - protein, 285 aa, Unknown
  Bacterial polypetide isolated from the Sargasso Sea
MAIFYQLVGKKIRIIADEYADPEQGTGAVKITPAHDFNDYEVGIRNKLEIINIFTKDGKINENAPREFVGLDRFDARKKILSMLKDKKLFIKEDNIKNKVPYGDRSNSIIEPYLTEQWFADAKKLSIKAKKIVKSKKTKFFPTNWSKTYFQWMDNIEPWCVSRQIWWGHQIPAWYGPDKKIFVAKNENDAKKMAKKFYKKDVKITRDPDVLDTWFSSGLWPFATLGWPKKNNYLSKFYPTTVLVTGFDIIFFWVARMMMFGMEFLNKEPFKDIYVHALVRDEKGQ

SEQ ID NO: 191861 - protein, 306 aa, Unknown
  Bacterial polypetide isolated from the Sargasso Sea
NEKDAQKRANKFYKKNVTLIRDPDVLDTWFSSGLWAFATLGWPSKNEYIKKFYPTSVLVTGFDIIFFWVARMIMFGMEFLNKEPFKDIYVHALVRDEKGQKMSKSKGNVIDPLDLINKYSADALRFTLLSMASPGRDVKLSEERVKGYRNFLNKLWNANNFLIHNKCSFKKIKKAPKTKVNINKWIHFELIETKKIVEKNIKDYRFDEASRNIYQFVWHSYCDWYLELSKTILFSDNKKNIIETKEMASYVFKEILVLLHPFIPFITEEIWLKNNLDSSNKNFFNDGKIGQMKKLVKIRVVKMLNI

SEQ ID NO: 191862 - protein, 300 aa, Unknown
  Bacterial polypetide isolated from the Sargasso Sea
MSFDKYEHKNVENKIYDYWEKKELFKPKENSKKFSIVIPPPNVTGSLHMGHALNNSIQDVLTRFHRMNNFETLWQPGTDHAGIATQALVEKKLAKDGVKKNDLGREKFIEKVWEWKNEYGDIIINQLKKLGCSCDWSRNAFTMDENLSKSVIKVFVDLYNKKLIYKAKKLVNWDVVLKTAISDLEVDQREVNSQLYYINYPIENSDKFITIATTRPETMLGDTAIAVNPKDDRFKDLAGKFVIIPLANRKIKIITDDYADPEQGTGAVKITPAHDFNDYDVGIRNKLEVINIFTPDGKNK

SEQ ID NO: 191863 - protein, 147 aa, Unknown
  Bacterial polypetide isolated from the Sargasso Sea
MKTPKGEKKDLVDTPMAKSYNPVAVEAAWYEWWEKCGMFTPEMGTNKPKFVIVIPPPNVTGALHIGHALTNSIQDTVVRWRRMSGYEALWVPGTDHAGIATQTVVEKKLAREEGVTRHDLGREKFLERVFEWKNEYGGKIFNQLRRI

SEQ ID NO: 191864 - protein, 316 aa, Unknown
  Bacterial polypetide isolated from the Sargasso Sea
LVGKNVILPIVGRKIKIIKDNYADPEQGSGAVKITPAHDFNDYEVGIRNKLELLNIFTEEGKVNKNAPDEYIGLDRFEARKKILSQLSNQNLLVKEEKIKNKVPYGDRSNSIIEPFLTEQWFADAKKLSIKAKQIVKSKKTKFFPENWSKTYFQWMNNIEPWCISRQLWWGHQIPAWYGPDKKIFVAENEKEAQKLSKKFYKKNVELIRDPDVLDTWFSSGLWPFATLGWPIKNDYLKKFYPTTVLITGFDIIFFWVARMMMFGMEFLNKEPFKDVYVHALVRDEKGQKMSKSKGNVIDPLELIEKYSADALRFTL

SEQ ID NO: 191865 - protein, 276 aa, Unknown
  Bacterial polypetide isolated from the Sargasso Sea
HALNNSIQDLLVRYYRMNNYETLWQPGTDHAGIATQALVERKLEKENLSKIDLGREKFIEKVWEWKNEYGDIIINQLKKLGCSCDWSRNAFTMDENLSKSVIKVFVELHKKKLIYKAEKLVNWDTVLKTAISDLEVDQREMNSKIYYIRYPIDNSSEFITIATTRPETMLGDTAIAVNPKDKRYKNHVGKTVTIPIVGRKIKIIKDNYADPEQGTGALKITPAHDFNDYDVGQRNKLEIINVFTEEGKINDNAPKDYIGLDRFDARKKILNELKEK

SEQ ID NO: 191866 - protein, 153 aa, Unknown
  Bacterial polypetide isolated from the Sargasso Sea
MSTEALSKTYDPHTIERTLYETWEAQGAFQPAGDGPAFCISIPPPNVTGSLHMGHAFQDTIMDALIRYHRMRGHRTLWQAGTDHAGIATQMVVERQLDQIGKTRHDLGRDAFIERVWKWKQESGGAITQQLRRMGASLDWSRERFTMDDDLSL

SEQ ID NO: 191867 - protein, 176 aa, Unknown
  Bacterial polypetide isolated from the Sargasso Sea
FEARKKIIDKLKELQLFEKDETIKNKVPYGDRSNSIIEPFLTEQWLCDAKKLSIKAKKIVKNKKTNFFPSNWSKTYFQWMNNIEPWCISRQLWWGHQIPAWYGPDRKIFVAENQKKAEQQAKKFYKKKVNLKRDPDVLDTWFSSGIWPFATLGWPSKNYFLKKFYPTSVLVTGFDI

SEQ ID NO: 191868 - protein, 280 aa, Unknown
  Bacterial polypetide isolated from the Sargasso Sea
MHLQWDENLLNSVIKVFIDLYKKKLIYKSKKLVNWDTVLKTAISDLEVDQREVSSKLYYIKYKIENSSETITIATTRPETMLGDTAIAVNPKDRRYFNLVNKFAILPIIGRKLKIVQDDYADPEQGSGAVKITPAHDFNDFEVGRRQKLKSINIFTEDGKINNNAPNEYIGLDRFEARKKIIDKLKELKILEKEETIKNKVPYGDRSNSVIEPFLTEQWFCDAKKLSIKAKKIVKKKYTNFFPSNWSKTYFQWMNNIEPWCISRQLWWGHQIPAWYGPDK

SEQ ID NO: 191869 - protein, 256 aa, Unknown
  Bacterial polypetide isolated from the Sargasso Sea
RILKELKEKDFFVKEENIKNKVPYGDRSNSIIEPFLTEQWFADARKLSVKAKEVVNSKKTNFFPENWSKTYFQWMNNIEPWCISRQLWWGHQIPAWYGPDEKIFVAENEDDAKQKAKKHYGKDVELNRDLDVLDTWFSSGLWPFATLGWPDDKKYVDKFYPTSVLVTGFDIIFFWVARMIMFGTEFLNKEPFKDIYVHALVRDEKGQKMSKSKGNVIDPLDLIEKYSADALRFTLLSMASPGTDVKLSEDRVKGYR

SEQ ID NO: 191870 - protein, 326 aa, Unknown
  Bacterial polypetide isolated from the Sargasso Sea
MDAKYFPIEIEEKWSKIWAERELNKPESEQNFSQIIPPPNVTGTLHMGHSFQYAIMDFYTRYHHMNGKNSYWQVGTDHAGIATQMVVENNLINEGKNKNDLGREKFLEEVWKWKDYSEEKITSQIKRLGCTVEWDKYRFTFDDDFCEAVNKAFVELYRNNKIYRGYRLVNWDPSLKTAVSDLEVVRQEKEGILWHIAYPISDSDEVLTVATTRPETMFGDMAVAVNPKDERFKKFIGQYVELPFVGRKIPVIGDEYVDMEFGTGCLKITPGHDFNDYEIGKKYALHEKDGVVHISDELNDFMPINIFTDEAHTNDSVPEPFCYLDR

SEQ ID NO: 191871 - protein, 260 aa, Unknown
  Bacterial polypetide isolated from the Sargasso Sea
KKYFHADASSEKEPYTIVIPPPNVTGMLTVGHVLNNTIQDILIRKARMEGKEACWIPGTDHASIATETKVIKMLEEKGINKNDLSREEFLEHAWEWKEKYGGIIINQLKKLGCSCDWEKERFTMDEGYSRAVLESFVKLYEKGLIYKGHRLVNWCPVSKSAISDEEVIHKEIDGHLWHFRYPIHGEDNYLVVATTRPETMLGDTAVAVNPNDKRYKKYIGKNVELPLVGRKIPIVSDDYVDPEFGTGCVKITPAHDPNDF

SEQ ID NO: 191872 - protein, 308 aa, Unknown
  Bacterial polypetide isolated from the Sargasso Sea
TAVSDLEVVRQEKEGILWHIAYPISDSDETLTVATTRPETMFGDMAVAVNPKDDRFKKFIGQYVELPFVGRKIPVIGDEYVDMEFGTGCLKITPGHDFNDYEIGKKYALHEIDGVVHSSDELNDFMPINIFTDEAYTNDSVPELFANLDRFKVRKVVLEELKNKNLLLKEEKHQISVPRGERSNIVIEPKLSHQWYVKTQEMAKKANEAVNKGEVVFHPGNWIKTYFNWMDNIQDWCISRQIWWGHRIPAWYDKDGNMYVGYDEDELRKHYKLDDRKLTQEEDVLDTWFSSSLWPFGSLGWPKETELN

SEQ ID NO: 191873 - protein, 296 aa, Unknown
  Bacterial polypetide isolated from the Sargasso Sea
HYKGLERSAAREQVVSEMETLGLLEKIEDNEMTVPYGDRSGVVIEPWLMDQWFVDAQRLAGPAITAVEQGQTTFVPEQWKNTYYDWMRNIQPWCISRQIWWGHQIPAWFTPSGEIFVEMTEEQAYAAARESCGNDVELTQDPDVLDTWFSSALWPFSTLGWPEKTPELAHYYPTNVLVTGFDIIFFWVARMMMMGIHFMGEVPFHTVYIHALVRDEQGQKMSKSKGNVIDPLQLIDKYGADSLRFTLTASAAQGRDVKLSEQRVEGYRNFCTKIWNAARFCELNECKRLKIMTLAK

SEQ ID NO: 191874 - protein, 217 aa, Unknown
  Bacterial polypetide isolated from the Sargasso Sea
MSLDKYNHLESENRIYSYWESNNLFKPKKNKKKFSIVIPPPNVTGSLHMGHALNNSIQDLLTRFHRMNNYETLWQPGTDHAGIATQALVEKKLEKEGIEKNSLGRDKFIKRVWEWKNQYGDIIINQLKKLGCSCDWSRNAFTMDENLSQSVLKVFLDLYKKKIIYKSKKLVNWDTVLITAISDLEVDQREVNSKLYYIKYPINQTSDYITIATTRPE

SEQ ID NO: 191875 - protein, 226 aa, Unknown
  Bacterial polypetide isolated from the Sargasso Sea
KIYKYWENHKLFEPKKNKKKFSIVIPPPNVTGSLHMGHALNNSIQDLLTRYHRMNNYETLWQPGTDHAGIATQALVEKKLKNEGINKNDIGREEFIKKVWEWKGEYGDIIINQLKKLGCSCDWSRNAFTMDENLSKSVIKVFVDLHKKKLIYKSKKLVNWDTVLKTAISDLEVDQREVNSSLYYINYPLDGSNEKITIATTRPETMLGDTAVAVNPKDKRYKNLVG

SEQ ID NO: 191876 - protein, 297 aa, Unknown
  Bacterial polypetide isolated from the Sargasso Sea
KWSKIWADRELEKPGSEDHFSQIIPPPNVTGTLHMGHSFQYAIMDFYTRYHHMNGIDSYWQVGTDHAGIATQMVVENNLLNEGKSKDDLGREKFLEEVWKWKDYSEGEISAQMKRLGITVEWDKYRFTYDDDFCKGVNKAFVELYRKDKIYRGYRLVNWDPSLKTAVSDLEVVRQEKDGVLWHISYPLADSDEVLIVATTRPETMFGDMAVAVNPKDDRFKQHIGKYVELPFVGRKIPVIGDEYVDMEFGTGCLKITPGHDFNDYDIGKKYALHEVDGVVQTSDKLEDFAPNKYFTD

SEQ ID NO: 191877 - protein, 268 aa, Unknown
  Bacterial polypetide isolated from the Sargasso Sea
YGDRSNTVIEPLLTEQWFADAKLLSKKAIQVVKNKKTNFFPTNWTKTYFQWMYNIQPWCISRQLWWGHRIPAWYSDEKKIFVAETEEEAKKIAKKYYKKNVVLKRDEDVLDTWFSSALWPFATLGWPKKTYELKRFYPTSVLVTGFDIIFFWVARMMMMGNYLIKKEPFSKVYVHALVRDEKGQKMSKSKGNVIDPLEIINKYGADSLRFTLISMAAPGRDVKLSEDRVKGYRNFLNKIWNANKFSKINNCKLTKKFNIKKTKLDLNK

SEQ ID NO: 191878 - protein, 306 aa, Unknown
  Bacterial polypetide isolated from the Sargasso Sea
VFIWTVAIGTLGWPDKTPELSKYYPTSVLVTGFDIIFFWVARMMMMQLVVTKEVPFHTVYVHALVRDEKGKKMSKSKGNVLDPIELIDEFGADAVRFTLTAMAVMGRDLRLSTSRIAGYRNFGTKLWNAARYAELNGCKVDARYRPELVETTVNKWIVGETARFKEAFDNALHSYRFNDAAQLAYNHIWKKFCDWYVEFSKPLLNGEDLYIKSETKHTMAWALDQCLIILHPIMPFITEELWGILSERKNMLVHQNWPEYTAKNLENKSADKEIEWIINLIEQIRSLRADLGVVPSAKIVLYKVTL

SEQ ID NO: 191879 - protein, 293 aa, Unknown
  Bacterial polypetide isolated from the Sargasso Sea
PVYIMMPPPNVTGNLHMGHALTFTLQDLLIRYHRMVGRDTLWQPGTDHAGIATQMVVERQLAAQNISRRDLGRNRFLEKVWEWKAESGGMIHKQLQRLGASPDWERERFTMDPGLSEAVIKVFVSLHRDGLIYRDKRLVNWDPKLMTAISDLEVEQREQTSSMWHLKYRLVGTENEFISIATTRPETMLGDGAVAVNPEDERYQHLIGKMVILPLSNRHIPIIADDYAKIDKGSGAVKITPAHDFNDFEVGRRHNLPLINLMTATATMESIDEIPEKYRGLDRYDARRQILRD

SEQ ID NO: 191880 - protein, 312 aa, Unknown
  Bacterial polypetide isolated from the Sargasso Sea
PFLTEQWFADAGKLSVKAKEVVNSKKTNFFPENWSKTYFQWMNNIEPWCISRQLWWGHQIPAWYGPDEKIFVSENEDDAKQQAKKHYGKDVELIRDSDVLDTWFSSGLWPFATLGWPDDNKYVDKFYPTSVLVTGFDIIFFWVARMIMFGTEFLNKEPFKDIYVHALVRDEKGQKMSKSKGNVIDPLDLIEKYSADALRFTLLSMASPGTDVKLSEDRVKGYRNFLNKLWNANNFLITNECDFKDIDDLPNLNVNINKWIYSELIETKNKIQKNLEDYRFDEAAKNAYQFAWHSYCDWYLELSKTILFSDDN

SEQ ID NO: 191881 - protein, 294 aa, Unknown
  Bacterial polypetide isolated from the Sargasso Sea
PFSTLGWPNKTQELEKFYPTSSLVTGFDIIFFWVARMMMMGLYFTKKVPFHEVYVHALVRDEKGQKMSKSKGNVIDPLDLMNEFGADSLRMTLCSMAAQGRDIKLSKQRVEGYRNFITKIWNALKLCEINNCYYGEAKISDTKNIFNIWILNELENCRKVAETSIQNYKFNEAANGLYKFTWSIFCDWYLEFTKIIFISEDKKLINETKHITSYVLSNILIMLHPIMPFFTEHVWDKAAGILKKDTSQISRAKWPEQIKLEDSDKSEVNFLIDLISSIRSTRAEMNVPAKSNIK

SEQ ID NO: 191882 - protein, 282 aa, Unknown
  Bacterial polypetide isolated from the Sargasso Sea
VSSKVPFVDREIPIIADSHVDKDFGTGCVKVTPAHDPNDFAIGKRHNLKQINVMNKDGTLNINAGIFQNLDRYEARKKIIKELDNLGLLTKIEDYKHTVPFSDRGKVPIEPLLSTQWFLKMDDISQGCLNEIDSKKPSFIPPRWEKVYKDWLENINDWCISRQLWWGHQIPAWYVLDDSQDSIEQNTPYIVARNEEDALIEANKKFGSNIKLVRDKDVLDTWFSSGLWPFSTLGWPNTNDPDFKKWYPNNVLVTGFDIIFFWVARMTMMGNTFTNYIPFKDV

SEQ ID NO: 191883 - protein, 271 aa, Unknown
  Bacterial polypetide isolated from the Sargasso Sea
ALVKTEIHMNKVGTFERTKAVIEPRLSDQWFLKMEELVKPAIKAVLEDEEIKLYPSKFNNTYRHWLENIRDWNISRQLWWGQQIPAYYYGDGKEDFVVAENIEEALILAKEKTNNQQLTTDNLTQDEDALDTWFSSWLWPMAVFGGILDPESEDFKYYYPTNDLVTGPDILFFWVARMIIAGYEYTDKKPFSNVYLTGLVRDKQRRKMSKSLGNSPDPLELIEKFGADGVRVGLLLSASAGNDIMFDEELCNNGKAFANKIWNAFRLIKGW

SEQ ID NO: 191884 - protein, 214 aa, Unknown
  Bacterial polypetide isolated from the Sargasso Sea
RQLWWGHRIPAWYGPDDTAFVEETAEAAIAAATTHYGKAVELWQDEDVLDTWFSSGLWPFSTLGWPESNAEIERYYPGDVLVTGFDIIFFWVARMMMMSMHFMDGEVPFKVVYIHALVRDEKGQKMSKSKGNVLDPLELIDKYGADSLRFTLAAMAAQGRDIKMSTNRLEGYRNFTTKIWNACRFLQMNECTNGDSIDLSIVEAPVNKWVVSEY

SEQ ID NO: 191885 - protein, 292 aa, Unknown
  Bacterial polypetide isolated from the Sargasso Sea
DIVGKLVTIPLANRKIKVITDDYADPEQGTGAVKITPAHDFNDYDVGIRNKLEVINIFTPDGKINDNAPDPYKGLDRFAARKLILEHLEEGKFLEKIEKLVNKVPYGDRSNSIIEPYLTEQWFVDAKTLAIKAKEVVNNGKTKFFPENWSKTYFQWMDNIEPWCISRQLWWGHQIPAWYGPDGKIFVAENEDECKKQAKEFYSKEVELKRDEDVLDTWFSSGLWPFATLGWPEKTPEVEKFYPTSVLVTGFDIIFFWVARMIMMGTEFLKEEPFKNIYVHALVRDEKGQKMS

SEQ ID NO: 191886 - protein, 293 aa, Unknown
  Bacterial polypetide isolated from the Sargasso Sea
QLQKLGCSCDWDKTSFTMDEDYSKAVLESFVQLYNKGLIYKGSKLVNWCPKSQTALSDEEVMFKEVNGSLWYIKYAINDSDTFIEIATTRPETMLGDTAIAVNPNDKRYKELIGKTALLPLVGRSIPIIADDMVDPEFGTGCVKITPAHDLNDYEVGIKHNLEMINIMNADSSISDKAPEKYRGMSREAARKQIVLDLKDINHLIKEEDYFHKVGYSERGNVPIEYYLSEQWFLKMEDLAKPASKAVKDNEINFYPNHWVKTYNHWMDNIQDWCISRQLYWGHQIPVWYKKRC

SEQ ID NO: 191887 - protein, 283 aa, Unknown
  Bacterial polypetide isolated from the Sargasso Sea
DWRRNSGNTISQQIRRMGSSIDWSREQFTMDEDYADAVLEVFVRLYDEGLIYRGQRLVNWDPELKTAISDLEVENTEENGHLWHIRYPLTNHARTKAGHPYLVVATTRPETMLGDTAVAVHPDDERYTNLIGTSVELPLCSRTIPIISDEYVDPEFGTGCVKITPGHDFNDYEVGARHDLPLINILTETAEINEEAPQAYQRLDRFEARDKIVDDLEKTGLLESVDDHSLMVPRGDRSGSIIEPLLTDQWFVKIQPLAAPAIDAVKNGEVRFVPKQYENVYFS

SEQ ID NO: 191888 - protein, 275 aa, Unknown
  Bacterial polypetide isolated from the Sargasso Sea
KITIATTRPETMMGDTAVAVNPKDERYVNLVGKNVLIPIVNRTVKIISDNYADPEQGSGAVKITPAHDFNDYEVGKRNKLEIINIFEENGKINKNGIKEFHGLDRFEARKLIIKKLKEKGSLVKIENIKNKVPYGDRSNTIIEPLLTEQWFVDAKKLSKKPIKIVKEGKTTFFPSNWSKTFFQWMNDIEPWCISRQIWWGHRIPAWYDDNGNIFVAESEKDAAKLAKKKNKNKQFKLRQETDVLDTWFSSALWPFATLGWPKKTGELNKFYPTSV

SEQ ID NO: 191889 - protein, 302 aa, Unknown
  Bacterial polypetide isolated from the Sargasso Sea
RDRFTMDPGYAEAVKTSFIRLFDQGLIYRGKRLVNWDPHLESAISDLEVENVEEKGHLWHLRYPLPKGVKTNSGESHLTVATTRPETLLGDSAVAVHPNDERYADLIGQSVILPLCDRKIPIIGDEYVDRDFGSGCVKITPAHDFNDYEVGERHNLEQINIFEADASLNDQVPGTYRGLSREEARERVLIDLEKGNFLEKVEDHKLMVPRGDRSNSIIEPYLTDQWFVKIGPLAEPAIAAVKDGQINFVPKQYENLYFSFMNDIRDWCISRQQWWGHQIPAFYDESGEVFVAENEEAARRKY

SEQ ID NO: 191890 - protein, 275 aa, Unknown
  Bacterial polypetide isolated from the Sargasso Sea
DIIFFWVARMMMAGLHFMKDEDGNRVEPFHTVYVHALVRDKNGQKMSKSKGNVIDPLNLIEEYGADALRFTLAIMAAQGRDVKLDESRIAGYRNFGTKLWNATRFAEMNGMKLDGSFRPSGATQTINRWILTELSKTTEDVTTAIENFRFNEAADALYRFVWHELCDWYLELLKPVFMGEDEAAKTEAQHCVAYVLAETYKLLHPFMPFMTEELWNHIGGEGLCCHADWHEPGFRDEEAADEINWLVDLISGIRSARAEVNVPPAAKAPLILVGA

SEQ ID NO: 191891 - protein, 222 aa, Unknown
  Bacterial polypetide isolated from the Sargasso Sea
MSDKYIHSNVEDKIYSYWEKNKLFKPQKNSKKFSVVIPPPNVTGSLHMGHALNNSIQDMLVRYYRMNNYETLWQPGTDHAGIATQALVERKLENENLNKNSLGREKFIEKVWEWKNQYGDIIINQLKKLGCSCDWSRNAFTMDENLSKSVIKVFVELHKKKLIYKAEKLVNWDTVLKTAISDLEVDQREMNSKIYYIRYPIDKSSEFITIATTRPETMLGDT

SEQ ID NO: 191892 - protein, 303 aa, Unknown
  Bacterial polypetide isolated from the Sargasso Sea
NTEKNGHLYYIKYKIEDSNENLIVATTRPETLFGDSAICVNPKDSRYESFIGRKAIIPILNKAIPVISDDTIDQDFGTGCVKITPAHDFNDYKLGKKHNLDFINILNKNGTFNNNVSGIFKDKNIHKSRSEVVGQLKELGSLDKIEDYKTTVPMGERSGEIIEPLLTDQWFMRMDDLAQLGIDAVKKSNIKFVPKNWEKIYFNWLNNIEDWCISRQIWWGHRIPAWYDDKGNVYVGDNEQEIRNKNNISEGINLIQDQDVLDTWFSSSLWPFTTMGWPKNTKEIEKYYPTSVLVTGFDIIFFL

SEQ ID NO: 191893 - protein, 306 aa, Unknown
  Bacterial polypetide isolated from the Sargasso Sea
MSRKRHDLEFINIFDENAKLNSNVPEEFQNLDRFEARKLILKKLDEMNLLIKEEKQQMVIPYGDRSGVVIEPWLTDQWFCDAKKLSVDPISAVKDNNSKFIPKQWENTFYNWMENIQPWCISRQLWWGHQIPAWYGPDNKYFVSETQEGAQNQAKEFYGKDVELRQDEDVLDTWFSSALWTFSTLDWPKKTYELDKFYPGNVLVTGFDIIFFWVARMMMMGSYFMKETPFKDIYIHPLIRDEKGQKMSKSKGNIIDPLELLDKYGADTLRFTLTALLNPGRDVKLSEARVKGYKSFHNKIWNAGKF

SEQ ID NO: 191894 - protein, 297 aa, Unknown
  Bacterial polypetide isolated from the Sargasso Sea
MGVFQGKSWWGHQIPIWTCKNGNLIAAYNEEDAKEKYFNKFNKNPEGPLKRETDVLDTWFSSGLWPFSTLGWPGKSNELNNFFPTTILVTGFDIIFFWVSRMIMMSLELTNQIPFKTIYIHNLIRDSKGQKMSKTKGNVIDPLDLIKQFGTDSLRFFLTSNISPHSDIKLAKNSLEPARNFMNKIWNANKFVKFHTKEKPNNDLKLNKFYDTWIVNSFSELIESYQIAINNCEIEKASSLLYKFFWDDFCDWYIEIVKVEFESNPKSEDSKNVICTILNDFLILLYPFCPFISSEIL

SEQ ID NO: 191895 - protein, 224 aa, Unknown
  Bacterial polypetide isolated from the Sargasso Sea
DIIFFWVARMMMFGMEFLEKEPFKDIYVHALVRDEKGQKMSKSKGNVIDPLELIEKYSADALRFTLLSMASPGRDVKLSEDRVKGYRNFLNKIWNANNFLIQNNCDFTDIAKPKNINENINKWIITEFLFVKENIKKNISDYRFDEAAKNAYQFVWHSFCDWYLELSKTIYYSDNQSSKEETRGVSAYLFREILILLHPFTPFITEEVWLKNKLDKNNKDYLMF

SEQ ID NO: 191896 - protein, 239 aa, Unknown
  Bacterial polypetide isolated from the Sargasso Sea
MSSDKYIHSDVENKIYSYWEKNNLFKPKKNKKSFSIVIPPPNVTGSLHMGHALNNSIQDLLTRFHRMNNYETLWQPGTDHAGIATQALVEKKLQDDGIKKIDLGRDKFIEKVWEWKNQYGDIIINQLKKLGCSCDWSRNAFTMDDNLSKSVIKVFVDLYKKGLIYKSTKLVNWDVVLKTAISDLEVDQREVNSKLYHIKYQIENSDDFITIATTRPETMLGDTAIAVNPKDDRYKSLVN

SEQ ID NO: 191897 - protein, 223 aa, Unknown
  Bacterial polypetide isolated from the Sargasso Sea
NQWFMNMNDLAKDGIRVVKEKKVNFVPEHWEKIYFNWLENIEDWCVSRQIVWGHRIPAWYDIEGNVYVGNDEEDIRIRHNLSDAISLSQDTDVLDTWFSSALWPFSTLDWKKDDAVFQRYFPTNLLVTGFDIIFFWVARMIMMSLKFTKDIPFKKIYIHGLVRDSEGKKMSKSIGNVIDPLDVIEGISLDKLLEKRTSSLINDKHKSSVIKKTKRDFPDGIKE

SEQ ID NO: 191898 - protein, 316 aa, Unknown
  Bacterial polypetide isolated from the Sargasso Sea
MDRFDARKLIIKKLKDNGSLVKIENIKNKVPYGDRSNTIIEPLLTEQWFVNAKKLSKKPIKIVKEGKTTFFPRNWSKTFFQWMNDIEPWCISRQIWWGHRIPAWYDENGNIFVAESEKDALKLAKKKNKNKQFKLRQETDVLDTWFSSALWPFATLGWPNKTTELNKFYPTSVLVTGFDIIFFWVARMLMMGNYFRKNTPFHKVYVHALVRDEKGQKMSKSKGNVIDPLDLINEYGADSLRFTLISMASPGRDVKLSRDRVTGNRNFITKIWSANNFLKLNNCKLDKKINLTSIKLPINHWIYNEFTKTQNLSQKT

SEQ ID NO: 191899 - protein, 305 aa, Unknown
  Bacterial polypetide isolated from the Sargasso Sea
FVDAKKLSINAKKIVKNKKTNFFPKNWSKTYFQWMNNIEPWCISRQLWWGHQIPAWYGPDKKIFVAENEKKAQLESKKFYKKKVKLTRDPDVLDTWFSSALWPFATFGWPHSNYFLKRFYPTSVLVTGFDIIFFWVARMMMLGVEFLKKEPFKEIYVHALVRDEKGQKMSKSKGNVIDPLELIDKYSADALRFTLLSMASPGRDVKLSEQRVKGYRNFLTKIWNANNFLNMNKCNFKSKIITKKLSLNINKWIYSELINTKNLSEKYIKDYRFDEASKVIYKFVWNSYCDWYLELSKTILSSNKK

SEQ ID NO: 191900 - protein, 328 aa, Unknown
  Bacterial polypetide isolated from the Sargasso Sea
TDEAHTNDSVPEPFANLDRLKVRKAVLEELKNKNLLLKEEKHQISVPRGERSNIVIEPKLSHQWYVKTQEMAKKANEAVNKGEVVFHPGNWIKTYFNWMDNIQDWCISRQIWWGHRIPAWYDEDGNIYVGYDEDELRNHYKLDDRKLTQDEDVLDTWFSSSLWPFGSLGWPKENELEKYFPTSLLVTGFDIIFFWVARMMMMSLEFTGKVPFKDVYVTGLIRDENGQKMSKSKGNIIDPIDLIYGIDLEDLVTKRTANLMQEGLAEKIERKTRKQFPNGIESYGTDALRMTFFSLATHTRDISFELGRLKGYRNFCNKIWNAARFINN

SEQ ID NO: 191901 - protein, 266 aa, Unknown
  Bacterial polypetide isolated from the Sargasso Sea
MDKRYEPLIIEEKWSELWAKNNLGKNNSSQTFSQVIPPPNVTGTLHMGHSFQYSIMDFYARYNHLNDVNTHWQMGTDHAGIATQMVVENNLSRENIDKNDLGREDFVKKVWEWKEFSENKITGQIKRLGNSVDWSNYRFTLDEGFNEAVLKAFVELYRKEKIYRGYRLVNWDPSLKTAVSDLEVVRQEKKGLIWYIKYPIIGSDDFVTVATTRPETMFGDMAIAVNPKDERYKDIIGKKVELPFVKRKIPIIGDDYVDKEFGTGCL

SEQ ID NO: 191902 - protein, 296 aa, Unknown
  Bacterial polypetide isolated from the Sargasso Sea
TAISDLEVDQREVNSKIYYIRYLIDGTEEFITIATTRPETMLGDTAIAVNPKDERFKSFVGKTVTIPIVGRKIKIIEDDYADPEQGTGALKITPAHDFNDYDVGQRNKLEIINIFTEAGKINKNAPEHYVGLDRFEARKRILKELKEKDFFVKEESIKNKVPYGDRSNSIIEPFLTEQWFADAGKLSVKAKEVVNSKKTNFFPENWSKTYFQWMDNIEPWCISRQLWWGHQIPAWYGPDEKIFVAENEDNAKQQAKKHYGKDVELNRDPDVLDTWFSSGLWPFATLGWPDDNKFCD

SEQ ID NO: 191903 - protein, 275 aa, Unknown
  Bacterial polypetide isolated from the Sargasso Sea
TGFDIIFFWVARMIMMQLATVKEIPFKKVYVHALVRDENGKKMSKSLGNVLDPLDLIDKYGADPLRFTLTAMAVTGRDLKLSESRIEGYRNFMTKIWNAAKYLEMNECHFDSEFDISGIKSPPNKWIIGKTLGTLEAVNQSYSKFRFNDTANTLYNHTWRVFCDWYIEFSKSLLNNESEETSRETRKTLAWAFEVCLKMLHPIMPFVTEELWGHFKKGEGLLSTSDWPKFSNISMDVDEIKNIESVISFIEDIRSTKADFNLVSGEKTALYVVDL

SEQ ID NO: 191904 - protein, 300 aa, Unknown
  Bacterial polypetide isolated from the Sargasso Sea
QDVLDTWFSSSLWTFATLGWPQQTKRLDKYHPTSLLVTGFDIIFFWVARMIMMTKHFTKAIPFKEIYITGLIRDSEGQKMSKSKGNVLDPLDIIDGINLEALISKRISGLLNPDDEQKIIKQTKKDYPQGIKAHGTDALRFTFLSLASGSRDINFDMKRVEGYRNFCNKLWNASRFIELNKPASFKKTNQFIKTPEDKWIVEKLNRTIVSMNTHMDNYRFDLATQSVYEFVWNDFCDWYIEFSKNRLDSDNIKKSEVDRTISGLLHILESILKLCHPFMPFITEEIWNQITSGKKESFLL

SEQ ID NO: 191905 - protein, 107 aa, Unknown
  Bacterial polypetide isolated from the Sargasso Sea
MGLDKHFQSAPVEKRISEKWISQKAFRAGINAKNGQPSYTIMIPPPNVTGVLHMGHAFNNTLQDILIRWKRMQGYKTLWQPGTDHAGIATQMVVERQLAEEGKKRTD

SEQ ID NO: 191906 - protein, 240 aa, Unknown
  Bacterial polypetide isolated from the Sargasso Sea
MLEKTYDAKSVEPRIATRWEQADAFRAGANAKPGRESFSIVIPPPNVTGSLHMGHALNNTLQDIMIRFERMRGKDTLWQPGMDHAGIATQMVVERQLMERQLPGRREMGRDAFVDKVWEWKEESGGQIINQLKRLGASCDWSRERFTMDEGLSEAVREVFVSLYKHGLIYRGKRLVNWDPEFETAISDLEVENREVDGHMWHFKYPLAGGETYTYVEKDADGNVTLEEERDYISIATTRP

SEQ ID NO: 191907 - protein, 308 aa, Unknown
  Bacterial polypetide isolated from the Sargasso Sea
GSLHMGHALNNSLQDVLVRYHRMNNYETLWQPGTDHAGIATQALVEKNLKSKGVDKNSIGREKFIENVWEWKDEYGGKIINQLKKLGCSCDWSRNAFTMDKNLSKSVIKVFIDLYNKKLIFKAKKLVNWDTVLKTAISDLEVDQREVSSKLYYIKYKVENRDEAITIATTRPETMLGDTAIAVNPKDKRYSNLVNKFAILPIVGRKLKIVQDDYADPEQGSGAVKITPAHDFNDFEVGRRHRIKSINIFTEDGKINTNAPKEYVGLDRFEARKKIIEKLKELDAFEKEETIKNKVPYGDRSNSIIEPF

SEQ ID NO: 191908 - protein, 290 aa, Unknown
  Bacterial polypetide isolated from the Sargasso Sea
SKLYHIKYPIEGSDKFITIATTRPETMLGDTAVAVNPSDERYKSLINKNVIVPIVDRKIKIIEDDYADPEQGTGAVKITPAHDFNDYEVGERNNLEVINVFTPDGKINENAPDNYIGLDRFEARKRILKELSDKNLFVKEEKIKNKVPYGDRSNSIIEPYLTEQWFVDAKKLSIKAKEIVNNKTTNFFPVNWTKTYFQWMDNIEPWCISRQLWWGHQIPAWYGPDGEIFVDETEEGANKLAKEHYKKDVELIRDPDVLDTWFSSGLWPFATLGWPEKNEYLEKFYPTSVW

SEQ ID NO: 191909 - protein, 285 aa, Unknown
  Bacterial polypetide isolated from the Sargasso Sea
IVTSKQTKFFPKNWEKTYFQWMNNIEPWCISRQLWWGHQIPAWYGPDKKIFVALNEKEASKLAKKFYKKKVNLIRDPDVLDTWFSSGLWPFATLGWPKKNYYLKKFYPTSVLVTGFDIIFFWVARMMMFGMEMINKKPFEDIYVHALVRDEKGQKMSKSKGNVIDPLELIEKFSADALRFTLLSMASPGRDVKLSEDRVKGYRNLLNKLWNANNFLIQNKCNFSKIKKTSKIKININKWIYAKLLETKKEVENNIKSYRFDEAARSVYQFVWHSYCDWYLELSKT

SEQ ID NO: 191910 - protein, 286 aa, Unknown
  Bacterial polypetide isolated from the Sargasso Sea
VDREIPIIADSHVDKDFCTGCVKVTPAHDPNDFAIGKRHNLKQINVMNKDGTLNINAGIFQNLDRYEARKKIIKELDNLGLLTKIEDYKHTVPFSDRGKVPIEPLLSTQWFLKMDDISQGCLNEIDSKKPSFIPPRWEKVYKDWLENINDWCISRQLWWGHQIPAWYVLDDSQDSIEQNTPYIVARNEEDALIEANKKFGLNIKLVRDKDVLDTWFSSGLWPFSTLGWPNTNDPDFKKWYPNNVLVTGFDIIFFWVARMTMMGNTFTNNIPFKDVYIHGLVRDENN

SEQ ID NO: 191911 - protein, 310 aa, Unknown
  Bacterial polypetide isolated from the Sargasso Sea
IIEPYLTEQWFADAKKLSIKAKEIVNNKTTNFFPVNWTKTYFQWMDNIEPWCISRQLWWGHQIPAWYGPDGEIFVDETEEGANKLAKEHYKKDVELIRDPDVLDTWFSSGLWPFATLGWPEKNEYLEKFYPTSVLVTGFDIIFFWVARMIMFGMEFQNKEPFKNIYVHALVRDEKGQKMSKSKGNVIDPLELIEKYSADALRFTLLSMASPGRDVKLSEDRVKGYRNFLNKIWNANNFLIQNDCKFENIETPNDLKLNINKWIFVEFTNTNDKIKKSIDSYRFDEAARIAYQFVWHSFCDWYLELSKTVF

SEQ ID NO: 191912 - protein, 287 aa, Unknown
  Bacterial polypetide isolated from the Sargasso Sea
KKYCLHCVDNEVHISDDIEDFEPLNIFTDEAHSNDNVPSPFKNLDRFKVRKLVLEEIKKLDLFVKEEPHEISVPRGERSNIVIEPKLSYQWYVKTKDMADKANKAVKNGEIKFHPENWIKTYFNWMNNIEDWCISRQIWWGHRIPAWYDDHGNVYVGYSENEVRTYYSLDNRSLRQDDDVLDTWFSSSLWPFASMGWPNESKNLKTFFPTNLLVTGFDIIFFWVARMIMMSIEFTGKIPFKDIYVTGLIRDENGQKMSKSKGNIIDPIDLIYGISLEDLLEKRTSYL

SEQ ID NO: 191913 - protein, 240 aa, Unknown
  Bacterial polypetide isolated from the Sargasso Sea
MDKRYEPLIIEEKWSELWAKNNLGKNNSSQTFSQVIPPPNVTGTLHMGHSFQYSIMDFYARYNHLNDVNTHWQIGTDHAGIATQMVVENNLSRENIDKNDLGREDFVKKVWEWKEFSENKITGQIKRLGNSVDWSNYRFTLDEGFNEAVLKAFVELYRKEKIYRGYRLVNWDPSLKTAVSDLEVVRQEKKGLIWYIKYPIIGSDDFVTVATTRPETMFGDMAIAVNPKDKRYKDIIGKKS

SEQ ID NO: 191914 - protein, 254 aa, Unknown
  Bacterial polypetide isolated from the Sargasso Sea
IMMPPPNVTGSLHMGHALTFTIQDILIRYHRMKGMEVLWQAGTDHAGIATQMVVERKLSESNLDRRSLGREKFIEKVWEWKKESGGQISNQLRRLGASADWSRERFTMDEGLSNAVKKVFVSLFNDKIIYKDKRLVNWDPKLLTAISDLEVEQRDTEGSLWHIKYPIDENNHIIVATTRPETMLGDTAVAVHPDDEKYKNLTGKFCNLPISNKKIPIIADEYADPEKGSGAVKITPAHDFNDFEVGKRHDLEFI

SEQ ID NO: 191915 - protein, 193 aa, Unknown
  Bacterial polypetide isolated from the Sargasso Sea
MAKTYDPVGTEARWQQAWEDQGAFHPDPKAPGEPFSVVIPPPNVTGSLHMGHAFNTALIDTIVRYQRLAGKNVLCLPGTDHASIAVQTILEKQLKEEGKTRHDLGREAFLERAWQWKAESGGRIVGQLRRLGYSVDWKRQRFTLDEGLSEAVKEAFVRLHEQGLIVRGEYLVNWCPASGSAVSDLEVEMKEVD

SEQ ID NO: 191916 - protein, 325 aa, Unknown
  Bacterial polypetide isolated from the Sargasso Sea
GLNIKLVRDKDVLDTWFSSGLWPFSTLGWPNTNDPDFKKWYPNSVLVTGFDIIFFWVARMTMMGNTFTNNIPFKDVYIHGLVRDENNKKMSKSSGNGIDPILLIDKYGSDALRFALIREVAGAGQDIRLDFDRKKDTSSTVEASRNFANKLWNATKFVLINKTSNNNNYLLNESDETSLELCDKWILSKLNQVNTKVVALLKEYKLGESAKLLYEFTWNDFCDWYVEFAKQRFNNKETKNRQISEKVLIKVLNDILVMIHPFMPHITEELWHALQLKPDNSLLSLQKWPIHENKFVDNKLDNSFQQLFEIIRLIRNLRAELGLKP

SEQ ID NO: 191917 - protein, 248 aa, Unknown
  Bacterial polypetide isolated from the Sargasso Sea
MVGKFAILPIVKKRIPIVADEYVKMDQGSGAVKITPAHDFNDYELGKRHKLEIINIFNENAELNENCPEEYQGLDRYTAREKIISELKEKELLSKEEENLHSVPYGDRSGEVIEPLLTDQWFVDAKKLSIEAISNVKNGNTKFIPNNWDKVYFDWMENIQPWCVSRQLIWGHQIPAWYGPDGNIFVEETVEEAIISANRYYGKDVKLIQEDDVLDTWFSSALWPFSTLGWPEKTSELEKYYPTSTLVT

SEQ ID NO: 191918 - protein, 231 aa, Unknown
  Bacterial polypetide isolated from the Sargasso Sea
MEFKKYNHLEEEKKISDFWIKKGCFKPQKGRVKNTFSIVIPPPNVTGRLHMGHALNNSLQDVLIRFNRMKGHETLWQPGTDHAGIATQAVVEKNLQQKGIKKDDLGRDRFIQKVWEWKEQSGGIILDQLKKLGCSCDWSRTRFTMDKDLSHAVIKVFVDLYKKKLIYKDKKLVNWDTQLQTAISDLEVIQKDVQSQLYYIDYQIENSDKKITIATTRPETMMGDTAVAVNP

SEQ ID NO: 191919 - protein, 147 aa, Unknown
  Bacterial polypetide isolated from the Sargasso Sea
MQLDKFFDFLKDEKNLYSQWEQSNCFKPKKGGEPYSIMMPPPNVTGSLHMGHALTFTIQDILIRYHRMKGMEVLWQAGTDHAGIATQMVVERKLSESKLDRRSLGREKFIEKVWEWKKESGGQISNQLRRLGASADWSRERFTMDEG

SEQ ID NO: 191920 - protein, 257 aa, Unknown
  Bacterial polypetide isolated from the Sargasso Sea
VAEMSALGLLEKVEDNDMTVPYGDRSGVVIEPWLMDQWFVDAQRLAGPAITAVEQGRTKFVPQQWENTYYEWMRNIQPWCISRQIWWGHQIPAWFTSSGEIFVAMTEEEAYAAAVAACGDDVVLTRDPDVLDTWFSSALWPFSTLGWPDTTPEVERYYQTDVLITGFDIIFFWVARMMMMGIHFMDDVPFHTVYIHALVRDEQGQKMSKSKGNVIDPIELINKFGADALRFTLTAFAAQGRDVRLSEQRVEGYRNFC

SEQ ID NO: 191921 - protein, 327 aa, Unknown
  Bacterial polypetide isolated from the Sargasso Sea
GEHLDKYLEVATTRPETLLGDTAVAVNPDDDRYKEFIGVKVKVPFVDREIPIIADSHVDKDFGTGCVKVTPAHDPNDFAIGKRHNLKQINVMNKDGTLNINAGIFQNLDRYEARKKIIKELDNLGLLTKIEAYKHTVPFSDRGKVPIEPLLSTQWFLKMDDISQGCLNEIDSKKPSFIPPRWEKVYKDWLENINDWCISRQLWWGHQIPAWYVLDESQDSIEQNTPYIVARNEEDALIEANKKFGLNIKLVRDKDVLDTWFSSGLWPFSTLGWPNTNDPDFKKWYPNSVLVTGFDIIFFWVARMTMMGDTFTNNIPFQDVYIHGLVR

SEQ ID NO: 191922 - protein, 315 aa, Unknown
  Bacterial polypetide isolated from the Sargasso Sea
KLSVKAKKIVKNKKTKFFPPNWSKTYFQWMNNIEPWCISRQLWWGHQIPAWYGPDKKIFVASNYNEAKKLAKKKYKKDVELVRDEDVLDTWFSSGLWAFATLGWPKKNEYLKKFYPTSVLVTGFDIIFFWVARMMMFGMEFLNKQPFKEIYVHALVRDEKGQKMSKSKGNVIDPLILIDKYSADALRFTLLSMASPGRDVKLSEDRVKGYRNFLNKLWNANNFLSMNKCDFSKSKKEPKVKLNINKWIISELNTVSKLIEKNINDYRFDEAARNIYQFVWHSYCDWYVELSKTILNSKEKSSISEVKQTLSYVFK

SEQ ID NO: 191923 - protein, 215 aa, Unknown
  Bacterial polypetide isolated from the Sargasso Sea
MSLSKFFNFLEEENKIYLNWEKSESFKSKKNEEAYSIMMPPPNVTGSLHMGHALTFTIQDILIRYHRMQGKEVLWQAGTDHAGIATQMVVERKLSEEGLDRRTLGREKFIEKVWEWKEESGDSINNQLRRLGASADWSRQRFTMDDGLSEAVKKVFVDLYNDGIIYRDKRLVNWDPKLLTAISDLEVEQKEQEGSLWHIKYPIDKKNYIVIATTR

SEQ ID NO: 191924 - protein, 263 aa, Unknown
  Bacterial polypetide isolated from the Sargasso Sea
KIKIIKDNYADPEQGTGALKITPAHDFNDYDVGQRNKLEIINVFTEEGKINENAPKDYVGLDRFDARKKILNELKEKDYFVKEENIKNKVPYGDRSNSVIEPFLTEQWFVDAKKLAIKAKKIVKTKKTIFFPNNWSKTYFQWMNNIEPWCVSRQLWWGHQIPAWYGPDNKIFVALNEKEASKQAKKHYKKDVKLVRDPDVLDTWFSSGLWPFATLGWPDKKDFVKKFYPTTVLVTGFDIIFFWVARMIMFGMEFLNKEPFKDI

SEQ ID NO: 191925 - protein, 273 aa, Unknown
  Bacterial polypetide isolated from the Sargasso Sea
DAKQQAKKHYGKDVELNRDPDVLDTWFSSGLWPFATLGWPDDNKYVDKFYPTSVLVTGFDIIFFWVARMIMFGTEFLNKEPFKDIYVHALVRDEKGQKMSKSKGNVIDPLDLIEKYSADALRFTLLSMASPGTDVKLSEDRVKGYRNFLNKLWNANNFLITNECDFKDIDKVPSLNVNINKWIYSELVETKNKVEKNLEDYRFDEAAKNAYQFAWHSYCDWYLELSKTIIFSDDEKAKAEVKKVSSFVFKQILILLHPFIPFVTEEIWLKTNL

SEQ ID NO: 191926 - protein, 293 aa, Unknown
  Bacterial polypetide isolated from the Sargasso Sea
YADPEQGTGAVKITPAHDFNDYEVGVRNKLEILNIFTDDGKINKNAPSEFVGLDRFQARKKILNNLTEKQLLVKEENIKNKVPYGDRSNSIIEPYLTEQWFVDAKKLSVKAKKIVKSNKTKFYPKNWSKTYFQWMNNIEPWCISRQLWWGHQIPAWYGPDKKIFVGKTESEAKKIAKKYYKKDVKLLRDPDVLDTWFSSGLWAFATLGWPAKNDYVKKFYPTSVLVTGFDIIFFWVARMIMFGMEFLNKEPFKDIYVHALVRDEKGQKMSKSKGNVIDHLELIEKYSADALRF

SEQ ID NO: 191927 - protein, 280 aa, Unknown
  Bacterial polypetide isolated from the Sargasso Sea
HYDRWEKAGYFKAIGNGNPYCIVIPPPNVTGTLHMGHAFQHTIMDALIRYHRMKGHNTLWQMGTDHAGIATQMVVERLLNAEGQSKHDIGREAFIKKVWEWKQHSGNIISHQMRCLGASVDWSRERFTMDTGLCKAVTEEFVQLYDEGLIYKGKRLVNWDPVLHTALSDLEVLSEEESGKLWRFRYHITDSNDYLVVATTRPETMLGDTAVAVHPEDKRYSSYVGKTVQLPLCDRKIPVLADEYVDPEFGSGCVKITPAHDFNDYELGLRHNLPIINILI

SEQ ID NO: 191928 - protein, 273 aa, Unknown
  Bacterial polypetide isolated from the Sargasso Sea
ENGHLWHFNYPVHNSNEHLTIATTRPETMFGDSAVAVNPADDRYSKFIGEFIDLPLSNRKIPIIGDDYVDKEFGSGCLKVTPAHDFNDYEIGKRHDLEVINILAEDGTLNSTVPPDFFGLDRFEARKKIITDLTNKGLLVKTEDHQLMVPRGDRSKTVIEPYLTDQWFVKMENLASPALEAVRQGKTKFIPENWTKTYYDWLENIQDWCISRQLWWGHRIPAWYDDSGNVFVGMSEEHVRKENSLSPNKNLKQDEDVLDTWFSSPLWPFSTLG

SEQ ID NO: 191929 - protein, 277 aa, Unknown
  Bacterial polypetide isolated from the Sargasso Sea
GHALTFTIQDILIRYNRMKGKEVLWQAGTDHAGIATQMVVERELQEKKIKRTDLGRDKFIEEVWKWKKDSGDKISNQLKRLGSSADWSREKFTMDEGLSIAVRKVFVELFNDNIIYKDKRLVNWDPKLLTAISDLEVEQREQEGSLWHIKYPINNDKFIVVATTRPETMLGDTAVAVHPEDKRYNDYIGLYCNLPLVERKIKIIADEYADPDKGSGAVKITPAHDFNDFEIGKKNNLEFINIFDQHAKLNDNVPDRFKGKDRYEARDDILKELKSLD

SEQ ID NO: 191930 - protein, 315 aa, Unknown
  Bacterial polypetide isolated from the Sargasso Sea
RNKIYDYWKKNELFKPKENTKKFSIVIPPPNVTGSLHMGHALNNSIQDVLTRFHRMNNYETLWQPGTDHAGIATQALVEKKLAKDGVKKNDLGREKFIEKVWEWKNQYGDIIINQLKKLGCSCDWSRNAFTMDENLSKSVIKVFVDLYNKKLIYKAKKLVNWDVVLKTAISDLEVDQREVNSQLYYINYPIENSDKFITIATTRPETMLGDTAIAVNPKDDRFKDIVGKLVTIPLANRKIKVITDDYADPEQGTGAVKITPAHDFNDYDVGIRNKLEVINIFTPDGKINNNAPDPYKGLDRFAARKLILEHLEER

SEQ ID NO: 191931 - protein, 282 aa, Unknown
  Bacterial polypetide isolated from the Sargasso Sea
YGDRSNSIIEPYLTEQWFVDAKTLAIKAKEVVNNGKTKFFPENWSKTYFQWMDNIEPWCISRQLWWGHQIPAWYGPDGKIFVAENEDECKNQAKEFYSKDVELKRDEDVLDTWFSSGLWPFATLGWPEKTPEVEKFYPTSVLVTGFDIIFFWVARMIMMGTQFLDKEPFKNIYVHALVRDEKGQKMSKSKGNVIDPLELIEKYSADALRFTLLSMASPGRDVKLSEDRVKGYRNFLNKIWNANNFLTQNKCDFGDVKKPENINLTINKWIISELVKVKTTPK

SEQ ID NO: 191932 - protein, 297 aa, Unknown
  Bacterial polypetide isolated from the Sargasso Sea
FQPINIFDNNAFSNQEVPEPFCNLDRFKVRKLVLEKLAEMGFLIKEESCEISIPRGERSNVVIEPMLSNQWYVETKSMATKANEAVEKGQIKFHPENWIKTYYNWMNNIDDWCISRQIWWGHRIPAWYDQEGNVYVGHDEDDVRKFYELDARTLTQDNDVLDTWFSSSLWPFATLGWPEKTKKIEDFFPTNLLVTGFDIIFFWVARMMMMSLEFTGKIPFSDVYITGLIKDENGQKMSKSKGNIIDPIDLIYGITLEDLITKRTSNLMQDGVAEKIERKTGKQFPDGIPAHGTDALR

SEQ ID NO: 191933 - protein, 217 aa, Unknown
  Bacterial polypetide isolated from the Sargasso Sea
KEIDSNITIDKLKQDEDVLDTWFSSWLWPITVFDGINKPDNEEIKYYYPTSDLVTAPEIIFFWVARMIISGYEYRGEMPFKNVYFTGIVRDKQRRKMSKSLGNSPDPIELMKKYGADGVRAGMLFSAPAGNDLLFDEKLCEQGRNFSNKLWNAFRLIQTLEVSDEGKDQSLAIEWINSRFNEVLSEVEDHFSKYRISDALLSLYTFIWDDFCSWYLE

SEQ ID NO: 191934 - protein, 180 aa, Unknown
  Bacterial polypetide isolated from the Sargasso Sea
MGLGKYNHKKVEDRIYSYWEKNKLFKPNKNKKTFSIVIPPPNVTGSLHMGHALNNSLQDVLIRYYRMNNYETLWQPGTDHAGIATQALVEKELKSKNIDKNQIGREKFIKKVWEWKNEYGGKIINQLKKLGCSCDWSRNAFTMDKNLSKSVIKVFVELYKKKLLYKSKKLVNWDPVLKTA

SEQ ID NO: 191935 - protein, 329 aa, Unknown
  Bacterial polypetide isolated from the Sargasso Sea
FAARKAIVAAIDAMGLLEEIKPHDLTVPYGDRGGVVIEPMLTDQWYVRADVLAKPAVEAVENGDIQFVPKQYENMYFSWMRDIQDWCISRQLWWGHRIPAWYDNDGNVYVGRTEDEVRQENNLGADVQLRQDEDVLDTWFSSALWTFSTLGWPENTDALRQFHPTSVMVSGFDIIFFWIARMIMMTMHFIKDENGKPQVPFKTVYMTGLIRDDEGQKMSKSKGNVIDPLDMVDGISLPELLEKRTGNMMQPQLAEKIAKRTEKQFPNGIEPHGTDALRFTLAALASTGRDINWDMKRLEGYRNFCNKLWNASRFVLMNTEGNDCGFNGG

SEQ ID NO: 191936 - protein, 305 aa, Unknown
  Bacterial polypetide isolated from the Sargasso Sea
RRAGHRPGVHLDGSVNEQVDAGIPAQFAGLDRFEARKQIVAAFEAAGLLEKIEDHALKVPKGDRSGTVIEPWLTDQWYVSTKPLAEKAIAVVESGEIQFVPKQYENMYFSWMRDIQDWCISRQLWWGHRIPAWYDEAGNVYVGRDEAEVRAKYKLEGATLRQDEDVLDTWFSSGLWTFSTLGWPEQTDFLKTFHPTDVLVTGFDIIFFWVARMIMLSTHLTGQIPFKTVYVHGLVRDGQGQKMSKSKGNVLDPLDIVDGITLDELLEKRTSGMMQPKLAEKIAKQTRAEFPEGIASYGTDALRFT

SEQ ID NO: 191937 - protein, 261 aa, Unknown
  Bacterial polypetide isolated from the Sargasso Sea
VKVKVPFVDREIPIIADSHVDKDFGTGCVKVTPAHDPNDFAIGKRHNLKQINVMNKDGTLNINAGIFQNLDRYEARKKIIKELDNLGLLTKIEDYKHTVPFSDRGKVPIEPLLSTQWFLKMDDISQGCLHEIYSKKPSFIPPRWEKVYKDWLENINDWCISRQLWWGHQIPAWYVLDEAQDSIEQNTPYIVARNEEDALIEANKKFGSNIKLVRDKDVLDTWFSSGLWPFSTLGWPNINDPDFKKWYPNNVLVTGFDIIFF

SEQ ID NO: 191938 - protein, 315 aa, Unknown
  Bacterial polypetide isolated from the Sargasso Sea
ATLGWPEKTPEVEKFYPTSVLVTGFDIIFFWVARMIMMGTEFLKEEPFKNIYVHALVRDEKGQKMSKSKGNVIDPLELIEKYSADALRFTLLSMASPGRDVKLSEDRVKGYRNFLNKVWNANNFLRQNECDFNDIKKPENLKLTINKWILSELVKTKNETENSLKNYRFDEAAKNIYQFVWHSFCDWYLELSKTVLNSNNEEEIKEIRQTSSYVFREILIILHPFIPFVTEEIWLNNKLDKNGIEFLMHANWLEDDYHEKKSYDEINNIINFITSIRSFKNELNISPGSFIEISTANTNKRYKNFLSSNENIMKK

SEQ ID NO: 191939 - protein, 308 aa, Unknown
  Bacterial polypetide isolated from the Sargasso Sea
MLRTAISDLEVDQREVSSKLYYIKYKIENSNDHITIATTRPETMLGDTGIAVNPKDTRYDKFIGKFAILPIVGRKLKIVQDEYADPEQGTGAVKITPAHDFNDFDVGKRQNFKTINIFTENGKINKNAPNQYIGLDRFEARKKILEELSKLEILIKEENIKNKVPYGDRSNSIIEPYLTEQWFVDAKKLSLNAKKIVKNKTTNFFPSNWSKTYFQWMNNIEPWCISRQLWWGHQIPAWYGPDKKIFVAESEKKAKIDAKRFYKNKVKITRDPDVLDTWFSSGLWPFATLGWPNSNYYLKKFYPTSVLV

SEQ ID NO: 191940 - protein, 300 aa, Unknown
  Bacterial polypetide isolated from the Sargasso Sea
RFVARKAVVADLEAIGALVEVKKHKLMVPICTRTGQVIEPMLTDQWFVAMSKVSDQDPTGKSIAQKAIDAVASGDVKFVPENWVNTYNQWMNNIQDWCISRQLWWGHQIPAWYDEEGNVIVARTEAEAQAKAPGKQLRRDEDVLDTWYSSALVPFSTMGWPNQGDSATDDFNLYLPSTVLVTGYDIIFFWVARMIMMTTHFTGRVPFKHVYIHGLVRDAQGKKMSKSEGNVLDPVDLIDGIALEPLLDKRTTGLRKPETAPTVRKNTQKEFPDGIPAYGADALRFTFAALASLGRSINFD

SEQ ID NO: 191941 - protein, 330 aa, Unknown
  Bacterial polypetide isolated from the Sargasso Sea
DYEIGKKYCLHCIDNEVHLSDDIEDFEPLNIFTDEAHSNDNVPSPFKNLDRFKVRKLVLEEIKKLDLFVKEEPHEISVPRGERSNIVIEPKLSYQWYVKTKDMADKANKAVKNGEIKFHPENWIKTYFNWMNNIEDWCISRQIWWGHRIPAWYDDHGNVYVGYSENEVRTYYSLDNRSLRQDDDVLDTWFSSSLWPFASMGWPNESKNLKTFFPTNLLVTGFDIIFFWVARMIMMSIEFTGKIPFKDIYVTGLIRDENGQKMSKSKGNIIDPIDLIYGISLEDLLEKRTSNLMQEGLAEKITRKTKKQFPNGIESYGTDALRMTFYSMQL

SEQ ID NO: 191942 - protein, 309 aa, Unknown
  Bacterial polypetide isolated from the Sargasso Sea
LDRFQARKKILSRLIEKQLLVKEENIKNKVPYGDRSNSVIEPYLTEQWFVDAKKLSIKAKKIVKSNKTKFYPRNWSKTYFQWMNNIEPWCISRQLWWGHQIPAWYGPDKKIFVGKNENEAKKIAKKYYKKDVKLFRDPDVLDTWFSSGLWAFATLGWPAKNEYVKKFYPTSVLVTGFDIIFFWVARMIMFGMEFLNKEPFKDIYVHALVRDEKGQKMSKSKGNVIDPLELIEKYSADALRFTLLSMASPGRDVKLSEDRVKGYRNFLNKLWNANNFLVQNKCSFKNIQKKPKISININKWIYDELLETK

SEQ ID NO: 191943 - protein, 271 aa, Unknown
  Bacterial polypetide isolated from the Sargasso Sea
MNDIEPWCISRQIWWGHRIPAWYDETGNIFVAESERDAVKLAKKKNKNKQFKLRQETDVLDTWFSSALWPFATLGWPKKTEELNKFYPTSVLVTGFDIIFFWVARMLMMGNYFRKNTPFHKVYVHALVRDEKGQKMSKSKGNVIDPLDLINEYGADSLRFTLISMASPGRDVKLSKDRVTGNRNFITKIWSANNFLKLNNCKLDKKINLTSIKHPINHWIYNEFIKTQNLITKNIEIFRFDEAARYAYQFVWHSYCDWYLEFLKPVFNSKI

SEQ ID NO: 191944 - protein, 327 aa, Unknown
  Bacterial polypetide isolated from the Sargasso Sea
TPAHDFNDYEVGQRHGLPLINVLDHSAAIDLPTSPYHGLDRYVAREKIVSDLETQGLIEKIVEHQMMVPRGDRSNAVIEPYLTDQWFVRATPLAAPAIRAVEDGEIRFVPDNWQSTYFEWMRNIQDWCISRQIWWGHRIPAWYDQDGHFFVARTEEEARAQARAHHGHDTTLRQDEDVLDTWFSSALWPFSTLGWPEQTPTLKALYPTNVLVTGFDIIFFWVARMIMFGIKFTGQVPFHDVYVHGLVRDADGQKMSKSKGNVLDPLDLIDGIELEELVKTRTSGLMQPQMAQQIEKRTRRQFPDGIAAYGTDALRFTFASPGTQGRG

SEQ ID NO: 191945 - protein, 285 aa, Unknown
  Bacterial polypetide isolated from the Sargasso Sea
EEVIHKEKKGSLWYFRYPIKDENDYLIVATTRPETMLGDTGVAVNPKDKRYSKYIGKKIILPIINKEIPIFSDSYVDKDFGTGCVKVTPAHDPNDFEMAQRNNLNIINILNENGTLNDNVPKDFEGLDRFDARKKVVEYIEKLNLLEKIEDYTHKVGFSERTDVVVEPRLSKQWFLKMKDLAQPALEVVKDKKIQFYPERWEKIYNHWLNNINDWCISRQLWWGHRIPVWYKDDQIYCGEVAPEGKGWKQDEDVLDTWFSSWIWPFATLGWPDNSKDLKQFYPTQ

SEQ ID NO: 191946 - protein, 296 aa, Unknown
  Bacterial polypetide isolated from the Sargasso Sea
EFGTGCLKVTPSHDENDYKLGEKHKLQSIDIFDDEGKINENGKLYVGEDRFIVRKQISKDLDKIGLLEKTENYRNKVGFSERTDAVVEPKISTQWFLSMKDVKVPALDNVMNDNIKFHPSKLKNMYRAWMENINDWCISRQLWWGHQIPAYYLPSGEFVVAETKEEALKKAQEIDKNITIDNLTQDEDVLDTWFSSWLWPITVFDGINDPDNEEINYYYPTSDLVTAPEIIFFWVARMIIAGYEYRDEMPFKNVYFTGIVRDKQRRKMSKSLGNSPDPIELMKKYGADGVRAGMLF

SEQ ID NO: 191947 - protein, 313 aa, Unknown
  Bacterial polypetide isolated from the Sargasso Sea
LPLCNRLIPIVADSYVDPEFGTGVVKITPGHDFNDYDLGKRHGLYMDEDMQCHAGTEADFMPISIFNKTVEVIGVAPKKFHGMDRFEARKVILEDLKKDKFLVSEKEYESTLPYGDRSDQILEPLLTDQWYVDAKTLAKPAIEAVKSGEIQFVPTNWEKTYFQWMNNIQDWCVSRQLWWGHRIPIWYDESNKPHAGFSEKDVRERHNLKGKLRQEEDVLDTWFSSSLWTFATMGWPEKNKKLSLFHPTTTLVTGFDIIFFWVARMIMMTKHFMKEVPFKEVYITGLIKDENGQKMSKSKGNILDPIDSYRWSS

SEQ ID NO: 191948 - protein, 306 aa, Unknown
  Bacterial polypetide isolated from the Sargasso Sea
YNYWEKNKLFKPKKNSKKYSIVIPPPNVTGSLHMGHALNNSIQDLLVRYYRMNNYETLWQPGTDHAGIATQALVEKKLESENITKNDLGREKFIQKVWEWKNQYGDIIINQLKKLGCSCDWSRNAFTMDDNLSKSVVKVFVELHKKKLIYKAEKLVNWDTVLKTAISDLEVDQREMNSKIYYIKYPIENSSDFITIATTRPETMLGDTAIAVNPKDKRFKKYVGKIATIPVVGRKIKIITDNYADPEQGTGALKITPAHDFNDYDVGQRNQLDIINIFTEEGKINNNAPENYVGLDRFEARQKILK

SEQ ID NO: 191949 - protein, 296 aa, Unknown
  Bacterial polypetide isolated from the Sargasso Sea
ITIATTRPETMMGDTAVAVNPKDERYINLIGKNVLIPIVNRTVKIISDHYADPEQGSGAVKITPAHDFNDYEVGKRNNLEILNIFEKNGRINKNGIKEFHGLDRFEARKLLIKKLKEIGSLVKIENIKNKVPYGDRSNTIIEPLLTEQWFVDAKKLSKKPIKIVKQGKTSFFPKNWSKTFFQWMNEIEPWCISRQIWWGHRIPAWYDENGNIFVAENEKDAAKLAKKKNGNKQFKLRQETDVLDTWFSSALWPFATLGWPNKTKELDKFYPTSVLVTGFDIIFFWVARMLMMGNYF

SEQ ID NO: 191950 - protein, 296 aa, Unknown
  Bacterial polypetide isolated from the Sargasso Sea
MLGDTAVAVNPKDNRYKKYVNKTVTIPIAERKIKIIEDDYADPEQGTGALKITPAHDFNDYEVGKRNKLEIINIFTKEGKVNNNVISSYVGLDRFEARRKILNELKEKDFFVKEENIKNKVPYGDRSNSIIEPFLTEQWFVDAKKLSIKAKKIVKNKKTNFFPKNWSKTYFQWMNNIEPWCISRQLWWGHQIPSWYGPDKKIFVELNENDAKKSAKKYYKREVELIRDPDVLDTWFSSGLWPFATLGWPNKNGYLKKFYPTTVLVTGFDIIFFWVARMMMFGMEFLNKEPFKDIYV

SEQ ID NO: 191951 - protein, 278 aa, Unknown
  Bacterial polypetide isolated from the Sargasso Sea
SDLEVEQRDTEGSLWHIKYPIDENNHIIVATTRPETMLGDTAVAVHPDDEKYKNLVGKFCNLPISNKKIPIIADEYADPEKGSGAVKITPAHDFNDFEVGKRHDLEFINIFDENAKLNSNVPEEFQNLDRFEARKLILKKLDEMNLLIKEEKQQMVIPYGDRSGVVIEPWLTDQWFCDAKKLSVDPISAVKDKSSKFIPKQWENTFYNWMENIQPWCISRQLWWGHQIPAWYGPDNKYFVSETLEGAQNQAKEFYGKDVELRQDEDVLDTWFSSALWT

SEQ ID NO: 191952 - protein, 97 aa, Unknown
  Bacterial polypetide isolated from the Sargasso Sea
MEKTYDPQSIEQTLYQNWEEQGYFKPHGDASQGNYCIMIPPPNVTGSLHMGHAFQDTIMDTLIRYQRMKGKNTLWQVGTDHAGIATQMLVERKLEAE

SEQ ID NO: 191953 - protein, 301 aa, Unknown
  Bacterial polypetide isolated from the Sargasso Sea
IPIIGDEYVDMEFGTGCLKITPGHDFNDYEIGKKYNLYLDGEVVKSSKNQSDFKPVNIFDRFAYTNDSVPDPFKNLDRFKARKEVLSELEKMDLLVKEETHQISVPRGERSNVVIEPRLSFQWYVRTDEMAKKANEMVEKKIIRFHPNNWVKTYFNWMNNIEDWCISRQIWWGHRIPAWYDDENNCYVAETEELVRKKYNLGSKVLKQDDDVLDTWFSSSLWPFASLGWPKDNQDLKNFFPTDLLVTGFDIIFFWVARMMMMSIEFTNQIPFKDVYVTGLIRDENGQKMSKSKGNIIDPLD

SEQ ID NO: 191954 - protein, 183 aa, Unknown
  Bacterial polypetide isolated from the Sargasso Sea
DRSNSVIEPYLTEQWFVDAKKLSIKAKKIVKLKKTNFFPENWSKTYFQWMNNIEPWCISRQLWWGHQIPAWYGPDNKIFVALNEKEAEQNANKFYNKKVKLKRDPDVLDTWFSSGLWPFATLGWNTKDPYLKKFYPTSVLVTGFDIIFFWVARMIMFGMEFINKEPFKDIYVHALVRDEKGQK

SEQ ID NO: 191955 - protein, 242 aa, Unknown
  Bacterial polypetide isolated from the Sargasso Sea
MLEKHYKPSFLEEKFYKIWEKSGVFSANPESCKQPYAIMMPPPNVTGSLHMGHGLTFSLQDILIRYYRKTGRDTLWQPGTDHAGIATQMVVERQLAVEGLSRQELGRSKFLEKVWQWKKESGGTITEQLRSLGASPDWNRERFTMDADLSRAVTKVFVSLYKQGLIYRDKRLVNWDPKLLTAISDLEVQQMETKGKLWHFKYPIEGTLDEFITVATTRPETMLGDTGIAVHHDDPRHTKFVE

SEQ ID NO: 191956 - protein, 276 aa, Unknown
  Bacterial polypetide isolated from the Sargasso Sea
RNGLDKEQVIDFEGKLLPIANEFTGMAIEEARPKIVGKLQKKGLLVDTDSEYTHSKSFNSRGGGAIEPQIREQWFIDVNKPAVQWKGKKHSLKEVLIDVVRSGDIRLVPERFNSTYFHWVENLKDWCISRQIWWGHRIPVYYRENETRVSLQKPKPFKGWEQDPDTLDTWFSSALWTWSTLIDPELAKNYSLSLEDVLERSPDFQKFHPTDIMETGYDILFFWVARMILMTTYMLQEVPFKTVYLHGLIRNRDGKKMSKSDPKSVIDPLDSIEKYG

SEQ ID NO: 191957 - protein, 276 aa, Unknown
  Bacterial polypetide isolated from the Sargasso Sea
GSGAVKITPAHDFNDYDIAIKHNLPFINILNDDGTLNDEVPKNFRNLKILDAREKVLAFMSEIDIFVKEEKIDNTIPVGDRSGEVVEPLLKNQWFLDVKEMANKSSLAVEKGEVEFKPKFWENTFFEWMNKIQPWCISRQIIWGHRIPVWHSDDNRSVAAHNLDEANVKFLEKYQEEKQLNQDSDVLDTWFSSSLWPFSTLGWPNETIEYKRYFPTSLLVTGFDIIFFWVARMIMMSLELTGQIPFKLIYIHNLIRDKKGDKMSKTKGNVINPLDL

SEQ ID NO: 191958 - protein, 282 aa, Unknown
  Bacterial polypetide isolated from the Sargasso Sea
AELGAGVSLTQDEDVLDTWFSSGLWPFATVGWPAGDEAALKEYNRFYPSSVMETGYDILFFWVARMVMLGLEFTGKPPFHTIYMHGLVRDGQGQKMSKTKGNVVDPIETIEQYGTDALRLSLVTGVTPGLDVPLAMEKVQANRNFANKLWNTARFLVIGLKDLPAEERQALAVSGPMGEAELASLALPEAVGRLPLPRPRRQGHRPAGRVRLRPCRAGHLRLPLGRVRRLVHRDLEAAHRGRRPRRGARRATHARVRARLVPAAAAPVHALHHRGALAAAAA

SEQ ID NO: 191959 - protein, 318 aa, Unknown
  Bacterial polypetide isolated from the Sargasso Sea
VSLYEEDLIYKGDYIINWCPRCHTALSDLEVEHQDMQGYLYHLKYSVKDSEDFLVIATTRPETMLGDTAVAVNPDDERYQKYKGKKLILPVLNREVPLIEDDYVDTLFGTGALKVTPAHDPNDFELGRKHQLETINIMNPDGTMNSLAGATYEGLDRFECRKKIIRNLKDSGVLIKIEELNHSVGHCYRCRTVVEPYLSKQWFVKVKPLAEPAMKAVRDGSIKIVPKFWENTYFEWMENIRDWCISRQIWWGHQIPAWNCKACGEVVVARETPSSCSACSSTDLVQETDVLDTWFSSALWPFSTLGWPEKTDSLKCFY

SEQ ID NO: 191960 - protein, 226 aa, Unknown
  Bacterial polypetide isolated from the Sargasso Sea
KSCPKEIVEYDDPTTCPSCDSDQLNRDPDVLDTWFSSGLWPHSTLGWPDQTDELDYFYPGSVMETGYDILFFWVARMIMMGIQNMGEVPFKTIYLHGLVLDPEGIKMSKTKGNVLDPLEIINEYGADALRFALTTGTAAGNNIRMSESRLESSRNFANKIWNASRFVLSLNPKCNETPSLPKDSHLHDKWIISRLNIVAANVNKHMESYQFGEAQQELYDFFWNEY

SEQ ID NO: 191961 - protein, 314 aa, Unknown
  Bacterial polypetide isolated from the Sargasso Sea
RCGIKRDEDVLDTWFSSGLWPFATLGWPEKTPEVEKFYPTSVLVTGFDIIFFWVARMIMMGTEFLKEEPFKNIYVHALVRDEKGQKMSKSKGNVIDPLELIEKYSADALRFTLLSMASPGRDVKLSEDRVRGYRNFLNKVWNANNFLRQNECDFGDIKKPENINLTINKWILSELVKTKKETENSLKNYRFDEAAKNIYQFVWHSFCDWYLELSKTVFNSNNEEEIKELRQTSSYVFREILIILHPFIPFVTEEIWLNNKLDKNGNEFLMHANWLENDYHEKKSYDEINNIINFITSIRSFKNELNISPGSFIE

SEQ ID NO: 191962 - protein, 266 aa, Unknown
  Bacterial polypetide isolated from the Sargasso Sea
TKAHKLQVPRGDRTQQVIEPYLTDQWFVKMDVLAKRGLELVENGSIQFVPANWINTYRHWMENIQDWCISRQLWWGHRIPAWFDDAGTCYVGRDEADARAKNNLGPDIALHQDSDVLETWFSSQLWPFSTLGWPNEQAMDARGFERYLPSSVLITGFDIIFFWVARMIMATDSFTGRIPFKDVYITGLIRDAQGQKMSKSKGNVLDPLDIIDGISIEDLVAKRTTGLMKPKDAPKIEKATRREFPDGIIAHGADALRFTIAALATH

SEQ ID NO: 191963 - protein, 287 aa, Unknown
  Bacterial polypetide isolated from the Sargasso Sea
  misc_feature (287)..(287): Xaa can be any naturally occurring amino acid
MEFKKYNHSIEEKKISDFWIKKNLFKPKKNKSNKKFSIVIPPPNVTGRLHMGHALNNSLQDVLVRFNRMKGLETLWQPGTDHAGIATQAVVENNLLKEGIKKNDLGREKFIKKIWDWKEESGGIILDQLKKLGCSCDWSRTRFTMDKDLSKAVIKVFVDLYNNKLIYKDKKLVNWDTKLQTAISDLEVNQKDVQSQLYYIDYLIQNSDQKITIATTRPETMMGDTAVAVNPKDARYVNLVGKNVLIPIVNRAVKIISDEYADPEQGSGAVKITPAHDFNDYEVGKRX

SEQ ID NO: 191964 - protein, 271 aa, Unknown
  Bacterial polypetide isolated from the Sargasso Sea
TNWSKTYFQWMNNIEPWCVSRQLWWGHQIPAWYGPDKKIFVATNEVDAKKQAKKFYKKDVEITRDPDVLDTWFSSGLWPFATLGWPDKKDFVKKFYPTSVLVTGFDIIFFWVARMMMFGMEFLNKEPFKNIYVHALVRDEKGQKMSKSKGNVIDPLDLIEKYSADALRFTLLSMASPGTDVKLSEDRVKGYRNFLNKLWNANNFLITNKCDFKKTDKIPKTTLNINKWIYSELIEIKNKIQKNIEDYRFDEAAKNAYQFAWHSYCDGTSNL

SEQ ID NO: 191965 - protein, 255 aa, Unknown
  Bacterial polypetide isolated from the Sargasso Sea
FLIRYYRMNNYETLWQPGTDHAGIATQALVERKLEKEDLNKNSLGREKFIEKVWEWKNEYGDIIINQLKKLGCSCDWSRNAFTMDENLSKSVIKVFVELHKKKLIYKAEKLVNWDTVLKTAISDLEVDQREMNSKIYYIRYPIENSSEFITIATTRPETMLGDTAIAVNPKDKRYKEYVGKTVTIPIVGRKIKIIKDNYADPEQGTGALKITPAHDFNDYDVGQRNKLDIINVFTEEGKINDNAPQDYIGLDRFD

SEQ ID NO: 191966 - protein, 331 aa, Unknown
  Bacterial polypetide isolated from the Sargasso Sea
GIDKNELGREKFIEKVWEWKGQYGDIIINQLKKLGCSCDWSRNAFTMDENLSKSVLKVFVEMYKNGLIYKSKKLVNWDTVLKTAISDLEVDQREVNSKLYHINYPIEGTDKFITIATTRPETMLGDTAVAVNPSDERYKSLVNKNVIVPIVDRKIKIIEDDYADPEQGTGAVKITPAHDFNDYEVGERNNLEVINIFTSDGKINENAPDNYIGLDRFEARKRILKELSDKELLVKEEKIKNKVPYGDRSNSIIEPYLTEQWFADAKKLSIKAKEIVNNKTTNFFPVNWTKTYFQWMDNIEPWCISRQLWWGHQIPAWYGPDGEIFVDETEE

SEQ ID NO: 191967 - protein, 328 aa, Unknown
  Bacterial polypetide isolated from the Sargasso Sea
EFLKHAWQWKEKYGNTILTQLKRLGASCDWSRTTFTMDPEYSEAVTKVFVDLYNDGMIYKGERIINWDPKGQTALSDEEVIHKEISGHLWHFKYPIKDSKEHIIVATTRPETMLGDTGIAVNPNDERYQHLIGRNVILPIVNREIPIFSDSYVDKEFGTGAVKVTPAHDPNDFDMGQRNNLDTINILNPDGTLNNNVPDSFIGKDRLSARKLVVETIESLGLIDKIEDYVHKVGHSERTDAVVEPYISKQWFVNMEKLVGPAIDCVKNGEVKFYPERWTKTYYHWLDNIKDWCISRQLWWGHRIPVWYKNDEIYCGIKPPQGRRWVKK

SEQ ID NO: 191968 - protein, 286 aa, Unknown
  Bacterial polypetide isolated from the Sargasso Sea
LPITGRLIPVIADDYVDQEFGTGCVKITPAHDFNDYDMGKRHNLPMINILTDDAKINDDAPEAYRGLDRFDARKQIVADLDAQGALVKIEPHKLKVPRGDRTGAVIEPYLTDQWYVAVESLAKPAIEAVESGEIRFVPENWNKTYYQWMHNIQDWCISRQLWWGHRIPAWYDENGNVFVGRTEEEVREKHGLGSDVTLSQDDDVLDTWFSSALWPFATMGWPEETPDLETFVPSSVLVTGFDIIFFWVARMIMMTKKFTGKIPFKDIYITGLIRDENGDKMSKSKG

SEQ ID NO: 191969 - protein, 295 aa, Unknown
  Bacterial polypetide isolated from the Sargasso Sea
SILIGEKNKLFKPKENNKKFSIVIPPPNVTGSLHMGHALNNSIQDLLTRFHRMNNYETLWQPGTDHAGIATQALVEKKLKDDGIKKNEIGRDKFIEKVWEWKNQYGDIIINQLKKLGCSCDWSRNAFTMDDNLSKSVIKVFVDLYKKDLIYKSKKLVNWDVVLKTAISDLEVDQREVNSKLYHIRYPIENSKDFITIATTRPETMLGDTAIAVNPNDDRYKSLVNKFVTIPLVERKIKIIEDNYADPEQGTGAVKITPAHDFNDYEVGQRNNLEILNIFTPEGKINENAPKEFIG

SEQ ID NO: 191970 - protein, 333 aa, Unknown
  Bacterial polypetide isolated from the Sargasso Sea
ITFHPKTWTKTYNHWMENIKDWCISRQLWWGHQIPVWYHNDDKNKIHVSVEGPLDPENWTRDKDVLDTWASSWLWPMGVHSWPNDSDELKKFYPTDTLVTGPDIIFFWVARMIITGCEFMGQIPFKDVYFTSILRDETGKKLSKSLGNSPDPIELFNEFGTDAVRFGIMLMAPQGLDVLFSKDRLEIGRNFMNKLWNACRFIEMNLDKEYKRDLEFDNLELDLSDKWILSRLTKMVKDYNLQLERFHFNEAAKIIYEFTWNDFCDWYVEIAKIRFYGEDESKSNIVKSVSLKCISTVLTLLHPFAPFITEELWKHFSIQGASDLIVSSWIYKE

SEQ ID NO: 191971 - protein, 238 aa, Unknown
  Bacterial polypetide isolated from the Sargasso Sea
MSSDKYNHKEVENRIYLYWEKNKLFKPKKNKKKFSIVIPPPNVTGSLHMGHALNNSIQDLLTRYHRMNNFETLWQPGTDHAGIATQALVEKKLGNEGIKKNDIGRDEFVKKVWEWKNEYGGIIINQLKKLGCSCDWSRNAFTMDSNLSKSVLKVFVDLYKKKIIYKSKKLVNWDTVLKTAISDLEVDQREVNSILYHIKYPIEKTKEFITIATTRPETMLGDTAVAVNPKDKRYKHLI

SEQ ID NO: 191972 - protein, 301 aa, Unknown
  Bacterial polypetide isolated from the Sargasso Sea
FKPRKNKKKFSIVIPPPNVTGSLHMGHALNNSIQDLLTRYHRMNNFETLWQPGTDHAGIATQALVEKKLEKNGVNKNDLGRENFIKKVWEWKGQYGDIILNQLKKLGCSCDWSRNAFTMDDNLSDSVLRVFVELYKKKIIYKSKKLVNWDTVLKTAISDLEVDQREVNSKLYYIKYPINGTDEFITIATTRPETMLGDTAVAVNPKDKRFKKYKNKYVDLPLVKRKIKIIFDNYADPEQGTGAVKITPAHDFNDYDVGQRNKLKIINIFTEDGKINNNCPEKYKGLDRFEARKIILNDLKI

SEQ ID NO: 191973 - protein, 276 aa, Unknown
  Bacterial polypetide isolated from the Sargasso Sea
GPDKKIFVAENENDAKKLAKKHYKKDTNISRDPDVLDTWFSSGLWPFATLGWPKKNDYLNKFYPTTVLVTGFDIIFFWVARMMMLGMEFLNKEPFKDIYVHALVRDEKGQKMSKSKGNVIDPLELINKYSADALRFTLLSMASPGRDVKLSEDRVKGYRNLLNKLWNANNFLIQNKCNFSEKKPKKFNLNINNWIFNELVKIKKEVETKIKEYRFDEASRLIYQFVWNSYCDWYLELSKTILYSNDKKKIKETQDVSGFIFTQILILMHPFIPFVN

SEQ ID NO: 191974 - protein, 275 aa, Unknown
  Bacterial polypetide isolated from the Sargasso Sea
NSKLYYINYQIENSSEFITIATTRPETMLGDTAVAVNPKDERYTNLVGKNVVLPITGRKIKIIQDDYADPEQGSGAVKITPAHDFNDYDVGKRNKLEIINIFTEDGKINENAPSDYVGLDRFEARKKILNELGDKLIKEENIKNKVPYGDRSNSVIEPYLTEQWFADAKKLSVKAKKIVKNKKTKFFPPNWSKTYFQWMNNIEPWCISRQLWWGHQIPAWYGPDKKIFVASNYKEAKKLAKKKYKKDVELVRDEDVLDTWFSSGLWAFATLGWPN

SEQ ID NO: 191975 - protein, 258 aa, Unknown
  Bacterial polypetide isolated from the Sargasso Sea
KKFYKKKVNLKRDPDVLDTWFSSGLWPFATLGWPSKNYFLKKFYPTSVLVTGFDIIFFWVARMMMLGMQFLNKEPFKEVYVHALVRDEKGQKMSKSKGNVIDPLVLIDRYSADALRFTLLSMASPGRDVKLSEQRVKGYRNFLTKIWNVNNFLKVNKCSFNGSINPHNLKLNINRWIYSELIETKNLTENFIKNYRFDEAAKTVYKFVWNSYCDWYLELSKTILFSKKNRDINEVKNTSGQIFKEILILLHPFIPFIT

SEQ ID NO: 191976 - protein, 278 aa, Unknown
  Bacterial polypetide isolated from the Sargasso Sea
CCCPTRPETMLGDTAVAVHPFDKRYSDLIGKTLVLPLVNREIPIIADEYSDPDKGSGAVKITPGHDFNDFDVGKRHDLEVINIFDEKACIVDTEFTKKYAGLDRFVARKKVIEDLEKENFLVKVEEVENVLPYGDRSGEIIEPWLMEQWYVNAKVLAKPTIDAVKQGKMRFIPKNWENLFFEWMNNIQPWCISRQLWWGHRIPVWYGPDKTTFVELDEEKALKKAEEHYGHKVSLQQENDVLDTWFSSALWPFSTLGWPNQTDELKKYYPGSVLVTGF

SEQ ID NO: 191977 - protein, 249 aa, Unknown
  Bacterial polypetide isolated from the Sargasso Sea
YIDYKLEDEDNVITIATTRPETMLGDTAIAVHPDDERFKDFVGKHAFIPILNRKIIIIADEYVKVDQGSGAVKITPAHDFNDYEIGIRHNLEVINIFNENAELNENCPIEYQNLDRFKARDKIVNELETIGALNKIEENIHTVPYGDRSGEVVEPWLTDQWFVNAKKLSLNAIEKVKTKKTIFVPQNWEKTYFDWMENIQPWCISRQLIWGHQIPAWYGPDGDIFVAENSDEAHKIARERYNKDVKLVQ

SEQ ID NO: 191978 - protein, 320 aa, Unknown
  Bacterial polypetide isolated from the Sargasso Sea
NPKDDRFKSFVGKTATIPIVGRQINIIEDDYADPEQGTGALKITPAHDFNDYDVGQRNNLEIINIFTESGKINDNAPRGYVGLDRFEARKKILKELKEKDFFVKEENIKNKVPYGDRSNSIIEPFLTEQWFADAEKLSVKAKEVVNLKKTNFFPENWSKTYFQWMNNIEPWCISRQLWWGHQIPAWYGPDKKIFVAINEDEAKEQAKKYYNKEVDLVRDPDVLDTWFSSGLWAFATLGWPDNKKYVDKFYPTSVLVTGFDIIFFWVARMIMFGTEFLNKEPFKDIYVHALVRDEKGQKMSKSKGNVIDPIDLIEKYSADA

SEQ ID NO: 191979 - protein, 261 aa, Unknown
  Bacterial polypetide isolated from the Sargasso Sea
MSFDKYEHNNVENKIYDYWEKNELFKPKENSKKFSIVIPPPNVTGSLHMGHALNNSIQDVLTRFHRMNNYETLWQPGTDHAGIATQALVEKKLVKEGIKKNDLGREKFIKKVWEWKNEYGDIIINQLKKLGCSCDWSRNAFTMDENLSKSVIKVFVDLYDKKLIYKAKKLVNWDVVLKTAISDLEVDQREVNSQLYYINYPIENSDKFITIATTRPETMLGDTAIAVNPKDDRFKDLVGKLVTIPLANRKIKIITDDYADP

SEQ ID NO: 191980 - protein, 296 aa, Unknown
  Bacterial polypetide isolated from the Sargasso Sea
SCDWSRNAFTMDENLSKSVIKVFVDLFNKGLIYKDKKLVNWDTVLKTAISDLEVDQREVNSKIYYIRYPIDGTEEFITIATTRPETMLGDTAIAVNPKDERFKSFVGKTVTIPIVGRKIKIIVDDYADPEQGTGALKITPAHDFNDYDVGQRNNLEIINIFTEAGKINNNAPKEYVGLDRFEARKRILKELKDKEFFVKEENIKNKVPYGDRSNSIIEPFLTEQWFADAGKLSVKAKEVVNSKKTNFFPENWSKTYFQWMNNIEPWCISRQLWWGHQIPAWYGPDEKKFLLQKMKE

SEQ ID NO: 191981 - protein, 262 aa, Unknown
  Bacterial polypetide isolated from the Sargasso Sea
FTEDGKINNNAPTEYVGLDRFEARKKILNELGDKLIKEEKIKNKVPYGDRSNSVIEPYLTEQWFADAKKLSIKAKKIVKNKKTSFFPKNWSKTYFQWMNNIEPWCISRQLWWGHQIPAWYGPDKKIFVAHNLNEAKKLAKKKYKKDVELVRDEDVLDTWFSSGLWAFATLGWPKKNEYLKKFYPTSVLVTGFDIIFFWVARMMMFGMEFLNKEPFKDIYVHALVRDEKGQKMSKSKGNVIDPLVLIEKYSADALRFTLLSMA

SEQ ID NO: 191982 - protein, 308 aa, Unknown
  Bacterial polypetide isolated from the Sargasso Sea
GCSCDWSRNAFTMDENLSKSVIKVFVDLYNKKLIYKAKKLVNWDVVLKTAISDLEVDQREVNSQLYYINYPIENSDKFITIATTRPETMLGDTAIAVNPKDDRFKDLVGKFVIIPLVKRKIKIITDDYADPEQGTGAVKITPAHDFNDYDVGIRNKLEVINIFTPDGKINDNAPDPYKGLDRFAARKLILEHLEEGKFLEKIEKLINKVPYGDRSNSIIEPYLTEQWFVDAKTLAVKAKEVVNNGKTKFFPENWSKTYFQWMNNIEPWCISRQLWWGHQIPAWYGPDGKIFVAENEDECKKQAKEFYS

SEQ ID NO: 191983 - protein, 265 aa, Unknown
  Bacterial polypetide isolated from the Sargasso Sea
KAVVAGLEELGLLVKVEDYRHSVPYSDRGKVPVEPLLSTQWFVKTEPLAARCREALEKQDPRFIPERWEKVYRDWLTDIRDWCISRQLWWGHRIPAWFVISETGGKYTDTTPYVVARNEAEALEKAKAEYGAAAEIEQDEDVLDTWFSSGLWPFSTLGWPDAYSADLQRWYPTSTLVTGFDIIFFWVARMTMMAGAFTGEMPFQDVYIHGLVRDEQNRKMSKSAGNGIDPLLLIDRYGTDALRFALVREVAGAGQDIRLDYDRKK

SEQ ID NO: 191984 - protein, 286 aa, Unknown
  Bacterial polypetide isolated from the Sargasso Sea
RQKLKIINIFSEDGKINNNAPREYIGLDRFEARQKIINKLKELEIFEKEESIKNKVPYGDRSNSIIEPFLTEQWFCDAKKLSIKAKKVVKNKATSFFPPNWSKTYFQWMDNIEPWCISRQLWWGHQIPAWYGPDKKIFVAENQKKAETLAKKFYKKRVNLKRDPDVLDTWFSSGLWPFATLGWPNKNYYLKKFYPTSVLVTGFDIIFFWVARMMMLGMEFLNKKPFKDIYVHALVRDEKGQKMSKSKGNVIDPLVLIDSYSADALRFTLLSMASPGRDVKLSEQRV

SEQ ID NO: 191985 - protein, 309 aa, Unknown
  Bacterial polypetide isolated from the Sargasso Sea
RYKHLIGKNVILPIVKRKIKIITDDYADPEQGTGAVKITPAHDFNDYEVGLRNKLEIINIFTEDGKINENAPSEFIGLDRFDARKKILNEIASKDLLVKEENIKNKVPYGDRSNSVIEPFLTEQWFTDAKKLSIKAKKIVKSKKTNFFPKNWSKTYFQWMDNIEPWCISRQLWWGHQIPAWYGPDKKIFVATSEIEAKKIAKKYYKKNVELRRDPDVLDTWFSSGLWPFATLGWPIKNNYLKKFYPTTVLVTGFDIIFFWVARMIMFGMEFLNKEPFKDIYVHALVRDEKGQKMSKSKGNVIDPLELIE

SEQ ID NO: 191986 - protein, 284 aa, Unknown
  Bacterial polypetide isolated from the Sargasso Sea
MTEMNDQLSLENYSPFEVEKKWQEKWEILKAFSPNPEDDGEPFCVVIPPPNVTGSLHMGHAFNTALIDVVVRFQRLLGKNVLCLPGTDHASIAVQTILEKQLKSEGKTSEDIGRDEFLKRAWNWKEQSGGRIVSQLKRIGYSVDWTRERFTLDQKLNEAVIEAFHILYEKNLIYRGEYLVNWCPESQSAVSDLEVEMQEVNGHLWHFKYPLISESGEQLDKYLEVATTRPETLLGDTAVAVNPDDDRYKEFIGVKVKVPFVDREIPIIADSHVDKDFGTGCVKV

SEQ ID NO: 191987 - protein, 309 aa, Unknown
  Bacterial polypetide isolated from the Sargasso Sea
MHSQWDENLSKSVLKVFVDLYNKKLIYKAKKLVNWDVVLKTAISDLEVDQREVNSQLYYINYPIENSDKFITIATTRPETMLGDTAIAVNPKDDRFKDIVGKLVSIPLANRKIKVITDDYADPEQGTGAVKITPAHDFNDYDVGIRNKLEVINIFTPDGKINDNAPDPYKGLDRFAARKLILEHLKEGKFLEKIEKLVNKVPYGDRSNSIIEPYLTEQWFVDAKTLAIKAKEVVNNGKTKFFPENWSKTYFQWMDNIEPWCISRQLWWGHQIPAWYGPDGKIFVAENEDECKNQAKEFYSKDVELKRDE

SEQ ID NO: 191988 - protein, 238 aa, Unknown
  Bacterial polypetide isolated from the Sargasso Sea
PYGDRSNSIIEPFLTEQWFCDAKKLSIKAKKIVKKKDTNFFPSNWSKTYFQWMNNIEPWCISRQLWWGHQIPAWYGPDKKIFVAENQKKAELLAKKFYKKKTNLKRDPDVLDTWFSSGLWPFATLGWPSKNYFLKKFYPTSVLVTGFDIIFFWVARMMMLGMQFLNKEPFKEIYVHALVRDEKGQKMSKSKGNVIDPLVLIDSYSADALRFTLLSMASPGRDVKLSEHRVKGYRNFLT

SEQ ID NO: 191989 - protein, 274 aa, Unknown
  Bacterial polypetide isolated from the Sargasso Sea
VAVNPDDDRYKKIIGKNVIIPIIGRKIKIITDEYADPEQGTGAVKITPAHDFNDYDVGERNNLEIINIFTDDGKINKNAPDEYVGLDRFDARKKIINKLNELGFFVKEENIINKVPYGDRSNSIIEPYLTEQWFADAKKLAVKAKDIVNSKDTKFFPENWSKTYFQWMDNIEPWCISRQLWWGHQIPAWYGPDGKIFVEETFEEAKKVSNDFYKKDVELVRDKDVLDTWFSSGLWPFATLGWPEKTDYLKSFYPTSVLVTGFDIIFFWVARMIM

SEQ ID NO: 191990 - protein, 262 aa, Unknown
  Bacterial polypetide isolated from the Sargasso Sea
EKTYFEWMENIQPWCISRQLMWGHQIPAWYGPDGKLFVAENLEDAKRIARDHYDKDVKLEQDNDVLDTWFSSALWPFSTLGWPDQTPELEKFYPTSTLVTGFDIIFFWVARMMMMGLYFTEKIPFSEVYVHALVRDDKGQKMSKSKGNVIDPIVLMDEFGADSLRMTLCSMAAQGRDIKLSKQRVEGYRNFITKIWNAVKFCEINNCSYEDFDIEHTQNIFNLWILNELENCRYKTEQSIKNYRFNEAANELYKFTWGIFCD

SEQ ID NO: 191991 - protein, 299 aa, Unknown
  Bacterial polypetide isolated from the Sargasso Sea
AVNPNDERYKTYIGKKVIVPIVDREVKIIFDNYVSIEQGSGALKVTPAHDFNDFEIGKRHKLEFINIFEKNGKLNNSVPKNLIGLDRFDARNLIVRKLKEINLLEKIDNIKNSVPYGDRSNSIIEPLMTEQWFADAKFLAKKAIQVVKKKKTNFFPVTWEKTYFQWMNNIQPWCISRQLWWGHRIPAWYTKDKKIFVAENENEAKKIAKKFYKKNVELKRDDDVLDTWFSSALWPFATLGWPKKTYELKRFYPTSVLVTGFDIIFFWVARMMMLGNHLIKKEPFSKIYVHALVRDEKGQ

SEQ ID NO: 191992 - protein, 283 aa, Unknown
  Bacterial polypetide isolated from the Sargasso Sea
MEIENKLYLDWEKKKLFSSRVNKNKQNFSIIMPPPNVTGSLHIGHALNMTIQDVLCRYWRMKNKNVLWQPGTDHAGIATQNVVEKNLIKSEKKSKNQIGKQAFIKKIWEWKENSGNQIINQIKRLGASPDWKRLKFTMDKDVSEAVNFVFVNLFKKGLIYKDKRLVNWDIKLQTAISDLEVEQKEQKGDFIYIKYFLEDSKNFIVVATTRPETLFGDCCLAVNPKDKKYKKFIGKKVKVPLTDRVIQIISDSYVDINKGSGALKITPAHDFNDFKIGKKLKTS

SEQ ID NO: 191993 - protein, 296 aa, Unknown
  Bacterial polypetide isolated from the Sargasso Sea
MQDETYEPLAIEKKWQESWESANKFVPVGSDKKFSIVIPPPNVTGSLHMGHALEHSIIDVITRIKRLQGYETLWVPGTDHAGIITQLLVENELSEKGVQKEDIGRENFISKVWEWKEKSGENISTQMRKLGMSCDWSRERFTMDEGLSTAVREVFIKLYEDGLIYKGTRMVNWDTELMSAVSDLEVTLNPEKGKLWSIKYKTEDSFLTISTTRPETLLGDTAVAVNPDDERYKNLIGKTAIVPLVNREVPIIADEYVDPEFGSGCVKITPSHDFNDYEIGEKHKLEFIQCIDLDGK

SEQ ID NO: 191994 - protein, 298 aa, Unknown
  Bacterial polypetide isolated from the Sargasso Sea
NIFDNNAKLNSEVPDRYVGVDRFEARDMIVKDIERLGLLEKIEDNEMTIPYGDRSGVVIEPWLTDQWFVDAKTLAAPAIAKVKEGYTRFVPSHWEKTYFDWMENIQPWCVSRQIWWGHQIPAWFGPDGEIFVEATEEEALISAKKHYGKNIDLKRDEDVLDTWFSSALWPFSTMGWPENTADLAKYYPTSVLVTGFDIIFFWVARMMMMGLHFLKEVPFKTVYIHALVRDEKGQKMSKSKGNVMDPLELIDKYGADALRMTLVALAAQGRDIKLSENRVEGLQNFATKLWNAARFCEF

SEQ ID NO: 191995 - protein, 273 aa, Unknown
  Bacterial polypetide isolated from the Sargasso Sea
MISDKYNHSVVESKIYSYWEKNNLFKPKKNKKKFSIVIPPPNVTGSLHMGHALNNSIQDLLTRYYRMNNYETLWQPGTDHAGIATQALVEKKLAAENINKNDLGRSEFIKKVWEWKNQYGDIIINQLKKLGCSCDWSRNAFTMDKNLSESVIRVFVDLYNKKLIYKSKKLVNWDTVLKTAISDLEVDQREVNSILYYIKYPIEHSSEFITIATTRPETMLGDTAVAVNPKDKRYKKFVGKNAILPLVGRKIQIVADNYADPDQGTGAVKLLQP

SEQ ID NO: 191996 - protein, 267 aa, Unknown
  Bacterial polypetide isolated from the Sargasso Sea
VIPPPNVTGTLHMGHSFQYAIMDFYTRYHHMSGKDAHWQVGADHAGIATQMVVENNLAKKNVTRLELGREKFVDEVWSWKNYSEEKITSQIKRLGCSVDWSKYRFTLDDGCNEAVIKAFVELHRKNKIYRGYRLVNWDPSLKTAVSDLEVIRQEKDGLLWHIKYPIEDSKDFVIVATTRPETMFGDMAIAVNPDDDRYKNLIGKNVVLPFVGRKIPILADEYVDMEFGTGCLKITPGHDFNDYEIGKKYSLHEVDGQVKTSDAASDF

SEQ ID NO: 191997 - protein, 277 aa, Unknown
  Bacterial polypetide isolated from the Sargasso Sea
TAIAVNPKDERFKSFVGKTVTIPIVGRKIKIIEDDYADPEQGTGALKITPAHDFNDYDVGQRNNLEIINIFTEAGKINENAPEHYIGLDRFEARKRILKELKEKDFFVKEENIKNKVPYGDRSNSIIEPFLTEQWFADAGKLSVKAKEVVNSKKTNFFPENWSKTYFQWMNNIEPWCISRQLWWGHQIPAWYGPDEKIFVAENEEDAKQQAKKHYGKDVELNRDPDVLDTWFSSGLWPFATLGWPDDNKFVDKFYPTSVLVTGFDIIFFWVARMIMF

SEQ ID NO: 191998 - protein, 635 aa, Unknown
  Bacterial polypetide isolated from the Sargasso Sea
MEISSKFDHTEIEKKWYSFWNKNKFFNSEPDDREPFTIVIPPPNVTGLLHMGHMLNNTIQDILIRKARMMGKNACWVPGTDHASIATEAKVVENLKSLGINKSDISREEFLKYAWEWTEKYGGGILDQLKRLGCSCDWNRTKFTLDDDMYESVILAFIDLHKKGYIYRGYRMVNWDPEAQTTVSDEEVNYVEEESKLYYLNYSIDGSKDKLIIATTRPETIFGDTAVCVNPKDKRYSKFVGKKAIVPICDRKIPIIADSYVDIEFGTGCLKVTPAHDLNDYNLGNKHKLEIIDIFDPKGRLNEYGLHYKNKDRFDARNEIVEELKNKKILDKSEVYKHNVGRSERTNAIIEPKISRQWFLKMDKISKPAITNVLKNENIKFFPKKFKSTYRYWLENIKDWNISRQLSWGHQIPAFYYGENSDEYVIAQNKDEAKKILENQKGLKLKDDELTQDEDVLDTWFSSWLWPISVFDGIRNPENKDIKYYYPTQDLVTGPDIIFFWVARMIISGYEFRDEKPFSNVYFTGIVRDKLRRKMSKQLGNSPDAIELIDKYGADSVRVGLMLSSAAGNDLLFDESLCQQGKNFTNKLWNALRLINGWQADDSKEISEVNSLALKWYENKFNQVLELINNNYNNY

SEQ ID NO: 191999 - protein, 421 aa, Unknown
  Bacterial polypetide isolated from the Sargasso Sea
GCVKVTPAHDPNDFAIGQRHGLPQITVMRKNGTMNKEAGQFEGLDRFEARKAVVAGLDDLGLLVKVEDYRHSVPYSDRGKVPVEPLLSTQWFVKTEPLAARCREALEKQDPRFIPERWEKVYRDWLTDIRDWCISRQLWWGHRIPAWFVISETGGKYTDTTPYVVARNEAEALKKAKVEYGAAAEIEQDEDVLDTWFSSGLWPFSTLGWPDASSADLQRWYPTSTLVTGFDIIFFWVARMTMMAGAFTGEMPFQDVYIHGLVRDEQNRKMSKSAGNGIDPLLLIERYGTDALRFALVREVAGAGQDIRLDYDRKTDTSATVEASRNFANKLWNATRFALMNLGGETPAQLGDPDPAALQLADRWILSRLARLNRETAERYDNYGLGEAAKGLYEFAWNDVCDWYLELSKRRLNPGENPSAE

SEQ ID NO: 192000 - protein, 315 aa, Unknown
  Bacterial polypetide isolated from the Sargasso Sea
MALNKHFDSATVERRVSEKWIGNKAFRAGANAKDGQPSYTIMIPPPNVTGVLHMGHAFNNTLQDILIRWKRMQGYKTLWQPGTDHAGIATQMVVERQLAEEGKKRTDFSRDEFLEKIWNWKKKSGGTIISQLQRLGASCDWDREAFTMSGAPNAPKDEGGNFHDAVIKVFVDLYKKGLIYRGKRLVNWDPHFETAISDLEVENIEVAGHMWHFKYPLKSGETYTYIEKDEEGNITLQEERDYISIATTRPETMLGDGAVAVHPSDQRYKSLIGKFCEIPVGPRQYRRLIPIIADEYPDPSFGSGAVKITGAHDFN

SEQ ID NO: 192001 - protein, 402 aa, Unknown
  Bacterial polypetide isolated from the Sargasso Sea
MEFKKYNHSKEEKKISDFWIKKGLFKPKKNKSNKKFSIVIPPPNVTGRLHMGHALNNSLQDVLVRFNRMKGLETLWQPGTDHAGIATQAVVENNLLKEGIKKNVLGREKFIKKIWDWKEESGGIILDQLKKLGCSCDWSRTRFTMDKDLSKAVIKVFVDLYNNKLIYKDKKLVNWDTKLQTAISDLEVNQKDVQSQLYYIDYTIENSDQKITIATTRPETMMGDTAVAVNPKDKRYVNLVGKNVLIPIVNRTVKIISDNYADPEQGSGAVKITPAHDFNDYEVGKKHKLEVINIFEENGKINKNGIKEFHDLDRFEARKLIIKKLKDIGSLVKIENIKNKVPYGDRSNTIIEPFLTEQWFVDAKKLSKKPIKIVKEGKTTFFPKNWSKTFFQWMNDIEPWCI

SEQ ID NO: 192002 - protein, 655 aa, Unknown
  Bacterial polypetide isolated from the Sargasso Sea
MQLPKFFNFLEDEKKIYSDWELSNSFASKKNIESYSIMMPPPNVTGSLHMGHALTFTIQDILIRYHRMQGKEVLWQAGTDHAGIATQMVVERKIADEGLERRLLGRDQFIKKVWKWKEESGGLINNQLRRLGASADWSRERFTMDEGLSEAVKKVFVDLYNDGIIYRDKRLVNWDPKLLTAISDLEVEQKEQEGSLWHIKYPIDKDNFIIVATTRPETMLGDSAVAVHPEDLKYKNLIGKTCTLPLVGKKIPIIADEYADPEKGSGAVKITPAHDFNDFEVGKRHNLEFVNIFDQFAKVNQNAPSKFQGLDRYEVRKLILEDLSKLNLLIKEEKQEMVIPYGDRSGVVIEPWLTDQWFCNAKKLSIDPINSVKKNNTNFVPKIWEKTFFNWMENIQPWCISRQLWWGHQIPAWYGPDNKIFVALNIEDAKLMASKHYAKDVELKQDEDVLDTWFSSALWTFSTLEWPNQTYELDRFYPGNVLVTGFDIIFFWVARMMMMGSYFMKETPFKDVYIHPLIRDEKGQKMSKSKGNIIDPLVLLDKYGADTLRFTLTALLNPGRDVKLAEERVKGYKSFTNKIWNAANFLNLNNVSFLDTIDIENIKLDSSKWILKEFEEIQKKYFENIERYQFHEIASLMYHFTWNTFCDWYIEFIKS

SEQ ID NO: 192003 - protein, 480 aa, Unknown
  Bacterial polypetide isolated from the Sargasso Sea
MEFGTGCLKITPGHDFNDYDIGKKYCLHEKGGTVLMSKNADDFKPINIFNDDAWTNDNVPEPFNNLDRFKVRKLAIEELNRLNLLVKEEEYEISVPRGERSNIVIEPRLSNQWYVKTSDMAKKANKEVKNGNIKFHPENWIKTYFNWMDNIEDWCISRQIWWGHRIPAWYDQDGNTYVGENEDDVRKHYKLNDIKLTQDEDVLDTWFSSSLWPFGSLGWPEETEDFKNFFPTSLLVTGFDIIFFWVARMMMMSLEFTGKIPFKDVYVTGLIRDENGQKMSKSKGNIIDPIDLIYGISLDDLIKKRTSNLMQEGIAEKIERKTRKEFPNGIESYGTDALRMTFFSLATHTKDISFEFGRLKGYRNFCTKIWNAARFIDGYPKERDSFVSQNDNDEWIHSEFLNTKDQITKNIADYRLDFAINEIYEFFWNKFCDIYIEECKKSGNTANLRPILKEILNLLHPFAPFITEEISDKIFKERII

SEQ ID NO: 192004 - protein, 600 aa, Unknown
  Bacterial polypetide isolated from the Sargasso Sea
NLNKNDLGREKFIEKVWEWKNQYGDIIINQLKKLGCSCDWSRNAFTMDENLSKSVVKVFVELHKKKLIYKAEKLVNWDTVLKTAISDLEVDQREMNSKIYHIRYPIDNSDDFITIATTRPETMLGDTAIAVNPKDKRFKKYVGKTVTIPIVGRKIKIIKDNYADPEQGTGALKITPAHDFNDYDVGQRNKLEIINVFTEDGKINNNAPIDYVGLDRFEARKKILNELKEKDFFVKEENIKNKVPYGDRSNSVIEPFLTEQWFVNAKKLSVKAKQIVKSKKTNFFPENWSKTYFQWMNNIEPWCISRQLWWGHQIPAWYGPDKKIFVATNETDAKKQAKKFYKKDVIITRDPDVLDTWFSSGLWPFATLGWPDKKDFIKKFYPTTVLVTGFDIIFFWVARMMMFGMEFLKKEPFKDIYVHALVRDEKGQKMSKSKGNVIDPLDLIEKYSADALRFTLLSMASPGTDVKLSEDRVKGYRNFLNKLWNANNFLITNKCDFNKTDKVPKTTLNINKWIYSELIQTKDKIEKNLKDYRFDEAAKNAYQFAWHSYCDWYIELSKTILFSDDEKSKKEVKEVSAYIFKQILVILHPIYSHLLLRKSG

SEQ ID NO: 192005 - protein, 462 aa, Unknown
  Bacterial polypetide isolated from the Sargasso Sea
YGPDGKVFVEENEETAKLKAKDFYHKKVELKRDEDVLDTWFSSGLWPFATLGWPKKNEYLDNFYPTTVLVTGFDIIFFWVARMIMLGMEFLDKEPFKDIYVHALVRDEKGQKMSKSKGNVIDPLELIDKYSADALRFTLLSMASPGRDVKLSEDRVKGYRNFLNKIWNANNFLIQNSCDFINVNKPENINENINKWIITEFLLIKEVIQRNIYNYRFDEAAKNAYQFVWNSFCDWYIELSKTIYYSDNQNSKDETRRVSSYIFREILILLHPFIPFITEEIWLKNKLDKNSKDFLMFANWSQDKGTTDKSYLEVNKIIYFITSIRSFKNELGVPPGSLVDVSIEKTNSEIKTFFNNNKTILMKLGRIKNITSKNLDKSSASLVLDGEQFKIYFDEDIDLDRVKDTLKKKLDKLNKEMDKINKRLANKNFVEKAPTELIDQEKTNFNNLEKDVKKIQLTLENL

SEQ ID NO: 192006 - protein, 344 aa, Unknown
  Bacterial polypetide isolated from the Sargasso Sea
TMDENLSKSVIKVFVDLYNKGLIYKDKKLVNWDTVLKTAISDLEVDQREVNSKIYYIKYPIDGTDEFITIATTRPETMLGDTAIAVNPKDDRFKSYVGKTVTIPIVGRKIKIIEDDYADPEQGTGALKITPAHDFNDYDVGQRNNLEIINIFTEAGKINENAPKHYVGLDRSEARKRILKELKEKEFFEKEESIKNKVPYGDRSNSIIEPFLTEQWFADAGKLSVKAKEVVNSKKTNFFPENWSKTYFQWMNNIEPWCISRQLWWGHQIPAWYGPDDKIFVAYNEDEAKQLANKHYGKDVELNRDPDVLDTWFSSGLWPFATLGWPDDKKFIEKFYPTSVLVTG

SEQ ID NO: 192007 - protein, 711 aa, Unknown
  Bacterial polypetide isolated from the Sargasso Sea
MSLDKYIHSDVEDKIYTYWEKNNLFKPKKNKKKFSIVIPPPNVTGSLHMGHALNNSIQDLLTRYYRMNNYETLWQPGTDHAGIATQALVEKKLNSENIKKNDLGREKFIEKVWEWKNQYGDIIINQLKKLGCSCDWSRNAFTMDENLSKAVIKVFVDLHKKKLIYKAEKLVNWDTVLKTAISDLEVDQREVNSKIYYIRYPIDGTSEYITIATTRPETMLGDTAVAVNPKDKRYKKYVNKIVTIPIVGRKVKIIEDDYADPEQGTGALKITPAHDFNDYDVGKRNKLEIINIFTEDGKVNNNAISSYVGLDRFEARKKILNELKEKDYFVKEENIKNKVPYGDRSNSIIEPFLTEQWFADAKKLSIKAKKIVKNKKTNFFPENWSKTYFQWMNNIEPWCISRQLWWGHQIPAWYGPDNKIFVELNESDAKKSAKKYYKKDVKLVRDNDVLDTWFSSGLWPFATLGWPNKNEYLKKFYPTTVLVTGFDIIFFWVARMMMFGMEFLNKEPFKDIYVHALVRDEKGQKMSKSKGNVIDPLDLIQKYSADALRFTLLSMASPGTDVKLSEDRVKGYRNFLNKLWNANNFLIQNKCNLKNSKKLPKLKVNINKWIYFELLQTSNLIKKNIEDYRFDEAAKNAYHFAWHKYCDWYLELSKTILFSDNLKAKNEVKEVSAFVFREILIMLHPFIPFVTEKIWLTNKFDNKNKNFLMLS

SEQ ID NO: 192008 - protein, 594 aa, Unknown
  Bacterial polypetide isolated from the Sargasso Sea
GERNNLEIINVFTENGKINENAPKEFIGLDRFEARKQLLKKLKENNFFVEEENIKNKVPYGDRSNSIIEPYLTEQWFADAKKLSIKAKEIVSSKSTNFFPKNWSKTYFQWMDNIEPWCVSRQLWWGHQIPAWYGPDGKVFVEYTEEEAIKEAKNYYKKDVELKRDEDVLDTWFSSGLWPFATLGWPNRTEYLKKFYPTTVLVTGFDIIFFWVARMMMMGMAFLEKEPFKDIYVHALVRDEKGQKMSKSKGNVIDPLDLIEKYSADALRFTLLSMASPGRDVKLSEDRVKGYRNFLNKIWNANNLLKQNDCNFDEIEKPKELKVNINKWIISEYYSINNQIKQNIKDYRFDEAARNAYQFVWHSFCDWYLELSKTILYSDDKSSIEEVKKVSAYIFREILIILHPFIPFVTEEIWLNNKLDKDSSDYLMFANWSEEKPLESNEYNDVSNIIEIITSIRSFKNEIGVNPGSLIDISLANTNSKTQDFFNKNEIVLKKLGRISNILLEDQKKSSASLIIKGELYKMYFEQDVDIKTIKDTLLKKHSKIKDEMDKINTRLSNKSFIDRAPKDIVELEKSNFNNLEKDAKKIQLTLENL

SEQ ID NO: 192009 - protein, 668 aa, Unknown
  Bacterial polypetide isolated from the Sargasso Sea
FITIATTRPETMLGDTAIAVNPKDERFKSFVGKTVTIPIVGRKIKIIEDDYADPEQGTGALKITPAHDFNDYDVGQRNNLEIINIFTEAGKINENAPENYVGLDRSEARKQILKELKEKDFFVKEENIKNKVPYGDRSNSIIEPFLTEQWFADAGKLSVKAKEVVNSKKTNFFPENWSKTYFQWMNNIEPWCISRQLWWGHQIPAWYGPDKKIFVAENEDGARQQAKKHYGKDVELNRDPDVLDTWFSSGLWPFATLGWPEDNKYVDKFYPTSVLVTGFDIIFFWVARMIMFGTEFLNKEPFKDIYVHALVRDEKGQKMSKSKGNVIDPLDLIEKYSADALRFTLLSMASPGTDVKLSEDRVKGYRNFLNKLWNANNFLITNECDFKDIEKVPSLNLNINKWIYSELIETKNKIQKNLEDYRFDEAAKNAYQFAWHSYCDWYLELSKTILFSDDEKAKAEVKKVSSFVFKQILILLHPFIPFVTEEIWLKNKFDNDGSDYLMLKNWLSGEINKDSSTEQVENIINIISEIRSFKNELNVSPGSFIDVSISNINKNQKDFINTNEIILKKLGRINTILDKDLDKPAATMVVSGDLFKIYFDKDVDLKLIKENLTNKQSRLEQEMNKISQRLENKSFVDRAPKEIVEQEKNNYNNLKNDIEKISVTIKGI

SEQ ID NO: 192010 - protein, 252 aa, Unknown
  Bacterial polypetide isolated from the Sargasso Sea
MEFKKYNHLKEEKKISDFWIKKGLFKPKKGSLKKNFSVVIPPPNVTGRLHMGHALNNSLQDVLVRYYRMKGFETLWQPGTDHAGIATQAIVENNLEKKGLKKNDLGREEFIKKVWEWKEESGGIILDQLKKLGCSCDWSRTRFTMDKDLSRAVIKVFVDLYNAKLIFKDKKLVNWDTHLQTAISDLEVIQKDVQSQLFYIDYQIENSEEKITIATTRPETMMGDTAIAVNPNDKRYSNFIGKKAIIPIVNRS

SEQ ID NO: 192011 - protein, 675 aa, Unknown
  Bacterial polypetide isolated from the Sargasso Sea
MSLGSLHMGHALNNSIQDLLIRYYRMNNYETLWQPGTDHAGIATQALVEQKLEKENLNKNDLGREKFIEKVWEWKNQYGDIIINQLKKLGCSCDWSRNAFTMDENLSKSVIKVFVELHKKKLIYKAEKLVNWDTVLKTAISDLEVDQREMNSKIYYIRYPIDKSGEFITIATTRPETMLGDTAVAVNPKDKRYKKYVGKTVTIPIVGRKIKIIKDNYADPEQGTGALKITPAHDFNDYDVGQRNKLEIINVFTIDGKINNNAPGSYIGLDRFEARKKILQELKEKDFFVKEENIKNKVPYGDRSNSVIEPFLTEQWFVNAKKLSIKAKKIVKSKKTNFFPANWSKTYFQWMNNIEPWCVSRQLWWGHQIPAWYGPDKKIFVATNEVDAKKEAKKFYKKDVRLIRDPDVLDTWFSSGLWPFATLGWPDKKDFVKKFYPTTVLVTGFDIIFFWVARMMMFGMEFLNKEPFKDIYVHALVRDEKGQKMSKSKGNVIDPLDLIEKYSADALRFTLLSMASPGTDVKLSEDRVKGYRNFLNKLWNANNFLITNKCDFNKTDKIPKSTLNINKWIYSELIQTKDKIEKNLKDYRFDEAAKNAYQFAWHSYCDWYIELSKTILFSDDEKAKKEVKEVSAYIFKQILIILHPFIPFVTEKIWLKNKFDKSNKNFLMHANWPSG

SEQ ID NO: 192012 - protein, 869 aa, Unknown
  Bacterial polypetide isolated from the Sargasso Sea
MPKRFDYLLKEDFWRNEWETNNIYSRSKNQAREKSFVIDSPPPTVSGSLHVGHIFSYTHQDIIARYKRMQKFNVVYPMGWDDNGLPTERRVQNIFGVRIDNNVSYIEKLNVEKEKKRLGLDKDTPLIINRQNFIEMCHIVTAQDEIVFKDLFRKMGYSIDWKDEYATIDNRSRRISQQSFIDLFEKKHIYQYESPTMWDIDFQTAVAQAEIEDRETPGAYHDIRFTIEDSEKDLIISTTRPELLGSCVGITAHPDDERYKHLFNKKAISPIFFAPVPIFPSKLVDMEKGTGILMVCTFGDQTDVIWWRENSLPLRQLFGSNGKVLNINYENEESSSNWISINPDKANKNISKLYEKSLKQSKDIIIDMLRDSDNSLNNKEPLVSEPKIISHPVRYYEKGDSPIEYLSSRQWFVKITDKKKDLLRMGEKIKWHPDYMSKRFENWTENLAIDWCISRQRFFGVPIPVWYRTDDKGEVNYNDVILPNISDLPIDPDIDTPNEFQEIDRGKPNGFVGEKDVFDTWFTSSMTPQIIAKWGLEDQDEMSSIFPMDIRPQSHEIIRTWAFYTIVKAYLHHDTIPWENVVISGWILDPDRKKMSKSKGNVITPIDTIEQYGADAVRYWAASARLGTDTTYDENVFLVGNKLVTKMYNAAKFVLSHDSYQINKLNEIDASFLKDLEEMVNNVTTYYEKFQFAQALQITEEFFWNTYTDNYLELVKKRVFNSDGDDKASAVTCLRLGLSVILRLLAPVLPTITEEIWSWCFKDEYDINSIHQSDWPSSDEFTEYNNPKYNNSLEIAIRAIRSVRQTKTSEGVGLGKPVRKIKIQTNEYNFEVIESIIEDFSNASGCSTFINEISDNDEILTEILEKESE

SEQ ID NO: 192013 - protein, 387 aa, Unknown
  Bacterial polypetide isolated from the Sargasso Sea
DLLDTWFSSGLWAFATLGWPAKKDYVKKFYPTSVLVTGFDIIFFWVARMIMFGMEFLNKEPFKDIYVHALVRDEKGQKMSKSKGNVIDPLELIEKYSADALRFTLLSMASPGRDVKLSEDRVKGYRNFLNKLWNANNFLIQNKCSFRNIQKKPKISININKWIYAELLETKSNVEKNIKDYRFDEAARNSYQFVWHSYCDWYLELTKTILYSNDKKSIKEIREVSSYIFKEILILMHPFIPFITEEIWLKNSIDNTKKNYLMLANWISGTSKKDKDFKEVEKIITIISQIRSFKNELNVSPGSFVDISLSKINANSKAFFKHNDTVLKKLGRINNFFDKDMEKPSATIVISGDIFKVYFEENVDLKIIKENLLNKQKKSQNEIDKIN

SEQ ID NO: 192014 - protein, 199 aa, Unknown
  Bacterial polypetide isolated from the Sargasso Sea
MSTEALSKTYDPHTIERALYESWEAQGAFQPAGDGPAFCISIPPPNVTGSLHMGHAFQDTIMDALIRYHRMRGHRTLWQAGTDHAGIATQMVVERQLNQLGKTRHDLGRDVFIDRVWEWKQESGGAITQQLRRMGASLDWSRERFTMDEDLSVAVREVFVQLYEEGLIYRGKRLVNWDPILHTALSDLEVLSQEEAGSL

SEQ ID NO: 192015 - protein, 387 aa, Unknown
  Bacterial polypetide isolated from the Sargasso Sea
RGERSNIVIEPKLSHQWYVKTQEMAKRANEAVNKGEVVFHPENWIKTYFNWMDNIQDWCISRQIWWGHRIPAWYDEEGNIYVGYDEDELRKYYKLDGRKLTQEEDVLDTWFSSSLWPFGSLGWPKETELSKYFPTSLLVTGFDIIFFWVARMMMMSLEFTGKVPFKDVYVTGLIRDENGQKMSKSKGNIIDPIDLIYGIGIEDLVTKRTANLMQEGLAKKIERKTRKQFPNGIESYGTDALRMTFFSLATHTRDISFELGRLKGYRNFCNKIWNAARFINNYPHESKEFIAKNDHDKWIEKEFNEVSKQIKKNIDEYRLDFAVNEVYEFFWGKFCDKYIEDCKKSGETSNLHPMLKKILVLMHPFAPFITEEVNELVFKDGSLMDSK

SEQ ID NO: 192016 - protein, 483 aa, Unknown
  Bacterial polypetide isolated from the Sargasso Sea
NNIDPWCISRQLWWGHQIPAWYGPDKKIFVEINEETAFAEAEKYYKKKVNLSRDPDVLDTWFSSGLWPFATLGWPDNKKYTDKFYPTSVLVTGFDIIFFWVARMIMFGTEFLGKEPFKDIYVHALVRDEKGQKMSKSKGNVIDPLDLISKYSADALRFTLLSMASPGRDVKLSEDRVKGYRNFLNKIWNANNFLVHNKCDFNDVKTPKDIKLNINKWINSEFLIIKEKIQNHIKEYRFDEAAKIAYQFVWHSFCDWYLELSKTVYFSKNKNDIQEVRSVTSYIYREILIILHPFIPFITEEIWLKNNLDKNSTYFLMHANWSKEISKTDSSHKEVNQIIEIITSLRSFKNELDISPGSQVEISLANTSKETQSFFNKNKNVFMKLGRINKISISDFDKSFASLVVKGEVYKIYFNEDVDLNKVKDSLMIKRKKIISEMDKINSRLSNKNFADKAPKEIVDQEKSNFNKLEKDANKIKLTLESL

SEQ ID NO: 192017 - protein, 315 aa, Unknown
  Bacterial polypetide isolated from the Sargasso Sea
AWYDNDGNVYVGYSENDVRSHYSLDKRSLKQDDDVLDTWFSSSLWPFASMGWPNESKNLETFFPTNLLVTGFDIIFFWVARMIMMSIEFTGKIPFKDVYVTGLIRDENGQKMSKSKGNIIDPIDLIYGITLEELLEKRTSNLMQEGLADKIARKTKKQFPNGIDSYGTDALRMTFFSIATNAKDISFEIGRLKGFRNFCTKMWNAARFINGYENKGNDFEVKSKADEVILKEFKQLKIDVEDNVNHYRLDLAINNVYEFFWNKFCDVYIEECKKTEKTDNLHPLLKEILIFIHPFAPFITEEIHSIIFKAPLIDR

SEQ ID NO: 192018 - protein, 875 aa, Unknown
  Bacterial polypetide isolated from the Sargasso Sea
MSSEKYIHSDVENRIYSYWEKNGLFKPRENSKKFSIVIPPPNVTGSLHMGHALNNSIQDLLIRYHRMNNYETLWQPGTDHAGIATQALVEKKLTSEKIDKNEIGREKFIEKVWEWKDQYGDIIINQLKKLGCSCDWSRNAFTMDENLSKSVIKVFVDLYNKGLIYKDKKLVNWDTVLKTAISDLEVDQREVNSKIYFIRYPIDGTEEFIKIATTRPETMLGDTAIAVNPKDERFKSFVGKTVTIPIVGRKIKIIEDDYADPEQGTGALKITPAHDFNDYEVGQRNNLEIINIFTEEGKINENAPKYYVGLDRSEARKKILKELKEKEFFVKEENIKNKVPYGDRSNSIIEPFLTEQWFADAGKLSVKAKEVVNSKKTNFFPENWSKTYFQWMNNIEPWCISRQLWWGHQIPAWYGPDEKVFVAVNEDEAKAQAKQHYKKDVELNRDPDVLDTWFSSGLWPFATLGWPDDNKYVDKFYPTSVLVTGFDIIFFWVARMIMFGTEFLNKEPFKDIYVHALVKDEKGQKMSKSKGNVIDPLDLIEKYSADALRFTLLSMASPGTDVKLSEDRVKGYRNFLNKLWNANNFLITNECDFKEIDKVPSLNVNINKWIYSELVETKNKIEKNLEDYRFDEAAKNAYQFAWHSYCDWYLELSKTILFSDDAIAKAEVKKVSSFVFKQILILLHPFIPFVTEEIWLKNKFDNNGSDYLMLKNWLSGEINKDSSTEQVENIINIISEIRSFKNELNVSPGSFIDVSISNINKNQKDFINTNEIILKKLGRINSILDKDLDKPAATMVVSGDLFKIYFDKDVDLKLIKENLTNKQSRLEQEMNKISQKLGNKSFVDRAPKEIVEQEKNNYNNLKNDIEKISVTIKGI

SEQ ID NO: 192019 - protein, 497 aa, Unknown
  Bacterial polypetide isolated from the Sargasso Sea
GERMINWDPQAKTALSDEEVFYKEVNSKLYYLRYKIEGSDDEWVNIATTRPETILGDTAICINPDDERYSYLKGKKVIVPLINRTIPIIFDDYVDMDFGTGCLKITPAHDQNDYELGKKHNLEIINILDSSGKFNKNAKLYIGEDRFDVRKLISSELEESGYLIKIEDHINKIGFSERTDAIIEPRLSLQWFCSMEKLSIPALDNVMNDTIKFHPSKFKNTYRHWVENIRDWCISRQLWWGHQIPAFFYGDGKDDFIVAPNIKEALKKLNSKSDKEYNLGDLVQEEDVMDTWFSSWIWPIAVFDGFSKDKKELNYYYPTNDLVTAPEIMFFWVARMIISGYEYVDKPPFNNVYFTGIVRDKLGRKMSKSLGNSPDPLELIKKYGADGVRVGMLLSSPAGNDLLFDSNLCEQGRNFTNKIWNSFRLIQSWKVSDEIDQEKISAIALEWIESKISQSIKKINLSYEKFRISEALMITYKTIWDDYCSWFLEMIKPGLPG

SEQ ID NO: 192020 - protein, 559 aa, Unknown
  Bacterial polypetide isolated from the Sargasso Sea
MYEKGLIYRNERIINWCPRCSTALSDLEVNYKETSGKLYYVKYYESKSEGHVTVATTRPETLFGDTAVAMNPSDERYSDGIQLIVPLCNREVPLISDEAIELDFGTGALKVTPSHDVLDFEIGQRHSLESLCVISNDGLLNSLCGKYDGTDRFEARDMVVQELEETGHIEKIEDYLHSVGSCQRCDCVVEPLPSLQWFVNVGAHTDEATIAGKAYKAVTSGDIEIVPERFTKIYLNWISNIRDWCISRQLWWGHRIPVWYCDDCDGLTVPIEDPDRCEHCQSSNISQDEDVLDTWFSSGLWPHSTLGWPKQTTEYEQFYPTSVLETGYDILFFWVARMIMMGIENTGSVPFRTVLLHGLIRDEHGAKMSKTRGNTMDPLELVNKYGTDALRFALTTGTAPGNDLRISDGKLESARNFTTKIWNAARYVMNILDRHDFDYNSANLNSSNKLKVEHREDQWILSRLQSVITNTNESLEKYELGEAQQGLYEFIWNDYCDWYIEMSKIRIADGDYDPMPCLIYVLGQILKMIHPFMPYITEEIWQNMNQRVDTELGSIMMTE

SEQ ID NO: 192021 - protein, 710 aa, Unknown
  Bacterial polypetide isolated from the Sargasso Sea
LSLYNEGLIYKDQALVNWDTKFKTAISDLEVVPTDVSTQIYYIKYPCSNSKTITVATVRPETIFGDVAIAVNPEDTRYLSLKNETFTIPLTSRSIPLIFDEYSDPDMGSGAVKITPAHDFNDFEIGKRHNLELLNILNDDGSLNENCPKEFQGVDRFEARKKVVLLLKEKGFIEKIEDYKTTIPYGDRSNTIVEPYLTHQWFCNAEELAKQAMKVVKDGETKFFPSNWEKTYFQWMENIKPWCISRQIWWGHQIPVWYGPDGKEFCAETEEEAKNLAIDFYKADKIILKRDQDVLDTWFSSALWPFSTLGWPDKEQTLDTFYPNSVLVTGFDIIFFWVARMMMMGNKFMSETPFKTVYVHALVRDEKGQKMSKSKGNVIDPLEIIDKYGADTLRFTLTSLNTPGRDVRLSEQRIAGYRNFVTKITNAYKFAEFKEIYPLNLKDNINPEHIFNLWIINEFQDLYKKVQENYKKYYFHEVANQLYHFTWHTFCDWYIELSKNLLDDNQYANETKFTFHLIFNSLLQLLHPVIPFITEKLWGKNNKDILMNHQWNYIDLKIGSEDVSKTKLFIDFIEEYRSIEKLFEIKKEDDVRIFSNNQSIQLILFDNKETFEFLTRKKLSTSQNENSVTLPFKEFDFEIFTNQIDKSKIKIKLNDNKNALEKEKNIIDKNLSNENFVSRAPKQLIDQNTERQGSINMELSKIDSILKNIQ

SEQ ID NO: 192022 - protein, 650 aa, Unknown
  Bacterial polypetide isolated from the Sargasso Sea
ALIDTIVRYQRLAGKNVPCLPGTDHASIAVQTILEKQLKEEGKTRHDLGREAFLERAWQWKAESGGRIVGQLRRLGYSVDWKRQRFTLDEGLSEAVKEAFVRLHEQGLIYRGEYLVNWCPASGSAVSDLEVEMKEVDGHLWHFRYPLSSGDGHLEVATTRPETMLGDTAVAVNPTDERYAHLVGQTLTLPFVGREIPIVADDHVEKEFGTGCVKVTPAHDPNDFAIGQRHGLPQITVMRKNGTMNKEAGQFEGLDRFEARKAVVAGLEELGLLVKVEDYRHSVPYSDRGKVPVEPLLSTQWFVKTEPLAARCREALEKQDPRFIPERWEKVYRDWLTDIRDWCISRQLWWGHRIPAWFVISETGGKYTDTTPYVVARNEAEALEKAKAEYGAAAEIEQDEDVLDTWFSSGLWPFSTLGWPDADSADLQRWYPTSTLVTGFDIIFFWVARMTMMAGAFTGEMPFQDVYIHGLVRDEQNRKMSKSAGNGIDPLLLIDRYGTDALRFALVREVAGAGQDIRLDYDRKKDTSATVEASRNFANKLWNATRFALMNLGGATPAQLGDPDPAALQLADRWILSRLARVNRETAERYSTYGLGEAAKGLYEFAWNDVCDWYLELSKRRLNPGENPSAEALADQRVAKQVLAKVISQM

SEQ ID NO: 192023 - protein, 552 aa, Unknown
  Bacterial polypetide isolated from the Sargasso Sea
LKNLNLFVKEESIKNKVPYGDRSNSIIEPYLTEQWFADAKKLSIKAKKIVKSKKTNFFPENWSKTYFQWMNNIEPWCISRQLWWGHQIPAWYGPDKKIFVALNEKEAKQNAKKFYKKDVELKRDPDVLDTWFSSGLWPFATLGWITKDPYLKKFYPTSVLVTGFDIIFFWVARMIMFGMEFIKKEPFKDIYVHALVRDEKGQKMSKSKGNVIDPLDLIEKYSADALRFTLLSMASPGRDVKLSEDRVKGNRNFLNKLWNVNNFLIHNKCNIKNSKKSPKAKININKWIYSELVQTKIVVEKNIKDYRFDEAARNIYQFVWHSYCDWYLELSKTILNSNNKNDIKETKEIASFVFKEILVLLHPFIPFITEEIWLKNKLDNLNKDYLMYSNWITDKSKKEKFTDVENIIDFITAIRSFKNELSISPGSYVDISLGGINKKNKAFFTKNDTIIKRLGRITNFIDKDKNKPSASLVIKGNVFKLYFEENVDLNVIKENLLSKQSKYQAEMDKISSRLKNKDFVKRAPKHIVDQEKSNYNNLGNDIKKLSATVKSL

SEQ ID NO: 192024 - protein, 875 aa, Unknown
  Bacterial polypetide isolated from the Sargasso Sea
MSSDKYIHENVENKIYSYWEEKNLFKPKTNKKQFSIVIPPPNVTGSLHMGHALNNSIQDLLTRYHRMNNFETLWQPGTDHAGIATQALVEKKLKSEGIDKNDLGREKFIEKVWDWKGQYGDIIINQLKKLGCSCDWSRNAFTMDENLSKSVLKVFVEMYKNGLIYKSKKLVNWDTVLKTAISDLEVDQREVNSKLYHIKYPIEGSDKFITIATTRPETILGDTAVAVNPSDERYKSLVNKNVIVPIVDRKIKIIEDDYADPEQGTGAVKITPAHDFNDYEVGERNNLEVINVFTPDGKINENAPDNYIGLDRFEARKRILKELTDKNLFVKEEKIKNKVPYGDRSNSIIEPYLTEQWFADAKKLSIKAKDIVNNKTTNFFPVNWTKTYFQWMDNIEPWCISRQLWWGHQIPAWYGPDGEIFVDETEEGANKLAKEHYKKDVELIRDPDVLDTWFSSGLWPFATLGWPKKNEYLEKFYPTSVLVTGFDIIFFWVARMIMFGMEFQNKEPFKNIYVHALVRDEKGQKMSKSKGNVIDPLELIEKYSADALRFTLLSMASPGRDVKLSEDRVKGYRNFLNKIWNANNFLIQNDCKFENIETPNDLKLNINKWIFVEFTNTNEKIKKSIDSYRFDEAARIAYQFVWHSFCDWYLELSKTVFYSENNENIEETRNVASFIFTQILVILHPFIPFLTEEIWLKNKLDKDGKDFLMLKNWSEASSDKDKDSDEVNEIIDFVSSIRSFKNEIEISPGSFVKILVNKINPEIKKFIENNSNTLKKIGRINEFVNEDIKKPSANLVIKGEIFKIYFDEDVDLSKIKETLLNKKNKIEKEMEKINTRLNNKSFIERAPNDIVEQEKSNFINLEKDVNKLNYTLESL

SEQ ID NO: 192025 - protein, 420 aa, Unknown
  Bacterial polypetide isolated from the Sargasso Sea
IEPYLTEQWFADAKKLSVKAKKIVKNKKTKFFPPNWSKTYFQWMNNIEPWCISRQLWWGHQIPAWYGPDNKIFVASNYSEAKKLAKKKYKKDVELVRDEDVLDTWFSSGLWAFATLGWPNKNEYLKKFYPTSVLVTGFDIIFFWVARMMMFGMEFLNKQPFKEIYVHALVRDEKGQKMSKSKGNVIDPLILIDKYSADALRFTLLSMASPGRDVKLSEDRVKGYRNFLNKLWNANNFLAMNKCDFSKSKKEPKVKLNINKWIISELNTVSKLIEKNINDYRFDEAARNIYQFVWHSYCDWYVELSKTILNSKEKSSILEVKQTLSYVFKQILILLHPFIPFITEELWLKNKLDKPKNYLMFANWSNKKANKDKQIKEVENIINLISQLRAFKNELNVSPGSFVDMSISTLSQKDQLFIKK

SEQ ID NO: 192026 - protein, 388 aa, Unknown
  Bacterial polypetide isolated from the Sargasso Sea
KMDEGTGAVKITPAHDFNDFEVGKRNNLEMLNILDKSGHLVDDDFIPKKYQKLERFSARKEILSDLKAEGSLIKTEKHLHNVPHGDRSGVIIEPYLTDQWYVDAKELSKKAIKAVKDKKTQFVPKNWEKTYFEWMDNIQPWCVSRQLWWGHQIPVWYGPDNHFFVAMDESEAKEKAYKHYGKDTDLVRDEDVLDTWFSSALWPFSTLGWPEKTPEFEKYYNTDVLVTGFDIIFFWVARMMMMGLYLTDDVPFHTIYIHALVRDEEGQKMSKSKGNVIDPLSLIEKYGADSLRFTLSSMAAQGRDIKLAESRVEGYRNFITKIWNAARFISTYNIILDTNFDPKTVKQDQNKWILGELDNLNMNVSQALDKFRFNDASAEIYSFIWHLF

SEQ ID NO: 192027 - protein, 289 aa, Unknown
  Bacterial polypetide isolated from the Sargasso Sea
MDIFNHKDYEKLWYDRWVEKGCFKAEVSSKKKPYTIMMPPPNVTGSLHIGHALTFTLQDILIRYFRMKGRDVLWQPGTDHAGIATQMVVERQLNEKGIDRRDIGREEFLNKVWEWKEHSGGQITNQLRALGASPDWDKERFTMDDGLSSAVKKVFVKLFNEGLIYKDKRLVNWDTKLLTAISDLEVEQREMESQFWYIKYSLENTKNFIVVATTRPETMLGDVAVAVNPKDERYNQFIGKNLILPIANRKIPIISDDYTEIEKGSGAVKITPAHDFHDFEVGKRRGLKI

SEQ ID NO: 192028 - protein, 264 aa, Unknown
  Bacterial polypetide isolated from the Sargasso Sea
MEFKKYNHSKEEKKISDFWIKKGLFKPKKNKSNKKFSVVIPPPNVTGRLHMGHALNNSLQDVLVRFNRMKGLETLWQPGTDHAGIATQAVVENNLLKEGIKKNDLGREKFIKKIWDWKEESGGIILDQLKKLGCSCDWSRTRFTMDKDLSKAVIKVFVDLYKNKLIYKDKKLVNWDTKLQTAISDLEVNQKDVQSQLYFIDYTIENSDQKITIATTRPETMMGDTAVAVNPKDERYVNLVGKNVLIPIVNRTVKIISDNYADPE

SEQ ID NO: 192029 - protein, 226 aa, Unknown
  Bacterial polypetide isolated from the Sargasso Sea
IAVNPKDDRYKSLVNKFVTIPLVERKIKIIEDDYADPEQGTGAVKITPAHDFNDYEVGQRNNLEILNIFTSDGKINENAPKEFIGLDRFEARKRLLKKLKEKDFLVKEENIKNKIPYGDRSNSIIEPFLTEQWFADAKKLSVKAKEVVNNKKTNFFPENWSKTYFQWMDNIEPWCISRQLWWGHQIPAWYGPDKKIFVAINEDEAKVDAKKHYNKDVELISRSRCT

SEQ ID NO: 192030 - protein, 324 aa, Unknown
  Bacterial polypetide isolated from the Sargasso Sea
MNSKIYYIRYPIDKSSEYITIATTRPETMLGDTAIAVNPKDKRYKSFVGKIVTIPIVGRKIKIIKDNYADPEQGTGALKITPAHDFNDYDVGQRNKLEIINVFTEEGKINENAPKEYVGLDRFDARKKILKELKEKDYFVKEENIKNKVPYGDRSNSVIEPFLTEQWFVDAKKLAVKAKKIVKTKKTNFFPNNWSKTYFQWMNNIEPWCVSRQLWWGHQIPAWYGPDNKIFVALNEKEASKQAKKHYKKDVKLVRDPDVLDTWFSSGLWPFATLGWPDKTDFVKKFYPTTVLVTGFDIIFFWVARMIMFGMEFLNKEPFKDIYV

SEQ ID NO: 192031 - protein, 336 aa, Unknown
  Bacterial polypetide isolated from the Sargasso Sea
MSNDKYIHSDVEDRIYSYWEENGLFKPKENSKKFSIVIPPPNVTGSLHMGHALNNSIQDLLVRYHRMNNYETLWQPGTDHAGIATQALVEKKLSVEKIDKNEIGREKFIEKVWEWKEQYGDIIINQLKKLGCSCDWSRNAFTMDENLSKSVIRVFVDLYNKGLIYKDKKLVNWDTVLKTAISDLEVDQREVNSKIYYIKYPIDRTDEFITIATTRPETMLGDTAIAVNPKDDRFKSYVGKTVTIPIVGRKIKIIEDDYADPEQGTGALKITPAHDFNDYDLGQRNNLEIINIFTEAGKINENAPKHYVGLDRSEARKQILKELKDKEFFVKEENIK

SEQ ID NO: 192032 - protein, 347 aa, Unknown
  Bacterial polypetide isolated from the Sargasso Sea
MLEKYYQPSLVEDKIYKTWENDGDFKPLKSSRDAYCIVIPPPNVTGTLHMGHALNNTLQDILVRFYRMQGKNVLWQPGTDHAGIATEMVVERELKKREINKNDLSREQFIEHVWEWKNQSGNEIINQLKRLGCSCDWSRERFTLDEGLSKAVRFVFVKLYNDKLIYKDKRLSNWDPKLKTTISDLEVIQKEVNGSLWYIDYKLENEDKVITIATTRPETMLGDTAIAVHPEDERFRDFVGKYAYIPILNKKIIIIADEYVKVDQGSGAVKITPAHDFNDYEIGKRHNLEVINIFNERAELNENCPIEYQNLDRFKAREKIVNELQTIGALNKVEENIHTVPYGDRSG

SEQ ID NO: 192033 - protein, 919 aa, Unknown
  Bacterial polypetide isolated from the Sargasso Sea
MKKTFNPSQVKQAMYQAWKSKGYFKPSGDNSNGAYCIMIPPPNVTGSLHMGHAFQQTIMDALTRYKRMLGKNTLWQVGTDHAGIATQMVVERKLAAEGKPDRHAMGRDAFIEKVWEWKAESGGTITEQMRRLGNSVDWDKERFTMDAGLSNAVQEVFVRLYQDDLIYRGKRLVNWDPKLHTAISDLEVENKEQKGHLWNLRYPLADGVTTADGKNYIVVATTRPETMLGDTGVAVNPDDERYQSLIGKEVLLPLVNRRIPILADEHADKDKGTGCVKITPAHDFNDYEVGKRHQLPMINVMTADATIRTEGECFFPNGEANPAHNTLIPAEFQGLDRYVARKAIVAAFDAAGLLDKVEDHNNTLPYGDRSGVVIEPLLTDQWYVRVAPMAKTAIEAVENGDIQFVPKQYENMYYSWMRDIQDWCISRQLWWGHRIPAWYDAEGKVYVGRNEAEVRAKHSLADSVTLRQDNDVLDTWFSSALWTFSTLGWPDNTEELKTFHPTDVLVTGFDIIFFWVARMIMMTMHFIKDEDGKPQVPFKTVYVTGLIRDENGDKMSKSKGNVIDPLDMIDGISLDDLLVKRTSNMMQPQLAEKIGNQTKKQFPEGIEASGTDALRFTLAALASTGRDISWDMKRLDGYRNFCNKLWNASRYVTMMTEEKDCGLAVDGKAAEMELSLADHWIISQYQQTITQFRGYLDSYRFDMAANTLYEFTWNQFCDWYLELTKPVLFKGTEAQQRGTRHTLLTVLESLLRLMHPIMPFITEEIWQLVAPMIRTDIKAGDSIMLQAYPEFNQALVNETATADLEWVKSFIVAIRNVRGEMDIAPSKPLSVLVRNLTPDDSRRLQSNMAFLQNMAKLEAITVLADGDTAPACAAQLLGKMDILIPMAGLIDKEAELARIAKQMEKAQQEHDRVAGKLAN

SEQ ID NO: 192034 - protein, 179 aa, Unknown
  Bacterial polypetide isolated from the Sargasso Sea
MDKTFEPQSIEQQCYKSWEEAGLFKASGSGDPYCILLPPPNVTGSLHMGHGFQQTIMDALTRYHRMKGDNTLWQVGTDHAGIATQMVVERQLNAQGKTRHDLGREDFIKKVWEWKEHSGGTITGQMRRLGTSPDWSREVFTMDEDLSKAVTEVFVKLHEEGLIYRGKRLVNWDPVLHTA

SEQ ID NO: 192035 - protein, 412 aa, Unknown
  Bacterial polypetide isolated from the Sargasso Sea
MDKQYYPVEIEEKWSKIWSEKVLSNKDSDASFSQVIPPPNVTGTLHMGHSFQYAIMDFYTRYHHMSGKDAHWQVGADHAGIATQMVVENNLAKKDVARKELGREKFLEEVWSWKEYSEEKITSQIKRLGCSVDWNKYRFTLDDGCNDAVIKAFVELHRRNKIYRGYRLVNWDPSLKTAVSDLEVVRQEKDGLLWHIKYPIENTEDFLIVATTRPETMFGDMAVAVNPNDDRYKDFVGKNVVLPFVGRKIPVLADEYVDMEFGTGCLKITPGHDFNDYEIGKKYSLHEVDGQVKTSNTVSDFEPINIFNEDACSNENVPEPFSNLDRFKVRKAVLEKLKELDLLEKEEKHHISVPRGERSNIVIEPKLSYQWYVKTEEMAARANDAVNKGEIIFHPNNWLKTYFNWMDNIEDW

SEQ ID NO: 192036 - protein, 875 aa, Unknown
  Bacterial polypetide isolated from the Sargasso Sea
MSNDKYIHSDVEDRIYSYWEENGLFKPKENSKKFSIVIPPPNVTGSLHMGHALNNSIQDLLVRYHRMNNYETLWQPGTDHAGIATQALVEKKLSAEKIDKNEIGREKFIKKVWEWKDQYGDIIINQLKKLGCSCDWSRNAFTMDENLSKSVIKVFVDLYNKGLIYKDKKLVNWDTVLKTAISDLEVDQREVNSKIYHIKYPIDGTDEFITIATTRPETMLGDTAIAVNPKDDRFKSYVGKTVTIPIVGRKIKIIEDDYADPEQGTGALKITPAHDFNDYDVGQRNNLEIINIFTEAGKINENAPKHYVGLDRSEARKQILKELKDKEFFVKEENIKNKVPYGDRSNSIIEPFLTEQWFADAGKLSVKAKKVVNSKKTNFFPENWSKTYFQWMNNIEPWCISRQLWWGHQIPAWYGPDNKIFVAYNEDEAKQLANKHYGKDVELNRDPDVLDTWFSSGLWPFATLGWPNDKKFVDKFYPTSVLVTGFDIIFFWVARMIMFGTEFLNKEPFKDIYVHALVRDEKGQKMSKSKGNVIDPLDLIEKYSADALRFTLLSMASPGTDVKLSEDRVKGYRNFLNKLWNANNFLITNECDFKNTDQIPELKVNINKWIYSELAETTNKIIKNLEDYRFDEAAKNAYQFTWHSYCDWYLELSKTILFSDDEDAKEEVKKVSAYVFKQILVLLHPFIPFVTEEIWLKNKFDNKGNDYLMFKNWISAKSTKDSHTDQVENIINIISELRSFKNELNVSPGSFIDISINNINKDQKQFISSNKIILKKLGRINNILSDDLDKPAATMVVSGDLFKIYFDKDVDLKLIKENLTSKQERLEQEMHKISQRLENKSFVDRAPKEIVEQEKTNYNNLKNDVDKISITIKGI

SEQ ID NO: 192037 - protein, 958 aa, Unknown
  Bacterial polypetide isolated from the Sargasso Sea
MEKTYDPQSIEQTLYQNWEEQGYFKPHGDASQGNYCIMIPPPNVTGSLHMGHAFQDTIMDTLIRYQRMKGKNTLWQVGTDHAGIATQMLVERKLEAEEGKSRHDLGRDAFMEKVWEWKAQSGGTITKQLRRMGASVDWDRERFTMDEGLSKAVQEVFVRLYEDDLIYRGKRLVNWDPKLHTAISDLEVENKEKQGHMWHLRYPLADGELTADGKDYLEVATTRPETMLGDSAVAVHPDDERYQALIGKFILLPIVNRRIPIVADDYVDMEFGTGCVKITPAHDFNDYEVGKRHKLPMFNVLTLDAAIRTSAEVVNTDGTINTSLDGSLPERFAGLDRFKARDAIVAEFETLGLLEKIAPHGLKVPYGDRSGVVIEPMLTDQWYVAVAPMAKTAIEAVENGDIKFVPQQYENMYFSWMRDIQDWCISRQLWWGHRIPAWYDANGKVYVGRTEAEVRAKHNIDDAIALRQDEDVLDTWFSSALWTFSTLGWPDNVEDLKTFHPTDVLVTGFDIIFFWVARMIMMTMHFIKDEDGKPQVPFKTVYVTGLIRDEAGNKMSKSKGNVLDPLDMIDGIDLEALVEKRTGNMMQPQLAAKIEKSTRKEFENGIEAHGTDALRFTLAAMASTGRDINWDMKRLDGYRSFCNKLWNASRYVLMNTEGQDCGPNSPDYQGGEMELSLADRWIIGLFNQTVKTYDDHMANYRFDLAANTLYEFTWNQFCDWYLELTKPVLQNGNEAQMRGTRHTLVNVLEAMQRLMHPMMPYITETIWQRVKPLTGAQGDTIMLAPFPSYDAAKVDATAMADLEWVKQVIVAVRNIRAELNIAPSKPLNALLRGVSAQDQARVEANQAFFTTLARLESMTILGEGETAPMSTTGLIGEMELLIPMAGLVDVAAEMARIDKQLEKLTQEIGRIEGKLSNEGFVAKAPPAVIDKERAKMADLSRDMDKLKEQKAEFAKLEA

SEQ ID NO: 192038 - protein, 741 aa, Unknown
  Bacterial polypetide isolated from the Sargasso Sea
MDAKYFPIEIEEKWSKVWAERELNKPESEQIFSQIIPPPNVTGTLHMGHSFQYAIMDFYTRYHHMNGLDSYWQVGTDHAGIATQMVVENNLANEGKDKNDLGREKFLEEVWKWKDYSEEKITSQIKRLGSTVEWDKYRFTFDDDFCESVNKAFVELYRNEKIYRGYRLVNWDPSLKTAVSDLEVIRQEKEGILWHIAYPISDSDEVLTVATTRPETMFGDMAVAVNPKDDRFKKFIGQYVELPFVGRKIPIIGDEYVDMEFGTGCLKITPGHDFNDYEIGKKYALHEIDNVVHSSDELNDFVPINIFTDEAHTNDSVPEPFANLDRFKVRKAVLEELKNKNLLLKEEKHQISVPRGERSNIVIEPKLSHQWYVKTQEMAKKANEAVNKGEVVFHPGNWIKTYFNWMDNIQDWCISRQIWWGHRIPAWYDEDGNIYVGYDEDELRNHYKLDNRKLTQDEDVLDTWFSSSLWPFGSLGWPKQNELEKYFPTSLLVTGFDIIFFWVARMMMMSLEFTGKVPFKDVYVTGLIRDENGQKMSKSKGNIIDPIDLIYGIDLEDLVTKRTANLMQEGLAEKIERKTRKQFPNGIESYGTDALRMTFFSLATHTRDISFELGRLKGYRNFCNKIWNAARFINNYPHESTEFVAKNDHDKWIEKEFDQVSQQIKKNIDEYRLDFAVNEVYEFFWGKFCDKYIEDCKKSGETSNLHPMLKKILVLMHPFAPFITEEVNELVFKDGSLMDRK

SEQ ID NO: 192039 - protein, 281 aa, Unknown
  Bacterial polypetide isolated from the Sargasso Sea
MKEMNDQLSLENYSPFEVEKKWQEKWEILKAFSPNPEDNGEPFCVVIPPPNVTGSLHMGHAFNTALIDVVVRFQRLLGKNVLCLPGTDHASIAVQTILEKQLKSEGKTSEDIGRDEFLKRAWNWKEKSGGRIVSQLKRIGYSVDWTRERFTLDQKLNEAVIEAFNILYKKNLIYRGEYLVNWCPESQSAVSDLEVEMQEVNGHLWHFKYPLISKSGEQLDKYLEVATTRPETLLGDTAVAVNPDDDRYKEFIGVKVKVPFVDREIPIIADSHVDKDFGTGC

SEQ ID NO: 192040 - protein, 959 aa, Unknown
  Bacterial polypetide isolated from the Sargasso Sea
MSETPSDPTSTLAKSFEPHTIEAHWGPEWEKRAYAAPTFDENKKDFSIQLPPPNVTGTLHMGHAFNQTIMDGLTRYHRMLGENTLWVPGTDHAGIATQIVVERQLDAQGISRHDLGREKFTERVWEWKQQSGSTITNQVRRLGASIDWSREYFTMDDKMSAAVRDVFVRLYEQGLIYRGKRLVNWDPVLLTAVSDLEVVSEEENGHLWHIQYPLTDGSGHLTVATTRPETMLGDTAVMVHPEDERYAHLIGKTVTLPLSGREVPIIADDYVDREFGTGVVKVTPAHDFNDYQVGLRHKLPMIEILTLNAKINDNAPEKYRGLDRFEARKQVVADLEALGALESVKPHKLMVPRGDRTGVVIEPMLTDQWFVAMSKPAPEGTFNPGKSIAETALDVVRNGEIKFVPENWSTTYYQWLENIQDWCISRQLWWGHQIPAWYGENGEIFVAQTEEGARDKAAAAGYTGPLKRDDDVLDTWFSSALVPFSSLGWPAQTPELKHFMPSSVLVTGFDIIFFWVARMVMMTTHFTGKVPFDTVYVHGLVRDAEGQKMSKSKGNTLDPIDIVDGIDLDALVAKRTTGLMNPKQAASIEKKTRKEFPDGIPAFGTDALRFTMASMATLGRNVNFDLARCEGYRNFCNKLWNATRFVLMNCEGHDCGFGKPEQCGECGPDGHLNFSAADRWIVSRLQRVEAEIAKGFADYRFDNVANALYKFVWDEYCDWYLELAKVQIQTGQPNQQRATRRTLLRVLETVLRLAHPVIPFITEALWQKVAPLAGRYPQGKAEGEASIMVQPYPIAEPSKLDEDAEQWAADLKAVIDACRNLRGEMNLSPAVKVPLLATGNAERLRTFAPYAQALARLSEVQIIADEASLDAQADGAPIAIVGNDKLVLKVEIDVAVERERLSKEIARLGAEVVKCNAKLQNESFVAKAPPAVVEQEQKRLAEFETTIGKLKAQLARLPA

SEQ ID NO: 192041 - protein, 739 aa, Unknown
  Bacterial polypetide isolated from the Sargasso Sea
MDKQYNPIEVEEKWVKIWSKRKVSNKESKESFSQVIPPPNVTGTLHMGHSFQYSIMDFYTRFNHMQGKDSYWQVGSDHAGIATQMVVENNLSKNNITRKDLGREKFIKEVWSWKDYSEKNITAQIKRLGCTVDWDKYRFTLDDRCNDAVIKAFVELYRKDKVYRGYRLVNWDPSLKTAVSDLEVIRQEKDGIIWHIKYPIEDSQDFVIVATTRPETMFGDMAVAVNPEDKRYKDLIGKKIILPFVGRKIPIIADKYVDMDFGTGCLKITPAHDFNDYEIGKKYCLHEINGEVFTSKNADKFQPINIFNEDAWSNKNVPKPFQNLDRFKVRKLVLEKLNEKELLLKEEKHPISVPRGERSNIVIEPRLSNQWYVKTSEMAKKANDAVNNGEVKFHPNNWIKTYFNWMDNIEDWCISRQIWWGHRIPAWYDNENNIYVGFDETEVREYYDLDNRELSQDEDVLDTWFSSSLWPFSSLGWPNDSEDLKKHFPTSLLVTGFDIIFFWVARMIMMSIEFTNKIPFKDVYVTGLIRDENGQKMSKSKGNIIDPLDLVYGISQDELVDKRTANLMQEGLAEKIEKKTRNQFPKGIESYGTDALRMAFFSMATHTKDISFEFGRLKGFRNFCNKIWNAARFIDGYPIEKETFDAENDIDKWIYDEFQKTKEQINKNIIEYRLDFAVNEIYEFFWSKFCDVYIEECKNTGNTANLRPLLNEILHLMHPFAPFITEEISDLLFNKSIIS

SEQ ID NO: 192042 - protein, 915 aa, Unknown
  Bacterial polypetide isolated from the Sargasso Sea
MDKTYNPKEIESRIYESWEDSGYFSPSKSGDPYCIVIPPPNVTGTLHMGHAFQDTIMDIIIRYQRMKGNNTLWQVGTDHAGIATQMVVERQLERSGTSRQKLGREAFEKEVWKWKEKSGNTITQQMKRLGASTDWTREKFTMDENLVQGVTRVFIQLYEEGLIYRGKRLVNWDPILQTALSDLEVVTSEEKGSLWHMKYPIDGLDDYIVVATTRPETMLGDTAVAVHPDDKRYKNLIGKLVNLPLTDRKIPIIADDYVDQEFGTGCLKITPGHDFNDFDIGKKHDLEIISILDQSAKIIQSAPKEYQGLDRFDARRKIVEDIESLGLMQEIEDYTLTIPRGDRSGAILEPLITNQWFLKMEPLAEPAITVVKNGELKFVPENWSKTYFEWLENIQDWCISRQLWWGHRIPAWYDNEGNVYVGESESEVREKNNIKNSIALTQDEDVLDTWFSSALWPFSSLGWPDETYDLKTFYPTNVLVTGFDIIFFWVARMVMMGLKFMKEIPFKEIYIHGLIKDKNGQKMSKSKGNILDPIDLIDGISLEDLLEKRVQGLMQPEMEKRIINDTKKEFPNGIPDFGTDALRFNFAIQASTGRDIRLDLRRVEGYRNFCNKIWNASRFIKMNTNDFELLDINDANGHAIDQWIQSKFAGTIDEIERQFNQYRFDLAATAMYEFVWNDFCDWYIELAKTLINDPEISDSQKDYTKNNLIKMLDAILRMLHPTIPFITEEIWQSLNEDNKRRSIMKADFPSSNDWRVDDEIVANTEWLKNIVSSVRQIRSEMNIPPNESIKIIINDASNTDSRRLESLGSFILNLASVESITQKDTSDDIPKSAFALLNQMKIYIPLEGLVDIEEEKARLEKKLVKLNQELKSVQDRLSNDTFVEKAPTEVVEELKGKLKSLMSDQTRIEEQIKLL

SEQ ID NO: 192043 - protein, 361 aa, Unknown
  Bacterial polypetide isolated from the Sargasso Sea
MAKTYDPQATEARWQQAWEESGAFHPDPQAPGEPFSLVTPPPNVTGSLHMGHAFNTALIDTIVRFQRMQGKNVLCLPGTDHASIAVQTILEKQLKAEGSSKEELGREGFLERCWDWKGESGGRIVSQLRRLGFSVDWQRERFTLDAGCSQAVIEAFVSLHEQGLIYRGEYLVNWCPASGSAVSDLEVEMKEVDGHLWHFRYPLSDGSGHLEVATTRPETMLGDTGVAVNPSDARYSALVGQTLTLPLVGREIPIVADEHVEAEFGTGCVKVTPAHDPNDFAIGQRHGLPLITVMAKDGSMNIEAGSFAGLDRFAARKAVVAAMDEQGLLVKVEPYRHSVPYSDRGKVPVEPLLSTQWFVKA

SEQ ID NO: 192044 - protein, 875 aa, Unknown
  Bacterial polypetide isolated from the Sargasso Sea
MNSDKYIHSEVEDNIYTYWEKNDLFKPKKNSKKFSIVIPPPNVTGSLHMGHALNNSIQDLLVRYYRMNNYETLWQPGTDHAGIATQALVEKKLESENLNKNDLGREKFVEKVWEWKNQYGDIIINQLKKLGCSCDWSRNAFTMDENLSKSVIKVFVELHKKKLIYKAEKLVNWDTVLKTAISDLEVDQREMNSKIYYIRYPIDKSDQFITIATTRPETMLGDTAIAVNPKDKRYKNYVGKTVTIPIVGRNIKVIKDNYADPEQGTGALKITPAHDFNDYDVGQRNKLEIINIFTEDGKINKNAPDSYVGLDRFEARKKILNELKEKNFFVKEENIKNKVPYGDRSNSVIEPFLTEQWFVNAKKLSVKAKQIVRSKKTNFFPENWSKTYFQWMNNIEPWCISRQLWWGHQIPAWYGPDKKIFVATNEVEAKKHAKKFYKKNVRLNRDPDVLDTWFSSGLWPFATLGWPDKKDFVKKFYPTTVLVTGFDIIFFWVARMMMFGMEFLNKEPFKDIYVHALVRDEKGQKMSKSKGNVIDPLDIIKKYSADALRFTLLSMASPGTDVKLSEDRVKGYRNFLNKLWNANNFLITNECDFNKTDKAPKTTLNINKWIYSELIQTKDKIEKNLKDYRFDEAAKNAYQFAWHSYCDWYIELSKTILFSDDQKAKKEVKEVSAYIFKQILVILHPFIPFVTEKIWLKNKFDKSNKYFLMHANWPSGKFKKDQSMKDVEKIINVISELRSFKNELNVSPGSFIDISINKIAKKNKTLMTNNEIILKKLGRINNFFDKDQKRPSATLVISGDIFKIYFDENVDLNLIKENLLKRQNKYQEEMNKISQRLSNKGFTDRAPKNIVEQEKTNYSNLKDDIKKISLTIESL

SEQ ID NO: 192045 - protein, 880 aa, Unknown
  Bacterial polypetide isolated from the Sargasso Sea
MLNKSYDPKEAEARLYNYWETEGYFKCGLTNNQPFSIVIPPPNVTGSLHMGHALNNTLQDIIVRYKRMLGEDVLWQTGTDHAGIATQMVVERKLDSENKPSRIELGRKKFIDEIWKWKEESGSIITNQLRRLGASCDWSRERFTMDEGLSLAVNKVFVDLYNEGLIYKDKRLVNWDPQLRTAISDLEVVQKEVDGCLWYINYPIKGSKESITIATTRPETMFGDTAIAVHPSDNRYADLIGKDVIIPIIGRSIKIITDEYADPEQGSGAVKITPAHDFNDFEVGKRNNLEMLSILDIDGKLNENVDKEWQGLDRFEARSKLLKMLSKEGYLEKEEKYNNSVPHGDRSDVVIEPYLTEQWYVDAKTLAKPALDSVKSGDMKFIPSNWSKTYYEWLENIQPWCISRQLWWGHRIPAWYTKDGKIIVAHNEKEAFSIAKKEFGKDIEIYQDEDVLDTWFSSALWPFSTLGWPEETVEIEKYYPTNLLVTGFDIIFFWVARMMMMGIHFMGKRPFSEVYIHALVRDEKGQKMSKSKGNIVDPLDLIDKYGADSLRFTLTAMAAQGRDVKLSESRVQGYRNFGTKIWNASRFCEMNDINNFNSFDKNSLEYPLNIWILNEFVEMQSQLEKNLTEYRFNDAANIIYQFIWGTFCDWYIELIKPHLSEEDDKYANEIKETCSFILDSILISLHPFMPFITEEIWQNLKKRDNPLIIQKWREISLADDHNNLSDEINDLIEIISNIRSIRVELNIKPKEKLAIEVINNSEALKIKNLEFYLSKIANISNITEVSDFSDKSAKFNVNNSRFSLLIPTSIDLTAELSRVIKEEEKLEKEINSISNRLKNKDFIAKAPKKVVEENKIKIEDMMQNKERLSSSKELIKKLIK

SEQ ID NO: 192046 - protein, 744 aa, Unknown
  Bacterial polypetide isolated from the Sargasso Sea
MSTDKYIHSDVENKIYSYWEKNSLFKPIENSKKFSIVIPPPNVTGSLHMGHALNNSIQDLLVRYHRMNNYETLWQPGTDHAGIATQALVEKKLASEKIDKNEIGREKFIEKVWEWKEQYGDIIINQLKKLGCSCDWSRNAFTMDENLSKSVIKVFVDLHKKNLIYKAKKLVNWDTVLKTAISDLEVDQREVNSKIYYIRYPINGTDEFITIATTRPETMLGDTGIAVNPKDDRFKSFVGKTATIPIVGRKINIIEDDYADPEQGTGALKITPAHDFNDYDVGQRNNLEIINIFTESGKINDNAPIGYVGLDRFEARKKILKELKEKDFFVKEENIKNKVPYGDRSNSIIEPFLTEQWFADAEKLSIKAKEVVNLKKTNFFPENWSKTYFQWMNNIEPWCISRQLWWGHQIPAWYGPDKKIFVAINEDEAKEHAKKHYNKDVDLVRDPDVLDTWFSSGLWAFATLGWPDNKKYVDKFYPTSVLVTGFDIIFFWVARMIMFGTEFLNKEPFKDIYVHALVRDEKGQKMSKSKGNVIDPLDLIEKYSADALRFTLLSMASPGTDVKLSEDRVKGYRNFLNKLWNANNFLITNECDFINIDKVPSLNVNINKWIYSELIEAKNNIEKNLKDYRFDEAAKNAYQFAWHSYCDWYLELSKTILFSDNEESKIEVKKVSSYVFKQILILLHPFIPFVTEEIWLKNKFDKSGKNFLMLANWPTGKINKDSNTEQVEKIINIISEIRSFKNEL

SEQ ID NO: 192047 - protein, 609 aa, Unknown
  Bacterial polypetide isolated from the Sargasso Sea
ALKITPAHDFNDYDVGQRNNLEIINIFTEAGKINENAPEPYVGLDRFEARKRILKELKEKDFFVKEENIKNKVPYGDRSNSIIEPFLTEQWFADAGKLSVKAKEVVNSKKTNFFPENWSKTYFQWMDNIEPWCISRQLWWGHQIPAWYGPDEKIFVAENEDDAKQQAKKHYGKDVELNRDPDVLDTWFSSGLWPFATLGWPDDNKFVDKFYPTSVLVTGFDIIFFWVARMIMFGTEFLNKEPFKDIYVHALVRDEKGQKMSKSKGNVIDPLDLIEKYSADALRFTLLSMASPGTDVKLSEDRVKGYRNFLNKLWNANNFLITNECDFNDIDQVPSLNVNINKWIYSELVETKNKIEKNLDDYRFDEAAKNVYQFTWHSYCDWYLELSKTILFSEDDKAKEEVKKVSSFVFKQILILLHPFIPFVTEEIWLKNKFDNDGSDYLMLKNWLSGEINKDSSTEQVENIINIISEIRSFKNELNVSPGSFIDLSISNINKNQKDFINTNEIILKKLGRIKSILDKDLDKPAATMVVSGNLFKIYFDKDVDLKLIKENLTNKQSRLEQEMNKISQRLENKSFVDRAPKEIVEQEKNNYNNLKNDIEKISVTIKGI

SEQ ID NO: 192048 - protein, 876 aa, Unknown
  Bacterial polypetide isolated from the Sargasso Sea
MSTSKLDKVYNPVNIEEKWYQYWLENNYFKSKPDPNKEPYTIVIPPPNVTGMLTMGHVLNNTIQDILIRKARMEGREACWIPGTDHASIATEAKVVQMLQDKGIKKESLSRDEFLKYSWEWKEKYGGIIIQQLKRLGCSCDWDRERFTMDDDYTNSVLEAFVVLYNKGLIYKGFRLVNWCPVSKSAISDEEVIHQEVNGHLWHFRYPIKNSDEVLIVATTRPETMLGDTAVAVHPKDKRFKHLIGKTVLLPLANREIPIIGDNFVDMEFGSGCVKVTPAHDPNDFDIGKKHDLEFINIMNEDASLNSNVPESYRNLSRDSAREKIVNDLKANDQLEKIEKYNHKVGFSERGNVPIEYYMSSQWFLKMNELSKPAIEAVNNGSIKFHPEHWVKTYNHWMNNINDWCISRQLWWGHRIPVWYHKEDKEKVHVSVGGPNDIENWTQDEDVLDTWASSWLWPFAVHEWPKNNHDLKYYYPTASLVTGPDIIFFWVARMIMSGYEFLDDLPFKDVYFTSILRDETGKKFSKSLGNSPDPFTLFDEYGTDAVRFGIMLMAPQGLDVLFSSKGLEVGRNFVNKLWNASRFILMNIDDDMSDDFSENNLKLPELWILHRLQFAIDRINKYLNNFNFNEAAKVIYEFTWNDYCDWYIEISKTRFKKDNESYTNTVKSVSKYVLKNIIILLHPYSPFVTEEIWSKLKKHNDSDLIVKDWPKIENKWINKSLEDEMEILKSLISSIRTIRSQMNVPPNKLCKMIVQCNSEQKSILNSHSLIIKSLAKIETIEMTEDSKKPSQSATAIVDNMEIFIPLKGIIDFDIEKKRLQKRIKELKNHLIGANSKLKNKEFLKRAPKNIVDREKEKKEDMVLELEKITKNYDMIK

SEQ ID NO: 192049 - protein, 726 aa, Unknown
  Bacterial polypetide isolated from the Sargasso Sea
TDEFVTVATTRPETLLGDMALAVNPSDKRFSHLIGKKASLPLCNRLIPIVADSYVDPEFGTGVVKITPGHDFNDYDLGKRHGLHMDEDMQCHTGTEADFMPISILNKTVEVIGVAPKKFHGMDRFEARKVILEDLKKDKFLVSEKEYESTLPYGDRSDQILEPLLTDQWYVDAKTLAKPAIEAVKRGEIQFVPTNWEKTYFQWMNNIQDWCVSRQLWWGHRIPIWYDESNKPHAGFSEKDVRERHNLKGKLRQEEDVLDTWFSSSLWTFATLGWPEKNKKLSLFHPTTTLVTGFDIIFFWVARMIMMTKHFMKEVPFKEVYITGLIKDENGQKMSKSKGNILDPIDLIDGVSLEELLTKRTEGMMQPQLKEKIIKQTKNQFPEGIESYGTDALRYTFYSLASPGRDINFDIGRIKGYRNFCNKIWNAFRFIEMQIASHGYQSSEGSKDIFSDWMASKINQTAENCQTHIKQYRFDLASAEIYELVWSNFCDWYIEFCKVAIQKSNNVDQTNSLIKNLILNFYSILELLHPFMPFITEELSSKLADLGKLDKSGFLVEGGFSHPQACNQKSEIQLDKIINIISALRVIRAENQNIKNETLNLIISNDLNSDTQSIIIENELVISGIAKLGKIEFTDKIPAESIEKTMDGYKIIIPLEGLIDPEEEKARLLKELADVENDIKIVNAKLANKQFVDKAPAEVVKKEKSKILDAENKKTMLEKSIAKLQP

SEQ ID NO: 192050 - protein, 318 aa, Unknown
  Bacterial polypetide isolated from the Sargasso Sea
MLEDSYEPLSIEQKWQSEWELKNQFKPVESDKQFSIVIPPPNVTGSLHMGHALEHSIIDVIVRIKRLQGFETLWVPGTDHAGIITQLLVENELLEKGLSKEDVGRENFISKVWEWKEKSGENISGQMKKLGMSCDWSRERFTMDEGLSAAVRQVFVTLYDSGFIYKGSRMVNWDTKLMSAVSDLEVNLEEQTGKLWSVKYKCGDEFITIATTRPETILADTAVAVNPDDERYKSFIGKTAIIPIVNREVPIIADEYVDKEFGSGCVKITPAHDFNDYEIGLKHDLEVISCMKLDGTMSDDDFMPENYKNLDRLKQETR

SEQ ID NO: 192051 - protein, 749 aa, Unknown
  Bacterial polypetide isolated from the Sargasso Sea
VNNTLQDILIRFYRMRGRDVLWQPGTDHAGIATEMVVERELRKHKIKKANLSREEFIEHVWKWKDSSGNKIINQLKRLGCSCDWSRERFTLDEGLSKSVRHVFVKLYKDGLVYKDKRLSNWDPKLKTTISDLEVIQKEVTGTLWYIDYKIENGDSRITIATTRPETMLGDTAIAVHPEDKRYTGMVGKFAILPIVEKRIPIVADEYVKMDQGSGAVKITPAHDFNDYELGKRHNLKIINIFTENAELNENCPKEYQGLDRYSAREKIISELKEKKILSKEEENLHTVPYGDRSGEVIEPLLTDQWFVDAKKLSIEAINNVKNGNTKFIPNNWDKVYFDWMENIQPWCVSRQLIWGHQIPAWYGPDGKIFVEETTEEANLSANKYYGKDVELVQEDDVLDTWFSSSLWPFSTLGWPEETAELAKYYPTSALVTGFDIIFFWVARMMMMGLYFTKKVPFTEVYVHALVRDEKGQKMSKSKGNVIDPLVLMDEFGADALRMALCSMAAQGRDIKLSKQRIEGYKNFINKIWNAVKLCELNNCFYQEIDSKKTKNIFNKWILSEYENCRNKTQLALEHYRFNEAANELYKFTWNIFCDWYLEFSKVIYLSKNDTDIKETRNITSYVLSNVIIMFHPIMPFFTEHLWHQASNILKNDVMKINKSSWPKSISVDEKDNEKINTLLELISSIRSTRSEMNVPANAVVDINYSKISSELGSIFDQHKETIQSLTRSKSITEKNFSKDEGMVQVILTT

SEQ ID NO: 192052 - protein, 264 aa, Unknown
  Bacterial polypetide isolated from the Sargasso Sea
MSSEKYIHKNVENKIYAYWEKNNLFKPKKNKKKFSIVIPPPNVTGSLHMGHALNNSIQDFLTRYHRMNNYETLWQPGTDHAGIATQALVERKLESENIYKQSIGREAFIKKVWDWKKEYGDIIINQLKKLGCSCDWSRNAFTMDKNLSASVIKVFIDLYNKGLIYKSKKLVNWDTVLKTAISDLEVDQREVNSKLYYINYQIENSSEFITIATTRPETMLGDTAVAVNPKDERYTNLVGKNVVLPITGRKIKIIQDDYADPDQG

SEQ ID NO: 192053 - protein, 492 aa, Unknown
  Bacterial polypetide isolated from the Sargasso Sea
LTEQWFVDAKTLAIKAKEVVNNGKTKFFPENWSKTYFQWMNNIEPWCISRQLWWGHQIPAWYGPDGKIFVAENEDECKKQAKEFYSKDVELKRDEDVLDTWFSSGLWPFATLGWPEKTPEVEKFYPTSVLVTGFDIIFFWVARMIMMGTEFLKKEPFKNIYVHALVRDEKGQKMSKSKGNVIDPLELIEKYSADALRFTLLSMASPGRDVKLSEDRVKGYRNFLNKIWNANNFLSQNKCDFSDVKKPENINLTINKWILSELVKVKNDTENSLKNYRFDEASKTIYQFVWHSFCDWYLELSKTVFNSNNEEDIKELRQTSSYIFREILIILHPFIPFVTEEIWLNNKLDKNGGEFLMHANWLEGDYHEKKSYDEINNIINFITSIRSFKNELNISPGSFIEISTANTNKEYKNFLSANENILKKNGRIKNFHENDLKKSSASIVINGELFKLYFDQDVDLNMIKTTLEKKITKINEEMKKIDTRLSNKSFID

SEQ ID NO: 192054 - protein, 634 aa, Unknown
  Bacterial polypetide isolated from the Sargasso Sea
MDKRYEPLIIEEKWSELWAKNNLGKNNSSQTFSQVIPPPNVTGTLHMGHSFQYSIMDFYARYNHLNDVNTHWQMGTDHAGIATQMVVENNLSRENIDKNDLGREDFVKKVWEWKEFSENKITGQIKRLGNSVDWSNYRFTLDEGFNEAVLKAFVELYRKEKIYRGYRLVNWDPSLKTAVSDLEVVRQEKRGLIWYLKYPIIGSDDFVTVATTRPETMFGDMAIAVNPEDKRYKDIIGKKVELPFVKRKIPIIGDDYVDKEFGTGCLKITPGHDFNDYEIGKKYCLHCVDNEVHISDDIEDFEPLNIFTDEAHSNDNVPSPFKNLDRFKVRKLVLEEIKKLDLFVKEEPHEISVPRGERSNIVIEPKLSYQWYVKTKDMAYKANKAVKNGEIKFHPENWIKTYFNWMNNIEDWCISRQIWWGHRIPAWYDNNGNVYVGYSENEVRTYYSLDNRSLRQDDDVLDTWFSSSLWPFASMGWPNESKNLKTFFPTNLLVTGFDIIFFWVARMIMMSIEFTGKIPFKDIYVTGLIRDENGQKMSKSKGNIIDPIDLIYGISLENLLEKRTSNLMQEGLAEKITRKTKKQFPNGIESYGTDALRMTFYSIATNAKDISFEIGRLKGFRNFCTTNVECCKIY

SEQ ID NO: 192055 - protein, 407 aa, Unknown
  Bacterial polypetide isolated from the Sargasso Sea
DFEPINIFNQDAWTNNNVPELFENLDRFKVRKLVIKELTELKLLEKEEEYDVSIPRGERSNIVIEPRLSHQWYLKTSEMAEKANMEVKKGNIKFHPNNWIKTYFNWMDNIEDWCISRQIWWGHRIPAWYDDNGNIYVGENEQDVRNYYKLDAIDLKQDEDVLDTWFSSSLWPFGSLGWPEKTEDFKSFFPTSLLVTGFDIIFFWVARMIMMSIEFTGKIPFKDVYVTGLIRDENGQKMSKSKGNIIDPIDLIYGISIEDLVEKRTSNLMQEGIAEKIERKTRKQFPNGIESYGTDALRMTFYSLATHTKDISFEFGRLKGFRNFCTKMWNAARFIDGYPNEKDKFKAENDHDKWIYDEFSKAKKQINKNISDYRLDFAVNEIYEFFWNKFCDVYIEQCKKKVEKHRI

SEQ ID NO: 192056 - protein, 227 aa, Unknown
  Bacterial polypetide isolated from the Sargasso Sea
MKKNYEPKGIEKRIYENWESSGYFIASPDEKKKPFCIMIPPPNVTGTLHMGHGFQNTLMDALIRHKRMSGFDVLWQVGVDHAGIATQMVVERQLESEGKDKESIGRDAFEKRVWEWKEKSGGTITQQLRRLGASVDWSREAFTMNEDLSEAVKEVFVSLYDEGLIYRGERLVNWDVVLQTALSDLEVSTEEESGSLWYFDYPIENGNTITVATTRPETMLGDAAVAV

SEQ ID NO: 192057 - protein, 441 aa, Unknown
  Bacterial polypetide isolated from the Sargasso Sea
FIEKVWEWKNEYGDIIISQLKKLGCSCDWSRNAFTMDENLSKSVIKVFVELYKKKLIYKAEKLVNWDTVLKTAISDLEVDQREMNSKIYYIRYPIDNSSEFITIATTRPETMLGDTAIAVNPKDKRYKNHVGKTVTIPIVGRKIKIIKDNYADPEQGTGALKITPAHDFNDYDVGQRNKLEIINVFTEEGKINENAPKDYIGLDRFDARKKILNELKEKDFFVKEENIKNKVPYGDRSNSVIEPFLTEQWFVDAKKLAIKAKKIVKTKKTNFFPTNWSKTYFQWMNNIEPWCISRQLWWGHQIPAWYGPDQKIFVAINENDAIKQAKKHYKKDVKLTRDPDVLDTWFSSGLWPFATLGWPDKKDYVKKFYPTTVLVTGFDIIFFWVARMIMFGMEFLNKEPFKDIYVHALVRDEKGQKMSKSKGNVIDPLDLIEKYSADAL

SEQ ID NO: 192058 - protein, 485 aa, Unknown
  Bacterial polypetide isolated from the Sargasso Sea
MTDSTDNDGNFSTKPFVESKAIMQPFGDRSKVVIEPMLTDQWFVETSKIVKPALDVVKNGEIKIIPASGEKTYYHWLNNIEPWCISRQLWWGHQVPVWFDKDGNQYCAVTESEAQEQAGSDVQLTRDPDVLDTWFSSGLWPIGTLGWPEDSSALNQYFPTSTLVTGQDILFFWVARMIMMQLAVRNEIPFDTVYLHGLVRDAKGKKMSKSTGNVVDPIDIIDEYGADALRFTNASMASIGGVLKLDTQRIAGYRNFGTKLWNAARFASLNEANFGVSVPTAKETVNRWIVGETVKALNEVNIAFDQFRFNDAAQVLYSFVWGTVCDWYVELSKPLLNSADFKIKSETRQTMGWVIDQCLILLHPIMPFITEELWETLSQRNEMLVHCDWPEFDSTLIDHAADIEMNWVVNLIESIRSARAQLRVPAGLKIPMIFLKMDSEAKQAWENNSEMIQKLARITELTSADDIPKGSIAISAKGASFALPL

SEQ ID NO: 192059 - protein, 958 aa, Unknown
  Bacterial polypetide isolated from the Sargasso Sea
MEKTYDPQSIEQTLYQNWEEQGYFKPHGDASQGNYCIMIPPPNVTGSLHMGHAFQDTIMDTLIRYQRMKGKNTLWQVGTDHAGIATQMLVERKLEAEEGKSRHDLGRDAFMEKVWEWKAQSGGTITKQLRRMGASVDWDRERFTMDEGLSKAVQEVFVRLYEDDLIYRGKRLVNWDPKLHTAISDLEVENKEKQGHMWHLRYPLADGELTADGKDYLEVATTRPETMLGDSAVAVHPDDERYQALIGKFILLPIVNRRIPIVADDYVDMAFGTGCVKITPAHDFNDYEVGKRHKLPMFNVLTLDAAIRASAEVVNTDGTINTTLDGSLPERFAGLDRFKARDAIVAEFETLGLLEKIAPHGLKVPYGDRSGVVIEPMLTDQWYVAVAPMAKTAIEAVENGDIKFVPQQYENMYFSWMRDIQDWCISRQLWWGHRIPAWYDANGKVYVGRTEAEVRAKHNIDDAIALRQDEDVLDTWFSSALWTFSTLGWPDNVEDLKTFHPTDVLVTGFDIIFFWVARMIMMTMHFIKDEDGKPQVPFKTVYVTGLIRDEAGNKMSKSKGNVLDPLDMIDGIDLEALVEKRTGNMMQPQLAAKIEKSTRKEFENGIEAHGTDALRFTLAAMASTGRDINWDMKRLDGYRSFCNKLWNASRYVLMNTEGQDCGPNSPDYQGGEMELSLADRWIIGLFNQTVKTYDDHMANYRFDLAANTLYEFTWNQFCDWYLELTKPVLQNGNEAQMRGTRHTLVNVLEAMQRLMHPMMPYITETIWQRVKPLTGAQGDTIMLAPFPSYDAAKVDATAMADLEWVKQVIVAVRNIRAELNIAPSKPLNALLRGVSAQDKARVEANQAFFTTLARLESMTILGEGETAPMSTTGLIGEMELLIPMAGLVDVAAEMARIDKQLEKLTQEIARIEGKLSNEGFVAKAPPAVIDKERAKMADLSRDMDKLKEQKAEFAKLEA

SEQ ID NO: 192060 - protein, 740 aa, Unknown
  Bacterial polypetide isolated from the Sargasso Sea
MDKRYEPLIIEEKWSELWAKNNLGKNNSSQTFSQVIPPPNVTGTLHMGHSFQYSIMDFYARYNHLNDVNTHWQIGTDHAGIATQMVVENNLSRENIDKNDLGREDFVKKVWEWKEFSENKITGQIKRLGNSVDWSNYRFTLDEGFNEAVLKAFVELYRKEKIYRGYRLVNWDPSLKTAVSDLEVVRQEKKGLIWHIKYPIIGSDDFVTVATTRPETMFGDMAIAVNPKDKRYKDIIGKKVELPFIKRKIPIIGDDYVDKEFGTGCLKITPGHDFNDYEIGKKYCLHCVDNEVHMSDDIEDFEPLNIFTDEAHSNDNVPSPFKNLDRFKVRKLVLEEIKKLDLFVKEEPHEISVPRGERSNIVIEPKLSYQWYVKTKDMADKANKAVKNGEIKFHPENWIKTYFNWMNNIEDWCISRQIWWGHRIPAWYDDRGNVYVGYSENEVRTHYSLDNRSLKQDDDVLDTWFSSSLWPFASMGWPNESKNLKTFFPTNLLVTGFDIIFFWVARMIMMSIEFTGKIPFKDVYVTGLIRDENGQKMSKSKGNIIDPIDLIYGISLEDLLEKRTSNLMQEGLAEKIARKTKKQFPNGIESYGTDALRMTFYSIATNAKDISFEIGRLKGFRNFCTKMWNAARFINGYENKGNNFEAESESDKWILKEFEQLKADVEDNVNHYRLDLAINHVYEFFWNKFCDVYIEECKKTEKTDNLHPLLKEILVFIHPFAPFITEEIHSIIFKAPLIDR

SEQ ID NO: 192061 - protein, 576 aa, Unknown
  Bacterial polypetide isolated from the Sargasso Sea
LKKLGCSCDWSRNAFTMDENLSKSVIKVFVELHKKKLIYKAEKLVNWDTVLKTAISDLEVDQREMNSKIYYIRYPIENSSEFITIATTRPETMLGDTAIAVNPKDKRYKEYVGKTVTIPIVGRKIKIIKDNYADPEQGTGALKITPAHDFNDYEVGQRNKLDIINIFTEEGKINNNAPQDYMGLDRFDARKKLLEELKEKDFFVKEENIKNKVPYGDRSNSVIEPFLTEQWFVDAKKLAVKAKKIVKTKKTNFFPTNWSKTYFQWMNNIEPWCVSRQLWWGHQIPAWYGPDKKIFVATNEIDAKKQAKKFYKKDVEITRDPDVLDTWFSSGLWPFATLGWPDKKDFVKKFYPTSVLVTGFDIIFFWVARMMMFGMEFLNKEPFKDIYVHALVRDEKGQKMSKSKGNVIDPLDLIEKYSADALRFTLLSMASPGTDVKLSEDRVKGYRNFLNKLWNANNFLITNKCDFRKTDKVPKTSLNINKWIYSELIEIKNKIQKNIEDYRFDEAAKNAYQFAWHSYCDWYIELSKTILYSDDKKAQKEVKEVSAYIFKQIVVMLHPFIPFVTEEIWLKNKFDK

SEQ ID NO: 192062 - protein, 544 aa, Unknown
  Bacterial polypetide isolated from the Sargasso Sea
MSDKYIHSNVEDKIYSYWEKNKLFKPQKNSKKFSVVIPPPNVTGSLHMGHALNNSIQDMLVRYYRMNNYETLWQPGTDHAGIATQALVERKLENENLNKNTLGREKFIEKVWDWKNQYGDIIINQLKKLGCSCDWSRNAFTMDENLSKSVIKVFVELHKKKLIYKAEKLVNWDTVLKTAISDLEVDQREMNSKIFYIRYPIDKSSEFITIATTRPETMLGDTAIAVNPKDKRYKSFVGKTVTIPIVGRKIKIIKDNYADPEQGTGALKITPAHDFNDYDVGQRNKLEIINVFTEEGKINENAPKDYVGLDRFDARKKILNELKEKDYFVKEENIKNKVPYGDRSNSVIEPFLTEQWFVDAKKLAIKAKKIVKTKKTNFFPNNWSKTYFQWMNNIEPWCVSRQLWWGHQIPAWYGPDNKIFVALNEKEASKQAKKHYKKDVKLVRDPDVLDTWFSSGLWPFATLGWPDKKDFVKKFYPTTVLVTGFDIIFFWVARMIMFGMEFLNKEPFKDIYVHALVRDEKGQKMSKSKGNVIDPLDLIEKYSA

SEQ ID NO: 192063 - protein, 423 aa, Unknown
  Bacterial polypetide isolated from the Sargasso Sea
MQLDKFFDFLKDEKNLYSQWEQSNCFKPQKGGEPYSIMMPPPNVTGSLHMGHALTFTIQDILIRYHRMKGMEVLWQAGTDHAGIATQMVVERKLSESNLDRRSLGREKFIEKVWEWKKESGGQISNQLRRLGASADWSRERFTMDEGLSNAVKKVFVNLFNDGIIYKDKRLVNWDPKLLTAISDLEVEQRDTEGSLWHIKYPIDENNHIIVATTRPETMLGDTAVAVHPDDEKYKNLIGKFCNLPISNKKIPIIADEYADPEKGSGAVKITPAHDFNDFEVGKRHDLEFINIFDENAKLNSNVPEEFQNLDRFEARKLILKKLDEMNLLIKEEKQQMVIPYGDRSGVVIEPWLTDQWFCDAKKLSVDPISAVKDNSSKFIPKQWENTFYNWMENIQPWCISRQLWWGHQIPAWYGPDKKYFVS

SEQ ID NO: 192064 - protein, 245 aa, Unknown
  Bacterial polypetide isolated from the Sargasso Sea
MLDKYYQPDLVEEKIYKQWEEDGDFKAPNDSKNKHYSIVIPPPNVTGNLHMGHALNNTLQDILIRFYRMKGRDVLWQPGTDHAGIATEMVVERELKKQKIKKADLSREEFIEHVWKWKDSSGNKIINQLKRLGCSCDWSRERFTLDEGLSQSVRHVFVKLYKDGLAYKDKRLSNWDPKLKTTISDLEVIQKEVTGTLWYINYKIENEDRYITIATTRPETMFGDTAIAVHPEDKKYKDLVGKFAI

SEQ ID NO: 192065 - protein, 539 aa, Unknown
  Bacterial polypetide isolated from the Sargasso Sea
NYYTNFLVEKELEENGISKHDLGRENFLAKVWEWKEKSGDNITNQMKTLGMSCDWSRERFTMDEGLSQAVINVFVSLYENDLIYKGTRMVNWDTKLKSAVSDLEVTSANELGKLWAINYKVGDSFIEIATTRPETLLGDTAVAVNPSDDRYKDLIGKTAIIPIVNREVEIIADDYVDVEFGSGCVKITPAHDFNDYEIGKRHNLEMIRCLDFDGKIENHDFIPQELRGLDRFEAREKIIEMLKNQNLLKRVEDHQIQIPKGDRSKTILEPMVSEQWFVKTEEVAKKAIQVVEDDEIRFIPKNWEKTYFEWMYNIQDWCISRQQWWGHRIPAWYDDEKNHYVGTSEVNVREKYGLKDDVQLTQDEDVLDTWFSSALWPFSTLGWPDDTEDLKSYYPTTLLVTGFDIIFFWVARMIMMGLYTMENIPFKDILIHGLVRDSQGRKMSKSLGNTMDPLELSEKHGADALRFSLIEKANPGQDVPFDEEWTVSAKKFGNKIWNAAKFVHLYTDESTPYEINTVSLIENKWIISRFNETLEEFNE

SEQ ID NO: 192066 - protein, 527 aa, Unknown
  Bacterial polypetide isolated from the Sargasso Sea
MSSDKYNHSEVENHIYLYWEKNKLFKPKKNKKKFSIVIPPPNVTGSLHMGHALNNSIQDLLTRYHRMNNFETLWQPGTDHAGIATQALVEKKLEKEGIKKNDLGREEFIKKVWEWKSQYGDIIINQLKKLGCSCDWSRNAFTMDENLSQSVIKVFVELYRKKLIYKSKKLVNWDTVLKTAISDLEVDQREVNSKLYHIKYPINGTNEFITIATTRPETMLGDTAIAVNPKDKRYKKYKGKDVIIPLVERNIKIIFDDYADPEQGTGAVKITPAHDFNDYEVGKRNKLKIINIFTEEGKINENAPNKYFGLDRFEARKKILEDLSNLGLLVKEENIKNKVPYGDRSNSIIEPFLTEQWFVDAKKLSIKAKKIVKSKKTNFFPSNWSKTYFQWMNNIEPWCVSRQLWWGHQIPAWYGPDKKIFVASNENEAKKNAYKFYKKNVTLIRDPDVLDTWFSSGLWAFATLGWPSNNEYLKKFYPTSVLVTGFDIIFFWVARMIMFGMEFMNKEPFKDIYVHALVRDEKGQKMS

SEQ ID NO: 192067 - protein, 950 aa, Unknown
  Bacterial polypetide isolated from the Sargasso Sea
MEKTFNHNAIEQALYQHWEAQGYFKPHGDTSKDSFCIMIPPPNVTGSLHMGHAFQRTLMDTLIRYNRMRGKNTLWQAGTDHAGIATQMVVERKIAAEEGKTRHDYGREAFIDKIWQWKEESGGTITRQMRRLGDSVDWERERFTMDEGLSAAVQEVFVRLYEDGMMYRGKRLVNWDPKLNTAISDLEVENREIKGHMWHLRYPLANGAKTAEGQDHLIVATTRPETMLGDTAVAVNPEDPRYKALIGQHILLPLVNRLIPIVADEHADMEKGTGCVKITPAHDFNDNEVGKRHNLPMINIFTLDAHVRAEAEVVDSNGNPSTAYDAALPTEFAGMERFAARKAIVAKLDELGLLAEIKDHVLQQPYGDRGGVPIEPMLTDQWYVRVAPMAKTAIEAVEDGRIQFVPKQYENMYFSWMRDIQDWCVSRQLWWGHRIPAWYDDAGNVYVGRNEDEVRAKHSIPSVTTLRQDEDVLDTWFSSALWTFSTLGWPNNTEALKTFHPTDVLMSGFDIIFFWIARMIMMTMHFIKDENGQPQVPFKTVYITGLIRDEEGQKMSKSKGNVLDPLDMIDGISLEDLLEKRTGNMMQPQMAEKIGKRTAKQFPEGIEAHGTDALRFTLAALASTGRDINWDMKRLDGYNNFCNKLWNASRYVLMNTEDQDCGFNDGEMQFSLADRWIQSQLQVAIRDFRTALDTYRFDIAAGVLYEFIWNQFCDWYLELTKPVLTKGSEAEQRAARHTLVSVLETLLRLAHPIIPFITETIWKSVAPLAGVHADTIMIQAFPEFDAAKVDEAAMADQEWVKEFIVSIRNIRAEMNVAPSVPLNVLLQCDAKDAQRAADNEAFLKSLARLESIRVLADGETAPLSVKKLIGATELMIPMAGLIDKDAELARLAKEVARLVGECGRIEGKLGNEAFVAKAPEAVIIKEREKLEDYRLQLTKLEAQQAEIAAL

SEQ ID NO: 192068 - protein, 560 aa, Unknown
  Bacterial polypetide isolated from the Sargasso Sea
KDIKNILGKKAIVPIVERKVKIIADKYVSIEQGSGALKVTPAHDFNDFDIGKRHKLEFINIFEKNGKLNNSAPKDLIGLERFEARKTIVKLLKELNLLEKIENIKNAVPYGDRSNSVIEPLLTEQWFADAKFLSKKAIQVVKQKKTNFFPTNWSKTYFQWMNDIQPWCISRQLWWGHRIPAWYSKENKIFVAENEIEANKIAKKYYRKSVELKRDEDVLDTWFSSALWPFATLGWPKNTYELKRFYPTSVLVTGFDIIFFWVARMMMMGNHLVKKVPFSKIYVHALVRDEKGQKMSKSKGNVIDPLDLIEKYSADALRFTLLSMASPGTDVKLSEDRVKGYRNFLNKLWNANNFLITNKCDFKKTDKVPKTTLNINKWIYSELIEIKNKIQKNIEDYRFDEAAKNAYQFAWHSYCDWYIELSKTILYSDDKKAQKEVKEVSAYIFKQILVMLHPFIPFVTEEIWLKNKFDKSNKNFLMYKNWPSGKAKKDQAQKDVEQIINIISELRSFKNELNVSPGSFVDISINKIAKKSKTLMSNNEVVLKRLGRINNFFEKDQAKP

SEQ ID NO: 192069 - protein, 250 aa, Unknown
  Bacterial polypetide isolated from the Sargasso Sea
MDKKYQPLEIEERLSKHWAETPLSNRKNFSTFAQVIPPPNVTGTLHMGHSFQYAIMDFYSRYNFLNDKNVFWQMGTDHAGIATQLVVENRLLKKGETKETLGREKFLDEVWDWKEKSEANITSQIKRLGCSVDWNQYRFTLDEKFSESVTEAFVKLYRDKKIYRGYRLVNWDPSLQTAVSDLEVVRQEKIGKIWHISYPIEDSSDFLIVATTRPETMFGDMAVAVNPSDTRYKKYIGKKVSLPFVGRKFL

SEQ ID NO: 192070 - protein, 441 aa, Unknown
  Bacterial polypetide isolated from the Sargasso Sea
MLEKYYQPSLVEDKIYKAWENAGDFKPLKTSSDAYCIVIPPPNVTGTLHMGHALNNTLQDILVRFYRMQGKSVLWQPGTDHAGIATEMVVERELKKRDINKKDLSREQFIEHVWEWKNQSGNEIINQLKRLGCSCDWSRERFTLDEGLSKAVRFVFVKLYNDKLIYKDKRLSNWDPKLKTTISDLEVIQKEVKGSLWYIDYKLENEDKVITIATTRPETMLGDTAIAVHPDDERFKDFVGKYAYIPILNKKIIIISDEYVKVDQGSGAVKITPAHDFNDYEIGKRHNLDVINIFNEKAELNENCPIEYQNLDRFKAREKIINELETIGALNKVEENIHTVPYGDRSGEVVEPWLTDQWFVNAKKLSLNAIDKVKTKETIFVPQNWQKTYFDWMENIQPWCISRQLIWGHQIPAWYGPDGEIFVAENSDGAHKIAKEHYKKM

SEQ ID NO: 192071 - protein, 371 aa, Unknown
  Bacterial polypetide isolated from the Sargasso Sea
IDVEEKWVDIWSKKVFLNKDGNDSFSLVIPPPNVTGTLHMGHSFQYAIMDFYTRYNHMSGKRVHWQVGADHAGIATQLVVENNLSKKGTNKKEIGREDFLNEVWKWKDFSEDKIQRQIKRLGSSVDWSKYRFTLDDGFSKAVNKAFIELYRQNKIYRGYRLVNWDPSLKTAVSDLEVVRQEKKGLIWHIKYSIDDSDEFVTIATTRPETMFGDMAIAVNPKDSRYKSLIGKYALLPFKNRKIPIIGDNYVDMDFGTGCLKITPGHDFNDYEIGKKYALHEKNEIVHTSDDLNDFEPINIFNDEAWTNENVPEPFNNLDRFKARKLVLEKLSELKLLVKEEECDLSIPRGERSNIVIEPKIKQSMVCENFRY

SEQ ID NO: 192072 - protein, 248 aa, Unknown
  Bacterial polypetide isolated from the Sargasso Sea
MSSDKYIHSDVENRIYSYWEKNGLFNPKENSKKFSIVIPPPNVTGSLHMGHALNNSIQDLLVRYHRMNNFETLWQPGTDHAGIATQALVEKKLTSEKIDKNEIGREKFIEKVWEWKEQYGDIIINQLKKLGCSCDWSRNAFTMDENLSKSVIKVFVDLYNKGLIYKDKKLVNWDTVLKTAISDLEVDQREVNSKIYYIRYPIDGTEEFITIATTRPETMLGDTAIAVNPKDERFKFFVGKTATIPIVG

SEQ ID NO: 192073 - protein, 337 aa, Unknown
  Bacterial polypetide isolated from the Sargasso Sea
WMDIFQDWCISRQIWWGHRIPAWYDEDGNIYVGYDEDELRNHYKLDDRKLTQDEDVLDTWFSSSLWPFGSLGWPKENELEKYFPTSLLVTGFDIIFFWVARMMMMSLEFTGKVPFKDVYVTGLIRDENGQKMSKSKGNIIDPIDLIYGIDLEDLVTKRTANLMQEGLAEKIERKTRKQFPNGIESYGTDALRMTFFSLATHTRDISFELGRLKGYRNFCNKIWNAARFINNYPHEAKEFVAKNDDDKWIEEEFNKVSEQIKKNIEEYRLDFAVNEIYEFFWGKFCDKYIEDCKKSGETSNLHPMLKKILLLMHPFAPFITEEVNELVFKDGSLMKLK

SEQ ID NO: 192074 - protein, 437 aa, Unknown
  Bacterial polypetide isolated from the Sargasso Sea
MKKNYEPNGIEKKIYDKWESSGYFTAIPDEKKEPFCIMIPPPNVTGTLHMGHGFQNTLMDALIRHKRMSGFDVLWQVGVDHAGIATQMVVERQLESEGKTKESIGREAFEKRVWEWKEKSGGTITQQLRRLGASVDWSREAFTMSEDLSLAVKEVFVSLFDEGLIYRGERLVNWDIVLQTALSDLEVTSEEESGFLWHFDYPVENGGTITVATTRPETMLGDSAVAVNPEDERFKELIGQFVTLPITNRRIPIIQDTYVDSEFGTGCVKITPAHDFNDFEIGKRHDLEIINILNLDGSLNESVPEKFRGLTTTEAREEVLNELESLGCLNKVEPHKIQIPKSQRSDSVLEPIITNQWFVDVKKMSKEAMRVVQQNKTEFIPKNWENTYFNWMEDIQDWCISRQLWWGHRIPAWFDEKENIYVGRSEDEVRENMILKI

SEQ ID NO: 192075 - protein, 411 aa, Unknown
  Bacterial polypetide isolated from the Sargasso Sea
LKRDPDVLDTWFSSGLWPFATLGWPDKNYYLKKFYPTSVLVTGFDIIFFWVARMMMLGMEFLNKEPFKEIYVHALVRDEKGQKMSKSKGNVIDPLVLIDSYSADALRFTLLSMASPGRDVKLSEQRVKGYRNFLTKIWNVNNFLKVNKCTFDGVIKPKNLKLNINKWIYNELIETKILTENFIKNYRFDEAAKTIYKFVWNTYCDWYLELSKTILLSKNNSDIKEIKTTSGQVFKEILILLHPFIPFITEELWLRNKLKTKNTKYLTYSNWISLKKLKTDKSIQSVNEIIELISSVRSFKNELNVSPGSFVDISIEKLDKKKQMLYLKNEIIIKKLGRINSIFKKDMSKQSANLVFGGQILKLYFDKSIDLELIRQNLLKKQSKIQQDLDIVNKKLNNSSFCKTCTKAYCR

SEQ ID NO: 192076 - protein, 738 aa, Unknown
  Bacterial polypetide isolated from the Sargasso Sea
MDKRYSPIEVEEKWVDIWSKEILINKDAKETFSQVIPPPNVTGTLHMGHSFQYAIMDFYTRYNHMSGKKAHWQVGSDHAGIATQLVVENNLAKESIDRKDIGREKFIDEVWKWKDFSENKIQSQIKRLGCSVDWNKYRFTFDEEFTQAVNKAFIDLYRKDKIYRGYRLVNWDPSLKTAVSDLEVVRQEKKGLIWHINYPIENSNDYITVATTRPETLFGDMAIAINPNDSRYKSMIGKYALLPFVNRKLPIIGDEYVDMDFGTGCLKITPGHDFNDYEIGKKYNLHEKDGTVFTSKNIDDFKPINIFNDDAWTNENVPEPFNDLDRFKVRKLAIKELDRLKLLVKEEEYDISVPRGERSNIVIEPRLSNQWYVKTSEMAKKANKEVKDGNIKFHPENWVKTYFNWMDNIEDWCISRQIWWGHRIPAWYDEEGNIYVGESEDDVRNHYKLNGIELTQDEDVLDTWFSSSLWPFGSLGWPKNTEDLKDFFPTSLLVTGFDIIFFWVARMMMMSIEFTGKIPFKDVYVTGLIRDENGQKMSKSKGNIIDPIDLIYGISVNDLVKKRTSNLMQEGIAEKIEKKTRKQFPNGIESYGTDALRMTFFSLATHTKDISFEFGRLKGYRNFCTKIWNAARFIDGYPNERDSFKSLNDNDKWIYEEFQKMKEQINKNILDYRLDFAVNEVYEFFWNKFCDIYIEECKKSGNTSNLRPLLREILYVFHPFAPFITEEISNLLFKERII

SEQ ID NO: 192077 - protein, 480 aa, Unknown
  Bacterial polypetide isolated from the Sargasso Sea
MEFKKYNHSKEEKKISNFWIKKGLFKPKKNKSNKKFSIVIPPPNVTGRLHMGHALNNSLQDVLVRFNRMKGLETLWQPGTDHAGIATQAVVENNLLKEGIKKNDLGREKFIKKIWDWKEESGGIILDQLKKLGCSCDWSRTRFTMDKDLSKAVIKVFVDLYKNKLIYKDKKLVNWDTKLQTAISDLEVNQKDVQSQLYYIDYKIVNSDQKITIATTRPETMMGDTAVAVNPKDERYVNLVGKNILIPIVNRTVKIISDNYADPEQGSGAVKITPAHDFNDYEVGKRNKLETINIFEENGKINKNGIKEFHGLDRFEARKLIIKKLKDKGSLVKIENIKNKVPYGDRSNTIIEPLLTEQWFVDAKKLSKKPIKIVKDGKTTFFPSNWSKTFFQWMNNIEPWCISRQIWWGHRIPAWYDENGNIFVAESEKDAVKLAKKKNKNKQFKLRQETDVLDTWFSSALWPFATLGWPNKTEELNKFI

SEQ ID NO: 192078 - protein, 577 aa, Unknown
  Bacterial polypetide isolated from the Sargasso Sea
LGDTAIAVNPKDKRYKNHVGKTVTIPIVGRKIKIIKDNYADPEQGTGALKITPAHDFNDYDVGQRNKLEIINVFTEEGKINDNAPKDYIGLDRFDARKKILNELKEKDFFVKEENIKNKVPYGDRSNSVIEPFLTEQWFVDAKKLAIKAKKIVKTKKTNFFPTNWSKTYFQWMNNIEPWCISRQLWWGHQIPAWYGPDQKIFVAINENDAIKQAKKHYKKDVKLTRDPDVLDTWFSSGLWPFATLGWPEKKDYVKKFYPTTVLVTGFDIIFFWVARMIMFGMEFLNKEPFKDIYVHALVRDEKGQKMSKSKGNVIDPLDLMKKYSADALRFTLLSMASPGTDVKLSEDRVKGYRNFLNKLWNANNFLITNKCDFKKTNKVPKISLNINKWIYSELIETKNKIQKNIEDYRFDEAAKNAYQFAWHSYCDWYIELSKTILFSDDKKAKTEVKEVSAYVFKQILVMLHPFIPFVTEEIWLKNKFDESNKNFLMYKNWPTGKIKKDQSLKEVEKIIKIISELRSFKNELNVSPGSFVDVAINKIAKKNKSLVNNNDVILKKLGRINNFFDKEQNKPSATLV

SEQ ID NO: 192079 - protein, 511 aa, Unknown
  Bacterial polypetide isolated from the Sargasso Sea
WGIGKKKSGNKITQQLRRLGASVDWSREAFTMSDDLSLAVKEVFIKLYDEGLIYRGERLVNWDTVLGTALSDLEVSSEEENGFLWYIDYLTENNNKITVATTRPETLLGDTAIAVNPDDNKFKNLIGKKAIVPIVNREIPIISDDYVDSDFGTGCVKITPAHDFNDFEMGKRHKLPIINILNFDGTLNETTPDQYHGLSVNEARDLILKELEDFGQLKKTEPYRVQIPRSERSNSILQPLVTNQWFVNVKTLSEEAIRVVKDDETQFVPKNWENTYFNWMDDIQDWCISRQLWWGHRIPAWFDSEGNIYVAESEEGVRKKYKLDERELQQEDDVLDTWFSSALWTFSTLGWPKDENLLSRYHPTSVLVTGFDIIFFWVARMIMMTTHFINEVPFKKILIHGLIKDSEGQKMSKSKGNTLDPLDIIDGIDLESLLEKRTDGLMQPKMKERIIKQTKKEFPEGIKSYGTDALRLTFCSLASGGRDINFDIKRVEGYRNFCNKLWNAARFIDLN

SEQ ID NO: 192080 - protein, 589 aa, Unknown
  Bacterial polypetide isolated from the Sargasso Sea
MDSKYQPKKIERLWSSKWEESKLFSPSLKKNSKAFSIMLPPPNVTGVLHMGHGFQTSIMDSICRYKRMNGYDVLWQPGTDHAGISTEIVVERNLEKENKSKNKLGRDRFIKEVWKWKSKSGNTITSQLRRLGASLDWENEAFTMNEDYAHIVRKVFIELYEKGLIYKKNRLVNWDPKNETGLSDLEVTTREENGNIWHIKYEVGDGFIIVATTRPETMFGDQAIAVHPKDKRYKKLIGLKAKIPFTDKYIPIIADPYVDKDFGTGCLKITPGHDFNDYELGIKHGLEPINILNPDGTLNAETPAPFSGMDRFDARREIIKSLKDIQMLERIEPHKLSIPRAERSDTILEPYLTDQWYLNTDLIGKEALSLVKKKSINFIPDNWKKTYFSWMNELQDWCISRQLWWGHQIPIWYDQDGSEYCGENEKDIRKKYKLDKKISLVQDQDVLDTWFSSSLWTFATLGWPQQTKRLDKYHPTSLLVTGFDIIFFWVARMIMMTKHFTKAIPFKEIYITGLIRDSEGQKMSKSKGNVLDPLDIIDGINLEALISKRISGLLNPDDEQKIIKQTKKDYPQGIKAHGTDALRFTFLSL

SEQ ID NO: 192081 - protein, 381 aa, Unknown
  Bacterial polypetide isolated from the Sargasso Sea
MKLLEKKHNPSDIENKWYKYWLEKKYFSSQESENHYTIVIPPPNVTGKLHMGHVLNNTIQDILIRKARMEGKNACWIPGTDHASIATESKVTKMLEEQGINKKDLTREEFLKYAWEWKEEYGGTIINQLQKLGCSCDWDKTSFTMDEDYSKAVLESFVQLYNKGLIYKGSKLVNWCPKSQTALSDEEVIFKEVNGTLWYIKYAINESDTFIEIATTRPETMLGDTAIAVNPDDKRYKELIGKTALLPLVGRSIPIIADDMVDPEFGTGCVKITPAHDLNDYEVGIKHNLEMINIMNADSSISDKAPEKYRGMSREAARKQIVLDLKDINHLIKEEDYFHKVGYSERGNVPIEYYLSEQWFLKMEDLAKPASKAVKDNEINF

SEQ ID NO: 192082 - protein, 694 aa, Unknown
  Bacterial polypetide isolated from the Sargasso Sea
SDLEVDQREMNSKIYYIRYPIDKSKDFITIATTRPETMLGDTAIAVNPKDKRFKKYVGKTVTIPIVGRKIKIIKDDYADPEQGTGALKITPAHDFNDYDVGQRNKLEIINVFTEDGKINNNAPVEYVGLDRFEARKKILNELKEKEFFVKEENIKNKVPYGDRSNSVIEPFLTEQWFVNAKKLSVKAKQIVKSKKTNFFPENWSKTYFQWMNNIEPWCVSRQLWWGHQIPAWYGPDKKIFVAVNEDDAKKQAKKFYKKDVKITRDPDVLDTWFSSGLWPFATLGWPDNKDFVKKFYPTTVLVTGFDIIFFWVARMMMFGMEFLNKEPFKDIYVHALVRDEKGQKMSKSKGNVIDPLDLIEKYSADALRFTLLSMASPGTDVKLSEDRVKGYRNFLNKLWNANNFLITNKCDFNKTDKAPKTKLNINKWIYSELIQTKEKIEKNLKDYRFDEAAKNAYQFAWHSYCDWYIELSKTILFSDDEKAKKEVKEVSAYVFKQILIILHPFIPFVTEQIWLKNKFDKSDKNFLMYANWPSGKAKKDQSLKEVEKIISVISELRSFKNELNVSPGSFIDISMTNIAKKNKTLMTNNEIILKKLGRINNFYDKDQKKPSATLVISGDIFKIYFDENVDLNLIKENLVKRQNKYKEEMDKISQRLSNKGFTDRAPKNIVEQEKTNYSNLKNDIQKISLTIESI

SEQ ID NO: 192083 - protein, 780 aa, Unknown
  Bacterial polypetide isolated from the Sargasso Sea
EGISKNDLGREKFIAKVWDWKNEYGDIIINQLKKLGCSCDWSRNAFTMDENLSKSVLEVFVNLYKKKIIYKSKKLVNWDTVLKTAISDLEVDQRDVSSKMYYIKYPIHETNDFIIIATTRPETMLGDTAVAVNPRDKRYKKFKNKKVNLPLVERKIKIIFDKYADPKQGTGAVKITPAHDFNDYDVGKRNKLEIINILTEDGKINENAPSQYQGLDRFAARKKILSDLSDLGLLVKEETIKNKVPYGDRSNSIIEPLLTEQWFADAKKLSIKAKKIVKGKKTNFFPTNWSKTYFQWMNNIEPWCISRQLWWGHQIPAWYGPDNKIFVAMNEDDAKKDAKKYYKKDVSLIRDSDVLDTWFSSGLWPFATLGWPNNNEYLKKFYPTSVLVTGFDIIFFWVARMIMFGIEFMKKEPFKDIYVHALVRDEKGQKMSKSKGNVIDPLELIEKYSADALRFTLLSMASPGRDVKLSEERVKGYRNFLNKLWNANNFLIHNKCSFKNLKGKLKTNININKWIYNELLHTKLTVEKNIKDYRFDEAARNIYQFVWHSYCDWYLELSKTILYSGNKSQIEETKKTAAFIFREILILLSPFIPFITEEIWLKNSLDNSGKDHLMLSNWVSGKPNKEKSNSEVASLIQFISSIRSFKNELNISPGSFVDISLSNIAKKNKEFFNKNELVIKRLGRVNNFLDKDMNKPSASLVIAGNIYKLYFDQNVDLNLIKQNLIKKQSKFKDEVDKINSRLKNKDFVKRAPKHIVEQEKTNYNNLQNDIKKISLTVKGL

SEQ ID NO: 192084 - protein, 187 aa, Unknown
  Bacterial polypetide isolated from the Sargasso Sea
MQDETYEPLAIEKKWQESWESANKFVPVGSDKKFSIVIPPPNVTGSLHMGHALEHSIIDVITRIKRLQGYETLWVPGTDHAGIITQLLVENELSEKGVQKEDIGRENFISKVWEWKEKSGENISTQMRKLGMSCDWSRERFTMDEGLSTAVREVFIKLYEDGLIYKGTRMVNWDTELMSAVSDLEVT

SEQ ID NO: 192085 - protein, 388 aa, Unknown
  Bacterial polypetide isolated from the Sargasso Sea
TSVLVTGFDIIFFWVARMIMMGTQFLDKEPFKNIYVHALVRDEKGQKMSKSKGNVIDPLELIEKYSADALRFTLLSMASPGRDVKLSEDRVKGYRNFLNKIWNANNFLTQNKCDFGDVKKPENINLTINKWILSELVKVKNDTENSLKNYRFDEAAKNIYQFVWHSFCDWYLELSKTVLNSENEEDIKELRQTSAYVFKEILIILHPFIPFVTEEIWLNNKLDKEGKDYLMHANWLEDDYHEKKSYDEINNIINFITSIRSFKNELNISPGSFIEISTENTNKEYKNFLSSNENIMKKNGRIKNFHEKDLNKPSASIVISGELFKLYFDENVDLNMIKSTLEKKITKISEEMKKIDVRLSNKSFVDRAPQNIVEQEKSNFANLEKDVK

SEQ ID NO: 192086 - protein, 368 aa, Unknown
  Bacterial polypetide isolated from the Sargasso Sea
VPEEFIGLDRYDARKKILEDLKKKNLLVKEEKQNMVVPYGDRSGVVIEPWLTDQWFCDAKKLSIDPIKSVKSNNTKFIPKMWEKTFFNWMENIQPWCISRQLWWGHQIPAWYGPDKKFFVAETLEEANKQALKHYGKNQTLKQDEDVLDTWFSSALWTFSTLDWPNKTYELERFYPGNVLVTGFDIIFFWVARMMMMGSYFMKETPFKDVYIHPLIRDEKGQKMSKSKGNIIDPLELLDKYGADTLRFTLTSLINPGRDVKLSESRVKGYKSFINKIWNASNFLQLNKCSLDKDFDYKKIKAPVNKWIINELIKTKSNIEKNTLKYLFHEVSNDLYHFVWHSYCDWFIEFSKSLILKMQMNLMRQKMY

SEQ ID NO: 192087 - protein, 548 aa, Unknown
  Bacterial polypetide isolated from the Sargasso Sea
MDKRYNPTEVEEKWVEIWSNEVVSNKSSKESFSQVIPPPNVTGTLHMGHSFQYAIMDFYTRYNHMSGKKAHWQVGTDHAGIATQMVVENNLSKKNIDRKDLGREKFLQEVWKWKDFSEDKIQSQIKRLGSTVDWNKYRFTLDDKFSKAVNKAFVDLYRNKKIYRGYRLVNWDPSLKTAVSDLEVVRQEKKGTIWYIKYPIDSSDKFITVATTRPETLFGDMAIAVNPNDERYKDLIGKYALLPFVERKLPIIGDDYVDMEFGTGCLKITPAHDFNDYEIGKKYCLHEKDNKVYMSKNIDDFEPINIFNQDAWTNNNVPKLFENLDRFKVRKLVIKELTELKLLEKEEEYDVSIPRGERSNIVIEPRLSHQWYVKTSEMAEKANMEVKKGNIKFHPNNWIKTYFNWMDNIEDWCISRQIWWGHRIPAWYDDNGNIYVGENEQDVRNYYKLDAIDLKQDEDVLDTWFSSSLWPFGSLGWPEKTDDFKSFFPTSLLVTGFDIIFFWVARMIMMSIEFTGKIPFKDVYVTGLIRDENGQKMSKSKGNIIDPN

SEQ ID NO: 192088 - protein, 449 aa, Unknown
  Bacterial polypetide isolated from the Sargasso Sea
MDKRYNPIEVEEKWVDIWSKEIFINKDAKETFSQIIPPPNVTGTLHMGHSFQYAIMDFYTRYNHMSGKKAHWQVGSDHAGIATQLVVENNLAKDNIDRKDLGREKFIDEVWKWKDFSENKIQSQIKRLGCSVDWNKYRFTFDEGFTKAVNKAFIDLYRKDKIYRGYRLVNWDPSLKTAVSDLEVVRQEKKGLIWHINYPIDGSSDYITVATTRPETLFGDMAIAVNPKDSRYKSMIGKYALLPFVNRKLPIIGDEYVDMDFGTGCLKITPGHDFNDYEIGKKYNLHEKDGTVLTSKNIDDFKPINIFNDDAWTNGNVPDQFSGLDRFKVRKLAIKELDKLKLLVKEEEYDISVPRGERSNIVIEPRLSNQWYVKTSEMAKKANKEVKDGNIKFYPKNWVKTYFNWMDNIEDWCISRQIWWGHRIPAWYDEEGNIYVGESEDDVRNHYKL

SEQ ID NO: 192089 - protein, 358 aa, Unknown
  Bacterial polypetide isolated from the Sargasso Sea
MSSDKYIHSEVENKIYSYWEKNNLFKPKKNKKSFSIVIPPPNVTGSLHMGHALNNSIQDLLTRFHRMNNYETLWQPGTDHAGIATQALVEKKLANDGIKKNDLGRDKFIEKVWEWKNQYGDIIINQLKKLGCSCDWSRNAFTMDDNLSKSVIKVFVDLYKKDLIYKSKKLVNWDVVLKTAISDLEVDQREVNSKLYHIRYPIENSDEFITIATTRPETMLGDTAIAVNPKDDRYKSLVNKFVTIPLVERKIKIIEDDYADPEQGTGAVKITPAHDFNDYEVGQRNNLEILNIFTSDGKINENAPKEFIGLDRFEARKRLLKKLKEKDFLVKEENIKNKIPYGDRSNSIIEPFLTEQWF

SEQ ID NO: 192090 - protein, 584 aa, Unknown
  Bacterial polypetide isolated from the Sargasso Sea
MDNSFNSSQIEQELYKMWEEENFFAPADRDNQKNFCILIPPPNITGTLHMGHAFNHTLIDILIRHSRMTGKRTLWQGGTDHAGIATQMLVERKLAEENLSKIELGREKFLERVWDWRRNSGNTISQQIRRMGSSIDWSRERFTMDEDYADAVLEVFVRLYDEGLIYRGQRLVNWDPELKTAISDLEVENTEENGLLWHIRYPLTNHARTKAGHPYLVVATTRPETMLGDTAVAVHPDDERYTNLIGTSVELPLCSRTIPIISDEYVDPEFGTGCVKITPGHDFNDYEVGARHDLPLINILTETAQINEEAPQAYRRLDRFEAREKIIEDLEKTGLLESIDDHSLMVPRGDRSGSIIEPLLTDQWFVKIQPLASPAIDAVKKGEVRFVPKQYENVYFSWMDNIQDWCISRQQWWGHQIPAYYDSEGNIYVAKNEEEAREKYNLESSLPLSQDGDVLETWFSSALWPFATMGWPKETDDLKHFLPSSTLITGHDIIFFWVARMIMMTLHFTQKVPFETVYIHGIIRDADGHKMSKTKGNGLDPLDFIDGIDLETLVDKRTSNLTQPQMAQRIEKSTKQEFPEGMKL

SEQ ID NO: 192091 - protein, 864 aa, Unknown
  Bacterial polypetide isolated from the Sargasso Sea
MQDETYEPLAIEKKWQESWESANKFVPVGSDKKFSIVIPPPNVTGSLHMGHALEHSIIDVITRIKRLQGYETLWVPGTDHAGIITQLLVENELSEKGVQKEDIGRENFISKVWEWKEKSGENISTQMRKLGMSCDWSRERFTMDEGLSTAVREVFIKLYEDGLIYKGTRMVNWDTELMSAVSDLEVTLNPEKGKLWSIKYKTEDSFLTISTTRPETLLGDTAVAVNPDDERYKNLIGKTAIVPLVNREVPIIADEYVDPEFGSGCVKITPSHDFNDYEIGEKHKLEFIQCIDLDGKISNEDFIPENLRGKDRFEARKLIVNDLMKLEQLEKEEDYDIQLPKGDRSKSILEPMITEQWFVKTETLAKKAIKAVETEEIKFVPKNWEKTYFEWMYNIQDWCISRQIWWGHRIPAWYDEENNIYVGNSEQEIREKNNLPKETKLRQDEDVLDTWFSSALWPFSTLGWPEESEDLSNYYPTSLLVVGFDIIFFWVARMIMMGINFQKDIPFKDILVHGLVRDSKGRKMSKSLGNTIDPLELSDKHGADALRFSLVEKASPGQDVPFDEEWTIAAKKFGNKIWNASKFVHIYTDGKENNDLSTIECEENKWIINKFDAVLDEFNSLFEKYKISDAYKLLYNFLWSDLFDWYFEFSKNLIENENHKSETMEVLNSVFLKSIKILNPAMPHITEEVWETFDNEVLISNKWPEKYNINEDNDGSVEDLKNMISKIRNFKATYQIKNNTKLKIYSDVEIEDWFKSQFESLAKVEIQKDTFSPKEGEAVLHFHAGNYDFVLSAEEYIDIEVEIKKLNKKINEIEKSIEISNKRLENEKFMKNAKPELIDEEKSNKEALEMELSVIKETLKELGN

SEQ ID NO: 192092 - protein, 569 aa, Unknown
  Bacterial polypetide isolated from the Sargasso Sea
MSSEKYIHTKVENKIYSYWEKKQLFKPKKNKKKYSIVIPPPNVTGSLHMGHALNNTIQDLLIRYHRMNNYETLWQPGTDHAGIATQALVEKKLESQNINKKSIGRDKFVKKVWEWKNEYGGIIINQLKKLGCSCDWSRNAFTMDKNLSSSVIKVFIDLYNKGLIYKSKKLVNWDTVLKTAISDLEVDQREVNSKLYYINYQIENSSNFITIATTRPETMLGDTAVAVNPKDERYQNLIGKNVILPITNRKIKIIADDYADPEQGSGAVKITPAHDFNDYDVGKRNKLEIINIFTEDGKINNNAPTEYVGLDRFEARKKILNELGDKLIKEEKIKNKVPYGDRSNSVIEPYLTEQWFADAKKLSIKAKKIVKNKKTSFFPKNWSKTYFQWMNNIEPWCISRQLWWGHQIPAWYGPDKKIFVANNLNEAKKLAKKKYKKDVTLIRDEDVLDTWFSSGLWAFATLGWPKKNEYLKKFYPTSVLVTGFDIIFFWVARMMMFGMEFLNKEPFKDIYVHALVRDEKGQKMSKSKGNVIDPLVLIEKYSADALRFTLLSMASPGRDVKLSEDRVKG

SEQ ID NO: 192093 - protein, 874 aa, Unknown
  Bacterial polypetide isolated from the Sargasso Sea
MKLLEKKHNPSDIESKWYKYWLEKKYFSSQESENHYTIVIPPPNVTGKLHMGHVLNNTIQDILIRKARMEGKNACWIPGTDHASIATESKVTKMLEEQGISKKDLTREEFLKHAWEWKEEYGGTIINQLQKLGCSCDWDKTSFTMDEDYSKAVLESFVQLYNKGLIYKGSKLVNWCPKSQTALSDEEVMFKEVNGNLWYIKYAINDSDAFIEIATTRPETMLGDTAIAVNPNDKRYKELIGKTALLPLVGRSIPIIADNMVDPEFGTGCVKITPAHDLNDYEVGIKHNLEMINIMNPDSSISDKAPEEYRGMSREDARKQIVSDLKDINHLIKEEVYLHKVGYSERGNVPIEYYLSEQWFLKMEDLAKPAISAVRNKEINFYPNHWVKTYNHWMDNIQDWCISRQLYWGHQIPVWYKKDADRSNQDNWFVSTTPPTDLENWEQDNDVLDTWFSSWLWPFAVHGWPDIKTTKYFPTNALVTGPDIIFFWVARMIMSGYEFMGDLPFKDVYFTSILRDDKGRKLSKSLGNSPDPITLFEKYGTDATRFSIMLMSPQGSDVYFSENGIEVGRNFMTKIWNASRFIMLNHEDSFSNEINVEKLDNFDKWILDSLDETVNEVNKYFDKYQFNEAIKKIYDFTWNEFCNWYIEIVKHRFREGDFVTKSNSFNISKKIIKKIVLLLHPIAPFISEEIWNHLKDDNEQDIIISSWPKAKNRDISHNKDEISDFKEIVTSIRTIRSELNIPPSKKIDVIAYAKNELIKSRLNSLVDLIKSLSNSDNLNLSLEKEKPENSAVAVCKSVELYIPLGDLVDKDEELAKLNKRLSELDSFILSIENKLSNDDFISKAPENIVSGEKNKLNDFLVERTKILSNIEVLK

SEQ ID NO: 192094 - protein, 514 aa, Unknown
  Bacterial polypetide isolated from the Sargasso Sea
VLEWLIWDTKLKSAVSDLEVTSSNELGKLWTINYKVENSFIEIATTRPETLLGDTAVAVNPSDDRYKNLIGKTAIIPIVNREVKIIADDYVDVEFGSGCVKITPAHDFNDYEIGKRHNLEMIRCLDFDGNIEDHEFIPKELRGLDRFEAREKIIDMLKNQNLLQEVKDHQIQIPIGDRSKTILEPMISEQWFLKTDEIAKKAIQVVEDDEIRFIPKNWEKTYFEWMYNIQDWCISRQQWWGHRIPAWYDDEKNHYVGTSEANVRQKYGLKDNVQLIQDEDVLDTWFSSALWPFSTLGWPEDTEDLKRYYPTTLLVTGFDIIFFWVARMIMMGLYTMENIPFKDILIHGLVRDSQGRKMSKSLGNTMDPLELSQKHGADALRFSLIEKANPGQDVPFDEEWTVSAKKFGNKIWNAAKFVHLYTDESTPSEISTVSLIENKWIISRFNNTLDEFNDLFEKYKISDAFKLLYNFLWSELFDWYFEFSKNLFNDEDKKIETQTVLKSIFLESLKLLNP

SEQ ID NO: 192095 - protein, 355 aa, Unknown
  Bacterial polypetide isolated from the Sargasso Sea
VIPPPNVTGSLHMGHALNNSIQDLLTRYHRMNNYETLWQPGTDHAGIATQALVEKKLEKDGLKKNDLGREKFIEKVWEWKNQYGDIIINQLKKLGCSCDWSRNAFTMDKNLSDSVIKVFVDLYNKKLIYKSKKLVNWDTVLKTAISDLEVDLREVNSKLYYINYPIEGSNENITIATTRPETMLGDTAVAVNPKDQRYKKLVGLNIILPLVERKIKIISDEYADPEQGTGAVKITPAHDFNDYEVGVRNKLEILNIFTDDGKINENAPKEFIGLDRFEARKIILKKLVEKGFFVKEENIKNKVPYGDRSNSIIEPYLTEQWFADAKKLSVKAKKIVKSKKTKFYPGNGLKHIFNG

SEQ ID NO: 192096 - protein, 281 aa, Unknown
  Bacterial polypetide isolated from the Sargasso Sea
MNNIEPWCISRQLWWGHQIPAWYGPGKKIFVAKTEKEAKQLAKKYYKKDIKLNRDPDVLDTWFSSGLWAFATLGWPTKNEFVKKFYPTSVLVTGFDIIFFWVARMIMFGMEFLNKEPFKDIYVHALVRDEKGQKMSKSKGNVIDPLELIEKYSADALRFTLLSMASPGRDVKLSEDRVKGYRNFLNKLWNANNFLIQNKCSFKNIQKKPKISININKWIYAELLETKKNVEKNIKDYRFDEAARNSYQFVWHSYCDWYLELTKTILYSNDKKSIKEIREVS

SEQ ID NO: 192097 - protein, 339 aa, Unknown
  Bacterial polypetide isolated from the Sargasso Sea
FNWMDNIQDWCISRQIWWGHRIPAWLDADGNTYVGFNEEEVRDFYKLDQRKLNQVEDVLDTWFSSSLWSFGSLGWPDNTEDLQRYFPTSLLVTGFDIIFFWVARMMMMSLEFTGKIPFKDVYVTGLIRDENGQKMSKSKGNIIDPIDLIYGIELEDLVAKRTANLMQEGLAEKIERKTRKQFPNGIESYGTDAMRMTFYSLATHTKDISFELGRLKGYRNFCNKMWNAARFINNYPHEQKEFIPKNDADRWIEKEFETVSKQINKNIAEYRLDFAINEVYEFFWSKFCDKYIEKCKASGETGNLHPMLKRILLLVHPFCPYISEEINELIFKDGSLMDL

SEQ ID NO: 192098 - protein, 506 aa, Unknown
  Bacterial polypetide isolated from the Sargasso Sea
SDLEVEQRDTEGSLWHIKYPIDENNHIIVATTRPETMLGDTAVAVHPDDEKYKNLIGKFCNLPISKKKIPIIADEYADPEKGSGAVKITPAHDFNDFEVGKRHDLEFINIFDENAKLNLNVPEEFQNLDRFEARKLILKKLDEMNLLIKEEKQQMVIPYGDRSGVVIEPWLTDQWFCDAKKLSVDPISAVRDNSSKFIPKQWENTFYNWMENIQPWCISRQLWWGHQIPAWYGPDNKYFVSETLEGAQNLAKEFYGEDVKLRQDEDVLDTWFSSALWTFSTLDWPNKTYELDRFYPGNVLVTGFDIIFFWVARMMMMGSYFMKETPFKDIYIHPLIRDEKGQKMSKSKGNIIDPLDLLDKYGADTLRFTLTALLNPGRDVKLSEARVKGYKSFTNKIWNAGKFLQLNNSIFIDDISIDSIIFDANKWIIKELNDLNTQLDQLTKKYLFHEIANKIYHFVWHTYCDWYIEIIKQNFENEKFADEIKKVSGWTFIQVLKIIHPIMPFI

SEQ ID NO: 192099 - protein, 686 aa, Unknown
  Bacterial polypetide isolated from the Sargasso Sea
MSFDKYEHNNVENKIYDYWEKNELFKPKENSKKFSIVIPPPNVTGSLHMGHALNNSIQDVLTRFHRMNNYETLWQPGTDHAGIATQALVEKKLAKDAIKKNDLGREKFIEKVWEWKNEYGDIIINQLKKLGCSCDWSRNAFTMDENLSKSVIKVFVDLYNKKLIYKAKKLVNWDVVLKTAISDLEVDQREVNSQLYYINYPIENSDKFVTIATTRPETMLGDTAIAVNPKDDRFKDIVGKLVTIPLANRKIKIITDDYADPEQGTGAVKITPAHDFNDYDVGTRNNLEVINIFTPDGKINDNAPDPYKGLDRFAARKLILEHLEESKFLQKIEKLVNKVPYGDRSNSIIEPYLTEQWFVDAKTLAIKAKEVVNNGKTKFFPENWSKTYFQWMDNIEPWCISRQLWWGHQIPAWYGPDGKIFVAENEDECKKQAKEFYSKDVELKRDEDVLDTWFSSGLWPFATLGWPEKTPEVEKFYPTSVLVTGFDIIFFWVARMIMMGTEFLKEEPFKNIYVHALVRDEKGQKMSKSKGNVIDPLELIEKYSADALRFTLLSMASPGRDVKLSEDRVKGYRNFLNKVWNANNFLRQNECDFSDIKKPENLKLTINKWILSELVKTKKETENSLKNYRFDEAAKNIYQFVWHSFCDWYLELSKTVFNSNNDEEIKELRQTSSYVFREILIILHPF

SEQ ID NO: 192100 - protein, 335 aa, Unknown
  Bacterial polypetide isolated from the Sargasso Sea
MSNDKYIHSEVENKIYSYWEKNELFKPKENSKKFSIVIPPPNVTGSLHMGHALNNSIQDLLVRYHRMNNYETLWQPGTDHAGIATQALVEKKLTSEKIDKNEIGRDKFIEKVWEWKEQYGDIIINQLKKLGCSCDWSRNAFTMDANLSKSVIKVFVELYNKGLIYKDKKLVNWDTVLKTAISDLEVDQREVNSKIYYIKYPIDGSSEFITIATTRPETMLGDTAIAVNPKDDRFKSFVGKTVTIPIVGRKIKIIEDDYADPEQGTGALKITPAHDFNDYDVGQRNNLEIINIFTEEGKVNENAPEHYKGLDRFEARKRILKELKEKEFFCKRRKY

SEQ ID NO: 192101 - protein, 874 aa, Unknown
  Bacterial polypetide isolated from the Sargasso Sea
MPIPSKYEHIEIEKKWYSYWMENNLFKSIPNDKEPFTIVIPPPNVTGLLHMGHMLNNTIQDILVRRARMLGKNACWVPGTDHASIATEAKVVENLKEKGINKLDISRDEFLKYAWDWTEKYGGGILEQLKMLGCSCDWDRTKFTLDDEMYESVLIAFKILHDKGLIYRGYRMINWDPEAKTTVSDEEVNYVEEQSNLYYLKYKIVDSDQEMIIATTRPETIFGDTAVCVNPKDKRYKSLIGKQAIVPICDRKVPIIADPYVDVEFGTGCLKVTPAHDMNDYSLGKKHSLATIDIFDTNANLNKHGLHYEGKNRFVVRNEIEDELIKNKLLIKKENYVHNVGRSERTNSVIEPKVSKQWFLKMDEISKPAIINVLENESIKFFPNKFKSTYKYWLENIKDWNISRQLSWGHQIPVFYYGNNDEYIVANSKEEALKKANEDLKLNLKDSDLSQDQDVLDTWFSSWLWPISVFDGIRNPDNDEIKYYYPTQDLVTGPDIIFFWVARMIISGYEFRDEKPFSNVYFTGIVRDKLRRKMSKQLGNSPDAIKLIEQYGADSVRVGLMLSSAAGNDLLFDESLCQQGKNFTNKLWNASRLVDGWDIDLQIKQPKVNELAINWYRNKFNNTLESIDSNFESYRISDVLMSSYKLIWDDFCSWLLEILKPEYGKKIDQKSKSDLIELFIKNLKIIHPFMPFLSEEIYHNLEGKVSKPITISSWPNKGEYDIQLINNFEITKEIISQIRNYRKEKNIPFKTPIKLYCIPSNKPIGNIDVIKKIGFVEDIIESEKADFALVKSFIIKNYEFFIPLDEGFDKDSEIKKLNKELEYNIGFLKSVDSKLKNKNFISNAPKEIIDKEKQKIIDTEQKIKSIKKSISELS

SEQ ID NO: 192102 - protein, 308 aa, Unknown
  Bacterial polypetide isolated from the Sargasso Sea
MFYGQPGMDHAGIATQMVVERNLLKEGILRTDLGRDKFVKKIWEWKEESGGMITKQLRSLGATPDWRRERFTLDEGLSKAVRKVFVQLYNEGLIYKDNRLVNWDPKLLTAISDLEVENKSEKSKMWYIKYSTKDKKNSVIVATTRPETILGDTAVAVHPLDKRYSDLVGKTLILPLVNREIPVIADEYSDPDKGSGAVKITPGHDFNDFEVGRRHNLEIINIFDENACIVDKKFAENYIGLDRFEARKKVIEDLEKEKLIVKIEEVENVLPYGDRSGVIIEPWLMEQWYVNAKELAKPTIQAVEEGKM

SEQ ID NO: 192103 - protein, 497 aa, Unknown
  Bacterial polypetide isolated from the Sargasso Sea
WDPSLKTAVSDLEVVRQEKKGLIWHIKYHIDDTDEFITVATTRPETMFGDMAIAVNPKDTRYKSLIGKYALLPFVDRKLPIIGDEYVDMEFGTGCLKITPGHDFNDYEIGKKYSLYEEDNIVLTSKNIDDFKPINIFNDEAWTNENVPELFRNLDRFKVRKLVLSELAKLELLVKEEEYDVSVPRGERSNIVIEPRLSNQWYVKTSDMAKKANKEVENGNIKFHPENWVKTYFNWMDNIEDWCISRQIWWGHRIPAWYDQEGNIYVGENEKNIREHYKLNDIELHQDEDVLDTWFSSSLWPFGSLGWPENTEDFDNFFPTSLLVTGFDIIFFWVARMMMMSLEFTGKIPFKDVYVTGLIRDENGQKMSKSKGNIIDPIDLIYGISLEDLVKKRTTNLMQEGISEKIEKKTRKQFPNGIDSYGTDALRMTFFSLATHTKDISFEFGRLKGFRNFCTKIWNAARFIDGYPKERDSFIEENDNDKWIYEEFLKSTNQINK

SEQ ID NO: 192104 - protein, 387 aa, Unknown
  Bacterial polypetide isolated from the Sargasso Sea
MSGNNYNHSEVEDKIYSYWEKNRLFQPKKNKKKFSIVIPPPNVTGNLHMGHALNNSIQDLLTRFHRMNNYETLWQPGTDHAGIATQALVEKKLEKEGHSKHDLGREKFINQVWEWKNQYGDIIINQLKKLGCSCDWSRNAFTMDENLSKSVIKVFVDLYKKGLIYKSKKLVNWDTVLKTAISDLEVDQREVNSKLYYIKYPIENSENFITIATTRPETMLGDTAVAVNPKDKRYKNLVSKNVILPIVEKKIKIISDDYADPEQGTGAVKITPAHDFNDYEVGIRNKLEIINIFTEDGKININAPKEYIGLDRFEARKKIISELKNKNLFVKDEDIKNKVPYGDRSNSIIEPYLTEQWFADAKKLSNKAKKIVRSKKTKFFPTNWSKT

SEQ ID NO: 192105 - protein, 366 aa, Unknown
  Bacterial polypetide isolated from the Sargasso Sea
MTFEKYFDFIKDEKSIYSNWENSDCFKPIKNNESYSIMMPPPNVTGSLHMGHALTFTIQDILIRYHRMKNKEVLWQAGTDHAGIATQMVVEKKLSEQHIKRTDLTRDEFIEKVWEWKKESGDKINNQLRRLGASADWSRERFTMDEGLSEAVKKVFVDLYNDGIIYKDKRLVNWDPKLLTAISDLEVEQREVEGTLWHIKYTIDNENHIVVATTRPETMLGDAAVAVHPDDSRYKNMIGKFCILPIVEKKIPIIADEYADPEKGSGAVKITPAHDFNDFEVGKKHDLEFINIFDENAKINFNAPKEFQNLDRFEARKKILIELRNQNHLIKEEKQLMVIPYGDRSGVIIEPWLTDQWFCNAKKMSI

SEQ ID NO: 192106 - protein, 655 aa, Unknown
  Bacterial polypetide isolated from the Sargasso Sea
GDTAIAVNPKDDRFKDIVGKLVTIPLANRKIKVITDDYADPEQGTGAVKITPAHDFNDYDVGIRNKLEVINIFTPDGKINDNAPDPYKGLDRFAARKLILEHLEEGKFLEKIEKLVNKVPYGDRSNSIIEPYLTEQWFVDAKTLAIKAKEVVNNGKTKFFPENWSKTYFQWMNNIEPWCISRQLWWGHQIPAWYGPDGKIFVAENEDECKNQAKEFYSKDVELKRDEDVLDTWFSSGLWPFATLGWPEKTPEVEKFYPTSVLVTGFDIIFFWVARMIMMGTQFLDKEPFKNIYVHALVRDEKGQKMSKSKGNVIDPLELIEKYSADALRFTLLSMASPGRDVKLSEDRVKGYRNFLNKIWNANNFLTQNKCDFSDVKKPENIKLTINKWILSELVKVKNDTENSLKNYRFDEAAKIIYQFVWHSFCDWYLELSKTVLNSENEDDIQELRQTSAYVFKEILIILHPFIPFVTEEIWLNNKLDKEGKDYLMHANWLEDDYHEKKSYDEINNIINFITSIRSFKNELNISPGSFIEISTENTNKEYKNFLSSNENIMKKNGRIKNFHEKDLDKPSASIVISGELFKLYFDEDVDLNMIKSTLEKKISKISEEMKKIDVRLSNKSFVDRAPQNIVEQEKSNFANLEKDVKKIELTLKGL

SEQ ID NO: 192107 - protein, 436 aa, Unknown
  Bacterial polypetide isolated from the Sargasso Sea
INIFNQDAWTNNNVPKLFENLDRFKVRKLVIKELTELKLLEKEEEYDVSIPRGERSNIVIEPRLSHQWYVKTSEMAEKANMQVKKGNIKFHPNNWIKTYFNWMDNIEDWCISRQIWWGHRIPAWYDDNGNIYVGENEQDVRNYYKLDAIDLKQDEDVLDTWFSSSLWPFGSLGWPEKTDDFKSFFPTSLLVTGFDIIFFWVARMIMMSIEFTGKIPFKDVYVTGLIRDENGQKMSKSKGNIIDPIDLIYGISIEDLVEKRTSNLMQEGIAEKIERKTRKQFPNGIESYGTDALRMTFYSLATHTKDISFEFGRLKGFRNFCTKMWNAARFIDGYPNEKDKFKAENDHDKWIYDEFSKAKKQINKNISDYRLDFAVNEIYEFFWNKFCDVYIEQCKKSGETSNLRPLLKEILQLVHPFAPFITEEINTILFDERIIT

SEQ ID NO: 192108 - protein, 396 aa, Unknown
  Bacterial polypetide isolated from the Sargasso Sea
VSQLKRIGYSVDWTRERFTLDQKLNEAVIEAFNILYKKNLIYRGEYLVNWCPESQSAVSDLEVEMQEVNGHLWHFKYPLISESGEYLDKYLEVATTRPETLLGDTAVAVNPDDDRYKEFIGLKVKVPFVDREIPIIADSHVDKDFGTGCVKVTPAHDPNDFAIGKRHNLKQINVMNKDGTLNINAGIFQNLDRYDARKKIIKELDNLGLLTKIEDYKHTVPFSDRGKVPIEPLLSTQWFLKMDDISQGCLNEIDSKKPSFIPPRWEKVYKDWLENINDWCISRQLWWGHQIPAWYVLDESQDSIEQNTPYIVARNEEDALIEANKKFGLNIKLVRDKDVLDTWFSSGLWPFSTLGWPNINNPDFKKWYPNSVLVTGFDIILFWVARMTMMGNTFTK

SEQ ID NO: 192109 - protein, 510 aa, Unknown
  Bacterial polypetide isolated from the Sargasso Sea
VKEENIKNKVPYGDRSNSIIEPYLTEQWFADAKKLSIKAKKIVKTKKTKFYPVNWSKTYFQWMNNIEPWCISRQLWWGHQIPVWYGPDKKIFVAKTEKEAKQNAKKFYKKDVKLYRDPDVLDTWFSSGLWAFATLGWPAKNDYIKKFYPTSVLVTGFDIIFFWVARMIMFGMEFLNKEPFKDIYVHALVRDEKGQKMSKSKGNVIDPLELIEKYSADALRFTLLSMASPGRDVKLSEDRVKGYRNFLNKLWNANNFLIQNKCSFKNAHKKPKISININKWIYAELIETKEKIEKSIKDYRFDEAARYSYQFVWHSYCDWYLELTKTILYSNDTKSIKEIREVSSYIFREILILMHPFIPFVTEEIWLKNKLDNSKKNYLMLTNWVLGKSKKDKDFKEVEKIINIISQIRSFKNELNVSPGSFVDISLSKINDKNKVFFKHNDVVLKKLGRINSFLDKDQNKPSATFVASGDIFKVYFEESVDLKVIKENLLNKQEKYQNEIEKINSRLNN

SEQ ID NO: 192110 - protein, 442 aa, Unknown
  Bacterial polypetide isolated from the Sargasso Sea
MVVERRLNADGKSKNDIGREAFEKEVWNWKKYSGNKITSQLRRLGSSLDWSTERFTLDDDYHHAVLSAFIKLFEEGLIYQGKRLVNWDPALETSLSDLEVVNKDLTIKIWEIKYQLEGTDEFVTVATTRPETLMGDMALAVNPDDKRFAHLVGKNAEIPLCNRAIPIVADDYVDSEFGTGVVKITPGHDFNDYELGKRHGLHMNDSLQCYTGDENAFSPISILNKAVEVMGVAPEKFHGMDRFEARKVILQDLEKEKLLMSEKEYESTLPYGDRSDQILEPLLTDQWYVDAKTLAKPAIEAVKSKEIQFVPANWEKTYFQWMDNIQDWCISRQLWWGHRIPIWFDESNTPYAGFSEADVRKKHGLKGELRQEDDVLDTWFSSSLWTFATMGWPEKNKKLNLFHPTTTLVTGFDIIFFWVARMIMMTKYFMKEVPFKEVYITG

SEQ ID NO: 192111 - protein, 955 aa, Unknown
  Bacterial polypetide isolated from the Sargasso Sea
MSDNTLAKSFEPHTIESQWGPEWEKRGYAAPAFDPARPDFSIQLPPPNVTGTLHMGHAFNQTIMDGLTRYHRMLGENTLWVPGTDHAGIATQIVVERQLDAQGVSRHDLGREKFVERVWEWKEKSGSTITGQVRRLGASPDWSREYFTMDDKMSAAVRDVFVTLFEQGLIYRGKRLVNWDPVLLTAVSDLEVVSEEENGHLWHIRYPLVDGSGSLTVATTRPETMLGDVALMVHPEDERYAHLIGKLVTLPLTGREIPVIADDYVDREFGTGVVKVTPAHDFNDYQVGQRHKLAPIEILTLDAKINDNGPEQYRGLDRFDARKAIVADLDAEGFLDSVKPHKLMVPRGDRTGVVIEPMLTDQWFVAMTKPAPEGTFNPGKSITETSLDVVRSGQIKFVPENWTTTYYQWLENIQDWCISRQLWWGHQIPAWYGENGEVFVARNEEEARAQAAAKGYTGALKRDEDVLDTWFSSALVPFSSLGWPNETPELKHFLPSSVLVTGFDIIFFWVARMVMMTTHFTGKVPFHTVYVHGLVRDAEGQKMSKSKGNTLDPIDIVDGIDLDTLVAKRTTGLMNPKQAATIEKKTRKEFPDGIAAFGTDALRFTMASMATLGRNVNFDLARCEGYRNFCNKLWNATRFVLMNCEGHDCGSDKPEVCGAGDCGPGGYLDFSAADRWIVSLLQRTEADIAKGFADYRFDNIASSIYKFVWDEYCDWYLELAKVQIQNGTPEQQRATRRTLLRVLETVLRLAHPIIPFITEALWQKVAPLAGRYPQGKAEGEASLMTQAYPIANLQKIDEVSEQWAADLKAIVDACRNLRGEMNLSPATKVPLLAAGDAERLRSFAPYVQALARLSEVQILADEATLDKEAHGAPIAIVGPNKLVLKVEIDVAAERERLSKEITRLTNEITKCNAKLGNEAFVAKAPPAVVEQEQKRVAEFQSTLEKLRAQLDRLPA

SEQ ID NO: 192112 - protein, 418 aa, Unknown
  Bacterial polypetide isolated from the Sargasso Sea
PAWYGPDEKYFIEYSEDIARNVAKKFYGKDVPLKRDQDVLDTWFSSALWPFSTLGWPENTEEMKIHYPTSTLVTGFDIIFFWVARMMMMGIHFLNTPPFKDVYVHALVRDEDGKKMSKSKGNVIDPLELIDQFGADALRFCLSSMAAQGRDVKLSISRVEGYRNFATKLWNSVRFCELNSSFLDTNFDPKKCKNVINKWIIHKANITIKDVSKSIDDYKFNEASNILYSFIWHIFCDWYIELIKPSLYEPESKDNLESRNCSAWVLKIILHLLHPFMPFVTEELWEKFSGNSIKDLNKKLIVSKWPNAFNSKDYIYANEEVNWLIEIVTQIRSVRSELNISQNIEIEAYFYSKDNKINNFFNNSKLSIERLSKLSKISKIENENENGVKIIIKQGLIFLLISNSIDIDQEIERIKKVI

SEQ ID NO: 192113 - protein, 442 aa, Unknown
  Bacterial polypetide isolated from the Sargasso Sea
MLNKSYDPKEAEARLYNYWETEGFFKCGLTSSQSFSIVIPPPNVTGSLHMGHALNNTLQDIIVRYKRMLGEDVLWQTGTDHAGIATQMVVERKLETEKKPSRVELGREKFIDEVWKWKEESGNSITHQLRRLGASCDWSRERFTMDEGLSLAVNKVFVDLYNDGLIYKDKRLVNWDPQLKTAISDLEVIQKEIDGFLWYINYPIKDSEESITIATTRPETMFGDTAIAVHPDDKRYANLIGKEVIIPIVGRSISIIADNYADPEQGSGAVKITPAHDFNDFEVGKRNNLEMLSILDINGKLNENVKTEWQGLDRFEARSKLLKLLTDEGYLEKEESYSNSVPHGDRSDVVIEPFLTEQWYVNAEKLAQPALESVKNGDMKFIPSNWSKTYFEWLENIQPWCISRQLWWGHRIPAWYTKDDNIIVANNEKDAYEIAKKKLAKI

SEQ ID NO: 192114 - protein, 421 aa, Unknown
  Bacterial polypetide isolated from the Sargasso Sea
MSSDKYIHSDVENRIYSYWEKNGLFKPKENSKKFSIVIPPPNVTGSLHMGHALNNSIQDLLVRYHRMNNFETLWQPGTDHAGIATQALVEKKLISEKIDKNEIGREKFIEKVWEWKDQYGDIIINQLKKLGCSCDWSRNAFTMDENLSKSVIKVFVDLYKKGLIYKDKKLVNWDTVLKTAISDLEVDQREVNSKIYYIKYPIDGTDEFITIATTRPETMLGDTAIAVNPKDERFKSFVGKTVTIPIVGRKIKIIEDDYADPEQGTGALKITPAHDFNDYDVGQRNNLEIINIFTEAGKINDNAPKEYVGLDRFEARKRILKELKDKEFFVKEENIKNKVPYGDRSNSIIEPFLTEQWFADAGKLSVKAKEVVNSNKTNFFPENWSKTYFSWMDNIEPWCISRQLWWGHQIPAWYGPDEKNF

SEQ ID NO: 192115 - protein, 429 aa, Unknown
  Bacterial polypetide isolated from the Sargasso Sea
GPLNINAGIFQNLDRYEARKKIIKELDNLGLLTKIEDYKHTVPFSDRGKVPIEPLLSTQWFLKMDDISKGCLNEIDSKKPSFIPPRWEKVYKDWLKNINDWCISRQLWWGHQIPAWYVLDESQDSIEQNTPYIVARNEEDALIEANKKFGLNIKLVRDKDVLDTWFSSGLWPFSTLGWPNTNDPDFKKWYPNSVLVTGFDIIFFWVARMTMMGNTFTNNIPFKDVYIHGLVRDENNKKMSKSSGNGIDPILLIDKYGSDALRFALIREVAGAGQDIRLDFDRKKDTSSTVEASRNFANKLWNATKFVLINKTSNNNYLLNESDETSLELCDKWILSKLNQVNIKVAALLKEYKLGESAKLLYEFTWNDFCDWYVEFAKQRFNNKETNNRQISEKVLIKVLNDILVMIHPFMPHITEELWHVLQIKPDNA

SEQ ID NO: 192116 - protein, 360 aa, Unknown
  Bacterial polypetide isolated from the Sargasso Sea
MKLLDKKHNPSDIENKWYKHWLEKQYFSSQESDNHYTIVIPPPNVTGKLHMGHVLNNTIQDILIRKARMQGKNACWIPGTDHASIATESKVTKMLEEKGINKKDLTREEFLKHAWEWKEEYGGTIINQLQKLGCSCDWDKTSFTMDEDYSKAVLESFVQLYNKGLIYKGSKLVNWCPKSQTALSDEEVMFKEVNGNLWYIKYAINESDAFIEIATTRPETMLGDTAIAVNPSDKRYKDLIGKTALLPLVGRSIPIIADDMVDPEFGTGCVKITPAHDLNDYEVGIKHNLEMINIMNADSSISDKAPEKYRGMSREKARKQIVSDLKDANHLIKEEDYFIRLDIQKEEMYQLNIIYQNNGF

SEQ ID NO: 192117 - protein, 482 aa, Unknown
  Bacterial polypetide isolated from the Sargasso Sea
MEKTYNPKEIEARIYESWEDSGYFSPSKSGEPFCIVIPPPNVTGTLHMGHAFQDTIMDIIIRYQRMNGKNTLWQVGTDHAGIATQMVVERQLEKSGTSRQELGRESFEKEVWKWKEESGSTITKQMKRLGASTDWTKEKFTMDENLVRGVTKVFIQLYEEGLIYRGKRLINWDPVLQTALSDLEVSTTEEKGSLWHMKYPISDSEDHIVVATTRPETMLGDTAVAVHPDDKRYKDLIGREVILPLTDRKIPIIADEYVDQEFGTGCVKITPAHDFNDFEIGKRHDLEIISILDQSAKISPSAPSEYQGLDRFEARKKIVEDLEANGLMQEIEDYMLTIPRGDRSGAILEPLITNQWFLKMEPLAQPAIEAVKNDEIKFIPENWSKTYYEWLENIQDWCISRQLWWGHRIPAWYDNEGNVYVGESENEIRKQHNIEDSIALIQDDDVLDTWFSSALWPFSSLGWPDETYDLKTFYPTNVASHW

SEQ ID NO: 192118 - protein, 430 aa, Unknown
  Bacterial polypetide isolated from the Sargasso Sea
AKKLSIKAKKIVKNKKTNFFPTNWSKTYFQWMNNIEPWCISRQLWWGHQIPAWYGPDKKIFVELNEDDAKKSARKFYKKDVKLIRDPDVLDTWFSSGLWPFATLGWPNKNEYLKKFYPTTVLVTGFDIIFFWVARMMMFGMEFLNKEPFKDIYVHALVRDEKGQKMSKSKGNVIDPLDLIKKYSADALRFTLLSMASPGTDVKLSEDRVKGYRNFLNKLWNANNFLIQNKCSLKNSKKLPKLNVNINKWIYFELLETSKLIKKNIEDYRFDEAAKNAYHFAWHKYCDWYLELSKTILFSDNLKAKNEVKEVSAFVFRQIIIMLHPFIPFVTEKIWLTNKFDNKNKNFLMLSNWISAKSKKDSDHKHVQQIIDIISEIRSFKNELNVSPGSFIDVSINSIKKNSQNFMTDNEIIIKKLGRINNFFKKIKIS

SEQ ID NO: 192119 - protein, 408 aa, Unknown
  Bacterial polypetide isolated from the Sargasso Sea
FIKAKKIVKNKNTNFFPSNWSKTYFQWMNNIEPWCISRQLWWGHQIPAWYGPDRKIFVAENQKKAEQQAKKFYKNNVNLKRDPDVLDTWFSSGLWPFATLGWPSKNYFLKKFYPTSVLVTGFDIIFFWVARMMMLGMQFLNKEPFREVYVHALVRDEKGQKMSKSKGNVIDPLALIDSYSADALRFTLLSMASPGRDVKLSEQRVKGYRNFLTKIWNVNNFLKVNKCSFDGIIKPKNLKLNINKWIYNELIKTKNLTENSIKNYRFDEAAKTVYKFVWNSYCDWYLELSKTILSSKTNKDIKEVRNTSGQIFKEILILLHPFIPFITEELWLKNKLKTKSTKYLMHANWINDKKFKKDKNIENVNEIIDLISNIRSFKNELNVSPGSFGDISIEKLTKETKIFLQIEL

SEQ ID NO: 192120 - protein, 631 aa, Unknown
  Bacterial polypetide isolated from the Sargasso Sea
MDKQYHPVEIEEKWSKVWSERVISNKDSDTPFSQVIPPPNVTGTLHMGHSFQYAIMDFYTRYHHMSGKDAHWQVGADHAGIATQMVVENNLAKKDVNRLELGREKFLDEVWSWKNYSEKRIASQIKRLGCSVDWSKYRFTLDDGCNEAVIKAFVELHRKNKIYRGYRLVNWDPSLKTAVSDLEVIRQEKDGLLWHIKYPIENSKDFVIVATTRPETMFGDMAIAVNPNDDRYKNLTGKNVVLPFVGRKIPILADEYVDMEFGTGCLKITPGHDFNDYEIGKKYSLHEEDGEVKTSDSASDFEPINIFNEDAWSNENVPEPFSNLDRFKVRKVVLEKLKELNLIEKEEKHHISVPRGERSNIVIEPRLSHQWYVKTDEMAARANNAVNKGEIRFHPNNWVKTYFNWMNNIEDWCISRQIWWGHRIPAWYDSDNNVYVGYSEKEVRQFYKLDDRKLSQDEDVLDTWFSSSLWPFASLGWPEKTKDYKKHFPTSLLVTGFDIIFFWVARMMMMSLEFTDQIPFKDVYVTGLIRDENGQKMSKSKGNIIDPLDLIYGISQDDLVTKRTSNLMQEGIAQKIERKTRNQFPQGIDSYGTDALRMTFFSLATHTKDISFEIGRLKGYRNFCNKVGMQL

SEQ ID NO: 192121 - protein, 519 aa, Unknown
  Bacterial polypetide isolated from the Sargasso Sea
QLQLILKMKDTKISLGKKVELPFVKRKIPIIGDDYVDKEFGTGCLKITPGHDFNDYEIGKKYCLHCVDNEVYISDDIEDFEPLNIFTDEAHSNDNVPSPFKNLDRFKVRKLVLEEIKKLDLFVKEEPHEISVPRGERSNIVIEPKLSYQWYVKTKDMANKANKAVENGEIKFHPENWIKTYFNWMNNIEDWCISRQIWWGHRIPAWYDDHGNVYVGYSEDEVRTHYSLDNRSLRQDDDVLDTWFSSSLWPFASMGWPNESKNLKTFFPTNLLVTGFDIIFFWVARMIMMSIEFTGKIPFKDVYVTGLIRDENGQKMSKSKGNIIDPIDLIYGISLEDLLEKRTSNLMQEGLAEKIARKTKKQFPNGIESYGTDALRMTFYSIATNAKDISFEIGRLKGFRNFCTKMWNAARFINGYENKGNNFEAESESDKWILKEFEQLKADVEDNVNHYRLDLAINHVYEFFWNKFCDVYIEECKKTEKTDNLHPLLKEILIFIHPFAPFITEEIHSIIFKAPLIDR

SEQ ID NO: 192122 - protein, 437 aa, Unknown
  Bacterial polypetide isolated from the Sargasso Sea
MSQTKYDPSKIESKWYSAWEKNKVFSPSGKGESYCIMIPPPNVTGTLHMGHAFQVTLMDILCRYKRMCGFNTLWQAGTDHAGIATQMVVERKLTAQGLSRNDLGREKFIDQVWEWKDQSGNIITKQLRRMGASLDWDSERFTLDEGLSRAVRKVFIDLYNKNLIYKGKKLVNWDPVLQTALSDLEVIQNEEDGKIWTINYKIEDENNFLSIATTRPETLLGDTGVAVNPNDERYKKYIGKNIIVPLVGRKVKIIGDDYVDSEFGTGCLKITPAHDFNDFELAKRHNLEVINIFDSSARVLNTFDNYSNLDRYEARKKILKDLDELKVLIEEKDHKMVIPRGDRSHAVIEPYMTDQWYVKTKEIAEKAMEAVKESDIKFVPKNWEKTYFEWMNNIEDWCISRQLWWGHRIPAWYDAENNIYVGNSEEEIRDKFQIRDE

SEQ ID NO: 192123 - protein, 608 aa, Unknown
  Bacterial polypetide isolated from the Sargasso Sea
MGHALNNSIQDLLVRYHRMNNYETLWQPGTDHAGIATQALVEKKLSAEKIDKNEIGREKFIKKVWEWKDQYGDIIINQLKKLGCSCDWSRNAFTMDENLSKSVIKVFVDLYNKGLIYKDKKLVNWDTVLKTAISDLEVDQREVNSKIYHIKYPIDGTDEFITIATTRPETMLGDTAIAVNPKDDRFKSYVGKTVTIPIVGRKIKIIEDDYADPEQGTGALKITPAHDFNDYDVGQRNNLEIINIFTEAGKINDNAPKEYIGLDRFEARKRILKELKDKEFFDKEENIKNKVPYGDRSNSIIEPFLTEQWFADAGKLSVKAKEVVNSKKTNFFPENWSKTYFQWMNNIEPWCISRQLWWGHQIPAWYGPDNKIFVAYDEDEAKQLANKHYGKDVELNRDPDVLDTWFSSGLWPFATLGWPNDKKFVDKFYPTSVLVTGFDIIFFWVARMIMFGTEFLNKEPFKDIYVHALVRDEKGQKMSKSKGNVIDPLDLIEKYSADALRFTLLSMASPGTDVKLSEDRVKGYRNFLNKLWNANNFLITNECDFKNTDQIPELKVNINKWIYSELAETTNKIIKNLEDYRFDEAAKNAYQFTWHSYCDWYLELSKTI

SEQ ID NO: 192124 - protein, 529 aa, Unknown
  Bacterial polypetide isolated from the Sargasso Sea
MLEKYYQPSLVEDKIYKTWENDGDFKPLKSSSDAYCIVIPPPNVTGTLHMGHALNNTLQDILVRFYRMQGKSVLWQPGTDHAGIATEMVVERELKKRDINKKDLSREQFIEHVWEWKNQSGNEIINQLKRLGCSCDWSRERFTLDEGLSKAVRFVFVKLYNDKLIYKDKRLSNWDPKLKTTISDLEVIQKEVKGSLWYIDYKLENDDKVITIATTRPETMLGDTAIAVHPEDERYREFVGKYAYIPIINKKIIIIADEYVKVDQGSGAVKITPAHDFNDYEIGKRHNLEVINIFNENAELNENCPIEYQNLDRFKAREKIVNELETIGALNKVEENIHTVPYGDRSGEVVEPWLTDQWFVNAKKLSLNAIDKVKTKETIFVPQNWEKTYFDWMENIQPWCISRQLIWGHQIPAWYGPDGEIFVAENSDDAHKIARERYKKDVKLVQDEDVLDTWFSSALWPFSTLGWPDETPEFEKFYPTSTLVTGFDIIFFWVARMMMMGLYFTNKVPFSEVYVHALVRDEKGQKMSK

SEQ ID NO: 192125 - protein, 888 aa, Unknown
  Bacterial polypetide isolated from the Sargasso Sea
AFSPNPEDDGEPFCVVIPPPNVTGSLHMGHAFNTALIDVVVRFQRLLGKNVLCLPGTDHASIAVQTILEKQLKSEGKTSEDIGRDEFLKRAWNWKEQSGGRIVSQLKRIGYSVDWTRERFTLDQKLNEAVIEAFNILYKKNLIYRGEYLVNWCPESQSAVSDLEVEMQEVNGHLWHFKYPLISESGEYLDKYLEVATTRPETLLGDTAVAVNPDDDRYKEFIGLKVKVPFVDREIPIIADSHVDKDFGTGCVKVTPAHDPNDFAIGKRHNLKQINVMNKDGTLNINAGIFQNLDRYEARKKIIKELDNLGLLTKIEDYKHTVPFSDRGKVPIEPLLSTQWFLKMDDISQGCLNEIDSKKPSFIPPRWEKVYKDWLENINDWCISRQLWWGHQIPAWYVLDESQDSIEQNTPYIVARNEEDALIEANKKFGLNIKLVRDKDVLDTWFSSGLWPFSTLGWPNTNDPDFKKWYPNSVLVTGFDIIFFWVARMTMMGNTFTNNIPFKDVYIHGLVRDENNKKMSKSSGNGIDPILLIDRYGSDALRFALIREVAGAGQDIRLDFDRKKDTSSTVEASRNFANKLWNATKFVLINKTSNNNYSLNESDETSLELCDKWILSKLNQVNIKVAALLTEYKLGESAKLLYEFTWNDFCDWYVEFAKQRFNNKETKNRQISEKVLIKVLNDILVMIHPFMPHITEELWHVLQLKPDNALLSLQKWPIHENKFVDNKLDNSFQQLFEIIRLIRNLRAELGLKPSEKSPVYLISDNDELIDFLKTLVDDIQTLTKSSEVFIFKTNAVDKKEFAKSFSGIISDLEVYLPFQDFVNIDALKERLTKDLKKVNIELENLNKRLSNNNFVDKAPKDIVDECRFKLNEGSVQKERITKKLELLN

SEQ ID NO: 192126 - protein, 294 aa, Unknown
  Bacterial polypetide isolated from the Sargasso Sea
MTEMNDQLSLENYSPFEVEKKWQEKWESLKAFSPNPEDDGEPFCVVIPPPNVTGSLHMGHAFNTALIDVVVRFQRLLGKNVLCLPGTDHASIAVQTILEKQLKSEGKTSEDIGRDEFLKRAWNWKEQSGGRIVSQLKRIGYSVDWTRERFTLDQKLNEAVIEAFNILYKKNLIYRGEYLVNWCPESQSAVSDLEVEMQEVNGHLWHFKYPLISESGEQLDNYLEVATTRPETLLGDTAVAVNPDDDRYKEFIGVKVKVPFCDREIPIIAESHGDKDFGTGCVKVLQHMIQMRFA

SEQ ID NO: 192127 - protein, 663 aa, Unknown
  Bacterial polypetide isolated from the Sargasso Sea
MEVTNTDKNGHLYYIKYKLEDSDENLIVATTRPETLFGDSAICVNPEDNRYKRFIGKKAIIPILNKSIPVISDDSIDQDFGTGCVKITPAHDFNDYKLGKKHNLDFINILNKDGTFNKNVSDIFKDKNIHQSRSRVVDQLKETGSLDKIKDYKTTVPMGERSGEIIEPLLTDQWFMKMDDLAQLGIDAVKKSNIKFVPKNWEKIYFNWLNNIEDWCISRQIWWGHRIPAWYDDNGNVYVGDNEQEIRNKNNINEDINLTQDQDVLDTWFSSSLWPFTTMGWPENTKELEKYYPTSVLVTGFDIIFFWVARMVMMGIKFLDKVPFKTIYIHGLVRDSEGKKMSKSLGNVIDPIDIIDGIELDALIDKRVSNLVQPKLKDKIARKTKDEFPNGIDPYGADALRFCFCALASTGRDINFDLKRIEGYRNFCNKLWNASRYVFISTKDCLYDNKINFERLTVYEKFIIVKLDQLVTEYKKHCTSYRFDLMANSLYSFIWNEYCDWYLEIAKIEIEHDNHYTKNVLIYVLQIILKLCHPITPYITEEIWKEMIKLKYTNDLILMNAKFPSQQKIFKDDNINNEVLLLKKIINMIRKMRSDLNVHPKIKIDIYCRFEEGLYDHFMENNSKIITSLIKSNGLYINNGSYDITECIVVTVDEMKLYVPIKR

SEQ ID NO: 192128 - protein, 403 aa, Unknown
  Bacterial polypetide isolated from the Sargasso Sea
MDKKPYDPSDIEQKLYKAWENSGLFAPGDNPEAFSLAIPPPNVTGTLHMGHGFQNAIMDCLIRYYRMSGKNTLWQVGTDHAGIATEMVVERRLNAEGKTKSDIGREAFEEEVWNWKKVSGNKITSQLRRLGSSLDWGSERFTLDEEYQHAVLSAFIQLFEEGLIYQGKRLVNWDPVLETSLSDLEVVNKDLTIKIWEIKYQLEATDKFVTVATTRPETLLGDMALAVNPSDKRFSHLIGKKASLPLCNRLIPIVADSYVDPEFGTGVVKITPGHDFNDYDLGKRHGLHMDEDFQCHSGAEDDFVPISIFNKTVAIIGVAPKKFHGMDRFEARKVILEDLKKEKLLMSEKEYESTLPYGDRSDQILEPLLTDQWYVDAKTLAKPAIDAVKSGEIQFVPANGKKL

SEQ ID NO: 192129 - protein, 282 aa, Unknown
  Bacterial polypetide isolated from the Sargasso Sea
MSVEKYNHSEVEKRIYSYWERNSLFKPKENNKKFSIVIPPPNVTGSLHMGHALNNSIQDLLIRYHRMNNYETLWQPGTDHAGIATQALVEKKLASDNINKSELGRDKFIKKVWEWKNEYGDIIINQLKKLGCSCDWSRNAFTMDKNLSESVIKVFVELYNKKLIYKSKKLVNWDTVLKTAISDLEVDQREVNSKLYYINYPIEHTSEFITIATTRPETMLGDTAVAVNPKDKRYKNFVGKNVILPLVGRKIQIVADNYADPDQGTGAVKITPAHDFNDYEVG

SEQ ID NO: 192130 - protein, 446 aa, Unknown
  Bacterial polypetide isolated from the Sargasso Sea
MLEKYYQPSLVEDKIYKTWENDGDFKPLESSSDAYSIVIPPPNVTGTLHMGHALNNTLQDILVRFYRMHGKSVLWQPGTDHAGIATEMVVERELKKRDINKKDLSREQFIEHVWEWKNQSGNEIINQLKRLGCSCDWSRERFTLDEGLSKAVRFVFVKLYNDKLIYKDKRLSNWDPKLKTTISDLEVIQKEVKGSLWYIDYKLENEDKVITIATTRPETMLGDTAIAVHPEDERFKDFVGKYAYIPIINKKIIIIADEYVKVDQGSGAVKITPAHDFNDYEIGKRHNLEVINIFNENAELNENCPTEYQNLDRFKAREKIVNKLEIIGALNKVEENIHTVPYGDRSGEVVEPWLTDQWFVNAKKLSLNAIDKVKTKETIFIPQNWEKTYFDWMENIQPWCISRQLLWGHQIPAWYGPDGEIFVAENSDDAHKIARERYKKDVKLVQ

SEQ ID NO: 192131 - protein, 377 aa, Unknown
  Bacterial polypetide isolated from the Sargasso Sea
MEFKKYDHFKEEKIINDYWIKNKCFEPKKSKSNKKFSVVIPPPNVTGRLHMGHALNNSLQDVLVRFKRMNGFETLWQPGTDHAGIATQAVVEKNLEKEKVNKKKLGRDDFIKRVWEWKEESGGIILDQLKKLGCSCDWSRTRFTMDKDLSKAVIKVFVDLYNNKLIYKDKKLVNWDTKLQTAISDLEVIQKDVQSQLYYIDYNIESTSDKITIATTRPETMMGDTAIAVNPKDERYKSLIGMNVLIPLVNRTIKIIADNYANPEQGSGAVKITPAHDFNDYEVGKRNNLKIINVLEKNGSINKNGIKEFIGLDRFEARKLLVKKLKEEGYLAKIENIKNKVPYGDRSNSIIEPLLTEQWFVDAKKLAKKPIQIVKDG

SEQ ID NO: 192132 - protein, 334 aa, Unknown
  Bacterial polypetide isolated from the Sargasso Sea
MNTDKYIHSQVENKIYEYWEKNKLFRPQKNSKKFSIVIPPPNVTGSLHMGHALNNSIQDFLVRYYRMNNYETLWQPGTDHAGIATQALVERKLEKENLNKNTLGREKFIEKVWEWKNEYGDIIINQLKKLGCSCDWSRNAFTMDENLSKSVIKVFVELHKKGLIYKAEKLVNWDTVLKTAISDLEVDQREMNSKIYYIRYPIENSSQFITIATTRPETMLGDTAIAVNPKDKRYKEYVGKSVTIPIVSRKIKIIKDNYADPEQGTGALKITPAHDFNDYEVGQRNKLEIINIFTEEGKINNNAPQDYQGLDRFDARKKILEELKEKDFFLKKKI

SEQ ID NO: 192133 - protein, 441 aa, Unknown
  Bacterial polypetide isolated from the Sargasso Sea
MAQSKYNHKISESKIYSYWEKNKLFKPKKNKKSFSIVIPPPNITGSLHMGHALNNSIQDVLSRYYRMNNYETLWQPGTDHAGIATQALVEKNLKSKGIDKNEIGREKFIEKVWQWKEEYGGKIINQLKKLGCSCDWSRNAFTMDKNLSNSVVKVFIDLYKKKLIFKAKKLVNWDTVLKTAISDLEVDQREDNSKLYYIKYKIENSDETITIATTRPETMLGDTAIAVNPKDERYFNLINKFAILPIVERKLKIVQDDYADPQQGSGAVKITPAHDFNDFEVGKRHKLKSINIFTEDGKINNNAPNEYIGLDRFEARKKIIDKLKELQVFEKEETIKNKVPYGDRSNSIIEPFLTEQWFCDAKKLSIKAKKIVKNKKTNFFPSNWSKTYFQWMNNIEPWCISRQLWWGHQIPAWYGPDKKIFVAENQKKAELQAKKFYKKNG

SEQ ID NO: 192134 - protein, 580 aa, Unknown
  Bacterial polypetide isolated from the Sargasso Sea
MDKRYEPLIIEEKWSELWAKNNLGKNNSSQTFSQVIPPPNVTGTLHMGHSFQYSIMDFYARYNHLNDVNTHWQMGTDHAGIATQMVVENNLSRENIDKNDLGREDFVKKVWEWKEFSENKITGQIKRLGNSVDWSNYRFTLDEDFNEAVLKAFVELYRKEKIYRGYRLVNWDPSLKTAVSDLEVVRQEKKGLIWYIKYPIIGSDDFVTVATTRPETMFGDMAIAVNPKDERYKDIIGKKVELPFVKRKIPIIGDDYVDKEFGTGCLKITPGHDFNDYEIGKKYCLHCVDNEVHISNDIEDFEPLNIFTDEAHSNDNVPSPFKNLDRFKVRKLVLEEIKKLDLFVKEESHEISVPRGERSNIVIEPKLSYQWYVKTKDMADKANKAVENGEIRFHPENWIKTYFNWMNNIEDWCISRQIWWGHRIPAWYDDHGNVYVGYSENEVRTYYSLDNRSLRQDDDVLDTWFSSSLWPFASMGWPNESKNLKTFFPTNLLVTGFDIIFFWVARMIMMSIEFTGKIPFKDVYVTGLIRDENGQKMSKSKGNIIDPIDLIYGISLEDLLEKRTSNLMQEGLAEKITEKP

SEQ ID NO: 192135 - protein, 527 aa, Unknown
  Bacterial polypetide isolated from the Sargasso Sea
IEPYLTEQWFVDAKTLAIKAKEVVNNGKTKFFPENWSKTYFQWMDNIEPWCISRQLWWGHQIPAWYGPDGKIFVAENEDECKKQAKEFYSKEVELKRDEDVLDTWFSSGLWPFATLGWPEKTPEVEKFYPTSVLVTGFDIIFFWVARMIMMGTEFLKKEPFKKIYVHALVRDEKGQKMSKSKGNVIDPLELIEKYSADALRFTLLSMASPGRDVKLSEDRVKGYRNFLNKIWNANNFLRQNECDFSDIKKPENLKLTINKWILSELVKVKNETENSLKNYRFDEAAKNIYQFVWHSFCDWYLELSKTVFNSKNEEDIKELRQTSAYVFKEILIILHPFIPFVTEEIWLNNKLDKNGGEFLMHANWLENDYHEKKSYDEINNIINFITSIRSFKNELNISPGSFIEISTENTNKEYKNFLSANENILKKNGRIKSFHDNDLKKSSASIVINGELFKLYFDEDVDLNMIKSTLEKKIKKISEEMKKIDVRLSNKSFVDRAPQNIVEQEKSNFANLEKDVKKIELTLKGL

SEQ ID NO: 192136 - protein, 656 aa, Unknown
  Bacterial polypetide isolated from the Sargasso Sea
VAVNPKDERFVNLIGKNVLIPIVNRTVKIISDNYADPEQGSGAVKITPAHDFNDYEVGKRNKLEIINIFEENGKINKNGIKEFHGLDRFEARKLIIKKLKDKGSLVKIENIKNKVPYGDRSNTIIEPLLTEQWFVDAKKLSKKPIKIVKEGKTTFFPNNWSKTFFQWMNNIEPWCISRQIWWGHRIPAWYDENGNIFVAESEKDAVKLAKKKNKNKQFKLRQETDVLDTWFSSALWPFATLGWPKKTEELNKFYPTSVLVTGFDIIFFWVARMLMMGNYFRKNTPFHKVYVHALVRDEKGQKMSKSKGNVIDPLDLINEYGADSLRFTLISMASPGRDVKLSKDRVTGNRNFITKIWSANNFLKLNNCKLDKKINLASIKLPINHWIYNEFIKTQNLITKNIEIFRFDEAARYAYQFVWHSYCDWYLEFLKPIFNSKNKNEIKEAKAFSSFMMANILRILHPFIPFFTENLWSLNAYKKIFNNYLINSSWPDFKIINKFSKNQNNINDLIEIISNIRSTKAELKITPKLYCDIFLDDKSGKLKKLVNKNINLIKQVGRVNNVLTTKIRDKNSIDILVLKEKLSLNFNEDVNLGSQKERILQKIQTINKQITGLNNKLKNKAYVTNAPKEIVQNDKNLVKELTIEDRKLRSIVSSIN

SEQ ID NO: 192137 - protein, 588 aa, Unknown
  Bacterial polypetide isolated from the Sargasso Sea
MRFQNTLMDALIRHKRMSGFDVLWQVGVDHAGIATQMVVERQLESEGKDKESIGRDAFEKRVWEWKEKSGGTITQQLRRLGASVDWSREAFTMNEDLSEAVKEVFVSLYDEGLIYRGERLVNWDVVLQTALSDLEVSAEEESGSLWYFDYPIENGNAITVATTRPETMLGDTAVAVNPNDERFKGLIGKFVKLPITNRKIPIIKDSYVDEEFGTGCVKITPAHDFNDFEIGKRHDLEFINILNLDGTLNQSVPENFRGLTTAKAREKVLKEMDSLGLLNKVEPHKIQIPKSQRSDSILEPLMTKQWFVDVEMISKEAIRVVKENETEFIPKNWENTYFSWMDNIQDWCISRQLWWGHRIPAWFDEEENVYVGKSEDEVRKKYDLKDIELQQDADVLDTWFSSALWTFSTLGWPKKKNLLSRYHPTSVLVTGFDIIFFWVARMIMMTTHFISEVPFKKILIHGLIKDSEGVKMSKSKGNTLDPLDIIDGINLPDLSKKRTEGLMQPQMKDKIEKQTKKDFPDGIHAYGTDALRLTFCSLATGGRDINFDMKRVEGYRNFCNKLWNASRFIEMQIENSGVSEKPHDDLIE

SEQ ID NO: 192138 - protein, 432 aa, Unknown
  Bacterial polypetide isolated from the Sargasso Sea
IESKWYKYWLEKKYFSSQESDNHYTIVIPPPNVTGKLHMGHVLNNTIQDILIRKARMEGKNACWIPGTDHASIATESKVTKMLEEQGINKKDLTREEFLKHAWEWKEEYGGTIINQLQKLGCSCDWDKTSFTMDEDYSKAVLESFVQLYNKGLIYKGSKLVNWCPKSQTALSDEEVMFKEVNGKLWYIKYAINDSDTFIEIATTRPETMLGDTAIAVNPNDKRYKQLIGQTALLPLVGRSIPIIADDMVDPEFGTGCVKITPAHDLNDYEVGIKHNLEMINIMNADSSISDKAPEKYRGMSREKARKQIVSDLKDINHLIKEEDYLHKVGYSERGNVPIEYYLSEQWFLKMEDLAKPASEAVKNNEINFYPNHWVKTYNHWMGNIQDWCISRQLYWGHQIPVWYKKDTDRSNPDNWFVSTTPPKDIKNWSKI

SEQ ID NO: 192139 - protein, 442 aa, Unknown
  Bacterial polypetide isolated from the Sargasso Sea
DFMPINIFTDEAHTNDSVPELFANLDRFKVRKVVLEELKNKNLLLKEEKHQISVPRGERSNIVIEPKLSHQWYVKTQEMAKRANEAVNKGEVVFHPGNWIKTYFNWMDNIQDWCISRQIWWGHRIPAWYDEEGNIYVGYDEDELREHYKLDGRKLTQEEDVLDTWFSSSLWPFGSLGWPKETELNKYFPTSLLVTGFDIIFFWVARMMMMSLEFTGKVPFKDVYVTGLIRDENGQKMSKSKGNIIDPIDLIYGIGIEDLVAKRTANLMQEGLAEKIERKTRKQFPNGIESYGTDALRMTFFSLATHTRDISFELGRLKGYRNFCNKIWNAARFINNYPHESKEFVAKNDHDKWIEKEFNEVSQQIKKNIDEYRLDFAVNEVYEFFWGKFCDKYIEDCKKSGETSNLHPMLKKILVLMHPFAPFITEEVNELVFKDGSLMDSK

SEQ ID NO: 192140 - protein, 429 aa, Unknown
  Bacterial polypetide isolated from the Sargasso Sea
EGIDKNDLGREKFIEKVWEWKGQYGDIIINQLKKLGCSCDWSRNAFTMDENLSKSVLKVFVEMYKNGLIYKSKKLVNWDTVLKTAISDLEVDQREVNSKLYHIKYPIEGTDKFITIATTRPETMLGDTAVAVNPSDERYKSLVNKNVIVPIVDRKIKIIEDEYADPEQGTGAVKITPAHDFNDYEVGERNNLEVINVFTPDGKINENAPDNYIGLDRFEARKRILKELSDKNLFVKEEKIKNKVPYGDRSNSIIEPYLTEQWFADAKKLSIKAKEIVNNKTTNFFPVNWTKTYFQWMDNIEPWCISRQLWWGHQIPAWYGPDGEIFVDETEEGANKLAKEHYKKDVELIRDPDVLDTWFSSGLWPFATLGWPEKNEYLEKFYPTSVLVTGFDIIFFWVARMIMFGMEFQNKEPFKNIYVHALVRDEKGQ

SEQ ID NO: 192141 - protein, 638 aa, Unknown
  Bacterial polypetide isolated from the Sargasso Sea
LGKTVTIPIVGRKIKIIEDDYADPEQGTGALKITPAHDFNDYDVGQRNNLEIINIFTEAGKINENAPEHYVGLDRSEARKKILKELKEKEFFEKEENIKNKVPYGDRSNSIIEPFLTEQWFADAGKLSVKAKEVVNSKKTNFFPENWSKTYFQWMNNIEPWCISRQLWWGHQIPAWYGPDEKVFVAENEDDAKRQAKKHYGKDVELNRDPDVLDTWFSSGLWPFATLGWPDDNKYVDKFYPTSVLVTGFDIIFFWVARMIMFGTEFLNKEPFKNIYVHALVRDEKGQKMSKSKGNVIDPLDLIDKYSADALRFTLLSMASPGTDVKLSEDRVKGYRNFLNKLWNANNFLITNECDFKDIDKVPSLNVNINKWIYSELVETKNKIEKNLEDYRFDEAAKNAYQFAWHSYCDWYLELSKTILFSDDEKAKAEVKKVSSFVFKQILILLHPFIPFVTEEIWLKNKFDNDGSDYLMLKNWLSGEINKDTSTEQVENIINIISEIRSFKNELNVSPGSFIDVSISNINKNQKDFINTNEIILKKLGRINSILDKDLDKPAATMVVSGDLFKIYFDKDVDLKLIKENLTNKQSRLEQEMNKISQRLENKSFVDRAPKEIVEQEKNNYNNLKNDIEKISITIKGI

SEQ ID NO: 192142 - protein, 701 aa, Unknown
  Bacterial polypetide isolated from the Sargasso Sea
MQDETYEPLAIEKKWQENWESANKFVPVDSDKKFSIVIPPPNVTGSLHMGHALEHSIIDVITRIKRLKGYETLWVPGTDHAGIITQLLVENELSEKGVQKEDIGRENFISKVWEWKEKSGENISTQMRKLGMSCDWSRERFTMDEGLSTAVREVFIKLYEDGLIYKGTRMVNWDTELMSAVSDLEVTLNPEKGKLWSIKYKTEDSFLTISTTRPETLLGDTAVAVNPDDERYKNLIGKTAIVPLVNREVPIIADEYVDPEFGSGCVKITPSHDFNDYEIGEKHKLEFIQCIDLDGKISNEDFIPENLRGKDRFEARKLIVNDLMKLEQLEKEEDYDIQLPKGDRSKSILEPMITEQWFVKTETLAKEAIKAVETEEIKFVPKNWEKTYFEWMYNIQDWCISRQIWWGHRIPAWYDEENNIYVGNSEQEIREKNNLSKETKLRQDEDVLDTWFSSALWPFSTLGWPEDSEDLSNYYPTSLLVVGFDIIFFWVARMIMMGINFQKDIPFKDILVHGLVRDSKGRKMSKSLGNTIDPLELSDKHGADALRFSLVEKASPGQDVPFDEEWTIAAKKFGNKIWNASKFVHIYTDGKETNDLSTIECEENKWIINKFDTVLDEFNSLFEKYKISDAYKLFYNFLWSDLFDWYFEFSKNLIENENHKSETMEVLHSVFLKSIKILNPAMPHITEEVWETFDEEVLISN

SEQ ID NO: 192143 - protein, 889 aa, Unknown
  Bacterial polypetide isolated from the Sargasso Sea
MTLSKTYDPHSFESEIYKRWEEKGVFRADNTSEATPFTISMPPPNATGQLHVGHAVMLALEDILIRWHRMKGDEALWLPGTDHAAIATENVVLNKIRNEEGIQDPRETLEREEVLRRIAAYVENSRGTIRNQVKAMGSSCDWSRERYTMDPQLNRCVNESFVRMYEEGLIYRGPRIVNWDPKLKTNVSDDEVERKETRSPFYTFQYGPFQIGTVRPETKFGDKYVVMHPEDERYLDYQHGQTFECEWINGRIQATIIKDDSVDPEFGTGVMTITPWHDHTDFEIAERHQLDKEPIIDFEGRLLPIAQEFSGMAIEEARSLIVEKLKTKGLLVKVDEKYTHSKSFNSRGGGAIEPQIREQWFIDVNKQAIDWKGEKSSLREILIDVVRAGDIRLVPDRFESTYFHWVENLRDWCISRQIWWGHRIPAFYREKELQIAMKTPEGEGWEQDPDTLDTWFSSALWTWSTLIDPDLAQDESISFEELLRRSPDFQKFHPTHVMETGYDILFFWVARMILMTTFMIREVPFKTVYLHGLVRTRDGKKMSKSDPLTCIDPLESIRDYGTDALRLALIQGTGPGQDLRLYPEKLESCRRFANKVWNAGRYILMNIPSGTSMDPPQKVQNEAARWLLHELDMLIGKTRQGLETFRLSEVIDNLRSFFWSTFCDWYLEMDKRPDRNEEDNRVLAYALSTQLKLLHPYVPFVTEALWENLGQDKMLAKAPWPESQGYDFGESHKNIQLVCESVSQLRTLREKVRLGLNQKVDAGIDSEPHAEVFEIHSGLIKRLARISELKIRKVPATPSGEALSSYFQDSLVSINANALDFSQEISNLQKQLNQENQFLTKSRNKLQNPGFLNNAPDQVVLELREKVDSTEKTIDALKKQVIELEQLAN

SEQ ID NO: 192144 - protein, 405 aa, Unknown
  Bacterial polypetide isolated from the Sargasso Sea
MSSDKYIHSDVEDKIYSYWEKNKLFKPKKNLKKFSIVIPPPNVTGSLHMGHALNNSIQDLLVRYYRMNNYETLWQPGTDHAGIATQALVEKKLENENLNKKDLGREKFIEKVWEWKNQYGDIIINQLKKLGCSCDWSRNAFTMDENLSKSVIKVFVELYKKKLIYKSEKLVNWDTVLKTAISDLEVDQREMNSKIYYIRYPIEKSDEFITIATTRPETMLGDTAIAVNPKDKRFKKYVGKTVTIPIVGRKIKIIKDNYADPEQGTGALKITPAHDFNDYDVGQRNNLEIINIFTEDGKINRNAPKNYVGLDRFEARKKILVELKEKNFFVKEENIQNKVPYGDRSNSVIEPFLTEQWFVNAKKLSIKAKKIVKSKKNNFFPVNWSKTYFKGMNNIEPWCISRQLW

SEQ ID NO: 192145 - protein, 330 aa, Unknown
  Bacterial polypetide isolated from the Sargasso Sea
RLFSYWEKNNLFKPKKNKKSFSIVIPPPNITGSLHMGHALNNSIQDLLTRFHRMNNYETLWQPGTDHAGIATQALVEKKLANDGIKKNDLGRDKFIEKVWEWKNQYGDIIINQLKKLGCSCDWSRNAFTMDDNLSKSVIKVFVDLYKKDLIYKSKKLVNWDVVLKTAISDLEVDQREVNSKLYHIRYPIEKSDDFITIATTRPETMLGDTAIAVNPKDDRYKSLVNKFVTIPLVERKIKIIEDDYADPEQGTGAVKITPAHDFNDYEVGQRNNLEILNIFTSDGKINENAPKEFIGLDRFEARKRLLKKLKEKDFLVKEENIKNKIPIWG

SEQ ID NO: 192146 - protein, 279 aa, Unknown
  Bacterial polypetide isolated from the Sargasso Sea
MNPWCISRQLWWGHQIPAWYGPDKKIFVASNYKEAEKLAKKKYKKNVELVRDEDVLDTWFSSGLWAFATLGWPNKNEYLKKFYPTSVLVTGFDIIFFWVARMMMFGMEFLNKQPFKEIYVHALVRDEKGQKMSKSKGNVIDPLILIDKYSADALRFTLLSMASPGRDVKLSEDRVKGYRNFLNKLWNANNFLAMNKCDFSKSKKEPKAKLNINKWIISELNTASKLIEKNINDYRFDEAARNIYQFVWHSYCDWYVELSKTILNSKEKSSISEVKQTLS

SEQ ID NO: 192147 - protein, 98 aa, Unknown
  Bacterial polypetide isolated from the Sargasso Sea
MEKTYNPKEIEARIYESWEDSGYFSPSKSGEPFCIVIPPPNVTGTLHMGHAFQDTIMDIIIRYQRMNGKNTLWQVGTDHAGIATQMVVERQLEKSGTS

SEQ ID NO: 192148 - protein, 915 aa, Unknown
  Bacterial polypetide isolated from the Sargasso Sea
MKKNYEPSSTETEIYENWEKSDFFKAQPDESKESFCIMIPPPNVTGTLHMGHGFQNTLMDALIRHKRMSGFDTLWQVGVDHAGIATQMVVERQLEAEGLSREKIGRDEFEKKVWLWKEKSGNKITQQLRRLGASVDWSREAFTMSDDLSMAVKEVFIELYNQGLIYKGERLVNWDTVLETALSDLEVSSEEENGSLWYIDYFTSDNEKLTVATTRPETLLGDTALAVNPEDERYKGQIGKMALLPIVNREIPIIADNYVESEFGTGCVKITPAHDFNDFEMGKRHGLKIINILNFDGTLNDKVPDKYQNLNIEEARELILEDLNTIGQLNKTEPYKVQIPRSERSNSILQPLLTNQWFVNVEKLSEEAIRVVKENETEFIPKNWENTYFAWMNDIQDWCISRQLWWGHRIPAWFDKDDNLYVGESEKAVREKYNLDNIELKQDEDVLDTWFSSALWTFSTLGWPKKENLLSRYHPTSVLVTGFDIIFFWVARMIMMTTHFINEVPFKKILIHGLIKDSEGQKMSKSKGNTLDPLDIIDGINLDDLIDKRTEGLMQPKMKDRIIKQTKKEFPNGIEAYGTDALRLTFCSLASGGRDINFDIKRVEGYRNFCNKLWNAARFIDLNIDNYGISKKRSETSIDAWIDYKFNQTVEKVDQSMNEFRFDLATKALYEFIWYEFCDWFIELQKISLRKDDVNKAEIVRSLVDILEKTLRLAHPIMPFITEEIWKQFQAHHNSTHESIMISEYPVGSENTSEQDYQSVEWLKDIVSGIRNIRGELLIKPSIKISSIFKGGDELDKENLNQISSYIEKLCGLKDIIWAEESSQDIPSSMFTRDNLKVMIPLEGLIDAKEEMQRLDKKISKLIQEKEMLGSKLSNKSFVENAPKDLVESQKDRFSVLSKELENLDFQMDEIKKMI

SEQ ID NO: 192149 - protein, 302 aa, Unknown
  Bacterial polypetide isolated from the Sargasso Sea
MHELPKHYDHAAAQTRCQTLWDTNRYWHADPNQPGDVFSVVIPPPNVTGALHLGHALNNTLQDILVRTKRMQGFLTLWMPGTDHAGIATQAVVERRLLEEEGVSRHDLGRSKLVERIWNWKEQYEKRILSQLRDIGASCDWDRTRFTLDDQCGRAVRETFFRLFEKGLVRRGKRLVNWDTFLQTAVSDDEVFHEEVKGYFWHIRYTVIDPQPGEPIDITVATTRPETLLGDTAVAVHPNPAEALQSLLGELREKLSQAPEKEKAEIEQTIDSLQSRCKSVLPGLEKLADMAADGRHVRVPLL

SEQ ID NO: 192150 - protein, 689 aa, Unknown
  Bacterial polypetide isolated from the Sargasso Sea
MKKNYEPSSTETEIYENWEKSDFFKAQPDESKESFCIMIPPPNVTGTLHMGHGFQNTLMDALIRHKRMSGFDTLWQVGVDHAGIATQMVVERQLEAEGLSREEIGRDEFEKKVWLWKEKSGNKITQQLRRLGASVDWSREAFTMSDDLSTAVKEVFIELYDQGLIYKGERLVNWDTVLETALSDLEVSSEEENGSLWYIDYFTSDSEKLTVATTRPETLLGDTALAVNPEDERYKGQIGKMALLPIVNREIPIIADSYVESEFGTGCVKITPAHDFNDFEMGKRHGLEVINILNFDGTLNDKVPDKYQNLNIEDARKLILEDLNTIGQLNKTEPYKVQIPRSERSNSILQPLLTNQWFVNVEKLSQEAIRVVKENETEFIPKNWENTYFAWMKDIQDWCISRQLWWGHRIPAWFDMDDNLYVGESEKAVREKYNLDNIELKQDEDVLDTWFSSALWTFSTLGWPKKENLLSRYHPTSVLVTGFDIIFFWVARMIMMTTHFINEVPFRKILIHGLIKDSEGQKMSKSKGNTLDPLDIIDGINLDDLIKKRTEGLMQPKMKDRIIKQTKKEFPNGIEAYGTDALRLTFCSLATGGRDINFDIKRVEGYRNFCNKLWNAARFIDLNIDNYGISKKRSESSIDFWIDYKFNETVKKVDQSMNEFRFDLATKAIYEFIWYEFCDWFIELQKISL

SEQ ID NO: 192151 - protein, 474 aa, Unknown
  Bacterial polypetide isolated from the Sargasso Sea
KKLGCSCDWSRNAFTMDENLSKAVIKVFVDLHKKKLIYKAEKLVNWDTVLKTAISDLEVDQREVNSKIYYIRYPIDGTTEYITIATTRPETMLGDTAVAVNPKDKRYKKYVNKIVTIPIVGRKVKIIEDDYADPEQGSGALKITPAHDFNDYDVGKRNKLEIINIFTEDGKINDNAISSYVGLDRFEARKKILNELKEKDYFVKEENIKNKVPYGDRSNSIIEPFLTEQWFADAKKLSIKAKKIVKNKKTNFFPENWSKTYFQWMNNIEPWCISRQLWWGHQIPAWYGPDKKIFVELNESDAKKSAKKYYKKDVKLVRDNDVLDTWFSSGLWPFATLGWPNKNEYLKKFYPTTVLVTGFDIIFFWVARMMMFGMEFLNKEPFKDIYVHALVRDEKGQKMSKSKGNVIDPLDLIQKYSADALRFTLLSMASPGTDVKLSEDRVKGYRNFLNKLWNANNFLIQNKCNLKNAKKLPK

SEQ ID NO: 192152 - protein, 366 aa, Unknown
  Bacterial polypetide isolated from the Sargasso Sea
AWYGPDGEIFVDETEEGANKLAKEHYKKDVELIRDPDVLDTWFSSGLWPFATLGWPEKNEYLEKFYPTSVLVTGFDIIFFWVARMIMFGMEFQNKEPFKNIYVHALVRDEKGQKMSKSKGNVIDPLELIEKYSADALRFTLLSMASPGRDVKLSEDRVKGYRNFLNKIWNANNFLIQNDCKFENIETPNDLKLNINKWIFVEFTNTNAKIKKSIDSYRFDEAARIAYQFVWHSFCDWYLELSKTVFYSENNENIEETRNVASFIFTQILVILHPFIPFLTEEIWLKNKLDKDGKDFLMLKNWSEAISNKDKDSDEVNEIIEFVSSIRSFKNEIEISPGSFVKILVNKINPEIKKFIENNSNTLKKI

SEQ ID NO: 192153 - protein, 837 aa, Unknown
  Bacterial polypetide isolated from the Sargasso Sea
MCLPGTDHASIAVQTILEKQLKSEGKTSEDIGRHEFLKRAWNWKEQSGGRIVSQLKRIGYSVDWTRERFTLDQKLNEAVIEAFNILYKKNLIYRGEYLVNWCPESQSAVSDLEVEMQEVNGHLWHFKYPLISESGEQLDKYLEVATTRPETLLGDTAVAVNPDDDRYKEFIGVKVKVPFVDREIPIIADSHVDKDFGTGCVKVTPAHDPNDFAIGKRHNLKQINVMNKDGTLNINAGIFQNLDRYEARKKIIKELDNLGLLTKIEDYKHTVPFSDRGKVPIEPLLSTQWFLKMDDISQGCLNEIDSKKPSFIPPRWEKVYKDWLENINDWCISRQLWWGHQIPAWYVLDDSQDSIEQNTPYIVARNEEDALIEANKKFGLNIKLVRDKDVLDTWFSSGLWPFSTLGWPNTNDPDFKKWYPNSVLVTGFDIIFFWVARMTMMGNTFTNNIPFKDVYIHGLVRDENNKKMSKSSGNGIDPILLIDKYGSDALRFALIREVAGAGQDIRLDFDRKKDTSSTVEASRNFANKLWNATKFVLINKTSNNNYSLNESDETFLELCDKWILSKLNQVNTKVAALLKEYKLGESAKLLYEFTWNDFCDWYVEFAKQRFNNKETNNRQISEKVLIKVLNDILVMIHPFMPHITEELWHVLQLKSDKELLSLQKWPTQENKFVDNKLDNSFQQLFEIIRLIRNLRAELGLKPSEKVPVYLISDNDELIDFLKILVDDIQTLTKSSEVFIFKPNAVDKKEFAKSFSGIISDLEVYLPFQDFVNIDALKERLNKDLKKVTIELDNLNKRLSNKNFVDKAPKDIVDECRFKLNEGSVQMERITKKLELLN

SEQ ID NO: 192154 - protein, 279 aa, Unknown
  Bacterial polypetide isolated from the Sargasso Sea
MSSNQLDKTYRPNLVEDKWYEHWIEQDYFTADPNSDKEPYTIVIPPPNVTGMLTVGHVLNNTIQDILIRKARMEGKEACWIPGTDHASIATESKVVAMLHEKGINKNQLSREEFLEHAWEWKEKYGGIIIRQLKKLGCSCDWSRERFTMDEGYTKSVLTAFVKLYDKGLIYKGHRLVNWCPVSRSAISDEEVIHKEKQGFLWHFRYPITDSDQYVIVATTRPETMLGDTAVAVHPEDDRYQDMVGKTVSLPLVGREIPIIADTFVDPEFGTGCVKVTPA

SEQ ID NO: 192155 - protein, 621 aa, Unknown
  Bacterial polypetide isolated from the Sargasso Sea
MSFDKYEHNNVENKIYDYWEKNELFKPKENSKKFSIVIPPPNVTGSLHMGHALNNSIQDVLTRFHRMNNYETLWQPGTDHAGIATQALVEKKLAKNGVKKNDLGREKFIEKVWEWKNEYGDIIINQLKKLGCSCDWSRNAFTMDENLSKSVIKVFVNLYNKKLIYKAKKLVNWDVVLKTAISDLEVDQREVNSQLYYINYPIENSDKFITIATTRPETMLGDTAIAVNPKDDRFKDLVGKFVIIPLAKRKIKIITDDYADPEQGTGAVKITPAHDFNDYDVGIRNKLEVINIFTPDGRINDNAPDPYKGLDRFAARKLILEHLEEGKFLEKIEKLVNKVPYGDRSNSIIEPYLTEQWFVDAKTLAIKAKEVVNNGKTKFFPENWSKTYFQWMDNIEPWCISRQLWWGHQIPAWYGPDGKIFVAENEDECKKQAKEFYSKDVELKRDEDVLDTWFSSGLWPFATLGWPEKTPEVEKFYPTSVLVTGFDIIFFWVARMIMMGTQFLDKEPFKNIYVHALVRDEKGQKMSKSKGNVIDPLELIEKYSADALRFTLLSMASPGRDVKLSEDRVKGYRNFLNKIWNANNFLTQNKCDFGDVKKPENINLKINKWILSELVKVKNDT

SEQ ID NO: 192156 - protein, 875 aa, Unknown
  Bacterial polypetide isolated from the Sargasso Sea
MQLDKFFDFLKDEKNLYSQWEQSNCFKPQKGGEPYSIMMPPPNVTGSLHMGHALTFTIQDILIRYHRMKGMEVLWQAGTDHAGIATQMVVERKLSESNLDRRSLGREKFIEKVWEWKKESGGQISNQLRRLGASADWSRERFTMDEGLSNAVKKVFVNLFNDGIIYKDKRLVNWDPKLLTAISDLEVEQRDTEGSLWHIKYPIDENNYIIVATTRPETMLGDTAVAVHPDDEKYKNLIGKFCNLPISNKKILIIADEYADPEKGSGAVKITPAHDFNDFEVGKRHGLEFINIFDENAKLNSNVPEEFQNLDRFKARKLILKKLDEMNLLIKEEKQQMVIPYGDRSGVVIEPWLTDQWFCDAKKLSVDPISAVKDNSSKFIPKQWENTFYNWMENIQPWCISRQLWWGHQIPAWYGPDNKYFVSETLEEAQNQAKEFYGKDVELRQDEDVLDTWFSSALWTFSTLDWPNKTYELDKFYPGNVLVTGFDIIFFWVARMMMMGSYFMKETPFKDIYIHPLIRDEKGQKMSKSKGNIIDPLELLDKYGADTLRFTLTALLNPGRDVKLSEARVKGYKSFTNKIWNAGKFLQLNNSIFIDDISIDTIIFDANKWIIKELNDLNTQLDQLTKKYLFHEIANKIYHFVWHTYCDWYIEIIKQNFENEKFADEIKKVSGWTFIQVLKIIHPIMPFISEKLWRSLVDDKSYLMNQVFQNYSTNNSFNNSKKNFEIFIEFITSIRNLRSELNIPYKQLINISIEAKNEELNNFLIAYKNEISNFLKTKDISFDKIQPNKNSALIVLTSLSVLIPLDGIIDSEAELKKLNKKKQVEQEKFNKVNDKLKNDNFMNKASEEIINKFKNEANIYKSSIEKIDQIINTIK

SEQ ID NO: 192157 - protein, 611 aa, Unknown
  Bacterial polypetide isolated from the Sargasso Sea
MDAKYFPIEIEEKWSKVWAERELNKPESEQNFSQIIPPPNVTGTLHMGHSFQYAIMDFYTRYHHMNGANSYWQVGTDHAGIATQMVVENNLANEGKDKNDLGREKFLEEVWKWKDYSEEKITSQIKRLGSTVEWDKYRFTFDDDFCEAVNKAFVELYRNKKIYRGYRLVNWDPSLKTAVSDLEVIRQEKEGILWHIAYPISDSDETLTVATTRPETMFGDMAVAVNPKDERFKKFIGQYVELPFVGRKIPVIGDEYVDMEFGTGCLKITPGHDFNDYEIGKKYALHEIDGVVHSSDELNNFVPINIFTDEAHTNDSVPEPFANLDRFKVRKAVLEELKNKNLLLKEEKHQISVPRGERSNIVIEPKLSHQWYVKTQEMAKKANEAVNKGEVVFHPGNWIKTYFNWMDNIQDWCISRQIWWGHRIPAWYDEDGNIYVGYDEDELRNHYKLDDRKLTQDEDVLDTWFSSSLWPFGSLGWPKENELEKYFPTSLLVTGFDIIFFWVARMMMMSLEFTGKVPFKDVYVTGLIRDENGQKMSKSKGNIIDPIDLIYGIDLEDLVTKRTANLMQEGLAEKIERKTRKQFPNGIESYGTDALRMTFFSLATHTRDISF

SEQ ID NO: 192158 - protein, 495 aa, Unknown
  Bacterial polypetide isolated from the Sargasso Sea
TRYYRMNNYETLWQPGTDHAGIATQALVEKKLNSENIKKNDLGREKFIEKVWEWKNQYGDIIINQLKKLGCSCDWSRNAFTMDENLSKAVIKVFVDLHKKKLIYKAEKLVNWDTVLKTAISDLEVDQREVNSKIYYIRYPIDGTSEYITIATTRPETMLGDTAVAVNPKDKRYKKYVNKIVTIPIVGRKVKIIEDDYADPEQGTGALKITPAHDFNDYDVGKRNKLEIINIFTEDGKVNSNAISSYVGLDRFEARKKILNELKEKDYFVKEENIKNKVPYGDRSNSIIEPFLTEQWFADAKKLSIKAKKIVKNKKTNFFPENWSKTYFQWMNNIEPWCISRQLWWGHQIPAWYGPDKKIFVELNESDARKAAKKFYKKDVKLLRDPDVLDTWFSSGLWPFATLGWPNKNEYLKKFYPTTVLVTGFDIIFFWVARMMMFGMEFLNKEPFKDIYVHALVRDEKGQKMSKSKGNVIDPLDLIQKYSADALRFTLLSMA

SEQ ID NO: 192159 - protein, 426 aa, Unknown
  Bacterial polypetide isolated from the Sargasso Sea
LDTWFSSALWTFSTLDWPNKTYELDRFYPGNVLVTGFDIIFFWVARMMMMGSYFMKETPFKDVYIHPLIRDEKGQKMSKSKGNIIDPLVLLDKYGADTLRFTLTALLNPGRDVKLAEERVKGYKSFTNKIWNAANFLNINNVSFIDTIDIENIKLDTSKWILKEFEEIQKKYFDNIEKYQFHEIASSLYHFTWHTYCDWYIEFIKSDFKDPEKSEETIKVSGWVFVQILKLLHPVMPFITEKLWLSLVDKKNFLMNQEFIKINFDHSYQESKKYILKIIEIMTALRNLRSDLNISYKNNIDLIIDAKNDHLKKFISNYEEEFKRLIKTNTISYEENTNQKKSAFIVLSEITILVPLEGIVDTEKELSKLDEKKLNYNKKLNTVLDKLNNKAFIEKAPDNVIENFKMQEQEIKSSIEKINEIMNTIN

SEQ ID NO: 192160 - protein, 390 aa, Unknown
  Bacterial polypetide isolated from the Sargasso Sea
DTWFSSSLWPFSTLGWPDENDRVKTFYPTSVLITGFDIIFFWVARMIMMGLEFLEDVPFKEVYVHGLVKDAHGNKMSKSKGNIIDPIDLIDGIDIDSLLIKRSSDLMQPEMAEKIRKNTKKEYPNGIEAYGTDALRFTFSSLATSNRDINFDLKKLEGNRNFCNKIWNAARYIKLLKDEYKITSVKNPEYDDTDVWIYKRLNNLITSLRTNYKKYRFDFASKDLYDFIWNDFCNWYIELSKIDIKSKDSKKIESKIFHLEELFKNIILLLHPTMPFITEELKLFSFNDDRFLIQHNYPTEIEIPDESRSNYINWLTNVISEIRKYRSELGINPSAKVKIKISNLRKEDEGLVLKYQDYLKSIARLSECEIIKEINDDNVPTIVVENLKIK

SEQ ID NO: 192161 - protein, 429 aa, Unknown
  Bacterial polypetide isolated from the Sargasso Sea
PDVLDTWFSSGLWPFATLGWPDQKEFVEKFYPTSVLVTGFDIIFFWVARMIMFGTEFLHKEPFKDIYVHALVRDEKGQKMSKSKGNVIDPLDLIEKYSADALRFTLLSMASPGRDVKLSEDRVKGYRNFLNKIWNANNFLIQNECSFNNVEKPNDLKVNINKWIYSEFLTKKDEIQKNIKGYRFDEAAKNVYQFVWHSFCDWYLELSKTILFSDNQDAIKEVRNVSSFIFREILIILHPFIPFITEEIWLKNKLDKNSNDFLMYANWSNENSTKDREIDDVYKIIEIITSIRSFKNELGVSPGSLIDISLKNTSKETIDFFNNNQIVVKKLGRINNILDKDLDKGSATLVINGELFKLYFEQDVDLEIIKNNLSKKHSKIKEEMNKINTRLSNKSFTDKAPKDIVEQEKTNFDNLEKDAKKIELTLESL

SEQ ID NO: 192162 - protein, 359 aa, Unknown
  Bacterial polypetide isolated from the Sargasso Sea
KNLEKENLNKDNLGREKFIEKVWEWKNQYGDIIINQLKKLGCSCDWSRNAFTMDENLSKSVVKVFIELHKKKLIYKAEKLVNWDTVLKTAISDLEVDQREMNSKIYYIRYPIDKSHEFITIATTRPETMLGDTAIAVNPKDKRYKKYVGKIVTIPIVGRKIKIIKDNYADPEQGTGALKITPAHDFNDYEVGQRNKLEILNIFTEEGKINKNAPVEYVGLDRFEARKKILENLKEKDFYVKEENIKNKVPYGDRSNSIIEPFLTEQWFVNAKKLSVKAKKIVKSKKTNFFPSNWSKTYFQWMNNIEPWCISRQLWWGHQIPAWYGPDKKIFVALNEMEANKQAKKFYKKDTKLKRDPDV

SEQ ID NO: 192163 - protein, 620 aa, Unknown
  Bacterial polypetide isolated from the Sargasso Sea
AKISQSAPAEYQGLDRFEARKKIVEDLEANGLMQEIEDYTITIPRGDRSGAILEPLITNQWFLKMEPLAQPAIQAVKNGEIKFIPENWSKTYYEWLENIQDWCISRQLWWGHRIPAWYDNEGNVYVGESENEIRKQHNIEDSIALIQDDDVLDTWFSSALWPFSSLGWPDETYDLKTFYPTNVLVTGFDIIFFWVARMVMMGLKFMDEIPFKEIYIHGLIKDKNGQKMSKSKGNILDPIDLIDGISLDELLDKRVQGLMQPEMEKRIISDTKKEFPNGIPDFGTDALRFNFAIQASTGRDIRLDLKRVEGYRNFCNKIWNASRFIKMNTNDFELLEIKDTEGHPIDQWIQSKFAETIDEVEKQFSQYRFDLAATAMYEFVWNDFCDWYIELSKALINEPGIKQSQKDYTKNNLIKMLDAILRMLHPTIPFITEEIWQSLSEENNKKSIMKADFPSSKNWKADTEIAANTEWLKNFVSSVRQIRSEMTISPKQSIKIIVDDASNSDIKRLELFESFISNMGSVESIIHKEEADDLPKSAIALLKGMKIYIPLEGLVDIEEEKARLQKKLSNLNQDLKSVKNRLSNDAFVEKAPKEVVDELKEKFKALSLDQTRIEEQLSLL

SEQ ID NO: 192164 - protein, 416 aa, Unknown
  Bacterial polypetide isolated from the Sargasso Sea
KIITDDYADPEQGTGAVKITPAHDFNDYDVGIRNKLEVINIFTPDGKINDNAPDPYKGLDRFAARKLILEHLEEGKFLEKIEKLVNKVPYGDRSNSIIEPYLTEQWFVDAKTLAIKAKEVVNNGKTKFFPENWSKTYFQWMDNIEPWCISRQLWWGHQIPAWYGPDGKIFVAENEDECKKKAKEFYSKDVELKRDEDVLDTWFSSGLWPFATLGWPEKTPEVEKFYPTSVLVTGFDIIFFWVARMIMMGTQFLDKEPFKNIYVHAFVRDEKGQKMSKSKGNVIDPLELIEKYSADALRFTLLSMASPGRDVKLSEDRVKGYRNFLNKVWNANNFLRQNKCDFGDVKKPENIKLTINKWILSELVKVKNDTENSLKNYRFDESAKIIYQFVWHSFCDWYLELSKTVLILIMRRRLKN

SEQ ID NO: 192165 - protein, 662 aa, Unknown
  Bacterial polypetide isolated from the Sargasso Sea
TTRPETMLGDTAVAVNPKDKRFKKYKNKDVNLPLVGRKIKIIFDDYADPEQGTGAVKITPAHDFNDYDVGQRNKLKIINIFTDDGKINENCPGKYQGLDRFEARKIILEDLKNLNLFVKEENIKNKVPYGDRSNSVIEPYLTEQWFADAKKLSIKAKKIVKSKKTNFFPGNWSKTYFQWMNNIEPWCISRQLWWGHQIPAWYGPDKKIFVALNEKEAKQNAKKFYKKEVELERDPDVLDTWFSSGLWPFATLGWNTKDPYLKKFYPTSVLVTGFDIIFFWVARMIMFGMEFIKKEPFKDIYVHALVRDEKGQKMSKSKGNVIDPLDLIEKYSADALRFTLLSMASPGRDVKLSEDRVKGNRNFLNKLWNVNNFLIHNKCDIKNTKKSPKAKININKWIYSELVQTKIVVENNIKDYRFDEAARNVYQFVWHSYCDWYLELSKTILNSNNKKDIKETKEIASYVFKEILVLLHPFIPFITEEIWLKNKLDNSNKDYLMYSNWVSDKPKKEKFADVENMIDFITEIRSFKNELSISPGSYVDISLSGINKKDKSFFTNNETVIKKLGRITNFIDKDKNKPSASLVIKGSVFKLYFEENVDLNLIKENLLSKQSKYQAEMDKISSRLNNKDFVKRAPKHIVDQEKSNYNNLGNDIKKISATVKNL

SEQ ID NO: 192166 - protein, 422 aa, Unknown
  Bacterial polypetide isolated from the Sargasso Sea
KNTLWQVGTDHAGIATQMVVERQLEKSGTSRQELGRESFEKEVWKWKEESGSTITKQMKRLGASTDWTKEKFTMDENLVRGVQKVFIQLYEEGLIYRGKRLINWDPVLQTALSDLEVATTEEKGSLWHMKYPISDSKDHIVVATTRPETMLGDTAVAVHPDDKRYKELIGQEVILPLTDRKIPIIADEYVDQEFGTGCVKITPAHDFNDFEISKRHDLEIISILDQSAKISRSAPAEYQGLDRFEARKKIVEDLEANGLMQAIEDYTLTIPRGDRSGAILEPLITNQWFLKMEPLAQPAIEAVKNGEIKFIPENWSKTYYEWLENIQDWCISRQLWWGHRIPAWYDNEGNVYVGDSENEIRKQHNIEDSIALIQDDDVLDTWFSSALWPFSSLGWPDETYDLKTFYPTNVLVTGFDIIFFWV

SEQ ID NO: 192167 - protein, 658 aa, Unknown
  Bacterial polypetide isolated from the Sargasso Sea
ALNNSIQDLLVRYHRMNNFETLWQPGTDHAGIATQALVEKKLNSDKIDKNEIGREKFIEKVWEWKEQYGDIIINQLKKLGCSCDWSRNAFTMDENLSKSVIKVFVDLYNKGLIYKDKKLVNWDTVLKTAISDLEVDQREVNSKIYYIRYPIDGTEEFITIATTRPETMLGDTAIAVNPKDERFKSFVGKTVTIPIVGRKIKIIEDDYADPEQGTGALKITPAHDFNDYDVGQRNNLEIINIFTEAGKINENAPEHYKGLDRFEARKRILKELKEKDFFVKEENIKNKVPYGDRSNSIIEPFLTEQWFADAGKLSVKAKEVVNSKKTNFFPENWSKTYFQWMNNIEPWCISRQLWWGHQIPAWYGPDEKIFVAENEDDAKQQAKKNYGKDVELNRDPDVLDTWFSSGLWPFATLGWPDDNKFVDKFYPTSVLVTGFDIIFFWVARMIMFGTEFLNKEPFKDIYVHALVRDEKGQKMSKSKGNVIDPLDLIEKYSADALRFTLLSMASPGTDVKLSEDRVKGYRNFLNKLWNANNFLITNECDFKDIDKVPSLNVNINKWIYSELVETKNKIEKNLEDYRFDEAAKNAYQFAWHSYCDWYLELSKTILFSDDEKAKAEVKKVSSFVFKQILILLHPFIPFVTEEIWLKNKFDNDGSDYLM

SEQ ID NO: 192168 - protein, 688 aa, Unknown
  Bacterial polypetide isolated from the Sargasso Sea
FGKNVILPIVNREIPIIADDYVESDFGTGCLKITPAHDFNDYEVGLRHKLPIINIFNDSAELNENVPKKFRGLSRESAREVIVSEFKKLGLLKKTEKHKSKIPRGDRSGVVVEPYLTDQWFVDIKPLAEPAIEAVKNNDIQFVPDNWKKTYFEWMENIQDWCISRQLWWGHRIPAWYDDNGNTYVGKNEKEIRQKFKINKDINLSQDEDVLDTWFSSALWPFSTQGWPENTESLKTFYPGQVLVTGFDIIFFWVARMIMMGIKFKEEVPFKKVYIHGLIRDQYGQKMSKSKGNVLDPIDLIKGSSIENLLKKRTSGLMQSHLKPEIEKNTIDEFPDGINSYGADALRYTFASLATTGRDIRFDMGRIEGYKNFCNKLWNAAHYVIDNTHNCNLSNEKIACSNPIDLWIRTEQNKTINKVHKNFENYRLDLASQNLYEFVWHEFCDWYIELTKAILNDNSIQDSEKLGTKKNLLIVLESILRLLHPIIPFITEEIWLHIKDKFLFEDKTIMTRQYPIYDEKDTYKKESSDIEWIKKFILGIRQIRGELNISPKIELEVLLKNYTPKDTKIIKQHEYLIKRTARVKEIKLMDQNESEPLSAAALHGKMKILVPLIDHIDISDEIARLEKQATTLKNEILKSQKKLDNKGFREKAPKSVVEEEQKRIKVKSLLINELSAQIDHLIKLRNKS

SEQ ID NO: 192169 - protein, 577 aa, Unknown
  Bacterial polypetide isolated from the Sargasso Sea
KYSHIEIEDQIYSYWEKNNLFKPVKNKKKYSVVIPPPNVTGSLHMGHALNNSIQDLLIRYHRMNNFETLWQPGTDHAGIATQALVEKKLNSENIKKEDLGRDKFIEKVWDWKGQYGDIIINQLKKLGCSCDWSRNAFTMDENLSKAVIKVFVDLYKKKLIYKAEKLVNWDTVLKTAISDLEVDQREVNSKIYYIKYPIDGSNEFITIATTRPETMLGDTAIAVNPKDKRFKKYVNKFAIIPIVNRKIKIITDNYADPEQGTGALKITPAHDFNDYDVGKRNNLEIINIFSEDGKINNNAISSYVGLDRFEARKKILNELKEKDFFVKEENIKNKVPYGDRSNSVIEPFLTEQWFADAKKLAVKAKKIVKSKKTNFFPVNWSKTYFQWMNNIEPWCISRQLWWGHQIPAWYGPDNKIFVELNEKDALKAAKKFYKKDVKLKRDPDVLDTWFSSGLWPFATLGWPKKNDYLKKFYPTTVLVTGFDIIFFWVARMVMFGMELLNKEPFKDIYVHALVRDEKGQKMSKSKGNVIDPLDLIKKYSADALRFTLLSMASPGTDVKLSEDRVKGYRNFLNKLWN

SEQ ID NO: 192170 - protein, 125 aa, Unknown
  Bacterial polypetide isolated from the Sargasso Sea
MVNGAGLAMGTMDTIKLYDGEPANFLDVGGTATKERVSKAFKLILSDQNVKGILINIFGGIVRCDLIAQGIIDAIRERSVSVPIVVRLQGNKSEEGKSILNDSGLNLIGEDSLQEASKKIVELVK

SEQ ID NO: 192171 - protein, 277 aa, Unknown
  Bacterial polypetide isolated from the Sargasso Sea
TGSEGLFHAQQMLDYGSNVVCGVTPGKGGQTVTEKNLPVFNSIEEAKKEFSIDATVIFVPPRFAANAILEAINQNIGLIVCISEGIPVLDMKKVKSALDNSSSTLIGPNCPGLITAEESKIGITPGFICKKGSIGILSRSGTLTYEAIDQIVNVELGMTTAVGIGGDPIIGSSMIDILKHFANDDETKGVVMIGEIGGSMENEAAEWIKDNFNKPVVSFIAGQTAPKGKRMGHAGAIISEGSETADAKIKILKECGVSVAKTVSEIGETMLKMIEEK

SEQ ID NO: 192172 - protein, 180 aa, Unknown
  Bacterial polypetide isolated from the Sargasso Sea
MLKDSDSILLGPNCPGIITPEETKIGIMPGFIHQKGSVGIISRSGTLTYEAVHQTSMCGLGQSTCIGIGGDPIKGLNFIECLSLFEKDSATEGIIMVGEIGGSDEEKAAEFIKNKITKPVVAYVAGVSAPPGKRMGHAGAIVTGNEGTASSKYKALNDAGVKTTDSPALIGEIMKELLNQ

SEQ ID NO: 192173 - protein, 159 aa, Unknown
  Bacterial polypetide isolated from the Sargasso Sea
MSVLINKNTKLICQGFTGAHGTFHSEQSIKYGTNLVGGVTPGKGGQTHLNKPVFNSVKEAKDKTNANATMIYVPAKFAAAAIIEAIEAKIELIVCITEGIPILDMLKVKEKLSNSASRLIGPNCPGIITPDECKIGIMPGNIHKKGSVGIVSRSGTLTY

SEQ ID NO: 192174 - protein, 142 aa, Unknown
  Bacterial polypetide isolated from the Sargasso Sea
ASKHDLAYIKLDGSIGCMVNGAGLAMATMDIIKLHGQEPANFLDVGGGASKEKVAAAFKIILSDKNVKGILINIFGGIMRCDVLAQGIVEAAKETKINIPLVVRLAGTNSKEGKKILDESGLKIISASDLGDAAKKIVKQVE

SEQ ID NO: 192175 - protein, 265 aa, Unknown
  Bacterial polypetide isolated from the Sargasso Sea
KLMMMVSDAGGVDIEDVAEKTPERIQYVYFDNLEDFTISDSLQNKLNFSINEFTQFKEIVSNLCKAYVEIDASLIEINPLVVTKDEKLILLDAKINIDDNALYRQADIEKLKDTSEENDLELEASENDMVYIKLDGKIGCMVNGAGLAMATMDIIKQFGMEPANFLDLGGTANKERAIKAFKIIQSDKNVKSVFINIFGGIIHCDMIANGIIDAIKELDFKLPVVVRFQGTNSKEGRDIINNSSLGLISIDDFSNAAQKAVELSE

SEQ ID NO: 192176 - protein, 218 aa, Unknown
  Bacterial polypetide isolated from the Sargasso Sea
MSILVNKNTRLICQGFTGSQGTYHSEQAIAYGTNLIGGVTPGKGGQTHLNLPVFNTVDEAVKQTKANATVIYVPAKFAAKAIHEAIDSNIELIVCITEGIPVLDMIEIKKRIIDTKTYLIGPNCPGLITPSECKIGIMPGFIHKKGKIGIVSRSGTLTYEAVAQTTEVGLGQSTCVGIGGDPIHGMNFVDCIKLFLEDDETEGILMIGEIGGEEEENA

SEQ ID NO: 192177 - protein, 218 aa, Unknown
  Bacterial polypetide isolated from the Sargasso Sea
MSIFIDDDTRLVVQGITGRDGSFHTSQMMEYGTRVVAGVTPGKGGQDFAGPGGEKVPIFNAMDEAVSKTGANTSVVYVPPAFAADAILEATDSGVSLVVAITEGVPVLDMARAHAFARDKGVRILGPNCPGLISPGKAKVGILPAQIVAEGPIGVVSRSGTLTYEAVFQLTSVGLGQTTCVGIGGDPLIGTNFIDCLEAFELDPGTEAVVMIGEIGGT

SEQ ID NO: 192178 - protein, 147 aa, Unknown
  Bacterial polypetide isolated from the Sargasso Sea
MSIIINKDTKVICQGFTGSQGTFHSKQAIDYGTQMVGGVTPGKGGSVHLNLPVFNSVQEAVDITKPDATVIYVPAKFATKAIHEAIDANIKIISCITEGIPVLDMVEIKKRIIEKNIFFIGPNCPGLVTPEECKIGIMPGFIHKKVK

SEQ ID NO: 192179 - protein, 211 aa, Unknown
  Bacterial polypetide isolated from the Sargasso Sea
MSILVNKNTKLICQGFTGSHGTFHSEQSILYGTNLVGGVTPRKGGQTHLGKPVFDTVKEAKEKTGANATMIYVPAKFAANAIIEAIEASIEIIVCITEGIPIIDMLKVKKSLSKSNSRLIGPNCPGIITPDECKIGIMPGNIHKKGSVGIVSRSGTLTYEAVAQTTANGLGQSTCIGIGGDPINGTNFIDCLDLFFEDESTKSIVMIGEIG

SEQ ID NO: 192180 - protein, 241 aa, Unknown
  Bacterial polypetide isolated from the Sargasso Sea
FNTVADAVKQTEANATVIYVPAKFAAKAIHEALDANIELIVCITEGIPVLDMIDIKKRIIKNKTYLIGPNCPGLITPSECKIGIMPGFIHKKGKIGIVSRSGTLTYEAVAQTTEVGLGQSTCVGIGGDPIHGMDFVDCIKLFLEDDETEGILMIGEIGGEEEENAAEFISNSKRKKPVSAFIAGQSAPKGKRMGHAGAIVSGSKGTAHSKIKSLENAGVLVSKSPASLGKTMKLAMQNGNN

SEQ ID NO: 192181 - protein, 263 aa, Unknown
  Bacterial polypetide isolated from the Sargasso Sea
MMMVSDAGGVDIEDVAEKTPERIQYVYFDNLEDFTISDSLQNKLNFSINEFNQFKEIVSNLCKAYVEIDASLIEINPLVVTKDEKLILLDAKINIDDNALYRQADIEKLKDTSEENDLELEASENDMVYIKLDGKIGCMVNGAGLAMATMDIIKQFGMEPANFLDLGGTANKERAIKAFKIIQSDKNVKSVFINIFGGIIHCDMIANGIIDAIKELEFKLPVVVRFQGTNSKEGRDIINNSSLGLISIDDFSNAAQKAVELSE

SEQ ID NO: 192182 - protein, 137 aa, Unknown
  Bacterial polypetide isolated from the Sargasso Sea
PSLYKLDGSIGCMVNGAGLAMATMDIIKLYGEEPANFLDVGGGASKEKVSAAFKIILSDKNVKGILINIFGGIMRCDVLAQGVVDAAKEMKINVPLVVRLAGTNFKEGKEILDNSGLKLISAENLDDAAKKIVEAIK

SEQ ID NO: 192183 - protein, 282 aa, Unknown
  Bacterial polypetide isolated from the Sargasso Sea
SKVLVQGFTGSEGTFHSEQMIEYGTNVVCGVTPGKGGSTHLNKPVYNSVQEAVINEDINTSIVFVPPAFAADAIMEAAESGIKTIVAITEGIPVSDMTKVVSYIKRKNVRLIGPNCPGIITPEEAKIGIMPGFVFQKGNIGIVSKSGTLTYEAADQVVKAGYGISTAIGVGGDPIIGTTLLDSVQLFMNDESTDLIVLIGEIGGQLEIDAAKWVAENGNKKPVVGFIAGETAPKGRKMGHAGAIIGGKDDTATAKKRIMRESGISVVDSPADIGKTVKQILN

SEQ ID NO: 192184 - protein, 296 aa, Unknown
  Bacterial polypetide isolated from the Sargasso Sea
MSVLIDKKTKIIVQGFTGKMGSFHAEEMIKYGTNVVGGVTPGKGGMKHLNLPVFNTVKEAVKNTGASASILFVPPAFAADSAMEAADAGIKTCVAIVDGIPSHDMIKIKRYMRRYSRTEKMTLVGPNCAGVISPGKAMLGIMPGHIYKEGKIGIIGRSGTLGYEAAQQLKNLNIGVSTSVGIGGDPINGSSFKDILEKFEQDDETEAVLMIGEIGGPQEVAAGKFAKENMKKPVIAYIAGLTAPKGRVMGHAGAIVSAYGESAVEKVELLKECGVIISKNPSVMGETVKLALNSKT

SEQ ID NO: 192185 - protein, 248 aa, Unknown
  Bacterial polypetide isolated from the Sargasso Sea
AEKTPERIQYVYFDNLEDFTISDSLQNKLNFSINEFNQFKEIVSNLCKAYVEIDASLIEINPLVVTKDEKLILLDAKINIDDNALYRQADIEKLKDTSEENGLELEASENEMVYIKLDGKIGCMVNGAGLAMATMDIIKQFGMEPANFLDLGGTANKERAIKAFKIIQSDKNVKSVFINIFGGIIHCDMIANGIIDAIKELDFKLPVVVRFQGTNSKEGRDIINNSSLGLISIDDFSNAAQKAVELSE

SEQ ID NO: 192186 - protein, 303 aa, Unknown
  Bacterial polypetide isolated from the Sargasso Sea
RGAGKFLKPFNTKGGVQITESIDDAQKIAKGMMGNILITKQTGKEGKLVNRIYLEAGCEIDREYYLSILLDRNQSKLMMMVSDAGGVDIEDVAEKTPERIQYVNFDNLEDFTISDSLQNKLNFSINEFNQFKEIVSNLCKAYVEIDASLIEINPLVVTKDEKLILLDAKINIDDNALYRQTDIEKLKDTSEENDLELEASENDMVYIKLDGKIGCMVNGAGLAMATMDIIKQFGMEPANFLDLGGTANKERAIKAFKIIQSDKNVKSVFINIFGGIIHCDMIANGIIDAIKELEFKLPVVVRF

SEQ ID NO: 192187 - protein, 162 aa, Unknown
  Bacterial polypetide isolated from the Sargasso Sea
DNNIKIIVCITEGIPILDMVEIKKRIIEKNIILIGPNCPGIVTPEECKIGIMPGFIHKKGKIGIVSRSGTLTYEAVWQTSEIGLGQTTCIGIGGDPVHGLNFIDCLKLFLEDDETEGILMIGEIGGSAEEEAAEFISKSSIKKPISAFIAGISAPKGKRMGQ

SEQ ID NO: 192188 - protein, 224 aa, Unknown
  Bacterial polypetide isolated from the Sargasso Sea
DVSMIFVPAKFAADAMKSAIESEIGLIVCITEGVPVQDMIEVKAMLKGSDSILLGPNCPGIITPEETKIGIMPGFIHQKGSVGIISRSGTLTYEAVHQTSMCGLGQSTCIGIGGDPIKGLNFIECLSLFEKDPATEGIVMVGEIGGSDEEKAAEFIKDSITKPVVAYIAGVSAPPGKRMGHAGAIVTGTEGTALSKYKALNDAGVKTTDSPALIGEIMKELLNH

SEQ ID NO: 192189 - protein, 240 aa, Unknown
  Bacterial polypetide isolated from the Sargasso Sea
HPKKAGTDVDGVPIYANVAEAVETTGATASCIFIPAAGVRDAVMEAAEGGVKFIVAVTEGVPAHDEAIFYNQLKRDYPDVQLLGPNCPGIISPGKCNIGITAGHIAKPGGPVGIVSRSGTLTYQALYELKQKDIGVTTCVGIGGDPVPGTSFIDCLEAFEADPETKAIMMIGEIGGSAEEEAAEYIKDHVTKPVSSYIAGVTAPPGKKMGHAGAIVSGGKGTAKAKMEALEAAGVRVGNN

SEQ ID NO: 192190 - protein, 288 aa, Unknown
  Bacterial polypetide isolated from the Sargasso Sea
MTVLIDKNSKIIIQGFTGKMGTFHADEMIKYGSNVVGGVTPGKGGSKHLNLPVFNTVKDAVSETGADASILFVPPAFAADSAMEAADAGIKTCVAIVDGIPSHDMIRIKRYMRRYTKSSKMTLVGPNCAGIISPGKSMLGIMPGHIYKEGRIGIISRSGTLGYEAAQQLKNLNIGVSTSVGIGGDPINGSSFRDIIEKFETDDETDAILMIGEIGGPQEVAAGEFAKENMKKPVIAYIAGLTAPKGRVMGHAGAIVSAYGESAIEKVEILKECGITISKNPSVMGDTV

SEQ ID NO: 192191 - protein, 180 aa, Unknown
  Bacterial polypetide isolated from the Sargasso Sea
MSVLINKNTKVICQGFTGSHGTFHSEQAIEYGTNLVGGVTPKKGGQKHLERPVFNTVLEAKNEVGADATMIYVPAKFAAAAIIEAIDASIDLIVCITEGIPIQDMLKVRQSLANSNSRLIGPNCPGIITPDECKIGIMPGNIHKRGTVGIVSRSGTLTYEAVAQTTENGLGQSTCIGIGG

SEQ ID NO: 192192 - protein, 155 aa, Unknown
  Bacterial polypetide isolated from the Sargasso Sea
KDLTEEDPLELQAAEHDMNYVKLDGSIGCMVNGAGLAMATMDIIKQFGEEPANFLDLGGTANKDRVIMGFKTIQSDPNVKSILINIFGGIIHCDMIANGIVEAVKELNFKLPLVVRFQGTNASQGRDVINNSSLGLISIDDFTEAAKKVVELAKE

SEQ ID NO: 192193 - protein, 196 aa, Unknown
  Bacterial polypetide isolated from the Sargasso Sea
MSIIINKKTKVICQGFTGSQGTFHSEQAIKYGTQMVGGVTPGKGGTNHLNLPVFNSVQEAVKITGANATVIYVPAKFATKAIHEALDVGIEIIVCITEGIPVLDMVEIKKRTVEQKTKFIGPNCPGIVTPGECKIGIMPGFIHKKGKIGIVSRSGTLTYEAVWQTSQVGLGQTTCVGIGGDPVHGMNFIDCINLFL

SEQ ID NO: 192194 - protein, 276 aa, Unknown
  Bacterial polypetide isolated from the Sargasso Sea
LLDRSTCKNIIMYSTEGGMDIESVAEKTPELIYTEIIDPKIGILPFQARKVAFNLGLSGNAFKEMIKFITSLYNAYLKSDASLFEINPVLKTSDNKIIAVDSKVSIDDNSLFRQKEISNLRDFREENPIEVEANNAGLSYVDLDGNVGCMVNGAGLAMATMDLIKQAGGDPANFLDVGGTADSSRVETAFKLILKDVNVKAILVNIFGGIVRCDRVAEGIVKAFTNLKDSINVPIIVRLQGTNSDKAKKIIDSSGLNVISAIGFQEAAEKVNKAIN

SEQ ID NO: 192195 - protein, 172 aa, Unknown
  Bacterial polypetide isolated from the Sargasso Sea
PNCPGVITPEACKIGIMPGHIHKRGSVGVVSRSGTLTYEAVKQTSDVGLGQSSCIGIGGDPVKGTEHIDVLEWFLRDDETESIIMIGEIGGSAEEEAAQFLKDEAKKGRSKPTAGFIAGRTAPPGRRMGHAGAIVAGGKGGAEDKIEAMQSAGIIVAESPGSLGEAVLKAIG

SEQ ID NO: 192196 - protein, 263 aa, Unknown
  Bacterial polypetide isolated from the Sargasso Sea
MLEYGTNIVAGVTPGKGGMTHLGIPVYNSVSEAMNKSEINTSIIFVPPMFAADAIMEAVESNIKTIVAITEGIPTADMIRVKAYIKNKGVVLIGPNCPGIITPDEAKVGIMPGFVFKKGRVGIVSKSGTLTYEAADQVVKSGYGISTAIGVGGDPIIGTTLLDSIKLFMDDPETDIIVLIGEIGGQLEIEAANWVKSNGNKKPVVGFIAGETAPKGRKMGHAGAIIGGKDDTASAKKSIMRDCGISVVDSPAEIGSNVQKILN

SEQ ID NO: 192197 - protein, 273 aa, Unknown
  Bacterial polypetide isolated from the Sargasso Sea
SYYGRLNREYGTQVVAGTHPKKGGTEFEGVPIFSSVAEAVNETGATASCIFIPAAGVKGAVLEAAEGGVKFIVAITEGVPAHDEAFFFNQLKHEYPDVQLLGPNCPGIISPGKCNIGITAGHIAKPGGPVGIVSRSGTLTYQALYELKQKDIGVTTCVGIGGDPVPGTSFIDCLRAFEADPETKAVMMIGEIGGSAEEEAADFIKEHMTKPVSSYIAGVTAPPGKKMGHAGAIVSGGKGTAQAKMEALESAGVRVGQNPTEAGELMAEIVATL

SEQ ID NO: 192198 - protein, 141 aa, Unknown
  Bacterial polypetide isolated from the Sargasso Sea
VSRSGTLTYEAVAQTTENGLGQSTCIGIGGDPINGTNFIDCLDLFLNDADTQSILMIGEIGGSAEEEAAEFVKNHKIKKPIVGFIAGITAPPGRRMGHAGAIISGGKGGAEDKIKKMEECGITIAKSPSIIGKTLFNKLSN

SEQ ID NO: 192199 - protein, 200 aa, Unknown
  Bacterial polypetide isolated from the Sargasso Sea
ILIDKDASLIEINPLIITKNGKLICLDAKMNFDDNAIYRRPEILDLRDLNEEEPTEVEASKHGLAYIKLDGSIGCMVNGAGLAMATMDIIKLYGKEPANFLDVGGGASKEKVSAAFKLILSDKNVKGILINIFGGIMRCDVLAEGVVNAAKEVNLSVPLVVRLAGTNFKEGKKILDQSGLKILSATDLNDAAKKIVKAIE

SEQ ID NO: 192200 - protein, 160 aa, Unknown
  Bacterial polypetide isolated from the Sargasso Sea
RTDVAGMRDLSAEPASERKAREAGLSYVKLDGNVGCCVNGAGLAMATMDLVKYYGGEPANFLDIGGSSNPDKVVSALEIITSDPNVRVILFNIFGGITRCDDVANGIVEATKRIDIQQPIVIRLTGTNEELGLKILQEAGFSAYTSMDDVVEKAVDLAKG

SEQ ID NO: 192201 - protein, 183 aa, Unknown
  Bacterial polypetide isolated from the Sargasso Sea
MSVLVNKDTRLICQGFTGSHGTFHSEQAIKYGTKLVGGVTPKKGGQKHLGLPVFNTVKEAKENEGVNASMIYVPAKFAAAAIIEAIDASIELIVCITEGIPIQDMLKVKKKLFKSNCRLIGPNCPGIITPDECKIGIMPGNIHKKGSVGIVSRSGTLTYEAVSQTTENGLGQSTCIGIGGDPN

SEQ ID NO: 192202 - protein, 114 aa, Unknown
  Bacterial polypetide isolated from the Sargasso Sea
MDIIKLYGKEPANFLDVGGGASKEKVSAAFKIILSDKNVKGILINIFGGIMRCDVLAQGVVDAAKEININVPLVVRLAGTNFQEGKNILDNSDLKLISAENLDDAAKKIVEAIR

SEQ ID NO: 192203 - protein, 145 aa, Unknown
  Bacterial polypetide isolated from the Sargasso Sea
IANWRDPSQEDDKERKAKEFDLNYVTLEGNIACMVNGAGLAMATMDIIKLTGGEPANFLDVGGGTTAERVAEAFKIIVSDNKIKAILVNIFGGIVRCDLIAEGVIAAVKEVGISVPVVVRLEGTNVDAGKKMLSESGLDILSAHN

SEQ ID NO: 192204 - protein, 247 aa, Unknown
  Bacterial polypetide isolated from the Sargasso Sea
GTYHSQQAIDYGTKMVGGVTPGKGGTTHLDLPVFNTVKEAKDHTQANATVIYVPAKFATKAIHEALDADIKIITCITEGIPVLDMVEIKKRIIEQKTHFIGPNCPGLVTPGECKIGIMPGFIHQPGKIGIVSRSGTLTYEAVWQTSQVGLGQTTCVGIGGDPVHGMNFIDCLDLFLKDESTKGILMIGEIGGTAEEDAAEFISKSSIKKPMSAFIAGVSAPKGKRMGHAGAIISGNKGTAQSKIDAL

SEQ ID NO: 192205 - protein, 135 aa, Unknown
  Bacterial polypetide isolated from the Sargasso Sea
LTYEAVAQTTENGLGQSTCIGIGGDPINGTNFIDCLDLFLNDNETESILMIGEIGGSAEEEAAEFVKSHKIKKPMVGFIAGITAPPGRRMGHAGAIISGGKGGAEDKIKKMEECGITVAKSPSIIGKTLFNKLSN

SEQ ID NO: 192206 - protein, 125 aa, Unknown
  Bacterial polypetide isolated from the Sargasso Sea
VNGAGLAMATMDIIKLYGAEPANFLDVGGSATTERVTAAFKIITADPNVKGILVNIFGGIMRCDVIAEGVVQAAKDINLEVPLVVRLEGTKVNEGKAIINGSGLNVIAANDLDDAAQKIVKAVKG

SEQ ID NO: 192207 - protein, 274 aa, Unknown
  Bacterial polypetide isolated from the Sargasso Sea
MSVLVNKNTKVICQGFTGTHGTFHSEQAINYGTQLVGGVTPKKGGQKHLGLPVFDTVIEAKEKTGANATMIYVPPRFAAAAILEAIDANLDLIVCITEGIPVFDMMKVKQTLLKSKSRLIGPNCPGIITPEECKIGIMPGNIHKKGSVGIVSRSGTLTYEAVAQTSQNGLGQSTCIGIGGDPINGTNFIDCLELFLKDNDTHSIVMIGEIGGSAEEDAAEFLKKSKVKKPTVGFVAGLTAPPGRRMGHAGAIISGGKGGAEDKIEFMKSAGITI

SEQ ID NO: 192208 - protein, 171 aa, Unknown
  Bacterial polypetide isolated from the Sargasso Sea
MSVLINKNTKVICQGFTGSHGTFHSEQAIKYGTNLVGGVTPNKGGQTHLERPVFNTVKEAKDVTDANATMIYVPAKFAAAAIIEAIESSIELIVCITEGIPVLDMLKVKKKLTNSKSRLIGPNCPGIITPDECKIGIMPGNIHKKGSVGIVSRSGTLTYEAVAQTTENGLG

SEQ ID NO: 192209 - protein, 167 aa, Unknown
  Bacterial polypetide isolated from the Sargasso Sea
MSILVNKKTKVICQGFTGAHGTFHSEQAISYGTNLVGGVTPKKGGQTHLGKPVFNTVKEAVEKTKANATMIYVPAKFASSAIIEAIESEIPLIVCITEGIPVLDMISVKEKISKSKSRLIGPNCPGIITPDECKIGIMPGNIHKKGSCGIISRSGTLTYEAVAQTSQ

SEQ ID NO: 192210 - protein, 147 aa, Unknown
  Bacterial polypetide isolated from the Sargasso Sea
PTEVEASKHDLSYIKLNGQIGCMVNGAGLAMATMDIIKLYGSEPANFLDVGGGASREKVSAAFKIILSDSNVKGILINIFGGIMRCDVLAQGVVDAAKETNLSIPLVVRLAGTNEESGKEILKKSNLKIISANDLKDAAKKIIEKTK

SEQ ID NO: 192211 - protein, 208 aa, Unknown
  Bacterial polypetide isolated from the Sargasso Sea
EAIDASMELIVCITEGIPILDMLKVKQKLSGSNSRLIGPNCPGIITPDECKIGIMPGNIHKKGSVGIVSRSGTLTYEAVAQTTANGLGQSTCIGIGGDPINGTNFIDCLDLFLNDPETESILMIGEIGGIAEEEASDFIKNHKIKKPMVGFIAGVTAPPGRRMGHAGAIISGGKGGASEKIKTMEDAGITIAKSPADIGKTLLNKLSN

SEQ ID NO: 192212 - protein, 171 aa, Unknown
  Bacterial polypetide isolated from the Sargasso Sea
MSVLVNKKTRLICQGFTGTHGTFHSEQAIKYGTNLVGGVTPKKGGTKHLDLPVFNTVEEAKKNTNPNATMIYVPPKFAANAIIEAIEAKIELIVCITEGIPINDMLKVKGELSKSKSRLIGPNCPGIITPEECKIGIMPGNIHKKGSVGIVSRSGTLTYEAVAQTSKNKMG

SEQ ID NO: 192213 - protein, 157 aa, Unknown
  Bacterial polypetide isolated from the Sargasso Sea
MSVLVNKNTKVICQGFTGSHGTFHSEQAIKYGTNLVGGVTPKKGGQKHLDKPVFNSVAEAKAEVGADATMIYVPAKFAAFAIIEAIEASVELIVCITEGIPIQDMIKVKQKLKGSKSRLIGPNCPGIITPEECKIGIMPGNIHKRGSVGIVSRSGTL

SEQ ID NO: 192214 - protein, 138 aa, Unknown
  Bacterial polypetide isolated from the Sargasso Sea
DLSYIKLDGSIGCMVNGAGLAMATMDIIKLYGEEPANFLDVGGGASKEKVSAAFKIILSDKNVKGILINIFGGIMRCDVLAQGVVDAAKEINIKVPLVVRLAGTNFKEGKKILDYSGLKLISADNLDDAAKKIVEAIK

SEQ ID NO: 192215 - protein, 285 aa, Unknown
  Bacterial polypetide isolated from the Sargasso Sea
GRIGAIHSVVFGGFAANELASRIDDSKAKIIISASCGYEPGRTVHYKPLLNKAIEIANHKPEKCIIWQREKDKAELDPKKDIDWLDALKGAKPTECEKMNSNDYAYILYTSGTTGTPKGIVRDIGGHIVALKWTMKNIYNINQDDVWWSASDIGWIVGHSYIVYAPLFYGCTTVLFEGKPVGTPDAGVFWRIISDYKVKSLFTAPTAIRAIKKEDPDGKFFKKYDLSNFDTLFLAGERADPDTIKWFEKLSNAPVIDHWWQTETSWAISSNCAGIEKFPIKYGSA

SEQ ID NO: 192216 - protein, 175 aa, Unknown
  Bacterial polypetide isolated from the Sargasso Sea
MSVLVNKETRLICQGFTGKHGTFHSEQAIKYGTKLVGGVTPKKGGEKHLGLPVFNTVKEAKDSEGVNATMIYVPAKFAAAAIIEAIDASIELIVCITEGIPIQDMLKVKQKLSQSKSRLIGPNCPGIITPDECKIGIMPGNIHKKGSVGIVSRSGTLTYEAVAQTTENGLGQITC

SEQ ID NO: 192217 - protein, 211 aa, Unknown
  Bacterial polypetide isolated from the Sargasso Sea
MSVLVNKNTRVICQGFTGSHGTFHSEQSIKYGTNLVGGVTPKKGGQTHLDRPVFNTVLEAKNATDANATMIYVPAKFAASAIMEAIDANIDLIVCITEGIPVLDMLKVKKYLSKSKSRLIGPNCPGIITPDECKIGIMPGNIHKKGSVGIVSRSGTLTYEAVAQTTKNGLGQSTCIGIGGDPINGTNFIDCLDLFLKDPDTESILMIGEIG

SEQ ID NO: 192218 - protein, 106 aa, Unknown
  Bacterial polypetide isolated from the Sargasso Sea
EEPANFLDVGGGASKEKVSAAFKIILSDKNVKGILINIFGGIMKCDVLAQGVVDAAKETKIHVPLVVRLAGTNFEQGQKILDSSGLKIISASDLSDAAKKIVEEIR

SEQ ID NO: 192219 - protein, 237 aa, Unknown
  Bacterial polypetide isolated from the Sargasso Sea
IKYGTNLVGGVTPKKGGQIHLDRPVFNTVLEAKNATDANATMIYVPAKFAASAIVEAIDANIDLIVCITEGIPILDMLKVKKYLSKSKSRLIGPNCPGIITPDECKIGIMPGNIHKKGSVGIVSRSGTLTYEAVAQTTENGLGQSTCIGIGGDPINGTNFIDCLDLFLKDPDTESILMIGEIGGSAEEEASEFVKNHKIKKPMVGFIAGVTAPPGRRMGHAGAIISGGKGGADDKIK

SEQ ID NO: 192220 - protein, 167 aa, Unknown
  Bacterial polypetide isolated from the Sargasso Sea
PGIITPDECKIGIMPGNIHKKGTVGIVSRSGTLTYEAVAQTSVNGMGQSTCIGIGGDPVNGTNFIDCLELFLKDEETKSIVMIGEIGGSAEEDAAEFLKREKIKKPMVGFIAGLTAPPGRRMGHAGAIISGGKGGAEDKIEVMKSAGITISKSPADIGKTLYQKLNG

SEQ ID NO: 192221 - protein, 283 aa, Unknown
  Bacterial polypetide isolated from the Sargasso Sea
AILVDSETRLLVQGLGRDGSFQASRTLAYGTNMVAAVHPGRNGQKFENNVPFFSQVADAVDQTGANTGIIFVPAPFAMDAIIEQVDAGLELVVCITEGVPVIDMVKVMAYIKDKPTRLIGSNCPGVLSPGYKAKVGIIPSNIVKPGNVGVVSRSGTLTYEAIAQLVQHGMGQSTCVGIGGDPVHGTTFTDVLELFEADKETEAIVLIGEIGGTREQLAADYIKKHINKPVVAAIAGQSAPAGKRMGHAGAIITGKAAMASEKIKTLAEAGVHIAESPALIGAK

SEQ ID NO: 192222 - protein, 215 aa, Unknown
  Bacterial polypetide isolated from the Sargasso Sea
FKDMVKFVISLYKAYVGSDASLFEINPVLKTSDDKIVAVDAKVTLDDNGLFRHKEFEAMRDLSEENPVEVEAREVGLNYVDLDGNVGCMVNGAGLAMATMDLIKQAGGEPANFLDVGGTADANRVETAFRLILKDPKVKAILVNIFGGIVRCDRVAQGIVDAYKNLGDSIKVPIIVRLQGTNSDIAKELIDSSGLNVLSATAFQEAADKVQETLL

SEQ ID NO: 192223 - protein, 265 aa, Unknown
  Bacterial polypetide isolated from the Sargasso Sea
MSVLVDKNTKVICQGFTGKHGTFHSEQALKYGTRLVGGVTPKKGGQKHLDLPVFDTVQEAKEKTSADATMIYVPPKFAGAAIIEAIEAKLKLIVCITEGIPVLDMLRVKQVLKKSKSRLIGPNCPGIITPDECKIGIMPGNIHKKGTVGIVSRSGTLTYEAVAQTSENGIGQSTCIGIGGDPINGTNFIDCLELFLKDDETKSIVMIGEIGGSAEEEAAEFLRKEKIKKPMVGFIAGLTAPPGRRMGHAGAIISGGKGAAEDKIE

SEQ ID NO: 192224 - protein, 318 aa, Unknown
  Bacterial polypetide isolated from the Sargasso Sea
GGRGAGKFLKPFNTKGGVQITESIDDAQKIAKGMMGNILITKQTGNEGKLVNRIYLEAGCEIDREYYLSILLDRNQSKLMMMVSDAGGVDIEDVAEKTPERIQYVYFHNLEDFTISDSLQNKLNFSINEFNQFKEIVSNLCKAYVEIDASLIEINPLVVTKDEKLILLDAKINIDDNALYRQADIEKLKDTSEENDLELEASENDMVYIKLDGKIGCMVNGAGLAMATMDIIKQFGMEPANFLDLGGTANKERAIKAFKIIQSDKNVKSVFINIFGGIIHCDMIANGIIDAIKELDFKLPCCCTFSRNKFYRGKRHYK

SEQ ID NO: 192225 - protein, 159 aa, Unknown
  Bacterial polypetide isolated from the Sargasso Sea
EIEKLKDTSEENELELEASENEMAYIKLNGKIGCMVNGAGLAMATMDIIKQFGMEPANFLDLGGTANKERAVKAFKIIQSDINVKSVFINIFGGIIHCDMIANGIIDAIKELDFKLPVVVRFKGTNSQKGRDIINNSSLGLISIDDFSSAAQKAVELSE

SEQ ID NO: 192226 - protein, 196 aa, Unknown
  Bacterial polypetide isolated from the Sargasso Sea
MSIIIHKDTKVLCQGFTGSQGTYHSKQAIDYGTCMVGGVTPGKGGSTHLNLPVFNTVQEAVSKTKPDATVIYVPAKFATKAIHEALDANIKIITCITEGIPILDMVEIKKRIIKQNVYFIGPNCPGLVTADECKIGIMPGFIHKKGKIGIVSRSGTLTYEAVWQTSEIGLGQTTCVGIGGDPIQGMSFIDCIDLFL

SEQ ID NO: 192227 - protein, 160 aa, Unknown
  Bacterial polypetide isolated from the Sargasso Sea
ECKIGIMPGNIHKKGSVGIVSRSGTLTYEAVAQTTANGLGQSTCIGIGGDPINGTNFIDCLDLFLNDPETESILMIGEIGGSAEEEASEFIKNNKIKKPTVGFVAGLTAPSGRRMGHAGAIISKGKGGAKEKIEIMEDAGITVAKSPAELGKTLLNKLSL

SEQ ID NO: 192228 - protein, 225 aa, Unknown
  Bacterial polypetide isolated from the Sargasso Sea
KIIKPFNFTQEQKKIANKLINSIYKILIDKDAILIEINPLIVTKKGKILCLDAKINFDDNALFRRPEILKLRDLNEEEPAEVEASKFDLSYIKLNGSIGCMVNGAGLAMATMDIIKLYGEEPANFLDVGGGASKDKVKAALKLIIDDKNVKGILINIFGGIMRCDVLAQGVVDAAKESSINIPLVVRLAGTNFKEGKSILDKSGLEILSAEDLNDAAQKIVRAIK

SEQ ID NO: 192229 - protein, 256 aa, Unknown
  Bacterial polypetide isolated from the Sargasso Sea
MDIEEVANKTPNKIITTKVDFEKEISDASCENIIKIFNLNNENKSEAVKLIKSIYKMFVSTDASMVEINPLILTKDKKIICLDAKINFDDNALFKHKEIAELRDLNEEEPTETEANKHDLAYIKLDGSIGCMVNGAGLAMATMDIIKLYGEEPANFLDVGGGASKEKVSAAFKIILSDKNVKGILINIFGGIMKCDVLAQGVVDAAKEIKIHVPLVVRLAGTNFEKGKKILDNSGLKIISASNLSDAAKKIVKEIK

SEQ ID NO: 192230 - protein, 167 aa, Unknown
  Bacterial polypetide isolated from the Sargasso Sea
CPGVITPGECKIGIMPGHIHKPGKVGIVSRSGTLTYEAVKQTTDEGFGQSTCVGIGGDPIPGSNFIDILEMFQNDPQTEAIVMIGEIGGNAEEDAAAYIKAHVTKPVVSYIAGVTAPAGKRMGHAGAIIAGGKGTAAEKFAALEDAGVKTVRSLADIGKALREVTGW

SEQ ID NO: 192231 - protein, 205 aa, Unknown
  Bacterial polypetide isolated from the Sargasso Sea
MSILINRHTRLICQGITGSQGTYHSEQAIAYGTNVVGGVTPGKGGQTHLELPVFNTVKEAVDETNANATVIYVPAKFAAKAIHEALDSKIELIVCITEGIPVLDMIEIKKRVLNQKTFLVGPNCPGLITPEECKIGIMPGFIHKKGKIGIVSRSGTLTYEAVAQTTEVGLGQTTCVGIGGDPIHGMNFIDCLKLFLDDDETEGIL

SEQ ID NO: 192232 - protein, 284 aa, Unknown
  Bacterial polypetide isolated from the Sargasso Sea
MTVLVDKKSKIIIQGFTGKMGSFHADEMIKYGSNVVGGVTPGKGGSKHLDLPVFNTVKDAVNETGADASILFVPPAFAADSAMEAADAGIKICVAIVDGIPSHDMIRIKRYMRRYTKSSKMTLVGPNCAGIISPGKSMLGIMPGHIYKEGRVGIISRSGTLGYEAAQQLKNLNIGVSTSVGIGGDPINGSSFRDIIEKFETDEETDAVLMIGEIGGPQEVAAGEFAKENMKKPVIAYIAGLTAPKGRVMGHAGAIVSAYGESAIEKVEILKEYGITISKNPSVM

SEQ ID NO: 192233 - protein, 134 aa, Unknown
  Bacterial polypetide isolated from the Sargasso Sea
IKLDGSIGCMVNGAGLAMATMDIIKLYGEEPANFLDVGGGASKEKVSAAFKIILSDKNVKGILINIFGGIMRCDVLAQGVVDAAKEIKIKVPLVVRLAGTKFKEGKKILDNSGLKIISASNLSDAAKKIVQAIK

SEQ ID NO: 192234 - protein, 273 aa, Unknown
  Bacterial polypetide isolated from the Sargasso Sea
MSVLVNKNTKVICQGFTGTHGTFHSEQAIKYGTQLVGGVTPKKGGQKHLDLPVFNTVIEAKETTEANATMIYVPPKFAAAAILEAIDANLDLIVCITEGIPVFDMMKVKKALSKSKSRLIGPNCPGIITPEECKIGIMPGNIHKKGSVGIISRSGTLTYEAVAQTSHNGLGQSTCIGIGGDPINGTNFIDCLELFLKDDDTHSIIMIGEIGGSAEEEAAEFLKKSKIKKPTVGFVAGLTAPPGRRMGHAGAIISGGKGGAEGKIEVMKSARNH

SEQ ID NO: 192235 - protein, 249 aa, Unknown
  Bacterial polypetide isolated from the Sargasso Sea
MSVLVNKNTKVICQGFTGTHGTFHSEQSIKYGTQLVGGVTPKKGGQKHLGLPVFNSVLEAKKTTKAEATMIYVPPKFAADAIIEAIDAKIALIVCITEGIPIMDMLKVKLALKNSESRLIGPNCPGIITPDECKIGIMPGSIHKKGSVGIVSRSGTLTYEAVAQTSANGLGQSTCIGIGGDPINGTNFIDCLELFLKDDETDSILMIGEIGGKAEEEAADFIKKSKVKKPMVGFIAGLTAPPGRRMGHA

SEQ ID NO: 192236 - protein, 250 aa, Unknown
  Bacterial polypetide isolated from the Sargasso Sea
MSVLVNKNTKLICQGFTGSHGTFHSEQAIKYGTNLVGGVTPKKGGQTHLEKPVFNTVKEAVDETGANATMIYVPAKFASAAIIEAIDAKLELIVCITEGIPVLDMIKVKKKLSKSNSRLIGPNCPGIITPNECKIGIMPGNIHKKGTVGIVSRSGTLTYEAVAQTTENGLGQSTCIGIGGDPINGTNFIDCLDLFLKDDETKSILMIGEIGGSAEEEAADFIKNHEVKKPMVGFIAGVTAPPGRRMGHAG

SEQ ID NO: 192237 - protein, 188 aa, Unknown
  Bacterial polypetide isolated from the Sargasso Sea
MSVLVNKNTKLICQGFTGTHGTFHSEQSIKYGTQLVGGVTPKKGGQKHLGLPVFNTVIDAKEKTGANATMIYVPPKFAAEAILEAIDANLELVVCITEGIPVIDMMRVKQALSKSKSRLIGPNCPGIITPDECKIGIMPGNIHKKGSVGIVSRSGTLTYEAVAQTSQNGLGQSTCIGIGGDPINGTNF

SEQ ID NO: 192238 - protein, 202 aa, Unknown
  Bacterial polypetide isolated from the Sargasso Sea
MAIWIEEDAKVLVQGITGKQGMFHAGKMVEYGTNLVGGCTPGKGGQSVQLDGHDYPVFNTMSEAITATDADATVIYVPPPFAGEAIMEAADAFERIKGTGVIICITEGIPTLDMVKATAYVENRENIRLIGPNCPGIITPGEYGGAKLGIMPGHIHAKGRIGIVSKSGTLTYEAVAQTMSIDEGQSTCIGIGGDPVNGTGFI

SEQ ID NO: 192239 - protein, 192 aa, Unknown
  Bacterial polypetide isolated from the Sargasso Sea
IPVLDMLKVKKHLLKSKSDLIGPNCPGIITPGECKIGIMPGNIHKKGTVGIVSRSGTLTYEAVAQTTENGLGQSTCIGIGGDPINGTNFIDCLDLFLNDPETESILMIGEIGGSAEEEASEFVKNHKIKKPIVGFIAGITAPPGRRMGHAGAIISRGKGSAEEKIKTMENAGITIAKSPADIGITLYQKLSL

SEQ ID NO: 192240 - protein, 206 aa, Unknown
  Bacterial polypetide isolated from the Sargasso Sea
VRLKLIVCITEGIPVMDMMKVKDKLSSSSSRLIGPNCPGIITPDECKIGIMPAHIHKKGNVGIVSRSGTLTYEAVYQTTVAGLGQSTCIGIGGDPINGTNFIDCLDLFLSDQETASIIMIGEIGGSAEEEAAEFLKKQTIKKPTVGFIAGTSAPPGRRMGHAGAIVSGGKGGADDKIEAMKEAGIKISNSPAALGSTLLEVLKNQI

SEQ ID NO: 192241 - protein, 237 aa, Unknown
  Bacterial polypetide isolated from the Sargasso Sea
MLGMKTFQARKLAYGLGLKGASFKEACSIFMNMYLCYQSTDSSLTEINPLIQTSDNHIIALDSKFNFDGNALFRQKEISDMRDLSEEDEMEVEAGKFNLNYIKLDGNVGCMVNGAGLAMATMDIIKLAGGDPANFLDVGGTASAETVKNGFRIILSDKNVKAILINIFGGIVRCDRVANGVVQAVKELGLEVPVVVRLEGTNAKEAQSILKSSGVSIIPAEGMKDAATKVVSAALGS

SEQ ID NO: 192242 - protein, 160 aa, Unknown
  Bacterial polypetide isolated from the Sargasso Sea
QSKIGIMPGAIHKRGGIGIVSRSGTLTYEAVSQITRVGLGQSTCIGIGGDPVNGTNFIDCLSLFEQDEQTEAIVMIGEIGGDAEEQAADYVRNNVTKPIVSFIAGQTAPPGRRMGHAGAIISGGHGTAEEKMNALREAGIHVINSLDEIGNKMLEALVKA

SEQ ID NO: 192243 - protein, 170 aa, Unknown
  Bacterial polypetide isolated from the Sargasso Sea
NIDDNALYRQADIEKLKDTSEENDLELEASENDMVYIKLDGKIGCMVNGAGLAMATMDIIKQFGMEPANFLDLGGTANKERAIKAFNIIQSDKNVKSVFINIFGGIIHCDMIANGIIDAIKELEFKLPVVIRFQGTNSKEGRDIINSSSLGLISIDDFSNAAQKAVELSE

SEQ ID NO: 192244 - protein, 205 aa, Unknown
  Bacterial polypetide isolated from the Sargasso Sea
FFNLFKCFIRTDASLAEINPLVLTNDSKIVALDCKLNFDGNALYRQKDILSLRDTNEEDPTELEADKFDLNYIKLDGNVGCMVNGAGLAMATMDIIKISGGEPANFLDVGGTASADTVKNGFKIILSDKNVKAILINIFGGIVRCDRVANGVVEAVKELGLDVPVVVRLEGTNSEEAKKILARSKLSIIPASDMKDAALKVVKSI

SEQ ID NO: 192245 - protein, 279 aa, Unknown
  Bacterial polypetide isolated from the Sargasso Sea
MSVLVNKDTKVICQGFTGTHGSFHSEQALKYGTKLVGGVTPKKGGQTHLDLPVFNTVEEAKNKTSANATMIYVPPKFAGAAIIEAIEAKIELIVCITEGIPVLDMIQVKKILNKSSSRLIGPNCPGIITPEECKIGIMPGNIHKKGSVGIVSRSGTLTYEAVAQTSSNGMGQSTCIGIGGDPINGTNFIDCLELFLKDDETKSIVMIGEIGGSAEEEAAEFLKREKVKKPMVGFIAGLTAPPGRRMGHAGAIISGGKGGAEDKIDIMKSAGITISKSPA

SEQ ID NO: 192246 - protein, 201 aa, Unknown
  Bacterial polypetide isolated from the Sargasso Sea
MSVLVNKNTKVICQGFTGSHGTFHSEQAIKYGTNLVGGVTPKKGGQKHLDKPVFNSVLDAKNSVGADATMIYVPAKFAANAIIEAIEASIELIVCITEGIPILDMLKVRKKLDGSNSRLIGPNCPGIITPDECKIGIMPGSIHKRGTVGIVSRSGNFTYEAVAQTTENGLGSSTCIGIGGDSINGTNFIDCLDLFLNDDET

SEQ ID NO: 192247 - protein, 114 aa, Unknown
  Bacterial polypetide isolated from the Sargasso Sea
MDIIKLYGEEPANFLDVGGGASKEKVSAAFKIILSDKNVKGILINIFGGIMRCDVLAQGVVDAVKEINISVPLVVRLAGTNFKEGKMILDSSGLKLISAENLDDAAKKIVEAIK

SEQ ID NO: 192248 - protein, 282 aa, Unknown
  Bacterial polypetide isolated from the Sargasso Sea
TVLVDKNSKIIIQGFTGNMGSFHADEMIKYGSNVVGGVTPGKGGSKHLDLPVFNTVKDAVNETGADASILFVPPAFAADSAMEAADAGIKICVAIVDGIPSHDMIRIKRYMRRYTKSSKMTLVGPNCAGIISPGKSMLGIMPGHIYKEGRVGIISRSGTLGYEAAQQLKNLNIGVSTSVGIGGDPINGSSFRDIIEKFESDDETDAILMIGEIGGPQEVAAGEFAKENMKKPVIAYIAGLTAPKGRVMGHAGAIVSAYGESAIEKVKILKECGITISKNPSV

SEQ ID NO: 192249 - protein, 170 aa, Unknown
  Bacterial polypetide isolated from the Sargasso Sea
LIAPGIITPNECKIGIMPGNIHKKGSVGIVSRSGTLTYEAVAQTSANGMGQSTCIGIGGDPINGTNFIDCLELFLKDEETKSIVMIGEIGGSAEEEAAEFLKREKIKKPMVGFIAGLTAPPGRRMGHAGAIISGGKGGAEDKIEIMKSAEITISKSPADIGKTLYQKLNG

SEQ ID NO: 192250 - protein, 184 aa, Unknown
  Bacterial polypetide isolated from the Sargasso Sea
EIIEQNIYFIGPNCPGLVTPDECKIGIMPGFIHKKGKIGIVSRSGTLTYEAVWQTSQIGLGQTTCVGIGGDPIHGMSFIDCIDLFLHDEETEGILMIGEIGGSAEEDAAEFIKKSSIKKPTSAFIAGITAPKGKRMGHAGAIISGNKGTAESKIKALEESNVLIAPSPAELGETMLKAMQKSYT

SEQ ID NO: 192251 - protein, 281 aa, Unknown
  Bacterial polypetide isolated from the Sargasso Sea
SKESRILCQGITGSQGSFHAEQCIEYGSNIVAGVTPGKGGSTHLDVPVFNSVAEAKADLEIDVSMIFVPAKFAADAMKSAIESEIGLIVCITEGVPVQDMIEVKAMLNGSDSIILGPNCPGIITPHETKIGIMPGFIHQKGSVGIISRSGTLTYEAVHQTSMCGLGQSTCIGIGGDPIKGLNFIECLSLFEKDPETEGIVMVGEIGGSDEEKAAEFIKENISKPVVAYIAGVSAPPGKRMGHAGAIVTGKEGTALSKYEALNDAGVATTDSPALIGKIMKD

SEQ ID NO: 192252 - protein, 202 aa, Unknown
  Bacterial polypetide isolated from the Sargasso Sea
MSILVNKDSKIIVQGITGTEGSFHAGQCLEYGGNVVGGVTPGKGGQTALEGKVPVFNSCQDAVRETGANVSLIFVPPAFAADAIMEAADAGIALVVCITEGIPVQDMITVSDFLKKTDTRLIGPNCPGLLTPGEAKVGIMPGFIAQKGSVGVISKSGTLTYEAVHQICKQGMGQSTCVGIGGDPIIGTAMIDLLELFENDPE

SEQ ID NO: 192253 - protein, 205 aa, Unknown
  Bacterial polypetide isolated from the Sargasso Sea
LKLLPALLRAFLCLTWSEIKKRIIEQKTYFIGPNCPGLVTPGECKIGIMPGFIHKPGKIGIVSRSGTLTYEAVWQTSEVGLGQTTCVGIGGDPVHGMNFIDCLDLFLQDDETKGILMIGEIGGTAEEDAADFISKSIIKKPMSAFIAGVSAPKGKRMGHAGAIISGNKGTAQSKIDALQSANIAVAPSPAKMGETMLSEMQKGYN

SEQ ID NO: 192254 - protein, 248 aa, Unknown
  Bacterial polypetide isolated from the Sargasso Sea
MSIIINKKTKVICQGFTGSQGTFHSKQAIDYGTKMVGGVTPGKGGSIHLNLPVFNSVKEAVEKTKPDATVIYVPAKFATEAIHEALDSDIKIITCITEGIPILDMIEIKKRIIKQNIFFIGPNCPGLVTPDECKIGIMPGFIHKKGKIGIVSRSGTLTYEAVWQTSEIGLGQTTCVGIGGDPIHGMSFIDCIDLFLKDKDTEGILMIGEIGGTAEEDAAEFILKSPIKKPMAAFIAGVSAPKGKRMGH

SEQ ID NO: 192255 - protein, 214 aa, Unknown
  Bacterial polypetide isolated from the Sargasso Sea
HFRSIDTGIELIVCITEGIPVADMIRVKRALKGSSSRLIGPNCPGIISPSACKIGIMPGHIHNRGVVGVISRSGTLTYEAVAQTSLAGLGQSTCVGIGGDPIKGTEHIDVLELMLKDPETEAIIMIGEIGGSAEEEAADFIKHEAKSGRIKPIAGFIAGRTAPKGRRMGHAGAIVAGGKGGAEDKIEAMKAAGIVVAESPAELGTAVLKAMSNG

SEQ ID NO: 192256 - protein, 284 aa, Unknown
  Bacterial polypetide isolated from the Sargasso Sea
SNNDTKLIVQGITGSQGLFHATQCREYGTNVVGGVTPGKGGTQVEGFDVFNSVADARKTTGANTSLIFVPAAFAPDAILEAEDAGIELIICITEGIPTNDMVSVKKVIDSSSSILIGPNCPGIITPGQAKVGIMPGYIHKEGRIGIISKSGTLTYEAVWQLTQLGIGQSSCVGIGGDPIIGSTFIDILDLFNKDDDTDGVIMIGEIGGSAEQEAAYWIKDNFKKPVAAFIAGATAPKGKRMGHAGAIVSGSSGSAEEKKTVLESVGIKVSPSPAEMGETLKSLF

SEQ ID NO: 192257 - protein, 257 aa, Unknown
  Bacterial polypetide isolated from the Sargasso Sea
MSVLVSNESRILCQGITGSQGSFHAEQCIEYGSNIVAGVTPGKGGSTHLDVPVFNSVAEAKADLEIDVSMIFVPAKFAADAMKSAIESEIGLIVCITEGVPVQDMIEVKAMLNDSDSILLGPNCPGIITPDETKIGIMPGFIHQKGSVGIISRSGTLTYEAVHQTSICGLGQSTCIGIGGDPIKGLNFIECLSLFEKDPETEGIVMVGEIGGSDEEKAAEFIKENISKPVVAYIAGVSAPPGKRMGHAGAIVTAKRE

SEQ ID NO: 192258 - protein, 168 aa, Unknown
  Bacterial polypetide isolated from the Sargasso Sea
MSIIINKDTKVICQGITGSQGTFHSQKAINYGTNLVGGVTPGKGGTKHLGLPVFNTVQEAVESTKADATVIYVPAKFATKAIHEALDAKIKTIVCITEGVPVLDMVRIKQRIIDQKTNFIGPNCPGIITPDECKIGIMPGFIHKKGKIGIVSRSGTLTYEAVWQTTKV

SEQ ID NO: 192259 - protein, 156 aa, Unknown
  Bacterial polypetide isolated from the Sargasso Sea
ALKDLSEKNEMELEASTNDMNYIKLNGEIGCMVNGAGLAMATMDIIKQFGKEPANFLDLGGTANKERAIKGFKIIQSDNNVQSVFVNIFGGIIHCDMIASGIIEAVKELHFNLPIVVRFQGTNASEGRDIINNSKLNIISVDDFTEAAKKAVELSA

SEQ ID NO: 192260 - protein, 188 aa, Unknown
  Bacterial polypetide isolated from the Sargasso Sea
LDMTKVYNYIKQKDCKLIGPNCPGIITPDEAKVGIMPGFVFKKGRVGLVSKSGTLTYEAADQIVKEGFGISTAIGIGGDPIIGTTVEDAVKFFFEDDETDCIVMIGEIGGQLENNAAQWIKKSKIKKPVIGFIAGETAPKGRTMGHAGAIVGGKDDTAAAKKSILKECGVHVADSPADIGKFVKKYIN

SEQ ID NO: 192261 - protein, 124 aa, Unknown
  Bacterial polypetide isolated from the Sargasso Sea
VNGAGLAMATMDIIKLHGEEPANFLDVGGGASKEKVSAAFKIILSDKNVKGILINIFGGIMRCDVLAQGVVDAAKEIKIEVPLVVRLAGTKFEEGKKILDNSGLEIISASDLSDAAQKVVDSIK

SEQ ID NO: 192262 - protein, 304 aa, Unknown
  Bacterial polypetide isolated from the Sargasso Sea
EYQAKQLLLDFDLPILNSKFYINNLNNIEKDLKKLNGPPWVVKSQIHAGGRGAGFFKKSVNNKGGVQIAKDIDQTVTLANAMMTNTLVTKQTGAEGKIVNRILIEESCYIKKEFYLSLIIDRNTSKLMLMISSAGGVNIEEVAEKNPNKIHTFLFENFDEIILNEKLYEQLEITSNQYKELKSIIKKLALAFRSLDASTIEINPMVLNEKGKFVLLDAKITIDDNALFRQPNIANLKDISEEDPLELQASKNGMNYVKLQGSIGCMVNGAGLAMATMDMFKLFGHEPANFLDLGGTANKERAIQ

SEQ ID NO: 192263 - protein, 212 aa, Unknown
  Bacterial polypetide isolated from the Sargasso Sea
MSIWINEASKVLVQGITGGQGTFHATRMTEYGTDVVGGVTPGKGGQVVDLPGRSVPVYDAMGQAVSETDADVSVIYVPARFAAAAIIEAADAFNETKGEGLIVCITEGIPTLDMIRCVGHISEMPGIRLIGPNCPGIITPGENGGCKVGIMPGYIHAKGRIGIISKSGTLTYEAVAQTMSVGEGQTTCIGIGGDPISGTGFIDCLAAFEEDP

SEQ ID NO: 192264 - protein, 224 aa, Unknown
  Bacterial polypetide isolated from the Sargasso Sea
IYVPAKFATKAIHEALDADIKIITCITEGIPVLDMVQIKKRIIEQKTHFIGPNCPGLVTPGECKIGIMPGFIHQPGKIGIVSRSGTLTYEAVWQTSQVGLGQTTCVGIGGDPVHGMNFIDCLDLFLKDEATKGILMIGEIGGTAEEDAAEFISKSSIKKPMSAFIAGVSAPKGKRMGHAGAIISGNKGTAQSKINALESANISVAPSPAKMGETMLTEMQKRYN

SEQ ID NO: 192265 - protein, 166 aa, Unknown
  Bacterial polypetide isolated from the Sargasso Sea
MSIIIDKNTKVICQGFTGSQGTYHSQQAIDYGTQMVGGVTPGKGGTTHLGLPVFNTVKEAKDYSQADATVIYVPAKFATQAIHEALDANIKIITCITEGIPVLDMVEIKKRIIEQKTYFIGPNCPGLVTPGECKIGIMPGFIHKPGKIGIVSRSGTLTYEASMANI

SEQ ID NO: 192266 - protein, 128 aa, Unknown
  Bacterial polypetide isolated from the Sargasso Sea
GCMVNGAGLAMATMDIIKQFGEEPANFLDLGGTANKDRVIMGFKIIQSDSNVKSILINIFGGIIHCDMIANGIVEAVKELDFKLPLVVRFQGTNASEGRDVINNSDLGLISIDDFTEAAKKVVDLAKG

SEQ ID NO: 192267 - protein, 307 aa, Unknown
  Bacterial polypetide isolated from the Sargasso Sea
AAEFMLSKPHGQPRRPRPEGLEVGTLLLAAGVDIAHEYYLAITTDRDTRRNVLIASAEGGVEIEQVAEDNPAAILKEPIHPVLGLQPHQARRLAFELGFKGKAVGQATKIMLSLAKLFDAKDCSIAEINPLIITPASDEHPDGQVLAIDAKFNFDDNALFRQKDLVALDDGSETDPAEQRAEAAGLSYIKLDGNIGCLVNGAGLAMATMDTIKHHGGDPANFLDVGGSASKEAVTEAFRIILGDPKVEGILVNIFGGIMDCSRIAGGVAEAAKEIGFKVPLVVRLEGNNAEKGREILTEASAELPTM

SEQ ID NO: 192268 - protein, 221 aa, Unknown
  Bacterial polypetide isolated from the Sargasso Sea
MSIFVNKKTKLICQGFTGSHGTFHSEQSLAYGTNLVGGVTPKKGGQTHLGKPVFNTVKEAVETTNANATMIYVPAKYAASAINEAIESDIPLIVCITEGIPILDMIKVKQKLKNSRSRLIGPNCPGIITPNECKIGIMPGNIHKKGTVGIVSRSGTLTYEAVAQTTELGLGQSTCIGIGGDPINGTNFINCLEAFLKDSGTESILIIGEIGGNDEEEAAEF

SEQ ID NO: 192269 - protein, 176 aa, Unknown
  Bacterial polypetide isolated from the Sargasso Sea
MSVLVNKNTRLICQGFTGSHGTFHSEQAIKYGTKLVGGVTPKKGGQKHLGLPVFNTVKEAKESEGANATMIYVPAKFAAAAIIEAIEASIELIVCITEGIPIQDMLKVKQKLLKSNSRLIGPNCPGIITPDECKIGIMPGNIHQRGSVGIVSRSGTLTYEAVAQTTENGLGQSTCI

SEQ ID NO: 192270 - protein, 266 aa, Unknown
  Bacterial polypetide isolated from the Sargasso Sea
YGTQMVGGVTPGKGGTRHLNLPVFNTVKEAIDQTNANASVIYVPAKYATKAIHEALDARIETIVCITEGIPVLDMVEIKKRIIEQNTKFIGPNCPGIVTPEECKIGIMPGFIHKKGNIGIVSRSGTLTYEAVWQTSKAGLGQTTCVGIGGDPVHGINFIDCINLFLKDKDTEGILMIGEIGGTAEEDAAEFINSSKIKKPISAFIAGKSAPKGKRMGHAGAIISGNKGTAQSKINALEKANVFIAPSPSLLGETMLKAMQDGGNKI

SEQ ID NO: 192271 - protein, 263 aa, Unknown
  Bacterial polypetide isolated from the Sargasso Sea
MSILVNKNSKVIVQGFTGSEGTFHATQMLEYGTNVVGGVTPGKGGLSHLEKPVFNTVYDAKKNTGANVSIIFVPPAFAADAILESIDSEVEVIVAITEGIPVKDMIKVKAALKNKKSTLIGPNCPGIITPDEAKVGIMPGFVFKKGNIGIVSKSGTLTYEAADQVVKAGYGISTAIGIGGDPIVGTSTLDAIKLFMDDNDTSGIVMIGEIGGNYEAEASKWIKKTGNKKPVVGFIAGQTAPKGKRMGHAGAIIGGKDDTAEAK

SEQ ID NO: 192272 - protein, 258 aa, Unknown
  Bacterial polypetide isolated from the Sargasso Sea
VGGVTPKKGGTEHLGLPVFDTVKEAKDKTDANATVIYVPPPFAAKAILEAIDSEMNLIVCITEGIPVMDMLEVKDKLRSSKSRLIGPNCPGIITPDECKIGIMPAHIHQKGNVGIVSRSGTLTYEAVYQTTVEGLGQSTCIGIGGDPVNGTNFIDCLELFLSDPETESIIMIGEIGGSAEEEAAEFLRKEKVKKPTVGFIAGTSAPPGRRMGHAGAIVSGGKGGAEDKIEAMKSAGIQISNSPAALGSTLLEVLKNQN

SEQ ID NO: 192273 - protein, 257 aa, Unknown
  Bacterial polypetide isolated from the Sargasso Sea
LVGGVTPNKGGQTHLNLPIFNTVNEAKNKTGANATMIYVPPKFAGNAIIEAVEAEIELIVCITEGIPILDMLKVKKKLIKSGSRLIGPNCPGIITPEECKIGIMPGSIHKKGSVGIVSRSGTLTYEAVAQTTANGMGQSTCIGIGGDPINGTNFIDCLELFLKDDQTRSIVMIGEIGGKAEEEAASFIKKEKIKKPMVGFIAGLTAPPGRRMGHAGAIISGGKGGAEDKIEFMKSAGITISKSPADIGKTLFDKLNS

SEQ ID NO: 192274 - protein, 256 aa, Unknown
  Bacterial polypetide isolated from the Sargasso Sea
TPGKGGSKHLDLPVFNTVKDAVNETGADASILFVPPAFAADSAMEAADAGIKICVAIVDGIPSHDMIRIKRYMRRYTKSSKMTLVGPNCAGIISPGKSMLGIMPGHIYKEGRVGIISRSGTLGYEAAQQLKNLNIGVSTSVGIGGDPINGSSFRDIIEKFETDEETDAILMIGEIGGPQEVAAGEFAKENMRKPVIAYIAGLTAPKGRVMGHAGAIVSAYGESAIEKVEILKECGITISKNPSVMGDTVKSVLEKM

SEQ ID NO: 192275 - protein, 243 aa, Unknown
  Bacterial polypetide isolated from the Sargasso Sea
LSRPVFNTVKEAKKETGANASMIYVPAKFAASAIIEALDADIELIVCITEGIPVLDMLRVKKKLANSNSRLIGPNCPGIITPEECKIGIMPGNIHKKGSVGIVSRSGTLTYEAVAQTTENGLGQSTCIGIGGDPINGTNFIDCLDLFLNDKETKSILMIGEIGGVAEEEAAEFFKNHKIKKPTVGFIAGITAPPGRRMGHAGAIISGGKGGAEDKIKKMEDCGITIAKSPAEIGKTLLNKLSN

SEQ ID NO: 192276 - protein, 128 aa, Unknown
  Bacterial polypetide isolated from the Sargasso Sea
IGCMVNVQGLAMATMDIIKLYGEEPANFLDVGGGASKEKVSAAFKIILSDKNVKGILINIFGGIMRCDVLAQGVVDAAKEIKIKVPLVVRLAGTNFEEGKKILENSGLKIISANDLSDAAKKVVEAIK

SEQ ID NO: 192277 - protein, 201 aa, Unknown
  Bacterial polypetide isolated from the Sargasso Sea
MSILVNDQTRVLVQGFTGSQATLHSEQSIEYGTNIVGGVTPGKGGTTHLNKPVFNSVADAVKAEEPNAALIFVPAPFCKDSILEAADSGIELIICITEGVPTLDMLIVKKKIDELGLRLIGPNCPGIITPNEAKLGIMPGSIHKKGKVGIISRSGTLTYEAVKQTTDLGFGQSSCVGIGGDPIPGSSFIDMLELFNDDEET

SEQ ID NO: 192278 - protein, 186 aa, Unknown
  Bacterial polypetide isolated from the Sargasso Sea
MSVLINKSTKVLCQGFTGSQGTFHSEQAITYGTNMIGGVTPGKGGSKHLGLPVFNTVLEAVNELDVDASVIYVPPRFAADSILEAIDAKIPLIICITEGIPVQDMIKVKKFLSNSKSRLVGPNCPGIITPGECKIGIMPGHIHLPGKIGIVSRSGTLTYEAVAQQRMLGRSITCIGIGGDPTNGTN

SEQ ID NO: 192279 - protein, 234 aa, Unknown
  Bacterial polypetide isolated from the Sargasso Sea
MSILVDKNTKVICQGFTGKHGTFHSEQALKYKTKLVGGVTPKKGGQKHLDLPVFNSVEEAKSQTGANATMIYVPPKFAGAAIIEAIEAEMELIVCITEGIPVLDMLRVKQILEKSKSRLIGPNCPGIITPEECKIGIMPGNIHKKGSVGIVSRSGTLTYEAVAQTSSNGMGQSTCIGIGGDPINGTNFIDCLELFLKDEETKSIVMIGEIGGSAEEEAAEFLKREKIKKPMVGF

SEQ ID NO: 192280 - protein, 290 aa, Unknown
  Bacterial polypetide isolated from the Sargasso Sea
MSILIDKDTKVICQGFTGSQATQHCIQCIDYGTQLVGGVTPGKGGQTHLDLPVFNSVKEAVSQTEATATIIFVPARFCKASILEAAESGISLIICITEGIPTIDMLEVKVRCDNLGVRLIGPNCPGIITPGECKMGIMPGDIHLPGKVGVISRSGTLTYEAVKQTTDLGFGQTSCVGIGGDPVPGSSFIDILDLFQNDHKTEAIVMVGEIGGTAEEAAAEFIQSNVTKPVVSYIAGVTAPAGKRMGHAGAIIAGGKGTAEDKFKALEAAGVYTVKSPADIGKGVAEITGW

SEQ ID NO: 192281 - protein, 124 aa, Unknown
  Bacterial polypetide isolated from the Sargasso Sea
NGAGLAMATMDIIKLAGGEPANFLDVGGTASSETVKNGFRIILSDKNVKSILINIFGGIVRCDRVAKGVVEAVKELGLNVPIVVRLQGTNAEEAKIILKKSNVSVIPADGMKDAAEKAVIKTKN

SEQ ID NO: 192282 - protein, 185 aa, Unknown
  Bacterial polypetide isolated from the Sargasso Sea
MSILINKSTKVICQGFTGTHGTFHSEQAIKYGTQLVGGVTPKKGGQKHLGLPVFNSVIEAKEKTGANATMIYVPPKYAAAAILEAINANLDLIVCITEGIPVIDMIKVKQSLSKTSSRLIGPNCPGIITPNECKIGIMPGNIHKKGSVGIVSRSGTLTYEAVAQTSKNGLGQSTCIGIGGDPING

SEQ ID NO: 192283 - protein, 262 aa, Unknown
  Bacterial polypetide isolated from the Sargasso Sea
KYGTNLVGGVTPKKGGQVHLERPVFNTVQDAKNATGANATMIYVPAKFAAAAIIEAIDASMELIVCITEGIPILDMLKVKQKLLKSNSRLIGPNCPGIITPDECKIGIMPGNIHKRGSVGIVSRSGTLTYEAVAQTTENGLGQSTCVGIGGDPINGTSFIDCLDLFLKDPETKSILMIGEIGGSAEEEASDFLKNHKLKKPTVGFVAGLTAPPGRRMGHAGAIISKGKGGAEQKIKIMEEAGITVAESPAELGKTLLNKLSL

SEQ ID NO: 192284 - protein, 270 aa, Unknown
  Bacterial polypetide isolated from the Sargasso Sea
MSILVNKNTKLICQGFTGSHGTFHSEQSILYGTNLVGGVTPRKGGQTHLGKPVFDTVKEAKEKTGANATMIYVPAKFAANAIIEAIDASIEIIVCVTEGIPIIDMLKVKKSLSKSNSRLIGPNCPGIITPDECKIGIMPGNIHKKGSVGIVSRSGTLTYEAVAQTTANGLGQSTCIGIGGDPINGTNFIDCLDLFLKDESTKSIVMIGEIGGSAEEEAAEFISKHEIKKPMVGFIAGLTAPKGKRMGHAGAIISGGKGGAKEKIKICKKQ

SEQ ID NO: 192285 - protein, 179 aa, Unknown
  Bacterial polypetide isolated from the Sargasso Sea
MSILVNKNTKVICQGFTGGQGTFHSEQAIAYGTNMVGGVTPGKGGTRHLDLPVFNTVKEANENLEIDASVIYVPPPFAADSIIEAIDAKIPLIICITEGIPVQDMISVKNFLKDSTSRLIGPNCPGIITPGECKIGIMPGSIHKPGKIGIVSRSGTLTYEAVDQTTAVNLGQSTCVGIG

SEQ ID NO: 192286 - protein, 230 aa, Unknown
  Bacterial polypetide isolated from the Sargasso Sea
FKISDSLQNKLNFSINEFNQFKEIVSNLCKAYVEIDASLIEINPLVVTKDEKLILLDAKINIDDNALYRQADIEKLKDTSEENDLELEASENDMVYIKLDGKIGCMVNGAGLAMATMDIIKQFGMEPANFLDLGGTANKERAIKAFKIIQSDKNVKSVFINIFGGIIHCDMIANGIIDVIKELEFKLPVVVRFQGTNSKEGRDIINNSSLGLISIDDFSNAAQKVVELSE

SEQ ID NO: 192287 - protein, 210 aa, Unknown
  Bacterial polypetide isolated from the Sargasso Sea
MSVLVNKNTKVICQGFTGSHGTFHSEQAIKYGTNLVGGVTPKKGGQKHLDRPVFNSVLEAKNEVGADATMIYVPAKFAAAAIIEAIDASVELIVCITEGIPIQDMLKVRQKLSGSSSRLIGPNCPGIITPDECKIGIMPGSIHKRGSVGIVSRSGTLTYEAVAQTTENGLGQSTCIGIGGDPINGTNFIDCLDLFLNDSETESILMIGEI

SEQ ID NO: 192288 - protein, 209 aa, Unknown
  Bacterial polypetide isolated from the Sargasso Sea
MSVLVNKNTKLICQGFTGAQGTFHSEQAIKYGTNLVGGVTPKKGGQTHLGRPVFNTVKEAKIDTGSNATMIYVPAKFAASAIIEAIEASMELIVCITEGIPVLDMLRVKRKLLNSSSRLIGPNCPGIITPGECKIGIMPGNIHKKGSVGIVSRSGTLTYEAVAQTTENGLGQSTCIGIGGDPINGTNFIDCLELFLNDDETSSILMIGE

SEQ ID NO: 192289 - protein, 206 aa, Unknown
  Bacterial polypetide isolated from the Sargasso Sea
MSVLVNKNTKLICQGFTGSHGTFHSEQALKYGTQLVGGVTPKKGGQKHLGLPVFNTVEEAKAVTKANATMIYVPPKFAASAIIEAIYAKIELIVCITEGIPVIDMLKVKKILRGSASRLIGPNCPGIITPNECKIGIMPGSIHKKGSVGIVSRSGTLTYEAVAQTSVNNLGQSTCIGIGGDPINGTNFIDYLELFLKDDETKSIVM

SEQ ID NO: 192290 - protein, 311 aa, Unknown
  Bacterial polypetide isolated from the Sargasso Sea
LVTPQTPPEGKKVNKVLVAEDVYYAGDSEPKEFYVSVLLNRTSGKNMIMYSTEGGMDIESVAANTPHLIFYEEIDPAMGLIPFQARKVAFNLGLKNKAFKSMIKFITNLYNAYVGSDATLFEINPVLKTSDDEIIAVDAKVSIDDNAMFRHKDYHKLRDLEEENQIEVEADKAGLNYVDLDGNVGCMVNGAGLAMATMDLIKQSGGSPANFLDVGGTADAKRVELAFRLILKDPNVKAILVNIFGGIVRCDRVAQGIIDAYKNIGDNIKVPIIVRLQGTNSDSAKTLIQNSNLDVIAATAFEEAAMKVKKY

SEQ ID NO: 192291 - protein, 194 aa, Unknown
  Bacterial polypetide isolated from the Sargasso Sea
MSVLVNKSTKVICQGFTGKHGTFHSEQAIKYGTQLVGGVTPKKGGHTHLNLPVFNTVQEAKDKTLADATMIYVPPNFAGAAIIEAIEAKIALIVCITEGIPVIDMLKVKKILSKSDSRLIGPNCPGIITPDECKIGIMPGSIHKKGSVGIVSRSGTLTYEAVAQTSANNMGQSTCIGIGGDPINGTNFIDCLKL

SEQ ID NO: 192292 - protein, 258 aa, Unknown
  Bacterial polypetide isolated from the Sargasso Sea
GAQGKKVLKVYIEQACEIKKEFYLGIVLDRSKGKFVMMASTEGGMDIEKVAEETPGKIYKIIIDPSEGIKDYQIRQLGFNLLIPREAFKSFSKQVNLLSKLASEKDFTLVEINPLILTNQNEVMALDAKVNIDDNALFRNQDLKDLLDETEVDPKELEAEKYDLSYVKLDGKIGCMVNGAGLAMATMDIIKLKGSSPANFLDVGGGASKEKVKGAFQIIISDKDVEAILVNIFGGIMRCDIIAEGIVEAAKEINLNKP

SEQ ID NO: 192293 - protein, 287 aa, Unknown
  Bacterial polypetide isolated from the Sargasso Sea
MSVLVNKDTRLICQGFTGSHGTFHSEQAIKYGTKLVGGVTPKKGGQKHLGLPVFNTVKEAKESEGANATMIYVPAKFAAAAIIESIEASIELIVCITEGIPIQDMLKVKQILTKSNSRLIGPNCPGIITPDECKIGIMPGSIHKKGSVGIVSRSGTLTYEAVAQTTENGLGQSTCIGIGGDPINGTNFIDCLDLFLNDEETESILMIGEIGGAAEEEAAEFIKNHKIKKPIVGFIAGVTAPPGRRMGHAGAIISGGKGGAQDKIKKMQDCGITIANSPSKIGKTLFD

SEQ ID NO: 192294 - protein, 143 aa, Unknown
  Bacterial polypetide isolated from the Sargasso Sea
GIVSRSGTLTYEAVAQTTENGLGQSTCIGIGGDPINGTNFIDCLDLFLNDDETESILMIGEIGGSAEEDASEFIKNHKIKKPIVGFIAGITAPPGRRMGHAGAIISQGKGGAEDKIKKMEDCGITIANSPSKIGETLFNKLSD

SEQ ID NO: 192295 - protein, 103 aa, Unknown
  Bacterial polypetide isolated from the Sargasso Sea
DIIKLYGQEPANFLDVGGGASKEKVSAAFKIILSDKNVKGILINIFGGIMRCDVLAQGVVDAAKEIKINVPLVVRLAGTKFEEGKKILDNSGLKIISAADLSD

SEQ ID NO: 192296 - protein, 178 aa, Unknown
  Bacterial polypetide isolated from the Sargasso Sea
LILLDAKITLDDNSLFRHPELLALKDLSEENEMELEASNNDMNYIKLNGEIGCMVNGAGLAMATMDIIKQFGKEPANFLDLGGTANKERTIKGFKIIQSDHNVKSVLVNIFGGIIHCDMIASGIIEAVKELHFNLPIVVRFQGTNSSEGRDIINNSKTNIISVDDFTEAAKKAVELSA

SEQ ID NO: 192297 - protein, 195 aa, Unknown
  Bacterial polypetide isolated from the Sargasso Sea
MSVLVNKDTRVICQGFTGSHGTFHSEQALKYGTNLVGGVTPKKGGQKHLNLPVFNTVKEAKDSEGANATMIYVPAKFAATAIIESIDASIELIVCITEGIPIQDMLKVKQKLSKSKSRLIGPNCPGIITPDECKIGIMPGSIHKKGSVGIVSRSGTLTYEAVAQTTENGLGQSTCIGIGGDPINGTILLIVWDYF

SEQ ID NO: 192298 - protein, 251 aa, Unknown
  Bacterial polypetide isolated from the Sargasso Sea
PKKGGLKHLGLPVFNTVKEAKNEEGANATMIYVPAKFAAAAIVEAIEASIELIVCITEGIPIQDMIKVKQKLLNSNSRLIGPNCPGIITPEECKIGIMPGNIHKKGSVGIVSRSGTLTYEAVAQTTENGLGQSTCIGIGGDPINGTSFIDCLDLFLKDPDTQSILMIGEIGGTSEEDASDFIRNHKIKKPMVGFIAGLTAPPGRRMGHAGAIISRGKGGAEDKIKIMQDAGITIAESPAEIGKTLFNKLSL

SEQ ID NO: 192299 - protein, 133 aa, Unknown
  Bacterial polypetide isolated from the Sargasso Sea
DGNVGCMVNGAGLAMATMDIIKLAGGDPANFLDVGGAASAETVKNGFKIILSDKNVKAILINIFGGIVRCDRVANGVIKAVEELGLQVPVVVRLEGTNAEEAKSILKESGLSIIPANDMQDAAQKVVASATKS

SEQ ID NO: 192300 - protein, 201 aa, Unknown
  Bacterial polypetide isolated from the Sargasso Sea
MSVLVNKNTKVICQGFTGSHGTFHSEQAIKYGTNLVGGVTPKKGGQVHLQRPVFNTVKEAKENTGANASMIYVPAKFAGTAIIEAIDASIELIICITEGIPVLDMLKVKQKLTKSNSRLIGPNCPGIITPDECKIGIMPGNIHKKGSVGIVSRSGTLTYEAVAQTSENGLGQTTCIGIGGDPINGTNFIDCLDLFLNDEET

SEQ ID NO: 192301 - protein, 112 aa, Unknown
  Bacterial polypetide isolated from the Sargasso Sea
IIKLYGEEPANFLDVGGGASKEKVSAAFKIILSDKNVEGILINIFGGIMRCDILAQGVVDAAKEIKINVPLVVRLAGTNFKEGKKILDNSGLKIISASDLSDAAKKIVKEIR

SEQ ID NO: 192302 - protein, 214 aa, Unknown
  Bacterial polypetide isolated from the Sargasso Sea
MSVLVNKETRLICQGFTGSHGTFHSEQAIKYGTKLVGGVTPKKGGQKHLGLPVFNSVKEAKDSEGANATMIYVPAKFAAAAIIEAIEASIELIVCITEGIPIQDMLRVKQRLLKSKSRLIGPNCPGIITPDECKIGIMPGNIHKRGSVGIVSRSGTLTYEAVAQTTENELGQSTCIGIGGDPINGTNFIDCLDLFLNDDETESILMIGEIGGTA

SEQ ID NO: 192303 - protein, 209 aa, Unknown
  Bacterial polypetide isolated from the Sargasso Sea
MSILVNKNSKIIVQGFTGSEGTFHSEQMIDYGTNVVGGVTPGKGGKTHLEKPVFNTVKDAVEETGANTSIIFVPAGFAADAILEAADAGIEVIVAITEGIPVSDMSRVYSYIKDKNCTLIGPNCPGIITPNEAKVGIMPGFVFKKGRVGLVSKSGTLTYEAADQISKAGYGISTAIGIGGDPIIGTTVKEAVQYFFNDPETDCVVMMEK

SEQ ID NO: 192304 - protein, 200 aa, Unknown
  Bacterial polypetide isolated from the Sargasso Sea
MSILVNKNTRLICQGFTGAHGTFHSEQAIKYGTNLVGGVTPKKGGQTHLDRPVFNTVKEAKKTTNANATMIYVPAKFASSAIIEAIDASIELIVCITEGIPILDMLKVKKYLSNSNSRLIGPNCPGIITPDECKIGIMPGNIHKKGSVGIVSRSGTLTYEAVAQTTEVGLGQSTCVGIGGDPINGTSFIDCLDLFLNDED

SEQ ID NO: 192305 - protein, 124 aa, Unknown
  Bacterial polypetide isolated from the Sargasso Sea
LMGAGLAMATMDIIKAFGEEPANFLDVGGGASKEKVSAALKIILSDKNVKGILINIFGGIMRCDVLAQGVVEAAKEIKIQVPLVVRLAGTNFEEGKKILDKSNLKIISAEDLSDAAKKIVKAIK

SEQ ID NO: 192306 - protein, 234 aa, Unknown
  Bacterial polypetide isolated from the Sargasso Sea
MSVLINKETKVICQGFTGTHGTFHSEQALNYGTKLVGGVTPKKGGQKHLGLPVFNTVIEAKEKTGANATMIYVPPKFSADAIIEAINADLDLIVCITEGIPIIDMIKVKQELIKSKSKLIGPNCPGIITPEECKIGIMPGNIHKKGSVGIVSRSGTLTYEAVAQTSHNGLGQSTCIGIGGDPINGTNFIDCLELFLKDDDTHSIIMIGEIGGSAEEEASEFLKKSKIKKPTVGF

SEQ ID NO: 192307 - protein, 234 aa, Unknown
  Bacterial polypetide isolated from the Sargasso Sea
TVEDAIEETGANTAMTFVPPPFAKDAVLEAAYAGCELIVCITEGIPAKDEAEMYDLLKQKTSSRLLGPNCPGLISPGKSNVGIMPHEITMEGKVGVVSRSGTLTYQAVLELTNLNIGQSTCIGIGGDPVPGTSFIDVLDAFQNDIQTEAIVMIGEIGGSAEEEAAEFIKDNVTKPVVSYIAGLTAPPGKKMGHAGAIVSGNKGTASAKIEALTDAGANVVKNPTRIGQAIKDVI

SEQ ID NO: 192308 - protein, 295 aa, Unknown
  Bacterial polypetide isolated from the Sargasso Sea
MTVLIDKNSKIIIQGFTGKMGSFHADEMIKYGSNVVGGVTPGKGGSKHLNLPVFNTVKDAVNETGADASILFVPPAFAADSAMEAADSGIKTCVAIVDGIPSHDMIRIKRYMRRYIKSSKMTLVGPNCAGIISPGKSMLGIMPGHIYKEGKVGIISRSGTLGYEAAQQLKNLNIGVSTSVGIGGDPINGSSFRDIIEKFETDDETDAILMIGEIGGPQEVAAGEFARENMKKPVIAYIAGLTAPKGRVMGHAGAIVSAYGESAIEKVEILKECGITISKNPSVMGDTVKSVLEKI

SEQ ID NO: 192309 - protein, 140 aa, Unknown
  Bacterial polypetide isolated from the Sargasso Sea
QYDLAYIKLDGKIGCMVNGAGLAMATMDIIKLYGEEPANFLDVGGGASKEKVSAAFKIILSDKNVKGILINIFGGIMRCDVLAKGLVEAAREIKINVPLVIRLAGTNYKEGKKILDNSGLKIISASDLGDAAEKVVKAIK

SEQ ID NO: 192310 - protein, 268 aa, Unknown
  Bacterial polypetide isolated from the Sargasso Sea
YGSNIVGGVTPGKGGMTHLNLPVFNTVKEAVDQTGASTSILFVPPAFAADSAMEAADAGIKTCVAITDGIPSHDMVKIKRYMRRYPKDKKMGLVGPNCAGIISPGKSMLGIMPGHIYKEGKIGIVSRSGTLGYEAAQQLKDLEIGVSTSVGIGGDPINGSSFRDIIEKFENDDETIAVLMIGEIGGPQEVEAGKFAKENMSKPVIAYIAGLTAPKGRVMGHAGAIVSAYGESAIEKVELLKECGVTISKNPSVMGETVKKVLVENNLN

SEQ ID NO: 192311 - protein, 267 aa, Unknown
  Bacterial polypetide isolated from the Sargasso Sea
FHSEQAIKYGTNLVGGVTPKKGGQKHLNLPVFDTVEEAKNKTEANATMIYVPPKFAALAITEAIDANMELIVCITEGIPVIDMIKVKQRLLKSKSRLIGPNCPGIITPDECKIGIMPGNIHKKGTVGIVSRSGTLTYEAVAQTTANGMGQSTCIGIGGDPINGTNFIDCLELFLKDNETQSIIMIGEIGGSAEEEASEFLRKSKIKKPTVGFIAGLTAPAGKRMGHAGAIISGGKGGAESKIETMKLAGITVSKSPADIGKTLYQKL

SEQ ID NO: 192312 - protein, 265 aa, Unknown
  Bacterial polypetide isolated from the Sargasso Sea
AFISSAEGGVILKRWQKIISEKVITTKINLSTKVNETDIEKIIKPFSLSEKSKKQAFKLIQSIYRILIDKDANLIEVNPLILTKNEDLICLDAKINFDDNALYRHPDILSLKDPNEEDPIETEAKKHDLAYIKLDGKIGCMVNGAGLAMATMDIIEFYGSKPANFLDVGGGASKEKVSAAFKIILSDKNVSGVLINIFGGIMRCDVLAQGVVDAAKETELSVPLVVRLAGTNVELGKKILEKSNLKIISANNLEDAAKKIIKATK

SEQ ID NO: 192313 - protein, 221 aa, Unknown
  Bacterial polypetide isolated from the Sargasso Sea
MSLKIDGNTKVIVQGITGKEGGFHALRCLEYGTNIVAGVTPGRGGQIFNDSIKVYDSMKEAAVETGANTSLIFVPAPFAPDAILEAIYSGIKTVICITEGIPVNEMIKIYKIAHDLRVTLIGPNCPGLINPSEKCKIGIMPGDIFMPGRIGVVSRSGTLTYEAVDQLTKSGIGQSLCVGIGGDPIVGTTFINVLDYFIKDEETDGIVFIGEIGGTKEQEAA

SEQ ID NO: 192314 - protein, 230 aa, Unknown
  Bacterial polypetide isolated from the Sargasso Sea
MSVLVNKDTKVICQGFTGTHGTFHSEQALKYGTQLVGGVTPKKGGQKHLNLPVFDTVQEAKDKLSANATMIYVPPKFASAAIIEAIEAKIELIVCITEGIPVLDMLKVKKILNNSSSKLIGPNCPGIITPDECKIGIMPGNIHKKGTVGIVSRSGTLTYEAVAQTSANGMGQSTCIGIGGDPINGTNFIDCLELFLKDDDTKSIVMIGEIGGSAEEEAAEFLKKERVKKP

SEQ ID NO: 192315 - protein, 226 aa, Unknown
  Bacterial polypetide isolated from the Sargasso Sea
MSILVNKNTKLICQGFTGSHGTFHSEQSILYGTNLVGGVTPRKGGQTHLGKPVFDTVKEAKEKTGANATMIYVPAKFAANAIIEAIDASIEIIVCVTEGIPIIDMLKVKKSLSKSNSRLIGPNCPGIITPDECKIGIMPGNIHKKGSVGIVSRSGTLTYEAVAQTTANGLGQSTCIGIGGDPINGTNFIDCLDLFLKDESTKSIVMIGEIGGSAEEEAAEFISKHE

SEQ ID NO: 192316 - protein, 260 aa, Unknown
  Bacterial polypetide isolated from the Sargasso Sea
VGGVTPGKGGSKHLNLPVFNTVKDAVNETGADASILFVPPAFAADSAMEAADAGIKICVAIVDGIPSHDMIRIKRYMRRYTKSSKMTLVGPNCAGIISPGKSMLGIMPGHIYKEGRIGIISRSGTLGYEAAQQLKNLNIGVSTSVGIGGDPINGSSFRDIIEKFETDDETDAILMIGEIGGPQEVAAGEFAKENMKKPVIAYIAGLTAPKGRVMGHAGAIVSAYGESAIEKVEILKECGITISKNPSVMGDTVKSILEKM

SEQ ID NO: 192317 - protein, 173 aa, Unknown
  Bacterial polypetide isolated from the Sargasso Sea
MSIIIDKNTKVICQGFTGSQGTYHSQQAIDYGTQMVGGVTPGKGGTTHLGLPVFNTVKEAKDYTQADATVIYVPAKFATQAIHEALDANIKIITCITEGIPVLDMVEIKKRIIEQKTYFIGPNCPGLVTPGECKIGIMPGFIHKPGKIGIVSRSGTLTYEAVWQTSEVGLGQT

SEQ ID NO: 192318 - protein, 285 aa, Unknown
  Bacterial polypetide isolated from the Sargasso Sea
MSILLDKNTKVICQGFTGGQATQHCIQCIDYGTQLVGGVTPGKGGQEHLDLPVFNTVKEAVDATGATASLIFVPAKFCKSSILEAAESGISLIVCITEGIPTIDMLEVKVRCDQMGVRLIGPNCPGIITPGESKMGIMPGDIHLPGKVGIISRSGTLTYEAVKQTSDLGFGQTSCVGIGGDPIPGTSFIDVLELFQDDQSTEAIVMVGEIGGTAEESAAEFIQSNVTKPVVSYIAGVTAPPGKRMGHAGAIIAGGKGTAEDKYKALESAGVYTVKSPADIGKGIA

SEQ ID NO: 192319 - protein, 267 aa, Unknown
  Bacterial polypetide isolated from the Sargasso Sea
MSILVNKNSRVVVQGITGSEGEFHTKQMLDYGTNIVAGVTPGKGGQSVLDGSINVYNSVEQSVEKTSANTAIIFVPPPFAAEAIIESSYAGIETIVCITEGVPVHDMIKVKQIMKRNQTRLIGPNCPGIITVDECKLGIMPGFICKKGNIGVVSKSGTLTYEAIDQLVNAGLGQTTAIGIGGDPIIGTTMQDCLNLFENDPETEGVVIIGEIGGQMEIEAAHWAKKNMSKPIAGFIAGQTAPPGKRMGHAGAIVSGGNDTAEAKVKV

SEQ ID NO: 192320 - protein, 173 aa, Unknown
  Bacterial polypetide isolated from the Sargasso Sea
GPNCPGIITPGESKIGIMPGAIHQKGKIGIVSRSGTLTYEAVGQITNVGLGQSTCIGIGGDPVNGTNFIDCLSLFEKDEQTEAIVMIGEIGGDAEEKAADYARNNVKKPIVSFIAGQTAPPGRRMGHAGAIISGGHGTAKEKKNALREAGINVINSLDEIGIKMLEALGNHKV

SEQ ID NO: 192321 - protein, 197 aa, Unknown
  Bacterial polypetide isolated from the Sargasso Sea
EIDASLIEINPLVVTKDSKLILLDAKINIDDNALFRQPEIEKLKDISEENELELEASKNDMVYIKLDGKIGCIVNGAGLAMATMDIIKQYGMEPANFLDLGGTANRERAIKAFKIIQSDKNVKSVFINIFGGIIHCDMIANGIIDAIIELDFKLPVVIRFKGTNSKEGRDIINNSSLRLISIDDFSKAAQKAVELSE

SEQ ID NO: 192322 - protein, 163 aa, Unknown
  Bacterial polypetide isolated from the Sargasso Sea
TPDECKIGIMPGNIHKKGTVGIVSRSGTLTYEAVAQTTQNGLGQSTCIGIGGDPINGTNFIDCLDLFLKDPDTESILMIGEIGGSAEEEASEFVKNHKIKKPIVGFIAGITAPPGRRMGHAGAIISGGKGGAEDKIKTMENAGITIAKSPADIGRTLYNKLSL

SEQ ID NO: 192323 - protein, 291 aa, Unknown
  Bacterial polypetide isolated from the Sargasso Sea
MSILVDKNTKVICQGFTGTHGTFHSEQAIKYGTKLVGGVTPKKGGQKHLGLGVFNTVAEAKGKTGANATMIYVPPKFAAGAILEAIDAKLDLIVCITEGIPVFDMMKVKQALSKSKSRLIGPNCPGIITPGECKIGIMPGDIHKKGSVGIVSRSGTLTYEAVAQTSQNGLGQSTCIGIGGDPINGTNFVDCLDLFLKDKDTHSIVIIGEIGGSAEEEAAEFLKKSKVKKPTVGFVAGLTAPPGRRMGHAGAIISGGKGGAEDKIELMKSAGITISNSPADIGKTLYKRLKS

SEQ ID NO: 192324 - protein, 251 aa, Unknown
  Bacterial polypetide isolated from the Sargasso Sea
MSVLVNKNTKVICQGFTGKHGTFHSEQAIKYGTKLVGGVTPKKGGEKHLGLPVFNTVEEAKDQTAATATMIYVPPKFAANAIIEAVEAKIELIVCITEGIPVLDMLKVKKELKKSSSRLIGPNCPGIITPDECKIGIMPGNIHKKGTVGIVSRSGTLTYEAVAQTSVNGMGQSTCIGIGGDPINGTNFIDCLELFLKDNETKSIVMIGEIGGSAEEEAAEFLKREKTKKPMVAFIAGLTAPPEEEWGMLEP

SEQ ID NO: 192325 - protein, 155 aa, Unknown
  Bacterial polypetide isolated from the Sargasso Sea
IMPGHIHLPGSVGIVSRSGTLTYEAVAQTTTVGIGQSTCIGIGGDPVNGTNFIDCLDLFLKDKKTESIIMIGEIGGSAEEEASDFIRKSKVKKPMVGFIAGVTAPPGRRMGHAGAIIAGGKGGAGDKMEAMRLAGIKVAQSPAALGSTMLEAIDG

SEQ ID NO: 192326 - protein, 142 aa, Unknown
  Bacterial polypetide isolated from the Sargasso Sea
MSVLINKHTKVICQGFTGKHGTFHSEQALKYGTKLVGGVTPKKGGQRHLSLPVFNNVHEAKEKTFANATMIYVPPKFAAAAIIEAIEAQMELIVCITEGIPVLDMLKVKKILNQSKSRLIGPNCPGIITPNECKIGIMPGNI

SEQ ID NO: 192327 - protein, 177 aa, Unknown
  Bacterial polypetide isolated from the Sargasso Sea
MSVLVNKNTRLICQGFTGSHGTFHSEQAIKYGTNLVGGVTPKKGGQKHLGLPVFNTMKEAKESEGANATMIYVPAKFAASAIIEAIDASIELIVCITEGIPIQDMLKVKQKLNNSKSRLIGPNCPGIITPDECKIGIMPGSIHKKGTVGIVSRSGTLTYEAVAQTTENGLGQSTCIG

SEQ ID NO: 192328 - protein, 268 aa, Unknown
  Bacterial polypetide isolated from the Sargasso Sea
MSILINKDTKVICQGFTGSHGTFHSEQAIKYGTKLVGGVTPKKGGQKHLDKPVFNTVQDAKKETGATATMIYVPAKFAANAIIEAIESSMELIVCITEGIPVLDMLKVKKKLNNSKSRLIGPNCPGIITPEECKIGIMPGNIHKKGSVGIVSRSGTLTYEAVAQTSENGLGQSTCIGIGGDPINGTNFVDCLDLFLSDDDTKSILMIGEIGGTAEEDASEFLKNHKIKKPVVGFIAGITAPKGRRMGHAGAIISKGKGGAKDKIKKME

SEQ ID NO: 192329 - protein, 198 aa, Unknown
  Bacterial polypetide isolated from the Sargasso Sea
MSVLINKNTKVICQGFTGSHGSFHSEQAIKYGTNLVGGVTPKKGGQIHLDRPVFNTVKEAKDKTGANATMIYVPAKFASSAIIEAIDSSVELIVCITEGIPVLEMLKIKKKLRNSSSRLIGPNCPGIITPNECKIGIMPGNIHKKGSVGIVSRSGTLTYEAVAQTTENGLGQSTCIGIGGDPINGTSFIDCLDLFLND

SEQ ID NO: 192330 - protein, 128 aa, Unknown
  Bacterial polypetide isolated from the Sargasso Sea
IGCMVTGAGLAMATMDIIKLYGEEPANFLDVGGGASKEKVSAAFKIILSDKNVKGILINIFGGIMRCDVLAQGMVDAAKEMNIHIPLVVRLAGTNFKEGKKILDNSGLKLISAENLEDAAKKIVKAIS

SEQ ID NO: 192331 - protein, 236 aa, Unknown
  Bacterial polypetide isolated from the Sargasso Sea
DAVKQTKANATVIYVPAKFAAKAIHEALDANIELIVCITEGIPVLDMIDIKKRIINNHTYLIGPNCPGLITPSECKIGIMPSFIHKKGKIGIVSRSGTLTYEAVAQTTEVGLGQSTCVGIGGDPIHGMNFVDCIKLFLEDDETEGILMIGEIGGEEEENAAEFISNSKIKKPISAFIAGQSAPKGKRMGHAGAIISGSKGTASSKIESLENAGVLVSKSPASLGKTMKLAMQNGNN

SEQ ID NO: 192332 - protein, 283 aa, Unknown
  Bacterial polypetide isolated from the Sargasso Sea
IPRLYWKDGTFHAEEMINYGSNIVGGVTPGKGGQKHLDRPVFNTVKDAVKHTGATASILFVPPAFAADSAMEAADAGIKTCVAIVDGIPSHDMIRIKRYMRRYSKNEKMTLVGPNCAGIISPGKSMLGIMPGHIYKEGRVGVISRSGTLGYEAAEQMKNLGIGISTSVGIGGDPINGSSFRDIIEKFETDDETDAILMIGEIGGPQEVSAGEFAKENMNKPVIGYIAGLTAPKGRVMGHAGAIVSAYGESAIEKVEILKECGVTISKNPSVMGDTVKSVLEKM

SEQ ID NO: 192333 - protein, 253 aa, Unknown
  Bacterial polypetide isolated from the Sargasso Sea
MSVLVNKNTRVICQGFTGSHGTFHSEQSIKYGTNLVGGVTPKKGGQTHLNRPVFNTVLEAKNATDANATMIYVPAKFAASAIIEAIDANIDLIVCITEGIPVLDMLKVKKYLSKSKSRLIGPNCPGIITPDECKIGIMPGNIHKKGTVGIVSRSGTLTYEAVAQTTENGLGQSTCIGIGGDPINGTNFIDCIDLFLKDPDTESILMIGEIGGSAEEEASEFVKNHKIKKPMVGFIAGVTAPPGRRMGHAGAII

SEQ ID NO: 192334 - protein, 154 aa, Unknown
  Bacterial polypetide isolated from the Sargasso Sea
MPGNIHKKGSVGIVSRSGTLTYEAVPQTTENGLGQSTCIGIGGDPINGTNFIDCLDLFLNDEETKSILMIGEIGGSAEEEAAEFVKNHKIKKPIVGFIAGVTAPPGRRMGHAGAIISGGKGGAQDKIKKMEDCGITIANSPSKIGKTLFDKLSN

SEQ ID NO: 192335 - protein, 218 aa, Unknown
  Bacterial polypetide isolated from the Sargasso Sea
LNDSQFKQFENIVSKLGNAFIELDAESIEINPLALTKSGELVLLDAKITLDDNSLFRHPELLALKDLSEENEMELEASTNDMNYIKLNGEIGCMVNGAGLAMATMDIIKQFGKEPANFLDLGGTANKERTIKGFKIIQSDHNVKSVLVNIFGGIIHCDMIASGIIEAVKELHYNLPIVVRFQGTNASEGRDIINNSKINIISVDDFTEAAKKAVELSA

SEQ ID NO: 192336 - protein, 194 aa, Unknown
  Bacterial polypetide isolated from the Sargasso Sea
MSVLVNKNTRVICQGFTGTHGTFHSEQAIKYGTNLVGGVTPKKGGQIHLGKPVFNSVKDAKEATNANATMIYVPAKFAASAIIEAMDASIDLIVCITEGIPILDMLKIKEKLKKTKSRLIGPNCPGIITPDECKIGIMPGNIHKKGSVGIVSRSGTLTYEAVAQTSINGLGQSTCIGIGGDPINGTNFIDCLDL

SEQ ID NO: 192337 - protein, 107 aa, Unknown
  Bacterial polypetide isolated from the Sargasso Sea
GQEPANFLDVGGGASKEKVSAAFKIILSDKNIKGILINIFGGIMRCDVLAEGVVNAAKEININVPLVVRLAGTKFEEGIKILNNSGLDIIPASDLSDAAKKIVEAIK

SEQ ID NO: 192338 - protein, 190 aa, Unknown
  Bacterial polypetide isolated from the Sargasso Sea
MSVLVNKNTRLICQGFTGSHGTFHSEQAIKYGTKLVGGVTPKKGGQRHLGLPVFNTVKEAKELEGANATMIYVPAKFAASAIIEAIDASIELIVCITEGIPIHDMIKVKQRLLKSNCRLIGPNCPGIITPDECKIGIMPGNIHKRGSVGIVSRSGTLTYEAVDQTSDNGLGQSTCIGIGGDPINGTNFID

SEQ ID NO: 192339 - protein, 110 aa, Unknown
  Bacterial polypetide isolated from the Sargasso Sea
KLYGKEPANFLDVGGGASKEKVSAALKIILSDKNVKGILINIFGGIMRCDVLAQGVVDAAKEININVPLVVRLAGTNFKEGKEILDNSGVKLISAENLDDAAKKIIKAVK

SEQ ID NO: 192340 - protein, 143 aa, Unknown
  Bacterial polypetide isolated from the Sargasso Sea
SRSGTLTYEAVAQTTEVGLGQSTCVGIGGDPIHGMDFVDCIKLFLEDDETEGILMIGEIGGEEEENAAEFISNSKRKKPVSAFIAGQSAPKGKRMGHAGAIVSGSKGTAHSKIKSLEKAGVLVSKSPASLGKTMKLAMQNGNN

SEQ ID NO: 192341 - protein, 157 aa, Unknown
  Bacterial polypetide isolated from the Sargasso Sea
QLKDLTEEDPLELQAAEHDMNYVKLDGSIGCMVNGAGLAMATMDIIKQFGEEPANFLDLGGTANKDRVIMGFKTIQSDPNVKSILINIFGGIIHCDMIANGIVEAVKELNFKLPLVVRFQGTNASQGRDVINNSSLGLISIDDFTEAAKKVVELAKE

SEQ ID NO: 192342 - protein, 156 aa, Unknown
  Bacterial polypetide isolated from the Sargasso Sea
LLDESEVDPKELEAEKYELSYVKLDGKIGCMVNGAGLAMATMDIIKLKGSSPANFLDVGGGASKEKVKGAFKIIISDKDVKAILVNIFGGIMRCDIIAEGIVEAVKEINLEKPLVVRLEGTNVEKGKKILENSGLDIIAATDLEEAAEKIVKVVEG

SEQ ID NO: 192343 - protein, 164 aa, Unknown
  Bacterial polypetide isolated from the Sargasso Sea
IFRHPEIFKLRDLNEEDPAEIKASEHDLAYIKLDGSIGCMVNGAGLAMATMDIIKLYGEEPANFLDVGGGASREKVCAAFKILLADKNVKGVLINIFGGIMRCDVLAQGVVEAAKEIKIKVPLVVRIAGINFKEGKKILNESNLKILYADNLNDAAKKIVEAIK

SEQ ID NO: 192344 - protein, 227 aa, Unknown
  Bacterial polypetide isolated from the Sargasso Sea
MSILVNKDTKVICQGFTGTHGTFHSEQALKYGTKLVGGVTPKKGGQKHLNLPVFNTVQEAKEKTLANATMIYVPPQFAGSAIIEAIEANIELIVCITEGIPVIDMIKVKKVLKDSSSRLIGPNCPGIITPEECKIGIMPGSIHKKGSVGIVSRSGTLTYEAVAQTSSNGMGQSTCIGIGGDPINGTNFIDCLELFLKDEETKSIIMIGEIGGSAEEEAADFIKKEKI

SEQ ID NO: 192345 - protein, 125 aa, Unknown
  Bacterial polypetide isolated from the Sargasso Sea
MVNGAGLAMATMDIIKLYGKEPANFLDVGGGASKEKVSAAFKLILSDKNVKGILINIFGGIMRCDVLAQGVVDAAKETKLQVPLVVRLAGTNFQEGKKILDQSNLKILSASDLNDAAKKIVNAIK

SEQ ID NO: 192346 - protein, 205 aa, Unknown
  Bacterial polypetide isolated from the Sargasso Sea
EAYLELIVCITEGIPVLDMIKVKKKLLNSKSRLIGPNCPGIITPDECKIGIMPGNIHKKGSVGIVSRSGTLTYEAVAQTTENDLGQSTCIGIGGDPINGTNFIDCLDLFLKDEETKSILMIGEIGGSAEEEAAEFVKNHEIKKPMVGFIAGVTAPPGRRMGHAGAIISGGKGGAKDKIKKMEDCGIEVATSPSEIGKTLLNKLSN

SEQ ID NO: 192347 - protein, 239 aa, Unknown
  Bacterial polypetide isolated from the Sargasso Sea
MSILVNKQTKVICQGFTGKHGTFHSEQSLRYGTKLVGGVTPKKGGQKHLELPVFNTVQEAKEKTSADATMIYVPPKFAAAAIIEAIEAEIKLIVCITEGIPVLDMLKVKQILSRSTSRLIGPNCPGIITPEECKIGIMPGNIHKKGTVGIVSRSGTLTYEAVAQTTANRMGQSTCIGIGGDPINGTNFIDCLELFLNDDETQSIVMIGEIGGSAEEEAAEFLKREKIKKPMVGFIAGLT

SEQ ID NO: 192348 - protein, 255 aa, Unknown
  Bacterial polypetide isolated from the Sargasso Sea
VGVTPKKGGTKHLGLLFFNTVAEAKEKTSANASMIYVPPKFAAAAIIEAIDAEIDLIVCITEGIPIFDMMNVKKKIINSKSRLIGPNCPGIITPEECKIGIMPGSIHKKGSVGIVSRSGTLTYEAVAQTTKNGLGQSTCIGIGGDPINGTNFIDCLDLFLKDKDTHSIVMIGEIGGSAEEEAAEFLRKSRVKKPTVGFIAGLTAPPGRRMGHAGAIISGGKGGAEDKIEVMKSADITISKSPADIGKTIYEKLNN

SEQ ID NO: 192349 - protein, 219 aa, Unknown
  Bacterial polypetide isolated from the Sargasso Sea
MSILVNKNTKVICQGFTGGQGTFHSEQAIAYGTNMVGGVTPGKGGTRHLDLPVFNTVKEANENLEIDASVIYVPPPFAADSIIEAIDAKIPLIICITEGIPVQDMIRVKNFLKDSTSRLIGPNCPGIITPGECKIGIMPGSIHKPGKIGIVSRSGTLTYEAVDQTTAVNLGQSTCVGIGGDPLNGTNFIDCLDLFLSDEQTEAILMIGEIGGSAEEEAA

SEQ ID NO: 192350 - protein, 294 aa, Unknown
  Bacterial polypetide isolated from the Sargasso Sea
MSIIIDKNTKVICQGFTGSQGTYHSQQAIDYGTQMVGGVTPGKGGTTHLGLPVFNTVKEAKDYTQADATVIYVPAKFATQAIHEALDANIKIITCITEGIPVLDMVEIKKRIIEKKTYFIGPNCPGLVTPGECKIGIMPGFIHKPGKIGIVSRSGTLTYEAVWQTSEVGLGQTTCVGIGGDPVHGMNFIDCLDLFLQDDDTKGILMIGEIGGTAEEDAAEFISKSIIKKPMSAFIAGVSAPKGKRMGHAGAIISGNKGTAQSKIDALKSANIAVAPSPAKMGETMLSEMQKGYN

SEQ ID NO: 192351 - protein, 290 aa, Unknown
  Bacterial polypetide isolated from the Sargasso Sea
MSIIVNKDSKVLVQGFTGSEGTFHSEQMIEYGTNVVCGVTPGKGGTKHLNKPVYNSVQEAVINEDINTSIIFVPPAFAADAIMEAAESGIKTIVTITEGIPVNDMTKVVSYIKGKKIRLIGPNCPGIITPDEAKIGIMPGFVFKKGNVGIVSKSGTLTYEAADQVVKSGYGISTAIGVGGDPIIGTTLLDSVQLFMEDDETDVIVLIGEIGGQLEIDAAKWIKNNGNKKPVVGFIAGETAPKGRKMGHAGAIIGGKDDTASAKKRIMRESGVNVVDSPADIGKTVNEILK

SEQ ID NO: 192352 - protein, 291 aa, Unknown
  Bacterial polypetide isolated from the Sargasso Sea
MSVLVNKNTKLICQGFTGSHGTFHSEQAIKYGTNLVGGVTPKKGGQTHLDRPVFNTVKEAVDKTGANATMIYVPAKFASAAIIEAIEANLELIVCITEGIPVLDMIKVKKKLLNSKSRLIGPNCPGIITPDECKIGIMPGNIHKKGSVGIVSRSGTLTYEAVAQTTENDLGQSTCIGIGGDPINGTNFIDCLDLFLKDEETKSILMIGEIGGSAEEEAAEFVKNHEIKKPMVGFIAGVTAPPGRRMGHAGAIISGGKGGAKDKIKKMEDCGIEVATSPSEIGKTLLNKLSN

SEQ ID NO: 192353 - protein, 290 aa, Unknown
  Bacterial polypetide isolated from the Sargasso Sea
MSIIVNKNSKVLVQGFTGSEGTFHSEQMIEYGTNVVCGVTPGKGGTKHLDRPVYNSVADALNNEDINTSIIFVPPMFAADAIMEAAESGIKTIVTITEGIPVNDMTKVVSYIKGRNIRLIGPNCPGIITPEEAKIGIMPGFVFKKGNVGIVSKSGTLTYEAADQVVKSGYGISTAIGVGGDPIIGTTLLDSVQLFMEDEETDVIVLIGEIGGQLEIDAARWIKDNGNKKPVVGFIAGETAPKGRKMGHAGAIIGGKDDTASAKKRIMRESGVNVVDSPADIGKTVNQILN

SEQ ID NO: 192354 - protein, 291 aa, Unknown
  Bacterial polypetide isolated from the Sargasso Sea
MSVLINKNTKLICQGFTGSHGTFHSEQAIKYGTNLVGGVTPKKGGQKHLDRPVFNTVNEAKKETGANASMIYVPAKFAGSAIIEAIDSEIELIVCITEGIPVLDMLKVKKKLSESKSRLIGPNCPGIITPEECKIGIMPGKIHKKGSVGIVSRSGTLTYEAVAQTTEIGLGQSTCIGIGGDPINGTNFIDCLDLFLNDEETESILMIGEIGGTDEENASEFLKNHKVKKPVIGFIAGITAPPGRRMGHAGAIISGGKGGAKEKIKKMEECGITIAKSPSEIGKTLFNQLSN

SEQ ID NO: 192355 - protein, 291 aa, Unknown
  Bacterial polypetide isolated from the Sargasso Sea
MSILIDKNTKVICQGFTGKHGTFHSEQAIKYGTQLVGGVTPKKGGQKHLNLPVFDTVKDAKNKTGATATMIYVPAKFAASAIIEAIDAEIELIVCITEGVPVLDMIRVKNLLNKSKSRLIGPNCPGIITPGECKIGIMPGDIHTKGKVGIVSRSGTLTYEAVAQTTENGLGQSTCIGIGGDPINGTNFIDCLELFFNDPDTESIIMIGEIGGSAEEEASEYIKKSKIKKPIVGFIAGLTAPPGRRMGHAGAIISGGQGGAENKIALMKSAGITISDSPADIGKTLYKKLNS

SEQ ID NO: 192356 - protein, 291 aa, Unknown
  Bacterial polypetide isolated from the Sargasso Sea
MSILVNKNTKVICQGFTGTHGTFHSEQSIKYGTKLVGGVTPKKGGQKHLSLPVFNTVQEAKDKTEANATMIYVPPKFAAEAILEAINSKIELIVCITEGIPVLDMLKVKKELSRSNSRLIGPNCPGIITPEECKIGIMPGNIHKKGTVGIVSRSGTLTYEAVAQTSSNGMGQSTCIGIGGDPINGTNFIDCLELFLKDNDTRSIVMIGEIGGSAEEEAAEFLKKEKIKKPMVGFIAGLTAPPGRRMGHAGAIISGGKGGAEDKIETMKSAGITIANSPADIGKTLLLKLNG

SEQ ID NO: 192357 - protein, 291 aa, Unknown
  Bacterial polypetide isolated from the Sargasso Sea
MSVLVNKNTKVICQGFTGKHGTFHSEQALKYGTKLVGGVTPKKGGTKHLGLPVFNTVAEAKEKTSANATMIYVPPKFAAAAIIEAIDAEMDLIVCITEGIPIFDMMNVKKEIINSKSRLIGPNCPGIITPEECKIGIMPGSIHKKGSVGIVSRSGTLTYEAVAQTTKNGLGQSTCIGIGGDPINGTNFIDCLDLFLKDKDTHSIVMIGEIGGSAEEEAAEFLKKSKIKKPTVGFIAGLTAPPGRRMGHAGAIISGGKGGAEDKIEVMKSADITISKSPADIGKTIYEKLNN

SEQ ID NO: 192358 - protein, 288 aa, Unknown
  Bacterial polypetide isolated from the Sargasso Sea
MAVIIQKNTKILIQGFTGKMGTFHAEEMIKYGSNVVGGVTPGKGGTKHLSLPVFNTVKEAVKDTGATASILFVPPAFAADSAMEAADAGIKTCVAIVDGIPSHDMIRIKRYMRRYSKVEKMSLVGPNCAGIISPGKSMLGIMPGHIYKEGRVGIISRSGTLGYEAAQQLKNLNIGVSTSVGIGGDPINGSSFKDIIGKFEQDDETDVILMIGEIGGPQEVAAGKFAKENMKKPVVAYIAGLTAPKGRVMGHAGAIVSAYGESAVEKVEILKEFGITISKNPSVMGKQL

SEQ ID NO: 192359 - protein, 266 aa, Unknown
  Bacterial polypetide isolated from the Sargasso Sea
MSVLVNKNTKVICQGFTGSHGTFHSEQAIKYGTNLVGGVTPKKGGQKHLDRPVFNTVKEAKNEVGADATMIYVPAKFAAAAIIEAIDSSIELIVCITEGIPIQDMLKVRQKLKNSKSRLIGPNCPGIITPGECKIGIMPGNIHKRGTVGIVSRSGTLTYEAVAQTTENGLGQSTCIGIGGDPINGTNFIDCLDLFLNDGETQSILIIGEIGGTAEEDAAEFIKNHKIKKPIVGFIAGITAPPGRRMGHAGAIISGGKGGAEDKIKK

SEQ ID NO: 192360 - protein, 297 aa, Unknown
  Bacterial polypetide isolated from the Sargasso Sea
MTVLIDKNTKILIQGFTGKMGSFHAEEMIKYGSNIVGGVTPGKGGLKHLNLPVFNTVKEAVTQTGASASILFVPPAFAADSAMEAADAGIKTCVAIVDGIPSHDMIKIKRYMRRYSRVDKMTLIGPNCAGVISPGKAMLGIMPGHIYKEGRVGIIGRSGTLGYEAAQQLKNLNIGVSTSVGIGGDPINGSSFKDILEKFEKDEETDAVLMIGEIGGPQEVAAGKFAKENMKKPVIAYIAGLTAPKGRVMGHAGAIVSAYGESAVEKVELLKECGVTISKNPSVMGETVKAALNGKTT

SEQ ID NO: 192361 - protein, 287 aa, Unknown
  Bacterial polypetide isolated from the Sargasso Sea
MVNQETRILCQGITGSQGSFHAEQCIEYGSNIVAGVTPGKGGSTHLDVPVFNSVAEATSEVEIDVSMIFVPAKFAADAMKSAIESEIGLIVCITEGVPVQDMIEVKAMLKGSDSILLGPNCPGIITPEETKIGIMPGFIHQKGSIGIISRSGTLTYEAVHQTSMCGLGQSTCIGIGGDPIKGLNFIECLSLFEEDPATEGIVMVGEIGGSDEEKAAEFIKDNITKPVVAYVAGVSAPPGKRMGHAGAIVTGNEGTALSKYKALNDAGVKTTHSPALIGEIMKELLNQ

SEQ ID NO: 192362 - protein, 290 aa, Unknown
  Bacterial polypetide isolated from the Sargasso Sea
MSILIDKDTKVICQGFTGGQATQHCIQCIDYGTQLVGGVTPGKGGQTHLDLPVFNSVKEAVSQTEATASIIFVPARFCKASILEAAESGISLIICITEGIPTIDMLEVKVRCDNLGVRLIGPNCPGIITPGECKMGIMPGDIHLPGKVGVISRSGTLTYEAVKQTTDLGFGQTSCVGIGGDPVPGSSFIDILDLFQNDHKTEAIVMVGEIGGTAEEAAAEFIQSNVTKPVVSYIAGVTAPAGKRMGHAGAIIAGGKGTAEDKFKALEAAGVYTVKSPADIGKGVAEITGW

SEQ ID NO: 192363 - protein, 290 aa, Unknown
  Bacterial polypetide isolated from the Sargasso Sea
MAVLVDNSTKVICQGLTGSQGTFHSEQAIAYGTRMVGGVTPGKGGTKHLGLPVFDTVAEAKEKSGADVSVIYVPPFAAAEAILEAIEAEIELVVCITEGIPVMDMVRVKDKLQKSRTRLIGPNCPGIITPGECKIGIMPGHIHKRGKIGIVSRSGTLTYEAVHQTTKVGLGQSTCIGIGGDPVNGTNFIDCLELFLSDSETEGIIMIGEIGGSAEEDASQFIRGNSIKKPMAGFIAGITAPPGRRMGHAGAIIDGGKGAAGDKIEAMKSAGIVVSESPAKLGETMLSIIA

SEQ ID NO: 192364 - protein, 291 aa, Unknown
  Bacterial polypetide isolated from the Sargasso Sea
MSVLVNRNTKVICQGFTGSHGTFHSEQAIKYGTNLVGGVTPKKGGQKHLDLPVFNTVKEAKDSEGANATMIYVPAKFAAAAIIEAIDASIELIVCITEGIPIQDMIKVKQKLSKSKSRLIGPNCPGIITPDECKIGIMPGSIHKKGSVGIVSRSGTLTYEAVAQTTENGLGQSTCIGIGGDPINGTNFIDCLDLFLNDEETESILMIGEIGGSAEEEASDFIKNHKIKKPIVGFIAGITAPPGRRMGHAGAIISGGKGGAADKIKKMEDCGITIANSPSKIGKTLFNKLSD

SEQ ID NO: 192365 - protein, 295 aa, Unknown
  Bacterial polypetide isolated from the Sargasso Sea
MAILITKESKIIIQGFTGKIGTFHAEEMIEYGTNVVGGVTPGKGGQTHLDRPVFNTVKEAVKETGADSSILFVPPAFAADSAMEAADAGIKTLVAITDGIPAHDMIKVKRYMRRYKNEDRMTMVGPNCAGVISPSKCMLGIMPGHIYKEGNVGVIGRSGTLGYEAAQQMKNLGIGISTSVGIGGDPINGSSFKDHLAKFEQDDETKVILMIGEIGGPQEAEAAEFAKANVTKPVIAYIAGLTAPKGKRMGHAGAIVSSKGESAADKVEILQAAGITIAKNPSVIGDTVESVLKSL

SEQ ID NO: 192366 - protein, 291 aa, Unknown
  Bacterial polypetide isolated from the Sargasso Sea
MSILVNKNTKVICQGFTGSHGTFHSEQAIKYGTNLVGGVTPKKGGQTHLDRPVFNTVEEAKKETGANASMIYVPAKFAASAIIEAIESSIEIIVCVTEGIPVQDMLQVKLKLNNSKSRLIGPNCPGIITPDECKIGIMPGIIHKKGSVGIVSRSGTLTYEAVAQTTENGLGQSSCIGIGGDPINGTSFIDCLDLFLKDDETKSILMIGEIGGTSEEEASEFLKNHKVKKPIVGFIAGITAPPGRRMGHAGAIISGGKGTAQDKINKMKECGITIAKSPAEIGKTLLNKLSN

SEQ ID NO: 192367 - protein, 216 aa, Unknown
  Bacterial polypetide isolated from the Sargasso Sea
MSVIVNKDTKVICQGFTGSQGTFHSEQAIKYGTKMVGGVTPKKGGTQHLGLPVFDTVKEAKEKTQANASVIYVPPPYAAKAILEAIDSEIELIVCITEGIPVIDMFNVKDKLRSSSSRLIGPNCPGIITPDECKIGIMPAHIHKKGNVGIVSRSGTLTYEAVYQTTVEGLGQSTCIGIGGDPVNGTNFIDCLELFLSDPETKSIIMIGEIGGSAEE

SEQ ID NO: 192368 - protein, 226 aa, Unknown
  Bacterial polypetide isolated from the Sargasso Sea
ANATMIYVPPKFAASAIIEAINANLDLIVCITEGIPVMDMVKVKQSLKKSKSRLIGPNCPGIITPDECKIGIMPGNIHKKGTVGIVSRSGTLTYEAVAQTSLNGLGQSTCIGIGGDPINGTNFIDCLDLFLKDEDTHSIVMIGEIGGSAEEESAEFLKRSKIKKPTVGFVAGLTAPAGRRMGHAGAIISGGKGGAEDKIEVMKSAGITISKSPADIGKTLFTKLKI

SEQ ID NO: 192369 - protein, 282 aa, Unknown
  Bacterial polypetide isolated from the Sargasso Sea
MTEYGTDVVGGVTPGKGGQVVDLPGRSVPVYDTMGQAVSETDADVSVIYVPARFAAAAIVEAADAFNEIKGEGLIVCITEGIPTLDMIRCVGHISEMPGIRLIGPNCPGIITPGENGGCKVGIMPGYIHAKGRIGIISKSGTLTYEAVAQTMSVGEGQTTCIGIGGDPISGTGFIDCLAAFEEDPETEAVVMIGEIGGTAEEDAAAWAADNFSKPIVGFVAGATAPPGKRMGHAGAIISGGKGTAEEKFSAFEKAGIHIARDPSKIGEVLVSVLIEAGLREP

SEQ ID NO: 192370 - protein, 290 aa, Unknown
  Bacterial polypetide isolated from the Sargasso Sea
MSILIDKNTKVICQGFTGGQATQHCIQCLDYGTQLVGGVTPGKGGQTHLDLPVFNSVKEAVDTTGATASLIFVPAKFCKASIIEAAESGISLIVCITEGIPTIDMLEVKARCDELGVRLIGPNCPGIITPGESKMGIMPGDIHLPGKVGIISRSGTLTYEAVKQTSDLGFGQTSCIGIGGDPIPGTSFIDVLDLFEKDDSTEAIVMVGEIGGTAEEAAAEFIQSNVSKPVVSYIAGVTAPPGKRMGHAGAIIAGGKGTADDKFRALEAAGVHTVKSPADIGKGIAEITGW

SEQ ID NO: 192371 - protein, 289 aa, Unknown
  Bacterial polypetide isolated from the Sargasso Sea
MAILIDENTRVVVQGLTGREGQFHALRNRDYGTNIVAGTRPGKGGENIESIPIFNTVQEAVKEEGANVAMTFVPPAFAKEAVLEAAFAGCELIVCITEGIPAKDEAEMYDIIKKETNSKLLGPNCPGLISPGKSNVGIMPHEITKQGNVGVVSRSGTLTYQAVHELTQLEIGQSTCIGIGGDPVPGMSFIDVLEEYEKDDETSSIVMIGEIGGSAEEEAADFIKNNISKPVVSYIAGVTAPPGKKMGHAGAIVSGNKGTAQAKMDALKDAGVNVVSNPTKIGNAIKKVI

SEQ ID NO: 192372 - protein, 290 aa, Unknown
  Bacterial polypetide isolated from the Sargasso Sea
MSILVSKESRILCQGITGSQGSFHAEQCIQYGSNIVAGVTPGKGGSTHLDVPVFNSVDEAKADLEIDVSMIFVPAKFAADAMKSAIESEIGLIVCITEGVPVQDMIEVKAMLNGSDSILLGPNCPGIITPDETKIGIMPGFIHQKGSVGIISRSGTLTYEAVHQTSMCGLGQSTCIGIGGDPIKGLNFIECLSLFEKDPETEGIVMVGEIGGSDEEKAAEFIKENISKPVVAYIAGVSAPPGKRMGHAGAIVTGKEGTALSKYEALNDAGVATTDSPALIGKIMKDLLNR

SEQ ID NO: 192373 - protein, 295 aa, Unknown
  Bacterial polypetide isolated from the Sargasso Sea
MAVIIDKNTKIIVQGFTGKMGSFHAEEMIKYGSNIVGGVTPGKGGSKHLNLPVFNTVKEAVKNTGATASILFVPPAFAADSAMEAADAGIKSCVAIVDGIPSHDMIRIKRYMRRYTKSEKMSLVGPNCAGIISPGKSMLGIMPGHIYKEGRVGIISRSGTLGYEAAQQLKNLNIGVSTSVGIGGDPINGSSFKDIIGKFEEDDETDAILMIGEIGGPQEVAAGKFAKENMKKPVIAYIAGLTAPKGRVMGHAGAIVSAYGESAVEKVEILKEYGITISKNPSVMGDTVKSVISKS

SEQ ID NO: 192374 - protein, 293 aa, Unknown
  Bacterial polypetide isolated from the Sargasso Sea
MSVIVNKDTRVICQGFTGAQGTFHSEQAIKYGTNMVGGVTPKKGGSMHLELPVFDTVKEAKEKTNANATVIYVPPPYAANAIIEAIDSEIELIVCITEGIPVMDMMKVKDKLSSSSSRLIGPNCPGIITPDECKIGIMPAHIHKKGNVGIVSRSGTLTYEAVYQTTVAGLGQSTCIGIGGDPINGTNFIDCLDLFLSDPETESIIMIGEIGGSAEEEAAEFLKKQTTKKPTVGFIAGTSAPPGRRMGHAGAIVSGGKGGADDKIEAMKEAGIQISNSPAALGSTLLEVLKNQI

SEQ ID NO: 192375 - protein, 289 aa, Unknown
  Bacterial polypetide isolated from the Sargasso Sea
MSILVNKDTRVIVQGFTGSQGTLHSEQSIEYGTNIVGGVTPGKGGIEHLGKPVFNSVEDAKSSLDPNASIIFVPARFCKDSILESAEAGIKLIICITEGIPTLDMLEVKKRVDELGVRLIGPNCPGIITPGEAKLGIMPGDIHMPGSIGIISRSGTLTYEAVKQTTDLGFGQSSCVGIGGDPIPGSSFIDMLKLFQDDKQTEAIVMVGEIGGTAEEAAAEYIKNNITKPVISYIAGKTAPAGKRMGHAGAIIAGGKGTADNKIEKLQECGVYVADNLVSIGSKVAEVLG

SEQ ID NO: 192376 - protein, 290 aa, Unknown
  Bacterial polypetide isolated from the Sargasso Sea
MSILVNKNSKIIVQGFTGSEGTFHSQQMIEYGTNIVGGVTPGKGGLIHLDKPVFNTVEDAVNATDANTSIIFVPAGFAADAIFESVDAGIKVIVCITEGIPVLDMTKVYNYIKQKDCTLIGPNCPGIITPDEAKVGIMPGFVFKKGRVGLVSKSGTLTYEAADQIVKEGFGISTAIGIGGDPIIGTTVEDAVKFFFEDDETDCVVMIGEIGGQLENNAAQWIKKSKIKKPVIGFIAGETAPKGRTMGHAGAIVGGKDDTAAAKKSILKECGVHVADSPADIGKFVKKYIN

SEQ ID NO: 192377 - protein, 293 aa, Unknown
  Bacterial polypetide isolated from the Sargasso Sea
MSILINKDTKVITQGITGKTGQFHTRACREYANGREAFVAGVNPKKAGEDFEGIPIYASVKEAKAETGATVSVIYVPPAGAAAAIWEAVEADLDLAICITEGIPVRDMIEVKDRMRREGRKTLLLGPNCPGTITPDELKIGIMPGHIHRKGRIGVVSRSGTLTYEAVAQLTALGLGQSSAVGIGGDPINGLKHIDVMKMFNDDPDTDAVVMIGEIGGPDEANAAEWIKDNMKKPVVGFIAGVTAPPGKRMGHAGALISGGADTAEAKLEIMEACGITVTRNPSEMGRLLKKAL

SEQ ID NO: 192378 - protein, 293 aa, Unknown
  Bacterial polypetide isolated from the Sargasso Sea
MSILINKDTKVITQGITGKTGQFHTRACREYANGREAFVAGVNPKKAGEDFEGIPIYASVKEAKAETGATVSVIYVPPAGAAAAIWEAVEADLDLAICITEGIPVRDMIEVKDRMRREGRKTLLLGPNCPGTITPDELKIGIMPGHIHRKGRIGVVSRSGTLTYEAVAQLTALGLGQSSAVGIGGDPINGLKHIDVMKMFNDDPDTDAVVMIGEIGGPDEANAAEWIKDNMKKPVVGFIAGVTAPPGKRMGHAGALISGGADTAEAKLEIMEACGITVTRNPSEMGRLLKASL

SEQ ID NO: 192379 - protein, 125 aa, Unknown
  Bacterial polypetide isolated from the Sargasso Sea
MVNGAGLAMATMDIIKLYGQEPANFLDVGGGASKEKVSAAFKIILSDKNVKGILINIFGGIMRCDVLAQGVVDAAKEININVPLVVRLAGTNFAEGKKILDNSGLKLISAENLDDAAKKIVEAIK

SEQ ID NO: 192380 - protein, 291 aa, Unknown
  Bacterial polypetide isolated from the Sargasso Sea
MSVLVNKNTKVICQGFTGSHGTFHSEQAIKYGTNLVGGVTPKKGGQTHLNKPVFNTVKEAKDNLGANATMIYVPAKFASAAIIEAIDASIDLIVCITEGIPILDMLKVKQKLQNSNSRLIGPNCPGIITPDECKIGIMPGSIHKKGSVGIVSRSGTLTYEAVAQTTENGLGQSTCIGIGGDPINGTNFIDCLDLFLKDDETESILMIGEIGGTSEEEAAEFIKNQKIKKPIVGFIAGVTAPPGRRMGHAGAIISGGKGGAMDKIKTMEDCGIIIAKSPSEIGKTLLNKLSN

SEQ ID NO: 192381 - protein, 186 aa, Unknown
  Bacterial polypetide isolated from the Sargasso Sea
MSVLVDKDTRLICQGFTGSHGTFHSEQAIKYGTKLVGGVTPRKGGQKHLGLPVFNTVKEAKDSEGANATMIYVPAKFAAAAIIEAIDASIELIVCITEGIPILDMIRVKQKLIKSNSRLIGPNCPGIITPNECKIGIMPGNIHKRGSVGIVSRSGTLTYEAVAQTSENGLGQSTCIGIGGDPINGT

SEQ ID NO: 192382 - protein, 276 aa, Unknown
  Bacterial polypetide isolated from the Sargasso Sea
ITLDRNTEMDVFMVSTEGGVEIEKVASETPDKIKKIWIDPLVGIKTFQLRKLAFGLKLNGVAFKEAVDTFRKMYNCYKNTDASLLEINPLVKTNNENIVALDSKFNFDNNALFRQKKILEMRDLSEEDKMEVEASKYNLNYIKLDGNVGCMVNGAGLAMATMDIIKLAGGEPANFLDVGGTASSETVKNGFRIILSDKNVKSILINIFGGIVRCDRVAKGVVEAVKELGLNVPIVVRLQGTNAEEAKIILEESSVSVIPADGMKDAAEKAVSEAKK

SEQ ID NO: 192383 - protein, 270 aa, Unknown
  Bacterial polypetide isolated from the Sargasso Sea
MSIIIHKNTKILVQGFTGKIGSFHAEEMIKYGSNVVGGVTPGKGGMTHLNLPVFNTVKEAVDQTGASTSILFVPPAFAADSAMEAADAGIKTCVAITDGIPSHDMVKIKRYMRRYPKDKKMGLVGPNCAGIISPGKSMLGIMPGHIYKEGKIGIVSRSGTLGYEAAQQLKDLEIGVSTSVGIGGDPINGSSFRDIIEKFENDDETIAVLMIGEIGGPQEVEAGQFAKENMSKPVIAYIAGLTAPKGRVMGHAGAIVSAYGESAIEKVELS

SEQ ID NO: 192384 - protein, 297 aa, Unknown
  Bacterial polypetide isolated from the Sargasso Sea
MSILLNKNTKVLIQGMTGRIGSFHAQEMVDYGTNLVAGVTPGKGGTKHLDRPIFNTVKDAVNETGAEACIIFVPAAAAADSIMEAADAGIKYCVSITDGIPAHDMMKVKRYMLRYKKEDKMILTGPNCAGTITPGEAMLGIMPGHIYMAGDVGVVGRSGTLGYEAASQMKSEGIGISTSVGIGGDPINGSSHKDILELFAEDDSTKAVMMIGEIGGPQEAEAADFVKENMKHKPVVAYIAGLTAPKGRRMGHAGAIISGKGESAAEKVELLQEAGVHIVPNPSELGTTMKAVLEKNS

SEQ ID NO: 192385 - protein, 295 aa, Unknown
  Bacterial polypetide isolated from the Sargasso Sea
MTVLVDKNSKIIIQGFTGKMGSFHADEMIKYGSNVVGGVTPGKGGSKHLNLPVFNTVKDAVNETGADASILFVPPAFAADSAMEAADAGIKICVAIVDGIPSHDMIRIKRYMRRYTKSSKMTLVGPNCAGIISPGKSMLGIMPGHIYKEGRIGIISRSGTLGYEAAQQLKNLNIGVSTSVGIGGDPINGSSFRDIIEKFETDDETDAILMIGEIGGPQEVAAGEFAKENMKKPVIAYIAGLTAPKGRVMGHAGAIVSAYGESAIEKVEILKECGITISKNPSVMGDTVKLVLEKM

SEQ ID NO: 192386 - protein, 295 aa, Unknown
  Bacterial polypetide isolated from the Sargasso Sea
MTVLIDKKSKIIIQGFTGKMGSFHADEMIKYGSNVVGGVTPGKGGSKHLNLPVFNTVKDAVSETGADASILFVPPAFAADSAMEAADAGIKTCVAIVDGIPSHDMIRIKRYMRRYTKSSKMTLVGPNCAGIISPGKSMLGIMPGHIYKEGRIGIISRSGTLGYEAAQQLKNLNIGVSTSVGIGGDPINGSSFRDIIEKFETDDETDAILMIGEIGGPQEVAAGEFAKENMKKPVIAYIAGLTAPKGRVMGHAGAIVSAYGESAIEKVEILKDCGITISKNPSVMGDTVKAVLEKI

SEQ ID NO: 192387 - protein, 200 aa, Unknown
  Bacterial polypetide isolated from the Sargasso Sea
CDLIVCITEGIPAKDEARMYDLLKRNTTSQLLGPNCPGLISPGKSNVGIMPHEITKEGNVGVVSRSGTLTYQAVHELTRLDIGQSTCIGIGGDPVPGMSFIDVLEAFEKDEQTEAIVMIGEIGGSAEEEAAEYISKLVSKPVVSYIAGVTAPPGKKMGHAGAIVSGNMGTASAKIEALTNAGVNVVNNPTKIGQAIKELI

SEQ ID NO: 192388 - protein, 242 aa, Unknown
  Bacterial polypetide isolated from the Sargasso Sea
RRPVFNTVEEAKNKTGAFATMIYVPAKFAAAAINEAIDASIELIVCITEGIPILDMLKVKQKLSKSNSRLIGPNCPGIITPDECKIGIMPGNIHKKGSVGIVSRSGTLTYEAVAQTTSNGLGQSTCIGIGGDPINGTSFIDCLDLFLNDPETESILMIGEIGGIAEEEASEFIKNHKIKKPMVGFIAGITAPPGRRMGHAGAIISGGKGGAIEKIKTMEDAGITIAKSPADIGKTLLLKLSN

SEQ ID NO: 192389 - protein, 291 aa, Unknown
  Bacterial polypetide isolated from the Sargasso Sea
MSIIVNKDSKIIVQGITGSEGSFHSSQMLDYGTNIVGGVTPGKGGTKVIDDRVMVYNSVEEAKANTGANVSIIFVPPPFAAEAIIEASEAGISVIVCISEGIPVRDMVLVKRVIEQNNTMLIGPNCPGVISVDECKLGIMPGFICKKGNIGVVSKSGTLTYEAIGQLVDAGLGQTTAIGIGGDPIIGTSMIDVLNLFEKDDETKGVVLIGEIGGQMENDAAKWAKDNMSKPIVGFIAGQTAPKGRRMGHAGAIVSGGDDTAEAKMKIMKDCGILVCESVAEIGRKMKKALQ

SEQ ID NO: 192390 - protein, 217 aa, Unknown
  Bacterial polypetide isolated from the Sargasso Sea
VPPSFAAEAIIEASYAGINLIVCITEGLPVHDMLQAKRIISQNGTRLIGPNCPGIITVDECKLGIMPGFICKKGNIGVISKSGTLTYEAIDQLVSVGLGQTTAIGIGGDPIIGTTMRDCLELFESDPETEGVIIIGEIGGQMEIEAARWAKNNMSKPIVGFIAGQTAPPGRRMGHAGAIVSGGDDTAEAKMRILNECGIEVADSVADIGQLMKNLMK

SEQ ID NO: 192391 - protein, 258 aa, Unknown
  Bacterial polypetide isolated from the Sargasso Sea
MSVLIDKSTKAIFQGFTGSQATMHAEQCIEYGTNVVGGVTPNKGGQEHLGKPVFNSVEEAIKETAADTSVIFVPAKFAKSAIIEATEAGINLIICITEGVPVLDMVDVVNVLKSHPEVRLIGPNCPGVISPGKAKLGIMPASIHLEGTVGIVSRSGTLTYEAVKQTTDAGLGQSTCIGIGGDPVNGTSFIDALEMFENDSQTESIVMVGEIGGSAEEEAAEYIRDNIKKPVVSYIAGVTAPKGKRMGHAGAIISGGKG

SEQ ID NO: 192392 - protein, 162 aa, Unknown
  Bacterial polypetide isolated from the Sargasso Sea
MSILVNKNTKLLCQGFTGSHGTFHSEQAIKYGTNLVGGVTPRKGGQIHLGKPVFNTVKEAVEATGANATMIYVPAKFASEAIIEAIEASIDLVVCITEGIPVLDMLKVKKYLSNSNTKLIGPNCPGIITPDECKIGIMPGSIHRKGSVGIVSRSGTLTYEAV

SEQ ID NO: 192393 - protein, 117 aa, Unknown
  Bacterial polypetide isolated from the Sargasso Sea
MATMDIIKLFGETPANFLDVGGGASKEKVSSALKIILSDKNVKGILINIFGGIMRCDVLAAGVVDAAKEMKIHVPLVVRLAGTNVEEGNKILKESKLKIIPASDLSDAAEKIVKEIN

SEQ ID NO: 192394 - protein, 249 aa, Unknown
  Bacterial polypetide isolated from the Sargasso Sea
GKGGQIHLDLPVFNTVKEAVDATGASASIIFVPAKFCKSSILEAAESGISLIVCITEGIPTIDMLEVKVRCDELGVRLIGPNCPGIITPGEAKMGIMPGDIHLPGKVGIISRSGTLTYEAVKQTTDLGFGQTSCVGIGGDPIPGTSFIDVLDLFEKDNSTEAIVMVGEIGGTAEEAAAEFIQSNVTKPVVSYIAGVTAPPGKRMGHAGAIIAGGKGTAEDKFKALESAGVYTVKSPAEIGKGIAEVSGW

SEQ ID NO: 192395 - protein, 291 aa, Unknown
  Bacterial polypetide isolated from the Sargasso Sea
MNILNQDSNKVLIQGLGRDGSFQAERCIEFGTNIVSGVHPTKSGETFNRNIPIFGSVFEAVKKTSPEIGLIFVPAPFAADAIIEQIDASIPIIVCVTEGIPVSDMVKVNEYLKGKKTKLIGPNCPGYLIPDKKLKVGIIPGSIVKSGNVGVVSRSGTLTYEAIVQLTKLGIGQSACVGIGGDPINGTSFVDVLDMFEEDKKTEAIVMIGEIGGTKEQEAAERIKSSISKPVVASIVGQTAPEGRRMGHAGAVITGKSALASEKINSLRDAGVLIADSPTEIGLKVQELLKN

SEQ ID NO: 192396 - protein, 295 aa, Unknown
  Bacterial polypetide isolated from the Sargasso Sea
MAILITKESKIIIQGFTGKIGTFHAEEMMEYGTNVVGGVTPGKGGQKHLDRPVFNTVKDAVEETGADASILFVPPAFAADSAMEAADAGIKTLVAITDGIPAHDMIKVKRYMRRYKAEDRMTMVGPNCAGVISPGKCMLGIMPGHIYKEGNVGVIGRSGTLGYEAAQQMKDLGIGISTSVGIGGDPINGSAFKDHLAKFEKDDETKAIVMIGEIGGPQEAEAAEYAKNNISKPIIAYIAGLTAPKGKRMGHAGAIVSSHGESAAEKVEILKKAGITIAKNPSVIGETVETVLKAL

SEQ ID NO: 192397 - protein, 266 aa, Unknown
  Bacterial polypetide isolated from the Sargasso Sea
MSILVNKDSRIVVQGITGSEGTFHSNQMIDYGTNIVAGVTPGKGGQTALESKVPVFDCVEDAMKTTDANVSIIFVPPPFAADAVIEASESGIDLIVCITEGVPIHDMVKAKNIIDRNSTRLVGPNCPGIITVDECKVGIMPGFICKRGNIGVLSKSGTLTYEAIGQLVNVGLGQTTAIGIGGDPIIGTTMIDALRLFEEDPETEGVVLIGEIGGQMENDAASWIKENMSKPVTGFIAGQTAPPGRRMGHAGAIVSGGDDTAEAKMK

SEQ ID NO: 192398 - protein, 291 aa, Unknown
  Bacterial polypetide isolated from the Sargasso Sea
MSVLVNKNTKLICQGFTGSHGTFHSEQAIKYGTNLVGGVTPKKGGQTHLDRPVFNTVKEAVDKTGANATMIYVPAKFASAAIIEAIEANLELIVCITEGIPVLDMIKVKKKLLNSKSRLIGPNCPGIITPDECKIGIMPGNIHKKGSVGIVSRSGTLTYEAVAQTTENDLGQSTCIGIGGDPINGTNFIDCLDLFLKDEETKSILMIGEIGGSAEEEAAEFVKNHDIKKPMVGFIAGVTAPPGRRMGHAGAIISGGKGGAKDKIKKMEDCGIEVATSPSEIGKTLLNKLSN

SEQ ID NO: 192399 - protein, 291 aa, Unknown
  Bacterial polypetide isolated from the Sargasso Sea
MSVLVNKNTKVICQGFTGAHGTFHSEQAIQYGTNLVGGVTPKKGGQKHLDRPVFNSVLEAKKEVGADATMIYVPAKFAAAAIIEAIDASVELIVCITEGIPIQDMLKVRQKLNGSKSRLIGPNCPGIITPDECKIGIMPGNIHKRGSVGIVSRSGTLTYEAVAQTTENGLGQSTCIGIGGDPINGTNFIDCLDLFLNDDETKSILMIGEIGGNAEEEAAEFIKNHKIKKPIVGFIAGITAPPGRRMGHAGAIISGGKGGAGDKIKKMEECGITIANSPSKIGKTLFNKLSN

SEQ ID NO: 192400 - protein, 165 aa, Unknown
  Bacterial polypetide isolated from the Sargasso Sea
MSVLVNKNTKVICQGFTGSHGTFHSEQAIKYGTNLVGGVTPKKGGQKHLERPVFNTVLEAKNEVGADATMIYVPAKFAAAAIIEAIDASIDLIVCITEGIPVQDMLKVRQSLASSNSRLIGPNCPGIITPDECKIGIMPGNIHKRGSVGIVSRSGTLTYEAVAQT

SEQ ID NO: 192401 - protein, 289 aa, Unknown
  Bacterial polypetide isolated from the Sargasso Sea
MSILVNNNTKVICQGFTGKHGTFHSQQAIEYGTQLVGGVTPGKGGAEHLNLPIFDNVADAVTSTGANASVIYVPPQFAAAAIIEAIGAEIEIIVCITEGIPVLDMLEVRALLNKSNSILVGPNCPGIITPGECKIGIMPGHIHRAGSIGIVSRSGTLTYEAVAQTTAVGYGQSTCVGIGGDPIKGIDFIEVIDRFYSDPKTEAIIMIGEIGGSAEEEAAEFIRKNKKGKPIIGFIAGLTAPPGRRMGHAGAIVDGNSGSAETKIDAMKSAGIIMSSSPAMLGSTLKNIK

SEQ ID NO: 192402 - protein, 194 aa, Unknown
  Bacterial polypetide isolated from the Sargasso Sea
MSVLVNKNTKVICQGFTGSHGTFHSEQAIKYGTYLVGGVTPKKGGQRHLDRPVFNSVIDAKNEVGADASMIYVPAKFAAAAIIEAIDASIELIVCITEGIPVQDMLKVKQKLKGSKSRLIGPNCPGIITPEECKIGIMPGNIHKRGSVGIVSRSGTLTYEAVAQTTENGLGQSTCIGIGGDPINGTNFIDCLDL

SEQ ID NO: 192403 - protein, 190 aa, Unknown
  Bacterial polypetide isolated from the Sargasso Sea
MVEIKKRIIAQQTYFIGPNCPGIVTPEECKIGIMPGFIHKKGKIGIVSRSGTLTYEAVWQTSKIGLGQTTCVGIGGDPVHGMSFIDCLKLFLNDEDTEGILMIGEIGGTAEEDAAEFIRNYKTKKPISAFIAGLSAPKGKRMGHAGAIIQGNKGTAESKIKALESAGIAVASSPAKLGETMLNQIQKSNY

SEQ ID NO: 192404 - protein, 291 aa, Unknown
  Bacterial polypetide isolated from the Sargasso Sea
MSVLVNKNTKLICQGFTGSHGTFHSEQAIKYGTNLVGGVTPKKGGQTHLDRPVFNTVKEAVDETGANATMIYVPAKFASAAIIEAIEANLELIVCITEGIPVLDMIKVKKKLLNSKSRLIGPNCPGIITPDECKIGIMPGNIHKKGSVGIVSRSGTLTYEAVAQTTENDLGQSTCIGIGGDPINGTNFIDCLDLFLKDEETKSILMIGEIGGSAEEEAAEFVKNHEIKKPMVGFIAGVTAPPGRRMGHAGAIISGGKGGAKDKIKKMEDCGIEVATSPSEIGKTLLNKLSN

SEQ ID NO: 192405 - protein, 291 aa, Unknown
  Bacterial polypetide isolated from the Sargasso Sea
MSILIDKNTKVICQGFTGKHGTFHSEQAIKYGTQLVGGVTPKKGGQKHLNLPVFDTVKDAINKTGATATMIYVPAKFAASAIIEAIDAEIDLIVCITEGVPVLDMVKVKNLLKKSRSRLIGPNCPGIITPGECKIGIMPGDIHKKGKVGIVSRSGTLTYEAVAQTTENGMGQSTCIGIGGDPINGTNFIDCLELFLKDPETESIIMIGEIGGSAEEEASDFIKRSKINKPIVGFIAGLTAPPGRRMGHAGAIISGGQGGAENKIELMKSAGITISESPADIGKTLFNKLNS

SEQ ID NO: 192406 - protein, 291 aa, Unknown
  Bacterial polypetide isolated from the Sargasso Sea
MSILVSKSTKVICQGFTGKHGTFHSEQAIKYGTQLVGGVTPKKGGQKHLSLPVFDTVKDAKKTTGATATMIYVPAKFTAAAIIEAIDAEMELIVCITEGVPVLDMINVKNHLKKSKSRLVGPNCPGIITPEECKIGIMPGEIHKKGNVGIVSRSGTLTYEAVAQTTENGLGQSTCIGIGGDPINGTNFIDCLDLFFKDPETESIIMIGEIGGSAEEEASEFIKKSKNKKPIVGFIAGLTAPPGRRMGHAGAIISGGQGGAENKIELMKSAGITISESPADIGKTLYKKLNS

SEQ ID NO: 192407 - protein, 206 aa, Unknown
  Bacterial polypetide isolated from the Sargasso Sea
IKSIYKMFIDIDANLVEINPLILTKENKIICLDAKMSFDDNALFRNPEILNLRDLNEEEEIEIEANKHGLSYIKLEGSIGCMVNGAGLAMATMDIIKLYGEEPANFLDVGGGASKEKVSKAFKIILSDKNVKGILINIFGGIMRCDVLAQGVVDAAKEVKIEVPLIVRLAGTKFEEGKKILDNSGLKIISASDLSDAAKKVVESIK

SEQ ID NO: 192408 - protein, 289 aa, Unknown
  Bacterial polypetide isolated from the Sargasso Sea
MKNILNKDSNKVLVQGLGRDGSFQTEKCIEFGTEVVAGVHPTKAGENFKGIPIFGSVDEAVSQTSPDIGLIFVPAPFASDAIIEQVDAGIETVVCITEGIPVNDMLKVNNYIKGKKVRLIGPNCPGFLIPRKKLKVGIIPGSIVTDGKVGVVSRSGTLTYEAIVQLTMLGIGQSACVGIGGDPLHGTSFVDVLEMFEEDQNTEAIVMIGEIGGTREQAAAQMIKNSISKPVVASIVGQTAPEGRRMGHAGAVITGKSALASEKIKSLKSAGVYIADSPTEIGLRLKELI

SEQ ID NO: 192409 - protein, 136 aa, Unknown
  Bacterial polypetide isolated from the Sargasso Sea
AYIKLDGSIGCMVNGAGLAMATMDIIKLYGKEPANFLDVGGGASREKVSAALKIILSDKNVKGILINIFGGIMRCDVLAQGVVDAAKEINISVPLVVRLAGTNFQEGKEILDNSGLELISAENLDDAAKKIVEAIK

SEQ ID NO: 192410 - protein, 296 aa, Unknown
  Bacterial polypetide isolated from the Sargasso Sea
MSVLIDKKTKIIVQGFTGKMGSFHAEEMIKYGTNVAGGVTPGKGGMKHLNLPVFNTVKEAVKNTGASASILFVPPAFAADSAMEAADAGIKTCVAIVDGIPSHDMIKIKRYMRRYSRTEKMTLVGPNCAGVISPGKAMLGIMPGHIYKEGKIGIIGRSGTLGYEAAQQLKNLNIGVSTSVGIGGDPINGSSFKDILEKFEQDDETEAVLMIGEIGGPQEVAAGKFAKENMKKPVIAYIAGLTAPKGRVMGHAGAIVSAYGESAVEKVELLKECGVIISKNPSVMGETVKSALNSKN

SEQ ID NO: 192411 - protein, 253 aa, Unknown
  Bacterial polypetide isolated from the Sargasso Sea
MSVLIDKSTKAIFQGFTGSQATMHAEQCIEYGTNVVGGVTPNKGGQEHLGKPVFNSVEDAIKETAADTSVIFVPAKFTKSAIIEAAEAGINLIICITEGVPVLDMVDVINALKSHPEVRLIGPNCPGVISPGKAKLGIMPASIHLEGTVGIVSRSGTLTYEAVKQTTDAGLGQSTCIGIGGDPVNGTSFIDALEMFENDSQTESIVMVGEIGGSAEEEAAEYIRDNIKKPVVSYIAGVTAPKGKRMGHAGAII

SEQ ID NO: 192412 - protein, 137 aa, Unknown
  Bacterial polypetide isolated from the Sargasso Sea
LAYIKLDGSIGCMVNGAGLAMATMDIIKLYGKEPANFLDVGGGASKEKVSAALKIILSDKNVKGILINIFGGIMRCDVLAQGVVDAAKEINISVPLVVRLAGTNFKEGKEILDNSGLKLISAENLDDAAKKIVEAIK

SEQ ID NO: 192413 - protein, 125 aa, Unknown
  Bacterial polypetide isolated from the Sargasso Sea
MVNGAGLAMATMDIIKLYGKEPANFLDVGGGASKEKVSAALKIILSDKNVKGILINIFGGIMRCDVLAQGVVDAAKEINIGVPLVVRLAGTNFKQGKEILDNSGLKLISAENLDDAAKKIVEAIK

SEQ ID NO: 192414 - protein, 207 aa, Unknown
  Bacterial polypetide isolated from the Sargasso Sea
MSILVNKDTKLIVQGFTGSQGTLHSEQSIEYGTNIVGGVTPGKGGIKHLGKPVFNSVHDAVKELNPNASIIFVPAKFCKDSIMEAADAGIKLIICITEGIPTIDMLDVKRHIDDLGIRLIGPNCPGIITPGEAKLGIMPGDIHIPGSIGIISRSGTLTYEAVKQTTDLGFGQSSCVGIGGDPIPGSSFIDMLKLFEDDDKTEAIVMV

SEQ ID NO: 192415 - protein, 244 aa, Unknown
  Bacterial polypetide isolated from the Sargasso Sea
MSILLNKKTSILVQGITGSEGLFHAQQMLDYGSNVVCGVTPGKGGQTVTEKNLPVFNSIEEAKKEFSIDATVIFVPPRFAANAILEAINQNIGLIVCISEGIPVRDMKKVKSALDNSSSTLIGPNCPGLITAEESKIGITPGFICKKGSIGILSRSGTLTYEAIDQIVNVGLGMTTAVGIGGDPIIGSSMIDILKHFANDDETRGVVMIGEIGGSMENEAAEWIKDNFNKPVVSFIAGQTAPKG

SEQ ID NO: 192416 - protein, 170 aa, Unknown
  Bacterial polypetide isolated from the Sargasso Sea
DIDSNALFRQEKIAKFHDTSEEDPLELKASEYGLNYIKLDGNVGCMVNGAGLAMATMDIVKHHGGEPANFLDVGGAANVDTIKNGFKIILSDPNVKSVLINIFGGIVRCDRVANGVIQAVKELNLNVGVVVRLQGTNAKLAKQILDESDIELISAETIDEAAQKAVGLVS

SEQ ID NO: 192417 - protein, 296 aa, Unknown
  Bacterial polypetide isolated from the Sargasso Sea
MAILITKESKIIIQGFTGKIGTFHAEEMMEYGTNVVGGVTPGKGGQKHLNRPVFNTVKDAVEETGADASILFVPPAFAADSAMEAADAGIKTLVAITDGIPAHDMIKVKRYMRRYKAEDRMTMVGPNCAGVISPGKCMLGIMPGHIYKEGNVGVIGRSGTLGYEAAQQMKDLGIGISTSVGIGGDPINGSAFKDHLAKFEKDDETKAIVMIGEIGGPQEAEAAEYAKNNISKPVIAYIAGLTAPKGKRMGHAGAIVSSHGESAAEKVEILKKAGITIAKNPSVIGETVETVLKALQ

SEQ ID NO: 192418 - protein, 269 aa, Unknown
  Bacterial polypetide isolated from the Sargasso Sea
FHSEQAIKYGTNLVGGVTPKKGGQMHLDRPVFNSVVEAKDAVGADATMIYVPAKFAAAAIIEAIDASVELIVCITEGIPIQDMLKVRKKLDGSNSRLIGPNCPGIITPDECKIGIMPGSIHKRGSVGIVSRSGTLTYEAVAQTTENGLGQSTCIGIGGDPINGTNFIDCLDLFLNDEETQSILMIGEIGGSAEEEAAEFLKNHKIKKPTVGFIAGITAPPGRRMGHAGAIISGGKGGAEDKIKKMEECGIIVAKSPSIIGKTLFDKLSN

SEQ ID NO: 192419 - protein, 317 aa, Unknown
  Bacterial polypetide isolated from the Sargasso Sea
MRPEYHPCIKFRGGSKFSCKSIKGRYRVSILINESTKVICQGFTGGQATQHCIQCIDYGTQLVGGVTPGKGGQIHLDLPVFNSVKEAVDATGASASIIFVPAKFCKASILEAAESGISLIVCITEGIPTIDMLEVKVRCDELGARLIGPNCPGIITPGEAKMGIMPGDIHLPGKVGIISRSGTLTYEAVKQTTDLGFGQTSCVGIGGDPIPGTSFIDVLDLFEKDKSTEAIVMVGEIGGTAEEAAAEFIQSNVTKPVVSYIAGVTAPPGKRMGHAGAIIAGGKGTAEEKFKALELAGVYTVKSPAEIGKGVAEVTGW

SEQ ID NO: 192420 - protein, 181 aa, Unknown
  Bacterial polypetide isolated from the Sargasso Sea
MSVLVNKNTKVICQGFTGMHGTFHSEQAIKYKTKLVGGVTPKKGGQKHLNLPVFNSVQEAKDETSADATMIYVPPKFASDAIIESIEAKMELIVCITEGIPVLDMIKVKKVLKNSRSRLIGPNCPGIITPEECKIGIMPGNIHKKGSVGIVSRSGTLTYEAVAQTTANGMGQSTCIGIGGD

SEQ ID NO: 192421 - protein, 211 aa, Unknown
  Bacterial polypetide isolated from the Sargasso Sea
MSVLVNKNTRVICQGFTGSHGTFHSEQAIKYGTNLVGGVTPKKGGQVHLERPVFNSVREAKETTDANATMIYVPAKFAASAINEAIDSSIDLIVCITEGIPILDMLKVKKKLTNSNSRLIGPNCPGIITPDECKIGIMPGNIHKKGSVGIVSRSGTLTYEAVAQTTEIGLGQSTCIGIGGDPINGTNFIDCLDLFLNDEETKSILMIGEIG

SEQ ID NO: 192422 - protein, 291 aa, Unknown
  Bacterial polypetide isolated from the Sargasso Sea
MSILVNKNTRLICQGFTGNHGTFHSEQAIKYGTNLVGGVTPKKGGQTHLSKPVFNSVKEAKEKTDANASMIYVPAKFAASAIIEAIEASIELIVCITEGIPILDMLKVKKKLSNSNSRLIGPNCPGIITPEECKIGIMPGNIHKKGSVGIVSRSGTLTYEAVAQTTNNGLGQSTCIGIGGDPINGTNFIDCLDLFLNDEETKSILMIGEIGGIAEEEAAEFFKNHKIKKPMVGFIAGITAPPGRRMGHAGAIISGGKGGAEDKIKKMQDCGITIAKSPAEIGKTLLNKLSN

SEQ ID NO: 192423 - protein, 139 aa, Unknown
  Bacterial polypetide isolated from the Sargasso Sea
HDLSYIKLDGSIGCMVNGAGLAMATMDIIKLQGEEPANFLDVGGGASKEKVSAAFKIILSDTNVKGILINIFGGIMRCDILAQGVVDAANEIKIEVPLVVRLAGTKFEEGKKILDNSGLKIISATDLSDAAKKIVQAIK

SEQ ID NO: 192424 - protein, 294 aa, Unknown
  Bacterial polypetide isolated from the Sargasso Sea
MSIIIDKNTKVICQGFTGSQGTYHSQQAIDYGTKMVGGVTPGKGGTTHLDLPVFNSVKEAKDHTQADATVIYVPAKFATKAIHEALDADIKIITCITEGIPVLDMVEIKKRIIEQKTYFIGPNCPGLVTPGECKIGIMPGFIHQPGKIGIVSRSGTLTYEAVWQTSQVGLGQTTCVGIGGDPVHGMNFIDCLDLFLKDEATKGILMIGEIGGTAEEDAAEFISKSSIKKPMSSFIAGVSAPKGKRMGHAGAIISGNKGTAQSKIDALESANIAVAPSPAKMGETMLAEMQKGYN

SEQ ID NO: 192425 - protein, 118 aa, Unknown
  Bacterial polypetide isolated from the Sargasso Sea
MATMDIIKQFGEEPANFLDLGGTANKDRVIMGFKIIQSDPNVKSILINIFGGIIHCDMIANGIVEAVKELDFKLPLVVRFQGTNARQGRDVINNSSLGLISIDDFTEAAKKVVELSKK

SEQ ID NO: 192426 - protein, 169 aa, Unknown
  Bacterial polypetide isolated from the Sargasso Sea
MSVLVNKNTKVICQGFTGSHGTFHSEQAIQYGTNLVGGVTPKKGGQKHLERPVFNTVLEAKKEVGADATMIYVPAKFAAAAIIEAIDASIDLIVCITEGIPVQDMLKVRQSLADSKSRLIGPNCPGIITPDECKIGIMPGNIHKRGSVGIVSRSGTLTYEAVAQTTEKW

SEQ ID NO: 192427 - protein, 296 aa, Unknown
  Bacterial polypetide isolated from the Sargasso Sea
MSVLIDKKTKIIVQGFTGKMGSFHAEEMIKYGSNVVGGVTPGKGGIKHLNLPVFNTVKEAVKNTGASASILFVPPAFAADSAMEAADAGIKTCVAIVDGIPSHDMIKIKRYMRRYSRTEKMTLVGPNCAGVISPGKAMLGIMPGHIYKEGKIGIIGRSGTLGYEAAQQLKNLNIGVSTSVGIGGDPINGSSFKDILEKFEQDNETEAVLMIGEIGGPQEVAAGKFAKENMKKPVIAYIAGLTAPKGRVMGHAGAIVSAYGESAVEKVELLKECGVIISKNPSVMGETVKSALNSKT

SEQ ID NO: 192428 - protein, 291 aa, Unknown
  Bacterial polypetide isolated from the Sargasso Sea
MAVLINKNTKVICQGFTGSHGTFHSEQSIKYGTNLVGGVTPKKGGQTHLDRPVFNTVAEAKKSTDANATMIYVPARFAADAIIEAIDASIDLIVCITEGIPVLDMLKVKKHLLKSKSRLIGPNCPGIITPGECKIGIMPGNIHKKGTVGIVSRSGTLTYEAVAQTTENGLGQSTCIGIGGDPINGTNFIDCLDLFLNDPETESILMIGEIGGSAEEEASEFVKNHKIKKPIVGFIAGITAPPGRRMGHAGAIISRGKGSAEEKIKIMENAGITIAKSPADIGITLYKKLSL

SEQ ID NO: 192429 - protein, 289 aa, Unknown
  Bacterial polypetide isolated from the Sargasso Sea
MAILIDENTRVVVQGLTGREGQFHALRNRDYGTNIVAGTRPGKGGENIESIPIFNTVEEAVKEEGANVAMTFVPPAFAKEAVLEAAFAGCELIVCITEGIPAKDEAEMYDIIKKETNSKLLGPNCPGLISPGKSNVGIMPHEITKQGNVGVVSRSGTLTYQAVHELTQLEIGQSTCIGIGGDPVPGMSFIDVLQEYEKDDETSSIVMIGEIGGSAEEEAADFIKNNISKPVVSYIAGVTAPPGKKMGHAGAIVSGNKGTAVAKMDALKDAGVNVVSNPTKIGNAIKKVI

SEQ ID NO: 192430 - protein, 289 aa, Unknown
  Bacterial polypetide isolated from the Sargasso Sea
MSVLIDKSTKAIFQGFTGSQATMHAEQCIEYGTNVVGGVTPNKGGQEHLGKPVFNSVEDAIKETAADTSVIFVPAKFTKSAIIEAAEAGINLIICITEGVPVLDMVDVINALKSHPEVRLIGPNCPGVISPGKAKLGIMPASIHLEGTVGIVSRSGTLTYEAVKQTTDAGLGQSTCIGIGGDPVNGTSFIDALEMFENDSQTESIVMVGEIGGSAEEEAAEYIRDNIKKPVVSYIAGVTAPKGKRMGHAGAIISGGKGTAQDKFKALESAGVGVVTDLNLIGSRLKESL

SEQ ID NO: 192431 - protein, 297 aa, Unknown
  Bacterial polypetide isolated from the Sargasso Sea
MTVLIDKKTKILIQGFTGKMGSFHAEEMIKYGSNVVGGVTPGKGGINHLNLPVFNTVKEAVEKTGASASILFVPPAFAADSAMEAADAGIKTCVAIVDGIPSHDMIKIKRYMRRYSRTDKMTLIGPNCAGVISPGKAMLGIMPGHIYKEGRVGIIGRSGTLGYEAAQQLKNLNIGVSTSVGIGGDPINGSSFKDILEKFEQDKETDAVLMIGEIGGPQEVAAGQFAKENMKKPVIAYIAGLTAPKGRVMGHAGAIVSAYGESAVEKVELLKECGVTISKNPSVMGETVKSALNGKAT

SEQ ID NO: 192432 - protein, 221 aa, Unknown
  Bacterial polypetide isolated from the Sargasso Sea
MSVLVNKKTKVICQGFTGAHGTFHSEQAIKYGTNLVGGVTPKKGGQKHLDRPVFNSVSEAKDAVGADATMIYVPAKFAAAAIIEAIDASVELIVCITEGIPIQDMLKVRKKLDGSNSRLIGPNCPGIITPDECKIGIMPGNIHKRGSVGIVSRSGTLTYEAVAQTTENGLGQSTCIGIGGDPINGTNFIDCLDLFLNDEETQSILMIGEIGGSAEEEAAEF

SEQ ID NO: 192433 - protein, 295 aa, Unknown
  Bacterial polypetide isolated from the Sargasso Sea
MTVLIDKNSKIIIQGFTGKMGSFHADEMIKYGSNVVGGVTPGKGGSKHLNLPVFNTVKDVVSETGADASILFVPPAFAADSAMEAADAGIKTCVAIVDGIPSHDMIRIKRYMRRYTKSSKMTLVGPNCAGIISPGKSMLGIMPGHIYKEGRIGIISRSGTLGYEAAQQLKNLNIGVSTSVGIGGDPINGSSFRDIIEKFETDDETDAILMIGEIGGPQEVAAGEFAKENMKKPVIAYIAGLTAPKGRVMGHAGAIVSAYGESAIEKVEILKECGITISKNPSVMGDTVKAVLEKM

SEQ ID NO: 192434 - protein, 290 aa, Unknown
  Bacterial polypetide isolated from the Sargasso Sea
MSILIDKDTKVICQGFTGGQATQHCVQCIDYGTQLVGGVTPGKGGQTHLDLPVFDSVKEAVDQTGATASIIFVPARFCKASILEAAESGISLIICITEGIPTIDMLEVKVRCDDLGVRLIGPNCPGIITPGECKMGIMPGDIHLPGKVGVISRSGTLTYEAVKQTTDLGFGQTSCVGIGGDPIPGSSFIDILDLFENDSVTEAIVMVGEIGGTAEEAAAEFIQSNVTKPVVSYIAGVTAPAGKRMGHAGAIIAGGKGTAEDKFKALEAAGVYTVKSPADIGKGIAEVTGW

SEQ ID NO: 192435 - protein, 244 aa, Unknown
  Bacterial polypetide isolated from the Sargasso Sea
MSILVNKNTKVICQGFTGKHGTFHSEQAIKYGTQLVGGVTPKKGGQKHLNLPVFNTVKDAKKTTGATATMIYVPAKFTASAIIEAIDAEIELIVCITEGVPVLDMIKVKNHLKKSRSRLIGPNCPGIITPGECKIGIMPGEIHKKGKVGIVSRSGTLTYEAVAQTTENGMGQSTCIGIGGDPINGTNFIDCLDLFFKDPDTESIIMIGEIGGSDEEEASEFIKKSNNKKPIVGFIAGLTAPPGR

SEQ ID NO: 192436 - protein, 289 aa, Unknown
  Bacterial polypetide isolated from the Sargasso Sea
MSILVNKDTRVIVQGFTGSQGTLHSEQSIEYGTNIVGGVTPGKGGIEHLGKPVFNSVEDAKSSLDPNASIIFVPARFCKDSILESAEAGIKLIICITEGIPTLDMLEVKKRVDELGVRLIGPNCPGIITPGEAKLGIMPGDIHMPGSIGIISRSGTLTYEAVKQTTDLGFGQSSCVGIGGDPIPGSSFIDMLKLFEDDKQTEAIVMVGEIGGTAEEAAAEYIKNNITKPVISYIAGKTAPVGKRMGHAGAIIAGGKGTADNKIEKLQECGVYVADNLVSIGSKVAEVLG

SEQ ID NO: 192437 - protein, 291 aa, Unknown
  Bacterial polypetide isolated from the Sargasso Sea
MSILINKNTKVICQGFTGKHGSFHSEQSIKYGTKLVGGVTPNKGGQKHLGLPVFNTVHEAKSKTDANASMIYVPPKFAAQAILEAIDANLELIVCITEGIPIIDMIKVKKVLKKSKSRLIGPNCPGIITPDECKIGIMPGNIHRKGNVGIVSRSGTLTYEAVAQTTENGMGQTTCIGIGGDPVNGTNFIDCLELFLKDEETKSIIIIGEIGGNAEEEASDFLRKSKIKKPMVGFVAGLTAPPGRRMGHAGAIISGGKGGAEDKIEKMKSADITIANSPADIGKTLLEKLNG

SEQ ID NO: 192438 - protein, 291 aa, Unknown
  Bacterial polypetide isolated from the Sargasso Sea
MSILVNKNTKVICQGFTGTHGTFHSEQAKNYGTKLVGGVTPKKGGQKHLGLPVFNTVQEAKDQTSANATMIYVPPKFAGSAIIEAIEAKIELIVCITEGIPVIDMLKVKKILSKSTSRLIGPNCPGIITPNECKIGIMPGNIHKKGSVGIVSRSGTLTYEAVAQTSYNGMGQSTCIGIGGDPINGTNFIDCLKLFLKDEETKSIVMIGEIGGSAEEEAAQFLKREKNKKPMVGFIAGLTAPPGRRMGHAGAIIDGGKGGAEDKIEIMKSAGITISKSPADIGKTLFEKLNG

SEQ ID NO: 192439 - protein, 219 aa, Unknown
  Bacterial polypetide isolated from the Sargasso Sea
FGSPAFTADAIMEALAAEIPLIVSITEGVPVVDMIQVVDFVSKKGCRLIGPNCPGIITPGQCKIGIMPGAIHKTGRIGIVSRSGTLTYEAVSQITRVNLGQSTCIGIGGDPVNGTNFIDCLSLFEKDEQTEAIVMIGEIGGDAEEQAADYVKNNVTKPIVSFIAGQTAPPGRRMGHAGAIISGGHGTAEEKMSALKEAGVHVINSLDEIGNKMLEALGN

SEQ ID NO: 192440 - protein, 197 aa, Unknown
  Bacterial polypetide isolated from the Sargasso Sea
MSIIINKNTKVICQGFTGSQGTYHSQQAIDYGTKMVGGVTPGKGGSTHLGLPVFNTVKEAKDHTLADATVIYVPAKFATKAIHEALDANIKIITCITEGIPVLDMVEIKKRIIEQKTYFIGPNCPGLVTPGECKIGIMPGFIHQPGKIGIVSRSGTLTYEAVWQTSQAGLGQTTCVGIGGDPVHGMNFIDCLDLFLQ

SEQ ID NO: 192441 - protein, 224 aa, Unknown
  Bacterial polypetide isolated from the Sargasso Sea
RCQHDICACKFAADAMKSAIESEIGLIVCITEGVPVQDMIEVKAMLKGSDSILLGPNCPGIITPEETKIGIMPGFIHQKGSIGIISRSGTLTYEAVHQTSMCGLGQSTCIGIGGDPIKGLNFIECLSLFEEDPATEGIVMVGEIGGSDEEKAAEFIKDNITKPVVAYVAGVSAPPGKRMGHAGAIVTGNEGTASSKYKALNDAGVKTTDSPALIGEIMKELLNQ

SEQ ID NO: 192442 - protein, 294 aa, Unknown
  Bacterial polypetide isolated from the Sargasso Sea
MSIIINKDTKVICQGFTGSQGTFHSKQAIDYGTQMVGGVTPGKGGSIHLNLPVFDSVQEAVDRTKPDATVIYVPAKFATKAIHEAIDANIKIITCITEGIPVLDMVEIKKRIIEQNIYFIGPNCPGLVTPEECKIGIMPGFIHKKGKIGIVSRSGTLTYEAVWQTSEIGLGQTTCVGIGGDPIHGMNFIDCIDLFLHDEETKGILMIGEIGGSAEEDAAEFIKKSSIKKPTAAFIAGITAPKGKRMGHAGAIISGNKGTAESKIKALEQSNVLIAPSPAKLGETMLKAMQKSYT

SEQ ID NO: 192443 - protein, 194 aa, Unknown
  Bacterial polypetide isolated from the Sargasso Sea
MSILINKDTKVITQGITGKTGQFHTRACREYANGREAYVAGVNPKKAGEDFEGIPIYASVAEAKAETGATVSVIYVPPAGAAAAIWEAVEADLDLAICITEGIPVRDMIELKARMRAKNSKTLLLGPNCPGTITPDELKIGIMPGHIHRKGRIGVVSRSGTLTYEAVGQLTAIGLGQSSAVGIGGDPINGLKHI

SEQ ID NO: 192444 - protein, 291 aa, Unknown
  Bacterial polypetide isolated from the Sargasso Sea
MSILVNKNSRVVVQGITGSEGEFHTKQMLDYGTNIVAGVTPGKGGQSVLDGSINVYDSVEQSVEKTSANTAIIFVPPPFAAEAIIESSYAGIETIVCITEGVPVHDMIKVKQIIKRNKTRLIGPNCPGIITVDECKLGIMPGFICKKGNIGVVSKSGTLTYEAIDQLVNAGLGQTTAIGIGGDPIIGTTMQDCLKLFENDSETEGIVIIGEIGGQMEIEAAYWAKKNMTKPIAGFIAGQTAPPGKRMGHAGAIVSGGNDTAEAKIKVLKECGISVSESVANIGSVMKSIMN

SEQ ID NO: 192445 - protein, 293 aa, Unknown
  Bacterial polypetide isolated from the Sargasso Sea
MSILINKDTKVITQGITGKTGQFHTRGCRDYANGTNCFVAGVNPKKAGEDFEGIPIYATVKDAKARTGATVSVIYVPPAGAADAIWEAVEAELDLVVCITEGIPVRDMMMVKDKMRKGGSKTLLLGPNCPGLITPDEIKIGIMPGHIHRKGRIGVVSRSGTLTYEAVGQLTALGLGQSSAVGIGGDPINGLKHIDVMKMFNDDPETDAVVMIGEIGGPDEANAAYWIRDNMKKPVVGFIAGVTAPPGKRMGHAGALISGGADTAQAKLDIMEECGIKTTKNPSEMARLLKAML

SEQ ID NO: 192446 - protein, 291 aa, Unknown
  Bacterial polypetide isolated from the Sargasso Sea
MSILVNKDSKVIVQGVTGSEGQFHSVQMLEYGTNIVAGVTPGKGGQSTLDGKVPVFNSVEDAVKDTYADTSIIFVPPPFAAEAIIEASYAGISLVVCITEGVPVHDMLKAKKIISQNGTRLIGPNCPGIITVDECKLGIMPGFICKKGNIGVISKSGTLTYEAIDQLVNVGLGQTTAIGIGGDPIIGTTMRDCLELFESDSETDGVVIIGEIGGQMEIEAARWAKANMSKPIVGFIAGQTAPPGRRMGHAGAIVSGGDDTADAKMRILKECGIAVAESVADIGQKMKNEMN

SEQ ID NO: 192447 - protein, 291 aa, Unknown
  Bacterial polypetide isolated from the Sargasso Sea
MSILVNKETKVICQGFTGSHGTFHSEQAIKYGTNLVGGVTPKKGGQEHLGRPVFNTVKEAKDKTGANASMIYVPAKFAAAAIIEALDASIELIVCITEGIPILDMLKVKQKLSKSKSRLIGPNCPGIITPDECKIGIMPGNIHKKGTVGIVSRSGTLTYEAVAQTTENGLGQSTCIGIGGDPINGTNFIDCLDLFLKDDDTKSILMIGEIGGSAEEEAAEFIKSHSIKKPMVGFIAGVTAPPGRRMGHAGAIISGGKGSAKDKIETMEKAGITIANSPAELGKTLVDKLSL

SEQ ID NO: 192448 - protein, 290 aa, Unknown
  Bacterial polypetide isolated from the Sargasso Sea
MSVLVSKESRILCQGITGSQGSFHAEQCIEYGSNIVAGVTPGKGGSTHLHVPVFNSVAEAKADLEIDVSMIFVPAKFAADAMKSAIESEIGLIVCITEGVPVQDMIEVKAMLNGSDSILLGPNCPGIITPDETKIGIMPGFIHQKGSVGIISRSGTLTYEAVHQTSICGLGQSTCIGIGGDPIKGLNFIECLSLFEKDPETEGIVMVGEIGGSDEEKAAEFIKENISKPVVAYVAGVSAPPGKRMGHAGAIVTGKEGTALSKYEALNDAGVATTDSPALIGKIMKDLLNQ

SEQ ID NO: 192449 - protein, 186 aa, Unknown
  Bacterial polypetide isolated from the Sargasso Sea
RLCIAQSWPGQMRSVYGDHDRFIETYFSQFDGKYFTGDGCKRDKDGYYWITGRVDDVIIVSGHNLGTAEIESAFVAHPKVAEAAVVGYPHDIKGNGLYCYVTLNVGEKHDGDLERELKNWVKKNIGAHARPDFIQFAPGLPKTRSGKIMRRILRKIAANEHEQLGDTTTLADPSVVKSLVDNRKNI

SEQ ID NO: 192450 - protein, 341 aa, Unknown
  Bacterial polypetide isolated from the Sargasso Sea
LGVKKGDRVTIYLTMIPELAFTMLACARIGAIHSIIFGGFSAESIAGRINDCKSDYVVTADEGIRGGKTIPLKATTDEALIHCPNVKKCIVVKRTGNRINWDESRDVWYHEMIKKVSANCEPEEMNAEDPLFILYTSGSTGKPKGVLHTTGGYMVYASMTHQYIFNYKPKDIYFCSADIGWITGHSYIIYGPLANAATTIMFEGIPTYPDSSRWWQIVDKYKVNIFYTAPTAIRALMREGDGPVKKTSRKSLKLLGTVGEPINPEAWQWYYKTIGDSRCPIVDTWWQTETGGILISPQTGAIDLKPGSATKPFYGIKPVIVDKDGQVLKGEAQGRLCIAQS

SEQ ID NO: 192451 - protein, 295 aa, Unknown
  Bacterial polypetide isolated from the Sargasso Sea
DIGWVTGHSYIIYGPLSNGATTIMFEGIPTYPDSSRWWQIIDKYKVNIFYTAPTAIRALMREGDRPVKKTSRKSLKLLGTVGEPINPEAWQWYYKTVGDSRCPIVDTWWQTETGGILISPQTGAIDLKPGSATKPFYGIKPVIVDKEGKVLKGEARGRLCIAQSWPGQMRTVYGDHQRFIDTYFSQFDGKYFTGDGCRRDKDGYYWITGRVDDVIIVSGHNLGTAEIESAFVAHPKVAEAAVVGYPHDIKGNGLYCYVTLNVGEEPNGELERDLKLWVRKQIGPIATPDLIHFFT

SEQ ID NO: 192452 - protein, 330 aa, Unknown
  Bacterial polypetide isolated from the Sargasso Sea
MGGDDPKDSQKISIKQLHQKVSKAANGLKKLGVKKGDRVTIYLTMIPELAILMLACARIGAVHSIIFGGFSADSISGRVNDCESEYIITADEGVRGGKTIPLKDTTDDALLDCPNVKKCIVIKRTGNDIRWNYNRDVWYHDLIKDVSNKCEPEEMNAEDPLFILYTSGSTGKPKGVLHTTGGYMVYASMTHQYIFNYKAKDIYWCTADIGWVTGHSYIIYGPLANGATTIMFEGIPNYPDTSRWWQIVDKYKVNIFYTAPTAIRALMREGDKPVKKTSRKSLKLLGTVGEPINPEAWMWYYKTVGNSNCPIVDTWWQTETGGIMIAPQTG

SEQ ID NO: 192453 - protein, 289 aa, Unknown
  Bacterial polypetide isolated from the Sargasso Sea
MTHQYIFDYKPKDIYWCTADIGWVTGHSYIIYGPLSNGATTIMFEGVPNYPDSSRWWQIVDKYKVNIFYTAPTAIRALMREGDEPVKKTSRKSLKLLGTVGEPINPEAWMWYYKTVGDGRCPIVDTWWQTETGGILIAPQPGAIDLKPGSATKPFYGIKPVIVDEAGKVLKGACKGRLCMSASWPGQMRTVYGDHQRFIDTYFSQFDGKYFTGDGCRRDKDGYYWITGRVDDVIIVSGHNLGTAEIESAFVAHPKVAEAAVVGYPHDIKGNGLYCYDTLNAGEQADGDL

SEQ ID NO: 192454 - protein, 210 aa, Unknown
  Bacterial polypetide isolated from the Sargasso Sea
KPFMGIKPAMVDKDGKEIKGAGEGRLCITQSWPGQMRTVYGDHQRFIDTYFSQFDGKYFTGDGCRRDKDGYYWITGRVDDVIIVSGHNLGTAEIESAFVAHPKVAEAAVVGYPHDIKGNGLYCYVTLNAGETETGELDRDLKLWVRKQIGPLATPDLIHFTPGLPKTRSGKIMRRILRKIAANEHDQLGDTTTLADPSVVNSLVENRKNI

SEQ ID NO: 192455 - protein, 299 aa, Unknown
  Bacterial polypetide isolated from the Sargasso Sea
MYLINIDFAYFLKINTIYDLKKNQIQNIESKIMSNNFQEIYEQSINNPEKFWQEAAEDIFWFKKPTKILNKTKPPFYKWFEDGVTNTCYNALDIHIDQGKGNQTALIYDSPITGNKSKFTFEELKSKVSKFAGALRAQSVNKGDRVIIYMPMIPEAVIAMLACARIGAIHSVVFGGFASNELASRIDDSKAKLLVTASCGFEPGRTVEYKPLVDEAVKLANHKINKMILFQRPGHEVKLNNPNEVSWEEVVSNAEDADCVEMNSNEFAYILYTSGTTGTPKGIVRDIGGHIVALKWTMK

SEQ ID NO: 192456 - protein, 255 aa, Unknown
  Bacterial polypetide isolated from the Sargasso Sea
KKLGIKKGDRVTIYLTMIPELAILMLACARIGAIHSIIFGGFSAESISGRVNDCESEYVITADEGVRGGKTIPLKATTDEALINCPNVKKCIVVKRTGNYVFWNSERDVWYHELIKDVSSHCEPEEMNAEDPLFILYTSGSTGKPKGVLHTTGGYMVYASMTHQYIFNYKPKDIYWCTADIGWVTGHSYIIYGPLSNGATTIMFEGVPNYPDSSRWWQIVDKFKVNTFYTAPTAIRALMREGDEPVNKTSRKSLK

SEQ ID NO: 192457 - protein, 310 aa, Unknown
  Bacterial polypetide isolated from the Sargasso Sea
ALIWEGDEPGNSKEITFKELHSEVCRFANILKTLQIKKGSRVCIYMPMIPEAAFAMFACARIGAIHSVVFGGFSPESLKDRILDADCRIVITADEGVRGGKKVPLKDNVDEALINCPDVKNVIVVNRTGGKINWFEDRDLWFHELKDKVDDVCEPEPMDSEDPLFILYTSGSTGKPKGVLHTTAGYLLGAHISFKYLFGFNENDKYWCTADVGWITGHTYILYGPLSNGATSLMFEGVPTYPTASRCWEICDEHEINIFYTAPTAIRALMSLGDEFVGSTSRKSIKVLGTVGEPINPEAWDWYYSVVGNK

SEQ ID NO: 192458 - protein, 264 aa, Unknown
  Bacterial polypetide isolated from the Sargasso Sea
CIDRHLKDKKDKTAIIWVGDDPKDSQKISYKQLHQKVSKAANGLKKLGIKKGDRVTIYLTMIPELAILMLACVRIGAVHSIIFGGFSADSISGRVNDCESEYIITADEGVRGGKTIPLKYTVDEALMSCPNVKKCIVVKRTGNYINWDQNRDVWYHDLIKDVANHCEPEEMNAEDPLFILYTSGSTGKPKGVLHTTGGYMVYASMTHQYIFNYKPKDIYWCTADIGWVTGHSYIIYGPLSNGATTIMFEGIPNYPDTSRWWQIV

SEQ ID NO: 192459 - protein, 350 aa, Unknown
  Bacterial polypetide isolated from the Sargasso Sea
PPFYKWYEDGVTNTCYNALDIHIDQGRGEKTALIYDSPITNNKKKYTYNELRQKVSKFAGALSKQGVIKGDRVIIYMPMIPEAVIAMLACGRIGAIHSVVFGGFASNELASRIDDSKAKVLVTASCGFEPGRTVEYKPLVDEAIKMASHKIEKMILFQRSGHEVKLTAPKEISWDESLSNANEVDCVEMKSNEFAYILYTSGTTGIPKGIVRDIGGHIVALKWTMKNIYNIDTDDIWWSASDIGWIVGHSYIVYAPLFKGCTTVLFEGKPVGTPDAGAFWKIISDYKVKSLFTAPTAFRAIKKEDPDGKFFKKYDLSAFESLFLAGERADPDTIKWAENLLNVPVIDHWW

SEQ ID NO: 192460 - protein, 330 aa, Unknown
  Bacterial polypetide isolated from the Sargasso Sea
MFIGPLANKATSVMYEGAPNAPDEKRLWSIIEKYKVNIFYTAPTAIRAFMKWGVEHPQAHDLSSLRILGTVGEPINPEAWMWYHENIGGENCAIVDTWWQTETGSIMISPLPGVTSTKPGSACGPLPGIESIVIDNDGNEVGKGEGGFLAVKSPWPSMLRTVYGDDQRYIDTYWSQHNGLYFAGDGAKYDDEGYIWLLGRVDDVMNISGHRISTAEVESALVSHPAVAEAAVIGRSDEITGEAIAAFVSLIGTDEGNEDLIADLRQHVSDKIGPIAKPKSIVITADLPKTRSGKIMRRLLKDISEERKLGDVTTLANADIVSELQTRASE

SEQ ID NO: 192461 - protein, 204 aa, Unknown
  Bacterial polypetide isolated from the Sargasso Sea
TCIVDADGNILDDECSGNLVICDSWPGQMRTVYGDHKRFESTYFSAYEEMYFTGDGCRRDSDGYYWITGRVDDVINVSGHRLGTAEVESALVSNKKVSESAVVGFPHNIKGQGIYAFVSLKAGVDFEDEAISKELNSTVRDVIGPIASPDHIQITPSLPKTRSGKIMRRILRKIAENNFGDLGDTSTLADPTVVDDLINNRKNK

SEQ ID NO: 192462 - protein, 278 aa, Unknown
  Bacterial polypetide isolated from the Sargasso Sea
LKVTQFYTAPTAIRALMSFEEDFPGKYNLSTLRVLGSVGEPINPEAWRWYHKKIGKGRCPIVDTWWQTETGGILITPLPGCTPTKPGSATFPFFGVKPVIIEAETGKILKGNGVTGVLALEEPWPGQMRTIYKDQDRFEETYFKIYPGYYFTGDGCRRDEDGYFWITGRVDDVINVSGHRIGTAEVESALVLHDAISEAAVVGFPHEIKGQGIYAYVSLREGISANENLKKDLVNFVRKEIGPIAAPDVIHWAPNLPKTRSGKIMRRILRKIAANEAD

SEQ ID NO: 192463 - protein, 261 aa, Unknown
  Bacterial polypetide isolated from the Sargasso Sea
VVFGGFSAEALADRINDAEAKVVITSDGAWRRGDIVPLKQNVDDSLKLTDHIESVIVVKRTENEVTMVDGRDYWYSELVDKQEADCEPEVMNAEDMLYILYTSGTTAKPKGIVHTQAGYLTGVTTTHSAVFDVKEDDIYWCAADCGWVTGHSYIVYGPLANKTTSVMYEGAPNAPDEKRLWSIVEKYKVNIFYTAPTAIRAFMKWGVEHPQAHDLTSLRLLGTVGEPINPEAWMWYHENIGNESCAIVDTWWQTETGSIMI

SEQ ID NO: 192464 - protein, 214 aa, Unknown
  Bacterial polypetide isolated from the Sargasso Sea
WICTKPFYGIKPVLVDKNGKEIKGAGEGRLCIAQSWPGQMRTVYGDHQRFIDTYFSQFNGKYFTGDGCRRDKDGYYWITGRVDDVIIVSGHNLGTAEIESAFVAHPKVAEAAVVGYPHDIKGNGLYCYVTLNAGENETGELERDLKLWVRKQIGPLATPDLIHFTPGLPKTRSGKIMRRILRKIAANEHGQLGDTTTLADPSVVDSLVDNRKNI

SEQ ID NO: 192465 - protein, 304 aa, Unknown
  Bacterial polypetide isolated from the Sargasso Sea
VKKGDRVIIYMPMIPQSVVAMLACGRIGAIHSVVFGGFAANELASRIDDSKAKIIISASCGYEPGRTVHYKPLLNKAIEIANHKPEKCIIWQREKDKAELDPKRDIDWLEALKGAKPAECEKMNSNDYAYILYTSGTTGTPKGIVRDIGGHIVALKWTMKNIYNIEQDDVWWSASDIGWIVGHSYIVYAPLFYGCTTVLFEGKPVGTPDAGIFWKIISEYKVKSLFTAPTAIRAIKKEDPDGKFFKKYDLSKFDTLFLAGERADPDTIKWFEKLSNAPVIDHWWQTETSWAISANCAGIEKFPI

SEQ ID NO: 192466 - protein, 270 aa, Unknown
  Bacterial polypetide isolated from the Sargasso Sea
PELAYTMLACARIGAIHSIIFGGFSPDSISGRINDCKSDYVITADEGIRGGKIIHLKSIMDEALVECPKVKKCVVVKRTGNRINWDSSRDVWYHEMIQNVSAKCEPEEMNAEDPLFILYTSGSTGKPKGVLHTTGGYMVYASMTHQYIFNYKPKDIYWCTADIGWITGHSYIIYGPLSNGATTIMFEGIPTYPDNSRWWQIVDKYKVNIFYTAPTAIRALMRDGNKPVKKTSRKTLKLLGTVGEPINPEAWQWYYKTVGDSRCPIVDTWW

SEQ ID NO: 192467 - protein, 252 aa, Unknown
  Bacterial polypetide isolated from the Sargasso Sea
MVFKTVGDSKCPIVDTWWQTETGGILISPQTGAIDLKPGSATKPFYGIKPVIVDQEGKVLKGEARGRLCIAQSWPGQMRTVYGDHNRFIETYFSQFDGKYFTGDGCRRDKDGYYWITGRVDDVIIVSGHNLGTAEIESAFVAHPKVAEAAVVGYPHDIKGNGLYCYVTLNVGENPDGDLERELKLWVRKQIGPIATPDLIHFSPGLPKTRSGKIMRRILRKIAANEHEQLGDTTTLADPSVVKSLVDNRKNI

SEQ ID NO: 192468 - protein, 265 aa, Unknown
  Bacterial polypetide isolated from the Sargasso Sea
GTVGEPINPEAWKWYFEIPGNSNCPIVDTWWQTETGGILIAPQTGAIELKPGSATKPFYGIKPSIVDKEGNELDGECEGMLCISQSWPGQMRTVYGDHERFVSTYFSQFDGKYFTGDGCKRDKDGYYWITGRVDDVIIVSGHNLGTAEIESAFVSHKNVSEAAVVGYPHDIKGNGLYCYVSLNVGVEQSDNLIKELKNVVREKIGPIATPDIIHFTSGLPKTRSGKIMRRILRKIAANEHDQLGDTSTLADPSVVDDLISNRLNK

SEQ ID NO: 192469 - protein, 298 aa, Unknown
  Bacterial polypetide isolated from the Sargasso Sea
VNIFYTAPTAIRALMREGDKPVKKTSRKSLKLLGTVGEPINPEAWEWYYKTVGDSNCPIVDTWWQTETGGILISPQTGAINLKPGSATKPFYGIKPVIVDKNGKTLKGEAEGRLCIAQSWPGQMRTVYGDHQRFIDTYFSQFDGKYFTGDGCRRDKDGYYWITGRVDDVIIVSGHNLGTAEIESAFVAHPKVAEAAVVGYPHDIKGNGLYCYVTLNVGEKSTLDLERDLKLWVRKQIGPIATPDLIQFSPGLPKTRSGKIMRRILRKIAANEHDQLGDTTTLADPSVVKSLVENRKNT

SEQ ID NO: 192470 - protein, 111 aa, Unknown
  Bacterial polypetide isolated from the Sargasso Sea
MHPVVAEAAVVGFEHPIKGQGIYAFVTLMVGEEFSDELSAELRNFVGKEIGPIAKPDLIQNAPGLPKTRSGKIMRRILRKVAEGDFENLGDTTTLAEPAVVSDLINNKKSL

SEQ ID NO: 192471 - protein, 214 aa, Unknown
  Bacterial polypetide isolated from the Sargasso Sea
MTEKLIESILNESRSFAPSKKFINQANIEKEEEKRLREEASHNHIEYWAKLARAHLHWFLPFNNILDESNAPNYEWFNDGEINASFNSLDINANKNPEKTAIIFETEDGNSERITYKDLLLRTCQFANGLKKLGVMPMDRVVIYMPMCPEAVIAMQACARIGAIHSVVFGGFSSNALKDRIEDAQSKIVITADGAYRGGSVIPLKQATDEAVTN

SEQ ID NO: 192472 - protein, 222 aa, Unknown
  Bacterial polypetide isolated from the Sargasso Sea
MGKKELIFKTKPEWSRNALVNKSEYEKKYEKSIKNNDEFWKKAGKRITWIKQYNKIKNVKYSKEDVKIKWYEDGTLNASANCIDRHLKDKKDKTAIIWVGDNPKESKKISYKQLHKEVSKTANGLKELGVKKGDRVTIYLTMIPELAITMLACARIGAIHSIIFGGFSPDSIAGRIDDCKSDYVITADEGLRGGKTIPLKDITDEALSKCRDIKKCIVVKRT

SEQ ID NO: 192473 - protein, 167 aa, Unknown
  Bacterial polypetide isolated from the Sargasso Sea
KRFIDTYFSQFDGKYFTGDGCRRDKDGYYWITGRVDDVIIVSGHNLGTAEIESAFVAHQRVAEAAVVGFPHDIKGNGLYCYVTLNAGEQPSGDLERDLKLWVRKQIGPIATPDIIQFAPALPKTRSGKIMRRILRKIAANEYNQLGDTTTLADPSVVESLIENRQNK

SEQ ID NO: 192474 - protein, 229 aa, Unknown
  Bacterial polypetide isolated from the Sargasso Sea
MSDKFNKIYNHSIKNPEKFWQDAAEDIFWFKKPTKILNKSNPPFYKWYEDGITNTCYNALDIHIDQGRGKNTALIYDSPITGNKSKFTYEELRSKVAKFAGALKAQGVNKGDRVIIYMPMIPEAVIAMLGCARIGAIHSVVFGGFASNELASRIDDSKAKLLVTASCGFEPGRTVEYKPLVDEAIKIAKHKIEKMILFQRPSHEVKLNTPIEISWDEVVSNAEAADCVR

SEQ ID NO: 192475 - protein, 106 aa, Unknown
  Bacterial polypetide isolated from the Sargasso Sea
DVAEAAVVGYPHDIKGNSIYAFVTLRTGREITENTRTEIAKLVRADIGPHATPEKIQFTEGLPKTRSGKIMRRILRNIASDNIDDLGDISTLADPSVVESLVNNRI

SEQ ID NO: 192476 - protein, 322 aa, Unknown
  Bacterial polypetide isolated from the Sargasso Sea
MAENNPDKVAIIWEGDDPNETKKITYKDLLINVSKAANVLKKIGVKKGDRVTIYLTMIPELAYIMLACARIGAVHSIIFGGFSSESIAGRIKDCRSEYVVTADEGIRGGKTIPLKLTTDKALESCPDVKKCLVVKRTNKEIELKKDRDLFYDDIIKEVDSICEPEVLNAEDPLFILYTSGSTGKPKGVMHTSGGYIVYASMTHEYIFNYNNEDIYWCTADIGWITGHSYIIYGPLANGATTLMFEGVPNYPDFSRFWQIIDKHKVNIFYTAPTAIRALMREGDDYVTKTNRSSLKLLGTVGEPINPEAWKWYFEVPGNSKCP

SEQ ID NO: 192477 - protein, 162 aa, Unknown
  Bacterial polypetide isolated from the Sargasso Sea
TYFSQFDGKYFTGDGCRRDKDGYYWITGRVDDVIIVSGHNLGTAEIESAFVAHPKVAEAAVVGYPHDIKGNGLYCYVTLNAGEKNTLDLERELKLWVRKQIGPIATPDLIQFAPGLPKTRSGKIMRRILRKIAANEHGQLGDTTTLADPSVVESLVDNRKNI

SEQ ID NO: 192478 - protein, 308 aa, Unknown
  Bacterial polypetide isolated from the Sargasso Sea
WYYDGTLNASANCIDRHLKKNKDKTAIIWVGDDPKVQKKISYKQLHQEVSKAANGLKEIGVKKGDRVTIYLTMIPELAYTMLACARIGAVHSIIFGGFSADSISGRINDCKSDYIITADEGVRGGKTIHLKETVDEALLNCPNVKKCIVVKRTGNRINWDETRDVWYHDITKRASKNCEPEEMNAEDPLFILYTSGSTGKPKGVLHTTGGYMVYASMTHQYIFNYKPKDIYWCTADIGWVTGHSYIIYGPLSNGATTIMSEGIPNYPDWSRWWQIVDKFKVNIFYNAPTAIRAMMREGDEPVKKTSRK

SEQ ID NO: 192479 - protein, 168 aa, Unknown
  Bacterial polypetide isolated from the Sargasso Sea
ERYLESYWEYISIKGEKNVYFAGDGARIDEDGYIWIMGRVDDVISVSGHRLGTMEIESALVSHKSVAESAVVGKKDDLKGEVIVAFVSLEKDVNGSSELVENLKKHVVNEIGIIAKPEKIIISDSLPKTRSGKIMRRILRSLAAGEKISGDISTLEDSSVLEKLKELS

SEQ ID NO: 192480 - protein, 294 aa, Unknown
  Bacterial polypetide isolated from the Sargasso Sea
TLMFEGVPNYPNFSRFWEVIDKHKVNIFYTAPTAIRALMREGDDYVKKTSRSSLKLLGTVGEPINPEAWKWYYEVPGNSKCPIVDTWWQTETGGILISPQSGAIDLKPGSASKPFYGIEPCIVNKDGEEQTGEAEGMLCLQNSWPGQMRSVYGDHKRFISTYFSQFDGKYFTGDGCRRDKDGYYWITGRVDDVIIVSGHNLGTAEIESAFVSHPKVSEAAVVGYPHDIKGNGLYCYVSLIVGTESNEDLKNELIQTIRSKIGPIATPDFIHFADGLPKTRSGKIMRRILRKMQQ

SEQ ID NO: 192481 - protein, 261 aa, Unknown
  Bacterial polypetide isolated from the Sargasso Sea
DVLYSKDEVKIKWYFDGTTNVSYNCVDRHAKNTPNKTAIIWEGDDPAKVKKISYKELQSEVCKIANVLKKIGVKKGDRVTIYLTMIPELAYVMLACTRIGAIHSIIFGGFSSDSIAGRIKDCNSEYIVTADEGIRGGKNIPLKEITDRALDSCPDVKKCLVVRYTENKVNMIDKRDTYIDELISDVDDYCEPEEMSAEDPLFILYTSGSTGKPKGVLHTTGGYIVYASMTHEYIFNYKKNDIYWCTADIGWITGHSYIIYG

SEQ ID NO: 192482 - protein, 311 aa, Unknown
  Bacterial polypetide isolated from the Sargasso Sea
MYARSINDSDVFWEEQAEEFITWFSKWDIIQEWNFSDITISWFKNAKLNVSYNCIDRHLEKRGDQIAIIWEGDDPDDQKYITYRELHEEVCKFSNVLKSRGIKKGDCISIYMPMVPEAAVAMLACTRIGAIHSVVFGGFSPESLKDRILDSDCKLIVTADEGIRGGRFIPLKENVDIALTECPNVHTTVVIQRTGRKIAWNKNRDVFYHEAMEKVSSNCPAEEMDAEDPLFILYTSGSTGKPKGVLHSTAGYLLFTAMTHKYVFDYRDNDIYWCTADVGWVTGHSYIIYGPLCNGATTLMFEGVPTYPDAS

SEQ ID NO: 192483 - protein, 82 aa, Unknown
  Bacterial polypetide isolated from the Sargasso Sea
VGVDSTDDLIQDLKNTIREKIGPIATPDFIHITAGLPKTRSGKIMRRILRKIASNDFENLGDTSTLADPSVVENLIEKRKNK

SEQ ID NO: 192484 - protein, 272 aa, Unknown
  Bacterial polypetide isolated from the Sargasso Sea
MSEKFSKIYDFSIKDPEKFWQEAANDIFWFKKPTKILNKSNPPFYKWYEDGVTNTCYNALDFHIDQGKGIKTALIYDSPITGNKSKFSYEELRSKVSKFAGALKDQGVSKGDRVIIYMPMIPEAVVAMLACARIGAIHSVVFGGFASNELASRIDDSKAKILVTASCGFEPGRTVEYKPLVDEAIKQAQHKISKMILFQRKGHEVKLNAPMEISWDEAHANAKDTDCVEMNSNEFAYILYTSGTTGTPKGIVRDIGGHIVALKWTMKNIYNI

SEQ ID NO: 192485 - protein, 331 aa, Unknown
  Bacterial polypetide isolated from the Sargasso Sea
KKGDRVTIYLTMIPELAILMLACVRIGAVHSIIFGGFSAESISGRVNDCESEYIITADEGVRGGKTIPLKYTTDEALTSCPNVKKCIVVKRTGNYINWNEERDVWYHDLIKDVSNHCEPEEMNAEDPLFILYTSGSTGKPKGVLHTTGGYMVYASMTHQYIFNYKPKDIYWCTADIGWVTGHSYIIYGPLANGATTIMFEGIPNYPDTSRWWQIVDKYKVNIFYTAPTAIRALMREGDKPVKKTSRKSLKLLGTVGEPINPEAWMWYYKTVGNSKSPIVDTWWQTETGGILIAPQTGAIPLKPGSATKPFYGIKPVIVDKNGKEIKGAGEG

SEQ ID NO: 192486 - protein, 244 aa, Unknown
  Bacterial polypetide isolated from the Sargasso Sea
GKPKGVLHTTGGYMVYASLTHQYIFDYKPKDIYFCSADIGWVTGHSYIIYGPLSNAATTIMFEGIPTYPDFSRWWQIIDKYKVNIFYTAPTAIRALMKEGDEPVKKTSRKSLKLLGTVGEPINPEAWMWYYKIVGDSKCPIVDTWWQTETGGILIAPQPGAIDLKPGSATKPFYGIKPAIVDETGKVLKGACKGRLCLTASWPGQMRTVYGDHDRFIKTYFSQFDGKYFTGDGCRRDKDGYYWI

SEQ ID NO: 192487 - protein, 148 aa, Unknown
  Bacterial polypetide isolated from the Sargasso Sea
GCRRDKDGYYWITGRVDDVIIVSGHNLGTAEIESAFVAHPKVAEAAVVGYPHDIKGNGLYCYVTLNVGENPDGDLERELKLWVRKQIGPIATPDLIHFSPGLPKTRSGKIMRRILRKIAANEHEQLGDTTTLADPSVVKSLVNNRKNT

SEQ ID NO: 192488 - protein, 301 aa, Unknown
  Bacterial polypetide isolated from the Sargasso Sea
RGGKKVPLKANVDDALTNPETRSIQKVIVVQRTGSEIKWNQHRDIWYEDLMKVAGSVCAPKEMGAEEALFILYTSGSTGKPKGVLHTTGGYLVYASLTHERVFDYRPGEVFWCTADIGWVTGHTYLVYGPLANGATTVMFEGVPNYPDVSRVAKIVDKHKVNILYTAPTAIRAMMAEGKAAVEGADGSSLRLLGSVGEPINPEAWQWYYENVGQSRCPIVDTWWQTETGACLMTPLPGAHGLKPGSAARPFFGVQPALVDNLGNIIEGAAEGNLVIIDSWPGQARTLYGDHDRFVDTYFKT

SEQ ID NO: 192489 - protein, 287 aa, Unknown
  Bacterial polypetide isolated from the Sargasso Sea
AFMKWGVEHPKAHDLSSLRLLGSVGEPINPEAWMWYHENIGNEQCAIVDTWWQTETGSIMISPLPGITSTKPGSACGPLPGVDSVIIDEKGNEVGKGEGGYLAIKSPWPSMLRTVYGDDKRYIDTYWSQHEGLYFAGDGAKYDDDGYVWLLGRVDDVMNISGHRISTAEVESALVSHESVAEAAVIGRSDEISGEAIAAFVSLIGTDAGDEKLISELRQHVSDKIGPIAKPKSIVITADLPKTRSGKIMRRLLKDISEERKLGDVTTLANADIVSELQQRSSESDED

SEQ ID NO: 192490 - protein, 295 aa, Unknown
  Bacterial polypetide isolated from the Sargasso Sea
MKIQKHWKDNALVTPKDYEDLYTRSINDNDGFWKKQGERLDWIKKYSKIKDIKYSSTDVNIKWYYDGELNVSENCIDRHAKNNPNKIAIIWEGDDPKNTLKITYKELLLNVSRTANALKELGIQKGDRVTIYLTMIPELAYTMLACARIGAVHSIIFGGFSSESIAGRITDCKSEFVITADEGIRGGKTIPLKKIMDEALKNSSNIKKCIVVKRTGNIVNMEKERDVYLDDILKNVSDHCEIATMNAEDPLFILYTSGSTGKPKGVLHTSGGYLVYASMTHEYIFNYKENDIYWC

SEQ ID NO: 192491 - protein, 315 aa, Unknown
  Bacterial polypetide isolated from the Sargasso Sea
MVYASMTHQYIFNYKPNDIYWCTADIGWVTGHSYIIYGPLANGATTIMFEGVPNYPDSSRWWQIVDKYKVNTFYTAPTAIRALMREGDGPVNKTTRKSLKLLGTVGEPINPEAWMWYYKTVGNSKCPIVDTWWQTETGGILIAPQTGAIPLKPGSATKPFYGIKPVLVNKDGKEIKGEGEGRLCIAQSWPGQMRTVYGDHQRFIDTYFSQFDGKYFTGDGCKRDKDGYYWITGRVDDVIIVSGHNLGTAEIESAFVAHPKVAEAAVVGYPHDIKGNGLYCYVTLNAGESETGDLDRELKLWVRKQIGPLATPDLI

SEQ ID NO: 192492 - protein, 271 aa, Unknown
  Bacterial polypetide isolated from the Sargasso Sea
ESLRLLGTVGEPINPKAWEWYHSKIGSSKCPVVDTWWQTETGANMIAPIPGVTNTIPGTCTKPLPGIDVGIVDNDGIEIDEPNKGGNLVIRQPWPSMLRGIWGDNQRYLDTYWKKYSNKFYVTGDTARFDELGNIWIMGRADDVVNISGHRLGTMEIESSIVSHEYVAEAAVVSFKHEIKGEAIHAFVTLKNNYSQHNTKEFADEIRDWVKEKIGSIAKPDRISFSSSLPKTRSGKIMRRLLRNLARDENITGDISTLENEDVITQLRKTL

SEQ ID NO: 192493 - protein, 312 aa, Unknown
  Bacterial polypetide isolated from the Sargasso Sea
RGPAPYPSRRSTAQSAVTDANTTIESVLQEQRVFEPPADTAAKARIGSLEAYRAMADAAKNDPDAFWGEAARRELHWFEPFHTVLDWSNPPFARWFEGGTTNLSYNCLDRHLDGPTAQKTALIWEGEPGDVRRFTYQELHAEVCKAANGLKAMGIGKGDLVALYMPMVPEAAIAMLACARIGAPHSVVFGGFSAEALRDRLNDGEVKAVITADGGFRKDKPVSLKPAVDAALANGACPSVTGVLVVQRTKQDVEMVSGRDQWWHDLVEGQSADCPAEPMVSEDRLFVLYTSGSTGKPKGVVHTTAGYNPLGP

SEQ ID NO: 192494 - protein, 301 aa, Unknown
  Bacterial polypetide isolated from the Sargasso Sea
MKKYSVPKNFHSSVGHNSLDSYQFLRENAEQDSKSYWESVAERIDWFDKWTDVNNTDYSKAHIEWFTDGKLNASYNCIDRHIENGLGEKTALIWQSNDPAISTNVTYNELLEKVSLFANGLKRAGIKKGDRVCIYMQMIPEAIVAMLACARIGAVHSVVFGAFSSDALKNRINDSECKLLITQDNGVRGSKFDIPMKENADKIADKCPSLTTVVMVERSGNDMFMKEGRDITWNQFIDGCSSECPAEVMDAEDPLFILYTSGSTGKPKGVMHTTGGYLVYASHTHELVFDYHKDGYLLVYC

SEQ ID NO: 192495 - protein, 217 aa, Unknown
  Bacterial polypetide isolated from the Sargasso Sea
MTMIPELAYTMLACARIGAVHSIIFGGFSPDSISGRINDCESDYVITADEGVRGGKTIPLKSITDEALQSCPNVKKCIVVKRTGTKKIDWFNDRDVWYHQMTKKVSSKCEPEEMVAEDPLFILYTSGSTGKPKGVLHTTGGYMVYASMTHQYIFNYKPKDIYWCTADIGWVTGHSYIIYGPLANGATTIMFEGIPTYPDSSRWWQIVDKYKVNIFYT

SEQ ID NO: 192496 - protein, 306 aa, Unknown
  Bacterial polypetide isolated from the Sargasso Sea
IYLTMIPELAILMLACVRIGAVHSIIFGGFSADSISGRVNDCESEYIITADEGVRGGKTIPLKYTVDEALMSCPNVRKCIVVKRTGNYINWDENRDVWYHDLIKDVPNHCEPEEMNAEDPLFILYTSGSTGKPKGVLHTTGGYMVYASMTHQYIFNYKPKDIYWCTADIGWVTGHSYIIYGPLSNGATTIMFEGIPNYPDSSRWWQIVDKYKVNTFYTAPTAIRALMREGDKPVKKTSRKSLKLLGTVGEPINPEAWMWYYKTVGNSECPIVDTWWQTETGGIMIAPQTGAIPLKPVSATKPFNGI

SEQ ID NO: 192497 - protein, 236 aa, Unknown
  Bacterial polypetide isolated from the Sargasso Sea
MVATETGGIMISPQTGAIPLKPGSATKPFYGIKPVLLDKNGKEIKGPGEGRLCIAQSWPGQMRTVYGDHQRFIDTYFSQFNGKYFTGDGCRRDKDGYYWITGRVDDVIIVSGHNLGTAEIESAFVAHPKVAEAAVVGYPHDIKGNGLYCYVTLNASEKETGELERDLKLWVRKQIGPLATPDLIHFTPGLPKTRSGKIMRRILRKIAANEHDQLGDTTTLADPSVVESLVDNRKNI

SEQ ID NO: 192498 - protein, 290 aa, Unknown
  Bacterial polypetide isolated from the Sargasso Sea
KLKKKIKAKKENGNTPPEVIIKTKPEWVKSSLANKSKYQQKYSQSIKSNDEFWRKEGKRISWIKPYKKIKDVKYSTKEVKIKWFEDGTLNASANCIDRHLKDKKDKTAIIWVGDDPKDSQKISYKQLHQKVSKAANGLKKLGIKKGDRVTIYLTMIPELAILMLACVRIGAVHSIIFGGFSADSISGRVNDCESEYIITADEGVRGGKTIPLKYTVDEALMSCPNVKKCIVVKRTGNYINWDQNRDVWFHDLIKDVPNHCEPEEMNAEDPLFILYTSGSTGKPKGVLHTT

SEQ ID NO: 192499 - protein, 141 aa, Unknown
  Bacterial polypetide isolated from the Sargasso Sea
GYYWITGRVDDVIIFSGHNLGTAEIESAFVAHNKVAEAAVVGFPHQIKGNGLYCYITLNAGENPSGDLERELKLWVRKQIGPIATPDYIQFAPGLPKTRSGKIMRRILRKIAANEHHDLGDTTTLADPSVVESLIEKRKEK

SEQ ID NO: 192500 - protein, 289 aa, Unknown
  Bacterial polypetide isolated from the Sargasso Sea
MLKIHYSFLYTSGSTGKPKGVLHTTGGYMVYASMTHQYIFNYKPKDIYWCTADIGWVTGHSYIIYGPLANGATTIMFEGIPTYPDTSRWWHIVDKYKVNIFYTAPTAIRALMREGDKPVKKTSRKTLKLLGTVGEPINPEAWEWYYKTVGESRCPIVDTWWQTETGGILISPQTGAIDLKPGSATKPFYGIKPEILDKDGKVLKGEAQGRLCISQSWPGQMRSVYGDHQRFIDTYFSQFDGKYFTGDGCRRDKDGYYWITGRVDDVIIVSGHNLGTAEIESAFVAHPKV

SEQ ID NO: 192501 - protein, 233 aa, Unknown
  Bacterial polypetide isolated from the Sargasso Sea
MQNKFKEIYDNSIKNPEKFWKEASEDIFWFKKPTKILNTSNPPFYKWYEDGVTNTCYNALDIHIDQGRGKKTALIYDSPITGKKSQFTYEELRSKVSKFAGALKNQGANKGDRVIIYMPMIPEAVVAMLACARIGAIHSVVFGGFASNELASRIDDSKAKLLVTASCGFEPGRTVEYKPLVDEAIKIATHKIEKMILFQRPNHEVHLNTPKEVSWEEVVSKAKDTDCVEMSSN

SEQ ID NO: 192502 - protein, 279 aa, Unknown
  Bacterial polypetide isolated from the Sargasso Sea
VSADVGWITGHSYIVYGPFSNGATTLMFEGVPRPSNLGAFWEIVQKYKVSIFYTAPTAIRAFMKSGREIPDQYNLESLRLLGTVGEPINPEAWMWYKDVIGKNKCPIVDTWWQTETGGVMISPLPGVVATKPGSATYPLPGIEVEVVDKNGDKVMDNEGGYLIIKKPWPGMMRTIHGNPERYLESYWEYISFKGEKNVYFAGDGARIDEDGYIWIMGRVDDVINVSGHRLGTMEIESALVSHELVAEAAVVGRRDNLKGEVIVAFISLEKDVHSSPELV

SEQ ID NO: 192503 - protein, 250 aa, Unknown
  Bacterial polypetide isolated from the Sargasso Sea
ENIGNEQCAIVDTWWQTETGSIMISPLPGITSTKPGSACGPLPGVDSVIIDEKGNEVGKGEGGYLAIKSPWPSMLRTVYGDDKRYIDTYWSQHEGLYFAGDGAKYDDDGYVWLLGRVDDVMNISGHRISTAEVESALVSHESVAEAAVIGRSDEISGEAIAAFVSLIGTDAGDEKLISELRQHVSDKIGPIAKPKSIVITADLPKTRSGKIMRRLLKDISEERKLGDVTTLANADIVSELQQRSSESDED

SEQ ID NO: 192504 - protein, 258 aa, Unknown
  Bacterial polypetide isolated from the Sargasso Sea
MREFKLSNPLLSIDQYEEMYAESFKDKEQFWSKIAKSQLSWFKDFTKIKNTNYDGNVAIKWFEDGELNVCYNCVDRYAETQPEEVAIIWEGDETSQNKTYTYKELKSEVSKFANVLKKLGVQKGDVVTIYLTMIPEVAFAMLACARIGAIHSVIFGGFAPESIAGRIKDCKSQFVITADEGIRGGKIIPLKKYINTALEDCDDSIKTLVVRYTNTKDDLHRVNNFYYDELIKEVDDQCECVSMNAEDPLFILYTSGFT

SEQ ID NO: 192505 - protein, 264 aa, Unknown
  Bacterial polypetide isolated from the Sargasso Sea
MGEPINPEAWMWYHENIGGENCAIVDTWWQTETGSIMISPLPGVTSTKPGSACGPLPGIESIVIDNDGNEVGKGEGGFLAVKSPWPSMLRTVYGDDQRYLDTYWSQHDGLYFAGDGAKYDEEGYIWLLGRVDDVMNISGHRISTAEVESALVSHQAVAEAAVIGRSDEITGEAIAAFVSLIGTDDGNEELIADLRQHVSDKIGPIAKPKSIVITADLPKTRSGKIMRRLLKDISEERKLGDVTTLANADIVSELQTRASESDDE

SEQ ID NO: 192506 - protein, 299 aa, Unknown
  Bacterial polypetide isolated from the Sargasso Sea
LHISKDEEGNVLIQVSDHGSNQAYVNKLKYQKKYNTSVKENDAFWKKEGKRINWIKPYSKIKDVKYSKEDVKIKWYYDGTLNVSANCIDRHLKKNGKKTAIIWVGDDPGDQKKITYKELHKNVCKAANALKSIGVQKGDRVTIYLTMIPELAYTMLACARIGAIHSIIFGGFSPDSIATRINDCKSDYLITADEGVRGGKIIPLKKIADEALLQCPNIKKCVVVKRTGNQVNWENERDVSYEELISKVSAKCEPEEMNAEDPLFILYTSGSTGKPKGVLHTSGGYLVYASMTHQYIFDY

SEQ ID NO: 192507 - protein, 132 aa, Unknown
  Bacterial polypetide isolated from the Sargasso Sea
DDVIIVSGHNLGTAEIESAFVAHPKVAEAAVVGYPHDIKGNGLYCYVTLNAGEKSTLDLERDLKLWVRKQIGPIATPDLIQFAPGLPKTRSGKIMRRILRKIAANEHGQLGDTTTLADPSVVESLVDNRKNI

SEQ ID NO: 192508 - protein, 292 aa, Unknown
  Bacterial polypetide isolated from the Sargasso Sea
TAIRALMAQGDDFVNTTKRDSLKILGTVGEPINPEAWDWYYKIVGKSKCHVIDTWWQTETGSVLISPIAGITPVKPGSATLPFFGVKPAVVDNNDKIQNRGKGNLVLLRSWPSQIRTVYGDHKRMLETYFSQYDECYFTGDGAEIDQDGYFWITGRVDDVLNVSGHRLGTAEIESALVLHPKVAESAVVGVEHPIKGQGIYAFVTLMNDTELNDKLQDDLKKFVADEISPIAKPDLIQFSPNLPKTRSGKIMRRILRKVAADEINDLGDVTTLADSGVLEDLIENRLNLETN

SEQ ID NO: 192509 - protein, 145 aa, Unknown
  Bacterial polypetide isolated from the Sargasso Sea
CQRDEDGYYWITGRVDDVLNVSGHRIGTAEVEGAIGKANGVAEAAVVGFPHEIKGQGIFAFVTLMTGVNPSDKIKLEILDTVTKDIGPHAKPDSIQFSPALPKTRSGKIMRRILRKIAEGDYNNMGDISTLADPGVVKSLISENQ

SEQ ID NO: 192510 - protein, 320 aa, Unknown
  Bacterial polypetide isolated from the Sargasso Sea
WFEGVPNYPDSSRWWQIVDKYKVNIFYTAPTAIRALMREGDKPVKKTSRKSLKLLGTVGEPINPEAWMWYYKVVGEKKCPIVDTWWQTETGGILISPQPGAINLKPGSATKPFYGIKPAIVDESGKILKGPCKGRLCLLQSWPGQMRTVYGDHQRFIDTYFSQFDGKYFTGDGCRRDKDGYYWITGRVDDVIIVSGHNLGTAEIESAFVAHTKVAEAAVVGYPHDIKGNGLYCFVTLNSGEKPDGDLERELKLWVRKQIGPIATPDHIQFSPGLPKTRSGKIMRRILRKIAANEYRDLGDTTTLADPSVVESLVDNRKNK

SEQ ID NO: 192511 - protein, 329 aa, Unknown
  Bacterial polypetide isolated from the Sargasso Sea
PLFILYTSGSTGKPKGVLHTTAGYLVYTSMTHQYVFDYHDGDIYWCTADIGWVTGHSYILYGPLANGATTLMFEGVPNYPDFGRFWDICDKHKVNIFYTAPTAIRAIAKEGDELVNKRDLSSLRLLGTVGEPINPEAWLWYQRVVGHGNCPIVDTWWQTETGGILITPLPGATRTKPGSATRPFFGIQPVLVDGDGNEIDGAASGNLCIKHPWPGQMRTVYGDHERFIQTYFSTYKGLYFTGDGCRRDEDGYYWITGRVDDVLNVSGHRMGTAELESALVLHENVAEAAVVGFPHEIKGQGIYAFVTLNTGVEPTEELQKELIQLVRKE

SEQ ID NO: 192512 - protein, 165 aa, Unknown
  Bacterial polypetide isolated from the Sargasso Sea
FVETYFSQFDGKYFTGDGCRRDIDGYYWITGRVDDVIIVSGHNLGTAEIESAFVSHPKVSEAAVVGYPHDIKGNGLYCYVSLNAGEESSNELNKELKQLVREKIGPIATPDLIHFTEGLPKTRSGKIMRRILRKIAANEHSQLGDTSTLADPGVVGNLVKNRLNQ

SEQ ID NO: 192513 - protein, 240 aa, Unknown
  Bacterial polypetide isolated from the Sargasso Sea
MAENLIAAQASNPHLKNFDEYKKLYDQSIENPKEFFKKIANENLSWINDFTEVHNNRFANAKWFADGKINVSENCIDRHLKDKSKKIALIWEGDEPGNSKSFTFQELHEEVCRFSNVLKNLKVSKGSRVCIYMPMIPEAAFAMLACTRIGAIHSVVFGGFSPESLKDRILDADCEIVITADEGVRGGKIVPLKSNVDEALENCPDVRNTIVIKRTGNKINWNNDKDLWYEDLIKSVSTSC

SEQ ID NO: 192514 - protein, 309 aa, Unknown
  Bacterial polypetide isolated from the Sargasso Sea
IHYSFYIPSGSTGKPKGVLHTTGGYMVYASMTHQYIFNYKPKDIYWCTADIGWVTGHSYIIYGPLSNGATTIMSEGIPNYPDWSRWWQIVDKYKVNIFYTAPTAIRAMMREGDGPVKKTSRKSLKLLGTVGEPINPEAWQWYFKTVGDSRCPVVDTWWQTETGGILISPQTGAIDLKPGSATKPFYGIKPEILNKDGKVLKGEAQGRLCIAQSWPGQMRSVYGDHDRFIETYFSQFDGKYFTGDGCKRDKDGYYWITGRVDDVIIVSGHNLGTAEIESAFVAHPKVAEAAVVGYPHDIKGNGLYCYVTL

SEQ ID NO: 192515 - protein, 282 aa, Unknown
  Bacterial polypetide isolated from the Sargasso Sea
VPKKWSRSAYVDKSQYEKKYKLSIKNNEEFWKKEGKRIDWIKPYTKIRDVKYSKTDVKIKWFYDGTLNASANCIDRHLSDKKNKTAIIWVGDDPKDSKQISYKELHKNVCKTANALKELGIKKGDRVTIYLTMIPELAYTMLACARIGAIHSIIFGGFSPDSIAGRINDCQSDYIVTADEGVRGGKIIPLKKITDEALEKCPDVKKCIVVKRTGNKVNWIEDRDVSYDEIVKIASDKCEPEEMSAEDPLFILYTSGSTGKPKGVLHTTGGYIVYASMTHQYI

SEQ ID NO: 192516 - protein, 219 aa, Unknown
  Bacterial polypetide isolated from the Sargasso Sea
MKSNFNEIYRNSIDKPEDFWKEISNDIFWFKKPTKILNNNKPPFYKWFEDGITNSCYNALDFHIDEGRGDKTALIYDSPITGNKGKFSFKQLKDKVSKFAGALSNQGVKKGDRVIIYMPMIPEAVVAMLACGRIGAIHSVVFGGFASNELASRIDDSKAKVLVTASCGFEPGRTVEYRPLIDGALKLSKHKVEKVIFFQRQGHEIKLNAPLEISWEDSL

SEQ ID NO: 192517 - protein, 167 aa, Unknown
  Bacterial polypetide isolated from the Sargasso Sea
QRFINTYFSQFDGKYFTGDGCRRDEDGYYWITGRVDDVIIVSGHNLGTAELESAFVAHPKVAEAAVVGYPHDIKGNGLYCYVTLNAGENPSGDLERDLKLWVRKQIGPIATPDLIQFSPGLPKTRSGKIMRRILRKIAANEHDQLGDTTTLADPTVVESLVENRKNK

SEQ ID NO: 192518 - protein, 300 aa, Unknown
  Bacterial polypetide isolated from the Sargasso Sea
RIPLKANTDKALEQCPGVKSVVLVRRTNAEVTFYTERDVDYTEARKQVSAECEPEVMDAEDPLFILYTSGSTGKPKGVLHTTGGYMVYASLTHQYVFDYKEQDIYWCTADVGWITGHSYIIYGPLSNGAVTLMFEGVPNYPTSARFWQICDKHQVNIFYTAPTAIRSLMREGDEPVSSTDRSSLRLLGTVGEPINPEAWEWYYRTVGESRCPVVDTWWQTETGGILITPLPGATPLKPGSAAFPFFGISPGVVDNEGNLIEGEAVGNLCLLDSWPGQMRTVYGDHQRFVDTYFKQYSGKY

SEQ ID NO: 192519 - protein, 276 aa, Unknown
  Bacterial polypetide isolated from the Sargasso Sea
MVDNTFKPQPKISERAHISSLEQYGELYKRSINDPIEFWEEIAQRLDWYKPWNKVREFDFVNGEIEWFSGGELNACYNCIDRHINEGHGEDIAIIWEGNDPNQSRKFSYNDLLKEVSQFANALKELGVQKGDRVCLYMQMIPELAIAVLACARIGAVHSVVFGAFSSDSLRDRINDSECKILVTQDTGVRGTKQNIPMKENADQALFDTPSIEHVIVVRRTGEPVNMDAKRDLWWHEATSGVSAKCEPVAMDSEDPLFILYTSGSTGKPKGVLHTT

SEQ ID NO: 192520 - protein, 269 aa, Unknown
  Bacterial polypetide isolated from the Sargasso Sea
CESDYLITADEGIRGGKIIPLKKIADDALTQCPEVKKCVVVQRTGNQVDWNNERDISYKEMISSASSKCDPEEMSAEDPLFILYTSGSTGKPKGVLHTTGGYMVYASMTHQYIFDYKSNDVYWCTADIGWVTGHSYIIYGPLSNGATTIMFEGIPNYPDSSRWWQIVDKYKVNIFYTAPTAIRALMREGDKPVKKTNRKSLKLLGTVGEPINPEAWMWYYKTVGDSRCPIVDTWWQTETGGILISPQPGAIDLKPGSATKPFYGIKPVI

SEQ ID NO: 192521 - protein, 285 aa, Unknown
  Bacterial polypetide isolated from the Sargasso Sea
HFSEKYNYSIKSNDVFWSEEGKKINWIKPFSKVKDVSYDLNDLHIRWFYDGSLNVSSNCLDRHLESRENQIAIIWEGDDPNETKKITYRELYEEVCKFSNALKANGAKKGDRITIYMPMIPEAAVAMLACARIGAIHSVVFGGFSPDSLAGRITDCDSNIIITADEGVRGGKIIPLKENTDAALKLCSSIKKCIVVKRTGNDIKWVEGRDVWYHEAMSKVDNECQPEEMDAEDPLFILYTSGSTGKPKGVLHTTAGYIVYASITHKYVFNYIDGDIYWCTADVGW

SEQ ID NO: 192522 - protein, 251 aa, Unknown
  Bacterial polypetide isolated from the Sargasso Sea
YFEVPGNSKCPIVDTWWQTETGGILISPQTGAIKLKPGSASKPFYGIEPCIVDKDGNELEGECEGMLCMKRSWPGQMRTVYGDHKRFIDTYFSQFDGKYFTGDGCKRDKDGYYWITGRVDDVIIVSGHNLGTAEIESAFVSHKDVSEAAVVGYPHDVKGNGLYCYVSLKVGVDSSENLILELKKTIREKIGPIASPDFIHITAGLPKTRSGKIMRRILRKIASNEFENLGDTSTLADPSVVDNLIENRKNK

SEQ ID NO: 192523 - protein, 224 aa, Unknown
  Bacterial polypetide isolated from the Sargasso Sea
PQTGAIPLKPGSATKPFYGIKPVIVDKNGKEIKGAGEGRLCIAQSWPGQMRTVYGDHQRFIDTYFSQFNGKYFTGDGCRRDKDGYYWITGRVDDVIIVSGHNLGTAEIESAFVAHPKVAEAAVVGYPHDIKGNGLYCYVTLNAGETETGDLERDLKLWVRKQIGPLATPDLIHFTPGLPKTRSGKIMRRILRKIAANEHGQLGDTTTLADPSVVDSLVNNRKNI

SEQ ID NO: 192524 - protein, 254 aa, Unknown
  Bacterial polypetide isolated from the Sargasso Sea
MSSKFNDIYQKSINSPEEFWGNAAQDIFWFKKPTKILNKSNPPFYKWYEDGITNTCYNALDIHIDLGKGSKTALIYDSPITGNKSKFTYEELRSKVSKFAGALKDLGVNKGDRVIIYMPMIPEAVVAMLACARIGAIHSVVFGGFASNELASRIDDSKAKLLVTASCGFEPGRTVEYKPLVDEAIKQAQHKISKMILFQRKGHEVKLNAPMEISWDEAHANAKDTDCVEMNSNEFAYILYTSGTTGTPKGIVRD

SEQ ID NO: 192525 - protein, 305 aa, Unknown
  Bacterial polypetide isolated from the Sargasso Sea
IPELAYTMLACARIGAIHSIIFGGFSPDSISGRMNDCKSDYVITADEGLRGGKIIPLKSITDEALLNCPNVKKCIVVKRTGNRVNWDESRDVWYHEITKKASSTCEPEEMNAEDPLFILYTSGSTGKPKGVLHTTGGYMVYASMTHQYIFNYKPKDVYWCTADIGWITGHSYIIYGPLANGATTIMFEGIPTYPDTSRWWQIVDKYKVNIFYTAPTAIRALMREGEGPVKKTSRKTLKLLGTVGEPINPEAWQWYFKTVGDSRCPIVDTWWQTETGGILISPQTGAIDLKPGSATKPFYGINLLL

SEQ ID NO: 192526 - protein, 268 aa, Unknown
  Bacterial polypetide isolated from the Sargasso Sea
NQLKEKVALFAGALKKQGVSKGDRVIIYMPMIPEAVVAMLACGRIGAVHSVVFGGFAANELASRIDDSKAKILVTASCGYEPGRTVHYKPLVNKALELANHKIKKCIIFQREKDKAELNPAIDITWDDAHKNAKPAECEKMNANDYAYILYTSGTTGLPKGIVRDIGGHIVALKWTMKNIYNINPEDVWWSASDIGWIVGHSYIVYGPLFYGCTTVLFEGKPVGTPDAGVFWRMISEHKVKSLFTAPTAIRAIKKEDPNGEFFKKYDL

SEQ ID NO: 192527 - protein, 318 aa, Unknown
  Bacterial polypetide isolated from the Sargasso Sea
QAIYAMQACARIGAIHSVVFGGFSPSAIADRINDSGAKVVITSDEGRRAGNCVPLKANVDEAVSQDSVTTVEHVIVHQLTGGEVEWNSHDVWWHELVADLPAECEPEPMNAEDPLFILYTSGSTGQPKGVVHTTGGYLVYASMTHEYVFDLKEDDIFWCSADVGWITGHSYIAYGPLVNGCTQVVFEGVPTYPTAGRMGEVIDKHNVTILYTAPTAIRALMAKGDEPTATSTRKSLRVMGSVGEPINPEAWAWYYEHIGNENCPIVDTWWQTETGGIMITPLPGATDMKPGSATRPFFGIAPALFDAEGNTLEGAGDG

SEQ ID NO: 192528 - protein, 180 aa, Unknown
  Bacterial polypetide isolated from the Sargasso Sea
SWPSQIRSVYGDHERMISTYFKTYEDIYFTGDGARRDEDGYFWITGRVDDVLNVSGHRLGTAEIESALVLHDSVAEAAVVGFQHPIKGQGIYAFVTLMKGEDFNDALEQKLTKFVSKEIGPIAKPDLIQNAPGLPKTRSGKIMRRILRKIAEGDFDNLGDTTTLAEPAVVASLLENSKKL

SEQ ID NO: 192529 - protein, 181 aa, Unknown
  Bacterial polypetide isolated from the Sargasso Sea
MSENYKKTYDSSIKNRENFWKTISEDIFWYKKPSKILNSSNPPFYKWFEDGVTNTCYNAVDLHVDNGRGDKTAIIYDSPITKTKYKLTYKELKEKVSFFAGALKNQGIKKGDRVIIYMPMIPQAVIAMLACGRIGAIHSVVFGGFAANELASRIDDSKAKIIVSASCGYEPGRTVHYKPLL

SEQ ID NO: 192530 - protein, 323 aa, Unknown
  Bacterial polypetide isolated from the Sargasso Sea
CIDRHLKKNGNKTAIIWVGDDPSDQKKISYKELHKNVCKAANALKSIGVQKGDRVTIYLTMIPELAYVMLACARIGAVHSIIFGGFSPDSIATRINDCKSDYIITADEGVRGGKIIPLKKIADEALLQCPNVKKCVVVKRTGNQVNWENDRDLSYEDLISKASAKCEPEEMNAEDPLFILYTSGSTGKPKGVLHTTGGYIVYASMTHQYIFDYKPKDIYWCTADIGWVTGHSYIIYGPLSNCATTIMFEGVPNYPDSSRWWKIVDKYKVNIFYTAPTAIRALMREGDGPVKKTSRKTLKLLGTVGEPINPEAWLWYYKTVGDS

SEQ ID NO: 192531 - protein, 108 aa, Unknown
  Bacterial polypetide isolated from the Sargasso Sea
KVAEAAVVGCPHDIKGNGLYCYVTLNVGEEPSGDLERELKLWVRKQIGPIATPDFIQFAPGLPKTRSGKIMRRILRKIAANEHEQLGDTTTLADPSVVKSLVDNRKNT

SEQ ID NO: 192532 - protein, 111 aa, Unknown
  Bacterial polypetide isolated from the Sargasso Sea
AHPKVAEAAVVGYPHDIKGNGLYCYVTLNAGETETGELERDLKLWVRKQIGPLATPDLIHFTPGLPKTRSGKIMRRILRKIAANEHGQLGDTTTLADPSVVDSLVENRKNI

SEQ ID NO: 192533 - protein, 227 aa, Unknown
  Bacterial polypetide isolated from the Sargasso Sea
VLLVNPSTKTKYNESIKNNNTFWKKEGKRITWIKPYKKIKDVKYSKEEVKIKWYEDGTLNASANCIDRHLKDKKDKTAIIWVGDDPKDIQKISYKQLHQKVSKAANGLKKLGIKKGDRVTIYLTMIPELAILMLACARIGAIHSIIFGGFSAESISGRVNDCKSEYIITADEGVRGGKTIPLKATTDEALTNCPDIKKCIVVKRTGNYVFWNNDRDVWYHDLIKDVP

SEQ ID NO: 192534 - protein, 282 aa, Unknown
  Bacterial polypetide isolated from the Sargasso Sea
MIKKETLWWTDLISDCPSECDPEPLNAEHPLFILYTSGSTGKPKGIQHSTAGYILHAKTTFSWVFDIKEEDVFWCTADVGWITGHTYVAYGPLLAGATILIYEGAPTFPDVGRFWKICEKHAVTIFYTAPTAIRALMKHGDEIPNSYDLSKLRLLGTVGEPINPEAWMWYHSIIGQERCPIVDTWWQTETGGAMISPLPGITNTKPGSCTTPVPGIDVDIVNESGESVEEPNQGGYLVIKKPWPSMLRTIWGDNQRYIDTYWDKFDGRYYVAGDSAYKDEDG

SEQ ID NO: 192535 - protein, 300 aa, Unknown
  Bacterial polypetide isolated from the Sargasso Sea
KDKKDKTAIIWVGDDPKESQKISYKELHKKVSKAANGLKKLGIKKGDRVTIYLTMIPELAILMLACVRIGAVHSIIFGGFSAESISGRVNDCESEFIITADEGVRGGKIIPLKDTTDEALLNCPNVKKCIVVKRTGNSVSWNYDRDVWYHDLIKDVSNHCEPEEMNAEDPLFILYTSGSTGKPKGVLHTTGGYMVYASMTHQYIFNYKPKDIYWCTADIGWVTGHSYIIYGPLANGATTIMFEGVPNYPNSSRWWQIVDKYKVNTFYTAPTAIRALMREGDKPVKKTSRKSLKLLGTVGE

SEQ ID NO: 192536 - protein, 284 aa, Unknown
  Bacterial polypetide isolated from the Sargasso Sea
MREGDKPVKKTSRKSLKLLGTVGEPINPEAWMWYYKTVGNSKSPIVDTWWQTETGGILIAPQTGAIPLKPGSATKPFYGIKPVIVDKTGKEIKGAGEGRLCIAQSWPGQMRTVYGDHQRFIDTYFSQFNGKYFTGDGCRRDKDGYYWITGRVDDVIIVSGHNLGTAEIESAFVAHPKVAEAAVVGYPHDIKGNGLYCYVTLNAGETETGDLERDLKLWVRKQIGPLATPDLIHFTPGLPKTRSGKIMRRILRKIAANEHGQLGDTTTLADPSVVDSLVDNRKNI

SEQ ID NO: 192537 - protein, 176 aa, Unknown
  Bacterial polypetide isolated from the Sargasso Sea
MEIKKEWLEHAKVNKDKYYSMYDNSLQNNDKFWADQAQRVDWIKKFTKIKDIKYSKDDVSIKWFEDGNLNVCYNCIDRHAENNPDKVAIIWEGDDPNETKKITYKDLLINVSKAANVLKKIGVKKGDRVTIYLTMIPELAYIMLACARIGAVHSIIFGGFSAESIAGRIKDCNQNM

SEQ ID NO: 192538 - protein, 301 aa, Unknown
  Bacterial polypetide isolated from the Sargasso Sea
QKYSQSIKSNDEFWRKEGKRINWIKPYKKIKDVKYSTKEVKIKWFEDGTLNASANCIDRHLKDKKDKTAIIWVGDDPKDSQKISYKQLHQKVSKAANGLKKLGIRKGDRVTIYLTMIPELAILMLACVRIGAVHSIIFGGFSADSISGRVNDCESEYIITADEGVRGGKIIPLKYTVDEALMSCPNVKKCIVVKRTGNYINWDQNRDVWYHDLIKDVPNHCEPEEMNAEDPLFILYTSGSTGKPKGVLHTTGGYMVYASMTHQYIFNYKPKDIYWCTADIGWVTGHSYIIYGPLFDGATTI

SEQ ID NO: 192539 - protein, 238 aa, Unknown
  Bacterial polypetide isolated from the Sargasso Sea
DTWWQQKLGGILISPQTGAIDLKPGSATKPFYGIKPLIVDKDGHTIKGEGQGRLCIAQSWPGQMRTVYGDHQRFIETYFSQFDGKYFTGDGCRRDKDGYYWITGRVDDVIIVSGHNLGTAEIESAFVAHSKVAEAAVVGYPHDIKGNGLYCYVTLNVGENPDGDLERELKLWVRKQIGPIATPDFIQFSPGLPKTRSGKIMRRILRKIAANEHEQLGDTTTLADPSVVKSLVDNRKNT

SEQ ID NO: 192540 - protein, 269 aa, Unknown
  Bacterial polypetide isolated from the Sargasso Sea
RHLKDKKDKTAIIWVGDDPKDSQKISYKQLHQKVSKAANGLRKLGIKKGDRVTIYLTMIPELAILMLACVRIGAVHSIIFGGFSADSISGRVNDCESEYIITADEGVRGGKTIPLKYTVDEALMSCPNVKNCIVVKRTGNYINWDQNRDVWFHDLIKDVPNHCDPEEMSAEDPLFILYTSGSTGKPKGVLHTTGGYMVYASMTHQYIFNYKPKDIYWCTADIGWVTGHSYIIYGPLSNGATTIMFEGIPNYPDSSRWWQIVDKYKVNTF

SEQ ID NO: 192541 - protein, 297 aa, Unknown
  Bacterial polypetide isolated from the Sargasso Sea
MSGKYEKIYDSSIKNREFFWKEVSEDIFWYKKPSKILNSTNPPFYKWYEDGITNTCYNALDFHIDRGRGDKTAIIYDSPITGTKYKLTYKELREKVSIFAGALKNQGISKGDRVIIYMPMIPQAVVAMLACGRIGAIHSVVFGGFAANELASRIDDSKAKIIISASCGYEPGRTVHYKPLLNKAIEISNHKPEKCIIWQREKDKAELDPKKDIDWMEALKGAKPTECEKMNSNDYAYILYTSGTTGAPKGIVRDIGGHIVALKWTMKNIYNIDQDDVWWSASDIGWIVGHSYIVYAP

SEQ ID NO: 192542 - protein, 269 aa, Unknown
  Bacterial polypetide isolated from the Sargasso Sea
YIFWNNERDVWYHDLIKDVSNHCEPEEMNAEDPLFILYTSGSTGKPKGVLHTTGGYMVYASMTHQYIFNYKPKDIYWCTADIGWVTGHSYIIYGPLSNGATTIMFEGVPNYPDSSRWWQIVDKYKVNTFYTAPTAIRALMREGDGPVKKTSRKSLKLLGTVGEPINPEAWMWYFKTVGNSKCPIVDTWWQTETGGILIAPQTGAIPLKPGSATKPFYGIKPVLVDKDGKEIKGAGEGRLCIAQSWPGQMRTVYGDHQRFIDTYFSQFDG

SEQ ID NO: 192543 - protein, 154 aa, Unknown
  Bacterial polypetide isolated from the Sargasso Sea
TISLGDGCKRDEDGYYWISGRVDDVINVSGHRMGTAEVESALVSHEKVSEAAVVGFPHEIKGQGIYAYVTLNAGESGNEEIRKELIKWVRKEIGPIASPDLIQFAPNLPKTRSGKIMRRILRKIAENDYSELGDTSTLAEPMVVDELIENRQNK

SEQ ID NO: 192544 - protein, 198 aa, Unknown
  Bacterial polypetide isolated from the Sargasso Sea
MSFKFNQIYENSIKNPEKFWQEESENIFWFKKPTKILNKSNPPFYKWFEDGLTNTCYNALDIHIDQGRGQKTALIYDSPITGNKSKFTYEELRAKVSKFAGSLKNQGVNKGDRVIVYMPMIPEAVVAMLACARIGAIHSVVFGGFASNELASRIDDSKAKLLVTASCGFEPGRTVEYKPLVDEAIKIAKHKIDKMILF

SEQ ID NO: 192545 - protein, 259 aa, Unknown
  Bacterial polypetide isolated from the Sargasso Sea
MYEKKYKESLRNNNDFWEKEGKRITWIKPYTKIKDITYSKTDVSIKWFYDGTLNASANCIDRHLKKNKDKTAIIWVGDDPKVQKKISYKQLHDEVSKAANGLKKLGVQKGDRVTIYLTMIPELAYTMLACARIGAIHSIIFGGFSPDSIAGRINDCKSDYIVTADEGLRGGKTISLKSITDEALIHCPNVKKCIVVKRTGNRINWDERRDVWYDQMIKGVPTVCEPEEMDAEDPLFILYTSGSTGKPKGVLHTTGGYMV

SEQ ID NO: 192546 - protein, 290 aa, Unknown
  Bacterial polypetide isolated from the Sargasso Sea
MIPELAYVMLACARIGAVHSIIFGGFSAESIAGRIKDCKSEFVITADEGIRGGKTIPLKLTTDKALETCPDVKKCLVVKRTNKEIELKKDRDIFYEDILKDVDSFCEPEVLNAEDPLFILYTSGSTGKPKGVMHTTGGYIVYASMTHEYIFNYNEGDIYWCTADIGWITGHSYIIYGPLANGATTLMFEGVPNYPDFSRFWQIVDKHKVNIFYTAPTAIRALMREGDDYVTKTSRSSLKLLGTVGEPINPEAWKWYFEIPGNSKCPIVDTWWQTETGGILISPQTGAIKL

SEQ ID NO: 192547 - protein, 216 aa, Unknown
  Bacterial polypetide isolated from the Sargasso Sea
MNLTFKEIYDSSIKNPEEFWKNISEDVFWFKKPNKILNNSKPPFYKWFEDGVTNSCYNALDHHIEQGKGNKVALIYDSPITGNKAKFTFNQLKGKVSKFAGALDKLGIKKGDRIVIYMPMIPEAVVAMLACGRIGAIHSVVFGGFASNELASRIDDSKAKILITASCGFEPGKTVEYRPLVDGALKLSKHKLEKVIFFQRKDHEVKLNAPQEISWG

SEQ ID NO: 192548 - protein, 278 aa, Unknown
  Bacterial polypetide isolated from the Sargasso Sea
NWDNERDVSYEDLIKNASDKCEPEEMGAEDPMFILYTSGSTGKPKGVLHTTGGYMVYASMTHQYIFDYKNKDIYWCTADIGWVTGHSYIIYGPLSNGATTIMFEGVPNYPDSSRWWQIVDKYKVNIFYTAPTAIRALMREGDAPVKKTSRKSLKLLGTVGEPINPEAWMWYYNIVGEKKCPIVDTWWQTETGGILISPQPGAINLKPGSATKPFYGIKPAIVDEAGKVLKGPCKGRLCMLQSWPGQMRTVYGDHQRFIDTYFSQFDGKYFTGDGVDEI

SEQ ID NO: 192549 - protein, 171 aa, Unknown
  Bacterial polypetide isolated from the Sargasso Sea
GDHKRFIDTYFSQFDGKYFTGDGCRRDKDGYYWITGRVDDVIIVSGHNLGTAEIESAFVAHPKVAEAAVVGYPHDIKGNGLYCYVTLNAGEHADGDLERELKLWVRKQIGPIATPDLIQFSPGLPKTRSGKIMRRILRKIAANEHNELGDTTTLADPSVVDSLIENRQNKD

SEQ ID NO: 192550 - protein, 139 aa, Unknown
  Bacterial polypetide isolated from the Sargasso Sea
YWITGRVDDVIIVSGHNLGTAEIESAFVAHPKVAEAAVVGYPHDIKGNGLYCYVTLNAGETETGELERDLKLWVRKQIGPLATPDLVHFTPGLPKTRSGKIMRRILRKIAANEHEQLGDTTTLADPSVVNSLVENRKNI

SEQ ID NO: 192551 - protein, 282 aa, Unknown
  Bacterial polypetide isolated from the Sargasso Sea
KDKVSKFAGALSNQGVKKGDRVIIYMPMIPEAVVAMLACGRIGAIHSVVFGGFASNELASRIDDSKAKVLVTASCGFEPGRTVEYRPLIDGALKLAKHKVEKVIFFQRQGHEINLNPPIEISWDESLYNAKYTDCVEMGSNEFAYILYTSGTTGVPKGIVRDIGGHIVALKWTMKNIYNIDANDVWWSASDIGWIVGHSYIVYAPLFKGCTTVLFEGKPVGTPDAGVFWRVISEHKIKSLFTAPTAFRAIKKEDPDGKFFSKYDLSSFESLFLARGKSQTPD

SEQ ID NO: 192552 - protein, 210 aa, Unknown
  Bacterial polypetide isolated from the Sargasso Sea
KLFFGIEPCIVNKDGQELEGECEGMLCLKRSWPGQMRTVYGDHKRFIETYFSQFDGKYFTGDGCKRDKDGYYWITGRVDDVIIVSGHNLGTAEIESAFVSHPKVAEAAVVGYPHEIKGNGLYCYISLNVGVDSSKSLVNELKQTIREKIGPIASPDFIHVTSGLPKTRSGKIMRRILRKIASNDFENLGDTSTLADPSVVKTLIDERENK

SEQ ID NO: 192553 - protein, 303 aa, Unknown
  Bacterial polypetide isolated from the Sargasso Sea
RKKIKKKKSKKRKVKTRKKRLKKVKSKKIENTELIYKPKSDWIKKAIVNKSGYEKKYSESLKNNDNFWKKEGKRITWIKPYTKIKDYKYSKTDVNIKWFYDGTLNASANCIDRHLKKNKDKTAIIWVGDDPKVQKKISYKQLHQEVSKAANGLKEIGVKKGDRVTIYLTMIPELAYTMLACARIGAVHSIIFGGFSADSITGRINDCKSDYVITADEGVRGGKIIHLKATVDEALLNCPNVKKCVVVKRTGNRINWDESRDVWYHDITKKASKNCEPEEMNAEDPLFILYTSGSTGKPKGVCT

SEQ ID NO: 192554 - protein, 125 aa, Unknown
  Bacterial polypetide isolated from the Sargasso Sea
DIILGTAEVESAFVAHSKVAEAAVVGCPHDIKGNGLYCYVTLNVGEEPSGDLERELKLWVRKQIGAIATPDFIQFAPGLPKTRSGKIMRRILRKIAANEHEQLGDTTTLADPSVVKSLVDNRKNI

SEQ ID NO: 192555 - protein, 164 aa, Unknown
  Bacterial polypetide isolated from the Sargasso Sea
MKISYNDIYQNSIQKPEEFWQNISNDIFWFKKPTKILNKSNPPFYKWFEDGITNSCYNAVDLHIEKGMGENIALIYDSPITDKKAKITYNELKKKISKFAGALDKYGIKKGDRVIIYMPMIPEAVIAMLACGRIGAIHSVVFGGFASNELASRIDDSKAKILIT

SEQ ID NO: 192556 - protein, 254 aa, Unknown
  Bacterial polypetide isolated from the Sargasso Sea
STGKPKGVLHTTGGYMVYASMTHQYIFNYKPKDIYWCTADIGWVTGHSYIIYGPLSNGATTIMFEGIPNYPDSSRWWQIVDKYKVNTFYTAPTAIRALMREGDKPVKKTSRKSLKLLGTVGEPINPEAWMWYYKTVGNSKCPIVDTWWQTETGGIMIAPQTGAIPLKPGSATKPFYGIKPVLVDKNGKEIKGAGEGRLCIAQSWPGQMRTVYGDHQRFIDTYFSQFNGKYFTGDGCRRDKDGYYWITGRVDDVI

SEQ ID NO: 192557 - protein, 223 aa, Unknown
  Bacterial polypetide isolated from the Sargasso Sea
FFGGFSPDSIAGRINDCKSDYIVTADEGLRGGKTIPLKSITDEALIHCPNVKKCIVIKKTGNRVNWDERRDVWYNEMVKGMSTHSEPEEMNAEDPLFILYTSGSTGKPKGVLHTTGGYMVYASMTHQYIFNYKPKDIYWCTADIGWVTGHSYIIYGPLANGATTIMFEGIPTYPDSSRWWQIVDKYKVNIFYTAPTAIRALMAQGEGPVKKTSRKTLKLLGTV

SEQ ID NO: 192558 - protein, 263 aa, Unknown
  Bacterial polypetide isolated from the Sargasso Sea
NYRPKDIYWCTADIGWVTGHSYIIYGPLANGATTIMFEGVPNYPDSSRWWQIVDKYKVNTFYTAPTAIRALMREGDGPVNKTSRKSLKLLGTVGEPINPEAWMWYYNIVGNSNCPIVDTWWQTETGGIMIAPQTGAIPLKPGSATKPFYGIKPCLMDKDGKEIKGAGEGRLCISQSWPGQMRTVYGDHQRFIDTYFSQFDGKYFTGDGCRRDKDGYYWITGRVDDVIIVSGHNLGTAEIESAFVAHPKVAEAAVVGYPHDIKG

SEQ ID NO: 192559 - protein, 273 aa, Unknown
  Bacterial polypetide isolated from the Sargasso Sea
NRESLRILGTVGEPINPEAWEWYYHVVGDGRCPIMDTWWQTETGGHLITPLPGATDLKPGSATLPFFGIEPCLMNDKGEEVIGAGEGALCFKRSWPGQMRTVFGDHERFKSTYFQAYPGLYFSGDGARRDKDGYYWITGRIDDVINVSGHRMGTAEIESALVLHDNVAESAVVGYPHEIKGQGIYAYVTLNDGVKSSNELKRELIDHVRNEIGPFASPDIIQWSPGLPKTRSGKIMRRILRKIATNEIDNLGDTSTLAEPEVVKNLIENREIK

SEQ ID NO: 192560 - protein, 215 aa, Unknown
  Bacterial polypetide isolated from the Sargasso Sea
MEIKKEWLEHAKVNEEKYSSMYDNSLQNNDEFWADQAERVEWIKKFTKIKDIKYSKDDVSIKWFEDGNLNVSYNCIDRHAENNPDKVAIIWEGDDPNETKKITYGDLLINVSKAANVLKKIGVKKGDRVTIYLTMIPELAYIMLACARIGAVHSIIFGGFSAESIAGRIKDCKSEYVVTADEGVRGGKTIPLKLTTDKALESCADVKKCLVIKRT

SEQ ID NO: 192561 - protein, 207 aa, Unknown
  Bacterial polypetide isolated from the Sargasso Sea
MKKNFQEIYNKSIENPEEFWRNNSEDIFWFKKPTKILNKSNHPFYKWYEDGVTNTCYNALDVHIDKGNGDKTALIYDSPITGNKSKHTYIELKEKVSKFAGALVNQGVSKGDRVIIYMPMIPEAVIAMLACSRIGAIHSVVFGGFASNELASRIDDSKAKILITASCGFEPSRTVEYKPLVDGAMKLATHKVEKVIFFQRKGNEVKL

SEQ ID NO: 192562 - protein, 260 aa, Unknown
  Bacterial polypetide isolated from the Sargasso Sea
PDEKRLWSIVEKYKVNIFYTAPTAIRAFMKWGVEHPQAHDLTSLRLLGTVGEPINPEAWMWYHENIGNESCAIVDTWWQTETGSIMITPLPGITSTKPGSACGPMPGIDAVVVDENGNEVSKGEGGYLAIKTPWPSMLRTIFGDEKRYIDTYWSKYDGMYFAGDGAKYDDDGYFWLLGRVDDVMNISGHRISTAEVESALVAHESVAEAAVIGRADEISGEAIAAFVTLIGGYEGNEELISTLRQHVSDKMWTNLQNQKS

SEQ ID NO: 192563 - protein, 156 aa, Unknown
  Bacterial polypetide isolated from the Sargasso Sea
NYKGMYFTGDGVKRDHDGYLRILGRVDDVINVSGHRMGTAEVENAINEHEEVVESAVVGYPHEIKGEGIYAYVIVNSKSSDEIIKTEITDVVRRVIGPIAKPDKIQIVSGLPKTRSGKIMRRILRKVASNDFDNLGDTSTLLNPDVVDEIIKGSSY

SEQ ID NO: 192564 - protein, 213 aa, Unknown
  Bacterial polypetide isolated from the Sargasso Sea
MTQKYKEIYQKSITNREDFWKEISNDIFWYKKPTKILNSQNPPFYKWFEDGVTNTCYNALDLHIDQGKGEKLAIIYDSPITGSKENITYSKLKEKVALFAGALKKQGVSKGDRVIIYMPMIPEAVVAMLACGRIGAVHSVVFGGFAANELASRIDDSKAKILVTASCGYEPGRTVHYKPLVNKALELASHKIKKCIIFQREKDRAELNPAIDI

SEQ ID NO: 192565 - protein, 72 aa, Unknown
  Bacterial polypetide isolated from the Sargasso Sea
ADIGWITGHSYIIYGPLANGATTIMFEGIPTYPDSSRWWQIVDKYKVNIFYTAPTAIRALMREGDGPVKKTS

SEQ ID NO: 192566 - protein, 265 aa, Unknown
  Bacterial polypetide isolated from the Sargasso Sea
MVGEPINPEAWMWYYKTVGDSRCPIVDTWWQTETGGILIAPQPGAIDLKPGSATKPFYGIKPVLVDNDGKVIKGEGKGRLCMASSWPGQMRTVYGDHQRFIDTYFSQHDGKYFTGDGCKRDKDGYYWITGRVDDVIIVSGHNIGTAEIESAFVAHPKVAEAAVVGFPHSIKGNGLYCYVTLIAGENPSGDLERELKQFVKRLVGAHCYPDIIQFAPGLPKTRSGKIMRRILRKIAENDPDNLGDTTTLADPTVVASLVENRQNKG

SEQ ID NO: 192567 - protein, 303 aa, Unknown
  Bacterial polypetide isolated from the Sargasso Sea
AWRRGDIVLLKKNVDDSLKLTDHIESVIVVKRTENEVTMVNGRDYWYSELVDKQEANCEPEVMNAEDMLYILYTSGTTAKPKGIVHTQAGYLTGVTTTHSAVFDVKEDDIYWCAADCGWVTGHSYIVYGPLANKTTSVMYEGAPNAPDEKRLWSIVEKYKVNIFYTAPTAIRAFMKWGVEHPQAHELTSLRLLGTVGEPINPEAWMWYHENIGNESCVIVDTWWQTETGSIMITPLPGITSTKPGSACGPMPGIDAVVVDENGNEVSKGEGGYLAIKTPWPSMLRTVFGDEKRYIDTYWSKYD

SEQ ID NO: 192568 - protein, 267 aa, Unknown
  Bacterial polypetide isolated from the Sargasso Sea
PVSLKPAVDAALAGGACPSVSGVLVVQRTKQPVEMVKGRDLWWHDLVAGQSNVCPAEPMASEDRLFVLYTSGSTGKPKGVVHTTAGYNLWAHLTFQWIFDIRDEDVFWCTADVGWITGHSYIVYGPLSNGATTVMYEGAPRPSKPGAFWELIQKHGITIFYTAPTAIRAFMKSGRDVPDQYDMSSLRLLGTVGEPINPEAWMWYRDVIGGNRCPIVDTWWQTETGGVMISPLPGATPTKPGSATLPLPGIQADIVDAEGNSCGPDEG

SEQ ID NO: 192569 - protein, 263 aa, Unknown
  Bacterial polypetide isolated from the Sargasso Sea
NSINNILEEKRIFPPSKNFAENSNISTQEELLSLKKQASDNPIQFWESFAKSELDWFEPFQTVLDYKNAPFFKWFKEGKLNITYNCLDRHIKRGLGGKTALIWEGEPGDSKKYTYEELLKEVCKAANALKTIGVKKGDLVCIYMPMIPEAMFAMLACARIGAPHSVVFGGFSSEALKDRLIDGNARYIITADGGFRKDKVIELKQAVDAAIENGADKVVEKVVVVQRTKKNISMVDDRDLWWHELLKDQKDHCVPEIMNSEDR

SEQ ID NO: 192570 - protein, 140 aa, Unknown
  Bacterial polypetide isolated from the Sargasso Sea
LFGSPGRVDDVIIVSGHNLGTAEIESAFVAHPKVAEAAVVGYPHDIKGNGLYCYVTLNAGETETGDLERELKLWVRKQIGPLATPDLIHFTPGLPKTRSGKIMRRILRKIAANEHGQLGDTTTLADPGVVDSLVENRKNV

SEQ ID NO: 192571 - protein, 297 aa, Unknown
  Bacterial polypetide isolated from the Sargasso Sea
WQIVDKHKVNIFYTAPTAIRALMREGDEYVKKTKRSSLKLLGTVGEPINPEAWKWYFEIPGDSKCPIVDTWWQTETGGILIAPQTGAIKLKPGSATKPFYGIEPCIVDKDGNELKGECEGMLCIKESWPGQMRSVYGDHNRFIKTYFSQFDGKYFTGDGCRRDEDGYYWITGRVDDVIIVSGHNLGTAEIESAFVSHPKVSESAVVGYPHEIKGNGLYCYVSLNADTEASETIKKELVQTLRNKIGPIATPDFIHFTSGLPKTRSGKIMRRILRKIAANEHDQLGDTSTLADPSVGE

SEQ ID NO: 192572 - protein, 154 aa, Unknown
  Bacterial polypetide isolated from the Sargasso Sea
MSAEKIAVKTNWKNNAHLDKNNYEKFYEKSINDPEGFWSEQALNIDWYKPFTKDAIKKVNFSKDNLEIKWFYDGKLNVSYNCIDRHLKTKSDNTAIIWEGDNPNESKNITYKELHTDVCLMANVLKKRGVKKGDRITIYMPMIPEASYAMLACA

SEQ ID NO: 192573 - protein, 302 aa, Unknown
  Bacterial polypetide isolated from the Sargasso Sea
KLNADKALVDTPSITSVVVVKRTGVDINMIDGRDVWWHEQIEKANANCDPVQMDSEDPLFILYTSGSTGKPKGVLHTTGGYLVYASYTHHTIFDYKDNDVYWCTADIGWITGHSYIVYGPLSNQATTIMFEGVPNYPDFGRFWDVVDKHEVNQFYTAPTALRALMKEGDDWVTSRELGSLRILGTVGEPIKEPEWNWYHKIVGKERCPIVDTWWQTETGGILISPLPGATPTKPGSATFPFFGIHPVLMTDDGIEIKGNNVQGLLALKTSWPGQMRTIYGDHQRFIETYFSQFPGYYFTGDG

SEQ ID NO: 192574 - protein, 296 aa, Unknown
  Bacterial polypetide isolated from the Sargasso Sea
VIIYMPMIPEAVVAMLACARIGAIHSVVFGGFASNELASRIDDSKAKVLVTASCGFEPGRTVEYKPLVDEAVKQAKHKINKLILFQRQGHEVKLNAPNEVDWDEVVSKAKDIDCVEMNSNEFAYILYTSGTTGTPKGIVRDTGGHIVALKWTMKNIYNIDEGDIWWSASDIGWIVGHSYIVYAPLFKGCTTVLFEGKPVGTPDAGAFWKIISDYKVKSLFTAPTAFRAIKKEDPEGKFFSKYDLSKFESLFLAGERADPDTIKWAENLLKVPVIDHWWQTETSWAISSNCTGIEMM

SEQ ID NO: 192575 - protein, 320 aa, Unknown
  Bacterial polypetide isolated from the Sargasso Sea
TTDEALTNCPNVKKCIVVKRTGNYVFWNSDRDVWYHDLIKDVPNYCEPEEMNAEDPLFILYTSGSTGKPKGVLHTTGGYMVYASMTHQYIFNYKPKDIYWCTADIGWVTGHSYIIYGPLSNGATTIMFEGIPNYPNSSRWWQIVDKFKVNTFYTAPTAIRALMREGDEPVNKTSRKSLKLLGTVGEPINPEAWMWYYKTVGNSKCPIVDTWWQTETGGILIAPQTGAIPLKPGSATKPFYGIKPVLVNKDGNEIKGAGEGRLCIAQSWPGQMRTVYGDHQRFIDTYFSQFDGKYFTGDGCKRDKDGYYWITGRVDDVIIV

SEQ ID NO: 192576 - protein, 220 aa, Unknown
  Bacterial polypetide isolated from the Sargasso Sea
IDLKPGSATKPFYGIKPVLVDKDGKVIKGEGKGRLCMASSWPGQMRTVYGDHQRFIDTYFSQFDGKYFTGDGCRRDRDGYYWITGRVDDVIIVSGHNLGTAEIESAFVAHPKVAEAAVVGFPHSIKGNGLYCYVTLNAGEKPTGDLERDLKLWVRKQIGPIATPDVIQFAPGLPKTRSGKIMRRILRKIAANEPDNLGDTTTLADPSVVASLVENRQNKG

SEQ ID NO: 192577 - protein, 305 aa, Unknown
  Bacterial polypetide isolated from the Sargasso Sea
QFFLKKAISYLSWFKEPTVGHNGSFEETKWFEDGTLNISYNCIDRHAKNNPDKIAIIWQGDQENHFKKISYKDLLREVSKLANGLRSLGVKKGDRVCIYMPMIPEAAYSMFACMRIGAIHSVVFGGFSPEAISSRILDADCKYIITADEGIRGGKTIPLKFYVDKALEKCPDIKKVIVLQYTKGNINWNSKLDITYEELVTDQPTECACIELKAEDPSFILYTSGSTGKPKGVLHTTAGYLLSANLSFKYIFGIRDDDIHWCTADVGWITGHTYILYGPLSSGITTVMYEGVPMYPDPSRFLEDL

SEQ ID NO: 192578 - protein, 197 aa, Unknown
  Bacterial polypetide isolated from the Sargasso Sea
MTNSFNKIYQESIQNPEEFWKNVSDDVFWFKKPTKILNKSNPPFYKWFEDGVTNTCYNAIDVHIDKGNGEKTALIYDSPITNSKAKYTYNELREKISKFAGALDNQGIKKGDRVIIYMPMIPEAVIAMLACGRIGAIHSVVFGGFASNELASRIDDSKAKILITASCGFEPGRTVEYRPLVNGALKLAKHKVERVIF

SEQ ID NO: 192579 - protein, 274 aa, Unknown
  Bacterial polypetide isolated from the Sargasso Sea
MKVYVRGKIIPLKENTDAALKLCSSIKKCIVVKRTGNDINWVEGRDIWYHEAMSKVDNECQPEEMDAEDPLFILYTSGSTGKPKGVLHTTAGYIVYASITHKYVFNYIDGDIYWCTADVGWVTGHSYIVYGPLANGATTLMFEGIPNYPTNSRFWEIVDKHKVNIFYTAPTAIRALMREGDEAVKKTSRSSLKLLGTVGEPINPEAWRWYYDVVGNKNCEIVDTWWQTETGGILISPLPGVTPTKPGSATKPLFGVKPVIVDQNNNILEGPAEG

SEQ ID NO: 192580 - protein, 294 aa, Unknown
  Bacterial polypetide isolated from the Sargasso Sea
MAKRSKRRRKRKKKFGFDKPKSELIIKIKSDWIKKAIVNKKGYEKKYNDSIKNNDSFWKKEGKRITWIKPYKKIKDVKYSKNEVRIKWYEDGTLNASANCIDRHLKNKKDKTAIIWVGDNPKDTKKISYKQLHREVSKAANGLKSLGIQKGDRVTIYLTMIPELAIIMLACARIGAIHSIIFGGFSSDSIAGRINDCKSHYIITADEGVRGGKTIPLKAITDEALLKCPDIKKCIVVKRTGNFVNWINGRDIWYEDIIKKASTHCEPEEMNAEDPLFILYTSGSTGKTKRRFTH

SEQ ID NO: 192581 - protein, 123 aa, Unknown
  Bacterial polypetide isolated from the Sargasso Sea
VSGHRLGTMEIESALVSHKLVAEAAVVGRRDDLKGEVIVAFVSLEKDVKSSLELVEELKKHVVSEIGIIAKPEKIIISDSLPKTRSGKIMRRILRSLAAGEKISGDISTLEDSSVLEKLKESS

SEQ ID NO: 192582 - protein, 279 aa, Unknown
  Bacterial polypetide isolated from the Sargasso Sea
MYEGVPRPSNLGAFWEIVQKYKVSIFYTAPTAIRAFMKSGREIPDKYNLESLRLLGTVGEPINPEAWMWYKDVIGKDKCPIVDTWWQTETGGVMISPLPGVVATKPGSATFPLPGIEVEIVDKNGDKVKENEGGYLIIKKPWPGMMRTIHGNSERYLESYWEFITFKGEKNVYFAGDGARIDEDGYIWIMGRVDDVISVSGHRLGTMEIESALVSHKSVAESAVVGKKDDLKGEVIVAFVSLEKDVKSSSELVENLKNHVVNEIGIIAKPEKIIISDSL

SEQ ID NO: 192583 - protein, 240 aa, Unknown
  Bacterial polypetide isolated from the Sargasso Sea
AYTYKELLDWTARIAGGLVSLGVSKGDRVVIYMPMVPETVVAMLACARIGAIHSVVFGGFAAPELASRIDDAEPKVILSASCGIEFEKVIEYKPLLDAAIEIASFKPAHCVVLQRPQSQATLIEPRDIDWKSWESESESVGCVAVLATDPLYILYTSGTTGKPKGIVRDNGGHAVALKYSMGAIYDVDVGDIFWAASDVGWVVGHSYIVYGPLLKGCASILYEGKPIRTPDAGAFWRVVS

SEQ ID NO: 192584 - protein, 173 aa, Unknown
  Bacterial polypetide isolated from the Sargasso Sea
MSVKFNKIYNESINSPERFWSEASNDIFWFKKPTKILNKSNPPFYKWYEDGITNTCYNALDIHIDKGNGKRTALIYDSPITNNKSKFTFEELRSKVSKFAGALKDQGVNKGDRVIIYMPMIPEAVVAMLACARIGAIHSVVFGGFASNELASRIDDSKAKILVTASCGFEPGR

SEQ ID NO: 192585 - protein, 268 aa, Unknown
  Bacterial polypetide isolated from the Sargasso Sea
SISGRINDCESDYVITADEGVRGGKTIPLKSITDEALQSCPNVKKCIVVKRTGTKKIDWYNDRDVWYHKMISKVSAKCEPEEMNAEDPLFILYTSGSTGKPKGVLHTTGGYMVYASMTHQYIFNYKPKDIYWCTADIGWVTGHSYIIYGPLANGATTIMFEGIPTYPDTSRWWQIVDKYKVNIFYTAPTAIRALMREGDKPVKKTSRKTLKLLGTVGEPINPEAWEWYYKTVGDSRCPIVDTWWQTETGGILISPQTGAIDLKPGSAT

SEQ ID NO: 192586 - protein, 311 aa, Unknown
  Bacterial polypetide isolated from the Sargasso Sea
MRLIWVEDRDVWYDDLIRSASNNCEPEEMGAEDPLFILYTSGSTGKPKGVLHTTGGYMVYASMTHQYIFNYKKNDIYWCSADIGWVTGHSYIIYGPLSNGATTIMFEGVPNYPDTSRWWQIVDKYKVNIFYTAPTALRALMREGEGPVKKTSRKSLKLLGTVGEPINPEAWLWYYKVIGESKCPIVDTWWQTETGGILISPQPGAMDLKPGSATKPFYGIKPVIVDEKGNTLKGACRGRLCIAQSWPGQMRTVYGDHQRFIDTYFSQFDGKYFTGDGCRRDEDGYYWITGRVDDVIIVSGHNLGTAELKSA

SEQ ID NO: 192587 - protein, 315 aa, Unknown
  Bacterial polypetide isolated from the Sargasso Sea
RIAIIWEGDDPNEPKKITYRELYEEVCKFSNALKANGAKKGDRITIYMPMIPEAAVAMLACARLGAIHSVVFGGFSPDSLAGRITDCDSNIIITADEGIRGGKIIPLKENTDAALNLCSSVKKCIVVKRTGNDINWVEGRDVWYHEAISKVDNECQPEEMNAEDPLFILYTSGSTGKPKGVLHTTAGYIVYASITHKYVFNYIDGDIYWCTADVGWVTGHSYIVYGPLANGATTLMFEGVPNYPTNSRFWEIVDKHKVNIFYTAPTAIRALMREGDEAVKKTSRSSLKLLGTVGEPINPEAWRWYYDVVGNKNCE

SEQ ID NO: 192588 - protein, 296 aa, Unknown
  Bacterial polypetide isolated from the Sargasso Sea
VRRINFKAPTFSKDSDGNSVIKVSDSWANHAYVNDSKYKKKYKMSIKENDKFWAKEGKRITWMKKYTKIKDVKYSKDEVKIKWYYDGTLNASANCIDRHLKKNPSKTAIIWVGDDPADTKKISYRELHQNVCKAANGLKSLGIQKGDRVTIYLTMIPELAYIMLACARIGAVHSIIFGGFSPDSIATRITDCESEYLITADEGVRGGKIIPLKKIADEALDQCPNVKKCVVVERTGNQVDWNNERDVSYKELISSVPVKCDPEEMNAEDPLFILYTSGSTGKPKGVLHTTGWYMVY

SEQ ID NO: 192589 - protein, 286 aa, Unknown
  Bacterial polypetide isolated from the Sargasso Sea
PEEMNAEDPLFILYTSGSTGKPKGVLHTTGGYMVYASMTHQYIFDYKPKDVYFCSADIGWVTGHSYIIYGPLSNGATTLMFEGIPTYPDSSRWWKIIDKYKVNIFYTAPTAIRALMREGDGPVKKTSRKSLKLLGTVGEPINPEAWMWYYNVVGDKKCPIVDTWWQTETGGILISPQPGAINLKPGSATKPFYGIKPAIVDESGKILKGACKGRLCMLQSWPGQMRTVYGDHQRFIDTYFSQFDGKYFTGDGCRRDKDGYYWITGRVDDVIIVSGHNLGTAEMKVH

SEQ ID NO: 192590 - protein, 213 aa, Unknown
  Bacterial polypetide isolated from the Sargasso Sea
LSFKPFFGIEPCIVDKEGKELEGECEGMLCMKRSWPGQMRTVYGDHKRFIDTYFSQFDGKYFTGDGCKRDKDGYYWITGRVDDVIIVSGHNLGTAEIESAFVSHEDVSEAAVVAYPHEVKGNGLYCYVSLKVGVPSSDQLILDLKKTIREKIGPIATPDFIHITDGLPKTRSGKIMRRILRKIASNDFENLGDTSTLADPSVVDNLIENRKNK

SEQ ID NO: 192591 - protein, 282 aa, Unknown
  Bacterial polypetide isolated from the Sargasso Sea
MVYASMTHQYIFNYKPNDIYFCTADIGWITGHSYIIYGPLSNAATTVMFEGIPSYPDRSRWWQIVDKYKVNIFYTAPTAIRDLMREGDKPVKKTSRKTLKLLGTVGEPINPEAWQWYYKTVGDSRCPIVDTWWQTETGGILISPQTGAINLKPGSATKPFYGIKPVIVDKKGKVLKGEAQGRLCIAQSWPGQMRTVYGDHKRFIDTYFSQFDGKYFTGDGCRRDKDGYYWITGRVDDVIIVSGHNLGTAEIESAFVAHPKVAEAAVVGYPHDIKGNGLYCYV

SEQ ID NO: 192592 - protein, 240 aa, Unknown
  Bacterial polypetide isolated from the Sargasso Sea
MNKVDASNFVLEPTTQYDFSIMHYTSGSTGKPKGVLHRHQAVVQQWLTGKWALDLKEGDIYFCTADPGWVTGTSYGMMAPWTNCVTQIIYEGGFGAASWYEIIQKYGVTVWYTAPTAIRLLMRAGEAVVQRYDLSSLRFIGSVGEPLNPEAVVWGNKNYKMPIHDNWWQTETGAIMCANYATTNIRPGSMGKPFPGITMGILDDQYNELGSGESGILAVRPGWPSQMFAYWQQDEMYNSR

SEQ ID NO: 192593 - protein, 302 aa, Unknown
  Bacterial polypetide isolated from the Sargasso Sea
TDSIKNNNSFWKKEGKRITWIKPYKKIKDVKYSKDEVKIKWFEDGTLNASANCIDRHLKDKRDKTAIIWVGDDPKDTQKISYKQLHQKVSKAANGLKKLGIQKGDRVTIYLTMIPELAILMLACARIGAVHSIIFGGFSAESISGRVNDCKSEYIITADEGVRGGKTIPLKATTDEALSNCPDVKKCIVVKRTGNYVYWDQDRDVWYHDLIKDVSTTCEPEEMNAEDPLFILYTSGSTGKPKGVLHTTGGYMVYASMTHQYIFNYKPNDIYWCTADIGWVTGHSYIIYGPLANGATTIMFEG

SEQ ID NO: 192594 - protein, 188 aa, Unknown
  Bacterial polypetide isolated from the Sargasso Sea
QGRLCIAQSGQGQMRSVYGDHNRFIETYFSQFDGKYFTGDGCRRDKDGYYWITGRVDDVIIVSGHNLGTAEIESAFVAHQKVAEAAVVGYPHDIKGNGLYCYVTLNVGEEPNGDLERELKLWVRKQIGPIATPDFIQFSPGLPKTRSGKIMRRILRKIAANEHEQLGDTTTLADPGVVKSLVDNRKNV

SEQ ID NO: 192595 - protein, 309 aa, Unknown
  Bacterial polypetide isolated from the Sargasso Sea
NGLKNLGVQRGDRVTIYLTMIPELAYTMLACARIGAVHSIIFGGFSPDSISGRINDCESDYVITADEGVRGGKKIPLKSITDEALQSCPNVKKCIVVKRTGTKKIDWYNDRDVWYHKMTGKVSAKCEPEEMNAEDPLFILYTSGSTGKPKGVLHTTGGYMVYASMTHQYIFNYKPKDIYWCTADIGWVTGHSYIIYGPLANGATTIMFEGIPTYPDTSRWWQIVDKYKVNIFYTAPTAIRALMREGDKPVKKTSRKTLKLLGTVGEPINPEAWEWYYKTVGDSRCPIVDTWWQTETGGILISPQTGAID

SEQ ID NO: 192596 - protein, 278 aa, Unknown
  Bacterial polypetide isolated from the Sargasso Sea
MPVALKSSMKNIFDCKPGEVFFCASDIGWVVGHSYLVYAPLLNGNTTILFEGLPTMPDPGIWWSIVEDYGVSTMFTSPTAIRVLKKESERFLKKYKTNSLRKFFLAGEPLDKPTADWVATNLKTTEIIDNYWQTETGWPIISAQQPIQEIKLKRGSPSFAVFGYDIELLNEDLTVNSKPETKGILSIRAPLPPGCLQTIWGNDKRFIETYFTKIKGEFFYSTFDYAKFDQDGFFFILGRTDDVINVSGHRLGTREIEEAIQQHDDVAEVAVVGVFDNL

SEQ ID NO: 192597 - protein, 210 aa, Unknown
  Bacterial polypetide isolated from the Sargasso Sea
KPFFGIQPEIMDAEGNILEGACEGSLCLADSWPGQMRTVYGDHKRFIETYFSQFDGKYFTGDGCKRDEDGYYWITGRVDDVINVSGHRMGTAEVESALVAHPKVSEAAVVGYPHDIKGQGIYAYVTLNAGEETSDELYKELVAWVRKEIGPIASPDLIQWAPGLPKTRSGKIMRRILRKIAENEYSNLGDTSTLAEPAVVDDLIDNRMNK

SEQ ID NO: 192598 - protein, 247 aa, Unknown
  Bacterial polypetide isolated from the Sargasso Sea
PGNSKCPIVDTWWQTETGGILISPQTGAIKLKPGSASKPFYGIEPCIVDKDGNELEGECEGMLCMKRSWPGQMRTVYGDHKRFIDTYFSQFDGKYFTGDGCKRDKDGYYWITGRVDDVIIVSGHNLGTAEIESAFVSHKNVSEAAVVGYPHDVKGNGLYCYVSLKVGVDPSEDLVLDLKKTIREKIGPIATPDFIHITASLPKTRSGKIMRRILRKIASNDFENLGDTSTLADPSVVDNLIENRKNK

SEQ ID NO: 192599 - protein, 316 aa, Unknown
  Bacterial polypetide isolated from the Sargasso Sea
MAKKSKKKRKRIIRKKRLRKKSIKTSRKRYLSKKNRLQTKTNKSGEKVYKVKSEWLKKALVSKNIYEKKYSQSLKDNDGFWRKEGKRIAWIKPYTKIKDVKYSSSDVNIKWFYDGTLNASSNCIDRHLKNNKDKTAIMWVGDDPKVQKKITYKQLHNEVCKIANGLKEIGVQKGDRVTIYLTMIPELAYTMLACARIGAIHSIIFGGFSPDSIAGRINDCESDYVVTADEGIRGGKQIPLKSITDEALMSCPNVKKCVVVKRTGADISWNDSRDVWYHDITKNVTSYCEPEEMNAEDPLFILYTSGSTGKPKGVLH

SEQ ID NO: 192600 - protein, 325 aa, Unknown
  Bacterial polypetide isolated from the Sargasso Sea
SGRVNDCESEYIITADEGVRGGKTIPLKYTTDEALTNCPNVKKCIIVKRTGNYINWNNERDVWYHDLIKDVPSHCEPEEMNAEDPLFILYTSGSTGKPKGVLHTTGGYMVYASMTHQYIFNYKPKDIYWCTADIGWVTGHSYIIYGPLANGATTLMFEGIPNYPDTSRWWQIVDKYKVNIFYTAPTAIRALMREGDKPVKKTSRKSLKLLGTVGEPINPEAWMWYYKTVGNSKSPIVDTWWQTETGGILIAPQTGAIPLKPGSATKPFYGIKPVIVDKNGEEIKGAGEGRLCICSSWPGQMRTVYGDHQRFIDTYFSQFHGKYFT

SEQ ID NO: 192601 - protein, 225 aa, Unknown
  Bacterial polypetide isolated from the Sargasso Sea
MTEKLIESILNESRSFAPSKKFIKQANINNEEAERLREEASHNHIEYWAKLARAHLHWFLPFNNILDESNAPNYEWFNDGEINASFNSLDINANKNPEKTAIIFETEDGNSERITYKDLLLRTSQFANGLKKLGVVPMDRVVIYMPMCPEAVIAMQACARIGAIHSVVFGGFSSNALKDRIEDAQSKIVITADGAYRGGSVIPLKQATDEAVTNSLHKVKNVVVF

SEQ ID NO: 192602 - protein, 208 aa, Unknown
  Bacterial polypetide isolated from the Sargasso Sea
MKERGNKVAIIWEADTPNESKKITYNDLHSEVCKFANGLKSLGVKKGDRVTIYLPMIPEAAYAMLACARIGAIHSVVFGGFAPDSLRDRIVDCGSSTVITANEGLRGGKTIPLLSNVRSATTDLDIIENVLIVNRTNKEINYHEKEVSYEDLVSNQSNKCEITEQFSEDPLFILYTSGSTGKPKGVLHTSAGYLLHASISHKTIFDLK

SEQ ID NO: 192603 - protein, 217 aa, Unknown
  Bacterial polypetide isolated from the Sargasso Sea
MSDQSYFPVPNDIAKSAHVDNDGYLEMYKRSVEDAEGFWAEHGKRIEWTKPYTQVKDVTYDSDNVEIKWFYDGKLNVAHNCIDRHLEERADQVAIIWEGDDPSEDAQITYRDLHQHVCKFANVLKTQGIKKGDRVTIYMPMIPEAAYAMLACARIGAIHSVVFGGFSPDALAGRVEDCDSSVIITADEAYAGEELCPLRQIRTPPPNCAVTSKLSSS

SEQ ID NO: 192604 - protein, 255 aa, Unknown
  Bacterial polypetide isolated from the Sargasso Sea
YDGTLNASANCIDRHLKKNKDKVAIIWVGDDPKVQKKITYKQLHYEVSKTANALKGIGVKKGDRVTIYLTMIPELAYTMLACARIGAVHSIIFGGFSSDSIAGRINDCKSDFVITADEGVRGGKNIPLKSITDEALIHCPNVKKCVVIKRTGNYINWDNDRDVWYHEITKNASPHCEVEEMNAEDPLFILYTSGSTGKPKGVLHTTGGYMVYASMTHQYIFNYKAKDVYFCTADIGWITGHSYIIYGPLSNCATT

SEQ ID NO: 192605 - protein, 152 aa, Unknown
  Bacterial polypetide isolated from the Sargasso Sea
MSDKFNKIYNHSIKNPEKFWRDAAEDIFWFKKPTKILNKSNPPFYKWYEDGVTNTCYNALDIHIDQGRGKKTALIYDSPITDNKGKLTYAELRSKVAKFAGALKAQEVKKGDRVIIYMPMIPEAVIAMLGCARIGAIHSVVFGGFASTELAS

SEQ ID NO: 192606 - protein, 186 aa, Unknown
  Bacterial polypetide isolated from the Sargasso Sea
MSDNEKFNVSADWSANAQINQDKYNEWYETSFNNNEDFWNEHGKRMEWMKPYTKVKNVSFNKDNFSIKWYEDGALNASANCIDRHLKDKGDQTAIIWEGDDPKDSKHITYNELHKEVSKLSNGMKSLGVKKGDRVTIYMPMIPEAAYAMLACTRIGAIHSVVFGGFSPDSLAGRISDCKSRYCDNG

SEQ ID NO: 192607 - protein, 297 aa, Unknown
  Bacterial polypetide isolated from the Sargasso Sea
MNNERDVWYHDLIKDVSSHCDPEEMSAEDPLFILYTSGSTGKPKGVLHTTGGYMVYASMTHQYIFNYKPKDIYWCTADIGWVTGHSYIIYGPLSNGATTIMFEGVPNYPDSSRWWQIVDKYKVNTFYTAPTAIRALMREGDGPVNKTSRRSLKLLGTVGEPINPEAWMWYYKTVGNSKCPIVDTWWQTETGGILIAPQTGAIPLKPGSATKPFYGIKPSIVDKDGKEIKGAGEGRLCISQSWPGQMRTVYGDHQRFIDTYFSQFDGKYFTGDGCRRDKDGYYWITGRVDDVIIVSGH

SEQ ID NO: 192608 - protein, 172 aa, Unknown
  Bacterial polypetide isolated from the Sargasso Sea
MKKEVSYKTPQNIIDNANINEVDFNELYKESLENPDKFWGEQGEKYLDWYQKWTKVQESDFSKGKFSWFLGGKLNASYNCIDRHLPEKGNNIALIWEGDDPKDSKKITYKELHREVCIFSNVLKSRGIKKGDRVCIYMPMIPEATYAMLACARIGAIHSVVFGGFSPEFSQR

SEQ ID NO: 192609 - protein, 244 aa, Unknown
  Bacterial polypetide isolated from the Sargasso Sea
KYKVNIFYTAPTAIRALMREGDKPVKKTSRKSLKLLGTVGEPINPEAWMWYYRTVGDSRCPIVDTWWQTETGGILISPQPGAIDLKPGSATKPFYGIKPVLVDKDGKVVKGEGKGRLCMTQSWPGQMRTVYGDHQRFIDTYFSQFDGKYFSGDGCRRDKDGYYWITGRVDDVIIVSGHNLGTAEIESAFVAHPKVAEAAVVGFPHSIKGNGLYCYVTLNVGEQPTGDLERDLKLWVRKQIGPIA

SEQ ID NO: 192610 - protein, 300 aa, Unknown
  Bacterial polypetide isolated from the Sargasso Sea
YKWYPDGSLNTCFNAIDRHVLNGRGEQDAILYDSPVTNTKKKITYSELKHQVSIFAGALKKLGILKGDRVIIYMPMIPEALVAMLACTRLGAVHSVVFGGFASNELAVRIDDCKPKIIVSASCGHEPNRIVEYKPLLDNAVKIASHQVEKCIIYQREALNVKLIPGQDIDWNEVVKDVLLADPVEVRANDPLYILYTSGTTGKPKGVVRDNGGHAISLKWSMKNIYNVEPGDVYWAASDIGWVVGHSYIVYAPLLHGCTTILFEGKPVGTPDAGTFWRIISEYKVKVLFTAPTALRAVKR

SEQ ID NO: 192611 - protein, 157 aa, Unknown
  Bacterial polypetide isolated from the Sargasso Sea
VTGHTYITYGPLACGGTQVVFEGVPTYPDAGRFWKMIGDHKVTVFYTAPTAIRSLIKAAEADDKVHPKSYDLSSLRIIGTVGEPINPEAWMWYHKHVGQERCPIVDTWWQTETGGHMITPLPGATPTVPGSCTLPLPGIMAAVVDETGQDVPNGQGG

SEQ ID NO: 192612 - protein, 94 aa, Unknown
  Bacterial polypetide isolated from the Sargasso Sea
EKVSKFAGALKNQGINKGDRVIIYMPMIPEAVIGMLACARIGAIHSVVFGGFASNELPSRIDDSKAKVLLTASCGFEPGRTVQYKPLVDEAIKL

SEQ ID NO: 192613 - protein, 188 aa, Unknown
  Bacterial polypetide isolated from the Sargasso Sea
MQKKFQDIYENSIKNPEKFWQEASEDIFWFKKPVKILNKSNPPFYKWFEDGVTNTCYNALDTHIDQGRSKKTALIYDSPITGNKSQFTYEELRSKVSKFAGALKAQGANKGDRVIIYMPMIPEAVVAMLACARIGAIHSVVFGGFASNELASRIDDSKAKILVTASCGFEPGRTVEYKPLVDEAIKIA

SEQ ID NO: 192614 - protein, 190 aa, Unknown
  Bacterial polypetide isolated from the Sargasso Sea
AGEGRLCISQSWPGQMRSVYGDHQRFIDTYFSQFNGKYFTGDGCRRDKDGYYWITGRVDDVIIVSGHNLGTAEIESAFVAHPKVAEAAVVGYPHDLKGNALYVYVTLNLGEKENGDLERELKNHVARTLGPIYRPDIIHFTPGLPKTRSGKIMRRILRKIAANEHGQLGDTTTLADPTVVESLVDNRKNI

SEQ ID NO: 192615 - protein, 337 aa, Unknown
  Bacterial polypetide isolated from the Sargasso Sea
ILMLACARIGAVHSIIFGVFSAESISGRVNDCESEYIITADEGVRGGKTIPLKATTDEALTNCPNVKKCIVVKRTGNYVFWNNDRDIWYHDLIKDVSNHCEPEEMNAEDPLFILYTSGSTGKPKGVLHTTGGYMVYASMTHQYIFNYKPKDIYWCTADIGWVTGHSYIIYGPLSNGATTIMFEGVPNYPDTSRWWQIVDKFKVNTFYTAPTAIRALMREGDSPVNKTSRKSLKLLGTVGEPINPEAWMWYFKTVGNSKCPIVDTWWQTETGGILIAPQTGAIPLKPGSATKPFYGIKPVLVDKDGKEIKGAGEGRLCIAQSWPGQMRTVYGDHKKIY

SEQ ID NO: 192616 - protein, 291 aa, Unknown
  Bacterial polypetide isolated from the Sargasso Sea
IDRHLKDKKDKTAIIWVGDDPKDSQKITYKQLHQKVSKAANGLKKLGIKKGDRVTIYLTMIPELAILMLACVRIGAVHSIIFGGFSAESISGRVNDCESEYIITADEGVRGGKTIPLKYTTDEALTSCPNVKKCIVVKRTGNYINWNEERDVWYHDLIKDVSGHCEPEEMNAEDPLFILYTSGSTGKPKGVLHTTGGYMVYASMTHQYIFNYKPKDIYWCTADIGWVTGHSYIVYGPLANGATTIMFEGIPNYPDTSRWWQIVDKYKVNIFYTAPTAIRALMREGDKPVKK

SEQ ID NO: 192617 - protein, 254 aa, Unknown
  Bacterial polypetide isolated from the Sargasso Sea
MTNSFNKIYNESIQNPEEFWRNVSDDIFWFKKPNKILNKSNPPFYKWFEDGVTNTCYNAIDVHIDNGNGNKTALIYESPITHSKAKFTYNELREKISKFAGALNNQGVKKGDRVIIYMPMIPEAVIAMLACGRIGAIHSVVFGGFASNELASRIDDSKAKILITASCGFEPGRTVEYRPLVDGALKIAKHKVERVIFFQRKDHEVKLNSPIEMSWEEALVNAKNKDCVGVGANEFANILYTSGTTGIPKGIVRD

SEQ ID NO: 192618 - protein, 303 aa, Unknown
  Bacterial polypetide isolated from the Sargasso Sea
ENIRVSIFYTAPTAIRAFMKSGREIPDKYNLKSLRLLGTVGEPINPEAWMWYKDVIGKNKCPIVDTWWQTETGGVMIGPLPGVVATKPGSATYPLPGIEVEVVDKNGDKVMENEGGYLIIKKPWPGMMRTIHGNPQRYLDSYWEYISFKGEKNVYFAGDGARIDEDGYIWIMGRVDDVINVSGHRLGTMEIESALVSHKSVAEAAVVGRKDDLKGEVIVAFVSLEKDINISTELEDELKKHVVNEIGIIAKPEKIIISDSLPKTRSGKIMRRILRSLASGEKISGDLSTLEDSSVLEKLKEKS

SEQ ID NO: 192619 - protein, 252 aa, Unknown
  Bacterial polypetide isolated from the Sargasso Sea
PDSIAGRINDCKSDYVITADEGIRGGKTIPLKSITDEALVNCPNVKKCIVVKRTGNRINWDETRDVWYHEITKKASSYCEPEEMNAEDPLFILYTSGSTGKPKGVLHTTGGYMVYASMTHQYIFNYKPKDIYWCTADIGWITGHSYIIYGPLSNGATTIMFEGIPTYPDTSRWWQIVDKYKVNIFYTAPTAIRALMREGAAPVKRTSRKSLKLLGTVGEPINPEAWQWYFKTVGDSKCPIVDTWWQTETGGI

SEQ ID NO: 192620 - protein, 187 aa, Unknown
  Bacterial polypetide isolated from the Sargasso Sea
GRLCIAQSWPGQMRTVYGDHQRFIETYFSQFDGKYFTGDGCRRDKDGYYWITGRVDDVIIVSGHNLGTAEIESAFVAHPKVAEAAVVGYPHDIKGNGLYCYVTLNAGEKTSLDLERDLKLWVRKQIGPIATPDLIQFSPGLPKTRSGKIMRRILRKIATNEHDKLGDTTTLADPSVVKSLVNNRKNI

SEQ ID NO: 192621 - protein, 131 aa, Unknown
  Bacterial polypetide isolated from the Sargasso Sea
GRNDDVINVSGHRLGSAEIESALVESPHVAEAAVVAVPDAIKGEAIFAFVVERSQNPLRHNFESDLRKVVAQVISPIAKPQTIVRVPELPKTRSGKIMRRLLKSLIEGKEAQETSTLSNPKSLEAIKEVLL

SEQ ID NO: 192622 - protein, 176 aa, Unknown
  Bacterial polypetide isolated from the Sargasso Sea
APTFPDVGRFWDICEKHAVTIFYTAPTAIRALMKHGDEIPQSYDLSSLRLLGTVGEPINPEAWMWYHRIIGQERCPIVDTWWQTETGGAMISPLPGVTETKPGSCTTAMPGIDVDILDELGEPVGEANQGGYLVIKKPWPSMLRTIWGDNQRYIDTYWEKFDGRYYVAGDSAYRDE

SEQ ID NO: 192623 - protein, 250 aa, Unknown
  Bacterial polypetide isolated from the Sargasso Sea
MLFGKNKCPIVDTWWQTETGGVMISPLPGVVATKPGSATFPLPGIEVEIVDKNGDKVKENEGGYLIIKKPWPGMMRTIHGNSERYLESYWEYISFKGEKNVYFAGDGARIDEDGYIWIMGRVDDVISVSGHRLGTMEIESALVSHKSVAESAVVGKKDDLKGEVIVAFVSLEKDVNSSSELVEDLKKHVVNEIGIIAKPEKIIISDSLPKTRSGKIMRRILRSLASGEKISGDISTLEDSSVLEKLKELS

SEQ ID NO: 192624 - protein, 300 aa, Unknown
  Bacterial polypetide isolated from the Sargasso Sea
DPLFILYTSGSTGKPKGVLHTTGGYMVYASMTHQYIFNYKPKDIYWCTADIGWVTGHSYIIYGPLANGATTIMFEGIPTYPDNSRWWQIVDKYKVNIFYTAPTAIRALMRDGNEPVKKTSRKSLKLLGTVGEPINPEAWMWYFKTVGNSNCPIVDTWWQTETGGILISPQTGAINLKPGSATKPFYGIKPSIVNKDGKEIKGAGEGRLCISQSWPGQMRSVYGDHQRFIDTYFSQFNGKYFTGDGAKRDKDGYYWITGRVDDVIIVSGHNLGTAEIESAFVAHEKVAEAAVVGYPHDIKG

SEQ ID NO: 192625 - protein, 186 aa, Unknown
  Bacterial polypetide isolated from the Sargasso Sea
MLCIKNSWPGQMRTVYGDHSRFVSTYFSQFDGKYFTGDGCRIDKDGYYWITGRVDDVIIVSGHNLGTAEIESAFVSHPKVSEAAVVGYPHDIKGNGLYCYVSLIAGTESSEALKKELVNTIRLKIGPIATPDFIHFTNGLPKTRSGKIMRRILRKIAANEEDQLGDITTLADPSVVQTLIENKLNN

SEQ ID NO: 192626 - protein, 315 aa, Unknown
  Bacterial polypetide isolated from the Sargasso Sea
FKATTDEALSNCPDVKKCIVVKRTGNYVYWDDDRDVWYHDLIKDVPSHCEPEEMNAEDPLFILYTSGSTGKPKGVLHTTGGYMVYASMTHQYIFNYKPKDIYWCTADIGWVTGHSYIIYGPLSNGATTIMFEGVPNYPDSSRWWQIVDKFKVNTFYTAPTAIRALMREGDDPVNKTSRKSLKLLGTVGEPINPEAWMWYYKTVGNSKCPIVDTWWQTETGGILIAPQTGAIPLKPGSATKPFYGIKPCIVDKDGKEIKGAGEGRLCISQSWPGQMRTVYGDHQRFIDTYFSQFDGKYFTGDGCRRDKDGYYWITG

SEQ ID NO: 192627 - protein, 315 aa, Unknown
  Bacterial polypetide isolated from the Sargasso Sea
QKDYCEPEIMNSEDRLFILYTSGSTGKPKGVVHTTGGYNLWSHLTFKWIFDLKDDDIYWCTADVGWITGHSYIVYGPLSNGVTTLMYEGVPRPSNLGAFWEIVQKYKVSIFYTAPTAIRAFMKSGREIPDKYNLESLRLLGTVGEPINPEAWMWYKNVIGKDKCPIVDTWWQTETGGVMISPLPGVVATKPGSATFPLPGIEVEIVDKNGDKVKENEGGYLIIKKPWPGMMRTIHGNPERYLESYWEYIFFKGEKNVYFAGDGARIDEDGYIWIMGRVDDVISVSGHRLGTMEIESALVSHKSVAESAVVGKKDD

SEQ ID NO: 192628 - protein, 329 aa, Unknown
  Bacterial polypetide isolated from the Sargasso Sea
CNCIDRHLKDKKDKTAIIWVGDDPKDSQKISYKQLHQKVSKAANGLKKLGIKKGDRVTIYLTMIPELAILMLACVRIGAVHSIIFGGFSADSISGRVNDCESEYIITADEGVRGGKTIPLKYTVDEALMSCPNVKKCIVVKRTGNYINWDQNRDVWFHDLIKDVPNHCEPEEMNAEDPLFILYTSGSTGKPKGVLHTTGGYMVYASMTHQYIFNYKPKDIYWCTADIGWVTGHSYIIYGPLSNGATTIMFEGIPNYPDSSRWWQIVDKYKVNTFYTAPTAIRALMREGDRPVKKTSRKSLKLLGTVGEPIIQRLGCGTIKLWVIPNALL

SEQ ID NO: 192629 - protein, 232 aa, Unknown
  Bacterial polypetide isolated from the Sargasso Sea
DWFEPFQTVLDKENAPFFQWFKEGKLNITYNCLDRHIKRGLGGKTALIWEGEPGDSKKYTYEELLKEVCKAANALKAIGVKKGDLVCIYMPMIPEAMFAMLACARIGAPHSVVFGGFSSEALKDRLINGNARFVITADGGFRKDKVIELKKAVDAAIESGADKVVEKVVVVQRTQKNISMVDDRDFWWHELLKDQKDHCEPETMNSEDRLFILYTSGSTGKPKGVVHTTGGY

SEQ ID NO: 192630 - protein, 315 aa, Unknown
  Bacterial polypetide isolated from the Sargasso Sea
IFGGFSPDSISGRINDCESDYVITADEGVRGGKTIPLKSITDEALQSCPNVKKCIVVKRTGTKKIDWFNDRDVWYHQMTKKVSSKCEPEEMSAEDPLFILYTSGSTGKPKGVLHTTGGYMVYASMTHQYIFNYKPKDIYWCTADIGWITGHSYIIYGPLANGATTIMFEGIPTYPDTSRWWQIVDKYKVNIFYTAPTAIRALMREGDKPVKRTSRKTLKLLGTVGEPINPEAWEWYFKTVGDSKCPIVDTWWQTETGGILISPQTGAIDLKPGSATKPFYGIKPEILDKEGKVLKGEAQGRLCIAQSWPGQMRTV

SEQ ID NO: 192631 - protein, 241 aa, Unknown
  Bacterial polypetide isolated from the Sargasso Sea
MKSDRDYSYTSLMADASEDSTPEAMNAEDPLFILYTSGSTGKPKGVLHTSGGYLVWASLTHEYVFDYHDGDIYWCTADVGWVTGHSYIVYGPLANGATTVMFEGVPTYPDASRFWQVCDKHKINQFYTAPTAIRALMGQGSEFVKKCDLSSLKVLGTVGEPINPEAWNWYNEVVGKGRCPIVDTWWQTETGGHLLTPIPGAIATKPGSATFPFFSIQPVILDPQSGQELTEKECEGVLCIK

SEQ ID NO: 192632 - protein, 217 aa, Unknown
  Bacterial polypetide isolated from the Sargasso Sea
TGGILIAPQTGAIELKPGSATKPFYGIKPVIVDKNGNELTGECEGMLCIAKSWPGQMRTVYGDHERFIQTYFSQFDGKYFTGDGCKRDSNGYYWITGRVDDVIIVSGHNLGTADIESAFVSHSKVSEAAVVGFPHEIKGNGLYCYVSLNAGEKSSEDLKKELIQLVREKIGPIASPDLIHFTSGLPKTRSGKIMRRILRKIAANEHDQLGDTSTLAD

SEQ ID NO: 192633 - protein, 294 aa, Unknown
  Bacterial polypetide isolated from the Sargasso Sea
CIDRHLKDKKDKTAIIWVGDDPKDTQKISYKQLHQKVSKAANGLKKLGIQKGDRVTIYLTMIPELAILMLACARIGAIHSIIFGGFSAESISGRVNDCKSEYIITADEGVRGGKTIPLKATTDEALTNCPDVKKCIVVKRTGNYVFWNSDRDVWYHDLIKDVPNHCEPEEMNAEDPLFILYTSGSTGKPKGVLHTTGGYMVYASMTHQYIFNYKPKDIYWCTADIGWVTGHSYIIYGPLSNGATTIMFEGIPTYPDRSRWWQIVDKFKVNTFYTAPTAIRDLMRHGSEPVNKTS

SEQ ID NO: 192634 - protein, 239 aa, Unknown
  Bacterial polypetide isolated from the Sargasso Sea
MILGWQTETGGILISPQTGAIDLKPGSATKPFYGIKPEILDKDGKVLKGEAQGRLCISQSWPGQMRSVYGDHQRFIDTYFSQFDGKYFTGDGCRRDKDGYYWITGRVDDVIIVSGHNLGTAEIESAFVAHPKVAEAAVVGYPHDIKGNGLYCYVTLNAGEKSTLDLERDLKLWVRKQIGPIATPDLIQFAPGLPKTRSGKIMRRILRKIAANEHGQLGDTTTLADPSVVESLVDNRKNI

SEQ ID NO: 192635 - protein, 318 aa, Unknown
  Bacterial polypetide isolated from the Sargasso Sea
LACARIGAIHSIIFGGFSPDSIATRINDCESDYLITADEGVRGGKIIPLKQIADEALLQCPNVKKCVVVKRTGNQVNWDHERDVSYEELISNVSGKCEPEEMNAEDPLFILYTSGSTGKPKGVLHTTGGYMVYASMTHQYIFDYKPKDIYFCSADIGWVTGHSYIIYGPLSNAATTIMFEGIPTYPDYSRWWQIIDKYKVNIFYTAPTAIRALMKEGDGPVKKTSRKSLKLLGTVGEPINPEAWMWYYQTVGESRCPIVDTWWQTETGGILISPQPGAMDLKPGSATKPFYGIKPAIVDETGKILKGACKGRLCMTAS

SEQ ID NO: 192636 - protein, 175 aa, Unknown
  Bacterial polypetide isolated from the Sargasso Sea
IRTVYKDHERFMDTYFSTFRGHYFTSDGCRRDKDGYYWITGRVDDVLNVSGHRMGTAEVESALVAHPDVAEAAVVGYTHNIKGQGIYCYVTLNAGIEGTDEKKAEMVKQVRAEIGPVATPDLIQWAPGLPKTRSGKIMRRILRKIAENDYSNLGDTSTLAEPAVVDDLIENRQNK

SEQ ID NO: 192637 - protein, 192 aa, Unknown
  Bacterial polypetide isolated from the Sargasso Sea
ENNVEGNLCIKFPWPSILRTTYGDHKRCKETYFSTYSNMYFTGDGAKRDHDGYLRILGRVDDVINVSGHRMGTAEVENAINENSKVIESAVVGFPHEIKGQGIYAFAICQKNDNDTVQTLEEEIKLTVRSIIGPIATPERVQIVSGLPKTRSGKIMRRILRKVASKDVSDLGDISTLLNPKVVEDIIKGAGL

SEQ ID NO: 192638 - protein, 175 aa, Unknown
  Bacterial polypetide isolated from the Sargasso Sea
MTVKFNKIYQESIQNPEKFWQNVSEDIFWFKKPKKILNKSKPPFYKWFEDGVTNTCYNAIDTHIDHGKGERTALIYDSPITNNKSKFTYNELRNRVSKFAGALDNQGIKKGDRVIIYMPMIPEAVIAMLACGRIGAIHSVVFGGFASNELASRIDDSKAKILITASCGFEPGRTV

SEQ ID NO: 192639 - protein, 187 aa, Unknown
  Bacterial polypetide isolated from the Sargasso Sea
ERLCIAQSCPGQMRTVYGDHQRFIDTYFSQFNGKYFTGDGCRRDKDGYYWITGRVDDVIIVSGHNLGTAEIESAFVAHPKVAEAAVVGYPHDIKGNGLYCYVTLNVGETETGELERDLKLWVRKQIGPLATPDLIHFTPGLPKTRSGKIMRRILRKIAANEHGQLGDTTTLADPSVVDSLVDNRKNI

SEQ ID NO: 192640 - protein, 311 aa, Unknown
  Bacterial polypetide isolated from the Sargasso Sea
MRDQVALCAGGLIELGVVRGDRVIIYMPMIPETIIAMLACARIGAIHGVVFGGFASAELAVRIDDARPKAIISASCGIEVNRVIPYMPLLNDAIEIANHKPSNVIVVQRSELESTLNKGRDLDWNDVLDNATPAECVPLKSTDPLYILYTSGTTGLPKGVVRDNGGHAVALNYSMKAIYNVDAGDVYWAASDVGWVVGHSYIVYGPLLRGCTTVLYEGKPVGTPDAGAFWRIISDHKVKSFFTAPTAFRAIKKEDPDAGFIKKYDLSHFELLFLAGERTDPDTLEWAQEKLQRPVIDHWWQTETGWSIAAN

SEQ ID NO: 192641 - protein, 251 aa, Unknown
  Bacterial polypetide isolated from the Sargasso Sea
PESMNAEDPLFILYTSGSTGKPKGVMHTTGGYLVYTSFTHEKIFDYKPGDIYWCTADIGWITGHSYIVYGPLANRAVSIMFEGVPNYPDYGRFWDVVDKHKVKQFYTAPTALRALMKEGNDHVTSRDLSTLRLLGTVGEPIKEPEWMWYHNIVGKGKCPIVDTWWQTETGGILIAPLPGATPTKPGSATNPFFGIEPVLLTEDGKEIEGNNVQGLLAIKHSWPGQMRTVYGDHQRFIDTYFSQVPGYYFTG

SEQ ID NO: 192642 - protein, 114 aa, Unknown
  Bacterial polypetide isolated from the Sargasso Sea
AFVAHPKVAEAAVVGYPHDIKGNGLYCYVTLNSGEKSSGDLERDLKLWVRKQIGPIATPDLIQFAPGLPKTRSGKIMRRILRKIAANEHDQLGDTTTLADPSVVESLVENRKNK

SEQ ID NO: 192643 - protein, 316 aa, Unknown
  Bacterial polypetide isolated from the Sargasso Sea
KGIKKQITMKTSFDEIYQNSIQKPEEFWENISNDIFWFKKPSKILNKSNPPFYKWFEDGITNSCYNAVDLHIDSGKGEKIALIYDSPITGNKAKLTYNQLKEKVSKFAGALDNQGIKKGDRVIIYMPMIPEAVIAMLACGRIGAIHSVVFGGFASNELASRIDDSKAKILITASCGFEPGRTVEYRPLVDGALKLAKHKVEKVIFFQRKDHDVKLNEPLEISWKEALVNAKDKDCVEMGSNEFAYILYTSGTTGIPKGIVRDIGGHIVALKWTMKNIYNIDEDDVWWSASDIGWIVGHSYIVYAPLFKGCTTVLLK

SEQ ID NO: 192644 - protein, 225 aa, Unknown
  Bacterial polypetide isolated from the Sargasso Sea
SPQTGAIDLKPGSATKPFYGIKPEIVDKDGTVLKGEAQGRLCIAQSWPGQMRTVYGDHNRFIETYFSQFDGKYFTGDGCRRDKDGYYWITGRVDDVIIVSGHNLGTAEIESAFVAHPKVAEAAVVGYPHDIKGNGLYCYVTLNAGEKHDGELERELKLWVRKQIGPIATPDYIQFSPGLPKTRSGKIMRRILRKIAANEHDQLGDTTTLADPSVVKSLVENRKNT

SEQ ID NO: 192645 - protein, 296 aa, Unknown
  Bacterial polypetide isolated from the Sargasso Sea
MIAQSQISKKKITYKELQDKVSIFAGALSKQGIKKGDRVIIYMPMIPEAVIAMLGCARIGAIHSVVFGGFAANELASRIDDSKAKIILSASCGYEPGKTIEYKPLLKKAIELAKHKPEKCIIYQRKDFKTNLEKNEIDWNDAIKDVKPVECVEMNANDYAYILYTSGTTGVPKGIVRDIGGHIVALKWTMKNIYNIDPDDVWWSASDIGWIVGHSYIVYAPLFHGCTTVLFEGKPVGTPDAGVFWRIISEHKVKSLFTAPTAFRAIKKEDPNGTFFKKYDLSKFESLFLAGERADP

SEQ ID NO: 192646 - protein, 198 aa, Unknown
  Bacterial polypetide isolated from the Sargasso Sea
WYYDGTLNASANCIDRHLKKNPSKTAIIWVGDDPADTKKISYKELHQNVCKAANGLKSLGIQKGDRVTIYLTMIPELAYTMLACARIGAVHSIIFGGFSPDSIATRITDCESEYLITADEGVRGGKIIPLKKIADEALDQCPGVKKCVVVERTGNQVDWNNERDVSYKELISSVPSKCDPEEMNAEDPLFILYTSGST

SEQ ID NO: 192647 - protein, 209 aa, Unknown
  Bacterial polypetide isolated from the Sargasso Sea
YRGGSVIPLTLSTDEAVTNSLHKVKNVVVFERTGEKIEFDQERDVWWTDLISDCPSDCDPEPLNAEHPLFILYTSGSTGKPKGIQHSTAGYILHAKTTFSWVFDINEDDVFWCTADVGWITGHTYVAYGPLLAGATILIYEGAPTFPDVGRFWKICEKHAVTIFYTAPTAIRALMKHGDEIPKSYNLSQLRLLGTVGEPINPEAWMWYH

SEQ ID NO: 192648 - protein, 302 aa, Unknown
  Bacterial polypetide isolated from the Sargasso Sea
PVPCCLIYQRPQLQAELVPGRDLDWQQQLSQASPAACVPVAATDPLYILYTSGTTGKPKGVVRDNGGHAVALHYSMQAIYDMNPGDVFFAASDVGWVVGHSYIVYGPLFAGCTTVLYEGKPVFTPDASAFWRICAQYQVKVLFAAPTAFRAIRKEDPEALLQTYDLSKLKYIFMAGERLDPATYHWVREKIAKPVIDHWWQTETGWPISANLAGVELLPAKAGSATVPVPGFVLDILADNGQVLPAGQQGFIGLKLPLPPGCLSTIWGNDERFVDGYLTTFDGYYASGDGGYLDEDGYLFVM

SEQ ID NO: 192649 - protein, 266 aa, Unknown
  Bacterial polypetide isolated from the Sargasso Sea
MADPQIESVLQEERVFAPPQSLSADAAIGSLEAYQALVAQAEADPDAFWGQQAKESLHWFQPFDQVLDWSNPPFARWFEGGTTNLSYNCLDRHLNGPKADKTALIWEGEPGDVRRFSYRELHGEVCRAANALKALGIGKGDLVALYMPMVPEAAIAMLACARIGAPHSVVFGGFSADALRDRLIDGEAKAVITADGGFRKDKPVSLKPAVDEALAGGVVPSVQAVLVVQRTKEAVTMEPGRDHWWHDRVPQQSSDCPAEPMASEDR

SEQ ID NO: 192650 - protein, 271 aa, Unknown
  Bacterial polypetide isolated from the Sargasso Sea
SIKNREEFWKKVSEDIFWYKKPSKILNSENPPFYKWFEDGVTNTCYNALDHHIEQGRGEKLAVIYDSPITGVKQKITYKELRDKVAMFSGALRKQGVNKGDRVIIYMPMIPEAVIAMLACGRIGAVHSVVFGGFAANELASRIDDSKAKLIVSASCGYEPGRTVHYKPLVNKALELASHKPSKCIIFQREKDKAELNSAIDITWEDAHKDVQPAECEKMNANDYAYILYTSGTTGLPKGIVRDIGGHIVALKWTMKNIYNIDQDDVWWSAK

SEQ ID NO: 192651 - protein, 305 aa, Unknown
  Bacterial polypetide isolated from the Sargasso Sea
ISSCDCVEHVFMYRHTNADVDFNGPLDVDLGKAMETEDSVCEAEIMESEEPLFILYTSGSTGKPKGLQHSSAGYLLYTMLTHKYVFDYQEDDVYACVADIGWITGHSYVVYGPLANGATTVMFESIPTYPDAGRYWDMVERLKITQFYTAPTAIRAIARMGDSFVEKYDRSSLRVLGSVGEPINPESWNWYYSVVGNNHCNIVDTWWQTETGGVMITPLPGATPTKPGSATFPFFGVEPVILDDKGNELEGNGISGLLAINKPWPSIARTIYGDHERYMQTYLSPFKGYYFTGDGCRRDEDGYYW

SEQ ID NO: 192652 - protein, 224 aa, Unknown
  Bacterial polypetide isolated from the Sargasso Sea
SLPGAIAQKPGSATKPFFGIQPEILDAEGNILEGACEGSLCLADSWPGQMRTVYGDHQRFIETYFSQFEGKYFTGDGCKRDEDGYYWITGRVDDVINVSGHRMGTAEVESALVAHPKVSEAAVVGYPHDIKGQGIYAYVTLNAGEQTSDELYKELVAWVRKEIGPIASPDLIQWAPGLPKTRSGKIMRRILRKIAENDYSNLGDTSTLAEPAVVDDLVENRMNK

SEQ ID NO: 192653 - protein, 288 aa, Unknown
  Bacterial polypetide isolated from the Sargasso Sea
YNALDIHIDQGRGKKTALIYDSPITGNKSQFTYEQLRSKVSNFAGALKDQGVIKGDRVIIYMPMIPEAVIAMLACARIGAIHSVVFGGFASNELASRIDDSKAKILVTASCGFEPGRTVEYKPLVDEAVKLADHKIEKMILFQRSGHEVKLNGPLEISWEEAISNAKDADCVEMNSNEFAYILYTSGTTGTPKGIVRDIGGHIVALKWTMKNIYNIDTDDIWWSASDIGWIVGHSYIVYAPLFKGCTTVLFEGKPVGTPDAGAFWKIISDYKVKSLFTAPTAFRAIKK

SEQ ID NO: 192654 - protein, 221 aa, Unknown
  Bacterial polypetide isolated from the Sargasso Sea
MNRTYQEIYSESLKNPEEFWQKISEDVFWFKKPTKILKKDNPPFYKWFEDGVTNTCYNALDLHIDQGRGDKTALIYDSPITGNKSKFTFKDLKEKVSKFAGALDKQGVKKGDRVIIYMPMIPEAVIAMLACGRIGAIHSVVFGGFASNELASRIDDSKAKILITASCGFEPGRTVEYRPLVDGALKLANHQVQKVILFQRKDHEVELNKPLEISWDEALSG

SEQ ID NO: 192655 - protein, 319 aa, Unknown
  Bacterial polypetide isolated from the Sargasso Sea
YKWFEDGKTNTCFNALDIHVDKGKGDKTALIYDSPITGNKKKFTYKELKEKVSKFAGALKNQGINKGDRVIIYMPMIPEAVVAMLACGRIGAIHSVVFGGFASNELASRIDDSKAKLLITASCGFEPGRTVEYKPLVDEAIKLASHKLERIILFQRSGHEVKLNPPFEISWEESLSNAQNVDCVEMNSNEFAYILYTSGTTGVPKGIVRDIAGHIVALKWTMKNIYNIDSDDVWWSASDIGWIVGHSYIVYAPLFKGCTTVLFEGKPVGTPDAGVFWRVISEHKIKSLFTAPTAFRAIKKEDPEGKFFSKYDLRNFESL

SEQ ID NO: 192656 - protein, 203 aa, Unknown
  Bacterial polypetide isolated from the Sargasso Sea
MEKINSLSSYFKEYENSIENPEKFWSKVAETFKWQKPWDNLFSWDFDGPDVKWFENAKLNITENIFERLIDTHSEKTAIIWEPNDPKEKAINITYRELFDKTCQFSNALESEGIKKGDRVIIYMPMIPEAAIAILACARIGAVHSVVFAGFSSSALADRINDCEAKMVLTSDGNFRGAKNIKVKAVVDEALEKTKTVKKVIVC

SEQ ID NO: 192657 - protein, 327 aa, Unknown
  Bacterial polypetide isolated from the Sargasso Sea
IQTIAYRSCKDCECLKEIGVQKGDRVTIYLTMIPELAYTMLACARIGAIHSIIFGGFSPDSIAGRINDCKSDYVVTADEGIRGGKTIHLKSITDEALMSCPNVKKCVVVKRTGNDVSWDSSRDVWYHDITKKVSSYCEPEEMNAEDPLFILYTSGSTGKPKGVLHTTGGYLVYASMTHQYIFNYKPKDIYWCTADIGWVTGHSYIIYGPLANGATTLMFEGIPTYPDSSRWWQIIDKYKVNIFYTAPTAIRALMREGDKPVKKTSRKTLKLLGTVGEPINPEAWEWYYKTVGDSKCPIVDTWWQTETGGILISPQTGAIDLKPGFRY

SEQ ID NO: 192658 - protein, 131 aa, Unknown
  Bacterial polypetide isolated from the Sargasso Sea
DVIIVSGHNLGTAEIESAFFAHPKVAEAAVVGYPHDIKGNGLYCYVTLNAGEEHDGDLERELKLWVRKQIGPIATPDFIQFAPGLPKTRSGKIMRRILRKIAANEHEQLGDTTTLADPSVVTSLVDNRKNT

SEQ ID NO: 192659 - protein, 295 aa, Unknown
  Bacterial polypetide isolated from the Sargasso Sea
GDRVTIYLTMIPELAYTMLACARIGAVHSIIFGGFSPDSIATRINDCESDYLITADEGVRGGKIIPLKKIADEALSQCPNVKKCIVVKRTGNQVSWDDERDVSYEELIKKVSAKCDPEEMSAEDPLFILYTSGSTGKPKGVLHTSGGYLVYASMTHQYIFDYKPKDIYWCTADIGWVTGHSYIIYGPLSNGATTIMFEGVPNYPDSSRWWQIVDKYKVNIFYTAPTAIRALMREGDKPVKKTSRKSLKLLGTVGEPINPEAWMWYYKTVGDGRCPIVDTWWQTETGGILIAPQPG

SEQ ID NO: 192660 - protein, 314 aa, Unknown
  Bacterial polypetide isolated from the Sargasso Sea
RKVKKSRKKSRKVKKSRKKSRKVKKSRRVKKSRKRKVSKKRQNFKTPIQSKDSEGNTLIKVSDSWAHHAYVNESKYKKKYKLSIKENEKFWSKEGKRISWIKKYTKIKDVKYSKEEVKIKWYYDGTLNASANCIDRHLKKNPKKTAIIWVGDDPADSKKISYKELHQNVCKAANGLKSIGVQKGDRVTIYLTMIPELAYIMLACARIGAVHSIIFGGFSPDSIATRINDCESNYLITADEGVRGGKIIPLKKIADEALTQCPEVRKCVVVQRTGNQVDWDNERDISYKEMISSASNKCDPEEMNAEDPLFILYT

SEQ ID NO: 192661 - protein, 260 aa, Unknown
  Bacterial polypetide isolated from the Sargasso Sea
SCKNRKWLKRIGVQKGDRVTIYLTMIPELAYTMLACARIGAIHSIIFGGFSPDSIAGRINDCESDYVVTADEGIRGGKTIPLKSIADEALMSCANVKKCVVVKRTGADITWDDSRDVWYHDITKNVSSYCEPEEMNAEDPLFILYTSGSTGKPKGVLHTTGGYLVYASMTHQYIFNYKPKDIYWCTADIGWVTGHSYIIYGPLANGATTLMFEGIPTYPDSSRWWQIVDKYKVNIFYTAPTAIRALMREGDKPVKKTSRK

SEQ ID NO: 192662 - protein, 269 aa, Unknown
  Bacterial polypetide isolated from the Sargasso Sea
KPYTKIKDVKYSKTDVNIKWYYDGTLNASANCIDRHLRKNKDKTAIIWVGDDPKIQKKISYKQLHQEVSKTANALKDLGIKKGDRVTIYLTMIPELAYTMLACARIGAIHSIIFGGFSPDSIAGRINDCKSDYVITADEGLRGGKTIPLKSITDEALIHCPNVKKCIVVKRTGNRINWDESRDVWYNEIIKKASPVCDPEEMNAEDPLFILYTSGSTGKPKGVLHTTGGYMVYASMTHQYIFNYKPKDIYWCTADIGWITGHSYIIYGP

SEQ ID NO: 192663 - protein, 293 aa, Unknown
  Bacterial polypetide isolated from the Sargasso Sea
STQEELLSLKKLASDNPIQFWESFAKSELDWFEPFQTVLDNENAPFFKWFKEGKLNITYNCLDRHIKRGFGGKTALIWEGEPGDSKKYTYEELLKEVCKAANALKEIGVKKGDLVCIYMPMIPEAMFAMLACARIGAPHSVVFGGFSSEALKDRLIDGNARFVITADGGFRKDKVIELKQAVDAAIESGADKVVEKVVVVQRSQKNISMVDDRDFWWHELLKDQKNHCEPEIMNSEDRLFILYTSGSTGKPKGVVHTTGGYNLWSHLTFKWIFDLKDDDIYWCTADVGWIQVI

SEQ ID NO: 192664 - protein, 306 aa, Unknown
  Bacterial polypetide isolated from the Sargasso Sea
PMIPQAVIAMLACARLGAVHSVVFGGFAANELAVRIDDAKPVVIVTASCGIEGNKVLPYKPLVDEAISLAEHKPQACVLYQRPQLIAELNEATDHDWLSLVEASVPASPVAVDATDPLYVLYTSGTTGKPKGVVRDNGGHAVALHYSMGAIYGISENDIFWAASDVGWVVGHSYIVYGPLIKGATTVLYEGKPIGTPDAGAFWRMIESHKVNVLFAAPTAFRAIRKADPDAEFLSKYNTSSLRTLFMAGERLDPPTYFWASEKVGVPVIDHWWQTETGWPICSNPMGLEPMATKPGSSSVPTPGLT

SEQ ID NO: 192665 - protein, 265 aa, Unknown
  Bacterial polypetide isolated from the Sargasso Sea
MLACARIGAIHSVIFGGFAPDSIAGRIKDCKSQFVITADEGVRGGKIIPLKKYINTALESCDSSIKTLVIQYTNTQDELHKNNNFYYDELVKEVNDQCECVSMNAEDPLFILYTSGSTGKPKGVLHTTGGYLVYASFTHKYSFDYHPGDIYWCTADAGWITGHSYSVYGPLANGGKTLLFEGVPNYPDFSRFWEVCDKYKVNIFYTAPTVLRSLMKEGSSYIEKCDLSSLRILGTVGEPINPEAWSWYSSIVGKDKCPIIDTWWQ

SEQ ID NO: 192666 - protein, 106 aa, Unknown
  Bacterial polypetide isolated from the Sargasso Sea
AEAAVVGYPHDIKGNGLYCYVTLNAGEKESLDLERDLRLWVRKQIGPIATPDLIQFSPSLPKTRSGKIMRRILRKIAANEHEQLGDTTTLADPSVVKSLVENRKNV

SEQ ID NO: 192667 - protein, 321 aa, Unknown
  Bacterial polypetide isolated from the Sargasso Sea
YASMTHQYIFDYKANDIYWCTADIGWVTGHSYIIYGPLSNGATTIMFEGVPNYPDSSRWWQIVDKHKVNIFYTAPTAIRALMREGDKPVKKTSRKTLKLLGTVGEPINPEAWMWYYKTVGDSRCPIVDTWWQTETGGILIAPQPGAIDLKPGSATKPFYGIKPVLVDKDGKIIKGEGKGRLCMASSWPGQMRTVYGDHQRFIDTYFSQFDGKYFTGDGCRRDKDGYYWITGRVDDVIIVSGHNLGTAEIESAFVAHPKVAEAAVVGFPHSIKGNGLYCYVTLNAGENPTGDLERDLKLWVRKQIGPIATPDVIQFAPGLQK

SEQ ID NO: 192668 - protein, 171 aa, Unknown
  Bacterial polypetide isolated from the Sargasso Sea
YGDHERFIKTYFSQFDGKYFTGDGCRRDKDGYYWITGRVDDVIIVSGHNLGTAEIESAFVAHTKVAEAAVVGFPHDIKGNGLYCYVTLNAGENPDGDLERELKLWVRKQIGPIATPDHIQFSPGLPKTRSGKIMRRILRKIAANEHHDLGDTTTLADPSVVDSLIENRKNK

SEQ ID NO: 192669 - protein, 278 aa, Unknown
  Bacterial polypetide isolated from the Sargasso Sea
GDDPKDTQKISYKQLHQKVSKAANGLKKLGIQKGDRVTIYLTMIPELAILMLACARIGAVHSIIFGGFSAESISGRVNDCKSEYIITADEGVRGGKTIPLKATTDEALSNCPDVKKCIVVKRTGNYVYWDQDRDVWYHDLIKDVPNHCEPEEMSAEDPLFILYTSGSTGKPKGVLHTTGGYMVYASMTHQYIFNYKPNDIYWCTADIGWVTGHSYIIYGPLANGATTIMFEGVPNYPDSSRWWQIVDKYKVNTFYTAPTAKRALMREGDGTQLIKLLE

SEQ ID NO: 192670 - protein, 216 aa, Unknown
  Bacterial polypetide isolated from the Sargasso Sea
MDEKIYYPDLTNSKSFKIDKNKYKEMYQESISNPEEFWRKMGNRIDWITPFSKVKDTSFSHDDVSIRWYEDGSLNVSYNCIDRHLEKKRDKVAIIWESDEPSLSKNITYGELYKQVCRLSNIYKELGVNKGDRVILYMPMIPEAAYAMLACARIGAVHSVVFGGFSPEALASRITDCGASLVVTADEGPRGGKSVPLKENVNKALEISGDIKTLVV

SEQ ID NO: 192671 - protein, 116 aa, Unknown
  Bacterial polypetide isolated from the Sargasso Sea
ESALVLHENVAEAAVVGFPHEIKGQGIYAFVTLNTGVEPTAELQKELVQLVRKEIGPIASFDVVQWAPGLPKTRSGKIMRRILRKIAENEMESIGDTSTLADPSVVDDLISNRPAN

SEQ ID NO: 192672 - protein, 233 aa, Unknown
  Bacterial polypetide isolated from the Sargasso Sea
VKVKKKKSFKKKKIIKKKSDQSVEKELIYKTKKDWISKSTVNKSQYEKKYKSSLSDNDAFWKKEGKRISWIKPYTKIKDVKYSNSDVRIKWFYDGTLNASTNCIDRHLKKNKDKTAIIWVGDDPKIQKKITYKELHKEVSKAANGLKEIGVKKGDRVTIYLTMIPELAYTMLACARIGAIHSIIFGGFSPDSISGRINDCKSDYVITADEGVRGGKTIHLKSIMDEALVKCTK

SEQ ID NO: 192673 - protein, 222 aa, Unknown
  Bacterial polypetide isolated from the Sargasso Sea
MTEKLIESILNESRSFAPSKKFIKQANIDNEDAQRLREEASHNHIEYWAKLARAHLHWFLPFNNILDESNAPNYEWFNDGEINASFNSLDINANKNPEKTAIIFETEDGNSERITYKDLLLRTSQFANGLKKLGVVPMDRVVIYMPMCPEAVIAMQACARIGAIHSVVFGGFSSNALKDRIEDAQSKIVITADGAYRGGSVIPLKQATDEAVTNSLHKVKNV

SEQ ID NO: 192674 - protein, 243 aa, Unknown
  Bacterial polypetide isolated from the Sargasso Sea
MGQKFNQIYENSIKNPEDFWKNVSEDIFWFKKPTKILNKSNPPFYKWYEDGVTNTCYNALDHHIDQGKGERIALIYDSPITGNKAQFTFNQVKAKVSKFAGALDNLGVKKGDRVIIYMPMIPEAVVAMLACGRVGAIHSVVFGGFASNELASRIDDSKAKLLITASCGFEPGRTVEYRPLVDGALKIAKHQVEKVIFFQRKGHELKLNAPKEISWDEALSNAKDKDCVEMCSNRLCLHTIYIW

SEQ ID NO: 192675 - protein, 208 aa, Unknown
  Bacterial polypetide isolated from the Sargasso Sea
MNNNFKKIYENSIKEPENFWREIADDIFWFKKPKKILNKSKPPFYKWFEDGTTNTCYNALDIHIDGGRGDKTCLIYDSPITGNKKQFTYKELREKVSKFAGALTNQGIKKGDRAIIYMPMIPEAVVAMLACGRIGAIHSVVFGGFASNELASRIDDSKAKILITASCGFEPGKTVEYKPLVDEALKLASHKIKKLILFQRSGHEVKLN

SEQ ID NO: 192676 - protein, 246 aa, Unknown
  Bacterial polypetide isolated from the Sargasso Sea
GHSYIVYGPLANGATTLMFEGVPTYPDASRFWQVIDKHQVNIFYTAPTALRQLMSQGDEFVYKTNRKSLKLLGSVGEPINPEAWEWYYQIVGDKRCPIVDTWWQTETGGIMITPLPGATSLKPGSATLPFFGIQPALMDSEGHVIEELEASGNLVITTSWPGQIRSVYGDHQRVIDTYYAAYPDFYFTGDGARRDSDGYYWITGRVDDVMVVSGHNIGTAEVESALVLHPAVAEAAVVGFPHDIKG

SEQ ID NO: 192677 - protein, 107 aa, Unknown
  Bacterial polypetide isolated from the Sargasso Sea
VAEAAVVGYPHDIKGNGLYCYVTLNAGEKPTGELERDLKLWVRKQIGPIATPDLIQFAPGLPKTRSGKIMRRILRKIAANEHDQLGDTTTLADPTVVESLVENRKNK

SEQ ID NO: 192678 - protein, 278 aa, Unknown
  Bacterial polypetide isolated from the Sargasso Sea
GAIHSIIFGGFSPDSIAGRINDCKSDYVITADEGLRGGKTIHLKSITDEALIHCPKVKKCIVIKRTGNRVNWDNSRDIWYHDITKKASSVCEPEEMNAEDPLFILYTSGSTGKPKGVLHTTGGYMVYASMTHQYIFNYKPKDIYWCTADIGWITGHSYIIYGPLANGATTIMFEGIPTYPDTSRWWQIVDKYKVNIFYTAPTAIRALMREGDGPVKKTSRKSLKLLGTVGEPINPEAWQWYYKTVGESKCPIVDTWWQTETGGILISPQTGAMDLKPG

SEQ ID NO: 192679 - protein, 280 aa, Unknown
  Bacterial polypetide isolated from the Sargasso Sea
FWYKKPSKILNSDNPPFYIWFEDGITNTCYNALDLHVDQGKGEKLAIIYDSPITGSKETITYNKLKEKVSKFAGALKKQGINKGDRVIIYMPMIPEAVVAMLACGRIGAVHSVVFGGFAANELASRIDDSKAKILVTASCGYEPGRTVHYKPLVNKALELASHKIKKCIIFQREKDKAELNPAIDISWNDALKDTKPAECEKMNANDYAYILYTSGTTGLPKGIVRDIGGHIVALKWTMKNIYNIKPDDVWWSASDIGWIVGHSYIVYGPLFYGCTTVLF

SEQ ID NO: 192680 - protein, 304 aa, Unknown
  Bacterial polypetide isolated from the Sargasso Sea
DCQSEYVVTADEGVRGGKTIPLKLTTDKALESCPNVKKCLVIKRTNKNIDLDKDRDLFYDDVVKEVDNFCEPEILNAEDPLFILYTSGSTGKPKGVMHTSGGYIVYASMTHEYIFNYNDDDIYWCTADIGWITGHSYIIYGPLANGATTLMFEGVPNYPDFSRFWQIVDKHKVNIFYTAPTAIRALMREGDDYVNKTSRSSLKLLGTVGEPINPEAWKWYFEVPGNSNCPIVDTWWQTETGGILISPQTGAIKLKPGSATKPFFGIEPCIVDKDGKELEGECEGMLCMKRSWPGQMRTVYGDHK

SEQ ID NO: 192681 - protein, 173 aa, Unknown
  Bacterial polypetide isolated from the Sargasso Sea
MCIGDHQRFIDTYFSQFSGKYFTGDGCRRDKDGYYWITGRVDDVIIVSGHNLGTAEIESAFVAHPKVAEAAVVGYPHDIKGNGLYCYVTLNAGEKSTLDLERDLKLWVRKQIGPIATPDLIQFAPGLPKTRSGKIMRRILRKIAANEHGQLGDTTTLADPSVVDNLVDNRKNI

SEQ ID NO: 192682 - protein, 250 aa, Unknown
  Bacterial polypetide isolated from the Sargasso Sea
KIVGEKKCPIVDTWWQTETGGILIAPQPGAINLKPGSATKPFYGIKPAIVDETGKVLKGACKGRLCMTQSWPGQMRTVYGDHQRFIDTYFSQFDGKYFTGDGCRRDKDGYYWITGRVDDVIIVSGHNLGTAEIESAFVAHSKVAEAAVVGFPHEIKGNGLYCYVTLNAGENPSGDLERELKLWVRKQIGPIATPDHIQFAPGLPKTRSGKIMRRILRKIAADEHHDLGDTTTLADPSVVEALVENRKSKS

SEQ ID NO: 192683 - protein, 301 aa, Unknown
  Bacterial polypetide isolated from the Sargasso Sea
GLKKKKRITWMKKFTKIKDVKYSKDEVKIKWYYDGTLNASANCIDRHLKKNPSKTAIIWVGDDPADTKKISYKELHQNVCKAANGLKSLGIQKGDRVTIYLTMIPELAYIMLACARIGAVHSIIFGGFSPDSIATRITDCESEYLITADEGVRGGKIIPLKKIADEALDQCPGVKKCVVVERTGNQVDWNNERDVSYKELISSVPSKCDPEEMNAEDPLFILYTSGSTGKPKGVLHTTGGYMVYASMTHQYIFDYKANDIYWCTADIGWVTGHSYIIYGPLSNGATTIMFEGVPNYPDSCR

SEQ ID NO: 192684 - protein, 296 aa, Unknown
  Bacterial polypetide isolated from the Sargasso Sea
GKTIHLKSITDEALIHCPNVKKCIVVKRTGNRINWDESRDVWYNEMVKGVPSQCDPEEMGAEDPLFILYTSGSTGKPKGVLHTTGGYMVYASMTHQYIFNYKPKDIYFCTADIGWITGHSYIIYGPLSNGATTVMFEGVPTYPDSSRWWQIVDKYKVNIFYTAPTAIRALMAQGEGPVKKTSRKSLKLLGTVGEPINPEAWEWYYRTVGENKCPIVDTWWQTETGGILISPQTGAIDLKPGSATKPFYGIKPVIVDQNGKEIKGEGQGRLCMSQSWPGQMRTVYGDHQRFIDTYFS

SEQ ID NO: 192685 - protein, 195 aa, Unknown
  Bacterial polypetide isolated from the Sargasso Sea
QRDKGAGEGRLCIAQSWPGQMRTVYGDHQRFIDTYFSQFNGKYFTGDGCRRDKDGYYWITGRVDDVIIVSGHNLGTAEIESAFVAHPKVAEAAVVGYPHDIKGNGLYCYVTLNAGETENGDLERDLKLWVRKQIGPLATPDLIHFTPGLPKTRSGKIMRRILRKIAANEHGQLGDTTTLADPSVVDSLVDNRKNI

SEQ ID NO: 192686 - protein, 196 aa, Unknown
  Bacterial polypetide isolated from the Sargasso Sea
MSDNIKIPVFENFKDSAHLTKDKYEEAYKFALNNPEAFWEKEGKRINWINPYTRVKDVTWSNNDVNIKWFYDGTLNASYNCIDRHLSDKSDQIAIIWEGDDPNESKKITYKELHQKVSKFANMMKHFGVQKGDRVTIYMPMIPEAAYAMLACSRIGAIHSVVFGGFSPDALAGRILDCDSKFLITADEGIRGGKIV

SEQ ID NO: 192687 - protein, 260 aa, Unknown
  Bacterial polypetide isolated from the Sargasso Sea
VNIFYTAPTAIRALMRDGEEPVKRCSRSTLRLLGTVGEPINPEAWEWYYKVVGEERCPIVDTWWQTETGGIMLSPLPGATALKPGSATLPFFGIKPAIVDHEGSLLDGATEGNLVILDSWPGQMRTVYGDHERFIKTYFSQFPGKYFTGDGARRDSDGYYWITGRVDDVINVSGHRMGTAEVESALVAHPKVAEAAVVGFPHDIKGQGIYAYVTLNAGEVPDESLRKELILWVRKEIGPIASPDYLQWAPGLPKTRSGKI

SEQ ID NO: 192688 - protein, 160 aa, Unknown
  Bacterial polypetide isolated from the Sargasso Sea
VYFSTYNDKYFTGDGCKRDKDGFYRITGRVDDVINVSGHRIGTAELENGINEHPLVIESAVVGFPHSLKGQGIYAYVILEKTHFSEEKLSKEILQTVKNEIGSIAKPDKILFTSGLPKTRSGKIMRRILRKIAEKKFNEMGDISTLLDPSVVDEIIKKFK

SEQ ID NO: 192689 - protein, 316 aa, Unknown
  Bacterial polypetide isolated from the Sargasso Sea
ILNIKRNIRCPSKKTINFWAKEGKRISWMKKYTKIKDVKYSKEEVKIKWYYDGTLNASTNCIDRHLKKNPSKTAIIWVGDDPADTKKISYKELHQNVCKAANGLKSLGIQKGDRVTIYLTMIPELAYVMLACARIGAVHSIIFGGFSPDSIATRITDCESEYLITADEGVRGGKIIPLKKIADEALDQCPGVKKCVVVERTGNQVDWNNERDVSYKELISSVPAKCEPEEMNAEDPLFILYTSGSTGKPKGVLHTTGGYMVYASMTHQYIFDYKSNDIYWCTADIGWVTGHSYIIYGPLSNGATTIMFEGVPKLPD

SEQ ID NO: 192690 - protein, 135 aa, Unknown
  Bacterial polypetide isolated from the Sargasso Sea
GRVDDVLNVSGHRIGTAEVESAIVNHVDVAEAAVVGIEHDIKGQAIFAYVILRENNKDKMTINNEILEEVSKIIGKFAKPEVIQFTRDLPKTRSGKIMRRILRKIANNEFENLGDTTTLADPSIVEDLIKNKHER

SEQ ID NO: 192691 - protein, 235 aa, Unknown
  Bacterial polypetide isolated from the Sargasso Sea
YKQLHQEVSKAANALKELGVQKGDRVTIYLTMIPELAYTMLACARIGAIHSIIFGGFSPDSISGRINDCESDYVITADEGLRGGKTIPLKSITDEALVNCPNVKKCIVVKRTGNRINWDEDRDVWYHEITKKVSSNCEPEEMNAEDPLFILYTSGSTGKPKGVLHTTGGYMVYASMTHQYIFNYKPKDIYWCTADIGWVTGHSYIIYGPLSNGATTIMFEGIPTYPDTSMVVANC

SEQ ID NO: 192692 - protein, 256 aa, Unknown
  Bacterial polypetide isolated from the Sargasso Sea
DGFWKKEGKRINWIKPYTKIKDVKYSKSDVKIKWFYDGTLNASVNCIDRHLKKNKDKTAIIWVGDDPKVQKKISYKELHKEVSKAANGLKELGVKKGDRVTIYLTMIPELAYTMLACARIGAVHSIIFGGFSPDSISGRINDCESDYLITADEGVRGGKIIPLKSIADEALVNCPNVKKCVVVKKTGNRINWDERRDVWYHELTKKVSNKCEPEEMNAEDPLFILYTSGSTGKPKGVMHTTGGYMVYASMTHLIYI

SEQ ID NO: 192693 - protein, 194 aa, Unknown
  Bacterial polypetide isolated from the Sargasso Sea
VLKGEAQGRLCISQSWPGQMRSVYGDHQRFIDTYFSQFDGKYFTGDGCRRDKDGYYWITGRVDDVIIVSGHNLGTAEIESAFVAHPKVAEAAVVGYPHDIKGNGLYCYVTLNAGEKSTLDLERDLKLWVRKQIGPIATPDLIQFAPGLPKTRSGKIMRRILRKIAANEHGQLGDTTTLADPSVVESLVDNRKNI

SEQ ID NO: 192694 - protein, 249 aa, Unknown
  Bacterial polypetide isolated from the Sargasso Sea
KTVGDSRCPIVDTWWQTETGGILISPQTGAIDLKPGSATKPFYGIKPEIVDKEGNVLRGEAQGRLCISQSWPGQMRTVYGDHNRFIETYFSQFEGKYFTGDGCRRDKDGYYWITGRVDDVIIVSGHNLGTAEIESAFVAHPKVAEAAVVGYPHDIKGNGLYCYVTLNAGEKHDGELERELKLWVRKQIGPIATPDYIQFSPGLPKTRSGKIMRRILRKIAANEHDQLGDTTTLADPSVVKSLVENRKNT

SEQ ID NO: 192695 - protein, 208 aa, Unknown
  Bacterial polypetide isolated from the Sargasso Sea
FYGIKPVIVDKKGNVLKGECEGRLCIAQSWPGQMRTVYGDHQRFIDTYFSQFDGKYFTGDGCRRDKDGYYWITGRVDDVIIVSGHNLGTAEIESAFVAHPKVAEAAVVGFPHDIKGNGLYCYVTLNVGEKEDGDLDRELKLWVRKQIGPVATPDFIQFAPGLPKTRSGKIMRRILRKIAANQHDQLGDTTTLADPSVVESLVDNRKNI

SEQ ID NO: 192696 - protein, 281 aa, Unknown
  Bacterial polypetide isolated from the Sargasso Sea
MNQSFSEIYSNSINKPEEFWGNVAEDIFWFKKPKKILNKSNPPFYRWYEDGTTNTCYNALDLHIDEGNGDKLALIYDSPITGNKAKYTYKQLREKVSKFAGALQNQGVNKGDRVIIYMPMIPEAVIGMLACARIGAIHSVVFGGFASNELASRIDDSKAKILLTASCGFEPGRTVHYKPLVDEALKLAKHKIEKIILFQRFGNEVNLKTPLEISWEEALSKANNVDCVEMKSNEFAYILYTSGTTGVPKGIVRDIGGHIAALKWTMKNIYNVDQNDIWVVC

SEQ ID NO: 192697 - protein, 271 aa, Unknown
  Bacterial polypetide isolated from the Sargasso Sea
KENFLGRKKKKAFLGKKDSKQTKDSDGNIVFKVPQAWEKQAYINKTQYAKKYKLSIKDNENFWRKEGKRISWIKPYTKIKDVKYSKEEVSIKWYHDGTLNASANCIDRHLEKKGNKTAIIWVGDDPADSKKITYKELHKNVCKAANGLKNIGIQKGDRVTIYLTMIPELAYTMLACARIGAVHSIIFGGFSPDSIATRINDCESDYVITADEGVRGGKIIPLKKIADEAMMQCSNIKKCVVVKRTGNTVDWNDERDVSYEEITKNVSDKFV

SEQ ID NO: 192698 - protein, 289 aa, Unknown
  Bacterial polypetide isolated from the Sargasso Sea
NEKFDVSADWSANAQINQDKYNEWYETSFNNNEDFWNEHGKRIEWMKPYTKVKDVSFNKDSFSIKWYEDGALNASANCIDRHLKDKGDQTAIIWEGDDPKDSKHITYNELHKEVSKLSNGMKSLGVKKGDRVTIYMPMIPEAAYAMLACTRIGAIHSVVFGGFSPDSLAGRISDCKSDIVITADEGLRGGKPIPLKKNTDDAINISGGVRHCIVVKRTGGAIDWHDDRDVWYHELLSDASGDCPPEEMSAEDPLFILYTSGSTGKPKGVMHTTGGYMVYASMTHQYVFD

SEQ ID NO: 192699 - protein, 282 aa, Unknown
  Bacterial polypetide isolated from the Sargasso Sea
GFSPEALASRITDCGACLVVTADEGPRGGKPVPLKENVNKALQISGDIKTLVVKRTGANVYMKENRDFSYNEMTDIVSDKNVPEEMSAEDPLFILYTSGSTGKPKGVQHSSGGYIVYASLTHEYIFDYHDNDIYWCTADVGWITGHSYIVYGPLSNGATTLMFEGVPTYPDCSRFWQVCEKHNVNQFYTAPTAIRALMGQGDDFVNNCNLSSLRILGTVGEPINPEAWEWYNRVVGKGKCPIVDTWWQTETGGILISPLPGATPTKPGSATNPFFGIKPVIM

SEQ ID NO: 192700 - protein, 263 aa, Unknown
  Bacterial polypetide isolated from the Sargasso Sea
TVLDNENAPFLKWFKEGRLNITYNCLDRHIKRGLGGKTALIWEGEPGDSKKYTYEELLKEVCKAANALKAIGVKKGDLVCIYMPMIPEAMFAMLACARIGAPHSVVFGGFSSEALKDRLIDGNARFVVTADGGFRKDKVIELKKAVDAAIESGADKVVEKVIVVQRSQKNISMVDHRDFWWHELLKDQKDHCEPEVMNSEDRLFILYTSGSTGKPKGVVHTIGGYNLWSHLTFKWIFDLKDDDIYWCTNDVGWITGHSYIVYG

SEQ ID NO: 192701 - protein, 313 aa, Unknown
  Bacterial polypetide isolated from the Sargasso Sea
DWFDKWTTINNTDYSKAHIEWFSNGKLNASYNCIDRHIENGFGEKTALIWQSNDPTISTNVTYNELLKKVSLFANGLKRAGINKGDRVCIYMQMIPEAIVAMLACARIGAVHSVVFGAFSSDALKNRINDSECKLLITQDNGVRGLKFDIPMKENADKIADECPSLKTVVMVERSGNDMFMKEGRDITWNQFVDGCSSECPAEIMDAEDPLFILYTSGSTGKPKGVMHTTGGYLVYASHTHELVFDYHQDDVYWCTADIGWITGHSYIVYGPLSNAVTQVIFEGVPNYPDFGRLWQIVEQHKVNVFYTAPTAC

SEQ ID NO: 192702 - protein, 207 aa, Unknown
  Bacterial polypetide isolated from the Sargasso Sea
MGYKKEFQESIENPEKFWRKQAELIKWYEFPNTILSKDENGFYRWFKGGKLNTSYLLLDYHIESGRGDQTALIYDSPVTNSQRKFNFKELLEKVEKLAGVLRAKGIEKGDRTIIYMPMIPEALVAMLACARLGAIHSVVFGGFAPKELAIRIDDAKPKVLLTASCGIEFSNVIEYKPLVDEALILSKYPPKTVILLQRPQSKASMKS

SEQ ID NO: 192703 - protein, 284 aa, Unknown
  Bacterial polypetide isolated from the Sargasso Sea
FILYTSGSTGKPKGVLHTTGGYMVYASMTHQYIFDYKSNDIYWCTADIGWVTGHSYIIYGPLANGATTIMFEGIPNYPDSSRWWQIVDKYKVNIFYTAPTAIRALMREGDNPVKKTSRKTLKLLGTVGEPINPEAWMWYYRTVGDSRCPIVDTWWQTETGGILIAPQPGAIDLKPGSATKPFYGIKPVLVDKDGKVIKGEGKGRLCMAQSWPGQMRTVYGDHQRFIDTYFSQVDGKYFTGDGCRRDKDGYYWITGRVDDVIIVSGHNLGTAEIESAFVAHPKVA

SEQ ID NO: 192704 - protein, 197 aa, Unknown
  Bacterial polypetide isolated from the Sargasso Sea
FWGICEKHAVTIFYTAPTAIRALMKHGDEIPQSYDLSSLRLLGTVGEPINPEAWMWYHRIIGQERCPIVDTWWQTETGGAMISPLPGVTETKPGSCTTPMPGIDVDIVDELGEPVGEANQGGYLVIKKPWPSMLRTIWGDNQRYIDTYWEKFDGRYYVAGDSAYRDEDGCHWIMGRIDDVLNVSGHRLGTMEVESAL

SEQ ID NO: 192705 - protein, 275 aa, Unknown
  Bacterial polypetide isolated from the Sargasso Sea
MREGDEPVERTSRASLRLLGTVGEPINPEAWEWYYQVVGDAHCPIVDTWWQTETGGILISPLPGATPLKPGSVTRPLFGIRPAVVDADGNILDGKAEGNLVMLDSWPGQMRTVYGDHQRFVDTYFSTYDGMYFAGDGVMRDADGYYWITGRVDDVLNVSGHRMGTAEVESALVAHKDVAEAAVVGCPHEIKGQGIYAYVTLMEGIETSDELLAELRQWVRKEIGPIATPDFIQWAPGLPKTRSGKIMRRILRKVAENDFENLGDTSTLADPAVVD

SEQ ID NO: 192706 - protein, 145 aa, Unknown
  Bacterial polypetide isolated from the Sargasso Sea
MSFKFNKIYESSIKNPEKFWQEASEDIFWFKKPTKILNKSNPPFYKWFEDGVTNTCYNALDIHIDQGRGQKTALIYDSPITGNKSQFTYEELKSKVSKFAGALKAQGANKGDRVIIYMPMIPEAVVAMLACARIGAIHSVVFGGF

SEQ ID NO: 192707 - protein, 213 aa, Unknown
  Bacterial polypetide isolated from the Sargasso Sea
GSATSAIFFGVKPSLVDNDGNEIIGEGKGNLCIDQSWPSQIRTVYGDHERMVQTYFSQYKGKYFTGDGAKRDAHAYYWVTGRVDDVLNVSGHRIGTAEVESAIVTHPYVAEAAVVGIEHDIKGQAIYAFVILKDTEKSNDLVENEIIDTVSKSIGKIAKPEAIHITRDLPKTRSGKIMRRILRKIANKDTANLGDVTTLADPSIVEELINSRQ

SEQ ID NO: 192708 - protein, 207 aa, Unknown
  Bacterial polypetide isolated from the Sargasso Sea
GIKPVLVDKDGKVIKGEGQGRLCMASSWPGQMRTVYGDHQRFIDTYFSQFDGKYFSGDGCRRDKDGYYWITGRVDDVIIVSGHNLGTAEIESAFVAHPKVAEAAVVGFPHSIKGNGLYCYVTLNSGENPTGDLERDLKQWVRKQIGPICYPDVIQFAPGLPKTRSGKIMRRILRKIAANEPDNLGDTTTLADPSVVASLVENRQNRD

SEQ ID NO: 192709 - protein, 167 aa, Unknown
  Bacterial polypetide isolated from the Sargasso Sea
MSENEKFEVSSEWSAEAQINTDKYNEWYENSLNNNEEFWSEHGKRIDWIKPYTKVKDVSYNKDNFSIKWYYDGTLNASSNCIDRHLKDKADQTAIIWEGDDPADSKHISYKELHSEVSKLANGMKSLGVKKGDRVTIYMPMIPEAAYAMLACTRIGGIHSVVFGGFS

SEQ ID NO: 192710 - protein, 298 aa, Unknown
  Bacterial polypetide isolated from the Sargasso Sea
KKEGKRINWIKPYTKIKDVKYSKGDVKIKWFYDGTLNASVNCIDRHLKKNKDKTAIIWVGDDPKVQKKISYKELHREVSKAANGLKELGVKKGDRVTIYLTMIPELAYTMLACARIGAVHSIIFGGFSPDSISGRINDCESDYLITADEGVRGGKIIPLKSIADEALVNCPNVKKCVVIKRTGNRINWDERRDIWYHELTKKVSNKCDPEEMNAEDPLFILYTSGSTGKPKGVMHTTGGYMVYASMTHQYIFNYKPKDIYWCTADIGWVTGHSYIIYGPLSNGATTIMFEGIPTYPDS

SEQ ID NO: 192711 - protein, 265 aa, Unknown
  Bacterial polypetide isolated from the Sargasso Sea
TSRWWQIVDKYKVNTFYTAPTAIRALMREGDKPVKKTSRKSLKLLGTVGEPINPEAWMWYYKTVGNSKCPIVDTWWQTETGGIMIAPQTGAIPLKPGSATKPFYGIKPVLVDKNGKEIKGAGEGRLCIAQSWPGQMRTVYGDHQRFIDTYFSQFNGKYFTGDGCRRDKDGYYWITGRVDDVIIVSGHNLGTAEIESAFVAHPKVAEAAVVGYPHDIKGNGLYCYVTLNAGETETGELERDLKLWVRKQIGPLATPDNIHFTPRSP

SEQ ID NO: 192712 - protein, 279 aa, Unknown
  Bacterial polypetide isolated from the Sargasso Sea
MQKYKPNDDTKKLAHIGSFEEYKEMYDYSIREPETFWAEQAERISWFKKWNNVWEWDFNKANVKWFEGAKLNACYNCVDRHVIDGYGEKTALIWEGNNPAESKEYKYNELLEKVQLAANALKNLGVKKGDRVCIYMQMIPELAISVLACARIGAIHSVVFGAFAPDSLEARINDSECKVLITQDTGVRGTKNDIPMKSNANIAVQKTPSIEKVLVVNRTGSSIEMDAERDVWWHDALDSAEPECTPEEMDAEDPLFILYTSGSTGKQKGVMHTTGGYMV

SEQ ID NO: 192713 - protein, 285 aa, Unknown
  Bacterial polypetide isolated from the Sargasso Sea
IIYMPMIPEAVIAMLACGRIGAVHSVVFGGFAANELASRIDDSKAKLIVSASCGYEPGRTVHYKPLVNKAIELANHKPEKCIIYQREKDKAELNPSTDITWEDAHKNVLPAECEKMNANDYAYILYTSGTTGLPKGIVRDIGGHIVALKWTMKNIYNINQDDVWWSASDIGWIVGHSYIVYAPLFYGCTTVLFEGKPVGTPDSGVFWRVISEHKVKSLFTAPTAIRAIKKEDPNGDFFKKYDLSKFEKLFLAGERADPDTIKWFEKLSGSPVIDHWWQTETSWAI

SEQ ID NO: 192714 - protein, 296 aa, Unknown
  Bacterial polypetide isolated from the Sargasso Sea
RKKNKKKLRKKSKTIKRQKKTDSSELIFKVTKKWSNNAYVDRSKYESKYKLSIKDNENFWRKEGKRIDWIKPYTKIKDVKYSKTDVKIKWYYDGTLNASANCIDRHLEDKKNKTAIIWVGDDPKVSKQISYKELHKNVSKTANALKELGIKKGDRVTIYLTMIPELAYVMLACARIGAIHSIIFGGFSADSIAGRINDCQSNYIITADEGVRGGKIIPLKKITDEALTKCPDVKKCVVVKRTGNEINWVEGRDVYYDEIIKMASDKCEPEEMNAEDPLFIVYTSGSTGKPKGVYTL

SEQ ID NO: 192715 - protein, 331 aa, Unknown
  Bacterial polypetide isolated from the Sargasso Sea
IFYMPMIPEAVIGMLACGRIGAIHSVVFGGFASNELASRIDDSKAKVLLTASCGFEPGRTVKYKPLVDEALKLASHKIEKLILFQRPDNEVKLNSPNEISWEEALSNAKNVDCVEMNANEFAYILYTSGTTGIPKGIVRDIGGHITALKWTMKNIYNIDQDDVWWSASDIGWIVGHSYIVYAPLFKGCTTILFEGKPVGTPDAGAFWKIISEYKVKSLFTAPTAFRAIKKEDPEGKFFSKYDLSSFESLFLAGERADPDTIKWAESLLNVPVIDHWWQTETSWAISSNCTGIEMMKTKYGSACKAVPGYDVKVIKPDNSIAKSNEMGDIVI

SEQ ID NO: 192716 - protein, 209 aa, Unknown
  Bacterial polypetide isolated from the Sargasso Sea
MNEIYKINDAWLKNAKVNKEQYEKMYEQSVSDNENFWSEHGKRIDWFKPYTKIKEVVYNKNDVSIKWYFDGTTNISYNCIDRHAKNSPNKTAIIWEGDDPSKVKKISYQELQTEVCKMANVLKKIGVKKGDRVTIYLTMIPELAYVMLACARIGAIHSIIFGGFSSDSIAGRIKDCNSEYIITADEGTRGGKTIPLKDITDKALDSCPN

SEQ ID NO: 192717 - protein, 308 aa, Unknown
  Bacterial polypetide isolated from the Sargasso Sea
KRIDWLKPYTKIKDVSYDHDDVHIKWYYDGTLNACANCIDRHLPSRGNQIAIIWEGDDPTNDKQITYNELHKEVSKFANAMKTLGVKKGDRVTIYLPMIPEIAVAVLACARIGAVHSVIFGGFSPESIAGRILDCESDLVITSDEGVRGGRPIPLKANTDEALKKCPNVKTCIVVKRTGGETDWIKGRDHWYHEIMADASTNCPPEEMSAEDPLFILYTSGSTGKPKGVLHTTGGYMVYASMTHQFVFDYQEGDIYWCTADVGWITGHSYILYGPLANGATTVMFEGIPTYPNTSRCWEVCDKHNINI

SEQ ID NO: 192718 - protein, 292 aa, Unknown
  Bacterial polypetide isolated from the Sargasso Sea
EGIPTYPDSSRWWQIVDKYKVNIFYTAPTAIRALMAQGEAPIKKTSRKSLKLLGTVGEPINPEAWEWYYKTVGESKCPIVDTWWQTETGGILISPQTGAIDLKPGSATKPFYGIKPCIIDQNGNEIKGEGQGRLCISQSWPGQMRTVYGDHQRFIDTYFSQFDGKYFTGDGCRRDKDGYYWITGRVDDVIIVSGHNLGTAEIESAFVAHSKVAEAAVVGYPHEIKGNGLYCYVTLNAGEESNGELERELKLWVRKQIGPLATPDLIQFSPGLPKTRSGKIMRRILRKIAANE

SEQ ID NO: 192719 - protein, 299 aa, Unknown
  Bacterial polypetide isolated from the Sargasso Sea
MSEKFNKIYTQSINNPEKFWQDASDDIFWFKKPTKILNKSNPPFYKWFEDGVTNTCYNALDFHIDQGNGKRIALIYDSPITGNKNKLTYEELRSKVSKFAGALKNQGVMKGDRVIIYMPMIPEAVIAMLACVRIGAIHSVVFGGFASNELASRIDDSKAKILVTASCGFEPGRTVEYKPLVDEAIKQAKHKIDKMILFQRAGYEVKLNAPKEVSWEEVTSNSQETDCIEMNSNEFAYILYTSGTTGTPKGIVRDTGGHIVALKWTMKNIYNIDEDDIWWSASDIGWIVGHSYIVYAPII

SEQ ID NO: 192720 - protein, 304 aa, Unknown
  Bacterial polypetide isolated from the Sargasso Sea
MHSKVFGVQKGDRVTIYLTMIPELAYVMLACTRIGAVHSIIFGGFSPDSIATRINDCKSDYLITADEGVRGGKIIPLKKIADEALLQCPNVKKCVVVKRTGNQVNWENERDLSYEDLISKASSKCEPEEMNAEDPLFILYTSGSTGKPKGVLHTTGGYIVYASMTHQYIFDYKPKDIYWCTADIGWVTGHSYIIYGPLSNCATTIMFEGVPNYPDSSRWWQIVDKYKVNIFYTAPTAIRALMREGDGPVKKTSRKTLKLLGTVGEPINPEAWLWYYKTVGDSKCPIVDTWWQTKTGGILIAPQP

SEQ ID NO: 192721 - protein, 309 aa, Unknown
  Bacterial polypetide isolated from the Sargasso Sea
ECFNDGILNASFNCIDRHLSNPDAVAIIWESDDPSEDKKISYGHLHDEVCKFANLLKSRGIKKGDRVCIYMPMIPEATYAMLACARIGAVHSVVFGGFSVESLKDRILDSNCETVITANEGIRGGKRIPLKENVDKAIKSCPNVHSVIVVKRTGEELNLINKVDVDYLIEKEKFEAHCSCEPMKSEDPLFILYTSGSTGKPKGVLHTTGGYLLGAAITHKHIFNYSDGDIYWCTADVGWVTGHSYIVYGPLCNGATTLMFEGVPTYPDASRFWEIIDKHQVNIFYTAPTAIRALMAFGNEPLRASSRKS

SEQ ID NO: 192722 - protein, 150 aa, Unknown
  Bacterial polypetide isolated from the Sargasso Sea
SDGCRRDKDGYYWITGRVDDVLNVSGHRMGTAEVESALVAHPDVAEAAVVGYPHNIKGQGIYCYVTLNDGIKGTDEKKGEMVKKVRANIGPVATPDLIQWAPGLPKTRSGKIMRRILRKIAENDYSNLGDTSTLAEPAVIDDLIKNRQNK

SEQ ID NO: 192723 - protein, 298 aa, Unknown
  Bacterial polypetide isolated from the Sargasso Sea
DIKKCIVVKRTGNQVNWDHERDVSYEEIVANASTKCEPEEMNAEDPLFILYTSGSTGKPKGVLHTTGGYMVYASMTHQYIFDYKPKDVYFCSADIGWVTGHSYIIYGPLSNAATTVMFEGIPTYPDFSRWWQIVDKYKVNIFYTAPTAIRALMKEGDGPVKKTSRKSLKLLGTVGEPINPEAWMWYYNVVGDSKCPIVDTWWQTETGGILIAPQPGAIDLKPGSATKPFYGIKPVIVDESGKVLKGACKGRLCMSQSWPGQMRTVYGNHKRFIETYFSQFDGKYFTGDGCRRDKDGYY

SEQ ID NO: 192724 - protein, 284 aa, Unknown
  Bacterial polypetide isolated from the Sargasso Sea
LDNISNKTAIIWEPNNPEEDVIKISYKELYEKTCQFSNAMEANGVKKGDRVIIYMPMVPEAAIAMLSCARIGAIHSIVFAGFSSNALADRINDCNAKMVLTSDGNFRGAKNIPVKSVVDDALDNCKSVSKVIVLKRTGEKINMINGRDLWWHEVIENQSSEHEAAILDSEDMLFILYTSGSTGKPKGVVHTNAGYMIYTYYSFLNVFQYKKEDIYWCTADIGWITGHSYIVYGPLLAGATTLMFEGVPTFPDAGRFWEIVDKHKVNQFYTAPTAIRALQAYGLE

SEQ ID NO: 192725 - protein, 275 aa, Unknown
  Bacterial polypetide isolated from the Sargasso Sea
GRIQDCDSSLIITADEGIRGGKPIPLKANTDAALNSCPMCKTVVVVKRTGGKIDWVEGRDYWYHDITSAQSEECQPEEMNAEDPLFILYTSGSTGKPKGVMHTSGGYIVYASMTHRYVFDYKDGEVYWCTADVGWVTGHSYILYGPLANGATTLMFEGVPNYPNSSRFWDVCDKHNVSIFYTAPTALRALMREGEGPVKATSRKSLRLLGSVGEPINPEAWLWYYNVVGDGRCPIVDTWWQTETGGILITPLPGATDLKPGSATKPFFGIKRNNR

SEQ ID NO: 192726 - protein, 317 aa, Unknown
  Bacterial polypetide isolated from the Sargasso Sea
LGSTLKTRGDQTAIIWDGDDPSISKTFTYSELHKEVCQLSNALKSEGIKKGDIVTIYMPMIPEAAVAMLACSRIGAIHSVVFGGFSPEALAGRIQDCGSNCIITADEGVRGGKFIPLKTNTDAAVTKCPTIKKVFVVRHTGGDIDWNEKLDRWYHQSISAASVDCPPEEMNAEDPLFILYTSGSTGKPKGVLHTTGGYMVYASMTHEYVFDYQEDDIYWCAADVGWVTGHSYIIYGPLANGAITTMYEGLPNWPSASRIWEIVDKHSINILYTAPTAIRALMREGNGPVKRTTANRSVFWGPLVSRLIQKLGCGITK

SEQ ID NO: 192727 - protein, 137 aa, Unknown
  Bacterial polypetide isolated from the Sargasso Sea
ITGRVDDVIIVSGHNLGTAQIESAFVSHKDVSEAAVVGYPHDIKGNGLYCYVSLKVGVDSSQELVLDLKKTIKERIGPIATPDFIHITNGLPKTRSGKIMRRILRKIASNDFENLGDISTLADPSVVDNLIEDRKNK

SEQ ID NO: 192728 - protein, 250 aa, Unknown
  Bacterial polypetide isolated from the Sargasso Sea
GVPTYPDASRFWQICEKYKVNQFYTAPTAIRALMGLGDEFVNKNDLSSIRILGTVGEPINPEAWEWYNRVVGKNKCPIVDTWWQTETGGILITPLPGATTTKPGSATLPFFGIEPAILDPNSGEEISDEECEGVLVIKDSWPGQMRTVFGDHDRFVSTYFNDYKGYYFSGDGCRRDKDGYYWITGRVDDVLNVSGHRMGTAEIESALVAHPKVNESAVVGFPHPIKGQGIYAYVSLMSGEKNSDELLKEL

SEQ ID NO: 192729 - protein, 290 aa, Unknown
  Bacterial polypetide isolated from the Sargasso Sea
VKIKWYYDGTLNASANCIDRHLKKNANKTAIIWVGDDPSDSKKISYRELHQNVCRVANGLKSIGIQKGDRVTIYLTMIPELAYVMLACARIGAVHSIIFGGFSPDSIATRINDCESDYLITADEGIRGGKIIPLKKIADDALTQCPDVKKCVVIQRTGNQVNWNNDRDISYKEMIASVSNKCEPEEMNAEDPLFILYTSGSTGKPKGVLHTTGGYMVYASMTHQYIFDYKSNDIYWCTADIGWVTGHSYIIYGPLANGATTIMFEGVPNYPDSSRWWQIVDKYKVNIFYT

SEQ ID NO: 192730 - protein, 274 aa, Unknown
  Bacterial polypetide isolated from the Sargasso Sea
MEEYQKIYDEAKEDLEGFWDSRAKVLPWTAPYSKVLDWHPPHAKWFVDGQINVSECCLDHHIASGKGDKKALVWVGEPEGERREFTYSQLHAEVCRVAAGLQKIGIKPGQVVSIYMPMTPELVIAMLACARIGAVHSVIFGGFSSEAIADRNQDAQAVAVITADGGWRRGTQLPLKENVDNALSSSAHESSTVKHVIVLRRTGQPVDMVDGRDIWWHDLIEGMPADTPAVPMDSESPLFILYTSGSTGKPKGIKHTTGGYILWAKTTTEWVFDI

SEQ ID NO: 192731 - protein, 289 aa, Unknown
  Bacterial polypetide isolated from the Sargasso Sea
SEDVFWFRKPSKILNKSNPPFYKWFGDGITNTCYNALDFHIEKGRGDKTALIYDSPITGNNTKFTFNELKKKVSRFAGALDKQGIKKGDRVIIYMPMIPEAVVAMLACGRIGAIHSVVFGGFASNELASRIDDSKAKILITASCGFEPGRTVEYRPLVDSALKLAKHKIEKVILYQRKDHEIKLNEPLEISWEQSLVNAVDKDCIEMDSNDLAYILYTSGTTGVPKGIVRDVGGHIVALKWTMKNIYNIDTDDVWWSASDIGWIVGHSYIVYAPLFKGCTTILFEGKPV

SEQ ID NO: 192732 - protein, 243 aa, Unknown
  Bacterial polypetide isolated from the Sargasso Sea
MSYLSILWWQTETGGILISPQTGAIELKPGSATKPFYGIEPVIVNKDGKILEGECEGMLCMNRSWPGQMRTVYGDHERFIDTYFSQFDGKYFTGDGCRRDSDGYYWITGRVDDVIIVSGHNLGTAEIESAFVSHPKVSEAAVVGYPHDIKGNGLYCYVSLKVGENFSDNLKEELKQLVRKKIGPIATPDLIHFTNGLPKTRSGKIMRRILRKIAANEHDQLGDTTTLADPGVVKDLIDKRLNK

SEQ ID NO: 192733 - protein, 307 aa, Unknown
  Bacterial polypetide isolated from the Sargasso Sea
KGVLHTSGGYLVYASMTHEYIFNYKENDIYWCTADIGWITGHSYIIYGPLSNGATTLMFEGVPNYPTFSRFWEIVDKHNVNIFYTAPTAIRALMREGDEFVKKTKRNSLKLLGTVGEPINPEAWKWYYEIPGNSNCPIVDTWWQTETGGILISPQTGAIDLKPGSASKPFYGIEPCIVDKNGNELTGEAEGMLCLKDSWPGQMRTVYGDHERFISTYFSQFNGKYFTGDGCKRDKDGYFWITGRVDDVIIVSGHNLGTAEIESAFVSHEKVSEAAVVGYPHDIKGNGLYCYVSLKVGEQPSEELRKN

SEQ ID NO: 192734 - protein, 258 aa, Unknown
  Bacterial polypetide isolated from the Sargasso Sea
KRTGNRINWDSSRDIWYHEMIKNVSNKCDPEEMNAEDPLFILYTSGSTGKPKGVLHTTGGYMVYASMTHQYIFNYKPKDVYWCTADIGWVTGHSYIIYGPLSNGATTIMFEGIPTYPDNSRWWQIVDKYKVNIFYTAPTAIRALMRDGDKPVKKTSRKTLKLLGTVGEPINPEAWQWYYKTVGDSRCPIVDTWWQTETGGILISPQTGAINLKPGSATKPFYGIKPVIVDKSGKVLKGEAQGRLCIAQTWPGQMRTVY

SEQ ID NO: 192735 - protein, 257 aa, Unknown
  Bacterial polypetide isolated from the Sargasso Sea
MIGAWRRGEIVPLKENVDNSLELTEFIESVVVVKRTGQEVNMKDGRDYWYEEIVEEQSAECEPEVMNAEDLLYILYTSGTTAKPKGIVHTQAGYLTGVTTTHSAVFDVKDDDIYWCAADCGWVTGHSYIVYGPLANKTTSVMYEGAPNAPDEKRLWSLVEKYKVNIFYTAPTAIRAFMKWGVEHPKAHDLSSLRLLGSVGEPINPEAWMWYHENIGNEQCAIVDTWWQTETGSIMISPLPGITSTKTRISMWTITRG

SEQ ID NO: 192736 - protein, 210 aa, Unknown
  Bacterial polypetide isolated from the Sargasso Sea
MWYYKTVGDSRCPICHYPDNSRWWQIVDKYKVNTFYTAPTAIRALMREGDGPVKKTSRKSLKLLGTVGEPINPEAWMWYYKTVGDSRCPIVDTWWQTETGGILIAPQPGAIDLKPGSATKPFYGIKPVLVDKDGKIIKGEGQGRLCMASSWPGQMRTVYGDHQRFIDTYFSQFDGKYFTGDGCKRDKDGYYWITGRVDDVIIVSGHNLEQ

SEQ ID NO: 192737 - protein, 282 aa, Unknown
  Bacterial polypetide isolated from the Sargasso Sea
GATTIMFEGVPNYPDNSRWWQIVDKYKVNTFYTAPTAIRALMREGDGPVKKTSRKSLKLLGTVGEPINPEAWMWYYKTVGDSRCPICHYPDNSRWWQIVDKYKVNTFYTAPTAIRALMREGDGPVKKTSRKSLKLLGTVGEPINPEAWMWYYKTVGDSRCPIVDTWWQTETGGILIAPQPGAIDLKPGSATKPFYGIKPVLVDKDGKIIKGEGQGRLCMASSWPGQMRTVYGDHQRFIDTYFSQFDGKYFTGDGCKRDKDGYYWITGRVDDVIIVSGHNLEQ

SEQ ID NO: 192738 - protein, 284 aa, Unknown
  Bacterial polypetide isolated from the Sargasso Sea
AYVNKSQYEKKYKLSIKDNESFWRKEGKRITWIKPYTKIKDVKYSKKEVGIKWYYDGTLNASANCIDRHLEKKGNKTAIIWVGDDPSDTKKITYKELHKKVCKAANGLRSIGIQKGDRVTIYLTMIPELAYVMLACARIGAIHSIIFGGFSPDSIATRINDCESDYVITADEGVRGGKIIPLKKIADEAMMQCPNVKKCVVVKRTGNQINWDNERDVSYEEITSNASDKCPPEEMNAEDPLFILYTSGSTGKPKGVLHTTGGYMVYASMTHQYIFDYKNRDVYW

SEQ ID NO: 192739 - protein, 209 aa, Unknown
  Bacterial polypetide isolated from the Sargasso Sea
MMRTIYGDHDRFESAYFGDYPGRYFTGDRARRDEDGYYWITGRTDDVINVSGHRLGTAEVEAAIMTHPGIAKAAVVGFPHDVKGTGIYAFVVPKDSAEGAAAAAAASEKELQGAVRAAVRKVIGPVASPDVVQVTRAVPETRSGKIMRRILRKVAEGETDFGDTSTLLDPTIVPELISGHYDIFPKAEIVEIVEINGAESDQGVASSRG

SEQ ID NO: 192740 - protein, 254 aa, Unknown
  Bacterial polypetide isolated from the Sargasso Sea
NEHFWKKEGKRINWIKPYTKVKDVKYSKKEVNIKWYYDGTLNASVNCIDRHLGKKENKTAIIWVGDDPADSKKITYKELHKNVCKAANGLKSIGVQKGDRVTIYLTMIPELAYTMLACARIGAVHSIIFGGFSPDSIATRINDCESDYVITADEGVRGGKLIPLKKIADEAMMQCPNVKKCVMVKRTGNQVNWDNERDVSYEEIISNVSDKCSPEEMNAEDPLFILYTSGSTGKPKRVLHTTGGYMVYASMTHQ

SEQ ID NO: 192741 - protein, 110 aa, Unknown
  Bacterial polypetide isolated from the Sargasso Sea
HPKVAEAAVVGYPHDIKGNGLYCYVTLNAGEKPSGDLERELKLWVRKQIGPIATPDLIQFAPGLPKTRSGKIMRRILRKIAANEHDQLGDTTTLADPSVVESLVENRQNK

SEQ ID NO: 192742 - protein, 322 aa, Unknown
  Bacterial polypetide isolated from the Sargasso Sea
ADRRCSSIIFGGFSPDSIATRISDCESEYLITADEGVRGGKIIPLKKIADEALDQCPGVKKCVVVERTGNQVDWNNERDVSYKELISSVPAKCDPEEMNAEDPLFILYTSGSTGKPKGVLHTTGGYMVYASMTHQYIFDYKANDIYWCTADIGWVTGHSYIIYGPLSNGATTIMFEGVPNYPDSSRWWQIVDKYKVNIFYTAPTAIRALMREGDKPVKKTSRKTLKLLGTVGEPINPEAWMWYFKTVGDSKCPIVDTWWQTETGGILIAPQPGAIDLKPGSATKPFYGIKPVLVDKDGKVVKGEGKGRLCMASSWPGQMRTV

SEQ ID NO: 192743 - protein, 267 aa, Unknown
  Bacterial polypetide isolated from the Sargasso Sea
IGWVTGHSYIIYGPLSNGATTIMFEGVPNYPDSSRWWQIVDKYKVNIFYTAPTAIRALMREGDGPVKKTSRKSLKLLGTVGEPINPEAWMWYYKTVGEKKCPIVDTWWQTETGGILISPQPGAINLKPGSATKPFYGIKPVIVDESGKVLKGACKGRLCMAQSWPGQMRTVYGDHKRFIDTYFSQFDGKYFTGDGCRRDKDGYYWITGRVDDVIIVSGHNLGTAEIESAFVAHSKVAEAAVVGFPHEIKGNGLYCYVTLNAGENPSG

SEQ ID NO: 192744 - protein, 145 aa, Unknown
  Bacterial polypetide isolated from the Sargasso Sea
RDKDGYYWITGRVDDVIIVSGHNLGTAEIESAFVAHPKVAEAAVVGYPHDIKGNGLYCYVTLNVGEEPNGELERDLKLWVRKQIGPIATPDLIHFSPGLPKTRSGKIMRRILRKIAANEHDQLGDTTTLADPSVVKSLVKERKNI

SEQ ID NO: 192745 - protein, 266 aa, Unknown
  Bacterial polypetide isolated from the Sargasso Sea
WSRGNTALIYDSPVTSNIKKFSFTELRDEVALCAGALNQLGVVKGDRVIIYMPMIPETIIAMLACARIGAIHGVVFGGFASAELAVRIDDARPKVIISASCGIEINRIIPYMPLLNEAIDIATHKPGNVIVVQRPELQSELEKARDLNWEDALASATPSECLSLKSTDPLYILYTSGTTGLPKGVVRDNGGHAVALNFTMKAIYNVDVGDVYWAASDVGWVVGHSYIVYGPLLRGCTTVLYEGKPVGTPDAGAFWRVISDHKVKAF

SEQ ID NO: 192746 - protein, 325 aa, Unknown
  Bacterial polypetide isolated from the Sargasso Sea
DVWYHDMIKDVPSNCEPEEMNAEDPLFILYTSGSTGKPKGVLHTTGGYMVYASMTHQYIFNYKPNDIYWCTADIGWVTGHSYIIYGPLANGATTIMFEGVPNYPDSSRWWQIVDKYKVNTFYTAPTAIRALMREGDGPVNKTSRKSLKLLGTVGEPINPEAWMWYYKTVGNSNCPIVDTWWQTETGGILIAPQTGAIPLKPGSATKPFYGIKPVLVNKDGREIKGEGEGRLCIAQSWPGQMRTVYGDHQRFIDTYFSQFDGKYFTGDGCKRDKDGYYWITGRVDDVIIVSGHNLGTAEIESAFVAHPKVAEAAVVGYPHDIKSNG

SEQ ID NO: 192747 - protein, 298 aa, Unknown
  Bacterial polypetide isolated from the Sargasso Sea
ITWMKKYTKIKDVKYSKDEVKIKWYYDGTLNASANCIDRHLKKNPSKTAIIWVGDDPADTKKISYKELHQNVCKAANGLKSLGIQKGDRVTIYLTMIPELAYIMLACARIGAVHSIIFGGFSPDSIATRITDCESEYLITADEGVRGGKIIPLKKIADEALDQCPGVKKCVVVERTGNQVNWNNERDVSYKDLISSVPSKCEPEEMNAEDPLFILYTSGSTGKPKGVLHTTGGYMVYASMTHQYIFDYKANDIYWCTADIGWVTGHSYIIYGPLSNGATTIMFEGVPNYPDSSRWWQI

SEQ ID NO: 192748 - protein, 218 aa, Unknown
  Bacterial polypetide isolated from the Sargasso Sea
GVRKGDRVTIYLTMIPELAYTMLACARIGAVHSIIFGGFSADSITGRINDCKSDYIITADQGVRGGKIIHLKETVDEALLNCPNVKKCVVVKRTGNRINWDESRDVWYHDITKKASKNCEPEEMNAEDPLFILYTSGSTGKPKGVLHTTGGYMVYASMTHQYIFNYKPKDIYWCTADIGWVTGHSYIIYGPLSNGATTIMSEGIPNYPDWSRWWQDSR

SEQ ID NO: 192749 - protein, 254 aa, Unknown
  Bacterial polypetide isolated from the Sargasso Sea
KLNEIYENSIKNPEKFWLEASKDIFWFKKPTKILNKSNPPFYKWFEDGVTNTCYNALDIHIDQGRGKKTALIYDSPITGNKSQFTYEELKSKVSKFAGALKAQGANKGDRVIIYMPMIPEAVVAMLACARIGAIHSVVFGGFASNELASRIDDSKAKILVTASCGFEPGRTVEYKPLVDEAIKIASHKIEKMILFQRPGHEVKLNAPTEVNWEEVVSNAKDTDCVEMNSNEFAYILYTSGTTGTPKGIVRDIGG

SEQ ID NO: 192750 - protein, 148 aa, Unknown
  Bacterial polypetide isolated from the Sargasso Sea
GCRRDKDGYYWITGRVDDVIIVSGHNLGTAEIESAFVSHKDVSEAAVVGYPHDIKGSGLYCYVSLKVGIESSDDLLLDLKKTIREKIGPIATPDFIHITSGLPKTRSGKIMRRILRKIASNDFSNLGDTSTLADPSVVNDLIENRKNK

SEQ ID NO: 192751 - protein, 262 aa, Unknown
  Bacterial polypetide isolated from the Sargasso Sea
ITADAGYRRGVPSALKTNVDAALENGAQTVEHVVVVNRCDTEIQMIEGRDHWWHELVEKVAPDCPAESLDSEDLLYLLYTSGTTAKPKGIMHTTAGYLTQVMYTHRYTFDLNREEDIYWCAADIGWVTGHSYIVYGPLANGCTSVIYEGTPDTPRSDFRSDDSSEWSKDRLWDIIERYGVTQLYTAPTAIRTFMKWGAQEPASHDLSSLRVLGTVGEPINPEAWMWYHENIGGEKCPIVDTWWQTETGGHMITPLPGLTTTK

SEQ ID NO: 192752 - protein, 225 aa, Unknown
  Bacterial polypetide isolated from the Sargasso Sea
MSDKFNKIYDHSIKNPEKFWQEAAEDIFWFKKPTKILNKSNPPFYKWFEDGVTNTCYNALDIHIDQGRGKNIALIYDSPITGNKSKFTYEELRSKVGKFAGALKNQGVNKGDRVIIYMPMIPEAVIAMLGCARIGAIHSVVFGGFASTELASRIDDSKAKLLVTASCGFEPGRTVEYKPLVDEAIKIANHKIKKMILFQRPGHEVKLNAPLEISWDEAVSIAEPA

SEQ ID NO: 192753 - protein, 307 aa, Unknown
  Bacterial polypetide isolated from the Sargasso Sea
KPYTKIKDVKYSKSDVKIKWFYDGTLNASANCIDRHLKKNKDKTAIIWVGDDPKVQKKISYKELHKEVSKAANGLRELGVKKGDRVTIYLTMIPELAYTMLACARIGAVHSIIFGGFSPDSISGRINDCESDYLITADEGVRGGKIIPLKSIADEALVNCPNVKKCVVVKRTGNRINWDERRDVWYHEMTKKVSNKCEPEEMNAEDPLFILYTSGSTGKPKGVMHTTGGYMVYASMTHQYIFNYKPKDIYWCTADIGWVTGHSYIIYGPLSNGATTIMFEGIPTYPDSSRWWQIVDKYKVNIFYTAP

SEQ ID NO: 192754 - protein, 284 aa, Unknown
  Bacterial polypetide isolated from the Sargasso Sea
KITKSKIKNLNKTELIYKTKSEWIKKALVNKSAYEKKYNSSIKDNDGFWKKEGKRITWIKPYTKIKDVKYSKSNVHIKWYYDGTLNASVNCIDRHLKKNKDKTAIIWVGDDPKVSKKITYKQLHHEVSKIANGLKEIGVKKGDRVTIYLTMIPELIFTMLACARIGAIHSIIFGGFSSDSIAGRINDCKSDFVVTADEGVRGGKTIPLKSITDEALIHCPNVKKCVVVKRTGNYINWDQQRDVWYHEIIKNVSSNCEPEEMNAEDPLFILYTSGSTGKPKGVCT

SEQ ID NO: 192755 - protein, 274 aa, Unknown
  Bacterial polypetide isolated from the Sargasso Sea
WVTGHSYIIYGPLSNGATTIMFEGIPTYPDNSRWWQIVDKYKVNIFYTAPTAIRALMRDGDKPVKRTSRKTLKLLGTVGEPINPEAWQWYYKTVGDSRCPIVDTWWQTETGGILISPQTGAINLKPGSATKPFYGIKPVIVDKSGKVLKGEAQGRLCIAQSWPGQMRTVYGDHKRFIETYFSQFDGKYFTGDGCRRDKDGYYWITGRVDDVIIVSGHNLGTAEIESAFVAHPRVAEAAVVGFPHDIKGNGLYCYVTLNAGETHSLDLERELKLL

SEQ ID NO: 192756 - protein, 163 aa, Unknown
  Bacterial polypetide isolated from the Sargasso Sea
DTYFSQFKGKYFTGDGCRRDKDGFYWITGRVDDCINVSGHLLGTAEIESAFVEHELVSEAAVVGYPHEIKGQGIYAYVTTNTGVEVTEDLKKELVMWIREKIGPIATPDKLQFSPGLPKTRSGKIMRRILRKIASNEQDQLGDTSTLADPNVVQSLIDGSKDI

SEQ ID NO: 192757 - protein, 134 aa, Unknown
  Bacterial polypetide isolated from the Sargasso Sea
GYIWILGRVDDVISVSGHRLGTMEIESALVSHRSVAEAAVVGRRDDLKGEVVVAFVSLEKDVNSSSELVEDLKKHVVNEIGIIAKPEKIIISDSLPKTRSGKIMRRILRSLAAGEKISGDISTLEDSSVLEKLK

SEQ ID NO: 192758 - protein, 221 aa, Unknown
  Bacterial polypetide isolated from the Sargasso Sea
KYNVNVFYTAPTAIRALMSQGDEPVLKTKRDTLRVLGTVGEPINPEAWDWYYKVVGNGSCDVIDTWWQTETGSVLISPISGVTPVKPGSATLPFFGVKPAIYDEEGQALEGAASGNLVIESSWPSQIRSVYGDHERMISTYFKTYEDIYFTGDGARRDEDGYFWITGRVDDVLNVSGHRLGTAEIESALVLHDSVAEAAVVGFQHPIKGQGIYAFVTLMKG

SEQ ID NO: 192759 - protein, 240 aa, Unknown
  Bacterial polypetide isolated from the Sargasso Sea
IYDSPITGNKDKLSFTQLKDKVSKFAGALSNQGVKKGDRVIIYMPMIPEAVVAMLACGRIGAIHSVVFGGFASNELASRIDDSKAKILVTASCGFEPGRTVEYRPLIDGALKLAKHKVEKVIFFQRNGHEIKLNTPIEISWDESLSNAKDTDCVEMGSNEFAYILYTSGTTGVPKGIVRDIGGHIVALKWTMKNIYNIDTDDVWWSASDIGWIVGHSYIVYAPLFKGCTTVLFEGKPVGT

SEQ ID NO: 192760 - protein, 290 aa, Unknown
  Bacterial polypetide isolated from the Sargasso Sea
PTKILNKSNPPFYKWYEDGVTNTCYNALDIHIDQGRGQKTALIYDSPITGSKSKLTYEELKLKVSKFAGALKAQGINKGDRIIIYMPMIPEAVVAMLACARIGAIHSVVFGGFASNELASRIDDSKAKLLITASCGFEPGRTVEYKPLVDEAIKIANHNIEKMILFQRPGHEVKLNAPSEISWEEVMNNASDTDCVEMNSNEFAYILYTSGTTGTPKGIVRDIGGHIVALKWTMKNIYNIDTDDVWWSASDIGWIVGHSYIVYAPLFKGCTTVLFEGKPVGTPDAGAFWK

SEQ ID NO: 192761 - protein, 278 aa, Unknown
  Bacterial polypetide isolated from the Sargasso Sea
IRALMREGDEHVIKTNRKSLKLLGTVGEPINPEAWKWYYEVVGDSRSPIVDTWWQTETGGILIAPQTGAIELKPGSATKPFFGIKPVIVDKNGKELKGECEGMLCMMQSWPGQMRTVYGNHKRFIETYFSQFDGKYFTGDGCKRDKDGYYWITGRVDDVIIVSGHNLGTAEIESAFVSHQKVSEAAVVGYPHDIKGNGLYCYISLKVGEKPSEDLKKELINVVRKKIGPIASPDIIHFTSGLPKTRSGKIMRRILRKIAANEQDSLGDISTLADPSVV

SEQ ID NO: 192762 - protein, 256 aa, Unknown
  Bacterial polypetide isolated from the Sargasso Sea
MATKPEYEKKYKKSLKNNDEFWKKEGKRITWIKPYKKIKNVKYSKDEVRIKWYEDGTLNASANCIDRHLKDKKDKTAIIWVGDDPKDTKKISYKQLHKEVSKTANALKELGVKKGDRVTIYLTMIPELAFSMLACARIGAIHSIIFGGFSADSIAGRIDDCKSDYVITADEGIRGGKIIPLKYTVDEALAKCRSIKKCIVVKKTGNYINWNNERDVWYHKITKNVSSQCNPEEMSAEDPLFILYTSGSTGKPKGVL

SEQ ID NO: 192763 - protein, 299 aa, Unknown
  Bacterial polypetide isolated from the Sargasso Sea
YKSLKDYSEEHKRSLKENDVFWSEKAERIEWFKKWKKVSDIDFTLPKIEWFIGGKLNVSYNCIDRHIKNGKGDEIAFYWEGNDPSESKKLTYNQLYDKVCRFSNVLKNLNISKGDRVCLYMQMIPELPIAMLSCARIGAVHSVVFGAFSSDSLRDRINDSKCKLLITQDTGVRGTKNNIPMKSNADVAIEQSPSIENTIVVMRTGEKVHMKNKRDHWWHEQIDSVKPHCEPEYMDAEDPLFILYTSGSTGTPKGVMHTTGGYLLYADYTFSSIFDHKSSDIYWCTADIGWDTGHSYITY

SEQ ID NO: 192764 - protein, 164 aa, Unknown
  Bacterial polypetide isolated from the Sargasso Sea
MKDIFNKIYQESIQNPEKFWQNVSEDIFWFRKPSKILNKSNPPFYKWFEDGVTNTCYNAIDAHIDKGNGDKIALIYDSPITNNKAKFTYNELREKISKFAGALHNRGIKKGDRVIIYMPMIPEAVIAMLACGRIGAIHSVVFGGFASNELASRIDDSKAKDFNY

SEQ ID NO: 192765 - protein, 249 aa, Unknown
  Bacterial polypetide isolated from the Sargasso Sea
DPKVQKKISYKELHKEVSKAANGLKELGVKKGDRVTIYLTMIPELAYTMLACARIGAVHSIIFGGFSPDSISGRINDCESDYLITADEGVRGGKIIPLKSIADEALVNCPNVKKCVVVKRTGNRINWDERRDVWYHELTKKVSNKCEPEEMNAEDPLFILYTSGSTGKPKGVMHTTGGYMVYASMTHQYIFNYKPKDIYWCTADIGWVTGHSYIIYGPLSNGATTIMFEGIPTYPDSSRWWQIVDKFKV

SEQ ID NO: 192766 - protein, 180 aa, Unknown
  Bacterial polypetide isolated from the Sargasso Sea
SWPSQIRSVYGDHQRMIDTYFSIYEDIYFTGDGARRDEDGYYWITGRVDDVLNVSGHRLGTAEIESALVLHPKVAEAAVVGFDHPIKGQGIYAFVTLMMEESFSDNLNNELKHFVAKEIGAIAKPDLIQNAPGLPKTRSGKIMRRILRKIAEGDLTNLGDTSTLADPSVVKSLIANKMNI

SEQ ID NO: 192767 - protein, 293 aa, Unknown
  Bacterial polypetide isolated from the Sargasso Sea
KVQNKCEPEEMNAEDPLFILYTSGSTGKPKGVMHTTGGYMVYASMTHQYIFNYKPKDIYWCTADIGWVTGHSYIIYGPLSNGATTIMFEGIPTYPDSSRWWQIVDKYKVNIFYTAPTAIRALMREGDKPVKKTSRKSLKLLGTVGEPINPEAWEWYYKTVGDSNCPIVDTWWQTETGGILISPQTGAINLKPGSATKPFYGIKPVIVNKEGKVLKGEAEGRLCIAQSWPGQMRTVYGDHQRFIDTYFSQFDGKYFTGDGCRRDKDGYYWITGRVDDVIIVSGHNLGTAEIESA

SEQ ID NO: 192768 - protein, 320 aa, Unknown
  Bacterial polypetide isolated from the Sargasso Sea
FWAKREKEYHGIKKYTKIKDVKYSKDEVKIKWFYDGTLNASANCIDRHLKKNPSKTAIIWVGDDPSDTKKISYKELHQNVCKAANGLKSLGVQKGDRVTIYLTMIPELAYIMLACARIGAVHSIIFGGFSPDSIATRITDCESEYLITADEGVRGGKIIPLKKIADEALDQCPAVKKCVVVERTGNQVDWNNERDVSYKELISSVPSKCDPEEMNAEDPLFILYTSGSTGKPKGVLHTTGGYMVYASMTHQYIFDYKSNDIYWCTADIGWVTGHSYIIYGPLSNGATTIMFEGVPNYPDSSRWWQIVDKFKVNIFYTAPT

SEQ ID NO: 192769 - protein, 218 aa, Unknown
  Bacterial polypetide isolated from the Sargasso Sea
KLKPGSASKPFYGIEPCIVDKDGNELEGECEGMLCMKRSWPGQMRTVYGDHKRFIDTYFSQFDGKYFTGDGCKRDKDGYYWITGRVDDVIIVSGHNLGTAEIESAFVSHKDVSEAAVVGYPHDIKGNGLYCYVSLKVGVEKSEELVLNLKKTIREKIGPIATPDFIHVTAGLPKTRSGKIMRRILRKIASNDFENLGDTSTLADPSVVNNLIENRENK

SEQ ID NO: 192770 - protein, 222 aa, Unknown
  Bacterial polypetide isolated from the Sargasso Sea
DCKSDYIITADEGVRGGKIIHLKDTVDEALLNCPNVKKCVVVKRTGNRINWDESRDVWYHDITKKVSKNCEPEEMNAEDPLFILYTSGSTGKPKGVLHTTGGYMVYASMTHQYIFNYKPKDIYWCTADIGWVTGHSYIIYGPLSNGATTIMSEGIPNYPDWSRWWQIVDKYKVNIFYTAPTAIRAMMREGDGPVKKTSRKSLKLLGTVGEPINPEAWQWYFK

SEQ ID NO: 192771 - protein, 228 aa, Unknown
  Bacterial polypetide isolated from the Sargasso Sea
ILISPQSGAIDLKPGSATKPFYGIKPEIVDKDGKVLKGEAQGRLCISHSWPGQMRTVYGDHNRFIETYFSQFDGKYFTGDGCRRDKDGYYWITGRVDDVIIVSGHNLGTAEIESAFVAHSKVAEAAVVGYPHDIKGNGLYCYVTLNVGEEPNGDLERELKLWVRKQIGAIATPDFIQFSPGLPKTRSGKIMRRILRKIAANEHEQLGDTTTLADPGVVKSLVDNRKNI

SEQ ID NO: 192772 - protein, 246 aa, Unknown
  Bacterial polypetide isolated from the Sargasso Sea
GENCAIVDTWWQTETGSIMISPLPGVTSTKPGSACGPLPGIESIVIDNDGKEVGKGEGGFLAVKSPWPSMLRTVYGDDQRYLDTYWSQHDGLYFAGDGAKYDDEGYIWLLGRVDDVMNISGHRISTAEVESALVSHQAVAEAAVIGRSDEITGEAIAAFVSLIGTDDGNEDLIADLRQHVSDKIGPIAKPKSIVITADLPKTRSGKIMRRLLKDISEERKLGDVTTLANEDIVSELQTRSSESDDE

SEQ ID NO: 192773 - protein, 213 aa, Unknown
  Bacterial polypetide isolated from the Sargasso Sea
MQLSHFYGIKPVIVDKDGKALKGEAEGRLCIAQSWPGQMRTVYGDHQRFLDTYFSQFDGKYFTGDGCRRDKDGYYWITGRVDDVIIVSGHNLGTAEIESAFVAHEKVAEAAVVGYPHDIKGNGLYCYVTLNSGEKSSLDLERDLKLWVRKQIGAIATPDLIQFAPGLPKTRSGKIMRRILRKIAANEHGQLGDTTTLADPSVVDKLVDNRKNI

SEQ ID NO: 192774 - protein, 150 aa, Unknown
  Bacterial polypetide isolated from the Sargasso Sea
DGCRRDKDGYYWITGRVDDVIIVSGHNLGTAEIESAFVAHPKVAEAAVVGFPHSIKGNGLYCYVTLNAGENPTGDLERDLKLWVRKQIGPIATPDVIQFAPGLPKTRSGKIMRRILRKIAANEPDNLGDTTTLADPSVVASLVENRQNKG

SEQ ID NO: 192775 - protein, 292 aa, Unknown
  Bacterial polypetide isolated from the Sargasso Sea
YIVYGPLANGATTLMFVGVPNYPDASRFWQVVDKHKVNIFYTAPTALRALMREGEGPVKKTDRSSLKLLGSVGEPINPEAWIWYHKVVGDERCPIVDTWWQTETGGILISPLPGAIDQKPGSATKPFFGIKPEILDAEGNILEGACEGSLCLADSWPGQMRTVYGDHDRFIETYFSQFEGKYFTGDGCKRDEDGYYWITGRVDDVINVSGHRMGTAEVESALVAHPKVSEAAVVGYPHDIKGQGIYAYVTLNAGEEPNDELYKELIAWVRKEIGPIASPDLIQWAPGLPKTR

SEQ ID NO: 192776 - protein, 225 aa, Unknown
  Bacterial polypetide isolated from the Sargasso Sea
KEYSLMYDNSLQNNDEFWADQAQRVDWIKKFTKIKDIKYSKDDVSIKWFEDGNLNVSYNCIDRHAENNPDKVAIIWEGDDPNETKKITYRDLLINVSKAANVLKKIGVKKGDRVTIYLTMIPELAYIMLACARIGAIHSIIFGGFSAESIAGRIIDCKSEYVVTADEGVRGGKTIPLKLTTDKALETCPDVKKCLIIKRTNKEIELKEDRDLFYDDVIKEVDSIC

SEQ ID NO: 192777 - protein, 174 aa, Unknown
  Bacterial polypetide isolated from the Sargasso Sea
MTQEIYNPIPGFSNPHIKDFDEYLSLYKESIENPEKFFGDLAKENISWIEDFKEVHNSEFQETKWFVGGKTNITLNCIDRHLEKNGDKVALIWEGDEPGNSKEITFKELHSEVCRFANILKTLQIKKGSRVCIYMPMIPEAAFAMFACARIGAIHSVVFGGFSPESLKDRILDA

SEQ ID NO: 192778 - protein, 262 aa, Unknown
  Bacterial polypetide isolated from the Sargasso Sea
MSENEKFEVSSEWSAEAQINNDKYNEWYKNSLSNNEEFWSEHGKRIDWIKPYTKVKDVSYNKDNFSIKWYYDGTLNASSNCIDRHLKNKADQTAIIWEGDDPADSKQISYKELHSEVSKLANGMKSLGVKKGDRVTIYMPMIPEAAYAMLACTRIGAIHSVVFGGFSPDSLAGRISDCKSDIVITADEGVRGGKAIPLKKNTDEAISISGGVRHCIVVKRTGGDIGWVNERDVWYHELTEKESDDCPPEEMSAEDPLFILYT

SEQ ID NO: 192779 - protein, 237 aa, Unknown
  Bacterial polypetide isolated from the Sargasso Sea
MSNNEKFDVSADWSASAQIDQDKYNEWYETSFNNNEDFWNEHGKRIEWMKPYTKVKDVSFNKDNFSIKWYEDGVLNASANCIDRHLKDKGDQTAIIWEGDDPKDSKHITYNELHKEVSKLSNGMKSLGVKKGDRVTIYMPMIPEAAYAMLACTRIGAIHSVVFGGFSPDSLAGRISDCKSDIVITADEGLRGGKPIPLKKNTDDAINISGGVRHCIVVKRTGGAIDWHEDRDVWYHE

SEQ ID NO: 192780 - protein, 236 aa, Unknown
  Bacterial polypetide isolated from the Sargasso Sea
WWQTETGGIMITPLVGAIDMKPGSATLPFFGIEPVLVDDNNNEIKGPGEGSLCINMSWPGQMRTVYGDHKRFIDTYFTQYPGRYFSGDGCRRDEDGYYWITGRVDDVINVSGHRLGTAEVESALVLHKDVSEAAVVGYPHKIKGQGLYAFVALNKNVKPSTVLENELLQWVKQEIGSIAKPDFLQFTEGLPKTRSGKIMRRILRKISVNDYNNLGDTSTLADSTVVEGLIKNRKNI

SEQ ID NO: 192781 - protein, 313 aa, Unknown
  Bacterial polypetide isolated from the Sargasso Sea
TITLNIWAKLARAHLHWFLPFNNILDESNAPNYEWFNDGEINASFNSLDINANKNPEKTAIIFETEDGNSERITYKDLLLRTSQFANGLKKLGVVPMDRVVIYMPMCPEAVIAMQACARIGAIHSVVFGGFSSNALKDRIEDAQSKIVITADGAYRGGSVIPLKQATDEAVTNSLHKVKNVVVFERTGEKIEFDQERDVWWTDLISDCPSDCDPEPLNAEHPLFILYTSGSTGKPKGIQHSTAGYILHAKTTFSWVFDINEDDVFWCTADVGWITGHTYVAYGPLLAGATILIYEGAPTFPDVGRFLEDLRKA

SEQ ID NO: 192782 - protein, 223 aa, Unknown
  Bacterial polypetide isolated from the Sargasso Sea
MEQKIINNIDSLSQEHRRFSASNDFRIQANIQNNHLYDTAATDRLQFWHERAQELHWFTPWQTVLDWNRPHAKWFQEGTLNASYNCLDVHLTTHRRDKVAIIWSGEDGKQQQVTYYELWESVTIAAQCLKTHFNVQSGDRVTLYMPMTIDAVVMVLACARIGAIHSVVFGGFSAQALYDRIVDSGSTLVITAYGGYRRGEVLHLKATVDEALSLGDSPVKSVL

SEQ ID NO: 192783 - protein, 295 aa, Unknown
  Bacterial polypetide isolated from the Sargasso Sea
KNLGVKKGDRVTIYLTMIPELAYTMLACARIGAVHSIIFGGFSSESIAGRITDCKSEFVITADEGIRGGKTIPLKKIMDEALKNSSNIKKCIVVKRTGNFVNMIKERDVYLDDILKDVSDHCEVVTMNAEDPLFILYTSGSTGKPKGVLHTSGGYLVYASMTHEYIFNYKEKDIYWCTADIGWITGHSYIIYGPLANGATTLMFEGVPNYPSFSRFWEIVDKHKVNIFYTAPTAIRALMREGDGPVKKTKRDSLKLLGTVGEPINPEAWKWYFEVPGNSNCPIVDTWWQTETGGI

SEQ ID NO: 192784 - protein, 186 aa, Unknown
  Bacterial polypetide isolated from the Sargasso Sea
MKNNFKEIYNDSLNKPEEFWKNISEDVFWFKKPNKILNKSNPPFYKWFEDGITNSCYNALDLHIDQGRGDKTALIYDSPITGNKAKFTFNQLKQKVSKFAGALVKQGITKGDRIIIYMPMIPEAVVAMLACGRIGAIHSVVFGGFASNELASRIDDSKAKILITASCGVEPGRTVEYRPLVDGALK

SEQ ID NO: 192785 - protein, 252 aa, Unknown
  Bacterial polypetide isolated from the Sargasso Sea
MSESTIEEFYVEDRTFPPDPDFVKKALINDSSHHDEAISDYESFWARQARDLITWDEDFHTTLEWELPFAKWFVGGRLNISYNCLDRHVEAGYGDRIAYFWEGEPGDTRKITYQDLLVEVSKFANVLKEIGLNKGDRVAIYMPMIPELPIAMLACARIGLVHSVIFGGFSPDAIIDRCEDAQARLIITADAGYRRGIPSPLKPNVDKALESGASSVENVIVVNRCDLETQMEKGRDFWWHDLVDKADSNCPP

SEQ ID NO: 192786 - protein, 107 aa, Unknown
  Bacterial polypetide isolated from the Sargasso Sea
VAEAAVVGYPHDIKGNGLYCYVTLNVGEEPNGELERDLKLWVRKQIGPIATPDLIHFSPGLPKTRSGKIMRRILRKIAANEHDQLGDTTTLADPSVVKSLVSERKNI

SEQ ID NO: 192787 - protein, 286 aa, Unknown
  Bacterial polypetide isolated from the Sargasso Sea
MFEGVSNYPDSSRWWQIVDKYKVNTFYTAPTAIRALMREGDGPVNKTTRKSLKLLGTVGEPINPEAWMWYYKTVGNSKCPIVDTWWQTETGGILIAPQTGAIPLKPGSATKPFYGIKPVLVNKDGKEIKGEGEGRLCIAQSWPGQMRTVYGDHQRFIDTYFSQFDGKYFTGDGCKRDKDGYYWITGRVDDVIIVSGHNLGTAEIESAFVAHPKVAEAAVVGYPHDIKGNGLYCYVTLNAGESETGDLDRELKLWVRKQIGPLATPDLIHFTPGLPKTRSGKIMRRI

SEQ ID NO: 192788 - protein, 264 aa, Unknown
  Bacterial polypetide isolated from the Sargasso Sea
TVGEPINPKAWVWYQEKIGNGKCPIVDTWWQTETGANMIAPLPGVTPTIPGTCTKPLPGIVAGIIDSDGNEILSKNQGGNLVIKKPWPSMLRGIWGDKNRYISTYWKKYDNKYYVTGDTARYDEYGNIWIMGRSDDVVNISGHRLGTMEIESAIVSHPFVTESAVVSYKHEIKGEAIHAFITLGDEYSKNTGSETAEEIRIWVKDKIGSIAKPDKISFSTSLPKTRSGKIMRRLLRNIARGEDISGDTSTLENEDILDQLKKIL

SEQ ID NO: 192789 - protein, 302 aa, Unknown
  Bacterial polypetide isolated from the Sargasso Sea
KEVCKAANALKTIGVKKGDLVCIYMPMIPEAMFAMLACARIGAPHSVVFGGFSSEALKDRIIDGNARFVITADGGFRKDKVIELKKAVDAAIESGADKVVEKVIVVQRSQKNIAMVDNRDFWWHELVKDQKDHCEPEIMNSEDRLFILYTSGSTGKPKGVVHTTGGYNLWSHLTFKWIFDLKDDDIYWCTADVGWITGHSYIVYGPLSNGATTLMYEGVPRPSNLGAFWEIVQKYKVSIFYTAPTAIRAFMKSGREIPDKYNLESLRLLGTVGEPINPEAWMWYKDVIGKDKCPIVDTWWQT

SEQ ID NO: 192790 - protein, 233 aa, Unknown
  Bacterial polypetide isolated from the Sargasso Sea
TETGGILISPLPGAIAQKPGSATKPFFGIQPEIMDAEGNILEGACEGSLCLADSWPGQMRTVYGDHKRFIETYFSQFDGKYFTGDGCKRDEDGYYWITGRVDDVINVSGHRMGTAEVESALVAHPKVSEAAVVGYPHDIKGQGIYAYVTLNAGEETSDELYKELVAWVRKEIGPIASPDLIQWAPGLPKTRSGKIMRRILRKIAENEYSNLGDTSTLAEPAVVDDLIDNRMNK

SEQ ID NO: 192791 - protein, 295 aa, Unknown
  Bacterial polypetide isolated from the Sargasso Sea
MALENLDWFEKFSSVHNESFSDAKWFEGGKINVAHNCIDRHLKTNSEKTALIWEGDDPNKSQEISYKKLHEEVCRLANILKKLGAKKGSRVCIYMPMIPEAIYSMLACARIGAIHSVVFGGFSAESLKDRILDADCRILITADEGVRGGKSIPLKSNVDKALESCPQVSACLVVRRTGAKINLVHERDHYYDEIYKTVSADCECEEMDAEDPLFILYTSGSTGKPKGVMHTTGGYLLGAHMSFKYLFGYKEADNYWCTADVGWITGHTYIVYGPLSNAATTLAFEGIPTYPSASR

SEQ ID NO: 192792 - protein, 207 aa, Unknown
  Bacterial polypetide isolated from the Sargasso Sea
ISGMPAYRALAAEAENDYEGFWARLAREGLAWHKPFTKVLDESNAPFYKWFDDGELNASYNCLDRHVEAGNGERVAVIFEADDGTVTRVTYADLLARVSRFANALKKRGIGKGDRVVIYIPMSIEGIVAMQACARIGATHSVVFGGFSAKSLNERLVDVGATALVTADEQARGGKTLPLKSIADEAIALGGCEAVKSVIVYRRTGGK

SEQ ID NO: 192793 - protein, 224 aa, Unknown
  Bacterial polypetide isolated from the Sargasso Sea
SSSGAIDLKPGSASKPFYGIEPCIVNKDGEEQSGEAEGMLCLQNSWPGQMRSVYGDHKRFISTYFSQFDGKYFTGDGCRRDNDGYYWITGRVDDVIIVSGHNLGTAEIESAFVSHPKVSEAAVVGYPHDIKGNGLYCYVSLIVGTESNEDLKKELVQTIRSKIGPIATPDFIHFTDGLPKTRSGKIMRRILRKIAANEEDQLGDITTLADPSVVDKLINNKLNN

SEQ ID NO: 192794 - protein, 185 aa, Unknown
  Bacterial polypetide isolated from the Sargasso Sea
MSYQKVYDDWKQDPLEFWRNQAKEISWYKGPDKILDDSKKPFYNWFTGGAINACYNCVDRHIENGKGEDIAIIYDSAMCEKVRKISYLELKQNVAKLAGALKGKGIKKGDRVIIYMPMIPEAVVAMLACARLGAIHSVVFGGFASSELAVRIDDCNAKAVIAGSCGLEPGRIVPYKPLLDEAILL

SEQ ID NO: 192795 - protein, 248 aa, Unknown
  Bacterial polypetide isolated from the Sargasso Sea
PESAVAMLACARIGAPHTVVFGGFSAESLKERINDCGAKVVVTADGGYRRGKKIPLKDAVDGALSGGCKSVKSVIVAKRTGQDVKMSSKDHWYHEEMAKASDQFEAVELDSEHPLFILYTSGSTGKPKGILHTTAGYLLGAHLSTKYVFDLKEQDIFWCSADIGWITGHSYVVYGVLSNGGTTLLYEGAPNYPEPDRFWQIIEDHKVDIFYTAPTAIRAFMKWGDGHVLKHDLSSLRLLRTVGEPINP

SEQ ID NO: 192796 - protein, 306 aa, Unknown
  Bacterial polypetide isolated from the Sargasso Sea
KTRKSKTRRKRKSKSKKSKSRKFNFKAPKLLEDGDGKSLIKVSDSWANHAYVNESKYKKKYKLSIKENDKFWAKEGKRINWIKKYTKIKDVKYSKDEVKIKWFYDGTLNASANCIDRHLKKNPSKTAIIWVGDDPADSKKISYKELHQNVSKAANGLKSLGVQKGDRVTIYLTMIPELAYVMLACARIGAVHSIIFGGFSPDSIATRITDCESEYLITADEGVRGGKIIPLKKIADEALQQCPNVKKCVVIERTGNQVNWNDERDVSYKKLISSVPTKCDPEEMSAEDPLFILYTSGSTGKPKRSL

SEQ ID NO: 192797 - protein, 279 aa, Unknown
  Bacterial polypetide isolated from the Sargasso Sea
MFILYTSGSTGKPKGVLHTTGGYMVYASMTHQYIFDYKNKDIYWCTADIGWVTGHSYIIYGPLANGATTIMFEGVPNYPDSSRWWQIVDKYKVNIFYTAPTAIRALMREGDGPVKKTSRKSLKLLGTVGEPINPEAWMWYYKTVGERKCPIVDTWWQTETGGILIAPQPGAISLKPGSATKPFYGIKPAIVDESGKVLKGACKGRLCMTQSWPGQMRTVYGDHKRFIDTYFSQFDGKYFTGDGCRRDKDGYYWITGRVDDVIIVSGHNLGTAEIESAFV

SEQ ID NO: 192798 - protein, 296 aa, Unknown
  Bacterial polypetide isolated from the Sargasso Sea
MEIKKEWLVHAKVNEDKYSSMYDNSLQNNDKFWADQAQRVDWIKKFTKIKDIKYSKDDVSIKWFEDGILNVSYNCIDRHAENNPDKVAIIWEGDDPNETNKITYRDLLISVSKAANVLKKIGVKKGDRVTIYLTMIPELAYIMLACARIGAVHSIIFGGFSAESIAGRIKDCKSDYVVTADEGVRGGKTIPLKLTTDKALETCPDVKKCLVVKRTNKEIELKKDRDIFYDDILKDVDSFCEPEVLNAEDPLFILYTSGSTGKPKGVMHTTGGYIVYASMTHEYIFNYNDGDIYWCT

SEQ ID NO: 192799 - protein, 153 aa, Unknown
  Bacterial polypetide isolated from the Sargasso Sea
YFTGDGCRRDKDGYYWITGRVDDVIIVSGHNLGTAEIESAFVAHPKVAEAAVVGYPHDIKGNGLYCYVTLNVGEQHSLDLERELKLWVRKQIGAIATPDLIQFSPGLPKTRSGKIMRRILRKIAANEHDQLGDTTTLADPGVVKSLVENRKNN

SEQ ID NO: 192800 - protein, 169 aa, Unknown
  Bacterial polypetide isolated from the Sargasso Sea
MTQEIYNPNPGFSNPHIKDFDEYLSLYKESIENPEKFFGDLAKENISWIEDFKEVHNSEFQETKWFVGGKTNITLNCIDRHLEKNGDKIALIWEGDEPGNSKEITFKELHSEVCRFANILKTLQIKKGSRICIYMPMIPEAAFAMFACARIGAIHSVVFGGFSPEFFKG

SEQ ID NO: 192801 - protein, 151 aa, Unknown
  Bacterial polypetide isolated from the Sargasso Sea
TGDGARRDKDGYYWITGRVDDVLNVSGHRLGTAEVESALVLHPKVAEAAVVGYEHEIKGQGIYCYVTLMTGEPSSDKLKVSLVDLVSKEIGPIAKPDIIQWAPSLPKTRSGKIMRRILRKIASNEVENLGDTTTLAEPSVVEDLIKNRENY

SEQ ID NO: 192802 - protein, 281 aa, Unknown
  Bacterial polypetide isolated from the Sargasso Sea
IIYDSPITGVKKNISYKELKEKVSLFAGALKNQGISKGDRVIIYMPMIPEAVIAMLACGRIGAVHSVVFGGFAANELASRIDDSKAKIIVTASCGYEPGRTVHYKPLVNKALELATHKPEKCIIFQREKDKAELNPKIDITWEEAHKNAKATECEKMNSNDYAYILYTSGTTGLPKGIVRDIGGHIVALKWTMKNIYNIEPNDVWWSASDIGWIVGHSYIVYAPLFYGCTTVLFEGKPVGTPDAGVFWRIISEHKVKSLFTAPTAIRAIKKEDPDGKFLRN

SEQ ID NO: 192803 - protein, 261 aa, Unknown
  Bacterial polypetide isolated from the Sargasso Sea
TIYLTMIPELAYVMLACARIGAVHSIIFGGFSPDSIATRINDCKSDYLITADEGVRGGKIIPLKKIADEALDQCPNVKKCVVVQRTGNQVNWNNERDVSYSQMISSMSNKCDPEEMNAEDPLFILYTSGSTGKPKGVLHTTGGYMVYASMTHQYIFDYKSNDIYWCTADIGWVTGHSYIIYGPLANGATTIMFEGVPNYPDSSRWWQIVDKYKVNIFYTAPTAIRALMREGDAPVKKTSRKTLKLLGTVGETNNPEAWMWY

SEQ ID NO: 192804 - protein, 302 aa, Unknown
  Bacterial polypetide isolated from the Sargasso Sea
MNPHIKDFDEYKQLYDESINNPQGFFKTIAKENLSWIKDFNEVHNNKFAESKWFYDGKINVSENCIDRHLKDSSEKTALIWEGDDPGDSKKYTFKELHEEVCKFANVLKDLKVTKGSRVCIYMPMIPEAAFAMLACTRIGAIHSVVFGGFSPESLKDRILDADCEVVITADEGIRGGKKVPLKLNVDEALRKCPNVKHTIVIKRSGGDVPWNEDRDLYYEDLIKNVSSSCDPEPMDAEDPLFILYTSGSTGKPKGVLHTTAGYLLGAHMSFKYLFGINESDIYWCTADVGWITGHTYILYGP

SEQ ID NO: 192805 - protein, 256 aa, Unknown
  Bacterial polypetide isolated from the Sargasso Sea
EAWMWYYNVVGEKKCPIVDTWWQTETGGILISPLPGAIAQKPGSATKPFFGIQPEIMDAEGNILEGACEGSLCLADSWPGQMRTVYGDHKRFIETYFSQFDGKYFTGDGCKRDEDGYYWITGRVDDVINVSGHRMGTAEVESALVAHPKVSEAAVVGYPHDIKGQGIYAYVTLNAGESTSDELYKELVAWVRKEIGPIASPDLIQWAPGLPKTRSGKIMRRILRKIAENEYSNLGDTSTLAEPAVVDDLINNRMNK

SEQ ID NO: 192806 - protein, 263 aa, Unknown
  Bacterial polypetide isolated from the Sargasso Sea
VGDDPKVHKKITYKQLHQEVSKAANGLRELGVKKGDRVTIYLTMIPELAYTMLACARIGAIHSIIFGGFSPDSISGRINDCKSDYVITADEGIRGGKTIHLKSITDEALVDCPKVKKCIVIKRTGNRINWDASRDVWYHEMVKKVSSNCEPEEMNAEDPLFILYTSGSTGKPKGVLHTTGGYMVYASMTHQYIFNYKPKDIYWCSADIGWVTGHSYIIYGPLSNGATTIMFEGIPTYPDSSRWWQIIDKYKVNIFYTAPTAIR

SEQ ID NO: 192807 - protein, 284 aa, Unknown
  Bacterial polypetide isolated from the Sargasso Sea
CEGEPGDNKKYTYQELLKEVCKAANALKSLGIKKGDLVCIYMPMIPEAMVAMLACARIGAPHSVVFGGFSSESLKDRLIDGNARFVITADGGFRKDKVIELKKAVDASIESGANKIVEKVIVVQRTKKDISMVNNRDFWWHELLKDQKDWCEPEIMNSEDRLFVLYTSGSTGKPKGVVHTTAGYNLWSHLTFKWIFDIKDDDVYWCTADVGWITGHSYIVYGPLSNGATTLMFEGVPRASNLGAFWEIIQKYKVTIFYTAPTAIRSFMKSGREIPDQYDLRSLR

SEQ ID NO: 192808 - protein, 242 aa, Unknown
  Bacterial polypetide isolated from the Sargasso Sea
VKKGDRVTIYLTMIPELAYTMLACARIGAIHSIIFGGFSSDSIAGRINDCKSDYVITADEGIRGGKIIPLKSTTDEALVHCPNVKKCVVVKKTNNYINWNEDRDVWFHEMTKNVSSKCEPEEMNAEDPLFILYTSGSTGKPKGVLHTTGGYMVYASMTHQYIFNYKPKDIYFCSADIGWITGHSYIIYGPLANGATTLMFEGVPTYPDSSRWWQIIDKHKVNIFYTAPTAIRALMREGEAPG

SEQ ID NO: 192809 - protein, 298 aa, Unknown
  Bacterial polypetide isolated from the Sargasso Sea
SRIFNPHIKDFDEYLSLYKESIENPEKFFGDLAKENISWIEDFKEVHNSEFQETKWFVGGKTNITLNCIDRHLEKNGDKVALIWEGDEPGNSKEITFKELHSEVCRFANILKTLQIKKGSRVCIYMPMIPEAAFAMFACARIGAIHSVVFGGFSPESLKDRILDADCRIVITADEGVRGGKKVPLKDNVDEALMNCPDVKNVIVVNRTGGKINWLEDRDLWFHELKDKVDDVCEPEPMDSEDPLFILYTSGSTGKPKGVLHTTAGYLLGAHISFKYLFGFNDNDKYWCTADVGWITGH

SEQ ID NO: 192810 - protein, 309 aa, Unknown
  Bacterial polypetide isolated from the Sargasso Sea
KVKKCIIFQRDLHKAQLKPSQDLDWSDFIKDAFLAKPIEVDANDPLYILYTSGTTGKPKGVVRDNGGHAVSLKWSMNNIYNVKPGDVYWAASDIGWVVGHSYIVYAPLFHGCTTILFEGKPIGTPNAGTFWRIISEYKVNVLFTAPTALRAVKRDDPKGDFIKNFDITSLQSLFLAGERADPDTVLWLEDKLKVPVIDHWWQTETGWPVAANPLGIEALPIKTGSPTLAMPGYDVRVLSEEGIEVPRGALGAISIKLPLPPGSLPTLWSADDRYIESYLSKFKNYYETGDAGYQDEDDYLYIMSRTDDV

SEQ ID NO: 192811 - protein, 273 aa, Unknown
  Bacterial polypetide isolated from the Sargasso Sea
MSAEDPLFILYTSGSTGKPKGVLHTTGGYMVYASMTHQYIFNYKPKDIYWCTADIGWITGHSYIIYGPLANGATTIMFEGIPTYPDTSRWWQIVDKYKVNIFYTAPTAIRALMREGDGPVKKTSRKSLKLLGTVGEPINPEAWQWYYKTVGESKCPIVDTWWQTETGGILISPQTGAIDLKPGSATKPFYGIRPVIVDQEGKVLKGEAKGRLCIAQSWPGQMRTVYGDHQRFIDTYFSQFDGKYFTGDGCRRDKDGYYWITGRVDDVIIVSGH

SEQ ID NO: 192812 - protein, 234 aa, Unknown
  Bacterial polypetide isolated from the Sargasso Sea
TGGYMVYASMTHQYIFNYKPKDIYWCTADIGWVTGHSYIIYGPLSNGATTIMFEGIPNYPDSSRWWQIVDKYKVNTFYTAPTAIRALMREGDKPVKKTSRKSLKLLGTVGEPINPEAWMWYYKTVGNSKCPIVDTWWQTETGGIMIAPQTGAIPLKPGSATKPFYGIKPVLVDKNGKEIKGAGEGRLCIAQSWPGQMRTVYGDHQRFIDTYFSQFNGKYFTGDGCRRDKDGYYW

SEQ ID NO: 192813 - protein, 305 aa, Unknown
  Bacterial polypetide isolated from the Sargasso Sea
RKEGKRINWIKPYSKVKDVKYSKEEVNIKWYYDGTLNASANCIDRHLDKKGNKNAIIWVGDDPSDFKKITYKELHKNVCKAANGLRSIGIQKGDRVTIYLTMIPELAYIMLACARIGAVHSIIFGGFSPDSIATRINDCESDYVVTADEGVRGGKIIPLKKIADEAMMQCPNVKKCVVVKRTGNQVNWDNERDVSYDEIISNVSDKCVPEEMGAEDPLFILYTSGSTGKPKGVLHTTGGYMVYASMTHQYIFDYKNKDVYWCTADIGWVTGHSYIIYGPLSNGATTIMFEGVPNYPDSFRWWQIV

SEQ ID NO: 192814 - protein, 290 aa, Unknown
  Bacterial polypetide isolated from the Sargasso Sea
PDISRMWNIIQKYNVTIFYTTPTALRMFMKFGDDIPNSFNLSTLRLLGTVGEPINPEVWKWYFNIIGKKHCPIIDTWWQTETGGMMISSLPGIESNILKPGSATKPIPGVSISVIDDDGNDVDSGTKGSLIIKNPWPGMLMTLWGDDEKYKNVYWSKFENMYYPGDYAIRDSDGYFWLLGRSDDVLKVAGHRIGTAELESSLVSNDNVAESAVCGIPDEIKGESIIAFVVLKDGVEYSNEKLNDSLKDTVRNSVGAIAIPKEFYFVSKLPKTRSGKIMRRLLKAIANKEK

SEQ ID NO: 192815 - protein, 313 aa, Unknown
  Bacterial polypetide isolated from the Sargasso Sea
KVSKAANVLKKLGIKKGDRVTIYLTMIPELAILMLACVRIGAVHSIIFGGFSADSISGRVNDCESEYIITADEGVRGGKTIPLKYTVDEALMSCPNVRKCIVVKRTGNYINWDQNRDVWYHDLIKDVPNHCEPEEMNAEDPLFILYTSGSTGKPKGVLHTTGGYMVYASMTHQYIFNYKPKDIYWCTADIGWVTGHSYIIYGPLSNGATTIMFEGIPNYPDSSRWWQIVDKYKVNTFYTAPTAIRALMREGDKPVKKTSRKSLKLLGTVGEPINPEAWMWYYKTVGNSKCPIVDTWWQTETGGIMIAPQTGAI

SEQ ID NO: 192816 - protein, 216 aa, Unknown
  Bacterial polypetide isolated from the Sargasso Sea
MSLDKKNSINNILEENRIFPPSKKFAENSNISTQEELLSLKKQASDNPIQFWKSFAKSELDWFEPFQTVLDNENAPFLKWFKEGKLNITYNCLDRHIKRGLGRKTALIWEGEPGDSKKYTYEELLKEVCKAANALKAIGVKKGDLVCIYMPMIPEAMFAMLACARIGAPHSVVFGGFSSEALKDRLIDGNARFVVTADGGFRKDKVIELKKAVDAA

SEQ ID NO: 192817 - protein, 253 aa, Unknown
  Bacterial polypetide isolated from the Sargasso Sea
PKGIVHTQAGYLTGVTTTHSAVFDVKEDDIYWCAADCGWVTGHSYIVYGPLANKTTSVMYEGAPNAPDEKRLWSIVEKYKVNIFYTAPTAIRAFMKWGVEHPQAHDLTSLRLLGTVGEPINPEAWMWYHENIGNESCAIVDTWWQTETGSIMITPLPGITSTKPGSACGPMPGIDAVVVDENGNEVSKGEGGYLAIKTPWPSMLRTVFGDEKRYIDTYWSKYDGMYFAGDGAKYDDDGYFWLLGRVDDVMNIS

SEQ ID NO: 192818 - protein, 259 aa, Unknown
  Bacterial polypetide isolated from the Sargasso Sea
INPEAWQWYYKTVGESKCPIVDTWWQTETGGILISPQTGAIDLKPGSATKPFYGIKPVIVDQEGKALKGEAKGRLCIAQSWPGQMRTVYGDHQRFIDTYFSQFEGKYFTGDGCRRDKDGYYWITGRVDDVIIVSGHNLGTAEIESAFVAHPKVAEAAVVGYPHDIKGNGLYCYVTLNAGENPDGDLERDLKLWVRKQIGPIATPDFIQFAPGLPKTRSGKIMRRILRKIAANEHEQLGDTTTLADPSVVSSLVDNRKNI

SEQ ID NO: 192819 - protein, 89 aa, Unknown
  Bacterial polypetide isolated from the Sargasso Sea
MRTVYGDHDRFIKIYFSQFDGKYFIGDGCKRDKDGYYWITGRVDDVIIVSGYNLGTAEIESGFVAHAKVSEAAVVGYPHDIKGNGLYCY

SEQ ID NO: 192820 - protein, 142 aa, Unknown
  Bacterial polypetide isolated from the Sargasso Sea
MTEIIEAGNIASRRTFFSEEKFQQSYEDSIADPNDFWATQAMEFLTWQQTWSQVSRCNMARGEIEWFLDGKLNASENCIDRHLADKANRTAIIWEGDDPGDSKKISYRDLFEEVCKLANGLKSLGVKKGDRVCIYMPMIPEA

SEQ ID NO: 192821 - protein, 265 aa, Unknown
  Bacterial polypetide isolated from the Sargasso Sea
LTFKWIFDLKDDDIYWCTADVGWITGHSYIVYGPLSNGATTLMFEGVPRPSNLGAFWEIVQKYKVSIFYTAPTAIRAFMKSGREIPDKYNLESLRLLGTVGEPINPEAWMWYKDVIGKNKCPIVDTWWQTETGGVMISPLPGVVPTKPGSATFPLPGIEVEIVDKNGDKVMENEGGYLIIKKPWPGMMRTIHGNSDRYLDSYWEYISFKGEKNVYFAGDGARIDEDGYIWIMGRVDDVISVSGHRLGTMEIECALVSHKSVAEAA

SEQ ID NO: 192822 - protein, 294 aa, Unknown
  Bacterial polypetide isolated from the Sargasso Sea
KSEIDWFEPFQTVLDSDNAPFFKWFKEGKINITYNCLDRHIKKGLGAKTALIWEGEPGDSKKYTYEELLKEVCKAANALKAIGVKKGDLVCIYMPMIPEAMFAMLACARIGAPHSVVFGGFSSEALKDRLIDGNARFVITADGGFRKDKVIELKQAVDAAIESGADKVVEKVVVVQRTKKNISMVDDRDLWWHELLKDQKDQCEPEIMNSEDRLFILYTSGSTGKPKGVVHTTGGYNLWSHLTFKWIFDLKDDDIYWCTADVGWITGHSYIVYGPLSNGATTLMYEGVPRPSNL

SEQ ID NO: 192823 - protein, 291 aa, Unknown
  Bacterial polypetide isolated from the Sargasso Sea
MIQKTAKGFLTNNFIKKFLKLQNGLKKLGIKKGDRVTIYLTMIPELAILMLACVRIGAVHSIIFGGFSADSISGRVNDCESEYIITADEGVRGGKTIPLKYTVDEALMSCPNVKKCIVVKRTGNYINWDQNRDVWYHDLIKDVPNHCEPEEMNAEDPLFILYTSGSTGKPKGVLHTTGGYMVYASMTHQYIFNYKPKDIYWCTADIGWVTGHSYIIYGPLSNGATTIMFEGIPNYPDSSRWWQIVDKYKVNTFYTAPTAIRALMREGDKPVKKTSRKSLKLLGTVGEPINP

SEQ ID NO: 192824 - protein, 302 aa, Unknown
  Bacterial polypetide isolated from the Sargasso Sea
NKNNKNSSTELIIKTKPEWIKSSLANKNKYQEKYNQSIKNNDEFWRKEGKRITWIKPYKKIKDVKYSTKEVKINWFQDGTLNASANCIDRHLKDKKDKTAIIWVGDDPKDSQKISYRQLHQKVSKAANGLKKLGIKKGDRVTIYLTMIPELAILMLACVRIGAVHSIIFGGFSADSISGRVNDCESEYIITADEGVRGGKTIPLKDTTDEALLNCPNVKKCIVVKRTGNNIRWNYNRDVWYHDLIKDVSNKCEPEEMNAEDPLFILYTSGSTGKPKGVLHTTGGYMVYASMTHQYIFNYKPK

SEQ ID NO: 192825 - protein, 278 aa, Unknown
  Bacterial polypetide isolated from the Sargasso Sea
NMDFKDIYQRSISKPEEFWKEISNDIFWFKKPTKILNSDKPPFYKWFEDGITNSCYNALDFHIDQGRGEKTALIYDSPITSNKGKFTFTQLKDKVSKFAGALSNQGVKKGDRVIIYMPMIPEAVVAMLACGRIGAIHSVVFGGFASNELASRIDDSKAKVLVTASCGFEPGRTVEYRPLIDGALKLAKHKVEKVILFQRQGHEINLNSPLEISWEESLSNAGDMDCVEMGSNEFAYILYTSGTTGVPKGIVRDIGGHIVALKWTMKNIYNIDTDDVWW

SEQ ID NO: 192826 - protein, 248 aa, Unknown
  Bacterial polypetide isolated from the Sargasso Sea
QTSRASLKLLGTVGEPINPEAWEWYYRVVGDSRCPIVDTWWQTETGAIMIAPLPGAVDLKAGSATLPMFGVQPGLMDPDGNELDGAASGNLVLKASWPSQIRTVYGDHQRLIDTYFSAYKGCYFTGDGARRDEDGYYWITGRVDDVLNVSGHRLGTAEIESALVLHPSISEAAVVGYQHDVKGQGIYAYVSLMAGKEGSEELVKALRDLVTQEIGPIAKPDLIHFAPGLPKTRSGKIMRRILRKIAAD

SEQ ID NO: 192827 - protein, 236 aa, Unknown
  Bacterial polypetide isolated from the Sargasso Sea
KDSKHISYKALHKNVCKAANGLKSLGIQKGDRVTIYLTMIPELAYVMLACARIGAVHSIIFGGFSPDSIAGRINDCNSDYIITADEGVRGGKIIPLKKITDEALVKCPNVKKCIVVKRTGNEVNWVDDRDVWYEDITKNASAECEPEEMGAEDPLFILYTSGSTGKPKGVLHTTGGYMVYASMTHQYIFNYRKKDIYWCTADIGWVTGHSYIIYGPLSNGATTIMFEGVPNYPDTS

SEQ ID NO: 192828 - protein, 291 aa, Unknown
  Bacterial polypetide isolated from the Sargasso Sea
CLDRHVEAGLGEKVAFHWEGEPGDTRTITYDDLLNEVSKFANVLKSLGVEKGDRVCIYMPMIPELPVAMLACARIGAPHSIVFGGFSADSLSDRIDDASAKVLITADGGYRRGEPFPLKPTADESVAATSTIENVVVVRRTEEEVAWDENVDHWYHDLMSSASTDCPAEPLDSEDLLYLLYTSGTTAKPKGIMHTTGGYLTQVAFTHKYIFDLHPETDIYWCAADIGWVTGHSYIVYGPLANGATSVMYEGTPDTPRPEFRLGDRGEWPKNRLWDIAERYGVTQLYTAPTA

SEQ ID NO: 192829 - protein, 278 aa, Unknown
  Bacterial polypetide isolated from the Sargasso Sea
AANGLKKLGIKKGDRVTIYLTMIPELAILMLACVRIGAVHSIIFGGFSADSISGRVNDCESEYIITADEGVRGGKTIPLKYTVDEALMSCPNVKKCIVVKRTGNYINWDQNRDVWYHDLIKDVPNHCEPEEMNAEDPLFILYTSGSTGKPKGVLHTTGGYMVYASMTHQYIFNYKPKDIYWCTADIGWVTGHSYIIYGPLSNGATTIMFEGIPNYPDNSRWWQIVDKYKVNTFYTAPTAIRALMREGDKPVKKTSRKSLKLLGTVGEPINPEAWMWYY

SEQ ID NO: 192830 - protein, 124 aa, Unknown
  Bacterial polypetide isolated from the Sargasso Sea
HLLGTAEIESAFVEHGLVSEAAVVGYPHDIKGQGVYAYVTTNTGVQVSEDLKKELIQWIRKKIGPIATPDKLQFSPGLPKTRSGKIMRRILRKIASNEQDQLGDTSTLADPNVVQSLIDGSKNI

SEQ ID NO: 192831 - protein, 284 aa, Unknown
  Bacterial polypetide isolated from the Sargasso Sea
WYHEMIKNVSAKSEPEEMNAEDPLFILYTSGSTGKPKGVLHTTGGYMVYASMTHQYIFNYKPKDIYWCTADIGWVTGHSYIIYGPLSNGATTIMFEGIPTYPDNSRWWQIVDKYKVNIFYTAPTAIRALMREGEKPVRKTSRKTLKLLGTVGEPINPEAWQWYYKVVGDSRCPIVDTWWQTETGGILISPQTGAINLKPGSATKPFYGIKPVIVDKTGKVLKGETQGRLCIAQSWPGQMRTVYGDHQRFIDTYFSQFDGKYFTGDGCRRDKDGYYWITGRVDDV

SEQ ID NO: 192832 - protein, 153 aa, Unknown
  Bacterial polypetide isolated from the Sargasso Sea
YFTGDGCRRDKDGYYWITGRVDDVIIVSGHNLGTAEIESAFVAHPKVAEAAVVGYPHDIKGNGLYCYVTLNAGETETGELERDLKLWVRKQIGPLATPDLIHFTPGLPKTRSGKIMRRILRKIAANEHGQLGDTTTLADPSVVDSLVDNRKNI

SEQ ID NO: 192833 - protein, 212 aa, Unknown
  Bacterial polypetide isolated from the Sargasso Sea
MNQNFKEIYENSIKNPEEFWKEISEDIFWFKKPTKILNRTKHPFYKWYEDGTTNTCYNALDVHIDNGKGDRAALIYDSPITGNKKKFTYKELREKVSKFAGALQNQGIKKGDRVIIYMPMIPEAVIGMLACARIGAIHSVVFGGFASNELASRIDDSKARVLLTASCGFEPGKTVHYKPLVDDALKLASHKIEKLILFQRKGNEVKLNAPKE

SEQ ID NO: 192834 - protein, 214 aa, Unknown
  Bacterial polypetide isolated from the Sargasso Sea
MKNDRDYSYSALMADASEDSTPEAMKAEDPLFILYTSGSTGKPKGVLHTSGGYLVWASLTHEYVFDYHDGDIYWCTADVGWVTGHSYIVYGPLANGATTVMFEGVPTYPDASRFWQVCDKHKINQFYTAPTAIRALMGQGSKFVEKCDLSSLKVLGTVGEPINPEAWNWYNEVVGKGRCPIVDTWWQTETGGHLLTPIPGAIATKPGSATFPFF

SEQ ID NO: 192835 - protein, 303 aa, Unknown
  Bacterial polypetide isolated from the Sargasso Sea
MYWLLNELGNYINWNEERDVWYHDLIKDVPSHCEPEEMNAEDPLFILYTSGSTGKPKGVLHTTGGYMVYASMTHQYIFNYKPKDIYWCTADIGWVTGHSYIIYGPLANGATTIMFEGIPNYPDTSRWWQIVDKYKVNIFYTAPTAIRALMREGDKPVKKTSRKSLKLLGTVGEPINPEAWMWYYKTVGNSKSPIVDTWWQTETGGILIAPQTGAIPLKPGSATKPFYGIKPVIVDKNGKEIKGAGEGRLCIAQSWPGQMRTVYGDHQRFIDTYFSQFNGKYFTGDGCRRDKDGYYWITGRVDD

SEQ ID NO: 192836 - protein, 291 aa, Unknown
  Bacterial polypetide isolated from the Sargasso Sea
MVNNTDYSKAHIEWFSNGKLNASYNCIDRHIENGLGEKTALIWQSNDPTISTNVSYNELLKKVSLFANGLKRAGINKGDRVCIYMQMIPEAIVAMLACARIGAVHSVVFGAFSSDALKNRINDSECKLLITQDNGVRGLKFDIPMKENADKIADECPSLTTVVMVERSGNDMLMKEGRDITWNQFIDGCSSDCPAEVMDAEDPLFILYTSGSTGKPKGVMHTTGGYLVYASHTHELVFDYHKDDIYWCTADIGWITGHSYIVYGPLSNAVTQVIFEGVPNYPDFGRFWQIV

SEQ ID NO: 192837 - protein, 245 aa, Unknown
  Bacterial polypetide isolated from the Sargasso Sea
RWWQIVDKFKVNIFYTAPTAIRALMREGEGPVSKTSRKSLKLLGTVGEPINPEAWQWYFKTVGDSRCPIVDTWWQTETGGILISPQTGAIDLKPGSATKPFYGIKPVIVDKDGKVLKGEAQGRLCIAQSWPGQMRTVYGDHNRFIETYFSQFDGKYFTGDGCRRDKDGYYWITGRVDDVIIVSGHNLGTAEIESAFVAHTKVAEAAVVGYPHDIKGNGLYCYVTLNVGEHPDGDLERELKLWVRK

SEQ ID NO: 192838 - protein, 239 aa, Unknown
  Bacterial polypetide isolated from the Sargasso Sea
MGYKEEFQESIEKPEQFWRKQAELIKWYEFPNNILSEDENGFYRWFKGGKLNTCYLLLDYHIECGRGDQTALIYDSPVTNSQSKLSFKELLEKVANFAGVLRDNGIEKGDRAIIYMPMIPEALVAMLACARLGAIHSVVFGGFAPKELAIRIDDAKPKILLTASCGIEFNNVIEYKPLVDEAIRISKYPPQTVILLQRPQSKASMKTGRDFDWNELSNRSSPVSPVPVDATDPLYILYT

SEQ ID NO: 192839 - protein, 263 aa, Unknown
  Bacterial polypetide isolated from the Sargasso Sea
TKKWARSAYIDKSGYEKKYKLSIKDNENFWRKEGKRIDWIKPYNKIKDVKYSKTDVKIKWFYDGTLNASANCIDRHLKDKKNKNAIIWVGDDPKDSKNITYKELYRNVCKTANGLKSIGIKKGDIVTIYLTMIPELAYTMLACARIGAIHSIIFGGFSPDSIAGRINDCQSDYIITADEGVRGGKIIPLKKITDEALTQCPNVKKCIVVKRTGNEVDWVKDRDVSYEELIKLSSDKLDPEEMSAEDPLFILYTSGSTGKPKGV

SEQ ID NO: 192840 - protein, 118 aa, Unknown
  Bacterial polypetide isolated from the Sargasso Sea
EVESALVGHPKVAESAVVGYPHDIKGQGIYAYVTLMEGEMPSDELRTELVQWVRKEIGPIASPDLIQWAPGLPKTRSGKIMRRILRKIAANEHDQLGDTTTLAEPAVVDDLLDNRQNR

SEQ ID NO: 192841 - protein, 161 aa, Unknown
  Bacterial polypetide isolated from the Sargasso Sea
FSQFDGKYFTGDGCKRDKDGYYWITGRVDDVIIVSGHNLGTAEIESAFVAHPKVAEAAVVGYPHDIKGNGLYCYVTLNAGEQPNGDLERELKLWVRKQIGPIATPDLIQFAPGLPKTRSGKIMRRILRKIAANEYNELGDTTTLADPSVVESLIENRQNRN

SEQ ID NO: 192842 - protein, 99 aa, Unknown
  Bacterial polypetide isolated from the Sargasso Sea
PHDIKGNGLYCYVTLNAGEQPNGDLERELKLWVRKQIGPIATPDLIQFAPGLPKTRSGKIMRRILRKIAANEYNELGDTTTLADPSVVESLVENRQNKD

SEQ ID NO: 192843 - protein, 256 aa, Unknown
  Bacterial polypetide isolated from the Sargasso Sea
KYSLKLRNFEGVNLSRNYKEIYQKSISKREDFWKEISENIFWYKKPTKILNSERPPFYKWFEDGVTNTCYNALDLHIDKGRGEKIAIIYDSPITGTKKNISYNELKEKVSLFAGALKNQGVNKGDRVIIYMPMIPEAVVAMLACGRIGAVHSVVFGGFAANELASRIDDSKAKIIVSASCGYEPGRTVYYKPLVNKALELANHKPEKCIIFQREKDKADLNPKIDITWEDANKGAKPADCEKMNSNDYAYILYTSG

SEQ ID NO: 192844 - protein, 218 aa, Unknown
  Bacterial polypetide isolated from the Sargasso Sea
YTAPTAIRALMREGDKPVKKTSRKTLKLLGTVGEPINPEAWMWYYKTVGDSRCPIVDTWWQTETGGILIAPQPGAIDLKPGSATKPFYGIKPVLVDKDGKTIKGEGKGRLCMAASWPGQMRTVYGDHQRFIDTYFSQFDGKYFTGDGCRRDKDGYYWITGRVDDVIIVSGHNLGTAEIESAFVAHPKVAEAAVVGFPHSIKGNGLYCYVTLNAGENPA

SEQ ID NO: 192845 - protein, 306 aa, Unknown
  Bacterial polypetide isolated from the Sargasso Sea
ACVRIGAVHSIIFGGFSAESISGRVNDCESEYIITADEGVRGGKTIPLKYTTDEALINCPNVKKCIVVKRTGNYINWNEERDVWYHDLIKDVPSHCEPEEMNAEDPLFILYTSGSTGKPKGVLHTTGGYMVYASMTHQYIFNYKPKDIYWCTADIGWVTGHSYIIYGPLANGATTIMFEGIPNYPDTSRWWQIVDKYKVNIFYTAPTAIRALMREGDKPVKKTSRKSLKLLGTVGEPINPEAWMWYYKTVGNSKSPIVDTWWQTETGGILIAPQTGAIPLKPGSATKPFYGIKPVIVDKNGKEIKG

SEQ ID NO: 192846 - protein, 247 aa, Unknown
  Bacterial polypetide isolated from the Sargasso Sea
MAKRSKRKKSKSKSKRKKRVKRKKIKTLKKKKPSSKINNSKQTEDADGNIVFKVPPAWEKKAYVNQSQYAKKYKLSLKDNEGFWAKEGKRITWMKPYTKIKDVKYSKEDVSIKWYYDGTLNASANCIDRHLDKKGNKTAIIWVGDDPSDTKKISYKELHKNVCKAANGLKSIGIQKGDRVTIYLTMIPELAYIMLACARIGAVHSIIFGGFSPDSIATRINDCESDYVITADEGVRGGKIIPLKKIA

SEQ ID NO: 192847 - protein, 314 aa, Unknown
  Bacterial polypetide isolated from the Sargasso Sea
SYNELHEQVCKFSNVLINAGAKKGDRITIYMPMIPEATVAMLACTRIGAIHSVVFGGFSPDALAGRIEDCNSTIIVTADEGIRGGKTIPLKSNTDKAISKAKMCKTTIVVKRTGAEINWIDGQDIWYHEEMEKASANCPPAEINAEDPMFILYTSGSTGKPKGVLHTTGGYMVYASMTHHYVFDYQENEIYWCTADVGWVTGHSYIVYGPLSNGATTLMFEGVPNYPTVSRFWEIVDKHKVNIFYTAPTAIRALMAEGSEPVKKTKRDSLRILGSVGEPINPEAWNWYNNIVGDGRCPVVDTWWQTETGGILIT

SEQ ID NO: 192848 - protein, 124 aa, Unknown
  Bacterial polypetide isolated from the Sargasso Sea
HRLGTAEVESALVLHEQVAEAAVVGYEHEIKGQGIYCYVTLMVGSLGEDSLKKELVDLVAKEIGAIAKPDIIQFSPDLPKTRSGKIMRRILRKIAANEIHDLGDTTTLADPSVVDHLINNRLNK

SEQ ID NO: 192849 - protein, 239 aa, Unknown
  Bacterial polypetide isolated from the Sargasso Sea
MILWWQTETGGILISPQTGAIDLKPGSATKPFYGIKPVIVDKDGNVLKGEAQGRLCIAQSWPGQMRTVYGDHNRFIETYFSQFDGKYFTGDGCRRDKDGYYWITGRVDDVIIVSGHNLGTAEIESAFVAHPKVAEAAVVGYPHDIKGNGLYCYVTLNVGENPDGDLERELKLWVRKQIGPIATPDIIHFSPGLPKTRSGKIMRRILRKIAANEHDQLGDTTTLADPSVVKSLVDERKNI

SEQ ID NO: 192850 - protein, 253 aa, Unknown
  Bacterial polypetide isolated from the Sargasso Sea
ERDVWYDDIIKKVSTHCEPEEMGAEDPLFILYTSGSTGKPKGVLHTTGGYMVYASMTHQYIFNYKPKDIYWCTADIGWITGHSYIIYGPLSNGATTIMFEGIPTYPDNSRWWQIVDKFKVNIFYTAPTAIRALMREGDKPVKKTSRKSLKLLGTVGEPINPEAWMWYYKTVGDSKCPIVDTWWQTETGGILISPQTGAIDLKPGSATKPFYGIKPVIVDKDGKVLKGECQGRLCIAQSWPGQMRTVYGDHQRF

SEQ ID NO: 192851 - protein, 164 aa, Unknown
  Bacterial polypetide isolated from the Sargasso Sea
YRNIFFSFDGKYFTGDGCRRDKDGYYWITGRVDDVIIVSGHNLGTAEVESAFVAHPKVAEAAVVGCPHDIKGNGLYCYVTLNVGEEPNGDLERELKLWVRKQIGAIATPDFIQFSPGLPKTRSGKIMRRILRKIAANEHEQLGDTTTLADPSVVKNLVDNRKNI

SEQ ID NO: 192852 - protein, 289 aa, Unknown
  Bacterial polypetide isolated from the Sargasso Sea
SKGDRVTIYLTMIPELAYTMLACARIGAIHSIIFGGFSADSIADRINNCKSDYIVTADEGIRGGKTIHLKSITDEALIHCPNVKKCIVVKRTGNRINWDESRDVWYNDMIKGVPSQCEPEEMEAEDPLFILYTSGSTGKPKGVLHTTGGYMVYASMTHQYIFNYKPKDIYFCTADIGWITGHSYIIYGPLANGATTIMFEGVPTYPDSSRWWQIVDKYKVNIFYTAPTAIRALMAQGEGPVKKTSRKSLKLLGTVGEPINPEAWEWYYRTVGDNRCPIVDTWWQTETGG

SEQ ID NO: 192853 - protein, 224 aa, Unknown
  Bacterial polypetide isolated from the Sargasso Sea
MHQNVCKAANGLKSLGVQKGDRVTIYLTMIPELAYIMLACARIGAVHSIIFGGFSPDSIATRITDCESEYLITADEGVRGGKIIPLKKIADEALDQCPNVKKCVVVERTGNQVNWNEERDVSYKKLISSVPTKCDAEEMNAEDPLFILYTSGSTGKPKGVLHTTGGYMVYASMTHQYIFDYKPNDIYWCTADIGWVTGHSYIIYGPLANGATTIMFEGVPNYPD

SEQ ID NO: 192854 - protein, 255 aa, Unknown
  Bacterial polypetide isolated from the Sargasso Sea
ILYGALCPMGTTTIMFEGIPTYPSSSRCWEICDKYEVNVFYTAPTAIRALMSQGDDPVLKTKRNSLRVLGTVGEPINPEAWEWYYKVVGNSSCDVIDTWWQTETGSVLISPIAGITPMKPGSATLPFFGVKPALYDEQGKPLEGANSGNLVIEKSWPSQIRSVYGDHDRMISTYFETYKDLYFTGDGARRDEDGYFWITGRVDDVLNVSGHRLGTAEIESALVLHDKVAEAAVVGFEHPIKGQGIYAFVTLMKEE

SEQ ID NO: 192855 - protein, 311 aa, Unknown
  Bacterial polypetide isolated from the Sargasso Sea
VNNECEPEIMSAEDPLFILYTSGSTGKPKGVLHTTGGYLVYASMTHEYIFNYKKNDIYWCTADIGWVTGHSYIIYGPLANGATTLMFEGVPNYPDASRFWEVVDKHKVNIFYTAPTAIRALMREGDAPVNKTKRTSLKLLGTVGEPINPEAWQWYFNVCGRSKCPIVDTWWQTETGGILISPQTGAIPLKPGSATKPFYGIKPIVVNKKGEELTGECEGMLCIADSWPGQMRTVYGDHQRFIDTYFSQFEGKYFSGDGCKRDKDGYYWITGRVDDVIIVSGHNLGTAELESAFVAHNKVAEAAVVGYPHGN

SEQ ID NO: 192856 - protein, 301 aa, Unknown
  Bacterial polypetide isolated from the Sargasso Sea
SKKIPLKNNVDTALEDCPNVHSVFVVKRTNANVDWNDRRDVDYQEIIDTVPSECEAEPMDSEDPLFILYTSGSTGKPKGVLHTTGGYLLQASISHKLVFDYKDDEIYWCTADVGWVTGHSYIVYGPLANAATTLMFEGIPTYPNASRFWEVIDKHKVNIFYTAPTALRALMAQGDEYVKSSSRDSLRVLGTVGEPINPEAWEWYYKVVGDSKCPIVDTWWQTETGAMMITPLAGSTPLKPGSATKPFLGIEPALLDENGKEIEGEGSGNLVIKSSWPSQIRSVYGDHQRCIETYYSMYPGY

SEQ ID NO: 192857 - protein, 165 aa, Unknown
  Bacterial polypetide isolated from the Sargasso Sea
MIDTYFSTYSNIYFTGDGAKRDEDGYFWITGRVDDVLNVSGHRLGTAEVESALVLHPVVAEAAVVGFEHPIKGQGIYAFVTLMVDEEFSDELSTELRNFVGKEIGPIAKPDLIQNAPGLPKTRSGKIMRRILRKVAEGDFENLGDTTTLAEPSVVSDLIENKKSL

SEQ ID NO: 192858 - protein, 177 aa, Unknown
  Bacterial polypetide isolated from the Sargasso Sea
GQMRSVYGDHQRFIDTYFSQFEGKYFTGDGCRRDRDGYYWITGRVDDVIIVSGHNLGTAEIESAFVAHPKVAEAAVVGYPHDIKGNGLYCYVTLNAGEKSTLDLERDLKLWVRKQIGPIATPDLIQFSPGLPKTRSGKIMRRILRKIAANEHGQLGDTTTLADPSVVESLVDNRKNI

SEQ ID NO: 192859 - protein, 294 aa, Unknown
  Bacterial polypetide isolated from the Sargasso Sea
FLQIVYLGRINDCKSDYVVTADEGVRGGKIIPLKSITDEALINCPNVKKCIVIKRTGNRINWDERRDIWYHEMIDNVPTKCEPEEMNAEDPLFILYTSGSTGKPKGVLHTTGGYMVYASMTHQYIFNYKSKDIYWCTADIGWITGHSYIIYGPLSNGATTIMFEGIPTYPDTSRWWQIVDKYKVNIFYTAPTAIRALMREGEKPVKKTSRKTLKLLGTVGEPINPEAWQWYYKTVGDSRCPIVDTWWQTETGGILISPQTGAINLKPGSATKPFYGIKPVIVDKDGKTLKGEAQ

SEQ ID NO: 192860 - protein, 313 aa, Unknown
  Bacterial polypetide isolated from the Sargasso Sea
MFLDGGKSVDKYKVNIFYTAPTALRALMREGAGPVKKTSRKSLKLLGTVGEPINPEAWLWYYKIVGDSRCPIVDTWWQTETGGILISPQPGAIDLKPGSATKPFYGIKPVIVDEKGKVLKGACRGRLCIAQSWPGQMRTVYGDHQRFIDTYFSQFDGKYFTGDGCRRDEDGYYWITGRVDDVIIVSGHNLGTAELESAFVAHPKVAEAAVVGYPHDIKGNGLYCYVTLNAEERPSGELERDLKLWVRKQIGPIATPDLIQFAPGLPKTRSGKIMRRILRKIAANEHDQLGDTTTLADPSVVESLVENRQNNNY

SEQ ID NO: 192861 - protein, 313 aa, Unknown
  Bacterial polypetide isolated from the Sargasso Sea
NVKKWWVVVKRTGNSVNWDNERDVSYDEIIKNVSDKCAPEEMNAEDPLFILYTSGSTGKPKGVLHTTGGYMVYASMTHQYIFDYKPKDIYFCSADIGWVTGHSYIIYGPLSNGATTVMFEGIPTYPDSSRWWKIIDKYKVNIFYTAPTAIRALMREGDGPVKKTSRKSLKLLGTVGEPINPEAWMWYYNVVGDKKCPIVDTWWQTETGGILISPQPGAINLKPGSATKPFYGIKPAIVDESGKILKGACKGRLCMLQSWPGQMRTVFGDHQRFIDTYFSQFDGKYFTGDGCRRDKDGYYWITGRVDDVIIVSG

SEQ ID NO: 192862 - protein, 301 aa, Unknown
  Bacterial polypetide isolated from the Sargasso Sea
PLKKIADEAMMQCPNVKKCVVVKRTGNTVDWNDDRDVSYDEITKGVSDKCIAEEMNAEDPLFILYTSGSTGKPKGVLHTTGGYMVYASMTHQYIFDYKNKDIYWCTADIGWVTGHSYIIYGPLANGATTIMFEGVPNYPDSSRWWQIVDKYKVNIFYTAPTAIRALMREGDSPVKKTSRKSLKLLGTVGEPINPEAWMWYYKTVGEKKCPIVDTWWQTETGGILIAPQPGAINLKPGSATKPFYGIKPAIVDESGKVLKGACKGRLCMSQSWPGQMRTVYGDHQRFIDTYFSQFDGKYFTG

SEQ ID NO: 192863 - protein, 282 aa, Unknown
  Bacterial polypetide isolated from the Sargasso Sea
ANAATVLIHEGVPNHPTPARLGEMIDRHKVNILYTAPTLIRALMAEGKEQFSNYKGDSLRIMGSVGEPINPEAWRWYHEVIGHENCPIVDTWWQTETGGILISPLPGATDTKPGSATRPFFGVQPALVDNMGNIVEGATEGNLVILDSWPGQMRTVYGDHDRFALTYFKTFRGMYFTGDGARRDEDGYYWITGRVDDVINVSGHRLGTAEVESALVAHELVAEAAVVGYPHDIKGQGIYAYVTLTRGIEPTEELRQELRQWVRKEIGALATPDLIQWASGLP

SEQ ID NO: 192864 - protein, 213 aa, Unknown
  Bacterial polypetide isolated from the Sargasso Sea
SATRPFFGIQPVLMDADGNEVEGAVSGNLCIKHPWPGQMRTVFGDHQRFKETYFSTYPGYYFTGDGCRRDEDGYYWITGRVDDVLNVSGHRMGTAEIESALVLHESVAEAAVVGFPHEIKGQGIYTYVTLNSGVEESEDLKKELVQQVRKEIGPIATIDVLQWAPGLPKTRSGKIMRRILRKIAENDIEHVGDTSTLADPSVVDDLIQNRPSQ

SEQ ID NO: 192865 - protein, 294 aa, Unknown
  Bacterial polypetide isolated from the Sargasso Sea
YTAPTAIRALMREGDKPVKKASRKTLKLLGTVGEPINPEAWQWYYKTVGDSRCPIVDTWWQTETGGILISPQTGAINLKPGSATKPFYGIKPVIVDKDGKTLKGEAQGRLCISQSWPGQMRTVYGDHQRFIDTYFSQFDGKYFTGDGCRRDKDGYYWITGRVDDVIIVSGHNLGTAEIESAFVAHPKVAEAAVVGYPHDIKGNGLYCYVTLNAGEESSLDLERDLKLWVRKQIGPIATPDLIQFSPGLPKTRSGKIMRRILRKIAANEHGQLGDTTTLADPSVVKSLVENRKNI

SEQ ID NO: 192866 - protein, 212 aa, Unknown
  Bacterial polypetide isolated from the Sargasso Sea
RGGSVIPLKQATDEAVTNSLHKVKNVVVFERTGEKIEFDQERDVWWTDLISDCPSDCDPEPLNAEHPLFILYTSGSTGKPKGIQHSTAGYILHAKTTFSWVFDINEDDVFWCTADVGWITGHTYVAYGPLLAGATILIYEGAPTFPDVGRFWKICEKHAVTIFYTAPTAIRALMKHGDEIPKSYNLSQLRLLGTVGEPINPEAWMWYHSVIG

SEQ ID NO: 192867 - protein, 186 aa, Unknown
  Bacterial polypetide isolated from the Sargasso Sea
NLVMEQSWPSQIRSVYGDHQRMLDTYFSRYKDIYFTGDGARRDEDGYYWITGRVDDVLNVSGHRLGTAEIESALVLHSKVAEAAVVGFDHPIKGQGIYAFVTLMIGESFDDELNNELKQFVAKEIGAIAKPDLIQNAPGLPKTRSGKIMRRILRKIAEGDLSNLGDTTTLADPSVVKSLISNKINQ

SEQ ID NO: 192868 - protein, 256 aa, Unknown
  Bacterial polypetide isolated from the Sargasso Sea
MRVLDYWYHDLVDKQDAACEPEVMNAEDMLYILYTSGTTAKPKGIVHTQAGYLTGVTTTHSAVFDVKEDDIYWCAADCGWVTGHSYIVYGPLANKTTSVMYEGAPNAPDEKRLWSIVEKYKVNIFYTAPTAIRAFMKWGVEHPQAHDLSSLRLLGTVGEPINPEAWMWYHENIGSESCAIVDTWWQTETGSIMITPLPGITSTKPGSACGPMPGIDAIVVDEKGNEVSKGEGGYLAIKTPWPSMLRTVFGDEKRYI

SEQ ID NO: 192869 - protein, 247 aa, Unknown
  Bacterial polypetide isolated from the Sargasso Sea
MVIQDAQLLILWWQTETGGILISPQTGAINLKPGSATKPFYGIKPLIVDKAGKVLKGEAQGRLCIAQSWPGQMRTVYGDHKRFIDTYFSQFDGKYFTGDGCRRDKDGYYWITGRVDDVIIVSGHNLGTAEIESAFVAHPKVAEAAVVGYPHDIKGNGLYCYVTLNAGEVHSLDLERELKLWVRKQIGAIATPDLIQFSPGLPKTRSGKIMRRILRKIAANEHDQLGDTTTLADPSVVKSLVNNRKNN

SEQ ID NO: 192870 - protein, 249 aa, Unknown
  Bacterial polypetide isolated from the Sargasso Sea
DASRWWQIVDKYKVNIFYTAPTAIRDLMRRGDGPVRKTSRKSLKLLGTVGEPINPEAWQWYFKTVGDSKCPIVDTWWQTETGGILISPQTGAINLKPGSATKPFYGIKPVIVDKDGKVLKGECKGMLCIAQSWPGQMRTVYGDHQRFIDTYFSQFDGKYFTGDGCKRDKDGYYWITGRVDDVIIVSGHNLGTAEIESAFVAHQKVAEAAVVGYPHDIKGNGLYCYVTLNVGEEPNGDLERELKLWVRKQ

SEQ ID NO: 192871 - protein, 271 aa, Unknown
  Bacterial polypetide isolated from the Sargasso Sea
MKIYFWYKKPSKILNSDKPPFYKWFQDGTTNTCYNAVDLHVDNGKGEKVAIIYDSPITKFQKKITYKQLKDQVSVFAGALKNQGIKKGDRVIIYMPMIPEAVIGMLACGRIGAVHSVVFGGFAPNELASRIDDSKAKIILSASCGYEPGRTVEYKPLLKKAIELAKHKPEKCIIYQRKDFKVDLEKNEIDWNDSIKDTKPVECVEMNANDYAYILYTSGTTGVPKGIVRDIGGHIVALKWTMKNIYNIDPDDVWWSASDIGWIVGHSYIVY

SEQ ID NO: 192872 - protein, 248 aa, Unknown
  Bacterial polypetide isolated from the Sargasso Sea
MSKIYKVEKGLADTSHVNASEYKQLYKESIENPDLFWSKQAEAFIDWEEKWDQISRTNMKEGEIAWFLGAKLNVAQNCLDRHLQTKSEKTAIIWEGDNPNEQENISYKELHKRVCRLANGLKSRGIAKGDRVCIYLPMIPEAAIAMLACARIGAIHSVVFGGFSPQSLRDRIQDSECCAVITADEGLRGGKSVPLKQNSDIAVEECSTVHSVIVVKRTGGEIKWNTQKDIWYHDLIRGQSDNCPIEIM

SEQ ID NO: 192873 - protein, 266 aa, Unknown
  Bacterial polypetide isolated from the Sargasso Sea
SREITYQALHLYVCQLANTLKRQGVGKGDRVMIYMPMIPEAVFAMLACARIGAIHSVVFAGFSPDALAGRIADCGAKMVITADAGRRGGKPVPLKDNVDEALRQDGTSGVEKVLVVRHVGTDIHWQPGRDLDYAEEQAQSDNHCPPETMNAEDPLFILYTSGSTGKPKGVLHTTGGYLVYASLTHQLAFDYQPGQVYWCTADVGWITGHTYLVYGPLANGATCVMFEGVPNYPNDQRVGDIIDRYDVEILYTAPTAIRALMAGGDH

SEQ ID NO: 192874 - protein, 106 aa, Unknown
  Bacterial polypetide isolated from the Sargasso Sea
ENISWISDFNEVQNDGFANTKWFIGGKTNVSLNCIDRHLDENSNKTALIWEGDDPNESKQFTYKELHLQVCKFANVLKELGVKKGSRVCIYMPMIPEAAFAMLACT

SEQ ID NO: 192875 - protein, 303 aa, Unknown
  Bacterial polypetide isolated from the Sargasso Sea
CARIGAMHNVVFAGFSAKALSERINDSSSKIVITADGGNRGGKVLSLKPTVDEALKDCPLVSSVIVYKRTGNKISFDNKRDSWWHELTEGVANKHNAETFDSEHPLFLLYTSGSTGKPKGILHTSAGYLLGATISTRYVFDLKKEDIFWCTADAGWITGHSYVTYGPLSNGATIVMYEGSPNIPDWGRFWQIIEKYRVSTFYTAPTAIRSLAKSGNELPEKYDLSSLRVLGSVGEPINPSAWQWYYETVGSGKCPIVDTWWQTETGSIMISPIPGAMHLKPGSATRPFLGIKAEVVDNDGRPV

SEQ ID NO: 192876 - protein, 299 aa, Unknown
  Bacterial polypetide isolated from the Sargasso Sea
VLHTTGGYMVYASMTHQYIFNYKQKDVYWCTADIGWVTGHSYIIYGPLSNGATTLMFEGIPTYPDNSRWWQIVDKHKVNIFYTAPTAIRALMKEGDKPVKKTSRKTLKLLGTVGEPINPEAWQWYYKTVGDSRCPIVDTWWQTETGGILISPQTGAINLKPGSATKPFFGIRPVIVDKSGKVLKGEAEGRLCIAQSWPGQMRTVYGDHQRFIDTYFSQFDGKYFTGDGCRRDKDGYYWITGRVDDVIIVSGHNLGTAEIESAFVAHPKVAEAAVVGFPHDIKGNGLYCYVTLNAGENHS

SEQ ID NO: 192877 - protein, 264 aa, Unknown
  Bacterial polypetide isolated from the Sargasso Sea
RNNFMAKKKKRKIKKKRVKRKKRKIKKKRIKKLKRKKLKKIKKNQSSELIFKVPKKWSNKAYVDKAEYERKYRLSIKDNEGFWKKEGKRIDWIKPYTKIKDVKYSKTEVKIKWYYDGTLNASVNCIDRHLKDKKNKTAIIWVGDDPKVSKQISYKELHKNVCKAANGLKELGIKKGDRVTIYLTMIPELAYVMLACARIGAIHSIIFGGFSPDSIAGRINDCQSDYIITADEGVRGGKIVPLKKITDEALSQCPNVKKMCCSKR

SEQ ID NO: 192878 - protein, 281 aa, Unknown
  Bacterial polypetide isolated from the Sargasso Sea
EMNAEDPLFILYTSGSTGKPKGVLHTTGGYMVYASMTHQYIFNYKPKDIYWCTADIGWVTGHSYIIYGPLANGATTIMFEGIPNYPDTSRWWQIVDKYKVNIFYTAPTAIRALMREGDKPVKKTSRKSLKLLGTVGEPINPEAWMWYYKTVGNSKSPIVDTWWQTETGGILIAPQTGAIPLKPGSATKPFYGIKPVIVDKNGKEIKGAGEGRLCIAQSWPGQMRTVYGDHQRFIDTYFSQFNGKYFTGDGCRRDKDGYYWITGRVDDVIIVSGHNLGTAEM

SEQ ID NO: 192879 - protein, 293 aa, Unknown
  Bacterial polypetide isolated from the Sargasso Sea
KNISYKELHKNVCKTANALRELGIKKGDRVTIYLTMIPELAYVMLACARIGAIHSIIFGGFSPDSIAGRINDCKSDYIITADEGVRGGKIIPLKKIADEALVQCPNVKKCVVVKRTGNEVNWINDRDVYFHDLIKNVSDKCEPEEMEAEDPLFILYTSGSTGKPKGVLHTTGGYMVYVSMTHQYIFDYKKNDIYWCSADIGWVTGHSYIIYGPLSNGATTIMFEGVPNYPDFSRWWQIVDKYKVNIFYTAPTALRALMREGEGPVKKTSRKSLKLLGSVGEPINPEAWLWYYK

SEQ ID NO: 192880 - protein, 252 aa, Unknown
  Bacterial polypetide isolated from the Sargasso Sea
ISYKQLHQEVSKAANGLKDIGVKKGDKVTIYLTMIPELAYTMLACARIGAVHSIIFGGFSADSITGRINDCKSDYVITADEGVRGGKIIDLKATVDEALLNCPNVKKCVVVKRTGNRINWDESRDVWYHEITKMASKNCEPEEMNAEDPLFILYTSGSTGKPKGVMHTTGGYMVYASMTHQYIFNYKPKDIYWCTADIGWVTGHSYIIYGPLSNGATTIMSEGIPNYPDWSRWWQIVDKYKVNIFYTAPTAI

SEQ ID NO: 192881 - protein, 190 aa, Unknown
  Bacterial polypetide isolated from the Sargasso Sea
KLEVSKFANVLKKMGVQKGDRVTIYLTMIPEVAFAMLACARIGAVHSVIFGGFAPESIAGRIQDCKSQFVITADEGLRGGKTIPLKKYINTALESCDDTIKTLVIKYTKLKEDIYKDNDFDYAELKEEVDESCECESMNAEDPLFILYTSGSTGKPKGVLHTTGGYLVYASFTHKYSFDYHQGDVYWCTA

SEQ ID NO: 192882 - protein, 157 aa, Unknown
  Bacterial polypetide isolated from the Sargasso Sea
SVFYTAPTAIRALMAYGDEPVKRHDRSSLRILGTVGEPINPEAWRWYFQVVGDSKCAIADTYWQTETGGHVMTPLPGVTPMKPGSCCLPFFGVEPKVLDAQSGQEVAWSKGTRADGVLALAKPWPSACRTVWGDHERYMATYLDCYKPYLFHGRWLY

SEQ ID NO: 192883 - protein, 198 aa, Unknown
  Bacterial polypetide isolated from the Sargasso Sea
MTDKFQKIYDQSIKNPEKFWQEASNDIFWFKKPSKILNKSNPPFYKWFEDGTTNTCYNALDIHINNGRGKKVALIYDSPITGNKSKFTYEELRSKVSKFAGALLAQGAKKGDRVIIYMPMIPEAVIAMLACARIGAIHSVVFGGFASNELASRIDDSKAKLLVTASCGFEPGRTVEYKPLVDEAIKIAKHKIEKMILF

SEQ ID NO: 192884 - protein, 253 aa, Unknown
  Bacterial polypetide isolated from the Sargasso Sea
KWYFEIPGNSKCPIVDTWWQTETGGILISPQTGAIRLKPGSASKPFFGIEPCIVDKYGNELEGECEGMLCMKRSWPGQMRTVYGDHKRFIDTYFSQFDGKYFTGDGCKRDEDGYYWITGRVDDVIIVSGHNLGTAEIESAFVSHKDVSEAAVVGYPHDVKGNGLYCYVSLKVGVNSSNELVLDLKNTIREKIGPIATPDFIHITSGLPKTRSGKIMRRILRKIACNDFENLGDTSTLADPSVVENLIENRKNK

SEQ ID NO: 192885 - protein, 305 aa, Unknown
  Bacterial polypetide isolated from the Sargasso Sea
MKSFGKKLVKISFWFKKPTKILNKSNHPFYKWFEDGVTNTCYNALDIHIDQGRGQKTALIYDSPITGNKAKFTYEELRAKVSKFAGSLKNQGVNKGDRVIIYMPMIPEAVIAMLACARIGAIHSVVFGGFASNELASRIDDSKAKLLVTASCGFEPGRTVEYKPLVDEAIKIANHKIDKMILFQRPGNEVKLNAPNEISWEEAVSNATDADCVEMNSNEFAYILYTSGTTGTPKGIVRDTGGHIVALKWTMKNIYNIDMENIWWSASDIGWIVGHSYIVYAPLFKGCTTVLFEGKPVGTPDAGAF

SEQ ID NO: 192886 - protein, 287 aa, Unknown
  Bacterial polypetide isolated from the Sargasso Sea
HIDQGRGDKTALIYDSPITGNKAKFTFNQLKQKVSKFAGALDKQGITKGDRIIIYMPMIPEAVVAMLACGRIGAIHSVVFGGFASNELASRIDDSKAKILITASCGFEPGRTVEYRPLVDGALKLAKHKVEKVILYQRKGHEVKLNQPLEISWEESLVNASEKDCVEMGSNEFAYILYTSGTTGVPKGIVRDIGGHIVALKWTMKNIYNIDTDDVWWSASDIGWIVGHSYIVYAPLFKGCTTILFEGKPVGTPDAGTFWKIISDYKVKSLFTAPTAFRAIKKEDPEG

SEQ ID NO: 192887 - protein, 306 aa, Unknown
  Bacterial polypetide isolated from the Sargasso Sea
YASMTHQYIFDYKPNDIYWCTADIGWVTGHSYIIYGPLANGATTIMFEGVPNYPDNSRWWQIVDKHKVNIFYTAPTAIRALMREGDGPVKKTSRKSLKLLGTVGEPINPEAWLWYYKTVGDSRCPIVDTWWQTETGGILIAPQPGAIDLKPGSATKPFYGIKPLLVDKDGKIIKGEGQGRLCMAGSWPGQMRTVYGDHQRFIDTYFSQFDGKYFTGDGCRRDKDGYYWITGRVDDVIIVSGHNLGTAEIESAFVAHPKVAEAAVVGFPHSIKGNGLYCYVTLNAGENPTGDLERDLKQWVRKQIGP

SEQ ID NO: 192888 - protein, 291 aa, Unknown
  Bacterial polypetide isolated from the Sargasso Sea
GKIIPLKKIADEALLQCPNVRKCLVVKRTGNQVNWNNERDESYEELLAKASPKCDPEEMSAEDPLFILYTSGSTGKPKGVLHTTGGYLVYASMTHQYIFDYKQKDIYWCTADIGWVTGHSYIIYGPLSNCATTIMFEGIPNYPDSSRWWQIVDKYKVKIFYTAPTAIRALMKEGDGPVMKTSRKSLKLLGTVGEPINPEAWMWYYKVVGDSKCPIVDTWWQTETGGILIAPQPGAIDLKPGSATKPFYGIKPVIVDETGKVLKGACKGRLCISASWPGQMRTVYGNHQRFI

SEQ ID NO: 192889 - protein, 241 aa, Unknown
  Bacterial polypetide isolated from the Sargasso Sea
KTSRKTLKLLGTVGEPINPEAWEWYYKTVGDSRCPIVDTWWQTETGGILISPQTGAIDLKPGSATKPFFGIKPEILDKDGKVLKGEAQGRLCISQSWPGQMRSVYGDHQRFIDTYFSQFDGKYFTGDGCRRDKDGYYWITGRVDDVIIVSGHNLGTAEIESAFVAHPKVAEAAVVGYPHDIKGNGLYCYVTLNAGEKSTLDLERDLKLWVRKQIGPIATPDLIQFAPGLPKTRSGKNNEKN

SEQ ID NO: 192890 - protein, 111 aa, Unknown
  Bacterial polypetide isolated from the Sargasso Sea
AEAAVVGVPHDIKGQGIYVYVTLNAGEEASEQLRQELRNWVRKEIGPIATPDVIQWAPGLPKTRSGKIMRRILRKIATAEYDSLGDISTLADPGVVQHLIDTHRQMQAACA

SEQ ID NO: 192891 - protein, 271 aa, Unknown
  Bacterial polypetide isolated from the Sargasso Sea
MKSKYNEIYQESLNKPEEFWKNISEDIFWFKKPSKILTKSKPPFYKWFEDGVTNTCYNALDYHIDQGKGEKIALIYDSPITGNKAKFTFNKLREKVSKFAGALKNQGIKKGDRVIIYMPMIPEAVVAMLACGRIGAIHSVVFGGFASNELASRIDDSKAKILITASCGFEPGRTVEYKPLVDEAIKLANHKINKMILFQRPGNEVKLNSPIEVSWEEVISNAKDVDCVEMNSNEFAYILYTSGTTGAPKGIVRDIGGHIVALKWTMKNIYN

SEQ ID NO: 192892 - protein, 228 aa, Unknown
  Bacterial polypetide isolated from the Sargasso Sea
MISPLPGVVATKPGSATFPLPGIEVEIVDKNGNKVKENEGGYLIIKKPWPGMMRTIHGNPERYLESYWEYISFKGEKNVYFAGDGARIDEDGYIWIMGRVDDVISVSGHRLGTMEIESALVSHKSVAESAVVGKKDDLKGEVIVAFVSLEKDVKGSSELVDNLKKHVVNEIGIIAKPEKIIISDSLPKTRSGKIMRRILRSLAAGEKISGDISTLEDSSVLEKLKELS

SEQ ID NO: 192893 - protein, 223 aa, Unknown
  Bacterial polypetide isolated from the Sargasso Sea
TTGGYNLWSHLTFKWIFDLKDDDIYWCTADVGWITGHSYIVYGPLSNGATTLMYEGVPRPSNLGAFWEIVQKYKVSIFYTAPTAIRAFMKSGREIPDKYNLESLRLLGTVGEPINPEAWMWYRDVIGKDRCPIVDTWWQTETGGVMISPLPGVVATKPGSATFPLPGIEVEIVDKNGDKVKENEGGYLIVKKPWPGMMRTIHGNSKRYLESYWEYISFKGEKN

SEQ ID NO: 192894 - protein, 310 aa, Unknown
  Bacterial polypetide isolated from the Sargasso Sea
KKGDRVQIYLTMIPELAYIMLACARIGAVHSIIFGGFSAESIAGRIKDCQSEYIVTADEGVRGGKTIPLKLTTDKALESCPDVKKCLVVKRTNKEIELIKDRDLFYDDVLKEVDDFCEPEILNAEDPLFILYTSGSTGKPKGVMHTSGGYIVYASMTHEYIFNYNDGDIYWCTADIGWITGHSYIIYGPLSNGATTLMFEGVPNYPDFSRFWKIVDKHKVNIFYTAPTAIRALMREGDDYVSKTSRSSLKLLGTVGEPINPEAWKWYFEVPGSSNCPIVDTWWQTETGGILISPQSGAIKLKPGSASKPF

SEQ ID NO: 192895 - protein, 161 aa, Unknown
  Bacterial polypetide isolated from the Sargasso Sea
MFEGVPNYPNSSRFWEVVDKHNVNIFYTAPTAIRALMKEGNEPVNKTSRSSLRLLGSVGEPINPEAWNWYYTVVGSSKCPIVDTWWQTETGGILISPLPGAIDLKPGSATKPFFGISPALVDNEGNELEGEAEGNLIIKDSWPGQMRTVYGDHKRFAETYF

SEQ ID NO: 192896 - protein, 283 aa, Unknown
  Bacterial polypetide isolated from the Sargasso Sea
WQIVDKYKVNIFYTAPTAIRALMREGDKPVKKTSRKTLKLLGTVGEPINPEAWMWYYKTVGDSRCPIVDTWWQTETGGILIAPQPGAIDLKPGSATKPFYGIKPVLVDKDGKIIKKEGKGRLCMASSWPGQMRTVYGDHQRFIDTYFSQFDGKYFTGDGCRRDKDGYYWITGRVDDVIIVSGHNLGTAEIESAFVAHPKVAEAAVVGFPHSIKGNGLYCYVTLNAGENPTGDLERDLKLWVRKQIGPIATPDVIQFAPGLPKTRSGKIMRRILRKLLPMSQII

SEQ ID NO: 192897 - protein, 275 aa, Unknown
  Bacterial polypetide isolated from the Sargasso Sea
TAIRALMSLGDEFVSSTSRKSIKVLGTVGEPINPEAWDWYYSVVGNKSCEVIDTWWQTETGSVLISPIAGITPTKPGSATLPFFGVRPELFDENGIKQSGEASGNLVIESSWPSQIRSVYNDHQRMIDTYFSTYSNIYFTGDGAKRDEDGYFWITGRVDDVLNVSGHRLGTAEVESALVLHPVVAEAAVVGFEHPIKGQGIYAFVTLMVDEEFSDELSAELRNFVGKEIGPIAKPDLIQNAPGLPKTRSGKIMRRILRKVAEGDFENLGDTTISC

SEQ ID NO: 192898 - protein, 107 aa, Unknown
  Bacterial polypetide isolated from the Sargasso Sea
VGDSRCPIVDTWWQTETGGILISPQTGAIDLKSGSATKPFYGIKPEILDKDGKVLKGEAQGRLCLSQSWPGQMRSVYGDHQRFIDTYFSQFDGKYFTGDGCRRDKDG

SEQ ID NO: 192899 - protein, 121 aa, Unknown
  Bacterial polypetide isolated from the Sargasso Sea
HRIGSAEVESALVSHISCTEAAVVGIDHEIKGQAIYAFVTVIPGTACNEKLRKELVQTIRSVIGPFASPDVIHWAPGLPKTRSGKIMRRILRKIANSDLENLGDTSTLADPTVVEQLIQTR

SEQ ID NO: 192900 - protein, 263 aa, Unknown
  Bacterial polypetide isolated from the Sargasso Sea
WEGDSPEDSDEISFQQLHYEVCKLANGLKKLGVEKGDRVAIYMPMVPQAAYAMLACARIGAVHSVIFGGFSPNAIADRINDSSAKVVITCDEGRRAGRSVPLKANVDRALANDACPSITNVIVHKLTGGDVAFDDSVDVWWDALVEDCSAQCEPEVMNAEDPLFILYTSGSTGTPKGVVHTTGGYLLYTAMTFKYAFDYREDDIYWCTADVGWITGHSYMTYGPLINGATQVFFEGVPTYPDVRRIAQVVEKYKVNSLYTAPT

SEQ ID NO: 192901 - protein, 250 aa, Unknown
  Bacterial polypetide isolated from the Sargasso Sea
MPKKNKKVKVKKKKSIKKKKIIKKKSDQNIEKELIYKTKKDWISKATVNKSQYEKKYKSSISDNDAFWKKEGKRISWIKPYTKIKDVKYSNSDVRIKWFYDGTLNASTNCIDRHLKKNKDKTAIIWVGDDPKIQKKITYKELHKEVSKAANGLKEIGVKKGDRVTIYLTMIPELAYTMLACARIGAVHSIIFGGFSPDSISGRINDCKSDYVITADEGVRGGKTIHLKSIMDEALVKCTKVKKCVVVKRT

SEQ ID NO: 192902 - protein, 335 aa, Unknown
  Bacterial polypetide isolated from the Sargasso Sea
EMSAEDPLFILYTSGSTGNPKGVLHTTGGYMVYASMTHQYIFNYKPKDIYWCTADIGWVTGHSYIIYGPLSNGATTIMFEGVPNYPDSSRWWQIVDKFKVNTFYTAPTAIRALMREGNEPVNKTSRKSLKLLGTVGEPINPEAWMWYYKTVGNSKCPIVDTWWQTETGGILISPQTGAIPLKPGSATKPFYGIKPVLVDKDGKEIKGAGEGRLCIAQSWPGQMRTVYGDHQRFIDTYFSQFDGKYFTGDGCRRDKDGYYWITGRVDDVIIVSGHNLGTAEIESAFVAHPKVAEAAVVGYPHDIKGNGLYCYVTLNAGESETGDLERELKLWVRKQ

SEQ ID NO: 192903 - protein, 152 aa, Unknown
  Bacterial polypetide isolated from the Sargasso Sea
FTGDGCKRDKDGYYWITGRVDDVIIVSGHNLGTAEIESAFVSHKDVSEAAVVGYPHDIKGNGLYCYVSLKVGVDSSEELVLDLKKTIREKIGPIASPDFIHVTSGLPKTRSGKIMRRILRKIASNEFENLGDTSTLADPSVVDDLIANRKNR

SEQ ID NO: 192904 - protein, 181 aa, Unknown
  Bacterial polypetide isolated from the Sargasso Sea
RAPWPGMMRTVHGNPQRFRESYWEHIRPADGSYLYFAGDGARRDADGYFWVMGRVDDVINVSGHRLGTMEIESALVSHPAVAEAAVVGRPDDLKGEGIVAFVTLEAGRESSEDLIKQLRAHVGTEIGPIARPDEIRCSDALPKTRSGKIMRRILRALAAGQDVTGDTSTLEDRSVLDRLRA

SEQ ID NO: 192905 - protein, 207 aa, Unknown
  Bacterial polypetide isolated from the Sargasso Sea
YGIKPVLVDKNGKEIKGAGEGRLCIAHSWPGQMRTVYGDHQRFIDTYFSQFNGKYFTGDGCRRDKDGYYWITGRVDDVIIVSGHNLGTAEIESAFVAHPKVAEAAVVGYPHDIKGNGLYCYVTLNAGENETGELERDLKLWVRKQIGPLATPDLIHFTPGLPKTRSGKIMRRILRKIAANEHGQLGDTTTLADPSVVDSLVDNRKNI

SEQ ID NO: 192906 - protein, 289 aa, Unknown
  Bacterial polypetide isolated from the Sargasso Sea
FQDGITNTCYNAVDLHVEKGKGQKTAIIYDSPITNSQKKITYNELKDQVSIFAGALINQGIKKGDRVIIYMPMIPEAVIAMLACGRIGAVHSVVFGGFAPNELASRIDDSKAKIILSASCGYEPGKTIEYKPLLKKAIELAKHKPEKCIIYQRKDFKVDLEKNEIDWNDAVKDAKPAECVEMNANDYAYILYTSGTTGVPKGIVRDIGGHIVALKWTMKNIYNIDPDDVWWSASDIGWIVGHSYIVYAPLFHGCTTVLFEGKPVGTPDAGVFWRIISEHKVKSLFTAPT

SEQ ID NO: 192907 - protein, 313 aa, Unknown
  Bacterial polypetide isolated from the Sargasso Sea
LITADESVRGGKIFPLKSNVDKALEKENKINKVLVIKRTGNNINFLKERDIWWHEEKNKVDDTNKPAELKAEDPLFILYTSGSTGKPKGVLHTSGGYIVYASLTHEYIFNYKENDVYWCTADVGWITGHSYIVYGPLANGATTLIFEGVPNYPDAARFWEICDKHDVSIFYTAPTALRAIMREGDEFVKKTDRSSLRILGTVGEPINPEAWKWYYEVVGNQNCPIVDTWWQTETGGVLISPLPGTIDMKPGSATLPFFGIQPAIVDNQSTVLEGMAEGNLVITDSWPGQMRTVYGDHQRFIDTYFSTFDKVYL

SEQ ID NO: 192908 - protein, 265 aa, Unknown
  Bacterial polypetide isolated from the Sargasso Sea
IYGPLSNGATTIMFEGVPNYPDSSRWWQIVDKYKVNIFYTAPTAIRALMREGDKPVKKTSRKTLKLLGTVGEPINPEAWMWYYKTVGDSRCPIVDTWWQTETGGILIAPQPGAIDLKPGSATKPFYGIKPVLVDKDGKIVKGEGKGRLCMASSWPGQMRTVYGDHQRFIDTYFSQFDGKYFTGDGCRRDKDGYYWITGRVDDVIIVSGHNLGTAEIESAFVAHPKVAEAAVVGFPHSIKGNGLYCYVTLNAGENPTGDLERDLKL

SEQ ID NO: 192909 - protein, 135 aa, Unknown
  Bacterial polypetide isolated from the Sargasso Sea
TGRVDDVLNVSDIEIGTAEVESALVTHPDIAEAAVVPIEHEIKGQAIYAYVILKEKNMNADSLVKELNECVSSEIGKIAKPEYIHIIRDLPKTRSGKIMRRILRKIANNQFSDFGDTSTLADPTIIEELIRSKGE

SEQ ID NO: 192910 - protein, 207 aa, Unknown
  Bacterial polypetide isolated from the Sargasso Sea
YGIKPVLVDKNGDEIKGAGEGRLCIAQSWPGQMRTVYGDHQRFIDTYFSQFNGKYFTGDGCRRDKDGYYWITGRVDDVIIVSGHNLGTAEIESAFVAHPKVAEAAVVGYPHDIKGNGLYCYVTLNAGETETGELERDLKLWVRKQIGPLATPDLVHFTPGLPKTRSGKIMRRILRKIAANEHEQLGDTTTLADPSVVNSLVENRKNI

SEQ ID NO: 192911 - protein, 258 aa, Unknown
  Bacterial polypetide isolated from the Sargasso Sea
PEAWEWYYRVVGEERCPIVDTWWQTETGGIMITPLPGARALKPGSATLPFFGVVLALLDGDGHEIEGQGEGSLVIKNSWPGQMRTVFGDHQRFKETYFSTYPGYYFTGDGARRDSDGYYWITGRVDDVINVSGHRLGTAEVESALVLHENVSEAAVVGYPHDIKGQGIFAYVTLMNGIQPSENLRKELVDLVRKEIGPIANPDKIQWAPGLPKTRSGKIMRRILRKIAANELENLGDTTTLADPSVVEELKNSYMQSL

SEQ ID NO: 192912 - protein, 278 aa, Unknown
  Bacterial polypetide isolated from the Sargasso Sea
FRKSDLSSLKVIGSVGEPINEEAWNWYNEKVGKNNCPIVDTWWQTETGGIMISPLPNIIECKPTYATLPLPGIQPVLLDNNGNEILENNIEGNLCIKFPWPSILRTTYGDHKRCKETYFSTFKGFYFTGDGAKRDENGMYRILGRVDDVINVSGHRIGTAEVEDAINQNSDVVESAVVGYPHDIKGQGIFGFVIINNESEKTDYFDSIRKTVSNHIGPIAKPDKILIVPGLPKTRSGKIMRRILRKIASNEFNNFGDISTLLNPEIVDKIISSFKKTN

SEQ ID NO: 192913 - protein, 279 aa, Unknown
  Bacterial polypetide isolated from the Sargasso Sea
IGGFAPESNAGRIKDCKSKFIITADEGIRGGKIIPLKKYINTALEDCDDSIKTLVVRCTNTKEDLHQVNNFYYDELIKEVDDQCVCVSMNAEDPLFILYTSGSTGKPKGVLHTTGGYLVYASFTHKYSFDYHTGDVYWCTADAGWITGHSYSVYGPLANGGTTLLFEGVPNYPDFSRFWEVCEKYKVNIFYTAPTVLRSLMKEGNSYIEKCDLSSLRILGTVGEPINPEAWNWYSSIVGKDKCPVIDTWWQTETGGHLISPIPGVSKLKPGSATQPYFG

SEQ ID NO: 192914 - protein, 103 aa, Unknown
  Bacterial polypetide isolated from the Sargasso Sea
LTWEGDEPGNSKEKTFKELHSEVCRVANILKTLQIKKGSRICIYMPMNPEAAFARFACARIGAIHSVVFGGISPESQKDRNLDADCRIVITADEGVRGGKKGP

SEQ ID NO: 192915 - protein, 270 aa, Unknown
  Bacterial polypetide isolated from the Sargasso Sea
MPKKKVKKRKKKIITKRKTKAKSLAPKQEKELIYRTKKDWISKALVNKSQYEKKYKSSIKDNDGFWKKEGKRINWIKPYTKIKDVKYSKSDVKIKWFYDGTLNASANCIDRHLKKNKDKTAIIWVGDDPKVQKKISYKELHKEVSKAANGLKELGVKKGDRVTIYLTMIPELAYTMLACARIGAVHSIIFGGFSPDSISGRINDCESDYLITADEGVRGGKIIPLKSIADEALVNCPNVKKCVVVKRTGNRINWDERRDVWYHELTKKVS

SEQ ID NO: 192916 - protein, 309 aa, Unknown
  Bacterial polypetide isolated from the Sargasso Sea
KYDEMYSESINNPDAFWSKHGLRIDWIKPFTKIKDVSYEHPNVSIKWFEDGELNVSANCIDRHLKKRGNQTAIVWEGDNPEESQHVTYNELHHQVCKLANVYKNLGVAKGDRVVLYMPMIPEAAYAMLACARIGAIHSIVFAGFSPEALAARVEGCKASLIVTADEAPRGGKNTPLKANVDKALKICGDVKTLVVERTGGNVSMKDGRDTSFNAAMKEASEECEPTVMNAEDPLFILYTSGSTGAPKGVQHCSGGYLVWASMTHEYVFDYHDGDIYWCTADVGWVTGHSYIVYGPLANGATTLMLKVFQ

SEQ ID NO: 192917 - protein, 239 aa, Unknown
  Bacterial polypetide isolated from the Sargasso Sea
MILWWQTETGGIMISPQTGAIPLKPGSATKPFYGIKPVLVDKNGKEIKGAGEGRLCIAQSWPGQMRTVYGDHQRFIDTYFSQFDGKYFTGDGCRRDKDGYYWITGRVDDVIIVSGHNLGTAEIESAFVAHPKVAEAAVVGYPHDIKGNGLYCYVTLNAGERETGDLERDLKLWVRKQIGPLATPDLIHFTPGLPKTRSGKIMRRILRKIAANEHEQLGDTTTLADPSVVESLVDNRKNI

SEQ ID NO: 192918 - protein, 275 aa, Unknown
  Bacterial polypetide isolated from the Sargasso Sea
LACARIGAIHSIIFGGFSPDSIAGRINDCKSDYVITADEGLRGGKTIALKSITDEALMNCPKVKKCIVVKRTGNRINWDESRDIWYHEITKKVSSHCEPEEMNAEDPLFILYTSGSTGKPKGVLHTTGGYMVYASMTHQYIFNYKPKDIYWCTADIGWITGHSYIIYGPLSNGATTIMFEGIPTYPDTSRWWQIVDKYKVNIFYTAPTAIRALMREGDGPVKKTSRKTLKLLGTVGEPINPEAWQWYYKTVGDSKCPIVNTWWQTETGGILISPQ

SEQ ID NO: 192919 - protein, 265 aa, Unknown
  Bacterial polypetide isolated from the Sargasso Sea
KSNPPFYKWFEDGITNSCYNALDLHVDQGRGDKIALIYDSPITGNKAKFTFSDLKQKVSKFAGALEKQGVKKGDRVIIYMPMIPEAVIAMLACGRIGAVHSVVFGGFASNELASRIDDSKAKILITASCGFEPGRTVEYRPLVDGALKLAKHKVEKVIFYQRKDHEIKLNEPLEISWEESLVNATEKDCVEMGSNEFAYILYTSGTTGVPKGIVRDIGGHIVALKWTMKNIYNIDTGDVWWSASDIGWIVGHSYIVYAPLLKAAP

SEQ ID NO: 192920 - protein, 252 aa, Unknown
  Bacterial polypetide isolated from the Sargasso Sea
IWYRDVIGGGRCPIVDTWWQTETGGVMISPLPGATPTKPGSATFPLPGIEADVVNSDGDSVANNEGGYLVVKRPWPGMMRNVYGDEKRFRESYWEYLKPSDNSYIYFAGDGARRDEDGYFWVMGRVDDVINVSGHRLGTMEIESALVSHELISEAAVVGRPDDLKGESIVAFVTLKTGAEANENIEAQLKKHVVNEIGPIAKPDEFKFTDSLPKTRSGKIMRRILRALASGDEISGDTSTLEDRSVLDKLRS

SEQ ID NO: 192921 - protein, 115 aa, Unknown
  Bacterial polypetide isolated from the Sargasso Sea
SAFVAHPKVAEAAVVGYPHSIKGNGLYCYVTLNAGEKSTGELERDLKLWVRKQIGPIATPDLIQFSPGLPKTRSGKIMRRILRKIAANEHDQLGDTTTLADPTVVESLVENRKNK

SEQ ID NO: 192922 - protein, 307 aa, Unknown
  Bacterial polypetide isolated from the Sargasso Sea
SDGGKFVDKYKVNIFYTAPTALRALMREGVEPVRKTSRKSLKLLGTVGEPINPEAWLWYYRVIGNSKCPIVDTWWQTETGGILISPQPGAIDLKPGSATKPFYGIKPVIVDEQGKTLKGACRGRLCIAQSWPGQMRTVYGDHQRFIDTYFSQFDGKYFTGDGCRRDEDGYYWITGRVDDVIIVSGHNLGTAEIESAFVAHPKVAEAAVVGYPHDIKGNGLYCYVTLNAGENPSGDLERDLKLWVRKQIGPIATPDLIQFAPGLPKTRSGKIMRRILRKIAANEHDQLGDTTTLADPTVVESLVENRK

SEQ ID NO: 192923 - protein, 157 aa, Unknown
  Bacterial polypetide isolated from the Sargasso Sea
FDGKYFTGDGCKRDKDGYYWITGRVDDVIIVSGHNLGTAEIESAFVAHTKVAEAAVVGFPHEIKGNGLYCYVTLNAGESSSGDLERELKLWVRKQIGPIATPDHIQFSPGLPKTRSGKIMRRILRKIAANEHHDLGDTTTLADPSVVDSLVENRRNK

SEQ ID NO: 192924 - protein, 190 aa, Unknown
  Bacterial polypetide isolated from the Sargasso Sea
EGEGRLCIAQSWPGQMRTVYGDHQRFIDTYFSQFDGKYFTGDGCKRDKDGYYWITGRVDDVIIVSGHNLGTAEIESAFVAHPKVAEAAVVGYPHDIKGNGLYCYVTLNAGESETGDLDRELKLWVRKQIGPLATPDLIHFTPGLPKTRSGKIMRRILRKIAANEHGQLGDTTTLADPTVVDSLVDNRKNI

SEQ ID NO: 192925 - protein, 232 aa, Unknown
  Bacterial polypetide isolated from the Sargasso Sea
VPTYPDASRWWQIIDKYKVNIFYTAPTAIRALMKEGDKLVKKTSRKSLKLLGTVGEPINPQAWEWYYKTVGDSRCPIVDTWWQTETGGILISPQTGAIDLKPGSATKPFYGIKPVIVDKNGSVIKGQGQGRLCIAQSWPGQMRTVYGDHQRFIDTYFSQFDGKYFTGDGCRRDKDGYYWITGRVDDVIIVSGHNLGTAEIESAFVKHPKVAEAAVVGYPHDIKGNGLYCYVT

SEQ ID NO: 192926 - protein, 110 aa, Unknown
  Bacterial polypetide isolated from the Sargasso Sea
HPKVAEAAVVGYPHDIKGNGLYCYVTLNAGEIETGELERDLKLWVRKQIGPLATPDLIHFTPGLPKTRSGKIMRRILRKIAANEHEQLGDTTTLADPSVVSSLVENRKNI

SEQ ID NO: 192927 - protein, 299 aa, Unknown
  Bacterial polypetide isolated from the Sargasso Sea
GDANPAKHVIVVKHVGENIDFHQGRDLWYHEILAKEPKHCEPEVMNAEDPLFILYTSGSTGKPKGVLHTTGGYMVWASMTHQYVFDYKDRDIYWCAADIGWVTGHTYIVYGPLANGATSILFEGVPTYPSVKRIAQVVDKYKVNILYTAPTAIRALMAHGTVAVDGADLSSLTILGSVGEPINPEAWNWYHQSYGKSNCPIVDTWWQTETGGILITPLPGATALKPGSATRPFFGVKPAIVTNEGELIDGVAEGNLVILDSWPGQMRSVFGDHERFEQTYFSTYKGMYFTGDGAKRDED

SEQ ID NO: 192928 - protein, 132 aa, Unknown
  Bacterial polypetide isolated from the Sargasso Sea
VINVSGHRLGTAEVESALVSHELVAEAAVVGYPHDIKGQGIYAYVTLTRGTEESEELRQELRQWVRKEIGALATPDLIQWATGLPKTRSGKIMRRFLRKIAANEVTNLGDASTLADPAVIETLIETRLNRNE

SEQ ID NO: 192929 - protein, 142 aa, Unknown
  Bacterial polypetide isolated from the Sargasso Sea
DGYYWITGRVDDVIIVSCHNLGTAEIESAFVAHPKVAEAAVVGYPHDIKGNGLYCYVTLNAGETPDGDLERDLKLWVRKQIGPIATPDFIQFSPGLPKTRSGKIMRRILRKIAANEHEQLGDTTTLADPSVVSSLVDNRKNV

SEQ ID NO: 192930 - protein, 270 aa, Unknown
  Bacterial polypetide isolated from the Sargasso Sea
FFDDVIKEVDTICEPEVLNAEDPLFILYTSGSTGKPKGVMHTTGGYIVYASMTHEYIFNYNDGDIYWCTADIGWITGHSYIIYGPLANGATTLMFEGVPNYPNFSRFWQIVDKHKVNIFYTAPTAIRALMREGDDYVTKTNRSSLKLLGTVGEPINPEAWKWYFEVPGNSQCPIVDTWWQTETGGILISPQTGAIKLKPGSASKPFFGIEPCIVDKEGRELEGECEGMLCMKRSWPGQMRTVYGDHKRFIDTYFSQFDGKYFTGDGCKKR

SEQ ID NO: 192931 - protein, 249 aa, Unknown
  Bacterial polypetide isolated from the Sargasso Sea
GPVKKTSRKSLKLLGTVGEPINPEAWMWYYKTVGEKKCPIVDTWWQTETGGILIAPQPGAINLKPGSATKPFYGIKPAIVDESGKVLKGACKGRLCMTQSWPGQMRTVYGDHKRFIDTYFSQFDGKYFTGDGCRRDKDGYYWITGRVDDVIIVSGHNLGTAEIESAFVAHNKVAEAAVVGFPHEIKGNGLYCYITLNAGENPNGDLERELKLWVRKQIGPIATPDYIQFAPGLPKTRSGKIMRRILRKI

SEQ ID NO: 192932 - protein, 265 aa, Unknown
  Bacterial polypetide isolated from the Sargasso Sea
QAKQQSFGVGDDPADTKKISYKELHQNVCKAANGLKSLGIQKGDRVTIYLTMIPELAYIMLACARIGAVHSIIFGGFSPDSIATRITDCESEYLITADEGVRGGKIIPLKKIADEALDQCPGVKKCIVVERTGNQVNWNNERDVSYKDLISSVPSKCEPEEMNAEDPLFILYTSGSTGKPKGVLHTTGGYMVYASMTHQYIFDYKANDIYWCTADIGWVTGHSYIIYGPLSNGATTIMFEGVPNYPDSSRWWQIVDKHKVNIFYT

SEQ ID NO: 192933 - protein, 268 aa, Unknown
  Bacterial polypetide isolated from the Sargasso Sea
MPKKKKRKKIKKKKSSRKKRLKKSKSKKIENKELIYKAKSDWIKKAIVNKSTYEKKYSESLKNNDNFWKKEGKRITWIKPYTKIKDYKYSKTDVHIKWFYDGTLNASANCIDRHLKKNKDKTAIIWVGDDPKVQKKISYKQLHQEVSKAANGLKEIGVKKGDRVTIYLTMIPELAYTMLACARIGAVHSIIFGGFSADSITGRINDCKSDYVITADEGVRGGKIIHLKETVDEALLNCPNVKKCVVVKRTGNRINWDESRDVWYHEYN

SEQ ID NO: 192934 - protein, 273 aa, Unknown
  Bacterial polypetide isolated from the Sargasso Sea
WCCSSVVFAGFSSTSFADRINDCQAKIVLTSDGNFRGNKTIPVKPVVDEALEKCSTIESVIVLKRTKQKIDMTEGRDYWWHDCVNDVSSQCDPEILDSEGMLFILYTSGSTGKPKGVVHSSAGYMVYSAYTFLNVFQYYENDIYWCTADVGWITGHSYIVYGPLLCGATSIMFEGVPTFPNVSRFWDIIDKYKVNQFYTAPTAIRALQAHGLEPLKNNSLESLKVIGSVGEPINEEAWHWYHDNIGKGNCPLVDTWWQTETGGIMISALAGIT

SEQ ID NO: 192935 - protein, 178 aa, Unknown
  Bacterial polypetide isolated from the Sargasso Sea
MSSRFNKIYQNSIKNPEKFWQEASEDIFWFKKPTKILNKSNPPFYKWFEDGVTNTCYNALDIHIDQGRGQKTALIYDSPITGNKSKFTYEELRSKVSKFAGALKSQGANKGDRVIIYMPMIPEAVVAMLACARIGAIHSVVFGGFASNELASRIDDSKAKLLVTASCGFEPRTDSGNT

SEQ ID NO: 192936 - protein, 293 aa, Unknown
  Bacterial polypetide isolated from the Sargasso Sea
YTMLACARIGAIHSIIFGGFSPDSISGRINDCESDYVITQDEGLRGNKVIPMKSNVDEALVNCPNVKKCVVVKRTGNFVNIEKERDVWYHEITKKVSNKCEPEEMNAEDPLFILYTSGSTGKPKGVLHTTGGYMVYTSMTHQYIFNYKPKDIYFCTADIGWVTGHSYIIYGPLSNAATTVMFEGVPNYPDKSRWWQIVDKYKVNIFYTAPTAIRDLMREGDKPVKKTSRKSLKLLGTVGEPINPEAWQWYYKTVGDSRCPIVDTWWQTETGGILISPQTGAINLKPGSATKPF

SEQ ID NO: 192937 - protein, 293 aa, Unknown
  Bacterial polypetide isolated from the Sargasso Sea
HSITIFYTAPTAIRALMKEGEGPLKSTSRNSLRLLGSVGEPINPEAWEWYYKSVGKTKCPIVDTWWQTETGGILISALPGAMDLKPGSATLPFFGIRPIILDDKGNILEGPCKGNLCFEESWPGQMRTVYGNHERFKETYFSQFPGKYFTGDGCRRDKDGYYWITGRVDDVINVSGHRLGTAEIESALVAHPNVAESAVVGYSHDIKGQGIYAYITLQVEISPSEKLKKELINWVRKEIGPIATPDILHWAPNLPKTRSGKIMRRILRKIAEKQYEELGDTSTLADPNVVTNS

SEQ ID NO: 192938 - protein, 266 aa, Unknown
  Bacterial polypetide isolated from the Sargasso Sea
DEAIRGGKKIPLKMNVDTALLDCPDVMNCLVIKRTKSDIDWVEGRDKDYDEMFAEASNECPCEPMSSEDPLFILYTSGSTGKPKGVMHTTGGYLLGAHLSFKYLFGYKGEDKYWCTADVGWITGHTYIIYGPLSNGATSLMFEGIPTYPSPSRFWDVCDKHQISIFYTAPTALRALMAQGDEHVLKTNRKSLRILGTVGEPINPEAWEWYFKVVGNENCHIIDTWWQTETGSVLISPIAGITPVKPGSATLPFFGVRPELVDENGN

SEQ ID NO: 192939 - protein, 260 aa, Unknown
  Bacterial polypetide isolated from the Sargasso Sea
MKEVAQFANALKELGVNKGDRICIYMQMVPELAISVLACARIGAIHSVVFGAFSSDSLRDRINDSSCKILITQDTGVRGKKQNIPMKENADKAIVQTPSIEHTIVVRRTGEYVYMDTNRDIWWHEAVSGVDRFCPPEVMEAEDPLFILYTSGSTGKPKGVLHTTGGYLTYVSYSHQLIFDYKPGDIYWCTADLGWITGHSYIVYGPLSNRATTLMFEGVPNYPDFGRFWDVVDKHKVNQFYTAPTALRALMKEGNKWVLN

SEQ ID NO: 192940 - protein, 166 aa, Unknown
  Bacterial polypetide isolated from the Sargasso Sea
MSSKFNEIYENSINNPEKFWQEASQDIFWFKKPSKILNKSNPPFYKWFEDGVTNTCYNALDIHIDQGRGQKTALIYDSPITGNKSKFTYEELRSKVSKFAGALKAEGANKGDRVIIYMPMIPEAVVAMLACARIGAIHSVVFGGFASNELASRIDDSKAKILVTAS

SEQ ID NO: 192941 - protein, 185 aa, Unknown
  Bacterial polypetide isolated from the Sargasso Sea
MLCLKTSWPGQMRTVYGDHKRFISTYFSQFEGKYFTGDGCRRDKDGYFWITGRVDDVIIVSGHNLGTAELESAFVSHPKVSEAAVVGYPHDIKGNGLYCYVSLKVGTQSNENLKKELIQTIRSKIGPIATPDFIHFTDGLPKTRSGKIMRRILRKIAANEHDQLGDITTLADPSVVKKLIENKLN

SEQ ID NO: 192942 - protein, 151 aa, Unknown
  Bacterial polypetide isolated from the Sargasso Sea
TGDGCKRDKDGYYLITGRVDDVIIVSGHNLGTAEIESAFVSHKDVSEAAVVGYPHDVKGNGLYCYVSLKVGVDPSENLVLALKKTIREKIGPIATPDFIHITAGLPKTRSGKIMRRILRKIASNDFENLGDTSTLADPSVVENIIENRKNR

SEQ ID NO: 192943 - protein, 285 aa, Unknown
  Bacterial polypetide isolated from the Sargasso Sea
TADVGWITGHTYILYGPLSNGATTLMFEGVPTYPDPSRFWEVCDQHEINIFYTAPTAIRALIAKGEEYLESSNRNSLKVLGTVGEPINPEVWQWYFEKVGKSKCEVVDTWWQTETGSVLISPIAGITPKKPGSATLPFFGIEPSIVDVNGTILEGKSKGNLCINNTWPSQIRTVYGDHERMLQTYLSQYSEKYFTGDGARRDEDGYYWVTGRVDDVLNVSGHRIGTAEVESAIVNHPQVAESAVVGVEHEIKGQAIYAYIILKKTTEDHNKLESEIKDEVAKIIG

SEQ ID NO: 192944 - protein, 302 aa, Unknown
  Bacterial polypetide isolated from the Sargasso Sea
MIPELAIAVLACARIGAVHSVVFGAFSSDSLRDRINDSECKILVTQDTGVRGTKQNIPMKANADQALFDAPSIEHVIVVRRTGEPVNMDAKRDLWWHEATSGVSARCEPVAMDSEDPLFILYTSGSTGKPKGVLHTTGGYLVYASFTHQMVFDYHPGDIYWCTADLGWITGHSYIVYGPLSNRATTIMFEGVPNYPDFGRFWDVVDKHKVNQFYTAPTALRALMKEGNEWVSSRDLSSLRLLGTVGEPIKEPEWKWYYDIVGQGQCPIVDTWWQTETGGILITPLPGATPTKPGSATLPFFG

SEQ ID NO: 192945 - protein, 263 aa, Unknown
  Bacterial polypetide isolated from the Sargasso Sea
GEPINPEAWIWYMDVIGKNKCPIVDTWWQTETGGVMISPLPGIVATKPGSATFPLPGIEVEIVDKNGDKVKENEGGYLIIKKPWPGMMRTIHGNSERYLESYWEYISFKGEKNVYFAGDGARIDEDGYIWIMGRVDDVISVSGHRLGTMEIESALVSHKSVAESAVVGKKDDLKGEVIVAFVSLEKDVNGSSELVEDLKKHVVNEIGIIAKPEKIIISDSLPKTRSGKIMRRILRSLAAGEKISGDISTLEDSSVLEKLKELS

SEQ ID NO: 192946 - protein, 273 aa, Unknown
  Bacterial polypetide isolated from the Sargasso Sea
FQVPEKWAKQAYVNKVKYKKKYNLSIKENDRFWKKEGKRISWIKPYTKIKDIKYSKDEVKIKWYYDGTLNASSNCIDRHLKKNGKKTAIIWIGDDPSVSKRISYKELHKNVCKTANGLKSIGVKKGDRVTIYLTMIPELAYTMLACARIGAIHSIIFGGFSPDSIATRINDCESDYLITADEGVRGGKIIPLKQIADEALLQCPNVKKCVVVKRTGNQVNWDHERDISYEELISNASGKCEPEEMNAEDPLFILYTSGSTGKPKGVLHTTGGY

SEQ ID NO: 192947 - protein, 307 aa, Unknown
  Bacterial polypetide isolated from the Sargasso Sea
VCKAANGLKSIGVQKGDRVTIYLTMIPELAYVMLACARIGAIHSIIFGGFSPDSIATRINDCESDYVITADEGVRGGKIIPLKKIADEAMMQCPNVKKCVVIKRTGNQVNWDNERDVSYEDIISNVSDKCVPEEMGAEDPLFILYTSGSTGKPKGVLHTTGGYMVYASMTHQYIFDYKNKDIYWCTADIGWVTGHSYIIYGPLSNGATTIMFEGVPNYPDSSRWWQIVDKYKVNIFYTAPTAIRALMREGDAPVKKTSRKSLKLLGTVGEPINPEAWMWYYKIVGEKKCPVVDTWWQTETGGILIAP

SEQ ID NO: 192948 - protein, 180 aa, Unknown
  Bacterial polypetide isolated from the Sargasso Sea
MSGKTYLPSEEFSNNAVLQENEFNSMHGQFNEDPEEFWRQQGHRLNWIKGYSKVKNVDFSFPHVSIKWFEDGVLNVCENCVDRHLEAKGNDTAIIWEGDEPTDSEFITYNELHKNVSKLANSYKALGVRKGDRIIIYMPMIPEAAYAMLASARIGAIHSVVFAGFSPDALSARIQDCESF

SEQ ID NO: 192949 - protein, 312 aa, Unknown
  Bacterial polypetide isolated from the Sargasso Sea
KINLVPERDFLLDDLIKDVDYNCEPETMSAEDPLFILYTSGSTGKPKGVMHTSGGYIVYASMTHEYIFNYQAEDIYWCTADIGWITGHSYIIYGPLSNGATTLVFEGVPNYPDFSRFWQIIDKHQVNIFYTAPTAIRALMREGDDHVKKTKRNSLKLLGTVGEPINPEAWKWYFEIPGNSKCPIVDTWWQTETGGILISPQTGAIELKPGSASKPFFGIEPCIVNKDGVELLGECEGMLCIKRSWPGQMRTVYGDHNRFIKTYFSQFNGKYFTGDGCKRDKDGYYWITGRVDDVIIVSGHNLGTAEIESAFV

SEQ ID NO: 192950 - protein, 268 aa, Unknown
  Bacterial polypetide isolated from the Sargasso Sea
AIINKSGYEKKYSDSIKNNDNFWKKEGKRITWIKPYTKIKDYKYSKTDVNIKWYYDGTLNASANCIDRHLKKNKDKTAIIWVGDDPKVQKKISYKQLHQEVSKAANGLKEIGVKKGDRVTIYLTMIPELAYTMLACARIGAVHSIIFGGFSADSITGRINDCKSDYIITADEGVRGGKIIHLKDTVDEALLNCPNVKKCVVVKRTGNRINWDESRDVWYHDITKKVSKNCEPEEMNAEDPLFILYTSGSTGKPKGVLHTTGGYMVYAS

SEQ ID NO: 192951 - protein, 251 aa, Unknown
  Bacterial polypetide isolated from the Sargasso Sea
MSQIHKHSIPANIADSCLINPEQYKAQYHQSVTDPDAFWGEQGKILDWMRPYTRVKNTSFAPGNVSIKWYEDGTLNLAANCLDRHLAERGDQTAIIWEGDDASQSKHITYRELHHDVCRFANVLLDLGIKKGDVVAIYMPMVPEAAVAMLACARIGAIHSVIFGGFSPEAVAGRIIDSNSRLVITSDEGLRAGRAIPLKKNVDDALKNPNVKSIEHVVVLKRTGGKIDWQEGRDLWWSDLIAQASDQHQPE

SEQ ID NO: 192952 - protein, 176 aa, Unknown
  Bacterial polypetide isolated from the Sargasso Sea
MRTVYGDHERFIKTYFSQFDGKYFTGDGCRRDRDGYFWITGRVDDVIIVSGHNLGTAEIESAFVAHNKVAEAAVVGFPHDIKGNGLYCYVTLNAGEQSSGDLERELKLWVRKQIGPIATPDIIQFAPALPKTRSGKIMRRILRKIAANEHEELGDTTTLADPSVVESLIENRQNKN

SEQ ID NO: 192953 - protein, 269 aa, Unknown
  Bacterial polypetide isolated from the Sargasso Sea
IPELAILMLACARIGAVHSIIFGGFSAESISGRVNDCKSEYIITADEGVRGGKTIPLKATTDEALSNCPDVKKCIVVKRTGNYVYWDQDRDVWYHDLIKDVPNYCEPEEMNAEDPLFILYTSGSTGKPKGVLHTTGGYMVYASMTHQYIFNYKPNDIYWCTADIGWVTGHSYIIYGPLANGATTIMFEGVPNYPDSSRWWQIVDKYKVNTFYTAPTAIRALMREGDGPVNKTSRKSLKLLGTVGEPINPEAWMWYYKTVGNSKCPIVDT

SEQ ID NO: 192954 - protein, 172 aa, Unknown
  Bacterial polypetide isolated from the Sargasso Sea
MSENEKFEVSSEWSTEAQINNDKYNKWYDNSLNNNEEFWSEHGKRIDWIKPYTNVKDVSYNKDNFSIKWYYDGTLNASSNCIDRHLKDKADQTAIIWEGDDPADSKHITYKELHSEVSKLANGMKSLGVKKGDRVTIYMPMIPEAAYAMLACTRIGAIHSVVFGGFSPDSLA

SEQ ID NO: 192955 - protein, 148 aa, Unknown
  Bacterial polypetide isolated from the Sargasso Sea
GCKRDEDGYYWITGRVDDVINVSGHRMGTAEVESALVSHEKVSEAAVVGFPHEIKGQGIYAYVTLNAGENGNEEIRKELINWVRKEIGPIASPDLIQFAPNLPKTRSGKIMRRILRKIAENDYSELGDTSTLAEPMVVDELIENRQNK

SEQ ID NO: 192956 - protein, 314 aa, Unknown
  Bacterial polypetide isolated from the Sargasso Sea
YKPNDIYLVYKLIFGWITGHSYIIYGPLSNGATTIMFEGVPTYPDTSRWWQIVDKYKVNIFYTAPTAIRALMREGDKPVKKTSRKTLKLLGTVGEPINPEAWQWYYKTVGDSKCPIVDTWWQTETGGILISPQTGAINLKPGSATKPFYGIRPVIVDKNGKTLKGEAQGRLCIAQSWPGQMRTVYGDHQRFIDTYFSQFDGKYFTGDGCRRDKDGYYWITGRVDDVIIVSGHNLGTAEIESAFVAHPKVAEAAVVGYPHDIKGNGLYCYVTLNVGEKSSLDLERELKLWVRKQIGAIATPDLIQFSPGLPKTRS

SEQ ID NO: 192957 - protein, 222 aa, Unknown
  Bacterial polypetide isolated from the Sargasso Sea
MSDKFSKIYDHSIKNPEKFWQDAAEDIFWFKKPTKILNKSNPPFYKWYEDGVTNTCYNALDIHIDQGRGKNIALIYDSPITGNKSKFTYEELRSKVAKFAGALKNQGVNKGDRVIIYMPMIPEAVIAMLGCARIGAIHSVVFGGFASTELASRIDDSKAKLLVTASCGFEPGRTVEYKPLVDEAIKIANHKIEKMILFQRSGHEVKLNAPLEISWDEVVSIA

SEQ ID NO: 192958 - protein, 222 aa, Unknown
  Bacterial polypetide isolated from the Sargasso Sea
MSYENNYLYWKKSPLKFWETKASNIDWIKPWDKVLCSENNNYKWFKGGILNTCYNCVDRHVNKGKASKVAIIYDSPVTGKKDFITYSELLQKVSSLAASLHYKGVKKGDRVVLYMPMIPEVIVSMLACARIGAIHSVVFGGFAAEELANRIQDVSPKAVISASCGLEPNRTIDYKKILNEAIQISSHKPAFQIIFQREQYKCLLDKKGDIAWTDFVDHSKKI

SEQ ID NO: 192959 - protein, 217 aa, Unknown
  Bacterial polypetide isolated from the Sargasso Sea
MDAEDPLFILYTSGSTGKPKGVMHTSGGYLVYASLTHKYIFNYEDEDIYWCTADIGWVTGHSYIIYGPLSNGATTLMFEGVPNYPDTSRFWNIIDKYKVNIFYTAPTAIRALMREGNEPVKKTSRESLKLLGTVGEPINPEAWKWYYEVPGNSKCPVVDTWWQTETGGILISPQSGAIELKPGSASKPFFGIMPAILDKDGNELKGECEGMLCLKYS

SEQ ID NO: 192960 - protein, 262 aa, Unknown
  Bacterial polypetide isolated from the Sargasso Sea
LFYGPLANGATTLMFEGVPNYPDFSRFWQIIDKHKVNIFYTAPTAIRALMREGDDYVAKTNRASLKLLGTVGEPINPEAWKWYFEVPGNSKCPIVDTWWQTETGGILISPQTGAIKLKPGSASKPFFGIEPCIVDKNGNELEGECEGMLCMKRSWPGQMRTVYGDHKRFIDTYFSQFDGKYFTGDGCKRDADGYYWITGRVDDVIIVSGHNLGTAEIESAFVSNKNVSEAAVVGYPHDVKGNGLYCYVSLKVGVNPSDELIL

SEQ ID NO: 192961 - protein, 274 aa, Unknown
  Bacterial polypetide isolated from the Sargasso Sea
TSEKSLKLLGTVGEPINPEAWEWYYKTVGDSNCPIVDTWWQTETGGILISPQTGAINLKPGSATKPFYGIKPVIVNKDGKVLKGEAEGRLCIAQSWPGQMRTVYGDHQRFIDTYFSQFDGKYFTGDGCRRDKDGYYWITGRVDDVIIVSGHNLGTAEIESAFVAHPKVAEAAVVGYPHDIKGNGLYCYVTLNVGEKSTLDLERDLKLWVRKQIGPIATPDLIQFSPGLPKTRSGKIMRRILRKIAANEHDQLGDTTTLADPSVVKSLVENRKNT

SEQ ID NO: 192962 - protein, 272 aa, Unknown
  Bacterial polypetide isolated from the Sargasso Sea
IPWVSFPKQILGKDTNGVGRWFVDGEMNTCFAALDWHVEEGRGNNVALIYDSPVTATKAQYTYKELLDWAARIAGGLVSLGVSKGDRVVIYMPMVPETVVAMLACARIGAIHSVVFGGFAAPELASRIDDAEPKVILSASCGIEFEKVIEYKPLLDAAIEIASFKPAHCVVLQRPQSQATLVEPRDIDWKSWESESESVGCVAVLATDPLYILYTSGTTGKPKGIVRDNGGHAVALKYSMGAIYDVDVGDVFWAASDVGWVVGHSYIVYGPL

SEQ ID NO: 192963 - protein, 231 aa, Unknown
  Bacterial polypetide isolated from the Sargasso Sea
MPKKKVKKKNKFKKKVKKNKIKKKIRKIAKLKTEKEIVYKTKKEWISKAIVNKSQYEKKYNESLKNNDGFWKKEGKRIKWIKPYKKIKDVKYSKEDVKIKWFYDGTLNASENCIDRHLKKNKNKTAIIWVGDDPKIQKKISYKELHKEVSKAANGLKKIGVKKGDRVTIYLTMIPELAYTMLACARIGAVHSIIFGGFSPDSISGRINDCKSDYVITADEGVRGGKTIPLK

SEQ ID NO: 192964 - protein, 142 aa, Unknown
  Bacterial polypetide isolated from the Sargasso Sea
MDIIWITGRVDDVIIVSGHNLGTAEIESAFVAHSKVAEAAVVGYPHDIKGNGLYCYVTLNVGEEPNGDLERELKLWVRKQIGAIATPDFIQFAPGLPKTRSGKIMRRILRKIAANEHEQLGDTTTLADPSVVKSLVDNRKNT

SEQ ID NO: 192965 - protein, 190 aa, Unknown
  Bacterial polypetide isolated from the Sargasso Sea
MAQEIYNPNPGFSNPHIKDFDEYLSLYKESIENPEKFFGDLAKENISWIEDFKEVHNSEFQETKWFVGGKTNITLNCIDRHLEKNGDKVALIWEGDEPGNSKEITFKELHSEVCRFANILKTLQIKKGSRVCIYMPMIPEAAFAMFACARIGAIHSVVFGGFSPESLKDRILDADCRIVITADEGVRGGK

SEQ ID NO: 192966 - protein, 288 aa, Unknown
  Bacterial polypetide isolated from the Sargasso Sea
KIKTTSKAEKELIYKTKKDWISKALVNKSQYEKKYKASIKDNDGFWKKEGKRINWIKPYTKIKDVKYSKSDVKIKWFYDGTLNASANCIDRHLKKNKDKTAIIWVGDDPKVQKKISYKELHKEVSKAANALKELGIKKGDRVTIYLTMIPELAYTMLACARIGAVHSIIFGGFSPDSISGRINDCESDYLITADEGVRGGKIIPLKSIADEALVNCPNVKKCIVVKRTGNRINWDERRDVWYHELTKKVSNKCEPEEMNAEDPLFILYTSGSTGKPKGVMHTTGGYMV

SEQ ID NO: 192967 - protein, 289 aa, Unknown
  Bacterial polypetide isolated from the Sargasso Sea
KKGDRVIIYMPMIPQAVIAMLACGRIGAIHSVVFGGFAANELASRIDDSKAKIIISASCGYEPGRTVHYKPLLNKAIEIAKHKPEKCIIWQREKDKAELDPQKDIDWVETLKGVKPAECEKMNSNDYAYILYTSGTTGTPKGIVRDIGGHIVALKWTMKNIYDINQDDVWWSASDIGWIVGHSYIVYAPLFYGCTTVLFEGKPVGTPDAGVFWRIISEYKVKSLFTAPTAIRAIKKEDPDGKYFKKYDLSKFDTLFLAGERADPDTIKWFEKLSNAPVIDHWWQTETSW

SEQ ID NO: 192968 - protein, 185 aa, Unknown
  Bacterial polypetide isolated from the Sargasso Sea
CMLSSWPGQMRTVYGDHQRFIDTYFSQFDGKYFTGDGCRRDKDGYYWITGRVDDVIIVSGHNLGTAEIESAFVAHPKVAEAAVVGFPHSIKGNGLYCYVTLNAGENPTGDLERDLKLWVRKQIGPIATPDVIQFAPGLPKTRSGKIMRRILRKIAANEPDNLGDTTTLADPSVVTSLVENRQNKG

SEQ ID NO: 192969 - protein, 266 aa, Unknown
  Bacterial polypetide isolated from the Sargasso Sea
KKIKDVKYSKDDVHIKWFYDGTLNASANCIDRHLKKNAHKTAIIWVGDDPKVQKKITYKELHKEVSKAANGLKNLGVQKGDRVTIYLTMIPELAYTMLACARIGAVHSIIFGGFSPDSISGRINDCESDYVITADEGVRGGKTIPLKSITDEALQSCPNVKKCIVVKRTGTKKIDWFNDRDVWYHKMTSKVSVKCEPEEMNAEDPLFILYTSGSTGKPKGVLHTTGGYMVYASMTHQYIFNYKPKDIYWCTADIGWVTGHSYIIYG

SEQ ID NO: 192970 - protein, 310 aa, Unknown
  Bacterial polypetide isolated from the Sargasso Sea
QARYLTWKREFDEILDWSDAPFARWFTGGTLNVAYNCVDRHVENGFGTQVAIRFEGEPGDRRDITYAELKDDVCKAANALLELGVASGDRVAIYMPMIPEAIVAMLACARIGAAHSVVFAGFSSEALRSRIDDAQAVVVITADGQNRRGSAMPLKPAVDEAVSQTPTVTNVLVVRRTGGDVDWDDSRDVWWHDIVDRQSPDHTPEAFDAEHPLFILYTSGTTGKPKGILHTSGGYLTQAAFTHRNVFDLKPDDDIYWCTADIGWVTGHSYIVYGPLANRVTQVVYEGTPDTPGKDRWWDIVERHKVSIFY

SEQ ID NO: 192971 - protein, 157 aa, Unknown
  Bacterial polypetide isolated from the Sargasso Sea
FSGYYFTGDGCRRDADGYYWITGRVDDVINVSGHRMGTAEVESALVAHEKVSESAVVGYPHEIKGQGIYAYVTLMAGEEPSEQLRSDLEKWVRKEIGPIAKPDLIQWAPGLPKTRSGKIMRRILRKIAENDYSDLGDTSTLADPSVVDELVSNRMNK

SEQ ID NO: 192972 - protein, 310 aa, Unknown
  Bacterial polypetide isolated from the Sargasso Sea
ILYTSGSTGKPKGVMHTTGGYLVYASHTHELVFDYHKDDIYWCTADIGWITGHSYIVYGPLSNAVTQVIFEGVPNYPDFGRFWQIVEQHKVNVFYTAPTALRALMKEGDDWVAKYDLSSLKVLGTVGEPIKSPEWHWYFNVIGNEKCPIVDTWWQTETGGILMSPIPGCVPTKPGSATLPLPGIIPAILDEEGNEITKRNTTGYLVMTQSWPGQMRTVYDDHQRFIDTYFSQAPGNYFTGDGAYIDDDGYFWITGRVDDVLNVSGHRIGTAEVEGAIGAASGVAEAAVIGYTHEIKGEGIYAFVTLMTSV

SEQ ID NO: 192973 - protein, 165 aa, Unknown
  Bacterial polypetide isolated from the Sargasso Sea
MTKIKSLLDYTKSYQKSIDSPENFWEEIASRFKWRKKWDKILDWDFKLPKIVWFKNARLNITENIFEKNIKENGNKDAIIWEPNDPNEKSIRITYNKLFDLTCQFANALISNGIKKGDRVIIYMPMIPEAAIAILACARIGAVHSVVFAGFSSTALSDRINDVKQ

SEQ ID NO: 192974 - protein, 179 aa, Unknown
  Bacterial polypetide isolated from the Sargasso Sea
PSMLRGIGGDPQRYLDTYWSTYEGRYFAGDGAKVDDDGYLWLLGRVDDVMNVSGHRISTAEVESALVDHPSVAEAAVVGATDETTGQAIIGYVILRGGFDSTDELRQEIRAHVATKLGPIARPRAVFLVPDLPKTRSGKIMRRLLRDVAEGRDLGDTTTLADSSVVSAIQEGANESDED

SEQ ID NO: 192975 - protein, 214 aa, Unknown
  Bacterial polypetide isolated from the Sargasso Sea
PGSGTKPLFGIEPLLVDNEGNELKGATSGNLCIKSSWPGQMRGVYGDPERFYNTYFTTYKGYYFTGDGCRRDEDGYYWITGRVDDVINVSGHRLGTAEIESALVLHKDVAESAVVGFPHDIKGQGIYAFVTLNQEVEPTDELKKELVQQVRTQIGPIANLDNVQWAPALPKTRSGKIMRRILRKIAEKDLDSIGDTSTLAEPEVVDDLVKNAAK

SEQ ID NO: 192976 - protein, 298 aa, Unknown
  Bacterial polypetide isolated from the Sargasso Sea
FESLDIKWFKNAKLNITENIFERNLKGRGDKTAIIWEPNDPNEPSIHLTYNELYEETCKFSNALRDKGIKKGDRVIIYMPMVPEAAIAMLACARVGAVHSVVFAGFSSTSLADRINDCQAKMILTSDGNFRGNKTIPVKPVVDEALEKCSTIESVIVLERTKQKVNMTKGRDYWWHDCINGISSQCAPEILDSEDMLFILYTSGSTGKPKGVVHSSAGYMVYSAYTFLNVFQYDENDIYWCTADVGWITGHSYIVYGPLLCGATSVMFEGVPTFPNVSRFWDVVDKYKVNQFYTAPTA

SEQ ID NO: 192977 - protein, 294 aa, Unknown
  Bacterial polypetide isolated from the Sargasso Sea
MVDGRDHWYSELVDKQEADCEPEVMNAEDMLYILYTSGTTAKPKGIVHTQAGYLTGVTTTHSAVFDVKEDDIYWCAADCGWVTGHSYIVYGPLANKTTSVMYEGAPNAPDEKRLWSIVEKYKVNIFYTAPTAIRAFMKWGVEHPQAHDLTSLRLLGTVGEPINPEAWMWYHENIGSESCAIVDTWWQTETGSIMITPLPGITSTKPGSACGPMPGIDAVVVDENGNEVSKGEGGYLAIKTPWPSMLRTVFGDEKRYIDTYWSKYDGMYFAGDGAKYDDDGYFWLLGRVDDVMNI

SEQ ID NO: 192978 - protein, 309 aa, Unknown
  Bacterial polypetide isolated from the Sargasso Sea
DKTAIIWVGDDPKETQKISYKQLHQKVSKAANGLKKLGIKKGDRVTIYLTMIPELAILMLACARIGAIHSIIFGGFSAESISGRVNDCESEFIITADEGVRGGKTIPLKATTDEALTNCPNVKKCIVVKRTGNYVFWNSDRDVWYHDLIKDVSSQCDPEEMNAEDPLFILYTSGSTGKPKGVLHTTGGYMVYASMTHQYIFNYKPKDIYWCTADIGWVTGHSYIIYGPLSNGATTIMFEGVPNYPDSSRWWQIVDKFKVNTFYTAPTAIRALMREGDEPVNKTSRRSLKLLGTVGEPINPETWMWYYKT

SEQ ID NO: 192979 - protein, 311 aa, Unknown
  Bacterial polypetide isolated from the Sargasso Sea
SIAGRINDCQSDYIITAYEGVRGGKIIPLKKITDDALTKCPNVKKCIVVKRTGNEINWDNDRDIWYDEITKVASDKCEPEEMNAEDPLFILYTSGSTGKPKGVLHTTGGYMVYASMTHQYIFNYKKNDIYWCSADIGWVTGHSYIIYGPLSNGATTIMFEGVPNYPDTSRWWQIVDKYKVNIFYTAPTALRALMREGAGPVKKTSRKSLKLLGTVGEPINPEAWLWYYKVIGDSRCPIVDTWWQTETGGILISPQPGAMDLKPGSATKPFYGIKPVIVDEAGKTLKGACRGRLCIAQSWPGQMRTVYGDHQ

SEQ ID NO: 192980 - protein, 232 aa, Unknown
  Bacterial polypetide isolated from the Sargasso Sea
MSDIEKFDVSADWSANAQINQDKYNEWYETSFNNNEDFWNEHGKRIEWMKPYTKVKDVSFDKDNFSIKWYEDGSLNASANCIDRHLKDKGDQTAIIWEGDDPKNSKHITYNELHKEVSKLSNGMKSLGVKKGDRVTIYMPMIPEAAYAMLACTRIGAIHSVVFGGFSPDSLAGRISDCKSDIVITADEGLRGGKPIPLKKNTDDAHHISGGVRHCIVVKRQAGRSIGMMTVM

SEQ ID NO: 192981 - protein, 302 aa, Unknown
  Bacterial polypetide isolated from the Sargasso Sea
FNYKPKDIYWCTADIGWVTGHSYIIYGPLANGATTIMFEGIPNYPDTSRWWQIVDKYKVNIFYTAPTAIRALMREGDKPVKKTSRKSLKLLGTVGEPINPEAWMWYYKTVGNSKSPIVDTWWQTETGGILIAPQTGAIPLKPGSATKPFYGIKPVIVDKNGKEIKGAGEGRLCIAQSWPGQMRTVYGDHQRFIDTYFSQFNGKYFTGDGCRRDKDGYYWITGRVDDVIIVSGHNLGTAEIESAFVAHPKVAEAAVVGYPHDIKGNGLYCYVTLNAGETETGDLERDLKLWVRKQMDHCNSRL

SEQ ID NO: 192982 - protein, 281 aa, Unknown
  Bacterial polypetide isolated from the Sargasso Sea
AEDPLFILYTSGSTGKPKGVLHTTGGYLLGAAMTHKYVFDYHEGDIYWCTADVGWVTGHSYIVYGPLANAATTLIFEGVPNYPDASRFWQVIDKHRVNTFYTAPTALRALMREGEAPVKATSRESLRLLGSVGEPINPEAWEWYFHVVGDTRCPIVDTWWQTETGSILITPLPGATDLKPGSATRPFFGVQPVLLDEQGKEIDGPGAGVLAIRASWPSQIRSVYGDHQRMIDTYFKPYPGYYFTGDGARRDEDGYYWITGRVDDVINVSGHRIGTAEVESA

SEQ ID NO: 192983 - protein, 257 aa, Unknown
  Bacterial polypetide isolated from the Sargasso Sea
EPINPEAWMWYYKTIGKERCPIVDTWWQTETGSHMLTTLPGANSMRPGSAGVPFFGVDIAVVDDQGEEVPPNTGGKLVIRQPWPSMLRTIYGDQKRYKETYWNEVEDCYFTGDGARRDKKGYFWVVGRIDDVLNVSGHRLGTAEVESALVSHPKVAEAAVVGRPDEIKGQGIVAFVTLKGSEKKSSELRNELIKHVTKEIGAIARPDSIRFADALPKTRSGKIMRRLLRSIAAGEDVTGDVSTLEDKSVIQSLQQEV

SEQ ID NO: 192984 - protein, 144 aa, Unknown
  Bacterial polypetide isolated from the Sargasso Sea
ARIGAIHSVVFAGFSPEALKERILDSECSALITSDEGIRGGKKIPLKSNADKAMSFCPNIQTCVVVKHTGAEIEMKNERDFFYLDLISNESEICEPEPMEAEDPLFILYTSGSTGKPKGVLHSTGGYLLQATMTFKYIFDYQER

SEQ ID NO: 192985 - protein, 265 aa, Unknown
  Bacterial polypetide isolated from the Sargasso Sea
TYPSSSRCWEVCDKYNVNVFYTAPTAIRALMSQGDEPVLKTKRDSLRVLGTVGEPINPEAWDWYYKVVGNGSCDVIDTWWQTETGSVLISPISGVTPVKPGSATLPFFGVKPAIYDEEGQALEGAASGNLVIESSWPSQIRSVYGDHERMISTYFKTYEDIYFTGDGARRDEDGYFWITGRVDDVLNVSGHRLGTAEIESALVLHDSVAEAAVVGFQHPIKGQGIYAFVTLMKGEDFNDALEQELTKFVSKEIGPIAKPDLFKTL

SEQ ID NO: 192986 - protein, 211 aa, Unknown
  Bacterial polypetide isolated from the Sargasso Sea
FTHLVQLGKPKGVLHTTGGYMVYASMTHQYIFNYKPKDIYWCTADIGWVTGHSYIIYGPLANGATTIMFEGIPTYPDTSRWWQIVDKYKVNIFYTAPTAIRALMREGDKPVKKTSRKTLKLLGTVGEPINPEAWEWYYKTVGNSRCPIVDTWWQTETGGILISPQTGAIDLKPGSATKPFYGIKPEILDKDGKVLKGEAQGRLCISQSWPG

SEQ ID NO: 192987 - protein, 159 aa, Unknown
  Bacterial polypetide isolated from the Sargasso Sea
YGDHERMISTYFKTYEDIYFTGDGARRDEDGYFWITGRVDDVLNVSGHRLGTAEIESALVLHDSVAEAAVVGFQHPIKGQGIYAFVTLMKGEDFNDALEQELTKFVSKEIGPIAKPDLIQNAPGLPKTRSGKIMRRILRKIAEGDFDNLGDTTTSCRAC

SEQ ID NO: 192988 - protein, 125 aa, Unknown
  Bacterial polypetide isolated from the Sargasso Sea
GHRMGTAELESALVLHENVAEAAVVGFPHEIKGQGIYAFVTLNTGVDPTDELQKELIRLVRKEIGPIASFDVVQWAPGLPKTRSGKIMRRILRKIAESDTESIGDVSTLADPSVVDDLISNRPAN

SEQ ID NO: 192989 - protein, 280 aa, Unknown
  Bacterial polypetide isolated from the Sargasso Sea
MSENEKFEVSSEWSAEAQVNTDKYYEWYENSLNDNEKFWSEHGKRIDWIKPYTKIKDVSYNKDNFSIKWYYDGTLNASSNCIDRHLKDKADQTAIIWEGDDPADSKHITYKELHIEVSKLANGMKSLGVKKGDRVTIYMPMIPEAAYAMLACTRIGAIHSVVFGGFSPDSLAGRISDCKSDIVITADEGVRGGKEIPLKKNTDEAISISGGVRHCIVVKRTGGDIGWVDERDVWYHELTEKESDDCPPEEMSAEDPLFILYTSGSTGKPKGVMHTTGGYM

SEQ ID NO: 192990 - protein, 259 aa, Unknown
  Bacterial polypetide isolated from the Sargasso Sea
YASMTHQYIFNYKPNDIYWCTADIGWVTGHSYIIYGPLANGATTIMFEGVPNYPDSSRWWQIVDKYKVNTFYTAPTAIRALMREGDGPVNKTTRKSLKLLGTVGEPINPEAWMWYYKTVGNSKCPIVDTWWQTETGGILIAPQTGAIPLKPGSATKPFYGIKPVLVDKDGKEIKGEGEGRLCIAQSWPGQMRTVYGDHQRFIDTYFSQFDGKYFTGDGCKRDKDGYYWITGRVDDVIIVSGHNLGTAEIESAFVAHPKV

SEQ ID NO: 192991 - protein, 305 aa, Unknown
  Bacterial polypetide isolated from the Sargasso Sea
VLHTTGGYMVYASMTHQYIFNYKPKDIYWCTADIGWVTGHSYIIYGPLANGATTIMFEGIPTYPNTSRWWQIVDKYKVNIFYTAPTAIRALMREGDKPVKKTSRKTLKLLGTVGEPINPEAWEWYYKTVGDSRCPIVDTWWQTETGGILISPQTGAIDLKPGSATKPFYGIKPEILDKDGKVLKGEAQGRLCISQSWPGQMRSVYGDHQRFIDTYFSQFDGKYFTGDGCRRDKDGYYWITGRVDDVIIVSGHNLGTAEIESAFVAHPKVAEAAVVGYPHDIKGNGLYCYITLNAGEKSTLDLERD

SEQ ID NO: 192992 - protein, 252 aa, Unknown
  Bacterial polypetide isolated from the Sargasso Sea
MVQVKKTSRKSLKLLGTVGEPINPEAWMWYYKTVGNSRCPIVDTWWQTETGGIMISPQTGAIPLKPGSATKPFYGIKPVIVDKNGKEIKGAGEGRLCISHSWPGQMRTVYGDHDRFINTYFSQFDRKYFTGDGCKRDKDGYYWITGRVDDVIIVSGHNLGTAEIESAFVAHPKVAEAAVVGYPHDIKGNGLYCYVTLNAGEKDSGELERDLKLWVRKQIGPLATPDLIHFTPGLPKTRSGKIMRRILRKIAA

SEQ ID NO: 192993 - protein, 293 aa, Unknown
  Bacterial polypetide isolated from the Sargasso Sea
SFLLKKTKKFWAKEGKRITWIKKYTKIKDVKYSKEEVKIKWYYDGTLNASANCIDRHLKKNPKKTAIIWVGDDPSDSKKISYKELHQNVCKAANGLKSIGVQKGDRVTIYLTMIPELAYMMLACARIGAVHSIIFGGFSPDSIATRINDCESDYLITADEGVRGGKIIPLKKIADEALTQCPDVKKCVIIQRTGNQVDWNNERDISYKEMISSVSNKCDPEEMNAEDPLFILYTSGSTGKPKGVLHTTGGYMVYASMTHQYIFDYKSNDIYWCTADIGWVTGHSYIIYGPLAN

SEQ ID NO: 192994 - protein, 300 aa, Unknown
  Bacterial polypetide isolated from the Sargasso Sea
TKKVSNKCEPEEMNAEDPLFILYTSGSTGKPKGVMHTTGGYMVYASMTHQYIFNYKPKDIYWCTADIGWVTGHSYIIYGPLSNGATTIMFEGIPTYPDSSRWWQIVDKYKVNIFYTAPTAIRALMREGDKPVKKTSRKSLKLLGTVGEPINPEAWEWYYKTVGDSNCPIVDTWWQTETGGILISPQTGAINLKPGSATKPFYGIKPVIVNKDGKVLKGEAEGRLCIAQSWPGQMRTVYGDHQRFIDTYFSQFDGKYFTGDGCRRDKDGYYWITGRVDDVIIVYGHNLGTAEIESAFLPIQ

SEQ ID NO: 192995 - protein, 267 aa, Unknown
  Bacterial polypetide isolated from the Sargasso Sea
MVYASMTLFYIFNYKPKDIYWCTADIGWVTGHSYIIYGPLSNGATTIMSEGIPNYPDWSRWWQIVDKYKVNIFYTAPTAIRAMMREGDGPVKKTSRKSLKLLGTVGEPINPEAWQWYFKTVGDSRCPIVDTWWQTETGGILISPQTGAIDLKPGSATKPFYGIKPEILDKDGKVLKGEAQGRLCIAQSWPGQMRSVYGDHDRFIETYFSQFDGKYFTGDGCKRDKDGYYWITGRVDDVIIVSGHNLGTAEIESAFVAHPKVAEAAVV

SEQ ID NO: 192996 - protein, 337 aa, Unknown
  Bacterial polypetide isolated from the Sargasso Sea
AVHSIIFGGFSPDSIAGRINDCKSDYVVTADEGLRGGKTIPLKSITDEALVNCSNVKKCIVIKKTGNRINWDESRDVWYHDIVKKASPICEPEEMNAEDPLFILYTSGSTGKPKGVLHTTGGYMVYASMTHQYIFNYRPKDIYWCTADIGWITGHSYIIYGPLANGATTIMFEGIPTYPDTSRWWQIVDKYKVNIFYTAPTAIRALMREGDGPVKKTSRKSLKLLGTVGEPINPEAWQWYFKTVGDSKCPIVDTWWQTETGGILISPQTGAIDLKPGSATKPFYGIKPVIVDQEGKVLKGEARGRLCIAQSWPGQMRNCYGRSHRFIETYFSHLMVI

SEQ ID NO: 192997 - protein, 227 aa, Unknown
  Bacterial polypetide isolated from the Sargasso Sea
LNASANCIDRHLKDKKDKTAIIWVGDDPKDTQKITYKQLHQKVSKAANGLKKLGIKKGDRVTIYLTMIPELAILMLACARIGAIHSIIFGGFSAESISGRVNDCESEYIITADEGVRGGKTIPLKTTTDEALLNCPNVKKCIVVKRTGNYVFWDNDRDVWYHELIKDVSNNCEPEEMSAEDPLFILYTSGFTGKPKGVLHTTGGYMVYASMTHQYIFNYKPKDIYWC

SEQ ID NO: 192998 - protein, 298 aa, Unknown
  Bacterial polypetide isolated from the Sargasso Sea
MSRRKKRKSRKRKKRKSRKRKKIKIRKLRRKKSRKKIKKTKISTPNELIFKVPKKWSNTAYVDKAEYEKKYKLSIKDNERFWEKEGKRIDWIKRYKKIKDVKYSKTEVRIKWYYDGTLNASANCIDRHLPNKKNKTAIIWVGDNPKDSKQITYAELHKNVCKTANGLKELGIKKGDRVTIYLTMIPELAYAMLACARIGAIHSIIFGGFSPDSISGRINDCQSDYIITADEGVRGGKIIPLKKITDEALINCPNVKKCIVVKRTGNEINWVDGRDVWYDEITKMASSSCEPEERTQKI

SEQ ID NO: 192999 - protein, 160 aa, Unknown
  Bacterial polypetide isolated from the Sargasso Sea
FSQFDGKYFTGDGCKRDKDGYYWITGRVDDVIIVSGHNLGTAEIESAFVAHSKVAEAAVVGYPHDIKGNGLYCYVTLNAGEEPNGDLERELKLWVRKQIGPIATPDFIQFSPGLPKTRSGKIMRRILRKIAANEHEQLGDTTTLADQSVVKSLVENRKNI

SEQ ID NO: 193000 - protein, 252 aa, Unknown
  Bacterial polypetide isolated from the Sargasso Sea
WYYEVPGNSKCPIVDTWWQTETGGILISPQSGAIDLKPGSASKPFYGIEPCIVNKDGEEQSGEAEGMLCLQNSWPGQMRSVYGDHKRFISTYFSQFNGKYFTGDGCRRDKDGYYWITGRVDDVIIVSGHNLGTAEIESAFVSHPKVSEAAVVGYPHDIKGNGLYCYVSLIVGTESNESLKKELIQTIRSKIGPIATPDFIHFTDGLPKTRSGKIMRRILRKIAANEEDQLGDITTLADPSVVEKLIKNKLNN

SEQ ID NO: 193001 - protein, 228 aa, Unknown
  Bacterial polypetide isolated from the Sargasso Sea
MDDSLIESLDQYRGKYQKSIENPEEFWGDIAKNFTWFDQWDKTLEQDMLSAEFQWFKGGKTNISFNCIDRHLENNAEKTAIIFEPNNPNEESQHISYKELHSRVCQMSNVLLKNGVKKGDRVCIYLPMIPELAISVLACARIGAIHSVVFAGFSSVALSTRINDCSCSMVITSDGSYRGGKSLNLKSIVDEALNSCSTVNKVIVAKRTNESINMNKDRDVWLTDELSK

SEQ ID NO: 193002 - protein, 107 aa, Unknown
  Bacterial polypetide isolated from the Sargasso Sea
VAEAAVVGFDHPIKGQGIYAFVTLMIEESFSDDLNNELKQFVAKEIGAIAKPDLIQNAPGLPKTRSGKIMRRILRKIAENDLSNLGDTTTLADPSVVKSLINNKISL

SEQ ID NO: 193003 - protein, 196 aa, Unknown
  Bacterial polypetide isolated from the Sargasso Sea
IVDKNGDKVKENEGGYLIIKKPWPGMMRTIHGNSERYLESYWEYISFKGEKNVYSAGDGARIDEDGYIWIMGRVDDVISVSGHRLGTMEIESALVSHKSVAESAVVGKKDDLKGEVIVAFVSLEKDVNGSSELVEDLKKHVVNEIGIIAKPEKIIISDSLPKTRSGKIMRRILRSLAAGEKICGDISTLEDSSVLE

SEQ ID NO: 193004 - protein, 150 aa, Unknown
  Bacterial polypetide isolated from the Sargasso Sea
GDGCRRDKDGYYWITGRVDDVIIVSGHNLGTAEIESAFVAHPKVAEAAVVGYPHDIKGNGLYCYVTLNAGESETGELERDLKLWVRKQIGPLATPDLIHFTPGLPKTRSGKIMRRILRKIAANEHGQLGDTTTLADPSVVDSLVDNRKNI

SEQ ID NO: 193005 - protein, 149 aa, Unknown
  Bacterial polypetide isolated from the Sargasso Sea
RDEDGYFWITGRVYDVLNVSGHRLGTAEIESALVLHEKVAEAAIVGFEHPIKGQGIYAYVTLMIGEEESENLIKDLQNFVAKEISPIAKPDLIQWAPGLPKTRSGKIMRRILRKVASGEFDNLGDTSTLADPGVVDDLIKNKRNLKKTN

SEQ ID NO: 193006 - protein, 265 aa, Unknown
  Bacterial polypetide isolated from the Sargasso Sea
SNSIESVLQEQRVFPPSEDFASKSRISSFSKYLEMSQMAKSDPNKFWGDAAREELKWFKAFDKVLDWSNPPLAKWFDGGKINISFNCLDRHLNTQAADKLALIWEGEPGDQKKYTYKQLHKEVCKAANALKSLGIEKGDLVALYMPMVPEAAIAMLACARIGAPHSVVFGGFSSEALRDRLINGEAKAIITADGGFRKDKVIPLKDAVDSALEGGACPKVESVLVVQRTKKTIAMDDGRDYWWHEIVDSQSEECLPEQMDSEDCL

SEQ ID NO: 193007 - protein, 87 aa, Unknown
  Bacterial polypetide isolated from the Sargasso Sea
NHGEEPSPELYAEVRNWVRKEIGPLATPDVLHWTDSLPKTRSGKIMRRILRKIAAGDTSNLGDTSTLADPGVVEKLLEEKQAIAMPS

SEQ ID NO: 193008 - protein, 324 aa, Unknown
  Bacterial polypetide isolated from the Sargasso Sea
TDEALTNCPNVKKCIIVKRTGNYVFWNDERDVWYHDLIKDVPAHCEPEEMSAEDPLFILYTSGSTGKPKGVLHTTGGYIVYASMTHQYIFNYKPKDIYWCTADIGWVTGHSYIIYGPLSNGATTIMFEGVPNYPDSSRWWQIVDKFKVNTFYTAPTAIRALMREGDQPVKKTSRKSLKLLGTVGEPINPEAWMWYYKTVGNSKCPIVDTWWQTETGGILISPQTGAIPLKPGSATKPFYGIKPVIVNKDGKEIKGAGEGRLCIAQSWPGQMRTVYGDHQRFIDTYFSQFDGKYFTGDGCKRDKDGYYWITGRVDDVIIVSGHNL

SEQ ID NO: 193009 - protein, 296 aa, Unknown
  Bacterial polypetide isolated from the Sargasso Sea
YIIYGPLSNGATTIMFEGIPTYPDNSRWWQIVDKYKVNIFYTAPTAIRALMREGDKPVKKTSRKTLKLLGTVGEPINPEAWQWYYKTVGDSRCPIVDTWWQTETGGILISPQTGAINLKPGSATKPFYGIKPVIVDKTGKVLKGEAQGRLCIAQSWPGQMRTVYGDHQRFIDTYFSQFEGKYFTGDGCRRDKDGYYWITGRVDDVIIVSGHNLGTAEIESAFVAHPKVAEAAVVGFPHDIKGNGLYCYVTLNAGEKHSLDLERELKLWVRKQIGAIATPDLIQFSPGLPKTRSGKI

SEQ ID NO: 193010 - protein, 246 aa, Unknown
  Bacterial polypetide isolated from the Sargasso Sea
DVPVKKTSRKSLKLLGTVGEPINPEAWMWYYKTVGEKKCPIVDTWWQTETGGILISPQPGAINLKPGSATKPFYGIKPVIVDEAGKILKGACKGRLCMAQSWPGQMRTVYGDHERFIDTYFSQFDGKYFTGDGCRRDKDGYYWITGRVDDVIIVSGHNLGTAEIESAFVAHTKVAEAAVVGFPHDIKGNGLYCYVTLNAGEKADGDLERELKLWVRKQIGPIATPDHIQFAPGLPKTRSGKIMRRI

SEQ ID NO: 193011 - protein, 300 aa, Unknown
  Bacterial polypetide isolated from the Sargasso Sea
EKRKRINWIKPYTKIKDVKYSSSDVRIKWFYDGTLNASANCVDRHLKKNKDKTAIIWVGDDPKVQKKISYKELHKEVSKAANGLKEIGIKKGDRVTIYLTMIPELAYTMLACARIGAIHSIIFGGFSPDSISGRINDCKSDYVITADEGLRGGKTIHLKSIMDEALVDCPKVKKCVVVKRTGNRINWDPSRDVWYHEMIKNVSGKCEPEEMNAEDPLFILYTSGSTGKPKGVLHTTGGYMVYASMTHQYIFNYKPKDIYWCTADIGWVTGHSYIIYGPLSNGATTIMFEGIPTYPDNSRW

SEQ ID NO: 193012 - protein, 204 aa, Unknown
  Bacterial polypetide isolated from the Sargasso Sea
MKFDIDSFVNPNLKDFLEYQSLYNDSVKDPSNFFLKQALKEIDWIKEPTKGSTGSLSSPKWFEDGMLNISYNCIDRHAENHPEKTAIIWQGDEREKNENISYIQLQKQVCKLANGLKSIGVSKGDRVCIYMPMVPQAAYAMFACMRIGAIHSVVFGGFSPEAIKSRILDADCNYVITANEGIRGGKNIPLKDSVDEALKDCPNG

SEQ ID NO: 193013 - protein, 287 aa, Unknown
  Bacterial polypetide isolated from the Sargasso Sea
DCSSEYIITADEGIRGGKIIPLKNTVDKALETCPDVKKCLIVKRTGNKINLKQGRDLYFDELIKNVDDYCSPEIVNAEDPLFILYTSGSTGKPKGVMHTSGGYIVYASITHEFIFNYNKGDIYWCTADIGWITGHSYIIYGPLSNGATTLMFEGVPNYPDYSRFWQIVDKHQVNIFYTAPTAIRALMREGDGPVKKTKRTSLKLLGTVGEPINPEAWKWYFEIPGNSRCPIVDTWWQTETGGILIAPQTGAIELKPGSASKPFFGIEPCIVNKDGEELKGECEGMLC

SEQ ID NO: 193014 - protein, 218 aa, Unknown
  Bacterial polypetide isolated from the Sargasso Sea
IYWCTADIGWVTGHSYIIYGPLSNGATTLMFEGVPNYPDFSRFWQIIDKHKVNIFYTAPTAIRSLMREGNDYVNKTNRSSLRLLGTVGEPINPEAWKWYFEVPGNSQCPIVDTWWQTETGGILISPQTGAIKLKPGSATKPFYGIEPCIVDKEGNELEGECEGMLCMKRSWPGQMRTVYGDHNRFVETYFSQFDGKYFTGDGCKRDSDGYYWITRACR

SEQ ID NO: 193015 - protein, 88 aa, Unknown
  Bacterial polypetide isolated from the Sargasso Sea
WIKKFTKIKDIKYSKDDVSIKWFEDGSLNVSYNCIDRHAENNPDKVAIIWEGDDPNETKKITYRELLINVSKAANVLKKIGVKKGDGV

SEQ ID NO: 193016 - protein, 292 aa, Unknown
  Bacterial polypetide isolated from the Sargasso Sea
KTAIIWVGDDPKDTQKISYKQLHQKVSKAANGLKKLGIQKGDRVTIYLTMIPELAILMLACARIGAIHSIIFGGFSAESISGRVNDCKSEYIITADEGVRGGKTIPLKATTDEALSNCPDVKKCIVVKRTGNYVYWEQGRDVWYHDLIKDVPSYCEPEEMNAEDPLFILYTSGSTGKPKGVLHTTGGYMVYASMTHQYIFNYKPNDIYWCTADIGWVTGHSYIIYGPLANGATTIMFEGVPNYPDSSRWWQIVDKYKVNTFYTAPTAIRALMREGDGPVNKTSRKSLKLLGT

SEQ ID NO: 193017 - protein, 284 aa, Unknown
  Bacterial polypetide isolated from the Sargasso Sea
GAIHSIIFGGFSADSIAGRIKDCKSEYVVTADEGIRGGKSIPLKLTTDKALETCPDVKKCLVVKRTNKDIKLKKERDLFYDDLIKEVDSICEPEILNAEDPLFILYTSGSTGKPKGVMHTSGGYIVYASMTHEYIFNYNAGDIYWCTADIGWITGHSYIVYGPLANGATTLMFEGVPNYPDFSRFWKIVDKHKVNIFYTAPTAIRALMREGDDFVTKTDRSSLKLLGTVGEPINPEAWKWYYEIPGNSKCPIVDTWWQTETGGILISPQTGAIKLKPRICLKAF

SEQ ID NO: 193018 - protein, 249 aa, Unknown
  Bacterial polypetide isolated from the Sargasso Sea
MDFDLKDDDIYWCTADVGWITGHSYIVYGPLSNGATTLMYEGVPRPSNLGAFWEIVQKYKVSIFYTAPTAIRAFMKSGREIPDKYNLESLRLLGTVGEPINPEAWMWYRDVIGKDKCPIVDTWWQTETGGVMISPLPGVVATKPGSATFPLPGIEVEIVDKNGDKVKENEGGYLIIKKPWPGMMRTIHGNSERYLESYWEYISFKGEKNVYFAGDGARIDEDGYIWIMGRVDDVISVSGHRLGTMEIES

SEQ ID NO: 193019 - protein, 240 aa, Unknown
  Bacterial polypetide isolated from the Sargasso Sea
MSTPGWQTETGAMMITGLAALTSQKPGSASKPFLGVNPVLLDENGKEISGVGSGNLAIKDPWPSQIRSVYGDHQRCIDTYFKTYPGYYFTGDGAKRDEDGYFWITGRVDDVLNVSGHRLGTAEIESALVLHEQVAEAAVVGYEHEIKGQGIYCYVTLMIGYLGEDSLKKELVDLIAKEIGAIAKPDIIQFSPDLPKTRSGKIMRRILRKIAANEIYDLGDTTTLADPSVVDHLINNRLNK

SEQ ID NO: 193020 - protein, 182 aa, Unknown
  Bacterial polypetide isolated from the Sargasso Sea
ADSWPGQMRSVYGDHERFIATYFSQFVGKYFTGDGCRRDEDGYYWITGRVDDVINVSGHRMGTAEVESALVAHPKVSEAAVVGYPHDIKGQGIYAYVTLNAGEQTSDELYKELITWVRKEIGPIASPDLIQWAPGLPKTRSGKIMRRILRKIAENDYGNLGDTSTLADPTVVDDLINNRMNK

SEQ ID NO: 193021 - protein, 136 aa, Unknown
  Bacterial polypetide isolated from the Sargasso Sea
GRVDDVINVSGHRMGTAEVESALVAHPKVSEAAVVGFPHNIKGQGIYCYVTLMSGETPTEELRLELRNWVRTEIGPIASPDLIQWAPGLPKTRSGKIMRRILRKIAENDYGSLGDTSTLAEPAVVDDLIINRMNDA

SEQ ID NO: 193022 - protein, 309 aa, Unknown
  Bacterial polypetide isolated from the Sargasso Sea
QLHQKVSKAANGLKKLGIKKGDRVTIYLTMIPELAILMLACVRIGAVHSIIFGGFSADSISGRVNDCESEYIITADEGVRGGKTIPLKYTVDEALMSCPNVKKCIVVKRTGNYINWDQNRDVWYHDLIKDVPNHCEPEEMNAEDPLFILYTSGSTGKPKGVLHTTGGYMVYASMTHQYIFNYKPKDIYWCTADIGWVTGHSYIIYGPLSNGATTIMFEGIPNYPDSSRWWQIVDKYKVNTFYTAPTAIRALMREGDKPVKKTSRKSLKLLGTVGEPINPEAWMWYYKTVGNSKCPIVDTWWQTETGGIM

SEQ ID NO: 193023 - protein, 219 aa, Unknown
  Bacterial polypetide isolated from the Sargasso Sea
IDLKPGSATKPFFGIKPEILDKDGKVLKGEAQGRLCISQSWPGQMRSVYGDHQRFIDTYFSQFDGKYFTGDGCRRDKDGYYWITGRVDDVIIVSGHNLCTAEIESAFVAHPKVAEAAVVGYPHDIKGNGLYCYVTLNAGEKSTLDLERDLKLWVRKQIGPIATPDLIQFAPGLPKTRSGKIMRRILRKIAANEHGQLGDTTTLADPSVVESLVDNRKNI

SEQ ID NO: 193024 - protein, 282 aa, Unknown
  Bacterial polypetide isolated from the Sargasso Sea
CESEYIITADEGVRGGKTIPLKETTDEALESCPNVKKCIVVKRTGNSISWNYDRDVWYHDLIKDVPSQCEPEEMNAEDPLFILYTSGSTGKPKGVLHTTGGYMVYASMTHQYIFNYKPKDIYWCTADIGWVTGHSYIIYGPLSNGATTIMFEGIPNYPDSSRWWQIVDKYKVNIFYTAPTAIRALMREGDKPVKKTSRKSLKLLGTVGEPINPEAWMWYYKTVGNSKCPIVDTWWQTETGGILIAPQTGAIPLKPGSATKPFYGIKPVLVDKEGKEIKGPEK

SEQ ID NO: 193025 - protein, 263 aa, Unknown
  Bacterial polypetide isolated from the Sargasso Sea
MAKKYKEIYDSSINNREEFWKKISEDIFWYKKPTKILNGNNPPFYKWFEDGITNTCYNALDYHIDKGRGDKLAIIYDSPITGVQKKISYKELRERVALFAGALKKQGIKKGDRVIIYMPMIPEAVIAMLACGRIGAVHSVVFGGFAANELASRIDDSKAKLIVSASCGYEPGRTVHYKPLVNKALELANHKPDKCIIFQREKDKAELNSSMDISWEDSLKDVKPAECEKMNSNDYAYILYTSGTTGLPKGIVRDIGGHIVALK

SEQ ID NO: 193026 - protein, 292 aa, Unknown
  Bacterial polypetide isolated from the Sargasso Sea
INSGADKVVEKVVVVQRTKKNISMVDDRDFWWHELLKDQKEWCEPEIMNSEDRLFVLYTSGSTGKPKGVVHTTGGYNLWSHLTFKWIFDVKDNDIYWCTADVGWITGHSYIVYGPLSNGATTLMFEGVPRPSNLGAFWEIVQKYKVSIFYTAPTAIRAFMKSGREIPDKYNLESLRLLGTVGEPINPEAWMWYKDVIGKNKCPIVDTWWQTETGGVMISPLPGVVATKPGSATYPLPGIEVEVVDKNGDKVMENEGGYLIIKKPWPGMMRTIHGNSKRYLENYWEYISLKEK

SEQ ID NO: 193027 - protein, 292 aa, Unknown
  Bacterial polypetide isolated from the Sargasso Sea
MPKKKKVISKKPKETIYKTKKEWISKATVNKSQYIKKYNESIKDNEGFWKKEGKRINWIKPYKKIKDVKYSKDDVHIKWFYDGTLNASANCIDRHLKKNANKTAIVWVGDDPKVQKKITYKELHKEVSKAANGLKNLGVQKGDRVTIYLTMIPELAYTMLACARIGAVHSIIFGGFSPDSISGRINDCESDYVITADEGVRGGKTIPLKSITDEALQSCPNVKKCIVVKRTGSKKIDWYNDRDVWYHKMISKVSAKCEPEEMNAEDPLFILYTSGSTGKPKGVLHTTGGYMV

SEQ ID NO: 193028 - protein, 317 aa, Unknown
  Bacterial polypetide isolated from the Sargasso Sea
DEGVRGGKIIPLKKIADEALDQCPRVKKCVVVERTGNQVDWNNERDVSYKELISSVPAKCEPEEMNAEDPLFILYTSGSTGKPKGVLHTTGGYMVYASMTHQYIFDYKANDIYWCTADIGWVTGHSYIIYGPLSNGATTIMFEGIPNYPDSSRWWQIVDKYKVNIFYTAPTAIRALMREGDKPVKKTSRKTLKLLGTVGEPINPEAWMWYYKTVGDSRCPIVDTWWQTETGGILIAPQPGAIDLKPGSATKPFYGIKPVLVDKDGKTVKGEGKGRLCMATSWPGQMRTVYGDHQRFIDTYFSQFDGNILLGTDAEEI

SEQ ID NO: 193029 - protein, 299 aa, Unknown
  Bacterial polypetide isolated from the Sargasso Sea
RDISYDEMIKNVSDKCPPEEMNAEDPMFILYTSGSTGKPKGVLHTTGGYMVYASMTHQYIFDYKPKDIYFCSADIGWVTGHSYIVYGPLSNGATTIMFEGVPTYPDSSRWWQIIDKYKVNIFYTAPTAIRALMREGNDPVKKTSRKSLKLLGTVGEPINPEAWMWYYKVVGDSKCPIVDTWWQTETGGILISPQPGAINLKPGSATKPFYGIKPAIVDENGKVIKGAGKGRLCMLQSWPGQMRTVYGDHERFIKTYFSQFDGKYFTGDGCRRDKDGYYWITGRVDDVIIVSGHNLGPAE

SEQ ID NO: 193030 - protein, 121 aa, Unknown
  Bacterial polypetide isolated from the Sargasso Sea
FKWIFDLKDDDIYWCTADVGWITGHSYIVYGPLSNGATTLMYEGVPRPSNLGAFWEIVQKYKVSIFYTAPTAIRAFMKCGREIRDKYNLESLRLLGTVGEPINPEAWMWYRDVIGKDKCPI

SEQ ID NO: 193031 - protein, 157 aa, Unknown
  Bacterial polypetide isolated from the Sargasso Sea
FDGKYFTGDGCKRDKDGYYWITGRVDDVIIVSGHNLGTAEIESAFVSHKDVSEAAVVGYPHDVKGNGLYCYVSLKVGVDPSEDLVVDLKKTIREKIGPIATPDFIHIATGLPKTRSGKIMRRILRKIASNDFENLGDTSTLADPSVVNNLIENRKNK

SEQ ID NO: 193032 - protein, 164 aa, Unknown
  Bacterial polypetide isolated from the Sargasso Sea
TVYGDHKRFIETYFSQYDGYYFTGDGCKRDEDGYYWITGRVDDVINVSGHRMGTAEVESALVSHEKVSEAAVVGFPHEIKGQGIYAYVTLNAGEKGNEEIRKKLIKWVRKEIGPIASPDLIQFAPNLPKTRSGKIMRRILRKIAENDYSELGDTSTLAETDGSR

SEQ ID NO: 193033 - protein, 272 aa, Unknown
  Bacterial polypetide isolated from the Sargasso Sea
IYDSPITGNKSQFTYEELRSKVSRFAGALKAQGANKGDRVIIYMPMIPEAVVAMLACARIGAIHSVVFGGFASNELASRIDDSKAKLLVTASCGFEPGRTVEYKPLVDEAIKIAHHKIEKMILFQRPGNEVKLNAPNEVSWEEVVSNAKDADCVEMNSNEFAYILYTSGTTGTPKGIVRDIGGHIVALKWTMKNIYNIDTDDIWWSASDIGWIVGHSYIVYAPLFKGCTTVLFEGKPVGTPDAGAFWKIISDYKVKSLFTAPTAFRAIKKED

SEQ ID NO: 193034 - protein, 295 aa, Unknown
  Bacterial polypetide isolated from the Sargasso Sea
WITGHSYIIYGPMANRAITMMFEGVPNYPDFGRFWEIIEKHKVNKFYTAPTALRALMKEGDEWPNKYNLNSLKILGTVGEPIKEPEWLWYHNVIGKQKCPIVDTWWQTETGGVMITPLPGVTSTKPGSATLPFFGVVPELLDDEGNVLEGNNVEGNLAIQRPWPSIMRTVYGDHQRFFETYFEKFPGKYFSGDGCKRDEDGYYWITGRVDDVIIVSGHNLGTAEIEGSIGGHPSVAEAAVVGYPHEIKGNAIYAFVTLRTGHGVTDNTRSEIIKRVRADIGPHASPEKIQFTEGC

SEQ ID NO: 193035 - protein, 260 aa, Unknown
  Bacterial polypetide isolated from the Sargasso Sea
MPKKKVKKRKKKIITKKKTKAKSLAPQQEKELIYRTKKDWISKALVNKSQYEKKYKASIKDNDGFWKKEGKRINWIKPYTKIKDVKYSKSDVKIKWFYDGTLNASANCIDRHLKKNKDKTAIIWVGDDPKVQKKISYKELHKEVSKAANGLKELGVKKGDRVTIYLTMIPELAYTMLACARIGAIHSIIFGGFSPDSISGRINDCESDYLITADEGVRGGKIIPLKSIADEALVNCPNVKKCVVVKRTGNRINWDERRDV

SEQ ID NO: 193036 - protein, 171 aa, Unknown
  Bacterial polypetide isolated from the Sargasso Sea
MSEQKIFEIPASAKERALIDNDTYLKMYQESVEDPEVFWEKQADRLDWFKKWDRTFDWDYSKAYIRWYEGGKLNVSYNCLDRHLEERGEQKALIWESDDPNLDRSFTYKQLHSEVSKFANVMKAFGVVKGDRVMIYMPMIPELAIACLACARIGAVHSVVFGGFSSEALKT

SEQ ID NO: 193037 - protein, 257 aa, Unknown
  Bacterial polypetide isolated from the Sargasso Sea
EAWMWYHENIGNEQCAIVDTWWQTETGSIMISPLPGITSTKPGSACGPLPGVDSVIIDEKGNEVGKGEGGYLAIKSPWPSMLRTVYGDDKRYIDTYWSQHEGLYFAGDGAKYDDDGYVWLLGRVDDVMNISGHRISTAEVESALVSHESVAEAAVIGRSDEISGEAIAAFVSLIGTDAGDEKLISELRQHVSDKIGPIAKPKSIVITADLPKTRSGKIMRRLLKDISEERKLGDVTTLANADIVSELQQRSSESDED

SEQ ID NO: 193038 - protein, 250 aa, Unknown
  Bacterial polypetide isolated from the Sargasso Sea
FWKKEGKRINWIKNYKKIKDVKYSKDDVHIKWFYDGTLNASANCIDRHLKKNANKTAIIWVGDDPKIQKKITYKELHREVSKAANGLKNLGVQKGDRVTIYLTMIPELAYTMLACARIGAVHSIIFGGFSPDSISGRINDCESDYVITADEGVRGGKTIPLKSITDEALESCPNVKKCIVVKRTGTKKIDWYNDRDVWYHKITSKVSTKCEPEEMNAEDPLFILYTSGSTGKPKGVLHTTGGYMVYASND

SEQ ID NO: 193039 - protein, 270 aa, Unknown
  Bacterial polypetide isolated from the Sargasso Sea
ANALKKIGVKKGDRVTIYLTMIPELAYVMLACARIGAVHSIIFGGFSSESIAGRIADCNSKYLITADEGLRGGKKIQLKNIADKALENCPDVKKCLVVRYTNGSINLVKDRDIYLDDILSKVDDNCPAEEMNAEDPLFILYTSGSTGKPKGVLHTTGGYLVYASMTHEYVFNYNKDDIYWCTADIGWITGHSYIIYGPLSNGATTLMFEGVPNYPSFSRFWEIIDKHKVNIFYTAPTAIRALMREGDKFVKNTDRSSLKILGTVGERNKS

SEQ ID NO: 193040 - protein, 118 aa, Unknown
  Bacterial polypetide isolated from the Sargasso Sea
LGTMEIESALVSHKSVAEAAVVGKKDDLKGEVIVAFVSLEKYVNSSSELVESLKKHVVNEIGIIAKPEKIIISDSLPKTRSGKIMRRILRSLAAGEKISGDISTLEDSSVLEKLKELS

SEQ ID NO: 193041 - protein, 226 aa, Unknown
  Bacterial polypetide isolated from the Sargasso Sea
MKTFLCLISIDFTYFLKLNATYYIKSLKNGKSKQITMNKSLKEIYSESINNPEKFWQEVSEDIFWYKKPTKILNKSNPPFYKWYEDGITNTCYNALDLHIDQGKSDKVALIYDSPITGNKAKFTFKELKDKVSLFAGALDNQGIKKGDRVVIYMPMIPEAVVAMLACGRIGAIHSVVFGGFASNELASRIDDSKAKILITASCGFEPGRTVEYRPLVDGAIKLAKH

SEQ ID NO: 193042 - protein, 151 aa, Unknown
  Bacterial polypetide isolated from the Sargasso Sea
CDGCRRDKDGYYWITGRVDDVIIVSGHNLGTAEIESAFVAHPKVAEAAVVGFPHSIKGNGLYCYVTLNAGESPTGDLERDLKQWVRKQIGPICYPDVIQFAPGLPKTRSGKIMRRILRKIAANEPDNLGDTTTLADPSVVTSLVENRQNRD

SEQ ID NO: 193043 - protein, 246 aa, Unknown
  Bacterial polypetide isolated from the Sargasso Sea
IYNPNPGFSNPHIKDFDEYLSLYKESIENPEKFFGDLAKENISWIEDFKEVHNSEFQETKWFVGGKTNITLNCIDRHLEKDGDKVALIWEGDEPGNSKEITFKELHSEVCRFANILKTLQIKKGSRVCIYMPMIPEAAFAMFACARIGAIHSVVFGGFSPESLKDRILDADCRIVITADEGVRGGKKVPLKDNVDEALINCPDVKNVIVVNRTGGKINWFEDRDLWFHELKDKVDDVCEPEPMDSE

SEQ ID NO: 193044 - protein, 146 aa, Unknown
  Bacterial polypetide isolated from the Sargasso Sea
MFEITRHPVADAVRQRAHLDNDAYLRLYQQSVEQPDTFWAEQAKAFLTWFKPWDQVHSSDLKQGRAEWFKGGQLNVAYNCIDRHLQQRGEQVAIIWEGDNPAESAHITYNKLHHNVNRLANVLKRRGVKKGDRVCIYMPMVPEAAY

SEQ ID NO: 193045 - protein, 281 aa, Unknown
  Bacterial polypetide isolated from the Sargasso Sea
QGERDAEETPTMTAHSTYADFYRQSIDHRDTFWSEQAKLIDWKTPPQQVCDYSNPPFAKWFVGGTTNLCHNAVDRHLTTRASQAALVAISTETDTERSYSFAELHAEVQRMAAVLLSLGVKKGDRVLIYMPMIAEAAFAMLACVRIGALHSVVFGGFASGSLASRIEDAEPVAVVSADAGSRGGKVVPYKPLLDEAIALSKHKPAAVLMVNRGLAPMHLQAGRDHEWAPLREQHLNTVVPCAWVESTHPSYTLYTSGTTGKPKGVQRDTGGYAVALAASMK

SEQ ID NO: 193046 - protein, 143 aa, Unknown
  Bacterial polypetide isolated from the Sargasso Sea
DGYYWITGRVDDVIIVSGHNLGTAELESAFVAHPKVAEAAVVGYPHDIKGNGLYCYVTLNAGEKPSGDLERDLKLWVRKQIGPIATPDLIQFSPGLPKTRSGKIMRRILRKIAANEHDQLGDTTTLADPSVVESLVSNRKNAK

SEQ ID NO: 193047 - protein, 266 aa, Unknown
  Bacterial polypetide isolated from the Sargasso Sea
YFKTVGDSRCPIVDTWWQTETGGILISPQTGAIDLKPGSATKPFYGIKPEIVDKDGKVLKGEAQGRLCIAQSWPGQMRSVYGDHDRFIETYFSQFDGKYFTGDGCRRDKDGYYWITGRVDDVIIVSGHNLGTAEIESAFVAHPKVAEAAVVGCPHDIKGNGLYCYVTLNVGEEPNGDLERELKLWVRKQIGVIATPDFIQFSPGLPKTRSGKIMRRILRKIAANEHEQLGDTTTLADPSVVKSLVDNRKNIYNFILSIKFFFNNIP

SEQ ID NO: 193048 - protein, 120 aa, Unknown
  Bacterial polypetide isolated from the Sargasso Sea
TAEIESALVLHESVAEAAVVGFPHEIKGQGIYTYVTLNSGVEESEDLKKELVQQVRKEIGPIATIDVLQWAPGLPKTRSGKIMRRILRKIAENDIEHVGDTSTLADPSVVDDLIKNRPSQ

SEQ ID NO: 193049 - protein, 211 aa, Unknown
  Bacterial polypetide isolated from the Sargasso Sea
TKPFYGIKPVLVNKDGKEIKGEGEGRLCIAQSWPGQMRTVYGDHQRFIDTYFSQFDGKYFTGDGCKRDKDGYYWITGRVDDVIIVSGHNLGTAEIESAFVAHPKVAEAAVVGYPHDIKGNGLYCYVTLNAGESETGDLDRELKLWVRKQIGPLATPDLIHFTPGLPKTRSGKIMRRILRKIAANEHGQLGDTTTLADPGVVDSLVENRKNI

SEQ ID NO: 193050 - protein, 189 aa, Unknown
  Bacterial polypetide isolated from the Sargasso Sea
LVRILCLADSWPGQMRTVYGDHKRFIETYFSQFDGKYFTGDGCKRDEDGYYWITGRVDDVINVSGHRMGTAEVESALVAHPKVSEAAVVGYPHDIKGQGIYAYVTLNAGEETSDELYKELVAWVRKEIGPIASPDLIQWAPGLPKTRSGKIMRRILRKIAENEYSNLGDTSTLAEPAVVDDLIDNRMNK

SEQ ID NO: 193051 - protein, 255 aa, Unknown
  Bacterial polypetide isolated from the Sargasso Sea
MFEGVPNYPDFGRFWDVCDKHKVNIFYTAPTAIRAIAKEGDELVQKRDLSSLRLLGTVGEPINPEAWMWYHRVVGQERCPIVDTWWQTETGGILITPLPGATKTKPGSATRPFFGIQPILMDADGNEVEGAVSGNLCIKHPWPGQMRTVFGDHQRFKETYFSTYPGYYFTGDGCRRDEDGYYWITGRVDDVLNVSGHRMGTAEIESALVLHESVAEAAVVGFPHEIKGQGIYTYVTLNSGVEESEDLKKELVQQV

SEQ ID NO: 193052 - protein, 214 aa, Unknown
  Bacterial polypetide isolated from the Sargasso Sea
MENNGMNAKPNNLDALLDEKRQFGASAEFRKKAVVRDRGIYDKAKDDRLNFWESWAETLKWNEKWHTVLEWTPPYAKWFLGGRINVSENCLDRHLDEGRCDKTALIWEGENGESRHYSYQDLLEEVSRLANSLKSLGVKKGDRVAIYLPMIPEAAIAMLACARIGAVHSVVFGGFSPQSLADRINDLRATCLITADGGYRRGGVVPLKINADKA

SEQ ID NO: 193053 - protein, 225 aa, Unknown
  Bacterial polypetide isolated from the Sargasso Sea
MSEPTIEDYYVEDRTFPPSDAFQKNALIADRSLYEEAQENRLGFWARQARELVTWFEDFETVLEWDLPFAKWFVEGKLNISYNCLDRHVEAGQGDKVAFHWEGEPGDIRTITYNGLLEEVSKFANVLKSLGVTKGDRVCIYMPMIPELPVAMLACARIGAPHSIVFGGFSADSLSDRIDDADAKLLITADGGYRRGEPFPLKETADASVAATSTIENVVVVQRTG

SEQ ID NO: 193054 - protein, 297 aa, Unknown
  Bacterial polypetide isolated from the Sargasso Sea
APKQEKELIYRTKKDWISKALVNKSQYEKKYKASIKDNDGFWKKEGKRINWIKPYTKIKDVKYSKSDVKIKWFYDGTLNASANCIDRHLKKNKDKTAIIWVGDDPKIQKKISYKELHKEVSKAANGLKELGVKKGDRVTIYLTMIPELAYTMLACARIGAVHSIIFGGFSPDSISGRINDCESDYLITADEGLRGGKIIPLKSIADEALVNCPNVKKCVVVKRTGNRINWDERRDVWYHELTKKVSNKCEPEEMNAEDPLFILYTSGSTGKPKGVMHTTGGYMVYASMTHQYIFNYK

SEQ ID NO: 193055 - protein, 246 aa, Unknown
  Bacterial polypetide isolated from the Sargasso Sea
GNFKCPIVDTWWQTETGGILIAPQTAAIPLKPGSATKPFYGIKPCLVDKDGKEIKGAGEGRLCISQSWPGQMRTVYGDHQRFIDTYFSQFDGKYFTGDGCKRDKDGYYWITGRVDDVIIVSGHNLGTAEIESAFVAHPKVAEAAVVGYPHDIKGNGLYCYVTLNAGETGSGDLERELKLWVRKQIGPLATPDLIHFTPGLPKTRSGKIMRRILRKIAANEHGQLGDTTTLADPGVVKSLVENRKNI

SEQ ID NO: 193056 - protein, 159 aa, Unknown
  Bacterial polypetide isolated from the Sargasso Sea
SSFPGYYTTGDGARRDEDGYYWITGRVDDVLNVSGHRMGTAEVESALVAHPRVCEAAVVGYPHDIKGQGIYVYVTLNDGEAASEELLQELRQWVRREIGPIATPDLIHFTAGLPKTRSGKIMRRILRKVAANEHDSLGDISTLADPAVVASLVETRVNR

SEQ ID NO: 193057 - protein, 279 aa, Unknown
  Bacterial polypetide isolated from the Sargasso Sea
ADEGVRGGRPIPLKANTDAAVKNCPDCKTVIVVRRTGGDINWVEGRDIWYHDAMNTASPDCPVEEINAEDPMFILYTSGSTGKPKGVLHTTGGYMVYASMTHQYVFDYHDGDIYWCSADIGWITGHSYIIYGPLANGAITLMFEGVPTYPDSSRFWHVVEKHKVNMFYTAPTAIRALMREGETPVARCDKSSLRLLGSVGEPINPEAWMWYHRVVGEERCSIVDTWFQTETGGIMITPLPGATATKPGSATKPFFGVKPILVDGENKVLDGATDGNLCI

SEQ ID NO: 193058 - protein, 293 aa, Unknown
  Bacterial polypetide isolated from the Sargasso Sea
TAPTAIRALMAQGNDPVTRTKRDSLRILGTVGEPINPEAWDWYFNVVGESKCEVIDTWWQTETGSVLISPIAGVTPTKPGSATLPFFGIKPALYDENGTALDGANSGNLVIESSWPSQIRSVYGDHQRMIDTYFSTYEDIYFTGDGARRDEDGYYWITGRVDDVLNVSGHRLGTAEIESALVLHPKVAEAAVVGFDHPIKGQGIYAFVTLMIEESFSDDLNNELKQFVAKEIGSIAKPDLIQNAPGLPKTRSGKIMRRILRKIAENDLSNLGDTTTLADPSVVESLISNKISL

SEQ ID NO: 193059 - protein, 242 aa, Unknown
  Bacterial polypetide isolated from the Sargasso Sea
PIVDTWWQTETGGILIAPQPGAIDLKPGSATKPFYGIKPVLVDKDGKIIKGEGKGRLCMATSWPGQMRTVYGDHQRFIDTYFSQYDGKYFTGDGCRRDKDGYYWITGRVDDVIIVSGHNLGTAEIESAFVAHPKVAEAAVVGFPHSIKGNGLYCYVTLNAGENPSGDLERDLKLWVRKQIGPIATPDVIQFAPGLPKTRSGKIMRRILRKIAANEPDNLGDTTTLADPSVVTSLVENRQNKG

SEQ ID NO: 193060 - protein, 290 aa, Unknown
  Bacterial polypetide isolated from the Sargasso Sea
IKWYEDGTLNLAANCLDRHLAERGDQTAIIWEGDDASQSKNITYRELHRDVCRFANVLLDLGIKKGDVVAIYMPMVPEAAVAMLACARIGAIHSVIFGGFSPEAVAGRIIDSNSRLVITSDEGLRAGRAIPLKKNVDDALKNPNVKSIENVVVFKRTGGKIDWQEGRDLWWSDLIEKASAEHQPEEMNAEDPLFILYTSGSTGKPKGVLHTTGGYLVYAASTFKYVFDYHPGDIYWCTADVGWVTGHSYLLYGPLACGATTLMFEGVPNWPTPARMCQVVDKHQVNILYT

SEQ ID NO: 193061 - protein, 294 aa, Unknown
  Bacterial polypetide isolated from the Sargasso Sea
MGVQKGDRVTIYLTMIPELAYTMLACARIGAVHSIIFGGFSPDSISGRINDCESDYVITADEGVRGGKTIPLKSITDEALESCPNVKKCIVVKRTGTKKIDWFNDRDVWYHKMTSKVSAKCEPEEMNAEDPLFILYTSGSTGKPKGVLHTTGGYMVYASMTHQYIFNYKPKDIYWCTADIGWVTGHSYIIYGPLANGATTIMFEGIPTYPDTSRWWQIVDKYKVNIFYTAPTAIRALMREGDKPVKKTSRKTLKLLGTVGEPINPEAWEWYYKTVGDSRCPIVDTWWQTELEEY

SEQ ID NO: 193062 - protein, 239 aa, Unknown
  Bacterial polypetide isolated from the Sargasso Sea
AALEQAATISGMPAYRALAAEAENDYEGFWARLAREGLAWHKPFTKVLDESNAPFYKWFDDGELNASYNCLDRHVEAGNGERVAVIFEADDGTVTRVTYADLLARVSRFANALKKRGIGKGDRVVIYIPMSIEGIVAMQACARIGATHSVVFGGFSAKSLNERLVDVGATALVTADEQARGGKTLPLKSIADEAIALGGCEAVKSVIVYRRTGGKIDWHAGRDLWMHELTAGESDQCEP

SEQ ID NO: 193063 - protein, 280 aa, Unknown
  Bacterial polypetide isolated from the Sargasso Sea
NDPSEEALHITYNELYERVSKMANVLREQGVRKGDRVCIYLPMIPELAVSVLACARIGAIHSVIFAGFSASAVSARINDCECKMVITSDGGYRGNKTIDLKGIVDEALETCPSVTKVLVAKRTNTDVKMKEGRDVWLQPLLDVALDNSVAEIMDAEDPLFILYTSGSTGKPKGMVHTTAGYMVYTAYTFKNVFSYEENDIFWCTADIGWITGHSYILYGPLLNGATTVIFEGVPSYPDFSRFWDIIEKHKITQFYTAPTAIRSLAKESLDYIQKISSKIS

SEQ ID NO: 193064 - protein, 297 aa, Unknown
  Bacterial polypetide isolated from the Sargasso Sea
VFGGFSPDALAGRIQDCDSSLIITADEGIRGGKPIPLKANTDEALNSCPMCKTVVVVKRTGGKIDWVEGRDYWYHDITSAQSVECQPEEMNAEDPLFILYTSGSTGKPKGVMHTSGGYIVYASMTHEYVFDYKDGEVYWCTADVGWVTGHSYILYGPLANGATTLMFEGVPNYPNSSRFWDVCDKHNVSIFYTAPTALRALMREGEGPVKATSRKSLRLLGSVGEPINPEAWLWYYNVVGDGRCPIVDTWWQTETGGILITPLPGATDLKPGSATRPFFGIKPIIVDADGNVLDGAT

SEQ ID NO: 193065 - protein, 289 aa, Unknown
  Bacterial polypetide isolated from the Sargasso Sea
HSIIFGGFSPDSIATRINDCESDYLITADEGIRGGKIIPLKKIADDALTQCPEVKKCVVVQRTGNQVDWNNERDISYKEMISSASSKCDPEEMSAEDPLFILYTSGSTGKPKGVLHTTGGYMVYASMTHQYIFDYKSNDVYWCTADIGWVTGHSYIIYGPLSNGATTIMFEGIPNYPDSSRWWQIVDKYKVNIFYTAPTAIRALMREGDKPVKKTSRKSLKLLGTVGEPINPEAWMWYYKTVGDSRCPIVDTWWQTETGGILISPQPGAIDLKPGSATKPFYGIKPVIV

SEQ ID NO: 193066 - protein, 272 aa, Unknown
  Bacterial polypetide isolated from the Sargasso Sea
YDSPITGNKSQFSYEELRSKVSKFAGALKAQGTNKGDRVIIYMPMIPEAVVAMLACARIGAIHSVVFGGFASNELASRIDDSKAKLLVTASCGFEPGRTVEYKPLVDEAIKIANHKIDKMILFQRPGNEVKLNAPNEVSWEEVVYNAKDADCVEMNSNEFAYILYTSGTTGTPKGIVRDIGGHIVALKWTMKNIYNIDADDIWWSASDIGWIVGHSYIVYAPLFKGCATVLFEGKPVGTPDAGAFWKIISDYKVKSLFTAPTAFRAIKKEDP

SEQ ID NO: 193067 - protein, 284 aa, Unknown
  Bacterial polypetide isolated from the Sargasso Sea
MPKKKKVKKKVISKKPKETVYKTKKEWISKATVNKSQYIKKYNESIKDNDGFWKKEGKRINWIKPYKKIKDVKYSKDDVHIKWFYDGTLNASANCIDRHLKNNANKTAIIWVGDDPKVQKKITYKELHKEVSKAANGLKNLGVQKGDRVTIYLTMIPELAYTMLACARIGAVHSIIFGGFSPDSISGRINDCESDYVITADEGVRGGKTIPLKSITDEALQSCPNVKKCIVVKRTGTKKIDWYNDRDVWYHKMIGKVSAKCEPEEMNAEDPLFILYTSGSTGNP

SEQ ID NO: 193068 - protein, 271 aa, Unknown
  Bacterial polypetide isolated from the Sargasso Sea
SLRLLGTVGEPINPEAWMWYKNVIGKDKCPIVDTWWQTETGGVMISPLPGVVATKPGSATLPLPGIEVEIVDKNGDKVKENEGGYLIIKKPWPGMMRTIHGNSERYLEGYWEYISFKGEKNVYFAGDGARIDEDGYIWIMGRVDDVISVSGHRLGTMEIESALVSHKSVAESAVVGKKDDLKGEVIVAFVSLEKDVNDSSELVEDLKKHVVNEIGIIAKPEKIIISDSLPKTRSGKIMRRILRSLAAGEKISGDISTLEDSSVLEKLKELS

SEQ ID NO: 193069 - protein, 301 aa, Unknown
  Bacterial polypetide isolated from the Sargasso Sea
LKKNKDKTAIIWVGDDPKIQKKITYKQLHHEVSKAANGLKSIGVKKGDRVTIYLTMIPELAYTMLACARIGAVHSIIFGGFSPDSISGRINDCESDYVITADEGVRGGKIIHLKSITDEALVNCPNVKKCVVVKRTGNRVNWDKSRDVWYHEITKKVSSHCDPEEMNAEDPLFILYTSGSTGKPKGVLHTSGGYIVYASMTHQYIFNYKPKDIYWCTADIGWITGHSYIIYGPLANGATTIMFEGIPTYPDTSRWWQIVDKYKVNIFYTAPTAIRALMREGEGPVKKTSRKSLKLLGTVEN

SEQ ID NO: 193070 - protein, 179 aa, Unknown
  Bacterial polypetide isolated from the Sargasso Sea
MSEQKIFEIPAHAKEKAWIDNDTYLKMYQESVEDTVGFWDKQANRLDWFKKWDRTLDWDYNKAYIRWYEGGKLNVSHNCLDRHLEARGDQKALIWESDDPKVDRSFTYKQLHTEVSKFANVMKALGVVKGDRVMIYMPMIPELAIACLACARIGAVHSVVFGGFSSEALKNRITDCEAK

SEQ ID NO: 193071 - protein, 337 aa, Unknown
  Bacterial polypetide isolated from the Sargasso Sea
QYFHPSDEFVAQANMTDEGIYDRFGLDNFPECFHEYADLLSWHKRWDITFDASDAPCWKWFVGGKINASYNCIDRHLVSNRNKAAIVFVPELEQEPHEVVTYQELYVRVNETAALLRDFAGLKTGDRVTIHMPMSTDLPVVMLACARLGVIHSVVFGGFSGKACGERIADSGSSILITTDGYYRNGKMLDHKVKADEAVKVASDAGQIVEKVLVWRRYPDAYQSEVPMKPGRDFFMDEHLPEFSGVRVDPVELDADAPLFLMYTSGTTGKPKGCQHSIGGYLTYVAGTSKYVQDIHPEDVYWCMADIGWITGHSYIVYGPLALAATSVMYEGVPTFP

SEQ ID NO: 193072 - protein, 306 aa, Unknown
  Bacterial polypetide isolated from the Sargasso Sea
PSEDKKISYKELLVEVSKFSNVLKSKNVLKGDRVCIYMQMIPELAIAMLACSRIGAIHSIVFGAFSSNSLKDRINDSGCKIVITQDTGVRGLKVDIPMKENVDKALLDCPTIEKVFVVKRTSSDINMDKNRDLWWHEEMSNISKVCEPEWMDSEDPLFILYTSGSTGIPKGVLHTTGGYLVYASYTHEVIFDYHKNDIYWCTADIGWITGHSYIIYGPLSNNATTLMFEGVPNYPDFSRFWQIIEKHKVNIFYTAPTALRALMKEGNDFVKSTDRSSLKLLGSVGETIKKPEWDWYFEIVERKNVL

SEQ ID NO: 193073 - protein, 282 aa, Unknown
  Bacterial polypetide isolated from the Sargasso Sea
MSRKYREIYENSINNKEIFWKKVSEDIFWYKKPTKILNSDNPPFYKWFEDGITNTCYNALDHHIDQGRGEKLAIIYDSPITGKQKKISYKDLRDKVALFAGALKNQGINKGDRVIIYMPMIPEAVIAMLACGRIGAVHSVVFGGFAANELASRIDDSKAKLIVSASCGYEPGRTVFYKPLVNKALELAKHKPSKCIIYQREKDKAELNPDLDITWDEAHNEVKPAECEKMNANDYAYILYTSGTTGLPKGIVRDIGGHIVALKWTMKNIYNIDQDDVWWSAK

SEQ ID NO: 193074 - protein, 285 aa, Unknown
  Bacterial polypetide isolated from the Sargasso Sea
GHSYILYGPLANGATTLMFEGVPTYPDSGRFWQVVEKHKVSIFYTAPTAIRALMRDGDAPVKRHDRSSLRLLGSVGEPINPEAWMWYHRVVGDARCPIVDTWWQTETGGILITPLPGAIATKPGSATKPFFGIQPVIVDTENKELEGVAEGNLCINQSWPGQMRTVYGNHKRFVETYFSTFKGRYFSGDGARRDRDGYFWITGRVDDVLNVSGHRMGTAEVESALVSHNSVAESAVVGYPHNVKGQGIYAYVTLVAGLEADIELEKSLKLWVRKEIGAIAAPDLI

SEQ ID NO: 193075 - protein, 255 aa, Unknown
  Bacterial polypetide isolated from the Sargasso Sea
KDQGINKGDRVIIYMPMIPEAVVAMLACARIGAIHSVVFGGFASNELASRIDDSKAKLLVTASCGFEPGRTVEYKPLVDEAVKQATHKISKMILFQRKGHEVKLNAPIEISWDEAHANAKDTDCVEMNSNEFAYILYTSGTTGTPKGIVRDIGGHIVALKWTMKNIYNIDEDDIWWSASDIGWIVGHSYIVYAPLFKGCTTVLFEGKPVGTPDAGAFWKIISDYKVKSLFTAPTAFRAIKKEDPEGKFFSKYDLS

SEQ ID NO: 193076 - protein, 215 aa, Unknown
  Bacterial polypetide isolated from the Sargasso Sea
EAVVAMLACARIGAIHSVVFGGFASNELASRIDDSKAKILVTASCGFEPGRTVEYKPLVDEAIRIAGHKIEKMILFQRPGHEVKLNAPNEVSWKEVVSNAKDADCVEMNSNEFAYILYTSGTTGTPKGIVRDIGGHIVALKWTMKNIYNVDTDDIWWSASDIGWIVGHSYIVYAPLFKGCTTVLFEGKPVGTPDAGAFWKIISDYKVKSLFTAPT

SEQ ID NO: 193077 - protein, 211 aa, Unknown
  Bacterial polypetide isolated from the Sargasso Sea
MKDSFNKIYQESLKNPEKFWQNVSEDIFWFKKPSKILNKTNPPFYKWFEDGVTNTCYNAIDTHIDQGKGDKTALIYDSPITNNKAKFTYNELKEKISKFAGALDNLGIKKGDRVIIYMPMIPEAVIAMLACGRIGAIHSVVFGGFASNELASRIDDSKAKILITASCGFEPGRTVEYRPLVDGALKLAKHKVEKVIFFKRKGNEVELNSPT

SEQ ID NO: 193078 - protein, 135 aa, Unknown
  Bacterial polypetide isolated from the Sargasso Sea
GRVDDVIIVSGHNLGTAEIESAFVAHPKVAEAAVVGYPHDIKGNGLYCYVTLNAGEQENGELERDLKLWVRKQIGPLATPDIIHFSPGLPKTRSGKIMRRILRKIAANDHGQLGDTTTLADPSVVDSLVENRKNI

SEQ ID NO: 193079 - protein, 246 aa, Unknown
  Bacterial polypetide isolated from the Sargasso Sea
YYIEDRTFPPSETFRNDALIADRSLYEEAQEDRLGFWARQARELVTWFEDFETVLEWDLPFAKWFVEGKLNISYNCLDRHVEAGGGNKVAFYWEGEPGDTRTITYSELLEEVSKFANVLKSLGVTKGDRVCIYMPMIPELPVAMLACARIGAPHSIVFGGFSADSLSDRIDDADAKLLITADGGYRRGDPFPLKETADASVAATSTIENVIIVQRTGQEVEWNQTTDHWYHELMESASPDCPPEHL

SEQ ID NO: 193080 - protein, 233 aa, Unknown
  Bacterial polypetide isolated from the Sargasso Sea
GDIYWCTADIGWITGHSYIIYGPLCNGATTLMFEGVPNYPDFSRFWEIVDKHKVNIFYTAPTAIRALMREGNEPVKKTSRSSLKLLGTVGEPINPEAWKWYFEVPGNSNCPIVDTWWQTETGGILISPQTGAIELKPGSASKPFFGIEPCIVDKNGNELDGECEGMLCLKRSWPGQMRSVYGDHDRFINTYFSQFDGKYFTGDGCKRDKDGYYWITGRVDDVIIVSGHNLGTA

SEQ ID NO: 193081 - protein, 137 aa, Unknown
  Bacterial polypetide isolated from the Sargasso Sea
ITGRVDDVIIVSGHNLGTAELESAFVAHPKVAEAAVVGYPHDIKGNGLYCYVTLNAGEKSTGELERDLKLWVRKQIGPIATPDLIQFAPGLPKTRSGKIMRRILRKIAANEHDQLGDTTTLADPTVVESLVENRKNK

SEQ ID NO: 193082 - protein, 193 aa, Unknown
  Bacterial polypetide isolated from the Sargasso Sea
MEIKKEWLEHAKVNEEKYSSMYDQSLKKNDEFWADQAQRIDWIKKFTKIKDIKYSKDDVSIKWFEDGNLNVSYNCIDRHAKNNPDKIAIIWEGDDPNEIKKITYKDLLTNVSKAANVLKEIGVKKGDRVTIYLTMIPELAYMMLACARIGAVHSIIFGGFSAESIAGRIKDCKSEYVVTADEGVRGGKTIPLK

SEQ ID NO: 193083 - protein, 277 aa, Unknown
  Bacterial polypetide isolated from the Sargasso Sea
MSLDKKNSINNILEEKRIFHPSKKFAENSNISTQKELLILKKQASDNPINFWGSFAKSELDWFEPFQTVLDNENAPFFKWFKEGKLNITYNCLDRHIKRGLGGKTALIWEGEPGDSKKYTYEELLKEVCKAANALKAIGVKKGDLVCIYMPMIPEAMFAMLACARIGAPHSVVFGGFSSEALKDRLIDGNARFVITADGGFRKDKVIELKKAVDAAIESGADKVVEKVIVVQRSKKNIAMVDDRDFWWHELVKDQKDYCEPEIMNSEDRLFILYTSG

SEQ ID NO: 193084 - protein, 194 aa, Unknown
  Bacterial polypetide isolated from the Sargasso Sea
MSDKFSKIYDHSIKNPEKFWQEAAEDIFWFKKPTKILNKSNPPFYKWFEDGVTNTCYNALDIHIDQGRGKNIALIYDSPITGNKSKFTYEELRSKVAKFAGALKNQGVNKGDRVIIYMPMIPEAVIAMLGCARIGAIHSVVFGGFASTELASRIDDSKAKLLVTASCGFEPGRTVEYKPLVDEAIKIANHKIEK

SEQ ID NO: 193085 - protein, 312 aa, Unknown
  Bacterial polypetide isolated from the Sargasso Sea
SADSISGRVNDCESEYIITADEGVRGGKTIPLKYTVDEALMSCPNVKKCIVVKRTGNYINWDQNRDVWYHDLIKDVPNHCEPEEMNAEDPLFILYTSGSTGKPKGVLHTTGGYMVYASMTHQYIFNYKPKDIYWCTADIGWVTGHSYIIYGPLSNGATTIMFEGIPNYPDSSRWWQIVDKYKVNTFYTAPTAIRALMREGDKPVKKTSRKSLKLLGTVGEPINPEAWMWYYKTVGNSKCPIVDTWWQTETGGIMIAPQTGAIPLKPGSATKPFYGIKPVLVDKNGKEIKGAGEGRLCIAQSWPGQMRTVYGD

SEQ ID NO: 193086 - protein, 148 aa, Unknown
  Bacterial polypetide isolated from the Sargasso Sea
MSSSDVYKSKDWITEKAFIKKDDYKAMYEQSISKPDEFWFEQGQRLDWFTPYTKVRDYSYEKNDLYIKWYEDGELNASYNCLDRHIEKNGDKIAVIWEGDDSSNSRKITYQELLTEVCKFSNGLKSLGIKKGDRVTIYMPMIPEAAIA

SEQ ID NO: 193087 - protein, 206 aa, Unknown
  Bacterial polypetide isolated from the Sargasso Sea
IKPVLVDKDGKVIKKEGKGRLCMASSWPGQMRTVYGDHQRFIDTYFSQFDGKYFTGDGCRRDKDGYYWITGRVDDVIIVSGHNLGTAEIESAFVAHPKVAEAAVVGFPHSIKGNGLYCYVTLNAGENPTGDLERDLKLWVRKQIGPIATPDVIQFAPGLPKTRSGKIMRRILRKIAANEPDNLGDTTTLADPSVVTSLVENRQNKG

SEQ ID NO: 193088 - protein, 251 aa, Unknown
  Bacterial polypetide isolated from the Sargasso Sea
DQIAYIYDSPVTDTNQKISFKELQENVSKFAGGLQSLGLKKGDTAVIYMPMIPQAAYAMLACARLGITHSVVFGGFAPHELAIRIDDCNPKVIITASAGVEVKKRVPYLPFVKEAYEMSSHKPENIVVFDRQLWGNKVDWENEPQLTNFQELLEKSESVDCVPVASTHPLYILYTSGTTGKPKGVIRDTGGYATALKFSMKNIYGLNEGEVFWAASDIGWVVGHSFIIYGPLFNRNTSIIYEGKPIMTPDA

SEQ ID NO: 193089 - protein, 311 aa, Unknown
  Bacterial polypetide isolated from the Sargasso Sea
DFSRFWQIVDKHEVNIFYTAPTAIRALMREGDNYVTKTSRSSLKLLGTVGEPINPEAWKWYYEIPGNSKCPIVDTWWQTETGGILISPQTGAIKLKPGSASKPFFGIEPCIVDKDGNELEGECEGMLCMKRSWPGQMRTVYGDHKRFIDTYFSQFDGKYFTGDGCRRDKDGYYWITGRVDDVIIVSGHNLGTAEIESAFVSHKDVSEAAVVGYPHDVKGNGLYCYVSLKVGIDTSKELVSDLKKTIREKIGPIATPDFIHVTAGLPKTRSGKIMRRILRKIASNDFGNLGDTSTIADPSVVNDLIENRKNK

SEQ ID NO: 193090 - protein, 118 aa, Unknown
  Bacterial polypetide isolated from the Sargasso Sea
DRASLRLLGSVGEPINPEAWMWYHNIVGEARCSIVDTWFQTETGGIMITPLPGATATKPGSATKPFFGVKPILVDSENNVLGGATDGNLCIDHSWPGQMRTVYGDHQRFIETYFVAFP

SEQ ID NO: 193091 - protein, 165 aa, Unknown
  Bacterial polypetide isolated from the Sargasso Sea
FIDTYFSQFNGKYFTGDGCRRDKDGYYWITGRVDDVIIVSGHNLGTAEIESAFVAHPKVAEAAVVGYPHDIKGNGLYCYVTLNAGETETGELERDLKLWVRKQIGPLATPDLIHFTPGLPKTRSGKIMRRILRKIAANEHGQLGDTTTLADPSVVDSLVENRKNI

SEQ ID NO: 193092 - protein, 199 aa, Unknown
  Bacterial polypetide isolated from the Sargasso Sea
MSTNLFSPNKEFSADADINSIDQYKDLYKKSILDPEAFWAKTADRITWYKKWDQVREYDFENGSIKWFDGAKLNVSYNCLDRHIENGFGEQTAIIWEGNNPEEDQTFTYNDLLFEVKKFANVLKGIGVKKGDRVCLYMQMVPQLPIAMLACARIGAVHSVVFGAFSPGSLRDRINDSSCKVLITQDTGVRGTKQNIPRK

SEQ ID NO: 193093 - protein, 189 aa, Unknown
  Bacterial polypetide isolated from the Sargasso Sea
MSENEKFEVSSEWSAEAQVNSAKYNEWYENSLNNNEEFWNEHGKRIDWIKPYTKVKDVSYNKDNFSIKWYYDGTLNASSNCIDRHLKDKADQTAIIWEGDDPADSKHITYKELHSEVSKLANGMKSLGVRKGDRVTIYMPMIPEAAYAMLACTRIGAIHSVVFGGFSPDSLAGRISDCKSDIVITADEG

SEQ ID NO: 193094 - protein, 112 aa, Unknown
  Bacterial polypetide isolated from the Sargasso Sea
VAHPKVAEAAVVGYPHDIKGNGLYCYVTLNVGQEPSGDLERELKLWVRKQIGAIATPDFIQFSPGLPKTRSGKIMRRILRKIAANEHEQLGDTTTLADPSVVKSLVGNRKNT

SEQ ID NO: 193095 - protein, 309 aa, Unknown
  Bacterial polypetide isolated from the Sargasso Sea
SGGVRHCIVVKRTGGETGWEEGRDVWYHELTKSASDDCPPEEMSAEDPLFILYTSGSTGKPKGVMHTTGGYMVYASITHQYVFDYKPGDIYWCTADVGWVTGHSYIVYGPLANGAVTVMFEGVPNYPNASRFWEVVDKHKVNIFYTAPTAIRALMREGEDPVKKTSRSSLKLLGTVGEPINPEAWMWYYNVVGDGKCPIVDTWWQTETGGILITPLPGAIAQKPGSATKPFFGIQPEILDAEGNILEGACEGSLCLADSWPGQMRTVYGDHQRFIETYFSQFEGKYFTGDGCKRDDDGYYWITGRVDDV

SEQ ID NO: 193096 - protein, 263 aa, Unknown
  Bacterial polypetide isolated from the Sargasso Sea
KKITYKELHKEVSKAANGLKNLGVQKGDRVTIYLTMIPELAYTMLACARIGAVHSIIFGGFSPDSISGRINDCESDYVITADEGVRGGKIIPLKSITDEALQSCPNVKKCIVVKRTGSKKIDWYNDRDVWYHKMISKVSAKCEPEEMNAEDPLFILYTSGSTGKPKGVLHTTGGYMVYASMTHQYIFNYRPKDIYWCTADIGWVTGHSYIIYGPLANGATTIMFEGIPTYPDTSRWWQIVDKYKVNIFYTAPTAIRALMRERG

SEQ ID NO: 193097 - protein, 161 aa, Unknown
  Bacterial polypetide isolated from the Sargasso Sea
KTFRGMYFTGDGARRDEDGYYWITGRVDDVINVSGHRLGTAEVESALVSHELVAEAAVVGYPHDIKGQGIYAYVTLTRGTEESEELRQELRQWVRKEIGALATPDLIQWATGLPKTRSGKIMRRFLRKIAANEVTNLGDASTLADPAVIETLIETRLNRNE

SEQ ID NO: 193098 - protein, 254 aa, Unknown
  Bacterial polypetide isolated from the Sargasso Sea
MSHPSVYPVPASAAKRSLLTNEQYMQMYQQSVSSPDTFWAEHGKRLHWFTAFSKVKSTSFESGKVGINWFSDGVLNASYNCLDRHLPERADQVAYYWEGDSPDVQKTVTYAQLHQQVCQLANGMKSLGIKKGDRVTIYLPMIPEATVALLACARIGAVHSVVFAGFSPDALGSRIVDCDSKLVITADQALRGSRVTNLKDNTDMALAHLGADSPVQNVIVVKHVGKNVDMDAGKDGRDVWYHELLGKQSSDCPA

SEQ ID NO: 193099 - protein, 274 aa, Unknown
  Bacterial polypetide isolated from the Sargasso Sea
KKGDRIIIYMPMIPEAIMAMLACGRIGAVHSVVFGGFASNELASRIDDSKARMILSASCGLEPGRTVDYKPLLDEAKKIAKHKVEKTVIFQREQHEYKLEKDDVNWNEFIEDAIKVECVECDSNDPAYILYTSGTTGVPKGILRDIGGHIVGLKWTMKNIYDIDPTDVWWSASDIGWIVGHSYIVYGPLFHGCTTLIFEGKPVGTPDPGSFWRVISEYNVKTLFTAPTAFRAIKKEDPEGKFFKKYDLSKFEALYLAGERADPDTIHWAEGLLK

SEQ ID NO: 193100 - protein, 284 aa, Unknown
  Bacterial polypetide isolated from the Sargasso Sea
SLYLAGALKKQGVKKGDRVIIYMPMIPEAAIAMLACGRIGAIHSVVFGGFAANELASRIDDSKAKLIVSASCGYEPGRTVNYKPLVNKALELASHKPNKCIIFQREKDKAELNPAMDITWEDSLKDVKPADCEKMNANDYAYILYTSGTTGLPKGIVRDIGGHIVALKWTMKNIYNINQDDIWWSASDIGWIVGHSYIVYAPLFYGCTTILFEGKPVGTPDAGVFWRVISEHKVKSLFTAPTAIRAIKKEDPNGEFFKKYNLSKFEKLFLAGERADPDTIKWFE

SEQ ID NO: 193101 - protein, 299 aa, Unknown
  Bacterial polypetide isolated from the Sargasso Sea
CEPEEMNAEDPLFILYTSGSTGKPKGVLHTTGGYMVYASMTHQYIFNYKPKDIYWCTADIGWVTGHSYIIYGPLSNGATTIMFEGIPNYPDSSRWWQIVDKYKVNTFYTAPTAIRALMREGDKPVKKTSRKSLKLLGTVGEPINPEAWMWYYKIVGNSKCPIVDTWWQTETGGILIAPQTGAIPLKPGSATKPFYGIKPMLVDKSGKEIKGPGEGRLCIAQSWPGQMRTVYGDHQRFIDTYFSQFEGKYFTGDGCRRDKDGYYWITGRVDDVIIVSGHNLGTAEIESAFVAHPKVAEAA

SEQ ID NO: 193102 - protein, 279 aa, Unknown
  Bacterial polypetide isolated from the Sargasso Sea
SNKCEPEEMNAEDPLFILYTSGSTGKPKGVMHTTGGYMVYASMTHQYIFNYKPKDIYWCTADIGWVTGHSYIIYGPLSNGATTIMFEGIPTYPDSSRWWQIVDKYKVNIFYTAPTAIRALMREGDKPVKKTSRKSLKLLGTVGEPINPEAWEWYYKTVGDSNCPIVDTWWQTETGGILISPQTGAINLKPGSATKPFYGIKPVIVSKDGKVLKGEAEGRLCIAQSWPGQMRTVYGDHQRFIDTYFSQFDGKYFTGDGCRRDKDGYYWITGRVDDVIIVS

SEQ ID NO: 193103 - protein, 294 aa, Unknown
  Bacterial polypetide isolated from the Sargasso Sea
GIGDKTALIYDSPITGNKLKLTYKELKDKVSKFAGALINQGVKKGDRVIIYMPMIPEAVVAMLACGRIGAIHSVVFGGFASNELASRIDDSKAKILLTASCGFEPSRTVEYKPLVDGALKLANHKVEKVIFFQRKGNEVKLNAPLEISWDEALSNSKDTDCVEMNSNEYAYILYTSGTTGIPKGIVRDIGGHIVALKWTMKNIYNINKEDVWWSASDIGWIVGHSYIVYAPLFKGCTTVLFEGKPVGTPDAGAFWKIISDYKVKSLFTAPTAFRAIKKEDPDGKFFSKIQPEFI

SEQ ID NO: 193104 - protein, 245 aa, Unknown
  Bacterial polypetide isolated from the Sargasso Sea
MEIKESWIKEAKVNSQTYETKYNNSIKDNDSFWREEGKRIDWIKDYSKIKHVKYSKKEVDIKWYYDGSLNVAYNCIDRHAKNNPDRIAIIWEGDDPNEVKNISYKELLTNVSKASNVLKKLGVKKGDRVTIYLTMIPELAYMMLACARIGAIHSIIFGGFSADSISGRILDCKSEFVITADEGVRGGKKIPLKNITNTALESCPDVKKCLVVKRTGENIDMVQGRDVFYNDLIKDVERTCEPEIM

SEQ ID NO: 193105 - protein, 298 aa, Unknown
  Bacterial polypetide isolated from the Sargasso Sea
DKTAIIWVGDDPKDTQKISYKQLHQKVSKAANGLKKLGIKKGDRVTIYLTMIPELAILMLACVRIGAVHSIIFGGFSADSISGRVNDCESEYIITADEGVRGGKTIPLKSITDEALLNCPNVKNCIVVKRTGNYINWDDSRDVWFHDLIKDVSSQCEPEEMSAEDPLFILYTSGSTGKPKGVLHTTGGYMVYASMTHQYIFNYKPKDIYWCTADIGWVTGHSYIIYGPLSNGATTIMFEGVPTYPDSSRWWQIIDKYKVNIFYTAPTAIRALMREGEDPVKKTSRKSLKLLGTVGEPI

SEQ ID NO: 193106 - protein, 259 aa, Unknown
  Bacterial polypetide isolated from the Sargasso Sea
GVRGGKTIPLKATTDEALVNCPNVKKCIVVKRTGNFINWNPERDVWYHEITKKVSSNCEPEEMSAEDPLFILYTSGSTGKPKGVLHTTGGYMVYASMTHQYIFNYKQKDIYFCTADIGWITGHSYIIYGPLSNAATTIMFEGIPTYPDFSRWWQIVDKYKVNIFYTAPTAIRALMREGDGPVKKTSRKSLKILGTVGEPINPEAWQWYYKTVGDSKCPIVDTWWQTETGGILISPQTGAIDLKPGSATKPFYGIKPVIV

SEQ ID NO: 193107 - protein, 207 aa, Unknown
  Bacterial polypetide isolated from the Sargasso Sea
MSKKFQNIYENSIKNPEKFWQEASEDIFWFKKPTKILNKSNPPFYKWFEDGVTNTCYNALDTHIDQGRGQKTALIYDSPITGNKSKFTYEELRAKVSKFAGALKQQGVNKGDRVIIYMPMIPEAVIAMLACARIGAIHSVVFGGFASNELASRIDDSKAKLLVTASCGFEPGRTVEYKPLVDEAIKIANHKIEKMILFQRPGNEVKL

SEQ ID NO: 193108 - protein, 157 aa, Unknown
  Bacterial polypetide isolated from the Sargasso Sea
MSDNFREIYRKSIEDPENFWKEASDDIFWFKKPSKILNKSNPPFYKWFEDGVTNTCYNALDVHIDKGQGNKTALIYDSPITGNKSKLTYEELRSKVSKFAGALKNQDVGKGDRVIIYMPMIPEAVIAMLACGRIGAVHSVVFGGFASNELASRIDDS

SEQ ID NO: 193109 - protein, 290 aa, Unknown
  Bacterial polypetide isolated from the Sargasso Sea
MIPELAYVMLACARIGAVHSIIFGGFSPDSIATRINDCESNYLITADEGVRGGKIIPLKKIADEALSQCPDVKKCVVVQRTGNQVDWDDERDISYKDMISSASNKCEPEEMNAEDPLFILYTSGSTGKPKGVLHTTGGYMVYASMTHQYIFDYKSNDVYWCTADIGWVTGHSYIIYGPLANGATTIMFEGVPNYPDSSRWWQIVDKYKVNIFYTAPTAIRALMSEGEKPVKKTSRKSLKLLGTVGEPINPEAWMWYYKTVGDSRCPIVDTWWQTETGGILIAPQPGAIDL

SEQ ID NO: 193110 - protein, 318 aa, Unknown
  Bacterial polypetide isolated from the Sargasso Sea
KPEWVKRSLANKAQYQKKYSDSIKNNNSFWKKEGKRITWIKPYKKIKDVKYSKDEVRIKWFEDGTLNASANCIDRHLKDKKDKTAIIWVGDDPKDTQKISYKQLHQKVSKAANGLKKLGIQKGDRVTIYLTMIPELAILMLACARIGAVHSIIFGGFSAESISGRVNDCKSEYIITADEGVRGGKTIPLKATTDEALSNCPDVKKCIVVKRTGNYVYWDQDRDVWYHDLIKDVPNHCEPEEMSAEDPLFILYTSGSTGKPKGVLHTTGGYMVYASMTHQYIFNYKPNDIYWCTADIGWVTGHSYIIYGPLANGCTTIM

SEQ ID NO: 193111 - protein, 174 aa, Unknown
  Bacterial polypetide isolated from the Sargasso Sea
VYGDHERFVLTYFKTFRGMYFTGDGARRDEDGYYWITGRVDDVINVSGHRLGTAEVESALVSHELVAEAAVVGYPHDIKGQGIYAYVTLTRGTEESEELRQELRQWVRKEIGALATPDLIQWATGLPKTRSGKIMRRFLRKIAANEVTNLGDASTLADPAVIETLIETRLNRNE

SEQ ID NO: 193112 - protein, 268 aa, Unknown
  Bacterial polypetide isolated from the Sargasso Sea
VQQTFGWVTGHSYIIYGPLSNGATTIMFEGIPTYPDSSRWWQIVDKYKVNIFYTAPTAIRALMREGEKPVKKTSRKTLKLLGTVGEPINPEAWEWYYKTVGDSNCPIVDTWWQTETGGILISPQTGAINLKPGSATKPFYGIRPVIVNKEGKVLKGEAEGRLCIAQSWPGQMRTVYGDHQRFIDTYFSQFDGKYFTGDGCRRDKDGYYWITGRVDDVIIVSGHNLGTAEIESAFVAHPKVAEAAVVGYPHDIKGNGLYCYVTLNVGEK

SEQ ID NO: 193113 - protein, 282 aa, Unknown
  Bacterial polypetide isolated from the Sargasso Sea
KIKQQLSGLEIIQKIVKKFHIKNYIEKVSRAANGLKKLGIKKGDRVTIYLTMIPELAILMLACVRIGAVHSIIFGGFSAESISGRVNDCKSEYIITADEGVRGGKTIPLKDTTDEALMSCPKVKKCIVVQRTGNYINWDNKRDVWYHELIKDVSNNCEPEEMNAEDPLFILYTSGSTGKPKGVLHTTGGYMVYASMTHQYIFNYKPKDIYWCTADIGWVTGHSYIIYGPLANGATTIMFEGIPNYPDTSRWWQIIDKFKVNTFYTPPTAIRALMREGDKPVK

SEQ ID NO: 193114 - protein, 157 aa, Unknown
  Bacterial polypetide isolated from the Sargasso Sea
YKGLYFTGDGCRRDEDGYYWITGRVDDVLNVSGHRMGTAELESALVLHENVAEAAVVGFPHEIKGQGIYAFVTLNTGVEPTAELQKELVQLVRKEIGPIASFDVVQWAPGLPKTRSGKIMRRILRKIAENEMESIGDTSTLADPSVVDDLISNRPAN

SEQ ID NO: 193115 - protein, 107 aa, Unknown
  Bacterial polypetide isolated from the Sargasso Sea
AEAAVVGFPHSIKGNGLYCYVTLNAGENPTGDLERDLKLWVRKQIGPIATPDVIQFAPGLPKTRSGKIMRRILRKIAANEPDNLGDTTTLADPSVVTSLVENRQNKG

SEQ ID NO: 193116 - protein, 236 aa, Unknown
  Bacterial polypetide isolated from the Sargasso Sea
LKDKKDKTAIIWVGDDPKDSQKISYKQLHQKVSKAANGLKKLGIKKGDRVTIYLTMIPELAILMLACVRIGAVHSIIFGGFSADSISGRVNDCESEYIITADEGVRGGKTIPLKYTVDEALMSCPNVKKCIVVKRTGNYINWDQNRDVWYHDLIKDVPNHCEPEEMNAEDPLFILYTSGSTGKPKGVLHTTGGYMVYASMTHQYIFNYKPKDIYWCTADIGWVTGHSYIIYGPLSN

SEQ ID NO: 193117 - protein, 268 aa, Unknown
  Bacterial polypetide isolated from the Sargasso Sea
SANCIDRHLKRNKDKTAIIWVGDDPKVHKKISYKQLHQEVSKAANGLKEIGVKKGDRVTIYLTMIPELAYTMLACARIGAVHSIIFGGFSADSITGRINDCKSDYVITADEGVRGGKIIHLKETVDEALLNCPNVKKCVVVKRTGNRINWDESRDVWYHDITKKASKNCEPEEMNAEDPLFILYTSGSTGKPKGVLHTTGGYMVYASMTHQYIFNYKPKDIYWCTADIGWVTGHSYIIYGPLSNGATTIMSEGIPNYPDWSRMVANSR

SEQ ID NO: 193118 - protein, 92 aa, Unknown
  Bacterial polypetide isolated from the Sargasso Sea
NGLYCYVSLKVGVDSSDDLVLDLKKTIREKIGPIATPDFIHITAGLPKTRSGKIMRRILRKIASNDFDNLGDTSTLADPSVVNNLIKNRKNK

SEQ ID NO: 193119 - protein, 249 aa, Unknown
  Bacterial polypetide isolated from the Sargasso Sea
MSGNYKKIYDSSIKNRENFWKNVSEDIFWYKKPSKILNSSNPPFYKWFEDGVTNTCYNALDFHVDKGRGNKIAIIYDSPITNTKCELTYSELKEKVSIFAGALKNQGITKGDRVIIYMPMIPEAVVAMLACGRIGAIHSVVFGGFAANELASRIDDSKAKLIISASCGYEPGRTVHYKPLLNKAIEISNHKPEKCIIWQREKDKAELDSKLDIDWMEALKKAKPTECEKMNSNDYAYILYTSGTTGTPK

SEQ ID NO: 193120 - protein, 275 aa, Unknown
  Bacterial polypetide isolated from the Sargasso Sea
RSKIVITADGAWRRGDIVPLKQNVDDSLKLTDHIESVIVVKRTENEVTMVDGRDYWYSELVDKQEADCEPEVMNAEDMLYILYTSGTTAKPKGIVHTQAGYLTGVTTTHSAVFDVKEDDIYWCAADCGWVTGHSYIVYGPLANKTTSVMYEGAPNAPDEKRLWSIVEKYKVNIFYTAPTAIRAFMKWGVEHPQAHDLTSLRLLGTVGEPINPEAWMWYHENIGNESCAIVDTWWQTETGSIMITPLPGINSTKPGSACGPMPGIDAVVVDENGNE

SEQ ID NO: 193121 - protein, 330 aa, Unknown
  Bacterial polypetide isolated from the Sargasso Sea
KKLKIMAKRSKKKIKKKKKISKKLRSSEKNQELTIKIRSDWVKKALINKKQYEKKYSHSLKNNDDFWKKEGKRITWIKPYKKIKNVKYSKSDVNIKWYYDGTLNASANCIDRHLKKNKDKTAIIWVGDDPKVQKKITYKQLHQEVSKTANALKELGIKKGDRVTIYLTMIPELAYTMLACARIGAVHSIIFGGFSPDSIAGRINDCKSDYVVTADEGLRGGKTIPLKSITDEALVNCSNVKKCIVIKKTGNRINWDESRDVWYHDIVKKASPICEPEEMNAEDPLFILYTSGSTGKPKGVLHTTGGYMVYASMTHQYIFNYKPKDIYWCT

SEQ ID NO: 193122 - protein, 237 aa, Unknown
  Bacterial polypetide isolated from the Sargasso Sea
MSRKYSEIYEKSIINRESFWKEVSENIFWYKKPSKILNSDNPPFYKWFEDGITNTCYNALDLHIESGKGEKLAIIYDSPITGTKKKITYNELKEKVSLFAGALKNQGINKGDRVIIYMPMIPEAVVAMLACGRIGAVHSVVFGGFAANELASRIDDSKAKILVTASCGYEPGRTVHYKPLVNKAFELANHKPEKCIIFQRESDKAELNPKIDITWEDAHKGAKPAECEKMNSNDYAY

SEQ ID NO: 193123 - protein, 157 aa, Unknown
  Bacterial polypetide isolated from the Sargasso Sea
FDGKYFTGDGCKRDKDGYYWITGRVDDVIIVSGHNLGTAEIESAFVAHPKVAEAAVVGYPHDIKGNGLYCYVTLNAGESETGDLDRELKLWVRKQIGPLATPDLIHFTPGLPKTRSGKIMRRILRKIAANEHGQLGDTTTLADPSVVDSLVDNRKNI

SEQ ID NO: 193124 - protein, 195 aa, Unknown
  Bacterial polypetide isolated from the Sargasso Sea
MGKNLNEIYRNSIKNPESFWQEISDDIFWFKKPKKILNKSNPPFYKWFEDGVTNTCYNALDIHIDQGRGEKTALIYDSPITGAKAQFTYNQLKDKVSKFAGALVNQNVKKGDRVIIYMPMIPEAVVAMLACGRIGAIHSVVFGGFASNELASRIDDSSAKVLITASCGFEPGRTVEYRPLVDGAIKLAKHKVEKV

SEQ ID NO: 193125 - protein, 166 aa, Unknown
  Bacterial polypetide isolated from the Sargasso Sea
MSGKFNKIYDQSINNPEKFWSDASNDIFWFKKPSKILNKSNPPFFKWFEDGITNTCYNALDIHIDQGNGKRTALIYDSPITGNKSKFSYEELKAKVSKFAGALKDQDVNKGDRVIIYMPMIPEAVIAMLACARIGAIHSVVFGGVASNELASRIDDSKAKILVTAL

SEQ ID NO: 193126 - protein, 190 aa, Unknown
  Bacterial polypetide isolated from the Sargasso Sea
MKIKDEWISNAKINNDEYSSMYKQSIEDGDSFWKKHAGRIDWFKKFTKIKDVKYSSDEVNIKWFEDGELNVSYNCIDRHAKINPNKVAIIWEGDDPNNTKKITYEELKKNVCKTANVLKKIGIKKGDRVTIYLTMIPELAYVMLACARIGAIHSIIFGGFSAESIAGRVQDCESEFVITADEGVRGGKTI

SEQ ID NO: 193127 - protein, 123 aa, Unknown
  Bacterial polypetide isolated from the Sargasso Sea
NLGTAELESAFVAHPKVAEAAVVGYPHDIKGNGLYCYVTLNAGEKPSGELERDLKLWVRKQIGPIATPDLIQFAPSLPKTRSGKIMRRILRKIAAKEHDQLGDTTTLADPTVVESLVQNRQNK

SEQ ID NO: 193128 - protein, 121 aa, Unknown
  Bacterial polypetide isolated from the Sargasso Sea
GTAEVESALVEHKMVAEAAVVGYPHEIKGQGIYAYVTLVLGNEPSEEMETELKKIVRKIIGPIATPDQIQFSPSLPKTRSGKIMRRILRKIAANEHSELGDTSTLAEPAVVENLIENRKNI

SEQ ID NO: 193129 - protein, 136 aa, Unknown
  Bacterial polypetide isolated from the Sargasso Sea
DEGVRGGKIIPLKSIADEALVNCPNVKKCVVVKRTGNRINWDERRDVWYHELTKKVSNKCEPEEMNAEDPLFILYTSGSTGKPKGVMHTTGGYMVYASMTHQYIFNYKPKDIYWCTADIGWVTGHSYIIYGPLSNG

SEQ ID NO: 193130 - protein, 82 aa, Unknown
  Bacterial polypetide isolated from the Sargasso Sea
WWQIVDKFKVNTFYTAPTAIRALMREGNEPVNKTSRKSLKLLGTVGEPLNPEAWMWYYKTVGNSKCPIVDTWWQTETGGILI

SEQ ID NO: 193131 - protein, 304 aa, Unknown
  Bacterial polypetide isolated from the Sargasso Sea
PKLGSNNEIFWRDEGKRIDWIKEYTKIKKIKYSKNEVDIKWYYDGTLNASYNCIDRHAKISPDKPAIIWESDDPNFSKTITYKDLLREVSKASHVLKNLGVKRGDRVTIYLTMIPELAYFMLACSRIGAVHSIIFGGFSSESIKNRIIDCKSEFIITADEGIRGAKTIPLKQITDQAIKDISIKKCIVVKRTNAKIEMNKSRDVYVDDVVKESDNYFEPVEMNAEDPLFILYTSGSTGKPKGVLHTTGGYLVYASMTHEYIFNYNKDDIYWCTADIGWITGHSYIVYGPLANGATTLMFEGVPN

SEQ ID NO: 193132 - protein, 289 aa, Unknown
  Bacterial polypetide isolated from the Sargasso Sea
KFQKSYDNSISNPNDFWATQAMEFLTWQKTWSHVSRCNMARGEIEWFLDGKLNASENCIDRHLTDKANQTAIIWEGDEPGDSRKISYRDLFEEVCKLANGLKSLGVKKGDRVCIYMPMIPEAAFAMLSCARIGAIHSVVFGGFSPQALEDRILDADCNFVITANEGVRGGKIIPLKQNVDKALENCPKVQSVIVSKRTENDVNWVSGRDFWYQEVTEAQMPSCPPEIMDSEDPLFILYTSGSTGKPKGVQHSTAGYLLHAAITHKYVFDYHDGDIYWCTADVGWITGHS

SEQ ID NO: 193133 - protein, 317 aa, Unknown
  Bacterial polypetide isolated from the Sargasso Sea
MSKFDIKNFVNPHITTLEDFNSQYKESIQNPSSFFLKKAISYLSWFQEPTIGHNESFEEPKWFEDGTLNISYNCIDRHAKKNPEKIAIIWQGDQESNSKKISYQELLEEVSKLANGLKSLGVKKGDRVCIYMPMIPEAAYSMFACMRIGAIHSVVFGGFSPEAISSRILDADCEYVITADEGIRGGKTIPLKFSVEKALEKCPKIKKVIVFQYTKTDVNWNNKLDITYEELVTNQPIECECAELKAEDPSFILYTSGSTGKPKGVLHTTGGYLLGANLSFKYIFGIRDDDIHWCTADVGWINRHTYILYGPLSNGIT

SEQ ID NO: 193134 - protein, 290 aa, Unknown
  Bacterial polypetide isolated from the Sargasso Sea
YTSGSTGKPKGVLHTTGGYMVYASMTHQYIFNYKPKDIYWCTADIGWVTGHSYIIYGPLANGATTIMFEGIPTYPDTSRWWQIVDKYKVNIFYTAPTAIRALMREGDKPVKKTSRKTLKLLGTVGEPINPEAWEWYYKTVGDSRCPIVDTWWQTETGGILISPQTGAIDLKPGSATKPFYGIKPEILDKDGKVLKGEAQGRLCISQSWPGQMRSVYGDHQRFIDTYFSQFDGKYFTGDGCRRDKDGYYWITGRVDDVIIVSGHNLGTAEIESAFVAHPKVAEAAVVGYPP

SEQ ID NO: 193135 - protein, 284 aa, Unknown
  Bacterial polypetide isolated from the Sargasso Sea
KVSIFAGALKNLGISKGDRVIIYMPMIPQAVVAMLACGRIGAIHSVVFGGFAANELASRIDDSKAKIIVSASCGYEPGRTVHYKPLLNKAIEIANHKPEKCIIFQREKDKAELDPKRDIDWVEALKGAKLTECEKMNANDYAYILYTSGTTGTPKGIVRDIGGHIVALKWTMKNIYNIDQDDVWWSASDIGWIVGHSYIVYAPLFYGCTTVLFEGKPVGTPDAGAFWKIISEYNVKSLFTAPTAIRAIKKEDPNGKFFKKYDLSKFDTLFLAGERADPDTIKMV

SEQ ID NO: 193136 - protein, 256 aa, Unknown
  Bacterial polypetide isolated from the Sargasso Sea
KTVLKQINMENKYKSIYEQSIKNPELFWESVSKDIFWFKNPTKILNKSNPPFYKWFEDGKTNTCYNALDFHIDQGKGDKTALIYDSPITGNKAKFSYKELKNKVSKFAGALKNQGIKKGDRVIIYMPMIPESVIAMLACGRIGAIHSVVFGGFASNELASRIDDSKAKILITASCGFEPGRTVEYRPLVDGALKLAKHKVEKVIFYQRKGHEVKLNSPLEINWEESLANAKDVDCVEMGSNEYAYILYTSGTTRSS

SEQ ID NO: 193137 - protein, 286 aa, Unknown
  Bacterial polypetide isolated from the Sargasso Sea
KVQKKITYKQLHHEVSKTANGLKELGIKKGDRVTIYLTMIPELAYTMLACARIGAVHSIIFGGFSPDSISGRINDCKSDYVITADEGLRGGKTIPLKSITDEALVNCPNVKKCIVVKRTGNRINWDETRDVWYHEMIKKVSSNCEPEEMNAEDPLFILYTSGSTGKPKGVLHTTGGYMVYASMTHQYIFNYKPKDIYWCTADIGWITGHSYIIYGPLANGATTIMFEGIPTFPDTSRWWQIVDKYKVNIFYTAPTAIRALMREGDGPVKKTSRKSLKLLGTVGEPY

SEQ ID NO: 193138 - protein, 282 aa, Unknown
  Bacterial polypetide isolated from the Sargasso Sea
MIAAGDKYLESSSRESLKVLGTVGEPINPEVWEWYYDKVGNSKCEVVDTWWQTETGSVLITPIAGITPKKPGSATLPFLGVIPSIVNSEGEQLEGKSKGNLCIDVSWPSQIRTVYGDHDRMISTYFSQYANRYFTGDGASRDEDGYYWVTGRVDDVLNVSGHRIGTAEVESALVRHNAVAEAAVVGIEHEIKGQAIYAFVILKETTKNHNELIAEMIGTVSSEIGKIAKPETIQITRDLPKTRSGKIMRRILRKIANDDVENLGDTTTLADPSVVEDLIKNK

SEQ ID NO: 193139 - protein, 243 aa, Unknown
  Bacterial polypetide isolated from the Sargasso Sea
MQKKFQEIYENSIKNPEKFWQKASEDIFWFKKPTKILNKSNPPFYKWFEDGVTNTCYNALDIHIDQGRGQKTALIYDSPITGNKSQFTYEELRSKVSKFAGALKAQGANKGDRVIIYMPMIPEAVVAMLACARIGAIHSVVFGGFASNELASRIDDSKAKILVTASCGFEPGRTVEYKPLVDEAIKIANHKIEKMILFQRPGHEVKLNAPNEVSWEEVVSNAKDADCVEMNSNEFAYILYTSG

SEQ ID NO: 193140 - protein, 236 aa, Unknown
  Bacterial polypetide isolated from the Sargasso Sea
MKEKVSLFAGALKNQGINKGDRIIIYMPMIPEAVIAMLACGRIGAVHSVVFGGFAANELASRIDDSKAKLIISASCGYEPGRTVHYKPLINKALELSKHKPNKCIIFQREKDKAELNPKIDIDWNESIKGAKPTECEKMNSNDYAYILYTSGTTGLPKGIVRDIGGHIVALKWTMKNIYNIDQDDVWWSASDIGWIVGHSYIVYAPLFYGCTTILFEGKPVGTPDAGVFWRVISEH

SEQ ID NO: 193141 - protein, 188 aa, Unknown
  Bacterial polypetide isolated from the Sargasso Sea
EGNLCIADSWPGQMRTVYGDHKRFIETYFSQYDGYYFTGDGCKRDEDGYYWITGRVDDVINVSGHRMGTAEVESALVSHEKVSEAAVVGFPHEIKGQGIYAYVTLNAGENGNEEIRKELIKWVRKEIGPIASPDLIQFAPNLPKTRSGKIMRRILRKIAENDYSELGDTSTLAEPMVVDELIENRQNK

SEQ ID NO: 193142 - protein, 281 aa, Unknown
  Bacterial polypetide isolated from the Sargasso Sea
TLMYEGVPRPSNLGAFWEIIQKYKVSIFYTAPTAIRAFMKSGREIPDKYNLESLRLLGTVGEPINPEAWMWYKDVIGKNKCPIVDTWWQTETGGVMISPLPGVVATKPGSATFPLPGIEVEIVDKNGDKVKENEGGYLIVKKPWPGMMRTIHGNSERYLESYWEYISFKGEKNVYFAGDGARIDEDGYIWIMGRVDDVISVSGHRLGTMEIESALVSHKSVAESAVVGKKDDLKGEVIVAFVSLEKDVNSSAELVENLKKHVVNEIGIIAKPEKIIISDSL

SEQ ID NO: 193143 - protein, 140 aa, Unknown
  Bacterial polypetide isolated from the Sargasso Sea
YYWVTGRVDDVLNVSGHRIGTAEVESAIVNHVDVAEAAVVGIEHDIKGQAIFAYVILRENNKDKKTINNEILEEVSKIIGKFAKPEVIQFTRDLPKTRSGKIMRRILRKIANNEFENLGDTTTLADPSIVEDLIKNKHER

SEQ ID NO: 193144 - protein, 249 aa, Unknown
  Bacterial polypetide isolated from the Sargasso Sea
QVVGDSSCPIVDTWWQTETGAMMITPVAGFTSMKPGSATKPFLGIEPALLDESGKEIIGEGSGNLVIKSSWPSQIRTVYGDHQRCIDTYYSMYPGYYTTGDGARRDSDGYYWITGRVDDVLNVSGHRLGTAEVESALVLHKDVAEAAVVGYEHEIKGQGIYCYVTLMSGILPEEDLKSDLVKLVAKEIGPIAKPDIIQWAPGLPKTRSGKIMRRILRKIATNEIDNLGDTTTLADPSVVDELIANRENK

SEQ ID NO: 193145 - protein, 266 aa, Unknown
  Bacterial polypetide isolated from the Sargasso Sea
RNYLGLKNISKIKDVKYSKDEVKIKWFYDGTLNASANCIDRHLKKNPSKTAIIWVGDDPADTKKISYRELHQNVCKAANGLKSLGVQKGDRVTIYLTMIPELAYVMLACARIGAVHSIIFGGFSPDSIATRITDCESEYLITADEGVRGGKIIPLKKIADEALDQCPNVKKCVVVERTGNQVNWNNERDVSYKKLISSAPSKCDPEEMGAEDPLFILYTSGSTGKPKGVLHTTGGYMVYASMTHQYIFDYKPNDIYWCTADIGWVT

SEQ ID NO: 193146 - protein, 307 aa, Unknown
  Bacterial polypetide isolated from the Sargasso Sea
GRGDKIALIYDSPITGNKKQFTYNLLKEKVSKFACALKNQGINKGDRVIIYMPMIPEAVIAMLACGRIGAIHSVVFGGFASNELASRIDDSKAKLLVTASCGFEPGRTVEYKPLVDEALRLASHKLEKIILYQRSGHEVKLNAPKEISWEESLVNAQTTDCVEMNANDYAYILYTSGTTGIPKGIVRDIGGHIVALKWTMKNIYNIDSDDIWWSASDIGWIVGHSYIVYAPLFKGCTTVLFEGKPVGTPDAGAFWKIISDYKVKSLFTAPTAFRAIKKEDPEGKFFSKYNLSSFESLFLAGERADPD

SEQ ID NO: 193147 - protein, 275 aa, Unknown
  Bacterial polypetide isolated from the Sargasso Sea
RFFGKKKVKGSLVIKPYTKVKDFKYSKEDVHIKWYYDGTLNASANCIDRHLKRNKDKTAIIWVGDDPKVQKKISYKQLHQEVSKAANALRELGVKKGDRVTIYLTMIPELAYTMLACARIGAIHSIIFGGFSPDSISGRINDCESDYVVTADEGLRGGKTIPLKSITDEALVNCPNVKKCIVIKRTGNRINWDENRDVWYHEITKKASSNCEPEEMNAEDPLFILYTSGSTGKPKGVLHTTGGYMVYASMTHQYIFNYKPKDIYWCTADIGWVTG

SEQ ID NO: 193148 - protein, 323 aa, Unknown
  Bacterial polypetide isolated from the Sargasso Sea
MYEGVPRPSNLGAFWEIVQKYKVSIFYTAPTAIRAFMKSGREIPDKYNLESLRLLGTVGEPINPEAWMWYKDVIGKDKCPIVDTWWQTETGGVMISPLPGVVATKPGSATFPLPGIEVEIVDKNGDKVKENEGGYLIIKKPWPGMMRTIHGNSERYLESYWEYISFKGEKNVYFAGDGARIDEDGYIWIMGRVDDVISVSGHRLGTMEIESALVSHKSVAESAVVGKKDDLKGEVIVAFVSLEKDVSGSPELVEDLKKHVVNEIGIIAKPKKIIISDSLPKTRSGKIMRRILRSLAAGEKISGDISTLEDSSVFGKAERIILI

SEQ ID NO: 193149 - protein, 106 aa, Unknown
  Bacterial polypetide isolated from the Sargasso Sea
AEAAVVGYPHDIKGNGLYCYVTLNAGEIETGDLERELKLWVRKQIGPLATPDLIHFTPGLPKTRSGKIMRRILRKIAANEHDQLGDTTTLADPSVVDSLVENRKNT

SEQ ID NO: 193150 - protein, 107 aa, Unknown
  Bacterial polypetide isolated from the Sargasso Sea
LVAEAAVVGFPHDIKGQGIYAYVPLTRGTEESEELRQELRQWVRKEIGALATPVLIQWATGLPKTRSGKIIRRFLRKIAANEVTNLGDASTLADPAVIEPLIETRLN

SEQ ID NO: 193151 - protein, 200 aa, Unknown
  Bacterial polypetide isolated from the Sargasso Sea
NQDGKIIKGEGKGRLCMASSWPGQMRTVYGDHQRFIDTYFSQFDGKYFTGDGCRRDKDGYYWITGRVDDVIIVSGHNLGTAEIESAFVAHPKVAEAAVVGFPHSIKGNGLYCYVTLNVGEQATGDLERDLKLWVRKQIGPIATPDVIQFAPGLPKTRSGKIMRRILRKIAANEPDNLGDTTTLADPGVVESLIQNRKNRA

SEQ ID NO: 193152 - protein, 171 aa, Unknown
  Bacterial polypetide isolated from the Sargasso Sea
MNQNYKEIYDKSIKNREKFWREISNNIFWYKKPTKILNSDNPPFYKWFEDGVTNTCYNALDLHIEEGRGDKLALIYDSPITGVKKNITYKELRNRVALFAGVLKNQGINKGDRVIIYMPMIPEAVIAILACGRIGAVHSVVFGGFAANELASRIDDSKAKLLVTASCGYEP

SEQ ID NO: 193153 - protein, 322 aa, Unknown
  Bacterial polypetide isolated from the Sargasso Sea
IYLCTADIGWVTGHSYIIYGPLSNGATTIMFEGIPNYPDSSRWWQIVDKYKVNIFYTAPTAIRALMREGDKPVKKTSRKTLKLLGTVGEPINPEAWMWYYKTVGDSRCPIVDTWWQTETGGILIAPQPGAIDLKPGSATKPFYGIKPVLVDKDGKTVKGEGKGRLCMATSWPGQMRTVYGDHQRFIDTYFSQFDGKYFTGDGCRRDKDGYYWITGRVDDVIIVSGHNLGTAEIESAFVAHPKVAEAAVVGFPHSIKGNGLYCYVTLNAGENPTGDLERDLKLWVRKQIGPIATPDVIQFSPGLPKTRSGKIMRRILRKIAAN

SEQ ID NO: 193154 - protein, 286 aa, Unknown
  Bacterial polypetide isolated from the Sargasso Sea
KVNIFYTAPTAIRALMAQGEEPVKKTSRKSLKLLGTVGEPINPEAWEWYYKTVGDNKCPIVDTWWQTETGGILISPQTGAIDLKPGSATKPFYGIKPVIVDQSGKEIKGEGQGRLCMAQSWPGQMRTVYGDHQRFIDTYFSQFDGKYFTGDGCRRDKDGYYWITGRVDDVIIVSGHNLGTAEIESAFVAHPKVAEAAVVGYPHQIKGNALYCYVTVNNGVQADGDLERELKNHIAKTLGPFYRPELIQFSTGLPKTRSGKIMRRILRKIASNEHDQNRRYYNVSGS

SEQ ID NO: 193155 - protein, 209 aa, Unknown
  Bacterial polypetide isolated from the Sargasso Sea
VNIKWFYDGTLNASANCIDRHLKKNKDKTAIIWVGDDPKVQKKISYKQLHQEVSKTANGLKEIGVKKGDRVTIYLTMIPELAYTMLACARIGAVHSIIFGGFSADSITGRINDCKSDYVITADEGVRGGKIIHLKATVDEALLNCPNVKKCVVVKRTGNRINWDESRDVWYHDITKKASKNCEPEEMNAEDPLFILYTSGSTGKPKGVL

SEQ ID NO: 193156 - protein, 304 aa, Unknown
  Bacterial polypetide isolated from the Sargasso Sea
DRVIIYMPMIPEAVIAMLACGRIGAIHSVVFGGFASNELASRIDDSKSKLLVTASCGFEPGRTVEYKPLVDEALKLASHKLEKIILYQREGHQVKLNAPKEISWEESLANAQDADCVEMNSNEFAYILYTSGTTGIPKGIVRDIGGHIVALKWTMKNIYNIDKDDIWWSASDIGWIVGHSYIVYAPLFKGCTTVLFEGKPVGTPDAGAFWKIISDYKVKSLFTAPTAFRAIKKEDPKGKFFSKYDLSSFESLFLAGERADPDTIKWAETLLKVPVIDHWWQTETSWAISSNCTGIEMQKTKYGS

SEQ ID NO: 193157 - protein, 288 aa, Unknown
  Bacterial polypetide isolated from the Sargasso Sea
LTGHTYILYGPLSNGATTLMFEGIPTYPDPSRFWEICDKHEISIFYTAPTALRALMAQGDEHVLKTKRESLRILGTVGEPINPEAWEWYFKVVGNESCQIIDTWWQTETGSVLISPIAGVTPVKPGSATLPFFGVKPELVDENGVILEGEQSGNLIITQSWPSQIRSVYGDHQRMMDTYFSTYKNAYFTGDGARRDSDGYFWITGRVDDVLNVSGHRLGTAEIESALVLHEKVAEAAIVGFEHPIKGQGIYAFVTLMVGEKEDEVLVAELQNFVAKEISPIAKPDLIQ

SEQ ID NO: 193158 - protein, 277 aa, Unknown
  Bacterial polypetide isolated from the Sargasso Sea
YFRWFFPDSIATRITDCESEYLITADEGVRGGKIIPLKKIADEALDQCPNVKKCVVVERTGNQVNWNDERDVSYKKLISSVPTKCDPEEMSAEDPLFILYTSGSTGKPKGVLHTTGGYMVYASMTHQYIFDYKPNDIYWCTADIGWVTGHSYIIYGPLANGATTIMFEGVPNYPDNSRWWQIVDKYKVNIFYTAPTAIRALMREGDGPVKKTSRKSLKLLGTVGEPINPEAWMWYYKTVGDSRCPIVDTWWQTETGGILIAPQPGAIDLKPGSATKP

SEQ ID NO: 193159 - protein, 229 aa, Unknown
  Bacterial polypetide isolated from the Sargasso Sea
ALIYDSPITGNKKKFSYKELTEKVSKFAGALQNQGVKKGDRVIIYMPMIPEAVIGMLACGRIGAIHSVVFGGFASNELASRIDDSKAKVLLTASCGFEPGRTVQYKPLVDEALKLASHKIEKIILFQRLDNEVELNSPNEISWDEALSNAKNVDCVEMNANEFAYILYTSGTTGIPKGIVRDIGGHIAALKWTMKNIYNIDQDDVWWSASDIGWIVGHSYIVYAPLFKG

SEQ ID NO: 193160 - protein, 307 aa, Unknown
  Bacterial polypetide isolated from the Sargasso Sea
LYQKVNNFSFALKSIGIKKGSRVIIYMPTIPESIVAMLSCARLGLIHSVVFAGFSSESLKNRINDCEAELIITVDSFQRNGKTIMSKETVDNALKQDCPSIKKVIVFKNSDKEVSFDPNIDLWWHDILPNSDQVVLPEIMSSEDILFILYTSGSTGKPKGIIHSSAGYLLNCILTNKWVFDLKKDDIFWCTADIGWITGHSYVVYGPLATGSTILIYDGAPTYPKQDRFWEIISQNKVTIFYTAPTAIRTLMKLGENKPDDHDLSSLRLLGTVGEPINPKAWIWYQKKIGKENCPIVDTWWQTETGA

SEQ ID NO: 193161 - protein, 121 aa, Unknown
  Bacterial polypetide isolated from the Sargasso Sea
IYDSPITGNKKKFTYKELKEKVSKFAGALKNQGINKGDRVIIYMPMIPEAVVAMLACGRIGAIHSVVFGGFASNELASRIDDSKAKLLVTASCGFEPGRTVEYKPLVDDAIKLASHKLERM

SEQ ID NO: 193162 - protein, 325 aa, Unknown
  Bacterial polypetide isolated from the Sargasso Sea
IYGPLSNGATTIMFEGIPNYPDSSRWWQIVDKYKVNTFYTAPTAIRALMREGDTPVKKTSRKSLKLLGTVGEPINPEAWMWYYKVVGNSKCPIVDTWWQTETGGIMISPQTGAIPLKPGSATKPFYGIKPVLVDKNGKEIKGAGEGRLCINQSWPGQMRTVYGDHQRFIDTYFSQFDGKYFTGDGCRRDKDGYYWITGRVDDVIIVSGHNLGTAEIESAFVAHPKVAEAAVVGYPHDLKGNALYVYVTLNLGEKENGDLERELKNHVARTLGPIYRPDIIHFTPGLPKTRSGKIMRRILRKIAANEHGQLGDTTTLADPSVVDSL

SEQ ID NO: 193163 - protein, 288 aa, Unknown
  Bacterial polypetide isolated from the Sargasso Sea
MAKRSKKKKRKSKSRKKKSFKRKKKKILRKKNKKISTKKKGSKQTEDSDGNIVFKVPPSWEKRAYVNQSQYSKKYKLSLKDNEGFWAKEGKRITWMKPYTKIKDVRYSKEDVSIKWYYDGTLNASANCIDRHLDKKGNKTAIIWVGDDPSDSKKISYKELHKNVCKAANGLKSIGIQKGDRVTIYLTMIPELAYTMLACARIGAVHSIIFGGFSPDSIATRINDCESDYVITADEGVRGGKIIPLKKIADEAMMQCPNVKKCVVVKRTGNVVDWNGDRDISYDDITKD

SEQ ID NO: 193164 - protein, 259 aa, Unknown
  Bacterial polypetide isolated from the Sargasso Sea
LLNSEKFHIGLGNNDSSVRESAKKDYISFWNECAKSLSWFEPWTETLQWNPPFARWFTGGKINASYNALDVHQDSKSEKSAILWEGEDGTDRKITYKEMFTQVQKLANVLKSLGVKKGDRVTIYLPMIPELPISMLACARIGAVHTVVFSGFSATSLSDRVEDSQSKVIITADGGYRKGKIINLKEIVDESASSVQFVKSVIVYQRTGQNIQMNEKDLLWSDVMCSASPECDAEVLDSTDSLYILYTSGTTGKPKGVLH

SEQ ID NO: 193165 - protein, 197 aa, Unknown
  Bacterial polypetide isolated from the Sargasso Sea
GGKPIPLKKNTDDAINISGGVRHCIVVKRTGGAIDWHDDRDVWYHELLSDASDDCPPEEMSAEDPLFILYTSGSTGKPKGVMHTTGGYMVYASMTHQYVFDYKPGDVYWCTADVGWVTGHSYIVYGPLANGAVTVMFEGVPNYPSASRFWEVVDKHKVNIFYTAPTAIRALMREGEGPVTKTSRSSLKLLGTVGEPI

SEQ ID NO: 193166 - protein, 188 aa, Unknown
  Bacterial polypetide isolated from the Sargasso Sea
MTQEIYNPNPGFSNPHIKDFDEYLSLYKESIDNPEKFFGDLAKENISWIEDFKEVHNSEFQETKWFVGGKTNITLNCIDRHLEKNGDKIALIWEGDEPGNSKEITFKELHSEVCRFANILKTLQIKKGSRVCIYMPMIPEAAFAMFACARIGAIHSVVFGGFSPESLKDRILDADCRIVITADEGVRG

SEQ ID NO: 193167 - protein, 232 aa, Unknown
  Bacterial polypetide isolated from the Sargasso Sea
TGGVMISPLPGVVATKPGSATFPLPGIEIEIVDKNGDKVKENEGGYLIIKKPWPGMMRTIHGNSERYLESYWEYISFKGEKNVYFAGDGARKDEDGYIWIMGRVDDVISVSGHRLGTMEIESALVSHKSVAESAVVGKKDDLKGEVIVAFVSLEKDVNSSSELVEELKKHVVSEIGIIAKPEKIIISDSLPKTRSGKIMRRILRSLAAGEEISGDISTLEDSSVLEKLKEKS

SEQ ID NO: 193168 - protein, 240 aa, Unknown
  Bacterial polypetide isolated from the Sargasso Sea
DRHLKKNKDKTAIIWVGDDPKVQKKISYKQLHQEVSKAANGLKEIGVKKGDRVTIYLTMIPELAYTMLACARIGAIHSIIFGGFSPDSIAGRINDCKSDYVITADEGLRGGKTIHLKSITDEALLNCPNVKKCIVVKRTGNRINWDESRDVWYHEITKKVSSNCEPEEMNAEDPLFILYTSGSTGKPKGVLHTTGGYMVYASMTHQYIFNYKSKDIYWCTADIGWITGHSYIIYGPLSNG

SEQ ID NO: 193169 - protein, 309 aa, Unknown
  Bacterial polypetide isolated from the Sargasso Sea
KPEWVKRSLANKAQYQKIYSDSIKNNNSFWKKEGKRITWIKPYKKIKDVKYSKDEVRIKWFEDGTLNASANCIDRHLKDKKDKTAIIWVGDDPKDTQKISYKQLHQKVSKAANGLKKLGIQKGDRVTIYLTMIPELAILMLACARIGAVHSIIFGGFSAESISGRVNDCKSEYIITADEGVRGGKTIPLKATTDEALSNCPDVKKCIVVKRTGNYVYWDQDRDVWYHDLIKDVPNHCEPEEMSAEDPLFILYTSGSTGKPKGVLHTTGGYMVYASMTHQYIFNYKPNDIYWCTADIGWVTGHSYIIYGP

SEQ ID NO: 193170 - protein, 172 aa, Unknown
  Bacterial polypetide isolated from the Sargasso Sea
YGDHKRFIDTYFSQLMGKYFTGDGCRRDKDGYYWITGRVDDVIIVSGHNLGTAEIESAFVAHPKVAEAAVVGYPHDIKGNGLYCYVTLNAGEQPDGDLERELKLWVRRQIGPIAKPDLIQFAPGLPKTRSGKIMRRILRKIAANEHNELGDTTTLADPSVVESLVENRQNKD

SEQ ID NO: 193171 - protein, 305 aa, Unknown
  Bacterial polypetide isolated from the Sargasso Sea
VTIYLTMVPELAYTMLACARIGAVHSIIFGGFSPDSIAGRINDCKSDYIVTADEGLRGGKTISLKSITDEALIHCPNVKKCIVVKRTGNRINWDESRDVWYDDMIKGVPSQCEPEEMGAEDPLFILYTSGSTGKPKGVLHTTGGYMVYTSMTHQYIFNYKPKDIYWCTADIGWITGHSYIIYGPLSNGATTIMFEGIPTYPDSSRWWQIVDKFKVNIFYTAPTAIRALMAQGEGPVKKTSRKTLKLLGTVGEPINPEAWEWYYKTVGESKCPIVDTWWQTETGGILIAPPTGAIDLKPGSATKTF

SEQ ID NO: 193172 - protein, 166 aa, Unknown
  Bacterial polypetide isolated from the Sargasso Sea
MKKEFSYPVPIDISREASIDQEKYEAMYRDSLEDPKKFWGEQGKKFISWITPWEVIHENEFNNGKTEWFIGGKLNVSFNCVDRHLEERGNSVAIVWEGDEPGDSRNITYRELHKEVCKLANALKTNGIKKGDRVCIYMPMIPEAAFAMLACARIGAIHSVVFGGFS

SEQ ID NO: 193173 - protein, 221 aa, Unknown
  Bacterial polypetide isolated from the Sargasso Sea
MHQCKSGRKNMSYQKEYRESIENPEAFWSRQAELITWYEKPKSILSQDEKGFYHWFKGGKLNTSYLALDFHVENGRAEQAALIYDSPVTETVRSYTYRELLDEVARFAGVLQNQGVEKGDRVIIYMPMIPEAVVAMLACARLGAIHSVVFGGFAPNELSIRIDDAKPKALVTASCGIEFTNIIEYKPLVDEALRISSHALETVILLQRSQAKASMQAGRDF

SEQ ID NO: 193174 - protein, 274 aa, Unknown
  Bacterial polypetide isolated from the Sargasso Sea
KCVPEEMNAEDPLFILYTSGSTGKPKGVLHTTGGYMVYASMTHQYIFDYKNKDIYWCTADIGWVTGHSYIIYGPLSNGATTIMFEGIPNYPDSSRWWQIVDKYKVNIFYTAPTAIRALMREGEGPVKKTSRKSLKLLGTVGEPINPEAWMWYYKTVGEKKCPIVDTWWQTETGGILISPQPGAINLKPGSATKPFYGIKPVIVDEAGKTLKGACKGRLCMAQSWPGQMRTVYGDHQRFIDTYFSQFDGKYFTGDGCRRDKDGYYWITGRVDDVI

SEQ ID NO: 193175 - protein, 295 aa, Unknown
  Bacterial polypetide isolated from the Sargasso Sea
KQVLGGESNLSGKYEKVYDSSIKDRENFWKKISDDIFWYKKPSKILNSSKSPFYKWFEDGVTNTCYNALDFHIDKGRGDKTAIIYDSPITGAKSKFSYKELRDKASVFAGALKNQGINKGDRIIIYMPMIPEAVIAMLACGRIGAVHSVVFGGFAANELASRIDDSKAKIIVSASCGYEPGRTVHYKPLLNKAIEIAKHKPNKCIIFQREKNKAELNPKTDITWEEVLKGAKPTECEKMNANDYAYILYTSGTTGLPKGIVRDIGGHIVALKWTMKNIYKIDPDDVWWSASEYRL

SEQ ID NO: 193176 - protein, 198 aa, Unknown
  Bacterial polypetide isolated from the Sargasso Sea
MTKETIYEPSEEIINNAVISNEEFEELYKESINNPDQFWNQQARNYLSWDKEWDVVKECDLAKSEINWFKGAKLNASVNCVDRHLENNGEKIAIIWEGDDPQDSLKITYKQLHESVCRFANALKKRGISKGDRVCIYMPMIPEAAYAMLACARIGAIHSVVFGGFSPESLKDRILDSNCESVITADEGLRGSKKIPLK

SEQ ID NO: 193177 - protein, 265 aa, Unknown
  Bacterial polypetide isolated from the Sargasso Sea
LFILYTSGSTGKPKGVLHTTGGYLTYVSLTHELIFDYHPDDIYWCTADLGWITGHSYIIYGPLSNRATTLMFEGVPNYPDFGRFWDVVDKHKVNQFYTAPTALRALMKEGDDWVKSKDLSSLKLLGTVGEPIKEPEWKWYFNIVGNGNCPIVDTWWQTETGGILISPLPGATPTKPGSATLPFFSVQPILLSEEGKEIDGNDVSGLLALKTSWPGQMRTIYGDHERFIEVYFSQFPGYYFTGDGAKRDKDGYYWITGRVDDVFNV

SEQ ID NO: 193178 - protein, 261 aa, Unknown
  Bacterial polypetide isolated from the Sargasso Sea
YWCTADCGWITGHSYIVYGIMPNRVPTLMYEGAPNAPAEDRFWDICARHSVTHFYTAPTAIRAFMKWGDDHPNRHDLSSLQVLGTVGEPINPEAWMWYHRVIGNERCPIVDTWWQTETGGHMITPLPCATPTVPGSCTLPAIGVDAAIVDQDGQEVPHGTGGLLAIRKPWPGMLRGIYGDRERFIDTYWSRLPGLYFAGDGARRDERGYFWIMGRVDDVINVSGHRMGTMEVESALVSHPAVVEAAVVGMPHEIKGTGIAA

SEQ ID NO: 193179 - protein, 252 aa, Unknown
  Bacterial polypetide isolated from the Sargasso Sea
MNAEDPLFILYTSGSTGKPKGVLHTTGGYMVYASMTHQYIFNYKPKDIYWCTADIGWVTGHSYIVYGPLSNGATTIMFEGIPNYPDSSRWWQIVDKYKVNTFYTAPTAIRALMREGDKPVKKTSRKSLKLLGTVGEPINPEAWMWYYKTVGNSECPIVDTWWQTETGGIMIAPQTGAIPLKPGSATKPFYGIKPVLVDKNGKEIKGAGEGRLCIAQSWPGQMRTVYGDHQRFIDTYFSQFNGKYFTGDGCRR

SEQ ID NO: 193180 - protein, 250 aa, Unknown
  Bacterial polypetide isolated from the Sargasso Sea
MREGDKPVKKTSRKSLKLLGTVGEPINPEAWEWYYKTVGDSNCPIVDTWWQTETGGILISPQTGAINLKPGSATKPFYGIRPVIVNKEGKVLKGEAEGRLCIAQSWPGQMRTVYGDHQRFIDTYFSQFDGKYFTGDGCRRDKDGYYWITGRVDDVIIVSGHNLGTAEIESAFVAHPKVAEAAVVGYPHDIKGNGLYCYVTLNMGEKSTLDLERDLKLWVRKQIGPIATPDLIQFSPGLPKTRSGKIMRRI

SEQ ID NO: 193181 - protein, 176 aa, Unknown
  Bacterial polypetide isolated from the Sargasso Sea
MSSDFKQIYEASIKKPEEFWQNVSEDVFWFKKPTKILNKDKPPFYKWFCDGVTNTCYNALDIHIDQGRGERIALIYDSPITGNKKKFTYNDLKGKVSRFAGALKKQGVKKGDRVIIYMPMIPEAVIAMLACGRIGAIHSVVFGGFASNELASRIDDSKSKILVTASCGFEPGRTVE

SEQ ID NO: 193182 - protein, 239 aa, Unknown
  Bacterial polypetide isolated from the Sargasso Sea
MSAEDPLFILYTSGSTGKPKGVQHSNGGYIVYASLTHEYIFDYHQEDIYWCTADVGWITGHSYIVYGPLSNGATTLMFEGVPTYPDCSRFWQVCEKHNVNQFYTAPTAIRALMGQGDDFVNNCDLSSLRILGTVGEPINPEAWEWYNKVVGKGKCPIVDTWWQTETGGILITPLPGATATKPGSATTPFFGIKPVIIDPKTGQELIGNNVEGVLAFKDSWPSQMRTVYGDHDRFIKTYF

SEQ ID NO: 193183 - protein, 201 aa, Unknown
  Bacterial polypetide isolated from the Sargasso Sea
MSGEFDSTYTRALTDRVSFWGEAADGIHWDRKWDVVLDDSNPPFYRWFSGGILNTCYNALDRHVEAGRAEQCAIIYDSPMTEQVVKFTYRELRDRVALFAGVLASEGVTKGDRVVIYMPMIPEAVIAMLACARLGAVHSVVFGGFASNELAIRIDDAKPKIVVSASCGLEPGRIVEYKPLLDRALSSASHQPDRSIILQRE

SEQ ID NO: 193184 - protein, 518 aa, Unknown
  Bacterial polypetide isolated from the Sargasso Sea
MSSDFRQIYDNSIKKPEDFWKEVSEDIFWFRKPTQILNKENPPFYKWFCDGVTNTCYNALDIHIDQGRGDKTALIYDSPITGNKKKFTYNELKSKVSKFAGVLKNQGVVKGDRVIIYMPMIPESVIAMLACGRIGAIHSVVFGGFASNELASRIDDSKAKLLVTASCGFEPGRTVEYKPLVDEALKLASHKIEKMILYQRSGHEVKLNPKNEVNWEEALVNAKETDCVEMNSNDFAYILYTSGTTGIPKGIVRDIGGHIVALKWTMKNIYNIDADDIWWSASDIGWIVGHSYIVYAPLFKGCTTVLFEGKPVGTPDAGAFWKIIADYKVKSLFTAPTAFRAIKKEDPDGKFFSKYDLSSFESLFLAGERADPDTIKWAEKLLKVPVIDHWWQTETSWAISSNCTGIEMQKTKYGSACRAVPGYDVKILKSDNSIAKPNEMGDIVVKLPLPPGTFPTLWNADERYQKTYMSNYEGYYQTYDAGHIDEDGYIWIMSRTDDIINVAGHRLSTGAIEEVLSE

SEQ ID NO: 193185 - protein, 535 aa, Unknown
  Bacterial polypetide isolated from the Sargasso Sea
MPKKKKVKQKVISKKPKETIYKTKKEWISKATVNKSQYIKKYNESIKDNDGFWKKEGKRINWIKPYKKIKDVKYSKDDVHIKWFYDGTLNASANCIDRHLKKNANKTAIIWVGDDPKIQKKITYKELHKEVSKAANGLKNLGVQKGDRVTIYLTMIPELAYTMLACARIGAVHSIIFGGFSPDSISGRINDCESDYVITADEGVRGGKTIPLKSITDEALQSCPNVKKCVVVKRTGTKKIDWYSDRDVWYHKMTSKVSAKCEPEEMNAEDPLFILYTSGSTGKPKGVLHTTGGYMVYASMTHQYIFNYKPKDIYWCTADIGWVTGHSYIIYGPLANGATTIMFEGIPTYPDTSRWWQIVDKYKVNIFYTAPTAIRALMREGDKPVKKTSRKTLKLLGTVGEPINPEAWEWYYKTVGDSRCPIVDTWWQTETGGILISPQTGAIDLKPGSATKPFYGIKPEILDKDGKVLKGEAQGRLCISQSWPGQMRSVYGDHQRFIDTYFSQFDGKYFTGDGCRRDKDGYFWITGRVDDVIIV

SEQ ID NO: 193186 - protein, 364 aa, Unknown
  Bacterial polypetide isolated from the Sargasso Sea
MKEFKLSNPLLSKEQYEEMYAESFSNKEQFWSKVAKSQVTWSKDFTKVKNTNYDGDVSIKWFEDGELNVCYNCVDRHAETRPNEVAIIWEGDDTSKNKTYTYKELKSEVSKFANVLKKLGVGKGDVVTIYLTMIPEVAFAMLACARIGAIHSVIFGGFAPESIAGRIKDCKSQFVITADEGVRGGKIIPLKKYINTALESCDSSIKTLVIRYTNTQDELHKDNNFYYDELIKEVDDQCECVSMNAEDPLFILYTSGSTGKPKGVLHTTGGYLVYASFTHKYSFDYHPGDVYWCTADAGWITGHSYSVYGPLANGGKTLLFEGVPNYPDFSRFWEVCDKYKVNIFYTAPTVLRSLMKEGNSYIGK

SEQ ID NO: 193187 - protein, 194 aa, Unknown
  Bacterial polypetide isolated from the Sargasso Sea
MKSEFERIYRESIDNPEKFWQEVSNDIFWFKKPSKILNKSNPPFYKWFEDGTTNTCYNALDLHIENGKGGKTALIYDSPITGNKKKFTYLELKDKVSKFAGSLDNLGIKKGDRVIIYMPMIPEAVIAMLACGRIGAVHSVVFGGFASNELASRIDDSKAKLLITASCGFEPGRTVHYRPLVDGALKLAKHKVKK

SEQ ID NO: 193188 - protein, 200 aa, Unknown
  Bacterial polypetide isolated from the Sargasso Sea
YPEIVDAAGTPVEQGEGGWLVMTRPWPGMLRGIWGDEERFVETYWEKVPGKYLAGDNARQDSDGYYWIMGRIDDVLNVAGHRLSTIEIESALVSHPVVAEAAAVGRPHDVKGEAVAVFVTLREEEPSDTLKDTLRKHVRQQIGAIASPDDIHFTNALPKTRSGKIMRRLLRDIAAGREAVGDTTTLEDYSVLAKLRGDQE

SEQ ID NO: 193189 - protein, 591 aa, Unknown
  Bacterial polypetide isolated from the Sargasso Sea
MKNSFNKIYQESIQNPEEFWKNVSDDVFWFKKPSKILNKSNPPFYKWFEDGVTNTCYNAIDVHIDNGNGDKTALIYDSPITNSKAKFTYSELKEKISKFAGALDHQGVKKGDRVIIYMPMIPEAVIAMLACGRIGAIHSVVFGGFASNELASRIDDSKAKILITASCGFEPGRTVEYRPLVDGALKLAKHKVERVILFQRKDHEVKLNSPLEISWEEALINAKNKDCVEIGSNEFAYILYTSGTTGIPKGIVRDVGGHIVALKWTMKNIYNVDENDVWWSASDIGWIVGHSYIVYAPLFKGCTTVLFEGKPVGTPDAGVFWRIISEYKIKSLFTAPTAFRAIKKEDPDGKFFSKYDLSSFESLFLAGERADPDTIKWAENLLNVPVIDHWWQTETSWAISSNCTGIEMQKTKYGSACKAVPGYDVKIIKPDHSIAEPNEMGDIVVKLPLPPGTFPTLWNADKRYEENYMTNYKGYYQTYDAGHIDEDGYIWIMSRTDDIINVAGHRLSTGAIEEVLSEHQSVAECAVLGIADKLKGQLPIGLVVLKSGVEKDNETISKECIKMVRDKIGPVAAFKVVIVIKRLPKTRSGKI

SEQ ID NO: 193190 - protein, 364 aa, Unknown
  Bacterial polypetide isolated from the Sargasso Sea
KKALVNRKQYEKKYNDSVKHNEDFWKKEGKRINWIKPYTKIKDVKYSKTDVNIKWYYDGTLNASANCIDRHLKKNKDKTAIIWVGDDPKVQKKITYKQLHQEVSKTANALKDLGIKKGDRVTIYLTMIPELAYTMLACARIGAIHSIIFGGFSPDSIAGRINDCKSDYVITADEGLRGGKIIPLKSITDEALIHCPNVKKCIVVKRTGNRINWDESRDVWYHEIIKKASAICDPEEMNAEDPLFILYTSGSTGKPKGVLHTTGGYMVYASMTHQYIFNYKPKDIYWCTADIGWITGHSYIIYGPLANGATTIMFEGIPTYPDTSRWWQIVDKYKVNIFYTAPTAIRALMREGDGPVKKTSRKSL

SEQ ID NO: 193191 - protein, 519 aa, Unknown
  Bacterial polypetide isolated from the Sargasso Sea
MAKRSKKRKRKSKSRKKKSFKRKKKKILRKKKKKISSKKKGSKQVEDSDGNIVFKVPPNWERQAYVNQSQYSKKYKLSLKDNEGFWAKEGKRITWMKPYTKIKDVKYSKEDVSIKWYYDGTLNASANCIDRHLEKKGNKTAIIWVGDDPSDSKKISYKELHKNVCKAANGLKSIGIQKGHRVTIYLTMIPELAYTMLACARIGAVHSIIFGGFSPDSIATRINDCESDYVITADEGVRGGKIIPLKKIADEAMMQCPNVKKCVVVKRTGNTVDWNDDRDISYDDIIKDVPDKCVAEEMNAEDPLFILYTSGSTGKPKGVLHTTGGYMVYASMTHQYIFDYKNKDIYWCTADIGWVTGHSYIIYGPLANGATTIMFEGIPNYPDNSRWWQIVDKYKVNIFYTAPTAIRALMREGDGPVKKTSRKSLKLLGTVGEPINPEAWMWYYKTVGEKKCPIVDTWWQTETGGILIAPQPGAINLKPGSATKPFYGIKPAIVDESGKVLKGACKGRLCMTQSWPGQM

SEQ ID NO: 193192 - protein, 411 aa, Unknown
  Bacterial polypetide isolated from the Sargasso Sea
MKNSFNKIYQESIQNPEEFWKNVSDDVFWFKKPNKILNKSNPPFYKWFEDGVTNTCYNAIDVHVDRGNGDKTALIYDSPITNSKAKFTYSELKEKISKFAGALENQGIKKGDRVIIYMPMIPEAVIAMLACGRIGAIHSVVFGGFASNELASRIDDSKAKILITASCGFEPGRTVEYRPLVDGALKLAKHKVERVIFFQRKDHEVKLNSPLEISWEEALANAKNKDCVEIGANDFAYILYTSGTTGIPKGIVRDVGGHIVALKWTMKNIYNVDENDVWWSASDIGWIVGHSYIVYAPLFKGCTTVLFEGKPVGTPDAGVFWRIISEYKIKSLFTAPTAFRAIKKEDPDGKFFSKYDLSSFESLFLAGERADPDTIKWAENLLNVPVIDHWWQTETSWAISSNCTGIEMQKT

SEQ ID NO: 193193 - protein, 285 aa, Unknown
  Bacterial polypetide isolated from the Sargasso Sea
MMREGDELVKRSSRKSIRLLGTVGEPINPEAWLWYYKIVGDSKCPIVDTWWQTETGGILISPQPGAIDLKPGSATKPFYGIKPAIVDESGKELKGACKGRLCMSDSWPGQMRTVYGDHQRFIDTYFSTVDGKYFTGDGCRRDKDGYYWITGRVDDVIIVSGHNLGTAEIESAFVAHKKVAEAAVVGYPHEIKGNGLYCYVTLKAGEEGTEELKSELIQLVRKMIGPVAKPDLIHFTPGLPKTRSGKIMRRILRKVAENDYGNLGDTSTLADPTVVQSLIDNRLNK

SEQ ID NO: 193194 - protein, 500 aa, Unknown
  Bacterial polypetide isolated from the Sargasso Sea
YTMLACARIGAVHSIIFGGFSPDSIATRINDCESDYVITADEGVRGGKIIPLKKIADEAMMQCPNVKKCVVVKRTGNSVDWNDDRDISYDDITKDVSDKCAAEEMNAEDPLFILYTSGSTGKPKGVLHTTGGYMVYASMTHQYIFDYKNKDIYWCTADIGWVTGHSYIIYGPLANGATTIMFEGVPNYPDSSRWWQIVDKYKVNIFYTAPTAIRALMREGDGPVKKTSRKSLKLLGTVGEPINPEAWMWYYKTVGEKKCPIVDTWWQTETGGILISPQPGAINLKPGSATKPFYGIKPAIVDESGKVLKGACKGRLCMTQSWPGQMRTVYGDHKRFIDTYFSQFDGKYFTGDGCRRDKDGYYWITGRVDDVIIVSGHNLGTAEIESAFVAHNKVAEAAVVGFPHEIKGNGLYCYITLNAGENPSGELERELKLWVRRQIGPIATPDYIQFAPGLPKTRSGKIMRRILRKIAANEHHDLGDTTTLADPSVVESLIENRKEK

SEQ ID NO: 193195 - protein, 457 aa, Unknown
  Bacterial polypetide isolated from the Sargasso Sea
KKITYKELHKEVSKAANGLKKLGVQKGDRVTIYLTMIPELAYTMLACARIGAVHSIIFGGFSPDSISGRINDCESDYVITADEGVRGGKTIPLKSITDEALQSCPNVKKCIVVKRTGTKKIDWFNDRDVWYHKMTSKVSTKCEPEEMNAEDPLFILYTSGSTGKPKGVLHTTGGYIVYASMTHQYIFNYKPKDIYWCTADIGWVTGHSYIIYGPLANGATTIMFEGIPTYPDTSRWWQIVDKYKVNIFYTAPTAIRALMREGDKPVKKTSRKTLKLLGTVGEPINPEAWEWYYKTVGDSRCPIVDTWWQTETGGILISPQTGAIDLKPGSATKPFYGIKPEILDKDGKVLKGEAQGRLCISQSWPGQMRSVYGDHQRFIDTYFSQFDGKYFTGDGCRRDRDGYYWITGRVDDVIIVSGHNLGTAEIESAFVAHPKVAEAAVVGYPHDIKGNGLYCYV

SEQ ID NO: 193196 - protein, 270 aa, Unknown
  Bacterial polypetide isolated from the Sargasso Sea
MSQVHIHPVPADYKKQTLMDRETYDRWYSQSINDPGTFWAERAEQLLDWKTPWDTVSEWDFNEGRAAWFKGATLNACYNCVDRHLPERANQTAIIWEGDEPDQDKHISYQQLFEEVSKFGNVLKNRGVKKGDRVVIYMPMIPEAAYAMLACARIGAIHSVVFGGFSPEALKDRILNAEACALITADEGVRGGKTIPLKANADKALDGIDCVHTCLTVKRTGGDVDWQAPRDVWYHEAMADASSDCEPEWVEAEDPLFTLYTSGSTGKPKG

SEQ ID NO: 193197 - protein, 270 aa, Unknown
  Bacterial polypetide isolated from the Sargasso Sea
MNKKIENLLKEERKFPPSKELTENANATSSWYEDADKNRLEFWQKQALTRISWYKEPTEVLDDSNPPFFKWFKDGELNLSYNCLDRHLETDSDRVAFYWEGEPGDTQEITYQDLYERVCKLSNALKQLGVQKGDRVAIYLGMTPEIVVSMLACARIGAVHSVVFGGFSSEALADRINDAKAKTVITADGAWRRGDIVPLKNNVDGSLDLTDYVENVIVVRRTEQEINMADGRDHWYHEITEKQSSECEPEVMNAEDLLYILYTSGTTAKT

SEQ ID NO: 193198 - protein, 308 aa, Unknown
  Bacterial polypetide isolated from the Sargasso Sea
MIPELAYTMLACARIGAIHSIIFGGFSPDSIAGRIDDCESDYVITADEGVRGGKLISLKDITDQALSKCRDIKKCIVVKRTGNYINWNSERDVWYDDMIKNVSTNCEPEEMNAEDPLFILYTSGSTGKPKGVLHTTGGYMVYASMTHQYIFNYKPKDIYWCTADIGWITGHSYIIYGPLSNGATTIMFEGIPTYPDSSRWWQIVDKFKVNIFYTAPTAIRALMREGSAPVKKTSRKSLKLLGTVGEPINPEAWMWYFKTIGNSKCPIVDTWWQTETGGILISPQTGAINLKPGSATKPFYGIKPYYCK

SEQ ID NO: 193199 - protein, 508 aa, Unknown
  Bacterial polypetide isolated from the Sargasso Sea
IWVGDDPKVQKKISYKELHKEVSKAANGLKNLGVQKGDRVTIYLTMIPELAYTMLACARIGAVHSIIFGGFSPDSISGRINDCESDYVITADEGVRGGKTIPLKSITDEALQSCPNVKKCIVVKRTGTKKIDWYNDRDVWYHKITSKVSAKCEPEEMNAEDPLFILYTSGSTGKPKGVLHTTGGYMVYASMTHQYIFNYKPKDIYWCTADIGWVTGHSYIIYGPLANGATTIMFEGIPTYPDTSRWWQIVDKYKVNIFYTAPTAIRALMREGDKPVKKTSRKTLKLLGTVGEPINPEAWEWYYKIVGDSRCPIVDTWWQTETGGILISPQTGAIDLKPGSATKPFYGIKPEILDKDGKVLKGEAQGRLCISQSWPGQMRSVYGDHQRFIDTYFSQFDGKYFTGDGCRRDKDGYYWITGRVDDVIIVSGHNLGTAEIESAFVAHPKVAEAAVVGYPHDIKGNGLYCYVTLNVGEKSTLDLERDLKLWVRKQIGPIATPDLIQLLQDSKN

SEQ ID NO: 193200 - protein, 190 aa, Unknown
  Bacterial polypetide isolated from the Sargasso Sea
EAQGRLCISQSWPGQMRSVYGDHQRFIDTYFSQFDGKYFTGDGCRRDKDGYYWITGRVDDVIIVSGHNLGTAEIESAFVAHPKVAEAAVVGYPHDIKGNGLYCYVTLNAGEKSTLDLERDLKLWVRKQIGPIATPDLIQFAPGLPKTRSGKIMRRILRKIAANEHGQLGDTTTLADPSVVESLVDNRKNI

SEQ ID NO: 193201 - protein, 377 aa, Unknown
  Bacterial polypetide isolated from the Sargasso Sea
REFYILLGGYMVYASITHQYIFNYKPKDIYWCTADIGWITGHSYIIYGPLSNGATTIMFEGIPTYPDNSRWWQIVDKYKVNIFYTAPTAIRALMREGDKPVKKTSRKTLKLLGTVGEPINPEAWQWYYKTVGDSRCPIVDTWWQTETGGILISPQTGAINLKPGSATKPFYGIKPVIVDKEGKILKGEAQGRLCIAQSWPGQMRTVYGDHKRFIDTYFSQFDGKYFTGDGCRRDKDGYYWITGRVDDVIIVSGHNLGTAEIESAFVAHPKVAEAAVVGYPHDIKGNGLYCYVTLNAGENDSLDLERELKLWVRKQIGAIATPDLIQFSPGLPKTRSGKIMRRILRKIAANEHDQLGDTTTLADPGVVRSLVDNRKNI

SEQ ID NO: 193202 - protein, 407 aa, Unknown
  Bacterial polypetide isolated from the Sargasso Sea
FEVTPVSAEHPLFILYTSGSTGKPKGVQHSTGGYLLWALLTMQWTFDLKPDDIFWCTADIGWVTGHSYIAYGPLAAGATQVVFEGVPTYPNAGRFWDMIQRHKVNTFYTAPTAIRSLIKAAEADEKVHPKQYDLSSLRLLGTVGEPINPEAWMWYHTNIGGGRCPIVDTFWQTETGGHMMTPLPGATPLVPGSCTLPLPGIMAAVVDETGHDVPNGQGGILVVKRPWPSMIRTIWGDPERFKKSYFPEELGGKLYLAGDGSIRDKDTGYFTIMGRIDDVLNVSGHRMGTMEIESALVANPIVAEAAVVGRPDDMTGEAICAFVVLKRSRPDGDEAKQIANELRNWVGKEIGPIAKPKDIRFGDNLPKTRSGKIMRRLLRSLAKGEDITQDTSTLENPAILDQLKETR

SEQ ID NO: 193203 - protein, 224 aa, Unknown
  Bacterial polypetide isolated from the Sargasso Sea
PQPGAINLKPGSATKPFYGIKPAIVDENGKVIKGPGKGRLCMLQSWPGQMRTVYGDHERFIKTYFSQFDGKYFTGDGCRRDKDGYYWITGRVDDVIIVSGHNLGTAEIESAFVAHTKVAEAAVVGFPHDIKGNGLYCYVTLNAGENPDGDLERELKLWVRKQIGPIATPDHIQFSPGLPKTRSGKIMRRILRKIAANEHHDLGDTTTLADPSVVDSLVENRKNK

SEQ ID NO: 193204 - protein, 545 aa, Unknown
  Bacterial polypetide isolated from the Sargasso Sea
VHPPFYKWFEDGVTNPCYNALDYHVENGKGDKTALIYDSPITNNKAKFSYKELKEKVSKFAGALDNQGIKKGDRVIIYMPMIPEAIVAMLACGRLGAIHSVVFGGFASNELASRIDDSKAKILITASCGFEPGRTVEYRPLVDGALKLVKHKIEKVIFYQRKGHEVKLNSPLEISWDEALSNSKDIDCIEMSANEFSYILYTSGTTGVPKGIVRDIGGHIVALKWTMKNIYNVDDDDIWWSASDIGWIVGHSYIVYAPLFKGCTTVLFEGKPVGTPDAGVFWRIISDYKVKSLFTAPTAFRAIKKEDPEGKFFTKYDLSSFKSLFLAGERADPDTIKWAENLLKVPVIDHWWQTETSWAISSNCTGIEMQKTKYGSACKAVPGYNVKVLKSDKSIAKPNEMGDIVVKLPLPPGTFPTLWNANERYKKTYMSNYEGYYQTYDAGHIDEDGYIWIMSRTDDIINVAGHRLSTGAIEEVLSEHQSVAECAVLGIADKLKGQLPIGLIVLKTGVKKENETISKECIQMVRDKIGPVAAFKVVIVIKRLP

SEQ ID NO: 193205 - protein, 498 aa, Unknown
  Bacterial polypetide isolated from the Sargasso Sea
MLACARIGAVHSIIFGGFSADSITGRINDCKSDYVITADEGIRGGKIIDLKATVDEALLNCPNVKKCVVVKRTGNRINWDESRDVWYHDIIKKASKNCEPEEMDAEDPLFILYTSGSTGKPKGVMHTTGGYMVYTSMTHQYIFNYKPKDIYWCTADIGWVTGHSYIIYGPLSNGATTIMSEGIPNYPDWSRWWQIVDKYKVNIFYTAPTAIRAMMREGDGPVKKTSRKTLKLLGTVGEPINPEAWQWYYKVVGDSRCPIVDTWWQTETGGILISPQSGAIDLKPGSATKPFYGIKPEIVDKDGKVLKGEAQGRLCISHSWPGQMRTVYGDHNRFIETYFSQFNGKYFTGDGCRRDKDGYYWITGRVDDVIIVSGHNLGTAEIESAFVAHSKVAEAAVVGYPHDIKGNGLYCYVTLNVGEEPNGDLERELKLWVRKQIGAIATPDFIQFAPGLPKTRSGKIMRRILRKIAANEHEQLGDTTTLADPSVVKSLVDNRKNT

SEQ ID NO: 193206 - protein, 150 aa, Unknown
  Bacterial polypetide isolated from the Sargasso Sea
GDGCRRDKDGYYWITGRVDDVIIVSGHNLGTAEIESAFVAHPKVAEAAVVGYPHDIKGNGLYCYVTLNAGEKSTLDLERDLKLWVRKQIGPIATPDLIQFAPGLPKTRSGKIMRRILRKIAANEHGQLGDTTTLADPSVVDSLVDNRKNI

SEQ ID NO: 193207 - protein, 327 aa, Unknown
  Bacterial polypetide isolated from the Sargasso Sea
TIYLPMIPELPISMLACARIGAIHTVVFSGFSSKSLSDRVEDSQSKIIITADGGYRKGKIINLKEIVDDSASSVQFVKNVIVYQRTGQKIQLNEKDLLWHEVMQNSSEECDAEILDSSDSLYILYTSGTTGKPKGVLHGIGGYLTHLYSTYKWAFDIKDSDVYFCTADIGWVTGHSYVVYGPLLHGATQVMYEGAPDHPDSSRMWDIIQKYGVTIFYTTPTALRMLMKFGDDIPNSFNLSTLRLLGTVGEPINPEVWKWYFNTIGKKKCPIIDTWWQTETGGMLISPLPGIETIPLKPGSATLPVPGLDIEVVDETGNEVELKQKVH

SEQ ID NO: 193208 - protein, 176 aa, Unknown
  Bacterial polypetide isolated from the Sargasso Sea
MNRNYKEIYDESLKNPEEFWQKVSEDVFWFKKPTKILKKDNPPFYKWFEDGVTNTCYNALDLHIDQGRGDKTALIYDSPITGNKAKFTFKELKEKVSKFAGALDKQGVKKGDRIIIYMPMIPEAVVAMLACGRIGAIHSVVFGGFASNELASRIDDSKAKILITASCGFEPGRTVE

SEQ ID NO: 193209 - protein, 396 aa, Unknown
  Bacterial polypetide isolated from the Sargasso Sea
ESVEDPEGFWEKQADRLDWFKKWDRTLDWDYDKAYIRWYEGGKLNVAHNCLDRHLETRGEQKALIWESDDPNLDRSFTYKQLHSEVSKFANVMKAFGVVKGDRVMIYMPMIPELAIACLACARIGAVHSVVFGGFSSEALKNRIIDCDGKMLITANAGVRGGKSVPLKQNADVAMEETSIECCMVVKHTEDACEMQSGRDYFWHEEMAKVSSDCPAEEMDAEDPLFILYTSGSTGKPKGVLHTTAGYLVYTSLTHQYVFDYHDGDIYWCTADIGWVTGHSYILYGPLANGATTLMFEGVPNFPDFGRFWDICDKHKVNIFYTAPTAIRAIAKEGDELVNKRDLSSLRLLGTVGEPINPEAWLWYHRVVGQGNCPIVDTWWQTETGGILITPLPGAT

SEQ ID NO: 193210 - protein, 192 aa, Unknown
  Bacterial polypetide isolated from the Sargasso Sea
KGEAQGRLCIAQSCPGQMRTVYGDHKRFIDTYFSQFDGKYFTGDGCRRDKDGYYWITGRVDDVIIVSGHNLGTAEIESAFVAHPKVAEAAVVGYPHDIKGNGLYCYVTLNAGEMHSLDLERELKLWVRKQIGPIATPDLIQFSPGLPKTRSGKIMRRILRKIAANEHDQLGDTTTLADPGVVKSLVDNRKNI

SEQ ID NO: 193211 - protein, 411 aa, Unknown
  Bacterial polypetide isolated from the Sargasso Sea
MNEKIENLLKEDRKFPPSEQLVKKANAPSSWYDEANENRLKFWQKQALTRISWFKEPTEILDDSNPPFFKWFKDGELNLSYNCLDRHLESDGDRVAFYWEGEPGDTQEITYQDLYERVCKLSNALKKLGVGKGDRVAIYLGMTPEIVVSMLACARIGAVHSVVFGGFSSEALADRINDAKAKIVITADGAWRRGDIVPLKNNVDGSLELTEYVENVIVVKRTEQEINMANGRDHWYHEITDNESSECEPEIMNSEDMLYILYTSGTTAKPKGIVHTQGGYLTGVTTTHHEVFDIKEEDIYWCAADCGWVTGHSYIVYGPLANKATSVMYEGAPNAPDEKRLWSIIEKYKVNIFYTAPTAIRAFMKWGVEHPQAHDLSSLRILGTVGEPINPEAWMWYHENIGGENCAFVDT

SEQ ID NO: 193212 - protein, 443 aa, Unknown
  Bacterial polypetide isolated from the Sargasso Sea
MIIFWKKEGKRITWIKPYTKIKDYKYSKSDVNIKWFYDGTLNASANCIDRHLKKNKDKTAIIWVGDDPKVQKKISYKQLHQEVSKAANGLKEIGVKKGDRVTIYLTMIPELAYTMLACARIGAVHSIIFGGFSADSISGRINDCKSDYVITADEGVRGGKIIDLKTTVDEALLNCPNVKKCVVVKRTGNRINWDESRDVWYHDITKKASKSCEPEEMNAEDPLFILYTSGSTGKPKGVLHTTGGYMVYASMTHQYIFNYKPKDIYWCTADIGWVTGHSYIIYGPLSNGATTIMSEGIPNYPDWSRWWQIVDKFKVNIFYTAPTAIRAMMREGDSPVKKTSRKTLKLLGTVGEPINPEAWQWYFKTVGDSRCPIVDTWWQTETGGILISPQTGAIDLKPGSATKPFYGIKPEIVDKNGKVLKGEAQGRLCIAQSWPGQMRSVYG

SEQ ID NO: 193213 - protein, 320 aa, Unknown
  Bacterial polypetide isolated from the Sargasso Sea
MSEGIPNYPDWSRWWQIVDKYKVNIFYTAPTAIRAMMREGDGPVKKTSRKTLKLLGTVGEPINPEAWQWYFKTVGDSRCPIVDTWWQTETGGILISPQTGAIDLKPGSATKPFYGIKPEIVDKDGKVLKGEAQGRLCIAQSWPGQMRSVYGDHNRFIETYFSQFDGKYFTGDGCRRDKDGYYWITGRVDDVIIVSGHNLGTAEVESAFVAHSKVAEAAVVGCPHDIKGNGLYCYVTLNVGEQPSGDLERELKLWVRKQIGAIATPDFIQFTPGLPKTRSGKIMRRILRKIAANEHEQLGDTTTLADPSVVKSLVNNRKNI

SEQ ID NO: 193214 - protein, 377 aa, Unknown
  Bacterial polypetide isolated from the Sargasso Sea
QIPIKDDDGNLVFQVSEKRAKQSLVNKAKYKKKYNLSIKENDKFWKKEGKRISWIKPYTKIKDIKYSKEDVKIKWFYDGTLNASANCIDRHLKKNAKKSAIIWVGDDPSVSKKISYKELHKNVCKTANALKSIGVQKGDRVTIYLTMIPELAYTMLACARIGAIHSIIFGGFSPDSIATRINDCESDYLITADEGLRGGKIIPLKKIADEALLQCPNVKKCVVVKRTGNQVNWDHERDVSYEELIANASAKCEPEEMSAEDPLFILYTSGSTGKPKGVLHTTGGYMVYASMTHQYIFDYKPKDIYFCSADIGWVTGHSYIIYGPLSNAATTIMFEGIPTYPDSSRWWQIVDKYKVNTFYTAPTAIRALMKEGNDPVK

SEQ ID NO: 193215 - protein, 360 aa, Unknown
  Bacterial polypetide isolated from the Sargasso Sea
YTSGTTGKPKGALHRHQSIIQQYATGKWALDMKKDDVYWCTADPGWVTGTSYGMFAPWSNGLTQVIFEGGYSASKWYSIIQDYNVTVWYTAPTAIRMLMKAGAEPISKHNISTLRFIASVGEPLNPEAVVWGNENYGMPIHDNWWQTETGAIMCANYSFMEIRPGSMGIPIPGVELAILDKDFKRLEPNKPGILAVKPGWPSQFFAYWKNDERYNSRFKKGWYITGDEAFMDKDGFFWFQGRSDDVINTAGHLVSPFEVESTLIEHEAVAEAGVIGIPDKIAMEVVKAFVSLNNGFSWSKELRLELMQFAKSKLSSGVAPRDIEYVETMPKTRSGKIMRRLLKARELGLPEGDTSTLEDD

SEQ ID NO: 193216 - protein, 412 aa, Unknown
  Bacterial polypetide isolated from the Sargasso Sea
MYIPKKETSKNSHISSLDQYKKLYEDSVKTPEKFWQKISQRLDWIESCEQILHYDFKAGEIKWFSGGKLNASYNCIDRHINAGFGDDIAIIWEGNDPKQSRKFTYSQLLKEVSLFANSLKSLGVKKGDRVCLYMQMVPELAIAVLACARIGAVHSVVFGAFSSDSLRDRINDSKCKILVTQDTGVRGAKQNIPMKENADKAVMETPSIQQVIVVKRTGEKVSMDSQLDIWWHEAISGESPICNPEIMDSEDPLFILYTSGSTGKPKGVLHTTGGYLVYASFTHEMVFNYKPGDIYWCTADLGWITGHSYIVYGPLSNRATTVMFEGVPNYPDFGRFWDVVDKHKVNQFYTAPTALRALMKEGDSWVNSRDLSSLCLLGTVGEPIKEPEWKWYFEVVGKTKCPIVDTWWQTET

SEQ ID NO: 193217 - protein, 252 aa, Unknown
  Bacterial polypetide isolated from the Sargasso Sea
WYYRVIGDGRCPIVDTWWQTETGSIMITPLPGVTDLKPGSATLPFFGVNPALLDSNGDEITGVATGNLVIKESWPSQIRTVFGDHKRCIDTYFSTYPGYYFTGDSARRDEDGFYWVTGRVDDVINVSGHRLGTAEIESSLVLHIDVAEAAVVGYPHDIKGQGIYAYVTLMSGVEANETLRKELIAFVGKDIGAFAKPEIIQFAPGLPKTRSGKIMRRILRKVAANELENLGDTTTLADPTVVEQLIENRVNK

SEQ ID NO: 193218 - protein, 555 aa, Unknown
  Bacterial polypetide isolated from the Sargasso Sea
RHLKNKKDKTAIIWVGDDPKVQKKITYKQLHQEVSKTANGLKELGVKKGDRITIYLTMIPELAFTMLACARIGAVHSIIFGGFSSDSIAGRINDCKSDYVVTADQGIRGGKTIELKTTVDEALINCPNVKKCIVVKRTGNFINWDNERDVWYHDITKKASSHCEPEEMNAEDPLFILYTSGSTGKPKGVLHTTGGYMVYASMTHQYIFNYKPKDIYFCSADIGWITGHSYIIYGPLANGATTVMFEGVPTYPDSSRWWQIVDKFKVNIFYTAPTAIRALMREGDGPVKKTSRKSLKLLGTVGEPINPEAWMWYYKTVGDSKCPIVDTWWQTETGGILISPQTGAIDLKPGSATKPFYGIKPVIVNKEGKILKGECQGSLCIAQSWPGQMRTVYGDHQRFIDTYFSQFDGKYFTGDGCKRDKDGYHWITGRVDDVIIVSGHNLGTAEIESAFVAHPKVAEAAVVGYPHEIKGNGLYCYVTLNVGEKADGDLDRELKNWVKKHIGAHARPDFIHFTPGLPKTRSGKIMRRILRKIAANEHDQLGDTTTLADPSVVKV

SEQ ID NO: 193219 - protein, 514 aa, Unknown
  Bacterial polypetide isolated from the Sargasso Sea
EDGTTNTCYNALDIHVQNGLGNKTALIYDSPITGKKSKFTFSILKEKVAKFAWALQNQGVEKGDRVIIYMPMIPEAVMAMLACGRIGAIHSVVFGGFAANELASRIDDSKAKILVTASCGFEPGRTVEYKPLVDKALEIAKHKPEKLILYQREGHEVDLNNKNEISWNDALKGAQEVDCAEMNANDFAYILYTSGTTGVPKGIVRDIGGHIVALKWTMKNIYNINQNDVWWSASDIGWIVGHSYIVYAPLFKGCTTVLFEGKPVGTPDAGVFWRVISEHKIKSLFTAPTAFRAIKKEDPEGKFFSKYDLSCFESLFLAGERADPDTLKWAESLLKVPVIDHWWQTETSWAISSNCTGIEMQKTKYGSACMPVPGYNVKVLKTDKTEAKANEMGDIVVKLPLPPGTFPTLWNADERYKKTYMSNYEGYYQTYDAGHIDEDGYVWIMSRTDDIINVAGHRLSTGAIEEVLSEHKSVAECAVVGISDKLKGQLPIGFLALKIGVKQSNEEIIKECIQ

SEQ ID NO: 193220 - protein, 364 aa, Unknown
  Bacterial polypetide isolated from the Sargasso Sea
ASMTHQYIFNYKPKDIYWCTADIGWVTGHSYIIYGPLSNGATTIMFEGIPNYPDSSRWWQIVDKYKVNTFYTAPTAIRALMREGDKPVKKTSRKSLKLLGTVGEPINPEAWMWYYKTVGNSKCPIVDTWWQTETGGIMIAPQTGAIPLKPGSATKPFYGIKPVLVDKNGKEIKGAGEGRLCIAQSWPGQMRTVYGDHQRFIDTYFSQFNGKYFTGDGCRRDKDGYYWITGRVDDVIIVSGHNLGTAEIESAFVAHPKVAEAAVVGYPHDIKGNGLYCYVTLNAGESETGELERDLKLWVRKQIGPLATPDLIHFTPGLPKTRSGKIMRRILRKIAANEHGQLGDTTTLADPSVVDSLVDNRKNI

SEQ ID NO: 193221 - protein, 496 aa, Unknown
  Bacterial polypetide isolated from the Sargasso Sea
GKRITWIKPYKKIKNVKYSKSDVSIKWYYDGTLNASANCIDRHLKKNKDKTAIIWVGDDPKVQKKITYKQLHQEVSKTANALKELGIKKGDRVTIYLTMIPELAYTMLACARIGAVHSIIFGGFSPDSIAGRINDCKSDYVVTADEGLRGGKTIPLKSITDEALVNCSNVKKCIVVKKTGNRINWDESRDVWYHDIVKKASPVCEPEEMNAEDPLFILYTSGSTGKPKGVLHTTGGYMVYASMTHQYVFNYKPKDIYWCTADIGWVTGHSYIIYGPLSNGATTIMFEGIPTYPDNSRWWQIVDKYKVNIFYTAPTAIRALMREGDKPVKKTSRKTLKLLGTVGEPINPEAWQWYYKTVGDSRCPIVDTWWQTETGGILISPQTGAINLKPGSATKPFYGIKPVIVDKTGKVLKGEAQGRLCIAQSWPGQMRTVYGDHQRFIDTYFSQFDGKYFTGDGCRRDKDGYYWITGRVDDVIIVSGHNLGTAEIESAFVAHP

SEQ ID NO: 193222 - protein, 691 aa, Unknown
  Bacterial polypetide isolated from the Sargasso Sea
MPKKKKSKSRKKTSKRKRVKKRKKILKRKKKIRSKNKKVKINNEGSTQEIIFKTNPEWVKSGLINKSQYQNKYTDSIKNNNTFWKKEGKRITWIKPYKKIKDVKYSRNEVKIKWFEDGTLNASANCIDRHLKDKKDKTAIIWVGDDPKDTQKISYKQLHQKVSKAANGLKKLGIQKGDRVTIYLTMIPELAVLMLACARIGAIHSIIFGGFSAESISGRVNDCKSEYIITADEGVRGGKIIPLKATTDEALSNCPDVKKCIVVKRTGNYVYWDDGRDVWYHDLIKDVPNHCEPEEMSAEDPLFILYTSGSTGKPKGVLHTTGGYMVYASMTHQYIFNYKPKDIYWCTADIGWVTGHSYIIYGPLSNGATTIMFEGVPNYPDSSRWWQIVDKFKVNTFYTAPTAIRALMREGDDPVNKTSRKSLKLLGTVGEPINPEAWMWYYKTVGNSKCPIVDTWWQTETGGILIAPQTGAIPLKPGSATKPFYGIKPVLVDKDGKEIKGAGEGRLCIAQSWPGQMRTVYGDHQRFIDTYFSQFDGKYFTGDGCRRDKDGYYWITGRVDDVIIVSGHNLGTAEIESAFVAHPKVAEAAVVGYPHDIKGNGLYCYVTLNAGETETGDLERELKLWVRKQIGPLATPDLIHFTPGLPKTRSGKIMRRILRKIAANEHGQLGDTTTLADPSVVESLVDNRKNT

SEQ ID NO: 193223 - protein, 450 aa, Unknown
  Bacterial polypetide isolated from the Sargasso Sea
FLKDITDQALSKCRDIKKCIVVKRTGNYINWNSVRDVWYEDMIKNVSTNCEPEEMNAEDPLFILYTSGSTGKPKGVLHTTGGYMVYASMTHQYIFNYKPKDIYWCTADIGWITGHSYIIYGPLANGATTIMFEGIPTYPDSSRWWQIVDKHKVNIFYTAPTAIRALMREGNSPVKKTSRKSLKLLGTVGEPINPEAWMWYFKTVGNSKCPIVDTWWQTETGGILISPQTGAINLKPGSATKPFYGIKPVIVDEKGQTLHGECQGRLCIAQSWPGQMRTVYGDHQRFIDTYFSQFDGKYFTGDGCRRDKDGYYWITGRVDDVIIVSGHNLGTAEIESAFVAHKKVAEAAVVGFPHEIKGNGLYCYVTLNAGETPSGDLERELKLWVRKQIGPIATPDHVQFSSGLPKTRSGKIMRRILRKIAANEHHDLGDTTTLADPSVVESLVDNRKVK

SEQ ID NO: 193224 - protein, 443 aa, Unknown
  Bacterial polypetide isolated from the Sargasso Sea
MAEEKVYRVPNNHNRAFIDTNKYQEMYTRSINESNIFWEEQAEKFLTWFSKWDSVQQWDYDNLDIKWFHNAKLNVSYNCLDRHLKERGDQIAIIWEGDEPDLDKYITYKELHAEVCKFANVLKSRGAKKGDCISIYMPMVPEAAVAMLACTRIGAIHSVVFGGFSPESLKDRILDSDCKFVITADEGIRGGRTVPLKENVDDALSKCPNVHTVIVIQRTGKDIVWNNERDIWYQDAMAEASTHCPAIEMDAEDPLFILYTSGSTGKPKGVLHTTAGYLLYAAITHKYVFDYHENDIYWCTADVGWVTGHSYIIYGPLCNGAKTLMFEGVPTYPDASRFWQVVEKHKVSIFYTAPTAIRALMCKGEEFVKKTNRKSLRILGTVGEPINPEAWEWYYHVVGDGRCPIIDTWWQTETGGHLITPLPGATDLKPGSKTLPFFGIEPC

SEQ ID NO: 193225 - protein, 401 aa, Unknown
  Bacterial polypetide isolated from the Sargasso Sea
MRKKKKSKKKIRKKSRKISKKKNSNSSSNELIYKTKKEWIRQSLVTKKEYEKKYNQSIKDNEGFWKKEGKRISWIKPYTKIKDVKYSKTDVHIKWYYDGTLNASSNCIDRHLKKNKNKTAIIWIGDDPKVQKKISYQQLHNEVCKISNGLKSLGIKKGDRVTIYLTMIPELAYTMLACARIGAIHSIIFGGFSPDSIAGRINDCKSDYIVTADEGVRGGKTIPLKSITDEALVNCPNVKKCIIVKRTGNRINWDEERDVWYHDITKKVPNTCEPEEMNAEDPLFILYTSGSTGKPKGVLHTTGGYMVYASMTHQYIFNYKPKDIYWCTADIGWITGHSYIIYGPLSNGATTIMFEGIPTYPDTSRWWQIVDKFKVNIFYTAPTAIRALMREGDIPVKKTSR

SEQ ID NO: 193226 - protein, 449 aa, Unknown
  Bacterial polypetide isolated from the Sargasso Sea
LKSITDEALIHCPNVKKCFVVKRTGNRINWDENRDVWYHEMIAGVPSQCQPEEMNAEDPLFILYTSGSTGKPKGVLHTTGGYMVYASMTHQYIFNYKPKDIYFCTADIGWITGHSYIIYGPLANAATTVMFEGVPTYPDSSRWWQIVDKFKVNIFYTAPTAIRALMAQGDDPVKKTSRKSLKLLGTVGEPINPEAWEWYYRTVGDNRCPIVDTWWQTETGGILISPQTGAIDLKPGSATKPFYGIRPVIVDQNGKEIRGEGQGRLCMSQSWPGQMRTVYGDHQRFIDTYFSQFDGKYFTGDGCRRDKDGYYWITGRVDDVIIVSGHNLGTAEIESAFVAHPKVAEAAVVGYPHQIKGNALYCYITVNNGVIADGDLERELKNHIAKTLGPFYRPELIQFSPGLPKTRSGKIMRRILRKIAANEHDQLGDTTTLADPSVVDSLINNRKNI

SEQ ID NO: 193227 - protein, 356 aa, Unknown
  Bacterial polypetide isolated from the Sargasso Sea
MEIKKDWLEHAKVNEEKYSLMYDNSLQNNDEFWADQAERVDWIKKFTKIKDIKYSKDDVSIKWFEDGNLNVSYNCIDRHAKNNPDKVAIIWEGDDPNETKKITYKELLINVSKAANVLKKIGVKKGDRVTIYLTMIPELAYIMLACARIGAVHSIIFGGFSAESIAGRIKDCKSEYVVTADEGVRGGKTIPLKLTTDKALETCPDVKKCLVVKRTNKEIELIKDRDLFYDDVIKEVDSICKPEVLNAEDPLFILYTSGSTGKPKGVMHTSGGYIVYASMTHEYIFNYNDGDIYWCTADIGWITGHSYIIYGPLANGATTLMFEGVPNYPDFSRFWKIVDKHKVNIFYTAPTAIRAL

SEQ ID NO: 193228 - protein, 579 aa, Unknown
  Bacterial polypetide isolated from the Sargasso Sea
MSGNYKKIYDSSIKDRENFWKTLSEDIFWYKKPTKILNSSKPPFYKWYEDGITNTCYNAVDVHIDNGRGDNIAIIYDSPITGSKYKLSYKELKEKVSIFAGALKNQGIVKGDRVIIYMPMIPQAVVAMLACGRIGAIHSVVFGGFAANELASRIDDSKAKIIISASCGYEPGRTVHYKPLLNRAIEIANHKPKKCIIWQREKDKAELDPERDIDWLEVLKGAEPAECEKMNANDYAYILYTSGTTGTPKGIVRDIGGHIVALKWTMKNIYNIDQDDVWWSASDIGWIVGHSYIVYAPLFYGCTTILFEGKPVGTPDAGVFWRIISEYKVKSLFTAPTAIRAIKKEDPDGKFFKKYDLSKFDTLFLAGERADPDTIKWFEELSNAPVIDHWWQTETSWAISANCAGIEKFPIKYGSAFKPVPGYDLKVLNNEGKENKSGQMGDIVVKLPLPPGTFPTLWNADDRYKKVYMSTYEGYYQTYDAGHIDEDGYVWIMSRTDDIINVAGHRLSTGAIEEVLAEHKNVAECAVVGIADKLKGQLPIGLIALKAGVKRDNKEITKECVALVREKVGPVAAFKLAIV

SEQ ID NO: 193229 - protein, 269 aa, Unknown
  Bacterial polypetide isolated from the Sargasso Sea
MAKRSKKKKRKSKSKRKKRFKRKKIKTLKKKKLSSKINNSKQTEDADGNIVFKVPPAWEKRAYANQSQYAKKYKLSIKDNESFWAKEGKRITWMKPYTKIKDVKYSKEDVSIKWYYDGTLNASANCIDRHLDKKGNKTAIIWVGDDPSDSKKISYKELHKNVCKAANGLKSLGIQKGDRVTIYLTMIPELAYTMLACARIGAVHSIIFGGFSPDSIATRINDCESDYVITADEGVRGGKIIPLKKIADEAMMQCPNVKKCVVVTRTGNT

SEQ ID NO: 193230 - protein, 361 aa, Unknown
  Bacterial polypetide isolated from the Sargasso Sea
MGEKYKEIYDSSINNKEKFWKEVSEDIFWYEKPKKILNSSSPPFYKWFEDGVTNTCYNALDIHIDKGRGEKTAIIYDSPITGTKKNFSYKELREKVSLFAGALKNQGVNKGDRVIIYMPMIPEAVIAMLACGRIGAIHSVVFGGFAANELASRIDDSKAKLIVSASCGYEPGRTVHYKPLVNKALELSKHKPSKCIIFQREKDKAELDSKIDITWDEALKGAKETDCEKMKSNDYAYILYTSGTTGTPKGIVRDIGGHIVALKWTMKNIYNINQDDVWWSASDIGWIVGHSYIVYAPLFYGCTTILFEGKPVGTPDAGVFWRIISEHKVKSLFTAPTAIRAIKKEDPEGKFFKKYDLSKFD

SEQ ID NO: 193231 - protein, 271 aa, Unknown
  Bacterial polypetide isolated from the Sargasso Sea
MSLDKKNSINNILEEKRIFSPSKKFAENSNISTQEELLNLKEQASDNPIQFWESFAKSELDWFEPFQTVLDNENAPFFKWFKEGKLNITYNCLDRHIKRGLGEKTALIWEGEPGDSKKYTYEELLKEVCKAANALKAIGVKKGDLVCIYMPMIPEAMFAMLACARIGAPHSVVFGGFSSEALKDRLIDGNARFVVTADGGFRKDKVIELKKAVDAAIESGADKVVEKVVVVQRSQKNILMVDDRDFWWHELLKDQKDHCEPEIRIAKIDFL

SEQ ID NO: 193232 - protein, 631 aa, Unknown
  Bacterial polypetide isolated from the Sargasso Sea
MNRNYKEIYDESLKKPEEFWQKVSEDVFWFKKPTKILKKDNPPFYKWFEDGVTNTCYNALDLHIDQGRGDKTALIYDSPITESKAKFTFKELKKKVSKFAGALDKQGVKKGDRVIIYMPMIPEAVVAMLACGRIGAIHSVVFGGFASNELASRIDDSKAKILITASCGFEPGRTVEYRPLVDGALRLAKHQVEKVILFQRKGHEVKLNKPLEISWDEALSGADDKDCVEMGANEYAYILYTSGTTGIPKGIVRDIGGHIVALKWTMKNIYNIDQDDVWWSASDIGWIVGHSYIVYAPLFKGCATLLFEGKPVGTPDAGVFWRIISEYKIKSLFTAPTAFRAIKKEDPEGKFFSKYDLSSFESLFLAGERADPDTIKWAENLLKVPVIDHWWQTETSWAISSNCTGIEMQETKYGSACKAVPGYDVKIIKPDQTIAKPNEMGDIVVKLPLPPGTFPTLWNADERYKENYMSNYNGYYQTYDAGHIDDDGYIWIMSRTDDIINVAGHRLSTGAIEEVLSEHQSVAECAVIGIKDQLKGQLPIGLIALKAGVSKDNETISKECVQMVRDKVGPVAAFKIAIVVKRLPKTRSGKVLRGTIRKIADKEEYKMPATIDDPTILDEIKGDLINSDILK

SEQ ID NO: 193233 - protein, 389 aa, Unknown
  Bacterial polypetide isolated from the Sargasso Sea
MTDVGQQLHQTSIANKQAFWQQAAKALDWVTPSKQILDESEAPFYHWFSDGELNTCYNAVDRHVLAGRGEQIAIHYVSPVTETEYSITYRELQAQVARLAGYLQSVGVTKGDRVVIYMPMVPETAYAMLACARIGAIHSVVFGGFAANELATRINDAKPKLVMSASCGIEPSGVVPYKPLLDKALNEAVHKVEHCLILNRPQYEAQMQAGRDKDWQTALCASDSADCVTVKATDPLYVLYTSGTTGQPKGVVRDNGGHAVALAWSMANIYDIAQGDVFWAASDVGWVVGHSYIVYGPLLVGATTLLYEGKPVGTPDPGAFWRTIAKYRVKSFFTAPTAIRAIKREDPDGEFIQGVDLSCLKNVFLAGERCDPDTLHWAEAKLHKPRYRP

SEQ ID NO: 193234 - protein, 438 aa, Unknown
  Bacterial polypetide isolated from the Sargasso Sea
MAKKKKRKIKKKKKTKRKKNKSFKKSKKRNFKRKKTYNAKVSKETKDTDGNLVFKVPENWSRQAYVNKSRYEKKYKISIKNNEDFWRKEGKRINWIKPYTKVKDVKYSKNEVNIKWYYDGTLNASANCIDRHLEKKSNKTAIIWVGDDPSDSKKITYKELHKNVCKAANALKSIGIQKGDRVTIYLTMIPELAYTMLACARIGAVHSIIFGGFSPDSIATRINDCESDYVITADEGLRGGKIIPLKKIADEAMSQCPNVKKCVVVKRTGNSVNWDDDRDVSYNEIIKNVSDKCVPEEMNAEDPLFILYTSGSTGKPKGVLHTTGGYMVYASMTHQYIFDYKNKDIYWCTADIGWVTGHSYIIYGPLSNGATTIMFEGVPNYPDSSRWWQIVDKYKVNIFYTAPTAIRALMREGDGPVKKTSRKSLKLLGTVGEPINPE

SEQ ID NO: 193235 - protein, 321 aa, Unknown
  Bacterial polypetide isolated from the Sargasso Sea
GNSQPTLMHRGFGQVCEKHKVNQFYTAPTAIRALMGQGNEYVEKCNLSSLKVLGTVGEPINPEAWNWYNTVVGKGNCPIVDTWWQTETGGHLLTPIPGATNTKPGSATNPFFGVKPAILDPQTGQEIDDTEAEGVLCIKDSWPGQMRTVYGDHDRFIKTYFSDYKGYYFSGDGCRRDSDGYYWITGRVDDVINVSGHRMGTAEVESALVAHPKVSEAAVVGFPHDIKGQGIYCYVTLMSGETPSEELRLELRNWVRTEIGPIASPDLIQWAPGLPKTRSGKIMRRILRKIAENDYGSLGDTSTLAEPAVVDDLIINRMNDA

SEQ ID NO: 193236 - protein, 272 aa, Unknown
  Bacterial polypetide isolated from the Sargasso Sea
MSDKFKEIYRKSIEDPENFWREASDDIFWFKKPTKILNKSNPPFYKWFEDGVTNTCYNALDIHIDKGQGKKTAIIYDSPITGNKSKLTYEKLRSKVSKFAGALKNQGVGKGDRVIIYMPMIPEAVIAMLACGRIGAIHSVVFGGFASNELASRIDDSKAKILVTASCGFEPGRTVEYKPLVDEAVKLASHKISKMILFQRKGHEAKLNEPNEISWDEALADAKDTECVEMNSNEFAYILYTSGTTGTPKGIVRDIEGHIVALKWTMKNIYNI

SEQ ID NO: 193237 - protein, 622 aa, Unknown
  Bacterial polypetide isolated from the Sargasso Sea
YEESVKQPEKFWAEHGKRISWFTPFTKVKDTSFDLGNVHVNWFSDGSLNASYNCLDRHLPAKANQVAYYWEGDEPGVQKAVTYQELYDEVCQLANAMRALGVGKGDRVTIYLPMIPAAVVSLLACARIGAIHSVVFAGFSPDALGSRIQDCDSKLVITSDQAARGSRLTYLKDNTDQALAHLGDANPAKHVIVVKHVGENIDFHQGRDLWYHELLAKEPKHCEPEVMNAEDPLFILYTSGSTGKPKGVLHTTGGYMVWASMTHQYVFDYKDGDIYWCAADIGWVTGHTYIVYGPLANGASSILFEGVPTYPSVKRIAQVVDKYKVNILYTAPTAIRALMAHGTAAVDGADLSSLTLLGSVGEPINPEAWSWYHASYGKNNCPIVDTWWQTETGGILITPLPGATDLKPGSATRPFFGVKPAIVTNEGELVEGVAEGNLVILDSWPGQMRSVYGDHERFEQTYFSTYKGMYFTGDGAKRDEDGYYWLTGRVDDVLNISGHRLGTAEIESCLVAHDAIAEAAVVGYPHDIKGQGIYVFVAPRVGVEPSDELTKAVRDWVRREISPIAAPDIIQWTPSLPKTRSGKIMRRILRKIAANEYDQLGDISTLADPSVVEHLIQNRLNR

SEQ ID NO: 193238 - protein, 225 aa, Unknown
  Bacterial polypetide isolated from the Sargasso Sea
MKSDFQRIYNESIKNPEEFWKKIAEEIFWFKKPTKILNKSNAPFYKWYEDGVTNTCYNALDFHIDNGLGEKSALIYDSPITGNKKKFSYKELKEKVSKFAGALQNQGVKKGDRVIIYMPMIPEAVIGMLACARIGAIHSVVFGGFASNELASRIDDSKAKVLLTASCGFEPGKTVQYKPLVDEALKLASHKIDKLILFQRPDNEVKLNSLNEISWNEALSNAKNV

SEQ ID NO: 193239 - protein, 365 aa, Unknown
  Bacterial polypetide isolated from the Sargasso Sea
MSKDHKIYSPSADWTVSAHIKSLDKYNEMYNKSIEDPDSFWSDIAKRITWYKPWEKVRDFNFQNGEIKWFENGKLNVSYNCLDRHVESGNGEKTAIIWEGNDPSEDMHFSYNKLLEKVKKFSNVLKDLGIEKGDRVCIYMQMVPELAIAMLACARIGAVHSVVFGAFSADSLRDRINDSQCKLLITQDTGVRGQKNNIPMKLNADKALADTPSINSVVVVKRTGVDINMIDGRDVWWHEQIEKADANCDPVHMDSEDPLFILYTSGSTGKPKGVLHTTGGYLVYASFTHYTIFDYKDNDVYWCTADIGWITGHSYIVYGPLSNQATTIIFEGVPNYPDFGRFWDVVDKHEVNQFYTAPTALRALM

SEQ ID NO: 193240 - protein, 324 aa, Unknown
  Bacterial polypetide isolated from the Sargasso Sea
MTESLIRAKSLNPHLENFEEYKKLYDQSIDNPKEFFKKMAVENLSWIRDFTEIHNDEFANAKWFADGKINVSENCIDRHLEDKSEKKALIWEGDEPGNSKSFTYKEVHKEICKFSNVLKSLKVSKGSRVCIYMPMIPEAAFAMLACTRIGAIHSVVFGGFSPESLKDRILDANCEIVITADEGIRGGKIVPLKSNVDKALNDCPNVKHTIVVKRTGNKINWKDGRDLWYEDLITEVSSSCDPEPMDSEDPLFILYTSGSTGKPKGVLHTTAGYLLGAHMSFKYLFGASQSDIYWCTADVGWITGHTYILYGPLSNGMTTIMFEG

SEQ ID NO: 193241 - protein, 589 aa, Unknown
  Bacterial polypetide isolated from the Sargasso Sea
KYSKNDVHIKWFYDGTLNASANCIDRHLKKNANKTAIIWVGDDPKVQKKITYKELHKEVSKAANGLKNLGVQKGDRVTIYLTMIPELAYTMLACARIGAVHSIIFGGFSPDSISGRINDCESDYVITADEGVRGGKTIPLKSITDEALQSCPNVKKCIVVKRTGTKKIDWFNDRDVWYHKMTSKVSAKCEPEEMNAEDPLFILYTSGSTGKPKGVLHTTGGYMVYASMTHQYIFNYKPKDIYWCTADIGWVTGHSYIIYGPLANGATTIMFEGIPNYPDTSRWWQIIDKFKVNTFYTAPTAIRALMREGDKPVKKTSRKSLKLLGTVGEPINPEAWMWYYKTVGNSKCPIVDTWWQTETGGIMISPQTGAIPLKPGSATKPFYGIKPVLVDKNGKEIKGAGEGRLCIAQSWPGQMRTVYGDHQRFIDTYFSQFDGKYFTGDGCRRDKDGYYWITGRVDDVIIVSGHNLGTAEIESAFVAHPKVAEAAVVGYPHDIKGNGLYCYVTLNAGERETGDLERELKLWVRKQIGPLATPDLIHFTTGLPKTRSGKIMRRILRKIAANEHEQLGDTTTLADPSVVESLVDNRKNI

SEQ ID NO: 193242 - protein, 435 aa, Unknown
  Bacterial polypetide isolated from the Sargasso Sea
MPKKKKNNTKKRKKISKKLKNKSKIKKKSSKKIKKKIKVQNQEANQVSEVIIKTKPEWIKSSLANKSKYQQKYSQSIKSNDEFWRKEGKRITWIKPYKKIKDVKYSTKDVRIKWFEDGTLNASANCIDRHLKDKKDKTAIIWVGDDPKDSQKITYKQLHQKVSRAANGLKKLGIKKGDRVTIYLTMIPELAILMLACVRIGAVHSIIFGGFSAESISGRVNDCQSEYIITADEGVRGGKTIPLKYTTDEALLNCPNVKKCIVVKRTGNYINWDKERDVWYHDLIKDVSNQCEPEEMNAEDPLFILYTSGSTGKPKGVLHTTGGYMVYASMTHQYIFNYKPKDIYWCTADIGWVTGHSYIIYGPLSNGATTIMFEGIPNYPDSSRWWQIVDKYKVNTFYTAPTAIRALMREGDKPVKKTSRKSLKLLGTVGEPIIL

SEQ ID NO: 193243 - protein, 142 aa, Unknown
  Bacterial polypetide isolated from the Sargasso Sea
MSDKFNRIYNESIQNPEVFWQKAAEDIFWFKKPLKILNKTNPPFYKWYEDGVTNTCYNALDFHIDQGKGKKTALIYDSPITGNKSKFTYEELKSKVSKFAGALKEQGTSKGDRVIIYMPMIPEAVIAMLACARIGAIHSVVF

SEQ ID NO: 193244 - protein, 321 aa, Unknown
  Bacterial polypetide isolated from the Sargasso Sea
MFEGIPTYPDSSRWWQIVDKYKVNIFYTAPTAIRALMREGDGPVKKTSRKSLKLLGTVGEPINPEAWMWYYKVVGDSKCPIVDTWWQTETGGILISAQPGAIDLKPGSATKPFYGIKPVIVDETGKVLKGACKGRLCMSASWPGQMRTVYGDHKRFIDTYFSQYDGKYFSGDGCKRDKDGYYWITGRVDDVIIVSGHNLGTAEIESAFVAHNRVAEAAVVGYPHDIKGNGLYCYVTLKAGEQPSGDLERELKLWVRKQIGPIATPDIIQFAPALPKTRSGKIMRRILRKIAANEHNDLGDTTTLADPNVVDSLIDNRQNKN

SEQ ID NO: 193245 - protein, 371 aa, Unknown
  Bacterial polypetide isolated from the Sargasso Sea
MSNNIFPPSDEFKANAIIDKQRYEEMYSESITDPDAFWSKHGLRVDWIKPFTKIKNVSYQHPNISIKWFEDGELNVSANCIDRHLDSRGEQTAIIWEGDNPSESKHVTYRELHQKVSKLANVYKNLGLSKGDRVVLYMPMIPEAAYAMLACARIGAIHSIVFAGFSPEALAARVEGCKASLIVTADEAPRGGKNTPLKANVDKALEICGDVQTLVVERTGSNVPMTEGRDISYNSSMKDVSDQCEPTAMNAEDPLFILYTSGSTGAPKGVQHCSGGYLVWASMTHEYVFDYHQDDIFWCTADVGWVTGHSYIVYGPLANGATTLMFEGIPTYPDASRFWQVCEKHKVNQFYTAPTAIRALMGQGNKYVEKC

SEQ ID NO: 193246 - protein, 281 aa, Unknown
  Bacterial polypetide isolated from the Sargasso Sea
MSSLRTLFLAGEPLDEPTASWIAGALGKPVIDNYWQTETGWPMLAIPRGVEALPTKFGSPGVPSAGFNLTLRNELTGEPCPPGEKGVLALGYPLPPGCMSTVWGDDKRFISTYWSSVPNQQVYSTFDWGIQDGDGYVTILGRTDDVINVAGHRLGTREIEEALSSHAAVAEVAVVGVNDALKGQAAMAFVVLRDPQAYPDDKARAKLETELTATVDRHLGAIARPARVVVVSMLPKTRSGKLLRRAIAALAEGREPGDLPTIEDPSALQQVREALGDSTKH

SEQ ID NO: 193247 - protein, 313 aa, Unknown
  Bacterial polypetide isolated from the Sargasso Sea
MTEKLIESILNESRSFAPSKKFIKQANINNEEAERLKEEVSHNHIEYWANLARTHLHWFLPFNNILDESNAPNYEWFNDGEINASFNSLDINANKNPEKTAIIFETEDGNSERITYKDLLLRTSQFANGLKKLGVVPMDRVVIYMPMCPEAVIAMQACARIGAIHSVVFGGFSSNALKDRIEDAQSKIVITADGAYRGGSVIPLKQATDEAVTNSSHKVKNVVVFERTGEKIEFDQERDIWWTDLISDCPSHCDPEPLNAEHPLFILYTSGSTGKPKGIQHSTAGYILHAKTTFSWVFDIKEDDVFWCTADVG

SEQ ID NO: 193248 - protein, 662 aa, Unknown
  Bacterial polypetide isolated from the Sargasso Sea
LQVRFITSQFTFTFSLPILMKMKKYSVPKNFNSSIGHNNLDNYQSLRKNAKQDSNSYWESVAERIDWFDKWTTINNTDYSKAHIEWFSNGKLNASYNCIDRHIENGLGEKIALIWQSNDPTISTNVSYNELLKKVSLFANGLKRTGINKGDRVCIYMQMIPEAIIAMLACARIGAVHSVVFGAFSSDALKNRINDSECKLLITQDNGVRGLKFDIPMKENADKIADECPSLKTVVMVERSENDMFMKEGRDITWNQFIDGCSSECPPEVMDAEDPLFILYTSGSTGKPKGVMHTTGGYLVYASHTHELVFDYHQDDVYWCTADIGWITGHSYIVYGPLSNAATQVIFEGVPNYPDFGRFWQIVEQHKINVFYTAPTALRALMKEGDDWVTKYDLSSLKVLGTVGEPIKSPEWHWYFNVIGNEKCPIVDTWWQTETGGILMSPIPGCVPTKPGSATLPLPGIIPEILDEEGKVITERNTTGYLVMTQSWPGQMRTVYGDHQRFIDTYFSQAPGNYFTGDGAYIDDDGYFWITGRVDDVLNVSGHRIGTAEVEGAIGAASGVAEAAVIGYNHEIKGEGIYAFVTLMTGVDSSEEIKKDILDTVTKIIGPHAKPSVIQFCSGLPKTRSGKIMRRILKKIAQNETKDLGDISTLADPSVIDSLLEK

SEQ ID NO: 193249 - protein, 389 aa, Unknown
  Bacterial polypetide isolated from the Sargasso Sea
MSEKIENLLGENRTFDPPSSIVENANATKEWFDLAEEDRLAYWQKQALERITWYKEPTEILDDSNAPFYQWFKDGELNLSYNCLDRHLETDGDRVAFYWEGEPGDTQEITYQDLYERVCKLSNGLKELGVKKGDRIAIYLGMTPEIVISMLACARIGAVHSVVFGGFSAEALADRINDAEAKVVITADGAWRRGDIVPLKKNVDDSLKLTDHIESVVVVKRTNNDVDMVEGLDYWYHDLVDKQDATCEPEVMNAEDMLYILYTSGTTAKPKGIVHTQAGYLTGVTTTHSAVFDVKEDDIYWCAADCGWVTGHSYIVYGPLANKTTSVMYEGAPNAPDEKRLWSIVEKYKVNIFYTAPTAIRAFMKWGVEHPQAHDLSSLRLLGTVGEPI

SEQ ID NO: 193250 - protein, 481 aa, Unknown
  Bacterial polypetide isolated from the Sargasso Sea
MFACMRIGAIHSVVFGGFSPEAISSRILDADCEYVITADEGIRGGKTIPLKFSVDKALEKCPKIKKVIVFQYTKTDVNWNNKLDISYEELVTNQSIECECTELKAEDPSFILYTSGSTGKPKGVLHTTAGYLLGANLSFKYIFGIRDDDIHWCTADVGWITGHTYILYGPLSNGITTVMFEGVPTYPDPSRFWRVCDQHKVNIFYTAPTAIRALIAHGDKYLESTSRDSIRVLGTVGEPINPDVWEWYYQKVGKSNCEVVDTWWQTETGSVLISPIAGVTPKKPGSATLPFFGVKPSLVDSDGKELEGDAKGNLCIDSSWPSQIRTVYGDHKRMTDTYFSQYEGKYFTGDGAKRDKEGCYWVTGRVDDVLNVSGHRIGTAEVESAIVNHVDVAEAAVVGIEHDIKGQAIYAYVILKDNDKDKKIINFEILEEVSKIIGKIAKPEVIQFTRDLPKTRSGKIMRRILRKIANNEFENLGDTTT

SEQ ID NO: 193251 - protein, 297 aa, Unknown
  Bacterial polypetide isolated from the Sargasso Sea
IFYTAPTAIRAFMKSGREIPDKYNLESLRLLGTVGEPINPEAWMWYKDVIGKDKCPIVDTWWQTETGGVMISPLPGVVATKPGSATFPLPGIEVEIVDKNGDKVEENEGGYLIIKKPWPGMMRTIHGNSERYLESYWEYISFKGEKNVYFAGDGARIDEDGYIWIMGRVDDVISVSGHRLGTMEIESALVSHKSVAESAVVGKKDDLKGEVIVAFVSLEKDVNGSSELVEDLKKHVVNEIGIIAKPEKIIISDSLPKTRSGKIMRRILRSLAAGEKISGDISTLEDSSVLEKLKELS

SEQ ID NO: 193252 - protein, 276 aa, Unknown
  Bacterial polypetide isolated from the Sargasso Sea
KKTSRKSLKLLGTVGEPINPEAWMWYYKTVGNSKCPIVDTWWQTETGGIMIAPQTGAIPLKPGSATKPFYGIKPVLVDKNGKEIKGAGEGRLCIAQSWPGQMRTVYGDHQRFIDTYFSQFNGKYFTGDGCRRDKDGYYWITGRVDDVIIVSGHNLGTAEIESAFVAHPKVAEAAVVGYPHDIKGNGLYCYVTLNAGEIETGELERDLKLWVRKQIGPLATPDLIHFTPGLPKTRSGKIMRRILRKIAANEHGQLGDTTTLADPSVVDSLVDNRKNI

SEQ ID NO: 193253 - protein, 270 aa, Unknown
  Bacterial polypetide isolated from the Sargasso Sea
MSGKYRQIYDSSIKSKENFWKEVSEDIFWYKKPTKILNSSNPPFYKWFEDGITNTCYNALDFHIDKGRGDKTAIIYDSPITGTKYKLTYKELREKVSVFAGALKNQGISKGDRVIIYMPMIPQAVVAMLACGRIGAIHSVVFGGFAANELASRIDDSKAKIIISASCGYEPGRTVHYKPLLNKAIEIANHKPEKCIIWQREKDKADLDPKIDIDWMDALKEAKPTECEKMNSNDYAYILYTSGTTGTPKGNRKRHWWSYCCFEMDNEKHL

SEQ ID NO: 193254 - protein, 421 aa, Unknown
  Bacterial polypetide isolated from the Sargasso Sea
MVNERDIDWTHAMQTAQAADPTPLNGNDPLYILYTSGTTGAPKGVVRENGGHAVAMNYSMKTVYGMEPGEVFWAASDIGWVVGHSYIVYAPLMYRCATVLYEGKPVRTPDATAFWRVVEEYKVSALFSAPTAFRAIKKEDPNAEGFKKYNTSSLKRLFLAGERLDPPTYNWLKEKTQLPVLDHWWQTETGWAIACNPVGIETLTTKPGSSTVPTPGFDVRILDMDGNECAANEQGAVVIKLPLPPGCLPSIWQDTARFKASYLSEYEGYYLSGDGGYIDEDGYLFIMGRTDDVINVAGHRLSTGEMEEIVAAHPAVAECAVFGVNDPLKGQLPMGMIVLKNDFTGSSEEVEKALVASVRNQIGAIACLKNIVSVERLPKTRSGKILRKNLRQLIDGDELQIPSTIDDASIFEEINQQLTMR

SEQ ID NO: 193255 - protein, 338 aa, Unknown
  Bacterial polypetide isolated from the Sargasso Sea
MPKKKKSKKKKTKRTKKKKSSKKRRKIKRVSKTKRSTAKRSEKKNIDKSSSNDQVIKTKPEWVKRSLANKAQYQKKYSDSIKNNNSFWKKEGKRITWIKPYKKIKDVKYSKDEVRIKWFEDGTLNASANCIDRHLKDKKDKTAIIWVGDDPKDTQKISYKQLHQKVSKAANGLKKLGIQKGDRVTIYLTMIPELAILMLACARIGAVHSIIFGGFSAESISGRVNDCKSEYIITADEGVRGGKTIPLKATTDEALSNCPDVKKCIVVKRTGNYVYWDQDRDVWYHDLIKDVPNYCEPEEMNAEDPLFILYTSGSTGKPKGVLHTTGGYMVYASMTHQY

SEQ ID NO: 193256 - protein, 451 aa, Unknown
  Bacterial polypetide isolated from the Sargasso Sea
ARIGAVHSIIFGGFSPDSISGRINDCESDYVITADEGVRGGKTIPLKSITDEALQSCPNVKKCIVVKRTGTKKIDWFNDRDVWYHKMTSKVSAKCEPEEMNAEDPLFILYTSGSTGKPKGVLHTTGGYIVYASMTHQYIFNYKPKDIYWCTADIGWVTGHSYIIYGPLANGATTIMFEGIPTYPDTSRWWQIVDKYKVNIFYTAPTAIRALMREGDKPVKKTSRKTLKLLGTVGEPINPEAWEWYYKTVGDSRCPIVDTWWQTETGGILISPQTGAIDLKPGSATKPFYGIKPEILDKDGKVLKGEAQGRLCISQSWPGQMRSVYGDHQRFIDTYFSQFDGKYFTGDGCRRDKDGYYWITGRVDDVIIVSGHNLGTAEIESAFVAHPKVAEAAVVGYPHDIKGNGLYCYVTLNAGEKSTLDLERDLKLWVRKQIGPIATPDLIQLLQDSKD

SEQ ID NO: 193257 - protein, 140 aa, Unknown
  Bacterial polypetide isolated from the Sargasso Sea
YYWITGRVDDVIIVSCHNLGTAEIESAFVAHPKVAEAAVVGYPHDIKGNGLYCYVTLNAGENETGELERDLKLWVRKQIGPLATPDLIHFTPGLPKTRSGKIMRRILRKIAANEHGQLGDTTTLADPSVVDSLVENRKNI

SEQ ID NO: 193258 - protein, 282 aa, Unknown
  Bacterial polypetide isolated from the Sargasso Sea
LGDEPVNKCDLSSLRILGSVGEPINPEAWKWYHEIVGKKKCPVIDTWWQTETGGILISPISGTTPLKPGSATLPLFGVTPLIVDNDGNELKGACEGNLCIKTSWPGMMRTVYRDHKRFRDTYFSSFKGKYFTGDGCKRDEDGYYWITGRVDDVINVSGHRLGTAEVESALVLHKNVSEAAVVGFPHDIKGQGIYAYVTLMTGQEYNESLKKELISWVRSVIGPIAAPDVIQWAPNLPKTRSGKIMRRILRKVACKEEESIGDTSTLNDPNVVSELVNNRGKN

SEQ ID NO: 193259 - protein, 397 aa, Unknown
  Bacterial polypetide isolated from the Sargasso Sea
MNAEDMLYILYTSGTTAKPKGIVHTQAGYLTGVTTTHSAVFDVKEDDIYWCAADCGWVTGHSYIVYGPLANKTTSVMYEGAPNAPDEKRLWSIVEKYKVNIFYTAPTAIRAFMKWGVEHPQAHDLTSLRLLGTVGEPINPEAWMWYHENIGNESCAIVDTWWQTETGSIMITPLPGITSTKPGSACGPMPGIDAVVVDENGNEVSKGEGGYLAIKTPWPSMLRTVFGDEKRYIDTYWSKYDGMYFAGDGAKYDDDGYFWLLGRVDDVMNISGHRISTAEVESALVAHESVAEAAVIGRADEISGEAIAAFVTLIGGFEGNEDLISTLRQHVSDKIGPIAKPKSIVITNDLPKTRSGKIMRRLLKDISEERKLGDVTTLANADIVSELQTRSSESSDE

SEQ ID NO: 193260 - protein, 221 aa, Unknown
  Bacterial polypetide isolated from the Sargasso Sea
VTTTKPGSATHAIPGVVVEVVDDAGNKVERGGGYLTITEPWPSMLRGIWGDPERYKETYWSEYPDRYFAGDGAKIDDDGYLWLLGRVDDVMNVSGHRISTTEVESALVDHPSVAEAAVVGATDDTTGQAIVGYCILRGGNEPSDELREEIRQHVATKLGAIARPKAVVLVPDLPKTRSGKIMRRLLRDVAEGRKLGDTTTLADESVVDEIRDRAAEAPQED

SEQ ID NO: 193261 - protein, 485 aa, Unknown
  Bacterial polypetide isolated from the Sargasso Sea
VFGGFSPESLKDRILDSDCESVITADEGLRGSKKIPLKNNVDTALEDCPNVHSVFVVKRTDADVDWNDKRDVDYQEIIDSVPSECEAEPMDSEDPLFILYTSGSTGKPKGVLHTTGGYLLQASISHKLVFDYKDDEIYWCTADVGWVTGHSYIVYGPLANAATTLMFEGIPTYPKASRFWEVIDKHKVNIFYTAPTALRSLMAQGDEYVKSSSRNSLRVLGTVGEPINPEAWEWYYKVVGDSKCPIVDTWWQTETGAMMITPLAGSTPLKPGSATKPFLGIEPALLDEDGKEIEGEGSGNLVIKSTWPSQIRSVYGDHQRCIETYYSMYPGYYTTGDGARRDKDGYYWITGRVDDVLNVSGHRLGTAEVESALVLHETVAEAAVVGYEHEIKGQGIYCYVTLMLGEDPSEDLKNDLIQLVAKEIGAIAKPDIIQWAPGLPKTRSGKIMRRILRKIASNEVNDLGDTTTLADPSVVEELIHNRENK

SEQ ID NO: 193262 - protein, 162 aa, Unknown
  Bacterial polypetide isolated from the Sargasso Sea
HIFFSFDGKYFTGDGCRRDKDGYYWITGRVDDVIIVSGHNLGTAEIESAFVAHPKVAEAAVVGYPHDIKGNGLYCYVTLNVGEKSTLDLERDLKLWVRKQIGPIATPDLIQFSPGLPKTRSGKIMRRILRKIAANEHDQLGDTTTLADPSVVKSLVENRKNT

SEQ ID NO: 193263 - protein, 341 aa, Unknown
  Bacterial polypetide isolated from the Sargasso Sea
MQSKYKEIYDFSIGKKENFWKEVAENIFWYKKPSKILNSSNPPFYKWYEDGTTNTCYNAIDFHIDNGRGEKLAIIYDSPITGSKKTFTYNQLKEKVSLFAGALKNQGIKKGDRVIIYMPMIPEAVIAMLACGRIGAIHSVVFGGFAANELASRIDDSKAKIIVSASCGYEPGRVVEYKPLLNKALEIAKHKPNKCIIFQREKNKAALDSKMDITWEDSLKNAKPENCVEMNANDYAYILYTSGTTGLPKGIVRDIGGHIVALKWTMKNIYNIDQDDVWWSASDIGWIVGHSYIVYAPLFYGCTTILFEGKPVGTPDAGVFWRVISEHKVKSLFTAPTAIRA

SEQ ID NO: 193264 - protein, 299 aa, Unknown
  Bacterial polypetide isolated from the Sargasso Sea
MPRKKKVKKKVISKKPKETIYKTKKEWISKATVNKSQYTKKYNESIKDNDGFWKKEGKRINWIKPYKKIKDVKYSKDDVHIKWFYDGTLNASANCIDRHLKNNANKTAIIWVGDDPKVQKKITYKELHKEVSKAANGLKNLGVQKGDRVTIYLTMIPELAYTMLACARIGAVHSIIFGGFSPDSISGRINDCESDYVITADEGVRGGKTIPLKSITDEALQSCPNVKKCIVVKRTGTKKIDWYNDRDVWYHKMTSKVSAKCEPEEMNAEDPLFILYTSGSTGKPKGVLHTTGGYMVYAS

SEQ ID NO: 193265 - protein, 363 aa, Unknown
  Bacterial polypetide isolated from the Sargasso Sea
FGGFSAEALADRINDAEAKVVITADGAWRRGDIVPLKQNVDDSLKLTDHIESVIVVKRTENEVTMVDGRDYWYSELVDKQEADCEPEVMNAEDMLYILYTSGTTAKPKGIVHTQAGYLTGVTTTHSAVFDVKEDDIYWCAADCGWVTGHSYIVYGPLANKTTSVMYEGAPNAPDEKRLWSIVEKYKVNIFYTAPTAIRAFMKWGVEHPQAHDLTSLRLLGTVGEPINPEAWMWYHENIGNESCAIVDTWWQTETGSIMITPLPGITSTKPGSACGPMPGIDAVVVDENGNEVSKGEGGYLAIKTPWPSMLRTVFGDEKRYIDTYWSKYDGMYFAGDGAKYDDDGYFWLLGRVDDVMNISGHRI

SEQ ID NO: 193266 - protein, 423 aa, Unknown
  Bacterial polypetide isolated from the Sargasso Sea
MFTWDNDRDVWYHELIKDVSNVCEPEEMSAEDPLFILYTSGSTGKPKGVLHTTGGYMVYASMTHQYIFNYKPKDIYWCTADIGWVTGHSYIIYGPLSNGATTMMFEGVPNYPDSSRWWQIVDKYKVNTFYTAPTAIRALMREGDQPVNKTSRKSLKLLGTVGEPINPEAWMWYFNTVGNSKCPIVDTWWQTETGGILIAPQTGAIPLKPGSATKPFYGIKPVLVDKDGKEIKGQGEGRLCIAQSWPGQMRTVYGDHQRFIDTYFSQFDGKYFTGDGCRRDKDGYYWITGRVDDVIIVSGHNLGTAEIESAFVAHPKVAEAAVVGYPHDIKGNGLYCYVTLNAGESETGDLERELKLWVRKQIGPLATPDLIHFTPGLPKTRSGKIMRRILRKIAANEHGQLGDTTTLADPSVVDSLVDNRKNT

SEQ ID NO: 193267 - protein, 642 aa, Unknown
  Bacterial polypetide isolated from the Sargasso Sea
MTQDIYNPNPGFSNPHINDFDEYLSLYKESIENPEKFFGDLAKENISWIEDFKEVHNSEFQETKWFVGGKTNITLNCIDRHLEKNGDKVALIWEGDEPGNSKEITFKELHSEVCRFANILKTLQIKKGSRVCIYMPMIPEAAFAMFACARVGAIHSVVFGGFSPESLKDRILDADCRIVITADEGVRGGKKVPLKDNVDEALINCPDVKNVIVVNRTGGKINWFEDRDLWFHELKDKVDDVCEPEPMDSEDPLFILYTSGSTGKPKGVLHTTAGYLLGAHISFKYLFGFNENDKYWCTADVGWITGHTYILYGPLSNGATSLMFEGVPTYPTASRCWEICDEHEINIFYTAPTAIRALMSLGDEFVGSTSRKSIKVLGTVGEPINPEAWDWYYSVVGNKSCEVIDTWWQTETGSVLISPIAGITPTKPGSATLPFFGVRPELYDENGIQQSGEASGNLVIESSWPSQIRSVYNDHQRMIDTYFSTYSNIYFTGDGAKRDEDGYFWITGRVDDVLNVSGHRLGTAEVESALVLHPVVAEAAVVGFEHPIKGQGIYAFVTLMVGEEFSDKLSAELRNFVGKEIGPIAKPDLIQNAPGLPKTRSGKIMRRILRKVAEGDFENLGDTTTLAEPAVVSDLINNKKSL

SEQ ID NO: 193268 - protein, 575 aa, Unknown
  Bacterial polypetide isolated from the Sargasso Sea
MYEESITSPEKFWEKHGNRIDWMKPYTKIRDVSYNKEDLHIRWYEDGTLNASYNCLDRHLETKGNNTAIIWEGDDPNESKHISYNELHEQVCKFSNVLINAGAKKGDRITIYMPMIPEATVAMLACTRIGAIHSVVFGGFSPDALAGRIEDCNSTIIITADEGIRGGKTIPLKSNTDEAISKAKMCKTTIVVKRTGAEINWIDGQDVWYHEEMEKASANCPPAEINAEDPMFILYTSGSTGKPKGVLHTTGGYMVYASMTHHYVFDYQENEIYWCTADVGWVTGHSYIVYGPLSNGATTLMFEGVPNYPTVSRFWEIVDKHKVNIFYTAPTAIRALMAEGSEPVKKTRRDSLRILGSVGEPINPEAWNWYNNVVGDGRCPVVDTWWQTETGGILITPLPGATDTKPGSATKPFFGILPVIVDSDNKELTGATEGNLCINMSWPGQMRTVFGDHQRFIDTYFSTFPGRYFSGDGCRRDEDGYYWITGRVDDVINVSGHRMGTAEVESALVAHTDVAEAAVVGYPHDIKGQGIYAYVTVNIDVKTSEELLTELKQWVRKEIGPIATPDLIQFSPGSS

SEQ ID NO: 193269 - protein, 629 aa, Unknown
  Bacterial polypetide isolated from the Sargasso Sea
MSYQKEYRESIENPEAFWRRQAELITWYEKPKSILSQDEKGFYHWFKGGKLNTSYLALDFHVENGRAEQAALIYDSPVTETVRSYTYRELLDEVARFAGVLQNQGVEKGDRVIIYMPMIPEAVVAILACARLGAIHSVVFGGFAPNELAIRIDDAKPKALVTASCGIEFTNIIEYKPLVDEALHISSQTPEIVILLQRSQARASMQAGRDFDWNDLMSSANPADPVPVDATDPLYILYTSGTTGLPKGVIRENGGHAVALKYSMKAIFNTNPGEVYWAGSDVGWVVGHSYIVYAPLIHGCSTILYEGKPVRTPDAGAFWRVLDEHRVNTFFTAPTAFRAVKKEDPEAKLKQQYDISNLRNLFLAGERLDPPTYDWLEGIMHCPVIDHWWQTETGWPMCSNPMGLEPQPVKVGSATFPVPGYDIQVLDDEGKACDPGTTGNIVVKLPLPPSCFPSLWNDDERFRKSYLSQFPGYYQTGDGGIIDEDGYVFVMGRVDDVINVAGHRLSTGQMEELIGSHPGVAECAVVGIDDELRGQVPVGFAVLKDGVEMNHQDLEKELVSIIRKEIGAVACFRKSALVKRLPKTRSGKILRKTIRQLATTPEVPIPPTIDDPAILDEIRDAMQTSGIAK

SEQ ID NO: 193270 - protein, 321 aa, Unknown
  Bacterial polypetide isolated from the Sargasso Sea
IMYEGIPTYPDSSRWWQIIDKFKVNIFYTAPTAIRALMREGDKPVKKTSRKSLKLLGTVGEPINPEAWMWYYKVVGDSKSPIVDTWWQTETGGILISPQTGAINLKPGSATKPFYGIKPVIVDEKGNTLKGECEGRLCIAQSWPGQMRTVYGDHQRFIDTYFSQFDGKYFTGDGCRRDKDGYYWITGRVDDVIIVSGHNLGTAEIESAFVAHPKVAEAAVVGYPHDIKGNGLYCYVTLNVGEKEDGDLERELKLWVRKQIGPLATPDFIHFSPGLPKTRSGKIMRRILRKIAANQHDQLGDTTTLADPSVVQSLVDNRKNT

SEQ ID NO: 193271 - protein, 540 aa, Unknown
  Bacterial polypetide isolated from the Sargasso Sea
IFWYKNLSKILNSSNPPFYKWFEDGITNTCYNALDFHIDKGRGDKTAIIYDSPITGTKSKFSYKELRDKVSVFAGALKNQGISKGDRVIIYMPMIPEAVIAMLACGRIGAVHSVVFGGFAANELASRIDDSKAKIIVSASCGYEPGRTVHYKPLLNKAIEIAKHKPNKCIIFQREKDKAELNSKIDITWEEALKGAKPTECEKMSANDYAYILYTSGTTGLPKGIVRDIGGHIVALKWTMKNIYNINPDDVWWSASDIGWIVGHSYIVYAPLFHGCTTILFEGKPIGTPDPGVFWRIISEHKVKSLFTAPTAIRAIKKEDPDGKFFKKYDLSKFDTLFLAGERADPDTIKWFEKLSNAPVIDHWWQTETSWAISANCAGIEKFPTKYGSAFKPVPGYDLKVLNSEGKEAKRGQMGDIVVKLPLPPGTFPTLWNADERYKKVYMSTYPGYYQTYDAGHIDEDGYVWIMSRTDDIINVAGHRLSTGAIEEVLAEHKNVAECAVIGIADKLKGQLPIGLIALKAGVNRDNKENTKECVALVRR

SEQ ID NO: 193272 - protein, 188 aa, Unknown
  Bacterial polypetide isolated from the Sargasso Sea
MSKNFKSIYQDSIDNPEAFWQGVSDDIFWFKKPTKILNKSKPPFYKWFEDGVTNTCYNALDLHIDQGKGDKTALIYDSPITNTKAKFTFKELKDKVSKFAGALVNQGVKKGDRVIIYMPMIPEAVVAMLACGRIGAIHSVVFGGFASNELASRIDDSSAKVLITASCGFEPGRIVEYRPLVDGALKLA

SEQ ID NO: 193273 - protein, 636 aa, Unknown
  Bacterial polypetide isolated from the Sargasso Sea
MKFDIDSFVNPNLKDFLEYQSLYNDSVKDPSNFFLKQALKEIDWIKEPTKGSTGSLSSPKWFEDGMLNISYNCIDRHAENHPEKTAIIWQGDEREKNENISYIQLQKQVCKLANGLKSIGVSKGDRVCIYMPMVPQAAYAMFACMRIGAIHSVVFGGFSPEAIKSRILDADCNYVITANEGIRGGKNIPLKDSVDEALKDCPNVKKSIVLKYTDTEISWNDEIDIWYHELVDQQEDFCECEEMAAEDPSFILYTSGSTGKPKGVLHTTAGYLLGATLTFKYIFGYSDGDKYWCTADVGWITGHTYILYGPLSNGATTLMFEGVPTYPDPSRFWEVCDQHEINIFYTAPTAIRALIAKGEEYLENSKRDSLKVLGTVGEPINPEVWQWYFERVGKSKCEVVDTWWQTETGSVLISPIAGITPKKPGSATLPFFGIEPSIVDVNGTILEGEAKGNLCINSSWPSQIRTVYGDHERMLQTYFSQYPEKYFTGDGARRDKDGYYWVTGRVDDVLNVSGHRIGTAEVESAIVNHPQVAESAVVGVEHEIKGQAIYAYVILRKTKEDPNKLESEIKDEVAKIIGKIAKPDFIHFTRDLPKTRSGKIMRRILRKIANNDTENLGDVTTLADPKIVEELMENKV

SEQ ID NO: 193274 - protein, 516 aa, Unknown
  Bacterial polypetide isolated from the Sargasso Sea
YMPMIPEAVIAMLACGRIGAIHSVVFGGFASNELASRIDDSKAKILITASCGFEPGRTVEYRPLVDGALKLAKHKVEKVIFFQREGNEVKLNSPLEISWEESLINAKDKDCVEIGANEFAYILYTSGTTGIPKGIVRDVGGHIVALKWTMKNIYNINENDVWWSASDIGWIVGHSYIVYAPLFKGCTTVLFEGKPVGTPDAGVFWRIISEYKIKSLFTAPTAFRAIKKEDPDGKFFSKYDLSSFESLFLAGERADPDTLKWAENLLNVPVIDHWWQTETSWAISSNCTGIEMQKTKYGSACKAVPGYDVKIIKPDHSIADPNEMGDIVVKLPLPPGTFPTLWNADKRYQENYMSNYKGYYQTYDAGHIDEDGYIWIMSRTDDIINVAGHRLSTGAIEEVLSEHQSVAECAVLGIADKLKGQLPIGLVVLKTGVEKDNDTVSKECIKMVRDKIGPVAAFKVVIVIKRLPKTRSGKILRGTIRKIADGEDYKMPATIDDPAILGEITQSLIDNKILTK

SEQ ID NO: 193275 - protein, 632 aa, Unknown
  Bacterial polypetide isolated from the Sargasso Sea
MSGKYEKIYDSSIKNREKFWKEVSNDIFWYKKPSKILNSSNPPFYKWFEDGVTNTCYNALDFHIDNGRGDKTAIIYDSPITGVKYKLSYKELREKVSAFAGALKNQGISKGDRIIIYMPMIPQAVVAMLACGRIGAIHSVVFGGFAANELASRIDDSKAKIIISASCGYEPGRTVHYKPLLNKAIEIANHKPDKCIILQREKDKAELDPKKDIDWMEALKGAKPAECEKMNANDYAYILYTSGTTGTPKGIVRDIGGHIVALKWTMKNIYNIDQDDVWWSASDIGWIVGHSYIVYAPLFYGCTTVLFEGKPVGTPDAGVFWRIISEYKVKSLFTAPTAIRAIKKEDPDGKFFKKYDLSKFDTLFLAGERADPDTIKWFEKLSNAPVIDHWWQTETSWAISANCAGIEKFPIKYGSAFKPVPGYDLKVLNSEGKENKAGQMGDIVVKLPLPPGTFPTLWNADERYKKVYMSTYDGYYQTYDAGHIDEDGYVWIMSRTDDIINVAGHRLSTGAIEEVLAEHKNVAECAVIGIADKLKGQLPIGLIALKAGVDRDHKEITKECVALVREKVGPVAAFKLAIVVKRLPKTRSGKVLRGTVRKIADGETYKVPPTIDDPAILDEIKEDLKDNNVLKV

SEQ ID NO: 193276 - protein, 445 aa, Unknown
  Bacterial polypetide isolated from the Sargasso Sea
TDEALMQCPDVKKCIVVKRTGNYVHWNNERDVWYEDIIKKVSNHCEPEEMNAEDPLFILYTSGSTGKPKGVLHTTGGYMVYASMTHQYIFNYKPKDIYWCTADIGWITGHSYIIYGPLSNGATTIMFEGIPTYPDNSRWWQIVDKFKVNIFYTAPTAIRALMREGDKPVKKTSRKSLKLLGTVGEPINPEAWMWYYKTVGDSKCPIVDTWWQTETGGILISPQTGAIDLKPGSATKPFYGIKPVIVDKNGKALKGECQGRLCIAQSWPGQMRTVYGDHQRFIDTYFSQFDGKYFTGDGCKRDKDGYYWITGRVDDVIIVSGHNLGTAEIESAFVAHPKVAEAAVVGYPHDIKGNGLYCYVTLNAGETETGDLERELKLWVRKQIGPLATPDLIHFTPGLPKTRSGKIMRRILRKIAANEHSQLGDTTTLADPSVVDSLVENRKNI

SEQ ID NO: 193277 - protein, 631 aa, Unknown
  Bacterial polypetide isolated from the Sargasso Sea
MGNNDSSIRASAKNDYISFWDNCAKSLSWFKPWTKTLQWDPPFARWFVGGKINASYNTLDIHQGSKSEKPAILWEGEDGTDRKITYKEMFIEVKKLANVLKSLGVKKGDRVTIYLPMIPELPISMLACARIGAIHTVVFSGFSSKSLSDRVEDSQSKIIITADGGYRKGKIINLKEIVDDSASSVQFVKNVIVYQRTGQKIQLNEKDLLWHEVMQNSSEECDAEILDSTDSLYILYTSGTTGKPKGVLHGIGGYLTHLYSTYKWAFDIKDTDVYFCTADIGWVTGHSYVVYGPLLHGATQVMYEGAPDHPDSSRMWDIIQKYGVTIFYTTPTALRMLMKFGDDIPNSFNLSTLRLLGTVGEPINPEVWKWYFNVIGKKKCPIIDTWWQTETGGMLISPLPGIETIPLKPGSATLPIPGLDIEVVDETGNEVEPETKGSLIIKTPWPGMLLGLWKDTEKYKDVYWSKFESLYYPGDYAIKDSDGYLWLLGRSDDVLKVAGHRIGTAELESSIVSHNDVAESAVCGIPDEVKGESIIAFVMLKESVSTSEEQLRSELRETIRTQIGPIATPSQFYFVNKLPKTRSGKIMRRLLKAIAKNEKIGDVSTLEDGAAVNEIQSAFQELQKNIENQKK

SEQ ID NO: 193278 - protein, 276 aa, Unknown
  Bacterial polypetide isolated from the Sargasso Sea
MVFKVSEKWSKQAYVNKSQYEKKYKFSIKNNDDFWAKEGKRINWIKPYSKIKDVKYSKEDVHIKWYYDGTLNASANCIDRHLEKKANKPAIIWVGDDPSDSKKISYKELHKNVCKVANGLRSLGIQKGDRVTIYLTMIPELAYTMLACTRIGAIHSIIFGGFSPDSIATRINDCESDYVITADEGVRGGKIIPLKKIADEAMMQCPNVKKCVVVKRTGNPTNWDDERDISYDDMIKNVSDKCPPEEMNAEDPMFILYTSGSTGKPKGVLHTTRKVI

SEQ ID NO: 193279 - protein, 342 aa, Unknown
  Bacterial polypetide isolated from the Sargasso Sea
GWVTGHSYIIYGPLSNGATTIMFEGIPTYPDSSRWWQIIDKYKVNTFYTAPTAIRALMREGDGPVKKTSRKSLKLLGTVGEPINPEAWMWYYKTVGDKKCPIVDTWWQTETGGILISPQPGAINLKPGSATRPFYGIKPAIVDESGKVLKGACKGRLCMTQSWPGQMRTVYGDHQRFIDTYFSQFDGKYFTGDGCRRDKDGYYWITGRVDDVIIVSGHNLGTAEIESAFVAHTKVAEAAVVGFPHDIKGNGLYCYVTLNSGEKPDGDLERELKLWVRKQIGPIATPDHIQFSSGLPKTRSGKIMRRILRKIAANEYKDLGDTTTLADPTVVESLIDNRKNKS

SEQ ID NO: 193280 - protein, 385 aa, Unknown
  Bacterial polypetide isolated from the Sargasso Sea
MDYHSIYKSWQADPESFWMEAAEGIDWDQKPTFALNESNEPLFEWYTDSYVNACFNAVDRHVEKGQGDQTAIIYDSPITGKKKHISYAQLLEKTSLLAGSLLKKGITKGDRVIIYMPMIPEAIVAMLACARIGAIHSVVFGGFASHELAVRIDDAQPKIILAASCGIEPGRVIEYKPLIDGAIELSEHKPESVVILQRPEAAASLIPGRDFDWNEFQLNVEPTNCVMVEGNHPAYILYTSGTTGAPKGVVRPTAGHLVALHWSMKNIYNIDPGDVFWAASDVGWVVGHSYICYAPLIHGNTTVLFEGKPVGTPDAGTFWRVISEHKVKAFFTAPTAFRAIKREDPEGKFKSQYDLSCLQALFLAGERADPDTINWAKKPIGRTSD

SEQ ID NO: 193281 - protein, 262 aa, Unknown
  Bacterial polypetide isolated from the Sargasso Sea
GEPINPEAWMWYYKTVGDSRCPIVDTWWQTETGGILISPQTGAINLKPGSATKPFYGIKPVIVDKKGNVLKGECEGRLCIAQSWPGQMRTVYGDHQRFIDTYFSQFDGKYFTGDGCRRDKDGYYWITGRVDDVIIVSGHNLGTAEIESAFVAHPKVAEAAVVGFPHDIKGNGLYCYVTLNVGEKEDGDLDRELKLWVRKQIGPVATPDFIQFAPGLPKTRSGKIMRRILRKIAANQHDQLGDTTTLADPSVVESLVNNRKNI

SEQ ID NO: 193282 - protein, 641 aa, Unknown
  Bacterial polypetide isolated from the Sargasso Sea
MSENNIYKPISTNPHIKDIDEYHKLYKESIDNSEAFFQKLAKENISWINDFNEVQNDGFANTKWFIGGKTNVSFNCIDRHLDENSNKTALIWEGDDPNESKQFTYKELHLQVCKFANVLKELGVKKGSRVCIYMPMIPEAAFAMLACTRIGAIHSVVFGGFSPESLKDRILDADCEIVITADEGVRGGKKVPLKSNVDQALVNCPNVRTALVIKRTGGDIDWNNERDIWYEDLVKNVGSECDPEPMDSEDPLFILYTSGSTGKPKGVLHTTAGYLLGAHISFKYLFGIQPTDIYWCTADVGWITGHTYILYGPLSNGTTTIMFEGIPTYPSSSRCWEICDKYKVNVFYTAPTAIRALMSQGDDPVLKTKRNSLRVLGTVGEPINPEAWEWYYKVVGNSSCDVIDTWWQTETGSVLISPIAGITPMKPGSATLPFFGVKPALYDEQGKPLEGANSGNLVIEKSWPSQIRSVYGDHDRMISTYFETYKDLYFTGDGARRDEDGYFWITGRVDDVLNVSGHRLGTAEIESALVLHDKVAEAAVVGFEHPIKGQGIYAFVTLMKEEEFNEGLRTELIQFVSKEIGPIAKPDLIQNAPGLPKTRSGKIMRRILRKIAEGDFSNLGDTTTLAEPAVVESLVENSQKL

SEQ ID NO: 193283 - protein, 163 aa, Unknown
  Bacterial polypetide isolated from the Sargasso Sea
TYFATFPGRYFTGDGCRRDEDGYYWITGRVDDVINVSGHRMGTAEVESALVAHSLVAEAAVVGYPHEIKGQGIYAYVTLNVGVNPDEGLRKELVQWVRKEIGPIASPDLIQWAPSLPKTRSGKIMRRILRKIAENDFGSLGDTSTLAEPAVVEDLIENRENRS

SEQ ID NO: 193284 - protein, 635 aa, Unknown
  Bacterial polypetide isolated from the Sargasso Sea
MTDVGQQLHQTSIANKQAFWQQAAKALDWVTPSKQILDESEAPFYHWFSDGELNTCYNAIDRHVLAGRGEQIAIHYVSPVTETEYSITYHELQAQVARLAGYLRTMGVTKGDRVVIYMPMVPETAYAMLACARIGAIHSVVFGGFAANELATRINDAKPKLVMSASCGIEPSGVVPYKPLLDKALNEAVHKVEHCLILNRPQYEAQMQTGRDADWQTALKGCESVDCVTVNATDPLYVLYTSGTTGQPKGVVRDNGGHAVALAWSMANIYDIHQGDVFWAASDVGWVVGHSYIVYGPLLVGATTLLYEGKPVGTPDPGAFWRTIAKYQVKSFFTAPTAIRAIKREDPNGEFIQGVDLSCLKNVFLAGERCDPDTLHWAEDKLHKPVIDHWWQTETGWPVAANLMGVAPIAVKAGSPGRPVPGYEVDVVDELGAKVAANVSGNVVIKLPLPPGTLTTLWQNNKRYQDSYLSMYPGYYLTGDAGYMDEEGYLYIMSRIDDIINVAGHRLSTGRFEEVLCQHPDVAEAAVIGVDDKLKGQVPLGLVVLKKGVTITDEELHKQLIALVRQEIGPVASFRLVSAIQKLPKTRSGKILRGTMRKIADNQQYTAPATIEDPQTLDLVRTTLTRMGYADALVG

SEQ ID NO: 193285 - protein, 387 aa, Unknown
  Bacterial polypetide isolated from the Sargasso Sea
MYTSGSTGKPKGVLHTTGGYMVYASITHEYVFDYHPGDIYWCTADVGWVTGHTYIVYGPLANGAVTLMFEGVPNYPDASRFWQVCDKHQVNICYTAPTAIRALMREGDSPVKATSRKSLRILGSVGEPINPEAWEWYYHCVGESRCPIVDTWWQTETGGVLITPLPGVTELKPGSASKPFFGIQPALVDQNGEILEGETEGNLIILDSWPGQMRTVYGDHQRFVDTYFSTFDNAYTTGDGARRDADGYYWITGRVDDVLNVSGHRMGTAEVESALVAHQKVAEAAVVGYPHEIKGQGIYAYVTLMQGEEPSEDLLNELKQWVRKEIGPIATPDLMQWAPDLPKTRSGKIMRRILRKVAENKYQDLGDVSTLADPSVVENLIENRMNR

SEQ ID NO: 193286 - protein, 587 aa, Unknown
  Bacterial polypetide isolated from the Sargasso Sea
YSNSDVHIKWFYDGTLNASANCIDRHLKNNKDKTAIIWVGDDPKVQKKISYKQLHHEVCKIANGLKEIGVKKGDRVTIYLTMIPELAYTMLACARIGAIHSIIFGGFSPDSIAGRINDCNSDYVVTADEGVRGGKTIPLKSITDEALESCPNVKKCVVVKRTGKDVEWYDNRDVWYHDITKKVSSNCEPEEMNAEDPLFILYTSGSTGKPKGVLHTTGGYMVYASMTHQYIFNYKPKDIYWCTADIGWITGHSYIIYGPLANGATTIMFEGIPTYPDSSRWWQIVDKCKVNIFYTAPTAIRALMREGDGPVKKTSRKTLKLLGTVGEPINPEAWEWYFKTVGESKSPIVDTWWQTETGGILISPQTGAIDLKPGSATKPFYGIKPVIVDKEGKVLKGEAQGRLCIAQSWPGQMRTVYGDHKRFIETYFSQFDGKYFTGDGCRRDKDGYYWITGRVDDVIIVSGHNLGTAEIESAFVAHPKVAEAAVVGYPHDIKGNGLYCYVTLNVGEKADGDLERELKLWVRKQIGPIATPDLIHFSPGLPKTRSGKIMRRILRKIAANEHDQLGDTTTLADPSVVQSLVDERKNV

SEQ ID NO: 193287 - protein, 459 aa, Unknown
  Bacterial polypetide isolated from the Sargasso Sea
NCIDRHLNKNKNKNAIIWVGDDPKVQKKITYKQLHQEVSKTANALKEIGVKKGDRVTIYMTMIPELAYTMLACARIGAIHSIIFGGFSPDSIAGRINDCKSDYVVTADEGIRGGKIIPLKSITDEALVHCTNVKKCIVVKRTGNRINWDKSRDVWYHEIVKKASSICPPEEMNAEDPLFILYTSGSTGKPKGVMHTTGGYMVYASMTHQYVFNYKSKDIYWCTADIGWITGHSYIIYGPLANGATTIMFEGIPTYPDSSRWWQIVDKYKVNIFYTAPTAIRALMREGEGPVKKTSRKSLKLLGTVGEPINPEAWLWYYKTVGDSKCPIVDTWWQTETGGIMISPQTGAIDLKPGSATKPFYGIKPVIVDKDGKILKGECQGRLCIAQSWPGQMRTVYGDHNRFIETYFSQFDGKYFTGDGCRRDKDGYYWITGRVDDVIIVSGHNLGTAEIESAFVAHQ

SEQ ID NO: 193288 - protein, 361 aa, Unknown
  Bacterial polypetide isolated from the Sargasso Sea
MAKKKKKKSKVKKKSSKKVKKKTKVKKVSKKIKKRKKSKKKSKKENGSSPPEIVIKTKPEWVKASLANKSKYQQKYSQSIKSNDDFWRKEGKRITWIKPYKKIKDVKYSTKEVKIKWYQDGTLNASANCIDRHLKDKKDKTAIIWVGDDPKDSQKITYKQLHQKVSKAANGLKKLGIKKGDRVTIYLTMIPELAILMLACVRIGAVHSIIFGGFSAESISGRVNDCESEYIITADEGVRGGKTIPLKYTTDEALTSCPNVKKCIVVKRTGNYINWNEERDVWYHDLIEDVPTHCEPEEMNAEDPLFILYTSGSTGKPKGVLHTTGGYMVYASMTHQYIFNYKPKDIYWCTADIGWVTGHSY

SEQ ID NO: 193289 - protein, 398 aa, Unknown
  Bacterial polypetide isolated from the Sargasso Sea
TADEGVRGGKIIPLKKIADEALDQCPGVKKCVVVERTGNQVDWNNERDVSYKELISSVPAKCDPEEMNAEDPLFILYTSGSTGKPKGVLHTTGGYMVYASMTHQYIFDYKANDIYWCTADIGWVTGHSYIIYGPLSNGATTIMFEGVPNYPDSSRWWQIVDKYKVNIFYTAPTAIRALMREGDKPVKKTSRKTLKLLGTVGEPINPEAWMWYYKTVGDSRCPIVDTWWQTETGGILIAPQPGAIDLKPGSATKPFYGIKPVLVDKDGKVIKKEGKGRLCMASSWPGQMRTVYGDHQRFIDTYFSQFDGKYFTGDGCRRDKDGYYWITGRVDDVIIVSGHNLGTAEIESAFVAHPKVAEAAVVGFPHSIKGNGLYCYVTLNAGENPSGDLERDLKLWVR

SEQ ID NO: 193290 - protein, 104 aa, Unknown
  Bacterial polypetide isolated from the Sargasso Sea
GFEHPIKGQGIYAYVTLMVGEEENENLISELQNFVAKEISPIAKPDLIQWAPGLPKTRSGKIMRRILRKVASGEFNNLGDTSTLADPSVVDDLIKNKRDLKITN

SEQ ID NO: 193291 - protein, 362 aa, Unknown
  Bacterial polypetide isolated from the Sargasso Sea
MTHQYIFNYKPKDIYWCTADIGWVTGHSYIIYGPLSNGATTIMFEGIPTYPDTSRWWQIVDKYKVNIFYTAPTAIRALMREGDGPVKKTSRKTLKLLGTVGEPINPEAWQWYYKTVGDSKCPIVDTWWQTETGGILISPQTGAIDLKPGSATKPFYGIKPEIVDKDGNVLKGEAQGRLCIAQSWPGQMRTVYGDHNRFIETYFSQFEGKYFTGDGCRRDKDGYYWITGRVDDVIIVSGHNLGTAEIESAFVAHPKVAEAAVVGYPHDIKGNGLYCYVTLNAGEKHDGELERELKLWVRKQIGPIATPDFIQFSPGLPKTRSGKIMRRILRKIAANEYDQLGDTTTLADPSVVKSLVENRKKN

SEQ ID NO: 193292 - protein, 196 aa, Unknown
  Bacterial polypetide isolated from the Sargasso Sea
DGNELNGNNVQGNLCIKSPWPSIIRTTYGDHERCINTYFSNYKGMYFTGDGVKRDHDGYLRILGRVDDVINVSGHRMGTAEVENAINEHEDVIESAVVGYPHDIKGEGIYAYVIVGTKLNDDKIKDEIINVVRKVIGPIAKPDKIQIVSGLPKTRSGKIMRRILRKVASNDFQNLGDTSTLLNPDIVTEIIDGAII

SEQ ID NO: 193293 - protein, 443 aa, Unknown
  Bacterial polypetide isolated from the Sargasso Sea
EALESCPNVKKCFVVKRTGNKINWVVDRDIWYHKMIKNISTKCEPEEMNAEDPLFILYTSGSTGKPKGVLHTTGGYMVYTSMTHQYIFNYKPKDIYWCTADIGWVTGHSYIIYGPLSNGATTIMFEGIPTYPDTSRWWNIVDKYKVNIFYTAPTAIRALMKEGDKPVKKTSRKSLKLLGTVGEPINPEAWEWYYKTVGDSRCPIVDTWWQTETGGILISPQTGAINLKPGSATKPFYGIKPVIVDKDGKVLKGEAQGRLCIAQSWPGQMRTVYGDHQRFLDTYFSQFDGKYFTGDGCRRDKDGYYWITGRVDDVIIVSGHNLGTAEIESAFVAHEKVAEAAVVGYPHDIKGNGLYCYVTLNSGEKSSLDLERDLKLWVRKQIGAIATPDLIQFAPGLPKTRSGKIMRRILRKIAANEHGQLGDTTTLADPSVVDNLVDNRKNI

SEQ ID NO: 193294 - protein, 369 aa, Unknown
  Bacterial polypetide isolated from the Sargasso Sea
MSLDKKNSINNILEEKRIFPPSKKFAEKSNISTKEELLSLKKQASDNPIQFWESFAKSELDWLEPFQTVLDNENAPFFKWFKEGKLNITYNCLDRHIKRGLGGKTALIWEGEPGDSKKYTYEELLKEVCKTANALKAIGVKKGDLVCIYMPMIPEAMFAMLACARIGAPHSVVFGGFSSEALKDRLIDGNARFVITADGGFRKDKVIELKKAVDAAIKSGADKVVEKVVVVQRSQKDISMVDDRDFWWHELLKDQKDHCEPEIMNSEDRLFILYTSGSTGKPKGVVHTTGGYNLWSHLTFKWIFDLKNDDIYWCTADVGWITGHSYIVYGPLSNGSTTLMYEGVPRPSNLGAFWEIVQKYKVSIFYTAP

SEQ ID NO: 193295 - protein, 602 aa, Unknown
  Bacterial polypetide isolated from the Sargasso Sea
MSLNKKNSINNILDEKRVFPPSKEFADNSNIRTLEELTKLKKYALDNPIEFWETYANLEIDWFQPFQTVLDSENAPFFKWFKEGKLNITYNCLDRHIKNGLGSKTALIWEGEPGDSRKYTYKELIKEVCKAANALKEIGVKKGDLVCIYMPMIPEAMVAMLACARIGAPHSVVFGGFSSEALKDRLIDGNAKFIITADGGFRKDKIIELKKAVDLAIESGANKIVKKVLVVQRTKENIVMVENRDFWWHELLKSQKDWCEPEIMNSEDRLFILYTSGSTGKPKGVVHTTAGYNLWSHLTFKWIFDIKNDDIYWCTADVGWITGHSYIVYGPLSNGATTLMYEGVPRPSNLGAFWEVIQKYKVTIFYTAPTAIRSFMKSGREIPDKYNLESLRLLGTVGEPINPEAWMWYRDVIGKNKCPIVDTWWQTETGGVMISPLPGAVAAKPGSATYPLPGIEVEIVDKDGEKVMENEGGYLIVKKPWPGMMRTIHGNSQRYLESYWEFISFQGEKNVYFAGDGARIDEDGYIWIMGRVDDVINVSGHRLGTMEIESALVSHLSVAEAAVVGKKDELKGEVIVAFVSLEKEVKSSLELEEELKRHVINE

SEQ ID NO: 193296 - protein, 452 aa, Unknown
  Bacterial polypetide isolated from the Sargasso Sea
MSRKYREVYENSINNKEIFWKKVSEDIFWYKKPTKILNSNNPPFYKWFEDGITNTCYNALDHHIDQGRGEKLAIIYDSPITGKQKKISYKDLRDKVALFAGALKNQGINKGDRVIIYMPMIPEAVIAMLACGRIGAVHSVVFGGFAANELASRIDDSKAKLIVSASCGYEPGRTVFYKPLVNKALELANHKPSKCIIYQREKDKAELNPDIDITWDEAHKDVKPAECEKMNANDYAYILYTSGTTGLPKGIVRDIGGHIVALKWTMKNIYNIDKDDVWWSASDIGWIVGHSYIVYAPLFYGCTTVLFEGKPVGTPDAGVFWRIISEHKVKSLFTAPTAIRAIKKEDPNGDFFKKYDLSKFEKLFLAGERADPDTIKWFEKLSGSPVIDHWWQTETSWAITSDCTGIESFPVKYGSAFKPVPGYDLKVLDSDGKEVGPGKMGDIVVKLPLPPG

SEQ ID NO: 193297 - protein, 156 aa, Unknown
  Bacterial polypetide isolated from the Sargasso Sea
MKSDFKDIYRKSIDKPEDFWKEISNDIFWFKKPTKILNNSKPPFYKWFEDGITNSCYNALDFHIDEGRGDKTALIYDSPITGIKGNFSFKQLKDKVSKFAGALSNQGVKRGDRVIIYMPMIPEAVVAMLACGRIGAIHSVVFGGFASNELASRIDD

SEQ ID NO: 193298 - protein, 410 aa, Unknown
  Bacterial polypetide isolated from the Sargasso Sea
MPKKKKKKSKVRKKRAKVRKKTSKNKKRKNKSKIDNENFIPEVIIKTKPEWIKSSWANKSKYQQKYSQSIKSNDEFWRKEGKRITWIKPYKKIKDIKYSTKEVKIKWFEDGTLNASANCIDRHLKDKKDKTAIIWVGDNPKESQKITYKQLHQKVSKAANGLKKLGIKKGDRVTIYLTMIPELAILMLACSRIGAIHSIIFGGFSADSISGRVNDCESEYIITADEGLRGGKIIPLKETTDEALLNCPNVKKCIVVKRTGNYINWNDNRDVWYHELIKDVPYQCEPEEMNAEDPLFILYTSGSTGKPKGVLHTTGGYMVYASMTHQYIFNYKPKDIYWCTADIGWVTGHSYIIYGPLANGATTIMFEGIPNYPDSSRWWQIVDKYKVNTFYTAPTAIRALMREGDKPVKK

SEQ ID NO: 193299 - protein, 444 aa, Unknown
  Bacterial polypetide isolated from the Sargasso Sea
MSDNEKFEVSSEWSAEAQVNSAKYNEWYENSLNSNEEFWNEHGKRIDWIKPYTKVKDVSYDKDNFSIKWYYDGTLNASSNCIDRHLKDKADQTAIIWEGDDPADSKKISYKELHSEVSKLANGMKSLGVKKGDRVTIYMPMIPEAAYAMLACTRIGAIHSVVFGGFSPDSLAGRISDCKSDIVITADEGVRGGKAIPLKKNTDEAISISGGVRHCIVVKRTGGDIGWIDDRDVWYHELTEKESDDCPPEEMSAEDPLFILYTSGSTGKPKGVMHTTGGYMVYASMTHQYVFDYKEGDVYWCTADVGWVTGHSYIVYGPLANGAVTVMFEGVPNYPSASRFWEVVDKHRINIFYTAPTAIRALMREGEDPVKKTSRSSLKLLGTVGEPINPEAWMWYYNVVGDKKCPIVDTWWQTETGGILITPLPGAIAQKPGSATKPFFGVNL

SEQ ID NO: 193300 - protein, 342 aa, Unknown
  Bacterial polypetide isolated from the Sargasso Sea
MTKDKIYNPPLSVLENSNIKESEFEELYQWSLNKPEEFWASQAENYLSWNNKWSKVKETNIEKGEIVWFKDAKLNASVNCIDRHLPENAKKTAFIWEGDNPEETKNISYQELHDEVCKFANVLKARNVKKGDRVCIYMPMIPEATYAMLACARIGAIHSVVFGGFSPESLKDRILDSDCQTVITADEGLRGGKTVPLKENVDEALQGCPNVHTVLVITRTGAEISWNENCDVRFEEISEGVPSNCEPEIMDSEDPLFILYTSGSTGKPKGVLHTTGGYLLQAAMSHKLVFDYKDDEIYWCTADVGWVTGHSYIVYGPLANGATSLIFEGIPTFLRLPDFGKY

SEQ ID NO: 193301 - protein, 605 aa, Unknown
  Bacterial polypetide isolated from the Sargasso Sea
EGKRINWIKPYTKIKDVKYSKSDVKIKWFYDGTLNASANCIDRHLKKNKDKTAIIWVGDDPKVQKKISYKELHKEVSKAANGLKELGVKKGDRVTIYLTMIPELAYTMLACARIGAVHSIIFGGFSPDSISGRINDCESDYLITADEGVRGGKIIPLKSIADEALVNCPNVKKCVVVKRTGNRINWDERRDVWYHELTKKVSNKCEPEEMNAEDPLFILYTSGSTGKPKGVMHTTGGYMVYASMTHQYIFNYKPKDIYWCTADIGWVTGHSYIIYGPLSNGATTIMFEGIPTYPDSSRWWQIVDKYKVNIFYTAPTAIRALMREGDKPVKKTSRKSLKLLGTVGEPINPEAWEWYYKTVGDSNCPIVDTWWQTETGGILISPQTGAINLKPGSATKPFYGIKPVIVSKDGKVLKGEAEGRLCIAQSWPGQMRTVYGDHQRFIDTYFSQFDGKYFTGDGCRRDKDGYYWITGRVDDVIIVSGHNLGTAEIESAFVAHPKVAEAAVVGYPHDIKGNGLYCYVTLNVGEKSTLDLERDLKLWVRKQIGPIATPDLIQFSPGLPKTRSGKIMRRILRKIAANEHDQLGDTTTLADPSVVKSLVENRKNT

SEQ ID NO: 193302 - protein, 166 aa, Unknown
  Bacterial polypetide isolated from the Sargasso Sea
MTEQSLIKVTDEVKRTALIDNEKYLQEYERSINDPENFWAEHGQRIDWIKPYTRIKDVSYSEKDLHIKWFYDGTLNVSSNCLDRHLEKRGDQTAIIWEGDDPKEDKRITFKELHSEVCKFANALKELGVKKGDRVTIYMPMIPEAAVAMLACARVGAIHSVVFGGF

SEQ ID NO: 193303 - protein, 606 aa, Unknown
  Bacterial polypetide isolated from the Sargasso Sea
MPKKKKVKKKVISKKQKETIYKTKKDWITKALVNKSQYLKKYNESIKDNDSFWKKEGKRINWIKSYKKIKDVKYSKDDVHIKWFYDGTLNASANCIDRHLKKNANKTAIIWVGDDPKIQKKISYKELHKEVSKAANGLKNLGVQRGDRVTIYLTMIPELAYTMLACARIGAVHSIIFGGFSPDSISGRINDCESDYVITADEGVRGGKTIPLKSITDEALQSCPNVKKCIVVKRTGTKKIDWFSDRDVWYHQMTKKVSAKCEPEEMSAEDPLFILYTSGSTGKPKGVLHTTGGYMVYASMTHQYIFNYKPKDIYWCTADIGWVTGHSYIIYGPLANGATTIMFEGIPTYPDTSRWWQIVDKYKVNIFYTAPTAIRALMREGDKPVKKTSRKSLKLLGTVGEPINPEAWEWYFKTVGDSKCPIVDTWWQTETGGILISPQTGAIDLKPGSATKPFYGIKPEILDKDGKVLKGEAQGRLCIAQSWPGQMRTVYGDHQRFIDTYFSQFDGKYFTGDGCRRDKDGYYWITGRVDDVIIVSGHNLGTAEIESAFVAHPKVAEAAVVGYPHDIKGNGLYCYVTLNAGEKSTLDLERDLKLWVRKQIGPIATP

SEQ ID NO: 193304 - protein, 650 aa, Unknown
  Bacterial polypetide isolated from the Sargasso Sea
MSSQSLYKVSGNIAANALVNNDQYKKMYQESIVNPEGFWREHGKRIDWIKPYTKIKKTTFDDHNLSINWFYDGTLNASANCLDRHLAEHSDRVAIIWEGDNASEQRQITYGELHTQVCKFANALRSQGVRRGDIVTIYMPMVPEAAVAMLACARIGAVHSVVFGGFSPDSIASRVIDGKSKVVITADEGMRGGRAIPLKRNIDDALKHPDVTSVEKVIVLKRTGGKVDWVEGRDVWWHSLVETASEHCAIEEMGAEDPLFLLYTSGSTGNPKGVLHTTGGYMVYASMTHEYVFDYKPGEIYWCTADVGWITGHSYMVYGPLANGATVLIHEGIPNYPSPARLGEMIDRHKVNILYTAPTLIRALMAEGKQHFDKYDGSSLRIMGSVGEPINPEAWRWYHEVIGHEHCPIVDTWWQTETGGILITPLPGATDTKPGSATRPFFGVQPALVDNMGNILEGATEGNLVLLDSWPGQMRTVYGDHERFVLTYFKTFRGMYFTGDGARRDEDGYYWITGRVDDVINVSGHRLGTAEVESALVSHELVAEAAVVGYPHDIKGQGIYAYVTLTRGTEESEELRQELRQWVRKEIGALATPDLIQWATGLPKTRSGKIMRRFLRKIAANEVTNLGDASTLADPAVIETLIETRLNRNE

SEQ ID NO: 193305 - protein, 157 aa, Unknown
  Bacterial polypetide isolated from the Sargasso Sea
FDGKYFTGDGCKRDKDGYYWITGRVDDVIIVSGHNLGTAEIESAFVAHSKVAEAAVVGYPHDIKGNGLYCYVTLNVGEEPSGELERELKLWVRKQIGPLATPDIIHFSPGLPKTRSGKIMRRILRKIAANEHDQLGDTTTLADPSVVKSLVQNRKNI

SEQ ID NO: 193306 - protein, 660 aa, Unknown
  Bacterial polypetide isolated from the Sargasso Sea
MSAIESVLHETRQFAPPAALEQAATISGMPAYRALAAEAENDYEGFWARLAREGLAWHKPFTKVLDESNAPFYKWFDDGELNASYNCLDRHVEAGNGERVAVIFEADDGTVTRVTYADLLARVSRFANALKKRGIGKGDRVVIYIPMSIEGIVAMQACARIGATHSVVFGGFSAKSLNERLVDVGATALVTADEQARGGKTLPLKSIADEAIALGGCEAVKSVIVYRRTGGKIDWHAGRDLWMHELTAGESDQCEPEWVGAEHPLFILYTSGSTGKPKGVQHSTGGYLLWAAQTMKWTFDWKPTDVFWCTADIGWVTGHTYITYGPLACGGTQVVFEGVPTYPDAGRFWKMIGDHKVTVFYTAPTAIRSLIKAAEADDKVHPKSYDLSSLRIIGTVGEPINPEAWMWYHKYVGQERCPIVDTWWQTETGGHMITPLPGATPTVPGSCTLPLPGIMAAVVDETGQDVPNGQGGILVVKRPWPAMIRTIWGDPERFKKSYYPEELGGRLYLAGDGTVRDKDTGYFTIMGRIDDVLNVSGHRLGTMEIESALVSHELVAEAAVVGRPDDTTGEAVVAFVVLKRSRPEGEEAAALAKTLRDWVGKQIGPIAKPKDIRFGDNLPKTRSGKIMRRLLRSLAKGEAITQDTSTLENPAILEQLAEVR

SEQ ID NO: 193307 - protein, 402 aa, Unknown
  Bacterial polypetide isolated from the Sargasso Sea
MSYKKSYQNWQNNPISYWEEKAKDISWYKKPKKILDSSDAPFWTWFPDGELNTSYNCLDIHIKNGNGDRKALIYDSPVTQTKKTYTYKELLNKTEKIAGALQEHGVKKGDRVLIYMPMIPEAVASMLACARLGAIHVVVFGGFAPNELATRINDSKPQIIIAGSCGIEPGKIIEYKPMLDKAIELAKYKVKKCFIFQREICKANLIDDRDFNFQDVIDNSYSVTPVPVKSNDPLYILYTSGTTGDPKGMVRDNGGHAVALKNSMNMVYGLQPGDVFWAASDIGWVVGHSYIVYAPLLSGCTSILYEGKPTGTPDAGSFWRVISEYNVSVMFTAPTALRAIKRDDPNGKEIKKYNLKNFKMQFLAGERADPSTIQWTEKHLNVPVIDHWWQTETGWAIAGNFA

SEQ ID NO: 193308 - protein, 255 aa, Unknown
  Bacterial polypetide isolated from the Sargasso Sea
MSDYLINTSEDYNKIYEKSTNDVEEFWSTLAKDNFKWQKPWNSVLEWDFLKPEVNWFQGAKLNITENCIDRHLESNGDKIAIIFEPNDVNDKSEHISYINLHKRVNKMANVLKDIGVKKGDRVCIYLPMIPELAISVLACARIGAVHSVVFAGFSASALSTRINDCQCEVVITSDGSFRGNKILNLKEIVDDALNDCPQVSSVLVAERTKSKIELKYGRDKLLNDLIKNSSDSCPIEIMDSEDPLFILYTSGSTG

SEQ ID NO: 193309 - protein, 199 aa, Unknown
  Bacterial polypetide isolated from the Sargasso Sea
MAKETIYEPSKEIISNAVISKEEFEKLYQQSINNPEQFWEHQARNYLSWEQEWKSVKDSDLVKGEISWFKGAKLNASVNCIDRHLEKNAEKIAIIWEGDDPKDSLKITYKQLHNSVCKFANALKKRGIGKGDRVCIYMPMIPEAAYAMLACARIGAIHSVVFGGFSPESLKDRILDSDCESVITADEGLRGSKKIPLKN

SEQ ID NO: 193310 - protein, 580 aa, Unknown
  Bacterial polypetide isolated from the Sargasso Sea
LVNKSGYQKKYSDSLKNNDNFWKKEGKRISWIKPYTKIKDYKYSKTDVHIKWFYDGTLNASANCIDRHLKKNKDKTAIIWVGDDPKVQKKISYKQLHQEVSKAANGLKEIGVKKGDRVTIYLTMIPELAYTMLACARIGAVHSIIFGGFSADSISGRINDCKSDYVITADEGVRGGKIIDLKGKVDEALLNCPNVKKCVVVKRTGNRINWDESRDIWYHDITKKASKYCEPEEMNAEDPLFILYTSGSTGKPKGVLHTTGGYMVYASMTHQYIFNYKPKDIYWCTADIGWVTGHSYIIYGPLSNGATTIMSEGIPNYPDWSRWWQIVDKYKVNIFYTAPTAIRAMMREGDGPVKKTSRKTLKLLGTVGEPINPEAWQWYFKTVGDSRCPIVDTWWQTETGGILISPQTGAIDLKPGSATKPFYGIKPEIVDKDGKVLKGEAQGRLCIAQSWPGQMRSVYGDHNRFIETYFSQFDGKYFTGDGCRRDKDGYYWITGRVDDVIIVSGHNLGTAEIESAFVAHPKVAEAAVVGCPHDIKGNGLYCYVTLNVGEEPNGDLERELKLWVRKQIGVIATPDFYSVF

SEQ ID NO: 193311 - protein, 424 aa, Unknown
  Bacterial polypetide isolated from the Sargasso Sea
MKNSFAQIYNDSLQKPEEFWKDISEDVFWFKKPTRILNKSNPPFYKWFEDGVTNTCYNALDLHIDQGRGDKTALIYDSPITGNKAKFSFNELKEKVSKFAGALDNQGVKKGDRVIIYMPMIPEAVIAMLACGRIGAIHSVVFGGFASNELASRIDDSKAKVLITASCGFEPGRTVEYRPLVDEALKLANHKVEKVILFQRKDHEVKLNEPLEISWEECLANAKNKDCVEMGSNELAYILYTSGTTGVPKGIVRDIGGHIVALKWTMKNIYNINTDDIWWSASDIGWIVGHSYIVYAPLFKGCTTVLFEGKPVGTPDAGTFWRIISEYKVKSLFTAPTAFRAIKKEDPEGKFFSKYDLSSFESLFLAGERADPDTIKWAENLLKVPVIDHWWQTETSWAISSNCTGIEMQKLNMAQLVKQFLVMM

SEQ ID NO: 193312 - protein, 458 aa, Unknown
  Bacterial polypetide isolated from the Sargasso Sea
VQKKISYKELHKEVSKAANGLKEIGVKKGDRVTIYLTMIPELAYTMLACARIGAVHSIIFGGFSPDSISGRINDCKSDYVITADEGVRGGKTIHLKSIMDEALVDSPKVKKCVVIKRTGNRINWDPSRDVWYHEIIKNVSNKCEPEEMNAEDPLFILYTSGSTGKPKGVLHTTGGYMVYASMTHQYIFNYKPKDIYWCTADIGWVTGHSYIIYGPLSNGATTIMFEGIPTYPDNSRWWQIVDKYKVNIFYTAPTAIRALMREGDKPVKKTSRKTLKLLGTVGEPINPEAWQWYYKVVGDSRCPIVDTWWQTETGGILISPQTGAINLKPGSATKPFYGIKPLIVDKTGKVLKGEAQGRLCIAQSWPGQMRTVYGDHKRFIDTYFSQFDGKYFTGDGCRRDKDGYYWITGRVDDVIIVSGHNLGTAEIESAFVAHPKVAEAAVVGYPHDIKGNGLYCYV

SEQ ID NO: 193313 - protein, 502 aa, Unknown
  Bacterial polypetide isolated from the Sargasso Sea
SSINQKESFWKSVSEDIFWYKKPSKILNSSNPPFYKWFEDGETNTCYNAVDVHVEKGRGDKTAIIYDSPITGTKYKLSYKELKEKVSIFAGALKNQGIKKGDRVIIYMPMIPQAVVAMLACGRIGAIHSVVFGGFAANELASRIDDSKAKIIISASCGYEPGRTVHYKPLLNKSIEIAKHKPEKCIIWQRERDKADLDPKRDIDWVEALKGAKPTECEKMNSNDYAYILYTSGTTGTPKGIVRDVGGHIVALRWTMKNIYNIDQDDVWWSASDIGWIVGHSYIVYAPLFYGCTTVLFEGKPVGTPDAGVFWRVISEYKVKSLFTAPTAIRAIKKEDPEGKFFKKYDLSKFDTLFLAGERADPDTIKWFEKLSSAPVIDHWWQTETSWAISSNCAGIEKFPIKYGSAFKPVPGYDLKVLNSEGKENKAGQMGDIVVKLPLPPGTFPTLWNADERYKKVYMSTYEGFYQTYDAGHIDEDGYVWIMSRTDDIINVAGHRLSTGAI

SEQ ID NO: 193314 - protein, 361 aa, Unknown
  Bacterial polypetide isolated from the Sargasso Sea
DWKPTDVFWCTADIGWVTGHTYITYGPLACGGTQVVFEGVPTYPDAGRFWKMIGDHKVTVFYTAPTAIRSLIKAAEADDKVHPKSYDLSSLRIIGTVGEPINPEAWMWYHKHVGQERCPIVDTWWQTETGGHMITPLPGATPTVPGSCTLPLPGIMAAVVDETGQDVPNGQGGILVVKRPWPAMIRTIWGDPERFKKSYYPEELGGRLYLAGDGTVRDKDTGYFTIMGRIDDVLNVSGHRLGTMEIESALVSHELVAEAAVVGRPDDTTGEAVVAFVVLKRSRPEGEEAAALAKTLRDWVGKQIGPIAKPKDIRFGDNLPKTRSGKIMRRLLRSLAKGEAITQDTSTLENPAILGQLNRSV

SEQ ID NO: 193315 - protein, 572 aa, Unknown
  Bacterial polypetide isolated from the Sargasso Sea
MPKKKKKKSKVRKKKSKVRKKTSKKVNRRSKVRKKSSKKLKKKIKAKKENGNTPPEVVIKTKPEWVKSSLANKSKYQQKYSQSIKSNDEFWRKEGKRITWIKPYKKIKDVKYSTKEVKIKWFEDGTLNASANCIDRHLKDKKDKTAIIWVGDDPKDSQKISYKQLHQKVSKAANGLKKLGIKKGDRVTIYLTMIPELAILMLACVRIGAVHSIIFGGFSADSISGRVNDCESEYIITADEGVRGGKTIPLKYTVDEALMSCPNVKKCIVVKRTGNYINWDHNRDVWYHDLIKDVPNHCEPEEMNAEDPLFILYTSGSTGKPKGVLHTTGGYMVYASMTHQYIFNYKPKDIYWCTADIGWVTGHSYIIYGPLSNGATTIMFEGIPNYPDSSRWWQIVDKYKVNTFYTAPTAIRALMREGDKPVKKTSRKSLKLLGTVGEPINPEAWMWYYKTVGNSKCPIVDTWWQTETGGIMIAPQTGAIPLKPGSATKPFYGIKPVLVDKNGKEIKGAGEGRLCIAQSWPGQMRTVYGDHQRFIDTYFSQFNGKYFTGDGCRRDKDGYYWITGRVDDVIIV

SEQ ID NO: 193316 - protein, 373 aa, Unknown
  Bacterial polypetide isolated from the Sargasso Sea
HTTGGYMVYASMTHQYIFNYKPKDIYWCTADIGWVTGHSYIIYGPLSNGATTIMFEGIPNYPDSSRWWQIVDKFKVNTFYTAPTAIRALMREGDKPVKKTSRKSLKLLGTVGEPINPEAWMWYYKTVGNSKCPIVDTWWQTETGGIMIAPQTGAIPLKPGSATKPFYGIKPVLVDKNGNEIKGAGEGRLCIAQSWPGQMRTVYGDHQRFIDTYFSQFNGKYFTGDGCRRDKDGYYWITGRVDDVIIVSGHNLGTAEIESAFVAHPKVAEAAVVGYPHDIKGNGLYCYVTLNAGETETGELERDLKLWVRKQIGPLATPDLIHFTLGLPKTRSGKIMRRILRKIAANEHEQLGDTTTLADPSVVNSLVENRKNI

SEQ ID NO: 193317 - protein, 492 aa, Unknown
  Bacterial polypetide isolated from the Sargasso Sea
KKPTSILNKSTPPFYRWFEDGVTNTCYNAIDVHIDKGRGDKTALIYDSPISNNKAKFTYNELREKISKFAGALDNQGIKKGDRVIIYMPMIPEAVIAMLACGRIGAIHSVVFGGFASNELASRIDDSKAKILITASCGFEPGRTVEYRPLVDEALKLAKNKVEKVIIFRRKDHEVKLNSPLEISWEEALVNAKNKDCVEIGANEFAYILYTSGTTGIPKGIVRDVGGHIVALKWTMKNIYNVDENDVWWSASDIGWIVGHSYIVYAPLFKGCTTVLFEGKPVGTPDAGVFWRIISEYKIKSLFTAPTAFRAIKKEDPDGKFFSKYDLSSFESLFLAGERADPDTIKWAENLLNVPVIDHWWQTETSWAISSNCTGIEMQKTKYGSACKAVPGYDVKIIKPDHSIAKPNEMGDIVVKLPLPPGTFPTLWNADKRYEENYMSNYKGYYQTYDAGHIDEDGYIWIMSRTDDIINVAGQKLSTGAIEEVYQNISQC

SEQ ID NO: 193318 - protein, 692 aa, Unknown
  Bacterial polypetide isolated from the Sargasso Sea
MPKKKKKSKSRKKTSKRKKVKKRKKILKRKKKIRSKIKKVKINNEGSTQELIFKPKPEWVKSGLINKSQYQNKYTDSIKNNNAFWKKEGKRITWIKPYKKIKDVKYSKDEVKIKWFEDGTLNASANCIDRHLKDKKDKTAIIWVGDDPKDTQKISYKQLHQKVSKAANGLKKLGIQKGDRVTIYLTMIPELAVLMLACARIGAIHSIIFGGFSAESISGRVNDCKSEYIITADEGVRGGKTIPLKATTDEALSNCPDVKKCIVVKRTGNYVYWDDDRDVWYHDLIKDVPSHCEPEEMNAEDPLFILYTSGSTGKPKGVLHTTGGYMVYASMTHQYIFNYKPKDIYWCTADIGWVTGHSYIIYGPLSNGATTIMFEGVPNYPDSSRWWQIVDKYKVNIFYTAPTAIRALMREGDDPVNKTSRKSLKLLGTVGEPINPEAWMWYYKTVGNSKCPIVDTWWQTETGGILIAPQTGAIPLKPGSATKPFYGIKPVLVDKDGKEIKGAGEGRLCIAQSWPGQMRTVYGDHQRFIDTYFSQFDGKYFTGDGCRRDKDGYYWITGRVDDVIIVSGHNLGTAEIESAFVAHPKVAEAAVVGYPHDIKGNGLYCYVTLNAGETETGDLERELKLWVRKQIGPLATPDLIHFTPGLPKTRSGKIMRRILRKIAANEHGQLGDTTTLADPSVVDSLVDNRKNT

SEQ ID NO: 193319 - protein, 589 aa, Unknown
  Bacterial polypetide isolated from the Sargasso Sea
MADDLIESILNESRSFGPPKDFIDQANIDEEKAHNLKKQAEENHIQYWATLAKDQLEWFQPFNNILDESKAPNYEWFNDGVINASYNSLDVNVSKNPNKTAIIFETEDGKSEHITYKELLSKTSQFANGLKKLGVEPMDRVVIYMPMCPEAVIAMQACARIGAIHSVVFGGFSSNALKDRIEDAKSKIVITADGAYRGGNIIPLKQATDEAVSQSSYKVENVVVFQRTGEKIEFNEKRDVWWGDLVSDCDSNCDPEPLNAEHPLFILYTSGSTGKPKGIQHSTAGYILHAKTTFSWVFDIKNDDVFWCTADVGWITGHTYVAYGPLLAGATILIYEGAPTFPDVGRFWDICEKHAVTIFYTAPTAIRALMKHGDEIPQSYDLSSLRLLGTVGEPINPEAWMWYHRIIGQERCPIVDTWWQTETGGAMISPLPGVTETKPGSCTTPMPGIDVDIVDELGEPVGEANQGGYLVIKKPWPSMLRTIWGDNQRYIDTYWEKFDGRYYVAGDSAYRDEDGCHWIMGRIDDVLNVSGHRLGTMEVESALVANEMVAEAAVVGRPHEVKGESIFAFVVTKGERPSGEDAKKMQEAL

SEQ ID NO: 193320 - protein, 489 aa, Unknown
  Bacterial polypetide isolated from the Sargasso Sea
MKDSFNKIYQESIQNPEKFWQNVSEDIFWFKKPSKILNKSNPPFYKWFEDGVTNTCYNAIDTHIDKGNGDKIALIYDSPITNNKAKFTYNELREKISKFAGALHNQGIKKGDRVIIYMPMIPEAVIAMLACGRIGAIHSVVFGGFASNELASRIDDSKAKILITASCGFEPGRTVEYRPLVDGALKLAKHKVEKVIFFQRKDHEVKLNSPHEISWEESLINAKDKDCVEIGANEFAYILYTSGTTGIPKGIVRDVGGHIVALKWTMKNIYNVDENDVWWSASDIGWIVGHSYIVYAPLFKGCTTVLFEGKPVGTPDAGVFWRIISEYKIKSLFTAPTAFRAIKKEDPNGKFFSKYDLSSFESLFLAGERADPDTLKWAENLLNVPVIDHWWQTETSWAISSNCTGIEMQKTKYGSACKAVPGYDVKIIKPDHSIAKPNEMGDIVVKLPLPPGTFPTLWNADKRYEENYMTNYKGYYQTYDAGHIDEDGY

SEQ ID NO: 193321 - protein, 563 aa, Unknown
  Bacterial polypetide isolated from the Sargasso Sea
MQRIKTLSEYFKKYELSEKDPAKFWSQIADSFLWKKKWDNVLESDFENADFKWFKNAQLNITENIFERNLSQRGDKTAIIWEPNDPKESPIYLSYKELYKQTCTFSNALRSKGIKKGDRVIIYMPMVPEAAIAMLACARVGAVHSVVFAGFSAASLADRINDCEAKMVLTSDGNFRGNKTIPVKDVVDEALEKCSSIESVIVLERTKQNINMEDGRDSWWHECIEDQPKTCDSEVMDSEDLLFILYTSGSTGKPKGVVHSSAGYMIYSSYTFLNVFQYDEDDIYWCTADVGWITGHSYIVYGPLLCGATTVMFEGVPTYPNVSRFWDIVDKYKVNQFYTAPTAIRALQAHGLEPLENNSLDSLKVIGSVGEPINEEAWHWYHDNVGKGKCPLVDTWWQTETGGIMISALAGITPNKPAHASLPLPGIIPVIVDAEGNELNGNNVQGNLCIKSPWPSIIRTTYGDHKRCISTYFSHYKGMYFTGDGVKRDHDGYLRILGRVDDVINVSGHRMGTAEVENAINEHEDVIESAVVGYPHDIKGEGIYAYVIVSTKLNDDEIKNLDN

SEQ ID NO: 193322 - protein, 396 aa, Unknown
  Bacterial polypetide isolated from the Sargasso Sea
MQRIKSLSEYFDHYEKSQKDPEGFWSKIAESFNWIKPWSKVLESDFEKVSIKWFIDAKLNITENIFERNLVKNKEKTAIIWEPNNPDEETKKISYQELYEETCKFSNALKNLGIKKGDRIIIYMPMVPGAAIAMLACARVGAIHSVVFAGFSSTSLADRIDDCEAKMVITSDGNFRGNKVIPVKSVVDEALEKSNSIEKVVVLKRTNQDVNLVENRDFWWHELVADQSSECKAEVMDSEDMLFILYTSGSTGKPKGVVHTTGGYMVYSAYTFSNVFQYDKDDIYWCTADVGWITGHSYIVYGPLLCGATSLMFEGVPTYPNVSRFWDIVDKHKVNQFYTAPTAIRALQAHGLEPLENNSLESLKVIGSVGEPINEEAWHWYHDNIGKGNCPLVDTW

SEQ ID NO: 193323 - protein, 505 aa, Unknown
  Bacterial polypetide isolated from the Sargasso Sea
GQIIKIKPEWVKRSLANKSQYQKKYSESIKNNNTFWKKEGKRITWIKPYKKIKDVKYSKDEVRIKWFEDGTLNASVNCIDRHLKDKKDKTAIIWIGDDPKDTQKISYKQLHQKVSKAANGLKKLGIQKGDRVTIYLTMIPELAILMLACARIGAVHSIIFGGFSAESISGRVNDCKSEYIITADEGVRGGKTIPLKATTDEALSNCPDVKKCIVVKRTGNYVFWNEDRDVWYHDLIKDVPSHSEPEEMNAEDPLFILYTSGSTGKPKGVLHTTGGYMVYASMTHQYIFNYKPNDIYWCTADIGWVTGHSYIIYGPLANGATTIMFEGVPNYPDSSRWWQIVDKYKVNTFYTAPTAIRALMREGDGPVNKTSRKSLKLLGTVGEPINPEAWMWYYKTVGNSKCPIVDTWWQTETGGILIAPQTGAIPLKPGSATKPFYGIKPVLVNKDGKEIKGEGEGRLCIAQSWPGQMRTVYGDHQRFIDTYFSQFDGKYYTGDGCKRDKDGYY

SEQ ID NO: 193324 - protein, 334 aa, Unknown
  Bacterial polypetide isolated from the Sargasso Sea
MKICYTFYIHQEQQLKPKGIVHTQAGYLTGVTTTHHEVFDVKEDDIYWCAADCGWVTGHSYIVYGPLANKSTSVMYEGAPNAPDEKRLWSIIEKYKVNIFYTAPTAIRAFMKWGVEHPQAHDLSSLRILGTVGEPINPEAWMWYHENIGGENCAIVDTWWQTETGSIMISPLPGVTSTKPGSACGPLPGIESVIIDNDGNEVGKGEGGFLAIKSPWPSMLRTVYGDDERYIDTYWSQHEGLYFAGDGAKYDEEGYIWLLGRVDDVMNISGHRISTAEVESALVSHNAVAEAAVIGRSDEITGEAIAAFVSLIGTEEGNEDLIAELRQHVSDKIG

SEQ ID NO: 193325 - protein, 398 aa, Unknown
  Bacterial polypetide isolated from the Sargasso Sea
SIKDNESFWRKEGKRITWIKPYTKIKDIKYSKKEVNIKWYYDGTLNASANCIDRHLEKKANKPAIIWVGDDPADSKKISYKELHKNVCKAANGLKSIGIQKGDRVTIYLTMIPELAYIMLACARIGAVHSIIFGGFSPDSIATRINDCESDYVVTADEGVRGGKIIPLKKIADEAMEQCPNVKKCVVVKRTGNSVNWDNERDISYEEITKNVSDKCVPEEMNAEDPLFILYTSGSTGKPKGVLHTTGGYMVYASMTHQYIFDYKNKDVYWCSADIGWVTGHSYIIYGPLANGATTMMFEGVPNYPDSSRWWQIIDKFKVNIFYTAPTAIRALMREGDNPVKKTSRKSLKLLGTVGEPINPEAWMWYYKVVGETKCPIVDTWWQTETGGILISPQPGAI

SEQ ID NO: 193326 - protein, 255 aa, Unknown
  Bacterial polypetide isolated from the Sargasso Sea
AWMWYYNVVGDKKCPIVDTWWQTETGGILITPLPGAIAQKPGSATKPFFGVKPEILDAEGNILEGACEGSLCLADSWPGQMRTVYGDHKRFIETYFSQFDGKYFTGDGCRRDEDGYYWITGRVDDVINVSGHRMGTAEVESALVAHPKVSEAAVVGYPHDIKGQGIYAYVTLNAGEETSDELYKELVAWVRKEIGPIASPDLIQWAPGLPKTRSGKIMRRILRKIAENEYSNLGDTSTLAEPAVVDDLIDNRMNK

SEQ ID NO: 193327 - protein, 464 aa, Unknown
  Bacterial polypetide isolated from the Sargasso Sea
MPKKKKKRKAKKKKIIKRKKISKKKVEQNVEKELVYKTKKDWISKATVNKSQYEKKYKASLSDNDGFWKKEGKRINWIKPYTKIKDVKYSNSDVKIKWFYDGTLNASANCIDRHLKKNKDKTAIIWVGDDPKVQKKISYKELHKEVSKAANGLKEIGVKKGDRVTIYLTMIPELAYTMLACARIGAIHSIIFGGFSPDSISGRINDCKSDFVITADEGVRGGKIIHLKSIMDEALVECPKVKKCVVVKRTGNRINWDSSRDIWYHEMIKNVSNKCDPEEMNAEDPLFILYTSGSTGKPKGVLHTTGGYMVYASMTHQYIFNYKPKDVYWCTADIGWVTGHSYIIYGPLSNGATTIMFEGIPTYPDNSRWWQIVDKYKVNIFYTAPTAIRALMRDGDKPVKKTSRKTLKLLGTVGEPINPEAWQWYYKVVGDSRCPIVDTWWQTETGGILISPQTGAINLKPGSA

SEQ ID NO: 193328 - protein, 327 aa, Unknown
  Bacterial polypetide isolated from the Sargasso Sea
ITGAKGVKKGDRVIIYMPMIPEAVIGMLACGRIGAIHSVVFGGFASNELASRIDDSRAKVLLTASCGFEPGRTVKYKPLVDEALKLASHKIQKIILFQRPDNEVKLNAPNEISWDEALSNAKNVDCVEMNANEFAYILYTSGTTGIPKGIVRDIGGHIAALKWTMKNIYNIDQDDVWWSASDIGWIVGHSYIVYAPLFKGCTTVLFEGKPVGTPDAGAFWKIISDYKVKSLFTAPTAFRAIKKEDPEGKFFSKYDLSSFESLFLAGERADPDTIKWAESLLKVPVIDHWWQTETSWAISSNCTGIEMMKTKYGSACKAVPGYDVKVI

SEQ ID NO: 193329 - protein, 286 aa, Unknown
  Bacterial polypetide isolated from the Sargasso Sea
MSKIESVLHETRQFAPPAALEQAATISGMPAYRALAAEAENDYEGFWARLAREGLAWHKPFTKVLDESNAPFYKWFDDGELNASYNCLDRHVEAGNGERVAVIFEADDGTVTRVTYADLLARVSRFANALKKRGIGKGDRVVIYIPMSIEGIVAMQACARIGATHSVVFGGFSAKSLNERLVDVGATALVTADEQARGGKTLPLKSIADEAIALGGCEAVKSVIVYRRTGGKIDWHAGRDLWMHELTAGESDQCEPEWVGAEHPLFILYTSGSTGKPKGVQHSTGR

SEQ ID NO: 193330 - protein, 359 aa, Unknown
  Bacterial polypetide isolated from the Sargasso Sea
NIYFDYKNRDVYWCTADIGWVTGHSYIIYGPLSNGATTIMFEGIPNYPNSSRWWQIVDKYKVNIFYTAPTAIRALMREGDDPVKKTSRKSLKLLGTVGEPINPEAWMWYYNVVGGKRCPVVDTWWQTETGGILISPQPGAINLKPGSATKPFYGIKPVIVDESGKVLKGACKGRLCMAQSWPGQMRTVYGDHQRFIDTYFSQFDGKYFSGDGCRRDKDGYYWITGRVDDVIIVSGHNLGTAEIESAFVAHSKVAEAAVVGYPHEIKGNGLYCYVTLNAGENSSGDLERELKLWVRKQIGPIATPDQIQFAPGLPKTRSGKIMRRILRKIAANEHHDLGDTTTLADPSVVESLVDNRKNK

SEQ ID NO: 193331 - protein, 138 aa, Unknown
  Bacterial polypetide isolated from the Sargasso Sea
WITERVDDVINISGHRMGTAEVESALVEHKLVAESAVVGYPHDIKGQGIYAYVTLVLGSEPSIEIEKELKQVVRKIIGPIATPDLIQFSPALPKTRSGKIMRRILRKIAANEHSELGDTSTLADPSVVENLIENRKNI

SEQ ID NO: 193332 - protein, 220 aa, Unknown
  Bacterial polypetide isolated from the Sargasso Sea
MKNSFNEIYEESIQNPEKFWKNVSDDIFWFKKPTKILNKSNPPFYKWFEDGVTNTCYNAIDVHVDNGKGDKTALIYDSPITNSKAKFTYSELKEKISKFAGALDNQGVKKGDRVIIYMPMIPEAVIAMLACGRIGAIHSVVFGGFASNELASRIDDSKAKILITASCGFEPGRTVEYRPLVDGALKLAKHKVEKVILFQRKDHEVKLNSPLEISWEEALN

SEQ ID NO: 193333 - protein, 355 aa, Unknown
  Bacterial polypetide isolated from the Sargasso Sea
MIQKYKKKLRYKQLHQEVSKAANGLKEIGVKKGDRVTIYLTMIPELAYTMLACARIGAVHSIIFGGFSADSITGRINDCKSDYVITADEGVRGGKIIHLKTTVDEALLNCPNVKKCVVVKRTGNRINWDESRDVWYHDITKNASKNCEPEEMNAEDPLFILYTSGSTGKPKGVLHTTGGYMVYASMTHQYIFNYKPKDIYWCTADIGWVTGHSYIIYGPLSNGATTIMSEGIPNYPDWSRWWQIVDKYKVNIFYTAPTAIRAMMREGDGPVKKTSRKSLKLLGTVGEPINPEAWQWYFKTVGDSRCPIVDTWWQTETGGILISPQTGAIDLKPGSATKPFYGIKPEIVDKRWKGS

SEQ ID NO: 193334 - protein, 189 aa, Unknown
  Bacterial polypetide isolated from the Sargasso Sea
CEGKLCILDSWPGQMRTVYGDHQRFIDTYFSQFKGKYFTGDGCRRDKDGFYWITGRVDDCINVSGHLLGTAEIESAFVEHELVSEAAVVGYPHDIKGQGIYAYVTTNTGVQVSEDLKTELVQWIRKKIGPIATPDKLQFSPGLPKTRSGKIMRRILRKIASKEQDQLGDTSTLADPNVVQSLIDGSKNI

SEQ ID NO: 193335 - protein, 234 aa, Unknown
  Bacterial polypetide isolated from the Sargasso Sea
MKIFFWFKKPTKILNKSNPPFYKWFEDGVTNTCYNALDIHIDKGNGKKTALIYDSPITGNKDQYTYEELKVKVSKFAGALVNQGVNKGDRIIIYMPMIPEAVIAMLACARVGAIHSVVFGGFASNELASRIDDSKAKILITASCGFEPGRTVEYKPLVDEAVKQANHKVDKTILFQRNGYEVKLRAPDEISWDEALSNATETNCVEMNSNEFAYILYTSGTTGTPKGIVRDIGG

SEQ ID NO: 193336 - protein, 438 aa, Unknown
  Bacterial polypetide isolated from the Sargasso Sea
MARRSKKKTRFKRKSKKRVTKKKRNNNTNQELIFKTKSDWIKKALINKKQYDKKYSSSLKNNDDFWKKEGKRITWIKPYSKIKDVKYSKSDVHIKWYYDGTLNASANCIDRHLKKNKDKTAIIWVGDDPKVQKKISYKQLHNEVSKTANAFKDLGIKKGDRVTIYLTMIPELAITMLACARIGAVHSIIFGGFSPDSIAGRINDCKSDYVITADEGLRGGKKIPLKSITDEALSNCPNVKKCIVVKRTGNFINWEKDRDVWYHDIIKKASKNCEPEEMNAEDPLFILYTSGSTGKPKGVLHTTGGYMVYASMTHQYIFNYKPKDIYWCTADIGWITGHSYIIYGPLSNGATTIMFEGIPTYPDSSRWWQIVDKYKVNIFYTAPTAIRALMREGEKPVKKTSRKSLKLLGTVGEPINPEAWMWYFKTVGEGKCPIVDTW

SEQ ID NO: 193337 - protein, 347 aa, Unknown
  Bacterial polypetide isolated from the Sargasso Sea
MSDKFNKIYDHSIKNPEKFWQEAAEDIFWFKKPTKILNQSNPPFYKWFEDGVTNTCYNALDIHIDQGRGKNIALIYDSPITGNKSKFTYEELRSKVAKFAGALKNQGVNKGDRVIIYMPMIPEAVIAMLGCARIGAIHSVVFGGFASTELASRIDDSKAKLLVTASCGFEPGRTVEYKPLVDEAIKIANHKIEKMILFQRPGHEVKLNAPLEISWDEVVSKAEPADCVEMNSNEFAYILYTSGTTGTPKGIVRDVGGHIVALKWTMKNIYNIDTNDIWWSASDIGWIVGHSYIVYAPLFKGCTTVLFEGKPVGTPDAGAFWKIISDYKVKSLFTAPTAFRAIKKEDP

SEQ ID NO: 193338 - protein, 644 aa, Unknown
  Bacterial polypetide isolated from the Sargasso Sea
KTYPVPENILQSTHLTASQYDEMYKQSVEQPEAFWAEHASMLEWYQKPTKIKNTMFGENDVSIKWFEDGELNASYNCIDRHLADNATKVAFHWEGDSPEDSQDITYQQVHYEVCKLANALKEMGVAKGDRVAIYMPMIPEAAYAMLACARIGAVHSVIFGGFSPNAIADRINDSNAKVVITADEGRRAGRSIPLKANVDKALSGDACPSITHVLVHKLTGGEVDWNAKHDVWWHDAVDGVSAQCEPEVMNAEDPLFILYTSGSTGTPKGVVHTTGGYLLYSAMTFKYAFDYKEDDVYWCTADVGWITGHSYMVYGPMVNAASQVFFEGVPTYPDVKRIAQVVEKYKVNSLYTAPTAIRALMAHGDVPAEGCDVSSLRLLGTVGEPINPEAWEWYHRVIGMSRCPIIDTWWQTETGGHMILPLPGATELKPGSATRPFFGIQPALFDADGNELEGAAEGNLVIKDSWPSQARTVYGDHQRFINTYFSAYKGVYFTGDGARCDEDGFYWITGRVDDVLNVSGHRLGTAEIESALVAHPKVAEAAVVGFPHDIKGQGIYVYVTPNEGVEANEALTKELKAWVRQELSPIATPDMIQWSRGLPKTRSGKIMRRILRKIAANEHEQLGDTSTLADPSVVDTLIEERLNK

SEQ ID NO: 193339 - protein, 436 aa, Unknown
  Bacterial polypetide isolated from the Sargasso Sea
MFAIILLLKEQAVIYDWNPNIDIWYEDLYEDAENICPIEPMDSEDPLFILYTSGSTGKPKGVLHSTAGYLLGAHMSFKYLFGIQPNDKYWCTADVGWITGHTYILYGPLSNATTSLMFEGVPTYPSASRCWEICDKYSLDIFYTAPTAIRALMAQGDEYVQSTKRKTLRVLGTVGEPINPEAWEWYYSVVGNSKCDIIDTWWQTETGSVLISPIAGITPTKPGSATLPFFGVIPSLYDESGNVLEGEASGNLVIEKSWPSQIRSVYGDHQRMIDTYFSMYPNKYFTGDGARRDKDGYYWITGRVDDVLNVSGHRLGTAEIESALVLHPKVAEAAVVGFEHPIKGQGIYAFVTLMHDENFNEDLLNELKKFVVNEIGSIARPDLIQNSPGLPKTRSGKIMRRILRKIAEGDFSNLGDTTTLADPLVVDSLIENKQNL

SEQ ID NO: 193340 - protein, 332 aa, Unknown
  Bacterial polypetide isolated from the Sargasso Sea
YGPLANKTTSVMYEGAPNAPDEKRLWSLVEKYKVNIFYTAPTAIRAFMKWGVEHPKAHDLSSLRLLGSVGEPINPEAWMWYHENIGNEQCAIVDTWWQTETGSIMISPLPGITSTKPGSACGPLPGVDSVIIDEKGNEVGKGEGGYLAIKSPWPSMLRTVYGDDKRYIDTYWSQHEGLYFAGDGAKYDDDGYVWLLGRVDDVMNISGHRISTAEVESALVSHESVAEAAVIGRSDEISGEAIAAFVSLIGTDAGDEKLISELRQHVSDKIGPIAKPKSIVITADLPKTRSGKIMRRLLKDISEERKLGDVTTLANADIVSELQQRSSESDED

SEQ ID NO: 193341 - protein, 412 aa, Unknown
  Bacterial polypetide isolated from the Sargasso Sea
YKEIYDSSIKNREKFWKDVASDIFWYKKPTKILNSKNPPFYKWYEDGITNTCYNALDLHIDKGRGEKTAIIYDSPITGKKNKFTYKELKEKVSLFAGALKNQGINKGDRVIIYMPMIPEAVIAMLACGRIGAVHSVVFGGFAANELASRIDDSKAKLIVSASCGYEPGRTVHYKPLVNKALELSKHKPHKCIIFQREKDKAELDSKIDIDWNEALKDAKPTECEQMNANDYAYILYTSGTTGLPKGIVRDIGGHIVALKWTMKNIYNIDQDDVWWSASDIGWIVGHSYIVYAPLFYGCTTVLFEGKPVGTPDAGVFWRIISDYKVKSLFTAPTAIRAIKKEDPEGKFFKKYDLSKFDTLFLAGERADPDTIKWFEKLSNAPVIDHWWQTETSWAISSNCAGIENFQLNMALL

SEQ ID NO: 193342 - protein, 240 aa, Unknown
  Bacterial polypetide isolated from the Sargasso Sea
MILGWQTETGGVMISPLPGVVATKPGSATFPLPGIEVEIVDKNGDKVNENEGGYLIIKKPWPGMMRTIHGNSERYLESYWEYISFKGEKNVYFAGDGARIDEDGYIWIMGRVDDVISVSGHRLGTMEIESALVSHKSVAEAAVVGKKDDLKGEVIVAFVSLEKDVKGSSELVENLKKHVVNEIGIIAKPEKIIISDSLPKTRSGKIMRRILRSLAAGEKISGDISTLEDSSVLEKLKELS

SEQ ID NO: 193343 - protein, 560 aa, Unknown
  Bacterial polypetide isolated from the Sargasso Sea
MTQEIYNPNPGFSNPHIKDFDEYLSLYKESIDNPEKFFGDLAKENISWIEDFKEVHNSEFQETKWFVGGKTNITLNCIDRHLEKNGDKIALIWEGDEPGNSKEITFKELHSEVCRFANILKTLQIKKGSRVCIYMPMIPEAAFAMFACARIGAIHSVVFGGFSPESLKDRILDADCRIVITADEGVRGGKKVPLKANVDEALKNCPDVKNVIVVNRTGGEINWFEDRDLWFHELKVKVDDVCEPEPMDSEDPLFILYTSGSTGKPKGVLHTTAGYLLGAHISFKYLFGFNENDKYWCTADVGWITGHTYILYGPLSNGATSLMFEGVPTYPTASRCWEICDEHEINIFYTAPTAIRALMSLGDKFVGCTSRKSIKVLGTVGEPINPEAWDWYYSVVGNKSCEVIDTWWQTETGSVLISPIAGITPTKPGSATLPFFGVRPELYDENGIQQSGEASGNLVIESSWPSQIRSVYNDHQRMIDTYFSTYSNIYFTGDGAKRDKDGYFWITGRVDDVLNVSGHRLGTAEVESALVLHPVVAEAAVVGFEHPIKGQGIYAFCYFN

SEQ ID NO: 193344 - protein, 332 aa, Unknown
  Bacterial polypetide isolated from the Sargasso Sea
MSNNIFPPSDKFKANAIIDKQRYEEMYSESINDPDAFWSKHGLRIDWIKPFTKIKNVSYEHPNVSIKWFEDGELNVSANCVDRHLESRGEKTAIIWEGDNPSESKHVTYSELHRQVSKLANVYKNLGLSKGDRVVLYMPMIPEAAYAMLACARIGAIHSIVFAGFSPEALAARVEGCKASLIVTADEAPRGGKNTPLKANVDKALEICGDVQTLVVERTGGNVPMTEGRDISYNSAMKDASEKCEPTAMNAEDPLFILYTSGSTGAPKGVQHCSGGYLVWASMTHEYVFDYHQNDIFWCTADVGWVTGHSYIVYGPLANGATTLMLREFQPT

SEQ ID NO: 193345 - protein, 648 aa, Unknown
  Bacterial polypetide isolated from the Sargasso Sea
MSESKVYPVKAHISNGALLDKAGYEAMYRASVQDPDAFWGEQGKILDWMKPYTRVKNTSYDPGHVSIKWYEDGLLNVSANCLDRHLAQRGDKVAIIWEGDNPAEDRKLTYRELHTEVCKFANVLKAQGVHRGDVVCLYMPMVPEAAIAMLACTRIGAVHSIVFGGFSPEALAGRIIDSGSSIVITADEGLRGGRPVPLKKNVDEALTNPETKVNKVIVLKRTGGNIAWHNHRDIWWHDAVATASTDCPPEAMGAEDPLFILYTSGSTGKPKGVLHTTGGYLVYATLTFKYIFDYHEEDIYWCTADVGWVTGHSYLVYGPLANGATTIMFEGVPNYPATNRMSQVVDKHQVSILYTAPTAIRALMAKGNEAVAGTSRSSLRIMGSVGEPINPEAWEWYYRTIGEERCPIVDTWWQTETGGILISPLPGVTDLKPGSATRPFFGVQPALVDNMGEPLEGATEGNLVITDSWPGQMRTVFGDHERFEQTYFSTFPGRYFTGDGARRDEDGYYWITGRVDDVLNVSGHRMGTAEIESALVSHPKIAEAAVVGVPHEIKGQGIYAYVTLIAGEEPSRELHKEVKEWVRKEIGAIATPDVIHWAEGLPKTRSGKIMRRILRKIATGETDSLGDISTLADPGVVDKLIREKSEAA

SEQ ID NO: 193346 - protein, 388 aa, Unknown
  Bacterial polypetide isolated from the Sargasso Sea
EAAIAMLACARIGAVHSVVFGGFSPQSLRDRIQDSECCAVITADEGLRGGKSIPLKQNSDIAVEECPSVHSIIVVQRTGGEIKWNTQKDIWYHDLIRGQSDNCPIEIMDSEDPLFILYTSGSTGKPKGVQHSSGGYLLHAAITHKYVFNYKEDDVYWCTADVGWITGHSYIVYGPLANGASTLMFEGVPTYPDASRFWQVIDKHQVNIFYTAPTALRQLMSQGDEFVSKTDRKSLKLLGSVGEPINPEAWEWYYQIVGDKRCPIVDTWWQTETGGIMITPLPGATSLKPGSATLPFFGIRPALMDAEGNIIEELEASGNLAIKDSWPGQIRTVYGDHQRVIDTYYAAYPGLYFTGDGARRDSEGYYWITGRVDDVMVVSGHNIGTAEV

SEQ ID NO: 193347 - protein, 679 aa, Unknown
  Bacterial polypetide isolated from the Sargasso Sea
MAKRPKKKTKKKSSKKRKKNIKKRKKILKKISNINQETIFKTKSDWVKKALVNKKQYEKKYNHSIKQNDEFWKKEGKRITWIKPYTKIKDVRYSKSDVHIKWFYDGTLNASANCIDRHLKKNKDKTAIIWVGDDPKVQKKISYKQLHNEVSKTANALKDLGIKKGDRVTIYLTMIPELAYTMLACARIGAIHSIIFGGFSPDSISGRINDCKSDYVITADEGLRGGKIIPLKSITDEALLNCPNVKKCIVVKRTGNRVNWDESRDVWFHEITKKASSTCEPEAMNAEDPLFILYTSGSTGKPKGVLHTTGGYMVYASMTHQYIFNYKPKDIYWCTADIGWITGHSYIIYGPLANGATTIMFEGIPTYPDTSRWWQIVDKYKVNIFYTAPTAIRALMREGEGPVKKTSRKTLKLLGTVGEPINPEAWQWYFKTVGDSRCPIVDTWWQTETGGILISPQTGAIDLKPGSATKPFYGIKPAIVDQDGKVLKGEAKGRLCISQSWPGQMRTVYGDHNRFIETYFSQFDGKYFTGDGCRRDKDGYYWITGRVDDVIIVSGHNLGTAEIESAFVAHPKVAEAAVVGYPHDIKGNGLYCYVTLNVGESPSGDLERDLKLWVRKQIGPIATPDLIHFSPGLPKTRSGKIMRRILRKIAANEHEQLGDTTTLADPSVVESLVNERKNI

SEQ ID NO: 193348 - protein, 522 aa, Unknown
  Bacterial polypetide isolated from the Sargasso Sea
MSKDHKIYSPSADWTVNAHINSLDKYKEMYNKSIEDPDAFWSDIAKRITWYKPWEKVRDFNFQNGEIKWFENGKLNVSYNCLDRHVESGNGEKTAIIWEGNDPSEDKHYTYNKLLEKVKKFSNVLKDLGIEKGDRVCIYMQMVPELAIAMLACARIGAVHSVVFGAFSADSLRDRINDSQCKLLITQDTGVRGQKNNIPMKLNADKALVDTPSINSVVVVKRTGVDINMIDGRDVWWHEQIEKADANCDPVHMDSEDPLFILYTSGSTGKPKGVLHTTGGYLVYASFTHHTIFDYKDNDVYWCTADIGWITGHSYIVYGPLSNQATTIMFEGVPNYPDFGRFWDVVDKHEVNQFYTAPTALRALMKEGDAWVNSRKLDSLRILGTVGEPIKEPEWNWYHKIVGKERCPITDTWWQTETGGILISPLPGATPTKPGSATFPFFGIHPVLMTDDGKEIEGKNVQGLLALKTSWPGQMRTIYGDHKRFIETYFSQFPGYYFTGDGAKRDEDGYYWITGRVDDVLN

SEQ ID NO: 193349 - protein, 629 aa, Unknown
  Bacterial polypetide isolated from the Sargasso Sea
MNKEKIYNVPKDISEHSNVSESEFQVLYKQSLENPDEFWSSQAESYLDWDKKWEEVKNTNIEKGEIAWFSGGKLNASVNCIDRHLPKDKNKIAFIWEGDDPEESRNITYQDLHDEVCKFSNVLKARGVKKGDRVCIYMPMIPEATYAMLACARIGAIHSVVFGGFSPESLKDRILDSDCQTVITADEGLRGGKTIPLKQNVDEALEGCSNVHTVLVITRTEAEIPWNEDCDVRYEEISKNVSNECTPELMDAEDPLFILYTSGSTGKPKGVLHTTGGYLLQAAMSHKLVFDYKENEVYWCTADVGWVTGHSYIVYGPLANGATSVIFEGIPTYPSPSRFWEVIDKHKVNIFYTAPTALRALMAQGDDFVESSSRESLRILGTVGEPINPEAWEWYFKVVGNSSCPIVDTWWQTETGAMMITPVAGFTAMKPGSATKPFLGIEPALLDENGEEIVGEGSGNLVIKSSWPSQIRTVYGDHQRCVDTYYSMYPGYYTTGDGARRDADGYYWITGRVDDVLNVSGHRLGTAEVESALVLHQQVAEAAVVGYEHEIKGQGIYCYVTLMSDVSPNEELKSDLIQLVAKEIGPIAKPDIIQWAPGLPKTRSGKIMRRILRKIATNEIDNLGDTTTL

SEQ ID NO: 193350 - protein, 424 aa, Unknown
  Bacterial polypetide isolated from the Sargasso Sea
VCNCIDRHLPENAQKTAFIWEGDNPEEAKNISYQKLHDEVCKFANVLKARNVKKGDRVCIYMPMIPEATYAMLACARIGAIHSVVFGGFSPESLKDRILDSDCQTVITADEGLRGGKTVPLKENVDEALQGCPNVHTVLVITRTGAEISWNENCDVRFEEISKGVPSKCEPEIMDSEDPLFILYTSGSTGKPKGVLHTTGGYLLQAAMSHKLVFDYKDDEIYWCTADVGWVTGHSYIVYGPLANGATSLIFEGIPTYPSPSRFWEVIDKHKVNIFYTAPTALRALMAQGDEFVESSSRDSLRILGTVGEPINPEAWEWYFKVVGDSACPIVDTWWQTETGAMMITPVAGFTSMKPGSATKPFLGIEPALLDESGEEIIGEGSGNLVIKSSWPSQIRTVYGDHQRCIDTYYSMFPGYYTTGDGAR

SEQ ID NO: 193351 - protein, 431 aa, Unknown
  Bacterial polypetide isolated from the Sargasso Sea
KPFYKWYPDASLNTCFNAIDRHVMNGRGEQDAILYDSPVTKTKKKITYSELKYQVSIFAGALKNLGVLKGDRVIIYMPMIPEALVAMLACSRLGAIHSVVFGGFASNELAVRIDDCKPKIIVSASCGHEPNRIVEYKPLLDNAIKIASHQVERCIIYQREALNVELIPDQDIDWNEVVKDVSLADPVEVQANDPLYILYTSGTTGKPKGVVRDNGGHAVSLKWSMKNIYNVEPGDVYWAASDIGWVVGHSYIVYAPLLHGCTTILFEGKPVGTPDSGTFWRIISEYKVKVLFTAPTALRAVKRDDPNGEFIKKFDLTSLQSLFLAGERADPDTVLWLERKLNIPIIDHWWQTETGWPVAANPLGIESFPIKIGSPTLAMPGYDVRVLSEDGNEVPKGTLGAISIKLPLPPGSLPSLWNADDRFIESYLSTF

SEQ ID NO: 193352 - protein, 469 aa, Unknown
  Bacterial polypetide isolated from the Sargasso Sea
STCKILITQDTGVRGVKQNISMKANADKAVAETPSIEHVVVVKRTGEPVNMVKGRDVWWQDEMLEVNDECEPIEMNAEDPLFILYTSGSTGKPKGVLHSTAGYLLYTNFSFEMIFDYKQEDIYWCTADIGWITGHSYIVYGPLSNCATSIMFEGVPNYPDFGRFWDIVDKHKVNLFYTAPTALRALMKEGDQWVENRDLSSLRLLGTVGEPIKEPEWMWYHSVIGKEMSPIIDTWWQTETGGIMIAPLPGATPTKPGSATFPFFGIEPVLLTEEGDEIVGNDVSGLLAIKSSWPGQMRTVYGDHKRFIETYFSQFPGYYFTGDGAKRDKDGYYWITGRVDDVLNVSGHRIGTAEVEGAIGKTEDVAEAAVVGFPHDIKGQGIYAFVTLMTGIDPSDSIEKNIRDKVSKEIGPHAKPDRIQFTPALPKTRSGKIMRRILRKIAEGDFDNLGDISTLADPSVVDSLINNTN

SEQ ID NO: 193353 - protein, 457 aa, Unknown
  Bacterial polypetide isolated from the Sargasso Sea
FWSKHGKRIDWFKSYSNIKDVLYSKDDVKIRWYYDGTTNVSYNCVDRHAKITPDKIAIIWEGDDPTKVKKISYKELQSEVCKVANALKKVGVKKGDRVTIYLTMIPELAYVMLACARIGAIHSIIFGGFSSESIAGRIKDCNSEFVVTADEGVRGGKNIPLKDITDRALENCPDVKKCLVVKYTNNNVNMINDRDIFLNKLISEVDDYCEPEEMGAEDPLFILYTSGSTGKPKGVLHTTGGYLVYASMTHEYIFNYKKDDIYWCTADIGWITGHSYIIYGPLSNGATTLMFEGVPNYPTFSRFWEVIDKHKVNIFYTAPTAIRALMREGDDYVKKTSRSSLKLLGTVGEPINPEAWKWYYEIPGNSKCPIVDTWWQTETGGILISPQTGAIELKPGSASKPFYGIEPCIVNKDGEEQIGEAEGMLCLKNSWASQMRSVYGDHRRFISTYFSQFDGKY

SEQ ID NO: 193354 - protein, 210 aa, Unknown
  Bacterial polypetide isolated from the Sargasso Sea
MSEDNLYHPSEKAKKVSLINEKHFSEKYDYSIELNDKFWSEEGKKIEWIKPFSKVKDVSYDIKDLHIRWFYDGSLNVSSNCLDRHLEARGNQIAIIWEGDDPNETKKITYRELYEEVCKFSNALKANGAKKGDRITIYMPMIPEAAVAMLACARIGAIHSVVFGGFSPDSLAGRITDCDSNIIITADEGIRGGKIIPLKENTDAALKLCS

SEQ ID NO: 193355 - protein, 148 aa, Unknown
  Bacterial polypetide isolated from the Sargasso Sea
MTQEIYNPNPGFSNPHIKDFDEYLSLYKESIENPEKFFGDLAKENISWIEDFKEVHNSKFQETKWFVGGKTNITLNCIDRHLEKNGDKVALIWEGDEPGNSKEITFKELHSEVCRFANILKALQIKKGSKVCIYMPMIPEAAFAMFAC

SEQ ID NO: 193356 - protein, 409 aa, Unknown
  Bacterial polypetide isolated from the Sargasso Sea
MRQHRGVSAKCEPVAMDSEDPLFILYTSGSTGKPKGVLHTTGGYLVYASFTHQMVFDYHPGDIYWCTADLGWITGHSYIVYGPLSNRATTVMFEGVPNYPDFGRFWDVVDKHKVNQFYTAPTALRALMKEGNEWVSSRDLSSLRLLGTVGEPVKEPEWKWYYDIVGQGQCPIVDTWWQTETGGILITPLPGATPTKPGSATLPFFGVEPVLLTEDGKEIEGNNVSGLLALRSSWPGQMRTIYGDHKRFIDVYFSQCPGYYFTGDGARRDEDGYYWITGRVDDVLNVSGHRIGTAEVEGAIGKANGVAEAAVVGFPHDIKGQGIYAFVTLMTGVNESDEIYSGILESVKKDIGPHAKPDEIQFTPALPKTRSGKIMRRILRKIAEGDLDNMGDTSTLADPSVVESLTKGQ

SEQ ID NO: 193357 - protein, 654 aa, Unknown
  Bacterial polypetide isolated from the Sargasso Sea
MTEKLIESILNESRSFAPSKKFIKQANIDNEEAERLREEASQNHIEYWAKLARAHLHWFLPFNNILDESNAPNYEWFNDGEINASFNSLDINANKNPEKTAIIFETEDGNSECITYKDLLLRTSQFANGLKKLGVMPMDRVVIYMPMCPEAVIAMQACARIGAIHSVVFGGFSSNALKDRIEDAQSKIVITADGAYRGGSVIPLKQATDEAVTNSLHKVKNVVVFERTGEKIEFDQERDIWWTDLISDCPSHCDPEPLNAEHPLFILYTSGSTGKPKGIQHSTAGYILHAKTTFSWVFDIKEDDVFWCTADVGWITGHTYVAYGPLLAGATILIYEGAPTFPDVGRFWKICEKHAVTIFYTAPTAIRALMKHGDEIPNSYDLSQLRLLGTVGEPINPEAWMWYHSVIGQERCPIVDTWWQTETGGAMISPLPGVTNTKPGSCTTPIPGIDVDIVNESGEPVEEPNQGGYLVIKKPWPSMLRTIWGDNQRYIDTYWDKFDGRYYVAGDSAYKDEDGCHWIMGRIDDVLNVSGHRLGTMEVESALVANQKVAEAAVVGKPHEVKGESIFAFVVTKGDRPVGDEAKKMQEVLREWVSEQVGAIAKPDEIRFSDNLPKTRSGKIMRRLLRAIAREEAITQDISTLEDESIIRQLQGEE

SEQ ID NO: 193358 - protein, 690 aa, Unknown
  Bacterial polypetide isolated from the Sargasso Sea
MPKKKKKKSKVKKKSSKKVKKKTKVKKVSKKIKKKAKSKKENGSSPPEIVIKTKPEWVKASLANKSKYQQKYSQSIKSNDDFWRKEGKRITWIKPYKKIKDVRYSTKEVKIKWYEDGTLNASANCIDRHLKDKKDKTAIIWVGDDPKDSQKITYKQLHQKVSKAANGLKKLGIKKGDRVTIYLTMIPELAILMLACVRIGAVHSIIFGGFSAESISGRVNDCESEYIITADEGVRGGKTIPLKYTTDEALTSCPNVKKCIVVKRTGNYINWNEERDVWYHDLIKDVSSHCEPEEMNAEDPLFILYTSGSTGKPKGVLHTTGGYMVYASMTHQYIFNYKPKDIYWCTADIGWVTGHSYIIYGPLANGATTIMFEGIPNYPDTSRWWQIVDKYKVNIFYTAPTAIRALMREGDKPVKKTSRKSLKLLGTVGEPINPEAWMWYYKTVGNSKSPIVDTWWQTETGGILIAPQTGAIPLKPGSATKPFYGIKPVIVDKNGKEIKGAGEGRLCIAQSWPGQMRTVYGDHQRFIDTYFSQFNGKYFTGDGCRRDKDGYYWITGRVDDVIIVSGHNLGTAEIESAFVAHPKVAEAAVVGYPHDIKGNGLYCYVTLNAGETENGDLERDLKLWVRKQIGPLATPDLIHFTPGLPKTRSGKIMRRILRKIAANEHGQLGDTTTLADPSVVDSLVDNRKNI

SEQ ID NO: 193359 - protein, 311 aa, Unknown
  Bacterial polypetide isolated from the Sargasso Sea
MLKKKKVKKKVISKKPKEIIYKTKKEWISKATVNKSQYIKKYNESIKDNVGFWKKEGKRINWIKPYKKIKDVKYSKDDVHIKWFYDGTLNASANCIDRHLKKNAKKTAIIWIGDDPKVQKKITYKELHKEVSKAANGLKNLGVQKGDRVTIYLTMIPELAYTMLACARIGAVHSIIFGGFSPDSISGRINDCESDYVITADEGVRGGKTIPLKSITDEALQSCPNVKKCIVVKRTGTKKIDWFNDRDVWYHKMTSKVSAKCEPEEMNAEDPLFILYTSGSTGKPKGVLHTTGGYMVYTSMTHQYIFNYKPK

SEQ ID NO: 193360 - protein, 259 aa, Unknown
  Bacterial polypetide isolated from the Sargasso Sea
VIIYMPMIPEAVIAMLACARIGAIHSVVFGGFASNELASRIDDSKAKLLVTASCGFEPGRTVEYKPLVDEAIKLANHKISKMILFQRKGHEVKLNAPVEISWDEAHANAKDTDCVEMNSNEFAYILYTSGTTGTPKGIVRDIGGHIVALKWTMKNIYNIDEDDIWWSASDIGWIVGHSYIVYAPLFKGCTTVLFEGKPVGTPDAGAFWKIISDYKVKSLFTAPTAFRAIKKEDPEGKFFSKYDLSKFESLFLSRRACRP

SEQ ID NO: 193361 - protein, 363 aa, Unknown
  Bacterial polypetide isolated from the Sargasso Sea
MIPELAYTMLACARIGAVHSIIFGGFSPDSIATRINDCESDYVITADEGVRGGKIIPLKKIADEAMMQCPNVKKCVVVKRTGNTVDWNDDRDISYDDITKDVSDKCVAEEMNAEDPLFILYTSGSTGKPKGVLHTTGGYMVYASMTHQYIFDYKNKDIYWCTADIGWVTGHSYIIYGPLANGATTIMFEGVPNYPDSSRWWQIVDKYKVNIFYTAPTAIRALMREGDGPVKKTSRKSLKLLGTVGEPINPEAWMWYYKTVGEKKCPIVDTWWQTETGGILISPQPGAINLKPGSATKPFYGIKPAIVDESGKVLKGACKGRLCMTQSWPGQMRTVYGDHKRFIDTYFSQFDGKYFTGDGCRRD

SEQ ID NO: 193362 - protein, 175 aa, Unknown
  Bacterial polypetide isolated from the Sargasso Sea
MSLDKKNSINNILEEKRIFPPSKKFAENSNISTQEELLSLKKQASDNPIQFWESFAKSELDWFEPFQTVLDNENAPFFKWFKEGKLNITYNCLDRHIKRGLGEKTALIWEGEPGDSKKYTYEELLKEVCKAANALKAIGVKKGDLVCIYMPMIPEAMFAMLACARIGAPHSVVFG

SEQ ID NO: 193363 - protein, 636 aa, Unknown
  Bacterial polypetide isolated from the Sargasso Sea
MAENDKAAGRVASVMQEHRSFPPSKEFSSRSRIGSMEAYQALYEQAANDPNGFWAERAQSLPWMKPYDEVLRWAAPHAEWFVGGQTNASAACIDQHVEAGLGDKTAIVWVGEPTGERRTLSFRELKEEVSKAASGLSRLGVKQGEVVSIYMPMTPELVIAMLACARIGAVHSVIFGGFSSEAIADRNNDAQAVAVITSDGGWRRGSALPLKANVDEAVKKSPTVKHVVVLKRTGQEVAMVDGRDVWWHDMIANESGDFAPVPMDSESPLFILYTSGSTGKPKGIKHTTAGYLLWAKTTAEWVFDLRDDDLFWCTADCGWITGHSYVTYGPLAAGVGILIYEGAPDAPHQGRFWEIIEEEKPTIFYTAPTAIRAFMKWGPEHIDGKDLSSLRLLGTVGEGINPEAWMWYHETIGAERCPIVDTWWQTETGGIMMSPLPGCIPTKPGSCTLPLPGVCPEIVDASGEPVEPGEGGWLVMTKPWPGMLRGIWGDEERFVETYWERVPGKYLAGDNARKDEDGYYWIMGRIDDVLNVAGHRLSTIEIESALVSHPSVAEAAAVGRPHEVKGEAISVFVTLKSGEPDEAFKKELRQHVRQQIGAIASPDDVHFTAALPKTRSGKIMRRLLRDIAAGRETVGD

SEQ ID NO: 193364 - protein, 288 aa, Unknown
  Bacterial polypetide isolated from the Sargasso Sea
MSKFDIKNYVNPHITTLEDFNSQYKESIQNPSSFFLKKAISYLSWFQEPTIGHNGSFEEPKWFEDGILNISYNCIDRHAKKNPEKIAIIWQGDQESNSKEISYQELLEEVSKLANGLKSLGVKKGDRVCIYMPMIPEAAYSMFACMRIGAIHSVVFGGFSPEAISSRILDADCEYVITADEGIRGGKTIPLKFSVDKALEKCPKIKKVIVFQYTKTDVNWNNKLDISYEELVTNQSIECECTELKAEDPSFILYTSGSTGKPKGVLHTTAGYLIGANLSFKYIFGIKD

SEQ ID NO: 193365 - protein, 264 aa, Unknown
  Bacterial polypetide isolated from the Sargasso Sea
MVGEPINPEAWDWYYSVVGNKSCEVIDTWWQTETGSVLISPIAGITPTKPGSATLPFFGVRPELYDENGIQQSGEASGNLVIESSWPSQIRSVYNDHQRMIDTYFSTYSNIYFTGDGAKRDKDGYFWITGRVDDVLNVSGHRLGTAEVESALVLHPVVAEAAVVGFEHPIKGQGIYAFVTLMVGEEFSDELSAELRNFVGKEIGPIAKPDLIQNAPGLPKTRSGKIMRRILRKVAEGDFENLGDTTTLAEPAVVSDLINNKKSL

SEQ ID NO: 193366 - protein, 648 aa, Unknown
  Bacterial polypetide isolated from the Sargasso Sea
MSEKIENLLGEDRTFDPPTSIVENANATQEWFDLANEDRLAYWQKQALERITWYKEPKEILDDSDAPFYKWFKDGELNLSYNCLDRHLETDADRIAFYWEGEPGDSQEITYQDLYERVCKLSNGLKELGVNKGDRIAIYLGMTPEIVISMLACARIGAVHSVVFGGFSAEALADRINDAEAKVVITADGAWRRGDIVPLKQNVDDSLKLTDHIESVIVVKRTENEVTMVDGRDYWYSELVDKQEADCEPEVMNAEDMLYILYTSGTTAKPKGIVHTQAGYLTGVTTTHSAVFDVKEDDIYWCAADCGWVTGHSYIVYGPLANKTTSVMYEGAPNAPDEKRLWSIVEKYKVNIFYTAPTAIRAFMKWGVEHPQAHDLTSLRLLGTVGEPINPEAWMWYHENIGNESCAIVDTWWQTETGSIMITPLPGITSTKPGSACGPMPGIDAVVVDENGNEVSKGEGGYLAIKTPWPSMLRTVFGDEKRYIDTYWSKYDGMYFAGDGAKYDDDGYFWLLGRVDDVMNISGHRISTAEVESALVAHESVAEAAVIGRADEISGEAIAAFVTLIGGFEGNEDLISTLRQHVSDKIGPIAKPKSIVITNDLPKTRSGKIMRRLLKDISEERKLGDVTTLANADIVSELQTRSSESSDE

SEQ ID NO: 193367 - protein, 263 aa, Unknown
  Bacterial polypetide isolated from the Sargasso Sea
VGEPINPEAWKWYYEVPGNSKCPIVDTWWQTETGGILISPQTGAIELKPGSASKPFFGIEPCIVDKDGNELEGECEGMLCMKRSWPGQMRTVYGDHKRFIDTYFSQFNGKYFTGDGCKRDKDGYYWITGRVDDVIIVSGHNLGTAEIESAFVSHKDVSEAAVVGYPHDVKGNGLYCYVSLKVGVDTSDDLVADLKKTIREKIGPIATPDFIHITAGLPKTRSGKIMRRILRKIASNEFENLGDTSTLADPSVVDNLIENRKNK

SEQ ID NO: 193368 - protein, 416 aa, Unknown
  Bacterial polypetide isolated from the Sargasso Sea
VIIYMPMIPEAVFAMLSCARLGAIHSVVFGGFAPNELAIRIDDAKPKALVTASCGIEFNNIIEYKPLVDEALRISSHAPETVILLQRSQAKASMQAGRDFNWNDLMSSANPVDSVPVDATDPLYILYTSGTTGLPKGVIRENGGHAVALKYSMKAIFNTNPGEVYWAGSDVGWVVGHSYIVYAPLIHGCSTILYEGKPVRTPDAGAFWRVLDEHRVNTFFTAPTAFRAVKKEDPEAKLKQQYDISNLRTLFLAGERLDPPTYDWLEGIMNCPVIDHWWQTETGWPMCSNPMGLEPQPVKVGSATFPVPGYDIQVLDDEGKACDLGTTGNIVVKLPLPPSCLPSLWKDDERFRNSYLSQFPGYYQTGDGGIIDEDGYVFVMGRLDDVINVAGHRLSTGQMEELIGSHPGVAECAVVG

SEQ ID NO: 193369 - protein, 548 aa, Unknown
  Bacterial polypetide isolated from the Sargasso Sea
MGDVRRFSYRELHGEVCRAANALKALGIGKGDLVALYMPMVPEAAIAMLACARIGAPHSVVFGGFSADALRDRLIDGEAKAVITADGGFRKDKPVSLKPAVDEALAGGVVPSVQAVLVVQRTKEAVTMEPGRDHWWHYRVPQQSSDCPAEPMASEERLFVLYTSGSTGKPKGVVHTTAGYTLWAHLTFRWIFDLKEDDVHWCTADVGWITGHSYIVYGPLSNGATTVMYEGAPRPSKPGAFWELIEKHKITLFYTAPTAIRAFMKSGRAVPDGYDMSSLRILGTVGEPINPEAWIWYRDVIGGNRCPIIDTWWQTETGGVMISPLPGATPTKPGSATLPLPGIAADVVDASGNRASADEGGFLVVRRPWPGMMRTVHGDPDRFRRSYWEHLRAPDGSVIYFAGDGARRDADGYFWVMGRVDDVINVSGHRLGTMEIESALVSHPAVAEAAVVGRPDDLKGEGIVAFVSLEGGRDGSAELMAELRQHVGAEIGPIARPDEIRFSDALPKTRSGKIMRRILRALAAGEEVKGDTSTLEDRSVLERLRAEG

SEQ ID NO: 193370 - protein, 481 aa, Unknown
  Bacterial polypetide isolated from the Sargasso Sea
YLNQVEELKNNANATSEWFQDAEKDRLEYWKQQALNRITWFKEPTEVLDDSNAPFFKWFSDGELNLSYNCLDRHLETDGDRVAYYWEGEPGDTQEITYRDLYERVCKLSNALKSLGVQKGDRIAIYLGMTPEIVVSMLACARIGAVHSVVFGGFSAEALADRINDAEAKVVITADGAWRRGEIVPLKENVDNSLELTEFIESVVVVKRTEQEVNMKDGRDYWYEEIVEKQSAECEPEVMNAEDLLYILYTSGTTAKPKGIVHTQAGYLTGVTTTHSAVFDVKDDDIYWCAADCGWVTGHSYIVYGPLANKTTSVMYEGAPNAPDEKRLWSLVEKYKVNIFYTAPTAIRAFMKWGVEHPKAHDLSSLRLLGSVGEPINPEAWMWYHENIGNEQCAIVDTWWQTETGSIMISPLPGITSTKPGSACGPLPGVDSVIIDEKGNEVGKGEGGYLAIKSPWPSMLRTVYGDEKRYIDTYWSQHEGL

SEQ ID NO: 193371 - protein, 283 aa, Unknown
  Bacterial polypetide isolated from the Sargasso Sea
MFEDGDGKSLIKVSDSWANHAYVNESKYKKKYKLSIKENEKFWAKEGKRITWIKKYSKIKDVKYSKEEVKIKWFYDGTLNASANCIDRHLKKNPSKTAIIWVGDDPADSKKISYRELHQNVCKAANGLKSLGVQKGDRVTIYLTMIPELAYIMLACARIGAVHSIIFGGFSPDSIATRISDCESEYLITADEGVRGGKIIPLKKIADEALDQCPNVKKCVVVERTGNQVNWNNERDISYKKLISSVPTKCDPEEMSAEDPLFILYTSGSTGKPKGVLHTTGGY

SEQ ID NO: 193372 - protein, 333 aa, Unknown
  Bacterial polypetide isolated from the Sargasso Sea
MNSNFEKIYNESIKNPEEFWKKVADDMFWFKKPTKILNKSKAPFYKWYEDGVTNTCYNALDFHIDNGRGERTALIYDSPITGNKKKISYKELKEKVSKFAGALQDQGVKKGDRVIIYMPMIPEAVIGMLACGRIGAIHSVVFGGFASNELASRIDDSKAKVLLTASCGFEPGRTVQYKPLVDEAIKLASHKIEKLILFQRPDNEVKLNSPNEISWEEALSNAKNVDCVEMNANEFAYILYTSGTTGIPKGIVRDVGGHIAALKWTMKNIYNIDQDDVWWSASDIGWIVGHSYIVYAPLFKGCTTVLFEGKPVGTPDAGAFWKIISEYKVKSLF

SEQ ID NO: 193373 - protein, 479 aa, Unknown
  Bacterial polypetide isolated from the Sargasso Sea
DSIATRITDCESEYLITADEGVRGGKIIPLKKIADEALDQCPNVKKCVVVERTGNQVDWNNERDVSYKELISSAPTKCDPEEMSAEDPLFILYTSGSTGKPKGVLHTTGGYMVYASMTHQYIFDYKANDIYWCTADIGWVTGHSYIIYGPLSNGATTIMFEGIPNYPDSSRWWQIVDKYKVNIFYTAPTAIRALMREGDAPVKKTHRKSLKLLGTVGEPINPEAWMWYYKTVGDSRCPIVDTWWQTETGGILIAPQPGAIDLKPGSATKPFYGIKPVLVDKDGKVIKGEGKGRLCMASSWPGQMRTVYGDHQRFIDTYFSQFDGKYFTGDGCKRDKDGYYWITGRVDDVIIVSGHNLGTAEIESAFVAHPKVAEAAVVGFPHSIKGNGLYCYVTLNAGENPTGDLERDLKLWVRKQIGPIATPDVIQFAPGLPKTRSGKIMRRILRKIAANEPENLGDTTTLADPSVVTSLVENRQNKG

SEQ ID NO: 193374 - protein, 398 aa, Unknown
  Bacterial polypetide isolated from the Sargasso Sea
KEVNIKWYYDGTLNASANCIDRHLEKKGNKPAIIWVGDDPADSKKISYKELHKNVCKAANGLKSIGIQKGDRVTIYLTMIPELAYIMLACARIGAVHSIIFGGFSPDSIATRINDCESDYVVTADEGVRGGKIIPLKKIADEAMEQCPNVKKCVVVKRTGNTVNWNNERDISYEEITKNVSDKCLPEEMNAEDPLFILYTSGSTGKPKGVLHTTGGYMVYASMTHQYIFDYKNRDVYWCSADIGWVTGHSYIIYGPLANGATTMMFEGVPNYPDSSRWWQIIDKFKVNIFYTAPTAIRALMREGDNPVKKTSRKSLKLLGTVGEPINPEAWMWYYKVVGETKCPIVDTWWQTETGGILISPQPGAINLKPGSATKPFYGIKPAIVDESGKVLKGACKG

SEQ ID NO: 193375 - protein, 394 aa, Unknown
  Bacterial polypetide isolated from the Sargasso Sea
EVKKCLIVKRTNKEIEIKLNRDVFYQDLINEVEDICEPEILNAEDPLFILYTSGSTGKPKGVMHTSGGYLVYASMTHEYIFNYKPDDIYWCTADIGWITGHSYIIYGPLANGATTLMFEGVPNYPDFSRFWQIVDKHKVNIFYTAPTAIRALMREGDEYVKKTNRSSLKLLGSVGEPINPEAWKWYFEVPGNSKCPIVDTWWQTETGGILISPQTGAMELKPGSASRPFFGIEPCIVNKEGKELEGECEGMLCMKRSWPGQMRTVYGDHKRFIDTYFSQFDGKYFTGDGCRRDKDGYYWITGRVDDVIIVSGHNLGTAEIESAFVSHKDVSEAAVVGYPHEVKGNGLYCYVSLKVGVDTSDDLVNDLKTTIREKIGPIATPDFIHITSGLPKTR

SEQ ID NO: 193376 - protein, 376 aa, Unknown
  Bacterial polypetide isolated from the Sargasso Sea
GVLHTTGGYMVYASMTHQYIFNYRPKDIYWCTADIGWITGHSYIIYGPLANGATTIMFEGIPTYPDTSRWWQIVDKYKVNIFYTAPTAIRALMREGDGPVKKTSRKSLKLLGTVGEPINPEAWQWYFKTVGDSKCPIVDTWWQTETGGILISPQTGAIDLKPGSATKPFYGIKPVIVDQEGKVLKGEARGRLCIAQSWPGQMRTVYGDHNRFIETYFSQFDGKYFTGDGCRRDKDGYYWITGRVDDVIIVSGHNLGTAEIESAFVAHPKVAEAAVVGYPHDIKGNGLYCYVTLNVGENHDGDLERELKLWVRKQIGPIATPDLIHFSPGLPKTRSGKIMRRILRKIAANEHEQLGDTTTLADPSVVKSLVDNRKNI

SEQ ID NO: 193377 - protein, 337 aa, Unknown
  Bacterial polypetide isolated from the Sargasso Sea
MNFDIKDFKNPNLKDLDEYRHMYEKSVTDPSSFFLEHALKELDWFEKPSVGYSGKITKPTWFKDGVLNITHNCIDRHAAKNPNKTAIIWQGDEKENTKNISYDQLLTEVSKLANGLKSIGVKKGDRVCIYMPMIPEAAYSMLACMRIGAIHSVVFGGFSPEAISSRILDSDCQYVITADEGIRGGKRVNLKENIDIALKNCPNVQKTIVFKYTNAKIDWVDSRDVCYDELISQMPDVCKPEKMHAEDPSFILYTSGSTGKPKGVMHTTGGYLLGATMSFKYIFGFSSEDVYWCTADVGWVTGHTYIVYGPLSNGATTLMFEGIPTYPDPSRFWEVCD

SEQ ID NO: 193378 - protein, 648 aa, Unknown
  Bacterial polypetide isolated from the Sargasso Sea
MTASKTYPVPENILQSTHLTASQYDEMYKQSVEQPEAFWAEHASMLEWYQKPTKIKNTMFGENDVSIKWFEDGELNASYNCIDRHLANNATKVAFHWEGDSPEDSQDITYQQVHYEVCKLANALKDMGVTKGDRVAIYMPMVPEAAYAMLACARIGAVHSVIFGGFSPNAIADRINDSNAKVVITADEGRRAGRSIPLKANVDKALAGDACPSITHVLVHKLTGGDVDWNDKHDVWWHDAVEGKSAQCEPEVMNAEDPLFILYTSGSTGTPKGVVHTTGGYLLYSAMTFKYAFDYKDDDVYWCTADVGWITGHSYMVYGPMVNAASQVFFEGVPTYPDVKRIAQVVEKYKVNSLYTAPTAIRALMAHGDVPAEGCDLSSLRLLGTVGEPINPEAWEWYHRVIGKGRCPIIDTWWQTETGGHMILPLPGATELKPGSATRPFFGIQPALFDADGKELEGVAEGNLVIKDSWPSQARTVYGDHQRFINTYFSAYKGVYFTGDGARRDEDGFYWITGRVDDVLNVSGHRLGTAEIESALVAHPKVAEAAVVGFPHDIKGQGIYVYVTPNEGVEADEALTKELKAWVRQELSPIATPDMIQWSRGLPKTRSGKIMRRILRKIAANEHEQLGDTSTLADPSVVDTLIEERLNK

SEQ ID NO: 193379 - protein, 650 aa, Unknown
  Bacterial polypetide isolated from the Sargasso Sea
MSSQSLYKVSGNIAANALVNNDQYKTMYQESIVNPEGFWREHGKRIDWIKPYTKIKKTTFDDHNLSINWFYDGTLNASANCLDRHLAAHSDRVAIIWEGDNANEQRKITYGELHTQVCKFANALRSQGVRRGDIVTIYMPMVPEAAVAMLACARIGAVHSVVFGGFSPDSIASRVIDGKSKIVITSDEGMRGGRAIPLKHNIDDALKHPDVTSVEKVIVLQRTGGKIDWVEGRDVWWHSLVETASEHCAVEEMGAEDPLFLLYTSGSTGNPKGVLHTTGGYMVYASMTHEYVFDYKPGEIYWCTADVGWITGHSYMVYGPLANGATVLIHEGVPNHPSPARLGEMIDRHKVNILYTAPTLIRALMAEGKQHFDKYDGSSLRIMGSVGEPINPEAWRWYHEVIGHEHCPIVDTWWQTETGGILITPLPGATDTKPGSATRPFFGVQPALVDNMGNILEGATEGNLVLLDSWPGQMRTVYGDHERFVLTYFKTFRGMYFTGDGARRDEDGYYWITGRVDDVINVSGHRLGTAEVESALVSHELVAEAAVVGYPHDIKGQGIYAYVTLTRGTEESEELRQELRQWVRKEIGALATPDLIQWATGLPKTRSGKIMRRFLRKIAANEVTNLGDASTLADPAVIETLIETRLNRNE

SEQ ID NO: 193380 - protein, 417 aa, Unknown
  Bacterial polypetide isolated from the Sargasso Sea
RDVSYKELISSVPSKCDPEEMNAEDPLFILYTSGSTGKPKGVLHTTGGYMVYASMTHQYIFDYKANDIYWCTADIGWVTGHSYIIYGPLANGATTIMFEGVPNYPDSSRWWQIVDKYKVNIFYTAPTAIRALMREGDGPVKKTSRKTLKLLGTVGEPINPEAWMWYYKTVGDSRCPIVDTWWQTETGGILIAPQPGAIDLKPGSATKPFYGIKPVLVDNDGKVIKGEGKGRLCMASSWPGQMRTVYGDHQRFIDTYFSQHDGKYFTGDGCKRDKDGYYWITGRVDDVIIVSGHNIGTAEIESAFVAHPKVAEAAVVGFPHSIKGNGLYCYVTLIAGENPSGDLERELKQFVKRLVGAHCYPDIIQFAPGLPKTRSGKIMRRILRKIAENDPDNLGDTTTLADPTVVASLVENRQNKG

SEQ ID NO: 193381 - protein, 480 aa, Unknown
  Bacterial polypetide isolated from the Sargasso Sea
SPESLKDRILDSDCRIVITADEGVRGGKKVPLKANVDKALMQCPNVTNVVVVQRTQGHIAWHEGRDLWYHDLKKSAEKECPPEPMKAEDPLFILYTSGSTGKPKGVLHTTGGYLLGAHLSFKYLFGYEDSDKYWCTADVGWITGHTYILYGPLSNGATTLMFEGLPNYPTASRCWEVCDKYEINIFYTAPTAIRALMAQGNEFVTKTQRSSLKVLGTVGEPINPEAWHWYYEVVGNANCEVIDTWWQTETGSVLISPIAGVTPTKPGSATLPFFGVIPEIFDDQGNAKEGAVSGNLVIKHSWPSQIRSVFNDHQRMIDTYFSTYADIYFTGDGARRDEDGYFWITGRVDDVLNVSGHRLGTAEIESALVLHEKIAEAAIVGFEHPIKGQGIYAFITLMSGEVFYDGFEQELRNFVATEIGPIAKPDLIQNAPGLPKTRSGKIMRRILRKIAAGDIKELGDTTTLADPSVVEALVEGAKSL

SEQ ID NO: 193382 - protein, 279 aa, Unknown
  Bacterial polypetide isolated from the Sargasso Sea
YIVYGPLCNGGTSLVFEGVPTYPNMSRFWEVIDKHQVNQFYTAPTAIRALMGGGDTWLESTSRSSLKLLGTVGEPINPEAWDWYFNKVGGGRCPVVDTWWQTETGAHMLTPLPGATTLKPGSANRPFFGIQPALLDAEANEISGEGEGILVIKTSWPSQIRTVFGDHDRCVDTYFSAYPGYYFTGDGARRDEDGDYWITGRIDDVLNISGHRIGTAEIESALVLHSKVAEAAVVGCPHEIKGQGIYCYVTPMSHVIPDDDLYDELIGVVRERNWGKCKT

SEQ ID NO: 193383 - protein, 508 aa, Unknown
  Bacterial polypetide isolated from the Sargasso Sea
MPMIPEAAYAMLACTRIGAIHSVVFGGFSPEALAGRINDCNSSLIITADEGIRGGKKIPLKKNTDEALLKAKCCKKCLVVKRTGGDVNWNEERDFWYDEISSNVSHECQPEEMNAEDPMFILYTSGSTGKPKGVLHTTGGYMVYASMTHEYVFDYKKNEIYWCTADVGWVTGHSYIVYGPLSNGATTLMFEGVPNYPSVSRFWEVVDKHKVNIFYTAPTAIRALMAEGDKPVKLTSRKSLRILGTVGEPINPEAWNWYNEVVGEKKCPIVDTWWQTETGGILITPLPGATETKPGSATKPFFGIKPILVDNENNELSGATEGNLCIEMSWPGQMRTVYGDHERFIDTYFKTFPGRYFSGDGCKRDEDGYYWITGRVDDVINVSGHRMGTAEVESALVSHTNVAEAAVVGYPHDIKGQGIYAYVTLNIGTEDSQELLKELKSWVRKEIGPIATPDLIQFSPQLPKTRSGKIMRRILRKIAANEYSDLGDVSTLADPNVVENLIANRQNQ

SEQ ID NO: 193384 - protein, 568 aa, Unknown
  Bacterial polypetide isolated from the Sargasso Sea
FNCIDRHLKNNANKVALIWEGDDPSDSISLTYQQLHDEVCKFSNVLKNLGVRKGSRVCIYMPMIVEAAFAMLACTRIGAVHSVVFGGFSPESLKDRILDADCKIVITADEGLRGGKKVPLKLNVDEALKECPNVKSTLVIKRTGGDISWDENRDVWYEELSKDAETTCNPEPMDSEDPLFILYTSGSTGKPKGVLHSTAGYLLGAHISFKYLFGIRPEDKYWCTADVGWITGHTYILYGPLSNGATTLMFEGIPTYPSASRCWEICDKHEINIFYTAPTAIRALMAQGDEPVLKTKRNSLRVLGTVGEPINPEAWDWYYSIVGQSKCEIIDTWWQTETGSVLISPIAGVTPTKPGSATLPFFGVKPALYDESGKTLDGPNSGNLVMEQSWPSQIRSVYGDHQRMLDTYFSIYNDIYFTGDGARRDEDGYYWITGRVDDVLNVSGHRLGTAEIESSLVLHPKVAEAAVVGFDHPIKGQGIYAFVTLMIGESYSDELNNELKQFVAKEIGAIAKPDLIQNAPGLPKTRSGKIMRRILRKIAEGDLSNLGDTTTLADPSVVDSLISNKISL

SEQ ID NO: 193385 - protein, 526 aa, Unknown
  Bacterial polypetide isolated from the Sargasso Sea
GIKKGDRAIIYMPMIPEAVVAMLACGRIGAIHSVVFGGFASNELANRIDDSKANILITASCGFEPGKTVEYKPLVDEALKLASHKIDKLILFQRSGHEVKLNAPKELNWDEVLSNAQNVDCVEMNSNEFAYILYTSGTTGAPKGIVRDIGGHIVALKWTMKNIYNIDTDDIWWSASDIGWIVGHSYIVYAPLFKGCTTVLFEGKPVGTPDAGVFWKIISDYKVKSLFTAPTAFRAIKKEDPEGKFFSKYDLSSFKSLFLAGERADPDTIKWAEKLLKVPVIDHWWQTETSWAISSNCTGIEMMKTKYGSACKAVPGYDVKIIKPDQTLAKPNEMGDIVVKLPLPPGTFPTLWNADKRYEETYMTNYEGYYQTYDAGHIDDDGYISIMSRTDDIINVAGHRLSTGAIEEVLSEHQSVAECAVLGIADKLKGQLPIGLITLKTGVDKDDETITKECIQMVRDKVGPVAAFKVAIIVKRLPKTRSGKILRGTVRKIADNEPYKMPATIDDPTILTEIKEDLIKNNILKD

SEQ ID NO: 193386 - protein, 394 aa, Unknown
  Bacterial polypetide isolated from the Sargasso Sea
EDPLFILYTSGSTGKPKGVLHTTGGYMVYASMTHQYIFDYKSNDVYWCTADIGWVTGHSYIIYGPLANGATTIMFEGVPNYPDNSRWWQIVDKYKVNIFYTAPTAIRSLMREGDKPVKKTNRKSLKLLGTVGEPINPEAWMWYYKVVGDSRCPIVDTWWQTETGGILIAPQPGAIDLKPGSATKPFYGIKPVLVDKDGKVIKGEGKGRLCMAQSWPGQMRTVYGDHQRFIDTYFSQVDGKYFTGDGCRRDKDGYYWITGRVDDVIIVSGHNLGTAEIESAFVAHPKVAEAAVVGFPHSIKGNGLYCYVTLNMGEQATGDLERDLKLWVRKQIGPIATPDVIQFAPGLPKTRSGKIMRRILRKIAANDPGNLGDTTTLADPSVVESLVQNRQNKG

SEQ ID NO: 193387 - protein, 345 aa, Unknown
  Bacterial polypetide isolated from the Sargasso Sea
TADIGWVTGHSYIIYGPLANGATTIMFEGIPNYPDTSRWWQIVDKYKVNTFYTAPTAIRALMREGDKPVKKTSRKSLKLLGTVGEPINPQAWMWYYKTVGNSKCPIVDTWWQTETGGIMIAPQTGAIPLKPGSATKPFYGIKPAIVDKNGKEIKGAGEGRLCISQSWPGQMRSVYGDHQRFIDTYFSQFNGKYFTGDGCRRDKDGYYWITGRVDDVIIVSGHNLGTAEIESAFVAHPKVAEAAVVGYPHDLKGNALYVYVTLNLGEKENGDLERELKNHVARTLGPIYRPDIIHFTPGLPKTRSGKIMRRILRKIAANEHGQLGDTTTLADPTVVESLVDNRKNI

SEQ ID NO: 193388 - protein, 320 aa, Unknown
  Bacterial polypetide isolated from the Sargasso Sea
MFEGIPTFPNASRFWEVIDKHNVNIFYTAPTALRALMAQGDEYVKSSSRESLRILGTVGEPINPEAWEWYYKVVGNSKCPIVDTWWQTETGAMMITPLAGSTPLKPGSATKPFLGVEPALLDENGNEIEGEGSGNLVIKSSWPSQIRSVYGDHQRCVETYYSMYPGYYTTGDGARRDKDGYYWITGRVDDVLNVSGHRLGTAEVESALVLHEKVAEAAVVGYEHEIKGQGIYCYVTLMLGQDPSDNLRNDLIQLVGKEIGAIAKPDIIQWAPGLPKTRSGKIMRRILRKIASNEVDDLGDTTTLADPSVVEELIKNRENK

SEQ ID NO: 193389 - protein, 352 aa, Unknown
  Bacterial polypetide isolated from the Sargasso Sea
DDVFWCTADVGWITGHTYVAYGPLLAGATILIYEGAPTFPDVGRFWDICEKHAVTIFYTAPTAIRALMKHGDEIPQSYDLSSLRLLGTVGEPINPEAWMWYHRIIGQERCPIVDTWWQTETGGAMISPLPGVTETKPGSCTTPMPGIDVDIVDELGEPVGEANQGGYLVIKKPWPSMLRTIWGDNQRYIDTYWEKFDGRYYVAGDSAYRDEDGCHWIMGRIDDVLNVSGHRLGTMEVESALVANEMVAEAAVVGRPHEVKGESIFAFVVTKGERPIGEGAKKMQEALREWVAEQVGAIAKPDEIRFSDNLPKTRSGKIMRRLLRAIARDEAITQDISTLEDESIIKQLQGED

SEQ ID NO: 193390 - protein, 435 aa, Unknown
  Bacterial polypetide isolated from the Sargasso Sea
MSDKFNKIYEQSINNPEKFWSEAANDIFWFKKPTKILNKSNPPFYKWYEDGVTNTCYNALDIHIDQGKGKRTALIYDSPITGNKSKFSYEELRSKVSIFAGALKDQGVNKGDRVIIYMPMIPEAVVAMLACARIGAIHSVVFGGFASNELASRIDDSKAKVLVTASCGFEPGRTVEYKPLVDEAIKLANHKIDKMILFQRSGNEVKLNAPKEVSWEEVVSKANEVDCVEMNSNEFAYILYTSGTTGTPKGIVRDIGGHIVALKWTMKNIYNIDAGDIWWSASDIGWIVGHSYIVYAPLFKGCATVLFEGKPVGTPDAGAFWKIISDYKVKSLFTAPTAFRAIKKEDPEGKFFSKYDLSKFESLFLAGERADPDTIKWAENLLNVPVIDHWWQTETSWAISSNCTGIEMMETKYGSACKAVPGYDVKIIKSDQTFG

SEQ ID NO: 193391 - protein, 291 aa, Unknown
  Bacterial polypetide isolated from the Sargasso Sea
TAIRAFMKWGVEHPQAHDLTSLRLLGTVGEPINPEAWMWYHENIGNESCAIVDTWWQTETGSIMITPLPGITSTKPGSACGPMPGIDAVVVDENGNEVSKGEGGYLAIKTPWPSMLRTVFGDEKRYIDTYWSKYDGMYFAGDGAKYDNDGYFWLLGRVDDVMNISGHRISTAEVESALVAHESVAEAAVIGRADEISGEAIAAFVTLIGGFEGNEDLISTLRQHVSDKIGPIAKPKSIVITNDLPKTRSGKIMRRLLKDISEERKLGDVTTLANADIVSELQTRSSESSDE

SEQ ID NO: 193392 - protein, 368 aa, Unknown
  Bacterial polypetide isolated from the Sargasso Sea
YLVYASMTHEYIFNYKKDDIYWCTADIGWITGHSYIIYGPLSNGATTLMFEGVPNYPTFSRFWEVIDKHKVNIFYTAPTAIRAIMREGDDYVKKTSRSSLKLLGTVGEPINPEAWKWYYEIPGNSKCPIVDTWWQTETGGILISPQSGAIDLKPGSASKPFYGIEPCIVNKDGEEQSGEAEGMLCLQNSWPGQMRSVYGDHERFISTYFSQFDGKYFTGDGCRRDKDGYYWITGRVDDVIIVSGHNLGTAEIESAFVSHPKVSEAAVVGYPHDIKGNGLYCYVSLIVGAESNEGLKLELIQTIRSKIGPIATPDFIHFTDGLPKTRSGKIMRRILRKIAANEEDQLGDITTLADPSVVKKLIENKLNN

SEQ ID NO: 193393 - protein, 635 aa, Unknown
  Bacterial polypetide isolated from the Sargasso Sea
MTDVGQQLHQTSIANKQAFWQQAAKALDWVTPSKQILDESEAPFYHWFSDGELNTCYNAVDRHVLAGRGEQIAIHYVSPVTETEYSITYRELQAQVARLAGYLQSVGVTKGDRVVIYMPMVPETAYAMLACARIGAIHSVVFGGFAANELATRINDAKPKLVMSASCGIEPSGVVPYKPLLDKALNEAVHKVEHCLILNRPQYEAQMQAGRDKDWQTALCTSDSADCVTVKATDPLYVLYTSGTTGQPKGVVRDNGGHAVALAWSMANIYDIAQGDVFWAASDVGWVVGHSYIVYGPLLVGATTLLYEGKPVGTPDPGAFWRTIAKYRVKSFFTAPTAIRAIKREDPDGEFIQGVDLSCLKNVFLAGERCDPDTLHWAEAKLKKPVIDHWWQTETGWPVAANLMGVAPIAVKAGSPGRPVPGYEVDVVDEMGAKVAANVSGNVVIKLPLPPGTLTTLWQNNKRYQDSYLSMYPGYYLTGDAGYMDEDGYLYIMSRIDDIINVAGHRLSTGRFEEVLCQHPDVAEAAVIGVDDKLKGQVPLGLVVLKKGVTITDEELHKQLIALVRQEIGPVASFRLVSAIQKLPKTRSGKILRGTMRKIADNQQYTAPATIEDPQTLDLVRTTLTRMGYADALVG

SEQ ID NO: 193394 - protein, 315 aa, Unknown
  Bacterial polypetide isolated from the Sargasso Sea
MVQKGQIDHLLQESDVISPPDTLKSNANLPNYEEEYQQSIENPEAFWESVAKELHWFSPWDKIYENSFPNFKWFINGKCNITYNALDRHLDENRNKVALIWLAEDGSERTFTYGRLHNLVCKFANGLKSLGITKGDRVVIYMPLTPEGVIAMLACARIGAVHSVVFAGFSVSALADRIDDVQAKALITGDIGIRRGNHVDLKSIADAAQQRSTTLEHTIVWRRLGEQTPLLQNQIDFDQLVSQSSSHCPAEVMDSEDPLYILYTSGTTGKPKGVLHVHGGYMVGTYYHFKTFWDIKKNDTFWCTSDIGWVVGHSY

SEQ ID NO: 193395 - protein, 646 aa, Unknown
  Bacterial polypetide isolated from the Sargasso Sea
MSESIKIPVFENFKNKAHITKDKYDEIYKFSSDNPESFWKKEGQRINWINPYTKIKDVTWSNNNVDIKWFYDGTLNASYNCIDRHLLDKPDKVAIIWEGDDPNDSLKITYKELHKKVSKFANMLKHYGVQKGDRVTIYMPMIPEAAYAMLACSRIGAIHSVVFGGFSPDALAGRILDCDSKYLITADEGIRGGKLVPLKANSDKALEQCKDVKNVFVVKRTGGNIEMKDGRDIWYHEAIEQVDDECPPEEMNAEDPLFILYTSGSTGKPKGVLHTTGGYMVYASYTHEIIFDYHDNDIYWCTADVGWVTGHSYIVYGPLANGATTLMFEGVPNYPSNSRFWEVCDKHSVNIFYTAPTAIRALMKEGNSPVESTSRKSIRLLGTVGEPINPEAWMWYFNIVGEKRCPIVDTWWQTETGATLISPLPGATDLKPGSASKPLPGIKPVLLDSEGSILEGENEGNLCIADSWPGQMRTVYGDHKRFIETYFSQYDGYYFTGDGCKRDEDGYYWITGRVDDVINVSGHRMGTAEVESALVSHTKVSEAAVVGFPHEIKGQGIYAYVTLNAGENGNEEIRKELVNWVRKEIGPIASPDLIQFAPNLPKTRSGKIMRRILRKIAENDYSELGDTSTLAEPTVVNELIENRQNK

SEQ ID NO: 193396 - protein, 284 aa, Unknown
  Bacterial polypetide isolated from the Sargasso Sea
MREGDKPVKKTSRKSLKLLGTVGEPINPEAWMWYYKTVGNSKSPIVDTWWQTETGGILIAPQTGAIPLKPGSATKPFYGIKPVIVDKNGKEIKGAGEGRLCIAQSWPGQMRTVYGDHQRFIDTYFSQFNGKYFTGDGCRRDKDGYYWITGRVDDVIIVSGHNLGTAEIESAFVAHPKVAEAAVVGYPHDIKGNGLYCYVTLNAGETENGDLERDLKLWVRKQIGPLATPDLIHFTPGLPKTRSGKIMRRILRKIAANEHGQLGDTTTLADPSVVDSLVDNRKNI

SEQ ID NO: 193397 - protein, 349 aa, Unknown
  Bacterial polypetide isolated from the Sargasso Sea
MKNIESNFKESRIYTPNKNFAKSATVTDKILVNLYDEYKKNPDVFWSNLAKQEIKWIKEFTNVCEGNAPDFKWFKEGKLNISENCLDRHITNENDAIIHISEENKKQVISYKELYQKVNNFSFALKSLDIKKGSRVIIYMPTIPESIIAMLSCARLGLIHSVVFAGFSSESLKNRINDCEAELIITVDSFRRNGKIIMSKETVDNAIRQDCPSIKNIIVFKNSDEDVSFNPNIDLWWHDILPKSDQTISPEVMSSEDILFILYTSGSTGKPKGIIHTSAGYLLNCILTNKWVFDLKKDDIFWCTADIGWITGHSYVVYGPLATGSTILIYDGAPTFPKEDRFWEIISQN

SEQ ID NO: 193398 - protein, 517 aa, Unknown
  Bacterial polypetide isolated from the Sargasso Sea
MQRIKTLSEYFKKYELSEKDPEKFWSEIADSFIWKKKWDNVLESDFENADFKWFKNAQLNITENIFERNLSERGDKTAIIWEPNDPKESPIYLSYKELYKQTCTFSNALRSKGIKKGDRVIIYMPMVPEAAIAMLACARVGAVHSVVFAGFSAASLADRINDCEAKMVLTSDGNFRGNKTIPVKDVVDEALEKCSSIESVIVLERTKQNINMEDGRDFWWHECIEDESNICDSEVMDSEDLLFILYTSGSTGKPKGVVHSSAGYMVYSSYTFLNVFQYDEEDIYWCTADVGWITGHSYIVYGPLLCGATTVMFEGVPTYPNVSRFWDIVDKYKINQFYTAPTAIRALQAHGLEPIKNNSLDSLKVIGSVGEPINEEAWHWYHDNVGKGKCPLVDTWWQTETGGIMISALAGITPNKPAHASLPLPGIIPVIVDAEGNELSGNNVQGNLCIKSPWPSIIRSTYGDHERCISTYFSHYKGMYFTGDGVKRDHDGYLRILGRVDDVINVSGHRMGTAGSE

SEQ ID NO: 193399 - protein, 147 aa, Unknown
  Bacterial polypetide isolated from the Sargasso Sea
CRRDKDGYYWITGRVDDVLNVSGHRMGTAEVESALVAHSSVSESAVVGFPHKIKGQGIYAFVTLMSGKEPSDELKDELKNWVSKEIGAIAKPEVIQWAPGLPKTRSGKIMRRILRKIAENQFDELGDTSTLADPSVVESLIQNRLSS

SEQ ID NO: 193400 - protein, 186 aa, Unknown
  Bacterial polypetide isolated from the Sargasso Sea
MTKERIYEPSEKIINDAVISNDEFEELYKESINNPDQFWDQQARTYLLWDKEWDVIKESDLTKGDISWFKGAKLNASVNCIDRHLENNGEKTAIIWEGDDPQDSLKITYKQLHESVCRFANALKKRGISKGDRVCIYMPMIPEAAYAMLACARIGAIHSVVFGGFSPESLKDRILDSDCESVITAD

SEQ ID NO: 193401 - protein, 549 aa, Unknown
  Bacterial polypetide isolated from the Sargasso Sea
WINKALVKKSEYENKYKKSLKNNEEFWKKEGKRITWIKPYKKIKNVKYSKDEVRIKWYEDGTLNASANCIDRHLKDKKDKTAIIWVGDNPKDTKKITYKQLHKEVSKTANGLKQLGIKKGDRVTIYLTMVPELAITMLACARIGAVHSIIFGGFSADSIAGRIDDCKSDYVITADEGIRGGKTIPLKYTVDEALSKCRNIKKCIVVKKTGNYINWDNNRDVWYHEIIKNVSTQCDPEEMNAEDPLFILYTSGSTGKPKGVLHTTGGYMVYASMTHQYIFNYKPKDIYFCSADIGWITGHSYIVYGPLANGATTIMFEGIPTYPDTSRWWQIVDKYKVNIFYTAPTAIRALMREGEAPVKKTSRKSLKLLGTVGEPINPEAWQWYYKVVGDSRCPIVDTWWQTETGGILISPQTGAIDLKPGSATKPFYGIKPVIVDNDGKVLKGEAKGRLCIAQSWPGQMRTVYGDHNRFIETYFSQFDGKYFTGDGCRRDKDGYYWITGRVDDVIIVSGHNLGTAEIESAFVAHSKVAEAAVVGYPHDIKGNGLYCYV

SEQ ID NO: 193402 - protein, 444 aa, Unknown
  Bacterial polypetide isolated from the Sargasso Sea
DEALMSCPNVKKCIVVKRTGNYINWDQNRDVWFHDLIKDVPNHCEPEEMNAEDPLFILYTSGSTGKPKGVLHTTGGYMVYASMTHQYIFNYKPKDIYWCTADIGWVTGHSYIIYGPLSNGATTIMFEGIPNYPDSSRWWQIVDKYKVNTFYTAPTAIRALMREGDKPVKKTSRKSLKLLGTVGEPINPEAWMWYYKTVGNSKCPIVDTWWQTETGGIMIAPQTGAIPLKPGSATKPFYGIKPILVDKNGKEIKGAGEGRLCIAQSWPGQMRTVYGDHQRFIDTYFSQFNGKYFTGDGCRRDKDGYYWITGRVDDVIIVSGHNLGTAEIESAFVAHPKVAEAAVVGYPHDIKGNGLYCYVTLNAGETETGELERDLKLWVRKQIGPLATPDLIHFTPGLPKTRSGKIMRRILRKIAANEHGQLGDTTTLADPSVVDSLVDNRKNI

SEQ ID NO: 193403 - protein, 223 aa, Unknown
  Bacterial polypetide isolated from the Sargasso Sea
MTNSFNKIYQESIQNPEEFWRNVSDDIFWFKKPNKILNKSNPPFYKWFEDGVTNTCYNAIDVHIDNGNGDKTALIYDSPITNSKAKFTYNELREKISKFAGALDNQGVKKGDRVIIYMPMIPEAVVAMLACGRIGAIHSVVFGGFASNELASRIDDSKAKILITASCGFEPGRTVEYRPLVDGALKLAKHKVERVIFFQRKDHEIKLNSPTEINWEEALVNAK

SEQ ID NO: 193404 - protein, 660 aa, Unknown
  Bacterial polypetide isolated from the Sargasso Sea
MSAIESVLQERRVFPPSAEAAAGATISGMDAYRALAAEAERDYEGFWGRLARETLSWSKPFSKVLDESKAPFYTWFEDGQLNASYNSIDRHVEAGNGERIAIVFEADDGTVTNVTYNDLLQRVSRFANALKKRGVKKGDRVVIYMPMSIEGIVAMQACARIGATHSVVFGGFSSKSLNERLVDVGAVALVTSDEQMRGGKALPLKNIADEAIAMGGCDAVKSVIVYKRTGGKIAWDDSRDLWMHELTQAESDQCAPEWVGAEHPLFILYTSGSTGKPKGVQHSTGGYLLWAAQTMKWTFDWKPTDVFWCTADIGWITGHSYITYGPLTLGGTQVVFEGVPTYPNAGRFWDMIAKHKVTLFYTAPTAIRSLIKAAEADEKVHPKSFDLSTLRIIGTVGEPINPEAWVWYHENVGGGRCPIVDTWWQTETGGHMITPLPGATPLVPGSCTLPLPGIMAAVVDETGQDVPNGQGGILVVKRPWPSMLRNVWGDPDRYQKSYFPEELGGKLYLAGDGAVRDKETGYFTIMGRIDDVLNVSGHRLGTMEIESALVSNPIVAEAAVVGRPDATTGEAVCAFVVLKRARPEGEEAVKLANELRAWVAKEIGPIAKPKDIRFGENLPKTRSGKIMRRLLRSLAKGEEITQDVSTLENPAILDQLGESL

SEQ ID NO: 193405 - protein, 354 aa, Unknown
  Bacterial polypetide isolated from the Sargasso Sea
CLVVKYTENKVNMMDERDLYIDELISDVDEYCEPEEMNSEDPLFILYTSGSTGKPKGVLHTTGGYLVYASMTHEYIFNYKKDDIYWCTADIGWITGHSYIIYGPLSNGATTLMFEGVPNYPNFSRFWEVIDKHNVNIFYTAPTAIRALMREGDDYVKKTSRSSLKLLGTVGEPINPEAWKWYYEVPGNSNCPIVDTWWQTETGGILISPQSGAMNLKPGSASKPFYGIEPCIVNKDGEEQHGESEGMLCLKDSWPGQMRTVYGDHKRFISTYFSQFDGKYFTGDGCKRDKDGYYWITGRVDDVIIVSGHNLGTAEIESAFVSHPKVSEAAVVGYPHDIKGNGLYCYVSLIAGTE

SEQ ID NO: 193406 - protein, 280 aa, Unknown
  Bacterial polypetide isolated from the Sargasso Sea
AKGDKYLENSDRSSLKVLGTVGEPINPEVWEWYFEKVGKSNCEVVDTWWQTETGSVLISPIAGITAKKPGSATLPFFGVKPSLVDNDGIEIIGEGKGNLCIDQSWPSQIRTVYGDHERMVQTYFSQYKGKYFTGDGAKRDTDAYYWVTGRVDDVLNVSGHRIGTAEVESAIVTHPDVAEAAVVGIEHDIKGQAIYAFVILKDTEKNNGLVENEIIDTVSQSIGKIAKPEVIHITRDLPKTRSGKIMRRILRKIANKDTANLGDVTTLADPSIVEELINSR

SEQ ID NO: 193407 - protein, 640 aa, Unknown
  Bacterial polypetide isolated from the Sargasso Sea
MSTNSIQAIASNPYIKDLDEYRKLYDESINNPKDFFKKMATENLSWIKDFDEVHNSKFANTEWFKNGKINVSENCLDRHLEDRSEKTALIWEGDEPGDSKSYSFKELHEEVCKFSNVLKNLEITKGSRVCIYMPMIPEAAFAMLACTRIGAIHSVVFGGFSPESLKDRILDADCEIVITADEGVRGGKKVPLKANVDEALEKCPNVKNTIVIKRTGDQVNWVADRDLWYEDLSKDVDLTCEPEPMNSEDPLFILYTSGSTGKPKGVLHTTAGYLLGAHMSFKYLFGINESDVYWCTADVGWITGHTYILYGPLSNGTTTIMFEGVPTYPSSSRCWEVCDKYNVNVFYTAPTAIRALMSQGDEPVLKTKRDSLRVLGTVGEPINPEAWDWYYKVVGNGSCDVIDTWWQTETGSVLISPISGVTPVKPGSATLPFFGVKPAIYDEEGQALEGAASGNLVIESSWPSQIRSVYGDHERMISTYFKTYEDIYFTGDGARRDEDGYFWITGRVDDVLNVSGHRLGTAEIESALVLHDSVAEAAVVGFQHPIKGQGIYAFVTLMKGEDFNDALEQELTKFVSKEIGPIAKPDLIQNAPGLPKTRSGKIMRRILRKIAEGDFDNLGDTTTLAEPAVVASLLENSKKL

SEQ ID NO: 193408 - protein, 511 aa, Unknown
  Bacterial polypetide isolated from the Sargasso Sea
MSKKKKVKKKIISKKPKETIYKTKKDWISKATVNKSQYTKKYNESIKDNDGFWKKEGKRINWIKPYKKIKDVKYSKDDVHIKWFYDGTLNASANCIDRHLEKNAHKTAIIWVGDDPKVQKKITYKELHKEVSKAANGLKNLGVQKGDRVTIYLTMIPELAYTMLACARIGAVHSIIFGGFSPDSISGRINDCESDYVITADEGVRGGKTIPLKSITDEALQSCPNIKKCIVVKRTGSKQIDWYNDRDVWYHKMISNVSAKCEPEEMNAEDPLFILYTSGSTGKPKGVLHTTGGYMVYASMTHQYIFNYKPKDIYWCTADIGWVTGHSYIIYGPLANGATTIMFEGIPTYPDTSRWWQIVDKYKVNIFYTAPTAIRALMREGDKPVKKTSRKTLKLLGTVGEPINPEAWEWYYKTVGDSRCPIVDTWWQTETGGILISPQTGAIDLKPGSATKPFYGIKPEILDKDGKGFKGEAQGRLCISQSWPGQMRSVYGDHQRFIDTYFHSLMEIFYR

SEQ ID NO: 193409 - protein, 312 aa, Unknown
  Bacterial polypetide isolated from the Sargasso Sea
MRRKKKAKKALSKDKDKDKELILKTKSEWIKNALVNKTKYQKKYSDSLKNNNEFWKKEGKRITWIKPYKKIKNVKYSKKEVKIKWYEDGTLNASANCIDRHLKDKKDKTAIIWVGDNPKDQKKISYKQLHQEVSKAANGLKKLGIKKGDRVTIYLTMIPELAFTMLACARIGAIHSIIFGGFSADSISGRVNDCKSEYIITADEGVRGGKTIPLKDITDEALLNCPNVKKCIVVKRTGNQVNWVNGRDVWYNEMTKGVSNKCEPEEMSAEDPLFILYTSGSTGKPKGVLHTTGGYMVYASMTHQYIFNYKPK

SEQ ID NO: 193410 - protein, 222 aa, Unknown
  Bacterial polypetide isolated from the Sargasso Sea
MSDKFNKIYDHSIKNPEKFWQEAAEDIFWFKKPTKILNKSNPPFFKWFEDGVTNTCYNALDIHIDQGRGKNTALIYDSPITSNKSKFTYEELRSKVAKFAGALKNQGVNKGDRVIIYMPMIPEAVIAMLGCARIGAIHSVVFGGFASTELASRIDDSKAKLLVTASCGFEPGRTVEYKPLVDEAIKIANHKIEKMILFQRPGHEVKLNAPLEISWDEVVSNA

SEQ ID NO: 193411 - protein, 646 aa, Unknown
  Bacterial polypetide isolated from the Sargasso Sea
MSDNIKIPVFENFKDSAHLTKDKYEEAYKFALDNPEAFWEKEGKRINWINPYTRVKDVTWSNNDVNIKWFYDGTLNASYNCIDRHLSDKSDQIAIIWEGDDPNESKKITYKELHQKVSKFANMMKHFGVQKGDRVTIYMPMIPEAAYAMLACSRIGAIHSVVFGGFSPDALAGRILDCDSKFLITADEGIRGGKIVPLKVNSDKALEQCPDVKNVFVVKRTGGDIEMKEDRDLWYHEAVELVGDECPPEEMNAEDPLFILYTSGSTGKPKGVLHTTGGYIVYASYTHEIIFDYHDKDIYWCTADVGWVTGHSYIVYGPLANGATTLMFEGVPNYPSNSRFWEVCDKHSVNIFYTAPTAIRALMKEGDAPVKSTSRKSIRLLGTVGEPINPEAWMWYFNTVGEKKCPIVDTWWQTETGATLISPLPGATDLKPGSASKPLPGVRPVLLDSEGNILEGKNEGNLCIADSWPGQMRTVYGDHKRFIETYFSQYDGYYFTGDGCKRDEDGYYWITGRVDDVINVSGHRMGTAEVESALVSHEKVSEAAVVGFPHEIKGQGIYAYVTLNAGENGNEEIRKELIKWVRKEIGPIASPDLIQFAPNLPKTRSGKIMRRILRKIAENEYSELGDTSTLAEPMVVDELIENRQNK

SEQ ID NO: 193412 - protein, 483 aa, Unknown
  Bacterial polypetide isolated from the Sargasso Sea
FGGFSSEALKNRITDCDGKMLITANAGVRGGKSIPLKQNADAAMEGTSIEYCMVVKHTDDECEMQSGRDFFWHEEIANASSDCPAEEMDAEDPLFILYTSGSTGKPKGVLHTTAGYLVYTSLTHQYVFDYHDGDIYWCTADIGWVTGHSYILYGPLANGATTLMFEGVPNYPDFGRFWDICDKHKVNIFYTAPTAIRAIAKEGDELVSKRNLSSLRLLGTVGEPINPEAWLWYHRVVGHSNCPIVDTWWQTETGGILITPLPGATRTKPGSATRPFFGIQPLLVDGDGNELEGAASGNLCIKHPWPGQMRTVYGDHERFVQTYFSTYKGLYFTGDGCRRDEDGYYWITGRVDDVLNVSGHRMGTAELESALVLHENVAEAAVVGFPHEIKGQGIYAFVTLNTGVEPTAELQKELVQLVRKEIGPIASFDVVQWAPGLPKTRSGKIMRRILRKIAENEMESIGDTSTLADPSVVDDLISNRPAN

SEQ ID NO: 193413 - protein, 646 aa, Unknown
  Bacterial polypetide isolated from the Sargasso Sea
MTDKDLYKPALDIVKNSHANEKIYEKMYSESINSPEEFWKEHGQRIDWIKPYTKVKDVSYKKENLHINWYEDGTLNASFNCLDRHLKTKGKNTAIIWEGDNPNESKHISYNDLYKDVCKFSNVLKDAGAKKGDRITIYMPMIPEATIAMLACTRIGAIHSVVFGGFSPDALAGRIEDCNSSIIITADEGIRGGKVIPLKSNTDEAISKAKMCKTTIVIRRTGSEINWIEGQDIWYHKEMEKASLDCPPTEMSAEDPMFILYTSGSTGKPKGVLHSTGGYMVYASMTHHYVFDYQENEIYWCTADVGWVTGHSYIVYGPLSNGATTLMFEGVPNYPTVSRFWEIVDKHQVNIFYTAPTAIRALMAEGDDPVKKTKRNSLRILGSVGEPINPEAWNWYNNVVGNNKCPIVDTWWQTETGGILITPLPGATPTKPGSATKPFFGILPVLVDAENNELEGATEGNLCINMSWPGQMRTVYGDHQRFIDTYFSTFPGRYFSGDGCRRDKDGYFWITGRVDDVINVSGHRMGTAEVESALVAHSDVAEAAVVGYPHDIKGQGIYAYVTVNINVESSEELLLELKKWVRKEIGPIATPDLIQFAPGLPKTRSGKIMRRILRKIAANEHDELGDVSTLADPLVVENLVENRKNI

SEQ ID NO: 193414 - protein, 647 aa, Unknown
  Bacterial polypetide isolated from the Sargasso Sea
MSVIESKLSEKKNYKPNKDFTAKANIKKDDLNNLISSYVKNPHDYWEKLARDYISWSKDFTKVVSGTAPNYKWFEDGELNVSFNCLDRHANQEKDAIIHISEDNKKTILSYSQLGIMVKSFAFELSSIGLKKGDRVIIYMPTIPQSIAVMLACSRLGLIHSVVFAGFSAESLKDRINDCQASAVITVDSFLRNGKIITTKNTVNTALEFGCPSIKHLIIYNHNNTEFVKKDIDIIWNENLTKRSVDLNPIQMNSEDILFILYTSGSTGKPKGIVHSTGGYLLHCMLTNSWVFDLKDDDIFWCTADIGWITGHSYVVYGPLSMGATILIYDGAPTYPHIGRFWEIIEKNQVSIFYTAPTAIRTLMKLGENLPDDFNLESLRLLGTVGEPINPKAWEWYHSKIGSSKCPVVDTWWQTETGANMIAPIPGVTNTIPGTCTKPLPGIDVGIVDNDGIEIDEPNKGGNLVIKQPWPSMLRGIWGDNQRYLDTYWKRYSNKFYVTGDTARFDELGNVWIMGRADDVVNISGHRLGTMEVESSIVSHEYVAEAAVVSFKHEIKGEAIHAFVTLKDNYSQHNTKEFADEIRDWVKEKIGSIAKPDRISFSSGLPKTRSGKIMRRLLRNLARDENITGDISTLENEDVITQLRKTL

SEQ ID NO: 193415 - protein, 499 aa, Unknown
  Bacterial polypetide isolated from the Sargasso Sea
MLACARIGAFHSVVFGGFSAEALADRINDAEAKVVITADGAWRRGDIVPLKKNVDDSLKLTDHIESVVVVKRTNNDVDMVEGLDYWYHDLVDKQDATCEPEVMNAEDMLYILYTSGTTAKPKGIVHTQAGYLTGVTTTHSAVFDVKEDDIYWCAADCGWVTGHSYIVYGPLANKTTSVMYEGAPNAPDEKRLWSIVEKYKVNIFYTAPTAIRAFMKWGVEHPQAHDLSSLRLLGTVGEPINPEAWMWYHENIGSESCAIVDTWWQTETGSIMITPLPGITSTKPGSACGPMPGIDAIVVDEKGNEVSKGEGGYLAIKTPWPSMLRTVFGDEKRYIDTYWSKYDGMYFAGDGAKYDDDGYFWLLGRVDDVMNISGHRISTAEVESALVAHESVAEAAVIGRADEISGEAIAAFVTLIGGFEGNDELITTLRQHVSDKIGPIAKPKSIVITNDLPKTRSGKIMRRLLKDISEERKLGDVTTLANADIVSELQTRSSESADE

SEQ ID NO: 193416 - protein, 206 aa, Unknown
  Bacterial polypetide isolated from the Sargasso Sea
MTLDKKNSINNVLEEKRIFPPSKEYSENSNISSQEELISLQKQASNNPTKFWESFAKSELDWFEPFQTVLDSDKAPFFKWFKEGKLNITYNCLDRHISRGLGGKTALIWEGEPGDSKKFTYEELLKEVCRAANALKNIGVKKGDLVCIYMPMIPEAMFAMLACARIGAPHSVVFGGFSSEALKDRLIDGNARFVITADGGFRKDKV

SEQ ID NO: 193417 - protein, 609 aa, Unknown
  Bacterial polypetide isolated from the Sargasso Sea
MGLKKVKELLGMKKYTKIKDVKYSKDEVKIKWYYDGTLNASANCIDRHLKKNPSKTAIIWVGDDPADTKKISYKELHQNVCKAANGLKSLGIQKGDRVTIYLTMIPELAYIMLACARIGAVHSIIFGGFSPDSIATRITDCESEYLITADEGVRGGKIIPLKKIADEALDQCPGVKKCVVVERTGNQVDWNNERDVSYKELISSVPSKCDPEEMNAEDPLFILYTSGSTGKPKGVLHTTGGYMVYASMTHQYIFDYKANDIYWCTADIGWVTGHSYIIYGPLSNGATTIMFEGVPNYPDSSRWWQIVDKHKVNIFYTAPTAIRALMREGDKPVKKTSRKTLKLLGTVGEPINPEAWMWYYKTVGDSRCPIVDTWWQTETGGILIAPQPGATDLKPGSATKPFYGIKPVLVDKDGKTVKGEGKGRLCMAASWPGQMRTVYGDHQRFIDTYFSQFDGKYFTGDGCRRDKDGYYWITGRVDDVIIVSGHNLGTAEIESAFVAHPKVAEAAVVGFPHSIKGNGLYCYVTLNAGENPTGDLERDLKLWVRKQIGPIATPDVIQFAPGLPKTRSGKIMRRILRKIAANEHDQLGDTTTLADPSVVKSLVDNRKNI

SEQ ID NO: 193418 - protein, 169 aa, Unknown
  Bacterial polypetide isolated from the Sargasso Sea
DHNRFIETYFSQFDGKYFTGDGCRRDKDGYYWITGRVDDVIIVSGHNLGTAEIESAFVAHPKVAEAAVVGYPHDIKGNGLYCYVTLNVGEKADGDLERELKLWVRKQIGPIATPDLIHFSPGLPKTRSGKIMRRILRKIAANEHDQLGDTTTLADPSVVQSLVDERKNV

SEQ ID NO: 193419 - protein, 358 aa, Unknown
  Bacterial polypetide isolated from the Sargasso Sea
YIFNYKPKDIYWCTADIGWITGHSYIIYGPLANGATTIMFEGIPTYPDSSRWWQIVDKYKVNIFYTAPTAIRALMREGEKPVKKTSRKSLKLLGTVGEPINPEAWLWYYKTVGESKCPIVDTWWQTETGGIMISPQTGAIDLKPGSATKPFYGIKPAIVDKDGKVLKGECQGRLCIAQSWPGQMRTVYGDHNRFIETYFSQFDGKYFTGDGCRRDKDGYYWITGRVDDVIIVSGHNLGTAEIESAFVAHSKVAEAAVVGYPHDIKGNGLYCYVTLNVGENPNGDLERDLKLWVRKQIGPIATPDFIQFAPGLPKTRSGKIMRRILRKIAANEHEQLGDTTTLADPSVVKSLVDNRKNT

SEQ ID NO: 193420 - protein, 453 aa, Unknown
  Bacterial polypetide isolated from the Sargasso Sea
MSEYTEIHADSISHSDEFWLEVTKKTIDWKVPPTIGLKGDYRTIRDSQISWFSDGRLNASTSCLDQHLIERGSKTAILWEGDEPGDVRKLSYSELHSEVCRFSNALESIGVSKGDRVIIYMGMVPEAAIAMLSCARIGAIHSVVFGGFSADSLANRVIDSGSKVIITMDEGLRGGKAVPLKKTTDTAVEIVQDLDSSENVESVIVLKRTGGEIDWDTDRDLWWSEICEGKPDVHEPTVVDAEHPLFILYTSGSTGKPKGQVHSHGGYITYTSFTHRTVFDLREDDVFACVADVGWITGHSYIVYGPLANGATTFMFESTPLYPDAGRYWDMVERHGFTIFYTAPTAIRALASKPREFVSRSDRSTLRVLGTVGEPINPEAWEWYWDVVGEGRCTIVDTWWQTETGGICISPIAPITPVIGGSATLPLPGIQPRIFNSEGEMLEGVSEGLLCIE

SEQ ID NO: 193421 - protein, 405 aa, Unknown
  Bacterial polypetide isolated from the Sargasso Sea
MVAGESGDFAPVPMDSESPLFILYTSGSTGKPKGIKHTTAGYLLWAKTTAEWVFDLRDDDLFWCTADCGWITGHSYVTYGPLAAGVGILIYEGAPDAPHQGRFWEIIEEEKPTIFYTAPTAIRAFMKWGPEHIDGKDLSSLRLLGTVGEGINPEAWMWYHKTIGAERCPIVDTWWQTETGGIMMSPLPGCIPTKPGSCTLPLPGVYPEIVDASGEPVEPGEGGWLVMTKPWPGMLRGIWGDEERFVETYWERVPGKYLAGDNARQDEDGYFWIMGRIDDVLNVAGHRLSTIEIESALVSHPAVAEAAAVGRPHDVKGEAVSVFVTLKSGEPDEALKKELRQHVRQQIGAIASPDDIHFSASLPKTRSGKIMRRLLRDIAAGRETVGDTTTLEDYTVLANLRSSDE

SEQ ID NO: 193422 - protein, 429 aa, Unknown
  Bacterial polypetide isolated from the Sargasso Sea
IHSIIFGGFSPDSISGRINDCKSDYVITADEGVRGGKIIPLKSITDEALINCPNVKKCVVIKRTGNRINWDETRDVWYEDMIKNVSKKCEPEEMNAEDPLFILYTSGSTGKPKGVLHTTGGYMVYASMTHQYIFNYKPNDIYWCTADIGWITGHSYIIYGPLSNGATTIMFEGIPTYPDTSRWWQIVDKYKVNIFYTAPTAIRALMREGDKPVKKTSRKTLKLLGTVGEPINPEAWQWYYKTVGDSNCPIVDTWWQTETGGILISPQTGAINLKPGSATKPFYGIRPVIVDKNGKTLKGEGQGRLCIAQSWPGQMRTVYGDHQRFIDTYFSQFEGKYFTGDGCKRDKDGYYWITGRVDDVIIVSGHNLGTAEIESAFVAHPKVAEAAVVGFPHDIKGNGLYCYVTLNAGENDSLDLERDLKLWVRKQIV

SEQ ID NO: 193423 - protein, 173 aa, Unknown
  Bacterial polypetide isolated from the Sargasso Sea
TVYGDHQRFIDTYFSQFNGKYFTGDGCRRDKDGYYWITGRVDDVIIVSGHNLGTAEIESAFVAHPKVAEAAVVGYPHDIKGNGLYCYVTLNAGENETGELERDLKLWVRKQIGPLATPDLIHFTPGLPKTRSGKIMRRILRKIAANEHGQLGDTTTLADPSVVDSLVENRKNI

SEQ ID NO: 193424 - protein, 554 aa, Unknown
  Bacterial polypetide isolated from the Sargasso Sea
PAIIWVGDDPSDSKKISYKELHKNVCKVANGLKSLGIQKGDRVTIYLTMIPELAYTMLACTRIGAIHSIIFGGFSPDSIATRINDCESDYVITADEGVRGGKIIPLKKIADEAMMQCPNIKKCVVVKRTGNSVNWDNERDISYEDMIKNVSDKCPPEEMNAEDPMFILYTSGSTGKPKGVLHTTGGYMVYASMTHQYIFDYKPKDVYFCSADIGWVTGHSYIIYGPLSNGATTIMFEGIPTFPDSSRWWQIIDKYKVNIFYTAPTAIRALMREGDAPVKKTSRKSLKLLGTVGEPINPEAWMWYYKTVGNSKCPIVDTWWQTETGGILISPQPGAINLKPGSATKPFYGIKPAIVDENGKIIKGAGKGRLCMLQSWPGQMRTVYGDHERFIKTYFSQFDGKYFTGDGCRRDKDGYYWITGRVDDVIIVSGHNLGTAEIESAFVAHTKVAEAAVVGYPHDIKGNGLYCYVTLNAGENPDGDLERELKLWVRKQIGPIATPDYIQFSPGLPKTRSGKIMRRILRKIAANEHHDLGDTTTLADPSVVESLVENRKNK

SEQ ID NO: 193425 - protein, 594 aa, Unknown
  Bacterial polypetide isolated from the Sargasso Sea
MPKKKKKKSNKKRKNKKKNKSKKRKKILKSKRKKKIKLKKIEDTEGPKELIYKVKTDWVKKATVNKSEYEKKYRQSLKDNDGFWKKEGKRITWIKPYTKIKDVKYSKSDVHIKWFYDGTLNASANCIDRHLKRNKDKTAIIWVGDDPKVQKKITYKQLHQEVSKAANGLKELGVKKGDRVTIYLTMIPELAYTMLACARIGAIHSIIFGGFSPDSISGRINDCKSDYVITADEGIRGGKTIHLKSITDEALVECPKVKKCIVIKRTGNRINWDESRDVWYHDMIKNVSSNCEPEEMSAEDPLFILYTSGSTGKPKGVLHTTGGYMVYASMTHQYIFNYKSKDIYWCSADIGWVTGHSYIIYGPLSNGATTIMFEGIPTYPDSSRWWQIIDKYKVNIFYTAPTAIRALMREGDKPVKKTSRKSLKLLGTVGEPINPEAWQWYFKTVGDSRCPIVDTWWQTETGGILISPQTGAIDLKPGSATKPFYGIKPVLVDKNGKVLKGEAQGRLCISQSWPGQMRTVYGDHQRFIDTYFSQFDGKYFTGDGCRRDKDGYYWITGRVDDVIIVSGHNLGTAEIESAFVAHPKVAEAAVVGYP

SEQ ID NO: 193426 - protein, 636 aa, Unknown
  Bacterial polypetide isolated from the Sargasso Sea
MNEKIENLLNEDRLFEPSEELKNNANATSAWFKDAEKDRLEYWKQQALNRITWFKEPTEVLDDSNAPFFKWFSDGELNLSYNCLDRHLETDGDRVAYYWEGEPGDTQEITYRDLYERVCKLSNALKSLGVQKGDRIAIYLGMTPEIVVSMLACARIGAVHSVVFGGFSAEALADRINDAEAKVVITADGAWRRGEIVPLKENVDNSLELTEFIESVVVVKRTGQEVNMKDGRDYWYEEIVEEQSAECEPEVMNAEDLLYILYTSGTTAKPKGIVHTQAGYLTGVTTTHSAVFDVKDDDIYWCAADCGWVTGHSYIVYGPLANKTTSVMYEGAPNAPDEKRLWSLVEKYKVNIFYTAPTAIRAFMKWGVEHPKAHDLSSLRLLGSVGEPINPEAWMWYHENIGNEQCAIVDTWWQTETGSIMISPLPGITSTKPGSACGPLPGIDSVIIDEKGNEVGKGEGGYLAIKSPWPSMLRTVYGDDKRYIDTYWSQHEGLYFAGDGAKYDDDGYVWLLGRVDDVMNISGHRISTAEVESALVSHESVAEAAVIGRSDEISGEAIAAFVSLIGTDAGDEKLISELRQHVSDKIGPIAKPKSIVITADLPKTRSGKIMRRVLKDISEERKLGDVTTLANADIVS

SEQ ID NO: 193427 - protein, 367 aa, Unknown
  Bacterial polypetide isolated from the Sargasso Sea
MVYASMTHQYVFDYKDGDVYWCTADVGWVTGHSYIVYGPLANGAVTVMFEGVPNYPSASRFWEVVDKHKINIFYTAPTAIRALMREGEDPVKKTSRSSLKLLGTVGEPINPEAWMWYYNVVGDKKCPIVDTWWQTETGGILITPLPGAIAQKPGSATKPFFGVKPEILDAEGKILEGACEGSLCLADSWPGQMRTVYGDHKRFIETYFSQFDGKYFTGDGCRRDEDGYYWITGRVDDVINVSGHRMGTAEVESALVAHPKVSEAAVVGYPHDIKGQGIYAYVTLNAGEETSDELYKELVAWVRKEIGPIASPDLIQWAPGLPKTRSGKIMRRILRKIAENDYSNLGDTSTLAEPAVVNDLVENRMNK

SEQ ID NO: 193428 - protein, 430 aa, Unknown
  Bacterial polypetide isolated from the Sargasso Sea
MIPELAYTMLACARIGAIHSIIFGGFSPDSISGRINDCKSDFVITADEGVRGGKTIHLKSIMDEALVNCPNVKKCVVVKRTGGRINWDPLKDVWYHEITKNVSTKCEPEEMNAEDPLFILYTSGSTGKPKGVLHTTGGYMVYASMTHQYIFNYKQKDIYWCTADIGWITGHSYIIYGPLSNGATTIMYEGIPTYPDSSRWWQIVDKYKVNIFYTAPTAIRALMREGEKPVKKTSRKTLKLLGTVGEPINPEAWQWYYKTIGDSRCPIVDTWWQTETGGILISPQTGAIHLKPGSATKPFYGIKPVIVDKNGKVLKGEAKGRLCIAQSWPGQMRTVYGDHQRFLDTYFSQFDGKYFTGDGCRRDKDGYYWITGRVDDVIIVSGHNLGTAEIESAFVAHPKVAEAAVVGFPHDIKGNGLYCYVTLNAGENTL

SEQ ID NO: 193429 - protein, 344 aa, Unknown
  Bacterial polypetide isolated from the Sargasso Sea
ADRINDSEAKVVITADEGRRAGRSIPLKANVDKALANDACPSITHVVVHKLTGGDVDWNSEHDVWWQDAIGNCSAQCEPEVMNAEDPLFILYTSGSTGTPKGVVHTTGGYLLYSAMTFKYAFDYRDDDIYWCTADVGWVTGHSYMVYGPMVNAASQVFFEGVPTYPDVKRIAQVVEKYKVNSLYTAPTAIRALMAHGDTPAEGCDLSSLRLLGTVGEPINPEAWEWYHRVIGKGRCPIIDTWWQTETGGHMILPLPGATELKPGSATRPFFGVAPALFDADGKELEGAAEGNLVIKDSWPSQARTVYGDPSRFIIPILVRMKVCTLPVMARVAMKMAAIGSQAV

SEQ ID NO: 193430 - protein, 179 aa, Unknown
  Bacterial polypetide isolated from the Sargasso Sea
MAESGSHCLWRPITFYYTYFSAYEGVYFTGDGARRDEDGCYWITGRVDDVLNVSGHRLGTAEIESALVAHSKVAEAAVVGYPHDIKGQGIYVYVSPIEGVEVNDALTKELKGWVRQELSPIATPDIIQWSTGLPKTRSGKIMRRILRKIAANEHEQLGDTSTLADPSVVDTLIEERLNK

SEQ ID NO: 193431 - protein, 161 aa, Unknown
  Bacterial polypetide isolated from the Sargasso Sea
MADKIIQPHPKFKNPHIPDMQTYQEMYQESITNPKRFFGKEAEENLSWFQKFSSVHNDQFENTKWFNGGLINVSHNCIDRHLEKHSEKTALIWEGDDPQDNKIITYEELYEQVCQFANILKKLNVKKGTRVCIYMPMIPEAAFAMLACTRIGAIHSVFWRI

SEQ ID NO: 193432 - protein, 422 aa, Unknown
  Bacterial polypetide isolated from the Sargasso Sea
MVCIYMPMIPEAMFAMLACARIGAPHSVVFGGFSSEALKDRLIDGNARFVVTADGGFRKDKVIELKKAVDVAIESGADKVVEKVIVVQRTQKNISMVDDRDFWWHKLLKDQKDHCEPEIMNSEDRLFILYTSGSTGKPKGVVHTIGGYNLWSHLTFKWIFDLKDDDIYWCTADVGWITGHSYIVYGPLSNGATTLMYEGVPRPSNLGAFWEIVQKYKVSIFYTAPTAIRAFMKSGREIPDKYNLESLRLLGTVGEPINPEAWMWYKDVIGKNKCPIVDTWWQTETGGVMISPLPGVVATKPGSATFPLPGIEVEIVDKNGDKVKENEGGYLIIKKPWPGMMRTIHGNSERYLESYWEYISFKGEKNVYFAGDGARIDEDGYIWIMGRVDDVISVSGHRLGTMEIESALVSHKSVAESAVVGK

SEQ ID NO: 193433 - protein, 675 aa, Unknown
  Bacterial polypetide isolated from the Sargasso Sea
MPKKNKKIKKKKNIIKKRKKNFRKKSEKKIEKEIIYKTKKEWINKAIVNKSQYEKKYKVSISDNDNFWKKEGKRINWIKPYTKIKDIKYSRSDVRIKWFYDGTLNASANCIDRHLKKNKDKTAIIWVGDDPKVQKKITYKELHKEVSKAANGLKKIGVQKGDRVTIYLTMIPELAYTMLACARIGAVHSIIFGGFSPDSISGRINDCKSDYVITADEGVRGGKTVHLKSIMDEALVECPKVKKCVVIKRTGNRINWDDRRDVWYDEMINNVSSKCDPEEMNAEDPLFILYTSGSTGKPKGVLHTTGGYMVYASMTHQYIFNYKPKDIYWCTADIGWVTGHSYIIYGPLSNGATTVMFEGIPTYPDNSRWWQIVDKYKVNIFYTAPTAIRALMREGDKPVKKTSRKTLKLLGTVGEPINPGAWEWYYKIVGDSRCPIVDTWWQTETGGILISPQTGAINLKPGSATKPFYGIKPVIVDKTGKVLKGEAQGRLCIAQSWPGQMRTVYGDHKRFIDTYFSQFDGKYFTGDGCRRDKDGYYWITGRVDDVIIVSGHNLGTAEIESAFVAHPKVAEAAVVGFPHDIKGNALYCYVTLNVGEKGDGSLERELKNHIAKTLGPIYRPETIQFAPGLPKTRSGKIMRRILRKIAANEHDQLGDTTTLADPGVVKSLVDNRKNI

SEQ ID NO: 193434 - protein, 256 aa, Unknown
  Bacterial polypetide isolated from the Sargasso Sea
KDIYWCTADIGWVTGHSYIIYGPLSNGATTIMFEGIPNYPDSSRWWQIVDKYKVNTFYTAPTAIRALMREGEKPVKKTSRKSLKLLGTVGEPINPEAWMWYYKTVGNSKCPIVDTWWQTETGGIMIAPQTGAIPLKPGSATKPFYGIKPSLVDKNGKEIKGAGEGRLCIAQSWPGQMRTVYGDHQRFIDTYFSQFNGKYFTGDGCRRDKDGYYWITGRVDDVIIVSGHNLGTAEIESAFVAHPKVAEAAVVVTLTI

SEQ ID NO: 193435 - protein, 398 aa, Unknown
  Bacterial polypetide isolated from the Sargasso Sea
KEHITYAQLLEKTSVLAGSLITKGITKGDRVIIYMPMVPEAIVAMLACARIGAIHSVVFGGFASNELAVRIDDAKPKTILAASCGIEPGRIIEYKPLIDGAIELSEHKPESVVILQRPQSVASLIPGRDFDWDEFQIDAEPADCVMVEGNHPAYILYTSGTTGAPKGVVRPTAGHLVALHWSMKNIYNVDPGDVFWAASDVGWVVGHSYICYAPLIHGNTTVLFEGKPVGTPDAGTFWRVISEHKVKAFFTAPTAFRAIKREDPEGKFKSQYDLSCLQALFLAGERADPDTINWAQNLLGVPVIDHWWQTETGWTIVGNPTGIESLPIKVGSPSVPMPGYDIKILDNDGNELSNGELGAVAIKLPLPPGSLPTLWNAEERFKKSYLATFPGFYETGDA

SEQ ID NO: 193436 - protein, 286 aa, Unknown
  Bacterial polypetide isolated from the Sargasso Sea
MSENEKFEVSSEWSVEAQINTNKYNEWYENSLSNNEEFWSEHGKRIDWIKPYTKVKDVSYNKDNFSIKWYYDGTLNASSNCIDRHLKDKADQTAIIWEGDDPADSKHISYKELHSEVSKLANGMKSLGVKKGDRVTIYMPMIPEAAYAMLACTRIGAIHSVVFGGFSPDSLAGRISDCKSDIVITADEGVRGGKAIPLKKNTDEAISISGGVRHCIVVKRTGGDIGWVDDRDVWYHELTEKESDDCPPEEMSAEDPLFILYTSGSTGKPKGVMHTTGGYMVYASMT

SEQ ID NO: 193437 - protein, 636 aa, Unknown
  Bacterial polypetide isolated from the Sargasso Sea
MKFDIDNFINPNLKDYSEYETLYNDSINDPNNFFLKQALEEIDWIKKPTKSSTGTLSEPKWFEDGTLNISYNCIDRHAKTHPDKTAIIWQGDEKENNQYISYKQLHHEVCKLANGFKSVGISKGDRVCIYMPMVPQAAYAMFACMRIGAIHSVVFGGFSPEAIKSRIQDADCQYVITANEGIRGGKKIPLKDSVDEALHECPNVKKCIVLKYTDTKVSWNDEIDIWYHKLIDNQEDFCECEEMSAEDPSFILYTSGSTGKPKGVLHTTAGYLLGATLTFKYIFGYSEGDKYWCTADVGWITGHTYILYGPLSNGATTLMFEGIPTYPDPSRFWEVCDQHQINIFYTAPTAIRALIAKGEEYLENSKRDSLKVLGTVGEPINPEVWQWYFEKIGKSNCEVVDTWWQTETGSVLISPIAGITPKKPGSATLPFFGVEPSIVDVNGEVMLGEAKGNLCINNSWPSQIRTVYGDHERMVQTYFSQYPGKYFTGDGAKRDKDGYYWVTGRVDDVLNVSGHRIGTAEVESAVVNHPDVAESAVVGVEHDIKGQAIYAYVILKKTDKDISSLEIEIIDEVTKAIGKIAKPDFIHFTRDLPKTRSGKIMRRILRKIANSDTENLGDITTLADPNIVDELIRSKV

SEQ ID NO: 193438 - protein, 462 aa, Unknown
  Bacterial polypetide isolated from the Sargasso Sea
MVKKKSKKKAKRKKNKVRKKKNKFSKKIKKISRKKSDTEKKNEEIIYKTKSEWVKKSLINKSGYEKKYSQSIKDNEGFWKKEGKRINWIKPYTKIKDVKYSKSDVHIRWFYDGTLNASANCIDRHLKKNKDKTAIIWVGDDPKVQKKITYKQLHQEFQKLQMVKRIRGKKGDRVTIYLTMIPELAYTMLACARIGAVHSIIFGGFSPDSISTRINDCESDYVVTADEGIRAGKIIDLKFITDQALVDCPRVKKCIVVKRTGNRINWDNSRDVWYHDMIKNVSSNCEPEEMNAEDPLFILYTSGSTGKPKGVLHTTGGYMVYASMTHQYIFNYKPKDIYFCSADIGWITGHSYIIYGPLSNCATTVMFEGVPTFPDASRWWQIIDKHKVNIFYTAPTAIRALMKEGDKLVKKTSRKSLKLLGTVGEPINPQAWEWYYKTVGDSRCPIVDTWWQTETGGILISP

SEQ ID NO: 193439 - protein, 235 aa, Unknown
  Bacterial polypetide isolated from the Sargasso Sea
DTWWQTETGGILMSPIPGCVPTKPGSATLPLPGIVPSILDEEGNEIKERNTTGYLVMTQSWPGQMRTVYGDHQRFIDTYFSQAPGNYFTGDGAYIDDDGYFWITGRVDDVLNVSGHRIGTAEVEGAIGAASGVAEAAVIGYSHEIKGEGIYAFVTLMTGVEASAEIEKDILSTVTKIIGPHAKPSAIQFCSGLPKTRSGKIMRRILKKIAQNETDDLGDTSTLADPSVIDSLLKK

SEQ ID NO: 193440 - protein, 401 aa, Unknown
  Bacterial polypetide isolated from the Sargasso Sea
MSVSDIYKSKDWVRDKALISKEDYKKLYHQSITDPLSFWDEHGKRLAWYKPYTKIRDYSYDINNLYIKWYEDGVLNVSYNCIDRHIEKLGDKIAILWEGDDPADTKKITYKELLIEVCKFSNGLKSLGIKKGDRVTIYMPMIPEAAVAMLACTRIGAIHSVVFGGFSPEALVGRLEDCNSEFIITSDEGVRGGKIIPLKRNVDMAISKVKDFKKCIVVKRTGNEIPWNDKYDYWYHDLIDNSSDIFEPEKMSAEDPMFILYTSGSTGKPKGVLHTTGGYLVYASLTHQYVFDYHDDDIYWCTADVGWVTGHSYIIYGPLCNGATTVMFEGVPNYPDASRFWEIVDKHKINILYTAPTAIRALMSEGNKFLENTSRKSLRILGSVGEPINPEAWRWYYEASR

SEQ ID NO: 193441 - protein, 436 aa, Unknown
  Bacterial polypetide isolated from the Sargasso Sea
PNVKTTLVIKRTGGDINWVNERDIWYEDLIKNVSAKCDPEPMDSEDPLFILYTSGSTGKPKGVLHTTAGYLLGAHISFKYLFGIQAEDIYWCTADVGWITGHTYILYGPLSNGTTTIMFEGVPTYPSSSRCWEICDKYKVNIFYTAPTAIRALMSQGNDPVLKTKRSSLRVLGTVGEPINPEAWEWYYKVVGNSSCDVVDTWWQTETGSVLISPIAGITSMKPGSATLPFFGVKPALYDEQGKHLENANSGNLVIEKSWPSQIRSVYGDHNRMISTYFETYKDIYFTGDGARRDDDGYYWITGRVDDVLNVSGHRLGTAEIESALVLHDKVAEAAVVGFEHPIKGQGIYAFVTLMKEEEFNEDLRTELIQFVSKEIGPIAKPDLIQNAPGLPKTRSGKIMRRILRKIAEGDFSNLGDTTTLAEPTVVESLIENSQK

SEQ ID NO: 193442 - protein, 358 aa, Unknown
  Bacterial polypetide isolated from the Sargasso Sea
MVFDYKDNEVYWCTADVGWVTGHSYIVYGPLANGATTLMFEGIPTFPDASRFWEVIDKHNVNIFYTAPTALRALMAQGDEYVKSSSRESLRILGTVGEPINPEAWEWYYKVVGNSKCPIVDTWWQTETGSMMITPLAGSTPLKPGSATKPFLGVEPALLDENGNEIEGEGSGNLVIKSSWPSQIRSVYGDHQRCVETYYSMYPGYYTTGDGARRDKDGYYWITGRVDDVLNVSGHRLGTAEVESALVLHEKVAEAAVVGYEHEIKGQGIYCYVTLMLDQDPSEDLRNDLIQLVGKEIGAIAKPDIIQWAPGLPKTRSGKIMRRILRKIASNEVDDLGDTTTLADPSVVEELINNRENK

SEQ ID NO: 193443 - protein, 138 aa, Unknown
  Bacterial polypetide isolated from the Sargasso Sea
MRYEDLYSEWKNDPEKFWINAAQNIDWIKFPSFALDSSNRPFYKWFPDGLVNTCYNAVDRHVIKGKGEKTAIIYDSAIRSVKEKITYSQLLERVTKFAHAMSNAGITKGDRVIIYMPMIPEAIVSILACSRIGAIHSV

SEQ ID NO: 193444 - protein, 544 aa, Unknown
  Bacterial polypetide isolated from the Sargasso Sea
MTKDKIYNPPLSVLENSNIKESEFEELYQWSLSKPEEFWASQAENYLSWNNKWSKVKETNMEKGEIIWFKDAKLNASVNCIDRHLPENAEKTAFIWEGDNPEETKNISYKKLHDEVCKFANVLKARNVKKGDRVCIYMPMIPEATYAMLACARIGAIHSVVFGGFSPESLKDRILDSDCQTVITADEGLRGGKKVPLKENVDEALQGCPNVHTVLVITRTGAEISWNENCDVRFEEISKDVPANCEPEIMDSEDPLFILYTSGSTGKPKGVLHTTGGYLLQAAMSHKLVFDYKDDEIYWCTADVGWVTGHSYIVYGPLANGATSLIFEGIPTFPSPSRFWEVIDKHKVNIFYTAPTALRALMAQGDEFVKSSSRDSLRILGTVGEPINPEAWEWYFKVVGDSSCPIVDTWWQTETGAMMITPVAGFTSMKPGSATKPFLGIEPALLNESGEEIIGEGSGNLVIKSSWPSQIRTVYGDHQRCIDTYYSMYPGYYTTGDGARRDSDGYYWITGRVDDVLNVSGHRLGTAEVESALVLHKDVAEAAV

SEQ ID NO: 193445 - protein, 115 aa, Unknown
  Bacterial polypetide isolated from the Sargasso Sea
SAFVAHPKVAEAAVVGYPHDIKGNGLYCYVTLNAGEKSTLDLERDLKLWVRKQIGPIATPDLIQFAPGLPKTRSGKIMRRILRKIAANEHGQLGDTTTLADPSVVESLVDNRKNI

SEQ ID NO: 193446 - protein, 477 aa, Unknown
  Bacterial polypetide isolated from the Sargasso Sea
INGKLNITENIFERNLSKIKDKIAIIWEPNDPNNKVKKITYKELYYQVCQFSNALKKKNVKKGDRVIIYMPMVPEAVVAMLSCARLGAIHSVVFAGFSANSLSDRINDSGAKVIITSDGNYRGNKIIPVKKIVDQAIQKTNSIETVIVLNRTNMDVSMNEDRDYWYDEIIKNESTTNKAETMDSEDPLFILYTSGSTGSPKGVLHSCGGYMIYSQYTFENIFQNKNDEIYWCTADIGWITGHSYIVYGPLLSGATTLMFEGVPTYPDPSRFWKIVDKHKVNQFYTAPTAIRALQSFGDKYFEKSSLNSLKVIGSVGEPINLEAWNWYNSNIGKNKCPLVDTWWQTETGGIMISPIPGVIKPKPTYATLPLPGIQPILLDNNGNEIKDNEVEGNLCIKYPWPSILRTTYGDHERCKKTYFSTFKGYYFTGDGAKRDNDGNYRILGRVDDVINVSGHRIGTAEVENAINENVSVIESAV

SEQ ID NO: 193447 - protein, 366 aa, Unknown
  Bacterial polypetide isolated from the Sargasso Sea
MPKKKKRKKIKKKKSSRKKRLKRIKVKKIENSELIYKTKSDWIKKAIINKSGYERKYSDSIKNNDSFWKKEGKRITWIKPYTKIKDYKYSKSDVHIKWFYDGTLNASANCIDRHLKKNKDKTAIIWVGDDPKVQKKISYKQLHQEVSKAANGLKEIGVKKGDRVTIYLTMIPELAYTMLACARIGAIHSIIFGGFSADSITGRINDCKSDYVITADEGVRGGKIIDLKATVDEALLNCPNVKKCIVVKRTGNRINWDESRDVWYHDITKKASKNCEPEEMNAEDPLFILYTSGSTGKPKGVMHTTGGYMVYASMTHQYIFNYKPKDIYWCTADIGWVTGHSYIIYGPLANGATTIMSEGIPNYPDW

SEQ ID NO: 193448 - protein, 117 aa, Unknown
  Bacterial polypetide isolated from the Sargasso Sea
IESAFVAHSKVAEAAVVGFPHSIKGNGLYCYVTLNAGEKPDGDLERDLKLWVRKQIGPIATPDVIQFAPGLPKTRSGKIMRRILRKIAANDPDNLGDTTTLADPSVVESLVQNRQNK

SEQ ID NO: 193449 - protein, 350 aa, Unknown
  Bacterial polypetide isolated from the Sargasso Sea
IYDSPITGNKKKFTYKELRDKVSKFAGALKNQGIKKGDRVIIYMPMIPESVIAMLGCGRIGAIHSVVFGGFASNELASRIDDSKAKLLITASCGFEPGRTVEYKPLVDKALQLASHKLEKVILFQRAGHEVKLNSPKEISWDESLSNANDVDCVEINSNEFSYILYTSGTTGIPKGIVRDVGGHIVALKWTMKNIYNIDVDDVWWSASDIGWIVGHSYIVYAPLFKGCTTVLFEGKPVGTPDAGAFWKIISDYKVKSLFTAPTAFRAIKKEDPEGKFFTKYDLSKFESLFLAGERADPDTIKWAESLLKVPVIDHWWQTETSWAISSNCTGIEMMKINMAQLAKLCLDMM

SEQ ID NO: 193450 - protein, 337 aa, Unknown
  Bacterial polypetide isolated from the Sargasso Sea
GHSYIIYGPLANGATTIMFEGIPNYPDTSRWWQIIDKFKVNTFYTAPTAIRALMREGDSPVNKTSRKSLKLLGTVGEPINPEAWMWYYKTVGNSRCPIVDTWWQTETGGIMISPQTGAIPLKPGSATKPFYGIKPVLVDKNGKEIKGAGEGKLCIAHSWPGQMRTVYGDHDRFINTYFSQFDGKYFTGDGCKRDKDGYYWITGRVDDVIIVSGHNLGTAEIESAFVAHPKVAEAAVVGYPHDIKGNGLYCYVTLNAGEKDTGELERDLKLWVRKQIGPLATPDLIHFTPGLPKTRSGKIMRRILRKIAANEHDQLGDTTTLADPSVVESLVDNRKNI

SEQ ID NO: 193451 - protein, 411 aa, Unknown
  Bacterial polypetide isolated from the Sargasso Sea
AEPAACVPVLGTDPLYILYTSGTTGKPKGVVRDNGGHAVALSYSMQAVYDTKPGDVFWAASDVGWVVGHSYIVYAPLLAGCTTVLYEGKPVFTPDASAFWRVCAEHQVNVLFAAPTAFRAIRKEDPEATLQTYDLSALKYIFMAGERLDPATYHWVVDKIGKPVIDHWWQTETGWPISANPAGLELMNAKAGSSTVPVPGFNVEILDESGLPVPANQQGFIALKLPLPPGCLSSIWGNDERFVDGYLSTFPDYYASGDGGYIDDEGYLFVMGRTDDVINVAGHRLSTGEMEQIVASHPAVAECCVVGIYEAIKGQQPLAMVLVKNGVDISESQLEAELIAMVRQEIGAVACFKKAIIVQRLPKTRSGKILRKLLRQIATGSDYTVPSTIDDPACLPELAELMLQKDLIGSQ

SEQ ID NO: 193452 - protein, 578 aa, Unknown
  Bacterial polypetide isolated from the Sargasso Sea
VFKVPEKWSNQAYVNKSQYEKKYNLSIKNNEDFWAKEGKRINWIKPYTKIKDVKYSKDDVHIKWYYDGTLNASANCIDRHLEKKSNKTAIIWVGDDPSDSKKISYKELHKNVCKAANGLRSLGIQKGDRVTIYLTMIPELAYTMLACTRIGAIHSIIFGGFSPDSIATRINDCESDYVITADEGVRGGKIIPLKKIADEAMMQCPNVKKCVVVKRTGNEVNWDNERDISYDEMIKNVSDKCPPEEMNAEDPMFILYTSGSTGKPKGVLHTTGGYMVYASMTHQYIFDYKPRDIYFCSADIGWVTGHSYIIYGPLSNGATTIMFEGVPTYPDSSRWWQIIDKYKVNIFYTAPTAIRALMREGNAPVKKTSRKTLKLLGTVGEPINPEAWMWYYKVVGDSKCPIVDTWWQTETGGILISPQPGAINLKPGSATKPFYGIKPAIVDENGKVIKGAGKGRLCMLQSWPGQMRTVYGDHERFIKTYFSQFDGKYFTGDGCRRDKDGYYWITGRVDDVIIVSGHNLGTAEIESAFVAHTKVAEAAVVGFPHDIKGNGLYCYVTLNAGENPDGDLERELKLWVRK

SEQ ID NO: 193453 - protein, 128 aa, Unknown
  Bacterial polypetide isolated from the Sargasso Sea
IVSGHNLGTAEIESAFVAHSKVAEAAVVGYPHDIKGNGLYCYVTLNLGESPSGDLERELKLWVRKQIGPLATPDFIQFAPGLPKTRSGKIMRRILRKIAANEYDQLGDTTTLADPSVVKSLVENRKNN

SEQ ID NO: 193454 - protein, 645 aa, Unknown
  Bacterial polypetide isolated from the Sargasso Sea
MSDNLFSPNKEFSDNAYFKSLDQYNDLYNQSISNPENFWAEIANRITWFKKWDKVREYDFIKGSIKWFDGAKLNVSYNCLDRHVENGFGEQSAIIWEGNNPQEDQSFTYNELLSEVKKFANVLKSIGVEKGDRVCLYMQMVPQLPIAMLACARIGAVHSVVFGAFSPESLRDRINDSSCKVLITQDTGVRGTKQNIPMKANADKAVSETPSIEHVIVVKRTGVDVEIKSDRDLWWHEMMENADLECIPEEMNAEDPLFILYTSGSTGTPKGVMHTTGGYLVYTSFTHEKIFDYKPGDIYWCTADIGWITGHSYIVYGPLANRAVTIMFEGVPNYPDFGRFWDVVDKHKVKQFYTAPTALRALMKEGDDHVISRNLSSLQLLGTVGEPIKEPEWMWYYNIVGKGKCPIVDTWWQTETGGILISPLPGATPTKPGSATNPFFGIEPVLLSDDGKEIEGNNVQGLLAIKQSWPGQMRTVYGDHQRFIDTYFSQVPGYYFTGDGARRDKDGYYWITGRVDDVLNISGHRIGTAEVEGAIGKATGVAEAAVVGFPHEIKGQGIYAFVTLMTGTVDNTDINEGIMDSVTKIIGPHAKPDKIQYTPALPKTRSGKIMRRILRKIAEGDMENMGDTSTLADPSVVDELIKGKK

SEQ ID NO: 193455 - protein, 304 aa, Unknown
  Bacterial polypetide isolated from the Sargasso Sea
IVDKYKVNIFYTAPTAIRSMMREGDAPVKKTSRKTLKLLGTVGEPINPEAWQWYFKTVGDSRCPIVDTWWQTETGGILISPQTGAIDLKPGSATKPFYGIKPEIVDKEGKVLKGEAQGRLCIAQSWPGQMRSVYGDHNRFIETYFSQFDGKYFTGDGCRRDKDGYYWITGRVDDVIIVSGHNLGTAEIESAFVAHPKVAEAAVVGYPHDIKGNGLYCYVTLNVGEKHNGDLDRELKNWVKKNIGAHARPDFIQFTPGLPKTRSGKIMRRILRKIAANEHEQLGDTSTLADPGVVESLVENRKNI

SEQ ID NO: 193456 - protein, 603 aa, Unknown
  Bacterial polypetide isolated from the Sargasso Sea
QKPASLLKKLDQHHYQWFSDGVMNTCYMALDHQIEQGRGNQTALIYDSPVTGTSKKYSYLQLWDQVALFAGVLKANGLEKGDRAVIYMPMIPEAAIAMLAVARLGAVHSVVFGGFSSHELAMRIDDAAPKLIISASCGIEINRIIAYKPLLDEALQKASHKVHCSIVYQREQQPCALVAGRDLDWQQQMQSAEPAACVPVLATDPLYILYTSGTTGKPKGVVRDNGGHAVALHYSMQAVYDTKPGDVFWAASDVGWVVGHSYIVYAPLLAGCTTVLYEGKPVFTPDASAFWRVCAEHKVNVLFAAPTAFRAIRKEDPDATLQTYDLSALKYIFMAGERLDPATYHWVVDKIGKPVIDHWWQTETGWPISANPAGLELMPAEAGSSTVPVPGFHVEILDESGLPVPANQQGYIALQLPLPPGCLSSIWGNDERFVDGYLSTFPGYYASGDGGYIDEDGYLFVMGRTDDVINVAGHRLSTGEMEQIVASHPAVAECCVIGIYEAIKGQQPLAMVLVKNGVDISESQLEAELVAMVRQEIGALACFKKAIIVKRLPKTRSGKILRKLLRQIATGSDYSVPSTIDDPACLLELAELMQQKDLIGKEQ

SEQ ID NO: 193457 - protein, 156 aa, Unknown
  Bacterial polypetide isolated from the Sargasso Sea
DGKYFTGDGCKRDKDGYYWITGRVDDVIIVSGHNLGTAEIESAFVAHPKVAEAAVVGYPHDIKGNGLYCYVTLNAGEEPNGELERDLKHWVRRQIGPIATPDFIQFAPGLPKTRSGKIMRRILRKIAANQHDQLGDTTTLADPSVVNSLVDNRKNT

SEQ ID NO: 193458 - protein, 476 aa, Unknown
  Bacterial polypetide isolated from the Sargasso Sea
LDADCSLVITADQSVRGGKKTHLKKNVDTALDSCPGVKNCIVVQRTGEGIEMVAGRDHYYTEMIAQYDPTCECVATNSEDPLFILYTSGSTGKPKGVMHTVGGYLLGAHLSFKFIFGYQQDDIYWCTADVGWITGHTYIVYGPLSNCATSVIFEGVPTYPSPSRCWEICDKHQVNIFYTAPTAIRALMAQGNKPVKDTSRKSLKLLGTVGEPINPEAWDWYYKIVGESRCQIIDTWWQTETGSVLISPIAGITPVKPGSATFPFFGVKPGLMNDESNLIEGEGSGNLVIQNSWPSQIRTVYGDHQRMIDTYFSEYEDIYFTGDGAKRDKDGYYWITGRVDDVLNVSGHRLGTAEIESALVLHPVVAEAAVVGFEHPIKGQGIYAFVTLMVGQNSDDDLANELSKFVANEISPIAKPDLIQWSPSLPKTRSGKIMRRILRKIAAGETHDLGDTSTLAEPEVVKNLVENKLSLNQNSE

SEQ ID NO: 193459 - protein, 123 aa, Unknown
  Bacterial polypetide isolated from the Sargasso Sea
NLGTAEIESAFVAHPKVAEAAVVGYPHDIKGNGLYCYVTLNAGERETGELERDLKLWVRKQIGPLATPDLIHFTPGLPKTRSGKIMRRILRKIAANEHGQLGDTTTLADPSVVDSLVENRKNI

SEQ ID NO: 193460 - protein, 491 aa, Unknown
  Bacterial polypetide isolated from the Sargasso Sea
AVHSIIFGGFSPDSIATRIYDCESDYLITADEGIRGGKIIPLKKIADEALTQCPEVKKCVVIQRTGNQVDWNNERDISYKEMISTASNKCDPEEMNAEDPLFILYTSGSTGKPKGVLHTTGGYMVYASMTHQYIFDYKSNDIYWCTADIGWVTGHSYIIYGPLANGATTIMFEGIPNYPDSSRWWQIVDKYKVNIFYTAPTAIRALMREGDKPVKKTSRKSLKLLGTVGEPINPEAWMWYYKTVGDSRCPIVDTWWQTETGGILIAPQPGAIDLKPGSATKPFYGIKPVLVDKDGKVIKGEGKGRLCMAHSWPGQMRTVYGDHQRFIDTYFSQFDGKYFTGDGCRRDKDGYYWITGRVDDVIIVSGHNLGTAEIESAFVAHPKVAEAAVVGFPHSIKGNGLYCYVTLNVGEKSSGDLERDLKLWVRKQIGPIATPDVIQFSPGLPKTRSGKIMRRILRKIAANEPNNLGDTTTLADPTVVESLIQNRQNKG

SEQ ID NO: 193461 - protein, 379 aa, Unknown
  Bacterial polypetide isolated from the Sargasso Sea
KPKGVLHTTAGYLVYTSLTHQYVFDYHDGDIYWCTADIGWVTGHSYILYGPLANGATTLMFEGVPNYPDFGRFWDICDKHKVNIFYTAPTAIRAIAKEGDDLVNKRDLSSLRLLGTVGEPINPEAWLWYHRVVGHGNCPIVDTWWQTETGGILITPLPGATRTKPGSATRPFFGIQPLLVDGDGNELEGAASGNLCIKFPWPGQMRTVYGDHERFIQTYFSTYKGLYFTGDGCRRDEDGYYWITGRVDDVLNVSGHRMGTAELESALVLHENVAEAAVVGFPHEIKGQGIYAFVTLNSGVEPTDELQKELVQLVRKEIGPIASFDVVQWAPGLPKTRSGKIMRRILRKIAESDMESIGDTSTLADPSVVDDLISNRPTN

SEQ ID NO: 193462 - protein, 275 aa, Unknown
  Bacterial polypetide isolated from the Sargasso Sea
RTKRKSLRVLGTVGEPINPEAWDWYYKIVGNGSCDVIDTWWQTETGSVLISPISGITSVKPGSATLPFFGVKPAVYDDEGHSLEGAASGNLVIESSWPSQIRSVYGDHERMISTYFKTFKNIYFTGDGAKRDEDGYYWITGRVDDVLNVSGHRLGTAEIESALVLHDSVAEAAVVGFQHPIKGQGIYAFVTLMKDKVFNDDLEKDLIGFVSKEIGPIAKPDLIQNAPGLPKTRSGKIMRRILRKIAEGDFENLGDTTTLAEPAVVESLLENSKKL

SEQ ID NO: 193463 - protein, 269 aa, Unknown
  Bacterial polypetide isolated from the Sargasso Sea
LKLLGTVGEPINPEAWEWYFKTVGDSRCPIVDTWWQTETGGILISPQTGAIDLKPGSATKPFYGIKPEILDKDGKVIKGEAQGRLCIAQSWPGQMRTVYGDHQRFIDTYFSQFDGKYFTGDGCRRDKDGYYWITGRVDDVIIVSGHNLGTAEIESAFVAHPKVAEAAVVGYPHDIKGNGLYCYVTLNAGEKSTLDLERDLKLWVRKQIGPIATPDLIQFAPGLPKTRSGKIMRRILRKIAANEHGQLGDTTTLADPSVVDSLVDNRKNI

SEQ ID NO: 193464 - protein, 467 aa, Unknown
  Bacterial polypetide isolated from the Sargasso Sea
GIQKGDRVTIYLTMIPELAVLMLACARIGAIHSIIFGGFSAESISGRVNDCKSEYIITADEGVRGGKTIPLKATTDEALSNCPNVKKCIVVKRTGNYVYWDDDRDVWYHELIKDVPNHCEPEEMNAEDPLFILYTSGSTGKPKGVLHTTGGYMVYASMTHQYIFNYKPKDIYWCTADIGWVTGHSYIIYGPLSNGATTIMFEGVPNYPDSSRWWQIVDKYKVNTFYTAPTAIRALMREGDDPVNKTSRKSLKLLGTVGEPINPEAWMWYYKTVGNSKCPIVDTWWQTETGGILIAPQTGAIPLKPGSATKPFYGIKPVLVDKDGKEIKGAGEGRLCIAQSWPGQMRTVYGDHQRFIDTYFSQFDGKYFTGDGCRRDKDGYYWITGRVDDVIIVSGHNLGTAEIESAFVAHPKVAEAAVVGYPHDIKGNGLYCYVTLNAGETETGDLERELKLWVRKQIGPLATPDLI

SEQ ID NO: 193465 - protein, 347 aa, Unknown
  Bacterial polypetide isolated from the Sargasso Sea
FWFKKPTKILNKSNPPFYKWFEDGTTNTCYNAIDLHIDRGRGDKLALIYDSPITGNKAKFTYKQLKDKVSKFAGALVNQGVKKGDRVIIYMPMIPESVVAMLACARIGAIHSVVFGGFASNELASRIDDSKAKLLITASCGFEPGRTVEYRPLVDGALKLAKHKVEKVIFYQRKNNEVKLNSPLEISWEDSLSHAKDIDCVEMGANEYAYILYTSGTTGVPKGIVRDIGGHIVALKWTMKNIYNVDENDIWWSASDIGWIVGHSYIVYAPLFKGCTTILFEGKPVGTPDAGAFWKIISDYKVKSLFTAPTAFRAIKKEDPEGKFFSKYDLSSFESLFLAGERADPDT

SEQ ID NO: 193466 - protein, 447 aa, Unknown
  Bacterial polypetide isolated from the Sargasso Sea
MAKKLIKAQSLNPHIKDFDEYKQLYDESINNPQGFFKKIAKENLSWIKDFNEVHNNEFAESKWFYDGKINVSENCIDRHLKDSSEKTALIWEGDEPGDSKKYTFKELHEEVCKFANVLKDLKVSKGSRVCIYMPMIPEAAFAMLACTRIGAIHSVVFGGFSPESLKDRILDADCEIVITADEGIRGGKKIPLKLNVDEALRKCPNVKHTIVIKRSGGYVPWNQDRDLYYEDLIKNVSSSCDPEPMDAEDPLFILYTSGSTGKPKGVLHTTAGYLLGAHMSFKYLFGINESDIYWCTADVGWITGHTYILYGPLSNGTTSIMFEGIPTYPDSSRCWEICDKYDVNIFYTAPTAIRALMSQGDEPVLKTSRKSLRVLGTVGEPINPEAWDWYYKVVGNGACDVIDTWWQTETGSVLISPIAGVTEVKPGSATLPFLGVKPAIYDDEGIP

SEQ ID NO: 193467 - protein, 558 aa, Unknown
  Bacterial polypetide isolated from the Sargasso Sea
KKTPDKIAIIWEGDNPSHSKKISYKELLDNVCKTANALKSQGVKKGDCVTIYLTMVPELAYTMLACARIGAIHSIIFGGFSSDSIANRVQDCNSSFIVTADEGVRGGKPILLKKTVDAALLSCPSVKKCLIYKKTNNDLKENHIDVVLNEHINNASSECTPEEMNAEDPLFILYTSGSTGKPKGVMHTSGGYLVYASFTHEYIFNYNDGDIYWCTADIGWVTGHSYIIYGPLSNGATTLMFEGVPNYPDTSRFWQIIDKYNVNIFYTAPTAIRALMREGDEPVTKTSRKSLKLLGTVGEPINPEAWKWYYEVPGNKNCPIVDTWWQTETGGILISPQTGAIDLKPGSASKPFFGIMPAILDKNGNELKGECEGMLCLKHSWPGQMRTVFGNHQRFIDTYFSQFEGMYFTGDGCRRDSDGYYWITGRVDDVIIVSGHNLGTAEIESALVAHPKVAEAAVVGYPHEIKGNGLYCYVTLSVGEAESDELKKELKNLVRKIIGPIATPDIIHFTAGLPKTRSGKIMRRILRKIAANEHDQLGDITTLADSTVIDSLIEKKIK

SEQ ID NO: 193468 - protein, 436 aa, Unknown
  Bacterial polypetide isolated from the Sargasso Sea
LNKSNAPFYKWYEDGVTNTCYNALDFHIDNGRGEKSALIYDSPITGNKKKFSYKELREKVSKFAGALQNQGVKKGDRVIIYMPMIPESVIGMLACARIGAIHSVVFGGFASNELASRIDDSKAKVLLTASCGFEPGRTVQYKPLVDEALKLASHKIEKLILFQRPDNKVELNSPSEISWEDALSNAKNVDCVEMNANEFAYILYTSGTTGIPKGIVRDIGGHIAALKWTMKNIYNIDQDDVWWSASDIGWIVGHSYIVYAPLFKGCTTVLFEGKPVGTPDAGAFWKIISEYKVKSLFTAPTAFRAIKKEDPEGKFFSKYDLSSFESLFLAGERADPDTIKWAESLLNVPVIDHWWQTETSWAISSNCTGIEMMKTKYGSACKAVPGYDVKVIKPDNSIAKPNEMGDIVVKLPLPPGTFPTLWNADERYKKTVYDKL

SEQ ID NO: 193469 - protein, 301 aa, Unknown
  Bacterial polypetide isolated from the Sargasso Sea
MSLINIDFTYFLKLNAIFNLKTNKFNEIESKSMSKKLSEIYEQSLKNPENFWQEASNDIFWFKKPTKILNKSNPPFYKWFEDGVTNTCYNALDIHIDQGRGRKTGLIYDSPITGNKSQFTYEELRSKVSKFAGALKVQGVIKGDRVIIYMPMIPEAVIAMLACARIGAIHSVVFGGFASNELASRIDDSKAKILVTASCGFEPGRTVEYKPLVDEAVKLANHKIEKMILFQRSGHEVKLNAPLEISWEESISNAKDADCVEMNSNEFAYILYTSGTTGTPKGIVKDIGGHIVALKWTMKNI

SEQ ID NO: 193470 - protein, 191 aa, Unknown
  Bacterial polypetide isolated from the Sargasso Sea
FSAIQLAPIGIPLPSTLCKTINDEARDLAIGEIGELCVKGPQVMKGYWQRQEATDEILDADGWLKTGDIGLIQEDGYLRIVDRKKDMILVSGFNVYPNELEDVLATLPGVLQCAAIGVPDEKSGEAIKVFVVVKPGESLTKEQVMEHMRANLTGYKVPKAVEFRDVLPTTNVGKILRRELRDEELKKLGKK

SEQ ID NO: 193471 - protein, 557 aa, Unknown
  Bacterial polypetide isolated from the Sargasso Sea
MDKIWLKSYPPGVPAEIDASPYPSVPDLLDESFRQYRDRTAFVCMGKGITYGELDKLSRQFGAWLQSRGLARGARVAIMMPNVLQYPVAIAAILRAGYTVVNVNPLYTPRELEHQLKDSGAEAIVILENFASTLQAVIANTDVKHVVVASMGDLLGIKGWLVNYVVRNVKKMVPAWQLPSFTRFKAALAEGARQAFKAQKIGPDDVAFLQYTGGTTGVAKGATLLHRNIVSNVLQAGAWHHPAHEKFPEVKQFVTVVALPLYHVFALTVCGFLTMRTGGMGILIPNPRDIAGMIKELKGYQISTIPAVNTLYNALLNHPEFSQLDLSKLVIANGGGMAIQEGVAKRWYEKTHTAIIEGYGLSETSPVATCNPVTATEYSGTIGLPLPSTEVAIRDDAGNDVALGEPGEICIRGPQVMAGYWNRPDETAKVMFADGFFKTGDVGVMDARGYVKIVDRKKDMILVSGFNVYPNEVEDVVASHPGVFEVAAVGVPDEHSGEAVKLFVVKKDPALTDKDILAYCKERLTGYKRPKLVEFRTELPKTNVGKILRRELRDGRA

SEQ ID NO: 193472 - protein, 579 aa, Unknown
  Bacterial polypetide isolated from the Sargasso Sea
MNTVADRSDLTDRIWLKSYPEGVPAEINPDRYHSLVEVFRESVEKYRTRVAYVSVGTEMTYGECERQAKQFAAWLQSRGVKKGDRVAIMLPNSLQYPVCLFGTLLAGAIVVNVNPLYTVPELAHQLRDSGAQTIVVLENFARTLEQALPGSQVRNIVITGIGDLMGGALNLKGRALNFVMRHVQKQVPPYKLPSPVWLRDALAAGGSRTLQSVQLAPEDLAFLQYTGGTTGVAKGAMLTHRNIIANLLQAEEWSKSMLNGGVETNVTLLPLYHIFSLTVNLLMFMTLGGRNILIANPRDTKRVIFILRNERFSGIAGVNTLFNALLEDPDFAKRDFSAMKITIGGGMAVQRAIAQRWKEVTGHTIVEGYGLTECSPVVSMNPPHVTEFSGTIGLPAPSTEVRFKRDDGTIAPLGEPGELQVRGPQVMRGYWQRPDETAKSIDAEGWFSTGDIGVMDANGYIRLIDRKKDMILVSGFNVYPNEIEDVVALHPDVLEVAAIGVPDPVAGERVKIIVVPRTGALTEPALLEHCRAHLTGYKMPRIVEFRHEELPKSTVGKILRRELRDADPDIKRARAQAQQ

SEQ ID NO: 193473 - protein, 557 aa, Unknown
  Bacterial polypetide isolated from the Sargasso Sea
MDKIWLKSYPPGVPAEIDPTRYSSVAELLEEAFREHRAKPAFVCMGKEISYGELDALSRKLAAWFQSKGLARGARVAIMMPNVLQYPVAIAAILRAGYVVVNVNPLYTPRELEHQLKDSGAEAIILLENFAVTLQAIVRNTSIKHIVVAAMGDLMGMKGTLVNFVVRRVKKMVPAWCLPGHVKFNAAIAEGGHQNFKPVQQGPDDVAFLQYTGGTTGVAKGATLLHRNLIANVLQSEIWLDPVRANRTDIDQFITVVALPLYHVFALTVCGLLTIRTGGLGVLIPNPRDIPGMIKALEGYPITTIPAVNTLYNAMLNSPDFHKLDFSKLIAANGGGMAVQEAVAKRWFELTHTPIIEGYGLSETSPCVTCNPVTVTEYSGTIGLPLPSTEISIRDDEGNEVPLGQPGEICIRGPQVMAGYWNRPDETAKVMTPDGFFKSGDVGLMNEKGFVKIVDRKKDMILVSGFNVYPNEIEDVVAKMPGVFEVAAVGVPDQHSGEAVKLFIVKKDQALTDADIFAYCKTQLTGYKRPKIVEFRTELPKSNVGKILRRELRDGRA

SEQ ID NO: 193474 - protein, 488 aa, Unknown
  Bacterial polypetide isolated from the Sargasso Sea
MQQQLGLKKGDAVAVMMPNLLQYPVCILGILRAGCVVVNVNPLYTPRELEHQLLDSQAKAIVIVENFAHTLSDVQDKVKLNHVILTHMGDMLGLVKGTIVNLVVKHVKKLIPAHNLKKYVTYKQVIATGNAAAYKKPVVVGEDLAFLQYTGGTTGVSKGAMLTHRNMVANLEQADGCIGPLLTHGKEFVVTALPLYHIFALTANFLVFMKYGGTNLLITNPRDMPNFVKELEKYPFSVITGVNTLFNGLLNTPGFAQLDFSNMKLALGGGMAVQRPVAERWQKVTSTRLVEGYGLTECAPLVTVSPYNLPAYNGSIGFPAPSTDIKLVNDDGVEVAAGEAGEMWVKGPQVMKGYYNRHDETLKVLNADGWLATGDIARVDDEGFFYIVDRKKDMILVSGFNVYPNEIEEVVAMNDKVLEVAAIGVPNESTGEAVKIFVVKKDQSLTDAELIQHCKERLTGYKVPKLVEFRTELPKTNVGKILRRELKG

SEQ ID NO: 193475 - protein, 421 aa, Unknown
  Bacterial polypetide isolated from the Sargasso Sea
NLQSILKETSIKNVLITSVGEFLGLKGIMINFVLRKIRKMVPKYSLPNAVNFKDAINIGSKHKFQEQKIDKEDIAFLQYTGGTTGGVKAAILSHRNVLANAIQVREWLGEKLKFGEDLAICALPLYHIFALTCNSVVYFYFGANNILITNPRDIPGFVKILKKYKFTFISGVNTLFNKLLEDKNFQDCNFSKLNITIAGGMPVQKSVGNRWQKITGCLMVVGYGLSETAPAASIDPVDGKTFSDTIGLPLPSTEMSIQDDKGKILSAEKEGEICIRGPQVMRGYWNNEKDTKIALTKDGWFKTGDIGKMRKDGYFQIVDRKKDMIIVSGFNVYPSDIEEVAMQHQKILEAGCIGVSGNNGQELVKLFVSVVEGETITKEEILEHCRNNLTAYKVPKLLEIVDEIPKSNVGKILRRELREKK

SEQ ID NO: 193476 - protein, 242 aa, Unknown
  Bacterial polypetide isolated from the Sargasso Sea
MSIIVNKDTKVICQGFTGSQGTFHSEQAIKYGTQLVGGVTPKKGGTTHLGLPVFDTVSEAKEKTDANASVIYVPPPFAAAAIVEAIESQIELIICITEGIPVIDMMMVKDKLKSSKSRLIGPNCPGIITPDECKIGIMPAHIHKKGSVGIVSRSGTLTYEAVFQTTVAGMGQSTCVGIGGDPINGTNFIDCLDLFLKDDETESIIMIGEIGGSAEEEAAEFIKKQSIKKPMVGFIAGTSAPP

SEQ ID NO: 193477 - protein, 256 aa, Unknown
  Bacterial polypetide isolated from the Sargasso Sea
MSVLISKETKVICQGITGSQGTFHTEQAIEYGTKMVGGVTPGKGGTTHLNLPVFNNVSEAVNETGANVSVIYVPPPFAAAAILEAIEANIELVVCITEGIPVLDMVKVKEALINSNTRLIGPNCPGIITPGECKIGIMPGHIHQKGNVGIVSRSGTLTYEAVGQTTACGLGQSTCIGIGGDPVNGTNFIDCLDLFLNDDQTESIIMIGEIGGSAEEEAAEFLMSSSIKKPTVGFIAGLTAPPGRRMGHAGAIISGG

SEQ ID NO: 193478 - protein, 298 aa, Unknown
  Bacterial polypetide isolated from the Sargasso Sea
MIFHEHQAKQILKEFGAVVPEGVFAFTVKDLIEKCKKLKTDKYVLKAQIHAGGRGKAGGVKILNNLDELEKSANELLGKKLITHQTGPEGREVKRLYVETSSNIEKEFYLSCLIDRATSKIAFISSNEGGMDIEEVAAKSPDKILTNKVDFTEEISDAECEKIIKIFDLEDSSKMEAISLIKSIYKMFVKTDANMVEVNPLILTKEKKIVCLDAKINFDSNALFRHPEILNLRDLNEEDPIEIEASKHDLAYIKLDGSIGCMVNGAGLAMATMDIIKLYGEEPANFLDVGGGASKEKV

SEQ ID NO: 193479 - protein, 287 aa, Unknown
  Bacterial polypetide isolated from the Sargasso Sea
KQLDIKHELYLGLVFDRSSESIMVVASTEGGMSVEEISKEKPETIIRSKIEVAVGIQQFQAREIAFGLGIETKLISRAANTIIGCYKAFSELDATMVEVNPLVVSHQDEILALDCKMSFDNNAMFRRDEIAELRDKTQENSNEVYASDRGMNYVSLDGNIGNIINGAGLAMASMDMIKLAGGEPANFLDVGGGATPEKIVKAFKLISMDTKVKVILVNIFAGINRCDWVAEGIVQALSKIEIKHPLVIRLAGTNVEKGNEILKKSNINYIEASTLEDAANKAVKALG

SEQ ID NO: 193480 - protein, 182 aa, Unknown
  Bacterial polypetide isolated from the Sargasso Sea
KEKKIVCLDAKVNFDSNALFRHPEIVELRDLNEEDPTEIEASKHDLAYIKLDGSIGCMVNGAGLAMATMDIIKLYGKEPANFLDVGGGASKEKVSAALKIILSDKNVKGILINIFGGIMRCDVLAQGVVDAAKEINISVPLVVRLAGTNFKEGKEILDNSGLKLISAENLDDAAKKIVEAIK

SEQ ID NO: 193481 - protein, 269 aa, Unknown
  Bacterial polypetide isolated from the Sargasso Sea
MSILVDRNTRVICQGITGKVGEFHTRGCLEYGTRMVGGVTPGKGGETIADLPVFNTVAEARDVTGANATMIFVPPPFAADAILEAVAAEIELVIAVTEGIPVLDMARVLPAFENSKSRLVGPNCPGVITPGQCKIGIMPGYIHTPGNVGVMSRSGTLTYEAVWQLTQLGHGQSTCVGLGGDPLVGSSFIDILELFEQDDDTHAILMMGEIGGSAEEEAAAYVKEHVTKPVAAFIAGRTAPPGKRMGHAGAIISGGKGTAEAKLEALRDA

SEQ ID NO: 193482 - protein, 247 aa, Unknown
  Bacterial polypetide isolated from the Sargasso Sea
MNIHEYQAKSLLKQYGVPVPNGKVINSLRDLIGLDQELSGSKFVVKSQIHAGGRGAGFFKNDEHGGGGVTIANSLSDVETNVKRMLNNTLVTKQTGAEGKEVKTVYIEEACQIEREFYLSMLVDRKFGSVTVICSTEGGMEIEEVAENTPEKIIQINVDGQIGLKGYHTQQISKELGLSKDQHRCVSDLLYSLYEAFNKLDAAMIEINPLVITGSDEVLAVDAKMSFDDNALFRQPEVQGLRDESEE

SEQ ID NO: 193483 - protein, 249 aa, Unknown
  Bacterial polypetide isolated from the Sargasso Sea
MNIHEYQAKELLKNNGVNVPNGKVAFTVDEALDVAKELNSDVWVVKAQIHAGGRGKAGGVKVVKSLEEVQTAAKEIMGKTLITPQTGPQGKVVKKLYVEEGSNIEKEFYLSMVIDRETNGITVIASTEGGMEIEEVAEKTPEKIIKYKLKPCAEMNINEAKDIASKLGLEGELIDKAANFILSVHKTTVSLEALMVEINPMVITKEKEVYALDAKMGFDENSFYRHEDIANLRDEDEEDPLELEAKKHD

SEQ ID NO: 193484 - protein, 306 aa, Unknown
  Bacterial polypetide isolated from the Sargasso Sea
LVTHQTGPGGKEVKRLYVEESTNIKKEFYLSCLVDRVDSKIAFISSDQGGMDIEEVAKKEPNKIITTKVDLKENISDDECNQIVKIFGLKDNTFLQAKNLIKSIYKMFKECDANLVEINPLIISKENQIVCLDAKMNFDDNALFKHPEILALRDLNEEESNEIEASKHDLSYIKLDGNIGCMVNGAGLAMATMDIIKLFGKEPANFLDVGGGASKDKVSAAFKIILLDKNVKGILINIFGGIMRCDVLAEGVVEAAKEMKVNVPLVVRLAGTNFKQGIKILDESGLKIISASNLSDAAKKIVEAIK

SEQ ID NO: 193485 - protein, 259 aa, Unknown
  Bacterial polypetide isolated from the Sargasso Sea
MNIHEHQAKEILKEFGAPTTEGLVIFNTENLVEKIKVLKSNQFVLKAQIHAGGRGKAGGVKLVKKEDIIDVAKNLFGKVLVTPQTGPEGKEVKRIYVQKAYDILKEFYLSCLVDRKSSKIAFISSTEGGVDIEAVAKKNPEKINTTKVDLKKNLSSEDINNILKIFKFDKNQMIDATKLVTAMYEALISKDASLIEINPLVIIKNNKILCLDAKMNFDDNAIFKHPEIYKLRDLNEEDPTEIEASKHDLAYIKLEGSIG

SEQ ID NO: 193486 - protein, 244 aa, Unknown
  Bacterial polypetide isolated from the Sargasso Sea
MNIHEHQAKKLLREFGAPVPNGIFGLSVQEIIEKSKNLITNKYVLKAQIHAGGRGKAGGITIVNSLDELEQAANQLFGKTLITHQTGPKGKKVERLYVEEASRIEKEFYLSCLVDRKSSKIAFISSIQGGMDIEQTAKENPEKIITTKVEFDKSISENDCEKIINVFKLEYDAKDQAIDLVKSIYNLFIEKDASLVEINPLILTKEKNIICLDAKINFDDNALYKHPEILELRDLSEEDPTEIE

SEQ ID NO: 193487 - protein, 197 aa, Unknown
  Bacterial polypetide isolated from the Sargasso Sea
MNIHEHQAKQILKKYGAVVPEGVFALNVDELIQKAKALKTEKYVLKAQIHAGGRGKAGGVKILKSIEELTVAAKELLGKTLVTHQTGPEGREVKRLYVEESSNIDKEFYLSCLVDRASSKIAFISSDQGGMDIEEVASSSPEKIITTKVDMGDEISDSDCEKIINIFNLNEDAKKQAITLIKSIYKMFVGTDANMVK

SEQ ID NO: 193488 - protein, 311 aa, Unknown
  Bacterial polypetide isolated from the Sargasso Sea
NIHEHQAKQILKKYGASVPKGDFAFTVNELIEKAKKIKTEKYVLKAQIHAGGRGKAGGVKILNNIEELIDSAKEMLGKTLITHQTGPNGKEVKRLYIEESSKIKKEFYLSCLIDRASSKIAFISSDQGGMDIEEVAKKRPEKIITTKVDYLEDIDDENCKKIIKIFNLKDNTMLQGINLIKSIYKMFISTDANLVEINPLILTEDDNLICLDAKMNFDDNSIFRQPEIQSLRDLNEEDPSEIEASKHDLAYIKLDGSIGCMVNGAGLAMATMDIIKLFGQEPANFLDVGGGASKEKVSAAFKIILSDPNVK

SEQ ID NO: 193489 - protein, 309 aa, Unknown
  Bacterial polypetide isolated from the Sargasso Sea
MNIHEHQAKQILKKYGAIVPEGVFALNVDELIEKAKVLKTDKYVLKAQIHAGGRGKAGGVKILNSIEELTVAAKELLGKTLFTHQTGPEGREVKRLYVEESSNIDKEFYLSCLVDRASSKIAFISSDQGGMDIEEVASSSPEKIITTKVDIGGEISKSDCEKIINIFNLNEDTKKQAIILIKSIYKMFVSTDANMVEVNPLILTKEEKIVCLDAKVNFDSNALFRHPEIVELRDLNEEDPTEIEASRHDLAYIKLDGSIGCMVNGAGLAMATMDIIKLYGEEPANFLDVGGGASKEKVSAAFKIILSDK

SEQ ID NO: 193490 - protein, 276 aa, Unknown
  Bacterial polypetide isolated from the Sargasso Sea
FTGSHGTFHSEQAIKYGTNLVGGVTPKKGGQKHLDRPVFNSVLEAKNEVGADATMIYVPAKFAAAAIIEAIDASIELIVCITEGIPIQDMLKVRQKLSGSNSRLIGPNCPGIISPDECKIGIMPGSIHKRGSVGIVSRSGTLTYEAVAQTTENGLGQSTCIGIGGDPINGTNFIDCLDLFLNDSETESILMIGEIGGTAEEEAADFIKNHKIKKPIVGFIAGITAPPGRRMGHAGAIISGGKGGAEDKIKKMEECGITVAKSPSIIGKTLFDKLSN

SEQ ID NO: 193491 - protein, 293 aa, Unknown
  Bacterial polypetide isolated from the Sargasso Sea
KRLYVEESSNIDKEFYLSCLVDRASSKIAFISSDQGGMDIEEVASSSPEKIITTKVDMGDEISESDCEKIINIFNLNEDAKKQAITLIKSIYKMFVSTDANMVEVNPLILTKEEKIVCLDAKVNFDSNALFRHPEIVELRDLNEEDPTEIEASKHDLAYIKLDGSIGCMVNGAGLAMATMDIIKLYGKEPANFLDVGGGASKEKVSAALKIILSDKNVKGILINIFGGIMRCDVLAQGVVDAAKEINISVPLVVRLAGTNFKEGKEILDNSGLKLISAENLDDAAKKIVEAIK

SEQ ID NO: 193492 - protein, 152 aa, Unknown
  Bacterial polypetide isolated from the Sargasso Sea
MKIHEYQAKQILAKYGVPVPNGNVAFSVDEALMVAEDLKSEVYVAKAQIHAGGRGKGGGVKVSKGLEALRKNAETILGMQLVTHQTGPAGQKVKQILIEEGIDISKELYCSVLVDRGKQRIVILASTEGGMDIEEVAANTPEKIKKVFVDPS

SEQ ID NO: 193493 - protein, 181 aa, Unknown
  Bacterial polypetide isolated from the Sargasso Sea
KLSGSSSRLIGPNCPGIITPDECKIGIMPGSIHKRGSVGIVSRSGTLTYEAVAQTTENGLGQSTCIGIGGDPINGTNFIDCLDLFLNDDETESILMIGEIGGTAEEEAADFIKNHKIKKPIVGFIAGITAPPGRRMGHAGAIISGGKGGAEDKIKKMQECGITVAKSPSIIGKTLFDKLSN

SEQ ID NO: 193494 - protein, 171 aa, Unknown
  Bacterial polypetide isolated from the Sargasso Sea
GPNCPGIITPDECKIGIMPGNIHKKGTVGIVSRSGTLTYEAVAQTSENGLGQSTCIGIGGDPIHGTNFIDCLDLFLNDEKTESIVMIGEIGGTAEEEAAEFIKNHKIKKPMVGFVAGITAPPGRQMGHAGAIISGGKGNADEKIKIMEKSGITMAKSPSEIGITLLNKLSN

SEQ ID NO: 193495 - protein, 164 aa, Unknown
  Bacterial polypetide isolated from the Sargasso Sea
LYRQEEIQSMRDSSQEDEREYQAKQHDLSYVSLDGNIGCMVNGAGLAMGTMDTIKLYNGEPANFLDVGGTATKERVGEALKLILSDHNVKGILVNIFGGIVRCDLIAEGIIGAINEIEVNVPIVVRLQGNMSNEGKELLNSSGLNVIGEDSLIQASQKIVELVK

SEQ ID NO: 193496 - protein, 167 aa, Unknown
  Bacterial polypetide isolated from the Sargasso Sea
DNALFRHPELSELQDISEEDPLELEATKNNMNYVKLDGSIGCMVNGAGLAMATMDLIKQFGEEPANFLDLGGTANKERAVKGFKIIQSDPNVKSVLINIFGGIIHCDMIANGIIEAVKELNFKLPIVVRFQGTNSKEGRDIINKSNLGMISIDDFTEAANKVVELAK

SEQ ID NO: 193497 - protein, 171 aa, Unknown
  Bacterial polypetide isolated from the Sargasso Sea
VGPNCPGVITPGQAKIGIMPGFIHSPGTIGIMSRSGTLTYEAVHQIGAHGLGQSTVIGIGGDPIIGTTFIDMLELFANDEGTEGVVMIGEIGGNAEEEAAQWVIDNNFKKPIVSFIAGQTAPPGRRMGHAGAIIAGGKGTAAEKMKELKRAGITVVESPADIGQAMVSAIN

SEQ ID NO: 193498 - protein, 294 aa, Unknown
  Bacterial polypetide isolated from the Sargasso Sea
REIYLGFVLDRSSQRVMIVASAEGGMEIEDISAEKPDSIVRSTVEPAVGLQDFQCRQIAFKLGIDPALTQSMVRTLQGCYRAFREHDATMVEINPLVVTGDSRILALDAKMTFDDNALFRHPHISELRDKSQEDPRESRAADRGLSYVGLEGNIGCIVNGAGLAMATMDTIKLAGGEPANFLDIGGGATPERVAKAFRLVMSDDNVQAVLVNIFAGINRCDWVAEGVVQALREVQVNVPVIVRLAGTNVEEGQKILAKSGLPIIRATTLMEAAERSVQAWQSDSIGEPKLRAVK

SEQ ID NO: 193499 - protein, 168 aa, Unknown
  Bacterial polypetide isolated from the Sargasso Sea
MNIHEHQAKQILKKYGAVVPEGVFALNVDELIQKAKALKTEKYVLKAQIHAGGRGKAGGVKILNSIEELTVAAKELLGKTLVTHQTGPEGREVKRLYVEESSNIDKEFYLSCLVDRASSKIAFISSDQGGMDIEEVASSSPEKIITTKVDMGDEISDSDCEKIINIFN

SEQ ID NO: 193500 - protein, 195 aa, Unknown
  Bacterial polypetide isolated from the Sargasso Sea
GIPVMDMLEVKDTLRSSKSRLIGPNCPGVITPDECKIGIMPAHIHQKGNVGIVSRSGTLTYEAVYQTTVEGLGQSTCIGIGGDPVNGTNFIDCLELFLSDPETESIIMIGEIGGSAEEEAAEFLRKEKVKKPTVGFIAGTSAPPGRRMGHAGAIVSGGKGGAEDKIEAMKSAGIQISNSPAALGSTLLEVLKNQN

SEQ ID NO: 193501 - protein, 250 aa, Unknown
  Bacterial polypetide isolated from the Sargasso Sea
MNLHEYQGKEIFAKYDLPVSKGKVVTSLDEVEQACTDIGGSRWVAKAQVHAGGRGKSGGVALCDTIEEVADFTKKWLGKRLVTYQTDKEGQLVSCILVEECTNIADELYYSAVVDRSSREVAIIASSEGGVNIEKVAEETPEKITSIFLNGKDVSKGDIEKICTTLKLNETQSSQMEHIVRKTVSMFFECDLSLLEINPLVIKDDGNLHCLDAKINIDSNALFRQKELQEMHDPTQEDPRESEASKYDLS

SEQ ID NO: 193502 - protein, 264 aa, Unknown
  Bacterial polypetide isolated from the Sargasso Sea
VASTEGGMSVEEISKKKPETIIRSKIEVAVGMQKFQAREIAFGLGIESKLIARAADTIIGCYRAFSELDATMVEVNPLVISNQEQILALDCKMSFDNNALFRRNQVSELRDKSQENPNEVYASDRGLNYVSLEGNIGNIINGAGLAMASMDMIKLAGGEPANFLDVGGGATPEKIVKAFKLISMDEKVKVILVNIFAGINRCDWVAEGIVQALQKIEIKVPIVIRLAGTNVDKGNKILKESKINYIEANTLEDAANKAVKALGK

SEQ ID NO: 193503 - protein, 283 aa, Unknown
  Bacterial polypetide isolated from the Sargasso Sea
IEKEFYLSCLVDRATSKIAFISSDQGGMDIEEVAAKSPDKILTTKVELNEEISNKECEKIIRIFNLEGSYKNEAISLIKSIYKMFIKTDANMVEINPLILTKEKKIVCLDAKVNFDSNALFRHPEILKLRDLNEEDPSEIEASKHDLAYIKLDGSIGCMVNGAGLAMATMDIIKLYGEEPANFLDVGGGASKEKVSAAFKIILSDKNVKGILINIFGGIMRCDVLAQGVVDAAKEINISVPLVVRLAGTNFKEGKEILDNSGLKLISAENLDDAAKKIVEAIK

SEQ ID NO: 193504 - protein, 143 aa, Unknown
  Bacterial polypetide isolated from the Sargasso Sea
GIVSRSGTLTYEAVAQTTQNGLGQSTCIGIGGDPINGTNFIDCLDLFLNDPETESILMIGEIGGTAEEEASEFIRNHKIKKPMVGFIAGITAPPGRRMGHAGAIITRGKGGAQEKIKTMEDAGITIAKSPAEIGKTLLNKLSN

SEQ ID NO: 193505 - protein, 219 aa, Unknown
  Bacterial polypetide isolated from the Sargasso Sea
KLTINQKKEATQLLKALYKILIQKDANLIEINPLIITEEEKILCLDAKMNFDDNATYRRPEILKLRDLNEEDPKEIEASKYDLAYIKLNGSIGCMVNGAGLAMATMDIIKLYGKEPANFLDVGGGASKEKVSAAFKLILSDRNVKGILINIFGGIMRCDVLAQGVVDAAKEINLSIPLVVRLAGTNFKEGKEILDKSNLKILSATDLNDAARKIVEAIG

SEQ ID NO: 193506 - protein, 238 aa, Unknown
  Bacterial polypetide isolated from the Sargasso Sea
VDFNESISEEDCKKIIKIFDLDIDASKQAINLIKSIYKMFIDTDANLVEINPLILTKKNKIVCLDAKMTFDENALFKHPEIQKLRDFNEEEETEIEASKHDLAYIKLDGNIGCMVNGAGLAMATMDIIKLYGEEPANFLDVGGGASKEKVSAAFKIILSDKNVKGILINIFGGIMRCDVLAQGVVDAAKEIKIKVPLVVRLAGTNFKEGKEILDNSGLEIISANDLSDAAKKIVEAIK

SEQ ID NO: 193507 - protein, 315 aa, Unknown
  Bacterial polypetide isolated from the Sargasso Sea
VKAQVHAGGRGKAGGVKIAKSIANVQEMASKMLGTNLITKQTDDNGLPVNQVYIESGTSIQSEYYLSLLVDRTKESWTYIASIEGGVDIEAVAEESPEKIINYTIDPLKGLELSSLSEMADQMGFIDDVRSQFISITQKMFEIAKNKDANLIEVNPLILDDHNQLIALDAKISIESNALFRQEELLAFKDNSQENELEVKASEHDLSYVSLDGNIACMVNGAGLAMATMDLIKLHGGEPANFLDVGGGATTDRVKIAIDIIMENPNVDAILINIFGGIVRCDVIAQGITEAVKSTAIDIPIVARLQGTNVELGTK

SEQ ID NO: 193508 - protein, 303 aa, Unknown
  Bacterial polypetide isolated from the Sargasso Sea
GPDGKKVQRLLIESGIDIEKEFYAGIVLDRKEKKFVFMVSTEGGVEIEKVAEETPEKIIKEWIHPEDGLSKNQATALGSALGLTRNQLDSGIEIFTALWEAFSSLDCSLMEINPLVLTKNDKVIALDAKINFDGNGLFRHPELSDLRDKSEEDPAEAEASSYNLNYIKLDGNVGCMVNGAGLAMGTMDIIKLKGGDPANFLDVGGVANPETVANGFKIILSDPNVRSILINIFGGIVRCDRVAQGVINAMQTISVNVPVVIRLEGTNAKEASQLLEQSPLNFIVANSLSDAAEKAVAATNGAI

SEQ ID NO: 193509 - protein, 291 aa, Unknown
  Bacterial polypetide isolated from the Sargasso Sea
MSIIANKNTKVICQGFTGKHGTFHSEQAIEYGTNLVGGVTPNKGGQTHLSKPVFNSVKEAKEKTGANASMIYVPAKFAASAIIEAIDASIELIVCITEGIPVLDMLKIKKKLINSNSRLIGPNCPGIITPEECKIGIMPGNIHKKGSVGIVSRSGTLTYEAVAQTTNIGLGQSTCIGIGGDPINGTNFIDCLDLFLNDEETKSILMIGEIGGTAEEEAAEFFRDHKIKKPMVGFIAGVTAPPGRRMGHAGAIISGGKGGAESKIKKMEDCGITIAKSPAEIGKTLINKLSN

SEQ ID NO: 193510 - protein, 202 aa, Unknown
  Bacterial polypetide isolated from the Sargasso Sea
MEHIVRRTVLMFFECDLSLLEINPLVIKDDGNLHCLDAKINIDSNSLFRQKELQEMHDPTQEDPRESEASKYDLSYVSLDGNIGCMVNGAGLAMGTMDTIKFFKGNPANFLDVGGTATQERVAKAFKIILDDPEVKVVLVNIFGGIVRCDLIAEGIVAAIDEVGVEIPVVVRLEGNSAEKGLSILSNSSSKIQSKNSLKMQL

SEQ ID NO: 193511 - protein, 268 aa, Unknown
  Bacterial polypetide isolated from the Sargasso Sea
LPRGCIIASSEGGVNIEKVAEETPEKITSISLNGKDVSKGDIEKICSTLKLNETQSSQMEHIVRKTVSMFFECDLSLLEINPLVIKDDGNLHCLDAKINIDSNALFRQKELQEMHDPTQEDPRESEASKYDLSYVSLDGNIGCMVNGAGLAMGTMDTIKFFKGNPANFLDVGGTATQERVAKAFKIILDDPEVKVVLVNIFGGIVRCDLIAQGIVAAIDEVGVEIPVVVRLEGNSAEKGLSILSNSSSKIQSKNSLEDAARTAVELAK

SEQ ID NO: 193512 - protein, 332 aa, Unknown
  Bacterial polypetide isolated from the Sargasso Sea
AQIHSGARGKAGGIKVCKSEDEVAKAAEELLEKKLVTHQTGPQGKVCHRLYVEAGCNIDREIYMAFVLDRQKESVTVVASAEGGMEIEQLAIEKPDSIIKIAVEAAVGMQPFQAREIVFALGLDKSQVNQAVTTILGCYRAMRDLDANMVEINPLVVTKEGNLLAVDAKMGFDDNALFRHSQISELRDKSQEDIREMNAADRGLSYVGLDGNIGCIINGAGLAMATMDMIMHAGGEPANFLDIGGGASPERVSKAFNLVLSDDNVKCILINIFAGINRCDWVAEGIIQAVQKIELKLPVVVRLSGTNVEQGRKMLKDSGLPLIMAETLREAA

SEQ ID NO: 193513 - protein, 335 aa, Unknown
  Bacterial polypetide isolated from the Sargasso Sea
GVKILENLQKLEQEAQNLLGKTLVTHQTGPNGREVKRLYVEASSEISKEFYLSCLVDRASSKIAFISSDQGGMNIEDVASKSPEKIITTKVDLNDEISDDDCKKIIKIFNLDMEVSKKAVNLIKSIYKMFIDTDANLVEINPLILTKDNNIVCLDAKMNFDDNALFKHPEILELRDLNEEEDNEIEASKHDLAYIKLDGNIGCMVNGAGLAMATMDIIKLYGEEPANFLDVGGGASKEKVSAAFKIILSDKNVKGILINIFGGIMRCDVLAQGVVEAAKEIKIQVPLVVRLAGTNFEEGKKILDNSELKIISASDLSDAAKKIVEAIKIIYGSFS

SEQ ID NO: 193514 - protein, 190 aa, Unknown
  Bacterial polypetide isolated from the Sargasso Sea
PTLDMLKVKVKLKETGTRMIGPNCPGVITPGECKIGIMPGHIHKPGKVGIVSRSGTLTYEAVKQTTDEGFGQSTCVGIGGDPIPGTNFIDVLEMFQNDPQTEAIVMIGEIGGNAEEEAAEYIKAHVTKPVVSYIAGVTAPEGKRMGHAGAIIAGGKGTAADKFAALEAAGVTTVRSLADIGKALRTKTGW

SEQ ID NO: 193515 - protein, 189 aa, Unknown
  Bacterial polypetide isolated from the Sargasso Sea
INPLVITKNGDLHCLDAKINIDSNALFRQPELMEMHDESQEDPQEAEAAKHDLSYVSLDGNIGCMVNGAGLAMGTMDTIKFFGGNPANFLDVGGTATQERVAKAFKIILKDPEVKVVLVNIFGGIVRCDLIAEGIVAAIKEVGIEVPVVVRLEGNNAEIGAKILEESDIKVESINDLGSAAKKSVELAK

SEQ ID NO: 193516 - protein, 326 aa, Unknown
  Bacterial polypetide isolated from the Sargasso Sea
GKAGGVKILDNLSDLEKAAKDLLGKKLITHQTGPSGKEVKRLYLEEPSNIKKEFYLSCLIDRASSKIAFISSDQGGMDIEEVAKSDPNKINTVKISFKKDIEDEDCKKIIRNFNLDDDANTKCIKVIKSIYKAFVSTDASLIEINPLILTKENNIVCLDAKISFDDNAIFKHPELMELRDLNEEDPIEIEASKHDLAYIKLDGSIGCMVNGAGLAMATMDIIKLHGQEPANFLDVGGGASKEKVAAAFKIILSDKNVKGILINIFGGIMRCDVLAQGIVEAAKESKINIPLVVRLAGTNSKEGKKILDESGLKIISASDLGDAAKK

SEQ ID NO: 193517 - protein, 311 aa, Unknown
  Bacterial polypetide isolated from the Sargasso Sea
WLGNNLVTYHTDSKGQPVNSILVEECTNISQELYLSAVIDRDSQKIVFIGSSEGGVNIEEVAKNMPEKIIYQGVVYGDKSLPDNALNIAKVLKLNDIQTIQFISMIDNLLRLFVEKDLSLLEINPLVITDSGDLLCLDAKVNIDSNALFRQPELLEMYDETQEDPQEAEAAKNDLSYVSLDGNIGCMVNGAGLAMGTMDTIKFYGGNPANFLDVGGTATQERVAKAFKIILKDPDVKVVLVNIFGGIVRCDLIAKGIIAAIKEVEVKIPVVVRLEGNSADKGSKILSKADIKIDSINDLADAAKKAVELAK

SEQ ID NO: 193518 - protein, 194 aa, Unknown
  Bacterial polypetide isolated from the Sargasso Sea
MSVLVNKNTRLICQGFTGSHGTFHSEQAIKYGTNLVGGVTPKKGGQKHLGLPVFNTVKEARESEGANATMIYVPAKFAASAIIEAIDASIELIVCITEGIPIQDMLKVKQRLNNSKSRLIGPNCPGVITPDECKIGIMPGSIHKKGTVGIVSRSGTLTYEAVAQTTENGLGQSTCIGIGGDPINGTNFIDCLDL

SEQ ID NO: 193519 - protein, 244 aa, Unknown
  Bacterial polypetide isolated from the Sargasso Sea
ISTTKIDIKSEGPNDDEIKNIISIFNLTTSQKKEASNLIKVLYKVLVEKDASLIEVNPLIITKSEKILCLDAKMTFDDNAVFRRPEILELRDLNEEESAEIEASKHDLAYIKLDGSIGCMVNGAGLAMATMDIIKLYGQEPANFLDVGGGASKEKVTAAFKLILADKSVKGILINIFGGIMRCDVLAQGVLDAAKQVNLSVPLVVRLAGTNYIEGKKILDESDLKILSASDLNDAAKKIVEAIK

SEQ ID NO: 193520 - protein, 208 aa, Unknown
  Bacterial polypetide isolated from the Sargasso Sea
QMIEYGTNIVGGVTPGKGGQLHLNKPVFDSVNEAVSKTNADTSIIFVPPPFAADAIMESADAGIKVIIAITEGIPISDMVKVVPYVKAKGSILIGPNCPGVITPEEAKVGIMPGFVFKKGSVGIISKSGTLTYEAADQVVRAGLGITTAIGIGGDPIIGTTTRDAVELFMNDPQTKCIVVIGEIGGQLEVEAARWIKNTGNSKPVVGF

SEQ ID NO: 193521 - protein, 287 aa, Unknown
  Bacterial polypetide isolated from the Sargasso Sea
EGCDIKKEYYLSMLVDRASSSIQIIASTEGGMEIEEVAEKQPEKIITVNVPGDSIIDQNSLNKLTEGLNIDQNLSNDFCDQIQKIYNSFLSSDASLVEVNPFVLTGEGNFLALDAKVSIDDNALYKHKDVASMRDETEEDPAEIEASKHELNYVKLDGQIGCMVNGAGLAMGTMDIIKLHGGSPANFLDVGGGATKERVAKAFSIILQDPNVKAILVNIFGGIMKCDIIAEGVVAAAKELSIKVPLVVRLEGTNVDLGKEILNKSGLSIISADNLEDAAQKAVGALN

SEQ ID NO: 193522 - protein, 243 aa, Unknown
  Bacterial polypetide isolated from the Sargasso Sea
MSVLINKHTKLICQGFTGSHGTFHSEQALKYGTNLVGGVTPKKGGQIHLGRPVFNTVKEAKHQTGANATMIYVPAKFAAEAIIEAIDASIDLIVCITEGIPILDMIRVKQRLSESKSRLIGPNCPGIITPEECKIGIMPGDIHKRGSVGIVSRSGTLTYEAVAQTSSNGLGQSTCIGIGGDPINGTNFVDCLDLFLKDDETKSILMIGEIGGTAEEEAAEFVKNNKIKKPYGWLYCRPDSSSW

SEQ ID NO: 193523 - protein, 321 aa, Unknown
  Bacterial polypetide isolated from the Sargasso Sea
GVKILNTIEELSKAAKELLGKKLVTPQTGPQGRLVKRLYVESSSKIDKEFYLSCLVDRASSKIAFISSDQGGMDIEEVAKNNPTKIITTKVNLEDQISDEDCYKIIKIFNLEDSTKKQSIDLIKSIYKMFIDTDANLVEINPLILTKDKKIVCLDAKMNFDDNALFRNPDILNLRDVNEEEETEIEASKHDLAYIKLDGSIGCMVNGAGLAMATMDIIKLYGEEPANFLDVGGGASKEKVSAAFKIILSDKNVKGILINIFGGIMRCDVLAQGVVDAAKEIKIEVPLVVRLAGTKFEEGKRILDNSGLKIISASDLSDAAK

SEQ ID NO: 193524 - protein, 261 aa, Unknown
  Bacterial polypetide isolated from the Sargasso Sea
MNLHEYQAKQLFREYGIAVSDGVAASSAEQAEKAALSLGVSKWVIKAQVHAGGRGKAGGVEVVDKIEKVREFADKWLGTNLVTFQTDADGQPVNQILVETCTEIENELYLGAVIDRASQRLVVMASTEGGVNIEEVAEQTPEKIFKVEIDPIEGTNDMDADGLSSLLGLNDSQSSQFRSIYKGLVKLFVEKDLALLEVNPLVITDSGDLLCLDAKLNIDSNALYRQEALTAMRDFSQEDSRESKAAEWDLSYVALDGNIGC

SEQ ID NO: 193525 - protein, 177 aa, Unknown
  Bacterial polypetide isolated from the Sargasso Sea
ETKASLLGPNCPGLISPGKANVGIMPHEITLPGNIGVVSRSGTLTYQAVHELTNLNIGQSTCIGIGGDPVPGMSFIDVIEKFQADSETEGIVMIGEIGGTAEEEAADFIKQNVTKPVVSYIAGVTAPPGKKMGHAGAIVSGNKGTAEAKIHALTDAGAIVVKTPTEIGKAMKDVING

SEQ ID NO: 193526 - protein, 164 aa, Unknown
  Bacterial polypetide isolated from the Sargasso Sea
ALFRHPEIEKLRDLNEEDQYEQEAAKYDLAYIKLDGNIGCMVNGAGLAMASLDIIKMYGGDPANFLDVGGGATKEKVSNAFQIILSDESVKGILVNIFGGIMRCDIIAEGIVAAAKELKISVPLVVRLEGTNVEEGKSILNNSGIDIVSAMDLDDAAKKIVKLV

SEQ ID NO: 193527 - protein, 119 aa, Unknown
  Bacterial polypetide isolated from the Sargasso Sea
MNIHEHQAKELLASNNVNVAKGFPAFSVDEAIQVAKKLGGPIWVVKAQIHAGGRGKAGGVKVVNSLNNVEIAAKEILGKTLVTPQTGSEGKVVKRLYIEEGCDIKRELYLSVLVDRNLG

SEQ ID NO: 193528 - protein, 169 aa, Unknown
  Bacterial polypetide isolated from the Sargasso Sea
DNALYRHRGNMSLRDRDEEDPLELEASEAGLNYIKLDGNIGCMVNGAGLAMGTMDIIKTYGGEPANFLDVGGGATQETVEKAFRIITLDPNVKCILINIFGGIVRCDMVAAGVIAAFKNVNLQIPVVIRLEGTNSEEAHKIVRESGLGESLQMADGIQQAAQKAVSAAY

SEQ ID NO: 193529 - protein, 213 aa, Unknown
  Bacterial polypetide isolated from the Sargasso Sea
GKKLIRIINSLYKILIEKDASLIEINPLIINKNGNLICLDAKMNFDDNAIYRRPEILKLRDLNEEDPKEIEASKFDLAYIKLNGSIGCMVNGAGLAMATMDIIKLYGEEPANFLDVGGGASKEKVSAAFKLILSDQNVKGILINIFGGIMRCDVLAQGVVDAAKEVNLSVPLVVRLAGTNFQEGKDILQKSSLKILSAEDLNDAAKKIVEAIK

SEQ ID NO: 193530 - protein, 255 aa, Unknown
  Bacterial polypetide isolated from the Sargasso Sea
KKYGAAVPEGVFALNVDDLVEKAKTLKTEKYVLKAQIHAGGRGKAGGVKILNTIEELTVAANELMGKTLVTHQTGPEGREVKRLYVEESSNIDKEFYLSCLVDRASSKIAFISSDQGGMDIEEVASKNPEKIITTKVDIKDEILNSDCEKIIKAFNLNENTEKQAILLIKSIYKMFVSTDANMVEVNPLILTKEKKIVCLDAKVNFDSNALFRHPEIVKLRDLNEEDPTEIEASKHNLAYIKLNGSIGCMVNGAG

SEQ ID NO: 193531 - protein, 145 aa, Unknown
  Bacterial polypetide isolated from the Sargasso Sea
MNIHEYQAKNLLREYGVPVSNGVIIFSLDEINEKIKQLNSKKLVVKAQIHAGGRGKAGGVKVVKNSDEAKKELTKMFGKILITHQTGPKGKKVNKVYVEEASEIQRELYLSCLVDRASSKIAFISSSEGGMDIEKVANENQIRFL

SEQ ID NO: 193532 - protein, 135 aa, Unknown
  Bacterial polypetide isolated from the Sargasso Sea
LTYEAVAQTTENGLGQSTCIGIGGDPINGTNFIDCLDLFLNDDETESILMIGEIGGTAEEEASEFVKNHKIKKPIVGFIAGITAPPGRRMGHAGAIISGGKGGAKDKIKKMEECGITVAESPSIIGKTLFNKLSN

SEQ ID NO: 193533 - protein, 190 aa, Unknown
  Bacterial polypetide isolated from the Sargasso Sea
IPTLDMLTVKVKLDEAGVRMIGPNCPGVITPGACKIGIMPGHIHQPGKVGIVSRSGTLTYEAVKQTTDYGFGQSTCVGIGGDPIPGSNFIDILKLFEEDPQTEAIVMIGEIGGSAEEEAAAYIKDHVTKPVVGYIAGVTAPKGKRMGHAGAIIAGGKGTADEKFAALEAAGVKTVRSLADIGEALKSIIK

SEQ ID NO: 193534 - protein, 298 aa, Unknown
  Bacterial polypetide isolated from the Sargasso Sea
PMNIHEYQAKAMFRESGVSVQRGVHCTTVEQALSAYDSLNSDVVAVKSQIHAGGRGKGDLFCPDSGELVMQGGVKVAFSRMEVENYSSNILGHKLVTKQTGPSGKIVSNLYVESGCDIAHEYYLAILVDREEDAILIMASTEGGVDIEEVAETSPETIHKVWFDPSDGLSEEVANSLGDSLGLSGNSRTSFTEMMVNLASLFTEKDCSMIEINPLVRDGNGLMVALDAKVSFDENATFRHPWREGLRDSSEESDVEVRAHEHGLSYVDLEGNIGCLVNGAGLAMATMDVIKLVWGGAS

SEQ ID NO: 193535 - protein, 175 aa, Unknown
  Bacterial polypetide isolated from the Sargasso Sea
MNIHEHQAKQILKKYGAVVPEGVFALDVDELIEKAKALKTEKYVLKAQIHAGGRGKAGGVKILNTIEELTVAAKELLGKTLVTHQTGPEGREVKRLYVEESSNIDKEFYLSCLVDRASSKIAFISSDQGGMDIEEVASSSPEKIITTKVDMGDEISESDCVKVIKIFNLNEDAKK

SEQ ID NO: 193536 - protein, 267 aa, Unknown
  Bacterial polypetide isolated from the Sargasso Sea
KIAFISSDQGGMDIEEVASSSPEKIITTKVDMGNEISGSDCEKIINIFNLNEDAKKQAITLIKSIYKMFVSTDANMVEVNPLILTKEEKIVCLDAKVNFDSNALFRHPEIVELRDLNEEDPTEIEASKHDLAYIKLDGSIGCMVNGAGLAMATMDIIKLYGKEPANFLDVGGGASKEKVSAALKIILSDKNVKGILINIFGGIMRCDVLAQGVVDAAKEINISVPLVVRLAGTNFKEGKEILDNSGLKLISAENLDDAAKKIVEAIK

SEQ ID NO: 193537 - protein, 326 aa, Unknown
  Bacterial polypetide isolated from the Sargasso Sea
GIAASSAKEVEKAALSLGVSKWVVKAQVHAGGRGKAGGVEVVDKIEKVREFADKWIGANLVTFQTDADGQPVNQILVETCTEIENELYLGAVIDRASQRLVVMASTEGGVNIEEVAEKTPEKIFKVEVDPIEGINAMDADKLSSLLGLNDSQSSQFRSIYKGMVKLFLEKDLALLEVNPLVITGSGDLLCLDAKINIDSNALYRQEALNEMRDTSQEDERESKAAEWDLSYVALDGNIGCMVNGAGLAMGTMDIIKLHGGEPANFLDVGGTADAKRVAEAFKIILSDKNVNTVLINIFGGIVRCDVIADGIVEALTVMGVSVPVVV

SEQ ID NO: 193538 - protein, 180 aa, Unknown
  Bacterial polypetide isolated from the Sargasso Sea
NSKSKLIGPNCPGIITPDECKIGIMPGNIHKKGSVGIVSRSGTLTYEAVYQTTKNGLGQSTCVGIGGDPVNGTSFIDCLDLFLKDEETKSILLIGEIGGSAEEEASEFIINNKIKKPIVGFIAGLTAPRGKRMGHAGAIISGGKGGAKEKIKIMEDAGITVADSPSEIGNTLKDKLSLLK

SEQ ID NO: 193539 - protein, 297 aa, Unknown
  Bacterial polypetide isolated from the Sargasso Sea
PRGGIVYSPENAENKARELGGSKWVVKAQIHSGARGKAGGIIVCNSALEVAQAADKLLGKKLVTNQTGPEGKITNRVYIEEATEIKKELYLGLVFDRSSESIMVVASTEGGMSVEEISKKKPETIIRSKIEVAVGMQKFQAREIAFGLKIEPKLIARAAETIIGCYRAFSELDATMVEVNPLVISNQDQILALDCKMSFDNNALFRRNQVSELRDKTQENSNEVYASDRGLSYVSLDGNIGNIINGAGLAMASMDMIKLAGGEPANFLDVGGGATPEKIVKAFKLISMDKKVKVILV

SEQ ID NO: 193540 - protein, 238 aa, Unknown
  Bacterial polypetide isolated from the Sargasso Sea
FNTVKEAKDSEGANATMIYVPAKFAAAAIIEAIDASIELIVCITEGIPIQDMLKVKQRLLKSNSRLIGPNCPGIITPDECKIGIMPGNIHKRGSVGIVSRSGTLTYEAVAQTTENGLGQSTCIGIGGDPINGTNFIDCLDLFLNDEETQSILMIGEIGGTAEEEAAEFVKNHKIKKPMVGFIAGVTAPPGRRMGHAGAIISGGKGGAQDKIKKMEDCGITIANSPSKIGKTLFDKLAN

SEQ ID NO: 193541 - protein, 161 aa, Unknown
  Bacterial polypetide isolated from the Sargasso Sea
HPENVKLRDLNEEDLTEMEASKHDLAYIKLDGNIGCMVNGAGLAMATMDIIKLYGKEPANFLDVGGGASKEKVSAALKIILSDKNVKGILINIFGGIMRCDVLAQGVVDAAKEINISVPLVVRLAGTNFKQGKKILDNSGLKLISAENLDDAAKKIVEAIK

SEQ ID NO: 193542 - protein, 185 aa, Unknown
  Bacterial polypetide isolated from the Sargasso Sea
TGDDRVVALDAKLSFDDNALFRHRDNADMRDLAEEDPLETEAGEYELNYIKLDGSIGCMVNGAGLAMGTMDIIKTYGGEPANFLDVGGTATEETVEKGFQIITQDPNVRCILINIFGGIVRCDMVASGIIEAFRKVNLQIPVVVRLEGTNAEEAQKIIGSSGFGNRLQMADGLGEAAEMAVAAAA

SEQ ID NO: 193543 - protein, 250 aa, Unknown
  Bacterial polypetide isolated from the Sargasso Sea
MSILVNKDTKVICQGFTGSQATLHCSQAIEYGTSIIGGVTPGKGGESHLDLPVFNSTKEAQQELEIDATIIFVPAKFCKDSVQEAIDAEIPLIICITEGIPTLDMMKLKQNADSAGCRIIGPNCPGVITPDQCKLGIMPGYIHKPGKIGIVSRSGTLTYEAVDQTTQAGLGQSSCVGIGGDPIPGSSFIDILQLFEEDSETEGIVMVGEIGGTAEEEAAEFIQSNVSKPVVAYIAGVSAPRGKRMGHAGA

SEQ ID NO: 193544 - protein, 182 aa, Unknown
  Bacterial polypetide isolated from the Sargasso Sea
KNNEILCLDAKMNFDDNAIFKHPEIYKLRDLNEEDPTEIEASKHDLAYIKLEGSIGCMVNGAGLAMATMDIIKLYGEEPANFLDVGGGASREKVTAAFKILLSDKNVKGVLINIFGGIMQCDVLAQGVVEAAKDVKLKVPLVVRLAGTNFKEGKKILDASGLEILSADNLNDAAKKIVEAIK

SEQ ID NO: 193545 - protein, 283 aa, Unknown
  Bacterial polypetide isolated from the Sargasso Sea
LSARVLPGSQGSFHTQQAIEYGTQMVGGVTPGKGGTEHLGLPVFNTVKEAVEATGATASVIYVPAPFCKDSILEAAFGGIKLIVCITEGIPTLDMLDAKVKCDELGVVLIGPNCPGVITPGECKIGIMPGHIHLPGKVGIVSRSGTLTYEAVKQTTDAGFGQSTCVGIGGDPIPGSNFIDILKLFQEDPKTEAIVMIGEIGGSAEEEAAAYIKAHVTKPVVSYIAGVTAPAGKRMGHAGAIISGGKGTADEKFAALQDAGVKTVRSLADIGKALAELTGWAVK

SEQ ID NO: 193546 - protein, 252 aa, Unknown
  Bacterial polypetide isolated from the Sargasso Sea
KDSFNDKGGVQVILEKDQVSSIAKSMMGNVLITKQTGKTGKTVNRIFIEEGCDIDREFYLSLLVDRNNSKLMMMISASGGMDIEEVAKTNPEKIINIHFTNYTDITLDENLQTKLEITKNQFDALTLIVNKLLNAFTSIDASTIEINPLVLNKQGSFVVLDAKISLDDNALFRHPELVELKDLTEEDPLELQAAEHDMNYVKLDGSIGCMVNGAGLAMATMDIIKQFGEEPANFLDLGGTANKDRVIMGFKT

SEQ ID NO: 193547 - protein, 221 aa, Unknown
  Bacterial polypetide isolated from the Sargasso Sea
ETKAINRCAQAILGAYKAFSTSDATMVEINPLVLTGDDHVVALDCKMSFDDNALFRNPELAELRDKSQEDPKETYAADRGLNYIPLDGNIGNIINGAGLAMASMDMIQLAGGQPANFLDVGGGATPEKFVKAFKLISGDPKVKVILINIFAGINRCDWVAQGIVDALNQINISQPLVIRLAGTNVDEGIKILKDSKIKYIEAYTLEDAANKAVKALKELGE

SEQ ID NO: 193548 - protein, 208 aa, Unknown
  Bacterial polypetide isolated from the Sargasso Sea
FEAIDAGIKVIITITEGIPVNDMTKVNMYLKGKDCVLVGPNCPGVITPDEAKVGIMPGFVFKKGTVGIVSKSGTLTYEASDQVVKEGLGVSTAIGIGGDPIIGTTTKDAIELFMNDDETNCIVMIGEIGGQLEADAARWVKENGNKKPVVGFIAGETAPKGRTMGHAGAIVGGKDDTAEAKKRIMRKCGIHVVDSPAQIGKKVLEVLS

SEQ ID NO: 193549 - protein, 269 aa, Unknown
  Bacterial polypetide isolated from the Sargasso Sea
MSVLVNKNTRVICQGFTGSHGTFHSEQAIKYGTNLVGGVTPKKGGQVHLERPVFNSVKEAKETTDANATMIYVPAKFAASAINEAIDASIELIVCITEGIPILDMLKVKKKLTNSNSRLIGPNCPGIITPDECKIGIMPGSIHKKGSVGIVSRSGTLTYEAVAQTTENGLGQSTCIGIGGDPINGTNFIDCLDLFLNDEETKSILMIGEIGGTAEEEAAEFVKNHRIKKPIVGFIAGITAPPGRRMGHAGAIISRGKGGAEDKIKSMQD

SEQ ID NO: 193550 - protein, 273 aa, Unknown
  Bacterial polypetide isolated from the Sargasso Sea
VDRQSSKIAFISSTEGGVDIEKVASKTPEKIITTKVDLKNEIEKEEIEKIIAPFKFNKNQKDEAIKLVQGLYKILLQKDASLIEINPLIVTKNGKLICLDAKMNFDDNAIFRRPEILKLRDLNEENLAEIEASKYDLAYIKLNGSIGCMVNGAGLAMATMDIIKIYGKEPANFLDVGGGASKEKVAAAFKLILSDKNVEGILINIFGGIMRCDVLAQGVVDAAKEINLSVPLVVRLAGTNFKEGKEILDKSNLKILSASDLNDAAKKIVEAIK

SEQ ID NO: 193551 - protein, 250 aa, Unknown
  Bacterial polypetide isolated from the Sargasso Sea
HEYQGKQLFAQYGLPVSKCIAAATVEEAVEAADKIGGDMFVVKAQVHAGGRGKAGGVKLVKSKEDIRAFAEKWLGKNLVTYQTDEKGQPVSRILVETCTDIAKELYLGAVVDRSSRRIVFMASTEGGVEIETVAHETPEKILKAAIDPLVGAQPFQGRELAFKLGLEGKQVNQFVKIFMGLAQLFKDKDLALLEVNPLVITPAGDLHCLDAKLVIDGNALYRHPELKAMQDPSQEDPREAHAASWELKLR

SEQ ID NO: 193552 - protein, 117 aa, Unknown
  Bacterial polypetide isolated from the Sargasso Sea
MNIHEYQAKQILKKYGAAVLEGVSSHSVEELLEKAKSLKTEKFVLKAQIHAGGRGKAGGVKIVNTIDELSSAANEMLGKKLVTHQTGPQGREVKRLYVESSSKISKEFYLSCLVDRA

SEQ ID NO: 193553 - protein, 270 aa, Unknown
  Bacterial polypetide isolated from the Sargasso Sea
GAPVSNGTIILSKNEIKEKIKNLKDKQFVVKAQIHAGGRGKAGGIKLVNEVKKLEKEINLMFGKILKSHQTGPEGKEVKKVYVEEASNIYKEFYLSCIIDRESSKIAFISSVEGGMDIEKVAHDTPDKIFTTKFDLKEQMDEIEINKIIKPFGLDDDQKKEASKLIKILYKILKEKDASLIEINPLILTKEKKLICLDAKMNFDDNAIFRRPEILELRDLNEEEPTEIEASKHELAYIKLNGSIGCMVNGAGLAMATMDIIKLYGEEPAN

SEQ ID NO: 193554 - protein, 165 aa, Unknown
  Bacterial polypetide isolated from the Sargasso Sea
MNIHEHQAKDLFRVYNIPVSSGSVAYSADEIERAVNEVVGPVWVVKAQIHAGGRGKGGGVKVVSTKEDALNEAKKMYGMNLVTPQTGASGKEVKRIYIENGSDIEKELYLSCLLDRSTSKVAFIVSKMGGMDIEAVAADTPENITTVQIEPSIGVTKNDIEMIQK

SEQ ID NO: 193555 - protein, 187 aa, Unknown
  Bacterial polypetide isolated from the Sargasso Sea
MLKVKQILSKSSSRLIGPNCPGIITPDECKIGIMPGNIHKKGSVGIVSRSGTLTYEAVAQTTINGLGQSTCIGIGGDPINGTNFIDCLDLFLNDPKTQSILMIGEIGGTAEEEASEFIKNHKIKKPMVGFIAGITAPPGRRMGHAGAIISGGKGSANEKIKTMEDAGITIAKSPADIGKTLLNKLSN

SEQ ID NO: 193556 - protein, 188 aa, Unknown
  Bacterial polypetide isolated from the Sargasso Sea
PLVISNQDQILALDCKMSFDNNALFRRNQVSELRDKSQENPNEVYASDRGLNYVSLDGNIGNIINGAGLAMASMDMIKLAGGEPANFLDVGGGATPEKIVKAFKLISMDEKVKVILVNIFAGINRCDWVAEGIVQALEKIEIKVPIVIRLAGTNVEKGNKILKESKIKYIEANTLEDAANKAVKALGN

SEQ ID NO: 193557 - protein, 174 aa, Unknown
  Bacterial polypetide isolated from the Sargasso Sea
MKIHEYQAKEILEKFDIPIQRGYTLENKEDINLTIKKVQEEFQTEAVIVKAQIHAGGRGKGGGVKYCASLEDAQASAEDILGMNLVTHQTGPEGKKVNKILITEALDIKKEYYFAITFDRSKNCDVFIVSDEGGVDIEEVAKNSPEKIVKAWIDESNGSLNHSINKIITQLSLE

SEQ ID NO: 193558 - protein, 299 aa, Unknown
  Bacterial polypetide isolated from the Sargasso Sea
EGKIVNRIYIEEATEIKKELYLGLVFDRSSESIMVVASTEGGMSVEEIAKQKPETIIRSKIEVAVGMQQFQAREIAFGLGIEPQLIRRAAETITGCYRAFSELDATMVEVNPLVISNQDQILALDCKMSFDNNALFRRNQVSELRDKTQENSNEVYASDRGLNYVNLEGNIGNIINGAGLAMASMDMIKLAGGEPANFLDVGGGATPEKIVKAFKLISMDEKVKVILVNIFAGINRCDWVAEGIVQALQKIEIKVPLVIRLAGTNVEKGNKILKESKINYIEANTLEDAANKAVKALGN

SEQ ID NO: 193559 - protein, 245 aa, Unknown
  Bacterial polypetide isolated from the Sargasso Sea
EKIITTKVELDIEINESDIEKIISPFKFNESQKKESFKLIKAMYKILIEKDASLIEINPLIITKDKNILCLDAKMNFDDNAIFRRPEILNLRDLNEEDPAEIEASKHDLAYIKLNGSIGCMVNGAGLAMATMDIIKLYGKEPANFLDVGGGASKEKVSAAFKLILSDKNVKGILINIFGGIMRCDVLAQGVVEAATEIDLSVPLVVRLAGTNFKEGKQILDESNLKILSASDLNDAAKKIVEAIK

SEQ ID NO: 193560 - protein, 251 aa, Unknown
  Bacterial polypetide isolated from the Sargasso Sea
QIHAGGRGKAGGVKILDTIDELRIAAKELLGKTLVTHQTGPLGRKVKRLYVEESSNIDKEFYLSCLVDRASSKIAFISSDQGGMNIEDVAISSPEKIVTTKVKVDNEISDKDCEQIIKIFNLNDNAKKQAMSLIKSIYKMFIGTDANMVEVNPLILTKEEKILCLDAKVNFDSNALFRHPEILELRDLNEEESTEIEASKHDLAYIKLDGSIGCMVNGAGLAMATMDIIKQYGEEPANFLDVGGGASKEKV

SEQ ID NO: 193561 - protein, 276 aa, Unknown
  Bacterial polypetide isolated from the Sargasso Sea
MNIHEYQAKDLFRRFNITTSKGEVFEDAEAAEQYAQSINAKEYVVKAQIHAGGRGKAGGVKLVKTPNEVKEHVENMLGMTLVTHQTGPEGKVVNKVYVEEASSIIKEFYLSFVTDRKSEKNVIIASPEGGVDIEKVAEEEPEKLLTQPIDPVVGIQPFHVRKIAYFLGFDKDQTKQLNAIINGMYNLFTQMDCALVEVNPLIITEENIVKALDAKINFDDNAAFRHKEYSELHDPTEEEPSELEAKKWDFSFVKLDGHIGCLCNGAGLAMATMDII

SEQ ID NO: 193562 - protein, 284 aa, Unknown
  Bacterial polypetide isolated from the Sargasso Sea
MNIHEHQAKQILKKFGAVVPEGVFALNVNELIEKVKTLKTEKYVLKAQIHAGGRGKAGGVKILNTIDELTIAATELLGKTLVTHQTGPEGREVKRLYVEESSNIDKEFYLSCLVDRASSKIAFISSDQGGMDIEEVASSSPEKIVTTKVNMGDEISDTDCKKIIQIFNLNDDTQKLAISLIKSIYKMFISTDANMVEVNPLILTKEQKIVCLDAKVNFDSNALFRHPEIVELRDLNEEDPTEIEASKHDLAYIKLDGSIGCMVNGAGLAMATMDIIKLYGKEPG

SEQ ID NO: 193563 - protein, 273 aa, Unknown
  Bacterial polypetide isolated from the Sargasso Sea
GVFSHSIDELLKKAKSLKTEKFVLKAQIHAGGRGKAGGVKIVNTIEELNAAATEMLGKKLITHQTGPQGKEVKRLYVESSSKISKEFYLSCLVDRVSSKIAFISSDQGGMDIEEVAKNNPKKIVTTKVNLEDKISDQDCEKIVEIFSLNSDEKKKSINLIKSIYKMFIETDANLVEINPLILTEENEIVCLDAKMSFDDNALFRHPEILNLRDLNEEEESEIEASKNDLAYIKLDGSIGCMVNGAGLAMATMDIIKMFGEEPANFLDVGGGAS

SEQ ID NO: 193564 - protein, 277 aa, Unknown
  Bacterial polypetide isolated from the Sargasso Sea
EGKIVNRIYIEEATDIKKELYLGLVFDRASESIMVVASTEGGMSVEEIAKEKPETIIRSKIEVAVGIQSFQARELAFGLGIEPELIRRASETIIGCAKAFSELDATMVEVNPLVISKQKQILALDCKMSFDNNAMFRRDKVSELRDKTQEDEKEVYASDRGLNYVSLEGNIGNIINGAGLAMASMDMIKLAGGEPANFLDVGGGATPEKIVKAFRLITMDKKVKVILVNIFAGINRCDWVAEGIVQALEKIEIKFPLVIRLAGTNVKKEIKFFGIVS

SEQ ID NO: 193565 - protein, 251 aa, Unknown
  Bacterial polypetide isolated from the Sargasso Sea
HAGGRGKAGGVKILDNIEELKIAAKELLGKTLITHQTGPEGREVKRLYVEESSNIDKEFYLSCLVDRASSKIVFISSDQGGMDIEEVAINSPERILTTKVETNNEISNEDCENIVKVFNLSDDTKNQAISLIKSIYKMFISTDANMVEINPLILTKEKKIICLDAKVNFDSNALFRHPEIVELRDLNEEDPTEIEASKHDLSYIKLNGSIGCMVNGAGLAMATMDIIKLYGEEPANFLDVGGGASKEKFLL

SEQ ID NO: 193566 - protein, 176 aa, Unknown
  Bacterial polypetide isolated from the Sargasso Sea
PPRFAANAIIEAADAFNEIKGEGVIVCITEGIPTLDMIKAADHVSKIKGIRLIGPNCPGIITPGENGGAKIGIMPGHIHAKGRIGIVSKSGTLTYEAVAQTMSIDEGQSTCVGIGGDPVNGTGFIDCLEAFENDPETVAVVMIGEIGGTAEEEAAEWVSKNMTKPVVGFVAGMTAP

SEQ ID NO: 193567 - protein, 161 aa, Unknown
  Bacterial polypetide isolated from the Sargasso Sea
GECKIGIMPGNIHQKGSVGIVSRSGTLTYEAVAQTSSNKMGQSTCIGIGGDPINGTNFIDCLELFLKDEETNSIIMIGEIGGTAEEEASDFLKKEKIKKPMVGFIAGLTAPPGRRMGHAGAIISGGKGSAQEKIEVMKSAGITISKSPADIGKTLIDKLNS

SEQ ID NO: 193568 - protein, 224 aa, Unknown
  Bacterial polypetide isolated from the Sargasso Sea
MLGKKLITIQTGPEGKIINRIYIEEATDIKHELYLGLVFDRSSESIMVVASTEGGMSVEEISKEKPETIIRSKIEVAVGIQQFQAREIAFGLGIESKLISRAANTIIGCYKAFSEHDATMVEVNPLVVSQQDEILALDCKMSFDNNAMFRRDEIAELRDKTQENSNEVYASDRGMNYVSLDGNIGNIINGAGLAMASMDMIKLAGGEPANFLDVGGGATPEKIV

SEQ ID NO: 193569 - protein, 282 aa, Unknown
  Bacterial polypetide isolated from the Sargasso Sea
KAGGIIICNSSLEVAQAADKLLGKKLITNQTGPEGKITNRVYIEEATDIKKELYLGLVFDRSSESIMVVASTEGGMSVEEISKKKPETIIRSKIEVAVGMQKFQAREIAFGLKIEPNLIARAADTIIGCYRAFSELDATMVEVNPLVISNQDQILALDCKMSFDNNALFRRNQVSELRDKSQENPNEVYASDRGLNYVSLDGNIGNIINGAGLAMASMDMIKLAGGEPANFLDVGGGATPEKIVKAFKLISMDQKVKVILVNIFAGINRCDWVAERYSSSIR

SEQ ID NO: 193570 - protein, 260 aa, Unknown
  Bacterial polypetide isolated from the Sargasso Sea
MKIHEYQGKEILRKFGVAVPRGKPAFSVDEAVKVAEELGGPVWVVKAQIHAGGRGKGGGVKVAKSIEQVREYANQILGMQLVTHQTGPEGQKVNRLMIEEGADIKQELYVSLVVDRISQKIVLMGSSEGGMDIEEVAEKHPELIHKVIVEPSTGLLDAQADDLAAKIGVPAASIPQARAILQGLYKAFWETDASLAEINPLNVSGDGKVIALDAKFNFDSNALFRHPEIVAYRDLDEEDPAEIEASKFDLAYISLDGNIG

SEQ ID NO: 193571 - protein, 287 aa, Unknown
  Bacterial polypetide isolated from the Sargasso Sea
SRWVAKAQVHAGGRGKSGGVALCDTIEEVADFTKKWLGKRLVTYQTDKEGQLVSCILVEECTNIADELYYSAVVDRSSREVAIIASSEGGVNIEKVAEETPEKIASISLNGKDISKGDIEKICTTLKLNEPQSSQMEHIVRKTVSMFFECDLSLLEINPLVIKDDGNLHCLDAKINIDSNALFRQKELQEMHDPTQEDPRESEASKYDLSYVSLDGNIGCMVNGAGLAMGTMDTIKFFKGNPANFLDVGGTATQERVAKAFKIILDDPEVKVVLVNIFGGIVRCDLI

SEQ ID NO: 193572 - protein, 195 aa, Unknown
  Bacterial polypetide isolated from the Sargasso Sea
KIITTRIDVEKEISDLDCEKVIDVFKLEYEAKDQAIELIKSIYRLFIGKDASLIEINPLVLTKENNILCLDAKINFDDNAIFRHPDIYELRDLNEEDPTEIEASKQELSYIKLDGNIGCMVNGAGLAMATMDIIKLFGGSPANFLDVGGGASKEKVAAAFKMILSDKNVKGILINIFGGIMRCDVLALGVVDAAK

SEQ ID NO: 193573 - protein, 146 aa, Unknown
  Bacterial polypetide isolated from the Sargasso Sea
TEIEASKYDLAYIKLDGNIGCMVNGAGLAMATMDIIKLYGEEPANFLDVGGGASKEKVSAAFKIILSDKNVKGILINIFGGIMRCDVIAQGVVDAAKEIKIEVPLVVRLAGTNFEEGKKILESSHLEIISANNLSDAAKKIVEAIK

SEQ ID NO: 193574 - protein, 244 aa, Unknown
  Bacterial polypetide isolated from the Sargasso Sea
KIITTKVDLNNEISDDDCKKIIKVFNLDDQASKQAVSLIKSIYKMFIDTDSNLVEINPLILTKDNNVVCLDAKMNFDDNALFKHPDILKLRDLNEEEDNEIEASKHDLAYIKLDGSIGCMVNGAGLAMATMDIIKLYGEEPANFLDVGGGASKEKVSAAFKIILSDKNVKGILINIFGGIMRCDVLAQGVVEAAKEIKIEVPLVVRLAGTNFEEGKKILDDSVLKIISASDLSDAAKKIVEAIK

SEQ ID NO: 193575 - protein, 306 aa, Unknown
  Bacterial polypetide isolated from the Sargasso Sea
AFAAQWLGKNLVTYQTDANGQPVSKILVESCTDIAKELYLGAVVDRSSRRIVFMASTEGGVDIEKVAHETPEKILKATIDPLVGAQPFQGRELAFQLGLEGKQVQQFAKIFVGLAKLFKDHDLALLEVNPLVIKADGDLHCLDAKINIDANAMYRQPKLKTFHDPSQDDAREAHAAKFELNYVALEGNIGCMVNGAGLAMGTMDIVNLHGGKPANFLDVGGGATKERVTEAFKIILSDSNVAAVLVNIFGGIVRCDMIAEGIIGAVKEVGVKVPVVVRLEGNNAELGAKVLAESGLNIIAATSLTD

SEQ ID NO: 193576 - protein, 261 aa, Unknown
  Bacterial polypetide isolated from the Sargasso Sea
MNIHEHQAKEILREFGAPVSNGIVIYSLDEIDKKISKLKSKNFVLKAQIHAGGRGKAGGVKLVKNIEELRKEARELFGKKLITHQTGPEGKEVKILYIEEASEIRKEFYLSCLVDRKTSKIAFISSTEGGMDIEKVATDTPEKIFTTKIEIKENLTIEEINNIIKPFDLINEQKNIAQKLIQSLYKILIEKDGSLIEINPLILTKDERLICLDAKMNFDDNAMFRRPEILKLRDLNEEDSTEIEASKHDLSYIKLNGAIGC

SEQ ID NO: 193577 - protein, 187 aa, Unknown
  Bacterial polypetide isolated from the Sargasso Sea
MNIHEYQAKQLLSKYGVGVLDGGVASNSAEAVTVAQRLGGPIWVVKSQIHAGGRGKGKFLESTAGNSGGVRVVKSLDAVRDNCDQMIGAHLVTNQTGEEGKEVKKVYIEDGCEIQKELYLSLLVDRATSKVTVIASTEGGMDIELVAEQSPEKILKLEISEEKGLVKTKVIDLAKQLGLGEKAIDEA

SEQ ID NO: 193578 - protein, 159 aa, Unknown
  Bacterial polypetide isolated from the Sargasso Sea
IADLRDTTEEDPKELEASKYDLNYIALDGEIGCMVNGAGLAMATMDIIKLYGAEPANFLDVGGGATKEKVTEAFKIITSDPKVKGILVNIFGGIMRCNVIAEGVVAAVKEVGLQVPLVVRLEGTNVEKGKDIINNSGLDVIAANDLRDGAEKIVRAVKG

SEQ ID NO: 193579 - protein, 132 aa, Unknown
  Bacterial polypetide isolated from the Sargasso Sea
MAVLIDEKTKVICQGFTGSQGTFHSEQAIAYGTKMVGGVTPGKGGSDHLGLPVFNSVHEAKHITNADASVIYVPPPFAADSILEAIDARMELIVCITEGIPVQDMLKVKRALENSSSILVGPNCPGVITPEA

SEQ ID NO: 193580 - protein, 289 aa, Unknown
  Bacterial polypetide isolated from the Sargasso Sea
CTNIDTELYLGAVIDRSSKRVVFMASTEGGVEIEKVAEETPDKILRVSIDPAVGAQSFQGRSLAFRLGLSGKQVSQFTNLFMGLSKLFHELDCSLLEINPLVINDQGDVHCLDAKINIDGNALYRQKALAELHDPTQEDEREAAASKFGLNYVALDGTIGCMVNGAGLAMGTMDLVKLNGGNPANFLDVGGGATKEAVAEAFKIILSDINVRAVLINIFGGIVSCAIIADGIIGAVKEVGVDVPVVVRFEGNNSEVGRQKLSGSGLNIISAESLNDAAESAVLAASEGK

SEQ ID NO: 193581 - protein, 267 aa, Unknown
  Bacterial polypetide isolated from the Sargasso Sea
MKIHEYQGKIILEDYQISIPKGIPAFSIEDALKAYDSLDSDFVAIKAQIHAGGRGKGGGVKIAKNRTDAENHISNILGMNLVTHQTGPNGKKVERIYLESGVDIESEYYAAITLDRNTEMDVFMVSTEGGVEIEKVASETPDKIIKIWIDPLVGIKTFQLRKLAFGLKLEGATFKEAVDTFRKMYNCYKNTDASLLEINPLVKTKNENIVALDSKFNFDNNALFRQKKIMEMRDLSEEDKMEVEASKYNLNYIKIDGNVGCMVKWCR

SEQ ID NO: 193582 - protein, 175 aa, Unknown
  Bacterial polypetide isolated from the Sargasso Sea
MKIHEYQAKHILAKYGVPVPKGNVAFSVDEALIVAEDLKSEVYVVKAQIHAGGRGKGGGVKVSKGLEAVRKNAETILGMQLVTHQTGPTGQKVKQLLIEEGIDISKELYCSVLVDRGKQRIVILASTEGGMDIEEVAEKTPEKIKKVFVDPSVGLRPYQANELAFGLKYMKQIPN

SEQ ID NO: 193583 - protein, 249 aa, Unknown
  Bacterial polypetide isolated from the Sargasso Sea
MKIWQKLILEKIFNIYFENFEETELPKELEKKLKLTNNQFSELSLIVFKLVTAFKNIDASTIEINPLVLNKNGNFVLLDAKISLDDNALFRHPELDSLKDLSEEDPLELEAAENDMNYVKLNGSIGCMVNGAGLAMATMDIIKQFGEEPANFLDLGGTANKERAIKGFKIIQSDPNVKSVLINIFGGIIHCDMIANGIVEAVKELKFKLPMVIRFQGTNATEGRDIINKSTLELISISDFTEAAKKVVE

SEQ ID NO: 193584 - protein, 274 aa, Unknown
  Bacterial polypetide isolated from the Sargasso Sea
NVPNGVVIFSLQEIEQKSKILKTNKIAIKAQIHAGGRGKAGGIKIVDNFHQLKEEAEKLFGKKLITHQTRPEGTKVTRLYLEETCNIKKEFYLSCLVDRSSSKIAFISSVEGGVNIEEIAKNNPEKINTVKFSLSNTVKEDDIKKIILPFNLSKKSQKQASNLIQAVYKILIEKDANLIEINPLVLTSDDNLLCLDAKINFDDNALYRQSDILSLKDFNEEDPIETKANEYGLSYIKLNGKIGCMVNGAGLAMATMDIIKLYGSEPANFLDVGG

SEQ ID NO: 193585 - protein, 183 aa, Unknown
  Bacterial polypetide isolated from the Sargasso Sea
MNIHEYQAKSLLRSYGAPVSDGRVVLRAEEAKTAAGELDGPLWVVKAQIHAGGRGKGTFKEPGAGEAGGVRLAKSVEEAADEAKRMLGRTLVTKQTGPAGKQVNRIYIEDGSGIESELYLALLVDRQTSRISFVCSTEGGMDIEEVAEKTPEKILSFSVDPATGYQAFHGRRIAFMLGLEGPQ

SEQ ID NO: 193586 - protein, 206 aa, Unknown
  Bacterial polypetide isolated from the Sargasso Sea
MKIHEFQAKQVLSRYRVPVPRSKVAESVEEAVDAARELGGEVWVVKAQIHAGGRGKGGGVKFCRGLEEVRENAEKILGMQLVTKQTGPAGQKVLRVLIEEGMEIIKELYCSVLVDRTKQSVVMLASTEGGMDIEEVAANTPDKILKIFADPSLGLLPYQSSELAYGLGIDQINPKLLRPAAKLFSSLYQTFVHEDCSLVEINPLVL

SEQ ID NO: 193587 - protein, 295 aa, Unknown
  Bacterial polypetide isolated from the Sargasso Sea
MNIHEYQAKDLFRSYNIPVSSGSVAYSADEIEKAVNEVEGPVWVVKAQIHAGGRGKGGGVKVVSSKEDALNEAKKMYGMNLVTPQTGASGKEVNRIYIENGSDIEKELYLSCLLDRSTSKVAFIVSKMGGMDIEAVAVDTPENITTVQIEPSIGVTNNDIEMIQKAFEIGDDLNNQLSDLIKNMYLFFLEKDASLVEVNPLIVTNTNKLLCLDAKVNFDDNAIYRHPEIEELRDENEEDEYEREAAKYDLAYIKLDGNIGCMVNGAGLAMASLDIIKMYGGEPANFLDVGGGASK

SEQ ID NO: 193588 - protein, 180 aa, Unknown
  Bacterial polypetide isolated from the Sargasso Sea
MINSNSKLIGPNCPGIITPSECKIGIMPGSIHQRGSVGIVSRSGTLTYEAVDQTTKNGLGQSTCIGIGGDPINGTNFIDCLDLFLNDDETKSILMIGEIGGTAEEEAAEFVKNHKIKKPIVGFIAGVTAPPGRRMGHAGAIISGGKGGAEDKIKIMEDCGITIAKSPSEIGKTLLNKLSN

SEQ ID NO: 193589 - protein, 274 aa, Unknown
  Bacterial polypetide isolated from the Sargasso Sea
MPVSEGYAVDTADQAVAAAEKIGGTRWVVKVQVHAGGRGKAGGVKVADSLDDVKAFADQWIGKRLVTFQTDEDGQPVSKIYVESCTDIATELYLGAVVDRGTRRVVFMASTEGGVEIEQVAEETPEKILKTMIDPFVGPQPYQGRQLAFKLGLEGKQVQQFSALFMGLAKLFHELDCSLLEINPLVITETGDVHCLDAKVNIDGNALYRQKPIEAMRDLSQEDEREAQADEFNLNYVALDGNIGCMVNGAGLAMGTMDLVKLHGGNPANFLDVG

SEQ ID NO: 193590 - protein, 244 aa, Unknown
  Bacterial polypetide isolated from the Sargasso Sea
FKTPIDPIKGANQEQAIYLAENLNLSQSQTEEFVDLFLKLSKLFLDKDLSLLEINPLVINADKNLICLDAKINIDSNALYRQEELHQINDESQEDTREVEASKWDLNYVALDGNIGCMVNGAGLAMGTMDIIKLYGGDPANFLDVGGTVDAKRVSEAFKIILSDENVKAVLINIFGGIVRCDVIADGVIEAVSQMEINVPVVVRLEGNQAELGTKKLGESGLNIIGANSLEEAASKVVEVSKGS

SEQ ID NO: 193591 - protein, 244 aa, Unknown
  Bacterial polypetide isolated from the Sargasso Sea
QTGPEGREVKRLYVEESSNIDKEFYLSCLVDRASSKIAFISSDQGGMDIEEVAVKSPEKIITTKTDLKDEISDEKCKKIIEIFKLDGSSKGEAISLIKSIYKMFVSTDANMVEINPLILTKEKKVVCLDAKVNFDDNALFRHPEIVDLRDLNEEDPAEIEASKYELAYIKLNGSIGCMVNGAGLAMATMDIIKLYGSEPANFLDVGGGASKEKVSAAFKIILSDKNVKGILINIFGGIMRCDVL

SEQ ID NO: 193592 - protein, 245 aa, Unknown
  Bacterial polypetide isolated from the Sargasso Sea
MAVLIDEKTKVICQGFTGSQGTFHSEQAIAYGTKMVGGVTPGKGGSDHLGLPVFNSVHEAKHITNADASVIYVPPPFAADSILEAIDAQMDLIVCITEGIPVQDMLKVKRALENSSSILVGPNCPGVITPEACKIGIMPGHIHKRGSVGVVSRSGTLTYEAVKQTSDVGLGQSSCIGIGGDPVKGTEHIDVLEWFLKDDETESIIMIGEIGGSAEEEAAQFLKDEAKKGRSKPTAGFIAGRTAPP

SEQ ID NO: 193593 - protein, 278 aa, Unknown
  Bacterial polypetide isolated from the Sargasso Sea
IEKEFYLSCLVDRESSKIAFISSTEGGVDIESVAKNNPEKILTTKIEFKDTLSDNDIQKIIKIFSLDTNQKKDAESLVNALYNTLISKDASLIEINPLIITKQKKLICLDAKMNFDDNAMYRRPEILKLRDLNEEEPAEIEASKFGLAYIKLNGSIGCMVNGAGLAMSTMDIIKLYGEEPANFLDVGGGASKEQVSAAFKLILSDKKVKGILINIFGGIMQCDVLAQGVVEAAKKINIQVPLVVRLAGTNFEKGKEILDKSGLKILSASDLNDAAKKL

SEQ ID NO: 193594 - protein, 272 aa, Unknown
  Bacterial polypetide isolated from the Sargasso Sea
GPEGKVVKRLYVEESSNIEKEFYLSCLVDRASSKIVFISSDQGGMDIEEVAKKNPEKIVKTKINYSKEVSNEDCEKVIKIFSLNEKTKEQGKNLIKAIYKMFISTDASMVEINPLILTKEQNIICLDAKVNFDDNALFKHPEIVALRDLSEEDPTEIEASKYNLSYIKLDGSIGCMVNGAGLAMATMDIIKLYGEEPANFLDVGGGASKEKVSAALKLILSDRSVKGILINIFGGIMRCDVLAQGVVDAAKEMDINIPLVVRLAGTNLRKEK

SEQ ID NO: 193595 - protein, 210 aa, Unknown
  Bacterial polypetide isolated from the Sargasso Sea
MNIHEYQAKQILKKYGAAVLEGVSSHSVEELLEKAKSLKTEKFVLKAQIHAGGRGKAGGVKIVNTIDELSSAANEMLGKKLVTHQTGPQGREVKRLYVESSSKISKEFYLSCLVDRASSKIAFISSDQGGMDIEEVAKNNPKKIVKTKVNLEDKISDEDCEKIVEIFNLDLDAKKQSINLIKSIYKMFIDTDANLVEINPLILTQENKII

SEQ ID NO: 193596 - protein, 211 aa, Unknown
  Bacterial polypetide isolated from the Sargasso Sea
AIIEAIDASIELIVCITEGIPIQDMLKVKQKLIKSSSRLIGPNCPGIITPDECKIGIMPGNIHKKGSVGIVSRSGTLTYEAVAQTTENGLGQSTCIGIGGDPINGTNFIDCLDLFLNDEETKSILMIGEIGGTAEEEASEFVKNHKIKKPMVGFIAGVTAPPGRRMGHAGAIISGGRGGAQDKIKKMEDCGITIANSPSKIGKTLFDKLSN

SEQ ID NO: 193597 - protein, 279 aa, Unknown
  Bacterial polypetide isolated from the Sargasso Sea
FYLSCLVDRASSKIAFISSDQGGMDIEEVASSSPEKIITTKVDMSDEISESDCEKIINIFNLNEDTKKQAITLIKSIYKMFVNTDANMVEVNPLILTKEEKIVCLDAKVNFDSNALFRHPEIVELRDLNEEDPTEIEASKHDLAYIKLDGSIGCMVNGAGLAMATMDIIKLYGKEPANFLDVGGGASKEKVSAALKIILSDKNVKGILINIFGGIMRCDVLAQGVVDAAKEINISVPLVVRLAGTNFKEGKEILDNSGLKLISAENLDDAAKKIVEAIK

SEQ ID NO: 193598 - protein, 145 aa, Unknown
  Bacterial polypetide isolated from the Sargasso Sea
RIEASKFDLAYIKLDGNIGCMVNGAGLAMATMDIIKLYGQEPANFLDVGGGASKEKVSAAFKIILSDQNVRGILINIFGGIMRCDVLAQGVVDAAKEINISVPLVVRLAGTNFKEGKEILDNSGLKLISAENLDDAAKKIVEAIK

SEQ ID NO: 193599 - protein, 219 aa, Unknown
  Bacterial polypetide isolated from the Sargasso Sea
MSVLVNKETRLICQGFTGSHGTFHSEQAIKYGTKLVGGVTPKKGGQKHLGLPVFNTVKEAKNSEGANATMIYVPAKFAAAAILEAIEASIELIVCITEGIPIQDMLRVKQKLSKSNSRLIGPNCPGIITPDECKIGIMPGNIHKKGSVGIVSRSGTLTYEAVAQTTENRLGQSTCIGIGGDPINGTNFIDCLDLFLNDDETESILMIGEIGGTAEEEAA

SEQ ID NO: 193600 - protein, 162 aa, Unknown
  Bacterial polypetide isolated from the Sargasso Sea
MNIHEYQAKEILKNYGLPVLKGKSYNKNLETLDSDIKDLRGPPWVVKSQIHAGGRGAGYFKKSFNDKGGVQVVFEQNEVSSIAQSMMGNVLVTKQTGEKGKIVNHIFIEEGCDIEREFYLSLLVDRNNSKVMMMISAAGGMDIEEVAITNPEQIINIHFIKY

SEQ ID NO: 193601 - protein, 186 aa, Unknown
  Bacterial polypetide isolated from the Sargasso Sea
LVITDGGDLLCLDAKVNIDSNALFRHPELVEMYDETQEDPQEAEAAKNDLSYVSLDGNIGCMVNGAGLAMGTMDIIKFYGGSPANFLDVGGTATQERVAKAFKIILEDPDVKVVLVNIFGGIVRCDLIAKGIIAAIKEVEVKIPVVVRLEGNSADKGSKILSKADIKIDSINDLADAAKKAVELAK

SEQ ID NO: 193602 - protein, 206 aa, Unknown
  Bacterial polypetide isolated from the Sargasso Sea
MNIHEHQAKEILKQFNAPITKGVVIFDVENIQEKVKILKTSKLVIKAQIHAGGRGKAGGVKLVDKNNILEETKKMFGKVLVTHQTGPEGKKVKRLYIQEAYDIEKELYLSCLVDRETSKIAFISSLEGGVDIESVAKKTPEKITTIKIDLEKEIKKSDIDKVIKIFPFENSQKKDASDLVRAMYNILVQKNASLIEINPLVVTKQK

SEQ ID NO: 193603 - protein, 290 aa, Unknown
  Bacterial polypetide isolated from the Sargasso Sea
MSVLINKNTKVICQGFTGSQGTFHSEQAIKYGTQMVGGVTPKKGGQEHLGLPVFNSVKEAKDNTDANATVIYVPPPFAAGAIIEAIDADMELIVCITEGVPVLDMMQVKRKLEKSKSRLIGPNCPGIITPDECKIGIMPGHIHQKGKIGVVSRSGTLTYEAVAQTSAVGLGQSTCIGIGGDPINGTNFIDCLDLFLKDPETEGIIMIGEIGGTAEEEAAEFIKKSEIKKPVASFIAGASAPAGKRMGHAGAIISGGKGTAESKFSALEEAGVHISKSPAKLGETIKEALN

SEQ ID NO: 193604 - protein, 202 aa, Unknown
  Bacterial polypetide isolated from the Sargasso Sea
DQELYLGAVIDRASQRLVVMASTEGGVNIEEVAEKTPEKIFKQEIDPINGPDDSQARSLSEELGLNALQADQFLNIFNGLVNLFLEKDLSLVEVNPLVITDQGDLICLDAKINVDSNALYRQEDVETLRDPSQEDPREARAAEWDLSYVALDGNIGCMVNGAGLAMGTMDIIKLHGGEPANFLDVGGTADSKRVAEAFKIIL

SEQ ID NO: 193605 - protein, 256 aa, Unknown
  Bacterial polypetide isolated from the Sargasso Sea
MDIEKVARETPNKIITTKVDFENEISDNDCEKIIKIFNLNNQNRIEAIKLVKSIYKMFINTDASLVEINPLILTKENKIVCLDAKINFDDNALFKHKEIGDLRDLNEEDPTEIEASKHDLAYIKLDGSIGCMVNGAGLAMATMDIIKLFGEEPANFLDVGGGASKEKVSAAFKIILSDKNVKGILINIFGGIMKCDVLAQGVVDAAKETKIHVPLVVRLAGTNFEQGQKILDNSGLKIISASDLSDAAKKIVEEIR

SEQ ID NO: 193606 - protein, 267 aa, Unknown
  Bacterial polypetide isolated from the Sargasso Sea
MSVLINKNTKVICQGFTGSQGTFHSEQAIKYGTQMVGGVTPKKGGQEHLGLPVFNSVKEAKDNTEANATVIYVPPPFAAGAIIEAIDANMELIVCITEGVPVLDMMQVKRKLEKSKSRLIGPNCPGIITPDECKIGIMPGHIHQKGKIGVVSRSGTLTYEAVAQTSAVGLGQSTCIGIGGDPINGTNFIDCLDLFLKDPETEGIIMIGEIGGTAEEEAAEFIKKSEIKKPVASFIAGASAPAGKRMGHAGAIISGGKGTAESKFSAL

SEQ ID NO: 193607 - protein, 270 aa, Unknown
  Bacterial polypetide isolated from the Sargasso Sea
THQTGEKGQKVKRVYVTEAFDIAREFYAAITLDRSKCMDVFMVSSEGGVEIEKVAEEDPDKIAKVWIDPFLGMKTFQARKLAYTLGLEGDAFKSATKIFTQMYKCYQSTDATIVEVNPLVLTQDGKIIVLDSKINFDDNALFRHKSIAEMRDLDEEDPTEVEAGKYNLNYIKLDGNVGCMVNGAGLAMATMDIIKITGGDPANFLDVGGTASSETVKNGFRIILSDENVKAVLINIFGGIVRCDRVADGVVQAVQELGLQVPVVVRLEGT

SEQ ID NO: 193608 - protein, 227 aa, Unknown
  Bacterial polypetide isolated from the Sargasso Sea
DEAVKVAEELGGPVWVVKAQIHAGGRGKGGGVKVAKSIEQVREYANQILGMQLVTHQTGPEGQKVNRLMIEEGADIKQELYVSLVVDRISQKIVLMGSSEGGMDIEEVAEKHPELIHKVIVEPSTGLLDAQADDLAAKIGVPAASIPQARAILQGLYKAFWETDASLAEINPLNVSGDGKVIALDAKFNFDSNALFRHPEIVAYRDLDEEEPAEIEASKFDLAYISL

SEQ ID NO: 193609 - protein, 222 aa, Unknown
  Bacterial polypetide isolated from the Sargasso Sea
KIFSFNKNQLKDAKNLVNALFNILINKDASLIEINPLIITKQKKLICLDAKMNFDDNSMFRRPEIFKLRDLSEEEAPEIEASKFGLAYIKLNGSIGCMVNGAGLAMATMDIIKLHGQEPANFLDVGGGATKEQVIAAFKLILSDKKVKGILINIFGGIMRCDVLAQGVVEAAKETNIKVPLVVRLAGTNFKEGKEILDKSGLKILSASDLNDAAKKIVNAIK

SEQ ID NO: 193610 - protein, 249 aa, Unknown
  Bacterial polypetide isolated from the Sargasso Sea
MNIHEHQAKELLLEFGAPVSKGIVIYDLNDIDEKIKILKSKKFVLKAQIHAGGRGKAGGVKLVKDIDELKKEANKLLGKKLVTPQTGPAGKKVQRLYIEEASEIDKEYYLSCLVDRQSSKIAFISSKEGGMDIEEVAVKSPEKIITTKINLTKDLEINDIEKILKPFDLNESQKKEGSQLVKSIYKTLTLKDANLIEINPLILTKLGNLICLDAKINFDDNAMFRRPEILKLRDLNEEDPKEMRLANMT

SEQ ID NO: 193611 - protein, 203 aa, Unknown
  Bacterial polypetide isolated from the Sargasso Sea
MSILVNKDTKLIVQGFTGSQGTLHSEQSIEYGTNIVGGVTPGKGGTEHLGKPVFNSVNEAVEELDPNASIIFVPAKFCKESIIESTEAGIKLIVCITEGIPTLDMLEVKKRIDDLGVRLIGPNCPGVITPGEAKLGIMPGNIHKPGSIGIISRSGTLTYEAVKQTTDLGFGQSSCVGIGGDPIPGSSFIDMLKLLKMMIKPKQ

SEQ ID NO: 193612 - protein, 267 aa, Unknown
  Bacterial polypetide isolated from the Sargasso Sea
MSVLVNKNTRLICQGFTGSHGTFHSEQAIKYGTNLVGGVTPKKGGQKHLGLPVFNTVKEARESEGANATMIYVPAKFAASAIIEAIDASIELIVCITEGIPIQDMLKVKQRLNNSKSRLIGPNCPGVITPDECKIGIMPGSIHKKGTVGIVSRSGTLTYEAVAQTTENGLGQSTCIGIGGDPINGTNFIDCLDLFLNDVDTQSILMIGEIGGTAEEEAADFIKNHKIKKPIVGFIAGVTAPPGRRMGHAGAIISGGKGGAKEKIKKM

SEQ ID NO: 193613 - protein, 137 aa, Unknown
  Bacterial polypetide isolated from the Sargasso Sea
YIKLEGSIGCMVNGAGLAMGTMDIIKTYGGEPANFLDVGGTATEETVEKGFQIITQDPNVRCILINIFGGIVRCDMVASGIVEAFRKVNLQIPVVVRLEGTNAEEAQKIIGSSGFGDRLQMADGLGEAAEMAVAAAA

SEQ ID NO: 193614 - protein, 253 aa, Unknown
  Bacterial polypetide isolated from the Sargasso Sea
RRRTPEKIFKAEIDPIKGPKESQANDLSKNLGLNETQCSQFRDIFNGLIKLFLEKDLSLVEVNPLVITESGDLICLDAKINVDSNALYRQEEVEKLRDPSQEDQREAKAAEWDLSYVALDGNIGCMVNGAGLAMGTMDIIKLHGGEPANFLDVGGTADSKRVAEAFKIILSDENVNTVLINIFGGIVRCDVIADGIVEALTVMGVSVPVVVRLEGNSAEKGLKILDECELNIIPASNLEEAASLAVKASKGEI

SEQ ID NO: 193615 - protein, 253 aa, Unknown
  Bacterial polypetide isolated from the Sargasso Sea
FTGSHGTFHSEQAIKYGTNLVGGVTPKKGGQKHLDRPVFNSVLEAKYEVGANATMIYVPAKFAAAAIIEAIDASIELIVCITEGIPIQDMLKVRQKLSGSNSRLIGPNCPGIITPDECKIGIMPGSIHKRGSVGIVSRSGTLTYEAVAQTTENGLGQSTCIGIGGDPINGTNFIDCLDLFLNDSETESILMIGEIGGTAEEEAAEFIKNHKIKKPIVGFIAGITAPPGRRMGHAGAIISGGKGGAEDKIKKME

SEQ ID NO: 193616 - protein, 255 aa, Unknown
  Bacterial polypetide isolated from the Sargasso Sea
SKSIVVMASPEGGVNIEEVAEKTPENIYKASVKIDQEPSKDDALSLAKGLNLNKNQTEQFIGIFKNLTKLFIEKDLALVEINPLVIDENQNLKCLDGKISVDSNALFRQEEMKNLRDTSQEELRELKASEWDLNYVSLDGEIGCMVNGAGLAMATMDIIKISGGFPANFLDVGGGVNQKSVAEAFKIILSDDNVKVILINIFGGIVKCDVVAEGIISAVKEVGVNIPIVVRLKGNNADIAQSMLTDSELNIVFDS

SEQ ID NO: 193617 - protein, 291 aa, Unknown
  Bacterial polypetide isolated from the Sargasso Sea
EELLQKAKSLNTEKFVLKAQIHAGGRGKAGGIKIVNTIEELNSAAKEMLGKKLITHQTGPQGKEVKRLYVESSSKIEKEFYLSCLVDRASSKIAFISSDQGGMDIEDVAKNNPKKIITTKINLDDKISDKDCEQIVEIFNLNIDAKKQAINLIKSIYKMFIDIDANLVEINPLILTKENKIICLDAKMSFDDNGLFRNPEILNLRDLNEEEEIEIEASKHGLSYIKLEGSIGCMVNGAGLAMATMDIIKLYGEEPANFLDVGGGASKEKVSAAFKIILSDKNVKGILINIF

SEQ ID NO: 193618 - protein, 308 aa, Unknown
  Bacterial polypetide isolated from the Sargasso Sea
MNIHEHQAKQILKKYGANVPEGVFAFNVSDLLQKTKELKTDKYVLKAQIHAGGRGKAGGVKIVDNLENLEKEANILLGKKLITHQTGPLGREVKRLYVEGVSNISKEFYLSCLVDRASSKIAFISSDQGGMNIEEVAQNTPEKILTTKVDFNQEISEVDCKKIIKVFELDDNSSSEAISLIKAIYKLFIENDANLVEINPLILTKENKVVCLDAKMTFDENALFKHPEIQELRDYNEEEAAEIEASKHDLAYIKLDGSIGCMVNGAGLAMATMDIIKLYGEEPANFLDVGGGASKEKVLLHSKLFYQI

SEQ ID NO: 193619 - protein, 148 aa, Unknown
  Bacterial polypetide isolated from the Sargasso Sea
KRGSVEIVSRSGTLTYEAVAQTTEIGLGQSTCIGIGGDPINGTNFIDCLDLFLNDDETESILMIGEIGGTAEEEAAEFIKNHKIKKPIVGFIAGITAPPGRRMGHAGAIISGGKGGAEDKIKKMEECGITVAKSPSIIGKTLFNKLSN

SEQ ID NO: 193620 - protein, 217 aa, Unknown
  Bacterial polypetide isolated from the Sargasso Sea
NDRVKTQAISLVKSIYEMFINTDANMVEVNPLILTKEEKIICLDAKVNFDSNALFRHPEFVELRDLNEEDPTEIEASKHDLAYIKLDGSIGCMVNGAGLAMATMDIIKLYGKEPANFLDVGGGASKEKVSAALKIILSDKNVKGILINIFGGIMRCDILAQGVVDAAKEININVPLVVRLAGTNVKEGREILDNSGLKLISADNLDDAAKKIVEVIE

SEQ ID NO: 193621 - protein, 285 aa, Unknown
  Bacterial polypetide isolated from the Sargasso Sea
KLAHNRDDVESLAKQILGMNLVTHQTGPEGKKVQRLLIETGIDIAKEFYAGIVLDRKEKKFVFMVSTEGGVEIEKVAAESPDKIIKEWIHPEDGLTKDQAKRLCDALSLKGIQQDSGIEIFTALWKAFNSLDCSLMEINPLVLTKKDEVIALDAKINFDGNGLFRHPELSELRDETEEDPAEAEASSYNLNYIKLDGNVGCMVNGAGLAMGTMDIIKLKGGEPANFLDVGGVANPETVANGFKIILSDPNVKSILINIFGGIVRCDRVAQGVINAMENISVNVPV

SEQ ID NO: 193622 - protein, 193 aa, Unknown
  Bacterial polypetide isolated from the Sargasso Sea
GIPILDMLKVKQKLSKSNSRLIGPNCPGIITPDECKIGIMPGNIHKKGSVGIVSRSGTLTYEAVAQTTTNGLGQSTCIGIGGDPINGTNFIDCLDLFLNDPETESILMIGEIGGTAEEEASEFVKNHKIKKPMVGFIAGVTAPPGRRMGHAGAIISGGKGGAREKIKTMEDAGIIIAKSPAEIGKTLLHKLSN

SEQ ID NO: 193623 - protein, 186 aa, Unknown
  Bacterial polypetide isolated from the Sargasso Sea
FNLTKEKKIICLDAKVNFDSNALFRHPDILKLRDLNEEEPTEIEASKHDLAYIKLDGSIGCMVNGAGLAMATMDIIKLYGKEPANFLDVGGGASKEKVSAALKIILSDKNVKGILINIFGGIMRCDVLAQGVVDAAKEININVPLVVRLAGTNFKEGKEILDNSGLKLISAENLDDAAKKIVEAIK

SEQ ID NO: 193624 - protein, 160 aa, Unknown
  Bacterial polypetide isolated from the Sargasso Sea
PEILELRDINEENPSEIEASKHNLSYIKLGGTIGCMVNGAGLAMSTMDIIKLYGKEPANFLDVGGGASKEKVSAAFKIILSDKNVKGILVNIFGGILRCDELSKGLIEAAKEVNLKVPLVVRLAGTNFEEGRKILDNSNLKIISASDLDDAAKKIVEAVN

SEQ ID NO: 193625 - protein, 281 aa, Unknown
  Bacterial polypetide isolated from the Sargasso Sea
ATDKLLGKKLITNQTGPEGKIINRIYIEEATDIKHELYLGLVFDRSSESIMVVASTEGGMSVEEISKEKPETIIRSKIEVAVGIQQFQAREIAFGLGIESKLISRAANTIIGCYKAFSELDATMVEVNPLVVSHKDEILALDCKMSFDNNAMFRRDEIAELRDKTQENSNEVYASDRGMNYVSLDGNIGNIINGAGLAMASMDMIKLAGGQPANFLDVGGGATPEKIVKAFKLISMDKKVKVILVNIFAGINRCDWVAEGIVQALSKIEIKHPLVIRLAGT

SEQ ID NO: 193626 - protein, 277 aa, Unknown
  Bacterial polypetide isolated from the Sargasso Sea
REYDISVSEGLSASSSQEAEKIALSLNVDKWVVKAQVHAGGRGKSGGVELVDSIEKVKAFADKWLGKNLVTFQTDEKGQPVNQILIETVTDIDKELYLGAVIDRASQRLVVMASTEGGVNIEEVAEETPEKISKAEIDPIQGPNQLQAEKLASSLNLNEVQTLQFIEIFNGLVKLFIDKDLSLVEVNPLVITSSGDLICLDAKINIDSNALYRQEQILKLRDPSQEDPREASAAEWDLSYVALDGSIGCMVNGAGLAMGTMDIIKLHGGEPANFLDV

SEQ ID NO: 193627 - protein, 308 aa, Unknown
  Bacterial polypetide isolated from the Sargasso Sea
ISELNSKEFVLKAQIHAGGRGKAGGVKLIKNISDLEREAGKMMGKTLITHQTGPEGKEVKRLYIEEASDIAKEFYLSCLVDRETAKIAFISSTEGGMDIEKVASENPEKIITKKIDFKKEGPSEDEIKDIISVFKLSDEQKVTASKLVKSLYNIIINKDASLIEINPLIITKSNKLICLDAKMNFDDNAIFRRPEILKLRDLNEEDPAEIEASKYDLAYIKLNGSIGCMVNGAGLAMATMDIIKLYGEEPANFLDVGGGASKEKVAAAFKLILSDKNVKGILINIFGGIMRCDVLAQGGSRCSKRNKS

SEQ ID NO: 193628 - protein, 222 aa, Unknown
  Bacterial polypetide isolated from the Sargasso Sea
MIYVPPRFAAEAIIEAIEAKMELIVCITEGIPILDMIRVKKELRKSKSRLIGPNCPGVITPEECKIGIMPGNIHQKGTVGIVSRSGTLTYEAVAQTSSNGMGQSTCIGIGGDPINGTNFIDCLELFLKDDETKSIVMIGEIGGSAEEEAAEFLRREKIKKPMVGFIAGLTAPPGRRMGHAGAIISGGKGGAEDKIETMKSAGITISKSPADIGKTLFEKLKG

SEQ ID NO: 193629 - protein, 299 aa, Unknown
  Bacterial polypetide isolated from the Sargasso Sea
HEYQAKKILSNFGVTIPRGGIVYSPENAENKAREIGGSRWVVKAQIHSGARGKAGGIIVCNTPLEVAQATDKLLGKKLVTNQTGPEGKIVNRIYIEEATDIEKELYLGLVFDRSSESIMVVASTEGGMSVEEISKEKPETIIRSKIEVAVGMQNFQARELAFGLGIEPELIRRASDTIIGCYKAFSELDATMVEVNPLVISKQKQILALDCKMSFDNNAMFRRSQVSELRDKTQEDSKEIFASDRGLNYVSLDGNIGNIINGAGLAMASMDMIKLAGGAPANFLDVGGGSTPEKIVKAF

SEQ ID NO: 193630 - protein, 291 aa, Unknown
  Bacterial polypetide isolated from the Sargasso Sea
MSILVNKKTKVICQGFTGTHGTFHSEQAIKYGTQLVGGVTPKKGGQKHLGLPVFNTVKEAKDKTGANASMIYVPPKFAALAILEALDANLDLIVCITEGIPILDMMRVKKVLSKSKSRLIGPNCPGIITPEECKIGIMPGNIHKKGSVGIVSRSGTLTYEAVAQTSKNGLGQSTCIGIGGDPINGTNFIDCLDLFLKDEDTHSIIMIGEIGGTAEEEAAEFLKSSKIKKPMVGFIAGLTAPPGRRMGHAGAIISGGKGGAKDKIEVMKSAGITISKSPADIGETLYSKLKS

SEQ ID NO: 193631 - protein, 154 aa, Unknown
  Bacterial polypetide isolated from the Sargasso Sea
MNIHEHQAKQILKKYGAIVPEGVFALNVDELIKKAKALKTEKYVLKAQIHAGGRGKAGGVKILNSIEELTVAAKKLLGKTLVTHQTGPEGREVKRLYVEESSNIDKEFYLSCLIDRASSKIAFISSDQGGMDIEEVASSSPEKIITTKVDMGDE

SEQ ID NO: 193632 - protein, 171 aa, Unknown
  Bacterial polypetide isolated from the Sargasso Sea
MNIHEHQAKQILKKYGAAVPEGVFALNVDELIQKAKALKTEKYVLKAQIHAGGRGKAGGVKILKSIEELTVAAKELLGKTLVTHQTGPEGREVKRLYVEESSNIDKEFYLSCLVDRASSKIAFISSDQGGMDIEEVASSSPEKIITTKVDMSDEISELDCEKIINIFNLNE

SEQ ID NO: 193633 - protein, 163 aa, Unknown
  Bacterial polypetide isolated from the Sargasso Sea
MKKISALRDRDEEDPLEVEASEAGLNYIKLDGNIGCMVNGAGLAMGTMDIIKTYGGEPANFLDVGGSATQETVEKAFRIISLDSNIKCILINIFGGIVRCDMVAAGVIAAFKNTMLKIPVVVRLEGTNSEEAQTLVSQSGLGESLQIADGIQQAAQKAVSATK

SEQ ID NO: 193634 - protein, 192 aa, Unknown
  Bacterial polypetide isolated from the Sargasso Sea
MVEVNPLVISKQKQILALDCKMSFDNNAMFRRNKVSELRDKSQEDEKEVYASDRGLNYVSLDGNIGNIINGAGLAMASMDMIKLAGGEPANFLDVGGGATPEKIVKAFRLITMDKKVKVILVNIFAGINRCDWVAEGIVQALEKIEVKVPLVIRLAGTNVEKGNKILKDSNINYIEASTLEEAANKAVAALK

SEQ ID NO: 193635 - protein, 210 aa, Unknown
  Bacterial polypetide isolated from the Sargasso Sea
EAIDAQMELIVCITEGIPVQDMLKVKRALENTSSILIGPNCPGVITPDACKIGIMPGHIHKRGCVGVVSRSGTLTYEAVKQTSDVGLGQSSCVGIGGDPIKGTEHIDVLEWFLKDDETESIIMIGEIGGSAEEEAAQFLKDEAKKGRAKPTAGFIAGRTAPPGRRMGHAGAIVAGGKGGAEDKIEAMQSAGIVVAESPGSLGEAVLKAIG

SEQ ID NO: 193636 - protein, 287 aa, Unknown
  Bacterial polypetide isolated from the Sargasso Sea
VNKSTRLICQGFTGSHGTFHSDQAIKYGTNLVGGVTPKKGGQKHLGLPVFNTVKEAKESEGANATMIYVPAKFAAAAIIEAIDASIEIIVCITEGIPIQDMLKVKQKLNNSKCRLIGPNCPGIITPDECKIGIMPGNIHKKGTVGIVSRSGTLTYEAVAQTTENGLGQSTCIGIGGDPINGTNFIDCLDLFLNDDDTQSILMIGEIGGTAEEEAADFVNNHKIKKPIVGFIAGVTAPPGRRMGHAGAIISGGKGAAKDKIKKMEDCGIIMANSPSKIGNTLFNKLSN

SEQ ID NO: 193637 - protein, 239 aa, Unknown
  Bacterial polypetide isolated from the Sargasso Sea
KVDIGDEISDSDCEKIVKIFHLNKDTQKQAISLIKSMYKMFVSTDANMVEVNPLILTKEEKIVCLDAKVNFDSNALFRHPEIVELRDLNEEDSTEIEASKHDLAYIKLDGSIGCMVNGAGLAMATMDIIKLYGKEPANFLDVGGGASKEKVSAALKIILSDKNVKGILINIFGGIMRCDVLAQGVVDAAKEINISVPLVVRLAGTNFKEGKEILDNSGLKLISAENLDDAAKKIVEAIK

SEQ ID NO: 193638 - protein, 79 aa, Unknown
  Bacterial polypetide isolated from the Sargasso Sea
MNIHEYQAKEILKEFGAPVSNGFAVTSIEEIKDKIPSLKSKNFVLKAQIHAGGRGKAGGVKLVKNIQELDLEAKQMMGK

SEQ ID NO: 193639 - protein, 161 aa, Unknown
  Bacterial polypetide isolated from the Sargasso Sea
QDIADLRDTSEEDPKELEASKYDLNYIALDGEIGCMVNGAGLAMATMDIIKLYGAEPANFLDVGGGATKEKVTEAFKIITSDPKVKGILVNIFGGIMRCDVIAEGVVAAVKEVGLQVPLVVRLEGTNVEKGKDIINNSGLDVIAANDLRDGAEKIVRAVKG

SEQ ID NO: 193640 - protein, 251 aa, Unknown
  Bacterial polypetide isolated from the Sargasso Sea
MLAKIPEKIITTKVDINDEILNSDCEKITKVFNLDENTKKQAILLIKSIYKMFVSTDANMIEVNPLILTKEKKIVCLDAKVNFDSNALFRHPEIIELRDLNEEDPTEIEASKHNLAYIKLDGSIGCMVNGAGLAMATMDIIKLYGKEPANFLDVGGGASKEKVSAALKIILSDKNVKGILINIFGGIMRCDVLAQGVVDAAKEINISVPLVVRLAGTNFKEGKKILDNSGLKLISAENLDDAAKKIVEAIK

SEQ ID NO: 193641 - protein, 123 aa, Unknown
  Bacterial polypetide isolated from the Sargasso Sea
MDIHEYQAKEILAKFGVGVPPGALAYSPEQAAYRAREIGGDIWVVKAQIHAGGRGKAGGVKVCNSDTEIVEICENLFGSKLVTHQTDSNGKGVYRVYVEGSVPIDREIYLGFVLDRSSQRVMI

SEQ ID NO: 193642 - protein, 279 aa, Unknown
  Bacterial polypetide isolated from the Sargasso Sea
CQGFTGAHGTFHSEQAIKYGTNLVGGVTPKKGGQKHLDRPVFNSVLEAKNELGADATMIYVPAKFAAAAIIEAIDASIELIVCITEGIPIQDMLKVRQKLSESRSRLIGPNCPGIITPDECKIGIMPGNIHKRGSVGIVSRSGTLTYEAVAQTTENGLGQSTCIGIGGDPINGTNFIDCLDLFLNDGETESILMIGEIGGTAEEEAAEFIKNHKIKKPIVGFIAGITAPPGRRMGHAGAIISGGKGGAEDKIKKMEESGITVAKSPSIIGKTLFNKLSN

SEQ ID NO: 193643 - protein, 270 aa, Unknown
  Bacterial polypetide isolated from the Sargasso Sea
MNELEKSAKELLGKKLITHQTGPEGREVKRLYVEVSSNIEKEFYLSCLVDRATSKIAFITSDQGGMDIEEVAAKSPNKILTTKVELNEEISNEDCERIIKILSLEGSSKKEAISLIKSIYKMFIKTDANMVEINPLILTKEKKIVCLDAKVNFDSNALFRHPEILELRDLNEEDPAEIEASKYDLAYIKLDGSIGCMVNGAGLAMATMDIIKLYGEEPANFLDVGGGASKEKVSAAFKIILSDKNVKGILINIFGGIMRCDVLAQGVVDA

SEQ ID NO: 193644 - protein, 201 aa, Unknown
  Bacterial polypetide isolated from the Sargasso Sea
MNIHEHQAKQILKKYGAVVPEGVFALNVQELLEKVKSLKTEKYVLKAQIHAGGRGKAGGVKILNTIDELELAAKELLGKRLVTHQTGPEGREVKRLYVEESSNIKKEFYLSCLVDRASSKIAFISSDQGGMDIEEVASKIPEKILTTKVDINEEISNTDCEKIIKIFNLNNDAKNQAINLIKSIYKMFISTDANMVEVNPL

SEQ ID NO: 193645 - protein, 174 aa, Unknown
  Bacterial polypetide isolated from the Sargasso Sea
MNIHEHQAKELLRQYNIPTPSGYVAFTTEEAIKVSKKLPGPIFVVKAQIHAGGRGKAGGVKVVNNLDEVKNSAETILGKNLITHQTGPEGKLVQRLYIEDGCDISAEYYFSMVIDRVTSRVSVIASTEGGMDIEQVAKETPEKILSFNIDPTIGFHPFHSRLIANELKLKGSSF

SEQ ID NO: 193646 - protein, 148 aa, Unknown
  Bacterial polypetide isolated from the Sargasso Sea
VETQAKSVGLNYVDLDGNIGCMVNGAGLAMATMDLIKQSGGEPANFLDVGGTADADRVEVAFNLILQDPKVKAVLVNIFGGIVRCDRVAKGIVQAYKNMKDKIQVPIIVRLQGTNSIEAKKIIDSSGLQIYSATSFSDLTDRIKEALV

SEQ ID NO: 193647 - protein, 314 aa, Unknown
  Bacterial polypetide isolated from the Sargasso Sea
MIATWKKLVTNQTGPEGKITNRVYIEEATDIKKELYLGLVFDRSSESIMVVASTEGGMSVEEISKNKPETIIRSKIEVAVGMQKFQAREIAFGLKIEPKLISRVADTIIGCYRAFSELDATMVEVNPLVISNQDQILALDCKMSFDNNALFRRNLVSELRDKTQENPNEVYASDRGLNYVSLDGNIGNIINGAGLAMASMDMIKLAGGEPANFLDVGGGATPDKIVKAFKLISMDNKVKVILVNIFAGINRCDWVAEGIVQALNKIDIKVPIVIRLAGTNVDKGNKILKDSKIKYIEANTLEDAANKAVKALKK

SEQ ID NO: 193648 - protein, 246 aa, Unknown
  Bacterial polypetide isolated from the Sargasso Sea
TKHLDRPVFNSVLEAKDEVGADATMIYVPAKFAAAAIIEAIDASIELIVCITEGIPIQDMLKVRQKLCGSNSRLIGPNCPGIITPDECKIGIMPGNIHKRGSVGIVSRSGTLTYEAVAQTTENGLGQSTCIGIGGDPINGTNFIDCLDLFLNDDETESILMIGEIGGTAEEEASEFIKNHKIKKPIVGFIAGITAPPGRRMGHAGAIISGGKGGAEDKIKKMEECGITVAKSPSIIGKTLFNKLSN

SEQ ID NO: 193649 - protein, 231 aa, Unknown
  Bacterial polypetide isolated from the Sargasso Sea
MNENAENIAKVLKLNDQQTLQFIPIIDNLLRLFVEKDLSLLEINPLVITGNGDLHCLDAKINIDSNALYRQPELLDMRDETQEDPKESEAAKNDLSYVSLDGNIGCMVNGAGLAMGTMDTIKFFGGNPANFLDVGGTATQERVAKAFKIILDDPEVKVVLVNIFGGIVRCDLIAEGIIAAIKEVEVKIPVVVRLEGNNADIGSKILSKAKIKIESINDLAEAAKKAVLLAK

SEQ ID NO: 193650 - protein, 85 aa, Unknown
  Bacterial polypetide isolated from the Sargasso Sea
MNIHEYQAKEIFKNYEINVPNGVVIFSLEKIEEKFKIFKTNKIILKAQIHAGGRGKGGGIKIVSGIDELKAQANLLLEKNWLHTK

SEQ ID NO: 193651 - protein, 221 aa, Unknown
  Bacterial polypetide isolated from the Sargasso Sea
MSILIDKDTRVLVQGFTGSQGSLHSSQSIEYGTNVVGGVTPGKGGTTHLDLPVFNSVNEAVEQVQPNASIIFVPAPFCKGAILEAAEAGIKFIVCITEGVPTLDMLEVKKIVDGLGITLIGPNCPGVITPGVGKMGIMPGEIHLPGRVGIISRSGTLTYEAVKQTTDLSLGQSSCVGIGGDPIPGSSFIDILKLFEVDDQTDAIVMVGEIGGSAEEEAAEF

SEQ ID NO: 193652 - protein, 250 aa, Unknown
  Bacterial polypetide isolated from the Sargasso Sea
AKKTPNKIITTKIDLKENLENEEIEDIIKIFKLDKNQKKDGINLINALYKILIKKDASLIEINPLVITKQKKLICLDAKMNFDDNALFRRPEILKLRDLNEEEPAEIEASKHGLAYIKLNGTIGCMVNGAGLAMATMDIIKLYGQEPANFLDVGGGASKEQVIEAFKLILSDKKVKGILINIFGGIMRCDVLAQGLVDAAKETNIKLPLVVRLAGTNFEQGKEILNKSGLKILSASDLNDAAKKIVDAIK

SEQ ID NO: 193653 - protein, 273 aa, Unknown
  Bacterial polypetide isolated from the Sargasso Sea
DRVTSKISFVCSTEGGMDIEDVRASNPEKILSFSVDPATGYQAFHGRKIAFALGLENSQVKECIKLMGQLFQAFIEKDMEMLEINPLIVTKNGTLTVLDAKVGFDSNAIYRHQDIADLRDTTEEDPKELEASKYDLNYIALDGEIGCMVNGAGLAMATMDIIKLYGAEPANFLDVGGGATKEKVTEAFKIITSDPKVKGILVNIFGGIMRCDVIAEGVVAAVKEVGLQVPLVVRLEGTNVEKGKDIINNSRLDVIAANDLRDGAEKIVKAVKG

SEQ ID NO: 193654 - protein, 236 aa, Unknown
  Bacterial polypetide isolated from the Sargasso Sea
MSILVDKNTRLIVQGFTGSQGTLHSEQSLEYGTNIVGGVTPGKGGQSHLNKPVFNSVAEACKKVEPNASIIFVPAQFCKSSILEAAESGIKLIICITEGVPTLDMLEVKNRVDELGVRLIGPNCPGVITPGQAKLGIMPGNIHKPGSIGIISRSGTLTYEAVKQTTDLGFGQSSCVGIGGDPIPGSSFIDILKLFENDSETEAIVMVGEIGGNAEELAAEFIKDNITKPVISYIAS

SEQ ID NO: 193655 - protein, 196 aa, Unknown
  Bacterial polypetide isolated from the Sargasso Sea
MQLWVEVNPLVISNQDQILALDCKMSFDNNALFRRNQVSELRDKTQENPNEVYASDRGLNYVSLDGNIGNIINGAGLAMASMDMIKLAGGEPANFLDVGGGATPEKIVKAFKLISMDEKVKVILVNIFAGINRCDWVAEGIVQALEKIEIKVPIVIRLAGTNVEKGNKILKESKIKYIEANTLEDAANKAVKALGN

SEQ ID NO: 193656 - protein, 281 aa, Unknown
  Bacterial polypetide isolated from the Sargasso Sea
RSMVGKRVVTVQTGDEGLPVNIISLETLTDISKELYLSFIVDRVNKSVSIILSPSGGMNIEEVAKKTPDKIFNIQLDHNFECSDMEIQKLAPKLGLNNSQTLQLRSILQKCSKLFIEKDLSLLEINPLVVNKFGDLICLDAKINVDDNALFRHEDILRLKDISQEDDRENEANENDLSYVSLEGNIGCMVNGAGLAMGTMDTIKLYDGSPANFLDVGGTATKERVSKAFKLILSDSSVKAILVNIFGGIVRCDLIAQGIIEAISEISVAVPIVVRLQGNKS

SEQ ID NO: 193657 - protein, 225 aa, Unknown
  Bacterial polypetide isolated from the Sargasso Sea
KKGQLVNSILIEECTSITKELYLSAVVDRDSQKIVFIGSSEGGVNIEDVAKNSPEKIIYQGIDIENSNAKEEAVSISRVLGLNDIQTKQFIPMIENLLRLFIEKDLSLLEINPLVINDNGDLHCLDAKINIDSNALFRQPELQEMYDETQEDPQEAEAAKSDLSYVSLDGNIGCMVNGAGLAMGTMDTIKFFGGNPANFLDVGGTATQERVAKAFKIILKDKEVK

SEQ ID NO: 193658 - protein, 266 aa, Unknown
  Bacterial polypetide isolated from the Sargasso Sea
MHCSQAIEYGTSIIGGVTPGKGGESHLDLPVFNSTKEAQQELEIDATIIFVPAKFCKDSVQEAIDAEIPLIICITEGIPTLDMMKLKQNADSAGCRIIGPNCPGVITPDQCKLGIMPGYIHKPGKIGIVSRSGTLTYEAVDQTTQAGLGQSSCVGIGGDPIPGSSFIDILLLFEEDSETEGIVMVGEIGGTAEEEAAEFIQSNVSKPVVAYIAGVSAPPGKRMGHAGAIIAGGKGTAEDKFLALEKAGVHTTRSPAKIGEEISKLV

SEQ ID NO: 193659 - protein, 266 aa, Unknown
  Bacterial polypetide isolated from the Sargasso Sea
VKFCSSTESAIKSANEILGMNLITHQTGEDGKLVNQILITEALDIEKEFYFALMFDRAKNADVFIVSTEGGVDIEEVADKTPEKIVKAWVNNDTYPLEDAVNTIINALGLNSFNDAFEIFTNIYHCYSNSDCNLLEINPLVITEDQKIIALDAKVDIDSNALFRQEIISKFHDTSEEDPLELKASEYGLNYIKLDGNVGCMVNGAGLAMATMDIVKHHGGEPANFLDVGGAANVDTIKNGFKIILSDPNVKSVLINIFGGIVRCDR

SEQ ID NO: 193660 - protein, 274 aa, Unknown
  Bacterial polypetide isolated from the Sargasso Sea
KEILKKFGAPVSKGVVIFEIKDLDEKIKVLSTENFVLKAQIHAGGRGKAGGVKLVNKSKIQEETKKMFGKILVTHQTGPEGKKVKRVYIQEAYDIEKELYLSCLIDRQSSKIIFISSTEGGVDIEEVAKKNSEKIIKTKVDLKQNLLNEDIEKIIKIFSFDPNQKKDAKNLLNAMYNILIQKDASLIEINPLVITKQKKLICLDAKMNFDDNAMFRRPEILELRDLNEEEPAEIEASKFGLAYIKLNGSIGCMVNGAGLAMATMDIIKLHGRGT

SEQ ID NO: 193661 - protein, 202 aa, Unknown
  Bacterial polypetide isolated from the Sargasso Sea
FLEKDLSLVEVNPLVITDSGDLICLDAKINIDSNALYRQEEIEKLRDPSQEDPREAKAAEWDLSYVALDGNIGCMVNGAGLAMGTMDIIKLHGGEPANFLDVGGTADSKRVAEAFKIILSDENVNTVLINIFGGIVRCDVIADGIVEALTVMGVSVPVVVRLEGNSAEKGLKILDECELNIIPASNLEEAASLAVKASKGEI

SEQ ID NO: 193662 - protein, 269 aa, Unknown
  Bacterial polypetide isolated from the Sargasso Sea
MNIHEHQAKEILKSFDAPISKGIVIMSKDEIKKKIENLNGEEYVVKAQIHAGGRGKAGGVKLVKGLDSLEKEISSMFGKILVTHQTGPEGKEVKRVYVEEASNIEKEFYLSCLIDRETSKIAFISSTEGGMDIEKIASDQPEKIITTRVDLDDKINKDQIDKIIKPYCLTENQKKEGIKVIEAMYNILLKKDASLIEINPLIITKDQKLICLDAKMNFDDNAIFRRPEILKLRDLNEEDPAEVEASKHDLAYIKLNGSIGCMVNGAGLA

SEQ ID NO: 193663 - protein, 274 aa, Unknown
  Bacterial polypetide isolated from the Sargasso Sea
ESSNIKKEFYLSCLVDRVSSKIAFISSDQGGMDIEEVAKSNPEKIITTKVDLLDDIKEEDCRKIIKIFNLDDKASLQGIKLIKSIYKMFISTDANLVEINPLILTEENDLLCLDAKMNFDDNSIFRHPEILELRDLNEEDPAEIEASKHDLAYIKLDGSIGCMVNGAGLAMATMDIIKLYGEEPANFLDVGGGASKEKVSAAFKIILSDKNVKGILINIFGGIMRCDILAQGVVDAAKEIKIDVPLVVRLAGTNFLEGKEILDNSGLEIISASD

SEQ ID NO: 193664 - protein, 229 aa, Unknown
  Bacterial polypetide isolated from the Sargasso Sea
YIEDGCDIVSEYYFSMVIDRVSSRISLIASTEGGMDIEKVAEENPEKILSLNIDPTIGFQPFHSRLIANSLNLTGTSFKQAGDFFSQLYKLFTENDASLLEINPLVLTSENNLIALDAKMSFDNNALYRHPKIMALRDETEEDPAEILASKYDLAYIKLDGTIGCLVNGAGLAMATMDIIKLKGLSPANFLDVGGSATKEKVTEAFKIILSDEAVEGILVKYFWRNNAM

SEQ ID NO: 193665 - protein, 133 aa, Unknown
  Bacterial polypetide isolated from the Sargasso Sea
TYEAVAQTSAVGLGQSTCIGIGGDPINGTNFIDCLDLFLKDPETEGIIMIGEIGGTAEEEAAEFIKKSEIKKPVASFIAGASAPAGKRMGHAGAIISGGKGTAESKFSALEEAGVHISKSPAKLGETIKEALN

SEQ ID NO: 193666 - protein, 224 aa, Unknown
  Bacterial polypetide isolated from the Sargasso Sea
KGGQTHLDKPVFNTVADAKKSTNANASMIYVPAKFCANAIIEAIESDIELIVCITEGIPVLDMLKVKKYLSKSKSRLIGPNCPGIITPDECKIGIMPGNIHKKGSVGIVSRSGTLTYEAVAQTTSNGLGQSTCIGIGGDPINGTNFIDCLDLFLNDPETESILMIGEIGGTAEEEAAAFITQHKIKKPIVGFIAGITAPPGRRMGHAGAIISGGKGGAADKIKT

SEQ ID NO: 193667 - protein, 296 aa, Unknown
  Bacterial polypetide isolated from the Sargasso Sea
EVKRLYIEEASDILKEFYLSCLIDRETSKIAFISSTEGGMDIEKVASETPNKIVTIKIDLKKEGPSKKEIEKIISVFQLNEKQKKIASNLINSLYEIIIQKDASLIEINPLIITKTEELICLDAKMNFDDNAIFRRPDILKLRDLNEEDPAEIKASKHDLAYIKLNGTIGCMVNGAGLAMATMDIIKLYGKEPANFLDVGGGATKEKVSAAFKLILSDKNVKGILINIFGGIMRCDVLAQGVVDAAKEINLSVPLVVRLAGTNFREGKEILDKSNLKILSASDLNDAAKKIVEAIK

SEQ ID NO: 193668 - protein, 250 aa, Unknown
  Bacterial polypetide isolated from the Sargasso Sea
KKGGQKHLEKPVFNTVQEAKNETGATATMIYVPAKFAANAIIEAIDSSMELIVCITEGIPVIDMLKVKKKLNESKSRLIGPNCPGIITPDECKIGIMPGNIHKKGTVGIVSRSGTLTYEVVAQTSENGLGQSTCVGIGGDPINGTNFIDCLDLFLKDPETESILMIGEIGGTAEEEASTFIKNHKIKKPIVGFVAGLTAPAGRRMGHAGAIISGGKGGAKDKINIMEECGITVAKSPAEIGKTLLDKLSN

SEQ ID NO: 193669 - protein, 260 aa, Unknown
  Bacterial polypetide isolated from the Sargasso Sea
MSVLVNKNTKVICQGFTGKHGEFHSKQAIEYGTNLVGGVTPNKGGQKHLDRPVFNTVAEAKAEVGADATMIYVPAKFAAAAIIEAVESSIELIVCITEGIPIQDMLKVKQKLNGTKSRLIGPNCPGIITPDECKIGIMPGNIHKRGSVGIVSRSGTLTYEAVAQTTENGLGQSTCIGIGGDPINGTNFIDCLDLFLNDEETESILMIGEIGGTAEEEAAEFVKNHSIKKPIVGFIAGITAPPGRRMGHAGAIISGGKGGS

SEQ ID NO: 193670 - protein, 216 aa, Unknown
  Bacterial polypetide isolated from the Sargasso Sea
MSVLVDKNSKIIVQGFTGSEGSFHSQQMINYGTNIVGGVTPGKGGKIHLGKPVFNTVQQAINQTDADTSIIFVPAGFAADAIMEACDAGIKVIVAITEGIPISDMSKVFTYIKNKNCRLIGPNCPGVITPDEAKVGIMPGFVFKSGRVGLVSKSGTLTYEAADQITKAGYGISTAIGIGGDPIIGTTVRDAVELFFEDDSTDCVVLIGEIGGQLEA

SEQ ID NO: 193671 - protein, 254 aa, Unknown
  Bacterial polypetide isolated from the Sargasso Sea
MKIHEYQGKEIFKKHNIATPNGIPAFTVEEALEAYNSLKSDIVAVKAQIHAGGRGKGGGVKIAKNKDEAEKHIKNIFGMNLITHQTGEEGKKVERLYLESGVDIRSEFYAAITLDRSKEMDVFMVSTEGGVEIEKVASETPKKIIKIWIDPLVGIKSFQMRKLAKGLGLDGNAFKEACFTFTKMYECYQKTDASILEINPLVITRDDKIIALDSKFNFDSNALFRQKEILDMRDFTEEDKMEIEASNFNLNYIK

SEQ ID NO: 193672 - protein, 153 aa, Unknown
  Bacterial polypetide isolated from the Sargasso Sea
LIGPNCPGVITPGEAKVGIMPGYIHKQGKIGIISKSGTLTYEAVWQLTQLDIGQSSCVGIGGDPIIGSSFIDVLKLFEEDKDTDGVIMIGEIGGTAEQDAALWIKDNFTKPVAAFIAGATAPKGKRMGHAGAIVSGSSGSAEKKKQVLESVGI

SEQ ID NO: 193673 - protein, 276 aa, Unknown
  Bacterial polypetide isolated from the Sargasso Sea
KVLVTHQTGPEGRKVKTLYIEEASDISKEFYLSCLVDRETSKIAFISSTEGGMDIEKIAKETPNKIITTKIDFSIEGPNKKEIENIINIFSFNTEQKLVAEKLIKSLYKIIIEKDASLVEINPLIITKNDKIICLDAKMNFDGNAIFRRPEILKLRDLNEEEPAEIEASKYDLAYIKLNGSIGCMVNGAGLAMATMDIIKLHGKEPANFLDVGGGASKEKVTAAFKLILADKNVKGILINIFGGIMRCDILAQGVVEAANQVNLNVPLVVRLAGTN

SEQ ID NO: 193674 - protein, 150 aa, Unknown
  Bacterial polypetide isolated from the Sargasso Sea
IHKKGSVGIVSRSGTLTYEAVAQTTQNGLGQSTCIGIGGDPINGTNFIDCLDLFLKDEDTHSIIMIGEIGGTAEEEAAEFLKKSKIKKPTIGFVAGLTAPPGRRMGHAGAIISGGKGGAEDKIEQMKSAGIIISNSPADIGKTLYAKLKN

SEQ ID NO: 193675 - protein, 173 aa, Unknown
  Bacterial polypetide isolated from the Sargasso Sea
MNIHEYQAKEILKEFGAPVSNGFVIFNPEEINDQINKIKSDKLVVKAQIHAGGRGKAGGVKLVDRSQISSEVKKMFGKVLVTHQTGPEGKKVKRVYVQQAYDIEKEFYLSCLVDRESSKIAFISSTEGGVDIESVAKNSPEKIITTKIDLKKSLTNDEVQKIIKIFSLDTNQK

SEQ ID NO: 193676 - protein, 216 aa, Unknown
  Bacterial polypetide isolated from the Sargasso Sea
FAEYGLPVSEGYACATPQEAAEAADKIGGNTWVVKCQVHAGGRGKAGGVKLAKSKDEIRAFAQNWLGKNLVTYQTDANGQPVTKILVESCTDIAKELYLGAVVDRGSRRVVFMASTEGGVEIEKVAHETPELIHKAAIDPLVGPQPYQARELAFKLGLVGEQIKQFTKIFMGLGQMFLDCDFALLEINPLVITAQGNLHCLDGKINIDANALYRRC

SEQ ID NO: 193677 - protein, 163 aa, Unknown
  Bacterial polypetide isolated from the Sargasso Sea
YRQPEILKLRDLSEEDPAEIEASKNDLAYIKLGGTIGCMVNGAGLAMATMDIIKLYGKEPANFLDVGGGASKEKVSAAFKLILNDKNVKGILINIFGGIMRCDVLAKGVVDAAKEINLSVPLVVRLAGTNFKEGKEILEKSKLKILSASDLNEAAKKIVEAIK

SEQ ID NO: 193678 - protein, 204 aa, Unknown
  Bacterial polypetide isolated from the Sargasso Sea
INLQNIVFYRCKLNEINPLILTKENNIVCLDAKISFDDNAIFKHPELLELRDLNEEDPTEIEASKHDLAYIKLDGSIGCMVNGAGLAMATMDIIKLHGQEPANFLDVGGGASKEKVAAAFKIILSDKNVKGILINIFGGIMRCDVLAQGIVEAAKETKINIPLVVRLAGTNSKEGKKILDESGLKIISASDLGDAAKKIVKQVE

SEQ ID NO: 193679 - protein, 287 aa, Unknown
  Bacterial polypetide isolated from the Sargasso Sea
ILIKSFILGAVIDRASQRLVVMASTEGGVNIEEVAEETPEKIHKAEIDPIQGPNQPQAEKLANCLNLNEVQTIQFIEIFNGLVRLFIDKDLSLVEVNPLVITSSGDLICLDAKINVDSNALYRQEQILELRDPSQEDPREASAAEWDLSYVALEGNIGCMVNGAGLAMGTMDIIKLHGGEPANFLDVGGTADSKRVAEAFKIILSDENVNTVLINIFGGIVRCDVIADGIVEALTVMGVSVPVIVRLEGNNAHKGLKILDECDLNIIPASNLEEAASLAVRASKGDI

SEQ ID NO: 193680 - protein, 239 aa, Unknown
  Bacterial polypetide isolated from the Sargasso Sea
VQGFTGSQGTLHSHQSIEYGTNIVGGVTPGKGGKQHLERPVFNSVEEAIREEEPNASIIFVPAKFCKDSILEAAEAGIKLIICITEGVPTLDMLNIKKRIDSLGVRLIGPNCPGVITPGEAKLGIMPGNIHKPGSIGIISRSGTLTYEAVKQTTDLGFGQSSCVGIGGDPIPGSSFIDILKLFEDDDQTEAIVMVGEIGGNAEESAADFIQNNISKPVISYIAGQTAPPGKRMGHAGAI

SEQ ID NO: 193681 - protein, 281 aa, Unknown
  Bacterial polypetide isolated from the Sargasso Sea
MSILIDKDTRVLVQGFTGSQGTLHSSQSIEYGTNVVGGVTPGKGGTEHLDLPVFNSVNEAVEQVQPNASLIFVPAPFCKGAILEAAEAGIKFIVCITEGVPTLDMLEVKKIVDGLDITLIGPNCPGVITPGVGKMGIMPGEIHLPGRVGIISRSGTLTYEAVKQTTDLGLGQSSCVGIGGDPIPGSSFIDILELFESDDQTDAIVMVGEIGGSAEEEAAEFISQNVTKPVVSYIAGQTAPPGKRMGHAGAIISGGKGTAEDKIKKLNESGVVVAKNLLEIG

SEQ ID NO: 193682 - protein, 158 aa, Unknown
  Bacterial polypetide isolated from the Sargasso Sea
MNIHEYQAKEILSKYGVSIPKGGLAYSPENAKDRATELGGDLWVVKAQIHSGARGKAGGIIVCKSEQEVSDAANKLLGKTLVTHQTGPEGKTVQRIYVEEGTDIKKEFYLGLVFDRSTESIMVVASSEGGMSVEEIAQEKPESLIKTKIEAAVGMQAF

SEQ ID NO: 193683 - protein, 246 aa, Unknown
  Bacterial polypetide isolated from the Sargasso Sea
MNIHEHQAKQILKKYGAVVPKGVFALNVDDLLDKVKSLKTEKYVLKAQIHAGGRGKAGGVKILNTIEELELAAKELFGKILITHQTGPEGREVKRLYVEESSNIEKEFYLSCLVDRASSKIAFISSDQGGMDIEEVASKTPEKIITTKVAINDEISNNDCEKIIKIFNLNNDAKNQAITLIKSIYKMFISTDANMVEVNPLILTKEEKIVCLDAKVNFDSNALFRHPEIVELRDLNEEDSTEIEAS

SEQ ID NO: 193684 - protein, 143 aa, Unknown
  Bacterial polypetide isolated from the Sargasso Sea
ASDRGLNYVSLDGNIGNIINGAGLAMASMDMIKLAGGEPANFLDVGGGATPEKIVKAFKLISMDKKVKVILVNIFAGINRCDWVAEGIVQALQKIEIKVPLVIRLAGTNVEKGNQILKESKINYIEANTLEDAANKAVKALGK

SEQ ID NO: 193685 - protein, 189 aa, Unknown
  Bacterial polypetide isolated from the Sargasso Sea
MSIFIDKNTKVICQGFTGSQGTFHSQQAIDYGTNMVGGVTPGKGGEKHLGLPVFDTVYDAKFKTKANATVIYVPPPFAADAILEAIDSEIETIVCITEGIPVIDMVRVKRALHGSKSRLIGPNCPGVITPEECKIGIMPGHIHKKGSVGVVSRSGTLTYEAVAQTTEIGLGQSTCVGIGGDPVKGTEHV

SEQ ID NO: 193686 - protein, 111 aa, Unknown
  Bacterial polypetide isolated from the Sargasso Sea
LFGSEPANFLDVGGGATKEKVTEAFKIITSDKNVKGILVNIFGGIMRCDVIAEGVVEAVKNVGLSVPLVVRLEGTNVEKGKDIINKSGLNVIAADNLSDAAKKIVSAVKGN

SEQ ID NO: 193687 - protein, 290 aa, Unknown
  Bacterial polypetide isolated from the Sargasso Sea
VAIHRDEAVKCAEKLSKDTGTKIFVVKAQIHAGGRGKGGGVKIAKSLEEVKKISSDIIGMNLITPQTSKDGKLVRKVLIAEDVYYDGEFNRKEFYMSVLLNRASSKNMIVYSTEGGVDIEAVAENTPELIFNEEIDPGTGILPFQSRKIAFNLGLEGLAFKNMSKFVTNLYNAYVNSDASLFEINPVLKASDDKIIAVDSKVTIDENALFRHKDYESLRDLNEENPVEVEARENGLNYVDLDGNVGCMVNGAGLAMATMDLIKLAGGEPANFLDVGGTADSKRVEKAFRL

SEQ ID NO: 193688 - protein, 264 aa, Unknown
  Bacterial polypetide isolated from the Sargasso Sea
VASTEGGMSVEEISKQKPETIIRSKIEVAVGMQQFQAREIAFGLGIEPKLISRTAEAITGCYRAFSELDATMVEVNPLVISNQDQILALDCKMSFDNNALFRRNQISELRDKTQENESEVYASDRGFNYVSLDGNIGNIINGAGLAMASMDMIKLAGGEPANFLDVGGGATPEKIVKAFRLISMDKKVKVILVNIFAGINRCDWVAEGIVQALEKIDIKVPLVIRLAGTNVEKGNKILKESKINYIEANTLEDAANKAVKALGK

SEQ ID NO: 193689 - protein, 244 aa, Unknown
  Bacterial polypetide isolated from the Sargasso Sea
KIIQTKVNLEDQISDEDCNKIVGIFNLDTSAKKQAVNLIKSIYKMFIDTDANLVEINPLILTKNNKIVCLDAKMNFDDNALFRNPGILNLRDFNEEDETEIEASKHDLAYIKLDGSIGCMVNGAGLAMATMDIIKLYGEEPANFLDVGGGASKEKVSAAFKIILSDENVKGILINIFGGIMRCDVLAQGVVDAAKEIKIEVPLVVRLAGTKFEEGKKILDNSSLKIISASDLSDAAKKVVKAIK

SEQ ID NO: 193690 - protein, 292 aa, Unknown
  Bacterial polypetide isolated from the Sargasso Sea
RLYVESSSKIDKEFYLSCLVDRASSKIAFISSDQGGMDIEEVAKNNPKKIITTKVNLEDQISDEDCNKIVGIFNLDTSAKKQAVNLIKSIYKMFIDTDANLVEINPLILTKDKKIVCLDAKMNFDDNALFRNPDILNLRDFNEEEETEIEASKHDLAYIKLDGSIGCMVNGAGLAMATMDIIKLYGEEPANFLDVGGGASKEKVSAAFKIILSDKNVKGILINIFGGIMRCDVLAQGVVDAAKEIKIEVPLVVRLAGTKFEEGKKILNNSGLQIISASDLSDAAKKVVEAIK

SEQ ID NO: 193691 - protein, 284 aa, Unknown
  Bacterial polypetide isolated from the Sargasso Sea
MDIHEYQAKKILSDFGVTIPRGGIVYSPENAENKAREIGGSRWVVKAQIHSGARGKAGGIIVCNSPLEVAQATDKLLGKKLVTNQTGPEGKIVNRIYIEEATDIERELYLGLVFDRSSESIMVVASTEGGMSVEEISKEKPETIIRSKIEVAVGMQSFQARELAFGLGIEPDLIRRASETIIGCYKAFSELDATMVEVNPLVISKQKQILALDCKMSFDNNAMFRRNQVSELRDKTQEDAKEVFASDRGLNYVSLDGNIGNIINGAGLAMASMDMIKLAGGSPA

SEQ ID NO: 193692 - protein, 170 aa, Unknown
  Bacterial polypetide isolated from the Sargasso Sea
MSILINKNTIAICQGFTGSQATLHCSQSIEYGTKIVGGVTPGKAGQIHLDRPVFENVSEAIESTGADTSIIFVPAPYCKDSINDALDSGLKLVIVITEGIPTLDMLYLKAKADEMGVKIIGPNCPGVITPGEAKLGIMPVEIHKKGKVGIVSRSGTLTYEAVDQTTAIGL

SEQ ID NO: 193693 - protein, 299 aa, Unknown
  Bacterial polypetide isolated from the Sargasso Sea
GPEGKEVKRLYIEEASNISKEFYLSCLVDRASSKIAFISSTEGGMDIEKVAADTPKKIVTKKIDYKKEGPSDDEITEIISIFDLKDSQVKQGKELIKSLYKILTEKDASLIEINPLIINKDNNLICLDAKMNFDDNAIFRRPEIMQLRDLNEEEPAEIEASKYDLAYIKLNGSIGCMVNGAGLAMATMDIIKLYGQEPANFLDVGGGASKEKVTAAFKLILADKNVKGILINIFGGIMRCDVLAQGVVEAAKQINLSVPLVVRLAGTNFEEGKKILEDSNLKILSATDLNDAAKKIVDS

SEQ ID NO: 193694 - protein, 74 aa, Unknown
  Bacterial polypetide isolated from the Sargasso Sea
MNIHEYQAKQILKEFGIEVPNGVFALSVEDLIKKAKQLNTNKYVLKAQIHAGGRGKAGGVKILNNIDELSKASK

SEQ ID NO: 193695 - protein, 95 aa, Unknown
  Bacterial polypetide isolated from the Sargasso Sea
MNIHEYQAKQILKKYGVVVPNGVFSDSIEELLEKAKSLKTEKFVLKAQIHAGGRGKAGGIKIVNTLEELNLAANEMLGKKLVTHQTGPQGTKVKR

SEQ ID NO: 193696 - protein, 256 aa, Unknown
  Bacterial polypetide isolated from the Sargasso Sea
ARAFAQQWLDKRLVTYQTDANGQPVSKILVEACTDIDKELYLGAVVDRASRRVVFMASTEGGVDIEKVAHDTPEKILKATIDPLVGAQPFQARELAFQLGLKGDQVKQFVHIFVGLAQLFQDYDLALLEVNPLVIKRDGNLHCLDAKINIDSNAIYRQPKLRDMADPSQDDPREAHAAKWELNYVALDGNIGCMVNGAGLAMGTMDIVNLHGGAPANFLDVGGGATEERVTEAFKIILSDSNVAAVLVNIFGGIVR

SEQ ID NO: 193697 - protein, 255 aa, Unknown
  Bacterial polypetide isolated from the Sargasso Sea
MFPKVRLFFILDDAIDACNEIGGSKWVVKAQVHAGGRGKAGGVELIESPEMAVEFSKKWLGNRLITYQTDKLGQIVNSILIEEYTDIDKELYLSAIIDRDSQSIVFIGSSEGGVNIEEVAKNSPEKIIYQSVAYKDSSLPEHARNIAQVLKLDENQTGQFISMIDNLLRLFIEKDLSLLEINPLVINSAGDLHCLDAKINIDSNALYRQPELFDMYDETQEDPQEAEAAKNDLSYVSLDGNIGCMVNGAGLAMGT

SEQ ID NO: 193698 - protein, 165 aa, Unknown
  Bacterial polypetide isolated from the Sargasso Sea
ALFRHPEHLDLRDLKEEEETEIEASKHGLSYIKLDGNIGCMVNGAGLAMATMDIIKLYGQTPANFLDVGGGASKEKVSAALKLILSDKNVKGILINIFGGIMRCDVLAAGVVDAASEIKIDLPIVVRLAGTNVEEGNKILNNSKLKIIPASDLSDAAEKIVNAIT

SEQ ID NO: 193699 - protein, 207 aa, Unknown
  Bacterial polypetide isolated from the Sargasso Sea
MNIHEHQAKDLFRDYNIPVSSGSVAYSADEIERAVNEVVGPVWVVKAQIHAGGRGKGGGVKVVSTKEDALNEANKMYGMNLVTPQTGASGKEVKRIYIENGSDIEKELYLSCLLDRSTGKVAFIVSKMGGMDIEAVAADTPENITTVQIEPSIGVTNNDIEMIQKAFEIDDNLNHQLSDLIKNMYLFFIEKDASLVEVNPLIVTNTN

SEQ ID NO: 193700 - protein, 255 aa, Unknown
  Bacterial polypetide isolated from the Sargasso Sea
IQEAYDIEKELYLSCLVDRESSKIAFISSTEGGIDIESVAKEKPEKILTNKIDLKKSLTTDDIEKIIKIFSFSDDQKKDAEKLVNALYNILITKDASLIEINPLIITKQKKLICLDAKMNFDDNAMHRRPEILKLRDLNEEEPAEIEASKFGLAYIKLNGSIGCMVNGAGLAMATMDIIKLYGQEPANFLDVGGGATKEQVAAAFKLILSDKKVKGILINIFGGIMRCDVLAHGVVDAAREINIKVPLVVRLAGT

SEQ ID NO: 193701 - protein, 170 aa, Unknown
  Bacterial polypetide isolated from the Sargasso Sea
GNALYRQKPIEAMRDLSQEDEREAQADEFNLNYVALDGNIGCMVNGAGLAMGTMDLVKLHGGNPANFLDVGGGATKEAVAEAFKIILSDDSVKAVLINIFGGIVSCATIAEGIIGAVQEVGVTVPVVVRFEGNNSELGRQTLKESGLNIIPGESLVDAAEKAVAAAGGSK

SEQ ID NO: 193702 - protein, 146 aa, Unknown
  Bacterial polypetide isolated from the Sargasso Sea
MSILIDSSTKVICQGFTGGQGTLHSEQAIAYGTKLVGGVTPGKGGTQHLDLPVFDTVADAVSNTGATASVIYVPAGFCKDSILEALDAGIELIVCITEGIPTLDMLAVKARLEISGSRMIGPNCPGVITPGSLQNRDHAWGYHFTR

SEQ ID NO: 193703 - protein, 266 aa, Unknown
  Bacterial polypetide isolated from the Sargasso Sea
SFRAGYKYGTNLVGGVTPKKGGQKHLDRPVFNSVLEAKNEVGADATMIYVPAKFAAAAIIEAIDASVELIVCITEGIPIQDMLKVRQKLIGSSSRLIGPNCPGIITPDECKIGIMPGSIHKRGSVGIVSRSGTLTYEAVAQTTENGLGQSTCIGIGGDPINGTNFIDCLDLFLNDSETESILMIGEIGGTAEEEAADFIKNHKIKKPIVGFIAGITAPPGRRMGHAGAIISGGKGGAEDKIKKMEECGIIVAKSPSIIGKTLFDKL

SEQ ID NO: 193704 - protein, 277 aa, Unknown
  Bacterial polypetide isolated from the Sargasso Sea
LSCVVDRETSKIAFISSDQGGMDIEEVAKNNPEKITTTRLEFQKEITDIDCEKIVKIFKLDSEANYQAIKLVKSIYKLFIENDASLIEINPLILTKENKILCLDAKINFDDNALFRNPEILNLRDFNEEEEKEIEASKYNLSYIKLDGNIGCMVNGAGLAMATMDIIKLYGQEPANFLDVGGGASKEKVSAAFKIILSDKNVRGILINIFGGIMRCDILAQGVVDAANEININVPLVVRLAGTKFEEGKKILENSNLKIISATDLSDAAKKIVEAIK

SEQ ID NO: 193705 - protein, 231 aa, Unknown
  Bacterial polypetide isolated from the Sargasso Sea
EAKEKTEANATVIYVPPPFAADAILEAIDAEIEIIVCITEGIPQHDMTRVYNKLLQSKSRLVGPNCPGVITPEECKIGIMPGHIHSKGNVGIVSKSGTLTYEAVYQTSTIGLGQSSCIGIGGDPIPGTNFIDIIDLFLRDEATNSIIMIGEIGGNAEEEAAEFIKNSKIKKPMVAFIAGLTAPKGKRMGHAGAIIAGGKGTAEDKIEALKSADVKVSMSPALMGKTLYDLV

SEQ ID NO: 193706 - protein, 144 aa, Unknown
  Bacterial polypetide isolated from the Sargasso Sea
IKASKYDLAYIKLDGNIGCMVNGAGLAMATMDIIKLYGEEPANFLDVGGGASKEKVSAAFKIILSDKNVKGILINIFGGIMRCDVLAQGVVDAAKEIKINVPLVVRLAGTNFKEGKKILDNSNLDIISASDLSDAAQKIVKEIK

SEQ ID NO: 193707 - protein, 171 aa, Unknown
  Bacterial polypetide isolated from the Sargasso Sea
INFDDNSLYRHPEILKLRDLNEENPTEIEASKHNLSYIKLDGNIGCMVNGAGLAMATMDIIKLYGKEPANFLDVGGGASKEKVSAALKIILSDKNVKGILINIFGGIMKCDVLAHGVVDAAKEIKIKVPLVVRLAGTNFKEGKNILDNSGLKIISAENLDDAAKKIVEAIK

SEQ ID NO: 193708 - protein, 266 aa, Unknown
  Bacterial polypetide isolated from the Sargasso Sea
MSVLVNKNTRLICQGFTGSHGTFHSEQAIKYGTNLVGGVTPKKGGQKHLGLPVFNTVKEARESEGANATMIYVPAKFAASAIIEAIDASIELIVCITEGIPIQDMLKVKQRLNNSKSRLIGPNCPGVITPDECKIGIMPGNIHKKGTVGIVSRSGTLTYEAVAQTTENGLGQSTCIGIGGDPINGTNFIDCLDLFLNDEDTQSILMIGEIGGTAEEEAADFIKNHKIKKPTVGFIAGVTAPPGRRMGHAGAIISGGKGGAKEKIKK

SEQ ID NO: 193709 - protein, 232 aa, Unknown
  Bacterial polypetide isolated from the Sargasso Sea
MNIHEYQAKEILKQFGLPVLKGKSYNKNLQTLNDDIADLKGPPWVVKSQIHAGGRGAGYFKNSFNDKGGVQVVFQKNEVTTIAKSMMGNILITKQTGEIGKTVNRIFIEEGCDIDREFYLSLLVDRNNSKLMMMISAAGGMDIEEVAVTNPEKIINVHFTTYKDISLDESLIAKLEINNNQFKELTSIVNKLINAFTSIDASTIEINPLVLNKQGGFVVLDAKITLDDNALF

SEQ ID NO: 193710 - protein, 136 aa, Unknown
  Bacterial polypetide isolated from the Sargasso Sea
TLTYEAVAQTSENGLGQTSCIGIGGDPINGTNFIDCLDLFLNDEETKSILMIGEIGGTAEEEAAEFAKNHSIKKPIVGFIAGLAAPPGRRMGHAGAIISGGKGGAKEKIKKMEECGITVAKSPSEIGKTLFNKLSN

SEQ ID NO: 193711 - protein, 153 aa, Unknown
  Bacterial polypetide isolated from the Sargasso Sea
NVDSYTGLKSFHVQKILKELGLSKNQQKALSNLLQSLFRAFLQLDAAMIEINPLVITKTDDLLAIDAKMSFDDNALFRQPEVKQLRDESEEEPTEIEAAQLELNYIKLDGNIGCLVNGAGLAMATMDIIKLHGGDPANFLDVGGSATKERVAA

SEQ ID NO: 193712 - protein, 294 aa, Unknown
  Bacterial polypetide isolated from the Sargasso Sea
VLQGKSYTKNLDTLHVDIEDLNGPPWVVKSQIHAGGRGAGHFKNSFNDKGGVQVVFEKKDVLTIAQSMMGNVLVTKQTGEEGKIVNHIFIEEGCDIDREFYLSLLVDRNNAKIMMMISSAGGMDIEEVAVTNPEKIINIHFTTYKDVSLDESLLTKLDITKNQLEDLTSIINKLLNTFTSIDASTIEINPLVLNKQGGFVVLDAKISLDDNALFRHPELVELKDLNEEDPLELQAAEHDMNYVKLDGSIGCMVNGAGLAMATMDIIKQFGKEPANFLDLGGTANKDRVIMGFKI

SEQ ID NO: 193713 - protein, 208 aa, Unknown
  Bacterial polypetide isolated from the Sargasso Sea
LEAIDAGIKLIVTITEGIPTLDMLDVKVKLQETGVRMIGPNCPGVITPGECKIGIMPGHIHKPGKVGIVSRSGTLTYEAVKQTTDEGFGQSTCVGIGGDPIPGSNFIDILEMFQNDPQTEAIVMIGEIGGNAEEDAAAYIKAHVTKPVVSYIAGVTAPAGKRMGHAGAIIAGGKGTAAEKFAALEDAGVKTVRSLADIGKALREVTGW

SEQ ID NO: 193714 - protein, 187 aa, Unknown
  Bacterial polypetide isolated from the Sargasso Sea
FFSKIYKTFVDLDASLVEINPLVLSKENKLIALDAKMSFDNNSLFRQSEVLELKDETEEEPSETLAKKFDLAYIKLDGEIGCLVNGAGLAMATMDIINLKGSSPANFLDVGGSATKEKVKEAFKIILSDDAVKGILVNIFGGIMRCDIIAEGVVAAASDLALDKPLVVRLSGTNVEKGKEILSKSDL

SEQ ID NO: 193715 - protein, 273 aa, Unknown
  Bacterial polypetide isolated from the Sargasso Sea
MNIHEYQAKEILKEFGAPVSNGVTIFSISEIKEKIKKLKSNELVLKAQIHAGGRGKAGGVKLIKDISNLEEEAKKMIGKTLVTHQTGPEGKEVKKLYIEEASDISKEFYLSCLIDRQSSKIAFISSTEGGMDIEKVASETPENIVTNKIDLKNDGPSELEIEKIISVYQLNNDQKKDASKLIKSLYNIIIQKDASLIEINPLILTKSEKLICLDAKMNFDDNAIFRRPEISKLRDLDEENPAEVEASKNDLAYIKLNGSIGCMVNGAGLAMAT

SEQ ID NO: 193716 - protein, 293 aa, Unknown
  Bacterial polypetide isolated from the Sargasso Sea
IKSLQEVSGACKKIGGKSWVAKAQVHAGGRGKSGGVKLCNSINEVRDFAEQWLGKSLITYQTDEYGQLVNSILIEELTDIKDEIYLSMVVDRTSQSVAIIASAEGGVNIEETAKNNPEKIISIFLKDPNISQLQIQKICLTLSLNKQQSEQMDDILKRLTKLFFECDLALLEINPLVIKTDEKLHCLDAKLNVDNNALFRQQELAKMHDQTQEDHREATAKQFDLSYVSLVGNIGCMVNGAGLAMGTMDTIKFFGGNPANFLDVGGTATQERVAQAFKLILDDPDVKVILVNI

SEQ ID NO: 193717 - protein, 276 aa, Unknown
  Bacterial polypetide isolated from the Sargasso Sea
GLVFDRSSESIMVVASTEGGMSVEEIAKEKPETIIRSKIEVAVGIQSFQARELAFGLGIDSDLIARASDTIIGCAKAFSELDATMVEVNPLVISKQKQILALDCKMSFDNNAMFRRNKVSELRDKSQEDEKEVYASDRGLNYVSLEGNIGNIINGAGLAMASMDMIKLAGGEPANFLDVGGGATPEKIVKAFRLITMDKKVKVILVNIFAGINRCDWVAEGIVQALDKIEVKVPLVIRLAGTNVEKGNKILKDSKINFIEASTLEEAANKAVAALK

SEQ ID NO: 193718 - protein, 241 aa, Unknown
  Bacterial polypetide isolated from the Sargasso Sea
IPIFDDVEKAVSETNANVALTFVPPAFAKDAVLEAAFGGCELIVCITEGIPAKDEAEMYDILKKETKASLLGPNCPGLISPGKTNVGIMPHEITLPGNIGVVSRSGTLTYQAVHELTNLNIGQSTCIGIGGDPVPGMSFIDVIEKFQADSETEGIVMIGEIGGTAEEEAADFIKQNVTKPVVSYIAGVTAPPGKKMGHAGAIVSGNKGTAEAKIQALTDAGAIVVKTPTEIGKAMKDVING

SEQ ID NO: 193719 - protein, 284 aa, Unknown
  Bacterial polypetide isolated from the Sargasso Sea
LIKIQEYCSGFTGSQGTLHSSQSIEYGTNVVGGVTPGKGGASHLDLPVFNSVKEAVEQVQPNASLIFVPAPFCKGAILEAADAGIKFIVCITEGVPTLDMLEVKKIVDGLDITLIGPNCPGVITPGVGKMGIMPGEIHLPGRVGIISRSGTLTYEAVKQTTDLGLGQSSCVGIGGDPIPGSSFIDILELFEADDQTDAIVMVGEIGGSAEEEAAEFISQNVTKPVVSYIAGQTAPPGKRMGHAGAIISGGKGTAEDKIKKLNESGVVVAKNLLEIGSTIKSLMS

SEQ ID NO: 193720 - protein, 195 aa, Unknown
  Bacterial polypetide isolated from the Sargasso Sea
MLEINPLVVTKDGDVIPLDAKMNFDSNALYRQNDIHDLRDEDEEDPMELQASKHDLNYIKLNGTIGCMVNGAGLAMSTMDIIQLHGGSPANFLDVGGGATAEKVTTAFKIILSDPNVEGILVNIFGGIMRCDVIAEGVVEAAKEVSLEVPLVVRLEGTNVELGKKIMADSGLPIISADDLGDAAAKVVNAVKDAA

SEQ ID NO: 193721 - protein, 298 aa, Unknown
  Bacterial polypetide isolated from the Sargasso Sea
ELLGKTLVTHQTGPEGREVKRLYVEESSNIEKEFYLSCLVDRASSKIAFISSNQGGMDIEEVANSSPEKIITTKVDMGHEISNSDCEKIIKIFNLNEDVKKEAISLIKSIYKMFVSTDANMVEVNPLIMTKEEKIVCLDAKINFDSNALFRHPEIVELRDLNEEDPIEIEASKYDLAYIKLGGSIGCMVNGAGLAMATMDIIKLYGNEPANFLDVGGGASKEKVSAALKIILSDKNVKGILINIFGGIMRCDILAQGVVDAAKEINISVPLVVRLAGTNFKEGKEILDNSKLEINFCR

SEQ ID NO: 193722 - protein, 219 aa, Unknown
  Bacterial polypetide isolated from the Sargasso Sea
GKQIGSAVKILSAMYEAFTELDASLLKINPLVVTKNNEIVALDAKMAFDDNGLYRQPGVSEMRDEDEENPTELEASKHELNYIKLEGSIGCMVNGAGLAMATMDIIKLYGAEPANFLDVGGGATKERVSTAFKLILSDPNVEGILVNIFGGIMRCDVIAEGVVAAAREVSLQVPLVVRLEGTNVEMGKKIIGESGLEIIAANNLADAADKIVKAVKGME

SEQ ID NO: 193723 - protein, 214 aa, Unknown
  Bacterial polypetide isolated from the Sargasso Sea
ISSTEGGMDIEKVAKETPHKIITNKLEFTKEGPNKKEIEKIISIFNFNNTQIETAQNLIKSLYKILIQKDANLIEINPLIITNNNKIICLDAKMNFDDNAIFRRPEILKLRDLNEEDSTEIEASKHDLAYIKLNGSIGCMVNGAGLAMATMDIIKLYGKEPANFLDVGGGASKEKVTAAFKLILADKNVKGILINIFGRYMRCDVLAQGVVEAA

SEQ ID NO: 193724 - protein, 171 aa, Unknown
  Bacterial polypetide isolated from the Sargasso Sea
MNIHEHQAKQILKEFGATVPEGVVGFTVQELLEKCKLLKTDKFVLKAQIHAGGRGKAGGVKILDNLEELRKSAKELLGKKLVTHQTGPEGREVKRLYVEVSSKIEKEFYLSCLVDRASSKIVFISSDQGGMDIEEVAIKSPNKISKTKVELKDEISNEQCEEIIKIFNFRG

SEQ ID NO: 193725 - protein, 282 aa, Unknown
  Bacterial polypetide isolated from the Sargasso Sea
KKLYLGLVFDRSSESIMVVASTEGGMSVEEISKKKPETIIRSKIEVAVGMQKFQAREIAFGLKIEPNLIARAADTIIGCYRAFSELDATMVEVNPLVISNQDQILALDCKMSFDNNALFRRNQVSELRDKTQENPNEVYASDRGLNYVSLDGNIGNIINGAGLAMASMDMIKLAGGEPANFLDVGGGATPEKIVKAFKLISMDEKVKVILVNIFAGINRCDWVAEGIVQALEKIEIKVPIVIRLAGTNVEKGNKILKESKIKYIEANTLEDAANKAVKALGN

SEQ ID NO: 193726 - protein, 260 aa, Unknown
  Bacterial polypetide isolated from the Sargasso Sea
KNTKVICQGFTGAHGTFHSEQALKYGTKLVGGVTPKKGGQIHLGLPVFNSVQEAKEKTKANASMIYVPPKFAASAIIEAIDSEIELIVCITEGIPVIDMIKVKNLLKKNKSRLIGPNCPGIITPNQCKIGIMPGDIHMEGSVGIVSRSGTLTYEAVAQTSSNNLGQSTCIGIGGDPINGTNFIDCLELFLKDENTQSIVMIGEIGGTAEEEAAEFIKRSKIKKPIVGFVAGLTAPPGRRMGHAGAIISGGKGGANDKIET

SEQ ID NO: 193727 - protein, 278 aa, Unknown
  Bacterial polypetide isolated from the Sargasso Sea
MNIHEYQAKTMFREYGVSVQPGSHCTTVDQALLAYDSLGSKIVAVKSQIHAGGRGKGDLFCTDSGDLVMHGGVKIASSREEVLDFSSSILGRRLVTKQTGQSGKIVNNLYIEAGCEIVHEYYLALLVDREKDSLLVMASTEGGVDIEEVAENSPEAIHKLWFDPSQGLDLHSAGGLASSLGLEDSSQQSFIKMISNLATMFVEKDCSMIEINPLVRTENNLMIALDAKVSFDENASFRHQWMEDLRDLSEESDVEIRAKEYDLSYVDLDGNIGCLVNG

SEQ ID NO: 193728 - protein, 245 aa, Unknown
  Bacterial polypetide isolated from the Sargasso Sea
MSILINKNTKVICQGFTGKHGTFHSEQAIKYGTNLVGGVTPKKGGQMHLSKPVFNSVKEAKEKTGANASMIYVPAKFAASAIIEAIDASIELIACITEGIPVLDMLKVKKKLANSNSRLIGPNCPGIITPEECKIGIMPGNIHKKGSVGIVSRSGTLTYEAVAQTTDNGLGQSTCIGIGGDPINGTNFIDCLDLFLKDVETKSILIIGEIGGTAEEEAAEFYKNHKIKKPMVGFIAGITAPPGRR

SEQ ID NO: 193729 - protein, 176 aa, Unknown
  Bacterial polypetide isolated from the Sargasso Sea
CLDAKVNFDSNALFRQPEILELRDLNEEEPAEIEASKHDLAYIKLDGNIGCMVNGAGLAMATMDIIKQYGEEPANFLDVGGGASKEKVSAAFKIILSDKNVKGILINIFGGIMRCDVLAQGVVDAAKEINIEVPLVVRLAGTNFKEGKEILDNSGLKLISAENLDDAAKKIVEAIK

SEQ ID NO: 193730 - protein, 187 aa, Unknown
  Bacterial polypetide isolated from the Sargasso Sea
MQLVTHQTGPEGQKVNRLMIEEGADIKQELYVSLVVDRISQKIVLMGSSEGGMDIEEVAEKHPELIHKVIVEPSTGLLDAQADDLAAKIGVPAASIPQARAILQGLYKAFWETDASLAEINPLNVSGDGKVIALDAKFNFDSNALFRHPEIVAYRDLDEEDPAEIEASKFDLAYISLDGNIGCLVNG

SEQ ID NO: 193731 - protein, 260 aa, Unknown
  Bacterial polypetide isolated from the Sargasso Sea
QKWVGVELHLGKGGQNHLNLPVFDTLDEAIDVTSANASVIYVPPAFAADSILEAIDAKIDLIVCITEGIPVLDMVKVKNALKYSSSRLIGPNCPGIITPNECKIGIMPGHIHKKGKIGIVSRSGTLTYEAVGQTTAAGLGQSTCVGIGGDPLNGTNFIDCLNLFLSDEETDAIIMIGEIGGTAEEEASEFLKSSKIKKPVAGFIAGRTAPPGRRMGHAGAIVSGKSGGAEAKIDAMRSAGINVTDSPGMLGEAIIEAMKK

SEQ ID NO: 193732 - protein, 212 aa, Unknown
  Bacterial polypetide isolated from the Sargasso Sea
QFKIIIEKLGRAFISLDASTIEINPLVINKSGNLLLLDAKIALDDNALFRHPEYLQLRDTSEENEMELEASKNDMNYIKLDGEIGCMVNGAGLAMATMDIVKQFGKEPANFLDLGGTANKERTTKGFKIIQSDPNVKSVLINIFGGIIHCDMIANGIIDAIKELNYKLPVVVRFQGTNAAEGKNIINKSSLGLVSIDDLTEAAKKVVDLASK

SEQ ID NO: 193733 - protein, 212 aa, Unknown
  Bacterial polypetide isolated from the Sargasso Sea
MNIHEYQAKEILKKFGVKVPNGVPVFDLSELEQKYKLFKSRKIALKAQIHAGGRGKAGGIKIVNSLKELKKSATLLFGKKLVTHQTGKKGKEVKRLYLEETCNIKKEFYLSCLVDRSSSKIVFISSAEGGVDIEKVAKKNPKKIITVKLDSFNSINDENIEKIISPFSLSKELKKKSFRLIQCIHKTLIEKDANLIEVNPLVLTEDNDLVCL

SEQ ID NO: 193734 - protein, 165 aa, Unknown
  Bacterial polypetide isolated from the Sargasso Sea
QAKVREMRDTTQENERENRAQQWELNYISLDGDIGCMVNGAGLAMATMDLIKLNGGNPANFLDVGGGATKERVTEAFKIIMSDDNVKAVLVNIFGGIVRCDLIAEGIMAAVEEVGITVPVVVRLEGNNAELGAKLLADSGLNIIPANGFSDAAAQVVAAAQKAAE

SEQ ID NO: 193735 - protein, 251 aa, Unknown
  Bacterial polypetide isolated from the Sargasso Sea
SKKKPETIIRSKIEVAVGMQKFQAREIAFGLKIEPNLIARAADTIIGCYRAFSELDATMVEVNPLAISKQDQILALDCKMSFDNNALFRRNQVSELRDKTQENPNEVYASDRGLNYVSLDGNIGNIINGAGLAMASMDMIKLAGGEPANFLDVGGGATPEKIVKAFKLISMDEKVKVILVNIFAGINRCDWVAEGIVQALEKIQIKVPIVIRLAGTNVEKGNKILKESKIKYIEANTLEDAANKAVKALSN

SEQ ID NO: 193736 - protein, 284 aa, Unknown
  Bacterial polypetide isolated from the Sargasso Sea
NTKVICQGFTGAHGTFHSEQAIKYGTNLVGGVTPKKGGQKHLDRPVFNSVLEAKNEVGADATMIYVPAKFAAAAIIEAIDASIELIVCITEGIPIQDMLKVRQKLSGSNSRLIGPNCPGIITPDECKIGIMPGSIHKRGSVGIVSRSGTLTYEAVAQTTENGLGQSTCIGIGGDPINGTNFIDCLDLFLNDSETESILMIGEIGGTAEEEAADFIKNHKIKKPIVGFIAGITAPPGRRMGHAGAIISGGKGGAEDKIKKMEECGIIIAKSPSIIGKTLFDKLSN

SEQ ID NO: 193737 - protein, 73 aa, Unknown
  Bacterial polypetide isolated from the Sargasso Sea
MKIHEYQAKEIFRDFDVRVPSGKPVFSVEEALQAYDEMGSETVVVKAQIHAGGRGKGGGVKLAHNRDDVESLA

SEQ ID NO: 193738 - protein, 282 aa, Unknown
  Bacterial polypetide isolated from the Sargasso Sea
LLSEFGIPIPKSKVSDDKNTLLNHFDDFGSNAVLKVQVHAGGRGKAGGVKLVDNKEDAANFADKFFGNLFQTFQTGDESVVVNKILVEEASKIVSEMYLALLVDGSNQSVNIIASPEGGTDIEEVASSNPEKIFNLPINTILGPTDFHVREILDFLYLDKKLFSQLNKIIRGLYKLYLEKDCSLIEINPLILNEDNEIIALDAKITFDEDALFRNKDIGELRDLSQENEVEIKAAELGIKYVQLKGSVGCIVNGAGLAMATMDVIQSAGLNPANFLDIGGGA

SEQ ID NO: 193739 - protein, 227 aa, Unknown
  Bacterial polypetide isolated from the Sargasso Sea
MSILVNKNTKVICQGFTGKHGTFHSEQAIKYGTNLVGGVTPKKGGKMHLSKPVFNSVKEAKEKTGANASMIYVPAKFAASAIIEAVEASIELITCITEGIPVLDMLKVKKKLRNSNSRLIGPNCPGIITPGECKIGIMPGNIHKKGSVGIVSRSGTLTYEAVAQTTDNGLGQSTCIGIGGDPINGTDFIDCLDLFLNDEETKSILIIGEIGGTAEEEAAEFFKNHKI

SEQ ID NO: 193740 - protein, 255 aa, Unknown
  Bacterial polypetide isolated from the Sargasso Sea
MNIHEYQAKQVLNKYGVPTSSGIVALKEEEIDELMKDFDADLYVVKAQIHAGGRGKAGGVKVVKDKEEARKQAHEMFGKTLVTHQTGPEGQVVKRVYVESGCGIEKEYYFSAVLDRATSRITFMASTEGGVDIEDVAEKTPEKIIKVSVDPATGLQPFHCRSLAFGLGFSGDQAKQMMKMASCVYDAFVSTDASQVEINPLVVTTEGNLLALDAKMNFDENGLFRHPEIEALRDEDEEDPQEVRASKHDLSYVRM

SEQ ID NO: 193741 - protein, 234 aa, Unknown
  Bacterial polypetide isolated from the Sargasso Sea
DKIGGSEWVVKAQVHAGGRGKAGGVKLVRSKEDAKAFAQQWLGKRLVTYQTDANGQPVTKILVESCTDIAKELYLGAVVDRSSRRIVFMASTEGGVDIEKIAHETPEKILKATIDPLVGAQPFQGRELAFQLGLEGKQVAQFAKIFVGLAKLFQDHDLALLEVNPLVIKADGDLHCLDAKINIDANAMYRQPKLKTFHDPSQDDPREAHAAKFELNYVALEGNIGCMVNGAGLA

SEQ ID NO: 193742 - protein, 123 aa, Unknown
  Bacterial polypetide isolated from the Sargasso Sea
GLGQSTCIGIGGDPINGTNFIDCLELFLKDKETESIVMIGEIGGTAEEEASEFIKKSKIKKPIVGFVAGLTAPPGRRMGHAGAIISGGKGGANDKIETMKSAGITISKSPADIGKTLFEKLKA

SEQ ID NO: 193743 - protein, 84 aa, Unknown
  Bacterial polypetide isolated from the Sargasso Sea
IHKKGTVGIVSRSGTLTYEAVAQTSENGLGQSTCIGIGGDPIHGTNFIDCLDLFLNDEKTESIVMIGEIGGTAEEEAAEFIKNH

SEQ ID NO: 193744 - protein, 258 aa, Unknown
  Bacterial polypetide isolated from the Sargasso Sea
MSVLINKDTKVICQGFTGAHGTFHSEQSIKYGTNLVGGVTPKKGGQIHLERPVFNTVKEAKDQTGANATMIYVPAKFAASAIIEAIDSSIELIVCISEGIPVLDMLKVKKRLFNSKSRLIGPNCPGIITPDECKIGIMPGNIHKKGTVGIVSRSGTLTYEAVAQTSENGLGQSTCIGIGGDPIHGTNFIDCLDMFLNDEKTESIVMIGEIGGTAEEEAAEFIKNHKIKKPMVGFVAGITAPPGRRMGHAGAIISGGKR

SEQ ID NO: 193745 - protein, 242 aa, Unknown
  Bacterial polypetide isolated from the Sargasso Sea
TIDPASGLSSFYGRAIAFSLNLKGKQIKQCVSLVSTLYKIFLETDCEMLEINPLILTKDGDLNCLDCKMAFDSNALYRQPSILSLRDESEEDPKELAASKFDLNYIALDGEIGCMVNGAGLAMATMDIIKYFGSEPANFLDVGGAATKEKVTEAFKIITADKNVKGILVNIFGGIMRCDVIAEGVVSAVKEVGLKVPLVVRLEGTNVDLGKEIINKSGLNVIAADNLGDAANKIVKEVKSGN

SEQ ID NO: 193746 - protein, 281 aa, Unknown
  Bacterial polypetide isolated from the Sargasso Sea
VNKVLIAEDAYAPDFDKTSEFYMSVLLNRDSGKNIIMYSTEGGMNIEEVAEKTPHLIFKEEIDPGIGIQPFQCRNIAFNLGLSGKAFKEMTKFVRALYAAYVGCDASLFEINPVLKTCDDRIIAVDSKVSLDDNALYRHPDYAQMRDLDEEDPIDVEADQAGLNYVNLDGNVGCMVNGAGLAMATMDIIKQSGGDPANFLDVGGTANADRVEKAFNIILKDPNVKGILVNIFGGIVRCDRVANGIVQAYKNIGNIPVPIIVRLQGTNSIEAKSIIDNSGLN

SEQ ID NO: 193747 - protein, 265 aa, Unknown
  Bacterial polypetide isolated from the Sargasso Sea
QAIKYGTNLVGGVTPKKGGQKHLDRPVFNSVIEAKDSVGADATMIYVPAKFAATAIIEAIDASIGLIVCITEGIPVQDMLKVRQKLNGSKSRLIGPNCPGIITPDECKIGIMPGNIHKRGSVGIVSRSGTLTYEAVAQTTENGLGQSTCIGIGGDPINGTNFIDCLDLFLNDEDTKSILMIGEIGGTAEEEAAEFVKNHKIKKPIVGFIAGITAPPGRRMGHAGAIISGGKGGAEDKIKKMEESGITVAKSPSIIGKTLFNKLSN

SEQ ID NO: 193748 - protein, 285 aa, Unknown
  Bacterial polypetide isolated from the Sargasso Sea
GKSGGVELIDSAKSATRFAEKWLGNRLVTYQTDKKGQLVNSILIEECTSILKELYLSAVIDRDSQKIVFIGSSEGGVNIEDVAKNSPEKIIYQGIDIDNSNTQEEALSISKVLGLNDIQTKQLIPMIENLLRLFIEKDLSLLEINPLVINENGDLKCLDAKINVDSNALFRQPELQDMHDETQEDPQEAEAAKSDLSYVSLDGNIGCMVNGAGLAMGTMDTIKFFGGNPANFLDVGGTATQERVAKAFKIILKDKEVKVVLVNIFGGIVRCDLIAEGVVAAMKEV

SEQ ID NO: 193749 - protein, 209 aa, Unknown
  Bacterial polypetide isolated from the Sargasso Sea
IKLIKSIYKMFISTDANLVEINPLILTKENKIICLDAKISFDDSALFKHPEILELRDLNEEESTEIEASKHDLAYIKLDGKIGCMVNGAGLAMATMDIIKLHGQEPANFLDVGGGASKEKVSAAFKIILSDKNVKGILINIFGGIMRCDVLAQGVVDAAKEIEINVPLVVRLAGTKFEEGKKILDNSGLKIISATDLSDAAKKVVGAIK

SEQ ID NO: 193750 - protein, 253 aa, Unknown
  Bacterial polypetide isolated from the Sargasso Sea
MNIHEHQAKEILKEFGAPVSNGVVINSIDEIKEKISKLNTKEFVLKAQIHAGGRGKAGGVKLVKNISDLETEAEKMMGKTLITHQTGPEGKQVKRLYIEEASDISKEFYLSCLIDRESSKIVFISSTEGGMDIEKVAAETPKKITTNKIEFKKEGLNEKEIENIISIFKLDDKQKKIASKLLNSLYEIIIKKDASLIEINPLIITKSNNLVCLDAKMNFDDNAIFRHPEILKLRDLNEEEPAEIEASRHDLAY

SEQ ID NO: 193751 - protein, 185 aa, Unknown
  Bacterial polypetide isolated from the Sargasso Sea
VITKSNEILCLDAKMNFDDNAIFKHPEIYKLRDLNEEDPTEIEASKHDLAYIKLEGSIGCMVNGAGLAMATMDIIKLYGEEPANFLDVGGGASREKVTAAFKILLSDKNVKGVLINIFGGIMQCDVLAQGVVEAAKDVKLKVPLVVRLAGTNFKEGKKILDASGLEILSADNLNDAAKKIVKAIK

SEQ ID NO: 193752 - protein, 250 aa, Unknown
  Bacterial polypetide isolated from the Sargasso Sea
MSVLVNKNTKVICQGFTGKHGTFHSEQALKYGTRLVGGVTPNKGGQKHLNLPVFNTVQEAKDKTSANATMIYVPPKFAGAAIIEAIDAKMELIVCITEGIPVIDMIKVKKILKKSSSRLIGPNCPGIITPDECKIGIMPGNIHKKGSVGIVSRSGTLTYEAVAQTSANNIGQSTCIGIGGDPINGTNFIDCLKLFLEDDETESIVMIGEIGGTAEEEAAEFLKKEKIKKPTVGFIAGLTAPPGRRMGHAG

SEQ ID NO: 193753 - protein, 133 aa, Unknown
  Bacterial polypetide isolated from the Sargasso Sea
DGEIGCLVNGAGLAMATMDIIKLKGSSPANFLDVGGSATKEKVTEAFKIILSDQSVKGILVNIFGGIMRCDIIAEGVVAAASDLKIDKPLVVRLSGTNVSEGKSILANSDLEIISADNLDDAAEKIVASVNGN

SEQ ID NO: 193754 - protein, 261 aa, Unknown
  Bacterial polypetide isolated from the Sargasso Sea
AQIHAGGRGKAGGVKILDNLNELEKSAKELLGKKLITHQTGPEGREVKRLYVEVSSNIEKEFYLSCLVDRATSKIAFITSDQGGMDIEEVAAKSPNKILTTKVELNEEISKEDCEKIIKIFDLEDSSKKEAISLIKSIYKMFIKTDANMVEINPLILTKEKNIVCLDAKVNFDSNALFRHPEILELRDLNEEDPAEIEASKHDLAYIKLDGSIGCMVNGAGLAMATMDIIKLYGEEPANFLDVGGGASKEKVSAAFKIILS

SEQ ID NO: 193755 - protein, 169 aa, Unknown
  Bacterial polypetide isolated from the Sargasso Sea
FDDNAIFRHPDIYELRDLNEEDPTEIEANKQELSYIKLDGNIGCMVNGAGLAMATMDIIKLFGGSPANFLDVGGGASKDKVAAAFKMILSDKNVKAILINIFGGIMRCDVLALGVVEAAKEMKIDIPLVVRLAGTNYEKGKKILDDSKLKIISASDLSEAAKKVVEVTK

SEQ ID NO: 193756 - protein, 147 aa, Unknown
  Bacterial polypetide isolated from the Sargasso Sea
EEVVGIVSRSGTLTYEALAQTTEIGLGQSTCIGIGGDPINGTNFIDCLDLFLNDDETQSILMIGEIGGTAEEEAAEFIKNHNIKKPIVGFIAGITAPPGRRMGHAGAIISGGKGGAKDKIKKMEECGITVAKSPSIIGKTLFNKLSN

SEQ ID NO: 193757 - protein, 284 aa, Unknown
  Bacterial polypetide isolated from the Sargasso Sea
AKGKEVKRLYIEEGCDIGKEFYLSLLVDRKTSKITIIASTEGGMDIEKVAAENPEKIHTISIDSSTGLKPHHARRLSNALELETYTSKQLWGFLNCLYKAFISLDASLIEINPLIVTSKGDLIALDAKMSFDDNALFRQLHLNELRDLNEEDPAELRASEFDLNYIKLDGSIGCMVNGAGLAMATMDIIKIEGGEPANFLDVGGGATIEKVNEAFKIILSDKNVKGILVNIFGGIMRCDVIAQGVVEAAKSLGLKKPLVVRLEGTNVEEGKKIMSESGLDIIPA

SEQ ID NO: 193758 - protein, 268 aa, Unknown
  Bacterial polypetide isolated from the Sargasso Sea
MNIHEHQSKDLLKEFGAPVSNGFVILNPEEIKEKIKFINSKKLVIKAQIHAGGRGKAGGVKLVDRSEIQSEVDKMFGKILVTHQTGPEGKQVKRIYIQEAYDIEKELYLSCLIDRESSKIVFISSTEGGVDIESVAKKTPEKILTTKIDLKKSLDKFDKEKILKIFPFSKNQRQDAENLLDALYNILIQKDASLIEINPLVLTKQKKIICLDAKMNFDENALFRRPDIFKLRDLNEEEPAEIEASKHGLAYIKLNGSIGCMVNGAGLA

SEQ ID NO: 193759 - protein, 219 aa, Unknown
  Bacterial polypetide isolated from the Sargasso Sea
MSVLINRDTRVICQGFTGSQGTFHSEQAIAYGTNMVGGVTPGKGGQKHLSLPVFDTVSEAVEETGANASVIYVPPPFAADSILEAIDAKIELIICITEGIPIMDMVAVKAALNDSFSTLVGPNCPGVITPGECKIGIMPGHIHKPGKVGIVSRSGTLTYEAVAQTSVIGLGQSTCIGIGGDPINGTNFVDSLSLFLEDEQTEAILMIGEIGGDAEEKAA

SEQ ID NO: 193760 - protein, 176 aa, Unknown
  Bacterial polypetide isolated from the Sargasso Sea
MNIHEYQAKELFKNYGINVLKGKIAYTAQEAFNVASLIKTKKWIVKAQIHAGGRGKGGGVKLANSLDEVKIISDKIIGMNLVTHQTGSEGKKVLKVYVEEACDIKKEFYLGIVLDRSISKFVIMASTEGGMDIENVAENYPDKIYKVVVDPLLGIETYQIKKIAFFLKIPKETIND

SEQ ID NO: 193761 - protein, 137 aa, Unknown
  Bacterial polypetide isolated from the Sargasso Sea
WTLTYEAVAQTTANGIGQSTCIGIGGDPINGTNFIDCLELFLKDKDTKSIVMIGEIGGTAEEEAAEFLKKEKVKKPMVGFIAGLTAPPGRRMGHAGAIISGGKGGAENKIEIMKSAGITISKSPADIGKTLYQKLNG

SEQ ID NO: 193762 - protein, 247 aa, Unknown
  Bacterial polypetide isolated from the Sargasso Sea
SPNKILTTKVELNDEISNEDCEKIVKIFNLEGSYKNEAISLIKSIYKMFIKTDANMVEINPLILTKEKKIVCLDAKVNFDSNALFRHPEVSELRDLNEEDPAEIEASKHDLAYIKLDGSIGCMVNGAGLAMATMDIIKLYGEEPANFLDVGGGASKEKVSAAFKIILSDKNVKGILINIFGGIMRCDVLAQGVVDAAKEINISVPLVVRLAGTNFKEGKEILDNSGLILISAENLDDAAKKIVEAIR

SEQ ID NO: 193763 - protein, 263 aa, Unknown
  Bacterial polypetide isolated from the Sargasso Sea
MNLHEYQAKGLFAEYGLPVSEGYAVDTAEEAVEAAKKIGGDRWVVKVQVHAGGRGKAGGVKLVDSLEEVREFANQWIGKNLVTIQTDENGQPVSKIFVESCTEIETELYLGAVIDRGSRRVVFMASTEGGVEIEKVAEETPEKILRVAIDPFVGAQPYQGRDLAFRLGLKDKQIRQFADLFMGLSKLFMELDCSLLEINPLVVTSEGDVHCLDAKVNIDGNALYRQKRISEMNDPSQEDEREAQAAEYNLNYVALDGNIGCMV

SEQ ID NO: 193764 - protein, 263 aa, Unknown
  Bacterial polypetide isolated from the Sargasso Sea
YKYGTNLVGGVTPKKGGQKHLDRPVFNSVLEAKNEVGADATMIYVPAKFAAAAIIEAIDASVELIVCITEGIPIQDMLKVRQKLSGSSSRLIGPNCPGIITPDECKIGIMPGSIHKRGSVGIVSRSGTLTYEAVAQTTENGLGQSTCIGIGGDPINGTNFIDCLDLFLNDSETESILMIGEIGGTAEEEAADFIKNHKIKKPIVGFIAGITAPPGRRMGHAGAIISGGKGGAEDKIKKMEECDITVAKSPSIIGKTLFDKLSN

SEQ ID NO: 193765 - protein, 212 aa, Unknown
  Bacterial polypetide isolated from the Sargasso Sea
EQGKNLIKAIYKMFISTDASMVEINPLILTKEQNIICLDAKVNFDDNALFKHPEIVELRDLSEEDPTEIEASKHNLSYIKLDGSIGCMVNGAGLAMATMDIIKLYGEEPANFLDVGGGASKEKVSAALKLILSDKSVKGILINIFGGIMRCDVLAQGVVDAAKEMDINIPLVVRLAGTNFKEGKKILDNSGLKLISAENLDDAAKKIVKAIK

SEQ ID NO: 193766 - protein, 257 aa, Unknown
  Bacterial polypetide isolated from the Sargasso Sea
GWILKKLLQKHPDKNVTTKMKIKENISQTDIDKIILPFDFDEDQKDDANKLINALYKIMLDKDATLIEINPLIITKNKKILCLDAKMNFDDNAIFRRPEILKLRDLNEEDPAEIEASKHDLAYIKLDGSIGCMVNGAGLAMATMDIIKLYGKEPANFLDVGGGASKEKVSAAFKLILSDSNVKGILINIFGGIMRCDVLAQGVVEAAKEINLSVPLVVRLAGTNFKEGKDILDKSGLKILSAEDLNDAAKKIVEAIK

SEQ ID NO: 193767 - protein, 287 aa, Unknown
  Bacterial polypetide isolated from the Sargasso Sea
KETTKMFGKILVTHQTGPEGKEVKTVYIQEAYDIDKEFYLSCLVDRESSKIAFISSTEGGVDIEAVAKDNPEKISTNKINLKKELHETEIDNIIKIFQLSENQKKEAKKIIIAIYNILIKKDASLVEINPLVITKQKKLICLDAKMNFDSNALFRRPEILALRDLNEEEPAEIQASKHNLAYIKLNGSIGCMVNGAGLAMATMDIIKLYGQEPANFLDVGGGASKEQVAAAFKLILSDKKVKGILINIFGGIMRCDVLAQGVVEAAKETNIKVPLVVRLAGTNFEER

SEQ ID NO: 193768 - protein, 126 aa, Unknown
  Bacterial polypetide isolated from the Sargasso Sea
TENGLGQSTCIGIGGDPINGTNFIDCLDLFLKDKDTQSILMIGEIGGTAEEEAADFIKNHKIKKPIVGFIAGVTAPPGRRMGHAGAIISGGKGGAKEKIKKMEDCGITMANSPSKIGKTLLNKLSN

SEQ ID NO: 193769 - protein, 156 aa, Unknown
  Bacterial polypetide isolated from the Sargasso Sea
LRDKTQEDEKEVYASDRGLNYVSLEGNIGNIINGAGLAMASMDMIKLAGGEPANFLDVGGGATPEKIVKAFRLITMDKKVKVILVNIFAGINRCDWVAEGIVQALEKIEIKVPLVIRLAGTNVEKGNKILRDSKLNYIEANTLEDAANKAVAALKK

SEQ ID NO: 193770 - protein, 262 aa, Unknown
  Bacterial polypetide isolated from the Sargasso Sea
TSSKIAFISSDQGGMDIEEVASSSPEKIITTKVDMSDEISESDCEKIINIFNLNEDTKKQAIILIKSIYKMFVNTDANMVEVNPLILTKEEKIVCLDAKVNFDSNALFRHPEIVELRDLNEEDPTEIEASKHDLAYIKLDGSIGCMVNGAGLAMATMDIIKLYGKEPANFLDVGGGASKEKVSAALKIILSDKNVKGILINIFGGIMRCDVLAQGVVDAAKEINISVPLVVRLAGTNFKEGKEILDNSGLKLISAENLDDAA

SEQ ID NO: 193771 - protein, 262 aa, Unknown
  Bacterial polypetide isolated from the Sargasso Sea
MSVLIDKNTKVICQGFTGSHGTFHSEQSIKYGTNLVGGVTPKKGGQTHLERPVFNTVKEARAATGADATMIYVPAKFASSAIIEAIDASIELIVCISEGIPILDMLKVKKKLQDSNSRLIGPNCPGIITPNECKIGIMPGNIHKKGSVGIVSRSGTLTYEAVAQTTENNLGQSTCIGIGGDPINGTNFIDCLDLFLNDDQTESILMIGEIGGTAEEEAAEFVKNHKIKKPIVGFIAGVTAPPGRRMGHAGAIISGGKGSARK

SEQ ID NO: 193772 - protein, 187 aa, Unknown
  Bacterial polypetide isolated from the Sargasso Sea
MNIHEYQAKQLLSKYGVGVLDGGVASNSAEAVTVAQRLGGPIWVVKSQIHAGGRGKGKFLESTAGNSGGVRVVKSLDAVRDNCDQMIGAHLVTNQTGEEGKEVKKVYIEDGCEIQKELYLSLLVDRATSKVTVIASTEGGMDIELVAEQSPEKILKLEISEEKGLVKTEVIDLAKQLGLGEKAIEEA

SEQ ID NO: 193773 - protein, 244 aa, Unknown
  Bacterial polypetide isolated from the Sargasso Sea
KIITVNVPGGSIIDQNSLNKLTEGLNIDQNLSNDFCDQIQKIYNSFLSSDASLVEVNPFVLTGEGNFLALDAKVSIDDNALYKHKDVASMRDETEEDPAEIEASKHELNYVKLDGQIGCMVNGAGLAMGTMDIIKLHGGSPANFLDVGGGATKERVAKAFSIILQDPNVKAILVNIFGGIMKCDIIAEGVVAAAKELSIQVPLVVRLEGTNVDLGKEILNKSGLSIISADNLEDAAQKAVRALN

SEQ ID NO: 193774 - protein, 279 aa, Unknown
  Bacterial polypetide isolated from the Sargasso Sea
QGFTGSQGTFHCQQAIEYGTKMVGGVTPGKGGQSHLNLPVFDTLDKAIKVTSANASVIYVPPAFAADSILEAIDAKIDLVVCITEGIPVLDMVKVKNALKYSDSRLIGPNCPGIITPNECKIGIMPGHIHKKGKIGIVSRSGTLTYEAVGQTTAAGLGQSTCVGIGGDPLNGTNFIDCLDLFLSDEETDAIIMIGEIGGTAEEEASEFLKSSKIKKPVAGFIAGRTAPPGRRMGHAGAIVSGKSGGAEAKIDAMRSAGINVTDSPGMLGEAIIEAMKNF

SEQ ID NO: 193775 - protein, 290 aa, Unknown
  Bacterial polypetide isolated from the Sargasso Sea
KGQPVSVVMVEPCIEIEKELYLSAVVDRSAKAISIIASGEGGVNIEEVAETNPEKIFYEKIDLIIGPQPYQARRLSEALHLDAQQSNEFWNLFKNLVKMFVDCDMSLVEINPLIITSEGHLHCLDAKVNLDSNALFRQSNLANMRDLSQEDPQECEASNHDLSYVSLDGNIGCMVNGAGLAMGTMDTIKFYGGEPANFLDVGGAATKERVAKAFKIILNDPKVKVILVNIFGGIVRCDLIAEGIIAAVKETELVIPIVVRLEGNNSKLGSDMLQKSSLAIESDNDLKMQQ

SEQ ID NO: 193776 - protein, 317 aa, Unknown
  Bacterial polypetide isolated from the Sargasso Sea
KAGGIKLVNNLEELEKEAKNLIGKILVTHQTGPNGRKVQRLYVEEASSINKEFYLSCLVDRESSKIAFISSDQGGMDIEEVAKNNPEKILTTKVEFKDQISDENCKQIIEIFNLDQEAYKEAQKLIKSIYKMFIEKDASLVEINPLILTKDNKIVCLDAKMKFDDNALFKHPEIIDLRDFNEEEETEIEASKYDLAYIKLDGKIGCMVNGAGLAMATMDIIKLYGEEPANFLDVGGGASKEKVSAAFKIILSDKNVKGILINIFGGIMRCDVLAKGLVEAAREIKINVPLVIRLAGTNYKEGKKILDNSGLKIISAS

SEQ ID NO: 193777 - protein, 266 aa, Unknown
  Bacterial polypetide isolated from the Sargasso Sea
MVSTEGGVEIEKVAAESPDKIIKEWIHPEDGLTKDQAKRLCDALSLKGIQQDSGIEIFTALWKAFNSLDCSLMEINPLVLTKKDEVIALDAKINFDGNGLFRHPELSELRDETEEDPAEAEASSYNLNYIKLDGNVGCMVNGAGLAMGTMDIIKLKGGEPANFLDVGGVANPETVANGFKIILSDPNVKSILINIFGGIVRCDRVAQGVINAMETISVNVPVIIRLEGTNAKEASSLLNNSPLNFIVANSLSDAAEKAVSATNMES

SEQ ID NO: 193778 - protein, 199 aa, Unknown
  Bacterial polypetide isolated from the Sargasso Sea
ASELTYGLGIDQINPKLLRPAAKLFSSLYQTFVHEDCSLVEINPLVLTGDDRVVALDAKLSFDDNALFRHRDNADMRDLTEEDPLETEAGEYELNYIKLDGSIGCMVNGAGLAMGTMDIIKTYGGEPANFLDVGGTATKETVEKGFQIITQDPNVRCILINIFGGIVRCDMVASGIVEAFRKVNLQIPVVVRLEGTNAE

SEQ ID NO: 193779 - protein, 275 aa, Unknown
  Bacterial polypetide isolated from the Sargasso Sea
HAGGRGKAGGVKLVDQIEQLDQEVNQMFDKILKTYQTGPEGKKVKKVYVEEASNIFKEFYLSCLIDRESSKIAFISSTEGGVDIEKVATDNPNRIITTKFDLKDKIDEEDINKIIKPFNFQDNQKEDGKRLVKILYKILIEKDASLIEINPLIITKDQKLICLDAKMNFDDNAIFRRPEILELRDINEEEPAETEARKHDLAYIKLNGSIGCMVNGAGLAMATMDIIKLHGEEPANFLDVGGGASKEKVESAFKLILSDKNVKGILKNIFGGIMR

SEQ ID NO: 193780 - protein, 215 aa, Unknown
  Bacterial polypetide isolated from the Sargasso Sea
FAAAAIIEAIEASIELIVCITEGIPIQDMLRVKQRLLKSKSRLIGPNCPGIITPGECKIGIMPGNIHKRGSVGIVSRSGTLTYEAVAQTTENGLGQSTCIGIGGDPINGTNFIDCLDLFLNDDETQSILMIGEIGGTAEEEAAEFVKNHRIKKPMVGFIAGVTAPPGRRMGHAGAIISGGKGGAQDKIKKMEDCGITIADSPSKIGKTLYNKLSN

SEQ ID NO: 193781 - protein, 168 aa, Unknown
  Bacterial polypetide isolated from the Sargasso Sea
CPGIITPDECKIGIMPGSIHKKGSVGIVSRSGTLTYEAVAQTTENGLGQSTCIGIGGDPINGTNFIDCLDLFLKDDETQSILMIGEIGGTAEEEAADFIKNHKVKKPIVGFIAGVTAPPGRRMGHAGAIISGGKGGAVDKIKKMEDCGITIANSPSKIGKTLFNKLSN

SEQ ID NO: 193782 - protein, 288 aa, Unknown
  Bacterial polypetide isolated from the Sargasso Sea
MSILVNKDTKVICQGFTGSQATLHCSQAIEYGTSIIGGVTPGKGGESHLDLPVFNSTKEAQQELEIDATIIFVPAKFCKDSVQEAIDAEIPLIICITEGIPTLDMMKLKQNADSAGCRIIGPNCPGVITPDQCKLGIMPGYIHKPGKIGIVSRSGTLTYEAVDQTTQAGLGQSSCVGIGGDPIPGSSFIDILLLFEEDSETEGIVMVGEIGGTAEEEAAEFIQSNVSKPVVAYIAGVSAPPGKRMGHAGAIIAGGKGTAEDKFLALEKAGVHTTRSPAKIGEEIKQLV

SEQ ID NO: 193783 - protein, 133 aa, Unknown
  Bacterial polypetide isolated from the Sargasso Sea
NHLSDLIKNMYLFFIEKDASLVEVNPLIVTNTNKLLCLDAKVNFDDNAIYRHPEIEELRDENEEDEYEREAAKYDLAYIKLDGNIGCMVNGAGLAMASLDIIKMYGGEPANFLDVGGGASKEKVSSAFKIILS

SEQ ID NO: 193784 - protein, 285 aa, Unknown
  Bacterial polypetide isolated from the Sargasso Sea
YDMKKEFYLSCLVDRESSKIAFISSTEGGVDIESVANNNPEKILTTKIDLKKSLTDDDIQRIIKIFSLDSSQKKDAENLLNAVFNILISKDASLIEINPLVITKQKKLICLDAKMNFDSNAMYRRPEILKLRDLNEEEPAEIEASKFGLSYIKLNGSIGCMVNGAGLAMSTMDIIKLYGEEPANFLDVGGGASKEQVSAAFKLILSDKKVKGILINIFGGIMQCDVLAQGVVEAAKEINIKIPLVVRLAGTNFEKGKEILEKSGLKILSASDLNDAAKKIVNAIK

SEQ ID NO: 193785 - protein, 146 aa, Unknown
  Bacterial polypetide isolated from the Sargasso Sea
TEIEASKHDLAYIKLDGSIGCMVNGAGLAMATMDIIKLYGKEPANFLDVGGGASKEKVSAALKIILSDKNVKGILINIFGGIMRCDVLAQGVVDAAKEINISVPLVVRLAGTNFKEGKEILDNSRLKLISAENLDDAAKKIVEAIK

SEQ ID NO: 193786 - protein, 235 aa, Unknown
  Bacterial polypetide isolated from the Sargasso Sea
MAIWIEENAKVLVQGITGNQGTFHATKMVEYGTNIVGGVTPRKGGQTVDLGAVQAPVWDAMAEAIEATDADASVIYVPPRFAGAAIIEAADAFASIRGNGVIVCITEGIPTLDMVKAAEHVAKYPDVRLIGPNCPGIITPGETGGAKIGIMPGHIHAKGRIGIVSKSGTLTYEAVAQAMSIDEGQSTCVGIGGDPVNGTGFIDCLAAFENDEQTAAVVMIGEIGGNAEEEAAAWV

SEQ ID NO: 193787 - protein, 286 aa, Unknown
  Bacterial polypetide isolated from the Sargasso Sea
IKIQKLFAKDLLGAHGTFHSEQALKYGTKLVGGVTPKKGGQKHLGLPVFNSVAEAKEKTKATATMIYVPPKFAASAIIEAIESKMDLVVCITEGIPVIDMINVKKILKQSKTRLVGPNCPGVITPNECKIGIMPGSIHKKGSVGIVSRSGTLTYEAVAQTTFNGLGQSTCIGIGGDPINGTNFIDCLELFLRDDDTKSIIMIGEIGGTAEEEASQFIKDSKIKKPMVGFVAGLTAPPGRRMGHAGAIISGGKGGANDKIELMKSAGISISKSPADIGKTLFEKLKA

SEQ ID NO: 193788 - protein, 256 aa, Unknown
  Bacterial polypetide isolated from the Sargasso Sea
MNIHEHQAKDILKEFGAPVSNGIVVSSIGEIKEKITKLKSKQFVLKAQIHAGGRGKAGGVKLVTNIHELETEAKKMMGKILVTHQTGPEGKEVKRLYIEEASDILNEFYLSCLIDRESSKIAFISSTEGGMDIEKVASETPDKIITNKIDLKDTGPSNDEVEKIINIFKFTGDQKEIAKKLIKSLYRIITEKDASLIEINPLIITKENKIVCLDAKMNFDDNAIFRRPEISKLRDLNEEDPTETEASKHDLAYIKL

SEQ ID NO: 193789 - protein, 315 aa, Unknown
  Bacterial polypetide isolated from the Sargasso Sea
SGCKRKGWRIIVCNSPLEVAQATDKLLGKKLVTNQTGPEGKIVNRIYIEEATDIEKELYLGLVFDRSSESIMVVASTEGGMSVEEIAKEKPETIIRSKIEVAVGIQSFQARELAFGLGIESDLIARASDTIIGCAKAFSELDATMVEVNPLVISKQKQILALDCKMSFDNNAMFRRNKVSELRDKSQEDEKEVYASDRGLNYVSLEGNIGNIINGAGLAMASMDMIKLAGGEPANFLDVGGGATPEKIVKAFRLITMDKKVKVILVNIFAGINRCDWIAEGIVQALEKIEVKVPLVIRLAGTNVEKGNKILRTVK

SEQ ID NO: 193790 - protein, 134 aa, Unknown
  Bacterial polypetide isolated from the Sargasso Sea
TYEAVAQTTENGLGQSTCIGIGGDPINGTNFIDCLDLFLNDDETESILMIGEIGGTAEEEAADFIQNHKIKKPIVGFIAGITAPPGRRMGHAGAIISGGKGGAKDKIKKMEDCGITMANSPSKIGKTLFDKLSD

SEQ ID NO: 193791 - protein, 136 aa, Unknown
  Bacterial polypetide isolated from the Sargasso Sea
EGSIGCIINGAGLAMATMDMIKHSGGEPANFLDIGGGASPERVAKAFNLVLSDENVKGVLVNIFAGINRCDWVAQGVVKAMQDLNIQVPVVVRLSGTNVEEGRRILEESSMPLITADTLAEAAEKSVAAVSEEATV

SEQ ID NO: 193792 - protein, 297 aa, Unknown
  Bacterial polypetide isolated from the Sargasso Sea
GKEVKRLYVESSSKISKEFYLSCLVDRASSKIAFISSDQGGMDIEEVAKNNPKKIVKTKVNLEDKISDQDCEKIVKIFNLDLDAKKQSINLIKSIYKMFIDTDANLVEINPLILTKENKIICLDAKMSFDDNALFRHPEILDLRDLNEEDPTEVEASKHNLAYIKLDGNIGCMVNGAGLAMATMDIIKLYGKQPANFLDVGGGASKEKVSAALKIILSDKNVKGILINIFGGIMRCDVLAQGVVDATKEIKINLPLVVRLAGTNFIEGKKILDNSGLKIISAENLDDAAKKIVGAIK

SEQ ID NO: 193793 - protein, 195 aa, Unknown
  Bacterial polypetide isolated from the Sargasso Sea
MNIHEHQAKKILSDFGAPISKGVVILKKDEIDNKLSLLQGDKFVIKAQIHAGGRGKAGGVKVVKKNKSLKKEIEDMFGKILVTHQTGPEGKEVKRVYVEEASDIEKEFYLSCLIDRETSKIAFISSTAGGMDIETIAKEDPKKILTTKIDLTDKLDIKDIEKILKPFNFNTEQKLEGTKVVNSMFEILIKKRCIT

SEQ ID NO: 193794 - protein, 313 aa, Unknown
  Bacterial polypetide isolated from the Sargasso Sea
EHQAKELLRQYNIPTPAGYVAFTIDEAIKAAKKLPGPVFVVKAQIHAGGRGKAGGVKVVKDLDEVKNSAETILGKKLITHQTGSEGKLVQRLYIEDGCDISAEYYFSMVVDRATSRVSVIASTEGGMDIEQVAKETPEKILSFNIDPTIGFQPFHARLIANELKLEGSSFKQAGKFFNQLYKLFTEKDASLLEINPLVLTSENSLIALDAKMSFDNNALFKNSDIISLRDETEEDPAEILASKFDLAYIKLDGTIGCLVNGAGLAMATMDIIKLKGASPANFLDVGGSATKEKVTEAFKIILSDPAVEGILVN

SEQ ID NO: 193795 - protein, 250 aa, Unknown
  Bacterial polypetide isolated from the Sargasso Sea
MSVLVNKNTKVICQGFTGSHGTFHSEQAIKYGTNLVGGVTPKKGGQKHLDRPVFNSVLEAKNEVGADATMIYVPAKFAAAAIIEAIDASVELIVCITEGIPIQDMLKVRQKLSGSSSRLIGPNCPGIITPDECKIGIMPGSIHKRGSVGIVSRSGTLTYEAVAQTTENGLGQSTCIGIGGDPINGTNFIDCLDLFLNDSETESILMIGEIGGTAEEEAAEFIKNHKIKKPIVGFIAGITAPPGRRMGHAG

SEQ ID NO: 193796 - protein, 249 aa, Unknown
  Bacterial polypetide isolated from the Sargasso Sea
MNIHEHQAKQILKKYGAVVPEGVFALNVDELIEKAKTLKTDKYVLKAQIHAGGRGKAGGVKILNSIEELTVAAKELLGKTLVTHQTGPEGREVKRLYVEESSNIDKEFYLSCLVDRASSKIAFISSDQGGMDIEEVASNSPEKIITTKVDMADEISESDCEKIIKIFNLNEDAKKQAILLIKSLYKMFVSTDANMVEVNPLILTEEEKIVCLDAKVNFDSNALFRHPEIVELRDLNEEDPTEIEASKHD

SEQ ID NO: 193797 - protein, 304 aa, Unknown
  Bacterial polypetide isolated from the Sargasso Sea
MDIHEYQAKKILSNFGVTIPRGGIVYSPENAENKAREIGGSRWVVKAQIHSGARGKAGGIIVCNTPLEVAQATDKLLGKKLVTNQTGPEGKIVNRIYIEEATDIEKELYLGLVFDRSSESIMVVASTEGGMSVEEISKEKPETIIRSKIEVAVGMQNFQARELAFGLGIEPDLIRRASDTIIGCYKAFSELDATMVEVNPLVISKQKQILALDCKMSFDNNAMFRRSQVSELRDKTQEDSKEIFASDRGLNYVSLDGNIGNIINGAGLAMASMDMIKLAGGAPANFLDVGGGATPEKIVKAFKL

SEQ ID NO: 193798 - protein, 183 aa, Unknown
  Bacterial polypetide isolated from the Sargasso Sea
MNIHEHQAKEILKEFGAPVSNGIVIFSLKDLKKEITKLKSKEFVLKAQIHAGGRGKAGGVKLVKNVTDLENEASKMFGKILVTHQTGPEGKEVKRLYIEEASEISKEFYLSCLIDRETSKIAFISSTEGGMDIEKVASETPGKIITKKIDLSEEGPSKNEIQEIISIFKFSTDQNKEAVKIIK

SEQ ID NO: 193799 - protein, 219 aa, Unknown
  Bacterial polypetide isolated from the Sargasso Sea
DPKLIRSTASIFMALYKTFVEEDCSLIEINPLVLTREGFVFALDAKLTFDDNALYRHKGNMAFRDRDEEDPLEVEASDADLNYIKLDGNIGCMVNGAGLAMGTMDIIKTYDGEPANFLDVGGGATQETVEKAFRLITRDPNVKCILINIFGGIVRCDMVAAGVIEAFKNVNLKIPVVVRLEGTNSAEARTLVSESGLGESLQMAEGIQQAAQKAVAAVK

SEQ ID NO: 193800 - protein, 279 aa, Unknown
  Bacterial polypetide isolated from the Sargasso Sea
MSVLVNKETRVICQGFTGSHGTFHSEQSLKYGTKLVGGVTPKKGGQKHLGLPVFNSVKEAKESEGANATMIYVPAKFAAAAIIEAIDESIELIVCITEGIPIQDMLKVKQKLSKSKSRLIGPNCPGIITPEECKIGIMPGNIHKRGSVGIVSRSGTLTYEAVAQTTENGLGQSTCIGIGGDPINGTNFIDCLDLFLNDKETESILMIGEIGGTAEEEAAEFIKNHEIKKPIVGFIAGVTAPPGRRMGHAGAIISGGKGGAQDKIKKMQDCGITIANSPS

SEQ ID NO: 193801 - protein, 258 aa, Unknown
  Bacterial polypetide isolated from the Sargasso Sea
KGGLAYSPENAKDRATELGGDLWVVKAQIHSGARGKAGGIIVCKSEQEVSDAANKLLGKTLVTHQTGPEGKTVQRIYVEEGTVIKKEFYLGLVFDRSTESIMVVASSEGGMSIEEIAQEKPESLIKTKIEAAVGMQAFQAREVAFKLGLEAKAINRCAQAILGAYKAFSTSDATMVEINPLVLTGDDHVVALDCKMSFDDNALFRNPNLAELRDKSQEDPKETYAADRGLNYIPLDGDIGNIINGAGLAMASMDMIQL

SEQ ID NO: 193802 - protein, 273 aa, Unknown
  Bacterial polypetide isolated from the Sargasso Sea
IHAGGRGKAGGVKIIDNLTLLEEEANKLFGKTLFTHQTGPSGREVKRLYVETASEIEKEFYLSCLVDRASAKIAFISSDQGGMNIEEVAIKLPEKIITTKVDFNENISEEDCSKIIKIFDLDNNASKQAINLIKSIYKMFIDTDANLVEINPLILTKKNKIVCLDAKMTFDENALFKHPEIQKLRDFNEEEKTEIEASKYDLAYIKLDGNIGCMVNGAGLAMATMDIIKLYGEEPANFLDVGGGASKEKVSAAFKIILSDKNVKGILINILEE

SEQ ID NO: 193803 - protein, 317 aa, Unknown
  Bacterial polypetide isolated from the Sargasso Sea
KEILNSNKVPIPSGKVAKSGIEAKEIATLLGGNCVVKAQVHAGGRGKAGGIKLANNPNEALQHAENMIGSYLKTFQSGDTEFPINEVYIEKASSILKEYYLAVTMDFDFKCPVIIFSTEGGMNIEEVAEKYPDKIIKIHVDPLVGPSPYKIRNLISFFKFDKEVSSQLFKIITQLYEIFISRDSTLIEINPLALVDGNNLVALDAKITIDDDALFRHKDLIELFDESQINKSELNAQKNDLAYIKLNGGEVGCMVNGAGLAMATMDITMKAGALPANFLDVGGSASEERIMEAYNIITSDTDVKLILVNLLEGYEVR

SEQ ID NO: 193804 - protein, 225 aa, Unknown
  Bacterial polypetide isolated from the Sargasso Sea
MNIHEHQAKEILKEYGAPVSNGVAITNLDELKLKISSLNSKKFVLKAQIHAGGRGKAGGVKLVHDIQELEDEASQMMGKTLVTHQTGPEGKQVKRLYVEEASEIEKEFYLSCLVDRETSKIAFISSTEGGMDIEKVASKQPKKIITTKFELKDELSNNEIDKIILPFNLNQNQKTDAYKLVRALYKILIEKDATLIEINPLIVTTKGKLICLDAKMNFDDNALFR

SEQ ID NO: 193805 - protein, 223 aa, Unknown
  Bacterial polypetide isolated from the Sargasso Sea
MNIHEHQAKELFDGYDIPVSKGSVAYEKSQINEAVEKVKGPIWVVKAQIHAGGRGKGGGVKVVSSKEEAVNEAEKMFGMNLITPQTGPAGKEVKRIYIENGSDIKKELYLSCLLDRATSKVAFIVSKMGGMDIEAVAKDTPENITTVQIEPSIGVTENDINIISKAFELKKDLEGQLSDLIKNMYKFFLEKDASLVEVNPLIITETDKLLCLDAKVNFDDNAL

SEQ ID NO: 193806 - protein, 243 aa, Unknown
  Bacterial polypetide isolated from the Sargasso Sea
KIEAAVGMQAFQVREIAFKLGLEAKAINRCAQAILGAYKAFSTSDATMVEINPLVLTGDDHVVALDCKMSFDDNALFRNPELAELRDKSQEDPKETYAADRGLNYIPLDGDIGNIINGAGLAMASMDMIQLAGGQPANFLDVGGGATPEKFVKAFKLISGDPKVKVILINIFAGINRCDWVAQGIVDALNQINISQPLVIRLAGTNVDEGIKILKDSKIKYIEAYTLEDAANKAVKALKELEE

SEQ ID NO: 193807 - protein, 281 aa, Unknown
  Bacterial polypetide isolated from the Sargasso Sea
IAKELYLSAIIDRDSQEIMFIGSSEGGVNIEEVAKNTPEKIIYQPMIYKDSSSSKNAENIAKVLRLNQEQINQFIPMIENLLRLFVEKDLSLLEINPLVITKNGDLHCLDAKINIDSNALYRQPEIEEMHDESQEDSQEAEAAKNDLSYVSLEGNIGCMVNGAGLAMGTMDTIKFFGGNPANFLDVGGTATQDRVAKAFKIILKDPDVKAVLVNIFGGIVRCDLIADGIIAAIKEIEVKIPVVVRLEGNNADLGAKILSKSNIKIESINNLADAAKKVVEL

SEQ ID NO: 193808 - protein, 240 aa, Unknown
  Bacterial polypetide isolated from the Sargasso Sea
AKITTGANASAIYVPPPFAADAILEAVDAEMDLIVCITEGIPILDMMRVKAVLSRSNSILIGPNCPGVITPGQCKIGIMPGHIHKKGTVGVVSRSGTLTYEAVDQTTKIGLGQSSCIGIGGDPIKGTEFIDVIDKFLNDDETQSIIMIGEIGGSAEEETCEYLIKERKKGRSKPIAGFIAGRTAPKGRRMGHAGAIVAGGMGAAEDKIEAMKKAGVVVSDSPATLGEAVQEAIKKVSQSY

SEQ ID NO: 193809 - protein, 261 aa, Unknown
  Bacterial polypetide isolated from the Sargasso Sea
YGTNLVGGVTPKKGGQIHLERPVFNTVKEAKDQTGANATMIYVPAKFAASAIIEAIDSSIELIVCISEGIPILDMLKVKRKLSNSKSRLIGPNCPGIITPGECKIGIMPGNIHKKGTVGIVSRSGTLTYEAVAQTSENGLGQSTCIGIGGDPINGTNFIDCLDLFLKDEETESIVMIGEIGGTAEEEAAEFIKNHKIKKPMVGFVAGITAPPGRRMGHAGAIISGGKGNADEKIKIMEKSGITMAKSPSEIGITLLNKLSN

SEQ ID NO: 193810 - protein, 160 aa, Unknown
  Bacterial polypetide isolated from the Sargasso Sea
PKINDMYDETQEDPQEAEAANNDLSYVSLDGNIGCMVNGAGLAMGTMDTIKYFGGNPANFLDVGGTATQERVTKAFKIILRDPDVKVVLVNIFGGIVRCDLIAEGVIAAIKDVDIKIPVVVRLEGNNAELGAEILLNSNIRIISINDLAEAAKKSVELAK

SEQ ID NO: 193811 - protein, 232 aa, Unknown
  Bacterial polypetide isolated from the Sargasso Sea
MSVLVNKNTRLICQGFTGSHGTFHSEQAIKYGTNLVGGVTPKKGGQKHLGLPVFNTVKEARESEGANATMIYVPAKFAASAIIEAIDASVELIVCITEGIPIQDMLKVKQRLNNSKSRLIGPNCPGVITPDECKIGIMPGSIHKKGTVGIVSRSGTLTYEAVAQTTENGLGQSTCIGIGGDPINGTNFIDCLDLFLNDEDTQSILMIGEIGGTAEEEAADFIKNHKIKKPIV

SEQ ID NO: 193812 - protein, 280 aa, Unknown
  Bacterial polypetide isolated from the Sargasso Sea
HQTGPQGREVKRLYIEEGCDIGIELYLSLLVDRGSSRVTIIASSEGGMDIEEVAATQPDKILSVAIDPATGLQPHHARRLAGVMGLSGATAKQLPKFLGGLFEAFSRLDASLVEINPLVVTGSGDLLALDAKMSFDDNALYRHPEVMELRDLAEEDPAEVRASEFDLNYIKLDGNIGCMVNGAGLAMATMDIIQLQGGSPANFLDVGGSATAERVTEAFKIILSDDNVKGILVNIFGGIMRCDIIAEGVVGAARTLGLDKPLVVRLEGTNVEEGKRIMAA

SEQ ID NO: 193813 - protein, 161 aa, Unknown
  Bacterial polypetide isolated from the Sargasso Sea
MKIHEYQGKEILRNFGVPVPRGIPAFTVQEAVEAAQKLGGPVWVVKAQIHAGGRGKGGGVKVAKTIDDVKARASEILGMQLVTHQTGPEGQKVRRLYIEDGADIKNELYVSLVTDRATQKVALIASSEGGMDIEEVAHSTPEKIVTEMIDPLTGITEAQSR

SEQ ID NO: 193814 - protein, 253 aa, Unknown
  Bacterial polypetide isolated from the Sargasso Sea
NIEKVAEETPEKIASISLNGKDVSQSDIKKICSTLKLNDTQSSQMENIVRKTVSMFFECDLSLLEINPLVIKEDGNLHCLDAKINIDSNALFRQKELQEMHDPTQEDPRESEASKYDLSYVSLDGNIGCMVNGAGLAMGTMDTIKFFKGNPANFLDVGGTATQERVAKAFKIILDDPEVKVVLVNIFGGIVRCDLIAEGIVAAIDEVGVEIPVVVRLEGNSAEKGLSILSNSSSKIQSKNSLEDAARTAVELA

SEQ ID NO: 193815 - protein, 139 aa, Unknown
  Bacterial polypetide isolated from the Sargasso Sea
MNIHEHQAKQILKKYGAIVPEGVFALNVDELIKKAKALKTEKYVLKAQIHAGGRGKAGGVKILNSIEELTVAAKKLLGKTLVTHQTGPEGREVKRLYVEESSNIDKEFYLSCLIDRASSKIAFISSDKGGMDIEEVASS

SEQ ID NO: 193816 - protein, 301 aa, Unknown
  Bacterial polypetide isolated from the Sargasso Sea
GTNLITKQTDNLGLPVSKVYIESGTSIQSEYYLSLLVDRTKESWTFIASKEGGVDIEAVAEESPDKIVNYTIDPFIGVEIESLKEMADRMGFIDDIQSQFISITRKMFEIAKENDANLIEVNPLILDYENQLIALDAKISIESNALFRQQELLLLKDDSQENELEVKASEHDLSYVSLDGNIACMVNGAGLAMATMDLIKLHGGEPANFLDVGGGATSERVKMAIDIIMENPNVDAILINIFGGIVRCDVIAQGIYEAVKSTKIDVPIVVRLQGTNVELGTKILEESGMKIISASDLTDAA

SEQ ID NO: 193817 - protein, 179 aa, Unknown
  Bacterial polypetide isolated from the Sargasso Sea
MKIHEYQAKEIFRDFDVRVPNGKPVFSVEEALQAYDEMGSETVVVKAQIHAGGRGKGGGVKLAHNRDDVENIANQILGMNLVTHQTGPEGKKVQRLLIETGIDIAKEFYAGIVLDRKEKKFVFMVSTEGGVEIEKVAAESPEKIIKEWIHPEDGLTKDQAKRLCDALSLKGIQQDSGIE

SEQ ID NO: 193818 - protein, 268 aa, Unknown
  Bacterial polypetide isolated from the Sargasso Sea
MSILIDKDTRVLVQGFTGSQGTLHSSQSIEYGTNVVGGVTPGKGGASHLDLPVFNSVMEAVEQVQPNASLIFVPAPFCKGAILEAADAGIKFIVCITEGVPTLDMLEVKKIVDNLDITLIGPNCPGVITPGVGKMGIMPGEIHLPGRVGIISRSGTLTYEAVKQTTDLGLGQSSCVGIGGDPIPGSSFIDILELFEADDQTDAIVMVGEIGGSAEEEAAEFISQNVTKPVVSYIAGQTAPPGKRMGHAGAIISGGKGTAEDKIKKLNE

SEQ ID NO: 193819 - protein, 244 aa, Unknown
  Bacterial polypetide isolated from the Sargasso Sea
MSILIDKDTRVLVQGFTGSQGTLHSSQSIEYGTNLVGGVTPGKGGTVHLDLPVFNSVNEAVEQVQPNASLIFVPAPFCKGAILEAAEAGIKFIVCITEGVPTLDMLEVKKIVDGLDITLVGPNCPGVITPGVGKMGIMPGEIHLPGRVGIISRSGTLTYEAVKQTTDLGLGQSSCVGIGGDPIPGSSFIDILELFESDDQTDAIVMVGEIGGSAEEEAAEFISQNVTKPVVSYIAGQTAPPGKR

SEQ ID NO: 193820 - protein, 157 aa, Unknown
  Bacterial polypetide isolated from the Sargasso Sea
IGIMPGNIHKRGTVGIVSRSGTLTYEAVAQTTENGLGQSTCIGIGGDPINGTNFIDCLDLFLNDDETQSILMIGEIGGTAEEEAAEFLKNHKIKKPIVGFIAGITAPPGRRMGHAGAIISGGKGGAEDKIKKMEECGITVAKSPSIIGKTLYNKLSN

SEQ ID NO: 193821 - protein, 178 aa, Unknown
  Bacterial polypetide isolated from the Sargasso Sea
MQKINVDSNALYRQEQILELRDPSQEDPREASAAEWDLSYVALEGNIGCMVNGAGLAMGTMDIIKLHGGEPANFLDVGGTADSKRVAEAFKIILSDENVNTVLINIFGGIVRCDVIADGIVEALTVTGVSVPVIVRLEGNNAHKGLKILDECDLNIIPASNLEEAASLAVRASKGDIG

SEQ ID NO: 193822 - protein, 227 aa, Unknown
  Bacterial polypetide isolated from the Sargasso Sea
EKVAKEHPEKIIKTKFDLKKEVNQKDFENIIKVFDLNDKQKKQAKKIIESIFNLLIKKDATLIEINPLIITKSMNLLCLDAKISFDDNAMFRNQDILKLRDFNEEEPTEIEASKNGLSYIKLEGSIGCMVNGAGLAMATMDIIKLHGKEPANFLDVGGGASKEKVAEAFKIILSDKNVKGILINIFGGIMRCDVLAKGVVEAAKKIKLKVPLVVRLAGTNFEEGKKI

SEQ ID NO: 193823 - protein, 269 aa, Unknown
  Bacterial polypetide isolated from the Sargasso Sea
SSKIAFISSDQGGVDIEEVARSSPEKITTTKVEMDNEISDKDCSEIIKVFDLNDNAKKQAVTLIKSIFKMFISTDANMVEINPLILTKEERIVCLDAKVNFDSNALFRHPEILELRDLNEEEETEIEASKHDLAYIKLDGSIGCMVNGAGLAMATMDIIKLYGKEPANFLDVGGGASKEKVSAALKIILSDNNVKGILINIFGGIMRCDVLAQGVVDAAKEININVPLVVRLAGTNFKEGKKILDNSGLKLISAENLDDAAQKIVEAIK

SEQ ID NO: 193824 - protein, 174 aa, Unknown
  Bacterial polypetide isolated from the Sargasso Sea
MKIHEFQAKQVLSRYGVPVPRSKVAESVEEAVDAARELGGEIWVVKAQIHAGGRGKGGGVKVCRGLEEVRENAEKILGMQLVTKQTGPAGQKVLRVLIEEGMEIIKELYCSVLVDRTKQSVVMLASTEGGMDIEEVAANTPDKILKIFADPSLGMLPYQASELAYGLGIHQINP

SEQ ID NO: 193825 - protein, 291 aa, Unknown
  Bacterial polypetide isolated from the Sargasso Sea
SSKEEAVNEAEKMFGMNLITPQTGPAGKEVKRIYIENGSDIKKELYLSCLLDRATSKVAFIVSKMGGMDIEAVAKDTPENITTVQIEPSIGVTENDVNTISKAFELKKDLEGQLFDLIKNMYKFFLEKDASLVEVNPLIITETDKLLCLDAKVNFDDNALYRHPEIEELRDVNEEDEYEREASKFDLAYIKLDGNIGCMVNGAGLAMASLDIIKMYGGEPANFLDVGGGASKEKVSSAFKIILSDKGVKGILVNIFGGIMRCDIIAEGIVAAAKELEISVPLVVRLEGTNV

SEQ ID NO: 193826 - protein, 294 aa, Unknown
  Bacterial polypetide isolated from the Sargasso Sea
GGVKLVKNLNDLEKQAKIMMGKVLVTHQTGPEGKEVKRLYIEEASDISKEFYLSCLVDRETSKIAFISSTEGGMDIEKVAKETPNKIITHKIDLKDSGPSTDEIDNIISIFNFNEIQKKAAEALIKSLYKIIIEKDASLIEINPLIITKSGKLICLDAKMNFDDNAIFRRPEILKLRDLNEEDPAETEASKYDLAYIKLNGSIGCMVNGAGLAMATMDIIKLHGEEPANFLDVGGGASKEKVSAAFKLILSDKNVKGILINIFGGIMRCDVLAQGVVDAAKEINLSVPLVCKLA

SEQ ID NO: 193827 - protein, 242 aa, Unknown
  Bacterial polypetide isolated from the Sargasso Sea
TNKIELKDEGPSDDEIDKIISIFKFNTQQKVTASNLVKSLYKILIQKDANLIEINPLIVTKTDKIVCLDAKMNFDDNAIFRRPEILKLRDLNEENEAEIEASKHDLAYIKLNGSIGCMVNGAGLAMATMDIIKLYGKEPANFLDVGGGASKEKVAAAFQLILSDKNVKGILINIFGGIMRCDVLAQGVVDAAKKINLSVPLVVRLAGTNYKEGKEILDKSDLKILSASDLNDAAKKIVDAIK

SEQ ID NO: 193828 - protein, 180 aa, Unknown
  Bacterial polypetide isolated from the Sargasso Sea
VVALDAKLTLDDNALYRQKGNMSLRDRDEEDPLELEASEAGLNYIKLDGNIGCMVNGAGLAMGTMDIIKTYGGEPANFLDVGGGATQETVEKAFRIITLDPNVKCILINIFGGIVRCDMVAAGVIAAFKNVNLQIPVVIRLEGTNSDEAHKIVWESGLGESLQMADGIQQAAQKAVSAAN

SEQ ID NO: 193829 - protein, 231 aa, Unknown
  Bacterial polypetide isolated from the Sargasso Sea
MNIHEHQAKELFDGYDIPVSKGSVAYQKSQINEAVGKVKGPIWVVKAQIHAGGRGKGGGVKVVSSKEEAVNEAEKMFGMNLITPQTGPSGKEVKRIYIENGSDIKKELYLSCLLDRATSKVAFIVSKMGGMDIEAVAKDTPEHITTVQIEPSIGVTEKDINTISTAFELEKDLESQLSDLIKNMYKFFLEKDASLVEVNPLIITETDKLLCLDAKVNFDDNALYRHPEIEE

SEQ ID NO: 193830 - protein, 215 aa, Unknown
  Bacterial polypetide isolated from the Sargasso Sea
IYLGFVLDRATERVMLVASAAGGMEIEQIAEEDPESMIRVVIEPAVGLQAFQAREVAFALGLDASLVTEAANTLRACYRSFRDLDATMVEINPLVVTADGRILALDAKMTFDDNALFKHQRISELRDKSQEDPREMRATDRGLSYVGLEGDIGCIINGAGLAMATMDMIKHSGGEPANFLDIGGGASPERVAKAFTLVLSDDNVKGVLVNIFAGI

SEQ ID NO: 193831 - protein, 243 aa, Unknown
  Bacterial polypetide isolated from the Sargasso Sea
IEDVAANNPEKIINIHFNDIKNVTLDHNLQSTLEINQHQFEELNTITNKLLSVFSSIDASTIEINPLVLNKQGSFVLLDAKISLDDNALFRHPDLLALKDLTEEDPLELQAAEHDMNYVKLDGSIGCMVNGAGLAMATMDIIKQFGEEPANFLDLGGTANKDRVIMGFKTIQSDPNVKSILINIFGGIIHCDMIANGIVEAVKELNFKLPLVVRFQGTNASQGRDVINNSSLGLISIDDFTEA

SEQ ID NO: 193832 - protein, 300 aa, Unknown
  Bacterial polypetide isolated from the Sargasso Sea
GPEGKKVMRLYVEEASEISKEFYLSCLVDRQSSKIAFISSTEGGMDIEKVAKDNPEKIITTKIEFKDDINIKDIDKIIEPFAFDDNQKKESQNLIRSIYKTLINTDASLIEINPLIVTKSNQIKCLDAKMNFDDNALFRRPEILKLRDLNEEDPKEIEASKYDLAYIKLNGNIGCMVNGAGLAMATMDIIKLYGQEPANFLDVGGGASKEKVSAAFKLIMSDKNVKGILINIFGGIMRCDVLAAGVVEAAKETNLEVPLVVRLAGTNFKEGKKILEESKLKILSASDLNDAAKKIVEAIK

SEQ ID NO: 193833 - protein, 196 aa, Unknown
  Bacterial polypetide isolated from the Sargasso Sea
NDATLIEINPLVLTSDNQILAADAKLDIDDDSIFRHEEIKNISDISQEDTLEVEARDFDINYVKLDGNIGCIVNGAGLAMATMDVASSAGASPANFLDIGGGATEEKVAKALSLVLSDNNVKAVLVNLFGGILRCDIAARGFVMCIEESQNFNIPLIVRMLGTNAEEGIEILKNSNLNVTFVDTLEEAASKISKYS

SEQ ID NO: 193834 - protein, 259 aa, Unknown
  Bacterial polypetide isolated from the Sargasso Sea
VDRASSKIAFISSDQGGMNIEEVAQNTPEKILTTKVDFNQEISEVDCKKIIKVFKLDDNSGSEAVSLIKAIYKLFIENDANLVEINPLILTKENKVVCLDAKMTFDENALFKHPEIQELRDYNEEEATEIEASKHDLAYIKLDGSIGCMVNGAGLAMATMDIIKLYGEEPANFLDVGGGASKEKVSAAFKIILSDKNVKGILINIFGGIMRCDILAQGVVDAAKEIKIEVPLVVRLAGTNFEEGKKILENSGLKIISAN

SEQ ID NO: 193835 - protein, 313 aa, Unknown
  Bacterial polypetide isolated from the Sargasso Sea
MNIHEYQAKAIFRESGVPVQEGLHCTSVQQALSAYDSLGSKVVAVKSQIHAGGRGKGKLLSPKSGNLVMEGGVKVAFSRDEVEEYSSKILGNNLVTKQTGPSGKIVNNLYIESGCEIAHEYYLALLVDRESDSLLIMGSTEGGVDIEEVAETNPKAIHKQRFYPSEGLGIDKASSMAISLGLSGKSHDLFVEMALNLSSLFIERDCSMIEINPLVRSSDDRIIALDAKVSFDESATFRHPWRDELRDISEESEVEVRANEFGLSYVDLDGNIGCLVNGAGLAMATMDVIKMYGGEPANFLDIGGRANSESITA

SEQ ID NO: 193836 - protein, 117 aa, Unknown
  Bacterial polypetide isolated from the Sargasso Sea
CIGIGGDPINGTNFIDCLDLFLNDDETESILMIGEIGGTAEEEAADFIKNHKIKKPIVGFIAGITAPPGRRMGHAGAIISGGKGGAEDKIKKMEECGITVAKSPSIIGKTLFDKLSN

SEQ ID NO: 193837 - protein, 310 aa, Unknown
  Bacterial polypetide isolated from the Sargasso Sea
GVELVDSASDVKAFAEKWLGKNLVTYQTDANGQPVSKILVEECVAIDQELYLGAVLDRSSRRIVFMASTEGGVEIEKVASETPEKILKASIDPLTGPMSFQGRELAFNLGLEGDQIKQFTSLFLGLSKLFLDLDLSLLEINPLVITKEGDLNCLDGKINVDGNALFRQPKLQDMQDISQEDEREAKAAEWELNYVALDGNIGCMVNGAGLAMGTMDIVQLYGGSPANFLDVGGAANKERVTEAFKIILSDEKVSAVLVNIFGGIVRCDLIAEGVIGAVNEVGVSVPVVVRLEGNNAELGRQVLAKSGLNI

SEQ ID NO: 193838 - protein, 74 aa, Unknown
  Bacterial polypetide isolated from the Sargasso Sea
MKIHEYQAKQILAKHGVPVPKGKVVFSVDEAVKTAHDLNTEVCVVKAQIHAGGRGKGGGVKVSKGLEAVRKNAE

SEQ ID NO: 193839 - protein, 250 aa, Unknown
  Bacterial polypetide isolated from the Sargasso Sea
MNIHEHQAKQILKKYGAVVPEGVFALNVEDLLQKVKLLKTEKYVLKAQIHAGGRGKAGGVKILNTLEELKLAAKELLGKTLVTHQTGPEGREVKRLYVEESSNIESEFYLSCLVDRASSKIAFISSDQGGMDIEEVASTNPEKIITTKVDIREEISVPDCEKVIEIFKLDNDSKNQAITLIQSIYKMFISTDANMIEVNPLILTKEKKIVCLDAKVNFDSNALFRHPEILELRDLNEEDPAEIEASKHDL

SEQ ID NO: 193840 - protein, 218 aa, Unknown
  Bacterial polypetide isolated from the Sargasso Sea
PAKFAASAIIEAAELSIELITCITEGIPVLDMLRVKKKLANSNSRLIGPNCPGIITPEECKIGIMPGNIHKKGSVGIVSRSGTLTYEAVAQTTNNGLGQSTCIGIGGDPINGTNFIDCLDLFLNDQETESILMIGEIGGTAEEEAAEFFKNHKIKKPIVGFIAGITAPSGRRMGHAGAIISGGKGGAEDKIKKMEDCGITIAKSPAEIGKTLLNKLSN

SEQ ID NO: 193841 - protein, 217 aa, Unknown
  Bacterial polypetide isolated from the Sargasso Sea
VPAQFCKDSILEAADAGIKLIICITEGVPTLDMLIVKKRVDELGITLIGPNCPGIITPGEAKLGIMPGSIHLQGSVGIISRSGTLTYEAVKQTSDLGLGQSTCVGIGGDPIPGTSFIDVLKMMELDDQTKAIVMVGEIGGTAEEEAAEYIKDNISKPVISYIAGQTAPAGKRMGHAGAIIAGGKGTAADKIKKLKECGVHISENLLQIGAKTKEVLG

SEQ ID NO: 193842 - protein, 301 aa, Unknown
  Bacterial polypetide isolated from the Sargasso Sea
LITHQTGPLGREVKRLYVEEVSNISKEFYLSCLVDRASSKIAFISSDQGGMNIEEVAQNTPEKILTTKVDFNQEISEVDCKKIIKVFELDDNSISEAISLIKAIYKLFIENDANLVEINPLILTKENKVVCLDAKMTFDENALFKHPEIQELRDYNEEEVAEIEASKHDLAYIKLDGSIGCMVNGAGLAMATMDIIKLYGEEPANFLDVGGGASKEKVSAAFKIILSDKNVKGILINIFGGIMRCDVLAQGVVDAAKEIKIEVPLVVRLAGTNFEEGKKILENSGLKSYLQMTYQMLQKKL

SEQ ID NO: 193843 - protein, 223 aa, Unknown
  Bacterial polypetide isolated from the Sargasso Sea
LKIFKLDSNSKKQALDLIKSIYKMFTEYDVSLVEINPVILTKEKNIICLDAKISFDDNALHKHPEILELRDLTEEDPIEIEASKHDLSYVKLDGNIGCMVNGAGLAMATMDIIKLYGEEPANFLDVGGGASKEKVSAAFKIILSDKNVKGILINIFGGIMKCDVLAQGVVDAAKETKINLPIVVRLAGTNFEQGKKILDNSGLKIISASDLSDAAEKIVKEVK

SEQ ID NO: 193844 - protein, 168 aa, Unknown
  Bacterial polypetide isolated from the Sargasso Sea
MSILVNNDTKLIVQGITGSQGLFHATQCREYGTNVVGGVTPGKGGTEVEGFEVFDSVVDARKAKAANTSLIFVPAAFAPDAILEATDAGIELIICITEGIPTNDMVSVKKVVDASSSTLIGPNCPGVITPGQAKVGIMPGYIHKEGNIGIISKSGTLTYEAVWQLTQL

SEQ ID NO: 193845 - protein, 287 aa, Unknown
  Bacterial polypetide isolated from the Sargasso Sea
KKLITHQTGPEGREVKRLYVETSSNIEKEFYLSCLIDRATSKIAFISSNEGGMDIEEVAVKSPDKILTNKIDLTEEISDKDCEKIIKIFDLEDSSKMEAISLIKSIFKMFVKTDANMVEVNPLILTKEKKIVCLDAKINFDSNALFRHPEILNLRDLNEEDPIEIEASKHDLAYIKLDGSIGCMVNGAGLAMATMDIIKLYGEEPANFLDVGGGASKEKVSAAFKIILSDKNVKGILINIFGGIMRCDVLAQGVVDAAKEIDINVPLVVRLAGTNFKEGKTILDNSG

SEQ ID NO: 193846 - protein, 285 aa, Unknown
  Bacterial polypetide isolated from the Sargasso Sea
MNIHEHQAKKILRDFGAPVSNGIVIMSVNEIKEKISSLTGETFVLKAQIHAGGRGKAGGVKIIKDIQELKMAAKEMMGKILVTHQTGPQGKEVKRLYIEEASEIEKEFYLSCIIDRESSKIAFISSTQGGMDIEKVAFETPDKIKTIKIDLKNEGPNDDEIEKIISSFNLNYNQKKDAGDLIKSLYKIIVEKDATLIEINPLIITKTGKIICLDAKMNFDDNSIFRRPEILALRDLNEEDPAEIQASKHDLAYIKLNGSIGCMVNGAGLAMATMDIIKLYGKEPA

SEQ ID NO: 193847 - protein, 251 aa, Unknown
  Bacterial polypetide isolated from the Sargasso Sea
SKKKPETIIRSKIEVAVGMQKFQAREIAFGLKIEPNLIARAADTIIGCYRAFSELDATMVEVNPLVISNQDQILALDCKMSFDNNALFRRNQVSELRDKTQENPNEVYASDRGLNYVSLDGNIGNIINGAGLAMASMDMIKLAGGEPANFLDVGGGATPEKIVKAFKLISMDEKVKVILVNIFAGINRCDWVAEGIVQALEKIEIKVPIVIRLAGTNVEKGNKILKESKIEYIEANTLEDAANKAVKALGN

SEQ ID NO: 193848 - protein, 238 aa, Unknown
  Bacterial polypetide isolated from the Sargasso Sea
MSVLVNKNTKVICQGFTGSHGTFHSEQAIKYGTNLVGGVTPKKGGQKHLDRPVFNSVVEAKNEVGADATMIYVPAKFAAAAIIEAIDASIELIVCITEGIPVQDMLRVRQKLNGSKSRLIGPNCPGIITPDECKIGIMPGNIHKRGSVGIVSRSGTLTYEAVAQTTENGLGQSTCIGIGGDPINGTNFIDCLDLFLNDEETKSILMIGEIGGTAEEEAAEFVKNHKIKKPIVGFIAGI

SEQ ID NO: 193849 - protein, 305 aa, Unknown
  Bacterial polypetide isolated from the Sargasso Sea
APVSKGIVIFNLDELQKKISQLQSKEYVLKAQIHAGGRGKAGGVKLIKNFPDLINESKKMMGKILVTHQTGPEGKQVKRLYIEEASNISKEFYLSCLVDRETSKIAFISSTEGGMDIEKVAQETPDKIITNKIDLNESGPSNDEIEKIISVFRLSEKQKKTAYKLIKSLYEIIISKDANLIEINPLILTKSNELICLDAKMNFDDNAIFRRPEIYELRDLNEEDPTEIEASKYDLAYIKLNGSIGCMVNGAGLAMATMDIIKLYGKEPANFLDVGGGASKEKVAAAFKLILSDKNVKGILINIFG

SEQ ID NO: 193850 - protein, 316 aa, Unknown
  Bacterial polypetide isolated from the Sargasso Sea
SKYPSEGKVFENENDAEEYAKSLGVDEFVVKAQIHAGGRGKAGGVKLVKTPEEVRDTVKQMLGMTLVTHQTGPEGKLVNKVYVEKSSTIKKEYYLSLVTDRSTEKNVIIASPEGGVDIEKVAEETPEKLLTQPIDPVVGIQPFHIRKISYFLGLDKEQTKQLSSIISGLYNLYTEMDCALVEVNPLIATNEGEIRALDAKINFDDNAEFRHQEYPELHDPTEEEPLELEAKEWGFSFVKLDGNIGCLVNGAGLAMATMDIIKYHGAEPANFLDVGGGASVEQVTQAFKMILSDDNVKAILVNIFGGIMECDTIAES

SEQ ID NO: 193851 - protein, 211 aa, Unknown
  Bacterial polypetide isolated from the Sargasso Sea
VGSNLIKSLYEIVLKKDASLIEINPLIITKSGELICLDAKMNFDDNAIFRRPEILELRDLNEEEPAEIEASKNDLAYIKLNGSIGCMVNGAGLAMATMDIIKLYGEEPANFLDVGGGASKEKVSAAFKLILSDKNVKGILINIFGGIMRCDVLAQGVVDAAKEINLSVPLVVRLAGTNFKEGKEILDKSNLKILSASDLNDAAKKIVEAIK

SEQ ID NO: 193852 - protein, 196 aa, Unknown
  Bacterial polypetide isolated from the Sargasso Sea
MDASLLEINPLVVTGSGDLLALDAKMSFDDNALYRHPDVLALRDLAEEDPAEVRASEFELNYIKLDGNIGCMVNGAGLAMATMDIIQLQGGSPANFLDVGGSATVERVTEAFKIILSDENVKGILVNIFGGIMRCDIIAEGVVSAARSLGLDKPLVVRLEGTNVEEGKRTMAESGLDIIAADNLADAAAKIVAATA

SEQ ID NO: 193853 - protein, 217 aa, Unknown
  Bacterial polypetide isolated from the Sargasso Sea
PPPFAADAILEAIDAEIELIVCITEGIPQHDMTKVYNKLLQSKSRLVGPNCPGVITPEECKIGIMPGHIHSKGNVGIVSKSGTLTYEAVYQTSQIGLGQSSCIGIGGDPIPGTNFIDIIDLFLKDSETSSIIMIGEIGGNAEEDAADFIKKSKIKKPMVAFIAGLTAPKGKRMGHAGAIIAGGKGTAEDKIEALKSADVKISMSPALMGKTLYELLK

SEQ ID NO: 193854 - protein, 181 aa, Unknown
  Bacterial polypetide isolated from the Sargasso Sea
RGFVVLDAKISLDDNALFRHPELLELKDLTEEDPLELQAAEHDMNYVKLDGSIGCMVNGAGLAMATMDIIKQFGEEPANFLDLGGTANKDRVIMGFKIIQSDPNVKSILINIFGGIIHCDMIANGIVEAVKELDFKLPLVVRFQGTNSSEGRDVINNSDLRLISIDDFTEAAKKVVDLAKG

SEQ ID NO: 193855 - protein, 286 aa, Unknown
  Bacterial polypetide isolated from the Sargasso Sea
MSVLVDKKTKVICQGFTGTHGTFHSEQALKYGTQLVGGVTPKKGGQKHLGLPVFNTVIEAKEKTKAKASMIYVPPKFASSAIIEAIDSKIELIVCITEGIPVIDMIKVKQALKKSQSRLIGPNCPGIITPEECKIGIMPGNIHKKGSVGIVSRSGTLTYEAVAQTTANGMGQSTCIGIGGDPINGTNFIDCLELFLNDEETESIVMIGEIGGTAEEEAAEFLKKSKIKKPMVGFIAGLTAPAGRRMGHAGAIISGGKGGAKDKIETMKSADITISDSPADIRKNII

SEQ ID NO: 193856 - protein, 160 aa, Unknown
  Bacterial polypetide isolated from the Sargasso Sea
MNLHEYQAKQLFREYGIAVSDGVAASSAEQAEKAALSLGVSKWVIKAQVHAGGRGKAGGVEVVDKIEKVREFADKWLGTNLVTFQTDADGQPVNQILVETCTEIENELYLGAVIDRASQRLVVMASTEGGVNIEEVAEQTPEKIFKVEIDPIEGTNDMDA

SEQ ID NO: 193857 - protein, 284 aa, Unknown
  Bacterial polypetide isolated from the Sargasso Sea
MNIHEYQGKALFREEGVAVQEGFHCTTVDQALEAYDSLGSKIVAVKSQIHAGGRGKGNLYCPDTGDLQMEGGVKIALSRDEVETYSKNILGNILVTKQSGPEGKMVNNLYIEAGCEIAHEYYLALLVDREEDAILVMASTEGGVDIEEVAETTPQAIHKAWTDSSGKLPTGADSAMADSLGLTGVSKDSFKEMLGRLVSMFVTRDCSMIEINPLVRAGDGAMIALDSKISFDDNASFRHPWRAEMRDMSEEEEVEIRANKSGLSYVKLDGNIERLVNGAGLAMA

SEQ ID NO: 193858 - protein, 224 aa, Unknown
  Bacterial polypetide isolated from the Sargasso Sea
EIDATIIFVPAKFCKDSVQEAIDAEIPLIICITEGIPTLDMMKLKQNADSVGCRIIGPNCPGVITPDQCKLGIMPGYIHKPGKIGIVSRSGTLTYEAVDQTTQAGLGQSSCVGIGGDPIPGSSFIDILQLFEEDSETEGIVMVGEIGGTAEEEAAEFIQSNVSKPVVAYIAGVSAPPGKRMGHAGAIIAGGKGTAEDKFLALEKAGVHTTRSPAKIGDEISKLV

SEQ ID NO: 193859 - protein, 123 aa, Unknown
  Bacterial polypetide isolated from the Sargasso Sea
GLGQSTCIGIGGDPINGTNFIDCLDLFLHDDETESILMIGEIGGTAEEEASEFIKNHKIKKPIVGFIAGVTAPPGRRMGHAGAIISGGKGGAEDKIKKMEESGITVAKSPSIIGKTLFNKLSN

SEQ ID NO: 193860 - protein, 187 aa, Unknown
  Bacterial polypetide isolated from the Sargasso Sea
IINKKGKFILLDSKITIDDNALFRHSDLESLRDLSQEEPLEVEANEYGLSYIKLDGSIGCMVNGAGLAMATMDVIKQFGEEPANFLDLGGSANKERAVKAFKILQSDKNVKSVFINIFGGIVRCDVIANGIVDAVKELNFKLPIVIRFQGTNASIGQEIINKSNLDLVSVDDFMAAAKTAVDLSRKK

SEQ ID NO: 193861 - protein, 237 aa, Unknown
  Bacterial polypetide isolated from the Sargasso Sea
IQKAKALKTEKYVLKAQIHAGGRGKAGGVKILNSIEELTVAAKELLGKTLVTHQTGPEGRKVKRLYVEESSNIDKEFYLSCLVDRASSKIAFISSDQGGMDIEEVASSSPEKIITTKVDMGDEISESDCEKIINIFNLNEDAKKQAITLIKSIYKMFVGTDANMVEVNPLILTKEEKIVCLDAKVNFDSNALFRHPEIVELRDLNEEDPTEIEASKHDLAYIKLDGSIGCMVNGARI

SEQ ID NO: 193862 - protein, 296 aa, Unknown
  Bacterial polypetide isolated from the Sargasso Sea
MDIHEYQAKKILSGFGVTIPRGGIAYSPENAENKARELGGSKWVVKAQVHSGSRGKAGGIVMCNSPLEVAQATDKLLGKKLVTNQTGPIGKIINRVYIEEATDIKKELYLGLVFDRSSESIMVVASTEGGMSVEEISKEKPETIIRSKIEVAVGIQQFQAREIAFGLGIDSKLISRMADTIIGCYRAFSELDATMVEVNPMVISNQDQILALDCKMSFDNNALFRRSQVSELRDKTQENPSEVYASDRGLNYVSLDGNIGNIINGAGLAMASMDMIKLDGGEPANFLDVGGGATPE

SEQ ID NO: 193863 - protein, 250 aa, Unknown
  Bacterial polypetide isolated from the Sargasso Sea
HQTGPEGREVKRLYVEESSNIDKEFYLSCLVDRASSKIAFISSDQGGMDIEEVASSSPEKIITTKVDMSDEISESDCEKIINIFNLNEEAKKQAITLIKSIYKMFVNTDANMVEVNPLILTKEEKIVCLDAKVNFDSNALFRHPEIVELRDLNEEDPTEIEASKHDLAYIKLDGSIGCMVNGAGLAMATMDIIKLYGKEPANFLDVGGGASKEKVSAALKIILSDKNVKGILINIFGGIMRCDVLAQGVV

SEQ ID NO: 193864 - protein, 167 aa, Unknown
  Bacterial polypetide isolated from the Sargasso Sea
MSILVNKSTKVICQGFTGSHGTFHSEQAIKYGTKLVGGVTPKKGGQKHLGLPVFNTVQEAKDKTKATATMIYVPPKFAASAIIEAINAEIKLVVCITEGIPVIDMIKVKEKLKKSKSRLIGPNCPGVITPNECKIGIMPGNIHKKGSVGIITRSGTLTYEAVAQTTQ

SEQ ID NO: 193865 - protein, 282 aa, Unknown
  Bacterial polypetide isolated from the Sargasso Sea
AVITSPDDILSAVRDIGGDKWVVKAQAHAGGRGKAGGVKLVDTPEEAKEFAKHWLGNRLVTYQTDSNGQLVSSILVEECTDIAKELYLSAVIDRGTQRIVFIGSSEGGVNIEEVAEKTPEKIIYEPIDPLTGPMGFQARKISKVLGLDNEQTKQFSKMLSQLTKLFISYDLSLLEINPLVITQRGKLHCLDAKINIDSNAIYRQPEIQAMHDPSQEDPREAEAAKSDLSYVSLDGNIGCMVNGAGLAMGTMDTIKYFGGSPANFLDVGGTATQERVSKAFKL

SEQ ID NO: 193866 - protein, 274 aa, Unknown
  Bacterial polypetide isolated from the Sargasso Sea
MSFLVNKKTRLICQGFTGSHGTFHSEQAIKYGTKLVGGVTPKKGGQKHLGLPVFNTVKEAKNSEGANATMIYVPAKFAAAAIIEAIEASIELIVCITEGIPIQDMLKVKQKLSKSKCRLIGPNCPGIITPDECKIGIMPGNIHKKGSVGIVSRSGTLTYEAVAQTTENGLGQSTCIGIGGDPINGTNFIDCLDLFLNDEETQSILMIGEIGGTAEEEAAEFIKNHKIKKPIVGFIAGVTAPPGRRMGHAGAIISGGKGGAEDKIKAMEDCGIII

SEQ ID NO: 193867 - protein, 290 aa, Unknown
  Bacterial polypetide isolated from the Sargasso Sea
MSILVNKNTRVICQGFTGNHGTFHSEQAIKYGTNLVGGVTPKKGGQTHLSKPVFNSVKEAKEKTDANASMIYVPAKFAASAIIEAIEASIELIVCITEGIPILDMLRVKNKLSDSNSRLIGPNCPGIITPEECKIGIMPGNIHKKGSVGIVSRSGTLTYEAVAQTTNNGLGQSTCIGIGGDPINGTNFIDCLDLFLNDEETKSILMIGEIGGTAEEEAAEFFKNHKIKKPMVGFIAGITAPPGRRMGHAGAIISGGKGGAEDKIKKMQDCGITIAKSPAEIGKTLLKKIV

SEQ ID NO: 193868 - protein, 187 aa, Unknown
  Bacterial polypetide isolated from the Sargasso Sea
PLILTKEKELICLDAKMNFDGNALFRHPELIELRDLNEEEATEIEASKHDLAYIKLDGTIGCMVNGAGLAMATMDIIKLYGKEPANFLDVGGGASKEKVAAAFKIILSDKNVKGILINIFGGIMRCDVLAQGVVDAAKEIKMNVPLVVRLAGTNFEEGKKILDNSGLELISASDLSDAAKKIVEAIK

SEQ ID NO: 193869 - protein, 279 aa, Unknown
  Bacterial polypetide isolated from the Sargasso Sea
FYLSCLVDRASSKIAFISSDQGGMDIEEVANSSPEKINTTKVDINNEVSDKDCEEIIKIFSLSGSTKAQAIALIKSIYNMFISTDANMIEVNPLILTKEEKIICLDAKVNFDSNALFRHPEIVGLRDLNEEDPTEIEASKYDLAYIKLDGSIGCMVNGAGLAMATMDIIKLHGKEPANFLDVGGGASKEKVSAALKIILSDKNVKGILVNIFGGIMRCDVLAQGVVDAAKEINISVPLVVRLAGTNFKEGKKILDNSGLKLISAENLDDAAKKIVEAIK

SEQ ID NO: 193870 - protein, 286 aa, Unknown
  Bacterial polypetide isolated from the Sargasso Sea
MSVLVNKNTKVICQGFTGAHGTFHSEQAIKYGTNLVGGVTPKKGGQKHLNRPVFNSVLEAKNEVGADATMIYVPAKFAAAAIIEAIDASVELIVCITEGIPIQDMLKVRQKLSGSSSRLIGPNCPGIITPDECKIGIMPGSIHKRGSVGIVSRSGTLTYEAVAQTTENGLGQSTCIGIGGDPINGTNFIDCLDLFLNDSETESILMIGEIGGTAEEEAAEFIKNHKIEKPIVGFIAGITAPPGRRMGHAGAIISGGKGGAEDKIKKMEECGITVAKSPSIMEKLYL

SEQ ID NO: 193871 - protein, 272 aa, Unknown
  Bacterial polypetide isolated from the Sargasso Sea
DRASSKIAFITSDQGGMDIEEVAKNNPQKILTTKVEMSDEISKNDCEKIIRIFNLNDNIKNQAISLIKSIYKMFTSTDANMVEVNPLILTKEEKIICLDAKVNFDSNALFRHPEIKELRDLNEEDPIEIEASKHDLAYIKLDGTIGCMVNGAGLAMATMDIIKLYGKEPANFLDVGGGASKEKVSAALKIILSDKNIKGILINIFGGIMRCDILAQGVVDAAKEININVPLVVRLAGTNFKEGKKILDNSGLELISAENLDDAAKKIVEAIK

SEQ ID NO: 193872 - protein, 223 aa, Unknown
  Bacterial polypetide isolated from the Sargasso Sea
MSVLVNKNTKVICQGFTGAHGTFHSEQAIKYGTNLVGGVTPKKGGQNHLNRPVFNTVKEARDSLGANATMIYVPAKFAAAAIIEAIEASMELIVCITEGIPVLDMLKVKKKLVNSNSRLIGPNCPGIITPDECKIGIMPGSIHKRGSVGIVSRSGTLTYEAVAQTTENGLGQSTCIGIGGDPINGTNFIDCLDLFLNDEETKSIMMIGEIGGTAEEEAAEFIK

SEQ ID NO: 193873 - protein, 257 aa, Unknown
  Bacterial polypetide isolated from the Sargasso Sea
MRAHGTFHSEQALKYGTQLVGGVTPKKGGQKHLGLPVFNSVAEAKEKTNATASMIYVPPKFAASAIIEAIESKMELVVCITEGIPIIDMIKVKKILKQSKTRLVGPNCPGVITPNECKIGIMPGSIHKKGSVGIVSRSGTLTYEAVAQTSSNGLGQSTCIGIGGDPINGTNFIDCLELFLKDEDTKSIVMIGEIGGSAEEEASEFIKKSKIKKPMVGFVAGLTAPPGRRMGHAGAIISGGKGGANDKIETMKSAGIT

SEQ ID NO: 193874 - protein, 300 aa, Unknown
  Bacterial polypetide isolated from the Sargasso Sea
IDELNKEAKELLVKVLVTNQTGSQGKKVNRLYVEESSNIEKEFYLSCLVDRSSSKIAFISSDQGGMDIEEVAKEKPEKIITTKVDFTKEISNENCEKIIKVFKLNDSLKTQAIDLIKSIYKLFLDLDVSLIEINPLILTKENKIVCLDAKVNFDDNALFKHPEILELRDLSEENLTEIEASKHDLAYIKLDGSIGCMVNGAGLAMATMDIIKLYGEEPANFLDVGGGASKEKVSAAFKIILSDKNVKGILINIFGGIMRCDVLAQGVVDAAKEIKINVPLVVRLAGTNYEEGKKILDSSN

SEQ ID NO: 193875 - protein, 257 aa, Unknown
  Bacterial polypetide isolated from the Sargasso Sea
MDIEHVAEHTPEKIHKEFVDPRLGLQGFQARRVAFNLGLSGKAFKEMTKFVYSLYKAYDSIDASMFEINPVLKTSDNKIIAVDAKVSLDDNALFRHSDYAEMRDLNEEDPTEVEAGEAGLNFVKLDGNVGCMVNGAGLAMATMDIIKLSGGNPANFLDVGGTANAERVEKAFKIILKDENVKAILINIFGGIVRCDRVAQGVVDAYKNMGNIPVPIIVRLQGTNAVEAKKLIDESGLNVHSAVVLQEAADKVKEVLA

SEQ ID NO: 193876 - protein, 388 aa, Unknown
  Bacterial polypetide isolated from the Sargasso Sea
MNLHEYQGKQLFAEYGLPVSKGFAVDTPEEAAEACEKIGGSEWVVKAQVHAGGRGKAGGVKLVKSKEDAKAFAANWLGKRLVTYQTDANGQPVSKILVESCTDIAKELYLGAVVDRSSRRIVFMASTEGGVDIEKVAHETPEKILKATIDPLVGAQPYQGRELAFQLGLEGKQVAQFAKIFVGLAKLFKDHDLALLEVNPLVIKADGDLHCLDAKINIDANAMYRQPKLKTFHDPSQDDPREAHAASFELNYVALEGNIGCMVNGAGLAMGTMDIVNLHGGKPANFLDVGGGATKERVTEAFKIILSDSNVAAVLVNIFGGIVRCDMIAEGIIGAVKEVGVKIPVVVRLEGNNAELGAKVLAESGLNIIAATSLTDAAQQVVKAAEGK

SEQ ID NO: 193877 - protein, 235 aa, Unknown
  Bacterial polypetide isolated from the Sargasso Sea
MEGFYARQIAFGLGLEGKQVGSAVKLLMAIYKAFTDLDASLVEVNPLVVTGDGDVIALDAKMNFDDNALYRHPEIAEMRDEDEEDPTELEAFKHELNYIKLDGSIGCMVNGAGLAMATMDIIKLFGAEPANFLDVGGGATKERVTAAFGIILSDPNVEGILVNIFGGIMRCDVIAEGVVAAAREVSLQVPLVVRLEGTNVDLGKKILDDSGLAIIAADDLADAAGKIVKAVKESA

SEQ ID NO: 193878 - protein, 357 aa, Unknown
  Bacterial polypetide isolated from the Sargasso Sea
MKCEKSKEINTQKYVLKAQIHAGGRGKAGGIKILDNIDDLTKASKEMLGKILVTNQTGPSGKEVKRLYVEESSKIKKEFYLSCLVDRVSSKIAFISSDQGGMDIEEVAKSDPEKIVTTKVDFLKEISEEDCKKIIKIFNLDGHTSSQGIKLIKSIYKMFVSTDANLVEINPLILTSENNLLCLDAKMNFDDNAIFRNPEILELRDLNEENPTEIEASKYDLAYIKLGGSIGCMVNGAGLAMATMDIIKLYGEEPANFLDVGGGASKEKVSAAFKIILSDKNVKGILINIFGGIMRCDVLAQGVVDAAKEFKINIPLVVRLAGTNFEKGKKILDNSSLDIISASDLSDAAQKIVKEIK

SEQ ID NO: 193879 - protein, 207 aa, Unknown
  Bacterial polypetide isolated from the Sargasso Sea
AIESEIPLVICITEGIPVLDMVRVKRALVGSKTRLIGPNCPGVITPGACKIGIMPGHIHKAGSVGIVSRSGTLTYEAVAQTTAVGLGQSTCIGIGGDPVNGTNFIECLEMFLADPQTESIVMIGEIGGVAEEEAAEFVKSSKTSKPIVGFIAGMTAPPGRRMGHAGAIIAGGKGGAKEKMQALAEAGIHVAESPANIGQKMIEILRV

SEQ ID NO: 193880 - protein, 176 aa, Unknown
  Bacterial polypetide isolated from the Sargasso Sea
NSRLIGPNCPGIITPNECKIGIMPGNIHKKGSVGIVSRSGTLTYEAVAQTTENKLGQSTCIGIGGDPINGTNFIDCLDLFLKDDQTESILMIGEIGGTAEEEAAEFVKNHKIKKPIVGFIAGVTAPPGRRMGHAGAIISGGKGNAEKKIKKMQDCGITVANSPSEIGKTLLNKLSN

SEQ ID NO: 193881 - protein, 387 aa, Unknown
  Bacterial polypetide isolated from the Sargasso Sea
MDIHEYQAKKILSNFGVTIPRGGIVYSPENAENKAREIGGSRWVVKAQIHSGARGKAGGIIVCNTPLEVAQATDKLLGKKLVTNQTGPEGKIVNRIYIEEATDIEKELYLGLVFDRSSESIMVVASTEGGMSVEEISKEKPETIIRSKIEVAVGMQNFQARELAFGLGIEPDLIRRASDTIIGCYKAFSELDATMVEVNPLVISKQKQILALDCKMSFDNNAMFRRSQVSELRDKTQEDSKEIFASDRGLNYVSLDGNIGNIINGAGLAMASMDMIKLAGGAPANFLDVGGGATPEKIVKAFKLVTMDEKVKVILVNIFAGINRCDWVAEGIVDALKKIEIKVPLVIRLAGTNVEKGNKILKESKINYIEANTLEDAANKAVAALNK

SEQ ID NO: 193882 - protein, 307 aa, Unknown
  Bacterial polypetide isolated from the Sargasso Sea
RYILITKQTGQEGKKVNTFFIEEGCIIKREFYLSLLIDRKSSQIMLMISDAGGTDIEEVAESNPAKIHSIFFSNLEEINIDQNLKNKINITSDQFQKLIIIIKKLIDAFKSLDASSIEINPLVLDDKENFFLLDAKLALDDNALFRHQDLQDLRDLSEENALETKAAENGMNYVKLNGTIGCMVNGAGLAMATMDMIKLNGHEPANFLDLGGTANKERTIKGFKIIQSDKNVKSVLINIFGGIIRCDMIANGIIEAIKELNFKLPLVVRFQGTNAKEGRDIINKSQANIISIDDLTEATKKVVDLAI

SEQ ID NO: 193883 - protein, 312 aa, Unknown
  Bacterial polypetide isolated from the Sargasso Sea
MDIHEYQAKKILSGFGVTIPRGGIAYSPENAENKARELGGSKWVVKAQVHSGARGKAGGIIICNSSLEVAQAADKLLGKKLITNQTGPEGKITNRVYIEEATDIKKELYLGLVFDRSSESIMVVASTEGGMSVEEISKKKPETIIRSKIEVAVGMQKFQAREIAFGLKIEPNLIARAADTIIGCYRAFSELDATMVEVNPLVISNQDQILALDCKMSFDNNALFRRNQVSELRDKTQENPNEVYASDRGLNYVSLDGNIGNIINGAGLAMASMDMIKLAGGEPANFLDVGGGATPEKIVKAFKLISMDDKVK

SEQ ID NO: 193884 - protein, 385 aa, Unknown
  Bacterial polypetide isolated from the Sargasso Sea
MNLHEYQGKEIFAKYDLPVSKGKVVTSLNEVEQACTDIGGSRWVAKAQVHAGGRGKSGGVALCDTIEEVADFTKKWLGKRLVTYQTDKEGQLVSCILIEECTNIADELYYSAVIDRSSREVAIIASSEGGVNIEKVSEETPEKIASISLNGKDVSQGDIEKICSTLKLNDTQSSQMEHIVRKTVSMFFECDLSLLEINPLVIKDDGNLHCLDAKINIDSNALFRQKELQEMHDPTQEDPRESEASKYDLSYVSLDGNIGCMVNGAGLAMGTMDTIKFFKGNPANFLDVGGTATQERVAKAFKIILDDPEVKVVLVNIFGGIVRCDLIAEGIVAAIDEVGVEIPVVVRLEGNSAEKGLSILANSSSKIQSKNSLEDAARTAVELAK

SEQ ID NO: 193885 - protein, 301 aa, Unknown
  Bacterial polypetide isolated from the Sargasso Sea
MNIHEHQAKQILKQFGAVVPEGVYGLTVEELLEKCKSLKTDKYVLKAQIHAGGRGKAGGVKILDNFNDLEKSAKELLGKKLVTHQTGPEGREVKRLYVEVSSNIEKEFYLSCLVDRASSKIAFISSNQGGMDIEEVAIESPDKISTNKVELTDEISDEECQKIIKIFNLEGNPKIEAISLIKSIYKMFIKTDANMVEINPLILTKEKKIICLDAKVNFDSNALFRHPEILELRDLNEEDPAEIEASKHELAYIKLDGSIGCMVNGAGLAMATMDIIKLYGEEPTNFLDVGGGASKEKVQQP

SEQ ID NO: 193886 - protein, 194 aa, Unknown
  Bacterial polypetide isolated from the Sargasso Sea
MNIHEYQAKKILKDNGAPVLNGFVISKISEIENKLIQLRGKKFVLKAQIHAGGRGKAGGIKLVEGIDKVKDEAKKMFGKILVTHQTGLKGKEVKKLYIEEASNISAEFYLSCLVDRASSKIAFISSTKGGVDIEKVAKENPEEIITTKIDPTEEIKDKQIEQIIKPFNLDEKQKIEGKKLIYSLLKILKDKDAS

SEQ ID NO: 193887 - protein, 293 aa, Unknown
  Bacterial polypetide isolated from the Sargasso Sea
MSILVNKDTKLICQGFTGSQGTFHSEQAIKYGTNLVGGVTPKKGGQTHLDKPVFNTVMEAKKKVNANATMIYVPARFAANAIIEAIEASIELIVCITEGIPVLDMLKVKEYLKNSKSRLIGPNCPGIITPNECKIGIMPGNIHKKGSVGIVSRSGTLTYEAVAQTTENGLGQSTCVGIGGDPINGTNFIDCLDLFLKDDETESILMIGEIGGTAEEEAAEFVKNSNIKKPIVGFVAGLTAPKGRRMGHAGAIISGGKGGATDKIKKMEQCGIVVAKSPAELGKTLADILAFDK

SEQ ID NO: 193888 - protein, 392 aa, Unknown
  Bacterial polypetide isolated from the Sargasso Sea
PPVGGYMNIHEHQAKGLLAGFGVAVPRGTAAFTVDEAVAAATDHGGLMHVVKAQIHAGGRGKAGGVKVVKSVEEVREVATELLGKTLVTHQTGPQGREVQRLYIEEGCDIGDELYLSFLVDRGTSRVTIIASSEGGMDIEEVAETNPEKILSLGIDPATGLQPHHIRRIAGVLGLSKDTAKQLPGFLGSLYRAFNELDASLLEINPLVVTGSGDLLALDAKMSFDDNALYRHPDVLALRDLAEEDPAEVRASEFELNYIKLDGNIGCMVNGAGLAMATMDIIQLQGGSPANFLDVGGSATAERVTEAFKIILSDENVKGILVNIFGGIMRCDIIAEGVVSAARSLGLDKPLVVRLEGTNVEEGKRIMAESGLDIIAADNLADAAAKIVAATA

SEQ ID NO: 193889 - protein, 133 aa, Unknown
  Bacterial polypetide isolated from the Sargasso Sea
MNIHEFQAKKILAGYGVNIPRGKEAYSVAEAVSVAKDIGGEKWVVKAQIHAGGRGKAGGVKIADNLKEVEEISNSLLGMQLVTHQTGPEGKKVNKIFIEEGVNIVSEFYLGVVLDRSNEKYVMMASTEGGTEI

SEQ ID NO: 193890 - protein, 348 aa, Unknown
  Bacterial polypetide isolated from the Sargasso Sea
PAGGRGKGSFLETDAGTKGGVRITKSVEEAASEAKKMLGRTLVTHQTGPTGKQVNRVYIEDGSDITRELYLAILVDRQSSRISFVCSTEGGMDIEAVAATSPEKILSFSIDPTTSFQPYHGRRIAFMLGLEGKQLKQCVSLMSTLYNLFVDKDMEMLEINPLIVSGSGDLKCLDAKMGFDGNATYRHADIAELRDTTEEDPKELEASKYDLNYIALDGEIGCMVNGAGLAMATMDIIKLYGAEPANFLDVGGGATKEKVTEAFKIITSDPNVKGILVNIFGGIMRCDVIAEGVVAAVKEVGLKVPLVVRLEGTNVEAGNKIINSSGLDVIAANNLKDGAEKIVKAVKG

SEQ ID NO: 193891 - protein, 385 aa, Unknown
  Bacterial polypetide isolated from the Sargasso Sea
MNIHEYQAKELFKEFEIPVSTGTVAFSPNEIDQAVKDVSGPTWVVKAQIHAGGRGKGGGVKVVQSADEAIEECKKMFGMNLITPQTGPQGKIVQRVYIENGSDIKKELYLSCLIDRATSKIAFIASKHGGMDIEAVAEETPEEITTVFIEPSTGVSESDILAIQKCLELDESMHDQTRHLIENLYKFFKEKDASLVEINPLIITDKDKLLCLDAKVNFDDNALYRHPEIEELRDPNEEDEYEQEAAKFDLAYIKLDGNIGCMVNGAGLAMASLDIIKLYGGEPANFLDVGGGASKEKVSNAFKIILSDKGVKGILVNIFGGIMRCDVIAEGIIAAAKDLSISVPLVVRLEGTNVDKGKEILDNSGIDIISATDLDDAAKKIVELV

SEQ ID NO: 193892 - protein, 260 aa, Unknown
  Bacterial polypetide isolated from the Sargasso Sea
MNIHEHQAKEILKKYGAIVPDGFFALSVKELIEKAKSLKTEKLVLKAQIHAGGRGKAGGVKILNTIEELSNAAKELLGKKLVTHQTGPQGRVVKRLYVESSSKIDKEFYLSCLVDRASSKIAFISSDQGGMDIEEVAKNNPEKIITTKVNLEDQISDKDCDKIVRIFNLDNSEKKQAVNLIKSIYKMFIDTDANLVEINPLILTKDKKIMCLDAKMNFDDNALFRNPEILNLRDLNEEDETEIEASKHDLSYIKLDGSIG

SEQ ID NO: 193893 - protein, 266 aa, Unknown
  Bacterial polypetide isolated from the Sargasso Sea
MQREKLGGEVWVVKAQIHAGGRGKGGGVKVCQGLEEVQENAEKILGMQLVTKQTGPAGQKVLKVLIEEGMEIIKELYCSVLVDRTKQSVVMLASTEGGMDIEEVAANTPEKILKIFADPSLGLLPYQASELAYGLGIDQINPKLLRPAAKLFSSLYQTFVHEDCSLVEINPLVLTGDDQIVALDAKLSFDDNALFRHRENVDMRDLAEEDPLETEAGEFELNYIKLDGSIGCMVNGAGLAMGTMDIIKTYGGEPANFLDVGGTATE

SEQ ID NO: 193894 - protein, 283 aa, Unknown
  Bacterial polypetide isolated from the Sargasso Sea
MSVLIDKNTKAIFQGFTGSQATMHAEQCINYGTNIVGGVTPGKGGIEHLNRPVFNSVKDACSETNANVSVIFVPARFTKAAIIEAAESGIKLIICITEGVPVIDMIEVINELKNYPEVRLVGPNCPGVITPGEAKLGIMPADIHMKGSVGIVSRSGTLTYEAVKQTTDAGIGQSSCIGIGGDPVNGTSFIDCLEMFEKDQQTESIVMVGEIGGTAEEEAAEYIKTNISKPVVSYIAGVTAPKGKRMGHAGAIISGGKGTAQDKFKALELAGVSVVTDLNLIGS

SEQ ID NO: 193895 - protein, 279 aa, Unknown
  Bacterial polypetide isolated from the Sargasso Sea
MYLSLVIDRGAKCVSIILSEAGGMNIEEVAEKTPEKILKAELNSNFKISSDQISLFARNLAFNKTQESEFKHIVENCCKIFKDKDLSLLEINPLVITRAGALHCLDAKLNIDENALFRQEQIAEKRDASQEDSREFEAKQNDLSYVALDGNIGCMVNGAGLAMGTMDTIKLYDGEPANFLDVGGTATKERVSSAFKLILSDKNVKGILVNIFGGIVRCDLIAEGIIEAIKEINVEIPIVVRLQGNQSNLGKRLLNESGLNVIGEDSLQLAAKKIVDLVK

SEQ ID NO: 193896 - protein, 387 aa, Unknown
  Bacterial polypetide isolated from the Sargasso Sea
MKIHEYQGKTILNDYQICVPKGIPAYSIEEALNAYDTLDSDFVAIKAQIHAGGRGKGGGVKIAKNRIDAENHISDILGMNLVTHQTGPNGKKVERIYLESGVDIESEYYAAITLDRNTEMDVFMVSTEGGVEIEKVASETPDKIIKIWIDPLVGIKTFQLRKLAFGLKLKGAAFKEAVDTFRKMYNCYKNTDASLLEINPLVKTKNENIIALDSKFNFDNNALFRQKLIMEMRDLSEEDKMEVEASNYNLNYIKLDGNVGCMVNGAGLAMATMDIIKLAGGEPANFLDVGGTASSETVKNGFRIILSDKNVKSILINIFGGIVRCDRVAKGVVEVVKELGLKVPIVVRLQGTNAEEAKIILEKSNVSVIPADGMKDAAEKAVSKAKN

SEQ ID NO: 193897 - protein, 329 aa, Unknown
  Bacterial polypetide isolated from the Sargasso Sea
MNLHEYQGKALFAEYNLPVSKGKVVFKAEDIIDACNEIGGSKWVVKAQVHAGGRGKSGGVELISNPEDGVKFAQKWLGKNLVTYQTDKKGQPVNCILVEECTNIAKELYLSAIIDRESQQIVFIGSSEGGVNIEDVAKNMPEKIIYQGFVYKDDSLNENAENIAKVLKLNDQQTLQFIPIIDNLLRLFVEKDLSLLEINPLVITENGDLHCLDAKINIDSNALYRQPELLDMRDETQEDPKEAEAAKNDLSYVSLDGNIGCMVNGAGLAMGTMDTIKFFGGNPANFLDVGGTATQERVAKAFKIILDDPEVKVVLVNIFGGIVRCDLIA

SEQ ID NO: 193898 - protein, 385 aa, Unknown
  Bacterial polypetide isolated from the Sargasso Sea
MNIHEHQAKELFDGYDIPVSTGSVAYKKSQINEAVGKVKGPIWVVKAQIHAGGRGKGGGVKVVSSKEEAVNEAEKMFGMNLITPQTGPAGKEVKRIYIENGSDIKKELYLSCLLDRATSKVAFIVSKMGGMDIEAVAKDTPDHITTVQIEPSIGVTEKDVNTISTAFELEKDLEGQLSDLIKNMYKFFLEKDASLVEVNPLIITETDKLLCLDAKVNFDDNALYRHPEIEELRDENEEDEYEREASKFDLAYIKLDGNIGCMVNGAGLAMASLDIIKMYGGEPANFLDVGGGASKEKVSSAFKIILSDKGVKGILVNIFGGIMRCDIIAEGIVAAAKELEISVPLVVRLEGTNVDEGKKILDNSSIEIISANDLDDAAKKINKLV

SEQ ID NO: 193899 - protein, 386 aa, Unknown
  Bacterial polypetide isolated from the Sargasso Sea
MNIHEHQAKQILKKYGAVVPEGVFALNVDDLLDKVKSLKTEKYVLKAQIHAGGRGKAGGVKILNTIEELELAAKELFGKILITHQTGPEGREVKRLYVEESSNIEKEFYLSCLVDRASSKIAFISSDQGGMDIEEVASKTPEKIITTKVAINDEISNNDCEKIIKIFNLNNDAKNQAITLIKSIYKMFISTDANMVEVNPLILTKEEKIVCLDAKVNFDSNALFRHPEIVELRDLNEEDSTEIEASKHDLAYIKLDGSIGCMVNGAGLAMATMDIIKLYGKEPANFLDVGGGASKEKVSAALKIILSDKNVKGILINIFGGIMRCDVLAQGVVDAAKEINISVPLVVRLAGTNFKQGKEILDNSGLKLISAENLDDAAKKIVEAIK

SEQ ID NO: 193900 - protein, 355 aa, Unknown
  Bacterial polypetide isolated from the Sargasso Sea
SKNKVITSADDVVNACGDIGGNKWVVKAQVHAGGRGKAGGVKLVSSPEEGVEFANHWLGKRLITYQTDSNGQLVNSILVEECTEIAKELYLSAVVDRGSQRIVFIGSSEGGVNIEEVAENTPEKIIYEPIDPLTGPMGFQSRKISKVLGLEGEQSKQFAKMLPQLTDLFVTHDLSLLEINPLVITQGGKLHCLDAKINIDSNAIYRQPEIQAMHDPSQEDPRESEAALNDLSYVSLDGNIGCMVNGAGLAMGTMDTIKYFGGSPANFLDVGGTATQERVSKAFKLILADQEVKVVLVNIFGGIVRCDLIAEGILAAIEEVGVSIPVVVRLEGNNADIGSNILAESSAEIVSLNSL

SEQ ID NO: 193901 - protein, 289 aa, Unknown
  Bacterial polypetide isolated from the Sargasso Sea
MSVLIDNNTKAIFQGFTGSQATMHAEQCIDYGTNIIGGVTPGKGGQEHLNKPVFDSVKDACAFDEIDTSVIFVPAKFTKSAILEAAENGINLIICITEGVPVLDMIEVTNILKSFPGTRLVGPNCPGVISPGKSKLGIMPASIHKEGSVGIVSRSGTLTYEAVKQTSDVGLGQSTCIGIGGDPVNGTSFIDCLKMFENDNQTESIVMVGEIGGTAEEEAAEYIKSNISKPVISYIAGVTAPKGKRMGHAGAIISGGKGTAQDKFKALESAGVRVVTDLNLIGSKLKELL

SEQ ID NO: 193902 - protein, 204 aa, Unknown
  Bacterial polypetide isolated from the Sargasso Sea
SIYKMFVSTDANMVEVNPLILTKEKKIVCLDAKVNFDSNALFRHPEIVKLRDLNEEDPTEIEASKHNLAYIKLNGSIGCMVNGAGLAMATMDIIKLYGKEPANFLDVGGGASKEKVSAALKIILSDKNVKGILINIFGGIMRCDVLAQGVVDAAKEINISVPLVVRLAGTNFKEGKEILDNSGLKLISAENLDDAAKKIVEVIK

SEQ ID NO: 193903 - protein, 389 aa, Unknown
  Bacterial polypetide isolated from the Sargasso Sea
MDIHEYQAKKILSNFGVTIPRGGIVYSPEDAENKAREIGGSKWVVKAQVHSGARGKAGGIIVCNSTLEVAQATDKLLGKKLVTNQTGPEGKIINRIYIEEATDIKKELYLGLVFDRSSECIMVVASTEGGMSVEEISQKKPETIIRSKIEAAVGMQEFQAREIAFGLGIDSKLISRAAEAIRGCYKAFSELDATMVEVNPLVISEQEQVLALDCKMSFDNNALFRRNQVSELRDKTQENPSEVYASDRGLNYVSLDGNIGNIINGAGLAMASMDMIKLAGGEPANFLDVGGGATPEKIVKAFRLIMMDKKVKVILVNIFAGINRCDWVAEGIVQALQKIEVNMPLVIRLAGTNVEKGNKILKESNLNYIEASTLEDAANKAVKALKELG

SEQ ID NO: 193904 - protein, 386 aa, Unknown
  Bacterial polypetide isolated from the Sargasso Sea
MNIHEHQAKQILKKYGAAVPNGIFGFSSEEIVEKAKKLNTEKYVLKAQIHAGGRGKAGGVKILDNIQDLSLASKEMLGKVLITHQTGPTGKEVKRLYVEESSNIKKEFYLSCLVDRASSKIAFISSDQGGMDIEEVAKSNPEKIITTKVDLIDEIKEEDCKKIIKIFNLDEKTSLQGIKLIKSIYKMFISTDANLVEINPLILTEENDLLCLDAKMNFDDNSIFRHPEILELRDLNEEDPAEIEASKYDLAYIKLDGSIGCMVNGAGLAMATMDIIKLYGEEPANFLDVGGGASKEKVSAAFKIILSDKNVKGILINIFGGIMRCDVLAQGVVDAAKEIKIDVPLVVRLAGTNFLEGKKILDNSGLKIISASDLSDAAEKIVKEIK

SEQ ID NO: 193905 - protein, 282 aa, Unknown
  Bacterial polypetide isolated from the Sargasso Sea
FKEYYLSCLVDRATSKIAFISSTQGGVDIENVAAKNPEKIITTRTNLNNGIDEATIEKVLKPFNLNSEQKKDGKKLINALYKVLIEKDASLIEINPLIITKNQKILCLDAKMNFDDNALYRQPEILKLRDFNEEEPAEIEASKYDLAYIKLSGSIGCMVNGAGLAMATMDIIKLYGQEPANFLDVGGGASKEKVSAAFKLILSDKNVKGILINIFGGIMRCDVLAQGVVDAAKETKINIPLVVRLAGTNFKEGKLILDKSGLDILSAEDLNDAAKKIVKAIK

SEQ ID NO: 193906 - protein, 291 aa, Unknown
  Bacterial polypetide isolated from the Sargasso Sea
MSVLINKNTKVICQGFTGSHGTFHSEQAIKYGTNLVGGVTPKKGGQIHLQRPVFDTVEEAKKNTGANTSMIYVPAKFAGAAIIEAIEASMELIVCITEGIPVLDMLKVKQKLEKSKSRLIGPNCPGIITPDECKIGIMPGNIHKKGSVGIVSRSGTLTYEAVAQTSENGMGQSTCIGIGGDPINGTNFIDCLDLFLKDEETKSILMIGEIGGTAEEEAADFIKEHKIKKPIVGFVAGLAAPPGRRMGHAGAIISGGKGGAEQKIKKMEECGITVAKSPSEIGKTLLNKLSN

SEQ ID NO: 193907 - protein, 200 aa, Unknown
  Bacterial polypetide isolated from the Sargasso Sea
MFIELDASLVEINPLILTKDNQIVCLDAKMKFDDNAIFKHPEIKELRDLNEEEETEIEASKYDLAYIKLDGNIGCMVNGAGLAMATMDIIKLYGEEPANFLDVGGGASKEKVSAAFKIILSDKNVKGILINIFGGIMRCDVLAKGLVEAAREIKINVPLVVRLAGTNFKEGKEILENSGLEIISASDLGDAAKKIVEAIK

SEQ ID NO: 193908 - protein, 384 aa, Unknown
  Bacterial polypetide isolated from the Sargasso Sea
QSKKLFSDHGIPVLEGNIASSPDEAKSSAEKLKGDIWVVKAQVHAGGRGKAGGVKIARSIAEVHEMASEMLGTNLITKQTDEKGLPVNQVYIESGTSIQSEYYLSLLVDRTKESWTYIASIEGGVDIEAVAEESPEKIINYTIDPLKGLELSSLKQMADRMGFTDDVHSQFVSITKKMFEIAKDKDANLIEVNPLILDDHNQLIALDAKISIESNALFRQEELLSFKDNSQENELEVKASEHDLSYVSLDGNIACMVNGAGLAMATMDLIKLHGGEPANFLDVGGGATTDRVKMAIDIIMENPNVDAILINIFGGIVRCDVIAQGITEAVKSTAIDIPIVVRLQGTNVELGTRILEESGMKIISASDLTDAAIKVVSSVKEAVQ

SEQ ID NO: 193909 - protein, 390 aa, Unknown
  Bacterial polypetide isolated from the Sargasso Sea
MNLHEYQAKQLFREYGIAVSDGIAASSAEQAEKAALSLGVSKWVVKAQVHAGGRGKAGGVEVVHKIEKVREFADKWLGTNLVTFQTDADGQPVNQILVETCTEIENELYLGAVIDRASQRLVVMASTEGGVNIEEVAEQTPEKIFKVEIDPIEGTNDMDADGLSSLLGLNDSQSSQFRSIYKGLVKLFVEKDLALLEVNPLVITGSGDLLCLDAKLNIDSNALYRQEALTEMRDFSQEDERESKAAEWDLSYVALDGNIGCMVNGAGLAMGTMDIIKLHGGEPANFLDVGGTADAKRVAEAFKIILSDKNVNTVLINIFGGIVRCDVIADGIVEALTVMGVSVPVVVRLEGNNAQVGLRTLDECDLNIIPASNLQEAAELAVKASRGEIS

SEQ ID NO: 193910 - protein, 291 aa, Unknown
  Bacterial polypetide isolated from the Sargasso Sea
MSILIDENSRVVVQGLTGREGQFHALRNRAYGTNVVAGTRPGKGGENVEGIPIFDTINDAVSETKADVALTFVPPSFAKEAVLEAAFGGCKLIVCITEGIPAKDEAEMYDILKKETDSLLLGPNCPGLISPGKANVGIMPHEITLPGNIGVVSRSGTLTYQAVHELTKLNIGQSTCIGIGGDPVPGMSFIDVIEKFEKDDDTNGIVMIGEIGGTAEEEAAEYIKKNISKPVVSYIAGVTAPPGKKMGHAGAIVSGNKGTAKVKIQELTSAGATVVKTPTEIGEAMKEAISG

SEQ ID NO: 193911 - protein, 388 aa, Unknown
  Bacterial polypetide isolated from the Sargasso Sea
MNLHEYQSRNLLKDYSIAFPMGDIGQSPEEIYNIAKKYDGRVVVKAQIHSGGRGKAGGVKLCNSPEEAKEFAKNILGKNIITNQTDSDGVIVEKLLVTELTDIDREFYLSITIDPDFEGPVLIISPEGGMDIEKVAEDTPEKIIRLPFDPVIGAKPYELRKIIRTLDLPKEANNEFIKMINNLYVAFLETDSTLIEINPLVIDKKNNLIPLDCKINIDDDSFFRQKSIFKLRDKNQENPIETRAKDFDLAYVKLDQGNVGCLVNGAGLAMATMDVTTKSGCFPANFLDVGGSTDKEKIKEAFRILVSDKNVEFLLINLFAGIARADLIAEGVVEAAKETSFDLPIIVSMRGTNSERGFSILKNSDLDIHIAENLGNAAEVLSVLNKRK

SEQ ID NO: 193912 - protein, 269 aa, Unknown
  Bacterial polypetide isolated from the Sargasso Sea
FHSEQAIKYGTNLVGGVTPKKGGQQHLDRPVFNSVLEAKNEVGADATMIYVPAKFAAAAIIEAIGASVELIVCITEGIPIQDMLKVRQKLSGSSSRLIGPNCPGIITPDECKIGIMPGSIHKRGSVGIVSRSGTLTYEAVAQTTENGLGQSTCIGIGGDPINGTNFIDCLDLFLNDSETESILMIGEIGGTAEEEAAEFIKNHKIKKPIVGFIAGITAPPGRRMGHAGAIISGGKGGAEDKIKKMEECGITVAKSPSIIGKTLFDKLSN

SEQ ID NO: 193913 - protein, 388 aa, Unknown
  Bacterial polypetide isolated from the Sargasso Sea
MNIHEHQAKELLKQYNIPTPSGYVAFTTEEAIKVSKKLPGPIFVVKAQIHAGGRGKAGGVKVVKNLDEVKNSAETILGKNLITHQTGPEGKLVQRLYIEDGCDIRAEYYFSMVIDRVTSRVSVIASTEGGMDIEQVAKETPEKILSFNIDPTIGFQPFHSRLIANELKLEGSSFKQASKFFNQLYKLFTEKDASLLEINPLVLTSENSLIALDAKMSFDNNALFKHPDIMSLRDETEEDPAEILASKFDLAYIKLDGTIGCLVNGAGLAMATMDIIKLKGASPANFLDVGGSATEEKVTEAFKIILSDPAVEGILVNIFGGIMRCDIIASGVVAAAKTLSLSKPLVVRLAGTNVEKGKQILRDSGLKIIPADDLDDAAIKIVSAVKGD

SEQ ID NO: 193914 - protein, 387 aa, Unknown
  Bacterial polypetide isolated from the Sargasso Sea
MDIHEYQAKKILSSFGVTIPRGGIVYSPENAENKAREIGGSKWVAKAQIHSGARGKAGGIIVCNSPLEVAQATDKLLGKKLVTNQTGPEGKIVNRIYIEEATDIEKELYLGLVFDRSSESIMIVASTEGGMSVEEISKEKPETIIRSKIEVAVGIQNFQARELAFGLGIEPALIPRVSDTIVGCYKAFSELDATMVEVNPLVISKQKQILALDCKMSFDNNAMFRRSQVSELRDKTQEETKEVYASDRGLNYVSLDGNIGNIINGAGLAMASMDMIKLAGGSPANFLDVGGGATPEKIVKAFRLITMDEKVRVILVNIFAGINRCDWVAEGIVQALQKIEVKVPLVIRLAGTNVEKGNEILKKSKIKYIEANTLEDAANKAVKALGK

SEQ ID NO: 193915 - protein, 385 aa, Unknown
  Bacterial polypetide isolated from the Sargasso Sea
MDIHEYQAKEILSSFGVTIPRGGIVYSPENAENKAREIGGSRWVVKAQIHSGARGKAGGIIICNSSLEVAQATDKLLGKKLVTNQTGPEGKIVNRIYIEEATDIEKELYLGLVFDRSSESIMVVASTEGGMSVEEIAKEKPETIIRSKIEVAVGIQSFQARELAFGLGIESDLIARASDTIIGCAKAFSELDATMVEVNPLVISKQKQILALDCKMSFDNNAMFRRNKVSELRDKSQEDEKEVYASDRGLNYVSLEGNIGNIINGAGLAMASMDMIKLAGGEPANFLDVGGGATPEKIVKAFRLITMDKKVKVILVNIFAGINRCDWVAEGIVQALEKIEIKVPLVIRLAGTNVEKGNKILKDSKINYIEASTLEEAANKAVAAL

SEQ ID NO: 193916 - protein, 386 aa, Unknown
  Bacterial polypetide isolated from the Sargasso Sea
MNIHEHQAKQILKKYGAAVPNGVFGLTVEELIEKSKSLKTNKYILKAQIHAGGRGKAGGVKILDSIEELKKASKEMMGKKLITHQTGLEGKVVRRLYVEESSNIEKEFYLSCLVDRASSKIAFISSDQGGVDIEEVAKKNPEKIITTKINYSKEISNKDCENIIKIFSLEQKAQEQAKNLIKAIYKMFVSTDASMVEINPLILTKEGNLICLDAKVNFDDNALFKHPEIAELRDLSEEDPIEIEASKHDLSYIKLDGSIGCMVNGAGLAMATMDIIKLYGKEPANFLDVGGGASKEKVTEALKLILSDKNVKGILINIFGGIMRCDVLAQGVVNAAKDMDINVPLVVRLAGTNFKEGKKILDSSGLKLISAENLDDAAKKIVGAIK

SEQ ID NO: 193917 - protein, 386 aa, Unknown
  Bacterial polypetide isolated from the Sargasso Sea
MNIHEHQAKKILKKYGAPVPEGVHGFSVAEIVDKAKNLNTKKFVLKAQIHAGGRGKAGGIKILNNIDELKVASAELLGKKLITPQTGIDGKEVKRIYVEESSEISKEFYLSCIVDRATSKIAFISSDQGGMDIEEVAKNNPEKIITTRIDFQTEIKHEDCEEVIKIFKLNSDANNQAIKLIKSIYKLFIENDASLIEINPLILTKDNKIICLDAKINFDDNALFRNQEILSLRDLTEEEEKEIEASKHDLSYIKLDGNIGCMVNGAGLAMATMDIIKLYGEEPANFLDVGGGASKEKVSAAFKIILSDRNVKGILINIFGGIMRCDILAQGVVDAANEININVPLVVRLAGTKFEEGKKILDNSGLKIISASDLSDAAKKIVKAIK

SEQ ID NO: 193918 - protein, 390 aa, Unknown
  Bacterial polypetide isolated from the Sargasso Sea
MNLHEYQSKKLFLDHGIPVLKGEIANSPDEAKSAAEKLQSGIWVVKAQVHAGGRGKAGGVKIAKSIAEVGERAAEMLGTNLITKQTDDLGLPVSKVYIESGTSIQSEYYLSLLVDRTKESWTFIASKEGGVDIEAVAEESPDKIINYTIDPFKGLEIESLKEMADRMGFIDDIQSQFISITKKMFEIAKEKDANLIEVNPLILDDENQLIALDAKITIESNALFRQKELLLLKDDSQENELEVKASEHDLSYVSLDGNIACMVNGAGLAMATMDLIKLHGGEPANFLDVGGGATTERVKMAIEIIMENPNVDAILINIFGGIVRCDVIAQGIYEAVKSTKIDIPIVVRLQGTNVELGRKILEESGMKIISASDLTDAAIKVVASVKGKVE

SEQ ID NO: 193919 - protein, 291 aa, Unknown
  Bacterial polypetide isolated from the Sargasso Sea
MSILVNKDTKVICQGFTGSHGTFHSEQSIKYGTNLVGGVTPKKGGQTHLERPVFNTVQEAKNETGANASMIYVPAKFAAAAITEAIDASMELIVCITEGIPILDMLKVKQKLSGSNSRLIGPNCPGIITPDECKIGIMPGNIHKKGSVGIVSRSGTLTYEAVAQTTANGLGQSTCIGIGGDPINGTNFIDCLDLFLNDTETESILMIGEIGGTAEEEASDFIKNHKIKKPMVGFIAGVTAPPGRRMGHAGAIIAGGKGGASEKIKTMEDAGITIAKSPADIGKTLLNKLSN

SEQ ID NO: 193920 - protein, 284 aa, Unknown
  Bacterial polypetide isolated from the Sargasso Sea
MSVLINKDTKVICQGFTGAQGTFHSEQAIAYGTKMVGGVTPGKGGQTHLGLPVFNTVKEAVEATGAEASVIYVPAAFCKDSILEAANGGIKLIVCITEGIPTLDMLDAKVKCDELGVRLIGPNCPGVITPGECKIGIMPGHIHLPGKVGIVSRSGTLTYEAVKQTTDYGFGQSTCVGIGGDPIPGSNFIDILKLFQEDPQTEAIVMIGEIGGSAEEEAAAYIKKHVTKPVVSYIAGVTAPAGKRMGHAGAIISGGKGTADEKFAALEDAGVKTVKSLADIGKAL

SEQ ID NO: 193921 - protein, 295 aa, Unknown
  Bacterial polypetide isolated from the Sargasso Sea
RGKRLYVEVSSNIKKEFYLSCLVDRANSKIAFISSDQGGMDIEEVARKSPDKILTTKIDFANEISDKDCDIIVKIFNLDAEINNQAKSLVKSIYKMFIETDASMVEINPLILTKENKIICLDAKINFDDNALFRNPDIKKLRDLSEEDPLEIEASKHGLSYIKLDGNIGCMVNGAGLAMATMDIIKLYGEEPANFLDVGGGASKEIVTAGFKIILSDKNVKGILINIFGGIMKCDVLAQGVVDAAKEIKISVPLVVRLAGTNFQEGKDILEKSNLNIISASNLSDAAKKIIKEIK

SEQ ID NO: 193922 - protein, 291 aa, Unknown
  Bacterial polypetide isolated from the Sargasso Sea
MSILINKNTKVICQGFTGTHGTFHSEQALKYGTKLVGGVTPKKGGSKHLGLPVFNSVIEAKETTGANASMIYVPPKFAAAAIIEAIEARIELIVCITEGIPVLDMIKVKKLLKNNNSRLIGPNCPGIITPEECKIGIMPGNIHKKGSVGIVSRSGTLTYEAVHQTTTNGMGQSTCIGIGGDPINGTNFIDCLDLFLKDDETNSIVMIGEIGGTAEEEASEFLKKSKVKKPMVGFIAGLTAPPGRRMGHAGAIISGGKGGALDKIEIMKSAGITISKSPADIGKTLYNKLNS

SEQ ID NO: 193923 - protein, 386 aa, Unknown
  Bacterial polypetide isolated from the Sargasso Sea
MNIHEYQAKKLLKKFGAPVPNGVHGSTTEEILNKTKLLNTEKYVLKAQIHSGGRGKAGGIKITNTLEELKKAADQILGKTLVTNQTGPKGKKVKKLYVEESSNIDKEFYLSCLVDRAKSKIAFISCLEGGMDIEEIAIKKPEKIITTRVDVEKEISDTDCERIIEVFKLEYDAKDQAIDLIKSIYKIFIEKDASLIEINPLVLTKENNILCLDAKINFDDNAIFRHPDISELRDLNEEDPIEIEAKKKELSYIKLDGNIGCMVNGAGLAMATMDIIKLFGGSPANFLDVGGGASKDKVSAAFKMILSDKNVKGILINIFGGIMRCDVLALGVVEAAKEMEIDIPIVARLAGTNYEKGKKILEESKLKIISASDLSEAAKKIVKVTK

SEQ ID NO: 193924 - protein, 360 aa, Unknown
  Bacterial polypetide isolated from the Sargasso Sea
MKIHEFQAKQVLSRYGVPVPRSKVAESVEEAVDAARELGGEVWVVKAQIHAGGRGKGGGVKVCRGLEEVRENAEKILGMQLVTKQTGPAGQKVLRVLIEEGMEIIKELYCSVLVDRTKQSVVMLASTEGGMDIEEVAANTPDKILKIFADPSLGLLPYQASELAYGLGIDQINPKLLRPAAKLFSSLYQTFVHEDCSLVEINPLVLTGDDRVVALDAKLSFDDNALFRHRENADMRDLAEEDPLETEAGEYELNYIKLDGSIGCMVNGAGLAMGTMDIIKTYGGEPANFLDVGGTATEETVEKGFQIITQDPNVRCILINIFGGIVRCDMVASGIVEAFRKVNLQIPVVVRLEGTMQKKP

SEQ ID NO: 193925 - protein, 209 aa, Unknown
  Bacterial polypetide isolated from the Sargasso Sea
IEAIDASIELIVCITEGIPVLDMLKVKKKLAGSKSRLIGPNCPGIITPDECKIGIMPGNIHKKGSVGIVSRSGTLTYEAVYQTTKNGLGQSTCIGIGGDPINGTNFIDCLELFLNDKETKSILMIGEIGGTAEEEAAEYIKNQKIKKPMVGFIAGITAPPGRRMGHAGAIISGGKGGADQKIKKMEESGITIAKSPSEIGITLINKLNN

SEQ ID NO: 193926 - protein, 385 aa, Unknown
  Bacterial polypetide isolated from the Sargasso Sea
MNIHEHQAKELFDGYDIPVSTGSVAYEKSQINEAVGKVKGPIWVVKAQIHAGGRGKGGGVKVVSSKEEAVNEAERMFGMNLITPQTGPAGKEVKRIYIENGSDIKKELYLSCLLDRATSKVAFIVSKMGGMDIEAVAKDTPENITTVQIEPSIGVTENDINTISKAFELKKDLESQLSDLIKNMYKFFLEKDASLVEVNPLIITETDKLLCLDAKVNFDDNALYRHPEIEDLRDENEEDEYEREASKYDLAYIKLDGNIGCMVNGAGLAMASLDIIKMYGGEPANFLDVGGGASKEKVSSAFKIILSDKGVKGILVNIFGGIMRCDIIAEGIVAAAKELEISVPLVVRLEGTNVDEGKKILDNSSIEIISANDLDDAAKKIVKLV

SEQ ID NO: 193927 - protein, 291 aa, Unknown
  Bacterial polypetide isolated from the Sargasso Sea
MSVLINKDTKVICQGFTGAHGTFHSEQTIKYGTNLVGGVTPKKGGQIHLERPVFNTVKEAKDQTGANATMIYVPAKFAASAIIEAIDSSIELIVCISEGIPILDMLKVKRKLSNSKSRLIGPNCPGIITPDECKIGIMPGNIHKKGTVGIVSRSGTLTYEAVAQTSENGLGQSTCIGIGGDPINGTNFIDCLDLFLNDEETQSIVMIGEIGGTAEEEAAEFIKNHKIKKPMVGFVAGITAPPGRRMGHAGAIISGGKGNADEKIQIMEKSGITMAKSPSEIGITLLNKLSN

SEQ ID NO: 193928 - protein, 387 aa, Unknown
  Bacterial polypetide isolated from the Sargasso Sea
MDIHEYQAKKILSDFGVTIPRGGIVYSPENAENKAREIGGSKWVVKAQIHSGARGKAGGIIVCDTPLEVAQATDKLLGKKLVTNQTGPEGKIVNRIYIEEATDIERELYLGLVFDRSSESIMVVASTEGGMSVEEISKEKPETIIRSKIEVAVGMQSFQARELAFGLGIEPDLIRRASETIIGCYKAFSELDATMVEVNPLVISKQKQILALDCKMSFDNNAMFRRNQVSELRDKTQEDSKEVFASDRGLNYVSLDGNIGNIINGAGLAMASMDMIKLAGGSPANFLDVGGGATPEKIVKAFKLVTMDEKVKVILVNIFAGINRCDWVAEGIVEALKKIEVNVPLVIRLAGTNVEKGNQILKESKINYIEANTLEDAANKAVAALNK

SEQ ID NO: 193929 - protein, 420 aa, Unknown
  Bacterial polypetide isolated from the Sargasso Sea
MFARAKIGRRNLLAASRDARIIASRALNVHEYQGAEIMAKFGVRVPRGVPCRALDEMDDAMRALAGDDVVVKSQILAGGRGLGTFASGFKGGVHVVPKSEAKATAAKMLGETLVTKQSGPAGKPVNVLYLAEKMTLTREMYFAVMLDRASAGPLVIASAEGGTSIEDLAASHPEKIIKMRLDVERGMTQTQADELVKRLGIAKHQEDAAKQLMALYETFAKTDCTMIEVNPLAEDQDGRVVAADAKLNFDDNAEYRQKDVFALRDHSQEDPREVQASKFDLNYIGLDGNIGCMVNGAGLAMATMDIIQLYGGSPANFLDVGGNASEEQVVEAFKILTADPKVRAILVNIFGGIMKCDVIAAGIVAAAKQVDLKVPLIVRLEGTNVEAGNDILKSSGMTIITASDLDDAAQKACSSLSASA

SEQ ID NO: 193930 - protein, 293 aa, Unknown
  Bacterial polypetide isolated from the Sargasso Sea
MSVLINKDTKVICQGFTGGQGTFHSEQAIAYGTKMVGGVTPGKGGTKHLNLPVFNTVQECVDEVNPDATVIYVPPPFAADSILEAIASKVPLIICVTEGIPVQDMIKVKQFLKQSNSRLIGPNCPGVITPDQCKIGIMPGHIHAPGKIGIVSRSGTLTYEAVAQTTAAGLGQSTCIGIGGDPINGTNFIDCLDMFLNDDQTEAILMIGEIGGNAEEEAANFYKNHKIKKPIAGFIAGKTAPPGRTMGHAGAIVSGGSGGADAKVKVMSECGFIMSESPSGLGEAVVKAIEEWK

SEQ ID NO: 193931 - protein, 282 aa, Unknown
  Bacterial polypetide isolated from the Sargasso Sea
MNIHEHQAKEILKKYGAIVPEGVFSYSVEELLQKAKSLKTEKFVLKAQIHAGGRGKAGGIKIVNTIEELNSAAKEMLGKKLITHQTGPQGREVKRLYVESSSEIEKEFYLSCLVDRASSKIAFISSDQGGMDIEDVAKNNPKKIVTTKINLDDKISDKDCEKIVEIFNLSPDAKKKAINLIKSIYKMFIDIDANLVEINPLILTKENKIICLDAKMSFDDNALFRNPEILNLRDLNEEEEIEIEANKHGLSYIKLEGSIGCMVNGAGLAMATMDIIKLYGEG

SEQ ID NO: 193932 - protein, 393 aa, Unknown
  Bacterial polypetide isolated from the Sargasso Sea
MKIHEYQGKEVFKNFSIPTPRGFLIKDINSAEKIIKKAHDEFKSDKAVIKAQIHAGGRGKGGGVKVANGLESALKYVKEMHGMQLVTHQTGSSGQKVRKVYIEEASEIKKEFYCAITLDRNLGKDVFMVSTEGGVEIEKVADETPEKIVKTWIDPLIGMKSYQARKLAFGLKLEGNAFKESVKLFIKLYECYMKTDASLVEINPLVLTADEKIIALDAKFNFDGNALFRQKDILKLRDLDEEDPTEIEASKFDLNYIKLDGNVGCMVNGAGLAMATMDIIKIAGGDPANFLDVGGAASAETVKNGFKIILSDKNVKAILINIFGGIVRCDRVANGVVDAVKDLGLQVPVVVRLEGTNAEDAKNILSKSGLSIIPANDMKDAAEKVVEAATKRG

SEQ ID NO: 193933 - protein, 316 aa, Unknown
  Bacterial polypetide isolated from the Sargasso Sea
MNIHEHQAKQILKKYGAVVPEGVFAFTVEELVEKAKSLKTEKFVLKAQIHAGGRGKAGGVKILNTIEELSTAAKELLGKNLITHQTGPKGREVKRLYVEVSSNISKEFYLSCLVDRASSKIAFISSDQGGMDIEEVAKKTPNKIITTKVDFENEISDASCEKIIKIFNLNNKNKNDAIKLIKSIYKMFISTDASMVEINPLILTKENRIVCLDAKINFDDNALFKHKEISDLRDLNEEDSTEIEASKHDLAYIKLDGSIGCMVNGAGLAMATMDIIKLYGEQPANFLDVGGGASKEKVSAAFKIILSDKNVKGILI

SEQ ID NO: 193934 - protein, 291 aa, Unknown
  Bacterial polypetide isolated from the Sargasso Sea
MSILVNKKTKVICQGFTGSHGTFHSEQAIKYGTNLVGGVTPKKGGQLHLERPVFNSVKEAKDQTDANATMIYVPAKFAADAIIEAIDASIELIVCITEGIPILDMLKVKDILSGSQSRLIGPNCPGIITPGECKIGIMPGSIHKSGSVGIVSRSGTLTYEAVDQTTKNGLGQSTCIGIGGDPINGTNFIDCLDLFLKDEKTKSILMIGEIGGTAEEEASEFIKNHKVKKPIVGFIAGVTAPPGRRMGHAGAIISGGKGGAKEKIKTMEEAGITIARSPAEIGKTLLNKLSL

SEQ ID NO: 193935 - protein, 291 aa, Unknown
  Bacterial polypetide isolated from the Sargasso Sea
MSVLIDKNTKVICQVFTGSHGTFHSEQSIKYGTNIVGGVTPKKGGQIHLERPVFNTVKEAKDATGADATMIYVPAKFASSAIIEAIDASIELIVCISEGIPILDMLKVKKKLKDSNSRLIGPNCPGIITPNECKIGIMPGSIHKKGSVGIVSRSGTLTYEAVAQTTENNLGQSTCIGIGGDPINGTNFIDCLDLFLNDDQTESILMIGEIGGTAEEEAAEFVKNHKIKKPIVGFIAGVTAPPGRRMGHAGAIISGGKGNAEEKIKIMEDCGITVANSPSDIGKTLLNKLSN

SEQ ID NO: 193936 - protein, 388 aa, Unknown
  Bacterial polypetide isolated from the Sargasso Sea
MNLHEYQAKQLFAEYGLPVSEGYACATPQEAAEAADKIGGNTWVVKCQVHAGGRGKAGGVKLAKSKDEIRAFAQNWLGKNLVTYQTDANGQPVTKILVESCTDIAKELYLGAVVDRGSRRVVFMASTEGGVEIEKVAHETPELIHKAAIDPLVGPQPYQARELAFKLGLVGEQIKQFTKIFMGLGQMFLDCDFALLEINPLVITAQGNLHCLDGKINIDANALYRQPKLRQMHDPSQDDPREAHAAQWELNYVALDGNIGCMVNGAGLAMGTMDIVNLHGGSPANFLDVGGGATKERVTEAFKIILSDSKVQAVLVNIFGGIVRCDMIAEGIIGAVKEVGVKVPVVVRLEGNNAELGARKLADSGLNIIAATSLTDAAQQVVKAAEAK

SEQ ID NO: 193937 - protein, 287 aa, Unknown
  Bacterial polypetide isolated from the Sargasso Sea
MINKDTKVICQGFTGGQGTFHSEQAIAYGTQMVGGVSPGKGGTTHLGLPVFNTVRDAVEATGATASVIYVPAPFCKDAILEAIDAGIKLIVTITEGIPTLDMLDVKVKLQETGVRMIGPNCPGVITPGECKIGIMPGHIHKPGKVGIVSRSGTLTYEAVKQTTDEGFGQSTCVGIGGDPIPGSNFIDILEMFQNDPQTEAIVMIGEIGGNAEEDAAAYIKAHVTKPVVSYIAGVTAPAGKRMGHAGAIIAGGKGTAAEKFAALEDAGVKTVRSLADIGKALREVTGW

SEQ ID NO: 193938 - protein, 388 aa, Unknown
  Bacterial polypetide isolated from the Sargasso Sea
MKIHEYQGKEILRKFGVAVPRGKPAFSVDEAVKVAEELGGPVWVVKAQIHAGGRGKGGGVKVAKSIEQVREYANQILGMQLVTHQTGPEGQKVNRLMIEEGADIKQELYVSLVVDRISQKIVLMGSSEGGMDIEEVAEKHPELIHKVIVEPSTGLLDAQADDLAAKIGVPAASIPQARAILQGLYKAFWETDASLAEINPLNVSGDGKVIALDAKFNFDSNALFRHPEIVAYRDLDEEDPAEIEASKFDLAYISLDGNIGCLVNGAGLAMATMDTIKLFGGEPANFLDVGGGATTEKVTEAFKLMLKNPDLKAILVNIFGGIMRCDVIAEGVIAGSKAVNLNVPLVVRMKGTNEDLGKKMLADSGLPIISADSMEEAAQKVVAAAAGK

SEQ ID NO: 193939 - protein, 296 aa, Unknown
  Bacterial polypetide isolated from the Sargasso Sea
MNIHEHQAKDILKDFGAPTTEGVIIFNSEGIIDKIKDLNTDQFVLKAQIHAGGRGKAGGVKLVKKKDIVDEAKKLFGKVLVTPQTGPDGRVVKRIYIQKAYDIKKELYLSCLVDRQSSKIAFISSTEGGVDIEAVAKKTPEKIITTKVDLKQNLSPEEIKNILQIYQLDKNQMESAIKLVKAMYSALIKKDASLIEINPLVITKNNEILCLDAKMNFDDNAIFKHPEILELRDLNEENSSEIEASKHDLAYIKLDGSIGCMVNGAGLAMATMDIIKLYGEEPANFLDVGGGASKEK

SEQ ID NO: 193940 - protein, 386 aa, Unknown
  Bacterial polypetide isolated from the Sargasso Sea
MNIHEHQAKEILKKYGAIVPAGVFSTNVDDLIEKAKNLKTEKYVLKAQIHAGGRGKAGGVKILNTLEELKNSANDLLGKTLVTHQTGPEGREVKRLYVEESSNIEKEFYLSCLVDRASSKIAFISSDQGGMDIEEVASSNPEKIITTKVDIAEEISDSDCELVIKIFDLNSDAKDQAISLIKSIYKMFISTDANMVEVNPLILTKEGKIVCLDAKVNFDSNALFRHPEIQELRDLNEEDPTEIEASKHDLAYIKLDGSIGCMVNGAGLAMATMDIIKLYGKEPANFLDVGGGASKEKVSAAFKIILSDKNVKGILINIFGGIMRCDVLAQGVVDAAKEINISVPLVVRLAGTNFKEGKEILDNSGLKLISAENLDDAAKKIVEAIK

SEQ ID NO: 193941 - protein, 291 aa, Unknown
  Bacterial polypetide isolated from the Sargasso Sea
MSVLVNKYTKVICQGFTGSHGTFHSEQAIKYGTNLVGGVTPKKGGQKHLDRPVFNSVLEAKNEVGANATMIYVPAKFAAAAIIEAIDASIELIICITEGIPIQDMLKVRQKLSGSNSRLIGPNCPGIITPDECKIGIMPGSIHKRGSVGIVSRSGTLTYEAVAQTTENGLGQSTCIGIGGDPINGTNFIDCLDLFLNDDETESILMIGEIGGTAEEEAADFIKNHKIKKPIVGFIAGITAPPGRRMGHAGAIISGGKGGAEDKIKKMEECGIIVAKSPSIIGKTLFDKLSN

SEQ ID NO: 193942 - protein, 364 aa, Unknown
  Bacterial polypetide isolated from the Sargasso Sea
ADTAQGAVEAADRIGGNEWVVKCQVHAGGRGKAGGVKLVKNKDDIRAFAENWLGKNLVTFQTDENGQPVSKILVESCTDIANELYLGAVVDRTTRRVVFMASTEGGVEIETVAEETPEKILKAEIDPIVGPQPYQAREMAFALGLSGVQIKQFTQIFLGLAKMFEELDVALIEINPLVIKTDGNLHCLDAKVGIDGNALYRQPKLKDMQDPSQEDAREAHAAQWELNYVALDGNVGCMVNGAGLAMGTMDIVNLHGGKPANFLDVGGGATKERVAEAFKIILSDDNVKAVLVNIFGGIVRCDMIAEGIIGAVKEVGVEVPVVVRLEGTNAELGREVLANSGLDIIAAESLTDAAQKVVAAAEGK

SEQ ID NO: 193943 - protein, 224 aa, Unknown
  Bacterial polypetide isolated from the Sargasso Sea
MSVLINKDTKVICQGFTGGQGTFHSEQAIAYGTQMVGGVTPGKGGTEHLGLPVFNTVREAVEATGATATVIYVPAPFCKDSIVEAADAGIELIVCITEGIPTLDMLYVKEYVEAKGVRMIGPNCPGVITPGECKIGIMPGHIHKPGKVGIVSRSGTLTYEAVKQTTDEGFGQSTCVGIGGDPIPGSNFIDILQMFQDDPQTEAIVMIGEIGGTAEEEAAAFIKA

SEQ ID NO: 193944 - protein, 285 aa, Unknown
  Bacterial polypetide isolated from the Sargasso Sea
MKIHEYQGKEVFKSFSIPAPRGYLIKDISSAEKIIKKAHDEFKSDKVVIKAQIHAGGRGKGGGVKVANGLESALKYVKEMHGMQLVTHQTGSSGQKVRKVYIEEASEIKKEFYCAITLDRNLGKDVFMVSTEGGVEIEKVADETPEKIVKTWVDPLIGMKSYQARKLAFGLKLEGDAFKESVKLFIKLYQCYMKTDASLVEINPLVLTADEKIIALDAKFNFDGNALFRQKDILKLRDLDEEDPTEIEASKFDLNYIKLDGNVGCMVNGAGLAMATMDIIKIAGG

SEQ ID NO: 193945 - protein, 289 aa, Unknown
  Bacterial polypetide isolated from the Sargasso Sea
MGILIDNNTKLLVQGITGSQGQLHTRGCRDYGTNIVAGVTPGKGGQDFEGIPIFNTVQEAVNATGANASMIFVPPPFAADAVMEAAGAKIPLIVAITEGVPVTDMVRAVDFVRRQGVRLVGPNCPGVITPGQCKIGIMPGPIHEPGKVGVVSRSGTLTYEAVGQLGRAGLGQSSCIGIGGDPVNGTNFIDCLQMFEEDSQTEGIVMIGEIGGDAEEQAAEFVKQNVSKPIVSFIAGQTAPPGRRMGHAGAIISGGKGTASEKMAALQAAGIHVVKTPAEIGSRMREVLG

SEQ ID NO: 193946 - protein, 206 aa, Unknown
  Bacterial polypetide isolated from the Sargasso Sea
IDASIELIVCISEGIPILDMLKVKKKLQNSKSRLIGPNCPGIITPNECKIGIMPGNIHKKGSVGIVSRSGTLTYEAVAQTTENNLGQSTCIGIGGDPINGTNFIDCLDLFLNDDQTESILMIGEIGGTAEEEAAEFVKNHKIKKPIVGFIAGVTAPPGRRMGHAGAIISGGKGNAEEKIKKMQDCGITVANSPSDIGKTLLNKLSN

SEQ ID NO: 193947 - protein, 293 aa, Unknown
  Bacterial polypetide isolated from the Sargasso Sea
MNIHEHQAKQILKKYGATVPNGVFGLTVEELVEKSKSLKTNKYILKAQIHAGGRGKAGGVKILDSIEELTKASKEMMGKKLVTHQTGPEGKVVRRLYVEEASKIEKEFYLSCLVDRASSKIAFISSDQGGVDIEEVAKKNPEKINTTKINYSKEISNEDCENIIRIFNLKNKEKDQAKNLIKAIYKMFVSTDASMVEINPLILTEEGNIVCLDAKVNFDDNALFKHPEIADLRDLSEEDPIEIEASKHDLSYIKLDGSIGCMVNGAGLAMATMDIIKLYGEEPANFLDVGGGA

SEQ ID NO: 193948 - protein, 394 aa, Unknown
  Bacterial polypetide isolated from the Sargasso Sea
MNLHEYQAKELLKKFDLPVPKGLVFIENLSQIEENLETLKGPPWVIKSQIHAGGRGAGKFKNNFNDMGGVQVVLEKNKVFKIADSMINNVLITKQTGPKGKEVKRIYIEEGCKIKKEFYLSILIDRNTSQPMMMISASGGMDIEKVAESNPDEIDYIYFSDLTNIVLNKNLIKTLGISEKQFEELNTIVNKLIKLFINVDASSIEINPLVLNDEGHFILLDSKISLDDNALFRHPELNELQDISEEDPLELEATKNNMNYVKLDGSIGCMVNGAGLAMATMDLIKQFGEEPANFLDLGGTANKERAVKGFKIIQSDSNVKSVLINIFGGIIHCDMIANGIIEAVKELNFKLPIVVRFQGTNSKEGRDIINKSNLGMTSIDDFTEAAKKVVELAN

SEQ ID NO: 193949 - protein, 291 aa, Unknown
  Bacterial polypetide isolated from the Sargasso Sea
MSVLINKNTKVICQGFTGSHGTFHSEQAIRYGTNLVGGVTPKKGGQKHLDRPVFNSVMEAKKTVGVDATMIYVPAKFAAEAIIEAVDASIELIVCITEGIPVQDMLKVKQRLNKSESRLIGPNCPGIITPDECKIGIMPGNIHKRGSVGIVSRSGTLTYEAVAQTTENGLGQSTCIGIGGDPINGTNFIDCLDLFLKDEETESILMIGEIGGTAEEEAAEFILNHKIKKPIVGFIAGITAPPGRRMGHAGAIISGGKGGAEHKIKKMEESGITIAKSPSIIGKTLFNKLSN

SEQ ID NO: 193950 - protein, 293 aa, Unknown
  Bacterial polypetide isolated from the Sargasso Sea
MSVIVNKDTKVICQGFTGSQGTFHSEQAIKYGTNMVGGVTPKKGGTEHLGLPVFDTVKEAKDKTEANATVIYVPPPFAAKAILEAIDSEMELIVCITEGIPVMDMLEVKDKLRSSKSRLIGPNCPGVITPDECKIGIMPAHIHQKGNVGIVSRSGTLTYEAVYQTTVEGLGQSTCIGIGGDPVNGTNFIDCLELFLSDPETESIIMIGEIGGSAEEEAAEFLRKEKVKKPTVGFIAGTSAPPGRRMGHAGAIVSGGKGGAEDKIEAMKSAGIQISNSPAALGSTLLEVLKNQN

SEQ ID NO: 193951 - protein, 291 aa, Unknown
  Bacterial polypetide isolated from the Sargasso Sea
MSILVNKETRLIVQGFTGSQGTLHSEQSIEYGTNIVGGVTPGKGGQQHLGKPVFNSVKEAVEAEEPNASIIFVPAKFCKDSIMESAEAGIRLIVCITEGVPTLDMLDIKKYVDNKGIRLIGPNCPGVITPGEAKLGIMPGNIHLPGSIGIISRSGTLTYEAVKQTTDLGFGQSSCVGIGGDPIPGSSFIDILKLFEEDQQTEAIVMVGEIGGTAEEAAAEYIKNNITKPVISYIAGQTAPAGKRMGHAGAIIAGGKGTAKDKILKLRECGVHVADNLVEIGSKVEEILKNN

SEQ ID NO: 193952 - protein, 177 aa, Unknown
  Bacterial polypetide isolated from the Sargasso Sea
SNSRLIGPNCPGIITPGECKIGIMPGNIHKKGSVGIVSRSGTLTYEAVAQTTNNGLGQSTCIGIGGDPINGTNFIDCLDLFLNDEETKSILMIGEIGGTAEEEAAEFFRDHKLKKPMVGFIAGITAPPGRRMGHAGAIISGGKGGAESKIKKMEDCGITIAKSPAEIGKTLINKLSN

SEQ ID NO: 193953 - protein, 147 aa, Unknown
  Bacterial polypetide isolated from the Sargasso Sea
SAEIEASKYDLAYIKLDGSIGCMVNGAGLAMATMDIIKLYGKEPANFLDVGGGASKEKVSAALKIILSDKNVKGILINIFGGIMRCDVLAQGVVDAAKEINISVPLVVRLAGTNFKEGKEILENSGVKLISAENLDDAAKKIVEVIK

SEQ ID NO: 193954 - protein, 396 aa, Unknown
  Bacterial polypetide isolated from the Sargasso Sea
MNLHEYQGKEILEKFNVKVQKGYVADNIEDAVKCAQKIQKETGTGIFVIKAQIHAGGRGKGGGVKIAKSLEEVKKIASEILGMNLVTPQTPPEGKLVRKILIAEDVYYDGESERSEFYISVLLNRSSSKNMIIYSTEGGVDIETVAEKTPNLIFREEVESENGLLPFQARKIAFNLGLSGEAFKNMVQFITSLYQAYQMSDASLFEINPVLKSSDNKIIAVDSKVSLDDNALFRHKEYEAMRDLDEENPVEIEARAEGLNYVDLDGNVGCMVNGAGLAMATMDLIKLAGGEPANFLDVGGTADADRVEKAFRLILNDNNVKAILVNIFGGIVRCDRVAEGIVLAYKNLKQVNVPIIVRLQGTNSAEAKEIIDNSGLNVLSAIGFDEAAKKVQSAIK

SEQ ID NO: 193955 - protein, 186 aa, Unknown
  Bacterial polypetide isolated from the Sargasso Sea
LVITKNGDLHCLDAKINIDSNALFRQPELMEMHDESQEDPQEAEAAKHDLSYVSLDGNIGCMVNGAGLAMGTMDTIKFFGGNPANFLDVGGTATQERVAKAFKIILKDPEVKVVLVNIFGGIVRCDLIAEGIVAAIKEVGIEVPVVVRLEGNNAEIGAKILEESDIKVESINDLGSAAKKSVELAK

SEQ ID NO: 193956 - protein, 164 aa, Unknown
  Bacterial polypetide isolated from the Sargasso Sea
MFRRDKVSELRDKTQEDEKEVYASDRGLNYVSLEGNIGNIINGAGLAMASMDMIKLAGGEPANFLDVGGGATPEKIVKAFRLITMDKKVKVILVNIFAGINRCDWVAEGIVQALEKIEVKVPLVIRLAGTNVEKGNKILQDSKLDYIEANTLEDAANKAVAALK

SEQ ID NO: 193957 - protein, 291 aa, Unknown
  Bacterial polypetide isolated from the Sargasso Sea
MSVLVGNNTRLIIQGITGTEGSFHGQQMIDYGTNIVAGVTPGKGGQEALGVPVFNSVQEAVKHQGANTSVIFVPPKFAAGAVIESIDADLDLIVCITEGIPAADMVKVNHALENNNTRLIGPNCPGIITPGQAKIGIMPGFIHTPGSIGIMSRSGTLTYEAVHQIGAHGLGQSTVIGIGGDPIIGTTFIDMLQLFAEDDETNGVVMIGEIGGTAEEEAAQWVVDNNFSKPVVSFIAGQTAPPGRRMGHAGAIIAGGKGTANEKMTELKKAGITVVESPADIGQAMVEVLNK

SEQ ID NO: 193958 - protein, 317 aa, Unknown
  Bacterial polypetide isolated from the Sargasso Sea
PSILGMNLVTHQTGPEGKKVQRLLIETGIDIAKEFYAGIVLDRKEKKFVFMVSTEGGVEIEKVAAESPEKIIKEWIHPEDGLTKDQAKSLCDALSLKGIQQDSGIEIFTALWKAFNSLDCSLMEINPLVLTKKDEVIALDAKINFDGNGLFRHPELSELRDETEEDPAEAEASSYNLNYIKLDGNVGCMVNGAGLAMGTMDIIKLKGGEPANFLDVGGVANPETVANGFKIILSDPNVKSILINIFGGIVRCDRVAQGVINAMETISVNVPVVIRLEGTNAKEASSLLNKSPLNFIVANSLSDAAEKAVSATNMESK

SEQ ID NO: 193959 - protein, 361 aa, Unknown
  Bacterial polypetide isolated from the Sargasso Sea
MNIHEHQAKQILKKYGASVPKGVFALSVNELIQKAKTLKTEKFVLKAQIHAGGRGKAGGVKILNSIEELKVSAEDMMGKILITHQTGPEGRKVKRLYVEESSNIDKEFYLSCLIDRASSKITFISSDQGGMNIEEVAKKNPEKILNTKVNFKDEISKEDCEEIIKIFDLNNDIKNDAILLIKSIYKMFISTNANMVEINPLILTKEKSLVCLDAKVNFDDNALFRHPEIMELRDLNEEDPTEIEASKHDLAYIKLDGNIGCMVNGAGLAMATMDIIKLYGEEPANFLDVGGGASKEKVSAAFKIILSDKNVKGILINIFGGIMRCDVLAQGVIDAAKEIKINVPLVVRLAGTNFKEGKNIL

SEQ ID NO: 193960 - protein, 338 aa, Unknown
  Bacterial polypetide isolated from the Sargasso Sea
IHAGGRGKAGGVKIVDNIALLEEEAKKLFGRTLVTHQTGPLGREVKRLYVETASEIEKEFYLSCLVDRASAKIAFISSDQGGMNIEEVAVKSPEKIITTKVDFNESISEEDCNNIIKIFDLDSDASKQAINLIKSIYKMFIDTDANLVEINPLILTKKNKIVCLDAKMTFDENALFKHPEIQKLRDFNEEEETEIEASKHDLAYIKLDGNIGCMVNGAGLAMATMDIIKLYGEEPANFLDVGGGASKEKVSAAFKIILSDKNVKGILINIFGGIMRCDVLAQGVIDAAKEIKIKVPLVVRLAGTNFKEGKEILDNSGLEIISANDLSDAAKKIVEAIK

SEQ ID NO: 193961 - protein, 293 aa, Unknown
  Bacterial polypetide isolated from the Sargasso Sea
MSVLINKDTKVICQGFTGGQGTFHSEQAIAYGTKMVGGVTPGKGGTKHLDLPVFNTVQECVEEVNPDATVIYVPPPFAADSILEAISSKIPLIICVTEGIPVQDMIKVKQFLKQSKSRLIGPNCPGVITPGQCKIGIMPGHIHSPGKIGIVSRSGTLTYEAVAQTTGAGLGQSTCIGIGGDPINGTNFIDCLDMFLNDEQTEAILMIGEIGGSAEEEAANFFKNHKIQKPIAGFIAGKTAPPGRTMGHAGAIVSGGSGGADAKVKVMSDCGFIMSESPSGLGEAVLKAIEEWK

SEQ ID NO: 193962 - protein, 354 aa, Unknown
  Bacterial polypetide isolated from the Sargasso Sea
KLEKLGGSKWVVKAQIHSGARGKAGGIIICNSELEVAQATDKLLGKKLVTNQTGPEGKIVNKVYIEEATDIKKELYLGLVFDRSSESIMVVASTEGGMSVEEISKQKPESIIRSKIEVAVGMQQFQAREIAFGLGIEPKLISRMAEAITGCYRAFSELDATMVEVNPMVISNQEQILALDCKMSFDNNALFRRNQISELRDKTQENASEVYASDRGLNYVSLDGNIGNIINGAGLAMASMDMIKLAGGEPANFLDVGGGATPEKIVKAFKLISMDKKVKVILVNIFAGINRCDWVAEGIVQALQKIEIKVPLVIRLAGTNVEKGNKILKESKINYIEANTLEDAANKAVKALGK

SEQ ID NO: 193963 - protein, 214 aa, Unknown
  Bacterial polypetide isolated from the Sargasso Sea
MISRAANTIIGCYKAFSELDATMVEVNPLVVSHQDEILALDCKMSFDNNAMFRRDEIAELRDKTQENSNEVYASDRGMNYVSLDGNIGNIINGAGLAMASMDMIKLAGGEPANFLDVGGGATPEKIVKAFKLISMDTKVKVILVNIFAGINRCDWVAEGIVQALSKIEIKHPLVIRLAGTNVEKGNEILKKSNINYIEASTLEDAANKAVKALG

SEQ ID NO: 193964 - protein, 387 aa, Unknown
  Bacterial polypetide isolated from the Sargasso Sea
MDIHEYQAKKILSGFGVTIPRGGIAYSPENAENKARELGGSKWVVKAQVHSGARGKAGGIIICNSSLEVAQAADKLLGKKLVTNQTGPEGKITNRVYIEEATDIKKELYLGLVFDRSSESIMVVASTEGGMSVEEISKKKPETIIRSKIEVAVGMQKFQAREIAFGLKIEPNLIARAADTIIGCYRAFSELDATMVEVNPLVISNQDQILALDCKMSFDNNALFRRNQVSELRDKTQENPSEVYASDRGLNYVSLDGNIGNIINGAGLAMASMDMIKLAGGEPANFLDVGGGATPEKIVKAFKLISMDEKVKVILVNIFAGINRCDWVAEGIVQALEKIDIKVPIVIRLAGTNVEKGNKILKESKIKYIEANTLEDAANKAVKALGN

SEQ ID NO: 193965 - protein, 387 aa, Unknown
  Bacterial polypetide isolated from the Sargasso Sea
MDIHEYQAKEILSKYNVPVLPGSVALKPSEAVTAFDQLGTEKCVVKAQVHSGARGKAGGIKVCSSNEEVEDAAEKLLGSKLVTIQTGSQGKLIEKLYIESGCDIEREIYLAFVMDRAKQRISIVASAEGGMTIEELAVEKPDAIKKVEIDPVVGLTGFQARDLVFALDIPSECIKDGVKMLMGLYKAMVSLDANMIEINPLVITADKKLFALDAKMSFDDNALFRHEDIKVLNDNSQKDPREVAAQEHDLSYVGLEGNIGCMINGAGLAMATMDMIMHCGGKPANFLDIGGGASPERVAKAFELVLQDKEVKAMLVNIYAGINRCDWIAEGIVKAVSSMSLSVPLIVRLSGTNVEKGTKIITDSGLPIILADTLKDAAEKAVEAISS

SEQ ID NO: 193966 - protein, 238 aa, Unknown
  Bacterial polypetide isolated from the Sargasso Sea
MNIHEHQAKQILKQFGATIPDGVFGFTVEELLEKCKSLKTEKYVLKAQIHAGGRGKAGGVKILDNLDELEKSAKELLGKKLVTHQTGPEGREVKRLYVEASSNIASEFYLSCLVDRATSKIAFITSDQGGMDIEEVAIKSPDKILTNKVELNDEISNEECEKIIKIFNLDGNSKIEAISLIKSIYKMFLKTDANMVEINPLILTKEKKIVCLDAKVNFDSNALFRHPEIQELRDLNEE

SEQ ID NO: 193967 - protein, 370 aa, Unknown
  Bacterial polypetide isolated from the Sargasso Sea
MNLHEYQGKALFAEYNLPISKGKIIFKAEDVIEACNEIGGSKWVVKAQVHAGGRGKAGGVELIDDPNEGVKFANKWLGKNLITYQTDKEGQPVNSILIEECTEIVKELYLSAVIDRESQKIVFIGSCEGGVNIEEVAKNAPEKIIYQGVTYGDKSLPEDATNIAKVLKLDEKQTDQFLPIIENLLRLFIEKDLSLLEINPLVINEKGDLHCLDAKINIDSNALYRQPELQDMYDESQEDPQEAEAAKSDLSYVSLDGNIGCMVNGAGLAMGTMDTIKFFGGNPANFLDVGGTATQERVAKAFKIILKDPEVKVVLVNIFGGIVRCDLIAEGIIAAIKEVDINIPVVVRLEGNNAEKGSKILSKANIKMKV

SEQ ID NO: 193968 - protein, 387 aa, Unknown
  Bacterial polypetide isolated from the Sargasso Sea
MDIHEYQAKKILSDFGVTIPRGGIVYSPENAENKAREIGGSKWVVKAQIHSGARGKAGGIIVCDSPLEVAQATDKLLGKKLVTNQTGPEGKIVNRIYIEEATDIERELYLGLVFDRSSESIMVVASTEGGMSVEEISKEKPETIIRSKIEVAVGMQSFQARELAFGLGIEPDLIRRASETIIGCYKAFSELDATMVEVNPLVISKQKQILALDCKMSFDNNAMFRRNQVSELRDKTQEDAKEVFASDRGLNYVSLDGNIGNIINGAGLAMASMDMIKLAGGSPANFLDVGGGATPEKIVKAFKLVTMDEKVKVILVNIFAGINRCDWVAEGIVEALKKIEVNVPLVIRLAGTNVEKGNKILKESKINYIEANTLEDAANKAVAALNK

SEQ ID NO: 193969 - protein, 163 aa, Unknown
  Bacterial polypetide isolated from the Sargasso Sea
FKHPEILELRDLNEEEETEIEASKYDLAYIKLNGRIGCMVNGAGLAMATMDIIKLYGEEPANFLDVGGGASKEKVSAAFKIILSDKNVKGILINIFGGIMRCDVLAKGLVEAAREIKINVPLVIRLAGTNYEEGKKILDNSGLKIISASDLGDAAEKVVEAIK

SEQ ID NO: 193970 - protein, 291 aa, Unknown
  Bacterial polypetide isolated from the Sargasso Sea
MSILINKNTKVICQGFTGSHGTFHSEQAIKYGTDLVGGVTPKKGGQIHLKRPVFNTVKEAKDNTGANASMIYVPAKFAGEAIIEAIDASLELIICITEGIPVIDMLKVKQKLSKSNSRLIGPNCPGIITPDECKIGIMPGSIHKKGSVGIVSRSGTLTYEAVAQTTNIGMGQSTCIGIGGDPINGTNFIDCLDLFLKDKETKSILMIGEIGGTAEEEAAEFVKNHDIKKPIVGFIAGLAAPPGRRMGHAGAIISGGKGGAKEKIKKMEECGITVAKSPSEIGKTLINKLSN

SEQ ID NO: 193971 - protein, 387 aa, Unknown
  Bacterial polypetide isolated from the Sargasso Sea
MNLHEYQAKEYFEIYDLPVSRRSIIKKSSDIDEAIESIDFSNGCVAKVQSHTGGRGKVGGVKLCKSKAEVEEFVEQWLGKKIVTIQTDSGGLPVNIISLEELTDIDKELYMSFVVDRGEKCVSMIVSEAGGMNIEEVAEKTPEKILKAKLNSDYLIEEKEIKALADSLNFNSEQTNQFSKIVSGCAKLFKDKDLSLLEINPLVIKTDGNLHCLDAKINVDENALYRQEDLLDKRDPTQEDQREYEAKENDLSYVSLDGNIGCMVNGAGLAMGTMDTIKLYDGEPANFLDVGGTATKERVSKAFKLILSDQNVKGILINIFGGIVRCDLIAQGIIDAIKERSVSVPIVVRLQGNKSEEGKSILNDSGLNLIGEDSLQEASKKIVELVK

SEQ ID NO: 193972 - protein, 142 aa, Unknown
  Bacterial polypetide isolated from the Sargasso Sea
KFDLAYIKLDGTIGCLVNGAGLAMATMDIIKLKGASPANFLDVGGSATKEKVTEAFKIILSDSAVEGILVNIFGGIMRCDIIASGVVAAAKTLSLSKPLVVRLAGTNVEEGKKILRDSGLKIIPADDLDDAAKKIVSAVKGD

SEQ ID NO: 193973 - protein, 386 aa, Unknown
  Bacterial polypetide isolated from the Sargasso Sea
MNIHEHQAKELLKKFGANVPIGVFGLSVEEVLKKAKLLKTEKFVLKAQIHAGGRGKAGGVKILETLDELEKSSRELFGKKLVTHQTGPEGKEVKRLYVEESSNIEKEFYLSCLVDRASSKIAFISSDQGGIDIEEVASKSPEKIITTKIDLKDQISNDECEKIIKIFNLNGNLKNQAISLIKSIYKMFVDTDANMVEINPLILTKENKVLCLDAKINFDDNALFKHPEILNLRDLNEEDPSEIEASQYGLSYIKLNGSIGCMVNGAGLAMATMDIIKLYGEEPANFLDVGGGASKEKVSAAFKIILSDKNVKGILINIFGGIMRCDVLAQGMVDAAKKMNIHIPLVVRLAGTNFKEGKKILDNSGLKLISAENLEDAAKKIVKAIS

SEQ ID NO: 193974 - protein, 386 aa, Unknown
  Bacterial polypetide isolated from the Sargasso Sea
MNLHEYQGKALFAEYNLPVSKGKVVFEAQDVIDACNEIGGSKWVVKAQVHAGGRGKSGGVELISNPEDGVKFAQKWLGKNLVTYQTDKKGQLVNCILVEECTNIAKELYLSAIIDRESQKIVFIGSSEGGVNIEDVAKNIPEKIIYQGFVYKDDSLNENAENIAQVLKLNDQQTIQFISIIDNLLRLFVEKDLSLLEINPLVITENGDLHCLDAKINIDSNALYRQPELLEMRDESQEDPKEAEAAKSDLSYVSLDGNIGCMVNGAGLAMGTMDTIKFFGGNPANFLDVGGTATQERVAKAFKIILDDPDVKVVLVNIFGGIVRCDLIAEGIIAAIKEVEVKIPVVVRLEGNNADIGSKILSKAKIKIESINDLADAAKKTVSLAK

SEQ ID NO: 193975 - protein, 232 aa, Unknown
  Bacterial polypetide isolated from the Sargasso Sea
MNIHEHQAKELLKKYGANVPNGVFALTVKDILEKAKNLNSQKLVLKAQIHAGGRGKAGGVKILNDISELEKESNNLLGKKLITHQTGPSGKIVKRLYVEEPSDIDKEFYLSCLVDRGSSKIAFISSDQGGMDIEEVAKKNPNKINTIKVDFNKSISDLDCEKVIKIFDLKPDQSLEAMNIVKSIYKLFIDLDASMVEINPLILTKQGKIICLDAKINFDDNALFRHPEISAL

SEQ ID NO: 193976 - protein, 369 aa, Unknown
  Bacterial polypetide isolated from the Sargasso Sea
MNIHEHQAKEILKKYGAAVPNGVFGFSSDEVVEKAKKLNTQKYVLKAQIHAGGRGKAGGVKILKNIEDLSKASKEMIGKVLITPQTGPNGKEVKRLYVEESSNIKKEFYLSCLVDRASSKIAFISSDQGGMDIEEVAKLNPEKIVTTKLDVLEEINDEDCKKIIKIFNLDDKTSLQGIKLIKSIYKMFISTDANLVEINPLILTQENNLLCLDAKMNFDDNSIFRHPEISELRDLNEEDPTEIEAGKHDLAYIKLDGSIGCMVNGAGLAMATMDIIKLYGEEPANFLDVGGGASKEKVSAAFKIILSDKNVKGILINIFGGIMRCDVLAQGVVDAAKEIKINVPIVVRLAGTNFEEGKKILDNSDLEII

SEQ ID NO: 193977 - protein, 363 aa, Unknown
  Bacterial polypetide isolated from the Sargasso Sea
AGELDGPVWVVKAQIHAGGRGKGTFREKDAGESGGVRIAKSVEQAAEEAKKMLGRTLVTHQTGPAGKQVNRVYIEQGAEIESELYLALLVDRVTSRISFVCSTEGGMDIEDVAARNPEKIHSFSVDPATGYQAFHGRKIAFALGLENSQVKECIKLMGQLFRAFIEKDMEMLEINPLIITRSGNLTVLDAKVGFDSNAIYRHQDIADLRDTTEEDPKELEASKYDLNYIALDGEIGCMVNGAGLAMATMDIIKLYGAEPANFLDVGGGATKEKVTEAFKIITSDPKVKGILVNIFGGIMRCDVIAEGVVAAVKEVGLQVPLVVRLEGTNVEKGKDIINNSRLDVIAANDLRDGAEKIVRAVKG

SEQ ID NO: 193978 - protein, 293 aa, Unknown
  Bacterial polypetide isolated from the Sargasso Sea
MAVLIDEKTKVICQGFTGSQGTFHSEQAIAYGTKMVGGVTPGKGGGDHLGLPVFNSVHEAKHITNADASVIYVPPPFAADSILEAIDARMELIVCITEGIPVQDMLKVKRALENSSSILVGPNCPGVITPDACKIGIMPGHIHKRGSVGVVSRSGTLTYEAVKQTSDVGLGQSSCIGIGGDPVKGTEHIDVLEWFLNDDETESIIMIGEIGGSAEEEAAQFLKDEAKKGRSKPTAGFIAGRTAPPGRRMGHAGAIVAGGKGGAEDKIEAMQSAGIIVAESPGSLGEAVLKAIG

SEQ ID NO: 193979 - protein, 284 aa, Unknown
  Bacterial polypetide isolated from the Sargasso Sea
MKIHEYQGKEILRKFGVAVPRGKPAFSVDEAVKVAEELGGPVWVVKAQIHAGGRGKGGGVKVAKSIEQVREYANQILGMQLVTHQTGPEGQKVNRLMIEEGADIKQELYVSLVVDRISQKIVLMGSSEGGMDIEEVAEKHPELIHKVIVEPSTGLLDAQADDLAAKIGVPAASIPQARAILQGLYKAFWETDASLAEINPLNVSGDGKVIALDAKFNFDSNALFRHPEIVAYRDLDEEDPAEIEASKFDLAYISLDGNIGCLVNGAGLAMATMDTIKLFGGERA

SEQ ID NO: 193980 - protein, 390 aa, Unknown
  Bacterial polypetide isolated from the Sargasso Sea
MNIHEYQAKEILSRFGVSIPKGGVAYSPENAKDRATELGGDLWVVKAQIHSGARGKAGGIIVCKSEQEVSDAANKLLGKTLVTHQTGPEGKTVQRIYVEEGTDIKKEFYLGLVFDRSTESIMVVASSEGGMSVEEIAEEKPESLIKTRIEAAVGMQAYQAREIAFALGLESKAINRCAQAILGAYKAFSTSDATMVEINPLVLTGDDHVLALDCKMSFDDNALYRNPELAELRDKSQEDPKETYAADRGLNYIPLDGDIGNIINGAGLAMASMDMIQLAGGQPANFLDVGGGATPEKFVKAFKLISGDPKVKVILINIFAGINRCDWVAQGIVDALNQITISQPLVIRLAGTNVDEGIKILKDSKITYTEAFTLEDAANKAVKALKELEA

SEQ ID NO: 193981 - protein, 291 aa, Unknown
  Bacterial polypetide isolated from the Sargasso Sea
MSILIDENTKVVVQGLTGREGQFHALRNRDYGTKIVAGTRPGKGGENVEGIPIFDDVEKAVSETNANVALTFVPPAFAKDAVLEAAFGGCELIVCITEGIPAKDEAEMYDILKKETKASLLGPNCPGLISPGKANVGIMPHEITLPGNIGVVSRSGTLTYQAVHELTNLNIGQSTCIGIGGDPVPGMSFIDVIEKFQADSETEGIVMIGEIGGTAEEEAADFIKQNVTKPVVSYIAGVTAPPGKKMGHAGAIVSGNKGTAEAKIQALTDAGAIVVKTPTEIGKAMKDVING

SEQ ID NO: 193982 - protein, 377 aa, Unknown
  Bacterial polypetide isolated from the Sargasso Sea
MDLFEYQGKSLYQKFNINHPNSKLIKNLNDLNDPINLNFPVVVKAQVQVGGRGKAGGIKVAKDINELTQYSEEILGMDIKGHKVEILLLEEASNILEEYYISFTLDRSEKKYLIMLSAKGGMDIEQVAEENPDDLVKFHVSPSEKLTSSTISELINKANLNKDHEESLSEIIENLYLMFTEGDCDLVEVNPLAITDNGVMALDSKVSLDMNAKYKHPYFDDFEQEIPIPESEKNAKEKGLNFIKLDGSVGIIGNGAGLVMSTLDVVAENGGKAANFLDIGGGAKAETVSSALEVLEADQNVKSVLINIFGGITRCDLVAEGIIEATKGKELVWPIIIRLDGTNSLEGLEILRANPNEKIFIEESMDSAAKLAVQKGL

SEQ ID NO: 193983 - protein, 386 aa, Unknown
  Bacterial polypetide isolated from the Sargasso Sea
MNIHEHQAKKILKNYGAKVPNGIFASNVKDLLEKAKTLETEKYVLKAQIHAGGRGKAGGIKLVNNLEELEKEAKNLIGKILVTHQTGPNGRKVQRLYVEEASSINKEFYLSCLVDRESSKIAFISSDQGGMDIEEVAKNNPEKILTTKVEFKDQISDEDCKQILEVFNLDKEAYEEAQKLIKSIYKMFIEKDASLVEINPLILTKDNKIVCLDAKMKFDDNALFKHPEIIDLRDFNEEEETEIEASKYDLAYIKLDGKIGCMVNGAGLAMATMDIIKLYGEEPANFLDVGGGASKEKVSAAFKIILSDKNVKGILINIFGGIMRCDVLAKGLVEAAREIKINVPLVIRLAGTNYKEGKKILDNSGLKIISASDLGDAAEKVVKEIK

SEQ ID NO: 193984 - protein, 156 aa, Unknown
  Bacterial polypetide isolated from the Sargasso Sea
MNIHEYQAKQFLREYGIPVLDGRIIYKAEEAKTAAGELDGPLWVIKAQIHAGGRGKGKFIEESAGVEGGVRLAKSASEAAEQAQKMLGRTLVTKQTGQSGKEVRRIYIEDGCQIAKEFYLAVLIDRTTSRIAFVASKEGGMDIEEVATKTPERIIK

SEQ ID NO: 193985 - protein, 289 aa, Unknown
  Bacterial polypetide isolated from the Sargasso Sea
MSVLINKDTKVICQGFTGGQGTFHSEQAIAYGTKMVGGVTPGKGGTKHLNLPVFNTVQECVEEVNPDATVIYVPPSFAADSILEAISSKIPLIICITEGIPVQDMIKVKQFLKQSKSRLIGPNCPGVITPDQCKIGIMPGHIHTPGKIGIVSRSGTLTYEAVAQTTATGLGQSTCIGIGGDPINGTNFIDCLDMFLNDEQTEAILMIGEIGGNAEEEAANFFKNHKIKKPIAGFIAGKTAPPGRTMGHAGAIVSGGSGGADAKVKVMSECGFIMSESPSGLGEAVVKAI

SEQ ID NO: 193986 - protein, 309 aa, Unknown
  Bacterial polypetide isolated from the Sargasso Sea
KKLVTNQTGPEGKIVNRIYIEEATDIEKELYLGLVFDRSSESIMVVASTEGGMSVEEISKEKPETIIRSKIEVAVGMQNFQARELAFGLGIEPDLIRRASDTIIGCYKAFSELDATMVEVNPLVISKQKQILALDCKMSFDNNAMFRRSQVSELRDKTQEDSKEIFASDRGLNYVSLDGNIGNIINGAGLAMASMDMIKLAGGAPANFLDVGGGATPEKIVKAFKLVTMDEKVKVILVNIFAGINRCDWVAEGIVDALKKIEIKVPLVIRLAGTNVEKGNKILKESKINYIEANTLEDAANKAVAALNK

SEQ ID NO: 193987 - protein, 278 aa, Unknown
  Bacterial polypetide isolated from the Sargasso Sea
MNLHEYQGKEIFAKYDLPVSKGKVVTSLDEVEQACTDIGGSRWVAKAQVHAGGRGKSGGVALCDTIEEVADFSKKWLGKRLVTYQTDKEGQLVSCILVEECTNIADELYYSAVVDRSSREVAIIASSEGGVNIEKVAEETPEKIASISLNGKDISQGDIEKICSTLKLNDTQSSQMEHVVRKTVSMFFECDLSLLEINPLVIKEDGNLHCLDAKINIDSNALFRQKELQEMHDPTQEDPRESEASKYDLSYVSLDGNIGCMVNGAGFSMGTMDTIKFF

SEQ ID NO: 193988 - protein, 281 aa, Unknown
  Bacterial polypetide isolated from the Sargasso Sea
MNIHEHQAKQLLKKFGAIVPNGEACFTVQEVLEKAKKLNLKKYVLKAQIHAGGRGKAGGVKILDNLSDLEKAARDLLGKKLITHQTGPSGKEVKRLYLEEPSNIKKEFYLSCLIDRASSKIAFISSDQGGMDIEEVAKSDPNKINTVKISFKENIEDEDCKKIIRNFNLDDNANLKCIKIIQSIYKTFVSTDASLIEINPLILTKENNIVCLDAKISFDDNAIFKHPELLELRDLNEEDPTEIEASKHDLAYIKLDGSIGCMVNGAGLAMATMDIIKLHGQ

SEQ ID NO: 193989 - protein, 236 aa, Unknown
  Bacterial polypetide isolated from the Sargasso Sea
MSVLIDKNTKVICQGFTGSHGTFHSEQSIKYGTNLVGGVTPKKGGQIHLERPVFNTVKEAKDATGADATMIYVPAKFASSAIIEAIDASIQLIVCISEGIPILDMLKVKKKLQNSKSRLIGPNCPGIITPNECKIGIMPGNIHKKGSVGIVSRSGTLTYEAVAQTTENNLGQSTCIGIGGDPINGTNFIDCLDLFLNDNQTESILMIGEIGGTAEEEAAEFVKNHRIKKPNCWIYS

SEQ ID NO: 193990 - protein, 150 aa, Unknown
  Bacterial polypetide isolated from the Sargasso Sea
EEEATEIEASKHDLAYIKLDGSIGCMVNGAGLAMATMDIIKLYGEEPANFLDVGGGASKEKVSAAFKIILSDKNVKGILINIFGGIMRCDVLAQGVVDAAKEIKIEVPLVVRLAGTNFEEGKKILQNSGLKIISANDLSDAAKKVVEAIK

SEQ ID NO: 193991 - protein, 182 aa, Unknown
  Bacterial polypetide isolated from the Sargasso Sea
SKSILALDCKMSFDNNALFRRSQVSELRDKTQENPNEVYASDRGLNYVSLDGNIGNIINGAGLAMASMDMIKLAGGEPANFLDVGGGATPEKIVKAFKLISMDEKVKVILVNIFAGINRCDWVAEGIVQALEKIDVKVPLVIRLAGTNVEKGNKILKDSKINYIEANTLEDAANKAVKALGK

SEQ ID NO: 193992 - protein, 342 aa, Unknown
  Bacterial polypetide isolated from the Sargasso Sea
MKAQIHAGGRGKAGGVKIVNDLKSLETEAKSLLGKKLITHQTGPSGRIVKRLYVEVSSNIDKEFYLSCVVDRASSKIAFISSDQGGMDIEEVAMKSPEKILTTKVDLDNEISDENCNKIISIFNLDEETKVQGISLIKSIYKLFIETDANLIEINPLILTKEKELICLDAKMNFDGNALFRHPELIELRDLNEEEETEIEASKHDLAYIKLDGTIGCMVNGAGLAMATMDIIKLYGKEPANFLDVGGGASKEKVAAAFKIILSDKNVKGILINIFGGIMRCDVLAQGVVDAAKEIKMNVPLVVRLAGTNFEEGKKILDNSGLELISASDLSDAAKKIVEAIK

SEQ ID NO: 193993 - protein, 387 aa, Unknown
  Bacterial polypetide isolated from the Sargasso Sea
MDIHEYQAKKILSDFGVSIPRGGIAYSPENAENKAREIGGTKWVVKAQIHSGARGKAGGIIVCDTPLAVAQATDKLLGKKLVTNQTGPEGKIVNRIYIEEATEIKKELYLGLVFDRSSESIMVVASTEGGMSVEEIAKQKPETIIRSKIEVAVGMQQFQAREIAFGLGIEPQLIRRAAETITGCYRAFSELDATMVEVNPLVISNQDQILALDCKMSFDNNALFRRNQVSELRDKTQENSNEVYASDRGLNYVNLEGNIGNIINGAGLAMASMDMIKLAGGEPANFLDVGGGATPEKIVKAFKLISMDEKVKVILVNIFAGINRCDWVAEGIVQALQKIEIKVPLVIRLAGTNVEKGNKILKESKINYIEANTLEDAANKAVKALGN

SEQ ID NO: 193994 - protein, 199 aa, Unknown
  Bacterial polypetide isolated from the Sargasso Sea
SFIVCITEGVPTLDMLEVKKIVDGLDITLIGPNCPGVITPGVGKMGIMPGEIHLPGRVGIISRSGTLTYEAVKQTTDLSLGQSSCVGIGGDPIPGSSFIDILELFEADDQTDAIVMVGEIGGSAEEEAAEFISQNVTKPVVSYIAGQTAPPGKRMGHAGAIISGGKGTAEDKIKKLNESGVVVAKNLLEIGSTIKSLMS

SEQ ID NO: 193995 - protein, 386 aa, Unknown
  Bacterial polypetide isolated from the Sargasso Sea
MNIHEHQAKQILKKYGAIVPQGVFALSVDELVEKAKSLNTKKYVLKAQIHAGGRGKAGGVKILDTIEELSEAAKELMGKTLITHQTGPEGREVKRLYVEESSSIEKEFYLSCLVDRASSKIAFISSDQGGMDIEEVAKNTPEKIITTKVDLNNEILEKDCEKIVKIFNLKDTTKIQAISLIKSIYQMFIKTDANMVEINPLILTKEEKIICLDAKVNFDSNALFRQPEIVELRDLNEEDTSEIEASKHDLAYIKLDGSIGCMVNGAGLAMATMDIIKLYGKEPANFLDVGGGASKEKVSAALKIILSDKNVKGILINIFGGIMRCDVLAQGVVDAAKEINISVPLVVRLAGTNFKEGKKILDNSGLKLISAENLDDAAKKIVEAIK

SEQ ID NO: 193996 - protein, 386 aa, Unknown
  Bacterial polypetide isolated from the Sargasso Sea
MNIHEHQAKQILKKYGAVVPEGVFALNVEELLEKVKSLKTEKYVLKAQIHAGGRGKAGGVKILNTIDELELAAKELLGKTLITHQTGPEGREVKRLYVEESSNIEKEFYLSCLVDRASSKIAFISSDQGGMDIEEVASKTPEKILTTKVDINEEISNTDCEKIIKIFNLNNDTKNQAINLIKSIYKMFISTDANMVEVNPLILTKEEKIVCLDAKVNFDSNALFRHPEIVELRDLNEEESTEIEASKHDLAYIKLDGSIGCMVNGAGLAMATMDIIKLYGKEPANFLDVGGGASKEKVSAALKIILSDKNVKGILINIFGGIMRCDVLAQGVVDAAKEINISVPLVVRLAGTNFKQGKEILDNSGLKLISAENLDDAAKKIVEAIK

SEQ ID NO: 193997 - protein, 142 aa, Unknown
  Bacterial polypetide isolated from the Sargasso Sea
MSVLINKDTKVICQGFTGSQGTFHSEQAIAYGTKMVGGVTPGKGGTTHLGLPVFNTVKEAVEATGADASVIYVPAPFCKDSILEAAFGGIKLIVCITEGIPTLDMLDAKVICDELGITLIGPNCPGVITPGECKIGIMPGHI

SEQ ID NO: 193998 - protein, 185 aa, Unknown
  Bacterial polypetide isolated from the Sargasso Sea
MNIHEYQAKNLLKKYRIKVPDGVFSDKVNDLLEKAKSLKTDKFVLKAQIHSGGRGKAGGVKIFDNFKELQNGAMNLMGKILITNQTGPEGRKVNKLYVEEISKIDKELYLACLIDRSSSKIIFISSDQGGMDIEEVAKKNPKKIHTTKINSFNMIKDDECENIVKIFKLEKSEKTKAKDLIKENL

SEQ ID NO: 193999 - protein, 296 aa, Unknown
  Bacterial polypetide isolated from the Sargasso Sea
MNIHEHQAKELLNLNKVNVARGMPAFSVNEALTAAKKLGGPIWVVKAQIHAGGRGKAGGVKVVNSLDEVKNAAEEILGKILVTPQTGAQGKEVKRLYIEEGCDIKKELYLSVLVDRNSGCITFIASTEGGMDIEKVAEETPEKILKLGITPSTGFQDFHGRRLASALNISGKSIRPATLFLKNIYNTFVENDASLIEINPLVINTKDELIALDAKMSFDDNALFRHSKIIEMRDPSEEDPLEHRASEYDLSYIKLDGNIGCMVNGAGLAMATMDIIQLEGGSPANFLDVGGGATKE

SEQ ID NO: 194000 - protein, 290 aa, Unknown
  Bacterial polypetide isolated from the Sargasso Sea
MSVLIDKNTKVICQGFTGSQGTFHSEQAIKYGTLMVGGVTPKKGGQEHLGLPVFNSVKEAKDSTVANATVIYVPPPFAAGAIIEAIDADMELIVCITEGVPVLDMMQVKRKLEKSKSRLIGPNCPGIITPDECKIGIMPGHIHQKGKIGIVSRSGTLTYEAVAQTSAVGLGQSTCIGIGGDPINGTNFIDCLDLFLKDPETEGIIMIGEIGGTAEEEAAEFIKKSEIKKPVASFIAGASAPAGKRMGHAGAIISGGKGTAESKFSALEEAGVHISKSPAKLGETIKEALS

SEQ ID NO: 194001 - protein, 111 aa, Unknown
  Bacterial polypetide isolated from the Sargasso Sea
IKLHGGSPANFLDVGGGATKERVAKAFSIILQDPNVKAILVNIFGGIMKCDIIAEGVVAAAKELSIEVPLVVRLEGTNVDLGKEILNKSGLSIISADNLDDAAQKAVKALN

SEQ ID NO: 194002 - protein, 248 aa, Unknown
  Bacterial polypetide isolated from the Sargasso Sea
GQNHLNLPVFDTLDEAIDVTSANASVIYVPPAFAADSILEAIDAKIDLIVCITEGIPVLDMVKVKNALKYSSSRLIGPNCPGIITPNECKIGIMPGHIHKKGKIGIVSRSGTLTYEAVGQTTAAGLGQSTCVGIGGDPLNGTNFIDCLNLFLSDEETDAIIMIGEIGGTAEEEASEFLKSSKIKKPVAGFIAGRTAPPGRRMGHAGAIVSGKSGGAEAKIDAMRSAGINVTDSPGMLGEAIIEAMKKF

SEQ ID NO: 194003 - protein, 388 aa, Unknown
  Bacterial polypetide isolated from the Sargasso Sea
MKIHEFQAKELLSDYNVPIQRGHVVYSSNEIEKTIDKVQNEFNSDAVVVKAQIHAGGRGKGGGVKFCPSTESAIVSANEILGMNLITHQTGEEGKLVNQILITEALDIEKEFYFALMFDRAKNADVFIVSTEGGVDIEEVAEKTPEKIIKAWVNNDTYPLDDAINTIINSLSLNSFNDAFEIFKNIYNCYSNSDCNLLEINPLVITEDQKIIALDAKVDIDSNALFRQEKIAKFHDTSEEDPLELKASEYGLNYIKLDGNVGCMVNGAGLAMATMDIVKHHGGEPANFLDVGGAANVDTIKNGFKIILSDPNVKSVLINIFGGIVRCDRVANGVIQAVKELNLNVGVVVRLQGTNAKLAKQILDESDIELISAETIDEAAKKAVGLVS

SEQ ID NO: 194004 - protein, 221 aa, Unknown
  Bacterial polypetide isolated from the Sargasso Sea
MKIHEFQAKELLSYYNVPIQRGHVVYSSNEIEKTIEKVQNEFNSDAVVVKAQIHAGGRGKGGGVKFCPSKESAIESANEILGMNLITHQTGEEGKLVNQLLITEALDIEKEFYFALMFDRAKNADVFIVSTEGGVDIEEVAEKTPEKIVKAWVDNDTHLLDDAVNTIIDALSLNSFNDAFKIFKNIYNCYSNSDCNLLEINPLVVTEDQKIIALDAKVDID

SEQ ID NO: 194005 - protein, 278 aa, Unknown
  Bacterial polypetide isolated from the Sargasso Sea
YLIDRKTKAICLIASSEGGMDIEEVADKNPEKIAKIYLDASRKELNSENIDEVLRILDLDTAHKGKLTAVLNNLLLLFIEKDASLIEINPFVLSTEGHLICLDAKMNFDSNALFRHQDILSLRDPEEEDPLEIEASNHGLSYVKLDGTIGCMVNGAGLAMATMDIIKLYGEEPANFLDVGGGATKEQVMNAFKIILSDKNVKGILVNIFGGIMRCEIIAQGIIETASELNLSIPLVVRLEGTNVDLGKKYLEESGLNIIPANDLDEAAKKIVDAVSKV

SEQ ID NO: 194006 - protein, 386 aa, Unknown
  Bacterial polypetide isolated from the Sargasso Sea
MNIHEHQAKEILKRYGAVVPKGVFALNVEELIQKAKSLNTEKFVLKAQIHAGGRGKAGGVRILSNLEELKVAATELLGKTLVTHQTGMEGREVKRLYVEESSNIDKEFYLSCLVDRATSKIAFISSDQGGMDIEEVAKSNPEKIITTKVEMKDEISEKESEEIIKIFDLSENTKKQAKTLIKSIYKMFIGTDANMVEINPLILTKEEKIICLDAKVNFDSNALFRHPEIIELRDLNEENSTEIEASKHDLAYIKLDGSIGCMVNGAGLAMATMDIIKLYGREPANFLDVGGGASKEKVSAALKIILSDKNVKGILINIFGGIMRCDVLAQGVVDAAKEISISVPLVVRLAGTNYKEGKKILDSSGLKLISADNLDDAAKKIVEAIK

SEQ ID NO: 194007 - protein, 388 aa, Unknown
  Bacterial polypetide isolated from the Sargasso Sea
MNLHEYQAKSLFAEYGLPVSEGFACDTAQEAVEAAGRIGGNLWVVKCQVHAGGRGKAGGVKVTGDKEEIRAFAEHWLGKNLVTYQTDEKGQPVAKILVESCTDIANELYLGAVVDRSTRRVVFMASTEGGVEIEKVAEETPELIHKAIIDPLTGPQPYQARDLGFKLGLNPTQMKQFTKIFMGLATMFVDHDFALLEINPLVITTEGNLHCLDGKIGIDGNALFRQPKIKAMHDPSQDDAREAHAAMFELNYVALDGNVGCMVNGAGLAMGTMDIVNLHGGKPANFLDVGGGATKERVAEAFKIILSDSNVKAVLVNIFGGIVRCDMIAEGIIGAVKEVGVKVPVVVRLEGTNAELGREVLAKSGLDIIAANSLTDAAEQVVKAAEGK

SEQ ID NO: 194008 - protein, 290 aa, Unknown
  Bacterial polypetide isolated from the Sargasso Sea
MSVLINKDTKVICQGFTGGQGTFHSQQAIDYGTQMVGGVSPGKGGSEHLGLPVFNTVKDAVAATGATASVIYVPAPFCKDAILEAIDGGIELIVCITEGIPTLDMLEVKVKLEETGVRMIGPNCPGVITPGECKIGIMPGHIHLKGKVGIVSRSGTLTYEAVKQTTDEGFGQSTCVGIGGDPIPGTNFIDVLEMFQNDPQTEAIVMIGEIGGTAEEEAAAYIKANVTKPVVSYIAGVTAPAGKRMGHAGAIIAGGKGTAADKFAALEAAGVTTVRSLADIGKALRAKTGW

SEQ ID NO: 194009 - protein, 385 aa, Unknown
  Bacterial polypetide isolated from the Sargasso Sea
MNIHEYQAKAILKKFNVPVPKGEILLSKDNIVEAAQNVSDNVWVVKAQIHAGGRGKGGGVKIAKSIEEVENYVDQIMGMQLVTHQTGPEGKKVRRVYIEEGSNIVDEIYLSLLVDRQSSQVSFIVSTEGGVNIEEVAEETPEKITTVSIDPLDGVTPQDIDTLSLALNLDGDLKSQASSLFKNLYSAFVETDMSLLEINPLVITKENNIICLDAKVNFDSNALFRHPEYQDLLDPSEEDAAELKASEFGLSYIKLDGNIGCLVNGAGLAMATMDIIKLYGAEPANFLDVGGAATKDLVTEAFKIILSDDSVEGILVNIFGGIMRCDVVAEGIISAANEVNISVPLVVRLEGTNVELGKKIIQESDLSIISASDLDDAAKKITEAI

SEQ ID NO: 194010 - protein, 349 aa, Unknown
  Bacterial polypetide isolated from the Sargasso Sea
MNIHEYQAKEILKKFGLPVLNGKSYEKNIDLLKVDLNDLKGPPWVVKSQIHAGGRGAGYFKNSFNDKGGVQVIFEKDQVKKIASSMMGNVLVTKQTGEIGKTVNRIFIEEGCEIEREFYLSLLVDRNTSKVMMMISAAGGMDIEEVAANNPEKIINMHFDNFKNVTLDSNLQSTLEISQSQFDELNIITNKLLLVFSSIDASTIEINPLVLNKKGSFVLLDAKISLDDNALFRHPDLLELKDLTEEDPLELQAAEHDMNYVKLDGSIGCMVNGAGLAMATMDIIKQFGEEPANFLDLGGTANKDRVIMGFKTIQSDPNVKSILINIFGGIIHCDMIANGIVEAVKELNF

SEQ ID NO: 194011 - protein, 387 aa, Unknown
  Bacterial polypetide isolated from the Sargasso Sea
MDIHEYQAKKILSDFGVTIPRGGIAYSPENAENKAREIGGNKWVVKAQVHSGARGKAGGIILCDTPLAVAQATDKLLGKKLVTNQTGPEGKIINRIYIEEATDIKKELYLGLVFDRGSESIMVVASTEGGMSVEEISKEKPETIIRSKIEVAVGMQQFQAREIAFGLGIKPELIRRATETIIGCYRAFSELDATMVEVNPLVISNQDQILALDCKMSFDNNALFRRNQVSELRDKTQENANEVYASDRGLSYVSLDGNIGNIINGAGLAMASMDMIKLAGGAPANFLDVGGGATPEKIVKAFKLISMDEKVKVILVNIFAGINRCDWVAEGIVQALERIEIKVPLVIRLAGTNVEKGNQILKDSKINYIEANTLEDAANKAVKALGN

SEQ ID NO: 194012 - protein, 284 aa, Unknown
  Bacterial polypetide isolated from the Sargasso Sea
MNIHEHQAKDILKDFGAPVTEGVIIFNSDDIIDKIKDLNTDQFVLKAQIHAGGRGKAGGVKLVKKKDIVDVAKQLFGKVLVTPQTGPEGRVVKRIYIQKAYDIKKELYLSCLIDRQSSKIAFISSTEGGVDIEAVAKKNPEKIITTKVDLRLNLNPEEIKNILQIYQLDKNQMNSATKLVKAMYSALIKKDASLIEINPLVITQNNKILCLDAKMNFDDNAIFKHPEISKLRDLNEENPSEIEASKHDLAYIKLDGSIGCMVNGAGLAMATMDKIKLFGEEPAN

SEQ ID NO: 194013 - protein, 386 aa, Unknown
  Bacterial polypetide isolated from the Sargasso Sea
MNIHEHQAKNILRKYGAKVPDGVYALDVNELLEKAKNLKTDKYVLKAQIHAGGRGKAGGVKIVNDLKSLETEAKSLLGKKLITHQTGPSGRIVKRLYVEVSSNIDKEFYLSCVVDRASSKIAFISSDQGGMDIEEVAIKSPEKILTTKVDLDNEISDENCNKIISIFNLDEETKEQGISLIKSIYKLFIETDANLIEINPLILTKEKELICLDAKMNFDGNALFRHPELIELRDLNEEEETEIEASKHDLAYIKLDGTIGCMVNGAGLAMATMDIIKLYGKEPANFLDVGGGASKEKVAAAFKIILSDKNVKGILINIFGGIMRCDVLAQGVVDAAKEIKMNVPLVVRLAGTNFEEGKKILDNSGLELISASDLSDAAKKIVEAIK

SEQ ID NO: 194014 - protein, 291 aa, Unknown
  Bacterial polypetide isolated from the Sargasso Sea
MSVLIDKNTKVICQGFTGSHGTFHSEQSIKYGTNLVGGVTPKKGGQIHLERPVFNTVKEAKDATGADATMIYVPAKFASSAIIEAIDASIELIVCISEGIPILDMLKVKKKLQNSKSRLIGPNCPGIITPNECKIGIMPGNIHKKGSVGIVSRSGTLTYEAVAQTTENNLGQSTCIGIGGDPINGTNFIDCLDLFLNDDQTESILMIGEIGGTAEEEAAEFVKNHKIKKPIVGFIAGVTAPPGRRMGHAGAIISGGKGNAEEKIKKMQDCGITVANSPSDIGKTLLNKLSN

SEQ ID NO: 194015 - protein, 390 aa, Unknown
  Bacterial polypetide isolated from the Sargasso Sea
MNLHEYQAKQLFRDYGIAVSDGVAASSAEQAENAALSLGVSKWVVKAQVHAGGRGKAGGVEVVDKIEKVREFADKWIGTNLVTFQTDADGQPVNQILVETCTEIENELYLGAVIDRASQRLVVMASTEGGVNIEEVAEKTPEKIFKVEVDPIEGTNDMDADKLSSLLGLNDSQSSQFRSIYNGMVKLFLEKDLALLEVNPLVITGSGDLLCLDAKINIDSNALYRQEVLNEMRDTTQEDERESKAAEWDLSYVALDGNIGCMVNGAGLAMGTMDIIKLHGGEPANFLDVGGTADAKRVAEAFKIILSDKNVNTVLINIFGGIVRCDVIADGIVEALTVMGVSVPVVVRLEGNNAQVGLKTLDECDLNIIPASNLQEAAELAVKASKGEIS

SEQ ID NO: 194016 - protein, 203 aa, Unknown
  Bacterial polypetide isolated from the Sargasso Sea
MYEALISNDASLIEINPLVITKNNEILCLDAKMNFDDNAIFKHPEIYKLRDLNEEDPTEIEASKHDLAYIKLEGSIGCMVNGAGLAMATMDIIKLYGEEPANFLDVGGGASREKVTAAFKILLSDKNVKGVLINIFGGIMQCDVLAQGVVEAAKDVKLKVPLVVRLAGTNFKEGKKILDASGLKILSADNLNDAAKKIVKAIK

SEQ ID NO: 194017 - protein, 291 aa, Unknown
  Bacterial polypetide isolated from the Sargasso Sea
MSILVNKNTKVICQGFTGKHGTFHSEQAIKYGTNLVGGVTPKKGGQMHLSKPVFNSVREAKEKTGANASMIYVPAKFAASAIIEAAEASIELITCITEGIPVLDMLRVKKKLINSNSRLIGPNCPGIITPEECKIGIMPGNIHKKGSVGIVSRSGTLTYEAVAQTTNNGLGQSTCIGIGGDPINGTNFIDCLDLFLNDQETESILMIGEIGGTAEEEAAEFFKNHKIKKPIVGFIAGMTAPTGRRMGHAGAIISGGKGGAEDKIKKMEDCGITIAKSPAEIGKTLLNKLSN

SEQ ID NO: 194018 - protein, 154 aa, Unknown
  Bacterial polypetide isolated from the Sargasso Sea
SQEDPREAKAAEWDLSYVALDGNIGCMVNGAGLAMGTMDIIKLHGGEPANFLDVGGTADSKRVAEAFKIILSDENVNTVLINIFGGIVRCDVIADGIVEALTVMGVSVPVVVRLEGNSAEKGLKILDECELNIIPASNLEEAASLAVKASKGEI

SEQ ID NO: 194019 - protein, 291 aa, Unknown
  Bacterial polypetide isolated from the Sargasso Sea
MSILVNKNTKLICQGFTGSHGTFHSDQAIKYGTNLVGGVTPRKGGQTHLGKPVFNSVKDAVKETGANASMIYVPAKFASSAIIEAIEASLELIVCITEGIPVLDMIQIKKYLSNSKSRLIGPNCPGIITPDECKIGIMPGNIHKKGTVGIVSRSGTLTYEAVDQTTKIGLGQSTCVGIGGDPINGTNFIDCLDLFLKDKNTESIVMIGEIGGTAEEEASEFIKNHQIKKPIVGFIAGITAPPGRRMGHAGAIISGGKGGAEEKIRTMEGAGITIAKSPSDIGITLKNKLSL

SEQ ID NO: 194020 - protein, 386 aa, Unknown
  Bacterial polypetide isolated from the Sargasso Sea
MNIHEHQAKQILRKYGIKVPEGIFAHNVKELIEKAKSLNTEKYVLKAQIHAGGRGKAGGVKLTANLDELEKEATELLGKTLITHQTGPKGREVKRLYVEETSNIDQEFYLSCLVDRATSKIAFISSDQGGMDIEEVASKNPEKIITTKVEYSDEISNENCQKVIEIFKLDKDANSQAINLIKSIYKMFIENDANLVEINPLILTKKNKLICLDAKMNFDDNALFRHPEILKLRDLNEEEKTEIEASKHDLAYIKLDGSIGCMVNGAGLAMATMDIIKLYGEEPANFLDVGGGASKEKVSAAFKIILSDKNVKGILINIFGGIMRCDVLAEGVVEAAKETKIEVPLVVRLAGTNFREGKKILDNSGLKIISASDLADAAKKVVDAIK

SEQ ID NO: 194021 - protein, 128 aa, Unknown
  Bacterial polypetide isolated from the Sargasso Sea
GNIINGAGLAMASMDMIKLAGGEPANFLDVGGGATPEKIVKAFKLISMDEKVKVILVNIFAGINRCDWVAEGIVQALEKIEIKVPIVIRLAGTNVEKGNKILKESKIKYIEANTLEDAANKAVKALGN

SEQ ID NO: 194022 - protein, 387 aa, Unknown
  Bacterial polypetide isolated from the Sargasso Sea
MNLHEYQAKEYFETYDLPVSRRSIIKKSSDIDEAIESIDFSNGCVAKVQSHTGGRGKVGGVKLCKSKLEVEEFVEQWLGKKIVTIQTDSGGLPVNIISLEELTNIDKELYMSFVVDRGEKCVSMIVSEAGGMNIEEVAEKTPEKILKAKLNSDYLIEEKEIKALANSLNFDSEQTDQFSKIVLGCAKLFKDKDLSLLEINPLVIKTDGNLHCLDAKINVDENALYRQEDLLDKRDPTQEDQREYEAKENDLSYVSLDGNIGCMVNGAGLAMGTMDTIKLYDGEPANFLDVGGTATKERVSKAFKLILSDQNVKGILINIFGGIVRCDLIAQGIIDAIRERSVSVPIVVRLQGNKSEEGKSILNDSGLNLIGEDSLQEASKKIVELVK

SEQ ID NO: 194023 - protein, 172 aa, Unknown
  Bacterial polypetide isolated from the Sargasso Sea
MSFDNNALFRRNQVSELRDKYQENPNEVYASDRGLNYVSLDGNIGNIINGAGLAMASMDMIKLAGGEPANFLDVGGGATPEKIVKAFKLISMDEKVKVILVNIFAGINRCDWVAEGIVQALEKIEIKVPIVIRLAGTNVEKGNKILKESKIKYIEANTLEDAANKAVKALGN

SEQ ID NO: 194024 - protein, 325 aa, Unknown
  Bacterial polypetide isolated from the Sargasso Sea
MNIHEHQAKQILKQFGAAVPEGVYGFTIEELLEKCKSLKTNKYVLKAQIHAGGRGKAGGVKILDNLNDLEKSAKELFGKKLVTHQTGPEGREVKRLYVEVSSNIEKEFYLSCLVDRASSKIAFISSNQGGMDIEEVAIKSPDKILTNKIELIDEISDEECEKIIEIFHLEGNPKIEAISLIKSIYKMFIKTDANMVEINPLILTKEKKIICLDAKVNFDSNALFRQPKILELRDLNEEEPAEIEASKYELAYIKLDGSIGCMVNGAGLAMATMDIIKLYGEEPANFLDVGGGASKEKVSAAFKIILSDKNVKGILINIFGGNYEM

SEQ ID NO: 194025 - protein, 166 aa, Unknown
  Bacterial polypetide isolated from the Sargasso Sea
MALFRQKELQEMHDPTQEDPRESEASKYDLSYVSLDGNIGCMVNGAGLAMGTMDTIKFFKGNPANFLDVGGTATQERVAKAFKIILDDPEVKVVLVNIFGGIVRCDLIAQGIVAAIDEVGVEIPVVVRLEGNSAEKGLSILSNSSSKIQSKNSLEDAARTAVELAK

SEQ ID NO: 194026 - protein, 232 aa, Unknown
  Bacterial polypetide isolated from the Sargasso Sea
MSILIDKDTRVLVQGFTGSQGTLHSSQSIEYGTNVVGGVTPGKGGASHLDLPVFNSVKEAVEQVQPNASLIFVPAPFCKGAILEAADAGIKFIVCITEGVPTLDMLEVKKIVDGLDITLIGPNCPGVITPGVGKMGIMPGEIHLPGRVGIISRSGTLTYEAVKQTTDLGLGQSSCVGIGGDPIPGSSFIDILELFEADDQTDAIVMVGEIGGSAEEEAAEFISQNVTKPGFH

SEQ ID NO: 194027 - protein, 291 aa, Unknown
  Bacterial polypetide isolated from the Sargasso Sea
MSVLVNKDTKVICQGFTGSHGTFHSEQAIKYGTNLVGGVTPKKGGQIHLERPVFNTVEEAKNKTGANASMIYVPAKFASAAIIEAINASIELIVCITEGIPILDMLKVKQILSKSNSRLIGPNCPGIITPDECKIGIMPGNIHKKGSVGIVSRSGTLTYEAVAQTTVNGLGQSTCIGIGGDPINGTNFIDCLDLFLNDPKTESILMIGEIGGTAEEEASEYIKNHKIKKPMVGFIAGITAPPGRKMGHAGAIISGGKGSANDKIKTMEDAGITIAKSPADIGKTLLNKLSN

SEQ ID NO: 194028 - protein, 291 aa, Unknown
  Bacterial polypetide isolated from the Sargasso Sea
MSVLVNKNTKVICQGFTGSHGTFHSEQAIKYGTNLVGGVTPKKGGQKHLDRPVFDSVLEAKNKEGADATMIYVPAKFAAAAIIEAIDASVELIVCITEGIPIQDMLNVRQKLSGSSSRLIGPNCPGIITPDECKIGIMPGSIHKRGSVGIVSRSGTLTYEAVAQTTENGLGQSTCIGIGGDPINGTNFIDCLDLFLNDDETESILMIGEIGGTAEEEAADFIKNHKIKKPIVGFIAGITAPPGRRMGHAGAIISGGKGGAEDKIKKMEECGITVAKSPSIIGKTLFDKLSN

SEQ ID NO: 194029 - protein, 245 aa, Unknown
  Bacterial polypetide isolated from the Sargasso Sea
MNIHEYQSKQIFKEYGLPVPNSLTANTTEEVLVSAKEISDTNWVVKAQVHAGGRGKAGGVKVTDNLKEVEEFADKWINNKLVTYQTDDQGQPVSCILVEECTEIKKEFYLGAVIDRSTRSLAVMASSEGGMDIERVAKDHPEKIFKVFLKSPSVGNEDHLPLTEGLELSEEQTKEFKDIFRNLVTLFFEKDLSLVEINPLVLNGSDNLVCLDGKINIDSNALFRQDEILELRDISQEEENGVKSF

SEQ ID NO: 194030 - protein, 385 aa, Unknown
  Bacterial polypetide isolated from the Sargasso Sea
MNIHEYQAKDLFRKFNVATSEGKVFENENDAEEYAKSLDVEEYVVKAQIHAGGRGKGGGVKLVKTPEEVREMVKSMLGMTLVTHQTGPEGKLVNKVYVEAASNIKKEYYLSFVTDRATEKNVIIASPEGGVDIEKVAEETPEKLLTQPIDPVVGIQPFHIRKIGYFLGFDKGQVKQLGPLIQGMYNLFVETDCSLVEVNPLIVTDKDEVKALDAKINFDDNAEFRHKEYKELHDPTEEEPSELEAKEWGFSFVKLDGNIGCLVNGAGLAMSTMDIIKHHGAEPANFLDVGGGATVEQVTQAFKMILRDENVKAILVNIFGGIMKCDTIADGIMVAAKEVGIKVPLVVRLEGTNVELGKKMLEESGLNISTASTMKDAALKVVELI

SEQ ID NO: 194031 - protein, 291 aa, Unknown
  Bacterial polypetide isolated from the Sargasso Sea
MSVLVNKNTKVICQGFTGSHGTFHSEQAIQYGTNLVGGVTPKKGGQKHLERPVFNTVLEAKKEVGADATMIYVPAKFAAAAIIEAIDASIDLIVCITEGIPVQDMLKVRQSLADSKSRLIGPNCPGIITPDECKIGIMPGNIHKRGSVGIVSRSGTLTYEAVAQTTENGLGQSTCIGIGGDPINGTNFIDCLDLFLNDDETESILMIGEIGGTAEEEAAEFVKNHKIKKPIVGFIAGITAPPGRRMGHAGAIISGGKGGAKDKIKKMEECGITVAESPSIIGKTLFNKLSN

SEQ ID NO: 194032 - protein, 319 aa, Unknown
  Bacterial polypetide isolated from the Sargasso Sea
MNIHEHQAKQILKKFGAIVPEGVFGLTVEDLLEKCKSLKTEKYVLKAQIHAGGRGKAGGVKILNNLEELEKSAKELFGKKLITHQTGPEGREVKRLYVEASSDIEKEFYLSCLVDRATSKIAFISSDQGGMDIEDVASKSPDKILTTKIELKDEISNEECEKIIQIFKLENSPKNEAISLIKSIYKMFIETDANMVEINPLILTKKKKIICLDAKINFDSNALFRHPEILELRDLNEEDPTEIEASKHDLAYIKLDGNIGCMVNGAGLAMATMDIIKLYGEEPANFLDVGGGASKEKVSAAFKIILSDKNVKGILINIF

SEQ ID NO: 194033 - protein, 387 aa, Unknown
  Bacterial polypetide isolated from the Sargasso Sea
MDIHEYQAKKILSDFGVKIPTGGIVYSPENAENKAREIGGSKWVVKAQVHSGARGKAGGIIVCNSPLEVADATDKLLGKKLVTNQTGPEGKIINRIYIEEATDIKHELYLGLVFDRSSESIMVVASTEGGMSVEEISKEKPETIIRSKIEVAVGIQQFQAREIAFGLGIEPKLISRVANTIVGCYKAFSELDATMVEVNPLVVSQQDEIFALDCKMSFDNNAIFRRDDISELRDKTQENSNEVYASDRGMNYVSLDGNIGNIINGAGLAMASMDMIKLAGGEPANFLDVGGGATPEKIVKAFKLISMDKNVKVILVNIFAGINRCDWVADGIVQALEKIEISLPLVIRLAGTNVEKGNEILKKSNINYIEASTLEDAANKAVKALGK

SEQ ID NO: 194034 - protein, 292 aa, Unknown
  Bacterial polypetide isolated from the Sargasso Sea
SILVEECMTIAKELYLSAVIDRESQKIVFIGSSEGGVNIEDVAKKYPEKIIYEGVVYGDKALSENAENIAKVLKLNKDQTNQFIPMIENLLRLFVEKDLSLLEINPLVITENGDLHCLDAKINIDSNALYRQPDLAEMYDQSQEDPQEAEAAKNDLSYVSLDGNIGCMVNGAGLAMGTMDTIKFYGGNPANFLDVGGTATQQRVAKAFKIILDDPDVKVVLVNIFGGIVRCDLIAEGIISAIKEVDVKIPVVVRLEGNNAEKGSQILSKASIKIDSINNLADAAKKAVDFAK

SEQ ID NO: 194035 - protein, 350 aa, Unknown
  Bacterial polypetide isolated from the Sargasso Sea
MNIHEHQAKKILKNYGAKVPNGIFASNVNDLLEKAKTLATEKYVLKAQIHSGGRGKAGGIKLVNNLEELEKEAKNLIGKILVTHQTGSNGRKVQRLYVEEASLINKEFYLSCLVDRESSKIAFISSDQGGMDIEEVAKNNPEKILTTKVEFKDQISDEDCKQIIEIFNLDQEAYEEAQKLIKSIYKMFIEKDASLVEINPLILTKDNKIVCLDAKMKFDDNALFKHPEIIDLRDLNEEEETEIEASKHDLAYIKLDGKIGCMVNGAGLAMATMDIIKLYGEEPANFLDVGGGASKEKVSAAFKIILSDKNVKGILINIFGGIMRCDVLAKGLVEAAREIKINVPLVIRLA

SEQ ID NO: 194036 - protein, 386 aa, Unknown
  Bacterial polypetide isolated from the Sargasso Sea
MNIHEHQAKQILKKYGAAVPEGVFSHSVEELLQKAKSLKTEKFVLKAQIHAGGRGKAGGIKIVNTIEELNSAAKEMLGKKLITHQTGPQGREVKRLYVETSSKIEKEFYLSCLVDRVSSKIAFISSDQGGMDIEDVAKNHPKKIVTTKINLDDEISDKDCEKIVEIFNLSPDARKQAINLVKSIYKMFIDIDANLVEINPMILTKENKIICLDAKMSFDDNGLFRNPEILNLRDLNEEEETEIEASKHGLSYIKLEGSIGCMVNGAGLAMATMDIIKLHGEEPANFLDVGGGASKEKVSAAFKIILSDKNVKGILINIFGGIMRCDVLAQGVVDAAKEIKIEVPLIVRLAGTKFEEGKKILDNSGLEIISATDLADAAKKVVNSIK

SEQ ID NO: 194037 - protein, 390 aa, Unknown
  Bacterial polypetide isolated from the Sargasso Sea
MNIHEYQAKEILSKYGVSIPKGGLAYSPENAKDRATELGGDLWVVKAQIHSGARGKAGGIIVCKSEQEVSDAANKLLGKTLVTHQTGPEGKTVQRIYVEEGTDIKKEFYLGLVFDRSTESIMVVASSEGGMSVEEIAQEKPESLIKTKIEAAVGMQAFQAREIAFKLGLEAKAINRCAQAILGAYKAFSMSDATMVEINPLVLTGDDHVVALDCKMSFDDNALFRNPELAELRDKSQEDPKETYAADRGLNYIPLDGDIGNIINGAGLAMASMDMIQLAGGQPANFLDVGGGATPEKFVKAFKLISGDPKVKVILINIFAGINRCDWVAQGIVDALNQINISQPLVIRLAGTNVDEGIKILKDSKIEYIEAFTLEDAANKAVKALKELGE

SEQ ID NO: 194038 - protein, 318 aa, Unknown
  Bacterial polypetide isolated from the Sargasso Sea
MDIHEYQAKKILSNFGVTIPRGGIVYSPENAENKAREIGGSRWVVKAQIHSGARGKAGGIIVCNTPLEVAQATDKLLGKKLVTNQTGPEGKIVNRIYIEEATDIEKELYLGLVFDRSSESIMVVASTEGGMSVEEISKEKPETIIRSKIEVAVGMQNFQARELAFGLGIEPDLIRRASDTIIGCYKAFSELDATMVEVNPLVISKQKQILALDCKMSFDNNAMFRRSQVSELRDKTQEDSKEIFASDRGLNYVSLDGNIGNIINGAGLAMASMDMIKLAGGAPANFLDVGGGATPEKIVKAFKLVTMDEKVKVILVNI

SEQ ID NO: 194039 - protein, 335 aa, Unknown
  Bacterial polypetide isolated from the Sargasso Sea
MNIHEHQAKKILKEFGAPVSNGVVILSIKEIEEKITQLKSKEFVLKAQIHAGGRGKAGGVKLIKSLEELKQEATKMMGKRLITHQTGPEGKEVKRLYIEEASEIEKEFYLSCVVDRESSKIAFISSTEGGMDIEKVASENPEKIVTTKIDLKNELEKKDIEKIISPFKFDENKKEEAEHLLNAIFKILIEKDATLIEINPLIITKSQKILCLDAKMNFDDNAIFRRPDILKLRDFNEEDPIEIEASKHDLAYIKLNGSIGCMVNGAGLAMATMDIIKLYGQEPANFLDVGGGASKEKVSAAFKLILSDKNVKGILINIFGGIMQCDVLAKGVVDA

SEQ ID NO: 194040 - protein, 388 aa, Unknown
  Bacterial polypetide isolated from the Sargasso Sea
MNLHEYQAKSLFAEYGLPVSEGFACDTAQEAVEAAGRIGGNLWVVKCQVHAGGRGKAGGVKVTGDKEEIRAFAEHWLGKNLVTYQTDEKGQPVAKILVESCTDIANELYLGAVVDRATRRVVFMASTEGGVEIEKVAEETPELIHKAIIDPLTGPQPYQARDLGFKLGLNPTQMKQFTKIFMGLATMFVDHDFALLEINPLVITTEGNLHCLDGKIGIDGNALFRQPKIKAMHDPSQDDAREAHAAMFELNYVALDGNVGCMVNGAGLAMGTMDIVNLHGGKPANFLDVGGGATKERVAEAFKIILSDSNVKAVLVNIFGGIVRCDMIAEGIIGAVKEVGVKVPVVVRLEGTNAELGREVLAKSGLDIIAANSLTDAAEQVVKAAEGK

SEQ ID NO: 194041 - protein, 290 aa, Unknown
  Bacterial polypetide isolated from the Sargasso Sea
MSVLINKDTKVICQGFTGGQGTFHSQQAIDYGTQMVGGVSPGKGGTEHLGLPVFNTVKDAVAATGATASVIYVPAPFCKDAILEAIDGGIELIVCITEGIPTLDMLEVKVKLEETGVRMIGPNCPGVITPGECKIGIMPGHIHLKGKVGIVSRSGTLTYEAVKQTTDEGFGQSTCVGIGGDPIPGTNFIDVLEMFQNDPQTEAIVMIGEIGGTAEEEAAAYIKANVTKPVVSYIAGVTAPAGKRMGHAGAIIAGGKGTAADKFAALEAAGVTTVRSLADIGKALRAKTGW

SEQ ID NO: 194042 - protein, 165 aa, Unknown
  Bacterial polypetide isolated from the Sargasso Sea
RHPDVEELRDPDEEDPAELAANKIGLTYIKLDGNIGCLVNGAGLAMATMDIIKLYGEEPANFLDVGGSATKDKVTEAFKIILSDKNVKGILVNIFGGIMRCDVVAEGVLAAAREINISVPLVVRLEGTNVEEGKRIIEDSEMEVISGSDLDDAAQKITKAISEVK

SEQ ID NO: 194043 - protein, 386 aa, Unknown
  Bacterial polypetide isolated from the Sargasso Sea
MNIHEHQAKEILKKYGAIVPEGVFSHTVKELLQKAKSLKTENFVLKAQIHAGGRGKAGGIKIVNTIEDLNSAAREMLGKKLITHQTGPQGREVKRLYVETSSEIEKEFYLSCLVDRASSKIAFISSDQGGMDIEEVAKNNPKKIVTTKINLEDKISDQDCEKIVEIFNLSLDAKKQAINLIKSIYTMFIDIDANLVEINPLILTKENKIICLDAKMSFDDNALFRNPEILNLRDVNEEEEIEIEASKHGLSYIKLEGSIGCMVNGAGLAMATMDIIKLHGEEPANFLDVGGGASKEKVSAAFKIILSDKNVKGILINIFGGIMRCDVLAQGVVDAAKEIKIEVPLVVRLAGTKFEEGKKILNNSGLEIISASNLSDAAKKVVNSIK

SEQ ID NO: 194044 - protein, 158 aa, Unknown
  Bacterial polypetide isolated from the Sargasso Sea
MKIHEYQGKEIFKSYDIPIQDGYVIDKIDDALPTIKKVQNNFKTEAVVVKAQIHAGGRGKGGGVKYSPTTDDAFKNVKKMLGMNLITHQTGENGQKVKKIYITQALDIKKEFYCAITLDRSKAKDVFMVSSEGGVEIEKVAEETPEKLLKYGLILLLV

SEQ ID NO: 194045 - protein, 212 aa, Unknown
  Bacterial polypetide isolated from the Sargasso Sea
SAIIEAIDSSIELIVCISEGIPVLDMLKVKRKLSNSKSRLIGPNCPGVITPDECKIGIMPGNIHKKGTVGIVSRSGTLTYEAVAQTSENGLGQSTCVGIGGDPINGTNFIDCLDLFLNDEETESIVMIGEIGGTAEEEAAEYIKNHKIKKPMVGFVAGITAPPGRRMGHAGAIISGGKGNADEKIKIMEKSGITMAKSPSEIGITLLNKLSN

SEQ ID NO: 194046 - protein, 390 aa, Unknown
  Bacterial polypetide isolated from the Sargasso Sea
MNLHEYQAKKLFKDYDISVSEGLPASSSQEAEKIALSLNVDKWVVKAQVHAGGRGKSGGVELVDSIEKVKAFADKWLGKNLVTFQTDEKGQPVNQILIETVTDIDKELYLGAVIDRASQRLVVMASTEGGVNIEEVAEETPEKIHKAEIDPIQGPNQPQAEQLANSLNLNEVQTLQFIEIFNGLVRLFIDKDLSLVEVNPLVITSSGDLICLDAKINVDSNALYRQEQILELRDPSQEDPREASAAEWDLSYVALEGNIGCMVNGAGLAMGTMDIIKLHGGEPANFLDVGGTADSKRVAEAFKIILSDENVNTVLINIFGGIVRCDVIADGIVEALTVTGVSVPVIVRLEGNNAHKGLKILDECDLNIIPASNLEEAASLAVRASKGDIG

SEQ ID NO: 194047 - protein, 109 aa, Unknown
  Bacterial polypetide isolated from the Sargasso Sea
MNIHEYQAKEILSKFGVSIPKGGLAYSPENAKDRATELGGDLWVVKAQIHSGARGKAGGIIVCKSEQEVSDAANKLLGKTLVTHQTGPEGKTVQRIYVEEGTDIKKEFY

SEQ ID NO: 194048 - protein, 193 aa, Unknown
  Bacterial polypetide isolated from the Sargasso Sea
SLIEINPLIINKEQKLVCLDAKMNFDDNAIFRRPEILKLRDLNEEEPAEIEASKHDLAYIKLSGSIGCMVNGAGLAMATMDIIKLYGQEPANFLDVGGGASKEKVTAAFKLILADHNVKGILINIFGGIMRCDVLAQGVIDAANQVNLSVPLVVRLAGTNYKEGKEILEKSNLKILSASDLNDAAKKIVEAIK

SEQ ID NO: 194049 - protein, 387 aa, Unknown; identical to SEQ ID NO: 193881
  Bacterial polypetide isolated from the Sargasso Sea

SEQ ID NO: 194050 - protein, 151 aa, Unknown
  Bacterial polypetide isolated from the Sargasso Sea
NEEEETEIEASKHDLAYIKLDGSIGCMVNGAGLAMATMDIIKLYGEEPANFLDVGGGASKEKVSAAFKIILSDKNVKGILINIFGGIMRCDVLAQGVVDAAKEIKIEVPLVVRLAGTKFEEGKKILDNSGLKLISASDLSDAAKKVVEAIK

SEQ ID NO: 194051 - protein, 397 aa, Unknown
  Bacterial polypetide isolated from the Sargasso Sea
MNIHEYQAKGLLRNYGAPVADGRIVVKSEDAKTAAGELDGPVWVVKAQIHAGGRGKGTFIEKDAGESGGVRIAKSVEQAAEEAKKMLGRTLVTHQTGPAGKQVNRVYIEQGAEIKSELYLALLVDRVTSRISFVCSTEGGIDIEDVAASNPEKILSFSVDPATGYQAFHGRKIAFALGLENSQVKECIKLMGQLFQAFIEKDMEMLEINPLIVTKNDTLSVLDAKVGFDSNAIYRHQDIADLRDTTEEDPKELEASKYDLNYIALDGEIGCMVNGAGLAMATMDIIKLYGAEPANFLDVGGGATKEKVTEAFKIITSDPKVKGILVNIFGGIMRCDVIAEGVVAAVKEVGLQVPLVVRLEGTNVEKGKDIINNSGLDVIAANDLRDGAEKIVRAVKG

SEQ ID NO: 194052 - protein, 158 aa, Unknown
  Bacterial polypetide isolated from the Sargasso Sea
MAVLIDEKTKVICQGFTGSQGTFHSEQAIAYGTKMVGGVTPGKGGGDHLGLPVFNSVHEAKHITNADASVIYVPPPFAADSILEAIDAQMDLIVCITEGIPVQDMLKVKRALENSTSILVGPNCPGVITPEACKIGIMPGHIHKRGSVGVVSRSGTLT

SEQ ID NO: 194053 - protein, 239 aa, Unknown
  Bacterial polypetide isolated from the Sargasso Sea
IEFNNEGPDLDEIEKIISIFKLSEDQKKIAIKLIKSLYKIVVQKDATLIEINPLIITKEDKIVCLDAKMNFDDNAIFRRPEILNLRDLNEEEPAEIEASKYDLAYIKLNGSIGCMVNGAGLAMATMDIIKLYGEEPANFLDVGGGASKEKVTAAFKLILADKNVKGILINIFGGIMRCDVLAQGVVDAAKQVNLSVPLVVRLAGTNFKEGKEILEKSNLKILSASDLNDAAKQIVKAIK

SEQ ID NO: 194054 - protein, 135 aa, Unknown
  Bacterial polypetide isolated from the Sargasso Sea
LTYEAVAQTTENGLGQSTCIGIGGDPINGTNFIDCLDLFLKDDETDSILMIGEIGGTAEEEAAEFVKNHEIKKPIVGFIAGITAPSGRRMGHAGAIISGGKGGAEDKIKKMEESGITVAKSPSIIGKTLFNKLSN

SEQ ID NO: 194055 - protein, 86 aa, Unknown
  Bacterial polypetide isolated from the Sargasso Sea
MIGEIGGTAEEEAAEFFKNHKIKKPIVGFIAGITAPPGRRMGHAGAIISGGKGGAEDKIKKMEDCGITIAKSPAEIGKTLLNKLSN

SEQ ID NO: 194056 - protein, 291 aa, Unknown
  Bacterial polypetide isolated from the Sargasso Sea
MSVLINKDTKVICQGFTGAHGTFHSEQSIKYGTNLVGGVTPKKGGQIHLERPVFNTVKEAKDQTGANATMIYVPAKFAASAIIEAIDSSIELIVCISEGIPVLDMLKVKRRLSNSKSRLIGPNCPGIITPDECKIGIMPGNIHKKGTVGIVSRSGTLTYEAVAQTSENGLGQSTCIGIGGDPINGTNFIDCLDLFLNDEKTESIVMIGEIGGTAEEEAAEFIKNHKIKKPMVGFVAGITAPPGRRMGHAGAIISGGKGNADEKIKIMEKSGITMAKSPSEIGITLLNKLSN

SEQ ID NO: 194057 - protein, 192 aa, Unknown
  Bacterial polypetide isolated from the Sargasso Sea
MILKRVWRSVQRATFGRASMNIHEYQGKQLFREAGLSVQDGVHCTSVEQALAAYDSLGSKVVAVKSQIHAGGRGKGTLYHPDSGDLVMEGGVKIAFSREDVENYAENILGNILVTKQTGAEGKIVNNLYVEGGCNIAHEYYLAILVDREEKMPLIMASKEGGVDIEEVAEKTPEAIFKIYVDPVVGLQRADA

SEQ ID NO: 194058 - protein, 295 aa, Unknown
  Bacterial polypetide isolated from the Sargasso Sea
MYVEAGCNIEREIYIAFVLDRSKESVTVVASAEGGMEIEQLAVEKPDSIIKVAVEAAVGMQPFQAREIVFALGLDKTQVNQAVTTILGCYRAMRDLDANMVEINPLVVTKEGNLLAVDAKMGFDENALFRHSNISELRDKSQEDVREMNAADRGLSYVGLDGNIGCIINGAGLAMATMDMIMHAGGEPANFLDIGGGASPERVSKAFNLVLSDDNVKCILINIFAGINRCDWVAEGIIQAVQKIDLKVPVVVRLSGTNVEQGRKMLEDSGLPLIMAETLREGADKAVTEWKKAGK

SEQ ID NO: 194059 - protein, 386 aa, Unknown
  Bacterial polypetide isolated from the Sargasso Sea
MNIHEHQAKQILKKYGAVVPEGIVAFSVEELVEKAKSLKTEKFVLKAQIHAGGRGKAGGVKILNTIEELSVAAQELLGKNLITHQTGPKGREVKRLYVEVSSNILKEFYLSCLVDRSSSKIAFISSDQGGMDIEEVANKTPNKIITTKVDFEKEISDASCENIIKIFNLNNENKSEAIKLIKSIYKMFISTDASMVEINPLILTKDKKIICLDAKINFDDNALFKHKEIAKLRDLNEEEPTETEANKHDLAYIKLDGSIGCMVNGAGLAMATMDIIKLYGEEPANFLDVGGGASKEKVSAAFKIILSDKNVKGILINIFGGIMKCDVLAQGVVDAAKEIKIHVPLVVRLAGTNFEKGKKILDNSGLKIISASNLSDAAKKIVKEIK

SEQ ID NO: 194060 - protein, 386 aa, Unknown
  Bacterial polypetide isolated from the Sargasso Sea
MNIHEHQAKQILKKFGAIVPEGVFGLTVEELLKKCKSLKTEKYVLKAQIHAGGRGKAGGVKILNNLEELEKSAKELLGKKLITHQTGPEGREVKRLYVEVSSDIEKEFYLSCLVDRATSKIAFISSDQGGMDIEEVASKSPDKILTTKVELKEEISNEECEKIIQIFKLENNPKIEAISLIKSIYKMFVETDANMVEINPLILTKEKKIICLDAKVNFDSNALFRHPEILELRDLNEEDPTEIEASKHDLAYIKLDGSIGCMVNGAGLAMATMDIIKLYGEEPANFLDVGGGASKEKVSAAFKIILSDKNVKGILINIFGGIMRCDVLAQGVVDAAKEMKINVPLVVRLAGTNFKEGKEILDNSGLKLISAENLDDAAKKIVEAIK

SEQ ID NO: 194061 - protein, 385 aa, Unknown
  Bacterial polypetide isolated from the Sargasso Sea
MNIHEYQAKAILKNFNVPVPKGEILLSKDNILEAAKNVSDNLWVVKAQIHAGGRGKGGGVKIAKSLEEVETLVDEIMGMQLITHQTGPEGKKVRRVYIEEGSNISDELYLSLLVDRQSSQVSFIVSTEGGVNIEEVAEETPEKITTVSIDPDAGVTDDDVENLSSALNLDGDLKAQGSDLFRSLYTAFVESDMSLLEINPLVITGENNIICLDAKVNFDSNALFRHPEYQELIDPSEEDEAELKASEFGLSYIKLDGNIGCLVNGAGLAMATMDIIKLYGAEPANFLDVGGAATKELVTEAFKIILSDKNVEGILVNIFGGIMRCDVVAEGIISAANEVNISVPLVVRLEGTNVDLGKKIIEDSDLSIISASDLDDASKKITEAI

SEQ ID NO: 194062 - protein, 291 aa, Unknown
  Bacterial polypetide isolated from the Sargasso Sea
MSVLIDKNTKVICQGITGSQGTFHSQQAIEYGTKMVGGVKPGAGGSKHLDLPVFDNVKDAVSETGANASVIYVPPPFAGAAILEAVDAEIDLVVCITEGIPVSDMVKVKKALSNSKSRLIGPNCPGIITPDQCKIGIMPGHIHQKGTVGIVSRSGTLTYEAVGQTTACGLGQSTCIGIGGDPVNGTNFIDCLDLFLSDNETESIIMIGEIGGTAEEEAAEFLKNSKIKKPIVGFIAGLTAPPGRRMGHAGAIISGGKGGADDKIEALKDAGVVISNSPAGLGKTLLSVLGK

SEQ ID NO: 194063 - protein, 213 aa, Unknown
  Bacterial polypetide isolated from the Sargasso Sea
MNIGTKLIGAMFEALISKDASLIEINPLVVTKSNKILCLDAKMNFDDNAIFKHPEIFKLRDLNEEDPTEIEASKYDLAYIKLDGSIGCMVNGAGLAMATMDIIKLYGEEPANFLDVGGGASREKVTAAFKILLSDKNVKGVLINIFGGIMQCDVLANGVVEAAKDVKLQVPLVVRLAGTNFKEGKKILDESGLKILSADNLNDAAKKIVEAIK

SEQ ID NO: 194064 - protein, 265 aa, Unknown
  Bacterial polypetide isolated from the Sargasso Sea
MVVASTEGGMSVEEISKEKPETIIRSKIEVAVGMQKFQAREIAFGLGVAPELINRTADTIIGCYRAFSELDATMVEINPLAVSGQGQILALDCKMSFDNNALFRRNQISELRDKTQENPSEVYASDRGLNYVSLDGNIGNIINGAGLAMASMDMIKLAGGEPANFLDVGGGATPEKIVKAFKLISMDKKVKVILVNIFAGINRCDWVAEGIVQALNKIEINVPLVIRLAGTNVDKGNKILRESKIKYIEANSLEDAANKAVKILK

SEQ ID NO: 194065 - protein, 191 aa, Unknown
  Bacterial polypetide isolated from the Sargasso Sea
VPVLDMMQVKRKLEKSKSRLIGPNCPGIITPDECKIGIMPGHIHQKGKIGVVSRSGTLTYEAVAQTSAVGLGQSTCIGIGGDPINGTNFIDCLDLFLKDPETEGIIMIGEIGGTAEEEAAEFIKKSEIKKPVASFIAGASAPAGKRMGHAGAIISGGKGTAESKFSALEEAGVHISKSPAKLGETIKEALN

SEQ ID NO: 194066 - protein, 183 aa, Unknown
  Bacterial polypetide isolated from the Sargasso Sea
PRRRFCQRQGVRLVGPNCPGVITPGQCKIGIMPGLIHEPGKVGVVSRSGTLTYEAVGQLGRAGLGQSSCIGIGGDPVNGTNFIDCLKMFEDDSQTEGIVMIGEIGGDAEEQAADFVKQNVSKPIVSFIAGQTAPPGRRMGHAGAIISGGKGTASEKMAALQAAGIHVVKTPAEIGSRMREVLG

SEQ ID NO: 194067 - protein, 386 aa, Unknown
  Bacterial polypetide isolated from the Sargasso Sea
MNLHEYQGKLLFAEYNLPVSKGEVIFDAKNATDACNKIGGTKWVVKAQVHAGGRGKAGGVELIDSPDQAEVFAKKWLGQKLVTYQTDKDGQLVNSILIEECTNISKELYLSAVIDRDSQKIVFIGSSEGGVNIEEVARNTPEKIIYQGVEFKDQSLPEHAKNIANVLKLNDEQTNQFIPMIDNLLRLFVEKDLSLLEINPLVINSNGDLHCLDAKVNIDTNALFRQPELLEMHDETQEDPREAEAAKNDLSYVSLDGNIGCMVNGAGLAMGTMDTIKFFGGNPANFLDVGGTATQDRVAKAFKIILKDPNVKVVLVNIFGGIVRCDVIAKGIIAAIKEVDIKVPVVVRLEGNNADIGAKILSKANIKIESINNLSDAAKKAVELAK

SEQ ID NO: 194068 - protein, 291 aa, Unknown
  Bacterial polypetide isolated from the Sargasso Sea
MSILVNKETRLIVQGFTGSQGTLHSEQSIEYGTNIVGGVTPGKGGQEHLGKPVFNSVKEAVDKVEPNASIIFVPAKFCKDSILEAAEAGIKLIICITEGVPTLDMLDVKKYVDNIGARLIGPNCPGVITPGEAKLGIMPGNIHLPGSIGIISRSGTLTYEAVKQTTDLGFGQSSCVGIGGDPIPGSSFIDMLKLFEEDTQTEAIVMVGEIGGTAEEAAAEYIKNNISKPVISYIAGQTAPAGKRMGHAGAIIAGGKGTAADKISKLKECGVHVADNLVEIGNKVAEVLKIN

SEQ ID NO: 194069 - protein, 296 aa, Unknown
  Bacterial polypetide isolated from the Sargasso Sea
IVNRVYIEEATDIKKELYLGLVFDRSSESIMVVASTEGGMSVEEISKEKPETIIRSKIEVAVGMQQFQAREIAFGLGIESKLISRMADTIIGCYRAFSELDATMVEVNPMVISNQDQILALDCKMSFDNNALFRRTQVSELRDKSQENPSEVYASDRGLNYVSLDGNIGNIINGAGLAMASMDMIKLAGGEPANFLDVGGGATPDKIVKAFKLISMDEKVKVILVNIFAGINRCDWVAEGIVQALEKIEIKVPLVIRLAGTNVEKGNKILKDSKIKYIEANTLEDAANKAVKALGN

SEQ ID NO: 194070 - protein, 384 aa, Unknown
  Bacterial polypetide isolated from the Sargasso Sea
SLNNYFRDYGIAVSEGLAASSADEAEKAALSLGTSKWVVKAQVHAGGRGKAGGVEVVDQIEKVREFADKWIGTNLVTFQTDQNGQPVNQILVETCTDIDNELYLGAVIDRASQRLVVMASTEGGVNIEEVAEQTPDKIFKVEVDPIEGTNDKDADYLSLLLELNESQVSQFRTIYNGLVKLFLEKDLSLLEVNPLVITSSGDLICLDAKINIDSNALYRQEALSEMRDSSQEDERESKAAEWDLSYVALDGNIGCMVNGAGLAMGTMDIIKLHGGEPANFLDVGGTADAERVAEAFKIILSDDNVNTVLINIFGGIVRCDVIADGIVEALTVMGVSVPVVVRLEGNNAKLGLQTLDECDLNIIPASNLQEAAELAVKASKGEIN

SEQ ID NO: 194071 - protein, 353 aa, Unknown
  Bacterial polypetide isolated from the Sargasso Sea
AREIGGNKWVVKAQIHSGARGKAGGIIVCDTPLAVAQATDKLLGKKLVTNQTGPEGKIVNRIYIEEATEIKKELYLGLVFDRSSESIMVVASTEGGMSVEEIAKQKPETIIRSKIEVAVGMQQFQAREIAFGLGIEPHLIRRAAETITGCYRAFSELDATMVEVNPLVISNQDQILALDCKMSFDNNALFRRNQVSELRDKTQENSNEVYASDRGLNYVSLEGNIGNIINGAGLAMASMDMIKLAGGEPANFLDVGGGATPEKIVKAFKLISMDEKVKVILVNIFAGINRCDWVAEGIVQALQKIEIKVPLVIRLAGTNVEKGNKILKQSKINYIEANTLEDAANKAVKALGN

SEQ ID NO: 194072 - protein, 311 aa, Unknown
  Bacterial polypetide isolated from the Sargasso Sea
LFGKVLVTPQTGPEGRVVKRIYIQKAYDIKKELYLSCLVDRQSSKIAFISSTEGGVDIEAVAKTNPEKIITTKVDLKQNLSSEEIENILQIFQLDKNQTTTATKLVKAMYNALIKKDASLVEINPLVITKNNEILCLDAKMNFDDNAIFKHPEILELRDLNEEDPSEIEASKHDLAYIKLDGSIGCMVNGAGLAMATMDIIKLYGEEPANFLDVGGGASKEKVTAAFKILLSDKNVKGVLINIFGGIMQCDVLAQGVVDAAKDLKLNVPLVVRLAGTNFKKGKKILDESNLKILSANNLNDAAKKIVEAIK

SEQ ID NO: 194073 - protein, 292 aa, Unknown
  Bacterial polypetide isolated from the Sargasso Sea
MSVLINKSTKVLCQGFTGSQGTFHSEQAISYGTNMIGGVTPGKGGSKHLGLPVFNTVIEAVNELDVDASVIYVPPRFAADSILEAIDAKIPLIICITEGIPVQDMIKVKKFLSTSKSRLVGPNCPGIITPGECKIGIMPGHIHLPGKIGIVSRSGTLTYEAVAQTTDVGLGQSTCVGIGGDPLNGTNFIDCIELFLLDEQTEGILMIGEIGGTAEEEAAQYVKNHKIKKPIAGFIAGKTAPPGRTMGHAGAIVSGGSGDAETKIETFKSCGIEVAISPSDLGGAIVRAIKGF

SEQ ID NO: 194074 - protein, 105 aa, Unknown
  Bacterial polypetide isolated from the Sargasso Sea
ANFLDVGGGATKERVVEAFKIILSDDAVKAVFINIFGGIVRCDMIAEGVIGAVKEVGVKVPVVVRLQGNNAELGAKVLGESGLNIIADTDLTSAAQKVVAAAAKA

SEQ ID NO: 194075 - protein, 395 aa, Unknown
  Bacterial polypetide isolated from the Sargasso Sea
MNLHEYQAKILLKNNNVRVLNGYPVLDDRDIGTAVDSIQTPVMVVKSQIHAGGRGAGKFTDSGDDKGGVRVCFSKDEAKDNAKKMFGKTLVTKQTGPSGKQVNRLYIEEGCDIKKEYYLSMLVDRATSSISIIASTEGGMEIEEVAEKQPEKIITVNVPGDSIIDQNSLNKLTEGLKIDQNLSNDFCDQIQKIYNSFLSSDASLVEVNPFVLTGEGNFLALDAKVSIDDNALYKHKDVASMRDETEEDPAEIEASKHELNYVKLDGQIGCMVNGAGLAMGTMDIIKLHGGSPANFLDVGGGATKERVAKAFSIILQDPNVKAILVNIFGGIMKCDIIAEGVVAAAKELSIQVPLVVRLEGTNVDLGKEILNKSGLSIISADNLEDAAQKAVRALN

SEQ ID NO: 194076 - protein, 290 aa, Unknown
  Bacterial polypetide isolated from the Sargasso Sea
MSVLINKNTKVICQGFTGSQGTFHSEQAIKYGTQMVGGVTPKKGGQEHLGLPVFNSVKEAKDNTDANATVIYVPPPFAAGAIIEAIDADMELIVCITEGVPVLDMMQVKRKLEKSKSRLIGPNCPGIITPDECKIGIMPGHIHQKGRIGVVSRSGTLTYEAVAQTSAVGLGQSTCIGIGGDPINGTNFIDCLDLFLKDPETEGIIMIGEIGGTAEEEAAEFIKKSEIKKPVASFIAGASAPAGKRMGHAGAIISGGKGTAESKFSALEEAGVHISKSPAKLGETIKEALN

SEQ ID NO: 194077 - protein, 386 aa, Unknown
  Bacterial polypetide isolated from the Sargasso Sea
MNLHEYQGKALFAEYNLPVSKGKIIYSADEVTDACNEIGGTSWVVKAQVHAGGRGKSGGVQLINTPEDGIKFAEKWLGNNLVTYQTDAKGQPVNSILIEECTNISQELYLSAVIDRDSQKIVFIGSSEGGVNIEDVAKNMPEKIIYQGVVYGDKSLPDSALNIAKVLKLNDVQTNQFISMIDNLLRLFVEKDLSLLEINPLVITESGDLLCLDAKVNIDSNALFRHPELLEMYDETQEDPQEAEAAKNDLSYVSLDGNIGCMVNGAGLAMGTMDTIKFYGGNPANFLDVGGTATQERVAKAFKIILEDPDVKVVLVNIFGGIVRCDLIAKGIIAAIKEVEVKIPVVVRLEGNSADKGSKILSKADIKIDSINDLADAAKKAVELAK

SEQ ID NO: 194078 - protein, 290 aa, Unknown
  Bacterial polypetide isolated from the Sargasso Sea
MSILVNKDTKLIVQGFTGSQGTLHSEQSIEYGTNIVGGVTPGKGGMEHLGKPVFNSVNEAVEELDPNASIIFVPAKFCKESIIESAEAGIKLIVCITEGIPTLDMLEVKKRIDDLGVRLIGPNCPGVITPGEAKLGIMPGNIHKPGSIGIISRSGTLTYEAVKQTTDLGFGQSSCVGIGGDPIPGSSFIDMLKLFEDDDQTEAIVLVGEIGGNAEEAAAEYIKNNVTKPVISYIAGQTAPAGKRMGHAGAIIAGGKGTAKDKIEKLKECGVHIADNLVSIGSKVAEVLQH

SEQ ID NO: 194079 - protein, 291 aa, Unknown
  Bacterial polypetide isolated from the Sargasso Sea
MSVLINKNTKLICQGFTGAHGTFHSEQSIKYGTNLVGGVTPGKGGQTHLNKPVFNSVKEAKGKTNANATMIYVPAKFAAAAIIEAIEAKIELIVCITEGIPILDMLKVKEKLSNSASRLIGPNCPGIITPDECKIGIMPGNIHKKGSVGIVSRSGTLTYEAVAQTTENGLGQSTCIGIGGDPINGTNFIDCLDLFLNDPETESILMIGEIGGTAEEEAAEFIKNHKIKKPMVGFIAGITAPPGRRMGHAGAIISGGKGGASDKIDTMTDAGITIATSPAEMGITLKNKLGL

SEQ ID NO: 194080 - protein, 396 aa, Unknown
  Bacterial polypetide isolated from the Sargasso Sea
MNLHEYQGKQLLEKFNVSIQRGYVANNPDEAVECAKKLSNETGTEIFVVKAQIHAGGRGKGGGVKIAKSLDEVRSISSEIIGMNLVTPQTPKEGKLVNKVLIAEDVYYDGEGDRKEFYMSVLLNRSSSKNMIVYSTEGGVDIEAVAENTPDLIFNEEIDPGSGILPFQARKIAFNLGLKGQAFKNMVKFVTNLYNAYTGSDASLFEINPVLKAADDKIIAVDSKVTIDENALFRHSEYESMRDLSEENPVEVEARESGLNYVDLDGNVGCMVNGAGLAMATMDLIKLAGGEPANFLDVGGTADSSRVEKAFRLILKDSNVKAILVNIFGGIVRCDRVAEGIVSAYKNLGNIDIPIIVRLQGTNSDKAKEIIDGSGLNVLSAIAFDEAANKVQAALS

SEQ ID NO: 194081 - protein, 143 aa, Unknown
  Bacterial polypetide isolated from the Sargasso Sea
GNIGCIVNGAGLAMATMDTIKLAGGEPANFLDIGGGATPERVAKAFRLVMSDDNVQAVLVNIFAGINRCDWVAEGVVQALHEVQINVPVIVRLAGTNVEKGQKILTKSGLPIIIATTLMEAAELSVQAWQTYTAGEFKSRAEK

SEQ ID NO: 194082 - protein, 275 aa, Unknown
  Bacterial polypetide isolated from the Sargasso Sea
MNIHEHQAKEILKKYGAVVPEGVYALNVNELIEKVKNLKADKYVLKAQIHAGGRGKAGGVKIVDNIALLEEEAKKLFGKTLVTHQTGPSGREVKRLYVETASEIEKEFYLSCLVDRASAKIAFISSDQGGMNIEEVAVKSPEKIITTKVDFNESISEEDCNKIIKIFDLDNDASKQAINLIKSIYKMFIDTDANLVEINPLILTKKNEIVCLDAKMTFDENALFKHPEIQKLRDFNEEEATEIEASKHDLAYIKLDGNIECMVNGAGLAMATMDI

SEQ ID NO: 194083 - protein, 256 aa, Unknown
  Bacterial polypetide isolated from the Sargasso Sea
MDIEKVAEEDPKKIITLKFEISEKLDDKKLNELVEIFKLSDSQKKEAMNLLESIYRILIEKDANLIEINPLIITKKNNLICLDAKMNFDDNALYRQPDILELRDLNEEEPAEIEASKNDLAYIKLNGSIGCMVNGAGLAMATMDIIKLYGKEPANFLDVGGGASKEKVTAAFKLIISDKNVKGILINIFGGIMRCDVLAQGVIDAVKETNLKVPLVVRLAGTKFKEGKKLLDDSGLKILSANDLNDAAKKIIKAVS

SEQ ID NO: 194084 - protein, 344 aa, Unknown
  Bacterial polypetide isolated from the Sargasso Sea
MDIHEYQAKKILSNFGVTIPRGGIVYSPENAENKAREIGGSRWVVKAQIHSGARGKAGGIILCNNPLEVAQATDKLLGKKLVTNQTGPEGKIVNRIYIEEATDIEKELYLGLVFDRSSESIMVVASTEGGMSVEEISKEKPETIIRSKIEVAVGMQNFQARELAFGLGIEPDLIRRASDTIIGCYKAFSELDATMVEVNPLVISKQKQILALDCKMSFDNNAMFRRSQVSELRDKTQEDSKEIFASDRGLNYVSLDGNIGNIINGAGLAMASMDMIKLAGGAPANFLDVGGGATPEKIVKAFKLVTMDEKVKVILVNIFAGINRCDWVAEGIVDALKKIESKFH

SEQ ID NO: 194085 - protein, 262 aa, Unknown
  Bacterial polypetide isolated from the Sargasso Sea
KYGTNLVGGVTPGKGGQTHLNKPVFNSVKEAKDKTNANATMIYVPAKFAAAAIIEAIEAKIELIVCITEGIPILDMLKVKEKLSNSASRLIGPNCPGIITPDECKIGIMPGNIHKKGSVGIVSRSGTLTYEAVAQTTENGLGQSTCIGIGGDPINGTNFIDCLDLFLNDPETESILMIGEIGGTAEEEAAEFIKNHKIKKPMVGFIAGITAPPGRRMGHAGAIISGGKGGASDKIDTMTDAGITIAESPAEMGITLKNKLGL

SEQ ID NO: 194086 - protein, 155 aa, Unknown
  Bacterial polypetide isolated from the Sargasso Sea
LRDLNEEEPAEIEASKHDLAYIKLNGSIGCMVNGAGLAMATMDIIKLYGQEPANFLDVGGGATKEKVTAAFKLILADKNVKGILINIFGGIMRCDVLAQGVVDAAKQVNLSVPLVVRLAGTNFKEGKKILEESKLKILSASDLNDAAKKIVDAIK

SEQ ID NO: 194087 - protein, 376 aa, Unknown
  Bacterial polypetide isolated from the Sargasso Sea
LKGKSYNKKLETLDFDIEELKGPPWVVKSQIHAGGRGAGHFKNSFNDKGGVQVVFEKEKVSSIAQSMMGNVLITKQTGETGKTVNRIFIEEGCDIDREFYLSLLVDRNNSKVMMMISAAGGIDIEEVAATNPEKIINIHFSKYKDISLDESLQIKLEITKNQLDELTSIINKLLDAFISIDASTIEINPLVLNKEGNFILLDAKISLDDNALFRHPELTDLKDLTEEDPLELQAAEHDMNYVKLDGSIGCMVNGAGLAMATMDIIKQFGEEPANFLDLGGTANKDRVIMGFKTIQSDSNVKSILINIFGGIIHCDMIAKGIIEAVKELKFNLPLVVRFQGTNAKEGRDLINNSNLGLISIDDFTEAAKKVVDLAKD

SEQ ID NO: 194088 - protein, 367 aa, Unknown
  Bacterial polypetide isolated from the Sargasso Sea
FAVDTAEQAVVATEKIGGSRWVVKAQVHAGGRGKAGGVQLVDSGQEAKAFANKWLGQNLVTYQTDANGQPVNKILVEECVSIERELYLGAVIDRTTRRIVFMASTEGGVEIEKVASETPEKILKATIDPLTGPLSYQGRNLAFELGLSDAQIKQFTALFLGLSKLFIDLDLSLLEINPLVITSEGDLNCLDGKINVDGNALFRQPKLESMQDSSQDDEREARAAEWDLNYVALDGNIGCMVNGAGLAMGTMDIVQLYGGKPANFLDVGGAASKERVTEAFKIILSDKKVSAVLVNIFGGIVRCDLIAEGVIGAVNEVGVSVPVVVRLEGNNAELGREVLDKSGLNILAASSLSDAAEKAVSAVGDEK

SEQ ID NO: 194089 - protein, 324 aa, Unknown
  Bacterial polypetide isolated from the Sargasso Sea
MNIHEHQAKQILKKYGAVVPEGVFGLTVEDLVEKAKSLNTKKYVLKAQIHAGGRGKAGGVKILDTIEELSEAAKEMMGKILVTHQTGPEGREVKRLYVEESSNIDKEFYLSCLVDRASSKIAFISSDQGGMDIEEVASNLPEKIITTKVDIGNEISDKDCEEIIKIFNLNDSAKTQAISLIKSIYQMFISTDANMVEVNPLILTKEEKVICLDAKVNFDSNALFRHPEIVELRDLNEEDPTEIEASKHDLAYIKLDGSIGCMVNGAGLAMATMDIIKLYGKEPANFLDVGGGASKEKVSAALKIILSDKNVKGILINIFGGIMR

SEQ ID NO: 194090 - protein, 394 aa, Unknown
  Bacterial polypetide isolated from the Sargasso Sea
MNLHEYQAKELLKKFDLPVPKGIVFIENLSQIEENLETLKGPPWVVKSQIHAGGRGAGKFKNKFNNMGGVQVVSEKNKVFKIAESMINNVLITKQTGDKGKEVKRIYIEEGCKIKKEFYLSILIDRNTSQPMMMISASGGIDIEEVAESNPDEIHYIYFSDLTNIVLRKNLIKTLDISEKQFEELNIIVKKLIKLFINIDASSIEINPLVLNDEGHFILLDSKISLDDNALFRHPELNKLQDISEEDPLELEATKNNMNYVKLDGSIGCMVNGAGLAMATMDLIKQFGEEPANFLDLGGTANKERAVKGFKIIQSDSNVKSVLINIFGGIIHCDMIANGIIEAVKELDFKLPIVVRFQGTNSKEGRDIINKSNLGMTSIDDFTEAAKKVVELAK

SEQ ID NO: 194091 - protein, 172 aa, Unknown
  Bacterial polypetide isolated from the Sargasso Sea
MSFDNNALFRRNQVSELRDKTQENSNEVYASDRGLNYVNLDGNIGNIINGAGLAMASMDMIKLAGGEPANFLDVGGGATPEKIVKAFKLISMDEKVKVILVNIFAGINRCDWVAEGIVQALQKIDIKVPLVIRLAGTNVEKGNQILKESKINYIEANTLEDAANKAVKALGN

SEQ ID NO: 194092 - protein, 311 aa, Unknown
  Bacterial polypetide isolated from the Sargasso Sea
MNLHEYQGKLLFAEYNLPVSKGKVIFDAKDAIDACDEIGGDKWVVKAQVHAGGRGKSGGVQLIDNPEQAIEFAQKWLGNRLITYQTDAVGQIVNSILIEECTDIAQELYLSAVIDRDTQKIVFIGSSEGGVNIEEVAKNSPEKIIYQGVDLDDKDFSQHAENIGKVLKLNPDQQNQFSPMLDNLVRLFVEKDLSLLEINPLVITKNGDLHCLDAKINIDSNALFRQPELMEMHDESQEDPQEAEAAKHDLSYVSLDGNIGCMVNGAGLAMGTMDTIKFFGGNPANFLDVGGTATQERVAKAFKIILKDPEV

SEQ ID NO: 194093 - protein, 231 aa, Unknown
  Bacterial polypetide isolated from the Sargasso Sea
EADELATKIGVPAASLPQARAILQGLYKAFWETDASLAEINPLILTGDGKVIALDAKFNFDSNALFRHPEIVAYRDLDEEDPAEVEASKFDLAYISLDGNIGCLVNGAGLAMATMDTIKLFGGEPANFLDVGGGATTEKVTEAFKIMLKNPNLTAILVNIFGGIMRCDVIAEGVIAASKAVSLKVPLVVRMKGTNEDLGKKMLAESGLPIIAADSMEEAAQKVVAAAAGKA

SEQ ID NO: 194094 - protein, 388 aa, Unknown
  Bacterial polypetide isolated from the Sargasso Sea
MNIHEYQGKEILRKYNVPVPRGTPAFSVDEAIEAAEILGGPVWVVKAQIHAGGRGKGGGVKIAKSMDQVKEYASSILGMTLETHQTGPEGKLVKRLLIEEGADIKKELYVSLVVDRVSQQVALMASSEGGMDIEEVAVTHPEKIHTLLIDPQTGLQDAQADDIASKIGVPDASLAQARQALHGLYKAFWETDASQAEINPLILTGDGKVIALDAKFNFDSNALFRHPEIVAYRDLDEEDPAEIEASKFDLAYISLDGNIGCLVNGAGLAMATMDTIKLFGGEPANFLDVGGGATTEKVTEAFKLMLKNPYVKAILVNIFGGIMRCDVIAEGVIAAAKAVSLSVPLVVRMKGTNEDLGKKLLADSGLPIIAADTMAEAAEKVVAAAAGK

SEQ ID NO: 194095 - protein, 291 aa, Unknown
  Bacterial polypetide isolated from the Sargasso Sea
MSVLIDKNTKVICQGFTGSHGTFHSEQSIKYGTNLVGGVTPKKGGQIHLERPVFNTVKEAKDATGADATMIYVPAKFASSAIIEAIDASIELIVCISEGIPILDMLKVKKKLQDSSSRLIGPNCPGIITPNECKIGIMPGNIHKKGSVGIVSRSGTLTYEAVAQTTENNLGQSTCIGIGGDPINGTNFIDCLDLFLNDDQTESILMIGEIGGTAEEEAAEFVKNHKIKKPIVGFIAGVTAPPGRRMGHAGAIISGGKGNAEEKIKTMQDCGITVANSPSDIGKTLLNKLSN

SEQ ID NO: 194096 - protein, 233 aa, Unknown
  Bacterial polypetide isolated from the Sargasso Sea
EISEVDCKKIIKVFELDDNASFEAISLIKAIYKLFVENDANLVEINPLILTKENKVVCLDAKMTFDENALFKHPEIQELRDYNEEEATEIEASKHDLAYIKLDGSIGCMVNGAGLAMATMDIIKLYGEEPANFLDVGGGASKEKVSAAFKIILSDKNVKGILINIFGGIMRCDTLAQGVVDAAKEIKIKVPLVVRLAGTNFEEGKKILENSDLKIISANNLSDAAKKVVEAIK

SEQ ID NO: 194097 - protein, 388 aa, Unknown
  Bacterial polypetide isolated from the Sargasso Sea
MKVHEYQGKEIFKKYGIPTPKGIPAFSVEEALKAYDKLESNIVVVKAQIHAGGRGKGGGVKLAHNRDDVKSLASDILGMKLVTHQTGPNGKEVQRLLIESGADISREFYAAITLDRSKEMDVFMVSKEGGVEIEKVAAETPEKIVKVWIDPLVGLKSFQVRKLSYGLGLEGNAFKEACSIFKKMYECYQSTDASLLEVNPLIETNDKQIIALDSKFNFDGNALFRQKDIYEMRDLSEEDEMEVEAGSYNLNYIKLDGNVGCMVNGAGLAMATMDIIKLAGGDPANFLDVGGTASAETVKNGFRIILSDDNVKAVLINIFGGIVRCDRVANGVVQAVKELGLEVPVVVRLEGTNAEEAQDILNSSGVSIIPAKGMKDAAEKVVSAAINL

SEQ ID NO: 194098 - protein, 389 aa, Unknown
  Bacterial polypetide isolated from the Sargasso Sea
MNLHEYQAKGLFAEYGLPVSEGYAVDTAEEAVEAAKKIGGDRWVVKVQVHAGGRGKAGGVKLVDSLEEVREFANQWIGKNLVTIQTDENGQPVSKIFVESCTEIETELYLGAVIDRGSRRVVFMASTEGGVEIEKVAEETPEKILRVAIDPFVGAQPYQGRDLAFRLGLKDKQIRQFADLFMGLSKLFMELDCSLLEINPLVITSEGDVHCLDAKVNIDGNALYRQKRISEMNDPSQEDEREAQAAEYNLNYVALDGNIGCMVNGAGLAMGTMDLVKLHGGNPANFLDVGGGATKEAVAEAFKIILSDEAVKAVLINIFGGIVSCATIAEGIIGAVKEVGVAVPVVVRFEGNNSELGKKTLSESGLNIIPGDSLVDAAQKAVAAAGGTS

SEQ ID NO: 194099 - protein, 386 aa, Unknown
  Bacterial polypetide isolated from the Sargasso Sea
MNIHEHQAKQILKKYGASVPKGDFAFTVNELIEKAKKIKTEKYVLKAQIHAGGRGKAGGVKILNNIEELTEAAKEMLGKTLITHQTGPNGKEVKRLYIEESSKIKKEFYLSCLIDRASSKIAFISSDQGGMDIEEVAKKSPEKIITTKVDYLEDIDDENCKKIIKIFNLKDNTMLQGINLIKSIYKMFISTDANLVEINPLILTEDDNLICLDAKMNFDDNSIFRQPEIQSLRDLNEEDPSEIEASKHDLAYIKLDGSIGCMVNGAGLAMATMDIIKLFGQEPANFLDVGGGASKEKVSAAFKIILSDPNVKGILINIFGGIMRCDILAQGVVEAAKEININVPLVVRLAGTNYKEGKLILDNSGLKIISASDLSDAASKIVKAIK

SEQ ID NO: 194100 - protein, 226 aa, Unknown
  Bacterial polypetide isolated from the Sargasso Sea
MNIHEHQAKEILSEFGAPVTNGFVIFKPQEINEKINKLKSNKLVVKAQIHAGGRGKAGGVKLVDRSEVNSEVQKMLGKVLVTHQTGPEGKKVKRIYIQEAYDIEKEFYLSCLVDRESSKIAFISSTEGGVDIESVAKNNPEKILTTKVDLKDNLSDDDIQKIIKIFSLDKHQKKDAENLVNALFNTLISKDASLIEINPLVITKQKKLICLDEKMNFDDNAMYRRP

SEQ ID NO: 194101 - protein, 112 aa, Unknown
  Bacterial polypetide isolated from the Sargasso Sea
MGGEPANFLDVGGGATTERVKIAIEIIMENPNVDAILINIFGGIVRCDVIAQGIYEAVKSTKIDIPIVVRLQGTNVELGGKILEESGMKIISASNLTDAAIKVVASVKGKVE

SEQ ID NO: 194102 - protein, 246 aa, Unknown
  Bacterial polypetide isolated from the Sargasso Sea
PEKILKAKLDENFELENTEIMKISDLLNFNEKQKDQFKTIVDGSAKLFKEKDLSLLEINPLVVKANGDLLCLDAKINVDENALFRQEEIELKRDSTQEDSREYEAKVNDLSYVSLEGNIGCMVNGAGLAMGTMDTIKLYDGEPANFLDVGGTATKERVSKALELILSDKKVKGILVNIFGGIVRCDLIAQGIIDAVEEIKVSIPMVIRLQGNKADEGKRLLNESGLNIIGEDSLQEASKKIVNLVK

SEQ ID NO: 194103 - protein, 251 aa, Unknown
  Bacterial polypetide isolated from the Sargasso Sea
VASDSPNKIITTKVEISESIDDNKVEKILSPFNFNKDQKREAIKLIKSLYKLLIEKDATLIEINPLILTTNGKIICLDAKMNFDDNAIFRRPEILKLRDLNEEDPTEIEASKHDLAYIKLNGSIGCMVNGAGLAMATMDIIKLYGKEPANFLDVGGGASKEKVAAAFKLIMSDKNVRGILINIFGGIMRCDVLAQGVVDAAKEINLSVPLVVRLAGTNFKEGKDILDKSNLKILSADNLNDAAKKIVEAIN

SEQ ID NO: 194104 - protein, 265 aa, Unknown
  Bacterial polypetide isolated from the Sargasso Sea
IAFIVSKMGGMDIEGVAEDTPENITTVQIEPAVGVTDESINKILYAFELGENYVTQLSNLIKNMYKFFLEKDASLVEINPLIVTETNKLLCLDAKVNFDDNALYRHPEIEKLRDENEEDVYEREASKYDLAYIKLDGNIGCMVNGAGLAMASLDIIKMYGGEPANFLDVGGGASKEKVSSAFKIILSDTGVKGILVNIFGGIMRCDIIAEGIVAAAKELKISVPLVVRLEGTNVNEGKKILENSSIEIIPASNLDDAAKKIVKLV

SEQ ID NO: 194105 - protein, 233 aa, Unknown
  Bacterial polypetide isolated from the Sargasso Sea
EISDKDCDKIIKIFDLNDNAKKQAISLIKSIYKMFISTDANMVEVNPLILTKEEKIICLDAKVNFDSNALFRHPEITELRDLNEEDPTEIEASRHELAYIKLDGSIGCMVNGAGLAMATMDIIKLYGKEPANFLDVGGGASKEKVSAALKIILSDNNVKGILINIFGGIMRCDILAQGVVDAAKEINISVPLVVRLAGTNFKQGKEILDSSGLKLISAENLDDAAKKIVEAIN

SEQ ID NO: 194106 - protein, 209 aa, Unknown
  Bacterial polypetide isolated from the Sargasso Sea
ITLIKSIYKMFISTDANMVEVNPLILTKEEKIVCLDAKVNFDSNALFRHPEIVELRDLNEEDSTEIEASKHDLAYIKLDGSIGCMVNGAGLAMATMDIIKLYGKEPANFLDVGGGASKEKVSAALKIILSDKNVKGILINIFGGIMRCDVLAQGVVDAAKEINIGVPLVVRLAGTNFKQGKEILDNSGLKLISAENLDDAAKKIVEAIK

SEQ ID NO: 194107 - protein, 346 aa, Unknown
  Bacterial polypetide isolated from the Sargasso Sea
VVVKAQIHAGGRGKGGGVKYSSSTEEALKNVKKMLGMNLITHQTGDKGQKVKKVYITEALDIKKEFYCAITLDRSKAKDVFMVSSEGGVEIEKVAEETPEKIIKVWIDPLIGIKSFHAIKLANGLGLSGEAHKIAIKVFINMYKCYMGTDASIVEINPLILTEDNKIVALDAKFNFDGNAIFRHNNIAELRDTNEEDPTELEASKYDLNYIKLDGNVGCMVNGAGLAMATMDIIKLAGGEPANFLDVGGAASAETVKNGFKIILSDKNVQAILINIFGGIVRCDRVANGVIEAVKELGLKVPVVVRLEGTNSEDAKNILSKSGLDIIPANDMKDAAEKVVNSAINN

SEQ ID NO: 194108 - protein, 143 aa, Unknown
  Bacterial polypetide isolated from the Sargasso Sea
GIVSRSGTLTYEAVKQTTDKGFGQSSCVGIGGDPIPGSHFIDILSLFQEDSSTEAIVMVGEIGGTAEEEAAAYIKSNVTKPVVSYIAGVTAPPGKRMGHAGAIIAGGKGTADEKFAALEDAGVKTVRSLGEIGDALSEMTGWP

SEQ ID NO: 194109 - protein, 250 aa, Unknown
  Bacterial polypetide isolated from the Sargasso Sea
PEKIVNYTIDPLKGLEIGSLKEMADRMGFIDDIQSQFISITKKMFEIAKEKDANLIEVNPLILDDENQLIALDAKISIESNALFRQKELLLLKDDSQENKLEVKASEHDLSYVSLDGNIACMVNGAGLAMATMDLIKLHGGEPANFLDVGGGATTERVKMAIDIIMKNPNVDAILINIFGGIVRCDVIAQGIYEAVKSTNIDIPIVVRLQGTNVELGTKILEESGMKIISASDLTDAAMKVVASVKGKVE

SEQ ID NO: 194110 - protein, 350 aa, Unknown
  Bacterial polypetide isolated from the Sargasso Sea
INGKVVIKAQVHAGGRGKAGGIKIVDNPLDAKKVAQDMIGGTLKTFQSGGTKFPINKVYVEEASDILKEFYLAVTMDFDEKCPVIILSTEGGMNIEEVAEKTPDKIMKIHVNPLIGPSPYKVRNLLSSLNLEKKISQQISNIIQNLYRIFKSLDCTLIEINPLAITSQEKVIALDAKITIDDDSIFRHSDIEELFDETQMNQSELKALRNDLAYIKLDGGKVGCMVNGAGLAMATMDITMKAGTAPANFLDVGGSASEERIEEAYKIIASDNDVEVILVNLFGGILRCDVAAKGIINGFENYNKSIPMVVVLRGTNSEDAKLLLENSELDISFAEDLPTAASEITKKLKK

SEQ ID NO: 194111 - protein, 168 aa, Unknown
  Bacterial polypetide isolated from the Sargasso Sea
DENALFKHPEIQKLRDFNEEEETEIEASKHDLAYIKLDGNIGCMVNGAGLAMATMDIIKLYGEEPANFLDVGGGASKEKVSAAFKIILSDKNVKGILINIFGGIMRCDVLAQGVVDAAKEIKIKVPLVVRLAGTNFKEGKEILDNSGLEIISANDLSDAAKKIVEAIK

SEQ ID NO: 194112 - protein, 300 aa, Unknown
  Bacterial polypetide isolated from the Sargasso Sea
DKKGQLVNCILVEECTNIAKELYLSAIIDRESQKIVFIGSSEGGVNIEDVAKNMPEKIIYQGFVYKDDSLNENAENIAKVLKLNDQQTIQFISIIDNLLRLFVEKDLSLLEINPLVITENGDLHCLDAKINIDSNALYRQPELLEMRDESQEDPKEAEAAKSDLSYVSLDGNIGCMVNGAGLAMGTMDTIKFFGGNPANFLDVGGTATQERVAKAFKIILDDPDVKVVLVNIFGGIVRCDLIAEGIIAAIKEVEVKIPVVVRLEGNNADIGSKILSKAKIKIESINDLADAAKKAVSLAK

SEQ ID NO: 194113 - protein, 285 aa, Unknown
  Bacterial polypetide isolated from the Sargasso Sea
GSDIEKELYLSCLLDRSTSKVAFIVSKMGGMDIEAVAADTPENITTVQIEPSIGVTNTDIEMIQKAFEIDDDLNHQLSDLIKNMYLFFIEKDASLVEVNPLIVTNTNKLLCLDAKVNFDDNAIYRHPEIEELRDENEEDEYEREAAKYDLAYIKLDGNIGCMVNGAGLAMASLDIIKMYGGEPANFLDVGGGASKEKVSSAFKIILSDQGVKGILVNIFGGIMRCDVIAEGIVSAAKELKISVPLVVRLEGTNVDQGKQILENSGIEIISANDLDDAAKKIVKLV

SEQ ID NO: 194114 - protein, 160 aa, Unknown
  Bacterial polypetide isolated from the Sargasso Sea
SVYVDQWDWERVMGDGERHSGTLKATVEAIYAGIKATEDAVSKAFGLTPFLPETIQFVHSQELLSRYPDLDAKGRERAIAKELGAVFLIGIGGKLSDGQRHDVRAPDYDDWSTPAAEGYAGLNGDILVWNPVLEDAFELSSMGIRVDAEALKRQLAMTGD

SEQ ID NO: 194115 - protein, 330 aa, Unknown
  Bacterial polypetide isolated from the Sargasso Sea
MKQHYIRSQQQISFVKEMFSRQLAQQLGLMEVQAPILSRVGDGTQDNLSGHENAVQVKVKTLPEHSYEVVHSLAKWKRQTLGRFGFGPGEGIYTHMKALRPDEDRLTPIHSVYVDQWDWEKVMPSERRDLAYLQETVRGIWAAIKATERAVCAEHELTPFLPAEIHFLHSEELLTRYPDLDAKGRERAIAKELGAVFLIGIGGALSHGERHDVRAPDYDDWSSHSELGLAGLNGDILVWNPVLQDSFEISSMGIRVDAEALRRQLAITGDEDRLQYDWHQDLLAARMPQTIGGGIGQSRLAMLLLQKEHIGQVQVGVWPAEMKAAVQGML

SEQ ID NO: 194116 - protein, 227 aa, Unknown
  Bacterial polypetide isolated from the Sargasso Sea
IHNVANAYGKTATFMPKPYHGDNGSGMHVHQSVWKDGKNLFAGDGYAGLSDFALYYIGGIIKHARALNAITNPGTNSYKRLVPHFEAPVKLAYSAKNRSASIRIPYVANPKGRRVEARFPDPLMNPYLGFAALLMAGLDGVENKIHPGEAATKDLYHLPPEEDKLVPTVCHSLDQALEHLDKDRAFLTKGGVFTDSMIDAYIDLKMNEVTRFRMAVHPVEYDMYYSL

SEQ ID NO: 194117 - protein, 218 aa, Unknown
  Bacterial polypetide isolated from the Sargasso Sea
QTATFMPKPVAGDNGTGMHTHQSIWKDGKPVFAGGEYSGLSETCLHYIGGIIKHAKAINCFTNPSTNSYKRLIPGFEAPVLLAYSARNRSASCRIPFVGSPNGKRVEVRFPDATANPYLAFSAMLMAGLDGIQNKIHPGEPMDKDLYELPENELQNIPTVCGSLREAVDALKKDMSFLTKGGVFTEDQIEAYIDLKMEEVIEFEHAPHPVEFKMYYSS

SEQ ID NO: 194118 - protein, 99 aa, Unknown
  Bacterial polypetide isolated from the Sargasso Sea
TFAAMLMAGLDGIKNKIHPGESFDKDLYDLPPEEVKAIPTVCGSLREAMESLDKDREFLTQGDVFTDDQIDAYIALKFEEIHKFEHAPHPVEFEMYYSS

SEQ ID NO: 194119 - protein, 278 aa, Unknown
  Bacterial polypetide isolated from the Sargasso Sea
GGSSDCILIPVQTYKGPLFSDSLVMCEVQNGDHEVHPSNTRAAAASIVSDEWWFGFEQEYFFTGDNGEPLGWEDGTPRPQGDYYCGVGAGNVEGRDISEAHLEACLEAGIELTGTNAEVALGQWEYQCFGKGIKAADDLWVSRYLLYKIAEDFGVGVNIHPKPKTGDWNGSGMHTNFSNEEMRTAGSEDLYNSLCDKLGQVHKEGIALYGSDNNMRLTGLHETQSIEKFSYGVSDRGASIRIPIYTVENNWNGYLEDRRPASNADPYKIINHIVSTLK

SEQ ID NO: 194120 - protein, 227 aa, Unknown
  Bacterial polypetide isolated from the Sargasso Sea
MSSKNILKLMKDKQVEFVDLRFTDPKGKLQHLTMDATVVDEDMLDKGVFFDGSSIAGWKAINESDMILKPDLDKPIIDPFNSHTTLNIFCDILDAVKKDPYERDPRGTAKKAEAYLKKTGIGDKSYFGPEPEFFVFDDVRFKNDMNETSFTIDSSEGPYNTGKKYENGNMGHRPGIKGGYFPVPPVDSAQDMRGEYLKALKDMGVKVEKHHHEVAPSQHELGMYFGT

SEQ ID NO: 194121 - protein, 203 aa, Unknown
  Bacterial polypetide isolated from the Sargasso Sea
RECTLTNLFWKGSTPVFSGNKYAGLSQTALYYIGGILKHAKAINAFSNATTNSYKRLIPGFEAPVLLAYSARNRSASCRIPITLSKKGARCEIRFPDASGNPYLTFAAMLMAGLDGIKNKIDPGKSFDKDLYALSENEVKKVPTVCGSLREALESLDRDRAFLKKGNVFTDDQIDAYIALKFEEIHNFEHTPHPIEFEMYYSC

SEQ ID NO: 194122 - protein, 179 aa, Unknown
  Bacterial polypetide isolated from the Sargasso Sea
MSAANVLKFIKEKEAEFVDLRFTDPRGKLQHLTMDTSVVDEGMLNDGVFFDGSSIAGWKAINESDMILKPDTARMFMDPFTSHNTVVLFCDILDAIKKDPYERDPRGVAKKAEEYLKASGIGDKAFFGPEPEFFVFDDVRIKNDMNECGFKLDSKEGPYNSGKEYENGNMGHRPQIKGG

SEQ ID NO: 194123 - protein, 182 aa, Unknown
  Bacterial polypetide isolated from the Sargasso Sea
MRVYQKLPCTTSAVSSSTRKQLMPSLTLLRTSYKRLVPHFEAPVMLAYSARNRSASIRIPLVPSAKARRIEVRFPDPAANPYLAFVAQLMAGLDGIQNKIHPGDAMDKDLYDLPPEEEALIPQVCGSLDEALDALDANRAIFTKGGVMSDAMIDAYIELKRAEAKRVSVAVHPLEYELYYSV

SEQ ID NO: 194124 - protein, 197 aa, Unknown
  Bacterial polypetide isolated from the Sargasso Sea
VGADEVYGRSISEDHATACIEAGLNISGTNAEVMPGQWEFQIGPVGAPDIGDQIWIARWLLYRIAEDYNISATLTPKPVKGDWNGAGMHTNFSTKQMREDGGYDAIVAGCEALGKNAEFHVQNYGAGIEDRLTGDHETQRFDTFSYGVSDRGASIRIPWQVEVDKKGYLEDRRPNANADPYVIATVMIDTVCSAASS

SEQ ID NO: 194125 - protein, 162 aa, Unknown
  Bacterial polypetide isolated from the Sargasso Sea
MSAKDVLKFIKDKEAEFVDLRFTDPRGKLQHLTMDCTAVDEGMLNDGVFFDGSSIAGWKAINESDMILKPDLSRFFLDPFTSHNTVVLFCDILDAIKKTPYERDPRGVAKKAEEYLKKSGIGDKAFFGPEPEFFVFDDVRIKNDMNECGFKLDSKEGPYNSG

SEQ ID NO: 194126 - protein, 137 aa, Unknown
  Bacterial polypetide isolated from the Sargasso Sea
LAYSSRNRSASCRIPFVSNPKGKRVEVRFPDAASNPYLAFSAMLMAGLDGIKNKIHPGEPMDKDLYELPPEELKDIPTVCGSLREALAALDADRSFLTQGGVFDDDQIDAYIELKMEEVLAFEQTPHPIEFQMYYSV

SEQ ID NO: 194127 - protein, 313 aa, Unknown
  Bacterial polypetide isolated from the Sargasso Sea
MPDLDSGYLDPFYSEKTYCLHCNVVEPESGKLYGRDPRSTAVKAEEYLKKTKIGTKAFFGPEAEFFLFDDVKFSNSMNKVSFEVDAMDASWNTDTSYEMGNMGHRPGVKGGYFPVNPTDAGQDIRSEMLSTMKRMGMKVDKHHHEVASCQHELGLVFDSLKAQGDNLQKYKYVIQNVAHSYGKSATFMPKPVANDNGTGMHTNMSIWDGNKSVFAGKEYAGLSKHALHYIGGILKHAKALNAFTNPSTNSYKRLIPGFEAPVLLAYSAKNRSASIRIPYVESSKATRVEARFPDPTANPYLSFAALLWLDLDG

SEQ ID NO: 194128 - protein, 165 aa, Unknown
  Bacterial polypetide isolated from the Sargasso Sea
MSSSKVLKLMKDKDIEYVDLRFTDPRGKLQHLTMDATIVDEGMLNDGVFFDGSSIAGWKAINESDMILKPDLNRQIVDPYTSHNTLILFCDIFDAVKKDSYERDPRGIAKKAEAYLKKTGVGDKAYFGPEPEFFVFDDVRIKNDMNETSFAIDSAEGSLQFWKKI

SEQ ID NO: 194129 - protein, 179 aa, Unknown
  Bacterial polypetide isolated from the Sargasso Sea
MSSKNIIKLMKDKQVEFVDLRFTDPRGKLQHVTMDATVVDDELLNEGVFFDGSSIAGWKAINQSDMLLKPDLTRPIIDPFNSHTTLNIFCDILDAVNKDPYERDPRGTAKKAEAYLKKSGIGDKSYFGPEPEFFVFDDVRFKNDMNETSFSIDSSEGPYNTGKKYENGNMGHRPGIKGG

SEQ ID NO: 194130 - protein, 210 aa, Unknown
  Bacterial polypetide isolated from the Sargasso Sea
MSASAVKKVIKDKEIEYVDLRFTDPRGKLQHVTMDASIVDEDMLNEGVFFDGSSIAGWKAINESDMILKPDLSRTVIDPFTSHNTLNIFCDVLDAIKKDPYERDPRGTAKKAEEYLKKTGIGDKAYFGPEPEFFVFDDVRYSNDMNKTGFEIDSSEGPYNTGKKYENGNMGHRPGIKGGYFPVPPVDSAQDMRSEYLKAMKDMGIKVEKH

SEQ ID NO: 194131 - protein, 305 aa, Unknown
  Bacterial polypetide isolated from the Sargasso Sea
AEFFVFDDVRFKNDMNETGFKIDSKEGPYNSGREYENGNMGHRPGIKGGYFPVPPVDSEQDMRSEYLKAMKEMGIKVEKHHHEVAPSQHELGMYFGTLVDQADNLQLYKYAVHMVSNSFGKTATFMPKPVKGDNGSGMHVHQSIWKGDTALFSGDKYAGLSDTALHYIGGILKHAKAINAFSNATTNSYKRLIPGFEAPVLLAYSARNRSASCRIPITLSKKAARCEIRFGDAAGNPYLTFSAMLMAGLDGIKNKIDPGKSFDKDLYALSEDEVKKIPTVCGSLREAMESLDKDRDFLKQGNVFT

SEQ ID NO: 194132 - protein, 313 aa, Unknown
  Bacterial polypetide isolated from the Sargasso Sea
GSNFAFHEVDSVEGTWNSGADENPNLGHKPRHKEGYFPLPPVDTLQDVRTEMVMTMQDIGLTVEAHHHEVATGGQCEIDLEFSPLLKMADDMMKYKYVVKNVARQHGMTATFMPKPLFEDNGSGMHVHQSVWKDGDTLMYKEGNYANLSDLALNYIGGILKHAPALLAFCAPTTNSYKRLVPGFEAPVNIVYSQRNRTASVRIPAYSQSPKAKRMEFRCPDPSANPYLAFSAMLMAGLDGIKNKIDPGDPTDINLYAASDEVLSKIQSTPGSLAESLEALEKDHAFLLEGDVFTKDVIETYISYKKESEVDPN

SEQ ID NO: 194133 - protein, 301 aa, Unknown
  Bacterial polypetide isolated from the Sargasso Sea
FNNGVFFDGSSIAGWKAIYESDMVLKPDLSTAVMDPFTAQPTMMLFCDILDAVTKEPYERDPRGTAKKAEEYVKSSGIGDTVYIGPEAEFFVFDDVKFQVEMNKSSFEIDSSEGPYNSAKNYESGNLGHRPGIKGGYFPVPPVDSAQDIRTEFLEELKNLGLKMEKHHHEVAPSQHELGLLFDTLLKQGDGIQLYKYGVHMVANSFGKTATFMPKPVKGDNGSGMHVHQSIWKDGKPLFAGDGYAGLSETAIHYIGGIIKHGKALNAFTNPSTNSYKRLIPGFEAPVILVYSARNRSASCR

SEQ ID NO: 194134 - protein, 346 aa, Unknown
  Bacterial polypetide isolated from the Sargasso Sea
DEVFSRIKHENIKFIDLQFTGLTGRFHHTTISADTFTPQQMEDGLPKLDGSSIVGFTDIADSDLILKPDPSTFAIIPWLTEKKTARLLCDVYWGGGRGRLESDPRGICQKAEAFVKTQGFDFSNWGPEVEFFVFDKVHWDVLTPYKGQSYSIESSESPWSQEGTGYPMGLQEGYYPSTPSDTLAPFRNECVDVLNDNFGILCDNHHHEVATAGQCEIDIKYDLMTNSADGAQSYKYVVRNVAQQFGKVATMMPKPISMDAGSGMHTNVSLWKKDENTFYDKDEVLELSQIGRYFCGGVMEHAKGLTAITNPTTNSYHRLVPGYEAPVYIAWSSSNRSATIRIPGHF

SEQ ID NO: 194135 - protein, 212 aa, Unknown
  Bacterial polypetide isolated from the Sargasso Sea
PKPVKGDNGSGMHVHQSIWKGDKALFSGDKYAGLSDIALNYIGGILKHAKAINAFSNATTNSYKRLIPGFEAPVLLAYSARNRSASCRIPITLSKKAARCEVRFGDAAGNPYLTFAAMLMAGLDGIKNKIDPGKSFDKDLYALSESEVKKIPTVCGSLREAMESLDKDRDFLKQGNVFTDDQIDAYIALKFEEIHNFEHTPHPIEFDMYYSC

SEQ ID NO: 194136 - protein, 210 aa, Unknown
  Bacterial polypetide isolated from the Sargasso Sea
PIKGDNGSGMHTHQSIWKGKNAIFSGNEYAGLSKTALYYIGGILKHAKAINAFSNATTNSYKRLIPGFEAPVLLAYSARNRSASCRIPITLNKKSARCEIRFPDAAGNPYLTFASMLMAGIDGIKNKIHPGKSFDKDLYSLSEKEVKNIPTVCGSLREAMENLDQDRKFLTQGNVFTDDQIDAYIALKFEEIYNFEHTPHPMEFEMYYSC

SEQ ID NO: 194137 - protein, 269 aa, Unknown
  Bacterial polypetide isolated from the Sargasso Sea
CEVLNVDMTPHTTNTRAACEAAAENFAEFEPMFGLEQEYTFYEQSYDSLKYGQPLGFPPSGYPAPQGGYYCGVGADEVYGRDISEEHASACMAAGLEISGTNAEVMPGQWEFQIGPVGAPAIGDHIWVARWLLYRIAEDYNISATLDPKPVKGDWNGAGMHTNFSTKQMREDGGYEAIIAGCEALGKNAELHVKNYGSGIEDRLTGDHETQKFDTFSYGVSDRGASIRIPWQVEVDKKGYLEDRRPNANADPYVIAMLMIDTVCSAASS

SEQ ID NO: 194138 - protein, 251 aa, Unknown
  Bacterial polypetide isolated from the Sargasso Sea
MTAANVLKFIKTKEAEFVDLRFTDPRGKLQHLTMDSGVVDKDMLDNGVFFDGSSIAGWKAINESDMILKPDTARMFMDPFTSHNTVVLFCDILDAVKKSPYERDPRGIAKKAEKYLKTSGIGDKAFFGPEPEFFVFDDVRIKNDMNECGFVIDSKEGPYNSGKEYDNGNMGHRPPVKGGYFPVPPVDSEQDMRSEYLKNLKEVGIKVEKHHHEVAPSQHELGMYFGTLVDQADNVQLYKYVVQMVTHSFGK

SEQ ID NO: 194139 - protein, 160 aa, Unknown
  Bacterial polypetide isolated from the Sargasso Sea
CAPTTNSYKRLVPGFEAPVNIAYSAANRTASVRIPNNYTASPKAKRIEFRCPDPSSNPYLAFSAILMAGLDGVKNKINPGKPTDINIYEAPASVLAKIPSTPGSLAESLDALEKDHKYLLNGDVFTKDNIETYISYKRENEVSPMDIRPHPHEFNLYYDV

SEQ ID NO: 194140 - protein, 193 aa, Unknown
  Bacterial polypetide isolated from the Sargasso Sea
YYCGRNIGEKISREHLNACIEAGISICGTNAEVMLGQWEYQIGAGGSIHMSDDLWVARWLLERICEKEGVEVSLHPKPMEGDWNGAGCHTNFSTKEMREEDGDVKIGEAIEKLEPKHQEHIEAYGPDNDQRLTGLHETCDINTFRWGVSDRGASIRVPWQVHRDGKGYLEDRRPSSNCDPYLVAQKLVETICS

SEQ ID NO: 194141 - protein, 134 aa, Unknown
  Bacterial polypetide isolated from the Sargasso Sea
LLYRISEDYGVSATLHPKPVKGDWNGAGAHTNFSTKSMRSVGGIDVINEACEKLSQKHDEHINVYGAHNEERLTGLHETCSIKEFRYGVSDRGASIRIPMQTANDGYGYLEDRRPSANMDPYKVCAILIETTCG

SEQ ID NO: 194142 - protein, 225 aa, Unknown
  Bacterial polypetide isolated from the Sargasso Sea
MVSHSFGKTATFMPKPVKGDNGSGMHTHQSIWKGKTAVFSGNKYAGLSTTALHYIGGILKHAKAINAFSNATTNSYKRLIPGFEAPVLLAYSARNRSASCRIPITLNKNGARCEIRFPDAAGNPYLTFSAMLMAGLDGIKNKIDPGKPLDEDLYALPESKVKNIPTVCGSLREAMESLDRDRDFLKQGGVFSDDQIDAFIALKFEEIYNLEHTPHPMEFEMYYSS

SEQ ID NO: 194143 - protein, 195 aa, Unknown
  Bacterial polypetide isolated from the Sargasso Sea
IWKGDTPVFSGDAYAGLSETALHYIGGILKHAKAINAFANSTTNSYKRLVPGFEAPVLLAYSARNRSASCRIPITLSKKGARCEIRFPDASGNPYLTFAAMLMAGLDGIKNKIHPGESFDKDLYDLPPEEVKAIPTVCGSLREAMENLDKDREFLTQGNVFTDDQIDAYIALKFEEIHKFEHAPHPVEFEMYYSS

SEQ ID NO: 194144 - protein, 274 aa, Unknown
  Bacterial polypetide isolated from the Sargasso Sea
MSDAKTIMNMIKEKEIQFLDLRFTDPRGKMQHLSQHISTIDEKSLAEGFMFDGSSIAGWKAINESDMKLMPDCSRGIVDPFFSQPTLSIFCDVLDPISGEPYERDPRSTAKQALAYMGSIGVGDTAYFGPEPEFFVFDDVKYEAEMNSSFYKIDSSEGPYNSGKEFEEGNLGHRPGIKGGYFPVPPVDSAQDLRSEMVLSLVDMGVPMEKHHHEVAPSQHELGMKFGTLIDTADNVQLYKYAVQNVAHSFGQTATFMPKPVAGDNGTGMHTHQS

SEQ ID NO: 194145 - protein, 147 aa, Unknown
  Bacterial polypetide isolated from the Sargasso Sea
MSSKNVLKLIKDKEIEFVDLRFTDPKGKLQHLTMDSTIVDEEMLNKGVFFDGSSIAGWKAINESDMILKPDLDRPIIDPFNSHTTLNIFCDILDAVKKDPYERDPRGTAKKAEAYLKKTGIGDKAYFGPEPEFFVFDDVRFKNDMNE

SEQ ID NO: 194146 - protein, 309 aa, Unknown
  Bacterial polypetide isolated from the Sargasso Sea
KKTPYERDPRGIAKKAEAYLKSTGIGDKAYFGPEPEFFVFDDVRYKNDMNETSFAIDSIEGPYNTGRKYENGNMGHRPGIKGGYFPIPPVDSAQDMRGEYLKGLRDVGIKVEKHHHEVAPSQHELGMYFGTLVDQADNVQLYKYVVQMVSHSFGKTATFMPKPVKGDNGSGMHTHQSIWKGKMPVFSGNKYAGLSDTALHYIGGILKHAKAINAFSNAATNSYKRLIPGFEAPVLLAYSARNRSASCRIPITLSKKGARCEIRFPDAVGNPYLTFAAMLMAGIDGIKNKINPGKPLDEDLYALPEDKVK

SEQ ID NO: 194147 - protein, 204 aa, Unknown
  Bacterial polypetide isolated from the Sargasso Sea
IGINVEASHHEVASGGQCEIDLEFSPLLSMADDLLRYKYVVKNVAKQHGMTATFMPKPLFEDNGSGMHVHSSIWKKNKTLMYKKGNYADLSDFALYYIGGILKHAPSLLAFCAPTTNSYKRLVPGFEAPVNIAYSQANRTASVRIPNNYTSSPKAKRIEFRCPDPSSNPYLAFSSILMAGLDGVKNKIDPGKPTDINIYEASSK

SEQ ID NO: 194148 - protein, 246 aa, Unknown
  Bacterial polypetide isolated from the Sargasso Sea
MYFGTLTNQADNLQLYKYAVQMVTHSFGKTATFMPKPVKGDNGSGMHCHQSIWKGNTPVFMGNEYAGLSKTALYYIGGILKHARAINAFSNATTNSYKRLIPGFEAPVILAYSARNRSASCRIPIIMNPKAARMEIRFPDAAGNPYLTFASMLMAGIDGIKNKIDPGKSFDKDLYTLSEDEVKKLPTVCGSLREAMQNLDKDRKFLTQGGVFTDDQIDAYIDLKFQEIYKFEHTPHPIEFEMYYSG

SEQ ID NO: 194149 - protein, 213 aa, Unknown
  Bacterial polypetide isolated from the Sargasso Sea
MPKPVAGDNGSGMHTHQSIWKGDTPVFSGDAYSGLSETALHYIGGILKHAKAINAFSNATTNSYKRLIPGFEAPVLLAYSARNRSASCRIPITLSKKGARCEIRFPDASGNPYLTFAAMLMAGIDGIKNKIHPGESFDKDLYELPPEEVKSIPTVCGSLREAMESLDKDREFLTQGGVFTDDQIDAYIALKFEEIHKFEHAPHPVEFEMYYSC

SEQ ID NO: 194150 - protein, 260 aa, Unknown
  Bacterial polypetide isolated from the Sargasso Sea
MNANKILKLIKDKEVEYVDLRFTDPRGKLQHVTQDLQTVDEDMLNDGIFFDGSSIAGWKAINESDMILKPDLSSNFIDPFFSHTTLVLFCDVMDPITKTYYERDPRSTAKKAEAYLKKTNIGDKAYFGPKPEFFVFDDVRFTNLMNKVSYEVDSSEGPYNTGKEYENGNLGHRPKVKGGYFPVPPVDSAQDLRSECLKAMKDMGVKVEKHHHEVAPSQHELGTLFNTLVNQGDAMQIYKYAVHNVANSFGKNSYIYAKTC

SEQ ID NO: 194151 - protein, 305 aa, Unknown
  Bacterial polypetide isolated from the Sargasso Sea
IAKKAEQYLKASGIGDKAFFGPEPEFFVFDDVRIKNDMNECGFVLDSKEGPYNSGKEYESGNMGHRPGVKGGYFPVPPVDSEQDMRSEYLKNLKDVGIKVEKHHHEVAPSQHELGMYFGTLVDQADNVQLYKYVVQMVTHSFGKTATFMPKPVAGDNGSGMHTHQSIWKGDTPVFSGEAYAGLSETALHYIGGILKHAKAINAFSNATTNSYKRLIPGFEAPVLLAYSARNRSASCRIPITLSKKGARCEIRFPDASGNPYLTFAAMLMAGIDGIKNKIHPGDSFDKDLYELPPEEVKSIPTVCG

SEQ ID NO: 194152 - protein, 249 aa, Unknown
  Bacterial polypetide isolated from the Sargasso Sea
MSYKSQQLIKDHDVKWVDLRFTDTKGKQQHVTMPARDALDDEFFEAGKMFDGSSIAGWKGIEASDMILLPDDSTAVLDPFTEEPTLILVCDIIEPSTMQGYERDPRNIAKRAEEYLKSTGIGDTVFVGPEPEFFIFDEVKFKSDISGSMFKIFSEQASWNTDADIETGNKGHRPGVKGGYFPVPPVDHDHEIRTAMCNALEEMGLTVEVHHHEVATAGQNEIGVKFNTLVAKADEVQTLKYCIHNVADA

SEQ ID NO: 194153 - protein, 284 aa, Unknown
  Bacterial polypetide isolated from the Sargasso Sea
GKLQHLTMDKTVVDGDMLNEGVFFDGSSIAGWKAINESDMILKPDLSRKIIDPYTSHNTLVLFCDILDAVKKDPYERDPRGIAKKAEAYLKKTGIGDKAYFGPEPEFFVFDDVRIKNDMNETGFSIDSTEGPYNSGRKYENGNMGHRPGIKGGYFPVPPVDSAQDMRSEYLKGLRDVGIKVEKHHHEVAPSQHELGMYFGTLVNQADNVQLYKYVVQMVSHSFGKTATFMPKPVKGDNGSGMHTHQSIWKGKTPVFSGDKYAGLSQTALYYIGGILKHAKAINA

SEQ ID NO: 194154 - protein, 299 aa, Unknown
  Bacterial polypetide isolated from the Sargasso Sea
MGIADTAFFGPEPEFFLFDDVRYDSKEGGCFYSVDTIEAPWNTGRIEEGGNLGYKIQYKEGYFPVAPNDTAQDIRSEMLLLMGELGIPTEKHHHEVAGAGQHELGMKFDSLINAADNVMTYKYVVRNVAKKYGKTATFMPKPVFNDNGTGMHVHQSLWKSGQPLFFGEGAYANLSQTARWYIGGILKHAPSFLAFTNPTTNSYKRLVPGFEAPVNLVYSEGNRSAAVRIPLTGPSPKAKRLEFRSGDALANPYLAFSVMMLAGIDGIKNQIDPGDGVDVDLFELPADELAKIDTVPSSL

SEQ ID NO: 194155 - protein, 222 aa, Unknown
  Bacterial polypetide isolated from the Sargasso Sea
MLDPNTKQPIGFPEEGFPEPQGPYYCSVGASWIFGREMAEEHMALCLDAGLAISGINAEVMPGQWEFQIGPVSALDVSDHLWVARWLLLRVGEMHGIFPSLDPKPISGDWNGAGAHTNFSTKAMRESYQPIIDGCEALAKKHDLHIQNYGDGNERRLTGLHETQSIDQFSYGASDRGASIRIPWQVEKDQKGYLEDRRPSANMDPYTVTKLLLDTICSNEPQ

SEQ ID NO: 194156 - protein, 214 aa, Unknown
  Bacterial polypetide isolated from the Sargasso Sea
KPLFGDNGSGMHVHQSIWKDGDTLMYKKGNYADLSDTALNYIGGILKHAPALLAFCAPTTNSYKRLVPGFEAPVNIAYSQRNRTASVRIPTYSSSPKSKRMEFRCPDPTANPYLAFAAMLMAGLDGVKNKIDPGEPTDINIYEAPSEILAKIPSTPGSLAEALNALEKDNSFLLEGDVFTKDLIETYIDYKRENEVNPVNIQPHPHEFKLYYDA

SEQ ID NO: 194157 - protein, 323 aa, Unknown
  Bacterial polypetide isolated from the Sargasso Sea
LRERSRGIAKKAEAYLKTSGIGDKAYFGPEPEFFVFDDVKYKNDMNETSFKIDSSEGPYNTGKDYPNGNMGHRPGIKGGYFPVPPVDSAQDIRGEYLKGLRDVGITVEKHHHEVAPSQHELGMLFNTLVNQADNVQLYKYVVHMVSHSFGKSATFMPKPVKGDNGSGMHVHQSIWKGDTPTFSGDKYSGLSETALNYIGGILKHAKAINAFSNATTNSYKRLIPGFEAPVLLAYSARNRSASCRIPITLSKKGARCEIRFPDASGNPYLTFSAMLMAGLDGIKNKIDPGESFDKDLYSLSEDEIKNIPTVLWSLREAMESLDT

SEQ ID NO: 194158 - protein, 209 aa, Unknown
  Bacterial polypetide isolated from the Sargasso Sea
MSDANDILKKIKDEKINFVDLRFTDPRGKMQHVTQHVDTIDSDTLSDGFMFDGSSIAGWKAINESDMTLMPDLNRSYIDPFFSQPTLAVFCDILDPLSGEPYERDPRSTAKSAINYMESTGIADKAFFGPEAEFFIFEDVKIDVSMNRAMYSIDSVEGPYNSAKSYDEGNLGHRPGVKGGYFPVPPIDTGQDIRSDMLSTMSEMGVPVE

SEQ ID NO: 194159 - protein, 272 aa, Unknown
  Bacterial polypetide isolated from the Sargasso Sea
PEPEFFLFDDVRYDSKEGSCFYSVDTIEAPWNTGRIEEGGNLGYKIQYKEGYFPVAPNDTAQDIRSEMLLLMGELGIPTEKHHHEVAGAGQHELGMKFDSLINAADNVMTYKYVVRNVAKKYGKTATFMPKPVFNDNGTGMHVHQSLWKSGQPLFFGEGAYANLSQTARWYIGGILKHAPSFLAFTNPTTNSYKRLVPGFEAPVNLVYSEGNRSAAVRIPLTGPSPKAKRLEFRSGDALANPYLAFSVMMLAGIDGIKNQIDPGDGVDVDLL

SEQ ID NO: 194160 - protein, 136 aa, Unknown
  Bacterial polypetide isolated from the Sargasso Sea
MSSSTVLKLMKDKDIEYVDLRFTDPRGKLQHLTMDSTIVDEDMLKDGVFFDGSSIAGWKAINESDMILKPDLNRQIVDPYTSHNTLILFCDIFDAVKKDSYERDPRGIAKKAEAYLKKTGVGDKAYFGPEPEFFVF

SEQ ID NO: 194161 - protein, 129 aa, Unknown
  Bacterial polypetide isolated from the Sargasso Sea
SVRIPAYSQSPKSKRMEFRCPDPTANPYLAFSAMLMAGLDGIKNKIDPGKPTDINLYAASDDVLSKIQSTPGSLAESLEALEKDHAFLLEGDVFTKDVIDTYISYKKENEVDPINIRPHPHEFKLYYDA

SEQ ID NO: 194162 - protein, 167 aa, Unknown
  Bacterial polypetide isolated from the Sargasso Sea
MSKTPQDVLRQIKDDGIEFVDLKFADLHGKWQHLTVCTDMIEEESFTEGLAFDGSSIRGWKAINASDMAMIPDPASAWVDPFYRHKTLSMICSIGEPRSGEPYDRCPRSLAQRALDYLNSTGLADTAFFGPEPEFFLFDDVRYNSSEGGSFYSVDTIEAPWNTGRIE

SEQ ID NO: 194163 - protein, 158 aa, Unknown
  Bacterial polypetide isolated from the Sargasso Sea
MSVNDVLKTIKDKEIEYVDLRFTDPRGKLQHVTMDAKMVDDEMLNEGIFFDGSSIAGWKAINESDMILKPDTAKAIVDPFTSHNTLNLFCDVLDAIKKDPYERDPRGTAKKAEAYLKSSGIGDKAFFGPEAEFFVFDDVRFKNDMNETGFKIDSKEGP

SEQ ID NO: 194164 - protein, 302 aa, Unknown
  Bacterial polypetide isolated from the Sargasso Sea
NGNMVHRPGIKGGYFPVPPVDSAQDMRSEYLKAMKDMGIKVEKHHHEVAPSQHELGMYFGTLVDQADNLQLYKYAVHMVTHSFGKTATFMPKPVKGDNGSGMHCHQSIWKGSTAVFSGDKYAGLSDTALHYIGGILKHARAINAFSNATTNSYKRLIPGFEAPVLLAYSARNRSASCRIPITQSKKAARCEVRFPDAAGNPYLTFSALLMAGLDGIKNKINPGKSLDKDLYALGEEEVKKIPTVCGSLREAMESLDKDRKFLTQGNVFTDDQIDAYIALKYEEIYNFEHTPHPMEFQMYYSC

SEQ ID NO: 194165 - protein, 267 aa, Unknown
  Bacterial polypetide isolated from the Sargasso Sea
VHCYVVEPDTGEAYNRDPRGTAMKAEAYLKSSGIGDTFFVGPEAEFFLFDDVRFSNSMNKVSFEVDALDAAWNTDTDYEIGNTGHRPGVKGGYFPVNPIDDGQDIRSEMLSTMKRLGMSVDKHHHEVASCQHELGLIFSSLTKQGDELQKYKYVIHNVAQAYGKSATFMPKPIAGDNGTGMHCNMSIWKDGKPLFAGDKYADLSDEALWFIGGILKHAKSLNAFTNPSTNSYKRLIPGFEAPVLRAYSARNRSGCVRIPWTESPKAK

SEQ ID NO: 194166 - protein, 272 aa, Unknown
  Bacterial polypetide isolated from the Sargasso Sea
LKGLRDVGVKVEKHHHEVAPSQHELGMYFGTLVDQADNVQLYKYVVHMVTHSFGKTATFMPKPVKGDNGSGMHTHQSIWKGDIPVFSGDKYSGLSDVALHYIGGILKHAKAINAFSNATTNSYKRLIPGFEAPVLLAYSARNRSASCRIPITLSKKGARCEIRFPDASGNPYLTFAAMLMAGLDGVKNKIDPGKSFDKDLYSLSEAEVKNIPTVCGSLREAMEALDKDRDFLKQGNVFTDDQIDAYIALKFEEIHNFEHTPHPIEFDMYYSC

SEQ ID NO: 194167 - protein, 284 aa, Unknown
  Bacterial polypetide isolated from the Sargasso Sea
IIFCNVVEPSTGEMYSRCPRSTAVRATEYLKKTGIADTAYFGPEAEFFVFDDVKWNVSMNDTFYQIDSDEGPYNSGNSFDGGNIGHRPSIKGGYFPVPPVDSMTDMRAEMVGTMMEMGLEMEKHHHEVAPSQNELGGKFDELLSCADGMQKYKYVVHMVAHSYGKTATFMPKPVIDDNGSGMHCHQSLWKGNSPLFAGNEYSGLSENCLFYIGGIIKHAKAINAFTNSTTNSYKRLVPGFEAPTILAYSARNRSASIRIPYAESDKSKRLEVRFPDAASNPYLA

SEQ ID NO: 194168 - protein, 293 aa, Unknown
  Bacterial polypetide isolated from the Sargasso Sea
LDAVTKESYERDPRSTARKAEEFVKSSGIGDTVYIGPEAEFFVFDDVKFQVDMNKSMFEIDSTEGPYNSGKNYESGNLAHRPGVKGGYFPVPPVDSAQDIRTEFLEELKNLGLKMEKHHHEVAPSQHELGLLFDTLLKQGDAMQLYKYGVHMVANAFGKTATFMPKPVKGDNGTGMHTHQSIWKNGEPLFAGDKYAGLSDMALNYIGGIIKHGKALNAFTNASTNSYKRLIPGFEAPVILVYSARNRSASCRIPVSDNPKGKRVEVRFPDPSANPYLAFSAMLMAGLDGIKNK

SEQ ID NO: 194169 - protein, 285 aa, Unknown
  Bacterial polypetide isolated from the Sargasso Sea
MKYNCKTPKELLKKIKNNNVKMIDLRFTDLPGSTHHISIPIKYLTEDLFIDGVGFDGSSVRGFQSIENSDMTMVPDVSTGYIDPFYSEKTIAFYCNVVDPITYKSYSRDPRYIAQKAEKYLKSSGLGDTAYFGPEAEFFVFNDVKYDSGSNFAFHEVDSSEGAWNSGKDENPNLGHKPRHKGGYFPLPPADSLQDVRTEMVLTMEEIGINVEASHHEVATGGQCEIDLEFSPLLSMADDLLRYKYVVKNVAKQHGLTATFMPKPLFEDNGSGMHVHSSVWKKIKH

SEQ ID NO: 194170 - protein, 258 aa, Unknown
  Bacterial polypetide isolated from the Sargasso Sea
MLSTMKRMGMKVDKHHHEVASCQHELGLVFDSLKAQGDNLQKYKYVIQNVAHSYGKSATFMPKPVANDNGTGMHTNMSIWDGNSPVFAGKEYAGLSKNALYYIGGILKHAKALNAFTNPSTNSYKRLIPGFEAPVLLAYSAKNRSASIRIPYVESSKATRVEARFPDPTANPYLSFAALLMAGLDGIKNKIDPGEAATKDLYDLPPEELASIPTVCGSLREALNSLENDHAFLLEGDVFNVDQLEGYMDLKWEEVYAV

SEQ ID NO: 194171 - protein, 305 aa, Unknown
  Bacterial polypetide isolated from the Sargasso Sea
SRSTGKKAEDYLKSSGIGEKCFFGPEAEFFVFDDVKWATNQEYTFFSIDSEEGAYNTGTEMEGGNMGHRPKDKGGYFPVPPVDSATDIRAEMVSTMIEMGLDMEKHHHEVAPSQHELGFKFGSLIESADNLQKYKYCVHMVAQAYGKTATFMPKPVYNDNGSGMHVHQSIWSKSGSLFAGKEYAGLSDTCLHYIGGIIKHAKAINAFSNATTNSYKRLVPGFEAPVLLAYSARNRSASCRIPYAPSANGKRVEVRFGDASGNPYFTFAAMLMAGIDGIKNKIHPGDATDKDLYDLPEEDLKVSQL

SEQ ID NO: 194172 - protein, 266 aa, Unknown
  Bacterial polypetide isolated from the Sargasso Sea
MGVKVEKHHHEVAPSQHELGMYFGTLTNQADNVQLYKYAVQMVTHSFGKTATFMPKPVKGDNGSGMHCHQSIWKGNTPLFMGKEYAGLSKEALYYIGGILKHARAINAFSNATTNSYKRLIPGFEAPVILAYSARNRSASCRIPVIMNPKAARMEIRFPDAAGNPYLTFASMLMAGIDGIKNKIDPGEAFDQDLYSLSEDEVKKLPTVCGSLREAMQNLDKDRKFLTEGGVFTDDQIDAYIELKFQEIYNFEHTPHPIEFEMYYSG

SEQ ID NO: 194173 - protein, 246 aa, Unknown
  Bacterial polypetide isolated from the Sargasso Sea
MYFGTLVIKADNLQLYKYAVHMVTHSFGKTATFMPKPVKGDNGSGMHCHQSIWKGSTAVFSGNKYAGLSDTALHYIGGILKHARAINAFANATTNSYKRLIPGFEAPVLLAYSARNRSASCRIPITQSKKAARCEVRFPDAAGNPYLTFSALLMAGLDGIKNKIDPGKSLDKDLYALSESEVKKIPTVCGSLREAMESLDKDRKFLTQGNVFTDDQIDAYIALKYEEIYNFEHTPHPMEFQMYYSC

SEQ ID NO: 194174 - protein, 262 aa, Unknown
  Bacterial polypetide isolated from the Sargasso Sea
MSANNVLKTIKDKQIEYVDLRFTDPRGKLQHLTMDATIVDQGMLNDGVFFDGSSIAGWKAINESDMILKPDLARKIVDPYTSHNTLILFCDILDAIKKDPYERDPRGIAKKAEKYLKSTGIGDKAYFGPEPEFFVFDDVRIKNDMNETGFVIDSTEGPYNSGRKYENGNMGHRPGIKGGYFPVPPVDSAQDMRSEYLKGLRDVGITVEKHHHEVAPSQHELGMLFGTLVDQADNVQLYKYIVHMVSHSFGKTATFMPKPLKE

SEQ ID NO: 194175 - protein, 229 aa, Unknown
  Bacterial polypetide isolated from the Sargasso Sea
MSKSPQDVLSQIKDEGIELIDLKFTDIHGKWQHLTLTSDMIEEDSFTEGLAFDGSSIRGWKAINASDMSMVPDASTAWIDPFYKHKTLSMICSIQEPRSGEPYDRCPRALAQKALKYLDSTGIADTAFFGPEPEFFLFDDVRYDSKEGGCFYSVDTIEAPWNTGRIEEGGNLGYKIQYKEGYFPVAPNDTAQDIRSEMLLLMGELGIPTEKHHHEVASAGQHELGMKFD

SEQ ID NO: 194176 - protein, 156 aa, Unknown
  Bacterial polypetide isolated from the Sargasso Sea
MSANDVLKFIKDKEAEFVDLRFTDPRGKLQHLTMDSTAVDDGMLNEGVFFDGSSIAGWKAINESDMILKPDLSRYFLDPFTSHNTVVLFCDILDAIKKTPYERDPRGVAKKAEEYLKASGIGDKAFFGPEPEFFVFDDVRIKNDMDECGFKIDSKE

SEQ ID NO: 194177 - protein, 282 aa, Unknown
  Bacterial polypetide isolated from the Sargasso Sea
RCDILEPSTMKGYERDPRSISKRAEDYLKSTGIADEAYFGPEPEFFIFDEVRWGDALHSGFYEVDSEEGCWNSDRLDEDKNIGHRPGVKGGYFPVPPVDSCQDIRSAMCTVLEEMGLTVEVHHHEVATAGQAEIGTSCKTLTRKADELLILKYVVQNVAHSFGKTATFMPKPLVGDNGSGMHVHQSLVKAGKNLFAGDKYGNLSDTALHYIAGVFKHARAINAFSNSSTNSYKRLVPGFEAPTLLAYSARNRSASCRIPWVSSDKARRIEVRFPDSCGNPYF

SEQ ID NO: 194178 - protein, 246 aa, Unknown
  Bacterial polypetide isolated from the Sargasso Sea
MYFGTLTNQADNVQLYKYAVQMVTHSFGKTATFMPKPVKGDNGSGMHCHQSIWKGNTPLFMGKEYAGLSKQALYYIGGILKHARAINAFSNATTNSYKRLIPGFEAPVILAYSARNRSASCRIPVIMNPKAARMEIRFPDAAGNPYLTFASMLMAGIDGIKNKIDPGKAFDQDLYSLSEDDVKKLPTVCGSLREAMQNLDKDRKFLTQGGVFTDDQIDAYIELKFQEIYNFEHTPHPIEFEMYYSG

SEQ ID NO: 194179 - protein, 265 aa, Unknown
  Bacterial polypetide isolated from the Sargasso Sea
DPKGKLQHLTMDSTVVDEDLLDKGVFFDGSSIAGWKVINESDMVLKPDLARPIIDPFNSHTTLNIFCDVLDAVKKDPYERDPRGTAKKAEDYLKKSGIGDKAFFGPEPEFFVFDDVRFKNDMNETSFSIDSSEGPYNTGKKYENGNMGHRPGVKGGYFPVPPVDSAQDMRGEYLKALKDMGVKVEKHHHEVAPSQHELGMYFGTLTDMADNVQLYKYAVQMVTHSFGKTATFMPKPVKGDNGSGMHCHQSIGKGTHQFLWVKNTQ

SEQ ID NO: 194180 - protein, 295 aa, Unknown
  Bacterial polypetide isolated from the Sargasso Sea
NIAKKAEAYLKSSGIGDTAFFGPEAEFFVFNNVQFDSGSNFAFHEVDSVEGTWNSGADENPNLGHKPRHKEGYFPLPPVDTLQDVRTEMVMTMQDIGLTVEAHHHEVATGGQCEIDLEFSPLLKMADDMMKYKYVVKNVARQHGMTATFMPKPLFEDNGSGMHVHQSVWKDGDTLMYKEGNYANLSDLALNYIGGILKHAPALLAFCAPTTNSYKRLVPGFEAPVNIVYSQRNRTASVRIPAYSQSPKSKRMEFRCPDPSANPYLAFSAMLMAGLDGIKNKINPGDPTRYKSLRC

SEQ ID NO: 194181 - protein, 111 aa, Unknown
  Bacterial polypetide isolated from the Sargasso Sea
MSVESVLKQLEELEVKFVDLRFTDTKGKEQHVSIPAHQVDADFFEDGKMFDGSSIAGWKGINESDMVLMPDPTTFVLDPFTEETTALIRCDILEPGTMTGYDRDPRSIAKK

SEQ ID NO: 194182 - protein, 165 aa, Unknown
  Bacterial polypetide isolated from the Sargasso Sea
MSSSKVLKLMKDKDIEYVDLRFTDPRGKLQHLTMDATIVDEGMLNDGVFFDGSSIAGWKAINESDMILKPDLNRQIVDPYTSHNTLILFCDILDAVKKDSYERDPRGIAKKAETYLKKTGVGDKAYFGPEPEFFVFDDVRIKNDMNETSFAIDSAEGPYNSGKKY

SEQ ID NO: 194183 - protein, 278 aa, Unknown
  Bacterial polypetide isolated from the Sargasso Sea
NGNDNARHLVLLVEAHHHEVATGGQCEIDLEFSPLLKMADDMMKYKYVVKNVARQHGMTATFMPKPLFEDNGSGMHVHQSVWKDGDTLMYKEGNYANLSDLALNYIGGILKHAPALLAFCAPTTNSYKRLVPGFEAPVNIVYSQRNRTASVRIPAYSQSPKAKRMEFRCPDPSANPYLAFSAMLMAGLDGIKNKINPGDPTDINLYAASDEVLSKIQSTPGSLAESLEALEKDHAFLLEGDVFTKDVIETYISYKKESEVDPINIRPHPHEFKLYYDV

SEQ ID NO: 194184 - protein, 265 aa, Unknown
  Bacterial polypetide isolated from the Sargasso Sea
GVKVEKHHHEVAPSQHELGMYFGTLTDMADNVQLYKYAVQMVTNSFGKSATFMPKPVKGDNGSGMHCHQSIWKGNSPLFMGKEYAGLSQTALYYIGGILKHAKAINAFSNATTNSYKRLIPGFEAPVILAYSARNRSASCRIPITMNPKAARMEIRFPDAAGNPYLTFASMLMAGIDGIKNKINPGKAFDKDLYTLGEDEVKKLPTVCGSLREAMESLDKDRKFLTEGGVFTDDQIDAYIDLKFQEIYKFEHTPHPIEFEMYYSQ

SEQ ID NO: 194185 - protein, 151 aa, Unknown
  Bacterial polypetide isolated from the Sargasso Sea
MSASKVLKQIKDKEVEYIDLRFTDPRGKLQHLTMDSTIVDDDMLNDGVFFDGSSIAGWKAINESDMILKPDLSRTVMDPFTSHNTLIVFCDILDAIKKTPYERDPRGIAKKAEAYLKKSGVGDRAYFGPEPEFFVFDDVRIKNDMNETSFS

SEQ ID NO: 194186 - protein, 213 aa, Unknown
  Bacterial polypetide isolated from the Sargasso Sea
MPKPIAGDNGSGMHVHQSIWKDGKSAFAGSGYADLSDTCLYYIGGIIKHARALNAFTNASTNSYKRLVPGFEAPVLLAYSARNRSASCRIPYATSPNAKRVEVRFPDPTANPYLAFSAMLMAGLDGIENKIHPGDPMDKDLYDLPAEELEGVPTVCSSLGQALEALDADRDFLKKGDVFTDDQIDGYIELKQEELTAFLQAPHPIEFEMYYSV

SEQ ID NO: 194187 - protein, 305 aa, Unknown
  Bacterial polypetide isolated from the Sargasso Sea
DPFTTVPTLAVICMVQDPITREDYSRDPRFIARKAAIYLEGTGIADTCFIGPEAEFFVFDTAQFDQTAHEGFYSIDSAEAEWNRGSGSHGHQVRHRQGYSPVPPSDQMMDIRTEMMLTMIQCGIDVEAQHHEVASAGQCEIDMRYQSLVRMADHLCLYKYIVRNVARRHGRTATFMPKPIYGDSGSGMHVNLSLWKEGKPLFGGSGYAGLSDMALHALGGILKHARALLALTNPTTNSYKRLVPGYEAPINLAYSQRNRSAACRIPMYSTNPKTKRIEFRCPDPTCNPYLAFSGGSYGSQLMEFK

SEQ ID NO: 194188 - protein, 295 aa, Unknown
  Bacterial polypetide isolated from the Sargasso Sea
VFNNVQFDSGSNFAFHEVDSVEGTWNSGAEENPNLGHKPRHKEGYFPLPPVDTLQDVRTEMVMTMQDIGLTVEAHHHEVATGGQCEIDLEFSPLLKMADDMMKYKYVVKNVARQHGMTATFMPKPLFEDNGSGMHVHQSVWKDGDTLMYKEGNYANLSDLALNYIGGILKHAPALLAFCAPTTNSYKRLVPGFEAPVNIVYSQRNRTASVRIPAYSQSPKAKRMEFRCPDPSANPYLAFSAMLMAGLDGIKNKINPGDPTDINLYAASDEVLSKIQSTPGSLAESLEALEKDHAF

SEQ ID NO: 194189 - protein, 199 aa, Unknown
  Bacterial polypetide isolated from the Sargasso Sea
MSSNDVLKLMKDKEIEYVDLRFTDPRGKLQHLTMDATVVNNDMLNDGVFFDGSSIAGWKAINESDMILKPDLSRKVIDPYTTHNTLILFCDILDAVKKDTYERDPRGIAKKAEAYLKKTGIGDKAYFGPEPEFFVFDDVRIKNDMNETGFSIDSTEGPYNSGRKYENGNMGHRPGIKGGYFPVPPVDSAQDMRSEYLKG

SEQ ID NO: 194190 - protein, 209 aa, Unknown
  Bacterial polypetide isolated from the Sargasso Sea
MSIKDVNKLMKDKEVEFVDLRFTDPKGKLQHLTMDATVVDEDMLNEGVFFDGSSIAGWKAINESDMILKPDLSRPIIDPFNSHVTLNIFCDVLDAIKKNPYERDPRGTAKKAEEYLKKSGIGDKAYFGPEPEFFVFDDVRFKNDMNETSFNIDSSEGPYNTGKKYENGNLGHRPGVKGGYFPVPPVDSSQDMRSEYLKALKDMGVKVEK

SEQ ID NO: 194191 - protein, 317 aa, Unknown
  Bacterial polypetide isolated from the Sargasso Sea
GINESDMILKPDTARMFMDPFTSHNTVVLFCDILDAIKKDPYERDPRGVAKKAEEYLKASGIGDKAFFGPEPEFFVFDDVRIKNDMNECGFKLDSKEGPYNSGKEYESGNMGHRPQIKGGYFPVPPVDSEQDMRGEYLKNLKEVGIKVEKHHHEVAPSQHELGMYFGTLVNQADNVQLYKYVVQMVTHSFGKTATFMPKPVAGDNGSGMHIHQSIWKGDTPVFSGDAYAGLSETALHYIGGILKHAKAINAFANSTTNSYKRLIPGFEAPVLLAYSARNRSASCRIPITLSKKGARCEIRFPDAAGILIYICSYVDG

SEQ ID NO: 194192 - protein, 254 aa, Unknown
  Bacterial polypetide isolated from the Sargasso Sea
PHPTNTRALARAAEEKYGDQDPWFGLEQEYTMIDTESGWPAGFPANGFPAPQGPYYCGVGAEKIYGRPAVEEHTTLCIEAGLKISGTNAEVMPGQWEFQIGPAGTVEVGDHLWVARYLLYRVGEAHNVKISIEAKPMKGDWNGAGMHTNFSTKAMREGYEAITAACESLGAPGVPEKHLEGYGVGIEDRLTGDHETQRYDQFSYGVSDRGASVRVPWQVAQDQKGYIEDRRPNANADPYVVAALMTETVGAALA

SEQ ID NO: 194193 - protein, 285 aa, Unknown
  Bacterial polypetide isolated from the Sargasso Sea
MTLMPDLYRAYVDPFFAQPTLALFCDVLEPNTGEAYSRDPRGTAKAALAHMEAAGIGDTAFFGPEAEFFLFEDVKIDVSMNRAMYEVDSVEGPYNGARDYEEGNMGHRPGVKGGYFPVPPLDSGQDIRSEMVSVMAAMGINVEKHHHEVAPSQHELGIKFGTLIETADNLQLYKYTVHQVAHAYGLSATFLPKPISGDNGSGMHVHQSIWNDGKPLFAGNGYADLSESALFYIGGIIKHAKSLNAFTNASTNSYKRLIPGYEAPVLLAYSSRNRSASCRIPHVNS

SEQ ID NO: 194194 - protein, 250 aa, Unknown
  Bacterial polypetide isolated from the Sargasso Sea
FTDPRGKLQHLTMDATTVDEEILNEGVFFDGSSIAGWKAINESDMILKPDLKRKIIDPYTSHNTLILFCDILDAVNKNSYERDPRGIAKKAEAYLKSTSIGDKAYFGPEPEFFVFDDVRYKNEMNETSFAIDSSEGPYNTGRKYENGNMGHRPGVKGGYFPVPPVDSAQDIRGEFLKGLRDVGITVEKHHHEVAPSQHELGILYSTLVNQADNIQLYKYIVHMVSNSFGKTATFMPKPVKGDNGSGMHTH

SEQ ID NO: 194195 - protein, 196 aa, Unknown
  Bacterial polypetide isolated from the Sargasso Sea
MSSSEVLKLIKDKEIESVDLRFTDPRGKLQHLTMDATAVDEGMLTDGVFFDGSSIAGWKAINESDMILKPDLSRKIIDPFTSHNTLILFCDILDAVKKDSYERDPRGIAKKAEAYLKSTGIGDKAYFGPEPEFFVFDDVRYKNDMNETSFVIDSAEGPYNTGKKFENGNMGHRPGVKGGYFPVPPVDSAQDLRGEF

SEQ ID NO: 194196 - protein, 299 aa, Unknown
  Bacterial polypetide isolated from the Sargasso Sea
MSAANVLKYIKEKDAEFVDLRFTDPRGKLQHLTMDSTVVDEDMLNEGVFFDGSSIAGWKAINESDMILKPDTSRMFMDPFTSHNTVVLFCDILDAIKKTPYERDPRGIAKKAEEYLKASGIGDKAFFGPEPEFFVFDDVRIKNDMNECGFVLDSKEGPYNSGKEYESGNMGHRPGVKGGYFPVPPVDSEQDMRSEYLKNLKDVGIKVEKHHHEVAPSQHELGMYFGTLVDQADNVQLYKYVVQMVTHSFGKTATFMPKPVAGDNGSGMHTHQSIWKGDTPVFSGDAYAGLSETALHYIG

SEQ ID NO: 194197 - protein, 301 aa, Unknown
  Bacterial polypetide isolated from the Sargasso Sea
VVLFCDILDAIKKDPYERDPRGVAKKAEEYLKASGIGDKAFFGPEPEFFVFDDVRIKNDMNECGFKLDSKEGPYNSGKEYENGNMGHRPQIKGGYFPVPPVDSEQDMRGEYLKNLKEVGIKVEKHHHEVAPSQHELGMYFGTLVNQADNVQLYKYVVQMVTHSFGKTATFMPKPVAGDNGSGMHIHQSIWKGDTPVFSGDAYSGLSETALHYIGGILKHAKAINAFANSTTNSYKRLIPGFEAPVLLAYSARNRSASCRIPITLSKKGARCEIRFPDAAGNPYLTFAAMLMAGIDGIKNKI

SEQ ID NO: 194198 - protein, 262 aa, Unknown
  Bacterial polypetide isolated from the Sargasso Sea
MKNITNEVAPSQHELGMYFGTLVNQADNVQLYKYVVQMVTHSFGKTATFMPKPVAGDNGSGMHIHQSIWKGDTPVFSGDAYSGLSETALHYIGGILKHAKAINAFANSTTNSYKRLIPGFEAPVLLAYSARNRSASCRIPITLSKKGARCEIRFPDAAGNPYLTFAAMLMAGIDGIKNKIHPGESFDKDLYELPPEEVKAIPTVCGSLREAMESLDKDREFLTQGGVFTDDQIDAYIALKFEEIHKFEHAPHPIEFEMYYSS

SEQ ID NO: 194199 - protein, 235 aa, Unknown
  Bacterial polypetide isolated from the Sargasso Sea
MSAGKVIKLIKDKEIEYVDLRFTDPRGKLQHLTMDGKMVDEEMLNDGVFFDGSSIAGWKAINESDMILKPDLQRQVIDPFTSHNTLILFCDVLDAVKKDPYERDPRSIAKKAEAYLKKTGIGDKAYFGPEAEFFVFDDVRYSNDMHHTGFQIDSSEGPYNTGKKYENGNMGHRPGIKGGYFPVPPVDSAQDMRGEFLKALKDMGIKVEKHHHEVAPSQHELGMYFGTLTDQADNM

SEQ ID NO: 194200 - protein, 281 aa, Unknown
  Bacterial polypetide isolated from the Sargasso Sea
KGGYFPVPPVDSEQDMRSEYLKNLKEVGIKVEKHHHEVAPSQHELGMYFGTLVNQADNVQLYKYVVQMVTHSFGKTATFMPKPVAGDNGSGMHIHQSIWKGDTPVFSGEAYAGLSETALHYIGGILKHAKAINAFANSTTNSYKRLIPGFEAPVLLAYSARNRSASCRIPITLSKKGARCEIRFPDAAGNPYLTFAAMLMAGIDGIKNKIHPGESFDKDLYELPPEEVKAIPTVCGSLREAMESLDKDREFLTQGGVFTDDQIDAYIALKFEEIHKFEHAP

SEQ ID NO: 194201 - protein, 204 aa, Unknown
  Bacterial polypetide isolated from the Sargasso Sea
MSANDIKKMVDEKEAKFIDYRFTNTLGKEQHVTVTASDDGIATDCEEGKMFDGSSIAGWKDINESDMILMPDTSTAFADPFFDEPTINVTCDVIEPADGSSYEKDPRGIAKRAEKFLTDSGIADTAYFGPENEFFVFDDVRFEDKLGSCFFKVDSTEACWNSGKDYEDGNMGHRPLVKGGYFPVPPVDALQDCRSAMITTLHEV

SEQ ID NO: 194202 - protein, 248 aa, Unknown
  Bacterial polypetide isolated from the Sargasso Sea
PVDSAHDIRAAMCMVMEEMGLVIEAHHHEVATAGQNEIACEFNTLVKKADEIQVYKYVVHNVAHAYGQTATFMPKPLVGDNGSGMHCHQSISKDGVNIFAGDKYAGLSEEALYYIGGIIKHARAINAFANASTNSYKRLVPGFEAPVMLAYSARNRSASIRIPHVTSDKARRIEVRFPDPTANPYLAFSAMLMAGLDGIKNKIHPGDSMDKDLYDLPPEEAAEIPTVASSLEMALEALDNDRDFLKAG

SEQ ID NO: 194203 - protein, 210 aa, Unknown
  Bacterial polypetide isolated from the Sargasso Sea
MSANDIKKLVDEKEAKFIDYRFTNTQGKEQHVTVTASEEGIETDCSEGKMFDGSSIAGWKDINESDMILMPDTATAFVDPFYDEPTVNVTCDVIEPSDGSIYEKDPRGIAKKAEKYLIDSGVADTAYFGPENEFFVFDDVKFEDTIGSCFFKVDSSEAIWNSGKTYEDGNMGHRPGVKGGYFPVPPVDALQDCRSAMITTLHEVGVQCEV

SEQ ID NO: 194204 - protein, 295 aa, Unknown
  Bacterial polypetide isolated from the Sargasso Sea
MSDAQKIMGMIKEHDIIYVDLRFTDPRGKMQHVTQHIDTIDEETLAEGFMFDGSSIAGWKAINESDMTLMPDLYRAYVDPFFAQPTLALFCDVLEPSTKEAYSRDPRGTAKAALAHMESLGIGDTAYFGPEAEFFIFEDVKIDVSMNRAMYAVDSVEGPYNSARKYEEGNLGHRPGVKGGYFPVPPVDSGQDIRSEMLSVMSDMGVPVEKHHHEVAPSQHELGMKFGTLIETADNLQLYKYSVQQVAHAYGVSATFMPKPIAGDNGSGMHVHQSIWSKGKPLFAGNQYADLSEDA

SEQ ID NO: 194205 - protein, 263 aa, Unknown
  Bacterial polypetide isolated from the Sargasso Sea
DVPGTTHHFTIPIKFLEEDIFEDGLGFDGSSVRGFQAIENSDMIVVPDVTTAYIDPFFSEKTIAFYCDIKDPITKENYSRDPRNIAKKAEGYLKSSGMGDTAYFGPEAEFFIFNDVKYDSGSNFAFHEVDSNEGTWNTGKDEGPNLGHKPRHKEGYFPLPPVDSMHDVRTEMVMTMQDIGLTVEAHHHEVATGGQQEIDLEFAPLVSMADDLMKYKYVVKNVAKLHGLSATFMPKPLFGDNGSGMHVHQSIWKDGDTLMYKKR

SEQ ID NO: 194206 - protein, 271 aa, Unknown
  Bacterial polypetide isolated from the Sargasso Sea
MRFTDIPGTTQHFTIPIKFLDEDIFSDGLGFDGSSVRGFQEIQDSDMIVLPDAATAYIDPFFSEKTLALHCNIKDPVTLVDYSRDPRNIAKKAEAYLKSSGIGDTAFFGPEAEFFVFNNVQFDSGSNFAFHEVDSTEGTWNSGTDENPNLGHKPRHKEGYFPLPPVDTLQDVRTEMVMTMQDIGLTVEAHHHEVATGGQCEIDLEFSPLLKMADDMMKYKYVVKNVAKQHGMTATFMPKPLFEDNGSGMHVHQSVWKDGDTLMYKEGNYAN

SEQ ID NO: 194207 - protein, 297 aa, Unknown
  Bacterial polypetide isolated from the Sargasso Sea
KKAEAYLKKTGIGDTAYFGPEPEFFVFDDVRIKNDMNETSFSIDSSEGPYNSGKSYDNGNMGHRPGVKGGYFPVPPVDSAQDMRGEYLKGLRDVGITVEKHHHEVAPSQHELGMLFGTLVNQADNVQLYKYVVQMVSHSFGKTATFMPKPVKGDNGSGMHTHQSIWKGKTPVFSGNKYAGLSQTALYYIGGVLKHAKAINAFANATTNSYKRLIPGFEAPVLLAYSARNRSASCRIPITLSKKGARCEIRFPDASGNPYLTFASMLMAGIDGIKNKIDPGKSFDKDLYALSEKQVKK

SEQ ID NO: 194208 - protein, 177 aa, Unknown
  Bacterial polypetide isolated from the Sargasso Sea
MSANDVLKFIKDKEAEFVDLRFTDPRGKLQHLTMDSTVVDENMLNDGVFFDGSSIAGWKAINESDMILKPDTSRFFLDPFTSHNTAVLFCDILDAVKKTPYERDPRGVAKKAEEYLKSSGVGDKAFFGPEPEFFVFDDVKIKNDMNECGFAIDSKEGPYNSGKEYDNGNMGHRPPIK

SEQ ID NO: 194209 - protein, 283 aa, Unknown
  Bacterial polypetide isolated from the Sargasso Sea
LNDGVFFDGSSIAGWKAINQSDMLLKPDLTRPIIDPFNSHTTLNIFCDILDAVKKDPYERDPRGTAKKAEAYLKKSGIGDKSYFGPEPEFFVFDDVRFKNDMNETSFSIDSSEGPYNTGKKYENGNMGHRPGIKGGYFPVPPVDSAQDMRGEYLKALRDMGVKVEKHHHEVAPSQHELGMYFGTLTNMADNLQLYKYAVQMVTHSFGKTATFMPKPVKGDNGSGMHCHQSIWKGNTPVFMGNEYSGLSKTALYYIGGILKHAKAINAFSNATTNSYKRLIPGF

SEQ ID NO: 194210 - protein, 138 aa, Unknown
  Bacterial polypetide isolated from the Sargasso Sea
MSSSEVIKLIKDKEIESVDLRFTDPRGKLQHLTMDATCVDDGMLNDGVFFDGSSIAGWKAINESDMILKPDLSRKIIDPFTSHNTLILFCDILDAVKKTPYERDPRGIAKKAEAYLKSTGIGDKAYFGPEPEFFVFDD

SEQ ID NO: 194211 - protein, 276 aa, Unknown
  Bacterial polypetide isolated from the Sargasso Sea
MGDKAYFGPEAEFFVFDDVRFKNDMNETGFKIDSSEGPYNSGKKYENGNMGHRPGIKGGYFPVPPVDSAQDMRGEFLKALKDMGIKVEKHHHEVAPSQHELGMYFGTLTDQADNMQLYKYGVQMVAHSFGKTATFMPKPVKGDNGSGMHTHQSLWKGSTALFSGNKYAGLSDTALHYIGGILKHAKAINAFSNSTTNSYKRLIPGFEAPVLLCYSARNRSASCRIPITLSKKEARCEIRFPDAAGNPYLTFSAMLMAGLDGIKNKINPGKPIDEDL

SEQ ID NO: 194212 - protein, 206 aa, Unknown
  Bacterial polypetide isolated from the Sargasso Sea
DNGSGMHIHQSIWKGDTPVFSGDAYSGLSETALHYIGGILKHAKAINAFANSTTNSYKRLIPGFEAPVLLAYSARNRSASCRIPITLSKKGARCEIRFPDAAGNPYLTFAAMLMAGIDGIKNKIHPGESFDKDLYELPPEEVKAIPTVCGSLREAMESLDKDREFLTQGGVFTDDQIDAYIALKFEEIHKFEHAPHPVEFEMYYSS

SEQ ID NO: 194213 - protein, 272 aa, Unknown
  Bacterial polypetide isolated from the Sargasso Sea
MSKVKAEYIWIDGYEPTANLRSKTKIVDGPVEGLDQLPDWGFDGSSTLQADGNDSDCALKPVYFVPDPIRGGDDILVMCEVLNADGTTHKSNNRANCVEVSEKYESEIPWFGIEQEYTFYDGSEPLGFPSEGYPAPQGEYYCGVGANNIFGRDIVEEHLQLCLDAGLEVSGINAEVMPGQWEFQIGPLGSPEVADQLHLARWLLHRISEDYNVTVSLEPKPVKGDWNGAGAHTNFSTKTMREDGGYDTIVEACEKLGKNIDKHINVYGSKND

SEQ ID NO: 194214 - protein, 184 aa, Unknown
  Bacterial polypetide isolated from the Sargasso Sea
MSAKNVLKLMKDKEIEYVDLRFTDPRGKLQHLTMDSTIVDEDMLIDGVFFDGSSIAGWKAINESDMILKPDLNRKIVDPFTTHNTLVLFCDILDAVKKNPYERDPRGIAKKAEAYLKSTGIGDRAYFGPEPEFFVFDDVRIKNDMNETGFAIDSTEGPYNSGRKYENGNMGHRPGIKGGYFPVP

SEQ ID NO: 194215 - protein, 245 aa, Unknown
  Bacterial polypetide isolated from the Sargasso Sea
MSSSDVLKTLKDKDIEYVDLRFTDPRGKLQHVTMDAKMVDDEMLNEGIFFDGSSIAGWKAINESDMILKPDTSRAIVDPFTSHNTLNLFCDVLDAIKKDPYERDPRGTAKKAEAYLKDSGIGDKAYFGPEAEFFVFDDVRFKNDMNETGFKIDSKEGPYNSGREYENGNMGHRPGIKGGYFPVPPVDSEQDMRSEYLKAMKEMGIKVEKHHHEVAPSQHELGMYFGTLVDQADNLQLYKYAVHMV

SEQ ID NO: 194216 - protein, 184 aa, Unknown
  Bacterial polypetide isolated from the Sargasso Sea
MSSKNILKLMKDKQVEFVDLRFTDPRGKLQHLTMDATVVDEDLLNNGVFFDGSSIAGWKAINESDMILKPDLERPIIDPFNSHTTLNIFCDILDAVKKDPYERDPRGTAKKAEAYLKKSGIGDKSYFGPEPEFFVFDDVRFKNDMNETSFSIDSSEGPYNTGRKYENGNMGHRPGIKGGYFPVP

SEQ ID NO: 194217 - protein, 236 aa, Unknown
  Bacterial polypetide isolated from the Sargasso Sea
IAQKAEKFLKSSGLGDTAYFGPEAEFFVFNDIKYDSGSNFAFHEVDSNEGAWNTGRSEDPNLGHKPRHKQGYFPLPPSDSLQDLRTEMVLTMEDIGVNVEASHHEVATGGQCEIDLEFSPLLAMADDLLKYKYVVKNVAKQHGMTATFMPKPLFEDNGSGMHVHSSIWKKNKTLMYKKGNYADLSDFALHYIGGILKHAPSLLAFCAPTTNSYKRLVPGFEAPVNIAYSQANRNSI

SEQ ID NO: 194218 - protein, 239 aa, Unknown
  Bacterial polypetide isolated from the Sargasso Sea
FFVFDDVRIKNDMNECGFKIDSKEGPYNSGKEYDNGNMGHRPPIKGGYFPVPPVDSEQDMRGEYLKNLKEVGIKVEKHHHEVAPSQHELGMYFGTLVNQADNVQLYKYVVQMVTHSFGKTATFMPKPVAGDNGSGMHIHQSIWKGDTPVFSGEAYAGLSETALHYIGGILKHAKAINAFANSTTNSYKRLIPGFEAPVLLAYSARNRSASCRIPITLSKKGARCEIRFPDAAGNPYLTF

SEQ ID NO: 194219 - protein, 242 aa, Unknown
  Bacterial polypetide isolated from the Sargasso Sea
MSKTSQDVLRQIKDEGIELIDLKFTDLHGKWQHLTVASDLIEESSFTEGLAFDGSSIRGWKAINESDMAMVPDPSTSWIDPFYHHKTLSLICSIQEPRSGEPYARCPRALAQKALDYLGSTSVADAAFFGPEPEFFIFDDVRYNSGEGSSFYSVDTIEAPWNSGRVEEGGNLGYKIQLKEGYFPVSPNDTAQDMRSEMLLLMGELGIPIEKHHHEVAGAGQHELGMKFAPLINAADNVMIYK

SEQ ID NO: 194220 - protein, 287 aa, Unknown
  Bacterial polypetide isolated from the Sargasso Sea
LKKTGIGDKAYFGPEAEFFVFDDVKFKNDMNETGFKIDSSEGPYNTGKDYENGNMGHRPGIKGGYFPVPPVDSAQDMRGEFLKALRDMGIKTEKHHHEVAPSQHELGMYFDTLTTQADNMQLYKYGVQMVAHSFGKTATFMPKPVKGDNGSGMHTHQSLWKGSTALFSGNKYAGLSDMALHYIGGILKHAKAINAFSNSTTNSYKRLIPGFEAPVLLVYSARNRSASCRIPITLSKKAARCEIRFPDAAGNPYLTFAAMLMAGIDGIKNKINPGKPVDQDLYAMPED

SEQ ID NO: 194221 - protein, 162 aa, Unknown
  Bacterial polypetide isolated from the Sargasso Sea
MSTSSVRKVMKDKEIEYVDLRFTDPRGKLQHVTMDVTVVDDDMLENGVFFDGSSIAGWKAINESDMILKPDLSRTVVDPFTSHNTLNIFCDILDAVKKDPYERDPRGTAKKAEAYLKKTGVGDKAYFGPEPEFFVFDDVRYSNDMNKTGFEIDSSEGPYNTG

SEQ ID NO: 194222 - protein, 312 aa, Unknown
  Bacterial polypetide isolated from the Sargasso Sea
MTKIQEYVAKKAEEFVKSSGIGDSIFFGAEAEFFLFNDVRISTDPSNSFFSVDSGEAIWNKGSDERPNLGYHVRNKGGYFPCPPHDTMQDVRSEMVNHMVSIGMNVEAQHHEVATAGQQEIDLRFDTLLSHADDLQKYKYVVRNTAKSNGLSATFMPKPLSNDNGSGMHCHQSIWSNGKPIFYADSGYANLSDEAKFYIGGLLKHAPSLLAFTNPTINSFKRLVPGYEAPVKLAYSNRNRSAICRIPAYSPSPKAKRVEFRCPDATANPYLAFSAMVMAGLDGIKNRIDPGEPMDKNLYDLPAEEQAKVKEV

SEQ ID NO: 194223 - protein, 307 aa, Unknown
  Bacterial polypetide isolated from the Sargasso Sea
FYKHKTLSMICSIKEPRSGEPYDRCPRSLAQKALKYLESTGIADTAFFGPEPEFFLFDDVRYDSKEGSCFYSVDTIEAPWNTGRIEEGGNLGYKIQYKEGYFPVSPNDTAQDIRSEMLLLMGELGIPTEKHHHEVAGAGQHELGMKFDSLIKSADNVMTYKYVVRNVAKKYGKTATFMPKPVFNDNGTGMHVHQSLWKSGQPLFFGEGAYANLSQTARWYIGGILKHAPSFLAFTNPTTNSYKRLVPGFEAPVNLVYSEGNRSAAVRIPLTGPSPKAKRLEFRSGDALANPYLAFSVMMLAGIDGIK

SEQ ID NO: 194224 - protein, 222 aa, Unknown
  Bacterial polypetide isolated from the Sargasso Sea
MKGIQASDMAMVPDANTAWVDPFYRHKTLSMICSIQEPRTGQPYERCPRALAQRALNHLASTGLADMAFFGPEPEFFLFDDVRYNSAEGGSFYSVDTIEAGWNTGRIEEGGNLAYKIQEKEGYFPVAPNDTAQDIRSEMLLLMGQLGIPTEKHHHEVAGAGQHELGMKFAELIQAADNVMTYKYVVRNVAKKYGKTATFMPKPVFNDNGSGMHVHQSLWKGG

SEQ ID NO: 194225 - protein, 293 aa, Unknown
  Bacterial polypetide isolated from the Sargasso Sea
NSINKVGYEVDAVDASWNSDSEYDMGNMGHRPGIKGGYFPVNPTDAGQDIRSEMLSTMKRIGMKVDKHHHEVASCQHELGMIFDTLTKQADELQKYKYIVQNVAHAYGKSATFMPKPIAGDNGTGMHVNMSISKLGKPIFSGDKYADLSDEALFFIGGILKHAQSLNAITNPSTNSYKRLIPGFEAPVLRAYSARNRSGCVRIPWAESPKAKRVEARFPDPSSNPYLCFSALLMAGLDGIKSKIHPGESSDKDLYDLPPEELSSIPTVCGSLREAIKALEEDNQYLLAGDVLL

SEQ ID NO: 194226 - protein, 235 aa, Unknown
  Bacterial polypetide isolated from the Sargasso Sea
YERDPRGIAKKAEAYLKTSGVGDKAYFGPEPEFFVFDDVKYKNDMNETSFKIDSSEGPYNTGKDYPNGNMGHRPGIKGGYFPVPPVDSAQDIRSEYLKGLRDVGITVEKHHHEVAPSQHELGMLFGTLVNQADNVQLYKYVVHMVSHSFGKSATFMPKPVKGDNGSGMHVHQSIWKGDTPTFSGDKYSGLSETALHYIGGILKHAKAINAFANATTNSYKRLIPGFEAPVLLAYS

SEQ ID NO: 194227 - protein, 310 aa, Unknown
  Bacterial polypetide isolated from the Sargasso Sea
EPEFFVFDDVRYKNDMNETGFTIDSTEGPYNTGKKYENGNMGHRPGIKGGYFPVPPVDSAQDMRSEYLKAMKDMGIKVEKHHHEVAPSQHELGMYFGTLVDQADNLQLYKYAVHMVTHSFGKTATFMPKPVKGDNGSGMHVHQSIWKGNTALFSGNKYAGLSDTALHYIGGILKHARAINAFSNATTNSYKRLIPGFEAPVLLAYSARNRSASCRIPITLSKKAARCEIRFPDASGNPYLTFSAMLMAGLDGIKNKIDPGKSFDKDLYALSESEVKKIPTVCGSLREAMESLDKDRDFLTQGDVFTDDQI

SEQ ID NO: 194228 - protein, 231 aa, Unknown
  Bacterial polypetide isolated from the Sargasso Sea
PLFGIEQEYTFFMDGRPLGWPVEGFPAPQGPYYCGVGSIEIAGRDIVEAHTKACMDAGLAISGTNAEVMLGQWEFQIGPVDTVEVADQIWMARYLLYRVAEDFGVDASVAAKPIKGDWNGAGAHTNFSTKAMRKSYEAIITACESLGAEGKPAEHIAGYGLGSEERLTGEHETQRFDQFSYGVSDRGASIRIPWQVHLDQKGYIEDRRPNANMDPYVVTRLITNTCCSALA

SEQ ID NO: 194229 - protein, 287 aa, Unknown
  Bacterial polypetide isolated from the Sargasso Sea
TSHNTLNIFCDILDAIKKDPYERDPRGTAKKAEAYLKKSGIGDKAFFGPEAEFFVFDDVRFKNDMNETGFKIDSTEGPYNTGKKYENGNMGHRPGIKGGYFPVPPVDSAQDMRSEYLKAMKDMGIKVEKHHHEVAPSQHELGMYFGTLVDQADNLQLYKYAVHMVSHSFGKTATFMPKPVKGDNGSGMHVHQSIWKGNTALFSGDKYAGLSDLALHYIGGILKHAKAINAFSNATTNSYKRLIPGFEAPVLLAYSARNRSASCRIPITLSKKAARCEIRFGDAAGNP

SEQ ID NO: 194230 - protein, 258 aa, Unknown
  Bacterial polypetide isolated from the Sargasso Sea
MSASDVLKMIKDKEVEFVDLRFTDPRGKLQHLTMDATVVDEDMCNEGVFFDGSSIAGWKAINESDMILKPDTGRMFMDPFTSHNTLVLFCDILDAIKKTPYERDPRGIAKKAEEYLKSSGIGDKAFFGPEPEFFVFDDVKIKNDMNETSFAIDSTEGPYNSDKKYESGNMGHRPGVKGGYFPVPPVDSAQDMRGEYLKGLKDVGIKVEKHHHEVAPSQHELGMYFGTLVNQADNVQLYKYVVQMVSHSLEKLQHLAKA

SEQ ID NO: 194231 - protein, 244 aa, Unknown
  Bacterial polypetide isolated from the Sargasso Sea
DPFTSHNTVVLFCDILDAIKKDPYERDPRGVAKKAEEYLKASGIGDKAFFGPEPEFFVFDDVRIKNDMNECGFKLDSKEGPYNSGKEYENGNMGHRPQIKGGYFPVPPVDSEQDMRGEYLKNLKELGIKVEKHHHEVAPSQHELGMYFGTLVDQADNVQLYKYVVQMVTHSFGKTATFMPKPVAGDNGSGMHIHQSIWKGDTPVFSGDAYAGLSETALHYIGGILKHAKAINAFANSTTNSYKR

SEQ ID NO: 194232 - protein, 272 aa, Unknown
  Bacterial polypetide isolated from the Sargasso Sea
KASGVGDKAFFGPEPEFFVFDDVRIKNDMNECGFKIDSKEGPYNSGKEYENGNMGHRPPVKGGYFPVPPVDSEQDMRGEYLKNLKEVGIKVEKHHHEVAPSQHELGMYFGTLVNQADNVQLYKYIVQMVTHSFGKTATFMPKPVAGDNGSGMHIHQSIWKGDTPVFSGDAYAGLSETALHYIGGILKHAKAINAFANSTTNSYKRLVPGFEAPVLLAYSARNRSASCRIPITLNKKGARCEIRFPDASGNPYLTFAAMLMAGLDGIKNKIHP

SEQ ID NO: 194233 - protein, 303 aa, Unknown
  Bacterial polypetide isolated from the Sargasso Sea
MQDTGSDILDIKFIDLPGTWQHVSVPTSEVTESLFQDGTGFDGSSIRGFQSIDESDMLLVPDVSTVKKDPFNDGQLTVIADIRDPLTGESYSRDPRNVAKKAEAYLKTTGIGDNSFWGPEVEFFIFDSVRFSYGANHGYHFVDSDEGIWNSGDLTMLDGTTLNKGMRPRHKEGYFPVPPVDTLQDIRSEMVRTLINGFNIAVEKHHHEVATGGQGEIDIVFDSLVQTADNVMNYKYVVKNVAAKYDKVVTFMPKPLFNDNGTGMHTHQSIWIDGVPLFAGDEYAGLSKLALNYIGGLIKHGKA

SEQ ID NO: 194234 - protein, 295 aa, Unknown
  Bacterial polypetide isolated from the Sargasso Sea
FDGSSIAGWKAINESDMILKPDNSRAIVDPFTSHNTLNLFCDVLDAIKKDPYERDPRGTAKKAEAYLKSSGIGDKAFFGPEAEFFVFDDVRFKNDMNETGFKIDSKEGPYNSGREYENGNMGHRPGIKGGYFPVPPVDSEQDMRSEYLKAMKEMGIKVEKHHHEVAPSQHELGMYFGTLVDQADNLQLYKYAVHMVSNSFGKTATFMPKPVKGDNGSGMHVHQSIWKGDTALFSGDKYAGLSDTALHYIGGILKHAKAINAFSNATTNSYKRLIPGFEAPVLLAYSARNRSASCR

SEQ ID NO: 194235 - protein, 274 aa, Unknown
  Bacterial polypetide isolated from the Sargasso Sea
MSAANVLKFIKEKEAEFVDLRFTDPRGKLQHLTMDASIVDEGMLNEGVFFDGSSIAGWKAINESDMILKPDTARMFMDPFTSHNTVVLFCDILDAIKKDPYERDPRGVAKKAEEYLKASGIGDKAFFGPEPEFFVFDDVKIKNDMNECGFKLDSKEGPYNSGKEYENGNMGHRPQIKGGYFPVPPVDSEQDMRGEYLKNLKEVGIKVEKHHHEVAPSQHELGMYFGTLVNQADNVQLYKYIVQMVTHSFGKTATFMPKPVAGDNGSGMHIHQSI

SEQ ID NO: 194236 - protein, 165 aa, Unknown
  Bacterial polypetide isolated from the Sargasso Sea
KALIALAAPTTNSYKRLTPGLKAPTILALSARNRSAACRIPMYFQNPKAKRVEFRSADPTCNPYLTFAAMLMAGLDGIENGYEPGDPLESDLFSLSAEDMAKLPQVPSSLEEALQALEDDHEFLLKGGVFTEDLIRGWIDFKRENDVDPVRLRPHPYEFYLSFDA

SEQ ID NO: 194237 - protein, 251 aa, Unknown
  Bacterial polypetide isolated from the Sargasso Sea
PIRGGDDILVMCEVLNADGTTHKSNNRANCVEVSEKYKSEIPWFGIEQEYTFYDGSEPLGFPSEGYPAPQGEYYCGVGANNIFGRDIVEEHLQLCLDAGLEISGINAEVMPGQWEFQIGPLGSPEVADQLHIARWLLHRVSEDYNVTVSLEPKPVKGDWNGAGAHTNFSTKTMREDGGYDTIVEACEKLGKNIDKHISVYGSKNDERLTGLHETAKITEFKYGVSDRGASIRIPMATANDKKGYLKTGDLL

SEQ ID NO: 194238 - protein, 293 aa, Unknown
  Bacterial polypetide isolated from the Sargasso Sea
LIVYCDVYDPLNGKPYSRDPRSTAKRAEAFLKSTKIGDKAFFGPEPEFFVFDDVRSDVSMNHTFYQIDHEEGPYNSGSDFSDGNIGHRPGVKGGYFPVPPVDSGHDLRSEMVTTLMEMGVSMEKHHHEVAPSQHELGIKFDSLVRCADNVQAYKYVVAMVAHIYGKTATFMPKPVIDDNGTGMHTHQSIWKGSKPLFAGSGYADLSDTALHYIGGIIKHAKTINAFSNPSTNSYKRLIPGFEAPVLLAYSARNRSASCRIPFSPSKNGKRVEVRFPDATANAYLAFSSMLMAG

SEQ ID NO: 194239 - protein, 262 aa, Unknown
  Bacterial polypetide isolated from the Sargasso Sea
MSAANVLKFIKEKEAEFVDLRFTDPRGKLQHLTMDASIVDEGMLNEGVFFDGSSIAGWKAINESDMILKPDTARMFMDPFTSHNTVVLFCDILDAIKKDPYERDPRGVAKKAEEYLKASGIGDKAFFGPEPEFFVFDDVRIKNDMNECGFKLESKEGPYNSGKEYENGNMGHRPQIKGGYFPVPPVDSEQDMRGEYLKNLKEVGIKVEKHHHEVAPSQHELGMYFGTLVNQADNVQLYKYVVQMVTHSFGKTATFMPKPSCW

SEQ ID NO: 194240 - protein, 182 aa, Unknown
  Bacterial polypetide isolated from the Sargasso Sea
YAGLSKLHFIILGGILKHAKAINAFANSTTNSYKRLIPGFEAPVLLAYSARNRSASCRIPITLSKKGARCEIRFPDAAGNPYLTFAAMLMAGLDGIKKKINPGKSFDKDLYELPAKEVERIPTVCGSLREAMESLDKDRSFLTQGGVFTDDQIDAYIALKFEEIHKFEHAPHPVEFDMYYSS

SEQ ID NO: 194241 - protein, 174 aa, Unknown
  Bacterial polypetide isolated from the Sargasso Sea
CIIFGGILKHAKAINAFSNATTNSYKRLIPGFEAPVLLAYSARNRSASCRIPITLSKKAARCEIRFGDAAGNPYLTFAAMLMAGLDGIKNKIDPGKSFDKDLYALSEDEVKKIPTVCGSLREAMESLDKDRDFLKQGNVFTDDQIDAYIALKFEEIHNFEHTPHPIEFDMYYSC

SEQ ID NO: 194242 - protein, 318 aa, Unknown
  Bacterial polypetide isolated from the Sargasso Sea
MMKDKQIEFVDLRFTDPRGKLQHLTMDASVVDGDMLTDGVFFDGSSIAGWKAINESDMILKPDLNRQIVDPFTSHNTLVLFCDILDAIKRNPYERDPRGIAKKAEAYLKKTGIGDKAYFGPEPEFFVFDDVKIKNDMNETSFSIDSTEGPYNSGKSYENGNMGHRPGVKGGYFPVPPVDSAQDIRGEYLKGLRDVGITVEKHHHEVAPSQHELGMLFGTLVDQADNVQLYKYVVQMVSHSFGKTATFMPKPVKGDNGSGMHVHQSVWKGKTPVFSGNKYSGLSQTALYYIGGILKHAKAINAFFNATTNSYKRLISSF

SEQ ID NO: 194243 - protein, 285 aa, Unknown
  Bacterial polypetide isolated from the Sargasso Sea
CKKAEAYLKKTGIGDKSYFGPEPEFFVFDDVRFKNDMNETSFSIDSSEGPYNTGKKYENGNLGHRPGIKGGYFPVPPVDSAQDMRGEYLKALKDMGVKVEKHHHEVAPSQHELGMYFGTLTNQADNVQLYKYAVQMVTHSFGKTATFMPKPVKGDNGSGMHCHQSIWKGNTPLFMGKEYAGLSKDALYYIGGILKHARAINAFANATTNSYKRLIPGFEAPVILAYSARNRSASCRIPVIMNPKAARMEIRFPDAAGNPYLTFASMLMAGIDGIKNKIDPGKPFD

SEQ ID NO: 194244 - protein, 179 aa, Unknown
  Bacterial polypetide isolated from the Sargasso Sea
MSAAKILKLMKDKEVEYVDLRFTDPRGKLQHLTMDGKMVDEEMLNDGVFFDGSSIAGWKAINESDMILKPDLNRQVIDPFTSHNTLILFCDILDAVKKDPYERDPRSIAKKAEAYLKKTGIGDKAYFGPEAEFFVFDDVRYTNDMHNTGFQIDSSEGPYNTGKKYENGNMGHRPGIKGG

SEQ ID NO: 194245 - protein, 324 aa, Unknown
  Bacterial polypetide isolated from the Sargasso Sea
DPTLVLICDIQDPITGQKYDKDPRYVAKKAEEFVKSSGIGDSIFFGAEAEFFLFNDVRISTDPSNSFFSVDSGEAIWNKGSDERPNLGYHVRNKGGYFPCPPHDTMQDVRSEMVNHMVSIGMNVEAQHHEVATAGQQEIDLRFDTLLSHADSLQKYKYVVRNTAKSNGLSATFMPKPLSNDNGSGMHCHQSIWSNGKPIFYADSGYANLSDEAKFYIGGLLKHAPSLLAFTNPTINSFKRLVPGYEAPVKLAYSNRNRSAICRIPAYSPSPKAKRVEFRCPDATANPYLAFSAMVMAGLDGIKNRIDPGEPMDKIFMIFPQKNS

SEQ ID NO: 194246 - protein, 181 aa, Unknown
  Bacterial polypetide isolated from the Sargasso Sea
KALRDVGIKVEKHHHEVAPSQHELGMYFGTLVDQADNVQLYKYIVHMVSHSFGKTATFMPKPVKGDNGSGMHTHQSIWKGDTPVFSGDKYAGLSDTALHYIGGILKHAKAINAFSNATTNSYKILIPGFEAPVLLAYSARNRSASCRIPITLNKKGARCEIRFPDASRNPLFNFCCNVNGR

SEQ ID NO: 194247 - protein, 196 aa, Unknown
  Bacterial polypetide isolated from the Sargasso Sea
MSVKNIQKIMKDKEIDYVDLRFTDPRGKLQHVTMDAKVVDDDMLEEGIFFDGSSIAGWKAINESDMILKPDLSRPVVDPFTSHNTLNIFCDVLDAIKKDPYERDPRGTAKKAEDYLKKSKIGDKAFFGPEPEFFVFDDVRYKNDMNETGFSIDSTEGPYNTGKKYENGNMGHRPGVKGGYFSVPPVDSAQDMRSEY

SEQ ID NO: 194248 - protein, 298 aa, Unknown
  Bacterial polypetide isolated from the Sargasso Sea
CRSYTSHNSLILFCDIFDAVKKDSYERDPRGIAKKAEAYLKKTGVGDKAYFGPEPEFFVFDDVRIKNDMNETSFAIDSAEGPYNSGKRYENGNMGHRPGIKGGYFPVPPVDSAQDMRSEYLKGLREVGITVEKHHHEVAPSQHELGMLYSTLVDQADNVQLYKYVVQMVSHSFGKTATFMPKPVKGDNGSGMHTHQSIWKGKTPVFSGNEYAGLSKTALHYIGGILKHAKAINAFSNATTNSYKRLIPGFEAPVLLAYSARNRSASCRIPITLSKNGARCEIRFPDAAGNPYLTFSAM

SEQ ID NO: 194249 - protein, 164 aa, Unknown
  Bacterial polypetide isolated from the Sargasso Sea
MPGQWEFQIGPVGAPDIGDQIWVARWLLYRIAEDYNISATLTPKPVKGDWNGAGMHTNFSTKQMREDGGYDAIVAGCEALGKNAEFHVQNYGAGIEDRLTGDHETQRFDTFSYGVSDRGASIRIPWQVEVDKKGYLEDRRPNANADPYVIATVMIDTVCSAASS

SEQ ID NO: 194250 - protein, 183 aa, Unknown
  Bacterial polypetide isolated from the Sargasso Sea
KYAGLSNTALHYIGGILKHARAINAFSNATTNSYKRLIPGFEAPVLLAYSARNRSASCRIPITQSKKAARCEVRFPDAAGNPYLTFSALLMAGLDGIKNKIDPGKSLDKDLYALSESEVKKIPTVCGSLREAMESLDKDRKFLTQGNVFTDDQIDAYIALKYEEIYNFEHTPHPMEFQMYYSC

SEQ ID NO: 194251 - protein, 275 aa, Unknown
  Bacterial polypetide isolated from the Sargasso Sea
MSSNEVLKFMKNKEIEFVDLRFTDPRGKLQHLTMDATTVDEEMLNEGVFFDGSSIAGWKAINESDMILKPDLSRKIIDPYTSHNTLILFCDILDAIKKNSYERDPRGIAKKAETYLKSTGVGDKAYFGPEPEFFVFDSVRYKNDMNETSFSIDSNEGPYNTGRKYENGNKGHRPGIKGGYFPVPPVDSAQDMRGEYLKGLRDVGITVEKHHHEVAPSQHELGMLFSTLVNQADNVQLYKYVVHMVSQSFGKTATFMPKPVKGDNGSGMHTHQSIW

SEQ ID NO: 194252 - protein, 284 aa, Unknown
  Bacterial polypetide isolated from the Sargasso Sea
FDGSSTLQADGGDSDCLLKPVWMCPDPIRGGENILVMNEVCNPDGTPHRSNSRAALVEIAEKFKEHRPWFGIEQEYTLMDGKQPAGWPQEGFPERPQGPYYCSVGSEDVAARSMVEDHLDLCLEAGLEVSGINAEVMLGQWEYQVGPLPALEVGDQLWVARWLLERVGEEYGLRVELHPKPIKGDWNGSGAHINYSTESMRADGGLKVIEEACEKLGKNIEKHIAVYGDANAERLTGDHETCSINEFKYGVSDRGASIRIPMGVANDGKGYLEDRRPASNVDPI

SEQ ID NO: 194253 - protein, 119 aa, Unknown
  Bacterial polypetide isolated from the Sargasso Sea
GWKAINESDMILKPDLSRTVVDPFTSHNTLNIFCDILDAVKKDPYERDPRGTAKKAEAYLKKTGIGDKAYFGPEPEFFVFDDVRYKNDMNETSFSIDSSEGPYNTGKKYENRNMGHRPK

SEQ ID NO: 194254 - protein, 141 aa, Unknown
  Bacterial polypetide isolated from the Sargasso Sea
MSAANVLKFIKEKDAEFVDLRFTDPRGKLQHLTMDASIVDEDMLNEGVFFDGSSIAGWKAINESDMILKPDTARMFMDPFTSHNTVVLFCDILDAIKKDPYERDPRGVAKKAEEYLKASGIGDKAFFGPEPEFFVFDDVRI

SEQ ID NO: 194255 - protein, 269 aa, Unknown
  Bacterial polypetide isolated from the Sargasso Sea
RAYPQEKHHHEVAGAGQHELGMKFDSLINSADNVMTYKYVVRNVAKKYGKTATFMPKPVFNDNGTGMHVHQSLWKSGQPLFFGEGAYANLSQTARWYIGGILKHAPSFLAFTNPTTNSYKRLVPGFEAPVNLVYSEGNRSAAVRIPLTGPSPKAKRLEFRSGDALANPYLAFSVMMLAGIDGIKNQIDPGDGVDVDLFELPADELAKIDTVPSSLNDSLNALKADKDYLLAGGVFTEDFIDNFIDIKYEEVQQLRQRPHPHEFFMYYDA

SEQ ID NO: 194256 - protein, 300 aa, Unknown
  Bacterial polypetide isolated from the Sargasso Sea
GPELEFFVFDDVRFKNDMNETSFSIDSSEGPYNTGKKYENGNMGHRPGIKGGYFPVPPVDSAQDMRGEYLKALRDMGVKVEKHHHEVAPSQHELGMYFGTLTNQADNVQLYKYAVQMVTHSFGKTATFMPKPVKGDNGSGMHCHQSIWKGNTPVFMGKEYAGLSKEALYYIGGILKHARAINAFSNATTNSYKRLIPGFEAPVILAYSARNRSASCRIPVIMNPKAARMEIRFPDAAGNPYLTFASMLMAGIDGIKNKIDPGKAFDQDLYSLSEDEVKKLPTVCGSLREAMQNLDKDRKF

SEQ ID NO: 194257 - protein, 248 aa, Unknown
  Bacterial polypetide isolated from the Sargasso Sea
LGMYFGTLVDQADNVQLYKYVVQMVSHSFGKTATFMPKPVKGDNGSGMHTHQSIWKGKTPVFSGNKYAGLSQTALYYIGGILKHAKAINAFSNATTNSYKRLIPGFEAPVLLAYSARNRSASCRIPITLSKNGARCEIRFPDASGNPYLTFASMLMAGLDGIKNKIDPGKSFDKDLYALSENEVKKVPTVCGSLREAMESLDRDRAFLKQGNVFSDDQIDAYIALKFEEIHNFEHTPHPIEFEMYYSC

SEQ ID NO: 194258 - protein, 330 aa, Unknown
  Bacterial polypetide isolated from the Sargasso Sea
QIEFVDLRFVDMRGIEQHVTFPVSIVEPSLFEEGKMFDGSSIAGWKGIAESDMVLMPDPASAYVDPFYADPTLVLTCDVLDPATMQGYGRCPRGIAKRAEAYLKSSGIADLAFFGPEPEFFIFDSVQFANDMGHTFFKINSEEGAWNTGKHYDGANSGYRPTVKGGYFPVPPTDSLHDIRAEMCKVLTQVGIEVEVHHHEVANAGQCEIGAKFNTLVTKADELQRMKHVIKNVAHRNGKTVTFMPKPLVGDNGSGMHVHQSLAKEGKNLFSGDGYGGLSQMALWYIGGIFKHARAINAFSNSGTNSYKRLVPGFEAPVMLAYSARNRSAS

SEQ ID NO: 194259 - protein, 183 aa, Unknown
  Bacterial polypetide isolated from the Sargasso Sea
MSSKSILKLIKDKQVEFVDLRFTDPRGKLQHLTMDSTVVDDDLLNKGVFFDGSSIAGWKAINESDMILKPDLDRPIIDPFNSHTTLNIFCDIIDAVKKDPYERDPRGTAKKAEAYLKKTGIGDKSYFGPEPEFFVFDDVRFKNDMNETSFSIDSSEGPYNTGKKYENGNMGHRPGIKGGYFPV

SEQ ID NO: 194260 - protein, 263 aa, Unknown
  Bacterial polypetide isolated from the Sargasso Sea
ILDAIKRNPYERDPRGIAKKAEAYLKKTGIGDKAYFGPEPEFFVFDDVKIKNDMNETSFSIDSTEGPYNSGKSYENGNMGHRPGVKGGYFPVPPVDSAQDIRGEYLKGLRDVGITVEKHHHEVAPSQHELGMLFGTLVDQADNVQLYKYVVQMVSHSFGKTATFMPKPVKGDNGSGMHVHQSVWKGKTPVFSGNKYSGLSQTALYYIGGILKHAKAINAFSNATTNSYKRLIPGFEAPVLLAYSARNRSASCRIPITLSKKGA

SEQ ID NO: 194261 - protein, 307 aa, Unknown
  Bacterial polypetide isolated from the Sargasso Sea
KKDPYGRDPRGTAKKAEEYLKKSGIGDKSYFGPEPEFFVFDDVRFKNDMNETSFSIDSSEGPYNTGKKYENGNMGHRPGIKGGYFPVPPVDSAQDMRGEYLKALKDMGVKVEKHHHEVAPSQHELGMYFGTLTNMADNVQLYKYAVQMVTHSFGKTATFMPKPVKGDNGSGMHCHQSIWKGNTPLFMGKEYAGLSKEALYYIGGILKHAKAINAFSNATTNSYKRLIPGFEAPVILAYSARNRSASCRIPVIMNPKAARMEIRFPDAAGNPYFTFASMLMAGIDGNKNKIDPGKAFDQDLYSLSEDE

SEQ ID NO: 194262 - protein, 270 aa, Unknown
  Bacterial polypetide isolated from the Sargasso Sea
RGEYLKALKDMGVKVEKHHHEVAPSQHELGMYFGTLTNQADNVQLYKYAVQMVTHSFGKTATFMPKPVKGDNGSGMHCHQSIWKGNTPLFMGKEYAGLSKEALYYIGGILKHARAINAFSNATTNSYKRLIPGFEAPVILAYSARNRSASCRIPVIMNPKAARMEIRFPDAAGNPYLTFASMLMAGIDGIKNKIDPGKAFDQDLYSLSEDEVKKLPTVCGSLREAMQNLDKDRKFLTEGGVFTDDQIDAYIELKFSEIYNFEHTPHPIEF

SEQ ID NO: 194263 - protein, 281 aa, Unknown
  Bacterial polypetide isolated from the Sargasso Sea
YFPVPPVDSEQDMRGEYLKNLKEVGIKVEKHHHEVAPSQHELGMYFGTLVNQADNVQLYKYVVQMVTHSFGKTATFMPKPVAGDNGSGMHIHQSIWKGDTPVFSGDAYSGLSETALHYIGGILKHAKAINAFANSTTNSYKRLIPGFEAPVLLAYSARNRSASCRIPITLSKKGARCEIRFPDAAGNPYLTFAAMLMAGIDGIKNKIHPGESFDKDLYELPPEEVKAIPTVCGSLREAMESLDKDREFLTQGGVFTDDQIDAYIALKFEEIHKFEHAPHPV

SEQ ID NO: 194264 - protein, 282 aa, Unknown
  Bacterial polypetide isolated from the Sargasso Sea
EAYLKKTGIGDKAYFGPEPEFFVFDDVRIKNDMNETGFVIDSSEGPYNSGKKYDNGNMGHRPGIKGGYFPVPPVDSAQDMRGEYLKGLRDVGITVEKHHHEVAPSQHELGMLFGTLVDQADNVQLYKYVVQMVSHSFGKTATFMPKPVKGDNGSGMHIHQSVWKGKTPLFSGNKYAGLSQTALYYIGGILKHAKAINAFSNATTNSYKRLIPGFEAPVLLAYSARNRSASCRIPITLSKKGARCEIRFPDAAGNPYLTFAAMLMAGLDGIKNKIDPGKSFDK

SEQ ID NO: 194265 - protein, 283 aa, Unknown
  Bacterial polypetide isolated from the Sargasso Sea
SSNKVLKLMKDKEIEFVDLRFTDPRGKLQHLTMDSTIVDDDMLNEGVFFDGSSIAGWKAINESDMILKPDLSRQVIDPYTSHNTLIIFCDILDAVKKTPYERDPRGIAKKAEAYLKKSGVGDKAYFGPEPEFFVFDDVKIRNEMNEIGFKIDSSEGPYNSGKNYENGNMGHRPGIKGGYFPVPPVDSAQDMRGEYLKGLREVGITVEKHHHEVAPSQHELGMLYNTLVTQADNVQLYKYVVQMVSHSFGKTATFMPKPVKGDNGSGMHTHQSIGKVKTQYFRK

SEQ ID NO: 194266 - protein, 258 aa, Unknown
  Bacterial polypetide isolated from the Sargasso Sea
MSASKIIKLIKEKEVEYVDLRFTDPRGKLQHLTMDGKMVDEKMLNEGVFFDGSSIAGWKAINESDMILKPDLDRQIIDPFTSHNTLVLFCDVLDAVKKTPYERDPRSIAKKAESYLKKSGIGDKAYFGPEAEFFVFDDVKYKNDMNEISFKIDSAEGPYNTGKDYENGNMGHRPGIKGGYFPVPPVDSAQDMRGEFLKALRDMGIKTEKHHHEVAPSQHELGMYFGTLTKQADNMQLYKYGVQMVAHSFGKTATFMPK

SEQ ID NO: 194267 - protein, 298 aa, Unknown
  Bacterial polypetide isolated from the Sargasso Sea
KDKQVEYVDLRFTDPRGKLQHVTQDLQTVNEDMLNNGIFFDGSSIAGWKAINESDMILKPDLSSNFIDPFFSHTTLSLFCDVMDPISKTFYERDPRSTAKKAEEYLKKTKIGDKAYFGPEPEFFVFDDVRYSNQMNKVSYEVDSAEGPYNTGKVYENGNMGHRPKVKGGYFPVPPVDSAQDLRSECLKAMKDMGVKVEKHHHEVAPSQHELGTLFNTLVNQGDAMQIYKYAVHNVAHSFGKTATFMPKPVKNDNGSGMHVHQSIFSGEKPLFAGDKYAGLSDTCLYYIGGIIKHARAL

SEQ ID NO: 194268 - protein, 314 aa, Unknown
  Bacterial polypetide isolated from the Sargasso Sea
KDVLKLMKSKNIEFVDLRFTDPRGKLQHLTMDTTIVDEGMLNDGVFFDGSSIAGWKAINESDMILKPDLSRKVIDPYTSHNTLILFCDILDAVKRDPYERDPRGIAKKAEAYLKKTGIGDTAYFGPEPEFFVFDDVRIKNDMNETSFSIDSTEGPYNSGKSYDNGNMGHRPGVKGGYFPVPPVDSAQDMRGEYLKGLRDVGITVEKHHHEVAPSQHELGMLFGTLVNQADNVQLYKYVVQMVSHSFGKTATFMPKPVKGDNGSGMHTHQSIWKGKTPVFSGNKYAGLSQTALYYIGGVLKHAKAINAFANATTN

SEQ ID NO: 194269 - protein, 270 aa, Unknown
  Bacterial polypetide isolated from the Sargasso Sea
TMDTTIVDEEMLNDGVFFDGSSIAGWKAINESDMILKPDLSRKVIDPYTSHNTLILFCDILDAVKRDPYERDPRGIAKKAEAYLKKTGIGDTAYFGPEPEFFVFDDVRIKNDMNETSFSIDSSEGPYNSGKSYDNGNMGHRPGVKGGYFPVPPVDSAQDMRGEYLKGLRDVGITVEKHHHEVAPSQHELGMLFGTLVDQADNVQLYKYVVQMVSHSFGKTATFMPKPVKGDNGSGMHTHQSIWKGKTPVFSGNKYAGLSQTALYYIGGVL

SEQ ID NO: 194270 - protein, 267 aa, Unknown
  Bacterial polypetide isolated from the Sargasso Sea
AEKYLKSSGLGDTAYFGPEAEFFVFNDVKYDSGSNFAFHEVDSIEGAWNTGRDENPNLGHKPRHKGGYFPLPPADSLQDVRTEMVLTMEEIGVNVEASHHEVATGGQCEIDLEFSPLLSMADDLLKYKYVVKNVAKQHGMTATFMPKPLFEDNGSGMHVHSSIWKKNKTLMYKKGNYADLSDFALYYIGGILKHAPSLLAFCAPTTNSYKRLTPGFEAPVNIAYSQANRTASVRIPNNYTSNPKAKRIEFRCPDPSSNPYLAFSAIL

SEQ ID NO: 194271 - protein, 196 aa, Unknown
  Bacterial polypetide isolated from the Sargasso Sea
MSAKNILKFIKDKQVEYVDFRFTDPRGKLQHVTQDLLTVNEDMLNDGIFFDGSSIAGWKAINESDMILKPDLSNSFIDPFFSHSTLAIFCDVMDPITKNYYERDPRSTAKKAEAYLKKTKIGDKAYFGPEPEFFVFDDVRFSNSMNKVSYEVDSAEGPYNTGKKYENGNMGHRPKVKGGYFPVPPVDSAQDLRSEC

SEQ ID NO: 194272 - protein, 240 aa, Unknown
  Bacterial polypetide isolated from the Sargasso Sea
RPAPKGGYFPVPPVDNNTDLRAQMVSTLVEMGVGMEKHHHEVAPSQHELGILFNTLLRTADNIQLYKWVVHMVAHENGKTATFMPKPVVGDNGSGMHCHQSVWKDGDTLFAGNGYADLSDTALHYIGGIIKHAKAINAFTNPTTNSYKRLVPGFEAPVLLAYSSRNRSASCRIPFVGNPKGKRVEVRFPDASANPYLAFTAMLMAGLDGIQNKIDPGDPMDKDLYDLPPEELEGVPTVCG

SEQ ID NO: 194273 - protein, 307 aa, Unknown
  Bacterial polypetide isolated from the Sargasso Sea
DLTGIADTAFFGPEPEFFLFDDVRYDSKEGGCFYSVDTIEAPWNTGRIEEGGNLGYKIQYKEGYFPVAPNDTAQDIRSEMLLLMGELGIPTEKHHHEVAGAGQHELGMKFDSLINAADNVMTYKYVVRNVAKKYGKTATFMPKPVFNDNGTGMHVHQSLWKSGQPLFFGEGSYANLSQTARWYIGGILKHAPSFLAFTNPTTNSYKRLVPGFEAPVNLVYSEGNRSAAVRIPLTGPSPKAKRLEFRSGDALANPYLAFSVMMLAGIDGIKNQIDPGDGVDVDLFELPADELAKIDTVPSSLNDSLNA

SEQ ID NO: 194274 - protein, 196 aa, Unknown
  Bacterial polypetide isolated from the Sargasso Sea
MSASDVLKLMKDKEIEYVDLRFTDPRGKLQHLTMDSTVVDEGMLNDGVFFDGSSIAGWKAINESDMILKPDLGRKVFDPFTSHNTLVLFCDILDAVKKDPYERDPRGIAKKAEAYLKTTGIGDKAYFGPEPEFFVFDDVRIKNEMNETGFVIDSVEGPYNSGKKYENGNMGHRPGVKGGYFPVPPVDSAQDMRGEF

SEQ ID NO: 194275 - protein, 55 aa, Unknown
  Bacterial polypetide isolated from the Sargasso Sea
MYVWIDGTGEGLRCKSRTLKISDWNGQLPKPEELPKWNYDGSSTGQAEGYLIVPS

SEQ ID NO: 194276 - protein, 275 aa, Unknown
  Bacterial polypetide isolated from the Sargasso Sea
MSASEVLKLMKDKEVEYVDLRFTDPRGKLQHLTMDKTVVDEEMLNDGVFFDGSSIAGWKAINESDMILKPDLGRKIVDPFTSHNTLVLFCDILDAVKKDPYERDPRGIAKKAEEYLKTTGVGDKAYFGPEPEFFVFDDVRIKNEMNETGFSIDSTEGPYNSGKKYENGNMGHRPGVKGGYFPVPPVDSAQDMRGEFLKGLRDVGITVEKHHHEVAPSQHELGMLFSTLVNQADNVQLYKYVVQMVAHSFGKTATFMPKPVKGDNGSGMHTHQSIW

SEQ ID NO: 194277 - protein, 204 aa, Unknown
  Bacterial polypetide isolated from the Sargasso Sea
GTGMHVNMSIWKSGNPLFAGNKYADLSDEALYFIGGILKHAKALNAITNPATNSYKRLIPGFEAPVLRAYSARNRSGCVRIPWTESPKAKRVEARFPDPSANPYLAFSALLMAGLDGIQKKTDPGEPSDKDLYDLPPEELLSIPTVCGSLREAVEALQADHDFMLAGDVFSKDQIEAYIELKNEEIQEFEHTPHPIEYKLYYSC

SEQ ID NO: 194278 - protein, 225 aa, Unknown
  Bacterial polypetide isolated from the Sargasso Sea
MAKSPQDVLSQIKDEGIELIDLKFTDIHGKWQHLTLTSDMIEEESFTEGLAFDGSSIRGWKAINASDMSMVPDSSTAWIDPFYKHKTLSMICSIQEPRSGEPYDRCPRSLAQKALKYLDSTGIADTAFFGPEPEFFLFDDVRYDSKEGSCFYSVDTIEAPWNTGRTEEGGNLGYKIQYKEGYFPVAPNDTAQDIRSEMLLQMAELGIPTEKHHHEVAGAGQHELG

SEQ ID NO: 194279 - protein, 226 aa, Unknown
  Bacterial polypetide isolated from the Sargasso Sea
VAKKYGKTATFMPKPVFNDNGTGMHVHQSLWKSGQPLFFGEGAYANLSQTARWYIGGILKHAPSFLAFTNPTTNSYKRLVPGFEAPVNLVYSEGNRSAAVRIPLTGPSPKAKRLEFRSGDALANPYLAFSVMMLAGIDGIKNQIDPGDGVDVDLFELPADELAKIDTVPSSLNDSLNALKADKDYLLAGGVFTEDFIDNFIDIKYEEVQQLRQRPHPHEFFMYYDA

SEQ ID NO: 194280 - protein, 253 aa, Unknown
  Bacterial polypetide isolated from the Sargasso Sea
VDLRFTDPRGKLQHVTMDSKIVDDGMLNEGIFFDGSSIAGWKAINESDMILKPDLSRTVVDPFTSHNTLNIFCDVLDAVKKDPYERDPRGTAKKAEAYLKKTGIGDKAYFGPEPEFFVFDDVRYKNDMNETSFSIDSSEGPYNTGKKYENGNMGHRPGIKGGYFPVPPVDSAQDMRSEYLKAMKDMGIKVEKHHHEVAPSQHELGMYFNTLVNQADNLQLYKYAVHMVSHSFGKTATFMPKPVKGDNGSGMHV

SEQ ID NO: 194281 - protein, 300 aa, Unknown
  Bacterial polypetide isolated from the Sargasso Sea
FVDPFFTDPTLVLICDIQDPITGQKYDKDPRYVAKKAEEFVKSSGIGDSIFFGAEAEFFLFNDVRISTDPSNSFFSVDSGEAIWNKGSDERPNLGYHVRNKGGYFPCPPHDTMQDVRSEMVNHMVSIGMNVEAQHHEVATAGQQEIDLRFDTLLSHADSLQKYKYVVRNTAKSNGLSATFMPKPLSNDNGSGMHCHQSIWSNGKPIFYADSGYANLSDEAKFYIGGLLKHAPSLLAFTNPTINSFKRLVPGYEAPVKLAYSNRNRSAICRIPAYSPSPKAKRVEFRCPDATANPYLAFSA

SEQ ID NO: 194282 - protein, 293 aa, Unknown
  Bacterial polypetide isolated from the Sargasso Sea
DWSFDGSSTQQADGSSSDCIIRPVNEYVGPRNSDSLVMCEVLSPDRSAHPSNTRSACVDILTDDWWFGFEQEYFFTNPEDGTILGWEDGTPRPQGDYYCGVGSGNVQAREVSEAHMDACLEAGIMITGTNAEVALGQWEYQCFGKGLKAADDLWVSRYLLHLIAEEYGVSVNIHPKPQEGDWNGSGMHTNFSNEQMRSAGSEELFNSMCEKLGEVHAEGIANYGSDNEKRLTGNHETQSIDTFSYGVSDRGASIRIPIYTVENDWNGYLEDRRPASNADPYKIISHIVGTLTQ

SEQ ID NO: 194283 - protein, 247 aa, Unknown
  Bacterial polypetide isolated from the Sargasso Sea
GILFDTLVNQADNIQLYKYVVHMVSNSFGKTATFMPKPVKGDNGSGMHTHQSIWKSESPIFSGDKYSGLSEIALHYIGGILKHAKAINAFSNATTNSYKRLIPGFEAPVLLAYSARNRSASCRIPITLNKKGARCEIRFPDASGNPYLTFSAMLMAGLDGIKNKIDPGKSLDKDLYALSENEIKNIPTVCGSLREAMESLDTDRDFLKQGKVFTDDQIDAYIALKFEEIHNFEHTPHPIEFDMYYSC

SEQ ID NO: 194284 - protein, 273 aa, Unknown
  Bacterial polypetide isolated from the Sargasso Sea
RDVFEEGIGFDGSSIRCFQSIEASDMILIPDIETAFVDPFFTDPTLVLICDIQDPITGQKYDKDPRYVAKKAEDFVKSSGIGDSIFFGAEAEFFLFNDVRISTDPSNSFFSVDSGEAIWNKGSDERPNLGYHVRNKGGYFPCPPHDTMQDVRSEMVNHMVSIGMNVEAQHHEVATAGQQEIDLRFDTLLSHADDLQKYKYVVRNTAKSNGLSATFMPKPLSNDNGSGMHCHQSIWSNGKPIFYADSGYANLSDEAKFYIGGLLKHAPSLLAFT

SEQ ID NO: 194285 - protein, 177 aa, Unknown
  Bacterial polypetide isolated from the Sargasso Sea
IQHYTTFGGILKHARAINAFANATTNSYKRLIPGFEAPVLLAYSARNRSASCRIPITQNKKAARCEVRFPDAAGNPYLTFSALLMAGLDGIKNKIDPGKSLDKDLYALSESEVKKIPTVCGSLREAMESLDKDRKFLTQGNVFTDDQIDAYIALKYEEIYNFEHTPHPMEFQMYYSC

SEQ ID NO: 194286 - protein, 302 aa, Unknown
  Bacterial polypetide isolated from the Sargasso Sea
SIRGFQTIDESDMLLVPDASTAKVDPFYKGQVTIIADIRDPLTGEDYTRDPRNIAKKAEAYLKTTGVGDGSFWGPEVEFFVFDSVQFSYGANHGFHHIDSDEGIWNSGADTMLDGTTLNKGARPTHKGGYFPAPPADTQQEMRSEMVRTLISAFGIAVEKQHHEVATAGQGEIDIVFDELLKTADNVMAYKYVIKNVAKEFGKVATFMPKPIFEDNGTGMHTHQSIWKDGVPLFAGDEYAGLSKLALNYIGGLIKHGKALMALAAPTTNSYKRLTPGFEAPTILALSARNRSAACRIPMYSQ

SEQ ID NO: 194287 - protein, 307 aa, Unknown
  Bacterial polypetide isolated from the Sargasso Sea
LRFTDPRGKMQHVSQHVSTIDEESLAEGFMFDGSSIAGWKAINESDMKLMPDCSRSIIDPFYSQPTLALFCDVLDPISGDSYERDPRSTAKQALDYMAKQGIGDTAFFGPEPEFFVFDDVKFENEMNSSFYSIDHSEGPYNSGKDFEEGNMGHRPGIKGGYFPVPPVDSGQDLRSEMVLSLTEMGVPMEKHHHEVAPSQHELGIKFGTLIETADNVQLYKYAVHNVANSFGQTATFMPKPVAGDNGTGMHTHQSIWKDGNPVFAGDKYSGLSETCLHYIGGIIKHAKAINCFTNPSTNSYKRLIPRF

SEQ ID NO: 194288 - protein, 273 aa, Unknown
  Bacterial polypetide isolated from the Sargasso Sea
GPEAEFFVFNDVKYDSSSNFAFHEVDSIEGAWNTGRDENPNLGHKPRHKGGYFPLPPADSLQDVRTEMVLTMEEIGVNVEASHHEVATGGQCEIDLEFSPLLSMADDLLKYKYVVKNVAKQHGMTATFMPKPLFEDNGSGMHVHSSIWKKNKTLMYKKGNYADLSDFALYYIGGILKHAPSLLAFCAPTTNSYKRLTPGFEAPVNIAYSQANRTASVRIPNNYTSNPKAKRIEFRCPDPSSNPYLAFSAILMAGLDGVKNKINPGKPTDINIY

SEQ ID NO: 194289 - protein, 298 aa, Unknown
  Bacterial polypetide isolated from the Sargasso Sea
FCDILDAIKKDPYERDPRGVAKKAEEYLKASGIGDKAFFGPEPEFFVFDDVRIKNDMNECGFKIDSKEGPYNSGKEYESGNMGHRPPIKGGYFPVPPVDSEQDMRGEYLKNLKEVGIKVEKHHHEVAPSQHELGMYFGTLVNQADNVQLYKYVVQMVTHSFGKTATFMPKPVAGDNGSGMHIHQSIWKGDTPVFSGDAYAGLSETALHYIGGILKHAKAINAFANSTTNSYKRLIPGFEAPVLLAYSARNRSASCRIPITLSKKGARCEIRFPDASGNPYLTFAAMLMAGIDGIKNKI

SEQ ID NO: 194290 - protein, 223 aa, Unknown
  Bacterial polypetide isolated from the Sargasso Sea
MGKEYENGNMGHRPGVKGGYFPVPPVDSEQDMRSEYLKAMRDMGIKVEKHHHEVAPSQHELGMYFGTLVDQADNLQLYKYAVHMVSHSFGKTATFMPKPVKGDNGSGMHVHQSIWKGDKALFSGDKYAGLSDTALHYIGGILKHAKAINAFSNATTNSYKRLIPGFEAPVLLAYSARNRSASCRIPITLSKKAARCEIRFGDAAGNPYLTFASMLMAGLDGIK

SEQ ID NO: 194291 - protein, 254 aa, Unknown
  Bacterial polypetide isolated from the Sargasso Sea
MSSNKILKLIKDKEIEYVDLRFTDPRGKLQHLTMDCKMVDEEMLNDGVFFDGSSIAGWKAINESDMILKPDLARQVVDPFTSHNTLILFCDVLDAVKKDPYERDPRSIAKKAEAYLKKTGIGDKAYFGPEAEFFVFDDVKFKNDMNETGFKIDSSEGPYNTGKDYQNGNMGHRPGIKGGYFPVPPVDSAQDMRGEFLKALKDMGIKVEKHHHEVAPSQHELGMYFGTLTEQADNMQLYKYGVQNGSSFFGKTAT

SEQ ID NO: 194292 - protein, 316 aa, Unknown
  Bacterial polypetide isolated from the Sargasso Sea
DSKEGPYNSGKEYDNGNMGHRPPIKGGYFPVPPVDSEQDMRGEYLKNLKEVGIKVEKHHHEVAPSQHELGMYFGTLVTQADNVQLYKYVVQMVTHSFGKTATFMPKPVAGDNGSGMHIHQSIWKGDKPVFSGDAYAGLSETALHYIGGILKHAKAINAFANSTTNSYKRLIPGFEAPVLLAYSARNRSASCRIPITLSKKGARCEIRFPDAAGNPYLTFAAMLMAGLDGIKNKIHPGESFDKDLYDLPADEVKSIPTVCGSLREAMESLDKDREFLTQGGVFTDDQIDAYIALKFEEIHKFEHAPHPVEFEMYYSS

SEQ ID NO: 194293 - protein, 256 aa, Unknown
  Bacterial polypetide isolated from the Sargasso Sea
AGQGEIDLRYDTMLSMADKVMRYKYVVKNVAQDHGKVATFMPKPIYNDNGTGMHTHQSIWKDGKPLFAGNEYAGLSKLALNYIGGLIKHGQALMGLCAPTSNSYKRLVPGFEAPTILGLSARNRSAAFRVPMYDPDNKAAKRIEFRSADPTCNPYLAFPAMLMAGLDGIENEIDPGDVLDDDLFSMPEEEQAKLKQVPNSIEGALNALEEDHEFLLKGNVFTSDLLEAWLSYKRETEVDQVRTRPHPWEYYLTFNA

SEQ ID NO: 194294 - protein, 208 aa, Unknown
  Bacterial polypetide isolated from the Sargasso Sea
FKIDSTEGPYNTGKDYPNGNMGHRPGVKGGYFPVPPVDSAQDMRSEYLKAMKDMGIKVEKHHHEVAPSQHELGMYFGTLVDQADNLQLYKYAVHMVSHSFGKTATFMPKPVKGDNGSGMHVHQSIWKGDKALFSGDKYAGLSEIALNYIGGILKHAKAINAFSNATTNSYKRLIPGFEAPVLLAYSARNRSASCRIPITLSKKAARCE

SEQ ID NO: 194295 - protein, 296 aa, Unknown
  Bacterial polypetide isolated from the Sargasso Sea
KAEAYLKKTGVGDKAYFGPEPEFFVFDDVRYSNDMNHTGFQIDSSEGPYNTGKKYENGNMGHRPGIKGGYFPVPPVDSAQDMRSEYLKAMRDMGIKVEKHHHEVAPSQHELGMYFGTLVDQADNLQLYKYAVHMVTHSFGKTATFMPKPVKGDNGSGMHCHQSIWKGSTAVFSGNKYAGLSDTALHYIGGILKHARAINAFSNATTNSYKRLIPGFEAPVLLAYSARNRSASCRIPITQSKKAARCEVRFPDAAGNPYLTFSALLMAGLDGIKNKIDPGKSLDKDLYALSESEVKK

SEQ ID NO: 194296 - protein, 227 aa, Unknown
  Bacterial polypetide isolated from the Sargasso Sea
MSSEKIIKLIKDKEIEYLDLRFTDPRGKLQHLTMDGKLVDEAMLNDGVFFDGSSIAGWKAINESDMILKPDLKRQVIDPFTSHNTLVLFCDILDAVKKNPYERDPRSIAKKAEAYLKKTGIGDKAYFGPEAEFFVFDDVRYTNEMNHTGFQIDSSEGPYNTGKKYENGNMGHRPGIKGGYFPVPPVDSAQDMRGEFLKALRDMGIKTEKHHHEVAPSQHELGMYFDT

SEQ ID NO: 194297 - protein, 188 aa, Unknown
  Bacterial polypetide isolated from the Sargasso Sea
KGNYADLSDFALHYIGGILKHAPSLLAFCAPTTNSYKRLVPGFEAPVNIAYSQANRTASVRIPNNYTASPKAKRVEFRCPDPSSNPYLAFSAILMAGLDGVKNKINPGKPTDINIYEAPASILAKIPSTPGSLAESLNALEKDHKYLLAGDVFTKDNIETYISYKRENEVSPMDIRPHPHEFNLYYDV

SEQ ID NO: 194298 - protein, 226 aa, Unknown
  Bacterial polypetide isolated from the Sargasso Sea
MSASSVLKVMNDKEIEYVDLRFTDPRGKLQHVTMDSKVVDDSMLNDGVFFDGSSIAGWKAINESDMILKPDLSRTVVDPFTSHNTLNIFCDILDAVKKDPYERDPRTTAKKAEDYLKKSGIGDKAYFGPEPEFFVFDDVRYKNDMNETSFSIDSSEGPYNTGKKYENGNMGHRPGIKGGYFPVPPVDSAQDMRSEYLKAMKDMGIKVEKHHHEVAPSQHELGMYFN

SEQ ID NO: 194299 - protein, 243 aa, Unknown
  Bacterial polypetide isolated from the Sargasso Sea
MSAKNIQKTIKDKQIEYVDLRFTDPRGKLQHVTMDAKVVDNDMLEEGIFFDGSSIAGWKAINESDMILKPDLSRPVIDPFTSHNTLNIFCDVLDAVKKDPYERDPRGTAKKAEDYLKKTKIGDKAFFGPEPEFFVFDDVRYKNDMNETGFSIDSTEGPYNTGKKYENGNMGHRPGVKGGYFPVPPVDSAQDMRSEYLKAMKDMGIKVEKHHHEVAPSQHELGMYFGTLVNQADNIQLYKYAVH

SEQ ID NO: 194300 - protein, 139 aa, Unknown
  Bacterial polypetide isolated from the Sargasso Sea
MSAANVLKFIKEKEAEFVDLRFTDPRGKLQHLTMDVTVVDEDMLNNGVFFDGSSIAGWKAINESDMILKPDTSRMFMDPFTSHNTVVLFCDILDAIKKDPYERDPRGVAKKAEEYLKASGIGDKAFFGPEPEFFVFDDV

SEQ ID NO: 194301 - protein, 274 aa, Unknown
  Bacterial polypetide isolated from the Sargasso Sea
STEGPYNSGKKYENGNMGHRPVVKGGYFPVPPVDSAQDMRGEFLKGLRDVGITVEKHHHEVAPSQHELGMLFGTLVNQADNVQLYKYVVQMVAHSFGKTATFMPKPVKGDNGSGMHTHQSIWKGDTPVFSGDKYSGLSETALHYIGGILKHAKAINAFSNATTNSYKRLIPGFEAPVLLAYSARNRSASCRIPITLSKKGARCEIRFPDAAGNPYLTFSAMLMAGLDGIKNKIHPGESFDKDLYTLPEEEIKNIPTVCGSLREAMESLDTDREF

SEQ ID NO: 194302 - protein, 213 aa, Unknown
  Bacterial polypetide isolated from the Sargasso Sea
MPKPIAGDNGTGMHCNMSIWKDGKPLFAGDKYADLSDEALWFIGGILKHAKSLNAFTNPSTNSYKRLIPGFEAPVLRAYSARNRSGCVRIPWTESPKAKRVEARFPDPSSNPYLCFSALMMAGLDGIKNKIDPGEAMDKNLYDLPAEELADIPTVCGSLREAIECLEADHEYLLAGDVFTKDQIEGYIELKMEEIETYEHTPHPVEYGMYYSC

SEQ ID NO: 194303 - protein, 214 aa, Unknown
  Bacterial polypetide isolated from the Sargasso Sea
MSAKDVLKLMKSKNIEFVDLRFTDPRGKLQHLTMDTTIVDEGMLNEGVFFDGSSIAGWKAINESDMILKPDLSRKVIDPYTSHNTLILFCDILDAVKRDPYERDPRGIAKKAEAYLKKTGIGDTAYFGPEPEFFVFDDVRIKNDMNETSFSIDSSEGPYNSGKSYENGNMGHRPGVKGGYFPVPPVDSAQDMRGEYLKGLRDVGITVEKHHHEV

SEQ ID NO: 194304 - protein, 181 aa, Unknown
  Bacterial polypetide isolated from the Sargasso Sea
SGLSQTALYYIGGILKHAKAINAFSNATTNSYKRLIPGFEAPVLLAYSARNRSASCRIPITLSKKGARCEIRFPDAAGNPYLTFAAMLMAGLDGIKKKINPGKSFDKDLYTLSENEIKNIPTVCGSLREAMESLDTDRDFLKQGNVFTDDQIDAYIALKFEEIYNLEHTPHPIEFDMYYSS

SEQ ID NO: 194305 - protein, 275 aa, Unknown
  Bacterial polypetide isolated from the Sargasso Sea
GPYNSGRKYENGNMGHRPGIKGGYFPVPPVDSAQDMRGEYLKGLKDVGITVEKHHHEVAPSQHELGMLFSTLVNQADNVQLYKYVVQMVSHSFGKTATFMPKPVKGDNGSGMHTHQSIWKGKTPVFSGNKYAGLSQTALYYIGGILKHAKAINAFSNATTNSYKRLIPGFEAPVLLAYSARNRSASCRIPITLSKKGARCEIRFPDASGNPYLTFSAMLMAGLDGIKNKIDPGKSLDKDLYALTENEVKKVPTVCGSLREAMESLDRDRAFLKKG

SEQ ID NO: 194306 - protein, 150 aa, Unknown
  Bacterial polypetide isolated from the Sargasso Sea
MSKSPQDVLSQIKDEGIELIDLKFTDIHGKWQHLTLTSDMIEEDSFTEGLAFDGSSIRGWKAINASDMSMVPDASTAWIDPFYKHKTLSMICSIQEPRSGEPYDRCPRSLAQKALKYLESTGIADTAFFGPEPEFFLFDDVRYDSKEGSC

SEQ ID NO: 194307 - protein, 291 aa, Unknown
  Bacterial polypetide isolated from the Sargasso Sea
LKKSGVGDTAYFGPEPEFFVFDDVKYNNDMNKTGFEIDSIEGPYNTGKKYENGNMGHRPGVKGGYFPVPPVDSSQDLRSECLKAMKDMGVKVEKHHHEVAPSQHELGTLFNTLTYQGDGMQIYKYAVQNVAQSFGKSATFMPKPVKGDNGSGMHTHQSIWKDGKPLFAGKKYAGLSDQCLHYIGGIIKHARAINAFSNATTNSYKRLIPGFEAPVLLVYSSRNRSASCRIPFSTSEKGKRVEVRFPDAAGNPYLTFSAMLMAGLDGIKNKINPGDALDKDLYALPENELSG

SEQ ID NO: 194308 - protein, 221 aa, Unknown
  Bacterial polypetide isolated from the Sargasso Sea
MFDGSSIHGWKGIEASDMILMPVDETAVLDPFTEEPTLILVCDIVEPSTMQGYDRDPRSIAKRAEEFLKGTGIGDTVFVGPEPEFFIFDQVKFKSDISGSMFKIYSEQGSWMTDQDVEGGNKGHRPAVKGGYFPVPPCDHDHEIRTAMCNAMEEMGLVVEVHHHEVATAGQNEIGVKFNTLVAKADEVQTLKYCVHNVADAYGKTATFMPKPLYGDNGSGM

SEQ ID NO: 194309 - protein, 210 aa, Unknown
  Bacterial polypetide isolated from the Sargasso Sea
IRLPRSSRRNYCGVGSDEVYGRSISEDHATACMEAGLNISGTNAEVMPGQWEFQIGPVGAPNIGDEIWIARWLLYRIAEDYNISATLTPKPVKGDWNGAGMHTNFSTKQMREDDGYSAIIAGCEALEKNAEFHVQNYGDGIEDRLTGAHETQKFDTFSYGVSDRGASIRIPWQVEKDQKGYLEDRRPNANADPYVIATVMIDTICSAASA

SEQ ID NO: 194310 - protein, 196 aa, Unknown
  Bacterial polypetide isolated from the Sargasso Sea
MSSSEVLKLMKDKEVEYVDLRFTDPRGKLQHLTMDAKMVDKDMLNDGVFFDGSSIAGWKAINESDMILKPDLDRKVIDPFTSHNTLILFCDVLDAVKKTPYERDPRSIAKKAEVYLKKSGIGDKAYFGPEAEFFVFDDVKYKNEMNETGFKIDSIEGPYNTGKDYPNGNMGHRPGIKGGYFPRPPVDSAQDMRGEF

SEQ ID NO: 194311 - protein, 235 aa, Unknown
  Bacterial polypetide isolated from the Sargasso Sea
INDSDMILKPDYQGTVVDPFTSHNTLNIFCDILDAIKKDLYERDPRGTAKKAEEYLKKTGVGDKAYFGPEPEFFVFDDVRYSNDMNHTGFQIDSSEGPYNTGKKYENGNMGHRPGIKGGYFPVPPVDSAQDMRSEYLKAMKDMGIKVEKHHHEVAPSQHELGMYFGTLVDQADNLQLYKYAVHMVTHSFGKTATFMPKPVKGDNGSGMHCHQSIWKGSTAVFSGNKYAGLSDTAL

SEQ ID NO: 194312 - protein, 192 aa, Unknown
  Bacterial polypetide isolated from the Sargasso Sea
ITVEKHHHEVAPSQHELGMMFGTLVDQADNVQLYKYVVQMVSHSFGKTATFMPKPVKGDNGSGMHTHQSIWKNDTPIFSGDKYSGLSETALHYIGGILKHAKAINAFSNATTNSYKRLIPGFEAPVLLAYSARNRSASCRIPITLSKKGARCEIRFPDASGNPYLTFASMLMAGLDGIKNKINPGKSFDKDL

SEQ ID NO: 194313 - protein, 195 aa, Unknown
  Bacterial polypetide isolated from the Sargasso Sea
HLVKSGSLFAGKEYAGLSDTCLHYIGGIIKHAKAINAFSNATTNSYKRLVPGFEAPVLLAYSARNRSASCRIPYAPSANGKRVEVRFGDASGNPYFTFAAMLMAGIDGIKNKIHPGDATDKDLYDLPEKDLKGIPTVSSSLRESLDSLDKDREFLKAGNVFTDDLIDSYISLKMDEVLQFEHTPHPVEFKMYYSV

SEQ ID NO: 194314 - protein, 300 aa, Unknown
  Bacterial polypetide isolated from the Sargasso Sea
MGHRPLVKGGYFPVPPVDALQDCRSAMITTLHEVGVQCEVHHHEVATAGQCEIGTLFNTLVKKADEVQKYKYVVQNVAHAFGKTATFMPKPVVGDNGTGMHVHQSLSKDGKNIFAGDKYGHMSQEALWYIGGIIKHARALNAFTNASTNSYKRLIPGFEAPVILTYSARNRSASIRIPYVMSDKARRIEVRFPDSTANPYLAFSAMMMAGLDGIKNKIDPGPAMDKDLFAISREEEALLPTVAPGLDIALDALDKDREFLNTGDVFTNTMIDSYIDLKMDEVQRLRQSTHPCEIEMYYSL

SEQ ID NO: 194315 - protein, 162 aa, Unknown
  Bacterial polypetide isolated from the Sargasso Sea
LAFCAPTTNSYKRLVPGFEAPVNIVYSQRNRTASVRIPAYSQSPKSKRMEFRCPDPSANPYLAFSAMLMAGLDGIKNKINPGEPTDINLYAASDDVLSKIQSTPGSLAESLEALENDHDFLLEGDVFTKDVIDTYISYKKESEVDPINIRPHPHEFKLYYDV

SEQ ID NO: 194316 - protein, 308 aa, Unknown
  Bacterial polypetide isolated from the Sargasso Sea
MFDGSSIAGWKAINESDMSLIPDPLTGVMDPFSAQPSMILFCDVQEPTTGGNYLRDPRSIAKNAEAYLASTNIGDTSYFGPEPEFFVFDDVRYNVEMSSCFYEFESEEGPYTSGNTIDDGNLGHRPTIKGGYFPVPPVDSASDLRAEMVTVMGEMGLHMDKHHHEVAPSQHELGLTFQTLVKCADNVQIYKYVTQMVAHTYGKTATFMPKPVAGDNGSGMHTHQSIWKNGKPVFAGNEYADLSDTALHYIGGIIKHARAINAFSNPTTNSYKRLIPGFEAPVLLAYSARNRSASCRIPFSPSPNGKRI

SEQ ID NO: 194317 - protein, 236 aa, Unknown
  Bacterial polypetide isolated from the Sargasso Sea
MSAKDVLKLMKSKNIEFVDLRFTDPRGKLQHLTMDTTIVDEGMLNDGVFFDGSSIAGWKAINESDMILKPDLSRKVIDPYTSHNTLILFCDILDAVKRDPYERDPRGIAKKAEAYLKKTGIGDTAYFGPEPEFFVFDDVRIKNDMNETSFSIDSSEGPYNSGKSYDNGNMGHRPGVKGGYFPVPPVDSAQDMRGEYLKGLRDVGITVEKHHHEVAPSQHELGMLFGTLVDQADNVQ

SEQ ID NO: 194318 - protein, 174 aa, Unknown
  Bacterial polypetide isolated from the Sargasso Sea
YIIFGGILKHAKAINAFANATTNSYKRLIPGFEAPVLLAYSARNRSASCRIPITLSKKGARCEIRFPDASGNPYLTFAAMLMAGIDGIKNKIHPGESFDKDLYDLPPEEVKSIPTVCGSLREAMESLDKDREFLTQGGVFTDDQIDAYIALKFEEIHKFEHAPHPVEFEMYYSC

SEQ ID NO: 194319 - protein, 268 aa, Unknown
  Bacterial polypetide isolated from the Sargasso Sea
ETTVNITCDVIEPSTMQGYERCPRSIAKRAEEYLKSTGIADTVLFGPEPEWFMFDDVRFKNTMSTAFFAIDSAEAAWNSDKVYEGGNKAHRPGIKGGYFPVPPVDQHHDIRSAMCVVLEEMGQVVEAHHHEVATAGQNEIATRFNTLTKKADEIQVLKYVIHNVANLYGKTVTFMPKPLVGDNGSGMHCHQSLAKDGVNLFAGDKYAGLSETALYYIGGIIKHAKAINAFTNPSTNSYKRLVPHFEAPVMLAYSARNRSASIRIPLVP

SEQ ID NO: 194320 - protein, 215 aa, Unknown
  Bacterial polypetide isolated from the Sargasso Sea
MSAANVLKYIKEKDAEFVDLRFTDPRGKLQHLTMDASIVDEGMLNEGVFFDGSSIAGWKAINESDMILKPDTARMFMDPFTSHNTVVLFCDILDAIKKDPYERDPRGVAKKAEEYLKASGIGDKAFFGPEPEFFVFDDVRIKNDMNESGFKIDSKEGPYNSGKEYENGNMGHRPQIKGGYFPVPPVDSEQDMRGEYLKNLKEVGIKVKNITMRCS

SEQ ID NO: 194321 - protein, 178 aa, Unknown
  Bacterial polypetide isolated from the Sargasso Sea
MTASKINKLIKDKEIEYVDLRFTDPRGKLQHLTMDASVVDEDMLDQGVFFDGSSIAGWKAINESDMILKPDLSRPIIDPFNSHTTLNIFCDIMDAVKKDPYGRDPRGTAKKAENYLKDSGIGDKAYFGPEPEFFVFDDVRFKNDMNETSFSIDSSEGPYNTGKKYENGNLGHRPGIKG

SEQ ID NO: 194322 - protein, 265 aa, Unknown
  Bacterial polypetide isolated from the Sargasso Sea
MRDMGVKVEKHHHEVAPSQHELGTLFNTLVNQGDAMQIYKYAVHNVAHSFGKTATFMPKPVKNDNGSGMHVHQSIFSGEKPLFAGDKYAGLSDTCLYYIGGIIKHARALNAFSNASTNSYKRLIPGFEAPVLLAYSSRNRSASCRIPFSDSKKGKRVEVRFGDASGNPYLTFASMLMAGIDGIKNKIKPGKPMDQDLYALGPEELKGIPTVCSSLRQACVALDEDRKFLTEGGVFTDDQIDAYISLKMEEGNKLSDTPHPIEFRM

SEQ ID NO: 194323 - protein, 171 aa, Unknown
  Bacterial polypetide isolated from the Sargasso Sea
MGGILKHAKAINAFSNATTNSYKRLIPGFEAPVLLAYSARNRSASCRIPITLSKKAARCEIRFGDAAGNPYLTFAAMLMAGLDGIKNRIDPGKSFDKDLYALSENEVKKIPTVCGSLREAMESLDKDRDFLKQGNVFTDDQIDAYIALKFEEIHNFEHTPHPIEFDMYYSC

SEQ ID NO: 194324 - protein, 298 aa, Unknown
  Bacterial polypetide isolated from the Sargasso Sea
MTASSVLKLIKDKEIEYVDLRFTDPRGKLQHLTMDSTIVDEGMLNDGVFFDGSSIAGWKAINESDMILKPDLTRKVIDPFTSHNTLILFCDILDAVKRNSYERDPRGIAKKAEAYLKKTGIGDKAYFGPEPEFFVFDDVRIKNDMNETSFAIDSSEGPYNSGKKYDNGNMGHRPGVKGGYFPVPPVDSAQDMRGEYLKGLRDVGITVEKHHHEVAPSQHELGMLFGTLVDQADNVQLYKYVVQMVSHSFGKTATFMPKPVKGDNGSGMHTHQSIWKGKTPVFSGNKYAGLSQTALYYI

SEQ ID NO: 194325 - protein, 303 aa, Unknown
  Bacterial polypetide isolated from the Sargasso Sea
TWHHFSNHINTFEMDVFEEGIGFDGSSIRCFQSIEASDMILIPDIETAFVDPFFTDPTLVLICDIQDPITGQKYDKDPRYVAKKAEEFVKSSGIGDSIFFGAEAEFFLFNDVRISTDPSNSFFSVDSGEAIWNKGSDERPNLGYHVRNKGGYFPCPPHDTMQDVRSEMVNHMVSIGMNVEAQHHEVATAGQQEIDLRFDTLLSHADSLQKYKYVVRNTAKSNGLSATFMPKPLSNDNGSGMHCHQSIWSNGKPIFYADSGYANLSDEAKFYIGGLLKHAPSLLAFTNPTINSFKRLVPGYEAP

SEQ ID NO: 194326 - protein, 176 aa, Unknown
  Bacterial polypetide isolated from the Sargasso Sea
MSASKVLKLMKEKEVEYLDLRFTDPRGKLQHLTMDGKMVDEEMLNEGVFFDGSSIAGWKAINESDMILKPDLERQVIDPFNSHSTLILFCDILDAVKKNPYERDPRSIAKKAEAYLKKTGIGDKAYFGPEAEFFVFDDVKFKNDMNETGFKIDSSEGPYNTGKNYDNGNMGHRPGI

SEQ ID NO: 194327 - protein, 271 aa, Unknown
  Bacterial polypetide isolated from the Sargasso Sea
MNKTSFEIDSNEGPYNTDKKYEGGNLGHRPGIKGGYFPVPPVDSAQDLRSECLKAMKDMGVRVEKHHHEVAPSQHELGTLFDTLVTNADNMQIYKYAVQQVANSFGKSATFMPKPVKGDNGSGMHTHQSIWKDGKPLFAGDEYAGLSKTCLHYIGGIIKHAKAINAFSNSTTNSYKRLIPGFEAPVLLAYSSRNRSASCRIPFTNSPKGKRVEVRFPDAAGNPYLTFASMLMAGLDGIKNKIDPGKPFDKDLYALSEDELKGVPTVCGSLR

SEQ ID NO: 194328 - protein, 197 aa, Unknown
  Bacterial polypetide isolated from the Sargasso Sea
MSIWKDGKPLFAGDKYADLSDEALWFIGGILKHAKSLNAFTNPSTNSYKRLIPGFEAPVLRAYSARNRSGCVRIPWTESPKAKRVEARFPDPSSNPYLCFSALMMAGLDGIKNKIDPGEAMDKNLYDLPAEELADIPTVCGSLREAIECLEADHEYLLAGDVFTKDQIEGYIELKMEEIETYEHTPHPVEYGMYYSC

SEQ ID NO: 194329 - protein, 279 aa, Unknown
  Bacterial polypetide isolated from the Sargasso Sea
DVRSSMCLAMQDMGLGVEVHHHEVGTAGQGEIGVRFDTLVSKADQTQIYKYCVHNVAHAHGLTATFMPKPLVGDNGSGMHVHQSIFKGGDNTFAGDEYGGLSETALYYIGGIFKHARALNAFTNASTNSYKRLVPGFEAPVMLAYSARNRSASCRIPYVSNPKARRIEVRFPDPTANPYLAFSAMLLAGLDGIQNRIHPGGPMDKDLYDLPPEEEKEIATVAHSLDQALDALDADREFLKVGGVMSDDMIDGYIDLKMEQVQRLRMATHPAEFDMYYSV

SEQ ID NO: 194330 - protein, 270 aa, Unknown
  Bacterial polypetide isolated from the Sargasso Sea
ADSDLILKPDPSTFAIIPWLTEKKTARLLCDVYWGGGRGRLESDPRGICQKAEAFVKTQGFDFSNWGPEVEFFVFDKVHWDVLTPYKGQSYSIESSESPWSQEGTGYPMGLQEGYYPSTPSDTLAPFRNECVDVLNDNFGILCDNHHHEVATAGQCEIDIKYDLMTNSADGAQSYKYVVRNVAQQFGKVATMMPKPISMDAGSGMHTNVSLWKKDDNTFYDKDEVLELSQIGRYFCGGVMEHAKGLTAITNPTTNSYHRLVPGYEAPVYI

SEQ ID NO: 194331 - protein, 194 aa, Unknown
  Bacterial polypetide isolated from the Sargasso Sea
WKGDTPVFSGDAYAGLSETALHYIGGILKHAKAINAFANATTNSYKRLIPGFEAPVLLAYSARNRSASCRIPITLSKKGARCEIRFPDASGNPYLTFAAMLMAGIDGIKNKIHPGESFDKDLYDLPPEEVKSIPTVCGSLREAMECLDKDREFLTQGNVFTDDQIDAYIALKFEEIHKFEHAPHPVEFEMYYSC

SEQ ID NO: 194332 - protein, 150 aa, Unknown
  Bacterial polypetide isolated from the Sargasso Sea
MSAKDVLKLIKSKNIEYVDLRFTDPRGKLQHLTMDTTIVDEGMLNDGVFFDGSSIAGWKAINESDMILKPDLSRKVIDPYTSHNTLILFCDILDAVKRNPYERDPRGIAKKAEAYLKKTGIGDTAYFGPEPEFFVFDDIRIKNDMNETSF

SEQ ID NO: 194333 - protein, 235 aa, Unknown
  Bacterial polypetide isolated from the Sargasso Sea
NVQLYKYVVQMVSHSFGKTATFMPKPVKGDNGSGMHTHQSIWKGKNPIFSGNKYAGLSETALHYIGGILKHAKAINAFSNATTNSYKRLIPGFEAPVLLAYSARNRSASCRIPITLSKKGARCEIRFPDAAGNPYLTFSAMLMAGLDGIKNKINPGKPLDEDLYALPEDKVKNIPTVCGSLREAMENLDRDRGFLKQGGVFTDDQIDAFIALKFEEIYNLEHTPHPMEFEMYYSS

SEQ ID NO: 194334 - protein, 248 aa, Unknown
  Bacterial polypetide isolated from the Sargasso Sea
MSASSVKKIIKDKEIEYVDLRFTDPRGKLQHVTMDATVVDEDMLNEGVFFDGSSIAGWKAINESDMILKPDLSRTVVDPFTSHNTLNIFCDILDAIKKDPYERDPRGTAKKAEEYLKKTGVGDKAYFGPEPEFFVFDDVRYSNDMNHTGFQIDSSEGPYNTGKKYENGNMGHRPGIKGGYFPVPPVDSAQDMRSEYLKAMKDMGIKVEKHHHEVAPSQHELGMYFGTLVDQADNLQLYKYAVHMVTHS

SEQ ID NO: 194335 - protein, 284 aa, Unknown
  Bacterial polypetide isolated from the Sargasso Sea
AVTKEPYGRDPRGTARKAEALVKSSGVGDTIYMGPEAEFFVFDDVKFSVEMNKSMFAIDSTEGPYNTDRDYETGNLGHRPGIKGGYFPVPPVDSAQDIRSEFLEELKNLGLKMEKHHHEVAPSQHELGLMFDTLLKQADNMQLYKYGVHMVANSFGKTATFMPKPVKGDNGTGMHTHQSIWKDGKPLFAGDKYAGLSDMALNYIGGIIKHGKALNAFTNASTNSYKRLIPGFEAPVILVYSARNRSASCRIPVSDSPKGKRVEVRFPDPSANPYLAFSAMLMAG

SEQ ID NO: 194336 - protein, 287 aa, Unknown
  Bacterial polypetide isolated from the Sargasso Sea
ESSDLVLKPVCVKPNPLDGIGNYLALCEVLDTEHKPVETNHRAKLAELMDELSDEFDPYVGMEQEYTLFKKDKTPLGWPDHGNPQPQGPYYCGVGTDEVFERDFIEEHTDACINADIKICGTNAEVMPGQWEYQIGYRDIEGEKADPLTISDEIWISRWLLYRLSEEYNIIAKLDAKPVKGDWNGAGMHTNFSTKQTRDKTSGLEAIHTAVKALENNHNAHITKYGFGLEDRLTGEHETCRIDQFKSGVADRGSSIRIPLHISEAGCGYFEDRRPSANANPYEVCTM

SEQ ID NO: 194337 - protein, 328 aa, Unknown
  Bacterial polypetide isolated from the Sargasso Sea
ILMPDDATAVVDPFTEEVPVNLRCNIVEPSTMQGYERDPRSVALRAEEYLKSTGIGDASFFGPEPEFFVFDNVQWKADMSGAMYKIDAEEAAWASSAEFESGNMAHRPGVKGGYFPVPPIDSAMDLRTAMCETMGAMGLQVEVHHHEVATACQNEIGVKFNTLVNKADEVQILKYVVHNVAHAYGKTATFMPKPLVGDNGSGMHCHQSIWKNGENLFAGNGYAGLSDQALYYIGGIIKHARAINAFANASTNSYKRLVPGFEAPVMLAYSARNRSASIRIPYVSSAKGRRIEVRFPDPTANPYLAFSAMLMAGLDGIQNKIDPGKLQV

SEQ ID NO: 194338 - protein, 255 aa, Unknown
  Bacterial polypetide isolated from the Sargasso Sea
MSKSPQDVLSQIKDEGIELIDLKFTDIHGKWQHLTLTSDMIEEESFTEGLAFDGSSIRGWKAINASDMSMVPDASTAWIDPFYKHKTLSMICSIQEPRSGEPYDRCPRSLAQKALKYLESTGIADTAFFGPEPEFFLFDDVRYDSKEGSCFYSVDTIEAPWNTGRIEEGGNLGYKIQYKEGYFPVSPNDTAPDIRSEMLLLMGELGIPTEKHHHEVAGAGQHELGMKFDSLINSADNVMTYKYVVRNVTKKYGKT

SEQ ID NO: 194339 - protein, 213 aa, Unknown
  Bacterial polypetide isolated from the Sargasso Sea
YAKPVAGDNGSGMHIHQSIWKGDTPVFSGDAYAGLSETALHYIGGILKHAKAINAFANSTTNSYKRLVPGFEAPVLLAYSARNRSASCRIPITLSKKGARCEIRFPDASGNPYLTFAAMLMAGLDGIKNKIHPGESFDKDLYELPPEEVKAIPTVCGSLREAMESLDKDREFLTQGDVFTDDQIDAYIALKFEEIHKFEHAPHPVEFEMYYSS

SEQ ID NO: 194340 - protein, 243 aa, Unknown
  Bacterial polypetide isolated from the Sargasso Sea
MTVVLIIGQRPGYKGGYFPAAPIDTMHGIRGEMVRIMVDQLGFHVEKHHHEVATGGQGEIDLKYDTMLSMADKVMRYKYVVKNVAQSYGKVATFMPKPIYNDNGTGMHTHQSIWKDGKPLFAGNEYAGLSKLALNYIGGLIKHGQALMGLCAPTSNSYKRLVPGFEAPTILGLSARNRTAAFRVPMYDPDNKAAKRVEFRSADPTCNPYLAFPAMLMAGLDGIENEIDPGDVLDEDLFSLSDE

SEQ ID NO: 194341 - protein, 177 aa, Unknown
  Bacterial polypetide isolated from the Sargasso Sea
MSASSVKKIIKDKEIEYVDLRFTDPRGKLQHVTMDATVVDEDMLNEGVFFDGSSIAGWKAINESDMILKPDLSRTVVDPFTSHNTLNIFCDILDAIKKDPYERDPRGTAKKAEEYLKKTGVGDKAYFGPEPEFFVFDDVRYSNDMNHTGFQIDSSEGPYNTGKKYENGNMGHRPGIK

SEQ ID NO: 194342 - protein, 244 aa, Unknown
  Bacterial polypetide isolated from the Sargasso Sea
MSASKVLKLIKDKEIEYVDLRFTDPKGKLQHLTMDGNMVDEEMLNGGVFFDGSSIAGWKAINESDMILKPDLNRQIIDPFTSHNTLILFCDVLDAVKKDPYERDPRSIAKKAEAYLKKTGIGDKAYFGPEAEFFVFDNVKFKNDMNETGFKIDSSEGPYNSGKDYENGNMGHRPGIKGGYFPVPPVDSAQDMRGEFLKALKDMGIKVEKHHHEVAPSQHELGIYFGTLTDQADNMQLYKYGVQM

SEQ ID NO: 194343 - protein, 153 aa, Unknown
  Bacterial polypetide isolated from the Sargasso Sea
VGAPDIGDHIWVARWLLYRIAEDWNISATLNPKPVKGDWNGAGMHTNFSTKQMREDGGYEAIVAGCEALGKNADLHVKNYGANIEDRLTGDHETQSFDTFSYGVSDRGASIRIPWQVEVDKKGYLEDRRPNANGDPYVIAMLMIDTVCSAASS

SEQ ID NO: 194344 - protein, 201 aa, Unknown
  Bacterial polypetide isolated from the Sargasso Sea
MHTHQSIWKGDTPVFSGDKYAGLSETALHYIGGILKHAKAINAFANATTNSYKRLIPGFEAPVLLAYSARNRSASCRIPITLSKKGARCEIRFPDASGNPYLTFAAMLMAGIDGIKNKIHPGESFDKDLYDLPPEEVKSIPTVCGSLREAMESLDKDREFLTQGDVFTDDQIDAYIALKFEEIHKFEHAPHPVEFEMYYSC

SEQ ID NO: 194345 - protein, 205 aa, Unknown
  Bacterial polypetide isolated from the Sargasso Sea
MGRIKAEYIWMDGHRPTSKLRSKTKILDKPVTKLEDLPEWGFDGSSTMQAQGNDSDCALIPVCFTPDPIRRGDNILVMCEVNNADGTPHKTNTRAQLRKVAEKYSDQDAWFGIEQEYTFFQGRNPLGWPQGGYPAPQGPFYCGVGADEVYGREIVEDHMEACMDAGIMISGINAEVMPGQWEFQVGPLGPLQVSDELWIARWVII

SEQ ID NO: 194346 - protein, 261 aa, Unknown
  Bacterial polypetide isolated from the Sargasso Sea
GDNILVMCETFLTDQETPHPTNTRALARAAEEKYGDQDPWFGLEQEYTMIDPETGWPAGFPPNGFPAPQGPYYCGVGALKIHGRAAVEQHTTLCIEAGLKISGTNAEVMPGQWEFQIGPAGTVEVGDHLWIARYLLYRVGEEHNIEISIEAKPMKGDWNGAGMHTNFSTSAMREGFEAITAACESLGAPGVPEKHLAGYGVGIEDRLTGEHETQRYDQFSYGVSDRGASIRIPWQVSQAQKGYIEDRRPNANADPYVVAAL

SEQ ID NO: 194347 - protein, 218 aa, Unknown
  Bacterial polypetide isolated from the Sargasso Sea
DIYAQPLPGENGSGMHVHLSIFNDENTNAFYDKNDPQHLSGTAKHFIAGVLDHAREIALVTNQTYNSYKRLVPGYEAPVYIAWAERNRSASVRIPLYKPGKEVATRMELRFPDPTCNPYLAFSVMLSAGLDGLTNKTGIPDEMTMDLYKLSNSDRKKLNIEALPHDLFEAVEVAESSEFLKEALGEDVHGKLIETKHSEVDKFRLHVSDKDLREHLIL

SEQ ID NO: 194348 - protein, 297 aa, Unknown
  Bacterial polypetide isolated from the Sargasso Sea
LLKKVKNEDIKMVDLRFTDMPGSTHHISIPFKYLKEDLFKDGVGFDGSSVRGFQSIENSDMAMVPDVTTAYIDPFYSEKTIAFYCDVVDPISYESYEKDPRYIAKKAEKYLKSSGMGDTAYFGPEAEFFVFNDVKYDSGSNFSFHEVDSTEGAWNTGKDENPNLGHKPRHKGGYFPLPPSDSLQDVRTEMVLTMEEIGINVEASHHEVATGGQCEIDLEFSPLLSMADDLLRYKYVVKNVAKQYGMTATFMPKPLFEDNGSGMHVHSSIWKKNKTLMYKKGNYADLSDFALHYIGGI

SEQ ID NO: 194349 - protein, 255 aa, Unknown
  Bacterial polypetide isolated from the Sargasso Sea
MSAEKVLKFIKEKEAEFVDLRFTDPRGKLQHLTMDSTVVDADMLNEGVFFDGSSIAGWKAINESDMILKPDTSRMFMDPFTSHNTVVLFCDILDAIKKDPYERDPRGVAKKAEEYLKSSGIGDKAFFGPEPEFFVFDDVRIKNDMNECGFKIDSKEGPYNSGKEYESGNMGHRPPIKGGYFPVPPVDSEQDMRGEYLKNLKEVGIKVEKHHHEVAPSQHELGMYFGTLVNQADNVQLYKYVVQMVTHSFGKTATF

SEQ ID NO: 194350 - protein, 280 aa, Unknown
  Bacterial polypetide isolated from the Sargasso Sea
KKVPIILGKEYENGNMGHRPGVKGGYFPVPPVDSEQDMRSEYLKNLKEVGIKVEKHHHEVAPSQHELGMYFGTLVDQADNVQLYKYVVQMVTHSFGKTATFMPKPVAGDNGSGMHTHQSIWKGDTPVFSGDAYSGLSETALHYIGGILKHAKAINAFSNATTNSYKRLIPGFEAPVLLAYSARNRSASCRIPITLSKKGARCEIRFPDASGNPYLTFAAMLMAGIDGIKNKIHPGESFDKDLYELPPEEVKSIPTVCGSLREAMESLDKDREFLTQGGVF

SEQ ID NO: 194351 - protein, 288 aa, Unknown
  Bacterial polypetide isolated from the Sargasso Sea
LQPDFDSAVIDPFTAQPSLILFCDIIEPSTGKRYDRDPRSTAIRAEEYMNKSGIGDAVYFGPEAEFFVFDDVKWNVSMNHTGYKIDSEEGPYNSGEDFDGGNIGHRPSVKGGYFPVPPVDSMTDIRAEMVTSMMEMGLPMEKHHHEVAPSQNELGFKFGPMIKAADWIQMYKYCVHMVAHSYGKTATFMPKPIVDDNGSGMHCHQSIWKGKTPVFAGKGYAGLSDTCLYYIGGIIKHAKALNAFTNASTNSYKRLVPGFEAPVLLAYSGRNRSASCRIPYATSKNAKR

SEQ ID NO: 194352 - protein, 225 aa, Unknown
  Bacterial polypetide isolated from the Sargasso Sea
MTASNVLKLIKDKEVEYVDLRFTDPRGKLQHLTMDATVVDEGMLNDGVFFDGSSIAGWKAINESDMILKPDLGRKVVDPFTSHNTLILFCDILDAVKKDPYERDPRGIAKKAEAYLKKTGIGDKAYFGPEPEFFVFDDVRIKNEMNETSFAIDSAEGPYNSGRKYENGNMGHRPGIKGGYFPVPPVDSAQDMRSEYLKGLRDVGIKVEKHHHEVAPSQHELGMYF

SEQ ID NO: 194353 - protein, 179 aa, Unknown
  Bacterial polypetide isolated from the Sargasso Sea
MSSKDILKLIKDKQVEFVDLRFTDPKGKLQHLTMDSTVVDEDMLDKGVFFDGSSIAGWKAINESDMILKPDLDRPIIDPFNSHTTLNIFCDILDAVKKDPYERDPRGTAKKAEAYLKKTGIGDKSYFGPEPEFFVFDDVRYKNDMNETSFSIDSSEGPYNTGKKYENGNMGHRPGVKGG

SEQ ID NO: 194354 - protein, 170 aa, Unknown
  Bacterial polypetide isolated from the Sargasso Sea
MSASSVKKIIKDKEIEYVDLRFTDPRGKLQHVTMDATVVDEDMLNEGVFFDGSSIAGWKAINESDMILKPDLSRTVVDPFTSHNTLNIFCDILDAIKKDPYERDPRGTAKKAEEYLKKTGVGDKAYFGPEPEFFVFDDVRYSNDMNHTGFQIDSSEGPYNTGKKYENGNM

SEQ ID NO: 194355 - protein, 260 aa, Unknown
  Bacterial polypetide isolated from the Sargasso Sea
KHHHEVAPSQHELGMLFGTLVDQADNVQLYKYVVQMVSHSFGKTATFMPKPVKGDNGSGMHIHQSIWKGKTPLFSGNKYAGLSQTALYYIGGILKHAKAINAFSNATTNSYKRLIPGFEAPVLLAYSARNRSASCRIPITLSKKGARCEIRFPDAAGNPYLTFAAMLMAGLDGIKNKIDPGKSFDKDLYTLSENEIKNIPTVCGSLREAMESLDTDRKFLKQGNVFTDDQIDAYIALKFEEIYNLEHTPHPIEFDMYYSC

SEQ ID NO: 194356 - protein, 218 aa, Unknown
  Bacterial polypetide isolated from the Sargasso Sea
PLGLLKKNTDIEGFLGPQGPYYCGVGAGKVFGRKIAEKVLENALKCRLNITGLNFEVAPGQCELQLCEKGLKAADDLMLLRYLLVRTAEDFNVGIELHPKPVKGDWNGSGCHTNYSTKSMRENGGMKHIMEAIKKLELKHKEHISVYGIDNDQRLTGKHETASVDKFSYGVADRGSSIRIPRFTDRDGKGYLEDRRPASNMDPYLVTSKIVETTILNN

SEQ ID NO: 194357 - protein, 245 aa, Unknown
  Bacterial polypetide isolated from the Sargasso Sea
VFRYFDNQADNVQLYKYAVQMVTHSFGKTATFMPKPVKGDNGSGMHCHQSIWKGSTPVFMGKEYAGLSKEALYYIGGILKHARAINAFSNATTNSYKRLIPGFEAPVILAYSARNRSASCRIPVIMNPKAARMEIRFPDAAGNPYLTFASMLMAGIDGIKNKIDPGKAFDQDLYSLSEDEVKKLPTVCGSLREAMQNLDKDRKFLTEGGVFTDDQINAYIELKFQEIYNFEHTPHPIEFEMYYSG

SEQ ID NO: 194358 - protein, 174 aa, Unknown
  Bacterial polypetide isolated from the Sargasso Sea
MSVEKALELIKESEAKFVDLRFTDTKGKEQHVSIPAGLVDEEFFEEGKMFDGSSIAGWKGINESDMVLLPDADSCVVDPFAEETQVNIRCDIVEPSTMEGYERDPRSVARRAEEFLKSTGIGDTVFFGPEPEFFLFDDVKFHTDMAGSFYKIDSSEAKWNSGEEFEGGNMAHRP

SEQ ID NO: 194359 - protein, 261 aa, Unknown
  Bacterial polypetide isolated from the Sargasso Sea
EKHHHEVAPSQHELGMYFGTLVNQADNVQLYKYVVQMVTHSFGKTATFMPKPVAGDNGSGMHIHQSIWKGDTPVFSGEAYAGLSETALHYIGGILKHAKAINAFANSTTNSYKRLIPGFEAPVLLAYSARNRSASCRIPITLSKKGARCEIRFPDAAGNPYLTFAAMLMAGLDGIKNKIHPGESFDKDLYDLPAEEVKSIPTVCGSLREAMESLDKDREFLTQGGVFTDDQIDAYIALKFEEIHKFEHTPHPVEFQMYYSS

SEQ ID NO: 194360 - protein, 298 aa, Unknown
  Bacterial polypetide isolated from the Sargasso Sea
GHRPGIKGGYFPVPPVDIAQDMRSEYLKAMKDMGIKVEKHHHEVAPSQHELGMYFGTLVDQADNLQLYKYAVHMVSHSFGKTATFMPKPVKGDNGSGMHVHQSIWKGDKALFSGDKYAGLSDLALNYIGGILKHAKAINAFSNATTNSYKRLIPGFEAPVLLAYSARNRSASCRIPITLSKKAARCEIRFGDAAGNPYLTFAAMLMAGLDGIKNKINPGKSFDKDLYALSEEEVSKIPTVCGSLREAMESLDKDRKFLTEGGVFTDDQIDAYISLKMEEVHNFEHTPHPIEFEMYYSC

SEQ ID NO: 194361 - protein, 287 aa, Unknown
  Bacterial polypetide isolated from the Sargasso Sea
DSLQDVRTEMFLTMEDIGINVEASHHEVATGGQCEIDLEFSPLLSMADDLLRYKYVVKNVAKLHGLTATFMPKPLFEDNGSGMHVHSSIWKKNKTLMYKKGNYADLSNFALHYIGGILKHAPSLLAFCAPTTNSYKRLVPGFEAPVNIAYSAANRTASVRIPNNYTASPKAKRIEFRCPDPSANPYLAFSAILMAGLDGVKNKINPGKPTDINIYEAPASVLAKIPSTPGSLAEALDALEKDNKYLLAGDVFTKDNIETYISYKRESEVSPMDLRPHPHEFNLYYDV

SEQ ID NO: 194362 - protein, 266 aa, Unknown
  Bacterial polypetide isolated from the Sargasso Sea
MGIKVEKHHHEVAPSQHELGMYFGTLVDQADNLQLYKYAVHMVTHSFGKTATFMPKPVKGDNGSGMHCHQSIWKGSTAVFSGNKYAGLSDTALHYIGGILKHARAINAFANATTNSYKRLIPGFEAPVLLAYSARNRSASCRIPITQSKKAARCEVRFPDAAGNPYLTFSALLMAGLDGIKNKIDPGKSLDKDLYALSESEVKKIPTVCGSLREAMESLDKDRKFLTQGNVFTDDQIDAYIALKYEEIYNFEHTPHPMEFQMYYSC

SEQ ID NO: 194363 - protein, 184 aa, Unknown
  Bacterial polypetide isolated from the Sargasso Sea
MSSDDVLKFMKEKEVEFVDLRFTDPRGKLQHLTMDSTIVDDEMLNDGVFFDGSSIAGWKAINESDMILKPDLGRKIMDPFTSHNTLVLFCDIMDAVKKDPYERDPRGIAKKAEAYLKSTGIGDKAYFGPEPEFFVFDDVRIKNDMNETGFSIDSTEGPYNSGKKYDNGNMGHRPGIKGGYFPVP

SEQ ID NO: 194364 - protein, 199 aa, Unknown
  Bacterial polypetide isolated from the Sargasso Sea
SVWKDGDTLMYKEGNYANLSDLALNYIGGILKHAPALLAFCAPTTNSYKRLVPGFEAPVNIVYSQRNRTASVRIPAYSQSPKSKRMEFRCPDPTANPYLAFSAMLMAGLDGIKNKIDPGKPTDINLYAASDEVLSKIQSTPGSLAESLEALEKDHAFLLEGDVFTKDVIDTYISYKKENEVDPINIRPHPHEFKLYYDA

SEQ ID NO: 194365 - protein, 135 aa, Unknown
  Bacterial polypetide isolated from the Sargasso Sea
MSVSKVLKLMKEKEVEYVDLRFTDPKGKLQHLTMDGKMVDEKMLNDGVFFDGSSIAGWKAINESDMILKPDLDRQVIDPFTSHNTLILFCDVLDAVKKNPYERDPRSIAKKAESYLKKTGIGDKAYFGPEAEFFV

SEQ ID NO: 194366 - protein, 253 aa, Unknown
  Bacterial polypetide isolated from the Sargasso Sea
MSASDVLKTIKDKEAEFVDLRFTDPRGKLQHLTIDSTVVDEDMLNQGVFFDGSSIAGWKAINESDMILKPDLSRMFMDPFTSHNTLVLFCDILDAVKKNPYERDPRGTAKRAEEYLKSSGIGDKAFFGPEPEFFVFDDVRIKNDMNETSFAIDSTEGPYNSGKRYENGNMGHRPGIKGGYFPVPPVDSAQDMRGEYLKGLKDVGIKVEKHHHEVAPSQHELGMYFGTLVNQADNVQLYKYVVQNGYTLIGKTA

SEQ ID NO: 194367 - protein, 259 aa, Unknown
  Bacterial polypetide isolated from the Sargasso Sea
MSASSVKKIMKDKEIEYVDLRFTDPRGKLQHVTMDATIVDEDMLNEGVFFDGSSIAGWKAINESDMILKPDLSRAVVDPFTSHNTLNIFCDILDAIKKDPYERDPRGTAKKAEVYLKKTGVGDKAYFGPEPEFFVFDDVRYSNDMNHTGFQIDSSEGPYNTGKKYENGNMGHRPGIKGGYFPVPPVDSAQDMRSEYLKAMKDMGIKVEKHHHEVAPSQHELGMYFGTLVDQADNLQLYKYAVHMVTHSLEKQQLLCLNQ

SEQ ID NO: 194368 - protein, 260 aa, Unknown
  Bacterial polypetide isolated from the Sargasso Sea
KHHHEVAPSQHELGMLFSTLVNQADNVQLYKYVVHMVSQSFGKTATFMPKPVKGDNGSGMHTHQSIWKGKTPVFSGNKYSGLSDTALHYIGGILKHAKAINAFSNATTNSYKRLIPGFEAPVLLAYSARNRSASCRIPITLNKKGARCEIRFPDASGNPYLTFASMLMAGLDGIKKKINPGKSLDKDLYALSEDEIKNIPTVCGSLREAMEALDTDRSFLKQGGVFTDDQIDAYIALKFEEIHNFEHTPHPIEFDMYYSC

SEQ ID NO: 194369 - protein, 184 aa, Unknown
  Bacterial polypetide isolated from the Sargasso Sea
MSAGKVLKFIKEKEAEFVDLRFTDPRGKLQHLTMDASIVDEEMLNEGVFFDGSSIAGWKAINESDMILKPDTARMFMDPFTSHNTVVLFCDILDAIKKDPYERDPRGVAKKAEEYLKASGIGDKAFFGPEPEFFVFDDVRIKNEMNECGFKIDSKEGPYNSGKEYENGNMGHRPQIKGGYFPVP

SEQ ID NO: 194370 - protein, 261 aa, Unknown
  Bacterial polypetide isolated from the Sargasso Sea
NMGHRPGIKGGYFPVPPVDSAQDLRSEMVLSLVDMGVPMEKHHHEVAPSQHELGMMFGTLIDTADNVQLYKYAVHNVAHSFGQTATFMPKPVAGDNGTGMHTHQSIWKDGKPLFAGDKYANLSQTCLHYIGGIIKHAKAINAFTNPSTNSYKRLIPGFEAPVILAYSARNRSASCRIPFTDSPNGKRVEVRFPDATANPYLAFSAMLMAGLDGIQNKIDPGEAMDQDLYELPASELTSIPTVCGSLREALDALANDMSFLT

SEQ ID NO: 194371 - protein, 186 aa, Unknown
  Bacterial polypetide isolated from the Sargasso Sea
MSAANVLKYIKEKDAEFVDLRFTDPRGKLQHLTMDSTVVDEGMLNEGVFFDGSSIAGWKAINESDMILKPDTSRMFMDPFTSHNTVVLFCDILDAIKKTPYERDPRGIAKKAEEYLKSSGIGDKAFFGPEPEFFVFDDVRIKNDMNECGFVLDSKEGPYNSGKEYENGNMGHRPGVKGGYFPVPPV

SEQ ID NO: 194372 - protein, 269 aa, Unknown
  Bacterial polypetide isolated from the Sargasso Sea
PRSIAKKAEAYLKSTGVGDKAFFGPEPEFFVFDDVRYKNDMNETSFKIDSTEGPYNTGRKYESGNMGHRPGIKGGYFPVPPVDSAQDMRGEYLKGLRDVGITVEKHHHEVAPSQHELGMLYSTLVNQADNVQLYKYVVHMVSHSFGKTATFMPKPVKGDNGSGMHTHQSIWKGKTPIFSGNKYSGLSDTALHYIGGILKHAKAINAFSNATTNSYKRLIPGFEAPVLLAYSARNRSASCRIPITLSKKGARCEIRFPDASGNPYLTFAA

SEQ ID NO: 194373 - protein, 153 aa, Unknown
  Bacterial polypetide isolated from the Sargasso Sea
MKIKAEYIWIDGKTPTAKLRSKTKIMDQGTEPPIWGFDGSSTEQATGDQSDCVLKPVSQFPDPIRGGDNILVMCEVLNVDMTPHASNTRAACVASAENFSEFEPMFGLEQEYTFYEQSYDSLKYGQPLGFPPSGYPAPQGGYYCGVGADEVYG

SEQ ID NO: 194374 - protein, 273 aa, Unknown
  Bacterial polypetide isolated from the Sargasso Sea
LKPDNSRAIVDPFTSHNTLNLFCDVLDAIKKDPYERDPRGTAKKAEAYLKSSGIGDKAFFGPEAEFFVFDDVRFKNDMNETGFKIDSKEGPYNSGREYENGNMGHRPGIKGGYFPVPPVDSEQDMRSEYLKAMKEMGIKVEKHHHEVAPSQHELGMYFGTLVDQADNLQLYKYAVHMVSNSFGKTATFMPKPVKGDNGSGMHVHQSIWKGDTALFSGDKYAGLSDTALHYIGGILKHAKAINAFSNATTNSYQRLIPGFEAPVFIAYSARNRS

SEQ ID NO: 194375 - protein, 264 aa, Unknown
  Bacterial polypetide isolated from the Sargasso Sea
HHEVATAGQCEIDIKYDYMTNAADGAQSYKYVVRNVAAEFGKVATMMPKPISMDSGSGMHTNVSLWKKDVNTFYDKDEDLELSQTGRYFCGGVMEHAKGLTAITNPTTNSYHRLVPGYEAPVYIAWSSSNRSATIRIPGHFKGEKYAFMKRMEYRVPDPASNPYLVFSAVLAAGLDGIKKKIEPGDPVKEDIYKMTKSERIKRGIDTLPANLGRALDELESDRKYLSPIFDNEVLDKIIELERRDHREIAIRPHPHEFYLYFDV

SEQ ID NO: 194376 - protein, 225 aa, Unknown
  Bacterial polypetide isolated from the Sargasso Sea
VPRDNGKAATFMPKPMFNDNGNGMHTHQSLWKNGQPLFAGDQYAGLSQDALYYIGGILNHAPALAAFTNPLTNSYKRLVPGFEAPINLAYSNRNRSATVRIPVVDSPKARRLEYRCPDSGANVYIAFAAMLMAGLDGIQNKIDPGDPMDVNIYDLPPEKLNKIGKMPSSLRESLDALESDNEFLLKGNVFTKDVIEYWLDYKMEEEVKAIDSRPHPHEFNLYFNY

SEQ ID NO: 194377 - protein, 194 aa, Unknown
  Bacterial polypetide isolated from the Sargasso Sea
DYYCGRNIGDRISRQHLNACIKAGISICGTNAEVMLGQWEYQIGAGGSIHMSDDLWVARWLMERICEKWGLEVSLHPKPIQGDWNGAGCHTNFSTKQMREDGGWDKIIEACEKLSENPQEHIEVYGEDNEQRLTGEHETCSINEFRYGVSDRGASIRIPWQVEVDGCGYLEDRRPSSNCDPYIVAEKLVSTICK

SEQ ID NO: 194378 - protein, 217 aa, Unknown
  Bacterial polypetide isolated from the Sargasso Sea
MSSSKILKLMKDKEAEFVDLRFTDPRGKLQHLTMDSKIVDEEMLNEGVFFDGSSIAGWKAINESDMILKPDLNRGIMDPYTSHNTLVLFCDILDAVKKNPYERDPRGIAKKAEAYLKTTGVGDKAYFGPEPEFFVFDDVKIKNDMNEIGFSIDSSEGPYNSGRNYENGNMGHRPGVKGGYFPVPPVDSAQDMRGEYLKGLKEVGITVEKHHHEGLQV

SEQ ID NO: 194379 - protein, 316 aa, Unknown
  Bacterial polypetide isolated from the Sargasso Sea
LKKSGVGDKAYFGPEPEFFVFDDVKIKNEMNEIGFKIDSSEGPYNSGKNYENGNMGHRPGVKGGYFPVPPVDSAQDMRGEYLKGLREVGITVEKHHHEVAPSQHELGMLYNTLVTQADNVQLYKYVVQMVSHSFGKTATFMPKPVKGDNGSGMHTHQSIWKGKTPIFSGDKYAGLSQTALHYIGGILKHAKAINAFSNATTNSYKRLIPGFEAPVLLAYSARNRSASCRIPITLNKKGARCEIRFPDAAGNPYLTFSAMLMAGLDGIKNKINPGKPLDEDLYALPEDKVKNIPTVCGSLREAMESLDRDRSFLKQG

SEQ ID NO: 194380 - protein, 310 aa, Unknown
  Bacterial polypetide isolated from the Sargasso Sea
YQNDMNHTGFQIDSSEGPYNTGKKYENGNMGHRPGIKGGYFPVPPVDSAQDMRSEYLKAMKDMGIKVEKHHHEVAPSQHELGMYFGTLVDQADNLQLYKYAVHMVTHSFGKTATFMPKPVKGDNGSGMHCHQSIWKGSTAVFSGNKYAGLSDAALHYIGGILKHARAINAFANATTNSYKRLIPGFEAPVLLAYSARNRSASCRIPITQSKKAARCEVRFPDAAGNPYLTFSALLMAGLDGIKNKIDPGKSLDKDLYALSESEVKKIPTVCGSLREAMESLDKDRKFLTQGNVFTDDQIDAYIALKYEEI

SEQ ID NO: 194381 - protein, 337 aa, Unknown
  Bacterial polypetide isolated from the Sargasso Sea
MSKSPQDVLSQIKDEGIELIDLKFTDIHGKWQHLTLTSDMIEEDSFTEGLAFDGSSIRGWKAINASDMSMVPDASTAWIDPFYKHKTLSMICSIQEPRSGEPYDRCPRSLAQKALKYLESTGIADTAFFGPEPEFFLFDDVRYDSKEGSCFYSVDTIEAPWNTGRIEEGGNLGYKIQYKEGYFPVSPNDTAQDIRSEMLLLMGELGIPTEKHHHEVAGAGQHELGMKFDSLINSADNVMTYKYVVRNVAKKYGKTATFMPKPVFNDNGTGMHVHQSLWKSGQPLFFGEGAYANLSQTARWYIGGILKHAPSFLAFTNPTTNSYKRLVPGFEAPVNLV

SEQ ID NO: 194382 - protein, 468 aa, Unknown
  Bacterial polypetide isolated from the Sargasso Sea
MSAKDVIKLIKSKNIEFVDLRFTDPRGKLQHLTMDTTIVDEGLLNDGVFFDGSSIAGWKAINESDMILKPDLSRKVIDPYTSHNTLILFCDILDAVKKDPYERDPRGIAKKAEAYLKKTGIGDTAYFGPEPEFFVFDDVRIKNDMNETSFSIDSTEGPYNSGKSYDNGNMGHRPGVKGGYFPVPPVDSAQDMRGEYLKGLRDVGITVEKHHHEVAPSQHELGMLFGTLVDQADNVQLYKYVVQMVSHSFGKTATFMPKPVKGDNGSGMHTHQSIWKGKTPIFSGNKYAGLSQTALYYIGGVLKHAKAINAFANATTNSYKRLIPGFEAPVLLAYSARNRSASCRIPITLSKKGARCEIRFPDASGNPYLTFASMLMAGIDGIKNKIDPGKSFDKDLYALSEKQVKKVPTVCGSLREAMEALDKDRSFLTQGNVFTDDQIDAYIELKYEEIHNFEHTPHPIEFDMYYSC

SEQ ID NO: 194383 - protein, 131 aa, Unknown
  Bacterial polypetide isolated from the Sargasso Sea
NRSASIRIPHVTSDKARRIEVRFPDPTANPYLAFTAMLMAGIDGIKNKIHPGDSMDKDLYDLPPEEAAEIPTVASSLEMALEALDNDRDFLKAGGVMTDDMIDAYIDLKSEEVTKLNMTTHPVEFDMYYSV

SEQ ID NO: 194384 - protein, 302 aa, Unknown
  Bacterial polypetide isolated from the Sargasso Sea
MAYKIQLKEGYFPVAPNDTAQDIRSEMLLLMGQLGIPTEKHHHEVAGAGQHELGMKFAELIEAADNVMTYKYVVRNVAKKYGKTATFMPKPVFNDNGSGMHVHQSLWKGGQPLFFGEGTYANLSQTARWYIGGILKHAPAFLAFTNPTTNSYKRLVPGFEAPVNLVYSEGNRSAAVRIPLTGPSPKAKRLEFRSGDALANPYLAFSAMVMAGLDGIKNQIDPGDGEDRDLFELPAEELAKIATVPPSLNGALEALNADRGFLTAGGVFSDDFIDNWIDLKYEEVQQLRQRPHPHEFAMYYDA

SEQ ID NO: 194385 - protein, 316 aa, Unknown
  Bacterial polypetide isolated from the Sargasso Sea
MISGSNFAFHEVDSTEGTWNSGSDENPNLGHKPRHKEGYFPLPPVDTLQDVRTEMVMTMQDIGLSVEAHHHEVATGGQCEIDLEFSPLLKMADDMMKYKYVVKNVAKQHGMTATFMPKPLFEDNGSGMHVHQSVWKDGDTLMYKEGNYANLSDLALNYIGGILKHAPALLAFCAPTTNSYKRLVPGFEAPVNIVYSQRNRTASVRIPAYSQSPKSKRMEFRCPDPSANPYLAFSAMLMAGLDGIKNKINPGDPTDINLYAASDEVLSKIQSTPGSLAESLEALEKDHAFLLEGDVFTKDVIDTYISYKKDSEVDPN

SEQ ID NO: 194386 - protein, 315 aa, Unknown
  Bacterial polypetide isolated from the Sargasso Sea
STEGPYNTGKKYENGNMGHRPGVKGGYFPVPPVDSAQDMRSEYLKAMKDMGIKVEKHHHEVAPSQHELGMYFGTLVNQADNIQLYKYAVHMVTHSFGKTATFMPKPVKGDNGSGMHVHQSIWNGNTPLFMGNEYAGLSKTALHYIGGILKHARAINAFANATTNSYKRLIPGFEAPVLLAYSARNRSASCRIPITLSKKAARCEIRFPDASGNPYLTFASMLMAGLDGIKNKIDPGKSFDKDLYALSEAEIKKIPTVCGSLREAMESLDKDRKFLTQGNVFTDDQIDAYIDLKMEEIHNFEHTPHPIEFDMYYSC

SEQ ID NO: 194387 - protein, 230 aa, Unknown
  Bacterial polypetide isolated from the Sargasso Sea
MSAANVLKFIKEKEAEFVDLRFTDPRGKLQHLTIDTSVVDEDMLNQGVFFDGSSIAGWKAINESDMILKPDTARMFMDPFTSHNTVVLFCDILDAVKKSPYERDPRGVAKKAEEYLKSSGIGDKAFFGPEPEFFVFDDVRINNDPNNTGFVLDSKEGPYNSGKVYENGNMGHRPPVKGGYFPVPPVDSEQDMRGEYLKNLKEVGIKVEKHHHEVAPSQHELGMYFGTLVD

SEQ ID NO: 194388 - protein, 468 aa, Unknown
  Bacterial polypetide isolated from the Sargasso Sea
MSAENVLKFIKEKEAEFVDLRFTDPRGKLQHLTMDATIVDADMLNEGVFFDGSSIAGWKAINESDMILKPDTARMFMDPFTSHNTAVLFCDILDAIKKDPYERDPRGVAKKAEEYLKASGIGDKAFFGPEPEFFVFDDVRVKNDMNECGFKIDSKEGPYNSGKEYESGNMGHRPPIKGGYFPVPPVDSEQDMRGEYLKNLKEVGIKVEKHHHEVAPSQHELGMYFGTLVDQADNVQLYKYIVQMVTHSFGKTATFMPKPVAGDNGSGMHIHQSIWKGDTPVFSGDAYAGLSETALHYIGGILKHAKAINAFANSTTNSYKRLIPGFEAPVLLAYSARNRSASCRIPITLSKKGARCEIRFPDASGNPYLTFAAMLMAGIDGIKNKTHPGESFDKDLYELPPEEVKAIPTVCGSLREAMENLDKDREFLTQGGVFTDDQIDAYIALKFEEIHKFEHAPHPVEFEMYYSS

SEQ ID NO: 194389 - protein, 254 aa, Unknown
  Bacterial polypetide isolated from the Sargasso Sea
MSAAQVLKFIKDKQIEYVDLRFTDPRGKLQHVTMDVGVVDSDMLNSGVFFDGSSIAGWKAINESDMILKPDLNRKVIDPFTSHNTLILFCDILDAVKKNPYERDPRSIAKKAEAYLKKSGIGDKAFFGPEAEFFVFDDVKYKNEMNETGFKIDSSEGPYNTGKDYDNGNMGHRPGIKGGYFPVPPVDSAQDMRGEFLKALRDMGIKVEKHHHEVAPSQHELGMYFGTLTDQADNLQLYKYGVHMVAHSLERQQL

SEQ ID NO: 194390 - protein, 352 aa, Unknown
  Bacterial polypetide isolated from the Sargasso Sea
KKTGVGDKAYFGPEPEFFVFDDVRYANDMNHTGFQIDSSEGPYNTGKKYENGNMGHRPGIKGGYFPVPPVDSAQDMRSEYLKAMKDMGIKVEKHHHEVAPSQHELGMYFGTLVDQADNLQLYKYAVHMVTHSFGKTATFMPKPVKGDNGSGMHCHQSIWKGSTAVFSGNKYAGLSDTALHYIGGILKHARAINAFSNATTNSYKRLIPGFEAPVLLAYSARNRSASCRIPITQSKKAARCEVRFPDAAGNPYLTFSALLMAGLDGIKNKIDPGKSLDKDLYALSESEVKKIPTVCGSLREAMESLDKDRKFLTQGNVFTDDQIDAYIALKYEEIYNFEHTPHPMEFQMYYSC

SEQ ID NO: 194391 - protein, 405 aa, Unknown
  Bacterial polypetide isolated from the Sargasso Sea
SDMILKPDLSRKVIDPFTSHNTLVLFCDILDAVKKNPYERDPRGIAKKAEAYLKETGIGDKAFFGPEPEFFVFDDVRIKNDMNETGFVIDSSEGPYNSGKKYENGNMGHRPGIKGGYFPVPPVDSAQDMRGEYLKGLRDVGITVEKHHHEVAPSQHELGMKFSTLVDQADNVQLYKYVVQMVSHSFGKTATFMPKPVKGDNGSGMHIHQSLWQGDTPLFSGHRYSGLSDTAIHYIGGILKHAKAINAFSNATTNSYKRLIPGFEAPVLLAYSARNRSASCRIPITLSKKGARCEIRFPDAAGNPYLTFSAMLMAGLDGIKNKIDPGESFDKDLYTLSESEIKNIPTVCGSLREAMESLDIDRNFLKEGNVFTDDQIDAYIALKFEEIYNLEHTPHPIEFDMYYSS

SEQ ID NO: 194392 - protein, 289 aa, Unknown
  Bacterial polypetide isolated from the Sargasso Sea
LFPVPPVDSAQDMRGEYLKGLREVGITVEKHHHEVAPSQHELGMLYNTLVTQADNVQLYKYVVQMVSHSFGKTATFMPKPVKGDNGSGMHTHQSIWKGKNPVFSGNKYAGLSETALHYIGGILKHAKAINAFSNATTNSYKRLIPGFEAPVLLAYSARNRSASCRIPITLNKKGARCEIRFPDAAGNPYLTFSAMLMAGLDGIKNKINPGKPLDEDLYALPEDKVKNIPTVCGSLREAMESLDRDRGFLKQGGVFTDDQIDAFIALKFEEIYNLEHTPHPMEFEMYYSS

SEQ ID NO: 194393 - protein, 336 aa, Unknown
  Bacterial polypetide isolated from the Sargasso Sea
MKVKAEYIWIDGYEPTANLRSKTKVLDGAVSSVSELPTWGFDGSSTLQADGGDSDCLLKPVWMCPDPIRGGENILVMNEVCNPDGTPHKSNSRAALVEIAEKFKEHKPWFGIEQEYTLMDGKQPAGWPEEGFPERPQGPYYCSVGSEDVAARSMVEDHLDLCLEAGLEVSGINAEVMLGQWEYQVGPLPALEVGDQLWVARWLLERVGEEYGLRVELHPKPIKGDWNGSGAHINYSTESMRADGGLKVIEEACEKLGQNVDKHIAVYGDANDERLTGDHETCSINEFKYGVSDRGASIRIPMGVANDGKGYLEDRRPASNIDPYKACAALIDTTCS

SEQ ID NO: 194394 - protein, 468 aa, Unknown
  Bacterial polypetide isolated from the Sargasso Sea
MSASKVIKQMKDKDIEYVDLRFTDPRGKLQHVTMDSKVVDEEMLDEGIFFDGSSIAGWKAINESDMILKPDLSRTVIDPFTSHNTMNIFCDVMDAIKKDPYERDPRGTAKKAEAYLKKSGIGDKAYFGPEAEFFVFDDVKYKNDMNETGFKIDSTEGPYNTGKDYPNGNMGHRPGVKGGYFPVPPVDSAQDMRSEYLKAMKDMGIKVEKHHHEVAPSQHELGMYFGTLVDQADNLQLYKYAVHMVSHSFGKTATFMPKPVKGDNGSGMHVHQSIWKGDKALFSGDKYAGLSEIALNYIGGILKHAKAINAFSNATTNSYKRLIPGFEAPVLLAYSARNRSASCRIPITLSKKAARCEIRFGDAAGNPYLTFAAMLMAGLDGIKNKIDPGKSFDKDLYALSEAEVKKIPTVCGSLREAMESLDKDRDFLKQGNVFTDDQIDAYIALKFEEIHNFEHTPHPIEFDMYYSC

SEQ ID NO: 194395 - protein, 468 aa, Unknown
  Bacterial polypetide isolated from the Sargasso Sea
MSSNKVLKLMKDKEIEFVDLRFTDPRGKLQHLTMDSTIVDDDMLNEGVFFDGSSIAGWKAINESDMILKPDLSRQVIDPYTSHNTLIIFCDILDAVKKTPYERDPRGIAKKAEAYLKKSGVGDKAYFGPEPEFFVFDDVKIKNEMNEIGFKIDSSEGPYNSGKNYENGNMGHRPGVKGGYFPVPPVDSAQDMRGEYLKGLREVGITVEKHHHEVAPSQHELGMLYNTLVTQADNVQLYKYVVQMVSHSFGKTATFMPKPVKGDNGSGMHTHQSIWKGKNPVFSGNKYSGLSETALHYIGGILKHAKAINAFSNATTNSYKRLIPGFEAPVLLAYSARNRSASCRIPITLNKKGARCEIRFPDAAGNPYLTFSAMLMAGLDGIKNKINPGKPLDEDLYSLPEDKVKNIPTVCGSLREAMESLDRDRSFLKQGGVFTDDQIDAFIALKFEEIYNLEHTPHPMEFEMYYSS

SEQ ID NO: 194396 - protein, 282 aa, Unknown
  Bacterial polypetide isolated from the Sargasso Sea
ADGSSSDCILRPVYEYTGPRNSDSLVMCEVLSPDRSAHPSNTRSACVDLVTDDWWFGFEQEYFFTNPEDGTILGWEDGTPRPQGDYYCGVGSGNVQAREVSEAHMDACLEAGIMITGTNAEVALGQWEYQCFGKGLKAADDLWVSRYLLHLIAEEYGVSVNIHPKPQQGDWNGSGMHTNFSNEQMRSAGSEELMTSMCDKLGEVHAEGISNYGSDNDMRLTGNHETQSIDTFSYGVSDRGASIRIPIYTVENDWNGYLEDRRPASNADPYKIISHIVGTLTK

SEQ ID NO: 194397 - protein, 396 aa, Unknown
  Bacterial polypetide isolated from the Sargasso Sea
MSASNVLKTLKDKNIEYVDLRFTDPRGKLQHVTMDAKMVDDDMLKEGIFFDGSSIAGWKAINESDMILKPDTNRAIVDPFTSHNTLNLFCDVLDAIKKTPYERDPRGTAKKAEAYLKDSGIGDKAFFGPEAEFFVFDDVRFKNDMNETGFKIDSKEGPYNTGKEYENGNMGHRPGIKGGYFPVPPVDSEQDMRSEYLKAMKDMGIKVEKHHHEVAPSQHELGMYFGTLVDQADNLQLYKYAVHMVSHSFGKTATFMPKPVKGDNGSGMHVHQSIWKGDTALFSGDKYAGLSDTALHYIGGILKHAKAINAFSNATTNSYKRLIPGFEAPVLLAYSARNRSASCRIPITLSKKAARCEIRFGDAAGNPYLTFSAMLMAGLDGIKNKIDPGKSFDKDL

SEQ ID NO: 194398 - protein, 383 aa, Unknown
  Bacterial polypetide isolated from the Sargasso Sea
MSIFCDILDPISGDPYDRDPRSTAKGALNYMKSLGIGDNAFFGPEPEFFIFDDVKMEVSSTVSYAEVDSSENPGNSARDYDAGNMGHRPGIKGGYFPVPPVDSGQDIRSEIVSVLSDMNVPMEKHHHEVAPAQHELGLKFGTLIDTADNVQLYKYAVHMVAHSYGKTSTFMPKPVAGDNGSGMHVHQSIWKSGKPLFAGNEYANLSETALFYIGGIIKHAKALNAFTNPSTNSYKRLVPGFEAPVLLAYSSRNRSASCRIPFAQSPSGKRVEIRFPDAMSNPYLAFASMLMAGLDGIQNKIHPGESMDKDLYDLPIDELANVPTVCGSLREALESLQTDNDFLTQGGVFSKDQINAYVELKMEEVINFEHAPHPIEYQMYYSS

SEQ ID NO: 194399 - protein, 412 aa, Unknown
  Bacterial polypetide isolated from the Sargasso Sea
GWKAINESDMILKPDLGRRVIDPYTSHNTLILFCDILDAVKRDPYERDPRGIAKKAEAYLKKTGIGDTAYFGPEPEFFVFDDVRIKNDMNETSFSIDSSEGPYNSGKSYDNGNMGHRPGVKGGYFPVPPVDSAQDMRGEYLKGLRDVGITVEKHHHEVAPSQHELGMLFGTLVDQADNVQLYKYVVQMVSHSFGKTATFMPKPVKGDNGSGMHTHQSIWKGKTPVFSGNKYAGLSQTALYYIGGVLKHAKAINAFANATTNSYKRLIPGFEAPVLLAYSARNRSASCRIPITLSKKGARCEIRFPDASGNPYLTFASMLMAGIDGIKNKIDPGKSFDKDLYALSEKQVKKVPTVCGSLREAMEALDKDRSFLTQGNVFTDDQIDAYIELKYEEIHNFEHTPHPIEFDMYYSC

SEQ ID NO: 194400 - protein, 179 aa, Unknown
  Bacterial polypetide isolated from the Sargasso Sea
MHFITIGGILKHAPSLLAFCAPTTNSYKRLVPGFEAPVNIAYSAANRTASVRIPNNYTASPKAKRIEFRCPDPSSNPYLAFSAILMAGLDGVKNKTNPGKPTDINIYEAPASVLAKIPSTPGSLAESLDALEKDHKYLLNGDVFTKDNIETYIAYKRENEVSPMDLRPHPHEFNLYYDV

SEQ ID NO: 194401 - protein, 336 aa, Unknown
  Bacterial polypetide isolated from the Sargasso Sea
FFVFDDVRIKNDMNECGFILDSKEGPYNSGKEYENGNMGHRPGVKGGYFPVPPVDSEQDMRSEYLKNLKEVGIKVEKHHHEVAPSQHELGMYFGTLVDQADNVQLYKYVVQMVTHSFGKTATFMPKPVAGDNGSGMHTHQSIWKGDTPVFSGEAYAGLSETALHYIGGILKHAKAINAFSNATTNSYKRLIPGFEAPVLLAYSARNRSASCRIPITLSKKGARCEIRFPDASGNPYLTFAAMLMAGIDGIKNKIHPGESFDKDLYELPPEEVKSIPTVCGSLREAMESLDKDREFLTQGDVFTDDQIDAYIALKFEEIHKFEHAPHPVEFEMYYSC

SEQ ID NO: 194402 - protein, 468 aa, Unknown
  Bacterial polypetide isolated from the Sargasso Sea
MSSKDVLKMMKDKDIEFVDLRFTDPRGKLQHLTMDSTVVDNDMLNDGVFFDGSSIAGWKAINESDMILKPDLSRKVIDPYTSHNTLILFCDILDAVKKDPYERDPRGIAKKAEQYLKKSGIGDRAYFGPEPEFFVFDDVRIKNDMNETGFSIDSTEGPYNSGKKYENGNMGHRPGIKGGYFPVPPVDSAQDMRGEYLKGLRDVGITVEKHHHEVAPSQHELGMLFGTLVNQADNVQLYKYVVQMVSHSFGKTATFMPKPVKGDNGSGMHTHQSIWKGKTPVFSGDKYAGLSQTALYYIGGILKHAKAINAFSNATTNSYKRLIPGFEAPVLLAYSARNRSASCRIPITLSKKGARCEIRFPDAAGNPYLTFAAMLMAGLDGIKKKINPGKSFDKDLYTLPEDEIKNIPTVCGSLREAMESLDTDRDFLKQGNVFTDDQIDAYIALKFEEIYNLEHTPHPIEFDMYYSG

SEQ ID NO: 194403 - protein, 233 aa, Unknown
  Bacterial polypetide isolated from the Sargasso Sea
MSAANVLKFIKEKEAEFVDLRFTDPRGKLQHLTMDVTVVDEDMLSNGVFFDGSSIAGWKAINESDMILKPDTARMFMDPFTSHNTAVLFCDILDAIKKDPYERDPRGVAKKAEEYLKASGIGDKAFFGPEPEFFVFDDVRIKNNMNECGFVLDSKEGPYNSGKKYENGNMGHRPGVKGGYFPVPPVDSEQDMRGEYLKNLKEVGIKVEKHHHEVAPSQHELGMYFGTLVQQAD

SEQ ID NO: 194404 - protein, 252 aa, Unknown
  Bacterial polypetide isolated from the Sargasso Sea
ACAASAENFSEFEPMFGLEQEYTFYEQSYDSLKYGQPLGFPPSGYPAPQGGYYCGVGSDEVYGRSISEDHATACMEAGLNISGTNAEVMPGQWEFQIGPVGAPNIGDEIWIARWLLYRIAEDYNISATLTPKPVKGDWNGAGMHTNFSTKQMREDGGYGAVIAGCEALEKNAEFHVQNYGDGIEDRLTGAHETQKFDTFSYGVSDRGASIRIPWQVEKDQKGYLEDRRPNANADPYVIATVMIDTICSAASA

SEQ ID NO: 194405 - protein, 469 aa, Unknown
  Bacterial polypetide isolated from the Sargasso Sea
MSVESVLKQLEELEVKFVDLRFTDTKGKEQHVSIPAHQVDADFFEDGKMFDGSSIAGWKGINESDMVLMPDPTTFVLDPFTEETTALIRCDILEPGTMTGYDRDPRSIAKKAEEYLRSTGIADTVLVGPEPEFFLFDDVRFGTDMSGCFVKIDAKEAAWNSGTSYEGGNTGHRPFVKGGYFPVAPVDSSQDLRSAMCLVLEEMGQVVEAHHHEVATAGQNEIATRFNTLTKKADEIQILKYVVHNMAHAYGKTATFMPKPIVGDNGSGMHVHQSLSKDGVNLFAGDKYAGLSETALYYIGGIIKHARALNAFTNPSTNSYKRLVPHFEAPVMLAYSARNRSASIRIPVVPSPKGRRIETRFPDPHANPYLGFAALLMAGIDGIQNKIHPGEAMDKDLYDLPAEEAAEIPQVATSLENALENLQADHEFLTRGGVFSEDFIQSYIALKSAEAERVSRTTHPLEFEMYYSL

SEQ ID NO: 194406 - protein, 468 aa, Unknown
  Bacterial polypetide isolated from the Sargasso Sea
MSAANVLKFIKEKDAEFVDLRFTDPRGKLQHLTMDSSVVDNGMLNEGVFFDGSSIAGWKAINESDMILKPDTARMFMDPFTSHNTVVLFCDILDAVKKDPYERDPRGVAKKAEEYLKASGIGDKAFFGPEPEFFVFDDVRIKNDMNECGFKLDSKEGPYNSGKEYENGNMGHRPQIKGGYFPVPPVDSEQDMRGEYLKNLKEVGIKVEKHHHEVAPSQHELGMYFGTLVNQADNVQLYKYVVQMVTHSFGKTATFMPKPVAGDNGSGMHIHQSIWKGDTPVFSGDAYAGLSETALHYIGGILKHAKAINAFANSTTNSYKRLIPGFEAPVLLAYSARNRSASCRIPITLSKKGARCEIRFPDAAGNPYLTFAAMLMAGLDGIKNKIHPGESFDKDLYELPPEEVKAIPTVCGSLREAMESLDKDREFLTQGDVFTDDQIDAYIALKFEEIHKFEHAPHPVEFEMYYSS

SEQ ID NO: 194407 - protein, 271 aa, Unknown
  Bacterial polypetide isolated from the Sargasso Sea
KALRDMGVKVEKHHHEVAPSQHELGMYFGTLTNQADNIQLYKYAVQMVTHSFGKTATFMPKPVKGDNGSGMHCHQSIWKGSTPTFMGKEYAGLSKTALYYIGGILKHAKAINAFSNATTNSYKRLIPGFEAPVILAYSARNRSASCRIPVINNPKAARMEIRFPDAAGNPYLTFASMLMAGIDGIKNKIDPGKSFDKDLYSLSEKELKKVPTVCGSLREAMESLDKDRKFLTQGNVFTDDQIDAYIALKFEEIHNFEHTPHPIEFDMYYSC

SEQ ID NO: 194408 - protein, 471 aa, Unknown
  Bacterial polypetide isolated from the Sargasso Sea
MNQTELIKFASENNVEIVDYKFCDFPGTWHHFSTPISCLNDDVFEEGVGFDGSSIRGFQSIQESDMLLFPDPETAFIDPFTKHQTFSITCNIKDPITAQPYTRDPRFLAQKAEQYLKSTGIADFSYWGPEVEFYIFDHVSFDQTYNEGFYHVDSVEGAWNTGDNSQQNLGYKPRYKEGYFPVAPMDHMQDIRSEMVKTLEQVDIDVEVHHHEVGTGGQAEIDMRFDSLTRMADKVLLYKYIVKNVGKNHGKTVTMMPKPIFMDNGSGMHVHQSLWKGEKNVFYDASKYGLLSDTARHYIGGLLKHADALCAFIAPTTNSYRRLVPGYEAPINLVYSLRNRSACIRIPTYSNSEKARRIEFRTPDPSSNPYLAFSAMLMAGLDGVINKIEPPEPVDKDLYDLKPEEMKDVKSVVGSLDAALDALEEDHAFLLKGDVFTQDVIDMWLSYKREREVDAMRLRPHPYEFSLYYDV

SEQ ID NO: 194409 - protein, 318 aa, Unknown
  Bacterial polypetide isolated from the Sargasso Sea
NNGKGTEPPIWGFDGSSTEQATGDNSDCVLKPVSTFHDPIRGGDNILVMCEVLNVDMTPHTSNTRAACEAAAENFAEFEPMFGLEQEYTFYEQSYDSLKYGQPLGFPPSGYPAPQGGYYCGVGADEVYGRDISEEHASACMAAGLEISGTNAEVMPGQWEFQIGPVGAPEIGDHIWVARWLLYRIAEDYNISATLDPKPVKGDWNGAGMHTNFSTKQMREDGGYEAIIAGCEALGKNAELHVKNYGSGIEDRLTGDHETQKFDTFSYGVSDRGASIRIPWQVEVDKKGYLEDRRPNANADPYVIAMLMIDTVCSAASS

SEQ ID NO: 194410 - protein, 473 aa, Unknown
  Bacterial polypetide isolated from the Sargasso Sea
MSKSPQDVLSQIKDEGIELIDLKFTDIHGKWQHLTLTSDMIEEDSFTEGLAFDGSSIRGWKAINASDMSMVPDASTAWIDPFYKHKTLSMICSIQEPRSGEPYDRCPRALAQKALKYLDSTGIADTAFFGPEPEFFLFDDVRYDSKEGGCFYSVDTIEAPWNTGRIEEGGNLGYKIQYKEGYFPVAPNDTAQDIRSEMLLLMGELGIPTEKHHHEVAGAGQHELGMKFDSLINAADNVMTYKYVVRNVAKKYGKTATFMPKPVFNDNGTGMHVHQSLWKSGQPLFFGEGSYANLSQTARWYIGGILKHAPSFLAFTNPTTNSYKRLVPGFEAPVNLVYSEGNRSAAVRIPLTGPSPKAKRLEFRSGDALANPYLAFSVMMLAGIDGIKNQIDPGDGVDVDLFELPADELAKIDTVPSSLNDSLNALKADKDYLLAGGVFTEDFIDNFIDIKYEEVQQLRQRPHPHEFFMYYDA

SEQ ID NO: 194411 - protein, 203 aa, Unknown
  Bacterial polypetide isolated from the Sargasso Sea
MSAKNVLKLMKDKEIEYVDLRFTDPRGKLQHLTMDSTVVDEDMLIDGVFFDGSSIAGWKAINESDMILKPDLSRQIVDPFTTHNTLVLFCDILDAVKKNPYERDPRGIAKKAEAYLKSTGIGDKAYFGPEPEFFVFDDVRIKNDMNETSFAIDSTEGPYNSGRKYENGNMGHRPGIKGGYFPVPPVDSAQDVRGEYLKGLRDV

SEQ ID NO: 194412 - protein, 348 aa, Unknown
  Bacterial polypetide isolated from the Sargasso Sea
IGDKAFFGPEPEFFVFDDVRIKNDMNECGFKLDSKEGPYNSGKEYENGNMGHRPQIKGGYFPVPPVDSEQDMRGEYLKNLKEVGIKVEKHHHEVAPSQHELGMYFGTLVNQADNVQLYKYVVQMVTHSFGKTATFMPKPVAGDNGSGMHIHQSIWKGDTPVFSGDAYSGLSETALHYIGGILKHAKAINAFANSTTNSYKRLIPGFEAPVLLAYSARNRSASCRIPITLSKKGARCEIRFPDAAGNPYLTFAAMLMAGIDGIKNKIHPGESFDKDLYELPPEEVKAIPTVCGSLREAMESLDKDREFLTQGGVFTDDQIDAYIALKFEEIHKFEHAPHPVEFEMYYSS

SEQ ID NO: 194413 - protein, 351 aa, Unknown
  Bacterial polypetide isolated from the Sargasso Sea
MSCENVLKLIKENDIKFVDLRFCDTIGKEQHVTVPATVVDKEMLKDGKMFDGSSIAGWKSINESDMILMPDTDSAVVDPFFDDETLNIRCNVLEPSTMAGYDRDPRSIAKRAEDYLKSTGIADTAFFGPEPEFFIFDEVRWGDELHSGFYEVDSEEGCWNSDRIDEDKNIGHRPGVKGGYFPVPPVDSCQNIRSAMCSVLEEMGVTVEVHHHEVATAGQAEIGTTCKTLTRKADELLILKYVIQNVAHSFGKTATFMPKPLVGDNGNGMHVHQSLVKGDKNLFAGDKYGNLSDIALHYIAGIFKHARAINAFSNASTNSYKRLVPGFEAPTLLAYSARNRSASCRIPWVSN

SEQ ID NO: 194414 - protein, 470 aa, Unknown
  Bacterial polypetide isolated from the Sargasso Sea
MSVEDVLKIVKEKEVKFIDYRFTNTSGKEQHVTVTASEDGINTDFSEGKMFDGSSIAAWKDINESDMILMPDASTAVMDPFYDEPTLAVSCDVIEPEDGKPYEKDPRSIAKKAEEHLKSSGIADTAYFGPENEFFVFDDVRFEDKLGSCFFSVDSTEGCYNSGKTYEEGNMGHRPLVKGGYFPVPPVDSLQDCRSAMITTLQEMGIKCDVHHHEVATAGQCEIGVAFNTLVTKADEVQKYKYVVMNVAHAYGKTATFMPKPLVGDNGTGMHVHMSLAKGGKNIFAGKEYGNLSQEALWYIGGIIKHARALNAFTNASTNSYKRLIPGFEAPVILTYSARNRSASIRIPYVTSDKARRIEVRFPDSTANPYLAFSALMMAGLDGIKNKIDPGPSMDKDLFEISSDEEKLLPTVAPGLDVALEALDKDRAFLKEGDVFTDKMIDSYIGLKYEDVQRLRQSTHPCEFEMYYSL

SEQ ID NO: 194415 - protein, 476 aa, Unknown
  Bacterial polypetide isolated from the Sargasso Sea
MKLKSSTPKDLMSEIKDMDIKMVDMRFTDIPGTTQHFTIPIKFLDEDIFSDGLGFDGSSVRGFQEIQDSDMIVLPDATTAYIDPFFSEKTLALHCNIKDPVTLVDYSRDPRNIAKKAEAYLKSSGIGDTAFFGPEAEFFVFNNVQFDSGSNFAFHEVDSVEGTWNSGADENPNLGHKPRHKEGYFPLPPVDTLQDVRTEMVMTMQDIGLTVEAHHHEVATGGQCEIDLEFSPLLKMADDMMKYKYVVKNVARQHGMTATFMPKPLFEDNGSGMHVHQSVWKDGDTLMYKEGNYANLSDLALNYIGGILKHAPALLAFCAPTTNSYKRLVPGFEAPVNIVYSQRNRTASVRIPAYSQSPKAKRMEFRCPDPSANPYLAFSAMLMAGLDGIKNKINPGDPTDINLYAASDEVLSKIQSTPGSLAESLEALEKDHAFLLEGDVFTKDVIETYISYKKESEVDPINIRPHPHEFKLYYDV

SEQ ID NO: 194416 - protein, 331 aa, Unknown
  Bacterial polypetide isolated from the Sargasso Sea
MKKLEYVWLDGYQPEPMMRSKVKVIDGEIPGNSGSDLPDWSFDGSSTQQAEGGDSDCILKPVTTYSGPLHSDSLVMCEVMSPDKSPHPFNTRNACIDLLSDEWWFGFEQEYFFTNPEDGTILGWEDGTPRPQGDYYCGVGAGDVYGREISQAHMDACIDAGIKITGTNAEVALGQWEYQCFGKGLKAADDLWMSRYLLHLVAEEFGVAVNTHPKPQEGDWNGSGMHTNFSNDEMRNNGSEELMNSLCEKLGAVHEEGISNYGSDNEKRLTGNHETQSINTFSYGVSDRGASIRIPIYTVENNWNGYLEDRRPASNADPYRIISHIVGTLTK

SEQ ID NO: 194417 - protein, 163 aa, Unknown
  Bacterial polypetide isolated from the Sargasso Sea
MSSNKVLKLMKDKEIEFVDLRFTDPRGKLQHLTMDSTIVDDDMLNDGVFFDGSSIAGWKAINESDMILKPDLSRQVIDPYTSHNTLIIFCDILDAVKKTPYERDPRGIAKKAEAYLKKSGVGDKAYFGPEPEFFVFDDVKIKNEMNEIGFKIDSSEGPYNSGK

SEQ ID NO: 194418 - protein, 468 aa, Unknown
  Bacterial polypetide isolated from the Sargasso Sea
MSAKDVLKFIKDKEAEFVDLRFTDPRGKLQHLTMDATAVDDGMLTDGVFFDGSSIAGWKAINESDMILKPDLSRKIVDPYTSHNTLILFCDILDAVNKNPYERDPRGIAKKAEAYLKKSGVGDKAYFGPEPEFFVFDDVRIKNDMNETSFSIDSTEGPYNSGRKYENGNMGHRPGIKGGYFPVPPVDSAQDMRSEYLKGLRDVGIKVEKHHHEVAPSQHELGMYFGTLVDQADNVQLYKYVVQMVSHSFGKTATFMPKPVKGDNGSGMHTHQSIWKSKTPVFSGDKYAGLSQTALYYIGGILKHAKAINAFSNATTNSYKRLIPGFEAPVLLAYSARNRSASCRIPITLSKNGARCEIRFPDASGNPYLTFASMLMAGLDGIKNKIDPGKSFDKDLYALSESEVKKVPTVCGSLREAMESLDRDRAFLKEGNVFTDDQIDAYIALKFEEIYNFEHTPHPIEFEMYYSC

SEQ ID NO: 194419 - protein, 279 aa, Unknown
  Bacterial polypetide isolated from the Sargasso Sea
MSARDVLKEIKSKNVEYVDLRFTDPRGKLQHLTMDKTIVDEEMLNDGVFFDGSSIAGWKAINESDMILKPDLSRTVIDPYTSHNTMILFCDILDAVKRDPYERDPRGIAKKAEAYLKKTGIGDKAYFGPEPEFFVFDDVKIKNDMNETGFSIDSSEGPYNSGKSYDNGNMGHRPGIKGGYFPVPPVDSAQDMRGEYLKGLRDVGITVEKHHHEVAPSQHELGMLFGTLVDQADNVQLYKYVVQMVSHSFGKTATFMPKPVKGDNGSGMHTHQSIGKVKI

SEQ ID NO: 194420 - protein, 195 aa, Unknown
  Bacterial polypetide isolated from the Sargasso Sea
ADEVYGRAISEAHATACIEAGLGISGTNAEVMPGQWEFQIGPVGAPDIGDQIWIARWLLYRIAEDWNISATLNPKPVKGDWNGAGMHTNFSTKQMREDGGYDAIVAGCEALGKNADLHVKNYGANIEDRLTGDHETQSFDTFSYGVSDRGASIRIPWQVEVDKKGYLEDRRPNANGDPYVIAMLMIDTVCSAASS

SEQ ID NO: 194421 - protein, 421 aa, Unknown
  Bacterial polypetide isolated from the Sargasso Sea
MSAKDVLKLMKSKNIEFVDLRFTDPRGKLQHLTMDTTIVDEGMLNDGVFFDGSSIAGWKAINESDMILKPDLSRKVIDPYTSHNTLILFCDILDAVKRDPYERDPRGIAKKAEAYLKKTGIGDTAYFGPEPEFFVFDDVRIKNDMNETSFSIDSSEGPYNSGKSYDNGNMGHRPGVKGGYFPVPPVDSAQDMRGEYLKGLRDVGITVEKHHHEVAPSQHELGMLFGTLVNQADNVQLYKYVVQMVSHSFGKTATFMPKPVKGDNGSGMHTHQSIWKGKTPVFSGNKYAGLSQTALYYIGGVLKHAKAINAFANATTNSYKRLIPGFEAPVLLAYSARNRSASCRIPITLSKKGARCEIRFPDASGNPYLTFASMLMAGIDGIKNKIDPGKSFDKDLYALSEKQVKKVPTVCGSLREAMEAL

SEQ ID NO: 194422 - protein, 468 aa, Unknown
  Bacterial polypetide isolated from the Sargasso Sea
MSAKNIQKTMKDKSIEYVDLRFTDPRGKLQHVTMDAKVVDDEMLEEGIFFDGSSIAGWKAINESDMILKPDLSRPVVDPFTSHNTLNLFCDVLDAIKKNPYERDPRGTAKKAEEYLKKSNIGDKAFFGPEPEFFVFDDVRYKNDMNETGFKIDSTEGPYNTGKEYDNGNMGHRPGVKGGYFPVPPVDSAQDMRSEYLKAMKDMGIKVEKHHHEVAPSQHELGMYFGTLVNQADNIQLYKYAVHMVTHSFGKTATFMPKPVKGDNGSGMHVHQSIWKGNTPLFMGNKYAGLSDTALYYIGGILKHARAINAFSNATTNSYKRLIPGFEAPVLLAYSARNRSASCRIPITLSKKAARCEIRFPDASGNPYLTFASMLMAGLDGIKNKIDPGKSFDKDLYALSESEVKKIPTVCGSLREAMESLDKDRKFLTQGGVFTDDQIDAYIDLKMEEVHNFEHTPHPIEFDMYYSC

SEQ ID NO: 194423 - protein, 470 aa, Unknown
  Bacterial polypetide isolated from the Sargasso Sea
MKSAKEVIDFAKKNNAVMVDLKFIDFLGTWQHFAVSISDLSEEMLEEGRMFDGSSIRCWQTIDSSDMKVMPDLSTTTMDPFYAHPTLSIICDIIDPITGEGYTRDPRNIASKAEKYLISTGIADTAFFGPEAEFFMFDDVRYAQDAEGGFYAIDSPECPWNTGTDEPGGNKAYKYGHKLGYFPTAPFDQDRDIRAEMVLKLEEMGITVEAQHHEVAPAQHEIDIKFDTLLKTADNLQWFKYVIRNVARENGKAATFMPKPMFNDNGNGMHTHQSLWKNGQPLFAGDQYAGLSQDALYYIGGILNHAPALAAFTNPLTNSYKRLVPGFEAPINLAYSNRNRSATVRIPVVDSPKARRLEYRCPDPGANVYIAFAAMLMAGLDGIQNKIDPGDPMDVNIYDLPPEKLNKIGKMPSSLRDSLDALESDNEFLLKGNVFTKDVIEYWLDYKMEEEVKAIDSRPHPHEFNLYFNY

SEQ ID NO: 194424 - protein, 184 aa, Unknown
  Bacterial polypetide isolated from the Sargasso Sea
MPKVSDILKEIKDTDIKFVDLRFTDPRGKLQHVTMDASVMDSDAFAEGIMFDGSSIAGWKAINESDMTLMPDPDTAHTDPFFAQSTMGIFCDILDPISGDGYERDPRSVAKKAEAYLKSTGIGDTSSFGPEAEFFMFDDVRFAADPYQTGFELDCTELPSNTATEYESGNLGHKPRTKGGYFPV

SEQ ID NO: 194425 - protein, 277 aa, Unknown
  Bacterial polypetide isolated from the Sargasso Sea
MTAILKPVTTYPGPLHSDSLVMCEVMSPDKTPHPSNTRNACIDLLSDEWWFGFEQEYFFTNPEDGTILGWEDGTPRPQGDYYCGVGAGDVYGRDISQAHMDACIDAGIKITGTNAEVALGQWEYQCFGKGLKAADDLWMSRYLLHLVAEEFGVAVNTHPKPQEGDWNGSGMHTNFSNDEMRNSGSEELMNSLCEKLGAVHEEGIKNYGSDNDKRLTGNHETQSIDTFSYGVSDRGASITIPIYTVENNWNGYLEDRRPASNADPYKIISHIVGTLTK

SEQ ID NO: 194426 - protein, 333 aa, Unknown
  Bacterial polypetide isolated from the Sargasso Sea
MAKTPQDVLRQIKDEGIELIDLKFTDLHGKWQHLTVCTDLLEEDSFTEGLAFDGSSIRGWKSINASDMAMVPDASTAWIDPFYRHKTLSMICSIQEPRSGEAYDRCPRALAQRALNHLSSTGLADTAFFGPEPEFFLFDDVRYNSSEGGAFYSVDTIEAPWNTGRLEEGGNLAYKIQLKEGYFPVAPNDTAQDIRSEMLLLMGQLGIPTEKHHHEVAGAGQHELGMKFAELIQAADNVMTYKYVVRNVAKKYGKTATFMPKPVFNDNGSGMHVHQSLWKGGQPLFFGEGTYANLSQTARWYIGGILKHAPAFLAFTNPTTNSYKRLVPGFEAP

SEQ ID NO: 194427 - protein, 259 aa, Unknown
  Bacterial polypetide isolated from the Sargasso Sea
HHHEVAPSQHELGMYFGTLVNQADNVQLYKYVVQMVTHSFGKTATFMPKPVAGDNGSGMHIHQSIWKGDTPVFSGDAYAGLSETALHYIGGILKHAKAINAFANSTTNSYKRLIPGFEAPVLLAYSARNRSASCRIPITLSKKGARCEIRFPDAAGNPYLTFAAMLMAGIDGIKNKIHPGESFDKDLYELPPEEVKAIPTVCGSLREAMESLDKDREFLTQGGVFTDDQIDAYIALKFEEIHKFEHAPHPVEFEMYYSS

SEQ ID NO: 194428 - protein, 393 aa, Unknown
  Bacterial polypetide isolated from the Sargasso Sea
LSRQVIDPYTSHNTLIIFCDILDAVKKTPYERDPRGIAKKAEAYLKKSGVGDKAYFGPEPEFFVFDDVKIKNEMNEIGFKIDSSEGPYNSGKNYENGNMGHRPGVKGGYFPVPPVDSAQDMRGEYLKGLREVGITVEKHHHEVAPSQHELGMLYNTLVTQADNVQLYKYVVQMVSHSFGKTATFMPKPVKGDNGSGMHTHQSIWKGKNPIFSGNKYAGLSETALHYIGGILKHAKAINAFSNATTNSYKRLIPGFEAPVLLAYSARNRSASCRIPITLSKKGARCEIRFPDAAGNPYLTFSAMLMAGLDGIKNKINPGKPLDEDLYALPEDKVKNIPTVCGSLREAMESLDRDRGFLKQGGVFSDDQIDAFIALKFEEIYNLEHTPHPMEFEM

SEQ ID NO: 194429 - protein, 426 aa, Unknown
  Bacterial polypetide isolated from the Sargasso Sea
MLDNGVFFDGSSIAGWKAINESDMILKPDLDRPIIDPFNSHTTLNIFCDILDAVKKNPYERDPRGTAKKAEAYLKKSGIGDKSYFGPEPEFFVFDDVRFKNDMNETSFSIDSSEGPYNTGKKYENGNMGHRPGIKGGYFPVPPVDSAQDMRGEYLKALKDMGVKVEKHHHEVAPSQHELGMYFNTLTNMADNVQLYKYAVQMVTHSFGKTATFMPKPVKGDNGSGMHCHQSIWKGSTPLFMGKEYAGLSKEALYYIGGILKHARAINAFSNATTNSYKRLIPGFEAPVILAYSARNRSASCRIPVIMNPKAARMEIRFPDAAGNPYLTFASMLMAGIDGIKNKIDPGKAFDQDLYSLSEDEVKKLPTVCGSLREAMQNLDKDRKFLTEGGVFTDDQIDAYIELKFQEIYKFEHTPHPIEFEMYYSG

SEQ ID NO: 194430 - protein, 241 aa, Unknown
  Bacterial polypetide isolated from the Sargasso Sea
LVDQADNLQLYKYAVHMVSNSFGKTATFMPKPVKGDNGSGMHVHQSIWKGDKALFSGDKYAGLSDTALHYIGGILKHAKAINAFSNATTNSYKRLIPGFEAPVLLAYSARNRSASCRIPITLSKKAARCEIRFGDAAGNPYLTFSAMLMAGLDGIKNKIDPGKSFDKDLYALSEDEVKKIPTVCGSLREAMESLDKDRDFLKQGNVFTDDQIDAYIALKFEEIHNFEHTPHPIEFEMYYSC

SEQ ID NO: 194431 - protein, 396 aa, Unknown
  Bacterial polypetide isolated from the Sargasso Sea
GVFFDGSSISGWKAINESDMVLKPDLTTTVMDPFTAQPTLIVFCDVLDAVSKEPYERDPRGTARKAEEYVKASGIGDTIYMGPEAEFFIFDDVKFQVDMNKSMFEIDSTEGPYNSGRSYESGNLAHRPGVKGGYFPVPPVDSAQDIRTEFLEELKNLGLKMEKHHHEVAPSQHELGLKFDTLLKQGDAMQLYKYGVHMVANAFGKTATFMPKPVKGDNGTGMHTHQSIWKNGEPLFAGDKYAGLSEMALHYIGGIIKHGRALNAFTNASTNSYKRLIPGFEAPVILVYSARNRSASCRIPVSDNPKGKRVEVRFPDPSANPYLAFSAMLMAGMDGIKNKIDPGNAADEDLYELPEAEVKKLPTVCGSLREALEAVDEDRAFLTEGGVFTDDQLMHI

SEQ ID NO: 194432 - protein, 469 aa, Unknown
  Bacterial polypetide isolated from the Sargasso Sea
MSVEKALELIKESEAKFVDLRFTDTKGKEQHVSIPASVVDEEFFEEGKMFDGSSIAGWKGINESDMVLLPDATSCVVDPFAEETQVNIRCDIVEPSTMEGYERDPRSVARRAEEFLKSTGIGDTCFFGPEPEFFLFDDVRFHTDMAGSFYKIDSSEAKWNSGEEFEGGNMAHRPGVKGGYFPVPPVDSAHDIRAAMCLVMEEMGLVIEAHHHEVATAGQNEIACQFNTLVKKADEIQVYKYVVHNVAHAYGQTATFMPKPLVGDNGSGMHCHQSISKDGVNIFAGDKYAGLSEEALYYIGGIIKHARAINAFANASTNSYKRLVPGFEAPVMLAYSARNRSASIRIPHVTSDKARRIEVRFPDPTANPYLAFTAMLMAGIDGIKNKIHPGDSMDKDLYDLPPEEAAEIPTVASSLEMALEALDNDRDFLKAGGVMTDDMIDAYIDLKSEEVTKLNMTTHPVEFDMYYSV

SEQ ID NO: 194433 - protein, 265 aa, Unknown
  Bacterial polypetide isolated from the Sargasso Sea
MSASDVLKTIKDKDIEYVDLRFTDPRGKLQHVTMDAKMVDDEMLNEGIFFDGSSIAGWKAINESDMILKPDLSRAIVDPFTSHNTLNLFCDILDAIKKDPYERDPRGTAKKAEAYLKSSGIGDKAFFGPEAEFFVFDDVRFKNDMNETGFKIDSKEGPYNSGREYENGNMGHRPGIKGGYFPVPPVDSEQDMRSEYLKAMKDMGIKVEKHHHEVAPSQHELGMYFGTLVDQADNLQLYKYAVHMVSHSFGKTATFMPKPVKGDNG

SEQ ID NO: 194434 - protein, 441 aa, Unknown
  Bacterial polypetide isolated from the Sargasso Sea
KLQHLTIDSTAVDNDMLNDGVFFDGSSIAGWKAINESDMILKPDLSRTVIDPFTSHNTLILFCDIFDAVKKNSYERDPRGIAKKAEAYLKSTGIGDKAYFGPEPEFFVFDDVRIKNDMNEIGFSIDSSEGPYNSGRKYENGNMGHRPGIKGGYFPVPPVDSAQDMRSEYLKGLRDVGIKVEKHHHEVAPSQHELGMYFGTLVDQADNVQLYKYVVQMVSHSFGKTATFMPKPVKGDNGSGMHTHQSIWKGKTPVFSGNKYAGLSDTALHYIGGILKHAKAINAFSNATTNSYKRLIPGFEAPVLLAYSARNRSASCRIPITLNKKGARCEIRFPDAAGNPYLTFAAMLMAGLDGIKNKINPGKSFDKDLYSLSEEEVKKVPTVCGSLREAMESLDTDRAFLKKGNVFTDDQIDAYIALKFEEIHNFEHTPHPIEFDMYYSS

SEQ ID NO: 194435 - protein, 466 aa, Unknown
  Bacterial polypetide isolated from the Sargasso Sea
LKKIKNEDIKMVDLRFTDMPGSTHHISIPIKFLKEDLFKDGVGFDGSSVRGFQSIENSDMAMVPDVTTAYIDPFYSEKTIAFYCDVVDPISYESYEKDPRYIAKKAERYLKSSGLGDTAYFGPEAEFFVFNDVKYDSGSNFSFHEVDSTEGAWNTGKEENPNLGHKPRHKGGYFPLPPSDSLQDVRTEMVLTMEEIGINVEASHHEVATGGQCEIDLEFSPLLSMADDLLRYKYVVKNVAKQYGMTATFMPKPLFEDNGSGMHVHSSIWKKNKTLMYKKGNYADLSDFALHYIGGILKHAPSLLAFCAPTTNSYKRLVPGFEAPVNIAYSQANRTASVRIPNNYTASPKAKRVEFRCPDPSSNPYLAFSAILMAGLDGVKNKINPGKPTDINIYEAPASVLAKIPSTPGSLAESLNALEKDNKYLLQGGVFTKDNIETYISYKRENEVSPMDLRPHPHEFNLYYDV

SEQ ID NO: 194436 - protein, 155 aa, Unknown
  Bacterial polypetide isolated from the Sargasso Sea
MSSKDVLKTMKDKEIEFVDLRFTDPRGKLQHLTMDSSVVDEGMLNDGVFFDGSSIAGWKAINESDMILKPDLSRKIVDPYTSHNTLILFCDILDAVKKDPYERDPRGIAKKAEKYLIKSGIGDKAYFGPEPEFFVFDDVRIKNDMNETGFSIDST

SEQ ID NO: 194437 - protein, 428 aa, Unknown
  Bacterial polypetide isolated from the Sargasso Sea
ADMLNDGIFFDGSSIAGWKAINESDMILKPDLSRTVVDPFTSHNTLNIFCDILDAVKKNPYERDPRGTAKKAEDYLKKTGIGDKAYFGPEPEFFVFDDVRYKNDMNETSFSIDSSEGPYNTGKKYENGNMGHRPGIKGGYFPVPPVDSAQDMRSEYLKAMKDMDIKVEKHHHEVAPSQHELGMYFSTLVNQADNLQLYKYAVHMVSHSFGKTATFMPKPVKGDNGSGMHVHQSIWKGGTATFSGNKYAGLSDTALHYIGGILKHAKAINAFSNSTTNSYKRLIPGFEAPVLLAYSARNRSASCRIPITLSKKAARCEVRFPDAAGNPYLTFSALLMAGLDGIKNKIDPGKSLDKDLYALSESEVKKIPTVCGSLREAMENLDKDRKFLTQGNVFTDDQIDAYIALKYEEIYNFEHTPHPMEFQMYYSC

SEQ ID NO: 194438 - protein, 468 aa, Unknown
  Bacterial polypetide isolated from the Sargasso Sea
MSASSVKKIIKDKEIEYVDLRFTDPRGKLQHVTMDATIVDEDMLNEGVFFDGSSIAGWKAINESDMILKPDLSRTVVDPFTSHNTLNIFCDILDAIKKDPYERDPRGTAKKAEAYLKKTGVGDKAYFGPEPEFFVFDDVRYSNDMNHTGFQIDSSEGPYNTGKKYENGNMGHRPGIKGGYFPVPPVDSAQDMRSEYLKAMKDMGIKVEKHHHEVAPSQHELGMYFGTLVDQADNLQLYKYAVHMVTHSFGKTATFMPKPVKGDNGSGMHCHQSIWKGSTAVFSGNKYAGLSDTALHYIGGILKHARAINAFANATTNSYKRLIPGFEAPVLLAYSARNRSASCRIPITQSKKAARCEVRFPDAAGNPYLTFSALLMAGLDGIKNKIDPGKSLDKDLYALSESEVKKIPTVCGSLREAMESLDKDRKFLTQGNVFTDDQIDAYIALKYEEIYNFEHTPHPMEFQMYYSC

SEQ ID NO: 194439 - protein, 486 aa, Unknown
  Bacterial polypetide isolated from the Sargasso Sea
MPYKVIGGKATQIKYSSDEVFSRIKHEGIKFIDLQFTGLTGRFHHTTISADTFTPQQMEDGLPKLDGSSIVGFTDIADSDLILKPDPSTFAIIPWLTEKKTARLLCDVYWGGGRGRLESDPRGICQKAEAFVKTQGFDFSNWGPEVEFFVFDKVHWDVLTPYKGQSYSIESSESPWSQEGTGYPMGLQEGYYPSTPSDTLAPFRNECVDVLNDNFGILCDNHHHEVATAGQCEIDIKYDLMTNSADGAQSYKYVVRNVAQQFGKVATMMPKPISMDAGSGMHTNVSLWKKDENTFYDKDEVLELSQTGRYFCGGVMEHAKGLTAITNPTTNSYHRLVPGYEAPVYIAWSSSNRSATIRIPGHFRGEKYAYMKRMEYRVPDPASNPYLVFSAVLAAGLDGIKKKIEPGDPVKEDIYKMTKSERKKHGIDTLPANLGRALDELESDRKYLTPIFSNEVLDKIIDLERRDHREIAIRPHPHEFYLYFDV

SEQ ID NO: 194440 - protein, 326 aa, Unknown
  Bacterial polypetide isolated from the Sargasso Sea
MQTMKILEYIWLDGYQPEPSIRSKIKVTKDETPPDWSFDGSSTQQAEGGSSDCLILPVQTYDGPLFADHLVMCEVETGEHKTHPSNMRAGAAQVVTDEWWFGFEQEYFFTDMNGEPLGWEDGTPRPQGDYYCGVGATNVKGREISEVHLEACLAAGIKITGTNAEVALGQWEYQCFGKGIKAADDLWVSRYLLYKIAEDYEVGVNIHPKPKTGDWNGSGMHTNFSNDEMRNNGSEKLYHSLCDKLGEAHEDGINAYGSDNDMRLTGLHETQSIDQFSYGVSDRGASIRIPIYTVENNWNGYLEDRRPASNADPYRIVKHIVGTLTK

SEQ ID NO: 194441 - protein, 450 aa, Unknown
  Bacterial polypetide isolated from the Sargasso Sea
MKYNCKTPKELLKKIKNEEIKMVDLRFTDMPGSTHHISIPVKYLTEDLFKDGVGFDGSSVRGFQSIENSDMAMVPDVTSGYIDPFFSEKTIAFTCDVVDPITYESYDRDPRYIAKKAEKYLKSSGMGDTAYFGPEAEFFVFNDVKYDSGSNFAFHEVDSAEGAWNTGKDENPNLGHKPRHKGGYFPLPPSDSLQDVRTEMVLTMEEIGIDVEASHHEVATGGQCEIDLQFSPLLLMADDLLRYKYVVKNVAKQHGMTATFMPKPLFEDNGSGMHVHSSIWKNNKTLMYKKGNYADLSDFALYYIGGILKHAHSLLAFCAPTTNSYKRLTPGFEAPVNIAYSQANRTASVRIPNNYTASPKAKRVEFRCPDPSSNPYLAFSAILMAGLDGVKNKINPGKPTDINIYEAPASVLAKIPSTPGSLAESLNALEKDHKYLLAGDVFTKDNIETY

SEQ ID NO: 194442 - protein, 231 aa, Unknown
  Bacterial polypetide isolated from the Sargasso Sea
YKYVVQMVTHSFGKTATFMPKPVAGDNGSGMHTHQSIWKGDTPVFSGDAYAGLSETALHYIGGILKHAKAINAFANATTNSYKRLIPGFEAPVLLAYSARNRSASCRIPITLSKKGARCEIRFPDASGNPYLTFAAMLMAGIDGIKNKIHPGESFDKDLYDLPPEEVKSIPTVCGSLREAMESLDKDREFLTQGGVFTDDQIDAYIALKFEEIHKFEHAPHPVEFEMYYSC

SEQ ID NO: 194443 - protein, 468 aa, Unknown
  Bacterial polypetide isolated from the Sargasso Sea
MSAANVLKFIKEKEAEFVDLRFTDPRGKLQHLTMDASIVDESMLNEGVFFDGSSIAGWKAINESDMILKPDTARMFMDPFTSHNTVVLFCDILDAIKKDPYERDPRGVAKKAEEYLKASGIGDKAFFGPEPEFFVFDDVRIKNDMNECGFKLDSKEGPYNSGKEYENGNMGHRPQIKGGYFPVPPVDSEQDMRGEYLKNLKEVGIKVEKHHHEVAPSQHELGMYFGTLVNQADNVQLYKYVVQMVTHSFGKTATFMPKPVAGDNGSGMHIHQSIWKGDTPVFSGDAYSGLSETALHYIGGILKHAKAINAFANSTTNSYKRLIPGFEAPVLLAYSARNRSASCRIPITLSKKGARCEIRFPDAAGNPYLTFAAMLMAGIDGIKNKIHPGESFDKDLYELPPEEVKAIPTVCGSLREAMESLDKDREFLTQGGVFTDDQIDAYIALKFEEIHKFEHAPHPVEFEMYYSS

SEQ ID NO: 194444 - protein, 339 aa, Unknown
  Bacterial polypetide isolated from the Sargasso Sea
MSARDVLKQIKSKNVEYVDLRFTDPRGKLQHLTMDKTIVDEGMLNDGVFFDGSSIAGWKAINESDMILKPDLSRTVMDPYTSHNTMILFCDILDAVKKDPYERDPRGIAKKAEVYLKKTGIGDKAYFGPEPEFFVFDDVKIKNDMNETGFSIDSSEGPYNSGKSYDNGNMGHRPGIKGGYFPVPPVDSAQDMRGEYLKGLRDVGITVEKHHHEVAPSQHELGMLFGTLVDQADNVQLYKYVVQMVSHSFGKTATFMPKPVKGDNGSGMHTHQSIWKGKTPVFSGNKYAGLSQTALYYIGGILKHAKAINAFSNATTNSYKRLIPGFEAPVLLAYSARNR

SEQ ID NO: 194445 - protein, 371 aa, Unknown
  Bacterial polypetide isolated from the Sargasso Sea
MSEIIQKIKDEDVKFVDLRFTDPHGKEQHVTMPAHVVDESMLEGGKMFDGSSIAGWKGINESDMILKPDLSTAVIDPFFSDTTLNITCDILEPSNGEGYNRDPRTIAKKAEKFLIDSGVADTAYFGPEPEFFVFDDVRYSNEIGSSFYEIDTEEACYNSGKVYEDGNTGHRPGVKGGYFPVPPVDSLQDIRSAMVTVLDEMGVECEVHHHEVATAGQCEIGTKYETLVKRADWNQILKYVVMNVAHNYGKTATFMPKPIINDNGNGMHVHQSLFKDGNNLFEGDLYGGLSQTALYYIGGIIKHAKAINAFSNSATNSYKRLVPGFEAPTILAYSARNRSASIRIPYEANPKARRIEVRFPDSCGNPYYTLQ

SEQ ID NO: 194446 - protein, 142 aa, Unknown
  Bacterial polypetide isolated from the Sargasso Sea
MSAENVLKFIKEKEAEFVDLRFTDPRGKLQHLTMDATIVDADMLNEGVFFDGSSIAGWKAINESDMILKPDTARMFMDPFTSHNTAVLFCDILDAIKKDPYERDPRGVAKKAEEYLKASGIGDKAFFGPEPEFFVFDDVRIK

SEQ ID NO: 194447 - protein, 307 aa, Unknown
  Bacterial polypetide isolated from the Sargasso Sea
DTDYEMGNTGHRPGIKGGYFPVNPIDDGQDIRSEMLSTMKRLGMKVDKHHHEVASCQHELGLIFDSLTKQGDDLQKYKYVIHNVAQAYGKSATFMPKPIAGDNGTGMHVNMSIWKGGKPLFAGDKYADLSQEALYYIGGILKHAKSLNAFTNPSTNSYKRLIPGFEAPVLRAYSARNRSGCVRIPWTESPKAKRVEARFPDPSSNPYLCFSALLMAGLDGIKNKVNPGEAMDKNLYDLPAEELADIPTVCGSLREAIEELQKDHDYLLAGNVFTKDQIDGYIELKMEEIESYEHTPHPVEYGMYYSC

SEQ ID NO: 194448 - protein, 324 aa, Unknown
  Bacterial polypetide isolated from the Sargasso Sea
MNECGFILDSKEGPYNSGKEYENGNMGHRPGVKGGYFPVAPVDSEQDMRSEYLKNLKEVGIKVEKHHHEVAPSQHELGMYFGTLVQQADNVQLYKYVVQMVTHSFGKTATFMPKPVAGDNGSGMHTHQSIWKGDTPVFSGDAYAGLSETALHYIGGILKHAKAINAFANATTNSYKRLIPGFEAPVLLAYSARNRSASCRIPITLSKKGARCEIRFPDASGNPYLTFAAMLMAGIDGIKNKIHPGESFDKDLYELPPEEVKSIPTVCGSLREAMESLDKDREFLTQGGVFTDDQIDAYIALKFEEIHKFEHAPHPVEFEMYYSC

SEQ ID NO: 194449 - protein, 468 aa, Unknown
  Bacterial polypetide isolated from the Sargasso Sea
MSAENVLKFIKEKEAEFVDLRFTDPRGKLQHLTMDSTVVDADMLNEGVFFDGSSIAGWKAINESDMILKPDTSRMFMDPFTSHNTAVLFCDILDAIKKDPYERDPRGVAKKAEEYLKSSGIGDKAFFGPEPEFFVFDDVRIKNDMNECGFKIDSKEGPYNSGKEYESGNMGHRPPIKGGYFPVPPVDSEQDMRGEYLKNLKEVGIKVEKHHHEVAPSQHELGMYFGTLVNQADNVQLYKYVVQMVTHSFGKTATFMPKPVAGDNGSGMHIHQSIWKGDTPVFSGDAYAGLSETALHYIGGILKHAKAINAFANSTTNSYKRLIPGFEAPVLLAYSARNRSASCRIPITLSKKGARCEIRFPDASGNPYLTFAAMLMAGIDGIKNKIHPGESFDKDLYELPPEEVKAIPTVCGSLREAMESLDKDREFLTQGGVFTDDQIDAYIALKFEEIHKFEHAPHPVEFEMYYSS

SEQ ID NO: 194450 - protein, 468 aa, Unknown
  Bacterial polypetide isolated from the Sargasso Sea
MSANKVLKQMKDKDIEYVDLRFTDPRGKLQHVTMDSKVVDEEMLDEGIFFDGSSIAGWKAINESDMILKPDLSRTVIDPFTSHNTMNIFCDVMDAIKKDPYERDPRGTAKKAEAYLKKSGIGDKAYFGPEAEFFVFDDVKYKNDMNETGFKIDSTEGPYNTGKDYPNGNMGHRPGVKGGYFPVPPVDSAQDMRSEYLKAMKDMGIKVEKHHHEVAPSQHELGMYFGTLVDQADNLQLYKYAVHMVSHSFGKTATFMPKPVKGDNGSGMHVHQSIWKGDKALFSGDKYAGLSDIALNYIGGILKHAKAINAFSNATTNSYKRLIPGFEAPVLLAYSARNRSASCRIPITLSKKAARCEVRFGDAAGNPYLTFAAMLMAGLDGIKNKIDPGKSFDKDLYALSESEVKKIPTVCGSLREAMESLDKDRDFLKQGNVFTDDQIDAYIALKFEEIHNFEHTPHPIEFDMYYSC

SEQ ID NO: 194451 - protein, 468 aa, Unknown
  Bacterial polypetide isolated from the Sargasso Sea
MTAANVLKFIKVKEAEFVDLRFTDPRGKLQHLTMDAGVVDKDMLDNGVFFDGSSIAGWKAINESDMILKPDTARMFMDPFTSHNTVVLFCDILDAVKKNPYERDPRGVAKKAEKYLKASGIGDKAFFGPEPEFFVFDDVRIKNDMNECGFKIDSKEGPYNSGKEYDNGNMGHRPPVKGGYFPVPPVDSEQDMRGEYLKNLKEVGIKVEKHHHEVAPSQHELGMYFGTLVDQADNVQLYKYVVQMVTHSFGKTATFMPKPVAGDNGSGMHIHQSIWKGNTPVFSGNAYSGLSKTALHYIGGILKHAKAINAFANSTTNSYKRLIPGFEAPVLLAYSARNRSASCRIPITLSKKGARCEIRFPDAAGNPYLTFAAMLMAGLDGIKKKINPGKSFDKDLYELPAKEVEKIPTVCGSLREAMESLDKDRSFLTQGGVFTDDQIDAYIALKFEEIHKFEHAPHPVEFDMYYSS

SEQ ID NO: 194452 - protein, 289 aa, Unknown
  Bacterial polypetide isolated from the Sargasso Sea
YFPVPPVDSEQDMRSEYLKAMKEMGIKVEKHHHEVAPSQHELGMYFGTLVDQADNLQLYKYAVHMVSNSFGKTATFMPKPVKGDNGSGMHVHQSIWKGDTALFSGDKYAGLSDTALHYIGGILKHAKAINAFSNATTNSYKRLIPGFEAPVLLAYSARNRSASCRIPITLSKKAARCEIRFGDAAGNPYLTFSAMLMAGLDGIKNKIDPGKSFDKDLYALSEDEVKKIPTVCGSLREAMESLDKDRDFLKQGSVFTDDQIDAYIALKFEEIHNFEHTPHPIEFEMYYSC

SEQ ID NO: 194453 - protein, 336 aa, Unknown
  Bacterial polypetide isolated from the Sargasso Sea
MSKIRAEYIWMDGHEPTQKLRSKTKVLDGPVESLDDLPLWGFDGSSTNQADGNDSDCMLKPVYKIPDPIRGGDDILVMCEVMNPDGSVHASNTRAHLRVVAEQHKDQEAWFGIEQEYTLFEGRNPLGWPEGGYPAPQGPFYCGVGADEVFGRDIVEEHLELCLDAGLEVSGINAEVMPGQWEYQVGPLGPLESADQMWLSRWLLYRVSEDFGVSATLHPKPVKGDWNGAGAHTNFSTRSMREEGGMKVIEDACEKLSQKHDEHIDVYGAHNEERLTGLHETCSIKEFRYGVSDRGASIRIPMQTANDGYGYLEDRRPSANMDPYKVCAILIETTCG

SEQ ID NO: 194454 - protein, 261 aa, Unknown
  Bacterial polypetide isolated from the Sargasso Sea
MSASSVRKIIKDKEIEYVDLRFTDPRGKLQHVTMDATIVDEDMLNEGVFFDGSSIAGWKAINESDMILKPDLSRAVVDPFTTHNTLNIFCDILDAIKKDPYERDPRGTAKKAEGYLKKTGVGDKAYFGPEPEFFVFDDVRYSNDMNHTGFQIDSSEGPYNTGKKYENGNMGHRPGIKGGYFPVPPVDSAQDMRSEYLKAMKDMGIKVEKHHHEVAPSQHELGMYFGTLVDQADNLQLYKYAVHMVTHSFGKTATFMPKPVK

SEQ ID NO: 194455 - protein, 468 aa, Unknown
  Bacterial polypetide isolated from the Sargasso Sea
MSAKDVLETIKDKEIEYVDLRFTDPRGKLQHVTMDAKMVDDEMLNEGIFFDGSSIAGWKAINESDMILKPDLSRAIVDPFTSHNTMNLFCDILDAIKKDPYERDPRGTAKKAEAYLKSSGIGDKAFFGPEAEFFVFDDVRFKNDMNETGFKIDSKEGPYNSGREYENGNMGHRPGIKGGYFPVPPVDSEQDMRSEYLKAMKDMGIKVEKHHHEVAPSQHELGMYFGTLVDQADNLQLYKYAVHMVSHSFGKTATFMPKPVKGDNGSGMHVHQSIWKGDTALFSGDKYAGLSETALHYIGGILKHAKAINAFSNATTNSYKRLIPGFEAPVLLAYSARNRSASCRIPITLSKKAARCEIRFGDAAGNPYLTFAAMLMAGLDGIKNKIDPGKSFDKDLYALSEDEVKKIPTVCGSLREAMESLDKDRDFLKEGNVFTDDQIDAYIALKFEEIHNFEHTPHPIEFEMYYSC

SEQ ID NO: 194456 - protein, 199 aa, Unknown
  Bacterial polypetide isolated from the Sargasso Sea
MKIKAEYIWIDGKTPTAKLRSKTKIMDQGTEPPIWGFDGSSTEQATGDQSDCVLKPVAQFPDPIRGGDNILVMCEVLNVDMTPHASNTRAACVASAENFSEFEPMFGLEQEYTFYEQSYDSLKYGQPLGFPPSGYPAPQGGYYCGVGADEVYGRSISEDHATACMEAGLNISGTNAEVMPGQWEFQIGPVGAPRYWRSN

SEQ ID NO: 194457 - protein, 292 aa, Unknown
  Bacterial polypetide isolated from the Sargasso Sea
KGGYFPVPPVDSEQDMRSEYLKAMKEMGIKVEKHHHEVAPSQHELGMYFGTLVDQADNLQLYKYAVHMVSNSFGKTATFMPKPVKGDNGSGMHVHQSIWKGDTALFSGDKYAGLSDTALNYIGGILKHAKAINAFSNATTNSYKRLIPGFEAPVLLAYSARNRSASCRIPITLSKKAARCEIRFGDAAGNPYLTFAAMLMAGLDGIKNKIDPGKSFDKDLYALSEDEVKKIPTVCGSLREAMESLDKDRDFLKQGNVFTDDQIDAYIALKYEEIHNFEHTPHPIEFEMYYSC

SEQ ID NO: 194458 - protein, 376 aa, Unknown
  Bacterial polypetide isolated from the Sargasso Sea
LDAVKKDPYERDPRGTAKKAEAYLKKSGIGDKSYFGPEPEFFVFDDVRFKNDMNETSFSIDSSEGPYNTGKKYENGNMGHRPGIKGGYFPVPPVDSAQDMRGEYLKALRDMGVKVEKHHHEVAPSQHELGMYFGTLTDMADNLQLYKYAVQMVTHSFGKTATFMPKPVKGDNGSGMHCHQSIWKGSTPVFMGKEYSGLSKTALYYIGGILKHAKAINAFSNATTNSYKRLIPGFEAPVILAYSARNRSASCRIPIINNPKAARMEIRFPDAAGNPYLTFASMLMAGIDGIKNKIDPGKSFDKDLYTLSESEVKKLPTVCGSLREAMQSLDKDRKFLTQGNVFTDDQIDAYIDLKFQEIYKFEHTPHPIEFEMYYSG

SEQ ID NO: 194459 - protein, 404 aa, Unknown
  Bacterial polypetide isolated from the Sargasso Sea
SKRSAFDGSSIAGWKGIEASDMLLVPDANTAHIDPFYEEPTLVLTCDVVEPSDGKGYDRDPRSIAKRAEAYLKSTGLGDTAYFGPEPEFFIFDGVTWNIDMQGCFVKINSEEAPWSSGKEFEHGNSGHRPGKKGGYFPVAPIDTFQDMRSEMCLILESLGIPVEVHHHEVAGQGQNEIGTKFSTLVQRADWTQLQKYVIQNVAHTYGKTATFMPKPVVGDNGSGMHVHQSVWKDGQNLFAGNGYAGLSEFALYYIGGIIKHARALNALTNPGTNSYKRLVPGFEAPVKLAYSARNRSASIRIPYVANPKGRRIETRFPDPLMNPYLGFSALLMAGLDGVQNKIHPGEAADKNLYDLPPEEDAKIPTVCSSLDQALEYLDKDREFLTRGGVFSNAMLDAYIELKM

SEQ ID NO: 194460 - protein, 468 aa, Unknown
  Bacterial polypetide isolated from the Sargasso Sea
MSSNDILKLMKDKEIEYIDLRFTDPRGKLQHLTMDSTAVDEDMLNEGVFFDGSSIAGWKAINESDMILKPDLSRKVIDPFTSHNTLVLFCDILDAVKKDPYERDPRGIAKKAEAYLKETGIGDKAFFGPEPEFFVFDDVRIKNDMNETGFKIDSSEGPYNSGKKYENGNMGHRPGIKGGYFPVPPVDSAQDMRGEYLKGLRDVGITVEKHHHEVAPSQHELGMKFSTLVDQADNVQLYKYVVQMVSHSFGKTATFMPKPVKGDNGSGMHIHQSLWQGDTPLFSGHRYSGLSDTAIHYIGGILKHAKAINAFSNATTNSYKRLIPGFEAPVLLAYSARNRSASCRIPITLSKKGARCEIRFPDAAGNPYLTFSAMLMAGLDGIKNKIDPGESFDKDLYTLSESEIKNIPTVCGSLREAMESLDTDRNFLKEGNVFTDDQIDAYIALKFEEIYNLEHTPHPIEFDMYYSS

SEQ ID NO: 194461 - protein, 246 aa, Unknown
  Bacterial polypetide isolated from the Sargasso Sea
MYFGTLVNQADNVQLYKYVVQMVTHSFGKTATFMPKPVAGDNGSGMHIHQSIWKGDTPVFSGDAYAGLSETALHYIGGILKHAKAINAFANSTTNSYKRLIPGFEAPVLLAYSARNRSASCRIPITLSKKGARCEIRFPDAAGNPYLTFAAMLMAGIDGIKNKIHPGESFDKDLYELPPEEVKAIPTVCGSLREAMESLDKDREFLTQGGVFTDDQIDAYIALKFEEIHKFEHAPHPVEFEMYYSS

SEQ ID NO: 194462 - protein, 342 aa, Unknown
  Bacterial polypetide isolated from the Sargasso Sea
MKIKAEYIWIDGKTPTAKLRSKTKIMDQGTEPPIWGFDGSSTEQATGDQSDCVLKPVSQFPDPIRGGDNILVMCEVLNVDMTPHASNTRAACVASAENFSEFEPMFGLEQEYTFYEQSYDSLKYGQPLGFPPSGYPAPQGGYYCGVGADEVYGRSISEDHATACMEAGLNISGTNAEVMPGQWEFQIGPVGAPAIGDQIWIARWLLYRIAEDYNISATLTPKPVKGDWNGAGMHTNFSTKQMREDGGYDAIVAGCEALGKNAEFHVQNYGAGIEDRLTGDHETQRFDTFSYGVSDRGASIRIPWQVEVDKKGYLEDRRPNANADPYVIATVMIDTVCSAASS

SEQ ID NO: 194463 - protein, 336 aa, Unknown
  Bacterial polypetide isolated from the Sargasso Sea
MKIKAEYIWIDGYEPTAGLRSKTKVLDGAVSSVSELPTWGFDGSSTLQADGGDSDCLLKPVWMCPDPIRGGENILVMNEVCNPDGTPHKSNSRAALVDITEKFKEHKPWFGIEQEYTLMDGKQPAGWPQEGFPERPQGPYYCSVGAEDVAARSMVEDHLDLCLEAGLEVSGINAEVMLGQWEYQVGPLPALEVGDQLWVARWLLERVGEEYGLRVELHPKPIKGDWNGSGAHINYSTESMRADGGLKVIEQACEKLGQNIDKHIAVYGDANEERLTGDHETCSIKEFKYGVSDRGASIRIPMGVANDGKGYLEDRRPASNVDPYKACAALIETTCS

SEQ ID NO: 194464 - protein, 449 aa, Unknown
  Bacterial polypetide isolated from the Sargasso Sea
RFTDTKGKEQHVTIPSHQVNAEFFEEGKMFDGSSIGGWKGINESDMVLMPDATTALIDPFYEEPTLIIRCDILEPGTLQGYDRDPRSIAKRAEEYLRSTGLADTVLFGPEPEFFLFDDIRFGASISGSHVAIDDIEGAWNSSTKYEGGNKGHRPGVKGGYFPVPPVDSSQDIRSTMCMIMEEMGLVVEAHHHEVATAGQNEIATRFNTMTKKADEIQIYKYVVHNVAHRFGKTATFMPKPMFGDNGSGMHCHMSLSKNGVNLFSGDKYAGLSEQALYYIGGVIKHAKAINALANPTTNSYKRLVPGYEAPVMLAYSARNRSASIRIPVVTSPKARRIEVRFPDPAANPYLCFAALLMAGLDGIKNKIHPGEAMDKNLYDLPPEEAKEIPQVAGSLEEALNALDADREFLTAGGVFTNDAIDAYIALRIEENDRVRMTPHPVEFELYYSV

SEQ ID NO: 194465 - protein, 180 aa, Unknown
  Bacterial polypetide isolated from the Sargasso Sea
VYQKPHFIILGGILKHAKAINAFSNATTNSYKRLIPGFEAPVLLAYSARNRSASCRIPITLSKKGARCEIRFPDAAGNPYLTFSAMLMAGLDGIKNKINPGKPLDEDLYALPEDKVKNIPTVCGSLREAMESLDRDRGFLKQGGVFSDDQIDAFIALKFEEIYNLEHTPHPMEFEMYYSS

SEQ ID NO: 194466 - protein, 399 aa, Unknown
  Bacterial polypetide isolated from the Sargasso Sea
MSQSVLDFIKENDVKFIDLRFTDTKGKEQHVSIPHHQVDEDFFEDGKMFDGSSIAGWKGINESDMVLMPVAESVKLDPFTEETTLIVRCDVVEPSTLQGYERDPRSVAKRAEDYMRSTGIADTVLFGPEPEFFLFDDVKYKSDMSGSMYKVDAVEAAWNSDKDYEGGNTGHRPGVKGGYFPCSPVDSSQDWRSATCLVLEELGQVVEAHHHEVATAGQNEIATRFNSMVLKADEIQEMKYVIHNMAHLYGKTATFMPKPIVGDNGSGMHCHQSLAKDGVNLFAGDKYGGLSEEALYYIGGIIKHAKAINAFANASTNSYKRLVPGFEAPVMLAYSARNRSASIRIPVVPSAKGRRIEVRFPDPTANPYLAFSAMLMAGLDGIKNKIHPGDAMDKDLYDL

SEQ ID NO: 194467 - protein, 343 aa, Unknown
  Bacterial polypetide isolated from the Sargasso Sea
MKYNCKTPKELLKKIKNEGIKMVDLRFTDMPGSTHHISIPIKYLTEDLFKDGVGFDGSSVRGFQSIENSDMTMVPDIATGYLDPFYSEKTIAFYCNVVDPITYKSYSRDPRHIAQKAEKYLKSSGLGDTAYFGPEAEFFVFNDVKYDSGSNFAFHEVDSTEGAWNTGRDENPNLGHKPRHKSGYFPLPPADSLQDIRTEMVLTMEDIGINVEASHHEVATGGQCEIDLEFSPLLSMADDLLKYKYVVKNVAKLHGLTATFMPKPLFEDNGSGMHVHSSIWKKNKTLMYKKGNYADLSNFALNYIGGILKHAPSLLAFCAPTTNSYKRLVPGFEAPSKHCIFTS

SEQ ID NO: 194468 - protein, 336 aa, Unknown
  Bacterial polypetide isolated from the Sargasso Sea
MKVKAEYIWIDGYEPTANLRSKTKVLDGAVSSVSELPTWGFDGSSTLQADGGDSDCLLKPVWMCPDPIRGGENILVMNEVCNPDGTPHRSNSRAALVEIAEKFKEHKPWFGIEQEYTLMDGKQPAGWPEEGFPERPQGPYYCSVGSEDVAARSMVEDHLDLCLEAGLEVSGINAEVMLGQWEYQVGPLPALEVGDQLWVARWLLERVGEEYGLRVELHPKPIKGDWNGSGAHINYSTESMRADGGLKVIEDACEKLGQNIDKHIAVYGDANAERLTGDHETCSINEFKYGVSDRGASIRIPMGVANDGKGYLEDRRPASNVDPYKACAALIDTTCS

SEQ ID NO: 194469 - protein, 469 aa, Unknown
  Bacterial polypetide isolated from the Sargasso Sea
MTTSSEALKAFRDSGAKYLDLRFTDVKGKWQHLTMDGTVVDEDLLNNGVFFDGSSIAGWKAINESDMVLKPDLSTTVMDPFTAQPTMMIFCNILDAVTKEPYQRDPRGTAKKAEEYVKSSGIGDSVYIGPEAEFFVFDDVKFQVEMNKSSFEIDSSEGPYNSAKNYESGNLGHRPGIKGGYFPVPPVDSAQDIRTEFLEELKNLGLRMEKHHHEVAPSQHELGLLFDTLLKQGDGIQLYKYGVHMVANSFGKTATFMPKPVKGDNGSGMHVHQSIWKDGKPLFAGDGYAGLSETALHYIGGIIKHGKALNAFTNPSTNSYKRLIPGFEAPVILVYSARNRSASCRIPVSDSPKGKRVEVRFPDPTANPYLAFAAMLMAGMDGIKNKIHPGDASDQDLYELSDNEVAKLPTVCGSLREALEAVDQDRAFLTEGGVFTDDQIDGYIDLKMQEVYDLEHSPHPVEFKNYFSV

SEQ ID NO: 194470 - protein, 448 aa, Unknown
  Bacterial polypetide isolated from the Sargasso Sea
MKPREVIAMCREKEVKAVDLRFVDFLGTWQHFTIPVAKLEEEVFEDGIGFDGSSIRGWQAINESDMLLVPVPDTAFVDPFTTVPTLAVICMVQDPITREDYSRDPRFIARKAAIYLEGTGIADTCFIGPEAEFFVFDAAHFDQTAHEGFYSIDSAEAEWNRGSGSHGYQVRHRQGYSPVPPTDQMMDIRTEMMLTMIQCGIDVEAQHHEVASAGQCEIDMRYQSLVRMADHLCLYKYIVRNVARRHGRTATFMPKPIYGDSGSGMHVNLSLWKEGKPLFGGSGYAGLSDMALHALGGILKHARALLALTNPTTNSYKRLVPGYEAPINLAYSQRNRSAACRIPMYSTNPKTKRIEFRCPDPTCNPYLAFSAVLMAAIDGIQNHIDPGEPLDRDIYDMPPEELANVSRTPAALGESIDALEQDHDFLLRGDVFTEDVIRTWISHKRNHE

SEQ ID NO: 194471 - protein, 468 aa, Unknown
  Bacterial polypetide isolated from the Sargasso Sea
MSAANVLKYIKEKDAEFVDLRFTDPRGKLQHLTMDASIVDEGMLNEGVFFDGSSIAGWKAINESDMILKPDTARMFMDPFTSHNTVVLFCDILDAIKKDPYERDPRGVAKKAEEYLKASGIGDKAFFGPEPEFFVFDDVRIKNDMNESGFKIDSKEGPYNSGKEYENGNMGHRPQVKGGYFPVPPVDSEQDMRGEYLKNLKEVGIKVEKHHHEVAPSQHELGMYFGTLVDQADNVQLYKYVVQMVTHSFGKTATFMPKPVAGDNGSGMHIHQSIWKGDTPVFSGEAYAGLSETALHYIGGILKHAKAINAFANSTTNSYKRLIPGFEAPVLLAYSARNRSASCRIPITLSKKGARCEIRFPDAAGNPYLTFAAMLMAGIDGIKNKIHPGESFDKDLYELPPEEVKAIPTVCGSLREAMESLDKDREFLTQGGVFTDDQIDAYIALKFEEIHKFEHAPHPVEFEMYYSS

SEQ ID NO: 194472 - protein, 349 aa, Unknown
  Bacterial polypetide isolated from the Sargasso Sea
GPEVEFFIFDSASFDYGPNHGFHHVDSDEGIWNSGESHMLDGITLNKSHRPKHKGGYFPVSPVDTQQDIRNEMIRIMQDSFDIKVEKQHHEVATAGQGEIDIVYNTLLETADNVMAYKYVVKNVAKRHGKVATFMPKPIFEDNGTGMHTHQSIWKDGKPLFAGDLYGGFSQLGLNYTGGLIKHGKALMALAAPTTNSYKRLTPGFEAPTILALSARNRSAACRVPMYFQNPAAKRIEFRSADPTCNPYLTFSAMLLAGLDGIENGYDPGEPLEQDLFELPLEEQAKLPQVPSSLEEALNALEEDHDFLLKGGVFTEDVIRSWIDFKRENDVDPVRLRPHPYEFFLSFDA

SEQ ID NO: 194473 - protein, 307 aa, Unknown
  Bacterial polypetide isolated from the Sargasso Sea
MICSIQEPRSGEPYDRCPRSLAQKALKYLESTGIADTAFFGPEPEFFLFDDVRYDSKEGSCFYSVDTIEAPWNTGRIEEGGNLGYKIQYKEGYFPVSPNDTAQDIRSEMLLLMGELGIPTEKHHHEVAGAGQHELGMKFDSLINSADNVMTYKYVVRNVAKKYGKTATFMPKPVFNDNGTGMHVHQSLWKSGQPLFFGEGAYANLSQTARWYIGGILKHAPSFLAFTNPTTNSYKRLVPGFEAPVNLVYSEGNRSAAVRIPLTGPSPKAKRLEFRSGDALANPYLAFSVMMLAGIDGIKIKLILVME

SEQ ID NO: 194474 - protein, 303 aa, Unknown
  Bacterial polypetide isolated from the Sargasso Sea
MSANNVLKQMKDKDIEYVDLRFTDPRGKLQHVTMDSKVVDEEMLEEGIFFDGSSIAGWKAINESDMILKPDLSRTVIDPFTSHNTMNIFCDVMDAIKKDPYERDPRGTAKKAEAYLKKSGIGDKAYFGPEAEFFVFDDVKYKNDMNETGFKIDSTEGPYNTGKDYPNGNMGHRPGVKGGYFPVPPVDSAQDMRSEYLKAMKDMGIKVEKHHHEVAPSQHELGMYFGTLVDQADNLQLYKYAVHMVSHSFGKTATFMPKPVKGDNGSGMHVHQSIWKGDKALFSGDKYAGLSDVALNYIGGILK

SEQ ID NO: 194475 - protein, 349 aa, Unknown
  Bacterial polypetide isolated from the Sargasso Sea
MTKVNDVLKKIKDNGVKYLDLRFTDPRGKLQHLTMDCSVVDESLLNEGVFFDGSSIAGWKAINESDMVLRPDLSTTVMDPFTAQPTMMVFCDILDAITKESYERDPRSTARKAEEFVKSSGVGDTVYIGPEAEFFVFDDVKFQVDMNKSMFEIDSTEGPYNSGKNYESGNLAHRPGIKGGYFPVPPVDSAQDLRTEFLEELKNLGLKMEKHHHEVAPSQHELGLLFDTLLKQGDAMQLYKYGVHMVANAFGKTATFMPKPVKGDNGTGMHTHQSIWKNGEPLFAGDKYAGLSDMALNYIGGIIKHGKALNAFTNASTNSYKRLIPGFEAPSDISLLSEKQVCIMQNTCI

SEQ ID NO: 194476 - protein, 323 aa, Unknown
  Bacterial polypetide isolated from the Sargasso Sea
MKKLEYIWLDGFQPEPSLRSKVKVTDGTPPDWSFDGSSTQQADGSSSDCIIRPVNEYIGPRNSDSLVMCEVLSPDRSAHPSNTRNQCVDILTDDWWFGFEQEYFFTNPEDGTILGWEDGTPRPQGDYYCGVGSGNVQAREVSEAHMDACLEAGIMITGTNAEVALGQWEYQCFGKGLKAADDLWVSRYLLHLIAEEYGVSVNIHPKPQEGDWNGSGMHTNFSNEQMRSAGSEELFNSMCEKLGEVHAEGIANYGSDNEKRLTGNHETQSIDTFSYGVSDRGASIRIPIYTVENDWNGYLEDRRPASNADPYKIISHIVGTLTQ

SEQ ID NO: 194477 - protein, 382 aa, Unknown
  Bacterial polypetide isolated from the Sargasso Sea
MIENHYVLYLNLYIHSSYSRNNNLIFWDFQIFKLNTTLVNMKIKAEYIWIDGKTPTSKLRSKTKIMEKGTEPPIWGFDGSSTEQATGDNSDCVLKPVSTFHDPIRGGDNILVMCEVLNVDMTPHTTNTRAACEAAAENFAEFEPMFGLEQEYTFYEQSYDSLKYGQPLGFPPSGYPAPQGGYYCGVGADEVYGRDISEEHASACMAAGLEISGTNAEVMPGQWEFQIGPVGAPDIGDHIWVARWLLYRIAEDYNISATLDPKPVKGDWNGAGMHTNFSTKQMREDGGYEAIIAGCEALGKNAELHVKNYGSGIEDRLTGDHETQKFDTFSYGVSDRGASIRIPWQVEVDKKGYLEDRRPNANADPYVIAMLMIDTVCSAASS

SEQ ID NO: 194478 - protein, 324 aa, Unknown
  Bacterial polypetide isolated from the Sargasso Sea
CFYSVDTIEAPWNTGRIEEGGNLGYKIQYKEGYFPVAPNDTAQDIRSEMLLLMGELGIPTEKHHHEVAGAGQHELGMKFDSLINAADNVMTYKYVVRNVAKKYGKTATFMPKPVFNDNGTGMHVHQSLWKSGQPLFFGEGSYANLSQTARWYIGGILKHAPSFLAFTNPTTNSYKRLVPGFEAPVNLVYSEGNRSAAVRIPLTGPSPKAKRLEFRSGDALANPYLAFSVMMLAGIDGIKNQIDPGDGVDVDLFELPADELAKIDTVPSSLNDSLNALKADKDYLLAGGVFTEDFIDNFIDIKYEEVQQLRQRPHPHEFFMYYDA

SEQ ID NO: 194479 - protein, 304 aa, Unknown
  Bacterial polypetide isolated from the Sargasso Sea
YENGNMGHRPGIKGGYFPVPPVDSAQDMRGEYLKGLRDVGITVEKHHHEVAPSQHELGMLFGTLVDQADNVQLYKYVVQMVSHSFGKTATFMPKPVKGDNGSGMHTHQSIWKGKNPVFSGNKYAGLSQTALYYIGGVLKHAKAINAFANATTNSYKRLIPGFEAPVLLAYSARNRSASCRIPITLSKKGARCEIRFPDASGNPYLTFASMLMAGIDGIKNKIDPGKSFDKDLYALSEKELKRVPTVCGSLREAMENLDKDRKFLTQGNVFTDDQIDAYIALKFEEIHNFEHTPHPIEFDMYYSC

SEQ ID NO: 194480 - protein, 197 aa, Unknown
  Bacterial polypetide isolated from the Sargasso Sea
MSAENVLKYIKEKEAEFVDLRFTDPRGKLQHLTMDASVVDEGMLNEGVFFDGSSIAGWKAINESDMILKPDTTRMFMDPFTSHNTVVLFCDILDAIKKDPYERDPRGVAKKAEEYLKASGIGDKAFFGPEPEFFVFDDVRIKNDMNECGFKLDSKEGPYNSGKEYENGNMGHRPQIKGGYFPVPPVDSEQDMRGEYL

SEQ ID NO: 194481 - protein, 169 aa, Unknown
  Bacterial polypetide isolated from the Sargasso Sea
MSASEVLKFIKDKDAEFVDLRFTDPRGKLQHLTMDATVVDEDMLKNGVFFDGSSIAGWKAINESDMILKPDTSRFFLDPFTSHNTAVLFCDILDAVKKTPYERDPRGVAKKAEEYLKASGIGDKAFFGPEPEFFVFDDVKIKNDMNECGFKIDSKEGPYNSGKEYENGN

SEQ ID NO: 194482 - protein, 154 aa, Unknown
  Bacterial polypetide isolated from the Sargasso Sea
YQVGPLGPLEVADQLWISRWLLYRIAEDYGVSATLHPKPVKGDWNGAGAHTNFSTKSMRDEGGIKVIEAACESLGKKHEEHIAVYGAHNEERLTGLHETCSIKDFRYGVSDRGASIRIPMATSNDGKGYLEDRRPSANMDPYKVCSILIETTCG

SEQ ID NO: 194483 - protein, 215 aa, Unknown
  Bacterial polypetide isolated from the Sargasso Sea
NFMPKPVKGDNGSGMHCHQSIWKGSTAVFSGNKYAGLSDTALHYIGGILKHARAINAFSNATTNSYKRLIPGFEAPVLLAYSARNRSASCRIPITQSKKAARCEVRFPDAAGNPYLTFSSLLMAGLDGIKNKIDPGKSLDKDLYALSESEVKRIPTVCGSLREAMESLDKDRKFLTQGNVFTDDQIDAYIALKYEEIYNFEHTPHPMEFQMYYSC

SEQ ID NO: 194484 - protein, 468 aa, Unknown
  Bacterial polypetide isolated from the Sargasso Sea
MSAKDVLKLMKSKNIEFVDLRFTDPRGKLQHLTMDTTIVDEGMLNDGVFFDGSSIAGWKAINESDMILKPDLSRKVIDPYTSHNTLILFCDILDAVKRDPYERDPRGIAKKAEAYLKKTGIGDTAYFGPEPEFFVFDDVRIKNDMNETSFSIDSSEGPYNSGKSYDNGNMGHRPGVKGGYFPVPPVDSAQDMRGEYLKGLRDVGITVEKHHHEVAPSQHELGMLFGTLVNQADNVQLYKYVVQMVSHSFGKTATFMPKPVKGDNGSGMHTHQSIWKGKTPVFSGNKYAGLSQTALYYIGGVLKHAKAINAFANATTNSYKRLIPGFEAPVLLAYSARNRSASCRIPITLSKKGARCEIRFPDASGNPYLTFASMLMAGIDGIKNKIDPGKSFDKDLYALSEKQVKKVPTVCGSLREAMEALDKDRSFLTKGNVFTDDQIDAYIELKYEEIHNFEHTPHPIEFDMYYSC

SEQ ID NO: 194485 - protein, 213 aa, Unknown
  Bacterial polypetide isolated from the Sargasso Sea
MPKPVKNDNGSGMHVHQSIFSGEKPLFAGDKYAGLSDECLYYIGGIIKHARALNAFSNASTNSYKRLIPGFEAPVLLAYSSRNRSASCRIPFSDSKKGKRVEVRFGDASGNPYLTFASMLMAGIDGIKNKIKPGKPMDQDLYALSPEELKGIPTVCSSLRQACVALDEDRKFLTEGGVFTDDQIDAYIDLKMQEVNNFQDTPHPIEFEMYYSC

SEQ ID NO: 194486 - protein, 332 aa, Unknown
  Bacterial polypetide isolated from the Sargasso Sea
DDVRIKNDMNETGFVIDSAEGPYNSGKKYDNGNMGHRPGIKGGYFPVPPVDSAQDMRGEYLKGLRDVGITVEKHHHEVAPSQHELGMLFGTLVDQADNVQLYKYVVQMVSHSFGKTATFMPKPVKGDNGSGMHIHQSVWKGKTPLFSGNKYAGLSQTALYYIGGILKHAKAINAFSNATTNSYKRLIPGFEAPVLLAYSARNRSASCRIPVTLSKKGARCEIRFPDAAGNPYLTFAAMLMAGLDGIKNKIDPGKSFDKDLYTLSEKEIKNIPTVCGSLREAMESLDTDRKFLKQGNVFTDDQIDAYIALKFEEIYNLEHTPHPIEFDMYYSC

SEQ ID NO: 194487 - protein, 469 aa, Unknown
  Bacterial polypetide isolated from the Sargasso Sea
MSVESVLKQLEELEVKFVDLRFTDTKGKEQHVSIPAHQVDADFFEDGKMFDGSSIAGWKGINESDMVLMPDPTTFVLDPFTEETTALIRCDILEPGTMTGYDRDPRSIAKKAEEYLRSTGIADTVLVGPEPEFFLFDDVRFGTDMSGCFVKIDAKEAAWNSGTSYEGGNTGHRPFVKGGYFPVAPVDSSQDLRSAMCLVLEEMGQVVEAHHHEVATAGQNEIATRFNTLTKKADEIQILKYVVHNMAHAYGKTATFMPKPIVGDNGSGMHVHQSLAKDGVNLFAGDKYAGLSETALYYIGGIIKHARALNAFTNPSTNSYKRLVPHFEAPVMLAYSARNRSASIRIPVVPSPKGRRIETRFPDPHANPYLGFAALLMAGIDGIQNKIHPGEAMDKDLYDLPAEEAAEIPQVATSLENALENLQADHEFLTRGGVFSEDFIQSYIALKSAEAERVSRTTHPLEFEMYYSL

SEQ ID NO: 194488 - protein, 242 aa, Unknown
  Bacterial polypetide isolated from the Sargasso Sea
MSASSVKKIMKDKEIEYVDLRFTDPRGKLQHVTMDATIVDEDMLNEGVFFDGSSIAGWKAINESDMILKPDLSRAVVDPFTSHNTLNIFCDILDAIKKDPYERDPRGTAKKAEAYLKKTGVGDKAYFGPEPEFFVFDDVRYSNDMNNTGFQIDSSEGPYNTGKKYENGNMGHRPGIKGGYFPVPPVDSAQDMRSEYLKAMKDMGIKVEKHHHEVAPSQHELGMYFGTLVDQADNLQLYKYAV

SEQ ID NO: 194489 - protein, 331 aa, Unknown
  Bacterial polypetide isolated from the Sargasso Sea
SIAGWKAINESDMILKPDLSRKVIDPYTSHNTLILFCDILDAVKRNPYERDPRGIAKKAEAYLKKTGIGDKAYFGPEPEFFVFDDVRIKNDMNETSFSIDSSEGPYNSGKKYENGNMGHRPGIKGGYFPVPPVDSAQDMRGEYLKGLRDVGITVEKHHHEVAPSQHELGMLFGTLVDQADNVQLYKYVVQMVSHSFGKTATFMPKPVKGDNGSGMHVHQSVWKGKTPVFSGNKYSGLSQTALYYIGGILKHAKAINAFANATTNSYKRLIPGFEAPVLLAYSARNRSASCRIPITLSKKGARCEIRFPDASGNPYLNFCVYVNGRFRWNKK

SEQ ID NO: 194490 - protein, 468 aa, Unknown
  Bacterial polypetide isolated from the Sargasso Sea
MSASKVLKMMKDKQIEFVDLRFTDPRGKLQHLTMDASVVDGDMLTDGVFFDGSSIAGWKAINESDMILKPDLNRQIVDPFTSHNTLVLFCDILDAIKRNPYERDPRGIAKKAEAYLKKTGIGDKAYFGPEPEFFVFDDVKIKNDMNETSFSIDSTEGPYNSGKSYENGNMGHRPGVKGGYFPVPPVDSAQDIRGEYLKGLRDVGITVEKHHHEVAPSQHELGMLFGTLVDQADNVQLYKYVVQMVSHSFGKTATFMPKPVKGDNGSGMHVHQSVWKGKTPVFSGNKYSGLSQTALYYIGGILKHAKAINAFSNATTNSYKRLIPGFEAPVLLAYSARNRSASCRIPITLSKKGARCEIRFPDASGNPYLTFASMLMAGIDGIKNKIDPGKSFDKDLYALSEKEVKKVPTVCGSLREAMESLDKDRKFLTQGGVFTDDQIDAYIALKFEEIHNFEHTPHPIEFDMYYSC

SEQ ID NO: 194491 - protein, 108 aa, Unknown
  Bacterial polypetide isolated from the Sargasso Sea
PDPAANPYLAFLAQLMAGLDGIQNKIHPGDAMDKDLYDLPPEEEALIPQVCGSLDEALDALDANRAIFTKGGVMSDAMIDAYIELKRAEAKRVSVAVHPLEYELYYSV

SEQ ID NO: 194492 - protein, 468 aa, Unknown
  Bacterial polypetide isolated from the Sargasso Sea
MSSKQVLKLMKDKQVEYVDLRFTDPRGKLQHLTMDATIVDEGMLNDGVFFDGSSIAGWKAINESDMILKPDLSRKIMDPFTSHNTMILFCDILDAVKKNPYERDPRGIAKKAEAYLKSTKIGDKAYFGPEPEFFVFDDVRYKNDMNETSFAIDSSEGPYNTGRKYDNGNMGHRPGIKGGYFPVPPVDSAQDMRGEYLKGLRDVGITVEKHHHEVAPSQHELGMLFGTLVDQADNVQLYKYVVHMVSNSFGKTATFMPKPVKGDNGSGMHCHQSIWKGNTPVFSGNKYAGLSDTALHYIGGILKHAKAINAFSNATTNSYKRLIPGFEAPVLLAYSARNRSASCRIPITLSKKGARCEIRFPDAAGNPYLTFAAMLMAGLDGIKNKINPGKSFDKDLYALSENEIKNIPTVCGSLREAMESLDTDRKFLTQGGVFTDDQIDAYIALKFEEIHNFEHTPHPIEFDMYYSC

SEQ ID NO: 194493 - protein, 434 aa, Unknown
  Bacterial polypetide isolated from the Sargasso Sea
MSVEDILKTVKEKEVKFIDYRFTNTNGKEQHVTVTANEDGIKSDFTEGKMFDGSSIAGWKDINESDMILMPDSSTAVMDPFYDEPTLIVTCDVIEPADGNPYEKDPRSIAKKAEAYLKETGIADKAFFGPENEFFVFDDVKFEDKLGSSYFSVDSTEACYNSSKSYEEGNMGHRPLVKGGYFPVPPVDALQDCRSAMVTTCQEMGVACEVHHHEVATGGQCEIGTVFNTLVTKADEVQKYKYAVMNVAHAYGKTATFMPKPLVGDNGTGMHVHMSLSKDGNNVFAGDKYGNMSEEALNYIGGIIKHARALNAFTNASTNSYKRLIPGFEAPVILTYSARNRSAAIRIPYVMSDKARRIEVRFPDSTANPYLAFSALMMAGLDGIKNKINPGDAMDQDLFELTTEEEKMLPTVAPGLDVALEALDKDRDFFEAGG

SEQ ID NO: 194494 - protein, 223 aa, Unknown
  Bacterial polypetide isolated from the Sargasso Sea
SHSFGKTATFMPKPVKGDNGSGMHTHQSIWKGDTPVFSGDKYSGLSEIALHYIGGILKHAKAINAFSNATTNSYKRLIPGFEAPVLLAYSARNRSASCRIPITLSKKGARCEIRFPDAAGNPYLTFSAMLMAGLDGIKNKIHPGESFDKDLYTLPEEEIKNIPTVCGSLREAMESLDTDRSFLKEGNVFTDDQIDAYIALKFEEIYNLEHTPHPIEFDMYYSS

SEQ ID NO: 194495 - protein, 328 aa, Unknown
  Bacterial polypetide isolated from the Sargasso Sea
MSTNNILKTIKDKQIEYVDLRFTDPRGKLQHVTMDAKIVDEDMLNDGIFFDGSSIAGWKAINESDMILKPDLSRSIVDPFTSHNTLNIFCDILDAIKKDPYERDPRGTAKKAEAYLKKSGVGDKAFFGPEPEFFVFDDVRFKNDMNETGFKIDSTEGPYNTGKEYENGNMGHRPGIKGGYFPVPPVDSAQDMRSEYLKAMKDMGIKVEKHHHEVAPSQHELGMYFNTLVNQADNLQLYKYAVHMVSHSFGKTATFMPKPVKGDNGSGMHVHQSIWKGSTAVFSGDKYAGLSETALYYIGGILKHARAINAFSNSTTNSYKRLIPGFEA

SEQ ID NO: 194496 - protein, 428 aa, Unknown
  Bacterial polypetide isolated from the Sargasso Sea
MSKSVADVVQLVKDEDVKFVDFRFTDTRGKEQHVSVPVSAFDEDKFESGHAFDGSSIAGWKGIEASDMLLVPDANTAFIDPFYEESTLVLTCDVVEPADGKGYERDPRSLAKRAEAYLKSTGLGDTAFFGPEPEFFIFDSVQWNTDQSGCFIKIGSEEAPWSSAKEFEGGNTGHRPGTKGGYFPVAPVDTFQDIRSEMCLLLEQIGIPVEVHHHEVAGQGQNEIGTKFSTLVQRADWLQQMKYIIHNVAHTYGKTATFMPKPVVGDNGSGMHVHQSIWKDGQNLFAGNGYAGLSEFALFYIGGIIKHARALNAITNPSTNSYKRLVPHFEAPVKLAYSARNRSASIRIPHVSNPKGRRIETRFPDPMANPYLCFSALMMAGLDGVQNKIHPGEAADKNLYDLPPEEDAKIPTVCAGLDQALDALDADR

SEQ ID NO: 194497 - protein, 466 aa, Unknown
  Bacterial polypetide isolated from the Sargasso Sea
MSASDVLKLMKDKEIEYVDLRFTDPRGKLQHLTMDSTVVDEGMLNDGVFFDGSSIAGWKAINESDMILKPDLGRKVVDPFTSHNTLVLFCDILDAVKKDPYERDPRGIAKKAEAYLKTTGVGDKAYFGPEPEFFVFDDVRIKNEMNETGFVIDSAEGPYNSGKKYENGNMGHRPGVKGGYFPVPPVDSAQDMRGEFLKGLRDVGITVEKHHHEVAPSQHELGMLFGTLVNQADNVQLYKYVVQMVAHSFGKTATFMPKPVKGDNGSGMHTHQSIWKGDTPVFSGDKYSGLSETALHYIGGILKHAKAINAFSNATTNSYKRLIPGFEAPVLLAYSARNRSASCRIPITLSKKGARCEIRFPDAAGNPYLTFSAMLMAGLDGINNKIHPGESFDKDLYTLPEEEIKNIPTVCGSLREAMESLDTDREFLKKGNVFTDDQIDAYIALKFEEIYNLEHTPHPIEFQMYY

SEQ ID NO: 194498 - protein, 257 aa, Unknown
  Bacterial polypetide isolated from the Sargasso Sea
HEVAPSQHELGMYFGTLTNQADNVQLYKYAVQMVTHSFGKTATFMPKPVKGDNGSGMHCHQSIWKGSTPLFMGKEYAGLSKDALYYIGGILKHARAINAFANATTNSYKRLIPGFEAPVILAYSARNRSASCRIPVIMNPKAARMEIRFPDAAGNPYLTFASMLMAGIDGIKNKIDPGKPFDQDLYSLSENEVKKLPTVCGSLREAMQNLDKDRKFLTEGGVFTDDQIDAYIELKFQEIYNFEHTPHPIEFDMYYSG

SEQ ID NO: 194499 - protein, 246 aa, Unknown
  Bacterial polypetide isolated from the Sargasso Sea
MYFSTLVNQADNLQLYKYAVHMVSHSFGKTATFMPKPVKGDNGSGMHVHQSIWKGSTATFSGNKYAGLSDTALHYIGGILKHAKAINAFSNSTTNSYKRLIPGFEAPVLLAYSARNRSASCRIPITLSKKAARCEVRFPDAAGNPYLTFSALLMAGLDGIKNKINPGKSLDKDLYALSESEVKKIPTVCGSLREAMENLDKDRKFLTQGNVFTDDQIDAYIALKYEEIYNFEHTPHPMEFQMYYSC

SEQ ID NO: 194500 - protein, 468 aa, Unknown
  Bacterial polypetide isolated from the Sargasso Sea
MSANNVLKTIKDKEIEYVDLRFTDPRGKLQHVTMDAKVVDGDMLDEGIFFDGSSIAGWKAINESDMILKPDLSRAIVDPFTSHSTLNIFCDILDAIKKDPYERDPRGTAKKAEAYLKKSGIGDKAFFGPEAEFFVFDDVKFKNDMNETGFKIDSIEGPYNTGKDYDNGNMGHRPGIKGGYFPVPPVDSAQDMRSEYLKAMKDMGIKVEKHHHEVAPSQHELGMYFGTLVDQADNLQLYKYAVHMVSHSFGKTATFMPKPVKGDNGSGMHVHQSIWKGDKALFSGDKYAGLSDLALNYIGGILKHAKAINAFSNATTNSYKRLIPGFEAPVLLAYSARNRSASCRIPITLSKKAARCEIRFGDAAGNPYLTFAAMLMAGLDGIKNKINPGKSFDKDLYALSEEEVSKIPTVCGSLREAMESLDKDRKFLTEGGVFTDDQIDAYISLKMEEVHNFEHTPHPIEFEMYYSC

SEQ ID NO: 194501 - protein, 276 aa, Unknown
  Bacterial polypetide isolated from the Sargasso Sea
RGAYLKGLRDVGIKVEKHHHEVAPSQHELGMYFGTLVDQADNVQLYKYVVQMVSHSFGKTATFMPKPVKGDNGSGMHTHQSIWKGKTPVFSGNKYAGLSQTALYYIGGILKHAKAINAFSNATTNSYKRLIPGFEAPVLLAYSARNRSASCRIPITLSKNGARCEIRFPDASGNPYLTFAAMLMAGLDGVKNKIDPGKSFDKDLYALSEKEVKKVPTVCGSLREAMESLDRDRNFLKQGNVFTDDQIDAYIALKFEEIHNFEHTPHPIEFDMYYSC

SEQ ID NO: 194502 - protein, 468 aa, Unknown
  Bacterial polypetide isolated from the Sargasso Sea
MSAKNVLKVIKDKEIDYVDLRFTDPRGKLQHVTMDTKVVDEDMLNDGIFFDGSSIAGWKAINESDMILKPDLSRTVVDPFTSHNTLNIFCDILDAIKKDPYERDPRGTAKKAEAYLKKSGIGDKAFFGPEAEFFVFDDVRFKNDMNETGFKIDSTEGPYNTGKKYENGNMGHRPGIKGGYFPVPPVDSAQDMRSEYLKAMKDMGIKVEKHHHEVAPSQHELGMYFGTLVDQADNLQLYKYAVHMVSHSFGKTATFMPKPVKGDNGSGMHVHQSIWKGNTALFSGDKYAGLSDLALHYIGGILKHAKAINAFSNATTNSYKRLIPGFEAPVLLAYSARNRSASCRIPITLSKKAARCEIRFGDAAGNPYLTFAAMLMAGLDGIKNKIDPGKSFDKDLYALSENEVKKIPTVCGSLREAMESLDKDRDFLKQGNVFTDDQIDAYIALKFEEIHNFEHTPHPIEFDMYYSC

SEQ ID NO: 194503 - protein, 336 aa, Unknown
  Bacterial polypetide isolated from the Sargasso Sea
MSKVRAEYIWMDGHEPTQKLRSKTKVISGPVESLEDLPLWGFDGSSTNQAEGNDSDCMLKPVYKVPDPIRGGEDLLVMCEVMNADGSVHSTNTRAHLRELAEQHKGQEAWFGIEQEYTLFEGRNPLGWPEGGYPAPQGPFYCGVGADEVFGRDIVEEHLELCLDAGLEVSGINAEVMPGQWEYQVGPLGPLDSADQMWLSRWLLYRISEDYGISATLHPKPVKGDWNGAGAHTNFSTKAMREEGGIKVIEDACERLSKKHDEHIAVYGAHNEERLTGLHETCSIKEFRYGVSDRGASIRIPMQTANEGYGYLEDRRPSANMDPYKVCAILLETTCS

SEQ ID NO: 194504 - protein, 296 aa, Unknown
  Bacterial polypetide isolated from the Sargasso Sea
RPGIKGGYFPVPPVDSAQDMRGEYLKGLRDVGITVEKHHHEVAPSQHELGMLFNTLVTQADNVQLYKYVVQMVSHSFGKTATFMPKPVKGDNGSGMHIHQSIWKGSTALFSGDKYSGLSQTALYYIGGILKHAKAINAFSNATTNSYKRLIPGFEAPVLLAYSARNRSASCRIPITLSKKGARCEIRFPDAAGNPYLTFAAMLMAGLDGIKNKINPGKSFDKDLYTLSEKEIENIPTVCGSLREAMESLDRDRKFLKQGNVFTDDQIDAYIALKFEEIYNLEHTPHPIEFDMYYSS

SEQ ID NO: 194505 - protein, 454 aa, Unknown
  Bacterial polypetide isolated from the Sargasso Sea
AEFVDLRFTDPRGKLQHLTMDATIVDAGMLNEGVFFDGSSIAGWKAINESDMILKPDTARMFMDPFTSHNTAVLFCDILDAIKKDPYERDPRGVAKKAEEYLKASGIGDKAFFGPEPEFFVFDDVRIKNDMNECGFKIDSKEGPYNSGKEYESGNMGHRPPIKGGYFPVPPVDSEQDMRGEYLKNLKEVGIKVEKHHHEVAPSQHELGMYFGTLVDQADNVQLYKYVVQMVTHSFGKTATFMPKPVAGDNGSGMHIHQSIWKGDTPVFSGDAYAGLSETALHYIGGILKHAKAINAFANSTTNSYKRLIPGFEAPVLLAYSARNRSASCRIPITLSKKGARCEIRFPDASGNPYLTFAAMLMAGIDGIKNKIHPGESFDKDLYELPPEEVKAIPTVCGSLREAMENLDKDREFLTQGGVFTDDQIDAYIALKFEEIHKFEHAPHPVEFEMYYSS

SEQ ID NO: 194506 - protein, 218 aa, Unknown
  Bacterial polypetide isolated from the Sargasso Sea
KTATFMPKPVKNDNGSGMHIHQSIFNGDKPLFAGDKYAGLSDECLYYIGGIIKHARALNAFSNASTNSYKRLIPGFEAPVLLAYSSRNRSASCRIPFSTSKKGKRVEVRFPDASGNPYLTFSAMLMAGLDGIKNKIKPGKPMDQDLYALSPEELKGIPTVCSSLRQACVALDEDRKFLTEGGVFTDDQIDAYIDLKMEEVNNFQDTPHPIEYEMYYSC

SEQ ID NO: 194507 - protein, 437 aa, Unknown
  Bacterial polypetide isolated from the Sargasso Sea
PTKFLDEDIFTDGLGFDGSSVRGFQEIQDSDMIVLPDPSTAYIDPFFSEKTLALHCNIKDPVTLVDYSRDPRNIAKKAEAYLKSSGIGDTAFFGPEAEFFVFNNVQFDSGSNFAFHEVDSIEGTWNSGTDENPNLGHKPRHKEGYFPLPPVDTLQDVRTEMVMTMQDIGLSVEAHHHEVATGGQCEIDLEFSPLLKMADDMMKYKYVVKNVAKQHGMTATFMPKPLFEDNGSGMHVHQSVWKDGDTLMYKEGNYANLSDLALNYIGGILKHAPALLAFCAPTTNSYKRLVPGFEAPVNIVYSQRNRTASVRIPAYSQSPKSKRMEFRCPDPSANPYLAFSAMLMAGLDGIKNKINPGDPTDINLYAASDDVLSKIQSTPGSLAESLEALENDHDFLLEGDVFTKDVIDTYISYKKESEVDPINIRPHPHEFKLYYDV

SEQ ID NO: 194508 - protein, 170 aa, Unknown
  Bacterial polypetide isolated from the Sargasso Sea
GGILKHAKAINAFSNATTNSYKRLIPGFEAPVLLAYSARNRSASCRIPITLSKKGARCEIRFPDASGNPYLTFSSMLMAGLDGIKNKIDPGKSFDKDLYALSEDEVKKVPTVCGSLREAMENLDKDRGFLKEGNVFTDDQIDAYIALKFEEIHNFEHTPHPIEFDMYYSC

SEQ ID NO: 194509 - protein, 336 aa, Unknown
  Bacterial polypetide isolated from the Sargasso Sea
MKVKAEYIWIDGYEPTANLRSKTKVLDGAVSSVSELPTWGFDGSSTLQADGGDSDCLLKPVWMCPDPIRGGENILVMNEVCNPDGTPHRSNSRAALVAIAEKFKEHNPWFGIEQEYTLMDGKQPAGWPEEGFPERPQGPYYCSVGSEDVAARSMVEDHLDLCLEAGLEVSGINAEVMLGQWEYQVGPLPALEVGDQLWVARWLLERVGEEYGLRVELHPKPIKGDWNGSGAHINYSTESMRADGGLKVIEDACEKLGQNIDKHIAVYGDANEERLTGDHETCSINEFKYGVSDRGASIRIPMGVANDGKGYLEDRRPASNVDPYKACAALIDTTCS

SEQ ID NO: 194510 - protein, 342 aa, Unknown
  Bacterial polypetide isolated from the Sargasso Sea
MAPEPEFFVFDDVRIKNDMNETGFKVDSSEGPYNSGKEYENGNMGHRPGIKGGYFPVPPVDSAQDMRGEYLKGLRDVGITVEKHHHEVAPSQHELGMLFGTLVNQADNVQLYKYVVQMVSHSFGKTATFMPKPIKGDNGSGMHIHQSIWKGKTPVFSGNKYSGLSQTALYYIGGILKHAKAINAFSNATTNSYKRLIPGFEAPVLLAYSARNRSASCRIPITLNKKGARCEIRFPDAAGNPYLTFAAMLMAGLDGIKNKIDPGKSFDKDLYTLSEKEIKNIPTVCGSLREAMESLDTDRKFLKQGNVFTDDQIDAYISLKFEEIYNLEHTPHPIEFDMYYSC

SEQ ID NO: 194511 - protein, 191 aa, Unknown
  Bacterial polypetide isolated from the Sargasso Sea
MSASNILKTIKDKKIEYVDLRFTDPRGKLQHLTMDATMVDQEMLNDGVFFDGSSIAGWKAINESDMILKPDLARKIVDPYTSHNTLILFCDILDAIKKDPYERDPRGIAKKAEAYLKSTGVGDKAYFGPEPEFFVFDDVRIKNDMNETSFAIDSTEGPYNSGRKYENGNMGHRPGIKGGYFQYHLWIVRKI

SEQ ID NO: 194512 - protein, 469 aa, Unknown
  Bacterial polypetide isolated from the Sargasso Sea
MSAQNVLALIQEHEVKFVDLRFTDTKGKEQHVSIPSHQVDEDFFEDGKMFDGSSIGGWKGINESDMVLMPDAASAKLDPFTEETTLNIVCDVLEPATMQGYDRDPRSIAKRAEDFLKSSGIADTVLFGPEPEFFMFDNITFSNTMGHSFVKIESEEAAWNSGTDYEHGNKGHRPFVKGGYFPVAPVDSSQDIRAAMCLVLEEMGQVVEAHHHEVATAGQNEIATRFNTLTLKADEVQVLKYVIHNVAHAYNKTVTFMPKPMFGDNGSGMHCHQSLAKNGVNLFAGDLYGGLSEMALHYIGGIIKHAKAINAFANPTTNSYKRLVPGYEAPVMLAYSARNRSASIRIPVVPSPKARRIEVRFPDPAANPYLAFAAQLMAGLDGIINKIHPGDAMDKNLYDLPPEEAAEVPTVAGSLDEALAALDADREFLTRGGVFSDDFINSYLELKQQDVDRVRMTPHPLEFELYYSV

SEQ ID NO: 194513 - protein, 468 aa, Unknown
  Bacterial polypetide isolated from the Sargasso Sea
MSAGNILKLIKDKNIEYVDLRFTDPRGKLQHLTMDSTVVDNGMLNDGVFFDGSSIAGWKAINESDMILKPDLTRKIVDPFTSHNTLILFCDILDAIKKNPYERDPRGIAKKAEAYLKKTGIGDKAFFGPEPEFFVFDDVRIKNDMNETSFSIDSTEGPYNSGKKYENGNMGHRPGIKGGYFPVPPVDSAQDMRSEYLKGLRDVGIKVEKHHHEVAPSQHELGMYFGTLVDQADNVQLYKYVVQMVSHSFGKTATFMPKPVKGDNGSGMHTHQSIWKGSTPVFSGNEYSGLSKTALYYIGGILKHAKAINAFSNATTNSYKRLIPGFEAPVLLAYSARNRSASCRIPITLSKKGARCEIRFPDASGNPYLTFASMLMAGLDGIKNKIHPGKSFDKDLYALSEEEVKKVPTVCGSLREAMESLDKDRNFLKQGNVFTDDQIDAYIALKFEEIHNFEHTPHPIEFEMYYSC

SEQ ID NO: 194514 - protein, 471 aa, Unknown
  Bacterial polypetide isolated from the Sargasso Sea
MSKTVADVMQLVKDEDVKFVDFRFTDTRGKEQHVSVPVSAFDEDKFESGHAFDGSSIAGWKGIEASDMLLMPDPTAAFIDPFYEESTLVLTCDVVEPADGKGYERDPRSLAKRAEAYLKSTGIGDTAYFGPEPEFFIFDSVQWNTDMSGCFVKINSEEAPWSAGKEFEGGNTGHRPGTKGGYFPVAPVDTFQDMRSEMCLLLEQLGIPVEVHHHEVAGQGQNEIGTKFSTLVQRADWTQWSKYIIHNVAHSYGKTATFMPKPVVGDNGSGMHVHQSIWKDGQNLFAGNGYAGLSELALFYIGGIIKHARALNAITNPTTNSYKRLVPHFEAPVKLAYSARNRSASIRIPHVSNPKGRRIETRFPDPMANPYLLFSALMMAGLDGIQNKIHPGEAADKNLYDLPPEEDAKIPTVCAGLDQAIEALDKDREFLTRGGVFTDGMLDAYLALKEQELAKFRMTTHPIEFEMYYSL

SEQ ID NO: 194515 - protein, 401 aa, Unknown
  Bacterial polypetide isolated from the Sargasso Sea
MGKKDVLKLMKDKEVEFVDLRFTDPRGKLQHLTMDATIVDDDMLEEGVFFDGSSIAGWKAINESDMILKPDLSRTIIDPFNSHSTLNIFCDILDAVKKDPYERDPRGTAKKAEDYLKKSGIGDKAYFGPEPEFFVFDDVRYKNDMNETSFTIDSAEGPYNTGKKYENGNMAHRPGIKGGYFPVPPVDSAQDMRGEYLKALRDMGIKVEKHHHEVAPSQHELGMYFGTLTDQADNIQLYKYAVQMVSHSFGKTATFMPKPVKGDNGSGMHCHQSIWKGSTPVFSGDKYAGLSQNALYYIGGILKHAKAINAFSNATTNSYKRLIPGFEAPVLLAYSARNRSASCRIPITLSKKAARCEVRFPDAAGNPYLTFASMLMAGIDGIKNKIDPGKSLDKDLYTLSE

SEQ ID NO: 194516 - protein, 199 aa, Unknown
  Bacterial polypetide isolated from the Sargasso Sea
THQSIWKGKTPVFSGNKYAGLSQTALYYIGGVLKHAKAINAFANATTNSYKRLIPGFEAPVLLAYSARNRSASCRIPITLSKKGARCEIRFPDASGNPYLTFASMLMAGIDGIKNKIDPGKSFDKDLYALSEKQVKKVPTVCGSLREAMEALDKDRGFLTKGNVFTDDQIDAYIELKYEEIHNFEHTPHPIEFDMYYSC

SEQ ID NO: 194517 - protein, 245 aa, Unknown
  Bacterial polypetide isolated from the Sargasso Sea
YFGTLVDQADNLQLYKYAVHMVSHSFGKTATFMPKPVKGDNGSGMHVHQSIWKGDKALFSGDKYAGLSDLALNYIGGILKHAKAINAFSNATTNSYKRLIPGFEAPVLLAYSARNRSASCRIPITLSKKAARCEVRFGDAAGNPYLTFAAMLMAGLDGIKNKIDPGKSFDKDLYALSESEVKKIPTVCGSLREAMESLDKDRDFLKQGNVFTDDQIDAYIALKFEEIHNFEHTPHPIEFDMYYSC

SEQ ID NO: 194518 - protein, 298 aa, Unknown
  Bacterial polypetide isolated from the Sargasso Sea
GHRPGIKGGYFPVPPVDSAQDMRGEYLKALKDMGVKVEKHHHEVAPSQHELGMYFGTLTNMADNLQLYKYAVQMVTHSFGKTATFMPKPVKGDNGSGMHCHQSIWKGSTPVFMGKEYSGLSKTALYYIGGILKHAKAINAFSNATTNSYKRLIPGFEAPVILAYSARNRSASCRIPIINNPKAARMEIRFPDAAGNPYLTFASMLMAGIDGIKNKIDPGKSFDKDLYTLSESEVKKLPTVCGSLREAMQSLDKDRKFLTQGGVFTDDQIDAYIDLKFQEIYKFEHTPHPIEFEMYYSG

SEQ ID NO: 194519 - protein, 265 aa, Unknown
  Bacterial polypetide isolated from the Sargasso Sea
GVEVEKHHHEVAPSQHELGTMFNTIVNQGDSMQIYKYAVHQVAHSFGKTATFMPKPVKGDNGSGMHVHQSIWKNKKPLFAGDKYAGLSDMCLYYIGGIIKHARALNAFTNASTNSYKRLIPGFEAPVLLAYSSRNRSASCRIPFSNSKNGKRVEVRFPDSSGNPYLTFAAMLMAGLDGIKNKIKPGRPMDEDLYALSGDELKGIPTVCTSLKGACTALDGDRAFLKQGGVFTDDQIDAYIELKMEEVQTFRDTPHPIEFQMYYSC

SEQ ID NO: 194520 - protein, 314 aa, Unknown
  Bacterial polypetide isolated from the Sargasso Sea
VWNTGTDEGPNLGYKVRNKGGYFPCPPHDTMQDVRSEMVNHMVAIGMSVEAQHHEVATAGQCEIDLKFDTLVKMADDLQKYKYVVRNTAKSNGLSATFMPKPLSNDNGSGMHCHQSIWSNGKPVFYGEGGYANLSDEAKFYIGGLLKHAPSLLAFTNPTINSYKRLVPGYEAPVKLAYSNRNRSAICRIPAYSPSPKAKRVEFRCPDATANGYLAFSAMLMAGLDGIKNRIDPGEPMDKNLYDLPPEEQSKVKEVPGTLEEAINNLESNHDYLLEGNVFTKDLIESYIEYKREEEIEPNKLLVTPAEFDMYYDY

SEQ ID NO: 194521 - protein, 481 aa, Unknown
  Bacterial polypetide isolated from the Sargasso Sea
MLIRHHQNYIGDKMSAENVLKFIKEKEAEFVDLRFTDPRGKLQHLTMDASIVDANMLNEGVFFDGSSIAGWKAINESDMIFKPDTARMFMDPFTSHNTVVLFCDILDAIKKDPYERDPRGVAKKAEEYLKASGIGDKAFFGPEPEFFVFDDVRIKNDMNESGFKIDSKEGPYNSGKEYENGNMGHRPQIKGGYFPVPPVDSEQDMRGEYLKNLKEVGIKVEKHHHEVAPSQHELGMYFGTLVDQADNVQLYKYVVQMVTHSFGKTATFMPKPVAGDNGSGMHIHQSIWKGDTPVFSGEAYAGLSETALHYIGGILKHAKAINAFANSTTNSYKRLIPGFEAPVLLAYSARNRSASCRIPITLSKKGARCEIRFPDAAGNPYLTFAAMLMAGIDGIKNKIHPGESFDKDLYELPPEEVKAIPTVCGSLREAMESLDKDREFLTQGGVFTDDQIDAYIALKFEEIHKFEHAPHPVEFEMYYSS

SEQ ID NO: 194522 - protein, 282 aa, Unknown
  Bacterial polypetide isolated from the Sargasso Sea
MTSADYASRQRAIIAELNVATHFDAEAEIARRVEFLAQYLRSTGLRTYVLGISGGVDSSTAGRLAQLSVEKLRAGGYDARFIAMRLPNGVQNDEADAQRALAFVRADEELTVNVKPAADAMLGALVASGHAFETPAQQDFVHGNVKARERMIAQYAVAGARRGIVIGTDHAAESLMGFFTKFGDGGADILPLAGLNKRRVRAVARALGGDELIVMKVPTADLEELRPLRPDEHAYGVTYDEIDDFLEGKPVADHVYETVLRFYDASRHKRALPYTMFDWPAA

SEQ ID NO: 194523 - protein, 289 aa, Unknown
  Bacterial polypetide isolated from the Sargasso Sea
MLPITANIKVEFSVKAQILTEMKVLKTIDPEFEVQRRVAFIKSKLQAARSKALVLGISGGVDSSTAGRLCQLAVDSLNSEHTDGGYQFIAVRLPYQIQKDEHEAQQACQFIQPTKLVTINVHQGVDGVHQATLTAFVEAGLHSPDAAKVDFIKGNVKARMRMIAQYELAGLVGGLVVGTDHSAENITGFYTKWGDGACDLAPLFGLNKRQVRQVAAYLGAPESLVYKAPTADLEDNQPLLEDEVALGLTYEQIDDFLEGKEVGKDVEEKLINIYKATQHKRQPIPTIYD

SEQ ID NO: 194524 - protein, 286 aa, Unknown
  Bacterial polypetide isolated from the Sargasso Sea
MTQHDSGARQASIAAEMHVAAEFDAAQEIERRVAFLANYLRTSGLKTYVLGISGGVDSTTSGRLAQLAVERLRAEHYDARFIAIRLPYGVQKDEADAQQALSFIRADENLTIDIKPAADAMLAALDTSGLRFNDDAQQDFIHGNIKARQRMIAQYAVAGARAGVVIGTDHAAESVMGFFTKFGDGGADVLPLTGLNKRRVRALSKALGAPEALAHKVPTADLEMLRPLRPDEDAYGIPYDDIDDFLEGKPVSAAARETILRFYDVTRHKRALPYTPFDWPVKTGGE

SEQ ID NO: 194525 - protein, 261 aa, Unknown
  Bacterial polypetide isolated from the Sargasso Sea
DPEFEVQRRVAFIKSKLQAARSKALVLGISGGVDSSTAGRLCQLAVDSLNSEHTDGGYQFIAVRLPYQIQKDEHEAQQACQFIQPTKLVTINVHQGVDGVHQATLTAFVEAGLHSPDAAKVDFIKGNVKARMRMIAQYELAGLVGGLVVGTDHSAENITGFYTKWGDGACDLAPLFGLNKRQVRQVAAYLGAPESLVYKAPTADLEDNQPLLEDEVALGLTYEQIDDFLEGKEVGKDVEEKLINIYKATQHKRQPIPTIYD

SEQ ID NO: 194526 - protein, 175 aa, Unknown
  Bacterial polypetide isolated from the Sargasso Sea
MATRSKANSAPGFFKGVCTVVMKLFCCVQPRVAVFGKKDYQQLMIVRRMAHQFALPVDIVPAETVRADDGLALSSRNVYLTNEERAEAPELYRTLHQVRQDVLETVLQGQASHEEVTTKAMEYLRGRGWQPDYVAVRRRSDLQEPTPENIAAGEPLVVLTAAKLGKTRLIDNLEI

SEQ ID NO: 194527 - protein, 275 aa, Unknown
  Bacterial polypetide isolated from the Sargasso Sea
MKVVHTISDLNNQLINYKLKSIGFVPTMGSLHDGHISLIQKAFLKAEIVVVSIFVNPTQFNDPKDFSNYPVNYNEDLEKLEKQNVDVVFIPKSVAELYSNEKPLNVDLNGIDEVMEGFHRKGHFNGVVRVLNLLFSLIKPQYAFFGEKDYQQLMVVKSMAKNHFKNIEIIGCPTKRDQNGLAMSSRNLLLKKEDHNKAIKLIKLLEDSKHMFQTHDRKFIEDYCLSKLKKFSIPEYFEIREISYLKRVEDKTTKQRAFVAAKIGDIRLIDNIEIN

SEQ ID NO: 194528 - protein, 229 aa, Unknown
  Bacterial polypetide isolated from the Sargasso Sea
MGNLHDGHLSLIDYARNISDYIVVSIFVNPTQFVAGEDFDKYPRTLDSDIKSISNLNVDLVFTPDIEEIYPANDRTSVEAPVSELESIHCGKYRPGHFRGVATVVTKLFDIVKPDIAIFGEKDYQQLLIIRYLVKSLLLPIEIIGLPTVREKSGLAISSRNSYMSKSERQQAPMLYECIRKTIKSIRSGDKDYSELEKKAKLFLKKAGFKIDYFNICDSCTLKTPTKKT

SEQ ID NO: 194529 - protein, 227 aa, Unknown
  Bacterial polypetide isolated from the Sargasso Sea
MIQTASIAELRSHCSSFKDHKECIAFVPTMGNLHDGHLHLIDYAHSLASKVVVSIFVNQTQFGPNEDFESYPRTHEADLSYCNQHNVDLVFMPSQDIMYPYHPFSTTIHVPNLSTRLCGHSRPHFFDGVASIIVRLFHCVSPHIAIFGEKDYQQFCLIKQLVDDLFIPVDVIAAPTIRSSSGLALSSRNSYLSKSQLDEAAIIYQALCYVKSHYEQGITLASILKNS

SEQ ID NO: 194530 - protein, 163 aa, Unknown
  Bacterial polypetide isolated from the Sargasso Sea
MIVVSDTAALAEHLTPLRERADTIAFVPTMGNLHEGHLALVDQARAAADAVVVSIFVNPMQFAAHEDLDTYPRTLDDDLSALREAGVDLVLTPSADDIYPDTSARHTAIHVPELGEALCGRDRPGHFDGVCTVVYKLFQLVGPDIAVLGEKDLQQLLIIKKMV

SEQ ID NO: 194531 - protein, 204 aa, Unknown
  Bacterial polypetide isolated from the Sargasso Sea
MVKLIKTRDDLNAIRKNFSRNNTIGFVPTMGNLHKGHLSLIEKSIEKTDITIISIFVNPTQFGPNEDYSNYPRTLKEDLHKIESISKQKELIVFIPKSVSEIYPEEFTTEFYIPELANCLCGTSRPGHFTGVLSVIYQLFKIVEPNIAFFGQKDYQQFCLIKKFASDLFPEISIQSLPIIREKNGLAMSSRNNYMNEEEINDSL

SEQ ID NO: 194532 - protein, 229 aa, Unknown
  Bacterial polypetide isolated from the Sargasso Sea
VIATIFVNPLQFAPNEDFEAYPRREDSDIRKLVEEDIDLLFAPDVSEMYRPDATTTISVGGLTDCLCALSRPGFFDGVATVVTKLLLQALPDIAIFGEKDYQQLLVIKRLATDLDIPVEIIGAPTIREEDGLALSSRNVYLDTKSRSIAPSMYNILTQYASDISNGNDIKKSLQLAKQNMRKSGFEKIEYLDLRSSQTLQACNDIKRPSRLFAAAWLGSTRLIDNLAIT

SEQ ID NO: 194533 - protein, 248 aa, Unknown
  Bacterial polypetide isolated from the Sargasso Sea
QALKVAEKVIVSLFVNPKQFSRGEDLDRYPRVFAKDLAVLSELNVDMVFTPSVDTMYPKSFQSQVSNFGFAQGLCSLTRPDFFSGVCTIVLKLFNIISPEFAVFGKKDYQQLRVIQEMVKDLNLKTEILSGEIVRSQTGLALSSRNQYLSSSELEQASYFPRSLRVAETLLKQGVDCVQAVILGVKKSLLSYDLQPEYLQLRGLSTFKNIEGKIVEPSILLAAIRLGKTRLIDNIELHRGAIVHVSRI

SEQ ID NO: 194534 - protein, 240 aa, Unknown
  Bacterial polypetide isolated from the Sargasso Sea
MKIFETENDIVNNHLNAKGLNLVPTMGNLHEGHLSLIEEAKNYNGKTIVSIFINPLQFGPNEDFKNYPRTIISDIKKLEKINCDYAFIPKDNFAKKLKLIKAPSISKKLCGKNRPGHFDGVLTIINKIFSVILPTHAFFGLKDYQQFILIREFTRISFPKIKIVGLPIIREKDGLAMSSRNNLLTKDERKIAPNIYEGLLWIENNRKRFTISELIKLSSEKLNQNNIQIDYLGIFDKKNL

SEQ ID NO: 194535 - protein, 200 aa, Unknown
  Bacterial polypetide isolated from the Sargasso Sea
MLIISDIAELEEALRIQRRKFKHISLVPTMGNLHEGHLKLVNHASEISDFVCVSIFVNPLQFGPKEDYSAYPRTLDEDISKLENTNCSLLFLPESKDLLLNIRECKADPYLSSILCGKTRTNHFDGVVTIVNRLFELFKPKSTYFGEKDYQQLMIIKEFITRNDLNIKIKGISTEREESGLAKSGRNKYLSNDEKEKATL

SEQ ID NO: 194536 - protein, 235 aa, Unknown
  Bacterial polypetide isolated from the Sargasso Sea
MKIIKKIDSIKSYGDIVFVPTMGALHEGHLSIVEEAKKWNLPICMSIFVNKLQFNNKSDFEQYPRDIDRDIIIAKETGVKILFLPESEYLYEHKNFSIISSGKLGMELEGKSRPGHFDGVLSIVDILLQLVQPKYAIFGKKDAQQFYLISSILRKRHRKVNFLATQTVRELDGLALSSRNALLSSSSRKESVGIFECLKFVAEDILKNKDINSSIQKGKMYLQKYSGIVLDYLVV

SEQ ID NO: 194537 - protein, 165 aa, Unknown
  Bacterial polypetide isolated from the Sargasso Sea
PMKGEARPHFFAGVATVVSKLFNHIPANFAIFGEKDFQQLAVIRQMVRDLDINIGIVAHPTIREADGLALSSRNQYLTSAQRRLAPQIYAQMQNTSALINNGTDINAAICQAKNQLQKAGFGKIDYFDLRQPDDFQPCEKPTATSRIFVAIWLGSTRLIDNCALG

SEQ ID NO: 194538 - protein, 245 aa, Unknown
  Bacterial polypetide isolated from the Sargasso Sea
MQIISDSDYLRTALNEERRKGRSLAFVPTMGNLHKGHMELVNRAKTLADIVIVSIFVNPLQFGSDEDLEKYPRTLSTDKALLFSEGIHTLFVPTEIDIYPNGREQETTIVVPEISKILCGKDRPGHFEGVATVVTKLLNLVTPDYAIFGEKDYQQLSIIRKLVHDLKFDTNIVAVGTVRDDDGLALSSRNMYLNADERKLAPLLFDTLAHCRDAIASGFDNFLELESHARFALIESGFSLDYFNI

SEQ ID NO: 194539 - protein, 253 aa, Unknown
  Bacterial polypetide isolated from the Sargasso Sea
MTLVPTMGNLHMGHISLIEAAKKVNNPIISTIYINKLQFNDKNDYLKYPKTIDDDIELLDKHGCDFLLIPDDSILKNILTIKAPNKSKKLCGINRPGHFDGVLTIVNKLFDIINPHSVVFGKKDYQQLILIKDFIQQNKSNINVISAETLRDVNGLALSSRNNLLSKEEKLIASKLYEVLVSINKNKNFLTPKLLDEKIEYLNSIGFKVDYLTACDTNTLEESFEIRNKDILIAIAATIGNIRLIDNMILSKL

SEQ ID NO: 194540 - protein, 267 aa, Unknown
  Bacterial polypetide isolated from the Sargasso Sea
MLKGHNDICLVPTMGALHDGHVSLIHKAKETGLKTVVSIFVNKLQFNDEQDFVNYPRDIEKDIKILNDLDVDFAFIPDEETIYPKSGFENLYAGNLGNKYEGSSRPGHFDGVLTIVNRLFQLIRPHTVIFGSKDIQQLFLIKKLILNKKYDIRIIEQKTTRTKTGLALSSRNKLLTKEGMKKAENIFKALLLVQNELEKSTNLIAIDNKAKSLLVSENIQLDYLEILDMNTFSPPKGDSKDFVIIIAVVIEGVRLIDNIRFNYEEIK

SEQ ID NO: 194541 - protein, 253 aa, Unknown
  Bacterial polypetide isolated from the Sargasso Sea
MVPTMGSLHEGHLSLIRKAISENEKVIVSIYVNPLQFNNVNDLKKYPRDIKNDLQRLETLSDIIVYVPDDNDIYEKDIKKKKYNFGHFTKIMEGKMRPGHFDGVATVVEKLLRMFNPSNAYFGEKDFQQLILIKTLVKKQELKVSIVGCETIREDDGLAMSSRNKLLNSSERTIAGNVIRLLKKAKKLYKSSTKEETKFNIIKDALMIENFNLEYFEILDISELSGFLEEEKEIRAFIACKVGKIRLIDNIKI

SEQ ID NO: 194542 - protein, 283 aa, Unknown
  Bacterial polypetide isolated from the Sargasso Sea
MQIVKNIIDLNNTLKSSKKEEKKTGLVPTMGSLHEGHLSLIKTALKSCDEVWVTIFINPTQFNDPKDFECYPKDFENDINTINSISSKINLFIPESVNEIYKDDITVDEFELGFVNKVLEARSRPGHFDGVATIINKLFNIFLPQVVFFGEKDFQQTLVVRNLIDSFFPNISLVICSTVRNENGLALSSRNKLLSANSYKHCGIIFGCLLFAKENYLKIDYADLLNKIKSKIEKINEFNLEYFEIRDEITLEPFGKSNDEGRFRGFICVKVEGVRLIDNLLLD

SEQ ID NO: 194543 - protein, 279 aa, Unknown
  Bacterial polypetide isolated from the Sargasso Sea
MKVISSIHELRDQLRGQNRTAFVPTMGNLHEGHLSLMRLARQHGDPVVASIFVNRLQFGPNEDFDKYPRTLQDDIEKLQKENVYVLFAPTERDMYPEPQEYRVLPPDDLGGILEGEFRPGFFTGVCTVVAKLMACVQPRVAVFGKKDYQQLMIVRRMCQQLALPVDIIAAETVRDEDGLALSSRNRYLSADERSEAPELAKTLQRIRESVLGGERDLGKLEEMARTHLAGRGWAPDYISIRRRANLIAPDAAQLEAGEPLVVVAAAKLGATRLIDNLEI

SEQ ID NO: 194544 - protein, 275 aa, Unknown
  Bacterial polypetide isolated from the Sargasso Sea
MIILKDNEHIFNNKNLCLVPTMGALHEGHIALINAAKKTEQEVIVSIFVNRLQFNDDLDFKNYPRDLEKDISILNRLNIEYAFFPDEEYMFPESGFDKLDAGNLGKKYEGNSRPGHFDGVLTVVNRLFELIAPKTAVFGAKDFQQLFLINKLILEKKYNIKLIENKTVRNSSGLALSSRNQHLSNKGIHQASFIYKSLNAAKDEFIKTNNTIDAVKVGTDILFDNNIDLDYFEILDHKTFSPPKNTTKKFIIITAAYVEGIRLIDNIQFEVGATK

SEQ ID NO: 194545 - protein, 274 aa, Unknown
  Bacterial polypetide isolated from the Sargasso Sea
MKIFETENDIKDNCLNAKGLNLVPTMGNLHDGHLSLIEESKNYKGKTIVSIFINPLQFGPNEDFKNYPRTIISDIKQLEKINCDYAFIPQDDFARKLNLIKAPSISKKLCGSNRPGHFDGVLTIINKIFSVILPDYAFFGLKDYQQYILIREFTKISFPRIKIVGLPIIREKDGLAMSSRNNLLTKDERKIAPNIYESLLWIENNRKKFTIAELIKLSSERLEKNNIQIDYLGIFDKKNLKKVKNFEEGALIAVAAKIGKVRLIDNIILDKSKN

SEQ ID NO: 194546 - protein, 272 aa, Unknown
  Bacterial polypetide isolated from the Sargasso Sea
MIVFNSIKEFNKAKENFDSLSFIPTMGNLHRGHISLIDTAKEYKNKVIASIYINKLQFNDKNDYLNYPKTIEDDINILEKHGCDYVLIPDESIIENIINIKAPPISNKLCGQSRPGHFDGVLTILNKFFQIIDPEIVFFGKKDYQQFVLVRDFILNNNLNIKIVGVDTVREDSGLALSSRNNLLSNQEKIIATELYKALKDIAINKTNLNSNLINLKKDYLKSLDINVDYLISCDPDTFEECYKINEKDILVAIAAYVGKIRLIDNIKLTKL

SEQ ID NO: 194547 - protein, 274 aa, Unknown
  Bacterial polypetide isolated from the Sargasso Sea
MRQRISSWRAEGQTVSLVPTMGALHDGHLSLIKIAQEKCDRVVASIFVNPKQFLPNEDFEKYPRNEDSDIEKLVELGTDLLFSPNASEMYRADASTAVVISQLTDCLCATSRPGFFDGVGTVVTKLLIQTLPDIAIFGEKDYQQLLIIKRLARDLDIPTKIIGAPTIREIDGLAVSSRNVYLSPTHRETAPSIFKVLKRTATAIALGDDALLAAQKAHDDLVLAGFSKIEYFEARHSETLEPIKDTRNPGRLFAAVWLGSTRLIDNLEIKAYSD

SEQ ID NO: 194548 - protein, 138 aa, Unknown
  Bacterial polypetide isolated from the Sargasso Sea
MLQEANATPLHLVPTMGALHQGHGALIRAARNQGGRVLVSIFVNPLQFGPNEDFASYPRNLDQDHSLALEAGADAIWAPQSQDLFPMGAAGLTQLLPAPELVTNLCGPGRPGHFQGVCTVVARLLALVKPSHLHLGEK

SEQ ID NO: 194549 - protein, 281 aa, Unknown
  Bacterial polypetide isolated from the Sargasso Sea
MITSAHIDDIRTQVRAWRAKGETIAFVPTMGNLHQGHITLVKEAAKKCDHVVVSIFVNPMQFGQNEDLDAYPRTLEADSQALTAAGAELLFTPTPAIIYPKGLAQQTYVEVPGISDVLCGASRPGHFRGVATVVCKLFNIVQPDVAFFGNKDYQQLLVIRTMVEDLSLPIEIIGVDTIREASGLAMSSRNGYLTAEEKAAAPALKKAIDAMAQGIKQGVSIEQVTAEAKASLIAAGFTPDYLEVRHATTLAHAETTDQALVILAAAYLGKARLIDNLRFDR

SEQ ID NO: 194550 - protein, 277 aa, Unknown
  Bacterial polypetide isolated from the Sargasso Sea
MKLVKSIKYLDKILNRYRSDGFKIHLTPTMGALHAGHLKLVKKSKKLKSIVVVSIFVNPTQFGPKEDYKDYPRTLKNDLKVLKKYGADIVFTPIQKQILSHKTKHNCPQFAIEKRLCGKSRPNYFPGVKNIVLKLFDIVQPDAAFFGEKDYQQYLVIKKMTESLKLNTRIICVKTVRDTNGLPLSSRNNYLSDQEFKIAIKINKLLKKLPPLIRTKLKINKILNHTKKILIDHGVDKIDYLTVLNDDLSVRKKISDKSRIFIAAKIGNTRLIDNIKI

SEQ ID NO: 194551 - protein, 127 aa, Unknown
  Bacterial polypetide isolated from the Sargasso Sea
MEVISEKQNLRSQIRSQKLLRKKIALVPTMGNLHEGHLSLINRAKKIADFVVVSIFVNPTQFLEGEDFERYPRTMEDDLSKLKKMGIDIVYTPELEDIYPHYPDEMVGVTLSGISNVFMWKHKTGTL

SEQ ID NO: 194552 - protein, 264 aa, Unknown
  Bacterial polypetide isolated from the Sargasso Sea
MGRRIGFVPTMGSLHAGHTSLVDRAMAECDDVATSIFVNPSQFGPQEDFERYPRDFDADFNLLAQHDVRWIFAPDVHEMYPPGDSTRIEISGPAEPYEGQLRPGHFSGVATIVFRLLQSTPANTVYFGAKDWQQVLVVRQMVRDLGLDVEVMTCPIVRDKDGLALSSRNAYLSESERTRAQTIYAALQQAEENWCRGLAIDKIELKVRDMLSAREIRIDYADIVHDESLRKISEVSRNTPAIFLIACHVGSTRLIDNILLPSQT

SEQ ID NO: 194553 - protein, 271 aa, Unknown
  Bacterial polypetide isolated from the Sargasso Sea
MRAYSSYKDIVRLVKKVNSIGLVPTMGSLHDGHLSIIKKALIKNDIVIVSIYVNPKQFNDSKDLKKYPRNLEHDLEKLKIFNKVIVYAPSDKDLYDEGEEVKKYNFGEIIKIMEGRLRPGHFDGVATVVEKLLVKFKPNNAYFGEKDFQQLVLIKELVKKIKLDVNIIGCETIRESDGLAMSSRNKFLNKSERKCAGQIIKLLDRAKKMYSTSSLKAIKSDILKQAYSIDNLKIEYFEILDVSDFLKDKKEIRAFIACRIGNTRLIDNIRI

SEQ ID NO: 194554 - protein, 283 aa, Unknown
  Bacterial polypetide isolated from the Sargasso Sea
MKVVDSISALRGTVNAWKRNGETVGFVPTMGNLHDGHLKLVKKAKAHNDKVVVSIFVNPMQFGANEDLDAYPRTIEEDKAKLTSVGADAVFLPSVAEMYPAGLDAQTFVEVPGISGSHCGASRPGHFRGVATVVTKLFNMVQPDDAFFGEKDFQQLQVIRALARDLSMAVKVHGVPTERETSGLAMSSRNGYLTDTEKATASAIFAEMQRLKAGIESGNTDFVELENAMVSNLEAKGFKKDYCQVVNAATFEPASDSDKELVLLVAMFMGKTRLIDNMQITRD

SEQ ID NO: 194555 - protein, 272 aa, Unknown
  Bacterial polypetide isolated from the Sargasso Sea
MKIFATENDIEDNRLNAKGLSLIPTMGNLHEGHLSLIKEAKNYNDKTIVSIFINPLQFGPNEDFKKYPRTIIADIKKLEKIDCDYAFIPQDNFAKKLKSIKAPSISRKLCGSNRPGHFDGVLTIINKIFSVILPTHAFFGLKDYQQFILIREFTRKYFPGIKIIGLPIIREKDGLAMSSRNNLLTKDERKIAPYIYKNLKWIKNNRNKFTIPELVKLSSEKLERHNIEIDYLGIFDKKSLNEVKNFEKGALVAVAAKIGNVRLIDNIILNKN

SEQ ID NO: 194556 - protein, 256 aa, Unknown
  Bacterial polypetide isolated from the Sargasso Sea
MIPTMGALHEGHLSLIKKGKEFGVSTMVTIFINELQFDSKEDFSNYPSKIEDDIKTLGNLDIDYLFIPENNYIYPDSGFEKIDSGAIGKKFEGNSRPGHFNGMLTVVNRLFQLTLPKIAVFGKKDAQQLFLIKEMVNKKNYQIKIIEGLTVRDNLGLALSSRNLLLSKYGEEKARLINQILNHSKKEFCETKDLNIFKKLKSYYSDGDIEIDYLAIVDPETFGDPLEQTENYIIIIAAYIENIRLIDNIEFKLERV

SEQ ID NO: 194557 - protein, 258 aa, Unknown
  Bacterial polypetide isolated from the Sargasso Sea
RIAFVPTMGNLHQGHLQLVDTAKQRADRVIVSIFVNPMQFGANEDLDKYPRTLEQDCKGLTEHGADAVFTPTPAIIYPRGLDVQTYVEVPLLGDHHCGASRAGHFRGVSTIVTKLFNLVQPDIACFGQKDYQQLAIIRQMVADLSMPIEIIGVPTTRAEDGLALSSRNGYLTAEQRAIAPDLYSVLQWMKQQLHQGFSDFRALEQQAKDKLNAAGFKADYMNISNRQTLVPATDSSQPLVILAAAYLGNTRLIDNIEV

SEQ ID NO: 194558 - protein, 281 aa, Unknown
  Bacterial polypetide isolated from the Sargasso Sea
MITSAHIDDIRTQVRAWRAKGETVAFVPTMGNLHQGHITLVKEAAKKCDHVVVSIFVNPMQFGQNEDLDAYPRTLEADSQALTAAGAELLFTPTPAIIYPKGLAQQTYVEVPGISDVLCGASRPGHFRGVATIVCKLFNIVQPDVAFFGNKDYQQLLVIRTMVEDLSLPIEIIGIDTIREASGLAMSSRNGYLTAEEKAAAPALKKAIDAMAQGIKQGVSIEQVTAEAKASLIAAGFTPDYLEVRHATTLAHAEATDQALVILAAAYLGKARLIDNLRFDR

SEQ ID NO: 194559 - protein, 287 aa, Unknown
  Bacterial polypetide isolated from the Sargasso Sea
MLVVTDASEMRGWSRARRAEGKRIAFVPTMGALHEGHLSLVDHARAKGDAVVMSIYVNETQFAPGEDFDQYPRTAEDVRAAEARGVDCVYQPKRMYAAAQDGEDPHETFVEVTELSNGLCSGTRPHFFRGVATVVTKLFNVVEPDVAVFGKKDYQQWRVIQRMVRDLNFDIDIVGGEIVREADGLAMSSRNLLLAPEKRREATVINRTLREAKALAERETTTGESLEKMVSEGIENGGGVVDYVRVMQPVSLKPHSGAVTSSCVIAIAAKFGTVRLLDNIEIDINRD

SEQ ID NO: 194560 - protein, 162 aa, Unknown
  Bacterial polypetide isolated from the Sargasso Sea
RFRPGFFQGVCTVVMKLMSCVQPRVAVFGKKDYQQLMIVRRMCHQFALPTDIIAAETVRDTDGLALSSRNRYLQAAERAEAPMLATELNRVRDAVLAGDRDFAKLEKAAMAELAARGWQPDYIAVRKRSNLLPPGAEDANAELVVLAAAKLGATRLIDNLEI

SEQ ID NO: 194561 - protein, 303 aa, Unknown
  Bacterial polypetide isolated from the Sargasso Sea
NIELNLIGKIQIKNLLMAMIAAEKSNIRFKNIIKIISKVKSVSGRFERIGKIINNSKVILDYAHTPDALKTCLQNLKDQFKNNKISIVFGCGGDRDKFKRPLMGKIVNKFCNKVYLTDDNPRKENPIKIRTSIKRKINKSKLYEIPSREKAIKEAIKNLLTGEILVVAGKGHENIQDYGNFKNFFSDKKCILKNIKQKNKYLSKDIKLNILKEESGQNHISLKTNLKNASINSKEIKKNDIFFAIKGKKKDGNQYLSEVFNKKASLAIVHKINKLEKKSKQIKVKNTLDFLTKTSSKVRENSS

SEQ ID NO: 194562 - protein, 322 aa, Unknown
  Bacterial polypetide isolated from the Sargasso Sea
VIMEASSHGLKQNRLDGLKFNSGIFTNLSQDHLDYHKNLKNYLNAKLYLFENLIAKRGNVITDQLIPEFKNIKKIAINKKLKLHTLNDKKNNLELISHNFKGEGQFLRIKLYNSIRDINLNLIGKIQLKNVLMAIIAAKYSGISLDKILNTIPKLKPVEGRFEKIGKIKNQSKVILDYAHTPDALKTCLLNLREQFPNKTITVLFGCGGNRDQNKRSKMGKIASDFADSIILTNDNPRFENPQKIRRDIKKGIKKKRITEISNRAIAITQAIHNLNSGEILLVAGKGHEKTQDIGNKKIFFSDRKVILNAIKNKNDNLSDNL

SEQ ID NO: 194563 - protein, 186 aa, Unknown
  Bacterial polypetide isolated from the Sargasso Sea
MYKLNFSLKDLSRLIKSFPGTPGRMEKIDIENNDVSALLPNVIVDYAHTPDGLKKVLKSIKKLCEGKLITVFGCGGDRDSSKRPLMGSIAEEFSDYVFITSDNPRSEDPEKIVSEILKGIEKRDQIKIEIDRFIAIKESIEFAKKEDIILIAGKGHEDYQILNDKIIDFDDRKIAYKFLEEKSKSK

SEQ ID NO: 194564 - protein, 280 aa, Unknown
  Bacterial polypetide isolated from the Sargasso Sea
MESLNLDYLKSIDIDYSKVVNHTFDVVEGSILCIDHDDNNKLNEYISSSLNKNPKFVITSNKCDIQDEKVLRFKDYESIFNYILEGISTNYKSLNYFGITGTNGKTTTAFYLNQLIGSDNLFIGSIDEKQKYSFTNEKILTTPKLFNVVKLISLQKENISSVSLEVSSHALDQNRLGDLKFLVSGFTNLSQDHLDYHGSIENYMNSKAKLFQKGVSEKFVYIDSPESAQIVNASNIESFSIGTNENNDVIYKEIDEKILKFTIDSNQVECQLHLSGPKIY

SEQ ID NO: 194565 - protein, 308 aa, Unknown
  Bacterial polypetide isolated from the Sargasso Sea
AVEAESEFAILEVSSHSIAQNRISGCEFEAAIFTNLTQDHLDYHSDMESYFQTKRKLFFPPYLKEKDGICVLNHDDHWISKLSSDLEKRSLLVSTKITESEFENDDFFFVTDKKFTESGSTCIFHTPREKIQLFIPLVGEFNLMNAIQAITILYKLNFSLKDLSKLIQSFPGAPGRMEKIQIDNNDVLRSLPTVIVDYAHTPDGLKKVLQSIKKLCEGKLITVFGCGGDRDRSKRPLMGSIAEELSDQLFITSDNPRSEEPQKIVNDILMGIKKREKITIEIDRFKAINESIKFANKKDIVFNCRKRT

SEQ ID NO: 194566 - protein, 286 aa, Unknown
  Bacterial polypetide isolated from the Sargasso Sea
MRSVKLHKLLDLVGIIPSLDLIDHEINNISFNSKEVQKGTLFLGMPGLNVDGGKYCIEAIENGAEAAIIGSAAKEKIGSIDRERILVIEDNLDYIFGQIVAEFWNRPSRKLKLIGVTGTNGKTTITFLLEYLLKKLGKKTALFGTLLNRWPGFSEVALHTTDFADKLQKKLNAAVEAESEFAILEVSSHSIAQNRISGCEFEAAIFTNLTQDHLDYHSDMESYFQTKRKLFFPPYLKEKDGICVLNHDDHWISKLSSDLEKRSLLVSTKITESEFENDDFFFVTDK

SEQ ID NO: 194567 - protein, 279 aa, Unknown
  Bacterial polypetide isolated from the Sargasso Sea
NKNLKSLTIGKKNSNLIIKKHEYFGNHQMVELEFNKKKYSFTTNLIGKIQVKNLLFSILAASRTKIKFNKIIETIKNIKPVEGRLEIVGNIKNNSKVILDYAHTPDALKYTLESIKEQFAQSSISIVFGCGGDRDKNKRSIMGKIANQYCNKIFLTDDNPRYENPKKIRNQIKTKITRSKLVEIPSRKKAIRVGIENLKSGDILLVAGKGHEIYQEYKGKKKFFSDKKNILKEINSKNIKLFRNWKANILNEKCNLSLINKKLKINKASINSKNIKKND

SEQ ID NO: 194568 - protein, 325 aa, Unknown
  Bacterial polypetide isolated from the Sargasso Sea
ELNAAVEAESEFAILEVSSHSIAQKRISGCEFEAAIFTNLTQDHLDYHSDMESYFQTKRKLFFPPYLIEKDGISVLNHDDHWISKLSSDLEKRSSLVSTKITESEFENDDFFFVTDKKFTESGSTCIFHTPREKIQLFVPLVGEFNLMNAIQAITILYKLNFSLKDLSKLIQSFPGAPGRMEKIQIDDNDVSRSLPTVIVDYAHTPDGLKKVLQSIKKLCEGKLITVFGCGGDRDRSKRPLMGSIAEELSDQLFITSDNPRSEEPQKIVNDILMGIKKREKTTIEIDRFKAINESIKFANKKDIVLIAGKGHEDYQILNDKVINF

SEQ ID NO: 194569 - protein, 294 aa, Unknown
  Bacterial polypetide isolated from the Sargasso Sea
EAIKRGAKAVISDKRSSNRKIIFCKNKNIKATLVNACRKFYNDQPKNIIAVTGTNGKSSVVDYFRQLLCLNKKKVATIGTLGMYLNYKKTKSILTTPDLVSLHKFMRDIKRKKIDIVMLEASSHGLHQGRLDGLNLKAGVFTNLSQDHLDYHITKKNYLKAKLLLFRKYLKKGNFSILSNQVPEFNKIKQISIRRKLKIIQTNKIYKKLTNSKLKNFEAKFQLENLSKAIAAAKICGLKERNIIFALKKMTQIPGRLELVKKINNIKIFVDYAHTPDALEKVLNNLIEDNKRNI

SEQ ID NO: 194570 - protein, 295 aa, Unknown
  Bacterial polypetide isolated from the Sargasso Sea
MGTLANRWPGHSRTAIHTTPFADQLQADLAAAKAAGCRLVAMEVSSHALDQARVAGCSFSGAVFTNLSQDHLDYHATLEDYFEAKALLFASPYLKGQAVVNTDDLHGRRLAQRLGDQCWRSSLEDSSAELFMDGLQFSASGVQGVLHGPAGSYPFQSPLVGRFNLMNLLQAVGVLLQSGLACGELLEALGTFNGVPGRMERVPHRPDQPAVLVDYAHTPDGLDNALQAARPFVEGKLTCVFGCGGDRDRTKRPQMGAIAAQLADELVVTSDNPRTEDPQQILDDVVAGIPAGSRC

SEQ ID NO: 194571 - protein, 333 aa, Unknown
  Bacterial polypetide isolated from the Sargasso Sea
VKLFEDALNNGARTIVSEKKYQGFVKNILYLHSNNPRKLLSESAAKIFKQKPNNLIAVTGTNGKSSITNFYYQILKLNKVQVASIGTLGVYYKNKFIKTHNTTTDPITLNKLLQKIKKNGINNVIMEASSHGLKQNRLDGIKFKTGIFTNLSRDHLDYHNSYLDYFNSKMILFKNLMHKKSCIIFDKEIKVSKSINKIVSNKNYNSICIGKSFSDVKITKHNYIADKQHVEFIFKNKKYFFKTSLLGKIQIKNLIMAMIAAKNSNIPLEKIVKSINKIKSVNGRLEEIVKFKDNSRVILDYAHTPDALETCLKNLNEQFKFSKFSIVFGCGGD

SEQ ID NO: 194572 - protein, 224 aa, Unknown
  Bacterial polypetide isolated from the Sargasso Sea
MSQKFYPKSQDIRFSFRDKIYQKSINLIGAFQAENLLMAALLVIASGEEESSIFEKLDNINPVRGRMELAATKKNGATVYVDYAHTPDAIEVALKSLKPHILGKLIVVIGAGGERDEGKRPLMGTAAEQNSDFVIITDDNPRNEDPSVIHQMIKNGIQNDNKVKVIADRAEAILTAVDLLEVGDGLLIAGKGHETEQVIGENNFPFDDFEQASLSVASLDGIEK

SEQ ID NO: 194573 - protein, 268 aa, Unknown
  Bacterial polypetide isolated from the Sargasso Sea
MRSIKLHKLLDLVGIIPSSNLIDQEINNISFNSKEVQKGTLFLGMPGLNVDGGKYCIEAIENGAEAAIIGSAAKVKIGSIDRERILVIEDNLDYIFGQIVAEFWNRPSRKLKLIGVTGTNGKTTITFLLEYLLKKLGKKTALFGTLLNRWPGFSEVALHTTDFADKLQKKLNAAVEAESEFAILEVSSHSIAQNRISGCEFEAAIFTNLTQDHLDYHSDMESYFQTKRKLFFPPYLKEKDGICVLNHDDHWISKLSSDLKKRSLLVST

SEQ ID NO: 194574 - protein, 297 aa, Unknown
  Bacterial polypetide isolated from the Sargasso Sea
SITIHKTLSLLKRKKIKNTILEASSHGLKQYRLNGLRFDTTIFTNLSRDHLDYHKTYKDYLNSKLILFNKLTKKGGSIIYDNDISQSKILKKICIKKNIKPLTIGKKNSNLLIKKHEYSGNLQKIEIEFNKKKYSFTTNLIGKIQVKNLLFAALAASESKIKFSKIIKLISKIKAVEGRLENIGNIKNNSKVILDYAHTPDALKHTLKSIKKQFSHSSITIVFGCGGDRDKDKRSIMGKIANNYCDKIFLTDDNPRYENPKKIRNQIKKKISTSKLVEIASREKAIKVAIESLSSGD

SEQ ID NO: 194575 - protein, 260 aa, Unknown
  Bacterial polypetide isolated from the Sargasso Sea
MNFLHDIMIPLNIDITKYPNLKINGIKTNSNEVTKGDIFVAIKGNKCDGHDYISKAVRSGACAIITDSESYKLIHPHQIKVENSRIAISSIAANFYNNPSKRLKVIGITGTNGKTSTAWLIASILKEAGLKVAQIGTLGIITDNKITKKGLTTPDPITLHKTFSMLEKNKFTHVVMEVSSHALDQHRVNDVDFDLAIFTNLTQDHLDYHKSMKSYFLAKTKLFKSLDPKAISIINNSSEYSEKFKKASNCKVVTFSKTRE

SEQ ID NO: 194576 - protein, 291 aa, Unknown
  Bacterial polypetide isolated from the Sargasso Sea
RLLANFFHQILTLNKKKVLSIGTLGININKKKIKTNNTTLDSISINKYLNLIKKKKTNNVILEASSHGLKQHRLDYLKFDIGIFTNLSRDHLDYHKSFKDYLNSKLILFKKLMKKKSTIIFSNNIPQSKLLKKICKKKRFKFVTLGEGDSDLKILSHSYKSDKQSVSFSLNNKIYNFDTKLIGKVQISNLLMAILAARQSKIPIKKIIKIIKKIQPVNGRMEQIGVLKNNAKVILDYAHTPDALENCLVNIKEQFKNRKINIVFGCGGERDKPKRQLMGYIANKYSKKIYL

SEQ ID NO: 194577 - protein, 272 aa, Unknown
  Bacterial polypetide isolated from the Sargasso Sea
FYFQLLKLNKIKVASIGTLGLKSKNIRLNLANTTIDPIRIGQILSKLKSQKINNVIMEASSHGLSQYRLDGLKFSSGIFTNLSQDHLDYHKNFKEYFKAKQYLFENLIRKKGNVIVDETIPEFKKIKKTAISRKLRLQTLNNSKSKFRIFSHSFRGEKQILKIKYNNLTREVNLSLIGKIQLKNILMAIIAAKNSKLSLIKILNVLSKLKPIDGRFEKIGKIKNKSKVILDYAHTPDALRICLSNLKEQFPNKKIILLFGCGGNRDQNKRFK

SEQ ID NO: 194578 - protein, 238 aa, Unknown
  Bacterial polypetide isolated from the Sargasso Sea
NHDNNIKLNDYVSSSLNKNPKFVITSNKCDIQDEKVLRFKDYENIFNYILEGISPNYKSLNYFGITGTNGKTTTTFYLNQLIGSDNLFIGTIDEKQKYSFTNEEILTTPKLFNVVKLISLQKESISSVSLEVSSHALDQNRLGDLKFLVSGFTNLSQDHLDYHGSIENYLNSKVKLFQKDVSEKFVYIDSPESTQIVNASNIESYSIGTNKNNDVRYKEIDEQVLKFTIDSNQVECQL

SEQ ID NO: 194579 - protein, 263 aa, Unknown
  Bacterial polypetide isolated from the Sargasso Sea
YKKKPKNLIAVTGTNGKSSVANFYLQILELNKKKVASIGTLGINSTSKKIELQNTTLDPLQLGKYLSKLKEQKIDNIILEASSHGLKQFRLDGLKFKTGIFTNLSHDHLDYHKSYKNYLNSKLYLFKKLLKKNSNIISDLDIPEHKKIKSIAKKKQIKINTISNKNGDLSIISHRYLGEKQLLRINYKKKLYNFKLNLIGKIQLKNVLMSMIAANMNNIDFKKIVNVIEKIKPVSGRLEKIGSIKNNSSVILDYAHTPDALRL

SEQ ID NO: 194580 - protein, 322 aa, Unknown
  Bacterial polypetide isolated from the Sargasso Sea
ISTPQFIVSNINKETEILLKNLYKKTPYRTIAITGTNGKTSVVWYISKILNLLNFNNITVGTLGHISNGKKKNEVNLTTPAYEELFKYGTSYKNNKYVYIFEASSHALDQNRIRNYPVNIAAITNISTDHLDYHKKISEYKKAKMKLFTKHLDNYGFAVINSRIKNISNLKKKLINKGIKVIYFGKNNIYFEKKKDSIFLNINKKKYIVNKLKLNTDIELENLECAITCCMALKINEKKIIKALSNITNPPGRLQKINYNKNKSKIIIDYAHTPDALKKTLKSFNVKNKKPILLFGCGGERDKIKRKSMGIIANKFALRTYI

SEQ ID NO: 194581 - protein, 266 aa, Unknown
  Bacterial polypetide isolated from the Sargasso Sea
ISGCEFEAAIFTNLSQDHLDYHLDMESYFQTKRKLFFPPYLMEKDGISVLNHDDPWISKLSSDLEKGSSLVSTKITESEFDNDDFFFVTDKKFTEIGSTCIFHTPKEKIKLFVPLVGEFNLMNAIQSITILYKLNFSLKDLSKLIQSFPGAPGRMEKIEIENNDVSRLLPTVIIDYAHTPDGLKKVLQSIKKLCKGKLITVFGCGGDRDRGKRPLMGSIAAEFSDHVFITSDNPRSEEPQKIVNDILMGIDKREKITIDIDRFKAI

SEQ ID NO: 194582 - protein, 164 aa, Unknown
  Bacterial polypetide isolated from the Sargasso Sea
MVLDQKRFYHIKFKGAIFTNFSQDHLDYHKTMKSYLNAKLILFRKLLSKKSTIISDDEIPTFKILNQIAKKKNLRISNINKTIKKIKNFDLKLNEDFKIRNLAMAIEAVKLCGLKEKLIFSSLKKLKDVNGRLELVKRYPNDVKVFVDYAHTPDALLKTLNSLR

SEQ ID NO: 194583 - protein, 299 aa, Unknown
  Bacterial polypetide isolated from the Sargasso Sea
NDAIKNGASAAISNKKIISEFNKPVINIKNTRKAASIISSRFYDNPSKDLTIIGITGTNGKTTTAYLLKECLDCAGFKTAQIGTTGVIAEGYKQEKTLTTPDAATIQKLLRNLVNDGFSHVVMEVSSHALHQLRVHNVHFDVAIFTNLTPEHLDYHKTMEKYFKVKSTLFNLLKEKNGKAVINYDDDYGKKLASKLNCDVALYSKTNSTKSFFSQINDYKNKINGTINSNERSYIIESNLIGNYNLENILATVTTLDSLKISKNAIIEGIKTCKNIPGRLELFPVKTGAKVIIDYAHTP

SEQ ID NO: 194584 - protein, 247 aa, Unknown
  Bacterial polypetide isolated from the Sargasso Sea
ILDHQFLKSEQKILFRFEKKKYYFSTRLIGSVQIKNLLMAIMAAMKSKIPLKKILKITQKIKPVNGRLEKIGRLNNNGIVILDYAHTPDALKTCIKNVKEQFKLRNINLVFGCGGERDKPKRKMMGRIADRYCNKIYLTDDNPRNEDPKKIRKDIKSNISKNKVFEIPSRESAIKSAILNIKSNEVVIIAGKGHEVYQEYISKKFFSDKRCIEKFIKVKNKSLNRNWKSNIISEIIKKKIDKNVNIN

SEQ ID NO: 194585 - protein, 234 aa, Unknown
  Bacterial polypetide isolated from the Sargasso Sea
RTLPNLSKIFLDYAHTPDALENAILSLREHFKKKITVVFGCGGERDKSKRRLMGKVAKKYCDKIFVTDDNPRNENPKKIRKDIMKGLKNSNAKEIGNRKKAILYALKKSYPNEVILIAGKGHENYQILGNKKIFLSDKNIIKNFKNKNIYSNKINHDLKYNGIILRKTLKAKRDYFFNNVSINSKTTKKNNLFVAIKGIKNDGHNFLSEAKKNGANYCVISKPNKKKSKLILVK

SEQ ID NO: 194586 - protein, 243 aa, Unknown
  Bacterial polypetide isolated from the Sargasso Sea
LEASSHGIIQNRLDGINFNGAVFTNLSHDHLDYHKNMENYFNAKIKLFTENLKDGACVSINLDDQYGMKLYNKIKTKNFKFVNFGFNENCELKLTKIKRIEKIWQLEILYKNKLYKTDIGLIGHFQIYNALAAASICLSLGLEQDSIFKSLSYLQNVPGRMQLVNHPLCKATIIVDYAHTPDALANAILAVKKMNVTGKIYTLFGCGGERDHEKRSKMGEVAFKNSDFTIITDDNPRSEDPSL

SEQ ID NO: 194587 - protein, 215 aa, Unknown
  Bacterial polypetide isolated from the Sargasso Sea
AAVLPPAAHEPVVVVGEPVARQLGELAAAFWEQPSSRLALIGVTGTNGKTTTTHLIEHLATAIGTPTALFGTLVNRWPGHSITATHTTGFADRLQGQLASAASAGAQLGAMEVSSHALAQQRVAGCRFAAAVFTNLTQDHLDYHASMQAYFEAKAALFADPLLEPGPARAVVNSDDPWGLQLAERLWRSLLAQFPQRARGGAAHERSGDDGSWGA

SEQ ID NO: 194588 - protein, 309 aa, Unknown
  Bacterial polypetide isolated from the Sargasso Sea
GSQLAAMEVSSHALVQERVAGCRFAGAVFTNLTQDHLDYHGTMEAYYEAKARLFTAPLLDGDGPSAVVNSDDPWGSRLAEQLGGRCWRSSLRDPQAQLQMVDLEMTGQGVRGRLISPAGSGAFCSPLLGRFNLMNLLQAVGVLLQRGLPLAPLLEAVGSFRGVPGRMERVVVNGAEADALPTVLVDYAHTPDGLENALSASRPFTGGRLVCVFGCGGDRDRGKRPQMAVIAARLADRVVVTSDNPRTEDPDQILADVVAGIPSGTDLSVERDRATAIAEAIAGASAADLVLIAGKGHEDYQILGTEKVH

SEQ ID NO: 194589 - protein, 329 aa, Unknown
  Bacterial polypetide isolated from the Sargasso Sea
WFNVDGGEYCIEAIENGAEAAIIGSAAKEKIGSIDRERIFVIEDNLDYIFGQIVAEFWNRPSRKLKLIGVTGTNGKTTITFLLEYLLKKLGKKTALFGTLLNRWPGFSEVATHTTDFADKLQKKLNAAVEAESEFAILEVSSHSIAQNRISGCEFEAAIFTNLTQDHLDYHSDMESYFQTKRKLFFPPYLKEKDGICVLNHDDHWISKLSSDLEKRSLLVSTKITESEFENDDFFFVTDKKFTENGSTCIFHTPEEKIKLFVPLVGEFNLMNAIQAITILYKLNFSLKDLSKLIKSFPGAPGRMEKIEIDNDDLFRFTPTVIVDLCHTP

SEQ ID NO: 194590 - protein, 277 aa, Unknown
  Bacterial polypetide isolated from the Sargasso Sea
KELFILKKLGVTNVIMEASSHGLAQGRMNGIDFKIGIFTNFSQDHLDYHKNMKNYFSSKMILFSKLLKKKKIIITDKEIKEFHKLKKIAKRKKLILKTINEKNFIDLKKFSLIGKFQSKNLSMASVAAKISGLSIKRINSVLSDIKSVNGRLELTRILPNKAKIFIDYAHTPHALETALQSLKDHFKNNISLVFGCGGERDKKKRKIMAKVASKFCKKIYVTDDNPRNESPKKIRKMIIRELKRGTYKEIGNRSNAIKLAIYNSDPFEIILVAGKGQ

SEQ ID NO: 194591 - protein, 250 aa, Unknown
  Bacterial polypetide isolated from the Sargasso Sea
LEIKYKNKLYKLRINLYGSIQIKNLLMSILASKVCGLKIENIFKKIDKIKSVNGRLQHIRTLSNKSKIFIDYAHTPDALENAILSLREHFQKKITIIFGCGGERDQGKRRLMGMVAKKYCEKIYVTDDNPRNESAKKIRKDIMSVLKNCNAKEIPSRKKSIFFALKNSDPYEVILIAGKGHESFQDFGKRKIFLSDHKIIKDFKDSKLNIIKNLNEMKYNASILRKIKEIKNSYLFSGVSINSKKIKKNN

SEQ ID NO: 194592 - protein, 264 aa, Unknown
  Bacterial polypetide isolated from the Sargasso Sea
GFIGTLGFKKNKFLKRRNLTTLDPVNLNKDLRSLKKSGINNVIIEASSHGLKQKRLDFLNIKVGIFTNLSIDHLDYHKNIVDYLNSKLLLFSNLLKKNGTVITDTDIKQYKAITKIQKKKKFKILTIGSQSNIFEIIKHEFYKNFQVLELKYKNKTYKLKINLFGSIQIKNLLMAIIASKVCGLKIEKIFNKIEKIKSIEGRLELIKTLPNQSKVFLDYAHTPDALENAILSLKQHFKNNITVVFGCGGERDKSKRKLMGKVQK

SEQ ID NO: 194593 - protein, 272 aa, Unknown
  Bacterial polypetide isolated from the Sargasso Sea
AGIEAINIGTTGVEGSWSTPLNYTTPDPVKLHQVLHKAASEGITHVAMEASSHGLDQRRLDGVEIKATAFTNFSRDHLDYHDSIEDYFNAKKGLFDRLCPKEKVGVFNIDNKEIKDLADWYSLNNHVLTVGHDKIADLVILQQKFHPKSQDIRFSFRDKIYQKSINLIGAFQAENLLMAAILLIASGQKKSVIFENLENIKPVRGRMELVATKKNGATVYVDYAHTPDAIAVALKSLRPHILGKLFVIIGAGGERDQGKRPLMGAAAEQNSD

SEQ ID NO: 194594 - protein, 277 aa, Unknown
  Bacterial polypetide isolated from the Sargasso Sea
IHSSTKKIELQNTTLDPLQLGRYLMKLKEKKVDNVILEASSHGLKQSRLDGLKFNTGIFTNLSHDHLDYHKSYKDYLNSKLYLFKKLLKKNSSIISDLDIPEYKKIKAIAKKKQFRLNTISNQNGDLSIISHRYLGQKQLVKINYKKKLYDFKLNLIGKIQLKNILMSMIAASMNNINFKRIVNVIEKIKPVSGRLEKIGSIKNNSSVILDYAHTPDALRICLQNIKDQFKNRKISLVFGCGGERDKSKRPTMGKIANKYCDKIYLTDDNPRNENPK

SEQ ID NO: 194595 - protein, 292 aa, Unknown
  Bacterial polypetide isolated from the Sargasso Sea
FIAYKGSFDNGLNYLGEAIEKGAVAIVIDDNEEFDIESFSSKIFKVTELRKSAGHIISRFYGHPSRNINIVGVTGTNGKTTVSYILGFANHKLKKNSAFIGTLGLGLFGQIEASKTTTPDPVTIHSSLSTWENEVDSVAMEVSSHALDQGRVEGVEFDTAVFTNLSRDHLDYHKTTENYIKAKFSLFEKAGLKNAVINISDSYGAQLIEKIPEDVNVFAYSCKKSNLKFYKREDISFTYCEKVEIESFKSKLIKINSPWGNANVRVNLLGDFNLENILAAFTVLCISGQPVD

SEQ ID NO: 194596 - protein, 292 aa, Unknown
  Bacterial polypetide isolated from the Sargasso Sea
LAQICKINKVPTKLTGTLGYFIDLKKYKETTLTTPANLDLYQFANSNKKNKFCFISEASSHGLRQGRLNDLNIDIAAITNLSHDHLDYHKSFRSYANSKKLLFTKILNSKGVAIINSRLKNYKHLEKKIKERNIKIITYGKKDVYFFKNNFLNLYIFGKKYKLIKFELINNIQKENLECAIACALAMKISIKNIINCLNKLKSPPGRFEIIHFTKKNSKIIIDYAHTPDALENILKTFSYDKFKPSLVFGCGGNRDKEKRRKMAIVAKKFANKVYITDDNPRYENPKNIRFS

SEQ ID NO: 194597 - protein, 256 aa, Unknown
  Bacterial polypetide isolated from the Sargasso Sea
LDLSNTTIDPIKLAKILSKLKTQKIDHVIMEASSHGLKQNRLDGLKFNSGIFTNLSQDHLDYHKNLKNYLNAKLYLFENLISKRGNVITDQFIPEFKNIKKIAINKKLKLHKLNDLELLSHNFKGEGQFLRVKLNGSIRDLNLNLIGKIQLKNVLMAIISAKYSGIGLDKILNTIPKLKPVEGRFEKVGKIKNQSKVILDYAHTPDALKTCILNLREQFPNKTITVLFGCGGNRDQNKRSKMGKVACDFADNIILT

SEQ ID NO: 194598 - protein, 243 aa, Unknown
  Bacterial polypetide isolated from the Sargasso Sea
CLKQKRLDNLNIKVGIFTNLSHDHLDYHRNIKSYLDSKMYLFKNLLNKKSKIITDESNKEFKILKNISNKRKIKKLTIGVNSGDIKILQNKYKENKQIVKILVNSKIFTIEIPLIGYFQTKNLLMAILAATNCGLNYKKIFKQLKKIKPVPGRLECVAKLKNNSDIIVDFSHTPDALKQSLIALKKQFKKEIIIVFGCGGERDIKKRPIMGKIAKKYCRKIFITDDNPRHESPKKIRNQIIRS

SEQ ID NO: 194599 - protein, 254 aa, Unknown
  Bacterial polypetide isolated from the Sargasso Sea
MIAQWCQLLGETSAVMGTVGNGLLDNVIPTENTTGSAVDVQHVLAGLVEQGATVAAMEVSSHGLVQHRVAALKFAASVFTNLSRDHLDYHGDMEHYEAAKWLLYSTHHCGQAIVNADDEVGRRWLGRLPDAVAVSMDDHINPNCHGRWLKAVAVDYHDSGATIRFASTWGEGEIESRLMGAFNVSNLLLALATLLALDYPLNELLKTASRLQPVCGRMEVFSAPGKPTVVVDYAHTPDALEKALQAARLHCSGK

SEQ ID NO: 194600 - protein, 302 aa, Unknown
  Bacterial polypetide isolated from the Sargasso Sea
LDPITIHKNLSSIKRKKITNTILEASSHGLKQHRLDGLEFDTAIFTNLSRDHLDYHKTYKDYLNSKLILFNKLIKKGGMVIYDNNTCHSKIIKKICKNKNLKSLTIGKKNSNLIIKKHEYFGSLQMVEFEFNKKKYSFNTNLIGKIQVKNILFSVLAASRSKIKFNQIIESIKDIKPVEGRLEIIGKIRNNSKVILDYAHTPDALKYTLESIKEQFGHSAISIVFGCGGDRDRDKRSIMGKIANQYCNKIFLTDDNPRYENPKKIRNQIKKKINRSKLVEIASRKKAIRIAIENLNSGDILL

SEQ ID NO: 194601 - protein, 285 aa, Unknown
  Bacterial polypetide isolated from the Sargasso Sea
VASIGTLGIFTNNSNRTSNNTTLDPITLHKALGDQKKKGIENVILEASSHGLKQHRLDGVKFDLGIFTNFSRDHLDYHKSFKEYFNSKMLLFKNLMKKKSKVIFDNDIKESKKIKKIASKNNSELITIGKKKSNLIVISHNYFGNYQYITFKFNNKIYTIKTFLIGKIQIKNILMAILAANSLKVPMNKIIKSISTIKPAYGRLQEIGKIKNNSRVILDYAHTPDALLNCILSVREQFKLSKISIVFGCGGERDKPKRKIMGNIANKYCDNIYLTDDNPRKEDPK

SEQ ID NO: 194602 - protein, 255 aa, Unknown
  Bacterial polypetide isolated from the Sargasso Sea
FYGLKFDACVLTNISQDHLDYHKTMSHYIMSKLKLFSDYVKKDSKIIVNSETKYIGRIKSYLKKESNISPIYFQKNKFKIVKIKKNKYNSTIVDVKFGKELKKFKFANFPLFQIHNFLLATLTLYSMGHNLTEIQKLSLKCPSVPGRMEFVGNTRNSASVYIDFAHTPDALQNALIEGGNLCKSELHVVFGCGGNRDYSKRPIMGKIASKYADNVVITDDNPRFENAKKIRKEIIDDCKNFLEISDRRKAIKHTI

SEQ ID NO: 194603 - protein, 262 aa, Unknown
  Bacterial polypetide isolated from the Sargasso Sea
VSWPDLKSAVLNLDDEFSLSLINDIRKEVEVFTYSVSNKSASVYSKGLTFSKSGYSAFINTPFGCKKLSGELLGRFNFSNILAVIATLISLMSREDSGHIDLAKIFDSISSLSSADGRMEIVNGSNEVTTIVDYAHTPDSLRNALETLKCHFKGEIWCVFGCGGNRDEGKRPIMGEIAESFADHIVITDDNPRNEPGDRIVSQILSGIQKHQNVSIIRNRAKAISHAITNASPADLIFIAGKGHETYQEISGRRVIFSDKAH

SEQ ID NO: 194604 - protein, 268 aa, Unknown
  Bacterial polypetide isolated from the Sargasso Sea
KAGVFTNLSHDHLDYHKNMKSYFNSKMYLFNKLLNKNSIIITDEDIKEFKNIKKISKNKKIKRTTIGTKTGNIRILSNKYKQHNQLVKIDIDSEIFNLNIPLIGYFQLKNLFMAVLAASVCGLNKKKILKQIHKIKPVPGRLECVVNLKNNSSIILDFAHTPEALEQSLIALKKQFNKEIIIVFGCGGERDKKKRFFMGKIASQHCRKIFVTDDNPRNEDPKKIRNSIIKGCKQIAISIGNRKKAIQTAIEALNSNEILLVAGKGHEN

SEQ ID NO: 194605 - protein, 300 aa, Unknown
  Bacterial polypetide isolated from the Sargasso Sea
MHHFTHLVKHHGGQRICIEASSHGLDQNRLSGFKVDTAVFTNLTQDHLDYHETLEAYAKAKRKLLKQESLRCVVLNADDNESQQWAAELPEHLSVCLCSIKASDKASLFAEFSSHPHHYKYCIAKTLRFTPNGCAFEIESSWGEASISLPLIGMFNIANLLSALTALLMQGLNFEQLVSAIAHLRGIPGRMEVFESRKHANIIVDYAHTPDALQQALMAARQHALGNLTVIFGCGGDRDNSKREQMGRIAEKWADEIVLTQDNSRSESPENIVADIMQGMQGKSNLKIELDRKTAIREAF

SEQ ID NO: 194606 - protein, 248 aa, Unknown
  Bacterial polypetide isolated from the Sargasso Sea
AELASHPIKSFSTQGETSADFYCTDVHYHDAGVNAVLHYPSLNGQGSLSASLESPLLGAFNLSNVVAAIAALYLQGMSMTAMLAVMPNVLPVAGRMERFSAANKATLVVDYAHTPDAIEQALKALRVHCKGTLWCVFGCGGDRDKGKRPLMAQAAEKYADKVMITSDNARSEDPQTIINDILQGINQPNNVLTHVDRIEAITRVVALAQADDIVLLAGKGHETYQEVAGQRIDYDERALALALSKDAL

SEQ ID NO: 194607 - protein, 280 aa, Unknown
  Bacterial polypetide isolated from the Sargasso Sea
IINLLIAITAASKYIPISKILKSIHKIKEVNGRMENIGKLYNNSKVILDYAHTPDALKICLESLKNHYKSSSISIVFGCGGERDRPKRKMMGKIASNFCERIYLTDDNPRNENPAKIRNDVKKKINKSKLFEIPSRRQAINDAISKLNSGDILVVAGKGHENYQEYDKKLFFSDRKCILKSIRIKNKALSRDWKINAINDCLGSSKIRKSLKINNISINSKDVKKGDLFIGLKGKKRNGNLFADDAIKNGALLSIIEKNYSKKFIKKKIEVNNTFKFFVK

SEQ ID NO: 194608 - protein, 262 aa, Unknown
  Bacterial polypetide isolated from the Sargasso Sea
YAIYDNDLKISFNLNKITRLNKIKKLTLGNTKSSFSIIDHQFLKDEQKITFKFDKKKYSFSTTLIGKVQIKNLLMAIMAAMKSKISLEKIIKIIPKIKSVNGRLEKLGNLNNYGIVILDYAHTPDALKTCIKNVKEQFKLRKINLVFGCGGERDKPKRKIMGNIADKYCDKIYLTDDNPRTEDPIKIRRDIKSNISKSKVLEIPSRERAIKSAIMDIRSNEVVIIAGKGHEVYQEYVSKKFFSDKKCIEKFIRIKNKSLNRN

SEQ ID NO: 194609 - protein, 251 aa, Unknown
  Bacterial polypetide isolated from the Sargasso Sea
MIGKIQLKNLLMSMIAANISNIEFRKVVNVVKKIKPVAGRFEKIGKIKNNSIVILDYAHTPDALKICLQNIKDQFQNRKISLVFGCGGERDKKKRPMMGKIANNYCDKIYLTDDNPRNENPEKIRANIKRKIKRLKLFEISNREIAIKRSIENLSTGEILVVAGKGHEKVQDYGKYKNFFSDKYCILKYIKIKNKQLNKDLKFNIINDIRKNKKISFKGKIRNASINSKEIKKNDIFFAIKGKNKDGNKFI

SEQ ID NO: 194610 - protein, 296 aa, Unknown
  Bacterial polypetide isolated from the Sargasso Sea
KISLKKELKLFTLKNKYLQIVSHNYINEAQILKIKHENLIHEIRVNLIGKIQLKNILMAVIAASKSNLDLKKIFSVIPRLSPVEGRLEKIGKIKNKSLVFLDYAHTPDALQTCILNIREQFPDKHISVLFGCGGDRDKGKRSKMGKIAYKYSDKIYLTDDNPRHERPKKIRDEIKRGLKKSQIIEISNRKEAIVKAINDLNTGDILIVAGKGHEKIQQIGNRKVFLSDRQIILNSIKKKNFKLSKNLKLNILNERFDRNVLSSKSVINKATIHSKNVKKNDIFFAIKGKKNDGNKF

SEQ ID NO: 194611 - protein, 299 aa, Unknown
  Bacterial polypetide isolated from the Sargasso Sea
KQKRVFGKDFKGIVFTNLTHDHIDYHKTFKDYRDTKKEVFDTLNKNSFALINIDDKNGKFMTQNSSARVYSYSIKSKSNFSCRIVEQQLNGMLLNIENSEIWTKLIGEFNAYNVLAIYSVGKIYELDSLNLLTNISQLNSVQGRLQSFLSNSNVTVIIDYAHTPDAIENVLSTINKIKKSNQNLITVIGCGGDRDRAKRSIIGKICSDLSYKVIFTSDNPRSENPESIINDIVSGVSNYNNNKILVEVERSKAIEEARKNSGEGDIVLIAGKGHEDYQILKNKVIKFDDFKMAKKIFNK

SEQ ID NO: 194612 - protein, 211 aa, Unknown
  Bacterial polypetide isolated from the Sargasso Sea
RYIPQAIAQGVAAIIAEAKDEAADGEIREMHGVPVIYLSQLNERLSALAGRFYHQPSGQMRLIGVTGTNGKTTTTQLLAQWANLLGETSAVMGTVGNGLLDKVIPTENTTGSAVDVQHVLSGLAGQGATFAAMEVSSHGLVQHRVAALQFAASVFTNLSRDHLDYHGDMEHYEAAKWLLYSTHHCGQAIVNADDEVGRRWLAKLPDAVAVS

SEQ ID NO: 194613 - protein, 228 aa, Unknown
  Bacterial polypetide isolated from the Sargasso Sea
MRNLAEIVHNIVPLGQHVPNTHIHGLAMNSNEVNQGDIFIAIPGTRLDGHNFIEQAIEKGASAIISNGKDLGELPIPQIKVANPRRAASIVASEFYGHPTKHLKVIGVTGTNGKTTTASILKSILDNAGYKVAQIGTLGLIADDFEHIKTLTTPDPITLQKLFSKLKEANYSHIVMEVSSHALDQFRVADVDFNIAVFTNLSPEHLDYHATIESYFQSKLKIIYNADH

SEQ ID NO: 194614 - protein, 210 aa, Unknown
  Bacterial polypetide isolated from the Sargasso Sea
MDIDYSKIVNHTSDVVEGSILCINHDDNNKLNDYISSSLNKNPKFVITSNKCDIQDEKVLRFEDYENIFNHILEGISPNYKSLNYFGITGTNGKTTTAFYLNQLIGSDNLFIGTIDEKQKYSFTNEKILTTPKLFNVVKLISLQKENISSVSLEVSSHALDQSRLGELKFLVSGFTNLSQDHLDYHGSLENYLDSKAKLFQKGVSEKFVY

SEQ ID NO: 194615 - protein, 293 aa, Unknown
  Bacterial polypetide isolated from the Sargasso Sea
FAAKINNKFPKNLIAVTGTNGKSSIANFYYQILQLNKKKVASIGTLGISGISYKKNIFNTTYDPIQLNNIFRILKKKKINNVILEASSHGLKQCRLDGLKFNLGIFTNLSRDHLDYHKTFKDYFNSKLILFKRLMKKKSRIIFDEDLKISKKIKKISKIKNFKTLSLGSNNADFKIIEHKYINLNQEIKFSYKNKIYNFTTKLIGKVQTKNLIMSILAASKSNINFNNILKSVKKIKPVPGRLEKINNLNNNSVVILDYAHTPDALKVCLTNLKDQFSLKKINLVFGCGGERD

SEQ ID NO: 194616 - protein, 187 aa, Unknown
  Bacterial polypetide isolated from the Sargasso Sea
VSNLLLALATLLALGYPLADLLKTATQLQPVCGRMEVFSAPGKTTVVVDYAHTPDALEKALQAARLHCTGKLWCVFGCGGDRDKGKRPLMGAIAEQFADVVVVTDDNPRTEEPRAIINDILAGMLDAGQAKVMEGRAEAVTNAIMQAKENDVVLVAGKGHEDYQIVGSQRLDYSDRVTAARLLGVIA

SEQ ID NO: 194617 - protein, 261 aa, Unknown
  Bacterial polypetide isolated from the Sargasso Sea
LDQGRLSGISIDYAVLTSFSQDHLDYHKSLEKYGNAKKILFKELQPKHSFIQIDSEFGQNLYEELVESKVEVFSVSLEKESDFSASFNKIDDSLGVSLKSPYGETEFNLRTVSRYIASNVICSIAALSVEGIKLDKLAECASEISFPAGRLESIRVGKDICYIDYAHTPEALKHALQEIREFYEVEIWCVFGCGGDRDKGKRPIMGKIAEDYSDHIIITDDNPRNEASKKIMDEILEGTTKSENIKTIADRREAIKFTLEE

SEQ ID NO: 194618 - protein, 305 aa, Unknown
  Bacterial polypetide isolated from the Sargasso Sea
MEERYCIEAIENGAEAAIIGSAAKEKIGSTDRERILVIEDNLDYIFGQIVAEFWNRPSRKLKLIGVTGTNGKTTITFLLEYLLKKLGKKTALFGTLLNRWPGFSEVASHTTDFADKLQKKLNAAVEVESEFAILEVSSHSIAQNRISGCEFEAAIFTNLTQDHLDYHSDMESYFQTKRKLFFPPYLKEKDGICVLNHDDYWISKLSFDLEKRSSLVSTKITESEVENDDFFFVTDKKFTESGSTCIFHTPREKIQLFVPLVGEFNLMNAIQAITILYKLNFSLKDLSKLIQSFPGCSWENGENKN

SEQ ID NO: 194619 - protein, 301 aa, Unknown
  Bacterial polypetide isolated from the Sargasso Sea
TIENKINNKTYSSELTTPDSIQLNNYLSKMVDKKCEYCFMEASSHAIDQLRIYGIRIKVGIFTNISHDHLDYHLNFKNYIDSKKKLFDLLDKKSIALVNNDDKRSNYILQNCFAKKYYYGIKKDSEFSGKIINNSIDGLKFRINNQDIFLKLKGKFNAYNILCVYAGSIILGIKKSNLLEHISELESPKGRFQFIKNSKGPSILIDYAHTPDALENVLKTIKEFKVKGKIISLFGAGGNRDKKKRFFMGEIASKYSDQIILTSDNPRNEDPLDIINDIKLGIKNSKKIVINVDRKSAIKSA

SEQ ID NO: 194620 - protein, 312 aa, Unknown
  Bacterial polypetide isolated from the Sargasso Sea
MGLHQFRLDSVKFTGAIFTNLSHDHLDYHKNIENYFLCKKRLFTEILQNNSAIAINIDDDFGKRLFNEIKNNRHLIITFGQSSDADIKINSINQNNQNIDLVLEYKNQIFKSTIGMIGKFQTYNVVAAASICVALGIDANLIFKSLSYLKPARGRMEVISVRYNNSMIIIDYAHTPEALSYVLNSIREIAKGKIITLFGCGGDRDKKKRKSMGELAKEFSDLVIVTDDNPRSESPSSIRKDILEGCPNAEEISDRNKAINYAISRLQKSDFLLIAGKGHETSQTIGMETLPFDDYTVAKETIKNIGKIRENC

SEQ ID NO: 194621 - protein, 222 aa, Unknown
  Bacterial polypetide isolated from the Sargasso Sea
AVPVSLAVPALDQLAGEIASGWYGDPSDSLLTVGVTGTNGKTSCTQWIATALTALHQPCAVIGTLGSGMPGQLVPTGFTTPDAPQLQRSLAQLRDAGAKAVAMEVSSHALHQGRVNGTAFDIAVFTNLTQDHLDYHGTFDAYEAAKAKLFAWRGLRAAVVNRDDAAGQRLLEKLAGRVRTIAYGIGDAPAPDADRELVALDVRATTTGTAFRLRSSWGRRGR

SEQ ID NO: 194622 - protein, 266 aa, Unknown
  Bacterial polypetide isolated from the Sargasso Sea
AVLAAYLSGIKIDTILRNISKVKPVNGRLEQIGKLKNKSRVILDYAHTPDALKTVISNIKEDYPLSKISLVFGCGGDRDKSKRPLMGDIANKYCDKIYLTDDNPRFENPKLIRDQIKRKIKKKKYIEISSRSDAISKAVSELNSGDILIVAGKGHENYQEYKKKLFFSDKLEIIKAIKKKNNLLSNSLKTNILTESFNNKILNKRTLINSVSLNSKDVKKNSVFFGVKGQKFDGNKFGIEAIKNNAILAITNKKSKNSRNIFSKNP

SEQ ID NO: 194623 - protein, 300 aa, Unknown
  Bacterial polypetide isolated from the Sargasso Sea
IEDLNSSYLKWIDEYFQIDHSYFNNLFITGTNGKTTTLSFLSEILENNGINHASSGTLGTFINNQKIFNNELTTEEPVFIRNLMSKCFRSNIKNIIFEASSIGVDKNRLQGLKVNHAIFTNISRDHLDYHGSLQNYINAKFKLVSNAKVETAAVNFDDEIISSQLKKIRSSKTFKISSRNNKSDIFFKALKYFEDGNIEFLVETPWGKFQAASKIESEFNLYNLFLTLPYYQFINDNCEDFFARVENLSLPLGRLNKIEKENVYIDYAHTPKALESVCKCLFKKKKNKLIIVFGAGGERD

SEQ ID NO: 194624 - protein, 252 aa, Unknown
  Bacterial polypetide isolated from the Sargasso Sea
GIKTNNNNKLTDNTTLDSINIHKTLSQLKKKKIRNAILEASSHGLKQYRLNGLRFDTTIFTNLSRDHLDYHKTYKDYLNSKLILFNKLTKKGGNVIYDNDISQAKILKKICIKRNLKPLTIGKKNSNLLIKKHEYLGNFQKIEIEFNNQKYSFTTNLIGKIQVKNLLFAALAASKSKIKFSKIIESISEVKAVEGRLENVGNIKNNSKVILDYAHTPDALKHTLESIKEQFSHSSIKIVFGCGGDRDKDKRS

SEQ ID NO: 194625 - protein, 344 aa, Unknown
  Bacterial polypetide isolated from the Sargasso Sea
CYKGNNFDGNKFISTAIKKGSKIIISEKKIVNFQKDVLFIHTKNIRKLLAGIAFKIYKNKPNNLIAVTGTNGKSSVSDFYFQLLKLNKIKVASIGTLGVKSKNIRLNLPNTTIDPIRIGQILSKLKSQKINNVIMEASSHGLSQHRLDGLKFSSGIFTNLSQDHLDYHKNFKEYFKAKQYLFENLIKKRGNVIADETIPEFKTIKKIAISRKLKIQPLNNSKNQLQILSHCFRGEKQILKIKYNNLTREVNLNLIGKIQLKNILMAILAAKNSNLSLIKIINVLSKLKPIDGRFEKIGKIKNKSRVILDYAHTPDALRICLSNLKEQFPNKKIILLFGCGGNRD

SEQ ID NO: 194626 - protein, 301 aa, Unknown
  Bacterial polypetide isolated from the Sargasso Sea
YIHTNNIRKLLAETAFKIYNKKPKNLIAVTGTNGKSSVVDFYYQILKLNNKKVASIGTLGVKSKRINLNLSNTTIDPIKLAKILSNLKTQKIENVIMEASSHGLKQNRLDGLKFNSGIFTNLSQDHLDYHKNLKNYLKAKLYLFENLIQKRGNVITDQSIPEFKNIKKITIHKKLKLHTLNDKKNNLELLSHNFKGEGQFLKIKLNSSIKDLNLNLIGKVQLKNLLMAIIAAKYSGVSLNKILNTISKLKPVEGRFEKIGKIKNQSKVILDYAHTPDALKTCLLNLREQFPNKIITVLFGC

SEQ ID NO: 194627 - protein, 299 aa, Unknown
  Bacterial polypetide isolated from the Sargasso Sea
NGKSSIADFYFQLLKIHKKKVASIGTLGIKTNTTFKSLPNTTIDPIKLSKIFKYLKKQKIESVILEASSHGLKQNRLDGLKFDIGIFTNLSHDHLDYHKTFKDYLNSKLYLFKNLLKKKANLITDENIEQFKRIKNIANKRGLKLNFISSGNVNSGLRIIDHEFRDEKQIVKLCYGKNEFNFEINLIGKIQLKNVLMALIAAEKSGIKFTKLIKNLNKLRSINGRLEKIGNIKNKSKVILDYAHTPDALKTVLENLKDQFPNKKISLVFGCGGDRDKTKRFLMGKIADRFCNNIYITDD

SEQ ID NO: 194628 - protein, 252 aa, Unknown
  Bacterial polypetide isolated from the Sargasso Sea
NLIEKIPYNLEGLNIKGLASNSKDVKKGYIFFAIKGNNLNGENFINEAIKNGASVIISSKDYKKNEKKAIHIKVGNVRKSLSLICSKFFNSKPRNIIAVTGTNGKTSVADFFYQILKLNNIHVASIGTLGIKLDKKTLNTKLTSPDVITLHKNLEILKKNKIENVIIEASSHGLDQNRLNNLNFKAGIFTNLSQDHLDYHKTMRAYLESKMVLFKALLPKKSFVITDGKLKEFSILKKISKKKKLRLIDINK

SEQ ID NO: 194629 - protein, 300 aa, Unknown
  Bacterial polypetide isolated from the Sargasso Sea
NYKNYFNSKLTLFNKLTKENGNLIFDNDFKNLRVFNKIAKRKKLNLFSIGSKKCNLRIISINILNNFQHVKFSYKNKIYNFKTKLVGKIQIKNLMMAVVAALNSNVKMEDIVKSLNHMKPVNGRLEIIAKTYNNSIIILDYAHTPEALKTCIKNVREQFNLRKIKVVFGCGGERDKEKRPIMGKIANKLCDFIYLTDDNPRSENPDEIRRNIKKSISKSKLNEIPSRKLAIRKAVLNTKSDEVLIVAGRGHERIQEYHDKRIFSDRDNIIKSVLLKNKSLSKNWKLNIFKEFIKDKKLNK

SEQ ID NO: 194630 - protein, 286 aa, Unknown
  Bacterial polypetide isolated from the Sargasso Sea
MHGVPVIYLSQLNERLSALAGRFYHQPSEQLRLVGVTGTNGKTTTTQLLAQWAQLLGETSAVMGTVGNGLLEKVIPTENTTGSAVDVQHVLSGLAGQGATFAAMEVSSHGLVQHRVAALQFAASVFTNLSRDHLDYHGDMEHYEAAKWLLYSTHHCGQAIVNADDEVGRRWLAKLPDAVAVSMEDHINPNCRGRWLKATAVSYHDSGATIQFASSWGNGEIESRLMGAFNVSNLLLALATLLALGYPLADLLKTAARLQPVCGRMEVFSAPGKPTVVVDYAHTPDA

SEQ ID NO: 194631 - protein, 256 aa, Unknown
  Bacterial polypetide isolated from the Sargasso Sea
LHVDGPSAVVNGDDPWGSRLAEQLRGRCWRSSMGDPQAELQMVDLEMTGQGVRGRLLSPAGSGAFCFPLLGRFNLMNLLQAVGVLLQRGLPLAPLLEAVGSFRGVPGRMERVVVNGAEAAALPTVLVDYAHTPDGLENALAASRPFTDGRLVCVFGCGGDRDRGKRPQMAAIAARLADRVVVTSDNPRTEDPDQILADVVAGIPSGTDLSVERDRATAIAEAIAGASAADLVLIAGKGHEDYQILGTEKVHFDDRE

SEQ ID NO: 194632 - protein, 279 aa, Unknown
  Bacterial polypetide isolated from the Sargasso Sea
KEKKIENVILEASSHGLNQNRLDGLKFNIGIFTNLSRDHLDYHKSYKNYLNSKLILFKKLLKKKSYAIFDDGLKISPKLSRITKLNKIEKFTIGNTKSSFEILDHQFLKNEQKILLRFNKKKYSFSTKLIGRVQTKNLLMAIMAAIKSKISLEKILKITQKIKPVNGRLEKIGKLHNNGIVILDYAHTPDALKTCIKNVKEQFKLRKINLVFGCGGERDRPKRKIMGIIANRYCDKIYLTDDNPRSEDPNKIRRDIKSNILKNKIIEIPSRESAIKSAI

SEQ ID NO: 194633 - protein, 324 aa, Unknown
  Bacterial polypetide isolated from the Sargasso Sea
LGIFTNLSQDHLDYHKNLNDYLNAKLYLFKNLIKKKGNIITDDTIPEFRAINKIAKKKRFKIITLNDKKNHFKVLSHTFKGEIQLLKIIHNNSIREINLNLIGKIQLKNILMAIIAAKKNINLKKIFDIIEKIKPVEGRFEKIGKIKNKSKIILDYAHTPEALKTCLLNLREQFPDQKLCLLFGCGGNRDQNKRSKMGKIASNFSDKIYLTDDNPRFENPDKIRRDIKKGIKRKKIIEISDRKKAIFEATKNLNTGEILLVAGKGHEKTQDIGKQKIYFSDKKIILKAIKTKNLNLSDNLKLNIIKEVSGNKSVSSSLPIKLAK

SEQ ID NO: 194634 - protein, 287 aa, Unknown
  Bacterial polypetide isolated from the Sargasso Sea
FQTKRKLFFPPFLKEKDGICVLNHDDHWISKLSSDIEKRSLLVSTRITESEFENDDFFFVTDKKFTESGSTCIFHTPREKIQLFVPLVGEFNLMNAIQAITILYKLNFSLKDLSKLIQSFPGAPGRMEKIQIDNNDFSRSLPTVIVDYAHTPDGLKKVLQSIKKLCEGKLITVFGCGGDRDRSKRPLMGSIAEELSDQLFITSDNPRSEEPQKIVNDILMGIKNREKITIEIDRFKAINESIKFAKKKDIVLIAGKGHEDYQILNDKVIHFDDRKIAYKLLKEKNKS

SEQ ID NO: 194635 - protein, 280 aa, Unknown
  Bacterial polypetide isolated from the Sargasso Sea
MRSIKLFKLLDLVGIIPTSNLIDQEINNISFNSKEVQKGTLFLGMPGLNFDGGKFCIEAIENGAEAAIIGSAAKEKIGSIDRERILVIEDNLDYIFGQIVAEFWNRPSRKLKLIGVTGTNGKTTITFLLEYLLKKLGKKTALFGTLFNRWPGFSEVASHTTDFADKLQKKLNAAVEAESEFAILEVSSHSIAQKRISGCEFEAAIFTNLTQDHLDYHSDMESYFQTKRKLFFPPYLIEKDGISVLNHDDPWISKLSSDLEKRSSLVSTKITESEFKNHDF

SEQ ID NO: 194636 - protein, 325 aa, Unknown
  Bacterial polypetide isolated from the Sargasso Sea
KIRQPALPKVSVAITETNGKTSVSWYLAQICKFNRIPSKLTGTLGYFVDLKKYKDSVLTTPSNLDLYQFSNEIKKNKFCFITEASSHGLHQGRFKNLKIDIAAITNLSHDHLDYHKNFRSYVQSKLLLFTKILNNKGVAVINARLKNYKTLEKKIKQRKIKMITFGAKDVYFYENNYLYLYIFGKKYKLEKFKLINNIQKENLECAIACALAINVSVNKIINCLHKLKSAPGRFEVINFRKKNSKIIIDYAHTPDALENILKTFSYDNFKPSLVFGCGGNRDKEKRTKMAIIAKKYSNRVYITDDNPRYENAKTIRESIKKFVPK

SEQ ID NO: 194637 - protein, 318 aa, Unknown
  Bacterial polypetide isolated from the Sargasso Sea
HANFKYCKIKSASICTLGVDYGKKINKLENTTVDPITLNQKLLNLKKNKIKKIILEASSHGLDQGRLDNLKFSIGIFTNLSRDHLDYHKNYKNYFNSKMILFNKLMKQKGLAVYDSDTDVSKKVIKIIKKKNLRAIGVGFKNSDLIIKNIVNLRSKQFVVFKFKNKIHYFTTRLIGRFQVKNLLMAVAAASEFIPLDKIIKNIQRICSVSGRLEEIGKINNQSKVFLDYAHTPEALKSTILNIKNHFNLENIKIVFGCGGDRDKKKRSLMGRIANRYCNKIYLTDDNPRNENPSIIRKHIKKYINKKKLSEIPSRINA

SEQ ID NO: 194638 - protein, 267 aa, Unknown
  Bacterial polypetide isolated from the Sargasso Sea
VRVAVAAFINLTRDHLDYHGDETAYLAAKSRLFAEIVVDGGVVVINADIPEADGLRSIATGRGLRVIDYGRDATDLVLVDVVADGSGQTLTVDIFGHRHDVRLLLPGAFQATNALAALGLAVATGVSEQTAVGALAELEGVRGRIELVARHPNGAAIYVDYAHTPDALKSVLETLRPHLAGELHVVFGCGGDRDPGKRVEMGRYAAAVAEHVILTDDNPRTEDPAEIRKAARVGCPDALEMGDRAEAITAGVKALKPGDILVVAGKG

SEQ ID NO: 194639 - protein, 277 aa, Unknown
  Bacterial polypetide isolated from the Sargasso Sea
LLAQISFSIFKKKPNNLIAVTGTNGKSSVSDFYYQILRLNNKKVASIGTLGVRSNNFNLNLLNTTIDPISLGKILTKLKKRKIENVIMEASSHGLHQNRLDGLMFNSAIFTNLSQDHLDYHKNFKNYLNAKLYLFQNLIKKGGFVITDDKIPEFTKIKNISLKRELKLFTFKNKYFQILSHNYKNEAQILKIKHKNLINEVRVNLVGKIQLKNILMAVIAALKSNLDLKKIFSVIPRLSPVEGRFEKVGKIKNKSLVFLDYAHTPDTLQTCILNIRE

SEQ ID NO: 194640 - protein, 295 aa, Unknown
  Bacterial polypetide isolated from the Sargasso Sea
IIEASSHGLSQKRLHHVKFKAGIFTNFSQDHLDYHKTMKSYLNAKLLLFREILDQKTSIILDRNINQYSLIKKIAKNKKLKVLDINKELNKKGDLYFKDLIDFRIKNLAMAIVASKICGLKDKYIYSAIKKLKDVNGRLELVKNFPNKIKVFIDYAHTPDALIKAIKSLKNEYGNNISLVFGCGGDRDKKKRSLMAKIANENCNKIYVTDDNPRNESPKKIRKQLLKYILNNKSFNIGNRELAIRKSIQNAEPNEIILIAGKGHEEKQIYKNKIINISDKKIVKKIKMKTRISKK

SEQ ID NO: 194641 - protein, 262 aa, Unknown
  Bacterial polypetide isolated from the Sargasso Sea
HDDHWVSKLSSDLEKRSSLVSTKITEREFENDDFFFVTDKKFTESGSTCIFHTPREKIQLFVPLVGEFNLMNAIQAITILYKLNFSLKDLSKLIQSFPGAPGRMEKIQIDDNDVSRSLPTVIVDYAHTPDGLKKVLQSIKKLCEGKLITVFGCGGDRDRSKRPLMGSIAEELSDQLFITSDNPRSEEPQKIVNDILMGIKKREKITIEIDRFKAINESIKFANKKDIVLIAGKGHEDYQILNDKVIDFDDRKIAYKLLKEKN

SEQ ID NO: 194642 - protein, 266 aa, Unknown
  Bacterial polypetide isolated from the Sargasso Sea
KTYVILDKFIKEYPVLKRISKKRQLRLLDINKQIKKIKNNSLSLIGSFQAKNLSMACLAARLCNVGNTGINNALKKIKSVNGRLDLIKIYPNNIKIFIDYAHTPDALQEVLQSIKKLNNNKISIVFGCGGERDYKKRPLMAKIAKSFCDKIYVTDDNPRKENPKKIRKEIIKHLKGSNYFDIGNRSKAIKESLINAEPNETILVAGKGHENYQDYGKRILSISDRQIIKKLKFKKNTSNQRNQNYLFNSKMMNTILKNKKFYKFDG

SEQ ID NO: 194643 - protein, 113 aa, Unknown
  Bacterial polypetide isolated from the Sargasso Sea
VAVDYAHTPDALEKALQALRPLAQQRGGQLWCVFGCGGDRDATKRPLMGAAAQHHADWVVATSDNPRSEDPAHILHQILQGTIAGETVRVEPDRAAAIALALNEADPADVVLI

SEQ ID NO: 194644 - protein, 301 aa, Unknown
  Bacterial polypetide isolated from the Sargasso Sea
RNIRKLLAKISFKIYKKIPKNIIAVTGTNGKSSIADFYYQILNLNNQKVASIGTLGVKSNNFKINLSNTTIDPIRLGKILTYLKKQNVNNIIMEASSHGLKQNRLDGLLFNTGIFTNLSQDHLDYHKNLKNYLNSKLYLFKYLIKKKGNVITDKEIPEFHKIKNITLNKNLNLHLLSDKKNKFEFLSHEFKDEVQILKIKYDNLIHKINLNLIGKIQLKNIFMAIVAAKKSNINIKKIFKVIPKIKSVEGRLEKVGKIKNKSKVILDYAHTPHALKMCLTNLKEQFPDKKISLVFGWAEIE

SEQ ID NO: 194645 - protein, 215 aa, Unknown
  Bacterial polypetide isolated from the Sargasso Sea
MKQINSDKVKYKNICSDSRIINKGDIFFAISGSNTDGLKYVNDAVAKGASAIVIPIRKKIKISSDIPIYKVKDIRKEISLAAFVVNSESIEKKIAVTGTNGKTSVTYFLNYILSNLGEKTATIGTLGNSLVKKINNENLTSPEPINLSKQLRKLSKNKIKYLIMEASSHGLHQKRFYGLKFDACILTNLSQDHLDYHKTMSHYIMSKLKLFSDYV

SEQ ID NO: 194646 - protein, 151 aa, Unknown
  Bacterial polypetide isolated from the Sargasso Sea
HGHPKGARVVVDYAHTPDALAAALGALRPEATGKLCVLFGCGGERDPGKREMMGQVACQIADHVIVTDDNPRSEDPAVIRRSILNACNSAVEIVPREKAIATALAQLGMGDVLLIAGKGHETGQLIGNETLPFDDAALASNQLRAMHEAQQ

SEQ ID NO: 194647 - protein, 259 aa, Unknown
  Bacterial polypetide isolated from the Sargasso Sea
MEVQNTTLDPLQLSKQLMRLKKKNINNLILEASSHGLKQSRLDGLKFKIGIFTNLSHDHLDYHKSYKDYLNSKLHLFKKLLNRNSNIITDLNIPEYKKIKSIALEKNLNLHTVSDKYGDLSIISHEYNGEKQLVKIKYKKKIYNFELNLIGKIQLKNVLISMIASHLSNINFENIVNFIHKLKPVYGRLEKVGSIKNNSSVILDYAHTPDALKTCLQNIKDQFKSKRISLVFGCGGDRDKFKRPSMGKIANEYCDRIYL

SEQ ID NO: 194648 - protein, 248 aa, Unknown
  Bacterial polypetide isolated from the Sargasso Sea
IRLGQILSKLKSKRINNVIMEASSHGLSQHRLDGLKFSSGIFTNLSQDHLDYHKNFKEYFRAKQYLFENLIRKKGNVIVDETIPEFKRIKKISISRKLRLQVLNNSKNHFQILSHSFRGEKQILKIKYKNLTREVNLSLIGKIQLKNIFMAIIAAKNSNVSSIKILNALSKLKPIDGRFEKIGKIKNKSKVILDYAHTPDALKICLSNLKEQFPNKKIILLFGCGGNRDQNKRFKMGKKASNYSNKIY

SEQ ID NO: 194649 - protein, 285 aa, Unknown
  Bacterial polypetide isolated from the Sargasso Sea
ILKLNKKKVASIGTLGVKSNNTNLNLSNTTIDPIKLGQILTKLKKQKIDNVIMEASSHGLKQNRLDGLLFNSGIFTNLSQDHLDYHKNLKNYLKAKLYLFESLIKKNGNVITDEKIPEFKKIKKITLKKSLNLYTLNNKKNYFDILSHTFKGESQILKIKYKKSIQEISFNLIGKIQLKNILMAIIAASQSNIEISKILKVIPKIKSVEGRFQKIGKLKNLSKVIVDYAHTPDALKTCLLNLKEQFPDKKISLLFGCGGNRDQNKRAKMGKIAENFSDKIYLTDD

SEQ ID NO: 194650 - protein, 155 aa, Unknown
  Bacterial polypetide isolated from the Sargasso Sea
AGQPLVAVDYAHTPDALDKALQALRPLAAERGGRLWCVFGCGGDRDAGKRPLMGAVAQQQADQVLVTSDNPRSEDPAAILHQILQGTIAGGTVRAEPDRAVAIAQAVAEAAPADVVLIAGKGHEDTQETAGVRVPFSDMAHAQAALQARGAHTWA

SEQ ID NO: 194651 - protein, 302 aa, Unknown
  Bacterial polypetide isolated from the Sargasso Sea
MYIHTNNIRKLLAETAFKIYNKKPKNLIAVTGTNGKSSVADFYYQILKLNNKKAASIGTLGVKSKNINLNLSNTTIDPIKLAKILSKLKSQKIENVIMEASSHGLKQNRLDGLKFNSGIFTNLSQDHLDYHKNLKNYLKAKLYLFENLIQKRGNVITDQLIPEFKNIKKITINKKLKLHTLNDKKNNLELLSHNFKGEGQFLRIKLNSSIKDINLNLIGKIQLKNVLMAIIAAKYSGISLDKILNIIPKLKPVEGRFEKIGKIKNQSKVILDYAHTPDALKTCLLNLREQFSNKTITVLFGC

SEQ ID NO: 194652 - protein, 318 aa, Unknown
  Bacterial polypetide isolated from the Sargasso Sea
MKNGAEAAIIGPAAKEKIGSIDRERILVIEDNLDYIFGQIVAEFWNRPSRKLKLIGVTGTNGKTTITFLLEYLLKKLGKKTALFGTLLNRWPGFSEVASHTTDFADKLQKKLNAAVEAESEFAILEVSSHSIAQNRISGCEFEAAIFTNLTQDHLDYHPDMESYFQTKRKLFFPPYLKEKDGICVLNHDDHWISKLSSDLKKRSLLVSTKITESEFENDNFFFVTDKKFTESGSTCIFHTPREKIQLFVPLVGEFNLMNAIQAITILYKLNFSLKDLSNFIQSFPGAPGRMEKIQIDDNDVSRSLPTVIVDYAHTPDG

SEQ ID NO: 194653 - protein, 303 aa, Unknown
  Bacterial polypetide isolated from the Sargasso Sea
CINKNLKSLTIGKKNSNLLIKKHQYLGNVQKIEIEFNKKKYSFSTNLIGKIQVKNLLFAALAASKSKIKFSKIIELIGKIKAVEGRLENIGNIKNNSKVILDYAHTPDALKHTLESIKEQFSHSSIKIVFGCGGDRDKDKRSIMGEIANKYCDKIFLTDDNPRYENPKKIRNQIKKNISISKLVEISSREKAIKVAIESLSSGDILVVAGKGHEIYQEYKGKKKFFSDKKCILNGINLKNKKLFKNWKANILHEQCNLSSLSKDMKINKASINSKNIKKNDVFFCIKGPRNDGNDYADEAIKK

SEQ ID NO: 194654 - protein, 104 aa, Unknown
  Bacterial polypetide isolated from the Sargasso Sea
RGKRPQMAAIAARLADRVVVTSDNPRTEDPDQILADVVAGIPSGTELRVERDRARAIAEGIAEASPADLVLIAGKGHEDYQILGTEKVHFDDREQAEQALRQRR

SEQ ID NO: 194655 - protein, 304 aa, Unknown
  Bacterial polypetide isolated from the Sargasso Sea
ACLAITDSDKFEFQTNVIKVEDIRAAAGIACSNFYNSPQNKLRLIGITGTNGKTSTSTILKNILDNENEKTLQVGTSGIKPSIDIYPGLTTPDIFDLYEILNHAVLEGFKNVVLEVSSHALSQRRIENIFFDITAFTNLTHDHLDYHKTMDEYFGEKLKLFNLNKENGCSVIMINDEYGKKITKLNSHAKSISLETKDADYSCTSFSINNLGITGTLLWDSKTLDFESRLIGSFNLENIVLAASIGIELNISSKSIIEGILNCTNIDGRLHFVENKKNQMIFLDYAHTPDAYLKALQALKDNFK

SEQ ID NO: 194656 - protein, 194 aa, Unknown
  Bacterial polypetide isolated from the Sargasso Sea
KSIIYSSLIGNYQINNLITAICIMIEMGYKREDIEKHSINIKPPPGRIELISSIKGADIYIDYAHTPDALKNVLLSLRPYVKNKLYLVFGCGGDRDKGKRGEMGKIAHQLADINIITDDNPRFENPKNIRKEILQCCPNAIEIGDRKKAIVKTIQKLISGDILLVAGKGHENSQEINGRHLNFDDAKIIKSMIN

SEQ ID NO: 194657 - protein, 287 aa, Unknown
  Bacterial polypetide isolated from the Sargasso Sea
TTIDPITLNKTLQEIKIKKIENVIMEASSHGLKQHRLDGLKFNIGIFTNLSRDHLDYHKSFKDYLKSKMILFNRLLKKNSKIIYDNSILESKLLKNISIKRKLNPITIGIKDSNLKIINHKFIGNKQEVKFIFKNDEYSFVTNLIGKIQIKNLIMAIVAANNCGLSMKRIIKSISRIKSVKGRFEQIGNLKNNSKVILDYAHTPDALKTCLLNLRSQFKLSKISIVFGCGGSRDKAKRPMMGKIANNLCDKIYLTDDNPRNENPKKIREEIKKKINKLKLFEISSRK

SEQ ID NO: 194658 - protein, 318 aa, Unknown
  Bacterial polypetide isolated from the Sargasso Sea
TSTVEFCRQLWVQAGWKAASMGTLGTKTETAINKSIYKNKKENLTTFEPSDLYKKLKFLVDEKISHLALEASSHGIDQRRLDGVKFSGAVFTNLSHDHLDYHKNTKNYFSTKKRLFTEILKNNSAISINIDDIYGKKLYQELKNTNHFIITFGESSEADIRIKSAIQNKQSIELILEYKNQNFQTTIGMIGKFQVYNVVASASICIALGMDSNLIFKSLGYLKPARGRMEVLSNTKNNALVIIDYAHTPSALTFALKSIEEISGRERIITLFGCGGDRDKEKRKIMGEIANKYSDLVIVTDDNPRSEVPSNIRMDILN

SEQ ID NO: 194659 - protein, 243 aa, Unknown
  Bacterial polypetide isolated from the Sargasso Sea
LHKSLDFLKNKKINNVIIEASSHGLHQQRLHHIKFKGGIFTNFSQDHLDYHKTMKSYLNAKLILFRKILSKKSTIISNGEIPTFKILNQIAKKKNFKILNVKKTFKKIQNVDLKLNEDFKIKNLAMAIEASKLCGLKEQLIFRSLKKLKDVNGRLELIRRYPNDVKVFIDYAHTPDALLEALKSLKNNYGNNISLVFGCGGERDQTKRPMMAKIANEKCKKIYITDDNPRNEKPQKIRKDLLK

SEQ ID NO: 194660 - protein, 246 aa, Unknown
  Bacterial polypetide isolated from the Sargasso Sea
HLDYHKSMKNYLNSKLILFKRLLPEKSHIISDNKNKIYPILKKIAKKRNLKLLDINKKIEIKNIKYFPLLGSFQIKNLSMAILATNLCGLSKGKILKTIKKIKSVHGRLELTRNYPNNIKVFIDYAHTPDALNEVLKSIKVKFDSEISLVFGCGGERDFKKRALMAKIAKLHCDKIYVTDDNPRRESPSKIRKEIIKNLKGSRYFNIGNRSRAIKTAITMANANGVILIAGKGHENYQDYGNKVLK

SEQ ID NO: 194661 - protein, 275 aa, Unknown
  Bacterial polypetide isolated from the Sargasso Sea
LQKVILDLKKIFSVIPRLSSVEGRFEKIGKIKNKSLVFLDYAHTPDALQTCILNIREQFPDKHISLLFGCGGDRDKGKRSKMGKIADKYADKIYLTDDNPRHEMPKKIRNEIKRGIKKSQIIEISNRKEAIVKAINNLNTGNVLIVAGKGHEKIQQIGNKKVFLSDRKIILSSIKKKNFKLSKNLKLNILNERFDQNILSSKSVINKASINSKSLKKNDIFFAIKGKKNDGNKFVEQAIQKKASITIVNKIQKKLAINKQAISINPLGLLTETAK

SEQ ID NO: 194662 - protein, 253 aa, Unknown
  Bacterial polypetide isolated from the Sargasso Sea
AFIAEAVARGAAAVLYQPEGLDAAPAVPVSLAVPALDQLAGEIASGWYGDPSDSLLTVGVTGTNGKTSCTQWIATALTALHQPCAVIGTLGSGMPGQLVPTGFTTPDAPQLQRSLAQLRDAGAKAVAMEVSSHALHQGRVNGTAFDIAVFTNLTQDHLDYHGTFDAYEAAKAKLFAWRGLRAAVVNRDDAAGQRLLEKLAGRVRTIAYGIGDAPAPDADRELVALDVRATTTGTAFRLRSSWGDADVEVGTLG

SEQ ID NO: 194663 - protein, 251 aa, Unknown
  Bacterial polypetide isolated from the Sargasso Sea
YLVEDLIDPHISYKNINISGIKTDSNEVLPGDLFVAVPGTNFDGHNFVKQAISNGASAVITSREEVNADSIPNIKVSNPRKVVSHVSSKLFHNPSEDITVIGITGTNGKTTTAYLISNALKKAGFKTAQIGTTGVIAEGFKQEKTLTTPDAINLQKLFLNFKNLGFTHVVMEVSSHALDQYRVADISFDFAVFTNLTPEHLDYHHSMEAYYQAKSRLFKMLTVDGVAIINSNDLNGKRIAKDTVAKVLFFS

SEQ ID NO: 194664 - protein, 254 aa, Unknown
  Bacterial polypetide isolated from the Sargasso Sea
HDHLDYHKSYKDYFNAKLYLFKELIAKNSNIITDFDIPEYKKIKSIAQNKKLKLQTISNKYGDLSIISHEYLGEKQLVKIKYKKKLYNFELNLIGKVQLKNVLISMIASHISNINFQNIINFAHKIKPVEGRLEKVGSIKNNSFVILDYAHTPDALRTCLQNIKDQFKNKKISIVFGCGGNRDKLKRPLMGKIANEYCDKIYLTDDNPRNEDPKKIRGSIKKKIKKSKLYDISNRGKGIHQAIQDLSTGEILVV

SEQ ID NO: 194665 - protein, 297 aa, Unknown
  Bacterial polypetide isolated from the Sargasso Sea
PINLGQILQKLKKEKVDNVIMEASSHGLKQYRLDGLNFKSGVFTNLSQDHLDYHKNLKNYLKAKLYLFENLIEKKGNIITDKNIPQYKTIKKISLKKKLKLSAINEKQNNFQLLSHRYDNENQLIKIKHKDSIKEINLNLIGKIQIKNILMAAIAAQKSNLNFDNILKVLPELKPVEGRLEKIGKIKNNSIVILDYAHTPDALKVCLLNIKEQFPDKKLNLLFGCGGNRDQNKRMKMGKIASIYADNIYLTDDNPRYENPIKIRKDIKKGINAKKITEISSRAIAISQAIKNLKSGD

SEQ ID NO: 194666 - protein, 227 aa, Unknown
  Bacterial polypetide isolated from the Sargasso Sea
AGDVFFAYAVDGADNRAFIAEAVARGAAAVLYQPEGLDAAPAVPVSLAVPALDQLAGEIASGWYGDPSDSLLTVGVTGTNGKTSCTQWIATALTALHQPCAVIGTLGSGMPGQLVPTGFTTPDAPQLQRSLAQLRDAGAKAVAMEVSSHALHQGRVNGTAFDIAVFTNLTQDHLDYHGTFDAYEAAKAKLFAWRGLRAAVVNRDDAAGQRLLEKLAGRVRTIAYGIG

SEQ ID NO: 194667 - protein, 316 aa, Unknown
  Bacterial polypetide isolated from the Sargasso Sea
LAFEINKNNIETKIAITGTNGKTSVAYFLSYLLRVSGKSVATIGTLGNSVLKRNKYNLTSPEPTDLSEQLKKIGQKKIKYLVMEASSHGLHQSRFYGMNFDVCALTNISHDHLDYHKTINNYIKSKMILFKDYIHKDSKLIINSKTKYIKKIRSILKKNESIQPLYFQANRDYKIIKILKKNDIQHVKAIVGSKRILLKFKNFPNFQIENFIFAISILNLIGFDPRKLSKSSLNCPSVLGRMEYVGRTKTGGKVYVDFAHTPDALKNSIMESKKLETSNVHVLFGCGGNRDRKKRPLMGKIASKYADKAIVTDDNP

SEQ ID NO: 194668 - protein, 306 aa, Unknown
  Bacterial polypetide isolated from the Sargasso Sea
KTATIGTLGNSQIKKLNTENLTSPEPVDLSKQLRKLSKNKIKYLIMEASSHGLHQRRFYGLKFDACVLTNISQDHLDYHKSMSHYIMSKLKLFSDYVKKDCKIIINSETKYIDRVKSYLKKESNISPIYFQKNNKFKIVKIKKNKYNSTIVDVKFGKELKKFKFAYFPLFQIHNFLLATLTLYSMGHNLTKIQKLSLKCPSVPGRMEFVGNTRKSASVYIDFAHTPDALQNALIEGGNLCKSELHVVFGCGGNRDYSKRPIMGKIASKYADKVVYTDDNPRFENAKKIRKESLMIAKTFGKSQIEE

SEQ ID NO: 194669 - protein, 277 aa, Unknown
  Bacterial polypetide isolated from the Sargasso Sea
KILFRFNKKKYSFSTKLIGRVQIKNLLMAIMAAMKSKISLEKILKITQNIEPVNGRLEKIGKLYNNGIVILDYAHTPDALKTCIKNVKEQFKLRKINLVFGCGGERDRPKRKIMGKIANKYCDKIYLTDDNPRSEDPNKIRRDIKSNISKNKILEIPSRESAIKSAILDIKSNEIVIVAGKGHEVYQEYIFRKFFSDKKCIEKFIKIKNKSLNKNWKSNIISEITKKKIEKNININEASIDSRITKKNNIFFGIKGKNFDGNKKLVMLLTMEPQFQL

SEQ ID NO: 194670 - protein, 312 aa, Unknown
  Bacterial polypetide isolated from the Sargasso Sea
EASSHGIEQNRIDALRINRAVFSNLSRDHLDYHETLDRYFKAKKRLFSEILEINGLAIVNNNCKYGRNIESFCKRKKIKVFTYGTKKADWKINKVIFCNSFTKVYISVLEKPYTFKCRFFAYYQIENLVCSMLIAYSYGIPLKKIIKWVEKIKEPPGRLEKINLKSNKSAVYIDYAHTPEALKISLTQLRENLKSRGRLKVLFGCGGDRDIGKRAQMAKHASNLADEVYITDDNPRYENPKKIRDQLSLHCKKAFVIANRKNAIKFAIKKLEKHDMLLVAGKGHEKFQEINGKKYSFDDKEVVLDAIREIEV

SEQ ID NO: 194671 - protein, 302 aa, Unknown
  Bacterial polypetide isolated from the Sargasso Sea
IKTNDVKLLLSDISSKFYNLKPKNIIAVTGTNGKTSVADLFYQILSANNIPVASIGTLGIKYKKKKLQSHLTSPDAITLHQALQHIKINKIDNVIIEASSHGLHQKRIENLNFKAGIFTNFSQDHLDYHKTMHSYLNAKLHLFKNLLNEKKVIISDKSLKEFKILKNIAQKKNLRLIDITQIKKKIKLISGIKLSKFQLNNLSMAIAAARLCNVKEKKIFYNLNKLSAVDGRLEHVKTFFYNIKIFVDFAHTPDALQNVLSALKSSYGENITLVFGCGGDRDFKKRPKMAKIANRHCKKIYV

SEQ ID NO: 194672 - protein, 247 aa, Unknown
  Bacterial polypetide isolated from the Sargasso Sea
MRAADPRQHVVITVGQDKSADFRIAHISPMDFGLEITVEHKEQAYRIPVALAGTFQAVNAVTAAVTAYASGLPIHDSLSALPYVTGAEGRMQLVTGHPGGARVVVDYAHTPDALEAALRALRPEARGRLAVLFGAGGDRDSGKRPMMGKVARDYADIAYVTDDNPRSEDAGAIRSQIIAACPNAIEIADRGTAINTALDELEKGDVLLIAGKGHEAFQLVGDETLPFSDSSVARNAIQRLTEGGEQK

SEQ ID NO: 194673 - protein, 206 aa, Unknown
  Bacterial polypetide isolated from the Sargasso Sea
MLDQSRHYTHDSRRIKPGDGYICLPKGEPYIEDALQRGAVDVVHLSREAFAEAAHDYFNYPTNRISLIGITGTNGKTSVSYFVAQLLEKMGHKVLVVGTLNSSLTTPESWDILAQIKAHADQGGTHVVLEVSSHGIDQKRVHGFEFDVKCLTNITHDHLDYHKTFENYKQTKLHFMMDYPGLAVFSEEASSIDAEDIPQLKGSFHV

SEQ ID NO: 194674 - protein, 284 aa, Unknown
  Bacterial polypetide isolated from the Sargasso Sea
MAAIKSKISLEKILKITQKIKPVNGRLEKIGKLYNNGVVILDYAHTPDALKSCIINVKEQFKLRKVNLVFGCGGERDKPKRKIMGKIANKYCDKIYLTDDNPRSEDPKKIRRDIKSNISKNKILEIPSRESAIKSAILNIKSNEVVIIAGKGHEVYQEYISRKFFSDKKFIKKFIKIKNESLNRNWKSNIISEITKKKIEKNIYINEASIDSRKTKKNNIFFGIKGKNFDGNKFVSQAFNNGASISINENKKKNKLKNDIYVKNSLKTFSETAKLVRVSSDIQQ

SEQ ID NO: 194675 - protein, 279 aa, Unknown
  Bacterial polypetide isolated from the Sargasso Sea
IPSLDLIDHEINNISFNFKEVQKGTLFLGMPGLNVDGGKFCIEAIENGAEAAIIGPAAKQKIGSIDRKRILVIEDNLDYIFGQIVAEFWNRPSRKLKLIGVTGTNGKTTITFLLEYLLKKLGKKTALFGTLFNRWPGFSEVASHTTDFADKLQNKLNAALEAESEFAILEVSSHSIAQNRISGCEFEAAIFTNLTQDHLDYHPDMESYFQTKRKLFFPPYLKEKDGICVLNHDDHWISKLSSDLKKRSLLVSTKITESEFENDDFFFVTDKKFTESGST

SEQ ID NO: 194676 - protein, 204 aa, Unknown
  Bacterial polypetide isolated from the Sargasso Sea
MSQTMLLSQLIPDVALPHDPTITGLVLDSRAVRPGNAFVAIAGFGAHGLGFVEQARAAGAGAILFDPPAPAELPAPADAIAVPGLRMRMGAMADQFHGHPSRAMTMVGVTGTNGKTSTVQLLAQAWHQLGIRSGSIGTLGVGLYGDVVPTGFTTPLVLQMHAVLAQLRDGGAQAVAMEVSSHALDQGRVDAVHYDVAVFTNLTR

SEQ ID NO: 194677 - protein, 240 aa, Unknown
  Bacterial polypetide isolated from the Sargasso Sea
YKYGNYLQNSHHIYIFEASSHALEQNRLRKYPVDIAAITNISRDHLDYHKNLSEYKKAKIKLFTKHLSNKGHAIINSRIKNILTLKRNLKNKKININYFGKNSIVFKKKQNFISFIVNKKIYKINELRLNTDIELENLECAIACCLALKINQKKIISILKKITNPPGRLQTIKYKKKKSKILIDYAHTPDALKRILKSTTLKKRKPVLLFGCGGDRDKRKRITMGKIANKYASKVYITDD

SEQ ID NO: 194678 - protein, 131 aa, Unknown
  Bacterial polypetide isolated from the Sargasso Sea
MKNLAMAIEAAKLTGLSENLIYKALKKIRDVSGRLELVRKYSNGIKVFVDYAHTPDALLKTLESLKSYYGNNVSLVFGCGGDRDKKKRALMAKIADKNCKKIYVTDDNPRNENPKKIRNELLKNIKDKKAF

SEQ ID NO: 194679 - protein, 210 aa, Unknown
  Bacterial polypetide isolated from the Sargasso Sea
SFDINRPITGVQLDSRLVRNGDLFVASSGRNHDARNYIDQAIRSGCAAVVSEFTAGMQKLEMRGGIPVIGAENLSSKVSEIANRFYQYPSSKLKIVGITGTNGKTSCSQFIADVLQSLGFKCGMIGTLGYGLPGSLEPTSLTTPDAVFSQKQIARMANKGFEYVSMEVSSVGLDQKRVEAIDFDTAVFTNLTRDHLDYHKTMEEYAKARE

SEQ ID NO: 194680 - protein, 196 aa, Unknown
  Bacterial polypetide isolated from the Sargasso Sea
SKVILDYAHTPDALNIVLANIKEQFPERKIRLVFGCGGDRDKAKRFKMGRIASKFANMIYLTDDNPRSESPKKIRRDIKKGIKIKNLKEISNRKIAISNCINDLSSGDIAIIAGKGHEKTQDYNGKKKFFSDRKEIIESISLKNKKLFKDKRLNIIQEKTRPLSKMLKLNNVSINSRELKKNDIFFGIKGKKHDGK

SEQ ID NO: 194681 - protein, 280 aa, Unknown
  Bacterial polypetide isolated from the Sargasso Sea
DFFYQIFSLQNIKSGFIGTLGFRKDNSLKERNLTTLDSLTLNKDLNDMKKSGIDNVIIEASSHGLKQKRLDFLKIKAGIFTNLSHDHLDYHKNMKNYLNSKLLLFKHILKKKSTVITDTDIQQYKRIKKIQKKRKLKILTIGSKSNKFRILNHKIYKNFQCLEIKYNNKIYSLKVNLFGSIQIKNLLMAILAANVCGLKIKSIFNNIHKIRSVDGRLQLIRTLTNKSKIFVDYAHTPDALENAILSLREHFKKKITVIFGCGGERDKSKRSLMGKVAKKY

SEQ ID NO: 194682 - protein, 255 aa, Unknown
  Bacterial polypetide isolated from the Sargasso Sea
TKSSFEILDHQFLKNEQKILFRFNKKKYSFSTKLIGRVQTKNLLMAIMAAIKSKISLEKILKITQKIKPVNGRLEKIGKLHNNGIVILDYAHTPDALKTCIKNVKEQFKLRKINLVFGCGGERDRPKRKIMGIIANRYCDKIYLTDDNPRSEDPNKIRRDIKSNILKNKIIEIPSRESAIKSAILDIKSNEIVIIAGKGHEVYQEYISRKFFSDKKCIEKFIKIKNKSLNRNWKSNIISEITKKKIEKNININEA

SEQ ID NO: 194683 - protein, 195 aa, Unknown
  Bacterial polypetide isolated from the Sargasso Sea
MSVHSEFEVANIAAALAAFLSMGHTIDKLIDLLPQLSSVPGRMQKIPGPKGCPAVVLDYAHTPDALERVLRACRHHCEGRLICLIGCGGGRDVGKRPIMGQVAIENSDVCYFTSDNPRDEDPLEIITNMTSSISTLEKRRVNLIIDRSEAIRAAIDLGREKDWVVIAGKGHETTQEVHGRLLPLNDLEIISEVFG

SEQ ID NO: 194684 - protein, 208 aa, Unknown
  Bacterial polypetide isolated from the Sargasso Sea
PVGSGAFHSPLLGRFNLMNLLQSVGVLLQRGLPLDPLLEAVGSFRGVPGRMERVVVEGAEAAALPTVLVDYAHTPDGLENALAASRPFAAGRLVCVFGCGGDRDRGKRPQMAAIAARLADRVVVTSDNPRTEDPDQILADVVAGIPSGTELRIERDRARAIAEGIAEASPADLVLIAGKGHEDYQILGTEKVHFDDREQAEQALGRRL

SEQ ID NO: 194685 - protein, 293 aa, Unknown
  Bacterial polypetide isolated from the Sargasso Sea
MILFKKLMKKKSIVIFDSNSKYGSKIKKIAKKNHSKCLIIGEKGSNLKLIKQISFKDKQKVFFEYKKKIFSFETSLIGKIQIKNLLMAIIAASKYVRINKILKSIHKIKEVKGRMENIGKLNNNSKVILDYAHTPDALRVCLRNLKNHYKLSNISIVFGCGGERDKPKRKMMGEVASNFCNKIYLTDDNPRNEKPFKIRNQIKKKINKSKLFEISSREKAIKQAILNLNSGDVLLVAGKGHENYQEYREKILFSDRACILKYINEKNKIISNDWKINVINESLDNFKISNSKK

SEQ ID NO: 194686 - protein, 281 aa, Unknown
  Bacterial polypetide isolated from the Sargasso Sea
MIKSFHNIVPLGQDVPNTLINGLTVNSNDVNEGDIFIAIPGTRVDGHNFIAEAIDKGASAIISNGRDLGKLPVPQIKVANPRRAASIVASEFYGHPTKHLVVIGVTGTNGKTTTASILKSILDTVGYKVAQIGTLGLIADDFEHIKTLTTPDPITLQKLFSKLNKANYSHVVMEVSSHALDQFRVADVDFNIAVFTNLSPEHLDYHASVESYFQSKLRLFTMLTLNSTAIVNISDSFGKRVSEKSPAPVIPFSKNNDNSIHYQKKETSIKGITGEITAGKK

SEQ ID NO: 194687 - protein, 279 aa, Unknown
  Bacterial polypetide isolated from the Sargasso Sea
MLTNTTLDPIQLSFILQDLRKKKIEYVIMEASSHGLKQNRLDGLLFDVGIFTNLSHDHLDYHKNMKSYLKSKLYLFDKLIKKKGNIITDANIPQSKKIQNISYKKNINLSLIFKKEGIELISHKFSNEKQILKIQFNKKKYKVALDLIGKIQIKNILMTVLAAYKSGLKFEKIINVIHKLKPVKGRLEKIGEIKNNSKVILDYAHTPAALELAILNIKEQFPKKKISLVFGCGGERDFKKRPMMGKIADKYSDRIYLTDDNPRNENPSKIRKDIKKGIK

SEQ ID NO: 194688 - protein, 286 aa, Unknown
  Bacterial polypetide isolated from the Sargasso Sea
NKITRLNKIKKLTLGSTKSSFSIIDHQFLKDQQKITFIFDNKKYSFSTSLIGRVQIKNLLMAIMAAMKSKISLENIIKIIPKIKSVNGRLEKLGNLNNYGIVILDYAHTPDALKTCIKNVKEQFKLRKINLVFGCGGERDRYKRKIMGSIADKYCDKIYLTDDNPRSEDPTKIRRDIKSNISKSKVLEIPSRESAIKSAIMDIKSNEVVIIAGKGHEIYQEYISKKFFSDKKCIEKFIRIKNKSLNSNWKTNIVSEITKKKIEKNININEASIDSRKTKKNNIFLA

SEQ ID NO: 194689 - protein, 216 aa, Unknown
  Bacterial polypetide isolated from the Sargasso Sea
RDHLDYHKTFKDYLNSKLILFNKLLKNKGNIVYDEKISQSKQLINIAKKRNLKKYNFGNQKSFIRILNIQKLDDFKRVDFKMSNKKYSFKTSLIGNVQITNLMFAVVAAYLSKININDILKSIEKIKPINGRLENVGNLKNRSKVILDYAHTPDALKTAILNVRKEYPISKISLVFGCGGDRDKHKRPEMGVIAKKYCDKVYLTDDNPRNESPQIN

SEQ ID NO: 194690 - protein, 300 aa, Unknown
  Bacterial polypetide isolated from the Sargasso Sea
IKKNKKAIFIKVKDTRKILARLSTKYYKNKPKNIIAVTGTNGKTSVSDFFYQIFKLQNKRSGFIGTLGFRKNNLLKKRELTTLDSLTLNKDLEEMKKSGINNVIIEASSHGLKQKRLDFLEIKAGIFTNFSHDHLDYHKNMKDYLNSKLLLFKNLLKKEGTIITDSDIKQYKLIKNIQKRRKLKILSIGSKNNFFKIINHKIFNNFQLLKVKYNNRIYKLKIKLYGSIQIKNLFMAILASKVCGLKIEKIFNKIEKIKSVNGRLDLIKTLPNKSKIFLDYAHTPDALESAILSLKEHFKK

SEQ ID NO: 194691 - protein, 278 aa, Unknown
  Bacterial polypetide isolated from the Sargasso Sea
MLLRDLLAPWFPYAGEQTFLDLTLDSRAIRRGDVFLALPGHKVDGRQFIDKALAQGATAVLVHTDKIDEQGKVIATEQGVQIYFYQLAKQVSAVAAVRYPVVQGQSMGIVGITGTNGKTSTSQLCAQLVTLLEGKAAVMGTLGNGLWGELVDSGNTTADAITLMRQLHEFADKGVNTCAMEVSSHGLVQGRVDAVPFDVAVFTNLTRDHLDYHGDMKNYAAAKQMLFCFDALRHGLVNLDDPVGAAWLSELANVPAKMWGFSIEAHTEAAFYTKNAQF

SEQ ID NO: 194692 - protein, 302 aa, Unknown
  Bacterial polypetide isolated from the Sargasso Sea
GIYQKRVEGISFKGMIFTNLTHDHLDYHSSFSDYRDTKKLVFDSLSKSSFALVNSDDKNAKYMVQNTKASIYTYSLKLKSNFTCKIIEQQLDGMLLSIDNSEIWTKLIGKFNASNILAIYSIGKLYNIDKINLLTSISKLESVKGRLQSFLSNNKVTVIIDYAHTPDAIENVISTINNIKKSNQNLITVIGCGGDRDKAKRPIMGKISSDLSSKVIFTSDNPRSEDPKSIINDMLQGVSNFNSKKISIELERKKAIRKAKENSNEGDIVLIAGKGHENYQELSNNKRIYFDDLKIAKEIFNK

SEQ ID NO: 194693 - protein, 266 aa, Unknown
  Bacterial polypetide isolated from the Sargasso Sea
DLFIAIPGMKYDGHDFIKEAMRNGASAVITNGRNANIDPIPQIKVANPRRAVSIVSSKLFNNPSKDVTVIGITGTNGKTTTAYLIANALNKAGYKTAQIGTTGIIAEGFNQKKTLTTPDAIHLQELFFEFKNLGFTHVVMEVSSHALDQYRVADISFDFAVFTNLTPEHLDYHPSMEAYYRAKSRLFKMLTIDGVAIINSSDLNGERIAKETIATVLFYSRGNGDTIHFSNTDSTLKGIRGTIKAGDFSYNINSSLIGDFNKENIL

SEQ ID NO: 194694 - protein, 321 aa, Unknown
  Bacterial polypetide isolated from the Sargasso Sea
SNGKDLGKLPVPQIKVANPRRAASIVASEFYGHPTKHLKVIGVTGTNGKTTTASILKSILDSAGYKVAQIGTLGLIADDFENIKTLTTPDPITLQKLFSKLKEANYSHIVMEVSSHALDQFRVADVDFNIAVFTNLSPEHLDYHATVESYFQSKLRLFTMLTINSTAIVNISDSFGKRISKKSPAPVVPFSKSNKNSIHYRKMETSITGITGEIIAGQNKYSIKSKLIGDFNSENILAAVSVAHALGENKKDIENGIKVCNSIPGRMESYCLSSGAIVIIDYAHTPDAYLKVLSTIKQNLSESGDLYAVFWCRRRQRQNKA

SEQ ID NO: 194695 - protein, 277 aa, Unknown
  Bacterial polypetide isolated from the Sargasso Sea
QLRTTKNNSIVILDYAHTPEALKTCIENVKEQFCLRKVSIVFGCGGERDKEKRPIMGKIANNLCDYIYLTDDNPRNENPKKIRNSIKRSILKSKMIEIPSRKLAIKNAILNSKSDEVLIIAGKGHENIQEYVEKKKFSDTNNIRESILLKNKFLSNDWKLNIFKEILKNKKLDRLKNLKLSTNSKKNNKDKIFLGIKGKTLNGNDFADEALNNGAKLAILQNSKNLNDKKINVKNTTELLTKLSQKIRISSNASQVAITGSSGKTSLKELLGQCLQK

SEQ ID NO: 194696 - protein, 277 aa, Unknown
  Bacterial polypetide isolated from the Sargasso Sea
MRSIKLHKLLDLVGIIPSLDLIDHKINNISFNSKEVQKGTLFLGMPGLNVDGGKYCIEAIENGAEAAIIGSAAKEKIGSIDRERILVIEDNLDYIFGQIVAEFWNRPSRKLKLIGVTGTNGKTTITFLLEYLLKKLGKKTALFGTLLNRWPGFSEVALHTTDFADKLQKKLNAAVEAESEFAILEVSSHSIAQNRISGCEFEAAIFTNLTQDHLDYHSDMESYFQTKRKLFFPPYLKEKDGICVLNYDDHWISKLSSDHEKRSLLVSTKITESELKM

SEQ ID NO: 194697 - protein, 311 aa, Unknown
  Bacterial polypetide isolated from the Sargasso Sea
MEHLDYHKNIKNYLNAKLYLFKELLDLKGNIIFDEKINQSKQLDIITKKRRLKKYTFGSSRSFIKIIKIQKVNNQNQIDFTLNKKNYSFKTSLLGKIQIKNLMFAIIAAYLSNVEINKILKSIQKIKPINGRLENIGNLKNNSKIILDYAHTPNALQTVISNIKEEFPLSKISLVFGCGGNRDKNKRSEMGAIAKKYCENIYLTDDNPRSENPKLIRNQIKRGLKNKKFFEISSRSKAISIAIDKLNSGDILIVAGKGHENYQEFKKKKIFFSDKLEILKSIFHKNKNLSKSIKNNILKETLESKIVNKKR

SEQ ID NO: 194698 - protein, 482 aa, Unknown
  Bacterial polypetide isolated from the Sargasso Sea
MHADTRSLEAGDVFFAYAVDGADNRAFIAEAVARGAAAVLYQPEGLDAAPAVPVSLAVPALDQLAGEIASGWYGDPSDSLLTVGVTGTNGKTSCTQWIATALTALHQPCAVIGTLGSGMPGQLVPTGFTTPDAPQLQRSLAQLRDAGAKAVAMEVSSHALHQGRVNGTAFDIAVFTNLTQDHLDYHGTFDAYEAAKAKLFAWRGLRAAVVNRDDAAGQRLLEKLAGRVRTIAYGIGDAPAPDADRELVALDVRATTTGTAFRLRSSWGDADVEVGTLGTFNVSNLLAVLGSLLATDVPFDAALAEIARLESVNGRMQRLGGRLQNDEPLVVIDYAHTPDALEKTLDALRPIATARGGRLVCMFGCGGDRDATKRPLMGAIAERLADETVVTSDNPRSEDPQRIIDQIVAGMTAPDHARRIEDRASAILQAVRGAAREDVVVLAGKGHEATQEIMGKKRTFSDQDHARLALAARATHGKGGAE

SEQ ID NO: 194699 - protein, 694 aa, Unknown
  Bacterial polypetide isolated from the Sargasso Sea
MLLKDYFPNLHKKYHELSFKGIAFNSKEVKKGYIFFAFKGNNTDGNFFIKDAIKNGSEIIITDKFKINGWKNNVLFLNDNNPRNLLAKFSSKIFNKKPNNLIGVTGTNGKSSIANFYFQILTLNRIKAAAIGTLGITGLKVKKNFSNTTFDTIQINKILKKLKKKNIENVILEASSHGLNQNRLDGLEFDIGIFTNFTRDHLDYHKTYKNYLNSKLILFKKLLKKNSYAIYDNELKISSNLNKITKVNKIKKLTLGNTKSSFSIIDHQFLKDEQKITFIFDKKKYSFSTTLIGRVQIKNLLMAIMAAMKSKISLEKIIKIIPKIKSVNGRLEKLGNLNNYGIVILDYAHTPDALKTCLKNVREQFKLRKINLLFGCGGERDKPKRKIMGNIADKYCDKIYLTDDNPRSEDPIKIRRDIKSNISKSKVLEIPSRERAIKSAIMDIRSNEVVIIAGKGHEVYQEYVSKKFFSDKKCIEKFIRIKNKSLNRNWKTNIVSEITKKKIEKNININEASIDSRKTKKNNIFFGIKGKNFDGNKFVNQALNNGASIAINQNKPVNQVKNKIYVKNSLKIFSESAKLVRISSNISSIAITGSAGKTSLKEMLGQMLGKLCQTSYSKKSFNNKYGVPISLFNINKEDKIGIFEVGMDKKGEIDFLTKKIMPNIGVITNISYAHIKNFKNLWGVAQAKSEIINN

SEQ ID NO: 194700 - protein, 448 aa, Unknown
  Bacterial polypetide isolated from the Sargasso Sea
KLKKEKIDNVILEASSHGLKQKRLDGLKFKIGIFTNLSHDHLDYHKSFKDYLDSKLYLFKKLLMKNSSIVTDLDIPEYKKIKSIARKRKIKLNTISNKYGDLSIISHKYFGEKQSLKIKYKKKIYTFQVSLIGKIQLKNLLMSMIAANMSNIDFKSIISVIKKIKPVSGRLEKIGFIKNNSSVILDYAHTPDALRICLQNIKDQFKNRKVSIVFGCGGNRDQFKRSLMGRIANDYCDKIYLTDDNPRKENPKKIRQNIKKKIDNSKLYEIPNREKAINLAIQNLLSGEILVVAGKGHEKIQDYGSYKKIFSDKDCIIKYVKKKNKLLKNDLKFNIIKEAIRNNNLSSNTKIRKASINSKNIRKNDIFFAIKGKKNDGNKFTNEALNKGASLAIVSKIYDLKKKNKKIIVKNTLDFLTKTSEIIRTNSSSKIIAITGSCGKTSLKELLK

SEQ ID NO: 194701 - protein, 643 aa, Unknown
  Bacterial polypetide isolated from the Sargasso Sea
MRLGDHFQQIKKKYHKTFFSGVCFDHRKIKKNYIFFAIKGNNLDGNNFIPSVIKKGCKIIVTEKNFDEWKNGVLFINTKNIRKLLAQISFSIFKKKPNNLIAVTGTNGKSSVSDFYYQILRLNNKKVASIGTLGVRSNNFNLNLLNTTIDPIYLGKILNQLKKRKIENVIMEASSHGLHQNRLDGLLFNSAIFTNLSQDHLDYHKNFKNYLSAKLYLFENLIKKKGFVITDEKIPEFKKIKNVSLKKNLKLITFENKSFQLISHNYKNKIQILKIKHNNLIHNIRVNLVGKIQIKNILMAAIAASKSNLDLKKILSVIPKLSPVEGRFENIGKIKNKSLVFLDYAHTPDALQTCVLNIREQFPDKHISLLFGCGGDRDKGKRSKMGKIADKYAHKIYLTDDNPRNERPKKIREDIKRGIKKHKVIEISNRKEAIVKAISNLNTGNVLIVAGKGHEKTQQIGNRKVFLSDRQIILNSIKKKNFNLSKNLKLNILNERFDQNILPFKSVINKASINSNSVQKNDIFFAIKGKKNDGNKFVKQAIRKKASITIVNKIQKKLPANKQASSINPLGLLTETAKIFRKNISTKIIAITGSCGKTTLKELLGSTLSKVSKTTISPKSYNNKYGVPLSLFNINQNDGLWCY

SEQ ID NO: 194702 - protein, 484 aa, Unknown
  Bacterial polypetide isolated from the Sargasso Sea
MNKFLSELVKTEENISSIKINGITSDSRNVMPGFIFAALPGSKTNGKKFISDAINKGAVVVIAETGTKISCSDTLLITSDNPRSKYAKIASKFYTEKPSWLGAVTGTNGKTSVACFTSQLWNSMNLKGAAIGTLGINSIEYKSSLDLTTPEPVTLHRELSEISTRGLDYAIIEASSHGLDQSRLDGITFEAAAFTNLSHDHLDYHITYEKYKNAKLRLFSDLINNNGTAVLNRDSNEFKEFSTVAKRNNISVISYGSDIRSDICLVSSIPKSVGQEIEINVSGKRERLLFPLFGDFQAHNAMCALGLVIASGADANKAIQSLGHLTGVKGRLELVAELSNRARIFIDYAHSPEALEKTLLSVKNYTRGKLNLVFGCGGNRDEAKRITMGQIASKYSNKIYVTDDNPRKENPEKIRRAILSGCPDGLDIGDRRKAIFLAVSELEPGDILVIAGKGHETDQLYNDRVKPFDDRYEVKKAIVYERVQ

SEQ ID NO: 194703 - protein, 351 aa, Unknown
  Bacterial polypetide isolated from the Sargasso Sea
NITHKIGVTGTNGKTSVTFYINYILDKINIKSATIGTLGNSAFKKNKGNLTTPSSLDLARQLSAIYRKKIDHVSIEASSHGLDQKRFSGLQFNVGILTNISRDHLDYHKTMDNYISSKAKLFNDYLSQNAKIIINSETKYLTQFLKKIKNLKSKELILFQKNNDYKLLKLNLRKNDVNVSVIISGKKFNLVFSNLPLFQIKNFLIAASAVSGMGYNLANLSTISKKCPNVSGRMEYVGLSKKGGKVYVDFAHTPDALLNVLKEIKQTNPSKIILIFGCGGDRDKGKRSKMGVIAKKYADIVIVTDDNPRYEDATKIRREIIQNSNFFVEISNRKKAIKHGISKLEKKSVLL

SEQ ID NO: 194704 - protein, 407 aa, Unknown
  Bacterial polypetide isolated from the Sargasso Sea
MLKKLIKNCPEKLENIFIKGLSSDTRNLKKGELFFAIPNKNFSVEKLIYLAKKKRAAAIVTSRKGKKFEKIIYIRNIKKVLADTCKKFFSEKPKNIIAVTGTNGKSSVADFFYQILKLNNIKCATIGTLGIKKGAGFEKTNLTSLDIISFHKELQKIKKLKIDNVLVEASSHGLDQGRLGGVKFRGGIFTNFSQDHLDYHKKMRDYLNSKLILFKSLLQRNNYLITDKYIPEFRTLKKIAKKRKLKIKTINLKKSYDDLSKFKLIGDFQKKNLLMAIYASQIIGLKEKKILGQLDKIRSVTGRLDLAKILPNMTKIFIDFAHTPEAIETAIKSLSLHFNRDITVVFGCGGERDKKKRAEMGKIANKYCNKIYITDDNPRNENPKKIRHSITRLINKKKLIEIGNRFE

SEQ ID NO: 194705 - protein, 420 aa, Unknown
  Bacterial polypetide isolated from the Sargasso Sea
IFNKKPNNLIGVTGTNGKSSIANFYFQILNLNKIKVASIGTLGITGLKIKKNYSNTTFDTIQINKILKKLKERKIENVILEASSHGLNQNRLDGLEFDIGIFTNLTRDHLDYHKTYKNYLNSKLILFKKLLKKKSYAIYDNQLKISSNLNKITKFKKIKKLTLGNTKSSISIIDHRFLKDEQKITFIFDKQKYSFSTKLIGRVQIKNLLMAIMAAMKSKISLEKVIKIIPKIKPVNGRLEKVGNLYNHGIVILDYAHTPDALTTCIKNVKEQFKFRKINLVFGCGGERDKAKRKIMGNIANKYCDKIYLTDDNPRSEDPKKIRRSIKSYISMSKVIEIPSREKAIKSAILDIKSNEVVIVAGKGHEVYQEYVSKKFFSDKKCIEKFIKIKNKSLNKNWKSNIVSEITKKKIEKNIKINEA

SEQ ID NO: 194706 - protein, 360 aa, Unknown
  Bacterial polypetide isolated from the Sargasso Sea
MGKLIKNIKPAYKSIKFNNIRFNSKDCKKNDIFFSIQGNKFNGNNYIKDAIKNGSKIIISNLNFEGFNKKKILFIKNKNPRKALAEAANNFYKKKPKNIIALTGTNGKTSIANFFYQILSLNKKKVAAIGTLGVLSKKIKLKTNNTTIDPIKMHQILQKLKNLNIDNVIIEASSHGLKQHRLDGLNLKTALFTNLSRDHLDYHKTFKDYLNSKLILFDKLLLNKGNIIFENGIPQEKELKKISKKKKLKIHKIGSENSFINLKKIQKINDKKRIYFSLLRKDYSFNSYLIGSIQIKNLLFAILAAYLSGIKIDAILRNIKKIKPINGRLEQIGKLKNKSRVILDYAHTPDALKTSYIKYK

SEQ ID NO: 194707 - protein, 370 aa, Unknown
  Bacterial polypetide isolated from the Sargasso Sea
LKVKKNFSNTTLDTIQINKTLKKLKDRKIENVILEASSHGLNQNRLDGLKFDIGIFTNLTRDHLDYHKTYKNYLNSKLILFKKLLKKRSYAIYDDKLKISSNLNKITKLNKIKKLTLGNTKSSFSIIGHQFLKDEQKITFRFDKKKYSFSTKLIGRVQIKNLLMAIMAAMKSKISLEKIIKIIPKIKSVNGRLERVGNLNNYGIVILDYAHTPDALKTCIKNVKEQFKLRKINLVFGCGGERDKYKRKIMGNIAEKYCDKIYLTDDNPRGEDPIKIRRDIKSNISKSKLFEIPSRERAIKSAIMDINSSDVVIIAGKGHEVYQEYVSKKFFSDKKCIEKFITIKNKSLNRNWKTNIVSEITKKKIEKNIN

SEQ ID NO: 194708 - protein, 947 aa, Unknown
  Bacterial polypetide isolated from the Sargasso Sea
MLLGNYFTNIDNSKKKIFFSGISFNSKDIKKDNIFFAIKGNHFDGNKFISIAIKKGSKIIISEKRITNPQKDILFIHTKNIRKLLAEIAFKIYKNKPNNLIAVTGTNGKSSVSDFYFQLLKLNKIKVASIGTLGVKSKNIRRNLQNTTIDPIRMGQILSKLKSQKINNVIMEASSHGLTQHRLDGLKFSSGIFTNLSQDHLDYHKNFKDYFKAKQYLFENLIGKKGNVITDETLPEFKRIKKIAISRKLKLQVLNNSKNQFQILSHSYRGEKQILKIRYYNLTREINLNLIGKIQLKNILMAIIAAKNSNISLIKILNVLSQLKPIDGRLEKIGKIKNRSKVILDYAHTPDALRICLSNLREQFPNKKIILLFGCGGNRDQNKRFKMGKIACDYSNEIYLTDDNPRFEDPRKIRDDIKKGIHDTLIKEIPNRKQAISEAIKNLSTGDILLVAGKGHEKTQDFGKKKIFFSDKKIILDCIKLKNTNLSKNFKINIIKELSKIKNKIPLVKADKARINSKEVNKNDIFFAIKGKKNDGNKYIGEAFKNKASLVVVNKVQNKFNSKRQIKVRNTLKFMTEISKIFRQNIDTNIIAITGSCGKTTLKELLGNVLGKISSVSISPKSYNNKFGVPLSLLNLKHSDEFGVLEVGMDKKGEIDNLTNIIKPNVGLITNINYAHAKNFKNIKQIALAKAEIIKNILPNGFVVLNADDSFFKLHKKIAENNNINVISFGIKTKKANVKLFNIKKVKKAFKIKVKLNDKFKYFIISNNFQSNIYNILSALSVISIYKDVLKLNEKIFLDFRSPAGRGDHSTIKIGNKKINLIDESYNSNPLSLKSALKNYDNIDTKKYRKYLLLGDMMELGSHSKKLHQSIVPLINETNIDKVFVMGKMVREIFYNIVKVKRGRILENKSGIFELIKKDFNNNDYLMIKASNATGFNSIVNNLKGLN

SEQ ID NO: 194709 - protein, 372 aa, Unknown
  Bacterial polypetide isolated from the Sargasso Sea
HTKNIRERVIYFEELKKYIGIFASRFYNSPSSKIKSICVTGTNGKTTAVETFANMSNLLGYKSGFMSSINFSKDGLILEKSDLTTPDAIKIHKNINDSLESDAIYIAMEASSHGLEQDRLIGLDIDYAILTSFSHDHLDYHGDIQSYQSAKEKLFLDLNPKKNIVCIDSSFGKKLHSKLLKNDKETYSISIKENADFHASFEKSPIGLKVNLKAFEKNLTFELKTFSRYLASNIICSMAVLILDGVKLSEISKIAKDIVLPQGRLERIIKNQQVIYIDYAHTPEALECTLKELNNIHNEPIWCLFGCGGNRDRDKRPLMGKIAQKYSNHVILTNDNPRDEDEMDIINDILSEVKEMEKISINLDRKDAIESS

SEQ ID NO: 194710 - protein, 444 aa, Unknown
  Bacterial polypetide isolated from the Sargasso Sea
NFVDDAVSRGAVAIITQNSSRCRDMAPTMPLIETCNPRLELAKLAACFFNGQPDYVAAVTGTNGKSSVVDFARQLWLSVGYSASSLGTLGLKTKQVLENSSLTTPDTVRLHKVLKSLSDREIHYLALEASSHGLDQYRIDGVKISAAVFTNLTQDHLDYHKDMRTYFKAKARLFSELLSANGTAVLNFDSSEFEALKSICISRGVSVISFGSSNGADIQLLDVKPSPAFQEIRIKVFKAEYQFVLKLLGKFQILNVLASLGIVVASKKDSDVEFWVDQLRNLKGVPGRLERVTDSNSLAQVIVDYAHTPDALRNALVALRQHTSKRLICVFGAGGERDRGKRKIMGQVADELADLCLITDDNPRNENPKRIRDQILEGCPNGESIACRGEAIKLGISKLQSGDLLLIAGKGHESTQEINGQKFEFSDVEVVKNLIKNAEGLNHE

SEQ ID NO: 194711 - protein, 471 aa, Unknown
  Bacterial polypetide isolated from the Sargasso Sea
MTLDSRAIRRGDVFLALPGHKVDGRQFIDKALAQGATAVLVHTDKIDEQGKVIATEQGVQIYFYQLAKQVSAVAAVRYPVVQGQSMGIVGITGTNGKTSTSQLCAQLVTLLEGKAAVMGTLGNGLWGELVDSGNTTADAITLMRQLHEFADKGVNTCAMEVSSHGLVQGRVDAVPFDVAVFTNLTRDHLDYHGDMKNYAAAKQMLFCFDALRHGLVNLDDPVGAAWLSELANVPAKMWGFSIEAHTEAAFYTKNAQFNDQGVQATLVWPEGEIDIRSPLLGAFNLSNLLAALSALYLQGMDMRALAAKVPYLVPVAGRMERFTTADNITLVVDYAHTPDAIEQALNALRRHCAGELWCVFGCGGDRDKGKRPLMGQAAEQFADRIMVTSDNARSEDPNQIITDIIQGLTHPERALTEVDRVAAIKHVVAQAKPGDVILLAGKGHETYQEAAGVRHDYDERALARQLSEQSQ

SEQ ID NO: 194712 - protein, 459 aa, Unknown
  Bacterial polypetide isolated from the Sargasso Sea
MNFEKRNFVSHSKYIKDDDIFISLKNGIKYLSQEDINKLSLILVDSKFEQYDNPKILKINNLEENYLNWIDEIYDIQQTTFKNFFVTGTNGKTTTIELLSQAFSFNSIPNSTIGTLGTYLNGNKYFSNNLTTEEPLFVRSVMRKCSENNIKNIFIEASSIGLHQNRLKGLTVEHAALTNISRDHLDYHKSFDEYLSSKLKLAENTTLKTLSYNLDEEHFSNIETAFKGEKIYSVSNKQKNADIYFEIKEFKENGRINFSAKTPWGEFNSSPKLHAEYNIYNLLLSLPYYFSITSNCTEFFSAADEMTLPDGRLQKIPNENIFIDFAHTPDALDAVCSELKRKNYKGLKLVFGAGGDRDQGKRELMGNIAQKYAKKIYITSDNPRFEKPDEIIEMIAAGISDKEKVIIELDRAEAISMAINELKKDEILLITGKGHEEYQIIGDDKKAFSDYEEVLKCIE

SEQ ID NO: 194713 - protein, 366 aa, Unknown
  Bacterial polypetide isolated from the Sargasso Sea
MKLKKICSILKINTNYLNFDKDIDIYSVSDDSRNTKKKDLYISLKKNQNNSHDYLKEAIGKGCKVVFSDYQIESSLKKEYKKVFFLKVKGLEKKIPLITNSIYKNPSRKLKITAVTGTNGKTSVTHFSHQILKFIGEKSAVIGTNGYGELGKLKNSGYTTPRNVILNRTLSELKKLKFEKVYLEASSHALEQERLKDINIENAVFTNLTHDHLDYHKNMKNYFNAKRRLFEDFDIKNAVINVDTQYGEKLAKKIDRNIKLLTFSNKKKTANAYIKNYKLNENGIDFVLDLGVNQIKCSLNLYGFYNIENLSLAILNLINQGYSPKEIEKSLKKLKPVKGRMECVYNKKNKKIFVDYAHTPISIEIL

SEQ ID NO: 194714 - protein, 385 aa, Unknown
  Bacterial polypetide isolated from the Sargasso Sea
MLLGNYFNNINKNYKNFSFSGISFETKSIKKNNIFFAIKGNSIDGNKFIPKAIKKGSKIIVTERKKNQYQNGILYIHTKNVRKLLAETAFKIYNKKPKNLIAVTGTNGKSSVADFYYQILKLNNKKGASIGTLGVKSKSINLNLSNTTIDPIKLAKILSKLKNQKIENVIMEASSHGLKQNRLDGLKFNSGIFTNLSQDHLDYHKNLKNYLNAKLYLFENLISKRGNVITDQLIPEFKNIKKIAINKKLKLHTLNDEKNNLELLSHNFKGEAQFLRIKLNSSINDINLNLIGKIQLKNVLMAIIAAKYSGISLDKILNTIPKLKPVEGRFEKIGKIKNQSKVILDYAHTPDALKTCLLNLREQFHNKTITVLFGCGGNRDQNKRS

SEQ ID NO: 194715 - protein, 202 aa, Unknown
  Bacterial polypetide isolated from the Sargasso Sea
FQYSGRQFSIPLKVEGYFQAMNILCAAGLAIASGSPSEKVFEHLKDLRPIPGRLEFCGFSKTEAKIYVDYAHTPDALTAALFSLRELTENKITLVFGCGGGRDRFKRPIMGEIAENFADGIIVTDDNPRNEDSDKIRKSILETCPSAIEIPNRKEAIITAINQGEKGDSILIAGKGHEKFQIISDKKIPFSDQEIIREVIGD

SEQ ID NO: 194716 - protein, 485 aa, Unknown
  Bacterial polypetide isolated from the Sargasso Sea
MELKEILYKVPILAIAGSSSRSVKNIHTDSRDVEKESLFVALKGNKYDGYNFINSAIKSGAFVIICNKIPKKLNKSITYVKVSDPGKVLATISSNFYRNPSKKIKLIGVTGTNGKTTITTLLYDIFSSQNQNAGLISTINIKYGKNNILSRNTTPDILKINYLLSEMVKEKIKYCFMEVSSHGISQGRIDGLYFFGGVFTNLTHDHLDYHKSFNNYRNVKKQFFDLLPKDAFSLVNKDDKNAIFMQQNTVSKKVSYAINTYADFNLKVLESTFSGMLLNINNNEIWTHLLGDFNASNLLAVYAVSVITGNEKIEILKKISLLKNVPGRFQTFKSDSDCYVIIDYAHTPKALESIINSINQIRTKNEKLITVIGCGGERDIEKRFEMGRIASEKSDTVIFTSDNPRNENPMSIIDQMNSGVGFKDKSKIICIKEREMAIKKSKEISKKSDIILIAGKGHESYQEISDVKIPFDDFLIAKKYFNKKI

SEQ ID NO: 194717 - protein, 755 aa, Unknown
  Bacterial polypetide isolated from the Sargasso Sea
GKKYEKTFFSDICFDSSKVKKDDIFFAIKGTNIDGNNFILDAINKGSKIIVTEKKITKFPNGVLIIHSKNVRKLLAEVSFKIYKKKPTNLIAITGTNGKSSVADFYYQILKFNNRKVASIGTLGVKSNNKYINLSNTTIDPIQLGKILNYLKNQKVDDVILEASSHGLRQNRLDGLKFNSGIFTNLSQDHLDYHKNLKDYLKAKLYLFEKLLSIKGNVITDEKIPEFRNIKKIALKRNLKIFSINNAKNHFKILSHYFVGEKQMLIIKYKNLIKNIKLNLIGKIQLKNIMMAIIAAQKSNLSLDKILGVIPKIRSVEGRLEKIGNIKNKSKVILDYAHTPDALKISLLSLREQFPNKRIVVLFGCGGNRDQNKRSKMGKIASLYADQIYLTDDNPRLENPNKIRKEIKRGINSNKISEISDRAKAISEAVKNLTTGDILLVAGKGHEKVQEIGNSKIYFSDKKIILNAIKLKNLNLSNNLKLNLIKESSGDKKLNTNLTLGQARINSKEVKKNDIFFAIRGRKNDGNKFVEEALKKKASIVVVNKIKKKLDYKKQIKVKDSLKFLTETSTIFRENIDAKIIAITGSCGKTTLKELLGKTLKKISKTTISPKSYNNKYGVPLSLFNLSENDNYGVLEVGMDKKGEIDYLSKIIKPDISVITNINYAHAKNFKNIKDIALAKSEIISNTKPNGFLILNADDNFFRLHQKIAAKNNINTISFGIKNHKSDVKLISVIKINNNFKINIKAKDFNKQFCD

SEQ ID NO: 194718 - protein, 365 aa, Unknown
  Bacterial polypetide isolated from the Sargasso Sea
GKLFKNLPKKYYSHKFNNLSLDSRKCKQGDIFFSIRGVKKNGNKFINNAINNGAKTIVSDLTFEGKKENILFINNKNVRKLVSEIASRYYKNIPPNLTAVTGTNGKSSIANFYFQILNNKKIKVAAIGTLGIKTDKSKKLTDNTTLDSLAIHKTLSLLKRKKIKNIILEASSHGLKQYRLNGIKFNTTIFTNLSRDHLDYHKTYKDYLNSKLILFNKLTKRKGTLIYDNDIDQSKILKKICIKKKLKPLTIGKKNSNLLIKKHDYVGNFQKVEIEFNKKKYSFSTNLIGKIQVKNLLFAALAASKSKVRFNKIIELMSEIKPVEGRLEVIGRIKNDSKVILDYAHTPDALKHTLESLKEQFSHSS

SEQ ID NO: 194719 - protein, 661 aa, Unknown
  Bacterial polypetide isolated from the Sargasso Sea
RVNLVGKIQLKNILMAVIAAFKSNLELKKIFSVIPRLSSVEGRFEKIGKIKNKSLVFLDYAHTPDALQTCILNIREQFTDKHISVLFGCGGDRDKGKRSKMGKIADKYADKIYLTDDNPRYERPKKIRDEIKKGIKKRQIIEISNRKEAIVKAINNLNTGDILIVAGKGHEKIQQIGNRKVFLSDRQIILNSIKKKNFNLSKNLKLNILNERFDRNVLSSKSVINKASINSKSVKKNDIFFAIKGKKNDGNKFAEQAIQKKALITVVNKIQKKLPINKQASSTSPLGLLTETAKIFRKNISTKIIAITGSCGKTSLKELLGNTLNKVYKTTISPKSYNNKYGVPLSLFNINQNDDYGVIEVGMDKKGEIDQLSKIIQPDISVITNINYAHAKNFKNVRQIALAKAEIIDNTKDNGYVVLNADDTFFSLHKKIAYKKKIKVLSFGMNNQYADIKLHNIIKSKKKYKICIKINNIKKNFSISNDFQNYIYNILAALTVKSVFFNILKLDKNIFLNFKTPEGRGDIKKIKVNKKMINLIDESYNSNPLSLKTAILNYDKIKTKNSKKYLILGDMLELGHHSKKLHESIAPVINRTNIDKVFVKGKEISFLYNKISKLKKGTVLKNKLQINDLIENNFDNDDFLMIKASNATGFNKIVKELKGIN

SEQ ID NO: 194720 - protein, 276 aa, Unknown
  Bacterial polypetide isolated from the Sargasso Sea
LKEKDGICVLNHDDHWISKLSSDLKKRSLLVSTMITEIEFENDDFFFVTDKKFTESGSTCIFHTPREKIQLFVPLVGEFNLMNAIQAITILYKLNFSLKDLSKLIQSFPGAPGRMEKIQIDDNDVSRSLPTVIVDYAHTPDGLKKVLQSIKKLCEGKLITVFGCGGDRDRSKRPLMGSIAEELSDQLFITSDNPRSEEPQKIVNDILMGIKKREKITIEIDRFKAINESIKFANKKDIVLIAGKGHEDYQILNDKVINFDDRKIAYKLLKEKNKSQ

SEQ ID NO: 194721 - protein, 162 aa, Unknown
  Bacterial polypetide isolated from the Sargasso Sea
LNSVQGRLQSFLSNSKVTVIIDYAHTPDAIENVLSTINKIKKSNQNIITVIGCGGDRDRAKRSMIGKICSDLSYKVIFTSDNPRSENPESIIEDIVSGVSNYNNNKILVEVERLKAIEEARKNSAEGDIVLIAGKGHEDYQIFKNKVIKFDDFKIAKKIFNK

SEQ ID NO: 194722 - protein, 317 aa, Unknown
  Bacterial polypetide isolated from the Sargasso Sea
MEVSSHSLALSRVEGINFNSAIFTNISHDHLDFHKTMKNYYQSKAKLFSYYLNSSKKKNKLAVINIDDKYGAMIANQTKKNINLITYSTKNKDADFYLKKIIKLDSINRLIIKNKNKELILDTKLFGLYNFQNILASVGFSKNKGLKIEDIYSGVKLFKGAPGRLEQISEKNSNIFIDYAHTPDALKKSIISLKENFKNKKLLILFGCGGDRDKGKRSKMGKIAASLGDNIIITSDNPRHEDPNEIIKDIISGISLNQRNKIIVISDRRKAIEYSVKKLEKDAQLLIAGKGHEDYQDIKGKKIKFSDKMEIKRCLKK

SEQ ID NO: 194723 - protein, 484 aa, Unknown
  Bacterial polypetide isolated from the Sargasso Sea
MKKKSKIIFDKDLKISNKIRKIAKTKNCEALSLGLNNADLKIIEHKFINLNQKIKFLFKKKIYSFTTKLIGKVQTKNLIMSILAAYKSNINFNNILKNVEKVKPVPGRLEIIGNLNNNSIVILDYAHTPDALKVCLVNLIDQFSLKKISLVFGCGGERDIPKRKIMGNIANIYCKKIYLTDDNPRRENPEIIRNQIKSQINKKNLIEIPSRKLAIKTAIENAKSDEIIVVAGKGHETYQEYKNKKYFSDRDCILKSIKEKNRKLSKNWKTNLVQEKLEKKLNNKTIINKACINSKEIRKNNIFFGIKGKNIDGNKFANLAIKNGASISIIDKNYEKKNKKKIKVKNTLNFLTECATKIRTSSNIIAIGITGSAGKTSLKELLGQSLSKIYQTTYSKKSFNNKYGVPVSLFNIDKRDKFGVFEIGMDKKGEINQLSKMVKPNIGVITNISYAHSKNFKSLFDIAKAKSEIIDNIIENGSIVLNAD

SEQ ID NO: 194724 - protein, 372 aa, Unknown
  Bacterial polypetide isolated from the Sargasso Sea
MHIGKLFKNLPKKYYFHKFNNLNLDSRKCRQGDIFFSIKGVKKNGNKFINSAINNGAKTIVSDLNFQGKKENILFINNKNVRKLVSEIASKYYKNIPANLVAVTGTNGKSSIANFYFQILNNKKLKVATIGTLGIKTNNNNKLTDNTTLDSVTIHKTLSLIKRKKIRNTILEASSHGLKQYRLNGLRFDTTIFTNLSRDHLDYHKTYKDYLNSKLILFNKLTKKGGNIIYDNDISQSKILKKICIKKNLKSLTIGKKNSNLLIKKHEYLGNFQKVEIEFNKQKYSFITSLIGKIQVKNLLFAALAASKSKIKFNKIIELMGEIKAVEGRLENVGNIKNNSKVILDYAHTPDALKHTLESIKEQFSHSSITIV

SEQ ID NO: 194725 - protein, 557 aa, Unknown
  Bacterial polypetide isolated from the Sargasso Sea
MGVKLPDGIKICHATNNSKRVKENSIFFALKGINYHGSKYIEEALERGAPIVVHNDINFKSDDKKVIYIKDLDAIEFILDESCNKLKDIGKISNFLQELYKIDITSLSFIGITGTNGKTTTAYLTHQLLTKANRSSLYIGTNGISYKSAEIESSVSNKTTPDIFELYEMINTYKDDLEFVCLEISSHALDQNRLARIFLDTVCILNIESDHLDYHKDEEEYIKSKFKIFNVPALKLAHEHQCKFLNCDSNLALEHYGANLENFESNNFRRVNLVSKESKIKYYVGRSFKYKKIDLGNWIKHEPSIFYNIESSKEDILDKECTYSIEIKEGKDYMLTHECPYLMNDQKTDCFSSNLFLDFNNENLVFARICAVSAETSNKNYLKAKKQNPREYKDIRQLINCNMLSLPKGRTDLVKNINANVVIDYAHNPEAFFVLLTEIKRKFKDLVVVFGCGGERDKYKRPLMLKVATNIATNIIFTSDNSRGEEFKDIFKDASDGNDLENVFAIEDRKEAIIKGSKLIGKDDCLLILGKGHEETQEIKGNVSYFSDYEVINEIYN

SEQ ID NO: 194726 - protein, 250 aa, Unknown
  Bacterial polypetide isolated from the Sargasso Sea
MYYGIRLVKLNSLIKNIAQNEGIFPPIEIKKICTNSKDVKNGSLFIAIDGVENDGHDYIEEAIENGASAVISNGRDIGKLPVPNIQVGNTRLAASRIAAEYFKHPSKELTVIGITGTNGKTTTASLIYSILNAAKLNVAQIGTLGVIANGIQKQKTLTTPDPITLHKTFNELIDRNFSHVVMEVSSHALDQCRVADVNFDIAVFTNLTEEHLDYHQNIEEYFKAKSKLFRMMPITGTSIINTDDEYGKKM

SEQ ID NO: 194727 - protein, 375 aa, Unknown
  Bacterial polypetide isolated from the Sargasso Sea
DDAGFGTLTVGGVIQKSSNIGATKIAMTMRPEEMWNMYTSIGLGQAPKVGFPGAVAGRLRPWKSWRRIEQATMSYGYGLSVSLFQLARAYTAIAHDGELMPVTIFKTDPNQPVAGTQVFNPTTAREVRAMLEAGDVFFAYAVDGADNRAFIAEAVARGAAAVLYQPEGLDAAPAVPVSLAVPALDQLAGEIASGWYGDPSDSLLTVGVTGTNGKTSCTQWIATALTALHQPCAVIGTLGSGMPGQLVPTGFTTPDAPQLQRSLAQLRDAGAKAVAMEVSSHALHQGRVNGTAFDIAVFTNLTQDHLDYHGTFDAYEAAKAKLFAWRGLRAAVVNRDDAAGQRLLEKLAGRVRTIAYGIGDAPAPDADRELVALDV

SEQ ID NO: 194728 - protein, 466 aa, Unknown
  Bacterial polypetide isolated from the Sargasso Sea
MNPLKNLLLKNKSFISNTSQLEDGDTFISINSGHKFLSKNDEKKVKYILCDTSEADSECFIKIPRLNENFIKWVDEIYNIKHKKFENFFVTGTNGKTSAVHFLSEIFKKNDVAYASMGTLGSFLEENEIEGQKLTTENPLYIRKFLKKVQNHTKHVFFEASSIGINQKRLAGLEIKHVGFTSFAEDHLDYHKTTYNYLSSKLELLSNRSLETLAFNLDMNISKEIKQNANARSIFSISSSNKKAEIYYEILDIDENGWIRFDTFTPWGQFSSNVRLWVDYNVLNLLISLPYYYYCFGEIKSFFRKIENILLPNGRFEVLNFKTKHKKVIIDFAHTPEAMEKLLSQLSKNYKEKIYLVFGCGGDRDKGKRPKMGAIAEKYATKIFLTSDNSRSESPDEIIDMIAAGIKDKLKIQVNIDREKAIQLAINSMSQDNVLVVAGRGHENFQIEQGNRLKFSDREIVKKCLA

SEQ ID NO: 194729 - protein, 941 aa, Unknown
  Bacterial polypetide isolated from the Sargasso Sea
MINNLDPKIANERVKGISSDSRKVKKGDLFISIKGNKLDGNSFIKDAISRGAKAIVYSGTIKKKYQNIILIKVADSRSKLAEISSKFYQKKPKNIVAVTGTNGKTSVSDFFYQILKLFKKPVGMIGTLGFKKNNNFRKRELTTSDTIGLHRDLYEMKNSKIENVILEASSHGLKQKRLDFLNIKTGVFTNLSHDHLDYHKDMNDYFSAKLILFKKILKKRSTIITDSEIKQYSTFKNLKKARKLNLLSIGNSGNTFEILSHNFYKEYQIIKIRYKNKVYNLKIYLIGSVQIKNLLMAILASEKCGIKIQSIFKKIHKIKSVNGRLEQIKELPNRSKIFLDYAHTPEALKTAINALKEHYKKKITVVFGCGGERDKPKRKLMGKIANQLCNKVIITDDNPRNESPKIIREQILSAIKKNKFKEIPGRKKAIIYALKNSDPYEIILIAGRGHETYQDFGKRKVPLSDKKIIQNFNSKKINTKINYFKNNNTLIKKILKNKKNIYFEGVSINSKSIKKNNLFVAIKGKKKDGHDFLKEAIKKGANYSIVSKKVKKNYKPLKVKNTLNFLKDFSQKKREDSSAKFIAVTGSAGKTSLKTMLGGLLNKYSKTYFSPLSYNNHYGVPLSLSNISPDHTFGVFEVGMSKFNEIFRLSSLVKPDIGIITNISEAHLENFRSISDIARAKGEIISNIQKGGTIILNRDDSFFNFFKQEAIKNKIQIKSFGYSKKADIRFLKSKKIKNNFYIELSINKEKILLPVRTINKSNIMNILSCLSVLDCLGLNHESIKNYFKKNKPLKGRGSIKKIKKFGRKFFLIDESYNANPISIKSAIENFSNISKNGKKKYFFFGDMMELGKKSHIYHKKVTKFINNSDIDKTFVYGKRSSAAFKFIKKNKRGEILDNINRFNPKISKIIKNGDLLMIKGSHATKLHKISENYLRGNNHAL

SEQ ID NO: 194730 - protein, 496 aa, Unknown
  Bacterial polypetide isolated from the Sargasso Sea
MIRNILFSTKLIGRIQIKNLLMAIMAAINSKISLEKILKITKKIKPVNGRLEKIGRLNNNGIVILDYAHTPDALETCIKNIKEQFKFRKINLVFGCGGDRDKPKRKTMGRIANRYCNKIYLTDDNPRNEDPKKIRRDIKSNILKNKFLEIPSRESAIKSAILDIKSNEVVIIAGKGHETYQEYANKKYFSDKNCIKKYIKAKNKTLNKNWKSNIISEVTKKKIGKNIKINEASIDSRKIKKNNIFFGIKGKNFDGNKFVDQALRNGASISIIDKKLKNKIKNKIYVKNSLKIFSESAKLIRISSCISSVAITGSAGKTSLKEMLGQMISKLCKTSYSKKSFNNKYGVPISLFNINEKDKIGIFEVGMNKKGEIDFLTKNILPNIGVITNVSYAHIENFKNLNDIAHAKSEIINNIVENGTIILNADDKYFNFFKVKAEKKKLRIISFGIKNNSNLRLIKIKKEKNNSILFINYNNSTLKFSIKKNLVNYIYNILST

SEQ ID NO: 194731 - protein, 493 aa, Unknown
  Bacterial polypetide isolated from the Sargasso Sea
MLLRDLLAPWFPYAGEQTFQDLTLDSRAIRRGDVFLALPGHKVDGRQFIDKALAQGAAAVLVHTDNPQEQGKVIAMPAEQGVQIYFYELAKHVSVVAAVRYPVIQGQSMAIVGITGTNGKTSTSQLCAQLVTLLEGKAAVMGTLGNGLWGELVDSGNTTADAITLMRQLHEFADKGVNTCAMEVSSHGLVQGRVDAVPFDVAVFTNLTRDHLDYHGDMENYAAAKQMLFRFNALRHGLVNLDDPVGAAWLSELANVPAKMWGFSIEAHTNATFYTKNAQFNDQGVQATLVWPEGEIDIRSPLLGAFNLSNLLAALSALYLQGMDMRALAAKVPYLVPVSGRMERFTTADNITLVVDYAHTPDAIEQALNALRRHCAGELWCVFGCGGDRDKGKRPLMGRAAEQFADRIMVTSDNARSEDPNQIITDIIQGLTHPERALTEVDRVAAIKQVVAQAKSGDVILLAGKGHETYQEAAGVRHDYDERALARQLSEQR

SEQ ID NO: 194732 - protein, 396 aa, Unknown
  Bacterial polypetide isolated from the Sargasso Sea
MTIGKKNSNLIIKKHEYFGNQQIVEIEFNKKKYSFSTNLIGKIQVKNILFSILAASRSKIKFNKIIESIKDIKPIEGRLEIIGKIKNNSNVILDYAHTPDALKYTLESIKEQFGQSAISIVFGCGGDRDKDKRSIMGKIANQYCNKIFLTDDNPRYENPNKIRNQIKKKITRSKLVEIPSRKKAIKIAIKNLNSGDILLVAGKGHEIYQEYRGKKKIFSDKKSILKEINSKNLKLFKNWKANILNEKCNLSLVNKKLKINKASINSKNIKKNDIFFAIKGPKNNGNNYADEAITKGASLALVNKLGKLNKSKKVLANNTLKVLTDASKDVRKISSAKFISITGSSGKTSLKDLLSFSLNKLAPTTKSTQSFNNKFGVPLSLFNVKKNDKFAVLEVG

SEQ ID NO: 194733 - protein, 466 aa, Unknown
  Bacterial polypetide isolated from the Sargasso Sea
MLIGKLFNNIPKKFKHHEFRNLSFDSRNCKLKDIFFSIKGTNSNGNKFIKNAINNGARTIISDLNYQGLKNGVLYINSSNVRKTLSYAGSKIFIKKPKNLIGITGTNGKSSVANFYYQILSQNKKLSASIGTLGIKSKLYKKNFEITTLDPITLHHNLQIIKNKKINNVILEASSHGLKQSRLDHLRFNCSIFTNFSRDHLDYHKNYKDYLNSKLKLFKNLTKKNATVIFDNDLSISKILKKTCNVKKFKIITIGKKNSDLNINRISYFKDLQVVEFDYKKKKYSINLKLVGKLQVKNILMACLAAECSGVKFSKIISNIHKIKPVEGRMEQIKTIKNGSKVILDFAHTPDALKSSLKNLKEQYPLNNLNIVFGCGGNRDKAKRPLMGKIADKYCEKVYLTDDNPRNEIPKKIRSQIKLKISRKKLIEIPSRKNAIIKAINNLSSGDILLIAGKGHETYQQYGSTK

SEQ ID NO: 194734 - protein, 457 aa, Unknown
  Bacterial polypetide isolated from the Sargasso Sea
MSSNENLVTNSKYLRKNDIFLSLRGGAKYLTTEHVNLVKHIFLDSNENIDLPKVTKIKDLNSSYLKWIDEYFQIDHSYFNNLFITGTNGKTTTLSFLSQILENNGIKHASSGTLGTFINEQKIFDNELTTEEPVFIRNLMSKCFRSSIKNIIFEASSIGVDKKRLQGLMVNHAIFTNISRDHLDYHGSLQNYINAKFKLVSNSEVKTVAVNFDDEIISSQLKKICSKNIFKISSRNNKSDIFFKVLKSYEDGNIEYSVETPWGKFRAASKIESKFNLYNLFLTLPYYQFIHDNCEDFFAKAQDLSLPFGRLNKTEKENVYIDYAHTPKALESVCECLYKKKKNKLIIVFGAGGERDKGKRALMGEVADKYCEKIYITSDNPRNEDPQQIANMIAEGIEELDKICMELDRSRAIKNAINELSEGDILLIAGKGHENKQIIGDACLDFSDYEEVKKCMF

SEQ ID NO: 194735 - protein, 473 aa, Unknown
  Bacterial polypetide isolated from the Sargasso Sea
LKKKLKLLAINENKNNFEIISHRYDKENQLIKFKHKNLIKEINLNLIGKIQIKNILMAAIAAQKSNLNFENILKVLPELKPVEGRLEKIGTIKNNSIVILDYAHTPDALKVCLLNIKEQFPDKKLNLLFGCGGNRDQNKRAKMGKIASIYADNIYLTDDNPRSENPSRIRNDIKKGTKAKKIIEISNRSIAISEAIKNLKSGDVLVVAGKGHENIQEIDKKKIKFSDRKKILIEINKKNKSLSDQLKINIIKELSNTQKLSKSISINKARINSNEVQKNDVFFAIKGKVNDGNNFVSQSFKKKASLAIVNKIQNNLDIKRQIKVKNTLKFLTKVSNIYRKNLSTNIIAITGSCGKTTLKELLGSVLGKISITSISPKSYNNKFGVPLSLLNIKENDQYGVLEVGMDKKGEIDYLTKIIEPNVGVITNINYAHAKNFKNIKQIALAKSEIINNIKLNGSIILNADDKFFKLHRQ

SEQ ID NO: 194736 - protein, 838 aa, Unknown
  Bacterial polypetide isolated from the Sargasso Sea
GKSSVSDFYYQILLLNNKKVASIGTLGVRSNNFNLNLLNTTIDPISLGKILTKLKKRKIENVIMEASSHGLHQNRLDGLMFNSAIFTNLSQDHLDYHKNFKNYLSAKLYLFQNLIKKGGFVITDDKIPEFTKIKNISLKKELKLFTFKNKYFQIVSHNYKNEAQILKIKHKNLIHEITVNLVGKIQLKNIVMAVIAALKSNLDLKKIFSVIPRLSPVEGRFEKVGKIKNKSLVFLDYAHTPDALQTCILNIREQFSDRHISVLFGCGGDRDKGKRSKMGKIADKYADKIYLTDDNPRHERPKKIRDEIKRGIKKSQIIEISNRKEAIVKAISNLNTGNVLIVAGKGHEKIQQIGNRKVFLSDRQIILNSIKKKNFNLSKNLKLNIFNERFDQNVLSSKSVINKASINSKSIKKNDIFFAIKGKKNDGNKFVEQAIQKKASITVVNKIQKKLPRNKQASSINPLGVLTETAKIFRKNISTKIIAITGSCGKTSLKELLGNTLNKVSKTTISPKSYNNKYGVPLSLFNINQNDDYGVIEVGMDKKGEIDQLSKIIQPDISVITNINYAHAKNFKNIRQIALAKAEIIDNTKDNGYVVLNADDTFFSLHKKIAHKKKIKVLSFGMNNQYADIKLHNIVKYKKKYKICIKINKIKKDFIVLNDFQNYIYNILAALTVKSVFFNVLKLDKNIFLNFRTPEGRGDIKKIKVNKKMINLIDESYNSNPLSLKTAILNYDKIKTKNSKKYLILGDMLELGHHSKKLHESIAPVINRTNIDKVFVKGKEISSLYNKISKLKKGSVLKNNLQINDLIENNFDNDDFLMIKASNATGFNKIVKELKGTN

SEQ ID NO: 194737 - protein, 470 aa, Unknown
  Bacterial polypetide isolated from the Sargasso Sea
MSNLSKVIRVNKTYNFNKNKYFSAITSNSKFTNNKTLFVYDKNTKVKKIYLDEVLKNKTPAIISNKYIKNLKIPQFVVSNINFEIHYLLTKLHSNLPFKTLAVTGTNGKTSVVWYISKILNSLKYNNTMVGTLGHFVNGKKINDINLTTPAYEELFRYGSSNKKEKNIFIFEASSHALEQNRLRNYPINIAAITNISKDHLDYHKTFSNYKKSKIKLFSNHLVNSGFAIINSRLNILSELKKTLIKKNVKFKYFGNKNIKLIKINDFVYLNINNTKYKLENLKLKTNIELENLECAITCCLALNISQSKIIRVLSKVTNPSGRLQTIEYKKKKSKIIIDYAHTPDALKKILLAYKIKKMKPSILFGCGGDRDKSKRKSMALIANKYADKIYITDDNPRNENPSKIRKNILKYCSRAMEVSDRRKAIKLAIKELKMNEILIVAGKGHEKFQVLKNKTIKFDDFTVVKQLLN

SEQ ID NO: 194738 - protein, 643 aa, Unknown
  Bacterial polypetide isolated from the Sargasso Sea
PRKILAEISNKIYSKKPNNIVAVTGTNGKSSVANFYLQICELNNIKSASIGTLGVKGKSINIKTTNTTLDPVNLNKILEKLKKRKINNVILEASSHGLHQQRLNGIRFDTGIFTNFSRDHLDYHKSYTRYLDSKLILFKKLLKKKGLVVFDNEISEAIKLKNICRNKKLKQAILGDNEGFKILSHTFIKNNQIVKFKFNNKEYSFETKLIGNVQIKNLMMAIIAASRLIPISNIVDKIKKIKPVNGRFEMIGQIKNNSRVILDYSHTPEALRTCIKNIKKQFSFSRIFLVFGCGGDRDKIKRSIMGRIANELCDKIFLTDDNPRNEDPNKIRNQIKENINKKRLIEISSRESAIKKSIFELKSGDVLIVAGKGHENYQQYKKKIKFSDKSLIKKYIILKNNKLSSEWKTNILKENLKNLKLSNKLNIQNASINSNTISKNSIFFGIKGKKLNGNKFANAAIKNGAVLSIIDKNFSKKNKKKIKVKNSLKTFSKVSKIIREVSNIQAIGITGSAGKTSFKDLLGNSLVQLRQTTYSKKSFNNKFGVPLSLFQIKKKHEFGVFEIGMDKHGEIESLTKLVRPNVAVITNISHAHIKNFKNINDIAKAKSEIIDQIKEEGIIVLNKDDKFYNYFAKKAKKRNIKII

SEQ ID NO: 194739 - protein, 463 aa, Unknown
  Bacterial polypetide isolated from the Sargasso Sea
MDSKITGIQLDSRLVNNGDLFIACFGRNHDARNFIDQAIRKGCGAVLAEFTSGMNRLEVRENVPIVGVENLSKKVSEIANRFYHHPSSQLKVIGITGTNGKTSCSKFIATALQKLGYRCGMMGTLGCGVPDALERTLLTTPDAVFAQRILAQMVSKNCEHVAMEVSSVGLDQKRVEAIRFDTAVFTNLTRDHLDYHKTMSEYAESKRELFQWPGLKSAVLNLDDEFSLSLINSIRKEVEIFTYSVSNRNASVYSESLTFSKSGYSALVNTPFGCKKLSGELLGRFNFSNVLAVIATIISLMARENSGSIDLAKIIDSISSLSSADGRMEIVNSPNEITTIVDYAHTPDSLKNALETLKCHSKGEIWCVFGCGGNRDEGKRPIMGEIAELFADHIVITDDNPRNEPGDRIVSQILSGIQTHHNVSIIRNRAKAISHVIASASPADLILIAGKGHETYQEISGRR

SEQ ID NO: 194740 - protein, 475 aa, Unknown
  Bacterial polypetide isolated from the Sargasso Sea
MISLKDIKDDFPEDVTINGVTCDSREVKPGYIFVAIQGEKNRGEDFVYEAISNGASAIVTSENSKLILDIPLIKDKNPRRYLSHISSTIYKNSPEIVCAITGTNGKTSTTNFLQQIWSLMGLNSSSIGTLGIIGNEEIQDTNITTPDPVLLHQTLDRLSSENITHLALEASSHGLSQHRIDSVKVRAAGFTNISQDHLDYHKTMKDYFDAKKRLFTEILPKDSYSVICIDTDEGRELSSIIKNSGKGVIEVGESANALNLRRIATTETGMEMIFQYSGRQFSIPLKVEGYFQAMNILCASGLAIASGSPSEKVFEHIKDLRPIPGRLEFCGLNKREAKIYVDYAHTPDALTAVLFSLRELTEGRLIIVFGCGGGRDKFKRPIMGEIAENFADIIIITDDNPRNEDPKDIRESILKSCPSGIEIPGRKDAIIKAIDLGKKGDSVLIAGKGHEKFQIIGSKKTPFSDQETIREVIGN

SEQ ID NO: 194741 - protein, 294 aa, Unknown
  Bacterial polypetide isolated from the Sargasso Sea
GLNFDLAIFTNITHDHLNYHKTFKNYLNVKKRFFDDLVKDSISLINVDDKNANYIVQNTISKVYRLSLLKDADYKLKIIENSFTGLMIKVDNELINTQLIGKFNAYNLLTVLSASKLLNLESKKILVGLSMLKNPDGRFDVVQMNKIIGIVDYAHTPDALLNVLETISDIKNNENSIITVVGCGGGRDKEKRFKMGRIASKYSNKVIFTSDNPRDEDPKLIIDDMILGVDDEDKKKVINIVDRKKAIERASKIVKPNDILLIAGKGHENYQIIKSKKIEFNDKNILKETLKMAV

SEQ ID NO: 194742 - protein, 226 aa, Unknown
  Bacterial polypetide isolated from the Sargasso Sea
MRSIKLHKLLDLVGIIPSLDLIDHEINNISFNSKEVQKGTLFLGMPGLNVDGGKFCIEAIENGAEAAIIGSAAKERIGSIDRERILVIEDNLDYIFGQIVAEFWNRPSRKLKLIGVTGTNGKTTITFLLEYLLKKLGKKTALFGTLFNRWPGFSEVASHTTDFADKLQKKLNAAVEAESEFAILEVSSHSIAQKRISGCEFEAAIFTNLTQDHLDYHSDMKSYFQK

SEQ ID NO: 194743 - protein, 481 aa, Unknown
  Bacterial polypetide isolated from the Sargasso Sea
MKHLPQIVHNLIPDNTNLPDTPIHGLTMNSNNVNEGDIFIAVPGINADGHDFIHQAIDLGASAIISNGRDVGKLPVPQIKVADPRRAASIVASEFYGHPSKHLTVIGITGTNGKTTTASILKSILNQDGQKVAQIGTLGVIADGLDHLDTLTTPDPITLHKLFSELNDEGFSHVVMEVSSHALDQYRVADVEFNIAVFTNLAPEHLDYHGTMESYYKAKLRLFTMLAIDATAVVNISDGFGKRILKKSSAPVITFSNSDQNSIYYQSKNISITGITGKIIAGHDSYYIKSKLTGDFNCENILAAVSVAHALGQSKIDIEKGIQNCSLVPGRMEIYGIASGANVIVDYAHTPDSYEKVLYTLKNIIPGSSNMYVVFGAGGDRDAKKRPEMAKIAEKFANHCFITPDNPRTEDPENISNQIATGFKGNSFTIFTDRGKGLRAAIERADNEDIIVVLGKGREEYQEIKGKKVFYSDIQIIKEYK

SEQ ID NO: 194744 - protein, 113 aa, Unknown
  Bacterial polypetide isolated from the Sargasso Sea
VFGCGGDRDKGKRPLMGAIAERLADQVIITADNPRTEDVMAICLDIAAGCAQQQYQLSPDRKTAIRTALEQAKAGDLVLIAGKGHEDYQIIGHEVLPYDERAFVLQLVTETAL

SEQ ID NO: 194745 - protein, 473 aa, Unknown
  Bacterial polypetide isolated from the Sargasso Sea
MLLKKLIKNLSPEIGATQINGICFDSRKAKKGDLFIAIKGEKHNGNKFVSQAVTKGVKVVIHSEKIKKNTKTKFIKFADTRDILAKISSKFFKNKPKNIIAVTGTNGKTSISDFFYQIFKLQNLKSGFIGTLGCRKDKLLKKRNLTSLDSLTLNKDLNEMSRIKINNVIIEASSHGLKQKRLNFLKIKAGIFTNLSHDHLDYHKNMKNYFESKLLLFKDLLKKRGTVITDTDIKQFKEIKKIQKKRKLKMLNIGSKSNTFDILDHKIFENFQYLKIKYKNKIYKLRINLYGSIQIKNLFMAILASKVCGLKVENILNKIDKIESVEGRLQLKRILTNNSKIFLDYAHTPEALEKAILSLREHFNKKISVIFGCGGERDKSKRKLMGKIASRYCDKIYITDDNPRNENAKKIRKDIIKGINHSFVREIGNRKKAIIYALKNSDPYEIILVAGKGHETYQELGNKKIILSDKNIY

SEQ ID NO: 194746 - protein, 407 aa, Unknown
  Bacterial polypetide isolated from the Sargasso Sea
IKNKILFLNSKNIRKLLAETSFRINNKIPKNLVAVTGTNGKSSISDFYFQILKLNKKKVASIGTLGIKTNNSFKSLQNTTIDPLKLSHIFKNLKRKKIENVVMEASSHGLKQHRLDGLFFDVGIFSNLSHDHLDYHKNFKDYFHSKLYLFKKLIKKNGCVITDQSIDQFSKIKNICKNRKLKLNFVSSKNDNFQIKVKSHKYYNESQLVEIVYKKLKFKFKLNLIGKVQLKNILMAVIAAEKSGIKLKNIFNKLNKIKPIYGRLDKIGKINNNSKIILDYAHTPDALKTVLENLKNQFFNRKVSIVFGCGGGRDQKKRAPMGKIANLYCDKIYLTDDNPREENPTLIRNQIKRNINKKKLFEIADRKKAIDEAVLNLKSGEILLVAGKGHEKTQTYKKKIRHFSDKE

SEQ ID NO: 194747 - protein, 349 aa, Unknown
  Bacterial polypetide isolated from the Sargasso Sea
MRLGDHFQQVKKKYHKTFFSGICFDHRKIKKNYIFFAIKGNNLDGNNFIPSVIKKGCKIIVTEKNFDEWKNGVLFIKTKNIRKLLAKISFSIFKKKPNNLIAVTGTNGKSSVSDFYYQILLLNNKKVASIGTLGVRSNNFNLNLFNTTIDPINLGKILNKLKKRKIENVIMEASSHGLHQNRLDGLLFNSAIFTNLSQDHLDYHKNFKNYLNAKLYLFQNLIKKGGFIVTDDQIPEFKKIKNISLKKKLKLFTLKNKYFQILSHNYKNEAQILKIKHENLIHEIRVNLVGKIQLKNILMAVIAAFKSNLELKKIFSVIPRLSSVEGRFEKIRKIKNKSLVFLDYAHTPG

SEQ ID NO: 194748 - protein, 386 aa, Unknown
  Bacterial polypetide isolated from the Sargasso Sea
IKLKNSIKKVKLNLIGKIQLKNLIMAIIAAEKSNINIMKILKVIPKLKSVEGRFEKVGEIKNQSKVIIDYAHTPDALKTCILNLKEQFPDKKIILLFGCGGNRDQNKRSKMGKIADDLSHKIYLTDDNPRLEKPNKIRKDIKKGIKRKKVIEISNRADAISNAIKNLNTGEILLVAGKGHEKTQDIGKRKINFSDKKIILDTIKIKNKNLSKNLKFEIIKEVSNFKKFSSSIVLKKARINSKEVKKDDIFFAIKGKKNDGNKFVQQSFKKKASLAVVNKIQRNCSIRKQIKVQNTLKFLTEISKILRKNIKTKIIAITGSCGKTTLKELLGNSLKKIDKTSFSPKSYNNKFGVPLSLFNLNQNDKYGVLEIGMDKKGEINNLSRII

SEQ ID NO: 194749 - protein, 406 aa, Unknown
  Bacterial polypetide isolated from the Sargasso Sea
FIISRFYGNPSKNIKVTGVTGTNGKTTVSYLIAYVMHELENNSAFIGTLGYGLFGQIETGRTTTPDPVKLQSLFSLWENQVDSVAMEVSSHALDQGRTEGTEFNTAVFTNFSRDHLDYHKTVDDYINAKFSLFEKTGLQNAVVNIGDPYGVKLVEKLSEDLNVFAYSTKKTNLEFYKRQNISFIYCEKIETESFRKRIIEVQSPWGKATIKINLLGEFNIENVLAAFTVLCLSGASTEAVAAKLSDFNGLPGRMEVFSSEDKPLIVVDYAHTPDALEKALTSLKPYCKGELFCVFGCGGGRDSGKRAQMGSIAESLSDKIILTNDNPRDELPEKIFEDILKGIENKSKVIIKEDRSDALISSFLEAKKDDVILLAGKGHEITQKIGSITIPFSDRELAKRLTEEHT

SEQ ID NO: 194750 - protein, 385 aa, Unknown
  Bacterial polypetide isolated from the Sargasso Sea
MDVKKICNHSSNATHGSLFIAVKGFAKDGHDYINDAIEKGASAIISDSEVLNTISVPNIKVKDSRLALSHIASRYYNYPSKELTIVGITGTNGKTTTASIFYSILKANGCNSAQLGTMGTITDSYKSTKTLTTLDPIDLHQKFRDFVNDGITHVVMEVSSHALDQFRVADVDFDIGVFTNLAPEHLDYHINMENYFSAKAKLFKMLNSSNTAIVNYEDKMAPNIVKISKAKIISFSKDRNTTVYLSELSHDINGIRFIINTKETKIPINSHLIGEYNIENILCAVSIALSIGIEPCIIQKGVNQCDIIPGRMERFNLNNGAKAIIDYAHTPDAYEKVLSTIQNIKLEKSKIHVLFGCGGDRDREKRSKMGQIAERYSDKMWITPE

SEQ ID NO: 194751 - protein, 401 aa, Unknown
  Bacterial polypetide isolated from the Sargasso Sea
KKPNNLIAVTGTNGKSSVSDFYYQILLLNNKKVASIGTLGVRSNNFNLNLFNTTIDPINLGKILNKLKKRKIENVIMEASSHGLHQNRLDGLLFNSAIFTNLSQDHLDYHKNFKNYLNAKLYLFQNLIKKGGFIVTDDQIPEFKKIKNISLKKKLKLFTLKNKYFQILSHNYKNEAQILKIKHENLIHEIRVNLVGKIQLKNILMAVIAAFKSNLELKKIFSVIPRLSSVEGRFEKIGKIKNKSLVFLDYAHTPDALQTCILNIREQFTDKHISVLFGCGGDRDKGKRSKMGKIADKYADKIYLTDDNPRYERPKKIRDEIKKGIKKRQIIEISNRKEAIVKAINNLNTGDILIVAGKGHEKIQQIGNRKVFLSDRQIILNSIKKKNFNLSKNLKLNILNE

SEQ ID NO: 194752 - protein, 485 aa, Unknown
  Bacterial polypetide isolated from the Sargasso Sea
MRPFGITAPALALTDIQLDSRRVGPGCLFVAIRGHQVDGRRFIEQAVAQGATAVLFEEDGEFVAPALSVPCLGIPDLPARLSELAGYCYDQPASKLDLVGITGTNGKSTTALLVANWRTLLGGKAGVMGTIGNGLFGELVEAENTTGSAVQVQANLAALQAQGADLVAMEVSSHGLVQHRVAALPFAAAVFTNLSRDHLDYHGTMEAYGAAKEELLKLVDEPCAVLNADDRLGRQWLAAYPAAVAFSVHGPVAGHPGRQLTAQDPHFHQQGFRTQINSSWGNGVLSAPLLGRFNVSNVLAAMGAMLVLGYDFDELLASAPQLQPVTGRMECFGGGKAPLAVVDYAHTPDALEKALQALRVHCEGRLWCLVGCGGDRDRGKRPMMAAMAELHADRVILTDDNPRTEEPARIMADMVAGLRDPGAVQIEHDRTKAIQLALSQASKQDIILVAGKGHEDYQIIGTDKRHYSDRETVAAALHTLLESFT

SEQ ID NO: 194753 - protein, 356 aa, Unknown
  Bacterial polypetide isolated from the Sargasso Sea
MLLGKVFKNINQKYKSIKFKEIKFNSKECTYNDIFFAIIGNNSNGNNYINDAINNGAKIIISNLKFQGFDKNKILFIHSKDPRESLAQAASSIYLKKPKNIIAVTGTNGKTSIANFYYQILTLNNKKSATIGTLGVLSKKLNLITNNTTVDPINIHKILKKLHELNVNDVILEASSHGLKQHRLNYINFKSALFTNLSRDHLDYHKKFEDYFNSKMILFNRLLKKRGNIIFDDEIAQATQLNKISKKRKLKKYTYGKDKSFIKILNVQKIDNKKKIDFLFNKKAYSFQTELIGEIQIKNLLFAIVAAYLSKIPIKNILKSIHKVKPISGRLEKIGKIKNKSNVILDYAHTPEALKT

SEQ ID NO: 194754 - protein, 358 aa, Unknown
  Bacterial polypetide isolated from the Sargasso Sea
MRKLQKYTTTFAVPLQAKLREAVQAGVEYGAMEVSSHALSQNRVAGCDFNGAIFTNLSRDHLDYHDSMESYFEAKASLFRSHLIDDDGPRSVINIDDKWGSILAKELNKKCWTCSLKENSQTREKPDLYISNLQIMQDGYMGKLHTPFGVGNFISPLIGEFNLMNMLQAVGILVQRGLPLNDLLEALNKFPGVPGRMQLINMDGFKVKDGYPLVIVDYAHTPDGLQNALIASRSLTKKRLICVFGCGGDRDKGKRSKMGEVADKFADYIVVTSDNPRQEDPIEIIKDIEKGITIDSEISVEPERSIAIQVAIAKAKKNDVVLIAGKGHEDYQILKDQTIYFDDREQARKALSLRTDVI

SEQ ID NO: 194755 - protein, 257 aa, Unknown
  Bacterial polypetide isolated from the Sargasso Sea
MQHLRINSSEVQKGDVFLALPGTKTHGNQFIEKALAAGAVVVLTDTQSALNDERIVVVPKLVELLSVLAAAFYPHQAQQLVGITGTNGKSSTAIFVNQLAVLLQQQAAVIGTLGYGDYRSLTPLNNTTPHLVDIHRILSTEAAKGCSLVAMEVSSHALVQQRVAGLQFEVAVFTNLTRDHLDYHGTMQAYGEAKALLFKADLAKKAVINVSDDFGRQLATDCTLPVLAYGQLKDCQGYSEYLAYDQLEITPLGYQFR

SEQ ID NO: 194756 - protein, 300 aa, Unknown
  Bacterial polypetide isolated from the Sargasso Sea
MERKGHWKYSDPEITGVETSSLRIEKGYIFVAKHSITQTSHGAIFSNQAFKKGASLIITDLEGYEYAVTKGLNLDIPFLLVENVELTLGNILENIYPDKPEFIMGVTGTNGKTSVVNFSQQLIEQKNKSCVTIGTLGVDGVLSLRTENTTPDQTFIFRILQMAKSKGANYALLEVSSHSIVQRRIKGVVFKVFCFTNLSQDHLDYHNDMETYFQSKLSILDTLSLNTKIIVNIDDKYGELFYEKAKSLGFQIETIGFSEKANVKLRAHQDTSDIQSVEIIKDGLLHRFKTLLIGKFQANK

SEQ ID NO: 194757 - protein, 575 aa, Unknown
  Bacterial polypetide isolated from the Sargasso Sea
IKNGARIIVSNLNFSGFSSKKILYIHDKNPRKLLSDVSSKIYKLKPKNIIAITGTNGKTSVANFYQQILNFNNKKVASIGTLGVLSKKIRIKTNNTSIDPISIHRILQKIKKLKIDNVILEASSHGLKQYRLNNIKFKTALFTNLSRDHLDYHKTMKNYLNSKLYLFDKLLNPKGNIIFDEKIKQTDKLNIISKKRNLKKYTFGNSKSFIKIVNIKKINEHNKVDFVINKKNYSFKTSLIGRIQIKNLMFAIIAAYLSNLKINKIVRSIHKIKPIKGRFEKIGYLKNNASVILDYAHTPNALETAMLNLKEEFPLSKISLVFGCGGNRDKDKRPIMGSIAKKYCENIYLTDDNPRSENPKLIRDQIKKGLHNKKIYEIPSRSKAILYAINRLSSGDVLIVAGKGHENYQAYKKIKFFSDKLEILKAISIKNNHLSKYIKTNILKEELDEQIVNKHKTINSVSINSKAVNKNSIFIGIKGKKFNGGKFSNEAIKRGAVLAISNKNNSDSKIVFKKNPLQFLNKLGEIYRKTLNPNTIAITGSAGKTSVKELIGFCLNKLEKTYFSKNSYNNKFGVP

SEQ ID NO: 194758 - protein, 485 aa, Unknown
  Bacterial polypetide isolated from the Sargasso Sea
MVGVETIDSLGNLNIPIKHIAFDSRKVHPGALFVAVPGDKHNGEAFIKDAWVKGAVAFVTQSPLKSLSLPSMEGRGFTALYVKDSRKALSKISANFYNQPSEYLNLTGVTGTNGKTTLTYILEALSRADGRQTGVIGTINCHFGETIIPAVMTTPESLDLNQSIRQMVDAGISDCFLEVSSHALSQKRVYDMSFEVGIFTNLSRDHLDFHENMNEYKNSKAKLFRENRVKVPVINIDDPTGKEFAVEFNRGVISIGKNRAADFSAEDITLEATGSRFTIKTPNGSMQVRTNLLGEHNVYNLLSAAAAASAQGISLDVIQNVFQKIPTIPGRFESVNNGQNFSVLVDYAHTEDALSKSITAAKAFTKGKVIVVFGCGGDRDRGKRKEMGQVALKNADFSVITSDNPRTEDPEQIIADICKDITDTESYKTITNRREAIGHAIGRAEKNDLVLIAGKGHEDYQILGTKKEHFDDREVAKEFLGKRTH

SEQ ID NO: 194759 - protein, 420 aa, Unknown
  Bacterial polypetide isolated from the Sargasso Sea
VVAHKDYTEKLAIPLIKVKNTRKKVSQIAAEFYNHPTKRMNVVGITGTNGKTTTASLLTSILQSAGNKTAQIGTLGFIAEGNSSEKGLTTPDSITLHQSLNNLCDDGFTHIVMEASSHALDQYRIHDIDFNFTVFTNLYPEHLDYHGTINNYFEAKVKLFTSYPNSSAAIINIDNEYGKSMASRSTAPVINTSMFSQADISFLDYKISLEGIEGIIKAEDKTYNIKSSMIGSFNAENILCATATGNAMGIEKSAIENGISLCKSVPGRMETFSIRSGAMAIVDYAHTPDAYEKVLSTIKELMIDSKANIYIVFGCGGNRDTLKRSQMGTIAEKYATHSFITPDNPRNEKISEINKEIISGFKNNRFDLFVDREAGLRAALNIALNNDIVIVLGKGREEYQEIEGKFIPYSDIKIISEYCT

SEQ ID NO: 194760 - protein, 397 aa, Unknown
  Bacterial polypetide isolated from the Sargasso Sea
MPELVDLSNFVDCEVSSLHLDSREVKDGGVFFAVNGINQNGMDFIQEAKSKGAKLIISEELVEDSSVIHCSNLKKLLGKFTSRFYSNPSEELTTFCVTGTNGKTTAVEAYSSMCSSLGKKCGYLSTVGKSIDGVKVKDPYALTTPDIISLNTSLYEMLLNGATHAAFEASSHGLDQGRLSGVSVDYAVLTSFSQDHLDYHKSIESYAKAKSILFKDLNPMTSIVQIDSEFGRNLYQDLLNEGAEVFSISLEKESDYLASFRKNKNSLEVSLKSPYGVSEFDLNTVSRFIASNVICAMVALNLEGIKIDKIAECASNIAFPAGRMESINIGKDICYVDYAHTPEALKHSLKEIKNFHGGEIWCIFGCGGNRDKQKRPIMGQIAEHYSDHVVITDDNPR

SEQ ID NO: 194761 - protein, 675 aa, Unknown
  Bacterial polypetide isolated from the Sargasso Sea
MRLGDHFQQIKKKYHKTFFSGICFDHRKTKKNYIFFAIKGNNLDGNNFIPSVIKKGCKIIVTEKNFDEWKNGVLFIKTKNIRKLLAQISFSIFKKKPNNLIAVTGTNGKSSVSDFYYQILNLNNKKVASIGTLGVRSNNFNLNLFNTTIDPIYLGKILNKLKKKKIENVIMEASSHGLHQNRLDGLLFNSAIFTNLSQDHLDYHKNFKNYLNAKLYLFQNLIKKDGFVITDDKIPEFKKIKNISLKKKLKLFTLKNKYFQILSHNYKNEAQILKIKHGNLIHEIRVNLVGKIQLKNILMAAIAASKSNLDLKKIFSVIPRLSPVEGRLEKVGKIKNKSLVFLDYAHTPDALQTCILNIREQFPDKHISVLFGCGGDRDKGKRSKMGKIADKYGDKIYITDDNPRHEVPKKIRDEIKRGIKKNQIIEISNRKEAIVKAINNLNTGDILIVAGKGHEKIQQIGNRKVFLSDRQIILNSIKKKNLNLSKNLKINIFNERFDQNVLSSKSAINKASINSKRLKKNDIFFAIKGKKNDGNKFVGQAIQKKASITVVNKIQKKLPRNKQATSINPLGLLTKTAKIFRKNISTNIIAITGSCGKTSLKELLGNTLNKISKTTISPKSYNNKYGVPLSLFNINQNDDYGVIEVGMDKKGEIDQLSKIIQPDISVITNINYAHA

SEQ ID NO: 194762 - protein, 484 aa, Unknown
  Bacterial polypetide isolated from the Sargasso Sea
MKNLKEILFKVTVDAIYGDTSTSVKDICFSSKEVDRDSLFVAINGYNTDGHNFIVEAINNGASTIVCEVLPKDFKKLKSVFVKVTCSKSALSIISSNFYDNPSSKIDLIGITGTNGKTTISSLLFDLFNRFSINSGLISTINIKYGDQDIDSTNTTPDSKSINYYLAEMIKSNVKICFMEVSSHGIDQKRIEGLSFKGIIFTNLTHDHIDYHKSFANYRDTKKKIFDSLPNSSFSLINSDDRNSKYIIQNSKSKKYTYGIKNKSDFNSGILEIQLDGMLLNIDKNEIWTKLIGDFNAYNILAIYSLGKIYELDTIRLLKTISQLENVQGRLQSFITKDRVTVIIDYAHTPDALENVLKTINKIRSVKQRLITVVGCGGNRDTKKRPLIGNLVSELSSYVIFTSDNPRSENPNEILKGVLSGVSKTNFKKTNIIVKRDKAIEAAHKYSREGDIVLIAGKGHENYQEINGEKIPFDDFKIAKQIFK

SEQ ID NO: 194763 - protein, 501 aa, Unknown
  Bacterial polypetide isolated from the Sargasso Sea
LDYHKTYKDYLNSKLILFKKLMKKKSFIIFDNDLKISPILNKIAKYNNLKNLSLGSKNSKLKLIDQRFINLNQKVKFSYNGKIFNFTTDLIGEIQIKNLLMSILAAHKSNISLKKITNCIKKIKPVPGRLEKIGKLKNNSIVILDYAHTPDALKICLENLKNQFRLRKINLVFGCGGERDRPKRKIMGAIANQYCNKIYLTDDNPRKENPKKIRNEIKKKINKNKLIEIPSRKLAIEKAILNIQSDEIVVVAGKGHERYQEYNIKKIFSDKDCIIKSIKKKNLNLKKDWKVNILEECLEKKLNYKIKINKTSINSKKIKKNDIFFAIRGKKLNGSKFAKEAIKNGASLAIVDNLHGEKNIKKIKVANVLKFFSKSSNKIRISSDIMAIAITGSAGKTSLKELLGQSLIKIDKVTYSQKSFNNKYGVPLSLFNINKNHKFGIFEIGMDKKGEIDYLSKIIKPNIGVITNISYAHSKNFKNLFGIAKAKAEIINNIVENGSII

SEQ ID NO: 194764 - protein, 503 aa, Unknown
  Bacterial polypetide isolated from the Sargasso Sea
NFINDAIKRGARIIVSNKFKTGINKGVLYIKVSDPRLALSSFANKYYNKKPNNIIAVTGTNGKSSIVNFYYQILKLNKKRVASIGTLGVKSNGVNLKLNNTTVDAITINKILANLKKKKIENVILEASSHGLHQKRLHGIKFSTSIFTNLSRDHLDYHKNYKNYFNSKLILFNELTNKNGNLIFDNDLKYSQIFKKIAKRKKLNLLNIGTSDSHLKINSIKILNNYQHIKFTFQNKEYQFKTSLIGKIQIKNLMMAIAAAIKSNLKIDDIVKKLKYIKPAKGRLEIIGTTKDNSIFILDYAHTPEALKTSIENIKEQFGLRKINIVFGCGGERDKEKRPIMGKIANKLCNYIYLTDDNPRSENPENIRASIKKSILPSKMIEIPSRKLAIKKAILNSKSDEVLIIAGKGHENTQEYIKKNKFSDKDNIKKSIILKNRILSNDWKLNILKEIVNNKKLDRLKNLKISTNSKEQNKGKIFLGIKGKSFNGNDFADEALKNGAKLA

SEQ ID NO: 194765 - protein, 284 aa, Unknown
  Bacterial polypetide isolated from the Sargasso Sea
TNLTHDHIDYHKTFKDYRDTKKEVFDTLDKNSFALINIDDKNGKFMTQNSSARVYTYSIKSKSNFSCRIVEQQLNGMLLNIENSEIWTKLIGEFNAYNVLAIYSVGKIYEIDSLNLLTNISELNSVQGRLQSFLSNSNVTVIIDYAHTPDAVENVLSTINKIKKSNQNLITVIGCGGDRDKAKRSMIGKICSDLSYKVIFTSDNPRSENPESIIKDIVSGVSNYNNNKIMVEIERSKAIEEAKKNSEEGDIVLIAGKGHEDYQILKNKVIKFDDYKIAKKIFNK

SEQ ID NO: 194766 - protein, 395 aa, Unknown
  Bacterial polypetide isolated from the Sargasso Sea
TGTNGKTTITFLLEYLLKKSGKKTALFGTLFNRWPGFSEVASHTTDFADKLQKKLNAAVEAESEFAILEVSSHSIAQKRISGCEFEAAIFTNLTQDHLDYHSDMESYFQTKRKLFFPPYLIEKDGISVLNHDDPWISKLSSDLDKRSSLVSTKVTESEFKNHDFFFVTDKKFTENGSTCIFHTPKEKIQLFVPLVGEFNLMNAIQAITILYKLNFSLKDLSNSIRSFPGAPGRMEKIEIDNDDVSRSLPTVIVDYAHTPDGLKKVLQSIKKLCKGKLITVFGCGGDRDLGKRPLMGSIAEEFSDQLFITSDNPRSEEPQKIVNDILMGIKKREKITIEIDRFKAINKSIKFANKEDIVLIAGKGHEDYQILNDKVINFDDRKIAYELLKEKRKSQ

SEQ ID NO: 194767 - protein, 128 aa, Unknown
  Bacterial polypetide isolated from the Sargasso Sea
MTDRDVWSRARADLQKDPPTSCSAGPRSDDDIFHWDATIIGPSESPYQGGLFFVAIHFPPDYPFKPPKVNFKTKVYHPNVNSQGSICLDILKEQWSPALTISKVLLSICSLLTDPNPDDPLVPEIAHV

SEQ ID NO: 194768 - protein, 98 aa, Unknown
  Bacterial polypetide isolated from the Sargasso Sea
MASKRINKELQDLGKDPPANCSAGPVGDDLFHWQATIMGPPDSPYQGGVFFLNINFPPDYPFKPPKVSFQTKIYHPNVNSNGSICLDILNAQWSPALT

SEQ ID NO: 194769 - protein, 227 aa, Unknown
  Bacterial polypetide isolated from the Sargasso Sea
MPMAFWQAKCGVTEGEDAKEKISAGYFRLIRNYYRFGWVIPYLFGASPAICSSFLQGKPTTLPFEKTDCGMYYLPYATSLRLSDLGYTNKSQSNLGITFNDLHEYVAGLKRAIKTPSEEYAAIGLEKDGKRLQINSNVLQIENELYAPIRPKRVTRRGETPSDALLRGGIEYIEVRSLDINPFSPIGVDEQQVRFLDLFMVWCALADAPEMSSDELLCTRKNWNRVI

SEQ ID NO: 194770 - protein, 297 aa, Unknown
  Bacterial polypetide isolated from the Sargasso Sea
NFSLPEALWQLQQQAEADTRSARDYQSARYIALIRNFRRYSWLLMYLFGASPALHKGFMRGRPHQLQELDAETLYLPYATSLRMSDLGYQSTAQSGLTPCYNDLASYTDSLRQAVGTPYPPYVEIGAKKDGEWLQLNTNILQIENEYYSNIRPKRVTYSGERPIQALMARGVQYVEVRCLDINPFLPLGIDLSESRFLDAFLLFCALADSPLLESGECHACTDNFLAVVKEGRRPGLELQRNGQPVALQAWADELLEQIRPLAELLDQNHGDNAHSLALQAQQAKVVDPSLTPSAQV

SEQ ID NO: 194771 - protein, 260 aa, Unknown
  Bacterial polypetide isolated from the Sargasso Sea
MAALGTTSFKTAIKGIRRGIERETLRIKPDGQLAQTDHAKALGSALTHPLITTDFSESLLEFITPAQTDIEVTLKQLTDIHKFALSHIGEERLWAGSMPCYIDNQDEIRLAQYGSSNVGTMKTVYRQGLKNRYGSMMQAISGVHFNFSIPQEFWQQYQKLLDDTGSLQDFISAQYLHLIRNYKRYVWLVVYLFGASPAMCSSFLQGREPKYKFQTLGKGSLYLPYATSLRMSDLGYTNSAQSSLNISYNNLPDYIQGLRQ

SEQ ID NO: 194772 - protein, 332 aa, Unknown
  Bacterial polypetide isolated from the Sargasso Sea
MAALGTTSFQTAIKGIRRGIERETLRINPDGQLAQTGHAKALGSALTHPLITTDFSESLLEFITPAQTDIDVTLKQLTDIHKFALSHIGEERLWAGSMPCYIGHQDEIQLAQYGSSNVGTMKTVYRQGLKNRYGSMMQAISGVHFNFSIPQEFWQQYQQLLGDTGSLQDFISAQYLHLIRNYKRYVWLVVYLFGASPAMCSSFLQGREPKYKFQTLGKGSLYLPYATSLRMSDLGYTNSAQSSLNISYNNLPDYIKGLRQAISTPSAEYANIGIKVDGQYQQLNSNILQIENEFYSTIRPKRTTQSGERPTCALKRRGVEYIEVRALDVNPI

SEQ ID NO: 194773 - protein, 303 aa, Unknown
  Bacterial polypetide isolated from the Sargasso Sea
MTTQDITNALNALSTGEHQNAIKGIKRGIERESLRIQSNGAISPTGHPKGVGSALTNGHITTDFSESLLEFITPVSESSTQTLKQLRDLQKFTLENMGDELLWPISMPCFINHQDDIVLAQFGSSNIGKMKTLYREGLKNRYGSMMQAIAGVHFNISFPESLWKSLHSLKQSNTSLQDFISDGYLSLIRNFKRELWLISYMFGASPALCNSFLQGRKTDLPFKKLGKGTLYLEVGTALRLGNLGYTNSAQSSLRVMYNSLDEYVAGLKKAINTPSDIYSDIDDYTSEQPKQLNKNILQIENEF

SEQ ID NO: 194774 - protein, 560 aa, Unknown
  Bacterial polypetide isolated from the Sargasso Sea
MDRFRFILRRILKDKPQNKGLTVNLVAIANHQSEKRKLKPFNELVQHFSDAQGRAALLGMQRGIEREALRIDESGYLALDGHPIELGSALTHSRITTDYSEALLEFITPVNNQVEPLLQGLTQTHAYSVRHLHGQRLWPVSMPCYVKDEANIPIARYGTSNTGKMKTLYRKGLTYRYGALMQIISGVHFNFSVSRELWQRLYELSDKGLSFEDFISESYFGLIRNYRRLVWVLPYLFGASPALCSSFIKGQKTDLRFEKSGRGTLYLPYATSLRMSDLGYTNKEQEDLNISYNSLPEYLAGVRAAIKMPSANFANIGVKVDGEYRQLNANVLQIENEFYSPIRAKRVTKSGEKPSEALARAGVEYIEVRALDVNPFSPIGIEASQVRFLDLFLLYCLLTDSPKSDAAEEARLSANLKSVVLEGRKLGLELMTDSGTRPLQTWLLDLFEHLDSLAKLLDGDKHDYQVALAHWREAVNDPHKTLSGQVLQQLVTKGQDHGQWVMSLAQQYHQYFMDYPLSAEVVSDYQAEAQASLNKQADIEAAQSAVSFDDYLTDYFGAPA

SEQ ID NO: 194775 - protein, 303 aa, Unknown
  Bacterial polypetide isolated from the Sargasso Sea
PMESIDIAGDSSFALALEAQERGHKLFHYEPKNLSLSQLKPVAKLRSLTVQNITGNHFSLGEQRAADLKTDIDVILMRQDPPFDMSYITATHILEHVHPHTLVINNPTNVRNTPEKLFVTHFENVMPPTLITSDEEEIFGFRKEFKDIIVKPLFGNGGAGVFHIKPDDENLSSLIELHKTFYREPLMIQEYVPAVRQGDKRIILIDGTPVGAVNRVPAKGEARSNMHVGGKPMQCELTGRDREICEIIGPSLKEKGLLFVGIDVIGNYLTEINVTSPTGIQELSRFEDTNIASLIWDAIEKKL

SEQ ID NO: 194776 - protein, 120 aa, Unknown
  Bacterial polypetide isolated from the Sargasso Sea
GQAYLPAIKDGDKRILMIDGEPVDYCLARIPAAGETRGNLAAGGRGEARPLSEKDRWIAAQVGPTLREKGLLFVGLDVIGENLTEINVTSPTCIREIDNAFGTNIGEMLMAAIERKLQAK

SEQ ID NO: 194777 - protein, 199 aa, Unknown
  Bacterial polypetide isolated from the Sargasso Sea
ILFWVRNYPEKLLVLDFPELTPPTTIARDLDTIKAFKAKHGDVILKPLYGNGGAGVFRLDANDRNLSSLHELFTGFSREPLIVQKFLPDVSNGDKRVILVDGEPVGAINRVPAAGETRSNMHVGGRPEKIGLTDRDLEICAAIGPLLKERGQVFVGIDVIGDYLTEINVTSPTGIQELERFNGVNIAEKVWEAIEARVA

SEQ ID NO: 194778 - protein, 147 aa, Unknown
  Bacterial polypetide isolated from the Sargasso Sea
IFRAQPGDPNVSVILETLTQSSSQTIMAQQYLPAIQEGDKRILMVNGEAVPWCLARIPLAGESRGNLAAGGSGIVQPLTERDQWIANQVGPTLRERGLYFVGLDVIGDYLTEINVTSPTCLREIEAETDLDIAGQLLDSLPLTGAAS

SEQ ID NO: 194779 - protein, 260 aa, Unknown
  Bacterial polypetide isolated from the Sargasso Sea
MLMAAQERGYQLFYMEMADLAMVNGVAMGNMRPLKVINDANKWFELGDAQDTPLSELNVVLMRKDPPFDTEFIYATYMLERAEEQGVLIVNKPQSLRDANEKLFTAWFSEFTPETIVTRDANRIRAFHQAKGDIILKPLDGMGGTSIFRVKQDDPNLGVIIETLTQYGNQYAMAQAFIPEITKGDKRILVVDGEPVPYALARIPKKGETRGNLAAGGSGVAQPLSDSDWKIARAIGPELKKRGLIFVGLDVIGDKLTEIN

SEQ ID NO: 194780 - protein, 257 aa, Unknown
  Bacterial polypetide isolated from the Sargasso Sea
MDYRQLSPEAVRNCDWAEIGEAQRQPLANMDIIMMRKDPPFDMEYIYTTYLLERVQAEGALVVNRPESLRDCNEKLFATQFPQCCPNLIVSRNMELLREFHLQHGNVVFKKLDGMGGASIFRVMQDDPNLSVVIETLTRGGQEQVMGQVYLPQIVDGDKRILLINGEPIPYALARIPSAGETRGNLAAGGHGEGRRLTDRDLWIAEQVGPELARRGLYFVGIDVIGDYLTEINVTCPTCIRELDEQFDLDIAGPADG

SEQ ID NO: 194781 - protein, 269 aa, Unknown
  Bacterial polypetide isolated from the Sargasso Sea
AQERGYQLFYMEMADLAMVNGVAMGNMRPLKVINDANKWFELGDAQDTPLSELNVVLMRKDPPFDTEFIYATYMLERAEEQGVLIVNKPQSLRDANEKLFTAWFSEFTPETIVTRDANRIRAFHQAKGDIILKPLDGMGGTSIFRVKQDDPNLGVIIETLTQYGNQYAMAQAFIPEITKGDKRILVVDGEPVPYALARIPKKGETRGNLAAGGSGVAQPLSDSDWKIARAIGPELKKRGLIFVGLDVIGDKLTEINVTSPTCIREIQAA

SEQ ID NO: 194782 - protein, 159 aa, Unknown
  Bacterial polypetide isolated from the Sargasso Sea
FKDIIVKPLFGNGGAGVFHIKPDDENLSSLVELYKTFYREPLMIQEYLPAVRQGDKRIILIDGEAVGAINRVPADGEARSNMHVGGKPMKCELTDRDREICEIIGPSLKEKGLLFVGIDVIGNYLTEINVTSPTGIQELSRFENVNIAKLIWEAIEKKL

SEQ ID NO: 194783 - protein, 300 aa, Unknown
  Bacterial polypetide isolated from the Sargasso Sea
GVVMDPIETINFKKDSTLAMMIEAQRKGHEIIYITPDSLFIDSGIPYASSNKLEVRNNPSDWFTKEEEIIIELSELDSILMRQDPPFNSGYIYNTYVLEMAERQGVNIFNNPRSLRDCNEKVYASEFPQCCTRHLVTSRKDFLTDFVLENKDTVIKPLDGMGGASIFRVKSNDPNLNVILETITDQFTEKVMIQEFIPEISEGDKRILIVNGKPMNASIARVPAEGELRGNLAAGASAVAKSLSERDLWICEELGPSLVKKGLLLVGLDIIGDYLTEINVTSPTCFKEYKELCDIDVAEI

SEQ ID NO: 194784 - protein, 203 aa, Unknown
  Bacterial polypetide isolated from the Sargasso Sea
IVNNPFWVRNFPEKLLVLEFPDLIPDTLISCDLEEIKEFKREFKDIIIKPLYGNGGAGIFRLKEDDKNLTSLHELFSSVSSEPLIAQEFLPDVKNGDKRIILVDGDPVGAINRVPKAGEIRSNMHVGGKAERAKISQRDKEICSAIGPILKSRGQIFVGIDVIGDYLTEINVTSPTGIQELERFDKVNIAEMIWQAVEKKLNS

SEQ ID NO: 194785 - protein, 240 aa, Unknown
  Bacterial polypetide isolated from the Sargasso Sea
IELSELDSILMRQDPPFNSGYIYNTYVLEMAARQGVNIFNDPRSLRDCNEKVYATEFPQCCTKHLVSSRKDFLVNFVLENKDTVIKPLDGMGGASIFRVKANDPNLNVILETITDHFTEKVMIQEFIPEITEGDKRILIVDGKPMSASIARVPAEGELRGNLAAGASAVAKSLSDRDLWICEEVGPSLVEKGLLLVGLDIIGDYLTEINVTSPTCFKEYKELCDINVAEIFIESVEEFSK

SEQ ID NO: 194786 - protein, 269 aa, Unknown
  Bacterial polypetide isolated from the Sargasso Sea
MGLEAERRGHQLYHYTPRELAMLDGRVVAEMQPMSLRREVGNHYTLGDTATVDLTDIDVVLLRQDPPFDMSYITTTHFLERVHPDTLVVNNPGEVRSAPEKLFVTEFADFMPPTLIATDQDLIRAFRDEHQDIILKPLYGNGGAGVFHVTPGDENMNSLLEMFAERNREPLIAQAYLRDVREGDKRIILIDGEPVGATNRVPQEGEARSNMHVGGQAKKTVLTRRERDICSAIGPALKKRGMIVVGIDVIGGYITEINVTSPTGLQEIN

SEQ ID NO: 194787 - protein, 225 aa, Unknown
  Bacterial polypetide isolated from the Sargasso Sea
PPFDMGYITNTHLLDLVAKETLIVNNPFWVRNLPEKLLVLQFPDLIPDTLISRDLEEIKEFKREFKDIILKPLYGNGGAGIFRLKEDDKNLTSLHELFCNISSEPLIAQAFLPDVKNGDKRIILVDGSPVGAINRVPKAGEIRSNMHVGGKAEPAKLSQRDREICSAIGPTLKSKGQVFVGIDVIGDYLTEINVTSPTGIQELERFDNINIAELIWQAVEKELKN

SEQ ID NO: 194788 - protein, 212 aa, Unknown
  Bacterial polypetide isolated from the Sargasso Sea
GTLIVNKPQSLRDANEKLYTSWFAQHTPKTLVTRDAARLKAFYQQEQDVILKPLDGMGGASIFRLKPEDANVSVIIETLTEHGSRYAMAQRFIPEIKDGDKRVLVVNGEPVPYCLARIPASGETRGNLAAGGRGEARPLSETDWAIARAVGPTLKAKGLIFVGLDIIGDRLTEINVTSPTCIREIEAAFPVSITGMLFDQIELLLKQKQQQS

SEQ ID NO: 194789 - protein, 255 aa, Unknown
  Bacterial polypetide isolated from the Sargasso Sea
SAALVPLGTEQDTPLAELDVVLMRKDPPFDNEFVYSTYLLEQAENDGVLVVNRPQSLRDCNEKFFATQFPQYTPATLVSRRPDIVRQFADEHRDIILKPLDGMGGSQIFRHREGDPNLSVILETLTLHGHQQIMAQAYLPAIKDGDKRILMIDGEPVPYCLARIPAAGETRGNLAAGGRGEARPLTERDREIAAAVGPTLREKGLIFVGLDVIGDHLTEINVTSPTCIREIDAAFDTRIGEQLMDCIARKRGLKA

SEQ ID NO: 194790 - protein, 298 aa, Unknown
  Bacterial polypetide isolated from the Sargasso Sea
DSSFAMLEEAQKRGYELFYLEMKDLYMEAGRAFGTMRPLTVKYDYADWYSLGEVVDQPLSSLDVILMRKDPPFDTEFIYATYMLERAEDEGCLIVNKPQSLRDANEKLYTAWFAEHTPTTLVTRRADKLRAFHAKHKDVILKPLDGMGGASIFRMKEDDANVGVIIETLTSHGSQYCMAQTYLPAIKDGDKRVLVVDGEPVPYCLARIPAQGETRGNLAAGGRGEARPLSEADWAIARAVGPTLKEKGLIFVGLDIIGDRLTEINVTSPTCIREIEAAFDVHITGMLMDAIERRLAKA

SEQ ID NO: 194791 - protein, 290 aa, Unknown
  Bacterial polypetide isolated from the Sargasso Sea
MAAQKRGYQLFYMEMADLAMVNGVAMGNMRPLKVINDANKWFELGDAQDTPLSELNVVLMRKDPPFDTEFIYATYMLERAEEQGVLIVNKPQSLRDANEKLFTAWFSEFTPETIVTRDANRIRAFHQAKGDIILKPLDGMGGTSIFRVKQDDPNLGVIIETLTQYGNQYAMAQAFIPEITKGDKRILVVDGEPVPYALARIPKKGETRGNLAAGGSGVAQPLSDSDWKIARAIGPELKKRGLIFVGLDVIGDKLTEINVTSPTCIREIQAAFDVDITGMLFDAIEARLAQ

SEQ ID NO: 194792 - protein, 318 aa, Unknown
  Bacterial polypetide isolated from the Sargasso Sea
MDILFIADPLERFKIYKDSTYAMMAEAARRGHAVYACEPHQLAWTGSGVEADVQRVTIVGDTADLHRHPWYEAAAHESRALTSFGAVLMRKDPPFDMEYVTATWMLELAERAGAHVFNKPQSIRDHSEKLAIGEFPQFVAPTLVTRDAARLRAFHAEHGDVIVKPLDGMGGMGVFRVKADGMNLGAIIEMLGHDGTRSLMIQKFIPEIKAGDKRILLIAGEPVPFSLARIPQGSEVRGNLAAGGLGVAQPLTARDREIAETLGPVLAARGLLLVGLDAIGDWLTEVNVTSPTCFREIMEQTGFDVAAMFIDALERAAA

SEQ ID NO: 194793 - protein, 313 aa, Unknown
  Bacterial polypetide isolated from the Sargasso Sea
MKLGVVMDPIETINFKKDSTLAMMIEAQRKGHEIIYMAPDSLFIDSGIPYASSNKLEVRNNPSDWFTKEEEMIIELSELDSILMRQDPPFNSGYIYNTYVLEMAVRQGVNIFNNPRSLRDCNEKVYATEFPQCCTKHLVTSRKDFLTDFVLENKDTVIKPLDGMGGASIFRVKANDPNLNVILETITDHFTEKVMIQEFIPEISEGDKRILIVDGKPMSASIARVPAKGELRGNLAAGASAVAKSLSERDLWICEEVGPSLVEKGLLLVGLDIIGDYLTEINVTSPTCFKEYKELCDIDVAEIFIESVEEFSK

SEQ ID NO: 194794 - protein, 313 aa, Unknown
  Bacterial polypetide isolated from the Sargasso Sea
MKLGVVMDPIETINFKKDSTLAMMIEAQRKGHEIIYITPDSLLIKSGIPYASSNKMEVRNDPSDWFTKDEEKIIELSKLDIILMRQDPPFNSGYIYNTYVLEMAARQGVNIFNNPRSLRDCNEKVYATEFPQCCTKHLVTSRKDFLTDFVLENKDTVIKPLDGMGGASIFRVKANDPNLNVILETITDHFTEKVMIQEFIPEITEGDKRILIVDGKPMSASIARVPAEGELRGNLAAGASAVAKSLSDRDLWICEEVGPSLVEKGLLLVGLDIIGDYLTEINVTSPTCFKEYKELCDIDVAEIFIESVEEFSK

SEQ ID NO: 194795 - protein, 318 aa, Unknown
  Bacterial polypetide isolated from the Sargasso Sea
MKRTKYKLGIVMDPISAIDPKKDSSLAMLIEADKRDYEIYYMEQKDLKLIDGCATAQATIIEIFDDQKKWYKSKSNVSIDLKELNIILMRKDPPFDMEYIYTTYVLDKAEEDGVLIVNKPQSLRDMNEKVYTAWFPECTPSTLISRSMAEIKLFLGQHKKIVVKPLDGMGGKSIFVVDENDGNANVIIETLTNYGTCSAMAQVFIPEIKDGDKRILLIDGKPVPYALARIPSKDDNRGNLVMGAVGEGRELTERDKLICSKISETLKKKGILFCGIDVIGDYLTEINSTSPTGIRELDSIYNLNIASDLFDMLEKKIN

SEQ ID NO: 194796 - protein, 317 aa, Unknown
  Bacterial polypetide isolated from the Sargasso Sea
MQYTVGVIMDPIASIKPHKDTSFAMMLEAQRRGAKVVYFELKDLYLDNGKPMGLGKTVSVKDQATDFYTIEDESTLYLGDVDVLLMRKDPPFDSEFLYATQVLSLAQDAGALVVNNPQALRDYNEKLFTSYFPEHIPNTLVTNNQALIREFHAKHQDIICKPLDGMGGASIFRVKPDGNNLGVIIETLTKLGTRYMMVQEYLPEIKDGDKRVLIVDGEVMPYCLARLPTKGETRGNLAAGGTGRPQPISDSDRALAEAIAPTLKENNILFVGLDVIGSKITEINITSPTCVREIEAAYDVNIMGALFDAIEKRLASK

SEQ ID NO: 194797 - protein, 322 aa, Unknown
  Bacterial polypetide isolated from the Sargasso Sea
MIKLGIVMDPIADINIKKDSSFAMLLQAQSRGYQLHYMEMNDLYLIEGQARARTRLLSVQQNGEHWYDFGGAQDIALSDLDVILMRKDPPFDTEFIYATYILERAEDEGTLIVNKPQSLRDANEKLYTSWFAQHTPKTLVTRDAARLKAFYQQEQDVILKPLDGMGGASIFRLKPDDANVSVIIETLTEHGSRYAMAQKFIPEIKDGDKRVLVVNGEPVPYCLARIPASGETRGNLAAGGRGEARPLTESDWAIARAVGPTLKAKGLIFVGLDIIGDRLTEINVTSPTCIREIEAAFPVNITGMLFDQIELLLKQNQLSKQN

SEQ ID NO: 194798 - protein, 315 aa, Unknown
  Bacterial polypetide isolated from the Sargasso Sea
MIKLGIVMDPISEINIKKDSSFAMLMAAQERGYQLFYMEMADLAMVNGVAMGNMRPLKVINDANKWFELGDAQDTPLSELNVVLMRKDPPFDTEFIYATYMLERAEEQGVLIVNKPQSLRDANEKLFTAWFSEFTPETIVTRDANRIRAFHQAKGDIILKPLDGMGGTSIFRVKQDDPNLGVIIETLTQYGNQYAMAQAFIPEITKGDKRILVVDGEPVPYALARIPKKGETRGNLAAGGSGVAQPLSDSDWKIARAIGPELKKRGLIFVGLDVIGDKLTEINVTSPTCIREIQAAFDVDITGMLFDAIEARLAQ

SEQ ID NO: 194799 - protein, 318 aa, Unknown
  Bacterial polypetide isolated from the Sargasso Sea
MDILFIADPLTQFKIYKDSTYAMMAEAARRGHTLYTCEPKHLAWTGGDVEANVQRFAIVGDVTDLHRDTWYAAEAAAPRSLKQFSAVVMRKDPPFDMEYVTSTWLLEMAERGGARIFNKPQAIRDHSEKLAIGEFAQFVAPTLVTRDAARLRAFHEEHGDVILKPLDGMGGMGVFRVKADGMNLGSIIEMLSHDGARSVMAQKFIPEIKEGDKRILLIGGEAVPFSLARIPQGNEVRGNLAAGGLGVARPLTEHDRKIADTLAPVLAARGLLLVGLDAIGDWLTEVNVTSPTCFREIMDQTGFDVAAMFIDALERAAA

SEQ ID NO: 194800 - protein, 261 aa, Unknown
  Bacterial polypetide isolated from the Sargasso Sea
ENLDGQSSSATNWYELADPKEQPLEMMQVIMMRKDPPFDMEYIYSTYYLERAEAKGSLVINKPSSLRDCNEKLFATHFPELTPELVVSRNSQTLKEFFFQHEDVVFKKLDGMGGKSIFRVKGDDSNLNVIIETLTDNSSTQIMAQKYIPEIVEGDKRILMIDGEPLPWALARIPAAGESRGNLAAGGTGVGQPISQRDKEIAKQLGPELRKRGLIFVGIDVIGDYLTEINVTCPTCIRELDQQFDSNISADLMNCIENKLS

SEQ ID NO: 194801 - protein, 315 aa, Unknown
  Bacterial polypetide isolated from the Sargasso Sea
MIKLGIVMDPISEINIKKDSSFAMLMAAQERGYQLFYMEMADLAMVNGVAMGNMRPLKVINDANKWFELGDAQDTPLSDLNVVLMRKDPPFDTEYIYATYMLERAEEQGVLIVNKPQSLRDANEKLFTAWFSEFTPETIVTRDANRIRAFHQAKGDIILKPLDGMGGTSIFRVKQDDPNLGVIIETLTQYGNQYAMAQAFIPEITKGDKRILVVDGEPVPYALARIPKKGETRGNLAAGGSGVAQPLSDSDWKIARAIGPELKKRGLIFVGLDVIGDKLTEINVTSPTCIREIQAAFDVDITGMLFDAIEARLAQ

SEQ ID NO: 194802 - protein, 251 aa, Unknown
  Bacterial polypetide isolated from the Sargasso Sea
ITGDHFCLGEQIATDLKTDIDVILMRQDPPFDMSYITATHILEHLHPDTLVINDPTNVRNAPEKLFVTHFKNVMPPTLITSDEKEIFSFRKEFKDIIVKPLFGNGGAGVFHIKPDDENLSSLVELYKTFYREPLMIQEYLPAVRKGDKRIILIDGEAVGAINRVPADGEARSNMHVGGRPMKCELTGRDREICEIIGPSLKEKGLLFVGIDVIGNYLTEINVTSPTGIQELSRFENINIAKLIWEAIEKKL

SEQ ID NO: 194803 - protein, 136 aa, Unknown
  Bacterial polypetide isolated from the Sargasso Sea
RILIEEGLEVREIECGIIGNSKLLTSEIGEVNYESDWYDYDSKYHSNNEIIIPAEIDSKITKEIKEIAIKSCRALNIFGFARVDFFLEKSSNKIFLNEINTIPGFTKNSMFPMLWEASGLKIEQLVAKLVEISLDL

SEQ ID NO: 194804 - protein, 122 aa, Unknown
  Bacterial polypetide isolated from the Sargasso Sea
MRNNWNSKLITSEIGEVYYESDWYDYDSKYNSNNKIIIPAEIDSKITKEIKEISIKSCRALNIFGFARVDFFLEKSSNKILLNEINTIPGFTKNSMFPMLWEASGLKIEQLVAKLVQITLDL

SEQ ID NO: 194805 - protein, 272 aa, Unknown
  Bacterial polypetide isolated from the Sargasso Sea
EKINFLDGINFQNVDIWFPILHGFNGEDGSIHGLLKFTKKPSVGCGIIGSALGMDKIMMKTIFSNLKLPQVNYLVFQNKDLNDKEEKNKLINEISKKLNFPVFVKPSNSGSSLGISKVTNEKEILQALEKAWEIDPRILVEEGLEVREIECGIIGNSKLLASELGEVKYESDWYDYDSKYNLNNKITIPAEIDSKIIKEIKEIAIQSCRALNIFGFARVDFFLEKSSNKIFLNEINTIPGFTKKSMFPMLWKSSGLNIEQLVAKLVDISLDL

SEQ ID NO: 194806 - protein, 101 aa, Unknown
  Bacterial polypetide isolated from the Sargasso Sea
DWYDYDSKYHSNNKIIIPAEIDSKITKEIKEIAIKSCRALNIFGFARVDFFLEKSSNKILLNEINTIPGFTKNSMFPMLWEASGLKIEQLVAKLVDITLDL

SEQ ID NO: 194807 - protein, 103 aa, Unknown
  Bacterial polypetide isolated from the Sargasso Sea
LHEFYSYEAKYVDERGADLIVPADIDLEVSRNIRKTAVEAFQITECRGMARVDFFLNNDNTFVLNEINTLPGFTNISMYPKLWEASGLSYPKLLESLIDLAME

SEQ ID NO: 194808 - protein, 302 aa, Unknown
  Bacterial polypetide isolated from the Sargasso Sea
SIDKQGQWHVSDASNYLLNSDDPAHIALRPSETSLAQVPGKQAHQLIDAQNGQPLPTVDVIFPIVHGTLGEDGSLQGMLRVANLPFVGSDVLGSAACMDKDVTKRLLRDAGLNIAPFITLTRANRNSISFSEVESRLGLPLFVKPANQGSSVGVSKVTSEAQYDQAVALAFEFDHKVVVEQGIKGREIECAVLGNDHPQASTCGEIVLNSDFYAYDTKYIDDNGATVVVPAAIAPEINDKIREIAIQAYQTLGCAGMARVDVFLTAENDVVINEINTLPGFTNISMYPKLWQASGLGYTDLI

SEQ ID NO: 194809 - protein, 128 aa, Unknown
  Bacterial polypetide isolated from the Sargasso Sea
EVREIECGIIGNSKLLTSEIGEVNYQSDWYDYDSKYHSNNKIIIPAEIDSKISEEIKDIAIKSCRALNIFGFARVDFFLEKSSNKILLNEINTIPGFTKNSMFPMLWEASGLNIEQLVAKLVEISLDL

SEQ ID NO: 194810 - protein, 153 aa, Unknown
  Bacterial polypetide isolated from the Sargasso Sea
MTSAYDKLHSTLDVKAFGRVAVLYGGKSAEREVSLKSGAAVIDALSTAGVDVVAIDVGDDLLARLQSEKIDRAFIILHGRGGEDGSMQGLLECLGIPYTGSGILASALAMDKLRTKQVWQSLGIPTPRHAVLASESDCLQASTELGFPLIVKP

SEQ ID NO: 194811 - protein, 191 aa, Unknown
  Bacterial polypetide isolated from the Sargasso Sea
RSGDFIDYEELIRELGPTLFVKPCREGSSLGVSKVHNSREFQAAIKDAFGIDRKIMIEKAVQGREIECSVLGNDSPKAAEVLGEIVPRHDFYSFEAKYVDDEGADLVIPAQIESKTSLKIREAAVEAFRCTECRGMARVDFFLNQDEDFFINEINTLPGFTNISMYPKLWEASGMSYSKLLEHLIELALEN

SEQ ID NO: 194812 - protein, 112 aa, Unknown
  Bacterial polypetide isolated from the Sargasso Sea
EVLGENVPRHDFYSYEAKYVDDEGADLIIPAQIESETSLKIREAAVEAFRCTECRGMARVDFFLNQDDDFFINEINTLPGFTSISMYPKLWEASGMSYSKLLEHLIELALEN

SEQ ID NO: 194813 - protein, 68 aa, Unknown
  Bacterial polypetide isolated from the Sargasso Sea
AVEAFRCTECRGMARVDFFLNQDDDFFINEINTLPGFTSISMYPKLWEASGMSYSKLLEHLIELALEN

SEQ ID NO: 194814 - protein, 137 aa, Unknown
  Bacterial polypetide isolated from the Sargasso Sea
PRILVEEGLEVREIECGIVGNSKLLTSEIGEVTYKSDWYDYDSKYNSNNKITIPAEIDSKIKKEIKEIAIQSCKALNIFGFARVDFFIEKSSNKILLNEINTIPGFTKNSMFPMLWKASGLNIEQLVAKLVDISLDL

SEQ ID NO: 194815 - protein, 353 aa, Unknown
  Bacterial polypetide isolated from the Sargasso Sea
MSSSPTTVGVVFGGCSGEHDISIRSAQTVVHGLNLGTNRQRYQLVLIYIDRDGRWWGPDIAAKVLDSGSPPSSADLPQPLPGPGFRGLPAGADAVTIWYPVLHGPNGEDGTIQGLFEMMQQPYVGAGVLGSAVSMDKQAMKAALAGAGLAQVPYVCAQAEDLSVAGRRDELLQRIEADLGYPCFVKPANLGSSVGISKARNREELLQGLSLAASLDARLLVEQGVQARELECAVLGGPTLRASVVGEVRFDADWYDYDTKYTEGRSTTLIPAPLPDDIVKTIRRQSIQACAAVGVTGMARVDFFYEESSGRVWLNEINTLPGFTSQSMYPMLWEASGVTLEQLVHELLESAGQ

SEQ ID NO: 194816 - protein, 355 aa, Unknown
  Bacterial polypetide isolated from the Sargasso Sea
MIGVKKKCIGLIFGGNSNEHEVSISSAKTVYEAFNSEINKERFTVKAFYINKYGDWLDSDSSEKILISKIQNNKTIKQEIFNQEKINFLEGIEFQNVDVWFPLLHGFNGEDGSIHGLLRFTKKPLVGCGIIGSALGMDKILMKTIFSNLKLPQVNYLVFQNEDLNDKEVKNKIINKILKKLNFPVFVKPSNSGSSLGISKVTNESEISQALEKAYGIDPRFLIEEGLEVREIECGIIGRSELLISEIGEVNYESDWYDYDSKYNSNNKIIIPAEIDSKITREIKDIANKSCRALNIFGFARVDFFLEKSSNKILLNEINTIPGFTKNSMFPMLWEASGLKIEQLVAKLVDISLDL

SEQ ID NO: 194817 - protein, 289 aa, Unknown
  Bacterial polypetide isolated from the Sargasso Sea
EREVSLKSGNAVLSALQAGGVDAFGIDVGDDFLQRLASEKIDRAFIVLHGRGGEDGSMQGLLECAGIPYTGSGILASALAMDKLRTKQVWHSLGLPTPRHAVLTSRADCEAAATELGFPLIVKPAHEGSSIGMAKVESVEALIAAWQDAARYDSQVLVEQWIAGPEYTIAVLRGEVLPPIGLGTPHTFYDYDAKYLADDTQYRIPCGLSAEKEAELKELTARACEAVGTQGWARADVMQDASGQFWLLEVNTVPGMTDHSLVPMAARAAGLDFQQLVLAILADSVEARG

SEQ ID NO: 194818 - protein, 355 aa, Unknown
  Bacterial polypetide isolated from the Sargasso Sea
MIRGQKKCIGLIFGGNSNEHEVSISSAKTVFQAFNSEINKERYTVKTFYINKYGDWLDSHLSEKILIGGIENNKTNKKEIFNQKKINFLDGIEFQNIDVWFPLLHGFNGEDGSIHGLLRFTKKPLVGCGIIGSALGMDKILMKTIFSNLKLPQVNYLVFQNENLNDKEVKNKIINEILKKLKFPVFVKPSNSGSSLGISKVKNESEILEALEKAREIDSRILIEEGLEVREIECGIIGDSKLLTSEIGEVNYESDWYDYDSKYHSNNKIIIPAEIDSQITKEIKEIAIKSCRALNIFGFARVDFFLEKSSNKIFLNEINTIPGFTKNSMFPMLWEASGLKIEQLVAKLVDISLGL

SEQ ID NO: 194819 - protein, 297 aa, Unknown
  Bacterial polypetide isolated from the Sargasso Sea
GPGIAAAVLERGEAATDEQLPPTPLPPAGFRGLPQGCEPIDVWYPVLHGPNGEDGTVQGLFRLMRQPFVGAGVLGSAVSMDKQAMKAAFAAAGLSQVPYVCVQASELKDDTTFNPLLKRIEQLGYPCFVKPANLGSSVGISKVRNRAELVEGLHKASLLDPRLVVEQGVTARELECAVLGRNDLRASVVGEVRFEADWYDYETKYTAGLSSTLIPAPLPDGVADWIRQQALQACEAVGVLGMARVDFFYDEAAGTIWINEINTLPGFTSQSMYPMLWAASGLTLDQLVHELVETAGE

SEQ ID NO: 194820 - protein, 237 aa, Unknown
  Bacterial polypetide isolated from the Sargasso Sea
IQHFKDDATAFNNQKKSTVEGKGVLNNRISEHILNNLNQIGIKNHLIKRLNMREQLIKLCEIFPVEFIVRNIATGSLTKRLGIADGTILSKPLIEFSYKNDDLGDPVVSREHILEFGWVKDSDTLDFIIAKCLRINDFMQGMFRGVGIKLVDFKLEFGQSKTDNEIILADEISPDTCRLWDVSSEKKLDKDRFRKDLGNIIQAYQEVARRLGIIHEEANISEVKFGKPTAVNITKKK

SEQ ID NO: 194821 - protein, 185 aa, Unknown
  Bacterial polypetide isolated from the Sargasso Sea
MKKGKKLYEGKAKIIYASSEKNLVIQHFKDDATAFNNQKKSVIEGKGILNNRISEHILTYLGQVGIKNHLIKRINMREQLIKYVNIIPIEFIVRNIATGSLTKRLGIEEGTTLEKPLLEYCFKNDKLGDPLISREHIITFNWLNLMELEWINEQCRRINDLLQGMFRSVGIKLVDFKIELEKQKR

SEQ ID NO: 194822 - protein, 243 aa, Unknown
  Bacterial polypetide isolated from the Sargasso Sea
KEKGLAIQHFKDDATAFNNQKKANVEGKGVLNNRISEHILQNLNQAGIKNHLVKRLNMREQLIKLVEIIPIEVIIRNIATGSLTKRLGIPDGTVLEKPLLEFSYKNDELGDPLVAKEHILAFNWATKDELDIIQDTTFRINDFMTGMFRGVGIKLVDFKLEFGRLWEKDKKEVILADEISPDTCRLWDIKSERKLDKDRFRKDLGNIIQAYQEVARRLNILPETTNISEVNFKKPTSINIKKK

SEQ ID NO: 194823 - protein, 262 aa, Unknown
  Bacterial polypetide isolated from the Sargasso Sea
MKKGKKLYEGKAKVIFATDEKNLVIQHFKDDATAFNNKKKDTIEGKGVLNNRISEHILTNLSQVGIKNHLVKRINMREQLIKFVEIIPLEFIVRNIATGSLTKRLGIGDGTVLDDPLIEYCLKDDKLGDPLVSKEHILAFKWASKKELEKIDKQLQRINDFMVGMFRGVGIKLVDFKVEFGRYKSNGKTEVILADEISPDTCRLWDNKTDKKLDKDRFRNNLGNLIDAYQDVARRLGILHEQSNITAVNFSKLKTIKNKKNK

SEQ ID NO: 194824 - protein, 246 aa, Unknown
  Bacterial polypetide isolated from the Sargasso Sea
YATSDKSLVIQYFKDDATAFNNQKKTTIEGKGVLNNRISEHILSNLSEVGIKNHLVKRINMREQLVKLVDIIPIEFVVRNIATGSLTKRLGIEEGTVLERPLIEYCLKDDKLGDPIISREHILTFNWLNVMQLDWIDENLSRLNDFLQGMFRGVGIKLVDFKVEFGFTHESEKTKIILADEISPDTCRLWDALTDKKLDKDRFRKDLGDLIPAYTEVAKRLGILHEQSNVSAVNVTQLSSVKRKKK

SEQ ID NO: 194825 - protein, 186 aa, Unknown
  Bacterial polypetide isolated from the Sargasso Sea
PIEAVVRGYLIGSGWKDYQATGSVCGIELEEGLQMAQKLPEPIYTPATKAEVGEHDENISYEKTVDLIGEELASRVKQIAIDIYNFGVNHAKEKGIIIADTKFEFGLDSDGELYLIDEVLTPDSSRFWAIENYELGSSPPSFDKQYLRDYLETLDWDKTAPGPELPQEVIDNTASKYKNAFKQIAE

SEQ ID NO: 194826 - protein, 248 aa, Unknown
  Bacterial polypetide isolated from the Sargasso Sea
MNKGKKLYEGKAKIIYETKEKGLAIQHFKDDATAFNNKKKATVEGKGVLNNRISEHILNNLNQVGIKTHLVKRLNMREQLIKLVEIIPIEVIVRNIATGSLTKRLGITDGTVLDKPLLEFCYKKDELDDPLIAKEHIFAFNWATKEEIEAIEEMTFRINDFMSGMFRGIGIKLVDFKLEFGRIWIDNNKEVILADEISPDTCRLWDIKSEKKLDKDRFRKDLGNIIQAYQEVARRLGIVPETTNVSKV

SEQ ID NO: 194827 - protein, 260 aa, Unknown
  Bacterial polypetide isolated from the Sargasso Sea
EKRKKLYEGKAKIIYATSDKNLVIQYFKDDATAFNNQKKSTIEGKGVLNNRISEHILLNLTQIGIKNHLVKRLNMREQLVKLVDIIPIEFIVRNIATGSLTKRLGIEDGTILERPLIEYCLKDDKLGDPNISREHILTFNWLNEKQLRLIDESLKRLNDFLLGLFRGVGIKLVDFKVEFGLTHESNKNEIILADEISPDTCRLWDSITEKKLDKDRFRKDLGDLIPAYTEVAKRLGILHEQTNVTAVNVTKLSSVKKKNK

SEQ ID NO: 194828 - protein, 116 aa, Unknown
  Bacterial polypetide isolated from the Sargasso Sea
MPEELLYEGKAKKLFITEDPQILRVEYKDDATAFNGKKFDRLRDKGRLNNAITVFFFEHLDTKDIPSHFVCKISETEQLVRRVKIIPLEVVVRNVAAGSLSKRIGWEEGKELPHPI

SEQ ID NO: 194829 - protein, 140 aa, Unknown
  Bacterial polypetide isolated from the Sargasso Sea
YKKDELDDPLIAKEHIFAFNWATKDEIKSIEDMTFRINDFMSGMFRGVGIKLVDFKLEFGRIWHGDKKEVILADEISPDTCRLWDVKSEKKLDKDRFRKDLGNIIQAYQEVARRLGIVPETTNVSEVNFNKPTSISIKKK

SEQ ID NO: 194830 - protein, 242 aa, Unknown
  Bacterial polypetide isolated from the Sargasso Sea
MNKKYDLIYEGKAKKVFTHNDVEKVRIEFKDDATAFNALKKEKFEGKGKLNCLISARIFEILIKKNIPTHFIELENENTMIAKKIKVIPLEIVLRNTAFGSLCKQTTIKPGTLLSKPLIDIYLKNDELNDPLLTKDRIELMNILSSHDLELIINLTLKINVILKSFFKNIQLQLVDFKLEFGYDFKNNILLGDEISPDNCRLWDLDQKNDTIVSLDKDRFRNDLGGLIEAYSEINRRINDYL

SEQ ID NO: 194831 - protein, 243 aa, Unknown
  Bacterial polypetide isolated from the Sargasso Sea
KEKGLAIQHFKDDATAFNNQKKANVEGKGVLNNRISEHILQNLNQAGIKTHLVKRLNMREQLVKLVEIIPIEVIIRNIATGSLTKRLGIADGTVLEKPLLEFSYKNDELGDPLVAKEHILAFNWATNDELDIIEEMTFRINDFMSGMFRGVGIKLVDFKLEFGRIWVNDKKEVILADEISPDTCRLWDVKSERKLDKDRFRKDLGNIIQAYQEVARRLGIMPETTNISEVNFKKPTSINIKKK

SEQ ID NO: 194832 - protein, 148 aa, Unknown
  Bacterial polypetide isolated from the Sargasso Sea
VIRNRATGSICRRLGTEDGLILDKPLFEFFLKDDDLGDPLINRNHIVSFGWAKDDELDEMISTSHKVNELLTKLFADSGMILVDFKLEFGVSNGKILLGDEFTPDGCRLWDDETLEKLDKDRFRQDLGDVIESYHMVAHRLGMQIKVD

SEQ ID NO: 194833 - protein, 88 aa, Unknown
  Bacterial polypetide isolated from the Sargasso Sea
VDFKLEFGRLWQGDKKEVILADEISPDTCRLWDVKSEKKLDKDRFRKDLGNIIQAYQEVARRLGIVPETANISEVNFKKPTSIKFKKK

SEQ ID NO: 194834 - protein, 263 aa, Unknown
  Bacterial polypetide isolated from the Sargasso Sea
MNKGNKLYEGKAKIIYETKDKHLVIQHFKDDATAFNNLKKAKVEGKGVLNNRISEYILSNLSQCGIKTHLIKRLNMREQLIKKAEIFPIEFIVRNIATGSLTKRLGISEGTILEKPLLEYCFKKDELNDPLVSKEHIFSFGWATEEEIKTIDKMTLRINDILTGMFRAIGIKLVDFKIEFGKAWNKDTDKKEIVLADEISPDTCRLWDAKTEKKLDKDRFRKDLGNIIQAYQEVARRLGIMPEETNISEVNFGKTIPIKFKKK

SEQ ID NO: 194835 - protein, 212 aa, Unknown
  Bacterial polypetide isolated from the Sargasso Sea
MTPDHGELLYEGKAKRVFASMDPDQVLVEFKNDATAFNAKKKAQLDDKGRLNCQISARLFELLEREGVPTHYCGLAGETWMLVRRVEIIPLEVVLRNIATGSLCRQTPITEGTAIEPALLDLYYKDDSLGDPLITEARVQLLGVADSARLSAIEQLARRVNATLLRFFEELDLPLVDFKLELGLASDGTLLLADEISPDTCRALGSPQQQCR

SEQ ID NO: 194836 - protein, 261 aa, Unknown
  Bacterial polypetide isolated from the Sargasso Sea
MKKGKKLYEGKAKIIYASSDKNLVIQYFKDDATAFNNQKKSTIEGKGVLNNRISEYILSNLSQIGIKNHLVKRLNMREQLIKLVEIIPIEFVVRNVATGSLTKRLGIEDGTVLKEPLIEYCLKDDELGDPLIAEDHIYAFEWASKKEIEKVKKMILRINDFMIGMFRGVGIKLIDFKLEFGRIKINGKNEVILADEISPDTCRLWDSVTEKKLDKDRFRKDLGDLIPAYTEVAKRLGILHELSNVTAVNVTKLSSVKKKSK

SEQ ID NO: 194837 - protein, 173 aa, Unknown
  Bacterial polypetide isolated from the Sargasso Sea
MSRRRQIYEGKAKVLFEGPEPGTLVQYFKDDATAFNNKKKGTITGKGVLNNRISEHLMTKLAAIGIPTHFVRRLNMREQLVKEVEIIPIEVVVRNVAAGSLAKRFGLEEGTPLPRSIVEYYYKSDELDDPMIMEEHITAFGWASPTELDEILAMTLRINDFLSGLFLGLEIKL

SEQ ID NO: 194838 - protein, 234 aa, Unknown
  Bacterial polypetide isolated from the Sargasso Sea
MKSALLETKLSLPNRRSGKVRDLYDVDLGSEKALLIVATDRISAFDVVMQNGFPGKGIVLTQISKFWFDYFGDRFSHHLISTNVDDVPGLNAEEKDALDGRIMLCRKTEVVPIECIARGYITGSGWKDYQTSGEVCGIKLPTGLRNSDKLDEPLFTPSTKADTGHDENISFEEGTNLVGLDLMEWLKKSTLSLYKEARDYALDRGIILADTKFEFGQLADSDEPLLIDEIFTPD

SEQ ID NO: 194839 - protein, 82 aa, Unknown
  Bacterial polypetide isolated from the Sargasso Sea
MKKGKKLYEGKAKIIYASSDKNLVIQYFKDDATAFNNQKKSTIEGKGVLNNRISEHILSNLSQIGIKNHLVKRLNMREQLIK

SEQ ID NO: 194840 - protein, 163 aa, Unknown
  Bacterial polypetide isolated from the Sargasso Sea
MNKGSKLYEGKAKIIYETKDKDLVIQHFKDDATAFNNLKKAKVEGKGVLNNRISEYILTNLAQCGIKNHFIKRLNMREQLIRKAEIFPIEFIVRNIATGSLTKRLGIPEGTVLEKPLLEYCYKNDELQDPLISKDHIFSFGWASKKEIEEIDITTLRINDLLS

SEQ ID NO: 194841 - protein, 106 aa, Unknown
  Bacterial polypetide isolated from the Sargasso Sea
LRINDFMIGMFRGVGIKLIDFKLEFGRIKINGKNEVILADEISPDTCRLWDSVTEKKLDKDRFRKDLGDLIPAYTEVAKRLGILHELSNVTAVNVTKLSSVKKKSK

SEQ ID NO: 194842 - protein, 129 aa, Unknown
  Bacterial polypetide isolated from the Sargasso Sea
RQTTIAEGTRIDPALLDLYYKDDDLGDPLLTDARVRLMGLVDDARLSAIEQLARRINGVLQPFFNDLELQLVDFKLELGLNRAGELLLADEISPDTCRFWDQRSRDANDRILDKDRFRKDLGGVMEAYG

SEQ ID NO: 194843 - protein, 111 aa, Unknown
  Bacterial polypetide isolated from the Sargasso Sea
FIKEQCLRINDFLQGMFIGINIKLVDFKLEFGKRKSDGKIILADEISPDTCRLWDADTEKKLDKDRFRKNLGNIVEAYQEVARRLGILHEQTSNVRPIKFPKPTAVKIKKK

SEQ ID NO: 194844 - protein, 219 aa, Unknown
  Bacterial polypetide isolated from the Sargasso Sea
MKKGKKLYEGKAKIIYATSDKKYVIQYFKDDATAFNNQKKSKINGKGVLNNRISEHILENLNQIGIKTHFVKRLNMREQVIKLVEIIPIEFIVRNIASGSITKRLGIEDGTVLKSPLVEYCLKNDNLGDPLIAEEHIYAFDWATKKEIEKVKKMILRINDFMIGMFRGVGIKLVDFKLEFGRAKVNGKNEVILADEISPDTCRLWDALTEKKLDKDRFR

SEQ ID NO: 194845 - protein, 178 aa, Unknown
  Bacterial polypetide isolated from the Sargasso Sea
MNKGKKLYEGKAKIIYETKEKGLAIQHFKDDATAFNNKKQATVEGKGVLNNRISEHILNNLNQVGIKNHLIKRLNMREQLIKLVEIIPIEVIVRNIATGSLTKRLGITDGTILEKPLLEFCYKKDELDDPLIAKEHIFAFNWATKDEIKTIEEMTFRINDFMTGMFRGVGIKLVDFKL

SEQ ID NO: 194846 - protein, 230 aa, Unknown
  Bacterial polypetide isolated from the Sargasso Sea
TAFNNQKKSKIDGKGVLNNRISEHILENLNQIGIKTHLVKRLNMREQVVKIVEIIPIEFIVRNIASGSITKRLGIEDGTVLKNPLIEYCLKNDKLGDPLIAEEHIFTFDWATKKEIEKIKKMILRINDFMIGMFRGVGIKLIDFKLEFGRLKMNGKKDIILADEISPDTCRLWDAVTEKKLDKDRFRKNLGGLIPAYTEVAKRLGILHEQSNVQNSNVTNLSAFKKKLKK

SEQ ID NO: 194847 - protein, 159 aa, Unknown
  Bacterial polypetide isolated from the Sargasso Sea
MKKGKKLYEGKAKIIYATNDKNLVIQYFKDDATAFNNQKKTTIEGKGVLNNRISEHILSNLSQIGIKNHLVKRLNMREQIIKLVEIIPIEFIVRNVATGSITKRLGIEDGTVLKEPLIEYCLKDDKLGDPLIAEEHIIAFEWATKNEIDTAKKMILRIN

SEQ ID NO: 194848 - protein, 191 aa, Unknown
  Bacterial polypetide isolated from the Sargasso Sea
VKRLNMREQLIKRVEIIPIEFVVRNIATGSLTNRLGIEEGTVLDSTLIEYCLKDDKLGDPLISKEHIYTFKWATRREIEKIDRQLLRINDFLVGLFRGIGIKLVDFKVEFGRYKNNSKNEILLADEISPDTCRLWDMNTEKKLDKDRFRKNLGNLIEAYQEVAKRLGILHEQSNVRPLRFPKPKAVKIKNK

SEQ ID NO: 194849 - protein, 123 aa, Unknown
  Bacterial polypetide isolated from the Sargasso Sea
HILEFNWASPYELDEISGMAFKINDFLTGLFYGVGITLVDFKLEFGRPLDKGDNKILLADEISPDSCRLWDDLDNRKLDKDVFRLDLGNISETYLEVAQRFNLNPKRTSSNAKVLKDNVFSME

SEQ ID NO: 194850 - protein, 108 aa, Unknown
  Bacterial polypetide isolated from the Sargasso Sea
MILRINDFMIGMFRGIGIKLIDFKLEFGRIKINGKNEIILADEISPDTCRLWDAVTDKKLDKDRFRKDLGDLIPAYTEVAKRLGILHEQSNVTVVNVTKLSSIKKKSK

SEQ ID NO: 194851 - protein, 173 aa, Unknown
  Bacterial polypetide isolated from the Sargasso Sea
MNKGKKLYEGKAKIIYETKEKGLAIQHFKDDATAFNNQKKANIEGKGVLNNRISEHILQNLNQSGIKTHLVKRLNMREQLIKLVEIIPIEFIVRNVATGSLTKRLGIPDGTILEKPLLEYCYKNDELEDPLIAEEHILAFNWATNMELKIIRNMTLRINDFMTGMFRGIGIKL

SEQ ID NO: 194852 - protein, 189 aa, Unknown
  Bacterial polypetide isolated from the Sargasso Sea
MKKGKKLYEGKAKIIFATSDKNLVIQHFKDDATAFNNQKKDVIDGKGILNNRISEHILTNLNQVGIKNHLVKRLNMREQLIQHVEIIPIEFIVRNIATGSLTKRLGIEDGTVLEYPLVEYCLKNDELGDPLISKEHIMTFKWMDDFEIDFVNNELARINDFLQGMFRGVGIKLVDFKVEFGRLEKNGKK

SEQ ID NO: 194853 - protein, 105 aa, Unknown
  Bacterial polypetide isolated from the Sargasso Sea
MSRRRQIYEGKAKVLFEGPEPGTLVQYFKDDATAFNNKKKGTITGKGVLNNRISEHLMTKLTAIGIPTHFVRRLNMREQLVKEVEIIPIEVVVRNVAAGSIAKRF

SEQ ID NO: 194854 - protein, 261 aa, Unknown
  Bacterial polypetide isolated from the Sargasso Sea
MNKGKKLYEGKAKIIYETKEKGLAVQHFKDDATAFNNKKKATVEGKGVLNNRISEHILNNLNQVGIKTHLIKRLNMREQLIKLVEIIPIEVIVRNIATGSLTKRLGITDGTILEKPLLEFCYKKDELDDPLIAKEHIYAFNWATKDEIKTIEEMTFRINDFMSGMFRGIGIKLVDFKLEFGRLWEGDKKEVILADEISPDTCRLWDIKSEKKLDKDRFRKDLGNIIQAYQEVARRLGIVPETSNVSEVNFKKPTSINIKKK

SEQ ID NO: 194855 - protein, 225 aa, Unknown
  Bacterial polypetide isolated from the Sargasso Sea
MSQSKTLYEGKAKKILKGPSKNTLIQVFKDDATAYNKKKHKIFSGKGILNNLISEHIMEHLMTKGIETHLKKRLNNREQLIKKCEIIPIEFVVRNIVAGSIAKKLGLKEGTKLKKPLLEYYYKKDSLDDPMISRDHVEAFGWATKTELKKIDKISTKINKILSSLFIKKKIVLVDFKIEFGRLTSNPKKIVLADEISPDSCRLWDKKSKKKLDKDVFRRNLGSLI

SEQ ID NO: 194856 - protein, 86 aa, Unknown
  Bacterial polypetide isolated from the Sargasso Sea
TSHKVNELLTKLFADSGMILVDFKLEFGVSNGKILLGDEFTPDGCRLWDDETLEKLDKDRFRQDLGDVIESYHMVAHRLGMQIKVD

SEQ ID NO: 194857 - protein, 194 aa, Unknown
  Bacterial polypetide isolated from the Sargasso Sea
MNDNLDLIYEGKAKKIFTHDDSDKVIIEFKDDATAFNALKKAKFEGKGKLNCQISSKIFELLIKNNIPTHYLGLRNENSMFAQKIKVVPLEIVLRNIAYGSLCKQTTIKPGTILDSPLIDIYLKNDNLNDPLLTQERIKLLNIIDNKELDLIIDLTLKINSVLKSFFQKIQLNLVDFKLEFGHNSKNEIILGDE

SEQ ID NO: 194858 - protein, 119 aa, Unknown
  Bacterial polypetide isolated from the Sargasso Sea
ANKKEIEKVKKMILRINDFMIGMFRGIGIKLIDFKLEFGRVKLNGKNEVILADEISPDTCRLWDSITDKKLDKDRFRKDLGDLIPAYTEVAKRLGILHEQSNVSAVNVTQLSSVKKKNK

SEQ ID NO: 194859 - protein, 92 aa, Unknown
  Bacterial polypetide isolated from the Sargasso Sea
MNKGKKLYEGKAKIIYETKEKGLAIQHFKDDATAFNNKKKATVEGKGVLNNRISEHILNNLNQVGIKTHLVKRLNMREQLIKWVENIPIEVI

SEQ ID NO: 194860 - protein, 243 aa, Unknown
  Bacterial polypetide isolated from the Sargasso Sea
MKKGKKLYEGKAKIIYSTPDKNLVIQYFKDDATAFNNEKRTTIEGKGVLNNRISEHILSNLSQIGIENHLVKRLNMREQLIKFVEIIPIEFIIRNIATGSLTKRLGIEDGTVLKEPLIEYCLKDDKLGDPLISEDHIYAFDWANKKEIEKIKKTIFRINDFMIGMFRGVGIKLIDFKLEFGRTKIDGKKEIILADEISPDTCRLWDSATDKKLDKDRFRKDLGDLLPAYTEVAKRLEFYMSNQ

SEQ ID NO: 194861 - protein, 231 aa, Unknown
  Bacterial polypetide isolated from the Sargasso Sea
PEAGTLVQYFKDDATAFNAQKKDVISGKGVLNNYISEHILTAVGDIGIPHHFITRLNDREQLIRKLEIIPIEVVVRNVAAGSICPRLGLEEGAMLNNTLVEFCLKDDSLGDPIIAPEHIFTFGWASSDELEIMVEDTLRINDFLTGLFLGIGVRLIDFKLEFGRFYHDPDDSDDNVIMLADEISPDNCRLWDSQTNEKMDKDRFRRDLGGLREAYQEIASRLGVEIPDLDK

SEQ ID NO: 194862 - protein, 104 aa, Unknown
  Bacterial polypetide isolated from the Sargasso Sea
INDILSGLFRAVGIKLVDFKLEFGRYWNNEEKKIILVDEISPDTCRLWDTKNEKKLDKDRFRKDLGGLIEAYQEVAKRLGIMPEGTNIKEIKTGISKTIKLKKS

SEQ ID NO: 194863 - protein, 192 aa, Unknown
  Bacterial polypetide isolated from the Sargasso Sea
MVAKLKKLYEGKAKIIYAKTSKEVIATYKNDATAFNNLKKGSIKNKGAINNAISSYLFQILNHCDIPTHFIKKIDKKSQLLKKVDIIPIEVLVRNFFAGSLSKKFGVKEGTQLSDTLIEYCLKSDELGDPHISSEHILNLGLCDFDELELIDEYSLRINDILRSTFYSIGINLVDFKLEFGICKKTDDPCFS

SEQ ID NO: 194864 - protein, 140 aa, Unknown
  Bacterial polypetide isolated from the Sargasso Sea
MKKGKKLYEGKAKIIYATNDKNLVIQYFKDDATAFNNQKKTTIEGKGVLNNRISEHILSNLSQIGIKNHLVRRLNMREQIIKLVEIIPIEFIVRNVATGSITKRLGIEDGTVLKEPLIEYCLKDDKLGDPLISEEHILAF

SEQ ID NO: 194865 - protein, 205 aa, Unknown
  Bacterial polypetide isolated from the Sargasso Sea
HILSALKDASIENHLIKRLNMREQLIDLVEIIPIEFIVRNIVTGSLTKRLDIEDGTRLKRPLIEFCYKSDKLGDPLVAREHIYVFEWASEVEIDYITEQCMRINDFLLGMFKGIGIKLVDFKLEFGKRKSDGKIILADEISPDTCRLWDADTDKKLDKDRFRKDLGEIIEGYQEVARRLGILHEQTNNIRPIKFPKPIAVKIKKK

SEQ ID NO: 194866 - protein, 147 aa, Unknown
  Bacterial polypetide isolated from the Sargasso Sea
NLLLEFSYKNDELGDPLVAKEHILAFNWATEDELEIIESMTFRINDFMSGMFRGVGIKLVDFKLEFGRLWENEKKQVILADEISPDTCRLWDVKSERKLDKDRFRKDLGNIIQAYQEVARRLGIMPETTNISEVNFKKPTSISIKKK

SEQ ID NO: 194867 - protein, 116 aa, Unknown
  Bacterial polypetide isolated from the Sargasso Sea
MKKGKKLYEGKAKIVYASSEKNLVIQHFKDDATAFNNKKKSVIDGKGILNNRISEHILTYLSQVGIKNHLVKRLNMREQLIKRVEIIPIEFVVRNIATGSLTNRLGIEEGTVLDST

SEQ ID NO: 194868 - protein, 180 aa, Unknown
  Bacterial polypetide isolated from the Sargasso Sea
NHGEVLPIEFVVRNIAAGSIVNRLGLNEGSILKNPIVEYYYKNDALGDPIVTIEHIKINDWANEEEIKKATNISLRINDILSGLFRAVGIKLVDFKLEFGRYWNNEEKKIILVDEISPDTCRLWDTKNEKKLDKDRFRKDLGGLIEAYQEVAKRLGIMPEGTNIKEIKTGISKTIKLKKS

SEQ ID NO: 194869 - protein, 163 aa, Unknown
  Bacterial polypetide isolated from the Sargasso Sea
LTKRLDISEGTVLEKPLLEYCYKKDELQDPLISKEHIYSFGWATEKEIKEIDKITLRINDLLLGMFRGIGIKLVDFKIEYGKAWNKDKEANEIVLADEISPDTCRLWDAKTEKKLDKDRFRKDLGNIIQGYQEVARRLNIMPEETNISEVNFGKTTSIKFKKK

SEQ ID NO: 194870 - protein, 196 aa, Unknown
  Bacterial polypetide isolated from the Sargasso Sea
MNSKLKFIYEGKAKKIFAYEDSNKVIIEFKDDATAFNALKKAKFEGKGELNCLISSKIFEFLIKNNIPTHYLGLKNNKSMIAQKIKIIPLEVVLRNTAYGSLCKQTTIKPGTVLEPPLIDFYLKNDTLNDPLLTKDRINLLKIIDNKELDFITNMTLKINKLLKMFFYNIKLDLVDFKLEFGYNTDGQIVLGDEIS

SEQ ID NO: 194871 - protein, 260 aa, Unknown
  Bacterial polypetide isolated from the Sargasso Sea
MKKGKKLYEGKAKVIFATDNKDFVIQHFKDDATAFNNQKKAKIEGKGVLNNRISEHILMNLDQVGIKNHLVKRLNMREQLIKHVEIIPIEFIVRNIATGSLTKRLGIEDGTILENPLIEYCLKNDELGDPLVSKEHIYTFKWSTKKEIEKIDKQLLRINDFMVGMFRGVGIKLVDFKVEFGRIKNNGKTDVLLADEISPDTCRLWDNKTDKKLDKDRFRNNLGNLINAYQEVAKRLGILYEQSNIQAVNFEKPKAVKNKK

SEQ ID NO: 194872 - protein, 181 aa, Unknown
  Bacterial polypetide isolated from the Sargasso Sea
LIKKNIPTHFLELKNENTMIAQKIKVIPLEIVLRNTAYGSLCKQTTIKSGTVLAKPLIDIYLKNDELNDPLITRDRIELMHILSSNDLDLIIDLTLKINLILKSFFKNIQLQLVDFKLEFGYDFKNNILLADEISPDNCRLWDLNQKNDTIVSLDKDRFRNDLGGLIEAYSEINRRINDFI

SEQ ID NO: 194873 - protein, 108 aa, Unknown
  Bacterial polypetide isolated from the Sargasso Sea
LRINDILLGMFRAIGIKLVDFKIEYGKTWNKDTEKKEIVLADEISPDTCRLWDSKTEKKLDKDRFRKDLGNIIQAYQDVARRFGIMPEETNISEVNFGKTIPLKFKNK

SEQ ID NO: 194874 - protein, 128 aa, Unknown
  Bacterial polypetide isolated from the Sargasso Sea
EHILIFGWATKKEIEKIKKIILRINDFMIGMFRGIGIKLVDFKLEFGRIKSSNKKDIILADEISPDTCRLWDSLTEKKLDKDRFRKNLGGLIPAYTEVAKRLGILHEQSNVNTSNVTNLSSFKKKIRK

SEQ ID NO: 194875 - protein, 216 aa, Unknown
  Bacterial polypetide isolated from the Sargasso Sea
KGVLNNRISEHILTNLSQIGIENHLVKRLNMREQLIKFVEIIPIEFIIRNIATGSLTKRLGIEDGTVLKEPLIEYCLKDDKLGDPLISEDHIYAFDWANKKEIEKVKKTIFRINDFMIGMFRGVGIKLIDFKLEFGRTKIDGRKDIILADEISPDTCRLWDSATDKKLDKDRFRKDLGDLLPAYTEVAKRLGILHEQSNVSAVNVTKLSSIKKRRK

SEQ ID NO: 194876 - protein, 191 aa, Unknown
  Bacterial polypetide isolated from the Sargasso Sea
MKKGKKLYEGKAKIIYATSDKNLVIQYFKDDATAFNNQKKSTIEGKGVLNNRISEHILSNLSQIGIKNHLVKRLNMREQVIKLVEIIPIEFVIRNIATGSITKRLGIEDGTVLKEPLIEYCLKDDALGDPLIAEDHIYAFDWASKKEIEKIKKMILRINDFMIGMFRGVGIKLIDFKLEFGRIKLNGKNEI

SEQ ID NO: 194877 - protein, 88 aa, Unknown
  Bacterial polypetide isolated from the Sargasso Sea
LTLKVNLILKSFFKNIQLQLVDFKLEFGYDFKNNILLGDEISPDNCRLWDLNQKNDTIVSLDKDRFRNDLGGLIEAYSEINRRINDYL

SEQ ID NO: 194878 - protein, 122 aa, Unknown
  Bacterial polypetide isolated from the Sargasso Sea
IYLKNDELNDPIITKDRIELMNIISSKDLDLIIDLTLKINLILKSFFKNIQLHLVDFKLEFGYNFNNKILLADEISPDNCRLWDLNQKNDIIVSLDKDRFRNDLGGLIEAYSEINRRINDFN

SEQ ID NO: 194879 - protein, 105 aa, Unknown
  Bacterial polypetide isolated from the Sargasso Sea
LRINDFLQGMFKGIGIKLVDFKVEFGKTKSDEKIILADEISPDTCRLWDSKTDKKLDKDRFRNDLGEIIEGYQEVARRLGILHEQSNIRPIKFSKPTAVKIKKNK

SEQ ID NO: 194880 - protein, 137 aa, Unknown
  Bacterial polypetide isolated from the Sargasso Sea
MKKGKKLYEGKAKIIYSSPEKNLVIQHFKDDATAFNNQKKATIDGKGILNNRISEYILQNLNQIGIKNHLIKRINMREQLIKLVEIIPIEFIVRNIASGSLTKRLGIEDGTVLNRPLVEYCLKNDELGDPLISREHI

SEQ ID NO: 194881 - protein, 215 aa, Unknown
  Bacterial polypetide isolated from the Sargasso Sea
GVLNNRISEHILLNLSQIGIKNHLVKRLNMREQVIKLVEIIPVEFIVRNIATGSITKRLGIEDGTVLKEPLIEYCLKDDKLGDPIIAEEHILVFDWATKKEMEKIKKMILRINDFMIGMFRGVGIKLIDFKLEFGRLKSSEKKEVILADEISPDTCRLWDGITDKKLDKDRFRKDLGDLIPAYTEVAKKLGILHEQSNISAVNVTKLSTVKRNRK

SEQ ID NO: 194882 - protein, 169 aa, Unknown
  Bacterial polypetide isolated from the Sargasso Sea
ARNIATGSITKRLGIEDGTVLKEPLIEYCLKDDKLGDPIIAEEHILAFDWATKKEMEKIKKMILRINDFMIGMFRGVGIKLIDFKLEFGRLKSSEKKEVILADEISPDTCRLWDSITDKKLDKDRFRKDLGDLIPAYTEVAKRLGILHEQSNISAVNVTKLSTVKRNRK

SEQ ID NO: 194883 - protein, 245 aa, Unknown
  Bacterial polypetide isolated from the Sargasso Sea
ATNDKDLVIQYFKDDATAFNNQKKSTIEGKGVLNNRISEHILSNLSQIGIQNHLVKRLNMREQVIKLVEIIPVEFVVRNVATGSITKRLGIEDGTILKEPLIEYCLKDDALGDPLIAEEHIYVFEWAKKEEIEKVKKMILRINDFMIGMFRGIGIKLIDFKLEFGRLKVNGKNEIILADEISPDTCRLWDSITEKKLDKDRFRKDLGDLIPAYTEVAKRLGILHEQSNLSAVNVTKLSSIKKKSK

SEQ ID NO: 194884 - protein, 214 aa, Unknown
  Bacterial polypetide isolated from the Sargasso Sea
VLNNRISEHILQNLNQVGIKNHLIKRLNMREQLIKLVEIIPIEVIVRNIATGSLTKRLGVTDGTILEKPLIEFCYKKDELGDPLIAKEHIFAFNWATENEIKTIEKMTFRVNDFMSGMFRGIGIKLVDFKLEFGRIWDGDTKEVILADEISPDTCRLWDIKSERKLDKDRFRKDLGNIIQAYQEVARRLGIVPETTNVSEVNFKKPTSISIKKK

SEQ ID NO: 194885 - protein, 175 aa, Unknown
  Bacterial polypetide isolated from the Sargasso Sea
MQKQAELYRGKAKTVYSTENPDLLVLEFRNDTSAGDGARIEQFDRKGMVNNKFNHFIMSKLEEAGIPTQMEALLSDTECLVKKLEMVPVECVVRNRAAGSLVKRLGIEEGIELNPPLFDLFLKNDAMHDPMVNESYCETFGWVSKKNLARMQELTFKANDVLKKLFDDAGLILVD

SEQ ID NO: 194886 - protein, 245 aa, Unknown
  Bacterial polypetide isolated from the Sargasso Sea
QTNDKKYVIQHFKDDATAFNNQKKAVMDGKGILNNRISEHILTQLNNVGIKNHLVKRLNMREQLVQYVEIIPIEFIVRNTATGSLTKRLGIEDGTVLDNPLIEYCLKDDDLGDPLVSTEHILAFKWMEKDELKLINKELNRINDFLQGMFRGVGIKLVDFKVEFGRYEKNGKKEIMLADEISPDTCRLWDVNSDKKLDKDRFRKGLGNLIEAYQEVARRLDILHEQSNIRPLKYTKPQAVKIKKK

SEQ ID NO: 194887 - protein, 206 aa, Unknown
  Bacterial polypetide isolated from the Sargasso Sea
MNKGNKLYEGKAKIIYETKDKNLVIQHFKDDATAFNNLKKSKVEGKGVLNNRISEYILTNLSQCGIKTHLVKRLNMREQLIRKAEIFPIEFIVRNIATGSLTKRLDISEGTILEKPLLEYCYKKDELEDPLISKEHIYSFGWATEKEINEIDKITLRINDLLMGLFRGIGIKLVDFKIEYGKAWNKDTEEKEIVLADEISPDTCRL

SEQ ID NO: 194888 - protein, 234 aa, Unknown
  Bacterial polypetide isolated from the Sargasso Sea
EIAAGKAKSMFTTNNANELIMEFRDDASAFDGKKRASLAGKGAVNNQFNAFIMDYLGANGVEHHLINLMDNTHSLVHSLDMFPIECVIRNRATGSICRRLGTEDGLILEKPLFEFFLKDDDLGDPLINRNHIVSFGWAKDDELDEMISTSHKVNGLLTKLFADSGMILVDFKLEFGVSNGKILLGDEFTPDGCRLWDDQTLEKLDKDRFRQDLGDVIESYHMVAHRLGMQIKVD

SEQ ID NO: 194889 - protein, 225 aa, Unknown
  Bacterial polypetide isolated from the Sargasso Sea
MKKGKKLYEGKAKIIYATSDKNLVIQYFKDDATAFNNQKKTTIEGKGVLNNRISEHILSNLSEVGIKNHLVKRINMREQLVKLVDIIPIEFIVRNIATGSLTQRLGIEDGTVLEHPLIEYCLKDDKLGDPLISRDHILTFNWLNVIQLDLINENLTRLNDFLLGMFRAVGIKLVDFKVEFGFTHESGKNQIVLADEISPDTCRLWDTITDRKLDKDRFRKDLGDL

SEQ ID NO: 194890 - protein, 161 aa, Unknown
  Bacterial polypetide isolated from the Sargasso Sea
MPEELLYEGKAKKLFVTEDPQILRVEYKDDATAFNGKKFDRLRDKGRLNNAITVFFFKHLETKNIPSHFVRMISETEQLVRRVKIIPLEVVVRNVVAGSLSKRIGWKEGKELPHPIVEFYYKDDDLGDPLLAEEHIRLLELASEAQIKEHKKRGLAVNEAL

SEQ ID NO: 194891 - protein, 240 aa, Unknown
  Bacterial polypetide isolated from the Sargasso Sea
MKKGKKLYEGKAKIIYASNDKNLVIQHFKDDATAFNNQKKDVIEGKGILNNRISEHILTQLSNVGIKNHFVKRLNMREQLVKLVEIIPIEFVVRNIATGSLTKRLGIEDGTVLDYPLVEYCLKNDDLGDPLVSREHILAFKWMDVFELDFIYEEVRRINDFLQGMFRGVGIKLVDFKVEFGRFEADGKREIMLADEISPDTCRLWDMRTDKKLDKDRFRNNLGNLVEAYQEVAIRLNILH

SEQ ID NO: 194892 - protein, 82 aa, Unknown
  Bacterial polypetide isolated from the Sargasso Sea
GWATLEQLAEMKAYSFKVNEVLSKLFDDAGLLLVDFKLEFGLFHGKIVLGDEFSPDGCRLWDKETRKKRTRTASAQGLGDVI

SEQ ID NO: 194893 - protein, 88 aa, Unknown
  Bacterial polypetide isolated from the Sargasso Sea
VDFKLEFGRIWQGDKKEVILADEISPDTCRLWDVKSEKKLDKDRFRKDLGNIIQAYQEVARRLGIVPETTNISEVNFKKPTSISIKKK

SEQ ID NO: 194894 - protein, 251 aa, Unknown
  Bacterial polypetide isolated from the Sargasso Sea
KAKIIYATSDKNLVIQHFKDDATAFNNQKKDIIEGKGILNNRISEHILTQLSNVGIKNHLVKRLNMREQLVKLVEIIPIEFIVRNIATGSLTKRLGIEDGTVLDYPLVEYCLKNDDLGDPLVSREHILAFKWMDVFELDFIYEEVRRINDFLQGMFRGVGIKLVDFKVEFGRNVSDSKREIMLADEISPDTCRLWDMRTDKKLDKDRFRNNLGNLVEAYQEVAVRLNILHEQSNIRPLTYPKPKAVKIKKK

SEQ ID NO: 194895 - protein, 240 aa, Unknown
  Bacterial polypetide isolated from the Sargasso Sea
NLVIQYFKDDATAFNNQKRTTIEGKGVLNNRISEHILSNLSQIGIKNHLIKRLNMREQIIKLVEIIPIEFIVRNVATGSITNRLGIEDGTVLKEPLIEYCLKNDKLGDPLISEEHILTFDWASKTEIDKIKKMILRINDFMVGMFRGVGIKLIDFKLEFGRIKIDGKNEVILADEISPDTCRLWDSITEKKLDKDRFRKDLGDLIPAYTEVAKRLGILHEQSNVSAVNVTKLSSVKRKKK

SEQ ID NO: 194896 - protein, 244 aa, Unknown
  Bacterial polypetide isolated from the Sargasso Sea
EKLYEGKAKILYSTDDSYSLIQHFKDEATAFNAKKKEVIEGKGVLNNFLSEFFMQKLNSVNVPTHFISRLNMREQLVEKCDIIPLEVVVRNIAAGSLSKRLGIEEGKRLPRPLVEFYYKDDSLNDPLVTESQISTFEWATETELGEIFEIALRTNDFLCGLLSAVNLTLVDFKIEIGRSFRSEGEKLIIADEISPDTCRLWDSKTKKRLDKDVFRLNEGSISIAYTEVADRFDLLPKNVRRAVQ

SEQ ID NO: 194897 - protein, 262 aa, Unknown
  Bacterial polypetide isolated from the Sargasso Sea
MNKGKKLYEGKAKIIYEGPEKGTAIQHFKDDATAFNNQKKSTVEGKGVLNNRISEHILNNLNQIGVKTHLIKRLNMREQLVRLVDILPVEFIVRNIATGSLTKKLGIADGTVLTKPLIEYSYKNDELGDPLIAREHILEFKWVKDANSLDFINATCLRINDFMQGMFRGVGIKLVDFKLEFGVANIDGKENIILADEISPDTCRLWDVASEKKLDKDRFRKDLGNIIQAYQEVARRLGIIHEEANISEVKFGKPKAVTIKNK

SEQ ID NO: 194898 - protein, 236 aa, Unknown
  Bacterial polypetide isolated from the Sargasso Sea
DRISVFDKVLPNIIPEKGIILNEISNFWFKRYNNLIPNHIIDYDINSLEISKDEIKEIAQRSITVKKLKTFPIEAIVRLYLSGSAYNEYLKDGCVCGIKLPKGLRQSEKLPEPIFTPSTKANVGDHDLNITHDSCINIIGKNNFEFIKKISIKIFNDAFLYLKERGIILSDTKFEFGFDSQDNIFLIDEVLTPDSSRFWLEKDYKIDCSPQSLDKQYIRDYVKFSGWTDDQNLPSL

SEQ ID NO: 194899 - protein, 175 aa, Unknown
  Bacterial polypetide isolated from the Sargasso Sea
EAGIATQVEALVSDTESLVKKLDMIPVECVVRNLSAGSLVRRLGVEEGKELNPPIFEFFLKNDALHDPMVNDYHILSFGWATEAQIAEMKALTFKVNSVLKALFDDAGMLLVDYKLEFGVDKDGNIVLGDEFTPDGCRLWDKETRKKMDKDRFRQGLGSVVETYIEVAERLGLSL

SEQ ID NO: 194900 - protein, 256 aa, Unknown
  Bacterial polypetide isolated from the Sargasso Sea
MKKGKKLYEGKAKIIFATSDKNTVIQHFKDDATAFNNQKKANIDGKGILNNRISEHLLKSLSEVGIKNHLIKRLNMREQLVELVNIIPIEFVIRNIATGSLTKRLGIEEGTVLDYPLIEYCLKDDKLGDPIISREHILNFKWLNLLELDLINKQCLRINDYLQGLFRGIGIKLVDFKVEFGKTKSDETIILADEISPDTCRLWDQETDKKLDKDRFRKDLGNIVDAYQEVARRLGILHEQSNIRPIKFSKPTAVKI

SEQ ID NO: 194901 - protein, 124 aa, Unknown
  Bacterial polypetide isolated from the Sargasso Sea
MTGASKDEIKQIDKMTLRINDILSGLFRGIGIKLIDFKIEYGKVWNKDKSENEIVLADEISPDTCRLWDTKTEKKLDKDRFRKDLGNIIEGYQEVARRLGIMPEIANVKEVSFNKPSSIKFKKK

SEQ ID NO: 194902 - protein, 261 aa, Unknown
  Bacterial polypetide isolated from the Sargasso Sea
MKKGKKLYEGKAKIIYATNDKNLVIQHFKDDATAFNNQKKDVIEGKGILNNRISEHILTQLSNVGIKNHLVKRLNMREQLVKLVEIIPIEFVVRNIATGSLTKRLGIEDGTVLDYPLVEYCLKNDELGDPLVSREHILAFKWMDVFELDFIYEEVRRINDFLQGMFRGVGIKLVDFKVEFGRSEVDGKREVLLADEISPDTCRLWDMRTDKKLDKDRFRNNLGNLVEAYQEVAIRLNLLHEQSNIRPLNYPKPKAVKIKKK

SEQ ID NO: 194903 - protein, 203 aa, Unknown
  Bacterial polypetide isolated from the Sargasso Sea
LAQCGIRTHFVKRLNMREQLINKAEIFPIEFIVRNIATGSLTKRLGISEGTVLEKPLLEYCYKKDELNDPLISKEHIYLFDWATEKEIQIIDKMTLRINDLLVGMFRGIGIKLVDFKIEYGKIWNEETEEKEILLADEISPDTCRLWDSKTEKKLDKDRFRKGLGNIIQGYQEVARRLGIMPEETNISEVNFGKTIPIKFKKK

SEQ ID NO: 194904 - protein, 234 aa, Unknown
  Bacterial polypetide isolated from the Sargasso Sea
YEGKAKKVFSHDEVDKVLIEFKDDATAFNALKKAKYEGKGRLNCLISARIFEILIKNKIPTHFIELKNENTMIAKKIVVIPLEIVLRNTAYGSLCKQTTIKSGTVLAKPLIDIYFKNDELNDPLITKDRIELMNILSSKDLDLIINLTLKINGILISFFKNIQLQLVDFKLEFGYDVNNNIILGDEISPDNCRLWDLNQKNDTIVSLDKDRFRNDLGGLIEAYSEINRRINNFI

SEQ ID NO: 194905 - protein, 261 aa, Unknown
  Bacterial polypetide isolated from the Sargasso Sea
MKKGKKLYEGKAKIIYSTNDKNLVIQYFKDDATAFNNQKKTTIEGKGVLNNRISEHILSNLSQIGIENHLVKRLNMREQIIKLVEIIPIEFIVRNVATGSITKRLGIEDGTVLKEPLIEYCLKDDKLGDPLISEEHILAFDWASKIEIDKVKKMILRINDFMIGMFRGVGIKLIDFKLEFGRIKINGKNDVILADEISPDTCRLWDSITEKKLDKDRFRKDLGDLIPAYTEVAKRLGILHEQSNVSAVNVTKLSSVKRKKK

SEQ ID NO: 194906 - protein, 261 aa, Unknown
  Bacterial polypetide isolated from the Sargasso Sea
MKKGKKLYEGKAKIIYATQDKDLVIQYFKDDATAFNNQKKTTIEGKGVLNNRISEHILSNLSQIGIKNHLVKRLNMREQVIRLVEIIPIEFIVRNVATGSLTKRLGIEDGTVLKEPLIEYCLKDDSLGDPLIAEDHIYAFEWANKKEIEKVKKMILRVNDFMIGMFRGIGIKLIDFKLEFGRLKVNGRNEVILADEISPDTCRLWDSVTDKKLDKDRFRKDLGDLIPAYTEVAKRLGILHEQSNVSAVNVTKLSSVKKKNK

SEQ ID NO: 194907 - protein, 234 aa, Unknown
  Bacterial polypetide isolated from the Sargasso Sea
MGEPIPNKGRVLNQMANFWFDKLAHIVPNHLTGDAPEAVVAADEVEQVKGRGVVVKRLEPIMIEAVVRGYLAGSGWKEYQASGAVCGVQLPEGLQNAQKLPEPIFTPAAKAEMGEHDENITFEETERRIGTELAATIRDISIKLYKEAADYAATRGIIIADTKFEFGLDNHGKLYLMDEVLTADSSRFWPADQYEVGTNPPSFDKQFVRDWLEAQPWGKTAPAPALPADVVEKT

SEQ ID NO: 194908 - protein, 237 aa, Unknown
  Bacterial polypetide isolated from the Sargasso Sea
MKKGKKLYEGKAKIIYATSDKNLVIQYFKDDATAFNNQKKSNIEGKGVINNRISEHILTNLSQVGIKNHLVKRLNMREQLVKLVEIIPIEFIVRNIATGSLTKRLGIEDGTVLARPLIEYCLKDDKLGDPIISKEHILTFNWLSKTQLDFVDDNLKRLNDFLLGMFRGVGIKLVDFKVEFGFMNESNKNEIILADEISPDTCRLWDSITEKKLDKDRFRKDLGDLIPAYTEVAKRLG

SEQ ID NO: 194909 - protein, 111 aa, Unknown
  Bacterial polypetide isolated from the Sargasso Sea
MNKGNKLYEGKAKIIYETKDKNLVIQHFKDDATAFNNLKKSKVEGKGVLNNRISEYILTNLMQCGIKTHLIKRLNMREQLIKKADIFPIEFIVRNIATGSLSKRLNIPEGT

SEQ ID NO: 194910 - protein, 100 aa, Unknown
  Bacterial polypetide isolated from the Sargasso Sea
MNKGNKLYEGKAKIIYETRDKNLLIQHFKDDATAFNNLKKSKVEGKGVLNNRISEYILTNLSQCGIKTHLVKRLNMREQLIRKAEIFPIEFIVRNIATGS

SEQ ID NO: 194911 - protein, 94 aa, Unknown
  Bacterial polypetide isolated from the Sargasso Sea
GDLDEMISTSHKVNELLTKLFADSGMILVDFKLEFGISNGKILLGDEFTPDGCRLWDDETLEKLDKDRFRQDLGDVIESYHMVAHRLGMQIKVD

SEQ ID NO: 194912 - protein, 212 aa, Unknown
  Bacterial polypetide isolated from the Sargasso Sea
NNRISEHILNNLGQVGIKNHLVKRLNMREQLIKFVEIFPIEFIVRNIATGSLTKRLGIEEGTVLESPLIEYCFKNDDLGDPLVSKEHIFAFNWATKKEIEKVNRYLFRINDFLIGMFRGVGIKLVDFKVEFGRYNYNNKSEIILADEISPDTCRLWDINSEKKMDKDRFRKNLGNVLQAYQDVARRLGILHEESNIRTVKFPKPKAVKIKKK

SEQ ID NO: 194913 - protein, 158 aa, Unknown
  Bacterial polypetide isolated from the Sargasso Sea
RLGVTDGTILEKPLIEFCYKKDELDDPLIAKEHIFAFNWATKDEIKSIEDMTFRINDFMSGMFRGIGIKLVDFKLEFGRIWEGDKKEIILADEISPDTCRLWDIKSERKLDKDRFRKDLGNIIQAYQEVARRLGIVPETTNISEVNFKKPTSISIKKK

SEQ ID NO: 194914 - protein, 248 aa, Unknown
  Bacterial polypetide isolated from the Sargasso Sea
GKAKIIYATNDKNLVIQYFKDDATAFNNQKKTTIEGKGVLNNRISEHILSNLSEVGIKTHLVKRINMREQLVKLVDIIPIEFIVRNIATGSLTKRLGIEEGTVIERPLIEYCLKDDELGDPIISREHILTFNWLNVMQLDWIDENLSRLNDFLQGMFRGVGIKLVDFKVEFGFTHESEKTQIILADEISPDTCRLWDTLTDKKLDKDRFRKDLGDLIPAYTEVAKRLGILHEQSNVSAVNVTQLSSVK

SEQ ID NO: 194915 - protein, 204 aa, Unknown
  Bacterial polypetide isolated from the Sargasso Sea
MSRRKQIYEGKAKVLFEGPEPGTIVQYFKDDATAFNNKKKGIITGKGVLNNRISEHLMIKLNDMGIPTHFIKRLNMREQLVRKVEIIPLEIVVRNVVAGSLAKRLGLEEGDELSRSIIEFFYKSDQLNDPLVTEEHITAFDWASTHEMDEIVTMTLRINDFLSGLFFGTGIKLIDFKLEYGRIYINDQIKIVLADEISPDSCRL

SEQ ID NO: 194916 - protein, 253 aa, Unknown
  Bacterial polypetide isolated from the Sargasso Sea
MKKGKKLYEGKAKVIFATDNKDFVIQHFKDDATAFNNQKKAKIEGKGVLNNRISEHILMNLDQVGIKNHLVKRLNMREQLIKHVEIIPIEFIVRNIATGSLTKRLGIEDGTILENPLIEYCLKNDELGDPLISKEHIHTFKWATKKEIEKIDKQLLRINDFMVGMFRGVGIKLVDFKVEFGRIKNNGKTDVLLADEISPDTCRLWDNKTDKKLDKDRFRNNLGNLINAYQEVAKRLGILHEQSNIQAVNFEKQ

SEQ ID NO: 194917 - protein, 210 aa, Unknown
  Bacterial polypetide isolated from the Sargasso Sea
SEYILSNLGECGIKTHLIKRLNMREQLIKKAEIFPIEFIVRNVATGSLTKRLGISEGTVLNKPLLEYCYKKDELEDPIISREHIFSFGWATEKQIEIIDKITLRINDILQGIFRGIGIKLIDFKIEYGIAINKDTNEKEIVLADEISPDTCRLWDVKTEKKLDKDRFRKDLGNVIQGYQEVARRLGIMPEETNISEVNFGKATSLKFKKK

SEQ ID NO: 194918 - protein, 195 aa, Unknown
  Bacterial polypetide isolated from the Sargasso Sea
NHLVKRINMREQLIKFVEIIPVEFIVRNIATGSLTKRLGIEDGTVLDEPLIEYCLKDDKLGDPLISKEHILTFKWSNKKELEKIDKYLHRINDFMVGMFRGVGIKLVDFKVEFGRYKNNGKTEVILADEISPDTCRLWDVNTEKKLDKDRFRNNLGHLIEAYQDVARRLGILHEQSNIRPIKFTKPKAVKFKKNK

SEQ ID NO: 194919 - protein, 148 aa, Unknown
  Bacterial polypetide isolated from the Sargasso Sea
VIRNRATGSICKRLGTHDGLILDKPLFEFFLKDDDLGDPLINRNHIVSFGWAKDNELDEMIRTSHKVNKLLTKLFADSGMILVDFKLEFGISNGKIFLGDEFTPDGCRLWDDQTLEKLDKDRFRQDLGDVIESYHMVAHRLGMEIKVD

SEQ ID NO: 194920 - protein, 167 aa, Unknown
  Bacterial polypetide isolated from the Sargasso Sea
MSRRKQIYEGKAKVLFEGSEPGTIVQYFKDDATAFNNQKKGVITGKGVLNNRISEYLMTKLNDMGIPTHFIKRLNMREQLVRKVEIIPLEVVVRNTVAGSLAERLGLKEGDNLPRSIIEFFYKADELNDPLVTEEHITAFDWASAQEMDELISMTLRINDFLSGLFF

SEQ ID NO: 194921 - protein, 242 aa, Unknown
  Bacterial polypetide isolated from the Sargasso Sea
MNNKYDLIYEGKAKKVFNYDDVDRVRIEFKDDATAFNALKKEKFEGKGKLNCLISARIFEILTKNKIPTHFIELENENTMIAKKIRIIPLEIVLRNTAYGSLCKQTNIKPGTSLSKPLIDIYLKNDELNDPLITKDRIELMNILSSDDLELIVKLTLKINLILKSFFNNIQLQLVDFKLEFGYDSKNNIILGDEISPDNCRLWDLNQKNDTIKSLDKDRFRYDLGGLIEAYSEIHRRINDFL

SEQ ID NO: 194922 - protein, 139 aa, Unknown
  Bacterial polypetide isolated from the Sargasso Sea
KKDELGDPLIAKEHIFAFNWASEAEIKSIEEMTFRVNDFMSGMFRGIGIKLVDFKLEFGRIWDGDKKEVILADEISPDTCRLWDIKSERKLDKDRFRKDLGNIIQAYQEVARRLGIVPETTNVSEVNFKKPTSISIKKK

SEQ ID NO: 194923 - protein, 261 aa, Unknown
  Bacterial polypetide isolated from the Sargasso Sea
MKKGKKLYEGKAKIIYATNDKNLVIQYFKDDATAFNNQKKTTIEGKGVLNNRISEHILSNLSQIGIKNHLVKRLNMREQIIKFVEIIPIEFIVRNVATGSLTKRLGIEDGTVLKEPLLEYCLKDDKLGDPLVAEEHIYAFEWATKKEIDKVKKMILRINDFMIGMFRGIGIKLIDFKLEFGRLKLNGKNEIILADEISPDTCRLWDSITDKKLDKDRFRKDLGGLIPAYTEVAKRLGILHEQSNISAVNVTKLSSVKKKRK

SEQ ID NO: 194924 - protein, 221 aa, Unknown
  Bacterial polypetide isolated from the Sargasso Sea
FKNDATAFNAQKKAQLDDKGRLNCQISTRLFELLEREGVPTHYCGLAGETWMLVRRVEIIPLEVVLRNTATGSLCRQTPIAEGTAIEPALLDLYYKDDSLGDPLLTEARVQLLGVADPARLSAIEQLARRVNAVLLPFFEGLDLQLVDFKLELGLAADGTLLLADEISPDTCRLWDRRNSNAEDRILDKDRFRKDLGGVMEAYGEVLKRVQGSCPNPRNCL

SEQ ID NO: 194925 - protein, 163 aa, Unknown
  Bacterial polypetide isolated from the Sargasso Sea
MKKGKKLYEGKAKIIYASPEKNLVIQHFKDDATAFNNQKKATIDGKGILNNRISEYILQNLNQVGIKNHLVKRINMREQLIKFVEIIPIEFIVRNIATGSLTKRLGIEDGTLLNRPLIEYCLKNDELGDPLISREHILTFDWLNIIELDWITEECRRINDFLP

SEQ ID NO: 194926 - protein, 254 aa, Unknown
  Bacterial polypetide isolated from the Sargasso Sea
MARRRQVYEGRGKVLFEGPEPGTLVQYFKDDAYVQQTRKAGTITGKGVLNNRISEYLMQRLGEIGVPTHFVRRLNMREQLVREVEIIPITIVVRNIVAGGLAERFAMPEGTALPRSIVEFYYKSDELGSPMVTEEHITAFGWAHPQDIDEILALSLRVNDFLAGLFLGIGLRLVDVRLEFGRLWENDHMRIMLADEISPDNCRLWDLQTNEPMDKDRFSKDLGRVEEAYQEVAHRLGILPQSEPSDFRGTNTIQ

SEQ ID NO: 194927 - protein, 165 aa, Unknown
  Bacterial polypetide isolated from the Sargasso Sea
MKKGKKIYEGKAKIIYATNDKSLVIQYFKDDATAFNNQKKTTIEGKGVLNNRISEHILSNLSQIGIKNHLVKRLNMREQIINLVEIIPIEFIVRNVATGSITKRLGIEDGTVLKEPLIEYCLKNDKLGDPLVSEEHILAFDWASKTEIDKIKKMIFRINDFMIGM

SEQ ID NO: 194928 - protein, 245 aa, Unknown
  Bacterial polypetide isolated from the Sargasso Sea
MNKGKKLYEGKAKILYETKDKNTLIQHFKDDATAFNNLKKTSVEGKGVLNNRISEYILINLSQCGIKTHFLKRLNMREQLIKKAEIFPIEFIVRNISTGSLTTRLGISEGTVLERPLLEYCYKKDELNDPIISKEHIFSFGWATEKEIEIIDKMTLRINDLLIGLFRGIGIKLVDFKIEYGKAWNKDTEKKEIVLADEISPDTCRLWDSKTEKKLDKDRFRKDLGNIIQGYQEVARRLGIMPEET

SEQ ID NO: 194929 - protein, 92 aa, Unknown
  Bacterial polypetide isolated from the Sargasso Sea
MKKGKKIYEGKAKIVFATENKNLVIQHFKDDATAFNNQKRAKIEGKGVLNNRISEHILTNLSQIGIKNHLVKRINMREQLIKFVEIIPIEFV

SEQ ID NO: 194930 - protein, 279 aa, Unknown
  Bacterial polypetide isolated from the Sargasso Sea
QFLTIGFSLFAQNGLADSHILDIPHPFVWIVQKARPIKVEAICRQYITGSMWRAYSKGERVFCGITLPEGLSKDQKLPELLITPSTKGILTGIPGVPAQDDVNISRSDIEANYQAFGFEKPQDIDLYETLLKQGFKVISDALAKLDQVFVDTKFEFGYVNDKNGQSKLIYMDEVGTPDSSRIWDGPAYREGKIVENSKEGFRQFLLNHFDDADILLNKDRMPEREALARDNDLPLEAMMNVSRTYTGVAEKVTGRSIALPTNPKADIIKVLREQYDLIV

SEQ ID NO: 194931 - protein, 153 aa, Unknown
  Bacterial polypetide isolated from the Sargasso Sea
MNKGNKLYEGKAKIIYQTKDKNLVIQHFKDDATAFNNLKKAKVEGKGVLNNRISEFILTNLMQSGIQTHLVRRLNMREQLIKKAEIFPIEFIVRNIATGSLTKRLGIAEGTILEKPLLEYCLKKDELNDPLISREHIFAFGWANENEIKFIDK

SEQ ID NO: 194932 - protein, 235 aa, Unknown
  Bacterial polypetide isolated from the Sargasso Sea
MKKGKKIYEGKAKIIYATGDKNLVIQYFKDDATAFNNQKRTTIEGKGVLNNRISEHILTNLSQIGIKNHLVKRLNMREQIIRFVEIIPIEFIVRNVATGSLTKRLGIEDGTVLEEPLIEYCLKDDKLGDPLVAVEHIYAFEWASKKEIEKVKKMILRINDFMIGMFRGIGIKLIDFKLEFGRIKVNGKNEIILADEISPDTCRLWDTITDKKLDKDRFRKNLGGLFLLIQKLQKD

SEQ ID NO: 194933 - protein, 140 aa, Unknown
  Bacterial polypetide isolated from the Sargasso Sea
MKKGKKLYEGKAKIIYATNDKNLVIQYFKDDATAFNNQKKTTIEGKGVLNNRISEHILSNLSQIGIKNHLIKRLNMREQIIKLVEIIPIEFIVRNVATGSITKRLGIEDGTILKEPLIEYCLKDDKLGDPLISEEHILAF

SEQ ID NO: 194934 - protein, 210 aa, Unknown
  Bacterial polypetide isolated from the Sargasso Sea
MAPRQKLYEGKAKILFKGTDSNTLIQYFKDDATAFNAKKTSVFEGKGILNNILSEHFMKGLSSIGISNHFIKRLNMREQLIKSCDIIPLEIVVRNLAAGSISKRLGLTEGTVFRPPLVEFYFKEDELGDPLVTEEHIVGLNWASQSEVKEIKATALRVNDFMSGMMSAVDITLVDFKIEIGRYCEQNEWKLIIADEISPDSCRLWDKTSG

SEQ ID NO: 194935 - protein, 191 aa, Unknown
  Bacterial polypetide isolated from the Sargasso Sea
KLIILYLSIKCRYYPIIRSQIHFIKKINIRDNLIHQCKIIPLEVVIRNIAAGSICKRLGIKEGKIFKDPIIEFYYKNDELNDPIVNNSHIISFGWSDKEELLNINKLSLKVNKILKKKFEEISISLIDFKLEFGRKTSDDSLVVADEISPDSCRLCDVNNKEKFDKDIFRYDKGNLLEAYKKLFIRLGIIK

SEQ ID NO: 194936 - protein, 212 aa, Unknown
  Bacterial polypetide isolated from the Sargasso Sea
NRISEHILTYLGQVGIKNHLVKRINMREQLIKHVTIIPIEFIVRNIATGSLTKRLGIEDGTVLDEPLIEYCLKNDGLGDPLISKEHIFAFKWATKKEIEKVDKQLHRINDFLVGLFRGVGIKLVDFKVEFGRFKNNNKNEIILADEISPDTCRLWDMNTEKKLDKDRFRKDLGNLIEAYQDVARRLGILHEQSNIRPLRFPKPKAVRLKKNK

SEQ ID NO: 194937 - protein, 231 aa, Unknown
  Bacterial polypetide isolated from the Sargasso Sea
DDATAFNNQKKSSIEEKGILNNRISEHLLKSLSEIGIKNHLIKRLNMREQLVELVNIIPIEFVIRNIATGSLTKRLGIEEGTVLDYPLIEYCLKDDKLGDPIISREHILNFKWLNIIELDLINQQCLRINDYLQGLFRAVGIKLVDFKVEFGKTKSNETIILADEISPDTCRLWDQETEKKLDKDRFRKDLGNVSEAYQEVARRLGILHEQSNIRPIKFTKPTAVKIKKSK

SEQ ID NO: 194938 - protein, 191 aa, Unknown
  Bacterial polypetide isolated from the Sargasso Sea
RLNMREQLIKKAEIIPVEIIVRNLATGSLTKRLGITEGTILSKPLIEYCYKSDDLGDPLVSIDHIFEFNWADKKEIETINELSLRINDILTGMFKAINIKLVDFKLEFGRAWNKDKDKNEIILADEISPDTCRLWDAKTEKKLDKDRFRKDLGNIIQSYQEVARRLGIMPEETNIKEVNFGKPTSVKFKKK

SEQ ID NO: 194939 - protein, 243 aa, Unknown
  Bacterial polypetide isolated from the Sargasso Sea
MKKGKKLYEGKAKIIFATSDKNTVIQHFKDDATAFNNQKKANIDGKGILNNRISEHLLKSLSEIGIKNHLIKRLNMREQLVELVNIIPIEFVIRNIATGSLTKRLGIEEGTILDYPLIEYCLKDDKLGDPIISREHILNFRWLNLIELDLINEQCLRINDYLQGLFRGIGIKLVDFKVEFGKTKSNETIILADEISPDTCRLWDQETDKKLDKDRFRKDLGNIVEAYQEVARRLGILHEQSNI

SEQ ID NO: 194940 - protein, 258 aa, Unknown
  Bacterial polypetide isolated from the Sargasso Sea
MKKGKKLYEGKAKIIYASPEKNLVIQHFKDDATAFNNQKKATIDGKGILNNRISEHILSNLNEIGIKNHLIKRINMREQLVKNVEIIPIEFVVRNIATGSLTKRLGIEDGTVLSRPLIEYCLKNDELGDPLISREHILTFDWLNVMELDWINEECRRINDFLQGMFRGVGIKLVDFKVEFGRSAQDNIIILADEISPDTCRLWDSSTEKKLDKDIFRNDLGNLIEGYQEVAKRLNILHEQSNIRPIKFPKPKAVKNKK

SEQ ID NO: 194941 - protein, 178 aa, Unknown
  Bacterial polypetide isolated from the Sargasso Sea
EIIPIEFIVRNIASGSITKRLGIEDGTVLKNPLIEYCLKNDKLGDPLIAEEHIFTFDWATKKEIEKIKKMILRINDFMIGMFRGVGIKLVDFKLEFGRLKMNGKKDIILADEISPDTCRLWDAVTEKKLDKDRFRKNLGGLIPAYTEVAKRLGILHEQSNVENSNVTNLSAFKKKLKK

SEQ ID NO: 194942 - protein, 208 aa, Unknown
  Bacterial polypetide isolated from the Sargasso Sea
MNNKYELIYEGKAKKVFSHNDSDKVIIEFKDDATAFNALKKARFEGKGKLNCLISARIFELLIKNNIPTHFIELKNENTMIAKKIKVIPLEIVLRNTAYGSLCKQTTIKPGTVLVKPLIDIYLKNDELNDPLLTKDRIELMNILSSKDLDLIINLTIKINGIMKSFFKNIQLQLVDFKLEFGYDFKNDILLGDEISPDNCRIMGSKSE

SEQ ID NO: 194943 - protein, 91 aa, Unknown
  Bacterial polypetide isolated from the Sargasso Sea
IKLIDFKLEFGRLKNNGKNEIILADEISPDTCRLWDSITDKKLDKDRFRKDLGDLIPAYTEVAKRLGILHEQSNVTAVNVTKLSSVKKKSK

SEQ ID NO: 194944 - protein, 252 aa, Unknown
  Bacterial polypetide isolated from the Sargasso Sea
MARRAKIYEGKAKILYEGPEPGTVVQYFKDDATAFNAEKKEVIEGKGVLNNRLSEFFMSGLNNIGVPTHFIKRLNMREQLVRNCEIIPLEVVVRNYAAGSMSKRLGIEEGTQLSRPVVEYYYKDDSLGDPIVSEEHIAAFNWASSQDMEDILGLSLRVNDFLSGVLFSVGIKLIDFKIEIGRFFEGEYQRLLIADEISPDSCRLWDVKSGKKLDKDVFRRDLGSLTDAYTEVANRLGLLPKTNSQIKPSLVK

SEQ ID NO: 194945 - protein, 114 aa, Unknown
  Bacterial polypetide isolated from the Sargasso Sea
MNKGNKLYEGKAKIIYETKDKNLVIQHFKDDATAFNNLKKAKVEGKGVLNNRISEYILSNLSQCGIKTHLVKRINMREQLIKKAEIFPIEFIVRNIATGSLTKRLGIPEGTNLE

SEQ ID NO: 194946 - protein, 189 aa, Unknown
  Bacterial polypetide isolated from the Sargasso Sea
MNNKFELIYEGKAKKVFFHNDSDKVIIQFKDDATAFNALKKAKFEGKGKLNCLISAKIFEHLLKNNIPNHFIELKNESTMIAQKIKIIPLEIVLRNTAYGSLCKQTTIKSGTLLAKPLIDIYLKNDELNDPLITKDRIELMDIISSKDLDLIIDLTLKINAILKSFFENIKLQLVDFKLEFGYNKNNQI

SEQ ID NO: 194947 - protein, 198 aa, Unknown
  Bacterial polypetide isolated from the Sargasso Sea
MNKGNKLYEGKAKIIYETKDKNLVIQHFKDDATAFNNLKKAKVEGKGVLNNRISEHILTNLSQSGIKTHLVKRLNMREQLIKKAEIFPIEFIVRNIATGSLSKRLGIPEGTVLERPLLEYCFKKDELNDPLVSKEHIYLFGWATESEIKNIDIITLRINDLLTGMFRAIGIKLVDFKIEYGKTWNKELEKKEIVLAEK

SEQ ID NO: 194948 - protein, 174 aa, Unknown
  Bacterial polypetide isolated from the Sargasso Sea
MARRTKIYEGKAKILYEGPEPGTIVQYFKDDATAFNAEKKEVIEGKGVLNNRLSEFFMSGLNNIGVPTHFIKRLNMREQLVRNCEIIPLEVVVRNYAAGSMSKRLGLEEGTQLPRPVVEYYYKDDSLGDPLVSEEHIAAFNWASPQDMDDILGLALRVNDFLSGIMFSVGIKLS

SEQ ID NO: 194949 - protein, 144 aa, Unknown
  Bacterial polypetide isolated from the Sargasso Sea
MLEYYLKNDELGDPLISSEHIFTFNWLKFSELDFVNKECRRINDFLQGMFRGVGIKLVDFKIEFGKTKSDNKIILADEISPDTCRLWDVKTEKKLDKDRFRKDLGNIIEAYQEIAIRLGIIHEQSNIRPLKFTKPREVKFKKNK

SEQ ID NO: 194950 - protein, 208 aa, Unknown
  Bacterial polypetide isolated from the Sargasso Sea
ATAFNAQKRGSVDLKGEMNNVITTLIFEYLNEKGIKTHFIKQLNEREQLVRKVSIIPLEMVVRNYSAGSMAQRLGVEEGIKSPVTIFDICYKKDELGDPLINDHHAVFLGAATYEELDEMYELTSDINEILIDLFDKMNIILVDFKIELGKTADGEIILADEISPDTCRLWDKDTMKKLDKDRFRRDLGEVTEAYVEIYNRLKAVLNK

SEQ ID NO: 194951 - protein, 88 aa, Unknown
  Bacterial polypetide isolated from the Sargasso Sea
MNKGKKLYEGKAKILYETKDKDLIIQHFKDDATAFNNLKKANVEGKGVLNNRISEYILTNLSQCGIKTHFIKRLNMREQLIKKLKYSP

SEQ ID NO: 194952 - protein, 221 aa, Unknown
  Bacterial polypetide isolated from the Sargasso Sea
TIIEGKGVLNNRISEHILSNLSQIGIKNHLVKRLNMREQVIKLVEIIPIEFIVRNVATGSLTKRLGIEDGTVLKEPLIEYCYKDDKLGDPLIAEDHIFAFEWASKKEIEKVKKMILRINDFMIGMFRGIGIKLIDFKLEFGRIKINGKNEIILADEISPDTCRLWDSITDKKLDKDRFRKDLGDLIPAYTEVAKRLGILHEQSNVTAVNVTKLSSVKKKNK

SEQ ID NO: 194953 - protein, 165 aa, Unknown
  Bacterial polypetide isolated from the Sargasso Sea
IVTGSLTKRLDIEDGSKLSRPLIEFCYKSDKLGDPLVAREHIYAFEWSSLKELDYINEQCLCINDFLLGMFKGIGIKLVDFKLEFGKRKSDGKIILADEISPDTCRLWDADTDKKLDKDRFRKDLGDVVEAYQEVARRLGILHEQVNNIRPIKFPKPTAVKMKKK

SEQ ID NO: 194954 - protein, 163 aa, Unknown
  Bacterial polypetide isolated from the Sargasso Sea
MIAKKIKVIPLEIVLRNTAYGSLCKQTTIKAGTVLAKPLIDIYLKNDELNDPLITKDRIALMNILNLQDLELVIDLTLKINLILKSFFKNIQLQLIDFKLEFGYDFKNNILLGDEISPDNCRLWDLNQKNDTIVSLDKDRFRNDLGGLIEAYSEINRRIDDFI

SEQ ID NO: 194955 - protein, 201 aa, Unknown
  Bacterial polypetide isolated from the Sargasso Sea
LGQVGIKNHLVKRINMREQLIKFVEIIPIEFIVRNIATGSLTKRLDIEDGTVLENPLIEYCYKKDELGDPLVAKEHIYAFNWASRKEIEKIDKYLLRMNDFMIGMFRGIGIKLVDFKVEFGRYKNNGKTEIILADEISPDTCRLWDISSDKKLDKDRFRKNLGNVMQAYQDVARRLGILHEESNIRAVKFPKPKAVKIKRK

SEQ ID NO: 194956 - protein, 231 aa, Unknown
  Bacterial polypetide isolated from the Sargasso Sea
LLLIILKKAKVEGKGVLNNRISEYILSNLSQCGIKTHLVKRLNMREQLIKKAEIFPIEFILRNISTGSLTKRLGIPEGTVLEKPLLEYCYKKDELNDPLISKDHIFSFGWATEKEMKIIDKTTLRINDILTGIFRAIGIKLVDFKIEYGKVWDKNKEKNEIVLADEISPDTCRLWDVKTEKKLDKDRFRKDLGNIIQAYQEVARRLGIMPEETNISEVNFGKTIPLKFKKN

SEQ ID NO: 194957 - protein, 157 aa, Unknown
  Bacterial polypetide isolated from the Sargasso Sea
MGIEDGTVLKEPLIEYCYKDDSLGDPLIAEDHIYAFEWATKKEIEKVKKMILRINDFMIGMFRGVGIKLIDFKLEFGRLKVNGKNEIILADEISPDTCRLWDSITEKKLDKDRFRKDLGDLIPAYTEVAKRLGILHEQSNVSAVNVTKLSSVKKKNK

SEQ ID NO: 194958 - protein, 127 aa, Unknown
  Bacterial polypetide isolated from the Sargasso Sea
MNKGNKLYEGKAKIIYETKDKDLVIQHFKDDATAFNNLKKAKVEGKGVLNNRISEYILSNLSQCGIKTHLVKRLNMREQLIKKAEIFPIEFIVRNIATGSLTKRLGIPEGTSLEKPLLEYCYKKDGT

SEQ ID NO: 194959 - protein, 210 aa, Unknown
  Bacterial polypetide isolated from the Sargasso Sea
MKKGKKLYEGKAKIIYSTSDKNLVIQYFKDDATAFNNEKRTIIEGKGVLNNRISEHILTNLSQIGIENHLVKRLNMREQLIKFVEIIPIEFVIRNVATGSLTKRLGIEDGTVLKEPLIEYCLKDDKLGDPLISEDHIYAFEWANKKEIEKIKKTIFRINDFMIGMFRGVGIKLIDFKLEFGRTKIDGRKEIILADEISPDTCRLWDSATD

SEQ ID NO: 194960 - protein, 185 aa, Unknown
  Bacterial polypetide isolated from the Sargasso Sea
MNKGKKLYEGKAKILYETKDKNLLIQHFKDDATAFNNLKKASVEGKGVLNNRISEHILTNLSQCGIKTHFIKRINMREQLIKKAEIFPIEFIVRNIATGSLTKRLGISEGTVLEKPLLEYCFKKDELNDPIISKEHIFSFGWASEKDIKIIDKMTLRINDLLVGMFRGIGIKLVDFKIEYGKTWG

SEQ ID NO: 194961 - protein, 104 aa, Unknown
  Bacterial polypetide isolated from the Sargasso Sea
MPEELLYEGKAKKLFITEDSQILRVEYKDDATAFNGEKFDRLRDKGRLNNAITGFFFEHLDTKDIPSHFVRKISETEQLVRRVKIIPLEVVVRNVAAGSLSKRI

SEQ ID NO: 194962 - protein, 190 aa, Unknown
  Bacterial polypetide isolated from the Sargasso Sea
RLNMREQVIKLAEIIPIEFIVRNIASGSITKRLGIEDGTVLKNPLIEYCLKNDKLGDPLIAEEHILTFGWATKKEIEKIKKIILRINDFMIGMFRGVGIKLVDFKLEFGRIKSSNKKDIILADEISPDTCRLWDALTEKKLDKDRFRKNLGGLIPAYTEVAKRLGILHEQSNVNSSNVTNLNIYKKKIKK

SEQ ID NO: 194963 - protein, 144 aa, Unknown
  Bacterial polypetide isolated from the Sargasso Sea
ITAGSIAKKLGIKEGLKLKKPLLEYYYKEDSLDDPMISRDHLITFGWATNSELKKIDKMSLKINKHLRNLFFKKNIILVDFKIEFGRLSSNPKKIVLADEISPDSCRLWDKKTNKKLDKDVFRRNLGSLLSAYEEVASRLGIVH

SEQ ID NO: 194964 - protein, 185 aa, Unknown
  Bacterial polypetide isolated from the Sargasso Sea
MKKGKKLYEGKAKIIYASSDKNLVIQYFKDDATAFNNQKKSTIEGKGVLNNRISEHILSNLSQIGIKNHLVKRLNMREQLIKLVEIIPIEFVVRNVATGSLTKRLGIEDGTVLKEPLIEYCLKDDELGDPLIAEDHIYAFEWASKKEIEKVKKMILRINDFMIGMFRGVGIKLIDFKLEFGRIKI

SEQ ID NO: 194965 - protein, 238 aa, Unknown
  Bacterial polypetide isolated from the Sargasso Sea
MKKGKKLYEGKAKIIFASPDKYLVIQHFKDDATAYNNQKRASIEGKGILNNRISEHILSSLKDVGIENHLIKRLNMREQLINLVDIIPIEFVVRNIVTGSLTKRLGIEDGTILNKPLIEFCYKNDNLGDPLVAREHIYAFGWASLLELDFITKQCLRINDFLQGLFKGIGIKLVDFKLEFGKRKSDGKIILADEISPDTCRLWDANTDKKLDKDRFRKDLGNIMEAYQEVAKRLGILH

SEQ ID NO: 194966 - protein, 106 aa, Unknown
  Bacterial polypetide isolated from the Sargasso Sea
MKKGKKIYEGKAKIIYSTSDKNLVIQYFKDDATAFNNEKRTTIEGKGVLNNRISEHILTNLSQIGIENHLVKRLNMREQLIKFVEIIPIEFVIRNVATGSLTKRLE

SEQ ID NO: 194967 - protein, 176 aa, Unknown
  Bacterial polypetide isolated from the Sargasso Sea
IIPIEVIVRNIATGSLTKRLGITDGTILEKPLLEFCYKKDELDDPLIAKEHIFAFNWATKEEIETIEEMTFRINDFMSGMFRGIGIKLVDFKLEFGRFWNDNNNEIILADEISPDTCRLWDIKSEKKLDKDRFRKDLGNIIQAYQEVARRLGIVPETTNVSEVNFKKPTSINIKKK

SEQ ID NO: 194968 - protein, 138 aa, Unknown
  Bacterial polypetide isolated from the Sargasso Sea
DDKLGDPLISEDHIYAFDWANKKEIEKIKKTIFRINDFMIGMFRGVGIKLIDFKLEFGRTKIDGRKDIILADEISPDTCRLWDSKTDKKLDKDRFRKDLGDLLPAYTEVAKRLGILHEQANVSAVNVTRLSSIKKKRK

SEQ ID NO: 194969 - protein, 213 aa, Unknown
  Bacterial polypetide isolated from the Sargasso Sea
MKKGKKLYEGKAKIIFASDEKNLVIQHFKDDATAFNNQKRTIIEGKGILNNRISEHILSFLKEIGINNHLIKRLNMREQLIELVDIIPIEFVIRNIATGSLTKRLDIEDGTVLNSPLIEYYLKNDELGDPIISREHIINFGWLKKLELESINEQCLRINDLLQGMFRGIGIKLVDFKIEFGKRKSDGKIILADEISPDTCRLWDEDTDKKLDK

SEQ ID NO: 194970 - protein, 122 aa, Unknown
  Bacterial polypetide isolated from the Sargasso Sea
LAFKWLKVMELDWINEECKRINDFLQGMFRGVGIKLVDFKIEFGKTKSENKIILADEISPDTCRLWDINTEKKLDKDRFRNNLGNLIEAYQDVARRLGILHEQSNIRPLKFPKPKAVKLKKR

SEQ ID NO: 194971 - protein, 219 aa, Unknown
  Bacterial polypetide isolated from the Sargasso Sea
MKKGKKLYEGKAKIIYATNDKNLVIQYFKDDATAFNNQKKTTIEGKGVLNNRISEHILSNLSQIGIKNHLVKRLNMREQIIKLVEIIPIEFIVRNVATGSITKRLGIEDGTVLKEPLIEYCLKDDKLGDPLISEEHILTFDWASKTEIDKVKKMILRINDFMIGMFRGVGIKLIDFKLEFGRIKIDGKNEVILADEISPDTCRLWDSITEKKLDKDRFR

SEQ ID NO: 194972 - protein, 209 aa, Unknown
  Bacterial polypetide isolated from the Sargasso Sea
RISEHILSNLSQIGIKNHFVKRLNMREQLVNHVEIIPIEFIIRNIATGSLTKRLGIEEGTFIEKPLLEYCLKNDKLGDPLISREHILTFNWLSANELDLINEECKRINDFLQGMFRAVGIKLVDFKLEFGKKKSDNKIILADEISPDTCRLWDSVTEKKLDKDRFRKDLGNIIEAYQDIAIRLGIIHEQSNIRPLKFTKPREVKLKKNK

SEQ ID NO: 194973 - protein, 250 aa, Unknown
  Bacterial polypetide isolated from the Sargasso Sea
MKKGKKLYEGKAKILYAAPEKGFAIQHFKDDATAFNNLKKSTIEGKGILNNRISEHILSSLNHIGIETHLVKRINMREQLVKLVEIIPIEFIVRNIASGSLTKRLGIEEGTVLEKPLLEFCYKNDSLEDPLIAREHIYAFNYCDMATLDRITKKCYRINDFLQGMFKAIEIKLVDFKLEFGLTKLEEDGSPVVKILIADEISPDTCRLWDATTDKKLDKDIFRKDLGNLIEGYQEIARRLGILHEQSNIS

SEQ ID NO: 194974 - protein, 230 aa, Unknown
  Bacterial polypetide isolated from the Sargasso Sea
MKKGKKLYEGKAKIIYATSDKGLVIQYFKDDATAFNNQKKSTIEGKGVLNNRISEHILSNLSQVGIKNHLVKRLNMREQLIKLVEVIPIEFITRNVATGSITKRLGIEDGTVLKEPLIEYCLKDDALGDPLIAEEHIYTFDWATKKEIEKIKKMILRINDFMVGLFRGIGIKLIDFKLEFGRIKINGKNEIILADEISPDTCRLWDSITDKKLDKDRFRKDLGDLIPAYT

SEQ ID NO: 194975 - protein, 261 aa, Unknown
  Bacterial polypetide isolated from the Sargasso Sea
MKKGKKLYEGKAKIIYATNDKSLVIQYFKDDATAFNNQKKTTIEGKGVLNNRISEHILSNLSQIGIKNHLVKRLNMREQIIKLVEIIPIEFIVRNVATGSITKRLGIEDGTVLKEPLIEYCLKDDQLGDPLIAEEHIIAFDWATKNEIDKVKKMILRINDFMIGMFRGVGIKLIDFKLEFGRLKSNGKQEVILADEISPDTCRLWDSITDKKLDKDRFRKDLGDLIPAYTEVAKRLGILHEQSNLSAVNVTKLSSVKRKNK

SEQ ID NO: 194976 - protein, 175 aa, Unknown
  Bacterial polypetide isolated from the Sargasso Sea
MKKGKKLYEGKAKIIYATNDKNLVIQYFKDDATAFNNQKKTTIEGKGVLNNRISEHILSNLSQIGIKNHLVKRLNMREQVIKLVEIIPIEFIVRNVATGSITKRLGIEDGTVLKEPLIEYCLKDDKLGDPLISEEHILAFDWATKTEIDKVKKMILRINDFMIGMFRGVGIKLID

SEQ ID NO: 194977 - protein, 186 aa, Unknown
  Bacterial polypetide isolated from the Sargasso Sea
NMREQLIKHVSIIPIEFIVRNIATGSLTKRLGIEEGTVLDNPLIEYCLKDDKLGDPLISKEHILTFKWATKKEIEKIDKQLNRINDFLVGMFRGVGIKLVDFKVEFGRLKNSNEVILADEISPDTCRLWDMNTEKKLDKDRFRNNLGNLVEAYQDVARRLGILHEQSNIRPIKFPRPKAVKLKKNK

SEQ ID NO: 194978 - protein, 245 aa, Unknown
  Bacterial polypetide isolated from the Sargasso Sea
MNNKYELIYEGKAKKVFTHNDANKVKIEFKDDATAFNALKKEKFEGKGKLNCLISARIFEILIKKNIPTHFIELENENTMIAKKMQVIPLEIVLRNTAYGSLCKQTTIKPKTLLPKPLIDIYLKNDELNDPLVTKDRIELMNILSSHDLELIINLTLKINVILKSFFKNIQLQLVDFKLEFGYDSNNNIILGDEISPDNCRLWDLNQKNDIIVSLDKDRFRNDLGGLIEAYSEIHRRINDFLKPN

SEQ ID NO: 194979 - protein, 260 aa, Unknown
  Bacterial polypetide isolated from the Sargasso Sea
MKKGKKLYEGKAKIIFATSDKNVVIQHFKDDATAFNNQKKAIIDGKGILNNRISEHILSSLTEIGIKNHLIKRLNMREQLVEMVNIIPIEFVIRNIATGSLTKRLGIEEGTVLDYPLIEYCLKDDKLGDPLISSEHILNFKWLNITELDLINNQCLRINDYLQGLFRGIGIKLVDFKVEFGKTKSNETIMLADEISPDTCRLWDQETDKKLDKDRFRKDLGNIVEAYQEVARRLGILHEQSNIRPIKFSKPTAVKIKKGK

SEQ ID NO: 194980 - protein, 256 aa, Unknown
  Bacterial polypetide isolated from the Sargasso Sea
KLYEGKAKIIYATTDKNLVIQYFKDDATAFNNQKKSTIEGKGVLNNRISEHILSNLSQIGIKNHLVKRLNMREQVIKLVEIIPIEFIVRNVATGSITKRLGIEDGTVLKEPLIEYCLKDDALGDPLIAEEHIYAFEWANKDEIEKVKKMILRINDFMIGMFRGIGIKLIDFKLEFGRLKNNGKNEIILADEISPDTCRLWDSITDKKLDKDRFRKDLGDLIPAYTEVAKRLGILHEQSNVTAVNVTKLSSVKKKIK

SEQ ID NO: 194981 - protein, 250 aa, Unknown
  Bacterial polypetide isolated from the Sargasso Sea
MTPDHGELLYEGKAKRVFASADPDRVLVEFKNDATAFNAQKKAQLENKGRLNCQISARLFELLEREGVPTHYCGLVGETWMQVRRVEIIPLEVVLRNTATGSLCRQTPIAEGTPIDPALLDLYYKDDALGDPLLTEARVHLLGVADPAQLSAIEQLARRVNGVLRPFFEEIDLQLVDFKLELGLASDGTLLLADEISPDTCRLWDRRNSNAEDRILDKDRFRKDLGGVMEAYGEVLKRVQGTCANPRNCL

SEQ ID NO: 194982 - protein, 220 aa, Unknown
  Bacterial polypetide isolated from the Sargasso Sea
GKGVLNNRISEHILTNLSQCGIKTHFIKRLNMREQLIRKAEIFPIEFIVRNIATGSLTKRLGIPEGTVLEHPLLEYCFKKDDLNDPLISKEHIFSFGWATKKEISEINKMTLRINDLLVGMFRGIGIKLVDFKIEYGKAWNKENEEKEIVLADEISPDTCRLWDSKTEKKLDKDRFRKDLGNIIQGYQEVARRLGIMPEETNISEVNFGKTIPIKFKKKK

SEQ ID NO: 194983 - protein, 261 aa, Unknown
  Bacterial polypetide isolated from the Sargasso Sea
MNKGKKLYEGKAKILYETKEKGLAIQHFKDDATAFNNQKKANVEGKGVLNNRISEHILQNLNQAGIKTHLIKRLNMREQLVKLVEIIPIEVIIRNIATGSLTKRLGIADGTVLEKPLLEFSYKNDELGDPLVAKEHILAFNWATNDELKTIEEMTFRINDFMSGMFRGVGIKLVDFKLEFGRLWENNKKEVILADEISPDTCRLWDVKSERKLDKDRFRKDLGNIIQAYQEVARRLGIMPETTNISEVNFKKPTSISIKKK

SEQ ID NO: 194984 - protein, 242 aa, Unknown
  Bacterial polypetide isolated from the Sargasso Sea
MNDKYELLYEGKAKKVFSHDDKDKVIIEFKDDATAFNALKKAKFEGKGKLNCLISSRIFELLIKNHIPTHFIELKNENTMIAQKIKVIPLEIVLRNTAYGSLCKQTTIKSGTVLAKPLIDIYLKNDELNDPIITKDRIELMNILSSNDLDLIINLTLKINLILKSFFKNIQLQLVDFKLEFGYNFKNNILLADEISPDNCRLWDLNQKNDTIVSLDKDRFRNDLGGLIEAYSEINRRINDFI

SEQ ID NO: 194985 - protein, 261 aa, Unknown
  Bacterial polypetide isolated from the Sargasso Sea
KGNKLYEGKAKIIYETKDKNLVIQHFKDDATAFNNLKKAKVEGKGVLNNRISEYILTNLSQCGIKTHFVKRLNMREQLIKKAEIFPIEFIVRNIATGSLTKRLGIPEGTVLEKPLLEYCYKKDELNDPLISREHIFSFGWATESEIKIIDKITLRINDILLGMFRGIGIKLVDFKIEYGKTWNKETNKKEIVLADEISPDTCRLWDSKTEKKLDKDRFRKDLGNIIQAYQDVARRLGIMPEETNISEVNFGKTIPIKFKKK

SEQ ID NO: 194986 - protein, 239 aa, Unknown
  Bacterial polypetide isolated from the Sargasso Sea
MRSSKTLYEGKAKKIIKGPKKNTLIQIFKDDATAYNKKKHKIFKGKGVLNNHISAHIMQYLKSKRIPTHFEEKLNDREQLIKKCEIIPIEFVVRNITAGSIAKKLGIKEGLKLKKPLLEYYYKEDSLDDPMISRDHLITFGWATNSELKKIDKMSLQINKHLRNLFFKKNIILVDFKIEFGRLSSNPKKIVLADEISPDSCRLWDKKTNKKLDKDVFRRNLGSLLSAYEEVASRLGIVH

SEQ ID NO: 194987 - protein, 260 aa, Unknown
  Bacterial polypetide isolated from the Sargasso Sea
MKKGKKLYEGKAKVIFATDNKDFVIQHFKDDATAFNNQKKAKIEGKGVLNNRISEHILMNLDQVGIKNHLVKRLNMREQLIKHVEIIPIEFIVRNIATGSLTKRLGIEDGTILEDPLIEYCLKNDELGDPLISKEHIYTFKWATKKEIEKIDKQLLRINDFMVGMFRGVGIKLVDFKVEFGRIKNNGKTDILLADEISPDTCRLWDNKTDKKLDKDRFRNNLGNLINAYQEVAKRLGILHEQSNIQAVNFEKPKAVKNKK

SEQ ID NO: 194988 - protein, 232 aa, Unknown
  Bacterial polypetide isolated from the Sargasso Sea
MKERLKKLLKGPKKNTLIQIFKDDATAYNKKKHKIFKGKGVLNNHISAHIMQYLKSKHIPTHFEEKLNDREQLIKKCEIIPIEFVVRNITAGSIAKKLGIKEGLKLKKPLLEYYYKEDSLDDPMISRDHLITFGWATNSELKKIDKMSLKINKHLRNLFLKKNIILVDFKIEFGRLSSNPKKIVLADEISPDSCRLWDKKTNKKLDKDVFRRNLGSLLSAYEEVASRLGIVH

SEQ ID NO: 194989 - protein, 242 aa, Unknown
  Bacterial polypetide isolated from the Sargasso Sea
MNNKHELIYEGKAKKVFTHDDVEKVRIEFKDDATAFNALKKEKFEGKGKLNCLISARIFEILIEKNIPTHFIELENENTLIAKKIKVIPLEIVLRNIAYGSLCKQTTIKPGTFLSKPLIDIYLKNDELNDPLITKDRIELMNILSSDDLELIINLTLKVNKILKSFFKNIQLQLVDFKLEFGYDFKNNILLGDEISPDNCRLWDLNQKNDTIVSLDKDRFRNDLGGLIEAYSEINRRINDYL

SEQ ID NO: 194990 - protein, 298 aa, Unknown
  Bacterial polypetide isolated from the Sargasso Sea
MNSKSIKHTNLKNKIHSGKVRDIYEIDEDKLLFVATDRISAFDVIMEQTVPGKGIVLNNLSSFWFDFFSNYNTHFISKAVDFDFSNTNYDEIFDLEILKRSTVVKKAKRIDMECVVRGFITGSAWNEYKSRNSVNFKPIMENLLEAEKFNTPIFTPSTKAEEGHDEALSEAEGKNLVGSEIYSKLENLSINLYSKAAKFCENKGILLADTKFEFGFIDDQIVLIDEVLTPDSSRFWKSSDYKLGYSPDPFDKQFLRNWLNDQVWDKTPPPPDLPDSVIKNTLKRYLDIYEIITNDNLE

SEQ ID NO: 194991 - protein, 261 aa, Unknown
  Bacterial polypetide isolated from the Sargasso Sea
MKKGKKLYEGKAKIIYATSDKNLVIQYFKDDATAFNNQKKSTIEGKGVLNNRISEHILLNLNQIGIKNHLVKRLNMREQLVKLVDIIPIEFIVRNIVTGSLTKRLGIEDGTVLDYPLIEYCLKDDKLGDPNISREHILAFNWLNAIQLDLIDENLKRLNDFLLGLFRGVGIKLVDFKVEFGFTHESGKSNIILADEISPDTCRLWDSITDKKLDKDRFRKDLGDLIPAYTEVAKRLGILHEQSNVSAVNVTKLSSIKKKSK

SEQ ID NO: 194992 - protein, 239 aa, Unknown
  Bacterial polypetide isolated from the Sargasso Sea
MTSSKTLYEGKAKKIIKGPKKNTLIQIFKDDATAYNKKKHKIFKGKGVINNKISEYIMEFLKSKKIPTHFEKRLNDREQLIKKCQIIPIEFVVRNVVAGSIAKKLGLKEGTKLKKPLLEYYYKEDSLDDPMISRDHVETFGWANRSELKKIDAMSLKINSLLTNLFRKKNIILVDFKIEFGRLASNSKKIVLADEISPDSCRLWDIKSKQKLDKDVFRRNLGSLMGAYEEVASRLGIVH

SEQ ID NO: 194993 - protein, 367 aa, Unknown
  Bacterial polypetide isolated from the Sargasso Sea
MSLADQVLAVNDDLPIRTDKPVHSGKVRSVYWLTAADSARLIREKGYDVPADAPLAIMVISDRISAFDCIWQGVDGLNGVPGKGAALNAISSHWFKLFKEKGLADSHILDIPHPFVWIVQKARPVMIEAIARQYITGSMWRAYKDGEREFCGITLPEGLKKDQKLPEILITPSTKGVLTGLDGVPEADDVNVSRADIERHYRGFNFSKPADIDRYEVLLKEGFNVISDALAELDQIFVDTKFEFGYVNDAAGNEKLIYMDEVGTPDSSRIWDGAALRDGQIVEKSKEGFRQWLLNHFPDPDILLNKHRMPERFALARDNKLPTEVMMDISNTYVGIAEKIIGQPLVRSANPKQEIIEVLRAQYGLID

SEQ ID NO: 194994 - protein, 259 aa, Unknown
  Bacterial polypetide isolated from the Sargasso Sea
MKKKKKLYEGKAKIIFATEEKNFVIQHFKDDATAFNNQKKSVIDGKGILNNRISEHILNNLGQIGIKNHLVKRLNMREQLVHHVKIIPIEFIVRNIATGSLTKRLGIEDGSVLERPLIEYCLKNDELGDPIVSREHILTFNWLNIVELDWISKELLRINDFLQGMFRGIGIKLVDFKVEFGKTNENKIILADEISPDTCRLWDASTEKKLDKDRFRQNLGNLIEAYQEVARRLGILHLESNIRPIKFSKPTAVKLKKNK

SEQ ID NO: 194995 - protein, 204 aa, Unknown
  Bacterial polypetide isolated from the Sargasso Sea
NKKKHEIINEKGILNNLISEFIFKYLSENGVENHFIERLNDREQLVKKVDIIPVEVIIRNIATGTLTKRLGIQEGLKLKKPLIEFTLKSDELDDPIISEEHVDVLEYAEKDEIKDIKEQALLINKLLLQLFSSINIQLVDFKIEFGRLTIDKKVILADEISPDSCRLWDKSSSEKLDKDRFRKNLGGLIDAYKEVATRLGIKIQ

SEQ ID NO: 194996 - protein, 291 aa, Unknown
  Bacterial polypetide isolated from the Sargasso Sea
MQSKELKNLELVARGKVRDIYAVDSDHLLIVTTDRMSAFDVVLPNPIPGKGEVLTQLSEFWFEKTQSIVKNHMTDDLDLVDLLDSPDQLDYFSKRSMIVKRLSPLPIEAVVRGYLIGSGWKDYQATGSVCGIELEEGLQMAQKLPEPIYTPATKAEVGEHDENISYEKTVDLIGEELASRVKQIAIDIYNFGVNHAKEKGIIIADTKFEFGLDGDGELYLIDEVLTPDSSRFWAIENYELGSSPPSFDKQYLRDYLETLDWDKTAPGPELPQEVIDNTASKYKNAFKQIAE

SEQ ID NO: 194997 - protein, 237 aa, Unknown
  Bacterial polypetide isolated from the Sargasso Sea
MEKRDELYRGKAKTVYYTDDSDKLILHFRNDTSAFDGEKIEQLERKGEVNNKFNHFIMTKLEEAGIATQVEALVSDTESLVKKLDMIPVECVVRNLSAGSLVRRLGVEEGKELNPPIFEFFLKNDALHDPMVNDYHILSFGWATEAQIAEMKALTFKVNSVLKALFDDAGMLLVDYKLEFGVDKDGNIVLGDEFTPDGCRLWDKETRKKMDKDRFRQGLGSVVETYIEVAERLGLSL

SEQ ID NO: 194998 - protein, 261 aa, Unknown
  Bacterial polypetide isolated from the Sargasso Sea
MKKGKKLYEGKAKILFSTSDKSLLIQHFKDDTTAFNNQKKAKIEGKGVLNNRISEYILKNLSQIGIKNHLIKRLNMREQLIKNVEIIPIEFIVRNIATGSLTKRLGIEEGTVLDNPLLEYCLKNDKLGDPIISKEHIIAFKWATNKELDKIDNMLLRINDFMVGMFSGIGIKLVDFKLEFGRLKLNHKKEIILADEISPDTCRFWDSKTDKKLDKDRFRKNLGDVLLAYKEVAKRLGILYEEANLKVVNFSKQKTIKFKKK

SEQ ID NO: 194999 - protein, 239 aa, Unknown
  Bacterial polypetide isolated from the Sargasso Sea
MRSSKTLYEGKAKKIIKGPKKNTLIQIFKDDATAYNKKKHKIFKGKGVLNNHISAFIMQYLKSKRIPTHFEEKLNDREQLIKKCEIIPIEFVVRNITAGSIAKKLGIKEGLKLKKPLLEYYYKEDSLDDPMISRDHLITFGWATNSELKKIDKMSLQINKHLRNLFFKKNIILVDFKIEFGRLSSNPKKIVLADEISPDSCRLWDKKTNKKLDKDVFRRNLGSLLSAYEEVASRLGIVH

SEQ ID NO: 195000 - protein, 296 aa, Unknown
  Bacterial polypetide isolated from the Sargasso Sea
MSTLYESTLRSLPLLGRGKVRDNYAVGNDKLLIVTTDRLSAFDVVMGEPIPNKGRVLNQMANFWFDKLAHIVPNHLTGDAPEAVVAADEVEQVKGRGVVVKRLEPIMIEAVVRGYLAGSGWKEYQASGAVCGVQLPEGLQNAQKLPEPIFTPAAKAEMGEHDENITFEETERRIGTELAATIRDISIKLYKEAADYAATRGIIIADTKFEFGLDNHGKLYLMDEVLTADSSRFWPADQYEVGTNPPSFDKQFVRDWLEAQPWGKTAPAPALPADVVEKTAAKYQEALERITGQSLA

SEQ ID NO: 195001 - protein, 161 aa, Unknown
  Bacterial polypetide isolated from the Sargasso Sea
KRLDMIPAECVVRNVATGSLCRRLGVEEGLDLVPPTFEFFLKNDELHDPMINEYHIASFGWASSAEVESMKAQTFRVNEILSKLFADGDMILVDFKLEFGRFDGELLLGDEFTPDGCRLWDADTRKKLDKDRFRQGLGGVVEAYEEVALRLGVDLEATIAG

SEQ ID NO: 195002 - protein, 261 aa, Unknown
  Bacterial polypetide isolated from the Sargasso Sea
MKKGKKLYEGKAKIIFASNDKKYVIQHFKDDATAFNNQKKAVMDGKGILNNRISEHILTQLNNVGIKNHLVKRLNMREQLVQHVEIIPIEFIVRNIATGSLTKRLGIEDGTVLDNPLIEYCLKDDDLGDPLVSTEHILAFKWMEKDELNLINKELNRINDFLQGMFRGVGIKLVDFKVEFGRYEKNGKKEIMLADEISPDTCRLWDVNSDKKLDKDRFRKGLGNLIEAYQEVARRLDILHEQSNIRPLKYTKPQAVKIKKK

SEQ ID NO: 195003 - protein, 238 aa, Unknown
  Bacterial polypetide isolated from the Sargasso Sea
MAVKLKKLYEGKAKIIYAKNSKEVIATYKNDATAFNNLKKGSIKNKGAINNAISSYLFQILNHCDIPTHFIKKIDKKSQLLKKVDIIPIEVLVRNFFAGSLSKKFGVKEGTQLSDTLIEYCLKSDELGDPHISSEHILNLGLCDFNELELIDEYSLRINDILRSTFYSIGINLVDFKLEFGICKKTDELVLADEISPDTCRLWDLKTNKKLDKDRFRRDLGNIEEAYEEVLNRLNLKI

SEQ ID NO: 195004 - protein, 291 aa, Unknown
  Bacterial polypetide isolated from the Sargasso Sea
MQSTELKNLELVAKGKVRDIYAVDSDHLLIVTTDRMSAFDVVLPNPIPGKGEVLTQLSEFWFEKTQSIVSNHMTDNLELIDLLDSPDQLDYFSKRSMIVKRLNPLPIEAVVRGYLIGSGWKDYQATGSVCGIELEEGLQMAQKLPEPIYTPATKAEVGEHDENISYEKTVDLIGEELANRVRQIAIDIYNFGVNHAREKGIIIADTKFEFGLDGDGELYLIDEVLTPDSSRFWAIENYELGSSPPSFDKQYLRDYLETLDWDKTAPGPELPQEVIDNTASKYKNAFRQIAE

SEQ ID NO: 195005 - protein, 155 aa, Unknown
  Bacterial polypetide isolated from the Sargasso Sea
IEDGTVLKEPLIEYCLKDDKLGDPLISEDHIYAFDWANKKEIEKIKKTIFRINDFMIGMFRGVGIKLIDFKLEFGRTKIDGRKDIILADEISPDTCRLWDSATDKKLDKDRFRKDLGDLLPAYTEVAKRLGILHEQSNVSAVNVTKLSSIKKKRK

SEQ ID NO: 195006 - protein, 101 aa, Unknown
  Bacterial polypetide isolated from the Sargasso Sea
FMSGMFRGIGIKLVDFKLEFGRIWNNNNREVILADEISPDTCRLWDIKSEKKLDKDRFRKDLGNIIQAYQEVARRLGIVPETTNVSEVNFKKPTSINIKQK

SEQ ID NO: 195007 - protein, 239 aa, Unknown
  Bacterial polypetide isolated from the Sargasso Sea
MSPSKTLYEGKAKKILKGPSKNTLIQVFKDDATAYNKKKHKIFSGKGILNNLISEHIMEHLMSKGIETHFKKRLNNREQLIKKCEIIPIEFVVRNIVAGSIAKKLGLKEGTKLKKPLLEYYYKEDSLDDPMISRDHVEAFGWATKSELKKIDKISTKINKILSSLFIKKKIVLVDFKIEFGRLTSNPKKIVLADEISPDSCRLWDKKSKKKLDKDVFRRNLGSLIKAYEEVASRLGIVQ

SEQ ID NO: 195008 - protein, 191 aa, Unknown
  Bacterial polypetide isolated from the Sargasso Sea
EHLMTKLNDMGISTHFIKRLNMREQLVRKAEIIPLEVVVRNTVAGSLAERLGLKEGENLSRSIIEFFYKSDELNDPLVTEEHITAFDWASPQEMDELISTTLRINDFLSGLFFGVGIKLIDFKLEYGRVFIDDQFKIILADEISPDSCRLWDMNTNEKLDKDRFRRDLGSAEEAYQEVARRLGVLPENTNG

SEQ ID NO: 195009 - protein, 367 aa, Unknown
  Bacterial polypetide isolated from the Sargasso Sea
MSLADSVLAVNNDLPIRTDSPVHSGKVRSVYWLTDADSRRLIKTKGYNVPEDTPLAIMVISDRISAFDCIFHGEGGLKGIPGKGAALNAISNHWFKLFAENGLADSHILDIPHPFVWIVQKARPIKVEAICRQYITGSMWRAYSKGERVFCGITLPEGLEKDQKLPDLLITPSTKGILTGIPGVPAQDDVNISRSDIEANYQAFGFEKVEDIDLYEKLLKDGFKVIAKALADLDQVFVDTKFEFGYVTDKNGNSKLIYMDEVGTPDSSRIWDGAAYRDGKILENSKEGFRQFLLNHFPDPDILLNKDRMPEREALARDNALPLEAMTQVSRTYTGIAEKVTGAAIPLPANPKADIIKILREEYDLIV

SEQ ID NO: 195010 - protein, 261 aa, Unknown
  Bacterial polypetide isolated from the Sargasso Sea
MKKGKKLYEGKAKIIYATSDKDLVIQYFKDDATAFNNQKKSTIEGKGVLNNRISEHILSSLSQIGIKNHLVKRLNMREQVVKLVEIIPIEFIVRNVATGSLTKRLGIEDGTVLKEPLIEYCLKDDKLGDPLIAEEHILAFDWASKKEIEKVKKMILRINDFMIGMFRGVGIKLIDFKLEFGRLNANGKKDVILADEISPDTCRLWDSLTDKKLDKDRFRKDLGDLIPAYTEVAKRLGILHEQSNLSAVNVTKLSSVKRKRK

SEQ ID NO: 195011 - protein, 89 aa, Unknown
  Bacterial polypetide isolated from the Sargasso Sea
MISTSHKVNELLTKLFADSGMILVDFKLEFGVSNGKILLGDEFTPDGCRLWDDETLEKLDKDRFRQDLGDVIESYHMVAHRLGMQIKVD

SEQ ID NO: 195012 - protein, 96 aa, Unknown
  Bacterial polypetide isolated from the Sargasso Sea
FRGVGIKLVDFKLEFGRLWEDDKKQVILADEISPDTCRLWDVKSERKLDKDRFRKDLGNIIQAYQEVARRLGILPETTNISEVNFKKPTSISIKNK

SEQ ID NO: 195013 - protein, 259 aa, Unknown
  Bacterial polypetide isolated from the Sargasso Sea
MKKGKKLYEGKAKIIFATSDKNVVIQHFKDDATAFNNQKKASIDGKGILNNRISEHILSSLTEVGIKNHLIKRLNMREQLVEMVNIIPIEFVIRNIATGSLTKRLGIEEGTVLDYPLIEYCLKDDKLGDPIISSEHILNFKWLNITELDLINNQCLRINDYLQGLFRGIEIKLVDFKVEFGKTKSNETIILADEISPDTCRLWDQKTDKKLDKDRFRKDLGNIVEAYQEVARRLGILHEQSNIRPIKFSKPTAVKIKKK

SEQ ID NO: 195014 - protein, 120 aa, Unknown
  Bacterial polypetide isolated from the Sargasso Sea
MSPDHGELLYEGKAKRIYATDHPDQVLVEYKNDATAFNAQKKAQLADKGRLNCQISARLFELLEGQGVPSHYLGLAGDTWMLVQRVEVIPLEVVLRNIATGSLCRQTPIAEGTPINPALL

SEQ ID NO: 195015 - protein, 262 aa, Unknown
  Bacterial polypetide isolated from the Sargasso Sea
MKKGKKIYEGKAKIVFATENKNLVIQHFKDDATAFNNQKRAKIEGKGVLNNRISEHILTNLNQIGIKNHLVKRINMREQLIKFVEIIPIEFIVRNIATGSITKRLGIEDGTVLDEPLIEYCLKNDKLGDPLISKEHILAFKWSNKKEIEKIDKYILRINDFLVGMFRGVGIKLVDFKVEFGRYKNNGKTEVILADEISPDTCRLWDINTEKKLDKDRFRNDLGHLIEAYQDVARRLGILHEQSNITPIKFTKPRAVKFKKNK

SEQ ID NO: 195016 - protein, 130 aa, Unknown
  Bacterial polypetide isolated from the Sargasso Sea
DELDDPMILEEHITAFNWASHSELDEIMSLALRINDFMCGLFLGIGIRLVDFKIEFGRLWVDDSLKIVLADEISPDSCRLWDAKTNKKLDKDRFRSDMGEVEEAYQEVDRRLGILPEAHLLKAEGPKLVK

SEQ ID NO: 195017 - protein, 241 aa, Unknown
  Bacterial polypetide isolated from the Sargasso Sea
MERDVPEELLYEGKAKKLFITEDPQILRVEYKDDATAFNGKKFDRLRDKGCLNNAITVFFFEHLETKDIPSHFVRKISETEQLVRRVKIIPLEVVVRNVAAGSLSKRIGWEEGKELPHPIVEFYYKDDDLGDPLLAEEHIRLLELASEAQIEELKKRGLAVNEALESLMLSKGIRLIDFKLEYGLDQKGEILLADEISPDTCRFWDIESGKILDKDRFRRDLGGVTEAYLEIHQRLTEEIT

SEQ ID NO: 195018 - protein, 261 aa, Unknown
  Bacterial polypetide isolated from the Sargasso Sea
MKKGKKLYEGKAKIIFATSDKNLVIQHFKDDATAFNNQKKDQFEGKGILNNRISEYILKNLNQVGIKNHLIKRINMREQLVKNVEIIPIEFVVRNIATGSLTKRLGIQEGTIFDEPLIEYYYKNDELLDPLISKEHIDIFKWAQKKEIDKIDKYLKRINDFMVGMFRGVGITLVDFKVEFGRYKSNNKSEIILADEISPDTCRLWDVITEKVLDKDRFRNDLGNVLDAYQDVARRLGILHEQSNVRPLRFSKPKAVKIKKK

SEQ ID NO: 195019 - protein, 130 aa, Unknown
  Bacterial polypetide isolated from the Sargasso Sea
LLKTYLCFLIWANKNEIEQVKKMILRINDFMIGMFRGIGIKLIDFKLEFGRIKINGKNEVILADEISPDTCRLWDSITDKKLDKDRFRKDLGDLIPAYTEVAKRLGILHEQSNISAVNVTKLSSIKKKNK

SEQ ID NO: 195020 - protein, 260 aa, Unknown
  Bacterial polypetide isolated from the Sargasso Sea
MKKGKKLYEGKAKIIFATSDKNIVIQHFKDDATAFNNQKKSNIDGKGILNNRISEHLLKSLSEIGIKNHLIKRLNMREQLVEMVNIIPIEFVIRNIATGSLTKRLGIEEGTVLDYPLIEYCLKDDTLGDPIISREHILNFKWLSLIELDLINDQSLRINDYLQGLFRGIGIKLVDFKLEFGKAKSDGTIILADEISPDTCRLWDQETDKKLDKDRFRKDLGNIVEAYQEVARRLGILHEQSNIRPIKFSKPTAVKIKKNK

SEQ ID NO: 195021 - protein, 208 aa, Unknown
  Bacterial polypetide isolated from the Sargasso Sea
RISEHILSNLNQIGIKNHLVKRINMREQLVKVVEIIPIEFVVRNIAAGSLTTRLGIEEGTVLEYPIIEYCLKNDDLGDPLVSREHILSLDWMNVMELELINEQCKRINDFLLGFFRGVGIKLVDFKIEFGRSAKDNSIILADEISPDTCRLWDSSTEKKLDKDIFRKDLGNLIEGYQEVARRLNILHEQSNIRPIKFPKPKAVKIKKK

SEQ ID NO: 195022 - protein, 250 aa, Unknown
  Bacterial polypetide isolated from the Sargasso Sea
MTPDHGDLLYEGKAKRVYAASQTDRVLVEFKNDATAFNAQKRAQLADKGRLNCQISARLFERLEAEGIPTHYLGLASDTWMVVQRVAIIPLEVVLRNIATGSLCRETPIAEGTVIDPALLDLYYKDDGLGDPLLSEARVRLLGVVEPEQLSAIEQLARRVNDVLQPFFADLDLQLVDFKLELGFNAAGQLLLADEISPDTCRLWDRRSSDAQDRILDKDRFRQDLGGVMEAYGEVLKRVQASCADPRNCM

SEQ ID NO: 195023 - protein, 97 aa, Unknown
  Bacterial polypetide isolated from the Sargasso Sea
INKYLKDLFLKIGIKLVDFKLEFGRLNSQEKKEIVLADEISPDNCRLWNEQDNASLDKDLFRQSKGDIKEAYIEVANRLGVLTQKVSSKLSENKLSH

SEQ ID NO: 195024 - protein, 180 aa, Unknown
  Bacterial polypetide isolated from the Sargasso Sea
MKKGKKLYEGKAKIIYATTDKNLVIQHFKDDATAFNNQKKDIIEGKGILNNRISEHILTQLSNIGIKNHLVKRLNMREQLIKLVEIIPIEFVVRNIATGSLTKRLGIEDGTVLDYPLVEYCLKNDDLGDPLVSREHILAFKWMDVFELDFIYEEVRRINDFLQGMFRGVGIKLVDFKVEF

SEQ ID NO: 195025 - protein, 239 aa, Unknown
  Bacterial polypetide isolated from the Sargasso Sea
MEKVKEIAAGKAKSMFTTNNPNELIMEFRDDASAFDGKKRASLAGKGAVNNQFNAFIMDYLGDNGVDHHLINLMDNTHSLVHSLDMFPIECVIRNRATGSICRRLGTEDGLILEKPLFEFFLKDDDLGDPLINRNHIVSFGWAKDDELDEMISISHKVNELLTKLFADSGMILVDFKLEFGVSNGKILLGDEFTPDGCRLWDDETLEKLDKDRFRQDLGDVIESYHMVAHRLGMQIKVD

SEQ ID NO: 195026 - protein, 172 aa, Unknown
  Bacterial polypetide isolated from the Sargasso Sea
MKNRKKIYEGKAKILYQGPEPNTLIQYFKDDATAFNNKKKDQIPGKGVLNNFISELIMTRLKDVNISNHLIKRMNMREQLIKKLDIIPIEVVVRNIATGSIVQRLGIKEGKVLNRPIIEFYLKNDKLNDPIINEEHIIVFEWATPNELEEIISLSSRINDFLTRLLLFSKYQ

SEQ ID NO: 195027 - protein, 261 aa, Unknown
  Bacterial polypetide isolated from the Sargasso Sea
MKKGKKLYEGKAKIIYATSDKDLVIQYFKDDATAFNNQKKSTIEGKGVLNNRISEHILSSLSQIGIKNHLVKRLNMREQVVKLVDIIPIEFIVRNVATGSLTKRLGIEDGTVLKEPLIEYCLKDDKLGDPLIAEEHILAFDWASKKEIEKVKKMILRINDFMIGMFRGVGIKLIDFKLEFGRLNANGKKDVILADEISPDTCRLWDSLTDKKLDKDRFRKDLGDLIPAYTEVAKRLGILHEQSNLSAVNVTKLSSVKRKRK

SEQ ID NO: 195028 - protein, 297 aa, Unknown
  Bacterial polypetide isolated from the Sargasso Sea
MEIENKNIVLETNLPNQNLINRGKVRDLYDMGDSLLIVSSDRISAYDAVLPTGILGKGEVLTKLSKFWFSLTENIIQNHFITDNVTEAYPSLKEHEEILKGRSMIVKKAKPLAVECIVRGYITGSGWSEYKKQGTVCGIRLKDGLLESEKLSPTIFTPSTKAEQGEHDENIDFETCVGIIGQELAEKVRDYSIKIYSTAHDYAKSKGIIIADTKFEFGLVGDELILIDEVLTPDSSRFWPLGLYEEGRGQQSYDKQFVRDYLTSVGWDKNPPAPQLPEDIASLTSKKYIEAIDLLTA

SEQ ID NO: 195029 - protein, 160 aa, Unknown
  Bacterial polypetide isolated from the Sargasso Sea
MKKGKKLYEGKAKIIYATSDKNYVIQYFKDDATAFNNQKRSVIEGKGVLNNRISEHILKNLSQIGIKNHLVKRLNMREQLIKFVDIIPIEFIVRNIATGSLTKRLGIVEGTVLNDPLIEYCLKNDDLGDPLISREHIYAFNWAKKNEIEKINKQLLRIND

SEQ ID NO: 195030 - protein, 261 aa, Unknown
  Bacterial polypetide isolated from the Sargasso Sea
MKKGKKLYEGKAKIIYSTNDKNLVIQHFKDDATAFNNQKKDVIEGKGILNNRISEHILTQLSNVGIKNHLVKRLNMREQLVKLVEIIPIEFVVRNIATGSLTKRLGIEDGTVLDYPLVEYCLKNDELGDPLVSREHILAFKWMDVFELDFIYEEVRRINDFLQGMFRGVGIKLVDFKVEFGRSEADGKREVMLADEISPDTCRLWDMRTDKKLDKDRFRNDLGNLVEAYQEVAIRLNLLHEQSNIRPLNYPKPKAVKIKKK

SEQ ID NO: 195031 - protein, 261 aa, Unknown
  Bacterial polypetide isolated from the Sargasso Sea
MKKGKKLYEGKAKIIYSTSDKNLVIQYFKDDATAFNNEKRTTIEGKGVLNNRISEHILTNLSQIGIENHLVKRLNMREQLIKFVEIIPIEFVIRNVATGSLTKRLGIEDGTVLKEPLIEYCLKDDKLGDPLISEDHIYAFDWANKKEIEKIKKTIFRINDFMIGMFRGVGIKLIDFKLEFGRTKIDGRKEIILADEISPDTCRLWDSATDKKLDKDRFRKDLGDLLPAYTEVAKRLGILHEQSNVSAVNVTKLSSIKKKRK

SEQ ID NO: 195032 - protein, 367 aa, Unknown
  Bacterial polypetide isolated from the Sargasso Sea
MSLADSVLAVNNDLPIRTDSPVHSGKVRSVYWLTDADSRRLIQTKGYNVPEDTPLAIMVISDRISAFDCIFHGEGGLKGIPGKGAALNAISNHWFKLFAENGLADSHILDIPHPFVWIVQKARPIKVEAICRQYITGSMWRAYSKGERVFCGITLPEGLEKDQKLPDLLITPSTKGILTGIPGVPAQDDVNISRSDIEANYQAFGFEKVEDIDLYEKLLKDGFKVISKALADLDQVFVDTKFEFGYVTDKNGNSKLIYMDEVGTPDSSRIWDGAAYRDGKILENSKEGFRQFLLNHFPDPDILLNKDRMPEREALARDNALPLEAMMDVSRTYTGIAEKVTGAAIPLPANPKADIIKILKDEYDLIV

SEQ ID NO: 195033 - protein, 255 aa, Unknown
  Bacterial polypetide isolated from the Sargasso Sea
MSKKKILYDGKAKTIFEGPTSDTVIQYFKDDATANNAEKHSIINGKGVLNNSISDYLMQKLNEIGIPTHYIKKLNMREQLVRKVEIIPVEFVVRNIATGSIVKRLGLKEGSVFSRPLIEHYLKKDELGDPLINEDHILNFQWGTRDELEEMQEYGLRINDFLRGLFFGIGLKLVDFKIEFGRYYSEDGNSILLLADEISPDNCRLWDIKTNKKMDKDLFRQELGGLKEAYQEVANRLGIIPEKKNYSSAKPKIVK

SEQ ID NO: 195034 - protein, 182 aa, Unknown
  Bacterial polypetide isolated from the Sargasso Sea
SKPLLGLAGDTWMLVQRVEVIRWKVVLRNIATGSLCRQTPIAEGTPINPALLDLYYKDDDLGDPLLTEARVRLLGLVDDARVSAIEQLARRINGVLQPFFDGLELQLVDFKLELGLNRAGELLLADEISPDTCRFWDQRSSDANDRILDKDRFRKDLGGVMEAYGEVLKRVHTACPNPRNCL

SEQ ID NO: 195035 - protein, 266 aa, Unknown
  Bacterial polypetide isolated from the Sargasso Sea
IDENSLLIVSTDRISAYDVVIPTAIPGKGAILNQMSTFWFNKTKSIISNHLMKPALGDDSLPESIQRRAMFVRKANRIDIECVARGYITGSALEEYNDTQTVAKIKMPKDLVDGDKFPEPIFTPATKASEGHDENISIEDMKNIIGNDLTNRLKELTLNIYKYAHDYAIERDIIIADTKLEFGFIDGKLSLIDELLTPDSSRFWDLHGYSPGKTQPNYDKQFVRNWLLSQDWDRQPPAPKLPDNIVANTIARYHDVFNKLTNQQIQ

SEQ ID NO: 195036 - protein, 238 aa, Unknown
  Bacterial polypetide isolated from the Sargasso Sea
MTKKELIYEGKAKTLFFYDDNKIIQYFKDDATAFNKKKHEIINEKGILNNFISEFIFKYLSENGVENHFIERLNDREQLVKKVDIIPVEVIVRNIATGTLTKRLGIQEGLKLKKPLIEFTLKSDELDDPIISEEHIDVLEYAEKDEINIIKEQALLINNLLLQLFSSINIQLVDFKIEFGRLTIDKKVILADEISPDSCRLWDKSSSEKLDKDRFRKNLGGLIDAYKEVATRLGIKIQ

SEQ ID NO: 195037 - protein, 291 aa, Unknown
  Bacterial polypetide isolated from the Sargasso Sea
MHNSNLKNYKKIHSGKVRDIYEIDNNTLLIVTTDRISVFDKVLPNIIPEKGIILNEISNFWFKRYKNLIPNHIIDYDINSLEISKDEIKEIAQRSITVKKLKTFPIEAIVRFYLSGSGYNEYLKDGYVCGIKLPKGLRQSEKLPEPIFTPSTKANVGDHDLNITHDSCINIIGKNNFEFIKKISIEIFNDAFLYLKERGIILSDTKFEFGFDSKDNIFLIDEVLTPDSSRFWLEKDYKIDCSPKSLDKQYIRDYVKFSGWTDDQDLPSLPDDIIRNTTEKYKYIRKIIQND

SEQ ID NO: 195038 - protein, 263 aa, Unknown
  Bacterial polypetide isolated from the Sargasso Sea
MNKGNKLYEGKAKIIYETKDKNLVIQHFKDDATAFNNLKKAKVEGKGVLNNRISEYILSNLSQCGVKTHLVKRLNMREQLIKKAEIFPIEFIVRNVATGSLTKRLGIPEGTILEKPLLEYCFKNDELSDPLISKEHILTFGWATEKELNLIDKSTLRINDILSGMFRAINIKLIDFKIEYGKIWNKDIEKKEIVLADEISPDTCRLWDARTEKKLDKDRFRKDLGNIIQAYQEVARRFGIMPEETNISEVNFGKTIPIKFKKK

SEQ ID NO: 195039 - protein, 190 aa, Unknown
  Bacterial polypetide isolated from the Sargasso Sea
MKKGKKLYEGKAKVIFATDNKDFVIQHFKDDATAFNNQKKAKIEGKGVLNNRISEHILMNLDQVGIKNHLVKRLNMREQLIKHVEIIPIEFIVRNIATGSLTKRLGIEDGTILEDPLIEYCLKNDELGDPLISKEHIYTFKWATKKEIEKIDKQLLRINDFMVGMFRGVGIKLVDFKVEFGRIKNNGKID

SEQ ID NO: 195040 - protein, 239 aa, Unknown
  Bacterial polypetide isolated from the Sargasso Sea
MEKVKEIAAGKAKSMFTTNNANELIMEFRDDASAFDGKKRASLAGKGAVNNQFNAFIMDYLGANGVEHHLINLMDNTHSLVRSLDMFPIECVIRNRATGSICRRLGTEDGLILEKPLFEFFLKDDDLGDPLINRNHIVSFGWAKDDELDEMISTSHKVNELLTKLFADSGMILVDFKLEFGVSNGKILLGDEFTPDGCRLWDDQTLEKLDKDRFRQDLGDVIESYHMVAHRLGMQIKVD

SEQ ID NO: 195041 - protein, 256 aa, Unknown
  Bacterial polypetide isolated from the Sargasso Sea
MNKGKKLYEGKAKIIYETKEKGLAIQHFKDDATAFNNQKKATVEGKGVLNNRISEHILQNLNQVGIKNHLVKRLNMREQLIKLVEIIPIEVIVRNIATGSLTKRLGVTDGTVLEKPLIEFCYKKDELGDPLIAKEHIFAFNWATENEIKSIEEMTFRVNDFMSGMFRGIGIKLVDFKLEFGRIWNGDNREVILADEISPDTCRLWDIKSERKLDKDRFRKDLGNIIQAYQEVARRLGIVPETTNVSEVNFKKPTSI

SEQ ID NO: 195042 - protein, 239 aa, Unknown
  Bacterial polypetide isolated from the Sargasso Sea
MNKVKEITSGKAKTMFTTSSEDQLIMEFRDDASAFDGKKRASLAGKGSINNQFNAFIMDYLKENGIKNHYIESLDRTHSLVHSLKMFPIECVIRNIATGSICRRLGTEDGLKLKTPLFEFFLKDDELGDPLINKNHIISFSWAEEHQINEMIEITYRVNELLSKLFANAGMILVDFKLEFGLRGEEILLGDEFTPDGCRLWDSVTHEKLDKDRFRQDLGDVIESYHLVADRLGIDIKVD

SEQ ID NO: 195043 - protein, 261 aa, Unknown
  Bacterial polypetide isolated from the Sargasso Sea
MKKGKKLYEGKAKIIYATQDKGLVIQYFKDDATAFNNQKKSTIEGKGVLNNRISEHILTNLSQIGIKNHLVKRLNMREQVIKLVEIIPIEFITRNVATGSITRRLGIEDGTILKEPLIEYCLKDDALGDPLIAEEHIYAFDWATKKEIEKIKKMILRINDFMVGMFRGIGIKLIDFKLEFGRIKTNGKNEIILADEISPDTCRLWDSITDKKLDKDRFRKDLGDLIPAYTEVAKRLGILHEQSNVSAVNVTKLSSVKKKRK

SEQ ID NO: 195044 - protein, 263 aa, Unknown
  Bacterial polypetide isolated from the Sargasso Sea
MNKGNKLYEGKAKIIYETKDKNLVIQHFKDDATAFNNLKKAKVEGKGVLNNRISEYILSNLSQCGIKNHLVKRLNMREQLIRKAEIFPIEFIVRNIATGSLTKRLGIPEGTHLEKPLLEYCYKKDELNDPLISKDHIFSFGWATENEIKIIDQMTLRINDLLTGMFRAIGIKLVDFKLEYGKAWNKDTEKKEIVLADEISPDTCRLWDVKTEKKLDKDRFRKDLGNIIQAYQEVARRLGIMPEETNISEVNFGKTIPIKFKKK

SEQ ID NO: 195045 - protein, 220 aa, Unknown
  Bacterial polypetide isolated from the Sargasso Sea
MKKGKKLYEGKAKIIFATNDKNTVIQHFKDDATAFNNQKKARIDGKGILNNRISEHILSSLSEIGIKNHLIKRLNMREQLVELVEIIPIEFVIRNIATGSLTKRVGIEEGTVLDSPLIEYCLKNDELGDPIISREHIINFNWLKTVELDLINEQCFRINDFLQGMFKGVGIKLVDFKVEFGKAKSDGRIILADEISPDSCRLWDQETEKKLDKDRLEKIR

SEQ ID NO: 195046 - protein, 161 aa, Unknown
  Bacterial polypetide isolated from the Sargasso Sea
MKKGKKLYEGKAKILYASPEKNLAIQHFKDDATAFNNQKKATIEGKGILNNRISEHILSNLNQIGIKNHLIKRINMREQLVKIVEIIPIEFIVRNIASGSLTKRLGIEEGTILSRPLIEYCLKNDDLGDPLISREHILTFDWLNIMELDWISEECRRINDF

SEQ ID NO: 195047 - protein, 238 aa, Unknown
  Bacterial polypetide isolated from the Sargasso Sea
MATKLKKLYEGKAKIIYAKNSNQVIATYKNDATAFNNLKKGSIKNKGAINNTISSYLFQILNHCDIPTHFIKKIDKKSQLLKKADIIPIEVLVRNLFAGSLSKKFGIKEGTPLSDTLIEYCLKSDELGDPHISSEHILNLGLCDFDELELIDEYSLRINDVLRSTFFSIGINLIDFKLEFGICKKSNELVLADEISPDTCRLWDLKTNKKLDKDRFRRDLGNVEESYTEVLDRLNLKI

SEQ ID NO: 195048 - protein, 230 aa, Unknown
  Bacterial polypetide isolated from the Sargasso Sea
AFNNLKKAKIEGKGVLNNRISEHLLTSLKNCGIKNHLIKRLNMREQLIKKVEIIPIEFIVRNIATGSLSKRLGIQEGTKLDNPLLEYCLKNDDLGDPIISKEHIYAFNWSSESEVKEIDKLSLRVNDILSGMFKAINIKLVDFKLEYGKYWNKDKDRFEVILADEISPDTCRLWDEKTEKKLDKDRFRKDLGNIIQGYQEVARRLGIMHEETNIKEVSFSRPTSIKFKKK

SEQ ID NO: 195049 - protein, 261 aa, Unknown
  Bacterial polypetide isolated from the Sargasso Sea
MNKGKKLYEGKAKIIYETKEKGLAIQHFKDDATAFNNKKKATVEGKGVLNNRISEHILNNLNQVGIKNHLVKRLNMREQLIKLVEIIPIEVIVRNIATGSLTKRLGVTDGTVLEKPLIEFCYKKDELDDPLIAKEHIFAFNWATEEEIKIIEEMTFRINDFMSGMFRGIGIKLVDFKLEFGRIWNNDQKEVILADEISPDTCRLWDIKSEKKLDKDRFRKDLGNIIQAYQEVARRLGIVPETTNVSEVNFKKPTSINIKKR

SEQ ID NO: 195050 - protein, 239 aa, Unknown
  Bacterial polypetide isolated from the Sargasso Sea
MEKVKEIAAGKAKSMFTTSNPNELIMEFRDDASAFDGKKRASLAGKGAVNNQFNAFIMHYLGDNGVEHHLINLMDNTHSLVHSLDMFPIECVIRNRATGSICRRLGTEDGLILEKPLFEFFLKDDDLGDPLINRNHIVSFGWAKDDELDEMIRTSHRVNELLTKLFADSGMILVDFKLEFGVSNGKILLGDEFTPDGCRLWDDQTLEKLDKDRFRQDLGDVIESYHMVAHRLGMQIKVD

SEQ ID NO: 195051 - protein, 261 aa, Unknown
  Bacterial polypetide isolated from the Sargasso Sea
MKKGKKLYEGKAKIIYATTDKNLVIQHFKDDATAFNNQKKDVIEGKGILNNRISEHILTQLSNVGIKNHLVKRLNMREQLVKLVEIIPIEFIVRNIATGSLTKRLGIEDGTVLDYPLVEYCLKNDDLGDPLVSREHILAFKWMDVFELDFIYEEVRRINDFLQGMFRGVGIKLVDFKVEFGRFEADGKREIMLADEISPDTCRLWDMRTDKKLDKDRFRNNLGNLVEAYQEVAIRLNILHEQSNIRPLTYPKPKAVKIKKK

SEQ ID NO: 195052 - protein, 147 aa, Unknown
  Bacterial polypetide isolated from the Sargasso Sea
PLIEYCYKNDELNDPLIAREHINSFGWANDIELDWITKQCFRINDFMQGMFKGVGIKLVDFKLEFGRLNQNGKERILLADEISPDTCRLWDAASEKKLDKDRFRKDLGNILEAYQEVARRLDILHEQNTNIRPIKFPKPTAVKIKKK

SEQ ID NO: 195053 - protein, 261 aa, Unknown
  Bacterial polypetide isolated from the Sargasso Sea
MKKGKKLYEGKAKIIYATNDKNLVIQYFKDDATAFNNQKKTTIEGKGVLNNRISEHILSNLSQIGIKNHLVKRLNMREQIIKLVEIIPIEFIVRNVATGSITKRLGIEDGTVLKEPLIEYCLKDDKLGDPLISEEHILAFGWASKIEIDKVKKMILRINDFMIGMFRGVGIKLIDFKLEFGRIKIDGKNEVILADEISPDTCRLWDSITEKKLDKDRFRNDLGDLIPAYTEVAKRLGILHEQSNVSAVNVTKLSAVKRKKK

SEQ ID NO: 195054 - protein, 217 aa, Unknown
  Bacterial polypetide isolated from the Sargasso Sea
MKKGKKLYEGKAKIIFASAEKNLVIQHFKDDATAYNNQKKDTIEGKGILNNRISEHILSSLKSIGIENHLIKRLNMREQLIDLVDIVPIEFVLRNIVTGTLAKRLGIEDGTVLSKPLIEFYYKNDDLDDPLVAREHIYAFGWTSEPELDWITKQCFRINDFLQGLFKSVEIKLVDFKVEFGKRRSDGKIILADEISPDTCRLWDANTDKKLDKDRFR

SEQ ID NO: 195055 - protein, 260 aa, Unknown
  Bacterial polypetide isolated from the Sargasso Sea
MKKGKKLYEGKAKVIFATDNKDFVIQHFKDDATAFNNQKRAKIEGKGVLNNRISEHILMNLDQVGIKNHLVKRLNMREQLIRHVEIIPIEFIVRNIATGSLTKRLGIEDGTILEDPLIEYCLKNDELGDPLISKEHIYTFKWSNKKEIEKIDKQLLRINDFMVGMFRGVGIKLVDFKVEFGRIKNNGKTDVLLADEISPDTCRLWDNKTDKKLDKDRFRNNLGNLINAYQEVAKRLGILHEQSNIQAVNFEKPKAVKNKK

SEQ ID NO: 195056 - protein, 261 aa, Unknown
  Bacterial polypetide isolated from the Sargasso Sea
MSRRKLIYEGKAKILYEGPERNTMVQYFKDDATAFNNEKKAIIEGKGVLNNRISEFIYNQLNDVGLETHLIKRLNMREQLIKSCEVLPIEFVVRNIAAGSIVNRLGLNEGSILKNPIVEYYYKNDALGDPIVTIEHIKINDWANEEEIKKATNISLRINDILSGLFRAVGIKLVDFKLEFGRYWNNEEKKIILVDEISPDTCRLWDTKNEKKLDKDRFRKDLGGLIEAYQEVAKRLGIMPEGTNIKEIKTGISKTIKLKKS

SEQ ID NO: 195057 - protein, 263 aa, Unknown
  Bacterial polypetide isolated from the Sargasso Sea
MNRGKKLYEGKAKIIYETKEKGLAIQHFKDDATAFNNKKKATVEGKGVLNNRISEHILNNLNQVGIKTHLIKRLNMREQLIKLVEIIPIEVIVRNIATGSLTKRLGVTDGTILEKPLLEFCYKKDELDDPLIAKEHIYAFNWASEEEIKSIEDMTFRINDFMSGMFRGIGIKLVDFKLEFGRYWEGDKKEVILADEISPDTCRLWDIKSERKLDKDRFRKDLGNIIQAYQEVARRLGIVPETTNVSEVNFKKPTSISIKKNKL

SEQ ID NO: 195058 - protein, 261 aa, Unknown
  Bacterial polypetide isolated from the Sargasso Sea
MKKGKKLYEGKAKIIYATNDKNLVIQYFKDDATAFNNQKKTTIEGKGVLNNRISEHILSNLSQIGIKNHLIKRLNMREQIIKLVEIIPIEFIVRNVATGSITKRLGIEDGTVLKEPLIEYCLKDDKLGDPLISEEHILAFDWASKTEIDKVKKMILRINDFMIGMFRGVGIKLIDFKLEFGRIKIDGKNEVILADEISPDTCRLWDSITEKKLDKDRFRKDLGDLIPAYTEVAKRLGILHEQSNVSAVNVTKLSSVKRKKK

SEQ ID NO: 195059 - protein, 132 aa, Unknown
  Bacterial polypetide isolated from the Sargasso Sea
PLIAEEHIIAFDWASRNEIDKVKKMILRINDFMIGMFRGVGIKLIDFKLEFGRLKSNGKQEVILADEISPDTCRLWDSITDKKLDKDRFRKDLGDLIPAYTEVAKRLGILHEQSNVSAVNVTKLSSVKRKNK

SEQ ID NO: 195060 - protein, 117 aa, Unknown
  Bacterial polypetide isolated from the Sargasso Sea
KTEIDKVKKMILRINDFMIGMFRGVGIKLIDFKLEFGRVKIDGKNEIILADEISPDTCRLWDSITEKKLDKDRFRKDLGDLIPAYTEVAKRLGILHEQSNVSVVNVTKLSSVKRKKK

SEQ ID NO: 195061 - protein, 298 aa, Unknown
  Bacterial polypetide isolated from the Sargasso Sea
MDIQNKNIILESNIKSCPLINRGKVRDLYDLGDQLLIVSSDRISAYDSVLASGIYAKGEVLTQLSKFWFSLTEDIVENHYITDDIAGFSQKLVDDLDVLQGRSMVVKKAKPLPIECIVRGYITGSGWAEYKKQGTVCGLKLNDGLVESEKLSEPIFTPSTKAEQGEHDENINFEQCVNIVGSEVANKVKDLSIAIYSKARDYAESKGILIADTKFEFGTLDNGKIILIDEVLTPDSSRFWPKALYEAGRGQESYDKQIVRDYLTSIGWDKKPPPPKLPDEIAEKTSNKYIEVLDLLTQ

SEQ ID NO: 195062 - protein, 182 aa, Unknown
  Bacterial polypetide isolated from the Sargasso Sea
IIKLVEIIPIEFIVRNVATGSITKRLGIEDGTVLKEPLIEYCLKDDNLGDPLISEEHILAFDWASKTEIDKVKKMILRINDFMIGMFRGVGIKLIDFKLEFGRIKIDGKNEVILADEISPDTCRLWDSITEKKLDKDRFRKDLGDLIPAYTEVAKRLGILHEQSNVAAVNVTKLSSVKRKKK

SEQ ID NO: 195063 - protein, 241 aa, Unknown
  Bacterial polypetide isolated from the Sargasso Sea
PEKNLVIQHFKDDATAFNNQKKATIDGKGILNNRISEYILSNLNEVGIKNHLIKRINMREQLVKSVEIIPIEFVVRNIATGSLTKRLGIEEGTLLDYPLIEYCLKNDDLGDPLVSREHILSFNWMNIMELELINEQCKRINDFLQGMFRGVGIKLVDFKLEFGRSGQDNEIILADEISPDTCRLWDSRTEKKLDKDIFRKDLGNLIEGYQEVAKRLDILHEQSNIRPIKFPKPKAVKIKKK

SEQ ID NO: 195064 - protein, 232 aa, Unknown
  Bacterial polypetide isolated from the Sargasso Sea
DDATAFNNKKRAKIDGKGILNNRISEHILKNLGQVGIKNHLVKRLNMREQLIKSVEIVPIEFIVRNIATGSLTNRLGIEDGTVLESPLIEYCYKNDELGDPLISKEHIFSFNWATRKEIEKIDKYLHRINDFMIGMFRGIGIKLVDFKVEFGRYKSGNKSEIILADEISPDTCRLWDINSEKKLDKDRFRKNLGNVMQAYQDVARRLGILHEESNIRAVKFPKPKAVKIKRK

SEQ ID NO: 195065 - protein, 133 aa, Unknown
  Bacterial polypetide isolated from the Sargasso Sea
MIRKRVRRQKNAIFIVNSHPGVIKMQKQAELYRGKAKTVYSTENPDLLVLEFRNDTSAGDGARIEQFDRKGMVNNKFNHFIMTKLQEAGIPTQMERLLSDTECLVKKLDMVPVECVVRNRAAGSLVKRLGVEE

SEQ ID NO: 195066 - protein, 88 aa, Unknown
  Bacterial polypetide isolated from the Sargasso Sea
MNSLTKLPINIGAIHFVGIGGIGMSGIAEVLLNLNYKVQGSDIKKSPITERLEKLGIRIFYEHDASNLKKASVVVVSSAVAESNSELM

SEQ ID NO: 195067 - protein, 268 aa, Unknown
  Bacterial polypetide isolated from the Sargasso Sea
IYERVEMLSNVVALKKNIVITGSHGKTTTTSLVAKILSMTKLDPTIINGGVINSIKNNAKLGKGDWAVLEADESDGSFLKLPINYSIVTNLDEEHIDFYKNYKNLEQSFLKFIHKTPPIGKCIICLDDPNIRKLKKSIKIKNFITYGFQRDVDCRIVNPKYALDKCKFDLILKESNKDKKSIKNITLNLLGEHNILNATAAICVCLNLGVSIQIIKRALMTFSGVQRRMTKIFSLRNNTFYDDYAHHPTEISSVLEGIKKVSKNKKIT

SEQ ID NO: 195068 - protein, 322 aa, Unknown
  Bacterial polypetide isolated from the Sargasso Sea
MPRPRWQAAAWSWSMREFVRHVHFVGIGGAGMSGIAAVLIDQGYEVSGSDQADSAETRHLSKKGAQVWLGHDAANVKGADVVVVSNAIDSHNPEVIAAADQGIPVVPRAQMLGELMRFRNGIAVAGTHGKTTATSLIATVFAEAQLDPTFLVGGLVKSEAGNARLGNGRWLIAEADESDASFLHLQPHIAVVTNIDTDHMATYGGDFGQLTDTFLKFLHNLPFYGLAVLCSDDSVIRDLRPHIRRPVVTYGVEPQADYQATDIRQHGTRMQFAVSLTDGSAIAVDLALPGLHNVRNALAAIAVADKVGISPDSIVKGLRNLR

SEQ ID NO: 195069 - protein, 214 aa, Unknown
  Bacterial polypetide isolated from the Sargasso Sea
DVLIFDIIQNKLKTSFKLKINNKIIHSSNYKFNINAIGNHNILNATASIIAAKLNGIKDKDINNALTNYVGVKRRFSFIGKKNKSFVYDDYAHHPTEIAATLSAAKSLKNKVVVVFQPHRYTRTKILIREFVKVLSKVDHLILLETYSAGEKTIKGATSKDIYLKILKKNKNTTYLKNIGDLNKLMKPHTMYQNTIIFMGAGSISSIAKKYLSN

SEQ ID NO: 195070 - protein, 190 aa, Unknown
  Bacterial polypetide isolated from the Sargasso Sea
MLRSPENLGIIHFIGIGGIGMSGIAEILIQSGYIVQGSDINESKNTARLKKLGIKIFIGHQKSNIKNAKIIVVSTAISQRNEELVKGKKMFLPIVHRAEMLGELMRLKQSIAIAGTHGKTTTTSLIAKMIEENGMDPTIINGGIISSLGSNAKLGKGKWMVVEADESDGSFAKLNPTAAIVTNIDLEHLD

SEQ ID NO: 195071 - protein, 297 aa, Unknown
  Bacterial polypetide isolated from the Sargasso Sea
MQINSKIHFIGISGIGMSGIAELMLDKGYSIQGSDILVNDNTKRLKTKGVKFFLGHNKKNIKNAHAVVYSSAIKKNNPEIKEAYIKKIPVLSRADMLAELMKNKKSIAIAGSHGKTTTTSLVGNIFNEAGLDPTIVNGGIINSFSNNNRYGKGEWMIVEADESDGTFLKLPHQISIITNLDIEHMDFYKSKKNLINAFEKFINLLPFYGTSIMCYDDKNLKLLIKKIKTRNILTYSIKNKKADVLIFDIMQNKLKTSFKLKINNKIIHSSNYKFTINAIGNHNILNAAASIVVAKLN

SEQ ID NO: 195072 - protein, 283 aa, Unknown
  Bacterial polypetide isolated from the Sargasso Sea
HFSGIGGIGMSGIAEILHNLGCKVQGSDLSNNANVQRLSDLGIKVFVGQKEENIGDISVVVRSTAVQDDNPEVVAARKKNIPVIARADMLKEIMYLKDCVTIAGTHGKTTTTSMVAQLFETAGLAPTVVNGGILNSCNTNAYLGSGDWLVAEADESDGSFNKLPAQVAVVTNIDPEHMEFYGSFANLRQAFKDFVEKVPFYGFAVLCIDHPEVKNLSAEINDRKIYTYGFAEDAQVRGKNLSIRENGFLFDVEVKIPGKEKLVSDVFLPNVWSAIMFLMPWLQ

SEQ ID NO: 195073 - protein, 203 aa, Unknown
  Bacterial polypetide isolated from the Sargasso Sea
MNTSQYKLNNIHFIGIGGSGMSGIAEVLNNLGYKVSGSDNVSSSNTDRLEKLGISINYDHNPNNLADVEMVVISSAISDDNPELVFAKEQLIPVLARAEMLSSLMNNKRGVAIAGTHGKTTTTSLVASIMTNANLDPTFINGGIINSFNSNAQLGEGDYLIAEADESDKSFLLLQPSVSIVTNIEPDHLVNYDGSFDNLKKAF

SEQ ID NO: 195074 - protein, 311 aa, Unknown
  Bacterial polypetide isolated from the Sargasso Sea
HLIGIGGIGMSGIAELLKNKEFIVSGSDIADSPNVKRLKDLGVNISIGHNKNNISNAELVIYSDAIPKNNVELIEALSKKILVYSRARMISEIAKLNNSTIAISGTHGKTTTTSMIGTVLKAVNLDPTIIVGGVVKSLESNSVLGSGDTFVVEADEYNKSLLHLSPTIAVINNIDFEHIECYKDLDDLKHTFIQFANSIPFYGNVCVCKDSSNVASILSKIDKPIMTYGIESENIDIKAENLQQANGCISFDVVVKDQKFSVNLSIPGKYNVYNALAAISVCETMGIDIESACKALSAFSGVKRRFDIKTN

SEQ ID NO: 195075 - protein, 98 aa, Unknown
  Bacterial polypetide isolated from the Sargasso Sea
MSNLPLSIGIIHFIGIGGIGMSGIAEVLNKLGYEVSGSDINENSNTIRLKKLGVKVNIGHSTSNVNKAKIVVISTAISSNNVEFLEARSNRIPIVHRA

SEQ ID NO: 195076 - protein, 249 aa, Unknown
  Bacterial polypetide isolated from the Sargasso Sea
NIIITGSHGKTTTTSLVAKILSDQKLDPTIINGGVINSLNSNAKLGKGEWSILEADESDGSFLKLPINYSVVTNIDYEHIDFYKNYKNLENSFVKFIEKTPPTGKSIICKDNSNIRKILKKIKNKNIITYGENKKSDYLISNIRYKIDYSAFDLKYKDIKKKKRKIKNIQLKLLGKHNVLNAAAAIAVCLNLGVSQNTIKKSLIKFSGVQRRMTKIFSKNNNYFFDDYAHHPTEIQSILAGVKNVHKDK

SEQ ID NO: 195077 - protein, 264 aa, Unknown
  Bacterial polypetide isolated from the Sargasso Sea
SRMVAWLNELPPNGFAVLCSDDPGVCAILPKLRCRYFTYGFNESADYRLIACQQIGLRTSLCWESPDGIRHEDQIHLPGRHNALNGLAAWIATTHFVEGGNPDLTPSWASYPGVNRRMMLHGELALDEGSALLIEDYGHHPTEMKATFNAIQAAWPEKRLVVLFQPHRYTRTRDLLSDFVEVLRLVPNLYLLPIYAAGEQAIQGVSSEHLAKIIEEQSNQLPIVYTDLNQARNALQSMLRENDILLLQGAGDVGSLVQRLGVLE

SEQ ID NO: 195078 - protein, 282 aa, Unknown
  Bacterial polypetide isolated from the Sargasso Sea
ASFLHLQPMVAIVTNIEADHMDTYHGDFENLKQTFINFLHNLPFYGRAVMCVDDPVIRELLPRVGRQITTYGFSEDADVRVEDYRQVGAQGHFRLVRQDKEVLQVTLNAPGRHNALNAAAAVAVATEEGIDDSAILRALESFQGTGRRFDFLGEYPLAEVNGKSGSAMLIDDYGHHPTEVDATIKAARAGWPDKNLVMLFQPHRFTRTRDLYDDFANVLTQVDALLMLDVYSAGEAPIPGADSRSLCRTIRGRGKVDPILLSDPAQAAQMLASVLTGNDLIL

SEQ ID NO: 195079 - protein, 221 aa, Unknown
  Bacterial polypetide isolated from the Sargasso Sea
MFKKVKSIHFIGIGGIGMSGIAELLNNLGFKITGSDIKFSENVKRLGLLGIEISIGHSPNNLKETDVVVYSSAVPLDNSEILSAISKSIPVIRRAEMLGELINLKQTSIAVGGTHGKTTTSSMIGMILEKSGYDPTLVVGGLVSNLNTNVKLGSGELIVVEADEFDRSFLALNPTIAIVTNLEMEHTDCYKDLNDIENAFLQFCKSVPFYGSVILCADSYS

SEQ ID NO: 195080 - protein, 241 aa, Unknown
  Bacterial polypetide isolated from the Sargasso Sea
MIPSASKALFLNVGKIHFVGIGGIGMSGIAEILHNLGYQVKGSDLSQSANVVRLQNMGIEINIGQSESNIEGCGVVVRSSAVKNDNPEIIAARNNRIPVIQRAEMLAELMRLKNAVAIAGTHGKTTTTSIVSALFDAESLDPTVVNGGIINKYNTNAKLGKGNWLIAEADESDGTFLKLPATIGVVTNIDPEHMEHYGTFDNLKKSFKSFINNLPFYGFAVLCNDHPEVKKLSMEIVDRKV

SEQ ID NO: 195081 - protein, 184 aa, Unknown
  Bacterial polypetide isolated from the Sargasso Sea
MNHSKYKLNNIHFVGIGGSGMSGIAEVLNNLGYKVSGSDSTSSSNTQRLEGKGIKIYYEHKSSNLEGVEMLVKSTAIPEDNAEIEEARDRFIPVLARAEMLSSLMNNKRGIAVAGTHGKTTTTSLVASIMSDAGLDPTFINGGIINSFNSNAQLGQGEYLIAEADESDQSFFVAFTICFHNYQY

SEQ ID NO: 195082 - protein, 207 aa, Unknown
  Bacterial polypetide isolated from the Sargasso Sea
MKHIVKNIHFVGIGGAGMSGIAEVLLNLGYRVTGSDLGSSATTQRLATLGATIMQGHAPEHVIGANAVVVSTAVRGDNPEVLAARAKRIPIVPRAVMLAELMRLKQGIAIAGTHGKTTTTSLVASVLAEGGLDPTFVIGGRLNSAGANARLGTGDFIVAEADESDASFLNLFPVIEVITNIDADHMDTYGHDFARLKQAFIEFTQRL

SEQ ID NO: 195083 - protein, 299 aa, Unknown
  Bacterial polypetide isolated from the Sargasso Sea
DIGIIHFIGIGGIGMSGIAEILHNLGYKVQGSDISENQNVKRLEEMGVKVFVGQASKNLSAVSIAVVSTAIKAGNVELSFAREKQIPIVHRSEMLAELMRLKWSIACAGTHGKTTTTSLVASVLDSAGLDPTIINGGILNSYGTNARLGDGDWMVVEADESDGSFNNLPATIAVVTNIDPEHLDFHGSFENLKNAFRSFVKNIPFYGFAVVCIDHPVVQELVQQVPDRRIITYGFDKTSDVQASKIIPTETGSCFDVIVRDKGKTNGGSIERIELPMYGEHNVLNSLAAIAISLEMGYA

SEQ ID NO: 195084 - protein, 311 aa, Unknown
  Bacterial polypetide isolated from the Sargasso Sea
EGPMTKRLSELGADVKIGHRAENVDGMDVIVVSSAINEENPEIITARENRIPIIRRAEMLAELMRFRHGIAVAGTHGKTTTTSLISTIFAEAHYDPTFVIGGLLNSAGTNARLGKSRYLIAEADESDASFLHLQPMVSVVTNIEADHMDTYGGDFSKVKDTFVDFLSNLPFYGQAIVCGDDTNIQEIRPRIGRSIVTYGFEEHNDYRAKNITLSFGKANFTVHRPDAEPLEIMLNLTGNHNVLNALAAIAVACDECIDDESIVSALASFGGIGRRFEQLGTFNTSKGEVCLVDDYGHHPTEVKATIAAARA

SEQ ID NO: 195085 - protein, 170 aa, Unknown
  Bacterial polypetide isolated from the Sargasso Sea
MQNKNKKIKVHFVGIGGIGMSGIAELMKKIGYSVSGSDINESENIKRLKEIGIIVNIGHDKKNISKVHAVVYSSAIKQNNPEIKEAKKNKIPIVSRADMLAELMKNKKCIAVAGSHGKTTTTSLVGNILETGKLDPTIVNGGIINSISKNNKFGKGDWMVVEADESDGSF

SEQ ID NO: 195086 - protein, 268 aa, Unknown
  Bacterial polypetide isolated from the Sargasso Sea
FVGIGGIGMSGIAELMFDLGYTVQGSDISTNANIKRLKKRGIKIFNSHHKNNIHNMSATVFSSAIKKNNPELLESKRLYIPLISRADMLAELMKLKKSIAIAGSHGKTTTTSLVGSIFDNANYDPTIVNGGIINSYSKNNRYGRSNWMIVEADESDGSFLKLPHEINIITNVDIEHLDYYKSKQNLLLAFEKFITNLPFYGCSIICTENVNSRKIYRKINTRRMISYSKSQNSDVKIVKINKDKKGNNFSLYFKKGVIKNIKGRYDFS

SEQ ID NO: 195087 - protein, 283 aa, Unknown
  Bacterial polypetide isolated from the Sargasso Sea
MNKIKINLNQKIHFIGIGGIGMSGLAQIMKNMGFKIQGSDMINSKNVERCRKIGIKIFRSHKKENIDHTSIVIKSSAIKNSNPEIKAAIEKNITILKRAEMLAHVVALKTNIVITGSHGKTTTTSLISNILSQAKFDPTIINGGIINSFNGNARLGKGNWAVLEADESDGSFLNFPINYSVVTNIDREHMDFYKNFKNLKNAFLKFLNKTPLIGKSFICIDDNEIKKLSKKIKNKNFYTYGFSKKADFQILNPVYNKDYSIFDLKISIPGENKRTIKKIRFKP

SEQ ID NO: 195088 - protein, 321 aa, Unknown
  Bacterial polypetide isolated from the Sargasso Sea
AQIMNNIGFVIQGSDINKNKNTERLIKSGIKVYFNHHHKNLKKATMVVVSSAIKKNNNELKAAKKRKLPIFRRGEMLANIVALKRNIVVSGSHGKTTTTSLIANILLEAGLDPTVINGGIINSLKNTAQLGKGEWAVIESDESDGSFLKLPITYSVITNIDKEHLDFYGNFENLKKSFLSFIEKTPSFGKSVLCIDDDNVRILVKKCKTSNYLTYGFSKDSNYQIVNIKKNFNYSTFDLSIKLPGHKIYKLKDIKINLLGDHNIKNATAAIAIALNLGIKINKIKKTFKKFLGIQRRFTKVFSIDKKDFYDDYAHHPTEIK

SEQ ID NO: 195089 - protein, 222 aa, Unknown
  Bacterial polypetide isolated from the Sargasso Sea
MLYSIKKVHFIGIGGIGMSGIAELLKNKGFLVTGSDISDSPNVQRLIDLGIHVTIGHNAENISDSELVIYSDAIPKNNVELKNALSKNLLVYSRARMISEIAKLNNSTVAISGTHGKTTTTSMVGSILKALELDPTIIVGGVVKSLESNSALGSGDTFVVEADEYNKSLLHLSPTIAVINNIDFEHIECYEDLEDLKETFIQFANSVPFYGSVCACLDSSNV

SEQ ID NO: 195090 - protein, 179 aa, Unknown
  Bacterial polypetide isolated from the Sargasso Sea
MKIELAKNEIIHFVGIGGIGMSGLSLIMKAKGFKVQGSDISHNKNIERLKKEKIKVFIDHKKQNLKNVTIVVVSSAIKKNNPELIEAKRKKLLIIKRGKMLAHIVSLMKNIVIVGSHGKTTTTSLVTSIFQTTNLDPTIINGGVINSLKNSAKLGKSDWSILEADESDGSFVQIPTTYS

SEQ ID NO: 195091 - protein, 148 aa, Unknown
  Bacterial polypetide isolated from the Sargasso Sea
RFEIVGEFEVNKKKFTWVDDYGHHPTEIKEVLETINNVWKNKRIIMIFQPHRYSRTAEHFNQFVDTLKNVQNLILMEIYAANEHKIENICSKALADEINKYSVNVVLINDHAKLAKFIEKTIQNDDVLLTMGAGDISKFNNYFRESLK

SEQ ID NO: 195092 - protein, 279 aa, Unknown
  Bacterial polypetide isolated from the Sargasso Sea
TYIIGGCLKSSNSHAKLGLGEYLVAEADESDASFTHLKPMISILTNIDFDHMSTYEHDKNKLYSGFLSFLHNLPFYGLAIVCLDDLGVKEVMPKISRSMITYGTTDKADIYAKDIHFSESKTSFEVYRKNKNKKISIELNLPGIHNIQNALAAIAVATELDIDDKSIIEAFKNFSGINRRFQVTKNVTVKDGKITLIDDYGHHPTEILATINAIKSGWGSKRITLLFQPHRYTRTRELFSEFVEVLSKVDQLILTEVYAAGEEKIDNISGQSIIEDIKN

SEQ ID NO: 195093 - protein, 310 aa, Unknown
  Bacterial polypetide isolated from the Sargasso Sea
NLSNENKIIGITGTHGKTSTTALLSHIFHFNNVNVSYIYGGVTNFSGIGGHYGDADQPIILETDEAFNTFEKILISDLLVLNIDSDHLDFFENFNNYKNAFLKVMDNVKDNLVINYDDSVLQDLEGFNNLVKYGKNKDSDFLILTPDKFLYENKEYIINSQILGDHFRSNMVGAIVLAMKNGISIKESLDAIFSFPGVKRRTELIGIAKGISIYDDYGHHPTEMNATISSLKKITKNKLYVVFQPHRYSRTKEYFNLFKDSLVQSDFAIVTDIYPAGEDPIPGISSKNFEGENIKYLQSTRFVPEYLSQE

SEQ ID NO: 195094 - protein, 262 aa, Unknown
  Bacterial polypetide isolated from the Sargasso Sea
EWAVLEADESDGSFLNFPINYSVVTNLDKEHLDYYKNFKNLKKSFLKFLSKTPTIGKSFICLDDNEIKKLIPKMKNKNFFTYGFSKNSNFQILNPTYKKEYSLFDLKISVPGSKKETIKKIKLNLIGKYNILNSVAAIALSLHIGVKISIIKNSLKKFTGIQRRLTKVFKVDEKEFYDDYAHHPTEIKSVLNSLKVTSSGRKIISVFQPHRYSRLKLLKREFASSFVDSDTVILCPVYPAGEKIDKRYDKLNFAELISKKSN

SEQ ID NO: 195095 - protein, 238 aa, Unknown
  Bacterial polypetide isolated from the Sargasso Sea
MNKLDKIKIHFVGIGGIGMSGIAELMFDLGYTVQGSDISTNENIRRLKKRGIKIYNFHQKTNIHNMSAIVFSTAIKKNNPELLECKRLCIPLINRADMLAELMKLKKSIAIAGSHGKTTTTSLVGSIFDNAQYDPTIVNGGIINSYSKNNRYGKSNWMIVEADESDGSFLKLPHEINIITNIDIEHLDYYKSKKNLLLAFEKFVTNLPFYGCSIICTEDLNSRKIYKNIKTRKMISFS

SEQ ID NO: 195096 - protein, 262 aa, Unknown
  Bacterial polypetide isolated from the Sargasso Sea
MPNCGESRYLVAEADESDASFLHLQPMVAIVTNIDADHMATYEGDFNKLKRTFVEFLHNLPFYGLAVLCIDDPVVREILPQINRQVITYGQSEDADIRAVDIHQKGMQTYFTVLREGREPLKVSVNMPGVHNVLNSLATIAVATDEGVSDRAIIEGLTGFQGVGRRFQVQGNFQWGNGEVMLVDDYGHHPREVAAVIKAVRAGWPERRLVMLYQPHRYSRTRDLYEDFVQVLGDANALLLMEVYPAGEEPVPGADSKHLCRS

SEQ ID NO: 195097 - protein, 317 aa, Unknown
  Bacterial polypetide isolated from the Sargasso Sea
RYRFGIAVAGTHGKTTTTSLIAAILGEAGEDPTFVIGGLLNQAGANAALGEGQYLVVEADESDASFLHLQPMMALVTNIEADHMEHYEGDLSRYIQAFNGFLHNLPFYGPAVMCLDDKGVRDLIPELSRQVVTYGRHADADYRLDNYRSAGLCSHFELIRPHDAAPLALTVNMPGLHNAQNAAGAAALCAELGISEDAIVRGLAEFGGVGRRFSDLGDVRWSAGSARLIDDYGHHPTEVAVTLQAARDAFHDQRVVMVYQPHRFTRTRDHFDEFVSVLGEAQFLILLDVYPAGEPAIEGADAQSLARAIRARGVLEP
